United States Patent Application Publication US 2007/0009899 A1 - sequence listing, part 3

SEQ ID NO: 7259 - DNA, 595 bp, Canis familiaris
gaggcaatattctgggggccagaggatgaagctgcccacttctaggggtggccggcagaccccccgcaaccgtggcatgttcatgaagccaggaactctgtacgtgtacatcatctatggcatgtacttctgcttgaatgtctccagccaaggggatggggcgtgcgtcctcctgcgagcgctggagcccctggggggcctggagaccatgcggcagctccgcagcaccctccgcaagggcaccacgggccgagccctcaaggaccgcgagctgtgcagtggcccctccaagctgtgccaggccctggccatcgacaagagctttgaccagcgggacctggccaaggaccgagcggtgtggctggagcgcagcccgccggggcccagcgagccagccgtggtggcagcagccagagtgggcatcggccacgcaggagagtgggcccagaagcccctgcgcttttacctacggggcagcccctgggtcagcgtggtagacagagccgcggagcagaacgcacaggcctgagcgacagcctccttcaaccaggctttttaattttttaacaaccaaataaacactttatgtttagaa

SEQ ID NO: 7260 - DNA, 625 bp, Canis familiaris
gacatgactgacgagaggtgatttaaacgtgatcatttcgccttcagaattgagtctaagatacagagctagttttaaaataatcctcagataaaaatctgcattgtcatcaaattaactgactttttctctcttttggcctcactttttgttttcaagtagttctgctatattcactaattcgactagacttggccatacacgggggcgatgtagacctcaaccatttgatggtttcagctccagaaagatgatgggggtggcctcaggagcggcccgatcgcagaacttgtgtatcccttgccgctggtgtgcaagcattcagggaaaccacccagtgtatcggttctgtccaactctgccgaatggagctggactcatggatatctagccgaaaaggggagccagagaagtacatgcataccaaagctgctcgtcctccaacttaaatgatattaatcaacctgcagataattcatactagaacttgcctttgtttagatgtcccttagattcaggaatgtatcatttgcagtgcttgtattggtttagaacacacgattttaagatcatccaccactgtactaaaacatttcaataaaatcatgctacttctttcaaaaaa

SEQ ID NO: 7261 - DNA, 652 bp, Canis familiaris
  misc_feature (1)..(1): n comprises a, c, g, or t, or includes no nucleotide
ngccatgcaaactcccgtcagcagattcggtatctgaatccaagatgggctgattatccggaagcctgttgactgtccatatcccgagctcggttccggaatacactctggcccgccggaagggcaggcatatgggcattggtaagagaaaaggtactgcccatgctcgaatgcctgagaaggtatacgtggatgaggaggatgagaattttacgcaggctgctcagaagataccgtgaatctaagaagattgaccgccacatgtatcatagcctgtacctgaaagtgaagggtaatgtgttcaaggacacagcggattttcatgggacacatccacaagctgaaggcagacaaggctcgcaagaagcttcctggctgaccaggctgaggcccgcagatctaagaccacaggaggcccgcaagcgccgtgaagaacggcttcaggcccagaaggaggaaatcatcaagactctgtccaaggaggaagagacccagaaattaaactccctctctcttgtctgtacatagtggcctcagcatgaatcagatcagttattccaataaaaccaacctttatctgcccaaaaaaaaaaaaaaaaaaaaaaaaaaaaaaaaaaaaaaaaaaaaaaaaaaaaaaaaaaaaaaaaaaaaa

SEQ ID NO: 7262 - DNA, 543 bp, Canis familiaris
ggctggccggacccctgacgccggccctgagctcgcctcggcccgcttgcaggttgaagaagccgcatcggaggaggtacggcctcctggccaacaccgacgaccccacggacatggcgtcgcctggacagcgacgaggagatcgtcttcgagacccggaatctgagatgatgctccggtccaggaggcggcctttccagaagccccagggagaggacaagaggcggaacgggctccgggggcgcggcaccccgctgatcctcctgctggcttcgctgcagactcccagagcaccgcttcggccctacccttcacccggatgccgccgtgcaggatgctgcgtgcaaatcagaggcgccggaagcctcacgcgggcctcagagactgggggactgtggcctgggtcactccacttctgcgggggacggggcgggctgagggacctgtctgggacctgtctgggagctgtcccgctgtgctggcgaccataaaggcagcagtggctcggtaaaaaaaaaaaaaaaaaaaaaaaaaaaaaaaaaa

SEQ ID NO: 7263 - DNA, 497 bp, Canis familiaris
  misc_feature (1)..(1): n comprises a, c, g, or t, or includes no nucleotide
nccctcgcataacgtgggttttggataggatcccagatcatcctatccgcctggttcctgcagcagtcggccccacagtgggctatcatcagagttcggttctacgagggtcctgagctggtggccgacagctacgtggtctctggacacaaccatgcggggtggccgcctgggggtcttttgcttctccccagagtacatcatctgggcccatctgcgctaccggtgcaatgacaccataccacgaggatctacgagactcagaggcttctgcaggcctagggatgggggtggggaccccttgctggaagatggcaccatcgtggctacccgtttgttgctcactgcaacaaacagggagcttggcaacccggctccacagaggtagctgccctagaggggctcagaaaggaccaaataaagtgtgtgtggtggaaaaaaaaaaaaaaaaaaaaaaaaaaaaaaaaaaaaaaaaaaaaaaaaaaaaaaaaaaaaaa

SEQ ID NO: 7264 - DNA, 638 bp, Canis familiaris
  misc_feature (282)..(282): n comprises a, c, g, or t, or includes no nucleotide
agcatatgctaggtatccgatagtcctgtagaatttagtgaagaaaccttatacagtttttaatttttatataaactactcagacccacagctacaaggttggaattttggttgttggtgttttttttttttttttaaagtaccccgcctgtataattgcatctgaattccctcctcctccccgcccgcccccctccccccgtgtttgtattttgggttggtttacacttgcacatattcaattttcaggttttcccttttacagtcttctcccctcacctncaggaccctcccccctttttaaaaaataaatcgctgacaagtgtgaatcccgtgaagactttattttgtgttgtgtgtatcctgtacagcaaggttggtccttcgtaacaacggatgaaatgattcccttttttaaagcgccctctctccctccacccccagcgccctgtccttggcatgttttgtatcggcgatcattctgaactgtacataatttatgttgcaagaggccaagggcaagattttggattttgcttcttccaagtttgtttttaaacgaccaaataaaaaaagaaccattttaaataaaaaaaaaaaaaaaaaaaaaaaaaaaaaaaaaaaaaaaaaaaaaaaaa

SEQ ID NO: 7265 - DNA, 556 bp, Canis familiaris
catatacactgtacatcctgatccagctttgaccttaacatgtcagtgtactgcagcatgctcatcggttaactactgattgtccaagccattagctagaacatcccatgtgctccatgattcgatcctcttcagttcatttcttcccacatctttgaacctctgtgccaacagcactgaactttgagtctatatgactttgttcaagttgagaccccttgtctggaatatgttcttgttcctttgctaggctagctcctactcatcttctaggatccccctcagggacacttcgtggggtgttttctgatttccctgatttccagctctggtttgtactaaatctctgtctctgagttcccataataccctgtgtaagtcttttatcattgcacttactctgtattatatgcttacctatttgtctacactgttagattatgaattccttaagaacagagaatgtgttttaagtatttgtgttcccagcacctagcttagtgactagcacaaactaggcattgaataaatgaaagtatgaatgaaaaaaaaaaaa

SEQ ID NO: 7266 - DNA, 588 bp, Canis familiaris
ctgtggatgttggcagcacagaccaagaatttggcattgaaatcgggccagtttgttttgtgtagagcaggccaagatacattgaccaagagcaccacccccgccaccagtgaccaccaccattcacaagaattctgactatttgaagctgatcctgagactcttgaagtaaaggctaatcccacatcagcactgtatatatggtcctaagtgcctggcctccttatccttcagaatatttattttacttacagtcctcgagtcttaattgatttaaactatttttcaatacaccagtttaggtttaagacaaccgatgataatgaccacctttttaaaaagtaaactgattgaataaatgaatctccgttttcttcaatttatttcaatgtaatgacaaagttgcttagtatttatgagaaaattcttcttcctggcaggtagcttaaagagtggggtacgtaaaaccacggtacgtgtttatttcacttggctgtagtttgagaactagaaagtagtgccttttgtgacttctcatttccagattatcaattaaaagtgaaatccaaaaaaaaaaaaaaaaaaaaa

SEQ ID NO: 7267 - DNA, 629 bp, Canis familiaris
  misc_feature (20)..(20): n comprises a, c, g, or t, or includes no nucleotide
agaaagagagagagaggcanagacacaggcagagggtgaagcaagctccatgcagggagcccgacgtggggactcgaccgggtctccagaatcatacccctgggccacaaggcagacgctaaacctctgagccacccaggcgtccaagattttcttttgacagagaggagcacaagccatgggagcatcaggcagagggagaagcatgctccccgctgagcagggcgcctgatgtgggcttgatcccaggattccgggatcatgacctgagctgaaggtaacctgaggctccaggacagaacctggctgcagaggtccacagggcagcacgttcctctcgcaacactatgtctggagccctccctctgctccatggtctctgcagctgacagcagtaggactcagggtaaggggaagaagcagagggagagagggacaaagtccaatgcaggatgggagctcacgactctgagatcacaacctgagcggaaaccaagagtcagaggctcaactgaggctcaaccatgccacccagtcatctctgaatttttttgacagtgccatcaattttttggagtttattacagtaaaaatgcttttgtttacccataaaaaaaaaaaaaaaaaaa

SEQ ID NO: 7268 - DNA, 495 bp, Canis familiaris
  misc_feature (27)..(27): n comprises a, c, g, or t, or includes no nucleotide
  misc_feature (48)..(48): n comprises a, c, g, or t, or includes no nucleotide
  misc_feature (65)..(66): n comprises a, c, g, or t, or includes no nucleotide
  misc_feature (77)..(78): n comprises a, c, g, or t, or includes no nucleotide
  misc_feature (87)..(88): n comprises a, c, g, or t, or includes no nucleotide
  misc_feature (110)..(110): n comprises a, c, g, or t, or includes no nucleotide
acacggtgtggcgcccggcgttctcgngaatgcgcttggtggccccgncgaaatagggtgctcgnngcgcggagacnncaaggtgcnntgtggtgcttcttgcctgttcntgtcaaagggcgcccgtgtggaaaggccgcttctttcggcccacaaggaggcggaccaagctggagctaggccaacgatgacgcggcgcaccttctacatcatcgagcgggagcccctcatcaacgcctacatctctgtgcccaaggagaacagcacgctcaactgtgccagcttcacggcgggcatcgtggaggcggtgctcacgcacagcggctttcccgccaaggtcacggcacactggcacaagggcaccacgctcatgatcaagtttgaggaggccgtcatagcccgggaccgagccctggagggccgctgaccctgtgggagataaagaatgcagagagcccccttcaaaaaaaaaaaaaaaaaaaaaaaaaaaaaaaa

SEQ ID NO: 7269 - DNA, 653 bp, Canis familiaris
  misc_feature (53)..(53): n comprises a, c, g, or t, or includes no nucleotide
agcccgggtccgtcctaactccactgccaactgtggaggagcccgccaagccncggtgagcattttccggtccccaaggaagccagccacagccacgggctttgtgggctccgcaggcctgggccgttctcggggtgcgcctgacggtctcagcagccccaagggtcctcagtgatctgcgcacaggacgggaggatctttccgacgttcccacgcgggcgaggggctccggcctccaggaaggccccagacacctggactccaaggtcttggaaggaaatcggaacggatggctggttggtgaaaacttaggatcacccagaagacttagtctgcgttttgactttgtgactcattagtgcagaaaccccaccggcggccgttacgctctgaccctgttccggcttattgtcatcaccacgcgggcacctgtgcggcacctgctgctcggtgggcaggtgtgactgttctggtcagtcctgtgtaacgggcaagtgtgggctgaaggggggcttcgtgtccttctaatcttgctggtttcaagatgggaagatggcatatttgctccgatatgtttgagaagacaaaaataaaattactttgggcagaaaaaaaaaaaaaaaaaaaaaaaaaaaaaaaaaaaaaaaaaaaaa

SEQ ID NO: 7270 - DNA, 632 bp, Canis familiaris
tgcggagcccgatgggggattcggcaccagggattccagccgaacgtccatccgcagctcccagtggtccttcagcaccatcagctatagcacccagcgctcctaccatgcctgctgcagctggactcgacaccctttgatccagaagaaccgccgggtggtgctggcctccttccctgctcctgctgctggggctgagtgtctccagcgccatcttctttgtgcccggcttcctgttgttggtcccgggagtctaccacgtgatcttcatctactgcgcggtcaagggccaccgcggcttccagttcttctacctgccctacttcgagaagtgagccgcggggcgggatccagccttgtctccgagcggccccagggggcgctcttcgggtccgcgccgctccggttccctcttcaccagggaagaactctgggacccgccagcccccagccccctcggaagtttgttcaggaagtttgcccaatacccaggcctgggaaagtcgcccctggcctgttctgtgccttaacttattcttgggccgtggagctgctgggttggtggtgttttgtgctaataaaagaatgtacttaattcccaaaaaaaaaaaaaaaaaaaaaaaaaaaaaaaa

SEQ ID NO: 7271 - DNA, 345 bp, Canis familiaris
agaacatgaagacaatatatttataccccaaccaacactctttacccaaaaagaagcacctgagtggtctaagaaaccaaagatgaagacctagtgtttggactgatttgctacaccattatttactcccagagttctttctttgatgaaccaaaagtttatcataatcatgtacttggcatttttttaaataactaaagtttattttaacaatgttaaattaacagatttcagcataagaatcaaaatgtatgaaatgcaaacaatagtatgctttgtattaggttttattttttgttacaaaataaatatatactcatgatttaaaaaaaaaaaaaaaaaaaa

SEQ ID NO: 7272 - DNA, 573 bp, Canis familiaris
  misc_feature (221)..(221): n comprises a, c, g, or t, or includes no nucleotide
gtttccttataaccctctgactatgcggatgctcagcagtacgccaccaacaccgattgcatgtgccccctcttctgtgaaccaagcagctcctcaaccaacagaacaggatctgggagcgagagcctgccccactgctctccgcacagtacgagactctgtcggatagtgacgactgaactgcacagagaaggggtcttggtggggccagggtgtgggtnggggagctcttgtttttgttggttttatttttaatggcaggtcacaaacctgtcctcctctgacttgtgcccagagacttttcaggagagcctggaccatggatgatgaagaaatgatggaaatttatttgcagagtcaaatggggggagggacagggagactgcctttgacacaggcagttcagtgaattataataatagtggagggttgaaatgtagagtttttaaaaagtggacaattcctgttcttacatctgtttgtaaagaaaaccataatgtctttaaatcacttttctgtaaatagatgaccttttttgcaaaaaaaaaaaaaaaaaaaaaaaaaaaaaaaaaa

SEQ ID NO: 7273 - DNA, 569 bp, Canis familiaris
gcctacattcaccaccccgtggctgtgccgtcagacagcgccatcctggctgtgcagacagaggtgggcttggaggacctggctgcagaggatgatgagggcttcactgcagacacggtagtggctctggagcagtatgccagcaaggtcctgcatgacagccaggctccccataacggcaaaggacagcaagttggggacagagcattccgctgtggctacaaagggtgtgggcgtctctacacgactgctcatcacttaaaggtgcatgaaagagctcatacaggtgaccgtccatacaggtgtgatttccccagctgcggaaaggcctttgccacaggatatgggctgaagagccatgtgcgcacccacactggtgaaaagccatataagtgcccagaggaactgtgcagcaaggccttcaagacctcaggagacctacagaagcacgtacggacccacaccggtgaacgcccattccggtgccccttcgagggctgtggccgctccttcaccacctctaacatccgcaaggtacatgtgcgcacccacacaggcgagcggcccta

SEQ ID NO: 7274 - DNA, 602 bp, Canis familiaris
agctcaccacaagtgtagccaccatctgtcaccatataacactgttacaatatcattttctatattccttatgctgtgccttttatccctgtgactcattcattctataactggaagtctgtatcttctgttccctgtcacccattttgctcatttcttccaccccactctcctcgggtaaccatcagtttgttttcagtatttatagatctgatgctgcttatgtttgttcatttgtttttagattgcgcatatgagtgaaatcatatggtatttgtctttctctgctgacttatttcactgagcataatactatgaaccatgatatcttttgatatcttttttcaagctagtcattgcccatggtgttaactaacaactgaatttacagttggcttttggaccataagcttgaaatgcaactgcattcctctgcattgtggaatgagggagaggctaaaggagcctcagatttatttgaagcatttttatttgggcatcaggtaaggcgatgcttatgatgctggttgcttaatagaaaagctatcttaaaacaacctaaaaaataaaaataaaaaaaaaccctaaaaaaaaaaaaaaaa

SEQ ID NO: 7275 - DNA, 682 bp, Canis familiaris
tctaatgctactttaatgttggtgtcttaaacatctggttccttcctcagaatcattggtgtctctgcttggctcattttccataagggaacagagaagggaatcctgtgcctgttaaataactttgattaatgtagagttttaattatcagttcatctgcccagactcataatgtttgggccagctatttacagaaagttatggatttgaatattttgaaaaccaattgcattatagagcttgagttcaagttgtctcttacaacctcattaatatactaacagtccctaacttaatgatggttggaattagaatttttcaacttgatgatggtgtgaaagtagtacaggcatactttgaagatattacaggtttggtgctagactactgcagtaaagtgagtcaaatatttttggtttcataaaagggtatataaaagtttacactgtagactattgactgtgcaatggctctatgactgaaaaaacaatgtgttttactgctaaaaaatgctgtcatctgagcttttagcaagttataatcattttgctggtggaaggtcttgcctggatattggtggctgctgactgataaagattggtggttgctgaaggctgggttggccatggcaatttcttaaaataaaaaaccatgaagtctgcccataaaaaaaaaaaaaaa

SEQ ID NO: 7276 - DNA, 637 bp, Canis familiaris
atcacagacaactcacttttgaagaaattgcccaaaagtgctaaaatcactgtgaacgaggtggagttgctggtgatgaaggcgctctcagtggggctggtgaaaggcagcattgacgaggtggataagcgagttcacatgacctgggtgcagccccgtgtgctggatctgcagcagatcaaggggatgaaggaccgcctggagttctggtgcaccgacgtgaggagcatggagatgctggtggagcaccaggcccacgacatcctcacctagtgcccctgcctcaccgtctgtggcagctgggaagacctgtgttcctgaggaagtagggggtgggattgtgtttgtggagtggggactgttctccctgctgtgaaatcaggacgtcactcatggggggcccgcctgcagagagaagcctcctttgtgggggtgtcccgtagttctcagtggggaggggtcacgggtctccagtgaggaggaggcgggcaagagtgtgtgtgcgccccgaggaacgaggagtagccctcaagtgtgtggggatgccactcaggctcatctccaccatctacctgtgtcaacatctctgctgttgttcaagaatgttcctgtaataaacgcctttgttttgtctaaa

SEQ ID NO: 7277 - DNA, 661 bp, Canis familiaris
taataaactgaactgtgggtttctctgttagaaggtggcattttgggctttccctctctttgtaaagcgatttctgcctagtttattgtctggttaactttagtttaatgaccttttaaaagttggcattgtaaataaaacacagttgaaaaaagttttctgaaatagaattaacaacgtattatctttattcatgagttggaaactggaaaaaggctacttgaggtaaatgttttgagtggggttattaggatgtcttccaacttcctggagtcaaggagtaccactggtattgatgagcctgtatgtagctgggctcccttaattggatctaaagacttgtttttgcatttttaatccttagctttgaatacattggctagagactcagttactactcagtttgtggttttgggggaaatttaactagccagtctgttagcttttcaattaaaaaaggcaaataacccatgtagtatgtcatctttttatcatcagttatcccatgtgggggaaacttcacactacttgcatgtaaaaaaaattaatttaacctttaacattaaagtgtctggcaaaacctaggagtatccatcatgaatgcaagattcaataaaaagtaagttacaccagtaaaaaaaaaaaaaaaaaaaaaaaaaaa

SEQ ID NO: 7278 - DNA, 114 bp, Canis familiaris
ggagaaaacgctaagttttagtggatcagatttttaaataaacatctgactctaaaaaaaaaaaaaaaaaaaaaaaaaaaaaaaaaaaaaaaaaaaaaaaaaaaaaaaaaaaaa

SEQ ID NO: 7279 - DNA, 685 bp, Canis familiaris
tgacagccaagtggaagaccattgtacacagaatgtggttaaatttcttgtacacaaattgtttattggcctgtttctttggtttgtaacttatcgtgtaaaaaggtttcccccctgcgtgtccgaagaatatgcatgtatagtaattaggacttcattcctccatgttttcttccctgtatcttactgtcattgtcctgaaaccttattttagaaaattgatcacagtaacatgttgcatgtggcttactctggatatatctaagcccttctgcacatctaaacttagatggagttggtcaaatgagggaacatctgggttatgcccttttttttaagtagttttctttaggaactgtcagcatgttgttgttgaagtgtggagttgtaactctgcgtggactatggacagtcaacaatatgtacttaaaagttgcactattgccaaacgggtgtattatccaggtactcgtacactatttttttgtactgctggtcctgtaccacgaaacacttttcttttattgttacttgctttttaaaactttgttttagccaccttaaagaaaatctgcttatggcacaatttgcctcaaatccattccaagttgtatatttgttttcccaataaaaaaattaccatttaccccaaaaaaaaaaaaaaaaaaaaaaaaaaaaaaaaaaa

SEQ ID NO: 7280 - DNA, 598 bp, Canis familiaris
acggtgtctgaggttttctcttttagccccgcttctgctttctcacggcctgttctgggcccaggtgtccaggccctgaggagggagcctctatggatggacaatggggacattgtgggcctgagggtcagaatcaagggggagggcatttgggctctgcatctgctcaacccctcaacccccttggctctgaaggatccctgcttgagcagggcagcagaagcttctgggctcagagagaaagagtgtgtataaagtgtgtgtgtgtctgtctgtctgtctgttcatctgcgtataataataccaggggtggctaggggccaggactgtttgtctaaggtccgatctgatatttccaccccgccttctccccagtgtacctcctgcccccacatctccatgtccctctcctgctcccccttgccttgttcctacccatcagcacaacctgtacagttgccattttactgcccttttttatattcaacagaaaccaggtgcctttggaggctctctgataaaataaatctttttttttttccaaaaaaaaaaaaaaaaaaaaaaaaaaaaaaaaaaaaaaaaaaaaaaaaaaaaaaaa

SEQ ID NO: 7281 - DNA, 630 bp, Canis familiaris
  misc_feature (92)..(92): n comprises a, c, g, or t, or includes no nucleotide
  misc_feature (114)..(114): n comprises a, c, g, or t, or includes no nucleotide
gagaactttaaaatatgtatgaattccacccccgatcctctgaatttggagaggaccccttccttgaagcctatctctgttctgctcctctncaggcctcctcttctctgctcnttggctaactgttggcatgaggtccccatcctgactggtgtctctgcccccacccagggctgcaaccaaggcatggttgtcctctggccatctgcagacccaaggccaggcctctctgatggtgaagcaggaaagtcttagaggactgtcagctgagagtggcaccctgcctgctggagtcagacctgatccagccggacctgacctccttagtaagatgtgtgtgagtcctccagcacttgaaggacaatctggccctgtttctcactggtgacttccatgctgcactgtcaccctgaggggtcccaccaggccctctagagaacatggtccccagccccccagctgcctagtgaaagacacccttcatcttctctccatttttgttaaggtataaagtaaattttggtcatgttttcagaacatgcaaattcttgctaatgaaagtgtccttgtacattgacacatatcctagcttctggacctgaaaaaagaacaaccagaaaagaagccaaa

SEQ ID NO: 7282 - DNA, 656 bp, Canis familiaris
aggagaagatgttcaacacgtccgtccctgctgaagcagctgtacgagccactttagctggggtgtccccactgggcgtaaccctcactcaaaggtgatagaccccacttcttatctcccacgggtctacgcacgcgtgtggttcttcacgacattctgagcatccccccatagtgttccccctggggcttctacataaagagtgtgttttgaaagactcttcttgagatcttcgagccccctaccaccgcgtgtagtagagtatccccgagaaccatgttctccacgggaccatatcctaaattaatggagactctgtggccagagaaggctcttttcacaggagtttccgccccaaagcccccgaggaggaatgagaatgttgaaccacttgccttctcccaaatatgggagggctgagttccctttgaccccaagatgagtgctaggcccctagagagagctctgcatgtcaccaagtgaccaggccttgcctcgaggcgctcctgtctcctaacccagctttccttcctctggactccgcactgtaacgcctacgtttgctgatcatgggaagaactcctgtgtgccactaactcaataaaaccgccaaggaatctgaaaaaaaaaaaaaaaaaaaaaaaaaaaaaaaaaaa

SEQ ID NO: 7283 - DNA, 236 bp, Canis familiaris
agtgcccctattgggtgtcatctgtgaagactcccgggcctcggctccctctggagagcctccaggaacccagagtatggtagagttactctccccggttggagaaggggtatttgtcacacacctgtgatgtgactgtgtatgtacgtgtatgtgtgtgtatatatattaaaacagatttgttgacacctacccaaaaaaaaaaaaaaaaaaaaaaaaaaaaaaaaaaaaaaaaa

SEQ ID NO: 7284 - DNA, 630 bp, Canis familiaris
  misc_feature (201)..(201): n comprises a, c, g, or t, or includes no nucleotide
  misc_feature (216)..(217): n comprises a, c, g, or t, or includes no nucleotide
atggagcgcctccaagcacgcgactggaccgacgacggatgcccggggaccgcccccagccatggaagccccgggaaacggccagcctaagaccgtgggctggggatgtccgccagggcgctcgggaagcaggcctcgaagcagggaggcccgccggcccggcggcgacgaggaggaggatggaggtatggaaagaggagntgatggaagggatcnngccgccccctgggaatggcggaccagatggagctaggagaggagaacgggggcccgcgggggcggcccgacgcgggcccgatggaggaggaggaggccgcctcggaggacgagaacggcgacgatcagggcttccaggaaggggaggatgagctcggcgacgaggaggaaggcgcgggcgacgagaacgggcacggggagcagcagcctcaaccgccggcgacgccgcaacagcagccgccacagcagcgcggggccgccaaggaggccgcggggaagagcagcggccccacctcgctgttcgcggtgacggtggcgccgcccggggcgaggcagggccagcagcaggcgggaggtaagaagaaggcggaaggcggcggaggcggcggtcgccccggggctccggcggcggga

SEQ ID NO: 7285 - DNA, 617 bp, Canis familiaris
ggtatctggatttctgaatattcataattgtgttactggggatgagaatattggaagtttaaattctagccctagattttagaataaattcactcagcacttgattgaagtacccaaaaatgtttcccaaaaagtgatagttgtaagttatctcaaaatgtcttagactaggttaaggttctcagtgacatgagaattcactaccaaagtatttactatggagtataattctctcagctgtattttcagttttcctaccccataaagcatattgttttttaataactgtgtaaatgactaaaccaatgtaagagacaagtccatgtgatagttttaattaaaatgagtcctggaagttggattttgcatttgatatctgtttggagttttagagccactgtgttaaaaaaaaaaaaaaaaatactatatgtagcaaggaaaaggtgctttttacttttaatccctttaatcaatatggcttttttccaaattggctaatggatcaaaatgaaacctgtcaatgtgaattcagttattgaccttgttacttgtttttgctagaaatgttattaatgtaataaatatcaacgtgggagataaaaaaaaaaaaaaaaaaa

SEQ ID NO: 7286 - DNA, 606 bp, Canis familiaris
caagaccccatgtttcatctatgatcctaaattcaagctgtgggcgatgtggcctgggcaccatactcttctaccgtgtttgcggcagtcaccaccaatgggaagacccatgtatttgacttgtccatcaacaagtatgaggccatctgcagccagcccgtggtgaccaaaaagaagaacaagatcacccacgtgcagttcaatcccatccaccccatcatcattgtgggtgatgaccgtgggcacgtcatttgcctcaagctctcacccaacttgcgcaagatgccgaaggaaaagaaggggcaggaggtacagaagggtccagctgtggaaatcgcaaaattggataaactcctgaacctggtgagggaagtgaaaaccaagacctgagtccctgtctcatttttcgaacccagtacttgtaactcctgactgaggtaccaaagcccagccttagcacccagtttgtgaccccacccctgatcaggtcctagcatctaccatcagcactctgtttcagccctggtcccagcgcttcacccctcaaccattatcctgtcctactttgcacaaataaacttgtgtttggaagctcaaaaaaaaaaa

SEQ ID NO: 7287 - DNA, 615 bp, Canis familiaris
acatatagattgaatttcttttaaaatacaccatgggtttaaaaattaaggccaagtgcttggcaaagtaagttttggttttagccaacccccaaagtgtttgaaaaaaagtatttctacaatttgccaaacccataaatacattcaggtccctccattcctctcatttaatatgatggcatcataaacatgggacttaatgtctattttcatatccaccaaggtttgagcaacatgaatcccaaatcttaattgaaaaactatgaaaaattttggaaaaacataatggttctgcaaatgaagatgaggggccaccagttcagagttctgattttgacagcactcccccccccccccgccccgactacaagatttggtcactcttgggcccaagcccagaggtggggacggttttcctccctgcacagcaagttccaggctatgctccctaaatggaaaagaaactgccccagaagaagctgcacttgtgtctttggatccagtcgtgatttctgaggctcctttccaaatctttatgacctctcatttgatggcagctcttggcattcttatttctgtgtcccttcttgccattgtctcactctcaaaaaaaaa

SEQ ID NO: 7288 - DNA, 587 bp, Canis familiaris
ttcttttacgtaagcagagtgctatgataaaatcttggtatttgtattgaagctgtaatctctggaccttattcatatgttatcccccttaagacccagtgaggtccttatatagatacacctgatatctaaacacgatcaaatccgcagtcacacattacatttacttgtcacacctctttagtggtctttctctcgtatgacctttattgctttgaagagtgcaaaccagttgctttgtaggacatctctcacttggggtttgtctgagacttcctcatgatcaaattgatgttatatgtttttggtggaaccccacagaaggaatgttgaatccttagaggcatcatatcagggggcacatggtgtcagtttggcctccttccggtgatcactcggcctgccagttatctctagtgtgaaattactactttttccctttgtaattactaaatgcttggccaagattcaccttgaaatcgtgtaaatactctgttcctcatccaaactttcacctgttagttttagcatccattcatgattcttgactccatcatgattgtaatgttggccaaaaaaaaaaaaaa

SEQ ID NO: 7289 - DNA, 638 bp, Canis familiaris
  misc_feature (403)..(403): n comprises a, c, g, or t, or includes no nucleotide
tggaaatgtgcactgaaatagatgtgagacatttagaatagcttgtgttatttatgttgggggaaaatgcactgaatttattagacaaacttaggagcgcttaacttccttacacaggacaggtgaaaatgacatttgggctgtctctatactatgaaccatttgtaaatgtcttacccttgatgtaaatatctcaaacaagatagaacgtttttaaacttcaagtagccctaaacaggagattgagaactgcatctgattcacagagggtagctggcttttaacctcttctgaacgtttgatgatctaaatcgtagggtgcatattaaaaatactatgttgatctaaaaagaaactggaaaaaaacaactggagttatagatacctgtcattagatacccanaagccagtatttgggggacatctataaaatggggcttgactataaaatctttattttaataactcttccccctgtgtaagttactgttaatggtttgtggtacgtcattctctagaatattaagtggaagtagatgctccggaagtagatgctccctacttttcatgtggaagtggaccaatgtctataaagagtgacaaataaagttaataatgattccaaaaaaaaaaaaaaa

SEQ ID NO: 7290 - DNA, 630 bp, Canis familiaris
ctccatagaagacaccgggccgatccagctccggactctagcctaggccgcgggacggataacaattgtcacacaggaaacagctatgaccattaggcctatttaggtgacactatagaacaagtttgtacaaaaaagcaggctggtaccggtccggaattcccgggatctccgagccgccacaatggtgcgcatgaatgtcctggcagatgctctcaagagcatcaacaacgctgaaaagagaggcaagcgccaggttcttatcaggccatgctccaaagtcatcgtccgatttctcactgtgatgatgaagcatggttacattggcgaatttgaaatcatcgatgatcacagagctgggaaaattgttgtgaacctcacaggcaggttaaacaagtgtggagtgatcagccccagatttgatgtacaactgaaagatctagaaaaatggcagaataacctgctcccatcccgccagtttggtttcattgtactgacaacctcagctggcatcatggaccacgaagaagcaagacgaaaacacacaggagggaaaatcctgggattctttttctagggatgtaattcatacgtgcaaataaaatgcctcaatggacaaaaaaaaaaaaa

SEQ ID NO: 7291 - DNA, 642 bp, Canis familiaris
agcagtgaagtggtagccgccaagggttgttagggggttgggacgagggagggagaatcgagtctggtagaggtttttgttttgagggccagtgataatgttttgatatttatttcctgctactgaaatttggatctgagtgaattgtccctatttctgatgatgtcggtattgcaaagcgacagattcataaagtaatgatcaaatcttcctttctttccgtgtgtatttctaagaaatagagccaactgattttgtatgtaaataccaagagcaatttacctggtactaaacccgcaccccagtgcggacccttccccaccctcaccctactcttgttccaactgtcctggaacccgttcccattgtgtgatccagccctggtcctggctgcggtcagcagatcccagtgaagggttttgtgtgtttaggcctcatttctttgtctttttcctactctgttcctggcattcgctgatttctagtgtgtactctgtagtctcagtccgtgtttgattccattccatggaaataaaaagtatgttgtacatactgcccaagaattgtcttgcaagttaaggctttcccctttactataagactataaataaaaacttattttatccttaaaaaaaaaaaaaa

SEQ ID NO: 7292 - DNA, 646 bp, Canis familiaris
  misc_feature (24)..(24): n comprises a, c, g, or t, or includes no nucleotide
gtgctcgggcatctgctggagagngagatccgggcgctgctgcctcccgaggattaccagcgatttctggacctgggcgtctccatcgcggaaaaccgcagtgccttcagctaccactgcaagaccccagactgcaagggatggtgtttctttgaggatgatgtcaatgagttcacctgcccggtgtgcttccacgtcaactgcctgctctgtaaggccatccacgagcagatgaactgcaaggagtaccaggatgacctggccctgcgggctcagaacgatgtggccgcccgacagacaaccgagatgctcaggtccatgctgcagcagggtgaggccatgcactgcccgcagtgccggatcgtggtgcagaagaaggacggctgtgactggatccgctgcaccgtctgccacaccgagatctgctgggtgaccaaggggccgcgctggggacccggggtgagtcctctggagagcagaggcctgcgggagctggggggaactgcccgggggccttgcccgagagtgggggacagcccctggggcgaggccaaccactgcccgtattcatccagcttgtaaagtaagaacgcttttttacattttttataaatggttgaaaagtacccagaaaagaaaaaaaaaa

SEQ ID NO: 7293 - DNA, 588 bp, Canis familiaris
  misc_feature (207)..(207): n comprises a, c, g, or t, or includes no nucleotide
gaactacacacatacttggtctaaaattgtggaaagctgaaggaggagctgggagcggggtgtggagctggaaaaactgtggccagctgctatcacatgccagctaggtgacacctcatatgaactgtagcagcacctgccctagatggacctttggagccttcaagacaaacaaaagagaaataactactgttacctcttcatccnaaatctcatgcaaagttttcttgtggtcaaacctaacctggaaacaaaggggcaagggaattccaggaaatgaagcgcctgcctagctaggccattccagtcaaagccacagtagtctgcaggccggtcacccgtctggctctgccgtattggttcagagcccacctctgctctaagcatgcaaaggaagcctcacctcattccaggggagcaacttccatcaactcacactgaccttcatcacttctgcagaactaccccggtggtatgtctgcaagtcaaggagtgatgaacacatccttaaaaagctttctgcatcaactggaggtgaaaacttccaggaagtgctctcagggcacaggtacaaaaaaaaaaaaaaaa

SEQ ID NO: 7294 - DNA, 502 bp, Canis familiaris
tttttagaatgtgttctctttcacctaaatctaatttcaatgaaaaagcccagcccacattgattgtctcaattttttctagttgtgtagtaattcttgaaattctctttaagaaaaatcagatcgagagaaagaaagactttgtaaataaggcttggctttcaggaaaaattatttaaaggttatgttaaaggatttaagcttattgaaagtgtaatggaaatgtggagaataacgtgggtaaaggaaactacctcactctttgaaggttttgtagaagcacacattaaacatcctaaaatggctttgtcacatatgaaccatctggtgtgaaagaactctataattgtagcattctaaaggacctggaataattgtattttgctggcagtggacacattctttattgtttgcagattcctcatcaaatctttaattatgcacttgtttctgtcatcaataaaacaacttaaatgaaaaaaaaaaaaaaaaaaaaaaaaaa

SEQ ID NO: 7295 - DNA, 628 bp, Canis familiaris
ttagacgagggtgaccattccctccctgcaagacaggatgatctcactttttgtgttcccccgtgtgtcattaataaacatcttatcttgagaaataggagggcttttttaaggaagattaaaaatgtaaattctgattgctgcaagaagaattttgtgtggaaggtccttttcaataaagccacccaatcttggcccactgctggctttgtcagagcaggctggtactgagcgtatttcatctgctgcttcagaaatgacttaccttttcaactcttgatgttgaatttttttcttaagagcttgcatcaggacctatttaagaccatgtgtcctaactaagctacaaagcaacttacagggtattttaaaccttgcttagtctgtccttctgtgacatttccttttggacgccattgagcttgaagaccagtcatggagaaatgttaccttactttgaacagatttagtgtcattcaagaccgttggcagtgttaaacgttacctgtgaacttcaactgtgtgatagtcaccggcttttgtattgttctcttacatggatgtgggggttctaattttgtcaaataaactgttctttatctgttgctgtaaaaaaaaaaaaaaaaaa

SEQ ID NO: 7296 - DNA, 569 bp, Canis familiaris
taccgggagaagatcgaggccgagctgcaggacatctgcaatgatgttctggagctgttggaccaatatcttattcccaatgctacacaaccagaaagcaaggtgttctacttgaaaatgaaaggagattattttagatatctttcggaggtggcatctggagataataaccaaccactgtgtcgaactcccagcaggcttaccaggaagcatttgaaattagtaagaaagaaatgcagcctacacatccaattcgacttggcctggcactgaatttctccgtcttctactatgagattctaaattctcctgaaaaggcttgcagcctggcaaaaacggcttttgatgaagcaattgctgaattggatacactgaatgaagagtcttacaaagacagcaccctgatcatgcagttgcttagggacaatctcactctgtggacgtcggaaaaccagggagatgaaggagatgctggggagggagagaactaatgtctgttgtacttcgtgatctgttcagtgtcactctgtaccctccacatatatccctttgtgcgatgataaaaaaaa

SEQ ID NO: 7297 - DNA, 594 bp, Canis familiaris
gacggggcgggatcccggtgccagtccgcgtcggcccgccctgccgcctcagtcggccgtcccgggctgggcccgaccgtcatggagcggggcgggacctccgcatgttccgtgtaaggcgcgtcgccgccgccgccgccagccgccagccgcctgccgccgccgccgcccccgcctgcgcctttccagacctcccgaaccgccgccgccgccgcctccgtcgccgcccggagcccggagcccggagcccctcgcccttggcagcctgtcgccgccgccaccccaccccccttcccgggcgggctcgaatgcgcgtcccgtgaaaggtgcaaggcccggcgccgccagcttgccgcaactgggaagaatggttcgggcctaggcggagcagcgatcggaggtgagaggggccgacggaactgactgagggccgggccgggccgggcctggccgccgggtgggggcgggggcgacgggagaaccgggtccgcctgcggttctgggagaccttccaggccggggctgctccatccggcttcgcttctctcctgctcgtttcacctcccccctgcaccccgccctcgacaagaaaaa

SEQ ID NO: 7298 - DNA, 571 bp, Canis familiaris
  misc_feature (13)..(13): n comprises a, c, g, or t, or includes no nucleotide
  misc_feature (34)..(34): n comprises a, c, g, or t, or includes no nucleotide
  misc_feature (51)..(52): n comprises a, c, g, or t, or includes no nucleotide
  misc_feature (54)..(54): n comprises a, c, g, or t, or includes no nucleotide
  misc_feature (63)..(64): n comprises a, c, g, or t, or includes no nucleotide
  misc_feature (66)..(66): n comprises a, c, g, or t, or includes no nucleotide
  misc_feature (81)..(83): n comprises a, c, g, or t, or includes no nucleotide
  misc_feature (92)..(93): n comprises a, c, g, or t, or includes no nucleotide
  misc_feature (95)..(95): n comprises a, c, g, or t, or includes no nucleotide
  misc_feature (100)..(100): n comprises a, c, g, or t, or includes no nucleotide
  misc_feature (103)..(103): n comprises a, c, g, or t, or includes no nucleotide
  misc_feature (105)..(105): n comprises a, c, g, or t, or includes no nucleotide
  misc_feature (111)..(111): n comprises a, c, g, or t, or includes no nucleotide
  misc_feature (113)..(113): n comprises a, c, g, or t, or includes no nucleotide
  misc_feature (115)..(115): n comprises a, c, g, or t, or includes no nucleotide
  misc_feature (130)..(130): n comprises a, c, g, or t, or includes no nucleotide
  misc_feature (135)..(135): n comprises a, c, g, or t, or includes no nucleotide
  misc_feature (140)..(142): n comprises a, c, g, or t, or includes no nucleotide
  misc_feature (149)..(149): n comprises a, c, g, or t, or includes no nucleotide
  misc_feature (158)..(159): n comprises a, c, g, or t, or includes no nucleotide
  misc_feature (166)..(166): n comprises a, c, g, or t, or includes no nucleotide
  misc_feature (255)..(255): n comprises a, c, g, or t, or includes no nucleotide
  misc_feature (277)..(277): n comprises a, c, g, or t, or includes no nucleotide
  misc_feature (303)..(303): n comprises a, c, g, or t, or includes no nucleotide
  misc_feature (320)..(320): n comprises a, c, g, or t, or includes no nucleotide
cgcgaggcagggnccaggcagccgggaccgcccntggccacactgcgcgtnntnccgggcgtnntnttctgcgttccggcnnngctttcctnngncacgngananccacgngncngctcgctctcgctgngggangtgannncccacgntttcttaannctggaancccagaagctcggcggggggactgttttgtcttttacaagtttttttaaaagcagggattaattccatggccattttttgtggtacttntggcctcgaatctttaccaagnaatcactgtgtttacatgaaatgatngatttgatactgtattntgatataaaattattttctgttaccggggttcacactacggcatgtcgtctacactgctgggagattcggggagcctcaccgacacccgtctggccgcaggcggaccaacacgcgtccctctgtagcatccagcagtgttcctacagacagaagtagtagagaccgaggacagtcccctatctgtgtaggttaattttcaaaaggaaatttaaactataatttaagatatttagcttcttttctacaaaaa

SEQ ID NO: 7299 - DNA, 702 bp, Canis familiaris
tagctggcaacgaccccgcaaacatcttcagtagcagtggctgcataaaagcagagggtgacatctcaaaatatggctgaggggtttaagtctcatctcattcgtctcattggaaatctgtgttacaagaataaagacaaccaagacaaggtaaacgagctggatggcattcccttgatcctagacagctgcagcatcgatgacagcaatccctttctgacccagtgggtggtgtacgccatccgaaaccttactgaagataacagtcaaaaccaagatctgatcgcaaagatggaggagcaggggctggcggatgcatccctacttaaaaagatgggttttgaagttgagaagaggggtgacaagctgattctgaaacctaccagtgacccacctccactgtgaatgaactctccatcaaaatacctgaatttttgaaatctgtttcatggatttttcgtcttctgcagtatgtgaaattgcaagtgtttgaagatttattacgtgcaaattcaggaacacatgagtcctttagataatagagtttaatgtggataagcttgaaagtgaacgtacatgagtattccattgtttctttgcttagaaactgtctggtttgcctttgtccccctggatacagtgtgcatttaagtaatatattgtacttactgtggcagcagataataaattcttctcttggaa

SEQ ID NO: 7300 - DNA, 607 bp, Canis familiaris
aggaaacaaggcaacaggaatcacactcgggtgctggcagctctaggtcccctgccaccacccctttcagccccaaggcctggggactcctgcccccacggggctctcccacttggctgggccaggagaggtctccactttggaaaactgcacgaggcgggagcttctgatgtgcattttgctaccagtttcacgattagcagcgaacgcccacaatgacagcacatgactggacaagacacttcagggaaggacacacagaagagtaaatcagacccacagtgccacgtgttaataacagtcccacaacagaagacacgacactggcgtgctggccataccgcaccaggggcaggcaaccgacccgtgggaggctgatggccacagaagtcctggaggtggctggcactttcactcccagtactggaaagaagtcactgaacacatatgttcacattctccacaaggacggtccaatgaaggtagccaaagagcggggagaaacactttaaaaagaacagagaaagcctgcttcctgtcccgagaggacacagggccagacattgcgggtggcaagggcccactgcggtctgggctagccagtgag

SEQ ID NO: 7301 - DNA, 554 bp, Canis familiaris
  misc_feature (125)..(125): n comprises a, c, g, or t, or includes no nucleotide
  misc_feature (192)..(193): n comprises a, c, g, or t, or includes no nucleotide
aaagggtgaccgttggcttcgatggcctggctggactgccgggagataaggccactcggggtgaccctggtccttctgggcccaccgggacctccaggagacgatggagaacgggctgatgacgngagaagttgggcccagaggactgcctggggaacctggaccgcggtggtctgttggggccaaaagggnngccaccacagggccctttcctgggacctcgcggggtgttaacgggttatgtgacgggccaacacagggccacaaaagggaaacgtgggcccccagggagagcctgtggcccacccgggacagccagggtaacaccaggcgcccagggtctcccaggcccccagggtgccattggtcctccaggggaaaagggtcccctggggaaaccaggcttgccaggaatgcccggtgccgatggacccccggggcacccaggcaaagaaggtcctccaggagagaagggcggccagggtccgcctggcccccagggcccaattggctatccaggtcctcgaggagtcaagggggcagatggcatccgc

SEQ ID NO: 7302 - DNA, 648 bp, Canis familiaris
ctagcccctctttgctggaatggacacgtcagatgtgatttgggtgccatccgtcatgcttcggagcagcacttctggtggttcatcttgaccttgtgcttgaggccgtcgtagagctcaaagttgtagttctccagggtggtgcagctgcgggagctcagccctgagtaggagcaggtacagtagagcagaagccccgcacacgtggcccccaggaggactcccagggagctcatggcgataatggtgatgaggatgggatccaacgtgtagagccagctcttttctttgtcggccgaaggggctccagatcctgaggttggggaagaagagttggtccagtccacctcgtactcatcatcaatttcatcttcatagccttctctcccatgtatttctggaatgtccactgcaaaagcagagatgggttccatacagttctccagtgggacgtccgtgcttatccgaatgtcatcaatggcaatttctcctgaacgtccttttcctatgactccctcaaacacaatctgatactccatgtcgtagctgggcaagatgatccgcccgtgtttccactcattgcctggtcctcgcggatgacccagaggagcttgctctcctggctggcttcgcgcaccacctgcagcg

SEQ ID NO: 7303 - DNA, 565 bp, Canis familiaris
cgtttattgagattggttcttgaagggtttttaagtcttcttctgaatgtctgcatgtggatgtgtgcatgaatgtgtttctgcatgtgcgcacacacgaggaagagttcgaagcagagagtcatgtaagtaatagaggccagacggtggcaggaagacagaaggacaccctcagagacccatagagatcagaaaggtgtgtctctccccttaaactagatctcttccctcagcgaggctgcgtcttccctcttcgggaagaagctccctgaagacaagactgtgtctccccctcagactgaggctccctggggaaggactgttcctttctgctcgtgaccagggctccctcagaagctgatcttcccaggaatgaagaaccgcaagcagtgtgtgtgtgtgtaccatgagttgtgtgactggtacacttgccttgagtcttcagaaacgtctgtagaaacacgtaggaaataaatgcactctgttttctgggtggagtttgggaaaaaaaaaaaaaaaaaaaaaaaaaaaaaaaaaaaaaaaaaaaaaaaaaaaaaaaaaaaaa

SEQ ID NO: 7304 - DNA, 522 bp, Canis familiaris
  misc_feature (1)..(1): n comprises a, c, g, or t, or includes no nucleotide
  misc_feature (111)..(111): n comprises a, c, g, or t, or includes no nucleotide
nggatcttcctcctggcgtcgctctctctccctgtccctctgccacggtgtccgtctcatcctccctctcctcttctcacatctcccacgctgggtccgctgtctgtggcncggggcctctgctcagcccctacccaggcaagccccggggcagagggcagctgcccccaagcctggacagtcctggaggaggtcagcaggtggagacgatgcaccctgcatgcactccgcactcccaaggggagcattggccccggaaagggcccagcctcccactggagccccagccagctttcatcgtccccctctccccacgagatggctagctctcccctcccttcgccttttggcccctggtatggtgggggtttctaacgatcacaccccgcttgagggagggggctgctttctgaggtcggttgttgtctttcacattaaaagaaacacctgtgcacaataaaaaaaaaaaaaaaaaaaaaaaaaaaaaaaaaaaaaaaaaaaaaaaaaaaaaaaaaaaaaaaa

SEQ ID NO: 7305 - DNA, 563 bp, Canis familiaris
  misc_feature (170)..(170): n comprises a, c, g, or t, or includes no nucleotide
tcctcaagttccctcaccagtgctcgccagaagtatagtccggcaagcctggcagaaggctgaatattccaattaccacaaaattgggcagctacaagatgggccaagaagattgaagccacgagaaaggagaagcccacagagtgaccacgagctcttggaattcgtgntaccaaaagagttcactgaaggcaaagaaaatgaggaacagaataatcaagcttgaagttaggaagctaccaaaagcagctctcctgaaagcttctcctaaaaaagcacctgctgctaagggtgcggcggcagcacctgctgcaaaggttccagccaaaaaggtggctgctgcgggcaagaaggctccagcccagaaggttcctgccccgaaagctgcaggccagaaagcagcacctccaaaggctcagaagggtcagaaagctccagcccagaaagcacctgctccgaaggcatctggcaagaaggcataaaaaacataagaggctgttataaataagtaataaaggttctttttgacaaaaaaaaaaaaaaaaaaaaaaaaaaaaaaaaaa

SEQ ID NO: 7306 - DNA, 617 bp, Canis familiaris
ggttttggcagtacatcaatgggcgtggatacggtttgactcacggggatttccaagtctccaccccattgacgtcaatgggagtttgttttggcaccaaaatcaacgggactttccaaaatgtcgtaacaactccgccccattgacgcaaatgggcggtaggcgtgtacggtgggaggtctatataagcagagctcgtttagtgaaccgtcagatcgcctggagacgccatccacgctgttttgacctccatagaagacaccgggaccgatccagcctccggactctagcctaggccgcgggacggataacaatttcacacaggaaacagctatgaccattaggcctatttaggtgacactatagaacaagtttgtacaaaaaagcaggctggtaccggtccggaattcccgggatcgtgaggttacctagccccccgtgcccccgacagacccaccactctcatacacggtgccagcacccgctgcctgcagtcaggcgcccctgcccggtgtcctcagttgcccctcgcccgcggccccccccacagagctgctccttggggggggggtgctgtttgagagtctttgtgttgcacattaaaactcaacaattta

SEQ ID NO: 7307 - DNA, 639 bp, Canis familiaris
gccgtttgtatagtccatgccctgaacatgtatttcttccagaaaggaggggggaggactgataactctcactcagctgtagtcacttttaagcagttctgcagtaactacacctacttaaaattctccctttgcatgttttgtaaataggctctagtttgttttttcattgcctcatcagcccacacaattaattctctgaatgggagggagagtgcttagcaaatggatttagaaaagtatctgtagaagaaaaataatactttattttgtcctgtttctcaagcactgttagatcgaacagttttgttaatagacacttttgcatccacgtttcaacattaacacttctgaagtcatggtctggtgtcagatttgataaagtcgaggcacttcatgttttacaatcaccttcattaaaataattcctaagatttccagcagtttatctaatatgtgtgtaaaatgtgcgttcttatttttattttagttttgcagatggttttctataaagtacgtttttactaagtccctgtgtgaatgatttaaaaaaactacagaataaggtacaaatgtagtgtatttaataaactgtcaactaaagcaaaaaaaaaaaaaaaaaaaaaaaaaaaaaaaaaa

SEQ ID NO: 7308 - DNA, 535 bp, Canis familiaris
tgtgtgggtttttccagaaggagcccccgacaaactaatgattctcactatacaccagaaactaagaatgatatgactgtttggagcgaagaggtagaaaatgaaagagaaatgcttttagaaaagttcattaatggcgctaaggaaatttgctatgctcttcgagctgaaggctattgggctgactttattgacccatcatctggtttggcattttttggaccatataccaacaacactctttttgaaacagatgaacgctatcgacatttaggattctctgtggatgatcttggctgctgtaaagtgattcgtcataggctctggggtacccatgtggttgtaggaagtatcttcactaatgcaacaccagacagccatattatgaagaagttaggtggaaaccaacagtaatgtcaatgtattggctgtactattgatatgtaccatttgggttgatctataaacactgtcaaaagcttcaaaaaaaaaaaaaaaaaaaaaaaaaaaaaaaaaaaaaaaaaaaaaaaaaaaa

SEQ ID NO: 7309 - DNA, 457 bp, Canis familiaris
attctcttttgtctcttcgatgttgataaccgctgtggaatgtaccatttctgtgttttcggaagggtgccagtttaactgtttaagcttatagtgttgaccaggacttgatatatagaagatggtagagttaaatctactttagaagcctactttgtgaccaaggagctcaatttttgttttgaagctttactaatataaaagagcattgtagatattttttttttgacatctattgtttaaaatagatgattataacggggcagggaactttcttttccctgcaagaatgttacatattgtatagataactgagtgacatttcataccatgtatattagtagagatgttctataagtgtgagaaagtatatgcgttcttaatagactactgtaattataagatatttttaattaaatattttttgtaaatattaaaaaaaaaaaaaaaaaaaaaa

SEQ ID NO: 7310 - DNA, 465 bp, Canis familiaris
ttttaaattgaaaggggtttgtgaatagcgttgaaaagtttcgtgtaaattcctagtgcagatatatagattcagatgtgatttgtgaggcccagagttacagaatcccagttgcttcagttaatttgcattgggaaaagcctgtcagtttttaggtcatttactttctataaactttagttacaattatggcaattagcagacagcttctcagtctgcttaatctcttcttaatcccaagaggaaagaaacacaagggtaaccccatatattaactgtcctgcttactttatataataggacttcttgctcaatttaaagtgatactgtacttctcagcagaaataaaaatgtaggttttcatagtagtgcagtttctgtatatggtccttataagtgaataaaatactgattttttaaaaaccaaaaaaaaaaaaaaaaaaaaaaaaaaaaaaaaaaaaaaaa

SEQ ID NO: 7311 - DNA, 600 bp, Canis familiaris
aaagaagctggaacgattggtccccaagttctctgaaatctcggggatagctgcccatttgttgataatggtttcctggccaaaccctaatgtgtttttgaagagcgttctctggactgatgcctgccttctgggcaccttttgcatgttccgtgacatagagaccagaccggttgcttttgggtgtccatccaaagccagtggaccaagaaggccagcttggagcttggccaaaagtccaccaaaggttctgccccaagaagctcagaaggctaaatgaatattatccctaatacctgccaccccagtcttaatcagtggtggaagaacggtctcagaactgtttgtgtcaattggccatttaagtttaatagtaaaagactggttaatgataacaatgcatcgtaaaaccttcagaaggaacacaggagaatgttttgtggaccatttgtttttttttttttttttttgtgcgtgtgtggcagttttaagttattagtttttaaaatcagtactttttaatggaaacaacttgaccaaaaatctgtcacagaattttgagacccattaaaacaaaagtttaatgagaaaaaaaaaaaa

SEQ ID NO: 7312 - DNA, 421 bp, Canis familiaris
tcaccttttctgtaaaaagttaaaaattaaattttatccaacaagagagggagaacagaaggggcagaagaagaggcagagagaaagaatcttaattaggctccacactcagtgcagagctctagatgaggctggatctcatgaccctgagatcatgaccagagctaaaatcaagagtcagatgcttaaccaactgagcatccaggtgccccttcagacatcacctttttagaagaatatatttatatgtatttgaaaacacatgtctattaactttgtagctagcttttcttccattgagcattctaatggcatttttcatgccatttagataatatctgtatatgggaactatgattgacatctgtaattaataaatatattcttactaaaaaaaaaaaaaaaaaaaaaaaaaaaaaaa

SEQ ID NO: 7313 - DNA, 599 bp, Canis familiaris
tatatcctacctccgtatccccgttttgtcttcctggacctggacattcagctcctgtccttgattgaattgggagccactggctcctgggtcatagggaagccacatagacatccctttcttcccttgcacgctcgctagcagctgctaaggtcttcacactctgattcctcagttttttgcctggtgacactgacatgaagtagtgggggagatagtccatgccaggaccccctggagtggccttctccttgggtgtgggcaggccctaattcactgtcgctttggagttgaggtgtctttctttctttagttcctgtattctaaacattagtacaaataaacatttttacacagaactccctactggatggtttatctcccgagctcccttttcctgcttgagaaagtcatttcatcctaaaactttcttccttaggagaatggtttttaagtggtttgaaatagagcttttaatcccagattgaaatttttgctaaagccccaatatgtaaagcagatataaaattgagtactttgttgtaaaaaaaaaaaaaaaaaaaaaaaaaaaaaaaaaaaaaaaaaaaaaaaaaaaaaaa

SEQ ID NO: 7314 - DNA, 617 bp, Canis familiaris
  misc_feature (42)..(43): n comprises a, c, g, or t, or includes no nucleotide
  misc_feature (70)..(71): n comprises a, c, g, or t, or includes no nucleotide
  misc_feature (128)..(128): n comprises a, c, g, or t, or includes no nucleotide
  misc_feature (197)..(197): n comprises a, c, g, or t, or includes no nucleotide
  misc_feature (390)..(390): n comprises a, c, g, or t, or includes no nucleotide
cgttgcgttcaagtttctaagttttgggccccctgccccggnngttcaatctgtgaaactttagggaagnntccgtctcccgtcctcgagaagggttgctccgtgccctgcctgtcctaccatggttntggcctcagctgccccaaggtgggtcggcccaactcttggcaatcccgcatgcgcccaccaagctgctnggaatcctgcctgctgcccagcgtcgatgggcttatgaggcctgagtggtccctcgagagctttccttgccttttgtgggaccaccgatacctcaaggacaatgtcttccccgtgacagggtgtgaggggctgcagaatcgtcagcatagccacttagcgctgatacttggaacccagactctccgtgacccntggcttccagctgcctcagcctctgccccgatgcctggctccttgcccctgccctacacatccccagaagggtcctggagccaaccctgccccaggatcaggttccagcctctcagtctcagaagagggggggagcaccccccatttctggccttttctcacgtggctccaagttctgctctgtactccagttccacccaaatacactttctggaacaatcaaaaaa

SEQ ID NO: 7315 - DNA, 453 bp, Canis familiaris
agcactacaagtgtgactcccacttggacaagataccgagcttcgttatgcagtttttaatattatttattcttttaaaaagtaataagcaccaaactacatacattgtatgtcatttaaagtatttatgtcaaacagggtgcaagtgtgaacccaaggaccggagcacaaaattctaactgcctggggcagggctaatgttagcgtttggtgtgcatctgcctccaaaggaggtgttagtggtcagcaagactcaacacagatgacattgaaattccgtttctctcctcatttatcacactggagcaaaactggctatttctgtgaatgatataaaacagggttctctgtaatggtattgtatatagtatatgtttattgttaagttcttgttatattataataaatatatttatagatctaaaaaaaaaaaaaaaaaaaaaaaaaaaaaaa

SEQ ID NO: 7316 - DNA, 298 bp, Canis familiaris
gagtgtgtgtgggggggttctgtactaatttccatggccggtggcttttccttccatgcatcactcccccccgcatgcccaggggccacccgcctggcattaccgcatgctggggtcattgggggaggggggtggggctcacgctgtcctgtggtcttgagatttttatttttgcatatgtaatccatcctgtacaggtagctaactttgtaaacgctgtgtatttcccctgcccccatggctgctggtgtaaataaactgcatctcccattggtaaaaaaaaaaaaaaaaaaaaaaa

SEQ ID NO: 7317 - DNA, 442 bp, Canis familiaris
  misc_feature (168)..(168): n comprises a, c, g, or t, or includes no nucleotide
ttgtttggagccaggggaccttggctttaaatctaaagtttcccagtgctccaaaaccaacggcatttaacttgaagtgcatgaacagattatcactagtggactgagaccaccatatttacgcaagtatttgctgcagatttcccatctatattttctcagaagggnctaaagattatttgaactgttaaatctttgcataatgtctgtgccactcctgcctgtttctccctgtacttaaccaaggtgttgaacatgactgtcacaactgttattttttccattaagccagaaggatatcatttgataatttatcgtataaattgtaacctcagttttaccatctcaatgtaatgttcacatgttgcttcctacattaaaatattttttgttaggaaaaaaaaaaaaaaaaaaaaaaaaaaaaaaaaaaaaaaaaaaaaaa

SEQ ID NO: 7318 - DNA, 409 bp, Canis familiaris
tggaggcggctggccctgccgggtgggtttgctggcaggacagcggtgggataggcgcaggtctcctcatccgcttccgtggcagcccacacgctgtgggaaggaaggctgtgtctttgctggttttcttggccacaggcaaggtgacatgaaaatgaaggcattttgctctgccagtgttttaacttctcttccattttgtggcatcccaagtgaccggcactttccctggaacctaggatgggtgcttgtgcccagtcggggactaagtagaattataaacgtgcgtgatcagaacggctaacttagcatcatgagtgctcctttcattttgatacggaaataaatttctgtgcacctgaaaaaaaaaaaaaaaaaaaaaaaaaaaaaaaaaaaaaaaaaaaaaaaa

SEQ ID NO: 7319 - DNA, 536 bp, Canis familiaris
  misc_feature (278)..(278): n comprises a, c, g, or t, or includes no nucleotide
gtaccatgcctgtttgccaagctggccggcttcctgggacctcacagagccagggagttcaggatccaagctccttgtcttcaagcataagatgaagaaacctagttgttggaccacgtggcatctgctgcccttgacggtgaatttcagatcggcatcccgaagtttgacttctaccattggataaggaccatgatcccaccattgcgagaccaccaaggtccgccaggccgcttatggggaatttcttcatcccggccaagattccaccaaatttngaagggagctccaattccgaactctgaagaaggatgggacagagaccctgaggacattcacactcttgttaggaactcattttagggtctttgtaggtggggcctatttttgtctccatgaagcctttgcctagatcagccatcagcaattcagctgagttgaagtttatttggattaaggactatttggattttaaataagttctcagtaaaagatcttctttggagccagaaaaaaaaaaaaaaaaaaaaaaaaaa

SEQ ID NO: 7320 - DNA, 468 bp, Canis familiaris
  misc_feature (72)..(72): n comprises a, c, g, or t, or includes no nucleotide
  misc_feature (161)..(161): n comprises a, c, g, or t, or includes no nucleotide
gcgtctcagccaccggcccaagacgggtttcattcgcgtggtgatgtatgaagggatagaaaattcatggcntgaattcaggacgccatgctatgacccaaactctatgctggtggtaggctaggggttgttcgtcttctctccaagaagatgggtgttcnttctctgacccctgaaatacgaatgcagagattcctaatcaaactgttgatcaaaagactgatcctaaccaatgctggtgttgcaccttctggaaccacgggcttaagaaaacccccaggatcactcctccctgccttttctctgcttgcatatcattgtggacacctagaatacgggacttgcctcgagaccatgccattttccaaatcagactcggcaggtagcctctgaacgcgaagagaatcttccaagagcatgaacagttaccatggtgtgcttttcaaaaagcaaaaaaaaaaaaaaaaa

SEQ ID NO: 7321 - DNA, 672 bp, Canis familiaris
  misc_feature (31)..(31): n comprises a, c, g, or t, or includes no nucleotide
ctcttctgaagtgatccagccacagaaaggncatcaatacttgattggtgaaaattggtggtaaatgcagaagaaaatttctgcacgaattctttgaagcgcacataaattcagggtcccaaaggccacaagcctgttggtgtctcctctacatgctgggtttatactgcgtctcttctggcacggaggggaatgggtctacatcacaggggcggagatatatgctctggagagggaaaaggttggagaggcccaaagaggggaaagattttttggcccctttccaggaaggtgccagggagtttgttgggtccaagccaatattcttcccaaggcaccaagccttggggaacccaacccaatcctaaccaaagggaggtttccggaaaaagagggaaggcttggctaatgaaagaaatacatgaagttccctaaacctatgggattaatcattatggaaatgtgaaccagcagctgtttgcttctgttgtcccaggtgtcagcctgtgtgcctgtcgctggtctgtcggtacagcaagaagaaaacacagggttcagaatgtcctatattgaggtgtttccacctcattgtgtaacagacagccagtaaacctacccattgatttgaaaaaaaaaaaaaaaaaaaaaaaaaaaaaaaaaaaaaaaaaaaaa

SEQ ID NO: 7322 - DNA, 749 bp, Canis familiaris
  misc_feature (1)..(1): n comprises a, c, g, or t, or includes no nucleotide
  misc_feature (273)..(274): n comprises a, c, g, or t, or includes no nucleotide
nggtggcaataagtgggaataaactcaagctgcgtgcttcaggaatcggggaagcaccctggctcccagctataggactaaatgtggcaagtgggcgtaggagccaagggccacaagaaatgtcttgaagcgggccctgaaggcggccacggaagtcgaccagacttgtggggacccgggacctcggccaagaggtccacagcacgtgggtattcagccagtttccttctaataatgggtttttctgaccgaatgcgagaatcttgaaggatnngaccatccagcttgacctggctggtaaccacgagtatctgaaaatgggccaccgactcaatgattactatcaccagcggtctacatatgtacgaggaacagccgccatacgggtcccccaggacgcgcccctaccagacttcagagccatgggagacccagcggtctcaacttacggatggacacttacctggacccaacccaccccctcgggcccctcgggccggccccgggcccccggaaggttggaccccactgggggctgcccttgcaccacgtggcttccgctgggctttactccagcagatcttgcctaccccctttctgcagccaggaaggaagagttaaacaatataaatgcctttgatatttcatgcaagtgcctaacatcgcatttcatttaaaaaatagaaataaaagcagtttgttaaaaacaaaaaaaaaaaaaaaaaaaaaaaaaaaaaaaaaaaaaaaaa

SEQ ID NO: 7323 - DNA, 667 bp, Canis familiaris
agaatgagaacagtcgggacaggctgctgacagataccgccaggctggaggcagtgtgccgaggagagctcagagcacccttctggtgcaagaagtgatggaagaagagtggcatgctctgcagtccatggagcgctgcccagaagccttgagtcagctggaggagctgatggacctggctgtgctcgaggagatccagcaggagctggctgaccaagaacggtccatcctcactgagtacgagcagagcctgcagttcgatgaagagtgtctgcgtgtcatgctggccgagtgggaggcaaacgctctcgtgtgtcccgtgtgtacaaagtacaatctgagggtatcaggtggcgtggccatgtgtccgtgtggcctctacctctcttcccagtctccagaactgactgagcagacgcttcgtggctgcttggagcgcagcgtgaatgagcacagcacacactgtccccacacgcctgagtttttggtcacagatgggacagaagaaaattccagtctcctcatgagctgcgtggcttgtgacacgtgggcggtaatccactagagccagactctgcagtgctggggtgactgccttgtaaataccagcctctcatttgtaacttattttgtattaaaatgtgtcaaacgtcaaaaaaaaaaaaaa

SEQ ID NO: 7324 - DNA, 625 bp, Canis familiaris
agttggatgcccaactgattgaaccaccttagacgcctcttgagcaattctttaaaaaattaaacaagttttaatgtgatttttctaacaacaactattctgggcccatattcacctagtgtgagggatttggtttctgttgttggtaggtgagtccttgagaagagactttttgattgagatgactaattacacctgtcactcatttagggcttactgtatgaccagcaagcaccatgctaaaagcttccagtggattttaaacattctctgagcaggctttttatgggaaggcttttacaaatgtggaatctcacagctattaagtggctgagccagggtcccatgccactgtgtggttctgcatcactgtataccattctgcccatgtttactctggttattctcatgccagcttgagatgtttgccttatttcacaaccacttcaacactacgttattaatgtttctcttagctaaggcaattaactgttcatacctgttacttattctaagtatttgaggccataaaaattgagtatgagctattgaactcattttatactttctctaacaggtagtcaaataaataaataacaatgaaaccaaaaaaaaaaaaaaaaaa

SEQ ID NO: 7325 - DNA, 641 bp, Canis familiaris
  misc_feature (12)..(12): n comprises a, c, g, or t, or includes no nucleotide
gccgttggttgntgtccacagctggcctcctgctgtgctttcctggcctctcctggtctcttgtttcctgttttctatcaggcctgctgaagtcagggtcctggacattgtttttttgtttttgtttttgtttttaatttatgatagtcacacagagagagagagagaggcagagacacaggcagagggagaagcaggctccaatgcaccgggagcccgatgtgggattcgatcctgggtctccaggatcgcaccctgggccaaaggcaggcgccaaacccctgtgccacccagggatccccgacattgttttttttttaagcaaagatgtttgggtctagatctagagatatatagaatgcttcctgcatcagggttctctgattctgtgttaaatcacagcccaaattttagagagcaaaacactcagtaaataatggaggtgggcaattgtgtaccgatgtgtactgctgacataattagagaagaagtgttaaaaatgtatttagccttggacccagcaattcctctttctggaatttatcctaggaaaatcgtgcaaagatatatgtataaagatagttgtcactgcattgttttataatatgaaaaaaaaaaaaaaaaaaaaaaaaaaaaaaaaa

SEQ ID NO: 7326 - DNA, 573 bp, Canis familiaris
tttttcagctaactgttgaagcttcaggatacgctccgcctggaatctgaaaaagcgtcttatgagatggcaaaccaacatcatacatccccttgggatatgcaacaccgagtcttgtcccctgcccgccagccagaagaagaactgccactttgttctgagaaatctgaaaaagtccttcactctcccaggcttgcagctggtcctggtccctggtggcactgcccaacacctctcgagggacaggttccattcgtgcatccatcttttcttgctgagaggactggttaaaatcttcaatggccttccggaaaaagaagttcagctcctcaaagttcatggcctggagctctgcataaagttctacctgctgggcttcatccagctcattccagaactgtagcaggtgttcctgtccagctttggacaacctgagtttgagatcgttaacattcataatgctctggtagccaagctttgtgaaaacagaggtgtaaactctgcacctgtaaacctcctggggcggctccggctccggctccggctccggctgcctgcgcgcggccactcctc

SEQ ID NO: 7327 - DNA, 566 bp, Canis familiaris
  misc_feature (106)..(106): n comprises a, c, g, or t, or includes no nucleotide
aattttgccagtttggacaaagccaatgaaaggaacagtgaccacttacctgggtggtcttccagatattccatttggtgccacaccagtgaatgtcttttacaantgggcctgtatggaagtgaacattaatggtgttcagctggatctggatgaagccatttctaagcataatgatattagagctcactcgtgtccatcagttttgaaaagcacaaagaattcttaaggcttctttcctgtgctgataatatatttttcctgtgcgtaattatacttatgtttcaataatagcggaagggttttccctgcactgtgcagactttgattattttatggtactttgactttcctggaattttaaaaaggtcctttttcaagaagaacaagatcctcttgtgatacaaatcacattaaaaaaattcttacctctattgctgcctagaaattaaataatggaatacacaaacatttctaatttgaatttttgctacaaatgacatttcttcatttttatgtttgtaaaagtaaaattaaattttgtcaccatgaaaaaaaaaaaaaaa

SEQ ID NO: 7328 - DNA, 664 bp, Canis familiaris
catggatgaggtgtgaaagccactgctaggggctgcatcaccatcataggtggtggagacactgccacttgctgtgccaaatggaacacagaggataaagtcagccatgtgagcactgggggtggtgcgagtttagaactcttggaaggtaaagtccttcctggggtggatgctctcagcagtgtttagtactgtcctgccttttggttcctgtgcacagtccctaagtcaacctagcacttgctgcatctctccttggcattagctaaaatcttccctcacgtcaagattcagctagtggccaagagatgcagtaccaggaacccttaaacaggcgcacagcatctcagctcctctttactgcacgctggatttgcctacattcttcaggatcccatttgaatttcttagtgactaaaccattgtgcatctactagagtgcatatatttatattttgcccgttagaagagaatagaggactcgtgtgtggcgtctttctcttttgaaataagctaattcctggataatagctgtgtcattgtttcactactcagtatggaaataagatgaaattccaattgtaggtaggtaggaagacaaagttggtgatctattaaatcaataaaagtatccactgaaacggaaaaaaaaaaaaaaaaaaaa

SEQ ID NO: 7329 - DNA, 640 bp, Canis familiaris
  misc_feature (594)..(594): n comprises a, c, g, or t, or includes no nucleotide
tatcttgccagaccccgtggtgttggtaacagacaagaccgtgatgtgcaacgtgaggcgtgtactgagctgctttggtggggactagctctgtggagggcaggacagcagctctgggcacggaggctggggcactgccacacatactgggccctgggcgaggagcttctccctgacagcagtcccaggcctggcggcgaggtccccaaggatgaagatggagacctgttcgacctgaggcccttcgtgtcagatctgatttgccttcatcaaaggaagccgacactcaccacgctacaccctctggttctgtgtgggggagccatggccccaagaccagccgtggaccaagaagctggtgatgctcaaggttgttcccacgtgccttagggccctgctggaaatggcacggttagagggcgcttcctccctggagaacactgtggacctgcacatttccaacagctacccactcactctcacctcggaccagtacaaggcgtacctccaggacctggttgaggacatggatttctgggtcactggggaggtctgacccctcctcaccggtgctgccttcttgtgccttcaccntggccaataaactgtttcttgccactgttaaaaaaaaaaaaaaaaa

SEQ ID NO: 7330 - DNA, 619 bp, Canis familiaris
atgggaatatgtagtatgtcgggtaatttgcttttctttctttgatgttatacttttaagatctatccgtgttcatatatgtgtttgcattaatagccacagggtcttaattattacagctttattgttgtatgttttatagcttagtctttaaatgatattctgtagatcaagcaaacttcctccccaccccagtttagtcttcaaacttgacttgtgcttcatatccatatacattttcagatcagcttttcaaattccattagagaccgtggagattttgattgaaattacactgattttaaagattaattcattgggggaggattgctatctttataatgttgaaacttttcatttatgaatatgatatctttctccacgtgtttagggattttatttatttgacagagagaaagaaagcacaagcaggtggagtggcagggacaggaagaagcaggctccctgctgagcagaaagttggaagctgggatcgagtcccgctcagtctccctgcatggagcctgtttctccctctgcctgggtctctgcctctctctctctctctctctctgtgtctctcatgaataaataaataaaatcttaaaaaaaaaaaaaa

SEQ ID NO: 7331 - DNA, 464 bp, Canis familiaris
aacttttcaaaacaggtctaaaagcagaggagatttcaaagcagttttcgttccttgaaagggatttaatgagccagatacttaaatttaaagtgtagtactcgttataagccacaggagaacattgcacattgattcctgaagctttctaatttagatggctataatgctgccatggacttaagccttataaggggccagtattaatcctgagcattacaagttttcttgttcttttctttaaaaaattatttgttgaaaattctttctcctagactcctgcctttgaacggcgtttaaaacttaatacactttttagaaaagtgcaatgggatgagattatgctactttattaaaagcatgttttctgtttcttagctgtgaggtcatttaattgaataaagatcatagcacccaaaaaaaaaaaaaaaaaaaaaaaaaaaaaaaaaaaaaaaaaaaaaaaa

SEQ ID NO: 7332 - DNA, 629 bp, Canis familiaris
cttcctgtaggcaggaccttgtctgaagacagctgggagtgacttccgtataagatcaggccaaatgaggtttatgatctattttattgctcccttatgtgttcatgttttaaagaagaatgacattgatacttacctcttcgctgataaatttacagtatttgcaacagtaaggaaataatctgtcatccagtcttaaattgtttttaaggaagctggtattgtagaactgataatataataaagaatttcccatgtaaattattttttagaaattctgttttcctgatctatgtatttctttctgactagatatgtgataggaggagtgtatgtatggaaatttctggcgtttttgtcatgttctattattgacccagtcactaaggctatctttttctctcctgactgttcaagatttctattaaaatctatctaagagggatccctgggtggcgcagtggtttggcgcctgcctttggcccagggcgcgatcctggagacctgggatcaaatcccacgtcgggctcccggtgtatggagcctgcttctccctctgcctatgtctctgtctctctctctttgtgtgactatcataaataaattaaaatcttttaaaaaaaaaaaaa

SEQ ID NO: 7333 - DNA, 223 bp, Canis familiaris
gcgggtaggttagggatggggcctaggccacagggatgatgacaattctcccctacaggttcgaacttctgacatgggtggctatgccacctgccaagacttcactgaggcggtcattggtgctctgcctcacccataggtccacccatacccatgtaaggtgttcaataaaacatggactcctaaaaaaaaaaacaaaaaaaaaaaaaaaaaaaaaaaaaaa

SEQ ID NO: 7334 - DNA, 520 bp, Canis familiaris
  misc_feature (1)..(1): n comprises a, c, g, or t, or includes no nucleotide
nggggcaacttcgtccagtcacaggtgggaggcactggctccccggcactgttcagactgtagccgtttctgcccacgctgggagcctctccagccatcctctgatgcccatagaagctggccaaactcctcctctggagggtagatggggccaccagagtcacaagtttgactacttcttccccatattcggcgttctcctactccaaccatccacatcctgttaaatccgccatgataccctgggggacgcacagatacggagacccagagaaaagccaagtttcttttttcttttcttttttttttttcccattgaggcattttatttgcacgtatgaattacatccctagggataccctgggtggcgcagcggtttggcgcctgcctttggcccagggcacgatcctggagacccgggatcgaatcccacatcgggctcccggtgcatggagcctgcatctccctctgcctgtgtctctgcctctctctctctctgtgactatcataaaaaaaaaa

SEQ ID NO: 7335 - DNA, 556 bp, Canis familiaris
  misc_feature (1)..(1): n comprises a, c, g, or t, or includes no nucleotide
ngtcagtgttttagggtgagcttagaaggctgcagcagcatgtgtcagtcattgtatctatgaccttggtgcaccctcggcaagccccgtatttgtttatcttgtagagtgttgtctgtgctgacctcacaggcagtacacatcaaagtgcctgcgtgaactcggccattgtcactggttggggctgtcacaggtgtgaaacaggacactcactgcgggcagactccttagctatcctttgagtggtttactgagccaggactcttgcccagtgtctctccatggcagtgtgttgtcacctcgtgccctctactgcctcagtgaagaggaaagaaacattgcttctgaaaggtgtgtctggggatccctgggtggcgcagcggtttagcgcctgcctttggcccagggcgcgatcctggagacccgggatcgaatcccacatcgggctctcggtgcatggagcctgcttctccctctgcctatgtctctgcctctctctctctctctgtgactatcataaataaataaaaatttaaaaaaagaaaaaaaaaataaa

SEQ ID NO: 7336 - DNA, 668 bp, Canis familiaris
agggtcttctcaagatctttcatggcattgtgaacctttgaagaagcagcgcgccacaataaattcacgtgtaatgctatgtgtctgtaattctatatgtcttcctggaatcatttttaaaggggggtggggaatagtagtccatgaataagtaatttggattagagtggagtaaggagctagaagagatgatctttgtctcttttcaaatgtacacaccccttcatgtctcacggtcttttctgagtagaagtgtatgcccttcgaaagaaatgctgggttttgctttttatggatatcaggtgggtaggtttattttgactacagtaaggattctcagggtatcacagcaactattgccagatgctatttctgtcttatgtttcaatgtattcacttgtcattttattgcttgctagaccagttctgcagtttatcccaacatgtactgtttgggacagtaaacccaatacctcatttgtaaaaagaattctccatggcatcagtgttaatagaatgaactcttaactgcatcctttatctctatttaaaagagaaagaaagaatgtcagtaggggggctctttggacatgaaacttacacaaaataaacaaactaggagagttaaaaaaaaaaaaaaaaaaaaaaaaaaaaaaaaaaataaaaat

SEQ ID NO: 7337 - DNA, 644 bp, Canis familiaris
gcccaccatcctgccagaccgttcagagattaggcatctggaccagaagaagagaggccccagggggaccacagttatgtcacgtgcccagagcggtggggtaaaagccacgccccccacaggcgctccttgttacctatagcatcagaaacttgtcacatctctcccttccggagagcagggcttgcaacttttcccctagaacctactttgaaggcaaattagaagctttgttttcattttcccctggtattgtcttgccaggatggttaggtacacaaggacgcttattagatcactgagaagaaaaagccatacccgcttctctggtatgaacatctagtttgagagcaagcaaaacagtaggcttgtattagtgctttaatggagtactggtaacattgtttctgttcttgataggaatctgcttatatttagccaggcttctatttcataccctctcccactacaaactttccgtgcagttacctttcatttttaaagcaatttcactgctaaatataaattgtatttgtggggttcatagttatataatgctgaagggaaccactctttcgttgaaaggtgataaaagttaaataaagactgtctccaccagtaaaaaaaaaaaaaaaaaaaaaaaa

SEQ ID NO: 7338 - DNA, 623 bp, Canis familiaris
tctggttgcagtgcttggtaatttgtgccttgctggtgtgctttgtatgtttgccaggtcacttttaatgcgttgtttgtgtgttttccaagtagcttatgaggccaacagagattttacgctggattacagttgtttcacttggggacggtattttacctgcaatgcatattaaaggatttgttctttgcagtggatttaggaggaattggagtcactcatgcttttgtataattttaaatccactgaggtatttaggttatgccagattgagaagaggcaaaattaataataataataataataataataataatatctacgtaattgagtgcatttcacctatgtagcctgcatacacttaagaggttgtgaggtctcatctttgttgagtttgtttcctgtgatctatagccactagcgtttattcttaaccacagcagactcactattttctaagtcaaccaccgactccaaaaacattatctctttctaatggttaatgtttcagtgtccaggtctgtgaactgtggctgagggaccattagtgatctggagaggatttatgatgactcagtgatggcacatttttcccttctcaaggggaggtctggaacagtgta

SEQ ID NO: 7339 - DNA, 487 bp, Canis familiaris
actattttaatacttcatcatccatgccactaccagacttcttttaaactttgctatcttctcttaaacttcagcttttactccaaaatttgatttttcaaggcctcccataccttggcatcatttaatgtaactttaaaaagtttttaaatagctagcatatatgtatcctctaacttctattttctcactttctttccacaagtcataagtatttctccatatgttcacttgcttatgctgtttataccttcaaactgtaacccttcttcaagggtgagctacaaatttgccagcccagagatcttttctttcatcaataatggcagttaaaaagtaaaaaatttaaccatgtaaatttatttgattacttatgtgatttttaaatgatgtaatgattgagtttcacatttcttttgatctattgcattcagcactattttgaataaaaagtccgttaactaaaaaaaaaaaaaaaaaaaaaaaa

SEQ ID NO: 7340 - DNA, 549 bp, Canis familiaris
gcctggggaacccagttgtcagcctgtggtgcagtcatggcatcttgggagcctttgaatggactgagattcacccacagcccattaaatgtgaccaagtgcgacaggccctgcttcctgcctgaccccacgggaatcctgtgtggtgtttgcggccccgcgctctgcttggcaaatattctgaaaagcatcggataaataggttggctttcagaaacccgtgttttgaagtacaaagcgtatatctcagaagcaaatttagaacttggaaaaagtgtcaccgatattttcagcttccactctctgcagccaaccccagggggaggaataatataaaagaatctcaaagaaatgaaagcacaagatacccctttactttgaaacaagaggaccataagtattcatttagaaaagtaatgataaaagttccatattttttacagacaataatggttctcttctagatgattttatttttaaaaagttgcagaaggggaagggcactcttaggggaataaaaaaagaaacgtctttaaaaaaaaaaaaaaa

SEQ ID NO: 7341 - DNA, 639 bp, Canis familiaris
ccggtccgggaatgcccggggatgcggccctgaggtgacctccggagatggttcgctactcgctgggacccagaaacctacgaaatcatgcaagtcgagaggttcaaatcttcgtgttcactttaagaacacacgtgaaactgcccaggccatcaagggtatgcatattcgaaaagccaccaagtatctgaaaagatgtcactttgcagaagcagtgtgtcccattccgtcgctacaatggtggagttggtaggtgtgcgcaggccaaacagtgggggctggacacagggtcggtggcccaagaagagtgctgagtttttactgcacatgcttaaaaatgcggagagtaatgctgaacttaagggtttagatgtagattctctggtcattgagcacatccaggtgaataaagcccccaagatgcgacgtagaacctacagggctcatggccggattaatccatacatgagctctccctgccacattgagatgattcttactgaaaaagagcagattgttcctaaaccagaagaggaggttgcacagaagaaaaagatatcccagaagaaactgaagaaacaaaaacttatggcccgggagtaaattctgcatagaataaatgcaaataaaaataaaaaa

SEQ ID NO: 7342 - DNA, 591 bp, Canis familiaris
ctgtgaataaatttgtaggcaactatgatggattcatagtggagtgaattgttgggatatttttaaaggggtgggtcagaggagggagggaagtgcactggtcattcagtcggtacttccatgccttggtctggggtgataggccatttcttgtctgcacccagcctatcctagacacttcgttcctatgcaggaaaattttatgtgccgaactttgatttctgtggtcacaaactgaacccattggtctctcagttcatgtcgtcacgccatgccacatgtctgcgtcctctgctgcttttttccttactcaagctaagtcctgtcattgctacctcaagtctttcacatctcctccacactcagataatctcagtggactcttggcttcttttacctgttctgatcccccgcctaccttatacacaatattaggttcatcttactgaaacatagctctgaccatgtatcccatgtatgtgttctatctcccctactagactgtaagctccttatgggcaggatctgtgtcggagtcatctttgtatctcccatagtacctatcaataaatatttcttgaatgaacaaca

SEQ ID NO: 7343 - DNA, 458 bp, Canis familiaris
atggctttctgttgcctcttgctgtcttgctttggcgtcctgttacatccgtcaatctccgcacagttgcagtccaaggttgtggctgtttggccgagaggtgagcccagcccatcagtatgcctcttggcacgggggcgtctcttgtcccttcttctggctggctggtgcagggtctgctgtcttctgggttctggagccaccctcgtggtcattggctcccatgccgccttccaccagatggaagctgtggatggggaagagctgcagatggagcctgtgtgaggacctgcgggcctctggaatcggctgcctcatccctgttcccccgctgccccgcttggccccgaggcctggccaaaggcctccttcccatctcgagcccagggcgggattccagctgtggaaataaagctgttacagttgtcattcaaaaaaaaaaaaaaaaaaaaaaaaaa

SEQ ID NO: 7344 - DNA, 543 bp, Canis familiaris
ttgatattaaatacagtttcctttgttttaagcatttatgtggtaaacacttacaagctgttgtgggacatcgtattcaaaggtcaggaagtcaggtttggggtttttttgtgtgttttgttttgtttttttgtttttttttgtttttgtttttttggtaagtctattacattgtaatagtgttctggagacaatctaggttaagcaagagcaaagtgccattgtttgcctttaagggggggagggggtattctctacacattgttctgtgtttaactttgcactttctttatataatagtttgcattttggttatttgcgtaccctggatactttcaggaagaatgaattaaatattcagggtgagtgagttaggtataagatctgaagttttcagctgtgaaaacaggaaaaatatataacattttaacttgactgtggaaaatgacggttgcatgtttctaatttgtatgtttccatctttgtgataagatgctttaataaatctcttaaatattgaaaaaaaaaaaaaaaaaaaaaaaa

SEQ ID NO: 7345 - DNA, 605 bp, Canis familiaris
tggtggtggccaagcatgcagcgagctggcctggttggaccgtgttccctgagagtgggggcgcttgcccaggagggaccagggtgtgcccatggcctgctccattcctcagtgctgaacagttcagctacagtcagattctggacaggggtttctgttgcataattaatattgaacctatacatgtgtataaccaaaacggaacaaaagagataaaataaaagcgattttcatttgggaggcggagagtgaattaccaacagggaattgggccttgggcctacccatttctgttgtagtttggggcagtgcaggagacctgtgtgggtgtgaaccaaggcaccaccgccactccccacaataaagcatctgcacttcgctcagtgctacccaagccctcccttcttccctctacccaacctgggcagtaggacgaagggccacagttgctgggtgtttatatagagagtaggttgattttattttacatgcttttgagttaatgttggaaaactaatcacaagcagtttctaaaccaaaaatgacatgttgtaaaaggacaataaacgttgggtcaaaatggaaaaaaaaaaaaaaaaaaaaaa

SEQ ID NO: 7346 - DNA, 591 bp, Canis familiaris
ccattgtggccaaacagtggcttctgggccggaagttgtatcgtgcgctgtgaaggcatcaacattctggcgagttcgacagaacaaggttgaagtacctggcccttgcctccggcaagcggatgacaccaacccatcccgtggccccctatcacttccgggcacacagccgtatcttttgctggacaggtagaggcatctgccccacaagaccaagcgaggcaggctgccctggaccgcctcaaggtgtttgatggggatcccaccaccctatgacaagaaaaagcgaatggtggttccagctgccctcaaggtggtacgcctgaagcctacacgaaagtttgcttacctggggcgcctggctcacgaagttggctggaagtaccaggcagtaacagccaccctggaggagaagaggaaggaaaaggccaagatccattatcggaagaagaaacagcttatgaggctacggaaacaggccgaaaagaatgtggagaagaaaattgacaaatacacagaggtcctcaagacccatggactcctggtctgagcccaataaaattgacttattcatcataaaaaaaaaaaaaa

SEQ ID NO: 7347 - DNA, 108 bp, Canis familiaris
tccaggtctctcctatggtgggtgctttgtccccaacccttgtgcttgctggcttgtgaatccgctcaataaaagtgtcgagaggtcaaaaaaaaaaaaaaaaaaaaa

SEQ ID NO: 7348 - DNA, 686 bp, Canis familiaris
attgttcttcccacaatccctgcgcaggtccagctgcgaccagggacctaggtatttcccctgccagattggcggagaagtttcaccaagctctacgacgagctgctgcagtcctaccaggagaagatgttcaacacgtcctgcctgctgaagcagctgaacgagcagtttagctgggtgtcccaagctggctaacctcacgtcaaaggtgaagacccattcgatcgtgcaggtcacgacggtgggttctcagactgtctgactgccaatgttcccgtgggcttcactaaggtggttgtgaagctctttgattctgaccccatgcacggtgatgatcccagaagcagtctccaggaacaatcctaaatttatggagactgtggcagagaaggctcttcaggagtatcgccaaaagcaccgagaggaatgagatgtgaacattgcttctccaaatatgggagggctgagttcctttgaccccaagatgagtgctaggcccctagagagagctctgcatgtcaccaagtgaccaggccttgcctgcgaggcgctcctgtctcctaacccagctttccttcctgctggactccgcactgtaacgcgctacgtttgctgatcatgggaagaactcctgtgtgccactaactcaataaaaccgccaaggaatctgaaaaaaaaaagagaaa

SEQ ID NO: 7349 - DNA, 574 bp, Canis familiaris
ttggaaaccaatacagccgcatgcagaagaatgaactagactactttattcaccctatacgacataactgaaaatggattaaagacttaaaatgtgaaaccagaaccatgaaagtcttagaagagagcatggggcattaatctctctgacatcagccatagcaacatttttctagatatgtctagagatatgtctcctgaagcaagggaaataagagccaaaataaactgttgggatttcataaaattaaaagcttcttctgctcagtgaaagaaacataaaactaaaaagcaacgtacaaaatgggaaaagatatttgcaaatgatatatccaataaagggttagtaaccaaatatataaagaacttctacaactcagctctctccaaaaagaaataatccaattaaaaatgagcagaacacatgaacagacatttctccagagaagacctgtagatggccaatagactcatgaaaatacattcatcatcacctgtcatcaaggaaatgcaaaacaaaaccacatgagatatcccctcacacctgtcagaatggctaaaattaaaaaaaaaaa

SEQ ID NO: 7350 - DNA, 696 bp, Canis familiaris
tctcaaatgtcttggatcctggtcgaaaccgtgtatcacccagttagaacttggtctcaggattactggattgtttctcaatactcaaagtgagatactgttaatttgttaatataacttcgttactgagtgctcacatacaggggagtatgacaaggtggggtcctttttcatactctgtccctctctatgtctgagtgttagaatacgttttaatgttgcttcagtgattctataatgtaaaattatttctttttaatgagaaactttgcatttgttaattatttttttcaatggttgagcagattttttaaagaatttgtcaaaggggtcacttttgtccatcccttttacacttttcagattctcagagtagctcatctcacctttaaaaagaatatctcaatctctttgctatgttccagccattaatttgaacgttggaagatttttataaaaagttggagactacagaagatacaataggttattaaaaagcagaatttactcaatactgagcagcagatatagtttgtagataggataagaaggaggacactaaattgaaacctttcagatgaatccattttagcattgactgaatagataggtaatcatttatatagtttttattttttcacttaatgtgattttactgaaacacttgagtaaggggaggaggaagaaaaccaaaaa

SEQ ID NO: 7351 - DNA, 549 bp, Canis familiaris
aaccacttgaggaacggcccactgggaggacccaaaggtgatcttggcccaataccagtgcatgaggcttcttgcttcttagcccacaggcttgcaagctttagaatcttcttggggagaactatgatgctgggttcccaggccccattccaataagctatggaatctggatctatggggctgaagcctgagcagtggcatgtttgaagagctatctggtaacattgctgtgctgccatggatggagaaccacctgagctacttctgagcggtcagtgtgatagcgatttcctgggagagcccctgtttatgcctgttgtcttgggtcccacgcagtgttcatatttgcactgcatttgtcatttgttaaccagattgtatcattaatagttgtgttacaataagccaggacagggtttagttgagctccactttttatttccagcttctgccaaggattcatctattaggatatgaagtctgtgtgtgatgggggagtgttcaaaataatcattaataaagatgacttacttaacaaaaaaaaaaaaa

SEQ ID NO: 7352 - DNA, 543 bp, Canis familiaris
taagtcaccaagatgctgacattgaagatttcaaggcttaaaagaaggaactggaggaaattgttcagccacattatcagccaactctatggaagtgcaggccctcccccaactggtgatgaggaaccagcagacacaagatgagttgtagacattgctctgctagtgctgtaatattgtaaatactggactcaggaactttcgttaggagaaaattgagagaacttaagtctcgaatgtaattggaatcttcaccttggagtggagttgaaaatgctatagcccaagtggctgtttactgcttttcattagcagttgctcacatgtcttggggtggggggaaaggaagaattggctatcttaaaaagtgggtaaaaaagctggttttagggcgtgtgttcaccttggaaatgttctatttaacaattgcgtcacgcacatgtggtgtaggaactttttctaccataagtgacacccaataaatgtttgttatttaccaaaaaaaaaaaaaaaaaaaaaaaaaaaaaaaaaaaaaaaaaaaaa

SEQ ID NO: 7353 - DNA, 513 bp, Canis familiaris
agtccggccattttcagtttcccagacctcgttcacatagacctattagtgcaattgtaactggattgaagtgtcgttaatatattggaaggttttgtttccttagattagtaaataatcatacagagttttattttcaagttttcccttttgtgcactgtccctcatgctgtcctctccaggggacatgttcctcctggggatcataatttaatgaagatatttccatattaaagtgaggtaggtggggtattaacgtgaaagggagggagatgatgcatttcttctggattatgtttgaagtgttaaagatggctaagtattaaaagcaccaaaattaaatccttagcaatcagaacacttgcttcactagattttgccaactgccaatcatgttggactgagctaatctgttcctctttctgaaactattaaggtaaataattaacaataaaacttcctcttataaaggcacaaaaaaaaaaaaaaaaaaaaaaaaaaaaaaaaaaaaaa

SEQ ID NO: 7354 - DNA, 670 bp, Canis familiaris
cagctatgaccattaggcctatttaggtgacactatagaacaagtttgtacaaaaaagcaggctggtaccggtccggaattcccgggatcttggcgcgtccgggccttcctctcgccgccttcctgctcggtccgcagctcggcgatccccggccccattcttcatggcgtcgctcctgtgctgtgggcccaagctggccgcctgcggcatcgtcctcagcgcctggggagtgatcatgttgataatgctcggaatttttttcaacgtccattccgctgtgctgatcgaggacgttcctttcaccgagaaagattttgagaaagaccctcagaaaatatatgacctttacgagcgagtcagctacaactgtttcatcgccgcgggcctttacctcctcctcggaggcttctctttctgccaagttcggctcaacaagcgcaaggaatacatggtgcgctaggcacggtcgcgtctcgcctgtccagctcccgactctatttaaggactctacccacccgcccccatgccggcgccctccgtgggatcccctttccctgcggcgagactgaaccccttgtcctccggtctccggcccccgcggagagaggccggggctggccgtcccccgtccgtccacaataaagcgaagctgccctcttgaaaaaaaaa

SEQ ID NO: 7355 - DNA, 642 bp, Canis familiaris
acgcaagttccaggcgcggaagccggggaagagcaaggcggcggcggcggcggcctcggagcggaaccggggccccaggaagggtggtcgtgtgatcgcccccaagaaggcgcgcatcgtgcaacagcaaaagctcaagaaggatctggaggtcagcatccggaagaagattgaacatgacgttgtaatgaaggccaacagcagcctgcccaagaagctggcgctgctgaaggccactgccaagaaggaggcagcctcttcttcctccaccaagacaccttcctaagggcactggcccattggaggccatcgccacagcctccgtgctcagacctctgcaggtggccccacaggtggcactgcaaggagaggccgtgctctccagagcctcaggtggcacacacctcagatttcattggaggccaagcccgtgagcaggtgatcagcagatctggaaggcactggtcagcttgtcagggtgccgaggactccagaagggaaggaaatgtttgcctacttcctgctttcccctccccctccccaggtcttgtctccactggtttaacccagagcaataaacctgactgtgattcttaaaaaaaaaaaaaaaaaaaaaaaaaaaaaaaaaaaaaaaaaaaaagg

SEQ ID NO: 7356 - DNA, 530 bp, Canis familiaris
gtgtctccctgagacttggccaaagtttgaaagagccagatgcagtccccacgtaaagctttctctggctgagctcccatccttctgcttatatgggagtcctctcgcttgtggagaatcacaagcacttaattgaacctggagggccaaggtggtctttcaagcagagatccaatggtggggccacaacggtggggcttagaagaggtccctttaagatcaacttcccctggccctttgggttttacaccaagcttccaaccttgggaatctgaggcctgttggctccctgcaacttgggcaagcaagagaacaaatcgtctgaagattttcaccttttatttttagagattccatacagcggcattttatagccaatgattgtggtttcaagtttattttaatctgtagcaaagttttgtaatgattttctaatctctttctgagtactctgtggccctgcattatgaggcacctaccttcattttgctaatgcttattctgaataaaagtctttccttgcaaaaaaa

SEQ ID NO: 7357 - DNA, 572 bp, Canis familiaris
cactaccccaggatgaggggagtacattgctccctgaagcagtggataaaccataagggacaaacaataagcaaacgcttgggaagaaaggtcagcagtgagatatccataaggacgttaaaacacccggacatattcctggcagaaagttatgcattgtctaggactgagcatgcccagaaaatgccagagagaccctaagctctcgcctctggctacatcttgaaggcatgccccaacaacattcactcagaacatcccagcaaagactgggagattcttttggttccagatatttaaggaaatctctgtccaattattagccgaatatgaagctaatgggccactttaagtggtcacatacaacagagaattgacaattgtgtaggattagttcataaaaatcactaaagcacacacaatagcaactacaaaaagcatcaacaacagcaaactctaaggtgagggttgagagaatctgatttcccagtgtcaaaatgcccatttttcaagaaaaaagttggcaaggtatccaaacaaagtacaaccagtatacagaaaaaagaaaaaaa

SEQ ID NO: 7358 - DNA, 498 bp, Canis familiaris
tttccgtagcagaacactgtaaaacctcccgtgtctgttccagcagctgcaggtctccactcctctgttgtctcatgagcacacgaaagctgggtctcacctcgagcacaggggtctcttctgagcggccttggtcatcgggagcagatgcgctggggcaggagtgacactgtaatcacagggcagggggttgggggggagggaaggcgggaaaacctttattttgtgtaacccagacatgggggaaatggccgctgccatcacaagctatgcattttctcagtgtttccagcgagcttgatgtcttgcttggaaagtggatgtgcgtctgtgtttgtcatgacaacttaccagcagaaatcctcattcctttgctacagatttaccaaaaattgtcaagtcttttcagttaggagtttctttaaatgtatagtattttagaaaaaaagaatcaataaacagttgatctcgtgtgacaaaaaaaaaaaaaaaaaaaaa

SEQ ID NO: 7359 - DNA, 517 bp, Canis familiaris
  misc_feature (1)..(1): n comprises a, c, g, or t, or includes no nucleotide
ngacgcaaatggccggtaggcgtgtacggtgggaggtctatataagcagagctcgtttagtgaaccgtcagatcgcctggagacgccatccacgctgttttgacctccatagaagacaccggggaccgatccagcctccggactttagcctaggccgcgggacggataacaatttcacacaggaaacagctatgaccattaggcctatttaggtgacactatagaacaagtttgtaccaaaaagcaggctggtaccggtccggaattcccgggatgcctggacttctatgtggtgctgggtaggccaggtttcagcatcgcagacaagaagcgcaggacaggctgcattggggccaaacacagaatcagcaaagaggaagccatgcgctggttccagcagaagtatgatgggatcatccttcctggcaaataaattcccgtttctatccaaaagggacaataaaaacttttcagtgaaaaaaaaaaaaaaaaaaaaaaaaaaaaaaaaaaaaaaaaa

SEQ ID NO: 7360 - DNA, 617 bp, Canis familiaris
  misc_feature (138)..(138): n comprises a, c, g, or t, or includes no nucleotide
caccattgaaatgcattcaaaataggggtgcttagggtggcttcagtttggttaagaaacccaaacttcttggttttgggcaacaggtcctgaatatcagggttcgtgagattcgaattccgcgtcaacacctcagcnagggagtctgccttgagatttctctgctccttgctccctttggcccttgccccctggcttctcaaaacaagcaccataatccgcctatctctaatttcttccaaaaattaaattctttaaaggaaggaaaaacaatttcaattaatcctccaatacctaatcaatgtttttctgtttgaaaaggtttctaagaataattttccagtgaaccggaccagaactccccaaggggctttgttcctttgtggagctataattctattaagttgctatgttttcagcaactaaaacagtgccttggcacttaataagtatttattgaatgaatgcctatgtctctgcctctctctctgtgtttctcatgaatgaatgaaagaaagaaagaaagaaagaaagaaagaaagaaagaaagaaagaaagaaagaaagaaagaaaagagaaaaaaagaaaagaaaagaaaaagaaaaaagaaaaagaaa

SEQ ID NO: 7361 - DNA, 406 bp, Canis familiaris
  misc_feature (1)..(1): n comprises a, c, g, or t, or includes no nucleotide
nctcccgcaggcttgacctctcttctcgggattcaacttgaggaaggggccctctgatatgctcgtgtccacaaggggcttgcaacaaaggccctggcttgacccttccgaaccggaaggaaagggaacttgaaacttgcgggaccacccttttggaagccatccccatgtccatgccgcccagtgtcgacttcaacaagcctttcctcatcatcatcgtcgacagagacaccaagagtcccctcttcatgggaaaggtggtgaaccccaccccaaagtaactgccttgtgggtcaggtcccttccagataccattaaagagtgacccaccccaggaaaaaaaaaaaaaaaaaaaaaaaaaaaaaaaaaaaaaaaaaaaaaaaaaaaaaaaaaaaaaaaaaaaaaa

SEQ ID NO: 7362 - DNA, 447 bp, Canis familiaris
tgtgagacgctcatccacgtctgttttgacctccatagaagacaccgggaccgatccagcctccgtgactctagtcctaggccgtcgggatcggataacaatttcacacatggaaacatgctatgaccattaggcctatttatggtgacactatagaacaagtttgtaccaataaagcaggtctgtgtaccggtccggaattcccgggatctccgatatgcatcccgcaggaagggatgggggtgacatcctcaatccgcccaatcttcattcctgagcgggcaagggctctgagggctgatctggggatgtcacccccatcccctccgatagcacccgcaggaagggaggtcgccgtggtcgccgtctgtgaacaggattcttcaaactattttctgttaataaattgcctttgtgtaagctaaaaaaaaaaaaaaaaaaaaaaaa

SEQ ID NO: 7363 - DNA, 626 bp, Canis familiaris
  misc_feature (477)..(477): n comprises a, c, g, or t, or includes no nucleotide
ggccccattaacgggaccgatttttgaacaatcagcacaagattgtgctcaaactctcatccgagaattcaaatcatgtgttacgtctgttaactgctttggagacttcataaatttttctaggaaaggtgttggtggtttttttcactgtttttggaggactgatggcatttaactacaacccgtgccctccaggtgtgggcaatccctctgctgctggtggcatctttttgcctaccttggtagcccactctgttttttatactgtgtttgaagaactgtgtctggatagcagcatctctctctgtgtttttgctggtgagaattaggggacacatgagtgtgtatactccggaaaaccctctccttttaggagacacaggatgttttggagtttggtccaaaagggatccggaccaaatttaaatggccaggccaaggggccaccaggggaggaggagagctcattaaggatancgaagagggaacagaactccaggctgttgtgtgatcagtgcccattagttatttgtccctggaaaggggtcttcttctcagagccattcacagaataaatggtaaggttgatggaccctaaaaaaaaaaaaaaaaaaaaaaaaaaaaaa

SEQ ID NO: 7364 - DNA, 649 bp, Canis familiaris
  misc_feature (367)..(367): n comprises a, c, g, or t, or includes no nucleotide
cccgcgcatctgttggtcggcgtggcccaggacggggtgtcagagctggggtccggcccggaggaggccccgtgagcgtggagctggtgggctccgaagccatcggctgcggctgcacggcctggggcccgaggacggaggcgtgtatcactgtgcccccagcgcctgggttcagcacgccgaccgcagctggtaccaggcgggcagtgcccgctcggggcccgtcacggtgtacccctacacttcacgccctggacaccctgttcgtgcccctgctggtgggcgcgggggtcgccctagtcaccggcgccactgtcctcggcaccatcacctgctgcttcatgaagaggctgagaaaacggtgatncctggctcctcaggccttgcaggtgcccagcgtcctccggcccagctccaagacagcctccggtcacctggctgccccccccactccccttcctttaatttatttgaccccttgccccccactccttccttcccgacccccgctctggccttctgttcttgatctcggcccggcccagagggaggccattccctggcctagaattagtttttctaaaatgtgaataaacttgttttataaaaaaaaaaaaaaaaaaaaaaaaaaaaaaaaaaaaaaaaaaaa

SEQ ID NO: 7365 - DNA, 662 bp, Canis familiaris
tcagaagaaggtaccaacaggagggagaaaggaatcctcaaccttcctgaagaaggtgtaaagccagggaagcaagaaggaaatctttagaggaggctgattcaacctggcccagggtttaaagaggacactcccgtgaggcatttggaccctgaagaaatgataagaggagtagatgagttggaaaggcttagggaagagataagaagagtaagaaacaagtttgtgatgatgcattggaagcaaagacattcacgtagccgtccttatcctgtgtgctttaggccttgaattcttttttgtctgatattaaaatctggcccctgctttctttctgttagcgttttctgatgtatctctgacctttgttttacctttaatcatctggtggaattttgttttaggtagcttccttgttaccaccatctcactggattttgtattttgacccattccagaggtctgtttttcaattggaaagtttaacatatttgcatggaaatatattcattctatattgtaaagtaaaacagaacaggttacagagcagtatatttagtaccagttcacatgtaggattaaatcccaaatttgtgtgcgtgtgtgtgtatacatacatacatatatcaaaaatttgactgcttaaaaaaaaaaaaaaaaaa

SEQ ID NO: 7366 - DNA, 572 bp, Canis familiaris
gttttagcgcctgcctttggcccaggcgtgatcctggaggcccgggatcaatcccacgtcgggctcccggtgcatggagcctgcgttctccctctccctgtgtctctgcctctctctctctgctctctgtgtgactatcatagataaataaaagttagaaaaaaaaaaaagaaccacaactcagtggcaacaaagcagtccagtttttaaaacgggcaaatgatctgaatggacatctttctgtagaagtcatgcagatggccaacaggtacatgaaaaggggctcaacatcacttaatcatcagagatatgcaaactgaaaccacagtgaaataacacctcacacctgttgaaatggctttcatcaaaaagactacacaaatgttggtgaggaagaggagaaaaacgaacgcttgtgcactgttaagaatgtaacttggtgcacccactatggaacagtgtggagtttcctcacaaaaataaactcatgggcaccagactgactcagtaaacgaagcatgcaactctcgatctcagggtcataaggagcctgtttaaaaaaaaaaaaaaaa

SEQ ID NO: 7367 - DNA, 591 bp, Canis familiaris
ttggtctagaactcctatggtcacattattatgataataaggtttaaaatccatgtatcttcttcacatactaacatagacatcactttaccaaataatatggacagcaattgtgctagaaactaagaatgctcagtacaacctaagaaaatcccccaactataatgtcctaagaaatgggagctaatacttgaatggtccatttaaacagattttatacgttaaaataaagattatacaagccaccgttcatgaaaattttatagtaatgtgataatttatgaccttagtctcttttcttgactatgcaaagccatcagaagaaacgttagctatttggacaaccttgaaacggactccaggtgttttccatagccatgaccattatgactaaatcctgccaccagacatcttactagaatgaaacaaaggaaattggaaattcatgttttgtaacaggaccatttgtttccttacttttgagattagaagtttgttgttggatatatgatttgcaaatatttttgtccagtcgtgtgatttatattttcattctaagacttttcagagtaaaattttgaaaaagtccaa

SEQ ID NO: 7368 - DNA, 459 bp, Canis familiaris
atttttatgtgacattttagtatgttttgtacatagatttgttaaggggtcagccatttttttaattggatctcgggaatgaccaaaccagccttcggagcgttctctgtcctacttcttggaaactttacttgtggtgtgaccatgttcattataatctcaaaggagaaaaaaaaccttgtaaaaaaagccaaaacaacaacaaaaaaacaatcttattccgagcattccagtaacttttttgtgtatgtacttagctgtactataagtagttggtttgtatgagatggttaaaaaggccaaagataaaaggtttctttttttccttttttgtctatgaagttgctgtttattttttttggcctgtttgatgtatgtgtgaaacaatgttgtccaacaataaaccggaattttattttgctgagttgttctaacaaaaaaaaaaaaaaaaaaaaaaaa

SEQ ID NO: 7369 - DNA, 641 bp, Canis familiaris
gtggtttcttcagaacggtactctagtgtttaagtgtattttttcaagtagttttttaagtggatttttttaaaacttacaggttttggtttgaattaaactttttgttagatatatatatttcttatgtccagtatcacactgcaagtgttttattaccaaattctgttagtacacttacaagtgaaatagtggaatcagtgaaatttttcacagtagcttggttatttttcatatagaagtaaacttagaattataaaaatatagcccatattaaatttaaaaataggcccacattaaatacattttccagaaatacgtataccacatgcagctttgagctgttaagcatgttgttatcaaacaattattttagaactttaccatttctgcagtataatccttaccttggatattttacgaataaaatgtagctgttttcaatgtcaattaatttatcagaacatgaatagaaaagaacattgctgaattcctatgtgtatgtaggttggttttttttttttgaatgcccaacccattattataaagtacctcaaaactaattagttctgttcttaacagttgtcagtggtcagaaagttcatataaactggttttccgcatttttctataaaaaaaaa

SEQ ID NO: 7370 - DNA, 607 bp, Canis familiaris
tgtgtttccgtcacaccccgtgggacttgagcacgtaataggtattcaggatttgtagaatataaggatgacgacctcacgtaaatgaacccacaaaagggattgatgcaaagaatcatttgagactctgtgagttatgagaatgcagaaaacttagaatcagtcactaaacctgcaggtgacttttgcaaaacgtatgtttttttaagggcttcttttaaaatgtttgcctttttccttaccttgagagtattgggttggatttggaaactgtacctactgatggatgtgtgggactttttagaattcatccatctgcatcctttcccttcttttgaggcgacctaggtaattttgcgtacaatgcgtatgaaccacccccaaatgaaaatggtacgagcctctgtgttgtctcttgcataaggacttaaagattgtttttagtttttattatggaaactttcaaacatacctgaacgtagagaaacgtacggcgaccctcatgtatctatcacccgcaacgaccatcaaatcatagcttgttgattgttttgaaacaaatacaaaatgtatcatttctttaaaaaaaaaaaaaaaaaaaaaaaaa

SEQ ID NO: 7371 - DNA, 648 bp, Canis familiaris
gagaatatgttctggctctgatgagtttgagatgccagtgggacatccaagtgcaagttgtcccaataggcagtggaatacgcctgactggagcctgcgagaatagtctaaatcagaaatagaaatgtgtggcctgtagtgccttgtagacatctgccacaccagtggatgggtttgttgggctttccagaaagtatatacaggcgtaagaaaagaaggcctaggacagagccctgagaagtccccaagtctgatgtctgcaaaggaggctgaacctgcaaagttaattgaggtgaactgtgcagatggcaagatagtcagtggtagaccatggtgtctcagaagccaagggaagaaagtgttgaaggctgatgaataatcaagaaaataaggtctgaaaaaatccactggatttagaaataaggaagttgttggtgatctttgcaaaagtggtttcagtggagcgatgggaacagaggtcaaattacagtgagttgagaagtgagtgggaaggtgaggaagtgaagacttttgagacatttggctcttcccaagaaaaaaaaaggagaaggcaatagctggaaggagacaaaggtttttattcagataagagaaatgctgttggcatagatccagcaaaaggaaaaa

SEQ ID NO: 7372 - DNA, 689 bp, Canis familiaris
ctaccgtaccaatcccccaaggttttgtgttttggttttggaaacacaaagggaaattgggttggtaccccgagtggtttaaaacttcgcaaaattgcctaggtattatcctactgaagaatgtgcctcgcaagctgttgagcccatggcaaaaaacctgttcagtcagcatgtgagaaaaagttgcgagcttaaagcatcactcctgggaccattttgatcatcctcactgggcgccacagaggcaagagggtagttttcctgaagcaactgagcagtggcttgctacttgtgactggacctctggccctcaaccgagttcctctgcgtagaacacaccagaaatttgtcattgccacttccaccaaaattgatataagcagtgtgaaaatccccaaacatctcactgatgcttatttcaagaagaagaagctgcgtaaacccagacaccaggaaggggagatttttgacacagagaaggagaaatacgagattacagagcagcgcaaggttgatcagaaagctgtggactcgcaaattctgccaaaaatcaaagctgttcctcagcttcagggctacctccgctctgtgttttctctcacaaatggagtttaccctcacaaattggtgttctaaatttcttacaaagaacctaattaaacaactgatccattaaaaaaaaaaaaaaa

SEQ ID NO: 7373 - DNA, 630 bp, Canis familiaris
tacccctaggtggtacacaaaaggactaccgattccggaatagttcttttgatcgtatcagaagtatttttcttggcaggcttcttctgagccttgtgaccactccagcctagcccctactcgtgaacttgggggttgctgacctcctaccggcattattcctcttaacccattagaagtgcctctactcaacacctcagtcctcctagcctccggagtatctattacttgagcccatcatagtttaatagaaggtaatcgcaaacatatacttcaagccttattcattacaatctccttaggcgtatattttacgctattacaggcctccgaatactatgagacatcttttacaatctccgatggggtatacggatctaccttttttatagccactggatttcacggattacacgtaattattggctctacattcctcatcgtgtgcttcctccgacagctatactaccacttcacatcaaaccaccacttcggatttgaagccgctgcatgatattgacactttgttgatgtagtctggctattcttgtatgtatctatttattgatgaggatcctaaaaaaaaaaaaaaaaaaaaaaaaaaaaaaaaaaaaaaaaaaaaaaaaaaaa

SEQ ID NO: 7374 - DNA, 628 bp, Canis familiaris
gacacgttgtatcgcgtttcaagaccagagaaggttgggaggggcgctctgtgctcacggacgagcggcctgcggtcggggcgacccaccctttttctacggaaaaggaagccttttatttactattttgtatttatacatggtgtctatgtacataaatagtgacacctatgcagaccccagaccacctgaccaaatgcacacaagagggccgcgcccactggggccggactctccccccaggtgcactcactctggacctaacttgaaacaagcccccatctctccctcctggggccccagccccatggctgagtcccgtctcagtgcagaaggcacccggtgtcatcatgggctggtggacggacagactcccagtttcagagtgacgccaatgaccacgtcttccatttctcagagccgcccagcagcacctggacttttctcggcggctgagggtgctgctcatcttctgactctgctttgatagttggtgtaaatacatcacatgggctcctctgcgggcctcggcaacaggctgaattttgcagcatttttgtggaatagtttgcaatgtggtaaaagtgcaataaaactagagcaaatgtaaaaaaaaaaaataaaaaaa

SEQ ID NO: 7375 - DNA, 101 bp, Canis familiaris
gctgggcctcccggaatgcccaccaaggccctggcggggggagggggaggaagtggattagccctgccctcccccaaaaggcgaagcacgacttgcccagt

SEQ ID NO: 7376 - DNA, 536 bp, Canis familiaris
tctaatagatataatcttgataatatatgattaacttgttctgatacacttcagcagctgaagggacacatattctgtgatgctggccaatatgcattctgctccaacagtgtgcctggcaccatggtaggtgctttattttcactaacctatgaaattctcacttatctatgtagtagatcctattaaagaagaaactgaagcatatagaggttaagtaacttgccaaagtcccacagtctgtggaagtaggattctaacccagcaggcctgaaccagaaaccagccacacatttgtgggacttgatttcacaaccctgagaccatgacctgagctgaaaccaagagtctgaggcttggggcacctgggtggctcagttaattaagcgtcttccttcagctcaggtcatgatgctagggctctgggatggagccctgcatcgggatccctgtctcaatggggagtttcttcctttccctctgctgctccccatgcttgtgttctctctctctcaatcttaaaaaaaaaaaaaaaa

SEQ ID NO: 7377 - DNA, 647 bp, Canis familiaris
cctttcttgggcagctcacagatataacacgcgaaagttaatagctctaaaggtgaaataatccctcgagatgacagacaagcgatgtcatgaggcaccatatgaacacttgccaagtgttgatatttgccttaggagttcagaggagggagacatctttctgggctggggtacagagaaggttttgtttggttgggattggaactaggatttgaaaaaaagaggcggtgtttctcgaggggatgtgatagcactttcctttattctaagagtgatgagatgcctgtgaagggttttaagtaagggagatgtcaggataagatttgaattttgaaaacattactctggctataatatggagaacagatggctggagtaaagtctggcagacaggacagactgttgcaaaagtctttgctatgagaatggagcattcaagttgagctacctagcaaagagtgggatatgttgggctagatcttgggggagaggactcaggtgaaggtttggggttgggggttgtttgggaggctgtagtgataaccctaaaagtggttaacatccctgaaggagaaagtatggagaaaaaaaaacatcagaaggggaagaaataactgttttttaagcactcactttagggaactggc

SEQ ID NO: 7378 - DNA, 490 bp, Canis familiaris
ggtaggtgctgatggtcacgtgggtagagtgcgccagccccggagggacatctgcctggtgaaccgtccctctggggaagtacaggacatctcccggcttcaacgtgaactcgtaggccggcctcccgatccgctccctcggcctccacgctgtactcccgcgccaggggcacggtggggtggtagagacgccagtgcttctgtccctccagctgcaggatgaagacctcgacgtcatcgtaatgcggcgggaggccctgggacccggcaggggttatgtacacgttggagccaaccaaggagccgaagtaacattccagcttctcctggatcctccaaagctcatccttgaatctctgaggttggtgaaactgaatcgtcgcccttttctgatccagatctttcctcagctgcaggaagtgcactctgccggctttatttaagaccttcttcttccccttgacgcaccggcagacgttgacgtctcggc

SEQ ID NO: 7379 - DNA, 470 bp, Canis familiaris
  misc_feature (1)..(1): n comprises a, c, g, or t, or includes no nucleotide
naagagcagttttggccacttataggaggatatggcccactgattccctttattctcaggttgatactctgtagacgatagcttgagcaaagagttcacttttacaatgtatgtttgtgggagtatgatatgaactttcttccctcgacatgttcctaggttgtatctggaatacctcgtcgatagctctgacgtacccagatgcatatagctacctgaaataccgtctcctctataggatcgtttatctcgcttacagcggtgatgcttataatttttatgatctgggaagcctttgcatccaaacgagaagttgctatagtagaacttactacaactaacagttgagtgactacatggatgtccccctccataccacacgttcgaagaacctacatatgtgatccaaaaataagaaaggaaggaatcgaaccccctaaaattggtttcaagccaatgtcataaccatt

SEQ ID NO: 7380 - DNA, 546 bp, Canis familiaris
gcagctttgtgtgtacgaatgctcatgaaagtatggaatcctagtgaattaatgcccttcattatagcaggagaaatgccatatacatttatatctccgcttacagagatggagagctaaatgcccaggagaggatcagagaaccaccaagcccgcctatgagctctaaccgggaagcctgtgatgacttcaagctttgcgaacgctacgccatggtttatggatacaatgctgcctacgatcgctatttccggcatcgccgaggaggcaaatgagattgaaaaaagtctctttccttccagagcctggtgcctggttttgtattcctttacagtagcatcatcgaactacatatacacatacaaattgcttatttcttaaatgttcttgtctggctgttgccctccttcctgccccccagatcaataagctagtgaaaatgctaatgtggtgaaaggtcaaaagagaattaagatgtgtgattattattacataataaactcttggatggatactttcaaaaaaaaaaaaaaaaaaaaaaaaaaa

SEQ ID NO: 7381 - DNA, 572 bp, Canis familiaris
aagggagctagtaagtcacctgcaagagcgaaatgttcaggttttcctaatatctggtggctttaggagcattgtagagcacgttgcttcaaagctcaatatcccatcaaccaatgtatttgccaataggctgaagttttactttagatggtgaatatgcaggttttgatgagatgcagccaacagctgaatctggtgggaaaggaaaagttattaagcttttaaaggacaaaatttcaatttaagaaaatagtcatgattggagatggagccacagacatggaagcctgccctcctgctgatgttttcattggaatttggaggaaatgtgatcagacaacaagtaaaagacaatcgcagaatggtacatcacctgattttgtagagcttttgggagaactggaagagtaataccaatttttatatggttcattttttcaggcttaatattttaaaagtcacagagctttgatactgtttgcttacaattgcctattacaacttaatgtatagatttggtattgattatctgtacttccaagtaaactatggaaaatcaaaaaaaaaaaata

SEQ ID NO: 7382 - DNA, 503 bp, Canis familiaris
catgcagctctggagacaagagccagacaatactggtgtgcttttattactgttcatctatacacttccagtgtcgaaggctggacagatctgctcactttagcactctggcaattaaacagaacccccttctggcagaagcctattcgaatttggggaatgtgtacaaggaaagagggcagttgcaggaagcaattgagcattaccggcatgcattacgtctcataaccagatttcatcgatggttacattaacctggcagccgcattggtagcagcaggtgacatggaaggggcagtacaagcttacgtctctgctcttcagtacaatcctgatttgtactgtgttcgcagtgacctggggaacctgctcaaagcctgggtcgcttggaagaagccaaggtaggtgtttgatagaacacatttaaacatcagtgttatgaaaacttttactttttgccaagtcttcaactcttcattgagctatctccaaaaaaaaaaaaa

SEQ ID NO: 7383 - DNA, 102 bp, Canis familiaris
ctcttctgccgtggccatggtccacgggctctactgcgagtgaggacgcctccaagttctgcaaaaacggtttattatcccaggaggaggccctccccgggg

SEQ ID NO: 7384 - DNA, 626 bp, Canis familiaris
gcctgatgcaacattaggtttttgcttttttcaagaggaaaatcaacttcatgggtaaacgaaaatggctaaacctgtttttgttttagtaactaaagattgtacttctgaagttttgtgcttgagagacaatgccaggatgttttgcccagcctggggccccgggggtatgcccctgccgtgtcctgggggctgcgtctcctgtccttcactccaggccagcctccctcgcccgccctttctgccggcatgcctgccatggaagggacggagcaggcccagaagggagcctgctttgtactctgcctgggcggaggctggtgggggcagcacccccagcaccctcccacaggctctgccctcactccgggtcctgactgctcacagaatcggcccacagacgacctactcacgtgcacgtcaccagagctgcaggtctgctggggaggcccgtgttcagcgcctgtggtcacccccccaccccctcctgctgtcctgtctcttgggccatgtgtgaccatcactgtgccacttactgttactgccttgtgtgagacaccgattaaaccttcctgcctgtgaaaaaaaaaaaaaaaaaaaaaaaaaaaaaaaaaaaaaaaaaaaaa

SEQ ID NO: 7385 - DNA, 626 bp, Canis familiaris
  misc_feature (1)..(1): n comprises a, c, g, or t, or includes no nucleotide
naaaaagggactacgatacgggaataggtcttttgtatcgtatcagaagtatttttcttgcaggcttcttctgagccttttaccactccagcctagcccctactcgctgaacttgggggttgctgacctcctaccggcattattcctcttaacccattagaagtgcctctactcaacacctcagtgcctcctagcctccggagtatctattacttgagcccatcatagtttaatagaaggtaatcgcagaacatatacttcaagccttattcagtacaatctccttaggcgtatatttgtacgctattacaggcctccgaatactatgagacatcttgtacaatcgtccgatggggtatacggatctaccttgtttgtatagccactggatttgcacggattacacgtaattattggctctacattcgctcatcgtcgtgcttcctccgacagctatactaccacttcacatcgaaccaccacttcggattttgaagccgctgcatgatattgacactttgttgatgtagtctggctattcctctgtagtgtatctatttattgatgaggatcctaatcaaaaaaaaaacaaaaacaaaaaaaaaaaaaaaaaaaaaaaaaaaaaa

SEQ ID NO: 7386 - DNA, 548 bp, Canis familiaris
cgctttgaaggcaaagtgacaagctgcggagagtatcttcaagcgactattccgtttttgagaactattatactcctgaagtgacccagtgttttgctgcttcgttcctgtaagactttaacccatgagattggacacatatttggacttcgacactgccaatggcttgcatgcctcatgcaaggctccaaccacctagaagaagctgaccggcgccccctcaacctttgccctatctgtttacgcaagttgcagtgtgctattggcttcaacataatagagaagataccaagcgctggtgaggtggattgatgatgagtcggctgacacccccggagtcagcatggacacagttgtgaggataatgtgaatttacccaaacctgtggaagcctttaaggaatggaaagagtggataataaaatgccttgctgttgtccaaaaataaggaccttcacatagttattgaaataaacacttgcacattatgctttcaaaaaaaaaaaaaaaaaaaaaaaaaaaaaaaaaaaaaataaaaaaaaaaaaaaa

SEQ ID NO: 7387 - DNA, 595 bp, Canis familiaris
gcctgcagcttcacacaggctcctgcacattgtacagccgtataagcgtgacccccatgtggctatgaattgtgttcgccagaacacatgataagggcaactatcccaagggctattttaccctcacattacgagagggtccagatgcctgctgtcagatcgcttccgttggcttttttatggtccgtgcccagtcctcatggaacgtacaattttatgggtgtccggcatgatcccaacatgaagtatgagctgcagctggcaaatcctaaagagttctaccacgaggtgcacagacctgtcccacttcctcaacttcgctctcttgcaagagggtgaggtctactctgcggaccgagaagacctctatgcgctagttgtttcctcacctcccccttcttcacactccccaagactggagccttttacaaaaccccaaaaagaagctggtgacattcagcagcttggttccttttctccctgtttgtgcttcttgtaattgatctctcgtggcatgtagtcctgagcaaaatgtaataataaattttgtataaataggaaaaaaaaaaaaaaaaaaaaaaaaaaaaaaaaaaaa

SEQ ID NO: 7388 - DNA, 581 bp, Canis familiaris
atagctgggaatgcccacaagagtaggtaacccaggtggctgtggggcttctctcctcaccagtctccagcaggggactgtttaacctgaaccgataatactagcaaacctgcagggagttgctcacccacgagaagctgttttacttcctgttccttaaagatctgattagtctttaagaaaacttgaagatgaaggcaaaggtggtatgtaatatcttagaagaatggaacagttaggagaaattgttggtagggagggaggcagacagagtgacaagggaagtgctatacattaaatgcatgtgagtagctaacagaagaggtttaaggaggtcccgggagacctgtgccgccctcatcccatgagcctgcctgttagtgccctgctgtcactgaattatggatcctcccatttggagggggatcttggggttagactgacgagaatgggaagggttctagaatgagcgtcaagtttctcttagactctgaagtagatgatgtgcacacaattaaagtggttatgggaaaaaaaaaaaaaaaaaaaaaaaaaaaaaaaaaaaaaaaaaaaaaaagaaa

SEQ ID NO: 7389 - DNA, 631 bp, Canis familiaris
ggacggttcggacagtggcgatcatgaccgggtccgtaacacacttcttcagatgtttgaccggaacacacggaggggacgtcacgctggaagcctcccgggagaacagcaagcctcgggccagcttaaagcctcggaaagtgtgtacaggcggtaagagaaagaaggacgagattagtgtggacagtctggacttcaataagaagatcctgcacacggcctggcacccggcggagaacattatcgccgtggctgccaccaacaacctgtacatattccaggacaaactcaactaaggaagccagcgcagggactgagcccggccgtcttctcagcggaggggcgtcatcctccctgtgagaagtcacgggccgctgccccctcccctggatggctggggggcctggccttccccctgcggcgaggcggcccgggccgctgcccgcagaacaccgttcagcgcggatgtggtggacagtgcccagtaaaggccatcactcaaaataaatgtatttatttcagtctgagccttcctttccaatttgtagaccaaaaagttcccacccaggagaaaagccgtctgatggaacgtgtctctctctgcagcctcccccgccccatcacactcgcg

SEQ ID NO: 7390 - DNA, 378 bp, Canis familiaris
gcgtccggggctccctatgtgcatgtcacagcaggcagagtggtcagaagcacgggccggaccaggcagtggccggcaggttcccccttcaggagagcctctgggcaatgcgcacccagcttcactggccacggggtccactcccatccagccacaggcccccccgctcctcctcggggctccagctgtaggccaggcacacgggcctcgaccctccgcctgccctgccctcagccatcacgaccaccgggtgggacccttcgcgtagtcaggaagcgagtccactcagaactgcccgccttggaggaccgtgtccgagccaggccgccctggcccctgaagcttggcttttacaggcccaaggaagctcggtcttac

SEQ ID NO: 7391 - DNA, 548 bp, Canis familiaris
gcggatcttggaggccatgctcctggggtggccaggaaggcctgccaagatatttgtgagaaatctcccatttgatttgtacatggaagatgctagaagacaaattctacgaatgtggccacgtgctgtatgccgacatcaagatggagaacgggaagtccaaggggtgtcggtgtggttaagtttgagtcgccagaggtgggctgagagagcctgccggatgatgaatgggatgaagctgagtggccgagagattgatgttcgaatcgatagaaatgcttaagcagttgccttgttttagagcatcgagtagccagacctctgaatttgtattttttgcttgttaaccattttaatgttgttggctggagtgtataaagatgtttaaaaaattcagttgctttttggggtaatttgaattacttttttaatgaccggggttccatttgactgtttgcattgagattgcaatgtgcgcaattttttttgtagttgtggcatcttgttgacatcgatatgactttgataataaataccagttcctgaaa

SEQ ID NO: 7392 - DNA, 676 bp, Canis familiaris
aaatgtgttagacagaattgttgaagagacgtgcaaagtccgggattcaatggatccgtgaaatctgagggcagccttttcaggttgtcgttgaaatgtaaatgacctaagtagagcctaaatgttgtagaccggttgtagatggtaaagatgttaaaaagtttgtcttttaaaaagcttaacttgaaggtgttttaagagcccttcgaattcatgggttagtgattgcgtcatttgacacctagatcttaagctaatccttgctaaaacttgcaaatagttaattagtggtaggatgaaaatttgaagagattagaaaattgaagtggagaactcgcaagaccgaagtacaggaaggtgaagatttaaaagaccagaagtaaaggtgaagaaaagacttagagaagataggaaaattggaagaaaaattacacgccttttagaagacaaaaataatttaaacctcgaaggcaggaagcagaagaaaaaaatatttagagaagaacaaggcaacaaggtctcagatacaaattgagaaagccagaaattggaaacgaggtggaaaataaggtcagggaaagtacatcaggtagaaaatgaaaagctaggacaaccgctgaatataggcacataagatagacgtcaaaaaaaagagaagtttaaagccaaaaaaaaa

SEQ ID NO: 7393 - DNA, 624 bp, Canis familiaris
ggccatttagggggacactatagaacaacgttgtacaaagaagcaggctgtacccgtccggaattcccgggatcggagtctgaagaagacgcgcagaagtgcacctcgtaaggggaaggaaaagaaggaagaacaggtcaatcagcccttggacctcaagttgctgaaggagaaatgtgtttggtgtctgccacatatttgcatccttcaatgacacttttgtccatgtcactgatctttctggcaaggaaccatctgtcgcgtaactggtgggatgaaggtgaaggctgaccgagatgagtcttctccctacgctgccatgttggctgcccaggatgtggcccagaggtgcaaggagctgggcatcactgctctccacatcaaactccgagccacaggaggaaatagaaccaagaccctggacctggggcccagtcagccctcagagcccttgcccgctcaggaatgaagattgggcggattgaggatgtcacccccatcccctccgatagcacccgcaggaagggaggtcgccgtggtcgccgtctgtgacaggattcttcaaactattttctgttaataaattgcctttgtgtaagctaaaaaaaaaaaaaaaaaaaaaaa

SEQ ID NO: 7394 - DNA, 664 bp, Canis familiaris
cactgctggtgctctgcctccttgtcttccgtgtgtatctcagtaagtcttcaatatgtcggtgttctgagttttgtgtaacttttaggtcaatagaagaatttaggttcctagatggagagttggtccaggcatgtggtagatggtgaaaactagctctacagactgctagctttacatttagtcctgcttttgaatcatgtctgacctcgggttgtaggacaggatggcaagcacggagctggtgaagtacacaccatgcctaccagcctgctaataaccaggagcttgctacttactagttgtgtgacttgggcaaataattaaaatgctctgggctaagcttttcatttctaaaatggagataatagtacttgctgcataggggccatgtgagggttgactgagcctggtgtttagtaggtccttggaaagggatagcttcttcgttgttttgcacttgaaaacctagcaaaacccagaggtaactgagaaatcagcctgtggatgggccaggctggggagtgatgggactggtcggggaaaggcttcagtccagctctgagcctgagatgtgacagctcagagataaaggctgtggagagagctcgatccagttgtttgtgcctcagttctctctactgttgaatgaaaaaaaaaaaaa

SEQ ID NO: 7395 - DNA, 530 bp, Canis familiaris
aatcagatgtagaatgtgctttgtatagagacagttggggatgacatttttttgttttgctaagaatgcacatgcttgctgagatgcagatagatcctaaggatgaagcaggttttcagagggatggctgtaaggagattaggtactcagttttgggactgtttaacttctgaaatgtttattaatacatccatgtggcaatgtcaagttgggcatgtaagggtaagaatagaccctgtatataataatatttgggagctttagcgtatgggtggcatttaaagcactgacactggccatgatccaccagtgtgttgagtaaagatagaaaagagaggggatccctggatggctcagcggtttggcgcctgccatttggtcccagggcgcgatcctggagacccgggatcgagtcccacgtcaggctcctggtgcatggagcctgcttctccctctgcctgtgtctctgcctctctctctctctctctctctgtgactatcatgaataaataaataaaacctttaaaaaa

SEQ ID NO: 7396 - DNA, 106 bp, Canis familiaris
tatgaagaccttctaaaacatctgcacactgaaattcgtgtatctgtgaaagatgtgaatttcccttaaattctgcttctgaacagctttttataaattgtacttg

SEQ ID NO: 7397 - DNA, 457 bp, Canis familiaris
cagccccatgctccttccactggccgggcagtgcccccagccctgcccccaggcttagccactgctcccaggggggcaggaggagcttccatcaccatccggggaccccgacagcggctggcccatccgatccacacaccagcagggacctcggcgctgcccctgggaggagcggcactgccgcttccggtagaagcccttatggtcacaattaggcacgtagagggtgtgaacccctcgatacacttcggtctgtagctgctgtagcactgagtccagatgtctgcggcacgggcccatttcagcatcttggacaccaccaggattgggccggccggaagttgtagtagaggccctggattcctttgttggtctctgcggttcacatcctgtggacgagtggtccctgcttggggtttgctctccttaggattctcccccgggggcccgcgcgccc

SEQ ID NO: 7398 - DNA, 301 bp, Canis familiaris
tataatttattgagtttttacaagatgtatttgctgtagatttaacacttcgtacgcaatgcttctagacttttatagcccggactgctacctttcaaagcttgggagagaaagccgtgaattcagtcctgttcttttttgtactattactgaccctaatttggatggctattttttgctcatcagctggccagctgggcagtggttcagggtggtctttgttctcagggccccccgccttatgggggccaaaggtgtcgacccaaactggtagccgtaccttccaaaaaataaacagaga

SEQ ID NO: 7399 - DNA, 111 bp, Canis familiaris
cgggatcgagtcccacgtcgggctccccgcagggagcctgcttctccctctgcctgggtctctgcctctctctgtgtctctcatgaatcaataaataaaatcttaaaaaaa

SEQ ID NO: 7400 - DNA, 556 bp, Canis familiaris
actataatagctatcgacttaagtggaaataaatatgttaagttaaattatggtaagatctctttgctaagagttttagcttgactaacaactagtgatctcttactgttattggtaagcagggtgtgcaaagtggtggtgagctttgggttctatgatggagctggagagactaggcacccatgagaatcatcagaaacaagatggcctacagttttgagggctacattgttgtggacataatttcaaaataggaaatccatgtgcttcagaaggaatctcccatttcttcctggatgatttagaactttctatatctgggctgcctgggtagctcactctgttcatcgtctgctttctgctcaggtcatgatctcaggatcctgggatcaagccccacattggatcctggggattgagcaccctgctcatgggggagcctgcttttccctctccctctgctgctgtccctgcttgtgcgcatgctctctctctcaaataagtaaacaaaatctaaaaaaaaaaaaaaaaaaaaaaaaaaaaaaaaaaaaaaaaa

SEQ ID NO: 7401 - DNA, 634 bp, Canis familiaris
tgggagtgtccgtcctgtgcatgaatcagatgttccccaaatattaaagccactttttaggggaatatcaaaagaccaagggagcaacggggatgcacaaaatatgcactgacaaatacagtttctgtttgggtctgtatcagaaagagaaatcacagagctgtgaagattaatgagaccatatctctgaaaacctttaagtcctttggaggaaaagtgcttcgtaaatgccagcatttctgtgcctctcctcaccttttccctactagcagctgttttgcctcttgatgccctgtatctatcacaacaccctgtaattatgggaagtcctaattgtgcttgggtggaaaggtgggcagaggatgaagatagctctggtaagaatgtaggcccaagtgttggattagcatcaggggagggtccaacaaattttaccctgacccacgaagtcacagacttggaaagatggctgtttccctgtgttccaaaagccttaaaagcaaatgtgtgcatgtttggacacagtaattccacttataggaatgtagccgagggaaatgatcagaaatgcaggcaagggtgtatgccaaagatgaaaggtgtttgtcagcattatttgtaattgttaaaaact

SEQ ID NO: 7402 - DNA, 635 bp, Canis familiaris
cagttacaaagaaaaactgcacttgctctcccggccccaggaaggtgaggccgagtgaggagctaacctggtcccaagccctttgaacatctgggctctggctgcttcagaccagaggcccaaatctatggactgaaggggccatcccttcccctgtttgagcctccacttcttgggcccagctccataccctaatcctgaatttcaaccactggaccccaagatctacttctcaccaaaccacggaggaagggtggggaacttcagtatttcctcacagtttaggccttgacccacctccaccccaccttaagaacagtccttctaaggaagaagggtgggcctgcccacttccctcccactgttgctcccttctacacctcagggatccccttctccccctcaggcttcccttcctaggagtaggatcagggtctgcaggtttgatggtaatgccagctctgctgactcacctagcccctccttaggccttgcccctccttaggcgctggccctgggctctgtcctctaacctgagaggatcctcccgcccttcatgttggtgactaagagatctctgccctcccgaggaacgtctgcggcggaaaaataaaattcagcccgttttttctaca

SEQ ID NO: 7403 - DNA, 598 bp, Canis familiaris
ttctgactgcccaccgttgcaggcaaagaaacatcctgtccagcctggcagcttttctatgggcaagaagcaagccagtaaaggggaatggagcagaatccaagacagcaagaatgaattgaggcagtcagagatcaaggctgaggctcctctgtttaacgcagacccgacttaccacccagagtgctctgcacagagctcctcactataacagttgctgccgcaggaagcacagaccagaaacccctcgtccctctgtctcccatccccctttaccacccccagaggttgagcctgagagtgggaagatcactaaggaacccatgcctggagctggcccacaggccaaggagtcagcaactgtctcatcccctgtgcccatgagccccacgaggaaacgagccctggatcattacctcacccttcgaagctctggatggatcccagatggacaaggtcgatgggtaaaagatgagaatgttgagtttgactctgatgaagaggaacctcctgacctttccttagactgataccctcttttccccctcagttcacaaataaatttcagcaggctccaggagtctaactttcaaaaaaa

SEQ ID NO: 7404 - DNA, 622 bp, Canis familiaris
gtcttgttagggaagagcttgtatggaattatctgcttttatgggtgaacttggcatttgtgaatgggtatcttgttcacgatattaattgctagccaaaacaagtaaaagaacacaggagtaaaacggtgggatttttctgaatacgcattgtgatgaccagcaattaccttgccgactgatatccacgaggagaataatttggaagactgttgtgggggatttcaagagacgcttcagagaactttaaaactttcaataatgttttaaatacctggggaataaaaaccaaaaccacagagtaataatgttggaggaagaggcagtggaaaggaacagagaataggagcaaaaggaaaaacaaaggtgactggacaaaaagggaatcccatcaaagcaagaaggggtgaagtggctgagaagggccagtgccagtggtatgtgactccaggatctactgaaagaagtttgcattgcaggtccatttgtagatcttgatctacacatcagagactcaatagttaattttactcactaagataaaggtcttatttatctgattttaacagatgtaataaaattatttaaattaaaaaaaaaaaaaaaaaaaaaaaaaaaaaaa

SEQ ID NO: 7405 - DNA, 632 bp, Canis familiaris
atcaagcaagcatataacatcttacttcaactgaggctttggttccacagtggggacaccaagattggaccctgtggatcaattctctttgctcagctccattctgaattccatacttgacttctccagccaaataaaatgacctaaggtttttcaagatggggctattaaccatggtcccagcatatagaggaggagagagtgggagaggaagaaatgtgggtctctgctcttactgctctagctatttggaagaaagaaacagaagaaaggccatgtccttctgtacttgatcttgtaaccagggataatggtactacgcatttaaacagtggtcaataaaatatccttacagttgatcaacattaccagtactactcttcctagacaaggaaggagccttgatatttgggtagcatgaaggggagctttgaggacagcagttcttgagccactacctggctgtcaacacatggggaattagagaatgacacagcttttcagcaagcagtgagaactagccatggcagaagacctccagtacaaatgatgcaaaatgtacacctggctccagagacagatgaagatgatctttattctggttataatgactacaatccaacctatgatac

SEQ ID NO: 7406 - DNA, 699 bp, Canis familiaris
tcagcccagggctatatgtgtttggtttgtggataagttgcagcctgtgccagctgagagggtaaaaagagttgtgggccgagtttccgtggtagtgcgaggtctctcagttggagcagccatgagtgcgtgagaggaagcatcagccggtcagtgtgtttagagtgtgccctgcgagtagaggcgcaggagcagttacgagtgcgcaagagagtccggcgaagtgtaagttcaggcgagcaggccgttgagaaagaagctcaagcactgtagcgggtcactcgtgtcgtgcggcgccccagcacacgtggacagttccagcagctgcgccctgctcgaggctaggagagagaaaagggcacaagaatggtgaggttgcgtgcagcgaggtgccgcgcgtgcgagagttggagtttctggagtgcagcgccaagggcggaagaggggacactggctccgctgacatccaggacctggagaagtggctggctaaaatcgcgctgaggggcagaggcaaagcgcaggacatgaatgtgtgtgtgtgtgtgtgtgtgtgtgtgtgtgtgtgtgtgtgtgtgctgacagttttggaaaagggtgtggtagtctggagttgataaagaaggggtacaaatgtgagttagaaaacattttgcttgttctggaaagaagatagttgttgaaagtagaaggaaaaaa

SEQ ID NO: 7407 - DNA, 628 bp, Canis familiaris
ggtggagagccagcctcctggacacttctgatatcagggtttgggggatctttcattgacgtgctggactgtggacaccttacctgcttttaccagaaccgggacctttagagacatctaagcacccttgagtggtgcacacccgggtctagtgttttttatcaccgcccgatgggctcttgttgaatatgcccaatggaagtctttgtggcatgctctcaatctcaggtgccctttgtttgccattctaataggaccatcttagaggagaagtcactgcccctaagactggagaagacctacctactggccatattagatttggggagccacgtacatagcttacctttagctacttcaaatcaattgagttcttaggaggaaaagtcaaacccagaatttggtgccaaatcccaacatcttagtgggatttgacatatgccctgggtcctgggacactggacccatgtgtaggcagaggaccgagtactgaattgggatcctgtaagttccatgaaccattcctctttggtttggctttttgatatgattaaaataattttttattccaaaaaaaaaaaaaaaaaaaaaaaaaaaaaaaaaaaaaaaaaaaaaaaaaaaaaaaaaa

SEQ ID NO: 7408 - DNA, 607 bp, Canis familiaris
  misc_feature (377)..(377): n comprises a, c, g, or t, or includes no nucleotide
atctaccacctgtgtgttgggatctcgagccaacaagccctgggatggggggcaccagagggagaatctacatcaagcacccgcacctctttaagtatgcagctgacccccaggacaagcactggctggccgagcagcatcacatgcgggcaacaggggggaagatggcctacctcctcatcgaggaggacatccgggacctcgcagccagtgatgactatagaggatgcctggacttgaagttggaggagctgaaatcctttgtgctgccctcctggatggttgagaagatgcgaaagtacatggagacactacggacagagaacgagcatcgtgctgttgaagcgcctccacagacctgaccgaagccaagaccnctggctacacttggcagccctcctccaaggccctggcacccacgtggcggaggccactgctgggactgcacctggatggatctcagcagcattaagctgtgcctgggctagtctgtagtgactcactacagagcacccccagactggcgtgtggttctgtttgtaaagttatcgggttaagaaacaattaaacagtttgtaatagtgaaaaaaaaaaaaaaaaaaaaaaa

SEQ ID NO: 7409 - DNA, 629 bp, Canis familiaris
cagaatggtggtacccgagtggttaaacttcgccaaatgcctaggtattatcctactgaaatgtgcctcgcaactgttgagccatggcaaaaacctttcagtcagcattgtgagaaagttgcgagctagcatcactcctggggaccattttgatcatcctcactgggcgccacagaggcaagagggtagttttcctgaagcaactgagcagtggcttgctacttgtgactggacctctggccctcaaccgagttcctctgcgtagaacacaccagaaatttgtcattgccacttccaccaaaattgatataagcagctgtgaaaatcccccacatctcactgatgcttatttcaagaagaagaagctgcgtaaacccagacaccaggaaggggagatattttgacaccacgagaaggaggaaatacgagattaccgagcagcgcaaaggttgatccagaaaagcctgtggaacttccgccaaaatttctgccaaaaatcaaagctgttcctcagcttcagggctacctccgctctgtgttttctctcacaaatggagtttaccctcacaaattggtgttctaaatttcttacaaagaacctaattaaacactgatccattaaaaaaaaa

SEQ ID NO: 7410 - DNA, 611 bp, Canis familiaris
ccgatctcacgcccccctgtggcggctgtcgaccctttccgacgttctgccctatcaactttcgatggtagtcgcctgtgcctaccatggtgatccacggggtgacggggaatcagggttcgattccgagatggagcctgagtatcggctaccacatccaaggaaggcatgcaggctgcgcaaattacccactcccgacccggggaggtagtgactgtatattacaatacaggactctttcgaggccctgtaattggaatgagtccactttaaatcctttaacgaggatccattggagggcaagtctggtgccagcagccgcggtaattccagctccaatagcgtatatttagttgctgcagttaaagctcgtagttggatcttgggagcgggcggcggtccgccgcgaggcgagccaccgcccgtccccgccccttgcctctcggcgccccctcgatgctcttagctgagtgtcccgcggggcccgaagcgtttactttgaaaaaattagagtgttcaaagcaggcccgagccgcctggataccgcagctaggaataatggaataggaccgcggttctattttgttggttttcggaactgaggccatgat

SEQ ID NO: 7411 - DNA, 632 bp, Canis familiaris
ctgaagacctatgctaaagggcttggcttcaagctcctgaagcattgagtacctaaggcaggagtgagatctccgggtcccatcagcaggataggttgtgattcaaggcaccagtaaccaggaaatacagacatgtacagttgcagaagctgggagagtcaggtttcccttataagtatattcccctttgatagaagtgcctctggtcagcctgtatcttgattggaaatcctatatgttatataaacatggccattctttccaaattaatttatgggaaagcagaacaaagcaattatgaacctgggtttggaatcagacctaaatccaagtcacagctgtcttgctcaccctctccagcaagactgtttaccttcctaagcctcaagagttctcatctgtaaaatgatgacagcaaaaacaaagagtttagaggcatgtgggtggcgcagtcggttaagcggcaactcttggtttcagttcaggtcatgatctcagaatcctgggatcaagccccacgtctctgtgctcaacatggagtctgcttaggacactctctccctctccctctgcccctactgctcatgcttgttcgctcgctctctcaaatctttaaaaaaaaaaaaaaaaaa

SEQ ID NO: 7412 - DNA, 625 bp, Canis familiaris
tggaaaaagtattgctacatttagacattgtagtcatgaaacagttgcatattgagagtttcacatgtgttcaccatgtgtttgtttgcagtcaggtgcaatcatgacggtccttgctgctgtctgcacaaagatcccagaagggaggcttgccattatcttccttccaatgttcacattcacggcagggaatgccctaaaagccattattgccatggatacagcaggaatgatcctgggctggaaattttttgatcatgcagcacatctcgggggagctctctttggaatatggtatattacttatggtcatgaactcatttggaagaacagggagcctctagtgaaaatttggcatgaaatgaggactaacagccccaaaaaaggaggcggctctaagtagaactgggatcagatgatactggtgcatgtgccccgtgctgcctggagagtcccaggaactcatcagccctggagtgaccacatctttgctcctgcttggaagacacccagcatctagctttcccagtattttaaactctgtctccagtacatgtcttaccagaaagtgaattatgacaaagttgtgaaataaaggtttatatctctagtttgtaaaaaaaaa

SEQ ID NO: 7413 - DNA, 473 bp, Canis familiaris
  misc_feature (266)..(266): n comprises a, c, g, or t, or includes no nucleotide
tgctcgcacttgggtggtgcacatacgactacacacacacacacagtagatagtagacacgatacagaaaggagattctcctgaaattaagaaacggcatctttgcttgatattgagatagaattctggtcacctttgtagttggattggcgctactgaagaaaaggcagtgtccagccctgaatattgtatatttacaaagaaatcatcatgattttgtggagctcagtctctgcgggaagtttcggcccctagccatgatgctnacgggtgagttggccataaatgtatgtccatctaagtgctggtactaaggagactcctcataaagatataaaatccctccctcttcctacctcccaaaaggctgaacagtgtatagtatgttacatttcaataaatcaataaaaatgctgggaaaagaaaataaaaaaaaaaaaaaaaaaaaaaaaaaaaaaaaaaaaaaaaaaaaa

SEQ ID NO: 7414 - DNA, 503 bp, Canis familiaris
catctgaagggagaggcggagacacaggcggagggagaagcgggctccctgcagggagcctgatgtgggactcgatcccgggactccaggatcgcgtccctgggctgaaggcaggcactaaactgctgagccactcagggatccctaaatttcctctttttttttttctttttttgtaatttcctctttttataaggccacaagtcatactggattagggcccactccaaagacctcattttaatttacttacctctttaaataccttatctacaatatgtgttttttgtgaacagcttctttcatttaggatgttttcaaggttcattcatgtcatagcatgtattagtgtcttattctttttatggctgcaaacagtccattgaatgtacatgccacattttgcttatccattactggtttatggacatagtttctctatactttttaaccatttacaaataaagctgctatgaacattcatgtataaaaaaaaaaaaaaa

SEQ ID NO: 7415 - DNA, 632 bp, Canis familiaris
tcccctccaacccgcggctggggcagccctctctccccggtgtgcgcattttaacgaggcccgcagtgaggaaatccgttccggcaaggccggggcctgggctcctggcccagttatagcagcgttcggaggccaggccctttgctcagcagacaccagggcctccttcttccctggccatagggatgtgctcttagtcaactggaaaccgctggcccatggcgctagcccccgtgtggggctcagccgtatctcaggaaatgcgaccttttccggcccggatccagtggagcccaggaggtcgctgacttaccccaggcctgcggcccacagctctccgggatgccccaggcctgcccgccgcaccagctccagcccctgcagaggcctggacgggccgctgaacgccgggatcccaggaagcagtccgctcaggcctctgcctacaacggggaaagacctttgcatcccgggtgctttgccaggcacttggccttgttcctcccattgtgaacctagtccgagaaggaagccgagcctgagaagactcagagagtacacggggagagctggcggaaggaccctgacggtggcttctgagatgctagcagttgcggtctctgcctgctgtg

SEQ ID NO: 7416 - DNA, 703 bp, Canis familiaris
acgggctggctatgaggccagaacaactgggtggatatgactatttgtaggagcatttgagttattgccatcaaagtttcacaggcacctaacaagccagttgaaaagccattatttactcttagaggaagctgtgggacccattttgcacccatgagtttgtgaaatctggattaaaatgtacctcttcagtgttttctcatgccaactttcttctagcatgtgatattgagtaaactaaactattttcagcttttctccattaacattttgggtagtgtacttcagagtgatgttatctgagttaaagtagttttaagtacattaaatggatcttttacaccacatcaccgtgaacacattggggagacgtgcttttttggaaaactcaaggtgctagatccctgattcaaagaggaacatttctcctgtttgttcattctagtttattttcatttaaaatctttttaggttaagtttaagcttttaaaaaataagttagttttgaaaattgagacacattactaatactgtaggaattggtgaggccttgaccttaaaactttctttgtactgtgatttccttttgggtgtattttgctaagtgaaacttgttaaatttttttgttaactaaatttttttcttaaaataaagattttttcaccaaaaaaaaaaaaaaaaaaaaaaaaaaaaaaaaaaaaa

SEQ ID NO: 7417 - DNA, 598 bp, Canis familiaris
ttccggtcatgttaaagtgtcctgacttaacataatagccaattctacattcttcaggaaggaatacacgaagtaaaagcatatctccttgtctgtttttagatttctctcctttaccgtcttagtacattcctaattccttaaacttagtggcttaaacactgaatacctggcagctcctagggatccctccagtagatggtgataattttcagtgctttgttatgtttagcagaaatccaactgacttgtgttttaaaatacaggttgtctaatagggagattacgtgatcttaaatgagttttaggttttctgtaaccaattagctgtgaactcttaatgtagctaatgtttatacaaattttatagtcaaaattatttatttttatttttgtagggttgtcaaaacatgtagtatttgctttttgaaatatgtttgcctagagttgtaaaatattctgtgactcagaaattgtaaagtccttttggcattgtaaaaattaatactaccagcatgtcaaaagaaaaatggtttgcatttgtaatataaagtaaaattgtatttactgtaaaaaaaaaaaaaaaaaaaaaaaaaaa

SEQ ID NO: 7418 - DNA, 692 bp, Canis familiaris
tgcgaatagggtttaataacgggtccaaaccctgatagagagagtcatttacacacacaagtttcaactctgcacctagcacttttacacagcttctggtgtcacagcttcttacaccaatggggagaagagggtttcctggctcatgtagacagggttactgatttctataggaaccagaaggatgcattactggcagctgcaaacaaatggttaagtggtttggcagaatggcatgtcccggctgctggaatgtttttatgggttaaaattaagggtatttatgatgtaaaacaaatgattgaagaaaaagccattcagaaaaaggtattaatgcttcctggaaatgttttttacatcgataactcagctcctagtccttacttcagagcatccttctcttcagcttctccagaacagatggatatggccttccagagattagcccaacttattaaagaatctttatgaagaaatcaaactatgaaaaaatcaaactctttcatggatttttcagataaattatttttatgttttagcaagaagaaatgattattggcattagacttacagattggatttcaacaatcatgtcatgtctgtagtaattgtgcccttaaattcatcagattgacaaaatataatccacttataccttttgataaattttcactctgcaaaaaaaaaaaaaa

SEQ ID NO: 7419 - DNA, 656 bp, Canis familiaris
ggatctgtgcaactcactgcgcttaattctgtgcacaagtgttcggaaccagtgtcaagccagcagcgctacatcgcttgggcagcgtgattagtcactgtttctgtcttctttaaaagttaagttttttaaagccctgttccaaatgaacgttgttggattcgtggttggggttgggtctcaggggatggagaccctggccttcctctataattcctcatggcctgtctctgccatagaaccagccttttgcatctgaggcagatcatcctctaacacacagacctccttggtcccactggaggccagtgtccggcagcagtgtttggacggcagtgccatgggctgcctccctgtacccgagcccactccacagcagcagtggtggcttctctctgttctgtttctgcagcatcctgtacagaactgtgctgtgacatgcagtaggcctggatctggcagagagaataaacacgagccctccttcctttccatcgacacctctgtagagctctctgcaccctgtgcccttcactgtttgtatttaattttaaagtcagtgtattgcaaggaggctggatgcaagatagatactatattaaactgtactgttatttaagatgtaataaagcagtttgacatgagggaaaaaaaaa

SEQ ID NO: 7420 - DNA, 590 bp, Canis familiaris
aatagaggctcagggtcaggcacattgcactagacttctatccgtgacctgttgcccaggactttgactatccccagctgctgagggcaccagtcaccgcgatatggggtctggaggtggtgagatcaggaaccatgcttgaatcgagtcaccagacccttgttgctttgacagtgctcagctccagaaagcttgtgccagttgttccatctaccagatgcaactgggccagggagtctaggcctcatggggcaacaggaaaattgcctccaccagctgaggaaagagcacacagctcacctgagctcagctggatggcacagagccatctttggggaaaggtggcacaaaccacactccctgatccctccctgcactttgccaggtttccttactgtattccttcccttccatcttgagcaagcaggtttcactgcttcattaggacaagtcaaaagtgaatcagtttcactacctataaatttaagagctttccagagactggctgcttgcagccctgggaagatttgtgggattactatatggaaaatacacctttataataagctttagacattaaaactatctga

SEQ ID NO: 7421 - DNA, 655 bp, Canis familiaris
tctagcccgtgttaagggtagtgtcggcggcggccggcagccccaaggactgagggttgccccgcggcgaggttagagcacctttctgcggaaggcgcacctgttgcctgctgcctggctgtagtgtccgcgaccggagcgtgggcgtcggcgcgctctgacttttgggagccctgacagtgctgccaggccccctgccccactgcccccttccacagcaccgcgtcctcccctgcacgtgggcgctgcaagggaagaagggagccttgcacatggccccacgccccttccacctggggctgtgcgtgtgcgtgagggaggcagcggggggacacacaccgggaggtgccaaggccaagccggaggccgcgcgcggcaggggcaggaaaggggttccgcgtcgggctagggagatcccggcctggccgcctgagccccggagctcctcgggtcgtgggacatcggtccgcgctcccgccaatgggggtgacacttgcgagagggtgaggttaggacaccgccgggcacgtccggcccctcgcccgtccaggtgctggccacctggcccctgccggcggtccctgccgcgcgggcttttgttgctccctcccccacgtgcgggcggccgggtgggtgggggaaggcgaggtacaag

SEQ ID NO: 7422 - DNA, 636 bp, Canis familiaris
attctagggtccagtaattcagaaacccattaaggtctatgctctcctgcgtccggtgtcattgctgaaatgatttaggtagagttctttttaaggacgtttctttgttcgatctttccagaagcctctcagatcataactcattctgcaccgtgcccgacacttcttttattaacacttgtagttgagcactttgaaccaattgagcgttccatgtgtcattagaactctctttttaatagaggatatcccctaaatagcctgtgcctcttgtttacctttgtccaccactgatcacccatatattgatcacggtgattagaatatgacccaagaactcaggagatggccactgacctaaaatgctctcagggtagcaccactgtttttgaacaagtggctgttgtcagagactgagacagcacatacaggaaaggctgaagagtaactgcacagtaggaccataccccttatccatcccacttacacatgataggcccttgtttgagagagatagaagagtagatattggaatggggagactgtcacaggttacttaatttcttcaaataaactttgccctgaaatttaaactgaaaaaaaaaaaaaaaaaaaaaaaaaaaaaaaaaaaaaaaa

SEQ ID NO: 7423 - DNA, 667 bp, Canis familiaris
atggttcgccacaatgctgccgggctacgtgcgcccgatcccccccccggtcgagggccccccgcggccccgctgcccgcctacagtccgcgcgtctcaaccggcagctcagcacgggcgtgtcggagatccggcagacggccgaccgctggcgcgtgtccctggacgtcaaccacttcgcccccgaggagctgacggtcaagacgaaggacggcgtggtggagataactggcaagcacgaagagaggcaggatgagcatggctacatctcccgctgcttcactcgaaaatacaccctgccccctggtgtggatcctaccctggtctcctcctccctgtcccctgagggcactctcacggtggaggctcccatgcccaagccagccacccagtcggcagaaatcactattcccgtcaccttcgaggcacgtgcccagattgggggcccagaagctggaaagtcggagcagtctggagccaagtaaaggccttagccctgcttagcccacatcctcacctcagtagccatcactgaccgtccctgcacactaacctgtatgctcttttgatacatttaccttttgtttttctcaaataaagttcaaagcaactgcccaaagaaaaaaaaaaaaaaaaaaaaaaaaaaaaaaaaaaaaaaaaaaaaaaa

SEQ ID NO: 7424 - DNA, 560 bp, Canis familiaris
cgcaggacgacctcctggcgggccgctgtctgtgcccgtccccgcgtatcacatggcaagaatgtccaagccctagcggagactgatcgttgcatcgagtctctggatttgctgtgtgtgccagaaagtttgctggaaaggagggtaacaactgcacactctccaagacagagttcctaaccttcatggatacagaactggctgccttcacaaagaaccagaaggaccctggtgtccttgaccgcatgatgaagaaactggacctcaactctgatggcagcgtggatttccaagaatttcgttaatcttattggtggcatggccatagcttgccatgactcctttacaaggtctccccatttccggaagtaaatcggaggggttcctgggcctggcctccagaccacctctttccttcaaaacagcttcccaatcatcacatccttctcacatcctacacagacctgagcccacagtgtccaccaccctgtgcaggccagtcctgctggtagtgaataaagcagtagcatttttttaaagcaaaaaaaataaaataaaaa

SEQ ID NO: 7425 - DNA, 372 bp, Canis familiaris
tatgatgaaaatgaaataggcgtttcagtgatatcttcactagtaatgataagcagaaagtgacagttattacctgggaaattttaagctaaaaaaaaagggcctgggttcacctaaataacctaaatattgaagacatgagtataaaagtgttctacttgcacaatgtgttttctttaatcctggttatcttctgggatgcctgggtggctcagtggttgagcatctgccttcagctcagggcatgatcccaggtctgaggatcgagtcttgcatcaggctccctgtgaggagcctgcttctccttctgcccatgtctctgcctctctgtgtctctcatgaataaataaataaaacctttaaaaaaaaaaa

SEQ ID NO: 7426 - DNA, 547 bp, Canis familiaris
tcctgtacctttgtgaaggaaaggagttttcacacagagccaccaaaggaacgtgacccgagagcctggcttccaggccgaagcttaatcatgcagctggactgtcacccttagggatctgactgcctctcccagccgcggtcgggccatggctccagccgtattttttggttttctcctgaagctatacgctctggcccccccacgtacattacctgttcaaactcagcgttaagttatgacatgtgtccacgcttttatgttggtgctccgctgcaaaaagctggccacgggtggctggaggaggagctctcggggccagctgcccgtcacccctgcagccagccgtggggactggaagtcagggaccccgggccctggagcaagcgcccgtcttccgcagccctgcaacccagtggctttctgctaagtctcgcttgccttcttcctagcggccagactgcttttccataaactagtgaaggagaatctccagcgtgtgcattgaatgttgagaaggaatcgtagaagagctacagcaagcaaa

SEQ ID NO: 7427 - DNA, 587 bp, Canis familiaris
actgtgcccaagagtcgttttgtgctatagccactccaccatcatcaggcctcgccctgttactatagcatcaggaaacgtgtcacatctctccgccttccggagagacagggtcttgcactcttcccgctagaacctactttgaaggcaattagaagctttgtgtgtacattgtcccctgtggtattgtcttgtcaggatggttaggtacacaaggacgcttattagatcactgagaagaaaaagccaaacccgcttcttctggtatgaacatctagtttgagagcaagcaaaacagtaggcttgtattagtgctttaatggagtactggtaacatttgttctttcttgataggaatctgctatatttagccaggcttctatttcataccctctcccactacaaactttccgtgcagttacctttcatttttaaagcaatttcactgctaaatataagattgtatttgtggggttcatagttatataatgctgaagggaaccactctttcgttgaaaggtgataaaagttaaataaagactgtctccacagtaaaaaaaaaaaaaaaaaaaaaaaagaaaaaaagg

SEQ ID NO: 7428 - DNA, 531 bp, Canis familiaris
tctactcttctggtataagaccaccaagattatctgcattaggaccctaccctatgacctcatgttaaccttagttatgtcctgtaaagccctgtcccgaaatgacaaatcacattggggttagcatatgaattttggggggacatagttcattcagtcgtgtaacactcagtgaggtattcagaatagtgctttgcatgtagtaagtgctcgttagctattgtgttctttgttccctgtttttaaggaattcattgtagtcagagacaaaattatacataaaacaagcagaggacaaataaatgataccagtcatgaagataagtattagttcgggcagccctggtggcacagcggtttagcgccgcctgcagcccagggcgtgatcctggagacctgggatcgagtcccacatcgggctccctgcatggagcctgcttctccttctgcctgtgtctttgcctttctctctctctctctctctctctctctgtgtctctatgaatggataaataaaatcttaaaaaaaaa

SEQ ID NO: 7429 - DNA, 197 bp, Canis familiaris
gtaaggtatgctgtacacaaagtagaatatatatggaaaatatgcattttacttttaaatgtgctgaaaatttgaatataaaggttgaaaagaaacacatttacaaattatcattagcagagataaactgattttaaacaaactgtaccactaattcattcccctattgttttccataatagatattcaaaaaatat

SEQ ID NO: 7430 - DNA, 554 bp, Canis familiaris
acacgtatagacaagtttgtacaaaaaagcaggctggtaccggtccggaattcccgggatcgaggtggttcgaatcttccttcaggatatttaagaaaccagaccgtgacgattgggagaatgggctgaatgcaatggagtgtgcattacacttggaaaagagcgtgaatcagtcactactggaactgcacaaactggccactgataaaaatgacccccacttgtgtgacttcattgagactcattacctgaacgagcaggtgaaatccatcaaagaattgggtgaccatgtaaccaacctgcgcaagatgggggctcccgaatctggcatggcagagtatctctttgacaagcacaccctgggaaacagtgatagtgagagctaagccttaggctgtcttcccatagccgcagggtgacttccctggtcaccgaggcagtgcatgcatgttggggttacctttaccttttctataagttgtaccgaaacatctacttctttcgtttgtatcattccttcaaataaagtaatttggtacccaaaaaaaaaaaaa

SEQ ID NO: 7431 - DNA, 503 bp, Canis familiaris
ccactgtgctgctgccgtactaaccacaggtgatccgagctttagccgaaccgctggatgacaagaagagactggtgcgcaaggaggcagtgtcagccaggggagagtggtttctgctggggagccctggcagctgagcccagtcctggcctaggctctttggacagacaatctaacctggaattactaactatcaagccatcttgcccgagttagggagactactcgcctctgattgcctctctctgggccactgttgcatggccgtaaacataggaatcctgagcttctaatgactttgtgaaataacgagtgtgagactacttgtgtttgaagaaacatgcttggtcttggggctcttccatttatttgttagataaaaaggagatacgctgctgaggggtgaatgcagatgaatgtggaccaggataggatgatggatgtgtgtgtacctactgaagaataaaaatttcttttggtaaaaaaaaaaaaagaataaaaaa

SEQ ID NO: 7432 - DNA, 517 bp, Canis familiaris
  misc_feature (1)..(1): n comprises a, c, g, or t, or includes no nucleotide
ngtggtcgaatcttccttcaggatattaagatatccagtccgtgacgattgggagaatgggctgaatgcaatggagtgtgcattacacttgggaaagagcgtgaatcagtcactactggaactgcacaaactggccactgattataatgacccccacttgtgtgacttcattgagactcattacctgaacgagcaggtgaaatcctatctaaagaattgggtgaccatgtaaccaacctgcgcaagatgggggctcccgaatctggcatggcagagtatctctttgagcaagcacaccctgggaatacagtgatagtgagagctaagccttaggctgtcttcccatagccgcagggtgacttccctggtcaccgaggcagtgcatgcatgttggggttaccgtttaccttttctataagttgtaccgaaacatctacttctttcgtgttgtatcattccttcaaataaagtaatttggtacccaaaaaataaaaataaaaatgataaaaataaaaaa

SEQ ID NO: 7433 - DNA, 627 bp, Canis familiaris
atgggctctggctctgagaatgctgctggggcccttgcaacctgggacaaagctgaatatgtggaccctggggccaaagcccggatccaaactggagctgaagctaaagccaaagcccaagagagcagtggtgctagctccagtgctagcgccagtgctagtgccaatggtggctttggtgccagtgctagcctgactgccactctcacatttgggctcttcgcaggtctcagtggagctggtgctagcaccagtggcagctctggtgcctgtggtttctcctataagtgagatttcaggtatctacttagactgggttggaatagctggggcttcatgggttgggatgaagagctggctggttatagaaaggccaaggttgcaggaccatatggagcatgtgggaaaattccattattggcattttgttccttcccttttggtggttcttgggtgactttttgaatttcttttacttgtattttcagatactcctaatcccagcagtctttctcttcgagccagggtgcatcctcagaaacctactcaaatagcactctaggcagccactatcaatcaattgaagttgacactctacattaaatctatttgccatttctgaaaaaa

SEQ ID NO: 7434 - DNA, 535 bp, Canis familiaris
ctgcgcagggccatgcaagggtaatgcatattcgaagatagccacgcagagtatctggatagatgtcatcttgtgcaggaagtcagttgtgtcccagttccggtcgctacaatggtggagttggtaggtgtgctcaggtccaaacagtggggctggacacagggtcggtggcccaagaagagtgctgagtttttactgcacatgcttaaaatgcggagagtaatgctgaacttaagggtttagatgtagattctctggtcattgagcacatccaggtgaataagcccccaagatgcgacgtagaacctacagggctcatggccggattaatccatacatgagctctccctgccacattgagatgattcttactgaaaaagagcagattgttcctaaaccagaagaggaggttgcacagaagaaaatagatatcccagaagaaactgaagaaacaaaaacttatggcccgggagtaaattctgcatagaataaatgcaaataaaaataaagaaaaaaaaaaaaaaaaaaaaaaaga

SEQ ID NO: 7435 - DNA, 609 bp, Canis familiaris
cccagtgtggatttgacacgcaagattgtattttgtttctctttggtgccagatcatgcctgtcactagaatatgtgtgacggcttgtaatgcttaaaatagtattggggtgtatggcatggtggtgatgagggttattcctcatggctacttgttaatcgttacagcttagagaaggggacagagtttgtattgttggcagggcagtgacttgccccttctttcaactaatcttactgataattgtctcttgtctttaaataaattaaggatggaccatccctcaaacggcaaacaggcagggtatgagacaggtctgagggtgagggcttttacccattgagagaggggttggtgttatttgtagagcataacctgaggttggagaggaccactgggagcctgtaaccagaactagaaggtaacttctgggatggatggaggttctcttgagacagtgccaacctaaatctacctcaggtaagtagttagagtaactttttcaagacttcagaccaaacaagacacttgtattcagtctatgtattcctatgctttaatgtttttgttttcccttaaattcttaaataaacatttattctgaaaaaa

SEQ ID NO: 7436 - DNA, 490 bp, Canis familiaris
ggggcactctgggcaagtggtggagggggcaggcttgcgctgccctggaggagttctgggttgagctgggtcctgcctgctccccaacctccagcagccgccaccaccaatgctgcagtgtggctcagctttcgcactgcccaggtctgcagcactctcccagtgcatagggttccgcggggcggctgggtctgggtcccggggggcgggcacccccacagctctgagcagccagtggactgcgggcctgtggcctttctgggccagctcttgtatatagctggggcttgggggcaggccccccttcacagagcctgggtctgaggacacttggctgttccctcagcagaaggaggggcaggggtgtgtgctgggctcgtgaatgatgtacgatatatcccttagagtgaccattaaacctgaccctccgctgcgaaaaaaaaaaaaaaaaaaaaaaaaaaaaaaaaaaaaaaaaaaaataaaaaaaaaa

SEQ ID NO: 7437 - DNA, 563 bp, Canis familiaris
tacgttagatttgcaatgatgttgtaaacaagttcgttgccagaccgatgccctgtccggtcgtacgctgccgcgcggttgccacttatgaaggtgcgaacttcttggcttgtgctcgaaccctcttctcatactccactctgttttggcagtaaatcgtgtaggcctctgcttgagctgggtcctggatatttggttcatttagaagttcctgtattcctaacaagatgctgcttaatcgtgatggctggcctccagtccttgtcctcctcgaggatggacaggcacactgtgcccgaagggtacacgttcgggtgaaacagcggtggctcaaatttacattttgggggtgaggatggataatcgtctttgaaaagcatccgtagtttaaacaagcctccttcccagggagtccctttcttccctggaatggcacactcccagttcatgaggttcatcgtgccgtcgggattctttgtcgggacagccacaaagccaaacgggtggtcctttctccaggctttcctctcctgggcgagtctgctgagagcgatccccgacat

SEQ ID NO: 7438 - DNA, 510 bp, Canis familiaris
gtagttttaaggaagccgaaacaggtaatgagcccattgttcatagatgctgtcagatttgttggtgtattttgacctaggccagcatgtcatggtacatgacaggaagcagggcaagtagataagccctgaactagataaagcaggtgtggtgccggggttaaacgggttgggatttctttgggatcacatcttcgttaaagcattatgattttgttagctcacagggcaagtcagttataagctagccccctaaccccacccctcctaatgtttgctggagtgaaagtgacatagggcacttgatattttttagtgcatagtcatctgggtcaccccacacatcaataagccctaaacactcacttgggataagaacactaaacggattgatgcttttagggactattcatgcccttgttcatcactcagcctctggtatgcatgactatgacctaggctgggccaagaattgggctcatgctccaaggccacagaaaaaaaaaaaga

SEQ ID NO: 7439 - DNA, 590 bp, Canis familiaris
aagaagatattgcatatggcacaccagatgaagggtttagtttccagaatctataaataagtcagaataattatttaagaataaataagtcaatcaagaaatggacaggagacgtgaatagacccttctccaaagaagacatacacatggccaacagacacatgagaaaatgctccgcagcacttggcaccagggaaacaaaaataaaaccacagagaccccccctcacacctgtcagaatggataaaattaacaagacaggaaacaacagatgttggcgaggatctggtggagggggagcctcttgcactgttggtggcaacgcaagctggtgcagctgctctggagaacagtatggaaacgcctcagaaagttgaaactagagctaccttatgacccagcactgctggggatttaccccaaagatatagatgcagtgaaacactgggacgcctgcaccccagtgttcacagcagccatgtccacaacagcccaactgtgggaggagcctcgatgacgttggacagatggatggataaggaagatgtggtctatctatatatacaatggaatatcacccagccactaaa

SEQ ID NO: 7440 - DNA, 624 bp, Canis familiaris
ggtcctttgtggtccataacatggtacagtgtctttctaatcatgtgaaagaacccattagaggacataaaatgtgaagtatgccagaagacctttaagcgcaaggattaccttaagcagcacatgaaacccacgccccagaaagggacgtgtgccggtgtccaagagaaggctgtagcagaacctacacgaccgtgttcaatctccagagccacatcctctctttccacgaggagaggcgcccattcacttgtgaacaggaaggctgtggcaaaacatttgcaatgaaacaaagtctcactaggcatgctgtcgtgcatgaccctgacaagaagaagctcaaagtaaaacgatctcgtgaaaagcggagtttggcctctcgtctcagtggctatattcctcctaataagaagcaagaacaaggcttatctgtgtctaagaatggagagaccctgaactgtactgaagacaaggtgctctcaacagttgcaatccttaccctcagctaaacctcacattgctttgtttaaacaactacacacaagcgagctatttcttctcagaaccatgtttttctttattaaaatcactgatgcacatctgaaaaaaaaaaaaaaaaaaaaa

SEQ ID NO: 7441 - DNA, 566 bp, Canis familiaris
ttcggcctctttgggatttacactatctcacaggctgctgcagctggagatgttatcaaggctgcctataatcaagtaaaaacagttgctcaaggaaacctttccagtgtagatgtccaggttgccaagaacaagctgaaagctgcctacctaatgtcagtggagtcttctgaggggttcctggatgaagtcgggtcccaggcgctggttgctggatcgtacacgccgccagccacggtccttcagcagattgattccgtagctgacgctgatatcgtaaatgctgcaaagaagtttgtttctggccggaagtccatggcagcaagtggaaatttgggccatacaccttttgttgatgagttgtaatactgaaacacatctttcagggaagagctgaacgttttctcaacccagagcagaaaacacatgaaagtcaaaaatctctaatataacatttatcttttttttccccaatgagatgaaatgtcttagaacataaatacaggtttttgttcccaactgacttaaagtcaataaaacattctgtttaaatgttaaaaaaaaaa

SEQ ID NO: 7442 - DNA, 469 bp, Canis familiaris
ccaagtcagatccgcttatggataagtgaatctagtgttggaataggacttccagctttatgcttggaataaatagcatgtgtagcagctgtttgttgtcctggggtggatggggtaaggtgggcgctaagcctttttttaaggatttttcaggtacccctctaaaggcaccgaaggcttaagtaggacgaccatggagccttcctgtggcaagagagacaacaaagcgctattacactaaggtctataaaaatggtgtcagcctcctaaccccagcttctgttagaaatgaggacttggggatccctgggtggcacagcggtttggcgcctgcctttggcccagggcgtgatcctggagacccgggatcgaatcccacgtcgggctcccggtgcatggagcctgcttctccctctgcctatgtctctgcctctctctctctctctctctctatgtgactatcataaat

SEQ ID NO: 7443 - DNA, 617 bp, Canis familiaris
gcgtccccggcaaactttcggtccctccccgcccctcacccgttattcgtcgtggctcgagcccggccgcgccgccccgagggctcctccggacctccccgcccgcagctccgaccattacgggatccagaaacatgtcgaccacacttctgtccgccttctacgatatcgacttcttgtgcaagacggagaaatccctggccaacctcaacctgaacatgctggacaagaaggcggtggggacgcccgtggccgccgccccgagctcgggcttcacgccgggctttctccgacggcactcggccagcaacctgcacgcgctcgcccaccccgcgcccagcgccggcagctgctcgcccaagttcccgggcgcggctaacggcggcagctgcggcggcggggcggcgggcggcccggcctcctacggcaccctcaaggagccgtcggggggcggcggcaccgccctgctcaacaaggagaacaagtttcgggaccgctcgttcagcgagaacggcgagcgccgccctcctgctcctcggcctcgtcctgctcctcgtccgcctcgtcctgctcgtcggcctccacgccctcgggcgccccgacgtgctgcccctcgg

SEQ ID NO: 7444 - DNA, 611 bp, Canis familiaris
ccggaattcccgggatcagaacggcaagggagaagtcagatataatgtccaccttcccgggagcagccagccgggctcagcagcccccaggcccagaggacgaagaccccagcctggatgagtatgacctctatagcctggctcattcctgcctgggagtgggaggccggaaaggtcgcaccaagagagaagctgctgccaacaccaaccgccccagcccctggtggccatgagaggaagctggtgactaagctccagaacacggagcggaaaaagcggggggcacggtcctgagacggagctggaaatgaggccagagcacggacaccacacagcgacgaagacaggaccacggatcggcacctggaggcaggatccagacctgcttgccccccaccccacccccaggacttaccctacctgaccgaggctccgaggggccaccaaggaagtgactccagccccagaaaaaggacaagataggaagcaagaggcagggaatgaatggagaggcagagtcgcaaaaggtaccccctaaaaagaaaaacactgaagaaattggctctcctggagtgtgggaaggaaggacaataaacaaagtacatctgaaa

SEQ ID NO: 7445 - DNA, 690 bp, Canis familiaris
gtacaaaaaacaggctggtaccgtccgggattcccgggatcgcgctacacaggacagctggaagggatctttaagcccccttcatcctgtggtggggcttccagaagttgagagacttgttcaggatcacatcgtacaggatggcagctagaacccagaccctttgactcctggctgaaagcagtttatcctgattgtaaatgaagattatttccacagcaacttccacgtgttctgaggattcccttctctagagtttacaagtgacagaagaaacccgtcacactgttttgtggtcttactttatatgtttaaaaggcttatctaaataccaaaatgctttttttgtctttttaaaactctatggagccttttgtgaaaaagtaaatagtaatcaggacttataatttaatgttaagtattttggggaagtcactgaattttcatcctcattggattgtaacttacagtcttcaaactggtagttcttatgaatctcccaagatccttaaaagaagcaggcctggaagctactttcagtatttgtaaaggcctatcagaaatcatatctaccaaaaaaaatttttttaaatcatatctacattaaagcttcagaagctaataataaatactttgtttttaaatatcccaaaaaaaaaaaaaaaaaaaaaaaaaaaaaaaaaaaaaaaa

SEQ ID NO: 7446 - DNA, 603 bp, Canis familiaris
gtacttgttataggatttgtagaaattcatcacaaatacgtaaggctaggctttactattttatgcttatggacattgtatatttgtatcttaagaccaagtagaccaagtggacacggttatctcctaagtgtacaataaacctgcagcggggagaagtctggaaggctccaccaggtactaagggcagcttcttttcctgtcttttgtgcatggctggctcaccacactaccaagtaaggttgcgttctgatgggtaaaacagaggtggcgtacatttgtcaggaaggccttatccattttgattgtgtgacagattgaaaatctattgtttacattggggaatgtatctcagattttaaaatagaagagtaataaacagacttaaaaacaaatactaagatttctacttgttctaggcaagtaaatgaatggaattatctgaactccacagcgctggttgttgagagcggctgattaagcacaacatttggaagcatggttatcacatctccagcctgctgcgtaagtgcagggcaccagtagacaacgtgtattaaagatgaatctgtttgtatgtatccttatcaaatatattctata

SEQ ID NO: 7447 - DNA, 593 bp, Canis familiaris
tcttgtaaactgtatctaagtcctatgtggggactgtacacattttatttcctgttgtttcgatttagtttggcttgctgtttctaggtgaggagtttcgttaaagttcataatcagttgccacttgtcggttctatgaacatagactagagaatacacgtcctcttgcttccatcacactactaatctgatggaaggtttgctcatttacattttcgagactcttctgtatatgtataataacctcctctgcttgaacacagtattttccccatagcacttcattgctgatgtctgtctttggtgcctttcctggtcagcattctcagcctgtggcagtaaagagaaactttgtgctgcgtgaggacaaagctgctaaatctccttctatttttttaaaatcactaacattatattgcgacgagggaaagaaaaaaaagtctctatttaaatttgtttttttaaaattttcctcttcagttggtgtgtttttgggatgttttatttttagatggttacactgttagaacactattttcagaacctgaatgtaatttgtgtaataaagtgttttcagagcattaaaaaaaaaa

SEQ ID NO: 7448 - DNA, 650 bp, Canis familiaris
tgcgttccaactggcgctgccaagcctgttgggcaaggttcatcctgagctgtacgggaagctcactggcatgccttccggtgtcccgcaccccgcaagtattcacttgtggaatctgacctgccgcgtggagaaagctgccccatatggacgacattcaagatagggtagttgaagcaggcatcctggagggaccccctcaaggcatcctgggctacactgaggaacccaaggtgggtctccctgtgacttcaaacaagtggacaccccactcgtgcccaccctttcgaccgccgggggctggcattgcccctcacatgaccaccttggtcaagctcattttcctggtatgaccatgaagtttggctacagcaaccgggtggtggacctcatggtccacatggcctccaaggagtaagagcctcctggaccaccagccccagcaagaacaagaggaagagagaggccctcagctgctggggagtccctgcccccacttaatcccccgacacactgagagaatctcctgacctcccatttacatcctagaccccaaggaaggggaagggcttggggagccctaccttgtcatgtaccatcaataaagtatactgtacccagcgaagtctttggaaaaaaaaaaaaaaaaa

SEQ ID NO: 7449 - DNA, 578 bp, Canis familiaris
gaggacctgcccgtccgggtgaacctcaccgagtccatgagtgtcaggttgtggtttcagaaccgaagagcccaattctcgaaggatatgagagagccatttctggcccattaaacgcttccctcctcaaatcctactcaggggacgtgactgctgtggagcagcccatcgtacctcgtcctgctccacgacccaccgattatctctcctgggggacggcctctccgtacagatcctcgtccctcccaagatgttgtttacacgaggggcttcataacggattctaacggaagacactgaaaagcgccatggctacttattctgccacatgtgcccacaatagccctgcacagggcatcaacatggccaacagcattgccaacctgagactgaaggccaaggaatatagtttacagaggaaccaggtgccaacagtcaactgaggaaaaaaaaaaattaaacaggcctaagaagaaatccaaaaccataagacacctatcctgctctgtcatttcttcatctgctggaaaaaaaaaaaaaaaaaaataaaaaataaaaaaaaaaaaaaaaaaaaaaaa

SEQ ID NO: 7450 - DNA, 637 bp, Canis familiaris
ggtttcgtcagaagtaactcacaggttgggtttcctgagatgcacatggcaggatgcagaccagcatgcagagcattctgggattcagtccagggcggagagaagtgggcaggactggcagagggagaagctgaaaggcagtgtggctactataggggcctcagatgcttcacgggagctcggaaaccaggatggccctctagaattgtcccacatggaggcaagtgcctatgaccttcaatttacccctttgtcccatttctgcccctagttgtcaccagatctggcctccccatggagtgcttcttctagtgcacgagactcttcggctgagaaatcataccggtttccaaactactgtgcacctgagtgtcccaggcttccccgtggattcacaaagacagaaatgacaagcttgacatagttcagtgtttccacactggatcaaagttttcctttcaaaaccaggcttcagcagtcagtatgggaaaaggcaagttccatgtgagaaacaagacaaaacagcaaaggaacgtggtagtgtccagtctttgaaagcttggaaaacgtagcgcttcatgggcgctacgtcattaagacttaaatacattttaagttgtttggcctacttataagt

SEQ ID NO: 7451 - DNA, 558 bp, Canis familiaris
atggagctatgacctgggaccaatggatgggatgtctcagcctgggatcagggcttctctgtgggtgccctgcgctccccatagcctctgttccttcattttgtcaggtgccatttcttccccagagcctggttgaagtcccccagtgcctccttgtgcatagacctttctctgcccacccctgtctaccccgccccagccttctgtacacccagcggggctgtgcaagaaccccaccccagccccgacagtagtatagagccccccctttcggctggtgtagagtagcctatagtgtagtgcggtgtgctttcccgtggtggcgggtgggtggagggctccgtgccaactgcccttgaatccgccagcggcggccgtgctgtgttttgtgctgtgtccacgcgctgcggcgcccccctcccctgtactgacgcctagaagtgcttctctttgcatagtcacgtagctgccccacccactccccttcctgtgtttcacgcaagttttatactctaatatttatatggctttttttctttgaaaaaaattaaaacgttt

SEQ ID NO: 7452 - DNA, 634 bp, Canis familiaris
  misc_feature (328)..(328): n comprises a, c, g, or t, or includes no nucleotide
ctgcagctatgtcaagggaaagagtgggaccgatgccagcgcaggcggatggaggtgaacagaaatcatgctcacaacttcgacaatgtctctggagcgcgatgggaaactggccgagctggagtctgcgttcagacccacttgctggacatgagctcatccttcagcaagacaacccaaaacctggcccagaagaagcgtctgggagaatgtccgttgtccggatctacttggggctgtgtggtgggcattggcctgctcatcatcctgattgtgctactggtcatctttctcccgtggagcagtggggacagcagtgcatccacantgcccaggacgccggcgctgcctcagggcctgggggctgacccagctgggccttgaggataggccgaggggccgcactggctggttctggtctccagagaaccctggcgtttgctcccatctgagccacccaactgagcactgaagagcaactctgatgtgtgcacctttgcatctcctatcacgccacagactggcccttgagggcagcctgctgcactagctgtgccaggccagccctacctggagctcagtaaaagctgctgtttggttaaaaaaaaaaaaaaaaaaaaaataaaaaataaat

SEQ ID NO: 7453 - DNA, 496 bp, Canis familiaris
  misc_feature (1)..(1): n comprises a, c, g, or t, or includes no nucleotide
nccggcattattcctctgtaccccttagtaagtgcctctagctcaacacctcagtgcctcctagcctccggagtatctatgtacttgagcccctcatagtttaatagaaggtttatcgccaacatatacttcaagccttattcattaccatctccttaggcgtatattgttacgctattacaggcctccgaatactatgagacatcttttaccaatctccgatggggtatacggagtctaccttttttatagcccctggatttcacggattacacgtaattattggctctacattcctcatcgtgtgcttcctccgacagctatactaccacttcacatcaaacccccccttcggatttgaagccgctgcatgatattgacactttgttgatgtagtctggctattcttgtatgtatctatttattgatgaggatcctaaaaaaaaaaaaaaaaaaaaataaaaaaaaaaataaaaaaaaaaaaataaaaaaaaaa

SEQ ID NO: 7454 - DNA, 616 bp, Canis familiaris
acagaagcttggagtataaagattgtggtcctgccatagaacctggttcaagggccatcaaggagtcagaggatcaaagcagcagatggaccaagcagtcagagtcgatgcccaaaccttccagcaggtggtcccaccgcctctttgtgctggcaatatggctgaccctggatgcctttgggtctctggtcacttgtgtcttcaggctgacctttctaaagcatctatttagccatcctgcgtccagcctgaagcttatgttattagaagataaaagatgacaaatctcacttatctgcacagtttgtcactgtcctgtagcatttagagaaggaagtctacttgatgggagtatattttttaactcagctggtagaatttgactaattgaccgttcttttattgtgacttgagctgaagaggttgaccaccctcctgcgtggcacatgtgcacataccttccatggtgagatgattcttccttgtgctaatgagcagacagagctggtcatccttggcccctcgtgaggcatatcagagtacggagatgcatctggagggaggaaggggaagcaaacttaccagaacatgcaaatggaataaaatcattttggct

SEQ ID NO: 7455 - DNA, 546 bp, Canis familiaris
cgcagcatttctccaatggtcattacacagcctccaccagccttcacatcttaggtcgctctgtcatccatccaaggaaggagttcaaaccagtgcccatagatctgtagggggctgtgtgtaccttatatacataaatccaagggctctaatatatggagagtctgtgtgcgttatgagacccatcacttgcttacgagttagcttcagagtaaataatttgtataacaggcagaaagctgtagaaacaattcctcctgttccaacacctcgaacccctccgcacatccccgtttggcctgctgttttcctgcttcctttctcccacggctcaacatgcgtgaccttaaagtagatctcgtccaccacctcgtggtaggtcttgagctcgtagagctgcactttgaagtaaggcgacgacaggatattggtcaagatcatggggttgaggttcatcgtcttctcgttgccccacagcggcagcacattcccctgcttgcccgagaccgccggcttggtggcgccgccgccgccgccgcactgctg

SEQ ID NO: 7456 - DNA, 650 bp, Canis familiaris
aggcagggggactctctagaggatgtctccaagagacgaacccagggaacacctgatggattacttgagcatgtttggagaagttacggataggtttttgacagtcaccaccaggcacgaaggttgtgtgtgttcgcagagtgccccttggttcagctcagagctctgtttacccccttagtttgtcttgtttggtcagagcagtggaactgttggaaggatgggcttgaggtacggggctgtcagagggaggggaagagacagtccaggtaatgtctgccgttaacaaattaggactcagagctgcaagcatactgaacactccgctgaatattctccctgctgggaaagtagaaaggggttgcctcagcggcacactattgaaatagtaagatggggctgctattttgtgttgttatgcctttggtgctcttgtttttaagaattcactggtttaaccaacattgttcagtagcaatacaacacaagttgggggcgcctggctggctgagtcggttgagcatccgactcttgatttccgctcaggtcttgatctcagggtcttgagatcgagccccagtctgcgttgggcatggagcctgcttgggattctctctccctctccctctgctcctcccctcccgttctct

SEQ ID NO: 7457 - DNA, 664 bp, Canis familiaris
tctcccgatatgggatctgagataaataccttgatagtgatgctatatatattaatttttaaattgtaaagtaaatgtctttagtcctaggtttgtggtgtgttcatttgtgttaatgtgcagggaagggacatggacttgatggttatggggagtgtatcttgatgtgtgtgcaggggtgagtattgctaaattattaacagcttttcatttaggggtgagttatgtgacacagtggcctaatcagaaaaatgaaggagcgaagatgcaagctttgccaagtgatgaagtaaacacagattttgtatctgttttttatcaggtgttgtaaaatttgtgcatggcttttttttttgttgtggcttattagtaattggtagaggagaaaagaggaggaaaacccctcagctttgctaaccagtcttttcaaaggtacataagttggggagtaaaatctgactggcctaatgtgttgaaaagatcctatcctttataatattcaccccatcctgtaatcctccatgtagaggaactacattgttgtattctagtaattcactgtgatttataacaaaccagtgatgtcattctattgtgcacttttgtcaaaccatttacgtgactttaataaacatagtaaacttgctgactgcaaaaaaaaaaa

SEQ ID NO: 7458 - DNA, 563 bp, Canis familiaris
gttctgcattttgcccatcatctcttatgagcggagttgccaaagaaggactccattgaagatgaacagaggaagttattgtgatatgcaaatttgggactacactgccctacagtaccaggatgctggacatcaagtaaacgagcgcctatggctactggatgactccaatacgtggtgtcggttgaggaactcggccaacaggacgggctacgtgccgtccaactatgtggagaggaagaacaagcctgaaagaaaggctccctcgtgaagaatctgaaggacacactaggcctcggcaagaccaagaggaagacgagcgcgcgcgacgcgtccccgacgcccagcacggacgccgagttcccggccaacgggggcggcgccgaccgcatctacgacctcaacatccccgccttcgtcaagttcgcctacgtggccgagagggaggacgagctgtccctggtgaaggggtcgcgcgtcaccgtcatggagaagtgcagcgacggctggtggcgaggcagctacaacgggcagatcggctggtttccctccaactacgtcct

SEQ ID NO: 7459 - DNA, 644 bp, Canis familiaris
  misc_feature (71)..(71): n comprises a, c, g, or t, or includes no nucleotide
ctgctgtgagagttctgatcatctccatgcggtgcatggacacctcctgccagctcagggcaccgggaacnttgaggacctccacctgcggccctccctgaggggcacgtggggcacatcgccggccggtcggtgaagacgtagtaggtgaccctgtgtcccaccatgaagtacttctctgccgtctgcaggaacagctccaggaagaccatgtattttctgatagcaaacaccgtgagtccgatggtggcgttccagagccggaactgctcgttcaggacatcagtgttgaaggtcccttcccagacaacgggcgccagccacggggtcaggaccaacacatcgctcctgcagggtgttagcaccttgggctgtccataaaccatcctggaaggttccacggcctgcaggccatccagttcccccctcttgcctacccctgcttgcctgctccctagcatcgagtttcccaggatccggaaaccagtgccagaaaggaccaagaagagcgttactaggaggaaggtcaccgtgtgaagtgagcagcattttgttttccccgccggcgcccgccgcatcccggccatggccccgcgtcccaccgcggcctgcctgcgcgtccctgggcgcgccgacgcgccacc

SEQ ID NO: 7460 - DNA, 608 bp, Canis familiaris
tagttttagaaagctgttttctcttagctatactcagctaattctactagtcactcaggaccgctattcagtggcttttgtaaagtgagatcaaaatttgagtgagacatgtggctgagatcttgtcctgcatgaagcccaaagcactgaagtttgagcgagggaaagggactctcccccgaggatggaagatgatggcttcttttccagtgagtgctacttcacccttctgcagcccttagcttggcacctggctccagcttctgggtcagcttcaaggtgaactcaacagaggttgctcttgactgttggaggaacaaccagccttcctttcctttgctaaaagaagttcagaggcgttgtggcccggaagcttgccatgagtgtgtgctactggcagagccccaagcctaccagccactcctgatgggattgctcacagcgcagccaccccatcaccaacctgcaccttccttggaggatttaaatatgtttgattgcaaatgaatgtttttaagtgtatttaatgcaatttttcctgttctcaacatgaccacccaagattcaaacacaaaaaaaaaaaaaaaaaaaaaaaaaaaaaaaaaaaa

SEQ ID NO: 7461 - DNA, 699 bp, Canis familiaris
  misc_feature (33)..(33): n comprises a, c, g, or t, or includes no nucleotide
gtcatgaaagaagggggggctttgtgctgagcnctgagacttcctacagagctattagacatttttaaagtttatcacagaaataaaagatattccctgcccacaaaaggagaccaagtactagtttagcaaacctgcaagcaccagccagcaggcctggccagtacaaaggacctggaggctttgccttacaacacaaatcaccactctcggcagtgggaatacagctgtgaacaagattcaaaccgtctggaataactgacagtctgttcacaattaagtaaacagccagtttcaaaagggtaattgatgaaagaaaccaaataaggttggtgagataggaagatgcagttgctaagagttttaagggtctggctaaggtagttcagtctaatccagcagtcaatcatttctggtcaaagaaatgtctaagaaagatcacttaagggacacctggctggctcattcaatagagcctgtgactctcaatctctgggttgtaagttcaagccccatgttgggtgtggagtctacttaattaaaaaaaaaaaaaatttaagattattttagaacctttggaggattagaagaaggagaaatagtacacatgtagaacagaacacctacaaaaatctaaggtggggtggtaagttcctaaattggagagaattgggaaggagtggtctataggatttccaa

SEQ ID NO: 7462 - DNA, 626 bp, Canis familiaris
ggacccggcatcttccgcctctctgaaccactgccctcagcacccatgggaggggagagagcagctcacgccagtgtccttcctaggggagggagttctttggtttgctccttccacccaaggatgggcttcttagggtagcttttctctgtgactcatgagcaggtgggagtggtgagagctgtgtgtccagatggacatttcggcataagggtaactgtccccattcatctgtcccaaggccaaacaacgagtggatgaaaaagccagcctgggagccgtgaagctgcaggaagccccctccgccacctcccagatgaagcgaaccggagcaatcaagcctcgggcggtcaaggtggaagagagcaaggcctgaaggtgctgggccacgcctcgcccccctgagcgcagggctgccgctcggccctgacctctgacgcagccagacacgcggacatcttggagatccaccgtccaaccacctggcccggactgagagaccttccttcccttgtccactcctgaaagctccattgtccgaccagcttgcccccgtggatatgtggcattgacctgctcgctttaatatgaagcaaacaagcaagcaactgaaaaaaaaaaaaaaa

SEQ ID NO: 7463 - DNA, 607 bp, Canis familiaris
caaatgcctgctgtctgcttctgtgaaacctttcctggaacctgatctggagccatatcattcagggacacatttctgtttaccataccaactacaagaacctccaagttagttacctcccccccagccttcacactactgtcgaagatgtagatctaagttctcaccccactcgtagtcagccaaatttgaggttcagggcatgtgcttccagactgccaggtctgctcaagacttcttataccagagccactctcacttcagaccagctgactacaaattcaagggtctccacagtcacaccctccccgccaaccattaggctcaatgattcgctagaatgattcacaaaactcatgagagtcctatgcttaatgattacagttttattatagaaaaatttacgattcagaaccaaagaaaaagatgcataggagaacctgggtggctcagtggttgggcatctgcctttggctcaggtcgtgatcccagggtcccaggattgagtcctgcatggagcttcccacagggagcctgcatctccctcatgcctatgtctctgcctctctctgtgtgtctctcatgaataaataaataaaaccttaaa

SEQ ID NO: 7464 - DNA, 489 bp, Canis familiaris
gtgttccgtggttagcttttgtattcagaagtctaataaggcactctccgttagttttctagtaactaggtgtataaaatcatgtgttgcagctttacagttttgtgagaatatgttgtagatattccgtggactatgaactttcttaacatcactgtcttgccagatcaccgatactgtcccctgacgtgacgctggccctccgtctgcctcaccccccggacacacacttcccgttgccctgcctgaccatgttcccttgggtctgtgacattctgtaagcccgtgcttgtgctaacgaagttctgtacgacttacccactggcaagaatacaaggttggacctctcaaccaataaaatagaacaacattttttaaattgacagttacagaatcgtggagtgtttttacattgatcttttgctaatgcaattagcagtatgttttgcatgtatgacttaataaatccttgaatcataaaaaaaaaaa

SEQ ID NO: 7465 - DNA, 581 bp, Canis familiaris
aggctgtcaggaaaaggagacgcggggtcacccggccccagccacctcgctgcccgggttaaatcagccctgccttgaagatgacacaggccgcccaccaccgccccttagggcggcagcttcgccccatcagggcaccggtctctccgttgtgccctccgagcagtgctggcgagccgaccggaacgaaatggtgctatgtgggagagggctctggctcacccgccctgcagctccgtccttctgcacagcgatgtctcgatgaatcctttgctgacttcagtggaggagtctcgggtcatggccagcagctgggcaggaaggagctctggccagctcgggcaggccactgctctctgagctccccgcgggccagcccctgggcagcctcccggagggcacggtgtgtcggtcctcgagactcggccgactgtccggggcctctaggctccagccccaccccgccccccgaaagtgggcactggtccacctggccacccagcccacctccaagcacagtggccctgcgtagccaacgcaagtcttacgaaaaacaataaatgcatattaataataaaaaa

SEQ ID NO: 7466 - DNA, 588 bp, Canis familiaris
tggtctaattggtgagctggtgaagaagttttaggtcccaacagactattctgcaacgtacactgagattgcctaacagcaagtttgccatgttcttccgatcagagaccataagtgggacgttggtggaacctcgtggaagacataggttggaggataaggaagacatatttcttgatgaagattgaaaatcagccataaagaacggctcgtgttaagctggtcgtgtatttggacaaatgaaaaagcagggacagatcttagaaggaatttttcttttgatgacttaaggcagcaccctgatatttgtccctcatgttttcaaggctgaccttggtcccgacaagtatctgtcagataaagattttcagtgtgctaatcaaacgttgctgccttcctgtttgcacccttatatctatcgagttacctttgccacagctaacgaatcctcagcattgcttattaggatgtttaatgaaaaaggaactttgaaggacctgatctacaaggcaaaaccaaagacccattcctcaagaagtatggcaaccctaagaagattcagggccttgaactccagcaaaaaaaaaa

SEQ ID NO: 7467 - DNA, 541 bp, Canis familiaris
aattctcgcgagctcggaatttgagaatgtaaacatcggcattttttgatgatgtttagagcccagaatgtgactgaggttacctgaggggtccaaggatgagcttacactttctatgcttagaggagagggagaaggtcgtacggagaaggaagctggtggggctggaggaaaatctggaggcatgggcctgggaggcctgggcaggaggtactccagggtctcagatgctttggagaggcttgtaaaatgaagcctgagggcagaatgtctggacttggcaatgcagaggtcactggggacaagaagtttccatgagtgccagtataagagtgtgccagagggggtagccccagtggcgcagcggtttggtgccgcctgcagcccagggtgtgatcctggagacccaggatcgagtcccatgtcgggctccctgcatgcagcctgcttctccctctacctgtgtctgtgtctccgcctctgtgtgtgtgtgtgagtgtctcatgaataaataaataaaatcttttaaaaaaaaaaaaaa

SEQ ID NO: 7468 - DNA, 467 bp, Canis familiaris
tgccgtttcctgtactgtcttgctcatcttcgtgtgacgacgaagtcgcgtagactcgatcatcaggcgacgccctgtcggctgggtagagaaagtaacctgactacgtagacccgccgtgtcctgcacgtcgtggagcatcatgccacacactgttgcacccaccacccacgcccctctttgtgtacttcagtcttggaattcggaactctagccctggtaggaaagcaccgaagcatgtgggggaagcaagacgtcctggaatgtaagcatgtagctatatgggggggaggggggagggctgcctgaaaaacatcgtctatgggaatgacagtggggatggtttttatgtgcctttttgtttttgtagaaaggaaaacttggaaagactgaaagaatacattttatatctggatttttacaaataaagatggctattataatggaaaaaaataaaaaaaaaaaaa

SEQ ID NO: 7469 - DNA, 529 bp, Canis familiaris
ggacaggtgtaaaatgacatatggggctgttctatactatgaaccagtttgtagaatgtcgttacccgttgagtgtggatgatctcagacaaagatagaacgtttttaaacttgcaagtagccctaaacaggagattgagaactgcatcgtgattcacagagggtagctggcttttaacctcttctgaacgtttgatgatctaatatcgtagggtgcatattagaaaatactatgttgatctaaaagaaactggaatagacaactggagttatagatacctgtcattagatacccaaaagccagtatttgggggacatctataaaatggggcttgactataaaatctttattttaataactcttccccctgtgtaagttactgttaatggtttgtggtacgtcattctctagaatattaagtggaagtagatgctccggaagtagatgctccctacttttcatgtggaagtggaccaatgtctataaagagtgacaaataaagttaataatgattccaaaaaaaaaaaa

SEQ ID NO: 7470 - DNA, 489 bp, Canis familiaris
attgccatatcgaatgcttcctcctgagagcaactggtaccgtagttataccgatggcgaagaatcgtggttacctgtcggatcctgccgagatttccgtgaagcaagagcttgaacttgccaagaagtatggctatatgtttacctgatatcactaaagacgagctcttcaaaatgccttagtactcgaaaggatccaaggcagattttctttggtcttgcccctggatgggtggtgaatatgacagataagaaaatctcttaaacctacagatgagaatctcctcaagtattatagctcatgaattctctttcaagaaagcagagttgtaaaagagttctggaagaaaagggactgaaacagtacatatttgctcatggtctcatcttgatttgtgattctctaggtattgatgataatttcccatgtaaccctatttccatttttatctaaaattgaaataaaaaatgcaataagcaatggctgca

SEQ ID NO: 7471 - DNA, 515 bp, Canis familiaris
tgttggaatattatggacaacattaagtacccagattttcagagtgctttgggcagaaagttgtaacaagtttgtgtctggaggaaagtgttatttcgtacgtttgagttgacatgattatatttaaatcgtcgtgccgttgatcgtgactgagctagctatgttgttgccagtcacatgtagttagcatgatggcattcccttcatgttgcacactctgtaacagcatgctgttttgtggagaaacttgcattcatgaagagcccatgatgaacttgtaaaagtaaatttgatttatacccaccagaagaaatagtcgggaagggtgagggcggggttcttgttgctttcctcttttcctcttttttttctctcttacaaaaatgtacttgcacaaggaaggatcttcagatattcgtgcactgaataatgctgttatgttttgtttttttaaaaatgcaattaaaactagaaatagcaaaaaaaaaaaaaaaaaaaaaaaaaaaaaaaaaaag

SEQ ID NO: 7472 - DNA, 537 bp, Canis familiaris
cgaaagtagagtcagagaactgtgacgtcagagagcgagggtccccaccggcggggctgtctgatccgacgcagacgacgcagccagggcaccggagggtcggggcagcgaggcgcccgtgcgctcagggcgcggcccctcccggaccccggcggaggccaggccaggacgcccccggcggcagctcccgggacaaagggccgcaggccccgggtcccacgccgcgagccgcacccagggaggccggcgcgacgggcgggccgagggcccagggctgggcgccccgcagcgtgcccaggcagcagtccaccaggggcgccctctccgccgaccgcgccgcagcccctacctggctccaggcccggggccccagggtacggcctcgctgccgagcagtacagggcgacgaggatccccgagcaggcagccgcgagcagcggcagcagccacaggagcgggccgcgcgggcgccaccatgcggccccggccccgccgtcccgggcggaggggagaggccccggtgcgcagggcccgact

SEQ ID NO: 7473 - DNA, 555 bp, Canis familiaris
ttgatgacttcaaggctgaagactttcagatcgaggggtacaatcctcacccaactattaaaatgggaaatggctgtgtaaagtgcttttaaaagaggtgatattcagtctgtaggggttgactgaatgcccaggctttcactccgtttgccctagagggaggaggaggaactaggtcaaaaatctctcgtgaccagcagctattattcattaacttataagatgttgccactggcaaacataatcttgtggcttctcttagtaaccaaaagctttgagtttggttgactcactaaggtgtgaaagtgccgagtttgggaataaagtcaggaaagtgaacactgaaatacacttaaaatatgtacatgcatttcaatccgtttttatgaaggtctgcgaatttcaagaattacacatcagctgttaaccccaaatttgagcaagctgaggaacaccagcattcttaatgtacaattgtggctatgaacatttaaagttatttgctttatatattgttataataaaggtgtgtattgcaaaaaaaaaaaaaaaaaa

SEQ ID NO: 7474 - DNA, 652 bp, Canis familiaris
taggcatcttcccactatagatcctttaggggcaccatgaaaatcttgagctgaatgtacagctgattaagaccggagacaaaagtgggagccagcgaaggccacactgcgtcaacatgctggacatctccccccgtttcgtcctttgggctgatcatccagcaggtgtttgataatggcagcatgtacaaccctgaagtgcttgacatcacagaggaaactctgcattctcgcttcttggagggtgtccgcaacgttgccagcgtatgtctgcagataggttacccgactgttgcatcagtgccccattctatcatcaatggatacaagcgggtcctggctttgtctgtggaaactgattacacctttccacttgctgaaaaggtcaaggccttcttggctgatccatctgcatttgtggctgctgctcctgtggctgctgccaccactgctgcacctgctgctgccgcagccccagccaaggttgaagcaaaggaagagtcggaggaatcggacgaggatatgggatttggtctctttgactaatcaccaaaaagcaaccaattcagccaagtttatttgtgaaacaaggaaataaaggcttacttctcttaaaaaaaaaaaaaaaaaaaaaaaaaaaaaaaaaaaaaaa

SEQ ID NO: 7475 - DNA, 218 bp, Canis familiaris
gtgagggggcggcgagtggggggaacagagggagcacaaggggacaggacagtttagttggagcgctgctggcagccttcctcgtggacatatattaacttttttctctgtttcctctttcacgtctgtgtgcttgccccgcatgcatgtgttcaaactcatcactttaatcgtctcatgagcattaaaagcaaagggaagaggatgtgcaaaaaaaa

SEQ ID NO: 7476 - DNA, 663 bp, Canis familiaris
gtctgtgccgacaccaggatgagtgaggttattgatggctgacagaacgtgtgactgaagcccagagatttgcccgaatggagttaagggagcatggagaaaagaagaaatcgtacagcgtggatggaacgcatgcgggacaaacgaatgacacggatgggtgctacttggtgtcagggacaaggtggctggaggaaaaatgaagaaaaaacgaaaaggccgttaatttcttttataaagattcaatttcagccttctgttccataaaaggggattgtagaagagaatgaacctcttcagcagagtttcttagactgaaatctggcagaatgaagccagaacctcatctaacttagtactcattccccttctttagagtagcattcctgcagactggcttttacagtgctgatgtcagctttagttccttggtcatggcatgactaggatgtgctcttctatcagctcacacagaccttttgatttttcagctgtaagtcaaggactaggttgatgaagtactgggcctgttattgtaaagaaaagaagctattatgtctgtaaaatggtggtactttaaagaatctcagcttatgcttcattagatctaatgtgaaataataaatactatttttaaaagaaaaaaaaaaaaaaaaaaaaaaa

SEQ ID NO: 7477 - DNA, 618 bp, Canis familiaris
gagcccggcgagggcgggacgcgcattggggcccgatcccggcgctcacgccccgagtcggggtcagccgggctctttctgctcccgccggaggcggcggcgtccgggcgccccgcagccgcagccccgacacccgcaagagagtgcgtttcgccgacgcgcttgggctggagctggccgcggtgcgccgcttccgccccggagagctgccccgggtgcctcgccacgtgcaagcgcagctgcaaagggacgccctccgccacttcgcgccgtgcaggcctcgcgcccagcggcactccaggaggcagcgcgccgccctggagccggccagtgagcccggcttcgccgcccgcttgcaggcgcagcgcatctgcctggaacgcgccgaggcgggcccgttgggcgtggccgggagcgcgcgcgtgctggacctggcctacgagaagcgcgtgagcgtgcgctggagcgccgacggctggcggagccaacgcgaagcgcccgccgcctacgccggcccggccccgcccccgccgcgcgcacgacagctttgccttccgcctgcccgcgccgcccatcgggggcgccactgcttttcgccttgcgctaccgcgtgaccgg

SEQ ID NO: 7478 - DNA, 639 bp, Canis familiaris
gtgtcccaatttggaattgacctttggcttctgatgtttgcccccagccattcccaccgaggcagaaaggccttacatggttccacgggcctagatcccagggggttattcttgttcatcggattgttggtacccgcatctatccctttttcagtatcagtcccaatttttgccagttcagccaactccagactttgggtcagcacccagaatgtttaaaaactccctggatgtgtgggccgcgtgctgctggaagctgaccgtggatgcaagcaggtgctccatccgggactcgggaacgtgcattctgtttgtctgtgaccccggggtgggcagggccgtcctcactaccccaccccactctgcttctcttcattgatagaaagtctgtatccacaggagctaggggagcagaatcggtgggagaaaaattataggtaacttcagtgtttcctgcaaagccccctcttaccaaaaccaaagctgtgttgctaaaggtggcctgagggccccggctctgccatttgttcttccaacgttgacgatgttcattatttatacatgtgtgtttggggagttaagaactaactagtttttatcaaaaatggaaataaatgcggttattacaaaatgaaaaaa

SEQ ID NO: 7479 - DNA, 576 bp, Canis familiaris
ccatgtcctccaagctctcttcacccacccccaccacgggcttcctggatgctcgtcattccccagaccacccagcatggcagagacactctgtcagcagcctgcagtccggtgcaaggtgggtacccatacaagcgaggagacacaggtgaaaaggcagggaggatcgtgtgcccgggcgagaggggagctttcccaggtgtggatccagctggccagatctcaagcagaggaagcagcaggagcaaaggcagagagaggcggggagcccctcaaggctacagaaccaccagccattacgctggactcccacatccacctctggacccaccggcagtacatctggaggtcacttcaaacaaaactcatcccccacctacatttccctcctttcccgtaaacccttgagaaagcagtgttttctgttgtgtgctggtaaggggctcttccgggtgcacgtcccaaagtcccacatgatgcttcggtttcctaaggaaaagatgttaattactggggatgtgtttcaaagtgaaagttacttcaaataaaaaaaaaaaaaaaaaaaaaaaaaaaaaa

SEQ ID NO: 7480 - DNA, 603 bp, Canis familiaris
cctcaggtccttgagcctcatcagttgaaagagaaaggaagtggctgcctgcctcaccatccccgggctatcatagagattagatgaactcctggaggtaaggagtgtgtggcacatagaaaccacattctaggcaccaaggccgtgtggcctgctcttggactgatttcgtgccagagcttcttctgtgttaccatttcatgaggtgccaatatttaaaaattgggagatctcatagaaaaattaaaacatgtgcattctctttagaattcagaacatctggcagccctaggcctccatcctggcatggcaacgggctaagtagcatcttctcactcttgggcaggatgtgaggggcctccatggcccccggtgctccccgtaatcatttatcataaacccgacccctcactgtcagcactctccagacctgcttgcttgctcccctaccgtagaaataggtaatcatggttagtgctttccccaatgtgtgtgttttactattgagctatatttgtggactacttgtagtaatatgtcttgtacgtcactcataaacaataaaaatattaaaaagatatgataaaaaaaaaaaaaaaaaaa

SEQ ID NO: 7481 - DNA, 456 bp, Canis familiaris
actttctggaggcttcgcatccgcaggcaccaccaaaaagagaaagcaagagggggaaggaaacaacggcgacgggcagctgcctccagtcctgacaaccccaaagggacgcgctttgcgagcgggctcgcaggctggggctccgcggagaggggccggagggcgcccaccccggggcggcgcagcgggctcccggcctcccgccgcggccaacgcggggtttgttcaccgtgctgtcatctgtttttcagaccttttttttgttttgtttttttgtttttttgtttttgtttttgttttttgtatctaacatggtgaagaaaggagtgaagaagcgaacaaagtaactcccgaggggagtggagctcgctggtgacccagagccccgccgccgccgccgccgccgccgccgccgccagctcccgctcccgcggccacccacgtccacgttcaccc

SEQ ID NO: 7482 - DNA, 610 bp, Canis familiaris
  misc_feature (139)..(139): n comprises a, c, g, or t, or includes no nucleotide
accgtgactgtggagaagattggttttcgacctaagctcaactaccgagtgcccaaccggggccacaaactgactgtgaccctgtcctgtggcagatccgtctatcccaaccacagcctgggaggattacgtctggttncaggcaccagtaacacttaaaggcttccatgagtgaatgggggtgcttcttaattgtgaacacagtggcttaaattatctttcccccagtggcaccaagtcacccatctcttgcgtggagctacatttgcttcctggtgagaggaatgctctgtctttctagctgcccgtctttcctccttagacttactggtgggtggtgagcttattatatggctgtggctgtcataattattgaacaacatctctttgaatcaaaggttgattttcccagaaggtgctgggacaggcatttctgttcagattggaaagcaaatatggacccgaagccagacattctttatggaagtggccatcttaagcttttttgctgtggcctttcagaatttttaccaggacataatgaacttaaatataaaaatgaatgaacttgtattaaattatcttgaaactcttggcttaaaaaaaaaaa

SEQ ID NO: 7483 - DNA, 515 bp, Canis familiaris
ccgctgccatcgggccatcatcaccatctgccggctcattggcatcaaagacatgtatgccaaggtttctgggtctgtcaacatgctcaacctcacacggggcctcttccatgggctctcccaccaggaaacccatcaacaactggctgataagaagagtctacatgtcgtagaattccgggaagaatgtggccctctgcccatcgtggttgcctccccccagggagccttgagaaaggacccagagctagaggatgaggttccagacatcaaacttgactgggaagaagtgagggctgcgcagggaatgaagcgctcagtgtggtcaaatttgaagagagctgccacctgagcttcccctggccttgtactgctgcagtagtagctggtgctgtccagcacctggagagactcagcccctcacattttggaatatcactctctttctaaaggaaaggctaaccttctttatttacaaataataaataactatagctttaaaaaaaaaaaaaaaa

SEQ ID NO: 7484 - DNA, 641 bp, Canis familiaris
ggaaggactgatctacctttgcttctcaggactgcgtgctgacatgtgacacagatgactcaggcttgctatgtgtctgcagtcaggcccgaattcaaattaatgacccggattccaggatttgggtagtgaggtggaagggggctgataccttcctgaggtggtcagagcaaatttaagtggattatcaccctcgcagggtcccgtgcccttctgtgcagctatgcacgggatagtcgcagcaggctacggggatgggcaagtgcgtctgtatgaggccagtacaggaactctgcacgtccagatcagcgcccatgcccgggccatctgtgccctggacttggctcctgaggtgggcaagcttctctctgcagccgaggacacctttatacacatctggaagctgagcagaagcccggagagtggccacactgaggtggaacactgtcatggtgagtgtgtacctgacacccaggtctgtggtgcccgattctgtgacccctcaggcagctcctttgctgtgactggctatgaccttgctgagatcctgagattcagcagcgcgtgagaagagcagccctcctttctccctgccgtatttataaaggaaccctccaccccaaaaaaaaaaaaaaaaaaaa

SEQ ID NO: 7485 - DNA, 678 bp, Canis familiaris
agagccctttctcaagagcttgtgcccctcagtggcctgcggagacccccctgtggtggaacacgccaggaccttcggccagaagaaggaccgctacgagatcaactcgttggtacggtaccagtgcactgagggtttcgtccagcggcatgtgccgaccatccggtgccagcctagcggccactgggaaaaacctcgcatcacctgcacagaccgtgagcactgccacccccaccccccacccctcgctgggcacagcattccatcccatgaccctctgggagggaggggtcctgaacacctgctgtctgcactacccctgggctcatcacactcactccctcggccctcagggcgggctcatcacactcactccctcggccctcagggcaggctcactttcactgaggacaaggaaaaagtggctggtctgctttccttttcaacactcaaagacccttttagcccaaactgatgccaagaaaaatcaaaaccagggatgtccgggtggctcagtaggttaagtgtctgcttcagcttggggcatgatcccagggtcctgagatggagccaccgcatcgggttccctgctgagcctgcttctccctctcctgctccccctgcttgtgctctgtcaagtaaataaataaaatcctcttttaaaaaaaaaaaaaaaag

SEQ ID NO: 7486 - DNA, 664 bp, Canis familiaris
gcaggctgtaccgtccggaattccccggggatcagtcatgcactgttggtgggaatgcaaaactggtgcagccactatgggaaagttatagtggttcctcaataagttaataatagtattaccatatgatccagtaatcaccagggtttttttaaagattttttaaatttatttattcatagagacacagaaagagagagagagaggcagagacacaggcagagggagaagcaggcaccatgcagagagcctgacgtgggactcgatccagggtctccaggatcatgccctcggctgcaggtggctctaaaccgctgccccaccggggctgcccaatcaccaggtttttacacaaatatgaaaacactgagtcaaagtgatatatgcaccctatgtttattgcagtattatttgcatagccaaactatgaaagcagcccaagtgtccatggattaatgaatggataaagaagatggaatactattcagctataaaattaatgaaatcctgccattggcaacaacatggatgtatctaaatggtataatgctaagtcaaataagctagtcagagaaagacaaataccatttgatttcattcatatgtggaatttaagaaaaatcaaacaaatgaacaaagggaagaaaaaagagagagagaccaa

SEQ ID NO: 7487 - DNA, 290 bp, Canis familiaris
catgcctatggctgtctgagcgctgttggtctcgacgctctgctctgcagaagggggtcccccccctttccgattttttgtccttcccctccttctctctctctctctctctctccctctctctctctctcgtccctctctctctccactcccccctctctcttccccactcggctcctctcccccctcgcgcccacagcgtttggtgttgattcgagcgggaagaggggggtgggtgggatcggagggggagaccatgacctccagctacgggcacgttctggagcggc

SEQ ID NO: 7488 - DNA, 635 bp, Canis familiaris
  misc_feature (46)..(46): n comprises a, c, g, or t, or includes no nucleotide
gggcagcccaccgagtctctcccagcagctatgcccccggcccccntggccacctcactcaggtcctgccctcattacaccaagcttccctcaccaaggacagcaggaaagacagaggggactccaagggcaactcctgaaccacttccaacatttatggagcaccaactgtatgccccaccttggactgggcaccatagagattgtatctcagtgatttcctagaggcggggggtggtggcttaaccatcttggtgtcctcagggcctactgtgtcccagtggctacatagaatgtgtcttcctgcaggagagagaaattctgcacagtggatttagggagggagaaagtcagtacatttttgtgttgaaaaattaattttaatttttttaaacagaaagtgatttcttaaaaagattttatttatttattcatgagaggcttacagagagaggcagagactcaggtagaggcagaagcaggctccctgtggggagcccaatgcaggactccctcccaggatcccaggatcacgacctgagccgaaggcagatgctcaaccactgagccacccaagcattccagaaagcaatctttgtaaataaacaagaattctcaagtaaaaaaaaaaaaaa

SEQ ID NO: 7489 - DNA, 616 bp, Canis familiaris
ttttagtacatagcagaatacctgacataatatctaccctaatgataaatggatggataatgatacatgaataaaatggcatgaaattaataaacttttatactgaagccgccactatcatgatatgaaagtgcgtaatcgacatttattcttcctatggaagcaatttggagagaggaaggtaactaccttatcaccttggagattagggaaaactttttccagaaacttgtgtaaaagccaagttctaaagactgagttagctgtaggaacttatgcaaaggcccctattgctacagactgaacctcagatagagttgcctttgaggttaccaggtcatctaatgccaaatccaagaacccattattacaattttttcatactctcaggatttttgacagtttggctaccttctttttctaaactcttacctggaattagaagaactttcatttggagtgcctgggtggcccagacaaatgactcttgattttggctcaggtcatgatctcatgatggcgaaattaagccctgagtcagactctgacctgggtgtggagcctgcttaagattttttctctccctctccctctgtcctccccacactgtctcttt

SEQ ID NO: 7490 - DNA, 637 bp, Canis familiaris
gagagatccacctccatcccaatccgatgacttcttagtccccatcccattgaccttataatctatggtaaagttgaccaacactgttcttgaaactatctcttttcttcatttctaagtcacctctccctttttaaaaaaaatctctccttttccttggtcagtctttgtcatcatctaagtggcaacattctctagagtccaactcttatcctcttggcttatcatctctgtactcttagagatgtctcagcaatcaccatgtgctagaaactcccaagtctctccagctgagttatatttctagctccccgctatacatttatactggagtcagtctcaaccaattggaagatgaattttaaaatcctgtaatctgggcagccctggtggcgcagcggtttgacaccgcctgcaacctggggtgtgatcctggagaccggggatcgagtcccacatcaggctccctgcgtggagcctgcttctccctctgcctgtgtctctgcccctctctctctgtgtctatgaataaataaataaaatctttaaaaaaagaaaatcctgtaatcctaaaaaataataataataaataaataataaaaaataaataaaatcctgtaaaaaaaaaaaaaaaaaa

SEQ ID NO: 7491 - DNA, 472 bp, Canis familiaris
ccgaggggtcgggggaaggcccccccgccggcctggccagaggccaaggtcagccggcgccccacggccgcgcgccctcccgcggattcacgcacccggcgaccctccccgacacagccccgagggcaagaaggcgccatccccgcagagtggggcgcctggccccggggtgggtgctgggggcgcccagggcgcaccgggggtccggaggaccgggaggcggcctccaggcctggctgctcagagacccgtccatggcaccatccttggaacagttgcggcctgacaagccctcccgcgggtcctcctaaagccacgcgacgggttcggaacccaagttcccgctggaagaacctaaatccgatcctgcctcaaagctggaaaaggctgtttcagacaaacccaccaggattgtgaaacttccagaaaggggaactttaaaaacatgacccgagtggagagaaaaaaaaaa

SEQ ID NO: 7492 - DNA, 615 bp, Canis familiaris
ttgaggagcccccgagtgatcgatctgtgggacctggcccaagtccgccaaacttcactgagaaggagctggagtcattccgggaggagcttaagcactttgaagcccaaattgaaaagcacaaccactaccagaagcagttggaaatctcacatcagaaactgaaaacatgtggagagctttggggaccgggagcacgtgagccggaacaaggagaagtatgccatgctggaggagaagaccaaggagctgggctacaaggtaaagaagcacctgcaggatctgtcgggccgcatctcgagagctcgccacaacgaactctgaagactgcaggagcccgctggcgggaagaagttggggccgggggccaggcgtccgcctgaggacaggcctgggtgcttcggggcggcacctgacacggacaggaccctggaggaggtgtgaaggggaccggccaggcgtccttcatgcagaaggacagtgagcagtggtgtgccagatcgtgtgactctgcccctggaagtactgtgttcttaaaaacatgtcacggggtttaaatggtcatgatctaacctgtcaaaaaaaaaaaaaaaaaaaaaaaaaaaaaaaaaaaaa

SEQ ID NO: 7493 - DNA, 625 bp, Canis familiaris
gcccccgcctgccgacttgtatcatgccctgcgttggtacaatcacatcaagtcttacgagaaggaaaaggccagccttccaggagtgaagaaagctttgggcaagtatggccctgctaatgtgggaagacaccacaggaagtggagctacagatagtaaagacgatgatgatattgatctcttcggatctgatgacgaggaggaaagtgaagaagcgaagaggctaagagaggacgccttgcacagtatgagtccaaggaagcccaaaacctgcacttgttgcccagtcttccataatactagaagtggaaccctggggccgatgagaccagaatatggccaaaataagaaggaggggccgtcccgaagccattcaggccagatggcttggtctggggctcttctaaactagttccagtgggatatggaattaaaaaacttcaaatacagtgtgtagtggaagatgataaagttggaacagatatgctggaggagcggatcactgcttttgaggactatgtgcagtccatggacgtggctgcttttaataagatctaaaattacatcgtagatcattgtccttaaataaaagcttaaaagacaaaaaaaaaaaaaaaaaaaaaa

SEQ ID NO: 7494 - DNA, 661 bp, Canis familiaris
  misc_feature (28)..(28): n comprises a, c, g, or t, or includes no nucleotide
acaggctggtaccgtccggaattcccgngatggcgcattctgggggacattgctgatgactcagccctgcttgccactcggaatccctctaaggaacccaagggtcagccccacctggggccacccgccgtccacgcctccgctcgcaggaccccagagcccaacgtggccactgtgttggcttccatgagcatcgtctcatgactggggaggaaggttccagacctgcaggctcctgctctctccgcaggaaagaacccccatgtaaagcatcagtggagaacacccggggccacacgagggatgggggaccctggcgcccaagcgcggcgcgaacttcccaactgcggcaagagctttcatactcacggtgcacgtgtgaccggttctggttgctttctcttaatatatattttatttcaaagcacaaggggagggcgtggacaccattccacacagaggtcatcaggctggttaggggtgcgttgttcaaacatgtttattgaaataacacaggcagtgatacgttggaatactaaaaagtaaccgagatttttatatttttgtaaattatactttccatactgtagattgtgtacgttgtgtgtttttatagaaagctaataaattaaaggtacagcggtacctgagaaactgaaaa

SEQ ID NO: 7495 - DNA, 726 bp, Canis familiaris
tcaccatgggaaatcctaataaacatctcacctgggataagtaattggtatgtagccctggtgctgtgttagatagttcctaattggaaaaatgaggttgaagtttatgacagccagaaggtatgagattctattatgttaaattcagtaagggaaatccaaatccctcgttttattctgtctttttaggaaagctgtattgtggtgaaaattgttaacataaaagtgattatttagttctagtagtcttttatgattacactaatgtagcctagaaatagctatgtccttaggaaagtgtggtttagtttttgattttttacaggtaagtacagaggagaaaggatctcacgaatgttctgatgtgtaatatttgccttcagcttttgaaatggaatgggtctgagaaattcagaaagtatagctatatattcttcatattcttttataataatttgaggtcccaaaagactgcatttttaaacaagttactattaatgcattggcccacgtagcaaaaagatatttgattatcttataaattgttaagtacctttttcatgacttttctcagtattgtaacagcaacttgtcaaatccaagcatatttgaatgtgagctcccataatttgaaattgaaatagtactgtggttctgtatattatgttaaaatattaaataatggaaaccctttaaaaaaaaaaaaaaaaaaaaaaaaaaaaaaaa

SEQ ID NO: 7496 - DNA, 431 bp, Canis familiaris
cgtgagtcacccatgggaagtcatgcctgatctctacttcttacagagatcctgaagagtattgaaaaggtaagtacaggctgctgctctaaaaggctgtaactaaggaggaatttcagggtgaatggacggctccagccatgggctcctgagttcactgctactcagcctgaagttgcagactggtctgaaggcgtgcaggtgccctctgtgcctattcagcagttccctactgaagactggagcgctcagccagccactgaagattggtctgcagctcccactgctcaggccactgaatgggtaggaacaaccactgagtggtcttaagctgctcttccacagaaggaacagaatggaaataaggttgactggtagatatactagtttctgatggagggaagtggaaagatgagcatagagtacgatga

SEQ ID NO: 7497 - DNA, 606 bp, Canis familiaris
aatcaggaacacaaaatagtcataaaattagaagccatgcctacctgactcccccaacccaagttatactaaactagctagattaggaagatgttgtagccacaatgtacctgcatttcagcaaggcatttgataaagtgtatttgtaggagacagaatgccctcaccaaagatgctgattgacaggtcagggacttctagagactctccttggaactcttgcaaccaccacataatttgctaacttggatatagggaaggactgccagtaaactcaccaaatgtgaggatggcacaaacttgctgaatggcaaactcaggatgcaaaggcctgctcctggaaggaagtgctaaaattcatagaatggtattggcggggataaatataatgacttgtatttaagattaaacaaattaaccacataaataaaagaaaagcctggattgggcagcccgggtgactcagtggtttagcgccacctttggcctggggcctgatcctggagaccggggattgagtcccgcgtcgggcttcctgcatggagtctgcttctccctctgctgctctcgctttctctctctctgtctgtttctcatgaataaata

SEQ ID NO: 7498 - DNA, 601 bp, Canis familiaris
gtttctgtttcaggtacatctcctcgtctcctgaaggaccctcgactcctgttccgcgccgtccattccagctgctgggctagccacctgaggaagacccatcggcggcaagatcgacttacatcttgggtcctggactcccgaggcttcctgtttggcccctccctggcccaggaactcggcttaggctgtgtgctcatccgaaagcaagggaagctgcccggccccaccgtgtcggcctcgtacacgtctggaatacggcaaggctcatgctggaaatccagagagatgccctggagccaggggagaaggtggttgtcgtggatgatctgttggccactggaggaaccatgcgcgcagcctgtgagctgttgggccaactgcaggccaagtatgagtgatgggccccagcctggcagatgggagttccaacttggtggctggctgctgggggacaccggccatctgcctgcacttttgtaacggttttgtacagttgccttgttccagtgcactgggccaccttcagggcccttctggcaggttctggaagtgcacaagccccagcagctccacgtactaacacagagaggatgaataa

SEQ ID NO: 7499 - DNA, 504 bp, Canis familiaris
gatgaaggtagagtttcaaataagtagaaagagggatctattcaataatttatgtaaggacaattacttacccagttagagaaaatatatagttagactccttgacttcatatccccagaaagtaaattctaaatggattatattacaacttatacacataaaaatgataaatatattagaaaccattagggtaatttatctataaccttgggatagggaagactttcttaaacaacatgccaaacataagaaattataacagaaaaggcagataatttaaccatatcgaaatgtaaaatttgctgaataaaagataccatgctctatcaaattccaagagactttcttgccaatcctcaaattcatacagaattgcaagatgtcctgaatagtcaaagctatcttgagaaagcacaaagttggaaggcttcacacttcaaaacatactacagggggatccctgggtggcgcagcggtttggcacctcctcgcaccgggctccc

SEQ ID NO: 7500 - DNA, 571 bp, Canis familiaris
caagagcaaggtcacggcgccctggagggctccttcctgctgctcaagggcccgtacgatgacgtcaagatcagcccccgtcatctaccacttcgtcttcaccaacgagagcaacgagacggactacgtaccactgcccatcgtcgactccgtggagtgcaacaagctgctagccgccaagaacatcaacctacggctcttcctgttccagatacagaagtaggcggcgccgctgggctgcccccgccggcccggcagtggcttcacagtgctgaccattttagccaaggagaaggaacaaacgcgaacattgggaaagtctgcatgcgtgtgcgaaggtgtgagcacttacacctcgccctccgccccgcctcccctgtcccaggcatcagaggccgggccacctgcagaggagacggtggctcagggacacagcagggctaagcccagcggccgtgccccggcccccacgcgcggtgaggcgcaccgtctgctctgggccgtgcacgacccctgggccgggctcggggagcacgctgacttcagacggcatatttgattgcaattaaaa

SEQ ID NO: 7501 - DNA, 494 bp, Canis familiaris
  misc_feature (1)..(1): n comprises a, c, g, or t, or includes no nucleotide
ngcgggactcgttctcactgtagcattgctagctgttctctctttaaatctcaggccgaattggtagattttcaggctaatttgaaggttatctaggtaatttggtggggacaggtgatttggagaccctactcttcggccatcttgcccctcctcctcctgtctagaaaaggtttaagtgtcacatggccccagctttgttgctcatgttgctccctgtagaccctgttctgaacgttgctgttccacgtgtccaagccttgtggggttctgattttattttgatgtctggggaagcaaggaacatgttttcaattgaaacaaagatatctgggatccctgggtggcgcagcggtttggcgccatgcctttggcccagggcgcgatcctggagacccgggatcgaatcccacgtcgggctcctggtgcatggagcctgcttctccctctgcctgtgtctctgcgcctctctctctctctctctatcataaata

SEQ ID NO: 7502 - DNA, 538 bp, Canis familiaris
ggcgggtagcacttgctccagctaaggaccttaagtgggcaatgggcgaagagcaaggcccaaaagaattcttgagcggcctgaaagcgccagaagcgacagctgtgggaccggactcggccagaggtcacagcagtggtatcagcagttcctctatatgggtttcgacgaagcgaaaatttgaagatgacatcacttactggctgaacagagatcgaaatgggcacgactatgattactaccagcgtcactatgacgaggacgccgccatcggtccccagagcccctacagcttcaggcacggagccagcgtcaactacgatgactactgaccaaccacccctcggccctcggcgccccggccgcggaggtgacccactgggctgccttgcaccacgtggcttccgctgggctttactccagcagatcttgcctaccccctttctgcagccaggaaggaagagttaaacaatataaatgcctttgatatttcatgcaagtgcctaacatcgcatttcatttaaaaaatagaaataaa

SEQ ID NO: 7503 - DNA, 696 bp, Canis familiaris
caatgttcaaccaccaggaaacaggttatgaccactttaggcctattttaggtgacactataggacaagtttgtacaaaaaagcaaggctggttaccggtccgggaattcccgggatcaacagctccgttgaggaagcctcgggagtgtatcccatcgacgacgatgactacgcctccgcttcaggctcgggagctgacgaggatggagagagccccgagccgacggcgtcccggccgctccccaacgcagggcccacgagtgccgtccccgccgcggaggccacgacgctgaagacccgcgggaaggagcctgcccagacagagtcccctgaagaaatcggtgaggacaaagtccgcctctctgactccgaaaggaaggtggacccgtccgacgaggacgcaaacgtgtacacggagaagcactcggacaacctgtttaagcgaacggaagtcctggcggctgtcatcgctggcggcgtgatcggctttctctttgcgattttccttatcctgctgttggtgtatcgcatgaggaagaaggacgaggggagctatgaccttggagaacgcaaaccttccagtgctgcttatcagaaggcccccactaaggagttttacgcgtgaaactcccacctagtgtctctatttatgagatcactgaacttttaaaaataaagcttttgcatagaaaaaaa

SEQ ID NO: 7504 - DNA, 551 bp, Canis familiaris
gtttgatggtctctgatatggagtaccccaggctggcaccctagtgtttgtctcctggctacccaaaggtttttagatctctgaccatagttttacaccaagttattaacttttaaatattctgatgtactataagccgttatattatgtgggagtgtaggggtaggtggatgtcaacaatccccaagttggctcttgggagttgtgaaggagggtaagaacttaaagaccaggtcatgctttgaggggaggggcttcatagattctcccaggctctcaccgttccccttagccagtctgctgtcctgagacccagaagtgatggagagaaaccatccagagaaaccctatctggaaggaatgtatttgttgctaaattttgtagcactgtttacagttttcctccatgttatttatgaattttatattccgtgaatgtatattgtctgtaatgttgcataatgttcactttttatagtgtgtcctttattctaaacagtaaaatggttttatttctatcaccaaaaaaaaaaataaaaaaaaaaaaaaat

SEQ ID NO: 7505 - DNA, 555 bp, Canis familiaris
gccttggaagccctgggccctcctctccacatccactatctccaccgtcactgacaagtacaactttgtggacatttgctgatgcccagttgaagattcctgtctctggatccaagtcagagggccatctctatgtcagctcatccagagatgccccctttcagaggtggcaccttcaggaggtcttcttaaagctcaaggatggtcagcagattcctgtgttcaagcacagtgggaacacgtggtcatgaagtcaaagaggagtaaagatgatcagaaagactgtttgctcccagcagggcccttcctcctcaccgcgtgccctccgtggctgggagccagcttcccagtcgccaggggtgattgtatgtactgtcatatggtaattttggtgtaatttctaatttgaccacaactattgtgtggtggtttttgtttgtttcttttaatcagaagtgaaaaatttactgcaagtttataagaatttatttgaaaattcactgtctaaaagccaagtacgaataaaagcgatccatattaaaaaaaaaaaaaaaa

SEQ ID NO: 7506 - DNA, 498 bp, Canis familiaris
gggttgtgcctctgctctccgccggtggccacgcaggtggcatcctctccaggtgcccgcttgtctctagcccttgtacgcacctgctgtgtgggacacgtgctggagctctgccgagaccgccgctatctggcagggggacgctgggagctttttgtcaggcccaggtggtggtcacttcagtgtcaggaaaaatcagggtcacacaatccagtgaattttgtgctttttcggggggaaaagaaattacttaaaaactaaacatgaatttttttgaatgtagcccctgggcaatataacagaattttgagtttcttacacagtaagtagaatgaaatgttccccacctgaggacaagactccggcagaagtgtggcaaaaagcactttaatttaatgctgctaactttgtgtttatagttcctttgctggagtgtgagacctgctcgacacagtgagtttcttgtctgatgtacttaaggtgaccaacttgcctgag

SEQ ID NO: 7507 - DNA, 364 bp, Canis familiaris
  misc_feature (130)..(130): n comprises a, c, g, or t, or includes no nucleotide
tggttttccccaactttggaagccttaaggcttccaggccacgaaagttaagggagaagcccaggaccagcctgtccacttgggttcaattcttgtaagggcctttgaactgtagcaccaaaatgtttgncacgaggaaatgtagctgaccagaaaagacatatcatacctctagaaagaaaaagcatagtgtatttcaattcccaatgtgtaccttctatattttttccctaagtaaagaacaagactctactgatttcagttggctgttgtggttttaaagtatgagctatagactgtgtttttctgtactaatgtgtggcgcttattaaatacttttgtaccataagtaaacttggaagta

SEQ ID NO: 7508 - DNA, 548 bp, Canis familiaris
gacatatatattatttttgaaccgttacgttatgcacagtaaatgtatgtgtttctgtaacaaaattgggatctgtcttggcattaaaccatatcatggacccaaaatgtggccatactgaatgatgagcattttagcacaatttgagactgaaatttagtacactatgttctagatcggtcagtcttaacagtttgcctgctgtatttgtagtaaccattgttcctctggactgttcaagcgaaaaaggtaactaactccttcatcttcttttgcacttatttggaaattttagttatagtgtttaactggcatggattgatagagttggagttttatttgttaagaaaaattcacaagctaacttccatttaatccattaccctttattttattgaaatgtatagttataattaactgaagaaaagattcttgggagtatgttgtcataacattttaaaaggtttcccttcatttaaactaaattactgttttatgttgatctgcatatttctgtatatttgtcatgacagtgcttgcatcctatt

SEQ ID NO: 7509 - DNA, 592 bp, Canis familiaris
gataaagcccactgcatttgtctgttcgttcacggtttttatttgggtggataatgttaaaaggaacttaggaaagccatattaccatagcttaataagtgagcgaccctggtttgctaattgtggtttaacttattttgtagcttcctcactagtttgaggttgctaagcaaaatgtagacaacccagaaaagcgcttcctaagttgttgcacactttttgcacctcttgtgcattctgcaaggagacaaatgaatccatgtatttctacgtagataatcttcttcattggtaacctgttttcatttgtaatgatgctacataattttgtggctccctaatgcaataatgtacagaagataaaaaaaaatttataattgaacaatttgtctttctgttcactggatatgttgcaggtcacgctcccatgcccccctttctaaactgatatcaacaagactggaatgtttgtggtatcaggggcaagaggtatcataaaacaacaaaatagagtgaactcttttagagcatctatatctgcaatctgtaaatggtaaaatgtctgtgtatttttttaaatgtaccttttcaa

SEQ ID NO: 7510 - DNA, 536 bp, Canis familiaris
ctcttccaatgcaattctctgaaattgttaataatgcaagtcgtactttaacgtacatttttgttggttgcctatataggtataaaatgctctctctgacatcattataggtctgtcaggcactctgaacatttcctattgtgccacaagggaatggaatacatgagtagatgttaacttccctgaaatcactgccttccacatgcaccacaggaatacaagcctactatgttagatgggaaagaccactacaattaagtggtcatttgaaagtagagattctgttggacagaagaattagaggaaggtttatactctctgacacacacacacacacacacacacacacacacacacagaaaagccttaaccaaattcattagagtatattgtaattagttttgtgaatataaaattaaagcacttatatttaaaattagaattagtgactttaagattgaatgttgaatcaaattctcaggattttacagatttttttcctgctattccaaaatttaaaataaagctctctaatc

SEQ ID NO: 7511 - DNA, 516 bp, Canis familiaris
aatgctcatgaaaagtatggaatccctatggaattttatcccttcattaaccaggagaaatgccaatacactttatgatctccgcaatcagagatggagagctaagctccaggagaggatcagagaaaccaccaagcccgcctatgagctcaaccgggaagcctgtgatgacttcaagctttgcgatacgcctacgccatggtttatggatacaatgctgcctactatcgctatttccggcatcgccgaggaggcaaatgagattgtaaataagtctctttccttccagagcctggtgcctggttttgtattccttgtacagtagcatcatcgaactacatataacacatacaaattgcttatttcttaaatgttcttgtctggctgttgccctccttcctgccccccagatcaataagcagtgaaagtgcaatgtggtgaaaggtcaaaagagaattaagatgtgtgattattattacataataaactcttggatggatactttccagaaataaa

SEQ ID NO: 7512 - DNA, 500 bp, Canis familiaris
  misc_feature (1)..(1): n comprises a, c, g, or t, or includes no nucleotide
ncaggccctgtagctgtacccgcattcagctcaaggctgtgaagtcctccacaggccccggggatcagctcggaatgcacctctggcacacagtgggacacagcatcacaggtgcgtcttctgtggaatggacccccgcaactgtgggttggaaggactatgacatcctatccgctggttcctgcagcatctggccccaagtgggctacatcagatgttcggttctacgatgggtcctgagctggtggccgacagtcaacgtggtcctggacacaaccatgcggggtggtccgcctgtggggtcttttgcttctcccaagagaacatcatctgggccaatctgtcgctaccggtgcaatgacaccataccagaggactatcgagactcagaggcttctgcaggcctagggatgggggtggggacccattgctggaagatggcaccatcgtggctacccgtttgttgctcactgcaacaaacagggagcttggcacccggc

SEQ ID NO: 7513 - DNA, 622 bp, Canis familiaris
gaactcccaggctcgtcatggtccgccaaggcgcccggcgcacgggctcagagagagagcgagcataaggcaggaggatgtggcaggcagaggggagagggagaagcaggctccccacagaggagggagcccaatgcagggctcaatcccagaaccctggggatcatgacctgagccaaagtcagatgcccagcagcctgagccacacaggcaccccatcacccgagccttttaaaagactcacccagacttcagtggatgctcctggatcttggatgcactgggctccctggaggattggctgctggaacaggttagcctggaggcggttcgactatccttctacaaccacagaagagctgttaccagcagagagatccttggagctattaagcagagatcctttctgaagagcttttgtgtaaacgaagtgttctgaatggtgctgttgttgaaaggattgcacttgtcaaaaataatcagataggtcagaggactgagttggaagacaaggtatctgataaatacctgttgcaacaggagtcttggtactacatacctggtctctgggtcctgtgtttttggcctctgacctaatttgtgtgtggggaaatataaaggc

SEQ ID NO: 7514 - DNA, 627 bp, Canis familiaris
cacaatcccgtccaggtgtgcttgtcacagcgtccacctatgtccctgcccctgggtcctagctggggttttgttgagtggggtgcccagaatgtggcccctgctttgatttgccagcgtcctgcccaagagagccatctgctctctgcttgggatcctcttttcctgccactccttgcccactttgcttctcttggacacggtgtggttccagctcatttctttcagcccaaggctggggaaaagctgggatggtctgggaagccattgcatctgaattgccaggggtcatgctgactcttcccaagactcgaatccttggcgtgtcagcttgccaaggaggaagaccagggccagaacgtcagaatcttggtttgtgctttgaggggtttctcatgtcattccagcttcctgctaagtttcatccagaagcaattgcagaggctcctacagatgtttcagtgctttgattttggacaggcttagggtttaggaagagaagcttcccttaaccaggggtgccatttttcctcttggtttgcaagggtctgtaaatacctatatataaatttctgtgtattctcttgtgtcaaaaataaaaaaaaaaaaaaaaaaataaaaaaaaaa

SEQ ID NO: 7515 - DNA, 212 bp, Canis familiaris
aatattatccttgttttatttaaataaaatgttcttcattttgctttatagtatattgcccgtaattaaaaatttgtattatagcttcaatattacggttggcttttttttttttaaagatatgtttgcaataaactgaagaactgtaatgcccttttgtggaagaatttagaagtaatagaatgattaaaaatattaaacagatttaatac

SEQ ID NO: 7516 - DNA, 643 bp, Canis familiaris
agggagaacaggctccaagcaaccgggagcctgacgtgggattcgatcccgggtctccgggatcgcgccctgggccaagggcaggcgccaaaccgctgtgccacccagggatccctgtttgacagtgtcacgtgaagattattacgtagaagcacattgggctacaggatgccataaaagcatgtataagctgagtttattgcatttgtatttaacgtagtataccattaaaatttattgcattaaagctcaagcaaatgttttttcatgtttagacatcactctgttagaaagttcaattcattaagctctacatttcaatataaatattttgtaaagtgtccaaacttattgtatgtattgtgtttaaatatttatatttggccctatgtgtcttgtaaatcacaaaagagcagagttttaatatttgtttttcatttattggttgtctgttaaaaattgtgaattattttttgattgctaatgttatttttttcctttggaatttttggcataacacgtgatttccataaatatgaaattactcttgagaatacttaaggcaaatacatcctgcttataactctggtacattaaaatgctatagcattttaactgtgaaaaaaaaaaaaaaaaaaaaaaa

SEQ ID NO: 7517 - DNA, 662 bp, Canis familiaris
agacctgggatcgagtcctgcgtcaggctccccacagagagcctgcttctccctctgcctgtgtctctgcctctctctttctctgtatctctcctggataaataaaatcttaaacagtacttactaaaccccaaaaggctacctttcaggccacggagagactaggaacagaataatctaattagccattgttccaaaaagtttgggccagtgtgaagatggaaggaggaagggaaatttgttagtaatgtggatatagcaatgaagaataaacaatggcagtgactctggaaataagggcagatcttaagagggaacccggggcaagatcactggaaaaaaaaaagatgagggatgcagttaccaagggaggcaagaatggtttgagagaggaaaaggtcgtaagtccaggagactcgaagcccacacccaggcctccacttttctctctagtaaattggaaatgagaatcttatctataccagatagaattcttaagactgtataatacctgtgagaacactcagctcacttgtggtgcagagtaaatgctcagcgttagtatttctaagttgcacacattgaaatagaggaagtagttaacagcaatgcttttaagaatgaactgaaagttttgtttggggaaaaaaaaaaaaaaaaag

SEQ ID NO: 7518 - DNA, 493 bp, Canis familiaris
cagccggccaggtgggtcagcagcccctccagggtcccccgtctaccttgacctggcctatctgcccagcgggagcagtgcccggctagtggacgaggaattcttccggcgggtgcgtgcactctgctatgtcatcagtggccaggaccagcgcaaggaagagggtatgcgggccgtcctggatgcactactcgcgggcaagcagcagtgggaccgtgacctccaggtgaccctgatccccaccttcgattcagtggcaaagcacgagtggtacgaggagactcatgctcggcaccaggcgctgggcatcaccgtgctgggcagcaatagcaccgtgtccatgcaggacgaggccttccccgcctgcaaggtggagttctagctccgttcccgacacccaccccctcagcccagaatctgccactgtcccgagattcccctgcatcagaaataaaccaggtactccactcaaaaaaaaaaaaaaaaaaaaaaa

SEQ ID NO: 7519 - DNA, 483 bp, Canis familiaris
ggaaaaggagaaaaaccccaggttcttgtccaatttgccgccttcccccacaaaccgggccaatccttgggaacctacggattcttgaaaagccgtccctgagcaaaaatgggcatccacccaaggtcttccagcgcccgaggctgacctctctgggatcacctgaggaagggcccttgatgctgtcacaaggggctgcacaaggccgtgctgaccatcgacgagaaagggactgaagctgcgggagccacctttctggaagccatccccatgtccatgccgcccagtgtcgacttcaacaagcctttcctcatcatcatcgtcgacagagacaccaagagtcccctcttcatgggaaaggtggtgaaccccacccaaaagtaactgccttgtgggtcaggtcccttccagataccattaaagagtgacccaccccaggaaaaaaaaaaaaaaaaaaaaaaaaaaaaaaaaaaaaaaaaaaaa

SEQ ID NO: 7520 - DNA, 469 bp, Canis familiaris
  misc_feature (22)..(22): n comprises a, c, g, or t, or includes no nucleotide
caccactgaaataagggctatnacatgatgactcctctagagggcagtgttgcccactcattgtaagaactgatacacaaaggaatgtgaatttaaagcatattgacctttgttaccttctctgaaaactgccaggccatgtatttttttttttaatttattttaagtttgttatttaattgctgtgtattatttgcatttagttgtatttaatcaccacatcacatttaggaaacaataggaagagcgattttctgaatgggagactactgaggctcttttcaggagatgaggttgagttcatttcccccctaaggtggggcatgaactggaaatggcaacggtcttattgaataagtctctctccaggcaagggatattttattccccagtaatttaaactgtccttttaggtaaatgtgggaagttctgaatagagagaccaagggccaaaaaaaaaaaaaaaaaa

SEQ ID NO: 7521 - DNA, 536 bp, Canis familiaris
aacagccaaatttaaatgtgttaaattggaataaattacccccgttaacctgttcccattcttaaccttgttttaatccaaattctttttcttcggggaagaatttgaatgccgaagttactgacgagccttcacccaacccccaagacgctaaccagtattttgagaagttgctgcagattcctttggccgctgtatttgttcatttcttgcaatttgaaggtacgagttaggggtttaagggaaaaaaaaatcagtttctgttcttaaaaatgcatttaagttgtaaacgtctttttaagcctttgaagtgcctatgattctatgtaactcgtcgcagactggtgttcatgagaatatatatcggtttaaaaaaaaaaagttggtattttataagcacagacaattctaatggtaacttttgtagtcttacgaatagacataaattgtaatttgggaacataaaaactactgaataaatcacgtggcctaatgttgaaaaaaaaaaaaaaaaaaaaaaaaaaaaaaaaaaaaaa

SEQ ID NO: 7522 - DNA, 645 bp, Canis familiaris
aggcatgaagctccagttgtcatagttgtaatttgttttattctgggccgccttcctgttactggtctcattgtccctactgtgctgctggtgtttcatagaaccatctctcaaataaaccacttgcactgaaatctttgtttaagagaatacaaactaagaaaggaccatttagattttgggaacagtgatctgttcttcattaagatagtattatatgtacaaaaggtaatatgcttaattttcaagatgacccacaatcacagaagaaacactcagttatattagtatattctgttaaataacatgagaattatttatatatttatgaaagttttcccatttaaaatagctcctatattacagttctggtgtttgacctttacctacacagaaatttaaaccatcttgaatgattcatttgattagaattctgatatccaagatgttattgtgctaattaaaacatatgcttgaatcccaagaaaatgggagataattaacttaattaacttagtactcaataaaaagcctacctaaactttcattaattcatgagaatttactagtaaaggtattagtgaagttaatcacatagttactactctctgtagaaactttcaaactaaaaaaaaaaaaaaaaag

SEQ ID NO: 7523 - DNA, 527 bp, Canis familiaris
acaaggattgcttctgccttcttccaaacttgtgttcttgcctggacctgaggggaaccaacctggattcaatccctctggttggacactcactcaaaagacgctttctgattaagacggttgaaactagggatggacaggttatcaacgaaacttctcagcatcatgatgaccttgagtgaagcttgcccagattcggtgcagcaattactaccagcaagaataaaaaaaaaaagaaattcgtatcttaaagaaacagctttcaagtgcctttctgcagtttttcaggagcgcaagatagatttggaattaggagtaacctctagttcttaagaaccaacactcttaaaagatttaggagaaagtttacaacataatctagtttacgaagaaaacttgtgctagaatactttttaaaaagtatttttgaataccattaaaactgcttttttccaacaagtatctgaccaacttgtttctgcttcaataaatctttggaaactcaaaaaaaaaaaaaaaaaaaaaaa

SEQ ID NO: 7524 - DNA, 585 bp, Canis familiaris
aagggagggcacttctgtcctgagtcttgctctttcggggaaaagaagtgtcccagttcgacttaccgaaatgccttacacattccttacaaatagagtaaccacgcacacaccgttatccaggcccaacctccagtagctctgagagaagccatgagagactcttagaatcacagaaatagaccttccagaccccttgtttgtaaaagaacctttgtcacatttgataaacactattccccaggaccagccctggaccaccaccgagcagacgccaaagcccttaccagctctgtgacagaccccagggtatgtgctggggaggccgggacgctgggtatctgtatgtcaatcagtgcaattgttttcttcccctgggttgggggtcaggaggcgagcggcctggtggtgagtctccagggctgtggagcagactggaggggcccagcccagccggggaggcagcagcccctcacccccgggggaagttgccagcaagaactgatgtgtgacttcctggatgttaatgccattaaaaccaacattgttgcccggcaaaaaaaaaaaaaaaaaaaaaaaaaaaaa

SEQ ID NO: 7525 - DNA, 685 bp, Canis familiaris
tgggtcccaatctaagcatctgtgtgccttacagtcaaggtatggtgggcatttttgtgaatgtctcctagtttatttacaggtgtcctttggcaaatgctctgaggtcaccaagtttggctggcctctggatttcagcaattgctggaagagaaacagcatactgagtagttgataccaggagcagaggtcttatgagaaaagctgtggaagctggggtagcaaggcagggacctggtgatcagcttacccaggctatcttgacacctccaagtatttacaaaagctgactaaagtgaaatagtgaggcctcaccttcttccttacctgaagtctgggtttcaggtagtatttggggaaggagtatatgtcctttaacttccagtgagaaacagtctcagataatgttttaaagcatggattttagagccaggtgtctggttcagatttctagctttactacttaactagcaggtttaacattgataattgacttatcttttctgagcctcagtttcctcaactctaatgatatgtattgaactgaggggggatgttgagaatatctacctcagggttgttggattaactgaaacaatgtaaagctttagcacagtacctgacaagcacttaataaatggctgtggtggtgaaaaaaaaaaaaaaaaaaaaaaaaaaaaaaaaa

SEQ ID NO: 7526 - DNA, 641 bp, Canis familiaris
  misc_feature (29)..(29): n comprises a, c, g, or t, or includes no nucleotide
  misc_feature (105)..(105): n comprises a, c, g, or t, or includes no nucleotide
tctgaaataagggcttcccatgaatttgngaatgtgaaatgctaaacacaacataagttgactagatactttaatttggttatgaaatcttctaaatgacaccanccagaaatcagtagattcgatttttgagacaatcatgggtctgaattgattaataaaactgtcttgggtttctcttttaaagtatttctagtgtattaatcatacttgtttttgtgcaatgggggttataccacaccattaagagaataaaatgtaatttgaaagagggaattacaagatttgtttaatgaaggcccccaaatataaataaagactggtgtggaatctcagtgtatgttttctgccattgtaaaatgtctttttttagcatctgtttctaatggtataatacacaataggtgaatttcccaaatattcattttttttttcaatgtctaagttactgtttcttcaaagaaacacatgaagtataagtagtaggtgagactttttgttttatgtgggaatttttacataggaattgtataaggtccaaaattcctgtaatactgtcttatggaaacgtttacatttaaatggagtttttcttctcttatatacattaaagtctattttcatttaaaaaaaaaaaaaaa

SEQ ID NO: 7527 - DNA, 313 bp, Canis familiaris
gcgccaggacgacgcaggcatgtacatctgcctgggcgccaacaccatgggctacagcttccgcagcgccttcctcaccgtgctgccaggtgcgtggggcgggaggccggcgcgcggggccgcctgcgcaggctccgggacccacggcagaccgccccgccccgtctctcttgcagaccccaagccgcccgggcctcccgtggcccccgcgtcgtccagcacgagcttgccgtggcccgtggtcatcggcatccccgcgggcgccgtcttcctcctgggcaccgtgctcctgtggctgtgccaggccaagaag

SEQ ID NO: 7528 - DNA, 417 bp, Canis familiaris
ctgtaggatggacagatccttcaggccatgaccatatcactcatcggggggaggagagggtccctgtcacctttccctcttctgcccttgggccctttagccctggacctccactgtgggaatgggagtcccctgccccatagctccttgccctggccagaactactgccgaaggaggttaggccccatgattttaggtcacgaaggccgtaaggtggatggaagggaagggtctgcaggctggagtctagttgtaccctctccgtcatccagatgcttcctttataagcaagtcagcagcacagctgcccctgctgccatccagacttcttttatgtcaatcgggtttataaataaaaacccatatagatgcccaaaaaaaaaaaaaaaaaaaaaaaaaaaaaaaaaaaaaaaaaa

SEQ ID NO: 7529 - DNA, 601 bp, Canis familiaris
gatagcggtttgactcacggggatttccaagtctccaccccattgacgtcaatgggagtttgttttggcaccaaaatcaacgggactttccaaaatgtcgtaacaactccgccccattgacgcaaatgggcggtaggcgtgtacggtgggaggtctatataagcagagctcgtttagtgaaccgtcagatcgcctggagacgccatccacgctgttttgacctccatagaagacaccgggaccgatccagcctccggactctagcctaggccgcgggacggataacaatttcacacaggaaacagctatgaccattaggcctatttaggtgacactatagaacaagtttgtacaaaaaagcaggctggtaccggtccggaattcccgggatatcaccgtgggctcgctgggctcacccgacctgtcctacatcttcacagagtgggttgcggtgggcactcacctgcctcacagaggatgggagggcttgccttaggtcctgggcacggaggtgcatgctctgtacatgtcaaggtattacgtttcgttatagtaataaaaatttggaaagccaaaaaaaaaaaaaaaaaaaaaaaaaaaa

SEQ ID NO: 7530 - DNA, 613 bp, Canis familiaris
cagcaactgaggtcatcaactgtctttcaagtattgggaaagtttttgtttttaaagcaggaatcacggggcatttacctggtttggtgccgagtgtctcttggtgccagtttggtcttacaaacaaagacaaaattctactctttaaaaaagaaaaaacaatctaaaaaaagtttaacatgaatataaaatgtttcaaagtaaccgaaaactaaaatcatccacgtattagttaaatacctgacctaggtttctttcaaatacagtttttaaaaactgattaaggttagagaaacgcaaaggccatgtgatctcatatgtggaatttaattaacaaaacaacaacagaggggaagggagggaaaactaaaataagacgaaatcagagagagacaaaccatgagaccctgagctctgggaacagactgaggaggccgctggggggacggggcctcggagggtggtcgccacgggggcgcccgatgggatgagcgccgcgaggtctctgcacccgtggactcactgggcgctgcccccgaaaccagggctgcagtgtgttaactaccttggatttaaattaaaataaaagctgataaagagagaaaaaaaaaaa

SEQ ID NO: 7531 - DNA, 459 bp, Canis familiaris
  misc_feature (19)..(19): n comprises a, c, g, or t, or includes no nucleotide
ttcaggtaccgaacccccnaatccttctctttggggaaggagggaggccaaggtggagttccctgggtctccataaaacaatggtggctgtgaggttagaacggattcagctgctttcagagctgcctctccatttatcaccgggagacgggaagtccccagtgcctgcaggtgcctgaagatacctcctttatgcttctcctagagtggagaaagagcgccctcaggaacacattcctctccccaaatgaaaggtgctgccttggctgggtgggaattccatctgtgccactttctctctgcagtctgggcaggtttcctacactccaaacctgtttgcccacgtttagagggatggcacccacctcttagggtggttgtgaggactgcccgacacacagcaagtgctaaataaaggctggttgtggttaaaaaaaaaaaaaaaaaaaaaaaaaaaag

SEQ ID NO: 7532 - DNA, 327 bp, Canis familiaris
ggctgagacaggtgaggacagcgtcctcttttgctccaggcacagaggagcaaaggtgtggaggctggaggaggatgagccgggaggagggaggaggaaggagtctggtccggcagggggggccacggctgcttccccccccccccccagctgcctgtccgcggctggcctggtgtcgataaaaactaaacttaaaattataactgagggggacacttgacgggatgagcactgggtgttattctgtatgttggtaaattgaacacccaataaaaattattttattaaaaaaaaaaaaaaaaaaaaaaaaaaaaaaaaaaaaaaaaa

SEQ ID NO: 7533 - DNA, 531 bp, Canis familiaris
ccctgctgatgtgattgtgatctgccaccatgttcgcattctgtaggaatttcggtcagcagcaaaatttgatttttgtcatatccctttccttccccttgaaaccccagtttaaatggtgtccttatggtgaaagttgaaatattcaatgtccttttagtataatcctttctcaaacacggagccctagccctgtcacctgaaataaaacaagcttgagaccatctgctgtagctcaggtaggtagggggagacagtatttcccctgtagaatgtttccagtttccaggagcggaggtatctcttacactagccttttttctgaggtaaccccctctggttgttgagaattccaatcaaggtcacctcagagcatgagtttttaaggagtcctaaagtaagacaaccattttcggggttactcattgcctctctccatttgtgtcctaaattactctgccgtgtgctattttagtgttttggggaaatgaaaaataaaacgtgttatttagcaaaaaaaaaaaaaaaaaa

SEQ ID NO: 7534 - DNA, 566 bp, Canis familiaris
  misc_feature (139)..(139): n comprises a, c, g, or t, or includes no nucleotide
tggaggccaaccacgaatgaagctgactgaggaccccgagaaacagacgctgcctgggagcaaggctgccttccggctcctgggccctgaagggtccctgctgttggatgtgctgcagctggcagaggagccaccaccncaggctggccaggagctgcgggtctggcctcatggggcccgggaagcctgtaccgtgaggcctgccggcgtggagcccctgctgaggctctgggtccagcagggacagctgtgcgagccgctcccatctctggccgaatctagagccttcgcccagctgtccctgagccgtctgagccctgagcacaagcggctggagtggcccgcgctctaccaggttgcgttgtctgataagctccgggccctggtggacagactgggtgcgggaggatcctcgtgagaaccatgcttggggggcagccctggggacttggtggtttagctcccatatcgggctccctgcctggaacctgcttctccctctgcctgtgtctctgcctctctctctctctcatgaataaataaaatctttaaaaaaaaaaaaaaaa

SEQ ID NO: 7535 - DNA, 535 bp, Canis familiaris
gacatgtgagacttacactggcgatggtgtatcgtgggaagctcattgaggcggaagaccacatgaactgccagatgtccaacatcacagtcacatacagagatggccgagtggcacagctggagcaggtgtacatccgtggcagcaagatccgctttctcattttgcctgacatgctgtaaaatgcacccatgttaaagagcatgaataacctaaaccaaggctcgggagctggccgggggaaagctgctattctgaaagctcaagtggctgcaagaggaagaggacgtggaatggggcgtggaaacatcttccagaagcggagataaatttatctgttgaacagaactttgctgttatttttccttttaggttatctaaggttcagaggggatgtgtgcttatgtatatgttctagcttttcttttgacatctttctctttagatcaggggaaatgttaaactaaataaatatggtggtgtttttaaaaaaaaaaaaaaaaaaaaaaaaaaaaaaaaaaaaaaaaaaaaaaaa

SEQ ID NO: 7536 - DNA, 223 bp, Canis familiaris
caagtattggggattttaaaattaaatttaagggaagaggcacagaattaaaagctaccagtattggggcagccccaatggcgcagcggtttggcgccgcctgcagcccggcgtttgatcctagggaccctggacggagtcccaggttgggctccctgcatggagcctgcttctccctctgcccacccccctgtcagtccttaaaaaaaaaaaaaaaaaaaaa

SEQ ID NO: 7537 - DNA, 614 bp, Canis familiaris
gcaaagtgtacgcagaccttatgagacccacctctcaccccttccccgagggagaacaagcacggctgcacattcaagaggcagtgctgggtttcccttcctcacctgattttttggggggcaagggtctaccccttccaaggcacactggtagacgcctgagaatgtttggtgtaaacatctcaaccaaaactttgggcttcaagagtttcaagaacctgggtgggcagggttggcccaaggggcacagcgtgccctgggaggcgcagcggaggccagcaacccgccccgctacctcctggaactagggtcagggcctgtggccaccacccggtaccctccggctacagaagttcagaatggcatccttgataactttttagttttgcagcctggagcgccatgctgtttcccaaggtacattttccatgtccttctagctgcttctggcatgtatccctgggccctaaatcatcacatgcaaaatattttcttgaatgagttcatcagttgttaacctcaaggataataatgattgtaataaagctcttgcatttccttccaaaaaaaaaaaaaaaaaaaaaaaaaaaaaaaaaaaaaaaaaaaaaaaaaaa

SEQ ID NO: 7538 - DNA, 573 bp, Canis familiaris
acaatgccaattcggtggccagctttctccccttcttctgtactaacctgtctggagtggtccaaatcagctttgtttccaaccaagataagagtcacattcttaggcttttttatctcatccaggatgttcttaagtgggagaacttcctcaaaacttcctcggtcagtaatgtcatagaccagcacaaagccttccccccatcgcatgtgtccttccctctgaatggtatcttcctgaccagcagtatctagtatctccatggtgacaacttcatcatcgatggttgcttggtgtcgataggtggattcaagagtgggatcatattcccagatgaaccgtttggtcaggaatctcactacaagagctgacttgcccacacctgctctcccaaatattgccagtttgacctctgcacttttagccatgccgggtgtccgtaaataattcactgtcgttcaaactaaaaagctgagaaaatctttttgcttccagccttaggattcaccatatcattgtaaatctgcaatccctgttcacactctgcaggcccgggagagccgcggtcccccg

SEQ ID NO: 7539 - DNA, 549 bp, Canis familiaris
gtcagctatatgttagcttctctataaaagtctttaggatattgttgaacccttgaagccatctgaagtatataaaagttattggttctttaattgtgaccattgtgttgtattctgctttgctatgagtgatcttgtttctaaaccatagtatcctatgtcctatttaacccttgtttctatgaaagagaagactgacttgggtttgtcaaactgtgttagtgtgcgagtgcccaatacaggaggagccccagctccctgcatgtcacgtcccaagtgcctgggcttggtgttgtttctggaagcttggagtatgacttgagagtgcagttgacaaaagctggacaccagggactctgggtcacagtgcccaattctctgggatatttccacttgtgttttaaagtaaagagttttttcttactggtaaataagcttttctctaatttgtgagaaacatctcaataaagttcttttaagagactgtaaaaaaaaaaaaaaaaaaaaaaaaaaaaaaaaaaaaaaaaaaaaaaaaaaaaaaaaaaaaaa

SEQ ID NO: 7540 - DNA, 529 bp, Canis familiaris
ttttctagtctgctgtgatccatttaaaatgtgctggggtttattctagtgtcactgctcatgcgtgctgatactaatggcactatcttgatttgaagcatatagttgagggccattgaaagcaatctttcattaatgcagataaaagcagtttacatatgcagagttaccaaatggcatatctgaatctgtaagtaatgactctcgtgatcacctttgcaatgttacatatttctaagaaaccattgcttttggatatggttgctaatgaagcactttgagaaaagaaaaaaaacacctctactatttttctggtcgggtcattgctctttagaagtagcatcagcaatagatttcaaaaataagtagtaagcattacactaaagtgtgtaaatacttcattttttagtcatattgaaaaattctttgcatagttttaaattctgagacacatagtatagtatatgtgtatgcataagatcatcttcagctttttgacactttgaaataaagaaagtaatttaaggaa

SEQ ID NO: 7541 - DNA, 634 bp, Canis familiaris
agtcctgtgggatgagtctatgtgatcatccaggtctgggtgatggtcttgggtttgtaatactatagatacttgattgcaaacttagttcaagatcatttagtgaataatagctatgaattttttttctaaccttacattgtaactttcttctcttttaaaagatcattctgtacaaagctgtagttcattgtattcatgtttacagtgtttattgccttaatttatgtttgtttcaaacatctaagcttattgcttggatttctagttagatctgttgaatttggtgatgtcaaatgtttatggggtttttcacctaaaattagattatttatgctataggcgattttatttttttttaagtaaacctgtaatacagaacagcagacaacataaatgcctaggtaaatgccaaacctaagacatttgttgcccagggataaaatcactggttagaattatttaaatactttagattgttttgttaaataatatacatggttttaaattttgctatgtatatagctacatgatgaaaattagttaaatatttaaaaagttacttatgttgtgatctttacatgtgttctttgttcttgagtgaaaaaaataaagaaataaattacaaaaaaaa

SEQ ID NO: 7542 - DNA, 610 bp, Canis familiaris
gacgccatccacgctgttttgacctccatagaagacaccgggaccgatccagcctccggactctagcctaggccgcgggacggataacaatttcacacaggaaacagctatgaccattaggcctatttaggtgacactatagaacaagtttgtaccaaaaagcaggctggtaccggtccggaattcccgggataaacagaggaccggggcctcttccacggtgtatccagacgtacccaactaataaggtcatcccggtgcgcccagcttccgtacgacgcaccattaggccaagtgggtttttcttccgagtggtggtggcgttggctcgagcggaccgagatgccttatcacaatctgaagttcttactggtctccgtgcctactgcccatctcctcctactggaaaattaattccctgactctgtctgacttgctattgtgttctcatcgcctacaactgttgcctggcatggataaagtgctcagtaaacatttgagagagaatgagacatatgtatcattttgtatgttataaaactttaaagtgtggacagttacatattaaacagttaatggaaagcgtgaaaaaaaaaaaaaaaaaaaaaaa

SEQ ID NO: 7543 - DNA, 599 bp, Canis familiaris
gaatttgtcatggtaatgcatcgtaagatcttgaaggttaaagcgtatacccctcgtcacttgcaacttgctattcgtggagatgaagcattggattccctcatcaaggctacaattgctggtggtggtgttattccacacatccactaatctctgattgggaagaaaggactacagaagactgtttaaaggatgcctggattccttattatctcaggactctaaatactcttaacagctgtccagtgttggtgattccagtggactgtatctctgtgaaaaacacaattttgcctttttgtaattctatttgagcaagttggaagtttaattagctttccaaccaaccaaatttctgcattcgagtcttaaccatatttaagtgttactgtggcttcaaagatagctattgattctgaagtagtgggttttgattgagttgactgtttttataaaactgtttggattttaattgtgatgcagaagttatagtaacaaacatttggttttgtacagacattatttccactccagtggataagctcaataaaggtcatatccccaaaaaaaatatataaaataaataaaaattaaaaaaa

SEQ ID NO: 7544 - DNA, 675 bp, Canis familiaris
gtccctagaaaggtgtattctgaatgggaggcctatcttagtgtttgctgtttgtcactctcatctatttgcccatagctttccatgctagtctacccatcttgaaattaaccacatctgtcagattaggtggtggctctactggcaaagttttacttgtagctacagtggaggggagacttctcaggtagaaatggatgttgatagtaatgcaggtatctctccctagagcagtggctctcagaagtatgctagaggccaggtcccagtcacctctggatgtttccagtggtacacatggcaccctctggtggagagccacagctctccatggagcttctaaacagaagttgccagaatatttgttttaattatgaatctaagctcaatctttagcatcataaacagaaatttaattaattagttctaaggagttttgtgacagttacatatactgcacccatgtactataccatgcagtgaataaataaggtcatttcttggggtgcctcggtggctcagttaagtgtctgccttcatttggggtcgtggtctcagggtcctgggatcgaggcccacttctcccctctccctttgtcccaacccctcattcatgcttcgctttctctccctctctctctcaaataaataaataaaatcttaaaaaaaaaaaaa

SEQ ID NO: 7545 - DNA, 616 bp, Canis familiaris
  misc_feature (1)..(1): n comprises a, c, g, or t, or includes no nucleotide
ncgtgtacggtgggaggtctatataagcagagctcgttttagtgaaccgtcagatcgcctggagacgccatccacgctgttttgacctccatagaagacaccgggaccgatccagcctccggactctagcctaggccgcgggacggataacaatttcacacaggaaacagctatgaccattaggcctatttaggtgacactatagaacaagtttgtacaaaaaagcaggctggtaccggtccggaattcccgggatcgctgtggcaccggcgccgcgccggcgggccgtacgtcgaggtgccgctcgaccgcaccggcatcgcctggtggaccgactgccacgtcaagttccgcaacccgccgctggtgaacggcagcctggcgctggccttccacggcaccgcgccgccgcccaactggccccggcccgtgtacgcgctgagcccggacccgaacaacaccggcttcgtcaaccaggacttcgtggtgtggatgcgcacggcggcgctgcccacgttccgcaagctgtacgcgcgcatccgccagggcaactactccgcggggctgccgcgcggctcctacgtggtcaacatcacctacaactacccggtgcgcg

SEQ ID NO: 7546 - DNA, 680 bp, Canis familiaris
gggccattttcccttctgagagcagctgcagctcaggccctaccataccctttcccgtctggcctctccctgtcgcccccctctgcttggaggagggagaagtgggaagtagtttgggaactggttttgtccacatccacttccccattgttccttagcccaccctcagggcagagccccctgcccaagctgggtaagtgatgggcttggtccagcagggaccctgagggagcaaacccctttccttctggggagagtgtgcccccctaccatgtagttgaacaggggctaggagctctccactcccctctaacagcaggctgtgtgggtttcaattcccatccttcccaccccggctaggtgtcgtccaccctgtatcctatcatgtgtctgagtgtgtgtgggggggttctgtactaatttccatggccggtggcttttccttccatgcatcactcccccccgcatgcccaggggccacccgcctggcattaccgcatgctggggtcattgggggaggggggtggggctcacgctgtccggtggtcttgagatttttatttttgcatatgtaatccatcctgtacaggtagctaactttgtaaacgctgtgtatttcccctgcccccatggctgctggtgtaaataaactgcatctcccattggtaaaaaaaaaaaaa

SEQ ID NO: 7547 - DNA, 651 bp, Canis familiaris
  misc_feature (440)..(440): n comprises a, c, g, or t, or includes no nucleotide
tcccccgataagaccaccatttccccaaagaagtctccccagcagtctgtgtggtgttcagacatatgaagagaagcaagacagcatttaggacggagtaggcccctcagagagaatgcttgagacttcactcagtggcccccagaggtgctccatggagaaggcaagccatggggatgaaaccccacatggtctagtggaaccatggcagccacccatgtacattccccatggtcggtcccagccccttcattccagttgcctcccactgtagaggttgtaaatcccaattcccactgttccagcttcctttgcagcttggggtgacaagtgaccaggtatggccagtgccatttaagaggcacagttttaacacaggggctttctggggaaaatttaagcctttttctggaataaaaagagggccagacatgggtaancacctctctgcccctccattcttcctgccttgattgaggatgtgatgcctggagccccaacagccaccttgctacaatgagaaaaaggccaagagaatctcacagacactgacctaccctaccatcatttgaccaagctgatgccggcagccatactccttcagaattcttgtaaataaagtgaaaatcccctttgtttaaaaaaaaaaaa

SEQ ID NO: 7548 - DNA, 596 bp, Canis familiaris
ggctctggcgcatcggagttcgagggggccgggggtcggcagagccttgtgtgagggccccgagtttttactgcccccgtgtgtgtgcctgtggggtgcatgtgtgcaagaggtttttttactctttcctgtgggcgccagccactttgccactttcctgagtctgtcggaaaaaccaccaccaccccagcccccagccccgctccgtgctggggcctcttggctgctccacctgcctcacaggtcaccaggtccgctgggcaaccgtgtgtgcatggaacagacattgccaccgcccccagcctgccccggcccgccagtgtccacccccgtggacaccgaaccctgtggctcagccgggcctccagaatgagtccccagagcacatgggggtcggtcacagacctgcctaacccccttcccgtttgcctcaggccacagcgtgacctgtgtgtgcctgtcccagaccctcgagccacccgtccttgctctgcccggggcggctggccgtgggcaggaagaggatggaataaaacctgtcttgccccgaaaaaaaaaaaaaaaaaaaaaaaaaaaaaaaaaaaaaaaaaaaaaaa

SEQ ID NO: 7549 - DNA, 584 bp, Canis familiaris
ggagggttctaggggcacctggctggttcagtgaagtgtccactcttgactcttgatttcacctcaggtcatgacctcagggtcatgagatcgagccctgcctctggctttgcactcagcgggagtctgtttgagtttctttccctctgctcctccacgtcagatagttagctagctagattaaaaaaaaaaaaaaaaaaaaaatcttgaaaaaaatgtccttcctgctaggtgagatgtagacataatagatggagcttgagcagtcatcttggactgtgaggtggaagcctctttttatgaataacagaaataaggtagggattgtctgagccctccttgaccggaatagcagccctgagctgcagcgtcggaagttttaggtgaggaacaaacttcttgcttgttgaagtgttaactgttttagcttttctgttgctatagcctaatggaattcttattaatacagtatatttttagcatcccctaggattgtttctgtaagtatagcatttgagatgtaatgattcagtaaacatgtattttgtccttaaaaaaaaaaaaaaaaaaaaaaaaaaaaaaaa

SEQ ID NO: 7550 - DNA, 603 bp, Canis familiaris
agagatctctgtggattcatcactgtggtgttctccaagtctgctagccatgtaggtaagggtagggcacttttaatttaaatgacttcttgcaccatcttgcctaatggactagattggactgtatcaacattgatttactccactttttatgccttccgattgtgatgacgtccaaacacagtgaaagccttcagtcatgcttatgggatttaattgtgtatcctcattactgtatcatttgtggggtacacccctccccccttttttaaattaaatacagctcattcttactgtggcttgtagcattcctcctcttctggcctcctggactcttccccttcatctcttttacccttgccccctccacccagtcttggtggtggtatattaaaaaatgaaagaacgaaagcacaccaaatgagtcagtttggggtcagtggtaaagggggtatatgttgcgaacaaatgttttaataacagttggctgtaatcactccttgccgtgtctggcaccgaaaataaggaaaaaaatactactactgaataaaagtgaccaagaatgaaaaaaaaaaaaaaaaaaaaaaaaaaaaaaaaaaaaaa

SEQ ID NO: 7551 - DNA, 580 bp, Canis familiaris
cctgtttctgcaggaacgctactgcctggccttgaagaggatgagctgccgagctgcggctcttctgtgcccagcggaggcgggaggccctgggacaggggtggcctgcctggtactttccaatctggtggaacacacctgtgagaaggaacttgatcctcaatttgggactttttgctgcgggagtttggctggctaggaatttgagtgacattgacctaatggcacctcagccgggggtgtagccaaatagacacatggaaccccctgtgctgtacttgaaccttccaaaactagagcctccaatttatgaccgtcacaagacttagccctcttggaagttgaagcttcaatcagaccaccttcccttcccaattgcttcgtctccttgagcccactcagaactccattctctggtcagcagtcaggtttcagccaaagtgttgtcctctgttctgtaaagttctgtacatagttcctaagtttctgcaggaggtgatctttgctcttgtcctgaggaataacctaatgatattttaagaaatatttggaataaagacgtatacaaaaaaaaaaaaaa

SEQ ID NO: 7552 - DNA, 456 bp, Canis familiaris
ccccactttccaaatttctattattctactcttgtataatagtagctatgaatatggcgcccaatacccgggttgtccctgtgaacggggggtggggaaattcaagtggagacaaagtagttctaaaccttcctccatatagaaatgtggtcagtgatgtcactttccttgctggtcatcattaggccttaaatgaaatgcagaagctcccatcaaagagtttaacactaaaatcttcagggctttaaatgaaagggtaaggccagtttcagaaaaacaactttagacattagcagctccaatattaaataaagctctgttttcctatatttttatgactgttgagaccccgcagggaccaatatttgtattcaatttacatttcatggtttcccattgtttcacaatgagttctaataaatgggatttagtataataaaaaaaaaaaaaaaaaaa

SEQ ID NO: 7553 - DNA, 659 bp, Canis familiaris
  misc_feature (234)..(236): n comprises a, c, g, or t, or includes no nucleotide
ccctcccccacaaatcttctctttatcctctgcatcaaggattttttgtctttcagaattattatttatttattatttaaagaaagcaggtacgggcagagagagagagagaatctcaagcagattccactctgaggtcagagtccgattcgggccttgatcccaggactttgagatcctgacctgagctgaaaccaagagtggacgcttaactgactgagctacttcggtgcnnnctggcatcagggatttttaaccgttattccacgggtagggttctgaagatggggaagcaccagacatttctgtatgcaacacactagtgtacctgcttgtttctgggaagaagagtgccaggatcaggagctctgggtgggggcggtgggggtgagggactcattgtagaagggatgcattgctcattcgtgagtagtattaaggtattttgaaactgctaggtgtgctggtgcagatggacactaatgcagccacaattggagaatacttcgcttcgtaatattggagcacatgttactgcttcattttggagcttgtggtgttgatgacgttctgttttctgtttgtaaattatttggtaagcatatttctctctaggcgtttttcctttcggttctacaattgtttaaaaaaaaaaaaaa

SEQ ID NO: 7554 - DNA, 644 bp, Canis familiaris
ccatggtaaagatccctgggatccagtcctgcatcagctttcctgggaagagcctgcttttccctctgcctatgtctctgcctctccctctgtgtctttcatggataaataaattgtttaaaagtttttaaatgaaaatgtctgtgatcgtgttttcaagacagactttaaacctaagccaaggtttttttaattcccaaaataaaaagtgttcatttcacaagtaattaaagtatcatatataccttaagtactttctcagaggtaaactgttcttgatttcccatgcctgtgctatacatgcatgtagcagatttctgactgctcaagtacagaaaatgtgttggctattgggtttaattctataaatctagcctattagctatgccttggatatatgaagttgaaaatcaaccaaaatggaggaaaaaatttttcccattatgttattcttttccattcctacttttactgatttctatcatttaatcagcctgaacccataccattatatttttaatgctatctcattaaccacactatttaaaatgtgatctgatctcacccaaccaaaaataaaacaccaaaaaccaaaaataaatgtaactggaatttacatagaaaaaaaaaaaaaaaaaaaaaaa

SEQ ID NO: 7555 - DNA, 617 bp, Canis familiaris
gtatttggttccatctgacatcactgtggctcagttcatgtggatcatcaggaaaaggatccagcttccttctgaaaaggcaatcttcctgtttgttggataagacagtcccacagtccagcctaactatgggacagctttatgagaaggaaaaagatgaagatggattcttgtatgtggcctacagtggagagaacacttttggcttctgagggccagcgctgggctaggtgcaccgttcctgcttgtgtatcttgtaaatagtcggccattttcagtttccagacctcttcacatagacctattagtgcatttgtaactggatttatttcttaatatacttggaaggttttgtttccttagattagtaaacttatcatacagagttttattttcagttttccttttgtgcactgtcctcatggctgtcctctccaggggacatgttcctctggggatcataatttaatgaagatatttccatattaaagtgaggtaggtggggtattaacgtgaaagggagggagatgatgcatttcttctggattatgtttgaagtgttaaagatggctaagtattaaaagcaccaaaattaaaaaaaaaaaaaaaaaaaaaaa

SEQ ID NO: 7556 - DNA, 546 bp, Canis familiaris
ctccccaatcaactttgaccccacaggttcatacccgagtggctaagaacaacccagaaatggtggatgcagtgtcatctcttggtgcacacacgacaatgtctcatggcctgggacaagatccacgtgggctcttcctcttagtgtttcttctactttaccaaagttgtttgtgaccaggagaggtttagcaataaatgttttctctagcatttgtaaagccaagagtttgcatatgaaagtcaaaggggagcaagagagagagacacttaaagtggttactgtacactcggcactgaattgaattttttatacatgtgatcttgtttcatattcccaacaattctgtgaaatgggtagttttatccttgttaaactcctgagggaatgcaggctctgattggtagagaaatgtagtccaaggtactcagctgctaaatcacagacttgagattgtacttagaccctactctcaaaaatgttccctgttactttgttctctctccacgtacctgctttaaaaaaaaaaaaaaaaaaaaaaaaaaa

SEQ ID NO: 7557 - DNA, 610 bp, Canis familiaris
ccttttaacctggagacttgtcggcttatggtttcaatgctggatagagatatgtcaggcacaatggggtttcaatgaatttaaagaatctctgggctgtgctgaatggctggagacaacacttcatcagttttgacagtgatcagagtggaacagtggatcctcaagaactgcagaaggccttgaccacaatgggttttcgtttgagtccccaggctgtgaattcaattgccaaacgatacagcaccaatggcaagatcacctttgatgactacatcgcctgctgtgtcaaactgcgagccctgacagacagctttcgaagacgggatactgctcagcaaggtgttgtgaatttcccatatgatgatttcatccagtgtgtcatgagcgtttaaacccagaagccgtatgaacacaaccaaccaacagcattccgattggagttctctcttgctcttactctttgccttcagccactgtgtgtaaacttgcagcgctgcttttccttattagctgtcataaagatttattactttatgtacaatctaagtttttagtgttgataataaattcgttggaattttacgaaaaaaaaaaaaaaaaaaaaaaa

SEQ ID NO: 7558 - DNA, 578 bp, Canis familiaris
ggctgccttgccgtgtcagctatgtgctacgaatctcatgaaactatggaatcctatgaaattaatcccttcattaccaggagaaatgcccatacatttatatctccgctacagagatggagatcttaagcccacggagaggatcagagaatacctccaagcccgcctatgagctcaaccgggaagcctgtgatgacttcaagctttgcgaacgctacgccatggtttatggatacaatgctgcctaccatcgctatttccggcatcgccgaggaggcaaatgagattgaaaaaagtctctttccttccagagcctggtgcctggttttgtattcctttacacgtagcatcatcgtcactacatagacaccatagcgaaattgcttatttcttaaatgttcttgtctggactgttgccctccttcctgccccccagatcaataagcagtgcaaatgccatgtggctgaaaggtctacaagagacacttaagacggtgtgcattagttatctacattatagactccccccatggattctccagaaaataaaatgagaataaatataaaaaaaaaaaaaa

SEQ ID NO: 7559 - DNA, 514 bp, Canis familiaris
tattcatggtttcgattccggagagggatgcctgagttccggctaccacatcctaggtatagtcagcaggcgcgcaatattacccactccctgaccctggggtaggtagtgatcgtatatcacatacaggactctttcgatggccctgtaattggaatgagtccactttaatcctttatacgaggatccattgtgaggtcaagtctgtgtgccagcatgccgcggtattccagctccatagcgtatatttagttgcttcagtttatagctcgtagttggatcttgggatgcgggcggtcggtccgccgcgaggcgagccaccgcccgtccccgccccttgcctctcggcgccccctcgatgctcttagctgagtgtcccgcggggcccgaagcgtttactttgaaaaaattagagtgttcaaagcaggcccgagccgcctggataccgcagctaggaataatggaataggaccgcggttctattttgttggttttcggaactgaggccatgatt

SEQ ID NO: 7560 - DNA, 656 bp, Canis familiaris
atgcacacctgtggagcacaaccgttttctccagggtgacgtttcaagctattacatatgttggaccagccccatcgtaagaaggaaagagttttttaaggtaaaaatttttgtggtagtttatttaatgaaaagaggtaaaagttctactcttggaagatattttggtgtctttattgttgccgtccattgaagacacaggcaaaccggacggtgttccccaaaatccttattttctcctacagacatccccaatcttcctaaacacaatgctactaccctttatgagaactctgaacattgtaaattttccttttatgttattttagtgacaaccttatcttgagccgtgttctgtgttttggtcggttttcgttgttgtcagaaagacttttaagagatttgttagtttagttagctgtttacttgtttttaaccttgagaacttttagataaatactttgtttttctctgagattctaactcttgttaaaaatgcattttatactttgagtcatgtttttctgattatggtgtattttggaaaagagtgttaggatcctttctgaggtcaagaatttttactttaaattgaacaccaataaaaaataaataaaaaataaaaaataaataaaaaaaaaaaaaaaaaaaaaaaa

SEQ ID NO: 7561 - DNA, 638 bp, Canis familiaris
attgttgaatgctatatgttaactgtgatctcgatgggctcagaaaaagctgagggaatgcgaatcagtacttgtgaatgacttcttcttggtggcttgtcttgaggatttcattgaaaatgctcgtctcttcatatttgagactttttgtcgcatccagccacgtgtcatcagcattaacatgcttggcagacaaactgaacatgactccagaagaagctgaaaggtggattgtaaatttgattagaaatgctagactggatagccaagattcgattctcaaattaggtcatgtggttatgggtaacaatgcagtctcaccatatcagcaagtgattgaaaagacccaaagcctttcatttagaagccagactgttggccatgaatattgagaacgaaacttaatcagaatagtaggtcagaggctcctaactgggcaactcaggactctggcttctatctgaagaacctgtataaagataatatgcaacaaaatctataataatacacagatgaaataataaaatcactgtataaagagtgacatacattttagaaacagcttaacatgttgagtatatatttgggggaatttgaataaaattggctgtgtttcattttcacaacaaaaaaaaaaa

SEQ ID NO: 7562 - DNA, 562 bp, Canis familiaris
gatcgtggtttattgaccaagaatgagcttcaaaaatgatcatacttttatgagagaaaagcaagttgggatttaaagtaaaagaggggcagtgtcaactagagccccagatatattgcacagaacaatgtctaaaggcctaaccaatcactcaccacaagggactacttatatttttaggagcgtgcaaaggtggaggcatttttgtgattttttaaaagattttttctttcaggaaaatgtagtgctatataatgtttaaatagagaaagtgaaattttgaaaggcactctgaggatcatatattaatatttatcgatattaacatcccaattttgatggttatactgtggttacctggtagggcccccttgtatataagaaatatacactggaatattaaggaataatgggccatgatgtctgcaatttatggtacagaaatgctcacagatgagaaatccaatacgcaggcaaatagcactgtggcctttttctaccacttttatgtacatctggaattatttcaaaataaaatgttaaaagggaaaaaaaaaaaaaa

SEQ ID NO: 7563 - DNA, 656 bp, Canis familiaris
ccccttccaaaatggcagcctccagccgcgcacaagtgttagatctgtaccgggcgatgctgagagagagcaagcatttcagcgcctacaactacagaacttatgctgtcaggaggataagagatgccttcagagaaaataagaatgtaaaggatcctgcagaaattcaggctctagtgaataaagcccaaagagacctcggaataattcgtcgacaggtccacatcggccaaatgtattcgactgacaagctgatcattgagaatcaagagaagcctaggacctagggagccggggccagccgccacgggcagcggagggctgccttcagcatccatcctgcgcttggccggctccccacagaccgcaggtggcctcctccaacgatagcctctcgctccgcctgccctcgaggagctgataaactgagtccggtgtccattcctcggcagccttagtgaaaagggtggctgtgtctccttgattcaggtgttagaatgaagaagtggcgctcactcggaacactgctgtgtattgtcgcgtctcctctcctctgtatctctccaccacttgtatagagcgcctccgccctctgtttcttggttgacaataaacagaatcgtctccctgaaaaaaaaaaaaaaaaaaaaaaaaaa

SEQ ID NO: 7564 - DNA, 475 bp, Canis familiaris
tgggctgccaggaaagggcatttgcttgcagtgccctggcttgtggcaagggaggaatgtccagacggaagctgcgtgccatctggagtctgctgggatccgtcagcagtctgttgaacctcggctttggcagttttgtccttctcattagctggaggggtttctttgacctgctggcagtgtactgctgaagtggacagggcccgaggggctggcttggccccaatttccatcatcttagggcagttttgggcatagaacaacagagattttcctgccttctgcagaaaggcctgaggcactcgggataagaatgggcagcggcgaacaacagtctccatatccgagagggtgcactgatcctgcgcgggggactgcggcggaggaagaggcggcggcggcggcggcggcggcgggcacccgagccaaatcacaccaacccgttgcccttgtcggcgagaagcctcaggccgcg

SEQ ID NO: 7565 - DNA, 267 bp, Canis familiaris
tgtaatgacccttgaggatcatgtacatgcatctttgttgtgtctctgactcagagcagcagctcagaaggagcctttgcgggcactcccggtggcgtcatgtggtttagcgccgcctgcagtcccggggtctgatcctggagacccaggatcgagtcccgcgtcaggctccctgcatggagcccgcttctccctctgcctgtgtctctgcctctcagtctctctctctctgaataaataatttttttaaaaaaaatgcttaaaaaa

SEQ ID NO: 7566 - DNA, 299 bp, Canis familiaris
cgtctcactgctgtttccatataagccctttgcgaggcggggtccgcccgtgcgtcctgcctgcgcgtgcttgtgagaccggccggcgagctcggcgggggcccgggggcccgggggcccgggggcccgggacttggagcggcggcacggcccctgctgtggccaggcccacctcggcctcgagcggagaatgcgcatttggacctgggggtgcggtcgcctcctcccccccaccctcgagctgtgacctctgacggtggacggacgaataaaaggggcggagagaaaaaaaaaaaaaa

SEQ ID NO: 7567 - DNA, 633 bp, Canis familiaris
  misc_feature (39)..(39): n comprises a, c, g, or t, or includes no nucleotide
tgccgtttctcgttgtatttattctcaccatttggggcnacatgcatctctataatcagactggaaaatgggattttttatgatttttcagaatagaaatagggcaatttaacttaccagcccccctccccataataaccgcagtctacacagagtcagtatattttttcagagaaagttattcactcaattttttctgaaccataattaaactttatgataaaaacttacttgtacttgtttaaacttcttatttacccaaatgagcttttgttagttgcatcttccgaagaaaggtagatgagggacgcctgggtggttcagtggttgggtgcctgcctttggctcagggtgtgatcctggatgcccgggttcaagtcctgcattgggctccttatatggagcctccttctccctctgcctgtgtctctgcccctctgtctttgtgtctctcatgaataaataagtaaaaaaaaaaaaaaaaaaaaaaaagggtagatgagacacatcctagcaaaatatgtgtggtggttacaccactcccttactccttctccctctgcctgtgtctctgcccctctgtctttgtgtctctcatgaataaataagtaaaaaaaaaaaaaaaaaaaaaaa

SEQ ID NO: 7568 - DNA, 525 bp, Canis familiaris
aatcagacagaggtgggaagtttcacctgggtagatggcaacgtctctggggagttcacggatctggtccctgagaaacttattgtgatgaaatggaggtttaaatcttggccagaagggcactttgccaccatcaccttgaccttccttgacaagaatggagagactgagctgtgcatggaaggcagaggcatccctgcccccgaggaagagaggacgcggcagggctggcagcggtactactttgagggcatcaaacagacctttggctatggcgcacgcttattttaggctgtcagcagggggctgcccgctacttcgggccagccctctcctgactggggcttgggactcccaggattgcaccatcccaaccactaacttggggctggggccccttccctccacatataccttgggtttgtgcatgttttctgctgggtgggatcagagggggatttctcttttatgtgtacactccgctaaataaacgtaatttaaaaaaccaaaaaaaaaaaaaaaaaa

SEQ ID NO: 7569 - DNA, 584 bp, Canis familiaris
aaaggcaagacacaggacaccagttgttttgcaggtgatcctacttatttaaagactgctactgaactttacgttcccaaaggccacggggtgaaggaatggttgttgaggcctccttttatccatcccccaccctgaagtggtggttagtatacggtacttgaacagattaaatttcgaagcgaactgctgacagggctgggcccaggaccaaagtacctgaattcttttgtcctgaaattctttctccatcttaaattcattagtccacctcatctttcaattcttctgtagttaccctacatggatacattttaaaggaccacttgcctttcattctgagttgaagagctacccaaggtcccctgagaattatatcccaatgccagaaatgacagttttgtttatgaccaggtcaccacattagagtcccaatgtccatgagctgaagatctgatttcagacaacctgatacaagtttaccagccttctttgctatagtgaaggccactccagccaccacctaggagggcagagcagtttgagcaattctatcccaaaagcaaccacccttctttcttagg

SEQ ID NO: 7570 - DNA, 567 bp, Canis familiaris
aggtgcacaagagtctgcagaggatccgggaacgcaagctgccaacttcatcccctggggccctgccagcatccaggtggccctgtcaaggaagtctccctacctgccttcggcccaccgggtcagtgggctcatgatggccaaccataccagcatctcctcgctctttgaaagttcctgccagcaatatgacaagctgcggaagcgggaggccttcctggagcagttccgcaaggaggacatcttcaaggagaactttgacgagctggacacctcaagagaggttgtgcaggaactcatcgacgaataccatgcagccacacggccagactacatctcctggggcacccaggagcagtgacttcctccccaccacttcccctagacaataagcatagttcccataatgcctggtccctgtgacccagattcccctcaccagaaacctttctaggttcatctctggcccaggagctggccctacttcctcccttctctgcgctgacccttgatatgcttgtttagctctaataaagtaataaagatttgtggtgaatacaaaaaaaa

SEQ ID NO: 7571 - DNA, 654 bp, Canis familiaris
cgattcgtttgaacaaggttgaatgatcccgtaaatgtctgaaacggagcgccagtccatgggaagtgagcgcgcagaccgcagcctgtttgtccaagagctccttctgtctactttagtgcgtgaagagagctcgtcctccgacgaggatgaacggggggagatggccgattttggtgctatgggctgtgtagatattatgcctttagatgttgctttagaaaacctaaatttaaaagagagtaataaaggaaatgagcctccaccacctcctctttgatgacatcccattcgcagacaatgtcctctgtgctgtatttgccaatgaaagtggacaacaactatcttgggtttgtttggtgattgtaatttcaggtctgtcactcttgttacattgtgtacattcaaaggaagagagaaaatatatatgataatcatttccacttaactaatttttacttctagcaggtaaatgtaggtagcagtgcaggggtgatctctgcttcctgtaccttgacatgcaaaaggctctcctaatactccacattcaaactgaagaggaaaattgaaatctctaatgaagctgctgtgtgtatttatgaatattaatgaataaaaactgcttggatggtttaccttaaaaaaaaaaaaaaa

SEQ ID NO: 7572 - DNA, 581 bp, Canis familiaris
tttcttgctccccgaagttagggttctctctgccccaatcgcgtgttaatatttccactttcggacgacctgcattttccttttaaaggaattccagcaagatacctttttctcttggacgttgactctcgactgtttgccaaagtctcgcattaaaaaaaaaaaaacaacaacaaccaaacaaccaccaaaaaccaaaaaaccaaaaatttacctgatctctacttgagagttgttggcttcttttttttttctactagtttttctttttttttttaatttttacttttttttttttttttggaaactttttccacctttaaaaagaaaaaaaaaaaaaaaagatgcactactgtgtgctgagcgcttttctgatcctgcatctggtcacggccgcgctcagcctgtctacctgcagcacgctcgatatggaccagttcatgcgcaagaggatcgaggcgatccgcgggcagatcctgagcaagctgaagctcaccagccccccggaagactaccccgaacccgaggaggtccccccggaggtgatctccatctacaacagcaccagggacttgctgcag

SEQ ID NO: 7573 - DNA, 587 bp, Canis familiaris
gagcatttcagccccagaccagaagcagttcagttccttaacgtgactacactccagaaagagttgtatgactttgctaaggaaatatcatggatgatgatgagggagaggttctggaatatgtggatgatctcttggagctggaggagactggctagtccacagcaaagatgtgtcccttgatgttcaggagacccagattgttcgtcttcctttccccagcaccccacgtggttgatacctcaaagcattctatcttactctgtgaagtgaaagagaagcctcatctcttactacatcccataaggggtgagcctgccttctccgtgactacacctgcctccccatggtcttcccatgttcacacctgccttctcctcattcacacctgcctttctcaccattttggctggaaggacagatttccatttttccccccagaaaatcactatcatttttttaataagaaaaatactcctaaaattagctgcttccagattttagaccccattatccccatgccctgatccaagaaaaactgtggaaaacaaaggccaaacttctccacaccttaaaaaagaaaaaaa

SEQ ID NO: 7574 - DNA, 629 bp, Canis familiaris
agaccttaatgtactgtaaggaatgtgtgtcacattggaaaatttatacagacactttgaatatgctaaaaatcttgttagctggatatttcaaggaggtaaaatcaagtaatcttactggagacatacagatttggtcctccgcccccctgccttttgatggattttatgagtgaagcaaaagcaccatctggagggaatgtgttttgtcacaccaaagagatgaaatttttgtaaatttacatctcacttaggttggagattctttgccataggccaatttgctttcatctaaaattctatgggagatagggatgactcaagccaagttgcattcaacataatgttaagctaatgaggttctgttagtttgggagtttttttcttttaacctgaaggaaaacctgtttggggcttctaaacactaaagagaaaattttggcttagactagtattcagtctggtgccaaacttccaatggaattcaaatccacggaatagaaattttatccatagaggctatcctaataaattaatccttcactttgatctatttgatggtcttaaaatttcctgtttcaaacagctacattacttgattaaaacaatgttaaaattaaaaaaaaaaa

SEQ ID NO: 7575 - DNA, 646 bp, Canis familiaris
tggcgtccaagagaacaagtggtgaaaagtgtcaacaatggaaagtgccccagcagggaacgataagaagaatgaaaaggagcaagttgctaataaaggagagtccttagccctccctttggaagctggagaatattgtgtgcctcgagtaaatcgtaggcggttccgtgttaggcagcccatcctgcagtataggtgggatgtgattcagtggcttggagaaccacagggaaggatgagagaagagaatatggaaaggattggggaggagatgagacagctgatggaaaagctgagggaaaagcaattgagtcatagtctgcgggcagttagcactgaccctcctcaccatgaccatcatgatgagttttgccttatgccttgaatcctgacgttttccctgaagttaaataggaaggcacacctgcttcctaaatttacatgttctcaatgtacctttgttgtaaaccttttagtgttatatgtctcttatgggcctcctatgaccagcttctaattgaatgttgtattttgacccaatctgtaagattctgtcagcaggggagttttaccctattgcatggcaagatgttcattatatattgtggagttaataaagcagtttaaaagacaaaaaaaaaaaaaa

SEQ ID NO: 7576 - DNA, 474 bp, Canis familiaris
cgtttttataggatttccacttaggccgtgatcagtagttaagcacaggaaaatcccttgccaccccacctcccttggtcgatgccattgattctgccagcagctcctaaaccgccttacagctgagttagagatgaggggaggcagcagggatttccctgccttggggtgtggggagtagcagcaggttggggaagtgggtgggaatcccctgttagaaatctgtaagttctggttttactttgctattgtgccctactctggtccaaatggtagagtgcctcctttagaggtttagaggcaaatttgctccccaacctggagagggtagaaatgaccctcctttgttgaaataggatcaagggaaaacacagacttccaagataaagagactcttcccttgctatgattcataaacattttctatctcaaatatacccaatatggctttcccaaaaaaaaaaaaaaaaaaaa

SEQ ID NO: 7577 - DNA, 544 bp, Canis familiaris
agctcccttcccgtggccctgtccccaggggaagtggatggagggccctctggcttcctgccccaggaggggactgccttgggggtgaccgatttcaacccggcttctctggggaccgcttggcgcacagggtctgtctgggtcttgtctgcaactgatgcgtcgagtgctaaacagcatacattaaggagagccctaccgggctcttgttttaaaagcctattattttaatttccaaagcttttacagggaatgggcagcaaatagagcaacggcaacgcactgtctgccttctaattatgacattcatgactcagaatctcaaactgggtatttctttggccactcttcccagcatcccctctgaaagtgtcggcctgaggaggggatgctgattggggggatgctgatgtgatgcatcggattacagaccttgctgggggtgggtagtaatggtgtctacagcagggcagagtgggggaagaactaaaacatatttcattaaaaagcaagagaaatcccatcaaccctcaaaaaaaaaaaa

SEQ ID NO: 7578 - DNA, 574 bp, Canis familiaris
agcgtagaagcaggctccatgcagggagcctgacacgggacttgatcctgggtcttcaggatcataccataggctaaaggcggcactaaaccctgagccacgtgggctgccccccccccctctcattttgcccattgcccctgcctcctccccttctgtcgtgcttctttgaggttttcaaattatctgcagggagggtataatttataatcagcagaaaagaaagtaaaactttgttttggaaattcttacacaccattagtaagattgaaaaataattaagaaggtaggtcattgtttattttcttctttctagaaaggatctcgttcgagtagaagccacggtcatcgaaaagacagaatcatggcccaaaattaatatgaaatttaagaagaggaaaaactacaggaagacgaaagttatcgtgaacccacagactgtccttcggataaacaccattgagatcgctccatctttgtgctgatcctgaagctcatgtttacagaatgtaaaaataaacaccctgttttctggaaaaaaaaaaaaaaaaaaagaaaaaaaaaaaaaaaaaaa

SEQ ID NO: 7579 - DNA, 663 bp, Canis familiaris
tttaaaaatagactagagaaataaagcatatggaacatgcatatggacaaaacaattatttggatgagcttgaatttctcatctgaagccatgaaatcaatgacaatggaagaacatctttgaagtactaaaaggaaagaactgtcaacccagggttctatgtccagcaaaaaatccatcacaataaaggctcaataaggacactgtgcaagagatttgaacaggcatttcaccaaagaagatagatggcatataaacaaaaagatgcttaacataagcccttatgatgatttaggcaaaataaaaccacaatattataccactataggtctactaaaatggctaaaataaaaattacaatacccagttttagtaaggatgtacagcaactgaactctcatccatcactagcgggaaggcaaaataatatagccactctggataacagtctggcagtttttttatacagttaaatatacactatacaaccagttctaggtattcacctgggagaaatgaaaattattatttttttaaattttaaacttatttaattcataaattgataaaacttatagcacggaaccccccaaaaatgttaattttacccctcaaaatgttaattttactctaaattttaaaaaaatctctcactaaaaaaaa

SEQ ID NO: 7580 - DNA, 610 bp, Canis familiaris
gctaaattccaaaaacttgctggttgccaggaaagattcagcacattctctgtactggaaacctttgcaccaaagagagttatgactatctcaagactctgccggtgatgttcatattgtgagaggagacttcgatgagaatctgaattatccagaacagaaagttgtaactgttgggccagttcaaaattggtttgatccatgggcatcaagttattccatgggggagacatggccagcttagccctgttgcagaggcagttcgatgtggacattcttatctcgggacacacacacaaatttgaagcatttgagcatgaaaataaattctacattaacccaggttctgccactggagcatataatgccttggaaaccaacattattccttcatttgtgctgatggacatccaggcttctacagttgtcacttatgtgtatcaactaattggagatgatgtgaaagtagaacgaattgaataccaaaaaatcttaaaagccaggcctgtcttgctgttttttttttttcattcccatgttcaaatcaagtaattaaacatttatgtaccaccaaaaaaaaaaaaaaaaaaaaaaaaaaaaaaaaaaaaaa

SEQ ID NO: 7581 - DNA, 619 bp, Canis familiaris
agcaggtggtaccggtccggaattcccggatgccccagatactgcctgggggtccggagagctgggcgggtgggagtgggccctccccgcgggagcccagcgtggccccaggggccccgccttccaggaagccccttggtgcccgctgctctcccgcctgcccttccctcctggtgcagcaaggggggcgcctggccctgggctcccatccccagaaccagcccgggcggcgcggagggctgggctgctacccccgagctgctggcggagctgctgcaggagaggcgtgcggcccggcagcgtcctgtgctttgtttcacagcggcagcggcacgctggtgtccacagtgtgaggacgctgaccacgggcagccgctgctcggaagagcccccccacctgtctggcctccatcagttccctcctctgcgctcgttggtttgttctcgggttctttttcttcctcacttgccctgtcctgccttttgatggtgaccccagactctgagttcccccagggtccatggtgctgccccatctctgctccccgtgtttacacgccccccaccccgcgtgtccgccaggcaggagctgctggcggggcagcgggggcaggcgtcc

SEQ ID NO: 7582 - DNA, 601 bp, Canis familiaris
gctgcagatagatgaaagagaagcatttggcccacggctgccgcctgtcttctgccccaatgttcgtcagaaacttgaggcgcctcaaaaggagaaacataaaagaacaagacaacacaagaccaaaaagagcacagacggaggaaagagaagaaaaagaaacacccggaagcacaaacacaaaggcaagcaaaagaataaaaatcagagaagagtagtagttctgagagttcggacagcagtgatagccagagtgacgaagaagggcctgcagacctgtcaccccaggaactgctgagaagactgaaaagtctcccactaaggaggcagtaattgaattctgcactgacctgtcccggaccagatctcctccatgatggaagctcttcgattgctctgttaatacattgtacagattgtatttatatgtaaattcatgctgtaaaataatttttaaaaccttgacatttcaaaggctgccttggaaggttgtagaaattgatttctatttttaacttcagttggtgtcagaggaaataattcaaactgtacagtttaattaaaaatggaatttttctatttaaaaaaaaaaaaaaaaaaa

SEQ ID NO: 7583 - DNA, 622 bp, Canis familiaris
acagatgggagcagacatatctggccaggcgaatcccgttaagggccgtagctgaacccgcattcagctcaagtctttgtagtcctccacaggtccccggggagcagtctgcggaatgcactctggcacacaggggacacagcatcacaggtgcgtgctgctgtggaaggacccctcgcaacgtgggttggaaggacaagacatcctaccgctggttcctgcagcatcggccccaagtgggctactatcagagtgcggttctacgagggtcctgagctggtggccgactagcaacgtggtcctggacacaaccatggcggggtggccgcctgggggtcttttgcttctcccaagagaacatcatctgggccaatctgcgctaccggtgcaatgacaccataccagaggactacgagactcagaggcttctgcaggcctagggatgggggtggggacccattgctggaagatggcaccatcgtggctacccgtttgttgctcactgcaacaaacagggagcttggcacccggctccaagaggtagctgccctagaggggctcagaaaggacaaaataaagtgtgtgtggtggaaaaaaaaaaaaaaataaaaaaaaaaaaaaa

SEQ ID NO: 7584 - DNA, 627 bp, Canis familiaris
  misc_feature (40)..(40): n comprises a, c, g, or t, or includes no nucleotide
tgggcagccactcttccccacagtccagaggggatctgcnctaggtacaggtcctcctgcctctctccggtttcagcccacagcctgtcctccccactagggggactcctactacagaatgacttcagggtgtgcggccctgagggtcccagccctccgtcgtgctgcacgctcgctggaagtgaagacctccttcctaggagcatcattccaagggagactcctgattctgaagtctggtgttgacactggaatgacagcacagaaaaatctaggactcccgataccttctggaataaggaatttcccctccttgtccttgacctttgataaccgtggcaattgctaaatagaggaaacattaatgaattaaaaaagcattccttatttttttaactaatatttgcacattttcttagtatctttccaaatcttcgcctcttctattcctttgacagatggtatccctcctcctggatcattcgtttcacttggtttctaactttagatttacttcacttgttatttgacttagcaggtgcaacaacaacaaacaagtgtgcccgcccccacttgcctcttaactgaaaagcttaaaataaatttctgaaatatgtaaaaaaaaaa

SEQ ID NO: 7585 - DNA, 99 bp, Canis familiaris
gtcacctacagccacttctgttctatttccatttttatttttatagataagaaggaaaaagaagcctcgctttggcgtgggtatgaagccagaagccag

SEQ ID NO: 7586 - DNA, 665 bp, Canis familiaris
  misc_feature (46)..(46): n comprises a, c, g, or t, or includes no nucleotide
ggagggttacttgtgtactctacatgcacactttcccaggcagaanatcaagatgtcatcaggtgaaattttaaactcctacagtaacatcatacctgtggacattaaggaaatggcaaggacttgctcccgagacttcacgtttgctcccactggccaggaatgtggactcctggtgattccagataaggggaaagcctggggcccgatgtatatagccaaattgaagaaatcatagactgtaaaattggtcataaatatttcgtaagccatgtcagtgcattattatatttatttttctaggctgtgtgttaacgtttaaataattatgaagtcattttccctgggactgtttggaatcttatttatttaatacttggcatctcataacctaggcttaagaattttccaggtgtatttttttcctaagaatgtatctgtggcactggtttcaggtgttgcagatggtgtttgttctgtataataaatctgctgtcttttggttggcattttgcagttaaattaatcagattatatggttttatgcataatgtttaggaatacattcaatttatgatgttggtgctttgaacctttaaaaatgcacatttggctgttccttttataatttatctcatcaaatatacagatttctttcagacctc

SEQ ID NO: 7587 - DNA, 583 bp, Canis familiaris
atacttatattggaggacagttgctaatatcttctgaaatcaaatcatgtcctttaacccacatgttctgtcctggtgaaaactaccccatgtacctaagctatataactaagattgtggtattgtttgtgagaccaggtgaaaatcctgtccgtgcccatcagtactgtggaataccataaagcaacaaaagaatgagatttaactgtgtgaactaatgtggaaagatccaagacacattggtgaattttctgcaaattagattgcagatgagcatgtacagtaaaataccttttatgttttaaagaaggaaaccacgaggtaggcattttcatcagatacatttatgtattgaatggctagaaaaacaactggaggaggtctcctgggtgacacagttgattaagcatccaatttgtggtttcagctcaagttgtgacctcggggttgtgagatcaagctccgcatccggctgtgcacccagcatagagtctgcttgagattttctctccctctccctctgcccctcctgcttgtgctcactctctagaaagaaaaaaaagagaaagaaaaaaaaaaaaaa

SEQ ID NO: 7588 - DNA, 603 bp, Canis familiaris
atagtaataggaaccctaggggtaagatgcaggtcaaggtcagctgttgttaaagcctgggagttagtattgaagttctatgtccccccgtctctttcagcccactttgttcacagtctcttaaatcacttgaacgcgtgctgttttattgccatttatagaaaacagcatgttcactgtccaggtggtttggactccaggctgggggcttccctggctctcctggggatgttcccatgaaggactttgaaaaaccccaaagtgacagcacctccttcaggttcgagctgagaatggtcatggcagaggtgatatttgggatgttcagaaagacaaaaggaaaactacttaatggtttgaattgctttgaggatatttttaagaggtcaagttgcaggggatgggattttccagtgttttccagaagtgcttgtgaattgccagatgtggggtcttacacaatgtcggagggcctgcatcaccaagcgcttttagcctcccagagatttcttttttttatggtgcggtgccaccataggcatccagtctttggtaagagccaagcaagatttcttgaagttcaaattaaaaaataaaaaaaat

SEQ ID NO: 7589 - DNA, 615 bp, Canis familiaris
  misc_feature (237)..(237): n comprises a, c, g, or t, or includes no nucleotide
tgatgttcattcagcccaaagaagccaagaaaaatctcagagaggtgctccagtattatctcaaggattacagcctgaacaagaaccacagctgtggaatgagataagggatgcatgttccgctttcctgtcccttgactctcagcctcaggcacccaatgcattgaaggagctttgcatcacaattatggggactctaccaaagccccaggaaactgatgaaaaagataataccanaaggtttttatttcattattcaaagacacggaagttgggcaattcaaatgttgtgtcgtctgtcctgcatccgttactgcagcttgtccctcaactgcatgagagaagaatgaagagattcagactggacgaagaattccaaggtcctatcgcaagccaagttcgaagacagtttttgttcaggccacgcaatggaaggaggtcagaaggttacatttaaaatggataccaactattttctgcagaagcggcaccagagaatgcaaaatgttgacattctcttttcttctcagaaacaatccttgctaaacttaccatgtttgagaatccatgtgttgtaaacattcccaataaaagccggttgagattaaaaaaaaa

SEQ ID NO: 7590 - DNA, 692 bp, Canis familiaris
gcaggatgtcccaagctgcaactcctggatggagtccgtgaacatgggaagtttcatatcccgatctgaagaattcctgacccggatcagcacagaactcaccaatgaggccttgtttatcgctggctgccacatgaactctgtgcccatcaaggaaaaacagactacaagaccaagggactcagatatccaacatgtgttcttcaagacccgaggcaccgatacccggtgagtgaagcttcaagggagatgccctttgtcctgggagaaggatgaggagcctggaggggagagagcgagggtttgacaacatcctagcaggttctgacagaaaccgtacctgcaccaagacacacctcctgccatcctctcgtgacaagggagctctgcttagcaccttggcatccggaggatgactctaaccctctttgatgctgctcttggcctttcatatcctcctcattgtgtccttctagaacatacatcagagctcctcgttcacaagtcattaacacttcagtttgctggagatgcctggacatgagcagcatcacacccaaagcctcccaggtgttctggaaccatctcacacctctccaccctcagctggcaaggacatcaccagaaatccaaggctttaataaaaagacaggtctttccctcctcctaaaaaaaaaaaaaaaaaaaaaaaa

SEQ ID NO: 7591 - DNA, 622 bp, Canis familiaris
atcgtaatggataggattccccttccccggggaggaaactctagactcagagaagtgaagtcacttgtacaaatcacacagctagcaggtgtccaggtcaggatttcaccccaagcaagcactccccatcactttttttttgtttcccaatcactttggtatagcctctgaataataagattaaaaattattaattatgcaattataattaatgtaacctataattacaatatattattatagctattgtaataattactatattaattgacattattgttattatgattatcgtccgaagcagcagcaaccaccattgccctgtggccaacctccatgctaaggactgtcccattctttttttcaaacaacgaatactgagcatctatctgtgctatgccaggacccccattttacagacggggaaattgaggcccagggagcttctcccagagatggaggtacactgtccctgccaagcatcctcaactgggtgttccgagaccacctttgtaaagcaacctggtagtgttcaattcacgtgaggcactgcagccacccgcaccggtgcaactacctgggtctcgccgccccgcgccgctgaacagcggttggggcggga

SEQ ID NO: 7592 - DNA, 373 bp, Canis familiaris
cggatgtgatccccacggattctagtgcccactatccggtctctcttcgctggggagcctacttctccactttctgccctcggtgttctttgcccttctctgcccttcttcatgaataaaataaataaaatcttaaaaaaaaaaaaaaaaaaaaaatacaaataaagggacgccgggtggctcagtggttgaatgtctgccttcagcccaaggcgtgatcctggaaacccaggatcaagtcccacatccagcaccctgtgtggagcctgcttctccctctgcctgtgtctctgcctctctctctctgtgactatcataaataaataaaaattaaaaaaaaaaaaaaaaaaaaaaaaaaaaaaaaaaaaaaaaa

SEQ ID NO: 7593 - DNA, 644 bp, Canis familiaris
cccacgctggtgaagtggaaggcacgaagtcagtttggagccacacaatctctgttcagcctgacgagagcacagcagtcctacaagtcgctggtggcagatccacgagaagaacggctggtacacacgctcccaaggaagatggctaaccctggagagccgtccctccctcttccccaggcgccactggacccattacctttgaatgctgtattcggatctcacgctgcctctgtggttccctccctcatttgttcctggacgtgatagctctgcctattgcaggacaatgatggctattttaaacgctaagggaaaaccaaaacacagacctgtttcaagtactcaagactgacttacagaccaaccaaccacctggctggaacccctgctagcaggcattcttataaaaagaaactttcgagcctccttatattgctggaaactcagctgtgctccagactagagcctccttacctatgctatggatttttaatttattttctcttatttcatgtacactgctttttttggttacagtgtatgatggatgtgtatgaaaaaaatgtatctttggggaaaccaattaccagtttgttaatttgaaaaaaaaaaaaaaaaaaaaaaaaaaaaaaagaataaaa

SEQ ID NO: 7594 - DNA, 645 bp, Canis familiaris
acaaggtggctgccattggtgatagcacaggtgtgaagcgcgagggaaagcagggtacgggtgataagacaaatccaagtctacgaacccttgcgtaaccaagcaatgcacaccaacaggggggagcatctctaccccggggggccaaggcgctcccagcaccttccccgctgagggacaggtcctgatggaggggctgggtcccagcacatttgtgcaggccagaggcacccgggagcctgcatggctccgctctggggatttccattttatctctcaagctttttagatgccaaaaggaaaagcctttagcaggaggctaatgataacttcattattcttcggttctctgctcctcctccagctcctctttggtcatcatcttcctgtactggttcccccgcagcttccccgggctgtatttaaaggagaagacctctcccccgtcctcttcctcaggccctgcttgggctggtccctccgggccatcctgctccggctctggctgcggctccggctgcggctccggctgtggctccggctccagctctggctcctcttcctgcctggcctcagcggcctgctcctccgcctccaccggcgccgccgccgccgccgcgagctcccccgggccctcgggctccc

SEQ ID NO: 7595 - DNA, 608 bp, Canis familiaris
cgagtctccagaatgctcaagtacccaggtgcacagaaggacaccaaccgttcaggaggtccaagcagccttaagcacagtacaccttgaagctgttcttggtgcagcaggcccacatgatacttttgtgtatgttgaaattaacctgctaggcaactctgaattggggaagcagcctaaagatcctcacgttgtagtcatgttctaacgtggattaagagctttaccatttttggcattagcagatgaattcttgtttacctggctggtaagaaaagagtgatcaggcttggtcagcctagccagggactccccgagaagtttcaatgaatttatggcctcatcctgttaacattgttgctgtttgtttgtattgcaataataacaccctcatgtgagctgtggtgtaaactggtatctgttcctgtctggtctgagacaggcttcatctcactggtttgtgctcacaaagcatgcctgtatgactttaggggttttgttttgttttttttttttttatgaaggaatgtgccctatgaattcaataaaattcactgcagaatagatcaagtctaaaaaaaaaaaaaaaaaaaaaaaaaaaaaaaaaa

SEQ ID NO: 7596 - DNA, 483 bp, Canis familiaris
agcataattgaagaagaatcatacaaggactaattaactgtcagataggtttggggtgagacccattggatagtagaaggagaggattggcaaagggcagaaagaatctggctaatttctggaaaccaattaccttcattggtaatgaacaaattagtagaactctgcttgtgttaatgagtctggtcaaaaaccttatggtttattaccacactcaacagtttaccagctaatcactcatgatcctactgaatgttcaagttatacccacgttgaaccccaattttgcctgtatctccatgaaaaggtcataggctaacctcggccttcaattttccccagtgaattcctgagaatattccactagtggattggaagcctcatgaaggcagggcattttttcttggtcaccactgtatcctggcgtcctgacacagtgcctgatttggctcccaggaagtagctgactcaaaaaaaaaaaaa

SEQ ID NO: 7597 - DNA, 607 bp, Canis familiaris
ttccacgaacttccagcgtctgcctctcgaattctccccgagtacgagatagcagggacaggagcaggccgcccctgcagcagcccgggagccgcgtgggcctggagctatttgcgtcgcggtctgcgggggccccggggtacgccgatgacaggccggctcctggcgctttgcccccgtccgcgccgcgtacactccccggctccccaccgaggaggcccctggcagcgtccgggccgcggtcctgccaccggggaggcccggtccccacaccgggagccgcaggccgcccaccgcccgcaacgcgaggccgcagccaggcttgtaccctcttccctgacgggagccagtgactctcggacctgaggatcctttgatttcttttctttaagggagatttatgcgggggcggggggggccgggctcgtgtgcggccaggtgtgcagcggcggccgtgggcacgggaagagcggcctgcggatgccagctttccggggacagggccccgcccgtgttagtgcaaataaaagataaagagataaaaaaaaaaaaaaaaaaaaaaaaaaaaaaaaaaaaaaaaaaaaaaaaaaaaaaaaaaaaaaaaaaa

SEQ ID NO: 7598 - DNA, 578 bp, Canis familiaris
ttttgttatggttctcacagatgatggtgacatgatttacattctgataatgtggaccaatacatgggattgactcagtttgaactaactggacaccagtgtgtttgattttactcatccatgtgaccatgaggaaatgagagaaatgcttacacacagaaatggccttgtgaaaaagggtaaagagcagaatacacagcgaagtttttttctcagaatgaagtgtaccctaactagccgggggagaactatgaacatcaagtcagcaacatggaaagtacttcactgcacaggccacattcatgtctacgatactaatagtaacccatctcagtgtgggtataagaaaccacccatgacgtgcttggtgctgatttgtgaacccattcctcatccatcaaatattgaaattcctttagatagcaagacttttctcagtcgtcacagtctggatatgaaattttcttattgtgatgaaaggtaaataatatatgtaaaatataacttgaaaattttaattagtaaaaaaaaaaaaaaaaaaaaaaaaaaaaaaaaaaaaaaaaaaaaaaaaaaaaaaa

SEQ ID NO: 7599 - DNA, 634 bp, Canis familiaris
ttcgactctatgtttgcctaagtcactggttttgaggtcccatagttaggcttttttctcttgttgtcccttctgttggaatgagaacattttgattttccttcatctgtgaccagcgcccatagacatgggtgggtagtttgaaacttgagtatttgttggcacttcacctggtttctcttgtcatacctgagtgctctacttgccgaagtttcttgtttgatcccagagactgtcctctaaggtgttgctttccttttcaagtgtgttgtgaaggcaattttttaaggatatgaccagttagagcaacaattcccaattaaaaaggaaaagattttactttgcaagtaactgatgtctttaagaggacatttttaagtgttggttcagaggctctcccctcctctactgagagctctcctaacccagagctccaggactcggcccagctaacaaacgtaggagacgaaggtagcaaacagtgatatgagctttgtacagagatttgtacatttgtgtaataggccttttcacgctttatgtgtagctttttacctgtaacctttattacattgtaaattaaacgtaacttttgtcatttaaaaaaaaaaaaaaaaaaaaaaaaaaaaaaaaa

SEQ ID NO: 7600 - DNA, 635 bp, Canis familiaris
tacaccagtgcccaagagggaaacactgcaactttcttcatgtgttcagaaatcccaacaatgagttttgggaagctaacagagacatctacctgtctcccgatcggaccggctcatcctttgggaagggctcggagaggagagagaggacgggtcaccacgatgagtactatgggaggccacggcggcgaagaagccccagcccggtccactcctacaagagaaacggggaagccgagaggaagaggaggagcagccaccgggggaagaagtctcacaaacacctgtcgaggagccgcgacgggcccagttcacggagccgaggcaggaagaggggccgcagccgtggccggggcagccggagccagagctcctctaggtccaggagtcgaggcaggaggaggtcaggcagcagagactgaacgattcagggtcccaaatgcaaataaacttactttattcgtaactgattgtacaccgtccgccagaaccccacttcaggatacttttcttctctgataatcagtgtgtttagaatagaaagcctaggcaatatcaaatacacagaaaccgtgaaaatccccctgtaatcctaacctttagcaataaagttcacactggagcaaaaaaaaaaa

SEQ ID NO: 7601 - DNA, 680 bp, Canis familiaris
tatgacacagtcaaaaggtgtttggtggcctgaccttgtggacttacatgctgagcactcttgttccccattaaagacctgtgatcttgaaccagcgaggtggccttgatctgcctgccccctggagcagtatgtggtgcctccaggcaccaagtgtgagatcgcaggttggggtgagaccaaaggtaagaaagagcacagtgcaggggcatggactatcccaggccaggaggtctagactcagatgctacccagagggccctctcctccccattcttatcattgtaggtacagggaacaacaaagtcctaaatgtggcttcactgaatgtcatctccaaccaggaatgtaacatcaagcaccgaggacgcatacgggagaatgagatgtgcactgagggacttttggcccctgtgggtgcctgtgagggtgactacgggggcccacttgcctgctttacccatgactgctgggtcctggagggaattataatccccaaccgagtgtgtgcccggcctcgctggccagccatcttcatgcgtgtctctgtatttacggactggattcacaaggtcatgcagctgggctaggcccaatctcaatctcatgtactttggagagcacagagcttcctatcagacataaagctgcctcttctctttaaaaaaaaaaaaaaaaaa

SEQ ID NO: 7602 - DNA, 685 bp, Canis familiaris
aaagttggacaagtgggtaggtaacaccaactgacagatgatcataaacggagatgattacaggtgtgttcttaccttgggatttgaaagagcagagacctattttggagaaatcttaagctttgacaaaaaaaaaatgatagtggtctggacaatggttggatgttgatgtagtttccaaacgtgttaaaaccatcactgtaatcaaaaaaaggttctggtaactctatggtggtccgccaagagagtatttcattgcttttgactcagacaaaactaatagtagcatctttttgtcaagaagttgaaactatttgtcaaaaatgggtctaaaagcgctgcattggtgagcaggtatggagggacctgtacttttccatcatttgaccactgaaaccccagaccaccaaagggagtaactgcattggcccaaggacttttgccaaatccatcacactcacctgaccttttttcaacattaccacctcttttaccatttggaactccaagaaacagaacattctccaatagacaacagtaattgaaggatttgaataaattttaacaatgctgaattttataaatatgtaatatttggagaaatttatcattgggggaaagtagtgaatgctaactgcgtattttgctcaaataaaaacttctttttctgaaaaaaaaaaaaaaa

SEQ ID NO: 7603 - DNA, 679 bp, Canis familiaris
agcaggctgtaccgtccggattcccgggatagcaagatgcggcgtctcaatgtcagcggcgctgagcgaatctgtgggggaaaaggccgcggctgcaccgccgtttccgtttccagggttcctaccaggtcattaagcacttccacatggaggttggcacaggaccaagctcgagacacgcaactcataacagttgatgaaacattggatattactactttaactggtgttccagaagagcatatcaaaactagaaaagtcaggatctttgttcctgctcgcaataacatgcagtctggagtaaataacacaaagaaatggaagatggagtttgataccagggagcgatgggaaaatcctttgatgggttgggcatcaacggctgaccctttgtccaacatggttttaaccttcagtactaaagaagatgcagctgcctttgcagaaaaaaaatgggtggagctatgacattgaagagaggaaggttccaaaacccaagtccaagtcttacggtgcaaatttttcttggaacaaaagaacaagagtatccacaaaataggttggcactgactatatctctgtgcttgactgtgaataaagtcagctgtgcagtatttatagtccaggtataatacatctcttaatcttctaataaatttgacctttaaccacaagtaaa

SEQ ID NO: 7604 - DNA, 622 bp, Canis familiaris
  misc_feature (359)..(359): n comprises a, c, g, or t, or includes no nucleotide
ttgtttatctttatgcaggactgcagtgagtaagatattgtgaaacctgtgactcggcatggattcagacccggatgtcctggagtaatctgactgatgccttatgtgatgtatttagaaattctagctcaggggatctctgggtggctcagcggtttagcgcctgcctttgacccagggcgtggtcctggagtcccaggattgagtcccaggatcgagtcccaggattgagtcccagagtggagtcccacatccagctccctgtatggagtctgcttctcccgctgcctgtgcctctctctcattctgtgtctctcatgaataaataaataaaatcttaaaaaaaaagaaagaaaganattctagctcaaagaagtatatacttttagagctaaaagtgaatatatttatctactctaactctttttctttataagaaatcaagacccgggatccctgggtggcgcagcggtttagcgcctgcctttggcccagggcgcgatcctggagatcgggctctcggtgcatggagcctgcttctccctctgcctgtgtctctgcctctctctctctgtgtgtgactatcataaataaatgaaaaaaaaaattaaaaaaaaaaaaa

SEQ ID NO: 7605 - DNA, 610 bp, Canis familiaris
gtagttcccgtgttttcttctgtatttttaaagaaatctgttatttttttgtgcattaaaaaaaatctaagcagggggacatgccaaaaccatcatcatccacttggatgtcattttatagattaacactgtgtgcttttgtatggaaaaaatatatataatttaatagtataagtaaaggagatctatattcatttgcactcatgtaaaaccaactttgctctaccaaatgtcaagtttctgtgctttaaaaaaatgcatgtattgcatgtaaaggaaaaccatttgaattaatgtttatcacacctttctctcagtctgtttgtaaactgttgttgtggggtttttttcttgttcttgtttttaaatcacagtagacgtctgtatatcctagattactgagctggtcttgttaatgattccccagaagtggagcttttctttgatttgtcctttccaggagatcacaggaaatcctgccaggtaatgggtgtactatattagagccaatttggagactgaaagtttagggtttgttgaagttcattgtatggctatatttttgtagatatttaaaacttaataataaaactgttatcattctcaaaaa

SEQ ID NO: 7606 - DNA, 593 bp, Canis familiaris
aagcgattcctcttaccaaatagaaccccagcccttgaatcattaatctgatcactgcccattttgtggaattgcttttgaaatatgcttggcctctgctcaccgggagacttgctcttaaggtggatggtcctgtgtctgtatgtactatgagcctaatgacacagttgggtctatttctgccaaacctgtgtaggcattttataagctacatgttctaatttttaccgatgttaattattttgacaaatatttcatatattttcattgaaatgcagacctgcttgatcagttcccttgactatgggagtgacatttgccttaaattttttcaagcttgttctccattttgtcctgctcccctctatgactgtaatgcatttgccttgtcccctaggagctgaggaagcccagctgttgtttattgaatccacaacttcaaaagagaaatccacaaagcaaatacaatgttaaccctgttaataaaagagttaacatcccatgacaaagaagcccgtatttctttccaggcataacaattaaacaattaataaacgtgggtgttgacccaaaaaaaaaaaaaaaaaaaaaaa

SEQ ID NO: 7607 - DNA, 629 bp, Canis familiaris
gagcttgcaggagccgcaagcggtgctgggttcactttgagtcgtgcgggccgagggtgcaagacactttgctccgacatccctcagatgcacgtggttgaccacaccaaggggcagccttctgagagcgaaagcaggaacgtcctgacggagtccgcaaggatcacccggggcaagatcaccgatctggccaggctcagcgcagccaatcacgacgctgccatcttccctggaggctttggagccgccaaaaacctgagcacattcgccgttgacgggaaagactgcagagtccacgaggatgtggagagggtcctgaaggagttccacaaggccggcaagcccatcggcttgtgctgcatcgcgtctgtcctcgcagccaaagtgctccatggcgttgaggtcaccgtgggccacgagcaagaggaaggtggcaggtggccgtatgcggggaccgcggaagccatcaaagccctgggcgccaagcattgtgtgaaggaagtgaccgaagcccacgtggacaagaaaaacaaggtggtcacgaccccggccttcatgtgcgagacggagcttcaccacgtgcacgacggcatcggggccatggtgaagaaggtgctggaactctgtgc

SEQ ID NO: 7608 - DNA, 649 bp, Canis familiaris
gcagcggcctggagcagatttctcccagggcgttttcgggcctggggaccctggctccagagcctgcacctgcagaagaaccagctgcaggccatgcctgccctgccccatctcagccagctggagctcatcgacctcagcggcaatcccttccactgcgattgccagctgctcccgctgcacaggtggctcattgggctgaacctgcgtgtgggggccacctgtgccacccctcccagtgcccacggccagagggtgaaggctgcgactgcggtctttgaaatgtgcccaggctgggctgccaggaaggccaagcagatgcctgcttccggacccagtgccaggaggaccccatgaagatcagatggtggacagcagacaaggtggggaaggaggcgggccgcctctgagcactggagcaggccggccctgtcttgaccccgcccgggaggctcttactctcttcaggaacaggatccgatgagctcttctctgtggcctgcaggtcatcctccagcaggggcttcttggacccctgtctgaggggccgggtcttggtcggtggtattcttttccctttgaataaacacagaatgaaaccccaaaaaaaaaaaaaaaaaaaaaaaaaaaaaaaaaaaaaaaaaaaaaa

SEQ ID NO: 7609 - DNA, 708 bp, Canis familiaris
taggtgacactatagaacaagtttgtacaaaaagcaggctggtaccggtccggaattcccgggatcgagcaggagcggggaacaaaggagaggggaggggagcgagttgggcgagggagagcccccagccggctgcccgaagatcccggccggaggacgcccaagtgtcacttgaatcccacccgaggagcgggcgcctgggatccgagcgcctggattagcaataacggctggagcgcgtcctacaagttacgggagagtcggcggggaaggaggacaatcgcgtgcccccttcggccccgctcctggcccctcgagaccccagcatcgcctcgcgctggaaggggagctccagaatgaagagcaagaaaggtgtcgttgcagcatcaggcagtgagacagaggatgatgacaacatggacatccccctggacctctcctcctctgctggtgcaggcaagagacggcgaaggggcaacctgcccaaggaatctgttcagattctccgcgattggctgtatgagcaccgatacaatgcctatccctcagagcaagagaaagcattactgtcccagcaaacacacctgtctacactacaggtaaaggaagaagaacttgaggtgtatgcacgtgcgttgtttcctttgcttcccaaagtcattttattgcattcctgtaataacagatcattagatgcctccccactca

SEQ ID NO: 7610 - DNA, 425 bp, Canis familiaris
tgtgacctcatggctgtgaacaactgtgggctgcaggccgggctccctccatactcccagtgttcaagtcttggatccattgctggaatacctgagcgtgcagggccagcttttccgaggctccagcttgcttttccgccgggtgtcatcaggatcatgctttgccttggagtaaccgtgaatcacctgaaaaaacgtagtgtctcagcctggccaccgtgggtggagcccagtcatctcgggcacctgtcagatgagtccaacccagcaacacctagatgtgctccagccagctgggttttggtttccatattcaccatgtttctcaacactactttgctgataccaaggcagcatcttctgagtgagaaatcacgtgactgctcagaatgtgtctccctcagcaaatgctcgtccgtttaatg

SEQ ID NO: 7611 - DNA, 616 bp, Canis familiaris
actcacagcgtttcccagcgtcacccctggggaggtttgagacctttctcaagaatgagggccggacaatcccggtttgctccgaagtattcagtccgcgtcagtattttaaatggaatgattctcacttgtgaattggtttgggatccataggggaggcacagccacccacccacattataccaagtattggaatgattttctcaaggatttgaagtagggaagttacccaaacacttctgcttcccacttaactggcctgccatattgtaagaatggcaaatcctgttactgtgatatttagaatatccccagtgtccaccgtgttccgaagattctagtaatgatctagaaatatctttctcttatctgttatttatcaatttttcccacgtatttttatatggagaaaaattgtattgaagacactttagtatgcacgttgataagaggaatttggtataattatggttggtgattattttttatactgtatgtgcccaagctttactactgtggaaagacaactgtttaataaaagatttacattcccaccaaaaaaaaaaaaaaaaaaaaaaaaaaaaaaaaaaaaaaaaaaaaaaaaaaaaaaaaaaaa

SEQ ID NO: 7612 - DNA, 639 bp, Canis familiaris
atattctgagattagttttaggaacctcacaaagatttttattatggtgccatggttgttagtttttagtgagtgctgtaagatcccagattcattttaaaatatacagaatttccgttctccccaagtggccaaatttagctacagtggtaccaatatcatttacctagatgtgaataccttgtcacacgttaatgtcaacacatacagcaatttctgtgaaaagtagctgatgaagcctctcgttttctgtaattttgaatactgctctggcaaccaaaccataatatgaaaccagttagattctgcaagaagagctcttacaacagaactcacagcctccccccctcaccttcctttggtatcttgagccattaatgatttttttttttaatccagaaggtatattaagaaaccttttcagatttttctcctgatatgttcatgtggttgtagttctatcaaaacaccttattttaccttacagaccttcgttgcacaggcagacactgctgtatttagaaatttctatttcagttcattaaaaactgcaaaacccatctgtatcatgtacccaactgatttaaaataaatctacatgtttattgaaaaaaaaaaaaaaaaaaaaaaaaaaaaaaa

SEQ ID NO: 7613 - DNA, 614 bp, Canis familiaris
atggtgggctacgtgctggggcctttcttcctcatcaccactgtcggggtggtggtggctgtggtaatgtatgtccagaagaaataagcgagtggaccggcttcgccatcacctgctccccatgtacagctacgaccctgctgaggagctacatgaggctgagcaggagctactgtctgatgtgggggaccccaaggtggtccatggctggcagagtggctaccagcacaagcggatgcccttactggatgtcaagacctaaccagacccctcccagctctccagaaccataggatctggggcgtgccctgggcctgcagtctgctgcctccctctccgctagcactcacccagctccccctgctgggaactgtctcctctttccacccatccccagcagcacctcactcccccaccctccacagggccctcagccctgtgtgacagggtgcagccaaccacccaccgtctcatgggcaccacctggctttgaacgagtttccacggtgacagggcctaatgtatagtattcagtatatatattttgtaaataaaatgttttgtggctaaaaaaaaaaaaaaaaaaaaaaaaaaaaaaaaaaaaaaaaaaaaaa

SEQ ID NO: 7614 - DNA, 699 bp, Canis familiaris
cgagtggcacatagaagttggacaagaccctttagtaagaggattgtggggccgtgggattattagctttctgcacaggattacagtcgcctcctgggcagctgcccagagctctccttctcagatgggttcgggcccccatcagggccagagaagtgctaactcattctgtgtactttgagccaagagggcggctggcacctcctcattccatgctggggattcagctcactcaggatgtctgtgtcctcgtgaaagcttctggctgtcggagctcacagaccatctgcttgcattgcctgggcccctcctccagggcaccgaacctggcaataatgtgtcccatttggcagcccgtgtgacatctcttctggtatcaggtgactccaataatgatcatgcctgttgacacttagagctttctaaagggaattctgagtagcgatggaaaggccaagcagggctcaaggacacccgtggcgagcgctgcctgtgcagctggtgacgaagcccttgctgggaaaaataaaacgggttctgggtaagcaccgaactgtggctcgaatccggtgaggcacatgggaaaccccaagtgaggaatctggtttcccagataaataaattctgtaactgcccaaaagagaaaaaaaaaaaaaaaaaaaaaaaaaaaaaaaaaaaaaaaaaaaaaaaaaaaaaaaa

SEQ ID NO: 7615 - DNA, 664 bp, Canis familiaris
  misc_feature (28)..(28): n comprises a, c, g, or t, or includes no nucleotide
aagcttaaaagtagcgaatggggaaccnctgtgaaatggatgcacagtctcagccctggtttctgaggctggaaaaggatcctgcttctgtaggacctgcttctgcagatgccagtaggagtctactgggggtctactgcccctgggcccaaagaggagactgacttctgtatatgtctgcagtgtgtgagacaactgaactactttgcctgaggttggagtcccctcattactgatccatcaagtgactctctttggtcttacacgttctaccccagtgagtgatgccagctggagcagcacggcctctgttgctgttaatgcctagaaaataatccccccaaaggagaataagaagtctttgggctttctcttcaaaaaggagcccaaggctacttgagaccatcctgaatgccacagttgagctgatctgggggtaacttgcgtgtgggcaagaagaccgtgattgtaaactgaatgctatgaacatgtacgtgctctgtttgggagcctgcgaggaagcaggtgctcagcccaggaggaggtttctccgagtggatttcctgtgaagttaatgtttgtcactcaggcttaagttttgaagcaccaaataaacatttttaaaaatggaaaaaaaaaaaaaaaaaaaaaaaaaaaaaaaaaa

SEQ ID NO: 7616 - DNA, 589 bp, Canis familiaris
ggagccaggcatgtctagcggggctttggagatgagtctgagcctgaggacctccaagagggctctactggagcctgacatcgaagaatcagcatcagatgaccagccctcttcacacggctgccgcccccaccttccgctcttccctcttgggccctcccgttcccttccttcctctcaggcttgggcagggacctagagcagccactgctgcggggagggagggagggaggctgggtaggaggggaccttcctccagggaatgtgactctcaggccccagaatagctcctggacccaagcccagggcctggcccgggacaggacgaggctccgaggctccgaggctccaaggctctgagggtcggcgggccagggcgattttttacctcctgcctgcattgctggtcccctgccccacctgacgtcctattgcatagtctgacactggatccccatccctgcccccacctccaccccatcatctgtggacactggagtctagaataaaagctgtctgtcacatcacaaaaaaaaaaaaaaaaaaaaaaaaaaaaaaaaaaaaaaaaaaaaaaaaaagaaaaaaaaaa

SEQ ID NO: 7617 - DNA, 622 bp, Canis familiaris
agtcatattaaactcttaagtcccattaagcagaccggcattggcagtgtagccataactttctgatgttagtaaaacacatgggcgacttgaaattaaatcatgccaaggttttgatacacttgtcttaagatattgaatgatacacttcaaaaccctgataagaagtgtccagattctcagatgtttgttgcgtgagttttgtttagttgtgtgtattttttttttcagtgaatgtctggcacattgcaatcctcaaacatgtggttatctttgttgtattggcatattcagtgacttgtacattcagcggcagcatttaagcaagttttatcagtaagccaatattttcagttaaataaacgtttccaaaaatcacataagaatggatttaaacttgctgaatgtaaagattgaacttcaagtcactgtagctttagtaattgcttattgtattagtttagatgctagcacctgcatgtgctgtgcatattctgattttattaaaataaaaagttgaactgcacagtctcctttgttgttgtccaattgtggtttattataggtgaaaataaagttgtgctcttgcctgaaaaaaaaaaaaaaaaaaaaaaaaaaaaaa

SEQ ID NO: 7618 - DNA, 499 bp, Canis familiaris
ccactgtcctacatggctcagcggcagccgtccgagtctgggcggcacctgctctctgagccctccactcctctgtctccaccaggccctggggatgtcttctttccaaccctcgaccctgtgcctgactccccaaactctgaggccatctagaccagctggggccagtggcaattgtggctgggcccggggcaggtgcatctgaggcagagggagaggcaggctccatgcaccgggagcccgatgtgggattcgatctcgggtctccaggatcgcgccctgggccaagggcaggcgccaaaccgctgcgccacccagggatccctcatttcctgtcttgaatgctgacatgatggctggtgccatagtggccatcttgcaaccatgggggaaggtcaggaggcattagctctgacgtcaccgagcacaaaatcaacatttgtaattctctccagaatttttgttatgtgaataaaatgcattctgatttaaaaaaaaa

SEQ ID NO: 7619 - DNA, 664 bp, Canis familiaris
cagcccaccttgctcgggacggggccagggcttggccccagtagcctttcactcctctatctccccgcttctgagcggctccaggtgtgagcacggtgctggcctcccccccacaccccccagcttggccgctgcagggccactgggcccgggtttcgcagctgcgcagccccaccccatcgactaaatcaggatctgcagagaaaagcccggagaatgaggcatctccacgcgcaccttcgctgagaagcgtcccggaaaggccggccagaggctgcgagagccgcggccttcagagcacacacgtgcgcacacgtgcgcagccgacgcacgggccctcgggccactgggaggccaccaacattcgtgcgccaaaacctgaggctggaggcaggatgtacattctccccgtgtctcacctgcagaggaaagctgcgaacccgtgtcccgccgagggcacgtcccccacccaggctgtgctggccctgcaggtgccctgcccctccctccccttcaccagcctgcagcttctcttattccgacccagtgcctgacacacagatgcctgtgtggtgctttcccagaataaaggttgtgtattcgactctaaaaaaaaaaaaaaaaaaaaaaaaaaaaaaaaaaaaaaaaaaaaaaaaaaaaaaaa

SEQ ID NO: 7620 - DNA, 631 bp, Canis familiaris
  misc_feature (382)..(382): n comprises a, c, g, or t, or includes no nucleotide
cggttctcaccgcctgccgttctcctgcagggggctcctgcaacgtgcgccggctcctgcaaagtgcacaagagtgcagatgcacctcgctgcaagaaagagttaagtggaatctttcgtaatacaccccctgcccaccccctcccacctccaccctgtatatccccgcggggagtttaaaccgaacagccgacgccctctccttagggaaggtgctgccttccccagtgcgccctgtcgcggggaccggaatccttgatcctgtgtgcccagcacttatctctgccgcctctttctctaggctgtctgtctcctgtctgccccctggggctgtggtcccaaggtggcccacgggctcgcatttcggcacaagggcccacancgggaccaagtgccagcctgcctgtgccctaatgtgggggagagccctattcctgatgtaaatagagcgacgtgtacaaacctacagtttgtggggggttttttggtgctttttgttttgggtccaactctgacccgtttgctactacattcctagttattttccctatgaaataatacgtgaattataataaaagctgtcgactttaaaaaaaaaaaaaaaaaaaaaaaaaaaaaaaaaaaaaaaaaa

SEQ ID NO: 7621 - DNA, 173 bp, Canis familiaris
gattcccctggcgcctgatgccgtcccacccaccacctgtgcgcccaccgccacctggactgccctcttccccagccctgcccccgcaggctcctctctgccgcccagacttcaataaaacgtgcttttctctcttaaaaaaaaaaaaaaaaaaaaaaaaaaaaaaaaaaaaa

SEQ ID NO: 7622 - DNA, 586 bp, Canis familiaris
tgcccgtgatcctgagtttgtagcttttgtgagagaacatcaaatggaagagctttaagccaaacttctattttgaaactgatcagaagcctagagaagatggagatcacttgctacctatgtcatataattaacctggattttgacctctgttggaagaaggattttctactgtaacaaaagctaaatttggggacccaacttttttccagcttaaaatttcccaacgaatgtagttaaaagggatgtggacagttttcatacctgcaaaaacccaacctgtatttaaagaaactgaaaactgtatgaatcctcagaagtattctacaagggaaagaaatggcttaggagttggggcgtgccttcactgtctgcttctgaacctctgaaggtgtgtctcagtgactgtgggccaggtttccccagaggaagataaggctagagactcttacaagagaaggtgggcttaggaagtgactattttgtaggatgttcttgttaagtggaatgagaagcctttcaaatagttttcgtatagcttgttgtcagacatttaactaaataaaaaatattaagtttaaaaaaa

SEQ ID NO: 7623 - DNA, 551 bp, Canis familiaris
ggcatatgtgaagagagaaatgaccaagcttgggaaagaatttggaccaaaaattaaaatcatcagatataaagacgaaaccactacatactccaattaaagagatgactacaagtgcagtaaagcatacagaatatgggaatgacagggcagcccaggtggctcagcggtttagcgcagccttcagcccagggcctgatcctggagacccgggagcgagtcccacatcaggcttcctgcatggagcctgcttctccctctgcctgtgtctctgcgcctctctctctgtctctcatgaataaataaataaaacctgggcagccctggtggcacagcggtttagcgccgcctgcggcccagggtgtggtcctggagaccctgggttgagtcccacgtcaggctctctgcatggagcctgtttctccctctgcctgtgtctctgcctctctctttctctctgtgtctctatgaataaataaataaaatctttaaaataaataaaacccttttaaaaaaaagaaaaaaaaaaaaaaaaaaaaaaaaaaaaaaaa

SEQ ID NO: 7624 - DNA, 709 bp, Canis familiaris
ttgcagacctcagaaccgtcattggtccgattccggtaaaggtgccaagagcttagttgaactccttgatgagtctgaatgtacttcagatgaggaaatctttatctcacagacgaaatacagtcatttatggctaataaccagtctttctacagcaatagagcacataccgacagcatctgaaggagaaatttaataaatactgccgcttaaatgatcacaagaggcccatttgtagtggctggttgacaacggctggagcaaattaaataaataaaatagctctgtctttcaatgaaacactcaagatgactactgcgccttctctttcaaaaaacttaatttagtgacttatggccaaattttatcttaaatcaatgtgattctttcttgttttgggagacggtggaggtaacctcattagtttgttctttcttcaggcttgtgtctttagttgcgtggctgcgcaggcctgccatatgatttaagccatctctcttcattaaatgtttctcttcctgtgagacttactaaagcaacctagtggcaaaaagtaatgttgtacttatacttctgtacagaaatgacaatgagctgaatatatggttttacaagtagacatccacttgcaaaatgtttggatgtaatgttaaagcgcaatgtgcaaaatttaaaataaagaatatttattaaaaaaaaaaaaaaaaaa

SEQ ID NO: 7625 - DNA, 689 bp, Canis familiaris
taacccgatggccttctcaaaagcacattttaggtactgaagatattaatagcaaatgcatcttgaagcattttatggattctttgaccacatattcgttgttagatctatgtattgtaggatttttttagaatttttgtatatggattatttctttaatgtgaccaattaagacacatcttgtaaaagcatagtcccaggtaaaagaaacagagtataatggtttctttgaaaactcctgcaatgtttaatttggagccagcttcagactattttattggtggtaactactcgctgagctcttgttaataggtaataactccagagaagcagcctgtatatactcctaacatctctctgcttccaattgcatttaagtttagaagtaaaagcccccacaagtaaaacaatggaaatgtatatagaactgttagttcttacatgatttaattatatcaagatacatgaatttaaccgtttctgctttaactgtaggcaaactttccactttgctccacttctactgctattatgttaaaataacatccctttcctacataatcttttccttgactcaaatgagaatattaacctaaggtccagatgggagagaaacgactgagatgaatgtctttactaaaataccaataaatttgtcaaactcccaaaaaaaaaaaaaaaaaaaaaaa

SEQ ID NO: 7626 - DNA, 671 bp, Canis familiaris
  misc_feature (1)..(1): n comprises a, c, g, or t, or includes no nucleotide
  misc_feature (152)..(152): n comprises a, c, g, or t, or includes no nucleotide
ngaagagctttggttatcctgagggcacgtgtagagctctatgccgacaaggtggccacacagaggtctatgtgctattgcccacggcagagtcactgcgttaccaactcctaggagccttgctgtgcggagggcctgctatggctgtctcnggttcatcactggagagtggggccacaaggctgtgaggtcgtcggtgtctgggaaactccgaggacagaggcgctaaatccatcgcaagtttcgtggatggcttgatgattcacagtggagaccctgttaactactacggttgacaccgctgtgcgccatgtgctgctcagacagggtgtgctgggcatcaaagtcaagatcatgcttccctgggaccctagtggtaagattggccctaagaagcccctgccagatcatgtgagcacttgtggaacccaaggactgagatactgcccaccacccccatcgtcggaacagaagggtgggaagccagagccgcctgctatgccgcagccagtacccacagcataaatagggtctccttggcagttggatctggaggctggattttacatctgtgaagaccctttatataaaatatttgagtagaaacacgtggccaaaaaaaaaaaaaacaaaaaaaaacaaacaaaaaaaaaaaaaaaaaaaaaaaaaag

SEQ ID NO: 7627 - DNA, 625 bp, Canis familiaris
aggttttaacatctgtaatatcaatccattggcagtctatgtctgcattgtaggtatcatagcagccaggactcaacccctgtgtatgtgctgtacatgcaatcgcctgtggtagccatagtcacaggatgtgtcctcaagacagaaactggctttgtggccttcagccactctcctctgggtactggcatcaagtaggtcatagtggctgaattcatccatgctgtggtaatgttggtgacaactgtgccattcccaggaatatcttggtcggctgggtaagaaatctgatgtcccttggtttttcactctttgagggaatcttagcagcaccctgtgatcataatctctgacatctgccctgtatgctgagctggccaagcagttctcctctgcagcgcatctcaggttgtacatggacatcttttgcacgtacgtggacgcctggatgtagtacggatctggcaccaggtccgggagaccgtactggaaatagccggtgccgtatccgggccgatacctgctcccaggccgaggcctttcgtacgtgtcgtagtagttgtaataggggttgtcgtcggagtacttgtaggggttgtaggggtcgtcgcccaccatgccatcc

SEQ ID NO: 7628 - DNA, 614 bp, Canis familiaris
gccagccggcgggattgcggggctgggggtccccctgcgggcctgccgggcccctctcagctacaggctccacctccactatgtcagatcaccgtgcggattggagaggaggccattgtcaagcgccgcatctcagagactgacctgcgcccgggggagctgagcggagaggaggtggagagcgaggaggacgacgacgatgaagaggacgacgacgacgacgacgacgacgacgaggacgacgaggcgtcgcgggctggcggggaggaccagctctggcggccctactactcgtacaagcccaagcgcaaggcggcagcgggcgcgggcaggcagcggggttggcgcgctgtcccggggccagccggccgccgcagctggagacagaagcccgagcgcaggggctgggaggagccggcggccagccgaggggcccagcgggccgcaggccagggccgagcggaggcaccgctgcgaggactgcgcccagaccttcgccaccctgcggaagctgcgcaagcaccaggaggcgcacggcggcggctcgcacggcgcccgcggcggccggcggtcctccaaccgcttcgcctgcccgcactgcgccaaggtgtgca

SEQ ID NO: 7629 - DNA, 616 bp, Canis familiaris
ttccctctctcagcacctccaaggaactccagctgtctttttcccttctagttccccactagtcttatcctgatagggatagtctgtacgagtgcagattttcatagttttttttttccccctcaaggttttaatactatatagtgttatgtatgaattgattcatcagctaaagtaacaagtctctggacttactgaatttcagtatccgtaagggttttgtgttatgatccaagccaaaagaaaatgctgtataaaaatacccaacttcagccactgttaatactcagatcatatacctcttaaccaagagtatcttatgctaattagccctgctaaactatgtacacgaggaaaatgttcaagtattggatttgaaaataattgcttatgtttaacagaactaatgatgtacttaaacaatgtattatgaaaaactaaattatattataacatcattgtaactatgtagaaaatatagacttatgtataatccaaatgctaagaatttttatatggccttgtatgaagggagtttgaatgttaataaacacatgttttccactaaaaaaaaaaaaaaaaaaaaaaaaaaaaaaaaaaaaaaaaaaaaaaaaaa

SEQ ID NO: 7630 - DNA, 680 bp, Canis familiaris
ggccagatgattcattacggagaattaattaccaggtgggttcttaccttgggaattttaaagcagccaggagacctaatttggaagcaattctaagactttccgacggaccaagaagtgatagtggtcttggaacaattggttggatgttgatgtagtttccaaacggtgttaaaaccatcactgtaatcacaaaaggttctggtaactctattggtggtccgccaagagagtatgttcagatgctgtttgactcagaccacaactaatagtaagcatctttttgtcaagaagttgaaactatttgtcaaaaatgggtctacaagcgctgcattggtgagcaggtatggagggacctgtacttttgccatcatttgaccactgaaaccccagaccaccaaagggagtaactgcattggcccaaggacttttgccaaatccatcacactcacctgacctgtttttcaacattaccacctcttttaccatttggaagctccaagaaacagaacattctccaatagacaacagtaattgaaggatttgaataaattattaacaatgctgaattttataaatatgtaatagtattggagaaatttatcattgggggaaagtaggctgaatgctaactgcgtattttgctcaaataaaaacttctttttctgaaaaaaaaaaaa

SEQ ID NO: 7631 - DNA, 471 bp, Canis familiaris
ggcacagacccagcgtccaccttgatcggtcgaagaagctccatcacccctaggcccctaccgcttcatccggctcgctgcttcatgatgtatatgcctatttgctcacagagcccttccacaggtaccatgtcccaaatggaagccatgaatccaattgggcgtggcccccatcagggtgagtgggccaccccccccgttccataatcctcctttcctctgctccccagaccttgccatttggaaacaaacatcagatccttgccccaccccttgcttccagaaagggtcttgagcccataccccaagtctgacaccctcctcccctcccgccgcctgccaggacactctagcaggacactggtgctttgccgcataccctactgtgctgcacttctttcccaatttttcataaatataaatgtatgtatgtatgtgtaataaaaaaaaaaaaaaaaaaaaaaaaaaaaa

SEQ ID NO: 7632 - DNA, 430 bp, Canis familiaris
  misc_feature (29)..(29): n comprises a, c, g, or t, or includes no nucleotide
cctgggccaaaggcagatgctttaaccgnccttttggggccacccaggtgtccctgactacaagattccttttaagctgagtagtgtccagtcatcttagcatggcccacaggtcctccgtgatgtgcctccacaatctctgctttctgaagaagatcatgaatccttctgcccccaggcctctgctgttccctggactgggacgccctaagccttctgattctcaggttgttcccagtttcagctgaattgtcagcttcccacgagagcccttcttctctatcaggacacagccttttacaagacccggtaatttcttatcttcacagcatcgagctgtgtgaatacctctgttttcatttcctgttcctgtctgcctcactggaaaataaaatgaaactcactgaaagtaaaaaaaaaaaaaaaaagg

SEQ ID NO: 7633 - DNA, 605 bp, Canis familiaris
agcgcacacgatgagaatgcaaaagcattcccagaaagccctgactgaatttccaaacgagtttaaatgctgtggtttggtcaatggagctgctgactggggaaataattttcaagagaattacaagtcatgtgaatgttcaagtttgtcagattcttgtgtgatgtatgatggccaaaatgtttaccaacagccatgtatttctttgataaaagaagtagttgccaagcatattctgatagtaattggaatagcatttggactggcggttattgagatacttggtctggtattttctatggtcctgtactgcccagattggaaacaaaatgaatctgtggatgtgtcgagctctcatccatcaagcccctttaacattttgctttcgttttgtaactttaaatatacaaatactgtacatgttaggagcagctgtcttactaaaatgtctcatttagctacatcacagatatcttccagacatattgaacatatttaagatttgagtgacactaggaaaatgatatgaatgcgatttttacttaaaataaaagtaacattgtttatgctggtgtaaaaaaaaaaaaaaaaaaaaaaaaaaaaaa

SEQ ID NO: 7634 - DNA, 586 bp, Canis familiaris
accaagcaggaggaattttgagagcattgaggaagccctgtcccgacactgatgtgctctacatgactcgaatccagaaggaacgctttgagtctagccaggagtatgaagcttgctttggccagttcatcctcactccccacatcatgacacgggccaagaagaagatggtggtgatgcacccaatgcctcgagtcaatgagatcagtgtggaggtggactcagacccccgagcagcctacttccgccaggccgagaatggcatgtacatacgcatggctctgttagccactgtgctgggccgcttctagggcttgactcctcagattcttcttgtcaggcccagctgctgggcatgaaatcggtgccccccacgggggcagcacacttaggagatgctctggggcgtccagatagctcatgtgcccatatgcacatctgcagaccacgtgtcaggcactggactggactggagtgttctagcatgggggtggggccccgtctcccttaatgtaccgcaaacctgtaaagtcatttttctactgactaaataaacagctaagctgcttgtaaaaaaaaaaaaaaa

SEQ ID NO: 7635 - DNA, 667 bp, Canis familiaris
atttactgagcccttcacggatactctctgaagggagcccatggacactgaatgtaaaatgccctaaacctaaaaggtgttctttagtaagagaacatgagagtgcattgatactcttctgttgtgtatggaagatttgtttgttttccgtttttgactgtaacaagactttctggatagacttggagaaataccaaatgtctgtagtctatgacactagtattatatacaccttaccacaccttgtagcaccacccaacggaaccactaacaccaggcacaatgttaggaagtaacttggctttcctggccaaccaattttaggttaattcccttttaagaaaccaaaatccgtgtttcctctatacctagacaagtataatctgaaatccttagcatcggtctaatttgcatgcctcttgtgtttcaatttgtttttcaagtataaggaataagaaggacaaacatacctgtgggtctggtagcacaacatgaaagggaagtatgttgtttgttatttatttttaccagtacagtattttgattataaaaatagagtataatttatataacaggttttctgtttataggtagtttggttgaagacctcttctgattatggattctgttaagaaaaacaataaaatgctttaactacaaaaaaaaa

SEQ ID NO: 7636 - DNA, 504 bp, Canis familiaris
cccccctatgactcttattgcagggatcacagtaaccgtgtagcctcttttccagtttgttatgcgcagacttgggtctcccaaattcacatggctgaagtcttcccttccagtacgtagcagaatgtgactgaattggagatcgggcctttaaacgggtaatgtcagtagggtcgtaagtttgggctctgaacctgtccgtaagagacttagaaggacttactctaagagtccttatgagaagaggaagaagagatacagggtcacatgccaaggccatgtgagaacacggtaaaacgatgccattagaaagccaagaagagggatccctgcgtggcgcagcagtttagcgcctgcctttggcccagggcgggatcctggagacccgggatcgaatcccacgtcaggctcccagtgcatggagcctgcttctccctctgcctgtgtctctgcctctctctctctctgactatcataaataaataaaaattaaaaaaaaaaaaa

SEQ ID NO: 7637 - DNA, 606 bp, Canis familiaris
agtttatgttctccagaaaaagggggaccaaatttggggtttactaagatgcttgaggccacagttttatgccaaaccccagttgtggactttcgctgtgagatgggaagcagaatgaaggatttgcatgtggctgtcccacttagtaggctagaataccacttgcagtgtttataattagaataaccttagaggaaggtacaggtacacaggaagtagctggccatacagttgggaactcagtgcctgtgatctacttgattttttttttttcaggaagtacatattctggcccttccccattatctgttctagaatatcagtgcagtgcactgctactgttttattcacttggccatagactctttttctaacagctgcatattctttctgtatacggattgcattggcagcattgtgtctttcatcttgcacactagctcgacatagtgctgtctctgatttctaggctagtttgaggtatgagttttccatagaatgtgcactgatactgcattgccattcttctatggaaagaaaacttttgatgatgaaaccaataaagattttaaatatctataaaaaaaaaaaaaaaaaaaaaaaaaa

SEQ ID NO: 7638 - DNA, 669 bp, Canis familiaris
gttgtggacaaaccagttttatcaccaccctggctggggaacttggagcacagcatctgcctgctgagtctcaacagactccagcctctccgatgaccggctcaaccacctgctgagcgtggccccacagcagagcctggtgctcctggaggatgtcgatgcagcctttcttagccgagacctggctgcagagaacccagtcaagtaccaaggtctaggtcgcctcaccttcagcggactgctcaacgccttggatggtgtggcatccactgaggcacgcatcgtttttatgaccaccaaccacgttgacaggctggaccctgccctgatacgccccggaagagtagacatgaaggagtacgtgggctactgctcacactggcagctgacccagatgttccagaggttctatccagggcaagcaccttccttggccgaggcctttgcaggacgtgtccttcaagtcacaacgcagatcagtcctgcccaggtacagggctacttcatgctgtataaaaacgaccctgcaggggccattcacaatgctgagtctctgaggacatgacgggcaagctgtgctcagcgcttctcctctagatcaataaacacctgccacacccaaaaaaaaaaaaaaaaaaaaaaaaaaaaaaaaaaaaaaaaaaaaaaaaa

SEQ ID NO: 7639 - DNA, 490 bp, Canis familiaris
  misc_feature (1)..(1): n comprises a, c, g, or t, or includes no nucleotide
  misc_feature (171)..(172): n comprises a, c, g, or t, or includes no nucleotide
  misc_feature (185)..(185): n comprises a, c, g, or t, or includes no nucleotide
  misc_feature (198)..(199): n comprises a, c, g, or t, or includes no nucleotide
  misc_feature (205)..(205): n comprises a, c, g, or t, or includes no nucleotide
ncagcataaattaggggtttctcccttgggcccacgcttggatctggaggctggatttgtacgcttccttgctggaagaaccctttaataaaatatttgagtaaaacacgtggcacaaatagacctgtgcccaccgtaatttggttctgagaattcttattgccctgaagnnggaacacttaacnttggttggctgcnncggccntcattttccctgaaatccttggtttcagctgttgttgtgaggcaagagccagaacaggaagacccaaacagctaaccacgagtaatatcctataaatctgtgtaaagtgaaggctgattgctagttggatagcacccttgattaattcacccaccacgtttgaggttataggtttggaagagggatatatttaagatgtttttcttttctaatgcataaagaaatcttattgcacatagaaaataaatacggtgcctattgtaaaaaaaaaaaaaaaaaaaaaaa

SEQ ID NO: 7640 - DNA, 654 bp, Canis familiaris
tgtttagaagccgcctttggtcccacaaggggggggcccaaatttaaaacccccccttggtttgcttgggaaagttggcccccccagaaacccccccccgatcctcaacacgcccaggcccttgggcctcccaggatgtccccccagctttgttgccctcacccaggggtaccccctctgccagagaatcccagggaccctagttcataccccacttcagctttcagttagcctgccatggtaccctctgcaccagagagcacaggaaccaccccaggctatgcccatttcagctctggctatccccaaaaggacagccccagcgccccagcaccccagcctatgccagacagctccagcaagcaaatcaaaatcaccaggtatacacagtctacacaggatggccatacatgagaccattcctttgagtttagaagtagctgtcccacaaaattcatgaaataaacacaaagtcaagcaaaataatggggagacagaaaagtatgttccaagtgagttaagacaaacctttgagagagaactaaatgagatggagataagcaatatgcctgataagtttaaaataatgatcataaagatgctcagtgtactggagagaatggtggaagagctctgtgagaacttgaacaaaga

SEQ ID NO: 7641 - DNA, 674 bp, Canis familiaris
  misc_feature (136)..(136): n comprises a, c, g, or t, or includes no nucleotide
agggatagcgggaaggaccggagggagccacaagtctgcaacccaggcggggaggaagcgggagggaaccgctccgcaggcacagggcgcagggaccggaggcggaggacaggggacctgccagtaccgtctcccngaagcgggacagcgatacacggcagaattatggagaagagcctcctcgcggccccgagaagcctgaaagccaagcttgcgcccaccggcggttccaaggcgccccgcagtgccaaccaccaagcccccacaagaagggggccgaaccagggccggaaggccggttgggccccccgggaaagtctgttccttggggacccgggacccgcctgcaactgtggagcccagcgcggagtcatgtgcaccggctcacgcaccggtctcggcggcacggacagtgctgcgtatcaacaaaatgaaagctcagggcgacaggagggcagatagctccaggtcctccgaaccccagtccccggcagaacgaccccccccaccacgtgctgtctcccagccgcagcccctaccgcgcggccggagcccgcggggcaagtgtgcagccctggcgcgcccccgcaccgccacgcgccccctcaccggcccgggggcgctttgccgcagtcattaataaagaaggtcgccaagctcaaaaaaaaaaaaaa

SEQ ID NO: 7642 - DNA, 605 bp, Canis familiaris
ttctgactccctggtgagtctggataccccagggaaagcaaacagtacaagtgatcattctggctgaccctgatggacatgaaatttgcttttgtaggggatgaagcatttcgagaactttctaagatggatccagagggaacccagattgttggatgatacagagagagagagagacagagacacaggaggagggagaagcaggctccatgccgggagcctgacgcgggactcgatccggggactccaggatcgcgccctgggccaaaggcaggcgccaaaccactgagccacccagggatccccccaaccaggcaatggcggcagataaaagtgacgaatggttcactaaaccaaataaatccaaggcttcgggataacagaagacatgatgtggaacagcatttgtgattcctgtgtagcacctgcaagccctgatgtgtctgtgcatgataaatgttctcacaacttggttgtttcctgtataggcaaggggggtgtggtggtaaagatctgtgtgttatactctttgaaagctctaagataaattttagaaataaaatcctattattatccaaaaaaaaaaaaaaaaaaaaaaaaaaaaa

SEQ ID NO: 7643 - DNA, 585 bp, Canis familiaris
cttacccgtgacaaaatggtgctgccatggtcgcaaaaatggcagaccactgattgaagcctcatgttgagcgttaagagctgaccgatggttatttgcttcggtcctatgtttgtgctggcttgtactgggaacgcgataatcagattcggaagacctccttacgctcagcaccaacaggtccgccaaattcgggaaaagatgatggaaatcatgacccgagaggtgcaaacaaatgacttgaaagaagtggtcaataaactgattccagacagcatcggaaaagatatagaaaagcttgtcagtctatttatccactccatgatgtttttgttagaaaagtaaaaatgctgaagaagcccaagtttgaattgggaaaactcatggagcttcatggtgaaggtagtagttctggaaaagctacgggggatgagaccggtgctaaagttgaacgagctgatggatatgaaccaccagtccaagaatctgtttaaaattcagacatttaatggtgaccaataaaaacatatttgtgatgtttaaaaaaaaaaaaaaaaaaaaaaaaaaaaaaaaaaaaaaaaaaaa

SEQ ID NO: 7644 - DNA, 560 bp, Canis familiaris
gtgcaaaagttggaagccgcttctccaggtgcccaccccccgcccccgtaccccattccatctgcgtccagcagcaccacggaaagccgggaagcgagccgggagtgggggaggctgtcccagccccagggcagccctaaccccacaggctttgccatttgtatccccctctccccactctctgcctccaccaatttgcaaaattacagctcaagaggcgtttttcgtcattacctgtgcttgggatgcatttaaggaactattcgtatccacaccaggatttactgttgggttccagctcaccggttgcagacccgtgaaggtaatttggcgagcatctgcagaccacagctcttctctgtttgtctttaaaagaagagcagtgagggacgcctgggtggctcagcagttgagtggctgcctttggctcagttcctgggattgaatctcacattggggtccccgcagggagcctgcttctccctctgcctgtgtctctgcctttctctgtgtgtctctcatgaataaataaataaaatctaaaaaaaaaaaaaaaaaaa

SEQ ID NO: 7645 - DNA, 621 bp, Canis familiaris
gtataacgggcacagaatgtatttcagcccgtgtctaaaaagacttaagagaagaattggcagctgatagctttgtgatgtgtttggctgagagcgcccccagctcgaaagctgcttttcatgtgcaatattggcccgagttggccgggctttgttaaattgagctttctgtgggcaagactccagttcacttaccacgctccacaccatgcatgtaccgcactccagaaatcatgcttctccctgaatatactaatacttggtttccaccagataatcctccacactccgccctgaaagccagtggccacttcacgctggttgtgccagatgctgaggggtctgttgtctttgcagatgcttttgttttgacacttgactggcgaggaagtctctctgcacagagcagtgccctggggcaggtggatgtagctagaaagtgcggcagccctcaaagccctgagcggcacgtccacgggaggcctggttaatcgtgcgccctgtggagtttggaaaagcagaagacctatctcagggaaggcccttggttgaggtgtctgtgctttctggaggtgcagggtccactccctcatgtcacttgttggcgtgaataaacttcct

SEQ ID NO: 7646 - DNA, 652 bp, Canis familiaris
tttatcacgtgttatatttctaatcctacttacgatcctagaattcgctgttgccctaattcaagcctatgtttttaccttactagtgagtctatacttacatgacaacacctaatgacccaccaaactcacgcttaccacatagtcaacccaagcccatgaccgctgacaggggccctttctgccctccttataacatcgggtcttatcatatgatttcactataactcaatagccctacttacattaggattcacaaccaacctgttaaccatgtaccagtgatgacgagatgtgatccgagaaggcacattccaaggacatcatacccctattgtacaaaaaggactacgatacggaatagttctttttatcgtatcagaagtatttttctttgcaggcttcttctgagccttttaccactccagcctagcccctactcctgaacttgggggttgctgacctcctaccggcattattcctcttaacccattagaagtgcctctactcaacacctcagtcctcctagcctccggagtatctattacttgagcccatcatagtttaatagaaggtaatcgcaaacatatacttcaagccttattcattacaatctcctactaaaaaaaaaaaaaaaaaaaaaaaaaaaaaa

SEQ ID NO: 7647 - DNA, 417 bp, Canis familiaris
  misc_feature (30)..(30): n comprises a, c, g, or t, or includes no nucleotide
gaagaacagaggccacgaaagggagtaaangccctttatgacacggggctgcaggaacacaatcaagcaaaacatcgcttgctaaattttccaaaaaacttacccagttctcttattgggtgaaaacatgaatccagatggcatggttgcactcctggactaccgtgaggacggtgtgaccccttatatgattttctttaaggatggtttagaaatggaaaaatgttaacgaacttggctgttaactttggatgtatcacctgttgtcctaactggctgctgctcttcatccacacaacaccaggacttagacaaatgggactgatgtcatcttgagctctttattttgaccttgatttatttggagcggaggcattgtttttaagaaaaaaacatgtcatgtaggttgtctaaaaa

SEQ ID NO: 7648 - DNA, 497 bp, Canis familiaris
gttcgcgagttaaatatactggtgctcgtgagagggccagaatctgttatatgagaaaaagcttgtcggagatcatagagatacaagagtagtgtggctgagatggaagacaggccttattcttgagttccaagttttcatctgctccttttcctagtttggatttctttggtgctgtagaaaggaagaagaagagaaaaatatatattcataaaagatatggtgctcattcccatccatcaaggatgtgctaaagacgagtgtggtgttaagtagaattgtaattatgtttatgtacagttctatactgttatgctatgtgtccatttccaaaacttgcacgtgtgctctgaattccatctgactctaattttatgacaattgcagaagctatgatggcaataaatatatgtattatgaaaaaaaataaagttgtaatttctgatggctctaattccctttctttgattaataataaaatgcctttgtataaaaaa

SEQ ID NO: 7649 - DNA, 550 bp, Canis familiaris
gttaccctttcctgtgtgttttatctaattactttggttgttaatatggtaataattaaaagtcaaggtaaattttaaatattaagatttctgatttatggagcttgaattatgccaccatgcttatgtaaaatgaaagtggcaccatggtgaaactgagaaaagttgctcagttctaacagttttgatttattctttcttgcgacctccttcccttattgtcttgaaccatagcaaaaggatactgcatctcttattattgtagtgctgaggttattgaagttatataaaacacatctcagtctgtttctttgaaaggaaaagtcctgctggctgacaagtctaagcagggagaattaagataaacgtattcatgttttgcacacaaacgcagaatttgtataaccatatgacttcatagttgtgatctcaaagagggaatttctcctttatctttcttgcagttaatgtaagaacactctgaatctctaagcttctgaagtgttagaggtgttagaggtatagatggtttagtaaagatgtagtttgt

SEQ ID NO: 7650 - DNA, 162 bp, Canis familiaris
  misc_feature (1)..(1): n comprises a, c, g, or t, or includes no nucleotide
ngaacatcatctgggccaatctgcgctaccggtgcaatgacaccataccagaggactacgagactcagaggcttctgcaggcctagggatgggggtggggacccaattgctggaagatggcaccatgcgtggctacccgtttgttgctgcactgcaacaaac

SEQ ID NO: 7651 - DNA, 141 bp, Canis familiaris
agtgctttgcctttggccgcagctgtggctgtcttgacgttttcagacttgggagacgaggtggctgttgtaattgcagatcctgtgagaatgtgaagctggataatatatgaaatgcaaaataaaaagtcatccaaaaaa

SEQ ID NO: 7652 - DNA, 458 bp, Canis familiaris
tttgttgtctagaaagtttcgcggaatccacatgttgctgtcaggggatttgtctctctctgagagagaccttgggcatgatccacattttccttccttccttctagttgttattgttcagtgaataggtgtgtgacaggacaaacctcataccctattttaaattgtcttttgttctctccgtccccgttgtactggccatgtgcttcagttaattgtgaggaaggtacagctctcctctgtacagagattgtatgttgagagctatctacaagcacatctaggtagatcccataactttgggttgtaatggctttagaatcatttgtgcttgagggtctttattttgagccatgaaggtacacgtcatgaatgcacatcagaccagcgtaaatacccacaacttctgttttcataggtgggctttttcacatcagagtgaggcttatcccccaata

SEQ ID NO: 7653 - DNA, 248 bp, Canis familiaris
ccatcccaccccctgaccctccaacccccccaccactggtctctgctctgggttctctgaaggcggcgctgtactctctgggcaccttggcaaccactctgtctacaagagcgacaaataccaacacaatcctgttttccttttagttgcctcgaatattcaaggtttgtcctctccatgcatgttcatacatatgcatgtaattaaacatttgtggaaatcactttaataataaacaggaaatgaac

SEQ ID NO: 7654 - DNA, 490 bp, Canis familiaris
aactacttttaagaatcgctttaccatatctacgttctgttatttcagaaggcttagatatttagtagagatatggacaagtttttgaatggtaaatatatgttttattttgggatttagtcattgggattttatatggtgaaaccactgattattagaaaaagctctatttacaatcatgctaaagaatgtgaagactttaggcttaatccatggtggtgggtgaggtataatagtttccactctggcagaagacaggacattcacagacctataaggtacaaatacataagtaaatacccagtggcattttatttttgtttactgattttaaatgattggtattgattttcatagctgttgtccattctaatatttctgaacctttaatggctgctagtttattagacttcattcaaaactatctttaaagtgctctttatgaataaattgtttctggaattaaaaaaaaaataaaaaaaaaaaaaaa

SEQ ID NO: 7655 - DNA, 438 bp, Canis familiaris
gttgatattatatattgtcagtttcctttacatactttatgtactgtagagtatgtgtaaacaagcatatattgaagtctattagggtcaatctacctttggaggttgaacattggatttaaatgatagatattttggagtcatacatgctatgcgatattttagtcttgtccaatgctatttccattaaatagttaaactagattgtatccatgactggtattgcctaacatgaaagttacaaagcttaggcataggggaaatgggctttttagaagccaggaattctaagtatattctgttcttcaaataaatgtcattttcttctttaaatattgaataagttttatgaacaatatctttctttgcaaactcgaattacatgtgcttggaattaagttttagtttttttcactgcacaataataaagcctgagtt

SEQ ID NO: 7656 - DNA, 431 bp, Canis familiaris
ctctggggaatgggaggatgggcgtcctgagtcacctcgcaccgcttgctgcgggtttgtgccccacgcccctgcgccttcgggtgcatagcggggggggctgatctaatttcaggttaaaagttttctcatctggtgcgttagaggtgggaatatgttcacggtctcaagcgtgaccatccctcagacacagacacaacccagacgatcctggtctgaatcacaaaaattgggtgggggtgtttggagctctgtaaggctgagctgggaccagttgctggtgagactgggccagcccggggaggggaagattcttgccagggcgttctgaggtctgtttacctttactgtggtggattctgtttaatttcatctatctggccttttgctggaaacgccagataggaaaataaagagcatttgaataaaaa

SEQ ID NO: 7657 - DNA, 443 bp, Canis familiaris
agatgaacaagttcaattcctgggaaagagagtttccagattgtgctcagtttaccggctatcattattcaaagagatggcaatggattcaggtttaatccaaagctgtagtcattgtatgtctggttcaagaggccttcgccgacgaaataggcactagtctgtcctcacttattcggagtgggaagagaaacagaatgttcagaagttttctgccatggaggcaaaatatttggaaaggatacagtacaaacatgatgaggaagctcagaaagagtaatgacattccagacccaggtctcccctggagctataaaatataatacttcctcgtttaaagtaggctagctagctctccccaataaagataccactatcagagtaggaacaaggtagatgtttctgaaacatacgtgcttcattatgaaaccatgggtggctca

SEQ ID NO: 7658 - DNA, 488 bp, Canis familiaris
tgtagctggcctccagaccaggatctgtcggtccctggctcgctctctgtccctgtccctgctgccacgtgtccgtctcatcctcccgtcgtcctctcgtcacatctcccagctgggtccgctgtctgtggcgcggggcctctgctcagcccctacccaggcaagccccggggcagagggcagctgcccccaagcctggacagtcctggaggaggtcagcaggtggagacgatgcaccctgcatgcactccgcactccaaaggggagcattggccccggaaagggcccagcctcccactggagccccagccagctttcatcgtccccctctccccacgagatggctagctctcccctcccttcgccttctggcccctggtatggtgggggtttctaacgatcacacccagcttgaggaggggctgcttctgaggtcggttgttgtctttcaattaaagaaacactgtgcaataaaaaaaaaaaaaaaa

SEQ ID NO: 7659 - DNA, 498 bp, Canis familiaris
cgaagttatggatatctcattgctttcagatagggatgctaagttgatggaagtcgtatagaagatcaaaaacccaagcaaatgataccaataccaccatgtagtttaagtgggaagtataatatatagactgaaaccaaatctatcaaatagatcaatatatagagatttcttgctatataagttgacataatggggcttacatccaaaggtggaagttctaaggtaaatttattataataaaaggtgactatctacatagcttataaaataacagactttagcataaacctaatttatgaaattcatgtaagatattttattcaaataagccattctagtttaatctttgcaatggctatggggtttagggcaaaaatgttgcctggttaacattgatataacagaagcaactttatttagactaaaacaacaaatttataagttattgaaaatagttcttatacaaacaaagctttgcacgttaatctagagcaa

SEQ ID NO: 7660 - DNA, 650 bp, Canis familiaris
ctctgcagcagcccggcgtgctgtgcagagggtagacaaggtttaggtccgtgacacagctctctcgagattgcctagggtggggggccgagactcctcctgcgggtctggcccttggggggcctgtctcgtcgtgagacctgtggacgagaagctatcactaaagctctacagaagacaggggaggtcgagagaacggcaactgagagtggcaaaattattagatatccagaaatacttattttttttttttaggaagttgaggaagttcccagagtttcaatgcttgagagagctttacttgcgaccaaaggcgactcgaaatctggtttatttgaagcctcagtcaggcccctttctgaggggattgaggccctggaccactgggtcctactgctagcaaagggaggaaggcacaagccagccagactgctcctggacaggcagccgccgccccaccagcccagaggtcgatgcccagtgtagcacctgatacaattaggagcaggcctcagggcgcagccaacacggtcctacaccctcgaaatatacatcacgttgacggagagagaagaccttcaaataacgttgctaaccagattaaaaaaattgagctcaaagtttatttttgaaatatttttacttttttt

SEQ ID NO: 7661 - DNA, 557 bp, Canis familiaris
gcgcccactgactgccctgacaacaaacccacccacccaggcccaacaccagtagagctgcaggctgcacaggcactgtgtgacttggtggaaaatcccctagagcctcagggcgactacctgtgtgtccaggcctgttcaggcagagatgtcaagtcctactcattacagcaagtgggtgcagatgccaactagccagttgtatactcagttgggtccctgacccaaccctctgccaccgcccccttgaacccctgcacaggcccggagtccccactgccctctgcccactctaaagccttgaccacaagggcccggctggtgtgccatctggtgcgtttgctggctcacatagttatagcttgttggtgtaactgtgtgtgtctggccctggtggcagtcagtgctctggtaggctccctgtgccgctggtcggtggcagggggctgcccactcccctcaatcttcaggcaggttgggagggaggatttttgggtgggtaggggcaccccccttttactctaatttaactgggaaaactcacttttttttttttt

SEQ ID NO: 7662 - DNA, 575 bp, Canis familiaris
tgatgaccctgattagtagttgctgcttaggcagactaatagtgacacaaggttgctgtacagggcagggaggaccagaagtcaaaatgcgtcaagcctaggccgcagatttcgcatcgagaaagcaaaggcttctgcatctgatactttgagctaatcaggaggtgaaaatctgacagagttgcaatcaggtattggtgtgttctgcaaaatagatcagacaactattttgcctaacactgtgcctaagtatcttgacttacaatcatagagattcaactgtctttgaggttcattgccagcacctgagaaaccactactaagtaataagggcatgcagaggtatgcaagctaattaagatataaaaggtaacagaaagagaagttaaaaaattactacgagctctgttgctactaaggatgcaaaatatagctttaggactaaactgtagataggagaaaaatctcatctttgttgaccccctagaggtataaacaatatcattaagatactatttgccgaaataacaaccaagatttttttttttttttttttttttttttttttttttttt

SEQ ID NO: 7663 - DNA, 333 bp, Canis familiaris
gtcgctcctccgtagaagcgagcggtataaaagcagcattgtgttacttgaagaatcactgctattagtgcaaaattggatatcggtcttagctcacacgagccttaaatatatgttggtatcttaacaaaaaatcgagtaagtcgtttagaatcgaaaaactgaatggtgttctcatttacgagattataaacagaaagagcaccgaaacttaaccagtcggctttacttgtatttcatgaagcaaagacacaaagtgctgccagtttgcgggtagtttattgtgggtagctaactaaatttctagcaaagcagatcgtttttttttttgtt

SEQ ID NO: 7664 - DNA, 607 bp, Canis familiaris
gaaagaaagacaaatctgaattgaataaataactagtgtgcgtgtgtgtgtgtgtgtgtgtgtggctgtgtggctgtgactgtggctggcacctatctgggtgcccttagagggtcacgtacccggtaccctggtactcggccagtgccgttggctgtagccctaccgcagtgcctccctggagacttgtttaggagaaatttgagttttctttgcttgcattccaaatgatatgtgacttgggccggtagtatatttatgttccccaaccccagacaggtgagacaacccagggtggtggctcctggtgtggtcagccaggccaaacgataaatactccccccccccaatacatagatttttataagtcttatataagtttatctacttagaaaagttttggatcttcaacctgcttcctttaccttcagaagtaaaggaaccttggttgaccagcagatctgtcaaataagttccaagcacaaagcaactctcgaatcacggtttctctctgttgcggcagactcggacgcagattagccagcgagtagcacctaggagaaaataggctgaaataatttcagaacccctgtagaacttttttttt

SEQ ID NO: 7665 - DNA, 537 bp, Canis familiaris
tgccgtttgaagatagaatctggtacagactctgaactgcactcagatgtaaatatatggtcctaccagtgctgacatttcaaatataggaacaagctgactcgaaaatacaaatgataaagatccaactgtttagactgttcattggccatgcctcgtaatacactgctagagctaatttttggtagaaactagtttaaactgtaatttattaggcatttctatgagagacccctgaatattctccttaactagagcctataacatcaagtttgtcaaaatacaaccagattgcaaaactaagggcacaaccagccctgtgtcagtaaatattcagactcaaaatgttagagcaggctcctgaaaaatgctatagctgatctgttgctgtgcatgggccagtacgccgttgtatgctcagcgaaactgtgaaacaagagtagtaagactttatttacgagccatcagtatattcctgcaccctttttttttttttttttttttttttttttttttttttttttttttttttttttt

SEQ ID NO: 7666 - DNA, 604 bp, Canis familiaris
acctagtaaagctgtgcaacggccacgtcttctacttctagtccctcatataccggctccagactaaaggggtggtcatccctggctaagagttccccaggtccgatccttcgactccgctccccttgccacctagtagaacctgatcaaagagttggaggagccctcggagatctagttggatgtaggtgtggagcagtggtctttactgaacacagagtcctgtctagtgttggacgccttagggcagtagggagtcctggggcaaccaggtgacaaagagcacatagtgcagactccctagtaggagttgcagtctgtgttgctctggaccaactctctcaaccagtcgggcgagagcgcctacgacgggggctagaactctgaggcaggtcactacgtaacgcactacatcctcactgcacgtgcctacctgttgttttaagtacacgggttgtcttcgatgaagacaccaacccccacagaagaagccaacaccagaaacacaaaggcccaaaggactaaaccctgccacgacccctcgctccccctcaccgacgaacagtgccctggaagtatttacataattaagagtatgattttt

SEQ ID NO: 7667 - DNA, 617 bp, Canis familiaris
ggaaactgcactggactatcaccactgagcaggaagggtaagtggccgtgactgggcacagctccctgacacgtgaccgcaagggtcacaaactcacagcacccacagcccccggaccagccccgacctgatctcactcacacatgtttttatttacaatttgtctgaaactttatgagcacatatttatactgctttacagtgcaatttgaattctatattctagaccacagcaatttcagcaagccttattcatcgtctagctatacctagtgttttgctaggtttaaggaactgtaactgccccagcagcactgagtcctgcactaaacaaaattacactgcaactaaaactttgaggtggttaaatagtaggactgatctgagcaaagtgtcacagttgtatagaactgtgctgtgtaatttgaagaggtttcaattgatggagtttactgtttatgcctgacaaggggcaccagctaggcactgaaggaattgagcctgtaccaagtaaaaggcactggactagtacactgtgaagagtgtaatcgtgacacacacacacacacacacagagtcatactatttaaattttttttaatttaatttaatttttt

SEQ ID NO: 7668 - DNA, 596 bp, Canis familiaris
cctgtgcaggggcctccctcggcagcggctggagcggcagctggttgcacagagcccttgtcctcacccggcgcctgcggagctagcgagcactgccggcctggtcgccaactgctccggggtcatctgctaagacaggggatgagcagccctgttcagcaccgtgtcgagggccatcacagcgcctgtccatcagggctacaggaccaggggcatcagcgcagagatcgtctgcgggggcatagagctggtgcatgggcagtgccaggtggtgtgccgcgcgctgcagggcaaccagctgcagctattcaggtacgtcttctggtgccgcgccgagaacgaggtgcactcgcgcatctgccctgccgaggggcagctcgccgccgactcgcagcgccacgtgaaccccgcagccgggctcgcggagtccgcagactgcgagcgacccaacccgcagctgcgccagtgctccggccacacccagccgcagcactccacggagtgccagcagcacaacgcgcagatcaacaccgaggccgtggagcgctccaggcgctgggttgggagatgtcgagcggcgctgcccggggcgaggg

SEQ ID NO: 7669 - DNA, 630 bp, Canis familiaris
tgacgggcgtagactggcctcggaggctgacagtgaaactaccacacctgagcggccttgctctgagaggtaggcgtgaccaagacctgagttcagctgctgcaggggcaaccctttgtgctcgcggcctgccacagacgcagaatagtggtgtttctttgcccccagctggtgctccagcgggccagctgccagcgtgagttatggcaggctggcgagggcaggcgggaggtcatctcccagtgcacctgccagcaccggaccgaggttgtgccctaggagctccagtggcaggtggaggaggcaaccacgggagccccggccctgccagaggcctagacccacacggctgtcttgaacctggaccaccaggctggttcaggtgcttgggcacctggttccccaagttggtgtcctttccaggggcagtggtgttggcctcccacccctcacccctcggccggcccggcaccgggtcccaggtggccaggcaagcagggaaccccccagtgttcgctgctattggtaaccggggtcaacacctcgaagccaacccaccccctcgtttggctcaagactgctgaaaactcttgctggttgttatttcatgagatttgctttttttttttt

SEQ ID NO: 7670 - DNA, 657 bp, Canis familiaris
gtagacccctctgggtttgtcgcataaccttgttcaattataaagctttggtgctatatggtatcaaaggtgctacgaccaagtggtttttactcaattgactaaaagcacttctggttataaattttataacagctagttaccaagaggcagacaacaaagaaataagaatttaggcagcagcagagggtaatagaacacacaacaagtctatcctttagattcacagattgagtaggttttctaagaccatcgctgtcttccactagtcacaaaaggctgaaatttaaatgaccaaaaatttgccattttgcagctaatcaaactaccatacactggtagatgaaatgagtcctgttaagtgttgttagagcctttagtgctacttacgggaggtcaaaaggcagaccaaacttttgaggttatttacatatctaaatgataccaatgtgatttcagataccaatgtgattttaaaagagcaagtattctgaataaaaaacatctaatgtttattgtagcctctctgggttaatctaacctgtgaatttcgtgaggtttggtatctgtcctaatttgttatgctggaatacgaactatcaagatttgctccaatttactctgttttatttgttctgagccaatttttgttttttt

SEQ ID NO: 7671 - DNA, 692 bp, Canis familiaris
acacgaaaaaatggtgtgtacaaggagacgacacggtaggacagcttagctaggggtgacgcttagcgctggtcctcctacgagcctggccgactgtgtatggctacaggtcctggtgtgtgtgccgctgggtcctctgataggactcagcgcctgtggcggagggtcttttgcctcgcccccctgctggccacccggaatcatatgctactgtttcaggactctacacaccccgagcgcggtgtgctgggcaagctcagcaacccgatgttccatcaaagttggcttaatgttgcaaagaaaactaaacccgcaggataagacaagcctggtaggaatggatctcttggtcgcaataatgtactcagtgttgtttttgcctttcccgcaacacaggatagttctacatgaaagtgtgcttgcttttctgatggcaagataatgagcaaattaggtgatcaggattctaaaaacagaacagagtatggttacagcaatataaatgcctggcaacataaactatcccacaccctcatctttcaaaccgagctgaatccaaactaaaaatttgcttaaactcgagcatttatatttaagataaagaggggaactatgaatatattagcagttgggttcctcacaaacgaagtttggagtattttgaatttatttgtcagacacctctgattttt

SEQ ID NO: 7672 - DNA, 596 bp, Canis familiaris
gcaggtcaggcagttaacaggtatcgttaaagtcgttggacatactacaattacggaactggacagactacaccatcttgtctgttgttttgccctacaagaacccagagtttccgaagcttgagcagtgtgctagtgatacatagtagtataagtagcagtcgagcagctgttaatccttgttatcttaaaggccttctactacatcataacacatttggttacctcctcgtgagtgctgtgagcctggtagtctgcctaggtcttagcatgcttgttcgcaacagtgtagtaagtctttcagtcaaagtcgaacttacgctcccgcctggcagactactcctcttgtgaagtgaagtgttactacaaaggggctctctctcaacagggtaattggttttcccttgaaacctacccacctgtattgtggatttgttgggtttaactgcccgcagtaaaataaaaatgcaatcagcagaccactactgttgtttaagaaggacctaagaaatttcatcatttgtctgctttagaaagatttaatacaatcttatttctgcaatctattgttttttttttttttttttttttttttt

SEQ ID NO: 7673 - DNA, 532 bp, Canis familiaris
ctgcttctcagagtagtggccttggctgaggtctaacccctctaggtctaaggttgcgcagtatgttcacatctgtggtatgtttacatgactttttgcaggccctgttgatagtagccaaaaaggcaactgttacacagtacttgctgtaacctcgttaccagggacctggccagttatattgcaggcttgaacccaaccaagcagtccctcttagtgttctaggaggcccttgaggtagttgagttgacctcctactttaacctgtagttgttggagcatagacaggctgaggcagaaggcctcgagttgtagtcggtcgtagtgcaagagatcttctacctcaatgcagacttaaaccaggagaccaagcacttgttgttaaggctgttcgaccgggcaaagatctacttgtgctcctagggctttcccctgcgccaaatcagtgtcctaaattatttaccatgagcatccgaattttttttttttttttttttttttttttttttttttttttttttttttttttttg

SEQ ID NO: 7674 - DNA, 603 bp, Canis familiaris
gaccaagcggcagcccgccacaaccccttaacctcatagcatggctctggctaggcaccagtgggctaaggcctgttcgttgaggacatagcccactaggcagtgcagggcaggcggttggtccctgaggcagtaaaggtggccagggagtgctgcaaagctgcccgacggataggtgacgccctctgggtatctgtggccgcgaggtggcagcaacactggtgagacatcttcagcacaggggtggcgagctgagggctcttacgctgcccacaggactggtggcctacccatctgtaggaatcctcagacaggatcttccgtactgtagagaaagtggccaggcggcagcagcattctgcagccccttcccaggccacatgcccctccaaccgcatcgtccagcaggtcgactcacgccttgcggccctggtgcaggactgcaagatcatagaggtggcgtggtgcgccatccagtggttggtgcaggaaccccagcagtgggcggctggcgaccaggacatcgtgcaacagccggcgcaggtcttggagcaggcatgagtctgccgcaaccagcagggctggaggcaggtgctggcccgg

SEQ ID NO: 7675 - DNA, 622 bp, Canis familiaris
ctctgactcgccggcccccggccccgcctcctcccacccaacactggctgagtagagtgcaaccactgggttcccgggttgggccgtgggaccccgtgactgtgccgtggccaggggtctctccgggtggggcctaggtccccctggacaggcccactggaggggaggtttcgagcagtcggcctcatagaccctgttggtcggctagcagcagacgctggctgaggagatgcactgcagagaggtctgggagacagagagccccagagcttgagccagagcttgagaccggccgagagggtgcctgtgcgcgggcgactggtgtccatcgaaggctgcggcagtgcacccggggccccttcttctttgcagcacaacccaggctaactagcggccctcgcactcactctttccccaaaaggttgtcggggaacctcagctacagggaacggtcagcaggtccctggtgactgcctcccccctgcagccgccccctccccacccccgctactgtgacggccagcagcaaaggagccactttatttctctagaaccccttttttttttttttttttttttttttttttttttttttttttttttttttttttttttttttttt

SEQ ID NO: 7676 - DNA, 681 bp, Canis familiaris
cccttaggcggctgccaacatgggctgtggaaaccggtgtaaccgcatagtggtcgctgcagggccctgggtagaccactgtctacacctggtgcagccggtctgaggcagtgtcccgtataactctctttggtgctgtaagaggtgtagcaggagctggtgctgaacctggccgaccagccagtggtgcactgtgcacgggccctgtgtagactgccaggggactgttactcaggcattgaccagcctcagggaacaagcactgccatctagagtgttgatggctttagaacacaaagaagcttgtaccttggtctgactagggggtttagagttccacggaaaaaaagtgcaagccaaagtcatgaagattattgttacctacttttccctgacaggtccacacaggcagtggctgcacattaaccagggtcagtgcacatgtttgtgcaacagaatggtcttactgccagaagcaagaaaaagcacagcagttagccaccaaaaaagctcaaacagtctagcaaattatataagaatagatacctttgctgattaagcaacttcaaactgttaacaagtcacaagcagaggaggctagttaggctgcaacagattcccctcctgattcactcaagtgtagaccaagtttataatttgaaaggaccacttttttttttt

SEQ ID NO: 7677 - DNA, 672 bp, Canis familiaris
  misc_feature (107)..(107): n comprises a, c, g, or t, or includes no nucleotide
atcagatcgatgtcatacaaaaaattggcccccagtacccacttcgcattcgtgcgaatatatacctagctgtaaactagtgctcaggtggaaagagaagctgcganaggacaacaaggctgctaaagaagagatcaaggttactgtttctcatgagtcacgtgttgcggaatctgtttaacaaggctaagtgcctgtacgggtgtttggtaaactacaggtagatgttgtaatacacactggtgaacattaacaagcctgagttaagacgtggcagacagaattctgagagtcagcaggtgtcatcacacggccccacctctacacctccaactacttagtgcacgtaacaggcaaccgccaacacttccagtttttcgtcacccagtggttgcgcatagtaggcaagttgatcgtcgagttgtttgaggtggtggaggacatagtacacacctaccggggcaacttattggtgtccgcggcggcaagagctgtgtttatggcggcacaccaagagccaggcccagcagtccaatgaggaagccggagtgggagtgcccagagctccactaggatgaatggtaagccccgaagcatttctccgcgcaaataaaacaattcctgagagaggagattgatacttttaagttcctcaaaaaagggggatttttt

SEQ ID NO: 7678 - DNA, 566 bp, Canis familiaris
agttcgatcagaagttgctagtatattgaaagaggaacccttgccccgttgagttagaactttggctgtgcttcaggaagattctaaagatgctggaatatatgcaggtgacaacagagcttaagaaacactaccagcagtaacagaggatacagagaagttatttgtgtttggatgctgagcaacacttgaccaactgtgtcacggtaaatttggagataggttgggtcacaaagcacgatactactagtaaggctcacagtcagctcatctgaggaactacatagtcacagagttggacatcaactggcacccacgccctccacctccagtttagcctgtgacacagttgttgttgcaagggaattcactgatgtaagtactttgctttagaggtcagttacagcaagaagtactgagaagtgttttgagcttgtggttcaaaatatataaagtctgagatggtttaagacataaccaggatattaatcagatgataacaagccattggcttgtgaaactttccctcaggagtttatttcccttcataattagttttttttttt

SEQ ID NO: 7679 - DNA, 483 bp, Canis familiaris
tggttagggttgggccccttggtggcctgagccaggtgtagccccctattaggggccctggtttagctcaacccaggggtctctcctacgaaccctctaggcccccaacttctccccagccattggcctgtccagaccctcactgtggtctcacagctctggcaaccctcagccagttcaccagggaagggacgggacccctccatccacccccagggcggtggggggctgggcacaaggcaccactgctggagtcctctcagccctctctcagggactggtgcctttacttcacgggtttcggggcaagaaaaaattttagaaataaaattttctagtttcccttgcagttatgtttcctctgtttaatctaagtcgtgtaaaaatgaatacagccttgtttttatttgccccctttgtttatttttactttcccctttcccgtatgtgttttttttttttttttttttttttttttttttt

SEQ ID NO: 7680 - DNA, 590 bp, Canis familiaris
acatggagcgatctcaacccaccgcagttgttgttaatggtctccaactactgcaacctgagtctcggctggcactagctatacagaatggtctgacgagcggtgttaggctagcacgagtggtagctctacactactactgatgagtagaactgtggagctgctagaagaccttgcctggaactctctctactgacccctacgtggggatagcaggctactctccaggtaggagagcctactctatactcctgtaaatggggttgggcaggggaggttgatactgactacctactagggacaaagactcaaggttgcactgtttctcagcaggctgacagggcggagggccccagtgccaacgacccaagagaattggtcacctacccaccccggtctcatacccacctaatgcaccatcaacccacctaagccctcgtggaaacttgcaactaacacttgtaccttaggggtgctaggacacaggcacaaaaagctaaattcaacaaaaaccagaaaaactacgtaggattccaaagtgacagagttgaggattttattttttttttaggaagttttttttttttttt

SEQ ID NO: 7681 - DNA, 717 bp, Canis familiaris
cgccgccttagccggtctgcagggtcttggtagagttcccccgttgcccccggcggccgctcgccggcgcccacgccgcttgtcacgggagcccttcccgcgattccatcaagtcgttggccaacgtagaccacgaggtccggccggagtcccatgagtgtgtgaaatatgtacggctgctcgctttgttctggataatcatcatcctccgggtgaaccgccgagagcctgtctactctgtgagcctggttttggtagacaagagctagaaagttgctgtttagcttaggtgttgtgtcatatttgaggtacttgtttacgacttctaatacctggtgtggcagttggccagactgctgcgggttggagtgtgcatctggctgttcagagccttggtgcaggtgctgaactccctggaggccttggccatcctggtccgcatactcgtccagggtgccctaataacagcatggttgagccaggcatttctgttgctgcggtagcaggctgtgtgttttgcagcatttgtggcagcagcagccattggctgcaccaagtgccacaaatcttgtaataccacttttatttttttattgtttactgaaacaggattctccaaagtacaccttccaagtccatcattagtcaaggaaatacacccaaatttaacttcatcagttgtgtttatttgtttggctcataatttttttttttttt

SEQ ID NO: 7682 - DNA, 535 bp, Canis familiaris
gtagaaggttttgatcctgctgggtgtcaaaggcatcagaccccgagagatcagagtgttcctgccttagcaaccctacggccaaacggtctaccctggagtggcctaggagttgcacatcagccccttgaagctaggtcgagatctctcccttgactacgtggctcctactctcggtaggcgccatcaacggctccggaaacccactctagcacaactaggagctccccgtgatccggcccttgcggcccgcgttcctgaaagagccctggcacatcggaaacttgtacctaccttaggccatcctgcagctgcaccttgccgcctgcttcaacttgtgccctgacttgtcgtaacgcagtaacccctcccatccagacccactgacaaagtctacaccgtaccaaagcagcctcccaaactggttcccacataggaaaaatgaaatttaatttggtgactaataagaggagggttatagtttatttgaggttgttttggcctagttttttttttttttttttttttttttttt

SEQ ID NO: 7683 - DNA, 544 bp, Canis familiaris
catcactgttggtaaagtcatacctatccctctacgaatgctcctgcttcaactgagtgtccactgcaaactagcctgaacactttgacgaacactccctggccttattgcagggagacattttggtctacaaatcaccctgccctgcctaagaaaccttgtgtttctataaaattttttagaattgtataggtccttaccactaatgctagaaacctatgctgcctgacttgtgctaaatctcataaacagctgtattatcaatcaaatgttcagcacttttccctggagcaaacaaaagaaaattacaaaataagcactagtagtaaaactataacagctttatgagataaaccaggtaatctctatgagagaaaaccagttgataacagtattttagaggaaaaattttccactgatatcaaaaaggttttggtgctacaggaatagctattttctgtgcattttccattgaaacaaacgagaccacccatcaaccacctagacttactgtaatttgatagattaccattttttttttttt

SEQ ID NO: 7684 - DNA, 678 bp, Canis familiaris
atctgtacccctgtaacgagttactagtctctgttaaatacacactaggaaccggtggcaggttgacctagtactttggaggcctgctgtaaaatgggacagggctgtgtcctccaccaggaaagatgtaggcctatcacactcagagcccactctaggctggttgggggggagactcaaaatagttgactctttaccctacctagtgggcacctaccagttgttcatttctccaacctttggcagcctccaccattaatacgacgctcagggggaattgttaaacttctatgttgaaagggggtgtctctttataactgacataggatgctatgatagaaataaagcatgcttttctaggccaggaacttgaccatagcccagaaaagcaacagataaaagataaaaagataaaagatcaaacacccatgtttcttttccttatgtcagatctgatgaccccctaatacagagttggtatagaaccttgtcccactgaggtagccagtttcctctgtaatggatcattccaatatatgtaatagcacccccccctttatatctatccatagtatttgaaattaaatattcaatggctctgaattgtggaattcttctgcttattatttatgttcttaatattcttatatcagatttttttttttttttttttttttt

SEQ ID NO: 7685 - DNA, 576 bp, Canis familiaris
agtacgggcagccccctgtggtagtcaggccccgtgtagagaacacagccccgtggtgccaaaaccccatgtgggccccgacctgatctgtctgaggatccagtgtaggtggtgacaggtgctctgcagcagcaggtgtagcagtcaaaattccctctcttgcgttacacagccaaccgtgcccagctgctcacaatacatcttttggctgttggattccctgtgagtgctgaggttaggcagcttcggatgcttgtggtgtgttgcagacaaaacacaaccaaagttctcaagtgaggtgtgcacccctttcattgttggctgacaagtccaactacacagtggcagaggtttcttcaccctcaaaaatctgtgttataaaagcagccaattagtctaacccaaacctccacaccaaaagtggcaataccaacaccagcccccaccacccctaaaactatctccttgggggatagacccaagaacaccccaaacatacaagtataagggtacaaaaaatatctggttttcttttctttgtttttttttttttttttttttttttttttttttttt

SEQ ID NO: 7686 - DNA, 621 bp, Canis familiaris
actgaacaaaagtgctatatttctctggttaccaaagagatgttttctggcactggagttagcccgctcaagagagctgagaaacctataaaacaataagtactctgggcagttcccgaggacaaaaaggctggtagaaaatcagacttctatgtcctgggccaaatcatcccctgactatagcacagtcccaagtgaaaataaataaagagtgttttttttgtgtgtaaaatttaatctccaagcctttgagagacggagacccctgctccagttaaccccactaccacacacagaaagctgcgcactctccctctcagtccaaccagagaaacctctgaccccctggtgccctgaggggcaagaatctccctaaaatgtgttgggttttcagtggaacagtgcattgaaatgtgccagcccccaactcagtaataaacttcataagtacttgagccctccaagagcctgtttcaggggaatcggctgagtgcttgtctgtctgttgccccagcccaccaggtgaggctgcatggagttgtgtgggtctcattcctttattgattgcctctatgatagctgggtgtaagtcgagcacagttttctttccttttatgtttt

SEQ ID NO: 7687 - DNA, 661 bp, Canis familiaris
ctgctcccctcgaggaagtatccacgttgctgacattaatcacagagttgagtttgtgttgccactagcacaatcatctaccttattggggagtgccagccaacaccgagtcatctccagccacccctaggacaaccctagaactctccagccaacaccactagactctccagccaaacactcctaaaaggcaggttggtctgtaagacctaaaaacccccctgttttactcatactaaaaaaattattgtttttatcaccattttaatgcacaacctgtaaaatgtcccctaatacccctagcccagtaccttttttcagaggttttctttggcctttcaacacctctccaatcgtctgccatatagaggacagtccagctcctaaacaggctccctcagtttgtccacagacaaacttgagacagacaatccccaccttgaagggatgtatgagctgtcatctgtttataggtaaaaagccctgctcaacatctacacctttgacaattttaggaaggacggacccccaaggggtcttaagactgaatcttgacactgtgaagggttaggttgtttgctgtgggtgacatgaaactaactaaaaacttatttataaataagtgatccattttttttttttttttttttttttttttttt

SEQ ID NO: 7688 - DNA, 642 bp, Canis familiaris
gcagggtctatcctgccaggtgatggtctctgtgtgtgggggtgttcagtgtccagccccaaccgtgaggcctacataaatccaggtgtttgcctcctccaccagggcaccacacggcagccccactgtcagctgtggcgtcacttgccccctgtttccccctcccggctacctgtcccagtgtcaccccattcggcctgtttggaccgaaacaccgtgtttgacacagacctacaccaggcagacagggctggtccggcactggctgcccgccgcggtcccagggtgctgcacgcccgtgtacgatgacgcaacgcccggcggtacgccctggccctggtgctgcagggcccccagacactccccagcagcccgggcctgggccagggctcgcagcgggttcccatccccaccacaggcctcctctccagcaccagccctgtcaaatcctgacaccacctacctgtcctctcccaagtgcctagaaggggctacacccacctaaccagagacccataccccaggccaggtccactgagggtggcgaggcattgtactagatgaaaccataaatatagttcataaataaaagagagagaggaaactatcttgtttattttccaacagtaaagatgctttttt

SEQ ID NO: 7689 - DNA, 500 bp, Canis familiaris
agtgtgagttacaaattttacaagtcaaacacgacgtttatgtacaaatttttttatgtgaggttaatttaaaattatatagaaaataaattcactgacatatttttgagaaggatgaaaggggatccagggatgcactgagtgaattgctacagccaactgcaggttactagtaccactgggaccagggtaagtgacactagactggcaccatgcaacacccccacacatcctcactagcactcactcccacacacttgattttacaaattttttagaattataaacttctagattaattagatttggaatcattagtgtataaactctactcaaaaaaaggatcattgacaaagtttacatgacagttaacttctgaatactgagctacaattaactctcatgcctctaaacgtgatccatcatggctatagatgcattaggcagcagaacaggtctgtgctggacgagttttaagtttccagtgcaagccagtaatt

SEQ ID NO: 7690 - DNA, 635 bp, Canis familiaris
ctttatcccgccgtgtgaataggttattcataagtagcttaagttgtgtgaagttgtgtacttctgttgcggccttgcatttagaatattagttatgtaatttggttttatttgttaatctgtttgaactggtctactttgttgacttgcttttctaactacaataccgggccccacaagctggctttggtttgctgcaggttgttttttaggagctgtttaatcttgtggtagaggtctaggttgtataaacaatttgtttttacactcacctaaacatattgagcgaaagttttacaatggtgccattgttcaatatttaatacttaaatataaaatttattggactcactttagtttggattaattttgatctacacaagatctaagcagacagatgttctactgtataagaggtagaatgtaagctacaactaagaatttccaactcagtatgaatctaaatagattgactagctttaaaaaaaatatttatctgtgagtttagaggtctattttaggaacagcctaaaggtaggaggctgatggaggatcaatagattgttcattagtcttttaactaggcatgcttatagattttatttaaaacaaagctgattttttttttttttttt

SEQ ID NO: 7691 - DNA, 495 bp, Canis familiaris
tgagtacgacaaacaggtactttggtggattttaagaaattagtagtcctgactaacatagctgtctatatctaggttgtagggaagtacttgctttatggggttttccagtaagagtctggtggggagttgtcctaagttgccctaacatggtaggagtacccaggtgggtaagtagacctatcccgcaacctgtagccagtcgcttggttagtccaccgcagtagtcaacaaacttggctccttggctgctcaggcagggggttcctcctagtactaagtcctagacgagcccgtgcccgggtcttgccagcaggctgccaacgtcctgaggtgggttagggcagagaaggtgctgtggttgtgtgtctgtggtaagctaaatacccaattcgaaccagtttacagcttactgcttgtccggcattgcgttgcggaagctccaaaacctgggcagctttttttttttttttttttttgttttgtttttttttt

SEQ ID NO: 7692 - DNA, 570 bp, Canis familiaris
ctgactgcacgaaataggctgtgctgtgttcctgcaggttcaaatttatccatgttgaaactgtgttttgtgggctttccaatgggggcagttggccttagaacctgctcggatgtacttagagatgtggtcctaatggcctgaaggccctgaccagaaactggtgtggtggctgtagtgtaagatgcggtgtcctccctcaccacctggtttggcggaatcaacaccactcccagtcaaaaaacaaactaatgcatctgattcagaccatccaagccaagagggatccagcaatagatattctggttctggctaaagttcaaagtttcatttagagtaatctcaactagcctttgccatactctggttacaggagagaaggagcaaacgattattgctaaaggattttaaaattctagtcagctgacctgagtctaaaaccaagtaaaaaggctgacatgtataagattgggggtggggttattacatctgttatagacacattgcattgtttagcggtaaatccttattttgagtatatagctttttttttttttttttttttttttt

SEQ ID NO: 7693 - DNA, 544 bp, Canis familiaris
actcacgttcgagtcgaactaggctgcccaaagcccactgtaatttccagttgaacaaattcagagagaaatttgcacaaggccaggactcccccgaaactactccccttgacccagacatctcacttgaagaggaccaaatgtcacatgacaacatgaccagcattctgagaaccaaccagaggtataaagaactctatgaaaccaccagccaaacccaccaacacctccagagctgaccagccctaccaacataccagccctaccaacatccctgcacaacggaccaggacccctgactgcccagaccaggggctccaccccagctgctgctcttgccctgtcccaaaagagggccaaagtgtatgctaacagacccacactgcctccaggccatagatcaggtaccagagaaaaagggggcagcggcacatggtttttaggtccgctgtctgaatgaaagaggtaaccttggtaaccttggtaaaaggggtggcacattactctaccccctgtcctccactttatttagactaaatttatt

SEQ ID NO: 7694 - DNA, 597 bp, Canis familiaris
ccctgtccctcgcccgagccctccgcccgggcggcccccgccacgtgcccccgccccgcaacctgcccgctacgactcccaccctccccggccccgcgcccccggccccgcgccccccgcgacgtgcccgggcacccctgccccgcgggctcagaccaccacaccgaggagcatcactgtcactccctgtggacccgctctagctgtctcctggacacctggagagggatagttgactggttgggtggtccccctccctgccctgccccgctgtggtacccgcctcccagctccccaccagacccccctacggcctcccctgcccacctcgccctcccagggcccctgtggcaaggctgggcaccggaggcctgagcacctgtaccactagggctcggcccaggcacccccggccaagcactgccctgcccctacccaggtcaccaaggccccacaggcgcccccgtggacaccgccaggccacaggtggactcgagtccctgtcagtgccgggtctgctggcccagctctcccccctctccccgagctctagccctgaccttatttgacaaagttcagcctttttttttttttttt

SEQ ID NO: 7695 - DNA, 402 bp, Canis familiaris
aagttagttattatgcaaggaaacaagctagagtttatatgatgtgtttggacacagtgaggctgctggtggagaagactctggtcaataactgaaacccagcagtactgtggcaggtgtatgcatctgtttgtcttgtaaccaagtcaacactcacaaaacatcaagattgaacaggcgttataagatgtccacagaaccaaacaccaactacaaaaacaccattaatcatcaatttgcatagaaactgttatcccaaggaagtctataagagccatataacatatataaagaagttaaatttctttagattgtgtgggtggaaaaaaccactaaacagagtacatattactggtcatgaaagtctgagtcagaaaaacaccctccgaaccctgcctaact

SEQ ID NO: 7696 - DNA, 649 bp, Canis familiaris
ctccagctgagttaacagaacacgtggattttgacaacgtacacaacgaatatgaaaaaaagtatgctgtgtagcaataatacccgttccctacaaaaacgactacagggtagttacagatgtttgttaaattgcagtttgtggtctttggttcttgcacagagttttggttttggtggttccaccaacaaactaatgtgctattcagtgagttcaacaatgagagggcatgagaggcactagcaccctgtgaccctgccaacacagaccaaatgggaggtaagcatatgaactttgacttgcaaatgtggtagggttttgggagttgactgttccaaccatttgctgtgggctcttactgagagttatttaactcaactgttaccctctgtgtttactcaacaagaagaaaagttcttgttaggtactaatcagagatcatttgggataatgtcagccactggagctgactgtgaggcatctgctgaaccttctatgagatgtcaagatcaaatcccaaccatataaccaacctaacaatcaggagttctctgtaggatgtaaatgcagcacatgttaacttatttgatattataaacataatcagttttttttttttttttttttttttttttttttttttttattt

SEQ ID NO: 7697 - DNA, 579 bp, Canis familiaris
caacccctagccccaggtcgctgcctgcagggcccacttagtcagagagtggtgccgccaccgccaacctgcagctaccccacaagcccaggtccacggactgccacagttgcaggccctcctgtacagccagccccaccggccccaggaccctgcacaagcctttgtgtcatttgaggttgggccgctgggctgggctgagtaaaggtgaggggtgaacacaggggtatgtcaggtccctgacaacagggggagcatagaggggtacctgccctcgaacaggtcggggttggctgtggcaaaacaggtttcagctttaggtcactgtgctgtcaggcaaccagctgtgccctagggttgccgaggaccgaccctcaaggcctatgtagggcagcggtgggcctctagccacaccctcacacaccctcccacaccatcacacaccatccaacaccgtcccacaccctcctacaccgtaccagaccgtctcacaccctcccccggggggcaccatgccaagtaccaaaccacactaggttatttctgagagacgtgtttccttttttttttttttttttt

SEQ ID NO: 7698 - DNA, 508 bp, Canis familiaris
ccctagttataagaccgttcacctacagaagcactgtaaggttaaactgaggttaataaggtctgaaaggcacttctgtcacctgatggcttagcagcagataccactggagtcactaactcactgaactctcttttgtagaaggtcttcaacatcttaaaagcaactactaaagcagagacactggccctgtagtctccttgacctacagtttagaactaacctgctttagaggaacagtttaggatagtttcaaactttgtcgtcatgctctgtcccacacaaaagggtttctattaaagttattttattaaaaagtaggtaaccgtttaaagactagaaaagttgtgtttagccacctaaattttgatcgttgacttttggtactagttgccattgaaattgttcatcaataagtcagtttcaattagtttcacaaatattttttaatttttctagggttttagttttttttttttttttttttttttttttttttttttttttt

SEQ ID NO: 7699 - DNA, 625 bp, Canis familiaris
ggtaaatgactacagaagctaaccatgtagatagttgttagaaattgagataaagtgatatatacagagtgggcattagatcttttgatacaaaggattagttggttatgagaacacttggaatataataaaacaaaaatagcaagcaaaatgaacatagaaaataaaagattggttcctacacaaggaaaggactatcataaactcttgctgcctaaagaaaacttggacttggcatagggctggaagaatcaggctgagatgccagaaggatccagctgatcaggtgatcatcagattagagaaaaggtgcttagacatagttactaagaggaaaattataggttgcaaataaagttcttattatccaaagcatagtaaaccaaacagatgttattatgagaaataaacctttttatctgaacactagatataactgctacattttccttataaaaggtctaaaattagttcctaagcatagaaatgttaacaaaaactgaaaacactcctttataatttaagtaaaaatagatcctctctaaaaaatttaacctagttaaagtttaaaattctgctcccaatctatattatttgactttgaaattaacagattttttttttt

SEQ ID NO: 7700 - DNA, 676 bp, Canis familiaris
actgcatagggttatacagggggagttgaagctgattccccggaactggtacatgtgcctaactgtgaggagacgaggagaccgtaaaactccataatgcgtgcttaccctactaagacaccaggaggaagggtctttaaggatcttggaataggttccaggctttcagcttagcagtgtgtccttactctacggcctctcgggaatcgaagagtctccgaggtccgacacaccggtaggtacacacagagcaagcaggtgggttggtaggccttgcctagcaagagggtacacttagttggcgtgctccaaatatctcaagtaggaggtgtctactacttagcccatagcaactgaccattaccgtatcaggcatagagcagcctcgggcccctgctacttgtacagggtcaaggttggcttgtactaagatgtagttcatttgcttgttgaatactgatcctgctgcttggctgtgcctcccctgagatccacacaggccaggacagcagtaggcctgtcacagaaagcaggcatctccgtcttccaggagcgagagaggctggagtcctacggctcccgcatgtttagtaggctgttcaaatggttattttctaaggaaaacagttttttttttttttttttttttttttttttttttttttttgtttttttt

SEQ ID NO: 7701 - DNA, 564 bp, Canis familiaris
  misc_feature (150)..(150): n comprises a, c, g, or t, or includes no nucleotide
agtttggcccgttgtagtaatcttggtcataggtgacttcagagtcttgtaggctacggtttacgttgtactatacatcctggtgcacttgtgctcggtctagttgatccggttccgggagcgctgacgttactgcttccacttggtccnctggttcccctgccagtggtggttagagcactgaggtgcctacacagcagggcactaagccttgtagtctgctgtggtttaggcctgcgtagtgcagtgggttcagtggttagcctagtccctggttgcataccgagtgctactgtaggccttgtctggcggctcctcctcagtccaaaacctgagctgctttagcttgttgttgttcagatccatattcctggagctgtctcgctgagcagtagtgccctagtcatccaaagacaatagcttagttagaggcttacgcaggttgaacagcagtatgttccgcctgcctggtaaactgagttcttggagtggttgttctttgtgtcgctcattgcctaagatgcaggtgtttttttatttttaattgtagttgttttttttttt

SEQ ID NO: 7702 - DNA, 640 bp, Canis familiaris
cggtgcaggagcagcagtaagcggcgccgcccccgcctccccgcctggctccagagccatcgcggccctagccgaggggcacaggcagtgcagcccgccgaagccacctcgtctacgcgcaggccctatgggcagcagcagcagcccggccccccgagcccccgcctgctcctctgcctccctgcccagcacggtgacccccacggccagccccggctctgggtggtagtcgttgttgtcgtggtggtgcggtctgtgtcggtgtccacaggggtgcggcagggagactgcgtagtaggtgggcacaaagattaggtcgtggtagcctctcacctggtccagccccccaacagagtgacggtcccagtgtgctctgtagtaggctgccagtgcgtggtgtccccagcaggccctccccgccatcaccgagcccccggccactgcccagccctctctgctgatagccttgacccagccagagaccgagcccgacagggccaacttggtgttgtggcctgttgctcggactacggtagttgtgttagggccgcccacaacgccggtccaggtccgctacgcggcgtgctagcgcgcgcaggagcagcgggtggccgtggtctccctggacaacggggtccag

SEQ ID NO: 7703 - DNA, 101 bp, Canis familiaris
atgcccttccaaagggtggtccttgtaaagctgtacagactttgcggtgttaagcacaatgtgcacatgttagttttctatacagcaaacttgattttttg

SEQ ID NO: 7704 - DNA, 465 bp, Canis familiaris
ggtcacaagatgtgtccttggagtcctctcaggcagttgggaaaatgcagagcacccaaaccagtaacacctccaacagcaccaacaaatctcagcatggatcagcaaggctctttcgttcttccagcaaaggcttccaaggtacaactcaaacaagccatggttccttgatgacaaacaaacagcatcaaggcaaatcaaataatcagtattaccatggcaaaaagaggaaacacaagagggatgcccccctctcagacctttgtagatagtcggcatcgtacgatggactgtcttctgtgtgcaatgatctcatgctcaggacagttggatagggactcctggcattcgggagccttacactgttcagactctgatttagcaactgcgttttttcccagctcgccacggaatggatcatgaagactgacaactgcaaaaaccaaaagcaagcaaaaaagagga

SEQ ID NO: 7705 - DNA, 520 bp, Canis familiaris
  misc_feature (94)..(94): n comprises a, c, g, or t, or includes no nucleotide
cagtagtttacccctcactgcagacctactgcagttctgacggaggctcaggggtgatggtccaaggttcaggatggggtggttagtgtcctangggaattcatctccactttggtgattcttaggctgatggatactgacaagaccctttggaatgttcctggctcaagtagaagtaggagatttctcactctatcaaggaagactcaaacttatttgtcctgacaagaaatctcgaaacttaatgtgttcacatgaccttgccactgcaaatgtttttttttggaccagactaggattggaccgtggtcatgggatagtctagactagcactgcccaacagaactagaatgtgagcttcatatggaattgtaaacttctaatagctatattaaaaaaaaaagggggggggatccctgggtggcgcagaggtttggcgcctgcctttggcccagggtgcgatcctggagacccgggatcgaatcccacgtcgggctcccggtgcatggagcctgcttct

SEQ ID NO: 7706 - DNA, 605 bp, Canis familiaris
ggggcgttcgtctggagcactgtactgaccagatgtaaagaaagggcttcaaaaaggtcttatatcttatccttgtaacttctgagctgaccctcttgagtatttactgtcccgttcaggacttttgttttgtgtttgtttacacagtgtggccaatcagtgtgataggaggggggaaaatgaaaaaaaaaaaaaataataaccccaccctgcgacaacacattttatggtagctctttacttttttatgaaaagaatattattggccgtgtttaaatctcttcgttttggtcccatccaaagtcttgatagtaagcattattttgggggtagaaatagtgaaatctctagcctctttgtgtgtttttgttgttgttgttttatataaagcaagtattcactaaaataaagtttaaaaaactaatgtcttgctagacaaggtttgctgttgtgccgtgtgcctgtcactactggtctgtacttctatggatttgcatttttgtattttgtaccaagtaaaaataaagtgttatgagtagtaaaaaaaaaaaaaaaaaaaaaaaaaaaaaaaaaaaaaaaaaaaaaaaaaaaaaaaaaaaaaaaaa

SEQ ID NO: 7707 - DNA, 604 bp, Canis familiaris
  misc_feature (1)..(1): n comprises a, c, g, or t, or includes no nucleotide
  misc_feature (113)..(113): n comprises a, c, g, or t, or includes no nucleotide
ncacaaattcaccacaaggaaacaaggctatggaccattaggccctaattaaggtgaacacctatagaacaagttgtacaaaaagcaaggctggtaccggtccggattcccgngattgggagtcccccatatcctaggggctgctgccctcatgcctcaggcaacctggggcttacagtactgggaacacaaggctttagtcactactgttaagaaaggtcttctaaaaagttaaaaaaaaattcttaagagttctgaggcataagtgcctgtgactcattcctgagagttattagtgccatttccactgtaagccagaaagacctgggaaatggaggggagcccttcgttgagaatggggtgtatttaaacttgtcaagcacagtccaggcgctatactctgtagctgttagggtgtgaggatgctgggggccaagcctggtgtacagaggtagttccagatctgtagatggggaacagccaaggggtcacaggctctacccttgtgctatccctgtaattctgtgatcccaaacctaataaattatttttaaagaaaaaaaaaaaaaaaaaaaaaaaaaaaaaaaaaaaaaaaaaaaaaaaa

SEQ ID NO: 7708 - DNA, 589 bp, Canis familiaris
  misc_feature (326)..(327): n comprises a, c, g, or t, or includes no nucleotide
gacatctaccggagactgttgggttaaactgtacaggtttctggcccagacggacccactctgaccgttaaccaaggtttgtgtttgaagaggtttgttcatgaagtcgcaccaaccggccacctctgtccctttcccggatgatccggaagatgaaactgcctggccgggaaaacaaaacagctgtggttgtaggaaccataacggatgatgtgcgtgtccaggaggtgcccaagctgaaggtgtgtgcactgcgcgtgagtagccgtgcccggagccgcatcctcaaagctggaggcaagatcctcaccttcgatcagttggcnnctggactcccctaagggttgtggcaccgtcttgctctctggtccacgcaagggccgagaggtgtacagacactttggcaaggccccaggaaccccacacagccacaccaaaccctacgtgagatccaagggccggaagttcgagcgtgccagaggccgcagggccagccgaggctacaaaaactaaccccagatcctgccttgttattaaaaagattttgaatgcccaaaaaaaaaaaaaaaaaaaaaaaaaaaaaaaaaaa

SEQ ID NO: 7709 - DNA, 555 bp, Canis familiaris
gatgctgtgtaaagtaaaattgatccacgaattagtataatctgtataatgtattaaggtgtcactggaatcagagtatgagaaaatgaaggactccacttttgatgactggaagaatattcgaggacccaggccttgggaagatcctgacttcctccaaggacgagatccagaaatccttaagactaagacaacttgactaaagttgattctttttttttttttgtttttaaaccagaaatgttacctatcaatcggaatacccactacatattcaatgggaagaaaatttcagaactgcagaagcccggttatgagtaatgtgatgacagataatcttgataaaaagtcgcagtaacctcaggcagtgattttatgtcaaacctatgtgggaaaataatatcgatcacaggctgatgagagttttggttttacttatagtccctcacatggtataaaatcagtctccaaagtatcacctgatgattgtattgatactattaaaacatgttaagaaaaaaaaaaaaaaaaaaaaaaaaaaaaaaaaaaaaaaaa

SEQ ID NO: 7710 - DNA, 625 bp, Canis familiaris
  misc_feature (50)..(50): n comprises a, c, g, or t, or includes no nucleotide
acataactttatggaatcctttaaggtgatgctttgggcacacacaaaanatgtggttaaattttcatttgtataaatgtatattaaatcggtaaatgatcagttaccttatgacttgttaaaacattaagaacgattctaaagaatatataaatgttattaaaataacacttttatacccccatttcaacaagagtacctatcaactaataaattagtcacacaattaaatcatgtcttatgttcttcacaagatggtgtattattataaaaagtcatggttctcacctcattctacattcagaatcactaatggaacttttaaaatgaaacagaacttttaaaatgaaacactgctcataagcttctgatggaatagttctaggatagagcctgggccttgtacccaagagactgccaatgttaaaaactattggtgtagggcagcctgggtggctcagtggtttagtgccgccttcagcccaggatgtggtcctggagtcctgggattgagtcccatgctgggctccctgcatggagcctgcttctccctctgcctatgtctctgcctctctctctctgtgtctctcatgaataaataaataaaatcttaaaaaaaaaaaaa

SEQ ID NO: 7711 - DNA, 582 bp, Canis familiaris
  misc_feature (60)..(60): n comprises a, c, g, or t, or includes no nucleotide
aacagggtactgggcacccagcgctgggctactggttgaggcctacccggggcggggcgnggcctcccgtggaagcatggcagccccgagtgctggcgggaacgtgaaatggcatgcacactcggccactgagcggccagttctagtggaaatcctcgtacagtgaccgtgtatctcggagaagcggccaggatctgtgcctgcccaggaccggaagcagcccgagtcctcccagcctgtgtggacgcagcagtaaaaaggagcaggtcctgagagaagcagcagccacaaagcttacccactctgatcccgtttctagaacattcttgaatggagaatgctggagagggggcacccgagtgtcctgacgcggtgcttcggtgaacttgtgcacgtgaccgtgtgcacacaccaccagcctggtgctggcagggctgtgagccgggcctgggccccggaggcggtcgtgtggctcactgagcgtctgcctcatgataaacagtggaagaagcagccgggcatcctgggggtgcgggggccgtgtgcctgcccttgtccgcatgcgcgcacctgccggccctg

SEQ ID NO: 7712 - DNA, 603 bp, Canis familiaris
tatcagcatagggtacttggtggctcaagtaaggtaaactttgactctgatttcagctcaggtcacaatggtctcaagagttgtgagatcaagccccacatcaggctctgtactctccttgagattttctcccctctgccccactgttcatgtgagctccatccctctctctctctctcaagtaaataaatattttatgaaaaaaagataaccaacttaaaaatcgaatatgccaaagaggcaaactttggggcagcaaaatctgcttcccctacagaagcattattgtctccaaacttggatttgtatcattcgtcaaatacagttcactctaatgtaagtagatgttcttttgtagttatttaggggaagaggaaaccatgttttaatttattaaaactgtagggtccattaaactggattgttgtagtttgcttagaaaataagttaattctcattacgttaaatacaaaacaaatgaaacactgtttcatggcaagtggggctaccataggttttactcttttgattgtgggcatgactgaatgcatttgtaactagtcatatcactattaaaatcaaccatttagaaaaaaaaaaaaa

SEQ ID NO: 7713 - DNA, 684 bp, Canis familiaris
  misc_feature (407)..(407): n comprises a, c, g, or t, or includes no nucleotide
caccgccattggacgttcaaatggggagtttgtttggcaacccaaaaatgcacggggactgttccccacaatgttcggttacaactccgccccattgacgcaaatggcggtaggcgtgtacggtgggaggtctatataagcagaggctcgttttagtgaacccgtcagatccgcctgggagaacgccatctcacgctgtttttggacctccatagaagaccaccggggaccggatcccaggcctcccgggactttagctaagcccgcggggacggataacaattttcacacaggaaaacagctatgaccatttaggcctatttaggtgacactatagaacaagtttgtacaaaaaagcaggctggtaccggtccggaattcccgggatcacaaccatgcggggtgcncgcctgggggtcttttgcttctcccaagagaacatcatctgggccaatctgtgctaccggtgcaatgacaccataccagaggactacgagactcagaggcttctgcaggcctagggatgggggtggggacccattgctggaagatggcaccatcgtggctaccctcactgcaacaaacagggagcttggcacccggctccaagaggtagctgccctagaggggctcagaaaggacaaaataaagtgtgtgtggtggaaaaaaaaaaaaaaaaaaaaa

SEQ ID NO: 7714 - DNA, 437 bp, Canis familiaris
  misc_feature (41)..(41): n comprises a, c, g, or t, or includes no nucleotide
  misc_feature (66)..(67): n comprises a, c, g, or t, or includes no nucleotide
  misc_feature (84)..(85): n comprises a, c, g, or t, or includes no nucleotide
  misc_feature (87)..(87): n comprises a, c, g, or t, or includes no nucleotide
  misc_feature (99)..(99): n comprises a, c, g, or t, or includes no nucleotide
ccggttgaaactaaagggatggacacaggttatcacacgangaacttttctcagcatttcatgatnngaccctctgagtgaagnncnttggcccacganttctggtgccagccaatgtactaccacgcaagaataaaaaaaaaaagaaattcgtatcttaaagaaacagctttcaagtgcctttctgcagtttttcaggagcgcaagatagatttggaattaggagtaacctctagttcttaagaaccaacactcttaaaagatttaggagaaagtttacaacataatctagtttacgaagaaaacttgtgctagaatactttttaaaaagtatttttgaataccattaaaactgcttttttccaacaagtatctgaccaacttgtttctgcttcaataaatctttgggaaactcaaaaaaaaaaaaaaaaaaaaaa

SEQ ID NO: 7715 - DNA, 235 bp, Canis familiaris
  misc_feature (31)..(31): n comprises a, c, g, or t, or includes no nucleotide
taaacacctactcagaaagcccgggtgagcncagtgggcatgtgctttgtgtaaagatggaagaagcagggcaatccatcatttctttcaggtggacaatttactgtcctaataaggaagggagcacaatggaaatacacctgaactgttttattgcagtaatttttcatatctgaaattgtattatttaatattttgaataagattttaaaaataaatggcaaagatattaaaa

SEQ ID NO: 7716 - DNA, 682 bp, Canis familiaris
gcgtacttgcatgagaatttgggagcaatcgcctgttcagtatcccgcttatgtgactgtgggaggcatcaacctccgttagtaaactgatgtttgcaggactttcttttaatctttgtggaagtgtggcattggcagacagcttctcataaaatttccatggctcttctcctttggttattttttcaaaacaaggtccaacactatacagatggatgccgcctcgtttacaattgacattctttggtcaaggattacagtcaaggctttggtccggagaagaactaaccaaatatgagaatttgtactcaggtgaaaggaccagaggctggctacgtggctacccccatagccatggtccaggcagccatgacacttctaaacgatacctctgatcttcctaacacgggcggggtcttcacacctggagcagccttctgcagaacaaagttgattgacagactcaaccaacgtggcattgaatttagtgtcattagcagctctgaagtctaaacatttaaagaattaactgaaggcatagaatgcatgaattaacggcttttttttaatgtaaaatttgaaattcttctatatcctgtctgtatgtaaaaaagattgtcaaatctaaaatatatacacattaaaagcaggaaattgtgctcacttaccctaaaaaaaaaaa

SEQ ID NO: 7717 - DNA, 674 bp, Canis familiaris
ggatgatccccaggacccacaaagtaacatttccaaatcagtagatcgctgaaaagccattcaacattgcatcttctgaaataaattctattcccagtttttgttccatgtttcaacataagctttccataggctctattgggaagaacattgtaataatcgcgtgctccacctttaatttctactgtacaaccagtagccaaagctgcagctctgaagcagtcttctgcctttttggtcaaaactggaagttctttcattgagggtgcacggaagtaatagattaattcagaataagagggaatgatattgggttttacaccaccactttttattatgccatgaactctccaggatggtttcatttgctgtctcaagacagacagattgttgtaggcaagaacagcagcatctaatgcatttactccttcccagggatatgcagcagcatgacatgctttgccatagtatttcacagtcacatcatgttccgccacatcaggtagataagcagcatcctcttgggatgggtgagccataaaaacaacatcaagatttttaaaagcccctgcttccattaaatcaattttgccaccaccttcttcttcggcaggggttcccaggacaattaccttcacaggcggaggcggcccggggcggccctccagggcccc

SEQ ID NO: 7718 - DNA, 588 bp, Canis familiaris
gagctacaatgtcactccacctactcaggaatgagcctgtgactactggaacagagattttgtcccaagtttccagcctggccacgttcagcctgggcgacatgtcagctttacctggagtacagagctacctggtgcaagtggtggccaccaactacaaccagtatgccttggtgtacttccggaaagtctacaaaagccaggagtacttcaagatcaccctctatgggaggacgaaggagctgcccctggaactgaagaaggaattcatcaggtttgcccaatccataggcctcacggaagaccacatcatcttcctgtcccccttgacccagggccaatggaattggaggtgaatgagaacgcggtactacctgtctctctccacccggtcgccctcacaccaacctctgaccaggacatcacccagcgtgtccccaccaacccggacaccgagagagccatgagacccttcttaccacatagcccaccagctgctctccaggctgtccttctgatggaactcttcctccttgcttgctaaataaacacatgccacctggttaaaaaaaaaaaaaaaaaaaaaaa

SEQ ID NO: 7719 - DNA, 632 bp, Canis familiaris
agagataaaataaatgtttagaaattaatctgtcttgagtgagaattttcagaccatggaaataaaataggacactcaatgatgtataaaatcctctaagttggcaactgaatttgttattgttttctactttttgaaatagctactgaattgtgtgatcttttggcttctgcttgttattaaaagtacttgtcagatcttagtaacatttcaaagagccatgtgacatgagcaagtggtgaaaattggatattaaatttgagaatggcagttctgtgtaagaagaaggaaaacaggaagagagagaagtactgaagaaggaaatgagcccttgagagagacccaaggaaacctggaacccacactcaaacgaataaacagacacccagagataatatcactcaacaaatatgtatttaacttctaccttaagagaacaaagttgggtgtgcttttatgctgtaacatgttatatatataagcatgttatgtatataaacacaaatacaagtctttaaaccatagatattgactataacttaagatattctcatcctgtatctatgctttgattttgtttactgaagtactattgaatcctttaaaatacatatatatttctaaaatgcgaa

SEQ ID NO: 7720 - DNA, 501 bp, Canis familiaris
cttgcaccccgacctccagggacccttcagcacaggccctgctgttcccatggtgcttctcaccctgagctcctgtagcctcagccagggaaagagtggatgagcagtgagctggtttcttgccctccagtggcagcggggagcggggggggggggttgagcttccctttgaccctcttccccccctttcccagatcttcaatatttgttgtgatgtaacagctacaagagctgtaagaggaactatgggctttgggtgttttcttgggttgaaaagggatggggggaggggggggaaatgcatgcaggggtatgaaggcagcccaaggattcccagagactcgggaggaaacctgtttgaaacaaaaatgtgttattgttattgtgttattgttgcattactgtgttgtgaagataaattgttctgtatgctaaagctttctcctcaataaaaatataaagggtgtgtaaaaaaaaaaaaaaaaaaaaaaaaaaaaaaaa

SEQ ID NO: 7721 - DNA, 558 bp, Canis familiaris
gttgccaatatgatcaaggggaaaactcctgaggagatccgtaagaccttcaatatccaaagtgactttactgaagaagaggaagcccaggtacgcacaagagaaccagtggtgtgaagagaagtgagaatgttaagcctcgacacgtgtaacacgtgtaaggattgttcccaatactagttgcactgctctgtttataaattgttaatattagacaaccagtagacaaatgcagcagcaaatcagttgttttagcagaataattgtcctccttgcatagtggtagtttgagtacagattcccaaacttatggctgagtttcttctagtatgatcgaaagtttctttttttccttgctcttaataaactgaactgtgggttctctgtagaaggtggcattttgggctttccctctctttgtaaagcgatttctgcctagtttattgtctggttaactttagtttaatgaccttttaaaagttggcattgtaaataaaacaagttgaaaaaagaaaaaaaaaaaaaaaaaaaaaaaaaaaaaaaaaaaaaaaaaaaaaa

SEQ ID NO: 7722 - DNA, 545 bp, Canis familiaris
  misc_feature (1)..(1): n comprises a, c, g, or t, or includes no nucleotide
ntacaggccttcctgtttacttatagcatcagaaactgtcacatctcgtccccttccggagagcagggcttgcactcttcccctagaacctactttgaaggcaattagaagctttgttttcatttccccctggtattgtcttgccaggatggttaggtacacaaggacgcttattagatcactgagaagtaaaatgcctaacccgcttctctggtatgaacatctagtttgagtagcaagcgaaaacagtaggcttgtattagtgctttaatggagtactggtaacatttgttctttcttgataggaatctgcttatatttagccaggcttctatgttcataccctctcccactacaaactttccgtgcagttaccttgtcatttttaaagcaatgttcactgctaaatataaattgtatttgtggggttcatagttatataatgctgaagggaaccactctttcgttgaaaggtgataaaagttaaataaagactgtctccacagtaaataaaaaaaaaaaaaaaaaaaaataaaaaaaataaa

SEQ ID NO: 7723 - DNA, 580 bp, Canis familiaris
ttcatacatcctaagaaagccaaataatgatacctaacgaaataaaggtaacctaccaataaaaccatcgcctgccaagaccaaactcaactgtctttgaaggatgaggaacacacaaaaaatttcagactcttaaccacatagcctcaacaatttcacagcaaaaggctaagatttaacatgcaaagaaacaggagaatgtgacccctaacaagaagtgacaggcaatagaaatagacccactgataacagaaatgttgaaaataatagggcctttaaaaatctgcatataaatatatttagtactttcaaccatagctgaaattgttcccaggtttgataaaaaacattaatgcattgattcaaaaagctcaatgaatctttagcaggataaacagaaagccacacccaagtacattatgttagattactaaaaaataaaaataaataaaagagaaaatcttaaaaatgccccaagaagaaaagacatattacataatgaaaggcaatgataaaaatgactgcttattatcagaaacagtgttaccaggaggcaataggatatcttcaaagtactgaa

SEQ ID NO: 7724 - DNA, 484 bp, Canis familiaris
tgccccgcgctctgcgagcccggcgacctgtctggagctgtctgtgtgctgcagccggcgcccgagccaccccgcccccgcaccccgccccgcactgggccgtgtacgtggtgtcgggcagatcatccacctgcaccaaggcgagatccgccaggacagcactgtacgaggcagggcgcggccaacgtgggccagggtggtgaatagctggtaccgctaccgcccgctggtggccgagctggtggtgcagaacgcctgcggccacctgggcctcaagagcgaggagatctgctggacgaactcggagagcttcgccgcctggtgccgctttggcaagcgggagttcaaggccggaggggaggtgccggccggcacgcagccgccgcagcagcagtactatctcaaggtgcacctgggcgacaacaaggtgcacacggccaggtttcacagcctggaagacctcatccgcgagaagcgccgcatc

SEQ ID NO: 7725 - DNA, 619 bp, Canis familiaris
  misc_feature (1)..(1): n comprises a, c, g, or t, or includes no nucleotide
  misc_feature (89)..(89): n comprises a, c, g, or t, or includes no nucleotide
ntgcagctgatttagaccggagaccaagtgggagccagcgaagccacgactgctcaacaatgctggacatctcccccttctcctttggnctgatcatccagcaggtggtttgataatggcagcatttacaacccctgaagtgcttgacatcacagaggaaactctgcattctcgcttcctggagggtgtccgcaacgttgccagcgtaagtctgcagataggttacccgactgttgcatcagtgccccattctatcatcaatggatacaagcgggtcctggctttgtctgtggaaactgattacacccgtgccacttgctgaaaaggtcaaggcctttttggctgataccatctgcaattgtggctgctgctcctgtggctgctgccaccactgctgcacctgctgctgccgcagccccagccaaggttgaagcaaaggaagagtcggaggaatcggacgaggatatgggatttggtctctttgactaatcacccaaaagcaacccattcagccaagtttatttgtgaaacaagggaataaagggttacttttcttaaaaaaaaaaaaaaaaaaaaaaaaaaaaaaaaaaaaaaaaaaaaaaaaaaaaaaaaaaaaaaa

SEQ ID NO: 7726 - DNA, 607 bp, Canis familiaris
tggatccactgggccacaactatggtatctatactgtcaccgaccaggaccctcgcacaagccaaggagattgcacttggccggtgctttgatggcacatccgatggctcctccagagtcatgaagagcaacgtgggagtggccctcacctttaactgcgtagagagacaggtgggccgccagagtgccttccagtacctccagagccccccctcccggccccctgccacaagcactgtcagaggaagagtgtcctcaaggagacagcaacgggctagtaggggtggccagcgcgggtgagaaggcgtggcctctctgaggtttcctgggattgctcctcagcctctgagcaactaagtcatatggtacttttcttcccccacctcatgtgacagccattgtgagactgatgtataaactgtcacttggttaatttaagcacatctgttctggtgcaatttgcttgttttcttcatgcctttacttactgtctttaccccatgataccgattggcacgtagcccccagagatgtcaaaataaatcttttttgtcttgttctttaaaagaaatacaaaaaaaaaaaaaaaaaaaaaaaaaaaaaaaaa

SEQ ID NO: 7727 - DNA, 402 bp, Canis familiaris
gacaggatgcaatctagaagagaactcaaaatagaccaattttgttaaggaaggaggtcttgtcaatttagaaaggctctaccctcactgttttggcaacttagtcttgtagtggctgagaacttctcattccagctgtttattccaccctccagcattcattcctgatcattggatccttgaaacctacagtaggattagctgcctccctattcgaaatcatggtgttgggggcgcttgggtggctcagttggttgaagcatatgcctctggggattaaacagaatcaggctccctgctgagtggggtgtctgcttctccctcagcccctttgctcctcaccctacttatggctctctctctctctctctctctctctctcaaatcagtacataaaattct

SEQ ID NO: 7728 - DNA, 669 bp, Canis familiaris
  misc_feature (1)..(1): n comprises a, c, g, or t, or includes no nucleotide
nattagtactgtcccctttgcttatatggttcaacttcaacaaagtactcatctgtcatatttaagtttccaggcctagttgttttggtagtagggagatggggttggatacaaagatgaacatgacaggctctgccttccaaggccttgaatcaaggaagataagtagttccacagaggcccaatccagaacaggccagctggaagattacacatgccttgcagagagggttcagtatgtggaaaatatggagaaacttctcacacctggaagaatttggcaggggttctatggagggaagagttcatctggcagaggttgtgtttagggtattccaaaaagaacaacaacttgaaccaaaggtacagaggctgggaagaacagaccacattttgcagaacagtgtatctggtttgactttaacaatgtatacatgtataagaatgatgcccagggatccctgggtggcgcagcggtttggcgcctgcctttggcccagggcgcgatcctggagacccgggatcgaatcccacgtcgggctcctggtgcatggagcctgcttctctctctgcctgtgtctctgcatctctctctctctctctctctctctgtgactatcataaataaataaaaattaaaaaaaaaaaaagtacattaaaaaaaaaaaa

SEQ ID NO: 7729 - DNA, 620 bp, Canis familiaris
  misc_feature (80)..(80): n comprises a, c, g, or t, or includes no nucleotide
tattagatatcataaatgtgggtttgctacccaaatgagaaacttagttatctttttaagaaaataagtatttatcgcantaagtgaatttataaccaagttaagcacaaaagcagggtaaaaaatgtttaaaaataagttgatgtaaatgaggcatttgaaaatataggttggtgcttcatcattaactttaattttgtgacttttgtcagttgatgtcacaaccttaatgttatttttaaaatagtttttttttaggggtatttaattaagtaatgtggtgtttgcttatttcaaacagtctgtctttgttcctgtcaaagccatgctggcagggcattgcttttcttttcccttttgttaatattctgtgttagataatggtttcgcaaataatagattccaaggacctttgatccaccattactgtaaaataaaatacaacttaatttttttctgggcataatggttttaaccttgtgtactaatttgactgtgcttgtgggggcagatccttaaatgagacgcaaatgaaggaaaaattgctaatgctgccactgtatatctaatgagcactgtgtaataaaccataacctcttcgaaaaaaaaaaaaaaaaaaa

SEQ ID NO: 7730 - DNA, 583 bp, Canis familiaris
tgtatcaaacaagtgatatcagcttactttggggccagggtgtcttatctctaaattcagttttagcactgatggaaaatcaccacggccataattgatgacaagtcattgttatcccataccccaggagactataggcaaattagggcagtattacaagtgattaagaggatagatttggcataagacagacccgggttcaaatccctactcccgtttactggctctgtgaccttgagacaagtaaaccttttctgagccctaattttttcatctgtaaagacagtattactgacctcatagggttgttactagatatagtagtttctaaaggatcttactgccaagtaatcgctcagtgaatgttcgcttatattctgattatgatatggtgataatggtgattcttatattatggaccaaataccctgttgggtagtgggaggactttgtcagatctttgttgtgaaatttttttgaggaatgctacctaattattaaaggcctgtgttttttaaaaaaaaaaaaaaaaaaaaaaaaaaaaaaaaaaaaaaaaaaaaaaaaaaaaaaaaaaaaaaaaaaa

SEQ ID NO: 7731 - DNA, 623 bp, Canis familiaris
gtgtcactccttcgaggtgatccggccaattcgggaatagcttttagattaggagagaaccccacttggtgggagatgtctttctcatttacagctcgggcctccctgtgcgggatctggtgggactcagggtagtctgcagatgatctagattgtgccagtggtgcactagctgtccatgtgtatatagcagtgactctggtccttgcttagctcgttctgaatctcctgacccacatacccgagcagctcaagggatgtgtctatccagggaggtcctgcaggcatctccagggggtccagcaagaatccacttgtctttccatcccctaattcctcaactttcgttccatggtgaataccagcgctcaacctctaaattgcccaagacagagacctcagggatactctgttatcttctactccctcttaaatccataaggcgactcagttttaacttctgagtgcctcctgtgtccatcagcctcctccctgactgtcttgttctcccctctaggcctttatcatctctcttatggtattaagtcatttctccacctctacctcctcattgcctctatttctgcctctcttagtctctccttaaaaaaaaaaaaaaaaaa

SEQ ID NO: 7732 - DNA, 578 bp, Canis familiaris
cctaagcatacgtgcgtgtctgtaactgtttttttttttctcaagtgaatttggcttatttacccccctgtgaccctaattcttaacatgagagaaatttatctaatttattaaaagagagaaagctttcctttgaacgttacgctttgagaagtaaaactcctgaaaggggaagcacacttctaatgccagtcgaaacctcctttatttcgtgtatataatttgatttgcacatgtacaaatggagacacttttttgcgtttttgccgggattggttttgttttgtttttgttgtttttttgtcactgctttagtttgctttttttgtgttttctctatgttttgaatagtgtttctttggtatttattgtctctctgacgtgccttttcacttttctttggggtcggtttttagaaggtgggaaccatttaaggaagatcatagactcctcccgtttgaagataggacatatctttgtgtcaccatagatgctctggctgggcacagaagtgccctccaggccctgggccacagcatatgtgctccctcacccccgtgaggccatgagaaccccca

SEQ ID NO: 7733 - DNA, 114 bp, Canis familiaris
cacccaccaatttttttactgtaaatgtttcactttcctatagctgtcctttgtgaacttttcactttaaagaataaaagtgtttgataccaaaaaaaaaaaaaaaaaaaaaaa

SEQ ID NO: 7734 - DNA, 135 bp, Canis familiaris
cccgtcacccagtgctcagctcccaggccacggccccgcgtggctgcccggcgggacgtgccgcttctgttgaggtccacctgatgctaaagaaataaatatgtgctgaacccttaaaaaaaaaaaaaaaaaaaa

SEQ ID NO: 7735 - DNA, 663 bp, Canis familiaris
gtcagctctaaacaatgtgattatgtagtacatttctttctttttcagggattattatataataaatagcatagggttcctgggtggctcagtggttgagcatctgcctttggcctcaggttgtgacccccccggggtcccgggatcgaatcccgcgtcgggctccctgcatggagcctgcttctccctctgcctgggtctctgcctctctgtgtgtctctcatgaataaataaagaaatctttaaaaaaataataaatagcataaccaaaattaattggatttttttttttgtaggcaatgaattctcttgtaccttttggcagttttggtggtatggttcgtatcatgagacacaaaccattttagcaatattttctgacaaatatttattgttcactaactcaagcaaagtaaattggcatgcagtttcacttattttcaaaatagctttttagaatttgtgctgaaacctgtttcatgtattaatgttggagtgttcgtgttttttctgaattaagtcataccaacatacgtaaaatcagtcttcaaaaaagataagaaatacattttaatggacggatattcactgtagctagaggagctcccatgaagaagctcagttgtctgctctctgctaggactccccggggagtcggctcca

SEQ ID NO: 7736 - DNA, 606 bp, Canis familiaris
atttggggagggttttggaggggaagtaatgtcactgatatacttaagccttgttgattttgcagaaaggtactgttactgtctgataggatgcctttgttttgtacatgatcccaatctttgttttacatttcttttatcccaaatatttaggcatctgacattttcaacccaaatttcaattatatactgtgatttttatttgttgcaatacattaaaatttcagaggtactttggggctcaaaagctaggatttctaagtatgtgcatttcacataataaagctgttaatggtgagccaagtattatatactaactagatttttccacatctgtatagtatattatatgtattttgtggtattgagattatagaaagtttagagtgtcaaacatgcgtttaatgtgtatttttaaacaaatttatggcaattaaaatatttggagaccagggtatcacatttcaatttgtaaagatctttttaactctactgtgtcattaagatgctttgtataatgcccaaccatagctggagaaactaagtttaataaatatcaaatagattttctgtaaaaaaaaaaaaaaaaaaaaaaaaaaaaaaaaa

SEQ ID NO: 7737 - DNA, 626 bp, Canis familiaris
tacaccagacaaacttaaatatgaaaaaggaatttataaaagtaaaattgaaattaataaagtgaaaacaacatacactaatgttatttattgcctactacatttgagttacagttttaagagcctaactcatttagtattactctgatccccattttatagaggaaggaactgaagcacagggagattgagcatcacacagctcctgagtggcagagacagcactggaattcagacactctggctccaagggccacagtcttccctcaccaggctcactatcgggtctagagcccacatatccacagtccctctccacttctccttccagtgcaatgctggaaaatgtgttctttatggaaaccataccatacaaattttgaatgtgtaacatttttgttcatctgatgcaaaaaaaaaaaaaaaagtcagttttaatatctatacctttacatctggaataaaatgagaacatgtgcctaaatcaattttaatgatttatgtattttatttagcctgcttctccctctgcctgtgtctctgcctctctctctctctgtgactgtcataaataaataaaaaaaaaaaaaaattgtaaaaaataaaaaaataaaaataaaaaaaaa

SEQ ID NO: 7738 - DNA, 670 bp, Canis familiaris
cggtcacgaagtcatttaaaggaggacatcctgaacatgtttgtccgcaggggcatgaagacattatgatcacagtgattcccgcagaatcgaccccttagggagaggcatgagctgatttcatgtttcccgcaagactctccagtggacgatgcatgatgactctgacgggtgcacggcgcccccaggactttggaccgtgttgtttgtccaacagaaacacctggccaacagaatccttcttgatagtttgcatggcgaaacaaatgtaatgtcgtagatctgcaggcagaagctcgcccttctgtatcctatgtacgcagtgtgcttttccttgccagcttggactgttcctgcttagacagtcaacgtttgtctcttccttttaccgagtcatcatcttagtccgactaaggcagttaatgtaatgcgtagatggaggaaagtcccgcgggagccaggacggtcctgggcacgtttatgctttcctcctagtcagcacccagaggaggtcgacgccagagaccaccgctgggtggatgctggcttccagaagggccagagtccctcttttaggaaactcttcagaactgggagcacagtgactgagtttgagctattaaacccttcttcataaaaaaaaaaaaataaaaaaaaaaaaaaaaaaaaa

SEQ ID NO: 7739 - DNA, 624 bp, Canis familiaris
  misc_feature (22)..(22): n comprises a, c, g, or t, or includes no nucleotide
atccacgctgtttttgacctcncatagaagacaccgggaccgatccagcctccgactctagcctagccgcgggacggataacaatttcacacaggaaacagctatgaccattaggcctatttaggtgacactatagaacaagtttgtacaaaaaagcaggctggtaccggtccggaattcccgggatgcaaggccaagttcgccggcagaagcttcagaaacccccttgccaagtaaggtccaggtggcgcaccctgtggtcctgagtcagctcgttagacctctgctcccccgggcagctcaaggcccccagcccaaagtggcagggccctgtgctagttagctgccctctcccttccccgtgatgttctcaaagcttccttagaattgctacagaagccagagttgacatctggaaccctgctgggaaccctagctctgtaaacatgtaattggtccaaatcattgctttctcacctcacttccaccaagcatctggagccaggtctgtctatgtaataatctcaaggtgtccacaggcaagatccccagtggttttatgtgcagaataaaaaggcctcagtgacccatagaaaaaaaaaaaaaaaaaaaaaaaaaaaaaaa

SEQ ID NO: 7740 - DNA, 477 bp, Canis familiaris
ccagcagtggtgatcagcagttctctgtggatatgggtttcggcgagaggcgggagtttgggggatggcatcggctgtgagcgggctgtgacagagatcgaaatgggcacgactatgattactaccagcgtcactatgacgaggacgccgccatcggtccccagagcccctacagcttcaggcacggagccagcgtcaactacgatgactactgaccaaccacccctcggccctcggcgccccggccgcggaggtgacccactgggctgccttgcaccacgtggcttccgctgggctttactccagcagatcttgcctaccccctttctgcagccaggaaggaagagttaaaccatataaatgcctttgatatttcatgcaagtgcctaacatcgcatttcatttaaaaaatagaaataaaagcagtttgttaaaaaaaaaaaaaaaaaaaaaaaaaaaaaaaaaaaaaaaaaaaaa

SEQ ID NO: 7741 - DNA, 653 bp, Canis familiaris
cgagaagttagaggtcttgactaggttcagatggcatctccacggattgggaggtcatctgggccagtagttctcccgcttcagaggtagcgtttttccttggggaggtttgacaccacatccccagctccctgagcacagactacagggatcttgtggacaaagcgttccccaagccaaagactgcagaatggtttgtgccaatgacatcagggcagcacccatgttttgtcagcaggaagaagcagtagactgtgcagggcctggaggtacctatgcccttcttgtcccagtcccacagaggtagaggttgacagatggctcttagtccaagggtaggggtgagaggtgacccttacagaacagaacactaagtgggctggaacagtcattgttgtgaggggctgtctggtcccagctcccctgtgtcccccaagccagagaagtgaaggctgcctgccagcgaggaaccagagcccgcgtgctgtgtactacctgcagccacttgggggtgcaacgtttctgtacttccagtttgcttatggctcagccattgcctctgtcaatctgtgattctgttgtacccatttcaagagtaaataaagctcgtgatgtcccacccaaaaaaaaaaaaaaaaaaaaaaaaaaaaagg

SEQ ID NO: 7742 - DNA, 554 bp, Canis familiaris
  misc_feature (1)..(1): n comprises a, c, g, or t, or includes no nucleotide
naagagtcacactttgagatggacatttaaaggacccgcccttgataatgcctctgggccccctgacccttttcgggagaagatttgtacccgccaggccttttgcaagtcataatcctgtgcacggcattgagtatagggtcggccacttctggccctttgctccctcactcacgggcaccctgctcccccttcctctttatggacggaagtacccgcggagtatcctccactgtgcctccaattcatgcacggtgcttccacccttataagggagtgactatgatgagcacaccctgcagcccacgggccaggattggactcggaggagctcttttgatgattatctggctcttttagccccatccttctgggggcacacccaccccttccttaggttggtgtgcatggggatactctcctccccctttttcccccagagaggaaatataaagccacctttgccctagggcccaaaaaaaaaaaaaaaaaaaaaaaaaaaaaaaaaaaaaaaaaaaaaaaaaaaaaaaaaaaaaaaaaaaaaaaaaaaaaaa

SEQ ID NO: 7743 - DNA, 607 bp, Canis familiaris
ggctcatggaccgcggtggtcccggtgggatgttcagaggtggccgcggtggagacagagggggcttccgtggggccggggcatggaccgaggtggctttggcggaggaagacgaggcggtcctggtgggccccctggacctttgatggaacagatgggaggaagaagaggcgggcgtggaggacctggaaaaatggataaaggcgagcaccgtcaggagcgcagagaccggccctactagacgcagagaccccgcagagctgcattgactaccagatttattttttaaaccagaaaatgttttaaatttataattccatatttataatgttggccacaacattatgattattccttgtctgtactttagtatttttcaccatttgtgaagaaacattaaaacaagttaaatggtagtgtgccgagttttttttccttcttttaaagatggttgtttaactaaagactaaacaatgggaaccccttgtgagcatgctcagtatcattgtggagaaccaagagggcctctaactgtaacaatgttcatggttgtgatgtttttttttttttttaaataaaattccatatgtttataaaaaaaaaaaaa

SEQ ID NO: 7744 - DNA, 497 bp, Canis familiaris
  misc_feature (1)..(1): n comprises a, c, g, or t, or includes no nucleotide
ntcagtctgtatcttctgtttccctgtcacccttgtgctcatttcttccaccccactctcctcgggttaccatcgtttgttttcagtattttatagatctgatgctgcttatgtttgtctgttcatttgtttttagattgcgcatatgagtggatcataatggtatttgtctttctctgctgacttatttcctgacatatactatgacatgatatcttttgatatcttttttcaactatcatttccggtgaagaggggctggatgacctgggagaaaggaggcaggagcagatcgtgtgggtcatcctgtgtttacaataaaagcacaccggggatgccctgggtggcgcagcggtttggcgcctgcctttggcccagggcgtgatcactggagacccgggatcgaatcccacgtcgggctcccggtgcatggagcctgcttctccctctgcctgtgtctcctgtgtctctgcctctctctctctctctgttactat

SEQ ID NO: 7745 - DNA, 593 bp, Canis familiaris
  misc_feature (179)..(179): n comprises a, c, g, or t, or includes no nucleotide
  misc_feature (186)..(186): n comprises a, c, g, or t, or includes no nucleotide
ttttacactgaaagcaaagattatagcaattgtagtccatggtatttattttcagtcaaaccaaagttacatataattctgcctctgcttatacgggatattaacactaacatacgctccctctcaaagacttgcacaggccaaattgttggaatgctggtttttcttgacaactccanaccccanaactatgatgatgcgttatggtgtagttgaaaatagcatagtcagatgtttgcttaaaacctagaaactttacgtgttgcttttcatgtgctgtgccaagtcttgataatactttttcccccaaccaagggacctcataacctgattatggttattgctttacaaacagttttgacagaaggtggctgctagagcttaacatacgtaccagttccatgtgatggagctggttcttgcaaactaagctcatcatttattctttgctgaagtcagcaaatagagttagagagatacccagtcatctatcacaccaaataaaaggacataatggctttcaaaagggttttcccacatacccaaaggctttctgaaagcttctacctctgcaaaaaaaaaaaagaaaaaaa

SEQ ID NO: 7746 - DNA, 556 bp, Canis familiaris
aagaagaggaggtgttgcagtggagtgatggggtgccttttggtgttggggatgccggtaaaacctcttgtgtttccttccctgaacagccacaatggtgcgcatgaatgtcctggcagatgctctcaagagcatcaacaacgctgaaaagagaggcaagcgccaggttcttatcaggccatgctccaaagtcatcgtccgatttctcactgtgatgatgaagcatggttacattggcgaatttgaaatcatcgatgatcacagagctgggaaaattgttgtgaacctcacaggcaggttaaacaagtgtggagtgatcagccccagatttgatgtacaactgaaagatctagaaaaatggcagaataacctgctcccatcccgccagtttggtttcattgtactgacaacctcagctggcatcatggaccacgaagaagcaagacgaaaacacacaggagggaaaatcctgggattctttttctagggatgtaattcatacgtgcaaataaaatgcctcaatggaaaaaaaaaaaaaaaaaaaaaaaaaaaaaaa

SEQ ID NO: 7747 - DNA, 567 bp, Canis familiaris
tcgggcccgccgctcgcctcgggccaggggggagcctttccccctcgcccccaaagtttctgggttcgttggaatttttgcattcagattttttttttccctttttttctccacctaggaatttgaggggaaaacttttgacaaatcgatcgcactttctctccgctagctcttaacgagagaggctcccgctggacaaagttttgcaaagttttccgagtgtgatggttgcggggagagctaatccaccagcttgattcacggcttcatctcaccacccctcgagcagcccctaaacccgctataagggaacaaacaaacaaacaaacaaacaaagttacactccgagtcgcctcgtgtctcctctctctctcttcttttaggcaatttcttccctccctctctccgctcccctcgcagcctccactccccttccctcggccccttcctccttctctgtttcggttggaggtgccaggacccccggccgaagcctcccctcccccgccgctcgcgtcccttctcatccggccctcccctcccccgccgcggccgacacagccaatc

SEQ ID NO: 7748 - DNA, 622 bp, Canis familiaris
tttggatgatggaggaagggacacggtctctttcgtggggaattttttctctgggaagtcacttttgagtgagcggatatatactattggatctttggagaaatcctttcagacccttggagaaatatttcaggccacggatatttataagaaaggaaaatggaaggttcccgtagactaggaatacttttagcgtgtatctccaatgctgacacagacatctgtgtcatttacgctgacacagacatccgtgtcaatttttttttcccgtttctccagaaggaaggtccaatgaaaccgaaaaggtgtggttagaattctttttttcactttcgtaaccttaatttatgactgcgttcgttcagccccgtaatctgagaaatactgtgccaattctagcacagtgtgtcttctataacctggatgttagaatagcccatatgtaccaaaagattaaatcaagtattttgtcctatgtataacaccaattacttttacacagagaaagatgttttctaggaaaaagaaattctggtaattcatactatttctttgtatgaaccaataaaatttattttacccaaaaaaaaaaaaaaaaaaaaaaaaaaaaaaaaaaaaaaaa

SEQ ID NO: 7749 - DNA, 611 bp, Canis familiaris
  misc_feature (53)..(53): n comprises a, c, g, or t, or includes no nucleotide
acaccggaccgatccagcctccggactctagctaggccgcgggacggataacnatttcacacaggaaaacagctatgaccattaggcctatttaggtgacactatagaacaagtttgtacaaaaaagcaggctggtaccggtccggaattcccgggatgcagtggatggtcgtgcggaactgctccagcttcctgatcaagaggaacaagcagacgtacagcacggagcccaacaacctgaaagctcgcaactccttccgctacaacggtctgattcaccgcaagactgtgggcgtggagccggcggccgacggcaagggtgtggtggtggtcctgaagcggagatcaggccagcggaaacccgctacctcctatgtgcgaactaccatcaacaagaatgcccgggccaccctcagtagcatcaggcacatgatccgcaagaataagtaccgtccggatctgcgcatggctgccattcgcagagccagtgctatcctgcgcagtcagaagcctgtgatggtgaagaggaagcgggcccgccccaccaagagctcctgagcacttgcccctgtacccagagcaataaagatgttaaccatcaaaaaaaaaaa

SEQ ID NO: 7750 - DNA, 567 bp, Canis familiaris
cccaagtgttccagtttcactgagtgtttgtggctcagttcagtgaggtttcctcatactttgtgttaaatttacaaacatcatgggaggggtttccagaaggtacattgttccattaagggagctggagccacatctcatgttttgggcaccacaaagcttcaaaccacattgctgtacccctaccccccaacccctgtgttgctttcatgggactgttctttctaaacccgaggctgccacagtgtcacagctgtgggggcccatcgtcaccccccaaccccaccccacctcccctgacccctccagccccctataggcggcagtaggctgagcaccacaggatgtctgtgtcagccctcaccactgtcaggacacacttgggacgcttttcttgagtcgcacaaattgtgcctaacagtaatttctgacaggagtaggagacccgtgaggaagcggctgatagcatcacagaaatcttttctgggacaacaattaaatcatgtatttgtaattttttttaagtttacaaatgaattgtacaacaatgtaaaaataaagttcatc

SEQ ID NO: 7751 - DNA, 579 bp, Canis familiaris
taactgatcaaagatgggctgataatccggaagcctgtgactgtccattcccgagctcggtgccggaaaaacactctggcccgccggaagggcaggcatatgggcattggtaagagaaaaggtactgccaatgctcgaatgcctgagaaggtaacgtggatgaggaggatgagaattctacgcaggctgctcagaagataccgtgaatctaagaagattgaccgccacatgtatcatagcctgtacctgaaagtgaagggtaatgtggttccaagaagcaagcggattctaactggaacacatccacaagctgaaggcagacaaggctcgcaagaagcttctggctgaccaggctgaggcccgcagactctaagaccaacggaggcccgcaagcgccgtgaagaacggcttccaggcgcaagaaggacggaaatcagtcaagagctctgtcaaacggaggaagagaccaaggagagatacaactccctgtatcttgtgctgatacatagcggcctcagcatgaatcagatcaggttaatctcatatagaagaccaacctttatctgccaaaaaaaaaaa

SEQ ID NO: 7752 - DNA, 604 bp, Canis familiaris
cgcgctggcgggtcgggccggcctcctggagacgccaaccctctcatctacgaacgctccggggagcggccggtgaccgcgggcgaggaggacgatcaggttccagacagcatcgacgcgcgcgagatcttcgctgattcgctccatcaatgacccggagcatccactgacactggaagaattgaacgtagtagagcaagtccgggttcaggtgagcgaccccgagagcacggtggccgtcgccttcacacccaccattccacaactgcagcatggccacccttattggcctgtccatcaaagtcaaacttcttcgatcccttccccagcgtttcaagatggatgtgcacattacaccagggacccatgcctcggagcatgcagtgaataagcagcttgcggataaggaacgggtggcagccgccctagagaatacccacctgctggaggttgtgaaccagtgcctgtcagcccgctcctgagcctggctttttgcccccccccccccccccatcacacccagggcccatggccttgttttcttgaatcactgacaatgaggaactaacattttgcattttgtaataaactcttaatttatact

SEQ ID NO: 7753 - DNA, 598 bp, Canis familiaris
acaatgtttctgagcccagaaaatccgggaacttggatgtcctccgcaagaatcacatccaagggaaataacaggcttggaatcttcagatattatttatttattcgtcacacacacacgcacacacacacacgcacacacacacagaggcagaggcacaggcagagggagaagcaggcgtaccatgcagggagcccgacgtgggactcgatcccgggtctccaggatcacttctcggccaaaggagtttggaggcctactatagccaaactttggggtttgttttctccttctgtgaaaagaaatatcaaggaatattattgaggtattcctagaggaaaagtgaagttgagaaaagaaaacatcccctctaaaacattaagaaagaagcatctttgaatctgagcttgatattgaaagaagagatgaaaaacaccagctggattagaaagaactggcttcttgtagctggggtgtctttcataggtgtccatctctggaacatactttatacagagggctgcaaaagaatctgtaaaatctcaatctagaggcaaacaacagagtattggagaatgaagtaaaaaataaatatttg

SEQ ID NO: 7754 - DNA, 499 bp, Canis familiaris
aacggattgaatcccagggagggccaagtcagcagtagtctgcagtccataaagaagatcgctgacgaaactggacgggctgtacgagtgtatcctctgtgcttgctgcagcaccagctgccctagctactggtggaatggagacaaatacctggggcctgcggttctcatgcaggcctaccgctggatgatcgactccagagacgacttcactgaggagcgcctggccaagctgcaggacccgttctctctgtaccgctgccacaccatcatgaactgcacaaggacctgccccaaggggctgaatccaggcaaagctattgctgaaatcaagaaaatgatggccacctataaggggaagaaagcgtccgtgtgacgctgagcgtgaagtagccggctcggctggacacactttacatccaacttgagtcccttcagaggccttgattttccatgagcacagcatgtataataaacattttaagaaataaataaatgc

SEQ ID NO: 7755 - DNA, 586 bp, Canis familiaris
aggcataatctgtgtggagggcttcaaagagcactgtgaggaattctggcacacaattaggtatccccactggaagcacatttcctgtaagcacgctgaaagtgttgaaaccgaaggaaatggagaggatctgcgcctttttgattctttcgagagaactactccttgaggcccactggggactatggattaaggaatgactatcacatgaatctgggcccattcttagaatttctaaagaaacaccaaagtgagcatgttttccagatactttttggtattgaaagtaaaagttcagactcttaggaagctattaagaggccgatgcttcactaagtcagtatttctgtcaataagacccaaaccaaagggccagtggctaggtagcgtcatctgtgagacacctagctccagaatttttacctggtgatgaaacaccaaggcctttaaactttataacagtgcaattgtgatgttacctctctgttcttgtgttaactgaaaagtatttaattgtacactaataaaaagtccaatttaacccgtgggaaaaaaaaaaaaaaaaataaaaatatagaaaaataaa

SEQ ID NO: 7756 - DNA, 380 bp, Canis familiaris
tcttgttctcctcgggcttctgtctggggacgttccgcacggggcttggcgctgggcttcttgagcgagccccgcggctgcagggggggctccattcccccaggcaacacagcacccacagcaccaccacagcacccacagccgaggccatgccgcggagacttcgtccgagggcccaccaggcacagcccggcagcctcaccgcgggggccgcttccagcccgcggggccgggggcgcaggccggccctggagatgggcacgaccttgcgcatgctctcgctctccgaggccgtcagggtgcgcacggccttgggggccgccggctggctgcgccgggcagggctggccttgggggcgccctggggcgcttctctgacc

SEQ ID NO: 7757 - DNA, 602 bp, Canis familiaris
ggtgctggtccggcgccgaagggcgagtcgccgtctggagcgcctgggccacggcgcggccccgggagcagaggtggagccaccccatcacgctaaagatgaaaggctggggttgtctggccctgcttctgggggccctgctgggaactgcctgggcccggaggagccaggatctacactgtggagcttgcagggctctggtggatgaactagagtgggaaattgcccaggtggatcccaagaagaccattcagatgggctctttccgaatcaatccagatggcagccagtcagtggtggaggtaactgttactgctcccccaaataaagtagctcactctgactttgaatgagaagtcaactaatttagaaggaccttggtttaatagaagtgaagaaaacattgacccagagaggtatctaaaagattgggctgtctcgtttgtaagaggttagaggcttatactctatgtgcttgcttcctggctccaaaccttaatactttatttctgctgtagttagcaaaccctaatcaatccccttctccacatccttaattcatgtcactcagtttttactgtggcacaattcgtatatataca

SEQ ID NO: 7758 - DNA, 644 bp, Canis familiaris
gttggtgggaaagggaaccaacctttgattgggggtgttccgtgagcctgccttggccttgctggccaggccacaatgctcctggtgtgacccatgagctcgccagcttcctggacctgctgcccacgctggcgtctctgtaccggggccccgctgcccaacgtcaccttggatgttgttgatctcagccccttgctgctgggcaacaggtcaggagacctgccctcctccccaggctctccccacagtgacaccacaccggaccctgcctgccacgcctccagccctctgactgcccatgagcccccactgctctttgacttgtccgaggaccctggtgagaactacaacctcctgggaggaatggctgagtcgccccagaggcactgcaggcgctgaagcaacttcagctgctcaaggcccagtttgacgccaccgtgaccttcagccccagccagatggcccgaggcgaggatcctgccctgcagatctgctgtcagcctggctgtaccccccggccatcctgctgccactgccctgagccccaggcctgagagcactggcacgggccagccaggccctcgccccacacaggcatgtacactgagaacgctaataacaccagctggtactcaaaaaaatta

SEQ ID NO: 7759 - DNA, 605 bp, Canis familiaris
tgaggaaattcaagaaagaatgagaattttggaactctatgccagtgatcctgagtttgtagcttttgtgagagaacatcaaatggaagagctttaagccaaacttctattttgaaactgatcagaagcctagagaagatggagatcacttgctacctatgtcatataattaacctggattttgacctctgttggaagaaggattttctacttaaaaaactaaatttggggaccaaacttttttccagcttaaaatttcagaatgtagtaagggatgtgacagttttcatacctgcaaaaacccaacctgtatttaaagaaactgaaaactgtatgaatcctcagaagtattctacaagggaaagaaatggcttaggagttggggctgccttcactgtctgcttctgaacctctgaaggtgtgtctcagtgactgtgggccaggtttccccggaggaagataaggctagagactcttacaagagaaggcgggcttaggaagtgacgattttgtaggatgttcttgttaggtggaatgagaagcctttcaaatagttttcgtatagcttgttgtcagacatttaactaaataaaaaatattaagtt

SEQ ID NO: 7760 - DNA, 264 bp, Canis familiaris
aacccagtggcaaggctctagtatctgtgggcagcagcgaccctgagagcaaagacgcggggtctctgttctacgtctcggacgccaccgactgctcgctgaccctggactgctcggagccgggcgaggcgggcgcgggggatggctccctgtcctcgggggccggggagccgggcagccaggtctcctctcaccccacctccagccccgtcggggaggcctctgccccggggtccgaggagagcccccccgcccgcagggaca

SEQ ID NO: 7761 - DNA, 619 bp, Canis familiaris
tcggttttgcagatacatcaatgggcgtggatacggtttgactcacggggatttccaagtctccaccccattgacgtcaatgggagtttgttttggcacccaaatcaacgggactttccaaaatgtcgtaacaactccgccccattgacgcaaatgggcggtaggcgtgtacggtgggaggtctatataagcagagctcgtttagtgaaccgtcagatcgcctggagacgccatccacgctgttttgacctccatagaagacaccgggaccgatccagcctccggactctagcctaggccgcgggacggataacaatttcacacaggaaacagctatgaccattaggcctatttaggtgacactatagaacaagtttgtacaaaaaagcaggctggtaccggtccggaattcccgggatattgagtctccatattaaaatgaatctagtaggtattaagatatcctaaaataatagactacagaaaaaaatagatgtaaatattaaatcatttggcttatttgaaaagaaatgcttaaaattttcagtttaatctttctatactttcccaataaagaccacttcatgtacaaccaaaaaaaaaaaaaaaaaaaaaaaaa

SEQ ID NO: 7762 - DNA, 575 bp, Canis familiaris
acctccagggactccctgagctgtgaggtgcagccagtgagcagatggacctagcacttccccctccgagcctcaacaccctcatctcttagggtgcattagctacctcatggtggctcaaaacaggagaactgcagttcaactgctaggatttagcacgagagacttcatacctccccagcaacctttctgccacagcagcaggggccatggacggcatggagatggccagctgcagcctgagccagaaatgccaaacagaaggtttctagggctgtcagaggccttggctggctgaggtgaggacctgaggggaagaaggtacaccagaatggcaggtgtagagatgaacagtctaggagccttgcctgttccacttgtgagatgggtggaaatcctcacctgcctacccctctcaaatagacagcctggggtccccaaccaggtcacttcagtcaagtggcacggtgccgggagagtagtagcctcaaataaatttgcactaaaccagaaaaaaaaaaaaaaaaaaaaaaaaaaaaaaaaaaaaaaaaaaaaaaaaaaaaaaaaaaaaaaaa

SEQ ID NO: 7763 - DNA, 477 bp, Canis familiaris
ggagttcagtttgatgccctggttttcagccctcttgctaggcttccgtgtctggatttgcctgaagagtttggattgtacacagcatgttgggtagccctccctgtccttgtgtgttttttttgttccccctccctatccttcttattctaacccagagcatttcctacccattgtctacagtcccagaagtaaagtccattactgaggcaggcaaggagccgggcttttaagggcaagtggagggcctttgccacactgctgccaactatggggagtcccagataaaggcctgcgacagctggtatgagagctgtcacagacaacatggccacctctgggtctttatgcatgaagattatgtaaaggtttttattaaaaagtatatatatatatataaataaatgatctagattattttcctctttttctgaagctactttcttaaaaaaataaataaaatgtttatagcattcc

SEQ ID NO: 7764 - DNA, 610 bp, Canis familiaris
cgcggagcccgagtccccgcggcggccaacggcaggttcgtcccgcttcccgcctgaaggcgacggtggcccacagcacgtccgaccggtttcaggtagaaacaagagttgaaagatgtccagcaaacagcaagcaccaacaacatcgcccaggcacggagaacggtgcaacagctgagaatggaagcctccatcgagagaataaaggtttcaaaggcatcagcggacctcatgtcctactgtgaggagcacgccaggagcgaccctttgctgatagggataccgacctcagaaaaccctttcaaggataaaaaaacttgcatcatcctatagaggaacagtgaaagggctcctcgcctctcctcaacaaagcaaattatgagcagctccttggaagaaatttaccttcagcttatctggtaaccactgctaataactaaaatactctaacttggaataatcgactccgacgtctttatttttccaagttgccttttctttaaaacacctttttctgatttaatacggaataacggtcttcttttccactcgataactatggtgtcctcttgggttactgcttaagaaaagttggtttgggccatttcga

SEQ ID NO: 7765 - DNA, 571 bp, Canis familiaris
aatttggatgacttggagaataatggctgtgcctttgatagaatagagacataaagaggaagagaggccctagggaaaagaccgcgttggaaatggtgaggacttgctgtgatggtagtaggctagtgtccataagttatttttatttgtaatttatactctgagtattttagaaagtattacaacttcctggccaacaggaagttgaaaattggctttagcccttaaaaggtcagggctctgttcccacttcctggcacatcggtatcctgccttttacatcggtatccagtaaatatttgtgagatacgtggagaccatttgtatcaaaacaagtagaaattgaactagaggtccttgataaagtagtggaggagtacactagtgtttgttcatgtgaggttcttggaagtcagcattaggattaatagaagagcttgcttaaatgcagattattgggccatgccccagatatgatgaatcaaaaatcctcgggtgtaggcttcaggaatctgcattttaataagtacctccagtgatttttaagcatgtgcaagttaaaaggaatagt

SEQ ID NO: 7766 - DNA, 594 bp, Canis familiaris
ccttgctcgcaatctttaccgagatgagaaggacagcgttgactggcatagcgacgatgaaccttcgctggggagatgtcccgtcattgcttcactgagttttggtgccacacgtgcttttgagatgagaaggaagcccccaccagaagagaacggagactacacatatgtggaaagagtgaagatacccttggatcatgggaccttgttaatcatggaaggagccacacaagccgactggcagcaccgagtccccagagagtaccactctagagaaccgagaataaacctgacttttcggacggtttatccagaccccggaggcactggtggtgtgagaccttgagagagcagccgtgctgacaccgagcacacctcccgctgcgaagaaacctgcagaggctggtgcagctcatctctcggggtagctgtggggaagacggggtgggatttgcttcccagctcagagtcctgttcagagacggccagcggctcgcgtgcgtgctctcttcaccgctgggacgctgctccccgatcgcatcttgaaatcacatattttctttacacaaattaaaaactgctgtggccgtgctc

SEQ ID NO: 7767 - DNA, 621 bp, Canis familiaris
  misc_feature (68)..(68): n comprises a, c, g, or t, or includes no nucleotide
tctttcgtacgacgtccacacccagacccctcttctagacctcatgagcgacgccctgtcctcgccanaatgaaagggtttgacgtgttcaatgcactggatctcatggagaaccaaaccttcctggagaagctcaagtttggcataggggacggcaacctgcagtattacctgttacaattggaaatgccccagcatgggagcagagaaggttgggctggtgttacaataatcagttgccagtgagagtctggataaagccactgagaagtcacaccaggaaatggaaccccaccacttgttggtccaattttcacaaacgtgagaatcctggcaaagggaacagaactgaaccggctttaccaaaccgccgctgaacttgacaattgtattgcaatggcgtaggctgcgtgatgtcacctccggccgtgtgatgtcacctccggccgtgtctctggtctccctgttttccaattaatcacatccttctgcagccgtgatcaagggaatgtaactgctgaaaactagctcgtgattggcatattatggagttaacgggtgaataataaaagtatatatatatatatattatatatatataaatattttaaaaaaaaaaaa

SEQ ID NO: 7768 - DNA, 626 bp, Canis familiaris
gcctctgatcacccattgctcccacactgcctgcaccaaccagggctcccaggaccccttcctcttctcctaaatgacaaatcctggtttcccccacatcacgtctggggtttgctctgtgctctctcaccgtccccaagcagaggttgggaagagagaaaccaggtttttaacttgtggctgctcctgctgctgctgctgctgctccgtctccggccgaacaggaggagaacccagtccctgctcactacggaggtctccttctaggccactcaggacatttttagcttctgttctccccatattcccttttcctcagccctcccaactcccaggaaggactacccatgagagtggggttctgaggttcccctatggggacggttccgttcttgaagtgtcagtgttggggaatatctatggcccgtgaggcccatctcaggtttggggatcccccagtccctatgttcagtgttggggtaccccctgggagcctagtttctttgaggccccagcccctcttttagctaccattgaatgggtgttaaccctgtattaatggaaataaagttccatttcttccaaaaaaaaaaaaaaaaaaaaaaaaaaaaaaaaaaaaaaaaaaa

SEQ ID NO: 7769 - DNA, 355 bp, Canis familiaris
  misc_feature (59)..(60): n comprises a, c, g, or t, or includes no nucleotide
  misc_feature (90)..(91): n comprises a, c, g, or t, or includes no nucleotide
cagaggattggggaccactagggatagtccctttgttttcctgggcctaccaacccccnnagcttttctttgttcccccacgggtccccnncaaacctggccacgccacgcaagaggacaccaaatgaggaccaagtggcttttatacaaagtatctatatcagattcttctatattgtacagaacggggcatgcgcccccatctactgccttttctattgcccccccaacctcccagctatctaagatgttggggaaggtgaagaaccctccccttcatgccctcctaccaacaacaacaagtttgcttcttttcctctttgaaaaaaaaaaaaaaaaaaaaaaaaaaaaaaaa

SEQ ID NO: 7770 - DNA, 595 bp, Canis familiaris
  misc_feature (34)..(34): n comprises a, c, g, or t, or includes no nucleotide
gttggctgagtatttttagggcaaggaaaagcanctcagaggggaaacgaaggtagcagacagaccagccctgatatggacacgtggaccgtgggtatcagccctcggaggaaggcttatcatgggaaggacggttcttcagagatagcggtgtggcgtcaaacaggtagttttgcacataacacaccaaacggcccagtacaggactgtcgagagaccacggccgcctgaaggagcctgtgttggtactaatggaccttgaatttggggacactccttggaggtctccagcgcagtgggacggttttccagaagaggcgagtggcccgcccctcccagtctccgccctcagggagcagtcctccatcgtgctgaatctgtcttccaggagctgcccctgtggggcggggttgccgggccagcctttctcttcagccacatcttgtgtatgcaaggaagccaggaatacaggttttcttgatagatttgggttttaattttgtttttattgcgccggacaaaatacagttatctgatggttcttcaattatgttattttaataaaataaattaaatgtaaaaaaaaaaaaaaaaa

SEQ ID NO: 7771 - DNA, 479 bp, Canis familiaris
tctgagctgtcacctgccgaggccttggaccaccggagcctggcaggccctggtcagagccccataagctgcttgcgggaaggtgcctgtggtccaggccccgtgggtctgggagaagagagccagggtggaggcaggagctgagttccctgacgggagagcaggcgggctcccaagctgcttggccccctgcccccagcccgccaccctccccagcttctctctctctggacacctctctcctgcttccttgttttttatcaggctttccctgtgggggacggaggcccctgggcactagagtgcttcacccacggctcggtgccccctcgccccttccccctttttatacagatgtttttatatccatgtgcttgggtttgccgtgatgcagggctgagctgctgtggcatctttatttctctccttgggtctgtgtcccctcccctgtgcctgacaagccagttcattgttttctc

SEQ ID NO: 7772 - DNA, 573 bp, Canis familiaris
  misc_feature (1)..(1): n comprises a, c, g, or t, or includes no nucleotide
nataagatgaataaggctagtggaaaagttagctcacaaatataatcttcagggatataagattcattattggtggaccacaggtttggctctcaaagccaaagcaaaatgttcagttctcaaaatcacattatggcaggtctgtaacctgttaaacagagagtgcccatctatgttatgtgtctgtctagaaaaagacacttgactaattaagtccatggagcttgattctggggactggaaaaggtaagaaattgttggcttatagtatttcgaatttcctaatgagccaagaatctcctctttgcctagattgtatagaattagagagaattggacataaggaattaaaaaaaagaaagagggcagccctggtggctcagcagtttggcgcctgccttcagcccagggtgtgatcctggaaaccccgatagagtcccacatcgggctccctgcatggagcctgcttctccctctgcctgtgtttctgcctctctctctctgtctgtctgtctgtcataaataaataaataaataaataaataaataaataaataaaatcttaaaaaaaaa

SEQ ID NO: 7773 - DNA, 625 bp, Canis familiaris
gttccggggtgatcaaggctggcttttcaggagaccagattccccaatactgtttcccaactatgttgggcgccctaagcacatgcgagtgatggctggagacctggagggagaccttttcattggaccaaagcagcagctccccactggtgcagcactgcttcctgtgccatacctaggcatcccttaccttgtcacattcagtcttcctgtcttcctgggtagatgccttggtgtaggctgaggactgggcagtcttccatccccagcaaagggtctgccccaggatcagggcagaggatcatggattattgtagtttcccttcaaagcacttcattgacaccactcctcatttaccttagtatcttgggtaggaaagggttaatggtcttcattggttgccactcccagaagccactggatctggagtcagacctagagggagtatggggggcacgtttccttttcccacctgtcccacgaaggaggttttcattgactatggccaggacccccacttccctctcccagaaatgtacaataatttaacacagctgcctgaaaactttttttgtaaatcattatagtaataattatggacaaggcctaaaaaaaaaaaaaaaa

SEQ ID NO: 7774 - DNA, 637 bp, Canis familiaris
  misc_feature (486)..(486): n comprises a, c, g, or t, or includes no nucleotide
tactggcaggcgaatccccttcagggccgtaggctgaacccggcaattcagctcaaggctgtgaagtcctccacaggccccggggagcagctgcggaatgcactctggcacacaggggacacagcatcacaggtgcggctgctgtggaaggacccccgcaacgtgggttggaaggacaagacatcctaccgctggttcctgcagcatcggccccaagtgggctacatcagagtgcggttctacgagggtcctgagctggtggccgacagcaacgtggtcctggacacaaccatgcggggtggccgcctgggggtcttttgcttctcccaagagaacatcatttgggcccatattgcgccgtaccggtggcacatagagcacccacaaaccacgaaggagactaacgaagaacttcaagaagggctttcttggcaagggcccttaagggaattgggggggtttggggggaaccccattgctggaagnatggcaccatcgtggctacccgtttgttgctcactgcaacaaacagggagcttggcacccggctccaagaggtagctgccctagaggggctcagaaaggaccaaaataaagtgtgtgtggtagaaaaaaaaaaaaaaaaaaaaaaaaaaaa

SEQ ID NO: 7775 - DNA, 646 bp, Canis familiaris
ctgtcgttaggaggctgagagactggatggagtgccggagtcttctggtgcgcccgtgtcagggagacagccccgtgcgggagaggcacgactggtgaccatcgagggcctcccggcatggacgtactggagtagaggcctggagctcgcaggcgccgcgtgggaacacccggaagctcagggtgcagattttatgttattcaggagagacacagagacgcagacacaggcagagggagaggcgggctccatgcggggagcccgacgtgggactcgatcccgggactccaggatcacggcctgggccggaggcagacgcttaactgctgagccacccagggatcccagatgtgagggttctaagcaaagccctggctgttaatgacttttaaatactgtgccctggcctaaccccctgaactcaagaaaactcctaggaacttctgcccgtcaatcttactttttgaaaatgaactgaggaattgctgtaacaggaaaagaaacatttgaggataatgcctgcacagatgaatcagaaagtgcctcagcctcacaataatggtaaaatctcaccctgaatattcacgccaggcctaataaaaggggcctgcttctccttgttcaggcaaaaaaaaaaaaaaaaaaa

SEQ ID NO: 7776 - DNA, 136 bp, Canis familiaris
gtcttctgggagacggggaccattaaccacagaaaatccaagtctggccattaacttgccagaagtgacaaagataagtgatcagacctttgctcatgaccttggaataaaaaacgctgaacctcccccaccaaga

SEQ ID NO: 7777 - DNA, 684 bp, Canis familiaris
  misc_feature (38)..(38): n comprises a, c, g, or t, or includes no nucleotide
aagactgttacccgtctgggaaatcttttgtaagattntagtaatcactcttctgagagtgacattccggcaacacccgctgccttcatgtgcccatcagccttcccagtttgaaaaccagggtgcactgttgagccaggttctaaattgtatttaaacaacttcccaggctgagttatctatactctcttggagataaaggagagtttggggtttatttaataaaaagtggattcggattttttttttgtttaacccagagctcccccccgccaagtttgcaggctagatttccagctgggaaggaagttgcatggaaccagctaaatctagactagaaggctttagacttaggggcacgctcccagagcaactcagacaaacccatgttgagggtcttaattgtgacctctgtgtacctggctcacctgtttcttgaccttaatttcatttgatgggtatgaatttctccagtacccatgtggaaaatcagaacttccctacttctgtgcaacaggaaattgtatatcggggaagggccacaacaagggcaacttaagataaatagcttaagtcagaaaaagccttcagatgttttaggggacatgtcttaggctctgcctgaattttcaggcctattaaaggatatattatatacgaaaaaaaaaaaaaaaaaaaaaaaaa

SEQ ID NO: 7778 - DNA, 615 bp, Canis familiaris
caaactgacagagtctaattaattagcaatgttgtatcccacgttggcagtaaatccatggaatgtaccacagaagaaaaggacacttaaaatggaaaaaaagttttccaaaggtatataatttggacttgagttcaactcctgggtatatgttaccgacacccctctcccttccccagacttaacttgaaattctcacattcagctcttaagagttcttaatttataactgacttttaaatgagaaatttttctagtggttttggtttgggagtaatcattcattaaaaaatgcaatgtggtttatgcaaatgaaacagccttgcattactcttggcctcctccctgcgggtggtgtgcacagatcctggcagtatggtcaggtttggccctaggagtcctgtcaggacatggccatggcctcctgcatttcactactcgagttcagtaacagcgcagattccatgttcttgttccgatactctctgagaagtgcctgatgatgctgatgtaattacagacacaagaacaatctttgctattattgtataaagcccataaatgtacataaattatgtttaaaaaaaaaaaaaaaaaaaaaaaaaaaaaaaaaaa

SEQ ID NO: 7779 - DNA, 657 bp, Canis familiaris
aaaaagcaggctggtaccgtccggaattcccgggatggagaacagagttacatgtcctattgtgtttgcgatacagttacgctcctgtttcatgtacccgtggctccccaaaatatgccagagcttgtgggccggggggggccctgtttatccagctgtagtagctagtttcttcatttgtatacctggagcccactgatcccattttaggagtgttaatttttcagtattaattagaagaaggacctagttcactatggttggatgggatgggcagtggagaataagattaatactgctttgatattctccaagagaaagttctaacacttgcagtacagttttttcttcccttttctggaaaataaggaggaaatgcagcttctggtgtctcactttgagacaaagtctgctttgccagagagcaaattgaggtaaattcacacccctggaattgctttgagttcagagccttgagtgggagggattgagtgtatagagatccttattagctctgtagcttattctgtatcggttaacatttgtacaatatcggttagacagtgggagctcataatgtggacaataaaagacgaagtggtcactcctaaaaaaaaaaaaaaaaaaaaaaaaaaaaaaaaaaaaaaaaaaaaaaaa

SEQ ID NO: 7780 - DNA, 612 bp, Canis familiaris
  misc_feature (67)..(67): n comprises a, c, g, or t, or includes no nucleotide
cacagggacattgtggaggaaagcatgacagagaagaaatgcagtctgcactttttacgtacttttnaagtgtccgtaagtgaaggaatttgcttatgaagcatgggttttaatatctagtcattaaactgcacaagtgcaaatacaagggcaggaaaggataatcacttagctttggatgaagaggggaagagaggcagagaagcctttgtcgaagtgtcctgccgttactgagttacctggatagatagcaactggttcatggttagtagaaacattacttgcatgttcggttattttaaaacatgctaattccaaagccacttttacaatccaagagtggaaaatataaatggggtgacataaattattgatttctttaaaatgtttataaaccgtcccacatatgaaatgaaacatttacgttctctctttataaccagatggcaacttgttaaatcatgaaaacattcagaatccaagtgccacttaaactttgaagccatagataaatttaatggggaaataaaccaggataaaattttttaagaatatgatggaatccttctttactttcttaatttgtcttttgttcctaaaaaaaaaaaaaaa

SEQ ID NO: 7781 - DNA, 616 bp, Canis familiaris
tagtcatcgctattaccatggtgatgcggttttggcagtacaatcaatgggcgtggatagcggtttgactcacggggatttccaagtctccaccccattgacgtcaatgggagtttgttttggcaccaaaatcaacgggactttccaaaatgtcgtaacaactccgccccattgacgcaaatgggcggtaggcgtgtacggtgggaggtctatataagcagagctcgtttagtgaaccgtcagatcgcctggagacgccatccacgctgttttgacctccatagaagacaccgggaccgatccagcctccggactctagcctaggccgcgggacggataacaatttcacacaggaaacagctatgaccattaggcctatttaggtgacactatagaacaagtttgtacaaaaaagcaggctggtaccggtccggaattcccgggatcacccgctgcctgcagtcaggcgcccctgcccggtgtcctcagttgcccctcgcccgcggccccccccacagagctgctccttggggggggggtgctgtttgagagtctttgtgttgcacattaaaactcaacaatttagacctgcaaaaaaaaaaaaaaaaaaaaaaaa

SEQ ID NO: 7782 - DNA, 597 bp, Canis familiaris
accaagccttaatgactgtacctgtactgaagggctgtcctgtgcactttctgagatgctgtttcgtttatacgtgacctccaaggtgaacaggagccccatggccgggaccgtggaaggtacactctgctgtgctgcatctccgcgtccgtccatgtgctactctcagctcggagcatgaattggtggcgaaaaggtcaacagggaaggtagccatatacaggcagatgatgaagctaactgttagaactaatacccatggtgttgtcagtaaacttttattgcgcagtttacaatgtgtgaggaaccgtggattaataaaagatgcaggcttaactcttacccgttcatacctatgatctggttaaggagcaagacgcctaagaaaggcaaggaaaggggcgccagggtggctcaatcggtgaagctctgccttcggctcaggtcagatcccagggccctgggatggagcctccatcaggctccctgctcagcagggagtctgctcctctctctcccactacccctcccccctgctccttgtctctctctctctctctctttcaaacaaataaaatcttaaaaaaaaaaaaaaaa

SEQ ID NO: 7783 - DNA, 565 bp, Canis familiaris
agctttgtgctacgaatctcaagggaagtatgggatcctagtggaattaatcccttcattacaacggagaaatgcccagtacactttatatctccgctacagagatggagagctaaagcccacggagaggatcagagaaacccccaagcccgcctatgagctcaaccgggaagcctgtgatgacttcaagctttgcgaacgctacgccatggtttatggatacaatgctgcctacacatcgctatttccggcatctgccgaggagggccaatgagattgaaaaaagtttctttccttccagagcctggtgcctggttttgtaattccctttaccagtagcatcatcggactacattgacacatacaaattgcttatttctgtaaatgttcttgtctggctgttgccctccttcctgccccccagatcaataagcagtgaaaatgcaatgtggtgaaaggtccaaagagaattaagatgtgtgattattattacataataaactcttggatggatactttccaaaaaaaaaaaaaaaaaaaaaaaaaaaaaaaaaaaaaaaaaaaa

SEQ ID NO: 7784 - DNA, 608 bp, Canis familiaris
ccaatactcggcatgaacctgatgaatgaattaaaacagtacttcagccaaaagctggcatgacatgcagaccactaccgcctacaagaagacacatgaaaccctgagtcacgctgggcagaaggcgactgcagctttcagcaacgttgggacggccatcagcaagaagtttggagacatgagacgaaagtaggcggcgcgacccccggcggaggcagcttcgaagaggtgctcagctccaccgcacaggccagcgcgcagagctcggggggcgggccgcggcgggccgaggaggaggagctgcagtgctaggaccgccccctgcggcccagccccgccccctgcggtcctggccacgcccccgcctcctgcggcccggccccgccccctgtggtcctggccccgcctcctgcagccctggccccgcctcctgcagccctggccccgcctcctgcggccccggccccgcctcctgcagcctggccccgcctcctgcggccccggccccgcctcctgcggccccagccccgcccccaccccgggaaaacccaggccttgacctcgttcttccaatggcctctccgcggagtttaataaaagcatttcca

SEQ ID NO: 7785 - DNA, 449 bp, Canis familiaris
cgggagtcgcccagcggtcccgtcggagcatatgaggagctggtgagcatgaacgtggcaaggtgattagtgagccgtatcgatgccactggtttcagtcggatatcaacgtccctcaggctgaaggaagtatcgccgcctccagagcaaggtcactgccaaatagacccgctgacaatgaggagctgggcctcctccttggcccatcttccgagcacaggcgctaattgttgtgataatttgtaattgtgacttgttctccccgggctggcagcctggtgggggtgccaggccccagctttgttccctgctccccagtagcctgcccaagtggtcatcagtagcctgcccaagtggtcatcagaggagagggtggggttggcgtcggtggggagatgcaaaatgacaattaaaaaaaaagatacattaaaaaaaaaaaaaaaaaaaaa

SEQ ID NO: 7786 - DNA, 247 bp, Canis familiaris
gccaggtgtcggtgtcggtggcaacggacggcaggcctggaaaatgggtgtgggagcagccggggcgcgcgggccgggtgcggggggccctgcgggggcgtcaggacgtgcagggcggaggagacggccccggagctgccggcccgcgacggcctcgcttcggcggcggcggcggcggcggcggcggaggagcccaggatggagacagacccgcagggaggggaagagctggccgggcgggagggtg

SEQ ID NO: 7787 - DNA, 613 bp, Canis familiaris
aaggaaagatcgatttgcccctgtcccttttctttcgcggcctcggccctgccaagccccagctgggggcctctcagtgccatcgacgctgtccaagaatgtccaggggtgaaggagggggccccaaggcgcccggctcctcctgcctcctcacagccgtgggagccccagtgcctatcttagaaggaggctcaggaagggacacgctctgcccccgctgtccccggaccagcctcactctaggacgcagggctggcttctgtgtttctgtccgtcttcggccaagttctgtgttaatcacacacacacgtatatacgtaggagactttggcccgctctggcccttgggtccccatcgccctacctggtccggtccagatgccaagatgggggagttcaggtcgggctccggctcggggacgggtgtgtgttcttgttctgcccaacttgtttcttatagctctccctggggccgcggggaggaggggatctggatcttttttcagaactccgtttaatgtctgtctccatgctatggttgcatttctgttttctatgaatgagtctgcattcgcattaacagaaacaaccagacgcaaacaaaaaacaaaac

SEQ ID NO: 7788 - DNA, 625 bp, Canis familiaris
aagcaggctggtaccggtccggaattcccgggattgaagagcctgctccgtctcgtccattctggctgcttggccgtggcagctttgtgctacgaatctcatgaaagtatggaatcctatgaaattaatcccttcattaacaggagaaatgcccatacatgttatatctccgcaacagagatggagagctaaagcccaggagaggatcagagaaccaccaagcccgcctatgagctcaaccgggaagcctgtgatgacttcaagctttgcgaacgctacgccatggtttatggatacaatgctgcctaccatcgctatttccggcatcgccgaggaggccaatgagattgaaaaaagtctctttccttccagagcctggtgcctggttttgtattcctttacagtagcatcatcgaactacataaacacatacaaattgcttatttcttaaatgttcttgtctggctgttgccctccttcctgccccccagatcaataagcagtgaaagtgcaatgtggtgaaaggtcaaaagagaattaagatgtgtgattattattacataataaacttcttggatggataaaaaaaaaaaaaaaaaaaaaaaaaaaaaaaaaaaaaaaaaaa

SEQ ID NO: 7789 - DNA, 634 bp, Canis familiaris
  misc_feature (81)..(81): n comprises a, c, g, or t, or includes no nucleotide
tgctattcaggacattgtgtaccccgaggatcggatcagagcgaaattttattcagcctatggatctggtcagaaagcttntgatctgttcaatccgaacttcaagtctacctgtcaacagtttgtggagaaatacattgagctccagaaactcggagaaacagatgaagagaagttatttgtggaaacagggaaggctttattggcagaaggtgtcattttgagacgagtaggagaagcaaggactcacaaggaaggtagtcacgtttcctggaaatctgaacccaaggatgccgaaccccaaacagtattggaaaaaaggcagcctctgcaagaagttccacaggaccagaattcggaggcttctgaagaacagtcgaaaggtctctcacctccctgaagaacttgtataccgtgtatactgacatccaaactgtgttcactagatgaatgttgaactgtttttaacagttgaactgtgtaaatgtttcacagtctcttaggcattatgtttgtcttcttttagttcctatttctaggttgtcataaatctcagtttcacagtttaaatgaacttttatgttgggacggtattaaataaagaattccctgactgctaaaaaaaaaaaaaaaa

SEQ ID NO: 7790 - DNA, 432 bp, Canis familiaris
tcaggcattacccgttttcctgggatggggtctgccccccattcaagactccttcttgggcccttgcttgctaggccagcaggagagaccccaagctctgtgggccctaaccgtccacccccacctgcccgaagccctctggcagaggactgggaggtacctggagccccagaagatatttctactcagcctggggattaaggtttgaggctttgttcctttagagacttcctcccagcaggcaggctcccactgctcccccaagctcctgagctgaggagaagcaagctggagccagggtgtaggctttagactgggatccctggaggacctgcagcctgagatcctgaggcccaaggggcagcgggggcagtgtcagaggacagctcttgtctccacccctaataaacaatctatagacccaaaaaaaaa

SEQ ID NO: 7791 - DNA, 631 bp, Canis familiaris
gcctacctcttcaactctgtggtgaacgtgggctgcgggccagccgaggagcgggtgctgctgacaggcctccatgctgttgctgacatccactgcgagaactgcaagacaactttgggctggaaatatgaacaggccttcgagagcagccagaagtacaaagaggggaagtacatcattgaactcaaccacatgatcaaagacaacggctgggactgacccctgctcctgccgcatgtggctcgagcctggcctggccgccagagggcgccactggcttccctccacaagaagggagccctggaccctcagggcccccgcagaggaaggatccagctcctgtacatatattttattgcatgcactgtgaccttggggggagatcagaaggtggacgacacccccgcaactccctgcgatctggctggcttggatctcgtttttaaccccttcctgccccgcctgccctatagatatggcctgtgtgctgctcccccggccccagtgcaccgtctgccctgtgaactccccccaccgggcccctcttaccccacgcgtgtctgctcccctcgttctgtagcgtttgtacataataaaacaatgaagtggagacaaaaaaaaaaaaaaaaaa

SEQ ID NO: 7792 - DNA, 613 bp, Canis familiaris
gtgctggttcatggagcccgggccgtcctgcagctatacccggagaactccgagcagttggagctaattacgatccaggccaccaaggctggcttcactggtggcgtggttgtggacttccccaatagcgccaaggcaaagaagttctacctctgcttgttttctgggccttcgacctttatgccaaagcccctgaatgacagtaacgagagtaatgaggaagaggaggtccaggagtccgtgttcacaagagagaggatcccatacaggatcgcatgccgcggggtagtaaggaagagccgtgagtgggtgctggagaagaaggaacgccggaggcggcagggcaaggaagtcagacctgacacccagtacaccggccgcaagcgcaagccccgcttctaggtggtttgcttaggctgcacgcggttattacaggcaagaagttttctctgttgaagtgcctacatccgtcagctgacaaaaatattgttttagaaaagttttcatgttctaacagtttctcttcacttaacaaaagttttaatagcatcttattttgttctaaaagcaataaaccacttcctgtggaaaaaaaaaaaaaaaaaaaaaaaaa

SEQ ID NO: 7793 - DNA, 682 bp, Canis familiaris
aggctgtgagattgtgttggatgattctgcccgaaaaggtacttcttggaaaagtacaagtatgttggagaatctttggtctgattgacggtcgcgctcaccatctggtaccatctcctgtttctttgccatagtggcattgatttgggattatatgcatccctttccagaatctaagcctgttttggctttgtgtgtcatatcctattttgtgatgatggggatcctgaccatttatacctcagtataaggagaagagcatctttcttgtggcccacaggaaagatcctacaggaatggatcctgatgatatttggcagctgtcctctagtctcaaaaggtttgatgacaaatacactctgaagttgaccttcatcagtggaagaacaaagcagcagcgagaggccgagttcaccaagtccattgctaagttttttgaccacagcgggacactggtcatggatgcatacgagcctgaaaacttcttgtgtatgacagctttccttcacacaccatttttgtgggtgtgtatatatctgacttggggagaattggaaaaaaacacagctttttaatttgtttaaaacagaccttctgcctgttacattttgtgctcttaacccaattaaagaagccagtggcatttttaattttaaaaaaaaaaaaaaaaaaaaaaaaaaaa

SEQ ID NO: 7794 - DNA, 589 bp, Canis familiaris
gaggaagaggaggacttggagttagaagaggaacactggacggacatgctggagacctgaccctgactcacctcagcagccccagccctctgcccactccgtctgtgccatccaccccccgcaggggtctaggcaatttttacttgattaccataaagagtctgagttaagggaactttgtggttttgggggggctggtgctaggaggcagaggccctgcgggtcactggggcctgaggaaaagaggagaattgggaggggtcactcgccagcatggaccagcctctcttcttcctagaggtctgtacacctcagctttccccagcatgcttgtgatggcacagagtcctttgagtacttgggagacttagagcccatctaaaatcagtgcccagggcagcctgggtggctcggcggtttagtgctgcctttggccggggcatggtcccggggacccgggatcgagtcccatgtcaggctccctgcatggagcctgcttctccctctgcctgtgtctctgcgcctctctctctctgtgtgtgtgtgtctcatgaataaataaaatctttaagaaaaaaaaaaaaaaaaa

SEQ ID NO: 7795 - DNA, 630 bp, Canis familiaris
ggaacaaattcaaacaggtctgaaatttcaaggctggaaataaagatagtaaaaaaggccaacttggtttcttctccattgtgcatacttgggggagtctacttaatcccctattccagtttatttcctcgttaagttaccacctgactattctaaggagcatttaatctatgatacatcacgatagtatctgaagcactgtttataggatgctggggttgggggtacacaaagagggaagcaagaaccttggttaaaagggaacctttatgatttcccagtcaggtttctatttctaatcctagatgaaaacagtcaacaaatatcaattgtgcaatgctgtgttatgtacaaccagtccctctggcagaaacaaagaaacgattgtaaacactgtcattcttgggaggtttttaccatcagtttaatgaacatgatttaatttcaatcattaagaaaatgatacttttttaggggcaccttggtggctcagtcggttaagcatccaactcttcgttttggctcaggtcatgatctcaggatcgtgagattgagccccatgttactctccaccctgggcatggagcctacttaagattctttctctcaaaaaaaaaaaaaaaaaaaaaa

SEQ ID NO: 7796 - DNA, 620 bp, Canis familiaris
gcagggttctggcttctatgtgaccacccacccacaggagctgacactgcagatgaacctgttgggactcatcaggaagctgcaacagaggggctgccaggcgggcaagacagccttgtgatcagctggggtctctgccagttacccgctgcccgtcacacctgagagacacctctgtctctctgtcaccgcaagcagcaggaagctgagtggaacttgtcctcctgacacctggccaccaccttcccagctgcctgcaggagaggtcgaccctctgcggagaggccaagtggaccctggcggtcagtacctgccacccacctttgtctgaagctaggatggtggtaaagggaagagcgggtctgctctgctggctgtccgcctcagacctcaggggacagtggagttggaggtcctagcaccttctcactccactgggcacatcctcacctctgccatgccccagatttcatgcttgttctggtgtcagcccctcccttggcaggtgcagccccctaaataagtgggagacagtccaaggcccaaggcctgtgtggcccagagaaataaaggtacctcagtgtagcctgcaaaaaaaaaaaaaaaaaaaaaaaaaaaaa

SEQ ID NO: 7797 - DNA, 612 bp, Canis familiaris
ctcactcttcctatttggagaaactcactcaaagatgctgtgaattgttcagcttcaacacagctcgtctggagcacaaggaaaaactcttgaccactgacgctctccagcaatgggcagggctgctccaggggccgtgttaccctgactttgagtgtcccaaggagcagggccatacactggcagggaagttacagagaggagctctgaattgcaccttttctggacagggtccccagggtccttcagcccttaaaacccttgatcctaggaaacgtgtggtgcatttagcagaataacacgggcagtgcctgcagagggagaagcaggcttccaggagggaccgcgacgagggactccatcccgggactccaggttcacgccttgggccaaaggtaggcgctaaactgctgagccacccaggctgccccctaagtcagtttcttatttagaatcagctctgcattcatcctcactgtttggcctaaaaaggtgtaaatatacttatttttggttttaattgcatgaattatgtgcccagaaaaaaaaaatgtgtttttttcttaaatttttccaaataaacgtttttctcaatgtttgtcacaaaaaaaa

SEQ ID NO: 7798 - DNA, 664 bp, Canis familiaris
agattataaaactagaatctttctatgttcagaagttcttggatattgcttcaacgtgtaaacaagggagccatagtctggcaagaagtttttgatgatcatgtgaagcttcagccaggcacgattgttcaagtatggaaatttcaatcgtatagtgaggacaagctcaagtcacagccgctggcttccctgtcatcctttctgctccttggtacttagattggattagttatggacaagactggaaaggttactataaagtggaccctcttgattttagtggttctccagaacagaaaaaacttgtcatgggtggagaagcttgtctgtggggagaatatgtggatgcaactaacctcactccaagattatggccccgggcaagtgctattggtgagagactgtggagtcacagcgacgtcaaagacctagaggatgcctacaacagactgacagttcaccgctgcagaatggtcagccggggaatagctgcagaacctctttatactggatattgtaaccactgaatacaaaacaaaaaaatgagcctaaacaaagaagaaaacgctacaatcaacttgattatgaaatcatggaaattaaaatttcgtatagttttcaaataaaatatctttttaaagattgaaaaaaaaaaaaaaaaaaa

SEQ ID NO: 7799 - DNA, 626 bp, Canis familiaris
tccatctcagcatctgattattggttgtggaccattcctaaaagaggagttgctgcgtcaagatagataattttgcttttaaggcctttgggtacatactgccaacttgtgccctagaaacgtggcgctgacttaactcccagtgaatcattctcactgcacttaatcgcatctgtagatgtgaaaaacagtctagatggtaggatatgcgaatgttcagctagtagatattgccaaatcgttttctcagtaatgtttcctatagcaagattttggacatcttttgttagatattattcctgattttttttttaatgtcgaaaatgtttttattgtctcattttctaattatttattgccaatagatagaaatacgattgtgttttgtatcctgatattatatccaacaggtgtttgttctatatgcacttaataattctgggatgcctgtgtggctcaggggttgagcatcatctgcctttggctcggggcgtgatcccagggtctggggattgagtccccgcgttgtgctccctgcaaggagtctgcttctccctctgcctgtgtctctcatgaataaataaataaaatcttttttaaaaattcaaaaaaaaaaaaaaaaaaaa

SEQ ID NO: 7800 - DNA, 685 bp, Canis familiaris
attcccggatggcaagctcccagagttgttacagcgggtatccctattcagaaaggagcccatgaaatgggtttttcagagaccgaaagttttcagttttgataaagtccccatttgtcaacttttgtccgtcatggattatgcttttggtgtcaagtctaagaattctttgcctacctctaggtaaaggagatagcagtggtggagagaatggaaggagaatttgagacagatgattgaacagagcctgtagaagagtcaaagctgagagatgctgagagaaaataggcatatgaagaaatatgagggaaattcttgccaaatatgtcaatatgttaccctgtcacatcatgcatagatgaggtaatgtaactgagaccaggaaaagtcaccccacaagacaaccctgagacagagaagtccccagagcctgttagtcaagacctaacatggtggtcttagcactccacctgtgaagagtggggtatggaatgctctggcatgtggaacactatggagtttactaaatgacaaattcccagaattctactactatactttcaatgtctagcaattccaatctgtgccatcacttcctctagtctgttcaaagctcactttaaaccctgcctcctctaaaaatttgtattaaacatgaagttaatgcaaaaaaaaaaaaaaaaaa

SEQ ID NO: 7801 - DNA, 463 bp, Canis familiaris
  misc_feature (1)..(1): n comprises a, c, g, or t, or includes no nucleotide
ncagataattacagattcctatgctgttaaaattgtacctgttcacgtgatctttgagtgaagctgagcagtttctcatgtgtttaagaacacatttctatattttcatcgtcttttcaactctttcctcattgtatattggctgttagtctttttattgttttgggggagctttttatgtgttagagatcccttttctagatatgagtttcagattactttgatcagtttgcctctcactgttacttgtggttatgttttatcatctgtcatttttaaaaatgggttaagagtctctgtgagggatccctgggtggcgcagcggtttggcgcctgcctttggcccagggcgcgatcctggagacctgggatcgaatcccacgtcgggctcccggtgcatggagcctgcttctccctctgcctgtgtctctctgcctctctctctctctgtgactatcatgaa

SEQ ID NO: 7802 - DNA, 501 bp, Canis familiaris
tctgcctcgcttctgtcccctgggaagtgccttccgtggctctggtccagccactagcctctggcatctcagtgagaacatagcgtcacatagccaggaccctgagggggtacatgtgaagtgcttccagtgacttggccaatccctttcagagctctttgaaccccggatgttcaaacagccccagagctacttgggtgcccactgcctctcacaggagtccctggggccatgagggtgcatccaggacggagggcagctactctagggctggggacagatgccgcttgtcccgccctggtccccagctgggtgctgagtggctggcatccctgcctgctgcgactcctgaagggcctgtctgtctttggcctcacctgtcctcaagagccttggttttcccacgtttggacaagagccccaggggactgtgctggcacagggctggcttctgaccatgcttggcagagaaataaacactgtcgctctgccgtgctaaaa

SEQ ID NO: 7803 - DNA, 445 bp, Canis familiaris
atgcttgttcataaggttaactcctttcctaccactcccgtgataacacttattccattgtgtggatcaggctacagtagtctgatttaggcagaatagaaagtaattggaagacggctggaaacccaaactcaaaagagcgaaggaacacagtcaaggtcttgtcctgtcgccagtagaatctgggtttgatgctgctgctgttggactgtaaggctgattccctttgcagtcacccctgctcatgctttgaacaatctctgacctctgggtctttatgtcactcatcccaaatctagaatctgaaatgggacatgatgagcttagcctaggacatatgactgccaaaggccagcagaggaaatgtctgtttttgaattgtgaggtagggtctcacctgccatgaagactcaaatagtggatgattgtctttaaaaaaaaaaaa

SEQ ID NO: 7804 - DNA, 640 bp, Canis familiaris
agacaactatgttcaaattggtctatctttgttcaaatttcttgcccacctaatgtggaaatccttccttggacatcacactacatgtaaggctggtaaggatgactcacacaagcttatggttttcattacccaaatttttagattctgaatgtagatggagtctcgtttaagagtcaccaaaggtgcctgcccccctttcctgctaagaagagtccctttgagactgtcccaagagtgtcagagaactcagtgggcaggggttctggtctgcttgccatctaggtgtgggatgtgagggacacttaatgattatgttgaatcttaggcgtcttatctcctctttgagggaatggaacacaaaggtagtcacctatcacttaaatttaccaatcccaaagaattaactaccaaccaaggtccaaggctcaagaatttccaaaatgttttttcatatcactttcgggtagtaaaatgatttacatttttttcttaattggcagcaccaattgccattccttacactctttgatttgtttttgttttgttttgtttttactgagctcttgcatgatttatcttgtgttaccatcctaaataaacattttattaaatgtaaaaaaaaaaaaaaaaaaaataa

SEQ ID NO: 7805 - DNA, 434 bp, Canis familiaris
cattggtatataattcacttttcttgaaagaactctagaatattatctagtaactatgtaaaaagggtactaaatattttatgatgtaaataccaggtagcaaaaatgtagttataaaaaaattggtaagagaaatgattattaataaagataattggcatctttataaatttaatatcctttctagaattttaaatattaaaattacccttttaaaaagctacattttggggcacctaggtggttcagtcagttaagtatctgattcttggttttggctcaggttgtggtctagggttgtgagttcaagctgcgagtcaggctctctgctcagtggggggaggggagggtgtcttcttgtctctctctgcccctccccctcaaacacaagttttaaaaataaatcagtcttcctaaaaaaaaaaaaaaaaaaa

SEQ ID NO: 7806 - DNA, 600 bp, Canis familiaris
acagcccaggggcaccactgagtcattctgggaaaagcatgacatcactgagtctcactgtctgctgcctacctgccagtctgccctctgtggttctctggtgacctcatgcctgaagtcctgtaagggaccctcacaccctgggtagcagagccaggtcagctttccggcttccggtcctggcttctccccagctgctgtttcctaccttcccaatgtttccttccctgcctggggtccgcaccacacccctggctcataagctcagctgtgacagaagcttctggaagtggtgatgggcatgaagaacttccagaagtatatccttgccaggtgtctgattggaaccctgggaattgcagtgttggaatcacttttaaaagtaaagcctgaggggggtgcctgggaggctcaatcgtttagcatctgccttcagctcaggtcacgatcccagagtcctgggatcaagccccacatcgggctccctgctcagctgggagcctgcttctcctccctctgcctgccgtgtgctcgctctctctcttgctcaatctctctgtgaaataaataaataaaatcttaaaaaaaaaaaaaaaaaag

SEQ ID NO: 7807 - DNA, 532 bp, Canis familiaris
gcggagaaggacgagtttgagctacaagaggaaggagtctggatgcaggtgtgtaaccccatcatcaccggactgtaccagggagcgggtggtcctggggctggtggctttggggctcaggctcccaaagggggctctgggtctggccccaccatcgaggaggtggattaggacttcttccccagattgttcctgtttgtgtcagaaacggttaggattaaggattctaacattgccttagaaagtctgtgtgttcatcagtctgcaactgctgcaagttgtttgcaaagtgttcaactgtcttttggtggaagttgatgaagttcctctttttttttttagagtcccaattgtaggaagaatttatactgccatatttttttttcttttttgtagtattgacgttgaacctgggcctttgttataactgatttttgcagagtaaataaactccaatcatttgtcttgcccaaaaaaaaaaaaaaaaaaaaaaaaaaaaaaaaaaaaaaaaaaaaaaaaaaaaaaaaaaaaa

SEQ ID NO: 7808 - DNA, 637 bp, Canis familiaris
tttgcttgagttaatgttcctgtgctcctgtgttataaggatctgtggttgttgttgttttagcccaagatcatcactgttcattgtacagtcaatcatataagactaaaaggcaattttgtttaatcatgaagagtatatcagtattagtctagtttattcttcacttctcatgtgtttctcactgatcattattttttttagtgcaggagaccaaaatatctgttaccttaattttgcatggggatttctgtaactcattgaagtttccttttaaataagaaaacctatataatctcatgtatgagcttaaagaagtagatttttagaaattatgtatggcataattctaaaataagaatttctgtatgtttccatatgctcttttcttatgtctcttattatattttattttctcttgtgctttatcattattgaaatatgtcagatgtccatttgttgcttgtactatgctgagaatgtacaaataaagttgaacagatacatgtctcatcctttaggaattttgcagttcagtacgaatgcagagacaaatataaagatgaggacagacatctacagatatcacatacataaataaaatattctgtatcaaaaaaaaaaaaaaaaaaaaaaa

SEQ ID NO: 7809 - DNA, 602 bp, Canis familiaris
gaggaccaggcgctgagcctctgagacatgtgactctgtccattgaagacaggacaggtatttttttttactttgttaccctcttacataccccaaaaggaaacagttcagattactgcacacatgcgttaaaagttttacttacactaaacaaggagttgttccaaataccatttttgcacagtgttaggaattgtaaagtccacacgagatactacttgcacaaaaagaaatgaaatattttttaacggggcagggggcagatcttacaaaactaaaataaaattcagactctacttctgttgtctgttatgttattgagctaatgatttattgggaaaaatacatttttatactcttttatcatggtactgtaactgtatccatattataaatataattaccttaaggatttttattattatttttttatgtccaagtgcccacgtgaatctgctggtaaaatttagcactcgtgtgtaaatggtatttcctctgtctgttctaccaagtatttatactctggtgcaactaactactgtgtgagggattggtccatgtgcaataaataccaatgaagcacaaaaaaaaaaaaaaaaaaa

SEQ ID NO: 7810 - DNA, 633 bp, Canis familiaris
cagccccttcctccaaagagtcagttgaaagacaagagagtcacactctcacgttttgcacaaggcaactcatggtcaggaagggtttaggggacggtcacttcgtattttccaagagtcaggccttctctgctgataccttgattcctttgggaagacaagagtttttcttaataacacaagtccctttatgagttattctttcagttctcagtggagtacagccaagatgtaggtgtttatgaacatgctctagagaagtaagcagatagaactggtttgtgggacaggagcggcttgctcaggaagagggaatggtgcaagtcttttattggaaggcttttattatggccgtgatagtgacattgccctcaccatgatccttctccaatgtggtcgtctttctttaccttgtgtcttctcttgtaaaaaatgaaactcaaaataaatgtgtcaaatttaaaaaaaaactggaaaagcaaacgaattgtgtgaaactgcataatgctgtaatgctaacctacaatatgtaatgctatcttgtatgtggagtttgttaatgtaccacacaagtgcaaaataaagactgactcacattaaacaaaaaaaaaaaaaaaaaaaaaaaaaaaaaaa

SEQ ID NO: 7811 - DNA, 614 bp, Canis familiaris
tctgcttttgagtaggaatttgcaatttgccatgtttattttttctgagcctcggtttatcccccttagaggttgtagagtgaaggatacctctgacatcatagccccagtcaaataggatattcctggccagaagtctagagatacttttatttttttaaataaaaagattgaatgtgagccaaatactcagcctgccctgccatagggcagagctgagctggaaatacagacaaggtggaacatgctggggagggatgagttttaagggctatgctagacttcctggaggagggagcagtgatggttctaatcgtaaagataggctacaagcctgaatccttttagcagctaatttttttcttactagaaaattaatatgtatattcattataaaagaaaaaatacaaaagaaatatcatcatccaaactcctacacctgggtggctcagcggttgagcatctatttgcctttgacttaggatgtgatcccagggttccaggatcgagtcccgcatcgggcttcctgcatggaacctgcttctccctctgcctatgtctctgcctctctctctgtgtctctcatgaataaataagatcttaaaaaaaaaaaa

SEQ ID NO: 7812 - DNA, 592 bp, Canis familiaris
gaacacaatgcagtgaggtataatgtacgaaatgttaaatggcttctagaccgtttcagttgactacttgtggtacttaggcagtggcaaagccacgctgagttacaggtgccagcccttctgactcctaagtaatttgccttacatactagcctttccactgctgaggttcaaattagtgcctcagaaaatatttgtcatgttttattttttagcatagattgggaacagttgaaaactcttaaatcctcagctgccagggtcttctatagtatcagtatgtgtttagcagaaactaactccataatgaatggaattcaattccacacatggtttgttcaagcacacttaataagtagcctattttttaaatgtcttttttaaatgtaaatatttggatgaagtttttaaagtttgttttgatatattcatttgctataccaaccatggtttcagaattcaccttttgagcaaattggtttcagaatctgtaaaatgaaccaagaatcttgtgtatcaaacctgtcacgcagacatgtgagaataatgtgttcataaagcatggatcttgcaaaaaaaaaaaaaaaaaaaa

SEQ ID NO: 7813 - DNA, 639 bp, Canis familiaris
gggccccagctgtaaacctgggaagactatgaagagccacaaggagaggcccattaactttagctatcctggtggcataaatgactcctcggatgtgaagcatggtgatgaggtggctggatgctctggaatctggaagactgtgaagtcagtcatctctccatgctgtagaagcatctatgtttgacctttcctctcctgcttgggtgtttccagctgtctcctccgcaaccaccggctgatggctgggtccaggtgggtggctggaatacatacagccataagcccacttcttcctatttaaattgtataatctagcttttgtataatctagcttttgacttctccaccaaagtacctatttttcctgtagcagagaccgccaggagccaactggcagaattttctttttaattataggcagggatcagagtttgaaataaaataaaacactgtcagggttttggacacactgtggtgggttatgtcttctccccagcttaggctagaagtagaccagccttcagagaggatgggctgaactgtgaattaatgtggcttcccaataaatccagacttaggaaaaaaaaaaaaaaaaaaaaaaaaaaaaaaaaaaaaaaaaaaaaaaaaaaaaaaaaa

SEQ ID NO: 7814 - DNA, 378 bp, Canis familiaris
tagtactacaattgtacttccttttgtattctttacctaaaggatactaataatactgattcaaagggatacatgcaccctgaggtttatagcagcattatacaataaccggactttggagagagcacaaatgtccatcaactgatgaatggataaagaagatgtggaatgtacatcgcaaactggatggaatattactcagtcatcaaaaagaatgaaatcctgacatctgcaatgacatggatggagctagagtgtattatgctaagcaaaataagtcagtcagagaaagacaattaccatatgatctcacttttatgtggaatattaaaatggaagcagatgaatatatggaaagggagaaaggaaaaataaaaa

SEQ ID NO: 7815 - DNA, 496 bp, Canis familiaris
tgctgttcttttccttaggcacagagatctataactagcctagattttcatcctgttctactgcttgattggccacctgccctatcctatagagtttacttacttgaagaactaagaatataatttactgctcatcccatacccgtcacctttcgtcatcaaagaatagcagagagtaggtaatggctcttagatcagcatcctcttcaatgattgattgtctcctggccggaatgttgcctctgcctggttggacctcttcgttcagtactgttgtgcggtctcgcatttcacatcatgagtgggcaatgcagggcagaaccaggaaagcagatatctgggctttggttttaacctttgtgtgctgccagctggactcaggcttcaccttttggaaagataaccaccatctgctccaatcatgtagacttcttgcagcctggtttctctgaaaataaacttactgtagatcccaaaaaaaaaaaaaaaaaaaaaa

SEQ ID NO: 7816 - DNA, 627 bp, Canis familiaris
cttcttgtcttctgtgtaaatcattgattgttgggaaaagctggcccaaactgcccaaattttaacgggtttctcgtcattttgaaatctgatagacatttcgtactttgcagtatctgtaggtatcccattaaagttgcctctagcttctaattggtatctctggatttaaaaagtccacacacatcagaggggcgggtaagactttggttctcgtatctctagcaagcatctgccataatctgccataaattgaaccacctgagaatgttatatttggtaacttaacacattgaactactctaggttttgggtttttttgttttgttttgttttgttttgttttgttttttaactaccctagtttgtttaatcttacagtcacttgcttcggaggaagtcgtaaataaaaccttccccccctgcttgaaagaataagatgattcctattttggtactgaaagtgtatagttttccttaaacgtgtttaagatcattggtagatcgttgtgatcattctatcacatctgcatgatcccaaacaactagttgcaatccggagaaaagcctggtaacaatgaaccagttgactttttttacttaagaccacttagaaaaataaaaaaa

SEQ ID NO: 7817 - DNA, 555 bp, Canis familiaris
taactccatgggttggcacggggctcccacaggatcagaggctgaagccaactgggatcattggcagcttcatgctcattactaccctccactcttgcgctctgccaccgtccggaaattcatggttggctatgaaatgcttgcccaggctcagagggacctcacccccgagcaggctgcagagagactaaggatgcttcctgaggttcattaccgcctggggcagcagaaggatagggagacagcaaccatcgcctgaccacgctgaccacagggccttctgcttgagggaaccagggccgagggttgggaagatgtgggatcaataaaactaaattgtgtttctcaaacttattctaatgacagaggagtatgaactataatccttggggatctgggttaaaggctgatggcatagcaccagccacaactcttctttgcctgcaaatatacaaaacttaagagtacaaaaattccaccccaaatctctgaataaaatgaatactcaatttaaaaaaaaaaaaaaaaaaaaaaaaaaaaaaaaaaaaaaaaaaa

SEQ ID NO: 7818 - DNA, 606 bp, Canis familiaris
gaagtgctgcccgtgggcgtcatcgcaggggccaccattggcgcgggcgtcctgctcaccttcttcttcatcgccctggtgttttttctctaccgccgccgcaaagcagccgcaaggacgtgaccctgcggaagctggacatcaaggtggagaccgtgaaccgcgagccgctcacgatgcattccgaccgggaggatgacactgccagcgtgtccactgccactcgggtcatgaaggccatctactcgtccttcaaggatgacgtggacctgaagcaggacctgcgctgcgacgccatggacacgcgggaggagtacgagatgaaggaccccaccaacggctactacaacgtgcgcgcccacgaggaccggcctgcgtcccgggccgtgctctacgccgactaccgcgccccggggcccgcgcgcttcgacggccgccccgcctcccgcctgtcgcactcgagcggctacgcgcagctcagctcctacagccgcgcccccgcgtccgacttcgggccggagccccccgccgccgggccccctaacgccgcgggcgccgacggggcgggcgcgctgtcctacgagaactacgacaagttcggcccgc

SEQ ID NO: 7819 - DNA, 481 bp, Canis familiaris
cggctacctcacaatccaaggaaggcagcaggcggagcaaattacccaactcctcccgacccggtggaggtagtgacggaaaataacaatacaggactctttcgaggccctgtaattggaatgagtccactttaaatcctttaacgaggatccattggagggcaagtctggtgtccagcagccgcggtaattccagctccaatagcgtatattaaagttgctgcagttaaaaagctcgtagttggatcttgggagcgggcgggcggtccgccgcgaggcgagccaccgcccgtccccgccccttgcctctcggcgccccctcgatgctcttagctgagtgtcccgcggggcccgaagcgtttactttgaaaaaattagagtgttcaaagcaggcccgagccgcctggataccgcagctaggaataatggaataggaccgcggttctattttgttggttttcggaactgaggccatgattaa

SEQ ID NO: 7820 - DNA, 615 bp, Canis familiaris
tcaaggtgtatcagttggcatgttattcagacagtagcggaatgcgtgaaccttgttcggttgcgacgtgtagagtgtgtgtgttagatacagcggctgcttggtcgtgtagtgattagacgaatgagagtaggttgtgcgtgaaagtagagtggaaaggtgttgcccggtccgtcaaatgcaagttaaaggttttagaaaaacttggggcacgttcccgtgctttctctgagtcctcttattttcccatcacattagaactaattcactacctttgttgcttaagaaagaaaaagaaattagaaagtaagttacttatgcttctctccctttgaataatttgtccaaatgcttaaattattatattagataaatgtacatagaagtaaaatgaaaacccaatgactagctgatagctatcttgtagcggtattgttctaggatgcatgttttccaagaccttgcattaaaagctgtcatttgtcaattttcttttggccatttttccccctattaaaagaagcaatttaaaaaagaaacattgtgattgagcagaaaagaagcaatcttgatgacatgttttaatacttacataagagccatagccagatttaa

SEQ ID NO: 7821 - DNA, 607 bp, Canis familiaris
gacaagtttgttacaaaaaagcaggctggtaccggtccggaattcccgggatctgctccagctaagactaatgtggcagtgggcgagagcaaggccaaagaattcttgagcggcctgaagcgccagaagcgacagctgtgggaccggactcggccagaggtccagcagtggtatcagcagttcctctatatgggtttcgacgaagcgaaatttgaagatgacatcacttactggctgaacagagatcgaaatgggcacgactatgattactaccagcgtcactatgacgaggacgccgccatcggtccccagagcccctacagcttcaggcatggagccagcgtcaactacgatgactactgaccaaccacccctcggccctcggcgccccggccgcggaggtgacccactgggctgccttgcaccacgtggcttccgctgggctttactccagcagatcttgcctaccccctttctgcagccaggaaggaagagttaaacaatataaatgcctttgatatttcatgcaagtgcctaacatcgcatttcatttaaaaaatagaaataaaagcagtttgttaaaaaaaaaaaaaaaaaaaaaaaaaaa

SEQ ID NO: 7822 - DNA, 645 bp, Canis familiaris
ccttaaaaggctaccgttgaatgaacaagtatattttatagagataatacttcagagacttagtgagaaagtcatgagaaaaatactagtgggaagtggaaaaatagcatctgaacttactataaggataaaaataacaatgctattcttcactgtcaaggagaaggattgattttggcccatgaggtgatctgttatttttcttgttctaggtttgtgctgatccatccataatcttttatttgttccctcctcaatcacatggtgaatctgttgttttctaactactgatgcctctaagtactcttgccccagggactagacaatatccctaagcagcggactatctcttgtcctcaatcctcaaggcccttatcgtatagttgaggagaaagcaaataaagaacaaggtaggacatggtgtgcataatgcgactcagacaagagctccagtatatttgtcaactcgttgacaattattccagttggatttagcagtcaagtcctgaggaagatattgaagtgaattgtctgagggcacctgactggcttagtcggtagagcacgggactcttgatctcagggttcctatgtgcaagccctatgttggatgtagagattatttaaaaaaaaaaaaaaaaaaaa

SEQ ID NO: 7823 - DNA, 666 bp, Canis familiaris
taagatgagtgaaaaatctactcgtatgtgttggagaggctggagacactgtacagtttgcagaatatattcagaaaaatgtgcaactttataagatgcgaaatggttacgaattgtctcccacagcagcagctaaatttcacgcgccgaaacttggctgactgtcttcggagtcggaccccgtatcatgtcaacctcctcctggctggctacgatgagcatgagggtccagcgctctactacatggactacttggcagccttggccaaggccccttttgcagcccatggctatggtgctttcctgactctcagtattctggaccgatactacacacccaccattcttctcgggagaagggccctggagctcccttaggaaaagttctggaagaggcttcccaagaaaccgcctttcaattcccgggaaccctgccaaccctttcagtgttcgaatcattgacaaaaatggcatccatgacctggacaacatttccttccctaaacagggctcctaaccatatgctgtccctcccacttgccagggaacttttttttgattggctccttcatctttttctactcttttgacatgtatccttgatagatagttaattcagaataaagctgaatctggataaattaaaaaaaaaaaaaaaaaaaaaaa

SEQ ID NO: 7824 - DNA, 643 bp, Canis familiaris
agcagccccatcccttaagacggtgatgataccctgggccccagcgtgaaaccctgggaagactatgaagagccacaaggagaggcccataaactttagctcatcctggtggcataaatgactcccttggatgtgaagcatggtgatgaggtggctggatgctgtggagtctggaagctcgtgaagtcagtcatctctccatagctgtagaagcatcatatgtttgacctcttcctctcctgcttgggtgtttccagctgtctcctccgcaaccacggcctgatggctgggtccaggtgggtggactggaatacatacagccataagcccacttcttcctatttaaattgtatatctagcttttgtatatctagctttgtgagtctcaacaaaagtacctatttttcctgtagccagagaccgcccaggagcagaactggcagaatgtttctcttttaattataggcagggatcagagctttgaaataaaataaaacactgtcagggttttggacacactgtggtgggttatgtcttctccccagcttaggctagaagtagaccagccttcagagaggatgggctgaactgtgaattatgtggcttccaataaatccagacttaggaaaaaaaaaaaaaaaaa

SEQ ID NO: 7825 - DNA, 605 bp, Canis familiaris
gcccggtacgaggggcccgagggccccggcagatcagggccctggctgagccagacctggagctgctgctctgtgctgcgtagactctagcattgaccaagttccttaaagaactggctgatggggcagggggcctggctgtgggctccagggatctcccgggggaggccactggggctcgccactccgaccccgccttgagttttatttatttaaatagtagtcggatgcttggcacgtcgtcctgttataggaaatttttgcctcatcggttttcctaattgtacaagtgcaatattttaaccaacgccttgtgaaaagccacctcgccgagaaggtggacaccactttccagtttcaggggagttgctggtcccaggcaccagcggtgggcagctgggccttctggactcatgcggcctggtgggggtgggtgcttccgtgggagctcgcacagagatccagcacccccctcccccgcccaccgagggaagtgcccctcaggggctctgggaaagcatggcacccttggaccacacagcagccaagttctggagcaaataaaaggcctgtgttaaaaaaaaaaaaaaaaaaaaaaaaaaaaa

SEQ ID NO: 7826 - DNA, 575 bp, Canis familiaris
ccaaaagtgaagctaagaatgctcctaacccaaggaaagaagccaagatacgaaaatctgtcgaagtacctgctggaccaccagacagtgagtgatgtttcttatcagctggtacaaacctggccatagtgaatttccatcccgggataaacttttcgaccatctgaagccacaggtcatgcaagagcaccttcatcatgttctttaggcagcataacaagtagtcgaagcaagaaagagaaacgtaaaaacagatagaaattctgccaacactttttctttttgattgtctctagattttgaaacccaaaactgaactggaatcatctaaagagttaaaatttcggtgaatctgccatttattgcaattgtggaagattattttttatcttgtaaaaacattttttttgtttaatatatattttttaaacatttcattagtgattgaattctactttgccatctgaattgacttgaatgtctcaaaacaggtaaatgctgtaaaagtacgcattcttgatttctgttggctcacgtggacagaaatgtacagggagaattaaattattttaaca

SEQ ID NO: 7827 - DNA, 357 bp, Canis familiaris
attttctgttattgaagcacataactgaaatgaaatcatggtatctgttaatttgtataagctagaagtcactattataatggattatgccaattctgaaaatttttacatgtatccagcaacataggatttatcagttatcagacacttcattgtaccagagattgtccagaacttttaaaagacctttgtgcccctgaactgggctatgggaaaaaataataataataataataatgaaaccaatactgacacaaatgctggtgcccattcagatcaagggtacctgttagggaaaaaaaataagtttgcacccccaaatgtcctgtatcttatgtaaaaaaaaaaaaaaaaaaa

SEQ ID NO: 7828 - DNA, 636 bp, Canis familiaris
tctcaggctttaggcattaccatctaagatctctaggggcaccacttgaaatcttgagtgatgtgcagctgattaagaccggagacaaagtgggagccagcgaagccacactgctcaacatgctgaacatctcccccttctcctttgggctgatcatccagcaggtgtttgataatggcagcatctacaaccctgaagtgcttgacatcacagaggaaactctgcattctcgcttcctggagggtgtccgcaacgttgccagcgtatgtctgcagataggttacccgactgttgcatcagtgccccattctatcatcaatggatacaagcgggtctctggctttgctctgtggaaactgatctacaccttttccacttgctgaaaaggtcaaggccttccttggctgatccatctgcatttgtggctgctgctcctgtggctgctgccaccacctgcctgcaccctgcctgctgccgcagcacccagctcaacgggttgaagcaaaggtaagagctcggaggcaatcggacgaggatatgggtattttcggtctctttgactaatcaccaggaaagcaaccaattcagccaagtttatttgtgaaacaaggaaataaaggcttacttctcttaaaa

SEQ ID NO: 7829 - DNA, 635 bp, Canis familiaris
  misc_feature (61)..(61): n comprises a, c, g, or t, or includes no nucleotide
gttcattcgtctctgctctgtaggcctctcgcgaaacagaatctaggcagggccgtcgccnccagactagtcccatgtttgctcactgctatatccacgcggacctgactgaacttatgatatgtcagcaaatggctaataaccaactcgacttcctgcatgggttttgaaaaacgggtggcgatggggttgcgaacagggggtgtggatattgagtaaattattgaaatgctgaaccccattgaatatcctttgtgtgaccctgtttgcctagctgggactcgggtacctcactctcctgggagtccaggccagtctccaccacacagtgtcagggattctttccttctgctgcaaaagccgtgtgaactttcctggccagtactggaaaggggaatgctatttatttttatattgtgtatattttgtcgtggtctgctgattccctgtttcactgagagcgacacttacctcagtagttagttcgatactgtgtgttggataattttttaaaagaactttttaaaaagctttttgatcctcagaggtctgtagatttatttccatatgaactggttattttgtataaagtacattcttaaaatagcaaaaaaaaaaaaaaaaaaaaaaaaaaa

SEQ ID NO: 7830 - DNA, 587 bp, Canis familiaris
  misc_feature (54)..(55): n comprises a, c, g, or t, or includes no nucleotide
  misc_feature (68)..(69): n comprises a, c, g, or t, or includes no nucleotide
  misc_feature (79)..(81): n comprises a, c, g, or t, or includes no nucleotide
  misc_feature (108)..(108): n comprises a, c, g, or t, or includes no nucleotide
  misc_feature (115)..(115): n comprises a, c, g, or t, or includes no nucleotide
  misc_feature (142)..(143): n comprises a, c, g, or t, or includes no nucleotide
  misc_feature (158)..(159): n comprises a, c, g, or t, or includes no nucleotide
  misc_feature (165)..(165): n comprises a, c, g, or t, or includes no nucleotide
  misc_feature (178)..(179): n comprises a, c, g, or t, or includes no nucleotide
  misc_feature (181)..(181): n comprises a, c, g, or t, or includes no nucleotide
  misc_feature (192)..(193): n comprises a, c, g, or t, or includes no nucleotide
  misc_feature (198)..(198): n comprises a, c, g, or t, or includes no nucleotide
gtttcagccgttttcaaaataccaggaggaggacccacttgcccacgtgtccgnntagcttagttgcnntccagaagannnagcttcataagtttgagttggcctgtnttggccnaacctttgcccagagactgctgagganngttcaaaggcacctnngattanccacagacttggnnanggggcgcgttnntgaangatgaggagctacagcagattcttgatgatatccagaccaagcgcagctttcaatattagtctccaaatattgctccactgctgagggaactgtgtcccaagcccatcaccactgaccaggtgtctggagctgacttacacggaaatactattgcagaagacagttgggcttcctttggctagaacaagttagcttggtctcagtttaggttgctgttttagacttaactccgagaccatggtaacctggccttccctcttggagggggaggcgtgaggggtgatgcgcatataagctacactagtgactaccttctaccacagttttggtacctgtgttatttttaaattgtttttgttttaaaaaaaaaaaaaaaaaaaaaaaaaaa

SEQ ID NO: 7831 - DNA, 584 bp, Canis familiaris
gttacttccagaagtgactgagtaaagaaatggttaataggacaccttgtattgagtagtcataggtgttttagtctttcagaaaatatgcgggattggattttgaaaatccggtgatcgctagataagcacattgaaagggacttttatcctgggtagtaaataagcgctatggaattgcacagaagataaaagggagatgaatagttaatgttaaaactttggtgtccatgggtttctctaaattgaccagagtacagcattctgatcatgaaacatctagaaaaagttgagacacattaataaaaaaacgaacgtgcaaactccttaatcccaacctgttgaagacaaccagcgttcggatgtttcttttttgtattttttaacatgcgttatataaacgtacataaaaatgggatcatacagtataatagtttttatatcctgctatcttttcaccaactgtatgttctcttcgctcttatttagtttaaagctgtaatcacatttttctattagtgagaacctttttgttattaaaagcagtttgaaataaaaaaaaaaaaaaaaaaaaaaaaaaaaaa

SEQ ID NO: 7832 - DNA, 618 bp, Canis familiaris
ttctgaagtaggaggtaaaccccggtattgttctacggactcactcagctccgctgctgtgtttaaaaaacacagttttaaatccccatttacagacactaaagtaaattaaaatacggctttctgggttgtaaacatgtggtagtactggagtgttgtatagtccatgttaaataaaagcccaaactggaatgtgcagaaaataggatctggttaatttgtggactcatctttatttttgtctttgtttaacttttttaaaaacgagattcctggagtaggtcggtatattctgttaaagagtcacagtgaccccttttgcttcttaccctgttgcttcacaagggacttgcccggggaccatgacctgctgctgtgttcacggccgccgccccaccgggacgccaggtagcaatcacagccgaggacggcgctcgttgaggtgcaatatccgactccccaagttagtcacggtgggtcttcgttgttcttgtgacaggatctatccagactgctgtactcttcatttgatgtaacacagatgctattaatctaaagatttgtaaataaagtacctgtatctagaaaaaaaaaaaaaaaaaaaaaaaaaaaaaaaaa

SEQ ID NO: 7833 - DNA, 416 bp, Canis familiaris
  misc_feature (1)..(1): n comprises a, c, g, or t, or includes no nucleotide
ncccagaggcggtgggctaaagccacgccccccaacaggcctacctgttactatagcatcagaaactgtcacatctctccccttccggagagcagggcttgcactcttcccctagaacctactttgaaggcaattagaagctttgttttcatttgccccctggtattgtcttgccaggatggttaggtacacaaggacgcttattagatcactgagaagaaaaagccaaacccgcttctctggtatgaacactctagtttgagagcaagccaaacagtaggcttgtattacgtgctttaatggagtactggtaacactttttctttcttgataggaatctgcttatatttagccaggcttctatttcataccctctcccactacaaactttccgtgcagttacctttcatttttaa

SEQ ID NO: 7834 - DNA, 642 bp, Canis familiaris
gagacaagctgggactgagcttctctaagtcccggacgggaggtggagaagtgctgtgtgtgcagtaccataggccatcccacagcgccgtggtcacctttatggaggctggagttgctgacaagattttgaaaaagaaagactatccgctttatataaatgaaaactgctacaacgtcattgtttctccatacacagaaacacatttgaaacagtttcagatgttttcgggaatatcggaaaggacggtgcttctgactgggatggaagatcttcagatgatggatgaagaaattttgcaggatttagttaacattcactttcagcgggagaagaacggaggtggagaagtagaagtggtcaaatgtgctctagaccaaccttgcatagcgtactttgaagaatagaggctggtagagcctctgagcccaaatcaccgtcaatatgtgacaaaataaatatccttttcctttaaggatattaagacctgaattctttagtgcccatttattcttatatacaaaatatatttccgtgtttttgaattcctctttgtttcaaactctggggcatgttcacaatacgtactatgtgcactgtattaaaaacagttctgtttattcataaaaaaaaaaaaaaaaa

SEQ ID NO: 7835 - DNA, 248 bp, Canis familiaris
ctcagcactcggtcgggaagcaggttgatctccttcatgatgttggccaggcgcacaggcagctcctgcctgaggaaggtgaatgaagttttctcacaggcattgctggacccgaagtccagaactgctttatggacagcggggacggggagaactgctgaagtgctcgatgtacttgggcgcccctgcgagggacgcgttcttcagcagcgcgcggacccagcgcatggcggcggcggcggcggcgg

SEQ ID NO: 7836 - DNA, 600 bp, Canis familiaris
ttagagggaaaaatagggttggctttaaaagtacatcagttactcattccacagtactaattctctgggtcaacccacttgtccaattcccttaggctattgagaaagtctcctagttggtgtcaataagtcagtttccattctgatccttacatgtgttctccacagttaacttttctcatccttattcagacccctcaaaatacttgccattgcataaacttgccagcccagttgtgcccaccttgatgtaaggtataccaccacattgtttccattctgtcttccagtagatgaggtttctgtttcccagagtgaatttgaggaaacaaaggagaggaattgccccagttctaagtttgctggcttaatccatctaattgctggtttccttgaagcagtttttatattttttttcaggagtcttaggcgtagttaaatgatttccagaaaacaggctcaaaacccttgagacctaaattcctttccactcaaaaagagatcctaaaccatatattttgtgtgtagagtttgttcaactaaaggaataaatgtttattaaactaaaaaaaaaaaaaaaaaaaaaaaaaaaaaaaaaaa

SEQ ID NO: 7837 - DNA, 708 bp, Canis familiaris
tggtaccgtccggaattctcgggataaagatttgtagtgacagcaccacctggctcgaaaccgttctaagactgctttatatgttgactccctggatcgagtcactgattttggaggtgagctacacgaagatggaggaaaactgcttctgcacttcttgcaatgtggttctgaatcatgttcgcaagtctgccattagtgaccaccttaacgtcaaagactcataccaagaggaaggcagagtttgaagagcagaatgtgagaaagaagcagaggcccctaactgcatcccttcattgtgctaacagtactgcgcaaacagagaaagtcagtgttatccaggactttgtgcaaaatgtgcgctggaagccaacatgcccacttgagaaggctgatcacgccagcagtccgtgctgttccgtgtctcgccatgtgaagaatggagggctccatacctacagtcagaccagctgaggagagcatatctgccttgatggctatgacaaattgagaaattctaactcgctcgaatctcagcaagatttgttgatcaagaggaggttaccaccattgtgatcaagataaatgtggagtattaaagttatgtgttgattgtgtggtgtcatttttatatttatttcatcttataaatcatgtgatgcagaatagttttgcaatgtgtatatagttgcaggcaaaaaaaaaaaa

SEQ ID NO: 7838 - DNA, 577 bp, Canis familiaris
ggaccagcggcgcttcttcccggcccctgcaaacctgggcgagctgtgccagcgcctcgtaagcaaacggtggagtacttaccaggagcaacttatgtgttcgtgttcctgggcctcatcctgtactgccgtggtgacgtcccctatgctgctggtggctctggctgtcttctttggcgcctgttacatcctcgatctccgcacattgcagtccaagtttgtgctgtttggccgagaggtgagcccagcccatcagtatgctctggccgggggcgtctcctttcccttcttctggctggctggtgcagggtctgctgtcttctgggttctgggagccaccctcgtggtcattggctcccatgccgccttccaccagatggaagctgtggatggggaagagctgcagatggagcctgtgtgaggacctgcgggcctctggaatcggctgcctcatccctgttcccccctgccccgcttggccccgaggcactggccaaaggcctccttcccatctcgagcccagggcgggattccagctgtggaaataaagctgttacagttgtcaaaaaaaaaaaaa

SEQ ID NO: 7839 - DNA, 567 bp, Canis familiaris
  misc_feature (1)..(1): n comprises a, c, g, or t, or includes no nucleotide
nccacagttatgtcacttgtcccagagcggtgggctaaagccacgccccccagtcaggcctccctgttactatagcatcagaaactgtcacatctctccccgttgccggagagcagggcttgcatctcttccccgtagaacctactgttgaaggcaattagaagctttgttttcatttccccctggtattgtcttgccaggatggttaggtacacaaggacgcttattagatcactgagaagaaaaagccaaacccgcttgctctggtatgaacatgtagtttgagagcaagcaaacagtaggcttgtattagtgctttaatggagtactggtaacatttttctttcttgataggaatctgcttataagttagcgcaggcttctatgttcataccctctcccactacaaactgttgccgtgcagttacctttcatttttaaagcaatttcactgctaaatataaattgtatttgtggggttcatagttatataatgctgaagggaaccactctttcgttgaaaggtgataaaagttaaataaagactgtctccagcagtaaaaagaa

SEQ ID NO: 7840 - DNA, 390 bp, Canis familiaris
atgtgccctgggcattcccagcattgggaagggcccgtgacgcactctcaccaagctataggagcttcacctaagcctgtgagcaggactgcactgatgtggaaataaagtatgtggaactcagctgtgcaccccgtccctaggcaggagaatttcccacggtcccgtgctctggagcaggagccgggcctgagtgcacagcagagctatacagcacagcacagccgcctctacggaaggaatccaatggatcctcagccctggggcctgctgagtgcttttacttctgttggaggatcaggggtaaacctaggaagctaataatctattcagtcacatgggaataaatgggtttggactcctataaaaaagaaaaaatagaaatagagt

SEQ ID NO: 7841 - DNA, 634 bp, Canis familiaris
gttctggtgcaattgcttgttttcttcaagcctttacttactgtctgtaccccatgataccgattggcacgtagcccccagagagtgtcagatgaatctttgttgtcttgttctttaaaaggaatacaaggaactgacctttgataaagtcagtggccatcaacggaaatgtccttccttgtatttttgcagggttttgctcacctctaccgtaatgataatctgatgttaaagacccgaataacccatagaaagcatatttcttggccttggtctatgggatgtcagcaaggcctctatcacagtccgcacatataaatggtggtgaaataaaggaataatctacaatattcttacttgaaatgtaaataagttatttctttgatgaatttggaacgctagtatacatcccacattaagctgttgaacacagggtaatcatagttcctctgccaagtctggaaagaccatctcatgactaccactgcgatgggctgctgactatatttgtgcatttccttttatatttacttttgttcttgctggaggcccagtgtaccccagagcagatgtcaataaatgcacatttggtaaaaaaaaaaaaaaaaaaaaaaaaaaaaaaaaaaaaaaaaaa

SEQ ID NO: 7842 - DNA, 609 bp, Canis familiaris
aagatggccggtcgtcggtgagaacttgtgcaggagcagctagaaaagggccaagagagctaaagaacgtggatgagaatattcgcaagctcaccggacgggatccgaatgacgtaaggcccatccaagccagattgctggccctttctggtcctggtggaggtagaggacgtggtagtttattgctgaggcgtggattctcagatagtggaggaggacccccagccaaacagagagaccttgaaggggcagtcagtaggctgggcggggagcgtcggacaaggagagaatcacgccaagaaagcgacccagaggatgatgatgttaaaaagccagctttgcagtcttcagttgtagctacctccaaagagcgcacacgtagagaccttatccaggatcaaaatatggatgaaaagggaaagcaaaggaaccgacgaatatttggcttattgatgggcactcttcagaaatttaaacaagaatccactgttgctactgaaaggcaaaagaggcgccaggaaattgaacaaaaacttgaagtgcaggcggaagaagaaagaaagaaagagagagagaaagaaagaaagaaagaaagaaagaaaaaaaaaa

SEQ ID NO: 7843 - DNA, 544 bp, Canis familiaris
gaagatttggattacactcagttcacgaaccagcataattccacacgtcatttctcaaaatcggaatcctgctcataaaggtttccatcataagcagtaaaccctaggaatctgccttgagaacggactcactgtagcaaacattactggatgatacagaacgcgttccacattcatttttttctttcctgtgtttgtattcctgggatttatctgtcaagagttcttctgaccataaataattttaattcagtttaaaatgttttggttattcttgatcacttgggcagtacaagaaaagtctagcttgctgaatattggcctcctctctgctgcatacacttcctgggatatagtatctaaaagctctgtaaaatgtcacttctgttaggtatggagtactggtatctagagactaggctttatttagcaattagaattttgtggagattatgatcagagtaaaacaatgtttggatgcaatacagaataaaagactataagaaataaaaaaaaaaaaaaaaaaaaaaaaaaaaaaaaaaaa

SEQ ID NO: 7844 - DNA, 573 bp, Canis familiaris
caagtttgtacgaaaagcaggctggtaccggtccggaattccccgggatcgtatttgtgccaacaagtacatggtgaaaagctgtggcaaagatggttttcacattccgagtgcggctccatcccttccatgttatccgtatcaacaagatgttgtcctgtgctggagctgacaggctgcatgacaggtatgcgaggtgcctttgggaagccccagggcacagtagccagggtccacattggccaagtcatcatgtccatccgtaccaagctgcagtaacaaggagcatgtgattgaggccctacgcagggccaagttcaagttccctggccgccagaagatccacatctccaagaagtggggctttactaagtttaatgcggacgaatttgaagatatggtggccgaaaagcggctcatcccagatggctgtggggtcaaatacatccctaatcgtggccccttggacaaatggagggctctccactcatgagaaccttgcaccacccgaaccctattcatgcccaccaataaatcctgcttcctgtcaaaaaaaaaaaaaaaaaaaaaaaa

SEQ ID NO: 7845 - DNA, 613 bp, Canis familiaris
gtcttcgttttctttttccagcattctacttgcagtaatgaaacagagacataaactatgacctaggggtttctgttggatagttagcaatttagaatggaggaagacacgaaagacatgttttccatttttttctttacttatttctcaaaaaaacatttagtcttgtttaatcttacatttttaactgattaaacctttaaagaactcagtgaattctatcttttaggttccagaaatactgacacaaatattttaaatatccatttacactttgtatatctaagagtcatatcttggtttttactatcacatatacatgaagcctttatatcttgtttctttatctagcattgtatcaccctctttaaaatttgagatagtctatcttgaaagttgtaatggaaaagataaaagaatgttgtctatatcttgattgcttagaaagtatttccatagtcaatgatggttcaataggtaaactaagtcctataaacctgaactcctatatggttaatactattaagcaagaatgtagtgcataattgaccaaatgtggatttgtttaaataaactcaatttaaaaagtttaaaaaaaaaaaaaaaaaaaaaa

SEQ ID NO: 7846 - DNA, 619 bp, Canis familiaris
gagtcgagaagacagagatgatgagagtaaatgactaactccaaagatggcttcactgaagagaaagcattttaagataaagtcttgtcagaagatcccagaaaagttctaattttcattagcagttaataaagttattcatgcagaagtgtattcaacaggacactgctctttgttgattttatttgtactttttggcctgggatatgggttttaaatggacattgtctgtaccagcttcattaaaataaaccaaatatttgtaaaaaccgtactaatgttcattttatttttaattgtatagaaagaaaaaagaaaatgcctaaaagttttcttgcataatactggaaattattgtttgtacatggtacaaataaatttttcagtactgtacagtgatgatgatcatgactttgaagcactgaaagctactgaagtgcctttgaattaaggatttaattaaggccacgctaccttcttaaatactcagtgttctgtttttttttttttttaaacttgatattcttgtatggtgcatatctatgatatagttatccagtcatgttgaataaatgggcatgcccaaaaataaaaaaaaaaaaaaaaaaaaaaaaaaaaa

SEQ ID NO: 7847 - DNA, 667 bp, Canis familiaris
agaaattctatgacgttaagttctcccatgtgctgacacattatagtatcaagtgtggtggttgatggttctagggcacaataatttcacctgcagtagtgtgaactctgctgggagagtcctcatcactttatcagactaggtaaaacttgtagaacccaaagaaaattagggcttcttgggtgatgaggagagaaccccatcgaggaaagacccacgggctctgagaactcccaggacaggatgcagaaggtctctttcccatcttgaacccctaaaccatgatattaacacaatgactacatattcagtgatttgtatgcaaacaacataagcaattgtgcctcatgtggtgaacttctgattgtatgccagtacagtaataaaactaagttactcactaccatgctctgggttagagagcatatgctggcatgtacagactctttgttattacaaaatcctatgctggttggtagagagaacaaaaaggcttctggaatgcttgtaatgttctgtgtcttgttctggatgctggttatatgggtgtgttcagtttataaaaattaatagatgtatacacttaggaattgtgaccctttccgtatgtattggatacttcaatacaagcatttttaaaggataaaaaaaaaaaaaaaaaaaaaaa

SEQ ID NO: 7848 - DNA, 560 bp, Canis familiaris
gaagagtttacagtgtatttagttgtttccaaaaaagccctcagaatccgttcttctgttctcctggggatccacccaagcaacaaccaggggaagttcaaccttgagccaggggccaaacctttcttaggggcttaaggaggtctaccaggggaatagggattgggagagggggctagaacaaggtctttctaatacaatcctggcagcctggacttcaccaaggaggtcttgcccagccatgggacagtatatatctggaaagagcagagcgttttcctcatcaggtgtggctggtcatgaaagggacagttgtccaagttgggctgggacttggtacatctcgttcgtccaatctccacctccaagaagtagttcatcccagacacaacctgcttgcgggcgcgcagcactcgcagggcgcggctgtggtaggcgtcgttgctcgcccggttgtactcgcgcacggcgaagtccagcgcctgctgcacgccctcctccccgacgtccgcgtccaccgcgccgcccaccgcgccgggcctgctgcctctccggccggc

SEQ ID NO: 7849 - DNA, 614 bp, Canis familiaris
agttttgaaggacaatgtgtgaggtgactgtccggagaggacaccgcccgaggagaaaagggtctggggcctctggggagaaggatgatgtcaggaagggttttaagggacaccagtgagggagtgtcctcttctgctggtgttttgtgagtttgttagtgccaaactggagtagggggtggggtgctgtcttccactgacacccagatccagaatccctggtcttggctccccagaactctgcctcctgtcccttctgccacctacccccacagaaacttaattcttttctgaccccttcccttgcctggtctagctcctctccaaacagccatgccctctaaatgctagagacctgggccctgaaccctgtagacagatgccccccaaactggggcatgggaggggggctgggggaccccatgattcagccacggactccaatgcccagcccctctccccagaacaatcccctgacaatcccatgtccctaaccccaacccgttgcggctctgtacacatttttaaacctggcaaaagatgaagagaatattgtaaatataaaaatttaactgttgaaaaaaaaaaaaaaaaaaaaaaaaaaaaaaaaaaaa

SEQ ID NO: 7850 - DNA, 511 bp, Canis familiaris
  misc_feature (1)..(1): n comprises a, c, g, or t, or includes no nucleotide
ntaacctcagctcgaaggtgaagacccattgctatcatacaggtcacgagcggtgggtttctcagactatctggactgccaatgttcccgtgggcttcactaaggtggttgtgaagctctttgattctgaccccatcacggtgatgatcccagaagcagtcttcaggaacaatccgtaaatttatggagactgtggcagagaaggctcttcaggagtatcgccaaaagcaccgagaggaatgagatgtgaacattgcttctccaaatatgggagggctgagttcctttgaccccaagatgagtgctaggcccctagagagagctctgcatgtcaccaagtgaccaggccttgcctcgaggcgctcctgtctccgtaacccagctttccttcctcatggactccgcactgtaacgcctacgtgttgctgatgcatgggaagaactcctgtgtgccactaacgtcaataaaaccgccaggaatctgaaaaaaaaaagaaaggaaaagaaaaaa

SEQ ID NO: 7851 - DNA, 622 bp, Canis familiaris
cgatggggtcctggccatgtgttagcacagctctcttctcgtttggttctccggccagtcaggtagtctcttgtaaactctatggttctgggtttgggcaggattttcccctagaataccacagaataactgtcaagttccccacctcattctggggctagggtgggtgaccagccctgatttgtgcctctcgtttggggacaggagtcctttccctttcttgctttggggcttcttgagagttcagagtacccactatagtttggctcttaaggtatagctttctgtatttgctgggttttgtttggggcccctggaccctgtgctttctggtttctcttgcctcatttagggagcatctcacaacacaattgtttatatctggtggttggactagccacaggccgcctctagatctggaaccaggccaagccagggctttgtaagggtaagaggaacactgagcaattcaggggccagctactgtgagtttgttgctaagctttgagctgtcagagaaacatcttgaacctcaatcttgggtctgaatgagactctttaagtgtttttaaaaaaaaaaaaaaaaaaaaaaaaaaaaaaaaaaaaaaaaaaaaaaaaaaaa

SEQ ID NO: 7852 - DNA, 600 bp, Canis familiaris
tgtagagctccttcccagaaatttagcacccagcgaatataggtatactttattgagggatcgagatgagctttaaaaaacttgagaaaccatttgcaagcctttcaaacagcagcatcaacttacgtggtggaaatagtaaacctatattttcatgaattctatgtgtatttttattttgaataaactgaaagaagttttgggtttttgaatttgtttttgcctccccctgactcaaaatgcattgtcatttgaatatagcctctttttaaaaacctgttagggataaaaaaaatagaaaataaaaatcagaggcctatctttgctttaaatctgtcctgtaaaatttttataaatcaaatgaaaggtgacattgccagaaacataccattaacttgcactactaggttagggaggacttaggggtgtctcctgtgtagtatgtgcttttctttatatacaaccaatcaatcttgctggtattttcattgtcacatttctcaaagttaagagggtatatattctggatacttgggaggggaataaattaaaattttcacactgcgtaaaaaaaaaaaaaaaaaaaaaaaaaaaaaaaaa

SEQ ID NO: 7853 - DNA, 557 bp, Canis familiaris
tagaatagttgtctgctgtagtctgtttgctgtaatatgcttgaaatttgtgtatgtccacttaggtatgttgtatagtctagggaaagtattttctaagaccaggttttagatgtggctcctattcctatgtaatactcgatttactgtacctgcttgatggttagaaggaagccagaagctgaattcaggcactttcgttcccagaaaactaattatggctcattccttttgacaagccgtaaaattggatccatttttaaaccgtgaaattctaattgatttttaaataagtttttggaagaactttgttactagatagttgaataatctttataagatattttatatattagaagcaattataattaaatctgtggtttctgaactaaaatggtgctagttccaggtgaagaaatgtaaagtgcaagtgagattctctggtgtcattggcattccaaacttttctctttgtttttgtctaatgttgcctttggatacgtctgtttctataaataaatttttgaacaataaaaaaaaaaaaaaaaaaaaaaaaa

SEQ ID NO: 7854 - DNA, 634 bp, Canis familiaris
  misc_feature (23)..(23): n comprises a, c, g, or t, or includes no nucleotide
  misc_feature (362)..(362): n comprises a, c, g, or t, or includes no nucleotide
aaagaaaggaatagaggcataanactggtaacatctgggcacaacttaagcagaaggccggtacttttactctcaaccatcgagaaaagtaaatagtaagaattatctaagattatctagaatccgatctctacatattacctttagcccctgtaattgttgctagatttggtatttgatctggaaatcccaaatacccagtttcttgagttttctggttggtaaaatgtggatgaaagctaaagcttccggctaaaagcataacctaacttatgtaaaaagcgtccaccgtgcattctctccacaagagagccagagatgctctaacaccactgcttccccactgaactgacctcgggacnctggagacaccaggtccagcctgtggcgtcatcatgaccagacctgaacgtgtctgcagctcgtggtactgcacctgccctacaccaaatacgtggggacacacggaacctgtccagcaggcagtggtataaaaggagcaattccttccatcatgattttcctaagctcagaagacattgttcgaaatgttgcctacaggagatgacccccttccttcgcaggtagcccacactctgtgtttcttgcactgagaaaatattccactctgtca

SEQ ID NO: 7855 - DNA, 689 bp, Canis familiaris
gtaattgtgcaagggtgatatcccaagactctacgacaccacctggccctgggcccacgcagcagctttctccgatgactgtgatttgccctccgctcagggacatgaacagattttgtggggctgcagaacacgtacatgggctacctagactacaggaagaaggcgataaaggaccttggcataagccccagcacttgcgtccttcaatccgggtgtgattgtggcccacatgacagaatggaagcaccagcgcatcacccaacagctggagaaatggatgccaaagaatgtggaggaaaatctctacagcagcttcccttgggaggaaggggtggcccacctccccccaagctgattgtgtttcatggggaaatactccccaatcaaaccccctgtggcacataaggcacctgggctggaatccagataccagatattcagagcattttctgcaggaagccaaattactccactggaatggaagacataaaccttgggacttccctagtgttcacaacgacttatgggaaagctggtttgttcctgaccctgcagggatatttaaactccatcaccaccatagctgatatgacttgacatttcaagtatttcctatataaaaatgtggaattgtgaaaaaaaaaaaaaaaaaaaaaaaaaaaaaaaaaaaaaaaaaaaaaaaaaaa

SEQ ID NO: 7856 - DNA, 612 bp, Canis familiaris
  misc_feature (1)..(1): n comprises a, c, g, or t, or includes no nucleotide
nagatggacgcagacatactggcaggcgaatcccttcagggccgtagcgtgaacccggcattcagctcaaggctgtgaagtcctccacaggccccggggagcagctgcggaatgcactcgtggcacacaggggacacagcatcacaggtgcggctgctgtggaaggacccccgcaacgtgggttggaaggaccagacatcctaccgctggttcctgcagcatcggccccaagtgggctacatcagagtgcggttctacgagggtcctgagctggtggccgacagcaacagtggtcctggacacaaccatgtcggggtggccgcctgggggtcttttgcttctcccaagagaacatcatctgggccaatctgcgctaccggtgcaatgacaccataccagaggactacgagactcagaggcttctgacaggcctagggatgggggtggggacccattgtctggaagatggcaccatcgtggctacccgtttgttgcatcactgcaacaaacagggagcttggcacccggctccaagaggtagctgccctagaggggctcagaaaggacaaaatacaagtgtgtgtggtggagtgaaaaaaaaaaaaaaaaaaa

SEQ ID NO: 7857 - DNA, 667 bp, Canis familiaris
aagcgctatgagatcatgaggagctgatgttagctatgtgctgttcatttttggagccttactgggtattcctctgatgacatcgacaagtttcttgtggatggtccggattggagggagcacagacacaggcaaacatattaaggaacacgattattatactccaactggggaattccgtgtagaccgtgagggttctccagtgctgctcaactgccttatgtacaagatgtgttactaccgctttggacaggtctacacagaagccaagcgtccgcctggctttgaccgtgtccggaatgctgagattgggaataaagactttgaacttgatgtcctggaggaagcatataccacagaacactggctagtcaggatatataaggtaaaggacctggataatcgaggcttatcacggacataaatgttacatccagctctgatatgcttcgcactgagtgcgtcacatttaggacgctgaagacgttttttaaatatgcagtttatgagaacagagcacgatgggattagaatttctggaagttttgcctgggcagatgggctgggccaaatggaatgatttttataattctgagcaggttaccaaatgaaatgtcatggctttaaaaaaaaaaaaaaaaaaaaaaaaaaaaaaaaaaaaaaaagg

SEQ ID NO: 7858 - DNA, 647 bp, Canis familiaris
gcttggttactacatgtgaaggacccatcataccacgttggcaccctcttcccaagtgacccctggccttcccctgcctccaccggtgactgaactaccacctcaggtgactgttttttaaatgctgggtttgagataacaagcctcccattaaagccagacggtaaagcctctgcctgtagcgtcctctgtgggcttgatgctgagctggctgcagccatgaggctttggctccgggagcagccagtgcaactcagcaggccagcctgggcctctggaacccgctctgctcctggggcgtccacactgcgtcaccctgaggctccttccctcactgcttctcctgtgttagcctttaggtgggaacctttcctctgatgggcatagtgcagccggcaagcccaggctgctgtagctctgtgggagggagggagcctctcctgggggaggagaaggggtggcttgcaccgtcctgaacccaccagtcctcatccctctcaagcagaaaccctggagagggggtctatttagccatggcccatcgcctgcctcccttgacctgtgtaaatgctacagcactcaataaagtggactctgaaaaaaaaaaaaaaaaaaaaaaaaaaaaaaaaaaaaaaaaaaaaaaaaaa

SEQ ID NO: 7859 - DNA, 549 bp, Canis familiaris
  misc_feature (1)..(1): n comprises a, c, g, or t, or includes no nucleotide
ncagccttgcccctactcctgacttgggggttgctgacctcctaccggcattattcctcttaccccttagaagtgcctctactcacacctcagtcctcctagcctccggagtatttattacttgagcccctcatagtttaatagaaggtaatcgccaacatatacttcaagccttattcattaccatctccttaggcgtatattttacgctattacaggcctccgaatactatgagacatcttttaccatctccgatggggtatacggatctacctctttttatagccacctggatttcacggattacacgtaattattggctctacattcctcatcgtgtgcttcctccgacagctatactaccaccttcacatccaacccccaccttcggagtttgaagccgctgcatgatattgaccctttgttgatgtagtctggctatttttgtatgtatctatttattgatgaggatccctaaaaaaaaaaaaaaaaaaaaaaaaaaaaaaaaaaaaaaaaaaaaaaaaaaaaaaaaaaaaaaaaaaaaaaaa

SEQ ID NO: 7860 - DNA, 694 bp, Canis familiaris
tgacggtaatgcccgcctggcattatgcccagtacaagacctatgggacttccctacttggcagtacatctacgtaatagtcatcgctattaccatggtgatccgttttgcagtacatcaatggcgtggatacggtttgactcacgggatttccaagtctccaccccattgacgtcaatgggagtttgttttggcacccaaatcaacgggactttcccaaatgtcgtaacaactccgccccattgacgcaaatgggcggtaggcgtgtacggtgggaggtctatataagcagagctcgtttagtgaaccgtcagatcgcctggagacgccatccacgctgttttgacctccatagaagacaccgggaccgatccagcctccggactctagcctaggccgcgggacggataacaatttcacacaggaaacagctatgaccattaggcctatttaggtgacactatagaacaagtttgtacaaaaaagcaggctggtaccggtccggaattcccgggatgcctgggtggctcagtcagttaagcatctgccttcggctcaggacatgatcttgggttcctataatcaagccctgcttcaggggcctgcttctccctctcctccctgctcatgctgtctctcactatctctctctctctctctccaaaaaaaaaaaaaaaaaaaaaaaaaaaaaaaa

SEQ ID NO: 7861 - DNA, 609 bp, Canis familiaris
cttaattgcccttccatagccaagttctggcttttccgctccaggctagcccttggcctgtctgttatgtttttatctatatgtcgaagggtcctctagcctcgcatgaccggggtgtcccagccctgatgggcctttggatagaacaggggccttgcgagcaggagacctggattctcatcccagatactccgcttcctagaagcatgagcgtggctacatcacttaccctgtcagagctccagttgactcctttctaaaacaaacagatctggtgaacctgacaggtaatcatgcgggtgacttgctcgtgagagaccagtctgttcatttgttttctctgggccagagaagagaaatcatgtacatagacccacccttggaaatggccattttagacctttttctttagccatttctctgcgggcagctgtgcttagttaagagtagttcctggaggcagtcgctgtcttctcacctgccacagaggagatgcgcgctgtgagtgggatctgtagaagcccgtatttatcacccagccataaaaccctggtaagtctcaaacagaataaaaatgtgtatgttaaatgacaaaaaaaaaaaaaaaaa

SEQ ID NO: 7862 - DNA, 638 bp, Canis familiaris
agttttgagaatacctgatattctcatataggtcattgacagtgcagacaggaaaagatttgaagagacgggtcaggaactagctgaatactggaggaagtaaacttattgttgtgccagtgctcatctttgctaacacagcaggatttgctcacggcagcccctgcctcttgaaattgcagaaggactgaacctgcacaccatccgcgaccgtgtctggcagatccagtcctgctcagctctcacaggagagggcgttcaggacggcataaactgggtctgccaaaaatgtcagtgccaagaagaaataaaatctagacgaacggagagacgcaggagctgcgggagctgaattctgtcctgaaaaacactaatttgctgctttctgacccaatgtttttccatctgtgtacagctacagctgtttgaagagaggggacaacacaggtttaaaaagaatccccattccagcagtagatttaactgatctctgaggttcagtatcatttttcaaataaaggaattatattatttcctctgcataattgaaatagtattaaatgtctccaagcacatgattagaaaaaaaaaaaaaaaaaaaaaaaaaaaaaaaaaaaaaaaaaaaaaaaaaaaaaaaa

SEQ ID NO: 7863 - DNA, 623 bp, Canis familiaris
tttcaggtggagacgcgcttgccctcattaggttggatgatctcttcctagagtcttttgaaattacagatgtgaagcccctaaagggagaccacctgtccagggcaataggaagaattgctggcaaaggaggaaaaaccaagttcaccatagagaatgtgacacggacacggatagttttggctgatgtgaaagttcacatccttggctctttccaaacatcaagatggcaagaactgccatttgcaacctcatcctgggaaatcctccatcaaaggtttacggcaatatccgagccgtggctagcagagcagcagatcgattctgatttcaaatcagaggcttaccttgtctttggactcgagtaaataaaagcccttgccctctgcctgtggtcacaggaaaccacgtgaagaactttttagtcacttgcagccttcatcgcttcttccgttctcagccagaagcatcagcagaaagcaaaggtttgataatacagcaacttgaagatccttcccgtatctgaatttaataccgtaattatacatcataatttatcacttcattttaaataaaagatttgcataataatgctcttattggaaaaaaaaaaaaaaaaaaaa

SEQ ID NO: 7864 - DNA, 639 bp, Canis familiaris
attggcatgtgccttctggagcccttttggaatattgaaatctagactttttttttttaaatgaagggcactttgtaatttttgagaataagctgcaggcagtggttctcccagtggggccctgggctggcagggcaggaacccatggatgtcctgagaccagctctgtctctgggacatcctgtggtcccagggctggctccacctgagaaccacttcctccctggctgtgtataaacatctttcttttttctttcttttctttttttttttagaaatagtgtttttattaaaatgccaaattaatattcctataatagctcctgaaccatgtgatgcctcagaagtcaaggtggtaactgtcagaattgctggagcgtctgccattgctttgaggtctgcttctacctttgcagcagaagggtggaccgtggactgtgggtgtgggggtgtcactgtgaggccagcttccacatggacatgggccttccagagctcaagccctggcctcaggtgccccctggctctgtgacatgggcccttacgtcccgtcagactgtgcatctagacccatctctgtgccagtggctggatgcttagttcagtgtatgaaggctgaataaagcactgtctcgatga

SEQ ID NO: 7865 - DNA, 614 bp, Canis familiaris
gggatgcttggaatgaatagaattttaggtactgtaaaaccaggcctttttagttaaattaaatgtgagaacaccttaggaagaaaatgcttagagtgggcttttaaggtgtgccctaaatgaatttttgccagtaactggtattcttggttttgtcctacttaatacacattaattcagaacttgtatactgttaagagttagattgtcttttggaatgaccagcaactttgatgtttgcactaagattttatttggaatgcaagagaggttgaaagaggtttcagtagtacacatgtaactaatttatttgaaatgtaccctaaagaaatctaccagtttcttcaaatgcctttttaaaactcatcagagatgattagtaaaaatgcggagtatcatacttttcttcttgcatgtcagctacataaacagttttgtacaatgaaaaatactaatttgtttgacattccatgttaaactactgtcatgttcagcttcattgcatgtaatgtagacctagtccatcagatcatgtgttctggagagtgttctttattcaataaagttttaatttagtataaaaaaaaaaaaaaaaaaaaaaaaaaaaaaaaaaa

SEQ ID NO: 7866 - DNA, 587 bp, Canis familiaris
tcaaagcagcctctgaagcagatctttgtttcagagaaccagcagtcccctgatccaagataaacaagctcctgatggatggaatgatctatgtggggtggtactctggttctagaacggccaccttcctcagggcgtcagcctttgtgctctacgacctcctaggagagaaggctcaggacacagcacctcccaaggctgtggggagtctccccactcacatttctctccaacccacaggctgctactgagggtgcaaaataggccagtgaccagcatggatgccccagtggacagtcctccattcaaattctggctgtatcacttcctgggcagcccagactaaacacattaccatctctcaataaagaatagtaatgtctgcttcgcaggcttgtgctgagtgatagagccagtggtgtgcacacccccttacaccctgcctggagcatagtaggcgcttaggaaacaacggttcccttccctccccctccccccggccatcactgtggggccatgtgcactgaaggcaaagtgagaacacctcctcagcaggtttgtactggcaaatgtctaataacaacaac

SEQ ID NO: 7867 - DNA, 697 bp, Canis familiaris
tatggaatccctatccacctaatctttctttctcgatcctattgtctcgtactttttcttgtaataaattcagtcacatatatgtaagaaggcctgcatacatagaagcagtcgcatagttaacacatggactctgtcttgtattacatgaaaagaaagtaagtcagaaagtagtctaagagtagaatggtagttgccaagcactggccgggagtggggcatgggtagttagtgtttaatgggtacagaattttagttggggaagctgtacaagttccacgagacagatgatggtgatagttgcacaacactgtgaatatgcttaatgccacctgaactgtacattaaatggttaccaatggccaatttcctatatatttagctataataaaaatttattggggagggaccaaaagggggaggaggggaaaaatttattaaatagtctaagagaggtgaggaacttttctaaaatgtagtgaaatatatctaccatttcctaccccaattcttatgaaaccccaagcaggaaattattggaaaagcatctgttactctttactgaactgtaccccctctaccaactgttagataaaaggagaggaggcatctatgtatttggaataaattgccactgaaacacccatccaaaaaaaaaaaaaaaaaaaaaaaaaaaaaaaaaaaaaaaaaaaaaaaa

SEQ ID NO: 7868 - DNA, 608 bp, Canis familiaris
ggagtgccggcgggtgccgcgggatcgaagcgcctgcggtccacttgaaacgctccatcctagacgcggaaacccgggcccctgggggtgtttgcacgcagccacgtcgggccccagcgggcctgagagccgggccccaagattcccgaaccttccagaacagccgccacagcagcaatggccccgccttgggtgcccgccgtgggcttcacactggtgcccagcctggggggcttcctgggctcgtactatgtccgcggggagggcctccgctggtatgccagcctgcagaagccctcgtggcacccgccgcgctggacgctgggccccatctggggcaccctgtactcggccatggggtatggctcctacatggtctggaaagagctggggggcttctcggaggaggccgtggttcccctgggactctatgctgggcagctggccttgaactgggcttggcctcccctcttctttggcacccgacaaatgggttgggccctggtggacctcctgctgacgggtgggctggcaggagccacggccgtggcctggcacagggtgagccctccggccgcccgcctgctgtacccgtacctggcctggct

SEQ ID NO: 7869 - DNA, 652 bp, Canis familiaris
ttatgctttatttggcttgtcgtgaaacacctttattacctgaggctcattcactgattcggcagcttgcaagaaggtgctctgaagtaaggctcctagtggacagccaagatgatgagcgtgttcctgctttgaatttattaatttgcttggttagcacggtattttgacccacgtgatttagccgatgagaccctcttgaagtagctggtctctcaggggtagaagatacttgtgatgaagtatcagccagagtctgaagatgcacagtgacacaccaagtgagaattgcatcacatcttcaacttatttgaaggttcttcatcttaacctgtgcatctcaagttgacattcagaagataaattgtaatgatttgagtattctgaagtatctttgggaaatccccaccaagccacgtttttaatgaagagtttaaaccgttttctgtaatcaacatgcttttaagacacaattgagtgccaactttaattggtgaaacatcctgtacagaaactgtatgatgaaattttacttagatccttggtgctgtttcattgttaataataaactcttattgagaatgtgttttggttattaaaatcttgtttgactcttgaaccaaaaaaaaaaaaaaaaaaaaaaaaaaaaaaa

SEQ ID NO: 7870 - DNA, 530 bp, Canis familiaris
gctgaattccttcatatcaggttttgggtcctatttcccgaattggacgatgagcccagtgaaaggcctaatgaaagatttaggggagctaaggaaatggagccaaaagtgttttgggggacacagattagaggagttcagactcgaaagtaagtttgagaacttgactgatggctctggagtatgacttgagcagtatagcccgcaaggaataggagggcatagtaacaggccggggagcctccatggaggccctctagcaaaaggagaccatgtagggtgtgtcccaggaactcggggaggctgccaccagctccaagattctgctccccaattcacaaccccaagatagtgtgtggtaattaggcagacagtgcatttaaatatgcattgtgtaccttttgtatgtgagacactgtggtaggtaatttgtgtggtgtgtgtggggggggggggaggagatgggttacttgaaaatggtccttgccctcaataaagcctagagtctagtaaaaaaaaaaaaaaaaaaa

SEQ ID NO: 7871 - DNA, 557 bp, Canis familiaris
gatggagtagagccccaagtcctgaaagaggccagcggtgcaaatccatgtggggccctagggaaaggggatcatggtgggatgtggcagagcttgtcatccgtgttttagatggggctcattgtgccaagggctcatgggtcactggttctccaagtgccaggggtgcgcaggtggtggcactgagccccctccctacactgtgcccttgtggagaaagcactgacctgttcgtgcccccgttaagtccccctcttctgacgtgcctttcgcacccctcccattaggacaatcagtcccctccctgtctgggagacctcttttctttctctcccctagcccttcttggcacccagccacctgcgcaggggtgtcctcttctctcccatccccccacccttgtggccagcctggctgattttgtaagatactgggttggagcccagtgattttttttttttcttgtaatttaaacaggcccagcattgttggttctatttaatggacacgagataatgttagaggttttaaagtgattaaacgtgcagactatgcaa

SEQ ID NO: 7872 - DNA, 541 bp, Canis familiaris
ggaaataagggagattcaagtcatatgattcctagttctgagaacgttcacacctgacttttcaggatgcacaagtgtccgtaaggtgagaccagtgctcctctcagtttcgttcagttaagtcgaactatgtgttcctctttccccatatatttttgcttgttagtgtatttcttgagctgttttcatatttctgtcctgttctgtgaaatggtttttgttaaaaacttgggaccacgcagagttgtaaagatgtatgttttttacctgacagttataccacaggtagactgtccagttgagttgagaagagtgaattgatagcttgtatttgtttttaaaattaaattaatcctggataagagttgcttttttttttttttttaggagttagtccttgaccactagtttggtaccatctctattttgggtgacctgtttcaccagcaggcctgttactctccatgactaactgtgtaagtgcttataatggaataaattgcttttctacgtaaaaaaaaaaaaaaaaaaaaaaaagaaa

SEQ ID NO: 7873 - DNA, 506 bp, Canis familiaris
  misc_feature (1)..(1): n comprises a, c, g, or t, or includes no nucleotide
ntgtggtgtcaatgcatctggtatcgtgtgttaatggttttagggggggaatctgcgtatcactctacctacgagcgcgcatacggcactatactctaacttatcgttcgtgctctcacgggaatatgcccgtcgcggccctaatgcagtcaaataacttgtagctggacttattcacttatcatttatcaactcacgcatataaatgcaaggtgctattcagtcaatggtttcaggacatatagttttagggtacacgtacgtacacgtgcgtacacgtacgtacacgtgcgtacacgtgcgtacacgtgcgtacacgtacgtacacgtgcgtacacgtacgtacacgtgcgtacacgtacgtacacgtgcgtacacgtacgtacacgtgcgtacacgtacgtacacgtgcgtacacgtgcgtacacgtacgtacacgtgcgtacacgtacgtacacgtacgaaaaaaaaaaaaaaaaaaaaaaaaaaaaaaaaaaaaaaaaaaa

SEQ ID NO: 7874 - DNA, 558 bp, Canis familiaris
cgacacgtccgtccctgctgaagcagctgaacgagcagtttatctgggtggtcccaactggctagcctcagcgtctaagtggagacccagttctatctccaggtgcacgtacggtgggttctcagacttctgactccaatgttcccgtgggcttcactaaggtggttgtgaagctctttgattctgaccccatcacggtgatgatcccagaagcagtctccaggacaatcctaaatttatggagactgtggcagagaaggctcttcaggagtatcgccaaaagcaccgagaggaatgagatgtgaacattgcttctccaaatatgggagggctgagttcctttgaccccaagatgagtgctaggcccctagagagagctctgcatgtcaccaagtgaccaggccttgcctcgaggcgctcctgtctcctaacccagctttccttcctctggactccgcactgtaacgcctacgtttgctgatcatgggaagaactcctgtgtgccactaactcaataaaaccgccaaggaatctgaaaaaaaaaaaaaaaaaaaaaaa

SEQ ID NO: 7875 - DNA, 575 bp, Canis familiaris
  misc_feature (1)..(1): n comprises a, c, g, or t, or includes no nucleotide
nattccgggagtggaataagggaaggattactggtccagttcattctgtgagaccagcattatcctgataccgagaccgaatgaagagacctgaatagggatccctgttgcagttttatatgccaataatgaagcagcaaaaagaaattaagagagacaattcgcatatatacttgcaccaaatatgatcaaatactttgtgataaacctaagccaaagaggtaaagacctttactttgaaaactataaaatatcaatgaaagaacttgaagacaacacaaagaaatggaaagatactccaagttcatggattagaagaacaaatattgttaaaatgtctatattacacaaagcatgctacacatttagtgcaatccctatcagaataccaatagcgggatccctgggtggcgcagcggtttggcgcctgcctttggcccagggcgcgatcctggagacctgggatcgaatcccacatcaggctcccggtgcatggagcctgcttctccctctgcctatgtctctgcctctctctctctctgtgactatcataaataaaaaaaaaaaaaaaaaaa

SEQ ID NO: 7876 - DNA, 577 bp, Canis familiaris
atatggggttgggtttcttgcggtgtgttttgtgaaagtgttccttttgtgttccgtccttttggtttaaaaagtttcacgtcttggtgccttttgtgtgatgcgccttgtctgacagcttgacatgtgcaattgtgagggatgtgctcacctctagccttaaggggggcagggagtgacgattcgggggaggctttgggagccaaataaggaagagggctgagctaagcctcggctctccagaatgtaagaaaacctaattttaaaccaaatctgaactctcaaaagtcgtatttttttaactgaaaatgtagaatttataaatatattcaggagttggaatgttgtagttacctactgagtaggcggcgatttttgtatgttatgaacatgcagttcattattttgtggttttattttactttgtacttgtgtttgcttaaacaaagtgactgtttggcttataaacacattgaatgcgctttattgcccatgggatatgtggtgtatatccttcagaaaaattaaaaagaaaataaaataaaaaaaaaaaaaaaaaaaaaaaaaaaaaaaaaaa

SEQ ID NO: 7877 - DNA, 466 bp, Canis familiaris
aacaaggatgcgtgcttattcctctggcctggcaggaagatggggcgatgagaggtggatgaaaaaatcagctacatcttcatgggatatttactcgtacttggtgctaaatcagatgcaacgagtcctggtacaacctgttatgaactgcctttgaacaccggcctgttatccaggcactcaatatagccagcaagtggttcttcggtatttttgtgggaaactttcttttgattttaaattcatgtgatcttcagatggccagctttttaaaaggattgcaggacacattattcttacaaactgtcggtaattgccttatttgaatgtattatgtgctttgctaaaactgtggtgaactactaagcttatgaatattactggctttcctggcatacatgactcttaatgtactaccaataaaattaaattcctagaaaaaaaaaaaaaaaaaaaaaaaaaaaaa

SEQ ID NO: 7878 - DNA, 508 bp, Canis familiaris
agactctatcgtccagagtcttccattacatggtacatttgcttcacaggtcacagctgacctgacctagggcaatgacgatgggaggcagttgaataaaccagggacaaggggccagagggaaggggcaggcaacacacaaaggaaggaaaaccaagctggcctcaggttttcagaggcaacaaatacagcagacccccacagaggagcagctgcagactcagggggcaaacaagctgtgacactgaatgatcctccaggagcgcaggccgcagaaggacatgcttgaatctgaacggctccccaaacacgccatccctgcaagtgtcgtggaaaaaatcatacaaagacctaagaggcatgagtcaagatctagaacagaggttggggaaggctttgcttttgctctttactttatttcacggggaccccaaactcaggaaatctgagccctcagacgctgctcggtcaaaaaaaaaaaaaaaaaaaaaaaaaaaaaaaaaaaaaa

SEQ ID NO: 7879 - DNA, 490 bp, Canis familiaris
gcctgagaacacggctaccacatccaaggtaaggcagcaggctgcgcataattacccactctctcgacctcggggtgaggtagtgacgaagtataacaatacaggactctttcgaggccctgtaacttggaatgagtccactttaaatcctttagacgaggatccattggagggcaagtctggtgccagcagccgcgggtaattccagctccaatagcgtatattaaagttgctgcagttaaaagctcgtagttggatcttgggagcgggcgggcggtccgccgcgaggcgagccaccgcccgtccccgccccttgcctctcggcgccccctcgatgctcttagctgagtgtcccgcggggcccgaagcgtttactttgaaaaaattagagtgttcaaagcaggcccgagccgcctggataccgcagctaggaataatggaataggaccgcggttctattttgttggttttcggaactgaggccatgatt

SEQ ID NO: 7880 - DNA, 606 bp, Canis familiaris
agagtagatcaagagtgctttggctagcatcctgcaaggagttgggtctaaacggtctgctccagcttcgtgctgctgctgctgctgctaatactgctgggaaggaagagtggctgacctggcatatcctttactcttggtgctgcagcagtcactcaggaagtgttgtttaaggggaaccttctggatccttttcatggcaccatggcaagaagaagctgtgtcttatctattgaagataaagcatggagttggctaatggatgctggtgagtgaataaggcaaatgggaagccagttcgcaaaggtatcttttgggaagggctgatctctcaaggactgacatggcacccgttggaaaacggcctctcacaatctgaacatcagaatgctgttttggagggaagtcctagttttcacactggtgacctgtgatcttttatatgttccctaaacgaagttcatatccattcccagctctcctacttgaagatcctaatcctgaagttggttagatccctcagtacgtaaaacacaattcgcaatgtgatttttactcttgttttccacttgacccagagtgatctaaaaaaaaaaaaaaaaaaaa

SEQ ID NO: 7881 - DNA, 544 bp, Canis familiaris
caattactgtgtctgcgtgaagtgatagatgaatacatggggctatcataggacttactcagacgctttacaggtaaagtctgaggaacgagacattcatagtgaaatttgaaggtctacatatatgtaaggtggtacacatgcatttaagaaagacctgtagaatgctctaaggtttcttctctggctcaccgttcaggctctgcacaaacagtaagtcaaggctaaggcagagctgtaaactagcctggcttgagtgtttaagatctgccccagcacacacactcacacagtccctcagcaaaaactaaagagatgtaggcggttccaggtatttaaaacaatatgtgtccagggatcccggggtggctcagcagtttagcgcctgccttcagcaccagggcatgatcctggagacccgggttctagtcccatgtcgggctccctgcatggagcctgcttctgcctctctctctctatctccctctctctctatctcatgaataaataaaatcttaaaaaaaaaaaaaaaaaaaaaaaaaaa

SEQ ID NO: 7882 - DNA, 583 bp, Canis familiaris
atcgtgcagatagcagtagttagcgtgtgtgtgtgtgtgtgtgtgtgtgtgtgtgtgtgtggtgaggattgagtgagacacaaatgtgcttctgaaaatttaacgtgtatacaaatcacctggcaatctcattcagcatggaggtcctgattcaagaggtctgagatggtgcatttctaataaactccctggtggtgccaaagcttctgaccctggggcatgctttaaggagctagttcatgtaaagtaaagcatctggaacagagcatggcatatgagacctgataatgttacctgctattatggttatttttcagccaaaaaaatcagatagggaccctgctttcatagatgccatagtctaatggcagatagctgagacagttgtatctaagatagttacagctgttaagccctgagataaggaagtgctgagcatctcaagagccattaagagggaccctaacttttaactaccaggaaggatttagtggggggcaggaggcgggaccaacaaagtctgagggtatgctctcttccttcctgctcctctgtgcaggatgttttaggaaaaaaaaaaaaa

SEQ ID NO: 7883 - DNA, 118 bp, Canis familiaris
gggtatgcttactctgtcttggttaatgggtattatgaggaaggggtagtaattggcctgctcagctctcactggaggttatttaaataaacttaaagacttaaataaacttaataga

SEQ ID NO: 7884 - DNA, 649 bp, Canis familiaris
taagcgctgaggattccaactgacctccacagggatacaggttgacttgatggtgatccattcatctattcacagctctgtgcccaacatggggccgaaactcaggacctcaagatcaagagttgggtgccccactgagccaactgagccagccaggcatcctttgctttatttcttctgggtactcccttgatctgtccagggttgagctctcccaaagcaacattaaggatggagcagcttgtttcctgtatgctaccccaaagtctccagagttaacaggtcctgttacctataacctgcttgtttgctgaaaggtccagtaccttgtgtgggactcaagaatgatttgaggaaccctaagccatttttctgttcagctccagtctgaggtctaaagaaagaaggatccctgggtggtgcagcagtttagcgcctgcctttggcccagggcgcgatcctggagacccgggatcgaatcccacgtcgggctcccggtgcatggagcctgcttctccctctgcctatgtctctgcctctctctctctctctctctctctctctctctctgtgattatcataaataaataaaaaatttttaaaaataaaaaaaaaaaaaaaaaaaaaaaaaaaaaaaaaaaaaaaaaaa

SEQ ID NO: 7885 - DNA, 614 bp, Canis familiaris
ctggttatcgggatactttgccagtgcactaatctcttttggagataaaattcgttagcgtgttactaaatggtaatatttcttttgcagaagatacagtaccgtgtctgaattaattattaatatttaaaatatttcattccgtaactcttcctcattgctttgcccctagcctattcagttcctttgtttggcagaattctgcaaaatgtgtgtcacccactactgagattgttcagcccctgatgtatttgtattgatttgttcctggtggtagcttgtcctaaaatgtgtgtagaaagcagatattttatgataaaattgttgtgtagtgcatgctctgtgtggaattcagaggagaaacccagattcagtgattaacaatgccaaaaaatgcaagtaactagccattgttcaaataacagtggtgctatttctcttttgtggccttttagacttttgttgccctaaaataccattttattgggaacccattttccacctggtctttcttgacagggtttttttctactttaaacagtttctaaataaaattctgtatttcaagagaaaaaaaaaaaaaaaaaaaaaaaaaaaaaaaaaaaaaaaaaaaa

SEQ ID NO: 7886 - DNA, 567 bp, Canis familiaris
gcgggtgttgaaaccgggagaggcgactgaagcatcgggtagtcggggctgtgatagacgaagggctgatcacgcggcaccacttgaagaagcgggcgtccagtgcacgtgccaacattactctgtctgggaagaagcgcagaaagctcctccagcagatccggctggcccagaaagagaaagcagccatggaagtggaagccccaacaaggccagtcaggactagtggaccacagcccaaacggcaaaagaagacaaaagcaccccaggatatagacatggaggaccttggagatgagaggggaatctctcaccccttccactagaagattctcagctggagccagaaagactctagttgttcagaggactttggagaaggcattgccccttttcattctccccagactcctcttccttcatggcctagtgacctgtcatggagggatatgttaagaggaagagagtggtgaagaaagactggagaacggggcccccttgcagtcagctccacttgtaataaagttctagagttctctttgaaaaaaaaaaaaaaaaaaaaaaaaa

SEQ ID NO: 7887 - DNA, 613 bp, Canis familiaris
agttggattacagaaaggccctttggaaatgaatggaaggcggctgcggacaccaggatccagacagaacagaccaaatgaggagttcgttgcagcacatcccagataccagctgctctgcctcaaatacggtgctcctgaagatggggaactcaaacacacagccgtttgtgctcaaaaaccagcttctaacactgaagataaaatatcctaatcaagttgatcagaaagtcctagagaaacaactgccagcctccatgacaattccaaaggtgaagggattgctggcacgtcttctcagagttcctgtgtcagaactcctgctgtcctacgaaagtccccaaatgcccggcagagagatcggactagaaaatgaccagcagtcattacagttttattctgtggaaagtggagactgtctattggtgcgatggtaactgggagtcactggacgtaaaagtcttacttggaacaattctggcagaaaaagaggttttacagcttgccctaagtacagaagaggtgatatttttcattggaaacagaccatttctaggcttgtatataacagcagtaataaaggctttgcacctactaaaaaaaaaaaaaaaaa

SEQ ID NO: 7888 - DNA, 633 bp, Canis familiaris
gcgggaaggtgctgccgccgttcagttccttcagaagagcatccatcggcacctggacgacatctccaaactctgtgactggaaccgctataacatccagtacattctggcagtgtccaggcagcggggcagaaagcgcccgtcagaaccgctgggcagcgaggaggaagcagacccgtccgatgacgacactctgcacctgctacgggggagggcagggcgatggggccgcgcagtcggtgtagggccggccccgtcccagccccgcttgtttggatgaagacccccgaagactggagcccgtggcctgggccccggaagcgagggagggcagtgcgcagggctgcgggggcaccggcccggaggactccgagccagacgcggctgcagctccggagccagccgctccccgggccagacacaggccttggcacacggccgggcacccgcgctccgagcaaagcatgagctctggcgtcatctgctcttggaaacgcctctccagggaggcagatgggttcgtttttatagacttgaactttgtaggagtgtaacttatattctttaatacagttgggatgatagatgaaaaggaggttttctacaataaaagtgtggagtaaacctgaaaaa

SEQ ID NO: 7889 - DNA, 673 bp, Canis familiaris
ggtgcagaagcttggcgaaccagtcgggctctggatgtgatccgcatccgcaagcccttccacactgacagtcctagcatccagggccagtggcaccccttcaccaacaaccgacaatgttgggtgggctacgcccgcgagaagtccaggatgctgcgctagcccaggcgcaagtgccgtaaagagttgccccaccaactacaatctcgggctctggactcttacctcagtggaagtggttcttcctctttcagaggaattccaagcccacgcaggcagatggagccccccaaaagagacactgacgccaaagcttttgcttgggataaagagctcttcattgctcaggaggaggggcagtgactttgttagtctcctaattcttccctgtttgacatccctgaaatctgaccattcaaggatattgcaggcatttatttctgaaatccagattgataagagtgatctcaaatcctggtgaggggtttcaaggttggcttcagaagagtccccaatgccctctttctacaaccattgagctagagagctagctagccccttatactgtgctgtgaacctggcattaggataaccattttatagctgtctgagtgtttagattagaaaagtaaggttaataaacttgcccaaggttaaaaaaaaaaaaaaaaaa

SEQ ID NO: 7890 - DNA, 619 bp, Canis familiaris
  misc_feature (59)..(60): n comprises a, c, g, or t, or includes no nucleotide
  misc_feature (63)..(63): n comprises a, c, g, or t, or includes no nucleotide
  misc_feature (98)..(98): n comprises a, c, g, or t, or includes no nucleotide
ttggcgtttaaagggctgcctttcccgttcaagagtttaaactaccaaccgttgcccanntgncataagaaattgcttaaaatacaggaccttcagcnagaatcttgaaaagcccagagatcccaagagccctccgagcaccacgcaagaagattcatcgtagagtcctgaagaagaatccactgaagaacctaagaatcatgttgaagctaaacccgtatgcaaagaccatgcgccggaacaccattcttcgccaggccaagaatcacaaactccggatggataaggcagcagcagctttagaagccaaatcggaggagaagggagttccaggcaagaagcccacggtagggaagaaaggaaagaaaactgttggtgtgaaaaagccgaagaaacctgtggtaggaaaaaaggctgcagctaccaagaaaccagcagctgacaagaaacctgcagaaaagaaacctaccacggaagagaagaagcccgctgcctaaaaacttatatttgtttattccataaaactcaaatcattttggacagctaattttaaataaagacctgatcaaagacagtgagaaacaaaaaaaaaaaaaaaaaaaaaaaaaaaaaaaaaaaa

SEQ ID NO: 7891 - DNA, 721 bp, Canis familiaris
agagagaagccacaaatgcacgagataatataagacgtttataattaagtcttgtcaagcaacattttattaccaggtttaaacccatgaggagaatgtctcctatctcgtgttaagttttccatgtctgccaaaaaatttaaaggaccagacactacggtattgcaagatactctttttttcttcagtgttgtgagtccacaagaaactaaagttgctggaaaatacacagtgcaaatgtgcatcaaccataaatggtctgcatcaggggaagaaaggcattcctgaggagcccaacacaggattaaaatgcagagaaaaaattattaagtttctaggtattccagcattgctccagacctttgaatttctgttatggatatcccatttatgagaattacaaaaaaataaaccaaacaaaccaattctgggtctcctttgcccagttggtttccttcctttctggtgtccttaattttccaatgcaacacctggttttgttgtacttaaatcatcacttttagaaacaagatactcacctcaaactctttgcatcttttaacttgttttgtttgtgtctctgatccttttataagcatttgcttggcaatatgcaaacgtagcttgcacaaggaaacacgtgcatctaacagttgtattgggcaatcctcctctttctgtgttaagaaataataaaagaacagaattgagttcaaaaaaa

SEQ ID NO: 7892 - DNA, 702 bp, Canis familiaris
  misc_feature (1)..(1): n comprises a, c, g, or t, or includes no nucleotide
naaaaaaaaaagttagtggtggcttctcagagtatagcagcatacgcctaggaaaggaccactgctctagaccataaacttggaaagagcagggacgtggtctgtcctgctcagtgctgttctcccaggaaggatttctttagggaaggaaaagttaggttgctgctcattcagtactcttcctatttgacagagacctgttgggatcagggcagaggaatttggctctctctggggagtgtttgctctccacatcccaggggtatgatccctctttcctggagccactcgctcttgtgcttcagatattttggtttgtgtatttccaaaaagatatgaaaaacatcttgtgctttccttgtctaatatcttcatttccaccctcaaaagttagtggatatttcaaaaagctttttattgaagtatagcataaagcgaagtgaatatatctaagtatagagcatggtggatttcctcaaactgaacatagtcatatgtctcaaatagaaatgctaacaaaggggatccctgggtggcacagaggtttggcgcctgcctttggcccagggcgccatcctggagacccgggatcgagtcccacgtcgggctcccggtgcatggagcctgcttctccctctgcctatgtctctgcctctctctctctctctctgtgactatcataaataaattaaaaaaaaaaaa

SEQ ID NO: 7893 - DNA, 547 bp, Canis familiaris
  misc_feature (1)..(1): n comprises a, c, g, or t, or includes no nucleotide
nagcctggcaggcatgaagcggacccgggcagaggccagtggggatagcgatgctgaggaccctggtgcccccccggagacagagggggctggccagcaggaggaagaggaggacgaagctgagtatttccgccaggcagtgggagaggagcccgatgaggacatgttcccgaaagcagcccaacgcggacagttcaccgggcccccaggcaagaagccacgaggaaaagagcggaggccagatggaggcacttaccacaggccttcaaaggccaagggcaagccccagcgggaccaggccaagctgggacggagaggagctgtccgggaccgcaggcgaggccaagctcgaccacctaagaaagtagtctgaggccaagctggagcagcggatggaatacccccaattggggccccaagacctgctttggacttccacctgggtctccaggagcagcccttggtttcctttcataaaggagcagtttccccgaaaaaaaaaaaaaaaaaaaaaaaaaaaaaaaaaaaaaaaaaaaaaaaaaaaaaa

SEQ ID NO: 7894 - DNA, 639 bp, Canis familiaris
tgatcagccaaaggagttcattgcgatactttaaatactgtctcagtactgggtgtttaaaggacacaatagctgctagaattcaggggtaaatgactgttgagaagacttcagaacattggggtttttaagagtcctggtttgtaacttcctatccagccctgccaccaataactcctgtgctcaccaggacccaggcccttggcaaggggagactccttggtggcactgtgaattacagatttgtttatctgcatttttgctatttatttaaatggtcgatcaacttcccacaaactgaggaatgaattccacaagcctattctgaaaatatggacataaacacttgctcgtcctttaaaggagttcaccagcacacctgttaacaagtcccgtttgcttccgtctttttttgtgagtaataaagtcaactgaccaagtgaccatgaagaggggctatctggggctcctgttttttagctgctgttcttcagctccgaccatgttgctgtgtgattatctcaattggttttaattgaggcagaaactgaagctctaccaatgaactgtttaaaaaaagacacacttttgtattaaaattgcttgcagtaacaaaaaaaaaaaaaaaaaaaaaaaaaa

SEQ ID NO: 7895 - DNA, 586 bp, Canis familiaris
attttttttttttttagctgctaacttttaagtcttcatttgcagttcatgtaacattttgtgtcttaaattacatgataaagcacgtcctgttaaaaaattctgggggggtatcgtggcttgtagaattcttttaacgatgtgatcttagatttttcttttgttcatgtggaatgcagatgggtgctatcagagcctctcccccatcactatagtgtaatatcattattacaccacactgaaatatattcagaattcgttttagctttattctttcttcagaggcgtttcagatgtaccgatgatactgtttcttgcactgcaatatataaacactccaaagtgtttatattggggagatttggggaggaagtatattcataaaagatgaaggctgtatctgtttattttgtttatcttcaattttttactggttcactgaaattcttatgaaggtgggatgaatttttcttgctgttcagtgctttattcttttcatctgttgttctgtggtcacagtgaccttagctatgtagcagactttcccaaatgtattgagtgcaaataaacagttacttagcagacc

SEQ ID NO: 7896 - DNA, 573 bp, Canis familiaris
  misc_feature (429)..(429): n comprises a, c, g, or t, or includes no nucleotide
ctaagaacacggacttgtatatttgtacccaagagagttttatttttctaaacaaaagaaaacataaagtgtacaatccaaacgggggtacttaaaccacacttcacagttccctagccagaaacatttactatggtggatcagcccttgttattttttgtgaactttggaaggaggacaagatcaatggaattcaaagagaaaccttgttcagaagttgcctttgtggggtttttgaaggaggttatgccaaatgtgaccaaaggactacatcgcattgtgctttttgattgaatcacccatagattcagtggctgtgcccacgtgtgggatgcgtgacaaccaggtgtaatgacctggtgtgtcattaaaccttggggggggggggcggtgtggggttaaaagtcactacctgtcaaggtttgtgtnttttacccccctgtaaatgatgtacccacttgtgtatatatttgttggtaattattttggtacttctaaagaacacccatgtatttattaaacagatttttacaaacagaaaaaatacaaaccaaaaaaaaaaaaaaaaaaaaa

SEQ ID NO: 7897 - DNA, 717 bp, Canis familiaris
  misc_feature (138)..(138): n comprises a, c, g, or t, or includes no nucleotide
ttggaatgctaccgatacatcaatggcaggaactcctccgatggtcctggtttatgtaccagcatgacactacggtgctatttaccccccatatgacgatgccaccgtgaatggtgctgccaaggaaaccaccgcccncttatgtgtctgcctgagcctgagaggggagtgaaactgggacctgcagcttgattttcagacgtcagagccatagttctttcatttcacttctgggatgagctctctgagcttattcgttgctgaaatgctccagttttaaaatttagatgttaagttgaaatcctctttagtgttaagcatatgcttcagctagagcatggtgatagaatcactgtagcattctttacatagggctggggcgcagtgggcttccctcgtctgtcctggttttccctaggcatggaaacctccccgcaattcggatgggcctggagtcagagaagcctggttttgtccctgctggacctcagaattagggaatgaaccacatttttttcttcatgttccctctatctcttctgagagtgtaaaataaaatcaaaattagataatgcttttcttaagccattctagtgtgtgaacaaacccttctagaacaggaatgtcaattgtgtaatcattgctctaattagctaaataggagttcgtatctatataaataaaacaagaatttccttaagattaaaaaaaaaaaaa

SEQ ID NO: 7898 - DNA, 628 bp, Canis familiaris
actatttctagtcatccggtactttgatctctgcacactaactagctaaagccatgatcagccttagaagtttttttaaatttagcacctgaggcagccactgtcaatcaatggagttactgttcagatgaaatctctttgttaatagtgtatgctttttagctttattataacacactacaactggttcagtgttttggactgttgagttatttctgaggagcctcaaaaaccacccaggtctctccaagtctttcatagcccttcaagtggttctggatttacttcaatatcttacactttcattaaccttaaggtgtgcttaaacttccaatccatattcccatctgaactggtagattttaagttattacacttcaaaaaggtaattacagtatggcactaaaatcacagacagaatatttggtatctttatgttatatggaatttttctgcagtgaaaatagacctaaacggggatgcctggggtggctcagtggttgagcgtctaccttcggctcaggttgtgatcctggggtcctgggatcgagtcctgcactgggctccccatagggagcctgcttctcctcctgcctatgtctctgcctctctatgtctctcatgaata

SEQ ID NO: 7899 - DNA, 655 bp, Canis familiaris
tggccagtgtaccataatatgttaccagaagagttattatctatttgttctccctttcaggaaacttattgtaaagggactgttttcatcccataaagacaggactacaattgtcagctttatattacctggatatggaaggaaactatttttattctgcatgttcttcctaagcgtcatcttgagccttgcacatgatactcagattcctcacccttgcttaggagtaaaacataatacactttacagggtgatatctccatagttatttgaagtggcttggaaaaagcaagattaacttctgacattggataaaaatcaacaaatcagccctagagttattcaaatggtaattgacaaaaactaaaatatttcccttcgagaaggagtggaatgtggtttggcagaacaactgcatttcacagcttttccggttaaattggagcactaaacgtttagatgcataccaaattatgcatgggcccttaatataaaaggctggctaccagctttgacacagcactattcatcctctggccaaacaactgtggttaaacaacacatgtaaattgctttttaacagctgatactataataagacaaagccaaaatgcaaaaattgggctttgattggcactttttgaaaaatatgcaa

SEQ ID NO: 7900 - DNA, 612 bp, Canis familiaris
  misc_feature (84)..(84): n comprises a, c, g, or t, or includes no nucleotide
gcttttcctcaggcggccagtgcacaatggaacgtttcctcctagtttataggtgatacagccctccatacttcctgaatgtcnattcaggaatgtgtggagggtggggagtggaattttgtgtgaaccatttcatggatgataaaaaagaggtatgcatagcaacttttttcctattgtgcattttggaagcaagtagccatagaacatacacacactaacatactatcagctcgagtggggacagtgggatttatgtgaacattaggcaaagccatgagatcaaaccatccaaagccttctaccaatgaggtacaatcacctggtttctaatcccaaatgttttcctgagacacgagcagatgtgaaaatgtcaaatactgcacataatggattgaggtgggagcagaaagccagagccatctttctatctggcacttcctatgtgctctgtgctttatataggcatctaaaatgctttgttaatctgatttgtattttgaggttgcgggcagtttcctcctctgacagccaaaacagaactctatcacttttgagagtcacgaccaagtttgctcaacattaaacactacgttatctcaaaaaaaaaaa

SEQ ID NO: 7901 - DNA, 630 bp, Canis familiaris
ccctcttcaccttcgaaggtggattggtatcagcttagaagagattgagagcattgaccaggagataaagatcctgagagaaaagactcctccaaagaggaatcaacttcttactcctctcatcaggaccggcctcccatgaaacccttcgttctcacctcggaatgtggcccaagcccaagtatttggagcaggttatccacagtctggcatctatgacggtgaatgactggtacgatcagcatcagaaatatggagtattaccagatcagggcgtagccaagacaacaccagagctccaaagaggtacgcagcaacaggaagatcaggaaccaaaggaggacgaggatgatgagcaaatgctccacagagctcgggagtgggatgactggaaggacacccatcctcgtggctacggcaaccgacagaacatgggttagtcttcccacaacacagatggaactacaggggctcacatcttccctgccaaggaaagctgtgcagtcttccctgggctcctgcttcagctgtgtacaacgagggccaagatgcttaatcttgctttgcgttcaataaagtgtcaagccattaaaaaaaaaaaaaaaaaaaaaaaaaaaaaaaaaaaaaaaa

SEQ ID NO: 7902 - DNA, 614 bp, Canis familiaris
gaaacagctatgaccattaggcctatttaggtgacactatagagacaagtttgtacaaaaaagcaggctggtaccggtccggaattcccgggatagcgaagcggtgaggcgggtggacgccgagtttcccgttttcgtcgtgcagacaacgtcactgcagagatggtcaatgttccccaaacccgaaggactttctgtaagaagtgtggaaagcatcagcctcacaaagtgacccagtataagaagggcaaggattccctttatgcccagggaaagaggcgctatgatcggaagcagagtggctatggtgggcagacaaagcccaattttccggaagaaggctaaaaccacacaagaagattgtgctgaggcttgaatgcgttgaacctaactgcaggtccaagaggatgctggccattaagagatgcaagcatttcgaactgggaggagataagaagagaaaaggcccagtgatccagttctaagctttgcgattttgagaggaaaatgttgacgctgtagaagaattacgcatttgaaaataaatgcagtgatacttttactccaaaaaaaaaaaaaaaaaaaaaaaaaaaaaaaaaaaaaaaaaaaaaaaa

SEQ ID NO: 7903 - DNA, 597 bp, Canis familiaris
ccataatcttggtccatagtatttacctcatttttgtctgttttgctgtgggtaagctttgtaagataaataatgtctatacatgtttcaactgtttaatgagtaatcagcaaatctgccaaggagtccctctggaaccatataaagattctggctctgaataaaccagaagtgtttgcccacatggcaaatgatccatgttaaatgtaaatccttttttagtgtttaacgtctgttctcataagcaggtgtattatgatgaaacatgtaccaattctgtcatcactgtgatctttaaaaaatctgcatttaatagtctaattaaggaactaagttgatttttttatttgccgtaaaccaagcaaaattaaatgcaataatttctgagacttatggcaaatgaattggaggtatggataaatctttcaaatattttttactgctcttcagtaaagaaaggcacaagaaaatacccaactctcttgtgttatctcagtgttgctactgcagaaaagtgacaatgcttacttgtgtaaatttatggcttactgtcaaagcttcattcttggctgcatgttgaaaatgtgattaaagtta

SEQ ID NO: 7904 - DNA, 651 bp, Canis familiaris
ggaggctctgtgcttcgtgggcacttctctaggctctggggagctcccggaagctggccttcatgctcgcacaacagaagcagctccctgcccgtctgggcaccacggaccatcttgaaaagctaggagacaagaagacgccatccaagctaggtggctggtggtctagatttagcttggggtccaaaagtcaactttgctgaagaacgtgcctgagggtccagggacatgcagtgctgggcatcgtgatgctgagcaaggagatccagcccgccagtccagacacaggacacgtgcgagatagtggtcagcacctgcggccgtgatgctcccaattgccggggccaagaatggagtttgaagatcagaagctttatcttggtccaggctttcacctcaggcagctttgtgtccccaatgtctccagacgaagagaaattgcatttttagaaaatccacatctgtgtaattaaaaatctcggtgcagggggcatctgggtggctcagcggttgagcatctcctttcggctcagggtgtgatcccagggtcctgggatcaagtcctgcatcgggacttgggagcctgcttctccctccgcctgtgtctctgcctccctctctgtgtctctcaggaatcaataaataaaatct

SEQ ID NO: 7905 - DNA, 559 bp, Canis familiaris
cctctacacccaatgtggggcttgaactcgaccctgagatcaggagttgcatgtgccagcccagcgccttgctccgaatggtaaaggactctatcacatatccagctggtgacaatgtagggcagcagaccaacatctccaggcctgcatcatctgggttctcacaccgagctgttatcatgagtataataaacctactccattcctgagccctcacttctaactctgcccgaagaatctgtctatgacagagatacagtcaatgacaccgacttgagatgccctagcctcctggcacccatattcctagttctgatttctgtggcttcccatcactctgttcttctggacccaagtagctccatcatttattttcctccagcccgagccctgggagcacctgatgactgaggctaatatccttagagtgatcttatgacccaatggcttctggccattactctcagtttagaaccttgtgtgtaggaaggacacagtttcaaaatgccctaaaaataatgagatcaaagataaatcttaaaagcctgaaaaaaaaaaa

SEQ ID NO: 7906 - DNA, 563 bp, Canis familiaris
atctctaccctagcagaaactaatcggagcccctgtcgactttaactgaaggagaatccgaactagtctctggatttaacgtagagtatgcaagcaggtccttttgccctattctgtctagcagagtacgcaaatattattataatagacatcctcgacaacaattctattcttcggcgcattccacaacccattcataccagaactctactctattaacttcactatgaaaccctcttattaaccatctgcttcctatgaattcgagcatcataccctcgattccgctacgatcaattaatacacttattatgaaaaaattttctacccttaactttagccctatgcatatgacatgttgccttacccattatcaccgcaagtatcccaccccaaacataagaaatatgtctgataaaagagttactttgatagagtaaataatagaggtttaaatcctcttatttctagaataataggcttcgaacctaatcttaagaattcaaagatcttcgtgctaccaaacttacactatattctacaaaaaaaaaaaaaaaaaaaaa

SEQ ID NO: 7907 - DNA, 624 bp, Canis familiaris
aagcgttggaagtggctgaatacaggaatgggtctctctgcttgcagctctgtgctggtttggttggcacacccctagggagccgcctcaaaggctggctcactcctccggctggcaatgccaagcatgaagagtgcatcactgtgcagatagctccagaggaggtcccaggtagccctcccggatcacatggacagagtagaggagtagagggtctccaaagaagtgcacagattacccagaaaggggcacttaggtaaagtattcataaaaactaaagtctcccctagctcagctttaggaaatgtttcagctttattaaggtgttctcttgacaaaaaaacacttctctacaaggcagattttagacttggaaatccaattttaaataactgtattcttttaaagaggggtgccaaaaaaagaggggtgcctggatggctcagtcatttgagtgtctgactcttgatttcaacttgagtcatagtctcagggtggtgagattgagccctgcattgagctctgcacagagcagggagtctgcttgagattctctccctctccctgccctaccctcccccaccccccttgcaaatgcatgtgcatgctctctaaaataaatct

SEQ ID NO: 7908 - DNA, 503 bp, Canis familiaris
tgagaccaccaatggcactttcctcagtgctgaactggcctccaaccctcagggccagggagcagcagtgcttccggaggacctcggcaggaactgtgccaagctgctgctcgaagaaatctataggggtggatgtgtggactcaaccaaccaaagcctggctttgttgctcatgacccttggacagcaggatgtttccaaagtcctgctgggacctctctctccctacacgatagagtttttgcgacatttgaagagctttttccagattatgtttaaaattgaaaccaagccatgtggcgaagaactcaagggtggggataaagtgctgatgacctgtgttggtgtcggtttctccaaccttagcaagactctcaagtgatactcttacctgataaggtcccagcgcctacaaacaaagcagaagttgccatggacacccaaagagatcaagcccagattcatccaggacaggatatgctcttatattaaggatttgttaa

SEQ ID NO: 7909 - DNA, 145 bp, Canis familiaris
taaatgaaggagtcaacacaagcaaggttgccaagagtattgccagatcctaactctctctgacaggtggaaaactttttgtcctttgaagataagcactaaggatcacgtagttgaaaagaagaaggcctggatgattggagaa

SEQ ID NO: 7910 - DNA, 595 bp, Canis familiaris
ccttggctaagattagggaccaaggacatatggaatccacaggaaaaaatacccttggtgccaccaacccattttatgccacatgcaagttttgaataaggatggtatagaaagcaacttgctacgtatatatgttccgattaaaaatactggtgctcgtgagagggccagaatctttatatggaaaaactttcgaaaatcataaaaatacaagatagtgtggctgagatggaaacaggccttattcttgatttcccaattttcatctctccttttcctatttggatttctttggtgctgtagaaaaaaaagaagagaaaaatatatattcataaaagatatggtgctcattcccatccatcaaggatgtgctaaaacaatgtgtttaataaattgttaattattttatgtacagttctatactgtatctatgtgtccatttcccaaacttgcacgtgtctctgaattccatctgactctaattttatgacaattgcagaactatgatggcaataaatatatgtattatgaaaaaaaataaagttgtaatttctgatgaaaaaaaaaaaaaaaaaaaaaaaaaaaaaaaaaaaaa

SEQ ID NO: 7911 - DNA, 629 bp, Canis familiaris
gtttagcaccgcctttggcccaggtcctgatcctggagccctgggatcgagtcccgcgttgggctccatgcagggagcccgacgtgggcctggatcttgggacttcaggatcacgcccgggactgaaggcggcgctaaaccgctgagccacctgggctgcccaggcagctgtctttgaataatgtattctttaatagcaaaaatagaggatagcatacattagaaactccttgttttgccagcaaacaagttataaaagtagaaattatgctcccaggcatatgttatatactgaacagttactcaaaatgtgtagatttcaagaaaactattttgactttggaagtagctatgtgagcttgtagtacagaatcataaagccaccagggactttgaggaaatatacttcttactgtttcctttatgcaggactttcctaacccatcttggaaaagtgagactcatattttattatccagaaatacagatatatggttactgatcagtagttttgaggatgattaatgaaacatggctggctgtcagtgacactgcatttgaggaatgttgctgcttagaaacagagggaaggcttgaaaggttagaaacacctgttggatgccaaaaaa

SEQ ID NO: 7912 - DNA, 502 bp, Canis familiaris
tagcagaagtttaaattaaagaactagaagtaagtttgagtaaatattgacagtaaatttgaagaaaaagcagtaaaatcctacctggagcggagtgtaaaggaagctgaggacaacatccgggagatgctgatggcacgaagggcacagtaggaaatctccagccgaagcttcctgccccctcccattcctggcaagggcaggtgggaggcccacatggagaaacttctcttctgcccgggtggactttttatttggatgatctcataaccctgtgttttctacttcaccatgatactctttcagaccccagttctgtattttttatcctggctctgtctgccacccctgtccagaacacttttctccctgggggtgagtcacaaactcccaggagagggagatgggagccatacagataggggagctctgcccaagcctatgaactagttatgctccttagaccaataaaaggcatgtgttccccccaaaaaaaaaaaaa

SEQ ID NO: 7913 - DNA, 435 bp, Canis familiaris
agaacagcaacgggtggcagaagctgtgggtggtgttcacgaacttctgtctcttcttctacaagtctcaccaggacaatcaccccctggccagcctgcctctgctcggctactcgctcaccatcccctcggagtccgaggacatccacaaagactacgtattcaagctgcatttcaagtcccacgtgtactacttcagggctgaaagcgaatacacgtttgaaaggtggatggaggtgatccgcagcgcgaccagctcggcctcccgcacccacattctgagtcacaaagagtctcatgtatattgacggcgggacacgtttgttgattggctcagcggtggctgctttcctgggagatgcttcctctcctgtgtattaatgaagcctagtaaaattaacacctgtctggaaaacagaaaaaaaaaaaaaaaaa

SEQ ID NO: 7914 - DNA, 673 bp, Canis familiaris
attcccgggattgagcaggaggcgccaatcatggcgagtcagacatccgcccacaatcgaggacccgaaaggttcggcgcaaaggagcccaagagccaggacatctacctgagactgttggttaagctgtacaggtttctggccagactgaaccaactctacctgtaaccaggttgtgttgaagaggttgttcatgagtcgcaccaaccggccaacctctgtccctttcccggatgatccggaagatgaaactgcctggccgggaaaactaaatcagctgtggttgtagggaccataacggatgatgtgcgtgtccaggaggtgcccaagctgaaggtgtgtgcacctgcgcgtgagtagccgtgcccggagccgcatcctcaaagctggaggcaagatcctcaccttcgatcagttggccctggactcccctaagggttgtggcaccgtcttgctctctggtccacgcaagggccgagaggtgtacagacactttggcaaggccccaggaaccccacacagccacaccaaaccctacgtgagatccaagggccggaagttcgagcgtgccagaggccgcagggccagccgaggctacaaaaactaaccccagatcctgccttgttattaaaaagattttgaatgcccaaaaaaaaaaaaaaaaaaaaaaaaa

SEQ ID NO: 7915 - DNA, 582 bp, Canis familiaris
aaccctgcgaaagggacttcgatcacatcgaacgtgagaattcagtcttcttcggaaaggagaagaagaggctccgagttgaccaatggttgggaaataagtaaagaactggctaccgttcgcacgatctgtagtcacgtttcagaacatgatcaagggcgtgacactgggcttccgtttacaagatgaggtcggtgtatgctcacttccccatcgaacgttgttattcaggagaatggttctcttgttgaaatccgaaatttcttaggtgaaaaatacattcgcagggttcggatgaggccaggtgttgcttgttcggtatctcaagccccaaaagatgagttaattcttgaaggaaatgacattgaacttgtttcaaactcagctgctttgatccagcaagcaacaactgttaaaaacaaggatatcagaaaatttttggatggtatctatgtttctgaaaaaggaacagttcagcaggctgatgaataagctctgagttgtccagcaacagaaacagcaagatgccagatgatttttcagacttatttgtgataccttaagaatgcaataaaaactaca

SEQ ID NO: 7916 - DNA, 628 bp, Canis familiaris
  misc_feature (27)..(28): n comprises a, c, g, or t, or includes no nucleotide
ctttttgcccttctaaatgttctcttnncagtcaagcttcacaaggcctgaccatgcagaggcggctctgcttctccagcctgcagaaggcgttgtcattggtaaacgcgggttggagaatgcccattcccacaaggttctttgggaacaaggcaacttccaacttcttgttggttcttggaaccaaggcaagtttggccccggaattcattggtttgggttctgggcccaaaaccggtttctttccagttcgggtaaagcggccaggggcagggccaaaccaccgtgtgatccttgggctcgtcgcacacccactcctcgcagcatttcccgggcagcttgaccctccgcgggaaggggcagtcggggctgggcaagcggacgtccatgctgcacaggggcacgcagcccaccgccccgtccaggcaggtgcactggtacttgcagctgctctggaaggactctccgctccggtacacagttcctccgaagacgcagggggccccgtctttagccgtgcacacgccgatcttgcggttggccggggagccgaagtcgcaaaagaggcccttgtgcgggtcgcaggggtcgcgctccgtgcacagctcgcccagctgcttggcgcaca

SEQ ID NO: 7917 - DNA, 549 bp, Canis familiaris
cccgcccgccttcccctgtccatcttctcctccgcctgccggagtcgcagtcgcagtagctgtcacctcaagacccctcggctcgggggagcgagggggacggcggaggggggaagccaggaaggtgcgaacggcgcttgcgcaagagccgtcgccgagctcagaccggaagtcagctgcccctcccgccccacccggaagtcgcttcccgggacgagctttccctgcgggttgtcacctccagcggctcttccggcggcgccttcctcacggcccgtgcccctgtgggaaagtgaggtcgcgcggatcgctagagccccgcgtcgtcggaggctcccttgactttgaggactgggcagccggaaaactgaaactaggaaattcctgcagtccaggggctcgctcgaggtgacccagagaaaagagaagaaagtgtcactcactcgcgacataaaaggatgaaatcaacatactcctttggggtatcaccttatgcacgatctctcctgcatacttgtcctcaaactccaacaaaaggaccgaagcgca

SEQ ID NO: 7918 - DNA, 635 bp, Canis familiaris
acagattatttctcagcagttttaaaaataggaccccgaagtgggtggaatacgttccaagtgcttcaaaaatcttggctgacttagaactgcatatcctgcaaattttgtatccctccaggaaaggggaccaaatactcagacaaacaaaagttgagagcgtttgacatcaaaaggtctttatcagataaagttctaacgggcgtatgttaggcagaaggatactattcccacaccgaagttacgacacgtaagaagaaaagaggaaagaaactggtaaattcgtgagaaaacctaaacaaacactgactgcatgaaacagcaataatatattctgggttggcaatgcaacaacttaaacccaagaaggcaaacaactgcagataatgtgacctaatgttcctgttgtgttagggcacctgggtggctcagtggttgagcgtctgtctgcctttgattcagggcgtgatcctagagacctggatcaaggcccacatcgggctccctgcagggagcctgcttctccctctgcctgtgtctctgcctctctctgtgtgtctctaacgaatagataaataaaatatttaagaaaaatgttaaaaaaaaaaaaaaaaaaaaaaaaaaaaaaaaaaaaa

SEQ ID NO: 7919 - DNA, 597 bp, Canis familiaris
taagacactgtcccgacttaaagtcagttaacttcacctgtgtgatagctattagagtggttttctgtccttatgtttcatttacataagaatatttcgttattgtttcattttctcatgttaatttaggaacacggtataaaatacacaccagttgacctatgctaacttctgcacttgacataaccatttttattcattcctacaggagacattaaatgtaaaagatggtcaattttgaggagcaaaagggtgctgagatgactttggtaggattggctggtgctttctcaaatggatgtcagagtttattactagtaaagaaaaagaaaatgtaatttgcattattgtgtcatttttctaagaaaaatcttaataggggttctttagatgtctctacaatgttttcctatctagtggtcattttaggaaaattgataatctgtagaatgaacaattacattttgttattactgacactttgttaaaaaggttgtattgtgtcttcaagttgtggcttaaagtgtaaacattatgatactattcattcaaatacaatgatgcctatgatgcactcaaatagcattcgttctgtgt

SEQ ID NO: 7920 - DNA, 621 bp, Canis familiaris
tgaaagagcccagagggaggaagaagccagacgactatcaggagctcagtatggctctttcccaggtggctttccagggggaatgcctagtaattttcctggaggaatgcctggaatggcaggggggatgcctggaatggcaggaatgcctgggctcaatgaaattcttagtgacccagaggttcttgcagccatgcaggatccagaagttatggtggccttccaggatgtagcccagaacccagcaaatatgtcaaaatatcagagcaacccaaaggttatgaatctcatcagtaaattgtcagccaaatttggaggtcaagcataatgcccttctgacaaagcccttgctgaaagaaaagcaacttcgatcacctaatggatgtcgcaataatacaaaccagtgtacctctgaccttctcaagaagaaagctggggtgctgtgaagagaatccctacccctctgccccacatgcaactgaaacattctacagtggtttgccattagggtattcattcagataatgttttcctactaggaattacaaactttaaacactttttaaaccttaaaaatatttaaaaacattaaaagagaaaaaaaaaaaaaaaaaaaaaaaa

SEQ ID NO: 7921 - DNA, 522 bp, Canis familiaris
  misc_feature (1)..(1): n comprises a, c, g, or t, or includes no nucleotide
naactgaggacctctccaagctgaggatcctcgtctgtaagagggggatccccgctccgtggcttgttggggatttaagtgagaaacacttggaagtgccttggccagtgcctggtgggtgggtgctccttacacctcttgctttcttttctcttggtgggggcatcactacaccgcactacagagggcgccccccaccctgaagctcttgctgggtgaggggcagatcctccccctaccaggggtggacccataactatgaaaaacccagcctctggtttttcagcccaagcattaaaaactcctcaacctgggcagctgggtggcttggttcagcggctgccttcagctcaggtcgtgatcttgggctccccactcaatggggagcctgcttctccttctttctttgcccctctctcttctctctctctctcataaataaaatctttaaaagaaaaaaaaaaaaaaaaaaaaaaaaaaaaaaaaaaaaaaaaaaaaaaaaaaaaaaaaaaaaaaaaaaaa

SEQ ID NO: 7922 - DNA, 501 bp, Canis familiaris
ccagggcccctgcagttcgaggaggggccccgtgagaactctgagcccttccgtgttggcccttcctgcctcctcccttttgcccggcccccatgggcccgtgctttggagaccaggcccccaaacatgggtgcccggctgacctccagggtggctacccggggaatggtgctgccactgacctggggacagccatctcctacccactgtcttgtctgctcccactagggcttgtctctgtcctcccaggatgctggagagagccccaggccagcccacagtgccccgtgccgggtgacagctcggtccacgtcgccctggtcccttctgatctgcaccctggtgcctggcccatctgtctcctgcatttttctttcctgctgctgttttgtaaaaagaaagaaggaaaaagaaacccaaacaagggagagtaatatataattctctcattttttgtaggtctgtaataaagaactttatgtgaaaaaaaaaaaaaaaaaa

SEQ ID NO: 7923 - DNA, 617 bp, Canis familiaris
  misc_feature (1)..(1): n comprises a, c, g, or t, or includes no nucleotide
nagaggaaaggatagtacacatatccttagacacaaatctggaataaaacagaaagcacgttcaagatagatcaaattccctcagagaacttgtgttggctaattccttttccttttggagatgaggcttctgtggcctactgtccatttatttatggcctctgcatccgggctgcttaaataacagccatgattgaggaatactgcagaggagatgcttgtccttttatagtgatagtcttctgtaagatgagaagtttgaaccggaatgatcactggattatgtctaagatttctttcttgatgtactatgtatgagtctcttcttcccttccctctttgtgcttcaggtgataggcctaggaagtaagagaatgtgcagtatactcgttactcttgatataaaagccaatggagggatccctgggtggcgcagcggtttagcgcctgcctttggcccagggcgcgatcctggagacccgggatcgaatcccacgtcaggctcccggtgcatggagcctgcttctccctctgcctgtgtctctgcctctctctctctctctctgtgactatcataaataaataaaaatttaaaaaaaaaaaaaaaaaaaaaaaaa

SEQ ID NO: 7924 - DNA, 617 bp, Canis familiaris
attgcagatgattatgaccaagaagaaacttgtgaaagctttcaaaaagaaatttgcctgtgaatggtactgtgattgaacatcctgaatacggagaggttattcagcttcaaggtgaccaaagaaaaaacatttgccagtttcttttggaggttggcattgtcaaagaggaacagcttaaggttcatggattctaaaatgaacctaaatgcgtggagaatttcttgaataattttgttctctaaacccagtttggctgccttgtgaaatgattctctgcagtaaacggacttttcatgtatttaatcattcaaactcccattcacatctgcatgattacagaaaacatggggtatgtaggctagtaacacataagaaaattgcagtaagatggtaatgagaccccgtattcatcttaacatgtttccaatggaaaatattttgttttgagtgtttatttgttcggtttattatttttcacttgattaaatgtttttttgttgtattaaaccatgtatgttgcagcttaacaataaagaaacatctatgaatccttttgtgagcagttaggctcccaaatctaagcaagtaaaaaaaaaaaaaaaaaaaaaaaaaaa

SEQ ID NO: 7925 - DNA, 129 bp, Canis familiaris
  misc_feature (1)..(1): n comprises a, c, g, or t, or includes no nucleotide
nccggaaaatttactttttttgtttgtatcattccttcaaataaagtaatttggtaccccaaaaaaaaaaaaaaaaaaaaaaaaaaaaaaaaaaaaaaaaaaaaaaaaaaaaaaaaaaaaaaaaaaaaa

SEQ ID NO: 7926 - DNA, 542 bp, Canis familiaris
caagcccaagaagtgtgcccggcgtttcactgactactgtgacctgtacaaggacaaggtcatctcactgcctgagctgaagggctgcctgggtgttagcaaagaagtaggacgcctcgtctaaggagtggaaaaccacagggcaggtggagagaccagggaggcaggacggactgcccgatgcccaaccttcaccagctccccaggcccggccacatcccatgtaacatgagtggtgcccaccgtgtttgcacttttgataactctcatttgcgtgttttctttctggttgcatttttaaacaccagtatctaataccacagtgggaaaaggaaagggaaaaagactgtttattctctctcttattgtaagtttttggatctgctactgacaactttgaggggtttttggggggcgggtttggggggagggtgtttgtttcggggactgagaagaaagagatttatatactgtacataaaaatatatgtaaattgtaaaaaaaaaaaaaaaaaaaaaaaaaaaaaaaaaaaaaaaaaaaaa

SEQ ID NO: 7927 - DNA, 578 bp, Canis familiaris
gtggagtacaatggcactgtgatatctgtgtggtgtctaagtaacaagagactgcagtggacgtggtaccgacttcaggaatcaccagcaatgagcgagggaagaacaagtgcagcctcctgtggttccgttctccccatgctactctctcggttataagaaatggtgttggctctcctgtcacctctggctgcaaactgatttttgtgtcatttactataaataggcaagaaattaaattctgaagacttctcctcgaatttaaatgtgtagacaactgtcacagaagggggtctaacgtgacctcttccctctagacgctgagagttggcagttagatgattaaaaaggaacatttaaggatggaccttaattttttctgtaacaatatgataacttttcacattgtcttttactgtagccactttatacaacaagtattttctatatatttcaacaaaaatatggaaccatttaatgaaactttatagtccttaaacgttgctgaacttttgccatcttgcaatagaattggaatgtaaatgttaaaaaaaaaaaaaaaaaaaaaaaaaaaaaaa

SEQ ID NO: 7928 - DNA, 636 bp, Canis familiaris
aagcctagatgagagttcaattgagtttggaagcatctggagtcccattgaattcagatcatcggtagaatgttctagttctgtggccagctgcttagagctttactgcatgtattctctcaagaattttatccgttttgtattttagaaatgtcagttgctgcattcctgaagtctttatttgcaatatgagcttatagactatccattccctttgggtggattgttgtttgacttgtgaatgaaaaaaatctcttaaaccacaccactattgaatgaaaatattgaaattgtatctgtaagaaacatttaaagaggagatatattagttttttaattggtattttaatttttatatattcaggaaagaacagaagtgattgaatattgttaattataccactgtgtgtttagaagagtaaggagcagtcagttttcatatcaatgacagcatttaaggtattgttctgttgaataaaacatatgacctggaattattttactgtttcagtagtattacctgtattttctcacttgtttggatgatttccggtgaatctgtgtcaacagttccttttaaatacaaatcaataaattccaaaaaactttaccaccaaaaaaaaaaaaaaaaaaaaa

SEQ ID NO: 7929 - DNA, 504 bp, Canis familiaris
ctggcccggggcctgcgcgagcttccagccttcaaaagcaccggctttgctcacctggcatcagccttgcttgcaaggtcgcgatcacatctacctccaaagacccctggggagtccacctgccctcgttgcctttccgctccagactcctctattctgaagaggcctgagactgccatggggaacagaagagctgggctcccccaacccatagaccccctcactccagcctcccagcacgacaaaaactggcttagcccacttctgtcccttaggtcaggtgcacagaagagtcccaagcctcgtaggttccctaggaaaccagactcagctcgtgtaaataggctaccaaccacacaaaatgtcacagcctgattcacaggcctcagagcaacaacagtgggtttgtctcaccggaatacttggaattttattttttcaagtaaagttttcaataaacttgccagctgttaaaaaaaaaaaaaaaaaaaaaaaaaaaaaaaa

SEQ ID NO: 7930 - DNA, 594 bp, Canis familiaris
  misc_feature (285)..(285): n comprises a, c, g, or t, or includes no nucleotide
  misc_feature (362)..(362): n comprises a, c, g, or t, or includes no nucleotide
caggtgggacacaacagcgacagcagctcaaaggagggcacttctgtctgagtctgctctgcgggaaaagaagttcccagttcaacgttaccaaagtgcctgacacattccgttacaaagttgtatgagccttccaacacaccgttatccaggcccaacctccagtagctctgagagaaggccatgagagactcttagaatctacagaaatagaccttccagacccctggttttgtaaaagaacctttgtcacatttgataaacactattccccaagggaccagncctgggaccaccaccgagcagacgccaaagcccgttaccagctctgtgacagaccccagggtatgtgctggggagcncgggacgctgggtatctgtatgtcaatcagtgcaattgttttcttcccctggcttgggggtcaggaggcgagcggcctggtggtgagtctccagggctgtggagcagactggaggggcccagcccagccggggaggcagcagcccctcacccccgggggaagttgccagcaagaactgatgtgtgacttcctggatgttaatgccattaaaaccaacattgttgcccggcaa

SEQ ID NO: 7931 - DNA, 673 bp, Canis familiaris
  misc_feature (166)..(166): n comprises a, c, g, or t, or includes no nucleotide
  misc_feature (193)..(193): n comprises a, c, g, or t, or includes no nucleotide
agcattagccactcctgatttacctcctcttctctattatctgagttcactgtatactgcatcctatagctttaggagcagttgaggaacggccctggaggaccaaggtgatctggcccaatagcagtgcatgaggctgctgctcttagcccaagctgcaaacttnagaatcttcttgggagactatgatgcntggttccccaggccccacttcccaatagctattggaattctggatctatcggggctgaagccctgagcacgtggcatagtttgaagagcttattctgggtaacacttgctgttgctcgccactaggatggaggaaaccacctgagctacattttgagacgggtcacatgttgtataaacggagttttcttgggagagagaccccctgtttaagcccggtgttcttgggttcccaaccccagggttcaaaattggccaccggccaatttgtcatttgttaaccagattgtatcattaatagttgtgttacaataagccaggacagggtttagttgagctccactttttatttccagcttctgccaaggattcatctattaggatatgaagtctgtgtgtgatgggggagtgttcaaaataatcattaataaagatgacttacttaacaaaaaaaaaaaaaaaaaaacaaaaaaaaaaaaaa

SEQ ID NO: 7932 - DNA, 628 bp, Canis familiaris
caatatacagcctcattacctcaggcaagttatgtcctctctaaactgggatttcttaatctgtggggccagcgcttgttcctgccttaaagatgtggtgacaattaaatagaattttataagagcacttctcataacatctggtacttagtaaacattaaacatgtcttatttctcaattagtagtatccttattcctggttttgtataacttttaacgtgaatgtggccaggataccatgagggaagtgaaactttacttcttaccatcttaggtttttagctgggactcttaaccaaaagacagattagcaggagacagtttgttaacacatgcagaatccatcatacgggagaaaagtaacgcaaagtggtagcttagaatttaaatttatatagcatcttcaacaaagaacagtaaatgtgtaaagaagtgaaaggaaagggttacttgggtggctcaactggttagacatctgccttcagctcaggtcatgatcctcgggtcttggagtcaagcctggctttgggcttcttgctcagtagggagcttacttctccctcttctcctcctacttgtgttctcttgctatcaaatgaataaataaaatcttaaagaaaaaaaaaa

SEQ ID NO: 7933 - DNA, 230 bp, Canis familiaris
  misc_feature (92)..(92): n comprises a, c, g, or t, or includes no nucleotide
ttaagcggatatcagggacatccatagctttcaaaaatatgtgcttccaaaattgccaatgagactacaagctgtaacccacgtaacttacnggtgtaaacttaagtagcattttaaagtgttttcctgaacactgatggaaatgtatagaataatatttaggtaataacgtctgcatcttctaaatcatgatattaaaatataatggaacccaaagagaaataaataaa

SEQ ID NO: 7934 - DNA, 399 bp, Canis familiaris
agacaagttgaggcaccagaggatacaggacgagaaccatcctcagtcacctagaagaggtttctgaagactgtgagaaaaggagctcttttcagaagaggtatcctgaggatcgtgctttcagaaaatacggtcacacatcaaaaagacccaaagatgtggagaggtatgaaaacagagagcctgccaggaacccacagtggaagtttgggcattctcttccatcttaccaagagaagaaggagcagcggaaccttggaccatctcatcgacatactcagagggaacctccagagaccagttcagcaaccagggtatcctgtgactatcgccacaaacgtcgtaaggcctcaggtggggaccaggacatttctgatggaagaacgcagaagcactcta

SEQ ID NO: 7935 - DNA, 577 bp, Canis familiaris
gttttaacacccaagcgcgggccagagagatcggacagagaatccgaaacgggggccagtcaggccccagataaaatctacatcgactcgcccaccaacacctgccatcagcgcggccagcttcagcagcctggtgtcaccgcagggcagtgatggccgtggcccgggccgtccctgggagcattaagaggacggcctctgtggaatacaagggggacggcgggcgtcaccccagtgaagaggctgccaacggccacggcctaccggggagcaccggaccgagggggttggccttgaggacgcgctgcattgtgcgcatcggaggtgaagaggggggccggcacccccgaagctgatgaccctgccgccgggggccagaccaggaacggggctggcgggagcccacagggccagacgcccaaccacagcacagcgggacggggaactcggggagcctgggcagcgcccgcaggcctcacagggagttcactggtgaagacgcgggccgcggcggatggcggtggcagcggggagcctggcgccaccaacagcaagttcccctacaaggcctccgggg

SEQ ID NO: 7936 - DNA, 655 bp, Canis familiaris
agacgctgattagcctaatttgggtcacaagttgttctttgcacagaccacctagcctaggtcttatgcacatgcattttgggttgattcttgggtactgtgattggtattcccactaaaaagttgcatcactagagggtaatccctctaaccaggaggaaagacaagtcacctacttaagaggttctctctatatgtaatctgtattttaactttgtatttttgcagacagaaagagtttactttcaggttttcttacctaaggggagcaaagagaagagcaaaccaatgttcttttgccaccgatggagcattggaaaggtcatagactttgcagcttctttaaccagtcttaaaaatgacaataaccaattaacagctaagaagttaaggttatgtcacattacttcaggagaagccttacccttggatcatactttggaaacctggattgctaaggaggattgccctttacataatggtggaaatattatcttggaatatcttaatgatgaagaacaatttttaaaaaatgttgattcttacttggaatagtcatgtaaggactcaagctggagatgacaaggaaaattctatgttaagtcaatttcctttactacaaatacaatatattttatttttaaaaaaaaaaaaa

SEQ ID NO: 7937 - DNA, 367 bp, Canis familiaris
caatcatgtatgtgtccattggccttgggccctcgtgctgctgtggtgctacctgtccctcggcaggggtgttggggagtggcagtccttccaggggggccgtccctcagcctctccaacgtggggctgggccctgcctccccctcccccccagctccccacaggcctggagcctgctgggctggactgaggctcaaggtctcccccagctgtcccgccccccaacagtcctcactctagggccaggggggaggctgggggaggagttgtgtctcgtcttctgtctccatgtggttttgggtgtttttcttgttgtgtcctggattccgataaaattaaattgcttcagatctaaaaaacaaaaaaa

SEQ ID NO: 7938 - DNA, 658 bp, Canis familiaris
gaaagggccaaagtggggagctggtgatcgaacagaagcttctggtgtccaaagaatctcatgtgaggatcctgattggcccaaaggggcgcttgatcgcccagattgcacaggaggcaggccacgacctcatggacatcttcctctgtgatgttcagctccgcctctctgtgaagcttctccagtgaccaccctctgctgcctctcccaagggtctgagccagagctgctggcaggagccactgaccagaatggcccctgccgagggcctctagggactggtgggaggcatggacactgcccgacggctggcttggccttgctgggtctgcctagcccctatttagccatgtctccttttggaggcaggaacttagctcagttctcaggtcgttttctctgcctggggccctagctacttcagtcttgaagttgactcttttgtaggaacaatgccaacctgcttctagctggcaccgaacccagagtttctccctgagttgccagttttagcagagaggtctttttcctatcccctcagttcctctaccttaaagcgatgtgtgaggacctgtgggtcctaagtgagatagtgccactcaccccatgcctttccccttctcgaatgctaataaaaagacaagcatgctgaaaaaaa

SEQ ID NO: 7939 - DNA, 223 bp, Canis familiaris
ggaggaatttgcagctgtcagggaagcccagggttttgctgcgactccgaggtagataaggggccccctgggcttcctcctcctgcggggtagaagagaataatcaggaaggcgacccctttgctgacctttattcaaagccctgtgctgctggaccaacaagctcgcacagagctaaaggagggaactgtgttggaaatggccgaagttctgaataaagtga

SEQ ID NO: 7940 - DNA, 625 bp, Canis familiaris
cacaagtggaggcccagggccctcaagaccttcgctgctgtcagtctctcccgattctgggtgtcttgtattgtaatggctgttaacactgtggtttaacagtattgccctctggtcagttttgcataagcacttatttccagcagggttttttataaaacagccagctgcctgaaagacactctccagtcatggtattcatttatcctcagaatgttatgtattgcaactgacttgtgattagttacccaaatagttaaactggagtgcctctctggctgagtgttgggtgatatttatgtaacgaacgttgccggtttactgtccatgttgtctattgtgtattggtttttggaaccataaggttaccttttttccctattattttgagcaaatgcttgattgtttttaataacaactatggcatttgctctttgttgaccaaacccctgagagtaatccacaacttcagggcttcactttggtatgtgtgtggatagatttgagtttttgtttttgtttttttttagaacactaatttactttttataatcccaactcttggcttatggtattaaattccccctcacctttaaaaaaaaaaaaaaaaaaaaaaaaaaaaaaa

SEQ ID NO: 7941 - DNA, 634 bp, Canis familiaris
ccctccggtgtaggttatagcccattgcttgtacgtatgatagaaggcatcttggtggttctttacaggatcctggtgaatcccttgtgtcagttcaaccagcatcagtccatcatgcccacacagtcttgatgatccctctctggataatggtagcagaatgttacagataagtggggaaatgataatatagtatagagaaattgtgtatggggatctgagatcttattttgttggcctttatttttacattgacctatgtgcctgtaactggactttgcaagagttgcagtgataatccctctccattgtctgtgatgcttataatctgagataagtgagagggggaaatgtaaatttaaaatcttataattttagtcatgtgttgaaatgtcaccttctctctttctcccttaccctcgctttccttctttgccagatgatttatttttttttaccttgttggatgactgtgaatctataaataatgggatgggctaggtgtatcagtttgcgaccacatgttaagaactgaaggggaacttctcgagatgacttaagaatcatcccatgcaaatatattgttttgccccaaataaactattcagaacgctaaaaaaaaataaaaaaaaaa

SEQ ID NO: 7942 - DNA, 534 bp, Canis familiaris
tttccctcgttgttttcttttgttttcgtttctgaagggtcgtttttttactctgagtaccttctgatagccaggcgggtaaagacacagcagtactgtgtacacacgtcacctcttcagaggagaaggcaaatgatccattctagggaaaatcggaaacgatccgtgagcccagtcttcatctgtgtgtgagagcagagcttagccatctacgggagaaaccaaatcaaggaacggttttggggttctttttccttaggcaaaaatgtttcatgcagggtgtgtatgttttctttgcctttatatttcctttcctagaaatctcttgtaaatgaccaaactgtgaaatgggttgcccaaaaattgttgccctttgttttagatgccacaagcagtgtaaatccccaacggaaccctgtccaatctgctccttcctccctccccagagagcgaggatctcatccaccaatgtaattaccatacgcttgctattaaagagccttcccaaactaaaaaaaaaaaaaaaaaaaaaaa

SEQ ID NO: 7943 - DNA, 718 bp, Canis familiaris
  misc_feature (262)..(262): n comprises a, c, g, or t, or includes no nucleotide
gttcttttttaggattcctcgaaggacgacatttaaggagtccatcgacggctttgttcggccagatagtcaccgaccggaggactgggtcctccaagggtttggctttgtagacttcaacagtgaggaagatgccaagctgccaaggaggccatggaagatggtgaaatagatggaaacaaagttactttggactgggccacaacctaagggtgaaggtggctttggagcccgtggtggaggccggggtggctttggagcncgaggtggtggcacgaggaggccgaggtggatttcggtggcagaggccggggaggctttggagggcgaggaggcttccgaggaggcagaggaggagggggagaccacaagccacaaggaaagaagacgaagtttgaatagtttcttccatccctctgtcttttcctcttctgtttgaaagaaaaggactctggggtttttactctgttacctgatcaatgacagagccttctgaggacattccaagacagtatgcagtcctgtggtctacttggaaattcgtatagataacatttcaagggagataccctgttggttttgactggatattcatataaactttttaaagagatgagtgatagagctaatccttatctgtaagttttgaatttatattgtttcttcccatgtacaaaaccatttttttcctacaaaaaaaaaaaaaaaaaaaaaaaaa

SEQ ID NO: 7944 - DNA, 621 bp, Canis familiaris
aggaagccctaccactatgaagcggaagtatgagctggacgccccgcgccaacatctaagatttgtccccctcctgcatacacacatgtacgagtccggggaggctatatagaagtaccgagccttgaggctagacgtggggaacttctcctggggtctcggagtgttgtacacgcataatccaggattatcgatgttgtctataatgcatccaacaatgatactggtccgcaccaagaccctggtgaagaactgtatcgtgctcattgacagcatcaccgtaccgacagtggtacgatgtctccatctacgcatctgcccctgggacgcaagaagggggccaagctgacgtcctgaggaggaagagattttaaattaaagaaccggtccaaggaaaattcccaggaaggaagttatgaatggaaaggaaaaaagaatgccaaaatcagcagtcttctggaggagcagttccaacagggcaagcttcttgcatgcatcgcttcgagaccaggccagtgcggccgggcagatggctatgtgctagagggcaaggagctggagttctatctgaggaaaatcaaagcccggaaaggcaaataaatcttctgtcttcggtcatgt

SEQ ID NO: 7945 - DNA, 598 bp, Canis familiaris
  misc_feature (95)..(95): n comprises a, c, g, or t, or includes no nucleotide
ggtctgcagcagcatcataaacaagtgggccatttgcgggtcctgacccgtccccaccagccgcagcgggatctcaggtgttgcttgcaccctgngtccaccgagtgctgcgggcctaatgggaggcagggagagttgcccctgggactgctgggtcaggaggggggagtcagccccttccccactatgccaccagccccgcaatgcagtccccctgctgctccgcgtgcggctgcatggtctgctcggagcactcagcgcaagcctccgaggggctctgtttcctctccagccatgcgaaagacacagtccatcactgcacttattttctcttcttgagagtaaacaattcaccggtaggactttttcttctaagaatcaaaacctaaatggaattaagtgactaaacaccagatgcagttcttagaaatgcttctggctcagaagagaggtaacttctataaacacggagctaatgtcctatctctttgtgtctgtgttaagtgtatgttttaccgtctagtggggagtaagtgccaaatgttttcaaactaataaagtcaacagttaactaaaaaaaaaaaaaaaaaaaaaaaaa

SEQ ID NO: 7946 - DNA, 574 bp, Canis familiaris
ccccctggacctgaccgggctccacgagactctagcttgcctctgccctcccccaaaggtggaaagccgggagctacactccaagtctgtggcttttgtgtaccaccttggtgagcttccttgctgtggactcctccaactggggaccccccagtatgctagactgagctggcgtcgtggatgccaggccacccgtgcgtggccatcgctgccacaccccagcatgcccccccactgtcctcagagcatctccccatccttggcctccctcccacaactcattccctagtggggagcaccatggacccccacccccacctcatggccctactctgctgctcccacccgcctgtcccagccccccaaagctcaatgctaaatccgtatgtcaccacagctactgcacgccactctaaaaacagctacagtcaaggtaggcatagataccaggtccccccaccggccctagagttgaggtctgaacatggtggggggcgtagggggtgggcagaggacaacctctgaggggctgtaagcaggtggggagtgaagatctcaataaagctcaggatct

SEQ ID NO: 7947 - DNA, 358 bp, Canis familiaris
  misc_feature (1)..(1): n comprises a, c, g, or t, or includes no nucleotide
ngatgttgtcctgtgctggagctgatcaggctgcagacaggtatgtcgaggtgcctttgggaagccccagggcacagtagtccagggtccacattggccaagtcatcatgtccatccgtaccaatgtctgcagttacaatggtagcatgtgattgaggccctacgcagggccaagttcaagttccctgtccgccagaagatccacatctccaagaagtggggctttactaagtttaatgcggacgaatttgaagatatggtggccgaaaagcggctcatcccagatggctgtggggtcataatacatccctaatcgtggccccttggacataatggagggctctccactcatgagaac

SEQ ID NO: 7948 - DNA, 600 bp, Canis familiaris
ccatctcatgagcctatcattcgggcttgtctcccttgccccgtggccttggcctgatcaaaagtcatgggaggccggtgggaccttcccatctcacctcacccttgtcaagccactgttgagctcctttgctgcctccaccccctggacccctccctgcctctccccatcagccttccaggcctgggcagaggctgccttctgggactcctcagcccaaacttggttcttggaagctactactggactgagcccagtttgcccctgtagtacatttctacccctgtgctgtgtgagagcagtctctgtgccaagcggtggtttgggggcaagcctcatggctctccccaagccacccccctacccgatctagtgttagcctcatatatctggacacacagctcactcacacccttcctccacgtggattgccttgcccccgagcccaggggagaagtctgcaatggagggttctcccttactggggatgactcttctttgatgagctgaaagaacaagcacactgttcactgaaataccagcccactgaaaaaaaaaaaaaaaaaaaaaaaaaaaaaaaaaaaaaataaaaaaaaaagg

SEQ ID NO: 7949 - DNA, 549 bp, Canis familiaris
cagctgctgcaggagatgcgtgtcccccacaggatgtgctccccagggatgcagcccaccaatgatccagcccttcaggactcagcctctcaggatccagcccatcaccgctcccaggattcaagttcaccactgctcccaggagagtctgacctcccaggagagtgaggatacatacttgtaaccccggcagctcaggcctgtggggtgaggctccacacagcccctggggctcacagactgacagccgagggcctgcccatgctgatggcccagctgcccggccctgcgtggcagagagtctggccggcccagcacagactctgcctgagcctttttatttatttcctcccgagtggagcttgggctagcccactggggccggaggaggtgagggccagtgagcagggcctcactcagcccctcttcctgggggatgctccctagggctggggtgctgtggtgaggggggaaaggggggtgttctttatgtaaaatagaaacatgattttgtacagaaataaaccggcttgtgtagagaaaaaaaaa

SEQ ID NO: 7950 - DNA, 598 bp, Canis familiaris
gagcccttcgagcttgtagtctctaccattctcatatgaagttacgcgtagcgaattattctcctatcagtcctcctaattaacgggtcatttacactatccactgctaattattacccaagtacatatatgattaatctttccggcctgacccctagccatgatatgattcatctctaccctagctagaaactaatcgagcccccttcgacttaactgaaggagaatccgaactagtctctggatttaacgtagagtatgcagcaggtcctttcgccctattctttctagcagagtacgcaaatattattataataaacatcctcacaacaattctgttcttcggcgcattccacaacccattcataccagaactctactctattaacttcactataaaaaccctcttattaaccatctgcttcctatgaattcgagcatcataccctcgattccgctacgatcagttaatacacttattatgaaaaaattttctacccttaactttagccctatgcatatgacatgttgccttacccattatcaccgcaagtatcccaccccaaacataaaaaaaaaaaaaaaaaaaaaaaaaaaa

SEQ ID NO: 7951 - DNA, 448 bp, Canis familiaris
aagatgcttatttgtcagagtaaagtccctatacgccccgctatacaagggatataccttgccctgaattttccacatggagaatgttttctgaagatcactggcatatagaaagtgattcttaggttacacagagtcaatgctggtataatgacttgaatgcaaacacactccaaacagtttgagtcattgacattcaaacagaaaagtgcactttaaaattttcccaggactcctgggtggctcagcagttgagcatctgcctttggctcagggcgtgatcgtggggtcctgggatcgattcccgcatcgggctccctgcatggagcctgcttctccctctgcctgtgtctctgcccctctctgtgtgtctctcatgaataaataaaatctttaaaaaataaaaataataaataataaaaaaaaaaaaaaaaaaaaaaaaaaatat

SEQ ID NO: 7952 - DNA, 537 bp, Canis familiaris
ctttgcaggcttttgtctgagccgtttaccactccagcgctagccccgactcctgacttgggggtttctgacctcttgtccgtcattattcctcgtgaacccattagaagtgcctctatctctacacctcagtcctcctagcctccggagtatctattacttgagcccatcatagtttaatagaaggtaatcgcaaacatatacttcaagccttattcattacaatctccttaggcgtatattttacgctattatcaggcctccgaatactatgagacatcttttacaatctccgatggggtatacggatctaccttttttatagccactggatttcacggattacacgtaagtattggctctacattcctcatcgtgtgcttcctccgacagctatactaccacttcacatcaaaccaccacttcggatttgaagccgctgcatgatattgacactttgttgatgtagtctggctattcttgtatgtatctatttattgatgaggatcctaaaaaataaaaaaaaaaaataaaaaa

SEQ ID NO: 7953 - DNA, 501 bp, Canis familiaris
ggctgtgtattgtgtaactgggactcaagtattctgagtggctctaatggtatttcctatggatccgagatttgatcgtctgccatgcacacatcataaggatacctatgtcagatgactgcttatgtacagagagtaatctcagcatcaagtgttactttgtgtccatcatgttgaccgggaccttataatcgaaggatccggaatgatccctggagttcccatcatgtacatttctaaccataggtacaacatttgagcggatgccagatgattatggagcccctcggttctaattcttaaaagatcgtttttctgtcttcttataccaactttttctgttgccagttcatattatgcaatatgctatagtatgaattattcttcttacccatttgctctgttatgagctgagtatggttaaatatattcattttttgatgttttgaaatcagtattttgtatcattttaagtattgttgcatctttctataaatcaga

SEQ ID NO: 7954 - DNA, 652 bp, Canis familiaris
gatctcctcgccaacaaatcagcttacccagagatctaggcctggttctataaaaggataaagatctccatcaaggtcaggtcaagatccaggtctgtttcactggtccaagaatcagtcaaagtccagatctctatctactaaagaaatcattccccatcaggaagtccataaagaagtgcaagtcctgaaagagtgaagttctcaagttcatcttttagagaaaagttatttcgtttacattattataagggatttgtgatgtctagaaagtttaacctaggaaggttatttcaatcatctaatcaaaatggacctggattattactctgtaaattcacagcaataagataatataaatttttgttgaatgtattaacatcttgtggtttgaaaatgtggatttttatttggcatgtttaagatatttctaactagaataaagaactataaattaaaacttaataaaagttttattttataaaggggcagctgggtggatcagtcagttaagcgtctttggttcaagtcatgatcctagcgtcctgggatggaacacagcaccaggctggttccctgctcagcagggagtctgcttctctctgcccctgctcatactatctctctttctctcactcacataaataaaatc

SEQ ID NO: 7955 - DNA, 407 bp, Canis familiaris
tatgaaatcactgtcgggaaagattgtgttctcctagagttataaccttaggaccaattgcaaatatctatcctctgtgtacttctgcacacttgccgaagaggagaatacacaaggattcttgacatgagaacgtggtggaggtggggtgttcagggattgaagataaggctgccagctacggttggttagcattgcataacactttggctcttttttaaaaacctaattgaacttgcccagttgagaagtttaacataaagagtaatcttttatatcacactcttttcttatgaaaattcagtgggttcagtgtggataaaatagaattcatccattcatggaagaggcattcttcccgaggagctcatgtctcctggccagtgttactcacaatgaaatactat

SEQ ID NO: 7956 - DNA, 733 bp, Canis familiaris
tccggaattcccgggatctctgcttactgcacaagcccagtgagaccaacccacagggaccacggagagaccatgaagagcctgctccttctctccattctggctgccttggccgtggcagctttgtgctaacgaatctcatgaaagtatggaatcctatgaaattaatcccttcattaacaggagataatgccaatacatttatatctccgcaacagagatggagagctaaagccacaggagaggatcgagtagaaaccaccaacgcccgccctactgtagtcgtcacatccgggcagaggcagtctgtattgacgttcatatgacatgtcttcgaacgaccgactaccactcgagtgttatttgagagtgaacaactgacttgcctgcactaactcgtctgactatccgccgagtactcgccacgaggggagcgcaatagatgagatgtgaaaaagatgtctcttctccttctcccaagacgctcgtggtcgctcgtggtttgttgatatctccttataccacgatagcattcattcgaaccttaccattaaaccaccataccaaatttgcttattttcttaaatgttcttgtctggctgttgccctccttcctgccccccagatcaataagcagtgaaagtgcaatgtggtgaaaggtcaaaagagaattaagatgtgtgattattattacataataaactcttggatggatactttcaaaaaaaaaaaa

SEQ ID NO: 7957 - DNA, 530 bp, Canis familiaris
  misc_feature (1)..(1): n comprises a, c, g, or t, or includes no nucleotide
nctgaagaaagatgcaggcccacaatgccaaggccatggctgcgcgtgcttgaggctatcaaggctcttgtcaaagccccaggaggttaagcccccagatccccaagggcggcaccgcaagctcaatcgacttgccacatcgctcacccccaagctcgggaaacgtgctcgtgcccgcattgccccaaggtctcaggctctgccggcccaaggccaaggccacaggctcaaaccaaggccaggctgcagctgcgaccccggctccggctccggctccggctccggctcctgctcctgctcctgctcctgcttctactcctgcagcgcaggctccccaaggtgcccaggcccccaccaaggccccagtgtagaggcttctgcctgccagtgtgaggacggaaggactggtatgacccctgggcttctgtctgcatgggcccggtgtcctcctgtgctatttgtacaaataaacctgcggcaggaaaaaaaaaaaaaaaaaaaaaaaaaaaaaaaaaaaaaaaaaaaaaaaa

SEQ ID NO: 7958 - DNA, 434 bp, Canis familiaris
ggaaacagcggccaaagtggacggaggtctcgcacaacttttctccgattacccccccggcgtccgccacatcctcttccagcacggaggccaggacacgcagttctgggcgggctggtacgggccccgcgtcaccaacagcagcatcgtcattggccctaaggtgaccggggacccggcccggttccccgctcagcccgagcacacacagggccgggagagggccgcccgcttgccctcctcgcttcatctccactgacagtgtctgctagccactcctccgtcctgtgtctggaccaaaccacccgcagcagtgccctccactgaggctgcgctgggcgcaaggccctgctggggagctgctgccccacttccagcctggagcaaacccaccagttggcggtaactccgtcacgtactctgacattttgtga

SEQ ID NO: 7959 - DNA, 562 bp, Canis familiaris
taagaaggtccattttggggagtcttccccttggtcaagggaagcttctctcttagaggggacggaggtcatcctggcgtgcaaactcaggacccgccttgaatgacgtgaccttactgcgagtccctcattgtggctgagcgcatcgcagccatggaccctgttgttcactcagcactcagagaggagaggctgttgctgatgcagacgggctccagctccccgtgtctggacctcagccgcctggacaagggcctggccgtgctggttcgggagcgaggtgcagacctggtggtcatcgagggcatgggccgcgctgtccataccaactactatgcggccctgcgctgtgagagcctcaagctggctgtcatcaagaactcctggctggctgagcggctgggtggccggctcttcagcgtcatcttcaagtacgaggttccggctgagtgaggtgcctgccctgccagactgttccgctcgtcgcttgtcaggaatgtatttcgactgcaacagggaaaccaagttcaaaaaaaaaaaaaaaaaaaaaaaaaaaaaaaaa

SEQ ID NO: 7960 - DNA, 592 bp, Canis familiaris
agcctaatcttaatttgattaagggaatttacttcaaaattaatttgataatagtaatttaaggtatattcatacctacaaattatgaaaattatttgtgtaaaagggcttcaagaatatatcatatccaattttgtattgtttatctcttacataatatgaaaaaattttaattcttcttaattgccttttgccattaaactatttcataataaatcctgtacaaagaattttgcccccaatagagatttgtttgtgaaatataaggtttcttatgtgatattttaaagtacccatacatgtaactcataaatatttctttaggattactataaacactgaacctgtgtccatctacagactctctgttttgaaattagtattcaaacagcctaaaatttggtgttgaaattattttgtgaattcttgacttaaagtattactacacatagtataacatgcctcagtccagtgttcagatttctacttgtgatgtgttgtcatgaaaatgagatgctctaccttcagttgttcataagtcaataaaacaaattctggtaaataaaaaaaaaaaaaaaaaaaaaaaaaaaaa

SEQ ID NO: 7961 - DNA, 467 bp, Canis familiaris
ttaactccttaagaggtctgtgttgcaattatctgaatggacaaaaaaggggaaatttccccttaaaaggaccaggaattctaactttcttcttggaaaactggaacccccgccgctgtttttgctccctgctctatccgccccaaaaaggggttttcttgggggtttaaaaagggaaaagttgcccaaaaaggggttttttggtggaacattggaaaacacctgcgtttggttcaagcattccagtatactgaccgacatggagaagtctgccctgctggttggaaacctggtagcgaaactataatcccagatccagctggaaaactgaagtattttgacaaactcaactgaaaaatacttcatcagctgaaaagtacttcgtcaggttgcaatgcttgaaggttcttagtaaagttcaccgttttagaacttagtaaagttcaccgtttcagaaccaaaaaaaa

SEQ ID NO: 7962 - DNA, 628 bp, Canis familiaris
tctttcctcctcttgactccctttaacgtgagatactggggagaagaggagaaaattatttctgacttagttgtaccaatgcccagggccaagcccgtgcccagctttctaaccccagtcccgacttctggagcatgtgctgcagagtcagctcagtctgtgcacttggatcagtcccctcctgtcctgagtatgggtcatttcttggggaattttctttgcattgaagaaagagggcggggaaccatattgcccctccttcccccatcaaacttccttcatttaacttgctataaaatgagtcatataaagaaattctatatgggtgaggtatatcccacttctgtgaaaacattacaaatcagaccgccttctctgagtttatttaagatgcttttgttgcgagcggagttctagagtgaagccccctctgtgtgtgtgagatagtaacaccttgtaactcattacagctgggcactatttacataaaccagagctgagccaggcaggaatttgctgattaatttatttttaatggagtgaagtataccatgtaccaaaataaactttactgtgtgtacctaaaaaaaaaaaaaaaaaaaaaaaaaaaaaaaaaaaaaaaaaaaaa

SEQ ID NO: 7963 - DNA, 583 bp, Canis familiaris
ttatagatctggaaaatgtcttggaggttttgctgtcattccagtacatcacctaatgaaggggatacttaaagatgtacagtttgaagtttatgattaacaagatgtaaaaccgcttttgagaagatgtggtaacctacgaacaaattgtgaattttaacagtatttgggtgacaactatcaaattcttggctttggaaagctggcgaatgcttcttaatactggtatatttgagatactgctatgtggattttgagcattctttaaagaccctatttgatccttaaacttatgctttatgaaagggaagtcatttctttaagctgctttgaagtgtggcagaaagcatacaggacactttgtaattaatgacaatgctaagtggaatgtcttaccaacttctgtagaaagtgactgcaatgggaaaatctccatttagttctaaaactaggtaaaatggtctcaacaggaccaccaggggcactgatgaggcctataaattagaaactaataaaagaatttcacaacttaaaaaaaaaaaaaaaaaaaaaaaaaaaaaaaaaaaaaaaaaaaaaaaaaaaa

SEQ ID NO: 7964 - DNA, 480 bp, Canis familiaris
ttaagggcctggaagtcactttgttcagagacgctttaatttccgtgtgtcaaacaactgtcagctatacataaaggcacagtattataacgtctcgggcctctcccctgagggcctacttccggcaggaaaccaacggcttattggtcagggaattcttctctgctgaagcttatttaagaacagaacctcttgcttcagcacactgcaggctcagaagagaagccttataaagaaccagagggatggatgtgtggcttcattgcaaaatccagtcatggttttaaataacagtccaaacgccattgcttcagattgagaggaaaagtgaaaatagtcccaaaaagcccataaatcacccatgtaaacagaacgggggtctgtgccccgtgcagtaaaaaatgtgcaatgtccagtaaaaaaaaaaaaaaaaaaaaaaaaaaaaaaaaaaaaaaaaaaaaaaaaaaaaaaaaaaaaaaa

SEQ ID NO: 7965 - DNA, 594 bp, Canis familiaris
gaggcagacacccaggcagagggagaggcaggctccctgcggggacccgaggcagacgctcaaccacggagccaccggggcgcccagggtagtcttgaatcccgaggcttgagctagctggtggcataaatttagccattacctttcctgagccttaattttcttgactatgaaatgtagatcatccacctcgataaaatacattctttaattagtcaagggacatttattgtggttactcagggagcacttttgtttatttcctagtcctggaaatgacaactgtaactaatggaaatcggtgatattagggtaccttaggtatcaccatatgttaacattttattaaaccaggaatcctctctttctccctcttccttaagaaaaaagggttttgggatccctgggtggcgcagcggtttggcgcctgcctttggcccagggcgcgatcctggagacccgggatcgagtcccacgttgggctcccagtgcatggagcctgctgctccctctgcctgtgtctctgcctctctctctctctctctctgtgtgactatcagaaaagaaaagaaaagaaaagaaaagaaaagaaaa

SEQ ID NO: 7966 - DNA, 351 bp, Canis familiaris
cttaaaatgaagcttgcacctggttgtttgaggattggtgggctactgggttggtggggggagggggtagtcaactgagcttttaaaatattaggtcacatttattatgttcacatactattctcttcctgactttaaaaaagttcaaaatcgggcagccaggatggctcagcggtttagcgcctgccttcagcccagggtgtgatcctggagacccgggattgagtcccacatcaggctccctgcatggagcctgcttctccctctgcctgtgtctctgtctctctctctatttgtgtatgtgtctcatgaatgaataaataaaatcgtttaaaaaaaaaaaaaaaaaaa

SEQ ID NO: 7967 - DNA, 580 bp, Canis familiaris
atgcccccacctcatgcctgaccaaagtttaggaatcacagatgaacccttgagaaaattgtgactctgttccccgcttgggagctggggagggttgggggggaggaaggagaatggatttttagcagtccttatcctcacacatacagcctagcccagcctagcccctgccatcttagacgtagccccctttctgggtgaatgatgggccgtgtgcccctcaggcaaattctgatctctaagagatccccagacctcacccagcctttgcctctatctctgcccctgactccaccctaagataacagcacaacaaactcttcctaaagatatttttattcatcctgtttcatgctgtacggaggaggctgagtccatttagtgacatttcttcccataatgggagtggggaggattgtggggaggagggcctttggattcttgtgctgtgtgcatatgaaggcagatgggggttaggtggaggaggagggcagagtgattagctgaggttattgcttttcatggcaaacctaattaaaatgacaggaacctcttcatggtaaaaaaaaaaaaaaaaaaa

SEQ ID NO: 7968 - DNA, 592 bp, Canis familiaris
gggggtgttggaggacccaagtcttggggagctcagggacctggggtgtttgtagttttttgccttttagaaaagttataaatctttccactatttagtttttgattctgatgactcctttctcttctactctctggcccccagtgttttataaactgtttttgagtgtcccatggggcagggtcgcatatctttgccctcctccaagccgctcggctccctcccagatcctaccctccagcctcgccagttgccaaacactaaatatgcagacactcacctgtctgacctcccaccatggccatgaacacagcctcccccacgaaacccccctcaaagttcaggattggggagagggaggaggggaggaacagtctccctgatttttcaatataatttttttccagagtttgggttttttgggcttatccttattttttgacaatttaggggggacgaggggccgggcatggcaagggggttggcctgagggtcaccatttggctcaacagccacgtttttgtacagaattgatggttgattctttgttctcttgaaataaaccgaggaaaatgatgcctcttttgctact

SEQ ID NO: 7969 - DNA, 591 bp, Canis familiaris
ggatcacagagtcagatgtgcggccctgtgtcatggcagcctgccatttctagacattggctccgttaaaacgataaaatcactgttttctccttaacctaaagctaccagtttcttcacttcccccagaggggaagagaaggggaaaaaaaaattgaagtatagattcccctcccccatcactgaagctattatcatcgcttcttccctcccccaaaaagctgtgaagccctttgcctcgctcttgacagcgtggggggccggtgggcagggactgtgagtttgcatctctggattgtttttacttccactctgggtactcattcaggtgtgggggtctctccagcctcagccatacatgtttcttcagaatcctttggtcaacggagaccttgattttcaggcagtttggtctggggtattttcgtttgttctgtttggggttttttgtttttgttttttgttttttcatctttgtggttctggaagcttctggtgtgtggcatctgaccagttttgaattggtcctttctataaaatcgatatttataaggcaaaaaaaaaaaaaaaaaaaaaaaaaaaaaaaaaaaa

SEQ ID NO: 7970 - DNA, 515 bp, Canis familiaris
tggactccatccacagccaccattggtgtatccagggctgtagtgccgtcactggggagaacctcctgcctggcattgactggctcctggatgacatttccagccgcatcttcacggccgactgaaccactccggatgccccccaccccaccttgcagtccagccccctacccccgccctcatcaagcaccatccatgggggaacaggagtcagccagcctgacaaacaccccccaccccactctgtaacctgctgctgctgctgctagtactgcccactgctgctctgtggccagctggctcccgtggctggagggctgctgccctggctgtcaacctggcgtcctgagcccagcccacctgcagctgccaatgccaagaggagagggctgggctaggggggggtggggggtggagctgcctctgctgctaccaaggctgtgggcctcatcctttgctcagctgtgagaataaatcctttcttgccctcaaaaaaaaaaaaaaaaaaaaaaaaa

SEQ ID NO: 7971 - DNA, 662 bp, Canis familiaris
gggactttgggatttaaatcattttagctgatggctaaatagtaacatttatatttaagaacaaaaaaaagagagaagcatagagatgtgttttataaataagtttatgtgtaccggtttgcatgtgcccatcccaaatcattatttttgtagaatctaacttaaacctactatttataatgaataggcaaccattaactgtgtacatacaagtataaatatgttatatcttgtacatatggtttagtcaccagatcccagcatacttcttaacccaagattgtagatgttttttccttttgatttctctttgtactaaagaatcgagagttgctacaataaaataagagaaacaatacatttaggagtgagttactatagtattctgctacaataaatgtttctaccccttgtaatagtatgatatcaagtgtctaaaatatttgtaagtatttctctggaagagaacagctaatgactaatatgatttgtaaaagaagttattttgttttgaaagtgcgctgtgatttgtagtcacctggtactaaagcccagaacacgaatagagaagccccaaatgaacagattctgttaaattaatcagagagcttttaaatttacaagatgaaatcaataaaaatcatagctggttgcaaaaaaaa

SEQ ID NO: 7972 - DNA, 716 bp, Canis familiaris
ggaaggtcagcataccagcgggcaagacatctgaccaagtactattgccagcctaaggaacaattggaataagtccccagacatccctggatcaaagacagtgctgcgacgagttaaggaagatgaagatggacaaaacggtatcggatcttgctgtggttttgtttgagacagcacgctgagatcaggctatctgctaccagacactaaagcatatggagatcgaatagaaagaatgcttcgcctcagtttaaacattgaccctgatgcaaaggtggaagaagaaccagaagaagaacccgaagagacaaccgaggacaccacagaagacacagagcaggacgatgaagaagaaatggatgcaggaacagacgacgaagaacaagaaacagtaaagaaatctacagctgaaaaagatgaattataaattatactctcaccatttggaacctgtgtggagagggaatgtgaaatttaagtcatttctttcgagagagacttgttttggatgctccccgcagcccccttctcccctgcactgtaaaatgttgggattgtgggtcacagaaagaagtgggttttttagttgaattttttttttaacattcctcatgaatgtaaatttgtactatttaactgactattcttggtgtaaaatcttgtcatgtgtataaaaataaaaaagatcccaaataaaaaaaaaaaaaaaaaaaaaa

SEQ ID NO: 7973 - DNA, 665 bp, Canis familiaris
caagaaaagccctcgtgttaataaccctggcgaaagtcccatcaagatcagtggcgtcggatcaagaacaaaatatgaaagctagatacctgggaacttaactgcaatgctggatcgttttcccacatgattgataatacatacattctggatatacagtctttaataattgcctgacaatcagataaatatatatgcctgcccatccatcagcagtaatttctttgataggatgtcttgctgatgatatttgatggtaatgtctagaaaatataattatcttctctacatcgtattatggaggtagtataatatatatatattttttatgatatatatgtgtgtgtgtgtgtatatatatatatagtgtgtatagtgtatatacacatatatatgtcaacaattcgagtaaagctttgtgtttaattttcagaaggaatcaaataaaaccaagtatccatcttctgtagttcgtagggtgttaggtcctttaacgtaaagtcaaacttcaaattccatctagctctgtgttaatccctgttattactggtaaagcttcatttgaatatgtaaattcagtttaggctatgtaaaatttttgctaatgtcatcattctgaaaaaaataaatttacaaatacattcaaaattaaaaaaaaaaaaaaa

SEQ ID NO: 7974 - DNA, 652 bp, Canis familiaris
gtctgtccgcattaacttctgtgcggcagctgcagcagctgcaggtacagggaccccgggattccctgtgaccaacattggtgcggtcggcaagatctctgctggaaccaggcttggggacacaggtcccaggtagggattaaaggctgctgatgcattggtggctaagcttggtgcaactgaaaacattggcacgggttgtaatggggcaccgggcatcatggcattggctagttgcatttgctgggccaacatggccatgttcttctgctgaatcaagttattgcgcccatttatctccaattgcgtttttaagtgtgggggtggatgaagatatttgcagttctccctggagcaacgacctttcaatgaatcaaagcaggcgattactcgtccattttcaacttggcagcttttcgaaggatgtgcaaatttacattccgtgtctggccgtgagcaagtccccctttggaactctctacatacttccagtgttagccattttgtgtcccgaatcggtgtgacactaacagccatgtttatagattttacaggtagttaaatttttcagtgaaaccaaccaacccaacccccccccacaaaaaaaaacaaaaacaaaaacagcaaccaaaaaaaaaaaaaaaaaaaaaaa

SEQ ID NO: 7975 - DNA, 603 bp, Canis familiaris
atttttaataggtctctttgaaaccttttgtggaatgttatcagataatttgcaaatacgctcttgaatgaagaagatgacaagttcactgagaagcagtacttggctggagttcggaaattcactaatcagcttcttgatcaaggcacctcacaatgttacgacgtactgtcttgtgatgtacagagaaatgcgcttagcagcttttgtgaggctaggtgtgatagaaaagaagaaagtaaatggtgacagtgtatttaatgtgaatgaacctgccatgacaaaattagaagagatgcttggttgtaagacaccagtaggagaagccagcaaccgcaaaactttaatattgccaaacagttatgagaaatttggtcacataattggtatcatgcgaaggactcttactccaacaagcagggacatgaaagaagagagccatctgctcgtggtctgtgagagccatgggctcagcggaaaggaagaggtgacaggtgcaagcaatcagtgtgaccctctccaccacgacagttaaaaaggcagttgtgtccaactctgtgtgtgttttaaaataaaatagtcttttggaaaaaaaaaaaaaaa

SEQ ID NO: 7976 - DNA, 383 bp, Canis familiaris
taaaagttttgtggtttgtcctggaaggcatgcagccataacttacttaattcagttaccaagggagaataagcaaatccttggattgatccagaggtttcttgtacttcagatttacatacccctgggacaagacttctccactgaattgctgacgttagagtcctctgccggatcttctgtatctggacagtaggtacaagaagagagaatctagagaaccacatgggaggatatttctctggccagaagacaccacccataacagcattggagatgctgggaaatagaatctggctgtgtgcccagaagaaaaggaaacaacaggctttggccaagacgtatcatcctttaccagctgagtttctaataaataagttaaa

SEQ ID NO: 7977 - DNA, 696 bp, Canis familiaris
cggaccataagtgacttactcaaggatcaggactgccttgaggtcatcaggataaactggatccatgtcatccgacaataaaactggaggaattttgcaagtaaatggggcaagccctatgatgaactgtgtttcctggagcagcggcctcagagccctaccttggagttcctgctccgggacagccagaggccagtgggccagctgatggagctctgcaggctctaccaacagggccgacgtggagaaggtcctgcacaggtgggtggatgaggagtggcccaagaggggtcgtggagaccaccccagggacttctagacctcggcttctttggcttctttggagccttgagaacaaccaacacggttaaggagggaaatgtggatctgttctttttgtaattgtttaggataaggacactgagagatgatggacattgattggttctccccaaagctggtggtttttggaggggtagggttgtattttggtggcggatttttgtttgtgtagttttgcacatctgttttaatttaatatttgaatctggttggggaaagatacttcctagcctcagatggggaccagggccaaagaccacagtcagaatggaatcatgccatgatgaaaataaaatgatcctctcccttcaaaaaaaaaaaaaaaaaaaaaaaaaaaaaaaaaaaaaaaaaaaa

SEQ ID NO: 7978 - DNA, 656 bp, Canis familiaris
caggtgtaggagagagatcttcagaaaggattttctagccactgagatgggtaaatgaatcataacttatatgtgaataagatgcatataaatagcatttacaatagtgaagtcttatttagatgcaatgacatgaagcaaaaagttgtatgttacaggatctgtcacagttcagctcactgtagatttatatagaaacaatcctgagcagtctaaactttatatggttcttgcagtcacgttttatctttagtatttgtaccttcagaaatgtcagaactaaggcctagccacgattatctcagcatgtgcattaaaaaggatgtttcatgaaatttcagattaaataatggctaaacatagtgtgtccccagttataacaccaattcatgtgccatattctacttgaaagacttttatcttcctgtaagcttttcattgggctcttcctgcccagagactgatttataactgtcacttttagaatgtgctggcaccagtttttagcatatgcagtacagaagcagagctagggcctgatcgccgaagatagcactgcgtttcagagtttcttgtgatgattgtcaaataaatcgtgcctactgatataaccagctccaaaaaaaaaaaaaaaaaaaaaaaaaaaaaaaaaaaaa

SEQ ID NO: 7979 - DNA, 515 bp, Canis familiaris
ctggtcctcaagagccatctcaggagtcggacctgggtctgagtgcagtccttgcggctgtgctgagagctcggtctgaggcatgtctctggagaagcaggcactgctgcagacccagctggaggagcagctgcgggacaaggtgctccaggagaaggacctcgcccagctgaaggtgcagagcaacctggacaaggccaatctcagtgccagagtgacagagctggccctgaccgtggagcgccttcagaaccagaatctggagaaggatcaggtctatcaaggtccttactgagaagcttgaggtccctggaatccctgcggctccaggagcaggcggccgtggagacagaggacggagaggggctgcagcagaccctgagagacctggcacaggccgtcctgtcggacgtggacagcggcgtccagctaagcggctccgagcgcacggccgacgcttcggacggcagcctgcgggggctctcgggcccccgacgccctccccgccgcgccgc

SEQ ID NO: 7980 - DNA, 644 bp, Canis familiaris
aagatgcggaacagaagattttcatgcaggaatcagatgcctcaaatttcctcaagaagcgtgacaagcggtcccccaaatcccgagatgaggccaatgcggaaaacaggcagaaactgcgggctgatgagctgcggagagagtaccatgaagaacaagggaatgagtttgagaacttcgtagaggaacaaaatgacgaacaggaagagagaagccgggaagctattgagcagtggcgccagtggcattatgatggcctgtacccatcgtatctctataatcgccaccacatctgacatctttattgaccaagacgatggagactgagattcacatacctaccccacgtgtttgaacaacgcttccacacaaacaggcctctttggagggtctcaacttggggcttggtgtggtaaacacacaagccttttgctctgattaagatgccccggcttttgcttctttgcatctgtggggttagcaccaaactaacagtgacttccccttacttggccattgtctcccacagtaagattcctgtcctgtagaacaatgaaaaggatcacagtaaaaagaaaagatgacatgtttgcttacagcttagaaataaatgtgctcagttgaaaaaaaaaaaaaaaaaaaaa

SEQ ID NO: 7981 - DNA, 700 bp, Canis familiaris
  misc_feature (407)..(407): n comprises a, c, g, or t, or includes no nucleotide
acaggcctttctggatattcctttgtcgaggtgtatcaaatgttaaagaaagtctaacgatacagaagagctttattggaaaccgaacaccttcccaactcatgctccaacttctgacttagtggcaacttattttcagagccttcctggttctgctggtagttaccttgataactctgacaaatatgcttttattcctatgtactgatttatcaacatcaggtattatctagttaacttcctatatgaaagaaccagagttaattcacatatactgtatgttacactttgccttgcctccttaattgtgtcattgattttcacttttcttttgattgatttctaacttaaatgatatagctttcactttgatttcactttagtgttcacttggagtttttatctantctcccctctgtggtcaatgaagatgttagtgagataatttagcttttcctggcaactcttattttttgtcttttgtcaaataatgtatttgtttttacaataatccattgaacgtactgttctggagtcatgttaagtatagtcaccttcatctgtgtacttagtaattttgtggaaagcagtgatggaaatcacttccttgtggaaggaggaatgtaagacagatgatctgctctttagctttagtccttcatcttcgttggcaaaaataacaactcatattctataaaaa

SEQ ID NO: 7982 - DNA, 547 bp, Canis familiaris
tgtgcctgattcacaggatggacactgtgggcagtggaatctcaggcattgtgatgagcctgtggagagaacctctctttgacttgtacagaaagtctcatctggcattgctaggacttttggtagtctaggatatgaaaatagaatagacatagaaaagtgggaattgcagtgggggagtcagcttagcctagtgggaagtctgggaaagcttcaccgcagtaacattgggcaggatcttgacgactgaggattctgcgtagccgagagagcatggagagcatgatcttgaaagctttctactctgttttttcaatataaatttaaaccagaattatactaccattgatatagattttcattagaaaggtttctaggggcagcccgggtggctcagtcagtttagcgctgccttcagctcaggccctgatcctggagaccggggatcgagtcccgcatcaggctccctgtgtggagcctgcttctccctctgcctgtgtctctgcctctctctgtagctgtgtgtctctcatgaataaataaataa

SEQ ID NO: 7983 - DNA, 575 bp, Canis familiaris
ccccgggatccgaccccagaaaaagaggaagcggcgagtgtataaggtgccagcctctggggaccttgggaccagaatcgccgttgcccaggctgccaggggcccggggctccgggcccccgctccagctcgctgtcggattccgcgggctccagcccagtgcacgccgctgggcctgcaggcgcctaccactcggcgtcagccgagtccatggacgagattccagtggcgcagacgcgcctgggcagtgccgctctggccgccccggtgggtaggggccgggagccggggctggccctgcagctgcgtgcgcctgccgtgttcgtgagcccgagcagcggggagacccgggtgcggggaggcctggaggcgggcctggcttagcgcggtggagaggcaggagggccagggaggagcggccagccccgttctctatgcaacacccccaccgtcgctgcaccgagtgcactttaggggcccctacggtcggcgggatgggtccccttcctccgcaactcagcaatacccgccccaccggccgtgatgctccaataaagtcttttttatgcttttgt

SEQ ID NO: 7984 - DNA, 585 bp, Canis familiaris
  misc_feature (214)..(214): n comprises a, c, g, or t, or includes no nucleotide
tctcttattgggctcctgctccaaccatgacaagttaatagcctggtgcaggcttgcttcccataccgaccccaagtccctgactacattgggtgtttcccttagcagtttgggagctataccagcagcagcactagaccccaacattgcaacacttggagagataccacagccaccacttatgggaaatgtggatccttccaaaattgatganattaggagaacagtctatgttggcaatttaaattctcagacaacgacagctgatcaactacttgaattttttaaacaagttggagaagtgaagtttgtgcggatggcaggtgatgagactcagccaactcggtttgcttttgtggaatttgcagaccaaaattctgtaccaagggcccttgcttttaatggagttatgtttggagacaggccactgaaaattaatcactccaacaatgcaatagtaaaaccccctgagatgacacctcaggctgcagctaaggagttagaagaagtaatgaagcgagtacgagaggctcagtcctttatctcagcagccattgaaccagagtctggaaagagcaaaaaaaa

SEQ ID NO: 7985 - DNA, 547 bp, Canis familiaris
cgattgcacagacaaagcgcctcttggcactgaggacggcacgagccgaggttagaaggcaacgttttgagaatcgtccgccttcggccagcgaaggaggaccgagattaaatcaacaagccccgaagggtacatgactcctggagacgaccgaggacgactggcagcgcctgaaacttgcaatacggcttgcaacagcagcgcgggggctggcccgcagcgtcccgggcgaggcggggggcaggagccctaacagaaggcaagacacggacggctggtgcgccgcgtgcagtgcgagccggccagcaccgcgggggtcacctgggccccgcgcccgcctcatgtggtgcctggacaggctccgcttgggccccgagcgcctgcggaggggcaggaacggggctccccagggccgggcccaccggctcccgacgctcacgcccgccgcctgggaaaacgtgctcacccccgaccgcatccccgagttctgcatccccccgcgcctcgcgccctgcaccggcgtggccgcactccgggtttcctggag

SEQ ID NO: 7986 - DNA, 617 bp, Canis familiaris
cggatcgaaccctgtgtggaggagacagagctgcagcagcaagacacagcatcaggcctggctccagagtattgcagagaaagacaacaacctggtacctattggcaagccggcctcagagcactatgatgatgaagaagaagaggatgaagatgacgacgaggatagtgaagaggactcagaggatgatgaggatatgcaggacatggatgagatgaatgactacaatgagtcaccagatgatggagaggtcaatgaggtggacatggaaggcaacgaacaggatcaggaccagtggatgatctaggtagacaaggcagggtggcctcaggtaaattccaggccagcccaacttaccctgcatcctctgcagaaccagctgattgccccagtgcctgaaagctcacccttgggtatctcttcagctgctgccaggaactggtctccttggctcctcccaggccatcagtttgcccgtgattccccagggcctgagcccaacccacctttctgcctagtacctcaccctttggttgccaggtataatctctttctaactctcttgaataaagacacaggactgattttttcaaaaaaaaaaaaaaaaaaaaaaaaaa

SEQ ID NO: 7987 - DNA, 525 bp, Canis familiaris
acctcatccattaagttcccgtgaccatactccatacccccaccccctccaccactgcctccacccccctcttctggagataacagttcttctcattttggatcctactactaggtgaaagtatgctaatttctggagaaatctggactttttatatggaagggattttttttttaaagaaagtaattatggaactagatttttaacattgtaaaatactaaatgatccttcagttgtaagttgatatatatttgtaacctttgtgaaattgtatccttatgaaaataccacttttgtggaagagagaatccaactatgtaatatttaattaaaacaatccatgtttaccctatccctgctcaattaaacagtgtatataggtctaataatagctctggagcaacttttatcatgagtcaaatatattaaacacattgatgtcttcttggtatatctgaaaacaagaggtagaagtcctgttgagagtctttaaaataaactatttttacaaatgtaaaaaaaaa

SEQ ID NO: 7988 - DNA, 499 bp, Canis familiaris
agtgaagttttaagaaggaatgttcaagagatagcccaccgtggtgggtaccccaacaatgtcaaggagccaactcagtgtgtagtacacagatgaaaagatgacatggaaatgggagactgaaattaagaggacccaaagagccttctagaccagcatggacagtaccccatatggatgaaccagaggcaaaggaaaaggctaaaggcaaagcgagaaaaagggaagggggaaagccaagcccaagcagcaaaggcagcgaagggtttggcttggtagactcttaaacacctggaaaatcctacgcgggactggtctttgattagaatgtatacacggatttcaacttcacccaatgaaaacttggtttccgtatttaacttggccttgctcttcaatacaaaccccacttaactcctcaaatttgttttgggagcttgaataaaatatttttttgatgaatgaaaaaaaaaaaaaaaaaaaaaaaaaaaaaaaaaaa

SEQ ID NO: 7989 - DNA, 532 bp, Canis familiaris
  misc_feature (66)..(66): n comprises a, c, g, or t, or includes no nucleotide
accattgaagatgtcctcagcccagaatacctgtgtgtgtcgaacagatgaagccggatcctgganaggcctgaaggaaaacatgctggagaccctggtccccaaggtcgaaggcaaccgggtgatggtggtgctggggccacaggctggaagggtgggccgcctactaggccggaacagagaacggagccgagctctggtgcagctgcggagagagaatcagctggtggagcttcactatgatgctgtctgccagtacatgggccccagtgattcggatgaagactgacctgtggccccactcccaccccaggccactgccagctctgtacagtgtgaaaagcctgtctttgcagaggcggagcagtaatccttccatcttccacttgcactgtcgccccaggacagggcaagggcaggacatgagacagatggaccagcagggaggctcgaaacaaaccctagtattttccagaagtcagtgtgtaataaaaatcatttcccaaaaaaaaaaaaaaaaaaaaaaaaaaaa

SEQ ID NO: 7990 - DNA, 635 bp, Canis familiaris
catggggagggcagaaaatagatccgcggcctaaaaggaccatgtggattttgatcctcagggacgggacttgtgggtgttagagaaaaggcatggtagagtggtgtaggagagttctgatttttcaaatccgatgaaattaccttcagtctacattttgtttttaaagacaaaattattccactggctcagccccagtggacctaggtggactgcccgagagggatctctgggcccgggcctggtggcggacctctggcacctccctgctccacctcaatcagggtagagcgctggaaggcagaaccaggtctagtggtggctggagagttccagcacggggtggggataagtccctcgtggatgcttgcacaaaactgccttaaaatgtcagtcaatacagatatacctatttttattttttactctgtaagaaaagggctcaaagagctttctcttttaacttgtctaaaaaatactggctacagaatgaaggtagatgacactacggttaataattcatgctgtatataagcattttgctttgtgaaaataaaatactgtagtatgttgtaaacactcaaagctttttccttctataataaattcttttgaaacttgaaaaaaaaaaaaaa

SEQ ID NO: 7991 - DNA, 605 bp, Canis familiaris
caccgacatcacgggctttgggattttggggcacgcacagaacctagccaagcagcagaggaacgaggtgtccttcgtgattcacaacctcctgtcctggccaagatggctgctgtgagcaaggcctgtggaaacatgtttggcctcatgcatgggacctgcccagagacatcaggaggcctcctcatctgtttaccacgagagcaagccgcccggttctgtgcagagatcaagtctccccaatatggggagggccatcaggcatggattattgggatcgtggagaaaggcaaccgcaccgccagaatcatagacaagccccggatcatcgaagttgcaccgcaggtggccactcagaacgtgaaccccaccccgggtgccacctcttaatctagacccaagtagctatctggttttgtttttaaatagagctatttcttttttcatcatttcaattaaagacgatacacgacaacaaaaatctcattgtgtctacacatctggtgaccttaggtcgatttgtgagtggatgcaattaataaaataaaatccattgccctttttaaaaaaaaaaaaaaaaaaaaaaaaaaaaaaaaaaaaaaaaa

SEQ ID NO: 7992 - DNA, 660 bp, Canis familiaris
agataattctcaatcgttgtgagaacgcgaatgttaccaagcatcgatcgtggaaaaggacagttaagatgcagggatgttgaagcgggagggaatggtgatggtgagagagacagtcgtcaatggggaagggcgttttagtatttaaagagcaaacggtagaagcggtatgccgtaaagttgcaatataaccgtgttaaagagggaggagagtaagggagaacagcatgaattccgtaagaaatgtctaaagataaaaaaagttaggtgggatgtctcaaaaagaaaacctgagagtaccgggtgtgtttgaatataaaaagaggtttttgttttgttttgttttgttttttcagagtctgaggatgaattggtggtctgcagattccttaaaaattaagaaaataaatcttattatgaaacaggaacattcaaaagtttttcgagaattgcactgcatacttcacttgtgaataatactattcatacgaagtcataattatgtaaacactgactaccaatacaacaagaaatgattgtgtggtattggggggattggagaggacacaggtgtgtgtaatgggaaagactccctcaagatctaatacagagaagtcaataaaaaagtataaacacatttttcaggaaaaaaaaaaaaaa

SEQ ID NO: 7993 - DNA, 511 bp, Canis familiaris
ctcaaacgccccaacgcagggcctgatgcccccgacagagaggatgtgaggggttcagtgggcagcactatcgccgccaactaggtgccgccctcgagcagggtcacgtggcagagaaggtgccctaaggtctgggcttcacctgaacgtgaagtgctctgcgcacgttccctgtggcaggtcgggttaagcgagtgacatctgtgcagccctcccatggccctggaggagttctccaggcagaagccaacctgggccgagtgcagggaggaaccgggcagtgggactggccaggacctcaggacccggctgcaaggtcagacagaggtgtccccccatgtgctaggcctgtctgcagggctgggtcaggagccactgtgtacccctccacgagctcagctgtacccatttgcatgtgtgccgcaagcctaagggaaataaagccccacttccccgacatgcaaaaaaaaaaaaaaaaaaaaaaaaaaaaaaaaaaaaaaaaaaaaaaaaa

SEQ ID NO: 7994 - DNA, 612 bp, Canis familiaris
gtagaattatttcagtgttactattttggtatttggaaagtcaacacacaatgaattggtttatttataaccgggaaaccaattggctgagaaaaaattgttaattctaagtcaaatttatttcaagggtagattcccaaagttacttctcgtagtctgcctctgccagtagataaaaaatttgtaccatagaattcattggagaaagagatgtcataaatggttaagattagtaataatgcttattgagggtgattatggccacttggatcacctctggtcgttgtaaatattttagctaactctccccatccttaggacataaatcatatttttctgcccatcatcaaccagaatattttttatttgacactgagcaccaactggtcatactaataaatgcccatgtcatgcagataactgggaggatgaggtacctaaaaacatacaactgattgggggaaacatggcacaagtaaggatatcatatcctatgatatctgtttattttaatttaatttcctttgaatggatagttgggggctccatttctaaggagaatagacaaagaaataaaatgatctttggcattttaaaaaaaaaaaaaaaaaa

SEQ ID NO: 7995 - DNA, 504 bp, Canis familiaris
acggttgggttttcagacttctgacttccaaaggtcccgtgggcttcaactaaggtggttgtgaagcttctttgaattctgaccccactcacgggtgaatgatctccaggaagcacgtctccagggaccatcctgaatttatgggagactgtggcaaagaaggctcttcaggagttatcgccccaagcaccgagaggaatgagaatgtgaacaatggcttctcccaaatatgggaggctgagttccttggaccccaagatgagtgctaggcccctagagagagctctgcatgtcaccaagtgaccaggccttgcctcgaggcgctcctgtctcctaacccagctttccttcctctggactccgcactgtaacgcctacgtttgctgatcatgggaagaactcctgtgggccactaactccaataaaaccgccaaggaatctgaaaaaaaaaaaaaaaaaaaaaaaaaaaaaaaaaaaaaaaaaaaaaaaaaaaaaaaaaaaaaa

SEQ ID NO: 7996 - DNA, 515 bp, Canis familiaris
cgagcccagtgacacccattgaaaatgtcagagcccggattccagacaatggagggcatcccgcctgaccatcagcgtctgatttttgcgggcaaacagctagaagatggccgaactctgtcagactaccatatcccgatagagtccaaccttgcacttgggtgcttcgcctgcgaggtggcatcattgagccttcactccgccagctggccccagaaatacaactgcgacaagatgatctgccgcaagtgttatgctcgcctgcacccccgtgctgtcaactgccgcaagaagaagtgcggccacaccaacaacctgcgcccccaaaagaaggtcaaataaggcccctccaccagctcttcctttgcccgcagggcggcctcctgcccgagcctcaataggtcctggggcctcaataaagtttccctttcattgactggagccagtaaaaaaaaaaaaaaaaaaaaaaaaaaaaaaaaaaaaaaaaaaaaaaaaaaaaaaaaaaaaaaaaaaaa

SEQ ID NO: 7997 - DNA, 554 bp, Canis familiaris
  misc_feature (52)..(52): n comprises a, c, g, or t, or includes no nucleotide
agggaatgggttgggggagttagctcgagaccacagcctgggccagcccctngggctggcagtcctgcatccaccatgtcctgcgcctgacctttgtcctcctttcttacaacgggaacacagcttgtgagcgcatgtcagcagttaacaagtggtttttaggacattcttggctttgctgaacctatctagtgcctgtttcgtgctttttttttttttttttcttgccattcctttcgccttttccttctgtcttttctccttcctgcttcttgtttctttccagtacatgagtgtctcctgagggacaaagcagccacccatgggcgttctctggatggaggtgctgctccatttttctcctttgctttctctctttactttctctctttactttagagcactggccagacccaggtgtttctttgatttttctcagcgcttctcttctaacctgcatgtagagttctgtattgctgtggcttccatggggagggggaaaaagatgaagagaaaaaaaaaaaaaaaaaaaaaaaaaaaaaaaaaaaaaaaaa

SEQ ID NO: 7998 - DNA, 615 bp, Canis familiaris
tacatcttggacgcagcgggtacttcgatgtgcgagacaaagacgagaagtggatccgcattttcatggaaaagggagacatgatcactctccctgcagggatttatcaccgcttcacgctggacgaaaagaactacgtgaaggccatgcggctgttcgtggggcaacccgtgtggacggcgtacaaccggcccgccgaccacctggaggcccggggccagtacgtgcggttcctggcgcagaccgcctaggcccgggcagcctcgcctcgcgggccgggcttccccgcgctgggccgccgctccccggggtcgccgtcgtcaccaggcagccgcccgcgccggacccgtcgcctgagcccctgtgagcggagccgcccctcggacctgggtgtgaagcagacgtgcggctgccagcctgccctgtagacgccggaccgccagacccagacgctcttctgcggcccggtgggccgggtggctgggccagtgcacccgcagccgtcatggggcgtcgcagccgcgggggccaccttcttgttccacataaagcagcggccgtgattgtgcgctcactcggcctcattaaagtccccccgccgcaaaaaaaaaaaaa

SEQ ID NO: 7999 - DNA, 641 bp, Canis familiaris
  misc_feature (458)..(458): n comprises a, c, g, or t, or includes no nucleotide
atctgcagaatgatgaagttgcatttaggaaattcaagctaatcactgaggatgtgcagggcacaaaactgcctgactaattttcatggcatggatcttacccgtgacaaaatgtgctccatggtcaaaaaatggcagaccatgattgaagctcatgttgatgtaaagactaccgatggttatttgcttcgtctattttgtgttggttttactaaaaacgcaaataatcagattcggaagacctcttacgctcagcaccaacaggtccgccaaattcggaaaaagatgatggaaatcatgacccgagaggtgcaaacacaatgacttgaaagaagtggtcaataaactgattccagacagcatcgggaaagatataggaaaagcttgtccagtttaaattaatcccaaccttcccaattggaatggttttttgggttaaggaaaaaagtaaaaatgcntgaagaagcccaagtttgaattgggaaaactcatggagcttcatggtgaaggtagtagttctggaaaagctacgggggatgagaccggtgctaaagttgaacgagctgatggatatgaaccaccagtccaagaatctgtttaaaattcagacatttaatggtgaccaataaaaacatatttgt

SEQ ID NO: 8000 - DNA, 465 bp, Canis familiaris
gttcgccggccctgtcgccgtcccttctccttcccttctcctccccttctcctccccttccccttgtccttctcttttcttttctaagatcttatttattgggcagccccggtggcgcagcggtttagcgccgcctgcagcccagggcgtgatcctggagaccctggatcgagtcccacgtcaggctctctgtatggtgcctgcttctccctctgcctgtgtctctgcctctctctctctctgtctctatgaataaataaattaaatcttaaaaaaaaagatcttatttattcatgagagaggcagagacacgggcagggggagaagcaggctccatgcaaggacgaccccagtgtgggactcgatccctatcccagggtcatgccctgagccaaaggcggaagttcaaccactgagccacccaggcatccctcaagttaaaatcttaaaaaaaaaaaaaaaaaa

SEQ ID NO: 8001 - DNA, 504 bp, Canis familiaris
tgcgtcggtcttatttttgtgttggttttacctgaataacgccattaatcagattcgggaagacctcttagcgctcagcacccaacaggtccgcccaattcggaaaaagatgatgggaatcatgacccgagaggtgccaaccaaatgacttgaaagaagtggtccaataaactgattcccagaccagcatcgggaaagaaataggaaaaagcttggtcaagtctattaatccactccatgagtttttgttagaaaaagtaaaatgctgaagaagcccaagtttgaattgggaaaactcatggagcttcatggtgaaggtagtagttctggaaaagctacgggggatgagaccggtgctaaagttgaacgagctgatggatatgaaccaccagtccaagaatctgtttaaaattcagacatttaatggtgacccaataaaaacatatttgtgatgtttaaaaaaaaaaaaaaaaaaaaaaaaaaaaaaaaaaaaaaaaaaaaaaa

SEQ ID NO: 8002 - DNA, 656 bp, Canis familiaris
  misc_feature (1)..(1): n comprises a, c, g, or t, or includes no nucleotide
  misc_feature (389)..(389): n comprises a, c, g, or t, or includes no nucleotide
ntttgatcgcgatgatgtggctttgaagaactttgccacaatattgttctccaccaatctcatgaggagagggaacatgctgagaaactgatgaagcttgcagaaccaacgaggtggtcgaatcttccttcaggatattaagaaacccagaccgtgacgattgggagaatgggctgaatgcccatggagtgtgccattacacttggaaaagagcggtgaatcagtcactactgggaactgcacacaactggcccactgatgaaaatgacccccacttgtgtgacgttcattgagactccattattctgaacgagcaggtggaaatccatctaagaattgggtgaccacgtaaccaaccacgcgcaagagtaggggggcgtctccgaganactggcacagtgcacgaggagatactctcttgagcacagagaaccaccccggggaaccagtgatagtgagagctaagcccttaggggctgtctttcccatagccgcagggtgacttccctggtcaccgaggcagtgcatgcatgttggggttacctttaccttttctataagttgtaccgaaacatctacttctttcgtttgtatcattccttcaaataaagtaatttggtacccaaaaaaaaaaaaaaaaaaaaaaaaaaaaaaaa

SEQ ID NO: 8003 - DNA, 484 bp, Canis familiaris
atcgtaccattcccgtacaaactttcctgatggagatgaagaaggacttccccgaagatttgtatgatgaaatgtgtgtcaaccccagcgcaccttctattacattgtacctgacctcattggacatggcacaactttaatttattttatgagctttggtgagcccaggaccattatataaccagggaatatattttcttaatcaccataccatacttatcccctttgtccagggcataaatacatcattcatcctcccaactaaattatgttaaaaaaaaaattaccacattaaccagatcagttatgcccaatttaaatggaccggcagtttgcatatgagccaaatctttgtaattgtgagcttcattctttttttacccagttatcttaagatgcttataaattaaacttcttttattaaaaaaaaaaaaaaaaaaaaaaaaaaaaaaaaaaaaaaaaaaaaaaaaaaaaaaaaaaaagg

SEQ ID NO: 8004 - DNA, 663 bp, Canis familiaris
ggtggttggcaggctttaggcatgaccacggagatgtctaggggcaccatgaaatcttgagtgatgtgcagctgattaagaccggagacaaagtggggagccagcgaagccacaacgtgcgtcaacatgctgaacatgtcccccgtgtcctttgggctgatcatccaagcaggtgtttgataatggcagcatctacaagcctgaagtgctttgacatcacagaggaaactctgcattctcgcttcttggagggtgtccgcaaacgttgccagcgtatgtctgcagataggttacccgactgttgcatcagtgccccattctatcatcaatggatacaagcgggtcctggctttgtctgtggaaactgattacacctttccacttgctgaaaaggtcaaggccttcttggctgatccatctgcatttgtggctgctgctcctgtggctgctgccaccactgctgcacctgctgctgccgcagccccagccaaggttgaagcaaaggaagagtcggaggaatcggacgaggatatgggatttggtctctttgactaatcaccaaaaagcaaccaattcagccaagtttatttgtgaaacaaggaaataaaggcttacttctcttaaaaaaaaaaaaaaaaaaaaaaaaaaaaaaaaaaaaaaaaa

SEQ ID NO: 8005 - DNA, 593 bp, Canis familiaris
tatcttcctaaacttagagaaaagtttaagtgatggaaattttgggagttttaaaccgacaaaaggaaaatcttactgattcaactttggcttatctctgttggtctgctgaccctcttgtgtatgtctgatggtattggtacttgagttatttgtgatgtttgtcctaaactagcagacccacacttgataatctagatcttaaaaattcaggtctaagcataatactctctagtaccctctagtaccattcacattgttgcaaatgataaaatttcattttttgatggctaatattccattgagtatataagataactatcatgcaatttcactcatatgtggaatttaagaaacagagaatcatagggggagggaggaaaagataaaataagacaaaaatcacagagggagacaaaccataagagactctataactcattttaggaaataagttgagggttgctgcggggaaggtggatggggggatgggacaactgggtgacgggcattaaggagggtacttgatggaatgagcactgggtgttatgtgcaactgatgaatcactaatctcttcctctgaaattttaaa

SEQ ID NO: 8006 - DNA, 649 bp, Canis familiaris
cttccatcagattccccttgggagtccatgatcttcattgaaaggactgactttaaagaggagccagagtcaggctataagcgcctggcgtggggccagcctgtgggcctgaggcatacagggctacgtcatcgagctgcagcatagttgtcaaaggggccccagtgggctgtgtagagagacctggaggtgacccgtagacgagccgatagctgcaggaaagccccaggcctcttatatcacctgggtgtcacagccttctgaacttgtgagaattcgcccttatggaggcgaactaatttcaggcaaccaggaacccttgagggattcccgctggaagggtggcctggttgggaattccttaaaagtggaacctggaacccagcatcgctacaagtggtggaggcagcgttagtggactgctctgtggccctggcaaagccctttgacaagttccagtttgagcggcttggctacttctccttggatccagacagctgccagggacagcttgtcttcaaccggactgtcactcttaaggaggacccaggaaaggtgtgagctgtaaggaagccccatggacctacctcatgcttctggaggctagggataccctagactccgtgtcaataaaaaacagctaaatcaa

SEQ ID NO: 8007 - DNA, 635 bp, Canis familiaris
  misc_feature (56)..(56): n comprises a, c, g, or t, or includes no nucleotide
  misc_feature (68)..(68): n comprises a, c, g, or t, or includes no nucleotide
catagtggatcaagacagggaggctacaaaacggcaagcccggggtggcgcagcgntttagcgctgcnttcagcccagggcgtgatcctggagacccgggatcgagtcccgcatccagctccctgcatggagcctgcttctccctctgcctgtgtccctgcccctctctctctctctctctctggatctgtgtctctcatgaatgaataaataaaaattaaaaaaaaaagactgtaaaattcctacaagaaaacccaggggaaagcttcgtgacactggattcgcagtgatttcgtggatgatacccaacagccccagcggcaaaagtgaaaataggtaaattagggttcgtcaagtccccagagtgaaaagccaacctgcggaatgacagacaacgtttgcacatcacgtacctggtaagggattactgtccagaatgcagaggggactaaaacaaaacaaccaccacctgagaaaaaacgggcagagggcttgaacagactcttctccaggtgtatcagtggccggcaggtgtatgagaagatgccccgcctcaccggtcctagggcaacggtgatcaaaaccacagcggaaaccgcttcactcccgttggggtagctactgataaaaaaaaa

SEQ ID NO: 8008 - DNA, 612 bp, Canis familiaris
gagctagttccttagtctcatctttaaaaatgaggtttaaaaagattagcatctatgctcatagtttttgagtattacatgggtcactgcatgtatagtgtttagaacagtgtttagcacacagcacacaatacattttagctatagttattcctctatgaacttgctattctctgccactccccctgcccattgcctatgaaatttattttctgaggctttaagcagaagaatgacatgatgaaggtgatgccttagaaaaattaatctggtagcagagcacaaggtagattgagaagaagaaaggaagaccattgttgcaaaacaagaggctttccaattcaaaaaaaaaaaaaactatcctagaatgtcttcaccaaataactttgtcaatgctttttccttctttgcttttaattattttcgaaggccactaaaagtacaataggatacatacttttccatttgcaatcagtttaggtttaacagtgcaggctaacccgttttgagcattttcacataaaccttgaaaaataagttctttttcagagtcttctcttgtgagcagaaaaggttttgcaaaaacctttaaataaataaaaaaaaaaaaaa

SEQ ID NO: 8009 - DNA, 580 bp, Canis familiaris
ccgtgaccgatccccagttccctgggaaaagtggtactcctcttcctgaagagaacaggtattacagctttgcagataagtaccagcccataggagttaaatgagtgaaatgcttctttgggcctgaccccagcaagaccagcatcttgaggctctagccttcctcctcatagcctgtgagtcagggacagagtgggaatgcccacagaccaccttctcgggttagccagatcatggggctcagggggagggggaggatcaagctcctccttccccaaggggaggtaaaggcaaggtgtctagcaacttggaagttgtctgtaatgacctttaaaggcccaacggtctgtccgcatctcctgactaaaaggcattgcatccctatttcatatcacatgacagagaaacctgttctcgtggcatgtaacatccctgtaagagcattgtatatgattttgtattttttaattcattttaatctacaggttggaatctaatttttaaattttattggaactcacattttaaaaagaaaaacatttaaaataataaaaaaaaaaaaaaaaaaaaaaaaaaaaaa

SEQ ID NO: 8010 - DNA, 587 bp, Canis familiaris
  misc_feature (333)..(333): n comprises a, c, g, or t, or includes no nucleotide
tagacccccaggcctggatgagtatgacctctataggcctggctcattcctgcctgggatgggaggccggaaaggtcgcaccaagagagaagctgctgccaacaccaaccgccccagccctggtgggccatgagaggaaactggtgactatagctcccgtacaccggagcggaaaaaacggggggcacggtcctgagaaacggagactgggaaagaggcccagagccacggaccacccaccacagcggcggaaggaccagggacccacgggaatccggccaactgggagccaagggaatcccaagaacccttgcttgccccccaccccacccncaggacttaccctacctgaccgaggctccgaggggccaccaaggaagtgactccagccccagaaaaaggacaagataggaagcaagaggcagggaatgaatggagaggcagagtcgcaaaaggtaccccctaaaaagaaagacactgaagaaattggctctcctggagtgtgggaaggaaggacaataaaccaagtacatctgccaaaaaaaaaaaaaaaaaaaaaaaaaaaaaaaaaaaaaaaaaaaaaaaaa

SEQ ID NO: 8011 - DNA, 654 bp, Canis familiaris
cggttatccacaaggccatccacaccctgggttttcctccaacgcgtgaagaaaattgagcagctgtttttgaataagggagaagaagaaacgtacttcttcgtaggagacaaatactggcgatttgatgagaagaggacaatccatgggagccaggctttcccacagcacaatagcagaagactttccagggggttgactcgaaaggttgatgctgcgtttgaagcatttgggttttactatttcttccatggattcttccaccagttggagtttgaccccaaatgcaaagaaaagtgacaacatgttttgaagagcaaacagctggtttgaatttgtttgagctgctgagatgcacaacacagtcatttgaaatgaagctaataagtctttacctaaatctttgtgaattgagctggtttgttttctcctgcatgtgtggtgactgacagtatgagggtcacctgcgtgtcttgctggtcaattcacattattattggacatttgagcatgctgctgagctggtgctttgatcacatgggataacttccacagaaggggaagcactcatgtgcaagaccagtgactgtatatagactatttacttgttatttaataaagagaattggtcagttaaaaaaaaaaaaaaaaaaa

SEQ ID NO: 8012 - DNA, 638 bp, Canis familiaris
tgtgtatctgagacagtcatatgacttctgtctggctgagtgccctgtgcagggatctctggggtggctcttggtcagggtttcctcactgcacccttttggacgccaggccagtctttctatgtctatgacagttgtcgctgtcggagccagaatacgtacagctgtggctgcaggttggtgggttttggaagccagctcctggggacagtgtctaggcagtcgttcattggagaaacatttactgagtcccatgatgatagagggatgctatgatctcaagctaaatcatcacataaggtcttgccacccactttttttgaacacttaaggattcagatgggatggatcaccatgctatggtgtcttgatgcacaggacatggaaatgacgtttgccaagccttgtcctgattgtgcctcttctcaggggaaggcagagatgttcagagtggttcctccctggagtttattagataaattcatggccccacttcaaagctgtttttttgtttttgtttttgtttttttacttgacagagcaatgctgtgctttgagaaaattattgaaaaaagtctacacattaggcagacatactgtaataaattcagaaaagacgtgaaaaaaaaaaaaaaaaa

SEQ ID NO: 8013 - DNA, 302 bp, Canis familiaris
  misc_feature (5)..(5): n comprises a, c, g, or t, or includes no nucleotide
caacnctggtcttgagttagaaagggtctgggaggccatgatgccccctcctttacccctaagttcctgggggggcggtggtttggaacttgggaacttgtgtgaggtgttcccagagggaaggggcaggagtggaaattagttggcccctactgccccccagtgaggttgtggcccctcccccaacttttcttcacgtttcttaaaggcattttggttttttaaaatctgtacagcaagagcaactttttctgtcaaataaaaatgagaaatgcaggaaaaaaaaaaaaaaaaaaaaaaaa

SEQ ID NO: 8014 - DNA, 628 bp, Canis familiaris
cggacgcttggaagccctgatgcccatatctcggaagccagaagcacgagtgggaagagaagccataaagggagctagaagaatggtaagcgaggcaggacgaggcagctacaggaaccaagccaaccacagggcagcagaagaaagcccttgtgaacgagcatagacgaatctgtccccaggcacactgaatggggacgggtggcccggctgggggaacttaaacccccaaggtccggccaagccgggcccaaagaaggtcttcccggaatggcggcctccggccttcaattctcccctcaagcaggccccctgggggcacctgaagagccatccctggggaaacactacatctgcaatatcttaatcctactcagtgaagctcttcacagtaattggattaattatgttgagttcttttggaccaaaccttttgtctttagagttgatcattgtgttgtagattgcatgtgttccttcagctgtgttctcctggcaggcagagaggagggggaggaaaagaggggggaagcctcccaaaggtagcctcaacctctacttttgtgcattattctcagaataaatttgtttcaaacaataaaaaaaaaaaaaaaaaaaaaaaaaaaaa

SEQ ID NO: 8015 - DNA, 651 bp, Canis familiaris
gatctgttctgcgtaccatctgtgtcttctctttggaatgttttgtcaaacattttatagtgaagaaccgtcttgaattttgacttactgctctacctagggtagaaaattctatataggttagaaacttccataatgttaacataaaaaaagaggttggtaatatggagtgagaactgtgtttctggaaaaaaatagagagaggcccatgtgtgtgtgtggaataactgtaatgtaatgggacaaaacacagtcccaaattaaaagccagctggaaaaaattacttaggttaggaattccaccttcttaaattggggtggtttttttttttccctggttttgtgacctttgttccccccctcattaaaaaggtaaatattgaggaaaaatgcctttgttatatatcacaatttgggggaagttattccctactttaaaagtcaaaggtttatcagtaatattggttgtcatactgtggtcaagatgtgacccattctgtagcctttttgcattttttgtttgtttttcactttataacgtttatttttctttttcctcccgttttttaatttaaattccagttaacaatgtaatattagtttcaggtgtagaatttagtgattcatcacttaatacagcacccagtgctc

SEQ ID NO: 8016 - DNA, 566 bp, Canis familiaris
ctgcccggcgcacaacactgtgcttcttcccgggctcccccctgcctcctgcaccccctggccccaacaccctggttctccctccagaccttctgctggccctttgtgagtgttctcaagtctgggggttgtccccctaaaggacttacttcctggagccatttggctctggggggcaccctctgtgagtttccgtgctgtctggggaccccacgggattccatgttctgtctgattcctggcctctcctgacctctggaggtcagcttgctgcttgaggtcttcctgctgaggtggcagcagcagcccttgccccctcctctcaaggcctgtgctgggtgcaggggatgcctaggggttcccctcagctgccagtgagtcggaggacagctgagcaggcctgggcctccactgtcctgctcactgaggcaatgactgcatttggaatgtgtacccgtcccacccggtccatctgtgacgctcattaaagcctttccactccctggaaaaaaaaaaaaaaaaaaaaaaaaaaaaaaaaaaaaaaaaaaaaaaaaaaaaaaaaaaaa

SEQ ID NO: 8017 - DNA, 516 bp, Canis familiaris
cgttccagaagcacgtcgggaagggtatggcatctgtgccttgggtggctcctgggtgctcctcggcacaggtgtgtatggctcccatccttgcccctacgcagcccatcctggagggcagccagtttgtcccatcagtccccactccccactggcttctggtagctctcgcatgcggttttattaactacagtctagaagcgatgctttagtggcctaacccggagttaaatactactctttccagccaaatccggcagctcaccccgcctacaggaggcactgattagtctactaacagccaaaggcccacacaggaggggctgagccccccagggcggctggcaggtgtcaggtggaaagaaaccatttgcttgtgagcgtctccacctgccggtgtaggctcagccatgccccatccccaagccctcccgcacccttgttctccctaaagtggaattgttgaagtgtggcgagtccgtgctcgagacaataaagcttgtgactgacgtccag

SEQ ID NO: 8018 - DNA, 439 bp, Canis familiaris
tttattgggagtcaagttgccacattccatgagtcaacgcgattatatattcttcagatttcataggtacatattcaagagtgaaaagaaagtgggaattcaggaacttggaccacgttttaccttaaaattaagatctcttcagaaaggaacctttgattctaaatatggagaatatgaatgggtccataagccccgggaaatggatacaagtagaagaaaattccatttataaaatactgaaggaatagtattgaattgtactaaacaggtctactttggatttatgacagaagaccctttttaaaacgtcatttactggttccataaaccttttcatgtctggaccaagtaacaagtgccatgaattaccattcactgtttatgtagcacatacaaataaaagtcattttggtgagtttaaaaaaaaaaaaaaaaa

SEQ ID NO: 8019 - DNA, 172 bp, Canis familiaris
acccccacaggattcccctggcgcctgatgcctcccacccaccacctgtgcgcccaccgccacctggactgccctcttccccagccctgcccccgcaggctcctctctgccgcccagacttcaataaaacgtgcttttctctcttgaaaaaaaaaaaaaaaaaaaaaaaaaa

SEQ ID NO: 8020 - DNA, 654 bp, Canis familiaris
  misc_feature (1)..(1): n comprises a, c, g, or t, or includes no nucleotide
ncttgcttctgtctggtctccctccccggctttttcctcgtgggatgtatgagtcgcgctgtgcagaaggacccttggatttcagtcattcgctctgacgcaccgttattggcctgccagtttgagtttccttctcctgtgggctttcctttctgtggctatccgcgtgtgcctctggcctctccctggggtctcttgctgtttggagaggtatatacccgtgagagctggggctccttcccaggagggacatgggctctcgttggtttggtttccagggtgggcctgttttagagattcttccccaccgcccctgcagacctccctctcctggcctggcttggatcgccgcctgttggcggctcagagtgggtgggatgggagtgtcccatctggatgtccacaggggccttgaccctgtggccatgtcccccactcccctgccgcccacaagggcccctggactagctgggcctaggaccgaggtgcctgggcgggcagcctgtgtggagacgcagctgttgccggaaggctgggtgtccctgctcggctcacctgtttggtcgtaataaaaataattctttcaagaaaaaaaaaaaaaaaaaaaaaaaaaaaaaaaaaaaaaaaaaaaaaaaaaaaaaaaaaaaaaaaaaa

SEQ ID NO: 8021 - DNA, 541 bp, Canis familiaris
gcatcagtactgtcacatctgctgccccgtccggagaagcagggcgttcactcttcccctagggacctagtttgaaggccattagaagctttgtgtttcatttgccccctggtatttgtcttgccacggatggttaggtacacaaggacgcttattagatcacctgagaagtataagcccaacccgcttctctggtatgaacatctagtttgagagcacagccaaaccgtaggcttgtattagtgctttaatggagtactggtaacatttttctttcttgataggaatctgcttatatttagccaggcttctatttcataccctctcccactacaaactttccgtgcagttacctttcatttttaaagccatttcactgctaaatataaattgtatttgtggggttcatagttatatatattctgaagggaaccactctttcgttgaaaggtgataaaagttaaataaagactgtctcccccagtaaaaaaaaaaaaaaaaaaaaaaaaaaaaaaaaaaaaaaaaaaaaaaaaaaaaaaaa

SEQ ID NO: 8022 - DNA, 501 bp, Canis familiaris
gccgggctttgcactccttccccttgtacctatctttgaaggccattagagagcctttgttgttcatttccccctggtatttgtcttgccaggatggttaggtacacaaggacgcttattagatcactgagaagcaaaatgcccaacccgcttctctggtatgaacatctagtttgagagcacagccaaaccgtaggcttgtattagtgctttaatggagtactggtaacatttttctttcttgataggaatctgcttatatttagccaggcttctatttcataccctctcccactacaaactttccgtgcagttacctttcatttttaaagccatttcactgctaaatataaattgtatttgtggggttcatagttatataatgcctgaagggaaccactctttcgttgaaaggtgataaaagttaaataaagactgtctccccccagtaaaaaaaaaaaaaaaaaaaaaaaaaaaaaaaaaaaaaaaaaaaaaaaaaaa

SEQ ID NO: 8023 - DNA, 599 bp, Canis familiaris
ttgacttgttctggagattagggcctctgggagataattataggtcatatataggttcatgagggtgggaccctgatccattaggataggtatccttaacggaagaggaagagacacctcggcctggtgactggagaagaagccaagtgaggacacagcgagaaggcagtcatccaccatccaaggggagagatcgcaggagaatccagtgttaacatctccatcatggatgtccaacctctggaactgtgagaaatatctttctgttctttaagcctcccagtctgtggtggtattttgtatgaccacccaagctaagaggcaagatgaggccatcctgcatgctggcagaagcatctgtttcttcgggagatggcagcggtgaagattctgatacctagctccgaatacatcagggaacaaatggcaggagagttgttgctagaatagcacctgtgatgtcactgggctttgttcctaatcgtgtgttcctaatcggagcttggagttctagccttaccagagacttttgaactaccttatatcctttaataaatcccttttctcttttaaaaaaaaaaaaaaaaaaaaaaaaaaaa

SEQ ID NO: 8024 - DNA, 458 bp, Canis familiaris
  misc_feature (1)..(1): n comprises a, c, g, or t, or includes no nucleotide
ntctgtgatccaggagtgagctctcgcagggggcccgggcaggacgggttgtgggtgctgtggtttaggggcctgttgtttaagactggctgattctgttctcctcttcctttaagatttatttatttggggctctctgggtggctcagttggctaagtgtcagcccgtgttcctccctcttcctcccccccccttacgtcttgctctctctcaaataaataaaatcttaaaaaaaagatttgttgggatccctgggtggcgcatgcggtttggcgcctgcctttggccacagggcgcgatcctggagacccgggatcgaatcccacgtcaggctcccggtgcatggagcctgcttctccctctgcctatgtctctgcctctctctctctctctatgtgactatcataaataaataaaattaaaaaaaaaaaaaaaaaaaaaaaaaaaaaaaaaaaaa

SEQ ID NO: 8025 - DNA, 678 bp, Canis familiaris
  misc_feature (1)..(1): n comprises a, c, g, or t, or includes no nucleotide
ngatcgcaggatcaaggtgaaaaggagaaccccatgcgggagcttcgcatccgcaaactctgcctcaacatctgtctgggggagagttgagacaagactgacccagcggcggccaaggtgctggatgcgagctcactgggccaggaccacccagtgtttcgtcccacagcttagtgtacaaccggcttagtatcactctcttggtagtcaatgcgaggaagatagatgaaagaatgttatctgctccacctgcagcagcaccgctcggggcccacaaacacaaggaagatacttgtaggaagaagatgtacaaagagggtcgacgagatatagagatgataagagaaaatatacatcttttctcgcagatatcgtgggaaaatcttgtgtgttttggagatcacaggagcactatcgattctggggatcaaatatgacccaagccattggtatctaccggcctggacttctatgtggtgctgggtaggccaggtttcagcatcgcagacaagaagcgcaggacaggctgcattggggccaaacacagaatcagcaaagaggaagccatgcgctggttccagcagaagtatgatgggatcatccttcctggcaaataaattcccgtttctatcccaaaggccaataaaaacttttcagtgaaaaaaaaaaaaaaaaaaa

SEQ ID NO: 8026 - DNA, 641 bp, Canis familiaris
gacaagccaccattgcctcactctgctctctaccactgccctgcccaatttgtctgggaccttgccgccccccccccccagctcttgctgcgtgatactggccagagttgcctctggattttcagcctctgggtctcagggtcttcccctccatatctcagatgctctgtgctctcgtgcccctctttttcagagatctcccttctctctcgcgccctatatatcttgcgcgagactctttctttgggccctatgtgtcctcctcccttctttcggcactctcttcccctttggggggtttcgagcgtgccccgggccctaaaggggaagaatgtgggaaggttccagttcctgggttctgcctgcttcctgccaactgctgtgggtggctccagtgccagctccagggtctgggacagaggtccaggtggtgtgggcccaggagggggcccccatccagctcccctgcagccccacaatccctctccaggatgtcagccttctgcgaaacgcaggggtcacttggtaccacctaccagagagtggcccagcggccccggcgctcagcctgcggcccgccgcgccctccgcccggggcccggggccgcgcagctacgtggtgctgatgcgggctcccggcg

SEQ ID NO: 8027 - DNA, 639 bp, Canis familiaris
tcacccccacacatcttggggcaggacctcgctaacttcaggagcctcggcctggaaaggaaaggagtgggacagctccgcgcattctgaggcaacggagtggagccaccaccagcagagagctcgcttctttctgtcacaagggcccaggacagggcagcctcgtcccccgccggcttccacaacccaccaggacggccaggttcccggctggtctcctgctggggacagtggttaagacatttgaaaagttagctctccccggagacagaaagatgcttcctaaaaggagaatgtagatgtctttctccagcccatcaataagtcatttttgtaatagagccaaagcgaatgttctcgattagaagagcttagtggctgttggtagtgttaaaataataatccttctagtatcccaaggtttctattttttttttcagggaaattttcacattgatgatgaatgaaactagttccattttggaggtcattcctgaccataatggcttttgttctgctgctctgaatcttgtacgttccatctaatatgtcactgtgctgctgtatctagatcgaaccactgttgttgttttttttttaagagaaataaattccttaatgaaaaaaaaaaaaaaaaaa

SEQ ID NO: 8028 - DNA, 534 bp, Canis familiaris
gcatagcctaatctagagtcacacggtgagccccttcctccttgcttccaccgtgttaccaaaggacacggggctttcacaatccatcccagctccttaattctgcgtgaagacatagccaatgcagtgaaattgccgtgttcacaccaaaagtcagtggctcagaagaatggagctaagtaagaaatcacagcctatactcccgtgtgaaattgttttgggaaatcagagagcactttagaagagaggttttcaaacacaacccacttgtgcattggaactcaatttagtgctttgagaccagcacttgctttaaaagaaaaataaaagaatcgagtttatcagaatgcatcaggttccacggcgaaatccacttttatactatctctgtcatgtttttacttgactacatcatggtaagggtattgtttctataaaacttctgtttttgttatatgtatttatgtacacagtgtgtttgtttataaacatttatatacatacccagaaaaaaaaaaaaaaaaaaaaaaaaat

SEQ ID NO: 8029 - DNA, 343 bp, Canis familiaris
  misc_feature (1)..(1): n comprises a, c, g, or t, or includes no nucleotide
nccccccgccgccgggggctgtgccctgatgaccagcgccctggggatgaggaatcgctgctggtcagaaagcagctgccacagtggaacgttctgtttacgactgtctttaccggaggctgttctgttgtcttccatttcccttcacgcccgcgagctgacgtcgtggttcctgtgaatctgggttgcatgtgggtacgttggaagaaaggcgatctcccacgcctcggtagacgctttgtggttggaataaaggacgcagatttgccaaaaaaaaaaaaaaaaaaaaaaaaaaaaaaaaaaaaaaaaaaaaaaaaaaaaaaaaaaaaaaaaaaaaaaaagc

SEQ ID NO: 8030 - DNA, 488 bp, Canis familiaris
ccccctctcgagggaagtgcggccatctgctgcagaggttcgatgaggacgatgccatcgacctgtttgtgcagcgatgaggatggaggacaaggagcggctgcggcttcgggaggatcggctgcgacagtatgctgagaagaaggccaagaagccagcgctggtggccaagtcctccatcctcctggacgtcaagccttgggacgatgagacaaacatggcccagctggaggcctgcgtgcgctccatccagttagacgggctgacctgggggggctccaagctggttccggtgggctatggcatccgcaagctgcagatccagtgcgtggtggaggacgacaaggtggggacagacctgctggaggaggagatcaccaagttcgaggagcacgtgcagagtgtggacattgctgctttcaacaagatctgagccccagcaccgggcctgggtgtgtgaggccccgcagccattaaagactgagatt

SEQ ID NO: 8031 - DNA, 302 bp, Canis familiaris
  misc_feature (13)..(13): n comprises a, c, g, or t, or includes no nucleotide
tatgggtaaagcntgtattagctagtggagccactttctgtattgctgtatgggcatatacagcaacacacaattggaatagaatggaacctgtcccctgttggcagagtcaccccccaaggaatggagggatcagtaatcccacgctggtataataatgaattgtttcaaaaccaactcataattgatgccaggagaaagcactgtgcacctactaaaatatggcatgatttaagaaataaagtacatttgaaaccttccaaaaaaaaaaaaaaaaaaaaaaaaaaaaaaaaaaaaaaaaa

SEQ ID NO: 8032 - DNA, 555 bp, Canis familiaris
ctttaagcatcagtaactgtcacatcgtttccccttccggagatcagggcttgcactcttccccttagtacctactttgaaggcgattagaagctttgttttcatttctccccctggtattgttcttgtccaggatggttatggtatacaacggacgtcttattagagtctctgagagagatataattccccatcacccgcgttcttcttcgtgtgatagtgacactttaatgattttaggagggaccagaccaataccgttgagcgctgtgaataatggcgctttaatggagtacctgtgtaccatttttctttcctggatagggaattcttgctaatatttagccagggcttctatttcataccctctcccactacgaactttccgtgcagttacctttcatttttaaagcaatttcactgctaaatataaattgtatttgtggggttcatagttatataatgctgaagggaaccactctttcgttgaaaggtgataaaagttaaataaagactgtctccaccagtaaaaaaaaaaaaaaaaaaaaaaaaaaa

SEQ ID NO: 8033 - DNA, 564 bp, Canis familiaris
agagcattcggaacgtcacggttgatggcacagaacgcaggcatgatgggcatgggccctcgcagaacccggggaccatgggcacgcccccagcccagtcggagatgggactggccccttacagcaatccgcctaccagccagccgggaatgtacaacatgagcacaggaatgacccaaatgttgcagcacccaaaccaaagtggcatgggcatcgcacacagccaagcccaggggacaaggccgcccgcctccgggccaggggtgggcatggtgagtggttttgggcagagcatgctggtgaactcggccatggcccagcagcacccgcagatgaaggggccggtgagccaggccctgcagaggccccagggcccgccccggctgcagggcatcctggggaccgtccagcaggggacgcagggctggcagcagaggagcttgcagggggtgcccgggaggactagtggggacctgggctccttcaacaacggcgccggctacccgctgcaggctggccagccgcggctgagcaagcagcacttcccgcaggcgctgggccccg

SEQ ID NO: 8034 - DNA, 522 bp, Canis familiaris
tatctattttttatcttttaagggagccagcaatgtatatttaaatttttatagaatctgatttaaccatttaccatagtatgagatactaattttttaaaagagatttaattcaattatttatgagagacacagagagagagagagagagaggaagaggcgggctccatgtggggagcccgatgtggggctcgatctccggactccgggatcgcgccctgggctggaggcgggcactgaactgctgagccatccagagatcccagtatgagatattcaaagtattctcttaaggtggataatatcctgactttccaaaaatttagtaattccattattctatcacactttagatgattgctttgctttgtatttttctgtgcatacgcttgatttcaatggctacaacttccccagagaaaggaaaaaaaataatggagatgattaaaaaacttttaatgtgattactttatagtaaacacagggaggatattgtagggacaaatacacattttgtaaaaa

SEQ ID NO: 8035 - DNA, 508 bp, Canis familiaris
tgtgggactcctaccccgggccctcgctggacgccgtgaccgccttctgcggcgatcttcgacccgcttcggtctacccgcaggcacccgaggaggctgggcgctgcatcggcgagggggcgtcttcgggtgtctgctgcgcaccttcgctcccgccgtggtgctgccagcgggcgctgggcgacttcgcgctcttcaagcgcgtggtgcgcagcctggggcggctgggcccgcgcgccctgtgcgccaagctagcgtgcgcgcgctccgagctgcacgagctcttcccggacttcgccgccctcgccgcgctggccttggcgctgcccgcgggcgccggcctcctggacaaggtgggccgcagccgcgagctgcgctggtgggggccgagcggggccggggaaggccggggcggcccggcggtgaagatcgccgtggatgggccgccgctgcacgagtttgactttgcgctggccgtggagttcttggagagcgggtgggcggaggg

SEQ ID NO: 8036 - DNA, 602 bp, Canis familiaris
tatggagcgccaggatgtggccgagatcaccaagcagctgccccctgtggtgcctgtcagcaagcccggtgcccctcgtcgctccctgtcccgctccatgtcccaggaagcacagagaggctgagagggacggtgacctgggctccactgcgcccgccgcgggctgggcccttcctggctaggaccatggaggggagctgctggccatggatgctttgtagtttgcccagagttgggggctaggggaggagggagccagaggccaggatgcctgggtcccctgagttcccaaagggaggggagcaaagacagtggccacgaagggtagggagctgggggccagcacagccaagtgcccgccagccctaggagaagggacagaagatgccggggaggacaagtggtccctgaggggagtgaccctggtccgggccccggcttcagagaagatgaggatgagtgtaaggggatctggaatgctctaggaagaattggaggagacgggagtgagggggacgtgaagagggcagaggggagagtggagcccccagcatcctctgttagcgctgcaataaacgctcaattgtgttccagaaaaaaaa

SEQ ID NO: 8037 - DNA, 605 bp, Canis familiaris
  misc_feature (142)..(142): n comprises a, c, g, or t, or includes no nucleotide
cggagatggttcgctactcgctggacccacgaaacccgtacaaatcatgcaaagtcgagaggttcaaatcttcgtgttcacgttaaggacacacgtgtaactgccccaggccatccaagggtagagcatattcgttatagcncaccaagtatctgaaagattgtcactttgcagaagcagtgtgtcccattccgtcgctacaatggtggagttggtaggtgtgcgcaggccaaacagtggggctggacacagggtgcggtggcccacagaagagtgctgagtttttactgcacatgcttaaaaatgcggagagtaatgctgaacttaagggtgttagatgtagattctctggtcattgagcacatccaggtgaataaagcccccaagatgcgacgtagaacctacagggctcatggccggattaatccatacatgagctctccctgccacattgaggtgattcttactgaaaaagagcagattgttcctaaaccagaagaggaggttgcacagaagaaaaagatatcccagaagaaactgaagaaacaaaacttatggcccgggagtaaattctgcatagaataaatgccaaataaaaataaaaa

SEQ ID NO: 8038 - DNA, 547 bp, Canis familiaris
atcgctcctgcaaaatttcaagttgcccaatgacaagaaaggctaatattgcactgttcagtaaatcactatactaaagattttcccttgaaatgttagtgaatggatttactttgctgaggtttatgggaactatctgaaatatgtattagaagacacttcagtcatcatgaaatgaaatctacttccagcccaacctccaaatatttaccgtgtcttcttgattttccactctactgcacatattttaaggaaaagtaacccaactgagttgtttaggcagttaatattcacctgagccaaatttttttttaattaactctaagaagagatttgctgaaggttatagaaaaggtattttatgttgaacataagaatattcttcttcccaccagtgaacttttgaaagcttagtttggaattagtggaaactgtccctttgataacccagatattatttaaggtgtaaagcgagctaataaaatgtcttagtttgagcatacctgccaaaaaaaaaaaaataaaaacaataaaaaaaaaaaaaaaa

SEQ ID NO: 8039 - DNA, 611 bp, Canis familiaris
ggcactcactaacaccacgtttcttcagatcatctctttctctttggaggatttaccctctgataaacagccactaagtgatgcctggacttactgcatcagtaaaaatgaatggatacagtttaatcatccctatactgaaaaacccagattatggcatacagcttgtgccacgtgacgaaggagaagtaattgtttttggtgggtgcgccaacaccttcttgtccatcacagagctgcacacagtaacgaaatacttatattttcagttcaacccaaatctcttgtaaggctaagcttagaagcagtcatttgctttaaagaaatgttagcccactcgtggaactgccttcccaaacacttacttcacagtgttaatcagaggtttggtagtaacaacacttctggatcttaaggcttcgtagataatgcctctgatcacccttgcatggacagcaattctgtaaacatcagagagtggcattgtttgtataatcatatgcattgttgtagtttgcagctttttggttttaatgtgcatgtgaatggcctagagaacctatttttgtgtctaaaatttaccaataaatgtatttaacacccaaaaaaaa

SEQ ID NO: 8040 - DNA, 572 bp, Canis familiaris
acctgccccctgagtatcctgccatcaccgctgagaagtagccgggaatgtctggctagatttgcccagaggaccaggccgatcctggtcacagtgagatcagttgccaccaggtgtccgaaggtgccaggcgcgggtcctcgtccatcacatccagtagctccaagcccagaccacctacatcgctttgccctcgagcatgaggcctctgagcaggtggagatctacctctggaaactgataaaagatgaggaaactgaggctcagagaggtgaagtacctggcccaaggccacacagccagaatcttccacttgattcagatcaagaaagtcaggaagcaagacttccagaaagaagcacagaacttccggctactcaccagcacccatgaaggttactggaatgttttcctagcccagaccccggagctgaaggtcacagccagtccagaccaagcaacctagaccttgtaatgaagacctaagcagttgcagatacgagctttaccctttttgttgttatatattaataaatgataagttgcattactcctccaaaaaaaaaaaaaaa

SEQ ID NO: 8041 - DNA, 570 bp, Canis familiaris
aagaaggagactccctctgttggctacttccagtctccccagccagttctcagggcccatgatctctctgactttcaagcggttttccaggctaaacccaggcacagcccatgtgcatgcataggcaaaggatgtgccagtgtaagaagatggcatgatatggaagtgtattccttttcaggcctgcagagtgtccctcccttggccccagaacgaagatccatgcttgaggactactctcagtcactgcacaccagaactctctctggctccccccgctcctgttctgagcaagctcgagtctatgtggatgatgtgacccttgaggacctgtcaggctacatggaatattacttgtatattccccagaaaatgtcccacatggcagaaatgatgtacacctgatagtaagaagctaattaatatgctttaaacccaatgaaaggttgtcagagagatttagttaatggcagaccttgcggccacgttgtgtgagaagacatcttctgctcactgtgcttgccaataaaaacttttcttggccaaaaaaaaaaaaaaaaaaaaaaaagg

SEQ ID NO: 8042 - DNA, 640 bp, Canis familiaris
atacgtgcccatctgcaggtccaggtgatggatgcctgtcttagatgtcaagctgaaaacctacagaggattgtgttttggtctggggagaatgtaatcattcctttcacaactgctgcatgtccctgtgggtgaaacagaacaatcgctgccctctctgccagcaagattgggtggtcccaagaatcggcaaatgagagtggtggaaggctctcttagtgcatttgtttggagccctggtggatcacattaccacgtgccagaacactccagggaactaattcttccaacacggaggagatggctctgtggtcttttggtactcatcagaggcatggtttagcacttttgttagttttattttcagaaattctctacaattaagaagataatttattaaagatggtctttcctacctctgtggtatgtgtcacatacactgcttagaagtgctttaaaggaggagagagctacccattgaatgactttataatttacttactgatatccaaggggctgtggaagcagttccatttggaagagaacttgttgcatgcttatagttgatcagttaaaaagaaagaagaaaaaagacactgttataataacaaataaagtgcagtttaaaacgcaaaaaaaa

SEQ ID NO: 8043 - DNA, 447 bp, Canis familiaris
ccttgatgtactgcaaacatttttcttcagtctctctcacttagcccatagtttacaggccaaatcaaaccacctccatcacccaaagcagtattgataaaacgaatgctgaacttggattatgaaaggtttagttcccagaactcgctgtactgctggcagggccaagtgagtaggaatattctggtttagggggaaaaaaactgcttgtatttttttcaactggcagataaagaatgatagtgcccaaaatgtgcaggtggaaatggaacatggaggcagcccgggtggctcagcagtttagcgtaccttcggcccgaggtgtgatcctggagaccctggattgagtcccacatggggctccctgcatggagcctgcttctcactctacctgtatctctgcctctctctttctctgtctctcatgaatgaataaataaagtcttt

SEQ ID NO: 8044 - DNA, 577 bp, Canis familiaris
  misc_feature (1)..(1): n comprises a, c, g, or t, or includes no nucleotide
ntccaccccccgccccaagttttctgtgtgtgttttgggggaccagcaacactgtgatgaggccaaggcagtggacattccccacatggacattgaagcgtctgaagatactctaccatgaatataaaaactatgtccaaaagtctggcccagaagtatgatgcctttttggcttcagaatctctgatcaatgcagattccacgaatcctgggtccaggcctgaataaagctggcaagttcccttccttgctgacccaccatgagaacatggtggcccaagtggatgaagtgaagtccacccatcaaattccagatgaagaaggtgctatgtctggcacgtggctgttggccaccgtgaagatgacggacgatgagcttgtgtacaacatccaccttatgctgtccatttcctggtgtccttgtctcaagaagaattggcagaacgtccgggctttgtacatcaagagcaccatgggcaaaccccagcgcctttactgagaccatttaataaatcctagtgctaccgttaccaaaaaaaaaaaaaaaaaaaaaaaaaaaaaaaaaaaaaaaaaaaaa

SEQ ID NO: 8045 - DNA, 618 bp, Canis familiaris
ggttaattggttgaagtattatcagtgaccagctttcagaggaaacactcctcctacgtgttgtgttcacgtgatgccggtggcaagcatgcccttggagtcgtggagccctcgtctgtgatgtgacccattcacaggcttctcaggaggaaccagacgaagttggacaatttgggagcacccaggaggccctaagtgcagggactgactgctatccttaaaagtgggtgttgtcaggaagagattcccttagaggtgccctgttagcctctggctggcgctctaggtggatggttttctctgtggcctgagagctgcttctctggtgtctttctctgtggggttggtttccgtgcctgtgaatacttcccgtaggtttcagggtctttctacaaagacaggagctgtgtggatcctttacacgtctgtttgcccagacggtcatcgttggctgaggttctgattgagacccttcccccccaacggatcttaatgtttcccactcttgtttcacatgtaatttgagaagtgtcactgtttttccctttggggaattacatctaaatcctggtaactattaaaaagcatatctggtttaaaaaaaaaaaaaaaaaaaaa

SEQ ID NO: 8046 - DNA, 572 bp, Canis familiaris
gtaagggcattcctgctaccgacccaggaggactggagagaggaagcgcaatctgttcggggttgcattgtggatcccaatctcagtgttctcaatttggttattgtgaaaaaagggggagaaggatattcctggactcacggatactactgtgcctcgtcgcctggggccccaaagagccagcagaatccgaaagctttttaatctgtcgaaagaagacgatgtccgccagtatgttgttagaaagcccctaaaccaagaaggtaagaacctaggacccaagcaccccagattcagcgttcctggtacttcccaccggttccccccaacaccaaacgtcggcgtattgctttgaagaaacagcgtactaagaaaaataaggaagaggctgcagaatatgctaaacttttggcccagagaatgaaggaggcccaagaaaaacgccaggaacagattgccagagacggaggctgtcctctctgagagcttctacctctaagtctgagtccagtcaaaaatgagattttctaagagtgacaaaataaataagatcagacacccaaaaaaaaaaa

SEQ ID NO: 8047 - DNA, 571 bp, Canis familiaris
  misc_feature (481)..(481): n comprises a, c, g, or t, or includes no nucleotide
gcacatatgatatatctccccgtggccatcagagttgtaggtccatttactcgtatcatgctttttgacactttgagtcagtgtgcatttctggttaactcttatgaagtgggcaaggcttcattttgtctgtagtcctttctagagtatactacggccttgggatgcctgggtcgactcagtggttgagctgtctgccttgggctcagggcgtgatcccggggtcctgggatcgatgtcctgcaccgggctccttgtcagggagcctgcttctccctctgcctatgtctctgcccctctgtgtgtgtttctttcttttttttttttttaatttttatttatttatgatagtcacagagagagagagagagacgcgcagagacacggacagagggagaagcaggctccatgcactgggagcccgacgtgggattcgatccggggtctccgggatcgcgccctgggccaaaggcaggcgccnaaccgctgcgctacccagggatccctctgtgtgtgtttcttatgaacagatacaataaaacttaaaaaaaaaaaaaaacttaaaaaaaaa

SEQ ID NO: 8048 - DNA, 716 bp, Canis familiaris
ttagttgataagcggaatttcaccagaagaatcaaagacgcttttgaagtgtttgaccacgagtcgaataatacacgtggatgtgagagagatcggacacattatcaggtcactagggtgctgcccaagcgaaggagagctgcatgacctgatcgtagaggtagaggaggaagaacccactggatacattcgatttgaaaaatttcttccacgtgatgacccaagtactactagaaaaaaggtacagacccattccagaagatatccttcttcgagcatttgaggtgttagatccatcccaacgtggatttctaactaaggaagaattgatcaagtatatgactgaagaaggtgagcctttttctcaggaagaaatggaagaaatgttgtccgctgccattgacccagaatcgaattccattcgttacaaggactacatagccactgatggtggtagatgacggctaggtgccctgaagacttaatttctcattgaaaggatgacctgtaaagaatggccctgttcctttgttaatttttacatcttataattcctacacatgctaattaatacctggtgacaactatttcaagatactttgttttttaaaagatgaacacaaatttatttggtatgtctagacttacagaatgacaaatgactaattattttaaagcccattctttaaaaccaaaaaaaaaaaaaaaaaaaaaaa

SEQ ID NO: 8049 - DNA, 537 bp, Canis familiaris
  misc_feature (1)..(1): n comprises a, c, g, or t, or includes no nucleotide
natgttacactatccaccgctaagtattacccacagacatatatgagtaatctttccggcctgacccctagccactgatatgattcatctctaccctagcaagaaactaatcgagcccccttcgacttaactgaaggagaatccgaactagtctctggatttaacgtagagtatgcagcaggtcctttttgccctattctttctagcagagtacgccaatattattataataaacatcctcaccgaccattctattcttcggcgcattccacgacccattcatacccgaactctactctattaacttcactataaaaaccctcttattaaccatctgcttcctatgaattcgagcatcataccctcgattccgctacgatccattaatacacttattatgaaaaaattttctacccttaactttagccctatgcatatgacatgttgccttacccccttatccccgccagtatcccccccccaacataaaaaaaaaaaaaaaaaaaaaaaaaaaaaaaaaaaaaaaaaaaaaaaaaa

SEQ ID NO: 8050 - DNA, 569 bp, Canis familiaris
caaatctaattgcattcactcataatcagcatgcctcatgggagaggtatggactccacgtgggagagtcctaccttgtgctcacattagtttatctgtcattaaattccctgtgtgtgaacactgctatgctattctggtcttaagcttattgactatataactccagtgcctgattttctcagaaagaaaatttctttttctttggcctagttttggttttcttaatgggcatgagttttcaggttcctgccatagtccaagcacagtatggacttactttgctttcagttatgcagcccatagactagtggtttgaaatcacttcttccaaactaccatttaacccgagttcctaaatatatgaaaccatttttttaaaaagaattccatatgtccaagtttgaagatttctctacccctgtgtttatcttgtcatttatccattgaaccaaaatgagagctaaagtaatgcctatgatgaatttgtatagcatattctgtctaaaaataaaatgatttactgatttaaaaaaaaaaaaaaaaaaaaaaaaaaaaaaaaaaaaaaa

SEQ ID NO: 8051 - DNA, 601 bp, Canis familiaris
  misc_feature (291)..(291): n comprises a, c, g, or t, or includes no nucleotide
aaggcacagcagaccaagtctgcagcggattgtggatggcgtttagccttgggtcatgggaaagctgcttttttttcttttcttctagccttaaaagctaagcgattccttaccatgaggctgttagcaccgcactgtagatctgaaagtcacaggcagattttcccatttcagaaaagtgtgcttttcagacctctcagacacattatgtaggataaaggagtttttcttaactgaattacattctaaaagttggactgtgtgcttctggggaaccacgtgcccagttanattctcagaatgtttgaggggacacgaatttttaatgttgttaggttcacacaaaagctaacttgctggacatttagccctgaggagtggttaaagggccgtgccaacctgaggccatctgtccttaaatgtccatggagggcagcccaggtggctcagtggtttagcgccaccttcggcccagggcatgatcctggagattcaggatcgagtcccacgttggcctctctgcatggagcctgctcctccctctgcctgtgtctctgcctctctctcattctctctctctcatgaattaaaaaaaaaaaaa

SEQ ID NO: 8052 - DNA, 625 bp, Canis familiaris
cccacgcaggctcttcctgctggtgacctgcacagcatggtgagcgtgtccacacccatcgcggacatctatgagtccggagaaggatgtatgatggcttcctctacatggtctacgcctcccaggaaccttcggcttctgagccatgcacgtaggcggggttgtgttggtcctgggagtgtcgtggggtgccctgtcaggctctgcccagggaactcctggctcctgaactgaactgctctgcccgggctggtctggggcagggatgctggccccctagccagggggcaccgaactgcacctactcttgcccctgggtggatcctgggccagtcattgttagggatgccctcctgggtgctggctgggatgggggagggtggggaacagcccccagcactcttgctcgtgtgatttatcttttttttaggcccctgcccatctgcccctccctcacctgaggcgctgcccccctgcctggacctgcccacccctgaaggactggcccttggctcacctgatcttgacatggtgtatggatctgtggtcattgttcctctgccagaataaagattgctcaggcccacaaaaaaaaaaaaaaaaaaaaaaaaaaaaaaaaaaaaaa

SEQ ID NO: 8053 - DNA, 611 bp, Canis familiaris
tcgcacgaggtttgaccagatatatttccggcgttacgatacggatccagacggctggattcaggtgtcatatgaacacgtatctgtccactggtcttcagcatcgtataaccctggcctttgcacacggcaacgtgacttatgcacaggacggctcacaagatgcccaatctccctttaaagaagtgggacacagatgcagccagctcttcctttagatttcatatcactaacgtttgggaccgactgtatatatgtggataagctgataaggtttttgcgaatataataatacttataatcattatttacaccccagacctttgatttgagactgtccacgttgtgccatgaggttagatatgataatgtttcagggtatcctgcatgccaaaaatccactcatgtgcatttctagagaaactcgagttctatagtggaagtacttttattagcccataggaatttaaaaataatacggaacttgcaccgaggcttttacgtgccttacatttttaaaatgcggtttattgtatttgtttgaatatgccacctaagccataaagcacatgcgccctccaaaaaaaaaaaaaaaaaaaaaaaaaaaaaaa

SEQ ID NO: 8054 - DNA, 617 bp, Canis familiaris
aggtctattttctgtatttaccgtagccgggtaacagctatttgtcctagctaatttcgtccttagacatcgttcttcatgatacaatattatcttgtagctcattttcactatgtgctttccataggaccacgtttttgccacttatgggaggatttgcccccctgattccctttattctcacggttatactcttaacgatacttgagcacaagattcactttacaattatgtttgtgggagtaaatataactttcttccctcaacatttcctaggtttatctggaatacctcgtcgatactctgactacccagatgcatatactacctgaaataccgtctcctctataggatcgtttatctcgcttacagcggtgatgcttataatttttatgatttgggaagcctttgcatcccaacgagaagttgctatagtagaacttactacaactaacattgagtgactacatggatgtccccctccataccacacgttcgaagaacctacatatgtgatccaaaaataagaaaggaaggaatcgaaccccctaaaattggtttcaagcccatgtcataaccattatgtctttctcaatcagaaaaaaaaaaaaaaaaaa

SEQ ID NO: 8055 - DNA, 525 bp, Canis familiaris
  misc_feature (1)..(1): n comprises a, c, g, or t, or includes no nucleotide
nggtccagaaggtctctgcctctggagtagaggacctcaggtggattatcttctggagagagtcccgaagcttctgcctctggagttggggaccttagtgggttgccttctggaagagaaggtctagagacctctgcctctggtgtaggggacctcagtgggttgccttccggagaaggtcaggaagcctctgcctctggagtagaagacctcagcagattgccttctggagaaggtccagaagcctctgcctctggagtaggggagctcagcgggttgccttctggaagagaaggtctagagacctctgcctctggtgtaggggacctcagtgggttgccttctggagaaggtccagaagcctttgcctctggagtagaggacctcagcatattaccttctggagaaggtccagaagcctctgcctctctctctctccctctgtgactatcataaataaataaaaaaattaaaaaaaaagaagctaaaaaaaaaaaaaaaaaaaaaaaaaaaaaaaaaaaaaaa

SEQ ID NO: 8056 - DNA, 640 bp, Canis familiaris
gcgaccatccggccctggagctccttcgtgaccagcggcgcttctcgcggccccgcacacctgggcgagctgtgccagcgccctcgtacgcagcgtggagtactaccagagcaacttatgtgttcgtgttcctgggccctcaatccctgtactgcgtggtgaccgtccccaaatgcttgctggtgggctctggctgtcttcttttgggcgcctgttacatcctctatctccgcacattgcagtccaagtttgtgctgtttggccgagaggtgagcccagcccatcagtatgctctggccgggggcgtctcctttcccttcttctggctggctggtgcagggtctgctgtcttctgggttctgggagccaccctcgtggtcattggctcccatgccgccttccaccagatggaagctgtggatggggaagagctgcagatggagcctgtgtgaggacctgcgggcctctggaatcggctgcctcatccctgttcccccctgccccgcttggccccgaggccctggccaaaggcctccttcccatctcgagcccagggcgggattccagctgtggaaataaagctgttacagttgtcattcaaaaaaaaaaaaaaaaaaaaaaaaaaaaaaaaaaaaaaaaa

SEQ ID NO: 8057 - DNA, 492 bp, Canis familiaris
catccttcccgtcgtacttgcgacgaggacctcctgcacatctagtctcctggttgcctacgggagacgcgggtccggcctcgccaggcacctccaacctaataagacttcagctcgatgatgcttctatcatttttgcctttaaccaaaactgtttcaaaagggaagagtttcttgtgctgggggagagggtgcaggaggtcaggtttacagtccttggaacgaggctctgctcctgtcactgggggtgggcccggggccctcgggttttgtccccagccctcactcttaaaagcgtggcagccgggcgcttcatagtgtgtgcccgggccagacgcatcttggaaccgagggctgcgtatttgagacaaaacccttgctgctttaggccctgtatggttttgaccatctatattttagcatttaattctctcctcctatttattgactttgacattactcaggtttgcgaaaaaggaaaaaaaaaaaaaa

SEQ ID NO: 8058 - DNA, 648 bp, Canis familiaris
  misc_feature (1)..(1): n comprises a, c, g, or t, or includes no nucleotide
ntgggatggagttcccccttatgtggcccccatggtgtctagatgagtatgagcagctctcctctgaagccctggaggctgcccgtatttgtgcccaccagtacctggtgaaagctgtggccaagatggttttcacatccgagtgcggctccatcccttccatgttatccgtatccaccagatgttgtcctgtgctggagctgaccggctgccagaccggtatgcgaggtgcctttgggaagccccacgggcaccgtagccagggtccacattggcccagtcatcatgtccatccgtacccagctgcagtaccaggagcatgtgattgaggccctacgcagggcccagttcaagttccctggccgcccgaagatccacatctcccagaagtggggctttactaagtttaatgcggacgaatttgaagatatggtggccgaaaagcggctcatcccagatggctgtggggtccaatacatccctaatcgtggccccttggacacaatggagggctctccactcatgagaaccttgcacccacccgaaccctattctatgccccacccaataaatcctgcttccctgtccaaaaaaaaaaaaaaaaaaaaaaaaaaaaaaaaaaaaaaaaaaaaaaaaaaaaaaaaaaaa

SEQ ID NO: 8059 - DNA, 638 bp, Canis familiaris
  misc_feature (345)..(345): n comprises a, c, g, or t, or includes no nucleotide
gagaggagaggcccctgtcttctgctcccctgtgccttccttctccccgtgcttggcttctgctgccaccctacttttgctttctcttcggccccttcttttatgctgtatttaaacttagaggcttgaatgtactgaaagtggtatttgacacaggaacggattggaaatgggaacagcactggtgtctggggaagattttagggggactaaatgtatgcatttttgtaagcatttgattttcatactttttgagcaggcactgagcccatgtagactaaaatgggtggaaatgcaaaaatcccaagaaaccaacttaagagtagggggataagcacacaggcnacttccgtgctatcccatatcaccccctaccatgccctctgtccagttctgtcaaagtaacgctgttatcccagtagaaactggaggtaagtataaatatccccaattgcactcgtgtggttaggcaggctagaaaaacactcggtgctagagagtgtgggaggcatccccaaactagagactacttgtgcttagtcagactggcagacactctgtcgggaagagtgtctttggctgattgatggtagcattttaggagataagttttccagatggaaaaaaaaaaaaaaaaa

SEQ ID NO: 8060 - DNA, 697 bp, Canis familiaris
  misc_feature (1)..(1): n comprises a, c, g, or t, or includes no nucleotide
ncagtaacagccaccctggaggagaagaggaaggaaaaggcccagatccattatcggaagaagaaacacgcttatgaggctacggaaacaggccgaaaagaatgtggagaagaaaattgaccaatacacagaggtcctcaagacccatggactcctggtctgagccccataaaattgacttattcatcatgcttggcctggcctgcccttcctccatcgccgccctaggatatgggggactcccacggggctgctgccctcatgcctcaggccacctggggcttacagtactgggaacaccaggctttagtcactactgttaagaaaggtcttctaaaaagttaaaaaaaaaaattcttaagagttctgaggcataagtgcctgtgactcattcctgagagttattagtgcccctttcactgtaagccagaaagacctggaaaatggaggggagcccttcgttgagaatggggtgtatttaaacttgtcatgcacagtcaggcgctatactctgtagctgttagggtgtgaggatgctgggggcccagcctggtgtacacgaggtagttccagatctgtagatggggaacagcccaggggtcacaggctctacccttgtgctatccctgtaattctgtgatcccaacctaataaattatttttaaagaaaaaaaaaaaaaaaaaaaaaaaaaaaaaa

SEQ ID NO: 8061 - DNA, 495 bp, Canis familiaris
aatgttggcggcttggtgtaccagctggatggggttccaacccaacatctcaagtaaaggtcaattgcacctctctacagggtggacatcctcgaacgttgcactgctccgctcaggccgtcctggaccggaagattgaattcccgaatgcccatacgaggaggcccgggccagaatcatgcagagtccagctcccgcaagatgaatgtgcagtcctgatgtgaactatgaggagctggcccgctgtacggatgacttcaatggggcccagtgcaaggccgtgtgtgtggaggcgggcatgatcgcgctgcgcaggggtgccacggagctcacgcatgaggactacatggaaggcatcctagaggtgcaggccaagaagaaagccaacctgcagtactacgcctaggaggttgctcgccacacctgctccctggtctggtgctggttaaaattcaaaataaaagatggtttcaggaaaaaaaaaaaaaaaataaa

SEQ ID NO: 8062 - DNA, 609 bp, Canis familiaris
ggataacaatttcacacaggaatacagtctatgaccattaggcctatttacggtgacaactatagaacaagtttgtacaaaaaagcaggctggtaaccggtccggaattcccgggatcctggagagcaattcattcttcccagtgtctgaaaggtaattgtttgcctggggcctaagcgtctctgctcctttgggcaccattggaatggagccatctgggaggtcagggacggggactgcctgaggagagctagccctagcctggcccctgcccagatgccattccatcactgatatttaagtgaaggggaggatccctagactatgttcttggctccagactcataatccacaaagcccaaccagctcatttcaacaaaggagcgctgatgtgaggggcaaggctgcctctgctccaggctcttcagaaagcatctgcatgtgaacaccatcatgcctctataaaggatccctattacagggacagcatgagtggtggctaacctgaccaataaagttattttatgattgcatctgcaaaaaaaaaaaaaaaaaaaaaaaaaaaaaaaaaaaaaaaaaaaaaaaaaaaaaaaaaaaaaaaaaaaaaaa

SEQ ID NO: 8063 - DNA, 601 bp, Canis familiaris
  misc_feature (200)..(200): n comprises a, c, g, or t, or includes no nucleotide
  misc_feature (204)..(204): n comprises a, c, g, or t, or includes no nucleotide
  misc_feature (300)..(300): n comprises a, c, g, or t, or includes no nucleotide
cctttggagaactagggaagaaaccgataccaggagctggcccataattagtgttgtgcactaatgacttttatctatgtgtcactaatagtttttaaattctgtagcgggctgttttaatattttacttaaatttttgcattcacgccatcaaatggtacttcgtcccaatcgataatcttgatcagagcctggggtgntgcnggggagtctacagctgaatgcagcctatttttaaagtagaaaatattttttaaatgagtgttccttcttgaaaaaaatcagtgtattggtcaaaanatgctgttgttaaaaataactgacaaataaagtttgctttgagatgcacaggtttcaaagtataatctcatatttaattctgtaaagctctcagtcccttgttctcattttcctttttcatataagtttaattaattatgcacatttaatttatctttcttcctgttttttctaatgctaatgttatttcttataactcagtaagatacggagtaaaataatgcttttggaagaatgtttaatagaaaattaaaatagcttttcctgaaaaaaaaaaaaaaaaaaaaaaaaaaaaaaaaag

SEQ ID NO: 8064 - DNA, 354 bp, Canis familiaris
gcagtgtgggcctcagactgccctgcagtcccccggcagcctgcagccctcggagttcctctattctcacggcgtgccaaggaccctgtccccgcaccagtaccactctgtgcacggagtggccatggtgccagagtggagcgagaacagctaaagcgaggcctgcttcgtcacagacgtgtgccagagagagaggagagagagagagtacgtgggagaaagtgaaagacagtagcagagagagccccatggatgagatacggatgacatttttcattacagcctgttttcacgtctgcactcgcgagccccggacgctgatctaatcagtcgtttgaaaccacgattcaaaaa

SEQ ID NO: 8065 - DNA, 608 bp, Canis familiaris
  misc_feature (17)..(17): n comprises a, c, g, or t, or includes no nucleotide
taaagaaagaaaagaanacaagggggatccctggatggctcagcggtttactgcctgacttgggctcagtggtcctggagtcctgggatcgagtcccatattgggctccctgcatggagcctgcttctctctctgcctctctctatgtgtgtctctcatgaataaatagaataaaatctttaaaaagaaaagaaaagaaaccaaaatactgttatttatctggccctggggtgggcagacagaagaaatggagtacaggttctgctgacactggggatcataggagctttggctcccctggggattccatcctagcagagggactttacaagacactaagcaattaatgctaagtgacatgttgctagcataattacagttgaggttttggagaaaagtaaattcaccgcatgtcaaaacatttgttggagtgtttatggagaaagaggggaatggtcttgggttatattttggcttacattctctgagactgtgcaatcatattatttaacaggattctatgctaggcactttaatggggaaatgtcctttttttaaagtctctagaaagaaggtgcagaggattaggagaaactactggtaaaaaa

SEQ ID NO: 8066 - DNA, 628 bp, Canis familiaris
gagatggtcccggagctggtggtgcccgagctgaccggcttccggctcaagccgtacgtgaactaccgcgtcccggcgggcacagaccagcccctgacggccaagcagctgttccgggaggcggtggcacctgccatcgagaaggacttcagggacggcgccttcgacccacagcagctggaaaagtacggcttcgagcccacccaggaaggcaagctcttccagctgtaccccaagaacttcccgcgctaggggtccccggggctgaccccggcgggatggaagcgtgcagcagggccggcccggggacctggaagccgtcgttccccgcccacagcgtctgcggcacagggaaggcggttcacaccccaccgtccatcacccggagtcaaaggagcatattcatggggtcaaaagcaacggctctggcgggcgcacctccagtaatctagcctctttcccctttggcttcacccattcagtgcagagtccctcgggcctcttgtgttctgcccaacatttcattgatcccttgtgttaaataccttcaaccctacagatgggtccaaattcttctactgaaataaatgcattagctaggaatccaaaaaaaaaaaaaaaaaaaaaa

SEQ ID NO: 8067 - DNA, 580 bp, Canis familiaris
gccaggggaccaacagtatgtcaacttgcccagaggcggtgggctaaagccacgcccccccagcaggcctgcctggtactatagcatcagaaactgtcacatctgctcgcccgttccggagagcagggcttgcactcgtgtcccgctagaacctacggtggaaggcaattagaagctttgttttcatttcccgctggtattgtcttgccaggatggttaggtacacaaggacgcttattagatcactgagaagaaaaagccaaacccgcttctctggtatgaacatctagtttgagagcaagcaaaacagtaggcttgtattagtgctttaatggagtactggtaacatttgtctttcttgataggaatctgcttatatttagccaggcttctatttcataccctctcccactacaaactttccgtgcagttacctttcatttttaaagcaatttcactgctagaatataaattgtatttgtggggttcatagttatataatgctgaagggaaccactctttcgttgaaaggtgataaaagttaaataaagactgtctccacagtaagaaaaaaaaaaaa

SEQ ID NO: 8068 - DNA, 623 bp, Canis familiaris
aagcagatagactgaaagctgcaacctatggctttaaagctgcgtgctgaatattggtgcttgtaaactgaagatgtcaaattggcagggagcagttgacagttgtttggaggctcttgaaatcgatccatccaataccaaagcattgtaccggagagctcaaggatggcaaggattaaaagaatacgatcaagcattggctgatcttaaaaaagcacaggagatagcaccagaagataaagctatccaggcggaattgctgaaagtcaaacaaaagataaaggcacagaaagataaagagaaggcagcatatgcaaaaatgtttgcctaagaagaaactcggttttacttaaatttaaatatgcattggttgtgtataaaggcaataagaacatttaaaggctttgtctgttgatgtatgatgccctgatgtgtttcctttgatacttcagtttcccattgtttacagtttaagaatactgaaaagaattcactcttaacagtgttacagaaacagtgaagtggatttttttaaatgcctatttgcattaatcacaaagaataatggtatccaatgtgttccaacacatcgtgttgaataaacaggattgtgacttaaaaaa

SEQ ID NO: 8069 - DNA, 642 bp, Canis familiaris
actctgctcatcagcatgatcctggcgtgtcctcttatagaaggagaaactctaaaagggattatactgggtaagatacaccatttgtgggggaggaggtgggggaaagaatccaaaacttctatatttttttgtgcaaaaacaatggtgaagaattagctactttcacatcgggatcgggggagtctgtccttcagaggtgtgctggtgcaggccagcagaaatcggtgacctgctggtgaacatgggccgtgcactactccccacttccgaacaccgtgccatgggtttgtgcagtgaaccacgcagcaatgtgggctctgcgtgacagtaccatatcatgaaaccacacacgtcactctcccactaggactgtcatttgaatctcttggtcataatctcacaaggttcttcttttcagttaggtaaatagaaaactctagtcacagagttgtgctaataaatgactccagctgatgtgatgatgagggcttttccttttcatagttttgtaagcagttttattgctttgatcattctcgaatgcatggctctattcatccagactggggtaataagagttggacagcaaaatataccagcaataaagaaaagtagatttttcaaaaaaaaaaaaaaaaa

SEQ ID NO: 8070 - DNA, 623 bp, Canis familiaris
gacagagggggcttccgtggtggccggggcatggaccgaggtggctttggcggaggaagacgaggcggtcctggtgggcccgctgggcctttgatgggacagaatgggaggaagaagaggcgggcgtggaggacctgggaaaatggataaaggcgagcaccgtcaggagcgcagagaccggccctactagacgcacgagagccccgcagaggctgcacttgagctaccacgagatttaattttttaaaaccacggaaaatgttttaaaatttataaattccataatttataattgttggccaacaaacacattatgagttaattccttgtctgtaactttagtaatttttcaccatttgtgaagaaacattaaacaagttaaatggtagtgtgccgagtttttttttccttcttttaaagatggttgtttaactaaagactaaacaatggggaaccccttgtgagcatgctcagtatcattgtggagaaaccagagggcctctaactgtaacaatgttcatggttgtgatgttttttttttttttttttaaataaaattccaaatgtttataaacagtcaaaaaaaaaaaaaaaaaaaaaaaaaaaaaaaaaaaaaaaaaaaa

SEQ ID NO: 8071 - DNA, 500 bp, Canis familiaris
tcgtatacccctgggaattgctgtagtttttccccaaatgccttcatcttttttggaaggactggtttttaaatttggccccacctgaagacttatggccatggaaacacctgagtttacttctgcacagcagccctgcgtgggtttttactgctcgctccccaattttttgtaattgccatgtttctgaaactcatttttgagtgtagtctcagcttcagtttgtgtaatactaaatcatgagaatttcctatgtgaaacaccaccaaaatctgttgtgtgcatcggattaacttataaaatgttgaaaatatgccacatgagtaatttgtattaagttttatcatggtgtaatttgtaaaaataaattaccaaaaatattatggatgcatcttatacaaacatttgtcatatccaaaggtcccaaactataattaaagtgctctgaagatttataaaaaaaaaaaaaaaaaaaaaaaaaaaaaaaaaaaaaaaaaaaa

SEQ ID NO: 8072 - DNA, 565 bp, Canis familiaris
taagcacctctgtatgccagacactatgctagtagcttaacatatatctcacttcatgtccattgcttccaaagcaccatgacatagacatatgtatagccatgtagggaatcacatggtaagtgagacttagggggtagtgaacggccgtgagaagcccctactaagtggaagagctggtttctaatttagatcggtttctctctgaagaccaggctctttctcccacacccagctgcttcaccaaccatagaatggtttatattgctgaagtaaatggactgagtcctctcaaaaactcaagcagagtagtatagggtcaacagaaagagaaccataacttatctttgacgagttctactagcttgcaagagaagggtggagcagagcaggacaagatgttaggcatggccagagtggtccctggagtagtttatctttggtttgatttaagaagaagaaactcacagagaacttgaggtttctaaagtatgcagatagagaagaagaaagaaagaagaaagaaaaaaaaaaaaaaaaaaaaaaaaaaaaaaaaaaaaaaaaa

SEQ ID NO: 8073 - DNA, 640 bp, Canis familiaris
caagtctggtttgcttctagaggaattggcttggttagtgacccaggatggggtgaggtcctatcagagcgctgcaaaggtagttcttactggaattggtgctgatgagcaacttgcaggttattctcgccatcgcgtgcgctttcagacacatgggatggaaggattaaatgaggaaattgagatggaactgggacgaatatcgtctagaaatcttggtcgtgatgacagagttattggcgatcacggaaaagaagcaagatttcctttcctggatgaaaatgtcgtctcctttctaaattccctaccagtttggaaaaaggcagacttgactttaccccgtggaattggtgaaaaactgattttgcgtcttgcagcagtggaacttggcttaacaacttgtgctcttctgccaaacgggccatgcagtttggatccagaattgcaaaaatggaaaagaataatgaaaaggcatctgataaatgtggaaggctccaggtcatttccttagaagacctctctattgaaaaggagattgaagtgtaatatttcacgacgtaacagcatttactgaatgatgattgtgtaaaaataaaacactttgctgctttattatcataaaaaaaaaaaaaaaaaaaaa

SEQ ID NO: 8074 - DNA, 583 bp, Canis familiaris
cagcagctaaaaaacccccagcacctcaatcccctgtccaggtctcagtccccctctacgcaactggtcaccagcggtaccggtcaaaaaaggctaaaagcccaacaccaagcccatctccggcaaggaactcagacccagaaggaggtggaaagaaaaagaagaaaaagaaggacaagaaacacaaaaaggataagaagcacaagaagcacaaaaaacacaagaaggaaaaggccatggcagcagccgctgcagcagctgtcactcccacggcccctgcggcccccacgaccacatcagcacaggaggaaccggaggcagagcccgagcctaagaaggaaacggagagtgagcctgaagacaacctcgacgacttagagaagcacctgcgtgaaaaggcgctgaggtcgatgcggaaggctcaagtgtccccacagtcttaggcgggaatgtgtgtcacgatgtacattttatttggtttgtacgcaattcaatttcaaaattgctaaaatgtgtttgagctttagactataacatttgttgtaataattgctaggttgaagttcaccatgtaaaaaaaaaa

SEQ ID NO: 8075 - DNA, 597 bp, Canis familiaris
  misc_feature (380)..(380): n comprises a, c, g, or t, or includes no nucleotide
gttgtttttttgttgtttgtgaacgctgtgatgctgtgtgccctagagggcagccaccgctcagcccttccttgggcatctcccttctgagagctgtcaggaccacatctgtcctcaccctgtgggaccgcctgcccctcccctccctagcccttccagcctgggggctgcgcgcgcgtgtgtgcatacgtgcacgcgcacacaaacacacatacacacacaccttacctctcatgcgtgttttactttttgacgttaggagtggctcactggctgggagcctttacctcggggagagggggaggttggttccttggggggccaaagaagggcagggagtgcctggaggggaattaagggttactaaagccctggctctncaggaacagcttctcccccatcccagggtcccatccccatcccccaaagaggtggcccttgtttacagtgaggactctggtcactgtgtctccgtttcctgaaatataaactgtagcgaccccagactgtagagatttttatgtgtttggatacatctgctgtgtgggaaaaaaacaaaaaccctacaaaaaacaaaaaaaaaaaaaaaaaaaaaaa

SEQ ID NO: 8076 - DNA, 546 bp, Canis familiaris
cgacgagaagatcacgcagctgcctgaagaagcacaagtccggcggcggcggcggcctcctgctgcacgcgtccgagaacgagagctcgtcctgagcgccaccgccccggccccgcgggcgctccggcctccgccccgccattcaggggccctttgctattttctgagatgtacatgtctatttttttaacctggaaattgagggggtcgggggagagagagagatgagagagagagagagagagagatggatggagagatggagagatggagggagagggatggagatggagagggagactcgggggctgatcacaaggcagaaaagaccacgcaccgcgctgcgttccaaggcacctgccccagcagccaggccgccccccagccccgctcggcgccccaggacccagtcccccgcgggagctgcggccccgcaccgccccactcccctcccgcccgtgccccccgcggcggccggggcgggggcgggggcggggaggtgttcccgaaggctcacgcccaccgcagggacctcggagccgcgcg

SEQ ID NO: 8077 - DNA, 599 bp, Canis familiaris
gactttaatgctttattttgagcattaaagaaaagaatctgttttccaacacctacataactggacctgcatcctctttagaaatgttgtttaataaacattgttgctttatcatccagaggctattgccaaacgctgttaactaggcaaaaagaaaaagggggaaaagtttttttacaggtttgtgtaacatccactcttcttcttgtcgtggtatcttagcttgaaatccaggaagcaatggtgtatggtgtccatatccatgatttcctgaattggagaaaaagtgtggaaagcatctggggaaaaggaggctctttaccagcttgtttcctgtaagctcaattggaagaccttgtctgtgcaaatagatttcaaaatagagcctgccctttgactgtctccataattacatggctcactctgtattttatttggcagccagagcagttaacccctggaaggaaggggctgatggcatggccagcttggcttccctgacatgtccatgggaatgaataaaccactgtttggagaagcccatagctcaaaacacaccagaacagtcttcaactgaactgaaacttaaaaaaaaaaaa

SEQ ID NO: 8078 - DNA, 628 bp, Canis familiaris
ttcagatctaatggtaatctgggacgcccattgtgataaagactttcaggtgaaaagacttgattttttgaaaggattgtttacccaacacaattctaatctcttctcttgtgtatttttgtgcactaggcgcattgtgtagcagttgagtaatgctggttagctgttaaggtggcgtgttgcagtgcagagtgcttggctgtttcctgttttctcctgattgctcctgtgtaaagatgccttgtcgtgcagaaacaaatggctgtccagtttattaaaatgcctgacaactgcacttccagtcacccgggccttgcatataaataacggggcatacagtgagcacatctagctgatgataaatacacctttttttcccccctaccccccaaatggtaaatctgatcatcttcatgtatgaacttaaaatacgggaaatgttaaggaagcaaaatggtttgtaactttgtaagtacttataacatggtgtatctttttgctcatgaaaattctgtactataaccattgtttctgtagtttaattaaaacgttttcttggtgttagcttttctccagaaaaaaaaaaaaaaaaaaaaaaaaaaaaaaaaaaaaaaaaaaaaaaaaaaaa

SEQ ID NO: 8079 - DNA, 425 bp, Canis familiaris
tttctacagaagcctttggcaaaagattgcaaggaaatctcccatcaatgagaacctacaggatctttgcagtattcctaagtggcagactgtagagtttattcaggtcaagccttttccttttcatgtgacgtgaaactattgggtcactttttatgtagttaattgacccagaagataggcatatggacggaattctagtggagaaaaaggaatcagggcctcctgggtggcttagctggttgggtgtctgccttgggctcaggtcatgatcccggggtcctgggattgagccccgcatcagccttcctgcttgatggggagcctgcgtttccctcttcctctactgttcccccatgcttatgctttcttgctctctctttcaaataaataaataaatcttaaaagaaaagaaaaaaaaaaaa

SEQ ID NO: 8080 - DNA, 597 bp, Canis familiaris
gatcactatcgtgggagattgaagcccgtcttacacgggcactcacaccacccgtcacccctctctgttcttctgagcagcactgacatggtttgcatcctcctcctggacggtggggggtggggggtcaggaaatccgaacctttgggccccctcctaccttcccaggaaggctttactgagttttctttctccttccatgctcctgacaaggaaactggggacatccagaaaagccttcagcagccccgactgcaaaaacactgtcagtgacgtgatgtgattgatgtttttaatatgtcaggaataggtatgcacgcaagctatttttattattcctgtggtattttgaatgtggttattcttcttaacgtgtaattcctgcatgtccagtattgagatgaaattgctaaaactgcctttgccttcaaataagctctgtctttgtgaatgtgtacgttcctctgtatgtcagataaattggcctctatctttgctgctgtaattgcctgtctataccagaaagcaagaagcaaacactgctttttagtgaaaaaaaaaaaaaaaaaaaaaaaaaaaaaaaaaaaaaaaaaaaaa

SEQ ID NO: 8081 - DNA, 604 bp, Canis familiaris
tcttgcgagccgagactgacagccttcgggatgtcctggctgagaaagaacgggagtgccaggcctggtgcaacaagctctacagcgggtgaatggggaggcccggatctgcgcactggcctccgagcccccagctgttcccacctgggaccagggcctggtagagtggctacaggaactgaacgtggatccaggcaccatccagatgctgctgaaccacagcttcaccctccgtaccctactgacctgtgccactcgagatgacctcatctacacccgcatcaggggagggatggtatgccgcatctggagagccatcctggcacagcgagcaggatccacaccagttaccgctggccgacaggaggccgaatgagagctgagacaagaggctagacccaaggacagatgaatgaagacacaagcagcttctgatacacctaccccaggactcaggggccaactggaggaggccaggttgagggtagcgggcagggtagggcccaggcctagccccatggggggagtcaaccatagagatgccccaagcatatcaagtaccaccaggcaaagactattaaacagaacacctttgtacaaaaaa

SEQ ID NO: 8082 - DNA, 558 bp, Canis familiaris
gctgtgtcctctctggaccaaccccacttgatgtcaggaacatgacttctctgcttatcccatacgtaatacaggtgttaagtatcttatgaagcaagatcattaaatactaaaggtcaaaggattaatttgtaacgtctgttatactacattagcttcaatacatccaaacccaaagaccgttaggtagatttatttttatataagcatgtttattttgatcagatgttttaacttggaattgaaaaaaaatacatttatgagatgttttataagatgtgtaaatatagaactgtatttattactacagcaaagatccagtaacacaaagggccatgataatgaaccatgtacagtggcataatcttccgtatatattgtgcttctctgcccattttcttaaaactcattaactgtatataatatgtgtaaatgtatagtacttgtaaatagatcccaaacttgcttttctattgggtacaaaataagataaatttgtaataaaatgtgtgactataaaacaataaaaaaaaaaaacaaaaaaaaaaaaaaaaaaaa

SEQ ID NO: 8083 - DNA, 622 bp, Canis familiaris
aggccagcttcgaagaaaagcccaagggagaagtttgcaagacgagttgtactgctgtcacaggaaatggatgctggattacaggcatggcagcttaggcagtcaagagaagttgcaggaagaagaaaggaagcagaaaatgctcttaaaccccaaggggctctactgcagaacccacaaccaggtccataaaagcagttcctgtctccctttcccggcctctctttggctttctgctctatcacctacatgcctcatcccagccagaagagagaaccttcacgtccccgtctgtcttcagagcacagagcttggacaccaggaagaactgcctagaagagttggcttagtcccctcctcccctggctctgctccagttcagcagaatattgctctgggacactttatcccctttgcaggccataggactggcccaatcaactatgaacagtagctgctctgcaaacatgaaaaaggagcagcagctctcctggctatgctaggcactcaagcttataacagaccagacacagctcaggctgcatgtagttactcatttaataaatgttttgttgaaaaaggcccaaaaaaaaaaaaaaaaaaaaaaaaaaaaaaaaaaaaa

SEQ ID NO: 8084 - DNA, 393 bp, Canis familiaris
  misc_feature (1)..(1): n comprises a, c, g, or t, or includes no nucleotide
ncctcaacatttcctaggtttatctggaatacctcgtcgatactctgactaccccgatgcatatactacctggaataccgtctcctctataggatcgtttatctcgcttacagcggtgatgcttataatttttatgatttgggaagcctcttgcatcccaacgagaagttgctatagtagaacttactacacactgaccttgagtgactacatggatgtccccctccataccacacgttcgaagaacctacatatgtgatcccaaaataagaaaggaagggatcgaaccccctaaaattggtttcaagcccatgtcataacccttatgtctttttccatcagaaaaaaaaaaaaaaaaaaaaaaaaaaaaaaaaaaaaaaaaaaaaaaaaaaa

SEQ ID NO: 8085 - DNA, 604 bp, Canis familiaris
tcagtgttccagatgtatcttagctaaagctagtgaatgccctaacttagatggttttgaagcctgtacatttggtattgtttgacccttaaacttttacatctcttagcatggaggacgaagaaaggctgtacattgttgcttgagagtctgtacatttagacccaattgtatttgcactgtcagtatggcaaatgagtggaaaaaatgttaatacactattggattttttatttttttgattcagcttgtcccaggctgaaaacctcatttatgttcatgacaagtggggattttttttttttttttaatgtctacattctttctaataaactgttggaagactttttggctgtccttttaagtgtctggtttactgtaattcatgtattaccatttactggaatggagtttttatttttacttgaggaagaatttgggaatattcctctgtttggaaaaaaaaggcttgctgtgatgtcaggaaaccttttaaaagtggatctgtaatagcaaattgtagatgcactttgcagcagttggaaaagaaagtgttgtgatttgattgaaataaaactaaatgtgttgtcctcctgtaaaaaaa

SEQ ID NO: 8086 - DNA, 658 bp, Canis familiaris
  misc_feature (458)..(458): n comprises a, c, g, or t, or includes no nucleotide
  misc_feature (541)..(541): n comprises a, c, g, or t, or includes no nucleotide
gcctacgtctcctttgggcctcatgccgggaaactggtcgcggattgtagatgttattgatcagaacagggctttggttgatggaccctgcactcaggtgaggagacaggcgatgccgttgcaaagtgcatgcagctgactggacgtcatccctcaaagtttcccctcacaagtgcttccgcccagaagtattgtcccggcaagccttggcagaaggctgatatcgataccaaatgggcagctacaagatgggccaagaagattgaagccagagaaaggaaagccaagatgacagactttgatcgttacaaagtcatgaaggcaaagaaaatgaggaacagaataatcaagcttgaagttaggaagctaccaaaagcagctctcctgaaagcttctcctaaaaaagcacctgctgctaagggtgcggcggcagcacctgctgcaaaggttccagccanaaaggtggctgctgcgggcaagaaggctccagcccagaaggttcctgccccgaaagctgcaggccagaaagcagcacctccanaggctcagaagggtcagaaagctccagcccagaaagcacctgctccgaaggcatctggcaagaaggcataaaaaacataagaggctgttataaataagtaataaaggttctttttga

SEQ ID NO: 8087 - DNA, 692 bp, Canis familiaris
  misc_feature (94)..(94): n comprises a, c, g, or t, or includes no nucleotide
gatacctcggccgatcgcacgccccccgtgctggcgacgaccccattcgaatcgtcttgccctaatcaacgtttcgattggtagtcgccgtgcnctaccattggtgaccactgggtgacaggggaatcaagggttcgatttccggagtagggagccttgagaaacggctgaccaccatcacaaaggaaggacagcagcgcgctgcaacattaccccacctcctcgacgcccggcggaggatagttgatcgcagaaagtaatcaactacagcgagctctcttcgacgagccccgctaatatatggtgagatagatgttcccccatctttataatactctcttttaacgaaggagtactcccatttaagagggcacaatgcttcggtgtgtcgccacacacaccgccgcggataattccagcctccaatagcgatatattaaagttgctccagttaaaaagttcgtagttggatcttgggagcgggcggcggtccgccgcgaggcgagccaccgcccgtccccgccccttgcctctcggcgccccctcgatgctcttagctgagtgtcccgcggggcccgaagcgtttactttgaaaaaattagagtgttcaaagcaggcccgagccgcctggataccgcagctaggaataatggaataggaccgcggttctattttgttggttttcggaactg

SEQ ID NO: 8088 - DNA, 599 bp, Canis familiaris
ttaaaaactgtttttggttggtagcaattcaaggcttttatcaagactttattgactggaaaaccaactttgtcatagtgtacatttgttatccacagatgttatcaacatttggctgagcataatccagatatgtagagcaagttgattttaattttcatagttgttttccttagtttcagcctctcaagccaaaatatgcaaggaacatgcaacttcaaattgaacattttgtacataaagtcttactttaatgtcagttgtcttctctcgaagctgtcagatttttccctctgatagctttcataacatactctttcagaaagagtagaacttaatgcttgataataaagggttgaacgtaaccttctcaattcatgttctagtgaatggaaaaaccattcagcaaaataagaatgggtgtggggaaactgagtcttggatacaatatggatgtgttttaagactaagcatacttgaggggcgcctgggtggctcagtcagctcaggtcatgatcccagtcctgggatcgagccctataaaataaataaaatcttaaaaaaaaaaaaaaaaaagactaagtgtacttaaaaaaaaa

SEQ ID NO: 8089 - DNA, 625 bp, Canis familiaris
attccagggatgttacccctattcaaagtttttctttggggttgcctctggagtcttggtgcctgcttcggacaccttaatgattctcaatctgcacccatgctcattcagtgcagagtcccgtgaatgatgtctgtggtcaagtgagatcacaggggcaaagctcatggaccgactagtgagggaaatagctggatttaattatgtggcttttaagctggctgtgaaagccattttgtaatttcagagagccttctgagtgatacccactttctgatataagcctatagcttgactccctgggaggaccagccattgatttggatgtgagaaaatccaattgtttgaagaaatctgtccgttactttctggtcctcccaggttctgactttaccagggcccaaaatttaaaaaaaaaaaaaaaaaaaaaaaaggaaagagagaagagggagataaatcccatctgtgaatttgtcttattggcgccttttccccccagctgtcttcccagtattatttttactgttaaaaaaatttttttaaaaatgtgaaatgtaatgtttttacagcgaccatatgaaatatattttataaggaataaaaaaaaaaaaaaaaaaaaaaaaaa

SEQ ID NO: 8090 - DNA, 645 bp, Canis familiaris
catgaagtacccactgatgatatatatgatagaccctcatgatttttctattttcagggaccccgggcctgtgtgatagcccactggatggcattttaatgactaccaaagtcccctaaaatttaaataaataaataaatcaaaatttcttttgagatcaagacatatttgtctttgttacataaagatttttaaatatctagaattaggttatataattcataatgtgtgtggtttttatagtaatacactccaattagtaaagacaaatttaatttctacccttgtatgaatgtaatgttagtttttaataaccacactcatgtatggttttgattatcccggtggagtgattgtgtatgtatgcataggaatgttttgttcaaatgtattttggattttcaataatcatgaatccaattttacctttatgtataaaaaccctttatgtaatgtaaaatgtataatattgtacataatattcagaataccattattttggtaaattagtttgtatttttaatgtcccagttgcagtatttaattatttgaacccccttgaaacttggtaatcatcaataaagctataaaaagcccagtggtaaaaaaaaaaaaaaaaaaaaaaaaaaaaaaaaaaaaaaaaaa

SEQ ID NO: 8091 - DNA, 603 bp, Canis familiaris
agatatttccaagtattattcgcctaaaagtagctatttgtgatctttatttaattgcctcagattgtgattctttagcttctcaactttcttacgtattgccatttatagtgggctagcagttttctgaactgttttcccaaacaggtaaaggatactttcagaaacctcagtagtataattaaaaggatctatatgtccaggatttggagtcatcactggtgaccagaattgttttttctcttctcccttgtattaaaaactagatttctttatcactatacagtgcagttgctacaattcacggctttctcttgatacttttcaaggttattcaaaagagatacagacctttgttaagggctcttatttctcataatattctgccttgcttattttcatacttcctctggaataaacctgctttgcaaagatctgcgtcacacaggccatataaattcttagaaccagttttatgctcctcagaaaactctgtacgttatttgctcctgttttgctaatgataatataattctattttatcttaaatttaaaatattttataatagagcactaatgaacacctaattgaaatacaaaaaa

SEQ ID NO: 8092 - DNA, 603 bp, Canis familiaris
agcgtcttcgcgcgctgagggggatgcctctgaggacaccctcatggtggactggttccaagctcattcacaagaagcagctgctctgaggcaggagtcggagctgatgtacaaggccagggaccatgcagctggcagaggagcagtctgaacctggagggggagctgcgtcagctgatggccaagcctgagagtctgaagtcacccctggaccagcagcgggaggcggatctgctgagccggtacataagtacagtggaggtaccgcagcaacatcgtggacgtcctggaggaggaccggctcagagagctggaggaggacgagatgctacagaacatgatccagaatctggatctccagagaagcagtggggatcagaagaagaagtccaagttcagcttgtccagagtcctgtccctgaggagcaaaaggaaccccgagtgagctgcctggccagccgcaggaccctgacccttggcccggggagggtggccaccgtgggggtggggttgtggtgtggggatgtgcaccaccctccctgtggggtctgagcagccacaataaaggaacaaccaccaaaaaaaaaaaaaaaaaaaaaaaaa

SEQ ID NO: 8093 - DNA, 602 bp, Canis familiaris
tttaacttgttgatcaggcactattacaagccctgacatgaggaaaactgggatatagttgcatgacttttctgaggttatttctctctcataaagcccagtttggatgtttctggtcagtggacagctttccatgatcattctgagaccagactccttccgtcttggggctacctgtctccagtctagagtcttctttgttgaaggagcccacaccaggagagggaagagaaaacgaccatttttgtgggtcaggttgaaagccttatcccttacccatgttcctttggacaaaactttgttgaatggcccatgtcactgaaagagattctgggaaatgtgtcttaattgtgcctgggaggatgggaaatgggaaaaccactctctggaacagctagccagtttgccatgctcacataatttattcttctccttttgggggtcccagtaaaagcattgaagagacaaacgagcccccagagcatttcaagttgtccatccgctggatgatgtcttgatgctcttaattccattactccgagcatgagtgttattttcctctagattcttagtactgtgtagtgaacagaaaaaaaaaaaaa

SEQ ID NO: 8094 - DNA, 588 bp, Canis familiaris
tttttgatagccagagatgctttattatccccacaccatctttttctcatctgggatgaatctgtagaaaggatttaagctgaaagaggaccaaggaaccagctctgtgaaaaggaaaaggaggaacctccttctttcattagagcataactgagtgaacttcttagtgtgggctagtgtggctcatgctcccagagtcccagccttctctgtcctttagggtggattgctatagttcaaagtcaagctttagaggatgggaaaagggtgaagtcagaaccttcctaaagcagagggcaccatcagtgtgaataaattcacttcagaatccccagagaaatcacttcttgttgttttgaaccagaatggatcattactgtgtactaaagggtattagactgcctcaggtgcagtcagagtggctacagcagttccaacatagtgtagacttgtactttacccttcctatattccttccattcttactggtgaacacagatggtagatttagctgctctagaattcccataaagtataatatttctaaaaaaaaaaaaaaaaaaaaaaaaaaaaaaaaaaaaaaaaaaa

SEQ ID NO: 8095 - DNA, 639 bp, Canis familiaris
  misc_feature (169)..(169): n comprises a, c, g, or t, or includes no nucleotide
gaggtctgcctgcctccttgcgcgcccggcggggtcgcatgctctgccaggagctcgaggcgttcagagaggccaagcgtcaccgtccgctgatcgccctgcccacccacgaccccgccacccacgggggcgcctctccagaggcatccggcaatcagaagtgagccanaatgtcgcgtaattctgcaagacggcaccgtccacctcgtgccctcctcttgaccaggggctattccatcgggtcccgcctctaacatctctcgaggtcgcgttccctctgcgggctcccccacccccagcccccatgccccaacctccccatgtcaggctcttctctccttggccctctccatcaggctgaggagatcctagtaacacctctaaaaatgtacaaactcaattggctttcataaccccccaaattaccccccccaaattatcccaaattacacaacagaaaaacctacgaatttctgaaaatatctctctctctctctctctctctctctctctcacacacacacacacacacacacacacacatcagtccccttaacaaattggctttttaggaacaccagcaattaattagttaaaaaaaaacaaccctaaaattatcaattggctaaaaaaaaaaaa

SEQ ID NO: 8096 - DNA, 703 bp, Canis familiaris
cgtctggactgtcccacgggctttgtctccgggtgttccgcgcccagactgtttccggggattgtgacttgcagggtccgccatggagccagagcagatgctggagggcataccacggttgcaggagaaccctcgactctgagtacggttctcacagacaatgtggagaggatagtagacccatgagaagattaatgcagaaaagtcatccaaacacgaaagtggatctcccgtctttgcccaactcgtgcctacctggatcagacccgttgtgcctattttattaacagggccttgctgtgcttgcacaaagagaagagccccccaatccccttgaatttctagcatcatatcttttaaaaaaccaggcaccacgtttgaagatcgagaactgagcttaattgggaagaccacgaaaaatttggtttctactgtagatttacatgattaagaggcagctttaattgccatgattccccccccccccccttttgggaatataagaaccttcaggacaacagaacttatttccggaattgcagaagaaaacatatttcccttattttgatttaatcaccatacttatttaatgagtgtattctgtgccatttttttctcagattgtctttaactttgtttttaaaataacccttccaaataaaccgttaaagcgtccaaaaaaaaaaaaaaaaaaaaaaaaaaa

SEQ ID NO: 8097 - DNA, 619 bp, Canis familiaris
ttacatggaactgtatgaccttaacagagacttgttaaatggatacaaattcgctgtaacaaccacacagaactcttgggaaacctaaaagcagtaaatcaggccattcaaagagcaggtcgtttgcgggttggaaaacccaagaaccacagtgatcactgcttgtcgggatgcgattcgaagcaacaacatcaacacgctgttcagaatcatgcgcgtgggaacagcttcttcttaggaaagattaggtaatggagttcctagaaagggtttttccctaaaaatcgagtctagtttgcttggatcacatcctggtgaacccaggtgctaaaaatggcaagagccttggtgagtgatacgaatgcaaggcaaccactgcatctgaaaagtgtatctttctatttttagaatcagttgcactgttaccagataataccaggtttgtgtagaggagggggatatctttgaaatgtaagggcttcaaagtccacatttttttctgtatgtatgtaaagttggtgtatagatgtatagatacatcttcttccttttaaatttaattgaatttgtaattaaaatgtttttttcattaaaaaaaaaaaaaaaaaaaaaaaaaaaa

SEQ ID NO: 8098 - DNA, 593 bp, Canis familiaris
ggcacagcatgtgggaattactacagagtatgcacactggctatccgtgatccacggtgattctgataatcacttagaagcatgccccgaacaccgactggtgaaaagtaaatcatgccaaatttgttctttagataaaactggcccgagcttgttttaaagaccctgggtattcaattctgtgttttgttccaaagaatctttgtttctggacactttcaccagataggatttgagaggatgaggccgttgaggtaaccagacttttggattaagagcctatgtgtccccgtttccccttactttcatgtatagggagtgcagagttcgttttctctgttagatttttaaaagattcctgtcttttaaaattgttgataccgtcgtcatttcatatttgagtatgtttgagaggcagccaaggaccataccccagaattttttttttaatgccccagaatttaacccagatatgccaatttgtaatcccagcttaaatctaccaattgaagtagccgagaggattaaatatgttctcccctcccccaaaaaaaaaaaaaaaaaaaaaaaacaaaaaaaaaaaaaaaaaaaaa

SEQ ID NO: 8099 - DNA, 620 bp, Canis familiaris
cattgttcattcctataacctctccattttcaggacttttgcaactgttgacccttttatgttttaaagtgagttaagtagtatgaaaatcattggtgttcattatttgcattgcttgagctctgatccaaatgtttgaagaaagaaactttatttttgcaacttacgtgaagtttttaagcttgagatatttcaacatgttatgtatattggaactcctgtagcttgatgcctcctgcttttgtagcagtgtacggtgagcacttgacagagagagtatgtgtgtatgtgtatgtatttttttaatatgtgtaaaactgtccttttcactccatgtcactaagtgatatttcatatctgtggttatactaataatgatgggccttgtaagtcttttggccattcaagaataataataaatatatactgctggcatggtaatgcttagttttcttttatttacgttttaaatgtaaggacccaacatctaaactcactgttattttgttgctttaatttttaaaaattacattcttatgtaacatctgatggtataagaaaatatagttggtatctattgagatttaaataataaaatgaatcctggtaaactcatcaaa

SEQ ID NO: 8100 - DNA, 569 bp, Canis familiaris
ttaaatgtgttgaactcagatcgacattccgcaagaagtttcacagggaccatgaaatatatgtatacatataccatatataaagtatatatattaaaatggaattatctctatccgggatactgcctccagttactgaactttttttaagaatactttttttttaagctgagaagtataggggtgaaaaagatgttatattgtgtttgactattttcccacttgtattttcatataatttatattttttaaaagctggacctttaaaagccagatgaaaaaaaaagggaaagcacggtgctttttaaaaatcagaactgaggtagcttagagatgtagcgatgtaagtgtctatgtgttttttttttttaaatgccaaaaaaatttcttatgggggagttttttgtttgtttattttagtagctgatgctggcacatcattttgctggagagttttttatatactgtagcctgatttcatattgtattttaaactgtgtgagattaaagaccaagaaattcattcataaaaaaaaaaaaaaaaaaaaaaaaaaaaaaaaaaaaaaaaa

SEQ ID NO: 8101 - DNA, 638 bp, Canis familiaris
ctcccagcccaggcctgctctcataccttacctctctctccccacctagggcacaggggcaaggcctcctgtctatagcagctccctcactttactactgccttaggaggcccctgcttgtgctcagggaagtccccttcatggacatgtccctactaggtggagtagggcttggtcccaactctgttaagccttcctgggatccgggtctagctctgttggggactggaaggtgtgtagaccctcttcctactagggctgtgctgtcctggacattgggctaggcccttccagtggttagggctgtgccaaccatgtacagaattgagtgctgtagactggccagactccataccccttatgccatctttccttctgaccagagtgatagggttccagccatggggaagcagtccagtcctctgtctccttgcactatcggagacagaagagcccagggcccaagcatcctggcagggatgctgtgggtgtcagttggttccagtctcccacttctggctctgccccagcctgtgtagctgttcctgcatgtggatgctgcatgtcgggtctggggcttggatgctgcactgccccgctgcctgtcccttctagtaaaataaagatctgttatgcct

SEQ ID NO: 8102 - DNA, 642 bp, Canis familiaris
gctctacgaatggagttccattaggcagttttttaaggtcttttctgaattgtcacagtcatgacaagattctttgtgacagtttgaagggataatgtgctttgaagtgagttttggtaaggtgatatttttgggcatctttcttcttatctcttacagtgttcttacacattttttgaatatcatgaggacctcatgtctgttttgattccttcctccttcactgatgctaaataatcccattgatatcaaactgtcaacctacccaaaaagatattgtggcttgtgggtattgctgtcttgtttttgatatgttcttgtattgactgcccattggcctgaaaatactcatcataagcctaaaaaaaaaatcatttttctttcccacccactgttttatctgcttgttgtaagaatcaaatgaaataatgtatgtgaaagcaccttgtaaactgtaacctatcaatgtaaaatgttaaggtgtgttgttatttcattaattacttcttctttgtttagaatggaatttcctatgcactactgtagctaggaaatgctgaaaaccactgtgttttttaattaatcataacagccaaaattaaagtatcttcaaaggaaaaaaaaaaaaaaaaaaaaaaaaaa

SEQ ID NO: 8103 - DNA, 684 bp, Canis familiaris
tcaatgttcgtcaaatcaaggacagttttaaaagtataacatatttgtgaagactctacaacttgttccatgtgtctccatgatgttacacccatagcttctctctctctctctctctctctctctctctctttctggtttttttcctttctttttatctcattgagctggttctttgctgtcatcgttctaacataacttactgggaaacgtgacatgacatcctcagccgctgtgttttccgatggtatctctttactttgattagtgacgcgtatgcggtgtcacttgtgttgtgtatagctaaagccatatttccaagcccggggtccagcaccaggggctccgggaattaagctcataggagaaacttattttaaacagagctttctctgtctaccttgaccggaattggaattttaaaatgatgtgtccatttttgttgtcgtttgcaggctcttatttttctctacttaaacattattgccctgtaacaaggctcttgagttaataaaagttatcatctctaagaattcattttctacgttttctagcaagtagaaggaggtcatcttgagtcgggccagttcctggcctgatgagagctgcaggtgcctctgggcagaaagtagcaggaggccacggccggtgccgggcgctgccccgatgtccctggctgccgcg

SEQ ID NO: 8104 - DNA, 579 bp, Canis familiaris
aggcctgccacaaaggctggggtgtcagcgtcatagttggagtagctgcttcaggtgaagaaatcgccactcgtccatttcagctggtaacagggcgcgtatggaaaggcactgcctttggaggatggaagagtgtggaaagtgtccccaagttggtgtctgaatatatgtccagaaagataaaagttgatgaatttgtgactcacagtctgtcttttgaccaaattaatgaagcctttgacctgttgcatgcaggaaagagcattcggactgttgtaaagctttaaattcaacagagaacacatttccatccttgtactgaagtcttgtggtccacctggaacagccagacaagtagctcttctaagttcacagtctcttagaccttttctactactacttttagagtaaccttctctagggaataatattttttgtataattcataaatctctaatcaaggacaaggctaatacagtcataaatctgttttctgaactctccttcacatgaataattgccaacccattaaggaatattctaacataataaaagtaatttctgcataaaaaaaaaaaa

SEQ ID NO: 8105 - DNA, 641 bp, Canis familiaris
ctgtgaatctgattttgttcatgacagctggggtattcctgtgccagcccctcaactgcatactagccagcagctatgaagaaagattgaacattgtcccttctgtaggtcagagctcatgggagctctgttggtagtgttgttctggtctcctattgcaagggacagaaggcttctgtgggaacatgtagaagttctgcttgctcgaaggctgagctctgttctctgggctcccgtgctgctttcagaagctaaagcactgccagtacacctctattgcaatcctcagtttctcttctgtttctttggttcaaaaacactcttctgcttttctgggtcaactcagagtccctgccttgttagctctttggtcttttgcagtctttagctttttgactcccccgagaaagcttggggaagaacatgtactactttcacattctccatctcaagtatcttggggattaactattaagaccctgcatcagagtccccgtgacctgtctgtgtatccctgattcacagattggatgtcatcagtgaaagtgtggaaaaaagatgaaacaagtctgctttcttgaccaagcctctgaagcatacatttctaccaacaaataaatgcaaataatggaagtaaaaaa

SEQ ID NO: 8106 - DNA, 611 bp, Canis familiaris
gaacttgctctctaagagaggttgggaccgggctgggttcagggggacacccgggagggggtgcagccctcacaggtgacacggaatgagaaccagggagctgctggaaaaaacagcggtaggtgccttgctctggcgtcccaggtggctggcggatggcagtgttggccgccgcggggccgctccctgcccaaccccgccccagggccccaggaggcggaagcgcagcggaacaaggccagagccagtgctcgggcctctctcacactctgccctcccgctatcacatgctgagcctgggaggtggcccctagctcgcggaacacagaaggaaggagccagcccctacccgcggtctcctgtcgcttacagactctgcgggctcaatccggggagagagaggtggcccgcgggggttctcctccctcacagagacaggcccagaggtttacaagttttctaagcttttgataatgtgaagctccaggttaagaggatgctgttgagcacattgcagctatgtaatttttggtgtatgtatgtaatatttaaggttgaaagaaaataaatctcaaagcaagatattaactcttattagaaaaaaaaagaca

SEQ ID NO: 8107 - DNA, 546 bp, Canis familiaris
  misc_feature (1)..(1): n comprises a, c, g, or t, or includes no nucleotide
ntaccattaattattattttaagccatagttttagcttatacacaggatgcctgggtggctcagacagataagtgtctgccctgggctcaggacatgattgccagattctgggatccggccctgtgtgggacatctctgctcaaacagggagtctggttttccttctgtcattcccccctgctcaagtactctttctctcttggtctcgctctcacaataagatctttaaaaaaatagctgatacagagaattcatatcacggagtgggttctgtgtcaaacgccccaggggttcctgagtggtgatggttaagcatctgatcttggttttgtctcacggtcatgacatcagggtcctgagatcaagcctcatgtcaggctctgcactcagcactggagactacttgggattttttctccctctccccctccccactaatgttttttctctcttttttgccaaataaataaatcttaaaaaaccaaccaactccaaaaaaaaaaaaaaaaaaaaaaaaaaaaaaaaaaaaaaaaaaaaaaaaaaaa

SEQ ID NO: 8108 - DNA, 660 bp, Canis familiaris
  misc_feature (56)..(56): n comprises a, c, g, or t, or includes no nucleotide
gcagctcttcttgcagaactagaaaaaattaaaaaagaaagagctgaagagcaggncaggaaggaacaagaacagaaagctgaagaagaaagaatacgtatggaaaacattttgagtggaaaccctctccttaatctcactggtccatcccagccacaggccaacttcaaagttaaaagaaggtgggatgatgatgttgttttcaagaactgtgcaaaggtgtagatgatcagaagaaagacaaagatttgtaaatgatacactgcgatctgaatttcacaaaaagttcatggagaaatatattaaatagtacagttttatgtgcttaattaaagactgtaaggtgtaaacgatcattctcactttgttctgtttttctctttccccatctaaattgtgtataggcctccctaattttaagttcccaactattcttttcccttaaatgaataacctttaatttggatggagggaccttggggaattgggtttaacctagtttccatcctctgaatatttccagtaatatgctttccttttaatatgggaaagggaatcttcttgtaataaatattttcaaaactcgaaatatctaaatctgtgcccccactttttttgttgaaatgtatacagcttataaaacgttgcacattttctttt

SEQ ID NO: 8109 - DNA, 455 bp, Canis familiaris
gattggttaatttgggatattactcgatccagttatcctcaagataagagacctgtccacatggatcaagcctgtttattcaggtggtccacaattaatgagaacttgtttgcaaccactggttatcctggcaaaattgcaagccaatttcaaattcatcatttaggacaccctcagcctgtcctcattggttctgtagccgtcggatctggtctttcctggcatagaactctcccacctgtgtgcaattggaggagaccacaagctgttgttttgggtaactgaaatgtagaacaaattttctctgtaccttagatacataaactctgtatttttaatacatattttgaagaatttcttatttttatatcaaatataccgtacgctctagaaatgtcccagttgttgcttctgttaaataaaataatggtttgaaaaatccaaaaaaaaaaaaa

SEQ ID NO: 8110 - DNA, 579 bp, Canis familiaris
cagccgggcccggcatccaatgctcctttgagccagcggcaaccctgaccccagagagggcagcgctcccctacttcccccgccggtacggggcccaagccagcctccggctacaacccccgagagcgccagctctaacgcctgggatgacgggctaccagaattgtctaataagcctggagatgcgaaggaaaagaggaagaagtcttgaggacccagctctgggtttcggatctctgtcacctccgcacatttctacccccatcacgtttcctgctcctcgttgtccagatgtggcaggccgccgctcccgccgcatctgcagccagtgaaagccaccttctcaagtcccctcgtttcctgtgggactttagatcttgagagctcctttcccagcggaaagagggaaaacctcactcccctcctgccccagggcagggcctttcaggccagtcggaggtctcgcagatccacagctctggcccttacaggtgggcaacccctgaagtgcccggagaacctgggcttcctgcgcatcattttgtattgccgccttttgcattaaaaggaaaatccact

SEQ ID NO: 8111 - DNA, 656 bp, Canis familiaris
  misc_feature (474)..(474): n comprises a, c, g, or t, or includes no nucleotide
  misc_feature (485)..(485): n comprises a, c, g, or t, or includes no nucleotide
  misc_feature (493)..(494): n comprises a, c, g, or t, or includes no nucleotide
aagcaatggatgatttttatccatagcctctatgtgggtttagtgcagttctacaaaacctctataatggaactctttcaagtgggaccccttttggggttcccagtggtgtgtttagagaaacagaggaaagcacagtgtgagcatccaggtaccatggtgctggagagcttggggacttacctgtttcaaaggagtttgaattctgactttatttttcagagatacgatttgttgtatgacatcagaagacatgatttctaggactcaatcagccaaatcagagttatcgtttagctgctgcatcagctttgaaatcacagatataaactgggctcgagttacaagtgtccccacttttgatgatatatagacaccagaggaaagcaacatggattattaataacaatagaaaaggaaagcccctaagaacccttgggaacaacaacaacaacaacaacaacaacacaaaantgtgttattanttggccgnnaaaatttatagttgtaaccagtgatccagcttattcttttgatattttgaaagtcccagtaattatttttgcaatgaatacggatacgacatagtcctttggtgttacctgcttttaaaaaataaagtcttaaaaaaaataaaaaaaaaaaaaaaaaaaaaa

SEQ ID NO: 8112 - DNA, 644 bp, Canis familiaris
  misc_feature (1)..(1): n comprises a, c, g, or t, or includes no nucleotide
nccccagtgaccaccatcctgccagaccgtcagagatagggcatctggaccagagagagagccccaggggaccacagttatgtcacttgcccagaggcggtgggctaaagccacgccccccaccaggcctccctgttactatagcatcagaaactgtcacatctctccccttccggagagcagggtttgcactcttcccctaggacctactttgaaggcaattagaagctttgttttcatgttccccctggtattgtcttgccaggatggttaggtacaaccaggacgccttattagaatcactgagaagaaaagcccacacccgcttctctggtatgacatttagtttgagagccagccaaacacgtaggcttgtattagtgctcttaatggagtactggtaacatttttctttcttgatagggatctggcttaataattaggccagggcttttaatttcaatacccgtctcccactacaactttccgtgcagttacctttcatttttaaagcaatttcactgctaaatataaattgtatttgtggggttcatagttatataatgctgaagggaaccactctttcgttgaaaggtgataaaagttaaataaagactgtctccacagtaaaaaaaaaaaaaaaa

SEQ ID NO: 8113 - DNA, 679 bp, Canis familiaris
tcctcaggcagaggcatctagcccagtgtctgcagaggaggggtgttggtccctgagctgaggcctacccttgctgcgcccattcccccctcacaagaccacacttggctctcgtccctctcgtggcccccttcttggaattagggaaacccccttgtgcccacgggggtctgtgtgacatcttggtctaccctgagcacgtgggcgccactacacgagactctgcacggcctctaagggaaggctctggccttatatgcacactctgcgtctgcctctgcaccagagagccctctggtttggagagcccccacaggccccccttcttgggaggagaccacctggctgggagtgtttccccgcccaccgcttgaatggttccccggcgttcttcccaaggcccaggtgccactgtgcaagctccaactgttggcagttactgctcccaggagccaccctcggcctataagaaacaggacttagagaaaaagaccttggcgtcattgtccctcagggcgacagctctgaagtgtattctgtgccagttgtccacagtgataaccttctcaataacacagttcttactggttttcctgccatccctcctatccccacccccttctgtggtttctaggattacctcccaaataaacctcttgcaccagaaaaaaaaaaaaaa

SEQ ID NO: 8114 - DNA, 532 bp, Canis familiaris
  misc_feature (1)..(1): n comprises a, c, g, or t, or includes no nucleotide
naacatgagcatccatacgtagcgaccaacggctactccggtggcctgaaactggcctacggggtcctcacgagccccggcctcacagtacggccagagctccttccagtccggctttggccctggcggttccttcagccgcagcagctcctccaaggccgtggttgtgaagaagatcgagactcgcgatggggaagctggtgtctgagtcgtctgacgtcctgcccaagtgaacggccagcgcgggcccccccagcctccttgctcttgtggccccatgaagccttcgggggaaggagctgtgcaggggagcctcgcgtacgagagacccgcctaaggctcagccccggtccccagcctacccttagggggagtctactgccctgggtaccccttcttgtccgtgcccccgaccgaaagcccattcaagtgtcttttccccaaataaagccgctgccagtccccaaaaaaaaaaaaaaaaaaaaaaaaaaaaaaaaaaaaaaaaaaaaaaaaaaaaaaaaaaaaaaaaaaa

SEQ ID NO: 8115 - DNA, 721 bp, Canis familiaris
  misc_feature (1)..(1): n comprises a, c, g, or t, or includes no nucleotide
  misc_feature (513)..(514): n comprises a, c, g, or t, or includes no nucleotide
  misc_feature (519)..(520): n comprises a, c, g, or t, or includes no nucleotide
  misc_feature (535)..(536): n comprises a, c, g, or t, or includes no nucleotide
  misc_feature (544)..(545): n comprises a, c, g, or t, or includes no nucleotide
  misc_feature (555)..(555): n comprises a, c, g, or t, or includes no nucleotide
  misc_feature (572)..(573): n comprises a, c, g, or t, or includes no nucleotide
  misc_feature (575)..(575): n comprises a, c, g, or t, or includes no nucleotide
nccgccatcaaccgccagatcaacctggagctctacgcgtcttacgtctacttggtccaatgtcttattacttttgatcgcgatgatgtgggctttgaagaactttgcccaatattttctccaccatctcatgaggagagggaacatgctgagaaactgatgaaggctgcagaacccacgaggtggtcgaatcttccttcaggatattaagaaaccagaccgtgacgattgggagaatgggctgaatgcaatggagtgtgcatttacacttggaaaagagcgtgaatcagtcactactggaactgcacaaactggccactgataaaaatgacccccacttgtgtgacttcacttgagactcacttacctgtgacgcaggcacggtgagaatccatcacaagaattgggtgaccaagtaacccacctgcgccagatgggggcttccggatttggccatggcacagaagtaattccttccttttgaaccaaaggccaaccaaccccctgggggannacagnntgataattgagagcnntaagcctnntaggctgttnctgtcccattagccgcnnangggtgacttccctggtcaccgaggcagtgcatgcatgttggggttacctttaccttttctataagttgtaccgaaacatctacttctttcgtttgtatcattccttcaaataaagtaatttggtacccaaaaaaaaaaaaaaaaaa

SEQ ID NO: 8116 - DNA, 593 bp, Canis familiaris
ctatgaccattaggcctatttaggtgacactatagaacaagtttgtacaaaaaagcaggctggtaccggtccggaattcccgggatcgcctccggaggtggcaaccatcgaatcgcttgggcatcaatggctgccctcaagacctctggtgaaaccccaagatcgttaaaaaaggaggacccaagaagttcatccggcaccagtcagaccgatatgtcaaaattaagcgcaactggcggaaacccagaggcattgacaatagggtacgcagaagattcaagggccaaatcttgatgcccaacattggttacgggagcaacaagaaaacaaagcacatgctgcccagtggcttccggaagttcctagtccacaacgtcaaggagcttgaagtgctgctgatgtgcaacaaatcttactgtgcagagattgctcacaatgtatcctccaagaaccgcaaagccatcgtggaaagagcagcccagctggccatcagagtcaccaatcccaatgccaggctgcgtagcgaagaaaatgaataaacagcttatgtgcgcgtcatatttgtgttaataaaaccataaaactaccaaaaa

SEQ ID NO: 8117 - DNA, 629 bp, Canis familiaris
gtgaagaagcaggaggccaagaaaggtgggtcaaccccactgttcgagaagaggcccaagacttcggcatcggacaggacatccagcccaagagggacctcacccggctttgtcaagtgccgcgctacatccggcttgcagcgccagagggccataccgtatcccttcgagctggggttaacacgtgtcaccaccttggtggaaaacaagaaggctcagctggtagtgatagctcacgacgtggatcccattgagctggttgtcttcctgcctgccctgtgtcgtaagatgggggttccttactgcattatcaaggggaaggccaggctggggcgtctggtccacaggaagacctgcaccactgtcgccttcacacaggttaactcggaagacaagggagctctggctaagctggtagaagccatccggaccaattacaatgacagatacgatgagatccgccgccactggggaggcaatgtcctgggtccgaagtcagtggctcgcatcgccaagctggaaaaagccaaggctaaagaactggccaccaagctgggctaagtggacgctgttgaattttctgtacataaaagtaataaaaggttctctttcaaaaaaaaaaaaaaaaa

SEQ ID NO: 8118 - DNA, 687 bp, Canis familiaris
  misc_feature (517)..(517): n comprises a, c, g, or t, or includes no nucleotide
  misc_feature (525)..(525): n comprises a, c, g, or t, or includes no nucleotide
ctcagccacctgcagacttgtctgacggagcgcccgatttgccgccttggcatgggctgagccccggggctgagccatttataagagatgctcaagctgtttgaaagtgtataaggagtctcttctcaagggtgcccaagtaggaccgcatgggggggcatcgtatttaagtttaacgagagtgtccatgactcaggttcagatcgcatcctcccttgccttctccatcctctggctgcgtaagcctgcctgtcgcacccccggcaggcagcccagtgtgccttttcttgcctttcgctgactttcttggtcattccttactcacttccgggctggattaaaccctcatgctcactgacgttttctgatacttcacagagaccactggtctcctcttagtgaaagcacggatcccaaattagagagtgaaaggggaaccagaaggaaaaccaggctttcccagttaataaggaattaagcccaccgggggaattggaaaaggccaccagcatagggnaatacagntcaatgatgttgtaatagtgttgtgtggtgacagatgggagtcgcacttgcggtgagcacagcatagaacatagggaagttgaatcactaggttgtacacctgaagcttatgtaacattgtgtatcaactacactcaaattaaaaaaaaaaaaaaaaaaaaa

SEQ ID NO: 8119 - DNA, 664 bp, Canis familiaris
  misc_feature (352)..(352): n comprises a, c, g, or t, or includes no nucleotide
ctcccccatcagccacgaggctcccctatccttcaggctgccattgtcccccagcttctcgcctgtcactgtctccttgtggctgcttcgctcacccgttgtctcacccctttgggtggcccagggcccttcagcctccgcactcagcgcagagtccggcctggagccacctgatgacacggagctgcacatctagctgtggcccaggctggggccccgacctgggatgcgcacagtgtccccaatgcaggccccatctgagcctgcctgggcagcctcggaccatgattgaccacaggggaggccagctccccatcctaaactccagtgggggcaggtcccacatctcacnctggtcctgtcagagcaccagtcaaatagaggtcctactggccacggacctggggccaggtccaatgtggggagaaatatgaaggaggcagcagctctgggttctcctcagtgagggcttcctgcctcgtgccagcaccctgaggtggagctgagactttatttattggggggtagggggaatgggggaggcccctccaacctgtttgggcccagctcctttgggttccactaacacccctgcccctgcacagaaccaagtgccaattctcactctggagccttaataaactgcagtttgtaaaaaaaaaaa

SEQ ID NO: 8120 - DNA, 647 bp, Canis familiaris
gaacaagtttgtacaaaaaagcaggctggtaccgggtccggaattcccgggattgttgagctccccagatatggtcaagaaaccaggttaagtgccaacataaaacatgaaactagacaaggaagatccttgtcttcatagtatttccaacatactgtacacaggaaaacactgaagcagctctcaccacaggtgagacagacacaagcactcggcacttcagaggaagaaaaatatatccagttgggaagaaccaacacgtggaggcagtggttattttaactgggttttaaatgtgtgaaagacaacattttgaaccaacagccatgtgaggatcttctgtgaatgtcagacattgcacacatgcttacatggtctcattctaggttttgggagggacctgtggagtaaagctagtggcatcgatgtgcagaggtgcttgaatgccaactaaagctggtggcctcatctccatagtaaatgggaaaaccctggggatgtatgaacaggatggggaggtatggggaagtgaaagggagagcaacagggaagggctgaatccaatgttgaaatcatcagtgtgaaccataatgagagcctgagctggagtggtggcagtgagaagaggtaaaaaaaaaaaaaaaaaa

SEQ ID NO: 8121 - DNA, 546 bp, Canis familiaris
  misc_feature (279)..(279): n comprises a, c, g, or t, or includes no nucleotide
caccggaggccgcgggcccgcgggctggcgggacatagcagggagccccgcttcagaacccgtccgcccctggggtcttcccagggcactggggagggccgaggctgaggcccaccatgcccagccggctgctgctcgccgctgcactgctgtccagctgggctcagcttccggccgaagccagctcctggtggtcattagctatgagccctgtacagagacccgagatgtttatcatcggtgcccagcccgtgtgcagccagcttcctgggctctccnctggccagaggaagctgtgccagttgtaccaggagcacatggcctacatcggggagggagccaagacgggcatcaaggagtgccagtaccagttccgtcagaggcggtggaactgcagcaccgtggacaacacatctgtctttgggagagtcatgcagatagggagccgggaggccgccttcacctacgcggtgagcgccgcgggcgtggtgcacgccgtcagccgggcctgccgcgagggtgagctgtccacctgcggctgcagcc

SEQ ID NO: 8122 - DNA, 680 bp, Canis familiaris
taaagctacgataggtagacacattcagaaaaatgaaactgctgttatgtatgaagcaatcactttgacttatgtgggtgaaatcatattcgattttaagaaataaaagcgagagtattttcagtaagaccaccacaccacggtcagatttcaaactgaacttgaaattgtctcctcgaaaatccttcattctgcatgtgatcactttgcaggcagcttgggttctttgcgatcagttttaaagagcagatctgtgaaatcttgattttaaaaagcgttcctgctgtcctttgcaatttaacgatgaaccttttgagttctaaatcaggatttatttcttttctgttttttcttcttcattctaagggcttataatttacctagctccctgaggaactgtatgggtaagaaatgatacccaagttctcatttcatttgtgggggagaaaaaaaaattgaactgactttcagcagtatttttaaaaatttaaaaataaacatttgacagtttttaaagtttaaaattgctttaaatgttaaatagctaaagtctgcttagatgtgattcaaaaagactacgtaattattgaaataataacgatttcaggctccatacaaggattgataagatgcaaaaatatttcaaataaaaaaaatttcaaataaaaaaaaaaaaaaaa

SEQ ID NO: 8123 - DNA, 650 bp, Canis familiaris
gtcatactttagccactaccatgcagcatataaacccgagtatacacatgcatgtaatcttgtctcaacaatgtctaaaggagcataaatatttaatagtagatgttgtatcccactatgaggaacttttatgtttaaacaaaggatgttcaaatcttacgcataataagccaaattgaatccacaagttccaaaaccaagtaatgaaaaatatttaaacagcattataaatccttatagtttataccatactgccatttaaaaggtatgttttttcatataaataccccacatttaacgaagcactatttccactaatattgaaatgaaaggagttaagactcacgaaactcttctaacatattattgtgctcttctctggcccttactcggataccctctaagcacattaagggaggaggtcccaaaaaccttggaaaaacttaaaggaatttcccaggggattcctccccagtttttcttttatgattcacacattattcattatgaagtaggaactctgttttccctctattaaggcagctattatatacctattatataccctatttctcagggtattactctcctatctaggcaaacctttccaaataaagcataattttactctctgataaagaaaaaaaaaa

SEQ ID NO: 8124 - DNA, 514 bp, Canis familiaris
  misc_feature (1)..(1): n comprises a, c, g, or t, or includes no nucleotide
ncttcatctttggctacagaacagctccaggttctacgtggttatgtggaaacagatggaggcaagacatactggcaggcgtatcccttcagggcccgtagctgaacccggcattcagctcaaggctgtgaagtcctccacaggccccggggagcagctgcggaatgcactctggcacacaggggacacagcatcacagtgcggctgctgtggaaggacgccccgcaacgtgggttggaaggacaagacatcctaccgctggttcctgcagcatcggccccaagtgggctacatcagagtgcggttctacgagggtcctgagctggtggccgacagcaacgtggtcctggacacaaccatgcggggtggccgcctgggggtcttttgcttctccccagaggacatcattctgggcccatctgcgctaccggtgccatgacaccataccagaggactacgagactcagaggcttctgcaggcctagggatgggggtggggacccattgctggaag

SEQ ID NO: 8125 - DNA, 407 bp, Canis familiaris
gtatagtttttaaatgaaataccaattattttttttttaagatgataaccaagagaagttgttataaagttgaattgtgaaatttaatggattaataatggaaaaatccaaaggttgaagaattgaatttttaaggaaaggccattttccttaaccagaaagaaatttcagagtttccaagaccacaaacttaaaataagtaaagaagacagtaaaattctcaaaaaggcccggaaagatggatttttgcatgaaacacttctggacaggagagccaaattgaaagctgatagatactgcaaatgaccagaattgtgtttcttctcgtttgtttgtttgtttgtttgtttgtttgtttctgaataaaataatcactggaagtgtttttacagagaaaaaaaaaaaaa

SEQ ID NO: 8126 - DNA, 594 bp, Canis familiaris
ctcgtaagtgccacgttaattttgagatcgggtcactttatcatgagctagtgctgcttagtataggatatcctagtgtttggtgaattttctctcccagtgaaaggtagcgcaatgttgtgttagcactactctcgggaggaatacccaccatggctccagggggttccaccagcagcttgctgtaaacctccaagaatctccatctcatcctggcaggggcagccctggagccaagaactggccattatgtcttaatggcccttaacactccaagaggaatggctcccagcatagaaatttaaattgtgtctcctttggttgttggctatcagaagctatctctcccttggagtgttgggttttagaagtagtcatccactggtgcccaagtggcccaattggttgagcatctgactcttgctttcggctcaggtctccgctcaggtcacaatctcaaggtggtaagactggctagcatcaggccccacacttagcagggagtctgcttccccttctccctctgtgcacccctccccttgctcacacaagtgcccacacatactctctaagaaataaaatcttaaaaaaaaa

SEQ ID NO: 8127 - DNA, 733 bp, Canis familiaris
  misc_feature (256)..(256): n comprises a, c, g, or t, or includes no nucleotide
  misc_feature (325)..(325): n comprises a, c, g, or t, or includes no nucleotide
  misc_feature (411)..(411): n comprises a, c, g, or t, or includes no nucleotide
cggcaccaaacccggcccccgaataaaagcggcgcacgaacttggtgcctacacagaccccaaaggacaaaggggtttatagtccactataaatcgggatatcctgctgttgcgctctgcctgggtgtgcccgccaccaaacagccccccacgaagtctcctcaatgagggtggcgtatccctcatttgtgcacagacgccggtgctcaaagcactatgggggggttataaccacagctctaaaatttttggcccncgcaaacgctctcacaatgtcccgtgtgcacagaggggagagcgagagctctggagaccgcccactcgncggagagctctctcgagagagagttccttggaattccttaattgggtgttggccggaaagattcccaccaaaaccaaatttccttngagggttaatccctccatggatcccattccataaagctatcagaagaaaatcctgacacccagtggatcaccaaaccagtccacaaacacagggagatgcgagggctgacctctgcaggccgcaagagtcgtggccttgggaagggtcacaagttccaccacactattggtggttctcgccgtgcggcatggagaaggcgcaatactctccagctccaccgttaccgctaatataagtaatgtttgtaaaattcttacctaataaaccatttaggacagtcaaaaaaaaaaaaaaaaaaaaaaaaaaaaaaaaaaaaaaaaa

SEQ ID NO: 8128 - DNA, 600 bp, Canis familiaris
gatgcatgagactcgggatcacctgcaccccaatgtccacagcagccgggtccacagtagccacactgtgggaggagcctcggtgccctcaggtagatgatagataaagaggatggaagatagatgatggtcttagatgatagatagttagatgataggaatggtactcagctatcattgagaagaaaatcttgccatttgcaatgacgtggatagaactagagggatcgtgttaagtgaaataagtcagtcaggaaagaaaaattaccgtatggttgcattcataggtgaaacttaaagaagcaaagcagatgaacatctgtgaagggaaggaaaaacaaataagatgaaaacagagatggaggaaaaaaagactcaatcacaggaaacaaactgagggtcgcctggagggcaggggagtggagtggtgggacacgggtaactggtagacgggcatcgaaggagggcacgtgatgtcatgagccctggtgttatctccaactggtgaatccctgaattctacctctgaaagtataatacactatactgttaattaattgggtttaaattaaattaagtttaaaaaatcaaaaaaaaaaa

SEQ ID NO: 8129 - DNA, 619 bp, Canis familiaris
aatggaggcctggacaggaagttctcctggacgacctgcgtgaccaaatgtcatgctctactggaaccacaggcacccctgcctcctcccagcgcttctacaaggagaaccttggggcagggcttcatggccaacgcgcatgaccggatgaaggtctacgtgcccacaaggcttttgctgcccttcccttgtgagttaatgcacgtgcccagaaaagtgggtgaaggccaagtatccgaaactcatctcctactcctacatggcccgtgggggccactttgccgcatttgaggagccagagctgctggcacaggacatccgcaagttcgtggggcttctggagctacgctgatgcccatggggactggctgtcaccctggggctccctggccaacaacgtctgcccctttacctggaagcccccacaccccgcctcccggcgccggctcccaaggagcagggaggctcccagtgttctcttggcaaagatgtacacccccatgcctgtcccctgcccatgcctggaccccatgctcactgccgccagcaccagtgctcccacacacacaatcaataatgataaatgattttattcctaaaaaaaaaaaaaaaaaaaaaa

SEQ ID NO: 8130 - DNA, 529 bp, Canis familiaris
gatcgggatagctatctcaagagaaaagaaacaaatgaagagagccttatgactacctccagcctggagagagtttccattcagcataggagggagaatctaatcagattctggcagtctctgaattgagagtttagagtttggagaatttaaggtggctcaaatttatggggtaggttacagagaggagctgcacccagatgtagcacattccccacatgatttgaagttgtgatcacacatatgtgaggaagctccctcggctggagaaagaactactggaaaggaacaggcagagccatccttggaacttgcacaggttggaagtaatttgtgtttccacccattggaatggaaccccctccctgccccagcccaacatttggaaaatcacaatggaacttcataaaaatagtgcctcagtgggtcactcaaattggctctagactaacggctgctctgaaccagacaaagcataaatgcaaaccactacaaacccaaaaaaaaaaaaaaaaaaaaaaaaaaaaaa

SEQ ID NO: 8131 - DNA, 656 bp, Canis familiaris
tgaaatcatgcccgtgcaaaacagaccccgtgctggccaacggaccaggttcaggcattcgttgccatcggagattacaacggacacgtgggtctgggcgtcaagtgctccaaggaggtagccactgccatccgtggggccatcatcctggccaagctttccaattgtccccgtgcgacgaggctactgggggaacaagatcggcaagcccccacactgtcccatgcaaggtgactggtcgctgtggttctgtgctggtgcgtctcatccctgcccccagaggcactggcattgtctcggccccctgtgcccacagaagctactgatgatggctggtattgacgactgctatacttcggccaggggctgcactgccacactggggaacatttgccacgggctacatctttgagtagcgagtcttcttatagagcctatcacggtattcttctacaccccccgagattttctgggaaaagaggaccttgttgtttcaccccaagtcttccctatcaggaattcactgaccatcttgtaaagacccacaccagagtctccgtgcagaggacccaggctccagctgtggccaccacatagttttatacaagaaaaataaaagtgaattgaagcttgttaaaaaaaaaaaaaaaaaaaaa

SEQ ID NO: 8132 - DNA, 676 bp, Canis familiaris
agtccggcactcgtgtggaccaccagacggccccatcgtgtggggggagtccagggaccaatggccagcatgccttctatcagctcatccaccaaggcaccaagatgataccctgtgacttcctcatcccggtccagacccagcacccgataaggaagggtttgcatcacaagatcctcctggccaactttttggcccacaacctgaggccctgatgaaggggaagtcgatcagaggaggcccggaaggaggcatgcagcaccgccagcgaaagaggtccacgcaggagcttagtagaagctgttgtctcacacaacggtctcttgtataggagaatctccccccacacatctatatgtgtgtcacacacgacgtcacgcgcacatcacatttgtggagacccctgttagattgtccacagtgatacgcagacacaccaaagatctctcgttcccggggttttcacattcctgggaaccattcaaccaggcctttggacccagtgggggggtggagctgggaaagcagctggccagaaaattgagcctgaacttgatggcagtagcccagtcacctctcacgactcttccacgaacgggctaatcaacttcatcaagcaggagcgtgaggccagaagccaataaactcatgcccggctgcaaaaaaaaaaaaaaaa

SEQ ID NO: 8133 - DNA, 660 bp, Canis familiaris
tagccagaacaacagattggggctgttgtttacagaggtaatccgtttggcttgaaatatttgttagatgttgaagctataggctctctttgggatagaaactttggctggcctggaaatgaatttttaaactgaatcctaattgttaattatcagctctactatagggaacatgtgaacccatatgctttcaagttcatgcctgaaaaggggtgctgtctatgctctttataaactgggtcaataaggggaattgtttccccataatccattttcacagtgaagcttgactaatttagaatgacttactaaactaaagaatcccatttagaatgaaggaaaaaaaatttctaaatccaaattctgtggagccatgctctactagggaggaatgtgcatgaccctctggtgactgtccctacgcccacagtcctgcatctagcctgctccacctgtggcttttcattatggtcttaacaatcatcattatctttgtgaaaaggttccctttggggagaatttacaggaggcatgatttcttaaagagagttaagactacaaccccttagtgctactcttagctatttagtatcttatttcttgataatcaatgtactttcatacatcagtattcatcttcgaaaagaaaaaaaaaaaaaa

SEQ ID NO: 8134 - DNA, 320 bp, Canis familiaris
  misc_feature (1)..(1): n comprises a, c, g, or t, or includes no nucleotide
ntgtgcggaaaaattaccattccggacttttttcggaggccccggtaattgggaatggaagttcccaccttttaaattccctgtgaaaccgagaatcccattggagggcaagtctggtgccagcagccgcggtaattccagctccaatagcgtatattaaagttgctgcagttaaaaagctcgtagttggatcttgggagcgggcgggcggtccgccgcgaggcgagccaccgcccgtccccgccccttgcctctcggcgccccctcgatgctcttagctgagtgtcccgcggggcccgaagcgtttactttgaaaaaaa

SEQ ID NO: 8135 - DNA, 581 bp, Canis familiaris
ttatagacattggaaaatcttttacagagactccaggcctagattttaatgttcagttgtaaaccctcgaagaagggtaatgggatgtttccaaatccattttcaatgtttttataagccaaattttgtatgttattgtacagtatttatttgatgtttaatgttactgtatgctacctctcccactctggttttatttgtaattgcattttatacactcatttttaaatgacttttcagtgtttctcataatgttataatgtcatggctaactttcgaaaacagcttttcacgagatttgtccttagagaaatgactgcagtaatttctagttgtataatttttcatgttgagccaaaagagtatattttgcactttaaaaatgctgcgtcctagttcatttgaatatagctatctcaaaagttgaggccaattgtaaacaatttttttttcactttagacagtctgagtttttaacttataacatttgcatgtgacaagtttgaaaacaaagcaggatcaatgcagagaagctgaaagatctgaatgataaactagggattaatttaaataaagctaat

SEQ ID NO: 8136 - DNA, 566 bp, Canis familiaris
gacccccgtccctggcctgaccccgccgggctcggaggcgcatcaggcccgggagaccgtgtggtgcccccgcgcccgagaggccccgcggtggcaggtgccggcgcctcccgcacggccccccttgtctcatttgtttcgaggaaacgcgccggttgccttaacgctgtggtttgcgtaagactcggtgtgggccctgaccctggggaggcgtggaggcctcgagatcgcgctcgtcccgggcctggcgcaggggctgcgttgtggcccaggaaaccccgagctgcacacccctccgccccagttttgtctgtcgagtcggggaccactcaggcccccggtcggcgatctttgcttgcagaaggggttttccttctaggaacgtgctggtggggtctggccttccccgcccaggcttaggggtgggtgtatgatgttgtgtcactgcagattccatgggtagctggggcctcttaggaaaatttaaaacgagtcgtgaaaagtcttcaaaagaaatgcatacatcccctccaggcaggggggaagaaagaaagaaaaagaaaaaa

SEQ ID NO: 8137 - DNA, 623 bp, Canis familiaris
ctggaaaatttggcacttgctttgacccccttgtgacccgtgcattgtcccaaacacattaatcacggacttctgtttgtggttaggaattacgttttccctttccatacgattggcggaaaattttttccagttagataaaggtacatgttttagataaagttacatgttttacgcttgataatccagatactggacttaaataggtgtattttctgataatgaggaattttgaatgattatttagggattctatttccattttatttttatagtaagctttaaaggatttgcttgtctgagaatttttgtttggctagttaccaatttgggagttatgtgtgctagatttttttagttgattaaaacttaaatgttttagattgaacattttatttccatgcccagttaacccttagcctatattttcactatggacacctgcttttggtttttggatttattttttgggaggggggaggtagggattgtcagactttcctcttaagtatcttcagttattcttttaagttatgaatgaggttctagattggctcactcaaataaaggacgtaatttcagttgaaaaaaaaaaaaaaaaaaaaaaaaaaaaaaaaaaaaaa

SEQ ID NO: 8138 - DNA, 542 bp, Canis familiaris
gtaccaggaaatgcaaaggaagaaagtctgaatgtatttattcagaatcttctgtgggagaagaatataagaaacaaaggatgatgactgcatggaggtcatacggcttaaaggggctggtgtcgatcaaagaccaagccaagcaggtgattgtccagggtgtccatgagctctatgatctggaggagactccactgagctggaaagatgacaccgagagaacaaatcgattggttcttattggcaggaatttagataaggagatcctaaggcaactgtttgtagctactgtgactgaagcagagaagcggtggacaacacatttcaaagaagatcaagtttgcctataacattagaagcatcacagaaattaggtgataaatcaggagtaagtttcctactgagtgtatttcaagcatttcttctatgtatttcttctgctgtggattccagtgtactttaaaatagtgtttattttatggaacacataagatgtagtaagtacttcaaacatttgacattcatacaataaaattaatgtc

SEQ ID NO: 8139 - DNA, 653 bp, Canis familiaris
tgtcgaaaggaaaggagagtgtctgggttacagcaggcgccaggcagacattggcaaagttctggaggggagagaaccgatctcggggtcctcggggtccgttccagagtttctccaggtttatgtaaactagaagggagccagcggagaaggggagagcacctagaacagtaagggaaacccctcgataaagggctaggaacccttcctgttgatagacagtagaaaaagcatggaggatccctctgtaagatggctccagcaggttctgcacaatcaaccgggttttgatgaggtctgtggggtacatcacaatggtagacaccatgcccgcaagactcccagccatgatggagctccactgggaaatatggcccaggtcatccgtgaacagcatgacaaacttgcggtaggcggcgagctgcacggcgctgcaggggaagaggcgcaggcaggccaccgcgttccccttccacagggcgcggggcccctcggcgcgccacgcccggagccccgcggcccacggtccccgggccgggccccgcgcgcacgccgacactgggccagcacggtggcgagctcgagcggcgcggtgaccgtgaggctgagcgcccccgccgcgcccgcgcacagcagccgctggccgcccgtca

SEQ ID NO: 8140 - DNA, 596 bp, Canis familiaris
ttttattatggagagtggtaaatttataccaagtatttaccacactaaaagctcatataattgaaactgaggtgaatataatttagaactgtttcttttaaggatttgtttttttgctcactttttgctgggagtattactgaagctgtgatcaagggattgtaacacacaaatctagatcaagtggacattacatgaaacattatataagaaacacataactaaagactttagttttgaatctaagagtattataaactttttaccaaggaccaaaaaaaaatcttaccttatctttactgtttgactttaggatcccatccataaaattatgtacctagaaatactgctctaacacagtaaccacacacctaatggtgactttttaaagtttaagcgtaacttttcttacatacttggtatatgtcttttttttttcagcttgagagcttatagtttttagaagggaacagtcttttaaattgtgactactcaatttttctttttttttggtttctattgtctttagtataataaaaaagttactgtctttaaaaaaaaaaaaaaaaaaaaaaaaaaaaaaaaaaaaaaaaaag

SEQ ID NO: 8141 - DNA, 605 bp, Canis familiaris
agaatatgtggcagctctctcgatagctaaatacaaggacagacctgaatctgtgtattttttcaagagaggtggcaagcgttcagcagtaccactttataaacaggaacccatcataagtgcactggaagaaggcccgctatcaattacccagtgtatggagaaacgacacaggttagaagacgtcgctttgaacgcgccataggaccttctcaacacacaccatcagaattcactattcacccatcagagtctcttatcaagataaaggtttcctccataatgaagtccaaatgagttcacagtggagaggatttcccaaagtggttacttcagctatagccctgccccacaatcaaggaaacctgatggctatgattactacgcccttttctaggaatcaatactataacattgatgtacccagcagaacagcaagagttgttactactcgttttgggaggaccttatccaatatctggtacaactgtccttagacccacaggcaaagaagaagtcaactaattaaatgaagaatgaaaaattttgacactgaaatacattttattaataaagaatgttgagagaagcataccaatttaaaa

SEQ ID NO: 8142 - DNA, 601 bp, Canis familiaris
gctggaggatggaacttaatagtggtttcagtaggagcagctgtataaactacttgggcccaaagagagaaccagatgtgctacctaaggattggagcttgtatttgtagtaccaaaagtcccccagcttctagtacttgttccaaatttccgaagccagttggtttattttgtgcaaaggcattgttttgggatgagaagagactggtccctgtacttgcagttccaacaagctatttgatgttcctgttgatgtgccaacccaagccagtgcttgtggaagtagctggctgactaaatgaattagtaccaaattatcctcctggtttggtctgtgaatttccaaagaggcctccagtattgttgctagaaccaaatgcagatgttccaaatgcccctccactagtagtgccaaacccagtgttctgtccaaatgttgaagttgtgccaaagccaccagtgccacccccaaagggtgttccaaatgacttattaaacatcttcaaaatgagtctttgcttcagaaagcgcggtgcggtgggggaagggaagtgtcaggagtgaaggcctaggcccgtccgccacccgccgctcggggagc

SEQ ID NO: 8143 - DNA, 672 bp, Canis familiaris
gtttgtacaaaaagcaggctgtaccgtgccgggagttcccgggataaacaaatctcactgcccttgaaataaaggagttgtacctagttctctgaatggaaccctaagtagaaatgttgatggcacccaagacctgtaggcagtgtctgtcgggcacatgagtcggtggagatactgggagtcattgatatgatactgatagatcatactagtcgctgctaggacagacctatcaccagtcatagagcaatactctgatttgagaagtgtagatactcaatctggataatattaacccaaccaattacttgagagctaagatttccaggctgtctacattgatttcttgaaaattttgcagattgccacatacaaatgaagataggagattagagaatttatttccttcagttaactttttaacacaagggtatcagagtggaggacttagatgatgctacctgtgtttgaaaataatgcgctttgcctaaccttcagcagaatgtattgttttagcatattctatgtataaaaaagtttaaagatgtcttcaaagaagactagagtctttaagtcacttatagctatattttactacaaaaatttgtgtataaagatatatttaagtgttttcgataaatttaaattactccgaaaaaaaaaaaaaaaata

SEQ ID NO: 8144 - DNA, 582 bp, Canis familiaris
ccagttcgtacggtctgcccctatcgacttttcgatggtagtctccgtgccttatccattgttgaccacgggtgactgggaatacagtggttctgattccggagagggagcctgaggttacggttatccacatcgcaaggaaaggcagcaggcgcgcaattacccactcccgacccggggaggtagtgacgataattacaatacaggactctttcgaggccctgtaattggaatgagtccactttaaatccttaacgaggatccattggaggggcaatgtctggtgccagcagccgtcggtaattccagctccatagcgtatattaaagttgtctgcagttattaagctcgtagttggatcttgggagcgggcgggcggtccgccgtcgaggcgagccaccgcccgtccccgccccttgcctctcggcgccccctcgatgctcttagctgagtgtcccgcggggcccgaagcgtttactttgagaaaaattagagtgttcaaagcaggcccgagccgcctggataccgcagctaggaataatggaataggaccgcggttctattttgttggttttcggaact

SEQ ID NO: 8145 - DNA, 475 bp, Canis familiaris
taactgcttcctggcacaggctgtcgacagcattgagctgtctgacccgaacccaggtgtttaccccccaatagagtgtacatggacactagaggatttgcatgtgttttccctgagagaagcataagacaagttgtctgagagcccagtttccaagcagcccctcccatctcgcctcccagcgcttacgagacgctacggcagccacagtgagcccacgtcacacctctgaacaagctagagatgaggtgcccaccggcctctaccacgacagaccccagggcaaccctggccccggcccgctccacctcccggggcagcgtctgcccggctgtgcagagtccctgccggctctcccgctgctccgaagccgggcccagcactccgaattctggtttggaacgctggagcgggggttgttaataaatcgtttatacacctaaaaaaaaaaaaaaaaaaaaaaaaaaaaaaaaaa

SEQ ID NO: 8146 - DNA, 658 bp, Canis familiaris
aagtcgtcgtgagcttgttcattccgccgcccgaggggcatccacagctgggccacgtatcgtgttactgcggcaagaaagcccagctctacataggcaatgtgctcccggtgggcactatgcccgagggcaccatctgtgtgctgtctggaggatgaagcctggtgtacagggtgcaagttggtcccgagcctctcgggaactatcgcgactgtcatctcccacatacccgggagaccgagaagacccgagtgaagctgccgtccggttcaaagaaggtcatttcttccgccaacagagtccgtgtgtgggtgtggtcgctggaggtgtcctgcattgacaagcccattctgaaggctggccgtgcttaccacaagtacaaggcaaagaggaattgctggccacgtgtgcggggtgtggccatgaatcctgtggagcatccttttggaggtggcaaccaccaacacatcggctaaaccctctactatccgcagagatgcccctgctggccgcaaagtgggtcttattgctgctcgccggactgggcgtctgcggggaaccaagactgtgcaggagaaggagaactaggcttgaggggctcaataaagtgtgtccttctgccaaaaaaaaaattaaaaaaataatattataataatta

SEQ ID NO: 8147 - DNA, 194 bp, Canis familiaris
agcgcgacgtcgacttcctcatcatctacatcgaggaggcgcacccctcggacggctgggtcaccacagattccccctacagtatcccgcagcaccgaagtcctggaggaccagggtcagcgcggctcaggtactgcagcaaggtgcgcccagctgctctctcgtcctcgacaccatggccaactccagcagct

SEQ ID NO: 8148 - DNA, 196 bp, Canis familiaris
ggtttgtttgcaaaggccctggccaacgtgaacattgggagcctcatctgcaatgtaggagtctggtggacctgccccagcatgctggcgtctgcgccagcaggaggtcctgctccttccaccgctgctgccccagctgaggagaaaaaagtggaagcccagaaagaagaatctgaggagtctgatgatgacatgg

SEQ ID NO: 8149 - DNA, 621 bp, Canis familiaris
tagtcttgtcatcctgaatttgcacagaagaaaagcgggtgtccagcatggccatcctgatgttgctgacaggatccccatgcagcttgtccttctcacagatactggcagctcagctcctggacccagcacccctcaaatggatttctgcaatgcgagagcctttctcggcatctgtcccgcgtttccatggtccccaatgtcccctccacttggtgaggccaccaactcctcaccagaaggacgctaccaagaaggcccgaacagctactgtttgccttctctgggcccgttccagcgccgatgcccccagctgccccttcacccccgcgcccagcctgttctgtttacatggtactgtgctgatggaagagcaggccgccatcctgcagcagccgcccgggtgaaagccagtgagcctattaaccgtgccatcttgcgaactacacttgtaaaagatcattgctttgtatcgtagtaaccgatatgcgccgtatatgttgaatgtatatgaatataatttcatatttctgctctttgaaaatgtctaaagtattttttctttctcatttatgttgaactaaaaatgaattaaaaagatctccagacccaaaaaaaaaa

SEQ ID NO: 8150 - DNA, 547 bp, Canis familiaris
ggaccaaatgaggagcaatcaggtgtacacggcgttgtttctaatgtttacagagcctagtcagatcgcgttatgaataagtaattttagtgttaaatagacttccagctttatgctggaataaatagcatgtgagcaagctgtttgttggcctgggggtggaggggtaaggtgggcgctaagcctttttttttaagatttttcaggtacccctctaaaggcaccgaaggcttaagtaggacaaccatggagccttcctgtggcaagagagacaacaaagcgctattacactaaggtccataaaaatggtgtcagcctcctaaccccagcttctgttagaaatgaggacttggggatccctgggtggcacagcggtttggcgcctgcctttggcccagggcgtgatcctggagacccgggatcgaatcccacgtcgggctcccggtgcatggagcctgcttctccctctgcctatgtctctgcctctctctctctctctctctctatgtgactatcataaataaataaaaattttaaaaaaaaaaaa

SEQ ID NO: 8151 - DNA, 561 bp, Canis familiaris
caagaccaagcgtaccatccagtttgtggactggtgccccactggcttcaaagtgggcattaactaccagcctcccactgtggtacccggtggagacctggccaaagtatcagcgagctgtgtgcatgctgagcaacaccacagccattgctgaggcctgggctcgcctggaccacaagtttgacctgatgtatgccaagcgtgcctttgttcactggtatgtgggtgagggcatggaggaaggagagttttctgaggcccgtgaggacatggctgccctggagaaggattatgaggaggttggtgtggattctgttgaaggagagggtgaagaagaaggagaggaatactaaagttaaaaatgtcacaaaggtgctgcttttacagggaagcttattctgttttgaacattgaaaagttgtgctctgatcagttaatttgtatgtagcagtgtatactctcatatataattactgacctatgctttaaaacacgacgctttgttacagactcaagctgtccatttctctgatgggtttgaataaagtattcccgtgtctt

SEQ ID NO: 8152 - DNA, 632 bp, Canis familiaris
aatgcggttctgttcacacagatttagaacccttgaagctgttctgtagcctctggccaattgtcctggtccaaggtgtactgtttcatttgtggtaaaaacactgtgtgggaatagagcttccaagtagaaagatatggacttttgaccagaaattgtctgaaagaattgggtgttcaggttagcctttaatatacaaatctgattgccatctaaagaggagagtatgaatatcacgggagcaaaccgagggcaactacttaggaaattaagggtgggaaaggcttcttcaaagacagtgtctaaacagatgaaaagtatgaagaggaagtgaacgatttgaacacagaaacaatatccatatgacagaaaataaagtaaaacattaggttaaaaagatcaatgacttgggtcgcctgggtggctttttagttgggtctctgccttctggccagggcatggtcctggggtcctgagatccagattggcccccgtcggactcccctgggggagccagcttctccctccacctgtgtctctgcctctctgtgtgcatctctcatgaatgaaagaaagaaagaaagaaagaagaaagaaagaaagaaaggaagaaagaaagaaagaaagaaaga

SEQ ID NO: 8153 - DNA, 103 bp, Canis familiaris
attttttacaagagtaaaataataatttatttgaaatggggagcgtgcattttactgtattttgtgtgttacgtttatctctcagaaatggaaagaaaattaa

SEQ ID NO: 8154 - DNA, 600 bp, Canis familiaris
  misc_feature (203)..(203): n comprises a, c, g, or t, or includes no nucleotide
  misc_feature (222)..(222): n comprises a, c, g, or t, or includes no nucleotide
  misc_feature (243)..(243): n comprises a, c, g, or t, or includes no nucleotide
  misc_feature (266)..(267): n comprises a, c, g, or t, or includes no nucleotide
  misc_feature (335)..(336): n comprises a, c, g, or t, or includes no nucleotide
  misc_feature (346)..(346): n comprises a, c, g, or t, or includes no nucleotide
  misc_feature (352)..(352): n comprises a, c, g, or t, or includes no nucleotide
  misc_feature (373)..(373): n comprises a, c, g, or t, or includes no nucleotide
  misc_feature (397)..(397): n comprises a, c, g, or t, or includes no nucleotide
tatttcttattaaaatatgtagtttttaaggacttctttttctgaccagtattatgtaatttgtttagtgttgggtagatggggagtgtcgcgttgtatgttaccggtaccagctgacaatgtatttttgtgcacattctgttgattatgcttagtagtttcacgtgcttatgtatggtattcataacccgacctattgcctncatgaggaaacatggtaangataatgtattgtacagccancttgttacacaagtttataatgnntattgtttctatctgtgttttaatatgtatgttatataacattccaaagagaattttgtttcttgatnntgagaaaagngatacnaaaatgcagaatccacaattnttgataagctgaaaattgccaatntgttttgcagtactttattatattgggtgtcttgtctttcttgggcttttagttagctaatgaatgaatacattagacacttttgggttttagttgggattttacatagcttgcattttaattctttggttctttgctgtttctattaacccatagcattattttaataaatgttataatacccaaaaaaaaaaaaaaaaaaa

SEQ ID NO: 8155 - DNA, 657 bp, Canis familiaris
  misc_feature (239)..(239): n comprises a, c, g, or t, or includes no nucleotide
gcctcaggagctgctggatgtgggagtctggtggtgtttggggaaattgaaagtggaacctggtctgccgtagacccctcagtgacgttcagtcggagcacatccttcggaagctgccgcagccgaggtgagaaattgtctctgatcccgcaaggcacgcgcagacccttcacttgcgtctgtgtggccacccgagctcttaaagattctggccacagtattccggccactcgatgatntgcacactcggagagcgtgtggagaccgccactcctgttgggctgcacagcacggaatgaaggaccctgagagctcccttcaaccggcgaattgcccttggttggaattcttggcttggccccaaggattccacccaaccccgggaatgtgggacctggccctccaaagccctggccaggagcagattgaggtggtgctgctcaacagcctgcagcagttccgccaggaccagggggatgggtccaagtccgaggatgaactggaccaggccagcacccctacagacgtgcgggatattgacctgtgaggatgcagtcgggccgaatgggagagacgtattcccatctgctctctccttctctctggttgtgttttgttctttatgttttaggatgaaacttaaaaaaaaaaaaaaaa

SEQ ID NO: 8156 - DNA, 532 bp, Canis familiaris
tagccccctgactcctggacttggggtttgctgacctccgtaccggcattagttccctcgttgacccaggtttagaaggtgcctgctactgcacacgtcagtcctcctagcctccggagtatctattacttgagcccatcatagttttatagagaggtaatcgcgacatatacttcaagccttattcatggacaatctccttaggcgtatattttacgctattacaggcctccgaatactatgagacatcttttacaatctccgatggggtatacggatctaccttttttatagccactggatttcacggattacacgtaattattggctctacattcctcatcgtgtgcttcctccgacagctatactaccacttcacatcaaaccaccacttcggatttgaagccgctgcatgatattgacactttgttgatgtagtctggctattcttgtatgtatctatttattgatgaggatcctaaaaaaaaaaaaaataataaaaaaatatataaaaataaaaatgtaatgttaa

SEQ ID NO: 8157 - DNA, 599 bp, Canis familiaris
gtgacttctgtaacaaacatccaccttttgtggaggctctgttcttataaaatacctattgtttaaaaactctgtaaccacgagccaactaaaggaatacgagggaaaacggtaaataatcccccacacttgttttctagaatttgtggctttaaagaggaacccaacccaaacccaattaattttttctcagaaaccagggaatacgcttgagggaaataaaagcatctccgttcttcggggttcccgttcttgttttgtttcgtcatgttttaaagacctttgcctgtctcggcgagtgagcgacagggaggtgcctgggaggccggcagggtgccctttctctcccccggcctcggcgaaggtctgggcggctggcaccgcctccttggccagcgtcctcgctctctgcacccacggggggccaccgctggccgccagcgcccccgagcccccctcgggtctgcgcacgccttcacaaaataaccgccctctctcctggtttgctccatctttcgcttcttcctctcttgagaaccacccccgcttggcggaggcccccagtgtttgcagaaggcctcggtggccgcagggcgtcc

SEQ ID NO: 8158 - DNA, 625 bp, Canis familiaris
ttggtagcaaccaggcagacaccccaaacccctgggaaaccaagaccagcatgttaactggaagataccccactaccaagaccacagtgtaaatttgacttgcaccaatagaactttcacggataagttagcaccaccacgaaattgttaggaattattttctttggggaaaatgccactaggaaccacagtgggacgtaggatgggactgtttttcctttaaaatttcttcacgtttgtttgtaatcttatagagttgatacttgggtgaaaaaaatccttagctgaaagtgtttctgaaaacttaggtaaagccaagaagcccgcacaggccattttgagagattaccttagagctaatgtcccatattaagctattagagaaatacaggaagcaactttaaataaatttggaagggatccctgggtgggtcagtggcttagtgcctgcctttggccccgggcgcgatcctggagtcctgggatcgagttctgcatcaggctccaggcatggagactgcttctccctcctcctgtgtctctgcctctctatcatgaataaataaatctttaaaaaaataaaaaaaaaaaaaaaaaaaaaaaaaaaaaaaaaaaaaaaaaaaag

SEQ ID NO: 8159 - DNA, 567 bp, Canis familiaris
tctccccgttatccctccccgctgaggctctccagtcacgtatcgcgtgatctccgacacctgcatccggaaggcagccccccgcccttcgaggacactcatccttgagctcttgaggaccccaggacctagtgatgtgacccatctgcccgcccagacacccctccctgcccgccccaccccgaggtcccttcttaccctgacacccctctcgttattccaggagtcctgaaatccccctttgccctaaggattcggtccctgccaccccttagattccttcgaggggtcctgagacccctcgtgaggttacctagccccccgtgcccccgacagacccaccactctcatacacggtgccagcacccgctgcctgcagtcaggcgcccctgcccggtgtcctcagttgcccctcgcccgcggcccccgccccccagagctgctccttgggggggggtgctgtttgagagtctttgtgttgcacattaaaactcaaccatttaaaaaaaaaaaaaaaaaaaaaaaaaaaaaaaaaaaaaaaaaaaaaaaaaaaaaaaaaaaaaaaaa

SEQ ID NO: 8160 - DNA, 633 bp, Canis familiaris
agccactttctcaggtccccggccaccagcctggtcccgaatctcccgccaccgtcgccgccaccaccaccgctgccaccaccgccaccaccaccaccaccacacagtagcccaccggatagaccgttgtcagacaagattccttcagattccgagttgcctaccggtttttttttttcttttttgaagacagccataaccacagcacatattactgtagctctttgtagtgttacgtacatacatatcatagctctattctctccctttgttttgttttcgactttttttttttttttttaataaacgctcataatctttactggtgaagaggatgaaaaaaaataaattgaccaataaaacccgtttgtggggaaaagaatttttaaaaaaagcgggaaaaaaaatcacctgaatgcacgaggggctcgcctcctgtttagcacttttgtacctgaggaaataaaaaaaaagaaaaaaaaagcccgaggatctcacgttttattaaaaaagtgaagattgctgtatactatttattcaacttataatttatgttactccttgatctttgtcttttgtcatgaccaagcatttatttaataaagttatgcattcagttaaaaaaaaaaaaaa

SEQ ID NO: 8161 - DNA, 547 bp, Canis familiaris
ggaatcccgttcactggggagctctgggagttcttgagctttgccgaaaggtacccccacctcatctataccttctgctctttggtctgacccgtgccctgggtcagagcttcatcttcatgaccgttgtgtattttggccccctgacctgctccatcatcacccgactcggaagttcttcactattttggcctctgtgatcctcttcgcccatcccatcagccccttgccgtgggtgggccccgtgcttgtgttcttgggtctcggtctcgatgcccagtttgggaaaggagcccagaagacatccccctaggaagagagagactacctccccttcgagaatatttaagttattgtctccaatatggacatctcttgggccaatggacaccatagggataaaggactgggttccagtctgtttttgtttttttgtggggttttttttgttgttgttttttaagaaaaggaaaccaaaatcacatattctttaaaaaaaaaaaaaaaaaaaaaaaaaaaaaaaaaaaaaaaaaaaaaaaaaaaaaaa

SEQ ID NO: 8162 - DNA, 634 bp, Canis familiaris
tgtccgttgtctgctgcctaaggaggaaaggaagtgatgaccacttgacacttgtcaactaaatccttctgctaaagataatcgggcgtcaggcctctttaccccgtgaccatgcagagggacccccaaccacttggaccagcacgttcccaaactccccacttatttatttgtggagagggaaagaggactgtcacctggttgaacaccactgaagttcccaagttcctcttataaacttggatgatgaagaatagaccagagtccactactgagccttggtgccatagagccgtgaccatgaaattctgcattggactttaatttatgacatcgccatgctgggatggaaaaaaatgtcacatttcagagtgtgccaaaaccatggcacctaaagtcatgcgttgaaagttgtgtgtttatcatcccataaggatttgttttaaaagtggttcttggactagaagacatttgtaaattcactggtatgcaccagaaatgaacttggttgccataataaattaaaaattcccagctggagaactattaagccttttaaagaatacacttaaacccaccaaaagacctcttgtagtggaaaaaaaaaaaaaaaaaaaaaaaaaaaaaaaaaaaa

SEQ ID NO: 8163 - DNA, 600 bp, Canis familiaris
acccccctgtgcccagggggtcatctggactgtgttcaacccagacacgtgaggctggagtgcttatagcagctccacaccctctctggctccctgtggggacctgatgactctcggctacagctgaacttccgagccacacagcctttgaatgggcgaataatcgaggcctccctttcccctggctttcaagtggagagcagccccaggtcttttgagccagtccacctgaattcctgccttggtgctggtgacatcctggccgtggtttttggcctcctctttgctgtcaccagcatcgccttcacttgtgccaatgagaaagcacgggaagactccggaatgggacccaagggaatgttagctatcacccagcagaggtcacagagactgttgcctagaggccttggaacttggagaatatgcagagagaagccaaccagaagaatctgagggggagctggagactttgtcctttcctaccctttataccacttcctttttaaggttcaaaattttttttttaaataaatgtttctaataaaatatatggaaggcagctttgttccctaaatcagaaaaaaaaaaaaaaaaaaaaaa

SEQ ID NO: 8164 - DNA, 619 bp, Canis familiaris
aacccatgtctgtctcggataagcagggcggccaagtgcggcaaaggccagtcccggtcctcccgcgcgggcctgcagttcccggtgggccgagtgcacaggctgctgcgccaaggttactacgcggagcgagtgggcgccggggcgcccgtgtacctggcggcgtgtgtctggagtacctgacggctgagatcctggagttggccggccatgccgctcgtgaccaccagaagaccaggatcatcccgcgccacctgcaactcgccatccgcaacgacgaggagctcaacacagctgctggggaaagtcaccactcgcgcagggcggcgtcctgcccaacatccaggccgtgctgctgcccaagaagaccgagagtcaaaaggcgaagagcaagtgaccctgacgccgccacaggggagctggcttccccagcaagggctcttttcatggccaccccgcagtattctctttttttttttccccccccaatatactcgatgtcctggaaggctggcgcgatctagtggggaggtgggtggcagggggcccgcggagtccgaggcccaataaagtcggtgaaaatcgaaaaaaaaaaaaaaaaaaaaaaaaaaaaaaaaaa

SEQ ID NO: 8165 - DNA, 462 bp, Canis familiaris
tcacgtgtaactgtaagttttcagtactgtgcttttataccttttaatgccatgttgtattcatttcacgtactcctagatagtgtgtagaatttatgcatgtttgtttatgagtaagctcggttggtgctttcgcttttgtgctacctttgaattttttgtacccgagacgtgctaaacttatgaaattcattgagaaattttccatcttattcttttatatggaacggatgatgtgtattagagtagactacttctggagagtttggaaagactccccagtaaagctggcctaacccagggaaaagtcaaggcccctctctttaggacctcgatgggcacaggaaacatccatatggaatgcagtgatgtggacagaaatggtctcgatgtgggcacttggcacactttactaaacacaaattacagcccccccatgagtaaactttaaacattaaaaat

SEQ ID NO: 8166 - DNA, 520 bp, Canis familiaris
  misc_feature (241)..(242): n comprises a, c, g, or t, or includes no nucleotide
gggtatccagggcttcgattccggtagagggatgcctgtagtacggctaccacatccaaggaagtgcttgcatggcgcgcgatagttacccatctcccgatcccggggaggtagtgacgctaatacaatacaggactctttcgaggccctgtaattggaatgagtccactttaaatccttttaacgaggatccattggagggcaagtctggtgccagcagccgcggtaattccagctccanntagcgtatattaaagttgctgcagtttaagctcgtagttggatcttgggagcgggcgggcggtccgccgcgaggcgatccaccgcccgtccccgccccttgcctctcggcgccccctcgatgctcttagctgagtgtcccgcggggcccgaagcgtttactttgaaaaaattagagtgttcaaagcaggcccgagccgcctggataccgcagctaggaataatggaataggaccgcggttctattttgttggttttcggaactgaggccatgattaaa

SEQ ID NO: 8167 - DNA, 584 bp, Canis familiaris
  misc_feature (1)..(1): n comprises a, c, g, or t, or includes no nucleotide
nagtcgtgcgcctgtgaaggcatcaacctttctgcccatttctacagaaaccagttgaagtacctggccttcctccgcaagcggatgaacacccacccatcccgtggcccctatcacttccgggcacccagccgtatcttttggcggaccgttagaggcatgctgcccccccagacccagcgaggcccggctgccctggaccccctccaggtgtttgatgggatcccccccccctatgaccagaaaaagcgaatggtggttccagctgccctcaaggtggtacgcctgaagcctacacgaaagtttgcttacctggggcgcctggctcacgaagttggctggaagtaccaggcagtaacagcccccctggaggagaagaggaaggaaaaggcccagatcccattatcggaagaagaaacagcttatgaggctacggaaaccggccgaaaagaatgtggagaagaaaattgacaaatacccagaggtcctccagacccctggactcctggtctgagccccataaaattgacttattcatccaaaaaaaaaaaaaaaaaaaaaaaaaaaaaaaaaaaaaaaaaaaa

SEQ ID NO: 8168 - DNA, 667 bp, Canis familiaris
ccctctagctcttttacttctcacctttcctggtcctgagaagtcacagattagtgtaaagaaaggggaagccctacatacatgagtgacaggagctggcaatgagatagagcctccatccaagtctccagttgaaaagtccattgttggcatagatgatatggaacataactttatgatgactcttaagggtggcatgttagatggggctagtcacctatctggagctagtgtagtttcctgctatgaatgattgttattactcattatctcattcatttctggctttgtaaagtgtgttgtcaaaacacaaggttgtgtacatttgacctgggagatttcttggcagagccgactgcttttcccctttgcctactttccacgtcttctgcttagacatacaggaaacttatggttgctctccatatctaactgtgaccctcccctaaagttgagaggtggtgagggtaaagaagggagtatccacggcagccccggtggcacagcggtttagcgccgcctgccgccccggggtgtgatcctggagacccgggattgagtcccacgtcgggcttcctgcatggagcctgcttctccctctgtctgtgtctctgcctctctctcgctctctctgaatgaataaataaataaatcttttaaaaaaaaa

SEQ ID NO: 8169 - DNA, 611 bp, Canis familiaris
atgtgtcatagagatgaaaggtcatatgttttccctatggtcacagattgtggccctaaattaactttcttccaccacagaacttttaagaaggaattttactcatgattgtcataactggttttgactgctgcaaaagttaacccctgtttgtgttttagccatattcttttctcttcccagtaacttctccgactcttgttcaccttcctgttctcagctcctagcgtaaggattgatccacagtaggccattaatatgcttgtgtctgctcacactcacatatactaaattacatcagcccttgaacccattcaatgaaaaaatggaattgttcttttaaactgtcacagattattcatttgtttttatgtaaccgaatccatatttattgagtgaatatccatagttatgaagttagaaatgtattatctaacatctccaaagtaatcaaaatatttggctacagtgtgcatggcaacatctgatccttcccagaccaaacatcttccaggaaatatataactttatgtctccagttcaagttcagttgtaatagaaacagacttatttagaaataaagttctacatttgaaaaaaaaaaaaaaaaa

SEQ ID NO: 8170 - DNA, 607 bp, Canis familiaris
ccccggccccggtgttggcgcgccatggcggactcgggctgcgaggccccgcagggccaggaccgggagagttttctgtacttcgcctacggcagcaacctgctgaccgagcggatccacctccgaaacccgtcggccgcgttctgctgcgtggcccgcctgcaggtcagtgctgccgccgccccgccgacgaccgggccgcgttcggaggagccgccttccggggccggggcgcggctcctgctgcgcggctcctgctgcgcggccacgtcggggcggcccgcggggtcggccggctctccccgggaggctgggcctgccggccgacgtggggcgcgcgcgcagcctccctgcctcggttcctccacacgtcggcgcccccgtcggggaccccgcctccccgccgccccttgctgcggggctggtcggctgctgccgggagctcggctgcgcgggggccggtcggtaggaggggctgtgcccggccacgtcgggggctgctgcaccgcagcccacccgggtgaaaggcgctgctcttcgcgggagcctgggactctccgtctcggcgtcggcgttcccgccgctgttgggcgtaggcatcgctgaa

SEQ ID NO: 8171 - DNA, 658 bp, Canis familiaris
tgtccactaatgggacgcacgagatcctagatcctgacttggttgtatcagatttggttgatacagttaatactgaccctttgcaaaacacatcatccagtaccaaggaatctgaagaaggtcagttgaaatctcctttggaagctggccaggtctcatctgcattgacttgccactcctttggtgatggattgggggctgcaggcttggagtttgaactgcaaagtcaatgggagaaaacagtatgaagacagaaccgacttctcctcttgctgagttacaagagatttctactgtggcagtaacaaatacttttaagaaaacagatgattttgtgacatgtaaagcaccagctgttgacctagatcacaagttcaggtgcaaggttgtggattgtttaaaatttttccgcaaggcccaactgttgcactatcacatgaagtatttccacgggatggagaagtcaccagagccacgaggagagtccaggaaagaagcatgtcccaacgagaggctcttcagcttcagacaggccaaccaggagagcttgaccaggaagcgggtctctgccagttctccaactgccaaagataaggaaaagaataaagagaagaaattcaagaatttgtgagagtgaagcccaagaaaaaaaaaaaaa

SEQ ID NO: 8172 - DNA, 681 bp, Canis familiaris
atcgacctgtgtgtaaatgtaccacaatgtaaaaccaccataaagttgtttttacttttctttctaacatccatgcttacagaactgttcagattaggtttgtcacgtagtaaatttcacagaccaatacccatttttctccacatccactgaaccatactatacttactatacctgcaactaagtgttaacaattatgctctgtaaccctgtactgctagtattagaactaaaaaattttcacatacagcccatgcttaatgcttctataactgtggatttgtcagcctttatgtaatctgtattatataaagcacggggataagaaaagaggtacaccatgtatgcctttaaaaggctatttcttaaagctgttacacaggggataatggtatttcaactagttatcagcaagtgaccaatacattccaccacaaatgtactcttgttcttctagcttttagactatggaaaaaactgagtgcttcagagttcggaaagagaagggaacactacacctgtgttgtggatgaactgaagactttgcctgttcattttttaaatattattttcaggtcctttgcttacccaaggaagccccatttcactcaaatgttttgagaactgtgtttgaataaatgcacatgaaaagagtaaaaaaaaaaaaaaaaaaaaaaaaaa

SEQ ID NO: 8173 - DNA, 565 bp, Canis familiaris
ggaataatccccatatcctcacccgttgtaagtatgaaatgaaataatgcctgtaaagccgagagccccatgtaaagtacttgtatatgttgtaataatggtatattatttttgttactagtttttaactgtacttaatttggaataatgagttcagatgcctatgatcccgggaggaagaccggatgtgttgtatcctgtttccaactttgctaagtgctcatcagaactcaccccctgtagaataatagttttgtatgtgttaaaccttagagaaaaatttaccagatattgttataacgtggtacccaaattacactgcccttgatggtgtttcttcagaaaaactatttttctccataattggaggagaggaggggcacctgagtggctcagtggttgagtgtctgcctttgattcaggttgtgatcctggagtcctgggatcgggtcccacatcgggctccctgcatggagcctgcttctccctctgcttctgtctctgcctctctctctgaataaataaattaaaaatattaaaaaaaaaaaaaaaaaaaaaaaaaaaa

SEQ ID NO: 8174 - DNA, 682 bp, Canis familiaris
tgtccaaaggttgcaggctcactatctaaagatatcggaggcttgttttcagactgttatgttcgggataactgccaccctttcaaagccactatattggtctggattcagtttccgatgtggatcttcatgtctgttgctctccggaattttagcacaggggcagcacattcagaagcaggtttttctgttcaggaacagttagctactgatggaatcctgtggtttcctgacctcactgcactggattctacctggattctgcctatttctgttggtgtcatcaatttattaatagtggagatttttgccctgccaaaaattggaatgtctcgttttcagacatatattacatactttgttcgtgcagtatcagtgttgatgattccagttgctgcgacagtaccttcatcgattgtactctactggttatgctccagcctcatggggctttcacagaacttgctgctgcgctctcctagatttcgccagctttgccgaataccgttgaccacagtcagattcagactctccttataaggacctctttgctgccttttataccaagttcatttcaagaaaatgacatgctttccagtaattttgaaacaattgcaagtgttgctatcaccaatatatttatgtttagaaattccaaaaaaaaaaaaaaaaaaaaaaaaaa

SEQ ID NO: 8175 - DNA, 571 bp, Canis familiaris
tggggcccttgacttgctgcctggggggcaccctggactccgattcaaggtcgttgtgtccaggcaggggagtgattttgaagactctccgggtgatcccaagcagctgctgctaaggaggagcccgtctgagccggggtccccaggagcctgctggctgccagcccggtgatgagctgacacagcccagtggagcagcacacggcaccagcccccctgcacccctgcccccggggaacccaagagagcgccccccccaaggctccctaccccatgccctttggccccccctggcccccgtggcatccctggaacctgggacaggactgtgccgggatcgtctgacctcacccctgggtcctctcctccaggtgccccctcacaccagccacgtgcccgaggctgggacgggacactacatggggctgaatcccgcccccaaaacacactaggtgggtacagcaagccacggtatcccttcacctcactagcgccagcttcagaggtccccaggtacacacagcggggaaacttaataaaaaacccagaaagtaaaaaaaaaaaaaaaaaa

SEQ ID NO: 8176 - DNA, 685 bp, Canis familiaris
taatttttaaaatagaaggtttgaacaaaagggcatcaaggaaattttcagaatcaatttcaccaggcacctgttttctaaaaataggtattgccatatatatatatatacacacacatgcgcacacacacacacatatatatttttagtataatgttagttgggtttgatttattaaagtgttgttaaatcttttatttatctgcatatagccctgattggctttttgggattgaaacttttgcgcctgatgccttaaaataaggaaaatgctttgtttctgagccctgaagttgtttttatttttgcatacttctctaatactgctatcccccgatcccgattttggggaagggtaggaaaatgcgaggttttgtgttttgaattactgtcagaattaaataccccattacacgccaactttttttttaaaaggaccgttgcacttgtgctgccaaaatctaaatatttatatttcttatttttttctttatatattttacacttttaatatgttgaacccctggaaatttgttacagatccatttgtgataggagtttaaatgtgttgtcattgtcgcccttgtcttcactctgtcccgagcctatcattatgtaaaccataaaatttattgtgtccgttgctttgaaaaaaaaaaaaaaaaaaaaaaaaaaaaaaaaaaaa

SEQ ID NO: 8177 - DNA, 583 bp, Canis familiaris
atccttctaagggctgtctaatatttaaacaaccattagtataaagctccaaatgtaatcaaggacccttccgagccatgattagcttcagaatggttagtttacagaacactaacttgatttgatttgtctttgatttgccagatgtttacaccagtaaaaatgtcatttctctagaattcatggtgatctggccccaaaaaaataataaccaattgaaagcatttggatatctatacactccttcccatttgttctattaccttgagtccatagatatctatattcccgtaaaaaaaccatcttttgacctccagatatgctaggtattctatgctagataactcttcaaaacccatctcttcatagggcacctgggtggctcatttggttggacatttgactcttgattgctgctggggttatgatcacagtgttgtgagatcaagccaggctcacgccctgggtatgaaacctgggtaagagtctttcgctctccttctgcccctcccactcccccttaaaaaaaaaaaaaaaaaattctcttcattcctccctctctccccattaaaaaaaaaaaaaa

SEQ ID NO: 8178 - DNA, 600 bp, Canis familiaris
  misc_feature (1)..(1): n comprises a, c, g, or t, or includes no nucleotide
ntgattaagaccggagaccaagtgggagccacgaagccacacctgctcaacatgctgaacatctcccccttctcctttgggctgatcatcccagccaggtgtttgataatggcagcatctacaaccctgaagtgcttgacatcacagaggaaactctgcattctcgcttcctggagggtgtccgcaacgttgccagcgtatgtctgcagataggttacccgactgttgcatcagtgcccccttctatcatccatggataccagcgggtcctggctttgtctgtggaaactgattacacctttccacttgctgaaaaggtcaggccttcttggctgatccatctgcaatttgtggctgctgctcctgtggctgctgcccccactgctgcacctgctgctgccgcagcccccgcccaggttgaagccaaggaagagtcggaggaatcggacgaggatatgggatttggtctctttgactaatcacccaaaagccacccattcagcccagtttatttgtgaaaccaggaaataaaggcttacttctcttaaaaaaaaaaaaaaaaaaaaaaaaaaaaaaaaaaaaaaaaaaaaaaaaaaaaaa

SEQ ID NO: 8179 - DNA, 692 bp, Canis familiaris
cttgccagatcttcagcccgacaacctcgtgttcggccagacgtccgggaacactggcccaaggccactacaccgagggcccgagctgtagactcggtgctggacgtggtgaggaaggagtcggagagctgcgactgcctgcagggcttccagctgacgcactcgctgggcggcggcacgggctcgggcatgggcacgctgctcatcagcaagatccgcgaggagtaccccgaccgcatcatgaacaccttcagcgtcatgccctcgcccaaggtgtcggacacggtggtggagccctacaacgccaccctgtcggtgcaccagctggtggagaacaccgatgagacctattccatcgacaacgaggccctgtacgacatctgcttccgcaccctgaagctgaccacccccacctacggcgacctcaaccacctggtgtcggccaccatgagcggcgtcaccacctgcctgcgcttcccgggccagctcaacgccgacctgcgcaagctggccgtgaacatggtgcccttcccgcgcctgcacttcttcatgcccggcttcgccccgctcaccagccgcggcagccagcagtaccgcgcgctcacggtgcccgagctcacccagcagatgttcgactccagaacatgatggccgcgtgcgacccgcgcccggccgctacctgacggtggccg

SEQ ID NO: 8180 - DNA, 604 bp, Canis familiaris
  misc_feature (1)..(1): n comprises a, c, g, or t, or includes no nucleotide
ntcgcatccgccaactctgcctcaacatctgtgtgggggagagtggagacagactgacccgcgcggccacaggtgctggagcagctcacgggccagaccccagtgttctcccaagctaggtaccccggttagatcctttggtatcaggagaaatgaaaagattgctgtccacctgcacacagtccgtggggcccaagccgaagaaatcctggagaaaggtctaaaggtgcgagagtatgagttaagaaaaaataacttctccgatactggaaactttggttttgggatcccggagcacatcgatctggggatccaatatgaccccagcattggtatctacggcctggacttctatgtggtgctgggtaggccacggtttcagcatcgcagaccagaagcgcacggacacggctgcacttggggcccaacacagaatcagccaagaggaagccctgcgctggttccagcagaagtatgatgggatcatccttcctggccaaataaattcccgtttctatcccaaaggcccataaaaacttttcagtgaaaaaaaaaaaaaaaaaaaaaaaaaaaaaaaaaaaaaaaaaaaaaaaaaaaaaaaaaa

SEQ ID NO: 8181 - DNA, 580 bp, Canis familiaris
gaagagagttgaagagatcaaacagaagcgcccagctaaatttataatgaatagattaaagaaaaataaagaattacagaaagttcaggacatcaaagaagtcaagccaaacattcatcttatccgggcccctcttgcaggcacaaggaaagcagctggaagaaaaaatggtgcagaaattacaagaggatgtggacatggaagatatttcttaaaaaaaaatctcactccatttctataagtgcgtttgaaaatctccttaggagcctaagaacttataaattatcaatttatattttaaataaggtcactcaaatgaaaggtaattaaaagtacatctcttgtacattgctgtctgtagaacatcagatattgtggatgttagattgcatcttcattgttaaaccttcactgatagttacatttatgtaagtcatgcaaattttttttataaatacagagtgaaatgtggacataaaatggttctgccatttggatggtggcagtaggtggtacttatgtaagaactaatgacaaaattcatggctagccaatatgtaaaataaattttctttgccag

SEQ ID NO: 8182 - DNA, 524 bp, Canis familiaris
ggtgttgggtggttaaggaatccactgaaggtatgctttgtctggtggaggaaccgcatttgggtaacttgtctggcccccaaagtgggaagaagtgcccaaggtaggaagtgactggccaggtaggaagccccagccccatgcctgatgttagatctcctgtgggatcgccacccacctgatatttctgatagtcctactatggtcttcccaagctgcgttctcacttccactccaactccttcaaatagcatcttgtttctggaatccttccataagtagaggcctaaatctttttcccacctgaggtcctaaccctggctgctttttcctgtcttggaagtcacctcaatcccctcctttaggacatgcctcctcccctggccttgaaaggagttcctctttccctgcccagaacccaacacctcattcctgtgtgcagccgagccataaagagcagacccttccaaaaaaaaaaaaaaaaaaaaaaaaaaaaaaaaaaaaaaaaaaaaaaaaaaaaaaaa

SEQ ID NO: 8183 - DNA, 641 bp, Canis familiaris
atttggcattgagctggagagtggcagagtgttaaacatgagatgacgtcatggtttctcccacagtggaggaaaagtatagaaaagatgccagccaaaatggtaaggaagctagaaagtaaatttactgcataatgtataatagcctatatattattttaagctaaatttgaagaaagtagaatgtcatctaacgtatacacggtctctgaaaatactgtagaataagcccaggaaaccatcagcacaggctttaactccaattgtcggagtgtgacatagagtctttttttattaagtgtccacagaaggttaagaatcacgggggttttagtaatttattcaatgccacttcttgccattattttgaaattgttaaaatgggtaagagttcagaaagccaacctgatggcttcactgggggagatggagccacactgtgctctgggtgggattgcctctgcacgagaacattacattttctctcaaaggcaaaatgcttgtagattttgcctctttactttgtatttacttttaaagttgcacttgttcacctaccagtgtttacgatatcctattacttgggatgctttttctataataaagtattatcatttgaaaaaaaaaaaaaaaaaaaaaaa

SEQ ID NO: 8184 - DNA, 558 bp, Canis familiaris
  misc_feature (1)..(1): n comprises a, c, g, or t, or includes no nucleotide
natcagtcctcctaataaacgggtcatttacactatcccacgctaattatttaccccaggacatatatgattaatctttccggcctgacccctagccactgatatgattcatctctaccctagcagaaactaatcgagcccccttcgacttaactgaaggagaatccgaactagtctctggatttaacgtagagtatgcagcaggtcctttcgccctattctttctagccgagtacgccaatattattataataacatcctcacaaccattctgttcttcggcgcattccacgacccattcataccagaactctactctattaacttcactataaaaaccctcttattaaccatctgcttcctatgaattcgagcatcataccctcgattccgctacgatcagttaatacacttattatgaaaaaattttctacccttaactttagccctatgcatatgacactgttgccttaccccttatccccgccagtatcccccccccaacataaaaaaaaaaaaaaaaaaaaaaaaaaaaaaaaaaaaaaaaaaaaaaaaaaa

SEQ ID NO: 8185 - DNA, 614 bp, Canis familiaris
agatggggctttggaactgattgaagtagacactgcagagcctggaaatatctggtcttattacctgccacaggttcccccaatcatcaccatgtgtgtccctcgaaccgcccccccccacccgttaatagcaacacctgattttgggctggggccgtaatacgttaatgtgctatcagccagcaacacgttgctgtcattttatcagaccaactgactgctgttttgcagaggagagagttccagaggcgtgaaaaggctttccttaccttttcatctaccacactgctttccatgaggtcttcttcatggagggtgctcaaccaaagtccagagtgaaaattttactggataaaaggagatgaggtctagagcgtgagctccttctctggtggtggtttgttttagggaggtttattctggggtgcctccgaagataagcttctcttaagaatgttgctagtgggggcccctgggtggcttagtggtcgagtacctgccttcggcccagggcgtaagtcccacatcaggctccctgtgggaagcctgcttctccctctgcctctctctgtctctcatgaataaataaaaatcttaaaaaaaaaaaaaaaaaa

SEQ ID NO: 8186 - DNA, 631 bp, Canis familiaris
  misc_feature (1)..(1): n comprises a, c, g, or t, or includes no nucleotide
nacatggtatgtctgacccaggtgcttcagtggagtccatcacaataccgtctgctatggataaagtggacaaatattggggaaatcattgttctcttattttagactctataatgatcattatccttcccagttactttacccagtgacaccacttgtagacaaccattaataccagaagtttatttttaatatgtattgctctgttaataaaattaaggaaaagagttataatctttctgatggaatttgggggaacactctaacactgtaaaagttaattcagagaatgatttttttactctcttccaaattttgtgaaattcatcctttttaggaattatattttcatatgtttaacttaaagcaggtgcttaatatattttgtgattttttttcagctccctttattttccttttatcatgatcaataatatagtaaggaatatcaaatcagggatccctgggtggcgcggcggtttggcacctgcctttggctcagggcgcgatcctggagacccgggatcgaatcccacatcgggctcctggtgcatggagcctgcttctccctctgcctgtgtctctgcctctctctctctctctgtgactatcataaataaataaaaaaaaa

SEQ ID NO: 8187 - DNA, 660 bp, Canis familiaris
cgatttactcgaaagtgagtttaatctcgaaagtaagagcaccattggagtagagtttgcaatcaagaagcatccaggttgatggggaagacagataaaggcacagatatgggacacggcagggcaggagcgataccgagctataacatcagcatattatcgtggagctgtaggtgccttactggtttatgacattgctaagcatctcacatatgaaatgtagaacgatgggctgaaagaactgagagatcatgctgatagtaacattgttatcatgcttgtgggcaataagagtgatttgcgtcatctcagggcagttcctacagatgaagcaagagcttttgcagaaaagaatggtttgtcattcattgagacttccgctctagactctacaaatgtagaagctgcttttcagacaattctgacagagatataccgcattgtttcccagaaacaaatgtcagacagacgtgaaaatgacatgtctccaagcaacaatgtggttcctattcatgttccaccaaccactgaaaacaagccaaaggtgcagtgctgtcagaacatataaggcatttctcttctcccctagaaggctgtgtatagtccatttcccaggtctgagatttaaatatatttgtaattcttgtggtcaaaaaaaaa

SEQ ID NO: 8188 - DNA, 558 bp, Canis familiaris
gttgcctaccatggtgacccacgggtttgtcggcggaatcaggggttcggattctcgggagaggggagctctgtagatactggctaccacatcgcaaaggaaagtcatgcaagtgtgcgcaaatttacccactcccgacccgggaggtagttgactgaaaattacaatacaggactctgttcgaggccctgtaattggtatgagtccaactgtttaatcctttaatcgaggatccattggagggctaatgtctggtgtcatgcagcctgcggtattccagctccaatagcgtatattaaagttgctgcagtttaagctcgtagttggatcttgggagcgggcgggcggtccgccgcgaggcgagccaccgcccgtccccgccccttgcctctcggcgccccctcgatgctcttagctgagtgtcccgcggggcccgaagcgtttactttgaaaaaattagagtgttcaaagcaggcccgagccgcctggataccgcagctaggaataatggaataggaccgcggttctattttgttggttttcggaactgaggccatg

SEQ ID NO: 8189 - DNA, 649 bp, Canis familiaris
cttgtgaaccatcagcctgtaaatcgtgatcaatcttgcatttttgagaaggtctattaagggataataaattcacatatgtacctcttggtgctacgacagacctcatcactccatttgccctgagctgactgggagaacagggcacagttttcacgcttaccgccattaggctgtgcgtggtcccagttgaggaaggagatggtgactccatggacatcaacaaacttgccctctgtgaccatgtcattgatgcccagccaaaagtcattgacacctggcaggcttcttttaccatagtctcggagggcattgatttcgtcagagtttctggggataaccaaggttcctcccttggagatgcagtcttcattggcttcatggaagtgcttcaaaccttctgaagcaaggtagcatttcttgtgaacttttgtgcctcggagacagactgtctgtagggcttgcatttccttcagggcattgacttctctccagagcttttcaacttgagtcttcaggtctccatccttttctttcactcggcgtttgctgtgcttcctggctttaaatttggatgtgtggctggtggtctggtccaggagtaaggtgataaccaggaggtaaattacaagtccattctttgccatgg

SEQ ID NO: 8190 - DNA, 623 bp, Canis familiaris
gtgtcatgttgtactctactcttggactatattatttatttgtaaaagattcttatatagtttatttctgagagacacacagagagaaaggcagagacataggcagagggagaaataggctccctgcagggagcctgatatgggatttgaccccaggatcctgggatcaagacttgagccaaaggcagaggctcaaacactgagccacccaggcgtcctgtcaactcttggatttataattcatggtaggcttataggttagctgttgctgtgtaaccagtcactctaaaattcagtggcttaaaaccattatttattcctgcttatatgtctcccaatcagctggacttcagttgattggggctggcctcacctgggagacttaacttcaaggtgacgtggccaaggacaattgtttttcatagaaagctggtggtttggactggtgtacctcggcctctcatgactcatattgtcctgagaccagctaactatccagggtatgttttcctcatgaggatgatacaagagagtgaatagaagtacttaaagcgtaggctcaggactggcatactgtcactgccttccaaaaagcaaatcacatagtcaagcccaaaaaaaaa

SEQ ID NO: 8191 - DNA, 595 bp, Canis familiaris
atgcatagcagggtgagagggagaactggctctccactgagcagagacccaacttgatgctccctcccaggaccctgggatcacgatctgagctgaaggcagatgctcagtggactgagccacccaggcatccctaacactagtttttcaagacaggaatttatagggtacgctgaatgatttaatggaaattgtcttcaacatgattttaaagactatgtgtgagaaagagagactgagaatgtgatattgtgtgtgatcttcacataccaatttctcttatcccaatggataaaaattgaaggcagaaggaaagcgagttcggagagggtgatttggtaagattttgttgcatactctttcacccaaataccaggctactgagctggagttagtgacttagttatgagttccttgatttttgtcccattgttgcagaaggtttgcaaatctactctgtggggataggataaacagtgcatcttatacagatatggactgcccttctgagaatgtatgtagatactgtggtgattaattaaacacaaatgaattcaaaagcaaaaaaaaaaaaaaaaaaaaaaaaaaaaaaaaa

SEQ ID NO: 8192 - DNA, 527 bp, Canis familiaris
  misc_feature (1)..(1): n comprises a, c, g, or t, or includes no nucleotide
  misc_feature (66)..(66): n comprises a, c, g, or t, or includes no nucleotide
  misc_feature (75)..(75): n comprises a, c, g, or t, or includes no nucleotide
ncgggattaaagtcttctacctggctttggggaattaccggctcaaggaatatgatgaaggcactnaagtatgtncgggggctgctacagacagagcccccgtacaaccaggccaaggaactggaacggctcattgacaaggccatgaagaaagatggactaaatgggcatggccattgtcggaggcatggccctgggctggcggcctggctggactcatcggacttgctgtatccaagtccaaatcctggatgagaccacacctccacctctgcccagggatatgttggagactgtagaggacagtcgaagaggggggacccgtccatccttgctgtcctttccgtaccctgtcactgcccaccggccttcatttttctttccccagagaattgtccaacagcccccaaccatgtgctccggaatgagtgtaaataaaactgggccttggcttggggaaaaaaaaaaaaaaaaaaaaaaaaaaaaaaaaaaaaaaaaaaaaaaaaaaaaaaaaaaaaaaaaaaaaa

SEQ ID NO: 8193 - DNA, 637 bp, Canis familiaris
gctattagtaataaaagtgaacactgctactatctgagcctacatacataatttgtgtggtttcgaattaaacttgcatatgtgttaatttttttgcatctaaaaaaaaagcatagaattattacagctcggcaaagaccctgtcgatggtaacagttcatttctttcattggatgaattaaattacagtggcattcttaaagatttccctcgaaaagcaatcttaaatgaaagtgtatgacttataagaaaagctagctatcttttgatgtgctgtttcccagaatctctgacactggagggcagctgtcttgtgcagtattttgtttccagcactgacattgtgggaaatgttgctgtagactgctgcgcagtcccaggtgcattctgtccctgcccacctcatggtccccactttaaagattgtgcagctctttaaataataaagctggaaaatatttttagtcaggttatcaaatttgatttacaaaaatgctaataactttgaaatgcgaaaagatttgaaaaaatatattaagtatactttgtattctggaagcgtgaattgcttttgaagtctgtcagtattattggtatttttcaataaagaatcatttttttctccaaaaaaaaaaaa

SEQ ID NO: 8194 - DNA, 618 bp, Canis familiaris
gaagaatactgaacatctgagtcctggatgatactaataaactaataattgcagaggttttaaatattagttaaatggctttcgcttaagattttaagattttgttatatacatattttcatattttcagtagtatctcttagcaacaccatttaagcaagtataaggtctggcaaagtttttccctgtaaaaatacttggtttataaataggttaatgataacaatttttgtcaaactgttctcaggggattttacatatatatatatatatatatatatttatatgtatatatatagatagatgcagaaaaattaaatttactttcagaatgctgggttaaacaagatagtttttcaaaacaaggcatgtgcaattaaaaaatgtgatgataagtctatcagttttctaaatccatggaggacctccatagaaaggccatgattgtgtaaaaattaagcaagtttttagtccagaggagcaagtccctatccttacatggatgtttctgcttctagctatagcacaactgtcaacatctgttgctagtaagtgatccaattaaaagtgaattctgcctcaaaaaaaaaaaaaaaaaaaaaaaaaaaaaaaaaaaag

SEQ ID NO: 8195 - DNA, 645 bp, Canis familiaris
tgctggcttttgctagatgggtttgggtggaacaatagtaatccaggttatttacgggtatacaggagggtaccaaactgtccaccatcagggaacctgaactgtaatttcttggtggacttttacacatgtgcccacttgatttgcttcatcctgttataactttgacatcagagtgatctgatagtgtcagaatgacaaccttacatccaaatgtcaccagattctcccctacaccagatgctaaatggacagaagggggtaggggatcacagtaaccttatttatcaccttccccaggagaaagaagttctgttgtaacaaataaatattgattttctccagtaatattatgaatattaaaactttaataatggcaacaaagtaataatcataattaacatcagttgaactcatttatattccaggctctgtgttgggcacttttataagcattatctcagttaatcctgaccacatctataggagatatgcactattattctcacttgttttgcagaggagagattgggactcaaagaaaatcacataatgtatcttgggccatatgatgagtaggaagtaaaagtagtgtttgagacttaacccctgtacaagaggctgaaaaaagatacttattaaaaa

SEQ ID NO: 8196 - DNA, 617 bp, Canis familiaris
  misc_feature (55)..(55): n comprises a, c, g, or t, or includes no nucleotide
gacgcatccatggggtcagcctcgggtaatgacactccgggtcaccgacggggcntcgttatcccctgtttacctgaacgcctccaacaagccggacccaggccggggccttggtcccacattccgatgggaggcagctttgcaccactcaagcgagggcagctactccagagcctgccttcagagcgggaagccttcagagcccgcgatcccgctcagcgattcctgctgggggaccacgtcttgcccggtgtttccaaacttgagcagaaacactcgtagggctggttcacataccagtcgctgggggcctatcagagtttttgactcagtagatctcagcggggctgagaatttgcattgtgacaccgagtgatgctaatgctgtcgacctaggggccacactttgagaaccactcccaactagtgccgtccgatcatcagagccacatcagtcactttaaattctctagtagccgtgctaaaaatgtaacacgaaatcagggtgaaatgaattttaataagatattttctttaacccagcatatttgacaattatcattttatcagttaatatacagacattaatgagaaaaaaaaaaaaaaaaaaaaaaagg

SEQ ID NO: 8197 - DNA, 651 bp, Canis familiaris
attcccgggatctcccctcttgctgctgcacaagccagtgagaccaacccacaaggaccacggagagaccatgaagagccctgctccttctgctccaattctggctgccctaggcccgtggcagcttttgtgctacgaatctcatgaaagttatgggaatccctatggaaattaatccccttcagtaacaggagaaatgcccaaacatttagatctccgcaacagagatggagagctaaagcccagggagaggatcagagaaaccacccagccccgcctatgagctcaaccggggaagcctgtgatgacttcaagctttgcgaacgctacgccatggtttatggatacaatgctgcctacaatcgctatttccggcatcgccgaggaggcaaatgagattgaaaaaagtctctttccttccagagcctggtgcctggttttgtattcctttacagtagcatcatcgaactacataaacacatacaaattgcttatttcttaaatgttcttgtctggctgttgccctccttcctgccccccagatcaataagcagtgaaagtgcaatgtggtgaaaggtcaaaagagaattaagatgtgtgattattattacataataaactcttggatggataaaaaaaaaaaaaaaaaaa

SEQ ID NO: 8198 - DNA, 589 bp, Canis familiaris
ctggggatccttctgacactgtcccccttggtcctggggtgcccgtgcttgactctccccacacctcaggcccagggttgccctggcacaggtgaatttaatgttggattttgccagaaggggttagggctgcttctcacgcgtggaatctttgagatcttgagtgagggtagcaggaaagtcagattcagtttataggaatctccgctacagccaagatcccaggaatgcgtggctttttctaacttcatatggactgtattatttatttaattaccaaagtatgttctcgtggtcctaagacaaacagagaagcttctagagaaaaacctagtttcccctccggccgaggcctcctttcgcatcttgccccccacggagggacaccccgagcctacctcagtcccctgggtcgcctcactgtccccagtgcggggcccacaggctgatgagccacttccctcaggcgatcgtagttcccacacgtagcggtgcttacttctgtagaacttctcctggagggaatttcaggtgggagagttttaataaaattttaagcagttggaaaaaaaaaaaaaaaaaaaaaaaa

SEQ ID NO: 8199 - DNA, 628 bp, Canis familiaris
aaggagtgaccatccgcaggactggaggggagccagcaggagcactgcttggaatccgaagcctcagagctccctcggcctttaggaactaagtgactctctaacatggttgttacatattcttctaactgtttccattctccaggctgagatagtctgtttaccccacaagcgcaagcctacacattcaggagggaaactctttgctccagttcccttcagaggggctggatgaggccatgtttggttggactagaaagagctcaaccgttttacattcctctttgaattttccaaagcaaaacccgttttgaccccattcagaggcaagcctcccccgtcttttcctgggccttcgggaaaccattggtgaatggctgtggagaatccagggttgtgggacgggggaggagaggcccatggggtggataggaattgctggttgtagtgtgacactctcgtgcttgccaggaaggaggagtctcgtgccgggaacactgactactgggaagccacacaggtctcgttcctccctgctgtttggaggcgacatctcctctttttacagagggtccatcctttttttcttacagtttcttcaataaagacacattcttgagtgaaaaaa

SEQ ID NO: 8200 - DNA, 662 bp, Canis familiaris
gaagagagattgggagaacattgcacaaactcttcagccaggaacacctagtgatatataagggatatgttgatgatcctcgaaatactgataatgcatggatggagacagaagctgtgaactaccatgatgaaacaggtgagataatggataaccttaccctggaggctggagatgatgctggaaaggttaaatgggtggacatcagtgatcaactccagctttatgccagtcactctcaattcatcaaactcgtggctgagaagcgagatgcacactggagtgaggactctgaaactgagtgcagtgggttgtagcccccatcattgtgggaaccacaggccagcaaaggggtgcgtgctgaaagaaggcatcacagagctcatactacaagggggcagggttggtcacttggaagttagtttattcactttcaaagctatttgcatttaggtttacatcagcataaaattagtaaatacggtgaaatgcaacatggaattttccgcttttcaatcaaaagaaatataaacaatcatattttgtatgtattctatttaagcatggcttaaaccacgtcttaaccaaaagtctttgaagaatcataatctgaataaaaataaatttatgttggccatcaaaaaaaaaaaaaaaaaaaaaaa

SEQ ID NO: 8201 - DNA, 579 bp, Canis familiaris
agtactcccactctttggtacaccaaccccacaaaccatgtcagtgtcaactaaagtagggactcccatgtccctcacagggcagaggtttacagtacagatgcccacatcacagtccccaactgtaaaagcatcaattcctgccacatccgcagttcagaatgttctgattaatccatcattaattgggtccaaaacattcttatcactacaaacatggtgtcatcacaaaatacttccaatgaatcatcaaatgcattgaaaagaaaacgagaagatgatgatgatgacgatgatgatgacgatgatgactatgataatttgtaatctagccttgatgctgtaacctgtaaacttggtcttaaatccattgtactgagattaaacgtgcatgctgggtattttgaagttgtgttgtagaaaacttaaatggtatttaatgagtaaatatagttatcctttcctattgagatgttgggttttctttaataggattagtaatggttattcattagcctttaagtgtgaaaaataaaattgttgttcatcaaaaaaaaaaaaaaaaaaaaaaaaaaaagg

SEQ ID NO: 8202 - DNA, 587 bp, Canis familiaris
agaggctctttgacctgtactactacgacggtctggccaaccagcaggagcagatccggctgaccgttgacaccacccagaccgtccctgaggacaaagacaatgacctcatcccgccccttgagctctgcatcagaaccaggtggaagggggcgtcggtgaactggaacggctcagagcccatcctgtgacccttcccattgggtaagcctctggctccgccactcatcactgggggtgacagctgagccccaggcctcagggacaaacaagtctttcagaagagtgtcacccccgtctgggccagcggtgctgcagaagcatccagcacctccctgccccttccatgaagggcccccaggactgtgatgagggcccacagtgctgctacacggctccctcccagctgagccatgactgccaaggattgaccgcctctgcgcattttgtctgcatccctcccttgttccccgctgggccacctgtccccttgtcaagcctgtgatatggtcagcccgggcaccctgggctcgttatttctggcaattgtctttctataaagcaagagtcaaacccaaaaaaaaaaa

SEQ ID NO: 8203 - DNA, 606 bp, Canis familiaris
ccctggggctgcggaccttctcggggttcggagcccccgggcttcttgctgaccctacccgcccgaagcgcctttactgtgcgcggcccgcaggcactgcctcccgatctttcgagcccagcccccttgaagaaagcaattgcaaggtattactaggcccttctggaaaagggacggcaccgaggagccgcgagggacgtgcctctccagggagggcgccctgacggtcctcgtgggttctctcactctcattccccctcagccccacgcgcagcctttaaaaccagctgctccccacggggcttgcttcggggtgaaccaaaccaagcccttttgctactaacccccctccaggagggaagggctgtgatgggggaatttgcagaaatccaagggaacattaaaagggagcgagaggtttttggtaaaacgttagaaataactgagaggagttagacaaggaactggtcaaggttgcttcttaggagaggaactgggtgcctggaggaatgaggtgagaaacttttccctctctgtcctttagacttgaactttttttcccccttgtatcctccctcccctcaccccaaaaaatttaacttaaaa

SEQ ID NO: 8204 - DNA, 667 bp, Canis familiaris
  misc_feature (50)..(50): n comprises a, c, g, or t, or includes no nucleotide
tgggatttttctagttaccctgcttagacataacggagggaagactgctnctaggtttattttctctctggaaaacccttgtgtaccctgactcctgactcagaacacgctcttgaagatattgatctaaacaagttacatccttggtggacttgtggacgaaagcattcagaagaaggtgacatttcaaaaagcccaagaacattctgtcaagacagcccgcttgccaatccaggaatacatggtcagatgccagaatgggaaaaactatcattcagagatattggccatcaatcaagtatttgatatcctgtccacatactttgagactcaaaactggcctgaagcactgaagaaaggagtttcttccaggaaaggctacgttcttcagaactcagtggaatgatggacagcctaaggagctgcaggaggcaaagctgctggaggtgctttgacagagaagcagagcagaggctggcgatggcacacacttgcctttaccttgacatcctggttcttacctagaatataaattactaataacagggaccatattttatgctcttttctatctcccatagtgcctggctcatgggaagagcccagatatatattgactaagtaaaaagtttacataacaaggaattagccctaaaaaaaaaaaaaa

SEQ ID NO: 8205 - DNA, 631 bp, Canis familiaris
aatacagagagggagttgaagttcaaatggcaagctggtcaggatcccctggtggctcaacggtttagtgcctgcctttggcctggggcatgatcctggctggagtcccaggatcaggtgccatattgggctccctgcatggagcctgcttcttcctctgcctgtgtctctgcctccctctctctgtctttcatgaataaataaataaaatcttaaaaaaaatattaaaaaatacagaaaacaaatggcaagctggtaagctgaggttttctgcattagaataggggacatcagcctggtatgaggtaagggtcatttctactgtgaaggaatagcgaaacggaaatgacaattaagtgtctatcctatgctttggatggggaaaaaatagctcacatgagaaattgaagctttaggcttgtgcctcacataagaacagagtatgaggggatccctgggtggctcagcggtttagcgcctgcctttggcccagggtgcgatcctggagtcctgggatcgagtcccacatcaggctcccggcatggagcctgtttctccctcctcctgtgtctctgcctctctccctctctgggtctctcatgaataaataaaatcttaaaaaaaaaaaaaa

SEQ ID NO: 8206 - DNA, 409 bp, Canis familiaris
cattccctgggccaccgggaagctgcaaggtgttggagtgggagtgggtagatgtggcttgcctgtctcatatctgactcaccgtgtactcttcttgaatccctcagggaatgtcagttcaattcagaggggaatcttagcctgcagtcgcccgggacctgctgacacttcctagtagtttaaagggacagctccatttaaaactctcacctgctgccttactttttcgctttatggaagattttctctagctgagtctgaatcaggtggattatactttgtaggggtcgggggaggcggagcagggcgaccccgagatgccatgtgaccgtgtctctccccctcctgccctggcatttcaggacgccagcagggagaccagcaaggcctgcaagacccacaagacggc

SEQ ID NO: 8207 - DNA, 649 bp, Canis familiaris
  misc_feature (1)..(1): n comprises a, c, g, or t, or includes no nucleotide
nctgctgctttgttatctctaatctcaaagaggatataagaaatttatatttaaataccctccagagggatcccctgggtggcgcacggtttggcgcctgcctttggcccagggcgcgatcctggagacccggatcgaatcccacgtcgggctcccgtgcatggagcgtgcttctccctctgcctgtgtctctgcctctctctctctctctctgtgactatgataaacaaataaaaaaaaattaaaaaaataaatgaaataaataccccccagaaatggtaatttgagagaagggaagcaagggtagaaaaaataagatgaataaggctagtggaaaagttagctcaaaatataatcttcagggatataagattcattattggtggaccacaggtttggctctcaaagccaaagcaaaatgttcagttctcaaaatcacattatggcaggtctgtaacctttaaacagagagtgcccatctatgttatgtgtctgtctagaaaaaaacacttgactaattaagtccatggagcttgattctggggactggaaaaggtaagaaattgttggcttatagtatttcgaatttcctaatgagcaaagaatctcctctttgcctagattgtatagaattagagagaattggaca

SEQ ID NO: 8208 - DNA, 642 bp, Canis familiaris
ggatacctgggtgtatgcaagtacaccgtacaggacgagagccattcagagtggtgtcttgtgtccgattttcacctatatagcagcaatccccatcattgtttccctgtggttgggaacaagttggtcaaggtatgggaccctggcacactggcaagctgaagacccatcacatcggccacacggggcctacttgaacaaccgtgaccgtcttctccggatggatctctctggtgccttcctggagggaaggatggccaagcccatgctgtgggatctcaaatgaaggcaagcaccttttataacactttgatggtggagacatcatcaatgccctatgcttcagtcctaaccgatactggctatgtgctgccacgggccccagcatcaagatctgggacttggaaggcaagatcattgtagatgaactaaagcaagaagttatcagtaccagcagcaaggcagagccaccccagtgtacctctctggcctggtctgctgatggccagactctgtttgctggctacaccgacaacctggtgcgtgtgtggcaggtgaccatcggcacccgctagaaatgatggcagaactttaggaataaaacattggttttctgaaaaaaaaaaaaaaaaaaaaaaaaaa

SEQ ID NO: 8209 - DNA, 624 bp, Canis familiaris
gcagtgctggaggcctcctcacagctggaggaaggtgcgagtaggatcggttgaggcctttgggtggggccactggcaaggccaggtggctgacaagtgcctcttccctcctgcccccactcccccagcagctcgattttcagccgttgggaggtggaggaggactggtgcctgtccgtcctccgctcctaccaggcagagcgtgggcctgactttcccctggagtgtggggggaagacatgaacgcagatggacgacagcagctggccttgtttctggctcagaagcatctgcacaacttcgaggccacacattgcaccccgctcccggcccagaacttccagatgccctggcacctctagcgaccacactggcacttgttttgaaagagtgggatggagggagatgtgaggaaggatcctcgtatttgtgattctctgtgttcgtgttgctgtttatagtttgtggaaaggtggggactgtcccccttctcactgccctcttgcacgtttcccctcagccatctggcagtacctaaccttccccaatacacatcctgcattcaatgaatggattattcctaataattaataaaaaggtattttttctaaaaaaaaaaaaaaa

SEQ ID NO: 8210 - DNA, 608 bp, Canis familiaris
  misc_feature (201)..(201): n comprises a, c, g, or t, or includes no nucleotide
gtgaatgtgtcaagtctggagttaaaggatctggaagtatcgaaagttggggagccaagcggaaggccatcactgcttcaacatgctgcacatctcccccttctcctttgggctgatcatccagcaggtgtttgataatggcagcatctaccaccctgaagtgcttgacatcacagaggaaactctgcattctcgcttccntggagggtgtccgcaacgttgcccagcgtatgtctgcagataggttacccgactgttgcatcagtgccccattctatcatcccaaaactggatacaagcgggtcctggctttgtctgtgggaaatctgattacacctttccacttgctgaaaaggtcaaggccttcttggctgatccatctgcatttgtggctgctgctcctgtggctgctgccaccactgctgcacctgctgctgccgcagccccagccaaggttgaagcaaaggaagagtcggaggaatcggacgaggatatgggatttggtctctttgactaatcaccaacaagcaaccaattcagccaagtttatttgtgaaacaaggaaataaaggcttacttctcttaacaaaaaaaaaaaaaaaaaaaag

SEQ ID NO: 8211 - DNA, 382 bp, Canis familiaris
  misc_feature (1)..(1): n comprises a, c, g, or t, or includes no nucleotide
naactgcacaaactggccactgatagaaatgacccccacttgtgtgacttcattgagactcattacctgaacgagcaggtgaaatccatcaaagaattgggtgaccatgtaaccaacctgcgcaagatgggggttcccgaatctggcatggcagagtatctctttgacaagcacaccctgggaaacagtgatagtgagagctaagccttaggctgtcttcccatagccgccagggtgacttccctgggtcaccgaggcagtgcatgcatgttggggtaaccttcaccttttctataagttgtaccgaaacatctacttctttcgtttgtatcattccttcaaataaagtaattgggtacccaaaaaaaaaaaaaaaaaaaaa

SEQ ID NO: 8212 - DNA, 547 bp, Canis familiaris
gcccggaagtattccagggtgtgggaaaagctggtcttccacatgcggggcgcagcacttcatcttcatgtgcccgcgctgcggcaagcagttcaaccacagcagcaacctcaaccgccacatgaacgtgcaccgcggcgtcaagtcgcactcgtgtggcatctgcggcaagtgcttcacgcagaagtccacactgcacgaccacctcaacctgcactccggagccaggccctaccgctgctcctactgcgacgtgcgcttcgctcacaagcctgccattaggcggcacctcaaggagcagcatggcaagaccacagcggagaacgtgctggaggccagcgtggcggagatcaatgtcctcatccgctagagctagcagagcaggctccaaggcccagcggcgtggggtgggggggtccctgggctgagtgtgaagggagctcccctggcccaggagaatagaataggggatgggagggttcggaacaggcaggtacgctggggaaccctagcagacatatcctgagagaggggccgaagattcctt

SEQ ID NO: 8213 - DNA, 658 bp, Canis familiaris
  misc_feature (1)..(1): n comprises a, c, g, or t, or includes no nucleotide
nccaaagggctacgatacggaatagttcttttttatcgtatcagaagtatttttctttgcaggcttcttcttgagcctctttaccactctcagcctagcccctactccctgaacattggggggttgctggcctccctaccggccattattccgtctgtaacgccacttagaagtgcctttctacttctacacctctagtgcctctctagcgctccgcgagtattctattaacttgaggcccactcactagtgttgaatagagaggtgaattcgccaaacatattactttcaagcctctattgcattacacattctcctcttagggcgtataattttaacggcttatttaacagggccttccggaattacttatggagaacattcttgttgaccattcttccgaatggggttgtacggatctacccctttttaaataaacccacctgggattcccccgggattaacaacgtaattattgggctctacattcctcatcgtgtgcttcctccgacagctatactaccacttcacatcaaaccaccacttcggatttgaagccgctgcatgatattgacactttgttgatgtagtctggctattcttgtatgtatctatttattgatgaggatcctaaaaaaaaaaataaaaaaaaaaaaaa

SEQ ID NO: 8214 - DNA, 524 bp, Canis familiaris
cgggaacgctacctccgcagcctgctggccatggtgggtcaccaggtgagcttcacagtgcacgagggtgtgcacgtgacgtgcccactttggagccaccgacctggacgtggccaacttcctacgtgtcgcagctgcagacgccgataggtgtgcaggcggaggcgctgctgcggtgtagtgacattattgcgtacaccttcaagccgtaaggatgttactaggttcacctttctgctgtgggcctagccacagggtcccagcccacacgttggtgggctccatagagtttgcaactaattcccttggaattttgagccgagctccagcaactcaggcttcttgggacctccggggtctcgtcagtaaaattccactgcaaccccaggattttagagcctgttgaaatgaaagctctacctcacagaactctaaactctgaaatagggcctcatggcggttcctgagactggggctgggggtaggtgggaagcggttggcggatgggattgttttttgaggtt

SEQ ID NO: 8215 - DNA, 565 bp, Canis familiaris
tcatctgggtttgatggtcgctgatatggattaccccaggctggcaccctagtgtttgtctcctggctaccaaaagggaaaagatcactacaatagttttacacaaagagaaacgtttgaaaatctgatgactataagcgaggaaaaatgtgggagtgtaggggaggtggatgtcaacaatccccaagttggctcttgggagttgtgaaggagggtaagaacttaaagaccaggtcatgctttgaggggaggggcttcatagattctcccaggctctcacctttccccttagccagtctgctgtcctgagacccagaagtgatggagagaaacctatccagaggaaaccctatctggaaggaatgtatttgttgctaaattttgtagcactgtttacagttttcctccatgttatttatgaattttatattccgtgaatgtatattgtctgtaatgttgcataatgttcactttttatagtgtgtcctttattctaaacagtaaaatggttttatttctatcacaaaaaaaaaaaaaaaaaaaaaaaaaaaaaaaaaaaaaaaaa

SEQ ID NO: 8216 - DNA, 619 bp, Canis familiaris
acatatgtgcattcatcgtgccctgcaagggatcattgtgtacaagctggtaagttttaaatgagggcctttagtctgttggaaaaagtgtacacaggtgtttggggcatgaaatgtgtgtttggcctaccttgagagtcactatgtagtctcagttcctcagccagtagggatggtttcttggtaagaaggtctctatgccaagtgattgatgagaaatgtttcatcttctagagaaaacttctgtttgtttggtcctgcttgaaagtgggatttatcttggtttgctgattgaaatgttggctatgtgattgagaaagcatagtgaagacaatgatcaacaagtccatacttaacaactgggcagcttgcctacaataacagaatttgctatgtgaatattaagcataaatcatacattctgataggtacatatatgtataacattttttttatgttatagcttataggaatactaccctaaatcattttaaattcccatatattgagctttgtgctgcatcttcaatatttcactggttttataatatattcctaggtcatttatctgtgctgggaatttcaatgctgtctcactagttgtagaaataaaaaaaaa

SEQ ID NO: 8217 - DNA, 620 bp, Canis familiaris
cccccacagtgcaggaccgctatgcagccaagcggcttccgtaaggcacagtggccccattgtggagcgcctggaccaacctcaatgatgatgcatggccgtaacaatgggcaagaagctcatgactgtgcgcattgtcaagcatgccttcgagatcatccatctgcgtcactggtgagaaccccctgcaaggtcctggtgaatgccattatttaacagtggtcccctgggaagactcaaccgcgcatttgggcgacgctggaacagctgaggcggtcaggctgctcgatggtgtcgccccactacgcgcgtgtgaatcaggccatattgggtgcgtgtgcacagaggcgccgcgagagccgcgcttctcgggacaatctcagagatatatgtgtggagtcctaaccaaatgagcttcatcaatccagccaaggggctcttccaattcctatgctatcaagaagaaggatgagctggaacgtgtggccaagtctaaccgttgatcacctggctgtggcttcaataaacctgtctgcccttggggcagcctcaccaaaaaaaaaaaaaaaaaaacaaaaaaaaaaaaaaaaaaaaaaaaaaaaaaaaaaaaaaaaaaaaaa

SEQ ID NO: 8218 - DNA, 651 bp, Canis familiaris
ctggaacgtggctggacgtcaacgggcctgatgcacacgcggacacacctctgcactgtgccatctcggcgggcgccgggcgccagcggcatcgtggaggtcctcactgaggtgccaggtgttgatgtcacggccactaacagccagggcttcaccctgctgcatcacgcatccctcaagggccacacgctagctgtcaggaggattctagctcgggcacgacagctggtggacgccaagaaggaggatggcttcacagccttacacctggctgccctcaacaaccaccgggaagtggcccagattctgatccgagagggccgctgtgatgtgaacgttcgcaaccgtaagctccagtcccccctgcacctggccgtgcagcaggctcatgtggggctggtgccgctgctagtggacgcgggctgcagtgtcaacgccgaggatgaggaaggggacacagccttgcacgtggccctgcagcgtcatcagctgctgccctggcagcagatggggccgggggggacccagggcccttgcagctgctgtccaggctccaggcctcaggcctcccgggcagcggggagctgacggtgggagcggcggtcgcatgcttcctggcgctggagggcgccgacgtgagctacgccaacc

SEQ ID NO: 8219 - DNA, 579 bp, Canis familiaris
ttccgccctgcctggggctcctcaacttggtggctgactttgcttcctgtcactaagccctggtcctacagccactgccacccccacagtccatccctgctgtgctgacctctgcggactgaggggcagagactgccatgggtgtggtgccacggggcagtcggcagaaggggagaccctggtttccaagccgtgtggacaggaagaaaagccagtggcagataccaggggtctaggagcgggagttgctgggtagctggcgctggctccagacccagtggggcccgccccctcactgccaagatgtctgtgactagcctaggggccaagctggagggggctctttggcaggcccaaacctgttctccagcgcagggagcaggggcagggcccatggagcctgagctgcagctctcggcgctcttaaaggacttggatggggcggggagtgcgctggagctgccccctgatgctctctgctttcccctctgtgttcttggcgtgtctgggctgtgcccggggcttctcaaataaagtcatgtgtggcaagcaaaaaaaaaaaaaaaaaaaaaaaaaaaa

SEQ ID NO: 8220 - DNA, 696 bp, Canis familiaris
tgtatgatcagaatgaagtatgagttctttcggttacaaccgtaaatagttacagatccatgataaaactttggatctttataaattaattttgtcaaaatgtggtcatgttaaagaaaactaaggacaagtacttcactctttttcatactattataagttattctggtattaaatatgtttaatacaattgatttttgttttgacatatttcagttagatgaatggatgctggttgttttttatttgaatgagtcataattcatttttgccattttttaaaaaagaatcagcaaatttgttctgtgttataaactatggatgataagtcaatataggagagctttcacatgatttttttaaataccaaagcttggaatctggcctataaacacatcaagaagattttgtaattaacacatccttggcaatatctccaattgcaattacttttaatttattttttcttttgctgctttaacattttctggaaattaaagtccctccatcctttaaaagagtcttgaacaatgctgagccagcagctaagaatctaactcataatttatgttgtagagaaatagaattacctctattctttgttttgccatatgtaatcattttaataaaattaataactgccaggagttcttgacagattgaaaataaaagttaatttctagacctcaaaaaaaa

SEQ ID NO: 8221 - DNA, 635 bp, Canis familiaris
gcttgctaagtaaaagtcattcccacatctgcatggtagcctccccattacaacatacctcagaaggtatttcaggtttggtttcagacatcgcaataaagcaagtatctcagtaaagtgagtcaagtgaatttttggtttcccggtgcatataaaagttatgtttacactatactggaatcggttaggtgtacaatacctatgatgcctataagaaagttaaagatagacttaaaaaaaacaacactgtattgctaagaaacactagccatcttccatactttctgtgggtgataattactgatcataacaaatatcataataacaaacagtgtgaaatattgcaagaattaccaaaatggcacacagagatgtaaagtgggaaatgcttctggaacaaatggcaccgatcagggtgcctgggtggctcagtggttgagcatctgcatttggttcaggttgtgatcctggggtcctgggatgagtcctgcatggggagcctgcttatccctctgcctgtgtctctgcctccctctatgtgtctctcatgagtaaataaaatctttttaaaaaagaaagaaaagaaagaaaaagaaaaatggccccaatcaacttccttggtgaagggttgctgt

SEQ ID NO: 8222 - DNA, 277 bp, Canis familiaris
  misc_feature (1)..(1): n comprises a, c, g, or t, or includes no nucleotide
ntacgagtgactactgagccaaccacccctcggcgcctcgggcggccccggccgcggaggtgacccactgggctgccttgcaccacgtggcttccgctgggctttactccagcagatcttgcctaccccctttctgcagccaggaaggaagagttaaacaatataaatgcctttgatatttcatgcaagtgcctaacatcgcatttcatttaaaaaatagaaataaaagcagtttgttaaaaaaaaaaaaaaaaaaaaaaaaaaaaaaaaaaaaaaa

SEQ ID NO: 8223 - DNA, 688 bp, Canis familiaris
ggtctaaacacccggtggttacctgaagtttttgttagaattggtacaacttgtcttagcacgagataatacattttcattactggagaatttaggagctatggatgagcaaagtgaaacctctcatgttcattttgagcctacagagtgacataaagagtaaatgggtcaaaacttgattcaaaaagctcttttcagagtgaatacgcaaggctaggacagacttagccagccttctatctcaacactgtccggtgaaaatcggcaatactgagacactgccggattctcaagtgcctttgggatcatcaaagataggttacataatctgaggtcttgagctggagttcagaatgtatcaaatccattgacagatcaacagtgctacactgaatatggctacacagttaaaggaaagacctcatttcccagttattctggatcagagagtttgcatatcactgtatgaagggagaaagggcgattgctggcagacatgtagttaaggtggcccaggaatcattctgtctggattaactgtcccagggaagtggcagggtgccatttctgtaccaagaggtgaatgtaatttgcatgttgaatgctgtaatcaagaacaaacaactcttgactctaccaattaaaacatcctgttttctctgcctgtaaaaaaaaaaaaaaaaaaaaa

SEQ ID NO: 8224 - DNA, 643 bp, Canis familiaris
gaaaagggatagagaatccccaagctgactcccctgttgagtaccagagatcatgacctgagccaaaatcaagagttggacatttaactgattgagccacctaggtgccctcatgatacaaggaatgcaatgtagggagtattaaagatagcccacctaattaaaaggatttgccaagccaaataataatacaacatattcaacgttttgttaaactataggtgtctacattgcattgttcagagtttctcttcagggccctcagattcttcatactagcaaaacaacagagctaaaagcttttgacttagtagtaatatatttcccctatttcttagaagatacactagaaaaactaccaggaaatacattagaagactatacagtggaaatgaaaattatgtaggggaaaacatcgcaaaggagaaaatatcaggacacctgggtggctcaggggttgagcgtctgtctgcctgtggctcagggcatgatcctggagacccgggatcgagtcccacattgggctccctgcgaggagcctgcttctccctctgcctgcatttctgcctcttctctctctgtgtctctcatgaataaataaataaaatgttaaaaaaaaaaaaaaaaaaaaaaaaaaaaaaaa

SEQ ID NO: 8225 - DNA, 495 bp, Canis familiaris
gcccaccggggtcgccaggagggcccaccctgtcctgtcggcgcaccgccacataggagtgcatccgctttcctcctgggaacggggcgaagacctctgcctcagtggtggtctgggcttggtttgtattctcatgcttttggaaggtgcgaggggagggaagggccgggatgtggaacctgtccgtgcccgtcagagccggtggcgacagcggccctctccaggcccggagccaaggcagcagcaccgcggcccccgagccagaagctgcaggcccaccagtgctggcgtcagatgttgagggtgttgtgtaaacagttggctgttttcgtgattcaagaacgttcaggattaaaagcagacacaaaattgtgctacttgaagttgaatctttttatgagacaaactgaatctgcgatctcaaattgcctctgaccttttataagaccgtgtatcttcaaataaatttattttgcaataaaaaaaaaaaaaaaa

SEQ ID NO: 8226 - DNA, 678 bp, Canis familiaris
cacagagagagagagagagagagagagaggcagagacatagcaagagggagaagcaggctccaatgcaccgggagcccgacgtgggattcaatcccaggtctccaggatcgcgccctgggccaaaggcaggcgccaaaccggtgccacccagggatccctcaaaccctgagttaatgctgcatgctttagttccgtcttccctttcagtattataagaaccttaaagtcacgtttgtgatctttctttggatatttatactttagatagtacctttaagtagcagtgtgggacgaggcttgtacatgttttgtctaatgttccatcgtcaccttttgtgcatttgtcactcttctaaatctaactttgcacaagtaacccatgtaaaaaaatgtacatttttcaaaacttgtaaataaaaataaccttaaaattttgtagtcaaggtatattttagctcactatgaacttttagtattaacttattggaatctcatatctactcactttcccccttgaaataaacatggtaaaagaaaatacacactctgggagaggaaaaaaaggagtagatactgttggagaggaccttcttgttataagtgttcatgctttgttctttttttaacgttttaacaagaatgtaaaactgttaaataaaacaaagttccttcaaaaa

SEQ ID NO: 8227 - DNA, 598 bp, Canis familiaris
tatcgaggcggggtcgtactccttgagagcagttcagatgatgatcaagcctattgactgaagagagacagtctgcaactcaaatgacatagaactccgtatttttcagttcctaagaaatgtaaatgttacatgtatattgttttgcacaactcatttctacagatacagtttttaaagtaattttaccgtaactgtacaaggagatttatgaatgcagtttcgtctttcctcagtatactgcagaagattatttgtgcccataaccttagctattttaaaaattatattgagtaaatacgggcaaagtttgttttataaaatgtaaatatttgccacaatatgtaacaaatcttagctttattttaaatcaaaattgaatacatgttcaagaacaatttatttaaaactttatgagattgctctaacttccaacagaaaaataattttaagatttcaagccaagtaatacattttatttataaaaatatagacaggaaattagagaaaactctagttttgccaatagaaaacacattttgcatagaataaaaattatttcaagttgaaaaaaaaaaaaaaaaaaaaaaaaaaaaaa

SEQ ID NO: 8228 - DNA, 568 bp, Canis familiaris
accagcaatcgcaacaccagcaccacctttctagtagtcaactgggccgttattttccctggcgttgtgaaagagaaatgggaatagtgcccttgctgatcgatccgcaaacactgcgaggagtttaacactcagtggtgacaagagcctcgagctgcgacaatatttatcaatccgcaccattacgtgtgccaccaccgacaatgccttgaaatggaattcgacctcaaaccacgtgaatgaacaactcagtcctccttggcagaagattgtggagtttccatctactgagcggaaatattctgcagaacttgtcaaatctttgaaacttggaatatattgctttcatcatatgaagtttattgcctattctgaagtgtcaaatttttcaagtttgtaagtttattaagtggttttaacattgggtgttttttgttgtttgttttgactctgaaaagaccatttaagggaaagctgaattctattaaaacatttgaggcgtgtttgtacgcaaaaaaaaaaaaaaaaaaaaaaaaaaaaaaaaaaaaaaaaaaaaaaaaaaaaaaaa

SEQ ID NO: 8229 - DNA, 591 bp, Canis familiaris
ggagccgcgccccttgggtgtccttagatgggtagctgtgcagactgagtgtggcccggcgatgtctcctccccctgtaggctccgcggccatgaaggtgaagatcaagtgctggaacggcgtggctacttggctctgggtggccaacgacgagaactgtggcatctgccggatggcctttaatggctgctgcccagactgcaaggtgccgggcgatgactgccccctggtgtggggccagtgctcccactgcttccacatgcactgcatcctcaagtggctcaacgcgcagcaggtgcagcagcactgtcccatagtgccgccaggagtggaagttcaaggagtgaggccaccctgtgccagcacccgccccacccccgctgccccgccaccctcttccctggcgacagcccctccggtggcagtggggacaacacttgaaacaaggactggagctgtatttgtttttcttcagattgtgacacttttatccaataagtaaaactcattaaattgtttgaaccttgaaaaaaaaaaaaaaaaaaaaaaaaaaaaaaaaaaaaaaaaaaaaaaaaaaaaaaaaaaaaaaaa

SEQ ID NO: 8230 - DNA, 584 bp, Canis familiaris
tacaggtcaaggccgcttgctgacccactgatgctggatggtttgagctcttatttccgtgcaagcttccagtcaaaacacttttcttgctttgagccaccatatcacaatgaattaaaacctttatcccctgccttcacaacattatatactttttttggagaggattcttaatgttataaagcagcctcaaattaagtgagattttatcgcttagccaccttccacttgttgacagggtacattcatctgcattgttaacagttttgtctctttgccagtatgattttctgaatatttgccttactgccagaaatgtttacaaaccttctgcagcggtcttaaaaggaatatttcaagaatttaaatgtgatgatatttatcactaatgtggaaatatcacgattcttacccactgtcttatccttctacttcaatttcgtatctagaaccctctgaacgatgttgtctggtggacattgtggtgttgacagctgtgggacattctgacttaatggaagtgaatcctcttccccccaaaaaggaaacaataattctcatattggtcctttaaaaaaaaaaaa

SEQ ID NO: 8231 - DNA, 435 bp, Canis familiaris
ctggtttactgtaaacactttttaattggtgttacctcaggatgctgtgcagagtaaatgggtgataggatatactgtctagatgtagccccacttaggacggccctcccatacttccatgtgccccttcccacccacgccatggtgacgatgacacacatcctggtggcatagcgtgtgttggtttagcgttgtctgcgttgtactagagcgaaaatgggtgtcaggcttgtcaccattcacacagaaattaaaaaaaaaatagataaaataaataaagagataaaacctttaccaagggagcatctttggactctctgtttttaaaacctcctgaaccatgacttggagccagcagattaggctgtggctgtggacttctagcacaaccatctaacattgctgatcaagaaattacaatatacgtccattcca

SEQ ID NO: 8232 - DNA, 583 bp, Canis familiaris
agctggatggccattggcactaagcgctttgacagtgagaaggccggagatcgggaggtgcagaggacaatgttggagcttctgaaccagctggatgggttccaacccgacactcaagtaaaggtcattgcagccaccaacagggtggacatcctcgaccctgcactgctccgctcaggccgtctggaccggaagattgaattcccaatgcccaacgaggaggcccgggccagaatcatgcagatccactcccgcaagatgaatgtcagtcctgatgtgaactatgaggagctggcccgctgtacggatgacttcaatggggcccagtgcaaggccgtgtgtgtggaggcgggcatgatcgcgctgcgcaggggtgccacggagctcacgcatgaggactacatggaaggcatcctagaggtgcaggccaagaagaaagccaacctgcagtactacgcctaggaggttgctcgccacacctgctccctggtctggtgctggttaaaattcaaaataaaagatggtttcaggtccctgcaaaaaaaaaaaaaaaaaaaaaaaaaaaaaaaaaaaaaaaaaaaaa

SEQ ID NO: 8233 - DNA, 647 bp, Canis familiaris
tggggaaagaggagacaggcgggtgccacgtcccagcagccgccttgctgggcaagggtccgcagcccaccctggcattgcttgtagggactgagttaccggcctcccgggttgaagatttctcccctccctcacgtgattcgggccccgtttctctcttctccgatctgcgtcctcccggagtgggagcagtcaggcgacgggagcgatgcgcttcgcctggaccgcgcttctgctcgggccgctgcagctctgcgcgctcctgcgctgcgccccgccggcagccggccaacagcagccccctcgccagccgcccgcggctccggccgcctggcgccagaggatccaatgggagaacaacgggcaggtgttcagcctgctgagcctgggctcgcagtaccagccgcagcgccgacgggacccgggcaccatcgccccgggcgctgccaacgccgcagccccgcagccgcgcacgccgatcctgctgctccgcaaccgcacggcggcagcgcgggagcgggccgcaggcacggcggggggcgccggccgacccagacccgccgcccgccactggttccaggctggctactcggcgtccggggcccgcgacgccaaccagaccgcgccgggagagcgcccggcgctca

SEQ ID NO: 8234 - DNA, 581 bp, Canis familiaris
cagaggcagagggagaagcaggctccgtgcaaggagcctgatgcgggactcaatcccaggacactctgggatcacaccctgagctgaaggcagacgctcaaccactgagccacccaggcatcccaataaataattaaatgacatgtgaaaataaagtattacactaattttccctgtgcctttgccaagaatttcagaagaaaagtttcagattatttgaaggctattgtcaaccactgagccaccctggcatcccttcacatgtcatattttttttttcacatgtcatttttgattgaaaaataggattatttaccaggttgaatctgagtcaattttggatattaaacaaaacaaagtccacactaaagaaataaggatatgccactaataagaacattaagaaattgtacaataggctctgaaggcagttctcagaaaaggaattctgaattgttttgagcagtgtgggtgtagcactgtatgagtggggtaatatagccagtcttctgaggtatttgctctgaagggagcaaaacttgtttgaattcttgtagttggactttaaaaaaaaaaaaaaa

SEQ ID NO: 8235 - DNA, 550 bp, Canis familiaris
gtatttataagagtctacagcacgtttttatttagtgaattggtggaaatgagatcgtatagaacacagatttccttttggacatctagggactacttcctggaatgctcctgtattataacttaaattatattagtctaaaaatgttcataattacacttactgacctgttatatttgtttcctgcatgtttacactgaagtttttcttgttttattcctatatacccatatgtatatgtctcccacagaaataatgttcatgatgaaatccaggcaggagtactaaaattatttagtgatgtacatttagccatcctaattattttatgtataaaatgatttctcattttgttagttgtaactgttggctattttgcttcaccttttgtatagacccagaaaatgtacattttcctcacagagcttatatgtaatagtaatcctctcaaattttataggaaaaacccaacatgtttgagactttaaaaataagcgtattcatctataaattgcctttttaaaaaataaaaaaaaaaaaaaaaaaaaaa

SEQ ID NO: 8236 - DNA, 571 bp, Canis familiaris
atttgctggtgttttcttcatgccctttacttacctgtcttttacccccagtgaatacccgattggcaccagagatggtcaaagtaaatcttttttgtcttgttctttaaaagtaataccatagaaactgaccattgataaaagtcagtggccatcagacgaaaatgtccttccgtttatttttgcagggttttgctcacctctaccgtaatgataatgctgatgttaaagaccctaataaccaatagaaagcatatttcttggccttggtctatgggatgtcagcaaggcctctatcacagtccgcacatataaatggtggtgaaataaaggaataatctacaatattcttacttgaaatgtaaataagttatttctttgactgaatttggaacgctagtatacatcccacattaagctgttgaacacagggtaatcatagttcctctgccaagtctggaaagaccatctcatgactaccactgcgatgggctgctgactatatttgtgcatttccttttatatttacttttgttcttgctggaggcccagtgtaccccagagcagatgt

SEQ ID NO: 8237 - DNA, 600 bp, Canis familiaris
gtgcaacaagtttgtgatggaatggtatattgtattttcttaaattgtcatcgaccctgatattgtactcccctttcctcctatatttggttgaaacttgtaggctgatttccttttacctacagcattcctctaaaatttgatgacatgactcctctttccctctgcccaatgacctcatccttcactaaagcttgttactttggcacatttccttagggccccaaacaaatgtataccagtctagttgttgttttatattgactttatacataccattgacttggcgtataatagttttatgatttttagctacttaggtaggccatttggttatcctttgtgacagaataatgtgaagctaaagttattactcagctctgaatggaaataaaattaactgcctctgttttattatgtgttcaaaatagatattgaaagtactcgggcattgaatttggggttaagttgctttaatctatatgtttatagaaaggaaagcaaagatggatagaaagaaatattaagatgttcttaaatactctgtattgctaccatttggaatttgcccaataacgggctctaaaaataaaattttta

SEQ ID NO: 8238 - DNA, 600 bp, Canis familiaris
ccttgtatgagaaaggccggaacccagtacacagagagcattttccctggccaaagtcagtgtctatggcacactctgagctgtacacctgccaccaaagtgggaggcctggacattgtcctcaggacctgggcccatggaggatctgctagagatccctaaaagacagttccatcttccttgagactctagcctcttgcaaagccagtttctctttcactctgttaggactgcaactctggcttcctgcacacaggaagtcctgccctcactctagagtgcttccctgcacatcattgctggctctggccccctaccccttctgccttcctggggtgatgattggtcctttgtttaggcagggctaggcagccctgtagaattgaataaatgtgaactcagggagttggagaaggctgagcttcctctccagggtaagatactagctatggagcgggttggtgaaagtcctggaagggcaatatttggattcagggtaaagaactaggtgcaccacccaccttgactatttataaatcgaaatatttgtaacttaaacatttttaatgaaggaggaggagcatttgtaaaaaaaaaaaa

SEQ ID NO: 8239 - DNA, 614 bp, Canis familiaris
gcccacattaccacctacacaggggttttaacaatcaaaagtgtaccatctcaaggttttaaactgaatgtatgggacattggtggacagagtaaatcagaccatactggagaaattattttgaaaatactgatattctcatatatgtcattgacagtgcagacagaaaaagatttgaagagacgggtcaggaactagctgaattactggaggaagaaaaactaagttgtgtgccagtgctcatctttgctaacaagcaggatttgctcacggcagcccctgcctctgaaattgcagaaggactgaacctgcacaccatccgcgaccgtgtctggcagatccagtcctgctcagctctcacaggagagggcgttcaggtggaccagaagtccacaccatccttaacacccagttcttggatacctgctcctgcatgtcattctctacctgcaattatgagatgtggacggtgccaccactaacaccccattctacgagctgttgaaaactatgccacacaccatcccatacatttccctcttcttgcctcaatgcaaataaagaaaaataatctacggccaaaaaaaaaaaaaaaaaaaaaaaaaaaaaaaaaa

SEQ ID NO: 8240 - DNA, 594 bp, Canis familiaris
cacacggaaacagctatgaccattaggcctatttaggtgacactatagcacaagtttgtacctcaaagcaggctggtaccggtccggaattcccgggatcgggcccagattcggatcaggccagggacaggctcgctcgggccccggccccatcactcccgggccccccggggccgctgagcatcccccagagccggagacacccggggacgtccgggtcgggcggcgccgcgaggcagtcccaggggcccggccccggccccggcccgctcgcgggagccctcgccctcctccctccgcccctcgcacccccccacccaccccaaaggttttgttttgtactcttttaattttgtgccacgtggctacattagttgatgtttatggagttcattggtcaatatttgacccattcttatttcaatttctccttttaaatatgtagatgagagaaagaacctcatgattctaccaaaatttttatcaacagctgtttaaagtctttgtagcgtttaaaaaatatatatatatacataactgttatgtagttcggatagcttagttttaaaagactgattaaaaacacaaaaagga

SEQ ID NO: 8241 - DNA, 571 bp, Canis familiaris
cactgtgctaggcccaccagctgagtgtttgttggggggtctctgcaccccatcggtgcctcccccacccaactccattcaccggtgcctttaggggagctgtatggagttgggacccttcttgtgggttttgggggtctccaggaagcctggccaagctgtcccccctccactgtgccaacccacccctgtggactccgtcccccgcctcaccccctgctgttctgggggcagctcccaagacctcctgccttccagctctgacttctgtgtctggaaccccttccccaaatgctgagtctggagatctaggccttgggctctgcccacggcctaactgttaaggggacccacgtaccagtgccaagggggatgtcaaacggagatctccttgcccctccacctccgagaactgggggcgggcgggaggacaaggttggccggaatcggtgaccttcccttgaagtgccttctctgtgactgagtgccccacggtatgacgggaactaaagagaaagccagaacccccaaaaaaaaaaaaaaaaaaaaaaaaaaaaaaaaaaaaaaaaaa

SEQ ID NO: 8242 - DNA, 633 bp, Canis familiaris
tctttgggggtgaagccgtgacaccttggaaacatcatgaacatgctcgagtcctgaacattgatgctgccattctgtgtgtctgcacctggcaccatgagagaatctcttgcccatgacatccgtctatggggcacaggagaccagtagtccagcagcctttgctgctgctgtagatacctacagccttcactgctaacaaaccccagtgctgacttgctgactttagctgatggagctcctgaagtccacaccttgctgcccctcacagagatggagctgccacacttgacctaactagctccttcatacccacccttaggtgaaagtctttcttcactgaatccagtctgtagagtttaaaataagtgaatgatcctaacaaaggacatcaacacaaaactaaaggaaataaaagccaagcaaacattatactaccaaaggaaaagaataaatttacagtaatctaccccaaagatatggagatccacaaattggctgggaaagaactaacagtaattgttttaaggaagatcagtaagctacaaaaaaacagaccactagctcagtaaaaccaggaaaacatttcatgaacaaatgagaagttcaacaaagagatagaaatcaaaaaaa

SEQ ID NO: 8243 - DNA, 592 bp, Canis familiaris
cctggcccgctactccgttttctcctgtcccccactccccaccccccagatgaggaactgagttcagaaagattaactcataggcttcaggacttcttaaactctacacctatagtactaaatcccatcatgaaatgagcagaagatatgaacagaaatttctccaaagaagacatacacgtcaagcacatgagaaaatgctccgcatcacttgccatcagggaaatacatatcaaaaccacgatgagaaaccacctcacaccagtgagaatggcgaaaattaacaggacaggaaacaacaaatgttgaagaggatgtggacaaaggggaaccctcttgcactgttggtgggaatgcaaactgatacagccactctggaaaactgtgtggaggttcctcaagaagttaaaaatagggatgccagggtggctcagcagttgatcatctgcctttggcccaggccatgatcctggagtcttgggattgagtccccatcaggctctctgcatggagcctgcttctgtctctgcctatgtctctgcctctgtctgtgtctctcctgaataaataaataaaatcttaaaaaaaaaaa

SEQ ID NO: 8244 - DNA, 573 bp, Canis familiaris
ttagaggtgtctgattcatttatctctccacgtatgcatcttagcagaaagaccacagtcctaaacaccaggaaaattaagaatgaagctaaactacccttccattgggaagcccaggatttaatgctaggcaccacgtaagaaaattagcttctgattcattaaattggctatatgacttctaatattttggataaattaattcactccagaattccagaaaagaatgagtaattaaagttccactatacctggataagtgtgtgtaaaaccagatcccttatattgtgaaagtacagtctgtaactgataaaactttatgattttttttccctattatgcccccacatatcaagatttgggcactttattttagaagaaaatatatatcttttacatatgtgtgtatttataaatgcactagatatatgtataaaaatttgtaagagctggaggctttaattcaccagtgcatttggacaacttggtgtaactattttatgtgatcccaataaaaagcataattttccaaaaaaaaaaaaaaaaaaaaaaaaaaaaaaaaaaaaaaaaaaa

SEQ ID NO: 8245 - DNA, 413 bp, Canis familiaris
aaatcatcacacacatcacacacacacacacacactctgaagttctgctggaatacgaactgtggtatcccaggaagacatgtcctccctgtagatgtacagggaacctactttctcttctgtatcctgtattagattctatttgtttcccctccaatgaaatgtgataaatggtaggcccagttctgtaaatcgatatcgtacctaattatcagtggttaatattttttttctatatattatgacatacatcatttatttaacctaagtggcgcttgataaacatggggactttggcattgcctgtagaggtttttggatactcttgtagctccttcaaaggaatgttgtgtctgtcaaactttagcaaaggcagtttaatctttgtcaatatgtagggtcaattctattag

SEQ ID NO: 8246 - DNA, 628 bp, Canis familiaris
gatcagtcctggtctctgaggcattaaacatctaataacagtgaagtggcagcacagcccttggtatctaaggagttggcaagcttaacaaacccagttttcaatagatttccatccttctacatttgttgataccactaatgaaatgctttgtaatagacttggctaattatgcaaatgatggtttgtaataattggtccagttttacaaacaacagatttttagattagggaggttaataagggagatgcctactgtgcctcttgcgtgtgctgggtgctctttgaaagcatcagcaaaaactacaaagcaagtaagatctgagcctcaacagattgcctggttctcattctcccagctttctttttaatagaaatgttatagttcataatgaatgtattgcattaaaactttatggctttattattgtaaaacagattcaagatacagtaagagtatcttcacagagatttgcattaatgaagactacacagaaaaccttcaggaggatttgtgtggatctgatatttagcaaaattttgtgtttcacactcttacagaaaaatcagaaataatcatttgtttaagaccaaaatataaataaagtttaaaaaaaaatcaaaaaaa

SEQ ID NO: 8247 - DNA, 582 bp, Canis familiaris
ggcctatgtaggtgacactatagaacaagtttgtacaaaaagcaggctggtaccggtccggaattcccgggatgcttggctcgggctggaggattgactcttgagtgttcgtgagaggtcagattgctgtcagacatggcccatggacatggccatgatcatggccatagtaaactggaacttccagattataaacaatggaagatagaagggacaccgttagaaactgtccaggagaagctggctgcacgagggctaagggatccatgggcccgcaatgaagcttggagatatgcaggtggatttgcaaacaatgtttcctttgttggtgcgttattaaaaggattcaaatggggatttgctgcatttgtggtagctgtaggggctgaatatttcctggagtccaagaataaagataagaagcatcactgaagataataccctggaagtatcttaaaggcttcttaattctcttctaaaaataagatttcttcaatgtagcctactcgtctgtgtttttcctgtaaaaaatactattaagatttaataaagtaataatacatgtgtcaaaaaacacataaa

SEQ ID NO: 8248 - DNA, 409 bp, Canis familiaris
ggggcgggagctggggacctcgaggctgaacgctgacagggaccccagggaggggacctcgggcatcgcgggggttccagagccccccaccaaaggtcctgggcccgggcctccccaggggctgtgggtgagcgcagcaccccgctgtctgtgcagaaagcacagctgccaaagcttctttttaagaatgaggagtggggctccggttgctgcaggacgcagctcaccaatgagctgtttttacaaatgacgtggacggcgttcaggggcgacttaaagttgtcacttgacgagcagaccatgggggcagcagctcgactggttggttggtttcctccactgtgagtcaaagagaagcactgaaaatgttatgaccagagggtttcaggaggagaacgaagccaaacaa

SEQ ID NO: 8249 - DNA, 614 bp, Canis familiaris
  misc_feature (17)..(17): n comprises a, c, g, or t, or includes no nucleotide
gcctagattttgcaagngacaagttcactgactaggtaagcacttacattttaaaattcagcattagtgcattgggaaggaactttactgcttttgtgcttggcatgtcattattttccacttgtgacatagggcctttcccaaatgaatgtgaggaattgctttcacttcaagactttccttcttttcagtaaactctaggaggtgttatggggggagggaagggaaccgaatccttgaaactttttatttggctcatgccatgttatgatcatgtaccttttaaataaggggaaatagtatctttaaagttaatgtctagcccagagtttagttaacgaagaattaaactgcactgttgatcggtgctttgtgtaaatacatcttaacgttttggttgagaggggccttaagaaggacagttcattgtaggaaagccattctgtacatgagtttaagcatacttgttgcattgtctctgcagattctatttttgtttaccaatattaaaatgtatgttagccaaaatgggtggattttcaaataaaatgcagcttcccaccaaaaaaaaaaaaaaaaaaaaaaaaaaaaaaaaaaaaaaaaaaaaaaaaaaa

SEQ ID NO: 8250 - DNA, 666 bp, Canis familiaris
caatccaggggaagtccgcgacaacctacctggaaacacagtgttggggcaatacaggcgtcatcccgcagcgtccacacgggaggccatgtgctcctgttatactctcaagtaccgttgagaaggttgtcagcatctcccagtgagcaccctgggagcccatcacccccgtcctagatctaacaaggtgaaaggtgatcctgggtgaggatcgggaagccaccacggggtcctgttgagcatcgatggtgaggatggcatcgtacgcatggaccttgacgagcagctcaagatcctcaacctccgcttcctggggaagctcctggaggcctgaggaacgcagggcgggtggacttggcagattatctggcagatagagagtggagtgtctgtccctccttcgttccatggcccttggctcttgacacagggtctggggtccagaccagggctaatctggtctttaggatttcttttattttccttttgagttcctatcttcctccctgatgttcatgggaatcagaatagagtctggggggagggtccccaccttcttgtaccctcccttccccagcttgcttttgtgtttcggtctttcaataaaaagctgtttggtcagaaaaaaaaaaaaaaaaaaaaaaaaaaaaaaaaaaaaaaaaaaaa

SEQ ID NO: 8251 - DNA, 559 bp, Canis familiaris
ccgcccccatcctgcccccagaagaggggccggcagaggggtcactgcagactgtagctgaggaggagactgctcgcccagtgccgagctggaaacaccacctccagccagtgctgacagtaaacccgctgaggaaaaaacagcagagatcggtgacaaaaaagcagaatttcctagtagtggcagcaattccgtgctcaatacccctcctactacacccgaatcgccttcttcggtcactgtaacagaagccggtcagcagcagtcttctgtgacagtgtcagaaccgctggctccaaaccaagaggaggttcgaagtatcaagagtgaaacggatagcacaattgaggtggatagtgtcgcaggggagctccaagacctccagtcagaagggaacagctcaccagcaggctttgacgcaagtgtgagctccagcagtagtaatcagccagaaccagaacatcctgacaagcctgtacaggtcagaaaagagggaaagaatctcagggagggaggaagttcatcaaaaaagcagaaacgaagccataaagcaacagtg

SEQ ID NO: 8252 - DNA, 590 bp, Canis familiaris
ttcacttacatccaagagaaccatccagttgtagtaaaatacctgaacattggatagggccaagtctccaagcagatctaagactccttccttcctattggcccttcgaccccagacctgctgatagaccagctgggtacttaccagtgtcctccttggctttccaaaccccacctaccatcctctggccttcatggacctacctggccctatccccaggacacccatgccatgagcttgaagtacagcttttggtgcaccaacgctttaggttttcacagctgctggcccgtactcacaacctgctcttaggaataaacacttcgaaaacagcccatcttcagtttacttgtaaggatagggaatgagtagtgtgcacaaagaggaagagcagatgccttccttcccctgtgaggtctttagacttggaagtactgtagaggaccaagcggctgtcagtctctcatccctttggcagtctgacagggggtctcagccctaatctcttcatcaaacagagtggacctgaggtgggtgaacaagtcaggcttaagaaaaggctgaggtctccaaattcccagaagaccaag

SEQ ID NO: 8253 - DNA, 341 bp, Canis familiaris
aaaattgacttgactcttccttaatggacttttgtataagggactgttcactgctgtattggtttgcaaatctcttgaatttagctcttttctagctaattatattgtaatcatttatattttatattgctaaatagcagagaaccacactttatataaagcagtttttgcatttgtttgttgaatgatgcatcatcttctgtaaaatatttatatgcctaaatggtaaaggaaagagataatatatatttttatgtttctgagcaatattttttaatgtatacctgtcttgtggaagaatatgcaggtaaataagaccatgatttgtaaagtgcaaaaaa

SEQ ID NO: 8254 - DNA, 556 bp, Canis familiaris
gagggaaatacaaaaaatctttaaaaaatttaaaatcagaaaaattcaccacatagatgaattacagtaaacgatttgcttttggtgggaatgaatgtcagaagcacattggagttagaaacaacagggtgccaaggggtaatgatgatatttatttcccacgagtcctggacaaacctctatcatatttagccattgggttttctcacaggcagaattggagtatcagaggcagtagtgcaggggatattgaggccctgagttttgtaatcgattcaggcttgatgccttgaagggtttttaatctatctataggggaggttttgatgggaggtgtactgtggatactgccagtaccagttgaagattttgctcataaagaggaaagtagggacacctgggtggctcagcggttgagggtctgccttctgctcagggcgtgatcctggagtcccaggatcaagtcccatatcaggctccttgcatggagcctgcttctcctgtctctgcccctctctctgtgtctctcataaataagtaaataaaatcttaaaaa

SEQ ID NO: 8255 - DNA, 575 bp, Canis familiaris
  misc_feature (1)..(1): n comprises a, c, g, or t, or includes no nucleotide
nagttggggttacaagtcaagtaactttttttcttcaatttcaggacatttacattcccccctgtgagctatgagattgcctggatggaagattgcctaatactacttacgatagaccctaaattccatcagtaatagtctgattcaatcaagacatttgtgtaggtccaccttttgtcccattggtgttaatcattgaaacccctgtatcactgtgaaacactggaagagctaataaattataaatgaagcaataccgtgttcctcttgacttttatttttcagaatagccctgtaaatttgctattttaatgtagtgttataaagtgacccctctgaatttgcttattgatgtagcgtgatagaaaattgacccttctgggatccctgggtggcgcagcggtttggcgcctgcctttggcccagggcgcgatcctggagaccccggatcgaatcccacgtcaggctcccggtgcatggagcctgcttctccctctgcctatgtctctgcctctctctctctctctctctctctatgtgactatcataaataaataaaattaaaaaaaaaaaaa

SEQ ID NO: 8256 - DNA, 537 bp, Canis familiaris
  misc_feature (1)..(1): n comprises a, c, g, or t, or includes no nucleotide
nttcttgacggcctgaagctccctgaacgacagctgtgggaccgggactcggccagaggtccagcagtggtatcagcagttcctctatatgggtttcgacgtaagcgaaatttgaagatgacatcacttactggctgaacagagatcgaaatgggcacgactatgattactacccagcgtcactatgacgaggacccgccatcggtccccagagcccctacagcttcaggcacggagccagcgtctactacgatgactactgaccaaccacccctcggccctcggcgccccggccgcggaggtgacccactgggctgccttgcaccacgtggcttccgctgggctttactccacgcagatcttgcctaccccctttctgcagccaaggaaggaagagttaaaccatataaatgcctttgatatttcatgccagtgcctaacatcgcatttcatttaaaaaatagaaataaaagccgtttgttaaaaaaaaaaaaaaaaaaaaaaaaaaaaaaaaaaaaaaaaaaaaaaaaaaaaaaa

SEQ ID NO: 8257 - DNA, 516 bp, Canis familiaris
  misc_feature (271)..(271): n comprises a, c, g, or t, or includes no nucleotide
acaccacacacacaccacaccggcagagagtagggttttaatctgtcttcttgggttcggtcaaaagcatgaactggttcttgaccgcccttgcatgtcataaccccactaggaaccactgaaactggctattgacgaccgggtccagggctataccccacacggtgaagtccctgtcggccaataaaagaaggaaccaattacggacacatgctgcatcctgggcagacttcaacaatgttgtgctaaatgaaagaagccagacacacancaccatacttttgtatgagtccgtatgtacacgtgaaatgtcctggaaaagcaaatttatatagagagaaggtcggttagtggtggccgcgggggcgggggcgggaacgcggatccaaccgcaggtgggcctcagggatctccctgcagggaccagcattgcctaaaactgactgatgagaaaaagaataaataaataaaccaaataaataaataaaaaaaaaaaaaaaaaaaaaaaaaaaaaaa

SEQ ID NO: 8258 - DNA, 440 bp, Canis familiaris
tcagcatgttgccccagcactggagaagccattcttgcggaggcagtcttatcacactgtcagagactgggacttggctgggtaccgacgtgctgtgccattctgcagatgcagccatatcacgagcgtgttaaataatgaccgacacgttggttgaaacgaagttttcagtaaggaagtgacagtccgatgtgggtaattatggccataactttagttcccagcctgaacctgcctctgctggagccatttcaacaaggtgttctcagaaccaagaagagacactggtttggtaccatttcccatcagcagcaggtgtctgaacaaaacatcaatgtgaataagggcccagtgcagtcctttgtatcttgattaaattacttgatattaaataaaaggtctgagtgctattggtttaaaaaaaaaaaaaaaaaaaaaaa

SEQ ID NO: 8259 - DNA, 446 bp, Canis familiaris
ggccttgcatcttaagaagatgaatgtctatcacacgtggagtcacctataagaagagtaaatggtgacaacacaggtggtttctcgatattactcaccgccagattatccagggcagctagaaacaactaggtggataatacctaactcagcttaatgttttgccacttgaagtttggcacaactagtatctgctgtaaaaacaaacccatatggtatgtgtacactagtattcctgagcaaaacatgcctttcatgtattttttaaaaatttgcatttgttttgaaattagcctataaaataccacccttggatgtagatctatagagaaagaaaatgtgttggatatattttccagtgaaatattatccttgttttatttaaataaaatgttcttcattttgctttatagtatattgcccgtaattaaaaatttgtattatag

SEQ ID NO: 8260 - DNA, 588 bp, Canis familiaris
ctcccggtgcctaaatgtgtggtgctcctcacgggcttcacatataatcactcaacctgggttttcatttgttcaccaagagatgcagcgggcagcagctccaggggctgcgggtgcgggtccactgatgtctgtgtccaccaagaagacacagtgttcctgaacttggaaaatgcacatctcagaactgggggccaagttctgagcaacggatctgcaggacgaggctgtgaggggccactcaggatgcagatgctggattacagtgaggtcttggggtgcccggctggcggggttggtggaacacgtgactttggatctcacggctgtgagttcaagccccacattaggtgtagagatcacttaagaataaaatctttttaagggagagtaaagaataaaattagggggcgcctgggaggcccagttggtgaagcatgtgccttcagctcaggtcctgatctcggggtcctgggattgagccccatgtgggctctgtgctcagcggggcgtctgcttctctctctgtccccactcccaccctctctgtcccagataaataaataaaatctttttaaataaaaaaaa

SEQ ID NO: 8261 - DNA, 628 bp, Canis familiaris
gactccgtctgtttaattacaccagcatcgcgaaggcccgcggcgggtgtgacgcgatgtgatttctgcccagtgctctgaatgtcaaagtgaagaaattcaatgaagcgtcgggtaaacggcgggagtaactatgactctcttaaggtagccaatgcctcgtcatctaattagtgacgcgcatgaatggatgaacgagattcccactgtccctacctactatccagcgaaaccacagccaagggaacgggcttggcggaatcagcggggaaagaagaccctgttgagcttgactctagtctggcacggtgaagagacatgagaggtgtagaataagtgggaggcccccggcgcccctccgtccccgcgagggggcggggcgggtccgccggccttgcgggccgccggtgaaataccactactcttatcgttttttcactgacccggtgagcgcgggggggcgagccccgaggggctctcgcttctggcgccaagcgcccggccgcgccggccgggcgcgacccgctccggggacagtgccaggtggggagtttgactggggcggtacacctgtcaaacggtaacgcaggtgtcctaaggcgagctcagggaggacagaaacctcccg

SEQ ID NO: 8262 - DNA, 648 bp, Canis familiaris
aggcatcccttggaatattttggtcttaactgttttttatcacttctgtagggaagaggctttgtgaccagtactaatcttgagtacattttttttttttttctgtccacacagtaaattaatgtctgcttttaaatgtcattgatctacttacactttcttgggggaaaaaaaatcacaatgtcccattttagcacgatgttgcatgtaaattgttagcacagtaatgactaccactcagatgattaagaatttttgtaacagaaagctctgctatgttttaatttttatataccattatgatgattagcaccttgtaagaatataaacctttgctttttaaagtttatttttactatttctttatccctgtttatggtatcagccttggtttcataatgtaaatactatatattgaaccaattaaaatgtccaattttttattaccatagttcatgttaatagtggggctttcaggtgtttagagatttttttggttaacattcaatgcagaagtactagatggtgttataactttagaattgaattttaagggattccctaatatgtatactatctttttatctgaagtaataaataaactatgatcttgaaagtgcctgaaaaaaaaaaaaaaaaaaaaaaaaa

SEQ ID NO: 8263 - DNA, 590 bp, Canis familiaris
gtccaactagatctgtaatccctcaatgtgcaaacttcgtgcagttaagtcatatgtcactggttattcgttagcggttcttattcgacccccactgaagtttatataggtgcacacagcttctaataattgcccatggtttagacatcctcaatactattctgcttagccaactccacattacgacgaatccatagccgtactataattctcgcacgaggacttcaaactctccttcccctaatagcagcctgatgatctattagcaagcctcactaatctggctctccctccaacaattaatcttatcggagaactatttgtagtgatatcctcattctcatgatccaacattactattatcctaataggaattaacattatcatcaccgccctatactcactttatatattaatcaccacacaacgtggtaaatattcccaccatatcaaaaatatcaaaccatcattcacaccgagaaaatgccctaatgaccttgcacctactgcccctactcctcctatcccttaaccctaaaattattctcggtcccatctactaaaaaaaaaaaaaaaaaaaaaaaaaaaaa

SEQ ID NO: 8264 - DNA, 569 bp, Canis familiaris
  misc_feature (1)..(1): n comprises a, c, g, or t, or includes no nucleotide
ncccataggtctctagcctgataagaggtgtgcttattcagaagtcaggttctaagtcagaacctgggaatagagcagcaaacaaggttgtccctaacctggtggagcttattttctagaggggaaataggctacaagaataagtacatagtattattcaagatagcgatttaagtacagggaggtaaagcaagataaaagaatgacaacaggggaatggggcagcgttgttttagataggatcaggcatagaaggccttcccaaagaggggacagctgaatggattcgagttgagaggaagagcctgagctaagaacatttcaggcaaggttcctaagagcaatcagcacttagatggaccttactatatgtgaggcagtcttctaaacactaaattttggggatccctgggtggcgcagcggtttggcgcctgcctttggcccagggcgcgatcctggagacccgggatcgaatcccacatcgggctcccggtgctggagcctgcttctccctctgcctgtgtctctgcctctctctctctctctgtgactgtcatgaataataata

SEQ ID NO: 8265 - DNA, 627 bp, Canis familiaris
cgattggtcaatctctacggactcctccacggcctccaggcggccgtggcccagcaggacaccctgatggaagcccggttccctgagggccctgagcggcgggagaagctggccagagccaactccagggatggagaggctggccgagtggggcccgccccagtggcacctgacaagcaggccaccgagctggcgctcctgcagcggcaacatgctctgctgcaggaggagctgcggcgctgccggcggctgggcgaggagcgcgccacggaggcgggcaacctggaggcccggctccgcgagagtgaacaggcccgggccctgctggagagggaggcggaggaggcccgcaggcagctggccatcttggggcagagtgagccgcccccggcggaggccccctgggcccgcaggcccttggaccctcggcggcgcagcctccctgcaggcgatgctctgtacctgagcttcacgcccccacagcccagccgaggccacgaccgtctggatttgtctgtgaccattcgctctgtccatcgaccctttgaggaccgagagaggcaggagctgggcagccccgaggagcggctgcaggacagcagtgaccctgataccggcagcgaggag

SEQ ID NO: 8266 - DNA, 654 bp, Canis familiaris
gctcttgacttattttggactgaaatttgggctactcccatgtggagattgtagttttgtagcttcactttatggccatgtttatattcgtaacatgccacttttgcagagaaaagtttagggaagtgttttgatgctaaattactggttaccagcataatttcatttcctgttctgagatattaactctaaaagaagaaatattttaaaatatgaccaaaaataaaatgcatgtgagtttacactggtaatgaaataattcaagttcaaatggatttatcaccatgttttacagatgagggaaaccgtgatttgggttttattatggttgaaataaactccaccaaacgaagacactttgaatttaataggttctctaaggtaagtcctacaccatgcctctattgaccaagttttgttaggataatagtgtcaagtttaagaatatgtactattttatagatgctcaaggaatattttatacttgaaaatatttcaatcataaatattttgaaactgcctaagatttccaggatgtggtctgctacatgagacaggtgttttaaccagagccaagaggaaattagaaacctgattaggaatatcctataccagttggagccagaaaaaaaaaaaaaaaaaaaaaaagggcgg

SEQ ID NO: 8267 - DNA, 572 bp, Canis familiaris
aatgtagacacttagtgcagtcttccttttatacacacatgcgatatttcttggtatctatagtttctgtactaacctttgagcacaattccttgtgctctggaaatacgcgtgaagtaagacaatgccccatgtttcccctagactttgtttcacctaatcttaatcccctcttggaatattcaattaacaattgtccgttgttttttaagcatgctgtagtactcactcagtgacatgccccttggtgtctgacatgttactgagctgttggtgtggaaggaagaaatgctggggaacaggcagcacgtgtgtgtccgagggtgggatgggttgtggggatgtccggagagtcttactgttgctggaattccgttcccctggttgggttttaaattttttttttttaaacttgtctttgtgtccaatgagattcgtgttcctcctgtgaaaacatgcagtttgagtactgtgttttttatgttgtccaagaaggattgaaaacctgtagcatgaataatatatatttttcatttgaaattttatgattgtattaaatgtattgctcctaa

SEQ ID NO: 8268 - DNA, 563 bp, Canis familiaris
tccatgccatccttgcgacacctgggccgctcccttgggctctatcgggaatggaccagcaggaggtcggcctttgctggatgtatgtgtacgtatgtgtttggaggattctccgctggcttatatcgccctcctcatctactctgatctatgaggcaggaaaggaggagtatgtgaaggcactaccaggttacctgaagccttttgaaacgctgttgtcccagaatgaggggggccaggccttcatcgtgggcaaccagatctccttcgcggactacaacctgtctggacttgctgctgattcaccaggtcctggcccccagctgcctggactccttccccctgctctcggcctatgtggcgcgcctcagcgccagaccccagctcaaggcattcctgtcgtcccccgagcacgtgaaccgccccatcaatggcaacgggaagcagtgagagcttgtggaaccctgggcgggaagctggggggctacctgacttcctttctccctgacccataaaattttcaagtgggaaaaaaaaaaaaaaaaaaaaaaaaaaaaaaaaaa

SEQ ID NO: 8269 - DNA, 589 bp, Canis familiaris
gcacagtaccttcctataatgtccctgtgactgcttttgcccatcgcccccataaccacacactggttcatcgctcattctgaccacgcaggtattggagtacggtatcccagacatacggtatacagagtggagccggaccatccagaacaggggtttcatcaccttggctccaaagggacactcccatcacacatatcagttttcatcccaagagacctatgcacatccttctccatgatgcctacatgttctgcatcattgacaagtcattgcctcttccaaatgacaaaaccttattctacaatccacttcctcccacgaacgaatcagatgttatcaggaggcgtaccgcccatgcctttaaaatttctaagatatataagcctttgctcttcatggatcttttggatgaaagaaccctggtagcagtagaacggcccctggatgacatcatcgctcaacttccaccacccatcaaaaagaagaaatttgggacctaaaatagggcactgtctgtgtccttccttgaactgtctaccctgtttgttttcacaatcatgataataaaacaagttattctttaaaa

SEQ ID NO: 8270 - DNA, 588 bp, Canis familiaris
cacattctggtacttgtatatacctggcctctgatatttaagtttgtaagaaagagcttttgtgataaagaattattttttcccaaaattgtattcctgaccgaactctgaaaacacgtgttcattctatgctggtagaaaagttattctagtgggaagtgttgatcatttggtgaacacaaactgtacacctttgagaaacttggtattttgggggtgcctgggtggctcagttgcttaagtgtccactcgggtcatggtctcggggtcctgagatcgagcccagttccgcactcagtgtggagtccaccttgagattctctctctccctctgtccctcccccagcttgcacaagctctcgccctctctctctctaataaataaataaatctttatttgagaaagagagtacacacaccaggtggaggaaggtacggagggagagggaagagcagactccatgctaggcagggagcccaatgtgaggctcaatcccaggtctccaagatcataacctgagcctaaggcagatgcttaatggactgagccaactcaggcaccctaaataaatcttaaaaaaaaaaaaa

SEQ ID NO: 8271 - DNA, 626 bp, Canis familiaris
ccctacggccagaagaacctgctcttcaaagactccaccctcggagctggtgcccatcgccacacagacctacgaggcctggttgggccgcgagtacctgcacgccgtgaagggtctcctctgtgatcccaaccgcctgccccactacctgcgctggtgtgtgctgtccactcctgagatccagaagtgcggagacatggccgtggccttcagccggcagcggctcaagccagagatccagtgcgtgtcggccgagtctccccaacactgcatggaacggatccaggccgggcagatcgacgcggtgaccctgaggggcgaggacacctacctggcgggacagaagcacggcctggtgcccgcgcgcgggggagcgctatgccccggacgacacgagcagctctgtacttcgccgtgtgccgtggtgaaacgggaccgctctacgccttttccctttgacgaacttccgggccagcccttcggttcccaaccccgggcttggcagcccccgggctgggacatccccgtgggcgccctgctcggaggggcttcctccgccggctgcgacgtcctcacagctgagcgttcttcagcgccagcgtgcctgtccaccccagctacccggc

SEQ ID NO: 8272 - DNA, 564 bp, Canis familiaris
cgttttgttgctgggttcttggcctgaagatgccccgctatgtgtctttttggtgacacacgtgaaccctgcttcccgaatggagtctacatggtcaagccctgaagatccctgtctcctccaccccccaggatgccctggatgaacctaggatgcttcccgctagagcttcgggcgggatgtggacgatgaagggaaaaggcacagatgcgaacttactggctcctaggagaccggaaaggacctgctggactcctgtaaaccctacttcttcccccagtcacaccgtctcctgcctgctggtacctgggtgggcacgtggtcaccgtctctccacacaccagaaatggacattgttgtgtaggatggaaatgaacatgcaccaaaaccctaccttatatggaagttgttgccctttgcagctcagccttgtacatatacctgcctcactctggcctgattcccttcttccctaccttctgtaaatatctgtatctaaacccagaatattttggcccaatataacacaccagaaaaaaaacaacaaaaaaaaaaaaaaaaaaa

SEQ ID NO: 8273 - DNA, 585 bp, Canis familiaris
caggataagacattcaaagcatgtaaactgtttggattctcgtatacctttacacacgtgttcctaattattgaattttgtttgtgcatatttattgaaatgtgtaatacatgcttacctttctcatctctacagggtttgaagcttttatcagtaaagcctgttagtggttcacacttaagattatgaaaccgtttttctccctaagacttggtttcttgtgttgctctcagactgataagcacttaaaaggggggcatagctagtctttcttcatgattatgtcagttaaaactgtaataggccaagtgcttcattgagagttccccccgcagacttacccttctctcctgcacagactattacttgactcttgtgacattaagttttttgataccacgaggagttatttttggaagttcttaatgaatgaagtaagtgtatgattattgaaatgattggtatttttgacaaatatttattacagtaatccagaaatcactattccaccacctcatgttacataggatgctcatttctgaaataaaggttcccgcctgctgtgaaaaaaataataaaaaaaaa

SEQ ID NO: 8274 - DNA, 546 bp, Canis familiaris
ggtcaaatcttagctcctagaaatctctattcttgaagaatttttttcaatcttaaccattattctccttataatcatcatattaacctccctagtgtgttgtatccttttaaggattttaaatgccttttggcagccattcacacatcaaatggtacccatcaggattagacaacctggaaaaactcagtgttctgaccacccatgtccatgatggtggtacgtctgttggtaacagcaacaatatcaggactcaactagaagaaacacaggaacatgagactctttagcatcaacagtggaaacagaaagtaacactgtactaataggtcatactcttcacccattgagagaatgaccccaagggaagagatattaaaattaaataccaaatggaggctaggcttaagaattccctgagcagaaaaaatatcatgtaagccacataaacaaaaactaagtctgtcttactttgtgaacataaaacttcacttaggttatttattgtaaatgtctctgaccaatcataaaaaaaaaaaaaaaaaa

SEQ ID NO: 8275 - DNA, 570 bp, Canis familiaris
  misc_feature (281)..(281): n comprises a, c, g, or t, or includes no nucleotide
tctcttacacgtcacctttggcagcacccgtaaatctgccgaagtgccatctccactggcctcatatgcatttggcacagaaatgaaacacatgattatttttataatatgagtcatcttcttcgaagtatgtcttcagtggtaaaaagtgatgaagcccgtacattgattttaagacaccaagtgtctaaagtggttttatggggcatgagagagatcctgatcttcaccactgaaaaactggtaatggtgttttacctaaggaaaaaggaattcgcacnacacgttttccaccctgccacctcttcttggtacaagctttggaaaaatcataggcttagtagctataaaggcagtgcagcaaaatcaaagaccctactcccattatggggtaaaatgaaggcctgaagctaccagatggaatatctgtgggtcagatgaaatctagaataagactgaaacactttctgcatgtagcccaagccaaacactacagaataagtgccagagactatatatttataaattagattcttttctaatctattacagataacttttctatcttta

SEQ ID NO: 8276 - DNA, 566 bp, Canis familiaris
cgtttgcccccgggggccccctctcgccattttgaggtctccccgtaatccctccccgtctgaaggcccccaaccacgtactgcagtctcctcctggcctgcatccggaaggcagccccccgccctttcgagacaactcatcctgagctctgaggaccccaggacctagtgatgtgacccatcctgcccgcccagacacccctcccctgcccgccccaccccgaggtcccttcttaccctgacacccctctcgttattccaggagccctgaaatcccactttgccctaaggattcggtcccctgccaccccttagactccttcgaggggtcctgagacccctcgtgaggttacctagccccccgtgcccccgacagacccaccactctcatacacggtgccagcacccgctgcctgcagtcaggcgcccctgcccggtgtcctcagctgcccctcgcccgcggccccccccacagagctgctccttggggggggggtgctgtttgagagtctttgtgttgcacattaaaactcaaccatttagacctgcacaaaaaaaaacaaaaa

SEQ ID NO: 8277 - DNA, 476 bp, Canis familiaris
taaggctaatctgccccattgatatcagcctagcacagagagcgtctaataaaaaggtgactgtggtccggaacttggaaccctatggtctagacccgtgctcagtggcttccatcctccagcagcgatgccaggctagcacgacggtcactcctgcccctggggccaaggacagcctgcaggtccagatccaggggaaccaggtccatcacctcagccggctgttgcttgaagagtatcggcttcctcgaaaatacatccaggcctagaaaaagccccccaacctgcctagaagaagtatacagattcttgtttcatgtggtcggtccggtggataatccaggctggtaatttatatgagcattttcagcttttgcaaatgaaaaaatataattctttacccaaataaatttttattctaatctaaaaaaaaaaaaaaaaaaaaaaaaaaaaaaaaaaaaaaaaaaaaaaaaaaa

SEQ ID NO: 8278 - DNA, 374 bp, Canis familiaris
gccagtgcagatcagttaatgctacagagaagacagctaagagtgtatccgttgttgttcttcccttagcgttactggaaagctttccggtatctagaatgtgttttaaatcagttttaagcaggttgggggagtggatggggtgaagcatcaaacacccattttattctttcatttgctctgctgatactgtagccctacttttacagtttgtttttttttttaagcatgttagtaccagcagccagctaaaagtttttctactcagataaaatgttgtttaagaggttagactttttttaaagctatgaaaaagttactgttttctcctccaaaaaaagtttaagatctgggaccacccacttattaaaaaa

SEQ ID NO: 8279 - DNA, 574 bp, Canis familiaris
cattcgtggctgacatacagtccgttagatcgttgtgcaaagtacttgagaaagattgtttgaaatcatgtcggaattgattttcagctgcatacccgtatacctggatgctcttcaaaacattttcgttcgttcgttgacccagtgttaccatgtctgaatgtactctgtcaagctatccctttaagcagctgtcttcctactgttgttaatgtaattctgatgaagctgaacgtagactgaatgtgaagtctgagcacgaaaataccacatgacatccctaccattttagagtacgtactttttgttaatacctaagacctctagaaatgaatgtatcagagaatgtaatgaaaacctcttactttaaaaaagtccttcatttggggagggacatgggaatgctgcatttgttggcctctttctttctgaaaggacctttcctctgcttacccttcaacatgcttcaattttatcaacgctatgttttgtatttttcaagcaagtatcaactctgcaataaagagatgtagtttttttaaaaaaaaaaaaaaaaaaaaaaaaaaaaaaaaaa

SEQ ID NO: 8280 - DNA, 532 bp, Canis familiaris
tgggggatggtgaagatgtagttgctgatattcaggatcggatccaggccctggggcttcatttgccagacccaccagtagagagcgaggatgaagaggaggagggagctaccggactgagcaaccacagctctattcccatggaccctgaacatgtggagctggtgaaaaggacaatggctggagtaagcctgcctgcaccaggggttcctgcctgggcccgggagatctcagatgcccagtgggaagatgtggtacagaaggccctccaagctcggcagggagccccagcctggaagtgactaccctaagagctgccttatctccctgcattccaggccagaaccagcacaggactgaacacatccctggttgtaatgtccatctccatcttcctcctctccctttccacatcaaggcaaatcagacttcttctcagagacccactttattcagttctgtacatatggggacatcggcccaagcccaacccatcttagcatgtatcactctgtggagaataaagcaccct

SEQ ID NO: 8281 - DNA, 645 bp, Canis familiaris
gtaatgcttctcagtccacactggggtacatgtatatgtagaagcctgtgatggctggcgagaggatcgtccaagaggacttgctttccataagaaatggttagtataaaaaaagatcacactgtgtaacagaattaatttgtcgtgattaatttttgctctactggtgtcatgagatgacagccacggatattaacttttgtagtgtatttcccaaatagagcctcagcattaaacggttactttaccacagcctaacgttaacttttttgtacacatgtaacgctcatgatctatatagaaaatatctctaattgtgtattggagagtgtatgtctagattttcaatctgttagcataattaaacccattcttcatcatttttggtcagaaactcaagcacagctggtactgacagctcccattccatgtctttgagtgaatactccttagggggtaaaaaaattaatctcctctgaatctgggagctgcctcgcctgaaactaatgcccctgctggttttctcttggaaccacattgacgagcctggaagagcctgatttggggcttaaaggcaggcagaccaaatttacctaatagtttattaaaaaaaagtgttaaagaaagacaatattaaaaaaaaaa

SEQ ID NO: 8282 - DNA, 596 bp, Canis familiaris
gaagctgtgctcagagctgggggctggtggggagttcgtcaccaccattgcatacagcatccggggccagctgagcctggcatcagaagacctacgccttcagtgagaacccccgtccccacggtggagattgccattcggaacacaggtgatgctgaccagtggtgtccactgctggagactctgacagatgctgagatggaaaagaagatccgcgaccaggacaggaacacaaggcgtatgaggcgtcttgccaacactgccccagcctggtaaccggcccattggtgcatggctcccacggagcgttcagaagatcggaccgcctctccttcatcttctggcaaggagggaaagggacaggccggggccatcctgaggagtatggggcgtggggagggcttccggtcaccctcccctgggcacacattccatttgttgggccctagtcgccacccaagtctctggtcagaaagaggcctcgtttttgagttgtgttttgtttttgtataggagccccaggtagggctagcaacactttttaaataaagacaacaggtcatgttcaaaaaaaaaaaaaaaaaaaaaaaaaaaaa

SEQ ID NO: 8283 - DNA, 522 bp, Canis familiaris
tgggtgttgagcttatatatgttaggggacagtagattggttttattttgggttttgttgtccctgcccacgggtttgtgacatgtgtgttaaaatagcactgagtggggcattttctttctctaatagagccatcagtgagatctggcttagcctgtgctagcaacagtctgaaattccttcagagaaggcagcccgttggaaaggtttttgactgtatctaatcaacattccttttgttggtgacatttgtgattttcagtaatttaagtttttgatggccttgtaaaaaagactccactatgtgaaggttaattgctgtgctgcaaagatcttgtctattggcccctgtaggaagttaaccttttttgttttccttttatgacattttgcttattgcacaactgctttagggataattgaattatattaagatgtcttgaaattatattatagcactccttgattaagaaaaaaaaaaaaaaaaaaaaaaaaaaaaaaaaaaaaaaaaaaaaaaaaaaa

SEQ ID NO: 8284 - DNA, 630 bp, Canis familiaris
  misc_feature (262)..(262): n comprises a, c, g, or t, or includes no nucleotide
aagatatggctcctttgggtgacataacggctgcaaatgtttgttatgactatggacacagatggcgcacattggtaagatgctgctattttttgacaaagtgatgttttgtgcggtcatcctggaaccgctagagaaagcagttaagaagaatttcaggtgtcacatgtgtttttgggcaaaaaggtcatcatgattgagggtcatgtgaccagaagaagctccagaaagctcgagcccttgcttcaggtggagggaggtntggagatacagaaatactctgctccacaggaaatttcagtgtctatgcagacagttccatacctgggaagggagactcagccggcggaggccgacaggcagttcactaaagcacaaggggagtcttttcagaccaagttgtcccttgcctcccaaacaaacgcccttcgagtttgttatggtttctattcctgcatcttgtggtatcaaaaccacttcctggaattgtaaaagtgctgccagaataaatgtttttttttccctcttccgagaaaaaaaaaatgacagtgctcatatttgacatttgtgcattggactcttttgaatgaataaaaaggaaagggtttggtataaaaaaaaaaaaaaaaa

SEQ ID NO: 8285 - DNA, 664 bp, Canis familiaris
gaaacgcggcattttggttaaaaaattacgcgttgccacaaggaaaggtatatcttaccgacatttttggttagttgtataatacgcgtggccgtctgatatttaaagtttgtaagaaagagctttttgtgataaggagtgattgtgtgttccgaaaattggtattcctgaccaaactttggaaaagtgttcattctatgctggtagaaagttattctagtgggaagtgttgataattttggtgagtaaaactgtacactttgagaaacttggtattttgggggtgcctgggtggctcagttggttaagtgtccactcgggtcatggtctcagggtcctgagatcgagcccagttccgcactcagtgtggagtccacttgagattctctctctccctctgtccctcccccagcttgcacaagctctcgccctctctctctctaataaataaataaatctttatttgagaaagagagtacacacaccaggtggaggaaggtacggagggagagggaagagcagactccatgctaggcagggagcccaatgtgaggctcaatcccaggtctccaagatcataacctgagccaaaggcagatgcttaatggactgagccactcaggcaccctaaataaatcttaaaaaaaaaaaaaaaaaaaaaaaa

SEQ ID NO: 8286 - DNA, 557 bp, Canis familiaris
  misc_feature (1)..(1): n comprises a, c, g, or t, or includes no nucleotide
ngaactatcgatacggaatagttcgttttgatcgtatcagaaggtatttttcttttgcaggcttcttttgagccttttaccagctccagcgctagcccctactcctgaactttggggggttgctgacctcctaccggcatgtagttcctctgtgacccatttagaagtggcctctactccaacacttcagtcctctagcctccggagtatcttattacttgagcccatcatagttttaatagaaggtaatcggcaaacatatacttcaagccgtattcatgtacaatctccttaggcgtatatttgtacgctattacaggcctccgaatactatgagacatcttttacaatctccgatggggtatacggatctaccttttttatagccactggatttcacggattacacgtaattatgggctctacattcctcatcgtgtgcttcctccgacagctatactaccacttcacatcaaaccaccacttcggatttgaagccgctgcatgatattgacactttgttgatgtagtctggctattcttgtatgtatctattt

SEQ ID NO: 8287 - DNA, 604 bp, Canis familiaris
gcagcaacaaatttgaaatcctggatcagcaacttaggaaacttcatgctagtgtcgaagccttggtctgtcatagaaaagaactttcggccaacacagctgcctttgctaaaagtgctgccatgttaggtaactctgaggaccatactgctttatctagagctttgtctcagcttgcggaggtggaggagaagatagaccagttacatcaagaacaagcttttgctgacttttatatgttttcagaactacttagtgactacattcgtcttattgctgcagtgaaatgggaggcaaaagtacaacaaggagaaagagattttgaacagatttctaaaacaattcgaaaagaagtgggaagatttgagaaagaacgagtgaaagattttaaaactgttattatcaagtacttagaatcattagtacaaacacaacaacagctgataaaatactgggaggcattcctgcctgaagccaaagccattgcctagcaagaagatttctgttatgaagatcttggatgtttgttccagttatgctgaattccacagtgaaatcatttaaaatcatctaaataaaccactctatattttaaaaaaaaaaa

SEQ ID NO: 8288 - DNA, 623 bp, Canis familiaris
cagctcctgggggtctggagtccccttcctcacgtcctcctggaacttagggtatttttgcacaaactcccacagagtttggggggatctaataggaaagggataaacctttagctattttcttaatccctccactcagctgccattagtttggctcttaaagagccaggctcccgttttctgccatctagcagtgaggctttccacctgttggagtggcctctggggctgagaaagggggaatcccagcccaattggggtttcacacagcccctttgtcgctgctggaatcatccaagggtctcccgctcagctgggcctaggaaggctctcgggggccaggagccgtgtcacctgggttctgtcccctcactctagatcaggcactttattgttggacctcagtggggtgggcttgcccctattcttccagagcctggaagggaagactagagggcttcctggaggaggctgtggagcaggaggggtcaggtggagaagaaagaggccagcagcaagcctttgcacactggggtgggggctgggagccggcgactaccccagacttggttttgtaatgatttgtacaggaataaatgcacctaagctctgaaaaaaaaaaa

SEQ ID NO: 8289 - DNA, 631 bp, Canis familiaris
ctgccaaccagatcagtattagctttaagcaccgcactctgcttctccctccgctggaggtccaaggactatcatagggtgcaatttggggcagggtgggggaaagcccctaccccaggctcccgctggataagagcagcccagggcctttagaaaaatagctggtttccccaccctctcttccagggaaaaccccatgattgcctcaaaccaggaaatggagatagcagagtctggcccttcccctacccagttcttcctccacatccctgagaaaacagcacttacaagacctcccttttggaggggccccacctgaaatgtcaggctaggggcactttggtacggaacatatttattgcctccatgcgtgtgtgtctgtgtgtgaggactagtgtgcatggacacgtctggagcaggcatatggggctctttcaggggcctctgagggggaaagagtttgcagtggccagacaccctgaaatccgcaggaatggagcctcatggggccccagagttccagtgggagagtagggtcccctcctgtctcccccctttccctcacttccatttttgtggacaataaatcaatatgcacaaaaaaaaaaaaaaaaaaaaaaaaaaaaaaaaa

SEQ ID NO: 8290 - DNA, 355 bp, Canis familiaris
aagatatgatcgaccgaattccgtgcggtcggctgggaactgtggaagaacttgcgaaccttgccgctttcctttgtagtgattatgcttcttggatcaatggggcagtcattagatttgacggtggagaggaagtatttatttcaggggaattcaacagtctgaggaaggtcaccaaggaggagtgggacataatagaaggactcatcaggaagacaaaaggctcctgagatgactctggccttcatcttggttatgatggaaatgatacaatctatgatcttttgaattattttcaagtctaataaattgttaaataacaaaaaaaaaaaaaaaaaaaaaaaaaaaaaaaaaa

SEQ ID NO: 8291 - DNA, 585 bp, Canis familiaris
tataaaactttaaaactttcacatggtaaaaacaaatatgacaataagaaaaccctagagaaaactcaagagaaaaagtgcttatttctttattacacaaagagatcttacagttttatgagggaaaataatgaacagaaacttgggcaaagaatatgaccaattatttcataaagaaaagaagaatggcaagaactacttggaaaaaaccacaacttcactagtgcttagaaagtgcaaatcacaacaatgtgatactatttttccttatcagattgacaaacagaagcaaatttgataaaactcagatttggcaaggatataagtgaacttacactgttgatagaaacgtgtactgggggtacctgggtggctcagtggttgagtgtctacctttggcttgggtcgtgatcccagggtccttcaatagagtcttgtatcaggctccccgcagggaacctgcttctctctctgcctatgtctctgcctctctttgtgtctctcgtgaataaataaataaaatctaaaaaaaagaaaagaaaagaaaagagaagagaaaagaaaagaaaagaaaagaaaaaaaaa

SEQ ID NO: 8292 - DNA, 667 bp, Canis familiaris
agagactttgttctcgcaaatcataaatggaccatagatacgtggtaaccatagacagtaaccaccctgccaaagccaaagaaagattcaacaaggctctctagctgtcaagatatgaggtagcatatcttcaaggtcagatggtaatgttaataacaggaaaagagagccagattttcagacattcagcagtttagcaaccctttccacagagttcattcaataccttgcactgatatagtatgtcacacttgtcaagatattcttgcatacatggtaaaatgcctccttgcacaatttgataaaaacatctctactactttacttctaaatttttgtgtgtctttaggggcaaggatattcttttttttgggggggggcaaggatattcttaaaaataaacttttttaaggctaattttgattttggaaattcaaagaaaattgtaaaatcataaatcctaatctggtgatattcctattaaagaaaaaaggttcttaagtttataatgggttgtaacattccacactatttgtttatacaaataaaagccaaggttaaaagccttgttttacttgttctgtggaccaacagatcgttagtaagatgtgaaagaggaaataaaggctgttatcaaacctttaaaaaaaaaaaaaaaaaaaaaaaa

SEQ ID NO: 8293 - DNA, 565 bp, Canis familiaris
actggcaggatttggtggaaattctgtagaactctggagtctaccaaggctccagcttccagaggaagatttggatgataaattgtggttttgatcaacttacctacctatcttccagccccagtcatgtggcaggcaactataaacatgttcctggagaaacttttacacagcttgtgggagccagggtgggcaaaaaggactctgtcctccaaatatctgggatttgatctctgactattgcttctgaggcaaaaatatgggcaggcattgttgcacctcccccactgctgcaagctactcctcctctggctaaagttacttccatgaatttaaagggctggtgccccgccacccacccccattcaaatattttccttttgggagccagatattaaaaactagggcattcaaaaacaactgcatgcacgaggaatattagaaagttaccacacatgcctagagaaaggctcagaaaagacctgagaatttacatctctggctcatcctcagcagatagcctacaacaatcaaaatgtaaaattaaaaaaaaaaaaaaaaaaaa

SEQ ID NO: 8294 - DNA, 661 bp, Canis familiaris
tgaagacaggatacctaagtagagtctgtacacaacccggagagtctgttcatccgagggtactgctgtcattctgggctatctgggggtgatgcccgagtagaccaaggaagctaattggaccagtacaagtggtatcggatcaggagacatcttccgcgatagactaacagggcttctgcaagatcgtgggccgctccaaggatatgatcatccggggcggggaaaacatctaccccgcagagcttgaggacttctttcacaaacacccgcaggtgctggaagtgcaggtggtgggagtgaaggacgctcggatgggggaggaaatctgtgcctgcattcgcctgaagaagggggagaagactacggaggaagagatcaaggctttctgcaaagggaagatctcccacttcaagattcctcgatacatcgtgtttgtcacagactaccccctcaccgtctcagggaagatccagaaattcaaacttcgagagcagatggaacaacatttaaacctgtgaataagggattgaggggtcctcacaagccctccctgcccttcccccacatccccatctgtctttgtgacttgacataaagagcttctctgttttcaaaaaaaaaaaaaaaaaaaaaaaaaaaaaaaaaaaaaaaaaaaaaa

SEQ ID NO: 8295 - DNA, 570 bp, Canis familiaris
tcgccatgtttcttgcttgttttggctgcgtcaggtatttgatgctttgtttcctgctctgcgccacactctcagccagaggaggaatcagtattgggggtccttgcttgacccttccgttactctctggcccctccctctgcaacccctccgtttctactggctaaggccaacctggccactttgtaggagggtttggggaggaggttgtgacatctgtgcagaggatgggagaaacttctggcctgaactcgtctgcgtagcatcctaactcccagctctgggacaggaggacagacggaagaggatgtctgtttcttccctctcctgatcttttgctttcccccacatgttgttgatttgatgttgaaagatgggcaaggctcccactgactctcccctactttacccctgttgacttaatttttctctccccagtgtctaatatgggttctgattcttaagtccttccttcccttcactacctcctttattataaattcaataaacaaggtgagatgtaaaaaaaaaaaaaaaaaaaaaaaaaaaaaaaaaaaaaaaaaaaaaaaa

SEQ ID NO: 8296 - DNA, 625 bp, Canis familiaris
aaacctgagagcacagactgtgaagagaccagacttagcttagtgcagcacaatggcactaaaatggttgtcctgcaacatggtgctgagtagcatctgcttaggtgtttaaaatgggaggctactgggttctgcaggtagaaatgtggatttagcagcctggggctttggaagctgcattgttgacactcaacccaggggaatgatgcaggtgaggcaaagcctctgagaaacactgttcctatgcaatggatatggaagcagtattggaattacaaaaaagcagggtggctccacattaaaacatactaactatactttaaacccaataatctttcttggtaacaaccggagttagaaaacagcatagaaaagcatactgcaataatattacccaggacattcatggatattccaggagtcagagatgatacagaagggacactgaaggacactgtagattaaaagttctctagtcaatcatttggactatagcagagggaaagaaaaattaataaaagtatattcattggatttagtggaaagaaaatgctaatatttgtatttatgagtagccacctttttgttcaatttgtaataaaattgatttttatacaaaaaaaaa

SEQ ID NO: 8297 - DNA, 543 bp, Canis familiaris
  misc_feature (80)..(80): n comprises a, c, g, or t, or includes no nucleotide
gagtttttaacagcatcttccgctgtttgacaatggcactctatgccaacactcctcatctgagggagcttcacttggancaaaccatatagctcatcagagtacccggtgggctggcggagcataagtacatccaggttgtctaccgtcatagcaccatatatctgcagtcggatctaatgacttttggcccaactgggataccaaacacccaaaagggctttcttaattcaagggtgtggagccttttcagcaaacccagtgcagtactgggagatccagccatccaccttccggtgtgtctacgtgcgctctgccattcagcttggaaattataaataattcccaagaaagccctcgtttttataacctggcaaaatcccattaatatcattgctcaaaaaaaaaaaaaaatgaaagctagatactggaaacttaactgcaatgtggatctttttcccacatgatttataatacataaagctgatatgcagtttaaataattgcctacaataaaaaaatattttgcctgccaaaaaaaaa

SEQ ID NO: 8298 - DNA, 633 bp, Canis familiaris
tactctaagagaagtggatcgtgatgttccagtacaaggggcagagtccgggtccaactcaagcaggaagacggcagcctctgtctcgtacagttcccatcacgtaagtcagtaatgttgtatgcagcagaaatgatacctaatctaaaaacaaggacacaaaaaaacaggaggtgggggaccaaagtcttcagcaaggagagggaagtaaaaaaggaaaaggaaagaagaagaagtgaccgcgtatgggaaccacatctggtactactgagagagaccatgaacgaaggcttctaatttaagagaaacagctttttatttgcatcatttaaccgaactatggacatctctgcctctcagcttcagcatcagagttgacagtgaagtaaatttgcatcagaactttgcatctagctcttacgcagtataaaagaaaattttgtttgcttttcaacgcagtttttgtggaagagagaagcatacttttaaatggacagtgaactctaccataagttacttgaaatcctgtatctgtcctgtgtgtaaacatgttttagataaatgagtttaaagattcgaaatacacattttcttcaacgtctagttaatgaaataaaatttgaaactgaaaaa

SEQ ID NO: 8299 - DNA, 589 bp, Canis familiaris
ctggatcctggagcagccccagggacaccacccgcttagtggccgacagccgaaggtcaccgggagcgagtcctcagcctctggtccatgctctggctactgaggcgtcgcagtggcacagattggatgacaggtggaaacttggactcccgaggagaccctcttccgcctgcgccgccgcctccgtcagaccccaccccccaggggacctcgcccccgagatctccagtggctaattcccactcagccgggttctcccgcggaggtggggagcgcggcgcaggccccagcctcctgggagcccacgtgggaatccgggaccgcccccccggccctgacccaggaggagggggcgtggcctctgcgagtcacgctgctgcagtccagcttctgacccgccccagcgccgcagccaatcggagcgggaggggcgtgacccgggggtaccgccccgagacgggagccgctctcggcgccggggggcgtgatctggtccccgcggtggcctagggtgggagacgtttccagggccaaagtttggttttcccaacacttgtccaaattcggattaaaactttgaacttttaaa

SEQ ID NO: 8300 - DNA, 146 bp, Canis familiaris
ttaatggaacttcagtgatacttggtagatatttcaagccttttgtcttttatacaatggtgctctattctgttgttttcgaagaagcatctgaacacttagatttgcatattcttatccaaagcattcacagaagtgggttttta

SEQ ID NO: 8301 - DNA, 621 bp, Canis familiaris
cccaagatggagagcctggataaccctatgggcctaccgcgtgggtctcgcgctcctgggagtgggcagcacgtttgtgctctccagcttctttgccctcggcttcaccgggaccttcctaggcgattacttcggcatcctcaaggaggccagagtgaccacgttcccgttcaacatcctggacaaccccatgtactggggcagcacggccaattacctgggctgggctgtcatgcacgccagccccaccggcctgctgctgaccgtggttgtggccctcatctacagggttgccatcctgtacgaggagcccttcaccgcgcagatctaccagcagaaagcctcttcttcccacaagaggagctgaccgcctggggccacccctctcagagtgggcctccaccagccccgaggtccaggccctgcagcgcagagaagggtgcccggccaccgctcagggttcgtgcccagcgagggccactccagtgccttggaaacctctgccttgggggccctggacatgctgtcgtccggccactgagccccccctgtctgctgcccccagcacgtcccaactcaccaataaaggcacctcgatgccagcaaaaaaaaaaaaaaaaa

SEQ ID NO: 8302 - DNA, 630 bp, Canis familiaris
acagcatgtacaaatagcctgaggaaaaccataattttgtagctattaagctggcactgtagagtatccctatatatcaagtatttagagttctatatgttgaaacatgtgtgttcaaattattttcggaattgctttcttaaaaggttttccctgtggatatctaaagtgacttttgaagcataattctaatatgtatggttttgccttctggacttagttttgatacagatctttaatttacatttgctttttccccgtgctccatagttgtgttttttcactgatctgatttcttcagttattcaaatagggaaagtaactttgcagttttgtttcactatagctcataatgacactgtggttattccatttattagtttactgttggatgctgctgttttcagataaatactggcataactgaacttatttttttaaaaaaattaagtatataaatctaaggatgggattttttttttccttgcattttaacaaacgtcaacacatgcagttgtttagttacaattcaaagtctatggaatggtaaaaattctgtttgatcaaaagaagtcagcaaattaaaaaaaaagttttcccagaaaaaaaaaaaaaaaaaaaaaaaaaaaa

SEQ ID NO: 8303 - DNA, 626 bp, Canis familiaris
gttgagtcttgacaagtggtcagcttttgctttctctgtctaagtcccttcctcctgaccagagtggatagttgtccaagagttgtggctcctgacctcaggggcctgctgatgccatgtccctccatctgttccattctgaagtctcagacccagaagtgggactgggcaccccttctatatggccccattcctcaccagagccaccgtgactggagattcaacagcaaagagagaggttcttactctagataggttttttggccccattgaagctctgtgtctttattcagagctcaagagatgacctggccaacctagatcttcccagtcctgctgtagagctgtcagccacagaagtaatgatgcttcccttcccttgcagtcccgagggtgtgcccatcacacacaggtcctgccaccctgaccacaaactgttgtactaagatcagagtcactgtaccattcttttccagggccacagctaacaccagttttctgaatgagaatccatgctggttaagactttcggttctacttgtttcccttggagatatttttccaagagcataatgtacattaaagtctttgaattgagactaaaaaaaaaaaaaaaaaaaaaaaaa

SEQ ID NO: 8304 - DNA, 589 bp, Canis familiaris
ataaatagtaagtaagcaagtaagtacgtacgtacagacatacatacataaatgcacatacatacaacaaagacaaactcggggcaacggcccggccgctcgggggtcgagctccgccttcagcccagggcgtggttctggagacgcgggctcagagtcccaggtcaggcgctctggatggaacctgcttctccgtctctccgtctctgataaataataaataaataaataaataaataaataaataaataaataaataaataaataaatacatacataaatacatgaaagataaataaacgaatgaataaatgaataaatgaataaatgaagaaataaaagaataaagaagtacgtacataaatacatacataaatacgtaagcaaataaggaaataagtaaagacagacatacatacatacatacatacatacaaacaaaccttccaaaaaaaaaaaaaaaaagggagaaaaaagaaaaaggcaaactggcggcgacgcatgggggctcggcgctcgagcgcctttctccccgtgccgaagtgtctgcctgtctttgcgtctgtcacgaatagatccataaaggagg

SEQ ID NO: 8305 - DNA, 678 bp, Canis familiaris
  misc_feature (149)..(149): n comprises a, c, g, or t, or includes no nucleotide
aggaccttcagatcgcctggagccccatccacgctgtgtttgaccctccatagaagacaccggaccgatccagcctcccggactctagctaggtccgcggggacggataacatttcacacaggaaacagctatgaccattaggcctatntaggtgacactatagaacaagtttgtacaaaaaagcaggctggtaccggtccggaattcccgggataagctatttccgctcccatgtcagcctgacttggatcctcttagtgggtgggcaggcactgcgtaacctccctgtctgtttcatagatgagcagattgaagcccaggagatcagagaagataaggaagccttgtggagatctctgggggtctgcagaggtgtcaaaaagagaggccgtctgagcgcccagtgagacgggcctgctgttccccgcctccctcagccaccgagcccatcaacgcggttgggatctattggcctataactagtccccaggggccaacaggacatggggaggtagggagccaggagaaggagctcttggccctcttctcccatgtggggacagaattatggggcactggggtcacatgtgacttttgccttcatgggccccctcttctataaaaaacattctacaactatattgtataaagatgaatatgactcagaaaaaaaaaaa

SEQ ID NO: 8306 - DNA, 710 bp, Canis familiaris
tatttagtgacactataggacaagttgtacaaaaagcaggcttgtaccgtccgggatttcccgcgattctctcccctctgctgctgcacaagccagtgagaccaacccacaggaccacggagagaccatgaagagcctgctccttctctccattctggctgccttggccgtggcagctttgtgctacgaatctcatgaaagtatggaatcctatgaaattaatcccttcattaacaggagaaatgccaatacatttatatctccgcaacagagatggagagctaaagcccaggagaggatcagagaaaccaccaagcccgcctatgagctcaaccgggaagcctgtgatgacttcaagctttgcgaacgctacgccatggtttatggatacaatgctgcctacaatcgctatttccggcatcgccgaggaggcacaatagagagttgagaaaaagtgctcttcttcctctttccgagagctctgggtggcctgggttttggaattcccttgtaaccagtaagcaatccatcggaactaccataaacacatacaaattgcttatttcttaaatgttcttgtctggctgttgccctccttcctgccccccagatcaataagcagtgaaagtgcaatgtggtgaaaggtcaaaagagaattaagatgtgtgattattattacataataaactcttggatggatactttcgaaa

SEQ ID NO: 8307 - DNA, 638 bp, Canis familiaris
atggaagatatgtaaagattacggtactaactgatgtcatgcaatggaaggcacagacggaaccgtccttatcctatttaatgtattcggctttaattctgttttgcctgatacacagtattgccacctgaacgttgcattgttctcgtatacctttccccatctcatttttaacttttcgtgtggctttagtttaggtatttcacttgtaactggcataaaattgggttttccccacccacaagctgcaagtctccctttttcaatcatgagtctcacccatttgcatgaaaagatgtacattatatattgtgaagtgaaaaaaaccattttccaaaagtatatgttgcatctcatttttgtaaaaaatgtatatttatatattaatatgccaagaaaaaagtatatacttaaatggcttaacacgtggctatctgtgcggtaataggtgttttggtttgttttttcactttttgcttcatcagaactaatttttaaagacaaacatgttactttcattgcaaaaaatataatgggaaaaacataaaaacctgtcaatcagcttataaagaccatgtggcacttaataaatacttgtcagaactttaaagaaaaaaaaaaaaaaaaaaaaaaaaaaa

SEQ ID NO: 8308 - DNA, 607 bp, Canis familiaris
ccatgtgaaaaaattcatgatgaaaccttcgaaaacagtatgagaagagttctcgttttatgaaggttggctatgagagagattttctgcgatacctacagagcttacttgcagaagtagaacgtagaattagacggggccatgctcgtttggcattatctcaaaaccagcagtcctctggggcagctggcccaacaggcaaaaatgaagaaaaaattcaggttctaacagataaaattgatgtcctcctgcaacagattgaagaattaggatctgaaggaaaagtagaagaagcccagggaatgatgaaattagttgaacagttaaaagaagagagagaattgcttaggtccacaacctcgacgattgaaagttttgctgcccaagaaaaacaaatggaagtttgtgaagtatgtggagcctttttgatagtaggagatgcccagtcccgggtagatgaccatttgatgggaaaacagcacatgggctatgccaaaattaaagctactgtagaagaattaaaagaaaagttaagaaaaagaactgaagaacctgatcgtgatgagcgtttaaaaaaggagaaacaagaacgagaaaaaaaaaaaaa

SEQ ID NO: 8309 - DNA, 635 bp, Canis familiaris
cacctctgccctccaatgcccctcaggcccccagtcccccagctgctggtgccaggcaacttgcatcactggagggtgggaagtagaattctgtgcacaaaaatgtccagcccagagcctactcatttctgcctcccagcccctctagacacccctggctgctggacaccctcctcgtgatgtgtttgtttatagtggagagaaaacaaaaccatagtcactgcatacatctgtcagggttcgtgaccagtccacatatagctgtgggttgactccagaacctggtccttttttttttggtttggattgtgtggtttttctaacaatggggaaaagaattgttattagtgacacagaaagattgccttaccctaagtgagtgtgagaagccataaggactgaattctgtggcccagcacccaggattgacccaccaacccagaggccggtggtcatgtgagttaaagagaagcccacatcccaatgagaagggttacccatagtacaaccagaacctgagctgtctcttgcccacggggattcagaagcatgtacagtcaactcttgcactataccttctccaagccagaaaccacatttaatttcataaaaaacttatgaaaaattaaaaaaaa

SEQ ID NO: 8310 - DNA, 584 bp, Canis familiaris
  misc_feature (309)..(309): n comprises a, c, g, or t, or includes no nucleotide
acacaggcagagggagaacaggctccatgcaccgggagcccgacgtgggattcgatcccggggtctccaggatcgtgccccgggccacaaggcaggcgcccaaccgctgcggccacccagggatcccaggtcttgtgttttcccagcattcaacttcattgaaataaactgcataataactggtttctcacccatagtgttatacaagtttatggtgtctaaggccaattatctgtagaggaataaacaccatgataccatttatatactatttggaaccatgagacacatttccacttcattaaccanatctccatgcatatggactggactaatttgtttttctaaaaaaaggatgtgagggaattaaaatctgtgtgggtaacataagtgactttcagttcacagtgtagaaaaaaatagtcaatatttctaaagaaataaatataaagtctggaattggagagataaaattttgccagttaaaatgtaatgcttccatttaaatccataactgtaataaattatccaaatttggaaaaaaaaaaaaaaaaaaaaaaaaaaaaaaaaaaaaaaaaaaaaaa

SEQ ID NO: 8311 - DNA, 567 bp, Canis familiaris
tacatgatatttctattttattatgcagaaggtaaatagccatatttgtaaaatgaccatcatgtatgttaacccagtactttccgttcatgaagacacattgctttttgtgatatgcacagtgtggataaatgttctgtctttctgtttttgatatagaattataacagaatcactcggtttatatatttaaaaatgtcagttctaagtattcacaatgtcttgcatgttgtctcaagtaatgtgaatactttgaactgtgtttcacagtttgaaataagctattcagtgtaatgctttttgtttgtatgcacctaaacttagattttacatgaagtatttttttcagtattatatgtacctgtttcgaaatatatagggatatgctcattatacccaaatattgtttaaaagtgagcacttaaagctttcggaatatctcagtgctgatgtagcatatttttttgcaattgctttttctatataaatgtcttcaatgcaatatactggcaagcttttctattttaataaaaataattttatatgaaaaaaaaaaaaaaaaaaaaa

SEQ ID NO: 8312 - DNA, 610 bp, Canis familiaris
caagtaaggaaagaataaggacctctatgatcaggagaataaaagaaaatcctgctagtgaagacttccattccactgtctagcagtcaggcccgcaccagtaccggctcagtctcctcttccaatggagatccccggtttttctctcctggggttaggatcgagcttcagctgccaaaggaaacctcgccctgtttcctcgttccaggaacggaggtctccaagccacgggtggctcgttcagatgttcagtgggagaacttgccagaatctcagcacttgtggggagatccttgcctgctgtttggtaaccatgtggtagtcagctgtatctcccaaccccagcagcaacagaaaaaagggagctagtcatgggagttaagtttccccagttactagtattgttcctgaaagcagacggaaagaacattaaaattactgcagcgggtgagttgcaactggcctccatgcccagaaaagcagactagaaatttaatgcaaaaatgagagctagaccgagctcatagcactggtctatgcctgtttacaaaaagagtggaacaccactgttaggattcaggagcttataatctagtttctataaattgcc

SEQ ID NO: 8313 - DNA, 566 bp, Canis familiaris
  misc_feature (326)..(326): n comprises a, c, g, or t, or includes no nucleotide
caaagattataatgagaccctaatgtatgtaagaatttttcacatgtggaaattataccaacatttgatatgctaaaatcttgttagctggatatttcaaggaggtaaaatcaagtaatcttactggagacatacagatttggtcctccgcccccctgccttttgatggattttatgagtgaagccaaagcaccaatctggagggaatgtgttttgtcacaccaaagagatgaaatttttgtaaatttacatctcacttaggttggagattttttgccataggccaatttgctttcatctaaaattctatgggagatagggatganctcaagcccagttgcattcaacataatgttaagctaatgaggttctgttagtttgggagtttttttcttttaacctgaaggaaaacctgtttggggcttctaaacacctaaagagaaaattttggcttagactagtattcagtctggtgccaaacttccaatggaattcaaatccacggaatagaaattttatccatagaggctatcctaataaattaatccttcactttgatctaaaaa

SEQ ID NO: 8314 - DNA, 546 bp, Canis familiaris
tgctcccctccgccggccccccgctcccccggcgtctacccagacccctcttttttacggcggccttccgcggcccccacccccacccttcccccaaggtaaattttacattttcacaacaggtttttgcacatctgcatttattgctaaatgtccgtagatgcgtaccacgccccttccgcgaactgtatttgggatcttgtgtgctctgtcttcgggggttgttactaaaggccgcttggtgaccctgtgccggcctggcctcccgcagccgctcctgctgtctggtgggccccgggcagggtgggccctgcgtgtgtccatttcctttgtcgaatgtcttccgtaccacgtgtgtccatagctatgatccgtcccttggccttaactttggaattctggagattatatgccaacgtgtgtaaaggcttatgaatatggatgacactgggaattttataaattttaaaataaaacccgggatcgggacaaaaaaaaaaaaaaaaaaaaaaaaaaaaaaaaaaaaaaataaaaaaaaaaaaaaaa

SEQ ID NO: 8315 - DNA, 660 bp, Canis familiaris
gtccctcaaggatgaggtcttgaaaatcatgcccgtgcaaaagcagacccgtgctgcccacggaccaggttcaaggcattcgttgccatcggagattacaacggacacgtgggtctgggcgtcaagtgctccaaggaggtagccactgccatccgtggggccatcatcctggccaagctttccattgtccccgtgcgacgaggctactgggggaacaagatcggcaagccccacactgtcccatgcaaggtgactggtcgctgtggttctgtgctggtgcgtctcatccctgcccccagaggcactggcattgtctcggcccctgtgcccacagaagctactgatgatggctggtattgacgactgctatacttcggccaggggctgcactgccacccctggggaactttgcccaggctacttttgaagcgattctttaagaccttccggcttattttcaccccccggaatctctggaaagagactgtgttcaccaagtctccctatcaggaattcactgaccatcttgtaaagacccacaccagagtctccgtgcagaggacccaggctccagctgtggccaccacatagttttatacagaaaaataaaagtgaattaaagcttgttaaaaaaaaaaaaaaaaaaaaaaaaaaaaaaaa

SEQ ID NO: 8316 - DNA, 610 bp, Canis familiaris
gactcctatagccacaggaagctggtggcacaaactgacactgcggtacatggaagctaccctgtgaggtgacccaggtctagaaaaaggaagctgggagtttgcagtgaacagctgacagcaagagcagaccatctgaggcatgaaggcaactttgctacccgcccccataccccaagtatagagaccatgtgcgcttttctaaagacatggccctgacatcagagagacttctcaaacccactatcctgagggtctgccctagagaatcacaccagccggagctccagaactcagtccctgagcccctctgttgggctaggcacttgagcacaaggtggagtgtcacagtgaaaaagacatgcagtactgtgccgcgcggacctgggttcgactcctgcctcttccacataaaattaggtgactttaggaaagttggttaactttgcccctggattatgtatagtttcctcattgtcccaaagggagcagggggtaagtgtggatgagttaatgtgtttgaagtctgctataaatccccaaatccactcttgtaaaaaaaaaaaaaaaaaaaaaaaaaaaaaaaaaaaaaaaaaaaaaaaaaaaaaaa

SEQ ID NO: 8317 - DNA, 569 bp, Canis familiaris
cacccacccaagttcactccatataccatcaggcctagggatggtcccactggtagtgtaggtcacccatgagaagatcctgtactagtcctggaaccagcctgggccatttgggtatggaattcctgggtgctcagtatccagagtatggctctgggtgagcatgtcctcttgtcgcctgaacacttttgcttatgtatgattcaacatggttgaaagagggccagcagggcagtccctggtggtgcagcagtttagcgccgcctgcagcccagggcgtgattcctggggacctaggatcgagtcccacatctggcttcctgtatggagcctgcttctccctctgcctgtgtctctgcccctctctctctgtctctatgaataaacaaaatctgaaagaaaagaaaagaaaagaaaagaaaagaaaagaaaagaaaagaaaagaaaagaaaaggaaagaagaaaaagaaagaaagaaagaagaaaaagaaaaagaaagaaagaaagaaagaaagaagaaagaaagaaagaaagaaagaaagaaagaaagaaagaaagaaagaaagaaa

SEQ ID NO: 8318 - DNA, 665 bp, Canis familiaris
tatgaccattaggcctatttaggtgacactatagaaacaagtttggtacacaaaaaggcaggctggtaccggtccggaattgcccgggatgtcgtagcaggcgccaagatgttgatgcccaagaagaaccgaatcgccatttatgaactccttttcaaggagggggtgatggtggcaaagaaggacgtccacatgcccaaacaccctgaactggccgacaagaatgtgcccaaccttcacgtcatgaaggccatgcagtctctcaaatcccgaggctacgtaaaggaacagtttgcttggagacatttctactggtaccttaccaacgagggtatccagtatctccgtgattacctccacctaccccccgagatcgtgcctgccactctgcgccgcagcagaccggagaccggcaggccacggcccaaaggtctggagggagagcgacctgcaagactgacacgaggggaagctgacagagacacctacagacgaagcgctgtgccccctggtgccgacaagaaagctgaggctggggcagggtcagcaactgagttccagtttagaggcggatttggtcgtggacgtggtcagccacctcagtaaaattggagattgttttgtgttgaataaatctatagccagaaaaacattaaaaaaaaaaa

SEQ ID NO: 8319 - DNA, 611 bp, Canis familiaris
gtttgccgcgactgtctggggagacaggaaagtttccagaactgccagcgctgcctccgaattctccccgagaaacgagaagcaggaacaggagcagccgccctcgcagcagcccgggagccgcgtgggcctggagctatttgcgtcgcggtctgcgggggccccggggacgccgatgacaggccggctcctggcgcttcgcccccgtccgcgccgacgacacccccaggctccccaccgaggaggcccctggcagcgtccgggccagcggtcctgccaccggggaggcccggtccccacaccgggagccgcaggccgcccaccgcccgcacgcgaggccgcagccaggcttgtaccctcttccctgacgggagccagtgactctcggacctgaggatcctttgatttcttttctttaagggagatttatgcgggggcggggggggccgggctcgtgtgcggccaggtgtgcagcggcggccgtgggcacgggaagagcggcctgcggatgccagctttccggggacagggccccgccgtgttagtgcaaataaaagataaagagatgctggtttaaaaaaaaaaaaaaaaaaaaaaaaaaaaaaaaaaaa

SEQ ID NO: 8320 - DNA, 440 bp, Canis familiaris
ctgcaagaccgcactcgcccccccccccgtccaccccccacccctccgcctcggcgagcgctggaagcctgggtgggaccctgccttggcctccaggccctctctccgcgggcatcagagtttatttccgactttctttgctggtcgaccagtgcttggcaagaagctctgctaataccttcgagtgccattctgctttttgaagacgagcgcaccctttcctttcccttctgataccctcagcctttcgggctgggaggggaaaaaaaaaaaatatcaacgtataatacaggaacgcagctccagagaccgcgttgtggttgctagaggagtgagcatcgggaagaacggaattgcatccagtaaattaaatgttttgcagcgttgcctatagaggcgacctcctcccgctaacagatcaaaaaaaaaaaaaaaaaaaa

SEQ ID NO: 8321 - DNA, 391 bp, Canis familiaris
ccatctgatccgtgcgcgctttgcatcctgcacagcatcggcaagatcggaggcgccgcagaaccgcgcctacagtcaagtctgctgtgcggcctctctgtccgagcgcctgcgcgtcagcccggataggatttacatctaactatctacgacatgaacgcggccaacgtgggctggaacggctccactttcgcctgagcgccacgcccgccggacccgcatgcgtcaggccccgctccccgcagccttgtgtccgccccgccctccccccccccagcgaccccacctccgaggcgggaccaataaacggtttggaggccgcaagtgcctcgggctttcaaaaaaaaaaaaaaaaaaaaaaaaaaaaaaaaaaaaaaaaaaaaaaaataaa

SEQ ID NO: 8322 - DNA, 597 bp, Canis familiaris
cagggccagaagctagctgaacagatgtttcagggaattattctttttttccgcaatagttggatttaatctacgggtacgtgggccgaacattttgggtggactgttctaaatagttaatggccggatttgctttttcgtgtttgttgacacttcctccatggcccatttatcgccggcatcccctcaagtggttacctgtccaagactcaggttcagaagacaagaaaccgggagaaagaaaaattaagaggcatgctaaaaataactaattagggtttccatgatttagctttactattgcacctgcttccgttttgtgtgagatgagctcaattgttttcatatcccaaacatgagcttaaacccatcgctgctctttcagcacagctgtgtgtagattttgttctctttatagttcacttctaactcagctggtttttgatttataaatactttagaccatctcttcataatcttcgtctgaaatgagaacagaaaacacaagtatgcaagcttctttcaggtctacaaaaagtgacaatgcctcataaatgatagtacaatttaaaaaaaaaaaaaaaaaaaaaaaaaaaa

SEQ ID NO: 8323 - DNA, 602 bp, Canis familiaris
cctcttgtcgttgttattataaatgtctacttgtttttaagaaaaaccaaccaatgtgttgtagacctatatgtaacctattccttagtctcatattataggtatgttataagaatggatattttacttggctttagaatgttttacacagaaaaataattcttaactgatcaagtccttgctactaaaatgcttgtgtttttcatcatgatgtcgtgtgcttctaaattaataatcattttcgttgtagaaaaatggagtgaatttatattagtcttggaaactaataatagcattgtaaatttatgagatgattttaacagaaaaaaattatagaagaatatagttattttaattgtaatattactaactgtagggtgagaaaggggggtcccgttgtggtgaactatgttatagcttgttactcacagtttctttttgatcattttttcggtctctgaggtgaaacgagttattaattaaaatttgtaaactcacatatgcatattgtatatgtgtagaaatgtaatcacactttgtcttggaattacattaaactgtttggaatcactgtaaaaaaaaaaaaaaaaaaaaaaaaaaaa

SEQ ID NO: 8324 - DNA, 570 bp, Canis familiaris
ctattgtcccttcatatcactcatgttgtagacctcagctccagacttcgatacttaaggttatatggactccgtggtgcaagtagccagtgcttgctacagacaggatgacagaggatgtctgtacaaggttcctacagccacaggctacctgctatttgtccaggctgatttatgatccaaattatctatcgatatgtccttgggtatgatttcttagaggataaccataaaccaagtggaaaaagctagaatggaattctctgatctacatagaccacatttctaagcccctgagttggttctgggcaccagggatccatgagggtgggtggtcacctccttacgtgcatcatacctaatttcattaagtaattaataattccagcatttgccaagccttcccatactcaattttaaaatgaaatgcattttgctatactattaaactggcttaatgtagtatatccttattaactagaatgtaatcaaagcttcaaataaagttaatgtgattgtgaaaaaaaaaaaaaaaaaaaaaaaaaaaaaaaaaaaaaaaaaaaaaaaaaa

SEQ ID NO: 8325 - DNA, 644 bp, Canis familiaris
atctccaagagggatttctccttatctttcttgcagttaatgtgaaggacactctgaatctctaagcttctgaagtgttagaggtgttagaggtatagatggtttagtaaagatgtagtttgtaatgttttatccctcttagcatgtgtttatttttcccctatgtaactcacgaggtgacttatttgttcagctcaagtgatattatacagctatagtatatcattcattagccaaaggaggaagccatctccatgctaacatcagaaatgtttatttaatattgagttgaatatttgactctaacaaccttttctacataccaaacaccagtatcttgagggttcttcaaaattgcacttgtagagggattcacgtatgtcataaatacttaaagatttgacacctagactgtagtatccactatgttggttaattttcttatgaggccccactgatgggaagaacttaaagatgaaatttgagaaaaactgaaaattagattatcaggttctgttaaattgttacatgtatcttgcttaagtttttgttcattaatttatatccactccattacataaagccaatttgggagaaaaaaaaaaaaaaaaaaaaaaaaaaaaaaaaaaaaaaaaaaaaaaaaa

SEQ ID NO: 8326 - DNA, 609 bp, Canis familiaris
ctcgctggcccagtgtttctttatgctttctgctctgttgtttgttctctgctgtgtgtatgtgttggtagaggcaggtctcttccccgggtctgggctcagcccttgggggtggtgggaggcctcatgaagatgccttccagggttttttcccatttgttattagggacccaaggccagctgcttcctgggtctcctgtttcagagaagggagtaagacagggcttgggtgggggtacagaggaaggaagaccatgaaccagaagtgagcaaatgtgaaaagttcctttttgagcctgacgagtcagctaggctctgcagtgctttctggagactgggagtgagtatgtgtgttgacatgtggattgggccaaaagaagctgaggggccaggcactacagaagtcacgagttctcagggcatgctgggggccgaaacagctctagcctgttgccccagcttgagagctgagcaggccccagtctggggtgtgcaggggtctggcaggcagcggctaactccccgcctcttgcattctgtttctagcactatggttggcctggttggggtgagtgccctcccaaacaccagaccacacagtcctccaaa

SEQ ID NO: 8327 - DNA, 453 bp, Canis familiaris
gcactgggcctgctgaaccaaggtctccttggcaagcagcaggggtctgtcccctgaacccattcttggtgcccctggaatttctgggccaggcagccactctctgcaaggtgaaggcccggcaggcgtacgacacagcagacatctgtgagccccctggccctcgggcctgcctgggctggcactgggttgtcatgaggatccagtcatggtggaaggcccctgacatggtgggcagcagggggtggcctttaagatgaccgacacagcaggagtctccagagacagcagacaggtgtacaggggcttggccgcagagctgaggtgggggcagtcgggcagcttggttaaagccacagttaaatactgtcccttcccacatcctgtattctctgtcctgtaattgtgagtaaagttcttgtcaacccaaaaaaaaaaaaaaaaaaaaaaaaa

SEQ ID NO: 8328 - DNA, 606 bp, Canis familiaris
gatctggcattcgtgcggcctctgggacgcccgcaccggccgcttgcttaccgactaccggggccacacggccgagatcctggactttgccctcagcaagatgcctctctggtggtgactacgtcaggagaccaaccaagctaaagtattttgtgtgcagagacctgaccgctaacggctgcagcctctgctttggtgttgaggggtgaagggagaccccaccagcagagtcggtagggcccggggaggaggagggggccgcggactgtgttccaaccccttcagccgacttgccccctccgtcccttctcttaagagacccatcccttggccccccaccccaccctcacccagacctgcgggtccctcagaggggggtcaggcctctttctctttcaccttcatttgctggcgtgagctgcgggggtgtgtgtttgtatgtggggagtaggtgtttgaggttcccgttctttcccttcccaagtctctgggggtggaaaggaggaagagatattagttacagattttaaaaatgtaaataaaatatacttccccagaagaaaaaaaaaaaaaaaaaaaaaaaaaaaaaaaaaaaaaaaaaaaaaa

SEQ ID NO: 8329 - DNA, 647 bp, Canis familiaris
gttatccaaaggcatcccacaccctgggttttccttccaacccttgaaggaaaattgattcacctgtttttgataaggagaagaagtaacgtactcttcgtaggagacaatactggcgattgatgagaagagacaatccatgggagccaggctttcccaagccaatagcagaagacttttccaggggttgactcgaaggttgatgctgcgtttgaagcaatttggggttttactatttcttcaatggatcttcacagttggagtttgacccaaatgcaaagaaagtgacacatgttttgaagatgcacagctggttgaattgttgagctgctgagatgcacaacacagtcatttgaaatgaagctaataagtctttacctaaatctttgtgaattgagctggtttgttttctcctgcatgtgtggtgactgacagtatgagggtcacctgcgtgtcttgctggtcaattcacattattattggacatttgagcatgctgctgagctggtgctttgatcacatgggataacttccacagaaggggaagcactcatgtgcaagaccagtgactgtatatagactatttacttgttatttaataaagagaattggtcagttataaaaaaaaaaaaaaaaaaaaaaaaaaa

SEQ ID NO: 8330 - DNA, 559 bp, Canis familiaris
gataaagatcagagaagccttgatattgatactgctaagtctatgctagctcttctgcttggaaggacatggccattgttttcagtattttaccagtacttggagccatccaagtatcgtgttatgaacacaagatcagtggtacaacgtattagaattcagcagaactgtccatgccgaccttagtaactatgatgaagatggtgcttggcctgttcttctcgatgaatttgttgagtggccaaaaattcgtcaaacatcatagcaagaactaaatgtgaagaaaatgcaaacctttttgcactcacgtgtatacaggctaaggagaccaaaaaatcccaagggtgcattttcattcatatgaaagacttcacatagtacttttttttcctttttttttaaaggaagttttcttgttacatgtgatgggcattgagccacacctcttctgagactgaatattgaagcttttgttttgagttatgtttataacatttatttcagaacaataaagattcagatttgtgaccaaggcccaaaaaaaaaaaaaaaaaaaaaa

SEQ ID NO: 8331 - DNA, 574 bp, Canis familiaris
  misc_feature (326)..(326): n comprises a, c, g, or t, or includes no nucleotide
tttataacctggcaaatcccataatatcatgctccaaatatttaaatatgaagctagatactggaaacttaactgcaatgtggatctttgttcccacatgatttataatacataaagccggatatgcagtttaaataattgcctaccataaaaaatattttgcctgccattttcagaattcttttttgaaggtttctgttgatgttaactgagctattgcagatattttaatttccctaaacgtaaaatttggagtaaatatacatatatatgtcaaccattcagtaaagcttttgtttaattttcagaaggaatcacaataaaancagtatccactcttctgtagttcgtagggtgttaggtcctttaacgtaaagtcacaacttcaaattccactctagctctgtgttaatccctgttattactggtaaagcttcatttgaatatgtaaattcagtttaggctatgtaaaatttttgctaatgtcatcattctgaaaaaaataaatttaccaaatacattccaaaaaaaaaaaaaaaaaaaaaaaaaaaaaaaaaaaaaaaaaaaaaaaagg

SEQ ID NO: 8332 - DNA, 607 bp, Canis familiaris
  misc_feature (146)..(146): n comprises a, c, g, or t, or includes no nucleotide
  misc_feature (269)..(269): n comprises a, c, g, or t, or includes no nucleotide
accgcatgcttgagcctgcagctggaccaagacagatggggttctcagctccagaggctgcccttcccttgtggggcctgtctgctgacattctgcagggcatctccaaggaacaggaaggactctggccagagcctcccatctcnttcgttgtcagtgcgcccagaggcccaggggcctctgcttggatgtcccctgcctgcgtcccacaggacgcgctccctgcctgtgtcccacaggatgcgccccctgtctctttgtatagtctntaattgcttgctctttcccctcctgggcaagggctgagggaggcctcccctccccacgttgggggaccactcccacagtgggttcccgaccgcatccgaaggacctctggggagagaagggacgcccagggacgcctcgtcttggcaagcctgggttggcgctctgaggtggactttctagaggcaattttgtacctttgtggagaaatgtgtcgcctccccccaacccagttcactcttttctcctgttttgtaaaaaataaaaataaacagaataacaataataaggggggaaaggaaacaaaggaaaataatctttgaataccaaaaaaaaaaaa

SEQ ID NO: 8333 - DNA, 609 bp, Canis familiaris
gaggtcttgttttcctgacggcagttagagctctatccgttagttggccacagaggtctatgtgctattgcccagtcagagtcctgcgttacaactcctaggtagccttctgtcggtaggcctgctatgttttctctggttcatcatggagattggggccaagtctgttgagtcgtggtgtctggggaaactccgaggacagagggctaaatccatgaagttttgtggatggcttgatgattcacatgtggatgaccctgttaactactacgttgacaccgctggtgcgccatgtgctgtctcagacagggtgtgctgggcatcaaagtcaagatcatgcttccctgggaccctagtggtaagattggccctaagaagccccttgccagatcatgtgagcattgtggaacccaaggatgagatactgcccaccacccccatctcggaacagaagggtgggaagccagatccgcctgctatgccgcagccagtacccacagcataaatagggtctccttggcagttggatctggaggctggattttactctgtgaagacctttaataaaatatttgagtaaaacacgtggcacaaaaaaaaaaaaaaaaa

SEQ ID NO: 8334 - DNA, 622 bp, Canis familiaris
tgatgtggctttgaagaacttttgcccaataattttctccacccatctcatgaggagagggaacatgctggaggaactgtattgaagcctgccaggaacccaacgagggtggtcgaatccttcccttcaggataattaagaaacccagacccgtgaccgattgggagaatgggctgaatgcaatggagtgtgcattacacttggaaaaagagcgtgaatcagtcactactgggaactgcaacaaactggccactgatattaaatgacccccacttgttgtgacttcattgagactcattacctgaacgagcaggtgaaatccatcaaagaattgggtgaccatgtaaccaacctgcgcaagatgggggctcccgaatctggcatggcagagtatctctttgacaagcacacctgggaaacagtgatagtgagagctaagccttaggctgtcttcccatagccgcagggtgacttccctggtcaccgaggcagtgcatgcatgttggggttacctttaccttttctataagttgtaccgaaacatctacttctttcgtttgtatcattccttcaaataaagtaatttggtaaaaaaaaaaaaaaaaaaaaaaaaaaaaaaaaa

SEQ ID NO: 8335 - DNA, 622 bp, Canis familiaris
caagaagtcagagtgacaggccacgtgagaaggaatataaaggatgggttttaaccacagaccccgtttctgccaatattgtcctggtgaacttcctggaagatggcagcatgtctgtgactggaattatgggccaactgctgtgcagactgttgaaactgtgaacgaaggggacccctggagtgagagagaagctgaaacatttgttcatgtctggagactgcaaggcctacagccctgaggatctggagaagagaaagaacagcctataagaaatggctcgagaagaaccacatccccatcactgagcagggagattcacgaaggactttgtgtgtggctggggttctgacaatagaaccaccctatggtccagaaaattgcagcagtcctaatgagattattctgtcccgtgttcaggatcttattcaaggacatcttgcagcttcccaatgagaggccaagacctatggatgcatcgactgaaataacacttcgtttttattccttcataaaatgttttgaatgttaaatccatgatattacaagatttcagaggccaaaaaaaaaaaaaaaaaaaaaaaaaaaaaaaaaaaaaaaaaaaaaaaaaaaaaaaaaaaaa

SEQ ID NO: 8336 - DNA, 963 bp, Canis familiaris
tcttttctttttcttcttttttttctttttttctttttttttttttttttttttttgtttttttttctttttttgtttttcgggagaggagggagagaggacagagaggaagcggagagcgaagagagagggacataagacggggttgttgttttcctccatttcctcgaccggactttagaaaccccgggtttagggtccgtataaacagagcccgcatttgcatgcttcatacctctgttcattatattcagtcaaccggaaagccattgacttggtattcttcctcttctatggcctcttactaaggggttcttggacgagactttgcagaaatgtggcagactacatggcgtctaccatagggttctacagcgagtcgggcatgcctaccaaacacctctcggacagtgtgtgtgccgtgtgtgggcagcagatctttgtggatgtcagtgaagagggcatcatcgagaacacatataggctatcttgcaatcacgtattccacgagttctgcatccgcggctggtgcattgtgggaaagaagcagacgtgtccctactgcaaagagaaggtagacctcaaaaggatgttcagcaacccctgggagaggcctcacgtcatgtacgggcaactgctggattggcttcgatacttggtagcctggcagcctgtcatcattggcctggtacaaggcatcaactacatccagggcctggaatagtcaggaagaagagcatccacccactatggacctcagggcactctcctgcctgccttccaagacctcctgggtgggaaagactcaaaaggggcacttgggccactcaggaaccttccggctgtgcccgggctggggagggagttgatggagagccagccagtggggctgtcagcagtgggagctttttaaaagaaaactattttgatgaaaaaaaaaaaaaaaaaaaaaaaaaaaaaaaa

SEQ ID NO: 8337 - DNA, 280 bp, Canis familiaris
ttccagtgggggccgtccctcagcctctccacgtggggctgggccctgcctccccctcccccccagctccccacaggcctggagcctgctgggctggactgaggctcaaggtctcccccagctgtcccgccccccaacgtccccactctagggccaggggggaggtgggggaggagttgtgtctcgtcttctgtctccatgtggttttgggtgtttttcttgttgtgtcctggattccgataaaattaaattgcttcagaaaaaaaaaaaaaaaaaaaaa

SEQ ID NO: 8338 - DNA, 616 bp, Canis familiaris
tcttctctgaccatacagagatttattgatgaaatctaccgtgtgactgcagagaaactcatctattaattgtgctgtagaaatggttcagtctgcagcccctggatgagatgtttcagcagactgaagatattgtttatcgttatcacaaggcagcccttcttttggaaggcctcactaagattctccaggaccctgcagatattgaaaatgtacataaatataaaactagtattgaaagaagattgtcagcactctgctgtagcaccgcgacgctgtgagccgcagcaggcttgtcccgcggaccattgctgggccttggggagagaagtttgggatcgaaacttgggttctgtctccccacccccaggaaaccctagttcctcacctggtgactacccaagaacaagcaggacttcaaacaggaaaaacaatcccaaaactacatacttgtaggaaatctgccttattggagacgtcaccccttcccttttctctgtagaagcaggagcaagagtattccacttggctctcagtttgaactccgtaaataaatgtaccttagaaacagtaaaaaaaaaaaaaaaaaaaaaaaaaaaaaaaaaaaaaaaaaaaa

SEQ ID NO: 8339 - DNA, 641 bp, Canis familiaris
  misc_feature (104)..(105): n comprises a, c, g, or t, or includes no nucleotide
  misc_feature (192)..(192): n comprises a, c, g, or t, or includes no nucleotide
tggctgagaaaaggccggcaaacttctaacgtgcctcgcagaaccccagttggcattgtcatcaggatcagaggtatcaatgtgtgtgaagcccacaaggtttnncgaaagggtcgttgcagctttctttcgccttcgcccagaattcttcacatggccacctcttgttaaagactcaacacaggcttcacngttaaacatgctaagggattgttggaaccgctatattagcactgtggggtacccacaacctgaagtcagtgaatgaattgatctacaagcgtggttatggcaagatcaacaagaagcgaattgccctgacagataacacattgattgctcggtctcttggtaaatatggcatcatctgcatggaggatctgattcacgagatctatacccgttggaaaacgtttcaaagaagccaacaactttttatggcccttcaaattatcttctccacgtggcggaatgaagaaaaagaccacccattttgtagaaggtggagatgctggcaacagggaagaccagatcaataggcttattagaaggatgaactaaggtatctaccatgattatttttgtaatctggtcagttaataaatgactactttcaaatggaaaaaaaaaaaaaaaaaaaa

SEQ ID NO: 8340 - DNA, 450 bp, Canis familiaris
gctgcagactggccatagctggcccgcaggacggcagagaccacgtcgtcaataaagcgctgagtgacacccacttggagcagggactcggccacagagcgctgggtcatgttgacgaaggcagactccccgagtgaatagagcagctcctccacgcctgagaaggcgtaaccatgggcctggtacttatagatcctcatgaacttctccatgacctcctccacccacatctgcagtctcaggaagctgatgccgtagtgccaccagaggcggaagaggttcagcaggtaccagtcggtctcctccaggacaaagtgctccccactgaagatggcactcctgcctaccacctctcgccggtgcctcaggcccagctgcttgacgaagtcctgcatgtgcaggctcagggagtggaaggaggcggccccgctctcatagtgctgcttgttg

SEQ ID NO: 8341 - DNA, 657 bp, Canis familiaris
agttgtacccaagagtgtgcagcaagaccaccagtgggttggtctgtgaagatataggtaacctgtgaattcattccacgtttccagaggtttcccaagaccggtcatctctttgtcgaagacatagctagtgtagagtctcctgaatcagtaaagagcccagatcttcgggtaatagctgctctatgaaatacagtaccttgaggccttggatagaagacaaccttctattagaagcacatcttccagccaccaggccaccttgcattaatatcttttgttagacggtatttcaaagtatgcaaattgtagccccctttgtggttgatttttgttgctgtttgttcagggcaaaataaaatgcaagaaattcttttagcatgaaaaagtgcatttaatgagttctggaacttactgcaccgctcctttgacagacatctgtatgccattgacgatattttattagacaggaatttaattaaaggaagtctgtgagccagattcttccccacatatgtgactcatatttggggatttctcacagatttagctccaaattgtgccacgtggcctgcctttaatatgtgaataattctgattttattcccagaacttctttgaagattcaaacccagcagttctttaaaagaaaaaaaa

SEQ ID NO: 8342 - DNA, 702 bp, Canis familiaris
gctatgtacaggcgatgagccacctggcgccagggctcccagagcaccctacacggacctgctgtcggtcatagaggagatgggtaaagagatccggcccacctattgctggcagcaagagcgccatggagcgcctgaagagaggcatcatccattgcccgggccctagtcagagagtgcctggcagagacagagcggaacgcccgcacgtaacaggacgcaattccaccgccgagtctggacctttcctggccactgcagagcacctgcttctccctggccttcaccccgagttgcatttccccacctgggcttcctgtcctgtgtcccctggtgggtgccctccaggaaccagggggcggctctcactccagccgacaacacttgactgggactctttcaagagttagcagcgaggtcactgtgagtcccgcccatgacctgccaacagtgttgatccaactggagcttgctcctttctgtggcccccaccactcagcacttacccaggacttgtcaccacctttcctagactcctcccctagcaaggcctccctaggcctgtcacctccctgccttgtctcctgggccatagcgactcttttttcagtcagtgtcttttgctaaatatgccctttttgtataaataaaagataatttggaaaaaaaaaaaaaaaaaaaaaaaaaaaaaaaaaaaaaaaa

SEQ ID NO: 8343 - DNA, 647 bp, Canis familiaris
tcaagctgctgcttcagaagcgggaagcacctgctccagctaagactaatgtgccagtgggtcgagaggcccaaagggccccccaaaaggaaatgtgccttggagcccgggcccccttgaaaaggccggcccacaggaaaggcgaccagccttttgggaccggactcggccagaggtccagcaagtggttattccacgcccagttttccccttgcttaagtaatggggtttctgacgaagccgaaatttgaagatgacattcacctttaactggggcttgatactagaagattctgaaaatggggcaacgtacttatgaattactaccatgtctgtcacttatgacgaggaaacgccgccatcggtccccagagcccctacagcttcaggcacggagccagcgtcaactacgatgactactgaccaaccacccctcggccctcggcgccccggccgcggaggtgacccactgggctgccttgcaccacgtggcttccgctgggctttactccagcagatcttgcctaccccctttctgcagccaggaaggaagagttaaacaatataaatgcctttgatatttcatgcaagtgcctaacatcgcatttcatttaaaaaatagaaataaaagcagtttgttaaaaaaa

SEQ ID NO: 8344 - DNA, 672 bp, Canis familiaris
catcagtgatttcaaagatcccgactataacggcaccagttgacccggtcgattagtgagattaaaccccccaacctcttcccactggccccccaggaaattacacaactgccatgatgaagatgatgatgaggaagaggaagaggaagaagaataaggaggaaaacccaaactgagcatccattaaacaagtctggcaggactcacaggagcagaggatgggttctagtggtgggtggggagctccatcaaaggtacatctggaaagtttctgaagactttaaaatattttaatcatagagagatacttcttagttttgtttgcactctttgcagatggttcaaattgtaatggagtctgtattgaaagaaagtaagggtaaagctgggctgaactgcatgcagatggctccaacgtggcttgtgacactgtttccttgtcttgtttcatcctcagtatgtattggctacaccagggtggtgaagagtctcagagtggagcaagggtgatgggaagaggtgatcccaaaatgatgttatgttacaaattgtgctcttactccaaagtccatcctgaatttttccgtgcattacacagtattatatatcagtggagaaatatattgttcccattaaaaaaaaaaaaaaaaaaaaaaaaaaaaaaaaaaaaaa

SEQ ID NO: 8345 - DNA, 573 bp, Canis familiaris
  misc_feature (228)..(228): n comprises a, c, g, or t, or includes no nucleotide
acccaagtctgtcctccttgcacagatgcatacactgaggccctgcaagctgcctcctgaggtcacacagcctatagggcacattagagcctggaacccacgcctgcagcatctccccactttgctgctggcccatggcttgcaccctggggcctcatctccctcagtgcactttccttcccccactcctttccccgaggcccctttcagtcacttggactcaggctntggatactcttgtctccatctcccatccctgtcaccagaagcaatccaccccccatacctagagccagcaggttcttttgagtgtgaggctggtgtgggcacctccaagggatccctaccctgccgcttcaccagtcctggggaggctgggactcccccacccccaccccaagcctgggccatagcttacattccactactgggagaagaaagaggctggggcccagagtgtctctatccctgggagccaaagaccccaggggctggtctggggcaggagtggagaggcggtgggcctccttttataaatattatacataagacccaaaaaaaaaaaaaaaaaaa

SEQ ID NO: 8346 - DNA, 835 bp, Canis familiaris
  misc_feature (2)..(2): n comprises a, c, g, or t, or includes no nucleotide
tnagcagcgttggctcgggggaaaaaacgagagaagtaaaacaagtctacatctttttgcccgtttttttttatgcccctttttttcgttattttacgccttcctctggctcacaacctcgacacctggtagtgtcctcagcaatggtatgaagagtgttacagagcatgtccaagctctcaacctgactgttttataacaggattgaatttcaaactgttggtggtctggggggaggggtgccataaatctatgctctactttttcaggagtgcagttcattctgaatctgaaagccacgttttccctaagctatgcacacccacatactgcgactacatggtaaagagggaatggccctagaacactattgagtaggaatcaaggatcatgaggaagaaaagacaggattcactagcacccaactttgcacacgtatcatacttgttgagaacaatgtttgggtctgcgtatcactaaatgaatgcccaagaagtagagatgaattttaacttttaaacttgaaaattaggcactgtctgtgaaattgcacctttttttttttaaaggtagagctgtatgtatggctattagttatgtcattggtttccaaaaaggaaaatgcattttgaatgtctgtgtccccatggttaggtgacagttccttgctgatgctgctttgcctgatgtaaatacagtaaatctcaatctttgactgggaagtgttgaatctcaaatctttgagcactcagtctagtaaagttgttgtcatgtataataaagaactagttgaattaactatgtgaggttaactattaataaattttaacatttt

SEQ ID NO: 8347 - DNA, 538 bp, Canis familiaris
caggagtagcccctgccatccgtgggccatcatcctggccaagctttccacttgtcccccgtgcgatcgaggtctactgtggggaacacagatctggcaagccccacactgtcccatgccaaggtgactggtcgctgtggttctgtgctggtgcgtctcatccctgcccccagaggcactggcattgtctcggcccctgtgccccagaagctactgatgatggctggtattgacgactgctatacttcggccaggggctgcactgccaaccctggggaactttgccacaggctacttttgatgcgatctctaagacctacagctatctcacccctgatctctggaaagagactgtgttcaccacagtctccctatcaggaattcactgaccatcttgtaaagacccacaccagagtctccgtgcagaggacccaggctccagctgtggccaccacatagttttatacaagaaaaataaaagtgaattaaagcttgttaaaaaaaaaaaaaaaaaaaaaaaaaaaaaaaaaaaaaaaaa

SEQ ID NO: 8348 - DNA, 450 bp, Canis familiaris
gccaactggagacgtgaagccggtggtgtccagcacgctctcttgtgtggactttcctgatgcacgctggaggactatacgcctacgatcccagatgcagtgactggttactacctgaaccgtgctggctttgaggcctcggacccacgcataattcggctcatctccctagctgcccagaaattcatctcagatattgccaacgatgccctacagcactgcaaaatgaagggcacagcttctggcagctcccgaagcaagagcaaggaccgcaagtacactctaaccatggaggacttgacccctgccctcagcgaatatggcatcaatgtgaagaagccgcactacttcacctgagccacccaacctaaatgtacttgtctgtccccctgtccccacaccagcctgttttcataataaactttattgtgacaggcagggctggtccct

SEQ ID NO: 8349 - DNA, 579 bp, Canis familiaris
ttccaggcggggaggaacgtcccgtcttcgccgcagatggctgcgcacgattgagctgctgcagcggtcactccccaagattgagcggagtgcctccgaaccctgccttgcaccgcacgcaggctgatgagttgcccgcctgcctactcagcgcagcccgccttgtgccttaggccctgcccccagtcaccagggaaccagtctcagcctgccatgccaaggagccctgcccaccaatcagtgttctgtctctgccctgatactgcctcaggatcccccatacccatcctgggagatggaggtatccccatgtgcttttccagttcctctggaagcagggggcccccaaagaccgagacccctgcttcctccataatttggtttcctcttggctttggggataacttctaaatctgggagctcctctatctccaagctgggctttgtggcagggattccactcagaacctctctggaatttgtgcctgatgtgccttccactggattttggggtccccagcaccccgtgtggatttggggggtcccctctgtgtcttccctaccattcaaggactcccc

SEQ ID NO: 8350 - DNA, 576 bp, Canis familiaris
ttctgttctgagcccttgtgaccagctccaggctgttgcccccttacttcctgtaacttgcgggggttgctgaccttgcttcccggcagttatttccctcgttagaccccatttatgagagtgccctcctactcaacacctcagtcctcctagcctccggagtatctattacttgagccccctcaatagtttaataagaaggtaatcgcaacatagtacctgtcaagccgttattcattaccatctccttaggcgtatattttacgctattacaggcctccggatactatgagacatcttttacaatctccgatggggtatacggatctaccttttttatagccactggatttcacggattacacgtaattattggctctacattcctcatcgtgtgcttcctccgacagctatactaccacttcacatcaaaccaccgcttcggatttgaagccgctgcatgatattgacactttgttgatgtagtctggctattcttgtatgtatctatttattgatgaggatcctaaaaaaaaaaaaaaaaaaaaaaaaaaaaaaaaaaaaaaaaaaaaaaaa

SEQ ID NO: 8351 - DNA, 610 bp, Canis familiaris
gcgccatgctacgagacggtgaagacatggctccaggagaaccttctggctcgtgggcatctttgggctgtgcacggcacctggtacagctcttgggtctgaccttcgctatgaccatgtactgtcaggtggtgaaggcggacacctactgtgcatagtttgcccactgcctgccacctctgccttgccgcccaaggacaccgcccacctggggagatgaccgtgtcccctcctgcctctcctgctgcaggactcagcaccagcccccacccccaccccccacccccggactctcagtcagtcctggggaacaccatgctggaggggatggcccagcgctggcaatataggcgggacggggacaggaagggcttctggcgcttttcatatccccatccccgcatcctccagagagcagtgtttgcgcccctgttggtcagggctattcatgggtgggggtgggggtgggggtgaaaggccacccactggtcctggtgctcaaggtggggctgcagccctgccacccacattccacagcagagccggggcaggctctgggtgcatcttaataaagtgcgtggatgacaaaaaaaaaaaaaaaaaaaaaaaa

SEQ ID NO: 8352 - DNA, 525 bp, Canis familiaris
  misc_feature (1)..(1): n comprises a, c, g, or t, or includes no nucleotide
ntgtatactctcactttacgagattccatcttgtgggattttgagagcatttttggacgtcagcggtgtctgttccactctggccgggccttccctggagactcctgtcccctgtgtggggatgggcctgggtccgggtctgggacgggtccctcccacctggtgccggtgttgccgtgactgagcatgggtctcacattgtttgcttacaatggagactttggatctctgtctcggggggccttctagccgactggaggggcggtgggtcctggctgagcccggatgggcccgcgcagcaccccttcccccccaagctgggctccccggtgctctgactcccagggtagcctgaggcctgccccaggcagaaccagaaccctccatttccaggctgggaaacggccgagggtgcttgagccgaaccacgtgcaggccgttcttcagccatttctaccacgatagcagaatcgaacacattggccaaaataaagttgaaattttaaaaaaaaaaaaaaaaaaaaa

SEQ ID NO: 8353 - DNA, 663 bp, Canis familiaris
ttaaaatcgctaccatacaggacaggagacacgttgacacacagaagggagatatgtgcctagtgtaggttctgcagtgcggccagagtccagtccaccagtgggccatttcccatcgggaacgtgagacagggcagaaccagccacggtccattctgcatggtcacaatagggtccctgtgatcgctcttgtctcgggtcatcctgtatcccctagcatttgtgcttgtacttgtgcttatacggccacccaggagatgggctgggggctgcatcactgctcacggaccccttggagggaccccggcctccctgggggcagtgtgggcactctggcttcctctgggctgcctggggtctcaccagcaggagtgcgggcgggcaggccagtcatcccagcacctcagccccgagccccgggagccctggtctacatgtgctttcactccctcagcctgcaagggtcagatttgccatcaaaacaacgacctctactgttttcttttgtattttgataaacactgaagaagctggagctgttcaactttatcttggggaagttcctcagaactggtttatttggtgtcgtggaacctcttactgctttcaatacacgattagtaatccaaaaaaaaaaaaaaaaaaaaaaaaaaaaaaaaaaaa

SEQ ID NO: 8354 - DNA, 230 bp, Canis familiaris
caccagccccctgtgctggtccaggagagggagggggttctcactacggtaccaaaagatgtaatcacctaggtttacaagtatttttaggactcacattaactcacatttatacagccgaagtgctattttatatgccatcaaatttgcctgtgtactttttttaagggaaagatgttaatattaaacctggtgcttctccctccaaaaaaaaaaaaaaaaaaaaaaaa

SEQ ID NO: 8355 - DNA, 682 bp, Canis familiaris
cactcagggtctaaacctcctgcaatggaacacacgtttcctggccagttcatgacagacttctactataatataggccatcaacactgttaacacttattaggcttcttagaaaatccagggtgcagaacttatttttcttttcttttcttggagtatgtgcagatgttaacattttctagtgtgttgaagtctttttaataaaaagaagtattaaaaagttactacttataaattagtactactcttttctcccctcccattctgatcatgttctcacttcacatttgatagaaggatgatttaagttattatgattccatggtctgttaggttctttttgagtgatgtttccatgttactgtcaacatggttaaaaggtgtaaagggaagtgtaagtggatgcccaatttagctctaaagaaacagctacatttgtcttctattgtaactcatgtggaaaggaccatttcaggtactgtgtgtgctaacctcttcctggacatcttaaagaatccaactaaaaccaagtttaaaactatttcagatgtgcaagtctattgaagccaatattttattttagagatttgtgttgtgtttgacaagtaactctttgtactgcattctgtggctttcaataaaaaaaaaaaacacatgaaaataaaaaaaaaaaaaaaaaaaa

SEQ ID NO: 8356 - DNA, 592 bp, Canis familiaris
actcaccggggattctccaagtctccaccccattgacgtcaatgggagtttgttttggcaccagatatcacgggactttccagaatgtcgtaacaactccgccccattgacgcaaatgggcggtaggcgtgtacggtgggaggtctatagtaagcagagctcgtttagtgaaccgtcagatcgcctggagacgccatccacgctgttttgacctccatagaagacaccgggaccgatccagcctccggactctagcctaggccgcgggacggataacaatttcacacaggaaacagctatgaccattaggcctatttaggtgacactatagaacaagtttgtacaaaaaagcaggctggtaccggtccggaattcccgggatggcgctcggccgggggcagcgcgcccaggaagcggctcaagcggccggcgtggcccgcctgtagcagcgcctcgcagacgcacgccacctgctcgggcgagaagcggaggcccgtgggcggctcggcagcggcctcggggggcgacccggggacgcccggggatcccgggccctccgctcccgccgccgcttcgcccgccccggccccgg

SEQ ID NO: 8357 - DNA, 540 bp, Canis familiaris
agaccatatgtcactctttatatgggggcctcatctgacagtagaaattaagtcttcagtttctgttgagctcaagtccttggctctctgcctatgagtcattgggttcccatggtaaaaggtattcactgtttcacatcacaggtacaggggaaggggtgacccagcacaggaagtgtgggtgacctggtgatcccgagcttcaattccagagtcactttaattactttcagagtctaaagaggactctacagctaaagtcctcccagtataatatttaatttataaaaaagaatcaatatggaaatgtcctagacttatgtataataataatttatgaccaattctatttcttccctatttaagaaggattaccttatctcaccaggaaatggaattttatgggcctttaaaaattttttttacaaacgacattataattgtatcagtatctcaagggaaatatgtactgggctttagaaagggagggggaaagagctagaaattgcagaaaaagccacccgaggaaaggaaaaaaaa

SEQ ID NO: 8358 - DNA, 573 bp, Canis familiaris
gccctgtgggtgtgacccgtcctgggaccgtgtctggggcagggaggtgtctgttgctgctcccaccagctctccctgctctctcccccagacaagcagatcgacctgcgcacggtggacctgaagaagctccgggttagagagctcaagaagattctggacgactggggggagacatgcaaaggctgtgcagagaagtctgactacatacggaagattaatgaactgatgcctaaatatgcccccaaggcagccagttcacggactgacttgtagtctgccccgcccctgctgcccctgagggaaggcagcgcacctgcgccttccccacagccgttttgtaatttattttttaggcgggctcctgaaagtccgtgtgaagcctggagctttcctgacgatgctggctctccagcgcccccctggggggattcactttattctgttgctggttttctctaggacttcaaagtgtgtctgggaattttttattaaaggaagaaaatttctagctgtccttggagaattaaagttaatctgaaataggatttggaccctaaaaaaaaaaaaaaa

SEQ ID NO: 8359 - DNA, 641 bp, Canis familiaris
atggcagtttgtcctaatttataaacttgttcttcatggcctgtgtttatcctgtacctagaaagagtgcagaatgcacacgttttaaaaatttgacacctgcccatatccccgtcttcctatcccctcttgttgattgtggtatctgatcttaaatagctaggctgaaggcacacggttccctccaaaaccactgttgataccactgcaaaaacaagccagcaacaaagacaatgtggagaggttggcttgcttccttctctcctaactgcatgttgaaaaataagcctttattgatcttaaacatctgtcagatgagtcatacattgggttatttttttatatacatgtatacacacaatatttcaaattgaaagcaacatctcaatggattcaaagctattaaatgctgttgtctataacagactaggaaatttataactgtaaaaatgaaacaaatgcacatattgatatttaaaatgcataatgaagaaaacccattggtgttgtgtttttcttgtatgccaataattaagccactactgttggcactgtttggttttctattttaacactgaaggagtgaaagtatttcctatatttatgaatttactatgaaaatcttggcaaaaaaaaaaaaa

SEQ ID NO: 8360 - DNA, 617 bp, Canis familiaris
gtaactattctgcttcaaaagacttggtatctctataaggttaaaaaccaacttttcctttgtttccccccttgtgagattagaacagtggttctgtaatttcactgtaagaattcattaaaaatgcagtttcacagccacactttccatttttatttagtagtaaggcctaggaatcaccatgttaaataccataccaggtggttctgacttaggactctaatttagagcaaaggtaagttagagatttctactcagaccagcaaattcctaactgcctgagcacaagacccataagaatctacagttctggccagagaagagcaggacttaaattttaggccttctgaattaaatttcctgtattccatctaaaccaacttaatttttcatgaggttaaactcagctcctagtgtttaagtgttatacagaacgaaatactattcgcatgaaagttagtactgtcctggaaaaaaaaaaaaaacgtgaaaggtgatccacaattaaaaattagctactcttggggtgcctggctggcttagtaggtagagcatgtgactggatctcagggtcaggagtttaggctccacattgggcatagagtttgcttaattaa

SEQ ID NO: 8361 - DNA, 650 bp, Canis familiaris
gagaaagagcaagagggagaagcaggccccacgcagggagcctgatgcaggactcgactgcaggtctccaggatcacgccctgggccaaaggcaggtgctcaaccactgagccacctgagctgcccagaactaagttattttttatcgttcctctgcctaaaagcctttcatggtttcccatggattcaggataaaatccaacttgttgccatggcctgcagaacctagtgccttactggtctccctttggttgtcggaacctggcaacctctttgccccttgttggctgctcagaatgcacttacccctgcgtcctcctgtggctagcttaggtccacccttcaggcccccgttcaaatgacctatctgtggagcagccttctatctaagattggccttagtatttatatattttttcatggcacttttagcaatctgaaatgttcgtgctgacttctatttgattactcatgttatacctgttttcagtcccacagtgacaggaatcctatttacccctctcattttctgctttttgcactgtacctaagcacagtgagaacgaatggttgggcaagttagggcactccaagatgcacactccatttaccttcattttactgaagaatccagtattttattatgtata

SEQ ID NO: 8362 - DNA, 527 bp, Canis familiaris
cggaccccgaggaggccgcacgctctctggcactgcctgaccgcctgcggacattggacgcggttctcagtcttcctcggggaggaattgcccttggggatgttgtcgtatctaacggttgatttctgacgaccgagaggtgtgagaatgaggtggtttttgttttgtgtttgttttgttttttcctgttggggctttaaatgaaaagtcatgggtcctttacttatttcctgaggtcccgttttccaaagatactgcatttcgtgaaagagcttctcccgaaaccaaggtgttggacgtccccgtctagtatgttctgcgatcaccccttgagaggtgtttttttgtttttttggtttttttttaaccttaaagatttcgagcggttacagagaggttgaggctttatccacaccacaatttgcggtctaaacaaacgtctttcccttaatgtgttatctttagttaaacctaaacaaaataaactttcttttttcactttaaaaaaaaaaaaaaaaaaaaaaaaa

SEQ ID NO: 8363 - DNA, 651 bp, Canis familiaris
gatctgcacaagccacgtgagacccaacccaacagggaccacggagagaccatgaagagcctgctccttctctccattctggctgccttggccgtggcagctttgtgctacgaatctcatgaaagtatggaatcctatgaaattaatcccttcattaacaggagaaatgccaatacattgtatatctccgcaacagagatggagagctaaagcccaggagaggatcagagaaaccaccaagcccgcctatgagctcaaccgggaagcctgtgatgacttcaagctttgcgaacgctacgccatggtttatggatacaatgctgcctacaatcgctatttccggcatctgccgaggaggcacaatagagagttgaaaaaagtgcttcttttctcttccacgagggctggtggcgctggttttggaatcccttaaccagtaagcaattcaatccggaactaacaattaaacacatacaaattgcttatttcttaaatgttcttgtctggctgttgccctccttcctgccccccagatcaataagcagtgaaagtgcaatgtggtgaaaggtcaaaagagaattaagatgtgtgattattattacataataaactcttggatggatactttcaaaaaaaaaaaaaaaaaaaaaa

SEQ ID NO: 8364 - DNA, 622 bp, Canis familiaris
tgaggtgacctccggagatggttcgctactcgctggacccagaaaccttacagatcatgcaagtcgagaggttcaaatcttcgtgttcactgttaagaacacacgtgaaactgcgcaggccatcaagggtatgcatattcgaaaagccaccaagtatctgaaagatgtcactttgcagaagcagtgtgtcccattccgtcgctacaatggtggagttggtaggtgtgcgcaggccaaacagtggggctggacacagggtcggtggcccaagaagagtgctgagtttttactgcacatgcttaaaaatgcggagagtaatgctgaacttaagggtttagatgtagattctctggtcattgagcacatccaggtgaataaagcccccaagatgcgacgtagaacctacagggctcatggccggattaaaccaaaaaaggagttttcccctggccaaccattgagatgattcttactgaaaaagagcagattgttcctaaaccagaagaggaggttgcacagaagaaaaagatatcccagaagaaactgaagaaacaaaacttatggcccgggagtaaattctgcatagaataaatgcaaataaaaataaaaaaaaaaaaaaaaa

SEQ ID NO: 8365 - DNA, 587 bp, Canis familiaris
accgagacaactgactagcatcacagctttgaagatgatgcattttaattgaactaaatcccacaatgctttggtttttcttcatgctgataggtttttatgctttaatcataaagttatattgaaaccgaatacaatacaatctagttgttaattcgtacattgggcactgtgtcactatgcttgacctatctgggccagtagctatagttgtggggctggaagcttagagatacggaggagagaattctcatactcaccatcaatatcttggtcagacctgaactcttcagtctcttcagaaaaactggataagaagataattatgccctgtttagagtttattcttcccaattggcaataccttggccttaagaatttggggagaccatttttggaaagataaatgcccaaattattggaaatttgttacagtggataatataccttattgtataaaattcatatttacctcttccatatgttagagacactgttgcacatgattctacttacgttaattttgtttcaataattaaaacaatggtaaaacttgaaaaaaaaaaaaaaaaaaaaaaaaaaaaaaa

SEQ ID NO: 8366 - DNA, 583 bp, Canis familiaris
ttctcacatgcttctgtttatatggcatttttccagttttactgagagatatattgaaatacatactgtgtaaatttaaggtgtacagaatgatgctttgaattaaatatattgtgaagtgactaccacacacaataggcgtcagcgtaatatccttcttatatatatatatatatatctgtttacaatttctttattgtttttttggccacagcacatagttagttgaacatatgctgtttgggggcagaaattttactgaaggcgttgtataggcccacatcacttcaaaaaccccctcttcctttactactgaaaattacaaaatacagattttaaacaatctgaggttaaaagttatgtactgggcagccctggtggctcagtggtttagcgccgccttcagcccagggcgtgatcctggagacctgggattgagtcccatgtcaggctccctgcatggagcctgcttctccctctgcctatgtctctgcctctcactctttctgtgtgtccctcatgaataaataaataaaatcttaaaaaaacaaaaaaaaaaaaaaaaaaaaaaaaaaaaaaaaaa

SEQ ID NO: 8367 - DNA, 570 bp, Canis familiaris
  misc_feature (315)..(315): n comprises a, c, g, or t, or includes no nucleotide
aaagcctcaagaacatgggcctgctgctctgagcagtgacaacacagcatctctgataggacagctccagaacattgccaagaaggaaaattgtgtccgcagtgtcattgatcagcggatccacctgtttctcaaatgctgtttggtcctcggtgtgcagagatctctcttagacctccctggaggcctcactgtcatcgaagcagaactggcggaactaggcccaaagtttgtcagcctaacgcatcaccatcagaaagtgtttggcccctactacacagagatcctaaaaccctcgtccctccagcccaggcnctggacacagaggtggagtccatctgaatgcaccagctcaaagccctggcccctggatcccaggagagaagctcatcgttctctggggtggctgaccagtgaccgtcagagcaggaagccctcctccctcctgcagctggcacaccagggctgtagcaagcagcgtgtaaatacccgctggcccaaactcccttactaataaacttctgaacccccaaaaaaaaaaaaaaaaaaaaaaaaaaaaaaaaaaaaaaa

SEQ ID NO: 8368 - DNA, 594 bp, Canis familiaris
ctgttgtcctcttggaaatgccttcgcccccaccttgtagcaccatctactggcagaatggcagtatctctgccaaaaccctttgttttaaaaacttgtttaggataattgcatcagatttagaaattttgccatcaaagatctgtgcagactttggttacacgtttacttgtaacgaagatgggctttatgggaatgtagttaacagtccatatcaccattgccccttctacacccagatttgagaaatgtaaactgctacgcatagcttgggcacgtggcccgaaattgctatgacacactaatgagaccagctacgtgtactggtatcttaggtgcaagttgtaaagccaagtatttgtgtattctgcttggttaaccaatgtatatttgtagccctttcatgccatagaattcaagttgttgtttataaaaaaaaccaaaccaaaccatgatataggagaaaattgccttcctggttagaaatatagaatagcatcgtttatggatatcaccaataaagaattccaattctttaaaaaaaaaaaaaaaaaaaaaaaaaaaaaaaaaaaaaaaaaaaaaaaaaaaaaaaaa

SEQ ID NO: 8369 - DNA, 587 bp, Canis familiaris
tactacatacttatgcatttggagagcaatgaaaagagaagagttacagttatttagttgttcaaaaaagcctcagaatccttctctgtctcctgggatcaccagcacacaggggatgtcacttgagcagggccaaccttctagggcttaggaggtctacaacgggaatatggggagtgggagagggggctagagcacggtcttctatacatcctggcacgctggacttcacccaaggaggtcttgcccagaccaggggaccagtataataatctggaaagagccagagcgttttcctcatccaggtgtggctggtcatgaaagggaccaattgttcccaatttgggcttgggacttgggtaacatctcgttcgtccaatctccacctccaagaagtagttcatcccagacacaacctgcttgcgggcgcgcagcactcgcagggcgcggctgtggtaggcgtcgttgctcgcccggttgtactcgcgcacggcgaagtccagcgcctgctgcacgccctcctccccgacgtccgcgtccaccgcgccgcccaccgcgccgggcctgctgcctctccggccggcccc

SEQ ID NO: 8370 - DNA, 660 bp, Canis familiaris
ttggaaatatcctaccagaatggaatcatcattacatcgagtcttctggttgcaaatgcacattcagtgttgctagatgactgtaatgagggtaaagccatgtttatttttgctgaagctcactaactccttgctcccctgctgcccccaataccatgctgacaacaagtctgaacaacagacactgccagcagtatttccctccatttgcctttccatgtgtttccatccagaaggacaggcagttctgctagtctggtcccccgtgctaaggttttaacagagcctttgttgtgaggaacaactgcccagacctcccaagcaagacctgggtgaggtcctgccttactgaactattgagatcactgagcatcgctgggatatgatgcttgatcgcccgtaccagtccttcacgcctatagtattctcattcacctcatcagaaccttcacaccaaatcagtgccaaaaatcaggaaagagttggataaaaacccaaggatttgtatgtggcaagtgagcttaaacttgtttgaacagataacctcagtgatttcaaatctattatttttccagccagccttttactttagcagatctcgtttcagaaacagctacttctttttttaaagtaatgtatttcaaataaaaaaaaaaaaaa

SEQ ID NO: 8371 - DNA, 719 bp, Canis familiaris
  misc_feature (1)..(1): n comprises a, c, g, or t, or includes no nucleotide
  misc_feature (51)..(51): n comprises a, c, g, or t, or includes no nucleotide
ncagagagtgcctaataacctctaacaccaatgtaatttaattccggaacntggagtggaggactccttctggcttaccagctccagcaacaggtcaggagcgaggcctgcctacatcttctattgaattcttacattgttgcacattgtgggggtcaggaagcagttcatcactgcacagtattaataatggcaagttatttcaacagacttatcttccttttctagccttagaaaatctctccttatcatagagcgcttttagttgattccctacaccactaaaatttactgtacaagtgccctaaagagttatttatgaaaaaacttcaagaacttactagatataacaagagagcatagtgaggaagggaatgtctgctgagtctcccagatggcaggttataaatctcagatgcgtaaataacattcagtttgcatcataactggttctgtgcacaaataatttgatgacaataaattgtgtgtttctctctttgttcctgggctaaagaacttgggagttgattaagagtacagagggatccctgggtggtgcagcagtttggcgcctgcctttggcccagggcacgatcctggagacccgggatcgaatcccacatcaggctccaggtgcatggagcctgcttctccctctgcctgtgtctctgcctctctctctctctctgtgactgtcataaaaaaaaaaaaaaaaaaaa

SEQ ID NO: 8372 - DNA, 278 bp, Canis familiaris
agctctattactgactcgctattctaaacttgcatgacctttactatgtttcctctttgaatattcttgaaattttagttggctaaccactggcttattagactggcccaccttttgctcgtctgtatctttgtaaacacagtgatatgccccttaaaattgtgtccacagctggtatatgcaacagtgtggaagttccttatctgacttaattaaatgcttgaaacactgaaaaaaaaaaaaaaaaaaaaaaaaaaaaaaaaaaaaaaaaaaaaaaa

SEQ ID NO: 8373 - DNA, 425 bp, Canis familiaris
  misc_feature (1)..(1): n comprises a, c, g, or t, or includes no nucleotide
ncgcaggctgctcagaagatacccgtgaatttaagaaagattgaccgcccaacatgtatcactagccctgtaccctgaaaagtgaaagggtaaatgtgtttcaagaaccacagcggattctcactggaacacatccaccaagctgaaggcagacaaggctcgcaagaagcttctggctgaaccacggctgaggcccgcagatctaagaccaaggaggcccgcaagcgccgtgaagaacggctccaggccaagaaggaggaaatcatcaagactctgtccaaggaggaagagaccccagaaataaaactccctctcttcttgtctgtacatagtggcctcagcatgaatcagatcagttattcaataaaacaaacctttatctgcccaaaaaaaaaaaaaaaaaaaaaaaaaaaaaaaaaaaaaaa

SEQ ID NO: 8374 - DNA, 629 bp, Canis familiaris
  misc_feature (50)..(50): n comprises a, c, g, or t, or includes no nucleotide
cattctcagtcccctcctcccactttgaagttctgtgtgggaaagtggcntttgcaaggaaccagggcctgactacctattcttggactcatttcctcgtccctcttgatgccatgatgttaatccccatgaatgttgaatctttagggttggttcttatcccgaatctggatattgcaagtgtcgtcattgtgctgatgcgccagatggaaccgttgtttttctggaggttctgttagacccacttccctacccgtgacttcaagaaaataagtctcccacgaccaaaaggccttatgtcactgctggtacctcccatgttctcatcccattatgtttttcctaagtccgggatggtgtttaatatttgggatatattgtttttcttcagaacttgtttaaatacacgcatcttctaaaacctgtaacttagtcaagcccagtattattaagttttatgtttcagccgaatttgggagatatgtgtgtttcagttattttgaagtctatataatgcatatctatctatccatccacccatccatctacatctatccttcatctctctatctatcaacggagatgtgtacccccctaaacaatacatgattttatttaaaaaaaaaaaa

SEQ ID NO: 8375 - DNA, 632 bp, Canis familiaris
ttcagtcctatttgtttatgctttggggtaaagtgtatctgaccaaacactgtatgttttaaaaaaataagtttgaaaaaaataaaataaaaataagtttgaaaaccactgctgcttaaatctgcaaatcagcaaaactcctttttcttttttgtctgagggtcacccacccagccaaccactgatctcatgtgcccactcctgacctcactaatacctcctttctgagatcctgttaccctgaggtctgccctggaacctttcctctggacagtccaggtgtcctgtgtgttttgtttggtttgatgacatttcacaaagggcctgcagaacacccacgcaaattcagttcgttggccaaaaaatgttcagcacccgtatgtaatgtgctgttttctgttttctaggatagcgaagtttccgttttcaatgggaagagtatggaaataaggcagaggggggggcctgggtagttcagtcggttgagtgtctgacttcagctcaggtcctgatactggggtactagaatcaagccccgtgtccggctccctgctcagcagagagtctgcctctctcacccctccccttgctcttattttcaactaccccccaaataaataaataaaatctta

SEQ ID NO: 8376 - DNA, 453 bp, Canis familiaris
ttggacagcactgaacgaggtttgcaatatcctttctgtcagacactaatgccctagctaactagaatgcggaccatttagtgtttctttggatctccacagtgtcttttcattcattgtaggtagttaactggtatttattaacttgatagtaagtgttttattgcttactctacagtgtgtgcatattttatggaggtcccatttgtactatttttgtaaaccaccccaccttaatatccttgaaatgatccaacatatgctccctttcaacacaggaaaatttagttacaaacaggatttatcccatgttaaaattctaaagagtaaaatagaaggtaaattatttgtaatatgctcacagcttttaaacaaatgcctaaatcttcaattctgatatcttataaacagactttgtatttgtcagcctaatgtaattgcttgtgataaaaa

SEQ ID NO: 8377 - DNA, 561 bp, Canis familiaris
ggaggagcaggagcccttgcgcaaacagtttctttctgaagagaacatggccacccacttctctcgactcagcctgcacaatgaccacccttactgcagcccccccatggtattccccccatctctgcccccactcaggagcccgtgctctgagctgcttctctggcgctacccctgggaacctgatccctgaggccctccggctgctgaggctaggggactcccctacccctcactaccctgcaacccaaactggggagatgatggagctctgagtgctggtggacagaaatactgcccaccctccctccccacaacagagaagaccagcattcccactaagggatcagctgttccgtatattctccagaccaggcctctgggccccaggacctaccctcaacagaggaggacactgaatcccacagagcccctggggtgggaggggcagaagggacaggagcatgagaaggggagcactccccccccccctagaaactgaataaagattgctgagccaaaaaaaaaaaaaaaaaaaaaaaaaaaaaaaaaaaaaaaaaa

SEQ ID NO: 8378 - DNA, 508 bp, Canis familiaris
tggcctccatgtgcaccttctctggtctcatccgtgatgattccaggcttcaggttctcaggtctgggctccatactgtcaggtgaaaccccacctacccatcctcaccgcctgccccctgcccttctccacatcctggtggagcctctggcaaccagggatgctcctactcccacagacaaatagcacatccctcagggcaccagctgccttactcttcctggatgctgaggattcgcagcaagatattgtacacatcttgttccatgtagccctgagcggcattcagcagatggttcctgtaggtggagatgatctcttcgtggttcttctgggaatcctgcagctgcagagcaaggtgagcattttctccccgaactgctaagacctcctctgaaagctgctccagcttcttcaacaactccttgatcttggcctccttgtcccggcaagcgccgatgagatgctccactttgtctttgaaccgctcggccgtttcctcaaactg

SEQ ID NO: 8379 - DNA, 397 bp, Canis familiaris
  misc_feature (30)..(31): n comprises a, c, g, or t, or includes no nucleotide
  misc_feature (36)..(37): n comprises a, c, g, or t, or includes no nucleotide
  misc_feature (39)..(39): n comprises a, c, g, or t, or includes no nucleotide
  misc_feature (51)..(51): n comprises a, c, g, or t, or includes no nucleotide
  misc_feature (62)..(62): n comprises a, c, g, or t, or includes no nucleotide
  misc_feature (68)..(69): n comprises a, c, g, or t, or includes no nucleotide
  misc_feature (73)..(73): n comprises a, c, g, or t, or includes no nucleotide
  misc_feature (79)..(79): n comprises a, c, g, or t, or includes no nucleotide
  misc_feature (82)..(82): n comprises a, c, g, or t, or includes no nucleotide
  misc_feature (88)..(88): n comprises a, c, g, or t, or includes no nucleotide
  misc_feature (90)..(90): n comprises a, c, g, or t, or includes no nucleotide
  misc_feature (96)..(96): n comprises a, c, g, or t, or includes no nucleotide
  misc_feature (98)..(98): n comprises a, c, g, or t, or includes no nucleotide
  misc_feature (113)..(113): n comprises a, c, g, or t, or includes no nucleotide
ctggtgtaagaggatatcttgataaagttnnggagnncnccagcaagaaantttgcccaacnccacanncaanagttgntgntggaangnccactngncctgtcttggcgtcnatgttatcagccagcaccaagccctcttgggcaatataaggagccgatggaaagatctcagaacagtcagatgctaagctgaaagagattgtaacacaacttcttggctggatttgaagcttaaactcctgtggatttacatcagatgccagtttggttttgtcgtcacttattctagtaatcagttccatttgtaaaaggattactcttatgctccagatgtacagaaattaccctaaaaataaaggttccatattggttggtgaaaaaaaaaaaaaaaaaaa

SEQ ID NO: 8380 - DNA, 553 bp, Canis familiaris
tattgcacacaggtaacagctatgacccttaggcctattttaggtgacactatagacaagtttgtaccaataagcaggctggtaccgtccggaattcccgggatgggggacacaggcactttggcacagacccagctccacctgatggtgagagctccatcagcccctggccccaccgccacggctcctctcagagaagctattgccaagacctcaagtccttcagaaccagaacagggtggccatcaggatggccacccttccataatcctcctttcctctgctccccagaccttgccatttggaaacaaacatcagatccttgccccaccccttgcttccagaaagggtcttgagcccataccccaagtctgacaccctcctcccctcccgccgcctgccaggacactctagcaggacactggtgctttgccgcataccctactgtgctgcacttctttccccatttttcataaatataaatgtatgtatgtatgtgtaaaaaaaaaaaaaaaaaaaaaaaaaaaaaaaaaaaaaaaaaaaaaaaaaaaaa

SEQ ID NO: 8381 - DNA, 611 bp, Canis familiaris
cgggatggagcctccgcggggagggacaagccaaaggactctgcagcagggatgaaagcttctcgtgggccatcctatttgtgctccctggtccttgggcgtcagcagccaagagatggtggaacattcctcaaggaagcaggtcaagggactagagacatgtggagagcctactctgacatgagagaagccaactacaaagattcagacaaatacttccatgcccgggggaactatgatgctgcacagaggggcccctgggggcgcctgggctgctaaagtgatcagtgacgccagagagaaatctcagagaatcacagatctttttaagtttggagacagcggccatggagcggaggactcgaaggctgaccaggctgccaacgaatggggccggagtggcaaagaccccaaccacttccgacctgctggcctgcctgacaagtactgagcttcatttcagttctgtcctcaagagccggtctatgagccccctaacgggaagaacacttattgagttagagttgctgaattctgtattctttctactcaatagtttagaaggagcacataaaaatgtttaataaatgcttgcaaaattcaaaaaaaaa

SEQ ID NO: 8382 - DNA, 579 bp, Canis familiaris
gaagacaccgggacccgaatcccaggcctccggactctagcctaggccgcgggacggataacaatttcacacaggaaacagctatgaccattaggcctatttaggtgacactatagaacaagtttgtacagaaaagcaggctggtaccggtccggaattcccgggatcacggccagcgccagggccgtggcggcggcggcggcggcggcggcggccagcgccagggccagcgccagggccagcgccagggccagcgccagggccacggccgccgcccgccgggctccgccgagcgccgcgcacgcccgcactcactcccgccaccccacgcacacgcacacccccgccctccccacgccccccacccgggaggggggagagaggcaaaaagtaagagaggaaaaaaaatagcaggaagatggcgcccaccaagcccagctttcagcaggatccttccaggcgagaacggtaacacttttctgtttattgaacctgccgccggcggcggcgccaggctctgcgagcggtcgcacctcctcggctcggcgaatggagtgactcgctgacaaaaaaaaaaaa

SEQ ID NO: 8383 - DNA, 621 bp, Canis familiaris
aactcaacacccccccttttctgccacagaggagtagggttgggcagaccagcctctcacccccaccccctgcgagcccccaccttgctttgtccagacacgtgtatctcgcagattttctaaggaccaccaaacctgaaacccaaataataccctacccaccccataaacccacttaaaccaccaaaaccaccaatacacccaaaaatctataaaaaaaggaattaaaaacctttcacgagaattactatttactttattaacttacggatttattatataaatatatattcacctagcaacatatcctcgccgcctcttgctcataatgaagacatagctgatttgctgccctcctgccagccccttactgatttctctctgttgtctgtcgttgggcatgggtctctggggaccctcctgaggtggagggtgggctgctggcctggctgcctgttagttgatgggttttgctcccttcccctcccccccctttttttgagtttattctgattgattattttttttctcggtttctggataaaccacccttctggggacaggataataaaacatgtaatatttttaagaaggaaaaaaaaaaaaaaaaaaaaaaaaaaa

SEQ ID NO: 8384 - DNA, 675 bp, Canis familiaris
cgtctctactcccaaccaatcatgtctgttcccaggcttgcaccgaggctgccactggatggagggccccctgttattcccctcccataggcctttaggccagactcccaactatgtggctagggctggacacctgccttccctaagcctacctccccaggacagaaatcacagaggggctatgagcccctgctgatttaccttctttgccaatcatgacttgtcgtgtcccttaaatcctaaacacacctctggaatcctttgtggtcaccaaactgttttctctatactctctggccccagcttggaattctaagcccccatggacctgagcctatggctgggattgccctagctggggccccatgcccagcatgcctatcctcccaagcagccctggacagaagggctgccaggcccagtatttgggacaagggagacagaggccatggcgagaatccagctttgacctttattcaagagaccagatgggttgccccaggatctgtcggccagccctgaggccaagcaaggctggaaacccacatctggccctgctttgccctgagctgcagcctcagccccaggatcctgcttgccaccactatagcaggcggaaggggccctgggggattggacgctgctattgattcattaaaaaaaaaaaaaaaataa

SEQ ID NO: 8385 - DNA, 613 bp, Canis familiaris
tgccacctctgcgaaccgtgccttctcgcgctccgaccaccctggcgctgcacatgaagcggcacatgtagcctggacgccccccccgcgcgcgaccgtggcgggtcccacgcgccgggcagcggccccccccaaactgtgactggtatttattgggcccggaggaccgggctgggcacagcgtggccattgagggggcccctccccgcgacgcctacgctgccgccccggcccccatcagagactgaaggcccggtgggagaagaccgcgatcctccttgacgagttttgttttcaaaatggtgccaataattcagtgtcgtcttcccgtccccccatcccaccgggtctacactagaggatcgaggcttgatgccttgtgagaaatacagccttaatttgtactgtcttcgacattttttttataatattgtacatagcaactgtgacatattgtattactgtaaataaggagacacggtgggcattttggctccctggttcagttttttaagactttggttgttgttgtttgtttgtttgttttttaattaaaagaaagttttgcatcttttgaaaaaaaaaaaaaaaaaaaaaaaaaaaaaaaaaaaaa

SEQ ID NO: 8386 - DNA, 608 bp, Canis familiaris
ccgtctctgcagctccacggccagctaaggccatggttctcaaaaagttgaaaaacaaaggccgggccgggcggtgcggcgggtcctcgccgggcagcgggggttcgaggggccgcccctgccgagccagacaggaacgggcgtgtgagcaccggtgggtgtggacgctcccagcgccagcgccctgggcaggagccggcttcctgtcagctccgcccgacgcctgtctctgggcgggtgagaccaggatactccttgcagaagggccagtgcaataaaaataccaggcaggactgttagaaaggtgcagggaagggacgccgggtggctccgcggttgggcgtctgcctcgcccagggcgtgaccggggggccccgggatcgagtcccgcctcgggtcccgggaccccgcgggcgtctcctgctccctctgcctgggcctcggcttctctctgtgtctcaggaataaatacaatctttaagaaaatggaaaggtacagggttgcctgactggctcgctcagaagagcacgcaactgttgatcctggggtcgtgcgtttgagacctatgttgggtgtagagttgacctaaataaaaaaaaaaaaaaaa

SEQ ID NO: 8387 - DNA, 609 bp, Canis familiaris
aagagccagcatccctggggcacggtgatcagagttattgggctgaagtctttctcgcttcaaggggttctctcctgattcgggggcctcccaacggatggggagatcactcacctctgcccacttccccccatagctgcctgaaaatcctcagcgctcaagcccatttttccagtaggaaaacatctcctgctgtccacctgcaaaggagcttaccctttgccttggccttcgggccatatctgtttagagtcctttttcctaagatgtgagttcctcacagcggactgtacacgtcccaaaagttcacttctgtttttccatgagtgctgtgtccactttcccctgtctccgcctgctcgtcatctctgagtgtgtgcctgggactgaggtggcacatgtgtgtgcgtgtatgtgtgcgtgaaatcacaagtgacatgtaccagccttttctctgttgaaactgatcccaacagtgacagaatttcacagatctacttcagtagatcttcatatagatcattgttagatatttaacattttttgtataatggaaatcaaaaatgaaacatgtatttccaaaagatgaaaattaaaggaattttcata

SEQ ID NO: 8388 - DNA, 123 bp, Canis familiaris
ccaataaccatacctgacttttctggttttactaccatagcctttttgtattagtgaaagaaattttaacctgtagagaaataaagtttcactttgacataaaaaaaaaaaaaaaaaaaaaaa

SEQ ID NO: 8389 - DNA, 655 bp, Canis familiaris
tatgggggcctgttctccaccatcgactgtggcctgtgcgcctcggggcaaagaagatccctgggattccactaccagcggagcattgactggggctttctgctgcccgcagtggcccattggccatggtgggctcaggcaatagatggggggcatcctcttggctctcatagagggtttggcatcctccttactcgctatactgcccagcagttccgcaatgcacccccgttcttggaggaccccagccagctaccccctaaggagggtaccccagccccaggctatcccagctatcagcagtaccactaaggaagtgactgtctgtcatcaccaccgtgggagctcctcctccgttccctccccgatgatctacctcgaagggagggctggctcccagttggccctgggaccctccagagagggcctctactctgttcccttgtcccagggcagggggtggggcaccccagctgctctgacggatgggtccccttctctctcagggcaccccaaccccaaattcacatgtaacaagttctcatcccagtcccctttcctggcgccctgatgagtatttaaagcccaatttgaaatgcccaaaaaaaaaaaaaaaaaaaaaaaaaaaaaaaaaaaaaaaaaaaaaaaaaaaaaa

SEQ ID NO: 8390 - DNA, 630 bp, Canis familiaris
aggtaaaatagtgagaatggaaaacaggaatggtgagagcccaggagagtttcagtagttctagtttgatttctctgttcatcgtattacatgggataatgatagcccctattaattgggcagttgtgatgattaagttacataaatgtctagcacagcgcctggaccagagtttgtttcaagggtataattcatttcatcccaattattcaacaaatatttactgaatttagggacgcctgggtggttcagcggttgagcgtctgccttcggctcagggcatgatcctggagtcccaggatcaagtcctgcgttgggtttcctgtgaggagcctgcttctccttctgcctgtggctccgcctctctgtgtcgctcatgaactaaaaaaaaaaaaaaaaaaaaaaaaaaaatttattgaacttggtgtttttgccaggcactgttttaagagctgcagaggtgatccctgggtggctcagcgctctggcgcctgccttcggcctggggtgtggttctggagtcctgggattgagtcccacatcgggcttcctgcatggagcctgcttatgtctttgcctctctctctctctgtctctcatgaataaataaaatcttaaaaaaaaaaaaaa

SEQ ID NO: 8391 - DNA, 589 bp, Canis familiaris
tggcaaccatatagtagacacattctttgtggtatctttggtgaaaaaaaaagtaagtatacatacccccgacagtatatatttggtttagtaatgagaatattgacctctcacggtgaataacacttctcaagtggttttcaggggcagccaattccccagagtacataaagcatttgaggctataatacctgggcccagacaggagttgggccttgatatatgccaccctccctcttttcaccagtacatactagaattaccaaaacactgaagtactatggtaaagaattgaatttctggggaactacaggagcctcagcagcctaagactagaatcttcgtttttgttttggatattatggtcatcccaatttattttttcctactgacatttcaagggaggacatttaccagaaaaatttaaaccctgtatcaatgagtcatacatatcttctgataagtgtatatatgcatatataaaaatctccatttcccatttaataccaaattagcttgtttaccatttccaaaaaaaaaaaaaaaaaaaaaaaaaaaaaaaaaaaaaaaaaaaaaaaaaaaaaaaaaa

SEQ ID NO: 8392 - DNA, 687 bp, Canis familiaris
atttcctaaccacatgcattggtatctaagaaatacttcataatggtatttttcgatttgtggttcagatgacttctagctgaaagcagacatggatatctactcactgatttgtcttctgcctaggggttaaaggacaatgtccaggggaatctcttcaaagtgattaccaaggatgacacacactattacatccaggccagcagcaaggctgagcgagctgagtggattgaagctatccaaaagttaacgtgacgagggaacatgttccggaaggaacagaaccaggattcctccctcctacctggatggtacagacaagacttcctggagaactgggattgcctgttaagacttcttagcttctttgtaatattgtatgtatggccttctctgagactggagttccattagatcacaatgtggcagtggtgctatttccttcctcaccttcaacagcctggaaacgctagaacagctgtaagacgtcagtgtcttgactttcatccattttcacagctagccatccctttggcaccaaagtaggttttcctgtcgtaacactaactagccaatattgtaatactcaataaaacactagtctcatgttggctctgaaatgctgtcaaaaagctaacttctctggaattaataaaaactgacatgtttctaaaaaaaaaaaaaaaa

SEQ ID NO: 8393 - DNA, 572 bp, Canis familiaris
cggacacgtgcaatctcgagcctggccagcctgcggctcaagtccaagcagcactcgtcgttcggctacggcggcctgcagggcccggccacgggcctcaacgcgtgcccagtacaacagctgaccgccccgccaggccccagcgggctgccagcggccggctcaggcgcccgggcggggcggggcggggcggcgcggaggacctgcagccgcgcccagcgccccccgcgccccccgcgcccgcgccccccgcgcccgcgccgccctctcctccccacctccccacctccgggctggttgtgtgtttgcttttccggaccccactctgccctcccaaacgggacgaaacaaacaaaaagacgtcggagaaaagtgctgcggaaaaaaaataaaaaaaaaataaaaacaaaaacaaaaaaaaacaaaacggatgagttgcaatttccctcgggatggcgcgggtggtgtgcgtgttcgctccctcgggcccggcgggcggttgcgcggaggggacgcggcgcgggaggccggcggtccggggaggacgccctggcagcccgcgttcccgccgc

SEQ ID NO: 8394 - DNA, 439 bp, Canis familiaris
  misc_feature (57)..(57): n comprises a, c, g, or t, or includes no nucleotide
ccagtgtcacctgaacgaggccaacgagtacactgtgtccaattcagatggactatnccgtcccttgccttgctttggagagaacacttggctcgaggaagcaagcattcaagccttcattctcttgcacgctgaccaaaaacgccattatatgctctacaagaatttcacagccctgatacctgggacaacagtggagattttacacggagactccaaaaatatcatccaactgattatcaatgcatacaatagcatccggtctaaagtggagctgtctgtctgggatcagcctgaggatcttaacctcttcttcactgctacctgccaggacggtgtgtcctaacatggccagaggaagtgcgaaggcctgaaaattggggacacggcgaccttcgaggtggcggcggaggcccggggctgcccgggcggcccagac

SEQ ID NO: 8395 - DNA, 633 bp, Canis familiaris
gtaaattgcaacttttaaagaataattggttaacttaatatatttgcttttgtctcaccggcacttagaggaaatttgaaccagttggaaaaagatttttttttttgtttccattctaagaaacacttgcagctcttttagtattcactgagtcttcctgtttttcctgtaccaggtcatggtgattttggttattttaattgttttcttaaaacccatttgaaacctgaagatttctgcaggctgtgtaagcatgtttacctgttggcttgctttgtgtgtctgttaaatgaatgtcatatgtaaatgctaaaataaatggacagtgtctccgaactgaataactacagtgacttgatgctctaaaacagtgtaggacttaataatagatggtttctaatccttggaattgtgattgtgacccatgagtggaggaactttcagtgctaaagctgataatgtgtgtagccaggagagtacctttttttttttctttttttttgtaaccactgtcttaatggcaaaataattatggtaaaaaaaaaagtctcgtgtttattattccttaagaactctgtgttatattaccatggacgcctaataaagcacaatgtggttgtttcaaaaaaaaaa

SEQ ID NO: 8396 - DNA, 692 bp, Canis familiaris
acgtgacatctcactagtcgagtctctggtggctttgatatggatattactcacttggatggccacaaaggtacatatttcccgggataagatcacaagaccaggagccacagctatggaagaaaggagaagggctccccaactttgacaacaacaacatcaagggctctttgataatcacttttgatgtggattttccaaaagaacagttaacagaggaagcaagagaaggtatcaaacagcttctgaaccaaggatcagtgcagaaggtatacaatggactgcaaggatattaagagtgaataaaattggactttgtttaaaataagtgaatcagcgatatttatatctacaagggtttttttgtgtttttgttcttactttcaatatgcaagtttggcttaatttgtttctcctaatgatcgtcatgagatgaataagagggcttaagaatttgtccatttgtgttgagaaaagaatgaccagcaaaaggtttaataatacctctccctttggggatttaaagtctggtgctgctgcctgagtttcaagaattaaagctgcaagaggactccaggagcaaaagaaacacaatataaggggtcggagttaattgttagccatttcattcaaaataccaactggagaagtctgtttttaaatacattttgttgtcatttttaaaaaaaaaa

SEQ ID NO: 8397 - DNA, 634 bp, Canis familiaris
  misc_feature (59)..(59): n comprises a, c, g, or t, or includes no nucleotide
  misc_feature (137)..(137): n comprises a, c, g, or t, or includes no nucleotide
ccctgcatgctgagagggggcagaggtgagtgcatgtaaaacccagccacagcagcaanttcagaatgaatgaaagaggaaggaagatcaggtttggattgcattcagatgtacaaatttgatcacaactaaatacnaaagcctcaatttaagcaggagcccaaaggtgtagtgaacaggtgtcctcgtttaccaactcagccatctgcactaagtcagcagaatcccacttccaattggaaaattggattgcagtcttcccaaagttttgaagaagcctcagcaatgagccaatgagctctttccacatccctgggtggcctgccagctgatcgattttagatgccagcctgtgcctagcaaaagccaggttggattttctgcccagcatttgctagtgaaaggaaaagaaacatcaaggtgatttctttggggtccttgtgtcgatcttccagagggaagtgcaaagctttcaaaccagcccagcaagggactttttccactggtctggcttttttaggctggattaataaaccctggtttctttttcagctcaggtatatttttcatttgctgatgactgtagaaagcctcctgctcacatctgtattataataaatgcattataaatgag

SEQ ID NO: 8398 - DNA, 380 bp, Canis familiaris
ctgcacacccctgggtgcctcccccgagagggcctgccccctcctggccctcccgcacggcgaccggcactgcagaggacaccagatccctcgctctgctgaaggatctctgtctccatgtgtgtgtataaatataggtatagagatatatatatgatagagatctatttttattctgaaattctgtgagaaaaaaaataaaaactgaatgagaagagcaaatggtactgatttgcctcggggtgcccaagactggtggttggtaataggaagagccccaagtgcatttcggcttgcagcgttcctccggaggaagcctcggggggctgggccaccttgctggcggtttgaaataaaggtctggaataaaaaaaaaaaaa

SEQ ID NO: 8399 - DNA, 580 bp, Canis familiaris
agacatcatacttgtctcaagttgtggcagagggcttatcacgagtttaaccagggttagctaccaagagtgtggactgtccttgagcctgtattcctggtctccctctctaagcaacaggcaggagacgaaccggggtggactagtatacaaggagcgcacctgtcagcgagcaaaaggtctctgattcttagctggagtctgcctgttgaactgtggtgcagccctgatgtctactacaaggctacagagggcattggggcctgtcagctaggtcccagcaccatcccaaaaccccacttctcatcgctgttgacttgccaactaccagttaaccctaggtttcaccaacccttgccacagctaaccttttcttcatggttactcaggggtttttttttttaaaaaaaacccagctggtcagcatggggtattcaaaaaagaaaccaaaaataatttatggggtagtaaaatgcaagaccatgttccagaagcccaacaagactgggatggtctacgctttagttatttagcacgctccaccacaagttcaaattttttttttttttttttttttttt

SEQ ID NO: 8400 - DNA, 604 bp, Canis familiaris
tcagagggaccaagagtgcagcaaacagtgtgggattccctgtttcattgcactgtggcttggatgatttgatcgactggtcaagccccggctgaggcaagtgaaagctggaggcacagatgccacctggcatgagctaaccaggggtatgatgggcatgggactcttccccattcaagattttccttactgttcctcaagggtgggtccaatgggaaccacttgccaaaaggtctctggtcccacagggtgccctattggggatttgagtagccattggactatgtgcttgcatcaggctaggccttgtggtgttattctaaacacctctgctcagagcagctcagtgcctgagggactgctgggccaccttgcccagtagactctcaaggtggccaatgatgagcacccatacctgtgcaaccaaccctttgccaaacctcagcccctctaggtggggtggggactgatgggccctaacacaactgctgtcataaccagggtgaggaaagcagtggggtccatgggaacttgggacccaaggagaatgaagtatccgttgttttgttctgatctaatcaggaaacatcaaaacatattttgc

SEQ ID NO: 8401 - DNA, 462 bp, Canis familiaris
gctctataaaacaggctaattgacagtagataaaacctcaataccactaataggaggacttggaggttcaaagattagggctgtacagggggttttttgctgatacaatggaacaaacatttgtgtaggatgacagttcatggagactcatttagttaagttgacttgttgagaaggttgaatctcatttcctttaagtctcagaatacaacctcacactccctagtaagctaggtactaaaacacaaagaaattttccttttcttttttctttgatcaggttgtttgtttcaattggcagaacatattggaaaatggtgctggttataagcaaatgtaaaattttaatttaaaaggaaaacagtaaagatgattactccaggtatagacttacctttagccctaaagatttgctataacttattttaaaggttactaattttttttttttttttttttttt

SEQ ID NO: 8402 - DNA, 650 bp, Canis familiaris
acacttagggccacaaagactgcacacaggagacacgctgccagcaggtagcttttgaggtgccttcctgcattacttgtaacagtacaatggttgaaggcccaagagggttaggctggagcccagttggcccaagatcatgtttcagcacaatatattatattcagtacagggaagcatttcactatgagatatgcacaagctaaaaccagggaaaaatacctgcataagggtcccacaagtcaaccaaagttgacagatggaaatgaacctcatcacctgaccctggtcaaaaaaaaaaaaaaaaaattaagtcctgtgtttagatgtacacatctggctcctcacagagcaggacaggaggccctttagagactaaagactagctttatgataaagactttctcaatagatcctggttcagataaattctggtgctctggggtacccagggaggcactgcggaactgctccagccaaaggccctgggcgagtcccaggtgaccagggtacgtgacccgctacgggcaccgggctaggtgccagcaacacccacagccagagacacagccacacacacacacacacacacacacacacactagttatttatttatttattaatttttttttattttaatttttttttt

SEQ ID NO: 8403 - DNA, 516 bp, Canis familiaris
tctcaacggactctcttgctaccaaataatagtttggttgctaaatttgggtctactctcatgtttcctactgtctggctgggtttgatgtcctcaaaatgttcctagtaacttggttttggagtaaggttcctatttaacgcctcaatggaaaacatgctcatgtggacgtttggtatcaccatatctcttaacagaaaacagttttccttcaactgggtaacaccacagctgttacagcctcaaaaagctagagacaccaagatactgggtctcattgtttctatatcttagacaatgaagagagggggatgagttaggggccaactggttcaaacttgactaggagacagagtaagaccacaacagggcctccaacccccaccctgcagagtgctgaagcctgatgccctttggttaggataagaggtagagaccagaggttaggtttggagggtgccaattcctatttatactgctcaactttttttttttttttttttttttttttttttt

SEQ ID NO: 8404 - DNA, 615 bp, Canis familiaris
ccaagactaggcctgacgtgtggaaccttacaacggggactcaaattgtcttctcgagttcagcctggcctacttgggatagctataacgtttgcccccctgatacagttgtagactcaaagctgttgccgagagaccctaaccgacgcatcttaggaggtgaaggatggagagcgctggcccttctgaggggcaggtctctgggacggaggcccctgttgtgagcagtgaaaaatcagctctagcaatttttagcggtgtgattagcagttcaattgggaaatgtagatgtaacacaggactaagtgctctacctggagttatttgcccccctgtagcgtcgatgttccatctcgggcactaggccggtaattacctatctagtgcacacccagcctcttaagtgtagtaacaatcagtttttgtgcctgtaagaaccatttcccgttgtggtggaagctctgttgtttttgtataccctgttgtttcagttgtttccttttcaataggcccgggtgatttaacagctatgttatttagcctttatttttattttttttttttttttttttatttttttttttttttttttattattttttttttttttttttt

SEQ ID NO: 8405 - DNA, 561 bp, Canis familiaris
gagcgttgatcaacctctctgaccacaccgggtagtgccgcaacagcaacaatttgatcaagtactacagagtgtggactcccggctactgcctgcacctgaatcttagaactgcactaagaccacttatttcgtgacctgttatcaagtattagaagggtaggaacttaagcaactggtggccgtacaccaagtcgctgacaagccaggcaaaggcgacctactacactttatacagctccaacaactgtgcctcggacaaccatacctgctggctggaggccaagatctccacgcagttcagaccacggccatacaacaacacatacaggttgacggcctgcgtgctgcgttttgtcttggagaaagggagacacagagggactggggggagagcctgcccaggggagaggctgtggaagaacgggcacccacctaggggctagaggcagggcaggccggcctaccagctagcctgccactcttgggctcgggcggcgcgcgggcggcacggcagccacggtggtgcggcgcgcgggcggccggtgcggtgcggggcgg

SEQ ID NO: 8406 - DNA, 586 bp, Canis familiaris
tagtgcacaggactgagcagaaggtgctcacctcacccaggagctgccagggacccagttctgtgaccagagctcgagccctggcagctccccgtctccaacggacactgggatgggccactcttgagattagagattgtatccccaggattaaccctatagattagcaggatctgattggtactcagtacaggtaccatgaccaggcagaaagctaaagggacacagaacactacatatttggttgggtcctgagtgggacacacggggacaagggtgtgagataaaggactgtagtccaagttagttatgtcatcagagaagtttgtgccaatactctcagccactgtagctatttgctatagctctcttgcatggattaggtagaacagtccaccgttgacaagctttgtgcctaaagccattgggtgtggcgtaaaaagatggagccgagttggttctcataatcagaaggattgccaacgggggagggggagagtgagggttagtatttctgtataaaaagaaaccagagatttatcaggttgttaccaaactattatttcatgtgtcacatcttcttctt

SEQ ID NO: 8407 - DNA, 630 bp, Canis familiaris
gtcagagctcttcaacattcctgcgcagtacaagcttgctcataaaagtgctcactgaaaggtgatctggttgctgcaccccagctacagctgagtgcacacctcaaggatgcagggtgtcagaacggtgtgagtccaagctacaaggtatattttactaggagagaccactggtgttagagcttatccaaagaataatattagctgtaatgggcacctcagagtactcttctcaacgaattagttgtagtattttaggcgatgagtcctgcaggggctccagctgctacaaagtcagagacaccaactgtgactagagcaacaggctctggtttgagaggttgttccaagtgacatagacatcgccggggccagggtgttcaagaactaacccatgttctggaagaagttagacagaggttctgggtgctgggtactaggtagtctccctctggttgcctcatccagtagtctcaaggttgagtaagacaacttctactctggctagtctcaaagttcgtatatgtgtagctcgctgaagttcaatgttgatgctgataaggcaaatagattatttggttgctaaaaattcaatttttttttttttttttttttttttttttttttttt

SEQ ID NO: 8408 - DNA, 154 bp, Canis familiaris
atgctgtggttgccccacagcccagacaggcctcccacaggcctgccgtttgctcactgtttccgtgcccaaccataaaccacaacccctctaggagcagtggcacccagcagtttagcttaatttgcctaagtaaaacttttttttttttttt

SEQ ID NO: 8409 - DNA, 596 bp, Canis familiaris
ctgtcctgtttacatccttggtaccaagtgggaacgggagcatctgttaaactcagaacagcacggactgcatgtgtaactggttagttgaaacgtttaaccacagaagcctagggtgccacacaaacatgcactgttataacacatttggattctgtagaggctcttgattggtcaaagttagcataagctttgttataacaggaaatgcctgtccacacagtgtttctaggtatactcttgtagttggatgttgtgatgacagattaacacacagtatatgcaaattccaacaacacaggcctggtctgactctgacaaattgacactctcggcctaggtgttagaaaccttgttgtctttgttgacgttctttgcatcttactcaaccaaagcaattacaagcctgcctacacagaatactaggaaattagaggacatagcaataaagtctgtggaaatgacagaaaagctgttaattaagtagttcagggttttcagttcagattggatagttaactggagagtcaactgggacttaaattattctgataaaagcaaaacataaatattttatttttaaacctaacagaatt

SEQ ID NO: 8410 - DNA, 510 bp, Canis familiaris
cacgggatttacgcagacgggggttggcgccgcacaggtcgccgcggggccgctggaggggccggtgggggttgcggtgcaggctgtagcactggaggccacgcaggttgccacggggccaggcggggacccctggtggtcggcgggcggagctgcgggcgcccacccagcggtgcgaggcagcggccgtgcagcacccccctccgtgggggcaggagtgtgcgcaaacccacggcttcctcctggagttggcttcgtagcaactactgagctctctggaagacaaaggaaaaacgtgcccagtcctcagaccaaacggatcaaataggtcgcaactttctgcctgtgcctgtttatgaggtttgttgtttttttttttgtttgttttgttttgttttgttttgtgtttggttggtgggtgggttggtttgtttgtttggtttgtgtgtgtgtgtgtttgttttgtttgttttctgtgggtttgtttttgtttgttgttgttttttttat

SEQ ID NO: 8411 - DNA, 594 bp, Canis familiaris
ccgaacagccaggaggacaccagcccaactgctaccagtaacactaccagcagaaacgaggcctcaaaggtcttgaccagaggtcacacccggggttggtgacccagttacacaggatagtccagctctaggttcttagtcttcaaatctaggccagctgattagactgcgtgttaggcaggcacttggcggaactggaccactaggagcaaacccactaccacagcagccagaccaactaccagaactagaacctgcagatatcctagcggcgtggtgggcacaacatagcctcaggccacagcctgcaaagctcctgcgaggcggagaaatccggggcgcagtacatcgcctaactcgccgtggtgtaccaggtcggtgcgcccgccggggggctgcaacggaatcagcaacgcgcaggcaagggaggccaacccccacgcccaggcctgcggcgactacatctacctccagcggttgcgggtgagtgggccccgcgacgctgcagccgctcccagcccgccccacggacactgccccgttgcccccgcccccggccaccacctgttttattttccgaaattccgccagttt

SEQ ID NO: 8412 - DNA, 689 bp, Canis familiaris
gggatgccgtgtagggagcgatcttgatctactggtgcataggtggttgttctgaccgtcgactagcgcaaacaacaccgggagcgcagcaggcttatacgcctgcacacagcgcacctctgggccccccgcccttcccggcccgtatttgcgcgctgtcagggcatcttggccttgcttggaatagactatatacggtaacgagagcgacgaggaggccgctttcgccctgaaccattgggagcatccataggcttgccagacctactaggagaattcctgcatttgaaagcccgttgccaactgacagaagctgtggtgcgtgcaggtcgcctcagcggtgcacagtgtgacaagttaacaataagggaaggcgttgtaacctctatctttaacaaagtggaataccactaagtacctaacctatttgcatactgttgtttaccagtctccctgaggtactcctttcctgacctctttctctgggtgtagcgtgggcagtccacagctggccgcttgtgacgaggccaagggttgggactcttgaacctcctctcataaggaggaacacgccgagcggctaggtgttggcgcttatcacacctgcacctccgaatccgcattatattgattagaaagattttaacaatccattatttctaaatggtctgactttttttttttttttt

SEQ ID NO: 8413 - DNA, 611 bp, Canis familiaris
  misc_feature (562)..(562): n comprises a, c, g, or t, or includes no nucleotide
gaaaaccggagcagaaatccatagtctgctcctctgggtctcagtgaacaggaggacggcaggtcgagcccttgctgtgcactctgcgaggccagtccgcccgtgtgcgcaacctgttccaggtcttgttggcgtgcactgtgggctgcgaggcaacaggcaccggccaggtcactcagctattgttctgcgagtgcctgtacacggagcactgcgggggcttggcagtgagcactctgaacagctcctctggttaggtaggaggctagtgctacagggtagagttgtgcaaggttactgccaagttggtccacttgtactttagtccctagtggttatagaagcccactacccctcagcaggggttgggggacttgttggcattgggacgcaaagcagttagaaaaatgggatgatgacagggacccccaggtgtcagcacctgcctgtggggtgggctttgaggggtggggtgggttgcaaaacaatccataagttggttctatggacaaaaagactgtgtttagaaaactaaataagaatttttctttttagaaccctntgctcagagcaggactagttcagcaactttttctaggtggattattttt

SEQ ID NO: 8414 - DNA, 676 bp, Canis familiaris
ttaaggcttgcggcccagctccaggtagcccagcgccgtagcccagcggcccaccccggggggcccgtccacgctagacactgggtacacgactgtgccaaggagcaattgtgctgtggtgcctctcaggcacagctctacgaagccagttcctgagagacagcccctgccacccccgggcaaggtccggtgttgcggggccgaggcagcgccagcgtcccactcacctgcaaggtggactgcctgggccccagaggccggttggctgcacctgggccccgtggttgtgctcaaaccttggtttcggaactctgtgcgcaaaacagttacaggtcccgactggtccctctttcccactgacctcacctgcccctgctcggccaccgcaccgggcaggcagtccagcaggggacagctcccccgccgcccctccccctcccactcccctcagggagcaacctacacctcgactgcaggcacccccttgcaatagaatgcgaggggacccgaggggggtggagatctaagcactgaggaaccctggtcgcggcctccctgaggatccaaaacaccaagttaaactctttagtatcagattagtccaaacccgtagttttgctgctttaatttgagtaaaataagaaaccatttttttttttttttttttttttttttt

SEQ ID NO: 8415 - DNA, 621 bp, Canis familiaris
tgtagtgtccctggactgctgccttcccactcgacggagtccgccgcttcaactaatccgtcgctgtcgccctgaatcccattcctcctgtaggccttgtgtcctttgctgccgtacctcctgcagtgttaacgaccgcacccgtggcagtgctgggcggggcagtgatttagccggcaatcctacacatcctactaccggaaatgactaccctctagttgtttagttgtagtttaaccctgcctattgtttaggtcctttgtaaggtgcagttgtccaattgagcaagcaaaaagccccaagtccctgtatttatggtcatacagctaatacatagctgctaggggaaaaataataaaaatccatttgtcgacacaaaaaggattagtatttcgagaaaaaattttttttttttttttttgccaggaaaaacacttatctccaaatttggaaaaatttaagaaactatacaggacttgaagtgtaaaaattgttccactaaaaattaaagattattttgaaatcttcaagtaaaaaaccttttttgacttccttcggcctgctcccgaattatttggacaatttattaattttttttttttttttttttttttttttttt

SEQ ID NO: 8416 - DNA, 574 bp, Canis familiaris
tggattttagattgttcaaggacagaaacaacactatattccaagtaaaacgatcgatataattactaggtggtcagatgtttttgaaattgcgtacaagccgaaaatgtcaatttagcctataaactctagcataaatcttagctgtgtcacacaaaaaagtgattaacatgccaaatttttagttcgttgaccaacattagcaattaaggagtcgcagccgctatgagtgagcctcagtgttggacttctgcagctgcaaggtgaagagggctcctatctcccgcttgtcaaagtatcaactgagagttcaagcctcaagacaagagcagtcgtgcatctccgtgctagtacaagaattagctaaaaaaggtagggttggtttcgatttagaaatggttgtggcaaatagtattggtaggtttgcgtcaacaagcaagatctatcgggggcatatcagcatataataaatgccagaattctcagaaattttgaaattggtaaaacacaaggaagatgtaaggacatgttaagctaacagttagttattttgaattttttttttttttttttt

SEQ ID NO: 8417 - DNA, 626 bp, Canis familiaris
aggagaggacctgcaatccaaccagcggcagcactgcgacactgccctccttgtagacaccatccctagcaaggggaggcccgtgtgggaccccagttgcaccggggggccttagtggtagtgcagtgcaaggtgtcctgccccatagacttggttaactgtgtaggcagactgtctctgcttggccggtcggagcaggtggagcggtcaccagagcaggtgctgcatccggagcaggtcgccaccaacactgtccagggggcccccccttggcggggtggggagcagaaggggccagagagcaactagggcatggtccaacacagccagtcacagaccgccgtttgctggccctcccggttacactctgctactgcacagagcctccacccttgtgggcaccactcctacatgtgggcaaagggcctgggctccgtgtgccccctgacaggggctctccttgggtgggagttgcgagccgggctcccctggggtggggaggctccaggggcacaaggcccaccctcccggtgccagagtccagaatggctgccgggtcccaataaattttcactccacccgtacgccccatttcttgctgttgtgttgtgtttggtttttttttt

SEQ ID NO: 8418 - DNA, 639 bp, Canis familiaris
acgggaaccggtggtttagctgagctcagtttagtaagctgctccattgttaactacaactgctttcaaacagtttatctgtcttataaaagaaaattttatccaagaaaagtataattcctataggattcagtatggattttaatcccaaacccagataaaacaatagaactgttaaatataactcctacttctataactctacatcatctataacttacttcatcattttgaccagggcctcaaaagttctcaatttgctaaactaaataccaactttccctttaggagcagtttatcaacttcaagttagattttagataatttacaatgcactctggtatatttctaaattaattatatattcagcaagcatctttcattgcgtctagaatacaggataagattagaaaaattagttgaaaattaaacaacctttaaaaactggattccataaagattttctaaagattcaaaaacagttgtgcacaataaaatttagccctgtctcaggcaaatatgacaacaaatctcacactctaacaaaataatatagcaatataatagtaagcttgtaatagatttttagccaagttatttagtaaacttgagacttttttttttttttttttttttttt

SEQ ID NO: 8419 - DNA, 658 bp, Canis familiaris
cccaaaggcccactgataaagctgcaccactatacatgtactgcgctaatattatggttgactgcgttctaaaaaaagctgatttgtgtggttggctgttagagtttaggcgaagtctacagcgcaacagcccagggcctttgctgttactgaacaaagcagcagtaacggctaccctacagccgccaccccctgctcaattgcccaacaacaaaaccaaacccagctgttccccggggtagtagttgactgggtgggtcagtggtgggtttctggtctgtgtggaactgggtttgtcttctctgagtattccccctaacagctggcgtccctgaagaaaactagcattcacaccacagcccgagactgaaaatcagttgaacataggtaggagagctggaaccccacaaacagtacttgtgcaaaccagtctatagaaacttatgaactcatttcaactcaaaaaaaaaaaaacaaactgtaaaataaataaataaagtttgtgtgtgtgtgtgtgcgcaccccccttgctgggggtgcttatatgggtgtggtgttgccgtcagccagtgctgcagtgctggtaccagggtactcgtccagttcctttggctgtcccaattcctcagtgcctccctggctaaccatttcaacccaa

SEQ ID NO: 8420 - DNA, 555 bp, Canis familiaris
ctacttctcggtgctgatatagctcacacagtcgaggctgctggcgcactccgggcagcaggtgcgctagctgtcgatcctggtagcagtgacgcggctggagcaggcagccaggtagttggtgcgcctggtgcagtggagctactccttggcgcagaacttcgcactgaaagggtgctacaaacgctccaacctcttcccctcaatcaacactcggcgccaagagcgcaacacagtccacatctaggccacccactgcagacagcacttcatccgggatgtcaactccaacatccctcgccgctcgccccagctgctagtggctccgcacaggtaggtcctgcacagctcaggcagctagttgtcgcccaaacaatgcgtctaggccctctaccgaagtgggctccaaataagacctctgctggaccattccccaccagaccctccctctcagggcacctgacctgggcgggcttattttgaggacacccaaaagcaccctttttttttttttttttttttttttttttttttttttttttttttttttttttt

SEQ ID NO: 8421 - DNA, 688 bp, Canis familiaris
gcgccacacgggcattggcgaggccccccaactggtttagttgctgtgccacttctctagggtcactacccgcaggtccagggtgtctcagtgccagctgtgctgtgcagcctggcagcacttgcgctgcttggccacctacaccacaaccaccactcactgcccatgagtagcctgctccaccaccaaccctgactgcacagtaggccacacacccaacacctagtacaactccccagtcccctgcttgggcacagtccccttggctctgggattgaacagtggcccggtaagtgttctgccagggggagttaccctgcagagagtccaggggcaacctggggccacacagaacaacttcaagttttctggggattatttagtgaggagttatcggggtgctccatcctctggacagaattctgatccctactaatgctagtctggaacacagacacagaccagaaagccgaacagttctcgttaaaccttttactctaggcaaaaagcattaactgctcctctccagtaagttctgcttttacagtccatttgttatcgttggcagaaatatgacaagcctttaaactaaatgggagttctgactaacaaaaggcatcggcagagagaatctcagttcctctagtatccaaagacacagattgattttttaggaagtttttttttt

SEQ ID NO: 8422 - DNA, 592 bp, Canis familiaris
ccatggccgcggggtcggtattcctaaactcttctggtttctgcatagtcctaatggccataaatggagtctcatatgttcttgaaagatcttttttgctggcaggatccggaccggttaacccgggtactttgacagatggctaagtatctgacctgaccctcttgtaggcgtcctgacgaagagagcggcagtagaattactgctaggccttagtaaagtttgttgaaaggtaagcggtactcccaaaaaagaaggaggatataaagaggcttatatagccttccagggcaaggaggcattccttctataatgggttgttttgttaagtgttcaaattgttaggaaaggtagctgtatacacaatcaaattttccaggttgtcctttctagtaagttggtgagcaagctaaaaaaatgtccgcaggtgggtgtttagttttcagcttacaacaatatctcagttttaattcaacggtaaaataaaaactgatgtatttgcaaaacaaacttctagattattaattatttattttgcaagcctcgttacaagcttatttgtataattctctagcagccttttttttttttt

SEQ ID NO: 8423 - DNA, 399 bp, Canis familiaris
cttttggttcagctaatatttgatccagtatgtggtctaataacttgcgtaatagctctgcactgatttggagttgaatcttaaaaacaaactgcaaagaagcataaaacaacagcaatttagatcgcacactaaactaatagagccaagcacccagtaagagctttccatatatatgtatatatatatatatatagtgtgtgtatataactgatcatcagtcgtagaaaaaaagaacagcaggtaattgaataaaacctttaatcctgaatcagactgagttcataagattaggcaatggtctgatgactatctgactgagatttaaagaaaactgaatagagaaaactaatagactgcaatcccttaccaattatttttgttatctatgtaaactaa

SEQ ID NO: 8424 - DNA, 597 bp, Canis familiaris
tatacaatcctctaacaggatgaagatattatccaggccacagtataaattgaaagattgtttgtgcaaaagagtatttgttaataaagaacctctttaagataaccagtcctttcaaagtttttgagaactaacatagcaggatgttttgaataacatgagggttgagaagtattaaaggagtttttttcagatctcaaagtgtttcaaggataaaagggggagccagggaggcactgaaggaattgagacctcacgggactattacactgggaccagtgtacgtgccctgaaccgctcactgagaggtgacctcaagtgtaacacacacacccacagacccaccccctgcaagctcttgcacacgcccacacacacacattatttatttatttacaaataaagtgtttgtgtgatctctctcctggaggtggttggatcggtgggtgtgggttgtgctgtcacctagcatggctgggtgcccttagagtggcacttaccctggacaccttgtactattccagtgccttggctgtagcaattaggtcagtgcctcactggctcccatttatttacaattttttttttttttttttt

SEQ ID NO: 8425 - DNA, 512 bp, Canis familiaris
cacaggtgcaaagtgtaattttcaacaggagcaaaagctaaccctttccaagacaaagcccgttgtgagaaggattcagaaaggaataaggaaagagaaagaaaaatttgacatatagttataggttgataagctcagagaaagttatgtcctagatttagggatggaaaactccaactgaaagccctattgagtcaggtatcaaagcagatatttgatagaaaaagaactactgtgatggtcctgttgtgtaataaacatgaatactctgaatttgggtaaaattgttaaagagaaacaaatttttttactgttaaaaaaagaaaagaaaacaatttgaacaaatccacttggtaagtttataaaagttaggtaaaaacttggggggttcgcaagaattttattagttccctttgtcaattctgttttacgactgcagaacagtccttttatttctaaaattgtgtcagattttttttttttttttttttttttttttttttttttttttt

SEQ ID NO: 8426 - DNA, 148 bp, Canis familiaris
atattgatcaattggattaaaataacagttgaagagattttaactcctagtaaaagtccgcagctgtgaacaaattgagggaattaaatagaaagtaggattttatcttaaatctcaaaaaacaatttgtctatttagagggaaacat

SEQ ID NO: 8427 - DNA, 606 bp, Canis familiaris
agttcctcaatggtagagtactcaacggaggcctggttagaggtcagacaaaggaactgaattaaattttttagtacatacagtttaccactgtgaagatctaggagacatgctgctctggtacagctagaactcaaacacaccgcctctcaggccggaggcctcccgagaacaaggaggcgctgtaagacaagaagaaaggttttaagcaccataggaacaaacagacctactgagaattctagtgaatgggtttcgtctcaacacatgggacttcgtctcaccatagtttagcaagacacaaaccagaagccgtttatgcgggaccaaaaacggttttaaagtagatatgagagaaaagatagatttcgaaacaatatggagcctcctcgtgccttgtagataaaacataaataaataatatatagctcaaggtgttgaataagactgtgtttagttgttaagaccattgagacgcgagaggggtgagatccctgtgccaccagcgggctgctgtggtcgcagtcacaggaaaggttttacaagcagatcctatgatttctatctttggtacactttttttttttttttttttttttttttttt

SEQ ID NO: 8428 - DNA, 529 bp, Canis familiaris
ccgcttgtactttaagcgttccctgaaggttggtacaaccagtatgactggaatcctactcaggtacagcagcctgctaatgccaggcacttttacagtacttagactggcaaaccacggtgtcgggagcttaggggtgctgcatgttcctagcctgtaactacctattacccaaacagcagaactcctcctccctagtacctacagagatgaaacagttctgactgcgtaacctggaaaatttatgaaagatttaaaactgaaacatctctcaaatactacctcacgagtaaaaaattaatttgcgaaaattaaccaaacacagaactgcagaattagcagtgtacctataaatgaaaatattgcaacaccccccaaaaaaaaaggcactagttaaaaacagaaagactaggtttagattgtgaggttataattatctaaactgaaatgaacagattagactggttaaaaacctttttttaattttgtaggtcaggtgcaaaaacaaagagttatgtttcaggttttt

SEQ ID NO: 8429 - DNA, 236 bp, Canis familiaris
gagacagcacagacaccagcaaacagggggctctgcacctgcacagccaggccccctcgggtggcaggttgggtgctgggacacccacgggcagctggggcgcggaccctgggctgcccctggtagggcaaccagtaggggggggaaggggggtagcgaccagaacgagcgcccctggtaggggaggcccaaacaacaaaatatcttatttctaacacctccttcttttttttttt

SEQ ID NO: 8430 - DNA, 618 bp, Canis familiaris
ctagaccatagttgatttgtctggcacaaaatccttcacttcagcaattttatagttagttcccacataggcacaaaatttttcgagtcttagagttgtttgcatcatgtaattcagataacactgagatttataaatcaaattattaattgatgtaaatgaggtcacctgtagaccacaaaacagtatggctagaagggtatttttgtatattagggctactacaacttaacatccaaaactgaaacttccagttgtggtttcagtgctggagtatggcctaattctggttaaggggtgtcaccattcagtggcccagcctttagggctagattcagagagcacccaacatcctgaaagatgactaggtccagtactaccaaaactggaagcaaagtttattttcaagccaaacctagcttctcactataagtggatatgtgtaaaactatattgagaacctaaaggacaacatgtttttcatattgttcaatttttatatagattcttatcatcctaagcatccttttacttaggaataacaactaataataaattatattacattattatttcaaaattttatcaaaaattttctcctttttttttttttttttt

SEQ ID NO: 8431 - DNA, 605 bp, Canis familiaris
actttgtgagttatagaggactgaaagtactgtgcacctcgttgaaaccagattacagggtgccaacagcatagtagatgaacagtaatgtgtcaagtagtggaggtagcctcttttgtgttccatcgaacccactctttgtagcacgagcaaattaaatatttgtacaacctcaaagtttcacaggttgaggttgcttttgaggctaatgtttataaactgctcttcttgatcctttaggtaaactatgttgtgttggctacactgttcccagtgtgttatggattgcatctctgtaaaggagtcaactaagtagagtgagtgggaccacactaaccttgatcatgataaagaaacctgatagttgatactgctgaactattacaacttgccttcctgaagttacaagatcgttgtaacctgggacagacaaatccagatctcaattgtgctctaaaatcatataggctatttcataaggtttgtacacggttttaggattcagttgtactttcatttccatctgtggtttgagctacgtccatgagtcaaccattttaaatttatagatatgatttaattttattttgaaaacatagtttttt

SEQ ID NO: 8432 - DNA, 552 bp, Canis familiaris
agagctgttattgatgcctaggcgcagatcggtgtggccgaccccctggtgtgtatcacgagggaacgaggtgctggtcgtggatcgtaggcaagcacctctgctgactcgacccccagtgatgttaaagtggtgggttgcgaaaaataaggcctgctaggcacacactaaccagcggttaaaggcacaacggaacagtttcctctccagctcacaggccacggagtggaactcccggcgggcttggaccacacgctcgttggcgacagggatgagagaacacactttgtcgcgcacctgtgccagctgcaggcagcagaagttggaagaccataaccaccgcagcaaacacaacaacaacaccactgtgaactgcagtactaagacaagcaggggggagacgcagccgcaggagtgacccggcgtcacctggtggcaacggccggccacgccctcgcacacgaccgccagcgccgcctcctagaccccggcaaccacctggacatgctggagtcagtcggtgttgaacaaaaacgccagctgggagacgtg

SEQ ID NO: 8433 - DNA, 656 bp, Canis familiaris
gactcctaacgctgccggcctctcctgagtcctaagggctgctcctccaccgcagaccgggccgactcacttttcgggttgctagcggacccctctttctgaaatgcaggctgctcaatcgcccactcgtgccccaagctgcaccagcggccctggcatgaactacctcgcctgaggaggactctcgggagagcgtggaggggccagtggtgccggctgcggctgccgcctcccctgcttccactgcctctgcagcctccacagccacaacctccggggtgcccgtggacttttggacgcgagaggtggtgccctgagggtcagagtcggcgctggccggggagtaagctgcagcaggcccgctgggtccgggttccggggtgagttgacgccagcgtgagggccgtgagggtagcacgccctttgggtaacaggtgccgggcccagtccgcaggccaccagcctccaggggtccgcttcgtggtggcacctagcagtccagcgctcgagccttgcggtctggtcggccacctccagccagctcccggtctctcacgaccaccaagaacagacaccagccccagcagaggaaattttcttttctctatttcttgaactgtctgcattttttttttttttttttttttttttttttt

SEQ ID NO: 8434 - DNA, 101 bp, Canis familiaris
gtaaagggacattcctctattaacacacctgatcatttgtgaaaggcaaataagggagtccttgtgaaagggcactggagacacagccgcgtgttcctgga

SEQ ID NO: 8435 - DNA, 471 bp, Canis familiaris
atattatctaatatgcagatatagctgaaaatataaggccatcctagagagttataaaagccagcctaaaactgttaacaagaaagttggaaacagaagtagaattcagtgcataagctgtataagattaaacccatatcgaattaaaggtgatttatatatatatataacaagtctatatagagagagagagagagatatatatatatatagatatgatatatagtctctagtatatagacatcgtaactgatttgcaaaagaaattaaaactgttggttaccttattatcgtgatacctacaacagatgaacgatgggagaatggaccaaattcgatttgactttcaactttaacctacatgcacgagagaattacccagaataatcaggatttgcaactaaagttatagatttaactgaaatggcatagattttaaaaagcattagactactaacagtttttttattt

SEQ ID NO: 8436 - DNA, 535 bp, Canis familiaris
  misc_feature (125)..(125): n comprises a, c, g, or t, or includes no nucleotide
ggtgctgtaggtcacataccccctggtaaggagcgtcagggcctagtaatgcttggccaatatgcgtccatctgataagcaaggtgctaaaagctgttgctaaaggccagggcaaccccttaccnagggctgttgtggactacaaagtgtcactcctgtacctcaaagccttcagcactcaggagctgccctccaatactgtcccccctgtggtagatcaccaggcctagtactatgccccctacagccactaccccaaccacgactcccaagaggataggtggtgatttgtcttagttgccctggccatgggaggatagtgcaaaacaaggttgcctaaaatcaccaaaacccagcatcctcctggacacacaaccccacccagccaccaaaacaatcaccctccccctcctctgtaccaaggtcaggaggtttaggtttccctgcggagactctgctcttgaacagatcacaacatttattttgaaaaaaaaagatttttttttttttttttttttttttttttttttttttt

SEQ ID NO: 8437 - DNA, 610 bp, Canis familiaris
tatctgtagtatgtatgccgctgcacacagaggttctcacaaagccttttgctctgtgccacgtcccaacgagaggccttgacagcatgtgctggtgtggctcttggcttgacactctggctgtttgacttgcagcaccagatgaattttaactggcccacttgtcacagattggaccctgcaacaatacactgaactgctgaggtgcaactcaactagttgactactactcattgttttcacaaccttcaaccaacaaaccagaagaaccagactacaggaggtcacagaaaaatcatcacacaaaccatagagggctgatgggaggtgagtactggtcagtgggatgctgtcatcaagggcgggttcccccactccagcctcctcagagcttggcgggcttgaaacctctgcaccccaagccactgaaaacacttttaatcatcatcactggtggctacagggaggcactgaggaagtgctacagccaaaggcactgtgagagtacccgggtaacagggtacgtgatcccctaagggcacccagctaggtgccagcaccacccacagccacagacacagccacagagagagagaaacactagttattt

SEQ ID NO: 8438 - DNA, 569 bp, Canis familiaris
gctcagcagttgagcatctgccttcggctcggggcatgatcctgggtttccaggatcgagtcccacggtgggctccctgcatggaacctgcttctccctctgcctgtgtctctgcctctctctctctgtgtgtctctcatgaataaataaataaaatcttttaaaaaaatacaggtttttaccagtagcacttagttttgttttggttcttctgccactttccactcttattttatttgtgaatctttttgatcgaccagaagtacatagaccttgggattccctctgcgagtcttgggaaaccccaggctcaagtttgtgtttttaccttgtctttcttccagttttccattcaagcaactgttatctgtaggctgggactgtcatgtttctagagcagtgctgtccaatagaagtataatataagctctgtaagtcatttaaatttgccagtagccgcattaaaaacgtaaaaagaaacaagtgaaattaactttaatgtattttacttaacccaatacacctaaaatataatttcaacatgtaatcaatattaaaaaatattctat

SEQ ID NO: 8439 - DNA, 601 bp, Canis familiaris
atagatagatagatagatagatgttaggttttttttttaagtgaacacaaggcttttagctgaatggacaagcccatgtgagtgttggtcacgtgggcccttcactcacccttggtgccttttgttccttccttgagatgccagccagcaacaagcatgaaagctcagtggctgccgttgttttaattcttacacactactcgagtttctttcaccaaaattgaaaacaggggcctcatattgaggacaccaccccaaatgaccccttaatatgccctccttctcaataagtcccagccaaacgtgggtggtcttgtgcatccctcctcattatgagcacacccttgtgctccacattccggacaggtcatagactaagtgcagacacaagacacacaccagtcagtgaggtccagggcagtatgtggtaaatgccagagcaactggccatgagcaggaaccagaggacattggaggaagaagagcagggaggtgtgcagaaacccaggatacttcgtgggggaggtaggattgcaaatgaacggggagttgcattttaataaacagagatggggggaaggcccctttggataaaaaaaaa

SEQ ID NO: 8440 - DNA, 549 bp, Canis familiaris
cctgacaacagagtttcgtggtttgaacttcagaagcatattcacttttgtagcccattgctcagggcaggggatctcagccaggatgtgcaatagaatgcagatagactgtggccttctcgccactgtgtgcttgtagtgatcccccggtcctgcgctacacctgtcctgcctcctgaagtcctgctcttcctccttgctttgatgcgactggggaggatggtacgggctggggccacaggagggtgtgaatgttctggacaacagggagaatgcaaggaggacagccgcactgccactctgctgccacactacagtatttctgcctggagccctttgccctgtccctcctcctccgggaggtgctgtagacgccgagggaaagaatttgctccaggccaggagcatgaattactactgttcaatttctctcctacttgaccttggtaaactgaaatgttgggggtgaagagaaacatatcactattttttcttttttatctggtaaataattaaaagaaaaaacccgaaaaaaaaaaaaaaaaaaaa

SEQ ID NO: 8441 - DNA, 572 bp, Canis familiaris
tgtcaacaggaggaagagttagtgcagtcaaggctgatttgggtaaatagttctcactaatcctgtgtgcacagaagtgggagaaataatttgcccttagccgaagagttgagaaacatctggcgtttaattggttggggtcaaataagtcagaggagtaactattaagccaacagttgaagatgactgaagaatattatttacataatacgtctggatgaagttatagtttctgttaacaacctgggggtataatttcaaagcaatactggggaatatatttcatagttcattaccttagtagaagttgtaaggttattctcatctccttgttatgaagatttaacttcaaaatgaatagaatctataatgagttgtctaaatgggcatattaatgggttcctatcgaaccgctttgagccaggaactggaatttaatggctatatggtgtcaaatttatacatcacttcatgtttgaaatgacacacctgttaaaaccagcctttgctaaggccatatatgtaccacactcaacctgtttcaaataaagttttccttcttactttttaaa

SEQ ID NO: 8442 - DNA, 386 bp, Canis familiaris
ggggaggggccagactagacacggcagacgggcccagtaaaattgtcaccaactctgcttcttactctgtttaaaatttctgctcttgaaagtatgagcgttcacatagtcattgtgaagattgttgggtcgtttcgtttttattctcctactctgaggactgagctctgggtggcgttggatatgtggtggtaggtagacagactcgatcattttgaactccataactcatgggtgcattctggtttttcttcggtatcgcagattatcccactgttgaataaaattataaatatgttaataccagctttttcccataaaataaccaatgttacatcgaaaaaaaaaaaaaaaaaaaaaaaaaaaaaaaaaaaaaaaaaaaaaaa

SEQ ID NO: 8443 - DNA, 618 bp, Canis familiaris
tagtctcttttcttgaaaggattattgactctctttgctactacataaaagaaagttattcattatacttatcatatactttatgttaacataaaagaagcctgcttgctgatttttataaaatgtactcttagagcataaatcataaggtaaggtaaatttcatacaaatctttttttctgaggaaactcccattttatatgtcaaattaaattagaaaaatgagcagtgttttcaattttcatttacattttgctgtattattaagacttgtaaataaatgtattgggtttttcagaaaatactgagctttcattagagtatgtgagtgcagaatttcttacatggtaaagactttgaagtatattaaaaaactggattcatagctcattataatagataccagaagtaagaagaatgttaattatattcatgaaatatatatggctgtttctgtatatatgaagaagtagacacctctgccccttctttaaaaatgtatctcaaatttcttaaactagataaaacaatatgtttaggtcacaatttcatctgtcaaagcaagtttatttaaaatacatattgtgaattggaaacttgaaaaaaaaaaaaaaaaaa

SEQ ID NO: 8444 - DNA, 595 bp, Canis familiaris
aagaaggaaggtctgaatcgtccttcacaactggctcatagacttgcagagaagtcctgcaggaatctccgacaagccctacttatgtgtgaagcctgcagagtacacactatccttttcactgctgatcaagaaagtccctgaacagattgggaggtgtatctgagggagactgccaatgctatagtcagtgagcagactccacaaaggctccttgaagttcgtggaagactgtgatggagcttctgaactcattgtattcctcctgaaataataatgaagggccttgctatcagaactttgtgcataattgtgatggacacgctgaaaggggaagtggcccagatggcagcttactatgcacatcgtctacagctgggtagcaaagccatttatcatttggaagcatttgtggccaaatttatggcactttataagaagttcatggaggatggattagaaggcatgatgttttgacatcttgacgtccatctacccttaattcttcctaatatttctcagtatcagcatttacgttcagtttatacttggaagagctgcaggtcaaataaactaactttacttagtaaaaaaa

SEQ ID NO: 8445 - DNA, 645 bp, Canis familiaris
cgccggcataccttcagaggctgagccaagaggccgacctctcctcctggctgagccgatggttccctttagaccccagccaagtctgtcgtggccctgaaagcgcccatcaaggtggagttggtagctgggtaaacctacagatggtgtgtgtgtgggcgcagcaagaagcagcccgttctgtgatggctcccacttcttccaacgcactggcctctccccactcaagttcaaggcccaggagacccgagtaatggccctctgtacctgcaaggccacccagaagcctccgtactgcgatggtacacacagaagtgagcgggtgcagaaggcagaactgggctccccgctctgagaggctggctgctgcccagccccaggcctctgacaggtaccccatttgtggggaaggagatgggagtgctgagccccagaagggtccacccagggatcccagtacacactgctggcttgtgaagggcttgctcccaatacctgaggagtctcgggcagccaggaacatgcccccagtttcactgcctgtcagtgaagatggcattaaacactttgcccacccccaaaaaaaaaaaaaaaaaaaaaaaaaaaaaaaaaaaaaaaaaaaaaaaaaaaaaaaaaaaaaaaaaa

SEQ ID NO: 8446 - DNA, 605 bp, Canis familiaris
  misc_feature (83)..(83): n comprises a, c, g, or t, or includes no nucleotide
ccggcgtccctccgtccctccccccacccaccccgggcccatcctcctgggaggccagagaataaaccgcatccgagaagccnacacatctgagctctgagccgttccttaaagtgcagcccaagcatttcagtgcagaagagtgcagctgacccatcgggtccccgtcgcacctgctgctgcagaacccggagcgggtgtgggcctggcccagcgcgacaggccggagggtgaatggccctgagccctcgccgatgtgtgtcggtgtcggatgatctattaaaacctctaatatcctttctgtttgtgttgttctctgaccccttaatgcacgccaggcgctacgccaagcgctttacagacgttacctcactcaatcctcaaaacagccctacggacaaggtcctgttataatgaccagtgcacaatttgagggacgcccaggtggctcagcggttgggcacctgccttcgactcagggcatgaccccggggtcctgggatcgagtcccgcatcgggctccctgcattagcctgcttctccttccgcctgtgtctgcctctctctgtgtctcccatgaataaataaataaaatcttaaaaaaa

SEQ ID NO: 8447 - DNA, 588 bp, Canis familiaris
aagcgattcaaagtcacaggaaattgggaggccacatcgtacatatgcacgggtatattatagtttgccttgtgttccagttttgataaagtttttcccagtttttaagtgatttatttgaagagcccctgcacacaggcgccatgttcagcacagtgggcttatgtgataaaatgagagcccatgtttgtttctaaccagttgtcactgggcctcctactgcttcaatccttgcccaagaaaatctcacaactatgcctatacccagacccatacccaccgtaatcctgaagacgtggagtttgtaaaagaaagtgaagaccacacatcagttaggacactctctttccaggactcaacttctgagatccacttctggagtagacaattgagcatcttaagtcctaaacccaagaaatgatctatcttaaaagatttaggggaaagggttgatgtttaactttagagagaatattgatttctttttgcttaaatttaaatccccaatgaacaaactcaagatatcattcatagttattcctaaacacttaaaaaataataataaaaaaaaaaaaaaaaaaaaaaaaa

SEQ ID NO: 8448 - DNA, 628 bp, Canis familiaris
tatacttctttgtgaggctattgctctcccttaccccatacgtcaactgtcagatgatttgaatagatatgcgtgatcctctgtgagctctgtgcccaacatggggccgaaactcaggacctcaagatcaagagttgggtgccccactgagccaactgagccagccaggcatcctttgctttatttcttctgggtactcccttgatctgtccagggttgagctctccaaaagcaacattaaggatggagcagcttgtttcctgtatgctaccccaaagtctccagagttaacaggtcctgttacctataacctgcttgtttgctgaaaggtccagtaccttgtgtgggactcaagaatgatttgaggaaccctaagccatttttctgttcagctccagtctgaggtctaaagaaagaaggatccctgggtggtgcagcagtttagcgcctgcctttggcccagggcgcgatcctggagacccgggatcgaatcccacgtcgggctcccggtgcatggagcctgcttctccctctgcctatgtctctgcctctctctctctctctctctctctctgtgattatcataaataaataaaaaatttttaaaaaaaaaaaaaaaaaaaaaaaa

SEQ ID NO: 8449 - DNA, 630 bp, Canis familiaris
gggatggtgaaggctttgctggcgcaggcatctgcctgctggatcacagggtcttcggtgttcctgggaaggtctgggctgtgctagactcttctgttgctgaccctcctgcctcgactccaagacgcctggcagcagagagccccttctcttgtgcaaggagaatggaccacaacggtcctggtgtcccggtgccatgccagagagagagagcgcaagagcacacgcaaccagcaggaagagcagcagagggagagggagaagcagactccccaactgagcaaggagtctgatgcggtgctcaatcccaggaccctgaaatcatgacctgagctgaaggcagatgcctaacagactgagccacccaggcgcccttgttctttttttaaaaagcttccttcctttgtgttcatttttatgacactagatttttgagagtcaaggccattgtcttatagaatgtcccacgttctgggtgtatctgtttcctaatgactgggtttaggtaaaatatttttggcaagcatacatatagatattgtgtagctcaaggtacatcctgtcagctcagcccactatcaataatactaattttgattacttgattaaagtggtggatgccccaaaaaa

SEQ ID NO: 8450 - DNA, 566 bp, Canis familiaris
ggattcggagctgcacattgcaggcctcagacttctcaacagcctctcactgcccgactatgtacatccacagctgcgacgggtgatgcctgccttgatggagatcctgcagtcagactatatcctggcacaggtgcaagctatacgattgctgagctacttggcacagaaaaacgaccttctctatgatattctcaactgccaggtgcattccaacttcctgaacctgtttcagaccacacagccagggagtctgctgttcgaggtactggtgtttgctgagcggctaagtgagggccggaattcaccccactaccgtgctgtgaagtggcattacaatgaacaatctctgcatgaagctctttttggggatgagtcacgactggcagaccggctgcttgccctggtcatccaccctgaggaggaggttcagatccaggcctgcaaggtcatagtcagcctgcagtgctcccaggatgtgggagtccggccctcctcctgccggcccagtcattcctacttcaatagcggggaataaagttaaggagagccaaaaaaaaaaaaaa

SEQ ID NO: 8451 - DNA, 560 bp, Canis familiaris
agtaaatatactattacaccctgaagaaatttaatgttggttttttttctgatagtttttttaaattgatctctatacttaacatagggctcaaactcacgactctgagatccagaatcacatgctctgctgactggccacccaggtgccttctgataaatagtcttttgaaatgtccttcatagaggcgcctgggtggcataatcggttgggcatctgactcttggtttcagctcagatcgtgatcttagagtcatatgattgaaccctgtatccaactccatgcttagcatggagtctgcttgggattctctgtctgaagtaagtaaattaaagaaaaaaaaaaaaaggacagcctgggtggctcagcgatttagtggcaccttcagcccagggcgtgatcccggggtcctgggattgagtcccacgtctggctctctgcatggagccacttctccctctgcctgtgtctctgcctctttctttctctgtctcacatgaataaataaatcaaatcttaagaaaaaaaaaaaaaaaaaaaaaaaaaaaaaaaaaaaaaa

SEQ ID NO: 8452 - DNA, 585 bp, Canis familiaris
  misc_feature (56)..(56): n comprises a, c, g, or t, or includes no nucleotide
gggaccacagttatgttcacttgcccagagcggtgggctaaagccacgccccccancaggcctccctgttactatagcatcagaaactgtcacatctctccccttccggagagcagggcttgcactcttcccctaggacctactttgaaggccattagaagctttgcttttcatttccccctggtattgtcttgccaggatgggttaaggtaacaacaaggacgcttatctagattcactgaagaaaggaaaagcccaacccgctttcttctgggtatgaacatctagttttgagagcaagcaaacagtaggcttgtattagtgctttaatggagtactggtaacatttttctttcttgataggaatctgcttatatttagccaggcttctatttcataccctctcccactacaaactttccgtgcagttacctttcatttttaaagcaatttcactgctaaatataaattgtatttgtggggttcatagttatataatgctgaagggaaccactctttcgttgaaaggtgataaaagttaaataaagactgtctccacagtaaaaaaaaaaaaaaaaaaaaaaa

SEQ ID NO: 8453 - DNA, 625 bp, Canis familiaris
aaaggggcataactgtgtttgttttttaaatttataaggcatacaggtctaaccataaggaggatttataatatgtgaacatttttgtaagacagctatactctcccattttcatctttactatgatatattttattataaagtagggaatgaatgaatgcggattgttgtcaactataaacacttctgtatgtcagcatttactgaccacttactgtgtgcatatcactactggcaaattttttaagacactgttaacatgaaagaataactatttaaaaattgccttgtaataatgtatatttaagttatttttgtctttataaagatttattaaataaaataagattaaaagtacactattcagctaccatactaaaaaaaactggttttagttttacagtgtgtaaactataaaagcgctttacctacagactttagacctacattttaaaattatctttggctattttaaattgttgtgatttataaggttgtagttaactcatttgaggcagttatctttctatataaatccattttcaaaagatagtgcttgtcttttttgttattacaccgagtgcaattgagtaagctgcatggcaaaatatgtgttatgtaaata

SEQ ID NO: 8454 - DNA, 648 bp, Canis familiaris
ctcctaggtgggtagtcatcgaagctgtctgtggcaggacgcgccctccagtctgtatctgttttgtcagaatcccgatttctatctcggccaaaggaacgatcatccctgtctttatcctgtgcttgatcagcaacgtccactcgaattctcctgttacctagagactcttcgttgaggctcagggcactgagcaaagaatccaggtcctcaaactcagcgtaaccaaaacctttcaacctctctggattgctgggttcacgtggtaaacgcactgcactgatatttaatcctctaaagaattccttaatggaatcttctgtgacatcatagggcaggttccctagaaaagcagtatagggtggcgattttggaagacggctccggtcgatattgggttcccgagcagcccgtggagcagtgggcaggatggaacggtcaattggaggtgccctatacacgtcatcgtcattactgtgccaagtggttgaaacatctccttccaggtcgtctgtttcatcagcccagctgactggtttggggacataggtgcttcctcccccagtccctccatcctcagccagaaagtctgttagggagatagttttccccttcttattcttcttttttgctgaggccgccatgttg

SEQ ID NO: 8455 - DNA, 592 bp, Canis familiaris
tgcctatgtctctgcctctaccctctgtgtcttttcatggaatagatagattgtttagaaattgtttgaaatggaaatgtctttagtttttttcaagacagactttaaacctaagcacaaggtttttttaattccccaaataaaatgttcatttcaaagtaattaaagtatcatatataccttaagtactttctcagaggtaaactgttcttgatttcccatgcctgtgctatacatgcatgtagcagatttctgactgctcaagtacagaaaatgtgttggctattgggtttaattctataaatctagcctattagctatgccttggatatatgaagttgaaaatcaacaaaaatggaggaaaaaatttttcccattatgttattcttttccattcctacttttactgatttctatcatttaatcagcctgaaccaataccattatatttttaatgctatctcattaaccacactatttaaaatgtgatctgatctcacccaaaccaaaaaataaaacaccaaaaaccaaaaataaatgtaactggatttacatagaaaaaaaaaaaaaaaaaaaaaaaaaaaaaaaaaaa

SEQ ID NO: 8456 - DNA, 714 bp, Canis familiaris
ccaagggagaaagacagaactaagacccaaggagaaaaacaagaaaagccaaggagacaagaccagagctagcctgaacagaggccaagaagggaccgtgaggcctgtgctgcaggaatgaccctaaggatgctctgggctggacaggcgaaggggggtcctgggaagctggggggatgatctgcttggtgatctctctgctctctccagcagccacggagtctcacagcacagtgctacttccaagctcaagccccctgccacactatgaaagggagaatattttagacctgggtgaagttctctgggcttccgcccacaaggaactcggctcttcccattcggaacctcgttctcggcacattcccgctcttggttgttgggagacttggcttggttgaaccacaattcccccaggcaattccccaattggactttcccctgccagggtgtgaggtgcgtcaggaggcaggaacctgccagttctcccctggtgcaaaaatctgatcctcggctaccctgcaaagggggagggcccgacccagaatggggctcagctaacacccctgctcctggggctccggctccccactccagctaaactcaactgatcaccctcctgctaactgcccactgctgctgccacttccagggaaaccactagcagctgccagtttattctgaataaataaattaatgccacagctgaaaaaa

SEQ ID NO: 8457 - DNA, 650 bp, Canis familiaris
  misc_feature (3)..(3): n comprises a, c, g, or t, or includes no nucleotide
  misc_feature (39)..(40): n comprises a, c, g, or t, or includes no nucleotide
tcntgccattgtcccatccggtcaacggccccgggcganncgaacccgccatggggcctaccgaggagccaggcgcccgaggaaggtgggaagccccccgtgccagaggcgttggagaaggaatccctgctgttccggttggttgagccattgcttggccagagcccccaacgaattggaagttggccgcttaaccgttggaatgcctttccaaaaatgtggccggggatgaccgggagcagttctgcaggggtcgccaggcagctggcacagaagtccctggggctctgaggcccaccctggcgcacacgcagacacggcgcccagccgtggccagtgtttctctgctgaacacctagtgacagtgacactctgtgctggtaccaaaaaaggcaagcttgcagaaccacagcatctgtttttttccctacctttcccgctccaaacaggcttctcttctgaaattatgattcatgtaggatgacagctggatgcagttttaccgtattcctggcaaggcggttcgggtagatggtgagagccgtccccgcctcctctccctgccggagcggagcgcccacggtcagcggcttccctttggtcgcggttgtgagggcgtgtgtgcgccgcactccagggggctagaacca

SEQ ID NO: 8458 - DNA, 319 bp, Canis familiaris
accaccacacacacacacacacacacacacacacacacacacacacacacatccccacaccggagagcctaaggacacatggagggaggcctctactatgcaccaagtgtgtcccctgagcacctgaggaccacatggaagtaccacgcacccaggagtcttcagaacgcagccctacatcgcggacatgtgtaccttccctcctggaacagtgagctagagctaactcattgtacccaacctgttatttggaagaaaatgaaataaaggcattcttggatgaaaaaaaaaaaaaaaaaaaaaaaaaaaaaaaaaaaaa

SEQ ID NO: 8459 - DNA, 659 bp, Canis familiaris
cactttgccatgtaaaaaaaaatagttttaaaatcagatttctagctaatctcaagagaatgtccttaggtttaagaataacttttagggaaaagaaattatgatttaattatatgatatcagtgacttacctgttcctaatgattagcaaatgtctgaaactgctgaaattatcttacattattttcactgaattaggcaggtattattatcatcatttgaaagatgaggaaaatgaggtgttttgcaaaataaagtaacatgtttccatcattttactagtgcagttataaattccttccatgtgagtgtagagtctccactaactgtgtgtcattatcactctatgggcatttattttatatcagtgtatttttttggtcctcattagaaaacatctttatgaattgcattattttttatgtacaaataaagaaatggtaatgcccaatattctttctgcaatcgaaaatcttgggcagcctgggtggcccagcggtttagcacttgccttcagcccaggacgtgagactggagttccgggaccaagtcccacatcaggctacctacatggagcctgtttctccctctgcctgtgtctctgcacctctctctctctctctctctcatgtctctcatgaataaatgaataaaatctt

SEQ ID NO: 8460 - DNA, 709 bp, Canis familiaris
tgggctgaatatgctgccagtgttataggaatattttccttaaagatttttggtagatattatgggtacccatatactgaaagacaactagcaatctgattttttataagtactcagtgtagaagcttctggcacttaattcttttcatattcagtgttaacttattatgttgcgtcttgccaagctcgtggggagcagagttggggtcctaactttcactgggaaaactgaagaaggaatcccccaggggtttttccctccataaagaacatcagagggcttgaacgagatgcagactatggggctcttaaaggaaaaataaaagcccatatacatcgtttcctttcatttctaaacacacttgatgttcacttttgtgtcatgtggaggtattactaaagacataaaatggattctctgacggaaagaatataaaatatcaatgtgctttgaaaagaagctgtcagtacttactgagtaatcttaccaagacatttcttagatgggaatgcagattcctagcaagctgttatctctaacgctgcaatttagtgttttgtcacaattctgcactaaatttctacattaaattagaacaaagaatttcaaactaaacattctatgggacagttcttagatgctttaagtttttaaaaaaggtgtaagtaaataaaatgcctcaaatgcaaaaaaaaaaaaaaaaaaaaa

SEQ ID NO: 8461 - DNA, 298 bp, Canis familiaris
  misc_feature (295)..(295): n comprises a, c, g, or t, or includes no nucleotide
ctatttttctaagttttggaaagcgggtttttttctttacaaaaattatggacacagttcactaaattcttgatttagtcaaaattcctagacggaaagaacctaaacacaaaaatattttaaagatataaatatatactgtatatgttatgtaatttatgtttaggctataatacatttcctattttcgcattttcaataaaatgtctctaatacaatacggttgattgcttgtgtgctccccagacttgcagttgagacgtattgtatcaatgaacattgtatgttatttaanaaa

SEQ ID NO: 8462 - DNA, 563 bp, Canis familiaris
ccgtgtgcgtgttgaagggccagggcccggtggagggcaccatccacttcgtgcagaagggaagtgggcctgttgtggtatcaggaaccattacagggctgactgaaggcgagcatggattccacgtccatcagtttggagataatacacaaggctgtactagtgcaggtcctcactttaatcctctgtcccaaaaaacatggtgggccaaaagatcaagagaggcatgttggagacctgggcaatgtgactgctggcaaggatggcgtggccattgtgtccatagaagattctctgattgcactctcaggagactattccatcattggccgcaccatggtggtccacgagaaacgagatgacttgggcaaaggtgacaatgaagaaagtacacagacaggaaacgccgggagtcgtttggcttgtggtgtcattgggatcgccaagtaaatattccctaggatgcgatctgagttctagttaactcctatgttatcttgctagtcgtagaaatttaacttgataaacattaaacattgtaacccttaaaaaaaaaaaaaaaa

SEQ ID NO: 8463 - DNA, 452 bp, Canis familiaris
ccgccccccaggtacaagcccgcggcccgggtgcggctgacaccccagagcaggctccgagacgccgagggcctggcgcgggagactggcgccccggccgagtccctgcggctccgctgcacgtcccctcgcctggacagctctgtgcctcagtttccccatctgtcaaacgggaaggatggagaggagcgcccgtcgcaccgggtcatcgtgacgataagatagtacgttcaaggagcgcaggtcggcgccgaggacgcgggcagcactgagccagcgcgatggcagccacgagcagacttttccaacaattgcactgagtcgcacatcccgcttccatcggtgccctccttgcaggcaccgaacgcggtttcccgtcctaacgttctcagcgactcggtcatttgacacaaacccacaggcacctgtgtgcggggatgtggcgggtgacc

SEQ ID NO: 8464 - DNA, 495 bp, Canis familiaris
gctgccttgcaccacgtggcttccgctgggctttactccagcagatcttgcctaccccctttctgcagccaggaaggaagagttaaaccatataaatgcctttgatatttcatgcaagtgcctaacatcgcatttcatttaaaaaatagaaataaaagcagtttgttaaaaaaaaaaaaaaaaaaaaaaaaaaggacgccgccatcggtccccagagcccctacagcttcaggcacggagccagcgtcaactacgatgactactgaccaaccacccctcggccctcggcgccccggccgcggaggtgacccactgggctgccttgcaccacgtggcttccgctgggctttactccagcagatcttgcctaccccctttctgcagccaggaaggaagagttaaacaatataaatgcctttgatatttcatgcaagtgcctaacatcgcatttcatttaaaaaatagaaataaaagcagtttgttaaaaaaaaaaaa

SEQ ID NO: 8465 - DNA, 317 bp, Canis familiaris
ctttttctcaccaagcctaatataattgagggaaatgtcggggtgctggcttaaggctgcacactgacatctggatcatgttcaaagccttattaacattgtacctaaaatgataggccactttgcctcacttacttgccaaaatagccatttctaagttaaggaaattttgaggtagtcttaacagcattcttgtatttcattttagattgtaagctcgatggcagggacactatattgttaaataagcttttatatagcaaccattgcagtatactcttggtgcttaataaatgctcatgattattaagaaaaaa

SEQ ID NO: 8466 - DNA, 626 bp, Canis familiaris
acaggacccagaccccctgtcagggtccacgtgctggccgcgcttcaaggaagctgggggtgttgttggacctagtaaactaggtgcagtgttgtaaatggccctgaaacatgttaaaatatatttgtaatcagtaaggccatacagatttaatgttgacagtagaatggagcaccatacaatgtaccatggatattgtaggtttccttaaatgctgtttttactgtgcaacttttttaaaattaggttttaatttcagtatgtaagaaccaccaatattttgtatattttccaactccattatatggtaatcgatttggtatctatggaatagatctatgtttctggataaaatgcttaaattgtccaactgtcatgacttcttgctataattgaaagcagtctccagattctttttgaagacttattcatagtctgtctctctctctctctccacgagggggtgggtcttgcaaacttaacttcagatcttgtgggtttatcattgtcttcagctcttcagtaccttctctgtgttggaataatagcttaaggaaattgatgtcaataaattcgtacttacatccaaaaaaaaaaaaaaaaaaaaaaaaaaaaaaaaaaaaaaa

SEQ ID NO: 8467 - DNA, 582 bp, Canis familiaris
  misc_feature (99)..(99): n comprises a, c, g, or t, or includes no nucleotide
  misc_feature (191)..(191): n comprises a, c, g, or t, or includes no nucleotide
  misc_feature (206)..(206): n comprises a, c, g, or t, or includes no nucleotide
  misc_feature (254)..(254): n comprises a, c, g, or t, or includes no nucleotide
  misc_feature (304)..(305): n comprises a, c, g, or t, or includes no nucleotide
aggaaccagcgtcacccacgggcaaatgttgggaagtcttaaccagaattaggttataaatgatcggaagtggaatggaataattttgaattcttgctnttccgggaattcttgaattgattctgatggaaggggaaaacgtggacagaaagccggacagagggctttacaggacgatgggaaaccgcccnttggcacccagtatnggaggtccaaaagagaaggccccaatgaaaccctggcaacttgttgcngcaaagtgcttgccactatgtactaagaatgtggaaacccttgggacgannttgagacagaatatggcacaaattagaggagtgcgtccgaagcattcaggcagatggcttggtctggggctcttctaaactagttccagtgggatatggaattaaaaaacttcaaatacagtgtgtagtggaagatgataaagttggaacagatatgctggaggagcggatcactgcttttgaggactatgtgcagtccatggacgtggctgcttttaataagatctaaaattacatcgtagatcattgtccttaaataaaagcttaaaagacaaaa

SEQ ID NO: 8468 - DNA, 458 bp, Canis familiaris
tttttggaagtgcagtctttattgtacccttctccagcttgtagcccattagaatgcttagcatttaagttcacttcattattgtatttgccaaggtaaatttttattaccttagaccagcttataaagctgttactacatacttaatcttactggtaaactcttttatttcccgaccttgtaatttgtttgtgatgtatattgtgagattgtattctatgttaatttaatcagcacaattcactgacatgctggactgacatgctggctgctgtttcaaagtgtaaagttcgtgtagggctgttgtcaaggtactgtgctttggttcctctagcaaccctgcgggtgtggcccgtaggatgctaagggcatttactacaccctccagcaaatttaactgcagattttctttgtagaaattctatgtataacgcaggtacctacttggcccatggctg

SEQ ID NO: 8469 - DNA, 616 bp, Canis familiaris
tatacatgtacacaacatagagcattatactcagcagggctagttatttggatttcttgcacacactatttagctttttgtaagttcgacatgtaaagtgttgaagacgatatagagagacctatgtgtttgaaatatgaatgataaatatgggattagcatgtaacctgtaatattatttaaacatgcaatgaactgactggtaagtgatgtctaaattgtatggctagcaatgtaatttattcagactgtatttttgtacagagcagcgcacactaacctatgcctctgtgtcctctttaatgcctaaaactgtgcctagaaatttcatctgtcttaagaaataaaattatacttcatgctgtttatgctatagtttctctactgctgttctatatttattatttttaaatatatgacatgtttactacttaaatatgaatccatggtattctggttattttttttaacagtcctctggggggaacctgtttctcactccagtggttttgagtttgcagtttcacaatcagttcttcatttcatgatttttgtagctgacatatgaagttatctatgtggataaaataaaaataaaagtggtttcactgaaaaa

SEQ ID NO: 8470 - DNA, 642 bp, Canis familiaris
  misc_feature (1)..(1): n comprises a, c, g, or t, or includes no nucleotide
ngccagaccgtcagagatagggcatctggaccagagagagagccccaggggaccacagttatgtcacttgcccagaggcggtgggctaaagccacgccccccaacaggcctccctgttaactaatagcatcagataactgtcacatctctccccttccggagagcacgggcttgcactcgttcccctagaacctactttgaaggccattagaagctttgttttcatttcccctgggtattgtcttgccaggatggttaggtacacacaggacgcttacatagatccctgagaaagaaatagcccaacccgctttttctggtatggacattctaatttggaagaaccagccataccagcttaggccttgtaataaggggctctaaatggagtactggtaacattcgtctttcttgataggaatctgcttatatcttagccaggcttctatttcataccctctcccgactacaaactattccgtgcagtgtgacctttcattttctaaagcaatttcactgctaaatataaattgtatttgtggggttcatagttatataatgctgaagggaaccactctattcgttgaaaggtgactaaaagttaaataaagactgtctccacagtaaaaaaaaaaaaaaaaa

SEQ ID NO: 8471 - DNA, 685 bp, Canis familiaris
cagttggcactggactcattctgcccgagcctgcacctgacactcagcttccacagcctccgcagtctggtcccttcttccgatcccctgcaggggactaccttctcaagtctagttgggccctccccgggtcatctgaacttagggaagtcctctccctcccgagaagggtctcctgcctgccttcctacatggtttggcctcagctgcccaggtggtggccactctggcatcccgcatccccacagcttgctgggatcctgcctgctgcccagcgttcgatgggcttatgaggcctgaatggttcccttcgaggagctttcctgcccttttgtgggaccaccgatacctcaaggacaatgtcttccccgtgacagggtgtgaggggctgcagaatcgtcagcatagccacttagcgctgatacttggaacccagactctccgtgacccctggcttccagctgcctcagcctctgccccgatgcctggctccttgcccctgccctacacatccccagaagggtcctggagccaaccctgccccaggatcaggttccagcctctcagtctcagaagagggggggagcaccccccatttctggccttttctcacgtggctccaagttctgctctgtactccagttccacccaaatacactttctggaacaaaaaaaaaaaaaaaaa

SEQ ID NO: 8472 - DNA, 659 bp, Canis familiaris
catgccctggcggcccagggtcaaggtaggacccaaaagaaaaagttgcttggcctgggactcaacacccttcttcccaccgttatgttcccctcgtacctggcgcacccggccccgccccgccccgccccgccccgcagaggccgcgcctgcgcagtggtgttcgactgcaagttcatcgagacgtcggccgcgctgcagcacaacgtggcggagctcttcgagggcgtggtgcgccaactgcgcctgcgccgccgggacagcgcggccccggagccgccgggcgctcaaggcccgctccaagtcctgccacaacctggccgtgctctgaggccgccgccgccctaggggtgacggaacactgggctgcattccgagctcccgatgccaccgaggggccacgccggcgtcgcccggagtctgcgcagtgggctgtgcctgccggctgccccggggccgggagcatctttggggccgcagcttcaaggacctcaccgcctcgggaagcagtggacagaccatggggccgaagcctcaagctggacgcagagtagggatttttatgcggtgcgagcctttttgtaaaaatcttccctgtccctgggctctggccaactccccacaataaaccagaccagaggggtaaaaaaaaaaaaaaa

SEQ ID NO: 8473 - DNA, 116 bp, Canis familiaris
gctccttgagagcaggaaccatgttatccctgttacttttgtaaaccactccattgttcttcactgcgcctagtgctacttgcctagtgctactcgttatgtgatcattggacttg

SEQ ID NO: 8474 - DNA, 507 bp, Canis familiaris
  misc_feature (297)..(297): n comprises a, c, g, or t, or includes no nucleotide
  misc_feature (314)..(314): n comprises a, c, g, or t, or includes no nucleotide
actgtggcactgccgtatttctgggagcacttcgataaggatggctggtccctgtggtacgctgagtaccgcttccctgaggagctcactcagacctttatgagcttgtaacctgcatgcaactgggaaatggttccacaccggttggacaaagctgaaggaaagaaatgccctttgccaagtgtcatccttctttggaacccaacaacagcagctcccaatttctggagtctgggtcttccgaggccaggagcttgcctcttccgcctgagtgccagattggcaggtggactacgnagtcctatacgtggcgngaaactggatcctggcagcgaggagacccagacgctggttcgagagtacttttcctgggagggggccttccagcatgtgggcaaaaccttcaatcagggcaagatcttcaagtaaacatctcttgtcatcatcgcctagctgcctgtacctgcccttcagggagatgggggtcattaaaggaaactgaacatt

SEQ ID NO: 8475 - DNA, 752 bp, Canis familiaris
actcctgaactgatggaagtttgtaaagagaaaggatttttctcctgaagcaattgaaaaagggaaatatcacctttgagcacatgtttgaagaagtgccgattgtaattgatactcacatctgatcaacgtcctaatgtgggagcttgagaagaagtcagctgtagcagataaacatgaattgctcagtcttgctagcagccatcatttggggaagaatctacagttgctgatggacagagtggatgaaatgagccaagatatagttaaatataacacatacatgaggaacacgagtaaacaacagcagcagaaacatcagtatcagcagcgtcgccagccaggagaatatgacagcgccagagtcggggagaaccccccactgcctgaggaggatctgtccaaactctgttcacaaccacctcacgcctcctggcacggatggattctttactcacttgcacggccacgaattaaacaacttaactgcccaaggaacaattcacaagggaaggtttccaccttggcccccaaaaccttttggggccatacttcttcatggggccccacggctgcttcaggaataaacaatccaatctgaggaaaaggtaagtttccacgatataaggagttaacatggactcttgagatcacattggggcaatccttggaagaaatacatttgtgtattgaaaagtctttctagctaataataaaataaaaataaaacaaaaaaaaaaaaaaaaaaaaag

SEQ ID NO: 8476 - DNA, 629 bp, Canis familiaris
gccgccgagggcatccacactggccagttcgtgtactgcggcaagaaagcccagctcaacataggcaatgtgctcccggtgggcactatgcccgagggcaccatcgtgtgctgtctggaggagaagcctggtgacaggggcaagttggcccgagcctccgggaactacgcgactgtcatcgtcccacaacccggagaccacagaagacccgagtgaagctgccgtccggttcaaagaaggtcatttcttccgcccacagagaccctggtgggtgtggtcgctggaaggtggccgcaattgacaagccccaattttgaaaggcctggcccgtgccttacccaccaggtaccaggccaagaggaattgctggccacgtgtgcggggtgtggccatgaatcctgtggagcatccttttggaggtggcaaccaccaacacatcggcaaaccctctactatccgcagagatgcccctgctggccgcaaagtgggtcttattgttgctcgccggactgggcgtctgcggggaaccaagactgtgcaggagaaggagaactaggcttgaggggctcaataaagtgtgtccttctgcccaaaaaaaaaaaaaaaaaaaaaaaaaaaaaaaaaaaaaa

SEQ ID NO: 8477 - DNA, 131 bp, Canis familiaris
ttctttgcttcgctgaatatatacaggtatgtaaaaaaaggattcagagttccaaaataaaaattagtggtatccaaacgtaaaaaaaaaaaaaaaaaaaaaaaaaaaaaaaaaaaaaaaaaaaaaaaaaa

SEQ ID NO: 8478 - DNA, 625 bp, Canis familiaris
catcctgtcagtatggaagttaattatcagttaaacacagtttttggatgagtgcaaaatgtctctggttttcgcagtttttggattttagaattaccagataaaaattaaggacttaaaataataattgcctttcatggtgtatttttggtgtgttctgtggagtttctccaaagaagccatttatgaaaatcaaagttaaatgtaaggcaacagtatatattttagaggattttatgtaaggttgtttctgttgaatgtatgatccactttgaaattgacagagaaaataggcatatcccaagtacagctttgtttattaatgtatttgagtccttgtcctaattttttcctttccttaaattcaaaatatctggaaattcctgcaagttttctataaactctagttgttcataagctagaaaatagcaataggggcagcccaggtggctcagcggtttagtgccgccttcagcccagggccggatcctggagacctgggatcgagtcccacgccgggctccctacatggagcctgcttctccctctgcctgtgtctctgcctctctctctccctctctgtgtgtctgtcatgaataaataaataaaatctttaaaaaaaaaa

SEQ ID NO: 8479 - DNA, 660 bp, Canis familiaris
ggttgcataacttttgcctgaggcccttctgactatgggcagtctcagcccacagatccgggcgtcagaacttcgaggtggcccttctcatctgtctgtagaccccactgcggactgtcccgcagctctctggacaccacgaggatcactgtgttcggcttttgaggagacctgactgtgagaaatgcgtgtacacgtaacacttccacgggaatttctaccgctgttctggttccccagagaaggggtctggttaaaatccctataaagttccttaaccccctggttcacaggagaggcccccaccggaattgcttggtttggacctggcggtggcccccttggttggaaggttggaaggaaccatgatgattccattgggcaagaagcccgaccccaagtgcgtcttcacctatgtgcagtcgctctacaaccacctgcggcgccacgagctgcgcctgcgcgggaagaatgtgtagcctccctgcgcgcacggcccgcctgcggcaagctgcacccaccatccaggcaccatcccctccctgtgcgcctgcccactgctgccctgtctgtcgcgacaccctcccctgcatacacacgctgcgttttgataaattattggttttcaacaaaaaaaaaaaaaaaaaaaaaaaaaaaaaa

SEQ ID NO: 8480 - DNA, 629 bp, Canis familiaris
ggttcccccacttggcgattgccaggaggtgagggggtgcaactcgaacacccccccgttgttctgccaacagaggagtagggttggcagaccagcctctcacccccacccctgcgagcccccacgttgctttgtccagacacgtgtatctcgcagattttctaaggaccacagaactatacctttttacttacttacttgaaccatgagacaccctaccggaatacaccggaaaatctataaaaaaaaggaattaaaaactttcagagaattactatttactttagttaacttacggatttattatataaatatatattcacctagcaacatatcctcgccgcctcttgctcataatgaagacatagctgatttgctgccctcctgccagccccttactgatttctctctgttgtctgtcgttgggcatgggtctctggggaccctcctgaggtggagggtgggctgctggcctggctgcctgttagttgatgggttttgctcccttcccctccccccctttttttgagtttattctgattgattattttttttctcggtttctggataaaccacccttctggggacaggataataaaacatgtaatatttttaaaaaaaaaaaaaaa

SEQ ID NO: 8481 - DNA, 552 bp, Canis familiaris
  misc_feature (95)..(95): n comprises a, c, g, or t, or includes no nucleotide
  misc_feature (141)..(142): n comprises a, c, g, or t, or includes no nucleotide
atgaagcttcattccgggaccttttcaattggaggtccaagctggaaggaattagaataagaacgaagatggccagtgaccagggagcccagctnggccagcaagctggacaaggccctgtcccctcacggaagcaggacnnaagctcaagtcgcccttcaagttctcggacggttctggggggaagtccaaaggcggcgggggctgcggcaggtacttgacgccctacgacagcctgctgggcaaggacaggaaggcgctggccaaaggcctcagcctgtccctcaaggcttccagagaaggtaaacacaaacgggccgccaaagcgaggaagatggaggtgggcttcaaggccagaggccagcccaagtcggcccactccccgttcgcctcggaagtgagcagctactcctacaatacggactcagaggaagacgaagaattcctgaaggacgagtggtctgcccaaggcccgtccagctccaaactgacgtcttccatcctgtgtggcatggtggcaaagaacggcaagctggctggaggccccaagct

SEQ ID NO: 8482 - DNA, 676 bp, Canis familiaris
aacagaggtgccaccaacagggtgtccttcttactctcttgcaggtcttaatgcagctttgtgggaaaggtctcctggggtaggaccaagtggtatatggtctgctgcttgccaacccgtgttccccccagggatgctgtggtcataaagtcagaataacagcatattcccatctccaagctattgtggcctgagcacagctgaaatctagcagagtctttcatatatagctttagagtaactcttctgcgttctttgtcactcctgaattcacgttctgcccttgcgttccaggacatgagccagaagagtcctcgtgaccgctagttattattgccagttccattggttgaaaagtccatttaaggggaaaaggatttccaaaaataaagctgtggggctgcttctccccaattcctccctaacaattcattgtgtggacttctctcatctaaaaggttggtggctttttgcttgggatcagtgctctattcatgtgttgctggtctctgaacacattcctgttgcgttaagacttgaaagatttgtagatgtgtgatgttcaggcacaggatgctaagagctatgttactattcttagtttgtaaattgtccttttgataccatcttgttttcttttgtaggtataaataaaacactgttgacaataaaaaaa

SEQ ID NO: 8483 - DNA, 609 bp, Canis familiaris
agaaggagccacagagctgtttctccaagcctggactgtgcctaatcagttatgggggaagtagtggatttagaactccatccagtcctctcccaaattcgtccttacctgggcctagatgaggagggggttggctggaagagacgtaagcccttcttgtgttcatttgccgaaacacgcaggacagccacgagccagggcttctgctcgccgtccgcaggccggagaaggaatgcctccgttcccggggggctatggcccggccttgtcaaccagcccctccgtggggctcagggcagcatgcccaggctctcggcctgcggcgacagtggctcgggcacctgccgggcccaggatcgcagcgcaggtgcaggaccacatccaccggctgcccggcaccgccacgggctcaagcagcttctcaacaaactggccaagggttgaggccctcagcagctcctcccccgccgtggagatgcagcccctcctgggcctcgtccccctcctgagctcccctccagcccagcaccattggatgagtgagtcaagctcattatattcttcaccgttggacatgcccaaaaaaaaaaaaaaaaaaaaaaaaaaaaa

SEQ ID NO: 8484 - DNA, 338 bp, Canis familiaris
tgacaacattccccgccgcaccacccagcgcattgtggctcctcctggtggccgtgccaacatcaccagcctgggctagaggtcctggccccgcagcctacgtggggatgggggatgggacacctgaggacattctgagacttccttccttccttttttttttttttaagagcctgtgatagttactgtggggcagccagttcatggggccccctctagggccctgcactccgtccctcacccggagtcactgattttgccacccacttccctatacatctacgaatatcacacccaagtctatccaccaaccccatacacggaactgcaaaaaaaaa

SEQ ID NO: 8485 - DNA, 514 bp, Canis familiaris
caggccgatccgcagcgctaccagggtgcttgaagatttccgccgctgttacccttggttcaagcttgattattctggaagcctacctggggcggtgccctttcaaaggttaggtactaagccagatactgaagggctgaagtttgtaaatcaatccttttgggaatccaatgctaatgaaaatgactgttaccccttggaatggctcctgccactcgaacctgcagtgcagtctgtgaagagtcacgtcctttttccttggctgctatgggttttgttcatgcagaggatgcctcctatctggttggtgcttgggcagatcctaggaacttccatctaatttccctgcattaatctatgcaagcagctgtcaacttactggaggaaagaaactgcccagaaattttgagatgcttaaatacttttagaccaattagatttatttaatatgaatacttgtttttattaaaaggattccaaataaaatactttaaaataaaaaaaaaaaaaaaaa

SEQ ID NO: 8486 - DNA, 631 bp, Canis familiaris
accaggaatggagattcgcatgcgaggatggtcgagaaaaagccggcaaactttctacgtgcgctgcagaacccaaagttggcatttgtcatcaggatcagaggtatccatggtgtgagcccaaaggttcgaaaggtgttgcagcttcttcgccttcgccagatcttcaatggcacctttgttaagctcaacaaggcttcagttaacatgctaaggattgtggaaccgtatatagcatgggggtacccaaacctgaagtcagtgaatgaattgatctacaagcgtggttatggcaagatcaacaagaagcgaattgccctgacagataacacattgattgctcggtctcttggtaaatatggcatcatctgcatggaggatctgattcacgagatctataccgttggaaaacgtttcaaagaagccaacaactttttatggcccttcaaattatcttctccacgtggcggaatgaagaaaaagaccacccattttgtagaaggtggagatgctggcaacagggaagaccagatcaataggcttattagaaggatgaactaaggtatctaccatgattatttttgtaatctggtcagttaataaatgactactttcaaatggaaaaaaaaaa

SEQ ID NO: 8487 - DNA, 613 bp, Canis familiaris
  misc_feature (1)..(1): n comprises a, c, g, or t, or includes no nucleotide
ncacgtcctccctgctgaagcagctgaacgagccgtttagctgggtgtccccaactggcgtaaccgtcacgtcaaagtgaagaccccttctattctccaggtcacgacggtgggtttctcagacttctgactcccaagttcccctgggcttcactaaggtggttgtgaagctctttgattctgaccccatcacggtgatgatcccagaagcagtctccaggaccaatcctaaatttatggagactgtggcagagaaggctcttcaggagtatcgcccaaagcaccgtagaggaatgagatgtgaaccattgcttctcccaaatatgggagggctgagttcctttgacccccagatgagtgctaggcccctagagagagctctgcatgtcaccacagtgaccaggccttgcctcgaggcgctcctgtctcctaacccagctttccttcctctggactccgcactgtaacgcctacgtttgctgatcatgggaagaactcctgtgtgcccactaactccaataaaaccgcccaggaatttgaaaaaaaaaaaaaaaaaaaaaaaaaaaaaaaaaaaaaaaaaaaaaaaaaaaaaaaaaaaaaaaaaaaaaaaaaa

SEQ ID NO: 8488 - DNA, 379 bp, Canis familiaris
cttaaacatttaccattttgtccatgacttccccgggctgggtcagacagtatgtgctcttgtaaaacaccagccactctctctgtctttcgtatttatgagaaacaccaacatttctttaatattgccctcctgttaggatgtaagctctctgagagcaaggatctcctgcttcgcctgcccctccagtccctagcacttgtaggtgcttacatgatatggtgaatgaatgagaaatccatactttaatggatgtcatcagaccacattaaaattgtgtgattatatgatatgatgcaactatcaggtgctttcctaataaaatatttcaaaccaaaaaaaaaaaaaaaaaaaaaaaaaaaaaaaaaaaataaaaaaa

SEQ ID NO: 8489 - DNA, 605 bp, Canis familiaris
attaattaaatttaatttggttgaatttaattttccactgggaggggataataatgagaaaaaggttgataaaaacactttcagaggttttatagttataccacaatccaggattattgtgttccacgtgctttatgtaggactgacagtagctacttgtggcaagatgtcagaagccagatgtttacagtaaattcttggccactctttatgctataatttcactctgtccatcaggacagtgtcagaaaacacaacagtcactatcattatttcacctggattgtagtggagaacttcacatattgacacatgcaatgaaaagataaattatttcattaaatttttaaatgctcaaataatcccaaatgtattgtgagaatgagtatctcagggtgggcagatagttactgaaattttttcctcaatgtcagtagctctgtttgatacctgctaagtatatggtaatgtacttgaaattgctttccagactcttactggaatatggtaacacagtcagcttagggctaaatcaaagatgatgtctcatgtatacaaagagatatttaatttctttaaaaataaagctatttttccttaaaaaa

SEQ ID NO: 8490 - DNA, 634 bp, Canis familiaris
  misc_feature (325)..(325): n comprises a, c, g, or t, or includes no nucleotide
aaggaaaatgtatttgaagactcttcaagcaggggctgaacgacttccacaccattagcggttgagacatacctctagatattttgaggtatttactatattaactacatttagaaagtttttaggttcgctataagtgccagtaaacattacagacattggatacagtgggattttctgtagattttacttgagaggtgagtataaagcaatttgcagtcactgaaatgacaagaatactgctcaagtgtgaatcccaaaccattaaagcttttaaattttaaagcatttggtaaaactgttgctgagtcttttctgttgccantagcaaactgcttttccattaatggagaattcatgcctttcaagcattttaaatatgacaatatttataaatgtgtggtttggaggaattgtttaaattctttttcctaatttcctttctcttcaggatagattctttcaacaagtaatttgtagtaatgactgtgttgacttcaattttggaatgtcgtagctatgtcagagattaactaatttggtcttattgaagccaacacagaacttgctgctgtgttttttcttcagtgataaataaaatacttacagaatttgaaaaaaaaaaaaaaaaaaa

SEQ ID NO: 8491 - DNA, 585 bp, Canis familiaris
aggaggcagaggatcaagcaggcagaggaccaagcaggcagagcgatgcccgaaaccttccaagcaggtggtcccaccgcctctttggtgctggcaatatggctgaccctgggatggctttgggtctctggtcacttgtgtcttcaggctgacctttctaaagcatctatttagccatcctgcgtccagcctgaagcttaatggttattagaaggaaaaaggatgaccaatctcacttatctgcacaagtgtttcaacctgtcctgtagcatttaagagaagggaagtctacttgatgggagtatattttttaactcagctggtagaatttgactaattgaccgttcttttattgtgacttgagctgaagaggttgaccaccctcctgcgtggcacatgtgcacataccttccatggtgagatgattcttccttgtgctaatgagcagacagagctggtcatccttggcccctcgtgaggcatatcagagtacggagatgcatctggagggaggaaggggaagcaaacttaccagaacatgcaaaatggaataaaatcattttggctagaaagaaaaaaaaaaaa

SEQ ID NO: 8492 - DNA, 660 bp, Canis familiaris
gcaacgaaggtgggagtcactgctgtgcaacaggacccaggtcaggccgccgtgtaagcagccaagacggggccccgcaggccccgagctggtgcccccccacaggaggcctgcaaaggccccacactgatccgacgcctttgaaaagggaagatcttttgcagcaaactggcaagacctgctgcaaagggatgcagaccctttcccctctgaccgcatggaaacggcagcggccccggaggccctgcccggatggccttgggatcgcacagagatccttcttcgctcgttaaacatcgtgggcagcaggtgctcagagctgacccagaccggagggaggccctgtctcaactgcacgctcacgacacgactgcgagcttgcttccctggcttcctagcccctatgttttatcttggtatgtgattctctcttgtgctctgcgtgatgttgtgtaagaaaccgaagtggaacaccaaggaagtggcattgagtttggaatcctgaactcgctttgtatttatgttgcccttgcccttgtgactgaataaagctgccgttatggaaagacacccctgtgtgcacctccataccgtgctcatgacacccgaaaaaaaaaaaaaaaaaaaaaaaaaaaaaaaaaaaaaaaaaaaaaaaaaaaa

SEQ ID NO: 8493 - DNA, 570 bp, Canis familiaris
gggttgcatggtgttggagaacattgctccagattggctttcttaaatggaccaggttggaagacggcggagcgctacattggactcctatgacattgtgctggagaaggacgagacactggacgtggtcaacgggctgctgcagcacatcctgccatcagggggactggatagagatgcagggctcctgagggcaggtgtggggctggagctgcaggctgcggagaggagggagcctcacccggaggccgccctgtggggagcgctgcttctccctgtgtgtgcagagtccaggggggtccagctgctgagcccaggcctctccctcctttcccagcgtcttctgttgtgttctccagagttttgcgggaagcccaagagatgggagggccaaccaggtgaacacaggacctatagagtgttagcactctagggaccatctagtccaggggttcttttttcccccaatttttaaaaataggaagctattcttcaaacatctaatgtgtgaaacagatcaaaataaaaaaaggaaaaaaccaaaaaaaaaaaaaaaaaaaaaaaaaaaaa

SEQ ID NO: 8494 - DNA, 614 bp, Canis familiaris
ttaaagggaaaggtctgacctgctttcctgtgtattgcatctcactcctacccttgagaaccatagattgccaagcatatcattctagcatcaactaagatgaaaatcagatttgctgaaggaaaaatcggactgccaatcattccaaggcccaactgccactgagccactcactaaaccaacaggaaaccctggtgaaggttcaggaagcatggagactctctcctaacaaaggtcgttgggaaacgatgctgagaaagttagaagactaaggagccaacaagagaaagatgctcataagcaaagccaaggtcaccatttcattccacgaaaggtctctttcccaccgtccagctttcctgtggaaaggattccttaaagtttgacaaccgaagaattcaaaggatgtgaatgttccaagaactctgtgtgagttacctagagtgatattgccgcaactcactaattgtgactaatcacctagattgtacgctctctgagggcagggctcttctcctacacatctttataatccctacagcagctttccgtgttttgtacttgtaggcatctaataaatttattatttgctaaagagaaaaaaaaaaaaaaaa

SEQ ID NO: 8495 - DNA, 546 bp, Canis familiaris
tcctggctagacttatacctcgcatgtgtcacaacacttaacacgagttgtctaaatatttggcccccccgttaaagaacctcctacagatgttactccccctttcttgacacaacacggggtgctcagtactttacgccaagctgactttgaggcccactaacattctcacgggagtctggctatgctgggaaaaattagccacgatgccacgtgattttgagccccacttgcattttgatcgggatccaccttcagaagcagccttcatgccagagatctgtggttattcgaacctttattactagtgatttcatgactggtatacctgcaacacctggccatgaaatccctgtagaggtggtgttaaagatggtcactgagattaagaagatttcctggtatttctcgaattatgtatgacttaacatccaagcccccagggactaccgagtgggagtaataaacttcttgttttactaaaaaaaaaaaaaaaaaaaaaaaaaaaaaaaaaaaaaaaaaaaaaaaaaaaaaaaaaaaaaaaaa

SEQ ID NO: 8496 - DNA, 670 bp, Canis familiaris
  misc_feature (34)..(34): n comprises a, c, g, or t, or includes no nucleotide
  misc_feature (150)..(150): n comprises a, c, g, or t, or includes no nucleotide
gagttcctgggaccaagtgttcgctgccttctgncagcgggtacccgaatccctatagccaaacatggtcttggacgggaagacatagtgcaccgggaggtgacccctgaccagaaactccgtgtcccggcgtctcctgacccagaccancaggatgcctcgctgggcggagcgactctttcctgccaatgttgctcactcggtgtacatcctgggaggattctattgtggacccacagaaccagaccatgaccaccttcacctggacatcaaccacgcccggctgatggaatttggtcttgcccggttcaaaagcaacgtgaccaagacaatgaagggctttgaatacatcttggccaagctgcaaggtgaggccccttcccaaacccttattgagacagccaaggaagccaaggagaaggcaaaggagacggcactggcagctacagagaaggccaaggaccttgccagcaaggccgccaccaagcagcagcagcagcagcacgcactttgtgtagctagcccaggcccctggtgcggtaggacacctgaccacccggcccaattctctctgcctttttccccttgtactttattattaaaagtccacttccaaacaaacaaaaacaaaaaaaaaaaaaaaaaaacaaaaaacaaacaaaaaaaaaaa

SEQ ID NO: 8497 - DNA, 620 bp, Canis familiaris
tagaggagggttgtcagatctacctgtgtggcaccaagagtgacctgctggaggaggacaggcggcgtcgacgtgtggacttccacgatgtccaggactacgcagaccatatcaaagctcagctctttgaaacatccagcaagacaggccagagtgtggacgagctcttccagaaagtggcagaggattacgtcagtgtggctgccttccaggtgatgacagaggacaagggcgtggacctgggccagaaggcaaacccctacttctacagctgttgtcatcactgagacaccaccactcacctggtctaggggaattaaaggaattcccccagaagggctagatctagctcccatctgggcttgagtggtcatacgtctgagctacccccagtccccgtggcagcagaggtggcacctgcctgtgctggcccatggaatggaggcagcattgggctgactgatgggtgtgaggagggtaaaggcttacttggaccccaggctcttgccctggaagcacttgtgtctgcagattatttaagtggctttttatttgtaaataaaatcgatgcactgtgaatcacactcaaaaaaaaaaaaaaaaaaaaaaaaaaaaaaaaa

SEQ ID NO: 8498 - DNA, 665 bp, Canis familiaris
ggaggatccgggaattgactgctgtggttcaagaagaggtttggttttcctgagggcagtgtagagctctatgccgaaaaggtggccacaagaggtctatgtgctattgcccaggcagagtcactgcgttacaactcctaggaggccttctgtgcggagggcctgctatggtgtgctcggttcatcatggagagtggggccccaaggctgtgagatcgtggtgtctgggaaactccgaggacagagggctaaatccatgaagtttgtggatggcttgatgattcacacatggagaccctgttaacctactacggcttgagcacccgcctgtgcgccccttattgctggtcaaaccgggttttcttggcatccaaattccagattcaaggctttccctggggaacccttaagtgggttaaaggaattggggcccttaaggaaaggcccccctgcccagatcatgtgagcattgtggaacccaaggatgagatactgcccaccacccccatctcggaacagaagggtgggaagccagagccgcctgctatgccgcagccagtacccacagcataaatagggtctccttggcagttggatctggaggctggattttactctgtgaagacctttaataaaatatttgagtaaaacaaaaaaaaaaaaaa

SEQ ID NO: 8499 - DNA, 458 bp, Canis familiaris
agaatggagtcacgagggaaagatggagggatgcctttatcaggtctttggctttagggtcagatgctttttgcggtcatcttcccattagagaaggggatcccttgtccctgataataggcgatttggacacacctggctggcttgcctctccacacctgctcctagtggccctcctccccagccccctacacttctgctttaccctccttctgcctcaacacagggggtgggtctgaggcctggggtgggagcaggtgactttgtttagtcacagtcttaccttttgtggtcaggtttggctactttgcagcttaccccaagagatacaacctaaacccccccacctactttttttttttttttgtaatgattaaaagtaacttttgtagctaaaaaaaaaaaaaaaaaaaaaaaaaaaaaaaaaaaaaaaaaaaaaaaaaaaaaaaaaaaaaaaa

SEQ ID NO: 8500 - DNA, 353 bp, Canis familiaris
cgcgctcgcgtcgagccagcgcggcgggttcgagccccagcgcccgccgccactcggccagctgaccccgcagaagcgccacgtcgcacgcccagcctaggccgggtacgggcgccgccgccgccgccaggctggccagcagagccggccgccacgccccggcccgcagcgccgccgccttcatgcgcgccccgtggggagacgcggggggcagcgccagcagcagcgcaccccgcctgggccgggggcagcgcgcgccgcagccactcgcagagccccgggaggccgccaggccgcagcgggaacacgggtggcggcgcctcctccagcacctcccacgtctcatcctcggg

SEQ ID NO: 8501 - DNA, 574 bp, Canis familiaris
tctgagccacaaaacacagtgaaggagaaagctgaacaaatgaaaaataaggaaggcagaggacaaagcaaaatcacctcttaaggtctcttgaggttttaagatatagacaaatcctttaagagttggaatatactcatatgataatgttttatttccaacaggaaatgaagcaatatttttaaatctagatataaccttctgatgtaaccattggtatgttgtgccttgcctgtaaaaatcctataactaataaattgtcttcaagatacaaggcccagcaaagcagagataatgtaagaagaagcagaaaataacattcattgaaaggcatgaaaaaattcaaaaactcttcctctttcaggcaacttgtcctccagaaaggtggagtgagtgggtggagatgcactccatgtctgagggtactgctatctgcggggccagccggccgcatcctgaggtcccgattcctgccgtgacccgtcagtacgccgcgcgttccctggacccgcacggcgggccctcggcagcttgggggttgtgggcggcctcccgaccgcaccgagagcccccc

SEQ ID NO: 8502 - DNA, 680 bp, Canis familiaris
aggcatactctaccggcactgagcttgtgaccctgatgcccaaatgagacatcccccgagttgtcaactgagctggtgcaagctggcttcattagcgaggctgaccagagccgactgacttctctgctagaggagaccctggaacaagttcaattttgccaggaacagcaccctcaactcagccgctgtcaccgtctcctcttagagctcacccgggccaggcccctaatcagagctgcagccgtcactagacgcgcccgcagccttcctgcctctcccccccagtcagtattacccgtgtgaagccccttctctcctttattattcaggagggctttggggctccctggttctgggcatcaccctccccttccccttctcttcctcccctctgcactttgtttacttgttttgcacagacgtgggcctgggccttctcagcagccgccttctagttgggggctagtagctgatctgccggctcccgcccagcctgtgtggaaaggaggcccacgggcactgggggagctgaattctacaatcccgctggggcggacggggcgggagagaagggtggtgctgcagtggtggccctggggggccattcgattcgcctcagttgctgctgtaataaaagtctactttttgctaaagaaaaaaaaaaaaaaaaaaaaaaaaaa

SEQ ID NO: 8503 - DNA, 621 bp, Canis familiaris
tccagccaccccacaaggacaccccctgcagaaagtgtcctggacaccccagcttgcacccacttcagtccactgtcctaccagggtaccctcagtgtgtagagtcccaggacaccccagcctgcatccacttcaacttagacagcctgctaaagcacctgctgcacagagccccatgacctctggcttgtggtcacttcagtgtcaactgtcctaccagggtgcctactgcatggagagccccaagacctctggcccacaccaaccacaccttcagccagccatccaaagtcaccaagcacacacagtccacataagggatgagcatatgtaaaaccatgccttcatgtttagaagtagctgttctgctaatctatagaaacacaaaaagaaagtcaagcaagatggagagacagaggaatatgctccagaagaaagaacagacaaaccctcagaaaaagaattaagtgaaatggagataagcaatatgcctgataaaaaatgtaaagtaatgattgtaaagatgctccatggactgaagagaagaatagaagaattcatgagaccagcagtaacgacacagaaaatacaaaaaagaaccagagttgaagaatacataac

SEQ ID NO: 8504 - DNA, 690 bp, Canis familiaris
attgacccgtcttacttttttcagccataactcttatagtatagctgacacctaactaagaaatgtcataagataacatatgagagtgcttgctggctcatttggtagaggatgcaaagtcttgattttgggtttgtgagttcaagccccatgttgggaatgaagcctacttataaaaacataaaaagaataaaaatatggtgggattcacaaaaagaaacttaaacttacagaaatttacttttgattatttcagatggaagctccacctctctctccttttccacatattaagcaacaaccaggctcaccacgccgcatttcccagcaacactccatttatgtttccccacataagaatgggtcaggccttacaccaaggagtgctctgctatataagttcaatggcagcccttctaaggtaaggtgcacacaaacttactccaaaacaacctatgtgcatgtgttaaaaactggatttcagattaatagttagtaatctttaatcttgggcagcccccgtagctcagtggtttagcaccgccttcagtccagggcatgatcttggagacccaggatcaagtcccaagtcaggctcccttccctgcatggagcctgcttcttcctctgcctgtgtctctgcctctctctgtgtctctcatgaataaataaataaaatcttaaaaaaaa

SEQ ID NO: 8505 - DNA, 659 bp, Canis familiaris
aaaagttcacaaaattcttttaaatgtgtaaggcgcattatcctggatacattcagtctgagagaagaaccagtaccccgaagtcagtaatatgtaagaaatagctgaacagcttccaagttggtttacagcaaaataaaaatactgcctttaggtttttttatacaagttttctaaaatttagattcaaaatttaagtgctgccttttatggtgagtagtttgatcattaatttatgttccagtttaagatacttcatacaccgtaggtatttaatgccccaacaataaaacaaaacacaaacaaaataaactagagtcatttagtgaacatctcaaatgaacaaaattttatgcagaactgggtatgaagtcatctggagtcaaacaaaatcacttttttaaatgttatcagaccactcagtaatgaagactttcctacatacgtcgtcgtatcttcaggcaaaaactattacgaaattagatgaagtaactacagaattgtgtttcttggtttaccatcaaaatgatggtgatattaaagcatgcctctttccaaaccgcttggccaatgctgataacaagcaggcaaggagacatctgccagcgttgccccacggcccccgccgcgactgtcccccagcagccggtccgggcggg

SEQ ID NO: 8506 - DNA, 575 bp, Canis familiaris
atgaactaatctgttgaattctctaataccaacgtattctctttagggggaaactccataaatatattctgtatttttgctcacatgatgaataaagatcttcccttgttctatttctccaccatggttcagattaagacttctgtgtgggatttccaattttttttttttttgctttattgaggcataattgacagaattgtaagatttgaagtgtacattgtgatgatttgatatatattgtgaaaggcagaataagacttttgtcttttaagaaggtttgttatataataaaaccttgggccaataggaatttatgaactcctaagggtgtgactttgaaagttttgtctgataattgaaagttagagaagtctaattatgttaaatatccagaaatgtagtagtttacatacatgcctagattattcagaggtgattcagaattttaaattacataattattgaactaactacataaacattaacatcttaataaaccatttctcagtggaccaaaaaaaaaaaaaaaaaaaaaaaaaaaaaaaaaaaaaaaaaaaaaaaaaaaaaaaaag

SEQ ID NO: 8507 - DNA, 684 bp, Canis familiaris
aagacttgtggcttctctcttcctggcagcttggctctgagccctcccacccccattccgtctgcttgcttctcatcacccgtcttttgagcaggccccaagtttggggacctgtgctcatgttggtgtcattgaggggccaagcatgtcactcctgtgcctgctgggtggtccatgggacgtggagtgaggggcctgggctgggcctgagaacgagggccccattggggtgtcagctgtgctggagacaggaccaggagaaacatcctgacccccagggggtgaccgggctgaggtgtcatctcctgctggttgggggagggctttgtccctaaagagtcccctgtggggaccatagtaagtaccctcacgtttccagctcctggctctggttggaagagagagaggagagggttgtcagagtcctggggggggaggggggggaggtttggaagcaggagaccgccctctagtggggcccaaaggaacagtgccccagctccggaggggcccaggctggggtggccagccagtccctgtgctacggcttgggacaatgtgaacacggactcaaacacatggtcctttttttgtagttcttaattttttttaatgtgccattattgtgagggaaaaaagaaaaaaagaaaagcaaaccaataaaacacctttaagaagcttgaa

SEQ ID NO: 8508 - DNA, 634 bp, Canis familiaris
  misc_feature (113)..(113): n comprises a, c, g, or t, or includes no nucleotide
cattggaagctacaaaggagcccgcttatcattgataaaatgagcatttcacagttttacagagatcctgcacttgttgggtcagaaacaggagctaaccacatttgcaccgnttcttaaaccagcatccctttcctcttcattgcttcatcccatagaacctgtttaaatccaggtacccatcaccctgccttaactcctgcaccccacttacttgccggatcatccagtcaaactccattacctaccattaacacacaccctcttactagtggtccacaccattctgttcatcacccccatttacttcctgccgtgttacctggagtgcctactgcctccctacttggtggccacccacgactagagactgctcatgccagcagcttgagccacttagcattagcacaccagcaacagcaacagttgttacagcaccagtcacctcatcttcttggacaagcccatccttctgcttcatataatcagcttggactttatccaattatttggcaatatccaaatggaacacatgcatactcaggacttggtctaccttcctcaaagtgggttcacccagaaaatgcagttaatgctgaatcttcattaaggagggtaagttaaaaaaaaaaaa

SEQ ID NO: 8509 - DNA, 495 bp, Canis familiaris
gtggtgcagcagattgtgcaccaggccagcgcgggccaccagatcatcgtgcagaacgtgactatggaccaggaggcagggctgggccctgaggctgcagcggcggacaccatcaccatcgcgacacctgagagcctgacggagcaggtggccatgacgctggcctcggccatcagcgagggcaccgtgctcacagcccgcgcgggcactaatggcagcgagcaggccactgtgaccatggtttcctcggaggacattgaaatcctggagcatgccggcgagctggtcatcgcctcaccagagggccagcttgaggtgcagacggtcatcgtctagcgtggccgcctgtaggctctcaggcagggctgcccaggacccggagaagaggggacacgagttcaggtgttcagaggggatgtgggtgtgtaaatagttttttgttgctttacaataaaacatgaaaaagcccaaaaaaaaaaaaaaaaaaaaaaaaaa

SEQ ID NO: 8510 - DNA, 641 bp, Canis familiaris
agcctgggatttctgtgaacgaatgcatgccgttgagtgagcgaatgagtgaacatagagtccctgataggtgccgagcactgtgctaggcgctctcgagcattagaacattttgtgactctggttgccattttctgtgtaagagtaattcataccatcgtaaatgttttcccagtatgaattatgttacaaatcattaattttatatttcatttaaattaaagaggaagagaaatggtttataatatattttaagcgatgtgttactatatagtacttacagctataattgtagttaataactagtctcttggaaaatgtcagagaaatacttgatttctgatgtaactttgactaaaatactttagaaataaataagacattcttattttgctatatcacttgaattatataatgaaaaagtaatgttttatagaaatgctggttattttatattcaaaaaattttgtcatgtaagtcatgggtaaaatctgcagttgtaaattatttttcctctgctaagggtcccggtcatggtcccatgctgttaaatataaatatatatatatactaaaatatttctgagttccaaataacagtctttagaaatcataaaaaaaaaaaaaaaaaaaaaaaaaaaa

SEQ ID NO: 8511 - DNA, 659 bp, Canis familiaris
cccaacttgccagagcttcctgagtatttgaaaaattactcgttccggtttatatttcaatcagaatcgatgcatctgtgaggcagtttgttttcctggggaaagtgtaaggagctgtggcggtggtatggagacgcgctcggtttagactcaatattgccacccactccctcagcagtgtcagagaacagtctcagaaagatctgttccttcccctcacagacttggtaccacaggctggcctatcctcaatgacttcgcttatctccaggagtagggaagtactgattgcccacagcttgcctctgtttcttgtttgtctggtgcacatttttaaaaaggcatctaatgtttctcctccttcaagagttttcgaactgtctagatgcccctgtttcaacccatgagggaaggaggggaaactgaatggaaagaaaccagagagggagacaaaccatgagagactattaactctggggaaccaactgagggttgctggaggggagttggagggatggggtaactgggtgatgggcattaaggagggcacatgatgtgatgagcactggcggttatatacaactgatgaattattgaacactatatctgaaactcatgatgtactgtatattagcaggttgaatttattaaaaaaaaaa

SEQ ID NO: 8512 - DNA, 628 bp, Canis familiaris
  misc_feature (45)..(45): n comprises a, c, g, or t, or includes no nucleotide
gacttcttgtgcacttgaaatctgtgttaacttttgattacctcnaacctataaatagcatactgtgagtcaaagccttacccataagttaatcaacatacatttgtattgataaaatcataaaatatttaatgttgtctttattgaaaaaattctatgtttaagtggacacctgcagtgccaacccaggttgttcatggtcaactatgttgatgggtgtaggagaatttagtattctgtgtgtttgaaattggtgatatgcttggttaactggctctccaacatggaaaatgccgatttattgcatttgcctacttccacagcgtaagtaatcctatcatggccattttaagttattaacatgccaccgaaaacggagctgggaaaagctgtgcaaaaatatggtctttttcaaacccaattaccagtttatttattctactagccattatattcactgtaattaaacacacagaaacttgagttggtttctcttaaatcactgaagattcatcccaaatgataacaaatggctaagtactgacaagtattctacttctgcaatatcctattaaatgactaaactaccaccaaaaaaaaaaaaaaaaaaaaaaaaaaaaaaaaaaaa

SEQ ID NO: 8513 - DNA, 649 bp, Canis familiaris
ggaagaagccccctatggcgggagtcgagatctcattaatactgcctagacccagcacgtgttcttgaaacccccaccccagctccttctaagacccagaggcccaggggacctacctagtagaacagtagcatttggaactgagaacacaccagaaacagcaggaccattgccagagcaagaacatgaaaaccaattaggacattgtgggtataccggtgcaaaaaccatgccacagagcccacggtgggcttgataggaccttgaggggacagtagatttaaattaacgggagtcagacctgacctgtctttgtacagtgacaggccacactgcatgggtgtggacaagcatcgaagccattgtcttctgcctgttttcctgtgcacagtcacattccctccttagtcaccttcccctttcacccttcacattaaacaagggaacactcgatctttcaagggaattacacatttgagttaatgtttcagtatatcattttcatactgtaaattattttgtaagagagatttaccgctatcccaggatgtttggactcagcgcccctgtgcatttggaaatcaataaactattactggaaataccaaaaaaaaaaaaaaaaaaaaaaaaaaaaaaaaaaaaaaaaaaa

SEQ ID NO: 8514 - DNA, 594 bp, Canis familiaris
  misc_feature (151)..(151): n comprises a, c, g, or t, or includes no nucleotide
agaattttggagacccggggcaacccctggtcccccaaagagacccgacgccttggcttcatggcctaacactttgaagagagaatctttcgggagaaggaggagttatggccactcctcccctcggccttgtgctctcccccgccggagncctggaccgcggtccctttgcctgtcgtggctttgttcgggtggcggaccgacggctgtgctgggggcgccgacggcaggcctgctcatcttctgctgggtttgtccgcatgttgtaattgtgcaaataaacgctcactcccaattagcggtatatttcttgaagtttaatattgtgtttgtgatactgaagtatttgctttaattctaaataaaagtttatattttacttttttattgctggtttaagatgattccgattgtccctgtatttggaggaggagtttcttatttgaaggctcttggaaatcttaggtctcttaccttgaaaagataggtgttaatctacccttctagtgctctgaaaactgaataaaagtgatgacacctcccaaaaaaaaaaaaaaaaaaaaaaaaaaaaaaaaaaaaaaaaaaaaaaaaaaa

SEQ ID NO: 8515 - DNA, 663 bp, Canis familiaris
  misc_feature (29)..(29): n comprises a, c, g, or t, or includes no nucleotide
aataactgccggaccctgaggtgcactgnggacacaagaccaggaaggtagtgtctcccccacgccggacccccagttctggtgcgatgacaatctccaggacagatcacccagctgctcctggattatcaggatcaggcccgagtgtctggggaggcaggttctgtgttccttcccttttccagaacatgagactaggccccggcgtgcctcccctagtagctggtcttctaaccagaagggaccggtcagttcctctgcctcccagcggacaactcaaattcattttccaacttacctaacatcttaaacctttcttctgggagaactggaaggtagaatttggtttcatcgtgtcaggagctgcgtgcagccaggtcttgttttccctcactccgcccactggctccttgtctgtgcaacctgtgcaactgcggaggtgggggaggcccggcccccaccctcgccggtccccccgggagtgcgtaggtactaaaccgagcagtgcaacttataattaagcatctgcagtgtttacatgtttcttaatgtgtcgtcttttcaatggctgtattttaaaaaaaaaaaaaaaaagaacacttgtttcagttgtgtctctgattaaaggaagcccctgtggcttggaggcattgtgcccatggt

SEQ ID NO: 8516 - DNA, 539 bp, Canis familiaris
tttggacccatgaaaggatgtaaatttttgtagtcagaagtctctggcccctatgggtgtggagtccaatacttttcccaaccacgtatccataggtggctatgtctggttccatcagtcatcagctagctatggcagtggcagaaggttttaatttactgccaggttactatatgtcttatgcagtgagaggagagccagattgaagtgacagggaagctacaggttacacagatttgtgaactcagccaagcacagtggtgtcagggcctatgctgctacaaagaagacatgttttagaccatactcatgtgtatgggccaaaaactcgaggactgtatttgtgactaattgtataacaggttattttagtttctgttctgtggaaagtgtaaagcattcccacaaagggttttaatgtagatttttttttttgcacccatgctgttgattgctaaatgtaatagtctgatcatgacgctgaataaatgtgtcttttttttttaaaaaaaaaaaaaaaaaaaaaaaaaaaaaaaaat

SEQ ID NO: 8517 - DNA, 577 bp, Canis familiaris
agcttggccaccgtggtcaagcacgaacgggagctctcagagacagcaccacgtcagcagcccaagatctaacccaggtctcctgaagtctcccccgacaaccatccagagttttcaaagggtccagggatttaagaagatggttgacaggtggcgaaattcacaatactcgctgtatgtggcagatgacactgagccagaggagaaacctgtatgctaccctaaggatgcaggacaccactgggacaggagttggcactagccacacaagcagctactgatggtccgtcaagcggccctgcaccagctgtttgcaaaggagcatcggcagtacaagcaggagctaagtcagatgggcaaagcattttatgtggagagactctgatggcagctgagaccaagctggctctcaaaggctcgactgtagacatacgctcgttcttcagccctaaatcttcattgtttggacaatgtttattcatagctgtaaccttaaaacaacttcgtgggttttgctcactgctgctcagatgtcaaaaaaaaaaaaaaaaaaaaaaaaaaaaaaaaaaaaaaaaaa

SEQ ID NO: 8518 - DNA, 673 bp, Canis familiaris
  misc_feature (1)..(1): n comprises a, c, g, or t, or includes no nucleotide
ncgccaatggcggtaggcgtgtacggtgggaggtctatataacagagctcgtttagtgaaccgtcagatcgcctggagacgccatccacgctgttttgacctccatagaagacacccgggaccgatccagcctccggactctagcctaggccgcgggacggataaccatttcacacaggaaacagctatgacccttaggcctatttaggtgacactatagaacacagtttgtaccaaaaagcacggctggtaccggtccggaattcccgggatggccgggtcaacatccctcgaggaccctgaggggggtctgtttctgtgttttcctatgcactttttacgtcacttcttccatccaccacccctggtcttgatgcagaagagcctggaagaggcaggaaacgaggttcagtttcaaaattcaaggaagagaagtgggggacctcactttggcctctcaacatctcacaaaacacttgaaaatgtacagagcttcataatgcagtatattgttcccaagtggctagttgagaagattttgttttcagtaacattttagcttaaaaaaaaaaaaccaaaaccaaaaataaagtttcttcggtatgaaggtgacatagaaggaaaaaaaaaaaaaaaaaaaaaaaaaaaaaaaaaaaaaaaaaaaaaaaaaaaa

SEQ ID NO: 8519 - DNA, 634 bp, Canis familiaris
tgggacagacagaaaagtcaccgtccatcaacaccattgatgtatgagtgaagaaacagaaccagaaaatggatgcactaacaacctggggatgggatagggtcagggagagcttcaggcagtgatgtgcccaagagtgaaggatcccacagtttcccagagggtaatgacactcccacaatctcaggcctggtatccatcctctttccactgtgagcagggccagaaggtaggtctcttagggtctgtgcccctggacctgaggaatggctatcagatgggatatgtccttccatcccccagatccaggggagagtcacttgttcaaccatatcccactaggtcccaaatggggcccccatttcacctgcatcaggactcttggcatccccagctgcccccacatcttgcctctgggtctcagagaggggtgtttctttggctacttcccctcccccagcaatgaaaaggaattgcctgggtctggaggcagatgctgcactgcactactccaatgtcttccatggagcctcaggtgctcccctctcacctggtagcccattcagctgctggtgatctcagcccttggacatttttccaataaaggttcttggacaaactggaaaaaaaaaaa

SEQ ID NO: 8520 - DNA, 640 bp, Canis familiaris
tgaaacagtttatgaaaatatgtactcatccatagcctattgatctgcaatctacaatttaattaggttaagtatattttctcagtgtatccagtctctgtttcccaatcttaggcttactagagtgtaaaagattcattaccttttgtttaaatttttttaggataaggctcagaacattgtccattctgtatatagctagattaattgtgagtaaatccttaactgtttttggtaggttgcgcatcacacttctgtgatttttagataatatttcagatggaaattgtttaaaacttacccttttgaaaatagatgaatgatttgtttcagttgggaaagggggagtggagaagagcataagctgttttattgaagaataacacatatcctggagagcagcagatcttaggtgtacagctcaattaacttttataaggtgaacacacccatggaatcaccacctagatcaagatctagaacattagggaccctgcctaggtggctcagcggttgagtgtctgcctttggctcagggtgtgatcccaggatcaagtcccgcatcgggctccctgcatggagcctgcttctctctctgtgtcccatgaagaaataaataaaatcttaaaaaaaaaaaaaa

SEQ ID NO: 8521 - DNA, 640 bp, Canis familiaris
taaaatcactggcatgttgttggagattgataattcaggacttctttcatatgcttgagtctccagagtctctccgttctaaagttgatgaagctgtagctgtactacaagcccaccaagctaaagaggctgcccagaaagcagttaacagtgccactggtgttccaactgtttaaaattgatcagggaccacgaaaagaaactcgtgcttcaccgaagaaaaatatctaaacatcgaaaaacttaaacattatggaaaaaaaacattgcaaaatataaaataaataaaaaaaggaaaggaaactttgaaccttatgtaccgagcaaatgccaggtctagcaaacaatgctagtcctagattacttactgatttaaaaacaacaaaaaaactacaaaaaaatagtaaaatataaaaacaaattaatgttttatagaccctgggaaaaagaattttcagcaaagtacaaaaatttaaagcattcctttctttaattttgtaattctttactgtggaatagctcagaatgtcacttctgttttaaataacagaattgataactgagcaaggaaacgtaatttggattataaaattcttgctttaataaaaattccttaaacagtgaaaaaaaaaaaaaaaaa

SEQ ID NO: 8522 - DNA, 674 bp, Canis familiaris
gaacgagtcaaggatgccagtccgaaccaggtcgcagaaaaggtggcctcccagaatcgccgagggcttcagcgatactgctctcatcatggtagacaacactaagtttacgatggactgcgtggtgcctacaatccatgtgtacgaacaccatgaaaacagatggcggtgcagggacccacactatgattactgtgaagactggccagaggcccagaggatctcagcgtcactcctggacagccggtcctacgaaacacttgtggattttgacaaccacctggatgacattcggaatgactggacaaacccagagatcaataaagccgttctacatctgtgctagggaggggttttagtgactggtctttgggcatttccactacactgaagaagaaagctattttttaatgtaaataagatctctcctagcctgtgtggaaagccgacagtttttggaggtggcatatgccctgacaaagggcagaatgtccatcagccatcttttaatgcagagtctctagaagaggtgcagactttcccatctgaccggccctgtggagtcctgcccagttgtatgttgctctaatcctccaaaacaagctgtttctgcttgtccgagatcattcctattaaagagttttaactaacaaaaaaaaaaaaaaaaaaaaaaa

SEQ ID NO: 8523 - DNA, 685 bp, Canis familiaris
  misc_feature (644)..(644): n comprises a, c, g, or t, or includes no nucleotide
ggtcggattccggatgcccgtcacatcgatgttgcatgtgtgaagcatcttccggccccccgcctgccgacttgtatcatgcctgcgttggtacacatcacaatcgagtcttacgagaagggaaaaggccagcccttccaggagtgaagaaaaagcttttgggcaaagtaattggccctgctaaatgtggaaagacacccacagggaagtggagcctacaagatagttatagacgatgatgatatggatctctttcgggatctgatgacgaggaggaaagtgaagaacgaagaggctaagagaggacgccttgcacagtatgagtcaagaaagccccaaatacctgcacttgttgccaagtcttccatattactagatgtgaaaccttgggacgatgagacagatatggcaaattagaggagtgcgtccgaagcattcaggcagatggcttggtctggggctcttctaaactagttccagtgggatatggaattaaaaaacttcaaatacagtgtgtagtggaagatgataaagttggaacagatatgctggaggagcggatcactgcttttgaggactatgtgcagtccatggacgtggctgcttttaataagatctaaaattacatcgtagatcattgtccnttaaataaaagcttaaaagacaaaaaaaaaaaaaaaaaaaa

SEQ ID NO: 8524 - DNA, 746 bp, Canis familiaris
tacatggtgccgccagagatctctaacaccccaggatcaagtccacaggaaatgccaggaattatcaatgatgtcacgccatattgtctacctcaacctacaaaggtatgacagagaggaagagacaaagagatctagaacaatgcctcaacgacggagaatgaatagcactggtggtcagacaccccgaagagacctggaaaaggtgctgacaggggaagagaaaggctctcagacctggagatcctggattctgtgcccgtgcaagggtcccccaagccctcaaaacaaggactacgttgtcagaccttaattggaacgtggaaatggagtcatccaggttttcaggggacctccaagaagggtatcagtcgactggataaacagatgagaaagttcacagatatcaggaaaaaaagcagatctgcacacgcagtgaaaatcagcatcgagggccataaaatgccattgtgaccttgcatgggacgtgtccccatctctaagaaatgcgccatggactctttggagaaagaagatgatatttaaaaaaatttttttagtgtatctgtaaatggttctgcttgtatcaaatgttgtcatagaactcacatttctctcacttgtatttaaaaactgtttgttgtgtactttgtacagaagaatacttactagtcatacttctataaactttacacaataaagttccattctgtaaaaaaaaaaaaaaaaaaaaaaaaaaaaaaaaa

SEQ ID NO: 8525 - DNA, 594 bp, Canis familiaris
ttgattcatgatagacacagagagacagagaggcgggaaacacaggcacagccgagaagcaggctccatgcagggagccccatgtgggactcgatcccaggactccaggatcatgccccccggccaaaggcaggcgccaaaccgctgagccacccagggatccctctcatctgatgttttttaaagttatattttttgctgatttaaaaatgcctggtttcttagatatgacactaaaagcatgggcaataaaagaaaaaatagttaaatttgattccattgaaattaaaaacttttattcatcaaaagataatatcaagagagttaaaaagacaaccaacaaaatgagagaaaaatttgcaaattatgtatctgataagggattaaggcccagaatatataaagaactcctgcaactcaacaacaaaaacaccaaacaactgaattcaaccagaggactaaaatagactttttgccaaagatgtgcagatgatcaagaagtacatgaaaagatgcttaacattattaatcacaagggaaatgcaaattaaaaccatagtgagatacttcacacctactaggatggctgttatc

SEQ ID NO: 8526 - DNA, 644 bp, Canis familiaris
atgtgttggagaggctggagacactgtaccgtttgcagaatatattcaggaaaatgtgcaactttataagatgcgaaatggttacgaattgtctcccacagcagcagctaatttcacgcgccgaaacttggctgactgtcttcggagtcggaccccgtatcatgtcaacctcctcctggctggctacgatgagcatgagggtccagcgctctactacatggactacttggcagccttggccaaggccccttttgcagcccatggctatggtgctttcctgactctcagtatcctggaccgatactacaccaccaaccatcttctcgggagagggccgtggagctccttaggaaatgtctggaggagctccagaaacgcttcatcctgaacctgccaaccttcagtgttcgaatcattgaccaaaatggcatccatgacctggacaacatttccttccctaaacagggctcctaaccatatgctgtccctcccacttgccagggaacttttttttgattggctccttcatctttttctactcttttgacatgtatccttgatagatagttaattcagaataaagctgaatctggataaaaaaaaaaaaaaaaaaaaaaaaaaaaaaaaaaaaaaaaaaaaaaaaa

SEQ ID NO: 8527 - DNA, 581 bp, Canis familiaris
tagatcttttcatcacagggttttggagttgtttttaatgcagccatggtgactggaactgaaggtatttactcacactcaggtggctaaggaggaaaatctcatggcctttattgtaccttctctcgagcagctgtgatgtgcagggcctatgttaaacatgattgtattattttaatatcctatctttgaattcagagtagtatgcatcttaaaggcaaaagggtgtggtcctcaaacaatttaatcagaataccatcttgattgtgatttatccattatcacattttattttattttttctcatcactttttaatatgacatatataatattgcacccaatcagccctatgacttcattggaggcaaattggttgggcaagctcttccttgttctttagtcacaataaattaagatattttactagcttacttgtttattatttcccatcggctagaatgttggtgccctgtggacaggatttttttttcctgttgtgtttgttgctgtactcccagggtccagactaatacttggtacttagtagttgcccaataaatacattatcaaatgggaaaa

SEQ ID NO: 8528 - DNA, 629 bp, Canis familiaris
ccagctagatgccctcaactcccagaagaaatacttttggtggaagcctggacctgtaccgggaccttgaccttaatagcatgctccaaaaattgggaataaagccgtctatcaactactaccaggtttcagatattaaagatgcccttgccggcatatacggagtcatacctaaaatccagtgtcttccgccacaacagcaagatcaccagtcctgaggcagcacctgggttttcttgcctatgcttctaacaaggggaaatacggaccatcacggaggagggtgtttgttggaaagtagaacacaaggagtctcaactgatgagacccgattgtcttcagccaggaccacaggcaggaagaaatattctggatgacaaatccatgtaggtttttgttctaccacaaatttgagtgacttgggcagccggggtggctcagcggtttggcgccgccttcggcccggggcgtgatcctggagacccgggatcgagtcccacgtcgggctccctgcatggagtctgcttctccctctgcctgtgtccctgctctcccccttactctgtgtctctcatgaataaataaataaaatcttttaaaaaaaaaaaaaaaaaaaaaaaaaaaaaaaa

SEQ ID NO: 8529 - DNA, 606 bp, Canis familiaris
  misc_feature (57)..(57): n comprises a, c, g, or t, or includes no nucleotide
gccaggaaagattcacacagattttgaaaaaggattcattatggctgaagtaatganatacgaagattttaaagaggaaggttctgaaaatgcagtcaaggctgctggaaagtacagacaacaaggcagaaattatattgttgaagatggagatattatcttcttcaaatttaatacaccccagcaaccgaagaagaaataaattttagctattcggataaatgtacaacttcctaaaagggatatgatttttttaaattaaaatttctgaaaactgagggacaaataaagttaggggatgggaatcttctaaaaacagaattatttttgttttaaaattaaaatactgtgtacctccaatgaaatgcaagttcactgaatgtgaacagctttgcttttcacgtgattaagaccctactccaaattgtagaagcttttcaggaaccatattactctcatgatacttcattaatctccatcatgtatgccaagcctgacacatttgacagtgaggacaatgtggcttgctcctttttgaatctacagataatgcatgttttacagtactccagatgtctacactcaataaaacatttgacaaaccaa

SEQ ID NO: 8530 - DNA, 675 bp, Canis familiaris
ctatgaacactaccaaggtggttcaattcaatcgtttaccctttggtggtgagtttcatagccagcagcaatgccaatacaggactcattgtcagcctagaaaaggaacttgctccgttatttgaagaattgagacaagtggtggaagtttcttaatctggcagtggttttgacgtaaaccttttcatcataacagacacaatatcaatccagcaatctttagaccacaacaatacttgtatccatgtactcaagaaagggccccttttcccaccttacactaaagaaagagcctatagttataatttatggacagattgattgttatcttttcttgtgtagggtcttttcttgacttagtgagatctggggttaccacagaaacggctcattacatcacagctcccatggagttagtccagtcacagatatgcatgagattctattcattggatcagaatcaaaatgatactttgatccacttgagccattaagtgctccctattatataatatgcccaggcctgcagaatgaagcagaccctttttattgtgaataataatgaggacatatttttctttatattgttttatttctttgcattgagtgtgaggaagataaatggcttagtaaaagtaataaaatcagtacaatcactaaaaaaaaaaaaaaaaa

SEQ ID NO: 8531 - DNA, 641 bp, Canis familiaris
  misc_feature (65)..(65): n comprises a, c, g, or t, or includes no nucleotide
tatcagtagaagttgtcctgcctgtaactaattgaatgtcgggtccttaggtgccagatcttgtntgaactgcttcctcctctataaaacgtgtggggaagttgggctaaatgacttcttagaggcttcttctgactcctttaactttgaaaggcaggccatcttgatccattggtttgttatcatgcacttatggtattgatttgtgagaataatgcagggatgtttacttacatttagttgaattggtgtgtactcattggaatatagaaattttttgggcaactgatcaacttaaaatctctgaattacagacttatatattcaataccatatgcataaaacaacccttttgttactgagttttatgtatgataatttatctgaggtaagcacatgacacattcttagtctgtgattacagattaaaaaatactctttaattgtattaaaatataatttaatgcacgttgtttgaagcatctgtcttcatctgatacatattgatataattaaaaagttacccgttttccactctgaagatttacagtacgatctaaaactgatatgatcatcaaaattaaagttgaatgaaatttaaatagaataaatttaagctataattaaaaaaaaaaaaaaaa

SEQ ID NO: 8532 - DNA, 603 bp, Canis familiaris
ggagtctgcgtcaatccagtggccaaggaggttggtgactgaaacggtcacacagggctcctcggtagaccccaccgaagctcttagcttcctcggggtccgtggaattgttgaatcttaattgtgttttaaaggaccagttttatatagaataattaaggacctccttatttttatattacatgctaatggttcaagtgttggtcttggagagagaagatggaccctgaaggacattcccagtaaagccgtggcagcgtggagagcctctgagtggttgtgtcttgcagtactgttgtggaagattgaccctttgctgttgtatgtaaagtttaaatagcttctgttgtgactttgagccacgtgacttcttatttatctgatcttttcacggaagtggcacgtgaacacgtgtgaggtcttcacttctggtgagctgtaacccatatcatcttgctaaattaatgggttgtacaattactaagttgtataaatttgttatactttttgccccgttttagtaaattttgaaaaggaagtgtaaaaaaaaaaaaaaaaaaaaaaaaaaaaaaaaaaaaaaaaaaaaaaaaaaaaaaaaaaaaa

SEQ ID NO: 8533 - DNA, 441 bp, Canis familiaris
tgtggatgccgtgtacatactgtatttctatattctcctttgtacagagtcacttaacaagtcaagctactgttttacaggtgctccttatttattagagctgtgagagcttgggggacacacctgtgcgagcgagtctcgctttttcaaatatgaaattgggggccaggggaagggaggtgggagggagagggaagctcgaaagcccagggagagatttataaaagagaacaaaaggaaaaacttccagcaacaaattaaacaaaccaaccaaccccaacaccaagcccacccccaccccccatccctgccccgcaggaagcacagcccctcctctgggtgctcactcccctgcggggctcccgacattctcctctctccctgactggtgtcagcttcatcaaacaaaaataaatctctaagaaaaaaaaaaaaaaaaaa

SEQ ID NO: 8534 - DNA, 633 bp, Canis familiaris
  misc_feature (363)..(363): n comprises a, c, g, or t, or includes no nucleotide
ccggtgatcatcaccactccccaggaggtgtccctcccagatgtccgggaaggaatcaactttctgccaccaaggtgaagctgcccatcatcggagtggtggagaacactgagtggcttcatctgcccccagtgcacagaaggaatttcagatattcccacccaacgaacacgggggtgcagaagtcatgtgccagaatttgaagatcccgctccttggaaaagtgcctctggatccacaacataggtaagagttgcgataaaggacagtcttttctgattgacgctccggattccccagccacctttagcctacagaagtatcattccaagaatccacggagttctgtggtcgccatctgcncagaagaagggcacctcatcagttcctgaaacatgagagtgttcaggacacgagccgaccccgcagcccggcccaagcagcctggggacacgggcagaaagggaccagacgctggtagggcgtgaagtcactttttcagagacgctttaattgtcgtgttcatacactgtcagcaaacataaaggcaagaataaaaacgttctcgggcctccaaaaaaaaaaaaaaaaaaaaaaaaaaaaaaaaaaaaaaaaaaaaaaaaaaaaaaaaaa

SEQ ID NO: 8535 - DNA, 604 bp, Canis familiaris
  misc_feature (1)..(1): n comprises a, c, g, or t, or includes no nucleotide
nccaaccatctcatatgaagtaacgctagccattattctcctatcccgtcctcctaataaacgggtcatttacactatccaccgctaattattaccccaggacatatatgattaatctttccggcctgagcccctagccactgatatgattcaatcttctaccctagcacgaaactaattcgaggcccccttcgaacttaactgtaaggaggaatccgagaactagttttctggagtttaaacgtaaaggtatgcagcaggtcctcttcgccctattcttttctagcacgagtacgccaatattattataataaacatcctcaccacacattctgtttcttcggcgcattccacaacccattcataccagagactctactctattaacttcactataaaaaccctcttattaaccatctgcttcctatgaattcgagcatcataccctcgattccgctacgatcaggtaatacacttattatgaaaaaattttttacccttaactttagccctatgcatatgacatgttgccttaccccattaaaaaaaaaaaaaaaaaaaaaaaaaaaaaaaaaaaaaaaaaaaaaaaaaaaaaaaaaaaagg

SEQ ID NO: 8536 - DNA, 498 bp, Canis familiaris
agcttgggaagcagcagccgaaagcacctataacagtcctgtgtggaatggaggggttccaacagccttgctcttaatttgctgagtgggactgggtttgaggttccgtttctatccacaagtccccttgtctgaggatttctgcccttctgctgccctgatccaggaagacagacttgtaatgggactaagacccaggagaccttgctttccatagagactcagccctcaacctctccttacctggggctttcttggcttctggactctccggggagggctcctcttggaagagccacaggtgccaccctctccttgaatcaccgttgtgcctggcaatttcctgcccctgggcagatgtgatgctgattgggcgggggtgggcaagagggggtgagggcttgggctggggtaaggagtatgaggctgttagactgttagattaaaatgtacattgatgagataaaaagcaaaactgttactaaaaaaaaaaaaaaa

SEQ ID NO: 8537 - DNA, 610 bp, Canis familiaris
tttttcgtaaataaaataatactttgcaggttctgctttgagtatttaacaatattttgtaagttgcctgggttttcctagggaaacagtctttagtgaaataggatatagtttatgaagagactgttttaagtggaattccatcaccaccaccagcaaacacctgaggtgctgcattaagtgacaatcaaaatagtgagtatttatggaagaatttagaaagtgatttttaaagacgccattgctttgaaagcagttctctgggtttcttgaatgaaaatggctaaatgtatttatttatattttaaaatatcttcgtgttgttttctcatcaaagtgatttcacattgtcatgtatttaatttgtggtttgttttgtttgctttgtaatcttttaaagaactgactcttcttatctggggctcagtctctagccttcatgaggactctccctgggccaatccaaatctgttttacttcgggacggcagtggagggacaaagccagatggtccttgcacttccttcctgttctcaattaaattaataatgaaaaaataaaggtaactccttcccaaaaaaaaaaaaaaaaaaaaaaaaaaaaaaaaaaa

SEQ ID NO: 8538 - DNA, 587 bp, Canis familiaris
tctggtgtggataaccaccgttgcgtggaccgtacggtggcaggtgtctgacaatcgcttgcctcttgtccggcctccaaccccctgtgccgggagcagccctcgtctattgtgcaccgctacatgagcatcacctcagagcggagtgtgcccgccgatgtgttccagatccaagcaacctctgtctaccctggcgcctacaatgcctttcagatccgtgcaggaaactcgcaaggggatttctacattaggcaaatcaacaatgtcagcgccatgctggtcctcgcccggcctgtgacgggcccccgggagtacgtgctggatctggagatggtcaccatgaattccctcatgagctaccgggccagttctgtactgagactcaccgtcttcgtgggggcctatactttctgaggtgggggtggggagccctcagggagggagaggcttcctgtggcccaagagcctggggctcagggatgactgtgctcggctgcaagggcagatgctgttgtgaagagtagaaagagaaaggcaataaagggagaaagaaggaaaaaaaaaaaaaaaaaaaaaaaaaaaaaaaa

SEQ ID NO: 8539 - DNA, 699 bp, Canis familiaris
gaagccagtgaattgaaatatttagtgcacctacacaaggtatcaaccagaatcctagatcagacaaactgtactgtaaaagtgagggagaagcgaagacattcccagataagcaaagctgaggaggtttactactattagacatgccttacagagatgctaaagggagtcctgcaggttaaaatgaaacgatactagacaacaactcaaagccatatgaagaaacaagatcacagtaaaagttagtatgtgggcaattataaaagttggttggtattattataagtggtttgcaactcccctttttgttttccacatggtataagagactaatgcatttttaaaaagcaattaatagtctaaaaactagggtttttgttaactttggtttgtaattccacattttattttctacatagtttaaagactactatatttaaaagaattatttgtgttttggatacacactacatagagatgaaattttctgacattgataactgaaaggtgtagggatgagtctagaaagaagtaaagtttctgtatattgtagagtgttacaactctaagatgttgggttcccatgggaactatgaagaaaataactatagaaaatacacaaaaagaatctaaatattttgctataaaaatcagctaaacacaaaaatgacagtaaagaatgaaatggacaaaaaaaaa

SEQ ID NO: 8540 - DNA, 665 bp, Canis familiaris
gcagaccatagagctcaaggagggagtgcaaggactttgtgggacaaaattggccagtttcagaaaatagttggtggtttaattgagcttgttgaccaacttgcaaaagaagcagaaaatgaaaagatgaaggccattggtgctcggaacttgctcaaatctatagccaaacaaagagaagcccaacagcagcaactccaagcactaatagcagaaaagaaaatgcagcttgaaaggtatcgggttgaatatgaagctttgtgtaaagtagaagcagaacaaaatgaatttattgaccaatttatttttcagaaatgaactgaaagtttcattttatagcaggagggcaaaaaaacaaaacaaaacccaaaaaacctctgtgccgttccagtgacttgactaatgacccacgtttgtcctgagagatggtgtgtaaggaacacagcatctttgaaggcagtaaaccaatatgggggagcttattgcagatggccatgtgcatctgctggtgaacacctagtagccatggtggtccaggctctcacttcttggcattcttagcctgaactgagcagtctgtacactctgatccttttttttcttctttttttgtaaattcacatagctttggaaaggaagagcaataaattattgttttcaaaaaa

SEQ ID NO: 8541 - DNA, 607 bp, Canis familiaris
ccacacaacctgctgccctgcatggaatttatagactagtggggaaagacagatatcaaacaaatgattgcttaaataaatgtagaatttttagtttttaaagtattttaagacaagaaatagaatcttatgagagatgattagggatactgatctatcaagatgtcaaggaaagtttccaaaaaaagggatctactatctgaaggagaagcaggagttcagatgtggagaagtagagactcaaggtcctttggaagaaggacaagaggtgagacaaagccagtgtgactggagggtacacagggaggaaaaggggacaatgaggcaggggatcaaatcatgccagaccttgtaggccatgcaaaggatcttggtctttatctaaagagcaatgtggggcagcccagggggctcagcggtttagtgctgcttcagcccagggcgtgatcctggagtcctgggatcgagtcccatgttgggctccctgcgtggagcctgcttctccctctgcctttgtctctgtctctctctctgtctctcatgaataaataaataaaatgttaaaaaaaataaaaaaaaaaaaaaaaaaaaaaaaaaaaaaaaaaaa

SEQ ID NO: 8542 - DNA, 679 bp, Canis familiaris
catctctgcagctcagaagtggacgttttgtgatcacaagaccaccccatgcgcgttaacagtaataaatccattctcagctgagggaaacacagagcgattacagcctggcatagcccagcagtggatccagagtaaaagggaagacattgtgagccagatgacagaagcctgccttaaccagtcgctagatgctctcctgtccagggacttgatcatgaaggaggactatgaactcgttagtactaaacctacaaggacctcaaaagtcagacagttactggacaccagtgacatccaaggagaagaatttgccagaattatagtacaaaagttgaaagataacaagcaaatgggtcttcagccttacccggaaatacttgtggtttctcgatcacaacctttaaattcatttcaaaataaaaacttataagtgactctttttcaagaagaaaagtctttctataagaggttattttatatttctgttgcctttatcatgtcgtttttataaaatccacatgaatattagaagttttaattgaagtttcttcttcaggtaaatattagtcttcttccataacattatagtatgtttttaaattaatatattggaaagtttgtgttttgctacatggttaaaaaaaaaaaaaaaaaaaaaaaaaaaaaaaaaaaaaaa

SEQ ID NO: 8543 - DNA, 628 bp, Canis familiaris
gacgagctgaatcccagccagccctttccacaagggcccgagcccctgggcgccccggaccggccgggagcccgccccagagcagcccggaggcccggccggggagagctcagacgaggagccggtggagtcccgggcccggcggctgcgggcgcaccgggttgcagaaggtacagagcctgcgaagggccttgtccggccgcaaaggcccggcctcgccgacacccacgccggtcaagccgccccgccttgggcccggccggagcgctgacgggccgcccgcggaagccgggcctgcgctggagcccaagccggagtcagaaccgccacaggacaccgaggaagatcctgggagacctggggctgccgaagaagccgccgtgcttcaaatagagagtgcggcctgatggctggtgctgtccgcctctcctgtgcctgtctatgcctaatcccaaaagaaatctccctctcagaatgcagcattcacgcccaaataaggagtcaatcctgcatccacagcccaactctggcctgcctttcccagttccttcaggccggcctgtgtcctctgaaagaggagcaccactcacacctgcttgcagtcaccgtcaataaaagtaatgtcacc

SEQ ID NO: 8544 - DNA, 535 bp, Canis familiaris
tggaaaaagctgtggcaaaagatggttttcaacaatccgagttcgggctcccaatccctgtccatgttatccgtatctacaagatgttgtcctgtgctggagctgacaggctgctagacaggtatgcgaggtgcctttgggaagccccaggggcacagtagccagggtccacattggccaagtcatcatgtccatccgtaccaagctgcagaacaaggagcatgtgattgaggccctacgcagggccaagttcaagttcactggccgccagaagatccacatctccaagaagtggggctttactaagtttaatgcggacgaatttgaagatatggtggccgaaaagcggctcatcccagatggctgtggggtcaaatacatccctaatcgtggccccttggacaaatggagggctctccactcatgagaaccttgcaccacccgaaccctattcatgcccaccccataaatcctgcttcctgtcaaaaaaaaaaaaaaaaaaaaaaaaaaaaaaaaaaaaaaaaaaaaaaaaaaa

SEQ ID NO: 8545 - DNA, 666 bp, Canis familiaris
ggctgggggacccgtgagcaccctgccctacaccaaacgccgtgctgcatgagattcagcgcttcatcagtgtgctgccacttggggctgccacgtgccctcacgcgtgacacccacctgcatggctacttcctgcccaagggtacctttgtgattcctctgcttgtgtcttcacatcgggaccccacccaattcaaagacccagactgcttcaaccccacgaatttcctggacgacaagggcgagtttcagaccaatgatgccttcatgccctttgccccaggtctgggccaggagggaggggacaaggctgggcaggccccagggtgcctggttcccaccctgcatccctgtgtcctcaggaaagaggatgtgcctgggagcaggcctggcgcgatcggagatcttcctcttctttaccgccatcctgcagcggttctgtttgctcccagtggggaaccctgccaacatcgacctcagcccacagtgcactggcctgggcaacatccccccagccttccagctccgtctggtggcccgctgagggcaggcttagctgccctctgttcactggctcccagacctccttaccccgtctggtcaataaaggcccttaactgcaaaaaaaaaaaaaaaaaaaaaaaaaaaaaaaaaaaaaaaaaaaaa

SEQ ID NO: 8546 - DNA, 567 bp, Canis familiaris
cacttccacattgggtagtcaaccttgtgctatgggatatgggaagtggcgtctgtttctctgtaaggattcaccccccaccagcttctgtctcataaattagggtgccgatttccaaggaacctgttacctcgtggttactgtgtctcttacggcaggaaatgctgattctatacgccctactctgggtaccaccacagccccaggccagacatgtgtcggctggaacaccgacaagtgatgcccacctcctccagtccctagatgccacaacctccactctgtctctgtgatgatactttgggaccataagtcctgtgctctgattacctgggtcctcgatgcaccctgccacgcgttacctcctggagctggatgagaagcgtgtgtccactctcccagccaagtagacacttcgccatctgtacagtgtgaggcagaaataccaccttgcctttaatggtgggaatcatcacgcaatcccatcccaaaactgcgggagcttgtccagctcctgccttcttgaccgcatctgtactgtattgggaaagtatcccatccacaaga

SEQ ID NO: 8547 - DNA, 680 bp, Canis familiaris
ccatagcctattaggtgacactatagaacaagtttgtacaaaaaatcaggttggtaccggtccggaattcccgggatggccgcgcgggaggagtccgcgatggccgatgagatcgccaaggctcaggccgcccggccttggaggcgacacgatcttcgggaagatcatccgcaaggaaatcccagcccaaatcatttttgaggatgaccagtgtcttgctttccatgacatttcccctcaagcaccaactcattttctggtgataccccagaagcatatatcccagatctctgtagcagaagatgatgatgaaagtcttcttggacatttaatgattgttggcaagaaatgtgctgctgatctgggcctgaagaaaggttatcgaatggtggtgaatgaaggttcagatgggggacagtctgtctatcatgttcatctccatgttcttggaggccggcagatgaattggcctcctggttaagcatgttttagggataattttcccttctctaggcaatgatcaatatttctaagttccagtatgttaaacagtatacttacttttgcctgtgtatggatagattgaggaagtaatttttaaaacccatacataataaaagacaatgttgcatggttaaaaaaaaaaaaataaaaaaaaaaaaaaaaaaaaaaaaaaaaaa

SEQ ID NO: 8548 - DNA, 555 bp, Canis familiaris
tctgaaagggcattgccgtggcaactgaacgatcctactacttcagtattgatgctcctccctcctgttaacccgctaagaagtattctgatgtctccggtcttcttgccaactacaccgacccccagagcacagctgcgcttcagcaccattgaagagttttcctatatccggaggctgccctctgacgtcgtcactggctacctggccctgaggaaggccaacaagcatcgttccctgagccttgagaagtggagatgaggtggagaatctgtttcacaaggcaaattttggactcatggttttgtttcatggagaaccaactcattttgctgtcaatctggaaatgtcagtgctgtgccttggaaagaatgtttggctttaatttcagggttgtttttttttttttttttttcttttctgtgttttccctccaagtgtgatatttcctgttgaattaaattatatttcagttgttgcctcaagtaaagttgtttgacaagaaaataaaaaaaaaaaaaaaaaaaaaaaaaaaaaaaaaaaaaaaaaaaaaaa

SEQ ID NO: 8549 - DNA, 665 bp, Canis familiaris
gtttgccataagtttcatatagttcggctaataccactaaatagctgcaagaccgtgtcaagaagaaagcgttttaatcataatatacgccccacactgaggccctcgttcgtgggatgacaccaaccttacaatgcaaaatcagtgacggtgtggtgctgtcattacgagcgcgctcaggcactgcaccggagtgtgctttcctgtgagttggcaggcgttccaagggtgtacctgccaacctcaggtgctctgctctgtgggcactgtcatgtggccaggggtcatctgaagtgagaccgacacattctgaagaacaggccatttgtcccagccctctgcctttacgggtcccccctcgatcacagcacccgcaggttaggagcctcctaccaccagaactgaccgtccgtaggcactgttctcagtctgcaaagactgacttttgggtctaggtcagagcccgcacacagaaccgagaacaacgcaaaataagggcaacaaaagggcaggcattgaaaaaagacacgtcttctttatgtattaatatgttaattaaatggaaacaaagattttatatgaaaatgagtttatattacatttccattatactattaagttagcatgaaagtttaccatcaaaataaagttacctcttttattac

SEQ ID NO: 8550 - DNA, 622 bp, Canis familiaris
atgtggacctgtctctggagggtccggcctggaagatctcccgggaagcaaggtgtcattaagcttgaaaaataatggtgatttcttcattgccaatgaggtcggcggcccatctacatcgatggacggccagtactctggctccaagtggcgcctcagcaacaattccgtggtggagattgccagcctgagattcgtcttcctcatcaaccaggacctcattgcccttattcgggccgaggctgccaagatcacgccacagtgaggggtggtggcaggacccatgtgctctctgtggcctcagtttcccctgccattccagccccttggagctggaactcaggctcctggaaaaaccatagtaggcaggaggaaacccaactgcgggcccattgatctgagcctctggtagggcagggctggtcctgggaagcccctggaggctggaaccctccagcttccttagagccagagcccctcccctcctctctctgcaggctgccctcctcttccctcgggttcccacctttgccctttcgtctccagctgattaacttcagactttacctttattatttttcttttgtaaataaaaagcaccaagttccaaaaaaaaaaaaaa

SEQ ID NO: 8551 - DNA, 631 bp, Canis familiaris
  misc_feature (399)..(399): n comprises a, c, g, or t, or includes no nucleotide
aaagaagctcttcggcctgggacaacttcaacatggtcacctatgacatcaggctctccaagaatgtgaagagccccacatgtcaggaaaggcaacaggagctgctggtgacggctcctgagggcagagccagccggcctgtgcccgtgcagcttttctcggctttttaagctttcattattaatccggaagaatgtgcgtggtcaccgggtctgaccgtgtggaaacagcagttgggatttagacagtgtcacaatcaatggtcttttctttggtcagcttttaaagggcggtttaacccaaaaacagtgcaagtttcgtggtgatttggggcagaagctgtcatgcatagtagtctcttcatggaaaccacccccaaagctttttgggaaaataaanaggcccttactggctaaagggggcatatttggaggagagttggggcagaacagcttactccacacggcacccagggtcgtcccctgcctgtgcctggttaccacaagccataattagaggagggggagcagctcttgtggccagcgctgaacacctgcatagtgggcttctaaggcttcacgtagcatccagtggggcatcacataccctttgccctgtgaaataaagcaat

SEQ ID NO: 8552 - DNA, 586 bp, Canis familiaris
  misc_feature (407)..(407): n comprises a, c, g, or t, or includes no nucleotide
actggccctctccttctaggacaggaggacaggcttctccctgggctcagttgtctcactgcctctctgcacactccccatcttgttgctagaatcacatctattccaatttgtctttatttctagaccaagtttatcatttaaagaaaaaggcatgcttatctggggaaccaagaataagtgtcttctagctttatgatgaaatgcagttttctcaagaaggaaagaaaaatcttcactttcaaggactagtattgaaaaaagaattcctgctcaaggtagcatctcaaacataactcagtctgggagcccttgggaactataccttgggctggggaacctaaatttgaggatgaacgcttgctagttctgggaccctggacaagattgttggcccctggggatcnctgggtggcgcagtggtttagcgcctgcctttggcccagggcacgatcctggagacccaggatcgaatcccacgtggggctccctgcatggagcctgcttctccctctccctgtgtctctgcctctctctgtgtgtgactatcatgaataaataaaatctttaagaaaaaaaaaaaaaa

SEQ ID NO: 8553 - DNA, 618 bp, Canis familiaris
tccacctgtggacctggatgggtattaaactcttcaggcataattaatacaaacagagccaagatgatacacatattaatgatatgtcatgtctgtctctgaaagctcagtgacatggaaatactggaaacccacttaatttgcaggaaaggtgctttgccttgcttctctcagaggttttggactatgggaggcttaagctgcagaaatttcttttgtacttttgttctgcccttattttttgaaaattctaacatatgactgctgtatcagaagaaacatttcaggaaagtttcctattggaaattaacagtcctgaccatcagctgatgactttattaccccattcatctaaagttaataattaaaaatttttatgtttattttagattcaaagtatctggtactgatatgttaaggatgactgaaataactccaaaggagttatgctggagtagttgtagagaaatacatttgagctagtgtactagaaaactacaatacagtggaaatttcatgtacttgcaaacattgactttgtaaaattaccttcatttctttggcatcaaaggcttacattaataataaaatgacagctttccatttaaaaaaaaaaaa

SEQ ID NO: 8554 - DNA, 225 bp, Canis familiaris
gcagtgcccgagtctttaaggtgctaatggttgctccagttcttctactgttctcgcccattgaaatatgatcatatttgttcaagtctttttggtgttatgtggttttaaaaggtgtgcttaaaaggtgtgtagtggtatcttaccatgaatggtgtatttcccctaacaattcagtgtgcttcctgtacctcttcctcacataaatatttgccaattccagtt

SEQ ID NO: 8555 - DNA, 567 bp, Canis familiaris
ttccacagttttaatatattattcttcaacgacattttttgtaactttacactttttttggttattttattttaaaaaaatgaaaaattaatttaaaaaaatgcaaaaaactgttggattatttattttagaaatttcccccctttgtgttggactgcaaattgagtttcttcttctttaggcctttccacaactaggactgagaatgtatgtaaaagttctgtgacagtacagaaggaaaacaacttttatgtatggcttctaaaagggaaaaaaaaaaaagaaaccctttgacttccacgtgcccatctcaagacattccgattgcagatttgaggttctggattccaggcttggagttctccaatgttaatgcaaacagaactggcacacacacattaagatgaatgtaattattcctcttgctggtcactaccgtcgcttcctatttctctttctttgtgtgaatttatttaaaagaaaaaaaaacttttttgtaacgactatttgcagtttaaaaatcaataaaccccgttttttttcaagaaacaaaaaaaaaaaaaaagg

SEQ ID NO: 8556 - DNA, 628 bp, Canis familiaris
ttcacagcttagaagaacttaaaaattgcccatcatagacagtactaatctgatattgtcctcagctgttgatacccgtgtctttttttaagaaaagaaaattatttaagtatgtttaaaatgagtctgccagtagctctttctgtagaaacaaagtctggaactaaaagccatatatttttaaagaccactttaaactacttgaaaagaattctaggaaacatgtaagaaaagcttgttatgcattgcctgcttttctcagaaaagataaaaactgctgtaggctatcagtatatttgtttattttacatatttggcatatctccctggctaatagatcctagaggatcttgtatattttgctttagacaaagaatcaggttatgatcattgtgtctgaactatcttttgggctttgcattaggtcaagaattttcagggtatcctaaaaataggactcttatcagcatatacgtgcagagtaagtcacctttctgggtctggtttctgagtggccatctgttgtccaactctgcttgctgccaactagactttccaaaagatttgtcaactagttttttatatgttaacacaaatctaattattgaataaagagaagcatattctg

SEQ ID NO: 8557 - DNA, 658 bp, Canis familiaris
cgccacgtggcgcccgtgtccccctacagccggcccactcggtgttccccgctggccaccctccagcatcggctaccacggctccatccgtgggcgcctacgccggctacccgtctcagtttgtgcctggcctggatcctagcaagtctggcctcgtgggaggccagctgtcggggggcctgggcctgcctccgggcaagccccccagctccagcccgctcaccggggcctccccgccctccttcctgcagggattatgccgcgacccctactgcctgggaggttaccacagcgcctcgcaccttggcggctccagctgctccacctgcagcgcgcacgaccccgcggggcccagcctgaaggccgggggctacccgctggtgtaccccgggcacccgctgcagcccgctgcgctctcgtccagcgccgcccaggccgcgctcccgggccacccgctctacacctacggctttatgctgcagaacgaaccgctgccgcacagctgcaactgggtggcggccagcgggccgtgtgacaagcgcttcgccacctcagaggagctgctcagccacctacggactcacacggccctgccgggcgccgagaaacttctggccgcctaccccggggcttcgggcctgggcagcgccgccgcagc

SEQ ID NO: 8558 - DNA, 617 bp, Canis familiaris
aatagagagtatgatcagagatgatctctctttttgaagagctcatggatccatcagctcttgggtccagagaagctatcctgagggtaaggggcctggggagcagagctgtctccagagggcccttcccgccttcctgtcctggatggccagggttttctttccatcccaactgcctcccaaagtcatgtttggaagtattggacaacagacttggcccaaggacattccccaatttcaaccagagggagaaattcaggggaaggcagccctggatccgacggcagcgcctgcaggccagatgttgggttatgcataggatgcttgagagaggtgacttcatagcgtccccactgcgggggatgtccccatctctgccaggccagtatctgtaagctgtgctgtgagcctaatcccctttaagaacttagcttgttggggcacctgggtgactcagtggttgagcgcctgccttcgggtcaagttgtgatcctggggtactggactgagtcctacaacctgcttctccctctgcctgtgtctctgctgctctctctgtctctcgtgaataaataaataaaatcttaaaaaaaaaaaaaaaaaaaaaaaaaaaaaaa

SEQ ID NO: 8559 - DNA, 601 bp, Canis familiaris
agatcctgagatgttggtagaaggtggatgagggggtcaagggagcttgcctcctggccaagggtcccaagtcttcccaacaaggggacaggatctgtgaaacggcagggaaggaggagtggtggcaggttgatggtgtgtgtcagtcatttgggtgagcagtaacatggtctttaccggggtagtttagttggcctgagggtagtgcctgctggggacagtggccttgccttcctgccgcaggacagccaccgggatgcagatgacacctttctggagacaggagggctctttgctcccagcaccccaagggagtgctgcttctgagtgggcagcttccacagatgtggttcccctgggtgggttcaccccagcgattctctgcggcatcttcttaccccacctcctgtcatgactattatcctggggccacccggcaagtcctgagagcagaacctggtgtccctcggtcccaccaaggcatgtactcctctgtctgcaccactcagtgctcactttgcctcctccccactaacatccagactttaaaatacagtaaattagatgtaaactgaaaaaaaaaaaaaaaaaaaaaaaaaaa

SEQ ID NO: 8560 - DNA, 646 bp, Canis familiaris
acctgctatcacaagggtgtccggggacagaccggacccttgtgtttcgagtccagttccacacgtgcaccatccacggaccacggctcactttccccaaggaccagctggacgaggcctgggctgatgagaggttcccattccaagcctccgtggagttcgtcttctcctccagccctgaaaaggtcaaaggcagcaccccacggaatgacccttcggtctccgttgactacaacaccgcagagcccgccgtgcgctgggactcctacgagcacttcaatcagcaccacgaggacagcgtggacggctcccccacccacacccggggacctctggatggcagtccctacgcccaggtgcagcagggccacccacagccagaaccaccagccgggcaacacactcacccaggagcccaccactcacggcacaccaccatggcgtctccagtcagacagcgactccaggccactcgtccacgcatgaccgccgagccggccgccgagtcaccctggccaggccctcccaccgacggccgccgagcgccaggagctggaccgcctcctggggggctgcggggtggccgggccgggccggggcgccgggcgggagacaggccatcctggacgacgaggagcagccaccc

SEQ ID NO: 8561 - DNA, 655 bp, Canis familiaris
cagaagcggggaaacttgtttattgataaaataaagaaaaagaaagcaagaaaagataatatggggtcaagtgtaactccatggaaatgccacgtctgctcttcagtgaagaagctggttttagagtctcacagaaaacttttgagctgtatgttatttattgttgcataaaagacgcttttttattgctgccctcatttgtcagctaattattttttcttataaaatccagccccggttacacgtaatccacttctgtatcttatcatgattcctgtaggtaaaagtacaagacgacctctagatgtcttttctttctatgaaaggagctgctatgtacacatgtgcacacacacacatacacacacacaactgggaatcaacaatgagtttattgttcatggtagataaaaattaagcttgcataaaggttgggctaagtggtcccggactacagactctgttgccttgaatataacagtacaatttgtcatttactctgcaccaggctaaactgagtaaaaatctatttgaaggtatcttgtttgtaaacatttgtcagattctaatttttttctttttgtattaaaattcaactatggatgtatatgaaacaaaataaatggagatcatttttctcccacaaaaaaaaaaa

SEQ ID NO: 8562 - DNA, 528 bp, Canis familiaris
ggccacttgtgaccttgctcaactactttcgccacttgtcggagaatgagagcaaagctgcgagtccgcttcaaacttgatggagaagattctgtcagcctttgcggaccgtccattcctgacaatgccggaggagaactgacacccccgtctcgtcacgtgccacgcgggagcgtgtcccgagttcctcccgtttgccgtttctcccgcgtgttcctgccccgaagtggaccggttctccattgctcctgtttctcgcgccttcctcgtgcacaagtgtttagctgagccgtcccgcctgacctgctttcctgtggacccttaggaacagcgttgggagactgtcaggacccgtgagaactgagacggtggagaggtcctaaaccagcaagagaggggggaaggaactgggatcagacgggatttggaggctcttttttggctagttgattgtcgtttctttttccataaagtctagaagtttttcaaaaaaaaaaaaaaaaaaaaaaaaaaaaaaaaaaaaaaaaa

SEQ ID NO: 8563 - DNA, 613 bp, Canis familiaris
tggatgctgctggagtgcctctctgtaaccacggcagaagttgtagtcaccgaaattcctaaagaagagaaggacccaggaatgggtggaatgggtggaatgggaggtggtatggaggcggcatgttctgattcctagaatagtgctttaccattcttaatgaactgtgagaggaagctcaaggctgtgttcctcaaccataacttcagagaagtcagttcaaggaaatgactgaagaaaaggctggctgatgtttaagaaaatcgctataaccatcagttactggtttcagttgacaacatataatggtttactgctgtcattgtccatgcctacagataatttattttgtatttttgaataaaaagacatttgtacattcctgataactgagtgcaagagccatgtaccaatgtactgctttcaacttaaatcactgaggcatttttactactattctgttaaaatcaggattttagtgtttgccatcaccagatgaaaagttaagcagcctttctgtggagagtaagaataattgtgtacaaagtagaaaaatatccaattatgtgacaacctttgtgtaataaaaatttgtttaaagttaaaaaaaaaa

SEQ ID NO: 8564 - DNA, 660 bp, Canis familiaris
gccggccagctcctcaatgcggcatccggggctcatcggcgtcacctgcgggttcccatcgacctggccagacgcggctgcagaaccagcagacggccaggcgccctgtacagcagcatgtccgactgcctcatcaagaccatccgctccgagggctacttcggcatgtaccgcggagccgctgtgaacctgacccttgtcaccccagagaaggccatcaagctggcagccaatgacttcttccgataccagctctccaaggacgggcagaagctgaccttgtttaaggagatgctggctggctgtggggccggcacctgccaggtgatcgtgaccacccccatggagatgctgaagatccagcttcaggacgcaggccgcattgctgcccagaagaagattcaggcccagctatctgcccaagggggcgcccagcccgccatggaggccccggccgccaccccggcccacagctacccagctaacccgggacctgcttcggagccggggcattgccggcctctacaagggcctgggggccacgctgctcagggacgtccccttctccatcgtctacttccccctctttgccaacctgaaccagctgggccgtcccgcatctggggagaagtctcccttctatgtgtccttcttggctgg

SEQ ID NO: 8565 - DNA, 656 bp, Canis familiaris
agcgttcctcggatcaaagcgtaccgagatgcagacggcctggtgattgaccagcatgagatatttgtggactaatgaactggaaagggaccctcaaagggtggatccctcggagacttggaggaggtctgggagggaaaaaggaatctgggcagctgaggtttggggggcgtgaccggccttttcgaaaacccattaatttgccaattattaaaaacgatcaatacagagagggaaaacgggaaaagcgggagcgatctcggtctcgagaaagacactgggactctcggacgagggaccgagaccatgatcgtaaccgggaaaagagatggcaggagagagagccaagcagggtgtggctagaaagtgactgggagagagagagggacttcagagatgaccgagccaaggggagggagaagagggaccgaagtaaatagaggctcaccagcatcgccagaacccagacccagcataaacagaagcacagagatctgtgttgcttttatatagtatgtatgtccagtgcttgagtaaagcttgctaatggtggtggggtctggagtaagttttctttccgatctggaacccaggttccagctgaacatgatattatgaactttatctctcattatttaataaacttgagaaacagt

SEQ ID NO: 8566 - DNA, 630 bp, Canis familiaris
  misc_feature (39)..(39): n comprises a, c, g, or t, or includes no nucleotide
tttccagaagattggcgctgcacccaaagcagacagcanatatgtatgaagtgcctactggagagtattctgaacacccaaactgaaaagaagaagaaaaaaaatacacgtcctgggttcgtggaactttcactctgttgggtgcaccgggagattagacagcagcagccccggccactccgctcactggctatttatccgagagaagtgaaacgtgacgtccacccagaggctaatacacagatgttcgcagaggccttccccacagtaacccccaactagaaacaccaggaggagccaaggggagcaccgtactgcaatacaaagggaaaaattacggacacgtccccaccgtggatgcatctcagaatcatcacaacacgtcaaaggagagcgcaaaactgatctctagtgacggaagcggtgtgcgaattgggccctagacccgggcccaacagactacgcgggccacagggaatctctttgtaccgtgattgtggtggtggttccaggggtgtagacatctgcccgcgtccatcacattgtacacccggaaaccataccgttgcttgtgtataaatgatccctcaataaaatgtgctgttttattttaaaaaaaaaaaaaaaaaa

SEQ ID NO: 8567 - DNA, 696 bp, Canis familiaris
  misc_feature (1)..(1): n comprises a, c, g, or t, or includes no nucleotide
ncagaagaacgggttgggggacacctggccctcccggagttctggcacagttgcgagtataaagactcagcatcacgtagaagcactcgttgagcatcgcaacggcaaggtttggtttcagcatctactcgggaatgggcctattaaaaagcacctttatagcaccagaaattgtgtggcctgtgagagtataggacgagtgctggcagagcgatgcttagaggcagggatcaacttcatggtctaccaacccactccttgggaggcagcctcagactcgatgaaacgactacagaatgccatgacagaaggcggtgtggtgctgcaggagcctcggagaatctatgaatgaaatagcattgttccaaacggggaactaggaagctgtgaggtgctacgtccttcagaagagagcatctggaagaagggccagctgggaagttttgtacaatcccgtaacagtgtggaacattactgtagttaagttaactacattactgtagttaacatcactccctcctccccttaggtctgttttcggggttgggtggcggtggttaaatcgaaggctaaattcttcccctctcttggacaggagagaattatctgggaaaagcggttgccaattataattaactttcaaaggacaagttaaatgtttataagttaatgaataaaggcatattatgagcaaaa

SEQ ID NO: 8568 - DNA, 527 bp, Canis familiaris
atggttttgggttggggatctttctgggtcttgtaacttatatttttattaagtatgtacgcagatttgaggaaggcagtgagccctctacccacccctccctgttcccgaatgcgtgtgaataataggctcccactgcccccgtcccaatttctcctagaccctgaggttccagagtctggtggtgactggagcctcccccgagggggaatcctggtgctcgaatttccctccaaaagcaagtagccaaagccattgccaaacacccccacccccaattcccccccccagccattgggctctttatttatgacgactttatttattctaatggattttatagtatttatatatattgggtcgtctgcttcccttgtatttttcttcctcctttttgtaatattggaaacgatggaataattattgttataagtatgctataataatatattaagtaatatattgttaaaagtttatttttgtggtttttggaatttttaaataaaaggaatctgtgtgtaaactgc

SEQ ID NO: 8569 - DNA, 560 bp, Canis familiaris
atggattggtgaattggagagccctcctcgggacgtgaggtcctagagaccccgatgatggatgctgagaggtgcctgaccttgcccgatccatgataacgggtcgaactctccccgtgagggtttggggcggcttggttgccggctggctgagctgtgtcaagctgagagctacttaaccctaaagcatggggaaccaggacgcccgccgtcagacagaagacgcccttctcctgaccccgggcccccctctcttgtgtttaactctgaaaagagcagactttttgccgagaactttgagaagataccctgatggatggtgagaagccccgaatccccctttggaaaactttcttcccattaattgaggcagtctaggacctgggaggaaggggctggggtatcttagctcctctgatcaactaatgacccctcaagacctgtacttgatagttctaatggggaacgctgactcctgcacccttcttccaggactgttggacaaaaagaataaaattggggatgtgattacttccctgttaaaaaaaaaaaaaaaaaaa

SEQ ID NO: 8570 - DNA, 575 bp, Canis familiaris
tttctagatcaagcctagaaaggcctggtactgaaggaggaagtactggttctggacttcctactacatgagacttttgcactggtgctttagtatcgcagtcctccaaggattccatgatgatttttaatgtctttctcagaactctgatattcatcacatctaaaaggcatgcagcctgtttcatacatgcttgactaaatattgggacctctttgggtattttgaggcatttaactgtttcttggctagttggaagaaggtacatgggcctttaagcatcttctagacagggaagctactttcagagagaaaaacctttctaagagagctttgatagtttcacactgaagcatgaagttgctgacttaggttgtttcctccatctggttttaagtaaatgaaactaccagaagcttttgacacgagatattttaccatgaagaacacagtgataatggaagtagcagaaaagtttgcccttgtaaatgtgtaaagttctcctatggattttggtgagtgatcattaaactgttttccaacttgcaaaaaaaaaaaaaaaaaaaaaaaaaaaa

SEQ ID NO: 8571 - DNA, 624 bp, Canis familiaris
  misc_feature (1)..(1): n comprises a, c, g, or t, or includes no nucleotide
ncaaaagggaaaggccccaaggggaaatttcccttggaaaaatggcttatcgtataggtttagggcagcacatatataaggtggctgattgaagactactgaggtgtgatatctaaaggaactctccatatttgaaagtgagacaaaagcaccaaggaataaatacagcagttgatggaaaccagaagctattaaagaaccaacctgctcttctgaaaaccaagttttaaaaactattcatcttggggcgcctgggtggctcagacggttaagcgtccaactcttgatctgagctcaggttttgatctcagggtcatgagccccatgttgggctccctgctgggtatggagtctacaagaaagaaagaaggggggatccttgggtggcacagcggtttggcgcctgcctttggcccagggcgcgatcctggagatccgggatcgaatcccacgtcgggctcccggtgcatggagcctgcttctccctctgcctgtgtctctgcctctctctctctcaccgtgtgcctatcacgaataaataaaaattaaaaaaaaaaaaagaaagaagggagggagggaggagagagaaagagaaagaccttaaaaatgattcatcttaaaaaa

SEQ ID NO: 8572 - DNA, 591 bp, Canis familiaris
  misc_feature (1)..(1): n comprises a, c, g, or t, or includes no nucleotide
natctggaagatgtccttcccccgctggggcgtgagagaagtcttcacccaacaggccgacctgtcgagagtcacagggcaccagaacctggccagtgttccccagatagtcccccagaccctgctcgatagtgaccgagttgggcacagaagaccgctgccgccacgggaagtaaatttgtgttttttttccggaaagatcggccccctggtcactgttcgtttcaacagaccctttctgttttgcatacacccccaagatacggagacatcctcttttggggcaaggtcaccaacccccatcaagcctaggcctccccccgcagaggtggggcccctttcagaggtctgtgcgtgcagcctggcctctctgcaccgaggaggccacgtgccaggctctgccctgctcatcctttagaaggtgccacgtgactaacctggtggctttccacgggaggcctatgggctttttgattctgaggccctgaggtctccagacagccataaactatcttttcttggaaaaaaaaaaaaaaaaaaaaaaaaaaaaaaaaaaaaaaaaaaaaaaaaaaaaaaaaaaaaaaaaaaaaa

SEQ ID NO: 8573 - DNA, 603 bp, Canis familiaris
tgtgcgcgtcaaaggaagtcagttttgctattttgagggtgctcccttcggagctcttccagtgagtgggggaggggcggcggacgccgagcggtccccatctgcgcttgcgccggcgcctccagtgacccggcctacacgctcgcgcatgcccgctgcgcgcggagccgcggtggccggcggcgttgcgcgtgcgcgctgaggagcccgctgaggagcggcgctggcggacgtcgggcggacggcccgtgacgtcgtgaggagcgctttaaagtgcgggctgggccgggcgtccgagggtctggctgggagtcgggtcggacctccgcagcggccctccgcggcatgaggcgctgccggcgcccttgctctctgggacgtggagaaggcggcggaggaggaagtcccgttgccgccaccgctgcatgacccaccgcccctgaggcccgaccccgcgcccgccccctcgacgccccccgccgggtcctccggcctcgcatgggggcctggcgctgaggaacccctttcctccgggggcgccggggcgcgtcctccgagagccatgcccggccgcccctcccgccccggaggaccctagagcag

SEQ ID NO: 8574 - DNA, 538 bp, Canis familiaris
agatgatgcatttgagtgacgtaatcccaatgctttggtttttcttcattgctgataggtgttttatgcttttaatcatgaaagttatattgaaaccaatacgaatacaatctagttgttaattctacattgggcactgtgtcactatgcttgacctatctgggccagtagctatagttgtggggctggaagcttagagatacggaggagagaattctcatactcaccatcaatatcttggtcagacctgaactcttcagtctcttcagaaaactggataagaagataattatgcctgtttagagttaatctccaatttgcatactttgcttagaatttgggagacattttttgaaagataaatgccaaattatcggaaatttgttacagtggataatataccttattgtataaaattcatatttacctcttccatatgttagagacactgttgcacatgattctacttacgttaattttgtttcaataattaaaaccatggtaaaacttgaaaaaaaaaaaaaaaaaaaaaaaaaaa

SEQ ID NO: 8575 - DNA, 603 bp, Canis familiaris
aggtgctttcccggcaagttaagacgaatctgtatggcacctggcgtaaggctgcctccctcaaggagttaactaacaacctttcccaagcataagatgcttaatacagacctcagcagaatcttgaaaagcccagagatccaaagagccctccgagcaccacgcaagaagattcatcgtagagtcctgaagaagaatccactgaagaacctaagaatcatgttgaagctaaacccgtatgcaaagaccatgcgccggaacaccattcttcgccaggccaagaatcacaaactccggatggataaggcagcagcagctttagaagccaaatcggaggagaagggagttccaggcaagaagcccacggtagggaagaaaggaaagaaaactgttggtgtgaaaaagccgaagaaacctgtggtaggaaaaaaggctgcagctaccaagaaaccagcagctgacaagaaacctgcagaaaagaaacctaccacggaagagaagaagcccgctgcctaaaaacttatatttgtttattccataaaactcaaatcattttggacagctaattttaaataaagacctgatcaaagacaaaaaaaaaaa

SEQ ID NO: 8576 - DNA, 676 bp, Canis familiaris
agatcaggaatgctgcttgagaggcagggattgcttcatgcctctacacttacctggaatataaacgaaacctgtttttttctcccttgaattcagtatcttcaagggaactcattaataccagccacccaatcaacagtttccagacatgtatgttttttaaattacgtttatttagcgtatgtacacataaaagagaaatccccctctgatcccacccagcagaaaacatgcacaaacccaaggtatatgtggagggaaggggccccagccccaagttagtggttgggatggtgcaatcctgggagtcccaagccccagtcaggagagggctggcccgaagtagcgggcagcccccctgctgccagccctaaaataagcgtgcgccatagccaaaggtctgtttgatgccctcaaagtagtaccgctgccagccctgccgcgtcctctcttcctcgggggcagggatgcctctgccttccatgcacagctcagtctctccattcttgtcaaggaaggtcaaggtgatggtggcaaagtgccctggagaaaggcagagaggaagggaggtttcagatccatggtttccaatcaggatttgagacaggggtaaagagaagagttctggagggtaataacaataagcaaataaatgtacttaccttcaaaaaaaaaa

SEQ ID NO: 8577 - DNA, 566 bp, Canis familiaris
  misc_feature (322)..(322): n comprises a, c, g, or t, or includes no nucleotide
gatagactaacatgttgaccatttttcaacttaagagattaaccaagatcagaaagctttagagtataataaagtagatgttctcatataccctgttctcagtactttcatctttttatctaaacctgacagcaattctatgaaatagtactactattgttccatataatatggatgagttaacttaggtacagaaaaggttaaataacttgcccagagtttaaagttgaagaaatagaatttgagcccaggctcttagaagagagagccctccctcactcttaacataatacagtattgtccctgtcagtactagccatgnagccataagggcatttatgaatatctataaagtcaagtaaaagaacatttgccatcatttactgagtaccttcttcgtgtcagattctgagaattttatgtatttaacacatcagatcctttacaacaaccttaacagtaggtggtactattcttacttacagaataagtaaaaagaagtaaaaagtaaaaagaagtaaaaagaagctcacagagatagggtagtttattaaaaaaaaaaaaaa

SEQ ID NO: 8578 - DNA, 614 bp, Canis familiaris
tgtccagaaattcttaaacggcgagcacatgttgttgcttgtataaagcctggtgatgatttttagactaacttccctggtgccctactggcaatagcactaccattgtaccctgctgtataataaataatcttagacatttatcaactgttgatacaaatgttagtccctaaccactttttatatgttttaaatttttgaaattcaagtgtacctgccataacatgaaataaacactagactgtatcacattttgaattatttcgtttaattttggatctctagaaatttattaaaaatatgaaagttttagtttcaatttagtttaaaataagcttttagtttagaaatgtctaactgtagcatttgataccaagtcagctgtcagaaaaatctgcttaaatattttgaaaaacatcccactggaaaaaaattttttttgaataaaaatcagaaaataaaatcatatgacatttttttaagaattaagcactaaaaggatattcatgtgccatcagcttgcagtttcatgtgaccaaatggacagttttatttgaaagaatgggaataaaatgattgattatggaaccagtaaaaaaaaaaaaaaaaaaaaa

SEQ ID NO: 8579 - DNA, 623 bp, Canis familiaris
  misc_feature (20)..(20): n comprises a, c, g, or t, or includes no nucleotide
ccagaactgttgtattatgngagttgtgacactggtgtccatcctccagtattcccatgtgttactgcccaacaccgaaggtccaggacctggtagatgacaagtccctgcaagaggcatgtttatcctatgtgacccaacaagggcacaagagggccagccttcgggatgtgttccagctgtattgcagcttgagccctggcactactgtgagagacctcattggccgccacccccagcagctgcagcgtgttgatgaacgaaagctgatccagtttgggcttatgaagaacctcatccgccgactacagaagtatcccgtgcgggtgtctcgggaggagcggagccaccctgcccggctttacacaggctgccacagctatgatgagatctgttgcaagacaggcatgagctaccacgagcttgatgaacggctggaaaatgaccccaatatcatcatctgctggaagtgaggctggtgggggctaaactaggcacacgactgtggctgctttcgtcctgcaaagcgctgtctggtgcatgagggctagacccgtagactagtccgtattgtctcaggggtgaccctcagttctgtaaataaaagcatctgtttcaaccta

SEQ ID NO: 8580 - DNA, 624 bp, Canis familiaris
tgaccgtgcccgctgcaagtacagtcacaaggatatagtacggagggctgcgccagcttgctgggggaagaaaagtaccggcaggacctgacggtgcctccaggctactgcacagacttcctgctctgcgtcagcagctccggtgctgtgcttcctgtgaggacccaggaccccttcctaccgtaccctccccggtcctgtccccagggccaggctgcctctcagtccactacccatgaccccgccccaagggtggtgctgatgctgcgagaacgctggcatttctgccgggatggccaagtgctgctgggctcccgggccctccgggagcggcacctgggcctgatgggctaccagctcctgccgctacccttcgaggaactggagtcacagagaggcctgccacagctcaagagctacctgaggcagaagctccaggccttgggcctccgctgggggcctgaaggggggtgaggggatgtacatggggctcagggtgacccccaaagggggtggacaatttgcactttggctctctatattttgatttctcattaaagtccctttctttcccccaaaaaaaaaaaaaaaaaaaaaaaaaaaaaaaaaaaaaaaaaaaaaaaa

SEQ ID NO: 8581 - DNA, 658 bp, Canis familiaris
  misc_feature (141)..(141): n comprises a, c, g, or t, or includes no nucleotide
gaagcattgaaaaagggaaatatcacctttgagcacatgtttgaaagaagtgccgattgtgaaattaaaaactgcacattctgatcaacgtcctaatgtgggagcttgagaagaagtcccagctgttaagcaggataaacnatgaattgctccagttctttgctaagcagccaatcactttggggaagaatctacagttgctgatggacagagtggatgaaatgagccaagatatagttaaatataacacatacatgaggaacacgagtaaacaacagcagcagaaacatcagtatcagcagcgtcgccagcaggagaatatgcagcgccagagtcggggagaacccccactgcctgaggaggatctgtccaaacttttcaaaccacctcagcctcctgccaggatggattctctactcattgcaggccagattaacacttactgccagaacatcaaggagttcactgcccaaaacttgggcaaactcttcatggcccaggctcttcaggaatacaacaactgagaaaaggaagtttccagaaaaggagttaacatggactcttgagatcacattggggcaatccttggaagaaatacatttgtgtattgaaaagtctttctagctaataataaaataaaaataaaacaaaaaaaaaa

SEQ ID NO: 8582 - DNA, 603 bp, Canis familiaris
catcattaccccctagttgtgaccaaaaggacttcggatcggaataggttctttttatccgtatcagaagtatttgtctttgcaggcttcttctgagcctgtgaccactccagcctagcccctactcctgaacttggggtttctgacctcctaccggcattattcctctgtaacccattagaagtgcctctactcaacacctcagtcctcctagcctccggagtatctattacttgagcccatcatagtttaatagaaggtaatcgcatacatatacttcaagccttattcagtacaatctccttaggcgtatattttacgctattacaggcctccgaatactatgagacatcttttacaatctccgatggggtatacggatctaccttttttatagccactggatttcacggattacacgtaattattggctctacattcctcatcgtgtgcttcctccgacagctatactaccacttcacatcaaaccaccacttcggatttgaagccgctgcatgatattgacactttgttgatgtagtctggctattcttgtatgtatctatttattgatgaggatcctaaaaaaaaaaaagaaaaaaa

SEQ ID NO: 8583 - DNA, 617 bp, Canis familiaris
gccgagccgccgcagccgcgccgcgggccgggtcccgcgcttcgccggggatgccgcggccttgcccaggacgctgggggagctgcagctctaccgcatactgcagagggccaacctgctctcgtacttcgacgccttcatccagcaaggcggggatgacgtgcagcagctgtgcgaggccggggaggaggagttcctggagatcatggcgctcgtgggcatggccagcaagccgctgcacgtcaggaggctgcagaaggccctgcgggactgggtcaccaaccccggcctcttcaaccagccgctgacgtcgctgcccgtgagcagcatccccgtgtacaaggtgcccgacggctccgcggcgtggctcggggtgccctgcggcggcctcgacagggccagcggcgcgcgcgagccccacgcgcaggcgcccaagtgcgccgcggccacgtgcgtgcagggcgcgggccccgggcggccggcggcgccgggcggcctcgtgctgccggccgtgggcgagccgcggctgtggacgggcccgcgcggccccgacagcgagcccagcctgtcccccggcgacctgggctcccccgcgtccccgagggagggcggcgagg

SEQ ID NO: 8584 - DNA, 636 bp, Canis familiaris
  misc_feature (407)..(407): n comprises a, c, g, or t, or includes no nucleotide
cctttaaaattaaatcaagtgtaatccaatacccatgtggaattccgaatggccaagtggaggggggccaggagggttaaattgtgtgtaatgatggggacctttgaaaactaccatcctttctataacccgacactaccacactttgagttcaataatacaaatcctgatataaaacttgttacagagtttggctcactttcagccgtttccctgctgctcagtggcaagtgcgagtctaaacttcctcccaaggccggtgtaccagactcagcactttaaagcttaatcactgataaactgcaccatgtactccatctgagttactacagaacttcaagttgcctgcttcttaatgattcccaggaaacttagttctaggcatacattttataaagtattatacnagtgttaactatgcaaataagttctaaatttacacaattatgtgtaatattttagtccaattactgtgatttattcgactctgttcattccaaagttatctggaattgtcatgctgtctcattttatagaaatctggtttaatatttataaaggcatagcagtcattttgttaagtttctgaatagatgacataaaaataaaatcaaggctttgaaacaaaaaaaaaaa

SEQ ID NO: 8585 - DNA, 427 bp, Canis familiaris
tcggtgttcccaggtagccaatggtggcggcaagtgatcagtgaagccggtgatccagtggctgaagcgcgtggagtactggcgccgagggccgctacaactccaccatcgacgtgggcggccagaagttcgtggtgctgcccacgggcgacgtgtggtcgaggcccgacggctcctacctcaacaagctgctcatcacgcgtgcgcgccaggacgacgcgggcatgtacatctgcctgggcgccaacaccatgggctacagcttccgcagcgccttcctcaccgtgctgccagaccccaagccgcccgggccgcccgtggcccccgcgtcgtccagcacgagcttgccgtggcccgtggtcatcggcatccccgcgggcgccgtcttcctcctgggcaccgtgctcctgtggctgtgccaggccaa

SEQ ID NO: 8586 - DNA, 656 bp, Canis familiaris
ctctacaggttcttgccacagaaatcatacacctgaatcaacttcttgcaggaggactccctcaatgtggctgacctgacctctctccgggccccgctggacatccccatcccagaccctccacccaaaggatgatgagatggaaacagataagcaggaaaagaaagaagttcccaagtgtggctttctccctggaaatgagaaggttctcgccttacttgccctggttaagccagaagtctggactctcaaagaaaaatgcattctggtgatcacatggatccagcacctgatccccaagattgaggatggaaatgactttggggtggcaatccaggagaaggtgctagagagggtgaatgcagtcaagaccaaagtggaagccttccagacaaccatttccaagtacttctcagaacgtggggatgctgtggccaaggcctctaaggagactcatgtaatggattaccgggccctggtgcatgagagagatgaagcagcctatggggagctcagggccatggtgctggacctgagggccttctatgctgagctttatcatattatcagcagcaacctagagaaaattatcaacccaaaaggtgaagagaagccatctatgtactagttcagggaaaaaaataaatgacctatga

SEQ ID NO: 8587 - DNA, 662 bp, Canis familiaris
gcagaaggggtatggtcctttagccctagctcaggctgtccaagagagcagctcaggcacccagcagcttccagctcctttatgacctcaagctcccagttgaggataaaatcaggatcatcgcacagaaaatctatggggctgacgacatagaattgcttcctgaagctcaacacaaagctgaagtctacacgaaacagggctttgggaacctgcctatctgcatggcccaaacacacttgtccttgtctcataacccagagccaaagggtgtgcccacaggctttgtcttgcccatttcgtgacatccgtgccagcgttcggggccggttttctgtaaccccttggtagggacgatgagcaccaatgcctggactcccccacttcggccctgtttctatgatattgatttggaccctgaaactgaacaagtgaatgggttgttctaaacagattgcctctcttcaagatgctgctccacaacatttggccaatgtgcattcaggccgactgttggttaggaagtgtggggaagtcgagagaagtcaacccctgccctgaagatcttagaaagtaaagagcaagaattcccccagaagcctctctttggtcttaatccccaccatcatgtataaattaacataaatcatgaaaaaaaaaaa

SEQ ID NO: 8588 - DNA, 616 bp, Canis familiaris
tggtgagtacgtggcccagaacacacccatcacgtggctggtgggcccttcgccccggggagtcgtcgagaaagccccagaagagaagaaataagacagccaggaggaggctggaggggagggacctagcctctccctgaggggcggcctgagcaccagacccctcgcctcacttggaacatgtgtccctaacctgtcccaccccaccccgctccaccccgctccaccctgcccatcttagctgccccctcggggagctgcaaaccgacctgtccatcccctcctctgcgctcagaggaagcgtatcctgagcatcacctcctcagtcaagacagggagggttctaggaaaagttttctaggagaccctcaatttctttttttcttaaacccagggatacatatcccatctctttttctttatcaagggccctggatatcagcctttagctgatggacttggatttctcccggggagggggtggagggagcgccacccaggcccatccgagagcagaggggctcagcctgcctggcctcccgtacctgccgagcttccgtattgccttaataaacttcacctgcagctaaaaaaaaaaaaaaaaaaaaaaaaaaaa

SEQ ID NO: 8589 - DNA, 619 bp, Canis familiaris
tggttcagcccctccgtgacggttgcccgacatgagcctgcccggaccttgacagcaggcctggccagcatccaggagctcctctccccccaggagccaacccaggccttcttgaggcagagaaacagcagccctgacttcagggaagcagctggtgcactaacacggcgcaacccctgttcttggtggacccgggctccgtggatatggaagcagcgacctgcccgtgctcttcgagctgggggagggttcctacttctccgagggggacgactacacagatgaccccaccatctccctgctgacgggctctgagcccccgaaagccaaggaccccactgtctcctagaggccccaggaggaaggctggccaagggctaggcgtggaccccggtcggcagcgagggccacagccctgtgtgcctggctggcttgaggctttacagccaccttggactgaccagcactgcggggattcagtcaggattggattttgggtttttacacgagagtccccctcaccccttcaatagagatatacacacacacggacagacggacggacgagactggcagagacctataaaggacagactgtaaaaaaaaaaaaaaaaaaaaa

SEQ ID NO: 8590 - DNA, 665 bp, Canis familiaris
  misc_feature (138)..(138): n comprises a, c, g, or t, or includes no nucleotide
  misc_feature (155)..(155): n comprises a, c, g, or t, or includes no nucleotide
cacattccaaagggccaagagagttaacactttgggacttcaaggggggagattttgttcatctttgtatgtggaagaggagccagaaaacctctgttctttccacagagcaggatgagcgctattctattcttacgnttttgcaaggggatttntttcttggcgcacctgggttgaaattcaagtgtgctggcaaacaggggagttaggttatgtattaaaattacatacacacccaaagaggtaaattgcacaaatgatttagatcagaagcaaataagtttggaccaatgctgttgataaatctaaattgttaagagagatcttatattgtattgtcaaattctttattagatttttctcaagtactggctctttcctgctctggacaagaattgagcagcttgtccaatgactgggaaaggaggacctgcaaccatctgatttggtctctgttaatgacgtctctccctctaaaccccttttaggactgggagaggcagagtaagccccagagcccaaacctcagtggttattaagatgttcaatcttgtgctgaaaattcctggtgatttaatcaataaagagtaatttctagtgaaataaataaaaaggactttgtggaaaaaaaaaaaaaaaaaaaaaaaaaaaaaaaaaaaaaaaag

SEQ ID NO: 8591 - DNA, 575 bp, Canis familiaris
atgtgtgcgtgcgtgtgtgtgtatgtgtgtgtacatttccaggtgtgcctcttgctacttttaaaaattcagtcatcccactactaatttgacatcttttcatgcttctagtgttttggccatacatcaacagagggctttcattttcccatgctgatgtgttcaggaaaggctgggtcaaattttgagtgggggataggaaggggagggggagaagaaattgacatttattttattatttatttaaaatgtttacatctttgtgttgtaccaagcctgatgagaaacagcattaaaatactcggttcctctctccctctctttcttcatttttttaaaaaaaaattaggctaatgatgctttttttgtttctaaaatgatttgtgacatgtgctgtataaactgtataaaatggttctgtttttaaagatggattgtcattcctctggggacagtggtcaccaaaaagtctacattgtaagagaatacaaggaaagatcctgcccctgttcctcaaaaattattttctctgtatgattaaaagtttattccatttaaaaaaaaaaaaaaaaaaa

SEQ ID NO: 8592 - DNA, 612 bp, Canis familiaris
gcatttgagatggcaatcagtctgggacaaggagaagggaaatggatgatcctgcttggttgtgactcattggccaagcttgtgcaagacattgtgtgtcagtttacacccccgtgctttcccacgaaataataaaccttcagttgtaatcccccagagtttatatttgatgcattcagatttgatttgcttagcgaactctcctgtgtgcaggttatctgcaggtatagattggtggcattgctattgatccctgtgatttacaggagcctaacattctttctctagcagtaaaatgtgtttgagtcttctccataggacactcctcactgaggatcagatgtaggttcaagatacaagacttatcttctgttaacccttgtatcctactaacctcatggagaacttgggcaatatatgggccttttaatcaggcttacaagttaggtgaaagaaaggaaagaagaaaggaaggaaagaaagaagaaagaaagaaagaaagaaagaaagaaagaaagaaagaaagaaagaaagaaagaaagaaagaaagaaagaaagagaaagaaagaaaagaaagaaagaaagaaagaaagaaagaaagaaagaaagaaa

SEQ ID NO: 8593 - DNA, 591 bp, Canis familiaris
acctcaagcatctctttattttgatgatatattttttataaggaaaataaatattcagatgatcgggaatgtatataactaaatgaaatcaagaaaaggaaataacagtatgcatttaaaaaacagaattatgaaattatatatcagtgcttagaatggggctaagggaagtgctgaaatgtagcaaaaggtaggagatgatgttgactgtcacccattgtaaatgtctgcaaatggatatttgttatacaagcaggattattacaagtgatctatatgaatgtcaaagccgtgacttccaggctttgcatcttgtatatgggaagaaatatgacaatcctagttaattagaccatagacccaaagcccttacatttgatgcattttgttttaaaagtaggccttgtttttcagcttcatctgcagttctatgtgaagattgataaatcagtttttacttgttttattaataagaacgtaatttggatatcttgagttgatggttttgtgatttagctgggtaaactatctttgtaacagataagttatttataaaaattaaaaaacttatattctaaaaaaaaaaaaaaa

SEQ ID NO: 8594 - DNA, 639 bp, Canis familiaris
  misc_feature (10)..(10): n comprises a, c, g, or t, or includes no nucleotide
  misc_feature (86)..(86): n comprises a, c, g, or t, or includes no nucleotide
atgggagttnggcacccagctttccgctccttttggaccccctgccttgcatcttgtgcaccctgccaggaccggccgacaggatntgccagcgggtgacctgccccccaactggagtatccctgccaaatcaccccttgaggaaagtagccgggaagtgctgcaagatttgcccagaggacaaggcagatcctggtcacagtgagatcagtgccaccaggtgtccgaaggtgccaggccgggtcctcgtccacacatcagtagctccaagcccagacaacctacatcgctttgccctcgagcatgaggcctctgagcaggtggagatctacctctggaaactgataaaaggaatcttccacttgattcagatcaagaaagtcaggaagcaagacttccagaaagaggcacagaacttccggctactcaccagcacccatgaaggttactggaatgttttcctagcccagaccccggagctgaaggtcacagccagtccagacaaagcaaccaagaccttgtaatgaagacctaagcagttgcagatacgagctttaccatttttgttgttatatattaataaatgataagttgcattactcctcaaaaaaaaaaaaaaaaaaaaaaaaaaaaaaaaaa

SEQ ID NO: 8595 - DNA, 646 bp, Canis familiaris
attgctttgggaccattatgtgaacattctcattgggtaatctataattaagacacccatggaaaggcttatttttactgactgccaggctaggaagcttcaaggtttgtcatttctgttggaatataagtttaaatggtaatggaatcaaatccataagctctgaaaagtcgatcaccttatatcgcttcatgcagtccttctttgtcctgccaggcactgcttctgctattttttcccatctttcaggtgtatttactgggtatgtttttaaagcctgttcccaaagcttctgttcttccgttgtccaaggggtgaaatctgtgcatgggcctgttcaagaaaaatttctatttgaaacctcttattttatttattttttaaagaaagtggtacagagaagccagtccacttatttcaaaaaaaatttttttttaagatttatttatttatttatgatagagagagagagaggcagagacacaggaggagggagaagcaggctccatgccgggagccagacgcgggactcaatcccgggactctaggatcgtgccctgtgccaaaggcaggcactgagccactcagggatctcctgaaacctcttattttgatagaaaattctgaaaaaaaaaaaaaaaaaaaa

SEQ ID NO: 8596 - DNA, 631 bp, Canis familiaris
agatgaggatggtgaggaggaagagtttgatgatgaagaggatgaagatgaagatgaagatgtagaaggggaagaggatgaagacgaagtcagtggagaggaagaagaatttggacatgatggagaggttgatgaagatgaagatgatgaggatgaagatgaagatgaagaggaggaagaaagtgggaaaggtgaataagaggaagagagaaacagacgatgaaggagaagatgattaaaacccccaataacttgcaaagaaagaactgttcagtattggttggactgctcatatggatttggtagctgtttaaaaaaaatataataaaaggtagctgtgatacaaaccccaggacacccacccacccaaagagccaaagaatagttcctgtgacattccaccttcctctatttagcccctcttggaaattcaccaccaagcttggggacttcaccccacaaaattgtaagcgttgttaggttttcgtgtcagacttgctgtagcgtggagagttgtgattggtgagccagccattgtggcttccagttacaccgagactgtaacagcatttttactttctgtacaacaaagaagctttgtaaataaaatcttaacattttggaaaaaaaa

SEQ ID NO: 8597 - DNA, 604 bp, Canis familiaris
  misc_feature (335)..(335): n comprises a, c, g, or t, or includes no nucleotide
cagtgaattcacttactcttcctcagaatccctccccacaggagaccaagtgttgcaacattttgcttctatcccattgttaaagattcagagaataaaccaggctggttgtgtccgccctccccactccccatgaagaataaaatccccacctctgactttgcaaacctatcatttaaggtgataggacagtactagaaaagcatttccgtttcacccctcaaaactgcggggggacaaagctgccactggaatgctattttattcttggacccaaagtgggacgttcaggaggaaaggggtcatcctggtcttcactcctaactgagtggttntgaggatgtacccaagatagttgcttctcttttcacaggcgctggggtgcccagcccatttggggtaaataagaccatggctgtgtgccttgtgtgtgtgtgtgtataaatgtaagtgaggctctaaaaggcccttgaacgtgtcttaatgagaacgtggtgatgctattttagatgtctgccaggtgagagcaatgctaaagcacaatccccaaataaagaccaccatttccccaaaaaaaaaaaaaaaaaaaaaaaaaaaaaaaaaa

SEQ ID NO: 8598 - DNA, 467 bp, Canis familiaris
  misc_feature (20)..(20): n comprises a, c, g, or t, or includes no nucleotide
  misc_feature (28)..(29): n comprises a, c, g, or t, or includes no nucleotide
  misc_feature (31)..(31): n comprises a, c, g, or t, or includes no nucleotide
  misc_feature (81)..(81): n comprises a, c, g, or t, or includes no nucleotide
gctgttttctaaaggtaccnatgctagnncnaggtctacggtggacttcagctacccctaaggatgggtgtgctactggcncaaggtgttacctggggtgctttgttttcttgtactgacgatgaggtgtctgtacacggtgccttgcgattcgtagtagaatagactgacctggtaaccagtcctctgtgaatagggggtaaagaatgaattttcacaaggcaataagtatttaaaagtgattgttcatctataccactttatatagatagtggtattaagatcaaaagctccatcttcctatttagatatacagtattgattaaagaatacctgtgcctgcagattccagtttcaaaggaatttaatattatttacacagttaaggaacagatgatacatttccatttgttagaaactgatctctataataaaatagattttaaattcaaaaaaaaaaaaaaaaa

SEQ ID NO: 8599 - DNA, 623 bp, Canis familiaris
  misc_feature (4)..(4): n comprises a, c, g, or t, or includes no nucleotide
gagncccctcagttcacagggcctgcctcatgtgaaggagctaataatttggatgatgatgatgaagaagaggagccttgtgtgatctgtcatgagaatctctctccagaaacctctctgttttgccttgtgctcacaaattccactctcagtgcattagaccttggctgatgcaacaggggacatgcccaacctgcagactccatgttttgttaccagaagaatttccgggtcacctcagccgacacttgcccaagatctgatccaagggtgtgattatgcaaaggaagttcagttatcagattccagaatttagttttgccttttgttatgaactgatagtgtgaggtgttgtgagaacacgtggtgatctctcttatagtttggtttaaaagaagcctagctaatttttcattccaaaggctgccagcccaaagagggaccaggaccaaacccttcaggacttggagcggaaagggcttaaattttaaaacttacattgtatttgcccatatgttagtaagcattttcttccaatgtaaacatcattgttagacaagaaaaaaaacatcctaagatctaaaaaaaaaaaaaaaaaaaaaaaaaaaaaaaaaaaaaaaaaa

SEQ ID NO: 8600 - DNA, 362 bp, Canis familiaris
  misc_feature (1)..(1): n comprises a, c, g, or t, or includes no nucleotide
ncatagtttaatagaaggtaatcgcaaacatatacttcaagccttattcattacaatctccttaggcgtatattttacgctattacaggcctccgaatactatgagacatcttttacaatctccgatggggtatacggatctaccttttttatagccccctggatttccccggattacacggtaaattattggctttaccattcctcatcgtgtgcttcctccgacagctatactaccacttcacatcaaaccaccacttcggatttgaagccgctgcatgatattgacactttgttgatgtagtctggctattcttgtatgtatctatttattgatgaggatcctaaaaaaaaaaaaaaaa

SEQ ID NO: 8601 - DNA, 587 bp, Canis familiaris
gtcgtctcggcctcgacaggcgcccacatcttgccccaccttccaactgccaagtcaaattaaaatgcagatgaaagggacgtgaaggccaatcctgcattttgctaaacgcagccatgttcttgagtcaatgactatcacgcaagcatgatcatctttgaaacccccaagcaatggacatgactatgtttttagatttctggccccttgattggacttaaccctctattaagttttcctttcctccatgtgtaaaatgaatatctctgtgttgcagaaaacagcatgttcagaagaggccatcaacaagggtacattggtgtcaggccacaacagaaatttggtttccggggtggatgtcaaatatctaatatttcttcaagattcttgcttcaggaggcaacctggttggctctggttgagtgtctgcctttggctcagggcgtgatcctggggtcctgggattgagtcccatatcgggctcctcttggggagcctgctgctccctctgcctgtgtctctgcctctttctctgtgtctcttggggataaataaataaaatcttaaaaaaaaaaaaaaaaaaaaaa

SEQ ID NO: 8602 - DNA, 629 bp, Canis familiaris
gcccctccgccggccgccttttggttttttttgttttagctgatgttactttgtagtaattatgatagagcagaatacgtgtactacatacttatgcatttggagagcaatgaaaagagaagagttacagttatttagttgttcaaaaaaagcctcagaatccttctctgtctcctgggatcaccagcacacaggggatgtcacttgagcagggccaaccttctagggcttaggaggtctacaagggaataggggagtgggagagggggctagagcaggtcttctatacatcctggcagctggacttcaccaaggaggtcttgcccagccaggggacagtatatatctggaaagagcagagcgttttcctcatcaggtgtggctggtcatgaaagggacagttgtccaagttgggctgggacttggtacatctcgttcgtccaatctccacctccaagaagtagttcatcccagacacaacctgcttgcgggcgcgcagcactcgcagggcgcggctgtggtaggcgtcgttgctcgcccggttgtactcgcgcacggcgaagtccagcgcctgctgcacgccctcctccccgacgtccgcgtccaccgcgccgcccaccgcgccgggc

SEQ ID NO: 8603 - DNA, 344 bp, Canis familiaris
cataaggatagatccaagtccttcccaatgcctaaggcaacttttaaacaaacatggacctctttaaaaacagagcatttcagaaaggaagagtattgtgtgtgaacaggtgctataaaatctggagttgtgtttgctattttgattattgacttgtcccccaattttgagggaagcatctcgggggagagttgcaaactagagctcatcccctgctctagtttgaattacttgagcttgaaagttatttagaatttgaaatgcaaaaaaataaaaaaataaataaaaaataataacaaaaaaataaaaataaataaaaaaattaaaaaattaaaaaaaaaaaa

SEQ ID NO: 8604 - DNA, 732 bp, Canis familiaris
  misc_feature (193)..(193): n comprises a, c, g, or t, or includes no nucleotide
  misc_feature (209)..(209): n comprises a, c, g, or t, or includes no nucleotide
  misc_feature (215)..(215): n comprises a, c, g, or t, or includes no nucleotide
  misc_feature (277)..(277): n comprises a, c, g, or t, or includes no nucleotide
  misc_feature (297)..(297): n comprises a, c, g, or t, or includes no nucleotide
  misc_feature (570)..(570): n comprises a, c, g, or t, or includes no nucleotide
gctagagaggatggaaatgaggaagataaggaaaatcaaggagatgagacccaaggtcagcagccacctcaacgtcgggtaccgccgcaacttcaatttaccgacgcagacgcccagaaaacccttaaccacaagatggcaaatgagactaaagcagccgaatccaccagcgtgagaatttcgtccgctcccngaggctgagcagggcnggggcntgagtaaaagccggcttaccaatcttctaccattcatccggcttttagttcatcccaaccantgatatgaaattgataagantgaaatttccacgcaactaaagaagaatgataacaccaaagattttggaggactgtaagaccccttaaagatgtcgtctgcttctttttgcgccacttgagccacgagtaaaatatgagactattcttgcacattattttatagcacgcacatggggtgttttaattaatttttaaccctctaaagagaccgtttttctttttgggtaattggattaaaccggtggttttttttaaaaaaaaaaaaaaaaagcctggtttttctcaatacacnctttaaaggtttttaaattgtttcatatctggtcaagttgagatttttaagaacctcatttttaatttgtaataaaagtttacaacttgattttttcaaaaaagtcaacaacggcaagcacccgttaataaaggtcttaaataataaaaaaaaaaaaaaaaa

SEQ ID NO: 8605 - DNA, 603 bp, Canis familiaris
tggatacatttgtgaaagaaaaagtagaactggattgaaaacataatgcttttaaatgtgaggtcctggggatcccctgggtggctcagcagtttagcaaacatgtgcctttggcccagggtagtgatcctggagttccaggatcgagtcctgcgttgggctccaggcatggagcctgcttctccctctgcctgctgtctctgtccccgcccctctctgtgtctatcatgaataaataataccttcttataaataatcactaaataaataataataaataatatgatgagattctcaattatagagcaccaatacctctcccccagacccaagagtattgtatatattgggagactcccattctacagagattctctataagtttttccctttggtggaatgcctggtggctcaccagttgagcatctgcctttggttcagggcatgatcccagagttccgggattgagtcccacatcgggctccctgcatggagcctgcttctccctctgcctgtgtctctgccttctctgtgtgtctctcatgaataaatagatttaaaaaaaaaaaagaaaaaaaaagacaaacggaaaaaaaaaaaaaa

SEQ ID NO: 8606 - DNA, 618 bp, Canis familiaris
  misc_feature (170)..(170): n comprises a, c, g, or t, or includes no nucleotide
  misc_feature (206)..(206): n comprises a, c, g, or t, or includes no nucleotide
  misc_feature (224)..(224): n comprises a, c, g, or t, or includes no nucleotide
  misc_feature (269)..(269): n comprises a, c, g, or t, or includes no nucleotide
  misc_feature (286)..(287): n comprises a, c, g, or t, or includes no nucleotide
ttgctgcctttggccgtggcagcttttgtgctacgaattctcatggaaagtatggaatcctatggaaattgaatccctgtcattaacagggagaaatgccaatacatttatatctccgcaacagagatggagagctaaagcccaggagaggatcacgagaaaccaccaangcccgcctatgagctcaacccgggaagcctgtgatnggacttcagagctttgcnggaacagctacagccatttggtttataggataccaatgctgcgcntacacatcgctatttcnncgggcatcgccgaaggagggcaacatagagagttgtgaaaaagatcttctcttctcccttctcacgagacgctcgtgggtcgccgtgtgtttgtgatatcgccttaacacagatagcattcattcgaaccataccattaaaccaccataccaaatttgcttagtttcttaaatgttcttgtctggctgttgccctccttcctgccccccagatcaataagcagtgaaaatgcaatgtggtgaaaggtcaaaagagaattaagatgtgtgattattattacataataaactcttggatggatactttcaaaaaaaaaaaaaaaaaaaaaaaa

SEQ ID NO: 8607 - DNA, 656 bp, Canis familiaris
  misc_feature (194)..(194): n comprises a, c, g, or t, or includes no nucleotide
  misc_feature (260)..(261): n comprises a, c, g, or t, or includes no nucleotide
agctaagttgcccaacctagattctgtggcagctgaaggctgcaaatggttcagtttgatcgttacttgtcagccccagatagcctgctaatgccacagctgaactttcttctaagtgccacagtgaaagagcacaatcataaaacacgtctacagaattagtctgcagagcctatggtgaagtgtatgcagcntgtgatgaatccacggtgaatgatataccagagattccagagagccattcctaacactcgatcgcnncttcagcaaagtgcaagacacttcctcgtccggagtaattcttactgtgaatagtgtgagcacaaacacttgcatccctcaagacttctaaaggttttctttgttcttttagtcttcctaatttctcgctcttgagaaagtggagatgggtaaccgagatttggttttggaattccataaccatttgttagggtcccaataattccttttctttggatcacaataacatggaagtaagtaatataatttcaacctgagttagtgttgctctgtatctgctccttatgtaaagatgatctgttttctgtgagctacctccccagctctgcagttttctggaatataaatgtatgggaaaaagtaaaaaaaaaaaaaaaaaaaaaaaaaaaaaaaaa

SEQ ID NO: 8608 - DNA, 564 bp, Canis familiaris
acccctgccacaggctatatagacccatgccgttccctaccgactggccttcagatcatgtgagttatgtgctaaagctgcacgaagactggggttaaaatcaagactcatttccacattgacttgattatgtcatcctcccacctattatgtaaattaaaggaaagagttaaggcaagagaaattgaacatatttttgtattaagactcaaagtttccggtaaattctagtcctctttctactctggccaggtggatatcagctagaaaacatggttttccttccttttagacctatactgcctaatacagcagctagtagccaccaggacagacaaaccagaggctgtggagtcagaaaggcttaggacccagagccaccaaatgctctgttatttatttatcagatttgaacaaaggcgaaattgaggtctttcttcataaccgagccccatgtcaagtgctgagtagccattagctagtggctacacaattggacagcacagatataaaacaattccatcaccacagaaaattccataggatggcactgctctaaacctg

SEQ ID NO: 8609 - DNA, 453 bp, Canis familiaris
gccgggccaggggccaagggcccccacccacccggtggtggatcccttgggctccgtctgcaacaaccccacttccgttcgccagcaatttccccgggcaagctgaaccctccgcgggaaagggccatccgggctgggcaaaccggaccgtcccatgctgcacagggcaacgcagcccaccgccccgtccaggcaggtgcactggtacttgcagctgctctggaaggactctccgctccggtacacagttcctccgaagacgcagggggccccgtctttagccgtgcacacgccgatcttgcggttggccggggagccgaagtcgcaaaagaggcccttgtgcgggtcgcaggggtcgcgctccgtgcacagctcgcccagctgcttggcgcacacacggcagcagccgcagccgtccagcacgagactgacgccgccgggcacctcggcgcc

SEQ ID NO: 8610 - DNA, 596 bp, Canis familiaris
ctatagaacaagtttgtacaaaaaagcaggctggtaccgtccggattcccggatcgggaggcaataagaagtaccgagccttgaggctagacgtggggaacttctcctggggctcggagtgttgtacacgcaaaaccaggattatcgatgttgtctataatgcatccaacaatgaactggtccgcaccaagaccctggtgaagaactgtatcgtgctcattgacagcacaccgtaccgacagtggtacgagtcccactacgcactgcccctgggacgcaagaagggggccaagctgacgcctgaggaggaagagattttaaataaaaaacgatcaaagaaaatccagaagaagtatgatgaaaggaaaaagaatgccaaaatcagcagtcttctggaggagcagttccaacagggcaagcttcttgcatgcatcgcttcgagaccaggccagtgcggccgggcagatggctatgtgctagagggcaaggagctggagttctatctgaggaaaatcaaagcccggaaaggcaaataaatcttctgtcttcggtcatgtaataaaggtgtttattgttcaaaaaaaaaaaaaaaaaaa

SEQ ID NO: 8611 - DNA, 631 bp, Canis familiaris
  misc_feature (276)..(276): n comprises a, c, g, or t, or includes no nucleotide
gcccgcgtccgcctgctgctgagtaaggggcattcactgctaccgacccaggagggactggagagaggaagcgcaaatctgttcggggttgcattgtggatgccaatctcagtgttctcaatttggttattgtgaaaaaaggggagaaggatattcctggactcacggatactactgtgcctcgtcgcctggggcccacaaagagccagcagaatccgaagctttttaatctgtcgaaagaagacgatgtccgccagtatgttgttagaaagcccnctttacacaagaaggtaagaaacctaggacccaagcaccccagattcagcgtctttggtactccacacgtgtgcctcccaacaccaaacgttcgggcgtaatggccttggaaggaaaccaggccgtacctaagaaaaataagggaagagggctgccagaatatgctaaaccttttggccagagaatgaaggaggccaaagaaaaacgccaggaacagattgccaagagacggaggctgtcctctctgagagcttctacctctaagtctgagtccagtcaaaaatgagattttctaagagtgacaaaataaataagatcagacaccaaaaaaaaaaaaaaaaaaaaaaaaaaaaaa

SEQ ID NO: 8612 - DNA, 636 bp, Canis familiaris
ggaatgacagtccaattgcaggttttcttgcagaaaacaaggctggaggaatgcatcatatctgcattgaggtggatgatataaatgcagctgtgatggatttgaaagagaagaacattcgtagtctcagtgaagagacccaaataggagcacatggaaaaccggtgatttttctccatcctaaagactgtggtggtattcttgtggaattggagcaagcttgacttatatttgcaagaaacttaaaaaattcccacctaaatagtctgaaattccccatcaaattatactccagcattgaatccttcactccttccatcacttaaaaattcaccattaaagagcactttaactggatcagttatggggtgtctgactctttattctcacgggttgttgcaattccaaaccccaatggttaaattggtggaacttcctttaaaaaccaaatttccaaaatttaaaaactaaattacaaaaagatttttttaattatatatatgtatatcaatatatataactgacatttgttaattactttggggtttttttctgatttagaggaatccttgattactaaatacttaagaaatattattaaaatcatatttatagaaataaaaaaaaaaaaaaaaa

SEQ ID NO: 8613 - DNA, 500 bp, Canis familiaris
  misc_feature (1)..(1): n comprises a, c, g, or t, or includes no nucleotide
naaagaattcttgagcggcctgaagcgccagaagcgacagctgtgggaccggactcggccagaggtccagcagtggtatcagcagttcctctatatgggtttcgacgaagcgaaatttgaagatgacatcacttactggctgaacagagatcgaaatgggcacgactatgattactaccagcgtcactatgacgaggacgccgccatcggtccccagagcccctacagcgttcaggcacggagaccagcggtctaaatacgatgaatactgacccaccacccctcggcccttggggccccggcccgcgggggttgaaccccactggctgccttgcaccacgtggcttccgctgggctttactccagcagatcttgcctaccccctttctgcagccaggaaggaagagttaaacaatataaatgcctttgatatttcatgcaagtgcctaacatcgcatttcatttaaaaaatagaaataaaagcagtttgttaaaaaaaa

SEQ ID NO: 8614 - DNA, 411 bp, Canis familiaris
agccataatacacgtttgcatctgatgaaagcacatttgcaggcagaccatggctttgggagggaagaagtgccctcgagaggccaagtcctttattcccaccccctgccaccagtggccctgcttctctcacgggcttttggcaggactgagagccatccctctgtctgcccaggagactctctataccctggtggcaagttggctagggacagattttccctagttctcatcctaaattgcctcctccccagttcatccctggagcgtctggcacagttgtgtctacatccttgtcctaaatggttgacctgcatttctgagttctgaaagcaaataaaaataacattttgttttgttgttttcaaaaaaaaaaaaaaaaaaaaaaaaaaaaaaaaaaaaaaaaaaaaa

SEQ ID NO: 8615 - DNA, 610 bp, Canis familiaris
tagattgctaaggagactatgtgtaaacaggcatcaatatcagactccaaacactaaaacagcttctagcaaaatgtatcaaagcttgcagaagcccaaatagatacatctccctcacctccccctcccaacacacacacatgtgtgcaagtgtgctcgcacttgggtgtgcacatacacacacacacacacacagagatagagcacagaacagaaaggagattctcctgaatttacaaacggcatctttgcttgatacttgagatagaattctggtcacctttgtagttggattgtgctactgaagaaaaggcagttccagccctgaatattgtatattaaaaaaaaatcatcatgattttgggagctcagtctctgcgggaagctgcggcccctagccatgatgtcagggtgagttggccataaatgtatgtccatctaagtgctggtactaaggagactcctcataaagactataaaatccctccctcttcctacctcccaaaaggctgaacagtgtatagtatgttacatttcaataaatcaataaaaatgctgggaaaagaaaataaaaaaaaaaaaaaaaaaaaaaaaaaaaaaaaaaaaaaaa

SEQ ID NO: 8616 - DNA, 333 bp, Canis familiaris
ccccacccaagacaggaaggacccctcagtgaaaccgttgacttgccgacttgccgtgtttttgccaaaaccaagattgcgaaggacacctccacctccagcggcggggcggggggcgaggggcggcctccccggccgggtggactcgcgtttccttctctgtagccagaccttggaaaaattgggacctttccaccggggatctgttccgcagtggccttttgctatgtgcctcctgagaaattcgtctttttgtataaataacaaagttgaaaatgtatttcctgaaataaatgtccgaaagcaaaaaaaaaaaaaaaaaaaaaaaaaaaa

SEQ ID NO: 8617 - DNA, 618 bp, Canis familiaris
cgtgtgttgaatgcccttgggttctccggcacattgatgctgttgtgaggaagaccagggatccagaacccacccaagcaggccccactgtggcttgctggctgctaaaatggagaagcaggtgccccctagaacgtgctgttgcttccagtgtctgcagacccttcctctgctgtgacagcactgctggccccggggacagtggtgtttttcaaagggacctactgtagccactttgatcacaagccttagtttgactcaacacttgtgggctttccactctatgtgtatctgtgcataggaacacctagtctggcagaggcaggccgaatgtctccacgaggtcatatgctagcagatgtcgcattggcctctgcagaagctgtactgtctggtttctacgttgagtaagtagttgtgactgtactgccttgtcacttttaatattaccagttttatacttggaaatggtacttgcctcttttaaatcttttctgtatttaacctccttcttcccagctcagtgctcccttcctaattgcagcaataatatcttaaaaaagcattcagtaattaaacgactgaaatcttaactgaaaaaaaaaaaaaaaaaaaaaa

SEQ ID NO: 8618 - DNA, 402 bp, Canis familiaris
gcaaccaacgcgtctgggagggaacgcacccccccagtctacgctatgcaatcccatcaaacccgccggagccaaggcaatcgagccaggctggggccgacaaggccctacacaagctggcgcacccagggggagaggaattatctctgcccgcacgaaccctcggtggaacgggggcgccacaaagcgggcgcttctacatgagcggcacagtcttgcgtctgggcccgcgcggccagctttgtgctggaggaatttgcttcttgtgcctgcgccgcggacaacccgcggtgaccgtgtccaagggagaaactgccccacgatttcgaaggtgcacactttccacagaaacagaactgacctgctccgccaggagagttagcctgtaatgtcctgaggaat

SEQ ID NO: 8619 - DNA, 367 bp, Canis familiaris
  misc_feature (322)..(322): n comprises a, c, g, or t, or includes no nucleotide
ataaagtaagctagggaaaagtattattaagaaacataaggaagagaaaatacattatagttctgtactgtatcaaaaaaactctaagtataagtggacccacacaatccaaactcatgttgctcaagggtcaactctctctggtgggagactgctcaaagtctccgatgaatggtgaggatgactgaagtggacaccttcttgagtatgtttgaacattaacacctggttccatgccttaagagagatgcccttttgtacctgggtggctcagtcggttaaatgtccgattcttgatctcagggttgtgagttcaagcccntgcattgggctctccactgggtgtgaagcctactttaaaaaaaaa

SEQ ID NO: 8620 - DNA, 619 bp, Canis familiaris
  misc_feature (1)..(1): n comprises a, c, g, or t, or includes no nucleotide
  misc_feature (169)..(169): n comprises a, c, g, or t, or includes no nucleotide
nttgcaggcttcttctgagccttttaccactccagcctagcccctactcctgaacttgggggttgctgacctcctaccggcattattcctcttaacccagttagaagtgcctctacgtcaacaccgtcagtcctgcctagccttccggagtattctattacttggagcnccactcataggtttaattagaaggtatattcgccaccatatagcttcaacgcgcttattcacttacaactctcctctagggcgtatatttgtacgcgtattacagcgcgcctctcgcgatatctatgtagacactactctttacacatatttcgcagttgggtatatccgatttcatccctttttaaaacccaccggagattttcccgggataacacacggtaattattgggcttcaaccattccctcatcgtgtgcttcctccgacagctatactaccacttcacatcaaaccaccaccttcggatttgaagccgctgcatgatattgacactttgttgatgtagtctggctattcttgtatgtatctatttattgatgaggatcctaaaaaaataaaaaaaaaaaaaaaaaaaaaaaaaaaaaaaaaaaaaaaaaaaaaaaaaaaaaa

SEQ ID NO: 8621 - DNA, 456 bp, Canis familiaris
  misc_feature (225)..(225): n comprises a, c, g, or t, or includes no nucleotide
ttggcgcatgccttggcccagggcgcgatcctgggagacccgggattgaatcccacaatcaggctccatgcagggagcccaatgtgggactcgatcccggggactccaggatcacgctaaaccgctgagccacacaggcatcccattctccgctttaacgtttgtagtctggactgtttgcaggggccttaaagttcccagccttgagccagttgtagttgttgnccctgtgttctgaacttttgagccttgactctcctgctagatgggcccgggccccacagccctgctactccgaggtcctcactgtccacggcttacgagttaaatctcaaacccgtgcagtttcattgcacgggttaatgagtgtatgagtatagagggtcaggtttgggttttgtttctttaaaaaaagaaagtggcaaaaaaaaaaaaaaaaaaaaaaaaaaaaaaaaa

SEQ ID NO: 8622 - DNA, 568 bp, Canis familiaris
ggtagaacgtgcgtcaccggttcgcagagcttggacccagaccatgtcccgcgggcgccattgtcaccgttatcaccaaagtcctactgggccagagaaagtgaagtcagaggccacaagctcggagcccacgccaacaccgcgcacctctcagcaccccacagtcctcacttccccgggcccaggagccccaggagccagccccctccgtcgggagcggggagcccgggacactgctctcctccctgcccccagcctgctaagccaagtggatgggcctgtgagaggaccccgcatgtgtcgcagttggcagagtacgggcgtgtgaagggtgaggcggcatcggcagttggaccccggggggatctggacagccccgcgtgcagaacgtcaggcctggaggggagacagggcttgccagctccacccttgctgcaggtcccagcctggcaggccggggaggcgggcggggagcaaggcactccctcctctgcctcccctccgagcagagggatcagagtgggatcacatgaataggggagaaaaaaaaaaagagtctatttttgtc

SEQ ID NO: 8623 - DNA, 592 bp, Canis familiaris
gtaggtgtcaggcactcagctaggtttggaagaagtacaaatgaatgagacctggttcttgtccttgagaaactctcttagactgctagaagatatagaaatataaggaaaaattgctaatgtgtcttattaattgaaaatactaacaaagttagtgattatagcaaagaagtgataaattggaccttggggaagcttcagagaggttacacttgttaggctggtcttaaaggctttcggcttctttgtctataatatgagaaaaataataattacctgccttacagaactgttgtcaagtgagaaaatccatgtgaaaatgctttgtgaagtttgtgtaaatactagctttgaagatcacagaatgtaagtgcaacaacatcaactttggattaaggcctggatttgaaagaatgacatttgctagctatgtgactttaggcaggtaataccttgtgatccctttagtttcttgatctctcctctcttaaagaactttgggagtgagatgaaataatcagaggtaatgcctgtcaagtcataggctctcaatagttgtttccttcctttgttttttcagtctaatttgggg

SEQ ID NO: 8624 - DNA, 544 bp, Canis familiaris
aacccaaaggttaaaccacagtgaagtccgactcctcagtctcttggagcagtctgaacacaagactgcagatgcagaaaataaagaccaagtcttcagaaacaggcttcaggatgccctcaccagggatggaagaggcaggctgcagcaaagagatgcagagttcccttgcacatctcgacttaaatgagtctcccatcaagtcttttgtttccatttcagaagccacagattgcttagtggactttaaaaagcaacttaacgttcggcaaggtagtcggacacggaccaaagcaggtcagaggaagaaggagaaaaccctgaatttctagggtccagacaccgacaaaaccattagcaataggggtgggccgtgtcattaagtcttagtggcttctgtttcattgttgaacaagttttttggccctgcagttttcaccaccagcaccaactcagcattcttgttttgatgttttctataagctatacagacattgtgtatagtattctgttttataacagtctggattcacttatagttaaa

SEQ ID NO: 8625 - DNA, 694 bp, Canis familiaris
cttggtgaaaggccggaggaatccgggaattgactgctgtggttcagaagaggtttggttttcctgaggcacgtgtagagctctatgccgaaaaggtggccacaagaggtctatgtgctattccccaggcagagtcactgcggttacgaactcctaggagcccttcgctgtccggagggccctgcctatggcttgttgcctgcggtttccatccattggaggaagttggggccccaaaggcctgttgaagttccgttggtgttctggggaaaccttcccgagggaccagaagggccttaaatcccatgaagctttgtggaatgggcttgaatgatttcaccagtgggagaccctggttaacttacctaccgttgacaccccctgggcggcccatgtgctgcttccaagacaaggttgtgctgggcatccaaagtccaaagaaccatgctttcccctggggacccctaagttggtaagattggcccctaagaagcccctgccagatcatgtgagccaattgtggaacccaaggatgagatactgcccaccacccccatctcggaacagaagggtgggaagccagagccgcctgctatgccgcagccagtacccacagcataaatagggtctccttggcagttggatctggaggctggattttactctgtgaagacctttaataaaatatttgagt

SEQ ID NO: 8626 - DNA, 582 bp, Canis familiaris
caaggaataaaattctaatgttctgcagactattttcacatattatttgttaaatgctggactatattatgaaaatgttttcaagaaatcatttaaatgtatagatcagtgtttcttaacagattaaatgataaaataagctacctataataggtacagattatatttttgagttttgtagagtattgccaaattaataatacagaaccagtgtttaattttatgtaggtgtgtccatgtaaatttagtgggactttaaaaagaatatttgaaaagcatctgtttcacttacactacataaattgtattatcctttcatagcattaggtgccttgtattttaaatctgtgacacactatgacaaatttttaaaggggaagtattatgtaaaatgaagaattatgtatttctaaagactgtattgctgtaaatttaattgataaagctctgcttaatttagagtttgaagaactattctctcttcaattaagacattttcataatggaatgatttaaattgaagtgataaagagtattattaaaataaaatgtttatatatataaaaaaaaaaaaaaaaaaaa

SEQ ID NO: 8627 - DNA, 639 bp, Canis familiaris
ctgggcccctgacctgttcatggaacaagctgccatgatcaaaggagaggggacaccacagatttccttccctctcctccacagacatggaagaggagacctgaagatagatacccccgtcctcccggcccccatccccatgcctccctctgattggaggagctgaccaaagcagccctaaagggccataacacttgaccaatccagctgctggcagaggggggaaccaagcgttttcccaagtggcattctcatctcgctttcaccctaagattgtcttaagcagcagcccagcttgcccagcccctggtgggtggtgggggagaaggagagctggcattcctctaggtggcaagcggcgactctacaccctccacctgccccaggactgggttggattagaaaaatgcctatttttcttgtatcgatgtagaaactctattttctcccaaagacactatttttgcagctgtttgaagtttgtatattttccgtactgcagagcttacacaaaattgaagaagaatgttaatgttcaagttttcttatcctgtgtttagaagttgttttttgcagatcttggtgttaatagaccaaataaataagtattcccagcaaaaaaaaaaaaaaaaaaaaaaa

SEQ ID NO: 8628 - DNA, 631 bp, Canis familiaris
  misc_feature (93)..(93): n comprises a, c, g, or t, or includes no nucleotide
ccaagatgaaagtgctgagattcatgcagaggttcagaaaagagatccctcgtgactggactgcacagtttcatggaggctgcagatgaggcncttggatgctctggatgctgctgcagctgaggctgaggcccgggctgaggcgagaacccgcatggggattggagatgaggccgtatctgggccctggagctgggatgacattgaatttgagctgctgacctgggatgaggaaggagattttggcgatcctggtctagaatcccatttaccttctgggccagataccaccagaatgcccgctcccgatttcctcagaccttcactggccccattattggccctggtggtacagccagcaccaactttgctgccaactttggtgccattggtttcttctgggttgagtgagatgttggatattgctaatcagttgcaatagtctttcccctgagtgaggctgaagcctcagattccttctaaacacagctatctagagagccacatcctgttgactgaaagtggcatgcaagataaatttatttgctgttccttgtctgttgctttttttccccttgtgtgctgtcaagttttggtatcagaaataaacgttgaaactgcaaagtgaaaa

SEQ ID NO: 8629 - DNA, 616 bp, Canis familiaris
gcagccgaatgtgacccaggtgacacattctccacgaggcgacaacacagccagggagaacacagccggagagccacgggaggtgtctcgaaatagtgatgcgtggcagacacatgaaacagttcccaggagaacagaagaatcaaaactttaccctcccacccagaaggaggcagactttcaggctccagcagatctgaaccagcacgacgcggaaccccgagaacccgaggagcggcaggtggaagaggagcacagaaaggccctggaagaggaagcgatggagcaggtcgggcaggctgagcatctggaggaggaacacgatccatctccagaggagcaggatcgggaatggaaggaacagcatcgggaatggaaggaacagcatgaagccagagaagaagccaaccttctagggggtcacgctccggctgaggtgcgtccttcggccgggccggccaccagactccgaccggcgtccgaggagcagctggagcagcggccgagggagcagcaggaggccgggcgccagcagaggctgcagggccacgcgtggaggcagcggcagcagcagctcctggccggggcggcccggcagaggcaggcgggccccgag

SEQ ID NO: 8630 - DNA, 596 bp, Canis familiaris
accacttggagggagcttttcaggagatctgcctgcagactgttgccagaatgcaaataagcagaaattccaagttggctgataggaaagcacaactttgtgaaaaggaagaaagcttctcttaggaagagaaaccagcactacatttgactgcatggttctgtttcaggaagcaactgctatgctgtgaactttcccttggagaggcccacatggcaaagaattaaggaaggtctctggccaacatccagtgaagaactgaaaccaagagggactaaatcttgagttgcttggactactacatgcctgagcttggaagcagatcttcctccagtcaagacttgagatgagactgcagtctcagctgacaccttgattgtagcatgtaagagaccttgagtcagacggaactagtcatgctgcacctgaactcctgacccacagaaactctgagataatagatatttattattttaagcatctcagttttgggccaatttatcacagagcagtacatacctaataccatttgtaagaataaaattgtaaagaaatgttgagaatgtacagtaatgttttgaaataaagtatagcac

SEQ ID NO: 8631 - DNA, 664 bp, Canis familiaris
  misc_feature (1)..(1): n comprises a, c, g, or t, or includes no nucleotide
nctgcagatcagccggaagaactatgaccctcagaaggacaacgcttctcggcaccgtcaggcttaagtccaccccccgcccccagttttctgtgtgtgttttgggggaccagcaacactgtgatgaggccacaggcagtggacattccccaacatggacaattgaagcgctgaagaaactcaacaagaataaaaaactagtcaaaaagctggcccagaagtatgatgcctttttggcttcagaatctctgatcaagcagattccacgaatcctgggtccaggcctgaataaagctggcaagttcccttccttgctgacccacccatgagaacatggtggccaaagtggatgaagtgaagtccacccactcctacattcccaccatgatagaagagggtctatatgctgtgcacatgtgctcttgtgtgccccagctggtgaaagatagccggaccgatgagccttgtgtaccaaccatcccaccttagcctgtccatttcctggtgtccttgctcaagaagaattggcagaacgtccgggctttgtacatcaagagcaccatgggcaaccccagcgcctttactgagaccatttaataaatcctagtgctaccgttaaaaaaaaaaaaaaaaaaaaaaaaaaaaaaaaaaaaaaaaaaaaaaa

SEQ ID NO: 8632 - DNA, 545 bp, Canis familiaris
  misc_feature (70)..(70): n comprises a, c, g, or t, or includes no nucleotide
ttcagccaatatcaggtggatccccgcgttccatttctgcaaaagtcaaccactctagtttaatttgatngggctacactcagactctgaggccttggtgtcacagcttacactgtctgccctggtagatgggaagagccattaatgctggaggcccaccaacttgggcttgccctggagttggaggcttaatcccgctgaaagaaacctctgggaatggttatcagaagatttggccttaatatatttcccgtgtgaccagcaggcttcccctcctccctccccccagaaggtgatccaaaccaaggatgatctgaacacagagctgtattttaaatatttagacagttacttgttagctggtttctagttaaattggttatctatctagttacccatactgcagtcgtgcagtcacctatacattatttaaatgtatttaactgttaaatgcgctaccccacccataatgaaatagacctttatgaaaactgtgaaaaaaaaaaaaaaaaaaaaaaaaaaaaaaaaaaaaaaaaaaaaaaaaa

SEQ ID NO: 8633 - DNA, 555 bp, Canis familiaris
tcctgctgtccccgtcgcttgggcctgcctccccctctgctttgactccccctttacccgtctctgggggggcctctttgtctccccttttatccatccttcggcttccccgggccccacgtgagcaggcgtacctctcagcctcatctccaggagggaacctctcatcagctttgtttccctcagtgcctcgctctggcctttgcaggctggcacggggacttgcctgccagcccctggttggagggctactccagaccaatttcagccaccttgcccgcagcgtcactccgcctgttgcacccctggctccccgatccatccgggccccttgggtgggccctgcttgcttcccccttggatgcccttcccctcctctgccccatccctacccctcccctgcctccccacccaagccaggtctatggagaggaaaaccaaccaccttaaaagagttttatttctgagaataaattaattttttgtaaataaaatgtttaaaaataaaaagaacactaaagttaaaaaaaaaaaaaaaaaaaaaaaaaaaaaaaa

SEQ ID NO: 8634 - DNA, 621 bp, Canis familiaris
  misc_feature (1)..(1): n comprises a, c, g, or t, or includes no nucleotide
natgaggcataatcataaccagctctatctgtctccgtcaaacagatctgaatccctaattgcatactcctcagttagtcatatggcactggttatcgtagcggttcttattcaaacacccactgaagttatataggtgcaacagctctaataacttgcccactggtttaacatcctcaatactattctgcttagcccactccaattacgaacgaatccataagccgtactataattctcgcacgaggacttcaaactctccttcccctaatagccagcctgatgactattagcaagcctcacccaatctggctctccctccaacaattaactcttatcggacgaactatttgtagctgatatcctcattctcatgatccaacattactattatcctaatacggaattaacattatcatcaccgccctatactcactttatatattaatcaccacacaacgtggtaaatattcccaccatatccaaaatatcaaaccatcattcacacgagaaaatgccctaatgtaccttgcacctactgcccctactcctcctatcccttaaccctaaaattattctcggtcccatctactcaaaaaaaaaaaaaaaaaaaaaaaaaaa

SEQ ID NO: 8635 - DNA, 536 bp, Canis familiaris
aactttgctctaaaaaccattgactgggtagcttttggggagatcataccccgaaaccagaaggccattgccaactccctgaaatcctggaatgagatgcttacctccaggttggctactcttcctgagaaaccacctgctatcgactgggcttactacaaggccaatgtggcaaaggctggcttggtagatgactttgagaagaagtttaatgccctgaaggttcctgtgccagaggataaatacactgtccaggtggatgctgaggaaaaagaagatgtgaaaagctgtgctgagtttttgtccctctcaaaggccaggattgaagaatatgaaaaagagctggagaagatgaagaacataattccatttgatcagatgaccattgaggacctgaatgaagtcttcccagaaaccaaattagacaagaagaagtatccctattggcctcacaagccaattgaaaatttataaacttgagttgaggagaaagccccggccctcatattataaacattggacattaaaaataatga

SEQ ID NO: 8636 - DNA, 519 bp, Canis familiaris
  misc_feature (384)..(384): n comprises a, c, g, or t, or includes no nucleotide
aggtaactgagaatacgcatataaatggtaagaaaggaacacacacacacacacacacacacacaccctgtgaaattcagcacaccacatgtgtgacagaacatgaaaactataattaacttacttacttattttatacacacacacaaaaaaagaacatgaaaacaatccagaacaagacaaggtatgtatttatgtgcccccaagttttattcacctttaaactctgaagccataaatgatattaagagcaaacaatctcaagtaggaatctttaatgaaataagagaaaaaaatcaacttttgaaatatggaacttgtttaacaagatccagaatcttacattgaaacaattccttttgaacagcgcttcagatttctcancttggtcagacagtgtgagttccttgttgccatgtgttaaagcaggtgaggcttcaaaatgaaaaacacatggtttgggtgtcaaatgccactgggatgattgtttttgattgttcagttatagatggtgtatta

SEQ ID NO: 8637 - DNA, 142 bp, Canis familiaris
gctgtccttgtcacggctacggtcggccgtctcctggagacgcagggggctgcccttcagagagcccgccagggtctgctttgtggaacagaatgtgaaccatcactcgatggcttacttgacttatttaattaaaaatgaa

SEQ ID NO: 8638 - DNA, 647 bp, Canis familiaris
ttctaactttgcgcccttcatcgacatcttcaccctcagacacgtacgtgatggttggttatgtctgacccgtcgatcccttccgcagctactctgatcaacattcgcaatgccaggaaacacctttgagaagctggagagagtggatggccccaagcacagcctcctgatgcgttgaaaattgccagatactctttctgaagatgctcaattgccttccccacccccgcgtttgtttgttttttttttttcaataatgtcgtgtgcttaaaagtgagctttgaaatgtgtgctgcttactaccttccatctttcttccctactcccccctcccccgactttaaacctatttactcagttatccagtagagcttcaggatggcctttctgaaaagttggtatggtgtaacactaaagtaggtggtgtgtgtgtgtgtgtatgtgtgtgtgtgtgtgttctgatgacctggttataatagatatacacattaaagcctttacagtctcttcctgtattccttacaagattgcaagatggaatgttactattttatcagccaggtattaaaatgcatttataaatccttcttggcttcaatcatgaataaacatttgctgttagcaatttaaaaaaaaaaaaaaaaaaa

SEQ ID NO: 8639 - DNA, 575 bp, Canis familiaris
tctgtggcagcggcaaccatttacatggcctcacaggcatcagctgagaagaggacccaaaagaaattggggatatcgctggtgttgctgatgttacacatcagacagtcctacaggctaatctatcctcgagccccagatctgtttcctacagacttcaaatttgacacccctgtggacaactaccacagctgtaagctgaggcagctaatgtcaaactcttctgaacactgaacttggcctgttgtacatagcctataccaagtgctggattgagcctctctttaataaggaaaaacaaagacatggtacgcattccagggctaaatattaattgcttggcacttctgtatgtatatactagtgaaacatatttaatgatttaaatttcttattgaatctgttttcttttgtagccatctaggaaactgtattttggaagatatttgaaattatgtaattcttgaataaaatgtttttcaaaactaaagtttttgttacaattacatgttatctgtaatttataatataattacaattatgcatatcattgcagctaaaaaaaaaaaaaaaaa

SEQ ID NO: 8640 - DNA, 568 bp, Canis familiaris
cttctacttcggtgaggactgggacattggggtctgtgggttacatcgttggtgtccacagcctggcccctctcagacactagagccctgctggccaagggctcagatggggtcccacgtgctggctgcgtgtcggtgtcaccgaggtcttgcctatgaggggtagagcatgctctggtctcctggggtctcagctccccatctgtacagtggggattatgagagcccctagctctgtgatgggtgtccgccccgcaccctgcaccctgcaccttgtcgtgcacaccctttagttccactgaagccgggactggtggtcagatggcagggcccaagcctcatcgccaccatgtcccagttgaatccaccccgcttaaaggcgcacattatttggggcgcctgggttgctcagggtctgctttccactcagggcgtgatcctggggtcgcgggatcaagtcccgcatcaggttccccgcagggagcctccttctccctctgcccgtgtctctgcctctctctgtgtgtctctcatgaatggatgaataaaatgttaaaaaaaaaaaaaa

SEQ ID NO: 8641 - DNA, 600 bp, Canis familiaris
agaacttcaaaagaattttatagagcacatctcttttgttacatcaatatgatgctaggaaaattcccaatgagcccatccggggaaagcgacatggagcttttgtgcaggcagagataaaaccagggagtaggcccatagttcctaagggaacagaggtattacggaatgctccggggtcatgctcatcagaacagtccaaaaaaacagagaaaggaaactcagcggaaagcaaaatgatctcaccaggtctctgccgacaaaattccccagagctgctagagactgaaactcacttatcagaaacagacgtcagagaggcagccaaggcatgccccagaagtcctgagagaagggagaaggttgcagacatcttccaaataactgcagtaaatgctcttctccccaggcatgatcgtttaaatccaccaataaaaagtcaggataaatcaggataaattaccttcttcaagacaaaaatctaatccttggaatggagagaaatttcagaatcatacaaaccctcacaggttgctttctcttatatcaataacctcaaaaattctatttacataaatgggaaaatgaaaaaagacactt

SEQ ID NO: 8642 - DNA, 491 bp, Canis familiaris
ctcatagtgagcagaccccaagtgaaacccagtggaaggagcttactcagtattttggaatccatgataggtttgacccccctgttaagaagcaaaaaatcgataagtcgggccttgaaaagagcatagaccaggctgtggaagaatggaacatcgagaaggctgaggaactcagcaaccagctagctactcgagagcttggtgttaaaattgcccaagcagttgcctgccacaactttgtaaaagcccaaaaggatgctgaaaattcgcaggttgctcgaaaaaagaaaaaacttgcatgggggtttgaagccaagaagagatgggaaacccagagcaacatgggatatatgtaacttgccagaattcctcaagacatttgagtcttgacttgggtttttacctgagtcttcaactgctcaatttgctgataatgttaactatatcaggaaactaatagaagctggaaaaataaaaaaaaaaaaaaaaaa

SEQ ID NO: 8643 - DNA, 556 bp, Canis familiaris
  misc_feature (260)..(260): n comprises a, c, g, or t, or includes no nucleotide
tggaacaggtttgatgttatgtcagtcaatcaggttaaaacttgtgtcttttcggttgcatagccggcaaataatttccaaatgacaacgcactcgtggtgtcgaggggctgggggacagtggagaaggtaaatgaaccaaaaggcataaatcaagggttcagatggagcagttaatcatgttgaagttatgtttctcaccttattgtcatgtgtttagacatttgtcacatttttaaaatccccccttgttctttaaanctcttcgagtattctctttgagccctactattgagttccacgaagagaattccaataatatggaaaggaaaaggaaggaaaaggaaaaggaaaaaaggaaaaggaagagaaagacaaaccactgtggcagtggcatttaacaatataatatattgtaaacacaataaaatagggattataatgtatgacttttggcattggcttgaagcaatataatatattgtaaacagacacagctcttacataatgaacattttatactgtttgtataaaataaaggtgctgctttagttttc

SEQ ID NO: 8644 - DNA, 611 bp, Canis familiaris
  misc_feature (42)..(42): n comprises a, c, g, or t, or includes no nucleotide
aaaagcaggctgtaccggtccggaattcccgggatccgagcnggtagccgctttcaggatgaagctgaacatctctttcccagctactggctgccagaaactcattgaagtggatgatgagcgcaaactgcgtaccttttatgagaagcgtatggccacagaagttgctgccgatgctctgggcgaggaatggaaggggagaaggatattcctggactcacggatactactgtgcctcgtcgcctggggccccaaagagccagcagaatccgaaagctttttaatctgtcgaaagaagacgatgtccgccagtatgttgttagaaagcccctaaacaaagaaggtaagaaacctagaaccaaagcacccaagattcagcgtcttgttactccacgtgtcctccaacacaaacgtcggcgtattgctttgaagaaacagcgtactaagaaaaataaggaagaggctgcagaatatgctaaacttttggccaagagaatgaaggaggccaaagaaaaacgccaggaacagattgccaagagacggaggctgtcctctctgagagcttctacctctaagtctgagtccagtcaaaaatgagattttctaagagt

SEQ ID NO: 8645 - DNA, 626 bp, Canis familiaris
atgtctctaacatctttctaaattggcagtgtgacttgcacagttgaacctcttgtctttatctctcatttccacacacaccccaccccacccatacctcatggttgtccttttgtgtatctgtctttctagcattctagtcttggtttagtttctgttttcatcctccttggaagattctgagagtgtggaggaaggatgggaaatctcagtataggtggagcagcctgctgcccacactgggggcggggtggtgggctcacactgtttctgtgcatgtaaatcgaacacaagctgggatcattatgggagagcatagtgcagatgacagggatctgggacctcagcaggctgcctgactgaaggcatcgatctgaagtatcagtgtctcctctggtcatcctgcccacgtaaaagtgaaactggctaagatgttaccaccattttgtagtcaaccaggatgacatgataaacagggtggctcagtgggagtgcaggactggggcagcgtcctcacacatgtaggggtaaaggccttgtataatgcgccttatgaagcactgtttcagagttcctttcatttcaataaagattatcaggtaattaaaaaaaaaaaaaaaaaaaaa

SEQ ID NO: 8646 - DNA, 652 bp, Canis familiaris
agacggctagaggaaagttacttctaaggaagctctgcaaagaatcagtgatattctgaagctgcaattacaatcagaggacgtatttcccacctggcaaagaaccaaaggaaggagagcggaaaatttacttggcaattgaaagtgccaatgaactggctgtgcagaaagcaaaggcagaaatcaccaggcttataaaagaagaactgattcggctgcaaaattcataccaaccaacaaataaaggaagatacaaagtcttataaaacatctggaaaaaactttttacctgtgctggcctgtgacacatgtggcatttgttgtctccagtttacaatgtattgtatattaacatttttaaaattctgtcttgctgatttttttaaatacatgaaaccagtatttgctaaagaaatcttctttcagtaagtaccaccagaattatcaaactgtatttaaaacaggcctgttttcagagtatgatatcctttaatgtaagctttaaatatcaatattttaaatatctggataatattccagaagtttaaaaaaaatggaaatatttggactttctattgacagtaataaagtacacaagtcactaaggagctcttcaaaaaaaaaaaaaaaaaaaaaaaaaaaaaaaaaaaaa

SEQ ID NO: 8647 - DNA, 630 bp, Canis familiaris
tctttcagtggaagttggaaaattacagtgggataaatttggtttgatagactttaaaggtaaaagcataaataaaatcctaaaagggaaaaaatgactcagtgctctggagctatttttgtaggaataggccctttatgaaagggtattagtcatgtagtttaaaagaaattcaacaagcaaattcaaccaacattcactgcatacccagttctgatgccaagtggtctttgggaatataaacaagaacaaatcaaggcttcagcctttaaaacacaatctagtaacaagagacagactagcaaacaaggagctttgttctaactgcctaatgttgaaatagagatgtttatgacgtgcaaaggaaaaacaaagagcattccaaagaatattttaatattggattttatagttcgtcttagaagttcgaggcaaaggatgcaaatccattgtaatgttttctttatgagctggaagtctaaggaaaatgaataggttgcaaaatcactgtgagggacgtggagagagaatgactttgcccttgatcattatagttaaatagatgacttcatcattaaacctaagtaccccatgcctgcggtacctcttcttttgaaaaaaaaaaaaaaa

SEQ ID NO: 8648 - DNA, 323 bp, Canis familiaris
ggccagtccgtggaggagttcaccagggtggagacaagtgccacccggccaatgcacttccgcaactccaaaggggagcattggccccggaaagggcccagcctcccactggagccccagccagctttcatcgtccccctctccccacgagatggctagctctcccctcccttcgccttctggcccctggtatggtgggggtttctaacgatcacacccagcttgaggaggggctgcttctgaggtcggttgttgtctttcaattaaagaaacactgtgcaaaaaaaaaaaaaaaaaaaaaaaaaaaaaaaaaaaaaaaaaaa

SEQ ID NO: 8649 - DNA, 674 bp, Canis familiaris
  misc_feature (423)..(423): n comprises a, c, g, or t, or includes no nucleotide
ggacattctggatgtggatggatacggttcacggatcaggatccctgtctattagactggacagcttgtggcaagctaatttgcctgtaataaagccaggactttttttttttattggagtactggtaaaatattgtgtgttgtgttgtgccgttgtgttgtgtgtggtataatatatatatgacacatatatatatatttggacagtaatctaagttaatttaaagtttgtttgtgcctttttgtctttaatgctgtggatatttcagaatgttagcctcaattccggaacaccaataaggttaggacgtaaagccttgtctgataattcacaagccctgaaatggataattcaaatgggaaatttctgctcaggatgacagtcccatccaaacagattggttttgctggaataatgaggtnaatgaatgtcccttgggagtctgatttgtcagttggaaatgtggtagcctcactttaatgaacaaattgcctttgttaaaacatgagtggctctgtatagctgatcagtttttccacctggaagcatttgtttctactttgactatgactgttttttggacagtttacttgttgagaatgtgaccaaaagttacatgtttgcacctttctagttgaaaataaagtatatattttttctataaaaaaaaaaa

SEQ ID NO: 8650 - DNA, 641 bp, Canis familiaris
ctcatagaggaataactccatctctcaccataggtttaatccttgtgccagagtaacccttgagtttttgtagttcaccttcaatgtcaatttccaaagtggggtatatagatttgtattggttagccagaactttaaacctctcagagaagccatcggagtcagaaaccagatcacacatccgcagtccactccgagcagctttggaagaataaactgggccaatgcccttttttgtggtacccagattttttcctgcttgttcttgtctctgttgctcctggataccatcagctgcttgatgaaaatcgaatacaatatgagctctgtcagatatgataagccttttttcccagccttccagaccttttcctttttggacatttttctctgcttcctcaaataatccgggaagatgaattaccacaccatttccaatgaatgcggtaacatttggattaattattccactgggcaaaagatgaaaatcatattccacagaatctacaacaactgtatggccggcattatttcctccctggcagcggcacacgatgtcggcgtcctgcgccagcagatccaccaccttccctttgccttcgtcgccccactgcgcgccgagcaccaccgtcacccggttt

SEQ ID NO: 8651 - DNA, 705 bp, Canis familiaris
tggagtacactgtgccggtaccccctggggcttggtcctggtcgctggacaagtttatgcctgcctttttattagccagcctaattgttagttttgaaaaaaggccccatacccctccaaggtggaatgggttaaaagggggaggggaaacattggggggaaaaggaaggggccaaacccaacgggtgtgggccctaggccttgttcccagaaaggcccctggtttaaaataaggccaagggcccttcccgcgcacacaaggggaccttaaccctctggcccacaattcggcccaaccttcccctggcccttgggccccttaaggcggccaagaccccttcaaccccctccaacccttggattggcctggccccagtaggcctgggattcccttgaggggccattggaccccctaaatccgggtttcacaagggtaaaccagtgggtgcctgagggtctttcctggtggggttgcacctactagaaaagggccattaatttggcctgcaaatgcttaaatgttattaaaaccacgtcgggctcccggtgcatggagcctgcttctccctctgcctatgtctctgcctctctctctctctctctctctatgtgactatcataaataaataaaaattttaaaaaaaaaaaaaaaaaaaaaaaaaaaaaaaaaaaaaaaaaaaaaaaaaaaaaaaaaaaaaaaaaaag

SEQ ID NO: 8652 - DNA, 617 bp, Canis familiaris
cattcaattttttggctctgcaaaactatgatgccctcaaaaggttgaggctaaaatgtaagaatatttcttcagcctttaattaatttttgaattttaatcaggttccaggagccactttttatagccaatacaaccgggcaagagaatacttcacccatatttaaaattgtggtttaataacccaggagtacccttgttaaatattttctaatacctggagccaagtttttgtcccggggaggccttccaaattaatgcccaaaagttaagcaattcaatgttttggacaacaataaagctttttactgataagaattcttaagtgttcccaaagcaactgatgttttacagggcttgtgttcttcttccttctctggaaggatttggggatccaccatgaacttactatacaaacactaatgatgggctaacttctggtttaatgagtgagttggctaccaccttgatgtaaaaatttgtaaaggaaactttttcaccattttgagtgtcagatgtatttttaactgtctggtttgtacttttacgacttttgtactaccaaagcagagttaaaaataaaaatgttaaacataaaaaaaaaaaaaaaaaaaaaa

SEQ ID NO: 8653 - DNA, 649 bp, Canis familiaris
  misc_feature (7)..(7): n comprises a, c, g, or t, or includes no nucleotide
ttcccgngatctgagcaggagcgccatcatgggagtcgacatccgccacaacaaggaccgaaaggttcggcgcaaggagcccaagagccaggacatctacctgagactgttggttaagctgtacaggtttctggccagacgaaccaactctacctttaaccaggttgtgttgaagaggttgttcatgagtcgcaccaaccggccacctctgtccctttcccggatgatccggaagatgaaactgcctggccgggaaaacaaaacagctgtggttgtaggaaccataacggatgatgtgcgtgtccaggaggtgcccaagctgaaggtgtgtgcactgcgcgtgagtagccgtgcccggagccgcatcctcaaagctggaggcaagatcctcaccttcgatcagttggccctggacatcccctaagggttgtggcaccgtctttaatttcttgggtcaaggaaagggccgaagaagggtgtacaaaccacttggcaaggccccaggaaccccacacagccacaccaaaccctacgtgagatccaagggccggaagttcgagcgtgccagaggccgcagggccagccgaggctacaaaaactaaccccagatcctgccttgttattaaaaagattttgaatgccaaaaaaa

SEQ ID NO: 8654 - DNA, 216 bp, Canis familiaris
caaagattgtgtccgtgggcgatgaccaggaaatccacgtctatgattgccccgtgtaaacaccagtctcgcaggctggtgtgcaggtcatgacattccgtacctctctagctttaacaaaacagagtgtttattggaacagaagcttaaattttgtagatatggtatctgttcatactttaacataaagtgttcataacacaaaaaaaaaaaaaa

SEQ ID NO: 8655 - DNA, 511 bp, Canis familiaris
actcaactggagttcaggctgtgatgggcggctcatttcaaaagttttgagactgtactgattgatcttggcattttcaagtttggatttaatgtccagtggcttttcaaaaaagtttactaatgactgttcagtcagaagtgaagctaaaatatgttcaagggagacagtccagtccccttctgcctcttgaggaaatgtctggggatcttgggtaattttcccagggttgttgtctgcaaaaacagagtcctgctctggagaaagagctgaagcccgcagctcctctccacattcctgggagcagcttccagagctgctacttcgctgccccacttccccaatctgcagcagcagagtggttactgtggcgatggcttgatacaaatcattttcttctggatcttcatggaacatactatacaaagttttacagaactggataaattctctctggaattaaaagaagtatacataaagcataaaaaaaaaaaaaaaaaaaaaaaaaaaa

SEQ ID NO: 8656 - DNA, 572 bp, Canis familiaris
atacaacaagggataaaccttcgatccagggatcatccttccaaaatggcgtatttaataaaagatttttggactgcactgacacaatctgttctagtacatcaagttctattttttaactgagctccagaggtagtttgttacagagaccttttagagaaagctcccatgtgatttccaaaattttctcccatgttaaatactaatcctgggacattgcagatgctgggtattttccagttttttcagtttgggctctcaggattactgattgtggcaaaaaagtgtttagactgctttaaaaactgtgcatttagggacatttaaaagcctatctgcaatgtttatcaagattaggaagcaatttccacaatagcgacaatacacagagaatcacttgaaaagaataagaaggttgggggttttttttttattattattcaaggttaccaccctgagtatacagcagtttattaaaaatatttgtgaatgtattttttagtactggaagaaaaaatattctgttgtctcatttagcattttaggatgttcttcacggagctgattaaaaa

SEQ ID NO: 8657 - DNA, 604 bp, Canis familiaris
agggcaaaaactgccggactaattttcatggcatggatcttacccgtgaccaaaatgtggctcccatggtcaaaaaatggcaagaccatgattgaagctcatgtgaatgttaaaggacttaccgatggttattgccttcgtctattttgtgttggttttactaaaaacgcaataatcagattcggaagacctctttacgctcagcaacccaacaggtcccgccaaattcgggaaaaagatgatggaaatcatgacccgagaggtggcaaacaaatgacttgaaagaagtggtcaataaactgattccagacagcatcggaaaagatatagaaaaagcttgtcagtctatttatccactccatgatgtttttgttagaaaagtaaaaatgctgaagaagcccaagtttgaattgggaaaactcatggagcttcatggtgaaggtagtagttctggaaaagctacgggggatgagaccggtgctaaagttgaacgagctgatggatatgaaccaccagtccaagaatctgtttaaaattcagacatttaatggtgaccaataaaaacatatttgtgatgtttaaaaaaaaaaaaaaaaaaaaaaaa

SEQ ID NO: 8658 - DNA, 589 bp, Canis familiaris
cctgagcacagggagcaggagtgggcagaagccaaagagctgctaaaggagccagaggaggaggaggaagaggaggaagaagaggaagaaatgcccagcagagacccctccccagaaccccccagccgcaggctgcagcgggtccaggacaagactgggaaactgcctcgggtccgagaggaactatgaggggctgagccagcatcttggggatgtggccacttggcttgtgaagcgccacgttgatgccaggacccctgagaggcccccatgtgatgggagcagaacagtgagctctctgcccctgcacccctactaccttggggatcacaagggctgtccagccctggactcagaggataactgcacagactagcctagagctcaccaggcctggttgatggacctccagccctaggacagaccaaggacacctccctggaaacaaatggcaggggatatagggcctgactgtgtcatatgtggagatgagagggaggataaccctagtgccctgtcccggcttgtaataaacatttgaagatccctcagccagggcaaaaaaaaaaaaaaaaaaaaaaaaaaaaaa

SEQ ID NO: 8659 - DNA, 663 bp, Canis familiaris
  misc_feature (1)..(1): n comprises a, c, g, or t, or includes no nucleotide
ntttcaacagacagctaatggtgcccaccacatgggccccaaagctggttgagaatgaggcctttcaaggtggttcaccttccggaccaagaattgtatggggattaaaaggagtggaatagtttgtctcaataataataaccccaatgggggaataatatacattctgggccacatagggaatggctggataatctccccccccttctcggttctcgaacactgggagagagaactcgggagagagatgggttaaggctcgagagtggagaaaggaaagcgaaaaaggaatgccaagccaggagaggggcaagagaggggaggaagggaggaggaaaatcccccgccaaacccttccaggacccatggccccggagccaaaattaagagtcggatgcttaaccaactaaaccacccagacacctcatgtatactttaagatacagttgaggggatcccctgggtggcgcagcggtttggtgcctgcctttggcccagggcgcgatcctggagacccgggatcgaatcccacatcgggctcccggtgcgtggagcctgcttctccctctgcctgtgtctctgcctctctgtctctctgtgactatcataaataaattttttaaaaaattaaaaaaaaaaaaaaaaaaaaaaaaaaaaaaaagg

SEQ ID NO: 8660 - DNA, 386 bp, Canis familiaris
  misc_feature (1)..(1): n comprises a, c, g, or t, or includes no nucleotide
ncagtgggtcggagcctatggattaacgccagcaactcggcctttttacggttcctggccttttgctggccttttgctcacatgttctttcctgcgttatcgcctgattctgtggataactgtattaccgcctttgagtgagctgatatccgtctcgccgcagccgaacgaccgagcgcagcgagtcagtgagcgaggaagcggaagagcgcccaatacgcaaaccgcctctccccgcgcgttggccgattcattaatgcagagcttgcaattcgcgctttttcaatattattgaagcatttatcagggttattgtctcatgagcggatacatatttgaatgtatttagaaaaataaacaaataggggttccgcgcacatttcccc

SEQ ID NO: 8661 - DNA, 641 bp, Canis familiaris
gatacctgacccctcaggcatgaggcctctccccttgttgcctggtataaattctaaactatcgtgcctgttggagaagtaaacctctgcagcaactgaagtattctgttgaagcccttaattccggattcttggggtagaccttaactctccttatctggttttttccagtctgcattaataggcacaggaaatgatttggcaaatttgggaagaaatgcatccatattttctccagaactgtttttaaagttgcgtacacattctagcttcgggtaagacagaagtttcactctgtcagcatttggaaaaataacatttggagtattacttacaggcgtggctattttatgttcctgttacatctttattttttgaaatcagagaagcttttgtcatagttggcaattctacagatcaattctaagtttctaaactaggtagaaactgaaaaagcatttagaaggaaattctaaagaaaattgaattaaaaaaatctgaaagttcaagttctaaatatctggaagtaggtggaaaataagtgtattgttctgaggatcacatgatggaaagcattattttgacaaaataaagcaatataacttgttactataaaaaaaaaaaaaaaaaaaaaaaaaaaa

SEQ ID NO: 8662 - DNA, 596 bp, Canis familiaris
caaagggtcgctttgctgttcatcggatacacctgaggaggccaagtataagttgtgcaaagtgagaaagatctttgtgggacaaaaggaatccctcacctggtgactcatgatgctcgcaccatccgctatcctgatcccctcatcaaggtgaatgataccattcagattgatttggagactggaaagattacggatttcatcaagtttgatactggtaatctgtgtatggtgactggaggtgccaaacctgggaagaattggtgtgatccacccaccggaggaggaaaaccaacccctgggttcttttgatgtagttcacgtgaaagatgccaatggcaacagttttgccacccgactctccaacatttttgttattggcaaaggcaacaaaccatggatttctcttccccgtggaaagggtatccgcctcaccattgctgaggaaagagacaagagactggcagccaaacagagcagtgggtaaaatggtccctgggtgacgtgattggaagtctttatacttaattaaagattctacagcacgctaaaaaaaaaaaaaaaaaaaaaaaaaaaaaaaaaaaaaaaaaaaaaaa

SEQ ID NO: 8663 - DNA, 607 bp, Canis familiaris
  misc_feature (1)..(1): n comprises a, c, g, or t, or includes no nucleotide
ncagagcggtgggctaaccaacgcccccccacaggcctccctggtactatagcatcagaactgtcacatgctgcgccccttccggagagcagggcttgcactcttcccctagaacctactttgaaggcaattagaagctttgttttcatgttccccctggtattgtcttgccaggatggttaggtacacaaggacgcttattagatcactgagaagaaaaagcccaacccgcttctctggtatgaacatctagtttgagagcaagccaaacagtaggcttgtattagtgctttaatggagtactggtgaacatttttgctttcttgataggagatctgcttataatttagccagggtttctattttcaaaacccttcttccgccgactaaccaaaccttttcccgtggcagttaccgttcatttttaaagcaatttcactgctaaatataaattgtatttgtgggggttcatagttatataatgctgaaggggaccactctttcgttgaaaggtgataaaagttaaataaagactgtctccacagtgaaaaaaaaaaaaaaaaaaaaaaaaaaaaaaaaaaaaaaaaaaaaaaaaaaaaaaaaaagg

SEQ ID NO: 8664 - DNA, 520 bp, Canis familiaris
tgagggtaatgtccatcatcgttactgatcacgttatttcgtaacgtctatcataggtcgacattcagtaaacattaaattgtcacagtttgtactttcaacttggttcatcttctctaaccaaacatggacaaaaatggcagagcacaaaaaccaaccaaccaacaaaaaagtttgctggtaccaaaagcccaggatgaggagttgcaaaggaacagttccaaaatactggggccttgggcagatggaaaattacagattaaaaatatgcttagactcatccagacagtgtgctgatttttaccagtgttaacactaggccagtgtttgaatttaactttgagaagcgcaatgatgatggtatttcacgtagaaaaactgtattagaagaggccccctctgtgtaagtgccttgacctactcagcaaaaggtgaatcaagccctcaggagccctatgccttgtaagttacaaacatccccactctgcccaggcaaagaacctttgggatttattaaaag

SEQ ID NO: 8665 - DNA, 706 bp, Canis familiaris
  misc_feature (117)..(117): n comprises a, c, g, or t, or includes no nucleotide
cacctgggcccacaggagagagagagagcaagagacacaggcagagggagaaagcaggctccattgcaccggggagcctgacgtgggactcgattccggatctccaggatcgcgccnctggggccaaaggcaggcgccaaaccgctgcgccacccagggatccctaattattgattttgaatatcactgtatctttttcagttttgttatccattgtaaattttgtttcaaaaataattgtttatggtaatacattattaattgaaaggatccctaaatgctattggattttgttttcactttcatagatcagtatctacaaataataatttcagggacaatgtaaacgtgtttagctgaatctgttaaactgctgaatctgtcaagtgagattagctagaaaaagttggagttcaattgattctgaagtttgcagaacacaggcaaagaataaagatcaattctaacattttggtaacccttgtgggcagaagggtgagaagaaattcttttgaaaactgaagttattattccataatgggtgacacatatagcaaaggacactatacatggtcagtgtgattatacctggggaatagaaaatgaaattcctacttgcctttgttttgtggaatccagtgatttatttaagagagatgttaatccttattaaagcagtaagttaacataaaaaaaaaaaaaaaaa

SEQ ID NO: 8666 - DNA, 617 bp, Canis familiaris
ttcaggatctgcgaagaaagcttttctacgttgctgccccagcctcctccctacacctctggcatctaagcagcaagcccagctgtgctggagttaccgacatcttcctctctcccccagctcactgggctggatggcatggactgtttgctgacctctgttctcctagggtatgggaggtgggcggtatcaagttctctgcctctctgtctctctctgtgtgactatcatgaataaataaataaaatcttttaaaaaaaaaaaaaaaaggaaatgcagtagaagagaacgtgtcaccctgaaagtgactgtaatacagtgttttgattatttgtcatcatcgaacatatgaagtccgttgatgttgttgtaaaatacacttcacctttaaatatttaagctttatgtcattgggtgtttttctcatctgcccttgtaatgcaaagatgcgttcatctgaggccgcacttggccatgcaaaggacagttgttgaaacatccacgtggaattttgcaatctttaaaaaatacacttgaacctaaatcttggcagaattagcagtgttataaactgcttccaaggacaccgcagtaggattttcgctgtatataacttt

SEQ ID NO: 8667 - DNA, 682 bp, Canis familiaris
  misc_feature (10)..(10): n comprises a, c, g, or t, or includes no nucleotide
cgatgtacanacacagcaaactccacgtaaaaggaacattcagctaaaggtttcatacttggatctcttctggtgtggtgcaatattagtaatatgattaaaaagtgctaatacacgtgtaatttagctaaagaggaaaatataatggataaatatcagcccttggtaattctgagagttatagtccgctcaattttagttaatcccaaaattttaaccagtctctatgaatcacataattttgcttccaatagagaaattatattttcgttgccacaatgggcattaagccctaactgcaaattattaatataataatcaaaaaagggaaaggaccagttccttcagctggattcagatcaagcaagtgtatggctggatgtccaggtcagcaggcttgcctgcctggttgtaaagagtcatcggagcccaattaataaatactatcactccaggggtgtctctaaagagaggctccctcctctctgtgtgaagaaggcttcacacctgcttaacctacattaggaaaggattaattacctgaagtgccgggcccctcagccagtcagcacgtttgtgccagggcacatggtggcctcggctgaggagggagagagggagaaggagcagctgggagatcatggaaagaccagctcctcctgatatggtcagcactttaggg

SEQ ID NO: 8668 - DNA, 646 bp, Canis familiaris
gggtctctaggatcacaccccaggctgaaggcaatgctaaaccgctggccaccagggcctgccctagtaaatatttcttgaactgaactagtgcccttaagggcagggcttcacttctttctttctttgggccacctcctggcacatagtaagtactcgcttttatctctgacagtaggttgatcaatgaggtcacagatccaggtcatatctgcaaaaagacttgagcaacgctgatgcagcgtgaatcgccggcgcgggctcggacggctccaaatagcttccccagagttgctcggctgcggggctgggggtcagagcgggctctcctctctctgcgcactcagcccctcttagcgtatgtccaggagctctgcacgtccggtgattacccgcactctggcgcccgccgccgccccgaggcgttgaaggtactggcggctcgggaggaggtcgcgcctgggtgcgggagggccggggcggctcccgtttccgactccaggcgctccggcacgaccgctgccctcgcgcccctccccgggacggaaatggattcagaaatcccccgggaaggcgccccctctcgggctcagccccgggagtcgggccagtcctggggtcaggccgcgggctggttccgcgtccc

SEQ ID NO: 8669 - DNA, 565 bp, Canis familiaris
ctatggtgctattgcccaggcagagtcactgcgttactaactcctaggaggccttgcttgtgcggagggcctgctatggtttcttcggttcatcatggagattgggccaaaaggctgttgagtcttggtgtctggggaactccggaggacagagggctaaatccatgaagttttgtggattggctttgatgattcacagtggagaccctgttaactactacgttgacaccgctgtgcgccatgtgctgctcagacagggtgtgctgggcatcaaagtcaagatcatgctttccctgggaccctagtggtaagattggccctaagaagcccctgccagatcatgtgagcattgtggaacccaaggatgagatactgcccaccacccccatctcggaacagaagggtgggaagccagagccgcctgctatgccgcagccagtacccacagcataaatagggtctccttggcagttggatctggaggctggattttactctgtgaagacctttaataaaatatttgagtaaaacacgtggcacaaaaaaaaaaaaaaaaaaaaaaaaa

SEQ ID NO: 8670 - DNA, 504 bp, Canis familiaris
  misc_feature (363)..(363): n comprises a, c, g, or t, or includes no nucleotide
gctagaatttagcatccccttatgcattgttgcctaaaggggagaaggaaaaaaacccacacacattaatggccgactggctctgatgtttttatagtaggtgtgagaacaacacaactgtcgttctaaattgttggtctgtctatatttcctgcgtgcctgggcaggggacgttatggggttcttaattttctctgtgtgagtattatactatactctatatatctactttgtgtttgcgactaaaatcttgtgtctcaaatagtaggagagaaagtgtaataatttggaagggaaaaagtggtaattggaataaggcctggccattaattattgtgagattaatgcagttgttgatatttntagggcacagtggtacagcccgcaccttgtataatgtcattctgaaaacattggtagttaataggtgccacaacattgcagaaagaaaagaaagaaggaaggaaaaggaaaggaagaagaaagaaagaaagaaagaaagaa

SEQ ID NO: 8671 - DNA, 705 bp, Canis familiaris
aacagggcttgaactaatatcctgagatcaagagttgcatggtctgacgctgagccaccaggcactccagctagccacccgtgttgtcctggccgttatactgtaccaccatcatggattgaagggaagagactggacatgaactgcattttgtccaacttgtgttataggagagctttccatcagtccccctaacgggtgatcaccaagttctttttgaatgcctacattgctggggagctcatcacttcttgaggaatcccattatatgttgaatagctccctttggtgatctcaacctttctgacagctccacttaaccatctacatgtagttgaaacccagatctttctccagaccaatatccagctgctcatgtggacaacatcacaaggatgtttgacatactcgccatcttgcagtcttctgctcttccccatttgctcctcgtccaatgtcctgtcacatgctcttttaggaactcttgactcaagacagagggagcggaattcctacgtaacagagcgttcttatgtcccatggcagctgtcatctgccaaagacatggaagaaggggagctgactcttccgtggcatgtattatgtgcccgcaactgtttccagcaccttacatatatgaagtttttatgagattagtgctctgtcctgggttgaatagtatccttccacttaaaaaaaaaaaaa

SEQ ID NO: 8672 - DNA, 567 bp, Canis familiaris
tttaagtgtctgttctggactgataatataaacaaactgctttacaacagctttatttatttctactttcatgcagttttttacacattgtggtgggtaagcttcacacacaccgcatcaataaaccattggttgtttatttttaaatggccaatttctcatttaagtttggatctgggaaggacaggacttctccaatagcccctgttaggttttaaagggtgaagtttctgaaaagcacgtgtggagagctgttctgtgagactgaaaccaggcagcgggtgtgaggaaacaaaagtgccgggaagatgtctatttttttcttgtgtattgaaatgtaaaatcataatgtttgtatgattgctgatgcgattgtttttgtaaattttattgtggcatatacagtattgtcatatgattgaaaagaaacacaacgtttcctaatgtaagtgctctgaaaatgtcgacactgtatatatatgagtatagtttgatttttttttttgtttggggttttttttttggcagattgaaaaattaaaataaatcttactatcgacaaaaaaa

SEQ ID NO: 8673 - DNA, 733 bp, Canis familiaris
agcggtgttgtgtctgttgaaatcactgccgtgctgtgctgtgtgagaaaaatataataggctttattgagatataagtgcacataccaaaacatttacttaacttaaaggaaacaagtctgggtttcggggtataattcaccagttatgcaaccatcaccacaaccgattttagagcatttgttctcatcccaaaagaacccgtggtagccagtaacaagtcacgttcctatgtcctcgccaccaccgcacaaaccctaggcaaccacgaaatgtaccctctgtctcccatagttttgtctattctcaacataaaaatgagatcctataatgtgtggtcttttgtgactgacttcttacgctagcatgttttcaagttcacccatgttgtagcatgtatccaatacttcattccttgtttttgctgattaataatccttttagatataccatactttgtttatctattcatccgtcgatggacatttgggtcgttccactttttggttattatgaatgatgctgctatgaacgctgtgtacatacatactcctctgttcatctctgcctagtacttaactctaattttgttgttgctttgtgtcccttttccttcacaagaatgtgagctctgcagggacctgaatcgccaggccctggtctgctgctgggcacccttgttggcccttagtaaacatctgtttggcaaaaaggtgaaaaaaaaaaaaaaaaa

SEQ ID NO: 8674 - DNA, 700 bp, Canis familiaris
acaaagcaggctctggtatccggtccggaattccccggatgcagtccgctctgctcctgtctctccttttgatgccggcgctgttgcctcgtggcctcctcgccgtgctttttggctaccccgaggctctgctgtccactcgggttcatgggagcccccccgtcttcagcgctttgtccgggggttcaaagagtctgcgtgtatatttctccggggtctgtgctctgcacccctttggtctacactgtcgcccccaaggagagaaggagtctccgcacaaggagagtactcgcacgagggctctgtgtgtgagagaacgcggtgtgcacacccgtgcgttacactctctatcctctcagataacatcatatcaatggatgtggaaaggaaagattggagggaagacaatggagggtgctggatggatggattaaaacccaaagttcccttgggttccagctttgacagatttcattcgttctgtgcacccttatgaagtggctgaagtgattgcattgcctgtggagcaggggaactccccatacctgcattgggtgcgccaggttacagagtcagtttcagactccagcacagccctaccgtgatgaaccctgtctctgccatgttcctctcatatacttcaatgcccttgacttccaggtgatgactgggcccctaataaatcctgtctgtagttcaa

SEQ ID NO: 8675 - DNA, 569 bp, Canis familiaris
gctacatagagtagtcaaattcatagagacagaaacagaatcatggttgccagcaactggaggtaagggcagtgggaagtagttgtttattagataaagactaagataaataaataaataaataaaattaactttattttctagtaaatgcaaagtttttgcaaagggaaaaaatagataaagagtttcagttttacaaaatgaaaagagttctggaaattgattgcataatgatatgtatgtatgtactttaacactattgaattgtacacttaaaaatgtttaagatggaggggacctggctggctcagttggtggagcatgtgatcttggggtcataagtttgagcccaacgttgggtatagagcttactttaaaaaaaatgtagggcagcccgggtggctcagtggtttagcgccacctttggtcctggagacctgggatcgagtcccatgtcgggctccatgcatggagcctgcttctccctctgcctgtgtctctgcctctctttttctctctctctctgtgtctctcgagtaaataaataaaatcttaataaaaaaaaaaaa

SEQ ID NO: 8676 - DNA, 664 bp, Canis familiaris
  misc_feature (110)..(110): n comprises a, c, g, or t, or includes no nucleotide
acaaacacgctttttttttgtggttttttttcgttgtttttttttttgtaagagagagcacatctgtgacaaaaaatactctggttgcaggaaaagctagggcacactgnttcgactaagtagtttttagctgttggagaaaatatagagcactttaatttctgttatcgttaaaataatgtattaaatccccgtcgaaaatgggtaaatggatccatacacgaggacatagcttaaaaatatttaaaatagaggataattcctcacaggaggacctttttttttttcttgtaaattaactggcttaaaaaatgaatgaaccaaaggtcccaaacagggccaaagaggattggagccaaactgggtcaaccacgatttcttattatcctccatgctcgctttgaagaagagaagaagaaaaaaaaaataagttttcaagttccatttcttatcgactccgcgggtccatctggccaacacgagtggcctggccactggtttttgcaacgacgacggtggtaaaatgcgtttggagagctaaacgcttgtttctgtcttgggattctggggtaggagttgcctttagcttaagtgtctttaaggagtaaggaaaacacaacacacacatacacacacacacacgcgcgcccacacacacacacac

SEQ ID NO: 8677 - DNA, 619 bp, Canis familiaris
aggcataagtgctaggtacgaacaaggttcattttcgtgtgcccattgatcaggagacaggacattaaaaacagtaatataagaaaggaagctttcacttgcagcctttttagcagagttttgccaaaacgtgttcgcggtgtcctctcctggttctccactacccaggcccttgccacgtcgcttgttcagtgtgaccatgctttcttctctgtagatgtttaacggcccaagccctttttccgcagggcattgaaccagccaatcagaacaccccatccttgaggggcagtaacctggccaatagtggtatccatcgcatcagctctgctggaggcaaggggcctaggtcctgctgccctgtggcctgccccctgctcccaatcttttattgtgtccataggaataataggtaagggctccatctctgtcaagccatgtaacaaaggacactgtgggaaaatctctggcatcagagggagcgtgtggagagcaactcgggaggaacaagtttattttgtattgaatgatttttaatgaatgcaatattaatccttgcagatgagcaataatcattaaagtcaattaaaatgataagaccttaaaaaaaaaaaaaaaa

SEQ ID NO: 8678 - DNA, 596 bp, Canis familiaris
  misc_feature (51)..(51): n comprises a, c, g, or t, or includes no nucleotide
agggtaatcagagaattagcatgggagatactggggacctcatgcagctgngcagataatataaagaagtggtttcattcatgctgaggagctgtgtgcctttccacccctcgccctgctccccctccccgctcccgagagttctctcctgcttgcacgtagtgtactccatggggtttgaagcagtggggctccactggactttctcctcttctcccccatgaggaacttaaaaggaggtcaaagtaaagactgacgcgtagtctcacctaagatgaggggaaacgtagttcatcgtacacattgacgactgtcaccaaaaatccataaaacaatagtactgtgcctctttctgaaacagcggacgacacaaaactcttagagcgactaaaatggtgacaggtagctgggacctaggctctcgtaccatgaaggttgttttgcttattgtatatttgtgtatgtagtgtaactattttgtacaatagaggactgtaactactattataggttgtacagattgaaatttagatgtttcattggctgtctgaagaggtgtggtttgtcttttctatagagatctacgtaaaaaaaaa

SEQ ID NO: 8679 - DNA, 422 bp, Canis familiaris
tcccaaaagattaaaagttaaaaattacatacctaccatgaaagatacctatcgtatattccttttaggagaattagctaggacctaatattaatctgaaaacaactctctaaagatcctatttgcaatactgctaatagattaagagattatccatgactttcagatgaaaagaataaactggatagaagactgggagaataagaaacttgtgatgaggggcgcctgggtagctcagtggttatgtctgcatttggttcaggtcatgttccgggggtcctaggattgagtcccacatcaggctccctacaggaagcctgcttctctctctacctgtgtctctgcctctttctctgtgtctttcatgaatgaataaataaaatttaaaaaaaaaaaaaaaaaaaaaaaaaaaaaaaaaaaaa

SEQ ID NO: 8680 - DNA, 613 bp, Canis familiaris
ttttgggagtgactcaagaagtgaagaatgcacaagaatggatcaccaggatattgggattgtatgcaaactctagccttgcttgttaaagttggtgtgttagatatctgtaatggtactgactttgcttgctttgaagtagctctttaattttttttgcagtaactgtttagttttttaagtctctcgtagtgttaagttatagtgaatactgctacagcaatttctaatttttaagaattgagtaatggtgtagaacactaattcataatcactctaattgtaatctgaataaagtgtaacattgtgtagcctttttgtataaaatagacaaatagaaatggtccaattagtttcctttttaatatgcttaaaataagcaggtggatctatttcatgtttttgatcaaaaactttatttgggatatgtatgggtagggtaaatcagtaagaggtgttatttggaaccttgttttggacagtttaccatttgccttttatcccaaagttgttgtaacctgctgtgatacgatgcttcaagagaaaatgcggttataaaaatggttcagaattaaacttttaattcattcgaaaaaaaaaaaaaaaaaaaaaa

SEQ ID NO: 8681 - DNA, 563 bp, Canis familiaris
  misc_feature (186)..(186): n comprises a, c, g, or t, or includes no nucleotide
ttctcgcgtgtttcctgcagcctgaagcaggttcttctcatttgccctatggtccctgcctggttctagagactggtccacctctgttttgagattttgtagatccatgtaactgaggacctgtcagaccaagatgacatcatagagtaatgttagtagacattctagatttgaccatctcaagtntcaaatctaagggcttttttttttttttttttaaatctctagataatatatgatagagagagagagaagagcagaagacactgggcagaaggagaagacgggttccaagcaccgggagcccgacgtgggaattgatcccgggtttccaagggttcggggccctgggcccaaaaggccagggcgccaaaccgctgcgccacccagggatcccctaagggctctttttgttccagttatcagtcagacttaaatttggagactgggactaagtagtaacatattttcaccaagacaataaaaactacatttgcattctaccatgtaaattcaaaacatctattaaggtatgaaacctagttttagagaagagccccact

SEQ ID NO: 8682 - DNA, 601 bp, Canis familiaris
gggtgttcctggcttacctgatctctacactggaggtgcatttcggatttcactctgatgccacctaatgaacgccttgttaactggaatcactgcgggtctttcttggtggggggttgccgggggctggcccagcttctccaaacaagggctggtattgtttggccatggcccttgtgatggaaggaaggatgcgcaccggggtttgggaacacgtgctgggagggtctggggaactctagagtcaggggggttcaaaatctggattcgaatcccagctctctgccttccaagagtcgtgcaacctctctgaccttctttatctgtaaggtgggggtaataatgcacccgtccacgcgcacagatcgttgtgacgttgactgagctgattcatgtaattgtttagaacaatgccagatgcagaattgatgattcagccgtgtcacctatgcacatacattgtcgtaacagccaccgtcactgtgctgtgatggctaagtttgtgtgaaaacttagctgggctgcggtgcccaggtatttagttaaactaattaaatcattaaatattaactaaaataaaaaaaaaaaaaaaaaaaaaaaa

SEQ ID NO: 8683 - DNA, 592 bp, Canis familiaris
gaagacctgcggccccgaggacagtggcaagtacacgtccgctgtgtccaaccgcgccggcgccatcaacgcgacctacaatggtgacgtgatccatcggacccgctccaagcccgtgctcacgggcacgcaccccgtgaacacgacggtggactttgggggcaccacgtcgttccagtgcaaggtgcgcagtgacgtgaagccggtgatccagtggtctgaagcgcgtggagtacggctccgagggccagctacaactccaccatcgacgtgggcggccagaagttcgtggtgctgcccacgggcgacgtgtggtcgaggcccgacggctcactacactcaacaagctgctcatcacagcgtgcgcgccaggacagaagcgggcactagaaaactgcgctgggggccaacaaccatgggctaacaaggtttcccgcaggcgccttcctcaccgtgctgccagaccccaagccgcccgggccgcccgtggcaccccgcgtcgtccagcacgagcttgccgtggcccgtggtcatcggcatcccacgcgggcgccgtcttcctcctgggcaccgtgctcctgtggctgtgcca

SEQ ID NO: 8684 - DNA, 632 bp, Canis familiaris
gcagcatagccactccggaggtgacctccgtcttctcgtagtatcggagttcactggaatactgcatcctatagctttaggagcagttgaggaacggccctggaggaccaaggtgatctggcccaatagcagtgcatgaggctgctgctcttagcccaagctgcaaacttagaatctcttgggagactatgatgctggttcccaggccccattccaatagctatggaatctggatctatggggctgaagcctgagcagtggcatgtttgaagagctatctggtaacattgctgtgctgccatggatggagaaccactgagctacttctgagcggtcagtgtgatagcgatttcctgggagagcccctgttatgcctgttgtcttgggtcccacgcagtgttcatatttgcactgcatttgtcatttgttaaccagaattggatcaattaaatagttgtgttacaataagccaggacagggtttagttgagctccactttttatttccagcttctgccaaggattcatctattaggatatgaagtctgtgtgtgatgggggagtgttcaaaataatcattaataaagatgacttacttaacaaatcaaaaaaaaaaaaaaaaaaaaaaaaaaa

SEQ ID NO: 8685 - DNA, 681 bp, Canis familiaris
gccctaatgtactgcgattgcggtacggtacccatgactggtaaagattttaaggtgtagaaacaagtattttggattgaggtaatgtcaacgtggtaaaaaatagttttttaaaacttcagaagtggttctcttgtatgagattcagactttcagtcactgacaatattgttgctattatcacaggaagttctgagaactactaatagtgatgggcagattgattctctgggaagcttctcctactagtaaaatgctgtcttgtctcctttcaaaggtcctgagttcacttagaaggtttgtattaaaatcctatatacatgcacagcactactactgaataagcactctcgtagtgctcaggcatggtgggcctttgcctgggcgactgtttgggccagtctgagtgaactgggggccaggtaaacacagcctcactgagcctatttacacattccttcttgagagtcaaagaggttaaaaaaaaagatgggaggaggcaatgggagcacttctcaccaaatgttcttgctcccttgttgaaatatgttgctggggtttcattgtcccttccccctctgccagaaagatgtgtggcattatccttttaattcatgttattaacggagcaataataaaattgacattttaaaaaaaaaaaaaaaaaaaaaaaaaaaaaaa

SEQ ID NO: 8686 - DNA, 564 bp, Canis familiaris
taggatccactaggacgctaatcttgcttagtcctgttttcagagagtggatctttctcacaaccaggttccttgagttacctcagcagaagactagaattagagacagaggacagacctcttgtcctagtataaggcattaagtatatgaccttgaatcacaggaatgggttaatagggcctggggactaggtatctatccgttagcagtttgtagcacgtatgtcttcaaggctgtgaattctgtactaattatcaatatttttaggtcattctgtatatgtattttaaattatggacatgaacttgggggaaaatgtgcaatttggagggctgcttgatttgtgttgggttagggaatatttttctttttttttgggaatatttttcaacttcttgctttatactctaaaatgtggtgtgtttatgaacttgttcatgttatttaatcaaggagatttccaatcgttaattcctcattactgacaaaaaagggaaaatatgaaacacaggaagggaaaataaactgacttttatagtaaaaaaaaaaaaaaaaaaaaaaaa

SEQ ID NO: 8687 - DNA, 716 bp, Canis familiaris
tcgggggcggttccgtctggcccaatcaggaacaggtcacagggaagaagcgcgtcctctgcacaacggtgcccggcaagtcaacccgccagtggcaccatcggcggctttcaggagcaggtgttctcggagtttggcttcccgccagctgtgcagcgctgggtcatcgggcagtgcctgtgtgtgcccgagcgcagccttgcttcgtatggggtccggcgggatggggatcctgctttcctctatcttgctctcagcgcccggagaggcctcaggacgcagccctctgggcccccagaagacagatggggaactaaagtcgcctgtttccgcagtcactggggctgcccagagcgcctcagccagccagcctccccagcccccttcagcctggctggtcctgcccttccggcacattcatcaatgcccccagccgacccggctgtgagatggcagcacccagaagcccctgcagttgggacccccttcctgcagcctccacccaccagccgccaaaggtctcgaagagagaggatggcctgatccctccgggcccgaggtccctggagcctgtcctgaaactctcaggcgacttttgctgactgctcaccagcatcaggccagggttgtggagggctgcgatctggagtcattaaagacacttctgaaaaaaaaaaaaaaaaaaaaaaaaaaaaaaaaaaaaaaaaaaaaaaaaa

SEQ ID NO: 8688 - DNA, 558 bp, Canis familiaris
acccaactcggactacgagaagatcacgcagctgtctgaagaagccacaagtccgcggcggcgcggcctcctgctggacgccggtccgagaacgagagctcgtcttgagcgcacactcgccaccggccccgcagggcgctccggcactccgcccctgccccgtcaggggccctttgctattttctgagatgtacaatgtctatttttttaacctggaaattgagggggtcgggggagagagagagagagagagtagagagagagagagagagatggatggagagatggagagatggagggagagggatggagatggagagggagactcggggtctgatcacaaggcagaaaagaccacgcaccgcgctgcgttccaaggcacctgccccagcagccggccgccccccagccccgctcggcgccccggacccgtcccccgcgggagctgcggcccacgcacacagcacccactcccactcccgccccgtgccaccccgcggcggccggggcgggggcgggggcggggaggtgttcccgaaggctcaacagcccaccgca

SEQ ID NO: 8689 - DNA, 628 bp, Canis familiaris
agaagccggccgccactatacaggtcctgacccagactggtgcctgggtgaccggcctctgccttccgccggagtttacttctgaccttgcccacctctgacccccaccttgctcctcacagcctctgcttggcgcacagagctgtccactttctagacatgtcctggcagggggacacaggcaatctggcacagacccagctccacctgatggtgagagctccatcacaccctggccccacacgccacggctccttctcagagaagctattgccaagacctcaagtccttcagaaccagaacagggtggccatcaggatggccaacccttccataaatcctcctgttcctctggtccccagaccttgccatttgggaacaaacatcagatccttgccccaccaccttggttccagaaagggtcttgagcccataccccaagtctgacaccctcctcccctcccgccgcctgcaggacactctagcaggacactggtgctttgccgcataccctactgtgctgcacttctttcccaatttttcataaaaataaatgtatgtatgtatgtgtaatattaaaaaaaaaaaaaaaaaaaaaaaaaaaaaaaaaaaaaaaaaaaaaaaaaaa

SEQ ID NO: 8690 - DNA, 673 bp, Canis familiaris
ggtgatccaaggacttcatgatccagggtggagactttacccgaggagatggcactggaggaaagagcatctatggtgaacgcttccctgatgagaacttcaagctgaaacactatgggcctggctgggtgagcatggccaatcgcaggcaaagacaccaaccggctcccagttctttatcacgacggttaagactgcctggctagatggcaagcacgatggtgttcggcgaaagatatttggaaggacatcggagatagttaacggaagatgggaggagcacacaaacagacagcccgggagcaagacccccgaaaggatagtgacagatactgcacgagcatcgtgggcaagagtatgaggagtgggagagagacgcctctctgcgcatactgcccaagagaatagagagaccccaggggcacggcttccccttgaagcaacaattggcggaagtcccggtcggccactttcccaggggtgaggacgggcccgccacagggcaccgtgctgcggggccctggtgctggcatctgacggagcggacccctcccctcacattccataggccagcggcctggttttgtaacaaactcaaactcctaccaatgctgaccaattaaaaaaaaaaaacggtgggttttttataaaaaaaaaaaaaaaaaaaaaaaaa

SEQ ID NO: 8691 - DNA, 676 bp, Canis familiaris
ggactcggagccatgggcatgggggacctgctcaaagccatagttcgacttcagtgagaagctctaactcgctggcggcttaccgaggaggaactggggcctctttcaccgcggtggtgtcttgtttctgcgagacacgcttcgggcattggaggacttcgcttccggtggaacagcttcaaggaagacccttgctcgccgggcttcttccgggcttcttggttgcttgaaggacccggcccttcggaagaactttccccggcttcacccaacctgccttggttccaagctgccgggaccgggggacccggaacaacaaggcattccgagaagctgcggtccttccggggtggacgcccagtgacccgcccggccggccttctgccgctgcccccttgtacagaatcgaactctgcacttctctctcctttacgagacgaaaaggaaaagcaaaccagaatcttatttatattgttataaaatattccaagatgagcctccggccccccgagccttcttgtaaataactgcctccctcccccatcactgaccctcccatcctcccctatttaaatcactctcccccctccctcattcgctagcccctgatttgttctattcctgtctcaaatccaatagttcacagctgaaaaaaaaaaaaaaaaaaaaaaaaaaa

SEQ ID NO: 8692 - DNA, 497 bp, Canis familiaris
ttaaagcttaccagttggtcaagaagtttgtattttgttaaacaagacctgaggttcattactcaggtaaaagtctgggtagatggtccaggctggtctggagctcaatggtgttgggcccttggttcttgccaacatctggctccactgggtgagatcctgacatcagggtcccaggtgtgtggcatatgcatttcaggcagcagaatggaggaaaagggcaagcactgcctgataaggagagcttccagaagatactgcattcagtgagccagaaacttagttaacccaagccaacacccaactgcaaatggctggagagtgtccttattctgaaaccatctgtcccccaaaaatgtcatgttactgagaaagcaaaagagaagaaataccggggaaaatattgcaaaatattctgactctatgagatacaccagtaagcagataaggataaactactaaaataggtggtattacaggtcagttgacaatattat

SEQ ID NO: 8693 - DNA, 465 bp, Canis familiaris
ctgccgcccccaaagttggaccccatcagtaagctggatggagccagccttcccctcctggggggctcttcctaaatatctgactggtatggaggctccagggagggccctcgggtgggatggacctggctgagcctcaagaaacgaggaagaggaggggggagggctcctggcggccagtgtccccacagctctcccggcacccagttcccacacctccctcccagctgcactttaacccagagggggagtggggtcctggggacagggcgggtgagtctgctcctctgtccccggggcgccggcagctcccccagcccctgtcccgggggtgccccggcccgtcctcacggctgttccgacaagagcttctggagcttgtaacgagtagattgtttccctgagttttctcatgaataaattcgttcaatgctaaaaaaaaaaaaaaaaaaaaaaaaaaaaaaa

SEQ ID NO: 8694 - DNA, 639 bp, Canis familiaris
  misc_feature (227)..(228): n comprises a, c, g, or t, or includes no nucleotide
ggtaccggtccggattcccgggatctcccctcgctgctgcacaagccagtgagaccaacccacaggaccacggaggagaccatgaagagcctgctccttctgctccattctggctgccttggccgtggcagctttgtgctacgaatctcatgaaagtatggaatcctatggaatgtaatcccggtcattaacagggagaaatgccaagacagttaaatgctccgcanncagagatgggagagctaaagcccagggagagggatcagagaaccaccaagcccgcctatgagcctcaaaccggggaagcctgtgatgacttcaagctttgcgaacgctacgccatggtttatggatacaatgctgcctacaatcgctatttccggcatcgccgaggaggcaaatgagattgaaaaaagtctctttccttccagagcctggtgcctggttttgtattcctttacagtagcatcatcgaactacataaacacatacaaattgcttatttcttaaatgttcttgtctggctgttgccctccttcctgccccccagatcaataagcagtgaaagtgcaatgtggtgaaaggtcaaaagagaattaagatgtgtgattattattacataataaactcttggatgga

SEQ ID NO: 8695 - DNA, 588 bp, Canis familiaris
gcccgcaagattgccctctagaaacgagtgtgaccgggaccattcgcgggaagacagaaccgcctacctcaagatcctggagagctcgcagactctgcttagtgtcctgaagagggaagctgggaacttgaccaaggccacagcctcagagcagaagagcagcggagctaaggacagctgatggggccgttctggggaggggcctgcctctactgtgcccggcagtggctgggcctccgactatcctcagcgtctttactcttcttggcaccagctgccccaggtaccaagaggctgttgccaagctccacctgccccaggtgacaaggaaacctctgggcacgtcccggccttgtactcatgcaggacttggggagtgcaggctctgggtcagttctgttcagggcctgaggtcgccaccaccccccatcccggtgctgccagaaaggccctgctcccttgtctccacaccatgagagtggcctcaccttgctgccccagccagggaagtgggcaaagggcaggggccctgcacctcagagcttgtcctggtggcatgtgactgtcaataaagcttaggtttgtaaa

SEQ ID NO: 8696 - DNA, 583 bp, Canis familiaris
  misc_feature (5)..(5): n comprises a, c, g, or t, or includes no nucleotide
ttaanatgtgaataaccttatgtcaaccaacatgtagaagagaacagttacagagtttagtcttaacatttatttgtagcacccagcagatcaacttttgcaaaatccgctttagaagagtgttttggtatcagaatcatgaataataaaatggagttttacatgtatactaattgatattttctcagtattttaatctcactacttatcccagaattttctgtaaacctaactgcttggtttgcagagttttagtcaccctttgacagtttgtaagaatttagtttgtagattccatttggtaagaaattagtatcggaaataatgttaaaatattaactaggtaaagacgtccactaatatagttttggttgttagatttgggctacttttaatcatggaataatatgtttgtattggtgtaagattcaatgaatgactttagctgtaggaatataatagttatactgcaaatattttgcatccctttgtgacctaatttacaaacatttaaaattgtgttgcaattttgctttgctgtttaataaaaagctgtttcagagattgaaaaaaaaaaaaaaaa

SEQ ID NO: 8697 - DNA, 557 bp, Canis familiaris
agggacatactagttcctcctacccacggccatgtgaaaaagcacccacgtttgggtgggcgctctataaagaacggcaacacactgtgatgtacacctacgacggaatacaaccaagggctacctggatcaggcttcggggagcgccgtgctcgagctcacggagaacgaccaggtgtggctccagctgcccaacacgggatcgaacgggctgtactcctcccagtacgtccactcctctttctcagggttcctggtggcaccaatgtgagcgtattcccaaccgagctcacgtaaatctgcttgacgaggcattccccaattccgctgcgccccacaaaatgcatatggacgtaggccaaaaagtgacccgttttaactttccaaatacagatgtgagctttcagaccaacccattctcctgctggaaaagcgggcagcaatggtaaagaatatgtgaagaccctcttgaatttctagtcagtggtcccaagactataaagttttctgtgaactccttcagtatttaaacatttcaacctcaaagtcctagtagg

SEQ ID NO: 8698 - DNA, 603 bp, Canis familiaris
  misc_feature (355)..(355): n comprises a, c, g, or t, or includes no nucleotide
ttcctggagaccatggcttgatggacaaagggctccccagctgttccaccgggcactcgactcccaccaggtcccccgatctgaagcctctgcctttggcgcctcccaccacgtggcctacttcgaggcctcagccaaactgcgcctcaatgtggacgaggcctttgagcagctggtgcgggctgtccggaagtaccaggagcaggagctcccgcccagcccacccagtgcccccaggaagaaagacggaggctgtccctgcgtccatcctctagcccgggtgcaaaaggagcagccagcatgagctctcgggaccagctgccttcactgagctctttccccttctgggtttccnaggatacactacacccccatcccaaattcctggccttctccaggacatcgccactgtgtgccttctgccgaagccttcacttccaccacccaagcccctgggtgaggggctcccgggcttttgggtcactgctgtatataactcccctctttacccccagggaaataaacgtcactgccaatgtcaaaaaaaaaaaaaaaaaaaaaaaaaaaaaaaaaaaaaaaaaaaaaaaaaaaaaaaaaaaaaaa

SEQ ID NO: 8699 - DNA, 591 bp, Canis familiaris
ttcggataagggagcagaaggctgcccggaggcaaagggaggaacagcagcggaagcagcgggagcaggaggagagggagcaagaagagcagcggcgttttgccgccctcagcgatcgtgagaagagagctctggccgcagagcgcaggctggctgcccagctgggagtctccaccccgcagacacccggtcctgcaaccctttgtgctcagcgctgctggagttgtgggacatccctccaaggcctcattccctttcactatcttgacttctctttctgctccacacgctgcctccgggatcaccgctgccaggccgccaagccctcttcctgacctctttacagctgcacctgggccaactctgggccctgagagggtgcattcacagtagccctaggtttcttctttcccgtgaaaccggagtatttggaagattaagaaggacactcaggaaccagggcaaagacagggccatagaggggtgtggagctggtactgtctctggaactttaatcgtaataaagtttggcaaggaaaaaaaaaaaaaaaaaaaaaaaaaaaaaaaaaaaaaaaaaaaaaaaaaaaaaaa

SEQ ID NO: 8700 - DNA, 601 bp, Canis familiaris
ctagctcgggtctcgttgctcaagggcacagagggcagagcctatgatgacgggggtctcttccccctttgtagccaaactcagtgagcagttcccggatctccagctcaaccagctccaccatctcagggtcttggacagcatctgctttgtttacgtacaccactacatgctctactccaatctgtctggccagaagcagatgctctcgggtctggggcatagggccgtcattggccgccaccaccaggatgcagccatcgagaggggcggtgcctgtgatcatattcttaacgtaatctgcatgacctgggcaatctgtgtgggcatagtggcgggcagcagtgctgtactcgacgtgagccgcgttaattgtgattcctcgggctcgttcttcaggggcattgtcaatctcttccaaagttatttcttaaacttggctccacctccctcggctaaaatcttggtgatggccgcggtcagtgtggtcttgccgtggtccacatggccgatggtgcccacgttcacatggggcttgtcgcgcacataggtcttcttggcctccacggccaggccacggcataagcggggcagggctggg

SEQ ID NO: 8701 - DNA, 611 bp, Canis familiaris
tccgttcatctgagtaatgagttgtttccagaggagacaagcctgtgtccccttgtcacccccaagaccctgcctgctggggccgcagggccgtgtggacggagggggcacacgcacctgcttctgctcccgtgtcgaggagtcgccgctcctccatgtgccagcatggttcacgtccaaggccgctctgcaaccggggagtaaattaattcctcccttgtacgtgcaatgtgaggaaatccagcctgcctcgaggtggtttattccagatctgtcggtaacggggctcatctgtgctcctggcgctgtgcctcagcgcggcggagctcacctgcctcccagtcactgcgacgggggacgcgcctgtgcacctcgtcgctcatcgcctctcatttttattaaacacgctcagtagctttgttgagaagaaaatgggttctttatcctaaagatgattaccgttttaaagtgctcttaacattttcaatgaatcctttttatttttttcctcgcggttttgtactccgtattctggggcgttttgtaatgtggctccttaccaagattattaaaaccttattaaaatctaaaaaaaaaaaaaaaaaaaaaaa

SEQ ID NO: 8702 - DNA, 646 bp, Canis familiaris
attcccggatctttttctatgtgtcatcgtatcttgcccactctttttgtgggctttataataaaaagcccgatgctgttttctcgcctgtaccttccgtcttaatttaaaacacccaaggttgccaacaaggacttttaagtggaataaactcaccagtgggtaaagagcatttcagttgccacttactatttgactcctgctgaaacttctcctcactcgatcctgatgggtgaggccgaaggcccctcacacctccaacagcactaggagatgggcagcaagtgggtccttttcctgtctgaatcagaagtaaaacttgaaagaaataaaattctgtataaatgagtactcatctaattccactttcttctgtatctttttttcacatgttagaaatcaaaggcaaaagtaaaaaaaaaaacttgtgttagaaataatggtattttctttcatttgttagaggtatttcaaattgttgtggtgttggtgggtctgtgctcgttattgtgagggacagagtgaagaataagatttgagtgtcttccctcctgtattttgtgagattacatgtattttgtgagaggtatgaccgagagaattttgaaggaaggattagttgctgctgtaaatgtttaaaaaaaaa

SEQ ID NO: 8703 - DNA, 605 bp, Canis familiaris
tgtcaaaagaagaagagagagccgtgaaggatgagttgctaagtgaaaaaccagaggtcaagcagaagtgggcatctcgacttctggccaagttgcgaaaagatatccgacctgagtaccgagaggattttgttcttacagttacggggaaaaagcctccatgttgtgttctttccaacccagaccagaaaggcaagatgcgaagaattgactgccttcgccaggcagataaagtctggaggttggaccttgttatggtgattttatttaaaggtattccgctcgaaagtactgatggcgagcgccttgtaaagtccccacagtgctctaatccagggctctgtgtgcagccccatcacataggggtttctgttaaggaactcgatttatatttggcatactttgtgcatgcagcagaggattcatttcataggggtctgtacatcagtcaagaaaatgactacagaggaattaccaagactggtaatcaagtaggaatgttctctggaagcccatgctgagggggagcagaactcagattgggacaactgcatgtgtggatcagtagcaaatccagtacaaggtttctgttcattgcacaagct

SEQ ID NO: 8704 - DNA, 618 bp, Canis familiaris
cagtcttgaaaacttaagttgcgtttaatccgtaccattctccaagttaacctgacaagcatactttgaatatttaataactggttttacaccggtacattagacattaagttgccacttgtcaggtggctagtttggggttagccgcatatccgtggggccagttgtgtgtcagctttctttactggtatctgagtattctcatcattggatagctttaatatctttacggaaacttaattttgggccttttgtcaatacgtcaaggtgtgtttcttcctcagagcactgaatagtcaaagatagtaaattcagctgttaatggattttatgtaagttacacattcttaatttggtctttgtaaatagcactaggtaggccttctacctgtaatactccaagagttaaaggcagcagaggggttcagaaagaacatttttttacagtcagttaatttaccatgtaaaattgctgtaaatgataatgtgtacagattttttgttcaaatattcaattgtaaacttcttgttaagactgttatgtttctattgcttttgtatggaatgatattgcaaaaataaaaagaaaagaacctttaaaaaaaaaaaaaaaaaaaa

SEQ ID NO: 8705 - DNA, 630 bp, Canis familiaris
ccaaaatcaacgggacttttccaaaatgtcgtaacaactccgccccattgacgcaaatggtcggtaggcgtgtacggtgggaggtctatataagcagagctcgtttagtgaaaccgtcagatcgcctggagacgccatccacgctgttttgacctccatagaagacaccgggaccgatccagcctccggactctagctaggccgcgggacggataacaatttcacacaggaaacagctatgaccattaggcctatttaggtgacactatagaacaagtttgtacaaaaaagcaggctggtaccggtccggaattcccgggatgggagccgcgctgccgggctcccgcctcggcccccgccggggccccgctccccgggcccgcggggctggcgctgggctcagcggggcgcgccgggccgggagccgcgctgccgggctcccgggctccaactcctcctcccccggcgccgccgccgccgccgccgccgccgccgcccgccgcgccgggtcctaaagccgcgcgcctcaagaggatggtgcgcctggcggcggagctgctgttgctgctggggctgctgctgctcacgctgcacatcacggtgctgcgcggctcgggagccgccgacggg

SEQ ID NO: 8706 - DNA, 525 bp, Canis familiaris
gtgttatctattgcatctgtaactgtcacatctctccccttccggagagcagggcttgcactcgttccgcctagttacctatctttgaaaggcaattagaagctttgttttcatttccccctggtattgtcttgccaggatggttaggtacacaaggacgcttattagatcctgtagtaagattaagccctaacccgcttctctggtatgaacatctagtttgagagcaagccaaaccgtaggcttgtattagtgctttaatggagtactggtaacatttttctttcttgataggaatctgcttatatttagccaggcttctatttcattaccctctccccctaccaactttccgtgcaagttacctttcatttttaaagcacatttcactgctaaatataaattgtatttgtggggttcatagttatataatgctgaagggaaccactctttcgttgaaaggtgataaaagttaaataaagactgtctccaccagtaaaaaaaaaaaaaaaaaaaaaaaaaaaa

SEQ ID NO: 8707 - DNA, 593 bp, Canis familiaris
aatattgatgatgggagcagtgagtcttgatgataagggttgagaaactggaatcccaacactgttttgttgcttgttttattatgacctcagattaaattggggaatatcagccctttggcacagttgtcccactacattcaaataaaagtgcaatggtggccttggggtctttcaaggagaaaaaaagtctcttatgcattggggcaaaataatcatcttaatggcttttttttactgatttctcctgacccccaggccaaggacacgaagtaatcatttacagctgaggagcattaaactagacttgaggagatggatctcattcaagtataaattataaataaaatctaaagcttgtcacatttgcctatttatgtgcattagtcttctaaaactagtttgattctgaaattgtgataatacttaataaataatagctgctaatgtttttacgtactagtgcccaatagatgaaggaggattccaacctgagatttttttgccttgggatttgaataataaatttttataacatttttttaattgtccccaaaaaaaaaaaaaaaaaaaaaaaaaaaaaaaaaaaaaaa

SEQ ID NO: 8708 - DNA, 691 bp, Canis familiaris
gtcctggacctccggccggctgcttggtaggcttcttgctggcccctctcagggtaggaggatcgggaagtagtatgtaccatccatgcatggagtttccaaactgggccctgggccttcgactcttccagacggatgatataagattcgatgcagactccagctgggacatcctggggcatccagaaggctcctcgctcctgaatacaccggccggcacagtgttatctggcggcccagctgcaggagaggctggcgggagcccatgcgggagctggggcagctccaggcccaggaggcgggtctgcagcgggaacagaggaaagcagacacccacaagaagatgactcgagttctagagccctgtgtgcctgtggacggggctcagggaccccagctcccgggtgccctcggggagaccagctgtcacccgactagatgctcctggaagaggggctggcctgctcccaggctacaccccacggccagcggacactgctgagaggacatggggctgcagggctcccttctggacacttccttgccactgagcccacccgccagtgtttcggggggtctcctcagcgaggacattaaagtgattgtgttgtggtgtctttaaaaaaaaaaaaaaaaaaaaaaaaaaaaaaaaaaaaaaaaaaaaaaaaaaaaaaaaaaaataaaaaaaaaa

SEQ ID NO: 8709 - DNA, 606 bp, Canis familiaris
cctcacaatagataaataaataaataaataaataaataaataataaatagatgcatgaatggataaggaagatgtggtgcatatacacacatgcacacatatacacacaatgaaatactacatagccataaaaaaggatgagatcttgtcatttgcaacatgaatagacttagaaggtaatatgctaagtgaaataagtcagagaaagacaagtaccatatgattttactctgctggaatataaaaaaataaacgaataacaaatagaaagcagaatcagattataaatacagagaacaaactgatggttgccagagggaaaggaggtaaggggggtggttgggcaaaatgggtgaaggggagagggagatataggcttccagttatggaatgaataagtcatggcataaaaggcatagcttagggcagcccaggtggctcagcagtttagtgccaccttcagcccagggtgtgatcctggggtcctgggatcgagtctcacatcaggctccctgcacggaacctgattctccctctgcctgtgtctctgcctctctctgtgtctctcatgaataaataaataaaatcttaaaaaaaaaaaaaaaa

SEQ ID NO: 8710 - DNA, 559 bp, Canis familiaris
  misc_feature (34)..(34): n comprises a, c, g, or t, or includes no nucleotide
acacagttataggaacactacatttaagtgggtncagtttgtctttactaaagactacactgaactctgctgttcctggttacgcagcggaatccgaggagcagatacagaccccactgtacggttcggacacttagcaccgtcctgggcagtccgtctcctgtcccgggcgcctgctgaggatccttactcatcactttggaatggctgaaattaagttctaactcttttgtttttggttttttgttgtgcttctttagaatccagctttcatttctaagcaaacctgtgtctacttcaaaagactggaaatagaaaaaaataaagtctttgccaaatccttcagagatgactgtagtcacatggcttaaatgaaatgtcaaaaagctttttgattaaaccaggcatccgccccgttgtcaccgttacctttctgccagcatgacctcttaaaggctgcctcttgggcgtactgtgtatcctgttgtgtatttgttcatttccacactcaattcagttgtgttaaaataaataacattttaagtttttaaaaaaaaaa

SEQ ID NO: 8711 - DNA, 443 bp, Canis familiaris
accttctggacgcacacttctcactttgctgtcacaccctctcggggctgatgttgtggcttgatgggtgctgcccccagggaccgcatcctgacacgcatcatagcaacattcctttcttgtgccctggtccccaaccactagttgataagtttataagcaacttccccctttctcacaccccgcacacccgcgtcgcgcaaaaatgtctataaacgcagatgttctggagatttcttgataagcttaaagaaattgaaaatagccaaaatctaggactgcagatttgtgcccatttatgaccttgtgctctgaaaaactaaatcggggcaaatgtagttttaaagtagaagaggaatttgcacagtaatatatatgcaagtataggtatagactatgtcatctggcacattcgttttctcagttaaaaaaaaaaaaaaaaa

SEQ ID NO: 8712 - DNA, 406 bp, Canis familiaris
atggaggaaaatttttggaataaagttttttgcgggaccagacccctgggaagaacgtgatttacaaggtataccgacaacagtatctttgcttttactcatgtacttatacctgcctggattgttcattattatatcaaatatcatgtgaatgcaaaaccatatgccattgttgaaaggaagcccagaatattcccaggtgatataattctggagactggagaagtaattccaccaatgaaagaatttcctgatcaacatcattgaagattactttaagatttcaaaggcatacaaaaaaaatttcaaaggcatatgaggccacgtttattgatgcattactgtatttactgaatatattttctggaaaagtaataaagtttactctgagataaaaaaaaaaaaa

SEQ ID NO: 8713 - DNA, 594 bp, Canis familiaris
aaactgcggcccagccttggcctggcaactgtgctgccacggctgcatccacgggccgtaggggctctagattctgaggcacatttggtgtccatcatgttccctggctcgtcctgctgtcagcgccaggaagtaccttcaaaggcagggcctgccagacttgtacttttcctcctctgagctagatttttatagccattaaagagaagaagccgggtaccaggagggcttctggagacaaactcagcaggggacttcagctggattctgttgaggagcaaagctgctggaatggatgggacagcggaagctggcgtgggaaggaggggctttctatggaaaaccttgacctagaaggtggcttccatctccccagctctgccggaagcttttggaaaaaagtgttttaggctcccaaacttaaccttggttttaagggaattctgtcccagggatgagttggggctgcttctgaagagcatttaaaattaaaatctatagctcaacctcattcaaagtaaagaatatcagcagcaaataaatgttaaatccgtctctaaaaaaaaaaaaaaaaaaaaaaaaaaaaaaataaaa

SEQ ID NO: 8714 - DNA, 577 bp, Canis familiaris
tggtaaaagtatcatcgtttcctatagagtgatcccaacaacaggtacaagtcccagaaagagtccttctctgcagggaattcagcacaaagcaaggctggctctgtccacccgcctctttttccctcccttgttcagtccagagagggtgtgctggtaaagagccatgggacaggagtccccaaagcagccatgatccatgtgcacttttcccctactctctccaagggtccttgatgaagcaaggagagccaggttctgcaatgatcgtctagatcttggaatttctttttctgaatataaaaaccctgtgcatcaggggctgtgagggatttcactgagtgctggcccttagaaccttgaagcctctggactgttggttaccaagaatctcagcttggctgagatggaaaaatcaaagtgagcattgctggctcaataccctccttgcagggatagggaaaaatttacccaatggcagaggtaataaaaaagaatgacaaacatttaagcttgttatttagaaaaaaaaaaaatgtactgaggtagaccaaacagaaaataataaaatttatgt

SEQ ID NO: 8715 - DNA, 636 bp, Canis familiaris
  misc_feature (38)..(38): n comprises a, c, g, or t, or includes no nucleotide
tgctttgccaaatcaatgagtgacgggttaactagaanatgtgacaatcacagttcctctgttgctcaaataattctgtttttccaaagcgttagcagctttaattaaatctgttggactgggggaggagagaactgttctctagcggttaacatggtattcttgaagaagaataatacaagccaaagaaaactcattatcaggcatgtttgccttagaaatggtagtgggtaaaatctggagttctaatctgtttttaaagctgcatatctcatatgtggtcttgggctcacagtctagtatttcctgagttcttgagtaagggttatgtgcatttaactgcctacctagctttcttccttcaggagacatttctcaccacagtggtcttgacaaagagtaacaatgtgctatttacagaagtttacttataagagcctgcaataacctatagctttgcatctctcacaggcctgattgacttgagttgtcaggatcaattacgaaaccgaagtttggtgcctcctctttatcatgttttttcccttgtaccagttgtgtttaatgtcattaaaaagaaataaaagttcttgtcgtggcaaaaaaaaaaaaaaaaaaaaaaaaaaaaaaaaaaaa

SEQ ID NO: 8716 - DNA, 652 bp, Canis familiaris
tatgcttgttctccgttggtgttgctgtgaagacacacacatttatgggattttcactctcaaagtctacagctcagtgagaaacagcaacctagagagccatggagattgtagggggtatggaggggagaaaaaaagccggaagttggaaaaatcagcagctactggtgcctgagggaatcagatgttagtattattattttagttgagagggcttgaaaatcaaagtatcttgatttacataatagagggcttgaggcgctaagaacaagtcaaatagtcacgactgccaccctctggcttctgtaatcattggtgtcggcttcctttttgcctttagtcagatcctcagcaaattcatagagattgggagggatgtgcaacataaaagttagcggtagtttgtgtcaggattgccaaagaggatgaaatacaagccttcccttagttttgcaatttgcagttgacggcatctccagtccacttccctggcattgctcatcaacctgaaggagcggatgattcccaaggcagcttccactagggatttgtaagtaagggttttgtgacacattttgtcccttggaactgagcctttttaactgtcgctgtgaataaactattttgatcgaaaaaaaaaaaaaaaaaaaaa

SEQ ID NO: 8717 - DNA, 649 bp, Canis familiaris
gcaatgtgggaattatggacatttaaatatatgtagaagagtttaaattggaccatttaaaagcagccatatcagaatccatatccctagttacagtcacataaatgcaagtttatttgcaagatccttgaaaggaaaaattttaatcaccacaacgacctccccacccagagggcaaaactagacaagttttggtgtactttaattaggtaagcaaacttagttaaatggatatttaaaggttccttctagtgaaccattccttttcaagaagttgaaaacccttgtgtgctgtattgactaaaaggtcatgattcatggagcgtctaagacttcgttcatgggaacctgatcataaccaggtggttagaaatgtttgcaatttagcacctgctggagtaaatgggtggacagacttctataatccaaatttttgacctgcatgttttttcttcaccccaactcattcctaacatgtaggctcaatcttctcagtatttgaactactggttcagcagaaaccaggaaaaacgataactttgtagtcagaatgttatccaactgtatattgtttactttattgtaaatactggtaaacagtggtcaataaatagttttatattcaaaaaaaaaaaaaaaaaaaaaaaaa

SEQ ID NO: 8718 - DNA, 496 bp, Canis familiaris
agaccatcttccaaggtgagacagggaggtgattctgtgttcgatctgcctgtgttcaatagcttcctggggatagtggtctgtccccgggcgtccgctcacagacacccaccccctcccggggtgctctgcttttcagaaggctcttctgttgtccctgtctgggactcatacactgccctgtttgttcccttagctggcgaatgctctgtttggagaaggaagtgatcaactatgaggatatcgaggccctcatcggtccgccacctcacggccccaagaagatgatcgcacctcagaggtggagtgaggccgagagggagaagcaagacgctggggaggaggaggcacctaagcagcccccacttcgaggggatgagccatcttggcccaaatagttggacctcctcaactgtgtctgcgggaatgtgatgttcctgccagccgcaggaaggaactccttacttagtgccaccacccaccccaccatgcccgt

SEQ ID NO: 8719 - DNA, 698 bp, Canis familiaris
gggaaactggtcgcgaattgtagatgttattgatcagaacagggctttggttgatggacctgcactcaggtgaggagacaggcgatgcctttcaagtgcatgcagctgactgacttcagtcctcaagttccctcacagtgctcgccagaagtatgtccggcaagcctggcagaaggctgatatcaataccaaatgggcagctacaagatgggccaagacagagttgaagccaagacgaaaggaaaggccaagactgagcagactgttgattccgttaccataagtcagtgaaggcagaacgaaaatagagggaacgagacataaatcaatgccatggaagatataggaaggcatatctacaagacagcatgcttcctcgcaaggacatgtcttcctccaaaagcagcacgctggcctgacaagagggcgcggcgagcaagcaccgccggcgcaagaggttcacacgcccaaaaaggtggtctgtctcggcgggcaagaaggtctccagcccagaaggttcctgccccgaaagctgcagggcccagaaagcagcaccctccaaaggctcagaagggtcagaaagctccagcccagaaagcacctgctccgaaggcatctggcaagaaggcataaaaaacataagaggctgttataaataagtaataaaggttctttttgacacattgaaaaaaaaaaaa

SEQ ID NO: 8720 - DNA, 579 bp, Canis familiaris
gtatgttagtattataaaatatgccatgaatttttgttgatattaaaaacagttttagtattattatcttgcagaatggagagttctctgcctgaaagactgcctctaggatcgatagtgctattatcttcattttatagatgtgcaaaaatcactgtgggtcctgaagccattttggtgcttcttttactaagacatagcttcatttaagcctgtggttcttatgagggtgacttgattattttcctgggaaggaagtctaagtggtagtacaggaaacctgtctaaatagtgcggtattgggttataggacactgcatatggctgtttttgccaggtagagagttataccacccttttcatttctgtgggcaaagagtcgattttagtcttttacaggaacatttttgttcatcattctgaacagtattattctagttaacagaaactatcacatacataggaacttagagttttatttttctgagtaataatgttcccccctccattgtttcttgaattacattaattcattagggagcattggcaaatcaaaaaaaaaaaaataaaaaaaaaaaa

SEQ ID NO: 8721 - DNA, 571 bp, Canis familiaris
aaaaataagacattgttgtgtggagatggtgcagttaagtgatgcttgatgacagcctgtaaaactcatcaataagtaagtgttgtaaatataatttataaccagtaatggatagtgtgtaatgaatggaccattaataattgattgtctcaaaacaaactgcttgtgttggctaagcttgtaatgttttcgagtgaagcagaagcactgtgctttccaccttatttttctaccaaataaacaccacaagtgatgggaaatgccgacgacgcccctgccaggtatcgacactgtgagagtagcggtacgggtgcggccgttcagtcaggtcagtgatggtgaaagctccaccaccttgttggaactttgaccaggacttgcattttcttcattttccaatgatagttaccaaacgtgtattcaagctgcttgtcactgatggaattattgaacttatttaaatgaacttgttaaacgagtaacttaaagatctctgcataattagtaaacacgtaacctcattcctttgcacaagtagctcaataaaaacattgatgagagaaaaaaaaaa

SEQ ID NO: 8722 - DNA, 656 bp, Canis familiaris
tgacaatggacattgtacaaaggtggatgtacttgatggctgacattacagaacaatcaagaggtggcccagcagatttcagatgccatttctcggcctgtgggctttggagatgttgtagatgaggatgagtctattggaagagctagagttgctggagcaggaggaactggctcgggacttgttaaccgtgggtgacaaagaggaagaaccccccgttgaactgcccagtgtaccctctacacatctgcctgtgggaccagaagctcccgaagcagacgaagatgaagcagcacttaagcagttggctgagtgggtatcctgataagtctgggttgcttttcccggcactgccttcattggtctcttttccttaagtgccaagtgctaagctaaaggatcctagcctgttggggaggtcctgctgagcggtgatagtgtgaccctgcctggaaaggggttgttgccctccccttcttggcccaactctgaaaaaggatgttggcgcgagaggagcccccaggcccccttctctttgatagcagtcacggtgccctcgttcccaataaaatcgggcagatggaactgtagtgcttacactgccttgtctacatctgaaaaaaaaaaaaaaaaaaaaaaaaaaaaaaaaaaaaaaa

SEQ ID NO: 8723 - DNA, 556 bp, Canis familiaris
ctcagacttgtccccccgtcaggtatcgtggttcagaacatggtgacagaccgcctggcttcaaatcctgacttgccactgcctagctgcgtggccttgggcaagtcacttcacctgtgagcccgtttcctcgtctgtaaaaatggggctaacggtgcctccctcgcggagttgttgggatttgatgactgcacaggaagcacctagaactttgtaagagagtagccgtggaggtgctgggcactggtacaggattcccccccccccccatttttttttcctgcaaaggagcaaagagtgaacactttcgtctccaccggccagggggccacaaacctcgtcactgtagtctgagggcagccatccacgtagctcacccacgcgctggggggtgtggaggcctggtgcaaagctggaagcaggggggcgtgagccacggtttgcacaccctcacgctagtcctcttaatcccgggacatcgggttcccatcatgcccattttgcagatggggaaagcgaggcaggggagcccgccctctgcgccagggcctcccgg

SEQ ID NO: 8724 - DNA, 640 bp, Canis familiaris
aagctacatatacttaaaatgtcctgatgggctcagaggtattttcctggatcttggggaagtactccatatgcaaaagctgcaaagctggacttggggatttcctctgcccagcagcactaacccacagagctcactgccccatctatccagacagacttacctagatgcttgagctctaaaaaatgtaaacaagcttgtgtctcctcccctgagccactggggaggatggccccttcttcattccagcccaggcagacgggagtatgttgaataagcatgattgggaccctatttggagatctgttgcctgaaggaactttgtttataaagcactgcttggcttcatatcccagctgattgcattgtccacaacctttccaccaccttgtggccagcactgttagcacacctgagacagattgaggcctccctaaaaaagggactgaggaacagctctgatgctcctaggctgggacccgcaaatggttttggcccacgtttgtgggcctggagactttttttttttccccctagggtctttaatgccagttaggtgccaaatgagaatgtctgctgagataaaaataaaataagaatgttttgctgaaaaaaaaaaaaaaaaaaaaaaaaaaaaaaa

SEQ ID NO: 8725 - DNA, 651 bp, Canis familiaris
gctctgagtttgtaatgcccaagccaggctgttttcttcacatccaccaccggggagaagccagccagttctgcttcgctttcactctcggtctccgccagtggctcatcacctccggggggtgcgttcttcccctgtcgcttcttcttgtcatgtttgtgatgcagggcatcagcttctgctttcatgctgtagtccagctgcatgagcaggggctccaggcgagtgtacatcctctggatcagctcatgataaaccaccaggggccacaacaggatgctcagcaagacaatgtaggaaatcataatccccggaacgtagtgtcccagcacagccagcacagcacagccagaacaaactcgagcacaaaactgagctggattctgcctcttgtactgcagcagctcctgcaggtgaatctggaaggtgagccagctctcagccaggtatctgcacaactcgggcacactcagcaggtgcggccgggcgcctgaccccgcaccctcactgtcagagtggggctcctctggggatgatgccgagaggtccgggaagaagcgaggctgccagagatccagcagaaaataggccaaaagtgagacgctgagtaggaagaaaggccggagggacgacgaagagagcaaccagaag

SEQ ID NO: 8726 - DNA, 612 bp, Canis familiaris
  misc_feature (1)..(1): n comprises a, c, g, or t, or includes no nucleotide
ntgagatcaaagtatgtagtgtccatgacagtggttggcatataggtgtacagtaactgttatgctgatcttaggctgctggggtactgtgagggacttcgacatctgtaagtcctgctgatacagggttgaaactaggcctgagttatcatgtccccatttgtgtctccaggatgattttgataggcttctgttaaagagtcctggatctcagtttgggcaggaacataatagggactattgccttggtgtcaaatggtaagggccagagaatttctcagtgccgcaccacaagtacttctgccttatttcctcatgtgattggaacttttgagtgagggaggagtggtgctgtgtatctgagagtctaggtgttgccaagtgccccagaccagcctattttcaaggagcaggccttgagggattccctgggtggcgcagcggtttggcgcctgcctttggcccagggcgcgatcctggagacccgggatcgaatcccacatcgggctcccggtgcatggagcctgcttctccctctgcctgtgtctctgcctctctctctttctctctctgtgactatcataaataaataaataaatttaaaaaaaatta

SEQ ID NO: 8727 - DNA, 610 bp, Canis familiaris
agcttccagttcattcacccgtggaccaaatgaggacgaacaggtgacacgctttcttctaggtttacataccacagtcagatccgttatgaataaagtaatttagtgtcaaatagacttcccagctttatgctgccaataaatagcatgtgaggcagctgtttgtttggccctggggttggagggctaaggtgggcgctaagcctttttctaagatttttcaggtacccctctaaaggcaccgaagggcttaagtaggacaacccatggagccttcctgtggcaagagagacaacaaagcgctattacacctaaggtcaataaaaatggtgtcagcctcctaaccccagcttttgttagaaatgaggacttggggatcccctgggtggcacagcggtttggcgcctgcctttggcccagggcgtgatcctggagacccgggatcgaatcccacgtcgggctcccggtgcatggagcctgcttctccctctgcctatgtctctgcctctctctctctctctctctctatgtgactatcataaataaataaaaattttaaaaaaaaaaaaaaaaaaaaaaaaaaaaaaaaaaaaaaaaaaaaaaaaaaaaa

SEQ ID NO: 8728 - DNA, 658 bp, Canis familiaris
atgcgacactgttctaatatcgttcttgtttaagggtaggttcacaccagtacatgtggtttccagaagccacttagtttgaaaagtacagcctccaggccagtgcgttctcaaatggctaatgtgcacgggaggtcatatggagagctgtgtttaaaatgcctgattcagggagtctggggtggagcccttgaaatggcagcaatttctaataaggtgatcattttggtgttttatgccactctgatttacttactcctacttgatgtggtatggatccagaactcgcgtgaatgcagcagatgggcaaggatgttcactgcaaatgtgtttataatcacacatgaattgaaatgaacctcagtgctcatgagtggaatggtgccctagcgaaccgcggggttcttcgagtaatgggagccaaccctgcagttactaggtgtgaacctgtgcctatgggacgggtctgcaaacccaagaggatggggaagggaaggctggggtcaggagcgggaggctcagtgatgggtggaggtggaggaaatgcacatgagaactcatcaaagatgagctttgcgggggagctgctctgacggcccccacttcccaccaccctcaggagcggaagctgttggaggagcgtctggccgagttctca

SEQ ID NO: 8729 - DNA, 593 bp, Canis familiaris
tcggggttcgtcaggcttcggacttcgtccgagcagttcctgctcctactcggagagcgagaagcaatggaaggcccgcatggaattcatcctgcgccacttgcccgactaccgcgaccctcccgatggcggaggccgcctggaccagctgctgtccctctccatggtgtgggccaaccacctcttcctgggttgcagttacaaacctaagaccttttagacaaagtgatggaaatggctgatgggattgaagtagaagacctgccacagtttactacccgaagtgaattaatgaaaaagcatcaaagttaaggcagaagattcatcacatttttcaacatcagctacaggctcaggaaggaggtggggatgaatgtgacattgaccacaggagctctcataagatccctgatatttccagcatgtaggaacaaggcagttggaatgacaatcttgtctagattgtagttttaaaaggtctcatgcttctagtagctatcattgtaaaagtgtgcatggatatttatgtatttataaatcatgccctttttaaaaaaaaaaaaaaaaaaaaaaaaaaaaaaaaaaaaaaataa

SEQ ID NO: 8730 - DNA, 645 bp, Canis familiaris
gtgatgtacgagatgtgatcccgagaaggcaacattccacgaacatgcataaccccctattgtacaaaaagggatatcgattcggattagttctgtttattcgtatcagaagtaattgtctttgcaggcttcttctgagcctttaccactccagcctagcccctactcctgaacttgggggtttgctgacctcctatccggcattattcctctttacccattagaagtgcctctactcacacctcagtcctcctagcctccggagtatctattacttgagcccatcatagtttaatagaaggtaatcgcgaacatatacttcaagccttattcattacaatctccttaggcgtatattttacgctattacaggcctccgaatactatgagacatcttttacaatctccgatggggtatacggatctaccttttttatagccactggatttcacggattacacgtaattattggctctacattcctcatcgtgtgcttcctccgacagctatactaccacttcacatcaaaccaccacttcggatttgaagccgctgcatgatattgacactttgttgatgtagtctggctattcttgtatgtatctatttattgatgaggatcctaaaaaaaaaaaaaaaaaaaa

SEQ ID NO: 8731 - DNA, 637 bp, Canis familiaris
tcttcatgctgctgggccacactgccccttgacaccccagctcttgccaacaggcctggactcccgaggcttcctgtttggcccctccctggcccaggaactcggcttaggctgtgtgctcatccgaaagcaagggaagctgcccggccccaccgtgtcggcctcgtacacgctggaatacggcaaggctcagctggaaatccagagagatgccctggagccaggggagaaggtggttgtcgtggatgatctgttggccactggaggaaccatgcgcgcagcctgtgagctgttgggccaactgcaggccaaggtactggagtgcgtgagcctggtggagctgacatcactgaagggcagggagaagctggaccctgtcccctttttctctctcctgcagtatgagtgatgggccccagcctggcagatgggagttccaacttggtggctggctgctgggggacaccggccatctgcctgcacttttgtaacggttttgtacagttgccttgttccagtgcctgggccaccttcagggcccttctggcaggttctggaagtgccaagccccagcagctccacgtacaaacacagagaggatgaataaactattttgctacaaaaaaaaaaaaaaaaa

SEQ ID NO: 8732 - DNA, 632 bp, Canis familiaris
atagtcttttatcatttcttattggttataatagacgctatgccattttttaacagatgtctcccatatagtctttctttccatgttcctactttcctgccacccccccaccattttcacttctctcctgaatttctccacctccccctacacccacccagagccatcataagttatctaccttctcttgtgtgcataatgagaccagatacatctttccgagaatccttagcctgatctaaagctattatctccctcttgtgacttagagaatcaagcttttatagaccctagtattcaggactctgtagatctacactttcgtacctttcgataggagatgtagagcatctacctttgtctaggccaaaggctcctcttgtcaggcccatctaggctttttgttcttactgtgtcctccatttcctggcttcccgcagctgttctttggttagggtgcactcccttctcttcttttgcttgcctctccaaatgttccttcagggcccacctcaagttttcccatgcaccttcttaactgctcccacttcacaggatttgctctttccattctattctaaaaagtactaatgccaatcacaaattttggaactccagaaaaaaaaaaaaaa

SEQ ID NO: 8733 - DNA, 588 bp, Canis familiaris
agctttgcctgtagcatatcagagtcttaaagggaattcagcttattactatccggacagagtcaacttctgtaattgtcctgggaatgacggagaaaggggaaacctggtaattcataagtaagacttaaattagtgtttaaatgtttgaaaattgccctctctgttcaggtgataccggttactgatggttacatgtcctagggaagtttccaattagggaatactgctctctgacattattcatttctaagtcctgggaagaagagcttgggaagcttctgagtatggagaagttccatatcgggaagaggtcccctcatagaagtatgaaagtattatagattctaaactgagacttaatcctcaaatgtgtttattttacttgtcctaaaataatctgtctacgaaatataaaaaactgtaagtaattgttattttcccacctgtaggaatctttaatgtgaaaatgtattctatgaaaataaagttttttaaaaaataaaatgctgtataataaattgtattctactcttttatgtaaaaaaaaaaaaaaaaaaaaaaaaaaaaaaaaaaaaaaaaaaaaaa

SEQ ID NO: 8734 - DNA, 242 bp, Canis familiaris
ctgtaatgtgctatgttcagccgggacgtctattttccccgggagtagcgttctgttttgcccccgttaccactgagtgtgccgtgcgtgagcggctcagtcggaagcggagtgcagagcggggcgctccgaccctgcggctccctgcacctgccggcccgatgccgtcctgcgcctccttatctcctcccggcgggagcctcgaggccccgtcacccagtgctcagctcccaggccacggc

SEQ ID NO: 8735 - DNA, 595 bp, Canis familiaris
caaatgaccaacacaaagggaaagaggagaggtacccgctatatgttctctaggccttttagaaaacatggagttgttcctttggccacatacatgcgaatctataagaaaggtgatattgtggacatcaagggaatgggcactgttcaaaaaggaatgccccacaaatgttaccatggcaaaactggaagggtctacaatgttactcagcatgctgttggcattgttgtaaacaaacaagttaagggcaagattcttgccaagagaattaatgtccgcattgagcatattaaacactcaaagagccgagatagcttcctgaagcgtgtgaaggaaaatgatcagaaaaagaaggaagccaaagagaaaggtacttgggtccaactgaagcgccagcctgccccacccagagaagcacactttgtgagaaccaatggaaaggagcctgaactgctggaacccattccctatgaattcatggcatgataactgtaaaaaaaataaaagacctcacgattgtaaaagtgtttctcttaattgagtaggagtgtggttggtgtcctttcacttaaaaaaatatttaaagcaaaaaaaa

SEQ ID NO: 8736 - DNA, 608 bp, Canis familiaris
gagcatgtatattatttggtgtttgatttcatggtcgtgtgaattcccactccttagaagctatccagttgtctgatcttcgacaataactgtgggaactaccactccaaactataattgttaggatttaactttttaatattagaagctaatataagggtataaaatgcaagatataagcaattgcacatgttaatcattcctaaaagcacaagataagaatgtgccttgatgtacatatagtaagatacttactccagtttacatttcaaaaaatggcttaaaaaataataaatgtgatgccatgcatgcattatacctgcatatgtaatattggcattcgcaaatttcccattgtttctgtagctgtgtggctgactttctattttaagtgaattgacatacagtctatgacgttcataatggctgcttgttcatcgtacctttcagttagtgaaaatgtatttcaacccagctcaaatttggaattgtcttttatgttccatcttgcactgttcgttactagatttagttaattgtatgagaccattaatgtagtgtcaaaaatatgtaaataaaagatgttgaatcttgtttaaaagcaaaaa

SEQ ID NO: 8737 - DNA, 663 bp, Canis familiaris
  misc_feature (236)..(236): n comprises a, c, g, or t, or includes no nucleotide
aggcccgtttcgcactgcggttgcacgcaggagtacctgagcctcgggtcttgcgttgcccctggctcgctcaccgtctgaggaaagaggaagtagatcaaggcttaagctagttgtgtgtctggtcagtgggcaagtggcagagagtagcggcaaggggggtggggagggacgtgcagccacgcggcggggccccgcgtcccacgtgggcagcgacaggcccggcgggaagggcnggcttcgggaggaaacgtggttctctccacgtgtacgtcagggcttcgcggggtcgtgggccggtgtgtctgtgcagccgcgcaggagagaggaaaccagtcctgacctggtgggagatgagcaaactatgctaccacaaagtaatagctctgtttcttaagggcaagaaagactacgtttgggatgcgatgcaatggagggtattaaaggaaatcaaagaggagttgtgctctgcactggaaaattgggttgtgtaaatgatggtatgaatgctcagccagaggcgagatcagggagttggtataaggtctgtttattaaatgggtgagtctggtgccatttcttttagtgaagtcggagtcgaaattgaagagatcagaccatgaaaatcactgcactcgcttatggttatttaaaaaaaaaaaa

SEQ ID NO: 8738 - DNA, 609 bp, Canis familiaris
cgtctcagctcagtgtcagttcagtatacacaggagggtgttccgttacagctctgttttacttttctgatcttttgtcacttctcttcatttgtctgcgcctttttgtatttagttcatagaatcatttaatctgagatttggatggggccttcagatatcatcctattttaataacgatatatagttttcccttcatttaaagtaataatttctaaagcaaagaataagtcttgatttttttctcaagcatataaatcaaattaacttttacttttatatgtcccctatttgtttctgttttatgtagaaaagcctagatgtatttttttcacaatctgtgcaccactgaatatgtaatgagaaatacgactttgtgcactgtaaacttattttcatttctgtagttaaaagttagtttcagggcagcccgggtggctcagtggtttggtgccaccttcagccaagggtgtgatcctggagacccgggatcaagtcccacgtcgggctctctgcatggatcctgcttctccctctgcctgtgtctctgcctctctctctctgtgtctctcatgaataaataaataaaatctttaaaaaagaaaaaaa

SEQ ID NO: 8739 - DNA, 632 bp, Canis familiaris
tttggggcaatcattatctgaagtattcaggcaggtgggaagggacggatgggacccccccaggctttggtggaccaggccctggacatccagtcttaaagctctgacctgtgtcacatggacactagaaaccagtgagatggagaaaggagaattctcagggaggaggagtccacctgggctgtccttgggcgttagggagggctcaaaggagccgattccaaaggctcatgccagccaggatggggagcccccggcttcggtgcagaggaaaggctgcctcagaggtagtctggggatcagagtgggtgcgaggaggctgcgttgggcttcgagactgtcgttgttctctgagggctgtctttgacaaaacgccataaactgggtcgtgaaacaacagaaaggaccctctcaaaattctggaggcccgatctgaaatcagattaccctcagggccacactgcctctgaatgttccaggggagctactcccttgtcctgtccagcgtgccgtggctgtaggccttccaggctgtggcagctttgcttcagcctctgcctctggcttccatcaccttctcctctgtgtctgtttgctccttttccgtctctttataaggacacttgaaaaaa

SEQ ID NO: 8740 - DNA, 588 bp, Canis familiaris
aaggcagagtctgggatgtctcgggaaagctccgggctggcactccagtttaattttctcggatagctccgtttcctctctttcttcagtttcatagccctgaaacagcttgtgcctttctttctcgttatccttctttaccagctgcatccgcctttccatacgttcaatccgagcaaggagcgtgtctctctccgacttcagctcctcgatctccttttccttggcctgcagctgctgctgctgctgttcgatgaggtccaattgcagcagaaggatctgcttgaggcaggcggcctgactggaggctcccgagccgccgccacccccgagagggctcttcctcatactcttccatctgccctcgctggccgccagggtcccggcggcggcggtgggcgcgaggggtggcggccccggcagaggtagtggtgggggtcccgccgggtccgaggcggtggcagctgggggagccgccccacccttgtccccagcccagggcgtaggctctttggccgccgccacgagagagcccgtctgaatgggcagcaccgcctgatacttgggtcggggactgcagccggcgcc

SEQ ID NO: 8741 - DNA, 610 bp, Canis familiaris
ccaggaggcccagagcgcctggaaggatgacttcgcactcaatagcatgctacggaagagttccgggtgagcagggcatggggggagtgtcaggacctcgaagagggggtcattgacaaggggggcagcatgcagggccagccctctccccaccatgtcctatctgcaggtgggtcatctggccctctgagcctcagtttgaccacatccctacctcaggagtagcctctgtctcctggggagccccagctcaccgggcacccctctgctgctcagctcctaacacacacctcataggtccactcaaccatcccaaaatgaagtctagatatcatcaacgcacccctacataattgccaaaaccctctctgcagtgccctgtggttaaaagaaaacaaaaattgaaagggaaagtcacctacaatgaaaagtaatcgtgggggcagcccgggtggctcagcggtttagcgccacctacagcccagggcgtgatcctggagaccggggatcgagtcccatgtcaggctccctgcatggagcctgcttctccctctgtctctgtctctctctctctcgattaaataaataaaaccttaaaaaaaaaaaaaaa

SEQ ID NO: 8742 - DNA, 523 bp, Canis familiaris
ttagctgtttgtacaacttttgggatccgggttgtgtacatcagtttctctggtatccgccagtccctctgtgggttggatcaccacaccctgtagggcttctcccctcctagctgtctttgggtaacgcaggactgggagctgttttgaccagagaggccaaggtcaagagtcaaggtgtagacaaattgtaaaatagaaaaaagtggtgttggtgaacttggttttgtgtttgttttgttttgttttcacatttggatagctgtcacaagaggtctttccctcagtttccagcatgttcttccttttctccctgttctcacgtttttcctcctattaatcaagagaaacttcaaagtccatgggatggtcggatctcacaggctgagaactcgttcacctccaagcatttcatgaaaaagctgcttcttattaatctgtgcaaactcttgccacgatgtggggagtttgacaaatctttcaaaataaaaagtaatgacttaaaaaaaaaaaaaaaaaaaaa

SEQ ID NO: 8743 - DNA, 543 bp, Canis familiaris
  misc_feature (86)..(86): n comprises a, c, g, or t, or includes no nucleotide
gaaatgcatacctgcaagtgagcagtaggctggccaactaatacttgcatctactttgaatctgctttgcaatgaagaaaactaancacagtgatgttacagaaagtgcatttaggtggaaaaggacctccgaggtgaaatgtaggttaagacctaaatgatacaatgaagcctaccttgcaaagcccaaggaagaagccattccaggcaatgggaacagtgtatccaaaggtcctaagatgggaatgagcttactaggttccaggaacaaaaaggtcaatatggctaaaggttagctggggaatggtcagagaacaaaggagtaggggaagaagaggctaaatgggttggcaggaggaggagaaggccttgtgggacaaggagggagtgatttggattctaagtggaatgggaaaccagcaggctttgagctggtgaacgagctctgatttacaagtttaaaaactcactaaggctgttatgtggagtgtatccaaaccagtaaaaatcagaaggaaacaattaggaaacttatagtctagg

SEQ ID NO: 8744 - DNA, 562 bp, Canis familiaris
ccagggtttcgaattcccggaagaaggggagccctgagaaaaacggccgtacccacaatcccaagggaaggccaagcaaggcggcgccaaattacccaactccccggaccccgggaagttattgaccggaaaaataccaataccagggacttcttttcggagggccccggtaaattgggaattgaagttcccacctttgaaaatcccttttaacgaagggaatccattgggaggggcaagttcttggttgcccagctagcccgcgggtaatttcccagctcccaatagcgtattattaaagtttgctgcagtttaaaaagctcgtagttggatctttgggagcgggcgggcggtccgccgcgaggcgagccaccgcccgtccccgccccttgcctctcggcgccccctcgatgctcttagctgagtgtcccgcggggcccgaagcgtttactttgaaaaaattagagtgttcaaagcaggcccgagccgcctggataccgcagctaggaataatggaataggaccgcggttctattttgttggttttcggaactgaggccat

SEQ ID NO: 8745 - DNA, 531 bp, Canis familiaris
  misc_feature (38)..(38): n comprises a, c, g, or t, or includes no nucleotide
gtgttttgtgcgggatcctggggttgacttcggagagngcacgacgtcttgcaatttttaaatttaaatttgagatttcaatgtgaatgatggtgcgtgccatgcagtcctcgcattttcctaactgtctcttccactttgggtagagggagggagggaagaggtaccagcagcagcattctgtgggcagaggaagtataccagagaatggggcagagaacgggctaaatttaaaattgtaattggctgacttccactggcttgcgggtgttctaatgactcataataacttcatttaaaaccagctgagcagaaaatagattggagaggagcctcgggccattatggatttgttttttttgacaagctcggttttgagcagccaggaaggctctcagagagggcttggctgtgttctctgcctctctctctctctctctctctatgtgactatcataaataaataaaaattttaaaaaaaaaaaaaaaaaaaaaaaaaaaaaaaaaaaaaaaaaaaaaaaaaaaaaaaaa

SEQ ID NO: 8746 - DNA, 653 bp, Canis familiaris
tggctgcgctgcagccgtggccctgacaccggcctggtgcctctggcctatgtgacctgaccccaactccaagtccaacccctggaagcagcccaaactgaggccctgtgcatgctggtggcctcagggaccctcataacccctgacttggagcctgagagcccttcccaagccctctggcttggccacagagagtagactgagagctgggggccatacatgccctgtgctcagtgttaattactccccattaactgtcccagtgacctcatccagacctccacccaggaaaggagggaagggatgcagcactgggctgccaggatttccctggcccatctgggcccagcccctccatagatatggataagcaccttccctatgaaggggaggttgaccagagaccccattttgccagggtttcccctaggccaggtaattgaggaggaaaggtgacagtatttgggggccagctccctaagcccccaaatgtaaataagctgtggccagtgcctggtggtcagaagagggaggaggagcccaggcttctgtttatgtatttatttatttatttattacacctattaataaaaaaggtgctcggcctcccaaaaaaaaaaaaaaaaaaaaaaaaaaaaaaaaaaaaaaaaggg

SEQ ID NO: 8747 - DNA, 590 bp, Canis familiaris
atcatgatccaagcccattctgtactcctattcgtttcatgggccaccagagccagtactgttggacagcagcagcattctagctgacagaattttgctgatggatactttcttcccaaattgtcatttatcttggtgagaccatagcccagtggcgtaaagctggggtaccaagacatgcctgagtatgaaaacttcaagcacctcctgcaggcaccactggatgatgcccaagagattctgcaagcacgcttccctatgccacgttacattaacacagagcatggaggcagccaggctcgattccttttgtccaaagtgaacccatctcagacacacaataacctgtatgcctggggacaggaaacaggagcacccatcctaactgatgatgttagcctacaggtgttcatggatcatttgaagaagctggctgtctccagtgcttgttaggctggacatgtgagcagaacattgaagagcacagggggttgtgttcataattgctaataacagcttagaaacactttccttgtggattttaataaataaaggaaacattgtatgtaaaaaaaaaaaaaaaaaaaaaa

SEQ ID NO: 8748 - DNA, 629 bp, Canis familiaris
ctcaatttgagaaggttgttttgataatacatgaactatatcaggatttcaattgaggaaccacttgaccggggagacttctggtaatttggagcaactactccttgctgttgtgaaatctattcgaagtatacctgcctaccttgcagaaaccctctactatgctatgaagggagcagggacagatgatcataccctcatcagagtcgtggtgtccaggagtgagattgatttgtttaacattaggaaggagttcaggaagaattttgccacctctctttattacatgattaagggtgatacatctggggactataagaaagccctcttgatgctctgtggaggagaagatgactgaggcatcagccagagagagatcttatgctgtgcctgccaccgccacttcgaccttccttcacagcttgctgcactttttatatgccagtgcttgacacattgccttattcacgtagcgtgctaataaccaaagcatacatgctgcagaataaaaataacggtgcttctttcttaatgttcaattaaggtctttctctttgtctgttgtagtactaaagtgtacttacgttattaaaaaaaaaaaaaaaaaaaaaaaaaaaaaaaaaaaaaaa

SEQ ID NO: 8749 - DNA, 586 bp, Canis familiaris
acttacttggtgctgggcagagaaaaagtacagaagtacagaacgtggtgacccgtatcaaggagctcacagccaggctggtgggcgatgctgcccaggaagcaggcgagaagctacagggcgcacccaacccggccagcagcagctctctgaaggtcaagcgtgagctgacccgggaaggatgagcagaagtggcgcaaagaggctgcggaaacagggcccccgcgaggaaccccacgagggcaagcagagtgcatgtagttactgggaggagttcaagtacaaaggcattgcaggcccggattctgaagacatcagtcccctgacccccagttcaacgctgtttttagaacactagctgtctttcgaggtctcctgacaaatataggatgattcagcacatccatcaatactcttgcgtagacaaaaggaagcacacgtggcccacgcttacccagatacacacgtgaggattttcaaaccctcttgtgtaattgctttgtgtcagagcctttcatctcctccccagatttttatcaatcgggtcatgccacaaagctggaaggggtttttaaggaatcgcttg

SEQ ID NO: 8750 - DNA, 645 bp, Canis familiaris
cagcaatgtgggagccgggaggcataatctgggccacagagggatgaactgccccactctaggggtggcccggcagaccccccgcaaccggtggcaggttcaagaagccagaactctgtacgggacatcatctatggcaagtacttctgcttgaatggtctccagccaagggggatggggcgtgcgtcctcctgcgagcgctggagcccctgggggggcctggagaccatgcggcagctccgcagcaccctccgcaagggcaccacgggccgagccctcaaggaccgcgagctgtgcagtggcccctccaagctgtgccaggccctggccatcgacaagagctttgaccagcgggacctggccaaggaccgagcggtgtggctggagcgcagcccgccggggcccagcgagccagccgtggtggcagcagccagagtgggcatcggccacgcaggagagtgggcccagaagcccctgcgcttttacctacggggcagcccctgggtcagcgtggtagacagagccgcggagcagaacgcacaggcctgagcgacagcctccttcaaccaggctttttaattttttaacaaccaaataaacactttatgtttagaacacggaaaaaaaaaaaaaaaaaaaaaaaaa

SEQ ID NO: 8751 - DNA, 661 bp, Canis familiaris
  misc_feature (1)..(1): n comprises a, c, g, or t, or includes no nucleotide
  misc_feature (387)..(387): n comprises a, c, g, or t, or includes no nucleotide
nctacgatacggaatagttctttttatcgtatcagaagtatttttctttgcaggcttcttctgagccttttaccactccagcctagcccctactcctgaacttgggggttgctgacctcctaccggcattattcctcttaaccccttagaagtgcctttatctcaacaccctcagtcgctcctagcctccgcgagtattctattaacttgagcccactcatagatttaaatagaagggtaatctgccagacactataccttcaagcccttaattcacttacacatctcccttaggcggtataattttaacgctatttaacacggcctccgagatactatgagacactcttttacacactctccgaatggggtataccggagtctacncttttttataagccacctggagtttcacggagttacaccgtaattacttggcgtctacacttcctcatctgtgtgcttcctccgacactgctatacgtaccaccttcacactcacaaccacccaccttcggatttgaagccgctgcatgatattgacactttgttgatgtagtctggctattcttgtatgtatctatttattgatgaggatcctaaaaaaaaaaaaaaaaaaaaaaaaaaaaaaaaaaaaaaaaaaaaaaaaaaaaaaaaaaaa

SEQ ID NO: 8752 - DNA, 649 bp, Canis familiaris
cgactcgctcattggtggaaatgcctccgcggaaggcccggaggtcgaaggtacccgaaagcacagtaatcaccggtgttgatattgtcatgaaccatcacttgcaggaaaccagcttcaccaaagaagcctacacagaagtacatccaagattacactgaaatcaagtccaaaggccaaacttgaagaacacgaggccacgaaagagtaaagcccctgttatggaaacggggctgcagaaccaatcaagcacatccttgctaatttcaaaaactaccagttctttattggtgaaaacaatgaatccagatgggcatggttgcactcctggactaccgtgaggacggtgtgaccccttatatgattttctttaaggatggtttagaaatggaaaaatgttaacgaacttggctgttaactttggatgtatcacctgttgtcctaactggctgctgctcttcatccacacaacaccaggacttagaccaatgggactgatgtcatcttgagctctttattttgaccttgatttatttggagcggaggcattgtttttaagaaaaaaacatgtcatgtaggttgtctaaaaataaaatgcatttaaactcatttgaaaaaaaaaaaaaaaaaaaaaaaaaaaaaaaaaaaa

SEQ ID NO: 8753 - DNA, 660 bp, Canis familiaris
cgctatggacttgagactttaaatcagcctatagttttttaaaagtagatgtattttcccaaactgtgttgttaaaaaacccattttgtcagcagcccaggtggctcagtggtttacaacctgtcttcagcccagggcgtgattctggagacccgggatcgagtcccacatcgggcttcctgcatggagcctgcttttccctctttctgtgtctctgcccccccttctctgtttctctcatgaataaataaaatctttaaaacaattttttttggtaattttttcattcttttacctgttcccaaatcccttagcaaaaggcatatgttggctgcctaaagcaaaaataaagatagctctttcacaaactaaaattttttcaataattaatagaataaaaagaacaagtggagtgtggtaatttttctaaaggccaggtccatcagttttagcctgtaattctcattgtatgatactaagtatttaaagtacatagtattatttttatttcagttctaagtggactccattaatatgaacaaatgagctcaaaatttctttccctaccgtttagagcatgcttcaaagagtaaaactataaaccggtctggttcagattttgttaacatgctttatgcagaaccttttaaaaaaaaaaaa

SEQ ID NO: 8754 - DNA, 454 bp, Canis familiaris
ttgcatttcacgccatcaaaatggtactttcttcccaaatccaaataaatctgatcagagcctggggtggtggcggggagtctacagctgaatgcagtctatttttaaagtaaaaatattttttaaatgagtttcctttttgaaaaaaaatccgtgtattggtccaaaaatgctgttgtttaaaattactggaccaattaagtttgccttgaagaatggccaccgggtttcaaagtaataatctcatatttaattctgtaaagctctcagtcccttgttctcattttcctttttcatataagtttaattaattatgcacatttaatttatctttcttcctgttttttctaatgctaatgttatttcttataactcagtaagatacggagtaaaataatgcttttggaagaatgtttaatagaaaattaaaatagcttttcctgaaaaaaaaaaa

SEQ ID NO: 8755 - DNA, 432 bp, Canis familiaris
  misc_feature (126)..(126): n comprises a, c, g, or t, or includes no nucleotide
  misc_feature (171)..(171): n comprises a, c, g, or t, or includes no nucleotide
tcccccttttcgggggccccccctttttcccaacaaagggggtgggtgggtggtggggtgggccccaaaaatttgtggccccacaaggaaattccttttcgtgaagaccttgaccggggggtttanaaggaaccatcagccttggaggtggagcccagtgaaccccaaaanccccccaaattcgagaatgtcaaagggaagatccaaagggaaaacaaaaagagggcatcccccctgaccagcacgagggttgatctttgctggcaaaacagctggaagatgggcgcaacccctgtccgactacaacatccagaaggagtccactctgcacttggtcctggccgccttgaggggaggtgtctaatttcccccccttaagctgttgacaaattcattgcacttttctttcaataaagttgttgcattcccaaa

SEQ ID NO: 8756 - DNA, 162 bp, Canis familiaris
aggattgaagaaagtcgtgcatgagacacctgctgctagcaagactgtttttttctttttcagctcccctggcaataataatggcacttcaatagaagatggacaaataccagaaataatattttatacataatttagcattctcatacatcttggctaaat

SEQ ID NO: 8757 - DNA, 216 bp, Canis familiaris
aagccctcaaggaaccaccaagagacagaaaagaaagcagaaaaacattaagcacagtggaatatcactttgatgagatgtcaatattgcccggacagatgcgacaccgatcttagccgagacttctggacttaggatcctggactgcccgttgtgggtcatgttatgcctcacctatctataaacatatatgtgcgtggaatgcccagcgagtta

SEQ ID NO: 8758 - DNA, 236 bp, Canis familiaris
ctgaagttgtgctcagagatgttcagtcagtctgctcccttaaaaaaaatcaaagatatgccttcacctcagtgagagcacgtctctaagccaaggctctattccagttgtcctgaaccaggtgggcgactgtttcaggggttttctcttttgccccatctccacctaataaagtttctgagagcatgccaaaaaaaaaaaaaaaaaaaaaaaaaaaaaaaaaaaaaaaaaaaaaa

SEQ ID NO: 8759 - DNA, 309 bp, Canis familiaris
ggagtgacgctgtcccttggtcagcagagctcggacaagtctctatctaatggtgaatcgccggtgggggccaccctctgctgtcctggcccgctcggctggtgctccatcatgctcagtgccttttccacggcccctgacccccggtgtgtgtaccagggctggggtcccgggagggcaaagtccacgccttgggcttggggatgcggtggtccaggcgtgggggtccagccctgctggggtgggagtgggacagggctggtggccaaactaaatcacccggtgaggaatgcagaaaaaaaaaaaaaa

SEQ ID NO: 8760 - DNA, 632 bp, Canis familiaris
  misc_feature (188)..(188): n comprises a, c, g, or t, or includes no nucleotide
gctttcttttttatatactccgtcccccacagtgctctgcaggtccggccagccagctgtgaaccgctggcccagagctgttgctaaggcttggggcttacatgccattcctgggggctgctgaaatcagataagatgtattgcttcccactgctggagaggtgcccccttcctgtggggtggggatnggggagtccccgacctcctgcaagagcacagctcagcatggtccctgcttcccacccctctgagcctttccctcctgagggcatagctctggctgaccctctaggattggcctctgctgggctagtgccctgggggagaccccgctgttgtgattcagctctagagatcattgtatgataatttaaaattatatagatattatttaaatcaaacccagtgggggttaaatttcaaagttcgtctgggggaggggagagagaaagagattgagagagcgctgtgacgcgttagcaggcctcagagctggtccttcctgcccatcccctctccatgcactagaatggaacacggaatggagcagcagatgctccagatatacagcccgctatgacctgaagggatgcttggaaggttaggccatgcagagagtggagatttaaaaa

SEQ ID NO: 8761 - DNA, 510 bp, Canis familiaris
ttaatatatatatatattttttagcagtgacattccctgagagctcccggggccctcagactcccctcggccgggtgggggcctggcctccccgggggtgccccctggcgggctctcccctgtgcttactaatacatccccttccttaaacccacccgtactggacccactggcctctcttctcctgggacccaaatctgggggcctcgccaccccccacccctatacctctcctctttccctttggcttctttttgccctgagccctgccctcgatccgttgcttgcccggggctcggggacgctgcctcctggccttccctccacgaggatgcctcacccctagctgtggctgcagggacttaatttatagggagaggcctgtggcggcggccaccccagccacagctgggccgcgcttaccgccacgggccggggcttgaaaaacctgagtctgctgattgaaataaatgtctctgtcttttaaaaaaaaaaaaaaaaaaaaaaaaa

SEQ ID NO: 8762 - DNA, 504 bp, Canis familiaris
ggatgttgtattataaccatgccaacagtgtctttggactgatatgttatatactacagttattacttggcatgacagcaagtgcagttgcagctttaatcctcatgacatcctccatcgtgtccgtggtaggctccttgtatctggcctacattctgtactttgtgctgaaggagttttgcatcatatgcgtcatcacatacgtgctgaacttcattcttcttatcatcaactataaacgactagtttacttgaacgaggcctggaaacggcagctgcagcccaagcaggactaacaaacggatgaactctggacagtcggaagtcccctttgccattaagtttattttgcagcagtttttttgttttgttttgtgttgttttgattcttcacaacagacactttccccaagaatcttaaactgattttttaaaatcctgtaaattagaaggggccctagctattttctgtgtcaatctttcattttcaatatggatacaaaa

SEQ ID NO: 8763 - DNA, 123 bp, Canis familiaris
gatttctttgaatcctgtcccttgattaagcaagtgacttggaacgggagtggggtgcagcctgggtcctttttcttgactaataaatattctgattgaaaaaaaaaaaaaaaaaaaaaaaaa

SEQ ID NO: 8764 - DNA, 513 bp, Canis familiaris
atttgctttctgagagctcagcccgttcttctgcgcgttccaggtcgctctcaatgatgaccagcttacgggccacctcttcatacttgcggtcggcatcttcagcaatgtgcttggcctctttcagttggatctcctgaatttccattttctcctcatccttttgggctcggctttcaatgactttcatgcctctctcgctctcgtccgctgccttctcagcctcctccagcttctgcaaagctgttgccagtcgctcctgggcacgatccaactcttcctcaaccagctggatgcgtctgttcagagaagctacatcggcttcagcggtctccctcagcttcctctcgtagtccagctcgcgctgcaggctgcccgcgcgctcctccgccgcgtccgcctgctcctgcaggctccggatcttccgccgcaccgcctccagcgagctgctcccggccatggctcggggcggcggcgggctgcgcgggcagaggccggtgctgcgctcccgcc

SEQ ID NO: 8765 - DNA, 607 bp, Canis familiaris
ctggcaccagatataggatttaagcataattttgggtgatggtatctttaaactcaccccatcttcaggtagactaccattgtgtcaagtatcatattagaggggagagaggattttttagtatcacactctctaatatagtcttaactgactggctgtaggattgaaggcatattctccccgtactgattaaaaggactctcttggaatttgtgaggccccgagaagaatacatatctgttagaattataatttgggaaaatgtgtgttattgatggttgctatatttgcagacttggttgcttataattcccatcccttactttaggataatatgattctaagaatgttccccactttgagtggtaaaacctaagtagatgactttatattcttgattataagaattccatagatattggacacacttaagatatagtgtaaataatcccaactgatgtagatcactgtgattgtccttttttttgtttggggaaatatactagagcttaatgggaagacccaccataaatcgttcacatacttctttcttataaaaaaaaaaaaaaaaaaaaaaaaaaaaaaaaaaaaaaaaaaaaaaaaaaaa

SEQ ID NO: 8766 - DNA, 462 bp, Canis familiaris
ttctcctctttttttattcccctgtgatgaatctgattagaaacatttcagcagccaagcatctattcccacaactgccccaaattctgtgaatgtggagtttgtgattgtaggtaagagaggtgtgctgacattaggatcctactggctgtgtggtttcagatgagttgtccaatctcgagaactgcttttccctcatgacacttaatgccagcttataattaaacagttaccatgaaagcatgtctgatcaatgtgagattctgtgagccttttgaaggcaaggactatacatagtcttttttagaatgtgcaacatgatttgacatatgtacacattgtgaaataattaccacaatcaagttaattaacacatctattaccttacagagttagcatgttttttttttgtgtgtagtgaaaatacttaagacctgttctcaaaaaaaaaaaaaaaaaaaa

SEQ ID NO: 8767 - DNA, 486 bp, Canis familiaris
ccatcttaataaggcagtataatttttttaaaattccactaccattaaaactcacttctgagtctgaatctacccaaaattgtaagagttggctataggattctagaagttggggtgggggataaaaaagagggatatgattactgagagggagactatctgttgtaatgagtagaaaagagtatgttacaattgtcaacaggaagaaccgccaattaatgtaaattatctggttcaaagatcaacagtaatggattcttttgactgaatatctgactggcaaacttcctgcaagcttccagtaactgacccttgtccccaagctgtgctcttgaaattaaatagacatcttccatcttctaatgatcctttgatgttcctttggagacagaacataatccaatagacctcccccagagttatcatgtgatacaaaatatttccccgtttggttaattttattaaaaaaaaaaaaaaaaaaaaaaa

SEQ ID NO: 8768 - DNA, 446 bp, Canis familiaris
agccattagccgtgggctgtcttcgttatcattgtaacttgtgtgtaaagatgcctggaagcgtatttaatacccaaatgcatctgaaaccatcaagcagtgctttcatttcagatctgtccgtcgatcgtattaaaattcaaattggactgtaacagtagtagtggcctaggactgtaccgggtgtgacgagctttggacgctgcacagtctcctcgccgccctttcctgacggagccagcgctggactcaatgctcctgctgtgctgctgcccatggggccgcaaccttcactgcgctggaagtgaggcgtgtgtgtgcccagtcacgtaagggaagctgtgattgtgtgctacattttgtacttttttatttgaattaaattatgtttttttttaattaaaagtcacctttattaataaagagagtgatttcagtaaaaaaaa

SEQ ID NO: 8769 - DNA, 509 bp, Canis familiaris
tgtttagcagatgctttactattaaattatccgccacccccccccccccaagtctcaaatcttgaagaatctcaaaccagggacaccagccccggcgacgacgaccctgggcgactgcaaagcgcaggcaacctcgattccccgaattggtggagtggccggcatcggtgtcccctggtttcactggcctgtttgaaggtgcagatcattctccgggaagtacagctgaaaccagtcctcctctgccctctgggggccttcattttcccagcctacatctgcttgtgactccagaaagacagacttcagattggccaaggcccagtttaaatgccgcctcctccaggaagcctgtccagcctcctggagccccggcccgacggcgaggggccgcgcggcggcggaccgcaccactggcctcggtgccccgagccgagccgcccgctgctccgcggaggtggcggggccctcaggcctcccgggacctgggcgccggggggtgatgcggg

SEQ ID NO: 8770 - DNA, 602 bp, Canis familiaris
gtgacacggacttccagaagatctttcccatgggtgatcgctgtacataggcctggccgggctcgccacggatgtccagactgttgcccagcgtctcaagttccggctaaacctgtatgagctgaaggaaggccggcagatcaagccctacacactcatgagcatggtggccaacctcttgtatgagaaacggtttggcccctactacacagagccagtcatcgctgggttggacccaaagacctttaagcccttcatctgctctctagacctcatcggctgccccatggtgactgatgactttgtggtcagtggcacctgctccgaacaaatgtatgggatgtgcgagtccctctgggagcccaacatggacccagaacacctgtttgaaaccatctcacaagccatgctgaatgctgtggatcgggatgcggtgtcaggcatgggagtcattgtccacatcattgagaaggacaaaatcaccaccaggacactgaaggcccgcatggactaaccctctgttcccagagactactttttttttttaataaatcgtttttctttcaaaaaaaaaaaaaaaaaaaaaaaaaaaaaaaaaaaaa

SEQ ID NO: 8771 - DNA, 609 bp, Canis familiaris
tgtaaatttttccaccatcacatttgtagaaccgttaatactgagctttagggttctatatagaccttgtattactttcatccagtgtgtagactaatggcgtaatcatagggaccagaagtaatccaagttggaaaggataattgtcaaaggtgtaaataacgtaggatagaatagtgacgaatcagaatccttcctcgttctgtcacttactagttatgtaaccatggaaataattttcatagttacacgtgaggattattgcaggtaagtagagtatgtagggcagtgcttcagatgtggtaaatggctctttaatggttgttattaatggtagtaaatgattatttggaaatagatgaaaaaagtacatgaatttaattttacttacaagtttgatgggaaatttcctaaaatgaattatatttccttgactgttaatttggctgctgaaaatattttaatgatttcaggagctaatgtaaaaaaaaattacctggaacccataacttgattccaggttgagtttttttaatattaaaaattgcttttcttcccaaaaaaaaaaaaaaaaaaaaaaaaaaaaaaaaaaaaaaaaaaaaaaaaaaa

SEQ ID NO: 8772 - DNA, 179 bp, Canis familiaris
aagtcatgcattttgtggcaagggtgcgtaaccgatgctccaaggactggccatgtaattatgattgggattccgaggatgatgcagaagttgaagctatcctcaattcgggggctaggggttacattgcaccctaggaagatctggggaaacccttaagggggtttggaaacaatatc

SEQ ID NO: 8773 - DNA, 413 bp, Canis familiaris
accccgcctccctccgggtgtgaaaccccgagaggtgtgttccatccactgggacttggactggtttgctgcagcgtggggggagccgctgtctccagagccggcgctgctcatctctcctccatctctacgaaaaagttggtgacttttctgcatttaaacatgtgtttaaatttgttcttcgaccccagagttacatattttaccataacacctggttttcaaatagttcagtctcagtaaagtaccatgattaaccttcatatactttgagagatttcagtgtcagtaagtttctgtacagactattactttataaaatacccaaatggcatggtcagactagatttggtaactgttttcagctgtaagactcctaaacggaatatcatttacccagtgaatatttatag

SEQ ID NO: 8774 - DNA, 649 bp, Canis familiaris
aagtatctcatctcagtgtccttatgccacaggattataattaatgctgtggctaaaaatcacctgtgctacatatgccagtgggtgacgctggcactgctgctggagagctgtgggctcctctctctctctctctctctctctctctctctctctctctcgaggttctgggctctatgtaagcttggaggtgtggtttattggaatgttgtagacagctgccagaagtgtttcactgtgtaaataaataacaactgtcaaagagagggaagtccttagtagcaacagtcaactctgttaccctttctaactggagaagactagctgatcttgtttttttccctcattacccctcagccgccactcattcttccagcacatgtgccccaagtctggtcctgacctttcccatgtggcccttgcttggaatgaggcagcagaatggtagcagacagggaaccagctgggtgggggcgggagaggggtgagaggctccagataatcgtcaagtagtgattgagagtttgactgtaaattaattttatgccataaaagaccaatccaattctgtttgactatgtagcatcttaaaaagaaaaaaaattaaaataaagccccagaattaagaaaaaaaaaaaaaaaaaaaaaa

SEQ ID NO: 8775 - DNA, 625 bp, Canis familiaris
  misc_feature (333)..(333): n comprises a, c, g, or t, or includes no nucleotide
tgtgttcctgtccaatgccccccactgtgacgatacgttctctaaatgtcagagcgtccatacacagctcaaaccaccctcaggaaccagcctctctagagcagaggaaggaagggacacggggatcgcctgggcctctcctgccttcctgtctgtctcctcacctagacttggttggcctccctcttctctaggctctacctgctaagcccctttgtcccggtctggaccctagggttgggggacaatgtgagggagtagaggagaaagcctgtggctggttctggtttcctgccttcccagagcacgtgggggccgcgctgtatctgcacnctggtaaaggtgacccctgcaagtcgccagcagccccagcacattcctgttccacaaggataggatgaggagctccagaaactttccattcaaaggcactctctgtgatcggagcctgggttcttgttctttccctgcgcccttgtccctccctggggagtaggagtgctatgctaggacttcaacctcagacttgggtggcctgtgtttcttttgatattgagaactattttaaggtaggagggtagcaagggacatttttaataaaccacttctgagcctcaaaaaaaaa

SEQ ID NO: 8776 - DNA, 596 bp, Canis familiaris
aagagcatagcccactgatagaaaggagaccatttggaacccaagagaacaagcgtctactagaaaagtctcagagggtagaagccatcatgcatctatgcaggctacaggtgcagaggatgcacagctcccagaaatagaggagatgatcacagtccccgaacgccagcagctagaaaccctgaagcgcaacgtcaacaagttggatgccagtgagatccaggtggatgaaaccatcttcctgctggagtcctatattgagagcaccatgaagagacaatgacccagaagaagagcctttctcagaaaatctgaggagattggaaggaaaaataaaggaggtgcctaggtggctcagttggtttagcgtctgcctttggctcaggtcatgatcccggggtcctgaggttgagccctgtattgggctccctgcctggcggggcatctgcatctccctctgcccttcccccctgctcctgcgctcgccctttctctctctctctccctctctctctttctctcccccacctcaaataaaaataaaagaggtgcctgatgccaaaaaaaaaaaaaaaaaaaaaaaaaaaaaaaaaaaa

SEQ ID NO: 8777 - DNA, 464 bp, Canis familiaris
tggagatacaagataatgcttagtatagttttgccatcttaacatttctgtaaagtgcttctcaaatttaatgactactgtgtcactattttgtatatgaattgtattaattttaataaattatgtaattatacatactgtaaaataaagatctttatcttcagctttaggtttttttcctgccaatgctgttatccgtgagtacagtattttgtttctgcttaagtgtatttatttgtatgtttccttaacagtaaactattgacttaaagtttaagtcctgtgttctacttgattttcccatgtgcttctttcatgtcatataataatggttactgtaaattgacctgtatcaatgagaatgtaaaatgataaacctatccatatatgaattaaaagattcaccagaataaatggctgttgaaatttgaaaaaaaaaaaaaaaaaaaaaaaaaaaaaaaggg

SEQ ID NO: 8778 - DNA, 510 bp, Canis familiaris
aagttccggctccaatccccttcccaatgttaatccggtaatccaccaagaatgttggtccctggtgctgtggaagctgaaccaggctgtccaagaacaagggtaattgcggaggttgcccttttggggaaagcccccagggggccaccagtaagccaaggggtccacattggccaagtcatcaatgtccatccgtaccaagctgcagaacaaggagcatgtgattgaggccctacgcagggccaagttcaagttccctggccgccagaagatccacatctccaagaagtggggctttactaagtttaatgcggacgaatttgaagatatggtggccgaaaagcggctcatcccagatggctgtggggtcaaatacatccctaatcgtggccccttggacaaatggagggctctccactcatgagaaccttgcaccacccgaaccctattcatgcccacccaataaatcctgcttcctgtcaaaaaaaaaaaaaaaaaaaaaaaaaaaaa

SEQ ID NO: 8779 - DNA, 624 bp, Canis familiaris
tgagtccctcccgtcccaccctgtcatgctgacattgcacttgaactctgaatgttccctgacgtagtacctggtactacatgggatagcccatatgtgccccttgccctgtactgccctgctgggtgccttgctgaaggcaggtggtcagtaaactgacttggagagcccaagcttcttcatattgtcacatctctttagaacctctgctgaggcctttggaagaccatttttaagtagtacctttgtttaaaaataggattttatggtggagacaaactcaatatcctttcctttgagatatgttgctttagaacattaccaactcatcagtagaatgcttttaacagtcacttgagttccttattcataatagctcaggatgaagtaagtgcttctaaagtgcaagttttaggtcgtctggggctccatctgtcaatttagcagacatttgttgagttcctgctacatgcaaggactacaccatgagattgtgataggggcaaaagtgatggtaacccaatataggcacgaaaaagccttcctttaatgaaatcacttgtgaaaatgttcaataaattccgtgtggttgcatagaaaaaaaaaaaaaaaaaaaaaaaaaaa

SEQ ID NO: 8780 - DNA, 554 bp, Canis familiaris
ctgccctgttgggttttcctccctctccccctcatctcagctgccccgtgggatccaggctgggagtcctgaggctggaaaaggatggacaagtacccggaagtcgtgcacctcccagagggggccgcgtccagctgcatgggggtccggagcgcctgccagccagggttcgagctggtcgtcgtttggaggatgcacatggaggaagaagggaaggtttttccgaagctggatcttctccccaaagtgccacagcaagccctggagctagaccagcaccacatcctggagactgcgcccctccgcttcagaaccctgctgggtgtgctgggcatcgaagctgctctagaaagcctgataacatctctgtgcccagcagacaaccagtttccggcaaacacgcaggtgtgtgatttcattccacataaagagttaccggcttccagagaaaaaccacgcctttaggacacagtgtctgtgcagtttcggcacatgatatataagctgacgggatgtggaaaaataaacatgactatttgaaaacaaaaaaaaaa

SEQ ID NO: 8781 - DNA, 642 bp, Canis familiaris
aaggcctgcagacttgaaatatttactctctgaccttttaaggaagaacaatttgccacgttcctaatgatacgttgataaaaaggttttggaaaatatataatcctaggttaccaccaaatctgtcaatgtacatctcttaatctgatagtgtctgaatctttgcaccataagcccagtacagtaaactttccagtgaagaatcatttatacttttcagtacatattgtcatattaggtatctgcctacaaatggctcggtttgaaaaatttttttacattgaactacttaatagttaccaacatttcaccactttgtgtttatgtatccttaggactaaatgggacttttgtaaataagattatgtttaaaccataaggcacatctgctctatataaaagaatttctggaagtggaaaatagctgtaaaacttataagttgtttatttttctaatcaattttttcctatctaaatcgttccttaatagtgaacacacattacttctgaatttcagatgaaaagaaattaagaggtacagtcaactcttaaagcatattttaagatttgttttactctgattaaaagcattgataatcatgtcagtaaaaaaaaaaaaaaaaaaaaaaaaaaaaaaaaaaa

SEQ ID NO: 8782 - DNA, 676 bp, Canis familiaris
gagaaatcatgctattcaggcccatctatgccgaacctatgctggtggtaggctaggttttcgtcttctctcaagaaatggtgttcttctcctgacctgaatacgaatgcagagattcctaatcgaactgttgatcaaaagactgatcctaaccaatgctggtgttgcaccttctggaaccacgggcttaagaaaacccccaggatcactcctccctgccttttctctgcttgcatatcattgtggacacctagaatacgggacttgcctcgagaccatgccattttcccaaatcagactcggcaggtagcctctgaacgcgaagagaatcttccaagagccatgaacagttaccactgcgtgtgcttttcaaaaagcaaaagcaaaagaaaaaaccccaacagcatccgcttgcttgggctggcaagtggctatccactccgttcctgtcagagctcagagcgcctctctgtgacggccctctttgagacgtggactcaaaagcattcttcaggcactgtgagagcagggaggactcacttagaaattggccaaacaccacaccttgacacactccctcagaaagagggggagacaggggcccgagcccgaagtggggggcgtgtccccaaaagatgattgtatgaagaaaagatggaggagctgttacgtgttc

SEQ ID NO: 8783 - DNA, 564 bp, Canis familiaris
tagctagggaggttggatttggctaattttatttagttctatcatattttgaattaaagctggcctaagctgacattttgttgttaagaatatagtgattggttcccataggaagatggctgcagccccattccaaatagtcccctttattctcctgaaaatcatacatagaaccagaagaatgaaacaacattttcagccaaactagcagaagggaaaaaccttaaactctaaattttgtgtgtggtccaaaatgtccagcccccatagaacggaagcataaagctaccatcgtgtggcagaggaaaagtggaatgtggcagacatcccagaattacagccccagaaatcatcagcaagtactcacccttagaggagaggactccactcagttggaacacaacatgggctggtgaaactaaaataggagagggcatgtctgccgggggaggtggagagaggagtcatgccaagtgcatggaagtgacagatataagaaaacctaggaaaaaaaaagagagagagagagagagaaaaaaaaaaaaaaaaaaaaaaaaaaaaaaa

SEQ ID NO: 8784 - DNA, 646 bp, Canis familiaris
gaacccgtccgtaagcctaccagagccggagtgaaaagaaggcacgaaaggctatgtccaaactgggtcttcgacaggttacacggggttaccagagtcactatccggaaatctaagaatatcccgtttgtcatcaccaaaccccgatgtttacccagagccccgcttcagatacctacatagtttttggggaagcccagattgaggacttatctcagcacagcaccactagcagctgctgagaaattccaagtttcaaggtgaagctgtctccaacacttcacagagaaacacacccgactcccagctgtaccagaggagagtgaagaagaagaggttgatgaaaccgggtgtagaggttaaggacactagaattggtcatgtcaccagcacaatgtgtcaagagccaaggcacgttcgagccctgaagaaccacacgtaatgatattgtaaatgctattatggaattaacacatgtaacccgtatgaaaacgaggactttttttggtgtttccaaagaataactgcagcttggtttgaaatttgtactgtttctatcattaataaagttatggcttcttgttggatgaaaaaaaaaaaaaaaaaaaaaaaaaaaaaaaaaaaaaaaaaaaaaaaaaaaaaaaaa

SEQ ID NO: 8785 - DNA, 494 bp, Canis familiaris
aaagcaaagatagctttacgattattctgttgttatagataggaggacatatttgtgttgcgatttcttctagcccttattccagcccttttttgagtgttcataaatatattatttgatggtacacattttaaccagaagatgaataacccccgaagaagacggtgaaagaagcgtttgttaagaagccatacagctaagttggcatgttaataaataatgtcccatagaaaatatactcctaaaaaagtgaatattttaaattatgttcttataagctaaagttgcctattgctgtatgcatgaatgacacaaggggctgaagctgagagtagtattttcgtattattatttatagttcttttatattttgaatgaacttttccttagctaaaatacttatcttggaaggtttgaacagttggaattcactttgtttgtttgatattttaaatagaaataaatgtattctaaatgaaaaaaaaaaaaaaaaa

SEQ ID NO: 8786 - DNA, 677 bp, Canis familiaris
ccgagggaaatctggtaaactgggctggagggtttctgcctccggagccccaaagagattagggtagtcctaagcctggatggggggtacgggtctgcagaggggccagcaggcttgattcaggggtaaaaagaggggtcttacatgggaaggtgcatccgtggcccggggactggggacccccgtgacagctggaaggagaagagagaggcatagggcgcgtggagggacggaggagggcggtggcgcggcgtgccccagcctgggcccctcgccctcccccaggtgtccacacacgccgtgggcccaccttcccccgcgttgccctcgggaaaggagacgcatgagggactcgcctgcatctgcccccgcctgcagcagctccatccgctcctgcagctgctggacgcgcgcctccaggtcctggttccgggcctcggcctcccggagctgactgtggggaggtaaaggccgtgagcactccggaccagagcgggacaggctgctggcggtagagaccagcccggcgccccgaccctgaccccgacctggcaaagttttggttagctgtgcggatggcctccagctcctggctcaggctctgccgtgtgagcacctcctcctccagggcctcctggagctcccgcagcgtcacctgggtcacctgggtcacctgg

SEQ ID NO: 8787 - DNA, 518 bp, Canis familiaris
atgaagatgggcatcacaagtgaatgcgagatatgaggaacccaggtaccatttctactcgatctgccaatgaataggcccagaaagatgtaagagactctttgatgaatggacataaaaattctacttgttaagaacacagtgtggctctggtaactgaccttcatagctaaagtttaaaaatacttgggaagtaaagacatcttgtggtgatagtacacccatatgcctgtgatgttcagcttctgtgaatgttgatataattgtaagtaatgtccaactctattttctaacacagtattaattataagggaattctgtctaccatagcactgtcttgctaatttctgtttacatttttacttctttctggagtacatatgctgaattgttccttatgattagttatattttaccaaagccagcacacagccacaacaacacttgagcacaggacccttggtctatatttttaattaaagtatcaactaagaaaaaaaaaaaaaaaaaaaaaaaaa

SEQ ID NO: 8788 - DNA, 656 bp, Canis familiaris
ggagtattgggcagaattgtagccacacttattgtaaaagtcaagtaccactttattaccccattggttttgtagataatttgtatcagacacccatgacttttcctgaaatccagcctggtaacatctgaagtttatataatattccgtaagggcttttaccttactggttttatggagcttttgattgttttataattatataaattagtaaccatgtacacaaagtgtatttgatattaaaagtttaatattgataatgttgttgataccctttccttaagtttcagctaagtcgtaggtcagactctgttgaaatgctgatgtcaacttcatttgaagaaaattgttggaattcccaagtcagagaagtttgtttttttttttccacttaacagttattaataacctgcaaaattagtctattacatggcagtggttcccagacctttggatttcatggacccgtagtaacatttccgaaaatttgagggacagggttgccgatgtattttgccaagtaatctgaaagaaacccctgtattaacactttttttttcttcttcataaaaggagtctcaggatgagagtcctttcagtggaataaacacagcttttttgggaaaaaaaaaaaaaaaaaaaaaaaaaaaaaaaaa

SEQ ID NO: 8789 - DNA, 633 bp, Canis familiaris
  misc_feature (80)..(80): n comprises a, c, g, or t, or includes no nucleotide
gccctacccccccctaggtcgctgcctcacgagcccattaacctcacccacacctcagcagcagactcctgtcaggagcnttccctgcggccctcagacaagatcagagcctccccttaggctcttagcaccgtgtattttgccgcctgggatggggaggggggaaatgaacatgcctttatttcccatgcacatttggaaccagttgggacattggcagagcagtcggggagatgggcacccgggcttggtaactgatggagccacgttggagggctgggattggccctgaggccacaaaggcttgttctcctcttcctacctggccacacacacggctccagacacaagcctctgccatggggacaaccccgaaacatggcaagatcagaggagcagcgagacccagatctggggcggggctgctggaatctgtacatttgggggagaagagcatgaaaagcaaatgaaactacaggggggatgagagtgaatattcagaatgaggaaggagatgaggatgagtgatacattttttaaaagcctgatgaattccaccaaaatcaccaatccgaaagtaaaataattttgtaaatccaaaaaaaaaaaaaaaaaaaaaaaaaaaaaaaaaaa

SEQ ID NO: 8790 - DNA, 604 bp, Canis familiaris
tagtgaaccgtcagatcgcctggagacgccatccacgctgttttgacctccatagaagacaccgggaccgatccagcctccggactctagcctaggccgcgggacggataaccatttcacaccggagaacagctatgacccttaggcctatttaggtgacactatagaacacagtttgtaccaaaaagcaggctggtaccggtccggaattcccgggatgtggggagccttcgggaagaggcttcctaagccactctggtcccttagggcactggctctgagcgtgctggcagcttgggccctccctctctcccgccctgtccccactcttcccggggcttcctcccggagaccacagagcctgctgcatttgcctgcccgctgccctgcttggcgcctaccccggtgacccaccccctgcaccccagtcatttcatccccgctgactgtgtggcctggggattggagtggggctctcatggtgacatgtttacagctgggtgtgactccagtaaagtggatttttttcccttaaaaaaaaaaaaaaaaaaaaaaaaaaaaaaaaaaaaaaaaaaaaaaaaaaaaaaaaaaaaaaaaaaaaaaa

SEQ ID NO: 8791 - DNA, 480 bp, Canis familiaris
ttttcctgttttgcactactgtcttttctggttacagtggccctgtgcttatagttattttccatctcctccttgctcttgaaacttcgtcgattccattgtgatgaagcgcacaaaccgcactgtctgtcggtaaccggtatctacgagattaatgattttctgttacactgtatagttgtcctgtggcacccctataccccagccctttcacgccctccccgcccccaccccagtatgtgggagctggcaccgtgccagcttgtgcaaagcttgccactcagccagtgaaaataataatgttattctgagaaagtggacttatccgaaatggaacctactgacattctatccgtggtgtacatagaatgatgaagggttccactgttgtcatatgtcttaaatttatttaaaactttttttaatccagatgtagactatattctaaaataaaaaaagcagatgtgttaacgaatttat

SEQ ID NO: 8792 - DNA, 547 bp, Canis familiaris
tcctctcggtgtacttcataattacacttgtctgatttagaatgtgattacattaatgctagatcatgttgctccaaattaaacacagtgggtgatcccagaattgatcggccacaccgtcatcaccgtactcatgctcgtctcactgcactggttcatcttcctcctcaacttgcctgctgccacctggaatatatatcggttcattatggtgccgagtgggaacatgggagtgtttgatcccacagagatccacaaccgggggcagctgaagtcacacatgaaggaagccatgatcaagctcggcttccacctgctgtgtttcttcatgtatctttatagcatgattttagccttgataaacgactgaagctgaggagccgcggtccgagtccgccagcaccatgaagtgcagcccaggagccagaggcgccggagatcatccttagaaccgtgaccatagcagtatattttttcctctttgaacaaaagaaaaatatttttgctgtatttttaccatataaagtatttaaaaaaacacaaaaaa

SEQ ID NO: 8793 - DNA, 648 bp, Canis familiaris
  misc_feature (28)..(28): n comprises a, c, g, or t, or includes no nucleotide
tcctcttttccaggggacggtttatccncatttactttgagaaaatcgaggcttaaatgaattatctgggccaagcccgtctggctggtgagaggcagggcgagggtcagtctcctgtcctgtggcgctccccctacagaggtgccacctccacctccacgtgaagaactctgaggatctgttctccccatttttcttatgtcatgtcttcatgtctttttagactgccagtatttgaggcaggaaccaacgattccccactgaatacaaggaagacaaatagaggagatgccagctaactaactggaacgggtccttaactggatttcttttttctcccctccattttagaataaacaagaaaatgataaggagaaaagcttgctagcagagatttattttcagaaccagattttaagttgtgtcttgggatcactttgataaagcctagtctttaccagggtgcctggtggctcagccggttaggcattcaccttcagctcaggtcatgatcctgggttcctgagatcaagtcccatattgggctctgctcagcagggagcctgtttccccctctccctcttgctgcacccccctcactcatgcatgttctctcccattctctgaaataaaatcttaaaaaaaaaa

SEQ ID NO: 8794 - DNA, 618 bp, Canis familiaris
  misc_feature (186)..(186): n comprises a, c, g, or t, or includes no nucleotide
acacatgaaggagaaggagaaatctgactgaaggggcagagccagggctcctgacgacaggcacttgggagttctgcgggcctgcgtcttcctcacagcgggctttgttctgttgttaaagctgtgggaccgtggcacagccttacctcaggggagatgcggcactgagtaccgagggagggggtnggggatgaattttctgtgagtttttccacctaatgctaagtggtatttttcataatgtggtcactctcatttctaagataaacattgccctccaactccatctggcccatgtgctttcctgtggcgggggtgctgttcaccacagtaagtggcctctcagtgttgctgaccacaagtgtgaaatcctagagcttcaggggagaggacgtgggggaaatccggggcttgactttataataggattatagagatgaaaagtacaccttgctttaggcaacagttgggattcctaagacgcatgtgtaagagcatatgtgaaatcccttccccattgttgatctctactcacagaattttgtctttattatggtgtaagaatcactcttaaagccacatattcaattcaaaaaaaaaaaaaaaaaaaaaaaaaaa

SEQ ID NO: 8795 - DNA, 479 bp, Canis familiaris
atagttccaatggccctgagggggatttttagactcacaggtgaagatcttcctctacaacgtgactttggaaaagattatcttatctgtctctgtagttccagaatattcatgtcaccaccaggtttttttaggatagatgaaggttttgagggtgtgtctggagctagagggcaccagttcctcgcagatgcctatctgttgaaggctcctctctcctccccttgatttgctgatgcctaacttggaaaaagactacacgagggtcagttttttgcttgcgaacaccccggagaaaaggctcattgggtttctgcacccacggaggttttggtgcatccactatactgccttaaactcaccatctttatttctaagcatgttatcacacccagagtctcttagaagaatctgaatttcctaaaaaaaaaaaaaaaaaaaaaaaaaaaaaaaaaaaaaaaaaaaaaaaaaaaaaaaaa

SEQ ID NO: 8796 - DNA, 549 bp, Canis familiaris
atgcctggaactactcaattcttgtacactaaggtgctatttacctacactgtccccactgattcctgccagctctgcctccttgtcaactctagactcccgagccatcttcccagaccctgcttcaacatttcttgctttagaggtaactttaggccgacagacccaagagctccttttctggcctgtggatggaaacgaagctgtgaatctgcacattgtggtgtggcatctagtctgcaaacaggtccccgcctttctaaaagcagcctcacagtctcatgcttcatctctcttttttgatgttcactttaaaaaccaaacacccagagctggactgttgagcaggcctgtctctcctattaagtaaaaataaatagtcgtacgtttgtaagctattgtgacagaaaagacaagggttactaattgtatgatagtgtttttatatggaagaatgtacagctttatggacaaatgtatgctgtttttgttactttaataaaaatgtagcagatgaagccgagtggtaatagagaaggtcacaaaaaa

SEQ ID NO: 8797 - DNA, 610 bp, Canis familiaris
  misc_feature (186)..(186): n comprises a, c, g, or t, or includes no nucleotide
gaaggacccatctcttagaaccacactgactcttctgtcaaggagccttgacacctgccaccaggggcccctgtcctcgtgccccctgagactaccacgggtcccctgattgacgcagagcctctggtggccaaccagcaacagcaggctctaccaatccgtcagacaaacccccacttgcagccntgtcaccctcaatttcctgcctgcctgcctctttcctgatggacctgatcaattcaggacagcttttattgcttttggcaaaaaactgccattaagatttacagaggccaaagctgggacaatgtaatcttcagagtaatttacacagtgagtttcaaaagatgaaaagttagcatttcagaggtaatttcataaagaggattatcagattaatcactgtgtcgacttaatagtggtgtctcaaataattaatgagcattcttggagtcagcaatgcaaaaacggactctaagaggaataaaaatggctgtgtcagacagtaagtgggttttgggcaatagatcttgagagaattctccttggaactacccccgtggagtgtctggcgtgggttgtgtggctcagagacataagaaaaggagaa

SEQ ID NO: 8798 - DNA, 638 bp, Canis familiaris
  misc_feature (96)..(96): n comprises a, c, g, or t, or includes no nucleotide
tgggctttgaaacctgatgaaccctattagctgtttctctgtggccatatgcttcccatgttacccagataccatctcaccaccccactctaaccnaagagaaatccagcctcctgagtttcttgtgtaccgggttaaaatatagtctcccggacaagtatttttctacattaagatctgggccaagataccttgggttgtggactcgggcccctatgatgggatgacatctctggccgggcctgagtggtggtgcccgggcacatctgaggttgtcactgttctgtctcctgttgctctggaatcctgtgtattggtctgtggcttcacccattagctgtttgtaagcagtgtatctgtatcctaagggggaggaccacttgtcaacagccgatggttggtggggaagctccttagacacctgcagttttgatgaggtgactttggagacgtgaagaggctgtgatgacactgacttgtcatggtcgcagcatttgaacttctggtataaaaaagaaatctgtaaatctataacctggcaacattttgcaatcctatattttaaggacagctctctaataaaatctagaaccacaccaaaaaaaaaaaaaaaaaaaaaaaaaaaaaaaaaaaaaaaa

SEQ ID NO: 8799 - DNA, 590 bp, Canis familiaris
ttcctgctaccgacccaggagactggagagagaagtcgcaaatctgtttcggggttgtcattgttggatgccaaatctcagtgttctcaatttggttattgtgaaaaaaggggagtaaggatattcctggactcacggatactactgtgcctcgtcgcctggggccccaaagagcccagccagtatccggtaagcctttttaatctgtcggaaggaagcgaagtccccccagtaaggtttgttaagaaggccccctaaccaaaggaagggtaagaaacctagaaccaaagcacccagagattcagcgtcttgttactccacgtgtcctccaacacaaacgtcggcgtattgctttgaagaaacagcgtactaagaaaaataaggaagaggctgcagaatatgctaaacttttggccaagagaatgaaggaggccataagaaaaacgccaggaacagattgccaagagacggaggctgtcctctctgagagcttctacctctaagtctgagtccagtcaaaaatgagattttctaagagtgacaaaataaataagatcagacacccaaaaaaaaaaaaaaaaaaaaaaaaa

SEQ ID NO: 8800 - DNA, 606 bp, Canis familiaris
attcaagctgatgaatttcatgagattaatttggaaaccagatgtctgtctattcatcttaaatgaggtctgcatttcctgtaatcagacctcatgaatctcctgtccagaacactgccttattttagtcaagggacctggcaaggtagtaattaggattataagtaaattaggaatcccaagattccttggtgggccatggaatcagaaaaaagctgaatagctgtagtagtttgtgaagtctgtgatcatgtttgggtcacagatgaaccatatgatgaaaaatttgatcctttcctaaggaaaatacacttgctatatcatttttgcagacagtggcaggggaaggtggagcatactggctgaccctgggcttacttcactcaggctaagccatgtcttggtcaacaatttctattctgcttaaagactatttagggacgcctgggtggctcagcggtttagtgcctgctttccgcccagggcatgatcctggagtccctggattgagtcccgcgttgggctccctgtatggagcctctttctccctctacctgtgtctctgactctccctgtctctcatgaataaataaaatcctaaaaaaa

SEQ ID NO: 8801 - DNA, 595 bp, Canis familiaris
ccccgagaggcaaggggcggggacggacggtggctcgcctcgcggcggaccgcccgcccgctccccagatccaactacgagctttttaactgcagcaactgtaatatacgctattggagctggaattaccgcggctgctggcaccagacttgccctccaatggatcctcgttaaaggatttaaagtggactcattccaattacagggcctcgaaagagtcctgtattgttattcttcgtcactacctccccgggtcgggagtgggtaatttgcgcgcctgctgccttccttggatgtggtagaccgtttctcaggcgtccctctccggaatcgaaccctgattccccgtcacccgtggtcaccatggtaggcacggcgactaccatcgaaagttgatagggcagacgttcgaatgggtcgtcgccgccaccggggggcgtgcgagtcggcccgaggttatctagagtcaccaaagccgccggcgcccgccccccggccggggccggagggaggctgaccgggttggttttgatctgataaatgcacgcatcccccccgcgaggggggtcagcgcccgtcggcatgtattagctct

SEQ ID NO: 8802 - DNA, 700 bp, Canis familiaris
  misc_feature (18)..(18): n comprises a, c, g, or t, or includes no nucleotide
gcaagcacaagtgcgcanttgtgggaaaggactgctccccgaaagaagaaggtggttcatagaacagctacagcagatgataaaaacttcagttctccttaaagaagttaaggggtaaacaatatctctggtattgaagaagtgaatatgttcacaaaccaaggaacagtgatccattttgaacaaccctaaagttcaggcatcgctggcagcgaacactttcaccattacaggccatgctgagacaaagcagctgacagaaatgctacccagtatcttaaaccagcttggtgcagacagtctgactagtttaagaagactggctgaagctctgcccaaacaatccgtggatggaaaagcaccacttgctaccggagaggatgatgatgatgaagttccagatcttgtggagaattttgatgaagcttccaagaatgaagcaactgaattgagtcaacttctgaagaagataaaacttgaagaagttactgggagctgctattttatattatgactgctttttaaaattttgttcatggatctgataaaatctagatctctaatatttttaagcccaagccccttggacactgcagctcttttcagtttttgcttatacacaattcattctttgcagctaattaagctgaagaagcctgggaataaagtttgaaacaaggttaataaaaaaaaaaaaaaa

SEQ ID NO: 8803 - DNA, 570 bp, Canis familiaris
cccggcggcggctgcagcgccgcggtggagggctgcgggcgggcggcgtgaggagcggcggcggagcgcggagctgccgggagcggagggcgccgggccgccccttgtccagtcctcgcaggccgccaggccccctccagccggggccgtggagcaccggggcaaaggccggggcccccccatgaaggagcgcgacgcggccccggccgagcggggcaagccggccacctacaccggggacaagaaggcgaagatggcggccaagaccaacaagaagtgggtccggctcgccaccgtgttcgcctacgtgctctccgtgtcgctggccgccatcgtgctcgccgtctactacagcctcatctggcagccggtgggcgccgggacctcggggggagccgccggcccgccccccggcggctccaacgccaccggcccgtccgggacttcgggggcggcggccgggcccaatgccaccggctcgtcccgccgcgaggcaccgcgcgacgcgcccccgctgcaggcggcgcggcccgtggcccccgagccacctgccgacagcccctggccggg

SEQ ID NO: 8804 - DNA, 630 bp, Canis familiaris
  misc_feature (1)..(1): n comprises a, c, g, or t, or includes no nucleotide
ntgcctccgccattgccgcctaaggtcgaccccacgagatccaagtcgtggtacctgaggtgcacccggtggcgaggtcggtgccacgtctgccctggccccgaagatcggcccgctgggtctgtctcccaaaaaggttggtgatgacatcgcccaggcaaccggtgattggaagggtctaaggattaccagtgaaactgacccattcagaaccagacaggccccagattgaagtggtaccttctgcctctgccctgattatccaaagccctcaaggaaccccccagagaccagaaagaagccagaaaaaccattaagccccagtggaaatatcacttttgatgagattgtcaatattgcccgacagatgcgacaccgatctttagccacgagaactttctggagaccacttaaagagatcctggggactgccccgtctgtgggctgcaatgttgatggccgtcaccctcatgacatcatagatgacatccatagtggtgcagtggaatgcccagcgagttaactaccaaggaaaatatttcccataaaggatcatttgaccaacccaaaaaaaaaaaaaaaaaaaaaaaaaaaaaaaaaaaaaaaaaaaaaaaaaaaaaaaaaaaaaaa

SEQ ID NO: 8805 - DNA, 501 bp, Canis familiaris
  misc_feature (1)..(1): n comprises a, c, g, or t, or includes no nucleotide
  misc_feature (34)..(34): n comprises a, c, g, or t, or includes no nucleotide
  misc_feature (53)..(53): n comprises a, c, g, or t, or includes no nucleotide
  misc_feature (60)..(60): n comprises a, c, g, or t, or includes no nucleotide
naccctgaagtgcttgacatcacacgaggaaacntctgcatttctcgcttccntggaggngtgtcccgcaacgcttgccacgcgtaatgtcttgcacgattaggttaacccgacctgttgcatccagtggccccattctatcatccaatggatacacagcgggttcctggctttgttctgtggaaactgagttacaccctttccaccttgctgaaaaaggtcaagcgccttctttggctgatccatcttgcactttgtggctgctgctcctgtggctgctgccaccactgctgcacctgctgctgccgcagccccagccaaggttgaagccaaggaagagtcggaggaatcggacgaggatatgggatttggtctctttgactaatcacccaaaagcaacccattcagcccagtttatttgtgaaacaaggaaataaaggcttacttctcttaaaaaaaaaaaaaaaaaaaaaaaaaaaaaaaaaaaaaaaaaaaaaaaaa

SEQ ID NO: 8806 - DNA, 592 bp, Canis familiaris
  misc_feature (6)..(6): n comprises a, c, g, or t, or includes no nucleotide
cttgtnccgagcaagcgattgtgcagaagggatcgatgaacctgaggttctggtctgctgtcagctcagcggcgcccactttgctcagctcctccaggaagatctcaaggaagtggctcttcactccgctgggggcctggctgtcagggtgtaggatctcggtcgtcagcagctccagcagctgctcgatctgcctttcttcccacccctgcgtcttcagggccttcaaggactcgttcaggaccatccgcatgagcatgtagaacttatccagccgcagcctgtcgatgcccgtccactcgcggttcatggtttgccagaacgtctgaaggaacaggtgctgtgcctctgtggtctgaaaagcatggatgagctgggaaatggtcctccctagttcttcctggaggagcggcttgtcctgcatccacatgcaataaaacagccctttccataccttcagcagctcgtcgtgagtgaaaccacctgcggccccctgactcctcgcgacgatgtacttccggagcttcctcaccgcccggtcccgggccacctgctcgtttccggccagacgctgcgccagctggatctccgg

SEQ ID NO: 8807 - DNA, 637 bp, Canis familiaris
ttttgtgcaggatgactgattggagaaaagctaccgggtgagttacggcaccgcgcggggacggcagcgagggaagatgcatctttatctcggaggttaaaaaaaattttaaataaaaaacgtgccttgtagagctgatgaaatacggtaagcgatctggggaggacggcatcggcgtctgggacgcagacgacccggaggataatgatgccgttgatgcgagtcgcgggcccgcggctgggaggtaggttccgggagcccggatgatctgctcctggccatcccgagtcggtcgtgtctaggaggccctcactccgcacagatggctggcacacagctggaaatagcaggattggaactcaaggagaaagtcattgcacggggttggtgcgtggctggttgtgaggttgggtcccgatgcttaagcgcatgtgaagcgaatcacggctttctccaaagccgcgagctgtgaggccttccccccacggtggagcctccccccggagcgtgggccgtgtgcggggacgcgggaggagcaggtgcggcagtcggcttgtgaccacggggcccgcacgcggtgcctggacgatcggcggctgggccagccccacatcctgccccccccgacccccaggat

SEQ ID NO: 8808 - DNA, 608 bp, Canis familiaris
ggacgacacactgaagctctgggactacagcaaagggaagtgcctgaagacatacaccgggccacaagatcggagaatactgcatttttgccacatttctccagtcactggcgggaagtggattgtgtctggttcagagggacactgggaatacatctggaacctgcagaccaaggagattgtaccagaaattacagggccacacagacgtcgtgatctcgacagcctgccacccgacagagaacatcatcgcctcggccgcactggagaacgacaagaccatcaagctctggaagagtgactgctaggcgctgtggtcaccgcaggggggacggtcaagacggtggccgggcggcgggagcacagtgtctggaagggcacccctcagtctgggcctgggggtcgggagaggcctggattaagccgcccctgaggacgatgtggcggagggagtgtctaccaccagaaagttctagaagttgctggtgatgttctggcaatccctctcacactgtctggggaagtttctagtctgtattgtgttcacacggagtccacacaaatttttaattttttattacagaagggtgaagttcaaaaaaaaaaaa

SEQ ID NO: 8809 - DNA, 311 bp, Canis familiaris
tcgagcggcggccagcgtggtgctgacctctggtggccgatcgggggattgtcaggggctccttgccctgcaggcaccgagtggcttttccctctcccgcgtcagggaggggtacatctcactgagctgaggggggcctactccaaggcgcctctctcccttctggagagacttgtacatagtgtagatcagggtgcaccagcctcctgacctctaaggctcaagtgttacgttgccttttgcaaactttattttcataggttgagaagttttgtacagagaataaaaaatgaaattatttataaaaaaaa

SEQ ID NO: 8810 - DNA, 647 bp, Canis familiaris
gcgccccatgagcctggctccctcaaagctactggttgatcagcgcccttgcagcagggccagtgctttggaatcagagcagagcatccacatgacagcctgccagcagcagtgactttgacttctgctcttaaagagtcccccagctcagccccaggactgattggtgggttttagtagtttgtcttgactgttttttagttttccttgaatctttgttttatcctttactgtttttaggttcggtatgtgttctcttattcccatgattcctcgagtttcctttttaaacatttgcatttgctggacaattgcatatttttttaaatccccccccacccacccttctttaaagctgaaagatacatttggttcatgtgcattgtttaccaagcaaaaagaaaaaaagaaaaaaaggcaaaaaaatattgtgaaaggaaaaaaaaacaacttaatatattttggattaatatttggtatttcttttaaagtatttttttgtgctgtgaacgttttctgccaaagaccatgatgtgtgtctgtatgtttaagttatcgtaaatatttaaaatgtaaacatggctgttttgttatgccaccctctaccaggactgctgctgcattccgctgggtataacagtatttta

SEQ ID NO: 8811 - DNA, 557 bp, Canis familiaris
ttgctcaaagtattgagaaatgaaagctagatactgggaacttaactgccaagtggatctttttcccaccatgatgttataatacattaagctgaatatgccagtttaaataattgcctaccgatgtaaagaaatattttgcctgcccattttcagaattcttttttgaaggtttctgttgatgttaactgagctattgccagatattttaatttccctgaacgtagaaatttggagtaaatatatataatatatgtcaaccattccagtaaagcttttgtttaattttcagaaggaatcaaataaaacacagtatccatcttctgtagttcgtagggtgttaggtcctttaacgtaaagtccaacttcaaattccatctagctctgtgttaatccctgttattactggtaaagcttcatttgaatatgtaaattcagtttaggctatgtaaaatttttgctaatgtcatcattctgaaaaaaataaatttacaaatacattccaaaaaaaaaaaaaaaaaaaaaaaaaaaaaaaaaaaaaaaaaaaaaaaaaaaaa

SEQ ID NO: 8812 - DNA, 615 bp, Canis familiaris
  misc_feature (1)..(1): n comprises a, c, g, or t, or includes no nucleotide
ngtcaacagtgcccaagagacgggtgggctaaagccacgccccccagcaggcctccctggttactatagcatcagagactgtcacatctgctccccgtttccggagagcacgggcttgcactcttcccctaggacctactttgaaggccattagagagctttgtgtttcagtttgccccctggtattgtcttgccaggatggttaggtacacaaggacgcttattagatcactgagaagaaaaagcccaacccgcttcttcttatgaacatctagtttgagagccagccaaaccgtaggcttgtattagtgctttaatggagtactggtgaacatttttctttcttgatagggatctgcttatatttagccaggcttctatttcataccctctccccctacaaactttccgtgcagttacctttcatttttaaagccatttcactgctaaatataaattgtatttgtggggttcatagttatataaatgctgaaggggaccactctttcgttgaaaggtgataaaagttaaataaagactgttctcccccagtaaaaaaaaaaaaaaaaaaaaaaaaaaaaaaaaaaaaaaaaaaaaaaaaaaaaaaaaaaaaaa

SEQ ID NO: 8813 - DNA, 630 bp, Canis familiaris
gatcatgcccaagttttcacctgtggcaacagccatttacaggctcctgccagacatcacccctgcttgagcccgtggaaggggattgcatcggaggagctgagccgatgcttctcacctggtgtcattgaggtgcaggaagtccaaggtaaaaaggtggccagggtggccaatccccggctagtataccttcagcagggaagtgttccggaaggagaagtctgaagaaggttgtccgccttgcgcgggttcgagaccattacatcttctctgtcgagtcaacaggggtgttaccaccagatgtgctagtgagtgaagccatcaaggtgctgatggggaagtgtccgacggttcttggatgaactggatgcagttcagatggatctgaggtttccaccggacttactggcatggcctggcctcggatgctcctgagccaagctgaagatcttgggtcctgacctgacctcacaggcctgctagagtctggtgtgactggagatcctgggttttctgggatagttccagtcttattttcagtcagtaggtttcgctaaatgtgccacaaaatgtgacctcatgcctttgtaaggccttaatgtaaataaattcacatccaaataaaaaaaa

SEQ ID NO: 8814 - DNA, 532 bp, Canis familiaris
  misc_feature (1)..(1): n comprises a, c, g, or t, or includes no nucleotide
nccttccggagagcacgggcttgcactcttcccctagaacctactttgaaggccattagaagctttgttttcatttccccctggtattgtcttgccaggatggttaggtacacccaggacgcttattagatcacctgagaagaaaaagcccaacccgctttctctggtatgaacatctagtttgagagcacagccaaacacgtaggcttgtaatagtgctttaatggaggtactggtaacacattttctttcttgataggaatctgcttatatttagccacggcttctatttcataccctctcccacctaccaactttccgctgcagttacctcttcatttttaaagccatttcactgctaaatataaattgtatttgtggggttcatagttatataatgctgaaggggaccactctttcgttgaaaggtgataaaagttaaataaagactgttctccccccgtaaaaaaaaaaaaaaaaaaaaaaaaaaaaaaaaaaaaaaaaaaaaaaaaaaaaaaaaaaaaaaaaaaaa

SEQ ID NO: 8815 - DNA, 293 bp, Canis familiaris
  misc_feature (1)..(1): n comprises a, c, g, or t, or includes no nucleotide
ncctaagggttgtggccaccgtcttactctctggtccacgcaagggccgagaggtgtacagacactttggcaaggccccaggaaccccacacagccacacccaaccctacgtgagatcccagggccggaagttcgagcgtgcccgaggccgcagggccagccgaggctaccaaaaactaaccccagatcctgcccttgttattaaaaagattttgaatgcccaaaaaaaaaaaaaaaaaaaaaaaaaaaaaaaaaaaaaaaaaaaaaaaaaaaaaaaaaaaaaaaaaaaaaaa

SEQ ID NO: 8816 - DNA, 630 bp, Canis familiaris
atagctaagctttgtttttaaagaattcagttgttcagttaaaggaaccaatgtgccattggtatttttttaaaatgagaaccttaaacgatataatcagcggcaaagaagtattaatcatcgctcctgcaaaaatttcaagttgccaaatgaccaagaaaggctaatattgcactttcattaaaaaaaaaaaaaaaagattttcccttgaaatgttagtgaatggatttactttgctgaggtttatgggaactatctgaaatatgtattagaagacattcagtcatcatgaaatgaaatctacttccagccaaacctcaaaatatttacagtgtcttcttgattttcaactctactgcacatattttaaggaaaagtaaccaaactgagttgtttaggcagttaatattcaacctgagcaaaatttttttttaattaactctaagaagagatttgctgaaggttatagaaaaggtattttatgttgaacataagaatattcttcttccaacaagtgaacttttgaaagcttagtttggaattagtggaaactgtccctttgataaccaagatattatttaaggtgtaaagcgagctaataaaatgtcttagtttgagcataaaaaaaaa

SEQ ID NO: 8817 - DNA, 495 bp, Canis familiaris
aatcgaaatggagtggggaagcacctttgaactgatgattggggacacaccggactagtggaaaagagctggtgaagcagctcctcacagagtctgttctgaaggaagaccctcgggtcgtcttccctaaggagaagattgtacgctacagacagatgttttcatctactgagccaaagagagcagaagagttatatgattccctattacaagccgttgccttctatgaattagcagtttttgacaccgaaccttaaaatgctgaggttaatataaagaactctgatgttatattaatttatatttattagctctaaagccataaagcccactgtttttaacatccatgtttatggagaagaaaacatgtttgtatttggatgtttaaagtcagacttccagctgttgaattgttcacagaataagcccagtccaataaataccttaagagattctgaaaaaaaaaaaaaaaaaaaaaaaaaaaaaaaaaaaaaa

SEQ ID NO: 8818 - DNA, 543 bp, Canis familiaris
ttttcaaatatctcatcaacgggtcctgaacattcaagccctgaatggtaacccacaacaactagcaggagcccagcaaggaaagcaacagcacagtatgcctgtctacaccacagaggggatttttgagcgaggccttgcctcctttctaaatctttccagaggtgtcctgattatttctagagtttacccccaaagtaggggttcttcaccgtatagaaatcaggggtatctgtgaacctgatggaggaaaatcttacatctttattttcactaatataactgaaatttcactaatataactaaaatttagctttactccccaataggaatactggcaacaaatcacaatagtaaaagcagtgcctgttaccttttaccttcccaccaatacaaattagttactttttatgttccattacagtttttgcaggcatcttaagatgctgttcacgtttggcactactttgacttatagaagatcttataatttgatgtactaataaaaaagtccatatattactgtaaaaaaaaaaaaaaaaa

SEQ ID NO: 8819 - DNA, 628 bp, Canis familiaris
  misc_feature (623)..(623): n comprises a, c, g, or t, or includes no nucleotide
agcgtgcctacccaaagtcagccaccatctgttccatatcagaagagggtcctactttggagcaactggcaaggagaagctcccgcggtactaccagacatcggtctgggcttcaagacgcccaatggaggccacttgagggcacctatattgacacagaaatgcccctttactggcaatgtctccatccgagggcggattttgtctggtctggtgacccaaatgaagatgcagaggactattgtcatccgccgagactacctccactacatccgaaagtacaaccgctttgagaaacgccacaagaacatgtcggtgcacttgtctccttgcttcagggatgtccagatcggcgacattgtcacagtgggtgagtgccgccctttgagcaagactgtgcgtttcaacgtgctcaaagtcacaaaagctgctggcacgaagaagcagttccagaagttttgaggcagacttctgtgctacaccccctgaagaaaatagaaactgtctaccaccccctgaagaaaataaaactgtttaccaccccctgatcacacaataacaaaaacacaacacaaataacacacacaacacaacacacacacacagaacaaagaaaaaaaaanaaaag

SEQ ID NO: 8820 - DNA, 655 bp, Canis familiaris
  misc_feature (440)..(440): n comprises a, c, g, or t, or includes no nucleotide
atcataattatgtattcttttgtccatcagcttaagtcaatagcccactgcatttttccttcctcagaatacactccagacctgtgctgtctaccagtagctattagccacatgtggctatttaaatgttaaattaaatgttaatttgtgtaataaaaattagaaactcagtttctcagttgtactggtcacatttctagtgcttaatagctgcttgtgcctacgtggctacctgtcatgttggatgagcagacacgactagtatgaaccgagttccatattcagcttcgcaagactagattactatttggtttaggtagctgatgcattcgactaagaatgtacatgcatgcacgccctctagatggaagaaaggaaggaatgattatgcacacctgctgtgcgtctcctctacacgacgtctatatattttaacacanatttctctctacacactctcgtagagcgtctagagcgcggagtctaaaatgttctccagatggcaaccctgtaaatggtattaatagttgcaaactaaaaattaaacaagacctctatttttttaagtaaacttaattattggcattgtgagtgtttgaagttgctggaataaattaatattattaaataaaaggctgaattccaaaaaaaaaaa

SEQ ID NO: 8821 - DNA, 586 bp, Canis familiaris
ataggaccaagctataaggaggcacctcaatcacctggtgcccctgaggaaattagctgctcaaattaattaatttaaaagagtaacatttaagtcaactcctgaaacactactgagtcattataagaatttctcgccccaatatattatagtgttttgtgactacagggaggataaacttgagtcctccctcacctgataactcagggccaggagtatagatgagtaattttacttacaattcatgtaaatacagataagatgaagtatggggctggttggactcactcagaaaaattcttgtagcttgttttcttgaaatagtccctgatatgaacttttcaaatacactttattaaacacttaaggaaacaaacacagtagctacaggacaatcaaccttacaaaatgaaacttcggaccataagtgctccctaagcttatatttcctttcaagttctgtaagggaatcaagaaatcatttcttcacatcgggttccctgcgtggagcctgcttctccctctgcctgtgtctctgcctctctgtgtgtgtgtctctcgtgaataaataaaatcattaaaaaaa

SEQ ID NO: 8822 - DNA, 624 bp, Canis familiaris
ttaaaaatgtggtcagtgaacctatcgaaggacatgaagactaccacatgatggcgtttcagttgggccccacggaagcctcttactactgggtgtactgggtcccaactcaatatgtggatgcaatcaaagacactgtgctggggaagtggcagtatttttgaaagcactttcacctctggcccaggagactgacccaaagtgaaggacattgctgggagaggcctgcagcatccctggatttcagagttctgggactttgttcaaaacaaaaccaaaaaaacaaaccaaaaaacctatatccactctaaggcgatgtggggactgaagccagaggtgatgtactttcaccattagcttaattttaacttaaaatcgccggttcccttttctggcagtcagcttcataccatttttaaagtcaacacggttgaaatcaataaatctgagttccgaacatattgtgtggaatactcttaagtgtgtttgagagtagatctaccaattttgtttagaaaggaatgatcaaaagcttgctggttttccttttaattttttttaaaacaatttcaactgaaatattttcataaatctttggttgcaaaccaaaaaaaaaaaaaaaaa

SEQ ID NO: 8823 - DNA, 620 bp, Canis familiaris
tggaccagagagagagccccaggggaccacaggtaagtcacttgcccagaggcggtgggctaaaagccacgccccccaacaaggccctcctggtactaatagcaatccaggaactggtcacatctctcccccttcccggagaagccagggcctgccacttcttccccttaggacctacctttgaaaggccaataaggaagcctttggtttccaatttcccccccttgggtaatgttcctggccagggaattggtaaggtacaccaaggaccgcttattagatccactgagaagaaaaagccaaacccgcttctctggtatgaacatctagtttgagagcaagcaaaacagtaggcttgtattagtgctttaatggagtactggtaacatttttctttcttgataggaatctgcttatatttagccaggcttctatttcataccctctcccactacaaactttccgtgcagttacctttcatttttaaagcaatttcactgctaaatataaattgtatttgtggggttcatagttatataatgctgaagggaaccactctttcgttgaaaggtgataaaagttaaataaagactgtctccacagtaaaaaaaaaaaaaaaa

SEQ ID NO: 8824 - DNA, 617 bp, Canis familiaris
gctaagacctgtgttccataacgtgtccctggatgtccctttcctggtctcccacccgtgggaacacgctcagaggaacccacacgcccgccacgagggcgtctgatgtcgggatgagagtcctcgacgtgtggagcaccctcctctctccctagctggtagttgagcgatttctttgtgagtatgaggatgtagtgggtgtagaaatacggcctctttttaccattccagtcatttttgtggcatgtggaattaatttgagactgtgctttgatatgtcggctgctacaaagctgatcgtatcatctgaactgaggcaaaacacattgcctcaatcagacaggaaggagttgccgtcgtaacaatgaagtgtagggacagctggagtaacgttccgtgctgtttgtgagtcgcggtcaagtagtctggaaactctgcgtcggggtttctgggctcccgtcccaactcgggagggccgggttccaggaatccagctcagcatgctcttcttagtttgactcaccctctgacctccagcttttacctgtgagtaaggagacagtgtaagggagggttaaaacttaaattgtaatccctttaagtacaaaaaaaaaaaa

SEQ ID NO: 8825 - DNA, 536 bp, Canis familiaris
gagttgaccaatggtggggaaatagaaaagaactggctaccgttcgcacgatctgtagtcacgttcagaacatgatcaagggcgtgacactgggcttccgttacaagatgaggtcggtgtatgctcacttccccatcaacgttgttattcaggagaatggttctcttgttgaaatccgaaatttcttaggtgaaaaatacattcgcagggttcggatgaggccaggtgttgcttgttcggtatcgtcaagcccaaacacagatgagttaattcttgtaaggaaatgacattgaacttgtttcaaactcagctgctttgattccatgccaagcaagccactgctgttaaacagcgaggatcatcagaaaatttgtgtggatggtatctatgtttctgaaaaaggaccagttcagcaggctgatgaataagctctgagttgtccagcaacagaaacagcaagatgccagatgatttttcagacttatttgtgataccttaagaatgcaataaaaactacactgataaaaaaaaaaaaa

SEQ ID NO: 8826 - DNA, 616 bp, Canis familiaris
  misc_feature (1)..(1): n comprises a, c, g, or t, or includes no nucleotide
natgtcactgcccagaggcggtgggctaaagccacgccccccaccaggcgctccctggtactattagcatcagaaacgtgtcacatctcgtccccttccggagagcacgggcttgcactcttcccctaggacctactgttgaaggcacattagaagctttgttttcagttccccctggtattgtcttgccaggatggttaggtacacaaggacgcttattagatccctgagaagaaaagcccaacccgcttctctggtatgaacatctagtttgagagcaagccgtaaccgtaggcttgtattagtgctttaatggagtactggtaacatttttctttcttgataggaactcatgcttatatttagcccaggcttctatttcataccctctcccactaccaactttccgtgcagttacctttcatgtctgttaagagcgacatgttcacatgcgtaaaatataatattgtaattctgtggcggtttctataggtgtatataatgctgacagggaaccactctttcgttgaaaggtgactaaaagttcaataaagactgtctccacagtaagaaaaaaaaaaaaaaaaaaaaaaaaaaaaaaaaaaaaaaaaaaaaa

SEQ ID NO: 8827 - DNA, 601 bp, Canis familiaris
  misc_feature (428)..(428): n comprises a, c, g, or t, or includes no nucleotide
agccccgcgcgcacctgggcgccctgctggccaggtacatccagcaggcccggaaagaaaactgagagcgaatgcggtggattcaattaattaaggaaaacctttttaaaagagctttcttgaactagtgttggcccgtgttgctgcttaagttcaacgctgtattatgaagatattaaaagctccttctggccgaatgtccgtcattaagaacctgcagaacctggaccccagtcacaggataagcgaccgggactacatgggctggatggattttggccggcgtagtgctgaggagtatgaatacccctcctaagggaccctgcctttgtcggcacaccaggaagcaaccgcctggctcagaagaggcagaaaaagaaaacaatcacactcataagtcattgtctctgaagtttgacattttcatnatctatttattaagttttcaatgtgaaaaatgtctgtaagattgtcccagtgcaacctcacacctcaccagaattgtacaaatggaaagcaaaacattttcctcgtctgtgatgcgtggtcctaaagtgttgctatgctattaaaataatttcattctgctccctaaaaaaaa

SEQ ID NO: 8828 - DNA, 675 bp, Canis familiaris
  misc_feature (121)..(121): n comprises a, c, g, or t, or includes no nucleotide
gaacaagtttgtacccaaaaagcaggctggtaccggtccggaattcccgggatgagggatggtgcgttcacttggggcccgaaggtgagagaggaagtcagggtaggggagaagccagcanccctgggaacccaggaaacagggccaggcccggttggcagctccttgcacggcccttttgccaaatgtcctactgggaatactaccagtgaagggagggagttaatgccactgcgggaggaggggccaggcggccataccaccacctgggcccccgattcagtttgcaaacataaaatgttaaggggacgtcctgccggctagtcagggctcaaagctcggggctcctcccccttccaacaaaggcagggcggcaggccagtcgtgccctctccgccgctccccagtcccccttagcgccgctcccgagcgcagacgggagcctcccgacgaccccctgcaaactcagcccctgggtaaaaactttgtgcccgcagtggatgagcgagaggtgctgagcgcgcgagcaaggtttggaaatccgcagagaccagagtcgacgggtacagcgcgcccttggctcggggcaaagggaaacacggcccctcccgcccccaccagccccgggcacgagacctgcagccaaggtggttacaaaaagaaaaaaaaaaaaaa

SEQ ID NO: 8829 - DNA, 645 bp, Canis familiaris
caacacgagaagttgaccaaggccatccagaaagccagagatcatggtctcctcaaggtaccacattcctcaggttgaacctcgggacttgatttcagtacctctcacggagctgtgagtgctactccgccagcccccaccctggtttcaggtgacccctggtatccatggtacagttggaaacagccaccggagagagagctgtcccgccttcgacggctctatcagggccatcttcgagaagagagcggtcccccacctgagtcaatgcctgaagtgccccttagcagcccaaccgaatcttcctccactgaggagagccctcagagtgctctgtaggagccatagaccgggaagggattaagggatagtgcctaggaattacatgatgggatttcactctcaagagttgtgtctgtatgtggccaatggcaggcccagggccagaggaaagaaatgattgctgttgaagggaataaatgcatcggagggcaggacagatgtgtatgggaaacctcaacccctatgtattgtaaataggctaaacattgttacttccaatgtctgctaaacttggcttttccacaaataaagctgtatttcctgttaaaaaaaaaaaaaaaaaaaaaaaaaaaaaaaaaaaaa

SEQ ID NO: 8830 - DNA, 620 bp, Canis familiaris
gtgaaggaattggatgtcctgatccacgactgagcagtggcctcagtacccgtagccccctgcccttcaggtgcttaccaaccagaacagcaaccccaggagctgagatttttctagtatagcattaattttgtaatgcaatatgctggatgcagagtctgttgttgtttgcctgtggtcctcagagactgcatcctccgtgcactgtgatgtagatggtagatgtgttctttgtaagctttaatcctatggttgtcaagagtaccatgtggttccactgttttgttttgtttttttaaacgatgagctgaggctcttattgcagctggttttcaagttaaaattgtgaaatactggtttccttccccacctccctccccgcccacaccaaatattttagtctatttaaagtacaaaaaaaaaaaatagttctacttaagaaaacattgcttaaatgtcctgtgatttctggtcaatttttatatatatttgtgtgtgtctgtatgtgctttcactttttaccttgtttgctctctacctgtgttaacagtactttcaccattgaaaggtgaacatttttcctagcattaaaaaaaaaaaaagcccaaaaaaaaaaaaaa

SEQ ID NO: 8831 - DNA, 612 bp, Canis familiaris
ctggaacgacgcagcttcattgggaactccgatatccagcctttggagaaactacagtactacttcatctcaatctggcggtccacgtcaccttctgccttttccgagtcatttcccagttcagtagctggatacggagacaatttacctcaataccggtcccatgttgttcagtggagacaaggaccacagatttgaatacagccacggccccattgccgtcctggcaaacagcagtgaccctgccgcggggccagagagtactcatcctttgccagcaaagatgcacaactataactatggcgggagcttgcaggagaacccgggcggccccggcctcatgcatggacagacctggacttctccggcccaaggacccgggtattcacaaggatacaggggacacattagcacatcaactggcagaggtcgaggcagagggttaccatactgagtatctgtttttcctcaggcacatcgtttttatctggaaagacttttctagctgcaatttaaggcagcgatccaagagacttgaataatattaattcaacaacagctttatttttatgtggaaaagggtcttgcatacaatagttaaaaaaaaaaaaa

SEQ ID NO: 8832 - DNA, 420 bp, Canis familiaris
  misc_feature (98)..(98): n comprises a, c, g, or t, or includes no nucleotide
  misc_feature (166)..(166): n comprises a, c, g, or t, or includes no nucleotide
tcgcttgttctccgtagtctcgacgtctgctgttatgaacacctcttgcgtcctcccccgcgggcgacgagtcttccaagaggcgcccccccgacgcnccaaagatggtgcacgagggcccctcgttggtgtctgagtatacgtcggcgcctttctcccttccccnccgggatgttttcaaagctccccttagaatttgcctaccaggaagcccaggagttgacatctggaaccctgctgggaaccctagctctgtaaacatgtaattggtccaaatcattgctttctcacctcacttccaccaagcatctggagccaggtctgtctatgtaataatctcaaggtgtccacaggcaagatccccagtggttttatgtgcagaataaaaaggcctcagtgacccataaaaaaaaaaaaaaa

SEQ ID NO: 8833 - DNA, 740 bp, Canis familiaris
atggaattcccccaggagatgtggcatgccctcagtaatttcccaccagttcattcggtcttcaaccttcccacaactgatgttctttcaagttcacttggaggcagaacacagattgttaaaggagatgggctggcacagaagacagtgagaaatgatgaaacatgtgctcccttaactgaggatgaaatgagagaattccaagttattagtgaacagttacagaagaatggtctgaggaaaaatggtattttgaaaaatggcctgatctgtgacttcaagtttggaccctgggaaaacagcactttcaaacccactattgagaatgatgacacagagacaagtagcagtgacacatcagatgatgacgatgtgtgaaggatttcctaacagctttagaaattttagtgtgatacatctctcatacagtttggggtgaattgtaaaaatgaagaactataatttatgtagtaaaataccccattagaagatgatttttttgagggacttcactatgaagaaaaccaagaatgttgtgttgggctgtgttgaacattatttctttgtaaatgaatgttgtagaaatgaggactttggttgatccaacattgactttcttcatcactgcagcatttctctgactagcaatgtgacgatgtaacaaatgagattttctcatttaataataaaaaattgtgtaatgttttgccaaaaaaaaaaaaaaaaaaaaaaaaaaaaaa

SEQ ID NO: 8834 - DNA, 630 bp, Canis familiaris
gtgctctctctctctctctctctctctttcctgaggcataatttacataaccattcactgatttaagtgtgcacttccatgagtttgaacaaaggtacataatcatgtaatcactgatgtgggaaacaaaggcaaaagaaacattgaacttccttactacttccagaccactgagaggtccttgaaacaggcagagtgaccttcgtctaggagctcagctgcctcatgtggacactttgctcagggcaagcccaatctttcaggaccctgtgagtctaccttaacttacagaaatccctttggaaacttcctttatctctactccccctgagatagatgtcagcgatcaccctccagacacacagcccagtgacacacgtctgaagggtctcatgacaggctttgctagacagcagtgaatggccttctaacaagagctagtgcccttgggtcctggaaaccgtgtttccaaaatacaatgccttggaggcttgtgctctcccttaccccctccaacttaagagtacagaatcagtcaccctcatgacccccctgaagctctttctgcccatgggtcctgcccccatgctgtaataaaaccacctttttgcaccaaaaaaaaaaaaaaaa

SEQ ID NO: 8835 - DNA, 666 bp, Canis familiaris
ctgtggtgtccggtgtagtatcagttctgcagttgtcctatacttggttatattccagcaagttgcttcctctgcatttctcccttctgtggatgattgtgtatcccctacccccgcatcccctacccgccgcccccataactggctgggcaccagcttcatctgtgatacccattgagaaatgttctctggttttgtttatgctgaaggtagagcataggtcacgtttcagagggaggctgtaaatatctggcattttcttatgtttgtttgtgttttattattgtttctattgtttttaccatcttcttttctttggggactttttgtaatgccgttgtacagctcataccttcctgccaacatatctgataatctgcttcatgcagttgccaacattcttaactgaaaataatctggtttatcatagagaaaatggggaacttggctctgtgtttttgcagggggaaggtagagagggtttatttaataattacctatcttaaatctttctgcgttggaagcagtttcgtgttcaaggaacaggaaaagctgaaaaaaaaccctaagtttaaatcaatccttttaaaatagatatttttattcttttatataaataaaatttcacaggtgttgaaaaaaaaaaaaaaaaaaaaaaaaaaaaaa

SEQ ID NO: 8836 - DNA, 395 bp, Canis familiaris
aacaccttgatgtccgtttcctttcacatatgttatgttcctaatatttcacgatggcctaccaatgccctagcagcacgggacttatttggtccggtgggggtgggggatggcgggatgggacacctcaacacttttttttttccactttcagaaactcaaatgtccaaaaaacgcattaagaggtttatttgggtaaatggcccgtagtggatttccccccagaaagggggaaggaacgagcgggtagacctttctttttggacagaagctagaaggcaggaaactttgtgcggtgtcaccgtgagcacctccagctgtattagtgccattggaataataaatttgatatggtggtgaaaaaaaaaaaaaaaaaaaaaaaaaaaaaaaaaaaa

SEQ ID NO: 8837 - DNA, 941 bp, Canis familiaris
cttttttttttttttttttcttttttgtatttttttttttttttttttttttttttgttttttttttttgtttgttttttatttttttttgttttttctttttatataaagacacaaccacaagcaacagtcatagtgtgcttccctccgttgcgtgttcctttcctgccttctctgtgtccctgttcgtttcgtttgtcgtctgctcgtatgagcttgtttcagtcccctagcacctggccctgttagtctctcaccagggtatcttgaccctgtctgatcctctcggcttctcatgtacctcttcttcctcggcctggtctctgcctccaatctctctccgtgtctctatgaatatattattaaatcttttaaattcttttatagagtcagacacttaactgctgagccacccaatgctccaggctctacctttgaggaagagtaccaagatttgtgaacatttaggaacctccacaggtggcactggtctacaaggactaatggacaccttctgtgtgctcacagctaatgcatctgtctctccctacagaggttctctttcaaggagaagagaaatttcataactgatggttgccatcatctctcttcactcaggcttctttcagatagtcagcttgtttccttcttttgccttcaggcaattacatttccaaggaaatttccatctcttcagttgattcccagaagtcttcttagaagagaggggcttcattggatctctgaagaggagaggaggggagaggaaagagagggaggaactctccagggtgggaaacgtttggcacttgctacagtttctctgctgatgagtaagagatttcaaaatgaatgagccagaagccaacaaataataataaaaaaagagaaatgtggtttcttaaaaaaaaaaaaaaaaaaaaaaaaaaaaaaaaaaaaaa

SEQ ID NO: 8838 - DNA, 656 bp, Canis familiaris
atgagaatctgaacctcgccctgtctcttgacaggagatgaccacgtgagttgctgagtgaactgctgcccttttacatgtgggtagaaatataagggcatgtggcagcaagatgctgcaaagtcaaaagaaagctgcctttcctctcttctctctcccttatttttatatttttaaataaaccagaaaacctcacactcagtcctgagtaaagaaaggaaagcactaaggaccgtagacagaacggcgtcatgaagcatgattgagtcacgatagcattgtgagagttgttcactgtttcagtaaaatcttgtagcatcccaaaatcgtcaacaatagatgtcaaaggctgctgctggcccaaaaaaagaaaaaacatttgaatacccctcccctttttttgcttctaaaagataagggatatgggtttgtaaaaagaaaagaaaaatctatatatatgtatatgtagagagagaaatatcccctgttgaccatttttaaaaggttccagattggatacgtgtttcaaccaaattttaacatgaatgagagcatagtaggcaggaagaacacttgatacaactatgcagattttataaatgtgcaataaaagtatttgttgtaaaaaaaaaaaaaaaaaaaaaaaaaaaaaaaaa

SEQ ID NO: 8839 - DNA, 630 bp, Canis familiaris
actatccctgccatcttcgtctgtagtcacagaggtctctgctcatcaagaagtcagcacgttccacagagtagagaggaaaggaaagaatgaactattttgcatttctcagaagtggttcaaattttacacagaaggaattaatgtcagtggcagttcacagttatcgtcaactcagactggaaacggtgcaggtgcttgcctagagtgaaaaacagcgcccttcctttgctgagaagcaggctctgcttgtcttggtttctcagtttgactctgggccctccagggcccatctattgaagaagaaagccactcactgatcagaggcagaccttgccctaagtgtgcttcccccagagagccttttgctcatattctgccaaagtcacaagtggccctattgggatgcctgcgagtgcagatgtaagaataattcacgacctaagaacttaaggggaaatgaggtaattcccaaaaaatccataattttgattttgtgggtttgtagccctgttaatggcaggttgcaggatacttgctgcaagtaagtggtaagcaacctttggatccgtccagtatagaacactttgaattttaagccattaagatcataaaggaccaaaaaaaaaa

SEQ ID NO: 8840 - DNA, 300 bp, Canis familiaris
gggccccaggggccttggttgaagggggtgccgccccggggctggccccgcaggagaccggagtctggaagctgtgtcctcgcagccccacggcagtcgcaaaggttttcccaggggttggaaagctggccaagtcctgttcacgcttggatgggcgcccgccccagggtgggccggagctgttctagcgccctgtcactccacccaccgccaccattaaataacaccatcctaccttcgaaaataaaattatatctatatttatagaacaccccgtcctccccagccccccgccccccc

SEQ ID NO: 8841 - DNA, 705 bp, Canis familiaris
agaaaggactctaagagcttgcccatgttgtggactcccatagagacattagcatggatgtaacacagatgaccatgtacctggctgtatgcagtatttctgctggatttgcatgggttctctctctagagcaacccttacaacatttcactgatcctgcttccccgtgttttaatcggttgttccatgctgtggatgttaatggagatatttgggaagatgagattgaagactagttaactcctactgctcaagataaggaagtggaatggtttgccctaatcttttgtcgagtacagaaaataactgcaggatatttagggtaccgttaattcactcttcctttgtagaagatgtggaagaacaaggtttatattttcgtgtggtactactgattaaggcacattcatatgtttttcattgtaacatagagaaaattataagccaaaggttcagaaaatgaaaactagagaatattaaatactacagtgtgcccgaagctctgaatagttaaaaaataaatatttattttcttccccaagctttaggtaaggaaaggagtcaagagttaaagacctttttacctgaaaacatccctctaagacatgtgggagtcccctcagtattactccttaaaactgggatgggtagaaagaagccttattaaaattgtactgagagcctgaaaaaaaaaaaaaaaaaaaa

SEQ ID NO: 8842 - DNA, 658 bp, Canis familiaris
tcccctggttttgatatctgtaacttttttaaagttagcatcacaaattattgaagtatacttctatactgggacacatttaattactgagtaaagaatttatttttcagtttcagatgtatgacttggggttttaaagtaaaaattacaaagttatttgtgagtaaactaaagttgcacaagtgactgaaataaaacttgtggaataggtttagtggggagattgaaatctccaaaaggccaacattttactccttttttaatagttgaaataccctgttttagtccctaagaattctcattgcatagtatatgccagactataaaatacttatttttaaaatgaaatctatatattgactttcttatcaatcatcttattgtgcaatcaaaattagatttctttgatttgaaaacaacatttagagcctccaaataacttttcaaagacttattcagctttgtgggtggtattttcatgcaaacaagtaagggtgggttttatattttgtagaagtttttggtcctattttaatgctctttgtatggcagtatgtatatagtgtgttaaattcctcaaaactcttctttaaaaactttgaagttaatacttttgtgtaactgtgttttgaataaagccatgacagtgtttaaaaaa

SEQ ID NO: 8843 - DNA, 680 bp, Canis familiaris
cgggccgtttgagaaatgggcctttaaacttaattgcgcccaaccatgtggttgtttccggtcggctttttggtaataaatgctccctgttgtctgtgtcttactatgcatataaacggcccctggggtgctcctctttgtctgttgtgggatatttgcttatatgataaaattttaatggccaaaatgttcaaatccctgtgagtccctgagagcccccatgctttcaggctgcccaggggtgtgggtgacgacttcccaggtggcttgtgccctaccagttgttaccgattatcctccggcaacttgggttgttaattcaagggaatcccctttccccataagacccccctctgaatggtgcccccaagcccctccagagcagcagcacagctgtttgggacccccccccccctcctttcccccatctttaaacctctgcttacaggagggtcctatgtacctggagagtcccttgcatctgtgattgagctctggcatctgggtcttttggcacagagcctggcctggcactgccttagctgtctgccggcaaaacttctccgttaggagggccctagcatttaccccaaggtagtgggtggtgaccctaaatcatgtggcaggccaaaatgataattattctgatctgtgcagggcctggcatatagcaggtgtta

SEQ ID NO: 8844 - DNA, 522 bp, Canis familiaris
tggccaggacttgtcaagccctgccaccgcttttgcgccaacctgtgctgggccagcgctgatgggtgtatttaactgcacggaaggctacttcatggaggatgggagatgcgtgcagaacctgtagtctcagctactactttgaccactcttcagagatcggataccaatcctgccaaaaatgtgatgctagctgtttgacatgccatggtccaggcttcaagaactgtacgagctgcctcagtgggtatctcctagacttagggacatgtcagatgggagccatctgcaaggacgcaacggaagagtcctgggccgaaggaggcttctgtatgctagtgaaaaagaaccatctgtgccagcggaaggttcttcaacaactttgctgcaaaacatgtacattccaaggctgagcggccatcctagatttctttgttcctgtagacttatagattactccatattattattaaaaaaaaaaaaaaaaaaaaaaaaaaaaaaaaaaaaaaaaaaaaaaaaaaa

SEQ ID NO: 8845 - DNA, 616 bp, Canis familiaris
gctttacgtgttatgaccacatacttaagtacgcggtacaatggccatgatgtcaactttgcaggacacaaagcgatgaatccagcggctcggggagtgcagtgggtgcatggatgacgtgtgtcctacggagttcgagtttgtcaccaacagaggctcccgcagtggaccccgaccggagagaagtggactcttcagcagcccagctcggccactccctgctctcaggatccctcgcctgcatcgtcctggcactgcagagactgtgcagataatcctgggtttttggtccgatgaaactgcattttagctatttgaatggccactcacttcttttcttacactcttggacaatggaccatgccacataaactaaaccgttttctatgagaagagagcagtactgcactctgtctccctttctgtttgcccaaagagtaccgggtgccagactggactgcttcctttttccttcagctatctatggggactttgtttattctagagaattcttactcaaatctttcttaccaggagattttcttaccttcatttgcttttatgctgcagaagtaaaggaatctcacgttgtgagttttttttccccccattaaaa

SEQ ID NO: 8846 - DNA, 713 bp, Canis familiaris
agactgcattgatattgccagcggacaagcatctatcactacctctcttggaaatcgtggaaggctgcacaattcctcacctcaagccataaccataaggtatctagtcaatgtttccttgtgttccaagtaaccagtgcctgccttctcgtgtaacgataggtaaatatctcccactcgcatagcatagcgttggccactcaaatccagtttttatctgtagataattacatctaagtagcaatcattattacagcccctctctcctcacacagaagtcgtcctcaatccccgattgatctcaaaatagtattgtatagaaatttttgtgaatatatatcttaatcaccactactatatgtacatcttttgaaattttatactcgagcactaaatattttaagtcgcacacatctgtgtacgcggtgtgtgataatagaaaatctaatagaatatttttggtgctgatcccaagagaagtgtatttttaaatatccccccatccctgggattctttgtggagtatttagtatattgacacgtatttttataaggtgaggtaactcagaacttaatttaaaaatctcaagtatattggtgcagttcagctgtcttctctacatcaccatagccatttgctttcatttccaaccataagaactaatttattagtgacttgaatcatcagaagtttaaaaaaaaaagttaaaaaa

SEQ ID NO: 8847 - DNA, 436 bp, Canis familiaris
cgagaggaagccgtttctgtgcgttcttgcttggattgatgccgtcctatgtaatgctgtactcttggcgacgcggcagttggtcttctccgcaggaggctcgccgtcttagttggggttttctggcagatgtgggtggtatttcgcaggaggctcctgcatgaagcctcgcggctgttgtgagctgtgtttggggcgcactgctgctgccagaggcagctcgccaggccagctaagaaaatgctcaagaaaacattttaaattcatgcttccctcttgttcttacaattgctcaaatacaaaattgaaatgggattccattggattatgcttctcttcttaaaggagtgctccttgaccatactggaaatgtattgattcttattgtttctgttcattaaaggtgaactgcaaagttacaacacaaaaaaaaaaa

SEQ ID NO: 8848 - DNA, 545 bp, Canis familiaris
cgggctcaagaattggatggtctcctggaggctctgaaattgaaatcgatgcagggaatagcctggcagcctctagtgctgaagaaacagcaggcagtgcccagggtcgtgcccgggaggctgagcagctgctgcagggcccactaggcgaccagtaccagacagtgaaggccttggctgagcgcaaggcccagggtgtgctggctgcacaggtgcgggcagaaccacttcgggatgaagctcgtggcttgttgcaggctgcgcaggacaagctgcaacgactgcaagagctggaaggcacctatgaggagaacgagcgggcactggaaggcaaagcagcccaattggatgggctggaggccaggatgcgtagtgtgcttcaagccatcaacttgcaggtccagatctacaacacctgccagtgactcttgcaggattcctaccccagcccccagccccgccgcacccccgttactgcctctgcatggaaaagttcccaccctgactaggccttcaataaactgctgtgaatccccaaaaaaaaa

SEQ ID NO: 8849 - DNA, 344 bp, Canis familiaris
gtttcagtaatgtttgcctctcccttaactccctagtatagggtttgggtaggaggccgtgtctggggtgggatgggggggcaggggcggctgttcttatcggctatcaactttcatctgcatgacttagctgttcagcagggtaagcatctaatgaccaagatctgttgttccagctccgtgatcctcctcctctcctgtggaagccccaggcccctagctcactctttaggcacagaagcctctattgcctggctgtccttgggtctcctattcttatgggtcccttgtatgtacataattaaacttttgtcctgttaaaaaaaaaaaaaaaaaaaaaaaaa

SEQ ID NO: 8850 - DNA, 600 bp, Canis familiaris
acaagctttttatcgggagttctttgcccctcagatacaatattgtgaatcatttgatgatccatatgtgaaatgtgaataatagaatttatgtgtctggatccacgccttttgagggctattgaggactttctcttacacatagccatatatagtgctctattaccctctcagccaagcacatgtcatcatacgtgtcctgtgcccgtcccgtttgcctcttaaatgtctggttagcagggaccccaagatttcagtgagtcaatgtacataactgtatatagctatattattgcatacgacaacgatctggtgctaatgttctgcccttggcattcttaggtggtggctgactcccctcctctgtcataactcagctctggaatgctctatatagcaaggtttcagtcaggggcattgcctgtggcttttatcctgccgtcccctgtggagaatgtgtacatatttcatgcttgacacttaccacttacctctcaacacatcatcctgcttgactttaacaaaataaatagtgtctctgaaaaaaaaaaaaaaaaaaaaaaaaaaaaaaaaaaaaaaaaaaaaaaaaaaaaaaaaaaa

SEQ ID NO: 8851 - DNA, 274 bp, Canis familiaris
ttcccatttcttatggtaaacatatgtaattaatgtaatgaattcacaactgaccagaacattagctagtcatggtgcagggctccaggcgctctctgggccacctacctgcctgggaacagactgccctcagaggggctctggagtgcctggaacccacttgcccacccttggcttggatgtgttccaagggtccagcactcgactcaaccttgaaaacgtttctccactttaaaaaattatgcattaaaaaaaaataaaaaaataaaaaata

SEQ ID NO: 8852 - DNA, 591 bp, Canis familiaris
actttggtccttactttgggactcgtttttgcacactggccaatggagatggctgtgaagaagagctgaagctggagtgctcacagctggccacatctgtgatgcataaggacatggaatgtggatgctttacattttgaccaacacatggtgtctaccataacccttcatgtttagtccaattgcttaaccaagtaatattctttagaattcagagatcagatcttcctataattccaagcctatgactaggctatacctcagactgttctttaacagtttcacctctggaattgaactctgatttttctaacccaattggtgaccatatcttaatgcaactcaagagcttagattggagtcttcccttgtcctacatcaagatgttcactcccaagtactccccgcagaatgatgtgcttctacacacacaagctatactcacaaccagtcattttggaatcttgcaattttcctaagatagggttaaattttttgctgatactttctgatataatttggcttattgtttttgagatcttggctgaaataaatgagatgcttatgaaaaaaaaaaaaaaaaaaaaaaaa

SEQ ID NO: 8853 - DNA, 731 bp, Canis familiaris
ctctacaatgggctatatgatggccaaaagcatctggagatcaaccctgaccaccccccattgtgggagacgcttgcggcaagaaggcaagaggcaagataagaacgacaaggctgtcaaggacactggtggtgctaactgtttgaaacagtctctactctctctccggcttcttcactcggaggatccccacgactcacttcctaacctgccatcttaacccgccatcgatcatacgctagtgcctcggtgcatccagatgaaaggatggataaggataggcaccgcgagggagacacaccacgtagctccttcgttctctgatgaggatgcccctcccactcttgtagaggtgtatagtagagatagccctcttcctggcgacctagtgggaagagagatctgagatttatttcttcccctctgcgcgagcacctgttgtcgcctctcggttattagagggtcccctagggttccccaaccaagcccctggagtgggcccccgggttccaacctgggttcccctctgctgatgtctagtggatttttttttttctcctcctgtctttgttagaggcaggacagaagggccttaagccctagccctcatgacatttgacaaggggtttggatgtgtattgtggtgtttgtttattttgttctgagattaaagtatgcaaaataaagaagatacggttttatacaaaaaaaaaaaaaaaaaaaaaaaaaaa

SEQ ID NO: 8854 - DNA, 370 bp, Canis familiaris
acgtgagggaagagccctcttgtgccagttatccaaatgtgaaaccaaacctaaccaaaccaaaaccaattcaccaacaccactttttctatttaacaatttttctacaccttgctcttgaccttggcctctctggtcaaaacagcctcccagtcctgcgtttcccaaagacagctaggaggggagaagccctacagggtgtggtgatccaccccccagcggcctggcggattccagagaactgatgtaccaccccggctcccaaaagtttgtacaaacagcctaacatgaagagaaatggcactgaaagatgagaggaaaatggtgaggaactgggtttatatgagaattaatatgttttcctaacaca

SEQ ID NO: 8855 - DNA, 551 bp, Canis familiaris
cccggagggggcccatgtctaacggggttacgttgctgccgagcgccgccaacgggagacgtgaagccggtggttgtccagcacgcctctggtggacttccctgatgcagctggaggactatacgcctacgatcccagaatgcagtgaactgggtttactacctgaaccgtgctggctttgagggcctcggaccccaccggcataaattcgggctcattctccctagctgccccagaaattcattctcagatattgccaacgatgccctacagcactgcaaaatgaagggcacagcttctggcagctcccgaagcaagagcaaggaccgcaagtacactctaaccatggaggacttgacccctgccctcagcgaatatggcatcaatgtgaagaagccgcactacttcacctgagccacccaacctaaatgtacttgtctgtccccctgtccccacaccagcctgttttcataataaactttattgtgacaggcagggctggtccctcccatgctgggaaaaaaaaaaaaaaaaaaaaaaaaaaaaaaggg

SEQ ID NO: 8856 - DNA, 638 bp, Canis familiaris
ttcaagcatcatctagttcttctccagaaacactgagagatgcaggtacaagtagtcaagtttcttccataaagagacctgaggaggatgatatggctttctttgaaagacgataccacagaaaggataaagatggaaaaggttgctaagcagaaaggaaaagcacccttgccatcaagtaccaaaccttcatgagagactattggggaaaattaaaacccctcatcccaatagattcttgtttgtgtttaattaaatataataatacaccttaatttctctcaattatttacttctcttactaatgtagaaacgtcattttgattgtttcctttatttaaacaagtgaaaatactttatattacttttgtcaacattcatgatttaatattttgtatatattttttatctctcctaacaaatgaggttattttcatattggtcaaagcctgaaaatacagtaactgtttttagtttgtcataatttaactttttgaggctatttaaaaaattaaacatgttattgggggttttgaacaaatatataaggagggaacactgtttaaaaatagtaagttaaaaatctcttttttatttgtcaaactttgtaatcttgatttatgtttttaaataaaaat

SEQ ID NO: 8857 - DNA, 117 bp, Canis familiaris
  misc_feature (1)..(1): n comprises a, c, g, or t, or includes no nucleotide
ncaacaaacagggagcttggcacccggctccaagaggtagctgccctagaggggctcagaaaggacaaaataaagtgtgtgtggtagaaaaatataaaaaaaaaaaaaaaaaaaaaa

SEQ ID NO: 8858 - DNA, 600 bp, Canis familiaris
ccaacctcaggcagctgatggcctagcagctggggaggcagggagagcacagacaacatcaggctaaatagctgcctctggaccccctgtgcccacacagcctggagctgctgctcgctgtgtgctggaagctcctgggaggtgtgtcataataaggcacttgtttctattatggttacaggtctgaaacttgcagccgtgctgaacgtctcttagttctcccattggctgtccttgctctggcctcaggaacttggcacaacctgttacctgtgcctggaacattgctttcctgcttcttgcctggttaactcctgtgctaccttcaggcatccgcctcaatgccacccctgcaggaggttttccctgactcacagcccccacgctaatttagatgctcctgctctttggatagcccggtagctccccagccgtggctctactgccacattctgctactgctctttgtcactatactacaagctccacaagggcaagattgatatttgtctggcttgtcactgtatgacttgagcacgctgcctggcaaatgggtgggtgcttgataaggagggaatcctggaaaaaaaaaaaaaaaaa

SEQ ID NO: 8859 - DNA, 700 bp, Canis familiaris
cccgggcctcagctctgaggagcggccaagcagcaggacaggcaacctcccctcgtggtcaattgtgataagcgccgatgtctgccttctcatccacaatccttgattttggcttcgtaagtggcaccattcttcagctcgaccttgacccgatgcttgttggtcaccacgtgggcgtttgtcacaatcaatccatcttcggacacgataaacccagacccactggccaccggcacctccctcttagaaaacggaagcttgcgaaacagctcgatgtgaaccacggcaggggcgatctttcttccaccaacgtcatgcgatgaagttgtacttatggcgcaaactgttagggtcttcttgccccttgtccgcacgagcgcctgcgctgcagagacgatagtacgcggcgcgctggttgcagacctctttggcccgcgcgcgctcggcggcggccacagctgggcaacaaggttgggccgttaagttgttgggccgttccgcctgcccgccaaccaccggcttcgcccgcctggcggcacacagcaagacgcacaggacactgcagcagcgcacgcacgcacacgtggccgaggcagggcacacccgaagggcaccacgcactgcagcccctcgccgcacgggccactcctgcaggccgcacgccgccccctcgggcgcgccgcacacctcgcagcagccg

SEQ ID NO: 8860 - DNA, 649 bp, Canis familiaris
tttaccagaaaggataccctaaccagaagtattatttctggagaccccgtgataaaagttggacactgagaattgcttcctttgaaaacactgaatggagtctaacaaagcttgagacaattcggttaccttgcagcctccgtgtttacttgcctggcaatcgcactgggattttacagaatatggaagtagagaaactggcaatgctcctgttactggctgctgtgggcttcttagaacactactccaggatacactctgactgtgaatgttgcagcagatacttaatacaagattattcaaagtacatatggactaaaaatcaaatattttagaatgggaagaggtgttttaggtttgtatttgtgggtctttattatgttgaaaagctgtctttcaaaacctgatttgaggaaaaaaaaaaagccttttatctttatccttttaatagttcatagaaactgatccagttttcttgtgtttgcttgaacaaatgtatgtcatatagaatttctttgatgtctgctgcaaatttaaaaactgttcccaagcctacatgttattgtattcagctttcctggtaactactgcacaattaccttttcatagaaataaaatcttgttaaaacaaaaaaaaaaaaaaaaaaaa

SEQ ID NO: 8861 - DNA, 586 bp, Canis familiaris
ccagccccagttctccctgacggaggcccatgaaagaaaatgtttccagtgcccctacttcttcttcgatgttgtttacatccacaatggcgctgacgagaaggaagaggaaatgagctggaaggacatgtttgccttcatgggcagcctggataccaagggtaccagctacaagtatgaggtggcgctagctgggccagcccttgagctgcacaactgtatggccaagctgctggctcacccactgcagcggccctgccagagtcatgcctcctacagcctgctggaagaggatgatgaagccactgaggttgaagccaccgtctgaaccatccctgtgcgtctccgccttcccatgcggtgaagccctgggcttggagaatgggtctcaaagtaggctgtgtggcaccttggtagggagggttccaggaggctcctggggactctgggcactcattccccatgttttccagccctcctcccactagcagtttgtccactgtaagttttattctcccctgtgtgacttttgtcatcaaaataaaaatctgagaatccctaaaaaaaaaaaaaaaaaaaaaaaaaa

SEQ ID NO: 8862 - DNA, 472 bp, Canis familiaris
aagagagctggtcctctgtctggaggacaaggagctggttgccggcgccccccgccgatgtcgggcctgggcccggaggccacggccacagggtcaggtcaccctgacggtgcgcaggagcccgcgggctcggcggaggcgcctgacggggtgaggcgggactcgcgtgggcacgggacagccccgaggggaggctgacaacgaatgagagggggaacctctgggtcccgcctacacgtggctgattatacagtaagaaaccgaattctgctcagcggtttagcgctgccttcggcccagggtgtgatcctggagacccaggatcgagtcccacgtcgggctccctgcatggagcctgcttctccctctgcttgtgtctctgcctctctccatcatgtcgtgaataaataaataaaatctttaaaaaaaaaaaaaaaaaaaaaaaaaaaaaaaaaaaaaaaaaaaaaaaaaa

SEQ ID NO: 8863 - DNA, 637 bp, Canis familiaris
aacaggtattgtcctagctaaattcgtccttagacatcgttcttcatgagtacatattatattgtggcccacattcacatatagtgcgtttcaataagggagcacgatgttttgcccttatagggaggagtattgcccccccgagttccccttaatctcacggttaaactctctaacgagaaactctgagaccaagagatcacaccttaaccaataatgtgttgtgtggggatgtaaaaatacctttcctgtcccttccaaccatttccctaagggttaatcctgggaataaccttccgttccggataacttcctggacctaaccccagaatggcaataataacctaaccctgaaataccgtctcctctataggatcgtttatctcgcttacagcggtgatgcttataatttttatgatctgggaagcctttgcatccaaacgagaagttgctatagtagaacttactacaactaacattgagtgactacatggatgtccccctccataccacacgttcgaagaacctacatatgtgatccaaaaataagaaaggaaggaatcgaaccccctaaaattggtttcaagccaatgtcataaccattatgtctttctcaatcagaaaaaaaaaaaaaaaa

SEQ ID NO: 8864 - DNA, 666 bp, Canis familiaris
tgtaaactggaagtttgttgaaaatgtgtcactttttaagtgttaaactctcttgtttgtatattttgctagctatgagcttttgagtaaaattcaagatctggaaaagttgaaataaaatgaaaagaagccgcccttttttgagcggtatcttgttggacaagtggcttctctgtgaattacttgtaacacaatagtggcctctgtctttgtaaggtgtttgatagagctaaataaatggaacagccaaacccatcctgttggtagcagttggcagtcctatttcattttattttattttttctgatctcctttgtttaaatggtaaaccttaacccatactttcagcaggccggtttgcagtgaattttcatttctttcctttttcacccccttgttgtaaaaagcccagcacttgaattgttattactttaaatgttctgtatttgtatctgtttttattagccgattagtgggattttatgccagttgttaaaatgagcattgatgtacccatttttttttttaaataacaaggcacagcctttgccccaaactgccatctaacgtttgtcattccagtttgagttaacgtgctgagcattttttaaaagaagctttgtaataaaacatttaaaaacaaaaaaaaaaaaaaaaaaaaaaaaa

SEQ ID NO: 8865 - DNA, 621 bp, Canis familiaris
  misc_feature (1)..(1): n comprises a, c, g, or t, or includes no nucleotide
nggaccacagttatgtcactgcccagagacggtgggctaaagccacgccccccacaggcctccctgttactatagcatcagaaactgtcacatctctccccgttccggagagcagggcttgcactctgtccccgtagaacctactttgaaggcaattagaagcttgtgttttcagtttccccctggtattgtcttgccaggatggttaggtacacaaggacgcttatctagatcatctgaggaagaataaacgccagaacccgcttcctctggtatgaacatctagtcttgagatgcaacgcacaaacagtaggcttgtattagctgctcttaatggagtacgtggtaacactttttctttcttgataggaatctgacttatagttatagtccaggcttctatttcataccctctcccatctacaaactttccgtgcaggttacctttcattgtttaaagcaatttcactggctaaatataaattgtatttgtggggttcatagttatataatgctgaagggaaccactctttcgttgaaaggtgataaaagttataataaagactgtctccacagtacacaaaaataagatacacaataacaaaaaaaggaaaaaaaaaa

SEQ ID NO: 8866 - DNA, 616 bp, Canis familiaris
ccataccctacccactcattaatataaacttgggagtcctattcatactagcaatatcaagcctcgccgtgtactccatcctctgatcaggatgagcctcaaactccaatacgccctcatcggaggccccttcgagcactaatgcgtctcacacatattctacaatagtgaagtaacgtctagcaattattcttctatcagtcctcctaataaacgggtcacatacacaatatccacgctaattattacccaagaacatatatgattaatctttccggccctgacccctagcccatgatatgattcatctctaccctagcagaaactaatcgagcccccttcgacttaactgaaggagaatccgaactagtctctggatttaacgtagagtatgcagcaggtcctttcgccctattctttctagcagagtacgcaaatattatcataataaacatcctcacaacaattctgttcttcggcgcattccacaacccattcataccagaactctactctattaacttcactataaaaaccctcttattaaccatctgcttcctatgaattcgagcatcataccctcgattccgctacgatcagtaaaaaaaaaaaaaaa

SEQ ID NO: 8867 - DNA, 522 bp, Canis familiaris
cggctgcaagcgcaagtattacctggccaggaggaggacgaagacgacgaggaggacgcgggcgacctgggagccgaaccccccgggggcgccccgttcgccccctgcaagcgcgcccgcttcgaggacttctgcccggactcgtccccggacgcgtccaacatctcaaacttgatctccatctttggctcgggcttctccgggctggtgagccgacagccggactcctcggagcagccgccgccgctcaacgggcagctgtgcgccaagcaggcgctcgccagcctcggcgcctggactcgagccattgtcgccttctagggacccccgagggcacggggacccggggccccgcggggctggggccagacaaagactcggccaaggggcgagaggagggagtgaacgggcgcctggccacccggggctgagctgggggtgagccgggggaggcggctgatgttttataaattgtaaaataaaaaaaaaaaaaaaagaaagaaagaaatctaaaaaaaaaaa

SEQ ID NO: 8868 - DNA, 646 bp, Canis familiaris
tctttcattataaatttgttctttaatatactatatacatatatatgtatattcctcattacattgatctcgttttttcttagctaaagacatctgtattgctactcagtatgggaatctctagaatgctattggtttttaaaatatgttgactttttttaaaatgaaaaaaaaataaaatatttgacttttgttgaattatctttgttctaacaatgttagatggcctttttccttctaaatataaaatcatggctaccaaaagatttgtcttatgtatttgttttgtgttaaataaaattgtggctagaaaatatattttttgatattttgtcattaaatatggaagttaattattgtttttaaaaaatgttctctatttaatacaggaaattacatttattgtttgttagaagcttttagtaagaattggtatcttttgtataatcacataatttttatcatttaaatcaatatgagttatattactggcgttactatattaacacattcttaaattttgagtaactacttgattatggcatatgctctttcaatgtattgcttttccctatttggttatttttattataattatgcatctatacattcataaataaaattcatttatattttaaaaaaaaaa

SEQ ID NO: 8869 - DNA, 463 bp, Canis familiaris
acgaggcagatgattcttttccacctcggaaatataatgcaagcaagccttgtgcgtagctaaatatttagcagatatgctttctgatttctcataaggtttctaattttagaaacctgtctctgtccacacagcaacttctgtccttgtgtcacttttgttggagcctgagggctggtttggagtgtgaaacctgcccaggttcagacagcgtgcactgtcttactgctgtggactcctcactggctggaagcaatattcccctaaactgcagggggcgctggcctaaaccaaacagtagtcagagtgagcacatggacggacacctgcaatgcaattggctgttgtggcaggtcagaaaccttaggattttgtttcctcttaagcctccaaaaaaataaataaataaaatgggttgaccccttaaaaaaaaaaaaaaaaaaaaaaaaaaaaaaaaaaaaaa

SEQ ID NO: 8870 - DNA, 379 bp, Canis familiaris
ccattgacttctaccctctatattgttcaataggagagacagccatcccacgctaactacatatatatatatatatatatatatatatatatatatatatatatatatatatatataaaatctcccttccattaattcttattccagttcattttgtttaaatggtggatttatgcaaatgataggattattaaaatattcaagcaaaacaccacaaattctaccacttagaaatagctagtgttcacatttggtgaacgttataccagacatttctttatgcatgtgcattgaaatggaagaatggatagaattttgtaaaaatagatggtgtgtgtgatttataataaaaagtattacgataaaaaaaaaaaaaaag

SEQ ID NO: 8871 - DNA, 630 bp, Canis familiaris
gcacagaaaagccagtcatcgagctctggaagaagcacacgctagcccgagaagatgtctttccagccaatgcccttctggaaatccgaccattccaagtgtggctccatcaccttgaccacaaaggtgaagccacggtgcacatggataccttccaggtggcgcgcatcgcctactgcaccgccgaccacaacgtgagccccaacatcttcgcctgggtttacagggagataaacgatgacctgtcctaccagatggactgccacgctgtagagtgtgagagcaagcttgaggccaagaagctggcccacgccatgatggaggccttcaagaagactttccacagtatgaagagcgatggtcggatccataggaacagctcatcggaagaagtttcccaggaattggaatccgatgatggctgaaggaactaaggacacttcagcaaggcagcattggtcaaggaattcaagatgatagatgaataagcaatgattcaaatttgggaagaaaagactgccaaacgattggcccaccaagctttttaaattcagaagagcaattctaaatctaaagaaatgtatcattaaagtaattacattacattgaaaaaaaaaaaaaaaaaaaaaa

SEQ ID NO: 8872 - DNA, 541 bp, Canis familiaris
  misc_feature (1)..(1): n comprises a, c, g, or t, or includes no nucleotide
ncggagctacactcattgccagaagatctgtgaaccactgggggggctactatccactggccttataattatcaaggtttccgatcagcctgcagagttgtcatgccttgtagctggtgggtggcccgcatcttgggtatggtgtgaaagctcagttcgtatacccggtgcttgttatcataaaatctcaagagactcaccacgagtatgaggcatcttgatgctgaagggaccaccaagtattttaaactcaatttcagcgatgctattcaagatacttttacagctctcaattgctttacagaacttcatccagaatgtgccaatgtactgaaagggtagtttaagtctaaaatgccctaacaatccctttattactggctatttttaatttgctttgctttgccaataaggcctacttacaagactaactttcccagctactttgaaataaacatgaaaaaatcaccatgtcagagaaaaagaaaaaaaaaaaaaaaaaaaaaaaaaaaaaaaaaaaaaaaaaaaataaaaaaaaaaa

SEQ ID NO: 8873 - DNA, 682 bp, Canis familiaris
aaaaccaggtccatttcccttaacgtctgtccgccatgcctcactctagctgcgccatccttgcccagctactgctggtttctcccaaggctcctgctttgaaagtcaatatatttatttgtggtctgtaatgcaacacttggtgctgtaagacacgtggataatgcacgccccaccttcttgcagccaccactcgtcagctttgctaactatctgcccctccggagcgaggccctccacagggagcagcagctctctggggtctccctgaggggcacaggggcacaatctgcgtctcgcgcgaatactctactcgtgtttttgttctacacgcgcgctacccacaacccctctctatcccttgcgccccttttagatccgatgtctgtttccgcgttgttcccctccgggcctgtaagcccagagggaattccaggggaagttcactttacagcaaatcccctgctcccctctgcccagtgctgacggaagcccctcctccataagcaagttcattctttcagtgccattggcatctacatagacaggtgtgagagtagatgtgtaggttactctacatgtatctgttctttcttcaaaaccatgttaactttgtgaaacgacttttacactccaacacgctttacagcagaagaaataaaggaatatgaaaaataaaaaa

SEQ ID NO: 8874 - DNA, 519 bp, Canis familiaris
tggcctggcccgtccatccagcccctttcctcttgctggcctccagaccaggatcttccgtcctggctcgctcttctgctcccctgttccctctccacgtgtccgttctcatcctccctctcctttctcaccatctcccagctggttccgctgtctggtggcgcggggcctctgctcagcccctacccaggcaagccccggggcagagggcagctgcccccaagcctggacagtcctggaggaggtcagcaggtggagacgatgcagccctgcatgcactccgcactccaaaggggagcattggccccggaaagggcccagcctcccactggagccccagccagctttcatcgtccccctctccccacgagatggctagctctcccctcccttcgccttctggcccctggtatggtgggggtttctaacgatcacacccagcttgaggaggggctgcttctgaggtcggttgttgtctttcaattaaagaaacactgtgcaaaaaaaaaaaaaaaaaaa

SEQ ID NO: 8875 - DNA, 555 bp, Canis familiaris
aagcttttctctctttcctgtgaatgattggtgatcactcagtggatagaggcacattgtcacagatgaatgagcctgggaaatgaattgccaagattaggacctggaagaggtaccagcctcttttccaagctggagaggctccaacactggatggttctgtagggagcctggtcatcaacttgcaatacctcacagagccagcccctctcccactctgcgctcccactggaaacactgattctccaagctggggagtttttggggagagaggcagaggtggctggagctctgttctctcctgcccggacaccactcgagctgtggtattgacagagtggctgacagctatcttccaacctgaactggctggggcaggacaagggctaggcttgatggtggccaggcttgtctgctcccagcctgggatgcccctgctctggacctctcatttctcttcattggtttatttttcaatgcatctttaatttgtaaagaaataaaataaattaagatgtaaaaaaaaaaaaaaaaaaaaaaaaaaaaaaaaaaaaa

SEQ ID NO: 8876 - DNA, 573 bp, Canis familiaris
aatgtttttgtaacctttgtagctacttttttttgtaagatgagatgaaaggcaggcctattgcatcacaagcacagacatagacaccaggaggaccaccgaacttatgctttatttgtaaaattttagtgttttctccatctctactgtcacaatgatgtgccaagtcttctcttggttgaatggaagtcagcccaggattataactcctgaatcttaacttaatatgcccaacagcatgggctacacacatatgaatatttaatatcttgaacccaatgatctcaaatttcaatgttcagatttgcttaactgaaaaataggtggtaaattttaagactgatgattttgccaaatactagacccaattcatgaagccacatacacttagagcaatatttttagtattaagaattatatagttacctagtgaaacttctcttttctagaattatttttcactctaagtcatgtgtatgttcctttttaatcatttgcatgttatgtttaacaagctcatagcccaaataaaacatagcaaatggccaaaaaaaaaaaaaaaaaaaaaaaaaa

SEQ ID NO: 8877 - DNA, 505 bp, Canis familiaris
cccccgtatatgggtatattaattgcctggctctccagattccccctttttgatcgttaaggaggattcagaggttgataatgtcaacctgggattagaagagagcacatgtactgagcccttgcagctccctaggtacaagagaactcaggccttatgttaaagtcatgcacttagaaagctaaccttctttattatgttgtatttattaataagaaagaaagataagcaaaccttcatatgcgtaaaatggcaacttctggatgctgggtgctcagcagcaagtgttgtactctaatctctaatgatccccctggattatctttttggtttaagtcaagcctgaggctggtgaacagtagctacacacccacattgtgtgttctgtgaatgctagctctcttgaatttggatactggttattttttatagagtgtaaaccaagttttatattctataatgcaaacaggtacctatctgtttctaaataaaactgtttacattc

SEQ ID NO: 8878 - DNA, 589 bp, Canis familiaris
gtgtgttgcttatctgctcttggcatgcacttcgatgcaaaagtgtgcaacataggggcccatcagctgccacagttgctgtcagtgggaatagattcttagtcgttatttgggtccctgaaaaattttctaacctagtttcagcttttactagtgaattgtgttttcacgtaacattttttaaaagcccattgtgtttaaagcttttaatctgtatttccgtgtgtgtgtgtatacatacacacacatacatatatatatagccagatattaagtctcttttggagatggcagtctgggtcatggtttttgtgctggactttgtaaaggccatcatccatatgcttgaagtttttgtaatatgagattaaacttagccacgagcctattattcagtgtgaagtaatgaaggagccacccacgaggcttatttctcatggctcccataagatttttttaaatgggccattggaattgattaggttaacttttactttatcctaatttgtaaactttttccctaaataaatgattgaataagtaaaaaaaaaaaaaaaaaaaaaaaaaaaaaaaaaaaaaaaaaaaaaaa

SEQ ID NO: 8879 - DNA, 610 bp, Canis familiaris
aagaggagaccacatccagcccctctgacacactcttgggccctggagccccgccagtgcaagtgaggcccaggggaggatgcgctttgctcaatgcccagaaagtgaacttaacctttgtcatctgcctgcagggtcagggcaggtctgagggtgagccaggtggggacggtgacatgcccagtcccctcactgctgctgccccacccacctacacagcatggccagaggacaccccagaagagaccggccccgcacagcgcgtgaggggacccggctccagtcaggtgcacgagaaggcagggccccgacctcggcctggacgcactgcctgaaactatatcccaacctgaaaagatccaaaccaaagagaaacttgatccagacaactgagtattatgatggtgcactctgcacatgcgcacgcgcacacacacacacctgtccgagtgcacgatgcacaccctcaccaatgacctgttaccagttacacataagcagacacacatacatacgcacatccccaccaacgccgtgatgaccgcacatccacggggggatacacacatcccacactcacacactcgctacagctcatctccctccaggc

SEQ ID NO: 8880 - DNA, 628 bp, Canis familiaris
gacaactggctccccaacactgccaacggtccagatgaccttcctccgcctctgtccaccgagggctctcagatatcacctaccactgcaagaacagcattgcctacctggaacgaagcagccggcaacctcaagaaggccctgctcatccagggctccaatgatgtggagatccgggctgagggcaacagcaggttcacatatactgttctgaaggatggctgcacgaaacacaccggtaagtggggcaagactatgatcgagtaccggtcacagaagacctcgcgcctccccatcattgacattgcgcccactggacataggagggcccgagcaggaatattggtgtgtacactcgggccctgtctgcgttctttgtgtaaacaccgcacaccacacaacacacaaccacatctccattgcgccaattccgagaggagacccaatatacttttccaggttcccagctcactctaggggctctgcactgaatggctgacctgacctgatgtccattcatcccacccgctcacagtgtggacttttctcccctctttctaagagacctgaactgggcagactgcaaaataaaatctcggtgttctatttaaaaaaaaaaaaaaaaaaa

SEQ ID NO: 8881 - DNA, 670 bp, Canis familiaris
atgatatatgatagcccatggattaatgacgtagatatctttcaagtggcctttaggagtggcaacatacaggaattttcctgtggtggaggcgagttggtcaatgctgcataatgaaaggccctacttatgtaatttcttaggaacgtttatgaaaaattcatccagacaagcactaatgaacattttgaaacaagatgggaacgataagctctgttgggtttcagtaagagaacagtggcagcctcaggaaacaaatgaaagccttaagaattatcaagatgctttgctccagagtgatctcacattgtgcccggtaggagtaaacacagaatgttatagaatatatgaggcttgctcctatggctctgttcctgttgtagaagatataatgacagctggcaactgtggaaatacgtctgtttaccgtaatgctcctctgcagttactcaagtccatggacgctccctttatctttattaagaactggaatgaacttcctgctgttttagaaaaagagaaaactctaattttacaagaaaagattcaaagaagaaaaatgttacttcactggtatcaacatttcaaaacagagctaaaaatgcgatttactaatattttagaaagttcatttttaatgaataataaagggtaactgttaattaaaaaa

SEQ ID NO: 8882 - DNA, 512 bp, Canis familiaris
cccagcccacgcgcactgcccgccaggccccgggtcagcgtcttacaactcttcgttatcaagtgcgtgtactgccctcgtctccagggccgcgaagagtcctcgaggcccccggagctagaagtgcagcctgacccagtttctcctggcctcctctcctccgctcccgggacacgacccacctccaaggggcggagggccccctggggcagcgctgactcacgcccgcgtggttcccgccagtctttcaacttgagggacccccgcaacctgccctgagccgggaactcatgtgggcgcccccctcggccagacccccgagctccaggcgccctgcacacctggcgagacaccagacaccggcgggcttttacttagcgtttgaaggcgtctccctagaggaaaggatttcgaagcttgtcggaatgaatccctccctctcttcacaaggtcttggccggtctaaagtctctcaataaacccgatttgtgctcaaaaaaaaaaaaaaaaaa

SEQ ID NO: 8883 - DNA, 623 bp, Canis familiaris
ccatatgtgcagtctaggatcaataagttttagtttttttaagaacatcattttttttggcttgaaaactatgatgtcctcaaagggtgaggctaaaatgtaagatattcttcagctttaattattttttaattttattcaggtcagagcacttttttatagcaatacaacaggcaagagaatactcaaccatatttaaaattgtgtttataccaagagtaccttttaaatattttctaatacttgagcagtttttgtccggctggcttccaaatatgccaaaagttaagcattcaatgttttgacacataagctttttactgataagaattcttaagtgttcccaaagcaactgatgtttacagggcttgtgttcttcttccttctctggaaggatctggggatccaccatgaacttactatacaaaacactaatgatgggctaacttctggtttaatgagtgagttggctaccaccttgatgtaaaaatttgtaaaggaaactttttcaccattttgagtgtcagatgtatttttaactgtctggtttgtacttttacgacttttgtactaccaaagcagagttaaaaataaaaatgttaaacataaaaaaaaaaaaaaaa

SEQ ID NO: 8884 - DNA, 652 bp, Canis familiaris
gagatcgagaagtaaagataggagaggagaaggagagattccggagctcagagagggaagaaagtcaaagtagaaaccaggaaaatacggaacccagaaagtaagaggttcacacagaaagaaaattctgagggtgagaagagaatgtactctaaaaatcgtgatcataatagctcaaataacagggaaaaaaaggctgagagagatccaagtccattctcaaaaattaaaccaagtagtcaggaccatgaattaaagttctccacattgaaaaataaggatgacgagaagaccagatcctcagtggaaaaagaaaacccaaaatcaaagggtcaagaaaatgaccacatacatgataaaaataaaaaatttgatcatgaatcaagccctggaacagatgaagacaaaagtggatgagtgagttgtgtaaacttatttccattctgtctcaaattttaagttttagagacttgctgatgaatctcctttatgttgttttcctcttttcattgtttttgggttttatgtttgtcttttttttttttttatgtggacttcattgagttgatcttttgataatctgcaacctggataatttgtactgctaaagttttaataaacttgaaatgagaaaaacaaaaaaaaaaaaaaa

SEQ ID NO: 8885 - DNA, 576 bp, Canis familiaris
  misc_feature (226)..(226): n comprises a, c, g, or t, or includes no nucleotide
gttcacttgtcagagttgctaactggcaccagatgttaagacccaactgcatgaatgagacccgcttcctggccttctgtgtgctgaagtgatggcgactggccagtcagccttcgagatggtctccagatggttccttcctcctgttcacatctctgtaggcccctcccacggtgaatagggctccctgtgtgaccaccaggatgctgtaggaatgacccaagtntaggtcataaaaaggcaccatggcttcagtcttgctcgctggagtcactcccctgggggaagccagcctccatgttgtaaggacactcaagcaatcctacagagaagaccctgtggtgaggaaccgaggtctctgccttgccagccttgcaagtgcaccatctaaggagcccatggtccagccccagtcaagctgtcagatgacgcagcccccacaacaccttagcggcaatcccaaaagagaccacaagctggaaccatccagctaacccacttctcaattccttacccacagaaacttggagaataaatgctgatgattttaagccaaaaaaaaaaaaaaaaaaaaaa

SEQ ID NO: 8886 - DNA, 571 bp, Canis familiaris
tcaaggtcaactatatataatgtatactataagatcaggaagcccattgaaaagtgagcttatttaaagtcgtttacttgcttgtatcccatcctctgcccaaataggcggctttttagacatactttctcagcaaatccttaaagttgcaaattattgaattgcactaatacatactgactcaagcctcgtttatgagctcacctggtggcaatgtgaaaagatttgtaaaagaagcatttctagtttctgggaaggcaaggtttccgtttcatttccttcagttttaaaataaaatctgtggcctcaaattgtagagtattcatgggttaagatacagagaaatggggacgcctgggtagctcaggggttgggtatctgccttctgctcagggggtgatcccaaggtcctgggatcgagtcccacatcagtctgccttgcagggagcctgcttctccctctgcctgtgtctctgcctctctctctctctctgtgactatcataaataaataaaaattaaaaaaaaaaaaaaaaaaaaaaaaaaaaaaaaaaaaaaaaaaaaaaaaaaaa

SEQ ID NO: 8887 - DNA, 289 bp, Canis familiaris
ccccatagtctactttattgtagataggaaatgtgcacacctgttgagattagcattaactaactaaaccatagtgacccagactggccacattaatgttcatagttgggattccatatttcctaggaaaaagaaaatcactaacctttttttgagaaaaatatttaaaatgtcacaattcagtactgcagttatcaatgtaaaatgcatttgatgcttagtaattaaaattttcccgattttaaaaaaaaaaaaaaaaaaaaaaaaaaaaaaaaaaaaaaaaaaaaag

SEQ ID NO: 8888 - DNA, 479 bp, Canis familiaris
acccaatgcgcccgccccccgcgccgtgcctgccgccggtcccagccagccctccgctgggcacgcagctattttagccaccacctgtccgggtgtccaggagcccccagcaccgcgggccgggaggtcaggcggagccgcgcgggaccctgggccgaggcgggagcgcggggctgaccctgccccccactgccgcaaggagggcccctgatatttatatttaagaaattaagataataatattaataatgctggaaggaaggtggcaccccgagcaggcctgtgctcgggcctgggacgtccctggcctgatggccaactgggtgggcgccgtggggccaggcacccaacagcccactgcccgtggcagccccagacctctgtaattttatatagagtttgagctgaagcttcgtatatttaatttattttgttaaacaagaaaatgtgcatcttcttcctctaaaaaaaaaaaaaaa

SEQ ID NO: 8889 - DNA, 656 bp, Canis familiaris
accccatcttagaagtgtttctttcttaagccctttgctcctggaggtaactttctccagctttcaggctcaactctacagcttctccacagcatcaaccctgggagtgttttgagactttttctcataaatgagggcaagtaacattcctgttttgctccggaaagtaatcaagtaccgctcagtatttttaaatgaatggattctcactttgtgatttgtttggggatcaaataggaagcacaggcaccaaccgacatatacaatgtattgaaatgattttctcagaatttgaagtaggaaagttacccaaacacttctgcttccacttaactggcctgcaatattgtaagaatggcatatccttgttactgtgatatttaaaatatccacagtgtccaccttttccaaaagattctagtaatgatctagaaatatctttctcttatctgttatttatcaatttttcccagtatttttatatggaaaaaattgtattgaagacatttagtatgcagttgataagaggaatttggtataattatggttggtgattattttttatactgtatgtgccaaagctttactactgtggaaagacaactgtttaataaaagatttacattccacaacttgaaaaaaaaaaaaaaaaaaaa

SEQ ID NO: 8890 - DNA, 539 bp, Canis familiaris
gctgttaatgaggttgtggctggaataaaggaatacttcaatgtgatgttgggcactcagctactctaccaatttgagagaccacagtatgcagagatccttgcagatcacccggatgcacccatgtcccaggtgtatggggcaccacatctactgagattatttgtacgaattggagcgatgttggcttatactccgctggatgagaagagccttgctttattgctcaattatcttcatgatttcctaaagtacctggcaaagaattcggcaaccttgtttagtgccagcgattatgaagtggctcctcctgagtaccaccggaaggccgtgtgaggcgaggcgcagaccctcgcttcgtttggatctctgtaaacacatttttgtttagtccttctcttgtacaaatgatgtactttgaaaatgttagtgtataacagagttgatgtttgttttctgtttgatcttaaacagagaaaataaaaggggttacagctccttttttctttcaaaaaaaaaaaaaaaaaaaaaaaaaaaaa

SEQ ID NO: 8891 - DNA, 522 bp, Canis familiaris
tgatgtgcttcgttccgtggctacctctctcctacctctctcatttccttcctgattcgtctgtgagcgccttcgtgtttctttactccactctcctgtttcctcttgctccgtcttgtagcctatttctgttccttgcttctgttttctggtcctcgtttgttttcgtcagcctgcctgtctcctgcgccacctctgtcccgatttctcttttatgatttccttgggagctctgagagcttctgttcttctctgcccctacgtccacgtgcctacccacagccccctgcctccgaaggtgctgagctccacatcccagcagcccctttctgcagctgttcatagccctgggcctcccgaggggtctcattgccaaagcatgcaagcccgccctgcttgtgcctttagctggtgtgtacgtgtgtgttggggggaggggatggatagctagggatgggctccatttctcctggtggaggggggtgtacattacatgtccccttaagattaaaaaaaaaaaaa

SEQ ID NO: 8892 - DNA, 621 bp, Canis familiaris
acttggcagtacatctacgtattagtcatcgctattaccatggtgatgcggttttggcagtacatcaatgggcgtggatagcggtttgactcacggggatttccaagtctccaccccattgacgtcaatgggagtttgttttggcaccaaaatcaacgggactttccaaaatgtcgtaacaactccgccccattgacgcaaatgggcggtaggcgtgtacggtgggaggtctatataagcagagctcgtttagtgaaccgtcagatcgcctggagacgccatccacgctgttttgacctccatagaagacaccgggaccgatccagcctccggactctagcctaggccgcgggacggataacaatttcacacaggaaacagctatgaccattaggcctatttaggtgacactatagaacaagtttgtacaaaaaagcaggctggtaccggtccggaattcccgggataagtaaaaacttcatcctggctgggttagtttcatagctctgaaaccatctcacagggatacttctgagttttgtcaaatgccatgaaagtgtttgctatcataataaacagaattcttgtgtgacctcaaaaaaaaaaaaaaaaaaaaaaaaa

SEQ ID NO: 8893 - DNA, 599 bp, Canis familiaris
actattatactacagcccaggtactgatccgggttcccccatgcaaggaggaaatttggtcgtgaattcccaagtccgtgacacccgtacgcattgctgagaactttcaggtctttgactttgagctgagtagtgtggacatgaccaccttactcagctacaaccggaactggaggtctgtgccttggtgagctgtgcctcccacaaggactatccattcactgaggagttctgaagctgtcggtgcctgtccgcccaggtgccccgcgtccctcctcccgtatgtagcgtagagtggcctctgcccctcggtggtgggtccgtgaacctgctgacgggcccgtgaggtgttgggtctcaagagcagtatcagcaggttagagtctcttccagttttgcccttcttcttgtccagctggggaatgtaggacctggcacccttttctgactaagttgaatctataaagttgaaatagtgccactaacacctggattttggctaccgggaacggtaaccctttcatccagacttcttgcctgaaataataaagagttattttgtgaacttgaaaaaaaaaaaaaaaaaaaaaaaaaaaaaa

SEQ ID NO: 8894 - DNA, 556 bp, Canis familiaris
ctggtggactgcagccaagcaggccaaccacatgctgctggtaaggggtgcacggcccccggacgccctgcgatggagattcctggtgaagcactgtgggcaaccggctctaccacgtgttcttaccttacttcaaggaacaagggagaatacacgctggtggtccaagtggggtgacggagcaacatccccggcagcccctaccgtgtcctggtcccctgatctctgggcctgtgccagctgccagctcccaggacaagacgtgcccccacacccatccccccaacctgagcagcccccctggtctcctcagccctggagccccggccagccctggccgccccatcaccgcagccaccccagccctgcgttgcactcacctgcctccacttaggcaaaggagagaggcgggcagaggtagcctttggtggctctgcctatcttcttcggttctgggggggggtgagggatgggggtagtacgcacgaccacccgctagttctcttccccagccaagaagaataaacgttctgcttccactaaaaaaaaaaaaaaa

SEQ ID NO: 8895 - DNA, 615 bp, Canis familiaris
gcatgacaatgagtgtgtgatccattaccaagtctcctcatggagaccacagtgagtcagcccttcacaggactactacggaagaaattattcatcccagtgtacagttaaaccaaagaatctcagtcacaccaaacccacctttttatttcctgctctctcccctattttttgaagaaagcgggtcccaacgtgattcaaacaactgtacagagcggcatatgagaattgccctaaactgaactgcaaataattatctgtgtatgtatatgtgtggggaagagaatgtattgcatatgtgtatgttatatggacatatgcacatacatacattgacccacaggacattgtaaaatattattacatgacatcttaagtagaaataagtagggacttttattccatcctttttttcacgtttacattttaattattaaaagttgctcctgcccctccctgaactattttgtgctgtgtatatcactgctttatataagttattttttaaggtgaactcagatgttatggttttgtaaatgtctgcaatcatggataggaataaaattgcttatttgagagctttcaaaaaaaaaaaaaaaaaaaaaaaaaaaaaaa

SEQ ID NO: 8896 - DNA, 475 bp, Canis familiaris
cccagcccccttgagagtgaccttcttgggtcatagagcccccaattcgtatgactggggcggggtcaacgtgtaacagggttgaagagtgggggccaagggcccctgaatccagggttaacctgaggccatagcgtgcccctggttcacttgtaaaggccctgttttgaggttgtttgttctagatttattttaagctaggtaagtctgaggggtgtggggccatggtcccctcggcctccatggggagggaagaagggggagctctttttttacgttgacttttttttctactctgttttcccttttccttctgctccaactttggggcccctgggggtttcagtcatctccccatttggtcccttggattgtctttctttgtctgttgattctaacttgtaaataaagaaaatattattccaaaaaaaaaaaaaaaaaaaaaaaaaaaaaaaaaaaaaaaaaaaaaaaaaaa

SEQ ID NO: 8897 - DNA, 473 bp, Canis familiaris
  misc_feature (124)..(125): n comprises a, c, g, or t, or includes no nucleotide
acgttggccaataagcacttggccatccggctctgggtgcacaaatggccaagtaccgcaatcccgggacctgtcgattgccaaatcactgggcaaacccattgaatgttggccctcgggctcnncacccatccttggctctgaagcagggtgatgaggtctggcttcagatcttctactcagagcagaatgggcttttctacgacccttactggaccgacagcctcttcacaggcttcctcatctatgctgaccaggacaaccctaatgaggtgtagacaggcaggtgttgggtctccagggagggaacaagctcctggacttccagaacaagactcatcaactctccgctgggtgggagtgggaacttccagccctggacattcctcctctgctcatttttccctccatcattaaatccaagctttttttattcaacctttcaaaaaaaaaaaaaaaaaaaaaaaaaaaaa

SEQ ID NO: 8898 - DNA, 622 bp, Canis familiaris
gagaagccctacggcttgccggggagtgcggccgggccttccgcacagcgtgcggccctgctggggcaccagcgcgtccacaccggcgagaagccctacgagtgcgaccagtgcgggaaggccttcagggtcagtgccaatctcaccggacacaagcgaaggcggcaccgggcacagagagcccaccgactggaggacggtggcacaggcctcccctcgtagctactgtttgaccggacactcgggggagccagcctgcccgcttcttcctgatgcctgacccctgactgaggtcctagagcctgaccttcctggtcagcattgtaggagtgcgtctactgcccaggccttgccaatcggtaatagtaatgctaaatagtgttttccacgtgccaaccgcccttctaagggctttgccattttaactcattcaatccataacatccctagaggatgaggacattaaggcaggaaaagatgagacccacgcagggtcacttgactagtaagttctgcacagatgcctgctgcacactcccttttgcaccacacctcttagcctacaactcatttcatggagcatgttttagttgataaaatattaatgatttgtaaaaaaaaa

SEQ ID NO: 8899 - DNA, 501 bp, Canis familiaris
ggtggtccgtccgtgcctcgtgggtgcttcgagccctacttcctgtgacccatcggccccgtgcctcgtcaggcgtgatgagggttttctgaggttcggagagagccgggaccgccccgtccagcctgcctgcccgttcggccctcctccccggggccctcaggacctcctcctcgagcagcctctgccggctcagctgcgcgggcccgcgggatggagcctggggggggggggggtgcacaccccggggcctcgggagcagctctgcggtgtgtgcgggacacaagcccccaccctgagccgggcggcctggccccgcaggtcccgagcatcgcaggcaccgggagggccgagcacagccagcccggcgtctcctgggcaagcccagcttcagcctgcggggaacgggcttggagccctaagcccggcgggcacgccccagggtgggctgggggagaacctaataaacgccctcgtaaaaatggaaaaaaaaaaaaaaaa

SEQ ID NO: 8900 - DNA, 608 bp, Canis familiaris
cgttctgtgtcctgcagcacttctgttcaccacgaataatgtcgttgcacaccagttctcgcagctgggctctaaggacctttgtgctggggctgacgcaggcgcctctcttggcgcatggtgtcccaggtgttggggaccactcgcagtgtacacacgttcatcgaggtgctgaggttgtcagccactgtcgcctcccctgccagctgcacctgtcctgggggtgccagctccacagagccctgcagctgcccgtccatgaagtcgcatacgtggaaggggccatcacatttcacatctggttctgggtcattaggctccagaatgtccctgatggacaggttgatgcacttgtagcggggtttccagaaccacagtcttgagagcttcctggccagcaagcagtagggctggaagctggtggagctccgcagactgtccacggggatgagcttgcctctgtggtccagctcccggatcacgctcttgatcactccctcaaaggcagatcccattgctcctgtgtggaggccgcgaggccaaggccgggccgcggctgctgatgctgggaggctgtcccgcctggggcctgtctcctcaggcacagt

SEQ ID NO: 8901 - DNA, 603 bp, Canis familiaris
ccctggtgagcccaacaggtaggtgccttcactcagagataggtttgtagaggggccgcatgtgtaggtgaactgggaggccctggccctgcccctcacaggtgagagccagcccttggggtggggttccagaggcaggaggcatgggcccaagtccagagggagcacccatcacagcgcagctcccgtctgctcacagttctgaaggtcagaagttcaggccttgtggctgggtcctccgttcaggatcatccaagtatctgccatgttaccttcctgacagctctggaaagaacccactcccagactcattctgattgttggcagagctgctgtcagcagaggccactcctagctcttagaggctacctgccttccttgcccgcggccccctccatttttcaagtcagcaacagagaatttctcacgcactgaatgcccttcctcttcttccaccaggccagagaaaactctctgcttctaatgagctctcatggttaggttaggccctcttggatactttccctatcataaggtcaaccgtgccatgtaagataacctaagcatgggagtaaaatccattagactcacaaaaaaaaaaaa

SEQ ID NO: 8902 - DNA, 381 bp, Canis familiaris
caagcagaaagcaagcccaggcagtatttggcggtggtcgtgtggtgtgtgcgtgtgcgtgtgcgcgtgtgcagttggaagcgctcggaggtggagagcagaaacaggagcccatctaggtgggaggagaggaaacatctggctggcgctggtcctctgtcaccacgactttctcttaccatcctctcctcccttcatctccgttttcgggctccaggctctggcctagcagccttcctgtgaactggagggaccagtgaattctttcctagcatttgaaatgcattctgtacagtccccatttcacccccatcctgcctaggccctagggctacagctgctgtggcctcttccaataaagtgaagttggagaaaaaaaaa

SEQ ID NO: 8903 - DNA, 590 bp, Canis familiaris
ggatcttggttcgctgttatttaatgatttgtcgctgaggccatagtcaatagggaaagctctggctgagatgcttgttgggtctgttgaagcctggggccaggcagccaaatctggcctgtgctgaggatgagaccctctgctttcacatctctgagctgcaccctcattactgaagatgcctttttgctttatagctttgctggagagcaattcattcttcccatgtctgaaaggtaatgttgcctggggcctaagcgtcctgctcctttgggcaccattggaatggagccatctgggaggtcagggacggggactgcctgaggagagctagccctagcctggcccctgcccagatgccattccatcactgatatttaagtgaaggggaggatccctagactatgttcttggctccagactcaaaaatccacaaaagccaaaccagctcatttcaacaaaggagcgctgatgtgaggggcaaggctgcctctgctccaggctcttcagaaagcatctgcatgtgaacaccatcatgcctctataaaggatccctattacaggaacagcatgagtggtggctaacctga

SEQ ID NO: 8904 - DNA, 531 bp, Canis familiaris
tcgtgcgcctctggactgcccgccctgccgcttgctgaccgactactcggggcccacacggccgaatgatcctggatctttgccctcatgctacagattgcctccctggtggtgatctacgtcaggagaccacaaagctcaaagtacttcttgtgtgcagagacctgaccgctaacggctgcagcctctgctttgagtgttgagggctagaagggagaccccgaccagcagaggcggtagggcccggggaggaggagggggccgcggactgtgttccaaccccttcagccgacttgccccctccgtcccgttctcttaagagacccatcccttggcccgcccaccccagccgctcacccagacctgcgggtccctcagaggggggtcaggcctctttctctttcacgcttcatttgctaggcgtgagctgcgggggtgtgtgtttgtatgtggggagtaggtgtttgaggttcccgttctttcccttcccaagtctctgggggtggaaaggaggaagagatacttagttac

SEQ ID NO: 8905 - DNA, 402 bp, Canis familiaris
gcacagccagccaggaccagcttcggtgcccagtcccgcagaacacatggcaaaaaatgtcacagccactacggagactgagcggtgcatcgagtctctgattgctgttttccagaagtttgctggaaaggagggtaacaactgcacactctccaagacagagttcctaaccttcatgaatacagaactggctgccttcacaaagaaccagaaggacactggtgtccttgaccgcatgatgaagaaactggacctcaactctgatgggcagctggatttccaagaatttcttaatcttattggttggcatggcacatagcattagccatgacatccttcacaagctctctcccatctctaccggaaggtaaatcggaggggttgcttggtggcgtgcctccc

SEQ ID NO: 8906 - DNA, 134 bp, Canis familiaris
ttaaagaattattgtacatgtgatttttttttcctgttcatacatttgtgctgcccgtgtactcttagcacatttcaataaaattgtttggaaaataaaaaaaaaaaaaaaaaaaaaaaaaaaaaaaaaaaaaa

SEQ ID NO: 8907 - DNA, 703 bp, Canis familiaris
ccatcttagagggttctttcttgaagccctttgctctggagtaacttctccagcttcagctcaaactcaacagcttctccaagcatcaccctgggaggtgttttgagacgttgttgtcataaatggagggccagtacattcctgttttgctccgaagtattcagtaccgctcagtattttaaatgaaatgaattatcactttgtgatttggtttgggatcaaatagggaagcacaggcatccacaccacatcatattacaacgattattgaagatgatgtattctcgagcaagtatgatagatagtgagaagtttacccccacacttttgcgttccacataacatggcgccgcgacatatatgtgatagagatgtggcgactatacccctgttgtatctcgtgtagaattatttaaaaatattcccacggggccaccccttttccaaaggattttagtaaggatcttaggaaatatcctttctttttatcctgttatttatcaatttttcccagtatttttatatggaaaaaattgtattgaagacatttagtatgcagttgataagaggaatttggtataattatggttggtgattattttttatactgtatgtgccaagctttactactgtggaaagacaactgtttaataaaagatttacattccaccaaaaaaaaaaaaaaaaaaaaaaaaaaaaaaaa

SEQ ID NO: 8908 - DNA, 637 bp, Canis familiaris
cctgaccatttcttccccagacctcacaccgtggactctaaacagcccccgttcatcagtcagaattgagagagagagataagctttttttttttcaattcccacttagaaagtggaaacagaggaattgcacagaggactgggggatccttgggcatcaagaggatgctagcacagcgggaacacagaggcagcaacggagtgtcttattgggggaccacagagcccatggcgacaggacacttctctcacgtgtacactctagagcaccccgcgccctcttctcacgcgccccgcacatctccacattctgccgcccacactcttttgtgaggggagtctacaacacgagagaggttttccggagactaaggaaaccaaccccccttctggccaccccttcaacttggccctgtatggtctattttctagaacactaggcttcttctttagcatagtcccccatgaagccggggccacaatgtctcagccgcctgcagtgacattgctggactccggaagaccattccacgggagaatgggttccccaggctcacagcgtagagacgttgagcccatggcaactgttttgactgctggcagtgcaaaacagtccaccccacgccactgccgcacg

SEQ ID NO: 8909 - DNA, 303 bp, Canis familiaris
accttttggacctacatgatgaatgcgcgatcccaaaatgttggttggcgccttgactacttcttgttgtctcactctctcttacctgcattgtgtgacagcaagatcgcgttccaaggccctgggcagtgacccctgtcctatcacctgtatacctagcgctgtgacatgctcccacaatgactggaagcctggggaataagtcccccctccccacagctagctttaaacttaacctccaccaacttctgttaaaaactgctctctagacaataatctgcactgtgatttcccttctaaaac

SEQ ID NO: 8910 - DNA, 289 bp, Canis familiaris
cgcggcgcagtccagcccggcttttggagaccgccgctgctaccagctgccaccgggagcgcggggcctggccctccgagcagtggcccgggacgtacgggaaggagccgacatgctcatggtgaagccgggaatgccctacctggacgttgtgcgggaggtcaaggacaagcaccctgagctccctcttgccgtgtaccacgtttccggagagtttgccatgctgtggcacggagcccgggccggggcgtttgatctcaaggctgctgttctggaggccatgaccgcc

SEQ ID NO: 8911 - DNA, 117 bp, Canis familiaris
taggcattcctgagaaattgaaagtggctacctttcatgtccaaaatgttgatctattataaataaaatgtttttgcataaaaaaaaaaaaaaaaaaaaaaaaaaaaaaaaaaaaaa

SEQ ID NO: 8912 - DNA, 487 bp, Canis familiaris
cgcaggttcacgacggttgggttctcaggacttctgacttccaatgtgtcccgtggccttcaacttaaggtggtttgtgaagctctgtgattctgacccccatcacggtgatgatcccagaagcagtctccaggaacaatcctaaatttatggagactgtggcagagaaggctcttcaggagtatcgcccaaagcaccgagaggaatgagatgtgaacattgcttctccaaatatgggagggctgagttcctttgaccccaagatgagtgctaggcccctagagagagctctgcatgtcaccaagtgaccaggccttgcctcgaggcgctcctgtctcctaacccagctttccttcctctggactccgcactgtaacgcctacgtttgctgatcatgggaagaactcctgtgtgccactaactcaataaaaccgccaaggaatctgaaaaaaaaaaaaaaaaaaaaaaaaaaaaaaaaaaaaaaaaa

SEQ ID NO: 8913 - DNA, 481 bp, Canis familiaris
tgtttcgtgtactttgaagatcacggactagtgacaagctctgctgaccatgctcattattttgtggaaaaatggagaaagagaatctggattacgcagtttaaaattatttcagaagttagaagagaatggtgacttatatcttgctgtctagttgaaggaatttggagtacatgtgcatgaaccttggacatcaaatatagggtaatattcaaatttgtaatgtattatttttttttaagattttatgtttgaggggatcactgggtggctcagcggtttagcgcctgcctttggcccaaggtgcgatcctggagtcccgggatcaagtcccccgtcgggctcctggtgtgcagcctgcttcttcctcctcctgtgtctctgcctctctctatgtctatcaataaaaataaataaatatttttaaaaaaaaaaaaaaaaaaaaaaaaaaaaaaaaaaaaaaaaaaaaaaaaaaaaaaaa

SEQ ID NO: 8914 - DNA, 706 bp, Canis familiaris
tcagttgtcatagtattccattttttgggtcacttattagtttcatgaatttcagattctgagggaaatgttttgtaaacattttactacgtttttttttaagataagatgaaaggcaggcctatttcatcacaagcacagacatagacacacagagacaaccaacttatgctttatttgtaaatttagtgttttctccatctctactgtcaaatgatgtgcaaagtcttctccttggttgaatggaagtcagccaacggattataactcgctgaagcttaacttaatattgcccccacagcatcggggcgtacaaacatcaatgaagtaattgtaatatcattgtatagcccacatgatgctcgatacattatcaactagtgtcagatattgctttactgctgaaatatgagtgtggtatatttaatgagccatgtagtagtagtatgtgtcgcagataatatcatgagccgccacattctgcgaagcccccaacacacttggagcacaatatttagagtttaagagtatatatagagttaccctcatgagtgaacacttctcttttccaggaataatttttcactttaagtcatgtgtatgttcctttttaatcatttgcatgttatgtttaacaagctcatagcaaaataaaacatagcaaatggcaaaaaaaaaaaaaaaaaaaaaaaaaaaaaaaaaaaaa

SEQ ID NO: 8915 - DNA, 651 bp, Canis familiaris
cagggtgtgacaacatgacctgcatcatcatgtgcttcaagcccccgaaacacagcagagcttcagccagagagtggcaagcggaaactggaggaggtgctttcttctgagggggctgaagaaaatggcaacagtgacattaagaagaaggccaagcgggactaacgggtggtctgtaatgccactgccctcacctagatctgttttttgagccctctggacgatgagaacgtgattatttgtcgttctttcctcctagcacgtctattcagcaggtgtattaatgatggtgcagcagggaggatgcgtggggtgtctattatttcacgccacctatttcccaagagaggggtctcttccctctcacacacacgcagctgtgggacgctctctgcgtgtcttccccacgctctcctcctgtgtctcctaggggctcatcacccggttctgtgccctgtgctctgttgtgttggagggaagactggcggttcttctggtttttactctgtgaactttatttaaggacattcttttttattggcggctccatggcccccagccgctcgcacccgctctctgttgtacactttcaatcaacactttttcagataaaggccaaacctaaaaaaaaaaaaaaaaaaaaaaaaaaaa

SEQ ID NO: 8916 - DNA, 201 bp, Canis familiaris
gatagggcactgagactctccatgaggttggaacggactctacctcgggggttggaggggggggtgtctccagccagcatccagcccctccctgcccccaggttggcggcagcaccgctgagaaagctgtatttccacccagttctgggtatatcagtgtgtcttgcagaatcttggatcattaaagataaacatattttt

SEQ ID NO: 8917 - DNA, 729 bp, Canis familiaris
tttcctcgccgtacatagatcttaagattttttctgccgttctctggatgctttatacaacattctttacctctggtctggagcctctttcttttctgtgtctttttctgttcttgttctttgttgttgttgtgtttccagtacggctcgcatgcaccagcgtagggccgtccatactctgatccctgcagtgtcaatgagtgcactactgcatgttatgcctaatctggggccgaaaccaagccaacccactcagtgtagtgtttctatatcctattttcttctcctccttcatgctagtttgtctcgcccaccctcgttatgcactccccttgcccccctcatgaatacccatccttcacaaccaactctgtttctaggaggatctggtggtggggattataccccttgtagcacgagacacttctccacagcacagggggtatttaagaagagcgccacaaatcttccgatggtgtataaatataatatcccagaagaaggaaaaattcagccataagggaataataagtcgaatattattgtgataaatggtgacaagtggtgactacacttatcatggtgggccctgagtaatgtatagaattgttgaaccactgtattgtatacttgaaacttgcataaacttgtatgtcaaccttacttcaataataaatattttataaaaaaaaaaaaaaaaaaaaaaaaaaaaaaaaaaaaaaaaaaaaa

SEQ ID NO: 8918 - DNA, 638 bp, Canis familiaris
tgcttccaggctcccaaccgtccttggcctggcctgctgctccatggcactcccaccccccccgttctgcaagttcatggcctggcccgtccatccaagcccctttcctctactggcctccagaccaggatcttcctccctggcgtcgctctctctcccggtccctctccacgtgtccgtctcatcctccctctcctctctcacatatcccagactgggtccgctgtgctgtggcgcgggggccctcttggtcacgacgcccgctatcaccacgagcacagacccccgggggcagaggaggcacacgcgtcgccccacagagctgggcagattctggagagaaggccagccggggggagaggaggcaccccggaaggcactcggcaactccaaaggggagcatgggccccgggaaaggggcccagcctcccactggagccccagccagctttcatcgtccccctctccccacgagatggctagctctcccctcccttcgccttctggcccctggtatggtgggggtttctaacgatcacacccagcttgaggaggggctgcttctgaggtcggttgttgtctttcaattaaagaaacactgtgcaataaaaaaaaaaaaaaaaaaaaaaaaaaaaaag

SEQ ID NO: 8919 - DNA, 515 bp, Canis familiaris
attccgcccaggccgctgtggggctggatcacccacacgcctgtacgggctttctccccgtcctaagctgttctcttgggaaacagcaaggactgtggagactcgttttctgacacacgagaggccacaggtctaagagcacaggtgtagagaaaattgttataaaatagagaaaaagtggtgcttggtgaaattggttttgttttgttttgttttggttttcaacaatttggaataagctgtcaacacaagaaggttctttccctcaagtttccagcatgttcttcgtgtgtctccctttctcacgtttttcctcctattaatcaagagaaacttcaaagtccatgggatggtcggatctcacaggctgagaactcgttcacctccaagcatttcatgaaaaagctgcttcttattaatcgtgcaaactcttgccacgatgtggggagtttgacaaatctttcaaaataaaaagtaatgacttaaaaaaaaaaaaaaaaaaaaaaaaaaaaaag

SEQ ID NO: 8920 - DNA, 100 bp, Canis familiaris
gcttgtattttcagtattttctacataatatggtaaaatgtagagccattgcaatgcatcaataaaatgggtaaattttctgattaaaaaaaaaaaaaaa

SEQ ID NO: 8921 - DNA, 125 bp, Canis familiaris
cttgcgaggcttctgggctcttctgggctcccccaggaggctgggagccccctgcagggtagacattcccttaccctgttttcctcaggcctactgggccaagcaagggtgggtggtggcaataa

SEQ ID NO: 8922 - DNA, 561 bp, Canis familiaris
atagtgaagtaacgttacaaagtattctgcctatcagtcctgcgctaatgttcggggtcattttacactatccacgctaattattacccaagtacatatatgattaatctttccggcctgacccctagccatgatatgattcatctctaccctagcagtaactaatcgagcccccttcgacttaactgaaggagaatccgaactagtctctggatttaacgtagagtatgcagcaggtccttttgccctattctttgctagcagagtacgccaatattattattattacatcctcaccaccattcttattcttcggcgcattcccccaccccttcatacccggactttacttctaatgacttcaactatgaacccctcttattaaccatctgcttcctatgaattcgagcatcataccctcgattccgctacgatcaattaatacacttattatgaaaaaattttctacccttaactttagccctatgcatatgacatgttgccttacccattatcaccgcaagtatcccaccccaaacataaaaaaaaaaaaaaaaaaaa

SEQ ID NO: 8923 - DNA, 366 bp, Canis familiaris
  misc_feature (345)..(345): n comprises a, c, g, or t, or includes no nucleotide
agacagtgagagaagtgttgctaattttaagtggtgttcttatgacatggattagaaagtaacttctaaaggacaacttttatggaaaaaaataagctgttaaaaaaaaaaggaaatgtagattaattggggaaatgggcgattgatggagaccgtttccctaacacactacatcatttatgtgctagtacttaactttttaagaaaatgtacttctacgttttgtactctgacatatgtgtgtttattttttaattgagaatgctgtgcctccagaggcagcagccaaatcatcctatcaaccatttacctgagttggtactgtttactttctgatcgataganataatacattgattcaaaaaa

SEQ ID NO: 8924 - DNA, 283 bp, Canis familiaris
gaaaggtcagaacctagcctgagagtgatttgttaaacccagcttgtattaataagaatgaacctttctcaagcacctgccatgtgccaggcactgagctagacactttatatataggttggtgctttgcgacatttaagaccagaggaaagtaggggagaattaaggataacccctggggactggggaacgtggctcaaaataaacccaacccaagtgtgacattccaaaaaaaaaaaaaaaaaaaaaaaaaaaaaaaaaaaaaaaaaaaaaaaaaaaaaaa

SEQ ID NO: 8925 - DNA, 608 bp, Canis familiaris
agcccggcgtgccgaaggttccgagcacaggcgtgaccagcatccgcgagcccttctgccggctgctggagcaggcccgcgagcgcaacgcccaaaggtggcgccctggccacagcagccgcttgctcgagcggccagacgccctgggccagcagctgcgcgggcaagctggaggagatgagcagccgggcccgcggccacctggaggagatgcgcgagcagatacaggaggtccgggtgaagatggaggagcaggccgaccagatacgccaaaaggccgaggccttccaggcgcgcctcaagagctggttcgagcccctgctggaagacagggcagcgccagtgggaacgggctggtggagaaggtgcaggcggaccgtggccaccatccccacctctaagcctgtggaggaaccatgagcgccccgcatgccacctgctgggccccccccaacatccttctccgtgccaccccgcctgctctccacacgggccttcagagaggcctgcccctgccccccaactttccctcctgaaagggccctagcttaataaagattcaccaagctccacagcaaaaaaaaaaaaaaaaaaaaaaaaaaaaaaaa

SEQ ID NO: 8926 - DNA, 112 bp, Canis familiaris
tacttaaattttgtgaccatagaggatttaaaaaaaaatcctgttagaagcaatgtaaatgtgaggggatagaaataaaatggtggttcagtgaaaaaaaaaaaaaaaaaaa

SEQ ID NO: 8927 - DNA, 749 bp, Canis familiaris
agtgtgacaaagatgccctggagcgcttgaagtaatgtgtgaggacgcctctgcagttacctctccggggagaatgctgcagagattctcatcctggctgacctccacagcccgatcagttgaaaactcagcggtggatttcatcgactatcatgcttcggatgtcttggagacctccgggtggaagtcaatggtggtgtcacatccccacttggtggctgaagcataccgctctctggcttcagcacagtgcccctctttctgggaccacccactgcaagcgcctcgatagcaatccttaagatcttcgcctcgtcgttaagagctccgcgtatattctccgaagctaccacagcacagtgtgcgttgtccacatgagcccacacagggtgatgagcagcgccgacatattgtgtgagacggtcttcaatcttctgtgtggtggggccaaagagcatcgtgtttgctgggcgcccccagacttttacaaccagcattaaataaacttgggggaatgtggggggagggaagggcccgggacctggggctgctcaacctaatgaaaaccctgttgctgcgtcactgtgttccctttggcctggccaagtttgatactgtggggattcagtttaggcgccggccctgaggacatcccagcggtggtacttcggagaaacctgtctgcatctgactgagcagagcaaatcgtcaggtgcctggagcaaaaaggaaaaaaaaaaaaaaaaaaa

SEQ ID NO: 8928 - DNA, 103 bp, Canis familiaris
  misc_feature (1)..(1): n comprises a, c, g, or t, or includes no nucleotide
nagttatataatgctgaaggggaccactctttcgttgaaaggtgataaaagttaaataaaaaaaaaaaaaaaaaaaaaaaaaaaaaaaaaaaaaaaaaaaaaa

SEQ ID NO: 8929 - DNA, 585 bp, Canis familiaris
gtcacttggcccagagccggtggctaaaccacgcccccccaacaggccctgccgtttactatagcatcagaaactgtcaacatctctcccccttccggagagcagggcttgcactcttcccctagaacctactttgaaggcacattagaagcttttgttttcagtttccccctggtattgtcttgccaggatggttaggtacacaaggacgcttattagatcactgagaagaaaaagcccaacccgcttctctggtatgaacatctagtttgagagcaagccaaacagtaggcttgtattagtgctttaatggagtactggtaacatttttctttcttgataggaatctgcttatatttagccaggcttctatttcataccctctcccactacaaactttccgtgcagttacctttcatttttaaagcaatttcactgctaaatataaattgtatttgtggggttcatagttatataatgctgaagggaaccactctttcgttgaaaggtgataaaagttaaataaagactgtctccacagtaaaaaaaaaaaaaaaaaaaaaaaaaaaaaaaaaaaaaaaaaaa

SEQ ID NO: 8930 - DNA, 665 bp, Canis familiaris
ggtaacattgacgactcgctcattggtggaaatgcctccgcgaaggcccggagggcgaaggtaccgaaagcacagtaatcaccggtgtttgatatggtcatgaaccatgcacttgcaggaaaccagcttcacaaaagtagcctacaagaagtacatcaaagattacatgaaatcaatcaaaggcaaacttgaagaacagaggccagaaagagtaaagccctttatgacaggggctgcagaacaaatcaagcacatccttgctaatttcaaaaactaccagttctttattggtgaaaacatgaatccagatggcatggttgcaacttcctggactaaccgtgaaggaacggtgtgaacccccttaataatgaatttttcctttaaaggaatggtttaaggaaatgggaaaaaattgtttaacgaacttggctgttaactttggatgtatcacctgttgtcctaactggctgctgctcttcatccacacaacaccaggacttagacaacatgggactgatagtcatctctgagctccttaatttgaccctgaattaattgggaaccggaggccaatggttttttaaagaaaaaaaacatgtcatgtaggttgtctaaaaataaaatgcatttaaactcaaaaaaaaaaaaaaaaaaaaaaaaaaaaa

SEQ ID NO: 8931 - DNA, 580 bp, Canis familiaris
agctgaacccggcatttcagctcaaggctgtgaagtcgctccacaggccccggggagcagctcggaatgcactctggcacacaggggacacagcatcacaggtgcggctgctgtggaaggacccccggcaacgtggtttggaaggacaagacatcctaccgctggttcctgcagcatcggccccaagtgggctacatcagagtgcggttctacgagggtcctgagctggtggccgacacgcaacagtggtctctggacacacaccactagtcggggtgtgccccctgggggtctctttgcgtttttcccaggggaaaattaattggggccaattggcggtaaccgggggcaatggaccacccatacccagaaggactacgagactcagaggcttctgcaggcctagggatgggggtggggacccattgctggaagatggcaccatcgtggctaccctcactgcaacaaacagggagcttggcacccggctccaagaggtagctgccctagaggggctcagaaaggacaaaataaagtgtgtgtggtggaaaaaaaaaaaaaaaaaaaaaaaaaaaaaaaa

SEQ ID NO: 8932 - DNA, 650 bp, Canis familiaris
cccgtgctgtccaacggaccaggttcaaggcattcgtgccatcggagattacaacggacacgtgggtctgggcgtcaagtgctccaaggaggtagccaactgccatccgtggggccatcatgcctggccaagctttccattgtccccgtgcgacgaggctactgggggaacaagatcggcaagccccacactgtcccatgcaaggtgactggtcgctgtggttctgttgctggtgcgtctctatccctgcccccgagaggcacctggcatctgtcttcggcgcccctcgtgccgcacacgaagacatgactgatgatggtcgtggtgattgtacggccgtgcttatacattcgggcagcggggtgtcactgcgcacccctgggggaaatcttgcgcacagagcgtatcatctttgtagagtcgcgtattctttagagcacctcaacagctatttcacccctgatctctggaaagagactgtgttcaccaagtctccctatcaggaattcactgaccatcttgtaaagacccacaccagagtctccgtgcagaggacccaggctccagctgtggccaccacatagttttatacaagaaaaataaaagtgaattaaagcttgttaaaaaaaaaaaaaaaaaaaaaaaaaaaa

SEQ ID NO: 8933 - DNA, 602 bp, Canis familiaris
ttcatgatatggttttgatttatcaggtttatgattttactattttgtcagtgttttctgaagcctaagttttaggtcttgacatcttttttcttgatgcgggcttggtatacatggcataatattgctggtaaatgcttgtgtatatcagagtgatttattttggctctgaagaacacattatatgattcttatatagcagagtttagcctaaggaaaagaaattttttgagatttaaatcacctcatggtaggagttagggggatgaataagcaagacacacaggatttttagggcagtgaaaatattcatactgtaggtgatactataatggtgaatacatgtcattatacatttctccaaactcgtagactgtacaacaccaagagtgaacctgcggtaaaactgtggagttttgagttatttaatgtgttaaagttaggttccattggattggaaaccaaatgccacccctcttggtggagaattgtttgataaacgagagatgattgtgcatagatagtggcaggaggcatttggggaatttctctaccttcctctcaattttgctgtgaatctaaaaccattctaaaaaaaaaaa

SEQ ID NO: 8934 - DNA, 663 bp, Canis familiaris
cagagaagagagccccaggggaccacagtttagtgtcacttgcccagagctggtgggctaaagccacgccccccacaggcctccctgtactatagcatcagaaactgtcacatcgtctccccttccggagagtcagggcttgcactcttcccctagaacctactttgaaggcaattagaagctttgttttcaatattcccccctgggtattgtctttgtcacggatggtttaggtgacaccacagagacagcctctatatagagtctcctcgtagagagagtaaagcccaacacccgttttttcgtggttagtgacactatttgagttgggaggaccaacccaaaccgagtgaggcttgtaattaagtgctttaaatggaggtacgggtaacatttgttctttcttgataggaatctgcttatatttagccaggcttctatttcataccctctcccactacaaactttccgtgcagttacctttcatttttaaagcaatttcactgctaaatataaattgtatttgtggggttcatagttatataatgctgaagggaaccactctttcgttgaaaggtgataaaagttaaataaagactgtctccaccagtaaaaaaaaaaaaaaaaaaaaaaaaaaaaaaaaaaaaaaaaaaaaaaaaaaaa

SEQ ID NO: 8935 - DNA, 703 bp, Canis familiaris
  misc_feature (43)..(43): n comprises a, c, g, or t, or includes no nucleotide
ctgccacaaagacactgctacggaattactgttttgggcccanaggggagtgaacactggagccgtgggcagctacaatgctacggacagagaccccccgaggggcaaaagctcaagccactaagggacgagggcccacgtccagcctcccgccaggcacatgctccgggagccacagcatgctcgggcccccgggggcaagcacagctgcccaagcaccaggcgcacaggcaacagtcgctcgctcgtcgctaggacgccagcggcgccggctggccccgcggtggtcgggcacgcctgctccacagccctgttgcgtttgtcgccgccccctctgcccctctttgtgtgctctctactagtggtcttgtgcgccccatctctcttgttgtgttcttctgtggtgcccccgttgtttggcgccctgggccccgcgtgtggttttccctggggtggcccacccaacaattccccttttcgcgggccccaaaggccttgccccaacagtattacttctgcttcccttgccagtgacggccacagccacgctcttcacggtgttcccaggggggcactgagggcgtccctgtcaggagccctccgcccacctcccgcaccgccttgcaaacgcttgtctgacacgcggctcacatttaccgctgagatttgctgtcaataaaaggtttgaggatcgggaaaaaaa

SEQ ID NO: 8936 - DNA, 422 bp, Canis familiaris
  misc_feature (53)..(53): n comprises a, c, g, or t, or includes no nucleotide
taataagttcacagtaaggccttcacaaggagacccctctccaacgcgttttngggtgtcctctggggcacagagtttcctctttgttcacaaaataacgctgtttaattttttgtggccaccttttgccggattcaatggggaattggaaaggagggaaccagcttgggaaggacctggaactccacctttaccgggacctgtctgtccccttacaaccaaactgggtggtcctgacccgactggcctaccagcataatcagtggaagctcatttggggagaaaccggctttaactgtttaaaagtcactgcttcactctcttaattcaacaaggaaaggaatgactatgccaataaaacgttttctccccttaaaaaaaaaaaaaaaaaaaaaaaaaaaaaaaaaaaaaaaaaaaaaaaa

SEQ ID NO: 8937 - DNA, 521 bp, Canis familiaris
ccgtgcccagccaccgcgtccttcggcgtcccttgcgcatctagcctcctctcccctcgtggggttcttggaggacggactgggcccatctctggggctcttacctcctgggctgtcttgggccttgtttgggacccctgtgcagggtcacagcacgtgcacggtggcaggtgcaagcatcctgcctgcccaagtcctgtgctgtcgggttgcctctgggtcttgtgttgtgcgctgggacggctctgacacaccgtggctgctggcgggccccgcccgccccttccccgtccctccccgttccctccccggcttcctgccatccacccggttgcaggggagttgcctggccaccagtgctgcgggtctgctgttatggcagctgcaggaccccctcccagctattccccagctgctccccagctcccgactcgcccgccacctgcctgctcaccaataaagaaagcctgacccgtaaaaaaaaaaaaaaaaaaaaaaaaaaaaaaaaaaaaaaaaaaaaa

SEQ ID NO: 8938 - DNA, 563 bp, Canis familiaris
gacctcgcgcctccccatcattgacattgcgcccatggacataggagggcccgagcaggaatttggtgtggacatcgggcctgtctgcttcttgtaaaaacccgaacccacatactacacaatccattgccaatccagaggacccaagtactttccagtcccagtcactctagggctctgcactgaatggctgacctgacctgatgtccattcatcccacccgctcacagtgtggacttttctcccctctttctaagagaccatcgaagctgggcagcactgcagcaatataatatcggtggttctatatatatatagtcttctctgtaagacactttggggtcgagagcacgagagccgaggaaatataatgtgtttggagattcaaaggcccctggagtgactgtccccagcccaggcaagaagatctcccttcaggtgccgggcgcaggaactgcgtgtgtcctacacaatggtgctattctgtgtcaaacacctctgtattttttaaaacatcaattgatattaaaaacaaaaaaattattggaaagtacaaaaaaaaa

SEQ ID NO: 8939 - DNA, 644 bp, Canis familiaris
agctctgagccccatcttgtctgcacaacaactacaactacatccttcaaggccctggagaaagtctgagcttgatcccagctggtggcgtgacccaggaagactgctgagcgctcctaccggggagcacattgagcagcagatccagacctaccagcgggagctggtttaaaggtgactgactacatttctgagaagaatctaccggtattccacacccggagtcaagctgagggacaagggagcgacagatgatcaaagagcgtttcaagggtttcaatgatggccttgaagaattgtgcaagatccagaaggcctgggctattcctgacatggagcagagagacaagattcgccaagctcagaaaacatcgtcagggagacgtacggggcctttctgcacaggtatggcagcgtgccgttcaccaagaaccctgagaagtacatcaagtaccgcgtggagcaggtgggcgacatgatcgatcgcctctttgacacctctgcctgagcctgctgctctccctgcctggtactgcccggtcagccctgttattggacagataaaccagtgttaactctgggaaaaaaaaaaaaaaaaaagaaaaaaaaaaaaaaaaaaaaaaaaaaaaaaaaaaaaaaaaaaa

SEQ ID NO: 8940 - DNA, 624 bp, Canis familiaris
  misc_feature (479)..(479): n comprises a, c, g, or t, or includes no nucleotide
agcgcccgccacccactctgccagcccccgggccctcacctgctgatttggactgtgtcctgagccccagctataggcaggcccctgttacaactggtcagaccacgcacagccctgccctgccctgccctgccctgccgactgcaaggcctccatctgcccagagacctacgctgccacttcaccaccgtccaccacattccagcgacagaacacagcctttgaaaataaggaccaacctagaagatgcctgagttggctctatgtccttggacattgatttggacagctcaccagcccctgaaggggccagtctttcaacctggttagttccctgcctactcccagggtcctccccttccccaccagattgctgcaggggcctagtgcgcctggcagccaattgttgacatttcttttctcctatgcaccagcttttgcacagctgtcctttttctttccaactgcagcagtcccancagatgtgtgcatttggacagaaatactaaaaacaaaacaacaaacaaaaacaggcactcagcccagctcctcaataccacctggaaaaaagcatttacgttcttttcaataaatatcagcactacaaaaataaaaaaaaaaaaa

SEQ ID NO: 8941 - DNA, 563 bp, Canis familiaris
ctccggagccattgacctcatcaacaacctgctgcaggtgaagatgcgcaagcgctacagtgtggacaagtctctcagccaacccctggttacaggagtaccagacgtggttggacctccgagagctggaggggaagatgggcgagaggtacatcacccacgagagtgacgacgcgcgctgggagcagttcgtggcagaacacccgctgcccggacctgggctgcccgccgatggggacttgggtggggccctcccgccgcaggaccatgagatgcaggggctggccgagcgcatcagcgtcctctgaggccccgtcctcccgcctcggctgcccggtgatgctgtcctctggtccccggagagcggccctccacaccatctcagcaaggaactgttctacacagaaggggcttcctgccccgaatggatgggacacgccccgggagaggagcagggcgggggtcagtggcgggtcagcgatagttatttccacccgaattccccagcaattaaaaaggactcatctctggaaaaaaaaaaaaaaaaaaaaaaaaaaaaaaaa

SEQ ID NO: 8942 - DNA, 654 bp, Canis familiaris
  misc_feature (41)..(41): n comprises a, c, g, or t, or includes no nucleotide
aggtgacaaagtacgttatgataagcgcattttccaagccnaaactttagtgagtagcttgtttccattttttgcaacttctctgtgatgtctggattattagaagacattggattcacatctctgcccctgcattacttttacctatgttttagttaaagtgtgtgaaggagattgggcttcacacagataattcgaaaagggagatgtattttcaggtaatttttgatgtcctttggtactatgcccaaattcaagtggtagtttttttaaccagtataacactttgaaagcatataaatctctttttaaaaattaaatcaacttaaaatccattcataaacggaccattgatttttgacttaaaataccaaagccgtttggtggagaaagtatagtttcaacaatggtgctggaataattgactagccataggccaaaaaaaaaaaaaaaaaaaattgagccataccttgcaccatataccaaaattaaaagggatgttaaatgtaaatgaaaaacctgtgaaacttttagaagaaactctaggagaaaaccttcgtgatgttgggttaggctaagatttcaacactaaaagtatgatctgaaataagtagttgataaattagatggcatcaaattcacaacttaaaaaac

SEQ ID NO: 8943 - DNA, 646 bp, Canis familiaris
acactcacagtgctttgctgcctggtatggccactgcccaggcttcaagttggtcagccctggaattcagaggatgcaaaggacttattaaatcaccattcgggataataatccagtggtggtgctagagaacgaactgatgtatggagttccttttgaatttccctccgaagctcagtcaaaagattttctgattcccacttggaaaagcccaaatagaaaggcacaggtacacacataactgtagttgctcattcaagacctgtgggcccctgcttagaagctgcaacagtgttatcccaagagggtattgaatgtgaggtgataaatatgcgaaccatcagacccatggacattgaaaccatagaagccagtgtcatgaagacccatcatctcataactgtggaaggaggctggccacacgtttggagtaggagctgaaatttgtgccaggattatggaaggccctgcattccatttcctggatgctcctgcagttcgtgtcactggtgctgatgtccctatgccttatgcaagattctagaagacaactctgtacctcaagttaaagacatcatatttgcgaataaagaaaacattaaatatctaaaaaaaaaaaaaaaaaaaaaaaaaaaaaaaaaaaaaa

SEQ ID NO: 8944 - DNA, 624 bp, Canis familiaris
  misc_feature (1)..(1): n comprises a, c, g, or t, or includes no nucleotide
nttatttgaaagtgattttgtgctgagcccatagttcatagttgaaagctctggctggagatgcttgttgggtctgtgaagcctgggccaggcagccaaatctggcctgtgctgaggatgaaaccctcgtgctttcacatctttccctgagctgcaccctcattactgaagatgccttttgctttatagctttttgctggagagccattcattcttcccatgtctgaaaggtaatgttgccttggggcctaagcgtcctgctcctttgggcaccattggaatggagccatctgggagttcagggacggggactgcctgaggagagctagccctagcctggcccctgcccagatgccattccatcactgatatttaagtgaaggggaggatccctagacttatgttcttggctccagactcaaaaatccacataagcccaaccagctcatttctacaacaggagcgctgatattaaggggcccaaggcctcccttcttgccttcccaggcttcttccagaaagcatctgcatgtgaacaccatcatgcctctataaaggatccctattacaggaacagcatgagtggtggctaacctgacccataaagttattttatgattgcaa

SEQ ID NO: 8945 - DNA, 693 bp, Canis familiaris
  misc_feature (1)..(1): n comprises a, c, g, or t, or includes no nucleotide
ncacagcccctggcacctgtccggggcgcacgttcctccttcgtcgtgtgcttcccgctcccaaccgtccttgacctggcctgctgctcctggcctcccaccccccccccttgtgcgagttcatggcctggcccgtccatccaagcccctttcctctactggcctccagaccaggatcttcctccctggctcgctctctctccctgtccctctccacgtgtccgtctcatcctccctctcctctcctcacatctcccagctgggtccgctgtctgtggcgcggggcctctgctcagcccctacccaggcaagccccggggcagagggcagctgccccccagcctggaccgtcctggaggaggtcagcaggtggagacgatgccccctgcatgcactccgcactcccaaggggagcacttggccccggaaagggcccaagcctcccacctggagccccagccagctttcatcgtccccctctccccaccgagatggctagctctcccctcccttcgccttctggcccctggtatggtgggggtttctaacgatcacaccccgcttgaggaggggctgcttctgaggtcggttgttgtctttccaattaaagaaaccctgtgccataaaaaaaaaaaaaaaaaaaaaaaaaaaaaaaaaaaaaaaaaaaaaaaaaaaaaaaaaaaaaaaaaaaaa

SEQ ID NO: 8946 - DNA, 432 bp, Canis familiaris
tctcctctcggcaggcccacagctgggaatatggaatgccctccaccaggggatggggtgggcctgacacagtgtgacagcgtctgtagtggaaatttgtatatagtatccggttccatttggatactctatcaggatgaatgtatagatgaagtaaggaatcttgttccgtctgaaacccccatcgccccctttccctcccttttttttttacttaaacatttttatgataatttagatggaagttgtttgtcagttaatgttggttccagtccttcaaactgttcatatctgctttataacattcattgtactaacccttcaggttggggtggggggctggtgacagtttagttatgtcctcaagataaagtcttagtgaaaaaaatgaataaatgttctttagttataaaaaaaaaaaaaaaaaaaaaa

SEQ ID NO: 8947 - DNA, 655 bp, Canis familiaris
  misc_feature (292)..(292): n comprises a, c, g, or t, or includes no nucleotide
ccaatggtgccattttgcattggagtcttccagaaggctgaggtgaactgttagctttgggctggtgcttgaaagaccattggggtgcttgaaagaagcttttcaagtagaaaaagtgtatttgaacatgtaattgatacatagaagcttttgctttccttgtccctcttgtggtagtagcaggggtgaattttgtgatgaccattatctctaaaaacctatccctacctgctcccatagagaattttgtagaatatagtttattatttaatgtagtctttctaccaaccanccagccccagccggaagcttggcataggaaccagaccagctattctaccactgaaatcttattcttttgatttgtcctgaagatatgtttccaagtatccctttaaaaaattggttttaaaaggccttaccagatttttcccataatagatcattttaatgattaaatgtgatccttttgacaggggacagatcaatggattctcaaagattagcaaggggttggttaccaaggggcatgagggagctttgaggaaatgttccatatcttgtctatggtagtgatggcatttgtcaaatttgggggtgagttttgccacatgtaaattacacttcaataaattgtgacttttaaaaaaaaaaa

SEQ ID NO: 8948 - DNA, 645 bp, Canis familiaris
ctccctcatgctgtagttggggcgtgacccggcgcctcgcgccttctagttatttcccctggggtctggggaagccctaagccccagtgagggatgcctcagttccctccggaggttagctcctggccgtccccctgtcggccccttgccccaccccacctccgttactttttttttcttttgcgggagaagaagcttgtaaatgttttgtagctgccagcagctgttgtcctgtggaaacctggggtgccggcctgtacagatcctgttcttggggggctgcatagcccccttgctttgtgttaatggggacttcccctttgtgccctgcgtgcacccctccccagttcaggggtctctaggggcagcggccatgttctccccctggggggggtgccctgtgcccccagtcctagggactccgtgcctggaaccctgcctcatcttctgttcctgccagaccctgtgggtcaccctcccacccctggttcctggaagcttctgctctgccagaccaggatgatggggggtgggcccttcctattgggctggattgtacatatgttaatagcgcaacccacgccacatttttataattgtgattaaactttattgtacaaaaaaaaaaaaaaaaaaaaaaaaaaa

SEQ ID NO: 8949 - DNA, 383 bp, Canis familiaris
aatatctcctggaagtttgatatggtaagtctctgctacttcaggatattttgtctagatacagtactttcttccctgatagatgcatcattgcagccctgggaaaggaggaggaagtcgaaagtttgtggaatagaagacgggcttggttgagctcataatattttttgtagagtttttcctggctgtggaaaaactcaggctggtaagcactttctctgtttaaagtcctacaaggccatttgaaataattcattcttcttacccaacttctaagtgctctttttctcaccaagcctaatataattgagggaaatgtcggggtgctggcttaaggctgcacactgacatctggatcatgttcaaagccttattaacattgt

SEQ ID NO: 8950 - DNA, 538 bp, Canis familiaris
tgtgatatttctttgagttgtcatttcattactccattaccattatttttaggaataaatggaagattttatgaatattctatttccccacgagatctcaagtttagtatttttgcattttgaccattgtcaagactaggactccaagctaggacatgactatatttcctataaaactgaaagctttgtttcataaattttaaaataattatttttgattatgaaccgtagtcccaatttaataattgacataattcataacagcttgctataaaaacgatagtttactagtctttctgttatttaaagaataaaatacgcttataaaagccttttaaccaactgctgcctttttaaaatacttaacttgcacaccaaatataacacataaagtcagtaatagtccttgtaatcctatgggaatcggttgtttattgtctatgtaccattttgctaccagttacattgaatcgcttaaaataaataataaaaattatttctggtggtgaaaaccccaaaaaaaaaaaaaaaaaaaaaa

SEQ ID NO: 8951 - DNA, 547 bp, Canis familiaris
  misc_feature (394)..(394): n comprises a, c, g, or t, or includes no nucleotide
  misc_feature (422)..(422): n comprises a, c, g, or t, or includes no nucleotide
gctgatatggattaccccaggctggcaccttagtgtttgtctcctggtctaccccaaaggaataagattcactaccatagttttacccctaagtaataaacttttaaaatctgatgactataaccttattttaaatgtgggagtttaggggaggtggatgtccacaatccccaagttggctcttgggacttgtgaaggagggtaagaacttaaagaccaggtcatgctttgaggggaggggcttcatagattctcccaggctctcacctttccccttagcccgtctgctgtcctgagacccagaagtgatggagagaaaccaaccagagaaaaccctatctggaaggaatgtatttgttgctaaattttgtagcacctgtttacacgttttccntccatgttatttatgaattttatattcncgtgaatgtatattgtctgtaatgttgcataatgttcactttttatagtgtgtcctttattctaaacagtaaaatggttttatttctatcaccaaaaaaaaaaaaaaaaaaaaaaaaaaaaaagg

SEQ ID NO: 8952 - DNA, 440 bp, Canis familiaris
ctgcttaatggaaacctgctggtgaatgtccccccatctgccagtgatcgacacagctctttgtaagagagaaggcagctgaatccgcccaagggacggtgttaggagaaggggtgggggcagatgctgtgggcaacccccctccctaccccccgccctatcacttcaccttgaggatccttttgccaaatttgttgaatgctggggacctccaggtcccacccccaccccaccctgacccccggccatatccccgtatcatgcctttgctcatcagcaccttggcagcctcccagagagggagaaacccagcctggggtccccgtctcctgtgcctgcccgccagccctcaggccccccggcctgtttgcacactctcgcgtgttaactgcattccaaccactaataaagtgcctattgtacagaaaaaaaaaaaaaaa

SEQ ID NO: 8953 - DNA, 649 bp, Canis familiaris
ttctcttctttggttttttgtctactctaagttccagtggtttgaaaccatttgttaacatgaccaacttaaaagtgatctgcttccattttcagctttctccagttaatgtaattaaggtctatatagacacatttggtgagagaatcccaggacaatgtttggggctaatggaatgaaacctcccttataattctttctttggaaagtagcaatcctcacaatctgccatgtcctaaaatgtaatggattatctctaaggggttgatagaaatatttagatgtaccctatttatagccaggtattttaatttacttaatggaaatcaagtgaataacacggcaacatagttcaagatattttattctaatacctaaataaaaagtttacttgagtggttgaagacatttgcatgaaattgcacctagtgcagtacttgatatttataattctacccacaacggttgtattgcattttccttttttttccattctttggcgccccctttagaaatgccctgaagtctcccattttttgcccatttcagccatgggacttttttcatattaatgtaaagatgtttgtgttactgtttataaattacacttgtaaataaaccagtacatttgctcagaaaaaaaaaaaaa

SEQ ID NO: 8954 - DNA, 605 bp, Canis familiaris
ctcacagagaaggaccctactgcggaactggttccttgctggaggaagaggctgaagtcatcaaccagaagctggcctcggaccccgccctgcgtgggaagctggcccgcctctccgccggctccttcgcccgcctggtggagctgttctctagccgggaggacagccctctgcccagccgtccacgcccctccttgccctgcccagggcctccaccgccttccccggagcccctggcccgcctggccctggccatggagctgagccgccgcgtggctgggctggggggcaccctggccggactcagcgtggagcacgtgcacagcttcgggccctggatccaggcacacgggggctgggagggcatcctggccatttcacctgtggacttgaacttacccctggactgagatcttcctcagaagccgctacaagattagacctcatgtctctacattctttgtgtgcttttccaagccttcctttctctactcagggttttggggtggtggctgccctccctgtgtttgccaaaaagaaactgtttaaatttttttcatattaaaactttttcaagtaaaaaaaaaaaaaaaaaaaaaaaaaaa

SEQ ID NO: 8955 - DNA, 267 bp, Canis familiaris
gaataacagaactttcttagttgatgaagacttaaacatctgcctgaggttaggaggccatttgcctgccttgtaccaaagctcaggtgaaagactgagatgaatgtctttcctctctctatctcccacaagacttcctcctggaaaactctttggtagatttggccaggagcttacctttatgtaaattggaggaatacatgcaccatacactatccacagatatagctaagtagatttgggtagagagtactatttccaagtagg

SEQ ID NO: 8956 - DNA, 463 bp, Canis familiaris
gtctggcttctgtgtatataacccgaaccctctgttctgacacgatccattgccaatccagaggacccaagtactttccagtcccagtcactctagggctctgcactgaatggctgacctgacctgatgtccattcatcccacccgctcacagtgtggacttttctcccctctttctaagagacctgaactgggcagactgcaaaataaaatctcggtgttctatttatttattgtcttcctgtaagacctttgggtcgaggcagaggcaggaaactaactggtgtgagtcaacgccccctgagtgactgtccccagcccaggcagaagatctcccttcaggtgccgggcgcaggaactgcgtgtgtcctacacaatggtgctattctgtgtcaaacacctctgtattttttaaaacatcattgatattaaaaacaaaaaaattattggaaagtaaaaaaaaa

SEQ ID NO: 8957 - DNA, 601 bp, Canis familiaris
caagagaactttgatgggattaaagtcaacctcaagtctttgaaaaatgatgagagatcttcccatctgatgttgagaagcttctggaaataggtccaagaccaagagcaccaatgaagtctctccaggaggtcctgccaaatccacttaaagagacatctgagagacccagaaaaccaccagctacccttaattttctaaagactgacctggaaagaaagagccaaatgatccgagatctcccgaatgagaataaaagtctgaagaaccaactcttgtcaggaagccagctgtgtggcatccatgcagaagagtccaaaaaaaatcccagcccagctgaaggagcttcgttacgggaagaaagatttattatttaagaaacttggaagtccatcactcctaaacccctccctgagtgagaactggtagagttaagatcccgaggtatttcttccatgttgttggctctgggagagtgaagaggaagctttctcttgaaaccatacaccccgtgttctcataataaagctagttggccaaaaaaaaaaaaaaaaaaaaaaaaaaaaaaaaaaaaaaaaaaaaaaaaaaaaaaaaaaaaaaa

SEQ ID NO: 8958 - DNA, 205 bp, Canis familiaris
atacttggaaaccagaatccagcgtaccagggagatcttttgcctatttcagagagttttgttatccagacagctggatcccttgaggctctaagtcgcaccaggatccatgagctgtgccacactggctgtacccccaaccccccagcaaggagcagttcctgcccaaggacctttaggcttggatgcgggagcagcatgctga

SEQ ID NO: 8959 - DNA, 591 bp, Canis familiaris
  misc_feature (411)..(411): n comprises a, c, g, or t, or includes no nucleotide
atgcctgaggagatcgagaactacgtgcatcgtatcgccgtaccgggcgctcaggaaacacaggcatcgcaaccactttcatcaacaaggcctgtgatgagtcggtgctgatggacctcaaagccctgctgctggaggctaagcagaaggtgcctcctgtgctacaagtgctgcactgcggggatgagtccatgctggacattggaggagagcgtggctgtgccttttgtgggggcctgggccatcgaatcactgactgcccccaactcgaggctatgcagacccagcaggtcagcaacatcggccgcaaggactacctggcccacagctccatggacttctgagccatctgtcgtcccttgtctctgagaggcttcagtctccagctaccaaccacatacaccagccccntggacaaaaagccagcatccttggcccagctggcctgggctgggccaggctgggcctggctgcctgctcccctgtgtcccccagaattactatttttgttcccctttaccccaggctatcattaaagcacaagcccctggtctcaaaaaaaaaaaaaaaaaaaaaaaaaaaaaaaaaaaa

SEQ ID NO: 8960 - DNA, 285 bp, Canis familiaris
  misc_feature (12)..(12): n comprises a, c, g, or t, or includes no nucleotide
  misc_feature (50)..(50): n comprises a, c, g, or t, or includes no nucleotide
  misc_feature (150)..(150): n comprises a, c, g, or t, or includes no nucleotide
ggagaggggatnttggagggtgactggaaggtacccaagatagaggaganaggaagcactggtgccatgtcccgaaaagccatcgacaagcttccacaccagacccccatcccccgagttggcacttctggataatgaagctgccacggnccggaggtcccaccaggacattcaggagggtggccgctggctcagcgagaagcgacaccgcctgcaggccatccgggatgggctccgggaggggagtcacgaggacagccttgaagaggggacccaggggtcctc

SEQ ID NO: 8961 - DNA, 693 bp, Canis familiaris
gatggagaagtgatggctttttaagatgtctatctctaactctggctggatttgaaccacgactctggtcctctcggtgatggtattgctctggatttgttgtgcaactgtcgctacagctgtcgagcagtatgttccctctgagaagctgagtatctatggtgacttggaatttgtgaacgaacaaaagttaaacagatatccatcttcttctcttgtggttgttagatctaaaactgaagaccatgaagaagcagggcctctacctacaaaagtgaatcttgctcattcagaaatttaagctttcttttttttaaagtaaagggttaattgacatctaaatttccattcctcatagagcttctcaagatggtttcattggatatagggcttaaaaatcactttaaaacacaaataaagttacccaaatctgtgaagaccgtatttgccgtaactttatctgtaatttcttttctagtaatttaagaggtggatatttgggattgcatttttattttactaatacctgtagctattttattatttacattgttttttgttttctttcttagccaaattctgtgagctgttcattgctcttcctcaccttctgccataatactgtctgtcaccttagttaataaactgaatattcaataggacttgatgcttctgctcaaaaaaaaaaaaaaa

SEQ ID NO: 8962 - DNA, 636 bp, Canis familiaris
cggggcacgcggtgtgcggaagtggagtcagggtagtacaattacgggaagagccagcgacgcggcggccaccagaataactacaagccatactgaggcttcattcagcaggatgcccgactgatcgcacacgctttgtttggatatcgagtgaacacaattatgtaccaaatttaacttggcatactttctatggcctgtcccatgtgcatcttatttaaatctcccccctggaaatcaatctcctgttgactatttccagagctctagtttgtaggcagcgtgtggggtctctgaggccagagcggcattatgggctgattttattctcgggttcccagagccagattggagggtctgcttcctgctgccccgctgcagcctggacctgtggaccctggttgtaaagagtaaactgtatcctagaaaaccagtgtcacctttttttcaccttttaattttatattatttgtgtcatacatttcctgttaatggaagtgttaattttactgtactttttggtaccttttgggaatctaatgtattgtaaggtattttacacgtgtcctgattttgccacgacctggatattgaagctatccaagcttttgaaataaaaatttaaaaacccccaaa

SEQ ID NO: 8963 - DNA, 446 bp, Canis familiaris
gatcccggaagtccgtttgcgctttgagctgcgggcttcgtcggtgggtcggtgccgccgtgtaggccaggcgctccagggtatgggtctgcgccactgcccacggtgtccgcgcggcgcacggggccgggagggcggcgggctccagctcctccccgcccagcgaggcggtgaccaggcggttaggcgtcgggccgggcctcgtcgcagaaggcgggcaggcaggcgccgttggtccggtgaccgcgctgtcgaagcggccccaggctcgggggttgccgagaagccgggcgcgggctccaggttgaccagcgtgaccaccacgccctccacctgctcgttgggggtgaacttgtcgttggcgtaggcgcgcaccttcacaaagcagcggcggcgctcgggcacgtccaggttgaacagacgccgctcccggatctccacgttgc

SEQ ID NO: 8964 - DNA, 638 bp, Canis familiaris
  misc_feature (1)..(1): n comprises a, c, g, or t, or includes no nucleotide
ntcctggtgctcgatgccgaggccatctcctggccgcctggcggccattgtggccaaacaggtgcttctgggccggaaggttgtagtcgtgcctgtgaaggcatcaacatttctggcaatttctacagaaacaagttgaagtacctggccttcctccgcaagcggatgaacaccaacccatgcccgtggcccctatcacttccgggcacccagccgtatcttttggcggacagttagaggcatgctgccccacaagaccaagcgaggccaggctgcactggaccgcctcaaggtgtttgatgggatcccaccaccctatgacaagaaaaagcgaatggtggttccagctgccctcaagcgtggtacgcctgaagccttacacgtaagtttgcttacctggggctgcgctggctcacgtaacttgagctggaatgtaccatggcagtcacagcccccctcggatggagaagatggaaggagaaaggcgccacgatgcccctatcgcggagaagagacacgctttatgagggctacgggaacaggcccggaaaagaatgtggagaagaaaattgacaaatacacagaggtcctcaagacctatggactcctggtctgagcccaataaaattgacttattc

SEQ ID NO: 8965 - DNA, 701 bp, Canis familiaris
tgcctatcagctgcaaaagggagtgataatgtatgtgatgtcactatggaaggaatcccgtaatgcacgtggttatctccctagagaatgttagtaaatgttaagtacgtatgtgaattttggttttacagaatttgttcttgtgtatgacacctgcatagtatgtaccaccacaatctgggcgtgacagaatgtccctctctttttatcacacgactgtttaagatacttcgtttaataatatgatttgatgataggtagtaatccctcctttatatactgccgtcacgttgtggttgatactcccccaattctccactattttgtaaggtgtgacaccctgctttgtgctcccctttttctacgaccccattttctgcgacagcgacacccccctcttcttcttcatagtgaaatatacgcagtagtgatctgcggcgtacgcttcccacacccctccggcgaggtccggttgcccgcttcagagccagctgcccccccaagcaggccgctccgtggggtgcgggggagcagccactttggagctgagtgtttcccgcttttgagttgtcctgacatccttcttgaaatgactgttaaaactaaaataaattacactgcatttattttatattcttggttgtaataaaatttaattgactttgaaaaaaaaaaaaaaaaaaaaaaaaaaaaaaaaaaaa

SEQ ID NO: 8966 - DNA, 645 bp, Canis familiaris
  misc_feature (509)..(509): n comprises a, c, g, or t, or includes no nucleotide
ctttacccctattgccctgctcttcagggcagtggttcagggccgctggagcactcagcaagcccctccttgtcttcccctctccctgaactcacccactggctctctaagattaggcagtgataccccccacctcctgccccgaaaatgggcaggggctgagctgggggtggggttgcaggtgtgccagctcctgagtttccgttctagggctgcctttgggccaagctcttgccagctttccctggcccaaacccacggcagtgcccgtcctccatctacctcccaccctctatcatgggtccacaatcacccctctctgggaagagagggaggctcctcgacgaagcacaacttacaggggcttgaccctcatatcatggggctgatgtggcctgtggcacgagagagcacgagagaaggagagacacacatagagatatccacgagaattctgttttcttaaggaaaaggccccaagtgctgggcctccccttgcaggggtccangaccaccaccttcttggcttctcttgccctgccccccccaccagagtccccccagccccatgcaccttcattgctgtttggattaaagcctctgttttgcacctgtcaaaaaaaaaaaaaaaaaaaaaaaaaaaaa

SEQ ID NO: 8967 - DNA, 610 bp, Canis familiaris
agggttgagggagacacaaggcgtcagcgcttctggtctggtaaatatatatgatgtgttgttttgttttttaactatgtggaggggacagtggattcccacagcaaaacaggtcccttcaggccctaggaatgccctccccacctcatccctcctttgcctgccctcccctctccccctacgaggtcccttccaaggcctcccacatccaggccagaagcccgtacgtgccttgcttcaggagctgcccgggcgtgcgtgggcgcccacagcgggcgccaccagcagggggacacagcctgccgcgcacagcgaaggagaaggacccccgccgcctccccctcttccccctcttctcccacactgtggcgcagtgtcaccaagaatgatgaggggtgcgccaaatctcacacacccccccctggtctcgtgcacacagaggagtaggtttggccagaccagccttctcacccccaccccctgcgagcccccaccttgctttgtccagacacgtgtatctcgcagattttctaaggaccacaaaacaaaaacaaaaacaaaaaaacaaacaaaaaaaccataaaacaacaaaaacaaaaaaaaaaaaaaa

SEQ ID NO: 8968 - DNA, 686 bp, Canis familiaris
  misc_feature (252)..(252): n comprises a, c, g, or t, or includes no nucleotide
tcacgcctgctagaaaggggacttgtggtcaacccttccaccaaccactccctcgctgcccctgtagggaggggtacccaagacccctgccctcaacctggccttcatcgtccccccaaggctccgccccagagttggggcagagggcggggcccccagcacactgggccacccctagtccaagccaagtattacttctggagaacatttgcaacactgcatcacatcccatcctcgctttgacaatgtttntgctgaggaacaataatagtgtaagaaattatattatattttggcccaagacagaatagtaatataatagccaccaggttcagaccccctggccttcctcttcacattcgctgtgtgttctctccctgggcccaagttctggtaactcttcacggttccgggttctctccctggagttctgaacaatttccagggcctttgccaagccaagccctgaggcccttcccctaaaggcactcgtgggcctccaggggtttgcccacctctctggccaggacccatctgtttgctgtgctttgtcctgaggtctgcggactgacccttgggcctaactttccaagggccagtgaaaatattgggaccaagatcccttgctaaataaaaaccaagaaatgtttacaaaaaaaaaaaaaaaaaaaaaaaaaaaaaaaaaa

SEQ ID NO: 8969 - DNA, 453 bp, Canis familiaris
cgagagcaacctgaattcgtgagattcttgtctgtgtctggagagtttgaggattgcctttttgtaaaagaccagccgaacatctgtttgttgttggttattttgataaagatatatgtggaccactgttttagagagtccacgtaggatataaattctttaagccacctctctctataaaaatggcacattcttcacaatttccggaataaaacgcggatcctttaaaaaaatatttcggtaaccttaagaaaccttgggcatttaaatcatattttgtccttaggtaaggtttggtttgtgtttgtgttttgtttgttttgcttgttccccccccccccaaaccttttgttctctctgtgaactcatctttccttttttctttcttttttttttgtatattattgtttacaataaatatacattgcattaaaaagaaaaaaaaaaaaaaaa

SEQ ID NO: 8970 - DNA, 681 bp, Canis familiaris
tggtagtccccagaagttacattactattttctgacttgaataggtaacacttaagccaactgtatgggaaataaagtaggaaaaaaaatatgtttacttgtcccttgctttagtatccttatcctcctagatgaaattgagggttgatattatatatgtcagtttcctttacatactttatgtacgttatatatgtgtaaacaagcatatattgaagtctatttaggggccaattctacctttggaggattgaagcaatctggagtgttaaataagtaattattattggaggtcataacaatcctactgacgactagttttatttctgctcatacaagactacttgtccccatatataatagtatgttataacatagagtatgtgaataataaataaacacttatattgcgcctacactagtgaatattatcacaaacgctatagcgactataggggaaaggggctttttagaagccaggaattctaagtataattctggttctttcaaatgaaatgtcattttcttctgttaaatattgaataagttttatgaacaatatctttctttgcaaactcgaattacatgtgcttggaattaagttttagtttttttcactgcacaataataaagcctgagttctgatcgaaaaaaaaaaaaaaaaaaaaaaaaaaaaaaaaa

SEQ ID NO: 8971 - DNA, 618 bp, Canis familiaris
  misc_feature (343)..(343): n comprises a, c, g, or t, or includes no nucleotide
actgttggattctcaatacgtaacacagtgtttcctaatgtattgaattttgtttgtgcatattgtatgtgaaatgtttaatacatgcttacctttctcatctctacacgggtttgaagcttgttatccagtaaaagcctgcttagtggttcacacctgaagatgtatgaatacacagtttttgctccctcatgacgatggtgttctttgttttttgctccttcagcacgtaataagcagcttcaaaaggggggggcatcagtatagtactctctttcatcgatgtattatcatcatgtttaaacatctgaatagaggcgacaagatgtgtctctcatgagangatgtctcccccccgcgacgagactacacccttctctccggacacagactattacttgactcttgtgacattaagttttttgataccagaggagttatttttggaagttcttaatgaatgaagtaagtgtatgattattgaaatgattggtatttttgacaaatatttattacagtaatccagaaatcactattccaaccacctcatgttacataggatgctcatttctgaaataaaggttccagcctgcaaaaaaaaaaaaaaaaaaaaaaaaa

SEQ ID NO: 8972 - DNA, 609 bp, Canis familiaris
gagtccatcggcctctttcttcccagttttttgggggtggcccaaaccagcctcgctgtcagggggcgccaatggtgagctgggagccagaggaccagtcgtgggtccaggtgggcgtgggcgattacattggcatctatgccagcatcaagacagacagcaccttctcgggatttctggtgtattctgactggcacaactcgccccgtctttgcttgatgcccgctgcaaagtgagctcaacctctctcactcctagggggggagagtgtgacagtgacagccacaccatccgggagggctggcccccctggggatagttgtgaatgactccgtcctgctgctgtcagagaacggggacagaggctgtctgagatcggggctggccattctggggccacggctggaattctgcccaaaaccaaaggagcactctgtgctggcaggtgtaggtccccatttgctctggcccggggaccctagaggcagggtgccctcttcctggtgctctgtttctctgggtcctccttgtccctcctattcctgggcccttttctcagagattattcaataaatcaacaacaaaaaaataaaaaaaaaaaaaaaaaaa

SEQ ID NO: 8973 - DNA, 210 bp, Canis familiaris
  misc_feature (1)..(1): n comprises a, c, g, or t, or includes no nucleotide
  misc_feature (3)..(3): n comprises a, c, g, or t, or includes no nucleotide
ncntatagtagaacttactaccaatctaacacttgagtgactaccactggatgtccccctccataccacaccgttcgaagaaccctacatatgtgatccaaaaataagaaaggaaggaatcgaaccccctaaaattggtttcaagccaatgtcataaccattatgtctttctcaatcagaaaaaaaaaaaaaaaaaaaaaaaaaaaaaaa

SEQ ID NO: 8974 - DNA, 558 bp, Canis familiaris
aacccttacccctgctgatgttccccgacccagtccttcaggctcttcctggccccgcccctgccactgtgagctggtgctcagtggggactcttggagttcaggtcagcctcagggctggcaccctggccccttcttcacccctttctagggggagcctacagctaggacctggggattgcacactccaggccccaggctaattcccctctgctctgtgttggggctacttagggctgccctaggctttttctctgtcttccactctattccagctttgtttccagcaagtgccttgacagtcactgggctccatgtgacttctgactctggcccccctcccacagccccttcttgggctgtagtctggggctgggaccctgtttggtttctgttttggctgaggacaggggaggggtaaaagtggttctagagtggcttgtgctgccacccccaacgccccacatttgctccccctgggaacctaccatcatcacaataaagaccacataatttttaaaaaaaaaaaaaaaaaaaaaaaaaaaaaaaaaaaaaaaa

SEQ ID NO: 8975 - DNA, 666 bp, Canis familiaris
ggatgaggacaagaagtttccccagataatgtgttagcacagctggcctaagcactgtttggtctagagttcatactacctgtgtagactggaaatccttaaggtaataattcagttcaaagtggtctcaggttgtttttaggcacttggcagaagcaaatgtaatcttctcttgaggtttgtactttaaatccaagcttcaaggaattccttcagataaaatttgaaggaatgtgtgctttcagtgaaaatacacaagtacacaaggaaagaaatcaccatgagtaagagtcattagggacactaggcaacagagtcagacccaacaaagacatattagaaataccaaataccaaatataggagctcctggatggctccgtaggttaagcatccgaatcatgattttggcttggttttgaagattcttccgggttacagggaattgaaggccccggtggttccctggcttccaacagggagtctgctgagattctctccctctgcccctcgctctctttctctaaaatacataaataaatcttaaaaaaaaaacacacacaaaacataagatatcttgcttatacttagaaagtatgactaaagaaaatctctaaaaggaccgaattggtctgataaaaaataaagcttttaaaaatgaacatta

SEQ ID NO: 8976 - DNA, 534 bp, Canis familiaris
aacgccaagtcatccaagggttgcgggcctggcctgctgggatagggagccccccgccaaaccgtggggctttggaagagagcacacgagcatctctaatccgcctgggtttctctgtcacgacatcggggcgccccacaagatgtggggctatcactcacgaggatgtcgcgtgtcgcatcgagggggtctcctgagactcgtgtgtggccgcagcacgccacaacgctgtgttctcggagacaccacaaccacagtcgcgggtgtgccgcgcccgtgggggttctttggccttttcccaagagaacattcatctggggcccaatctgcgctaccggtgcaatgacaccataccagaggactacgagactcagaggcttctgcaggcctagggatgggggtggggacccattgctggaagatggcaccatcgtggctaccctcactgcaacaaacagggagcttggcacccggctccaagaggtagctgccctagaggggctcagaaaggacaaaataaagtgtgtgtggtgg

SEQ ID NO: 8977 - DNA, 639 bp, Canis familiaris
attaaagaagggtcccattcctgttataactgggcaaacccgtttttgtgaatacctgtgacaatcctctgagagtgtttgcccagtgtacaccaattcgaatccgtcatattgaaaggtgactcatttttcggccacaactttttcgacatgatgttggaagtgaggactgacactgattctcaattcaagaatccagtatgttgcacataaaagcaatctatttcttgcctatatttgtgttaagtctttctaccaatttctttaagtaaaaatatttttttaaatggatatgaattgtttggatgtattgtaatataattgttttggggtgtgtatatatccattctataagatcataagaataggagtccttgaatgtttgcttctatcactgtgcacatccattgagaggtgttcagagaatgcagttgaatttaacatgtgtgatctgccatgctggaaaagtactattggaataactctgctatgacagtatttgaggtttggctagcaccacaatttttctactgtaaatgtttcactctcctatagctgtcctttgtgaacttctcactttaaagaataaaagtgtttgatacaaaaaaaaaaaaaaaaaaaaaaaaaaaaaaaaaaaaa

SEQ ID NO: 8978 - DNA, 621 bp, Canis familiaris
  misc_feature (1)..(1): n comprises a, c, g, or t, or includes no nucleotide
natgctggagatagttcctcagagcggagaggtctacacctgccaagtggagcacccaagtttgacaagccctgtcaccgtggaatggagggcacagtctgattctgcacagagcaagatgctgagtggaatcgggggctttgtcctgggtctgctcttccttgcagtggggctgttcatctacttcagaaatcagaagggacactctggacttcagccaacaggactcctgagctgaagtggagatggtgaccctcacagaaaaccttcctttccagcgttcttcttcagaggtccaaaaggtttccacgcttggcgtctttaatttttcttaccaaaacacgcggctttttcaggatttggtttggccctgggcttcaggggaacccttggcacagctttgtgttcccccaatggctccctctgccctgtccttgacctggaacccccagtgctgactgcagtaccttatctgcattctctccttcctcttcctatgcagcccttatgtttcccttgcatgggaactcaccttctgctcatgtttctttataaacttttctcaaataaatgtggattgaaaatcaaaaaaaaaaaaaaaaaaaaaaaaaaaaaaaaaaa

SEQ ID NO: 8979 - DNA, 634 bp, Canis familiaris
gtttaaccaggaaagaccctgtgaatgtgtttagtaagtaattgatatggtgaaatcctttaataaggaatgtctgcccttgtatataagccaactcttaattaggatcaagtgtaatcattgagaaaagcttttgtcagctcttactgtctactctgtatcaatgaagactcctggtgatagaccacacacaatgctccatcccatggcaaccacagaattgtagttagattttgctgtttgtatgtatagtctatgttacgaatccgtatcagatcgctggaggacttgtcttcaaaacggggcagactggatgaagatggttgtgaatgaacgatcgtaattgtccccctctaaagactgaatgcagcttcgcagcctaagaatggtgaagagagcgtgctgcttgatgaatgatgatggacactgcgctagatgtggggaaaatataatgagagttctctgtgttctcggaatcaacccccccctgtggttcaatctaggaatacttcttttgttctatgcagtcatgctgagccataattatgaaagtgttattaccacttgaaaatgcttataatacggcagacaataacaacaattaaagaggcataaaatagaaaaaaaaaaaaaa

SEQ ID NO: 8980 - DNA, 697 bp, Canis familiaris
  misc_feature (83)..(83): n comprises a, c, g, or t, or includes no nucleotide
gtaaaccatatacccagtgatgacgagatgtgatccgagaaggcacattccaaggacatcatacccctattggtacaaaaagnggctacgatacggaatagttcttgtttatcgtatcagaagtatttttctttgcaggcttcttctgagccttttaccactccagcctagcccctactcctgaacttgggggttgctggcctcctaccggcattattcctcttaacccattagaagtgcctctactcaacacctcagtcctcctagcctccggagtatctattacttgagcccactcatagtttaatagtaaggtgaatcgtcgacacaatatactttctatagccctattcacttacaatctcccttaggggctatatatttacgcgtatatacacggcgcctctccgcagatatcatcattagtagagcactatctttacacatattctcgatatgggtaaaagggatcaccctttttaaaacccacgggatttccccgggattaacaacgtaattatgggctctacattcctcatcgtgtgcttcctccgacagctatactaccacttcacatcaaaccaccacttcggatttgaagccgctgcatgatattgacactttgttgatgtagtctggctattcttgtatgtatctatttattgatgaggatcctaaaaaaaaaaaaaaaaaaaaa

SEQ ID NO: 8981 - DNA, 601 bp, Canis familiaris
gcaccttccaaggaggcaaacaacagagcagggcgagcagagctgctggagcgggtgctgcgagacctggaggtgcacaatgccgttctggtgagcccctctctgagtggccgttacgccctgcccgtcttgatccaaggccaccacacagctgcgtggatttgtgcccatcgcaacccgcctccaccccaggactacacccaggaacaatttctgggctgtgaagaccccaactctcatcttgtatgggggagctgggaccgtatcctggctcgggagtcactgcggcagctccggcacctgcccaaccactctgtggtgaagcttcgtgatgacaggccatgcctgctacctccacaagcctcaagacttccaccttgtcccttcttgccttccttgagcacccactgccttgaatgttaacccacggattgggcccaagactgggccggagcttggagaattggaccagtgctccaccagggaggcagcccctgggattggagagtagaagccagggggcaatggccagccaggacctctcatttcatctcacagacacaataaaaaaacacatttttgtcaaaaaaaaaaaaaaaaa

SEQ ID NO: 8982 - DNA, 705 bp, Canis familiaris
ctcttaaaggactcacaacgcccatgcactcatcctgaatccactgcaagataatttgaaaagtgcctagattgtaaccaatggagagacccatttgctaatcctaaagttgctgcaggcaagaacccacagtgattttctcttggatggaagcactggctgatgccatttttgcaatctcattttgactaggtggtaacagagctggtaggcaccatgtttggtgccctctctctatcctgccagtgctggtgagcatgttccttgtcccactgaacctgtcgtaaacagttgcaccactgacctgggctcacagtgagtacatcacaactactggggctaggcatgctatccatgcatcacccttcctcttgttgccatgcagctatgtcaccaccaccagccggaagtccagcagaatactgcaggagccaactacccactctactatacgacaggcccgcaattacacatctattctctctacagtgatacactggggatatgtatgactgtggccgattaaacggaattccaataaatccaatatggaagtcaatattccaagcattctttcaactacaattgtatgcaactagaaatcagttttagtaagaaaactggaaaaaccacacaaatatggagattaaacaacatgccacttaaaactcagtaagtcattgaagaaatcaaaggagatacaaa

SEQ ID NO: 8983 - DNA, 642 bp, Canis familiaris
agattttcccacatgtcagagagagacctgcaggaactgagtatccagctggaggaggagaggcgggccagggagtggccactagatgttgtcgaactgccctgagggccatctggaagactggttggaaaagagagccaacacggcctgagctcagctgccgagcagccagggctggaacccatcgagaagcaccatcttccagtaccccatagactgcgcaccagtgtcaggagctgcgctccataccccgcgcggcacacccccacaccgcgggtggtgtggcccccgcacgacgccacgagctgccacagggggctgagacccctctatctccccacttgagacccccattgggccagcttttgttccattcccaataaagataagggttccatacctgggggatccccaaggccctcttcccccgcctgctgccccctgtggagcctctgaaaccacatgctgctgggcctggcttgactaaggccccagagttgccccagcaggtatagccctggtcctagctctgctccagacagctccatcctccctccctcttgggacatcttgagaagatgggtggtaaaacttccttctggatgtttataaagaaagtctgtcaccaaaaaaaaaaaaaaa

SEQ ID NO: 8984 - DNA, 250 bp, Canis familiaris
aggggaacttaggttaatttttggaagggtttgataggtcgtccctgctataagttcatttgagtagcagacctgacaaagcatttgaggtcaaaaccctaccatgtgtaattaaaaaaaaaaaaagaaaaaaaaaaaaagaccatgttaataaaagtattcatttgcttgaaaagacaaaggacctaaaaagttattgactaaaattttatttctctcaaaaaaaaaaaaaaaaaaaaaaaaaaaaaaa

SEQ ID NO: 8985 - DNA, 548 bp, Canis familiaris
tgagaaacgtggcctagctaggtgcccacctaagtgcctcaggactgcaccttgggcagcatctgacgtcctcccgcctacaccggtgacctgtgaccagggccctgtgtggtccggactgagcagggggcaggccctcccctccccacagctggcacacagggaccacggcttccgtcgctcacccgcttctcccagccagctccgaggacacggccgcaccaccctctgccactccagagccgggggctacaagggttgggacactcatcttcccctcccggccttaaacttgggaggggagcactcaggactggcccccaccagggtcttgtggcctttttcctcacactgaagaggtcagcaataatctgtcactctggacccatgacccctcctccttctctagcccacactgaagcagaagcttcttgaccaaaggtcagagtgggtggggggcctgggactacagcctgtggaggctgttcactcacttaggtcttcattaaaagtgacagaggaaaccaaaaaaaaaaaaaaaaaaaaaa

SEQ ID NO: 8986 - DNA, 613 bp, Canis familiaris
  misc_feature (400)..(400): n comprises a, c, g, or t, or includes no nucleotide
ccctgcgttggtacaatcacatcaagtcttacgagaaggaaaaggccagccttccaggagtgaagaaagctttgggcaagtatggccctgctaatgtggaagacaccacaggaagtggagctacagatagtaaagacgatgatgatattgatctcttcggatctgatgacgaggaggaaagtgaagaagcgaagaggctaagagaggaacgccttgcacagtatgagtcaaagaaagcctaaaaacctgcacttgttgccaagtcttccatattactagatgtgaaaccttgggacgatgagacagatatggcacaaattagaggagtgcgtccgaagcacttcaggcagatggcttggttctggggcttctttcttaaacttaggtttcccaggtgggnaatatgggaatttaaaaaaccttcaaatacagtgtgtagtggaagatgataaagttggaacagatatgctggaggagcggatcactgcttttgaggactatgtgcagtccatggacgtggctgcttttaataagatctaaaattacatcgtagatcattgtccttaaataaaagcttaaaagacaaaaaaaaaaaaaaaaaaaaaaaaaaaaa

SEQ ID NO: 8987 - DNA, 606 bp, Canis familiaris
  misc_feature (180)..(180): n comprises a, c, g, or t, or includes no nucleotide
agaaatgtagaaaaaagagcgagtggggaagaaaatcatttcatgaaacgaacagccaggattcttacaaggaaaaagaggaaactgatgaagagagtggagaagagaaatgctgttaaggagtaagagggaatgagcaggatgtctcctgtctgtcgcccgcgctgtcgatggcagccnctggcattagcatccgtgcttatggtgggaacagcatcagtgagagccctccaacctgtacaaggctcttgagcaaagtcatctgtagcctggaaaggccaaatccaaccgcattgttgttgggtcagttggagtaaggctttgcctgtctcaggttttttaatcactatgtatgatattgcaactattgaccttagcttgtactttcttaagaaaagcatttgagaatcatagctgtcatcatgaaactgacttagttctgaacataatttgctacttccttagattgaagtgggaaaaaatggcttggcattgagagcagaaagaagtactggcttttggtgatttgaaaacaatgtttgtgggaagtctgaatcaataaatatctttaaaattataaaaaaaaaaaaaaaaaaaaaaaaaaaa

SEQ ID NO: 8988 - DNA, 314 bp, Canis familiaris
  misc_feature (1)..(1): n comprises a, c, g, or t, or includes no nucleotide
ncgccggccgggggtctgttgcccctgaatgacccagccgccctggggaatgaagggatcgctgctggtcagaaagcagctgccaagtggaacgttctgtttacgactgtctttactggaggctgttctgttgtcttccatttcccttcacgcccgcgagctgacgtcgtggttcctgtgaatctgggttgcatgtgggtacgttggaagaaaggcgatctcccacgcctcggtagacgctttgtggttggaataaaggacgcagatttgcaaaaaaaaaaaaaaaaaaaaaaaaaaaaaaaaaaaaaaaaaaa

SEQ ID NO: 8989 - DNA, 638 bp, Canis familiaris
gtctgtgttaaggaaaacaatagtgaagtcgtcatatgaacccaggtcctcaccattgtcctctcatctttcagggccatttctcttcatgttagctgtttgtacaaacttttggagccggggtggtacatcagttctctggaatccgccaggccgctggggggtggatcaccacaccctgtagggcttctcccctcctagctgtctttgggaaacgcaggactgggaggctgttttgaccagagaggccaaggtcaagagcaaggtgtagaaaaattgtaaaatagaaaaagtggtgttggtgaattggttttgttttgttttgttttgtgtttcacatttggatagctgtcacaaagaggtctttccctcagtttccagcatgttcttcccttttctcccctttttcaaggtttttccctccctaatttatcaagagaaacttcaaagtccatgggatggtcggatctcacaggctgagaactcgttcacctccaagcatttcatgaaaaagctgcttcttattaatcgtgcaaactcttgccacgatgtggggagtttgacaaatctttcaaaataaaaagtaatgacttagaaactgaaaaaaaaaaaaaaaaaaaaaaaaaaaaaaaaaaaaa

SEQ ID NO: 8990 - DNA, 544 bp, Canis familiaris
gctggtcaaggctcccagggatggctgtgctgtggcccccgctgcctgctgctgtatgtgctcgctggatgtcgacactgctgacagtgccactgcttttggggctcagacccaggatttctcccgagacacagccccccaccccactggctgaggctggggcagcccccatgccctgctgttctgcagaagtgggcagggcccagaagtgctgccagagtaccctgctgtgcagaagggaggactcccaggtcatcgagcagctatgctatggctgccgtgtgaatatgaaggatgtgccatctttggattctttgccaccttacatcttggctgaggcccagttccgcagccaaaggccctcgcaggatatccaggagtatctggttgagaacagtgacgaggaggtgcacaccactgggagctgagcctggggccacccccaagcaggagggcaaggatgggcaagcagcatgtgattgtataaataaaaacatttttaattagaaaaaaaaaaaaaaaaaaaaaaaaaaaaaaaaaaaaa

SEQ ID NO: 8991 - DNA, 691 bp, Canis familiaris
ccagagattcaacttttgtggagtgtcacagggtcacagcaatagcaggaagaagggagaatcctgtacttacccttcctcaccttctgcctgaatgtgtcgctggtgtcaaattttcttgacctgattggctaaaacaagttacatggcatgactgacttcaagaggtgggaagtatgatcctactgtgcccacaagagaaccagaaatactgaagagcaggactaatgtctgtcacaaatgtactaaatatgaatagaaatatatcgcaaatacatgcaaaaactggacaacaatctaagacaatattaatcaaggcctaaatgaagaaagtgctaaatgaatgtttgacgaattaatgagtgaatgagaaatccatgtgagttgaataataagggaagattttgcaacagaggtagaacatgaacacaccattaaaagtggggaggtgagtaggtatggggtgcagagaggaacataacatctcctcaagagggagaaaacagaggcacctgcatggctcagtgcttgagcatctgcctttggctcaggtcgtgattctggggtcctgggacggagtccccatcgggctccctgcagggagcctgcttctccctctgcctgtggctctgcctctctctgtgtgtctctcatgaataaataaatagaatcttaaaaaaaaaaaaaaagg

SEQ ID NO: 8992 - DNA, 637 bp, Canis familiaris
  misc_feature (26)..(26): n comprises a, c, g, or t, or includes no nucleotide
tcttgacaacccggagaccctcgtgngacagtgcagtcgctggatgtgtccctcaggcctctcccgtgacggggatatctggaccacagagaccctgcaggagtacatgaaggtggtgatgaccctccaatatgatgagaagccaccctacgtcatgctgaggaacaatctgaaagccctgctgcaggacctgcgggtgtcagcctacgaccccgtggacctccagatggtaccctagaacttttgactcgaggtttgaaatagaaaaaaaaaaaaacaatgcaagaaatgtgactgaaggcctgctgtagtatcacagatatgcttctggaaagatccctcgaatgcacatgcctatgcctgctgttgcttaaaccacactatgaatcaatcttgagttagcctcagagaaacccaaccaagttaaggcttcccaagattaaatgtggaatttccctcagttcgactgtcccatcctttcagctgtcatctcccaccagccactggggttgtagacagagaagacccccaactcatggtaggaggtgagccagtcccctccatggggacccttcctgctactcttggcactattatgctttggtaataaaatgtgtaataaaaaaaaaaaaaaaaa

SEQ ID NO: 8993 - DNA, 644 bp, Canis familiaris
  misc_feature (169)..(169): n comprises a, c, g, or t, or includes no nucleotide
ataagacctgttctgtagacccagggagtgtcatgtagatttctttgggtataaagtgaattagccatcatgaattcctccattttcagaagaaatcaataatgtggccacagatcttaatctaaaattggatgaacagtcttactgtaacagatgtgaagaggaaganatgccctagttttgttctgtcctatatggtagccatgagccatgtgtggctagttgaatttacatttaaattaatttaaattttaaaaattgagttcctcagtcattctagcctatttcaagtactcagtagccatatgtgtctactgtattgggcagcacatgcatagaattgcagaaagttctgttggtcacactgtctcagtcctttgcccagaccacaaatggcagttattagttctcccttagtgcaagacatagatgtttgtgtcttagggtgagggtgtccatctttaaggaatgaaagaatgttttaaaacccacttggacattggggtgcctgggtggctcagggtgtgatcctggagttccgggattgagtcccacattgggcttcctgcatggagcctgcttctcactctgcctgtgtctgcctctctatatgtctcacgaataaatcctaaaaaaaaaaaaaa

SEQ ID NO: 8994 - DNA, 742 bp, Canis familiaris
acagatttactattcggacaaatatcgacgacgaggagttcgagtaccgggcatgtcatgttgcccaaggacatagccaagctggtccgctaaacccatcttgatgtctgaaatcctgaatggaggaatcttggagttcagcagagtcagggatgggtccattatatgatccagtgagaccagacctcacatcttgttgtttccgacggccactgcccaagaagccgaagaaatgaagctggcagccactttccagcctcaaagctttacacagctgtcgtcgcttgctaaacatcgttcgctgataacatcattattgttgcccttctggttttctcactttgaatatttaaaaggaatgttcaagtaccactgttttgttgctgcctgacttgtttttgcttgagccaggagcccaaccaagccacccatggcccgggcccagattgaggtgctccttttggggctgcagccttcagctgagcttgtgtaccccagcagagcacacttggtaacatagaggaagcatctgacgataggccatggctgtcacggggattgtgtaaacttgcagtttttttttcctgccaggtgttgtatgtatggtggtttatgtttcaatatattggagacttttcattttattcaaggaatctgttccatgtttaaaagccttgattaaagaggaagttttttataatctaaaaaaaaaaaaaaaaaaaaaaaaaaaaaaaaaaaaaaa

SEQ ID NO: 8995 - DNA, 616 bp, Canis familiaris
tgggcaagttcgacatcccagcactggcccacgctctccagactgggtgcggctcatggagtaacgtgggcaacgccacgcgccttgttgcatccggcccgtacgaggggccatatgcagacagcctggagagcaagctggaccaaggaggtcctgggccaagttcctggaaaagagatacgccaggtctgccagtttgcgcttgccccaactgtccatgctctggaacctacgatctgaaaagcgtcctgagccaaatgggcatcaccaaggtcttcagcgccgaggctgacctctctgggatcactgaggaagggcccttgatgctgtccaaggggctgcacaaggccgtgctgaccatcgacgagaaagggactgaagctgcgggagccacctttctggaagccatccccatgtccatgccgcccagtgtcgacttcaacaagcctttcctcatcatcatcgtcgacagagacaccaagagtcccctcttcatgggaaaggtggtgaaccccacccaaaagtaactgccttgtgggtcaggtcccttccagataccattaaagagtgacccaccccaggaaaaaaaaaaaaaaaaaaaaaaaaaaaaaaaaaa

SEQ ID NO: 8996 - DNA, 202 bp, Canis familiaris
ggacggcccggggtccagctgtgggccagacactggggcttgtgtccgggatcttggttcattcttccagctggttgtgattattttctgagccgggaaaggaacaaaaacattccactgttatacctctgcttatgtttaagaggggatgggacttaagagaaaataaactattaaaagttgaaaaaaaaaagaaaaaaaa

SEQ ID NO: 8997 - DNA, 569 bp, Canis familiaris
atgagcttccataaccactttaattttagcataatgatggcctggattgtctgacctcagtagctatttaatacatcgagtaacatctgtatcaggccctacatagacaatacagttgagtgggagtataaccgaaattaaaagatgtgtgttaatggctgtgcgagaaaaatcgggataaaggccttaacagggacaacttcacagcgttgatgctggatatgcataaggtgatggccaaggtttagaacacatttttttcaaagtctaaatcttaaaccccgagtaacatctatgctcagagttagcataatttggagttattcagggattgcagagaaaagcattttcacagaaatcaagatgttatttttgtatactatatcacttagacacactgtgtgttcatttgctgtgaatcagtttttaaaagtcagatgggaaaagcaactgaagtcctagaaaatagaaaagtaattttaaactatcccataaagctggaggaggaagggggaaaaaaaaaaaaaaaaaaaaaaaaaaaaaaaaaaaaaaaaaaaaaaaaaaaaaaa

SEQ ID NO: 8998 - DNA, 596 bp, Canis familiaris
  misc_feature (10)..(10): n comprises a, c, g, or t, or includes no nucleotide
gggaacacgncaggaccttcggccagaagaaggaccgctacgagatcaactcgttggtacgggaccagtgcactgagggtttcgtccagcggcatgtgccgaccatccggtgccagcctagcggccactgggagaaaacctcgcatcacctgcacagacccctccacttacaagcgcagactacagaagcggagctcacgggccccacggaggagccgccccagcacagcccactgagaggagcttccaggacgcacccaggatgctgagcccaggagccccgccaggctgacatcccacatggatggtgtcctcttcttgccgctttctgtcatataaggaattccattaaagaaggaaaaaaaaacaaatcccaccccacccccaaatcgccaaaaccgcatctgatttttccctcctcgatgccaaagcaaagcaaacctattgtaagccatggactgagtttagagacatttctccaatctctcgttgtgcctttccagggaccagagcagggacagggggagaaggggaggggttaagttaaataaagaagattattttttgtttcctgactttaaaaaaaaaaaaaaaaa

SEQ ID NO: 8999 - DNA, 625 bp, Canis familiaris
gcctgctccagccctggctgctgcctcagtttccccagtgttcgagacctggcacagcatctgcgtacccactgcccacccacacagtcccctggaaggcaagctcttccgctgttctgccctgagctgcaccgagaccttccccagcatgcaggaactcgtggcacacggcaagctgcactacaaacccaatcgctacttcaagtgtgagaactgcctcctgcgcttccgcacgcaccgctcgctcttcaagcatctgcatgtttgcgccgagcatgcgcagagcccagccccgccgccaccccccgccctcggacaaggagccgccggcgcccgagcgtcccccggagtccgacgccgagtcggcgccgggcctgccgttcccgctgctcgagccgttcacgacccccgcccctgcccccaccgggcccttcctgccctacttgaaccccgcgccctttggcctgagtccccaacgcctgcgccccttcctggccgcggcgcccgggccgcccgcctccagcgccgcagtctggaagaagagcacaaggtgccggcggcagcccgcgaagaccccagggcggctccgacacgccctcagggcacgcggccccgagccgcatcg

SEQ ID NO: 9000 - DNA, 679 bp, Canis familiaris
  misc_feature (59)..(59): n comprises a, c, g, or t, or includes no nucleotide
ggcatgagctctggaagcagtacatccggggacttgtgcgggcggttctcaagccggancacgcagcccacagatgattcaggccaagctgttaaaggcagaccttcacgggggccctcatttcagtcacaaaatccaaatgcccctcctatgtgggtgtcacgggaatcctcctacaggaaacgaagcacgttttcaaaatcatcaccaaagaagaccgcctgaaagttatccccaagctgaactgcgtgttcacagtggaaatcgatggcttcatttcctacatttatggaagcaaattccagcttcggtcaagtgaacgatcagcaaagaaattcaaagcaaagggaacagtggacctgtgaggtctttgctgcggaggcgactgtgtgtgccccgaggactgggaccgcctgcgtgccctccttgcacgaagaggtggccgggccggctgtggttctcgaccagcgcggcgcgtcaccaccagagttaggaaccattcatcggggggtccctgggtggcgcagcggtttggcgcctgcctttggtccaggcgtgatcctggagtcccgggatcgagtcccacgtcgggctcccggcatggagcctgctgctccctctgcctctctctgtgtgtgtctatcatgaataaataaataaaatctttaaaaaacaaaaa

SEQ ID NO: 9001 - DNA, 560 bp, Canis familiaris
  misc_feature (271)..(271): n comprises a, c, g, or t, or includes no nucleotide
aaaatagtgtcaccctgggacccaacctcctccccatctgcctccctgacaacgagaccttctatgataggggcctcatgggctatgtcagtggctttgggataatggaggagaggctttcttatgacctcaaatttatccgtctgcccgtagctaaacgagaggcatgtgagagctggctcaggaaaaataaaaggaaggacgtgttttctccaaacatgttctgtgctggggacccatctctaaagcaggatgcctgtcagggggatancggaggggtctttgcagtgaaggatgagaacagtgatcgctgggtggccacaggcatcgtatcctggggcatcgggtgcagcaggggctatggcttctacaccaaattactcaactatgtggactggatcaagaaggagatggagggggagggctgaacccagaattcgctagatcagaatccagagagcagtgcattaaaaaaaattatctgataaccactaagaatccttattaaaatcactgatgcagaaagaaaaaaaaaaaaaaaaaaaaaaaaaaaaaaaaaa

SEQ ID NO: 9002 - DNA, 703 bp, Canis familiaris
aacagctatgaccataggcctatttaggtgacactatagaacaagtttgtacaaaaaagcaggctggtaccggtccggaattcccgggatcgggaagcccccagctaagaacctggaacctggggagtgagatctggaaactctggacagcccccacctggtgggccaacaaggaacactaaccgtggatggtgccccaggcccagctcaggacagatcccaaaacaaggatcacgctggctcagaaccagctccaagaggactcagaactctaacggggccagatcgaacctggggcccggggttgatctgggacccagactcagacgttggtaacctaaccaggcagatccaggactacatctgagcctgttccagacctgggcctggaggcccgatccacctctgactcgggagaagtcaggaattgcccaggaccctgaaggggccacgatggtaacagatctggaacctcagcctggccagatgcaggccctccccgtcccccagaaagagggaagcccactgtcctgggcctgcaggatttgggtcctgcccactagctgcactgacgctgcccctttctccctgcccaacttcccctcacctcagctccggacatccgggacttatttaaactctgttgcaagtgcaataaacccggcccggtgcccccactgaccagaaaaaaaaaaaaaaaaaa

SEQ ID NO: 9003 - DNA, 625 bp, Canis familiaris
gcccccgcatcatgcatcacatgcaggccagcctcccaacatgccgcctcctggcagatccccgcctcaggcctggcacctgggacaaatcccaccaggggctaatgcccccacagcagcttatgccggggcagatgccaccagcccagcctctttcagaaaatccaccaaatcacatcttagttccgtcaccaacctgcctgaggagaccaatgagctcatgctgtccatgcttttcaaccagttccctggcttcaaggaggtacgactggtccccgggcggcacgacattgcctttgtggagtttgacaatgaggtacaggcaggggccgctcgcgatgcactgcagggcttcaagatcacccagaacaatgccatgaagatctcttttgccaagaagtagcacctttttccccctgcctgcccctgccccctgctctggggccaccccttccccccttggctcagccccctgaaggtaagtccccctcaggggccttctcagagccgtgtgtgagtgagtggtcgccacacagcattgtacccagagtctgtccccagacattgcacctggcgctgttaggccggaattaaagtgttttttttgaaaaaaaaaaaaaaaaaa

SEQ ID NO: 9004 - DNA, 596 bp, Canis familiaris
ctggttttccttcttcttttggctttctctcactcactggttttccttcttcttttggctttccctcactcaccggttttccttcttcttttggctttccctcgctctccactggctttccctcgctctccgctggcttcccctcgctctccgctggcttcccctcgctctccgctggcttcccctcgctctccgctggcttcccctcgctctccgctggctttccctcgctctccgctggctttccctcgttctccgctggctttccatcctttggctttgtcatactttctgacttttctttatcctttagtatttcctcatcttctgtctttctctcattttctaacttttcctggttttccagagtacaatctacttcgggttcttccacatcctgtggctgttctttgtattccatctttccttggttctcagtcattccttcattttcattgcagagtttttccatgttgagatttcccctccttttcctgtcctgcaggaattctgagcagattcgtccttttctagccctgcagagtgctgagaacagacacgcagacctgaaagaacctggagcaacaattaagagc

SEQ ID NO: 9005 - DNA, 613 bp, Canis familiaris
ggaagtcaacaactgtctacatttgattccgacttcagaaaggcaaagccattcttacgtatcctccatagacagggtggcccacagggagggaacactggtttcctcatgcttggggtcatggtgagcacaccatcagtcttctacataaatgctttaaatggtgtaggatatgaaccagcacaactcaaaacagaagctgatccttcttatattcaatcagaaatgtgatcagaagaaaattgggatgcctgggtggctcagcagtaagcgcctgccttcagctcagggtgtgatcctggagtcccggattgagtcccacatcaggctccctgtatggagcctgcttctccctctgcctaggtctctgcctctccgtctcatgaataaaaaaatctttaaaagaagaaaactgaataattctgaaaatctgtagtaaacaatagcttgagaaagtactatggatctgggtagggcagtcttactttacgtgaacattagggattatcagtggaatttccatgttggttagctgtgtggtaccatgctgcagaagtcctagctgtgtctctatggaaatactatagttctttaaaaaaaaaaaaaaaaaaaa

SEQ ID NO: 9006 - DNA, 666 bp, Canis familiaris
gagcgacggctcgaaattctactgcagccggacacatatcgaaggccacccccaaatgggtttgttctttggtgttgggccaagtctataaaaggcctagacatagcgatgatggatatgtgccctggagagaaacggaaagtgattatacccccttcatttgcatatggaaaggaaggctatgcagaaggcaagattccacccgatgcaacattgatttttgagattgaactttatgcggtgaccaaaggaccacgaagcattgaaacatttaaacagatagacacggacaatgaccggcaactctctaaaactgagataaatcactacctgaaaagggaatttgaaaaagatgagaagccacgtgacaagtcatatcagaatgcagttttagaagatattttcaagaagaatgaccatgatggtgatggcttcatctcttccaaggaatacaatgtatatcaacatgatgaactatagtatatttttatttctaagttttcttagctacttactgtactttatatataaaacaaagtcccttctctagaacgtcgcattctgtgttgtcctcccaacgcagcagataacatcaatataccctctactacatataatttaggctaacactcaatggtgtgttattttgcaaaaaaaaaaaaaaaa

SEQ ID NO: 9007 - DNA, 597 bp, Canis familiaris
tggatctcagcaggttcactgagaagaggtacaagtctattgtcaagtataagacggccttctactcattctaccttcctgtggccgctgccatgtatatggcaggcatcgatggggagaaagagcatgccaatgctaagaagatcctgctggagatgggggagttctttcagattcaggatgatttcctggatctctttggggaccccagtgtgacgggcaagattggcacagacattcaggacaacaagtgcagctggctggtggttcagtgtctgcagcaggcatctccagagcagcgcaaagtccttcaggagaattatgggcagaaggaggcggagaaggtggcccgagtgaaggcgctgtacgaggagctgaacctgccggctgttttcacgcagtatgaggaagacagctatagccgcctcatgagcctcattgagcggtgcgcctcacccctgcccccagccatctttctggggctggcgcacaacatctacaagaggaaaaagtgacctagagacggcgagggtggggcggggcggctctcaataaattgtccaatcttaaaaaaaaaaaaaaaaaaaaaaaaaaaaa

SEQ ID NO: 9008 - DNA, 702 bp, Canis familiaris
ttgtgctgggctatatagaaggaagtagccacctcatccagccttttagctccctaaatgaccatgtgggggcattcctgtgctttctcagatcaagggacacttatcaaggactagctcagattctcacatgtacatgtacaaacaattttgtcatttcaaaaattgcagcacttagcacaatgccttgcatatattgggtgctcagtaagcttttattaaatgaataaatgtttgggaaccaggaggagtaccatttctgggcaggaaagtcagctgtgttgccatcatgtctttgttttcaatatctcttgtcctttcaggctctttggttttatgagggacagaaagctacccagacctgatctcaccagtggtttttaggactagctggattttttgtttgttttgttttgtttttcagccaaaataaattaagtgagactcaatcacttgaacttttgaagactcaaggcagacagtgaaactgttgttctcattggagaggatgaaacttctccaatattatatatagaatttagtggtcaggtgtttttgaatcagctgaaatatcatacatttctgtttgaaatccagcttttcgttacccatgatgcagttaaatgtccctttgctcatttcctttagcctatcactaaagctcttgtgattatttaaaaaaaaaaaaaaaaaaaaaaaaaa

SEQ ID NO: 9009 - DNA, 654 bp, Canis familiaris
ttctttctcgtaatcccccaaacagggagattaaaaaccatgttttcaagctcttcatgggccctcggttgaaatggcctgagcagagtgttcctaagcaaggcttcatcacacctcccaatcctctggatggcatcctctgaatagtcctctctggtaggaaaaacctcaaatgcacatattaaaatcaggagagtgctgaaatgaaccatttctctgttttccggggccttggacagctgcaacattgccctgaggaagtagctgggtccattctgggtcctggaacgtggtgttggcacttcagcccagggtgtgtagcaggaaagccttcccaggaagcagttttcctttgaaaataattctaaaaggacagcttcaaaatcaactgtagagagtagtgagcgcaggattgtctatggtgtgattggaggtactggctagaggtttcagtgggataatttacatgtccgtcgtttggcttttgcttctacagacactgctttgtacatgattcagactgtgaatccatcttttttaaatacctttcaaattcttggtaagatataattttgatagatgattgcagattttcttgtatttgtcaaattaataaagaccgcatgaatccaaaaaaaaaaaaaaaaaaaaaaa

SEQ ID NO: 9010 - DNA, 628 bp, Canis familiaris
atgagatcaggaacatgaaagggaagcaatggctcgtcacccttcgggggagtaccagggaccctgctggaatgttaaagaatggctccttcgaacaattgaggatgccccacctaacagggaagcctgctgggaaggcggagggaagaacaggattgctctgccctcttgcgcaaaacgtttttgttgccctggaaccctgaggggaaaacccaaccctggattcacctccccttctgggttggaccacctcaactctaaaaagaacgcctgttctggattaaagaccgggtttgaaacttaggggattggacagggttatcaaccgaaactttcctccagcatcatgatgacccttgaggtgaagcttgcccagattcggtgcagcaattactaccagcaagaataaaaaaaaaagaaattcgtatcttaaagaaacagctttcaagtgcctttctgcagtttttcaggagcgcaagatagatttggaattaggagtaacctctagttcttaagaaccaacactcttaaaagatttaggagaaagtttacaacataatctagtttacgaagaaaacttgtgctagaatactttttaaaaagtatttttgaataccattaaaactgc

SEQ ID NO: 9011 - DNA, 605 bp, Canis familiaris
tgacagctgaccttgggttcagagtcgatgacgataatgcctctagcactccgtcctgtttgggcccaacctgttcactcgataccgtgacatacagattatggtacttacccctgtgcagcctctaacatagtggggaaagctcactcggattatatgctgtatgtttacgatccccccacacgatccctcctccccacacagccaccaccaccaccaccaccaccaccatcatccttaccatcatcacagattctcgagcaggtgaagaaggcgccatcagagcggtggatcatgccgtgatcggcggtgtcgtggccgtggtcgtgttcgccatgctgtgcttgctcatcattctggggcgctattttgccagacataaaggtacatacttcactcatgaagccaaaggagccgatgacgcagcagacgcagacacagctataatcaatgcagaaggaggacagaacaactccgaagaaaagaaagagtacttcatctagatcagcctttttgtttcaatgaggtgtccaactggccctatttagatgataaagagacagtgatgttggaacttgaaaaaaaaaaaaaaaaaaaaaaaaaaa

SEQ ID NO: 9012 - DNA, 553 bp, Canis familiaris
acacatgctgatctgtggccagccaagcagtacccacttgtcacgccaaatgaagaaagaaatgttatggaagaggcaaaaggctttcagccctcaagatctgcagctcaacaggaacttgatgggaaacctgcttctcctactccagtaattgtcacctcccacacagccaacaaagaagaaaagagtttagtcgaactggaagtagatctggataatttagaattagaagatattgacacaacagacatcaacctggatgaagatattttggatgattgagtgtaatgtttcttgagaaccccactacacagatcattatgatggacaggtatcgatcgccaacctgaccacagtgctttagactcttgagaacctccttagattttatatggaaaggctgtttgtggcccactgggagcacactgctcttctcatcttaggagtcatttatgtgcagcatctaaatcattgtttcctcattaagtaaaccaagtgtgggctttgatttttttttcatactgtcattagactgttatctcataaaatcttt

SEQ ID NO: 9013 - DNA, 560 bp, Canis familiaris
gctaggagggacttcctccactcctttccaggatggacaattattctccaagcatggacgatgagcgtgtgatcccctcctgttctccgagacgctgagagagccggcattgcaggcaggaagatgccagaaattatgcaagaagaagtgaggtgtcatttacccaggagctgggggaggggcatctcctgcgtccccctcagccccaaccctctcctccagcccccccacccatcccaattttagtttcatgcaataaaaaggccgaactttttattccataaaacatgaaggacaaaactcaaaataaaaatatatttcaagtccatgaccagaaaactcccaccccttgccattcccaaaaggaccttttatgtacgtgacacttttttgttgtttgttttgtttggggttttaccgttactgggatttttaaatttgttttcaggggggtttttttgggggaaaaatttttaaaaatggaagcttctagcaagccccccccgccccaccccagtcaacctctttgctttcttcttttaaaaaaataaaaaaaagga

SEQ ID NO: 9014 - DNA, 430 bp, Canis familiaris
caattcccccctcccgcccgcccggctcccttaccaccaccccgctggcgctggccctcccgggacacttctatttagccggctttctcttgctgtcttttttgggactgctgtgttttgctgttttagaaaatcataaagaaaggaattcatttggggaagtttggaaaacggaaaccaaaaagatttcatgtgtaaagcttttttgcatgtaagttattgcatttcaaaggaccccgtcccccctttttttacagaccaacttttttgcgcaactgtggacactatccatggtgccttgaaatctatgacctcaacttttcaaaaagactttttttcaatgttattttaaccatgtaaataagtgtagatagaggaattaaactgtatattctggataaataaaattatttcgaccctgaaaaaaaaa

SEQ ID NO: 9015 - DNA, 427 bp, Canis familiaris
ccgttttcctggcctggcccaatccggatgctggccccgcaggccatccagagaaccgcacactagtgcccagaaaggaggaaggaatgaatgaaagcccaaaaatgaatatgaatatcccagaaaaggagtccaagaaccattccaccagtttgtaaagagaaaccgaaaatttatttaacaccaaaaagtcagaattgtggttacacttttgcttgttgttttttctatttcccccacacacgagtgaatacctatgaggccccatactccgtttctttggcactggtgtcctagccagatgctgtgaatattcctaacttagctgcccgctgttgcatttgaaaagttgaaatttgtaattagtctgttttggaataaagagagtaaccggaaaaaaaaaaaaaaaaaaaaaaaaaaaaaaaaa

SEQ ID NO: 9016 - DNA, 582 bp, Canis familiaris
cccgtcttgagccaggtaccgcagtaagcttcatcgctgagaggcacaggctcagcaactctctactagcaccatctcagcccccaagaactcgtcaacagggaagagccataggccgccatttagacagtgggccaagggagcttccaaatgtgtgaatggcacatgccagtttctgaagacagcagtaaccctagaattgtctcctttcctgaaggctgtattcctgcttctgctgggccaccccctgaaggctgtattcctgcttctgctgggccaccccctacccctgtcactgcttctctagtagaagtcacatttgtatctgtcagcctttggatgggccacccttgacagcagaagtgcagctggaagtaggactacactgaactgatgtatgtgtacctattccagagctatcttctggctgataggatggcgattttgcaccccagccctatccattgacaccaccacacagaatcagggtctcacatttcaccccaggttcaactgaggatgtggtttattaaacatggaagcgccaaaaaaaaaaaaaaaaaaaaaaaaaaaaaaaaaaaa

SEQ ID NO: 9017 - DNA, 524 bp, Canis familiaris
ctcatgagatgagggcacagtacaattcctgtttttgctccgaagtattcagtaccgctccagtattttaaatgaaatgattttcactttgtggattttggtttgggatcccatagggaagcaccaggcacctacccgacatataccatgtattggaatgattttctcagaatttgaagtaggaaagttacccggacacttctgcttccacttaactggcctgccatattgtaagaatggcatatccttgttactgtgatatttaaaatatccacagtgtccaccttttcccaaagattctagtaatgatctagaaatatctttctcttatctgttatttatcaatttttcccagtatttttatatggaaaaaattgtattgaagacatttagtatgcagttgataagaggaatttggtataattatggttggtgattattttttatactgtatgtgccagagctttactactgtggaaagacgactgtttaataaaagatttacattccacactttgaaaaaa

SEQ ID NO: 9018 - DNA, 585 bp, Canis familiaris
gaattacttacaagatgaagaaataccacaaggcattatatgatcgatttcaaaattactggtacagttaataaatgctttgcattcagggaagggagaatcatcatcttagaattatagcactgataggatccttatcaagtcctaccactttaagagaaggtaaaattcagcaagattgatataccatacaggcttaaatttctataaccagacagtgccccgtctccctgacccgtaatcacttagagtttttgagagaggagaatggaatctcagcactccctatattttaagcgttctgaccggagacctttttttcccggtaccttaattttttaaaattggttggttgggagaaccccgagaaaaagatgagagaagagagccagctggtgagggcagagggtgaacagactcctgctgagcaaggagcctgatgtgggacttgatcctggaactcctagatcatgatctgagctgaaggcagatgttcaaccaatccattgatgaatcaagccaccctggtgtgtgctgggcatgaagtactaggtagtgtactaaaaaaaaaaaaaaaaaaaaaaa

SEQ ID NO: 9019 - DNA, 107 bp, Canis familiaris
gtaaacgagggatttcctttagagataactatttggaatttttatagcttactttacccagttcagctgaataaatactgcattgttgtttctttccaaaaaaaaaa

SEQ ID NO: 9020 - DNA, 546 bp, Canis familiaris
agcagctgaacgagcagtttagctgggtgtcccaactggctaacctcactccaaaaagtgaagacccattctatctccaggtcacgacccgggtgggttctcagacttctgactccaatgttcccgtgggcttcactaaggtggttgtgaagctctttgattctgaccccatcacggtgatgatcccagaagcagtctccaggaacaatcctaaatttatggagactgtggcagagaaggctcttcaggagtatcgccccaagcatccgcagaggaatgagatgtgaacactgcttctccccatatgggagggctgagttccctcttgacccccagagtgtagatgctatggccccttgggaggactttgcaagtcccccaagggcccggccctgccctcgaggcgctcctgtctcctaacccagctttccttcctctggactccgcactgtaacgcctacgtttgctgatcatgggaagaactcctgtgtgccactaactcaataaaaccgccaaggaatctgaaaaaaaaaaaaaaaaaaaaaa

SEQ ID NO: 9021 - DNA, 621 bp, Canis familiaris
  misc_feature (1)..(1): n comprises a, c, g, or t, or includes no nucleotide
naatggtccgtctctagaaggaagacgcgccagctgccctccctgcggcttcaggctcttccgggggagcacggctacgcccgcgcatggacaccgcgcggacagctcgggtcacgccgctgcctaggctcgaccgtcgccaacagaaacaacgcggcttgtagccctgaaaaccaccgtctggccccgctcgcccttttcgtaaaggatggctgggagcacacctgccgcgacccaaagtagatggtgagaccgaatggcccctagcgcagcgaccggcagggatggccgcacagcagccggttctcctgcacccaagtcctgtgagcggcctgaaggcggcgccaaaccgccgagccacccgggcatccctacagtgcagtcgtgtataagagaagaggtcgatatccaaaatatgtaaagaaccgggatccctgggtggcgcagcggttgggcgcctgcctctggcccagggcgcgaccctggagacccgggttcgaatcccacatcaggctcccggtgcatggagcctgcttctccctctgcctgtgtctctgcctctctctctctctctgtgtgactatcataaataaataaaaattaaaatataaaaaaaaaaaa

SEQ ID NO: 9022 - DNA, 535 bp, Canis familiaris
agaatagatcaatcttgacagaacaccaaatgagaaccagatatattttctaattcatggcacgtgaggctgatgaagtaatagaagtgaaatttgtaaggttgagacagaaatgaatggatattgaatgcaccatcctaaaggaaatggtagctaggtgacatgatgcacgtgttagctaatgctatggttgaaatcattttgtagtatagaaatgtatcacattaaccggttgtgccgggatcccctgggtggcgcagcggtttggcgcctgcctttggcccagtgcgcgatcctggagacccgggatcaatcccacatcgggctccctgcatggagcccgcttctccctctgcctgtgtctctgcctctctctctctgtgactatcatgaataaataaataaaatctttaaaaacaaaacaaaaaaaccggttgtgcctttaaacttacaccaaagtgtacatctattacattttaataaagctaaaaaatgtctgaaactaaaaaaaaaaaaaaaaaaaaaaaaaaaaaaa

SEQ ID NO: 9023 - DNA, 587 bp, Canis familiaris
tcctgcgtacccggcatcttgtgttgggactcttccctctccctagggaccacaggaccaccgccaccaccaccccgccccccagagagtgatggttgggtgatactccctcaagcccaagaggagctcctccatctgttctagggaccgggtaacctagaaagggtgggagaaaacgtacaggcccgatgtgggggaacccccgctctggggctcaggttctgggagcacttctaccctacccccgcctccctccccgcccaggcctagatactgactgaattttgaatggacccggccgggaggcctagctgggggactcccttgcctttgggacccgagccaagtagtggagggcacggctggggagacgtgggcacgtcctcctcccccggaggggctggggagagtggccgtttgcactggcgaaccccccccttcccctccgctgcccctttcccggtctcttggcaccccctcctgggctgtccccattccctcttctgtatcaaggtgtattggttgtacatataaattatactttccctttccaaaaaaaaaaaaaaaaaaaaaaaaaaaaaaaaaaa

SEQ ID NO: 9024 - DNA, 547 bp, Canis familiaris
  misc_feature (1)..(1): n comprises a, c, g, or t, or includes no nucleotide
  misc_feature (168)..(168): n comprises a, c, g, or t, or includes no nucleotide
natgtcacttgcccagagcgggtgggctaaagccacgccccccaacaggcctccctgttactatagcatcagaaactgtcacatctctccccttccggagagcagggcttgcactcttcccctagaacctactttgaaggcaattagaagctttgttttcatttcccnctggtattgtcttgccaggatggttaggtacacaaggacgcttattagatcactgagaagaaaaagccaacccgcttctctggtatgaacatctagtttgagagcgagcaaaccagtacggctggtattaagtgctttaatggagtgactggtaacatatcgttctttccttgatagagaatcagcttataattagcaggagttcttttatcatcaccccctcttcccactacaaacttctccgcccagtcccctttcattttaaaccaattccacgcctaaaaataattgtatttgtgggtttcatagttatataatgctgaagggaaccactctttcgttgaaaggtgataaaagttaaataaagactgtctccaca

SEQ ID NO: 9025 - DNA, 610 bp, Canis familiaris
  misc_feature (393)..(393): n comprises a, c, g, or t, or includes no nucleotide
cttggtcccgcccctagtttttggggcgattagatgttaactggacctcacctctacagcatctatcctcatggattcaactgataagtttcccgtatggtcacacatgggttctggtttccttggcagcccatggctgtgtttgaagataagtttaggcccagatatggaggaagaggaagcccagaagctggtaagtgaagcccttgccgctggcgtcttcaacgacctggggtctggaagtaaccttgatctctgtgtcatcagcacagagccaactggacttcctccgcccgtaactcggtgccccaaccaagaaaggggactaaggtttggccggtaccagatgtgagaaagggaccaccgcagtcctcactgaaaaagtcaccaccntggagattgaggtgctggaagaaaccgttcagaccatggacacttcgtgaatggcatctgtggatggatggttactgctctacaagattggggtgcggggggacagtggaggcgcccccctcagaccttcatttggccgtgtctgctgaatgagaccccaataaaacatgaaaacccagattgaaaaaaaaaaaaaaaaaaaaaaaaaaaaaaaaaa

SEQ ID NO: 9026 - DNA, 615 bp, Canis familiaris
  misc_feature (278)..(278): n comprises a, c, g, or t, or includes no nucleotide
cagaggagaagcggctccccaagggagcccggtgtggggacttgatcccaagatcaagcagatgcccaaccgctgagccactcaaggcatcccataacgtagtttattatgttgaacttattatataaatgctaataagataatacatttatacaatgtattgattttttttgatttaagattatgatatttggaagaataaatgctcattgtgagcctcccagtccgacataaaaaaacatcactctggctaaagccctggcagcttatcccaccanttcttatattaggcttttcttttctcttaagtagaaatcaaagtttacaaaataatagcagacatttagatggactactattatggagtggtagaagggacttcagcactgaggcttatcatttttcttactggggagcccaatcaggactggagagaccaagctctttttacttgaatacacagaagcatagtgactatttgtgacttctgtctttctctcattttaatgtactgtaatgtcaaaatccgggtgaaaacctaactcatttgggatcttgatattcagaaccccagtcagtacattctaagaatggaattaggattactaaaaaaaa

SEQ ID NO: 9027 - DNA, 659 bp, Canis familiaris
tccttcgtggaccagcggcgcttctcgcggccccgcaacctgggcgagctgtgcccaggcgcccttcggtatcggccaggatcgtggggaggttagtcttatcccccgagtcaaaggcttatttgtggttttcgcttgttttcccttggggccccttcactcctgtactgcgtggtgacgtcccctatgctgctggtggctctggctgtcttctttggcgcctgttacatcctctatctccgcaccttgccgtcccagtttgtgctgtttggccgagaggtgagcccagcccatcagtatgctctggccgggggcgtctcctttcccttcttctggctggctggtgcagggtctgctgtcttctgggttctgggagccaccctcgtggtcattggctcccatgccgccttccaccagatggaagctgtggatggggaagagctgcagatggagcctgtgtgaggacctgcgggcctctggaatcggctgcctcatccctgttcccccctgccccgcttggccccgaggccctggcccaaggcctccttcccatctcgagcccagggcgggattccagctgtggaaataaagctgttaccgttgtccaaaaaaaaaaaaaaaaaaaaaaaaaaaaaaaaaaaaaaaaaaaaaaaaaaaaa

SEQ ID NO: 9028 - DNA, 576 bp, Canis familiaris
aattatagagtaattccccagtaagccctcgttttttaattaaaatctctggccaaatcccacttaatatcacttgctcaaatcttagtctccaaatgaaagctagatactggaaacttaactgccatgtggatctttttcccacatgatttataatacataaagccgaatatgcagtttaaataattgcctaccataaaaaaatattttgcctgccattttcagaattcttttttgaaggtttctgttgatgttaactgagctattgcagatattttaatttccctaaacgtaaaatttggagtaaatatatatatatatgtcaaccattcagtaaagcttttgtttaattttcagaaggaatcaaataaacagtatccatcttctgtagttcgtagggtgttaggtcctttaacgtaaagtcaaacttcaaattccatctagctctgtgttaatccctgttattactggtaaagcttcatttgaatatgtaaattcagtttaggctatgtaaaatttttgctaatgtcatcattctgaaaaaaataaatttacaaatacatttcaaaaaaaaaa

SEQ ID NO: 9029 - DNA, 528 bp, Canis familiaris
ggagctggtgctgggctgtgggctccagcccactccagcctcttcccacccggggagggtggagacagggaagggcccacaggttgctcccctgggaggcacttgcactcatggtgcgacctggaccccttcccaggccagtagaccacacctgatgacttggtcagggattcttctgtaacagccaagaacccttcctgatttgactttgaggccccaacattctagccccggggccacccaggccccagaagaccccccgccccacccagtcccccagcacaggcccgtccccggcgccttgtccctgttgcctgctgcactgatcatgaagccaccggccgctgccacgtgtgtagtacacatgccatcacactccctcctgatgggcgctgtgtgagggggtgtcacccagccgttttctcagtctcaggggccggtggctgtttttgaacttgtgttgactattgatacttatttactgtacaaatataatttatcatttgtatccaaaaaaaaaaaaaaaaa

SEQ ID NO: 9030 - DNA, 611 bp, Canis familiaris
gtttgacactcaagcgaggactagggctccagcacctggtgtcacgaagggaaggtggcgggagctctgaggcagcgggccctcaggcggtcccacctgttggcagtgcctgcttgccagctcctgccacccatccttcacaccattctacagttgtatttggggggctctgcagatctgtggctgtgatcaccctacaatggggaatgcttgtgaagggccctggttctctggaggagtttaccgggcccactccacctcagcttggacggggcatggcgtcaccagctgtcttggctcccccatccctggttctagtccctgctgggctgagaaggcacccttctccaaagggacctggggactggccccgtgggtgagggggccgaggcacactgcgcccctttccatgggcagggagggagtggagtgagcccgtcgcctgcctggcatccaggggctgccgagctcccgaggcctggagagggaacagagagacagagttgcccaagactggctctagtagtaaaaaggtcccttgcagctgggcttttctgaccccatgttgttgataaatgaaataaatcatcttacaaaaggaaaaaaaaaaa

SEQ ID NO: 9031 - DNA, 562 bp, Canis familiaris
cataaatgaggcccgtacattcctgttttgctccgaagtattcagtaccgcctcagtattgttaaatgaaatgattcgtcaacttgtgactttggttttgtggatcccatagtggaatgccaccacggcaccccatcccacactatacccatgtattgaaatgattttctcagaatttgaagtaggaaagttaccccacaccttctgcttccacttaactggcctgccatattgtaagaatggcatatccttgttactgtgatatttaaaatatccccagcgtcccccttttcccaaagattctagtaatgatctagaaatatctttctcttatctgttatttatccatttttccccgtatttttatatggaaaaaattgtattgaagacactttagtatgcacgttgataagaggaatttggtataattatggttggtgattattttttatactgtatgtgcccaagctttactactgtggaaagaccactgtttaataaaagatttaccttcccccaaaaaaaaaaaaaaaaaaaaaaaaaaaaaaaaaaaaaaaaaaaa

SEQ ID NO: 9032 - DNA, 625 bp, Canis familiaris
ccgctgtttagccaaagctcccttgcaacaccaggcccgtacccagccagtctcttgggtccgcaggccccagagtccctgaccctgctgaccctcgctgctcccaagactcccgcggtgccccacagcttaacgtccttggctgccacctcctggcgggttgcccccccggccctgatgcccgattcctcgctgcggagaacattgtgaggacaactgtagcctcgtagctgggttctctctggaagagacacacttgccaagagaaaactgtgatttttgtcatatttctctcgttaaaaaccataccttataaaccctgatcttagctaatgaaagctcttctggaaatccatgaccaccaccacggcccaccagccagcgcccgactgccttctccccgtcccagtccgggcccctcggaggcctcactgccgttttagagaacagcgtatttattgaaaccatgagaagggaccaagtgccttaatcgatatattttgtgattttttaaagatctatttaaaactgcttttctgctcttcataccgcacttagtgcaatgactatttctctgtacccgtgatgcttctgttttaataaatgcctcaaagtgaaaaaaaaa

SEQ ID NO: 9033 - DNA, 656 bp, Canis familiaris
ttcttaagccctttgctcttggagtaacttctccagcttcagctcaactcacagcttctccaagcatcaccctgggagtgttttgagacttttctcataaatgagggccgtgacattcccgttttgctccgaagtattcagtaccgctcagtattttaaatgaaatgattctcacttgtgatttggtttgggatccattagggaagccccaggccacccacccatcatataccatgtattgaaatgatttttctcagaatttgaagtagggaagttaccccaacacttctgctttcccaccttaactggcctgccatattgttaagaatggcatatccttgttactgtgatatttaaaatatccccagtgtccaccttttcccaaagattctagtaatgatctagaaatatctttctcttatctgttatttatccatttttccccgtatttttatatggaaaaaattgtattgaagacactttagtatgcacgttgataagaggaatttggtataattatggttggtgattattttttatactgtatgtgcccaagctttactactgtggaaagaccactgtttaataaaagatttaccattcccaccaaaaaaaaaaaaaaaaaaaaaaaaaaaaaaaaaaaaaaaaaaaaaaaa

SEQ ID NO: 9034 - DNA, 654 bp, Canis familiaris
cccagaccagagcttgcagctggtatagaggattctgcttgtattccatgggcttactattcaactgtggatcaagttaaggatctctatagtggattaattggcacactgattgtttgccggagacattacacggaattcttccatcccatattaaaattggaattctcccttctgtttttggtttttgatgaaaatgaatcctggtacatagatgacaacatcaaaacatactctaaccaccctgagaaagtaaacaaagatgatgaagaattcagagaaagcaataaaatgcatgctattaatgggagaatgtttgggaacctacgaggcctcaggatgaatgtgggagatgaagtcaactggtatctgatgggaatgggcaatgaaatagacctgcactcggtacattttcatggccacagcttcggatacaagcacaggggcatttataggtctgatgtctttgacattttccccgggacatacccaactgtagaaatgtttccagaacacctggaacctggttactccactgccatgtgaccgaccacattcatgctggaatggaaactacttacacggttctatcaaatagagacacccagtttggctgaaagaaataaattggtgataagtggaaaaaaaaaaaaa

SEQ ID NO: 9035 - DNA, 734 bp, Canis familiaris
ccccgcctctgatttcttagcacatttcttaggattaaaggtcaaaagatgctgatttaaaaggggtttctggtggtgttgaacacatgcaactttttacgtaaaaagagctctgcactggccatctatgaagcctctttaggatgtttgtcttgtcatttttgttctttacatcaagaaattgtatgtacaaatatgcggagaaaagttatattgcctctgcttttatcagggtgctaaaccctggtacttctatataaagtgtattaaaactgggatttgttacccgttgctgtacgttgtatatagaatttttataaattgtatgcttcagaaataatttatttttaaaaagaaattaaaattttaaatctgcaaccacgttttgcctttcctctctgaaatgtatagattccgtttgtcaccagggatcccaacccacatccattgtgaagtgttctctctctagaacagtccttaaatgtacagtgtattttatagatttgaagttaacattgttattttcaagagaatttatggacattgtagaaatatataagtgcatttcccaactgccttaaacattgtatttttatagacatccttaaaaaaaaaagtcctatgttttaagtaactatggctttgtgtattttttatttgttttattaaaatgtgtacatccagtaaagagtttttaaataatgaaaaaaaaaaaaaaaaaaaaaaaaaaaaaa

SEQ ID NO: 9036 - DNA, 634 bp, Canis familiaris
  misc_feature (1)..(1): n comprises a, c, g, or t, or includes no nucleotide
natgtgatcgcggtttttgcagtacatccatgggcgtggataccgtttagactcacggggatttccaagtctccaccccattgacgtcaatgggagtttgttttggcacccaaatcaacgggactttcccaaatgtcgtaacaactccgccccagttgaccgcaaatggggcgtatggcgtgtacgcgtgggaggtctaatataagccgagctcgctttagtgaaccgtccagatcgcctggagacgccatccacgctgttttgacctccatagaagacccccgggacccgatcccagcctcccggacttctaagcctaggcccgcgggaccggattaaccaattttcacaccaggaaacagctatgaccattaggcctatttaggtgacactatagaacaagtttgtacaaaaaagcaggctggtaccggtccggaattcccgggatcgccccaccactctcatacacagtgccagcacccgctgcctgcagtcaggcgcccctgcccggtgtcctcagctgcccctcgcctgcggccccccccccacagagctgctccttgggggggggggtgctgtttgagagtctttgtgttgcacattaaaactcaacatttagacctgcaaaaaaaaa

SEQ ID NO: 9037 - DNA, 643 bp, Canis familiaris
gtaattccggaatccatgcggccattctgtacattttctgcagctgtccaggcattgataagccccttcttattgagacgtgcatagtagggataccatttctggagtccaaaaagagctcggtgggtagaggaagccgtgatttgctgatttgatattattccacctgtcaagttgcccaagtgggcccgagcatttgtattgacaattccttcccatgaattcgcctgggcattcagcaggaataattagcaacaaggtctgtacatattccaccatgttgtttacaaggcgtcagcgttcacattcatgttatgttgtgctgacagtgaatcccattaaatcctgcgaggacatttacaaacgtaacctatgaatgtgtcccctcggtacgcttcacttatttcacaggttcctccagttatggcatggattaggaacgcagggacctgctgaagttggctcttcttcgtctgatgcaacctccacaacagctagaacagttgggatctgtgaagccatctggacattcgcaggaaaaggaattgtcagacaatcctgacaaacaaacacctccattttcacatggattgggatcacagatatcacctctgcacagctggggacacgcaggccgagcccg

SEQ ID NO: 9038 - DNA, 580 bp, Canis familiaris
acagcgcaggacctgagtctggtgttaggaaacataattaaagttgtcatatgaacccagttcctcaccatttgtcctctcatcttttcagtgccatttctcgttcatgttaggctgtcttgtacaaacttttgggagccggggtggtacatcagtgtctctggaatccgccaggccgctggggggtggatcaccacaccctgtagggcttctcccctcctagctgtctttgggaaacgcaggactgggaggctgttttgaccagagaggccaaggtcaagagcaaggtgtagaaaaattgtaaaatagaaaaagtggtgttggtgaattggttttgttttgttttgttttgttttcacatttggatagctgtcacaagaggtctttccctcagtgttccagcatgttcttcctgtgtctccctttctcacgtttttcctcctagttaatcaagagaaacttcaaagtccatgggatggtcggatctcacaggctgagaactcgttcacctcgcaagcatgttcatgaaaaagctgcttcttattaatcgtgcaaactcttgccacgatgtggggagttt

SEQ ID NO: 9039 - DNA, 588 bp, Canis familiaris
ggcggagaacggcgacccatccagatcacgatgccgttcaccgacagtgggaccttcgaggacggtgtggcaggtcaagttctacaattgaccacaagcgagatcactgccagtggggaagccccttctccgtcatcgagtacgagtgcaagcccaacgagacgcgcagcctcatgtgggtgaacaaggagtccttcctctgaggccgcctctccccgacggtgcgggtcggccccttccgaggcccccttttcgggtaacccagcgcaggccttcaccaaggcacccagcctctcttgccccttgggtgccgatgccctcaccggccccggttattctgcaagtgtccgttcccttccgatgtaccatccccgacgtgaaaggttgtgacgccccgtccccgagaagcccccactgtactaacgcgtcgctgtccctgcgcccggccaccgaccgctgcgaggagctcagtggcgcgggccggtggcgcccgctcccaacggttcggctgcagggccgccggtgtgtcgttgccaagttgagtgatcgcccctgttcttggtaaatgcgtaaataaaaagataaaac

SEQ ID NO: 9040 - DNA, 706 bp, Canis familiaris
  misc_feature (67)..(67): n comprises a, c, g, or t, or includes no nucleotide
aagtgattggaagttataatccttttaggttaaaaaatggggtagccattaaaggcaccttctctcntggtgtgctagtatcctgagtgtattctctgtaagtatagctcaaatggtcagtgtgaaaggttaacaaaagcaagatgtcaattgtacgtgggtggttaaggccagggcctcccctaccactgtgccactgacttgctgtgtgaccctgggcaagtcacttaactataatgtgcctcagttttccttctgttaaaatgggataataatactgacctacctcaaagggcagttttgaggcgtgactaatgctttttataaagcattttgggatccttcagcagaggaattcttttaagtcctgagtatttttatagtagcagtatccaccgtgaacttatgtccaccgtaaaccacgtgtcctatcattaatcgatattctctctgagagattggataaatccattggataagtggtggataactagccagacaaaatttgagaatgcataaactcattgccatggaaacaatacacaggataccttttccttaattgggtgggattttttcccttttatgtgggatagtagttatttgtgacctaagaataattttggaataatttctattaatatcaactctgaagcttagttgtactgatctgaaattgtgtttgttcataataaaagtgaagtga

SEQ ID NO: 9041 - DNA, 473 bp, Canis familiaris
  misc_feature (1)..(1): n comprises a, c, g, or t, or includes no nucleotide
ncttcaggagatcgacagtcagactcagaccagattccatgtgcacccgttactagcacaattcaaggatatcctaggagccttactcctacgtcgctaatccgtgatatcactagttgttatgttgtcaccctgacctattaggagacccagatagactacacccctgcaaaccccctgaacacccctccacatagtagaacctgagtgatatgtttctattcgcctatgctatcgctagcgatgccattcctaataaattaggaggtgtactcgccctagtattctccatcctaatcgttggcattcattccactcctccacacatctaagcaacgcagcataatattgccggccccttagccaatgcctattctgacttttagtcgccgatcttctcactttaacatgaattggaggacaaccagttgagcaccctttcatcattatcggacaagtcgcttcaatcttat

SEQ ID NO: 9042 - DNA, 390 bp, Canis familiaris
aatgacactagttcccagaggggttgatgctggaatacatcttccctcgtacataagggcctcttagcctgtaaagtcatttatacccagctagcaaatattatgtttttcgtagttttaagaaactttagtggtatagaagcataatggaaggaggatttagcttcattgctaaatatagaaaaggctaatcagggatcactgggtggcgcagtggtttggtgcctgcctttggcccagggcgcgatcctggagacccaggatcgagtcccacatcgggctcccggtgcatggagcctgcttctccctctgcctgtgtctctgcgcctctccctctctgtgactatcataactaaataaaaaattaaaaaaaaaagtttaaaaaaaaaa

SEQ ID NO: 9043 - DNA, 679 bp, Canis familiaris
cgagcttgctctgaagacgtcctcgatgtccaagctggcattcctccgccttctctccagccggcctcccagacatcacgtatcactgcaagaatagcatcgcgtacatggatcacgccagtgggaatgtaaagaaagccctgaggctgatggggtcaaatgaaggtgaattcaaggctgaaggaaacagcaaagttcacagtacagcagtcctggaggatggttgcactaaacacactggggaatggggcaaaacagtcttcgaatagccgaacacgcaaggctgtgagactacctattatagatattgcaccctatgatgttggtggtcctgatcaagaatttggtgtggacgttggccctgtttgctttttataaaccaaactctatctgaaaccccagcaagaaagtttcacagctccatatgtgttcctctcgttctaaccttgtcaagccagtacaagtgagccaacgtcaagttccagttatgttatttgccaaaagtgtttggaaaaagagtagtaagtgttggcacaaaaagaaagatacctttttttttttttttttgctgttacaccaaatacagttcaaatgctttttgttctatttttttaccatttcaatttcaaaatgtctcaatggtgcgtataataaataaacgttcaacactcgtgacagt

SEQ ID NO: 9044 - DNA, 552 bp, Canis familiaris
gtggggacagagccccgcaccaccagtatccctgaggacgcttggggaacccaagtcacgggaaggtgactggatcttgaaactggtgggaggctttggtgctaccctaagggaggtgaaacaagtccagctggcctgaagatcgtgagtgctgccctacctgcccctgttccttggacggcatccttccctttgcaaaaacggaccccaaactagggacccaactaattctcggtggctaaccgaaattgggaggcacttgaatggttagcaatttggttacaggactccatgtcaggaatttttattttgtttagacttttttgttgtttgtgttgtttgttttttgttaactgagaatgaattgtcaagtctagcttgcggagtaaaaatatggagagaaggggagaaatattttaagaagctctgtgtcctcaatgccttcgtgaaatcctactcagtaggctttccggggtatgaattgtaaacataaagaactaatttaatcccaaaaaaaaaaaaaaaaaaaaaaaaaaaaaaaaaaaaaaaaaa

SEQ ID NO: 9045 - DNA, 463 bp, Canis familiaris
tgttgtcatgtatttcggactactcccgttaagctggtctgctcggtgcccaatgggtgcgaagatctgtgtttggcccctcgtccccactctccgtgctactttagggcaggaaaatgagaaaatagaagcagaaaaagcatacaaataacggaaaccatgaagaccaagaagccaccacccataatgatgatgggcgaaagtggtatcctgtttgacattctaactctttgcttatcagtgaccttgatcattgttctctctagaaaatccttgggcatttttatttctagtcatgtgactttgtctttaaattttggctgtgtgttttactttttaaaagaatcaaacaaattactcttgacctgcgtgattttgttttcctattaaatatggaaacctttcccaatctggagattgaataaatattcattttcctttaaaaaaaaaaaaaaaaaaaaaa

SEQ ID NO: 9046 - DNA, 458 bp, Canis familiaris
ccagggaccgccaggtcccaactctgggggccagctgctcctgttcctggtctttgctggccttcctggctctttgtttactactccatgcagctgaggatggcaatcccttcgtggacggagccctgagggcttggcttcgtggccagctgttcccggaagtcctggctgactgccttagtagtgtctgctgggggaggggttgggggcttttctgtgtgttctagcttcggtgtgctgggcttggcccagggcagtgcttgctcccctgcctcgttctgcccaggaggtggcaagcccaggccctccgcggcatggcgggcccgggcaggccttcctctggagtctcctggtcctgcttgcctctgatccagggcccaggagggtaagacccttctcctggagaggagaacatggttgttgtcattgcatgcctcctgtctgttgtcacctcgtcg

SEQ ID NO: 9047 - DNA, 619 bp, Canis familiaris
aggttgtttctttatttcggagcccaacgccaaattttgctccggtgccagaaaaacagctccatttgaacaaaagggtatccatgcaaaccgtactgtaaactggtttaaaatgtgggggcaaggaggaggatgcatttcaaaagcctgatgacatccgagccaaattaggggaagtttccccatccagaaaattggttaccagttatcagagtatctgatgcaggcactcatggctcctgagaattcctcagctggggtaatggggtcatactatgaatccctcactacaaaatgacttgagtccagcgaaatctcattagggttaagaatattttcagggatccttaatactttgatttttgttttctgaaattggattttattttattttatcttataatttcagttcatctaaattttgtgttctgtacatgtgatgtttgactgtaccacttgactgttatggaagttcagcgttgtacgtctctctctacacctgtggtgcacttaacttgtggattttttatactaaaaatgtagaataaagactattttgaagatttgaataaagtgatgaagttgcattaccaacaaataaataagaaaaaaaaaaaaa

SEQ ID NO: 9048 - DNA, 626 bp, Canis familiaris
tgaaacgcaatatcagattcgggagacctcttacgtcagcaccacaggtccgccatattcgggaaagatgatggagatcatgacccgagaggtgcaacagaatgacgttgaaagaagtggtcaataacttgattccagacagcatcggaaagatataggagaaagcttgtcagtctatttatccacgtccatgatgtttttgttagagaagtataaatgctgaagaagcccaagtgttgaattgggaaaacgtcatggagcttcatggtgaaggtagtagttctggataaagctacgggggatgagaccggtgctaaagttgaacgagctgatggatatgaaccaccagtccaagaatctgtttaaaattcagacatttaatggtgaccaatagaaaacatatttgtgatgtttaatgttgcgttatcattcttttgtaaataatcaggctcggtgaagcagatgttttgaactgaccgtgtgaacttgttcagaactattgtatggatcttatccattgctcgttggctagctaaatagctgcaaaagggtagtgatctattttaagctgtagtgatctggatggaagtgttctagatggttaataaaaggaaactttttaacgt

SEQ ID NO: 9049 - DNA, 559 bp, Canis familiaris
tggaccccggaaggttccaggcccccggacttcagcccctctgccccatgagctgccctgagaacctcagtctggggataaaacccataaactaaaggagggagggcaccaatggtgattgcgtctgcccgaggagcttggacaagtccacccccctgtggatgggacgtgcgaccctggaaagcacagagccaggcctgggagagctgctttctgcccccagccccgcctcctgtcgtcactggtgccctgaatggtacgagattggtcagcgtccccccacccccaccgccccgcacctgaatcagaccccgtggaagcagtgcgaccgaccgaggctgctttccaaagggtcagtgttgtggcaaagctcttagaacagcaccaggcacatagtaaatgctcaataaatgctgactattattatcagcactgctataatggtggttattattgaattgcccggcatattatagaagcttaataaatgttcaaattgaccaaaaaaaaaaaaaaaaaaaaaaaaaaaaaaaaaaaaaaaaaaaaaaaaaaaaaaaaa

SEQ ID NO: 9050 - DNA, 591 bp, Canis familiaris
atgaagccggtgtccccaagacaaaagcataagtccccaacttgaaggatgtccgagaagtgttgaccagaccaggtcctatgcagtggtacagggaaggatgacaatccgctgcaagggagaatctgggggagcagttttccttgagcggagacacaggtttttgtcaggtgggcctggtgagttggggtctctacaacccctgtagcaagagtaataaaaactcacgccagaggccccccaagggcaaggaaccacgagattttcacatcaacctctttcgcctgcagccctggctgcggcagcacctggaggatatcctgaacttcttacccctctaattgtggccacccatccctctgttgtcctgccagcatctgccatctgtcttgtctcgcacccttgaactcagacccatgacccatctgtgctcccggcaaccccagagaagcacatccaggctggggaatccccaggggcgcaccctctcctttccttgactcactctcctttcactcatgtggaattacccagttatgaaattaataaaaatcgacaatgtcaaaaaaaaaaaaaaaaaaaaaaaaaaaa

SEQ ID NO: 9051 - DNA, 551 bp, Canis familiaris
cttcataaaacaagggctcttttcaaccaagaacaaagggttttgtcaagggaaaagttgatttaatacccataaatctccccctcaccctcaagtaattacatcctgagatttccacttttcttccaattctgaatccttgtttttccctcatctgagagcaaagttaaagtagacttaaggccattgaagaacaaaatgttggccaacagctcatcacttgtttgtcttatatttttttactgccacgaaactgtccatgtttctgtgtgtcctccaatccaaacacacattcactgccacttataaagtgaaggatgtaaagtaggatatattaactgtttcagtgaacggattttgtgaagtgccttctgttttagcactttaagtttatcacattttgttgagcttctgacattccactttcctagattataggaaagatctgtttatgtagtttgttttaaaaatgtgccaatgcctgtacattaacaagatttttaaaaataaaactgtataaaacaaagaaaaaaaaaaaaaaaaaaaaaaaa

SEQ ID NO: 9052 - DNA, 642 bp, Canis familiaris
ttttgtttggttaactgaatctaattttgacaatctttttgtaataagagcaattgtagcatattacctatgtgatttacaagttacttcatatatactcactgtatttctggtaagttcaatttttctcttctcatcataacagaatatttgagacaagacttctaaactaaagcagagggaaaaatatctgaaaatataagatgaggtcccatgtacacatatttatttatttatttatttatttatttatttatttatttatttatttatttatgatagtcacagagagagagagagagagagagagagagagagaggcagagacacaggcagagggagaagcaggctccatgcaccgggagcccgacgtgggattcgatcccgggtctccaggatcgcgccctgggccaaaggcaggcgctaaaccgctgcgccacccagggatcccaatgtacacacatttttatgaactctctaccaatgtgtttctgaggcaaatcagcctcatgaaaacagagtggcctgaggtagattttggtaaggggagaagacactgttgattatattgatttacagattcggtttagaattttataatcctcctcagttgcttatagtaaaaaaaaaaaaaaaaaaaaa

SEQ ID NO: 9053 - DNA, 514 bp, Canis familiaris
acatataggagtaatctttccggcctgacccctgagccatgatatgattcatcgtcgtacgcccgtagcagagaactaatcgagcccccgttcgactttaactgaaggagaatccgaactagtctctggatttaacgtagagtatgcagcaggtccttttgccctattcttttctagcagagtacgccaatattattatagataaacatcctcacaaccattctattcttcggcgcattccacaacccactcataccagaactctactctattaacttcacgtataaaaaccctcttattaaccatctgcttcctatgaattcgagcatcataccctcgaagttccgctacgatcaattaatacacttattatgaaaaaattttctacccttaactttagccctatgcatatgacatgttgccttacccattatcaccgcaagtatcccacccccaaacaataaaaaaaaaaaaaaaaaaaaaaaaaaaaaaaaaaaaaaaaaaaaaaaaaaaa

SEQ ID NO: 9054 - DNA, 318 bp, Canis familiaris
  misc_feature (49)..(49): n comprises a, c, g, or t, or includes no nucleotide
  misc_feature (111)..(111): n comprises a, c, g, or t, or includes no nucleotide
tgttataaatagcacaagcttttgcgtttctccgtcactccttttcatntggttccacttctctcgttctgaatggttggagatgcttcagctgagggaggatggggattngtgggacaaggtcccttggtgctgatgggctgaaggggcctgagttgtgggcaggtacagctttcctgtgggctctggggagcctgtcatgttgctgtgtcctggtgagcagcccgacccaataaacctgcttttttaaaaaaaaaaaaaaaaaaaaaaaaaaaaaaaaaaaaaaaaaaaaaaaaaaagaaaaaaaaaaaaaaaaaa

SEQ ID NO: 9055 - DNA, 595 bp, Canis familiaris
ccttgtttagtaatctggttttgagctctggaatggcttttggcatggggacggatgttttctcatctgttaagccttctggggattcatgttctggaaccctgtgactaccaagtcttctagcccatgctctcctttggtggttttgacaatgtccctatagctcgaggacaggcccctgaccgttttttacaccaagatgatactttgctgaaatgtcagatggaaccatttgacttgcctaatctactagatgtggcattgagaatacctaccatagttttattccatattactttgccctttattgcttcttaaacatttagatttggctacaggtaaccattttcagagtatggtgatttaagatagtttcatcatcccacgtgtgcacttttaataaggattttattatttggatggcttggattttccagcaattttgctgattttgtttatagttttttgtgtttgcttaatttatatttaacatggagactaagtttgtatgagtaggtatctatcatgccagaacttgaaacataataaagatatatttttataaaccaaaaaaaaaaaaaaaaaaaaaaaaaaa

SEQ ID NO: 9056 - DNA, 545 bp, Canis familiaris
gtgacaatgtgaagaaagctactagattaactgtattctcagtgtaaatatttactttgaataattaagtagatttagtggactccagatgtcctcttttctgataggcatgttgggataaaagatataatgggcatcatcttcaattctaccttttcagtttcaacctgaagaggaaactgagcaggtgataggcaattaacaggaattggggagactcctaactgaggccctgccaaatgggcatgtaactgtgtgctcccttctaccagtttgtagtcatggacctgatcatccttttcaggttgctttgaaataaaacttgcctttccatgcaacactcatattgaggtatagagattttcatataagtgttccatttggtcttctagaaaaactataagaacttaaaaatatatgtaacaatactaccattgctacccaaatcaatggttattcttcattattatttaatataatctaataataaacttttaaaatactttttaaaaaaaaaaaaaagaaagaaaaaaagaaaaaaaaaa

SEQ ID NO: 9057 - DNA, 506 bp, Canis familiaris
tgaggaaggtcctggaaggattgtacttcgagattgcatctattgagtatcaggaccgtgacgccctgctgcagcagatgttcgagtccgaatcactccagaggatgaaggcccgttcgttgggatgagagttctgaacttgtcacccagtgacagatatcccaagaatcccagtgtttggaaacagtgcatgattctggactggaagggtccacagcctggagaaccaagccaagctagcgatcacctcgttgcatatgctgtctagagatggctttccccatctgagttgtctctgtggcctgaccagcctgggcttcagccccacctgccctgcgaggtcagctgaaaggtgtgcagaggctgcctctgtgtggcctgtcgggggtggttctgaggtctgttcagagcagtaaggacgagaagatctatgaagagatcatgaggagcacttatcgtacgcctgtacgtatgtgtgtgaggtcctttcagtgcatatattaaag

SEQ ID NO: 9058 - DNA, 537 bp, Canis familiaris
ttaaggatggactcacacaagcttatggttttcatttacccaaatttttagattctgaatgtagatggagtctcgttttaagagtcacccaaggtgcctgccccccgtgtcctgctaagaagagtccctttgagactgtcccaagagttgttcagagaactcagttggcaggggttcttggtcttgcttgccatctaggtttgggatttgagggacaattaaatgattattttgaatctaggctcttactcctctgaggaatgggaacacaaggtagtcacctatcacttaaatttacaattccaaaagattactacaaccatgtcccatgctcagattcaaatggtttttcatatcactttcgggtagtaaaatgatttacatttttttcttaattggcagcaccaattgccattccttacactctttgatttgtttttgttttgttttgtttttactgagctcttgcatgatttatcttgtgttaccatcctaaataaacattttattaaatgtaaaaaaaaaaaaaaaaaaaaa

SEQ ID NO: 9059 - DNA, 501 bp, Canis familiaris
gaacaggggcaggacaacctcgccagtgtgaaggacactgagaagaagtgggctgagcaatatctaaagatcatgggaaaggtcttagaccaaggggaggacttcccagtgtcagaaatgacccggatcaccaagctgattgagaagaactagatgagtgatgggaagaaggaagagctccagaagagcttaaacatcttgactgctttccagaagaagggggtcgagaaggaggagctgtaaaaaggcactccaggttttccagggtttgggggtggggagaggggagagttaatctgttggctgtgagagaccctcctgggatacgagagagtggtggttaaaggggtactaagctggaaatctgagcatacctggacattgacgctgatgtgaccatgcttaggacattactagcgccagtttggtgtataaccagagcacttaccagatggcttgtgaaatcccccctcagaaggaattggtgctataaaaaagagt

SEQ ID NO: 9060 - DNA, 674 bp, Canis familiaris
tggccctttgaagacatcctgggcagagacagtgcgtcttactccttttgatttcttgaacgcgacttttagtacaatcagggaatccgaggcagaaggcaggcggcaggccctattcaacaggggctctggatcagctgctccctccccaggagctgactctggccctgggagccccagcgtctctaggggatgccgctcgccttctgggcacacaggctcgggcctgtcctcacagcggtgccacccgagctctgagtgtttactcctggaatgcacaggtgtcacacgcatgcgctgtggccctctccctcgagagttgcacacactggcttctctgcccatcggctggggaagctgcgcccctgggccgtgccctccatgtgcccctccacctctgtcctagatgccctgtgctcccccttcctcctcctggtcttacccctttttctgccctcccccagcccctccttacactctcacaggcggtcaaagttcccgtcttgggggccagtgctccatcctcagcacctggagcagagcctggctcagagaagaggctccgttaagagaggtgaagtgattttcctggcctgtccttcagggaattcagaggacattcagtcttctatacttttaaaaaaaaaaaaaaaaaaaaaaaaaaaaaaaaaaaa

SEQ ID NO: 9061 - DNA, 685 bp, Canis familiaris
taaattttagttgtgatgggagttgtctgtgggccacattgtacagcccattccgctataactcttgttttgaaacgtatatttgtcccacttgatgccacatgttacagtaaaatttatgcatttcttaaccagtttaacacagtgtaaaactgctgtctggaatgagagatggtaagaaaatggaatacttgtaattagaaattagaaaattagaggggcacctgggtggctcagtcaggtaagcgtctgactctagatttcggttcaggtcatgacctcagggtcctggaattgagccttgaattgggctctgcactcagctaagagtctgcttgtccctcttcctctgctcctactcaccgccccccaaataaataaataaataaataaataaataaataaataaaatcatgatcccggggtcctggattcaagcctttagtcgggctcccctctgcctgctgttcctccccctgcttgtgtgctctctcgctctctctctgtcaaataaataaatgaaatctttaaaaacaattttaaaaagaaattagaaaattagagcaattagaaaaaacttggagatgaatgaaaatgaaacacagcataccagaatttgtgggattcagctaaagtagaggaatatttatagctgtaatcacctatgtttaaaaaaaaaaaaaaa

SEQ ID NO: 9062 - DNA, 636 bp, Canis familiaris
cccagcctcacccaagcacaagcgggtgcaccgagggcgcatcggcagcctgccgccgccgccgctgctgcagctgccgccgcaggcctagacctcagccctgcctcgatgttgaggccagggcaggtctccctcctgggtcctgaggccgtgtccgttctcggctctggcctgggcctcagcctggccccagctctggccttggctctgaccctggctcggtgctgggctccctccctaatcccagccccagagctgtctccggctctgaatccacccccacccctgagtctgttaagtcttctgaccctaagcctggtcacagcgcccatcctgaccttgtggccggcccctgagcaggatccagtgcccagccccaaccccaaccccgagtctcaccctgagccctgctctcccgcccatgacactgccagcccagtgctccctactggcgagagtcccgagtgggtgcaggagcaaggggcactgctggggccggatggctgaagtggacgccgacactcacgggggcctggggaagttgtgtgtcatgcagtttagtaaaatcctcccactgcctcctgaaaaaaaaaaaaaaaaaaaaaaaaaaaaaaaaaaaaaaaaaaaaaaaaaaaa

SEQ ID NO: 9063 - DNA, 753 bp, Canis familiaris
  misc_feature (121)..(121): n comprises a, c, g, or t, or includes no nucleotide
ctggagggttacccagatgggacatctcttacacccatctctgtggaagcagttcaaaaaggtcagacagatacagttctatcttatgtagaaagaaagcagaaacacacggggagctacntgactcaggttgaaaaagaatgcaagagaaagaaaagccctcctatgacactgaaacagatcccagtgagggattgatgaatgtgctaaagaaaatttatgaagatggagatgatgatatgaagcgaaccattaataaagcctgggtggaatcaagagagaagcaagccaaaggagacacagaattttaagactttaaaagtcattttgggaactgtgatgtggaaatattgatgtttccaatgaggaaatgttggtgagctgcacagataaatctgacagataactacttacatagccttcttctaagtaaaggcagtgaactctcccatttcctcctggaggatttatttaaataaaatatgcttattaaaacacttcctccaaagatggtttccttagtaatctgggcatttgttcaaaaaaggataatattgtattcttgtgtgaaatgtaaaaaaaagcaagtcttgcctaatgataatgccacattgtgtgtatttttgttctgctaagaggtagaaaagttattgtttgcctataagttcttgataatcagctcccaccaatgtaagaataagtaaaaataaaacctgaatttttgcataaaaaaaaaaaaaaaaaaaaaaaaaa

SEQ ID NO: 9064 - DNA, 694 bp, Canis familiaris
ggtgattttagttagccactggatcttccttcagccagagatgactttgaagaggacaacaatgagtaaagccagtacacagaagagggctgtggtgaaggaccagcatggaaaacgcatttacttggagcacctggaggatgtaccagaagcactagaccaagatgacctccagcgcgacctccagcaactccttcggcatttctgcaaggaggactcgaagccagaggccaagtgaggggctgcccagtcctcacaccagaaaccacacattcactcaatatgcaacttcccgcgtcattagcagagtgacctaaccggcctcatgggataccctgacacttccactttgagcaaatacacaccgcattttgtttcagtttttccccgtcctctgctctgactgtaagctaatttgtgaccaaagatagcatccttcagactggatgctgtatccactactttgttgtgtctgtgctaaactgggaactggccacctccattgttctttgctcctgcacaagctccatgaaaatccatcgatcagaagaacttcacctacagacctcttcaagtgatgctatctaggagtccttccaggggatatccttataccatgtatatagctaaaatgctcagatgaacaacatattaaattaaaaccactgcctatcataaaaaaaaaaaaaaaggg

SEQ ID NO: 9065 - DNA, 573 bp, Canis familiaris
  misc_feature (83)..(83): n comprises a, c, g, or t, or includes no nucleotide
  misc_feature (152)..(152): n comprises a, c, g, or t, or includes no nucleotide
cgtgtctccggcccagctccgtggggcccggggggccctgtgggtgggctgccaccggccccgggctggaaaggcctgggaangtgcattggggaaagaagggcctgcccagcccagagatggcgtgcaatgcggcagcggttcaggaagtncgggcgtgagcaaccgtgtcgggccccgggccagcaggaacagcgtgtccagcgggtgcttcttggagagcaggtccatgaggcgcagcggcgagggtgcagctgtctgcacgctgagccagggcacccgggcacccgggaaacgccgctcgagttccgccacgtgggccttgacaggcgcaaagacatctgcgtgggccgcccgctgggcctgtcgtggctcgtacaggagcagcagggtcagggctgcagccgcgtcacccggctccagcgccgcggtggcgaaggcctccaggaagccaggggccaggtcccgctcggccgcagccagaggcagcaacacggtgagacgcgacgcctcggtgacgtagggcacaggcaggatctccacgcggctcaggggccgcagcagctgcacccg

SEQ ID NO: 9066 - DNA, 707 bp, Canis familiaris
tgaaaatccttgaacgaagttagtgacacaaattgatagattttaatgtagtcgtgtgtcatacattgttagagacttaacgacctgtttctctgggagcatttcccccccattaatgaatcagttacatccttcaaattgctgacacgtcataatgttgaatgaagcacatagagtatcttgtcaagagcacaggctatccccaattttagcattttctatataggtggtgccggtttaaaaagattataggcaggaatgaaccttatttgtgatataattaaaaagtagactagttagaaacaggcagcaagcaaattcataacaaaattgcaacaatttaatcctcagtttacagtatcctttaaagcgctcttgcccagtgtaaaattaacaaaacttgtactgtagcaagtgcaaaaggaatatttattcccgttgggctttatttaaatatcagtctcttgtaacagaaagcaggcaacattgctaattcaaagtatggaagcgaggtgcccaaaagtcttaaccatacttaatttctttttaagatttagcatctgcttctagttttcagtgattccactgatgatgcttgcaatttgaccgtatccgtcttgagcttttaacagaagacttaatatcacctctgtgacatcaatactgtgtgatttggtcttttgtggctttctttaaaaaaaaaaaaa

SEQ ID NO: 9067 - DNA, 655 bp, Canis familiaris
tgccagaacttagatcttggatcagctctaatataaatgaggctatttactggaaaatatttgtgagatggtcctttcaattgcttgcccactaggaaatctgtttcattgctttgtgatcgcattttgtgacagtctgtccccagcttgatcagccacttcatttggtctgcacctaatgaggggaaatccccaactgctggtcccaatagtatttgagcagccctagtattgttgggagtatgtacatggacaacttcaatgaatgaacacagcagcacagtaagttcctttatagttacaccttgtatgtcaaaagcattcaggccctgctctgtagtggtttttatcctcatacagaatagaaaagcctgtttgcttttttaacttctgcatgaaagatgacatctgaaatatctgatgtgtattatagtaataccagcttctgctctagaactactttgggggaaatggtcgtaatagcaaatgacttcctttaacagacactcaactcaaacagtgccatttagttcaggagatctctaagtgtagctgtcaatttggggtttaatttggcttctattggaccttttaaatgaaataaaggtttttttaatgccaaaaaaaaaaaaaaaaaaaaaaaaaaaaaaaaaaa

SEQ ID NO: 9068 - DNA, 660 bp, Canis familiaris
  misc_feature (2)..(2): n comprises a, c, g, or t, or includes no nucleotide
tncatgctcccaaagcctggaccgtgctgatggatactacaaatccttggagaaagcttaagctattgacccagtcactccacctttgacactttactgagtaacaagaggggaccacatagttactgttggcatttctttgtggtggtgtctgtctggacacccttcctaaaaacagaccacttttccttaactagcattggttttggtctgccttatgagttttgttttgaactagtgtaacacaaggctggttttaatgtatcttttccacttattatagttaatattcctacagtacaattttaaaatcttgtctttttatattatatttatgcttctgtcttatgattttttcaagctgttatattagtggtaacccatagtatacacattgaatctcatttttcatcccttggaaaaaaaaacctactagacaataaacttggctagactttgttttgggaattttacaagacatctgtagcaattagattttctttttctacattgaaaatataaactgctttctttcttccaataagctattgatctcttagctgttataatctgttcttatgatctgtataagccctgaatgaactttctttattcaataacattaaactttttggcttcttaaaaaaaaaaaaaaaaaaa

SEQ ID NO: 9069 - DNA, 603 bp, Canis familiaris
  misc_feature (582)..(582): n comprises a, c, g, or t, or includes no nucleotide
attgccagggcgcgaagaggtttttgctaaccggtataagtataggcatatcatctctagccttcctgagcctcagtttgtcaaccatgaacagcatttgccaaagggttgttagaagggctacattcagagaatgcaagtaaggcactttgcacagggcctggcacatgggaacctctcagtaaatctttgtagtagtagtagcagcagcagtaatgtgatcaagatgccccgtgaattcactttgagaactcactaccacctccattcaccatccactaaacatcaacaaggaaagacaaaatacagaaaatgacatagttgtactcaaaaacaagatccacatctcctagattagtaactctaagtagtaaagggagatgcaagcagacagaagtggctgagatgggtggggtgcctgggtggctcagtcagttaagcatctgcctttggctcaggtcatgatcccggggtcttgggatccaaccccgcatcaggctccctgctcagtggggagtctgcttctcactctctctctctaaccctcccttctactcttgttcgtgcatgctttctcccatntcaaatgaaaaaaaaaaaaaa

SEQ ID NO: 9070 - DNA, 552 bp, Canis familiaris
ccccgccttctgccagcataccatgggcctgccagacgagcttccttgaactaaagacacttaccgccagttccccgagttatggccctgagccaggcctccaggattctcacttttgttggtttcactaccagtagtcaacatggggagaccgtttcctctttttgtaagtctttgttgctaaaacgctgaagacctaggctacaatgagaaaagtaagggaccatacctctgtgaaattacattaacacaggtgtggaattgtttgggttgggtcgtatgtggtgtttggtgctatttatatgtgcccatcactgaggagtgggggcgatatctagctttaaccataaccgcatttcatatctgcgtcagtactgacaaagagaattccacaaaataaactaaaaaagactaatttaacaaaaaagcctgcacacagaagcctggataatgatgctgttttggtctttggggataattgtgcatttcatgtcaagaacccattgtgcccaaaaaaaaaaaaaaaaaaaaaaaaaaaaaaaaaaaaaaaaa

SEQ ID NO: 9071 - DNA, 716 bp, Canis familiaris
atgtgagttccaagaagtgtgacccatttacaatcgaacgtttatcaactcatttccttcgttcaaactataaatctcgttgtatcctattacacgggtaattccatgatacccacacccattaataagatcagcctgtgacaacccccaaccaggttccataactgtacagaccgcaatacccatagcctcttcacttaaatcccagagtccccgtatcatagatcacctcatcccctattccatttaaacttttaatactacctccacctcatcatccttcaaaacatagcaagcagtcaacaattcagacataccaaccagtaataaaagccgctagacagccttatttgaaactcacaacctcagggtattgctcagtagccatagcagttgtataacccaatactactaatatacccccccataaattaaaatactatcaaccctaaaaagaaccccccaaattcagaacaatcgcacaaccaatcccaccgctaataattagcacaagcccaccataaataggagatggtttagtggccaaacccaccaaactcatcacaaaaacgatacttaaaataaataccatgtatgttatcattattcctacatggaatttaaccatgactaatgacatgaaaaatcatcgttgtatttcaactataagaacattaaaaaaaaaaaaaaaaaaaaaaaaaaaaaaaaaaaaaaaa

SEQ ID NO: 9072 - DNA, 641 bp, Canis familiaris
tcactcttttcaagccatagtatgagtgtgctccatctgcagggttctaggacccaggacaccttacagatagtacgtgctgaagcagcttgcacagtgcttcatgaacttccttgaggctgattctggcctcaggatggagccttggagttttttttgtttttgtttttggaacctgctgttgcgctttgtgtgttttgtttttgttttccattttgggggggcacgggcgcatgggaaagagtttctgaactctttcctttgtgaactccccttgtgtccctgtaaagtcccttttctttcataattgttgtaagttacattttcattaagccccatcacatcttctttactgtaaaaatattaaaaggctgtttctaagtgggacggctaattctaattattgcagacatatttttgagatgtaaaaaaaatttaaaattaaatgataagtcttagaggtgagtgaggaataaaatggatgtaaacatttacattgggatgcattagaattctgctgtgtgtattgtcttttggttgaaaccaattatgaacagtgactaataataaaaagtcaatactcaatgatttaaaaaaaaaaaaaaaaaaaaaaaaaaaaaaaaaaaaaaaaaaaaaaaaaa

SEQ ID NO: 9073 - DNA, 540 bp, Canis familiaris
ggagtccgggaggggttccctgcttttccgatcagagtccagagaggctttcctcttcgaactttgctcggcccccctccgtgggtttctttctcttccatcagccttgctcatgtttcccgcacctgtggtcctcccttactggacgtgtaactcagccaggacagatgctacggcctcatccgtgggtgtcctcagcccagagccttctcttctcaggcactttctgcctttctgtgcttctcagttgtttatgtttgttttgtcttttaatgaagtagtatttggccggggctgagggtgcacacagagcgcttcttatgtacacaacgacacaggaaccttctacgagaaacgttttaccaacttcctgtcatggcataataacagttgtgaggtctttggggcctgtgcaaaactgtatcaaaaccctgatcatcttgggttgaagcccaagtctccttattttaacttaaataaaataattattttttaaaaaaaaaaaaaaaaaaaaaaaaaaaaaaaaaaaaaaaaaaaaaa

SEQ ID NO: 9074 - DNA, 715 bp, Canis familiaris
  misc_feature (125)..(125): n comprises a, c, g, or t, or includes no nucleotide
cgccttgcaagagcagtcgtcccgcggagactgcagggaactcaaggcgcctgcccagcaggccagccccagcctgcaacagacctccgaccacagctacgcccttttggacttagatgccctgnaaagaaactcttcctgactctgaaggaaaatgaaaagctccggaagcgcttgaaggcccagaggctggtgattcggaggatgtccaccgcctccgcgcacacagggctgggcctccgccagagccacagagctgagcccctggcaggtgggggccgtggaccccgagccttgccgctgatgtcaagtgacaggaatgccatgccgggtgggccacgcggaaggagcccaggccacctcaggggaagagtagttgcagcagcccaggacagggtggacctcgagcaaggggaccgagcctgctgtcctttcaacgaaagctgggtggtggggtgtgtgtgtcttgagaaccgcaggatgaagcgggcctggaggccatgtggcacacactcccccagtggggagaagtgcatccccttgaggggcggctgggcccggggcaggacacgagacggggcagtgtggcccccatcgcctgggcgctggctctgagtggctgagactggcctctgttcctggcctggtgtgacagagcaacagaataaagtgtctttttatgcaaaaaaaaaaaaaaaaaaaaaaaaaaaaaaaa

SEQ ID NO: 9075 - DNA, 612 bp, Canis familiaris
tccagagagtctgattcctagctgctgcacgttctggggttttgtgggagatgggctctggggagcacaacaagtttccccagcaacaccccatacatgaacagggaccagacaggctgcttctccagagtgctgctcgtgactcccatggggcagggggttggggtcccaccctgcacccccagaacatctgggagccccctctcccagacccagccaccttgttcccaatctcgacccaaacctttaccagcaagcttcccgtggagtttccaggtcaggaagcctgtggcctttggctgctgtcgccttagcattcggcaaagcaggccaccctcctgcctcggtggccccagcagccccggccactcaccgggcacggaagtatccccacacacacctgatgtcccctggggccttggtgatgcgtgtggggggccaagcgccaggcagcgcacagctgaggaagagacgattccagggaaaacttgacgttacaggcagaggccaccttccacgagagtctagagtcaaatgttgggttcttgttaatttttcatttatggaaggaaaatataaaaattatttctgtaactttgtttctgaaaaaaa

SEQ ID NO: 9076 - DNA, 646 bp, Canis familiaris
ccttggaactggagttaattctggaatttcgtattgacttaagccactttagtatttgggccaatccgccatttctccaagtagccacaacacgttgaccataagtttatcccaataggaatttctgctggtcacctgttaaatcaggcctagactcttcccgaataaaagcacaatggcatgtatgggtttgcttaagtcattagagatttgcagctgatatcagttaatccttctccattcataatatcatgaagtatttgtattttaaatagaagataggagttctgtgttaagactctttatttgtactctataattaaagtcaaatggttttaatgattatcccttatttcctttcttgaaataaattgttatgaaaatattttctaatgaaattcatcttggaaaactagaaagagaaaccatggcaaggtaattcttgttctgtttgccataatttagaaattcaacacttaaacaagtattttgtagttttacattcctttttaacccattcagtggagaatgtccagcttttctcccaagttgtatgttaattctaatatgtatccaacatcaaagataaacatgtaataaacatggaaataaagtttaaaaaaaaaaaaaaaaaaaaaaaaaaaaa

SEQ ID NO: 9077 - DNA, 626 bp, Canis familiaris
tgctctgtgctacgaagccgcctgggaaaccaccctctgctcttctcaggggaggtagactgcaacagacccccaggccccatccacacagccccccacctgctatgtggagctcaagaccgcgaaagagatgcacaggcctggccactggaggagcttctacagacataagctcctaaaatggtgggctcagtcattccttctgggggtcccaaatgtcgttgctggcttccgtaacccagaaggtttcatctgttccctcaagacctttcctaccatggaaatgttcgagtatgtcaggaatgaccgtgatggctggaatccctccgtgtgcatgaacttctgtgctgccttccttagctttgcccagaacacagttgtccaggatgaccccaggcttgtccatctcttctcctgggagcctggcagcccagtcacggtgtctaaacatcaagatgcaccctatgccttcctgcccacgtggtatgtggaagccatgacccaggacctcccatcaccccccaagacaccttcccccaaggactgaaacttcaaaggggctggtcctgtctccatgtgcacagataaaagcatatttctaggtgaaaaaaaaaaaaaaaaaaaaa

SEQ ID NO: 9078 - DNA, 520 bp, Canis familiaris
attattatatgccctaatttattaatctgaagatggacccctttgtgttttgtgtcttaagcatttcccaaagaaaagaaaaggtgttctagctgttgcatcaagaaaagatttagttatcagggccaatattttaattcagtgtcccaaataaatttgttaaggatactatgttacccaaatagatctacatcacctgattagtataaaattttgttgacaatgaatccacttcctggcataaaaaatatatatagatccaaaaaaaagttgtaaatgcttgctttttgttttttcaatcatggccatattatgaaaatactaacaggatataggacgaggtgtaaatttttttattattattttaaagatatgatttatcctgagtgctgtatctattactctttactttggttcctgttgtgctcttgtaaaagaaaaaatataatttcctgaagaataaaatagatctatggcaccttggaaaaaaaaaaaaaaaaaaaaaaaaaaaaaaaaaaaa

SEQ ID NO: 9079 - DNA, 604 bp, Canis familiaris
gacacggggcggagagggaagggatcggttccagggcaagagcactggaccggccccgcccttgctggcctcgttggtcctataacccgcagtgaatgtcgctgttccctcccgggacctccgtgctccctcatctgtcaagcagggacgtgtccttcccggcatcacacgcaccgatctggctcctggtgactgtgcctccggtcagccgtgcggatcccgcggagcagacactcagagggacaccggctgtccgcgcgtgctcactggggtccccaacttgccttcgctttccctcccctgaggagggagatgcgcggccgggaccggggcacttgggggcagccctttcaccgaccagcacatcagcaaaccctaggacagtgggattttctaacaaaataaacttgcttatttggtctgttttctgtaacttttgctaaatactttatacatttttaatgttaaaaagctgtgtctcctgccagcatttctcatcccggtatgactgtgtttacttcacattgtatacccttccaccctctggctgcctagatcagtaaataaaattgatgtactataaaaaaaaaaaaaaaaaaaaaaa

SEQ ID NO: 9080 - DNA, 562 bp, Canis familiaris
  misc_feature (227)..(227): n comprises a, c, g, or t, or includes no nucleotide
  misc_feature (232)..(232): n comprises a, c, g, or t, or includes no nucleotide
  misc_feature (245)..(245): n comprises a, c, g, or t, or includes no nucleotide
  misc_feature (253)..(253): n comprises a, c, g, or t, or includes no nucleotide
  misc_feature (255)..(255): n comprises a, c, g, or t, or includes no nucleotide
  misc_feature (374)..(375): n comprises a, c, g, or t, or includes no nucleotide
  misc_feature (397)..(397): n comprises a, c, g, or t, or includes no nucleotide
cacaccggtaagtggggcaagactatgatcgagtaccggtcacagaagacctcgcgcctccccatcattgacattgcgcccatggacatatcttttttttttttttttttaatagtcattccaatatcgtgagatgcattgttacaggaagtcctttgccttcccaaagccaccccgtttctccctgcagagaagggcctgtcctcgcccgagtccacacaggggancgcgngacacacgcacgnacacttcngncttcttctcttcgcttcgctacacacttaactgtagtttccacaaatctttgttgttaaattcttcgcccctgtaatgagcttggttcctcttttgctctttaagtcttctggaactgnngttcctgcccactcagcggccncttgttcttttgtcccccaattgaagatttatgaaggcttttggtctccctgggagtggggctgaggcatggaggcatccagggcttacctgtacactgacttgagaccagttcaataaagtgcacaccttaaaaaaaaaaaaaaaaaaaaaaaaaaaaaaaaaa

SEQ ID NO: 9081 - DNA, 580 bp, Canis familiaris
atagtcactggctcaggagacaagaaggctacagtcttacgagagtcatttactgaaaacatgggtttaacgtttatagtttgaatcgggcccaaaagttttgaatttgtagaaatagaaagttgtaacttttaaagggaaaattaacccccctgaaacctggttcccaaccttgacaccaaactattttgagtctaccaagaggaggcaacgagtcccctcaactgaaggtcaccgatctacctagacccaatggacaccgaggcagagtggacagaggggcccagggctgtaggcagagcctgtgactttcccttctgtgtgatctgcctagattacccttctgttccttgcagttcccctcacgttctgtgcttggtagagccgtggtgtctcccatggacttgttttctggttttgcatcttgtgaaatgtttttttgtatttttgttgaaggttaaacatttgtataaattgtaaatatatttggtttattaccgtaaaggctttagtacccataaaaaaaaaaaaaaaaaaaaaaaaaaaaaaaaaaaaaaaaaaaaaaaaaaaaaaaaaaaaa

SEQ ID NO: 9082 - DNA, 677 bp, Canis familiaris
aagaggaatggaaataataaatgtgcaagacatggacttaaaattacacatacaggaaaataggtagtaacaggcataaataatgaaagacaccattctgtgaattagaccatctggaacagagtaatcgagagacatattaaggagcatttctgagttttaaatgatgttaaattttaatgtaagaataattttactgcatgatttcagtaattgaataactacacacaaagtgttaatcctttttgtcctgtttcttagtttataagtgatttccaaagagcccagaaagaataaccattgaacacatccaaaatacataaaaagctttactggtccttgttaatacatccctagtaaatttcatttttttttctttttatccctgataaatttctgaacacataatttgcttccatgttgttaattttctttagtaataaactggctatcctgttagaagcaatctttgataatcatatttactctaggtgcccattttgcaatttcctaaagggctcatcatttatgtgaatctattactgagagttgactaaatacatttcttatgtatagattctgattttttgcttaagcacttgtatttttaagcaataaaaatatgtgacacaataaacatttttaataacaaaaaaaaaaaaaaaaaaaaaaaaaaa

SEQ ID NO: 9083 - DNA, 563 bp, Canis familiaris
acaccctcttcctggggctcccggacccgcggtcctgcctgcggaactgaggttaactagctcccagcactcaaacccagaggacctaccttctgtcaggtatctgtggaaacttggtttctaggcctggggcctgccccaccccccccaacaggtacacaggactggaggttcaggccgccccgccccctcttcctcaggggtgaggagggacagtcccctgccacagcactcaacctcagtcatgggggtgagggggaactagttacatcttacatcacattatttataaataagaattacattttctattgtgtgtcccgagggagctctggcccctcaggaaagctgcctaggacagcatctgagcctcctcttcacacaggcataacttaactatacagctaattcctagtcgatagcatttatacttaaccccctcagtgaacccagcttgaaggaatttaaaaggccatttagcttaaataccaaaataaatttttattttgttaaaaaaaaaaaaaaaaaaaaaaaaaaaaaaaaaaaaaaaaaaaaaaaaaaaa

SEQ ID NO: 9084 - DNA, 635 bp, Canis familiaris
atcatgctcatggttcaccagaggaagttgtatctatccccggaatggctgaatctgggttgaggtccaggtggtgattctttcccttccggggtcttacattaaccctggaaggagtgatgctgttcctgtttttagcttgaccatacacatttcatccactgttattaactgccctaaaaaatatgacctggctacctgtggaagtgttcataaggaagcaggcaggaagcagactagagctcacagctcactaagatggatccaagtaaatttggatggcctgtcagtaacattttagccgtttgtgtttgtaagctgtcatttagaaaaatgaaacttcttttaaaaactagtttcattgtaaacctgtcacaaatgtattcctggaattgggaattcctttgctgggccactttacctggaggaatgcttgtaaggaactcagccacccaagagggtagggtggcttctgtgaagtacaccaaggctccctactcctttgtaagcagtgctgtccagtaatgtaacaagagccacatgtgttaagtaacttttctaggagttaacattaaaccagtaaagtttgaaaaaaaaaaaaaaaaaaaaaaaaaaaaaaaaaaaaaaaaaaaaaa

SEQ ID NO: 9085 - DNA, 142 bp, Canis familiaris
aggagaggcagaagcagactccctgcccagcagggagcccaatgcaggctccatctcaggaccctgggatcatgacctgagccaaaggcagacacttagccagccaactgagccacccaggtgccctggctaattgtattta

SEQ ID NO: 9086 - DNA, 129 bp, Canis familiaris
cacgtggagttgggggtgggggtgggggcatctgctaaagagaggacctatgaagttcttaccaatattttgtatttgctgaaataaagctaagtcaacacaaaaaaaaaaaaaaaaaaaaaaaaaaaa

SEQ ID NO: 9087 - DNA, 626 bp, Canis familiaris
ttatggatgtcatcagcattgacaagactggggagaatttccgtgctaatctatgacaaccaaggtcgctttgctgttcatcggattacacctgaggaggccaaagtataagttgtgcaaagtgagaaagatctttgtgggaacaaaaggaatccctcacctggtgactcatgatgctcgcaccatccgctatcctgatcccctcatcaaggtgaatgataccacttcagattgatttggagactggaaagattacggatttcatacaagtttgatactggtaatctgtgtatggtgactggaggtgcccacctgggaagaattggtgtgatccacccaccggagaggagaccaaccctggttcttttgaatgtagttcaaccgtggaaagatgccaatggcaacagctttgccacccgactctccaacatttttgttattggcaaaggcaacaaaccatggatttctcttccccgtggaaagggtatccgcctcaccattgctgaggaaagagacaagagactggcagccaaacagagcagtgggtaaaatggtccctgggtgacgtgattggaagtctttatacttaattaaagattctacagcacgaaaaaaaaaaaaaaaaa

SEQ ID NO: 9088 - DNA, 654 bp, Canis familiaris
gtgggaacggggcagaggccaaggtgcagcccagcccgcagcccaggcggccctgcagccgcgtgcgctcagagctcaagaccaagcagcagattctgaacagcggcgccgcgcgcagaagttgcgcttcctgcagcgtgggggcctgaagcagctctccgcccgcaaccggcgccgcgcccaggagctgcagcggggtgcctttggccggggtgcccccctccaagaagggcaagatgaggaagaggatgtgagggccgtgacccggccctgtgactcctcgcatgctccaagggtcagggtggacatcgcagatgaccccgtgtaccaccgtgtgcctggccctgtgccaggtgctggcggcgctccctgcgggtgctgcagaccctaaagaagagcactgtgtggccacggagggcagcagccgcctctgcccaagacagagacggagacgtttaaacagtctttaggggctcccaggagtttgctggtgaggtcgaggcggccacacctgagttgctcctgcttccacgcatgctgggtggttcctgagctcagaggtggtggccacatggctctgagccctgagtgcctaaggcccagtgatggatttttaatgtaataaatctttattacgcaaaaaaaaaaaaaaaa

SEQ ID NO: 9089 - DNA, 388 bp, Canis familiaris
  misc_feature (107)..(107): n comprises a, c, g, or t, or includes no nucleotide
tggcgtaggacaacacccggaaatttggtcaatggcccaactctccacccaaaatggaaattaagccagttgttgaaaattccccccaaaccatctcactgatgctntatttcaagaagaagaagctgcgtaaacccagacaccaggaaggggagatttttgacacagagaaggagaaatacgagattacagagcagcgcaaggttgatcagaaagctgtggactcgcaaattctgccaaaaatcaaagctgttcctcagcttcagggctacctccgctctgtgttttctctcacaaatggagtttaccctcacaaattggtgttctaaatttcttacaaagaacctaattaaacaactgatccattaaaaaaaaaaaaaaaaaaaaa

SEQ ID NO: 9090 - DNA, 485 bp, Canis familiaris
tagacttataactggccagaaattgtgaagccaggttgatagagagtaccagacccatgtgcccctggatccccataatgacagcttcagactttggttgtttgttgaccaatttggcaaagttattctttaagggataaagtaagtttttatgtaaagctagagttaatcataatttcatttccccctgtacttaaagaccctgtatagatttagatacccggacttactcatagtatagttcatttgtttttaagaaaagctcagttcttagagatacactattactctaggactgttttctcaaatgtttgtaagatgacagatggtattgtccaacacagattgttttatttgtaataaaatgtaccaaaaccatttgccagtggtagacacaaggactgactatactgacctgtctgttagtaaaccgttgaacccagaaaaaaaaaaaaaaaaaaaaaaaaaaaaaaaaaaaaaaaaaa

SEQ ID NO: 9091 - DNA, 648 bp, Canis familiaris
gtcgagcccgacttgacccgggaaggtgcaagtattcctgtgacttggacctttcaggagaccacggggaagaacgtcatgctgctgcctgtgggctcagctgatgacggcgcccactcccagaacgagaagctcaacaggcttaactacatagaaggaaccaagatgctggctgcgtacctgtatgaagtgtcccagctgtaggagggagcgggtcccctcactcgtggagctccgtgggaggaattgcttctgccctcgctccaccccgaatgttcaggaggctgtcagcgcgatggtctccggaaagtagccaggatctaacagcgcacattcgtcagaggttctggttgccgtccagctgggctgcatggggggtcttccttcctgccccctctctgcctcctgactctggcttgggcacacttaggagatttagtcaggggcacgtgatgccctgaggggccaccccttctcgtccctcgccctcatgtgggttctgtccttgtctccagcctgaaaccagtactgctgtttcctatcttctctttatgatgattcctcaaaacctaaacctaaccgtaaggattacttgttctcagtatgtgctaccaaataaaaaggtacaaatgaaaaaaaaaaaaaaaa

SEQ ID NO: 9092 - DNA, 338 bp, Canis familiaris
aagggtggttttaataattttatgggcccaaacctaatgttggaaattctgttgtcccacagcttcccccgtgccctgccttatccctccaggaccacagctcccgtcctcctggcctccggtcctacccccgtgcgcccccccccccccctcctgtgccctccctggtttcttacgtagttgactctcctctctagtctccctgacctgcggcccccgtttcctctctgtggcagtttcatatttgctaagacgaatttgctcattaaacattttgttgtattttaaaaaaaaaaaaaaaaaaaaaaaaaaaaaaaaaaaaaaaaaaaaaaaaaaaa

SEQ ID NO: 9093 - DNA, 622 bp, Canis familiaris
tccctacatgccccccttgtgcctggcccgaggttccggcttccaccgcttttgccttcctgctctttaagcaggataagccaattgacttctctgaggacacccggccctcaccctgctaccagctggcccagcggaccttccacacttttgatttctacaagaagcaccaggaagccatgacaccagctgggctggcctttttccagtgtcgctgggatgattcagtgacccacatcttccaccagcttctggacatgcaggagcccgtgtttgagtttgtgcggccaccctcttaccaccccaaacagaagcgcttcccccaccggcagcccctgcgctacctggaccggtatagggacagtcacgaacccacctacggcatctactgagtggccagagtgccacccacctcaaagtggactgagcctctcaggccccaccagcaggaacaataaagaccactccactgggccacgctctgggctctagcccctgcctgaggcagcccctttgtggccttctcaggcccaggctttggaaatgaagagagctctctgaggatagtggcagggatgggacatgtgaataaagatgatttttttcaaaaaaaaaaaaaaaa

SEQ ID NO: 9094 - DNA, 650 bp, Canis familiaris
  misc_feature (314)..(314): n comprises a, c, g, or t, or includes no nucleotide
tggtgtttgcccctagtcggcacactcccatccgttcgagggcctgggcccccttggggccctgcaaggaggtatggagagtaaggtagtgagcctgttctgtgggggtggccatccacgagacactgtgtgcctgtgtgccctgggcatcagcatggccaggagcgccatggccctgaggacgcggccaagctggccgtcaccgtcagcgccatgatccccctgggcatcagcatcggcctgggcatcgagagcgcccagggtgtgccccagcagcgtggcctccgtgctgctgcacgggcctggcgggccgncacgttccttcttcgtcacctttcttcgagatccttcgcgaaaggagctggaaggagaagagcgaccgtctgctcaaagtcctctttctggtgctgggttatgccgtcctggccggcatggtcttcctcaagtggtgaggtgcccatcgcccgcccactggacccaggcgaccccccaatcccctcccccgaagcgggggagctcaggccctggtcccgcctgtgcacagaggggccgcgccccagatccgacaccctgagcctggggcacagcaactactttaaaaaatacttctcttaaaattatttaccaaaaaaaaaaaaaaaaaaaaaaaa

SEQ ID NO: 9095 - DNA, 651 bp, Canis familiaris
aagagtgctaaactttataccggcaccaccagctgggataattgtagtctgggtttccaaaagtctgaagagcaacttgtttgaccattcctgaatgcgaacgtgacacaatgatccttggggtcttctcattgtaagaagtgcgggctttcacattggacccaccatctaccatcgcccaagctgtatattcagaaaatggtttatgtattactcctagcacaggtttaccattcacagccacgcacaccatagtagtgacatactttcgaagatcctctgtatattcctgggtagcatcaagtggatcaatccagacagtaacactttctgctggcacttctttaggggtagctatttcctttaggatgtcctcaggaatcttatgatcccacaagataacctcctgatcagctgcatccacatgttcctcagtatttatctgcacgctggggaaggcggtcttgagcaggtagaacatcttgcggttggacagcacgtccccgctcgtcatcttgtcctcggctccctcgcgcgtcttccccttggacttctcgtggaggacgttgctctcgcggacgcgccgcacttcgtcgccgccgcgaacggccgccagcaccgacacggccagcatctcgcgcaggtccacgg

SEQ ID NO: 9096 - DNA, 377 bp, Canis familiaris
aaattgtatatgccccaataatttttgagcttaagatacttaccgagcatatatgaatactgtttggatataattttagccatggtaatcatttaaaaggtgatttaaatgtttgaaatctttactactgtaaaattttgtcactattaaaaacttcatactaccagtttcttttagaatacctgtaactagttaattatccacaggcataatattacaaaactttacacatattttttgagttgttcttttgtacatcatatattgtatgaaaagtgggagtattataggaaaaattttggtgatattaaaatgaatttttcaataaagtgtgttgaaattagtaaaaaaaaaaaaaaaaaaaaaaaaaaaaaaaa

SEQ ID NO: 9097 - DNA, 383 bp, Canis familiaris
tgatgtctgactgccactcctttctttcaaggacagtgtttttgtagtaaaatcactggtttatacaaagctttatttagggggtgaagttaagctgctaaaaccccatgttggctgctgctgttggaatactgtgctttgggagtaaaaaaaaaaaaaaaaaaaagttatttctttgtcttacagaattgtaaggaaatgagttagtcataagacttattcatttttccagggaacatattgattggtcttaaagactagacagttagataaatggtggctggaacatctatttttctacaaaactggaaaaatgaacccggttctaaaagaatgtatgacaaaataaaacatgtgaagcagtaaaaaaaaaaaaaaaaaaa

SEQ ID NO: 9098 - DNA, 580 bp, Canis familiaris
catttgcacagcaaagaatactgaaagatgaaaggaaaaccagttaaggggaggaagctatgtagaattggtccgaataaggaccatgagcctctagtagaagcagtgaccaagagatctacttggttcagaagaccaaacaggctggcccccaggaggtaactcacacagaccagcgttaggaaacaatcaaataaagtcaaccccttgcatccatcagaaatacattttaaaaatatgtcgtggagaaatagactcccggcaccagggagtcatgcttttttggagagcagtttggcaatacttgacaaaggtagaaagaaatgactgtaagactaagttatctcactttggggaatacattctgggaaaataattcaaaagaaagaaagtatttgcacagagatatttgtggccacctctatatcacagtcatcaattggaaactgcttggctgtgggggacaggcgagaagattgtggtctattaagacgatgagctattgccttcacatatgacaactatgagaactattttgaaaaatatgatgctatgtgatgcaatcacagcaaaaaaaaaa

SEQ ID NO: 9099 - DNA, 434 bp, Canis familiaris
ggaagaccatctaagacctaggaaacggaaacagagtggccagtccccagctggggctggaaagcaacgcatgaaggagaaagaacaagagaacgagaggaaagtggcacagctagccgaagagaatgaacggctcaagcaggaaatcgagcgcctgaccagggaagtagaggcgactcgccgggctctgattgaccgaatgggttaatctgcaccaagcatgaacagctgggaccatcacttccccccttgggccactacctacctttcacagacgtggctgctgatcatcttctccagtgccaacgatgtgaccctcaaccccatctattcagtagggggaaagcttggggtaggcaagagcatgtatatagagattgtacatttatttattattatccatatccattaaagtaactttctatgagcaaaaa

SEQ ID NO: 9100 - DNA, 653 bp, Canis familiaris
  misc_feature (21)..(22): n comprises a, c, g, or t, or includes no nucleotide
  misc_feature (35)..(35): n comprises a, c, g, or t, or includes no nucleotide
  misc_feature (63)..(64): n comprises a, c, g, or t, or includes no nucleotide
  misc_feature (130)..(130): n comprises a, c, g, or t, or includes no nucleotide
cgaaattgcgtaaacagggannggaaatcgcacanttgggggtagccttggaattaatggtgnnctgaaacacctaggacccttacttaccatttgaaagattgttaccagcccaaataaagtttgtatncgggactaagccaaagacgaatttggcaaacccccggggcaatggagcaagtttaatgaaaatactgacgaatacttctttgtgagttacgacagcagtgtaatttgcgatgggaaatgtaaggcctatcaaatttgtgcaattttgagtcttgatcatatttcctacaaagattgcctcagacaacattatataaagcaccatccttaaagtatttcacagtttgtagaaaatgcagcattgttctgtttctgagatcagtttgtgtgaattgttacataaatctttgtgagttagagcgggcaagcaaaattcctagcttggctttcttttttataatcctcaaatgtagatatttgtaacactttaaatctttactacatcgaatatattcaaactgtgccttactagaatgatgtctggatgtgaatatctgatcttccagtttatatgcctaatttatactcttgtacactcttgaaattaccatttatacaataaagcaaatgatttctcaaaaaaa

SEQ ID NO: 9101 - DNA, 400 bp, Canis familiaris
  misc_feature (68)..(68): n comprises a, c, g, or t, or includes no nucleotide
  misc_feature (81)..(82): n comprises a, c, g, or t, or includes no nucleotide
  misc_feature (84)..(84): n comprises a, c, g, or t, or includes no nucleotide
tggtttgtcttaaggaataatgaggtagaaaattgagatgactgaatagaaaccaaatagaactgtanctagtaaatttannangggaaattaggatatgcgtgtattcaaaattatgcaaattagcaatatactcagtgtcaactaaattactttgttgttgaatatgctttgttcttgactacaaaaaattctaaacaggtatttgtgttctctgaagccaaactgaaagtattttgtggtccgaaagatgtcaggttatgcatatatcattaagaaatttggatttttactcccagaatatgaagttcattcttaagatactatgcagtgacgtattgcataaaaactattttgtaaatatgtaaatatgttaataaagatacctcaatttaaaaaa

SEQ ID NO: 9102 - DNA, 625 bp, Canis familiaris
  misc_feature (38)..(38): n comprises a, c, g, or t, or includes no nucleotide
ctgttgcacgaaggcttttggcttcctaccttgcaacnaaataattgcacaaactccttagcgccgattccgcccacagagagtcctggagccagagtcttttttgatttgcattgtagggaagggactaagtgatagagactatgtcgctttcctgagctcccgagagcgctcgtgaactggaaccaactgcttcaggggaagagagagagagagagaaagagagagagagagagagagagggaaaaaaaaaaaaaaaaaaagacttgcctgggaggcggcgagaaacttgcattggaagcttcggcagccagcgttcaagaaactcctccacttagcacggtctccagactcggagccgagggacggcgcaaactgcggcgcggtgagagcgagagagcgagcgaggagagagcgagagcgagcagcagagggagggagagcagagcctctccagcctgggaactataactcctctgcaggaggcagcgcgctccttccccgcatctcctggggacacttctccccgcgcccggcgccggcccggccaggagcggaggggcccgcacggccgccgcgcgcgtcctcccgctcggcgtgtgctgcgcccggggagccgggaggg

SEQ ID NO: 9103 - DNA, 258 bp, Canis familiaris
ggacactgtcgggtctgaccccagccagtccggcagtggcttctgtccccactagcacctccagcccggtggccaccccctcagatccagtttccttgtctgtaaaatggggacagtgagtgtgcggggtggcgggggtcaggtgagaagaggctggtttgccctgcaaatgctcaataaaggagagcggttcttaaaaaaaaaaaaaaaaaaaaaaaaaaaaaaaaaaaaaaaaaaaaaaaaaaaaaaaaaaaaaaa

SEQ ID NO: 9104 - DNA, 443 bp, Canis familiaris
cgccgcttgctaaacctggcgtgaaaccggggagcaacgttctgggaccggacccgggcaattctggaaggaagggcgccaagcaaggttccgtggccactggggacccgacaagccgcccggtgtgccgcacgaccgcgctgaccgcctgctggacctgtatgcctcgggtgagcgccgggcctacgggccgcccttcctgcgcgaccgcgtggcggtgggggtggacgcgtttgcacgtggcgacttctccctgcgcatcgacccgttggagcccgctgatgagggcacctactcctgccacctgcaccaccactactgcggcctgcacgagcgccgcatctttcacctgagggtcaccgagccagtcgctgagccgcccccgcgggactcgccgggcaacggttccagccacagcggcgcccccggcccagattccaccc

SEQ ID NO: 9105 - DNA, 597 bp, Canis familiaris
gcatcacgctggggagtgttttgagacttttctcataaatgagggcagtacattcctgttttgctccgaagtattcagtaccgctcagtattttaaatggaatgattctcacttgtgatttggtttgggatcacatagggaagcacaggcaccaaccgcacatataccaatgtattgaaatgattttctcagaatttgaagtaggaaagttaccccaacacttctgcttccacttaactggcctgcaatattgtaagaatggcatatccttgttactgtgatatttataaatatcccccagtgtccaccttttcccaaagagttctagtaatgatctagaaatatctttctcttatctgttatttatccatttttccccgtatttttatatggagaaaaattgtattgaagacactttagtatgcacgttgataagaggaaatttggtataattactggttggtgattattttttatactgtatgtgcccaagctttactactgtgggaagacaactgtttaataaaagatttacattccaccaaaaaaaaaaaaaaaaaaaaaaaaaaaaaaaaaaaaaaaaaaaaaaaaaaaaaa

SEQ ID NO: 9106 - DNA, 643 bp, Canis familiaris
  misc_feature (1)..(1): n comprises a, c, g, or t, or includes no nucleotide
  misc_feature (152)..(152): n comprises a, c, g, or t, or includes no nucleotide
nctctatgaggcataatcagtaacaagctctatctgtctccgtcaaacagatctagaatccctaaattgcatactccttcagttaaggtcatatggcactgggttattcgtagcggttcttatgtcgcgacacgcatgaacgttatataggntgcaacaggctctaataatgtgcccactggtgttaacagtcctcgagtagttatatcttgcttagcccacatcccagttacgagacgaatccactagccgctactcatgattctcggaccgaggacttcacaaccctcctgtcccctgtatagcagcctgatgaactaattagccagcctcaccaattctgggcttctccctgcccaccaattaaattcttaatcgggaggaactatttgtagtgatatcctcattctcatgatccaacattactattatcctaataggaattaacattaccatcaccgccctatactcactttatatattaatcaccacacaacgtggtaaatattcccaccatatcaaaaatatcaaaccatcattcacacgagaaaatgccctaatgaccttgcacctactgcccctactcctcctatcccttaaccctaaaattattctcggtcccatctactaaaaaaaaaaaaaa

SEQ ID NO: 9107 - DNA, 323 bp, Canis familiaris
  misc_feature (1)..(1): n comprises a, c, g, or t, or includes no nucleotide
nactggtgctagattattgctcgcccagctcaccccccatcgtcatgacctgtcctgggcctggggcatcctctttccctcctctccctcaccctgtacttccttgtcccctttttatttattgggcagggggaggggtgagggcacaggcagaagagattccccgtgtcctggggtgggggggtgtcacagttaccatggtctttcccccttcccctggctgggggtagacttaataaagagagaaacttgaaaaaaaaaaaaaaaaaaaaaaaaaaaaaaaaaaaaaaaaaaaaaaaaaaaaaaaaaaaaaaaaaaaaaaa

SEQ ID NO: 9108 - DNA, 325 bp, Canis familiaris
ttctaatacatcttcgtagaatcattgttgtaccaccttacatgaagtatttcacagagatatctctatatgagaagagaaagagagagaaaagaaaagaaaaaagaaaagaagagaaagaccaaaccactgtggccagtggcatttaacaatataatatattgtaaacacaataaaatagggattataatgtatgacttttggcattggcttgaagcaatataatatattgtaaacaagacacagctcttacataatgaacattttatactgtttgtataaaataaaggtgctgctttagttttcaaaaaaaaaaaaaaaaaaa

SEQ ID NO: 9109 - DNA, 548 bp, Canis familiaris
atttcctttctgccatttttttttaggggaggaaaggctattttatgctcttttcccaaatctcaacttatgtgcttaattcattttatttttctctttttgaccctaaaagcatttaatggtgttaattacctctgcagatagttttgactgtatcctgtttttaaaattattttctaatggtttgtttttttactcttgatttacttcttgtaatttgatatgctattcatgtttttccatttctaagtggcgtgttttatattattgttagctgtattgcattttgatcagagactgacttttagaatttccacttttcaaaatttaccaaaatattctctgtaacttaatattcttgttgaattttgtcactgtccatggaacttgaatagaaggtacactatttgttttcaggttaaaaaactttggatgttcatatctgctatgtccttatttattttttgatttcttgttcagaaaatgtattagaatatttccaataaaactgtttctcatgtttctcctaaaaaaaaaaaaaaaaaaaa

SEQ ID NO: 9110 - DNA, 700 bp, Canis familiaris
aaatgtcatatatgtgtttaggttcctagagggtcaacctcactagggtgaaccttaaaccaggtgaaccctgtatgaaaataagagttatccaccatatactatgtattatgtcaggctcaataaatattatataagaaaaatgtaaaagccataaaaagtaactagtgttttaataaggtaacatgagatcctacaattacggatacccactttaaatcaaatgaaataaatattaggaatgggtctttgacaccagatttagggattatgttggtgtcatttgtacctaaataacccttacttctccagggctaaggcacaactcccgtagagttagttacatatagtgaaattatctgctgggtgacaccaaaagagcgataacacatataagtgtagcccctcagagcgtctaattaatataaattaggtgaattggccacatttcaagttccttccaaggggaaccccaaggttgggaaccttgggaaggaaggttcccagggatcaaggtttgtttaaatactagcacttgttattcttgtgaatagctaactttacagagcttccccaactctgacaaacggtctgaagaaaagaaacatacctgctggttctgtaatgtattcagtcgagaatcaagtttcttcttttcaatgcataaatcattcatctgatgaaaaaaaaaaaaaaaaaa

SEQ ID NO: 9111 - DNA, 712 bp, Canis familiaris
  misc_feature (109)..(109): n comprises a, c, g, or t, or includes no nucleotide
  misc_feature (236)..(236): n comprises a, c, g, or t, or includes no nucleotide
  misc_feature (501)..(502): n comprises a, c, g, or t, or includes no nucleotide
gcccgggacggcacccaccgcttcttcgtggccgagcaggtggggctgctgtgggcctacctgcccgaccgctcgcggctggacaagcccttcctgaacgtcagccggncggtgctcacctcgccctgggagggcgacgagcggggcttcctgggcctagccttccaccccggcttccggcaacaacgggcaagctctacgttctactactcagtggggtcccggggggcttcgancgagtggatcccggcccatcagcgagttcagggtgtccgctgacgacatgaacaccgtggaccacggctctgagaggataatcctggagatcgaagaaccagcctcaaaccacaacgggggccagctgctgttcggggacgatgggtatctctacatctttactggtgatggcgggatggccggagacccctttggaaagttccggaaaaggccccaaaaaccaattcggccgctggctggggcaagggtgctggcgcatcgacnngtggaccacaacgagcgcggcccgctctaccgcatcccgcgcgacaacccgttcgtgggcgaccccgccgcgcggcccgaggtctacgccctgggcgtgcgcaacatgtggcgctgctccttcgaccgcggggacccggcgaccggcgcgggccgcgggcgcctcttctgcggagacgtgggccagaacaagttcgaggaggtggacctg

SEQ ID NO: 9112 - DNA, 621 bp, Canis familiaris
gaaattaacttggtttagtcctgatgttggaaacaagctccatggatggagtgtttggttcaagaaaccattgtaaaggcagacaaaacctaggaggtagtcaggcccaatgatgcccctcaggggcacttttatgaattaaggcttagatgagggcgggttcacaaacaatattcaaagcagctctggaggccacagagtctatgttagccacgaagagaagctgaaaaagtgaagtgtcatgataaactaaggaattaaatgataaaaaccgacattaaaactgggcagggttcctggctggatcagttggtaaagcatctaaatcttgatttcgagattgtgagtttgagcctcatgtcaagtttagagatgacttaaaaataaaaaatcttgaacaaactgatcaatatctagttttttaaacttctaggaagtagtagaatgtaataatttggattttgctagtgctatttaatttttttccccactatgcttaatataattatgcatttgttctttgggtgaagtggattaatccacttacttggttctgaagtaaaattttagtcatgcacttgttttgagagaataaaaatgaccatacggtaaaaaaaaaaa

SEQ ID NO: 9113 - DNA, 629 bp, Canis familiaris
agtctcagatttggccattttaactatatgggatagatgaggcatgcccctcttgagagaaagaaatttttcctgcaggatgtgtggcagagaatatcttctgatgtaacaaatactattaaaggtcatagctgctgctgtgcacacttttctagaaatttcttgcttccttgaatgatgtgtatcgatatgtttgttttgttttgttttattctcttctctttcaagtaggatgtttaaatttgacttacccacatgtgtcctggaaaccaaagtttgcccagtcctaatgggtctatttcatgatatgcttctggggagtgaggctgcaggtgggctcctggggaacaggaagttggagaactcagctctgagcacctgttctcagtgtaaccttcagagctgtgcaaacataactaggcatgttttatcaatatccagaatcttaataaattgctcaggtttgtgaagtccattttggaagatcagaccgtgccacagtaatttttttgtgtagttttaatttgtatactgtgtccagtttgcttttaaaagtgttaatagtctttgtaaagtgatttgttttaagcacattaaaggttgttttgagtgttaaaaaaaaaaaaaaa

SEQ ID NO: 9114 - DNA, 388 bp, Canis familiaris
atgaatggtgctattttggactttcaacatgctccttggcgaggtagctctgatggagttatattttatttccatgttctaagaaggtgttggtactctgtttccctgaatgttgttctctagactggattgacttgttctccttgtgtcttcagtgtggctttcttcttcagcgctgtaggttgagtgaatgctaccagagagagtaagagactcgcgtctcatcggcgggcactcacagacgtgcagtccctgtcgcgggagccaatcaaccaaacctgtaatttacttacccaaatctcttctttttggtagccttcgccctgccctagccttaggagaaaagaaaacgccataatttgacaggcgtttttaggtgtctcttttg

SEQ ID NO: 9115 - DNA, 624 bp, Canis familiaris
  misc_feature (310)..(310): n comprises a, c, g, or t, or includes no nucleotide
  misc_feature (342)..(342): n comprises a, c, g, or t, or includes no nucleotide
  misc_feature (360)..(360): n comprises a, c, g, or t, or includes no nucleotide
ttgacctcaagttatcgatgtcattcctcatttacactgacccagtgctcatttgccattattggctcgtggctgctatacggtacactcagatggagaccatgtccacctgttgagcctcacgtgctagagaactaaatctggcttaacccggtccccagcccccagcccttgcttggggttgacctcttgttctctccacggtgtgaatgggggtcactgacgggacgggcctgatcgggggctcttggcttctggagccttgttatcttgtgacccgtcccctgttccacccaagttatgaggcccntggggccttagctctgggaagtcttgcatctntctcctgaccccactggnctggggtatccggggagtcacccttgccctttgcacctttcaccaccacaacccacgggtcccacgctggctgggtcctctgcaccgccccacctcccccacccatgtcctttccttctggttatgttgggagtgagcacctcttcttgtagccacttcacactgttgtctgttacttaattttttttttttaataagaagataataaaacctggtactttctagaaaaaaaaaaaaaaaaaaaaaaaaaaaaaaaaaaaaaaa

SEQ ID NO: 9116 - DNA, 620 bp, Canis familiaris
ggagttaccaacagcaacaacagtccagcctgcaccagtgcgggcttcaccacaggggagaggaccgcatctggacgtccagtcggggagcgtcgtcagaggccgaaacaagagtcagattgtgtcctcctgtagcttggcccgatgctggggctgccctgcctcttctttcagaggtgacagctcttctgctttctcccccagctcaagccctgagatatgcagggtaacgcatttatagactgttggggatcagagcgggcagtaaatgccaaggtcagactcagtaatatcctgccctcatgtgctgccaccttctctgcctcccggtcatccagggcaacattggggttgatggggtgaggatttctagttcccagctcctgttccccagtacagtcacactaatatacagactcaggctccagggtgaggtccctgtctagaatgcatcttccctgcttctacccctgactggctgggtcattggtgatcctgctggcctgtctcccgattgtttcagggtttgatatgggtttctatatccattatttgtaatgctttcctaggggtttggaaataaaacttctttcttgaaaaaaaaaaaaaaaaaaaaaaaa

SEQ ID NO: 9117 - DNA, 257 bp, Canis familiaris
cttggtttggggcccgttccttcccagggacccccccaccttgcctgggttggggggcaggagacagagtgactcaggtagggccccagggtggggtgaggaggttcctgctctggcaggtccaggcggaagggagcggagactgctggttcctgctgcagcgaggggagggtggaacagagatgggggaataaagactctgagacgtggtttaatagtaaaaactgtgttcgtcctaaaaaaaaaaaaaaaaaaaa

SEQ ID NO: 9118 - DNA, 650 bp, Canis familiaris
ggaagtctttggcttcccaagccctggatgatggtgaactggaggccccagctagagcttagctaccagctaatagtgggtgcctccccacctccccttacgagatgttggcttctcggcatcaggtagctaccacagcccccaggcttgcttaggcgatcctgagaataggaggaaggctgggggcgctgagaaatgcaaaaggctcagaatatttataaatcccacccccagggtggggaggggccaggtacccagacaccgaagaagctgcaccaaggaaacagcccatgggttttcctgagtcgggctgcgcagcccacgaacccctggcccctgcgcccaagcaggacaggctgtgcccacaggagccccagcaccccgcctgcaggaatccccgtgtgccctgtccctgctggccaatggcctgttggctgcccagtttttgcctgaattaaccaggtaggatgggaatcttcattaatatttgactttaagaagttggtaaggatatattttttttgtctatgttctgtttcaacttatgtagattattataaattgatgtaaaccacgtgagaggaaaatgttaataaaaaaatgcaagcccccacatttgcacaccaaaaaaaaaaaaaaaaaaaaaaaaa

SEQ ID NO: 9119 - DNA, 620 bp, Canis familiaris
  misc_feature (552)..(552): n comprises a, c, g, or t, or includes no nucleotide
agagagagcgagagatcgtctggcgaggggagccgggcgagcaccggcggcccggccccgacgggacaggagacccgcgcagccgactgcaggccttccctgccatgcgacctgtcagtatccggcagtggagcccatgggggctgctactgtgcctgctgtgcagctcctgcctgggatctccatccccaaccactgcccccgagaagatggctgggagccaggggctgcggttccggctggccggcttccccaggaagccctttgagggccgcgtggagatccagcgagctggcgacgtggggcaccatctgtgatgatgacttcacgcttcaggctgcccacgtcctctgccgggagctgggcttcacagaggccacaggctggacccacagtgccaagtatggccctggaacaggccgcatctggctggacaacctgagctgcagtgggacggagcagagtgtgagtgaatgtgcctcccggggctgggggaacagcgactgtacccacgatgaggacgcaggagtcatctgcaaggaccagcgcctnccctggcttctcagattctaacgtccttgaggtagaacagcacctgcaggtggaagaggtgcgactcc

SEQ ID NO: 9120 - DNA, 574 bp, Canis familiaris
tctggacaatgaataagaccctcttggttttgaccttaacatctagctcacccattgtaattttaagcttttccctaaaacctgttttcaaggggttcagttggcttcgtcctggggcaacatgatggcccccagaagctccacactgacattccaccagcttcctgatcctgctggaatgagagcttcttacataatagctccagcgaagtccaggagctcactgtcattggtctgcttgtgattacgcatttgtgaaccaggacagaaaagttctactctgagttacatagactgtgtaccaccagtggacccactagataggagaaaccaaccaattttccccccaggaaccccggtgcccataataattaccggttttttgccagcttccaaaccaatagattccttactagactctacatctccttttttatatcaaggtccatatgcagtctttaattttacccatgatctggggtgataagaacataggtaactgaatggttgacttagatttcagatttaaaaggattaaataaataaaccttgtgttatgaaaaaaaaaaaaaaa

SEQ ID NO: 9121 - DNA, 544 bp, Canis familiaris
cagaagacgacgacccaaagtacacagatcaggacggcaaagcgacgcctgcgacgacgacatcgacggcgaccggatacgaaatacggtggacaactgcccaaggggtacccaactcagaccagaaggacagtgatggtgacggtgtaggagatgcctgtgacaactgtcccccagaaaagcaacgcagaccagagggatgtagaccacgactttgtgggagacgcttgtgacagcgaccaagaccaggatggggatgggcaccaggactcacgggacaactgccctacagtaccgaatagtgcccagcaggactcagaccaccgatggtcagggtgacgcctgcgatgacgacgatgacaatgacggagtccccgacagtcgggacaactgtcgtcttgtgcccaacccaaccaggaagatggcaccatcgtggctaccctcactgcaacaaacagggagcttggcacccggctccaagaggtagctgccctagaggggctcagaaaggacaaaataaagtgtgtgtggtggaaaaaaaaaa

SEQ ID NO: 9122 - DNA, 340 bp, Canis familiaris
tgggcttttttgttgtttttgggtttttttgctctgatgaaaaacctagatgagatgggaggagctggttgtatagcagccatcttcttcatttcactacttttctccaaattttgggccagaatcatgacctagcatttgcttttaaccattgttaagacaatatggggcgcctggatggctcagttaagtatctgccttcagcgcaggtcatgatcccagggtcctgggatcaagctctggaatggctccctgcccagcagaaagtctgcttctccctctccctctgccccctggcttgtgctctcaaaccaaatcttaaaaaaaaaaaaaaaaaaaa

SEQ ID NO: 9123 - DNA, 608 bp, Canis familiaris
  misc_feature (1)..(1): n comprises a, c, g, or t, or includes no nucleotide
  misc_feature (401)..(401): n comprises a, c, g, or t, or includes no nucleotide
ntactgccaggcgaatcccttcaggcccgtagctgaacccggcattcagctcaaggctgtgaagtcctccacaggccccggggagcagctgcggaatgcactctggcacacaggggacacagcatcacaggtgcggctgctgtggaaggacccccgcaacgtgggttggaaggaccagacatcctaccgctggttcctgcagcatcggcccccagtgggctacatcagagtgcggttctacgagggtcctgagctggttggcccgaccagccacgtggttcctggaccaccaacccatgcggggtggcccgcctgtggggtcttttgcttctccccagaggacctctatctgggcccatctgcgctaccggtgccatgacccccatacccgaaggaacttncgaagaacttccagaagcctttctgccagccctagggatgggggtggggacccattgctggaagatggcaccatcgtggctaccctcactgcaaccaacacgggagcttggcacccggctcccagaggtagctgccctagaggggctcagaaaggaccaaaataaagtgtgtgtggtggaaaaaaaaaaaaaaaaaaaaaaaaaaaa

SEQ ID NO: 9124 - DNA, 643 bp, Canis familiaris
  misc_feature (304)..(304): n comprises a, c, g, or t, or includes no nucleotide
ccgagatggaagatctcgacttcttgagtgcctgcgacagtccagggaacacatcaaccgctgggtgccggaaggacggaaggtaaaattgtggacctgctgtctccaggttcagttgacccagggactaatctgattctcgtgaatgccatctatttcaaaggaaaactgggatacacacgtttaacaaagagcagaccacggagaggccatttaaagtcagcaagaatgagaagaagcccgtgcaaatgatgtttaaaaaatctacctttcaaatgacctatataggagaaatattcaccanaattctggtgcttccctatgtgggcagagagctgaacatgatcatcatgcttccagatgaaaacgtcagtttggagacggtggagacagaactcacttacgagaagttcacggagtggacgaggccggacatgctggacgaggaagaggtggaggtcttcctgccgaggtttaagctggaggaggagtacgacatgaaggccgtcctctgcagcctgggcatgaccgacgccttcgagcagagcaaggccgacttctcggggatgtcgtccaggggagacctgtacctgtccaaggtggtgcacaagtccttcgtggaggtcaacgaggaggggacgga

SEQ ID NO: 9125 - DNA, 621 bp, Canis familiaris
ggccttagagccccttggcccaagctgtgctggccggatcgtgcctcaaccacgttgtcccgtattttccagcatttatacctgtcccccgacctactcggatgcccccctgtgcatccctgcctgtgtcccgcagcagtcatgccggctgggcctcccgccctctccaggaacgtgcacgctcaccctgcttcctcgtgggtggccttttttttaaccgatccacactttttattttttaccaccagacctccacccccgacttcccccccgcccacgctgggcttcctttgttggagtcgactgatgatgcttctgggcccaactggcttcctccctaccctctaagtattgaatgtactttgtataattttagtggaacttattgttattacaagagaaaatttttaccatcctaacaggctttttcccagtaactagctgcagaccctgaaagacgcgtgtcccccgtgcataccttgtgtcgttgcctgcacctacttcctgctgtttttatactgtgactgtgttctatttgttatactcagggtaataaagccgtttcagatgaaaaaaaaaaaaaaaaaaaaaaaaaaaaaaaaaaaaaaaaaaaaaaaaaaa

SEQ ID NO: 9126 - DNA, 366 bp, Canis familiaris
attagtgccctggaagccccccccccgcttgtgttgtgggcaacattcctcctctcctctcttctggtgggctcgtgccacaggtgcttctcacccaaatatctcagagtgaaccagacagaccccagcgtgcgtaccctggcccctgtcccccgttcgggaatgtggaccaggtgccgagcgagaccgaactctaccccccacccccggggttcctagtttggcagtggcgcagctgcccacagatgcctgcattggcaggcgcgatcttcgcacaaagaggcgccgagaagccagtttcggggcttccttcccggtcgggccggggaattgggcctggggagggagagggtgcgagcgccagcg

SEQ ID NO: 9127 - DNA, 156 bp, Canis familiaris
cagatgctcccacttcccactgagggctgaggccccttcacttagtaaatggctcagcagggtgcagcgctggtttggactcgaacataatgaacataataaatgcatttcattcaagccccggagcccgccaaaaaaaaaaaaaaaaaaaaaaaa

SEQ ID NO: 9128 - DNA, 560 bp, Canis familiaris
  misc_feature (1)..(1): n comprises a, c, g, or t, or includes no nucleotide
  misc_feature (129)..(129): n comprises a, c, g, or t, or includes no nucleotide
ncccgcgggactcttccagtacccctctttgacggccccccgaggttttgcccagcggccttccttctgttgaaggcccagaccggccggaagcccgggttccgggggagtttccagccctttaccccntgagttctcccccctcccccgctgttcctgggtccagacctgggttcccatggcctcgggccacggggctcagcccggacagactcgcaccagcgtctccagccacagcaggccatggcggccctcaagcccgcgtcccctgagccccgaggaccaaggtgctatcctgcagacccccccgtctactcggaagcctgggccctgggccttcggtggcaccaagcgaggtgttgctttttaaaccaaaaaaccaaaccaaacgaccccaagctcttcttcctcaggggagtgattggttctacgttttactgaaaaccctctttatgtgttagttttctgattccttgtgtttgctccctgtgtccccgtcagccccttttcagaataaaggtgttcattcctccaaaaaaaaaaaaaaaaaaaaaaaaaaa

SEQ ID NO: 9129 - DNA, 523 bp, Canis familiaris
ctcccagcctagccccctactcctgaactttggggtttcctggcctcctacccggccattaattccctcttaaccccattaagaagtgccctcctactcgaccacctccagtccctcctagcctccgggagtatctattacttgagcccatcatagtttaatagaaggtaatcgccaacatatacttcaagccttattcattacaatctccttaggcgtatattttacgctattacaggcctccgaatactatgagacatcttttaccatctccgatggggtgtacggatctaccttttttatagccactggatttcacggattacacgtaattattggctctacattcctcatcgtgtgcttcctccgacagctatactaccacttcacatcaaaccaccacttcggatttgaagccgctgcatgatattgacactttgttgatgtagtctggctattcttgtatgtatctatttattgatgaggatcctaaaaaaaaaaaaaaaaaataaaaaaaaaaaaa

SEQ ID NO: 9130 - DNA, 627 bp, Canis familiaris
agggcagcacattcttctgtggatacatttgcttgcaccaattgatacaatcacccatatgagaatgctagaaaaggccaactttgggggccttctaagaattcagttaaataccattatatattttattccaaatggagaagctgacgtgaaagacattcttggtacttggatgtgaagtgaaggccctgccaaaaatgccaggtttataggtcccgttatttccagtgggtgccattggagccagtagtttgccaaatgatatttttcacttccttaaaggaaaagaccaaagccatagtttctggtttatatttccagaatgatattgattggactttgagttcaagggaaaaatagaaaattctttcagaacccggttcatgctaggacaccacgggaataccttcctctgtacagtgtagtagactacataggatgtagtcttgtagttctgtacaagattatgcacttgtagttctctgacatcttttgtgtatgtaatttagtattacctctcataacatagttgccagtgtcgaatacacttgtaacttggattttgccttataggctatatgtacactttatttttttaagcattttttcaaatctctcaaaaaaaaa

SEQ ID NO: 9131 - DNA, 623 bp, Canis familiaris
  misc_feature (109)..(109): n comprises a, c, g, or t, or includes no nucleotide
gttacagtttacaagacagcaacttctggaccttatgttccgatgtttacgttgggaccctgaaattagtagtagcccctgatgctgatgccaggtggattttaagccnacacataatatttttactcaggctggagtgagacagctttatgtacagattgactttgcagccatgtaatgaatgaaaagaaatgatcccttttgggggacctgatatttccggtactgtacatcccaaaccttgtacctagctttttaaaacagaaaatcatcactctaatttcccagcaccaagtaggccaggtagcctcagaagttggtgctctgccgggagctcacggctaagggatcagaattaagaggatctctcctggacttttggttttgtctttgtgctcttccctcccaatccattttgatttctgaggtttgtttgccagttttgttccaggatgttactttttatttgtttactttttttttttttttttttttttttggtcatttcaaaaatgcccttacttgtagtggtcatcctagtcagtaagaattcaactgatgggcttcccgtcatctggaaatgtcttcactgaagctgctggaaaccactgctttcatttcca

SEQ ID NO: 9132 - DNA, 582 bp, Canis familiaris
gagagggttaggagaacccgaagcagaagtcacaccaggttacaagcaaagggaaagcagaaaacggccacagcgaagtccccagtgaaaagcggaatggaaagaatgataccaggagccatggcacagatgcatatagaggaggaaaaacaaccccgggagaaccccggagataagcataccagagtgaccccaagagaacgaagcagaagtagagagaataaagagagactatatgtgacgatttacctgggaataaaaatatctccactccctcactgaatacctgtggcacagggctaaattatatactattgtctttctaataaaaaagctctgttttaattttccattcctgaaaactgtcatatcaaatacccaaaacccataggagtcctgtaagaatgaactctgcaaatatttctaagtaacctcttttggggctgtaaaaataccttctgttgatgaatgtttcttgtgctctatactagattaaaaagcccatataactctgtaacattttctttgttctgaaacatcattaaaagaatgacagtaccaaaaaaaaaaaaaaaaaaaaaa

SEQ ID NO: 9133 - DNA, 499 bp, Canis familiaris
ttgccaaaatctgtaaataggttagctcaaaatactgatttctaattgacttcatataaaatgtttgaatgaaaaattgatttttgtaggatataaactttttaaagaatacagatatataaataaggttaataattgcttttgttagcgacccatactttttttctgaagagtctatctaaaaccttgtgcagaaagtgctacacttcctcttttgttgtcccatgtctaactgtagacttatggaatatggcaagggggcacgatagagagacactatagagaaccgtaaggaaaacagaagaaaaaccagccatttaaaggaatggccaaattctaatgaaagacaaattatattgagtacatagaaattttattcccgaatgtgtaggttagtatacactgatttccactttcttttgattctacatatagggagtgatgagatgccacaattgtatggtgataaataaatcgcatggaacacatgaaaaaaaaa

SEQ ID NO: 9134 - DNA, 585 bp, Canis familiaris
  misc_feature (1)..(1): n comprises a, c, g, or t, or includes no nucleotide
ncatacaagctctatctgtctccgtcacacagatctaaatccctaacttgcatactcctcagttagtcatatggcactggttatcgtaaccggttcttattcaaacacccatgcagttatatatggtagcaacacgctgttataattgcccatggtgtacatcctccataatattctgctgagccgactcctactacgacaggaagcacacaatcacgctagctataattactcgtcgcgagaggatcttcaccccctctttcccctaatcaccgccagaagaatattacgcacgcctcacatatctggctctccctcccacaattatatcttatcggagaactatttgtagtagatatcctcattctcatgatccaacattactattatcctaataggaattaacattaccatcaccgccctatactcactttatatattaatcaccacacaacgtggtaaatattcccaccatatcaaaaatatcaaaccatcattcacacgagaaaatgccctaatgaccttgcacctactgcccctactcctcctatcccttaaccctaaaattattctcggtcccatcta

SEQ ID NO: 9135 - DNA, 557 bp, Canis familiaris
cctgggcttccggacagagaggcgtgaactgcctgtgctctggcaccagtgcctcctgactttggtccagcgctacaagcagacctggccacagatcagaaagacgccctctttggaactgctccgactgcagccgcatccgcagctgtcccccgagatcaggcgtgagctccagggcgcagtcccccgagatgtagaagatgttcctctcgccatggagtgaggaaagttacttgtcctggtctgaagggcatggggggctggtcaccaggattccctgttggtggcactgagctcttaacaactgaagtctcagatcaggacagtcagtgagaggggtcacaggcatctgtgactcctgtccctgacagggaggactgagagtctgctggctccctgttcattctaggtcttcatccctgctcagttctgagacctgacttgagaggccacactccagtgttaccactccctggctggggcttggaataggttctttctctcaggctgttgtgtcaagtcactgggatgtggataaataccaaggcagataaaaa

SEQ ID NO: 9136 - DNA, 580 bp, Canis familiaris
gttcagtggctcggaagtcccgcctggtgaacggccacgattggttggcatactgttttgtgcccaggtacggagtgagatctggagcatagcggcgccggcctggtggctttgttgcaagactgggacgcgcggccccatctcccgtgctcacgtctgtgcacgaaggaggcggccagcatgccgacagtgtcctcggctctgctccccttttgttgttgattctgacctgtgactcacgcttgtggtctctgccacgtatcagtggctcgtctgctgtggccgcgacacgtggagacccgctcctttgtcctgccctctgcttgcacctccgtcagcgtcctgccccgggagaggcctccggcggcccgcgaaggccagcccccgctccctgggcccggcaccagggtctccacataggggcctcactgagtcccctgggaaccccagtcgccgccgctgctcctgcacggctccgtagctgcccgcacatgcgtcaggctcctcagtgcagctttcatcccccgatgtcctgtaaataaaatggaagtagatgatgaaaaaaaaaaaaaaaaaaaaa

SEQ ID NO: 9137 - DNA, 697 bp, Canis familiaris
ccaaaggctcgtgagaagtccgtcccacaagggccccccgggggagaccagactgtccggaaatagcaactctgggcaacacaaggggacacctagccatcacacaggttgccggctttgctgttggaaaggggaccccccgccccataccgttggggtgtggaaagaggagaccaaagagcccatgcccttacccccgccttggttttccccgttggccaagcgcaatttccggggcccccccccccaaaaggttttgggggggcctaaacccaattccaaggaaaggttgccgggttttccttaaccggaagggggttccccttggaaggccttgggttgggccccgaaccaaggccaaaccggttgggttccccttgggaaccaccaaaccccaatggccgggggtggcccgcctcggggggttcctttctgcccttcttctccacagaagaacatcaatctgggcccaatctgccgctaaccgggtgccaatgaccaccaataccagaggactacgagactcagaggcttctgcaggcctagggatgggggtggggacccattgctggaagatggcaccatcgtggctaccctcactgcaacaaacagggagcttggcacccggctccaagaggtagctgccctagaggggctcagaaaggacaaaataaagtgtgtgtggtggaaaaaaaaa

SEQ ID NO: 9138 - DNA, 649 bp, Canis familiaris
aaacttttggttcaattcattcaggggatacagtgatgttagtgtgaataagcttcatgttataaagaattggtatattccttagtaggtgagcaagttttttctctaatatgtctatatggtaagtacatactaagtgcctgtgacatattatggcacttaattatctcggttaatcgtccatcctgaagtaggaattagtagcttcattttctacttgtaacccaagtgttatttttaaaaagtgaaagttaatcaaattactcccttccttgtaggatattctctaagacaccctgaaaaaagtagtgtttgtagggggaatgttacctcgtcttcaactttaataaggctacttttttctctttaaagaaaaatctgctttttaagataatacagtaaagtttacatatacaggtgtaagaaacttaacacataatactcgtgcctgcacctctatcagggatacagaatggttccatcatcccagatataagactacttaaaattgtagttagcaatcataatgttgaagtaacttaaaaatttacaaatggcaattaaaataaatgtcatctgcatcaaggcccaaaaaaaaaaaaaaaaaaaaaaaaaaaaaaaaaaaaaaataaaattaaaaaaaaaaaaa

SEQ ID NO: 9139 - DNA, 550 bp, Canis familiaris
ctggcccctcaattccaggtgccccacagccaattccacgactcttcttttgctggagaacatacaatccgtaactacccagccactgtccatggtgctctgctgagtgggctgcgagaagcaggaaggattgcagaccagtttctgggtgccatgtacactctgcctcgccaggccacgccaggcgtccctgcacagcagtccccaagcatgtgagactgaagggttctgagggaagcagacgatgtgcgtgtcttttgctgtgtaagcaaagctcgtagcaatactggatcccactgagaaactcactctggcatctgggctccgatcagctgcttgaactcatgatgccgggtggccaaggaggttgcctcctttgagtgacttagagctagagaggcagttgtccgttagcgtggaagtcagtgttcttcctaaagacttgaggtaagcaagtgtggtgagaggacatgttagtcttttggtgtgtggtggttttttatattttaaaaataaaacttcatataaaaaaaaaaaaaaaaaaaaaaaa

SEQ ID NO: 9140 - DNA, 554 bp, Canis familiaris
gtttcccgcgaagactctccagtggacgattgcatgatgactgctgagcgggttgcaccggcggccccaaggactttggagccggtgttgtttgtccaagcagaaacaccctggcgcaacagaatccttcttgatagttttgcaggcgaaacaaatgtaatgtcgtagatctgcaggcagaagctcgcccttctgtatcctatgtacgcagtgtgcttttccttgccagcttggactgttcctgctgtagacagtcaacgtttgtctcttccttttaccgagtcatcatcttagtccgactaaggcagttaatgtaatgcgtagatggaggaaagtcccgcgggagccaggacggtcctgggcacgtttatgctttcctcctagtcagcacccagaggaggtcgacgccagagaccaccgctgggtggatgctggcttccagaagggccagagtccctcttttaggaaactcttcagaactgggagcacagtgactgagtttgagctattaaaacccttcttcatactctgaaaaaaaaaaaaaaaaaaaaaaa

SEQ ID NO: 9141 - DNA, 610 bp, Canis familiaris
ggccctgggggtctttgatggttcttcacaccgtgcacggcacttacgtacgttcaagcttgcgcccctggtcaagtgtgggggtcttggctttgacacctgtggacaggagatcacagaggccacagggagatttgagtttcacctgtgggggaacttcagtacttcctatatctttcctctgcttcttacctcagggatgaccctggaaacccctgatcagtttggctgggagaatgactactctttcctgaggaagagtgggctgtcctctggcctggtgacagcagctctgtatgggcggctgtatgagagggactagggcagtgtggggtgtgcggcccggcacttgcccagcctgcagcccacaagcactgggactgtctctctgccccagagcccatcatgggagctgtgggacaaagtaggagaggtcgattcccccatggcctcttcctctttgatgtgaaccattgagtcttttctgatagtctctgctcacatttaccatttccaagccacatcttcctctagcaaatctctcattccacaactgattttaagggcaaaaacaaaaataaatgtcagtttatattttaaaaaaaaaaaa

SEQ ID NO: 9142 - DNA, 565 bp, Canis familiaris
ggtcccgtcgactgcccttgacctggttcatttccagttctctttaaaaactcagaaggtcatatcctcctgtgaacctgttgactccctgaaggtagctcatttttgtgtagcagaaaattctgggtttttaaaaacagacctatttgatacttggttctgacgtagactaggacagagccttggacaggtacatctccccgagtcttttccctcctctgttaagggggcatatcaatacctgcgtcgcacagtaatcagggaataattaagtggaataaagttgatagagtgcctgacacaaagaagtaggcggcagatgttagtccccttcctcctttgcactgcatactgtatctacctctagtattgtaactccaatgtaggactgaaaatgccagctaacctgtttgcctccccgactgtcagcgccgagaggacgagagtctcgtcctgcttaactttgtactcccaggccctcgctcaggatgggcaaataggaattaaataaatgtgtgttgcgttgaaaaaaaaaaaaaaaaaaaaaaaaaaaaaaaaaaaaaaa

SEQ ID NO: 9143 - DNA, 599 bp, Canis familiaris
gtatttgaatcctatttctccctgttgcattttcaacatgggaatgaaagctaatgtgcttgcttcattttctttggtaatctcgaattttgtagctttttaaaactagaaaaccagttgttctgacaagacaggcaactctagtgtaaaaacacatctttattaaacagagatactctgtagatgcttttcccaatgtatctggcagtctttgtcgttgttcatactggggataaaggggaactaggctagcagttctaatgtaacattctttaagcatatcttaatatagtatttaagtaaatggtctaatttctacataattattgcactgaactgtcttttttgtttttaaggtgtttaaataagctcggctaattcaagacactagccatttgtgcagagtgcttgaatttagtagcttacagcattatttatgaaggaaaaatatataaatatgaagtacctcatgttgaatgttattgtactgtatttttaatgtaacagtgcagatcttgttagacacatgaatgtgtataatcatgttaaatgcaaataaaaataaaattggttcataaaaaaaaaaaaaaaaaaaaaaa

SEQ ID NO: 9144 - DNA, 141 bp, Canis familiaris
attagcactaattcatcataagtaatatcttcattatgaatgggaattcgtcgaatatcctccccaagttgagctttgatgattagcttcccacttaggtccaactgtccattcatggtggactccaggatgttgtgtata

SEQ ID NO: 9145 - DNA, 612 bp, Canis familiaris
cttccccagcccctcagggcagcagtgcctccacccgtagtccggggtcccacccctcgcacggaggaagccgcttgggctgccatggccctgaccttcctgctagtgctgctcactctggccacgctctgcactcggctgcaccggaactttcgacgcggggagagcatctactgggagcccacagcggacagccaggacacggtggccgctgtgctgaagcggaggctgctcttgcccccacgccggctcaagcgctcccgccggagaccccttctcccgccctcgccggacagcggcccagacggggacagctccgactgacctgccccagccctgccactgcagtggtggtggtgaaggggacctttgcccaggaggccgcgacctctgccacgtggaccctgcgcgggaccgccccctggcggccggccggagcgcttcccgcctaagcatcgcaaaggggcttgtccctccgcctccggtgtggcttgctaccgagggttgagggaaggggcccacagcctcccttgcctgtatttctaattaaattattttggtagagtcaaaaaaaaaaaaaaaaaaaaaaaaaaaaaaaaaaaaaaaaaaaaa

SEQ ID NO: 9146 - DNA, 590 bp, Canis familiaris
ccctgtctgtcccgggccttgcctcgaaggttcttccaccaggaccagtcccccgtggggggcctcactaacggaggacattgagaaggcccggcaaggccaaggctcgccccgagagcaagccccacaagcagatgctcagtgagcgggctcgggaacggaaggtgccagttacacgaattgggcgcctggccaacttcggaggtctggccgtggggctaggctttggggccctggccgaagtagccaagaagagcctccgcccagaggacccttcagggaagaaagctgtgctggattccagccccttcctgtctgaggccaacgcggagcgcatcgtgcgcacgttgtgcaaggtgcgcggggcggcgctcaagctgggccagatgctgagcatccaggatgatgctttcatcaacccccatctggccaagatcttcgagcgggtgaggcagagcgcagacttcatgccgctgaagcagatgactaaaactctcaacaacgacctgggtcccggctggcgggacaagctggagtacttcgaggagcggcccttcgccgcggcgtccatcggccaggtacacctggct

SEQ ID NO: 9147 - DNA, 647 bp, Canis familiaris
ctcaagtcttgggggtcccccctagctggggcttcaagtcctactcactgcacatgctggaggatctgtaccatgtgccaggtacccgacaccacccccctatcccgtcaccccgtttcatgacgatgtccaacgagctaccacacaaggccgtgcccctgtccccagaagagggcacagacacctccagccttcaggacccttcttcatggaccaaagaagatgggagcttggtgtgggggtcatacgaatgccgcagagcttactgaggggtgcaccaaaggacttctcctgtgcttttcttggagctgagttttgtatttgacagattgttttcagtgcgtttccagctcattcagaactggattttcagaataggccatcatgccaccctttgttaacggaccatggcatttatttgtaatcctccctcccatcgctccactgaaacacaacataatgttaattcaggatatcagggactatattctagtgagacacctgatagtcatgtgtttttggaactttagtaacccatcacattctgaatttctgttatctttgaaatgtcatttttaacgctcatattttttcttaaattacattaaaaaatttgtgcagatcatgaaaaaaaaaaaaaaaaaaaa

SEQ ID NO: 9148 - DNA, 597 bp, Canis familiaris
ataatctgttgtttagaacagactttgaaaacgcgctgccggatttctccatttagccagatgatcctgaggactgaccactgttcgctggagggttgtccagcttttgtattctaatcgaaatgaggtggcagtgttaccatgaaaactttggagaagcaccctatgctagcctgtgctgccttgctcaggacctctgtctctacctagcagtgaaggctgtcgcagttgctgttgcttactctggaaggaacttagaacttaacagcagccttctaaatttgtgttgggaagacatcctttggaccaaagcaaacctctttatgctgggcatggtttctgggaagatgctgcagatgtgcccattagcacaggttcctgtccccaggtcagcagaagctattgtcaggccctgtgttcctgcccagagatggaggaacacgctccctggtttccagtatttatttggtaaacctgagtctgggataccctttttttgttactgttttccaaacactgaattattgtcaccttgatgtacaggtttcaataaagctttgtaaagataacagaaaaaaaaaaaaaaaaaagaaaaaa

SEQ ID NO: 9149 - DNA, 604 bp, Canis familiaris
aatcgtgcatatgaagtaacgcttagcaaattattcgtcctatcagtcgctcctaataaacgggtcatgttacactatccacgctaattgattacgccagagtaacatatatgattgaatctttcgcggccgtgacccgctaggccatgatatgattcatctctaccctagcagaaactaatcgagcccccttgcgacttaactgaaggagaatccgaactagtctctggatttaacgtagagtatgcagcaggtccttgttgccctattctttctagcagagtacgcaaatattattataatagacatcctcacaacaattctattcttcggcgcattccacaacccattgcataccagaactctactctagttaacttcactatagaaaccctgcttattaaccatctgcttcgctatgaattcgagcatcataccctcgattccgctacgatcaattaatacacttattatgaaaaaattttctacccttaactttagccctatgcatatgacatgttgccttacccattatcaccgcaagtatcccaccccaaacataaaaaaaaaaaaaaaaaaaaaaaaaaaaaaaaaaaaaaaaaag

SEQ ID NO: 9150 - DNA, 578 bp, Canis familiaris
cttgacttgtagaacagtattctcgttaagggacttcaggtcattcaacacaatggagtcgctcctgtaaagggcctttaaccttttggattccgcccttggtcccagtaatggacgtaatacatataaagtggcagaggagggagagatgtcaaagggagaggaaaacctgatgacaagggagccttctcctggagtcacccatacgttctcaggaggcccaacggtcacattcctaaggtactggaaccatggcactctgacccaggtggaaaccaggtctcccaccttagctcggacgcgcaaggagacgtttaagtgtggtaggaactcctgtgaagggctggttggggtgaagtcacactccatcgtggtgatgttcatacagttcacacctatgctgtccacactgaagtcgtaccactgactgccagaggcgtatttatactgcacctggtagaccacgggcctcgagtcattgctcagggacactggctcccagctcagaacccgctcggcgttgtacaggtgaacctttgggtttcgaggagcagggagtctgggaaagggagtctgct

SEQ ID NO: 9151 - DNA, 499 bp, Canis familiaris
gcctggatatggggctggagcgacctatggacagctgaggccagagctgggccccggacccttcggcagccctgatgcgaagagaggcagcagcggcctgggaaacggctatggaggcccctgacctcttgggaggcgctgaggccctgaggccctgctgctgacccctcctgagcaccctggacgcagcctggggtgttgggcaagggcgcccagacccgggtgcgtgcttctggcctggggtctcctgcaggctgaaagtattaatgaaggcgacgtgcttccctgtttggctgcgtgctgtgtgctgctgcgggccgtcacctcattcacctgttccctaacggggcagcgctttgtcaccatccagagggggagccacatcccagttaggggacctgtgcattattgatgtccatgtttataatcaacctattaaagcaaaaaatctttttctcttaaaaaaaaaaaaaaaaaaaaaaaaaaaaaaaaaaaaaaa

SEQ ID NO: 9152 - DNA, 607 bp, Canis familiaris
caggtgttaacagagggcttcagaaacaggccgaggagtcacctgagctcggctcgccacccttctgctgcggtgcggcgggactctgctagctccagactggtgctccacttgcagaaactccatcaagactgtgcactgagggtgtctgtgggcctggctctatttgctcttcttctggcttttttggtcaaagtctataagttaaaacacaactaaatgaagcatttgtgaagaagaataaatttctaagtaaaacctgcaacaaacggaaaaacaaccacgtcggttctccaagagcagtaatctatcctggtctcactgcctccgcttcagccctactttttaatgggcttcctctgtctcgcattgagttgggccatcggttatttgacctaaaacctactaactgttgccatagcatatcttctaaattaagctccttttggtttatttgcagcaagaaatgcaaatggttgcatttttctttcaccctccagtcttcaagtcagaacttcattgtaccccggatccagtcatcttttcctgatgtgggaagaattttgagacttcaataaacattaacaaaaaaaatgtaaaaaaaaaa

SEQ ID NO: 9153 - DNA, 644 bp, Canis familiaris
tcgagcgccgtccgccctgggcgccgtggacctgtacgagtatgcgtgtgaggacgatgacctgccgccctcgtgaccgcgcctccaggacgggcgggcgcttgctgcgcgcacagcggcgtgtgtcccatcgggacttccgtgggacgtgatttgtgccggacgacaggttgttctttcttcctggaagctggtcaggtggccgtcgagcattgtccctgcccgtccaggggccccacgtccgtgcaaggacccccgacaggcaggacacacgcggcccctgcagactcacccgcccggccgacgtccgtccacgtggagggcagcccggttccgcgcctggagctcgcccgccgcgtgctgacctgtgggtgtggggcagccccgtgttctcacgaggtgggtccggaacattccaggaggtgtccgtccacagcagtgtctggggcgctgccccagccaccgccctccacgcgggacctgccaaggagcacccctcgcgtgtactcacgtgtttgtgtacatgtacaaaacgtgtaaagttaacttttatttggtgtgtatagcggtttaaaaatgttttacgagatcacgtttgtattttcaaataaagagtttaaggattttgaaaaaaaaaaaaaaaa

SEQ ID NO: 9154 - DNA, 398 bp, Canis familiaris
ccgttggtgttccttgccagccattcgggccccccaatgtgggcaacaatccagagtccggttcttacgagggtcctgagctggtggccgacagcaacgtggtcctggacacaaccatgcggggtggccgcctgggggtcttttgcttctcccaagagaacatcatctgggccaatctgcgctaccggtgcaatgacaccataccagaggactacgagactcagaggcttctgcaggcctagggatgggggtggggacccattgctggaagatggcaccatcgtggctaccctcactgcaacaaacagggagcttggcacccggctccaagaggtagctgccctagaggggctcagaaaggacaaaataaagtgtgtgtggtggaaaaaaaaaaaaaa

SEQ ID NO: 9155 - DNA, 538 bp, Canis familiaris
cctgtaaactgtgaatccctttgggggactctgtgggaataggggcacacatgaatgattcgggaaagggcacatgggaatgaaatgaacaggagcaggcacctgcctggcaggtctgcacctaggtctcacctgcagaggggaggtgggaggtaagggacaggagctgcttggccccaggccctccctgccagaccctggtcagagtcagaagcctgagcgcctgggggctccctggaaccaagttccctggtgctgaggcctcatctctgggtgaagtcggtcagctagctacacagcctgaccctgctgtggccctggggctatcgcggagtccggagagcacaggggcctggaggagttgttcccaggctggcagagggcctttgcggaagggcttgagggctgagctgctctgctgaccacctgccaacccttccaagcgtctttggaaaatgtcccctctgaacatgatgtttgaacacagcttatgtaattaaaggtctgatgacacggaaaaaaaaaaaaaaaaaaaaaa

SEQ ID NO: 9156 - DNA, 675 bp, Canis familiaris
aacaaacaatctgagctactgggatgccccccctgggaagttcttatatgtgcaacaaagagcagactgtttcagtgtctggagcatttcagataaatacctttgatctaagggttcagcctttcaatgtgatggaaggaaaatattctacagctcaagactgcagtgccgatgacgacaacttcctcgtgcccatagcggtgggagcggccttggcaggagtacttattctagtgttgctggcttactttatcggcctcaagcgccatcacgctggatatgagcaattttaggacctgcagtccaatcaattataaagaaatacatgcacataaaatttttcttgcctctcaattttgaaacacgttgctctttaagattgatatgttgaaactttaattcttaaatcagtcccagcattttgagattaagtctctattaataaaaaccgttctcttttatcagcttaaaattactgtattcactggtcctgaagacagactggttaaaatcattggtgtgtggtgtgttaaggtctagcctaagaagcctcagccaaattttgatcctaacttgagatgccttaagcttattaatgcggccattataagaaaaaaatatgtagttgcctcttaatggaattaataaattttgtttcactaccaaaaaaaaaaa

SEQ ID NO: 9157 - DNA, 303 bp, Canis familiaris
tcacctgcgaagctaagtactttcgaagatgtcccttgtaagaccttggctggaggagtctagacacttgtccattctacacaaattgtctactcaagtatgataaaggaaacaactctgtaaacacaactgatacaactgtacagagtacgaagcaaaacacaaagaaactaaaggtctatataaaagctaagagtatcctatgtattttttatttacattcaacataggcagaactagaaaattaaaaaaaaattaaaatattggcttgaaataaaaaaaaaaaaaaaaaaaaaaaaaaaa

SEQ ID NO: 9158 - DNA, 485 bp, Canis familiaris
actgctgcagcgatgcttgcccagcagatgcgatttatgtttccaggaaccccacttcatccagtgcccacttttcctgtaggtcccgccatagggacaaatacggcgattagctttgctccttacttagcacctgtcacccctggagttgggttagtcccaacggaaattctacccaccacacctgttcttgttcccggaagtccacccgtcactgtcccgggctcaactgcaactcagaaacttctcaggactgacaaactggaggtatgcagggagttccagcgaggaaactgtgcccggggggagaccgactgccgctttgcacaccccgcagacagcaccatgatcgacacaaacgacaacaccgtaaccgtttgtatggattacataaaggggcgttgcatgagggagaaatgcaaatattttcaccctcctgcacacttgcaggccaaaatcaaagctgcgcagcaccaagccaacca

SEQ ID NO: 9159 - DNA, 645 bp, Canis familiaris
ctttcactgccaagggtccctgtcagattggggcagtgttccccagctatgcctgttaatcctggctcagagttcttccagttacatagttatatcacccgaagtcctcgtccttacctgtgggatccaaggtctcccaggagacctgagggctcccggcaagctcccgacccttcccctctcctgtcctcctccctcatgccctccagaggagctgagggagagaggtctgtgctttctcatctttaatgggagatgcaaaaggaaacaggtatggcctcttctcacccttctcataagataaaggattgccaacacttgaagactggtcacttagagccaacaatctcctccgtcttctggcatcagagaccaatcctacacagtcccagggccctgggtccctgagagaggaaagaaaatgcagggagcacagagaaggggcatgtcccagacagtaccctcatcctcctgccttccaaagcccagatgtccagctctctgcccttcccactccttactgggatcttgacattttctaggcctctgtgccatgcacagttgcagagatgagtcaaatccataccaccactgagatctcattattgccacagatgcacaaaataaataacccaacatcacaaa

SEQ ID NO: 9160 - DNA, 560 bp, Canis familiaris
gccttttagagtgaggggggggatcgtttccgctaggttagtttgttgattcgtgatgactgcctttcgtcttgtagctctctggcccccgatttttagtaaactgtttttgagtgtcccatggggcagggtcgcatatctttgccctcctccaagccgctcggctccctcccagatcctaccctccagcctcgccagttgccaaacactaaatatgcagacactcacctgtctgacctcccaccatggccatgaacacagcctcccccacaaaacccccctcaaagttcaggattggggagagggaggaggggaggaacagtctccctgatttttcaatataatttttctccagagtttgggtttctttgggcttatccttattttttgacaatttaggggggacgaggggccgggcatggcaagggggttggcctgagggtcaccatttggctcaacagccacgtttttgtacagaattgatggttgattctttgttctcttgaaataaaccgaggaaaatgatgaaaaaaaaaaaaaaaaaaaaaaaaaaaaaaaaa

SEQ ID NO: 9161 - DNA, 642 bp, Canis familiaris
taaggaaggctagcctggcggagagggacaaagcggtgtgggagcaaggatctggtcatgctacatagggactgttgaggttctgggggcaggtaatctgcaggcaggctgtttgggaaggaggagttctggaccaagtccaataaggtctgacatgagaccagaaaagctaactcacttcgaagacagcttatttagggcaggctctggggttttgtggtgggcagccaaatcagacagggggaccagtggggcagccttcttagcataagatacttattacaaaaggatccccaaatcctggccacacaagggggcagttcttgacgccttaagcctcttttgccaaccataaattggatttgcctggtcatgtgatctcaaaagaagccagacacatcgaatccagaaataagtttcatttgggggagaaaatgcctgtaaatatcatttctttccaggttgggatgcaggaattttcagtattttttttaacactgatgatcattgaagagtatttatgtaaacatataatgggtgggggttctgatcagggtgacgtatgggatgggttctcttgctgtgatgcagacatgtaaaataaagattctctgacagaaaaaaaaaaaaaaaaaaaaaaaa

SEQ ID NO: 9162 - DNA, 682 bp, Canis familiaris
  misc_feature (102)..(102): n comprises a, c, g, or t, or includes no nucleotide
gagcctaactatgcaaactcaccagtatgcacttctatggctggaagcagggtttgaagactgggatgtattacttaaggacacgaccagcagcaaatccantccagttcactctaaataaggagaagctgaaagataaggagaaggcaacaaaagaagaagaagagaaggaaaggaacacagcagccatggtgtgctctttggagaatagagaggagtgtctgatgtgtgggtcctgaggaaaggcttagaagagaccagcacttcttcacagacaaactacttcttgagcatagataggcattgtaggtttgtttgaagtgctaaggctttgctggatctcattgcagccaaaggatcagtcaatttaaagtactgtttctatatagtgtgaaagtattgattttaaaaattggtattttgggaatcaaagtagaagttttaggagtgcaaaacaagtcaccttgcaaataaggaatgattgagtagggtttcattgcccacctggcaccccttttctggtgacctcagttttcataaggagacatggttttgctgctttgactggtgagtccatagacgcaaaactgagtcctaacctgtgagaagtgctgataggacctttctctggataaggtcctataggtcattctgaaataaacatttctaagtgataaaaaaa

SEQ ID NO: 9163 - DNA, 626 bp, Canis familiaris
taaaatgaaagatcttaaacaggactaacattaaaaggagcctggtgggaacccagagtttgagcaatcttcagggcttgagtctgttcaatcagatgctgcacagtctcagcaaggttagcaaaaagcgacatgtggcttcagtgtggtgctgctcatgacgtaatgtctgatcctcacttttgcgccgatgactccttgcgggtcaaactgtttcccataatgtgttgttttatcctgtagccattatcccaattagacccatgggggatgtagggggtcctgaggtttctctggtttgttccaagacgcttcccatagagaatcccagagcctctccagtggttctgaatgagggatgattttagcaccccaaggagcatctggcaacatctggagacgtttttggctgccacagctggcatctagtgtgtagagggcagggatgctgctgaacattctacagtgcacagaacagtttccacagcaaagaattttccagccccagatgtcaatagtgctgaggttgagaaactgctctaatccaaaccaacccttaatcccaagtgacttgatggtttcaggtcactgacttaatgaaaagacctctagttatggtaagaaaa

SEQ ID NO: 9164 - DNA, 675 bp, Canis familiaris
ttccgctgcctggcctcgagtgccccaagtacctaccgccgctccgcagacacgctccgccaagagaagacagacactgtccgctgcatcaagtcctgccgccccaacgatgtcacctgcgtgttggaccccgtgcacaccatctcccataccgtttgtgtcgctgcccaccttccgagagttcacccgccctgaagagatcatcttcctccgggccgtcatgcccgtgtaccctgccaaccacgccgacattatcttcgacatcacagaaggaaacctgcgggactcctttgacatcatcaagcgctacatggacggcatgactgtgggtattgtgcgccaagtacggcccatcgtgggtccgtttcatgctgtcctgaagctggagatgaactacgtggtcgggggtgtggtgtcccaccgaaacgttgtcaacgtccacatctttgtctccgagtactggttctgagggcccatccgtggtgcagccacacctgtgcctccaggccaagtcattgctacaacaactatgcctgtccctcttgacgtttctcaaattaacatatttgtttgtagcgttaggccaacatgtattaagctgggccagatgaataagttcgtctgatatatttaaataatgagtccaattactcaaaaaaaaaaaaaaaaaaaaaa

SEQ ID NO: 9165 - DNA, 700 bp, Canis familiaris
gggcccaaaaactgcctgactaaatttttcatgccactggaattctttaccccgtgcaccaaaatggtgcctcccactggctccaataaaattggccagaccagtgactgtgaagcctcatgttttgatggtaagagactagcccgaattggtttattttagtctttgcgttcctaatctatgttttttgctttttttatctactaaaagcgaccagtcaatgcaggacatacggacaggacctctctaccgactgcacgcagccaaccaagcatgcgctcccgcactgtactgtgcggaaaagaaatgaattgagtggatcatggatgaccgccgagatggcgcacacataatgatcgttgaaagatagtgctcaatactcgtgattttccagcacacgctactcggaaaagtatatagaaaagagtcttgctcatgtcatattatactccacctccatagatgtttttgttagaaaagtaaaaatgctgaagaagcccaagtttgaattgggaaaactcatggagcttcatggtgaaggtagtagttctggaaaagctacgggggatgagaccggtgctaaagttgaacgagctgatggatatgaaccaccagtccaagaatctgtttaaaattcagacatttaatggtgaccaataaaaacatatttgtgatgtttaaaaaaaaaaaaaaaaaaaaa

SEQ ID NO: 9166 - DNA, 572 bp, Canis familiaris
aatacctcccgggtctctccagttctctgttcccaatgataaccactgtcactgttagcctgagcccctataccagctcttagatccccacagttctgctctgacctagacctcgaccttgaggccagcacctcccaatatctccgatgccaccctggagtgcccagacgtttctgggtctaccacactggcgccatctgtctctccactgtgcaactggctctccttcctgaaggccctcccaagccccctaccccaccccttagtgctcccagaaagcagccaaggaagatgtgagagccaaggccatgttccccgtgtcaggaatggcatctccatgaaggaggggcccgaagccctcatgggcggacctcccctgagcctgtctgaagggccggcccttagtgcattcaggctgaggcccctggacagggatgctacccctgcttctctggaggatgtgccctctcccctcaccctggtccctggcattagactcccccccgcccccaatccccatctgcccagtaaaggcctttgtgcagcaaaaaaaaaaaaaaaaaaaaaaaaaa

SEQ ID NO: 9167 - DNA, 700 bp, Canis familiaris
  misc_feature (2)..(2): n comprises a, c, g, or t, or includes no nucleotide
gnctgggaagacattccgggatcacctctgattctatgaatttttcctgctctcaccaaagaagtgacacacatgttgatagtgtgacaggtgattcttattttctttgggcttttctatgtttgtcatgttttctgtaagacttcatacataagtttttgtaaaaacaacctacagaacccaaaaaatgcctttgttttttttaggagcatgtaatatatttgttttgcattcttaggctatgtctttctgtctggtcatttcagtggggattactgaacattgtttttaattattatggggttgctatatttttatgtgttaggtatctatctgtttttcttttcttgatggtttaggtatgtccatgacattcctataatctctcctccatgaatggcaagggtagttatgaaagagtttctgctctcaaggatctgcttgctttgaaataaattggattagatttgttcatatgtttatattcctgttcaacgctaaatccattgttggaggagtattaatatcccagaatccatataaaatttatgagttttatttatgttcaaaacactgaacaatgttctgctcaacattgttcatttttatgggtctttttcttattagcacatttgaaaaaaaaatgttttttttcctttaatgtaagcctattaaagtcgatagccaataaacattttta

SEQ ID NO: 9168 - DNA, 422 bp, Canis familiaris
cacctgtaattcagaaccctgagtacaagggcgagtggaagccccggcagattgacaacccagattacaagggcacttggatccacccagagatcgacaaccctgagtactctcctgatagcaacatctatgcctatgaaaactttgctgttctgggcttagatctctggcaggtcaagtctggcactatctttgacaacttcctcatcaccaacgacgaggcgtatgcagaggagtttggaaatgagacctggggtgtcacgaaggcggcagagaagcagatgaaggacaagcaggatgaggagcagaggctaaaggaggaggaggaggacaagaagcgcaaggaagaagaggaggcagacaaggaagacaaagaaaaacatagaaagagaaagaaaggaagaaaggaagaaaggaagaaa

SEQ ID NO: 9169 - DNA, 628 bp, Canis familiaris
tcagacctatatttagattctgtaaatgaaaccccagatttgtgtttgatagttcctgctgtgaggactttaaagtttcaaacacacaagatgcttttggtgtccatcgtggattactatgaaccgaggagacaagcggtgaggagttacaactcagaagtgaagctgtctccttgtgacctctgtggggatgatcatggatgcagtccttgtgagagaggagcagcggccactccttgtcattctacagtcattgtcgtgttctgttttatgctgctgttctctatacagcagtggctgtgattcattttataaggactccatgtaacattgacatttctggaagtcatacgtgattgaattgtcttcattaccaagtattgcttctatttttgaaaaacaatgtttttcttcttatggggttgtgggggatggtgcacaacaggtcctagtgtgtatagctgcataaatgctgtctttacctgacttgtgtagaacaaaaaaaaaaatatcagtcttgcagttgtgcgtctttatttccccccctcttaaaaatcatttatgggtgttttatggaggtcattttcccagaataaaggtgttattttagaaaaaaaaaaaaaaaaaa

SEQ ID NO: 9170 - DNA, 664 bp, Canis familiaris
  misc_feature (296)..(296): n comprises a, c, g, or t, or includes no nucleotide
  misc_feature (392)..(392): n comprises a, c, g, or t, or includes no nucleotide
tctcggatgactgcaatgcattggaatacccaatcccaggaccaccatccgccagaccgtcagagatagggcatctggaccagagagagagccccaggggaccaacagttagtcaacttgcaccagagcggtgggctaaaacccacgccccccagcaaggcctccctgtgtacaatagcaatcaagaaactgtcacatctctccccttccggagagcagggcttgcactcttcccctagaacctactttgaaggcaattagaaggtttgttttcatttcccctggtattgtcttgncaggatggttaggtacacaaggacgcttattagatcactgagaagaaaaagccaaacccgcttctctggtatgaacatctagtttgagagcaagcnaaacagtaggcttgtattagtgctttaatggagtactggtaacatttttctttcttgataggaatctgcttatatttagccaggcttctatttcataccctctcccactacaaactttccgtgcagttacctttcatttttaaagcaatttcactgctaaatataaattgtatttgtggggttcatagttatataatgctgaagggaaccactctttcgttgaaaggtgataaaagttaaataaagactgtctccacagtaaaaaaaaaaaa

SEQ ID NO: 9171 - DNA, 398 bp, Canis familiaris
  misc_feature (253)..(254): n comprises a, c, g, or t, or includes no nucleotide
gttcagctcaccacccgaagagatgaatgaatattttttgatataaatcaatcattcctccatctgtaggttaggagattcttctcgaccatacgcgccaatgtctgctcttcatctaaaattctatgggagatagggatgactcaacgcccaagtcgcattcaacataatgttaagctaatgaggttctgttagtttgggagtttttttcttttaaccctgaaggaaaaccctgtttggggcttctaaacanntaaagagaaaattttggcttagactagtattcagtctggtgccaaacttccaatggaattcaaatccacggaatagaaattttatccatagaggctatcctaataaattaatccttcactttgatctaaaaaaaaaaaaaaaaa

SEQ ID NO: 9172 - DNA, 524 bp, Canis familiaris
cgagtgtcacacaggagacagctatgaccattaggcctatttaggtgacactatagaacaagtttgtacagaaaagcaggctggtaccggtccggaattcccgggatcatggctgtggccacaggctcgctgggactccttcgtgcaagatctggaactaacagctaccaccccagctgggcccaggccaagaggggccctgcccatgcccacactacaggccgggagctttggggctgggtgcataccaagcctccctcgctgggccacggggccttgggtccctgctcccctacgcaggtttggttcctcccgggggcccccactgtggagataaagatggggatagaatggggaaagaggaggggcagaaagccctcatccttttgctgccctggggttggggcctcatccctctggagggccagaggcaggaggtagaaactccaggggctggcttttttaaaactggttttattttaatttttattatattttcagtttttccataaaggaaccaattc

SEQ ID NO: 9173 - DNA, 630 bp, Canis familiaris
tgttttctcgaataaaaggtcccaccaatacattactagggcgagatatgaagggacccgctcacgataagctttggaaaccagttggaagctgaaatacatttgcatcgtcacaaaactgtgatcagagcctgtagaggacgaaatgacctgaaacgaccaatgcaagcccctccaggccacgtatgtttgttttgttactgtttcatactcaacctcttccttcttcctttagtcagaagtccttttcatggtttttatttagtagtatttaaaaccattattttaaaagttaaagtggaattaaacttatttagaacagatacatgaagttcttagttgacttacctgaatgccctgaaacgatatttctgaaaactgaactgttgctagcagatacatattgctcgtactttgactcatatttcagaatttttctggatcatatttaggcatgtttaaattcattttttaagcttatcagagaacatgtcatgttaataaagtggcaagtgttttgagggtagttcttaagggaatttttggtaactagattcagctgtagtttctgaactaatgtttccacctgtttggtcttgaattaagatggaatttgaaaaaaaaaaaaaa

SEQ ID NO: 9174 - DNA, 652 bp, Canis familiaris
cgaacataggttgatcagtacatcagaatcatatgtactcaatatgtcagtgccagatatcttaactgaacccgactgattcaaagaaacatagtctgatagattctccaagagggaaacagtaatgataagaagttgacatgttttgtctgcttaccatgttccagggatagttctaaccggttttatattcatcatctcgtttactcttacaatatcccccatgatgtaaggtgaattaccttagtttgcagataaagaaatagcagcctagagagaataaatacctacaaattggactctaaaacctaaaattgcataagaaatctagagacagagatggacaacagatacccaaagcttctaatcactatatcactactttgtgttatgggcaagcaatcaagaaagaagattggatcaaacacttcctatgtggaggcaagtcactgtatacctatacactggggacaaaaatatttgctgtcatttgtctcacacatacaacaaagaacaaatttgagactgccactttggaagcatttggtgaattaaagaatatgaagtgttttcatccaactaacttttcaaaatgagtttatgagtttatttgctcaaggaacatgaagtattttaaggacaaaaaaaaaaa

SEQ ID NO: 9175 - DNA, 596 bp, Canis familiaris
gttaggaaactagcatctcaagaggaagcaggtgccgctagtagcatatctgttcctgcatcagccattggtaggcagccgctccgccctgtgtcctttggcccccgtctgctcctttgtgtgctatttacgttcttgcttttttactctggttctgcttatagggattgttgcacaactggtgccttcataagaggaaggctcccagccattgagtacccctctgctctgtcccctgtggcaaggtgctgtggggtgcatgtttccacaggacttcaccagggtgagaccttgtttggtttgaactcttttgctcctaagagcataataaccctttttttttttacatttggaagctctggcatctcccctggcctctgccctcagacacacaggaggttggtctgatctctctggtcaccaggcctacacctgctagcaggggctgactgaatacagtgttttactgtcattaacagggactccaaggtcctctacgggtctcagccccaccaactctcactttggaacaaaacaccagcccttttgtagctaataataaagttgttaattgattatctcgaaaaaaaaaaaaa

SEQ ID NO: 9176 - DNA, 630 bp, Canis familiaris
ggaagtcttccataagtctcacttcatcccgctagttacacacttccttccagttgatccccaggagaggaaaaaccactgggttttttttccagtcatagttagcatttttcttcctccaccaatcttggctcctcaagccaggaattctggggctggcgggtcctgagtattgttgccttacctgcttctgccctctactggccactgtgcagaactgagggtagtagaaggcggtgcagcgccactgggccaggaccaggaaaagcgcagccttcagcagagcctccttcattcaatctctccggaaagcccggaggtgccttttgcttagcagatgtcacatgagttaggagggcggaccagacaggcgctttggggacaatccattgttttctaatagggaaatcactgtgggacgcctgggtggctcagaggttgagtgtctgcctcagttcagggcatgacgccagggtcctgggatcgagtcccacccacattgggctgcctgccgggaccctgcttttccctctgcctgtggctctgcttctttctgtgtctctcatgaataaataaataaaattaaaaaaaatagggaaatccatgaaaaaaaaaaaaaaaaaaaaaaaa

SEQ ID NO: 9177 - DNA, 591 bp, Canis familiaris
ccggactgatcgcagggacgggcccgccccaggcccggcacgccccccatccccgccaccgcttccccagtgggcaaggacgggactttgcgccccgtgcgcggacgccgcgattttgccttcggctcacggtgaagtccgaggcccggctccggagcctgcctgcgccccctagtggactcgccagagggtgccgcggaccctgccctccgcccccgactgcggacaggagcgcaggaaccgaggacttcaggggccggggactgcggggcccctccagaagcggaaagcagtccgcgaggagagccccatcctggaactgctcaggctccccagacttgacacagccctccccacttctggaggaggggagggcctctgggcggatgggtgtcccctggcgcccctaaactcttctctttctctcttttttttggggagaaacctcggaatttctatgagacccccccagggaggaggtcagttgggcccccatccctcccgctgccacaccccagtccctgttggaataaaaaaaagaacaaaaccccaaaactggggataaaaaaaaaaaaaaaaaaaaaaaaaaaa

SEQ ID NO: 9178 - DNA, 596 bp, Canis familiaris
gcggtttgactcacgggggatttccaagtctccaccccattgacgtcaatgggtagtttgttttggcaccacaaatcaacgggactttccaaaatgtcgtaacaactccgccccattgacgcaaatgggcggtaggcgtgtacggtgggaggtctatataagcagagctcgtttagtgaaccgtcagatcgcctggagacgccatccacgctgttttgacctccatagaagacaccgggaccgatccagcctccggactctagcctaggccgcgggacggataacaatttcacacaggaaacagctatgaccattaggcctatttaggtgacactatagaacaagtttgtacaaaaaagcaggctggtaccggtccggaattcccgggatcagcccccaccctctcccactcactcttgaagagagggcctcacctggggctccaggctgctctttcccatcactttggcctcccatgtgacattggtgtgtggtgttgtctgtatatgctaactccgttgctctttccagcccactgccaataaacaactatttaagggggaaaaaaaaaaaaaaaaaaaaaaaaaaaaaaaaaa

SEQ ID NO: 9179 - DNA, 608 bp, Canis familiaris
aagaaatattaaaggcatttaaactgtttgatggatgatgattcaggtaaaataagcttgaggaatttgcggacgtgttgccagagaattgggtgaaaacatgagtgatgaagaacttcgggctatgatagaagaatttgataaagatggtgatggagaaatacaatccagaggagttcattgctattatgactggtgacatttaaaggattacaaggataaacactaagaatgttgcagttctcatctcatattctatttttgtgcttggagccatgttaagaaaaaaaaccccacttagttctttttttcccaaaggacccaaaataagtgtcttatgtattcatattttactactgttaagtttctttgtatgaacagtattgttagcactctaataggttaactttgtatttatagtacagcttttatatatatataaagtttaaaaaattgaatcatgtggtatacattctctgaaagttttttattcggcatcagcagtcacttttgttttgatgtacacgttacagactttcattaataaaatgtttattttagtagtaaaaaaaaaaaaaaaaaaaaaaaaaaaaaaaaaaaaaaaaagg

SEQ ID NO: 9180 - DNA, 592 bp, Canis familiaris
aaagttggatgaagctgtaagctgtactacaagcccaccccagctaaagaggctgcccacgaagcagttaacagtgccactggtggttcccactgtttaaaattgatcaggaccacggaaaggaactcgtgcttcaccgaagataatatctaacatcgtagaaacttaaacattagtgggaaaaaaacattgccaaatatgaaataaataaaaaaggaaaggaaactttgaaccttatgtaccgagccaatgccaggtctagccaaccatgctagtcctagattacttactgatttaaaaaccaccaaaaaactaccaaaaaatagtaaaatataaagaccaattaatgttttatagaccctggggaaaagaattttcagccaagtaccaaaatttaaagcacttcctcttctttaattttgtaattctttactgtggaatagctcagaatgtcacttctgttttaaataacagaattgataactgagcaaggaaacgtaatttggattataaaattcttgctttaataaaaattcccttaaacccagtgaaaaaaaaaaaaaaaaaaaaaaaaaaaaaaaaaaaaaaaaaa

SEQ ID NO: 9181 - DNA, 624 bp, Canis familiaris
cctggatgaagacgaggaccctgtagacccaagtggctctagagctgccacctctaggaccagccgtgtgaccacaggtcccttggtgtccgggctgaccgggccgtctccagccgaggcagctgccagtgctccctggccatggctgtcttcctcgtctgcccagggtgggcgccgatgatcctgctctggcaacaccccgtggaagggaagccgtggcctgtgtgtttatacatgtacatatgtgtgcggggtccttggacccatttggtcttataaacacgggaccactgccaaggcctggtctcagcagccctgttccaccaaggaccttcatgcaggggtgagggggatgtcaaagggggccattgcggccttgacccaggctccctctctgaaccttggggtcagggagacctgtttacagtacaatgtgataaacccagtcttttgtaataaatggagtttgggttcttggggcagagtcctgagagtgtggcaggtgtgggtaggtgatgtaggggcggcctgagcttgcatctagcacccaacctgagctcaggaacgtcaggtgacttaataaatgaacgaatgtgagaaacaaaaaaaaaaaaaaaaaaaaaa

SEQ ID NO: 9182 - DNA, 107 bp, Canis familiaris
tgggacagtgtttggcacatagtaggtgctgaataaatatttgttgaatgaaaaaaaaaaaaaaaaaaaaaaaaaaaaaaaaaaaaaaaaaaaaaaaaaaaaaaaaa

SEQ ID NO: 9183 - DNA, 604 bp, Canis familiaris
atggctaggatttgcgtttctgtgggtttgaggatccatccctgctagcgtcagggaaaatggggtgccccacacgttggggcatgatccagccttgagacagagccgagagcaggtttgtccactgggctggccagtcgggattgggcagtccagggtggtcgtggagtagctttccaccgttggaggcttttggcttttgtcttgctgaggtagtccttgtccacaagccttgtggcctttatgccacaccaagtcttctgattgattgcatatggcagcaaaatgggtggagtagcacttgagaaatcctgagaaacaagtgtgagtaccatagaagctagaaagagggtggtgcagaaaacctagggaccctctctgcattgttctctacactacttctcaccaaatatttataatgtgccatgagatttttatgatacttcttcaatacaaagtgcaagcatgtagcatcattatatcaactaccactctgccactttacaaaaactctgtatgtaaactttttttaatgtaataaagaaatcgagagtaagtgttcatgttattaaaaatttttgatttcatggaaaaaaaaaaaaaa

SEQ ID NO: 9184 - DNA, 626 bp, Canis familiaris
gtatgtaggtgacataggtcattgctgcggtaagccatgtgcagctgctccaaagagtgttgagtgcatgtagccaaagtcaggaggcctagaatttagggagtgtgggcaactaaccactaagataaatggttgaacttgcacttagcgtttgcataggttggctgtcctttttttctgctgatgggttccatcagtgtatttttcctccttttggggttttaatgctgaatgtgtaaaaccctaagcagattgtgtaacatcccccaggcccagctgctggtcctgcccactaaagggggaacttgccaggtcctctgtggagtgcatctccaggaaaagtggattggaaaggatggtttgctttgcaaggaggctcagattttgtacagcgagtcggggagccgcatggccttttccaggcttctccagtaacgattctagtcctttctttcctcacctgtgcaaagcctgggctggctttgtctgttggccaagccttttctccagggctttgaaggtgaaaagcccctggaaccttcctgtgagcccacagctgggcctggcagcatttccaccctttccagtaagggagtgcagtcaaagaaaaaataaaaaaaaaaaaa

SEQ ID NO: 9185 - DNA, 627 bp, Canis familiaris
ccaaattaagagaaaataacttaaggactctaccatggaaatgaagaaaactagttgtaacaatgttcaatttagaaaagtttgagggggaaatatgcctagaagatcagtggataagatgaacatttttcttttagtgtccttgagagttcttggagtgccttgaaaaaaatatattggctacgtgaaggagtgtttcagctaaaatggaatgttacacccttaacacttgatgtttgaggagaatctagatatgttttaacattatcatggcagggaaacagagaagagaagtatttttatagtagaccttttcccaaaaactgtaaataggaaaataatctacttttttcaagagcaatatttatcattgtgtgttatgttaataatatgaattatcacattggctcagaaagttgaatcttgccactgtcagaattctgagccaatataaaccttgcttctgacccattgtgacagttttatatactatttcaaaatgatgattgttgcaagttaataaagttaacatctttaaatacttgatgaaattccgttgcacaagccaaatattaaaattaaaaataaacaagtccatgtctctgaaaaaaaaaaaaaaaaaaaaaa

SEQ ID NO: 9186 - DNA, 448 bp, Canis familiaris
tgttgggatttatctgcagtatgactagctttaagtgtttgtgcttatacaataagtgctatttctctcctgttcctgcagccttttaaagagaacaaattttgtgttccttgcaaattatattaagatgtttttaatagatttttatcaactgtgggaaactaaccacagagctaatactctttcttagaaacaacccatagttaagaagacacaagacttactgcagaaatatttttccagggattaagagagaaaaattgcctatattcttgagttagatgcacttgaagcaaaaaaagtgatcccaaagtagagttttatgagtttgcgcttcaaaaatttaacattcctttaaattatcttagggagtttttgctaagattcaatgagagaagcccatagtctactttattgtagataggaaatgtgcacacctgttgagatt

SEQ ID NO: 9187 - DNA, 593 bp, Canis familiaris
tctagtttcctgtttgtaggtaactactatgataattgacatatagtaagacttgacatgaatttaagctagggtgggacagttgtgaattggacagcagaaagaagcatagtagaagagtaagggttccagcccaggactccagacaagagcttaagatcaagctcttccactggccattgaatgaactctgtaaccacaagagggttccgtgcggcagtctccccagctccaaagtaggaataaacaatactttaactacctcacaggattgttgtgaggagaaaacagaactgcgaaagtgctctaaacagtcaaaagctattcacaaaaaaggtatgactcatatgggggggaggcggacaaaaacaattttgagggcagaaaagttattccacttttaaaatcaatagccagttctcattcttgctgttttattgagtgaaatgttaggaagaacctttattggccaagttgataacaaaactatatctgtgtatcccctttttttgttgctaagcatgcttgcattttaaaagaacactgctgtagaagtctttatataccaacttctctgaaagctaaaaaaaaaa

SEQ ID NO: 9188 - DNA, 609 bp, Canis familiaris
ttttgtagaataatccaggagccatttgatgagacagagcagaagaaatgacacagactttggaatataggaaattattctacattttccattcacgttttttaagttagtgagatgattttaaaggcattttttaaccccatggattagtattaagtgacagaaataatgttaaaaattaagttgaaataagtaatcttttcctaatgaagccgtgttggccttttagaccaaaatgaaaagttgcaaggcagatgtttaacctatttaaaagagccaaccatttcccaatgcccctggaataattaaatagaataacataatgtaagtagaagctagcacttgactttatttttttagcattgattttattaatttagttactgtatcttaccccactcagtggagatttgtttattcaatctgaaatgttaaagtacctctgacctaatatgactatcattactctgttatcagtctgtacttacattatgtcattgtttttatgttatctctttttaaaatatatatgtaacctatattaataaacatgaaagtttgcttggaaaaaaaaaaaaaaaaaaaaaaaaaaaaaaaaaaaaaaaaaaa

SEQ ID NO: 9189 - DNA, 579 bp, Canis familiaris
tttcccgtctaaagaagtacggtgaaagccccccggtatggatagggacgagggccgagacgcatgacctgctgtccgcagagcacacccgtggtgctcgccttcctcccggggctgggtctgaggcgtgactccccggggcgccccccaccccgaaggcgcgcaggtgaaggtgtgcacgcgggggcaaaacagccagggcgcgtgcgcctcggaaccggcactccacgtccgtccgtccgtccagcatgtccgtccgtccacgcggacttttatttcccgaggagccattggtggtggcggctccagctgccccccagctcgcgggggtcggggcaggggtccagggcccaggctgccacggaggaggcaagcagggccgccaggccagagctcaggaccccagcagcccagcgggggcagccacagggctccaccgagaccttgcagccaagcggcggctctgccctgccccccaggactccagcgcccgctccgagcagcgcaggcgcctctgcggggaggggcggtgaccgggtcgcgctgtccttgctgcgcctccgcctccgcctccgcctc

SEQ ID NO: 9190 - DNA, 415 bp, Canis familiaris
ggcacttcttggcatcatgaccccatgctcgcactcttgatggtgagagtctccatcatcccctggcccctaccgccacggctcctctcagagaagctattgccaagacctcaagtccttcagaaccagaacatgggtggccatcaggatggccacccttccataatcctcctttcctctgctccccagaccttgccatttggaaacaaacatcagatccttgccccaccccttgcttccagaaagggtcttgagcccataccccaagtctgacaccctcctcccctcccgccgcctgccaggacactctagcaggacactggtgctttgccgcataccctactgtgctgcacttctttcccaatttttcataaatataaatgtatgtatgtatgtgtaaaaaaaaaaaaaaaaa

SEQ ID NO: 9191 - DNA, 550 bp, Canis familiaris
ataccctcggcaagacatcaggacaaataaagagaaatgggggtatacattcccacagaagcagtgtgttatttgttttaaaactccggacagagatcttggaaatctttcaaaaagaccacttgaattcttcattggctgagaactacattttaaaaagtcttaaatagggctttgtttgcattgtttgagttcaaggggccttattattgaatggaattgcacaagcctttctttgtgcaatcaaaccattgttattggtagtttagtaaaggaaactgtggaatctaattggcaatggagtcataaatctatttactgagcgtggcttccaagaaatgttgcaattcaaaatagcactaagtccatgatttactggagatttggagattctaaataatattttttaaaaaagaaaagaaaaacctttccatgcaacttctggtttaacttttggcaactcaataaaacaaaacaacaacaacaacaaaaaacacaaaacaacaaaaaaaaaaaaagaaaaaaacgaaaaaacaaaaccaaaaaaaaa

SEQ ID NO: 9192 - DNA, 446 bp, Canis familiaris
  misc_feature (1)..(1): n comprises a, c, g, or t, or includes no nucleotide
  misc_feature (86)..(86): n comprises a, c, g, or t, or includes no nucleotide
ntttaacatcctcgatattattctgcttagccaactccaattacgaacgaatccatagccgtactataattctcgcacgaaggacnttcagaacccctccgttccccctatatagcagcctgatgactattagcaagcctcacaaatctggctctccctccaaccattaatcttattcggagaactatttgtaatgaaatcctcaattttcatgatcccaccttactattatcctaataggaattgaccttaccatcaccgccctatactcactttatatattaatcaccacacaacgtggtaaatattcccaccatatcaaaaatatcaaaccatcattcacacgagaaaatgccctaatgaccttgcacctactgcccctactcctcctatcccttaaccctaaaattattctcggtcccatctacaaaaaaaaaaaaaaaaaa

SEQ ID NO: 9193 - DNA, 630 bp, Canis familiaris
gagcaagccctcttccggaccatcatcacctacccctggttccagaactcctcggttatcctgcttcctcaacaagaaagacctgctggaggataagattctgcactcccacctggtggactacttccccgagttcgatggctcgcagcgggacgcccaggccgcccgggagttcatcctgaagatgtttgtggacctgaaccccgacagcgacaagatcatctactcgcacttcacgtgcgccaccgacacggagaacatccgcttcgtgttcgcggccgtcaaggacaccatcctgcagctcaaacctgaaggagtacaaccatggtctgaacccggccgtccgccgccgcgcccaggaacagggaccgccgccgggcgggggcctgcctgccggtgcccgagcccgccgcggctctgcccgccccacccgccccggctctgcccgcacgaccgacgttgaatatttgttttcatatttttaacaaatggtttttatttcacagttatcaggggacgtacgtctttctttctatacacctcgtgcaccttctcacctgtgtcagcggacgaggccgccttttcctggccttgacttagtggctcgcttttttctattaaaaaaaaaaa

SEQ ID NO: 9194 - DNA, 660 bp, Canis familiaris
ctgagcacagcactgtcagtggagaagacaagcaagcgaggaggcaagatcattgtgggtgatgccacagagaaagatgcatcccagaagtcagattcaaatccattaactgaaatacttaagtgtcctaccaaagtggtcctcctaaggaacatggttggtgcaggagaggtagatgaagacttggaagcagaaaccaaggaagagtgtgaaaaatacggcaaagttggaaaatgtgtgatatttgaaattcctggtgcccctgatgatgaagcagtacgaatatttttagagtttgagagagttgagtcagcaattaaagctgttgttgatctgaatgggaggtattttggtggacgggtggtaaaagcatgtttctacaatttggataagttcagggtcttggatttggccgaacaagtctgattttaagaactagagcacgagtcatctccgatgatccttaaatgagctgcaggctgagcagagaaggaaaaggcctcagccagcctgtgtggctgctgcgtacagagactcttggaaggacttctaagatatatgttgattgatcccttttttattttgtggttttttaaatatagtataaaaatccctttaaaaaaaaacccaaaaaaaaaaaaaaaaaaaaaaaaaaaaaaa

SEQ ID NO: 9195 - DNA, 495 bp, Canis familiaris
gtatctgataagggattcatactcggacacatatagagaattcttcacaatctcaatgcctaaaccttaaacccattttttaaacgagcaaaatagacatttctccaaggaagatgtacaaatggcaaaaaagcatatgaaaagatgctcagggcagccccggtggcacagcggtttggcgccgcctgcagcccggggtgtgaccctggagaccagggatcgagtcccacgtcgggcttcctgcgtggagcctgcttctccctctgcctgtgtctctgcctctctcttctttctctctgaataaataaataaataaatctttttaaaaaaaagaaagaaaagatgctcaatgtcattaatctttagagaaatgcaaatcaaaaccacaatgaaatattacttcacacccattagggtggctgctataaaaaaagagaaagaaagagaaagaaaaagaaaaagaaagaaagaaagaaagaaagaaagaaagaaaga

SEQ ID NO: 9196 - DNA, 559 bp, Canis familiaris
tctgcatgttatccagcttttcttcatcaaccatgttatcctgacggatacattcattggatatttagttggaaataccttatggttggtggcagttggctactacatctatgtaaccttcctaggatacagtgcattgccatttttgaaaaatacagttattcttctttatccgtttgcacctctcattctgctctacggcctgtcactagcactaggatggaacttcacccacacactgtgttccttctataagtacagagtgaaatgaaagcagtattgaaactattccatcctccccagcagcaagcactctgggtgaaatgatttcttcccaaacttgtaaataaactatctttgtagatatcttcaggtgtaaagtttgcaaatttgagaaaatacatatgttgacaccattgtcaaggtacattccttaaaactaattaaatgtacatttctatcaataaatattttcttaaactaaagcatgtattttattcattctaataaagctttaagtatttttgaaagaacagacaaataaaaaaaaacaaaaaaa

SEQ ID NO: 9197 - DNA, 623 bp, Canis familiaris
cacgggacatcatcgacatctttcttgtacatcctcaccatcatcgccgcgccaaggagtagctcacgctgggggccccgcttggtggcctggctggcctggaccctgcccctggtgtggcagtgccatcgtacctccccgctctcatccctgggcacagcctgggactgagggcccctctccaaccctcctgtgtgtacactgcagatacttctgttcggacccgccgtggccagcatggccccttctcgccctccggccctgccaaagggcagtggggcccggtttccatgccaccccatgcccactcactgttgcatgagccctgtctgccagcccaccctagggtctgggggcaacaccaggtcccaggggagaggggccgagccaagaggtgagggtgcacgtgtcccctcccgttcctgccccccagcctggcatagagtacccagtccccccctcccctcccctgccctggagtgctgccctcattcctgtgctgagccccgagggcagagaggatgagcctatttcaggggaggaggaggccttcctcttgtcttgctgtctaaaattcccaataaatgggaccttgtgctctaaaaaaaaaaaaaaaaaaaaaa

SEQ ID NO: 9198 - DNA, 643 bp, Canis familiaris
ccgaaccctcatagcagccatcctctacctgatcacctccatcgttgtccttgttgaaggaggaaaccactcccaaatcatcgcgggggtactgggcctaatcgctacaagcctcttttggctatgaatgcttaatatcagccttcccctctgcggcacgccaagagcactatcacgcacgcccctatctgagatcctcgcacagagatgggccccgggtaaggtggaactccccttcattttttcttctggaaaccctggcaaataacacttcccatcgaaaggactcctccctgcccttataacactcccagccaactcccagccccttactgaagtacaagtgcctttattgggagaatctgtcttcctgtcctgccagtcctccctcctgggtgtggccatctttatgggtgtgcctatgtccccctaccttctgcagtacccaacaggagacactgttctgcctggactatgcgcccacttaagccacaaaataaggggaggagggagcctcagatttcagactctaggccccaggctgtgacctgcaccaaataaactcctcagtgtgggggggatggttctgtggagggataaataaacagattgttaaaacatgtgaaaaaaaaaaaaaaaaaaa

SEQ ID NO: 9199 - DNA, 615 bp, Canis familiaris
  misc_feature (141)..(141): n comprises a, c, g, or t, or includes no nucleotide
  misc_feature (151)..(151): n comprises a, c, g, or t, or includes no nucleotide
gacaaataggtgcagaacctcttggccaaccttggccaagggctgtgtctttatctggactactcatcgttcccagaaaaaccaagagccagaggctcaataaaaacatagtttatttagagggctccctttcttgggggncaggggctcncctggtggcctcctcacccccaccaagcagtccttcagaggggctcaggcatcctctattcagaggcactcttggggaacaagtgctccccctgtccagcgtcaaagaactgggcacgcacctcttcccacggcccttaaggacacattggggctaaacccacaggccacaggccaaaggcaataaagctggttgggggggggcctcccttcccccagtgtatatactgtacctgtgtaacattttgtatattctggggatagggcagccccctgtatcatagcagaggttggaactggcaaatggggaggaagttctattaaatatttggggatgaggaaacttatttattgatagcataggacagaggaaggaggcggggacggggttccgcccaggtgactcacaacttctgtttgctttttatttcggaataaatggatttagccataaaaaaaaaaaaa

SEQ ID NO: 9200 - DNA, 345 bp, Canis familiaris
tcgttgtcacggtgcaagcatcctgcctgcccgagtcttggctgttgtgttttgctctcgggttctgtgttgtgcgtgggacggctctgaccactgctttctgtcgggccctgcccgcccctccccgcccctccccgtccctccccgtccctccccgctcctgccatccacccggttgcaggggagttgcctggccaccagtgctgtgggtctgctgttatggcagctgcaggaccccctccccagctattccccagctgctccccagctcccgactcgcccgccacctgcctgctcacccaataaagaaagcctgacccgtaaaaaaaaaaaaaaaaaaaaaaa

SEQ ID NO: 9201 - DNA, 493 bp, Canis familiaris
ctaaaccaggtcctggaccccagcttgttccttggtgacccggcctctgccctttcccgccggaagaaacttacttgacctttccccaccctctgaccccccacccttttccctcacagcctctgctgggcgcacagagctgtccacttctagacatgtcctggcagggggacacaggcactctggcacagacccagctccacctgatggtgagagctccatcacccctggccccacccttccataatcctcctttcctctgctccccagaccttgccatttggaaacaaacatcagatccttgccccaccccttgcttccagaaagggtcttgagcccataccccaagtctgacaccctcctcccctcccgccgcctgccaggacactctagcaggacactggtgctttgccgcataccctactgtgctgcacttctttcccaatttttcataaatataaatgtatgtatgtatgtgtaaaaaaaaaaaaaa

SEQ ID NO: 9202 - DNA, 694 bp, Canis familiaris
  misc_feature (370)..(370): n comprises a, c, g, or t, or includes no nucleotide
  misc_feature (379)..(380): n comprises a, c, g, or t, or includes no nucleotide
ttagagtattatgttactttagtccaggtctaagcctcttgagggactatagattgtaagatctggatgtgaatccttgaccgacacctagaataggtttataggacctttttggttgtggttgcagttttcagtaagattgcataagatgaagttcatgtttatcagaagttaaaatagaagttataggagttcttggagaaagggctttcttgttactttcattaccttgttgaaatttgccccagtttctggccaccagaattgatgaaaggagaccctgttgtttttcaaaggtaataattcctgttttgtgcccatcattgataaaccaggtcactgacactttcccttctaccctggccacaanggggaaaanncccccctattctgaacttctttccagagccaagtggcacaagtacatatattatttctgctgatgttgatggtgtggctgtgggagaattcgacaaaatactcatcagaagtacattcttagaggacctcagtatgcattgtacccctgctggttggaaattatcttcatttctggttggactgcattgtttagaaaaatgttaatggtttataattctagggaatttatagtgtggctctggggtaaattttgtggtttggaaaaaaataaatattttgtattgattctaaaaaaaaaaaaaaaaaaaaaaaa

SEQ ID NO: 9203 - DNA, 632 bp, Canis familiaris
gtgtctgctggtggcccggtgaccaccctgggtgctgaggtcgctctgttggctgggcaggcagtgtgctgttggtttcagtgactatcctcatcgtgctgttttcacgaccaacacttatggaatgtgggggggtgcgatgttgggtgctgcaggcctcctgagccggctggaggaagacagactgctgctgctgccaaaagaggacatctgtcgctgggcccttgctgcaggcagttgggcctaccaccgagccctgcacacacagcgcctgcagtgggagtgatgcttagagacagcatggtggggcttccgtcctggctaccgcttccctctcccacaggcctgctcccttaaggatggactctcgggtctcccaaaaagagcttgctgcagggtgatggatgccttggttaggaggctgagtccaggcaccaccgtccctcctctgcctgagtgtgggaactcgcctagaccagaatgaaggggatggggccccaggcacattttggggcctgctgctgggcaggccatggttgtggatccagagagaggcttggtctccaataaaccttagggaaacagcaaaaaaaaaaaaaaaaaaaaaaaaaaaaaaaaaaaaaaaaaaaaaa

SEQ ID NO: 9204 - DNA, 658 bp, Canis familiaris
ccgcaattcacaaacaagtcgtccagcagcctgtgtattcccccctaccacacccctcaaatatagaggtctgctttgaagtggagactgtttccaggccttattgagaccagagccctggagccccgctcccccctgccctgctatggcgtttcctctaacagggactggctcccagcttcacccccatggggttcctctacccagaaccagctttcctaacctaacagagaccacaaggccgcctctgcctgggggggcggcaggggggagtcctcctctttcactccaacttgcctgctgccccctttgtcttcctgcttccagctgggcttgggagtgaagtgggagagagacccagcacctctttagtgcctaagccctggcaagaggccttgcctgaacgccccctcttcccagaggctgcccagacctgggcctgggccgtgcgtgtcatcgtgttgctgcagtgcccaggaagggctgagcctcagagaactggccgccgccccaagtgttttctggggagactgaggtgtgctgccctcctgtctcacccgctcctccaaaccccccaaatcccccttggaagagaatataaaataaatctggataccagggaaaaaaaaaaaaaaaaaaaaaaaaaaaaaaaaaaaaa

SEQ ID NO: 9205 - DNA, 623 bp, Canis familiaris
ccgtggtgaagatgtcgcccggacctccaggtcctcaggcgctcgtggcagcctggtgtcatgggtttcctggtcccaaaggtgccaacggcgagcctggcaaggctggtgagaagggacttcccggtgctcctggtctgagaggtcttccaggcaaagatggtgagactggtgctgcaggaccccccggacctgctggacctgccggtgaacgaggcgagcagggtgctcctgggccatctgggttccagggacttcctggccctccgggtcccccaggcgaaggtggaaaaccaggtgaccagggtgtccctggtgaagcgggagcccccggcctcgtgggtcccaggggtgaacgaggcttcccaggcgaacgtggctctcccggcgcccagggcctccaggggccccgtggcctccccggcactcctggcacagacggtcccaaaggcgcatctggccgggctggcccccctggggcttctttctgatgctataaattttctggtaccctggatctagggacagtgtttccttacatatgtagagaaactattgtaaccacctttttctaacagcaataaagaggtgtcctaggctccaaaaaaaaaaaaaaaaaaaaa

SEQ ID NO: 9206 - DNA, 620 bp, Canis familiaris
  misc_feature (252)..(252): n comprises a, c, g, or t, or includes no nucleotide
acccggaagacactgggcaaggtctacagacaattttgattgtcacactgggtggggtgggaggatgtgcttacaggcctctaatgggcagaggccagggatgctgctaaacatcctacgtgcacaggacggcctccatgacagaaggttatctgactccaagtgtcactggtgccagagttgagaaacgctgaattacatggttgttagacctgcagagtccttcaccacaaaataaaacaaaagaccatngttagaatctaaggaaatgaccccacataaagccattgatcatatttttttcaggattccctgtcactcagcatttccatatggagcaataaagacagactacacagaaggggcaatgtcagggcgcaggaggccagatctttctttttaaagaaaaagactggtcagtgttagccagtaagtcattcatctggtctcactttaaattcacagaacacgatcctcttaggaaggaagtatgaaaagtgtacaatttaacatttttaataaatagtgacagaagttgcttacaatctgtgtcaatatgtatttacctactgctaattaaaaacaaaaaaataaattggtagtcaggggcaaaaaaaaaa

SEQ ID NO: 9207 - DNA, 656 bp, Canis familiaris
accaaggcttttcagagaggctcagatgagggagaagctggagcgctaccccaaggtgtcctgagggtcctgttccctgaccgctacatcctgcagggcttcttccgccctaacgagactgtgggggacttgcgggactttgtgaggagccacctggggaatcctgagctgcctttctacctgttcatcactcctccccaaactgtcctggatgaccacacgctgaccctctttcaggcaaatctcttccctgctgcccttgtgcatcttggagctgaggaaccgacaggcctcttcctagcgccgaggctgctggaacacacggtttccccgtctgcggctgacgtgctggtggccaggtgcatgtccagggttgctgggacctcacccccaatgccggcccctgaccctgcaccccttgacttggagccagcggctgaggcggaggcagtgcggctccctgaacccagccctgggtcggcccagccggtcagaagggacctgggcaaggtgcccaagtggctgaagctgccagccggcaagaggtgagggccgccagcctggacgcaccatctgccgccacaggacccccccgccaccccgagcaggaataaaggtgtgagctgctctcccgaaaaaaaaaaaaaaaaaaaaaa

SEQ ID NO: 9208 - DNA, 593 bp, Canis familiaris
ccacccccaagggctcccagagcccaatccccgagccagggccgggtggctaaggcttccggagtggcgtcccggttcgcaggttctgctacgttccagccagcccctgactggtcccccagaaaaggtgctgcgctgaggacgaggagctgctgcgagctgcaggcgctggccctggggcccggggcttcatcttggacacccgctcggcctgagccgccaaacaggcccttgtgaccggcggcggcaccgaggccagaggcgcctgccctggctgggaaccgctgcattggccacttgcagaggtgagaggtcttcagatcctctcctaggggctctcctacaggactcttcagggaaggggtatgagttgggagtgtcctccacggaccttggggactgttaagcatttccaggtagccatcctacccggtgagcgtccgcacttgcacactgcccactgagagctcattcctctcggcaccccaattctgtcttgaaagaaaaagtctctctttacattaaactgaaatttgatttcttaaaaaaaaaaaaaaaaaaaaaaaaaaaaaaaaaaaaaaaaaaaaaaaaaa

SEQ ID NO: 9209 - DNA, 614 bp, Canis familiaris
gtctctgggaagagccttgactcttcttgggggaaggaggtggctgcagaggggtctgaaccatcaacctataggagcatcttgggctttgggggcagcgtggctatagaatgttctcaacagcacacattctctcagtggtacacaattttaaatcaccttcctttttggctggagggacttagaggccatctgattatatgttctcatcttacagttgaggaaatgaggcccagaagtgtgaaatccatttcctaactgcttagggacagaaccaaaactggagtgtaagctcattccacaccaccattcttaccaatctttcccgtggctctggtattcatgttgaaatttcagatgttaaatgtttttgccagtgtcttttcaactgggaaaagtactagggcttaaatgtcagatttatttttaaatgactcactgtgtgtactgaaggaaaggacaccatatttaacttaatctaagaagccagtgattgtaaagcatgccattattttatagaccactgagttaggtgggggagtggaccattaacttgtgacagttcaatggccaagcctatttgaatttgatttgccaaagtgtgaaaaaaaaaa

SEQ ID NO: 9210 - DNA, 637 bp, Canis familiaris
aggagaagaatgttcaacacgtcctccctgctgaagcagctgagacgagccagtttagctgtggtggtcccacactggctaacactcactcaaagtgaagaccccattctatactccaggtcacgacggtgggtttctcagaacattctgacatcccaaaggtcccgctgggcttcactaagagtggttgtgaagagctcctttggaattctggacccccatccacgggtggaaggaatccccggaagccggttttcccagggaccattcccgtaaatttatgggaggactgtggccagagaaggctcttcaggagtatcgcccaaagcaccgagaggaatgagatgtgaacattgcttctcccaatatgggagggctgagttcctttgaccccaagatgagtgctaggcccctagagagagctctgcatgtcaccaagtgaccaggccttgcctcgaggcgctcctgtctcctaacccagctttccttcctctggactccgcactgtaacgcctacgtttgctgatcatgggaagaactcctgtgtgccactaactcaataaaaccgccaaggaatctgaaaaaaaaaaaaaaaaaaaaaaaaaaaaaaaaaaaaaaaaaaaaaaaaaaaaaaaaa

SEQ ID NO: 9211 - DNA, 655 bp, Canis familiaris
ggcaagcttggcatgaggagtgaccactgccttccaaagtctgttttcctcataaatcagtaaaagagttgctgaatcctctagctttagcacacctgggccaaaggagggaaagccaacaagactgcacaggtcatctacccatgacaaagtagacgtgagtctatgataaaacgaactagaattcacatgcagtgcctgatttcagcattgactcccataattggagggaaatggatccaaatttgaattaaggcccatggtgagggaacattgctttgttgtacttttgaataagagcttctcctgatcactattatatattttttttagaaagtctaaagttgagaagagagtatatcagtcctgacttttattcccatattggatggaataagttttagggtagaattttgttcagtttggatttaatcttttgaaaaataaattccttgtttacttgtttgattacaattctctttgttatctttaagaggtaagactgcaaggtgactagcatgttctgtgaatctgccattcctaaaagttttataaacacttgatatttttcactgataattgattgctgcaataaatatatattgtgaaaatgcatccacaataaatgggattcctcccaaaaaaaaaaaaaaaa

SEQ ID NO: 9212 - DNA, 667 bp, Canis familiaris
  misc_feature (65)..(65): n comprises a, c, g, or t, or includes no nucleotide
  misc_feature (137)..(137): n comprises a, c, g, or t, or includes no nucleotide
  misc_feature (153)..(153): n comprises a, c, g, or t, or includes no nucleotide
  misc_feature (181)..(181): n comprises a, c, g, or t, or includes no nucleotide
tcagtataacccagttcctcaccattttcctctcatctttcagtgccatttctcttcatgttagnctgtttgtacaaacttttgggagccggggtggtacatcagttctctggaatccagccagaccgcctgggggngtggatccaccacacncctgtagaggcttctcccctcctagctngtctttgggaaaacgcagaatctgggagagcttgttttgaccacgagagagccacagagtctacagagcacagagtgtgagagaaaaattgtgtaaatagagaaaagatgtgtgttttggtgtaaaatggttttgtttttttgtttgtttttggtttctcacacaattgggaataacctgtctcaaacaagaagttcttttcccttccaagtttcccagcaatgttcttcccttttctcccctttctcacgtttttcctcctattaatcaagagaaacttcaaagtccatgggatggtcggatctcacaggctgagaactcgttcacctccaagcatttcatgaaaaagctgcttcttattaatcgtgcaaactcttgccacgatgtggggagtttgacaaatctttcaaaataaaaagtaatgacttagaaactgccaaaaaaaaaaaaaaaaaaaaaaaaaaaaaaaaaaaaaaaaaaaaaaaa

SEQ ID NO: 9213 - DNA, 642 bp, Canis familiaris
tttaaaggccacctcccaggtaaaatccagggggaaaagtcatctaagtttaccaatgcacttgttttacccaaaatagaggaggagagtcttaatttttgctcttggatttaagtcaaggtactgtataaaagttgtgtaaaatcagtatgaaagttcaatgttgcttttcttgctcagtgattttgaagaaattgagtagttccccgtatgatatttctctttcttttctaaactgcattcctgtgcccacctgaaggcatgcctctatgtattggctactacagtatttcaaacagtatttgagatatttctttaaattatgtaccaatccaccaatgttggtgttttgtatggatcacaagtgcagcattccataattctttctgttatttgtcatggttgttatttaaagaacccaatatgtattgcatgaaaacattatgacctttcctcttagtttaaataaactcccaggtaactggacttttaaagtacctttctgtttgcctgatatctactttagccataatttttttacgaccttctgactcaaccaagtaaataaaagtatattttatcactggttaaaaaaaaaaaaaaaaaaaaaaaaaaaaaaaaaaaaaaaaaaaaaaaaaaaaa

SEQ ID NO: 9214 - DNA, 648 bp, Canis familiaris
acgtcaagttctccttccaatgcctgggcgcatgtatgcacctgcctgggtggcccctgaagctctgcagaagaagcctgaagatacctacagacgctcagcagatatgtggagttttgcagtgcttctgtgggaactggtgacgagggaggtaccctttgcgtgaccttctcccgaacattggaagaatttggagattgagaaggtggccaacttggaaaggccttccggccctacttattccccacccaggccaatttcccccccccaattgttggttgtaaaggcttccaatgaagatctgcatgaatgaagaccctgctaagcggcccaagtttgacatgattgtgcctatcctggagaagatgcaggacaagtagagctggaaagcccttgcctaaactccagaggtgtcaggacacggttaggggagtgtgtctccccaaagcagcaggcctctggttgcctcccctgcctccagtcatggtactaccccagccatggggcccatcccctgcccccatccctaccactgcagcccccaaaggggctaggctcagagctttgtcacttgccacacggtatctcccagcatgggagggaccagccctgcctgtcacaataaagtttattatgaaaaaaaaaaaa

SEQ ID NO: 9215 - DNA, 186 bp, Canis familiaris
ggccctgagtgtgtcatgaccctcagttactcacttaaccccaggccacgttgtatccggatagtctccagagttgtctttatatgtgaattaaattatattaaattttaatctatagtaaaagcacagtcctgaaaataaattgttgtgttaaaaaaaaaaaaaaaaaaaaaaaaaaaagaaaaa

SEQ ID NO: 9216 - DNA, 564 bp, Canis familiaris
gatgaaagtgattcccattggctcctcaacggctggaagggggcttctggaggggataatgaggttacagcggaccatgctgggagttgctcaacccagttggatggctttgagccaccagagaataatcaaggttatcatggctactaataggattgacatcctggactcagcgctgcttcgccctgggcgcatcgacagaaaaattgaattcccaccgcccaacgaggaggcccggctggacattttaaagattcattctcggaaaatgaacctgacccgggggatcaacctgcggaaaattgctgagctcatgcctggagcctcaggggctgaagtgaagggtgtgtgcaccgaagccggcatgtatgccctgcgggagcggcgagtccatgtcacccaggaggactttgagatggccgtagccaaggtcatgcagaaggatagtgagaaaaatatgtctatcaagaagctatggaagtaaggtgcttgtcttttgtgtggatccctcaaataaagctctgcaggacaagccttaaaaaaaaaaaaaaaaaaaaaaaaaaa

SEQ ID NO: 9217 - DNA, 116 bp, Canis familiaris
agaatcaggttcatgacagatggccaccatggcaggccatgctaggcacattgcactaattaaaaagcgtgagcattaaaaaaaaaaaaaaaaaaaaaaaaaaaaaaaaaaaaaaa

SEQ ID NO: 9218 - DNA, 615 bp, Canis familiaris
tggaccttagaagtatttgctttgtcctaagttatggaaatataattttatctggataaagattttttttttgaatttcaaagtcaggtttatcagaagggatgagaatagtaaatagtgaaatgggatatgatctacactggttgtcatggatattttgtaaatttttccaccatcacatttgtagaaccgtaatactgagctttagggttctatatagaccttgtattactttcatcccgtgtgtagactaatggctaatcatagggacccagaagtaatccaagttggaaaagggattaattgtcaaaggtgtaaataacgtaggatagaatagtgacgaatcagaatccttcctcgttctgtcacttactagttatgtaaccatggaaataattttcatagttacagtgaggattattgcaggtaagtagagtatgtagggcagtgcttcagatgtggtaaatggctctttaatggttgttattaatggtagtaaatgattatttggaaatagatgaaaaaagtacatgaatttaattttacttacaagtttgatggaaaatttcctaaaatgaattatatttccttgactgttaaaaaaaaaaaaaaaaa

SEQ ID NO: 9219 - DNA, 700 bp, Canis familiaris
aactgccatttcccactatatttatgtttgccccaagatgagttttattgtttgaaatctgagacacgtatgttcaaatggtctatctttgttcaaatttcttcccacctaatgtggaaatccttccttggacatcacactacatgtaaggctggtaaggatgactcacacaagcttatggttttcattacccaaatttttagattctgaatgtagatggagtctcgtttaagagtcaccaaaggtgcctgcccccctttcctgctaagaagagtccctttgagactgtcccaagagtgtcagagaactcagtgggcaggggttctggtctgcttgccatctagatgtgggatatgagaggacacctatatagtagatatagtgtggatattcttgagcgtctctatcctctctctagaggaatggaacaccaaggtagtcacctatcacttaaatttaccaattccaaaagattactacaaccatgtccatgctcagattcaaatggtttttcatatcactttcgggtagtaaaatgatttacatttttttcttaattggcagcaccaattgccattccttacactctttgatttgtttttgttttgttttgtttttactgagctcttgcatgatttatcttgtgttaccatcctaaataaacattttattaaatgtaaaaaaaaaaaaaaaaaaaaaa

SEQ ID NO: 9220 - DNA, 617 bp, Canis familiaris
agaagattcctggaagttgggggttggggccccagtttttgaagaactttatctatgaacttctccaagattattttcatatggcggcaagtgacatttaagaatttgctgtcggggacacctgatgtggaaatcccatagatttttaattatggaacatattagggatttttccagaactctaaagggtcagcagccctctagaaggtcaggccgtggcctgaggaggctgatatttgggggttggtatggggttggccaaacccagttctggctcacgtgtcaggaggggagtggccaggctgaaggaagcccctgccagcagagggcacagcttctcttcctgagcactctggagaaatccctacaaagcaatgtcactcctccagtgtcattaataatgtgtgttgcaaactttaggtttttttttttttcctttcctgaagatttcttttctctttgaatcaatccctagtcacgtagcatagggctagcggtcgtcaccgacatcctagtagaatgtagcggtcagcacccctgttttctactttgtgttcaactccaatgataccaatagactattcctcaatgtaattgcacaaaaaaaaaaaaaaaaa

SEQ ID NO: 9221 - DNA, 639 bp, Canis familiaris
tcatccgatggctccgctcccaaagtgtccagttccttgaggccctaccaaatgagcccacccccaatgccacttagtgccacgttccaccccatgctgcaggacgcagccgtctgcctctgcggccaacatggttggatattgctgtctctgggaccagtggcccactagagttcaacttttatagataatacagatattttggtaaattgaacttgtttttctttcccagcattgtagacgtggactgagaatggcggtgagttccactgcatctcactgctgggggcagatgtcttggatgcgtcaagggctggctgagctggactttagtcagctcaggtgagactcacctgtccttcctggttctcactcctcctcacggtggaatggaggccacagaaggggctgtcttgtctgaaatttcagtttcctcctgcccagctcccagccccaaaggagccctctgtacccaggctgtgaccgggcagagctggaaaggagggagggaggagggtgcggagggcgagcccccggaaacctgggaggattccattgccccatagcctcctccagcctatgtgacctaagtctgattccaggagcttgggttctaagcagcgatcatttaaaaaaaaa

SEQ ID NO: 9222 - DNA, 658 bp, Canis familiaris
caagttgctggtttaccgcacccccgggccaagaaaaatgaaatcaaataacttgttcatcgtgcttctcttcttcagctggttagctgtgctttggttttggccaactagtttttcttctcataagctgcatctgcttatattgtttcagaagtgataggtgtctttgtgtttatataatttattctccatcttcgacgggtatatttctgctggtaaatgcccgtcacacccattttatctagagtgtgaatatatgtgggatattatatgtgcgcagattccgagagctctgtgactctgtgtttatattccttggtgaattcccacatgggtgtgattccccaccgcccaccacctgccttccttccttagttaatttccaatgccatttatgttccctctttcctcattaaatggggtcagattccaggagattccacctcgctcaggtagactccttcgtctgccttccattacgagatggttttcccttcccctgtctctgagaggttaacagaacctaggcataaatcaattggaaaccggtctcttattttattgttgttattattatttttggatcagtcattttctgtgattagtttgactgtgtaaattagatattaactgcacttcttaacaaaaaaaaaaaaaa

SEQ ID NO: 9223 - DNA, 636 bp, Canis familiaris
catttttttgggtcactttattagtttcatgaatttcagatttctgagggaaatgttttgtacacatttgactactttttttttaagataagatgaaaggcaggcctatttcatcacaagcacagacatagacacaccagagaccaccaacttatgctttatttgtaaatttagtgttttctccatctctactgtcaaatgatgtgccaagtcttctcttggttgaatggaagtcagccacaggattataactcctgaatcttaacttaatatgccccaacagcatgggctacacacatatgaatatttaatatcttgaacccaaatgatctcaaatttcaatgttcagatttgcttaactgaaaaataggtggtaaattttaagactgatgattttgccaaataactaggacccaaatttccaggaagccccccaatacacttagagccatatttttagtattaagaattatatagttacctagtgaaacttctcttttctagaattatttttcactctaagtcatgtgtatgttcctttttaatcatttgcatgttatgtttaacaagctcatagccaaaataaaacatagcaaatggccaaaaaaaaaaaaaaaaaaaaaaaaaaaaaaaaaa

SEQ ID NO: 9224 - DNA, 605 bp, Canis familiaris
cctgcgttcctgcccggcctgcgcacggccttggcttggactcagccttttgcgaaggccaccccgcccgcctattccgcctgcttcggatcctgcccttcctgccggatcttttctgtgcggtggcccacctcggcccggcgccccccggagggagcccttggccccccttcggttcgttgcccctggaagcccccccccaaagcccaagaccttgccccttgggctttcataagtcccaccctggctgggccctggatgggcctgaagaggcacgggacctgtgccaggcccatggactgcccttggatggacaggaaagagttgtgtttctcaggggtcattacactgaggaagggctgccacctgctgggacctgcaaagtgttggtagggagcaaactcgcagggcgcaccctggaggaggtggtcatggcagaggaggaagatgagggtgtggacagacccaagtccccagcatgaggaggagctgtgcactctcccagagcccaggactggatccaagcactcaggtttcttttttcataattcctacacataaaaggaacttgttttgtagggacaaaaaaaaaaaaaaaaaaaaaa

SEQ ID NO: 9225 - DNA, 606 bp, Canis familiaris
  misc_feature (522)..(522): n comprises a, c, g, or t, or includes no nucleotide
tggccacatggtgtcagatgagtatgagcagctctcctctgaagccctggaggctgcccgtatttgtgccaacaagtacatggtgaaaagctgtggcaaagatggttttcacatccgagttcggctccatcccttccactgttatccgtattctaaccagaatgttgtcctgtgctggagagctgacacaggctgcaagaccacaggtatattcgagaggtgccctttgggagaagcccccagggccaccagtaaacccgggttccaacattggcccaagtattcaaggcccatcccgtacccaagcttccagaaccaagggaccatgtgattgaggccctacgcagggccaagttcaagttccctggccgccagaagatccacatctccaagaagtggggctttactaagtttaatgcggacgaatttgaagatatggtggccgaaaagcggctcatcccagatggctgtggggtcaaatacatccctaatcgtggccccttggacaaatggagggctctnccactcatgagaaccttgcaccacccgaaccctattcatgcccaccaataaatcctgcttcctgtcaaaaaaaaaaaaaaaaaa

SEQ ID NO: 9226 - DNA, 465 bp, Canis familiaris
tcactttggtttgcccattagggttatcgggagataccgggtccactgggaatgtgtttatgtcacaacctgggagtcctagaaacccctggtggggatgtgagggaagtatagggaagcatatacttggtatatttcttactatttgatatatatccctgattatttgggtttttttctttcttatgttcccacgatattgctaatcacgttgccatagtctttcccctgagtgaggctgaagcctcagattccttctataacaccagctatctagagagccacatcctgttgactgaaagtggcatgcacagataaatttatttgctgttccttgtctgttgctttttttccccttgtgtgctgtcaagttttggtatccagaaataaacgttgaaactgccaagtgaaaaaaaaaaaaaaaaaaaaaaaaaaaaaaaaaaaaaaaaaaaaaaaaaaaaaaaa

SEQ ID NO: 9227 - DNA, 591 bp, Canis familiaris
atgtcacttgcccagagccggtgggctaaagccacgccccccaccaggcctccctgttactatagcatccagtcaactgtcacatctctccccttcccggacgagacaggcgcgttgcacgtcattcccctagatacctccttcgaaggcgacttagaagcagtcgttgttcatctatcctcccctggtggtagttgtcgtccagcgaagtggagtggatggatgagcacaacgaagcggacgtataagtagctctgatgaggagaaagccccacccccgtttctgtggtatgcactatatagtgagagaccaacgcaaccatgatgaggctgtgatattaggtgctttaatggagtactggtaccatttttctttcttgataggaatctgctaatatttagccaggcttctatttcataccctctcccactacaaactttccgtgcagttacctttcatttttaaagcaatttcactgctaaatataaattgtatttgtggggttcatagttatataatgctgaagggaaccactctttcgttgaaaggtgataaaagttaaataaagactgtctccacagtaaaaaaaa

SEQ ID NO: 9228 - DNA, 143 bp, Canis familiaris
gcttaaacccactgagcccacaggctgcgaagctgacctctgatgaagaagacatttgtcattttacatctctctctctctctctctctctctctctctctcggcacctgacaagtattaataaatgttccactaaaaggtga

SEQ ID NO: 9229 - DNA, 661 bp, Canis familiaris
taggccaccacccaggttcacatatactgtttctgaaggatggctgcttcggatactacaccggtaagtggggcaagactatgatcgagtaccggtcacagaagacctcgcgcctccccatcattgacattgcgcccatggacataggagggcccgagcaggaatttggtgtggacatcgggcctgtctgcttcttgtcaaacccgaacccacctaccacacaatccattgccaatccagaggacccaagtactgttccagtcccagtcactctagggtctctgccactgaatggctgacctgacctgatgtccattcatcccacccgctcacagtgtggacttttctcccctctttctaagagacctgaacgtgggcagacgtgcaacaataaaatctcggtgttcgtatttatttattgtcttcctgtaagacctttgggtcgaggcagacggcaggaaactaacctggtgtgagtcaaaccgccccctgagtgacctgtccccacgcccaggacaagaagatctcccttcaggtgccgggcgcaggaactgcgtgtgtcctacacaatggtgctattctgtgtcaaacacctctgtattttttaaaacatcaattgatattaaaaacaaaaaaattattggaaagtaaaaaaaaaaaa

SEQ ID NO: 9230 - DNA, 227 bp, Canis familiaris
gcccactgggcggccccgccccaccaccaacctcttcaccaagctgacctccaaactgaccagaagggtcacagacgaacctgagagaatcgggggacctgaggtcacaagttgccatctaccttgggatcaaacggaaaccgccccccggctactccgattccctggagtgtgaagctgaccagctcgcgcccgcccgaggcctgatggcggcctgcgccaggcca

SEQ ID NO: 9231 - DNA, 628 bp, Canis familiaris
actgtagagaaaatggttaaagatccaccggaggacatcttttgggggggggagggagcttgggaggaggggaaatgactaatgaagctaattaataagaagcattcatcatctgctttcttaccctctctttaccaattagcagggcactggcccagagtgttgtacccccgtgtgtttaccctacacacactctcatatgcgtctcttgtgatatattaagagttgtgtgatagaggaatatgttgttctcatacacaaactcgtgacatagtggagtataagaggaagaggaatatgtggctttggtgtaaattcttatccccgagacactttttatggtaatcctctgtaaaataccaatgtaatgtatgccatgtaagtgttttcgtcctaatgttgctacttccatggccaaggaaaaaaaaaaaaagaatggaaaaaaaaagaaaaaaaattggaaaaaaaaaatcaggctcctagcagctactgtgtagaaatttccccctacttctaatttgctgaatgaagaaaaaaaaatcttttatttgtgatattttcagagacatttgctctagtatggtgtatttaaataataaaaacttaaaagaaaaaaaaaaaaaaaaaa

SEQ ID NO: 9232 - DNA, 578 bp, Canis familiaris
gcatgcccttccctgcatcaattcttgcaataccacaccctctcttctttcagccgccctctccactgccccagctagagcaccaatcatccctcatctggaatgttctctctccctcacaccagctgcctcaggaatttcctgaactacaaatctgctcctgttacatccctgcatagacttccagtgaaccctgcctaccttcgttgtctttagcagaagttgcaaactggtggccacatctggcctatagaggtcttcagcttggccaagggagttgaaagtaatgaggcactaatgtttaaaaattggggacttataaaattccagatgctcaatttctcttaaaaatatcaacgtgtgggcagccccggtggcgcagcgatttaacaccgcctgcagcccagggtgtgatcctggagacccgggatcgagtcccacatcgggctccctgcatggatcctgcgttctccttctgcctgtgtctctgcctctctctctctgtgtctctcatgaataaattaataaataaaatattttaaaaataaaaaaaaaaaaaaaaaaaaaaaaaaaaaaaa

SEQ ID NO: 9233 - DNA, 599 bp, Canis familiaris
ctagcaatagtacacctcctatttctacacgaaaccggatccaacaacccttcaggaatcacatcagactcagacaaaattccatttcacccttactacacaatcaaggatatcctaggagccttactcctactcctaatcctaatatcactagttttattttcacctgacctattaggagacccagataactacacccctgcaaaccccctaaacacccctccacatattaaacctgagtgatattttctattcgcctatgctatcctacgatccattcctaataaattaggaggtgtactcgccctagtattttccctccttattcttggccatccaattccattccttccaacaacaatttaagcaacgcagcataatattccggccccttagccaatgcctattctgacttttagtcgccgatcttctcactttaacatgaattggaggacaaccagttgagcaccctttcatcattatcggacaagtcgcttcaatcttatatttcaccatcttattgatcctaataccacagttagcgttatcgaaaacaaccttctaaaatgaagaaaaaaaaaaaaaaaaaaaaaaaaaaa

SEQ ID NO: 9234 - DNA, 544 bp, Canis familiaris
gttgctatctagaattacgaagacacagactctttgtctcagtaaacctgttgctgggagtgaatcccatagatttatttgtatgttgtagactatttgtacatggtttccctatggtattgatttaagaagtaaaaatttgtaaacaaccttagtgtccaccatggggagctgggttagtgatttgtgctggaatggagaactacacagctttaaaaatggggactgtctatgtgataatatgggaaagagctccaagatacattgttaaatgaaaaggtataaaacagtgtgtaaagtatgtttccatttgtgtaaaaaatttttttggtcacacacagacaaacacaatctcctaagggtacaaagtaacaaggcatactggttgctcttggggaggagaactgggaggaaagggatgaggaataattttcattctatatcttttgatatttttggaattttgaaacatgtaaaagtattaacagttcaaaaaataaatttaaattaaaaatctcaactcttgcaaattaaaaaaaaaaaa

SEQ ID NO: 9235 - DNA, 658 bp, Canis familiaris
  misc_feature (115)..(115): n comprises a, c, g, or t, or includes no nucleotide
cgaaacaggggattgcaagatcctgtacagccacgtgtgggaacgtgatgagggccctgggccagaaccccaccaacgccgaggtgctcaaggtcctggggaacccccaagagcngatgagatgaaatgtgaagagtgctggactcttgaacacattcctgccccatgctgcacgacatgtggcccacagaacacaggaaccagggcaccctatgaggaactaacgtcgaaggccctctgggtttttgaaccaggaaagggaatgtgcaacccttccattggggttgcctggaaattcccggcaaccgtttcctttgtccaacccttggggtgaagaagaattgaccgggaggaagaagtagagatgtctggtggcggggcatgaggacagcaatggttgtatcaactatgaagcgtttgtgaggcatatcctgtcggggtgaccggcccatggggcggagctcgtccgtatggtgctgaatggctgaggacgttcctggtgtgcccgagccccgtgccttcccccgtgtgagactgcatgtagccccgaaggcgtcctaggtcctcttgtcacagcacctttgccagcttgtctctcttggatatttgctatcagcagtcaccaaataaacttgctctgtgccctaaaaaaaaaaaa

SEQ ID NO: 9236 - DNA, 581 bp, Canis familiaris
acttgtttgctgatctgtgaaccttgtataccaagtttaactgttcccctgggtatatagtttcaatacccccgtacatatctcttgattgtaaacccttagcatcatgccggctcggtcacttcacggctgaggttgagaacatagttttatgggagagtatatcccctgatttggaggattccaccagaccctcgggtttttgattctgtgccaggggtaattaatggtgttaggacccgccttatttccaagaatttcttttagaggctgggcaaagagtctgaacccagttgtcatttctgtcttgccggtctaacagggttgggaaggtccgagccttaggacccactttcctgtcttacccaatgttttcctgccagaacaccgtgggtggttaattgccttgagttggaaaacggtttgcatttacaactgtaaatttattcatccttttaatttatgtaaggttttttgtacacaattctcaattcttttaagagatgacaacaaattttggttttctactgtcatgtgagaacattaggccccagcaacgcgtcattgtgtgaggaaaataa

SEQ ID NO: 9237 - DNA, 631 bp, Canis familiaris
taacgtgtccaaagtaagtctcttcctgttgtaaacacctatcacttgtccagttgcatctttatttggatatagctagagaagcctgcctggagaactcacagcaacagtcctggcaacctcgtttgatatcaacctagatagcaaaaaggtctctaggatctgctagcagaaactcaaacaccacttcctgtctctctgtgtgtggctgtgtctacggctgtgggtgttctggcacccagctgggtgcccctagctggtcacccttcctggtccccgggtaagggtacgcatcctgtgcccttggctgtagcacttccccagtcccccctcgagcaccgtttagtctaaaattaaaatttcacacttgctagactctgccacagctggttgtaacgtaggtgcccaatcacagaccccaagatgttggtacccacagccaacctggttcctggtccacaggccctcccatgtcctttgaagagggggagggttgccccttaaccacttgactaaaccagtacatagcgaaaattgccggtgttcaagaaccttaattttaggtcatagtcgaggtaccttttttttttttttttttttttttttttttttttttttttttttttttttt

SEQ ID NO: 9238 - DNA, 611 bp, Canis familiaris
gatcctcaagcaggtgcacccggtggaccaggggaaagggtggcctgcaggctgtggtgaacctgcaggagaaccctaacccctggcaccagcaggtaatctggcccagaccgtgggaagggggtcctacccctctggattagtcacccctcgggttgtggttcagatgctgcggcagccgaagcagcatcagcctgctaagcaggggcccctcaacttatccctcctggtcgggggtcccctccctcaccagatgggcgtgcttctcctccacctggctaataggcaccaccttccaggatagtgtcccccatagggccccccctaagggcaaccgccagcacgtgggtcgccatatggctagcccccacctggttagtgtcccccacctcctggttaatgtggacctccaccccctggttagcgacctccctgtcccatggtatcagaagtaccaacaattgacccaaaaaacccagcatagagacaagagtttcagagagtaagaaagagtgcaaaagaacccaccaagtagttaattataatgcattatttagctccttgccctaatttcagccttttttttttttttttttttttttttttttttt

SEQ ID NO: 9239 - DNA, 491 bp, Canis familiaris
cagctggtcagaagacccctgatcctggtcctgggctccatagtggtcatcgacgttggccaacgggagaaagtcttggttgggttaggctccgactagggagcagtttaccggctcgaacaagactcgccagggagtgttgtcagtccggtggttgttcgatgtcgtagccaggagaccggggctcagtggtctcgcctaggaagatactctcattagttgcgaaagcagtggctataacccgacggggagtccggccccaggggcggtgcacgaccgataggagcagttaggcagtggtccgaaccaggagagcccgtgccccgagccaacccccgagagtgtcagctagatgccccgttggcgaccatggaccacaagactctgctccaaagcctgcaagacacacaaggtataaagcatactgctgactcccttatttcaagcacagagccccatttttttttcttttttttttttttttttttttt

SEQ ID NO: 9240 - DNA, 628 bp, Canis familiaris
  misc_feature (301)..(301): n comprises a, c, g, or t, or includes no nucleotide
caatagtggtgtactccttgagatccagggaagttgacctagaacactgtcctctgagcaggctctcccctacagacttggtctttaaattcgttgctcaagtatactagttctgggctgagaccaccttagaaggagccatctagctagcccggtgctcgggtgttctatgccatccactccctctctgtgtaggtggtttgtcaaccctgatagtggccctaacctggtgccgtccgggtggcaggtgttcctaggcccttgtggggcctaaaggagaggccgccttgcacagagcccntagttcaaattggtacactcaagtgtcctctgaccgtggtgctcttctacgaaaactagccggactacgggttgcgtctagttgggttgctgcaaatctccaaaggccgctacgactacatctacgtccggggtgacgagaaagacctgggcgtgttgtccagggagccctccacccagcttgccagtaagtctaggcctctgatgtgtgggctggcagctgctggcaggtctcaaggtcagctgtggggtagatgaagatttatttaggataaaatttccgccctttttttttttttttttttttttttttttttttttttttttt

SEQ ID NO: 9241 - DNA, 617 bp, Canis familiaris
tggtagtggaagttaaataccgagagccagaccccgttaaagctgtctgagtaccagccttctaagaactagtcaacttcttgtttcactctgccataaatgtacaattacaggtattgagcatagagtaacctcaagttctcaacctaagaatagccaccctgtttccataaggtgaatcaataattctatttggcaggttccataaagccactgactatccagtaactcgtgctctaggaatactccgtacgctaagttttatacgtactccagggaaacaaataaatccgtcagagcctagtctctggtttcaatatttcagcttcgctgtgtttcctactgtggataactgtttcgagttgactgctcaagagaatcctaacggctcaaaagtgttccttaaagcagaggtttcagattaaagaccaagttctgacttgtttttataatagggttgttttacattatacgctgctattcccctcccaaagataaaagagctgagtaataaaaaattgtacaacaaactagattgatgccttctgggcaactcacacaaaactacactaattaacttaattttcccaatccaaaattttttttttttttttttt

SEQ ID NO: 9242 - DNA, 454 bp, Canis familiaris
acctcaatgataaaaatatgacatggttttataaaacattgtcctgaaaatgtagagcaccataaccatagattatcacttaaatcagatccagcaagtaggaatgttggttgcctgttgcagttaactggctcaaacaacctttttttcattaataggcactaaccaaaagtcttgccgattttaaggtacttaaaaatttccgatttaacattaagtaaaaatttattgaaaaaggttgttcaaagaatcatgtatgaagttattacaaatattgtataaaatatataatgttctcaatattaatttacagaggaaacagttcattttaggagcataaacccgagttgttttattggccttggtttaacaccgggacctagctacccttcaaacacaagaaaagacattagaaccaagtatcgacagaaacatatttattaaaaagttctat

SEQ ID NO: 9243 - DNA, 591 bp, Canis familiaris
ataacagatgaccggagtggcctgagaagccgggcacatgactaacccgaggttgtagttagattccagctcggagtaatttgctcaataaaccccacagtcccccttgtgcaggcacctgttgtaagggtacctacagttagacaaatagagaagctaaatcaaaatcctttattttttatttgatatatatatatatctctatatatataatttttatcctatcctttcccctcacaggggaaacatgaggcggaagtttataaccctctagagtactacccttttattgcctaaccactctccctcgagggtatttcaccaagtcaacctggccatggtgaactaccagcagagagaaaatgttacccaccccagccaattagaaaataggctgagtttagccacaagtactagacctgagagacaaacttcagatacataaacagtactagaacctgaagcaaggcccagcctcaggggccctgatcaccaagagtgctattcagatcatttacaaaaaacctgtactgatattatttggtgagtagagccttattttttttttttttttttttttttttttttttt

SEQ ID NO: 9244 - DNA, 247 bp, Canis familiaris
tccgataaggtccttccgttccccatgcctccaccaggagcatgccctcaccacagtagatcatgtgttagacaacaccacacaggcggtagtcttgatagtagaggcttagttacgtgcctggtccatgatgttcaggtcccagttgaggtggggtccttgctctgagcctctgtgtagtacagggcagagcaggctgccaacttatttaccattttccctgtttttttttttttttttttttttt

SEQ ID NO: 9245 - DNA, 617 bp, Canis familiaris
ccagacaaaacagcttatgaccttctagtttaatgtgttgtccagccagaaacgtcatccacttccaggactgtttatctgtaggtaacatgttgaccaggttgtagtttttactatttaatgcctattaaaccattttataagtattttttgatatgatcgtgttaaatttgttttttaacaaaatttacatcgtaaaattacaaggtatacctcagcaaaatttggagcaaaacaccaaacaagactaagcagtttaggacctgtaatccctccaaagggttggcaaatttgtctctagaataggagcattagatcaaactcaaatttttcacctggactgttaagaagccaagctaacctttctatttagctctcctacaaaccttttttaaataagccgagactcaactggggtcacacacacccaagtaccagattttgacttcttcttcttcttcttcctcctttttaataggggcagcaaaagactctgattccccgtgttagagcagtttaaattcaaagattgcaagatagaggaagaaggacaaaaaaaaaaaaaccacctgtctccctattattttatactattattttccttttttttttttttt

SEQ ID NO: 9246 - DNA, 280 bp, Canis familiaris
ggattaaagcctcgatgaaaggtgctaacacaaattaggctcaaagcaaatcagtttgagaaaggtggtccagcaacagcaaaccatcacatgaaccattttataagttgacaagatctcaaaagagttgaacctcatatataaaagcaattggattattttcatgaaagctactagatgactcagtgaaggggaggtgtatcctgcattggtaaattttaagtcccatttattatgtgttaaagcatatttcatgacaagaaagatttttttttttttt

SEQ ID NO: 9247 - DNA, 649 bp, Canis familiaris
cctgtctcataaggccgccagctggtaggtgtaactgctctagttggttgtttaggcacgacctccaacgggtgatcctggtccagcagttagaattgtaggcacacgtctaagtgtaagcctccatctggttgcagcaggttggcgtggtgtgcttggtaagcacagccacaacccttcaaaacaacccagttccagtgggtttccctccaggtaactcacccacaggaagtctcactcaccttttgttcgcaacagtaattgtcggaagtttcatgggtaggtctcggaatacttcgtttcaacactgctactcagtagtcccaagtgagttgcaagccctgtaacggagctgcctaatcatcctgcctgttatttttttttttgtttaacgatacaatttgtttctgcaaacttgagccaaacagctgaaaaactggtgcgcctgtatgtaaaggttaatggtgattccacatgaacaattgttccctctcacaattttgtaaatggtgtttgaaatcctctattacatgaaatcgttgttttcaagagcatgttatcaaaaatttttgataaaaagttatccctaattttcagcaaaaaaccctttttttttttttttttttttttttttttttttttttttttt

SEQ ID NO: 9248 - DNA, 568 bp, Canis familiaris
  misc_feature (311)..(311): n comprises a, c, g, or t, or includes no nucleotide
ccaccagtggtagtagtgtccttggttgagatctgtagtatacccagaaagggtccctgtaaccagtttgaagtcccttggttcccaaaaagttcaatgaaaaggcagaggtcatcaaatggtcctaccttgggaaagcaagtagaatccagccctggtcagaaagcccctattagtacttggggttttcaccaagtgggttgtaccctatttgtccaacttataccttttagtcaaatcagttgttgtggttgcagtggaaagccttgtgttcctcgaggagagttgtgttgagtgtagaatagcccttnctcagattctgcagattggtaagaacccttatcatgaagctcagaagaaatattaagaattataatgtccttgtgatgtccttagctgctgccttactcgaagaaaatgatgttataagataaccaagctagagatgaaagtgatatgtaacccttgaataggcagtgaaacaacatgatagtactgaaacaaaaaacaaagcacacttatttcagttcagagggaacacagatttttttttttttttttttttttt

SEQ ID NO: 9249 - DNA, 675 bp, Canis familiaris
  misc_feature (84)..(84): n comprises a, c, g, or t, or includes no nucleotide
ccatcagcccgcaccaaaacatttttgcaccactaaagccctgtttcattatatagatcatcctagtaaagttccgagggaaanaaagtatcatattcatcccccgatgtatgatctaataataaaaatcagtgtgatctacacctcaggtagaacactcacaggtataggttacacacctttccagtttcaccttggtgaatttgttaccggttgttattatccagtttatactccaaaaaaaaaaaaaagcccaagccaaggtgtccctgtgcaaaagctccaacctctcataacacaaacattttagatactcagagatgtgttttctatagatttatatggactgaatctatacaactaatgtgtttattattaaggttttctataaaagggttaacgctttattaaattttatggtagacctaaattgtttcagtagtgcagtttgagtcgattaattgaagtattatgtttttatacataagtctatgctccggaaaggaggctgtagtatccttcagaaaaagtattacttggatgatattgtttatccccaaggtttattacatagaagattcagttacattagtttatagatatttttatagataacacattccctgcaattaatttatgtaactattgctatatttttttttttttttttttttt

SEQ ID NO: 9250 - DNA, 547 bp, Canis familiaris
  misc_feature (235)..(235): n comprises a, c, g, or t, or includes no nucleotide
gtttgacctatataataagaggcagattgcttccaggagcatttgccaggtattgccccctcaacagctcccttcaacgctcaaagcttaacaacaagccccacggtcgtggcccactggggtgctctgcaccaggggacccaagtggcctgggggctaaacagcaccagcgtttacatttcagaaaagaaactgctgccttccttctcctactaccctaagcccctacatgtanctgacagcaacctcgaagcacccagcggcagattgcctgtggggtaactggggttgaactcaaatctgctttaccccagcaccccacagccctgagcagtcggttgccccaccacctattgcttgaactaacaaactgagcctaaggctacatctatgtctggagagtgtgatgtagagatggaatcacatcttggtacaggaccaaacaactttccctagaattcaaagagtttcgtcaaaatctcacctctcgcaaatctgctgttgtttatttggttatagtttttataccagcaagtttttttttttt

SEQ ID NO: 9251 - DNA, 202 bp, Canis familiaris
cagaagtgtccccgcctcgggtccctataaagataacctaaatccaaactaggaaaccccaagaaactcctagtgaacattatttagggtaaatgatattattaccctgatagtctatgcaggatagcaaactagttagaaaaatagatgtaaaaccaccccagttccagtgatttatttacagaaaccagttttttttttt

SEQ ID NO: 9252 - DNA, 603 bp, Canis familiaris
ccttccttgggcctcagttgctcggagcccggatccccagttgcaggttaaggcactgatacgagtggaagcagcaaaagccccgaacggagacagtccaagtagcagccccactgctgcacaagtgacgaggcgagcgtaagtcagtgaagcagttgccctggtcctataacaccctcaggcataagttgttcctgaggcagaataaatagcaggagattgtggtatacaagtatttaaggtgccctgcttgtactccttgaaagtgctagccaacaaggcactagaatactgcctgctccttgcccacaagggcctatattggtccgtaggtttgtacactgttctgactgtagcattgcagtttgtgtaagattccttcaacaaggcaggtaaagttgcaatttcaccagaggtaaatctactgtagccctgaaaggaaaagacgactcaataacatgattactgaacctaaagattttggtcaatcacaatagcacctgtagatcctgtttaatcccaatttttatttggaacctataaggaaggaggaattttttttttttttttttttttttttttttttttttttttttttttttt

SEQ ID NO: 9253 - DNA, 580 bp, Canis familiaris
gcaacgagtagaacagtcacccgtcgaaaccgtggtaccatatgtctactcaaggtgaggtcaacagctcaaagctcgttcagagagaggagaccccaagcgctacaacaccaacaacccggaacccgactccgagtgggccctacactccgggaggcagtagtcccagtgttgtccaacgaccaggcccccttgcacccgaacagcggtaactaagacccactactccctgccacgaggacccagccccatccagggcgagctcggggcctccagggcgagggcacccaccaggcgggcaaagagggtgtgacctcctaggaagcctatgccgcgagcatcgacatacggtttctgtttttgttgcaggtgtgcgtgccggcggcggtgggcgtggtcacggccctagtcggtctacccgccggcggtggtgggcgcggtcgaggaggtttagcggggggtcttcgtcagtgcgcggggcccgcgggcggcgggggctgcgcggcctcgagtcccccccccccccgtcccgcccgtcccggggctgcggcagcgccaccccacggtcttacagcggccc

SEQ ID NO: 9254 - DNA, 631 bp, Canis familiaris
atttcccatatcctgcaaaaagacaagagaataaaaatctgttagcagctagatctgggcacaaactatcaagaaagtgatagttaaccgaaaccaaagccattgccaaagctaaagatccacatcccagccaagcaggtctggtctacatatgcctgactaagctgacaggagaagagggaacaaaagaagaaagaaaagaaaaaaagaaaaaagaaagaaaaagaaaaaaaggatctagacatcaatccaaaattatgaaacaggcgtcctacatggaactgcctgctgccttgcacgcccaagaacacccaaattgggggggtgggggataacacatctccaaaacaaaaaattcaacgctcaaacaaatatattatgaaacgctcaaaaggaataaagcatccccaggtatcaaactcggttgttagttaatttataactcgggagtgagtgaatggatattgtacagttgaaaactgcagagttttccggtttttatatattctaaaattcaagtcagaggttttagtcggaagctagaaacattaaagatagaaacccacaaagagtattgtagcaaattatttacacaatttataagttttttttttttttttttttttttttt

SEQ ID NO: 9255 - DNA, 576 bp, Canis familiaris
ccacgcagccgccagcggacgttgcggcccgagacacggccctgcaccgggggcccggggcccaggggggcgcctcggccggaggttggccaggttgagcttaggggttgttggccagcctgcctgtgtaggcgagctaagcggctgcggaactggttgacgggcgagtgctccgagacgggcccggcctgctggttctgcgagacctgcgggagcaacaaggtgtgctggacctagtggcgctgcggcgtgggagcttgaagacagctcgcagtgcctgggctcccgggctcccgggtttcgccgcacgtgaaccgcctcgagggccaagtctggcgctttgtctacagcgaggctcgcccgcagggccagacgaggcacgatctggtgctgctgggactgggcagctgccgcgactcccggcacctgcgccgcggaggcgttggccacctggttgcctggggcctggacccgcacggccgctgcctgtggctgcttctcggagtgtcgcgtcgccacggagtcgatgggctctggctggtacacctcgcggcactggggccgctgctgcagctc

SEQ ID NO: 9256 - DNA, 447 bp, Canis familiaris
gtttcatcaaaggcaagttaactaggtctatacatagattgagccttctcttacagcgtttttctttttgatttaacttgatgttttctccaagttgttggagggtgggggtggtgcaagaccattgagaaaattggcccaatataagtgtgtgggttggtatttttataattaaatgtcatcagtattcaatcgccaaatctaatttatacatcggatccatattttgttatatgccagtttaaaattttatgctgttcttctggattgtttaatttgagtttactggggtaatactctctaaaatatttacctctacgatactattaaactatatagactctctctccagtgatttcacctttaataccgtcaggtaatgttttccttaaatcatagagagtaaagtttgtgtctacatttctattggttcctgttttccagtgt

SEQ ID NO: 9257 - DNA, 597 bp, Canis familiaris
tctaggtcttgtgggcctcttccgttgtccgcttctctgccaaggtgtcgcagctcctttctgctactcacttgagacataaatagtggaggtctctgcttgtcagacgctttaaaagctcatcaggctacgtaggtgcctagtcctaaagggtaaacttgtccaatgtgacaacctacctgggccaacggtattagagttgcagtgagtgccaccctgtacctgctagtccttcagtctgtcagtctttcagtctttagagcagtctctgcccctccgagagctaggaggagtggtgtgcctgccgcttggtttctcagttgtctctcaaaggcgccctatacgaaagagagaaaaaaagaaagttatattgaggagtccgagaaggaaaaaattttgccgccgagtaaagggggaaaaaaagaaagaaagaaaaaaagaaaaagcataaactaacccaacaagtcccttgcaacacaaattgatgaaataataggttttaagactctcattcaatttggtttgggagggtttatagatttaagacagcatttccttaatttatttttatcagttagagttttttttttttttttt

SEQ ID NO: 9258 - DNA, 712 bp, Canis familiaris
cgggtctctgaccctgtagtagtcatgccaggccaactacaaagggcatcctggtctgcacctgcaaaatcgaggaatagaggtttctgtaggtctgtctatcaggctggcgttacccaactggggccgatgcagagtcccggctaactgcacttggcagagttgaccacctctggccccggggtgctgcagcggttagctcacaggctctcctggggtctctgctactctggagcggcagcagaggttggtcccccgcttcgagggaaggttggtcctgtctaccatccgcaggaaccagctgctacggccccctgagggcatctactgtgagcggaacatcgtgggaccagtgcaggaggccgtctgcctcgaggaccaggtctcttcccagcggggaggccgccagggggacaaaagcaacacccctgtgttctactacagggccctacagcgcatccggagcctagtctcctatcctcgtggtcatcgtgtcactgtggcaacagctggccatgggtagggggaggggtccccaagcaggttgtaggctcccacgaggcatcccactcagcttccttccgggtgcaaggcccccggcaccctgtggatgcagcccatgtggggcactgtttggtcctttatttgagagagaggaggtttttttttttttttttttttttttttttttttttttttttttttttttttt

SEQ ID NO: 9259 - DNA, 640 bp, Canis familiaris
gctgcaccgtcaggtctgagttgtacagggtcctctcctactgtcccctagaactacatagtacatttaactgcagagggcgtagaggccagggctcctatcacaacatccgagaaagcggctgactcctccttagggttgtccctagataaagtcaagacctacttcttgatagtggcctacagctgcctgcccgaggagtcctttttgttgttcttgtactccctcgagctgaacttaccctacctcccctactactaagagggagtagtccgagggctcgactaaagccacttgcacactcccttcaagcgcttgtagccgttggttttgttggggctggtggatctgttgggacctgcagaggtttacgcttttaaggtatttcaccagttccaggagtgggttgagttttcctgtccagtgacccagacactaaaaacgttccctgatcaagattcaccagtcagtggatccttgccctgccaatgctccctgaaagagtcccctccccagtactggaccatgctacatcctactgctcacagaaactgccaggaccctgcgcaactccccacttcctaataccagaccatcaaagctctttatttcaagagaaaggttgcactctttttttttt

SEQ ID NO: 9260 - DNA, 618 bp, Canis familiaris
  misc_feature (459)..(459): n comprises a, c, g, or t, or includes no nucleotide
  misc_feature (487)..(487): n comprises a, c, g, or t, or includes no nucleotide
gctcgtttctctccggattgagggggcttgtcatagtacgtgatccggactctgttgtccacgcgccacccctactaagtctaagcgccctaggtctatggtgggcccgtgctggttaaaggagaggtctacgggccagacagcaacaaagatttttcccgagtcccccctccatcccctaactcaagccctaacccgtggtccctctgagtccaaacccgtaacccctagcctaacaatgggcaaaggcctccggttaagccggtcccggtcccggttggaccctaacctaaccctccccgcaacctcctgagaggtcaaaacaccccacaaacattgtgtccagttcagggctgtcagcttttattttacacggagaacataaataaataagacaaccagattgtccaaagggacgtggctgtggctggtttcattcaggagagtgaccttcgcccnccagtgagtcagacccctgccctggctngttgtacacccaactggagccgggcgctggttcagcgagagaccatctcttaggagcataacagagactttctccacagataaaaaattttctacttaagtataatttttccttttttaataaggtttgat

SEQ ID NO: 9261 - DNA, 685 bp, Canis familiaris
cgtgttgtccacaaacaacctggcaaatggctaatcccccatttgtacaacatggggctccttaagttttacaagtgagtagagctgcagtaattgtccggtgtctttcagggtgcctgcgttgcctctcacgcacgttctagccagtctacacccccaacaccacagggcaggtactacctgctgcagaaagtattagtctgctacaatcatccccccgtatgagcaagtctaccttactgctgtggtcacagctgacataacgacgaaaagcgatgtgaggacaccgtcctaaacccccgctatagcacctctatatggatactccccgctacaggcgtctcatctgacccccctaacactatcacatcacttgagtgtatcttccgggaacacaggcaaaagacagaggttccagtaactccccaaacctcaagcagttttgaaccttgcccaacaaggcagtaccctacagcctaaagaggcagcagcaccagaggcagcagcctcctcagcagctccagcagcagccgctgcccctgcctggaagttgcttggttgtgacggtggttacggtcgtggtatagggtaaaggacacaaagtcattactcctttttgcttcctaactgcctgaaataaagagtttcttggtttatttggcaatcaacacaatttttttttttt

SEQ ID NO: 9262 - DNA, 390 bp, Canis familiaris
gccgacgccgtgcactgtccggttgactgcagccccacccgcccctcccggttgacgcaacccgggtcgtgcaaacccagcgggaagactccacctgcggcacaaccggcggcgccaaccactcggcccgagccccagagggtttgagtggacgcgcggtacgcatgtgccccgcgacgacggtggcacccaagtcaaagtggtcagggctgccggttttcagtttcatggtttaaccagctgacctggggcacgcacgtggagtccctgtgttttgtgttgtttgagactcactcacgcgtctattttggtagtttacttctatcacaaaaggggatactccaatagctcgtacacaccagctatcaagaccacttcacctcttttggt

SEQ ID NO: 9263 - DNA, 589 bp, Canis familiaris
  misc_feature (340)..(341): n comprises a, c, g, or t, or includes no nucleotide
gcagcagtgattggggctaaccagcatccgtccctggtggtcaggatgtgtggttgcgctttacagaacggggaagccaagaggtagccctacactgagaacacctaaaggaataagagttttttggggtgttggtataaccaggtcactcggtatcatcagagccacgacgccaggggcccctttgtgcctgctgttaccgtttgcaaaaattacagacgtttgttgtcgtagaccgcctgatagaagaatgtttgccccatttccttgttggattgtttccatgttcccttgctcccttgtaactgcgacaagaatcacctcgagaccaccttctctnntcgacggcgataagcaaagttgtttctgcgatcattgtttttattggttgtggcagctgttatagcatttcaaaaggccctgtgttagttggtggcccttgtttttccgcccgggtcccgtaagccctgtgtccgtggcagaccacacagtgtgcaacatccaaattgaacagttaaccctgacctttttagtgtaaaacattgtgagtcttttatttattgtactgtctcccttttttttttttttt

SEQ ID NO: 9264 - DNA, 529 bp, Canis familiaris
  misc_feature (355)..(355): n comprises a, c, g, or t, or includes no nucleotide
agcttccccgggctctagtgcctgaaataggtttatcatccttatcaaacaaagagtgaatcgtctgcctgagattaaagcgtagggtttagattggccataccttaaagagcctaaaagtgacaagtactataaaccatccttgtaagccactgtcctctaatatatttgctccctaccaatttgataaactcccgaaagatgttttagctgccaagaacagaaacagtgtaccgaaagagagttaagaatctatttacaaagagtgaatgtgcgggcctgccctttaaccatgcaaggcaaacaaaaaatattaccaccttagatgtataaagattctccaaatttacaaatncatctcacgttatataaccttcagacccaatcatgttagtagacaggtagagttatacagtacaaccctgaaatatagccattaaatatcacaagatctcacaagtttaatccttaaatatcctatttgccttagtaaacaccctttttttttttttttttttttttttttttt

SEQ ID NO: 9265 - DNA, 557 bp, Canis familiaris
tgcaaccactgggttcccgggttgggccgtgggaccccgtgactgtgccgtggccaggggtctctccgggtggggcccaggtccccctggacaggcccactggaggggaggtttcgagcagtcggccctcatagaccccgttggtcggctagcagcagacactggctgaggagatgcactgcagagaggtccgggagacagagagccccagagcctgagccagagcctgagaccggccgagagggtgcccgtgcgcgggcgactcggtgtccatcgacggctgcggcagtgcacccggggccccttcttccttgcagcacaacccaggctaactagcggccctcgcactcactccttccccaaaaggttgtcggggaaccccagctacagggaacggtcagcaggtccccggtgactgcccccgccctgcagccgccccctccccacccccgctactgtgacggccagcagcaaaggagccacctttatttctcctagaacccctcttttttttttttttttttttttttttttttttttttttttttttttttttt

SEQ ID NO: 9266 - DNA, 453 bp, Canis familiaris
gccccgcccccaggaggcaaaaggcggaccaggaataagtgatccggaggtgtcgtagtggggtggacagcgcagacgggcggaggcgggggcccgcgacgcggcgcccgaccgggacccaggaccgactcgggccggctgcgacggggggcacgcgccccacgcaagcggagacgccgcggccggccggggggtggtacggcgacggggcggcggcggcggcggccaaaggccacgcacccccgcgccccgccacgcccgacccccccctcccacagacctggatccatgcgcgacccggcgcggtggaaatttgtcccaaagggggacgcccgaccgccacgggacggggcggacgggcccgaggggtgggactgaccccaccacctgtcaccgccgccacggaccccgcctccccgaggggagagcgggggggacgcctcgcctcgagcc

SEQ ID NO: 9267 - DNA, 568 bp, Canis familiaris
gatccgcatcataattgggctccgcaaaggccgcataagtaggacctgggaacaagcaagccccccccccagagttggacactcccagggtagttaactacctaacaggctaaactagaggcatcctaaaaccttgaacttcactggttggagcctatattccttagagctataatattagaggttaggagcatcataacccttgattaaacagattaagcaacagaagcaaaacccaggatagaataagtttgcaataagatttactcgggctaaatttcattacattgtaagtgaacctaattgagaaaagtgaaagatgaacatatttatgataaaaattatagaaagatcataataatacagcattttcatcacaactagcctgagcaacatcgttaattctcaattagtctcatatatcctttatagagatgaacaaattactatcatccattctcagatataatagaaattactcctactactacataaaaatagagtacaaatagatacataggtaaaatactctttattttagcttccaacctttttttttttttttttt

SEQ ID NO: 9268 - DNA, 459 bp, Canis familiaris
ctgtttgcccacgaaaaatattccaggcttttaccctaattatactaagcaccttttttttttagtttagtttgcatgtatcaggtttcaattcagcctagaggtacaaaaacccttctagtaaatattatctatttgccgttatagctcgaaatttattaagccatcctatttttttataaaagccagccttaaaactgttaacaaaaaagttggaaacagaagtagaattcagtgcataagctgtataaaattaaacccatttcgattttaaaggtgatttatatatatatataaacaagtctatatagagagagagagagagatatatatatatatatatatatctctatatatagacctcctaactgatttgcaaaagaaattaaaactgttggttactttattttcctgatacctacaacagatgaacgatgggagaatggaccaaattcgatt

SEQ ID NO: 9269 - DNA, 673 bp, Canis familiaris
aaagccttagtgttaggttattactaatagcagtgtctacctcaggcagaagaaagcaggtactacgcaaggatttcgtggagatttagctgtcttggaaggttaagttgcagcagtttagcataatgctcttacaatgtctaggaggagcagaagtagtgataaagctctgtcctgaagtactaaaactaggctaatgcaagaggtgaaacctgttattttctcggtcctgaatctcacctatctccttctgcatatctcaaaagcagttcctaatgccttggcatttaacacagagttgtttactgttgtagttgttgtagctgcatttgtagcaatataataagtgagcctctggttaagggtagtccttacccatacatatggtataaagccccaaatttattatcaacctagtagagtaagctccattaactcaaactcatatatcaaggtttcctcggtggtggtgaatccaaaaattgggcccgttcctatttattagggtggttagttgatatgtgagaagatgtaaagcggtgttagcaactactttaattacactcaaagtcatacaccattgtattggtcctagtttatattgtgaagtagtgatagatagtaggcagtaaacctataatttgataagtgtaggtttttttttttttttttt

SEQ ID NO: 9270 - DNA, 503 bp, Canis familiaris
acatttaacagggggatttgcttgtcccagttctaaaaggtcccaaacagcagtgcatgtactacaaatattcttagggcacctactagtacaatagagggttattgattctaaccagactttaacagtgggccaagcccagcagggagtccttgctggtgcgccagagtaaaggcacttgtcaccatatagtagcctggagcctaagttttagcagcacaacattgaccaaagaggcaagattgaggtgttgttaaactacctttagaatcccagattatcaggctaaattttaacaatcaattccaaccacccaactacaaccaatcccaaaaatctgaggttgtttggcagaattttaataagcccttaatattatttagggtctaccgcccccacagacccctccaaccaacccattgacccaaaacaacaaaccctccataaactcccacaacaaccatcaaataaccaccagcccatccaccaagtttttttttttt

SEQ ID NO: 9271 - DNA, 136 bp, Canis familiaris
attgaataaatttaataggcaggggagggggtgggagaggggccccagggtccaggtaaagaaaaacatttatttgaaggttttcccctttttttttttttttttttttttttttttttttttttttttttttttt

SEQ ID NO: 9272 - DNA, 631 bp, Canis familiaris
gactactggtactcgtggatactctaggagagtgccctctggaacgtttggagaagctcgcaacaacgccaacagcctcgtacaaccttaggctccacaagaattgcgacctctctggcaacctgaattcctatgcaattggtcaaagaggtgtccgcagtattattgcctaagggggaatctccccgttccacggtgtaacccgaaggtatggttagtgtaacttcctctggccaaggaaataagccctgtaaccttccctggttccgttaaggcccagtcctgtattctccaagtaagcacggacacaaggatttataggctactacagctcaggtggtacagtaactcgtgtacatatccgcaaggttttcgaaactttgttgccctcctcaaaaataggcccaactcttaatacaacacctccgaggcggttagttgtttttgtcctcccccaaaagatgttggaggtgtagcaggcctcccgggttgtcctgtacctatggcaataatgttggtagttcattggatacatcctagtaataaaaagattacaggacctgaattatttagtcatcaaaccttaggttttttttttttttttttttttttttttttttttttttttttt

SEQ ID NO: 9273 - DNA, 655 bp, Canis familiaris
gcagcagagccagggcccggaggctaaattagggtatttcacttgcagcagcaactgttccggggtgcctccagcacccttgcattgtcaattagaggctcaagggcgttgtgccttggcccctggttaacaagtgccggcccagatgcgcccttgttgcagtctacaagaggtcccggtcacggcctcgtggacctcctcagaggatactcttgaaccacatatagggaaacgtcgttgcgtttaaagttgtagtctactcaatcaggcagttctgtgtacgtttagggctcgtcatagtaatcatcctgcgactcatagtcgtggtcgccgcctacggacccctgtgccccatctgcaactggctaggtgcctgcgacttcatcgtagtcatcagtccctcctccccacggcccacggcgccccggccgcggtggagtcccccagggcagccaagctcctcgaggcaaccgcagggcaaatcacctgctgtacaagccatcccccaaacagctgcctcggttggttgtgaatttcctatatttagccaaagtataaactagcttgagccattctacgctaaactaaattttttatgtttattttgccgaaagaattttttttttttttttttttttttatttttttttatttt

SEQ ID NO: 9274 - DNA, 381 bp, Canis familiaris
gtctactggatccttcagctcacgcaaaggctaagctgcccttatactgaaggtaccctcagcaacctaaacagcctttgacttcttcacatgaaattaaggtgagggcatctcactgtcacagtggccaggagacttgcaatcccagacagcccaggatgtagggttgtgctaattagcaggtggcctccttcaagggcaagcccaggtgaaggtggcaattacctgcagtttgtttccacagggttaggaatactgttgtaaaggccaattatataaacctgagagtcctgctggcaaccccaccacccacccccgtgttggagtacctttccttggtagtacagttcttgtgcagataaaatttataaatgtctgcaa

SEQ ID NO: 9275 - DNA, 465 bp, Canis familiaris
  misc_feature (20)..(21): n comprises a, c, g, or t, or includes no nucleotide
acacttgtgtccccctcccnntgtcccagatatactctccacagcgtataacaaattgtgtgtgtttttcacgaggagatatattgtgactcataagaatattgtgtcacgagtcctctagaggtatagtgcaaagaagaaaaatgtggtaagccccaattagtaacccttccaggttcctcaaaacaatgcaattgataaccaaggtgaaacccttccagttagaacctccttaatgaagtgattgccttggattagctggggagtagattggtaagaatgccatatattataacttgtaatcaaattttaaacttagaaaataccagtaaaaattgtcaattgtggaggacagattaggtaacttttagaactaaagatgatattagtttagaaatcctgtttgtattcaaaaacctaattttataaaaatgttttttttttttttttttttttttttttttt

SEQ ID NO: 9276 - DNA, 639 bp, Canis familiaris
acaaatgtaacacacacacaggccaaaggtaggaaacccacaggactatccagggtctcaaacttaggggtgcagggcaagcctcctgggtcacaatcctctcaggatttgctaagagtagttcgtttcagtatcaaagcagtgtaccatgaattttccgtaatcttgctaatgactagattattcttgctgctgttattaacactcaagcacaatcaagctagttccagagatcatgggttaattgctcaaatacagtataagagttctgttacgtgtataaacctaaggagattgttgcagtaacctgcacccaaatcaaaacttcaatccagctttggatatggatgttcacagccctagaacatttagtagtcttgaaccaggacccaaagaaagcaccctaaacaatcacactgggagagctgtttaaaattactctttaccgattggcgccagggaggcactgaggaagtgcgacagccaaaggcactggaccagtacccaggaccagtgtacgtgaccctctactggcacccagatgggtgccagcaacacccacagccagagacacagccacacacacacacagagagacacactaggtatttattttttaaatttttttgttcctttttt

SEQ ID NO: 9277 - DNA, 650 bp, Canis familiaris
  misc_feature (164)..(164): n comprises a, c, g, or t, or includes no nucleotide
atatcctagcaatccaatacttgttgccggatagcaagataattatactatcttgatgtaaactgtctttgttataagtgtgtgttatttttggggactgaatgataagtagttgagtactgactacttggtgtctattattaccatttagaaatctcttcctnagtatgtccaaaatttatctagtttaattgcctttagtatgtgaataggggtgtttatgtctttacctctgattctaaggtttaaaactatcacaacccacttattcagtacgttcttgatgcatgttttacaaactgttgtcaacttcttcatacttgctgcaagtacattcctcctaaatatgttctcaagtaaatgcttttgctcaaacaaaaaattcacctataggttattcagccttatatgtcctattaaagggcctgttttctttactctatctacttgtgatcacttgactgggctgcccgggaggcactgcggaaatgcgcctccaacttccctgggcgagtaccaggtgtctagggtacgtgaccctcgacgggcacccagctaggtgccagcaacacccacagccagagacacagccacacacacggagacacactagttatttatttattttacaaattttttttttttttttt

SEQ ID NO: 9278 - DNA, 320 bp, Canis familiaris
agcactgatccagcagtaggtgttggtagcccacttggaggcccttgtgtagttggcagtgatcagggcagacacaacacactcaggagttttagaccgggttaacaacaaccgagaggctgctcagtccaaagtggcctcggagcaggcagtgcaggtgtttacgggggcccggcgctacggtgtagaagaccgctacctatgagtagtctgattccacatacattcagcacgcttgttgttgccctcgagaagcccgagtgcgtccttgtgcagccagaaggaggctgatcccaggtggggatgcggggtcctagcat

SEQ ID NO: 9279 - DNA, 592 bp, Canis familiaris
  misc_feature (152)..(152): n comprises a, c, g, or t, or includes no nucleotide
ctcccgacgagcataccggcctgttttgctggccccaggggcaggacagggcctggtccgcctggaccctcacaggggcctgcagcaccagaaccaggacaaagcagccaaccagcacaaagaaatcatcacctagctggcagtggtaggcntacccaacaggtcggtgcccagtggggcaggcaacgaggcctgcagaacccggttgaccaggcagtcagccaatgatgagacagcagggggtgggggagggggcaaaacagagagaacatgcaacggagagcagggcaaggccctgggctgagcaagcaccccagccacgaacagccctggtggaggctgccctggcccaccgcggctaggcgggcccgggctggccaaccacaggtgacaccaggaccagcaagccacagtacctgggccctggtgggattgtcccaacaccaggtgtggtgttctaggaagaagactaagctagccaccagacagaagactccacgacgggggggtaattccctggcctccccagtcaaagaaaacgaggtctccttatttttgtcctaaataaaaattttttttttttttttttttt

SEQ ID NO: 9280 - DNA, 646 bp, Canis familiaris
gaaacgaaacaattgcccaaagcacaggtgattcaacacccgcaactgcacttcactctgcaacaccctgctacttcccagggtgagaaaagtgtcaaaacactatttagtgggccgatctaacccgaaaagcaccgttgataactgatccgcactgataaaatttagtttagtaacactccaagagtaaaggaaagggtacctatgggttgccccggctccctccctctatatcctagataagtttagtaaaacactgttaaagttgatggtttgaatccccttctcaacagcaacctcaattcaggccagcctataagattgttaggctataccaagaatcagagtataaattttatacccccgagacctccaaaaccctttgtaacatgattagtacatgtttatacaaacacaatacagaataaatacctaaaaacccctgataaaaatataggttttttaagataagttgctcctaaatgatacgcctgaagtattgtggttaaaggatattaataggaaggagtaataaaaaatatcagatagagcccttgcaaatcatcagaggtttgtcctcagaaattattttgtaaatctaacccctttttttttttttttttttttttttttttttttttttttt

SEQ ID NO: 9281 - DNA, 640 bp, Canis familiaris
aacagcttctcaggaaaaatgccaaataaggatagtcgcctgcagtgaaatccccccagcctactccactaggagtggttatgatctcctgcctggagcagctccttgttagatccattatcagccacatgttcagctaggtgtggatggtgttgggctgtagccaagactgggactccaagtgaactagtattcctggacagacccaaaagtctggttattgtgactgaggatgaggaggatcttacttggccacaatttacccttgatagggggtacccagggagtcactgcggaagtggtacagccaacggccctgggagagtaacaggtgaccagggtacttgaccctctcctggcacccagctaggtgcgaaacacccacatccagagacacaagacacacacagagagacatctgttatttatgtattttacaatttttacccttgatgggtacccagggaggcgctgcggaaaggcgccagccaaaggccctgggagcgtaccaggtgtcccgggtacgttaccctctacgggcaccctgagctaggtgccagcaacacccacagccagtgacacagccacacacacacacacagagtcatactatttatttatttttaattttttttttttt

SEQ ID NO: 9282 - DNA, 650 bp, Canis familiaris
cctgtgtgtacaaaagggacttcgatacggaatagttctttttatcgtatcagaagtatttttctttgcaggcttcttctgacgccttttaccactccagccttagcccctactcctgaacttgggggtttctgacctcctaccggcattattcctcttaacccattagaagtgcctctactcaacacctcagtcctcctagcctccggagtatctattacttgagcccatcatagtttaatagaaggtaatcgcgcacatatacttcaagccctattcacttacaatctcccttaggcgctatattttacgcgtattacaggcctctcgcgatatctatgtagacactctttgttacaaatttccgcatggggtaatcggagtttacacctttttaaaacccatcgggatttccccgggataacaaggtaattaatgggttccaaccattcctcatcgtgtgcttcctccgacagctatactaccacttcacatcaaaccaccacttcggatttgaagccgctgcatgatattgacactttgttgatgtagtctggctattcttgtatgtatctatttattgatgaggatcctaaaaaaaaaaaaaaaaaaaaaaaaaaaaaaaaaaaaaaaaaaaaaaaaaaaaaaaa

SEQ ID NO: 9283 - DNA, 433 bp, Canis familiaris
gagtatgtggacagcaccaatctggcccccagactttggcccagagcaggggctgtggctgagaggctgtggagcaacaagttggtgactaacctggactctgcctttaaacgtttgacaccaattccgctgtgaggtactaaggcgaggtgtccaggcccagcccctcaatgtaggctactgtgaacacggagtttgaaccaacctgagcaagcagccccaggcactgaggagggtgctggccctaggagagcagtaatggggccaggcttccactgcatcccgcccgggggacggagccccttgctcacgtgcccctgtccatggagagaagggggccagtgttggcactagcatcccataaagagtgatgtggcatatttaaaaaaaaaaaaaaaaaaaaaaaaaaaaaaaaaaaaaaaaaaaaaaaaaa

SEQ ID NO: 9284 - DNA, 584 bp, Canis familiaris
gtggggtgtctcagtcacacgtctagattgagaatcggtgaccacggacctatgaatggtgcaagtatttaccacgttcccgtatttatcactgatcatctaactactcactggaaattccattaacggattttacggaacgtaaagttagaatggagaccctggataattctggtgtaatataaaatgggttttataactgcttttgtacctagctaggctgcagttattacacataataaatggataatatacacagccttcattgctcctacattcttcttacggtcggagcatgaggacaagcctctggtaccccccgggacagcgcattcccagggctcagctgggtctagactgttctctgcctccacaggactgtctggcaatcgactgtgttattggcccccccactgttagatgtatatacggggccccttctgatagcttagagctccacgacccttttttttttttttcggctttgctttttctgattttataccaactgtgtggactaagatgcattaaaataaacatcagagtaactcaaaaaaaaaaaaaaaaaaaaaaaaaaaaaaaaa

SEQ ID NO: 9285 - DNA, 619 bp, Canis familiaris
  misc_feature (225)..(225): n comprises a, c, g, or t, or includes no nucleotide
ctcatataaacccaggttcctcaccatgtttcctcgcatctttcagggccatttctcttcaagtttagctgtttgtacaaacttttgggagccggggtggtacatcagttctctggtatccgccaggccgctggggggtggatcaccacaccctgtagggcttctcccctcctagctgtcttttgggaaacgacaggactgggagcttgttttgaccacgagagncccaggtcaagagcaacggtgtagagaaattgtgaaatagagaaagtggtgttggtgaatatgggtttgtttttgtttgtgttgtgtttcaccaacattggagtatactcgtgtacaccaagggtgtcttccccccagtttcccagccaggttctcccttttctgcccctttctcacgtttttcctcctattaatcaagagaaacttcaaagtccatgggatggtcggatctcacaggctgagaactcgttcacctccaagcatttcatgaaaaagctgcttcttattaatcgtgcaaactcttgccacgatgtggggagtttgacaaatctttcaaaataaaaagtaatgacttagaaaaaaaaaaaaaaaaaaaaaaaaaaaaaaaaaaaaa

SEQ ID NO: 9286 - DNA, 365 bp, Canis familiaris
caccagtttctggaattattgagttccagctttaattcctctaggagctaaaagtgctgaccaaggccagtgaatgaatatttataccaaaggactcttaaactttgtattctgctggaacatgaaaagttctgccctgcctgcactaatttctggagccagaagctacagctttgaacagaggttttcagaggttgatataaagtgtattgtagtcatcacaaggttgatgatgtttaaacaatcagatttttctaaatatagaaacttttatgtgttactttttttgatattaaacttgatttttaaacctgtaattttcttctccattggaataaaaataatttttaactgcaaaaaaaaaa

SEQ ID NO: 9287 - DNA, 527 bp, Canis familiaris
tgactgatggtgtacagaccccacctgctctctgtccagtccaaaggaccctcatagttacagcacagaaacctgattgtaggggcaccccagccacgtggaacctagaagacccatgtttcctggaccgagaatcagtgtgttgggcatcagtgttttctgcaagggttgtgatctgaaactttttaaagaaccatccgccttttggggaagcatttctgaattgtccatcaccaaccatttcttggatatcatcatgaaacacctgtttgctgatcggagctgtcgtttaatttgatgcacctctggatccggatgaaacattaaattgtcttcctcatatctccatcaggtgtacagtttttaaaaccaacaatggcatttcaagtcttctgaaaacagtgtggcagtatgtgcgtggtccatagcacagtacaagcagcatctaataacagttttaattgtagaatgtttttgggtacttgaataaatcaaatctttaattgaaaaaaaaaaaaaaaaaaaaa

SEQ ID NO: 9288 - DNA, 540 bp, Canis familiaris
cttctccaagcatcaccctgggagtgttttgagacttttctcataaatgagggcagtacattcctgttttgctccgaagtattcagtaccgctcagtattttaaatgaaatgattctcaccttgtgaatttggtttgggatccatagggaagcaccaggcacccacccacataataccaatgtattgaaatgattttctcaggaatttgaaataggaaaggtaccccaaccacttttggcttcccacctaaacttgggccctgccaattaatgttaaagaatggcatatccttgttactgtgatatttaaaatatccacagtgtccaccttttccaaaagattctagtaatgatctagaaatatctttctcttatctgttatttatcaatttttcccagtatttttatatggaaaaaattgtattgaagacatttagtatgcagttgataagaggaatttggtataattatggttggtgattattttttatactgtatgtgccaaagctttactactgtggaaagacaactgtttaataa

SEQ ID NO: 9289 - DNA, 637 bp, Canis familiaris
aagaaagtactgttctatattcacctcaggaatggtgacagagttacactttcccgttttgtcttcttaaggtgtgaagccctctccaggctctataagccagacattccttcgttccctcgttccaagttaaacgcgttcgcttggtgctgcctcttgagtccacgcctctctgcctccctcgggagtgggtgtttgggagcctcaggcaccatcactgtgttctgaacctgtctcctaggtgcttatgatgagggtgccacttcatgatggtaagaaaagacacttcactggagggtttttgtaagcgtctctctttttgagaatagacattgtttaaaaagagaatcttactggttagaattattgtctcaccaaaagtgtttttagagaataattttggtccaaaaaaaatttctttttcaagctggatggatcaactgatttttgtctacaaatgttggcctatcacagtattttttcaatacagatcctatttaccaaatgaccattttagtgtttttaaaccatactaaggattgaaatatgtaaatcaggtgacataaacatgaaaattatgtgcctaaatatttttgtaaagatgtcaaataaatacttttttcctgaaaaaaaaaaa

SEQ ID NO: 9290 - DNA, 496 bp, Canis familiaris
gctcaacccagacccggaagacctgtcccatctgcaagcagcctgtccatcggggcccgggggatgaggaagaggaggaagagacacaggggccagagggtgatgaggaaggggagctgagggaccagcctgcttcagaacggaccccacttctgggctctagccccccacttccgagtacccttggctccctagctcctacccctcttgttttcccagggtcttcaacagagtccccccttccctccccctccatatttttcacgacgccaatcgggttaaaggccccccccaacccccgtccccacacctcctgggacctatttgcacagcccctgagcctctctcgtcttgtgttgagggacaggggatcttctgccccaggttgctcctttttccagccccatccttttgagggggctgggggtgtaaagggcctgaggtcttcacttactcagtaaataaaactgtttttgtgaactaaaaaaaaaaaaaa

SEQ ID NO: 9291 - DNA, 500 bp, Canis familiaris
aaaccagaccgtgacgattgggagaatgggctgaatgcaatggagtgtgcattacacttggaaaagagcgtgaatcagtcactactggaactgcacaaactggccactgatgaaaagtgacccccacttgtgtgacgttcatctgagactcactaacccgaagcgacgacacggggaaataccacacacagaaaatgggggagccacagtgaaccacaccctgcgccgaagagagtgggggtctccgcgatatcgtggacagtgcacagagatattttcttggaccaagcacaccccggggaaaccagtgataatgagagctaagccttaggctgtcttcccatagccgcagggtgacttccctggtcaccgaggcagtgcatgcatgttggggttacctttaccttttctataagttgtaccgaaacatctacttctttcgtttgtatcattccttcaaataaagtaatttggtacccaaaaaaaaaaaaaaaaaaaaa

SEQ ID NO: 9292 - DNA, 682 bp, Canis familiaris
  misc_feature (183)..(183): n comprises a, c, g, or t, or includes no nucleotide
gctgcctgcgacaacaacgttagctcgaataaggtcggaaagggaaagtccccacatgggagcgtgtccccatagggaccctcgggtggcttctgggcaaacgaggggagaggcccgggttcctgccgcagagcagacgtgggaggcctgacgtgaagaggccaaggcggggcctgaggtgcncggtggctgttcttcctttaaccttcctcctggtcgccctaagaaatgaggccggaaattcgtttttcaagacctctttgaaccccatggggcgggggggtgcttgtgttaaatgtacctgccccccgggggttcttcacacttgaaaaaacccatttcctggtcacccacaacctagaagggccaacgcgggggccggtgtaaccactgatgacatggaaccattaaaatggcaggaagtgtgagcagtgaattcaagggttggcttctccgtgagacagtacgtggcactttagaaactttcctttaatacgtaaaattttaagtcactcactgcaaagtgcatttaagatcttccaagaaggtagatgtttccgtttcgccttgttttgaaaaccgttgcctcaagtttgtgtcttacgagtagtggtttagaacccaggcctcttttttctttaaaaaaaaaaaaaaaaaaaaaaaaaaaaaaaaaaaaaaaaaa

SEQ ID NO: 9293 - DNA, 367 bp, Canis familiaris
gatacagatcatcaaactggccttggagtgattcttccgaaccctcatagcagccatcctctacctgatcacctccatcgttgtccttgttgaaggaggaaaccactccaaaatcatcgcgggggtactgggcctaatcgctacaagcctctttggctatgatgcttatatcaccttccccttgcggcagcaaagacatacagcagcccctactgatcctgcagatggcccggtgtaggtgaactcccttcatttctctctgaaacactgcaaataacacttccccactcgaaaggacatctctccctgcccttataacacatctccacgcccaatctccacgccccttaatgagaggaacaaaggc

SEQ ID NO: 9294 - DNA, 602 bp, Canis familiaris
  misc_feature (525)..(525): n comprises a, c, g, or t, or includes no nucleotide
  misc_feature (545)..(545): n comprises a, c, g, or t, or includes no nucleotide
agtgtttcaaaaaggattcagaacccttcaatccagacaacccttaccaccagcaaggaaggggaaagcatgacatttgaccctagactggatcacgaaggaatctgctgtatagaatgcagacggagctacactcattgccagaagatctgtgaacccctggggggctactatccatggccttataattatcaaggttgccgatcagcctgcagagttgtcatgccttgtagctggtgggtggcccgcatcttgggtatggtgtgaaagctcagttcgtatacccggtgcttgtatcataaaaactcaagagacaaccagagtatgaggcatcttgatgctgaagggaccacaaagtattttatactcaatttcagcgatgctattcaagatacttttaacagctctcaattgctttacagaacttcatccagaatgtgcaaatgtactgaaagggtagtttaagtctaaatgccccacaatccccctatacgggctaattttaaattgcttttgcttttcccnaataaaggcctaacttacanagactaactttccaagctactttgaaataaacatgaaaaaatcacaaaaaaaaaaaa

SEQ ID NO: 9295 - DNA, 472 bp, Canis familiaris
ggcatcctgggctacactgaggaccaggtggtctgcctgtgacgttcaactagtgacacccagctctgtccaccctttcgaacgcccgggggcctggcccattggccctcccaatggacccactttgttccaagactccattttcctggttatgcaccaatggaattttgggctaccagcactaacccggtgtttggtttggaacccttcaatggttccacatggccctccaaggagtaagagcctcctggaccaccagccccagcaagaacaagaggaagagagaggccctcagctgctggggagtccctgccccaacttaatcccccaacacactgagagaatctcctgacctcccaatttacatcctagaccccaaggaaggggaagggcttggggagccctaccttgtcatgtaccatcaataaagtatactgtacccagcgaaaaaaaaaaaaaaaaaaaaaaaaaa

SEQ ID NO: 9296 - DNA, 576 bp, Canis familiaris
atcaccccaggcacgctcccgtgtttcatccggcacgactttttggtcgtttgtttaagaacccaagatggcccttccttgggtggcttcggcgcaataccccttctggcgctcgttctgtctcgtgtaaagactctaaatagcctctctcagagcttaccatatgagattcgctgggccattggccaacctttgtaaacccttggctaaacaattcccaaatttaggaagaataaggaaccttttcaacaaggcccccaataagggttttcttttttgaaaatttaagaaaaaaatttaaaggggccaaaaaaacactgtatcagcatagccttttctgtatttaagacaagtcagtagccttcttggtgctttaggcattcagctttcttcaggctgataatttatagaaatcctgaaatgggcttcagatccaccccttaaaagacatctgaagctgtggcttggcctttggttttgaaataggaaggttgaaggacaacctgaacctagacctttttttaataaacaagttttgttttgtaaaaaaaaaaaaaaaaaaaaaaaaaaaaaaaa

SEQ ID NO: 9297 - DNA, 665 bp, Canis familiaris
ggggagaatttccgtcaatctatgacaccaaggtcgctttgctgttcatcggattacacctgaggaggccaagtataagttgtgcaaagtgagaaagatctcttgtgtggaaacacaaaggaaaatccccttcacctgtgttgactccatgaatgctctgcacccatcgcgctattccttgatccccctcatccaagagtgatatgatgaccatctcagcatgtgatgttggagaactggtgaagaatttcgcgagtttcactcaagatgttgatacatggtaaatctcgtgtattagtgtgacatgggagagggccccacaacacctgggggagaaatttgggtgtgagtctccccaccgcaggagggagcaccccccgggtctctttgaagtatagtctcacgggaaaaaggccaagggccaccaagctttgcccacccgattcttccaacatttttgttattggcaaaggcaacaaaccatggatttctcttccccgtggaaagggtatccgcctcaccattgctgaggaaagagacaagagactggcagccaaacagagcagtgggtaaaatggtccctgggtgacgtgattggaagtctttatacttaattaaagattctacagccaaaaaaaaaaaaaaaaaaaaaaaaaaaaaaaaaa

SEQ ID NO: 9298 - DNA, 646 bp, Canis familiaris
gtcagttttcatagtattcaattttttgggtcacttattagtttcatgaatttcagattctgaggggaaatgttttgtaaacatgtgttactacttttttttttaagataagatgaaaggcaggcctatttcatcacaagcacagacatagacacacagagacaccaacttatgctttatttgtaaatttagtgttttctccatctctactgtcaaatgatgtgcaaagtcttctcttgggttgaatggaagtctagcccaggattataactctctgagatctttaactcttatatagcccaacacgcactgggcgtacaacaacaataataggataaattaataattcttggacccaaagatttccaaattccaaggtccagaattggccttaacctggaaaaataaggttgggtaaattttaagactgatgattttgcaaaatactagaccaaattcatgaagccacatacacttagagcaatatttttagtattaagaattatatagttacctagtgaaacttctcttttctagaattatttttcactctaagtcatgtgtatgttcctttttaatcatttgcatgttatgtttaacaagctcatagcaaaataaaacatagcaaatggcaaaaaaaaaaaaa

SEQ ID NO: 9299 - DNA, 665 bp, Canis familiaris
  misc_feature (233)..(233): n comprises a, c, g, or t, or includes no nucleotide
  misc_feature (310)..(310): n comprises a, c, g, or t, or includes no nucleotide
ccctggcgccgttcgctattccacgaagccccccctttccgtcttgaaatggcgcgtcccaagacgccagggagtcatgtcctcccccctgggcgtcggcttcttcttcttccccctgtcgccctcttcccacaggtgtcgccgtcgtccattcccctccgcctctgtcctcctcgtctttcacaactattctcccacgacgtcgtggggctccgcgtcgtcttcgtgggccncggggggcgctcctgcgtctacgcgcccctatcaccacgagcacagaccccgcggggcacgaggaggcacaccgtgnccccacagagctgtggccagttctcgtggagggaggttcagccagggtggagaacgagtgccaccccggcaatgcactccgcactccaaaggggagcattggccccggaaagggcccagcctcccactggagccccagccagctttcatcgtccccctctccccacgagatggctagctctcccctcccttcgccttctggcccctggtatggtgggggtttctaacgatcacacccagcttgaggaggggctgcttctgaggtcggttgttgtctttcaattaaagaaacactgtgcaaaaaaaaaaaaaaaaaaaaaaaaaaaaaaaaaaaaaaaaaaaaaaaaaaaaaaaaa

SEQ ID NO: 9300 - DNA, 491 bp, Canis familiaris
gctggggaggcgcggaagctggacgaggtgaagcaggagcttcgggcactgagggccctggtcaaaggaaccagggggagcgcattggtcgcctggaggagcagctgggcacgcatggagaatggggatgcgtaggaccaaggcccaggggatgctgctccccctcacttcctcttcattcgctccctcctcacccagcctctgctggcaagtcacaccgcttgttggctgcctcctgccctgggcctgtgggacaggttctggagcagtccacacccacccatcccggggctagagccgcagcctggctcttgtcattgttactagggaggatttttgtatcaaggcaagcttatactctgagggaccaccacctgccagccctgctccctccccagaggaagtgggagaaacaatttctatattttcattccaaataaaattctctttctaaaaaaaaaaaaaaaaaaaaaaaaaaaaaaaaaaaaaaa

SEQ ID NO: 9301 - DNA, 644 bp, Canis familiaris
tgagacccaaggtcagcagccacctcaacgtgcggtaccgccgcaacttcaattaccgacgcagacgcccagtaaccctggaccacaagatggcaaagagaccaaagcagccgatccaccagctgagaattcgtccgctcccgaggctgagcagggcggggctgagtaaatgccggcttaccatctctaccatcatccggtttagtcatcccacatgaagaaatgaagatgaaattccagccataaggaatgggaccaaacgattggagctgaagaaccttaagtgcttgcttgtttgcccacttcgaccagactagaatagatactatctgcactcatttatgacagcactgggggtttttattattatttatcctcctagacgtctctctttggtggatgagatacacgtgttttttaaaaaaaaaaaaaagagccgtgggtttctctcaacaccacctttaaaggtttttaaattgtttaaaatctgggtccaagttgagatttttaagaacctcatttttaatttgtaataaaagtttacaacttgattttttcaaaaaagtcaaccaacggcaagcacccgttaataaaggtcttaaataattaaaaaaaaaaaaaaaaaaaaaaaaaaaaaaaaaaaa

SEQ ID NO: 9302 - DNA, 653 bp, Canis familiaris
acgtctacttgtccatgtcttatactttgatcgcgatgatgtggctttgaagaactttgccaaatatgtttctccacccatctcatgaggagagggaacatgctgagaaactgatgaagctgcagaaccaacgaggtggtcgaatcttccttcaggatattaagaaaccagaccgtgacgattgggagaatgggctgaatgcaatggagtgtgcattacacttggaaaagagcgtgaatcagtcactactggaactgcacaaactggccactgataaaaatgacccccacttgtgtgacttcattgagactcattatctgaacgagcaggtgaaatccatcaaagaattgggtgagccatgtcacaccatacctgagcaaggatgaggggctgcccgtatgtggtcatggccagactagtctactctatcaaagcaacacacctcgggtgggcaccgagtagatagagtgagatataccccttagctttttccccataccccacaggggagacttcccgtgtacacccagaggccagtgcatgcatttggggttacctttaccttttctataagttgtaccgaaacatctacttctttcgtttgtatcattccttcaaataaagtaatttggtacccaaaaaaaaaaaaaaaa

SEQ ID NO: 9303 - DNA, 646 bp, Canis familiaris
cccaggggggccacaagtgagtcactggcccagaggcggtgggctaaagccacgccccccacaaggcctccctgttactatagcatcagaaaactgtcacatctctccccttccggagagcagggcttgcactcttcccctagaacctactttgaaggcaattagaagctttgttttcatttcccctgcgtatgtgtacttgccaggatggttaggtacacaaggaacgcttattaagatcgacttcgagtagagaagaagccaaaccccagcttgctttggtatggaacgatcttagttttgtagaaggccaaccaggcaacaagttagggacgtgtcgttagttaagttagcttgctatataggtaggtaattcgttggacacatttctctctcgagatgagggtactgcgcatatattatagcacgaggcttcatatttacaacacctcttctcccactccaaactttcccgtgccagttaccctttcaatttttaaagcaatttcactgctaaatataaattgtatttgtggggttcatagttatataatgctgaagggaaccactctttcgttgaaaggtgataaaagttaaataaagactgtctccacagtaaaaaaaaaaaaaaaaaaaaaaaaaaaaa

SEQ ID NO: 9304 - DNA, 215 bp, Canis familiaris
atgttggtgttaatttcccatcgcacaaatatggaatccatttttcagaaatgttgccctttgaatgggatgattttcttcatctcatagctaaaatagctaactttagatagaataaaatgtgcaaggagccctaggaatatctgtatgttggatgactttaatgttacgttaagagaaaaaagaaaataaagtaataatataactcaaaaaaa

SEQ ID NO: 9305 - DNA, 677 bp, Canis familiaris
  misc_feature (401)..(401): n comprises a, c, g, or t, or includes no nucleotide
tgggtcagtgtgaaaggttaacaaaagcaagatgtcaatgttacgtgggtggttaaggccaggggcctcccctaccactgtgccactgacttgctgtgtgaccctgggcaagtcacttaactataatgtgcctcagttttccttctgttaaaatgggataataatactgacctacctcaaagggcagttttgaggcgtgactaatgctttttataaagcatctttgggatcctctcagcagaggaattcttttttaagtccttgaggtagttttttattagtagtcagctagtccacccgctgaagcattattggtcccccgctagataacacaccgtcgtgctccactacaccataattctgagtatattctctcttgaggaagaagttgtggagaaaantacccatctgtgagaataatggtgtggtggataatcatagcccagccaaaattggagaatgcataaactccatggcccatggaaaccaatacaccaggataccttttccttaattgggtgggattttttcccttttatgtgggatagtagttatttgtgacctaagaataattttggaataatttctattaatatcaactctgaagcttagttgtactgatctgaaattgtgtttgttcataataaaagtgaagtgaatctgaaaaaaaaaaaaaa

SEQ ID NO: 9306 - DNA, 637 bp, Canis familiaris
cctcccgccctgcccatgcccctgcgttgcctggggggtggcgcgtgcctcacggagatcgccgtgagccacacccctggggggctgggtcccccgttggggcccctatgcgtcacggggcgccacatgggcatgggtgtcccacgagatatgagaccacaggggaagggggagtctacccgtggcccgcgttttgtcttggggccttggagagggttacccagagatccccggcaccccactctggaggccctctccaggaagggaaatttctggtggtctttccagggcctctaattccacttaaagaggataataatccagggtcccctccaggggacccatccaggggccatccgttccctggtaaccttctgaagtctgcattttataaagacagccaagagatgggacgcctggatggctcagcggttgggcggctgcctttggctcaggtcgtgattctgggatctgtgatcgagtcccacgttgggctccctgcatggagcctgcttctccctctgcctgtgtctctgcctctctctctttgtgtctctcatgaataaataaataaatctttttcttaaaaaaaaaaaaaaaaaaaaaaaaaaaaaaaaaaaaaaaaaaaaaaaaaaaa

SEQ ID NO: 9307 - DNA, 670 bp, Canis familiaris
  misc_feature (175)..(176): n comprises a, c, g, or t, or includes no nucleotide
gccccccgtggcggcgacgacccattcgaacgtctgccctatcaactttcgatggtagtcgccgtgcctaccatggtgaccacgggtgacggggaatcagggttcgattccggagagggagcctgagaaacggctacccacaatccaaaggaaggcagcaaggcagcgcaacatnntacccatctcccgaccacggggaggatagtgacgacaaaataacaaactacaggagctcttttctctgacgggcccccgctagatttggagagtgatgtccaccatctaaatcctccttatcgacggagtaccccatggagagggcaacaatctcgtggtccacacacacgcccgcgggaatattctcccgacgtcctcccaaatgcgcgataatatataaagagttgtgcgccgagttaaaagagttgcttagttggatctgtgggaccggccggccggtcccccggcgaggcgagccacccgcccgtccccgccccttgcctctcggcgccccctcgatgctcttagctgagtgtcccgcggggcccgaagcgtttactttgaaaaaattagagtgttcaaagcaggcccgagccgcctggataccgcagctaggaataatggaataggaccgcggttctattttgttggttttcggaactgaggccatgat

SEQ ID NO: 9308 - DNA, 661 bp, Canis familiaris
cagaccaggatgcacgaaggagagagagtgagaaagtctctagaaatgaacccccgattaaggagggaagactgtcactctcgcgacttctaagccacccgaatctggacagccttctgaaggttatgccagccccctccaccaaggagaattgcttgggtgaagcgaagttctaaccctcctgcccgatctcagagctcggacacagagcaacagtcccccacgagtggtggagggaaaccagtcccggctcagccccccggaggaaggaccagcaaggagagatgaaaaccaagtagatggggtgagtgtccccaaaggccacagtgggaactccagccgtggtccaggagacggagggaaccaagaccactggaaggagccagacaggaaagacggccaaaaggatcagactcccgatctgcacctgagcccaagaaacctgaagaaaatccagcttcccagttcagttctgcacagccagtatgctgctctctcccttgatggtgaagatgagaacgagggagaagattaccccgaatagacctctgcatcctgtgctttctcctagtctctccacccctggaacattcgagagcaaatccaaacctctatccagaccagacaataaaactcaccatctcctggaaaaaaaaaaaaa

SEQ ID NO: 9309 - DNA, 622 bp, Canis familiaris
cagatcaagaccctttctgcagcttgttgtcatccaaggggtttctagcagcacgtgacgcttgttctccgtctactcttaggatacgggaaatgccattgtgattagggcacagggctgtaactccttatttacgtttgtaaatgtgcagtgcctcagcccctttctacccccctgtagggtcggcacgaggtcccgaggacatttaaggcactttcccgcgtgggtctttctcagcagccctgtgactttaggcacccagaatgaccagcgtttccgactccacgaacgcagtgggaacatcgtgccctgtgtttcgatcaagccgattttattttattttattttaaagattttatttatttattcatgatagtcacacgagagagagagagaggctcagagacacaggcagagggagaagcaggctccgtgcaccgggagcccgacgtgggattcgatcccgggtctccaggatcgcgcctgggcccaaggcaggcgcccaaccgctgcgccacccagggatcccgatcaagccgattttaattaagatgttctttgcctgctactaggtttgtaaatgaataaacacaccttttaatcactctgaaaaaaaaaaaaa

SEQ ID NO: 9310 - DNA, 613 bp, Canis familiaris
  misc_feature (1)..(1): n comprises a, c, g, or t, or includes no nucleotide
  misc_feature (17)..(17): n comprises a, c, g, or t, or includes no nucleotide
nctctataaacctcggnatacaatccccctatgagcagggacagtaattaccggtttccgctataagaccaagcatccttagcacactttctaccccaggcacccctcttcccctaattccaatactagtagtcatcgaaactattagtctatttattcaacccatagctctagccgttcgattaaccgccgatattactgcaggacacctcctaatccatttgattggaggggctaccttagctcttatcatattagcgcgaccacagcttttatcgcttttattattctaatcctacttacgatcctggaatttgctgttgccttaattcaagcctatgtttttaccttactagtgagtctatacttacatgacacacctaatgacccaccaactcacgcttaccacatagtcaacccaagcccatgaccgctgacaggagccctttctgccctccttataacatcgggtctcatcatatgatttcactataactcgatatccctacttacattaggattcacaaccaacctgttaaccatataccaatgatggcgagatgtgatccgagaaggcacattccaggacatcatacccctattgaaaaaaaaa

SEQ ID NO: 9311 - DNA, 648 bp, Canis familiaris
ctgagcccttccggatactcttctaaagagcccatggaccctggatgtgaaatgcccgaagacctgaagtgttcttagtcaaacattaaatgcacttaatactcttctgttgtgttatggaagattgtttgttttcccttttttgactgaaccagactttctggatagacttggaaaatacacaatgctgtagtctatgacactagtataatacccttacaccctttagcacaccaggacactacaagcatgttaggaagtacttgcttcctgcaaccatttagttatcctttagaaccaaatcgtgttcctctatacctagaccagtataatctgaaatccttagcatcggtctaatttgcatgcctcttgtgtttcaatttgtttttcaagtataaggaataagaaggaccaacatacctgtgggtctggtagccaacatgaaagggaagtatgttgtttgttatttatttttacccgtaccagtattttgattataaaaatagagtataatttatataacaggttttctgtttataggtagtttggttgaagacctcttctgattatggattctgttaagaaaaaccaataaaatgcttaactaccaaaaaaaaaaaaaaaaaaaaaaaaaaaaaaaaaaaaaaa

SEQ ID NO: 9312 - DNA, 570 bp, Canis familiaris
aagtattccgataattttagaatatcattgtttgggaatatacatttatctctatgttttcgatagttggaaaatgaccgttaaccctttgcttgtttatttctgaaaaagaacttgtatttagtgattatttgtagatagtgatattatagcattcatctgtgtgtaaatgtatttcatatagggaagagttctgatctgtacctatggtccgcattgaactaccatactggatgtgtatttctgtgatgttatgaatacatttctactttattttgaaacactttgcccaactaaatactgtaacactgtataacattaaaatgtttaaggactgcttagcattagaagcaggctatgtccagaaattctaaaacggcagcacatgttgttgcttgtataaagcctggtgatgatttttagactaacttccctggtgccctactggcaatagcactaccattgtaccctgctgtataataaataatcttagacatttatcaactgttgatacaaatgttagtccctaaccactttttatatgttttaaatttttgaaattcaagtgta

SEQ ID NO: 9313 - DNA, 654 bp, Canis familiaris
gaacatacagtgaccatgcaggaatggcctggaagctctgcctgtgtgtgctttgctctacacttacggttgtaatgcctgaggtagagatgaagttcttcttttaaatctgtcttgtactgactccttttgtactatgaaggccctcaccatgatttatgtttctgatgatatcagaagattcacactaggaaagtacctgtttggttcaattgttagctctcttgggcaggggaggggagcaagagtagagccgaagccactctgttaggagttgtatttcaaagtacctttccctgtaaggtgcatataggagtcaaaggtgagaaatgtaccctcgatcatgccccgatcatgtgcccctatcatgtctggtgtgccttaaatcttacctttgaatgaaaactctatggattgtttacagatgaagttttacactaggaccagatcacctgttacggttggtctttggcagtagtaatgttaaattctcttttttaatcttcgtttagggtcacataaagaggaattatttcagaaaagttaatgctttggttacatgacttagtctgattgggtaatgctgctcccaaaaaaaatagtttgtccttctccccattccaaaatgaattaatcccatcaggaaaaaccaaa

SEQ ID NO: 9314 - DNA, 643 bp, Canis familiaris
tggcgttctccacacagtcataaagtgaacacgcaggatataggatcatcagcccagatatacctccgcaataatctcagtgcggttgattctgacattgctaccattactttttgtcctatttttcatgccaccaaaatgaggaaaaccactaagtagccctaaagaaataaaatagattcatggcttggaaaggccaattctaggcattccttcccaaactgatgtgctaaaatcagcactgatgtttgtttttttacccctaggatttttagcctgggtgtgtaggttgaggcccagtccctctgcaggaaagaacttatttttaaactcagaaaatgtccatcatgaaaatcgacttcaactttagccaaaagaaaaaaaatccaccaaaagtatactctgtatgctgggattcccaggttcccacgtgcccctaccaattcttctggggggttttccttttcttctgataattctagagcctgttaccactagaaaggcatttcttccatggctggttgtagttagttcatgtttttccatccaaatttgccaatgtatttgttgctgtatagtgattgttttgccaaataaaattgcttgtcacctaaaaaaaaaaaaaaaaaaaaaaaaaaaaaaa

SEQ ID NO: 9315 - DNA, 551 bp, Canis familiaris
caggactcggacccatagccatgaaggtgacctcaagcctgcactcacccagactccccatggcgggaggccggaggttccctaaggtcccagaacctccccgtgggcccaggtctatgaggcaggtgtcctcgtgagggccggtcttgtgagcagcttaaggcagagctgggacccctccccatgtctggagtcacccccctgaagcaggtcggccaggctagtcaagctcctcgcccagggtgaggagccctcctgcactggtcaacagtggacgctggcaggagaggagcacccagcccacagcacctgtgctggggatggagtacctgtcccacctggaactgggtgttggacgccgtggcttctgggacctgagaacttgtgtttctgggccagttccacggtgggaagcaggttctgttgatcaggcaggaagtcccatcccacagctgggcccccccgactgggtgggggagaggacagattgcgctgagcccgccaggcctgtcaccacagagctcccaatctaataaagggatctctgaaaa

SEQ ID NO: 9316 - DNA, 540 bp, Canis familiaris
tctttttcccaaccatgatttataatacataaagccgtaatatgccgtttaaataattgcctaccataaaaaatattttgcctgcccttttcagaattcttttttgaaggtttctgttgatgttaactgagctacttgcagatattttaatttccctaaacgtaaatttggagtaaatatatatatatattcttgacatatatgtgtgtgtgtgtgtgtatatatatatatatatatatacccatatatatgtcaaccattcagtaaagcttttgtttaattttcagaaggaatccaataaaaccagtatccatcttctgtagttcgtagggtgttaggtcctttaacgtaaagtccaacttcaaattccatctagctctgtgttaatcccctgttattactggtaaagcttcatttgaatatgtaaattcagtttaggctatgtaaaatttttgctaatgtcatccttctgaaaaaaataaatttaccaatacattccaaattaccccttgttaaaaaaaaaaaaaaataaaaaaaaat

SEQ ID NO: 9317 - DNA, 697 bp, Canis familiaris
agtgtcctacgtctcgtcctctccctggggagctgacaggaccaaccacactgcccccccatcgcatacccccttccctttcctccccagttctgggatccctagagattttcataaagccactttgagggtagactttgtgggaaacaattaagtgactgactctaccaaattgtgatgccgtaagacctgagggagggagaaggggagagagggagatgcggcctgcttctccacttctccggaagtcacggcctgtcagaaaactgcacgggctacaggacacctgcaccaggcctccagaagccctcctcctaaggaccagaagccacctttttgctcagaaatgaccatcaaggaaggaggcaggacgttccatgcaaggattcttctgtggccttctgtcctgacatgtgggacatctcaggaggctggaaaggaccccctgccccccgtcccatgttctgtggtcttccacctgcacccactctccctgcactcccttgagtggtgccacgctgggtggggcccagggcctcatgcggtgaacggttcacacatctggatgtgccaaggcatttgtgatttggggccattctcacaagaaaaggctggcattctgcacacagaagcataaaatcgaggtgtttgatttcaagtaaatgtttttccaaagaaaaaaaaaaaaaaaaaaaaa

SEQ ID NO: 9318 - DNA, 686 bp, Canis familiaris
  misc_feature (1)..(1): n comprises a, c, g, or t, or includes no nucleotide
ngatattactcaccatccaaagatgaatactaccagttacatccacgcagatggaactggagggtatttatgctgagtgaaaaaagccagtcggagaaagactattatcatatggtttcactcatatgaagaatataagaaatagttcagaggtccataaaggaaggaggagaaactgaatgggggaaaaaatcagagaggaagaccaaccatgagaggctcttaactccgggaaaccaactgagggctgctgaaacggtggagggcggggggatggagaaactgagtgacggacattaaagagggtgtgtgatgtaatgagcactgagtgttacacacaactgatgagttcttgccaactgcatctgaaactaatgatgtgtactactatatcttccaaaatccaatttaaataaaaagaaagggaaaaaacccctgtaaaataggataacagaattaagatcaagcatacattttatagcaataaacataagactaaaatcatcttttaaaaaaatgtggtgtagggatccctgggtggcgcagcggtttggcgcctgcctttggcccagggcgcgatcctggagacccgggatcgaatcccacgtcgggctcccggtgcatggagcctgcttctccctctgcctgtgtctctgcctctctctctctctcactgtgtgcctatc

SEQ ID NO: 9319 - DNA, 514 bp, Canis familiaris
  misc_feature (1)..(1): n comprises a, c, g, or t, or includes no nucleotide
nagctttggaacatgaatccccccattagagacattcatccccgcaaccaataatgcacagaaaccctatttgctacccaggcctctcttccaagctccctgtggctccagcagcacctggagacaatgccccctgctccctccacagtgctgctctccatatccacccagctttgttctggaaactcccgagagggctggagcttgacccatctcagggaatgttgcccctgggccctggcttaaggctatactccggatctctgctcaccccaagggccctctcaaagcccactgccccctctaccactcctaggaggtaccattcttctcactctgggtcctacccctgcctagcagtgtcctagctctcaacagcttagggaagctctacacagagtaacctggaaccaggcacagggaaatttggtataactccatcagtgtctctatgtaagccataaggtcttaataaagtattctggggtgcaggttctgccattgaaaaaaaaaa

SEQ ID NO: 9320 - DNA, 616 bp, Canis familiaris
atattatgtttatttgtaaggatatagtgcaaagggaacattttgcgttttaaagtgaattacagctgtgctgtgaagagagttctttattgacctgtaggatcctacactttgatttaaagtgtaagacaaatgttggatatttgaggcccattgttaatatatttctattgcacgtatccttaaaaagcctctatacatactaaccaataaccccaccatttctgtgatgggtttcctttgtgaaaatcttcgtgtgatggaagcactgtgttcagtccttaatcccctaccaggtgtagcatcatagtacttgggggaaagggtgtgtgcatatgggtccttccccagaagagcagggtggctgatttggctactgcttctacagcttgagtttgtccacttaatgttctacactacagcagtgatgttgtgcagttccagctttgccagaagtttgtttccataagcgctctgtaggtttggttataatgaagattcacttgggaaaacagtgtgacttcagcctatgtaattaccttgttatgagtatgtaaaagtaaaatgcatgtgaatttattatatttgcactataaaggtatttgattaaaataga

SEQ ID NO: 9321 - DNA, 121 bp, Canis familiaris
cgatgcccaagccaagccaacctattgtaagccctggactgagtttagagacatttctcccatctctcgttgtgcctttccagggaccagagccgggaccgggggagaaggggaggggtta

SEQ ID NO: 9322 - DNA, 549 bp, Canis familiaris
gtgccgcagccatcgctggctatgttgtttatgagaccaggtgatgtcacgagtttaataaggacttccgggagccgatgaagaattatccgtgttacaaccacacggcgttcgatcctggaccggatgcacggaggattttaagtgctgtcggggccgctaactaccccgactggccgaccgtctctctcatgccccagggccacggtccctgactcctgctgcatccatgtcccgaatggactgtggggtttctttccatgtgaagcatatctacttctgagggctgcgctggagaagattgggggctggctgagaagccatgtgctggtggtggctgcacgcggccctgggccttgccttcgtggaggtactgggaattgtcttcgcctgctgcctcgtgaagagtattccgaagtggctatgaagtcatgtaggggtctggtctcttcagccccttcatctaagggagtgggatagtaccctcccggtttttccaattaaacggattatttttttcagactgaaaaaaaaaaaaaaaaaaaaaaa

SEQ ID NO: 9323 - DNA, 625 bp, Canis familiaris
  misc_feature (1)..(1): n comprises a, c, g, or t, or includes no nucleotide
ncccctgccgcgtgtggccccctcatcagtcggagactcatctcgacgggactctttcagttagccttcgttcacgcccccgaggtcttgccagcgacctctttcgtgtgagggcccagacggatcggaatgccaacgggtccacggggagttttcagcccttacccctgagtctccccctccccgctgctcggggtcagacctgggttcccgtggcctcgggccccggggctcagcacggacagactcgcaccagcgtttccagccaacagcaggccctggcgccctcaagcccgcgtcccctgagccccgagacccaaggtgctatcctgcagacccccccgtctactcggaagcctgggccctgggccttcggtggcaccaagcgaggtgttgctttttaaaccaaaaaaccaaaccaaaaccaaccccaagctcttcttccttaggagagtgattggttctacgttttactgaaaaccctctttatgtgttagttttctgattccttgtgtttgctccctgtgtccccgtcagccccttttccagaataaaggtgttcattcctccaaaaaaaaaaaaaaaaaaaaaaaaaaaaaaaaaaaaaaaaaaaaaaaaaaaaaaa

SEQ ID NO: 9324 - DNA, 546 bp, Canis familiaris
tgtgagttgtacggcgctggatgaccctggtcccagactggctcgtgggaagccccccacctccaccccgacgactggctctactttggggtctacctggtatttttcaacagcggtgtgggttctgatcccaggactgttatttgtgtcacatcgtgggtggaactcacagacgatgtcattacggccggagcacgctcacggaagaagctgcagtgacgcctccgagtcgcagcgctgctgtcctcggggagcggggagccccgcgggtccaggccctcgtgtggcggcctagcgctccacgtgccgtcgcctcccacgcctgctcctaaacacgcctgtttcccattgatcggtcggtggccagtttttgttattgttgtttttgttcttatttccattcagtgacccgtgcggggaaccgagaatcccttttagcttgtaataataacccctttccttacgtgttctgaggctagctcgagttgtccccgccgccaataaagcccattatccagaaaaaaaaaaaaaaaaaaaaaaaaaaaa

SEQ ID NO: 9325 - DNA, 363 bp, Canis familiaris
gccccttatgtgcggcccagatgctgccccaaagatcacgcccacaattggagggttgctgccagggcacaccaatggtgcctctctggttgcccatcagtttcccctggccattgtccagcccccttgggagcgtgtatactcagggctccttggaaacacccataggttagccacgggagaaaccccaacgtgcgggccaccattgatctgagcctctgtaggccaggcatgttcctgggaagcccctggaggctggaaccctccagcttccttagagccagagcccctcccctcctctctctgcaggctgccctcctcttccctcgggttcccacctttgccctttcgtctccagctgat

SEQ ID NO: 9326 - DNA, 594 bp, Canis familiaris
  misc_feature (219)..(219): n comprises a, c, g, or t, or includes no nucleotide
caccccccaggttttgtctcttccgtcatctgcaagggagggactgtggatggagtgggagaaccagttaggagtgccagccaatggaaccgccgggagctcactgataggaggatcctggcatctagagcctttgacctctctatctactcctttcagtgtcacccccctggccgaggcgttgcagctctgcgccttaagtcaccccctgggcatccntgggccttttttggactgcatagctgccacatagtgcacttgttccccgctgtggcccccagccctggagctgtaggaggttctgtgccccgactgtggcctgcagcccttgacctgtggagaaccttttgtgcccccgtggctatccttcgccagcatcatcaggaagatgggaaaggtcaggcagagttttctgccctaccaaggatagaagataaaggaaggcaccatgttttcatgaatttaccatatatctttgttttcttccaagaaaaagttgaggccacgtcatctgctccatgttgagtggtttattccaaataaagtttctgattataaaaaaaaaaaaaaaaaaaataaaaaaaaaaaaaaaaa

SEQ ID NO: 9327 - DNA, 585 bp, Canis familiaris
aagctgtggaaggatttgcaagaacctaccatcccagactccgatgttagtatttacttaccagcccttgaagacgatgaagagcatcgtggaaaaatgaagaacatcagcaatcaccttatcatggaagcgaacctcagcggagagttgaacttgaaaatagaaacagaactagtgtgtgtcacaactcacttcaaagaccttgggaaccctccgcccgcctctgaagacgcgtctcaggagagaccccccgagcagatggctgaagtgcacatagacatccggaagctcctgcagttcctcgctggacagcaagtgaaccctacgagggctgtgtgcaacctcgtcagtaaccagattatccactttgatttgctccacgaggacgtttccctgcagtacttcatcccagccctatcatataccggtccctgcccgggagctcggggctgcgccgtgctggccgtgggccatgtgtagagccatgaaagtctgtgcattttacttcttcagaaattttctggctaaaagttgggttaatgaaagacagttggataaacatactacattttaaaaaaaaaaaaa

SEQ ID NO: 9328 - DNA, 603 bp, Canis familiaris
ggagaaccgagaagtggcccccaccaagaggcatgtgatgatgaagatgtgagtaagagatatgggggcttcatgagagccttaaagagaagcccccaactggaagaagaagcccaagagcttcagaagcggtatgggggcttcatgagaagagtcggtcgccccgagtggtggatggactaccagaaaaggtatgggggtttcctcaagcgcttgccgactctctgccctctgacgaagaaggcgaaagctactccacagaagttcctgagatggagaaaagatatggagggtttatgagattttaaccccattggccgccagtgaccccaggccccagccagccttcctctgccccctggtcaatcgtgtcttactatcgcgcactgcttgcattgtagagctgactgtattatctggataacttaactatacacctgaaagtgctcacttcaggtcctgtgttctcttgacagtgtttatgctcagtattggtctattgcagctgtgtcattttcatgctacatcgctgttgttccttgtccctttatttttgacaagcaccagtaattgcttatttgtaaatagatccataaacccatt

SEQ ID NO: 9329 - DNA, 568 bp, Canis familiaris
ctgctgctcaactgctacaaccaagctcaaggacagctcaaagctagaggagttcatcaagacaaagagtgagagtgaagtccactttgatgtggagacagccatcaaggttctccggcaggctggctactactcccatgccctctacttggctgagaaccatgcacatcatgagtggtacttaaagatccagctagaggacatcaagaattatcaggaagccctacggtacatcggcaagctgccttttgagcaggcagagagcaacatgaaacgctatggcaagatcctcatgcaccatataccagagcagacgacccagttgctgaagggactctgtacagactatcagcctagccttgaatgccgaggcgatagagaggctcctggatgcagggccaactcagaggagttcatccccatcttcgccaacaaccctcgagagttgaaagccttcctggaacacatgagtgaagtacagcctgactcaccgcagggcatctatgatacgctcctggagctacggttgcagaactgggcccatgagaaagatccacaggtcaagaga

SEQ ID NO: 9330 - DNA, 590 bp, Canis familiaris
agtcagacccagaaggacacacactgtgtgattccactttgtacacatttcaaacagaccaaatccatgtctggtattgaagtcagggtggtggttactcttaggctggttgtggggaggctttggaggggctctcctcattctgttgtttgatctggttatataggtgtgttcagttttttgaaagttcatgaactgtcatcatttatcatacatgctcttcacttgaaatttttaaaaacctataagcacataaaaccactactatgcattttgtaagcattctcaatatttaaggatgtctatcagagagttatggtgaggtcagaattgagcagggggagagagagggaggaaaaggagaaaatagttcaaatgagagaggatccttacagactacctcctgacagtgtgctaagaactgagcagtgggggcagcccctgtggtgcagtggtttagcgccgcctgcagcctggggtgtgatcctggagaccccggatcagtcccagtcgggcttcctgtatggggcctgcatctctctctgcctgtgtctctgcctctctctctctctctctctctgtgtctctat

SEQ ID NO: 9331 - DNA, 653 bp, Canis familiaris
aaggcacccatgagtagggtgcacggtccctactgcctgatgaggtcggactcctgtgccgcctccagcgtcatcacagtgctcgggattgaccgggttctggttccttaggggccagacttgtgcacagagagtctggtttgtttcctgccgtcggaggtgccctgctcctcccaggaaagcatgcaccggggcaacagatacaccaccgaaaggctactcatgtgggctaagctgcttgccgaagcgtaagggataccagatgggccgggggagcccaggtggcttcaagggtatccgtagttttttcttactctgttcacgtcctcatgcgtgggaccccagggtatctccgtctcccctacggtccatataagcacattcatatattgtacagtaatccacttccttcgtagtgttagcccttgaacgatgcaggggttagaaactcgaacctccccagagatgaaaatccacgtagaacctttgactccattcagccttttgttgactggaagctttgctgatatcgtgaacagacgattgacacatattgtgtatgttatatgtattatatgctgtattatccttgaggtggagaaaaaattaaaattataaaataccaaaaaaaaaaaaaaaaaaaaaaaaaaaaa

SEQ ID NO: 9332 - DNA, 603 bp, Canis familiaris
taattattaacaaggtgtgtaaggaggggacttttaaaagtaggttaaattactatatgtgtgaattattataaacaagctctcctgggttattgtttgagctacccaatatgtcctgaagtgtacatctctcattaggcctattagacatttctactagtatggctttttaaaaaaaaaatatgtcttatttatactaaagagttaaacactaactggattctacctttcttcgtaagtgtcttctatattgggtttatcctcccatatatatcctggatattggacagtgtctacctactccacaagcctagaagctggaaatcagtgaagatgatttctgcttcctttttccacatatcccattatttttagtacctcatgtctttggtatttatctcctcttcattcctactgctaccatgtaagtttatactcatttgtcactcacttggactgcaacagtagcctctactgtcttacatccctccagtcaatgatgctaccagagtaacctttctaaagctctaatctgacttgttgcaaaataaataaataaataaataaataaataaataaataaataaataaataaataaattt

SEQ ID NO: 9333 - DNA, 648 bp, Canis familiaris
  misc_feature (533)..(533): n comprises a, c, g, or t, or includes no nucleotide
ggacacagagagaggcagagatacaggcagaggaagaagcaggctacctgcctggagcctgttgcgagacttggagggctactctcctccataccacctgggaatcacgacctgagccaaagacagatgctgcactgttgagtcacccaggtgccctcacatgtgggctaaaaaccaaaagaaaaacctaagcccgtagctaacagcacagtgctaggtgccacggggtggagtgggtggatgaaatgggtgaaggtggcccaaagggaacagacttctggttataaaataaattatgggaatataatacacaccaccggtgcctatagttaataatactgtaatgcatatttaaaagttactgagagtaaatcttagtttaccaaaacttttgagaaaaagatttttataactatcgtgacagatgttaactatacttattgtggtgcttttttgcaatacataacaacttttgaatcatgtccacctgaaactgatataatagtgtatgtcaattatacccttccccccanagtaacacttaaatttctatactgtggcctgtttccgtttcaaattctgcttcttagttcaatgagagtgacctatccatgctaatatgtgaataaacatattcatctgcacttt

SEQ ID NO: 9334 - DNA, 568 bp, Canis familiaris
aggcacccatgtcccctcaggcgggtctgtcggtcccgtgtggtgccgctagcccagtgtgtcagaacatcagcagaggtgcattctcaggacccaggcgtccccaccgagcagacaggaaagcaaccgaaagtaccatcgcaaaaggagtataatatacttgctcagctctaagattattacttcacagaagccttataactctgcttcgtctaagaaaacaatcacccaaaacattttcatacgcccatagtatgttccagattaccgactgttaatacgtaggttagtgtaagcttcgctcctgctgcatttgtacaattaacagcttacaacacatgatgactagcagtgaccggtcgtctcacataacccaaaagcatggtttaattaaaacatgtttaacccgatgactgtgccttaggagctgatgccctctcacggaacatgcctgggttgtacccgcgggcggaggttgtaagtcacagtaacccaaatgatgttacggtggaggaagctctcctgcagaattattttaaagatattcttctgttccaaaaaaaaaaaa

SEQ ID NO: 9335 - DNA, 572 bp, Canis familiaris
gtctagctttgtgctctagggttcccagtgaatatttagggagatggtggaccttctttacagagctgacatgacacccacccctgggggctctgaccgaggtgggcccactttgtttgagttgcttacatactgtagttatttctgttaaggtttacttcctaggtgcctgaacggcctccagcatgtgacccttgccaccgttcatgtcatctgtgacagcaggaaaagaacagctgtgttcacggtgaagcgttaatgagaatatgtgtaggtcaggctgtttcagtagctgttggagttattcgttagccataaccacatttttttagttatttgttagcattaagccaaattgttttcccaattgttttcgttcttgtgatgaggctcagcaactctgtccaacaaattttagttttgcttagaaatcgccaagtagtccccaaagattttagagggaactgataatgatggcaaaagaaaatttgcagtcacacatttgcttgttacagttccttttctccaaaattttatttttggtaatctaaataaagtgttgcctctcttgt

SEQ ID NO: 9336 - DNA, 586 bp, Canis familiaris
atctgccgtccttttaagatgccaggtctccttgtgtcccggcttgatggacatccgggttgttttctcggatgttgcgattgactcccagttacattcctgtgatgacacccagtgctgatcccgtcaagtgccccccgccccctcagtatattcctcagccattagagacgaccgatacccaccatttgcttcgacgtggatggaactggagggtattatgctgagtgaagtgggctccacacccaacatgggccttgaactcaggatcctgagaccaagagtcaaaggctctaccagctgagccagccaggcacccctatattttctattcatatcctttatcagatatgggtgttgtaaacacttcttcacaggatgtggcttctgtgtttaaaataatggtgctgaggatccgtgggtggctccagggtttagtgcctgcctttggcccagggtgtgatcctggagcctcgggattgagtaccacatcaggctccctgcatggagcctgcttctccctctgcctgtgtctctgcctctctctgtgtctcacgaataaatagataaaatcttaaaaaaaata

SEQ ID NO: 9337 - DNA, 603 bp, Canis familiaris
ccatcaaggtttcacgttaagagtccatacagggcctgttaagagaaaaacttggcaatcacacatctgataaaggaattgtatccagggtaactgggtggctcagtcagtaagtgtttaccttaggctcaggtcatgatcccagggtcctgggatggaggccaggctcactgctcagccagggagtctgtttctccctccctctctgcccttgccccagctcatgatctctttctctcaaataaatagaatccaaaaaaaaaaaaaaaggatcgtatccagaatatataaagaaatctccaaattcaatagtaaaaccaacagcccgaataaaaataaaccaatgatttgaatagaccataaaatggtgcagttgctttggaagacacgtggcagcttctttaaaaaagccaatgttcatttatcatataacccagctattcttctcaggtactcgccccagagccatgaaaatatgtgtccctgccaagacatggacacccatgcgcataggcgctttgtgatagcccccaactggaaacaaccaatgtccatccaaaggtgaggggatgaaaaaaaaataaaaataaataaaaataaata

SEQ ID NO: 9338 - DNA, 590 bp, Canis familiaris
tcatggacgtgtcagcacattaaggaataaaaagtaatgaagagttcacataaaactttggtatgtccctactgaaagaaagaaacatgctcctaactctagagcaggaggccaagcggcagagattgcccatgccaagtccggagcggttagaaaaggtaatagattccatggatgcattagataaagttgtccaggaaagagaagatgccctaagacttcttcagactggtcaagaaaaagctagacctggtgcttggagaagagacatctttggaagaatcatctggcacaaattcaagcagtggcctataccttggtacctaaataaaagataccataggaaacgattctttgcaatgccctatgtggaacgtctttgtcagcactgagacttgagagacatgcccccactgtggcgcgagagagaagagttatagagaaaaagaaagaaaaatttcttcaggaaaagtttccacatctttctgaagcccagaagtcaagtcaagtctaagatgtctgagttcaagttgcccttttgttttccttggataacagtctatatacaaaagtaaatatgtattaattta

SEQ ID NO: 9339 - DNA, 608 bp, Canis familiaris
gcgggggcaggaggggcaacagccgccagcgcaggcctgtgtccctagaggtgcgtggggttctccagagaagggtccgtcttagtcatgtgcaagaccacggtgggggccttgtagtggcagtgggtgccacggccatagcccccggaagcccggcaggcctttgcccgggcccggccggctgccatcttgcggtggcacaagctctgccaggtctggaaagtcttggagctccaaacccagacgccgctggtgatccccaccaccagcgacatgaagatcttaagcataaagacggccacggtgggcaccgagccccccgggagcgagcagtccctccggcccccgggcaccgtggctgccaggcagggctgctctgtggcccgaaggcgccagaagtccatgttgaggcgttcatagacgtagcacacaatgacgcaggtggcaggcaccgtgtagaggatggagaagaccccgatcttgaccatgagcttctccagcttctccgtgttggtgccacctgtcttcatgatcttgcggatgtggaagagggccacgaagccggtcaggaggaagctggtgcccagcaccaggtagcaggagagggg

SEQ ID NO: 9340 - DNA, 543 bp, Canis familiaris
acttcattctttttttggactcttacatgtacttgatacttggttttccatgctggcgaaggcaggaacaaatgtggcttaagtggtttttctgtccagaaatatggcagatcctctagtatgacctgccttcaactttgggcatggaagaaggggaggggagtttccagtgaaaaagaagcaaaatgccttatgcagctcgatctgacttcatggcatttgtatattctgtagctccagttttctaaaaactaacgtttttcatttgacccaagatgggtacttggatgtttggtttatttttccaagtgaggtgtaatgttagactataaaggctgggactcaggtaactttccccagttggaactgaactttctcatcaaagagtggacttcattcgcaatgttcccaaatttgtagttgatttagaagaaattcagggtctagaaaaaaacctcgaacaagaaaaatagttcaataaaatgtggattttctttcttccccttaaaacctacaaaaaaaaaaaaaaaaaaaaaaaaaaaa

SEQ ID NO: 9341 - DNA, 603 bp, Canis familiaris
aagatggtgcggacactccttggcagtcccatctcccctgcccaccagaacccatcccccaactctggctgcggtccagttggtacctaagcaccaaaagcctcaagctggattcggtcataccatctctgagcccccttgcccgccacctcttccccacttctggggacaccttcggattggaagacccccattgggaacagccctcttgctcttgtggaattcatccattcatctgtccatccgtccatccctccttgtccccagttgaccacccagcaccactagctggctgggtgccccctaccatcaacctggttaccctgtcctggcggccgtgtaccctgcctccaaccccccccacacacccctacgatggggcctgagcacccagggtgtgaggagctatgctagctggggtggcaggaatctcctccccaacctgggtcccccccatgcagtactgtatcccccatccctccctggaaccactgaacttcagagcatctcccacccctgccccgcccatctctttgtgtctcgctgtgatagatcaataaatattttattttttgtcctggaaaaaaaaaaaaaaaaaaaaag

SEQ ID NO: 9342 - DNA, 566 bp, Canis familiaris
acgtcaatgggatttgttttggcaccaaatcacgggactgtccaaatgtcgtaacaactccgccccattgacgcaaatggtcggtaggcgtgttacggtgggaggtctatataagtcagagctcgtttagtgaaccgtcagatcgcctggagacgccatccacgctgttttgacctccatagaagacaccgggaccgatccagcctccggacttctagcctaggccgcgggacggataacaatttcacacaggaaacagctatgaccattaggcctatttaggtgacactatagaacaagtttgtacaaaaaagcaggctggtaccggtccggaattcccgggatccctggaggaggtgtgaaggggaccggccaggcgtccttcatgcagaaggacagtgagcagtggtgtgccagatcgtgtgactctgcccctggaagtactgtgtttttaaaaacatgtcacggggtttaaatggtcatgatctaacctgtcaaaaaaaaaaaaaaaaaaaaaaaaaaaaaaaaaaaaaaaaaaaaaaaaaaaaaaaaaaaaaaaaaaaaaa

SEQ ID NO: 9343 - DNA, 599 bp, Canis familiaris
agatttgtaaagtgtaaaacaagtattttgtattgtatgtaatttcacgtgttaaaaaatagtttttaaaacttcagaagtggttctcttgtatgaaatcagactttcagtcactgacaatattgttgctattatcacaggaagttctgagaactactaatagtgatgggcagattgattctctgggaagcttctcctactagtaaaatgctgtcttgtctcctttcaatgttcctgagttcacttagaaggtttgtattaaaatcctatatacatgcacagcactactactgaataagcactctctagtgctcaggcatggtgggcctttgcctgggcgactgtttgggccagtctgagtgaactgggggccaggtaaacacagcctcactgagcctatttacacattccttcttgagagtcaaagaggttaaaaaaaaagatgggaggaggcaatgggagcacttctcaccaaatgttcttgctcccttgttgaaatatgttgctggggtttcattgtcccttccccctctgccagaaagatgtgtggcattatccttttaattcatgttattaacggagcaataataaaattgaca

SEQ ID NO: 9344 - DNA, 559 bp, Canis familiaris
agtgagaaagagttaagaggtggaatcatagcttgtttcaggtgtgatgtaggcagtttcactggtcatgtatacctggtagtataatgtacctgaaagaatgttggccgctgagccgttgcacacatgccaatctgatcttttaattcctggagtgcacttcagagtcttagtaaagagaagggagagaccagtggctgtgtttcagatgatcagtcctgaaacaggccagagccaggacccccaggatgtttgtacggttgagacaaatggcccaggtatattttgtacattagttatgatctgtgttcatttttctttctccttcgccaagtttatgtagacacaggcatggaatgcagttccatttttcacccctagaattgatctattttctgattgcttcccgtgtctctggtattctcgttatgtcctcagaacctgtttttgccctgtatatgcaaattgtatgtttataggtgaaatgttaatgcattaaatgattaaccttaaagcataaaaaaaaaaaaaaaaaaaaaaaaaaaaataaaaaaaaaaa

SEQ ID NO: 9345 - DNA, 554 bp, Canis familiaris
agccagctggacctgtcgacaacttaatgttgtatgacagttggttgaattttgtgggggagttgtctaatggtcatacaatatagagtacagttggaaacctgaagaatgaaagtttgtaggcgtttattgttttccttaaggggaatggactattgctctcatgtgtaattttctccagttgaaaatctgttcgttaaagtttaccagctgttcttttcccctgaaccccgcccccagattctagggacacatttaataacatataattctcatatactgtttgtagtgttttaatcttggtatttttctcacgtaaaaatattatgattgtgccataggcatgacttcatttttgttgtactttttgttccgtcgtggttaaggaaaggcatcttctttggtacatgagctagtttattttgtaggagaaatgaaaatgattaatcccaaatgattctcttataaactatttgtaaacatcacttattcgttagtatttgacttaattaaaaatatttattttgaatcagtcctttcattacaaaaaaaga

SEQ ID NO: 9346 - DNA, 674 bp, Canis familiaris
atggtacgtttcttccccgcacctcatgtgacaagccattgtgagactgatgtttaaactgttcacttggctttaatctaagcacatctgttctgggtgcatttgcttgttttcttcatgcctgtacttactgtctttaccccatgataccgattggcaccagagatgtcggataatcttttttgtcttgttctttaaaagaaatacaagaaactgaccattgataaagtcagtggccatcaacgaagaatgtccttcctttatttttgcagggttttgctcacctctaccgtaatgataatctgatgttaaagaccaaataacccatagaaagcatatttcttggccttggtctatgggatgtcagcaaggcctctatcacagtccgcacatataaatggtggtgaaataaaggaataatctacaatattcttacttgaaatgtaaataagttatttctttgatgaatttggaacgctagtatacatcccacattaagctgttgaacacagggtaatcatagttcctctgccaagtctggaaagaccatctcatgactaccactgcgatgggctgctgactatatttgtgcatttccttttatatttacttttgttcttgctggaggcccagtgtaccccagagcagatgtcaataaatgcacatttggtaaa

SEQ ID NO: 9347 - DNA, 470 bp, Canis familiaris
gtgatgcagagaattgctcaacaagagtaggagagttacagaccgttttcaaatgcatgtccacctggaacttgtgaccttatgttggaagtaggtccttgcagatgcgaacgcaagttaagatgcagtgattgaattaggatggattatatataatccagtagctgatactcttataagaagagggaaatttggtcatagagtcatagggtgaaagccatgtgaagaagtaaagacacagaggaggagaagctggttgtgaatgtgcaagcagagattgtaatgacgtaggtagcaagccgagagacaccaaggattgccagcaaccaccagcaactacaggaagcaaggaagagttctttcatagactcctttggaggaggcatgatcctgttgatacctgaattttggactttcaccctctggaactgtgagaataaatgtctattgttcaaagccaaaaaaaaaaa

SEQ ID NO: 9348 - DNA, 560 bp, Canis familiaris
caaccaagccttcgggtgcaaacgtacggtcaccgcccagatcctgtaaaggccctcaccaattgcgcccaacaccgacgttcacacgtgtgcaagtgcatgatcgatcaggcacatcaagaagtacggccaatccggcagattttatacctcggagacctgctggagacctgccacttccaggccttctggcaagccctggatgaaaacatggacctcctggaaggtataactggcttcgaagactctgtccgaaaatttatctgccacgttgtgggcatcacttatcagcacattgatcgctggctgctggctgagatgctcggggatctaacagacagccagctaaaagtgtggatgagcaagtacggctggagcgcagatgagtcaggccagatcttcatctgtagccaagaggagagcatcaagcccaagaacatcgtggagaagatcgactttgacagtgtgtccagcattatggcctcctcccagtaacctggcaggtgtttaataaagatttgttgatttaaaaaaaaaaaaaaaaaaaaaaaaaaaaaaaa

SEQ ID NO: 9349 - DNA, 576 bp, Canis familiaris
tggagcgctacctccaaaggtggtcctgagggtcctgttcccttgtccgctacatcctgcagggcttctttccgccctagcgagactgtcatcagtcgctcccaaaactgtcctggatgaccacacgctggaccctctttgcaggcaaaatctcttccctgctgcaccttgtgcatcttgggagctgaggaaccgacaggcctcttcctagcgccgaggctgctggaacacacaggtttccccgtctgcggcgtgacgtgctggtggccaggtgcatgtccagggttgctgggacactcacaccccaatgccggcaccacgtgaccctgcaccccttgacttggagccagcggctgaggcggaggcagtgcggctccgctgaacccagccctgggtcggcaccagccaggtcagaagggacctgggcaaggtgccacaagtggctgaagctgccagccggcaagaggtgagggccgccagcctggacgcaccatctgccgccacaggacccccccgccaccccgagcaggaataaaggtgtgagctgctaaaaaaaaaaaaaaaaaaaaaaaaaaa

SEQ ID NO: 9350 - DNA, 640 bp, Canis familiaris
tattacctcaagcgactcatacgaccattagaatttccacatgttctgtagcttagagtgctcacttactacctctggacgatactcacgctgtagtttgtctcgttcgtaccttttgtgcatcttgtaatttactctttgtttccttcataaaatgtaatgtgacattgtaatctgtttaaaagaagaatcagggttgcatttgcaacttttaaaaaaccgagagtggaaacattgggtcttcaatgaacacaggatcagtagaactgttgtaaatactgagaaagcattttgaatgttcttcatcttattactaatccatgcaagaaaagaaaaaaaaaaaaaagcggcgccgattgtgatgcattcaaagtccagtattcggtactgtatatttcaccctgtgtgctggggccccctctccttcctctctttttgtattgtatgcgattctgaaactgattgagtcatgaaaataatttgtggcggtgattctaatgtattaaaactgtttcgtgttcctttctaactggattacacccctggattgaaaaagtcttcctcgtggtagctctatgtagtttcaaacatgaataaactttttgctttcatgattaaaaaaaaaaaaaaaaaaaaaaaa

SEQ ID NO: 9351 - DNA, 655 bp, Canis familiaris
cacatatgcctgttctgaaggatgtctgcccgggtacatcaccgggtcagttggggccaagacttatgatcgagtaccggtcacagaagacttcgcgcctccccatcaatgaccattgcgcccatgggacatagggagggcccgagcaggaatttggtgtggacatctgggcctgtctgcgttctttgtataaaacctcggacccacgacgacacgatccattgccaatccagaggacccaagtactttccagtcccagtcactctagggctctgcactgaatggctgacctgacctgatgtccattcatcccacccgcgtcacagtgtggacttttctcccctgctgttctaagagacctgaactgggcagactgcaaaataaaatctcggtgttctatttatttattgtcttcctgtaagacctttgggtcgaggcagaggcaggaaactaactggtgtgagtcaaacgccccctgagtgactgtccccagcccaggcaagaagatctcccttcaggtgccgggcgcaggaactgcgtgtgtcctacacaatggtgctattctgtgtcaaacacctctgtattttttaaaacatcaattgatattaaaaacaaaaaaattattggaaagtaaaaaaaaaaaaaaaaaaaaaaa

SEQ ID NO: 9352 - DNA, 523 bp, Canis familiaris
ctctgtccccaagaccccctcagaaacaggactctcatgccagagcctttgcacaggtgccaaggggaggcgttgaagcttccagaatggccaccagtcacctgtgtgagggtcaggctcagatcgtcggcttagagagacaccatgggggctcctgcccatggtgatagccacacgcacagccccaaggactgcagggctcgccttgcgtgtgatgccaggacgcgccaggggctggggccatggggcagtgctgcccagactggcgccccaggagcccccagcgtgccgccgaggggccccctgacctgctcacccccccacgacgggggccgaaaggctctcgggggcttcagccccacacggggatgagagaagcagctcacagctcacacgaaagagaggcaaagtgcctgatatatttttatatatctaacagatggtgcatgttctctccagtctgattaacaaagaaataacttaaaaacttgactgatattatcttaataaaatgtgcaaacct

SEQ ID NO: 9353 - DNA, 564 bp, Canis familiaris
catgtggttggaccctggaatccgaaaccagttgatcacagggagccggtgtttgttgggggtgttccagagtctctgctgaccccacgcctggcccccggccggcccttcactggctgcatccgtcactttgtgattgacgggcgcccggtgagcttcagcaaggcggccctggtcagcggcgccgtgagcatcaactcctgcccggcagcctgagcccgcagagttgcttgtgcaaaggtcctgggagcgctgtccgtgcaaaggtcctgggagcactgcccgggaggcgaagccagccgggatgggcagcttttcctcgctgccagagctgtcatctggttgagcaggacttaggtgcatcatcagagactggcagtttattatttctcatgtggattcttacctcggatcccaaatctctgcagtgaacaacacccaaaggagcgttacgcttacttgcattgtattatttcctgctggtgagattaccattcctgtttctaataaactagaagggattctaaataaatggcacactggcacacatttctaagtaaaaaa

SEQ ID NO: 9354 - DNA, 659 bp, Canis familiaris
tcttggcctttcagagttgctacaaagtttggaccagatagttcccagctacttcagggggaaagaaaggcgtgctttttattgatgtatagagctagtgtaggggctctcccaaccagtctgaacctctcactggcattccttggccctggtgtccaaacgaacacagggccctatgaacacaggtatattccaaacatattcaacatcttgatctttccagtgcagtttgtctttcttacatttgtcaattcttgctactccagagaggggaacttttgaatgcttgttaactctttcaggtaacaagaattccattgacaaataaactggtctgggaaactgagtaagccctttgcctgtcctggaagggctgctgtgcactgtgaaatgtctaatgttgctatcaagaaacatcagttgggagaattggatgtggcatttttcagatatatcatagtgggctaagttatggtgacgaaggacaatatttctgtccaacgtagaaatgctggttagtgtcaggttagccctggagcagagaaagatcaaatgcacatggggatgggaaacactattgactgagtacaaggcagcacttattgatccctgttaatgtggtcagtgtagctcaaagaccctacaggaaaagcttaaga

SEQ ID NO: 9355 - DNA, 604 bp, Canis familiaris
ccaaaggaggttgaaattcttagaagtttggcataataattaagtcaatatcaaaatgttttttctaaggtttttcaaacgtgtaaagcaaaagaaagttgttatttaggcacaaagaatcacaagtgtctcagtgataatttcagaaacatctaaccttgatttgactcttccgtgttcatgctttcttcagctgcagtctctgacatttcttcatcttcctcttcatcatgtaggtcttttgaaattaattgtctagctaatttaagtattcagtccttcattgtagtgaagcttccttttcatgttcaaactgtcgctttttttctacaagatacaaaaagtaggcttaggaaatagctcaatgattagcaaactacagcctgcatctgtttggtaaataaactattattgggggcaactgaatggctcagtcgattaagcatctgctgtcagctcaggtcatgatcccagggtcatgggatagagccccacatcaggctttttgctcactgaggagtctgcttttccctctgtctctccccaccactcatgctctctcttcctctctctctctcccaaataaataaaatcgtaaaaaaaa

SEQ ID NO: 9356 - DNA, 645 bp, Canis familiaris
tgaagtattcagaacagaggaggaggaaaaaaataagatctcagggacaagatgttacatcatcagtatatttcatgaagcaaacaatcagcaatgcctgtggaacaattggactgatccatgctattgccaacaataaagacaagatgcacttcgaatctggatcaaccttgaaaaaattcctggaggaatctgtgtcaatgagccctgaagaacgagccagatacctagagaactatgacgctattcgagtcactcatgagaccagtgcccatgaaggtcagactgaggcaccaagtatagatgaaaaagtagatcttcattttattgcattagttcatgtagatgggcatctctatgaattagatggacggaaaccatttccaattaaccatggggaaactagtgatgaaactttattagaggatgccatagaagtttgcaagaagtttatggaacgtgaccctgatgaattgaggttcaatgcaattgctctatctgcagcatagcttgtcagtaaatggaaacaccaaatactgtattatttgcaacaaaaattacatttctgctgccatacactaactcaaaaattttgatattttcattaacttgactgattaaactttatgtgaattaaaaaaaaaa

SEQ ID NO: 9357 - DNA, 608 bp, Canis familiaris
ccactctcttctgtcactgatgatgacacagcatgaccacttacttgggagtggaacctgtccattaagaaggaggtggacagaatgagtgcatgtgcccatcccgtgtgtccgtagcgctgccacccagaagtacctctcagtcatgttcactaccccatccctccgccgccattcacagctggatcccttcctcaatgctccgccacgtttcgtgttatcaatgtatcttaaggcaccatgtgctctcaaagtgttcactagcacaagatgcttgagacccagactttaatccgtgcccagttcgcttctggtcccccatcatgaccagatcttcaaaattcttcatttcaatacccagtcatttaatagttccttctatttttcccatttgagcaactagaggccaggaaataggcaaactagtcactaacagtccttttgccttgggttccagtagctcattcccaaccctggattcttctgtggttgctgctggctcaatgaaggtccctaatcacattccctaccagttggggttcttcttttctgggagacactgtaaagagcacaagagagtaaataaaacagttgtatgatcaaaaaaa

SEQ ID NO: 9358 - DNA, 612 bp, Canis familiaris
cagcaccactgatggtgaaagatctagtagttacaaccttcagggcgtacaggagcatcaatgacctcgtgaagaagtacagcttttcccgagctcttgtccggccttctggtacagaagatatcgtccgagtatatgcagaaagcagactcacaggaaaaatgcagataggcgttgcacacgcagtgagcctgggcagtatttcagctggctggaggagttggagaaccaccccaaccaggtttctgaagacaatttttatattcatgagaaactggatttttaaaaagtttttacaaaataatagtactcccattattgtgacaggttcaaacccatttgtaatcataatgtttacagtgcatcttactagattgtgcttctaaaactgattatttttcttaaacagctacgcacagtaattgtttagaagtaggtaagacttgttaaatttagtttttaaaaagtaaaacgttacctaatttcaatctcattaatgtaaagtggggcttcactctgtggttcaattatcaactttataatacatgcagggaaaattcacgagggctgctggaaaattaaaccttattatcagctaaaaaaaaaaaaaaa

SEQ ID NO: 9359 - DNA, 642 bp, Canis familiaris
tcctgctgtgaaggtcttcctgactggctgcgggccaacctgacctcatcgttgtgtgtgcacagagctctcaagtctgtggaatcgcctgtctgtgttgctgaacctgttgccagctgctggtgagctccaagagtctggcctggccctgtgtcccgaggtccaggacctacttgaaggttgtgaactgcctgacctgccctccagtctgctgctcccagaggacacggcccttcgtaacctgcctcccctccgggctgcccatagacgcttcaactttgacacagaccggcccctgcttaactccttagaggagtcagtcgtgcgcatctgctgcatccgcagctttggacacttcatcgcccacctgcagggcagcatcctgcagttcagcgcagaggctggcatctttgtcagcatcgcccagtctgagcaggagggcgtgctgcagcaggcccaggcgcagttccgcatggctcaggaagaggcccgtcggaacaggctgatgagagacatggcccagctgcgacttcagctcgaggtctctcagctggaagggagcctgcagcagcccaaggcccagtcagcaatgtctccttacctcgtcccggacacccaggccctctgccaccacctcccggt

SEQ ID NO: 9360 - DNA, 117 bp, Canis familiaris
tagcaaaagattccagagaaagacaaatccttgggtttcattcacttcctggtcaaatccatttgctgtaatccataggcagtctgtgaatcataagcatgccctgtttttccccat

SEQ ID NO: 9361 - DNA, 600 bp, Canis familiaris
tctggagcgggtgcacgtgattcagagggagcaggagcagagggagagggcaaaagcgggagcatgaggcccggagagcagcaaaaggcagctgcctcacaggcccgtggggccccggcgcccacacaccagagcctctctagagccctgtcctgagattcccagggaccatgcgcggcctcggccccctccgcctgcctgtcctcctaaagcaggccgtttatggtatcagagccacagtgttcaacgtcctaaggcagcgtgacttcccatgagatgctgagaaaggctgcagaactgtgagtggccagtggtcagaccgaagccccagctaaacaccttagatgcggtgcacccaaggtgtatggtggggtcagggatcgacgtttaacacagaaggtccctgatccgagggcacccgggaggctcagcggtggagcatctgcctttggctcagggcgtgacccccgggttccgagatggagtcccgtatcaggctccctacaggggcctgcttctccctctgcctgtgtctctgcctctctctgtgtatctctcatgaataaataaataaaatcttcaaaaacaaaaaaaaaaaaa

SEQ ID NO: 9362 - DNA, 688 bp, Canis familiaris
acattacattcatccatggggattggaagatcattcttgaacaccatttatcgccgggaagggccaaccattaattgggccacaagccattggcacttgcttcggcttactggctgggtgtctcgtcagttcatgtacttctcgcctaccttgtgcaacgcccagatcaccatgctccagatgctggcactgtatggctacaggcctctgttgggcactgcagttgtcctgttcatcacctataatatccacctccatgcccgtcttctacctcttctggttgctggtgggttgggctttcaaccctccgcatggtggcagtgctggtgtccaggactgtgggccccactcagcggctgcttctctgtggcaccctggctgccctgcacatgctcttcctgcgtgtatctgcattttgcctaccacaaggtggtggaggggatcctggacacgttggagggccccaacatcccgcccatgcagagggtccccagagacatccctgctgcactccctgctgctaggctctctgctactgtactcaacgccacagccaaggctgtcgcggtgaccctgcaatcacactgacccacactgagccaccttggctggcccccatccccccatctgcggagcagaggaagattaaagaacagtactgatgaaaaaaaaaaaaaaaaaaaaaaaa

SEQ ID NO: 9363 - DNA, 562 bp, Canis familiaris
cacctgcactgtctggagaggagatggggctcctacccagctggactgaaggcctcaggccaccccaggctctccagcttcctgcatggctggcaggggcactggtcatcacagcacacatggtgtcatccactgtgacaaggttctcagtggctttttcatataaaaggaaaggactatttaagctttccagtaataaaatgttctgaatatactgtttcaggataattaagagtcgctcacagcagcgtaacttccagcttctggtcatcactcacgatgtaagattttgtagagctcttaggccgctctgaatatgtggagaaattctacaggattaagaagaacatcgatcagtgctcagagattgtgacatgtaatgttagctccctgggttcttacgttcattaaaaatagtcaagattttgccttaaaaatacatgtcctcaggcaactgcttatttctggtatcaacttactcagtaggaaaatctgtcccctcagaggagctctgcatctagaatcattaaaattgttccacatgaaaaaaaaaaaaaaaaaa

SEQ ID NO: 9364 - DNA, 590 bp, Canis familiaris
cgcccgggagcaaatgcagccccgaggatttggctactgcatataacacaagggggcaaatcaagtacttcagggttgatttttatgaagccatggatgactacacatctgccatagaagtccaacccacttttgaagttccatattacaacagagggttgatattgtataggctgggctactttgatgatgctttggaagattttaagaaggtactaaacttaaatcctgaatttcaagatgctacactgagcttaagacagactattttagacacaagaagtaaacagaagaagaaattattgaaataaaattgactcatgatccttttaatacttgacatctcattgcttataacataaaataggtgttaagcaatttttttgtgttcagctattttgatttatatttgagataaagatattcatgcattagcactgagagttaaatgatatatttaaagtagttaatttcagattgagtaactgttgaataagtatgcttttcataaaatgtaaataatatcaatgcatagttgtatgttattacaataaaatatttaaagaaaaaaaaaaaaaaaaaaaaaaaaa

SEQ ID NO: 9365 - DNA, 507 bp, Canis familiaris
gatcattattagcaataagttccgtcgatgattggatgagaagtatagtacgagaagttaaagaggagagtgtgtgtgtgaaatctgacgagttttaatcttggatatcaactgcttttaaaggtgcttcttctcctgtcttgtcatgtgctgaaatggtcaagattacccacatttgggaaggctttaaagacacatgttatggtgctaatgtactgttcacggtaggaaactccaggtcagaattgttgccttgcattcaaaacataaatgcacaccatctttccaaaaatttattgccgtgtcacttgcaggggactctctcctcccttgatcctgtaaaagtcaacaacaacaacaacaacaacaaaaaattatggggctgcttttgtcacagtaacacagagaatgtgctgaaatttaactttgtaagcttgtatgtggttgttggtctttttttttttttcctccagacacccataataaaatatcataataaaaaaaaaa

SEQ ID NO: 9366 - DNA, 607 bp, Canis familiaris
cttccagggttattgcatttggattaggcctttctgaaggagtttcagatattctgatagacgtgtgaaggaaacagtctggacagctcctcctgacacactttgtgggggtccctgtataaatccatgctcacagctgctcctagagggagggcccaggccttggtcagaggggtggaaccaaccaattcctccttgctttgctttccgctcagcttctcctgtgtgattgaggggggtcagtgcttaaggaagaggtggttttaatttattaattgttttgaggacaactgtaagagggtgtagtggggcccggctaccccacaaatggtaaccctggtggttgctgcatccctcccctctgctactggctagaggatctttgtggccaaggagctgctatagcctggggtggggccatgccctcctctccctctggccctctgccccatcctccaggggtacaggacagagcagggataaactggaggtgactgagcccctgtctggagagagaggcaagccctgttgacacaggtctttcctaaggccacaaggtccaggctggtggcccaggaccatcatgctactaccttaataaaaattc

SEQ ID NO: 9367 - DNA, 501 bp, Canis familiaris
ctgtactgtccaagtcagtccttgggtacagcgcaaggtcattcccatgctctatgtggaatttgtctgaagggtaaggagtcccacaagaaagggaaggctgaatcacttatacctgctcccagtgtgataacagtggccatccttcttgcctggatatgacaatggagcttgtttctatgattaagacctacccatggcaatgtatggagtgtaaaacttgcattatatgtggacagccccaccacgaagaagaaatgatgttctgtgatgtgtgtgacagaggttatcatactttttgtgtgggccttggtgctattccatcaggtcgctggatttgtgactgttgtcagcgagcccccccatctgcccaggaaagtgggcagaagggggaaaaacagcaagagggataagataaaatagctttctgaccccatattgtaatatggatataaatgatatatttggtgccatttatttacattctcattttatgcccca

SEQ ID NO: 9368 - DNA, 672 bp, Canis familiaris
  misc_feature (266)..(266): n comprises a, c, g, or t, or includes no nucleotide
cttcctgggtgggatcccaaaccgaagagtttcctaggaatgaagtcagggagaacacgtgaggagaaactgcgcttttcatatgatgcatcatcatgcttacgaatgttctgtgagaattccgtgcggaagaaagtcgctctccaccctcctgtggtggtgcacggccacctccgcaatgctgctgctgtcaccacagcacggacgagctggcctgcgcctgctccgaactgcccgccggacccctgccttcccgccctccttcnctggtcagaccctccccgtggggcagcccaggcccgtgaaggcctcctgtgcctccagccgccccccagccgcccgccaggtgctgccctggcagggcccacaccttggcttccgactctgcctggggcctcctggtttaatattctcctgtgtacacctgacctttggagcccctgcttctgaggcaccttctttgacctcacgttctcctcccaagccctgtgttcttcccctggtgacgccgtgctggggtcggcctgctgtgacaggtcctgtatccacgcctcattccacacactagccgtgggctggccacgggcaaggattatgcctcttcacctgtacgttactcaccatgcaaacctagagcctcgtactcagcaggtgttaaataaatgcatagca

SEQ ID NO: 9369 - DNA, 555 bp, Canis familiaris
agagacactgtatctcaggttggccataagactgtggacttcgtgattgttgttgaacttctgggtcaaactcaaatgaggtgaattttgcctttaaagagttttattttgctaagaacccatttgaatagtcacgagagaatctataatagatgtcagtacaagtagttcatatagtttaaccatttagtttggggctctatattacttgattgagccttaaatctatgtggttttaatcacatggtttgttctttgaatggttgtctaatgctgtagataatctgtagctgaggactgtacctaccaacataaaggtgtggtatcaaacttcaggttgaaactgtttgaagcattataaacattcatttcactactagattgtataaggatattggctgtgatgagactcactgcgttaattttttcagtagtgaaattaaatccccattccattcaacaggcacatgttgaaagagcattgtcgttggtgttaatgggggtatgtgtttccttcattgtatttgggccttttgtattgcactcttgatatta

SEQ ID NO: 9370 - DNA, 352 bp, Canis familiaris
aacttttcactgtcacccaggtgccatctgcctctttcaagaaacagcctgccttggctgccatttgttgcccaactcccagagtatggaggagacccaaggggtcccacacctggagaatctggagagtttgggaggagaactgagctcgataccaaaggagacactgctgtaaggaagaaaccattatctagtccaggagagcatcctccacctgtcatccgctgtgtgagtggatttgtggaggcccgagtggcagccaatctctgtggcttctgttgaacttcctgagtgtcacttccccacactcacagtgattctgtctggcttgtatttgcactttggtaaaagt

SEQ ID NO: 9371 - DNA, 573 bp, Canis familiaris
ggggaatgacagccagtgtcaacgtggagctgatcacacctggctgcacgagagccgccgcaggtccagacctgctggaaagtctgccctcggacacccgccttgtcctcctcatgctgtctacctgagtgccaagtggaatgaccacatttgatccgaaggacctcttcgtggagcccttttaccctcgaatcctctgtgataaaagcgtttcatgatgaacagcaagaaataccctgtggcccatttcactgactcaactttgaaggccaaggtagggcagctgcagctctctcacaatctgagcttggtgatcatggtgccccagagcacgaaacactatctcgaagacctggagcaggctctcagccccattgtcttcaaggccatcatgaagaaactggagatgaccaagttccagcccactctcctgacgctgcctcgcatcaaagtgaagagcaaccaggacatgctgacagtcatggagaaactaaaattctttgactttctttatgacctcaacctgtgtgggctgaccgaagacatagatcttcaggtttctgcgatgcagca

SEQ ID NO: 9372 - DNA, 587 bp, Canis familiaris
  misc_feature (402)..(402): n comprises a, c, g, or t, or includes no nucleotide
ttgatacatttagaactcggaggaatagtacaacagttatgagccgtcataacctgttgctgtcatcctcccctaatcgtgttcctagtagccgactgcatcagatccaaagggaggaaggcatggatatgatgaacagggaaacagcacacgaacgggaagtgcagacagcaatgcagataagcccatcatgggatgagagcttgagcttgagtgacagcgattttgagaagccggagaaactatattctcctaaaaggattgacttcactccagtttctccggcaccgtcacccaccagaggatttggaaagcaatgtttttcaccatccttacaaatgtttgtgagcagcagtgggctgccaccaagtcctgttcctagtcccagacgctttgccaacnagaggagtcagagtccagtcaaatgtatcaggcccagtgttcttggtcccctgaaaagaaaaggtgaaatggagacggaaagccagcccaagaggctcttccaaggcactaccagtatgctgtctccggaggctgctcaactgtctgatctcagttcatggtaaaaaatgaaataaaaaaaaatg

SEQ ID NO: 9373 - DNA, 461 bp, Canis familiaris
  misc_feature (1)..(1): n comprises a, c, g, or t, or includes no nucleotide
naggctgtgaagtcctccacaggccccggggatgcatgctgctggaatgcactcttggcacacacggggacacagcatcacacggtgcggctgctgtggaaggacccccgctacgtgggttggaaggaccagacatcctaccgctggttcctgcagcatcggcccccagtgggctacatcagagtgcggttctacgagggtcctgagctggtggccgacagccacgtggtcctggacaccaccctgcggggtggccgcctgtggggtcttttgcttctccccagagaacatcatctgggcccatctgcgctaccggtgccatgacaccataccacgaggactatcgagactcagaggcttctgcaggcctagggatgggggtggggacccacttgctggaagatggcaccactcgtggctaccctcatctgcaacaaacacgggagcttggcacccggctc

SEQ ID NO: 9374 - DNA, 429 bp, Canis familiaris
aggcacacccccagggagaagcacaggcccgagacgacggcgatgaggagggggcttctgacgcacagtgaggaagagctggagcacagccaggacacagacgcggaggatggggccttgcagtaagcagcttgacaggagcgatggccaaccggcaggagaagggcgtgcactgtaccaggcctaaagctgggcacccacccctggagaccacccccggcaggtcccaggagagctggcagcaggcacctcctcccccacacatcccagcccgtgccacatcctctgcaggtggagttatcagcctcccgtccccacacgccctccctgttggcactgcccaggccagagggcagaacacagaggtttccccacactctacctcccctcccagaacactcccaggcttggagtttttctataggtttg

SEQ ID NO: 9375 - DNA, 545 bp, Canis familiaris
acttgctgattgcttatggaggttataaattgttccttagtgatggtcaagattctccgtccaccgtgattctgagtatcctccgaattccgatcattatgcagagattcaccgactcagcaggacaccccatccctcgggctttaagtctgaatacacaggaccacatggtgcaactttctggttttgccagtgctttcacaggacaacaaggatttgacacattcaggaccacgggttctggactgggcttgggaactggaggaatattaggatatttgtttggcagcaatagagcagcaacacccttttcagactcatggtactacccatctcatcctccttcctactccagcacatggaatagccgtgcttactcaccacttcggggaacctcgggtagctattcggcatcatcaagctcagagacaagaaccagaacagcgtcaggatatggtggtaccagaagacgataagaaagtaaacagttgaagtcaaacgctggaagcaaaatttctgatttttttcatcactttctttaaaaa

SEQ ID NO: 9376 - DNA, 568 bp, Canis familiaris
ggataggttctgtttattcgtatcagaagtatgtttcttgccagctttttctgagccttttaccactccgcctagcccctactccggaacttgggggttgctgacctcctaccggcattattcctcttgaccccttagaagtgcctctactcacacctcagtcctcctagcctccggagtatctattacttgagcccactcatagtttaatagaaggtaatcgccaacatatacttcaagccttattcattaccatctccttaggcgtatattttacgctattacaggcctccgaatactatgagacatcttttaccatctccgatggggtatacggatctaccttttttatagccacctggatttcacggattacacgtaattattggctctacattcctcatcgtgtgcttcctccgacagctatactaccacttcacatcaaacccccccttcggatttgaagccgctgcatgatattgaccctttgttgatgtagtctggctattcttgtatgtatctatttattgatgaggatcctaaaaaaaaaaaaaaaaaaaaaaaaaaa

SEQ ID NO: 9377 - DNA, 525 bp, Canis familiaris
ttatgtacggggaataattgattctgtaaacaaaatctttttggcagctcagatagtgtacatttaaaaattttgtataggtatttcatagccaaaagaaatgtgtatttctttttttgttattttatcttggaaacggtacatattttagtatttgtgcagaccaaaaccaaagaaaagccgacagtcctaaagtatttgttatcacttgtaccatccacttgtgccttactgtatcatgaataatgtcaaaccagttgtacacagtggcatccttgagcagtgagatgagagactaggagtgtggaacttttaaagcgagttggattttaaccagtaatgtacctggtggatttgtttttaacccaaaagaagagttatcacccatttgtacattttatgagttgatttttttttttttgtataatgtcataaaagagaaatgaaaagtgccagtcactatgtggtatctaggaaaatcatgatattgttggttttttgttttctctctgtgaaataaaatca

SEQ ID NO: 9378 - DNA, 478 bp, Canis familiaris
tttggtgccacaccaggtgaatgtcgttcttaccatggctgtatggaagtgaacactaatggtgttcagctggatctggatgaaccactttctaagcataatgatattagagctcactcgtgtccatcagttttgaaaagcaccaagaattcttaaggcttctttcctgtgctgataatatatttttcctgtgcgtaattatacttatgtttccataatagcggaagggttttccctgcactgtgcagactttgattattttatggtactttgactttcctggaattttaaaaaggtcctttttcaagaagaaccagatcctcttgtgataccaatcacattaaaaaaattcttacctctattgctgcctagaaattaaataatggaatacaccaaacatttctaatttgaatttttgctacaaatgacatttcttcatttttatgtttgtaaaagtaaaattaaattttgtcaccat

SEQ ID NO: 9379 - DNA, 604 bp, Canis familiaris
gtggaccagcggcgctttctcgcggctccgcaacctgggcgagctgtgtccagcgcctcgtacgcaacgtggatgtacctaccaagagcaactatgtgttcgtgttcctgggcctcatcctgtactgcgtggtgacgtcccctatgctgtctggttgtgctctggctgtcttctttggcgcctgttacatcctctatctccgcacattgcagtccaagtttgtgctgtttggccgagaggtgagccccgcccatccgtatgctctggccgggggcgtctcccttccccgttgtctggctggcttggtgccagggtcttgctgtcttctgggttctgggagccaccctcgtggtcattggctcccatgccgccttccaccagatggaagctgtggatggggaagagctgcagatggagcctgtgtgaggacctgtcgggcctctggaatcggctgcctcatccctgttcccccctgccccgcttggccccgaggccctggccacaaggcctccttcccatctcgagcccagggcgggattccagctgtggaaataaagctgttacccgttgtcattccaaaaaaaaaaaaaaaaaaaaaaaaaaa

SEQ ID NO: 9380 - DNA, 471 bp, Canis familiaris
ggttgatgagctggctggatgctgtggagtctggaagctgtgaaagtccgtcatctctccatgctgtagaagcatctatgtttgacctttcctctcctgcttgggtgtttccagctgtctcctccgcaaccacggctgatggctgggtccaggtgggtggctggatacatgacagccataagccccttcttcctatttaaattgtatatctagcttttgtatatctagcttttgagtctcaactaaagtacctatttttcctgtagcagagaccgccacggagccaactggcagaattttctttttaattataggcacgggatcagagtttgaaataaaataaaacactgtcagggttttggacacactgtggtgggttatgtcttctccccagcttaggctagaagtagaccagccttcagagaggatgggctgaactgtgaattatgtggcttcccaataaatccagac

SEQ ID NO: 9381 - DNA, 294 bp, Canis familiaris
gtccctctgctttcttcctccctgaagctcaacccccctggtggccaccgcccttcccccacccctttggtgtgattatttcatctgttagatgtggctgttttgcgtagcatcgtgtgctgcccccgccccgcccctcctcagtccctgtgcgcgcgccccttctgcgatgtatggcccttgcccctcccccacattaataatttatatatataaatatctatatgacgctctttaaaaaatatcccaaccaaaccaaacaaaaacatcctcacgactccccaggaaaaaaaa

SEQ ID NO: 9382 - DNA, 546 bp, Canis familiaris
atctggatgactaatttgaccctggtcccaactctgcaactcagcatgcactgccagtcttctcacccccccatatcctgttctccccctaatccccccccacaccttaccaaattgagatccaagaaatctcattctgcgattgttaatttaaggatttaaaaacccattttaatactgtttcactagtttcggcctttgaagtaggtagacttacgggttttattctgcaaattgctggtggtcatgaaaccattcaagttatgtttgtattatgttatcaacccaataacgtttggaaaaaacacctgatttcttttaataagccctcagatctgttaccacatctctcatttgtgatgccataggacactttgcctgtattaaaagggcccagagtaaatgccttttttgttgaacatgtctatagagttggcagttaatgctgaaatttgtcaaatagcccttcccaaattatacttgtgaaatataccaaaaaaataaattgatctacttaaaaaaaaaaaaaaaaaaaaaaaaaaaaaa

SEQ ID NO: 9383 - DNA, 569 bp, Canis familiaris
caccacccagcagccactctttatcagctacactctctacagaccgcacacctactagttgtttgttgcatccagacagtgtgtttcagcactactattgttgaagacaacgcacccctatactcgacgagttttataagaggagagggaagagtataaatagtagaagtatgtagcatcttctagaaggatgatgatgtaacacgacgggaagaattgctctcgttgattattatgagcgactattaaaaagaagacgctttgagatatacagccttacgtggtatagtaagccctcttagaaatctctacgatgagtatggacgaaatattttaagcataaatttgactcacgctgtccacttctctgaataagactacactttcttagagtgaaaatagcacaaatagagcaattaccagaatgataatgctatttgtgttcattctttttagtgtcaggtcttttatcttaattgccccgaaccaaaactgtattttatttgtttgtttttgaatacagcactttaaatctaaaaaaaaaaaaaaaaaaaaaaaaaaaaaaaaaa

SEQ ID NO: 9384 - DNA, 325 bp, Canis familiaris
ccaccctctagagtgtgcacattaccaacagagaattaataatccaaatattaccagtaatgccagccattggttcttcgatattctaagatcaccagtggtctcctgctttaactatttctaaagttcttttatccatttgttcactgctatgtgatccaaacccagatgaccccctagtgccagagattgcacggatctataaaacagacagagataagtacaacagaatatctcgggaatggactcagaagtatgccatgtgatgctaccttaaagtcagaataacctgcattatagctggaataaactttaaattacctgt

SEQ ID NO: 9385 - DNA, 613 bp, Canis familiaris
cttttttttctcaaccagtgttttgctcctgaaccgccactctttatctgtgtttgggaatgatgagggaagacaggtgatagctgggacatgtgggctcagaaggaggaatacataggaagtcaaagggaaaaggtgataaagtataacttgaataaccttttttcataaagaaagtacatgtttattgtaaagtgactagaaaacagagatgaacaaataaaatccacctagatcttcagttctggctatataaataaccaaaaacaactagaaataaaacccacaattattaaaattaaaatctaaatggacatttaacatcatactagagttggctgaagaaagaatccgaaacttgggatactggtatcaagagacacacgatatagccaagaggatgtccaagagacgatacatgtctgttgttcaagccctcattgtgatactttgttatggcagccctagaaaattcacttactgaattctgtagagatagtaaaatatctttccatagtaccattttaatgggattgtttgatttttgtaataaaaagatgaataagcaaggtttaaataaatactcatgaatgctttcccattttttaaaaaa

SEQ ID NO: 9386 - DNA, 644 bp, Canis familiaris
tcaaatgtaaattcagtggaaaagaggcggacagtgctgtatttaaacagaagttgtattatgatgtttttgttttgtttttgtttttttactattgcttgattaaatttggcatttaaatagtggtggaaatatttatataattgtcattttttggttgtccagttcccttggctactgtttttcttcagatttgttctttcattctcaagtgcacaagtctttgataaaatattgttaaactgtattataagtattattacacagggttatgttttcctggtctggagcatttttaaaatcccaactgtctgtcctgtggagcaggcagtgatttttgctttcacaaacttttatacgcaatttggaggaaagtactttctaattaccatgtgttgttccggaatttaaaggtcccaattctttaagccccaagcctgctagtaagggcatccaattggatcctttcctatgttgaaatggaagaattaatgagcttacacttaattagtattgtaatgtgtaaaggaagcccagcaaaattttttgaaaacttgatgatcccacgtatttaccattgtatgttaaagcacaaataaatcaccatttttttagaaaaaaaaaaaaaaaaaaaaaaaaaaaaa

SEQ ID NO: 9387 - DNA, 619 bp, Canis familiaris
  misc_feature (61)..(61): n comprises a, c, g, or t, or includes no nucleotide
ctctacccccatggaggaggattgggggtccacattttggggccatgcccaatcctgcacnttgggggctccagcccccctaaaattaaatttctacagcatccctctagctttcaatttccccagccccctgaacccagaaagatcacctgctgtacacgatatacctagaacccatagccccgaggcccggcaaggcctgctcgccttgcacatgacactacagggacgggggagcaccacagggctgtggaacccgggacacaaggggacctgcggcagctggctcgcccagtgtggggagggttacacctgctgcacccgaccgggccagggacagggtagagaaagcccacccctgacacgctgggacccccagcaggtgctcaccacaggtgcccccacacaggcaggcacactgcagggacacggtctcgtacccggggcggggccctctgcttgtgacctcagattcctgcaccccagaattcgagggggctggtactgaccacccctccctcattcagccgagggacctttgtggaggcagcctctgcctttgctcaatctggactttttaaataaaaaaagtggaatttgaaaaaaaaaacaaaaaaaa

SEQ ID NO: 9388 - DNA, 622 bp, Canis familiaris
cagtatttccgggacattggagttcccatgaccagcgtgcggctgtcctgctattttgagaacctcctctcctacttcttgcccaagaaagcccccgatggaaagagctacttgctgagcttgcccatgggtgatgtgcccatggacggcatatctgtgaccgacctgggccccgtggtgctcagcctgctgaagatgccagaagaatatgtcggccggaacattgggctcagtacctgcaagcacacagcagaagagtatgccgctctgctctccaagcacaccgggaaggccgtgtgtgatgccaagacgaccccggaggactacgagaagcagggcttcccaggtgcccgtgacctggccaacatgttccgtttctatgccctgaagcctgaccgtgacatcgaactgaccctgaggctcaaccccaaggccaggacactggaccagtggctggagcagcacaaaggggactttgctggactctgaccctgccacctctcagccccatctggggagacggggaggtgcagcacagtgatcccttgttttacaaaaaaattatttttcaagtaaaggcgattgttctcacaaaaaaaaaaaaaaaaaaaaaaaaaaaaaa

SEQ ID NO: 9389 - DNA, 650 bp, Canis familiaris
ttggcttctccctctaccctacaccatcagacttcctgctaggctctttttctctcgaatggatagatgaaatctaaaagaaactgctttaaccaggctgctcaggaattactggattctggaaaagtaattcatctgaccatgttcaaaagaatactaacatagacacccagatggcatgtgattattttatgctgctctgtacatttgtctgcataactctggaacaaggcattctgtcttggagggtaggtgcctcaaaagatcaaataaagctcaacagtttggtgggtattgaatttgggcaaagagacctcaaccattttttttttaactttttttttctaaaaaaagaaaacattggttaagttctgctgggagatacaggcaaaaattcttggctatgttttagcaatgtagtcttacagggttgagtgtgcttaacagaaggttactaagttgaatggagaaaagtacatgtaatttgtgcttattgtagaaaaactgaaaatgagttaaatcgaaactatcattccattagttagtgataaaccctattaactatttgtgtatttcctctcagtactgctatattaaaatcaacaaatacatataaaatcaagaaatatattttaataaacatacaatta

SEQ ID NO: 9390 - DNA, 535 bp, Canis familiaris
agccgccatcccatcattgtctcctgtggttgggaccagttggtcaaggtatggaacctggccaactgccagctggaggcccatcacactcggccaacccgggctacttgaacacccgtggccgtttttccggatggatcttttcgggcttttggaaggaaagatggcccaacccatccttggggtttccaaggaagccaaccacccttaaaaccaccttgatggtggagaccattcatccaatgccctatgccttcagtcctaaccgatactggctatgtgctgccacgggccccagcatcaagatctgggacttggaaggcaagatcattgtagatgaactaaagcaagaagttatcagtaccagcagcaaggcagagccaccccagtgtacctctctggcctggtctgctgatggccagactctgtttgctggctacaccgacaacctggtgcgtgtgtggcaggtgaccatcggcacccgctagaaatgatggcagaactttaggaataaaacattggttttctgaaaaaa

SEQ ID NO: 9391 - DNA, 329 bp, Canis familiaris
agaagaggtttgagttgtgccaggagcccaagcttgtgtctgcagaaataggaggcgccctgaccccccacccattttgggcttagagaacccagagaggcggctgaggggcctctggggggcacctgggcctttttcacagtacataagccatctttgtatcaatgatgttacactaatggaaactgattgcccttctgccactgcttggacaagcacagaggaagctgaacggttccaaggcaggggcaagcacagaacaatggggccgccagctggagcagtggacttttgtaaactacactaaaactgaaggaattaaagtgctc

SEQ ID NO: 9392 - DNA, 626 bp, Canis familiaris
atggcgcttccatggttttttttcgccgatgtatcaatagtgccaaacaggcctgattttattatcacttgtcaatcacttcctgttctgtgctttgcagcaggatggactgaagtagggaagatgctgtcaagtctgagttaacacaaccccatgctgacatgtgcgacgcgagatatgcagtgtgtttaaaccacaccatggcttagactccgtgccatattactttgtttggaattggctcaaattgatttttttgatttctaggaagaattcctttgtatatttgttttttgagaggtgaaaattttgaaaacagactaaagcactcacacacatgcacacgcggtgatttttcttgtgttcctttgtacacagaggacacttcagccttggacaaacttgttggctttttgggttttttgttcatttgcttaacagttagagggctacattgttggactcacacctaattaatgatcagctgtagagaatagtatttatatatgtgacaatatgggtttgtaacattagtttaaaaaagggaaagtttcattctgtatattttgttaccttttaccagaataaaagaattacatattaaaaaaaaaaaaaaaaaaaaaaaa

SEQ ID NO: 9393 - DNA, 601 bp, Canis familiaris
cgttctggaagaagctggaagatggtcccaaggttcttgaaatctggggatctgcccattgttgatatggttcctggccaacctatgtgtgttgagagctttctctgactatcctcctctgggccgttttgctgttcgtgacatgagacagacggttctgtgggtgtcatcaaagccagtggaccaagaaggcagctggagctggccaaagtcacccagtctgccccagaaagctcagaaggctaaatgaatattatcccttatacctgccacccccagtcttaatcagtggtggaagaacggtctcagaactgtttgtgtcaattggccatttaagtttaatagtataaagactggtttatgataaccaagcatctgttaaaccctccagaagggaacgccggaagttttgtggaccaacttgttttttttttttttttttgtgcgtgtgtggcagttttaagttattagtttttaaaatcagtactttttaatggaaacaacttgacccaaaatctgtcacagaattttgagacccattaaaacccaactttaatgagaaaaaaaaaaaaaaaaaaaaaaaaaaaaaaaaaaaaaaaaa

SEQ ID NO: 9394 - DNA, 673 bp, Canis familiaris
gaaagatggtttccgggacttagccctcgtggttctcgggagccttggcgttcccaggtgtggccggaggacctccagcagtcctggatgcagcttctcggcttcatcgaaaatgaacagggctctgttggcagcgctcctgcgtcttcttgatctagagtcagctagctgctcctctgtacacgctccacgctacttcgcgctgagtgaaaatggtagaatggcgatgaacactctctgagcaccgtcacctcctctgcgccgtcctcgcgctacagcgttctttctgccacgccgacccggcgccccgcagaatttttcccgtgtccccagcacccaccctgggaagagggcacatgtccccagggcccctttgtggtgcgcgcgggcacagtctcacagtaacgcccttcactccgttcaggaccagttccccgggcccagatgctgcccgtgccattcgtatgctcaggtccgattctaggcctgtgaagttgttggagatcctgcagtcctcactgtcgcagcaatcctggaagctgcagtaccacgaggtcaggatggccaggtactgctggcccaacaggggaaggctccagcccgggggcgcctccgcgtcgcgctcgcagtcgtcgggccacacgcggcagcgcaggagcgcccagtagcgccg

SEQ ID NO: 9395 - DNA, 703 bp, Canis familiaris
aacaccctgacatggttgtcccgcaggggcaaatgaagacattatgatcacagtgattcccgaagaaaatcgaccccgtagggagaggccatgagctgggattttcatgtttccccccgcacaagactcctccacgtgggacgatagtcatgaatgactcttgaagacgggggtgtgcacggcgcccccccacgagactcttggacacgctgtgtgttttgtccacgcacgagaaccaccctggcccacacgagatccttctctgagtatggttgtcacggcgagaaaccaaatggataatgttcgtagaattctgcacaggcaacagagagctctggcccctttctggaatccctaatggtaaccgccagtggtggctttttccctggcccaggcctgggacctggtttccctggctttagaccagtcaacgtttgtctcttccttttaccgagtcatcatcttagtccgactaaggcagttaatgtaatgcgtagatggaggaaagtcccgcgggagccaggacggtcctgggcacgtttatgctttcctcctagtcagcacccagaggaggtcgacgccagagaccaccgctgggtggatgctggcttccagaagggccagagtccctcttttaggaaactcttcagaactgggagcacagtgactgagtttgagctattaaaacccttcttcatactct

SEQ ID NO: 9396 - DNA, 655 bp, Canis familiaris
  misc_feature (16)..(16): n comprises a, c, g, or t, or includes no nucleotide
  misc_feature (35)..(35): n comprises a, c, g, or t, or includes no nucleotide
ttgtgcctcggtgccntgaggaattctccaagggncctccaatggttattcccgctgtggagcctaatgccactttgtgtgggtttttggggccttcgcctgtgttttcccaccatcgatgtgggaaatagacttttgggggtgttgccacgggtgcatgtagtcacgatacttcttctcaaccccacaccacatgagcccccctctctctctatctcccaagatgctacctgtagtagtgagactctcttcttgggagatctctttgtccccaaattccccaggcacgaaattcccagaggttcccagagccctatttccacagggggcacaaacgttttcccttttccggtgaggaacctttttttttcctttttaaacccagcccccaccacccaggtttcccaaagcccaccgtttcatctttcctggatcactacagtgaagtattacagttgtacagttcccaatctggccttggcttgctcggataaaactttgtatgtattttgtatggcatagattctatattgtaatgatgtcctatgcaaaaaaaaaaaaaaaactaaaaactaaattgtaaattttattgttttaacgtgtatgcatgtttagtgacgtttacattttgaaataaaatttatgattcattaaa

SEQ ID NO: 9397 - DNA, 567 bp, Canis familiaris
gcatagtaccctccagttccatccacgtcgaaccaaatggtgggtattggtcatttctaatggctgagtaaatattgccattgtatacatagaccacatctttctttatccattccttttagattacataattcactgctgagtggcagctctgggctgtcttgtggggcttttgggatgtgccaaaaatgacctgaaacctattagttctgattttcagactccctttccacttggtgtttcctttagcacacggacctgtttcctacaagaacggaaaatgtttctcaaaagtgtgttcattcttactccccgttttatgtcctttcatttcttgtgacacatgggagaggagggaggtgggatgggtaagggaatctgggaggtcctgggcccctctggttcagttgctaagttccctgccaaaggaacccctctgtgagcatgccctccccgcctcttccctacatcattctagcacagggttctccaccttggctgtacatgtgcattcttcctggagcttttaaaaatacccatgtgtggctctcctttttttttaaaaaa

SEQ ID NO: 9398 - DNA, 659 bp, Canis familiaris
cggcgcgccgagggccagcagggttttttctaggcttcagacaccggtttcaaaagtgagaactttttccacatcacagtcctcgcttcaagtggcaggccctgtgtggaacctgggtcgactcaatcacatagcagttgcagtgccagacttggaaaaagccaaggcattttataagaatattctgggggcccagataagtgaggtggtccctcttcctgagcacggagtatctgttgtttttgtcaacctgggaaacaccacagatggagctgcttcatcccttgggaaatgacagtcccattgcaggttttctgcagaaaaacacaggctggaggaatgcatcatatctgcattgaggtggatgatataaatgcagctgtgatggatttgaaagagaagaacattcgtagtctcagtgaagagacccaaataggagcacatggaaaaccagtgatttttctccatcctaaagactgtggtggtattcttgtggaattggagcagcttgacttatatttgcaagaaacttaaaaaattcccacctaaatagtctgaaattccccatcaaattatactccagcattgaatccttcactccttccatcacttaaaaattcacaattaaagagcactttaactggaaaaaaaaaaaaaaa

SEQ ID NO: 9399 - DNA, 638 bp, Canis familiaris
gggggtgacggataggacagaagatccacaagatcactgactgctttccactgccacgtcttcccgttcgtggagcaggaggagggccgcctcacaaccctgcagcagctgcgacagcagagccaggagctgcaggaggtcctgggggagactgagcgcttcctgacccaggtgctgggccgggtgcagcggctgctgccaccctggcaagtgcagatccgcaagatgaaggccgtgtacctggctctcaaccagtgcagcgtgagtgccacgcacaagtgcctcatcgctgagggctggtgcgccacgcgcgacctgcccacgctacagcaggtgctgcaggacagctcgagtgaggcaggcgtgagcgctgtggttcaccgcatcccctgccgggacatgcccccgacgcttatccgcaccaaccgctttactgccagcttccagggcatcgtggacgcctacggtgtgggccgctatcaggaggtcaatcctgcgccctataccatcatcaccttccccttcctctttgccgtgatgtttggtgacgtgggccacgggctgctcatgttcctctttgccctggccatggtgctcgcggagaaccagccggccgtgaagacggcgcagaatgagat

SEQ ID NO: 9400 - DNA, 678 bp, Canis familiaris
  misc_feature (74)..(74): n comprises a, c, g, or t, or includes no nucleotide
ctattttgatatagtttggtaaaataaacatgtttagctttgtaataacttttccaagctgaactccctctagncaagatatttttcagtgcttttatttactatgcacttagactatgcactttttctgaaatatttttgtaacagcttaacttttttgtatttttgccactttgaaaaggttgtggtgtagttggtctgtaattaagttgcagatttaaaactgctgttagctttgtaaatccaaatataggtgtttttgtcctggtatatcttcattccatctgcagctggagctggaatcccattgatcttctagctaccattcattttcttcacagttcaccaaagaagaatgtgaaattcagtgaatgctgttactaatcctgtcgggagatgaatctcatttcaccaaaattaaattatgtttttccactaaaatgatgatacaagttgaagacacatcactctgaaattggaagacctcaccacttaaggctccgcagtggcttacccagctgaactctaggttactactctactttgttcacccattggggggtgcagttttttttaaatgttgggagatggccattctaactactgttgaatgtctctgttttgggaaggtataaccagaaaataaaaaagaatatatatgaaaaaaaaaaaaaaaaa

SEQ ID NO: 9401 - DNA, 585 bp, Canis familiaris
  misc_feature (30)..(30): n comprises a, c, g, or t, or includes no nucleotide
gtaagtcttggttggtatcccactggttanccgaggagatacacacccggctccggttcagtgtttctttagtgtttaaagtaagcttgagttataaaatgaaatccaggagtctctcccagatgtgtacataaaatgaaacgttatacccctttttaaagaaccaactatgctgatctaaatgtttttgctgtcgattgtgatctttaaaataaacccctgattttggaatttgatttttcatggaagtgcccccttctctaaatttagccctcgactatatcacggctgtatagacccgaaagcgtcgtccataaaatttgctgggattctgtgactggaaaaggtgacccagttggtgactttgaccctgcacggtattaattcccttttcactggtttactatgagagtcactttttcaaccaattattctgtaatatattgttagactaaagcccttgtattaagactgtttaaaatgtaagccttgtaattctgaaaatacaccttttaagaagaaaaaaaaaaaaaaaaaaaaaaaaaaaaaaaaaaaaaaaaaaataaaaaaaaaaaaaaaaaaggg

SEQ ID NO: 9402 - DNA, 545 bp, Canis familiaris
  misc_feature (541)..(541): n comprises a, c, g, or t, or includes no nucleotide
gtcaagaatattatgacccagaatgtggagcggatcttggcccgaggagaaaaacctggaccatctccgcaacaagacagaggatctggaagccacatcggagcacttcaagaccacatcacagaaggtggctcggaagttctggtggaagaacgtgaagatgattgtcctcatctgcgtgattgtttttatcatcatcctcttcatcgtgcttttcgccacccatgccatccccacatagggagcccctccccccacccaccctcttctttagggcaaccctccatagcaggtgccaagaagggccctctcttccatccttgtctgcaggaagtgctgctgcgtcctcctgcccctcattctgaggcccctctgccacactgtctgccccaggcaccttggtcccccggaaggagagagttggactgtggctgtttcatgggccctcagagttggttggagagatatccagaaggcccagcatggggctaggacactgatggtggccggtgggcataaagacctttcagtatcccttcanaaaa

SEQ ID NO: 9403 - DNA, 540 bp, Canis familiaris
ggatcccatgcgtcttcggtagacaagtcaccttggtagctagcaccagtgccagctccatgcatcgcaccttccttagtgttgattgcccttcccgcatttattggtgtattaaaatgactgaatatgaacattaaggactccatgaacctgggctaatgggagactgtagagcaaatgaaaaagatccaccggaggacatctttgggggggggagggagcttgggaggagggaaatgactaatgaagctaattaaaagaagcattcaaatctgctttctaccctcattaaccattagcagggcactggccagagtttgtaccctgtgttttaccttaacaacattctatttgctctttgtatatttaagtgttgtaaggaaatgtgtttcaatcaaaactgaacatgagataaaggaaagagatgtggcttttgtgatattctatcacagacacttttattgtatctctgtaaaatacgatgtatgtatgcatgtaagtgttttcgtcctaatgttgctacttccatggcaaaggaaa

SEQ ID NO: 9404 - DNA, 717 bp, Canis familiaris
ccaggatattgtttcatttttaaaggaaatcactttctggccactgagagaatctgaggtacaacccgtttatcccaaggccatccacagccctgggttttcctccacaccgtgaagaaaattgatgcacgctggtttttgataaggagaagaagaaaacgtacttcttcgtaggagaccaatactggcgatttgatgagaagagaccatccatggagccaggctttcccaagccaatagcagaagactttccacggggttgactcgaaggttgatgctgcgtttgaagcactttgggttttactatttcttccatggatcttcacagttggagtttgaccccaatgccaagaaagtgacacatgttttgaagagccacacgctggttgaattgttgagctgctgagatgcacaacacagtcatttgaaatgaagctaataagtctttacctaaatctttgtgaattgagctggtttgttttctcctgcatgtgtggtgacctgacagtatgagggtcacctgcgtgtcttgctggtcaattcacattattattggacatttgagcatgctgctgagctggtgctttgatcacatgggataacttccacagaaggggaagcactcatgtgcaagacccgtgactgtatatagactatttacttgttatttaataaagagaattggtcagttaaaaaaaaaaaaaaaaaaaaaaaaaa

SEQ ID NO: 9405 - DNA, 667 bp, Canis familiaris
caacggggcgcgaaaggccatggccgagccggttccggtaacgatgacattgatgatgtgccttatatttttctgagcaagagtgggagatcctggagaagtggcagaaggaaatgtatcagcaagtgatgaagaacaattatgagactcttgattccctgggtcgtgttttttccacagccagatctcatcatctggatagaacacagggagaatgctgttaatcagagaccagggacccttagagaaaagaatggcatgtagcccttctactgatgagcagtgggacttgcaggggactggaaagttgctgtattttggtgagtatgatggatttagggtcataactgatttcattttcctgaatctggatggtcagctggacatagtgaataagaagcattattttgatggagaatgttagttttttttagtcaagtgggaagcaaatttaggactgtattaatttaaaaaaaagaatattatttttataaagagggatgttgtgtatgtttcatgaaaaaaaaaaaaaaacaaaaaaccctggaaagaattacctgtaaaagagcagtaaaggacccacttgtgaagtcctgaggagcaactgccttctctgtcacagtgttgtgtccatttgagtatagagaaatggaaaactaaaaaaaaa

SEQ ID NO: 9406 - DNA, 619 bp, Canis familiaris
cgttctggaaagaagctggaagatggtccccagttcttgaaatctggggatgctgcccttgttgatatggtttcctggccaacccatgtgtgttgagagcttctctgactatcctcctctgggccctttttctgttcgtgacatgagaccgaccgtttctgtgggtgtctatccaagccgtggaccagaaggccagctggagctggccaagtccacccagtctgccccagaaagctccagaaggctaaatggatattatcccttatacctgcccacccccagtctttaatccgtggtggaagaaccggttctccagaactgtttgtgtccattggccctttaagtttaatagtaaaagactggttaatgatcaccatgccatctgtaaaaccctccagaaggaaaggagaatgttttgtggaccctttgttttttttttttttttttgtgcgtgtgtggccagttttaagttattagtttttaaaatccgtactttttaatggaaaccacttgacccaaaatctgtcccagaattttgagaccccttaaaaccaaagtttaatgagaaaaaaaaaaaaaaaaaaaaaaaaaaaaaaaaaaaaaaaaaaaaaaaaaaaaa

SEQ ID NO: 9407 - DNA, 646 bp, Canis familiaris
  misc_feature (1)..(1): n comprises a, c, g, or t, or includes no nucleotide
ntatcagagtagtatgattaggaaataatagttagagggatcatattataagagagtagccagagaacattttactgagaaggtgacaattaagcccagacctatagataacggggtaggtgaatgagtggaaattgatttctgaggaggagcaggaactgaggggccaagacaggaatgtgctttctatgtgcttgggggttgaaagagggacaaacggaggcatagggtggtacaagcacaaaataaatcaaagccaggaccagtcctacaaataagagctagaaccaagcacattaccactatggaatctacagggattttgtggctcatcagctgtatattagtgacaccttcataaagactgtgtagctctgctcactgaaaccgtagttaatataattactgtttctgtttatttcattttccccttaaaatgaaggccctaggggatccctgggtggcgcagcggtttggtgcctgcctttggcccagggcgcgatcctggagacccgggatcgaatcccacatcgggctcctggtgcatggagcctgcttctccctctgcctatgtctctgcctctctctctctatgtctatcatgaataaataaataaaatcttaaaaaaaataaattaaaaaaaaa

SEQ ID NO: 9408 - DNA, 448 bp, Canis familiaris
aactcagggacttaaccaaatgactaagatttcatctgtgcccaaattactttgagagctttaatgatgaccattttcttagtttgaataaatttgcagccacaacccattgtaagggtgtaatttatcttgcaggttttatttggtgaaatagagatttgactttaaatggtccttgtaaataatttattttctgctgtaaccttgtgctgtgtagcatatcagtatgcattgtctcagggaacttgaaaaaatgagcttgattgaatgtgaatatttctgattttcgcttctaacaatgtatatatgttttcaaaaaccaaaaagtagcactgtctagcttagttgattctatgaatcatcttattagaaaagatatcttaagttatttaaaaagttgagatatctttattattataaattacagagaaactccagagaaaaaaaa

SEQ ID NO: 9409 - DNA, 648 bp, Canis familiaris
ttataatatatggtcctcagttggggaaagatacttatgatgaaggatattttgtaagtggaacttttttttaatattggtaatagtcggcacagcaactatagaagtaccactccatagatggcattaaaacctattgtagtgtggatagatattttttcttttttaaaatgtgatattgacgttttattaatattttttaaattgttacgtttataaatttggtacttaaggcacagccagtatgagacactgaatgcgacatttattataaagagctgctgcactcctactatttttataaattttactaaccaagtagactaatgtagaccttcacagacatggtagggccaaagcctcttcagacaaaggctcccaaatgctaactcagaaagaaagaaaaaaagccttttccaattccaattaaacagcaacgacatttaaaaaaaaaaaaaaaaaatcctgtttttccgattaaatgttcggttgtttggtgagggttttttggttttgttttgtttttttctttctttctttctttctttttaatctccaaacaaccagttaagtaaaatgctgggcgcttttaaaatatcaaacttgttcagtgatacaataacaaatagaagttttattaaaaaaaaa

SEQ ID NO: 9410 - DNA, 585 bp, Canis familiaris
  misc_feature (1)..(1): n comprises a, c, g, or t, or includes no nucleotide
natcagcctgtaacaaccaccaaccaagttccataactgtacagagccgcgatacccatagcctcttcactaaaaaatccagagtcccccgtatcatagatcactcaatcccctattccattaaactttaatactacctccacctcatcatccttcaaaacatagcaagcagtcaaccattcagacaaccaacccagtaataaaagccgctagaacagccttatttgaaactcacacctcagggtattgctcagtagccatagcagttgtataacccaatactactaatatacccccccaataaattaaaaatactatcaaccctaaaaaagaaccccccaaattcagaaccatcgcacaacccatcccacccgctaataattagcacaagcccaaccataaataggagatggtttagtggccaaacccaaccaaactcatcaccaaaacgatacttaaaataaataccatgtatgttatcattattcctacctggaatttaaccctgactaatgacatgaaaaatcatcgttgtatttcaactataagaaccattaaaaaaaaaaaaaaaaaaaaaaaaaaaaa

SEQ ID NO: 9411 - DNA, 582 bp, Canis familiaris
  misc_feature (1)..(1): n comprises a, c, g, or t, or includes no nucleotide
  misc_feature (33)..(33): n comprises a, c, g, or t, or includes no nucleotide
ntcgccttgtcctcggctctcttatgtattacnccggtctcccaggttctgtgtctaggtgggggctttcttggtttctgggctttaactctgggggctttcgtaggcgcatcgcctgccaactctatgcgccctttgcagcggagacgccccgggtgcctgggtgcgcgtaagctcacgtggccccgtggaaggcccggcgctggggtggccccaggtggcgccaggtgcgcacggcgggcccacggtggctgcgggtgggccccaggtggcccacgggcccgccgcctgccgctcgctgtatcctgcgccctcagagccgcacgcccgttagggagaccagtagatagctcgtttgacaccccccgaggcctgggtcacccctgcacccgggcctgcgttgggggcttcgcttctgtgtgcttatgggaaacctgtactccgagaaggggggattttcatcctagtaactcctgagctaagttttattattcagcccataaatatgttttcgtgtaaaaaaaaaaaaaaaaaaaaaaaaaaaaaaaaaaaaaaaaaaaaaaaaaaaaaaaaaaaaaaaaa

SEQ ID NO: 9412 - DNA, 600 bp, Canis familiaris
tcctggaactggacaggcatatgggaaaactgcagtcatttcgaggagggcaagccaagtatgtcctgtcatacccccaccccatacccccagttcacctagatattaaatacccattaactaagcagtcctggtgattgatatttacacctttccatcaagatgcacgatttagtgctcacttcggcagcacatataccagatgcacgatttagaaaagtggcatcataatacgaaccttaaccatgaatttctatttgtttttttttaaaggaagaaacgtatctcctttatatcattttgatctttataaaatatatatatttatatttatatatctttggattcagccaaaaagtaggtactggaaatatcgcacgttctaaaagcagatgaaaccaacaccaggttttaaaaagtagggggcggggtgtaaggagaggtaggcagcacggagtaccaagacaattatcccaaaaagataaagggcaataaaggtaaaaacaaattctctcaaaagacggcatctattaaaagaaaatcaaattctttaagtttgcaccaataaaatgaacacgtagaaaataaaaaaaccaaaaa

SEQ ID NO: 9413 - DNA, 541 bp, Canis familiaris
cacaccaagggccacttaaatagtgctggagaattttttttttaagatttttttatttgagagagagagagagagtatgaaccggaggggccgagggagagagaaactcctaaccgattctatgctgagtgaagagccccatttggggcttgatctcatgactgtgagatcacagcctgagcctaaatcaagagttggattctaaactgactgcaccacccaggtgcccccaaaagtgttagagatttttcttggaaggagctctcaaccaatatcaggaagagaattggttgataaatgaccccaatttctcattttggagataaatctggagtgtgctttacattatccctgagttgcccagtagaatggattttaattctctatggtggaaacagcttggtaaatattttttttattggcttcctttctatccttatcttctaccttcattcttctaagggtgtctcctgggatcacttctgccaataaactacttgtagttgaaaaaaaaaaaaaaaaaaaaaaaaaaaaaaaaaaa

SEQ ID NO: 9414 - DNA, 589 bp, Canis familiaris
ggagactcgtgtccagacctgagctccggatctgagaggatgacgaagaggcgcgccgcggcgcagcggggctcaggggctgagcccactgggccgcaggagcagcccggggtcccaggtcagagagggcctcggaagaagaggcggcggtctcgggcgggggccagagtgaaggtggccggcagccaggagctacagaccaagcagcagctgctgcagagccggaagtgaccccagcaggcccagcatgcggggaggcgctgtccctgtagatcctcccggtttgcgctgagttgagtgggcacaggactgtaggctctcagtcacagactgagactgtggacgtggacactcacggctccctggcgtcctgagtcagcagggctctggccccttgctccgtggctgggccccgggagcgctgacgctgtgctgactttggtcaggccaggaaacctcccgagaggtaaacctgcctggcaggcagcccccctggggtcgggggctggctgcacgctgcgggtgtctgtgaataaaatgtctgtgcggttaaaaaaaaaaaaaaaaaaaaaaaaaaaaaaaaaaaaaa

SEQ ID NO: 9415 - DNA, 614 bp, Canis familiaris
catcctggttttaatgtcccgttgctaccgtccagttttacagatggtgtggtttttagtcttgcagccaggatgtggggggatagacacacacgtctgaatatgactttagcttctgggagccaagggcaacagcagcagtccctccgtggggcatcctcttggctgagctgcatcctggcacagtgagtcctcatccactttgcttggcctggaagctttcactagtctcctccaagtccagagctgtgtttgtccatcctcctgtgcccagcgtggcacttagcaggtagattaggtacatgtttgctgcatggatgagtagggtgtagactgtcttacaatcaaggaacacgaccaagtgctttcacgggctaaagtttcaggatacagtgagttggagagggaaagagctcatctaaacctggctctgacatgcattagattttgtcacttctcatggaggtagagaggctctccagcaggcacggattggcttacgcaataagcgtggaggtgggagggcacagagccatggcttcgggcactcttttcagccatagcagatatgtatgaaccaaattgagtgttttcataataccacattcaaaaaa

SEQ ID NO: 9416 - DNA, 588 bp, Canis familiaris
tcatggctgcaggcccgccagtctgaagaccaccctcatcggcggcgcggcggggcctggagtgtgacggcaaggtcaacatctgctgtaagaaacagttctttgtgagcttcaaggacattggctggaacgactggatcatcgccccctccggctatcacgccactactgcgagggtgggtgcccgagccacatagcaggcacgtcggggtcctcgctctcctttcactcgaccgtcatcaaccactaccgcctgcggggtcacagccccttcaccaacctcaagccgtgctgtgtgcccaccaagctgagaccaatgtccatgctgtactacgatgatgggcaaaacatcatcaaaaaggacattcagaacatgatcgtggaggagtgcgggtgctcatagagcacccccggcccaggggtggggggacaggagccggagttgtccagagaagagacggtggcaaaacaaaaaacaaaaacaaaacaaacaaacaaaaacaaaagacaaaacaacaacaacaaaaaaagaaagaaagaaagaaaagaaaaaaagaaaaaagaaaaaagaaaaaaaaaaaaaaaaaa

SEQ ID NO: 9417 - DNA, 544 bp, Canis familiaris
  misc_feature (81)..(81): n comprises a, c, g, or t, or includes no nucleotide
cagcgtggggccttgaggagggccgcacctgccgcaagtgcagcggcccccgaggctgaggatggaggcccgtgcgtagcncatgtgtgtctgcgatttttaccttcttttctctgacaagagaacgacctaagtatgaatcgaaattcctgtcttaggaatgcattgcctatttatatctgggaagattctctatttccgccatatatatccctgcttatcataaatgtgcgtcttctgatgatacggcctttggcgacttccttcccggctcagtggagcatgcttgatctgcggtgctaggaggcatcttcatgggagacgggggttctctaacacacaaagattttgcaaaagaaagccaggaccacccttcaaaagaatgggggtgactgggtgaccggcactgaggggggcacttgatgggatgggtgctgggtgttattctatatgttggccaattgaacacccataaaaaataaatttacaagagaaaaaaaaaaaaagaagaaatccttgggggaatcttaacattaattagaaa

SEQ ID NO: 9418 - DNA, 596 bp, Canis familiaris
acagtgaccatcacccctcaggggtagtgatgtggtacctgtatcccatcaggaagctggggacgccccagcactaaggagctgagacacgtgacaggctgtggcggcatcactgagcctagactatggagcctccacctgccgagggccagcaggcggggttctttgctacccaggcccacttggtgatttggccccatcagacccaagtgcatcccagggccaggtcccatgccctgcccaagtgtgaaccttcttggagacttgacttggggcaatgtcccgtggccttcctagcctctaccttgtctgcacagccccacagatgttactgagcagctcagccagcctcctgagcccccacaagcagggggaccgataccctctgactctgtttactcggaaatcaggatttggaatttttcttacgattaggagtggagatctgatctcttgtcaggagctcccgtgaattgtgtgattggttttcctgcctggagaaggccttgccagttgatgccacccaggttaaccttggttccttcaggttacccaataaagctgttttttaaaaaaaaaaaaaaaaaaaaaaaaaa

SEQ ID NO: 9419 - DNA, 622 bp, Canis familiaris
attgacacacccctaagtacaaggttgtgtacatggttgtgcacacatgctaccttcttagggattccgggaccggtttttggttctggatagccattagtaacatagtgctatgttaaggtattaagtgattaaagttgatggacccttttgtacaatttccatatagtctattcattaagtaatcttttaccagttacatcaggcctgaacccgtccacttcagaaagcttccaattatagaaaccatactgttctatacgagtgaccgattatgctttctttggcctacattctttattctgcggtgaagttgaggcttataagtccaaaccaaggaaataacttactatccacccgtttataccgaactcacagaatctatgacttttttaaactaagatctgttaaaaagaaatctgtttccacagatgacccgtgtaccataccactgtggtgaaaatgaattcagacttattaaacgacgaacttgttaaatcctctcagtgtctatttatcagcacaatacaccccggagaactgttgatggcatattgaatagattttaatgaataaattgctctggaaacccaaaaaaaaaaaaaaaaaaaaaaaaaaaaaa

SEQ ID NO: 9420 - DNA, 654 bp, Canis familiaris
gtttacagcttttgcatttagaagagtttcagaaaaacgagagcacctcttactggagaaaattgaccacctgaagggacagctgcggcctctcgaacagataaaagctggaatcgaagctcgctcagaagctaaaactagcagacttctgtgggctgggttagcactgttgtccgttcagggcggggcccttggcctggctcacctggtgggtgtactcctgggatattatggaaccagtgacctacttcatcacagttgcaattccatggtcttttttgcatactttataatcacccgacacggattatacttactccgctgttaagagtaggccgttttttcactttttcccattaaaaatccaaggaaccaccattttgatgtggtcagtacacagttaaaagaagatcttgctaaggctacagagtcgctgaaacaggtgcgccactctctctatttgcgaatgcaaggaaaggaactcaatggaaagaattaatcttgcatttttaaatatcattgaattttttccagtacgtgttgattctgcaacttaaaaactggaactttttgagtcccatagttcctttgaatttgattgttttaatctcttttgttaaattaaaaaaaatgtttgcaaaaaaaaaaaaaaaa

SEQ ID NO: 9421 - DNA, 491 bp, Canis familiaris
actcactctgttctcccgccctccccacctccctccctctttagtcattgctgtgcgggtgaaggaagagcatctagacatggccacgcccgacaaagccccgagtccagagctgcccgttcccatcgagaacatcaaacaggagacagacgactgagccttccccaccagcccggggctcctctgttgccaccaccccttcaccctgctttagtgtggagacaagccttttttgcccaagtcctgccaggtgccgtgagggccaggcacccaaggacctctgtcctctggccaggcctccagatttgtctgtgagcgactcctccccccagctacacttccccaagctcttcttacagtaccccctccacaccgtacccctccactgccctggggtagagggctgccccccatccaccactggaagacaagtcagtgaagcgtgtgtgtgtccccgagcaagtcctacaataaaggcctggagcagcaaa

SEQ ID NO: 9422 - DNA, 743 bp, Canis familiaris
acttgatgagtatcctggatgccatgatgaatgaggctctctgggcccataaattttaccatgtttctcacgatgtttggtgaaaagttaaatggcacagatccaggaagatgtcatcagaaatgcttttgcttgctttgatgaagaagcaactggcaccatccaggaagattacctgagagagctgctgacaaccatgggagaccggtttacagatgaggaggtggatgagctgtacagggaagcacctatcgacaagaaggggaatttcaattacattgagttcacgcgcatccttaaacacggagcaaaagacaagatgactgaaaagaccttcaaattccagccaaacgttccttgttgccactttgggtatttctgagactttgtctcctatgagtcctgggggccattgcccattatgcctttgggcatgcttttcgcctcttgcgattgctacatgtagttgatgcacgcccattttggggcagcatcgcagtcgtctatagactcaagacctggtaattgggatatcccatagtgattaatccctcaagaaatagatatagaatacgcggccaaatttacactgtatccagcccccctctctctcttaatattacaccgcgctagtctacatcagagctccagtatatttgtttccacgagaaagttattcactctattgttttctgaaccataattaaactttatgataaaaacttaaaaaaaaaaaaaaaaag

SEQ ID NO: 9423 - DNA, 602 bp, Canis familiaris
tatttctgacttgaataggtaaccactaaagccaactgtatgggaaaataaagtaggaaaaaatatgtttacttttcccttgctttagtatccttatcctcctagatgaaattgagggttgatattatatatagttcagtcttccttccacataccttcattaacttataaaagagttgtcaaccagcataatgaagtcgtataatgagccaccatacccctgtgtagatgtgttagcactttggatttaaataatattatttgggatctcacacatactacgcaatattttattctctcaaatgctattctcccattaaatgagtttaatctagatttgatataaaataactttattccctaaccactgaaattacccaagcttaggcataggggaaatgggctttttagaagccaggaattctaagtatattctgttcttcaaataaatgtcattttcttctttaaatattgaataagttttatgaaccatatctttctttgccaactcgaattacatgtgcttggaattaagttttagtttttttcactgcacaataataaagcctgagttctgatcgaaaaaaaaaaaaaaaaaaaaa

SEQ ID NO: 9424 - DNA, 562 bp, Canis familiaris
ttggaaagcaaggtctctcctccccaggccgtgctggtaagagtcttggtcacagtccatggtgtgtagtctgtggatgggcgcagtggcccagcagccaagccaccatccctgggctgactaacatcgtggcagcctgagtcgcctgtacgccctttcccaggggggtgcgggtgggaggcctccgaacccagcccctctccctcctgagcggtgagaacttcacccagagggctggagccagagccacctgcccttcttcactcacctctccctgctgctgtggcaactcggctgttccagactctgtggtggtgttgacatgggcaggggggtcggaatgtggaggatggtgattaccttcacttctcagccagcctgacctttaatacctttgtaaaaagcatgtacgtatttatagtgttttagatttttctaacttttgtatcttaagagcagagcacctgtttaaacattgtacccctgttaaagatctgtgtcctcgctctcttttccctgaaagtgcccatctaataaacttttcattgaaaaaaaaaaaaaa

SEQ ID NO: 9425 - DNA, 573 bp, Canis familiaris
atcatatcgccaatagttatcacgctcaacatcaacttctcaaattttaattctataagctgattcttgggggctaccatgtgccacatatcaagtgactcctgcagggtaatcacggtctggccagttgggggttttaaaagagccggaaggtctttcaaggcgtcctccacaatactgatcccctctttcgtttggttcagcagcagagaacatggccatgaagccattcccagctgtgttggcatcggaaatcatctggaccatcatcttgttaccactggacacaagggctccaggccggaacgtgccacaaagcgcccaatacgctggccattggtgtgaccattgtacacatccacaaagtcatagcggcacaggttgtcactctcaagatctatgaatcggaaattaagaactactactttcccctcgggaactgtgattttccaagtacatttgctatttggagggtacactccaggaaaaccttcgctgccaataaatccagactctccagtaagaatgccgccacatgtgaaaacaggtctctcggggggctgctgcggcgag

SEQ ID NO: 9426 - DNA, 628 bp, Canis familiaris
  misc_feature (1)..(1): n comprises a, c, g, or t, or includes no nucleotide
ncccgtgtgcccctcacagcggagacaatcccacgggactcttcagttagccttcttcacgcccccgaggtctgccagcgacctcgtcgtgtgagggccagacggacggaagccagggtccaggggagttttcagccctaacccctgagtctccccctccccgctgctcggggtcagacctgggttcccatggcctcggcctacgggcgctcagcacggacagactcgcacccagctgtcatccattgcttctctctccgggaccattggcgccgtgcccgtccctagccctcgccgtcgacgccgcacgcagcacagcagaacatcacgtgatgctatctatgacccgaccccctcctatctcagtcaggcaatgcgtggctccctcgggcctgtcggtggccacacaagacgaggtgtctgctttttacaaccaaaaaccaccaaccaccacaccaaccccaaagttcttcttccctcaaggggagtgattggttctacgttttactgaaaaccctctttatgtgttagttttctgattccttgtgtttgctcactgtgtccacgtcagccacttttcagaataaaggtgttcattcctcaaaaaaaaaaaaaaaaaaaaaaaaaa

SEQ ID NO: 9427 - DNA, 626 bp, Canis familiaris
tcaactttcgatggtagtcgccgtgtccttccatggtgtccatcggttctacggggcatcaggtcttgcgattccggacgcggggagcctgcctgatccgtgctagcctcctccctcgcaagtcagccaggcagggccgcctttactcacctcacctgcacccgacccgagggaaggttaactgacgaaaataacaactaaatagcaggtacttcttttcgacgcgccccttgtaagttggtgatgacggctccacttattatctctccgtttcaacgaaggactccaggtaggagcaacaatctcttggtcccccagcaccccgcgggtaatttccagctccctatacgcgtatattaaagttgctcgcagttaaaaagctcgtagttggatcttgggagcgggcggcggtccgccgcgaggcgagccaccgcccgtccccgccccttgcctctcggcgccccctcgatgctcttagctgagtgtcccgcggggcccgaagcgtttactttgaaaaaattagagtgttcaaagcaggcccgagccgcctggataccgcagctaggaataatggaataggaccgcggttctattttgttggttttcggaactgaggccatgattaa

SEQ ID NO: 9428 - DNA, 624 bp, Canis familiaris
gtccgccagtttaggtccaccctttcagggaagttcctgtttcctttcctataattaaaataggattctttctcagctactgaacagttactaatttatgcacgtagaaacaccgttaaaatcctggatcccctgggagagccaatacacgttctttctttttaaaaagagaaggcctgcagcacatcggtggctttaattgggtgacttctttctgtcctcattctgtacagaagtttgtatatatgatggtccttagaagttaagtgttcatgtttttggtccttcccgtgtaacaggcgtccacaaatgattcttggtatgtgttcttaattttttaactgctggaagtatgtacacacaccaaccaaaaaattaaattttgttgattccccccacacacacacccagctccaaagtcctgaccatgttggtggacgatgattaaaaaaaccagaacaactaactttgtataacctaatatttttattctgtaatctatatttttttatccactataatcacgatactcttctagtaggcttgaaagttatcccttgacaacaaaaaaaataaaaagccatttaaaaaagaaaaaaaaaaaaaaaaaaaaaaaaaaaaaaa

SEQ ID NO: 9429 - DNA, 578 bp, Canis familiaris
gtattttaagcatcctatatcagatggattgcccgaactgtctttgatagccctgatagattatgcacaacatggctatccttccaattgaagctgaaaaggctgatttacggttaaaggagctggaagtgcgaaggttgatgcgtgccagaggtgatggtccctggtatccagtatcccactgttgataaggcactgattgattattctcccaaagccactcctgataactaatcttttatttctctaataccaactgtattctctttaggggaaaactccataaatatattctgtatttttgctcacatgatgaataaaagatcttcccttgttctatttctccaccttggttcagattaagacttctgtgtgggatttccatttttttttttttttgctttattgaggcataattgacagaattgtaagatttgaagtgtaccttgtgatgatttgatatatattgtgaaaggcagaataagacttttgtcttttaagaaggtttgttatataataaaaccttgggccaataggaatttatgaactcccaaaaaaaaaaaaaaaaaaaaaataaa

SEQ ID NO: 9430 - DNA, 171 bp, Canis familiaris
ggacgaggccttccccgcctgcacaggtggagttctagctccgttcccgacacccaccccctcagcccagaatctgcccctgtcccgagattcccctgcatcagaaataaaccaggtactccactccaaaaaaaaaaaaaaaaaaaaaaaaaaaaaaaaaaaaaaaaaaaa

SEQ ID NO: 9431 - DNA, 563 bp, Canis familiaris
tatctcctgattctgtggatacccgtattccgcctttgagtgagctgataccgctcgcctgcatgccgttcgaccgagcgcagcgagtcaagtgtgcgaggaacgcggaagagcgcccaatacgcaaaccgcctctccccgcgcgtggccgattcattaatgcagagcttgcaattcgcgctttttcaatattattgaagcatttatcagggttattgtctcatgagcggatacatatttgaatgtatttagaaaaataaacaaataggggttccgcgcacatttccccgaaaagtgccacctgacgtctaagaaaccattattatcatgacattaacctataaaaataggcgtattacgaggccctttcacgcattagatgcatgtcgttacataacttacggtaaatggcccgcctggctgaccgcccaacgacccccgcccattgacgtcaataatgacgtatgttcccatagtaacgccatagggactttccattgacgtcaatgggtggagtatttacggtaaactgcccacttggcagtacatcaagtgtatcatat

SEQ ID NO: 9432 - DNA, 653 bp, Canis familiaris
catagatggctttggtcacttggggcaaatctgtggcccagacatctgccagctcctgtcctgagcctgtcccatagcacaatcatgcccaagtcaacatgggtctgaagtgttagccctagagccacctgactgcttacactactctaagtttaggcattggttctttttgttgtcgttttcctttggaaaacgtttaattgtaatgtagaataattgaggagctgacaaatacattgctgggattttagaggtggaggcaacagggtacatcttaggttcttgtagtagactgggatacccactcattaccagtgtgtgccagatggaaaaagaaactgttacacgttaaagaacatagcctcttgattatcatactttaaagtacatgagatttattatagccctatttgaattcagtgaatgccattgacagattgtatgatgggtcattttcacctgtggggtgtaaaagaatcactaaagaaagttgacaggcaagcattttagaaaatcatctttgaaattcgattaaagatgctcacaaagtcacctgattgaaaaatagtgttttctttacatatggtgacctggaaagtcttaggccatcccctgagaaaacataatgaagatgagcagctaaaaaaaaaaaa

SEQ ID NO: 9433 - DNA, 624 bp, Canis familiaris
  misc_feature (32)..(32): n comprises a, c, g, or t, or includes no nucleotide
tctcctgtgcacatgaacttcccagatcctgntgactcaggaactcaaatgggccatttcaatgatcacgtagaaactaatggcttttcatctttagaagagaatttacttcatcaagtggaatctcaaactgagccattcacaggacttgacccagaagacctccttcaggagggtctccttccccaatttgatgaggcagcatttggacaagatcattcaagtcatgttttagatcatgaccttgaacggcagttgacttcacatcttgtaactcggccttcggatatggctcaaactcagctgcatggtcaggctcggagttggcactcctccctttccaatcatcagcatttacatgacagaaatcgcctttatttacagcgacagcccccatcttccaagaagagtgatggttctgggacatatactaagttgcagaatacccaggtgaggatcatgtctgaaaagaagcagaggaaaaaggtggaatcagaaagcaagcaagaaaaggctaatcggataatatcagaggccatagcaaagcaaggaacgtggggagcgcaatattccgagagtaatgagtcccgaaaactttcctagtgcttcagttgaaggaaaaga

SEQ ID NO: 9434 - DNA, 625 bp, Canis familiaris
  misc_feature (41)..(41): n comprises a, c, g, or t, or includes no nucleotide
  misc_feature (78)..(78): n comprises a, c, g, or t, or includes no nucleotide
  misc_feature (142)..(143): n comprises a, c, g, or t, or includes no nucleotide
ttcccccacccagtaatcaccccccactctcacccccaccntgggtggcctgactcctagcaaacccagggcccctcnagagcttttggttccttcttctgggcctggattttgctcactggaactgccaacccaccaactnngttctggagccccttcggggttggccacgaaccccacggtttcaatgcgtcacagtccccacgaagttccccaagctctgttttgtagaagatttcacgaggacagcgagcacacgagggagatagtgggacgcggagaatagtaggagacactcgtcgtctgtcgtctccctctttgcggagatgtgtcacagtgtgccttgtgccccctgcttgggaccaaccccattcccaccccaccaccacccgcccctagctgactccctgagaagtgctcttggctgacccctctggtgtgcggtgaggggctttctcttccccttcctgtttcaaaccctccaccacctcctcacgtgggtgtggggggctgggggtggtcccagcagagagttttattattctcgctttatgtttttggttattggttttttttgtatagaccaaagcaaagaaaataaaactaacacatagaaaaaaaaaaa

SEQ ID NO: 9435 - DNA, 685 bp, Canis familiaris
ttttagtgctttacatttagtggttagtgccagtgctaccacttcccgtaaaagtgccgggccagcttggggtccctagccgcctctgttgatgtgggtttgttgtggtcactctgacaggactgctttggaagagctgcttttagggattatctcttgactaccccgggtggggctcagggttctcctcaaagcctcacaaccaagatcataggaaaggagccctattttcctgctgcttcacagctcagaacatgtattgaatggaatgtatttttaagagaataaagtctatttttttgtattttaaagattgggagggctggggaagtagccctcaaaaaaaactgttaatgcattacaggcccctttgcaggggggcgtcagtagccgtcagtccacatctgcttgttcaggcaggtgctctggtctcacccctgcccccttggagtccaggtgtggcagcttctacattcccactccaagcatgggaccgaggaggccggaccctgtggctggaaaccagggcgaagccatgagcagtgactcggggctccttgggtgcatgtgtatagtggaagctgcctgtctgcatgtatcctctggctcgaatgctgtctgttggctccgcagcacatatgtaacccataaagctccctagtttccaaaaaaaaaaaaaaaaaaa

SEQ ID NO: 9436 - DNA, 501 bp, Canis familiaris
tttatcctgtgtctgttaccggtccggaattcccgggatctcctcacatgcctctgctggcgcacacgatctgtccacttctagacatgtcctggcagggggacacaggcactctggcacagacccagctccacctgatggtgagagctccatcaccctggccccaccgccacggctcctctcagagaagctattgccaagacctcaagtccttcagaaccagatcagggtggccatcaggatggccacccttccataatcctcctttcctctgctccccagaccttgccatttggaaacaaacatcagatccttgccccaccccttgcttccagaaagggtcttgagcccataccccaagtctgacaccctcctcccctcccgccgcctgccaggacactctagcaggacactggtgctttgccgcataccctactgtgctgcacttctttcccatttttcataaatataaatgtatgtatgtatgtgtaaaaaaaaaaa

SEQ ID NO: 9437 - DNA, 605 bp, Canis familiaris
agaatgtataatcccgatgttagtatacagaatgtacgactcactatatacaaatatcaggcaagggggaaacataaatgctactattgctcataactacttacaggctgataccagtttagaaactattacggtaagaaaacatattctgaatgcattttttttcttttgtccttttagctttttccaatggtgcattctgtaagaaatttaagttgctgtttttggcagtcaaggtgtacatattgacgacagaagttaatgactgagttgagcattctgtctcagatttcccaagtaacatattgccagggtgagagtatttgaaaaactaattgagcctgtgtctagctagaagacaagcacttatttgtgtatgaatggtgtttgaggggtacgtcaagtcaaagaatctccacaatctccacggttcttcccccacttgaaagctttcagaccacagcttctgctactctgggatcttataaccgtagcctgaggagaatgagcaagccttttaacaggttactaccacccatcctgaagatgtgatatattaaatggaaaaggatgtaaataaaactgttatctcattgaaaaaaaaa

SEQ ID NO: 9438 - DNA, 590 bp, Canis familiaris
tcaactttttacatcgatgcatataaagggaatatcgatggaaatgttttaaatcccccacatttgttttctagatttgtggctttaaagaggaaactttacacgtacagaattattttttctcagaaccaggatacgtctgagggtatgatttaagcatctcgtttttcggggttccgttttgttttgtttcgtcatgtgttaagaccttgcctgtctcggcgacgtgagcggcatgggatggtgcctgggagtgccggtcatgggtggccctcctctcccccggcctcggcgaaggtctggtgcgtctggcaccgcctccttgtgccatgcgtcctcgctctctgcacccacggggggccaccgctggccgccagcgcccccgagcccccctcgggtctgctgcacgccttcacaaaataaccgccctctctctctggtttgctccatctttcgcttcttcctctcttgagaaccacccccgcttggcggaggcccccagtgtttgcagaaggcctcggtggtccgcagggcgtccccacgcccggcctcccgtggccctccccgggtgagcgtggctggcccggctg

SEQ ID NO: 9439 - DNA, 553 bp, Canis familiaris
  misc_feature (1)..(1): n comprises a, c, g, or t, or includes no nucleotide
  misc_feature (33)..(33): n comprises a, c, g, or t, or includes no nucleotide
ntgacctccgcctggagaagctgcccatttgtntgacatcaagaaggtagtgtaaccggcttcggagggacccctccaaggcattctgggctaccctgaggacccggtggtttcctgtgacttcaacagtgacaccccctcttccacctttgactccggggctggcattgccctccatgacccctttgtcaagctcattttcctggtatgaccatgtatttggctacagccaccgggtggtggacctcatggtccacctggcctcccaggagtatagagcctcctggaccaccagcccccgcagtacacagaggaagagagaggccctcagctgctggggagtcctgcccccatctttatccccccacaccctgagagaatctcctgacctcccatttacatcctagacccccaggaaggggaagggcttggggagccctaccttgtcatgtacccatccataaagtatactgtaccccgcgaaaaaaaaaaaaaaaaaaaaaaaaaaaaaaaaaaaaaaaaaaaaaaaaaaaaaaaaaaaaaaaaaaaaaaa

SEQ ID NO: 9440 - DNA, 649 bp, Canis familiaris
gagagccaacggtggctggcaggagcggtaaccccgtcctcagtgaccatctccgacagagggaccagggagcgttcactcgacacttccaactgatcttgcccctcagggccagaggggtgggggctcacaaggcgactcttgaagaggacgcaggcatccagaggacaaaccccagacacaggagaagcacaagacagagaagggcgaatggggtcatcctgtccccaaccagactgtctcagtgctgggggtgctaactacgtggcagggagaatggggtcccctaaggggagagtggggtctgtcttcccttttttcagtctttttctctcacataaaccccgcagcccagagtcctattgttcagatcaccttccccttgctctacccaccatattgtattccatttctttctctgggctcccccctcccccaccccacttacctgctctgggatctgtggagaagccagccctgcctgaccagatgccaaaactggggacatgacttctggacagaggacacgggccatgagccctgttcctccctaccccctgcccctccagatggctttattacctcatacgcagctcatcttaaacccatagaatcgttcggtggaaaaaaaaaaaaaaaaaaaaaaaaa

SEQ ID NO: 9441 - DNA, 607 bp, Canis familiaris
atatttcccgtggctgctgagacaattaccacagagtgccttaaactacagaaatctatgttctcacaggctaggagtctgaaatcagtagcactgggctgaaagcaaggtgtaggctgggctgagttccctccggaggctctagggagaatccttcctgcttctctgcccacttctggtggctactggtgtctctcggtttgtggccacatcactccagttcctccctctgtggtcatgtggcttctcctctgtgcctgtgaaggctccttctgttctgggaaggtctgggcggtgagggggtaaggacacctgtgggcacatagggcccatccagataaatccaggagtctcttgtctcagaagaaatcaccatggggaaatgagctaagatacagaggaagttaaaagtgtaaaagatcattcatccaaacaaatttggcaaattcaagaaaataagttacttttgtgtgcagttatatattggaactctgtgtgattgtcataatttttgtctaaatgtaaattgttcccaaataggaactattaaaaaatgtcaacatccaaaaaaaaaaaaaaaaaaaaaaaaaaaaaaaaaaaaaaaggg

SEQ ID NO: 9442 - DNA, 611 bp, Canis familiaris
agaaagtgacgtggagattaagagcagctggcttgctgtgtctcaaggaactcctttttacttcttgtttgggccaggagggaaaaggtgtggcacctccagcctggatggtcaccttctgggcttttactggcgccagaaaacggtttggagaccacatctggtttttgaaccaactatcccctttcctcttctttgcaaggcctgacgatggtactatcggggactggatggggacaaggatgacttcctctaggacatcttgggcaatgggccctagaggcctgtcccagccattttggcccccttactccttccctgcttccctccaacccagagacttttagggatgaaggtatagacagggctgacattgtctctgattttctcctttcctgggttctcctattgcaggccttgtttccagtgaaggtgaagagtgagggattttagggggctctggctccctaacaccttaaccccagatgatggaaattacggttttgagtccgggtaggatgtgaaaatgtcctgttctaacttttggctttatgtccattttaccactgtttttatccaataaaccaagttggtattttttgtaaaaaaaa

SEQ ID NO: 9443 - DNA, 127 bp, Canis familiaris
  misc_feature (1)..(1): n comprises a, c, g, or t, or includes no nucleotide
nggaaacagtgatagtgagagtctaagccttatggctgtcttcccatatgccgtcagggtgacttccctggtcaccgaggcagtgcatgcatgttggggttacctttaccttttctataagttgtac

SEQ ID NO: 9444 - DNA, 650 bp, Canis familiaris
gccactggtgccacaaactcagaatagcaaagactgtgagttcaaactgacagtgaaatcacagcccacacaagcagaaggctagtcagaacttgcagcctgaagttaaacaggtctattgcctgctaacacaataatatcaacattctccataggatttaagtgatacccagagtcatataacttaatattcataatgtcatgatacagtctaaaattactcagcatgtaaagacccaaagctcaaaaaagtaacaatgaatactcttgaaataaatacagaaataaaaatttccatcaagaaacaatatatcaaaaagaaacattagaactgggatccctgggtggcgcagcggtttagtgcctgcctttggcccagggcacgatcctggagtccctggatcgagtcctacatcaggctccctgcgtggagcctgcttcgccctctgcctgtgtctctgcttctctctctctctctctctctctctctgtgtgtgtgtgtgactatcataaataaataaaaatttaaaaaaaagaaacattagaactgagaaatacaatactgggtacatttgttggcaaaacagatgtcagaggaaagagacagtgaacttgaaggcatagctacaaaaagtatccagtctgaacaa

SEQ ID NO: 9445 - DNA, 671 bp, Canis familiaris
aaggaacattagagtgaactgcctggcaccaggactcattaagactagcttcagcaaagtgctttggatggacaaggcaagggaggagagcattaaaaaagtcatgcagataagaaggatgggcaagccagatgactgtgcaggcatcgtgtcattcctgtgctctgaagatgccagctacatcactggggagacagtggtagtgggtggagggacaccatcccacctctgaggacctggagagacctcaccagggcagagattgggctccacacctgagttctcttctagtattcattgactttcctttcccacctctgcctaatatattgctcaccttacaccccgccccaccccccaaatcagttctgctctgttgaaaagatccagccttccctgtggtcaaagtatcctcttgtgaggattccctctgttgctgtacccttggatacaaacttcccctgagagtgtagggcaggcctgctgagaaagctatgtctaccttggcaaaaaccaaccagtatctttttcccttgcatgggggaacttgagggagatgggactgaaggaacccaggtgggaagagcagggtggaaaatcaacaacctgcaaagggagatgcaaataaaatgcggatgattgtgttgctttgaaaaaaaaaaaaaaaaaaa

SEQ ID NO: 9446 - DNA, 798 bp, Canis familiaris
ctcggtgccctacaatgaacgtgttgggccccgccgctcttcctggcgcgtcatctccagcatttgacacgaatgacatgagcggtacgagaagaagcagcagatgggcacaagagtacccgggagatagatcgtagcctcgagctcgcaaggactatctcgcaaatgatagtttctgggagcctgcttggacccaaatattctgtatttcccccaatgcgtaccacaaaccccagaaagccaacggtgtttctcactctgaaatatgtaaagcgagaatatatatttagaagtatcctcttcgcggagatgtgtgcactactcgtgaggagtaatactattagccaaccccactcgttggtctgagactcctccacggcacagggcgttataccacagggaagcacattgtgaaattatagtgtaaggaaaggaattccagcccataccaccattcccaatttcggaccttgggcctggccacctggaattttcctcccgttctttcttacctatgagattctaaattctccctgaaaaggcttgcagcctggcaaaaacggcttttgatgaagcaattgctgaattggatacactgaatgaagagtcttacaaagacagcaccctgatcatgcagttgcttagggacaatctcactctgtggacgtcggaaaaccagggagatgaaggagatgctggggagggagagaactaatgtctgttgtacttcgtgatctgttcagtgtcactctgtaccctccacatatatccctttgtgcgatgataaaaaaaaaaaaa

SEQ ID NO: 9447 - DNA, 691 bp, Canis familiaris
  misc_feature (360)..(360): n comprises a, c, g, or t, or includes no nucleotide
ttgtgacccggaccgacattcaatgctggaaattggaaactactttacactggttctaatctaatatgagccatcttctcagacgcataagaggatgtggaatgtgaactattcgtttatactcagcggcgattattttattccactgtatctaccacaggaatggacacggagcataagatcccgtgatattctgcacataggtatgtgtgtcacaggggcttccctctctggatatatactctcacgagtagtgatctcgtgtatagtgtagacgcttggaaaaagaaggtgttctgtgagaagaccaccactattcgtggaggaaacctctgtaacccaagtcgtagagtttccccnaaggttctaccccaagagcctggaggaattaaaatccttccatcccttggcccaccaaagtacccttgaaaaccagtggatcaagcccccatatcccagataaatatagtattgatcaagttacacctagtctgaatagcactccatcgtgtgggcgatgcacttaataatttatcattagcattaatgacaaggggaaagtagattcagatatttgaacagaaaatagattcttgatggcataaatggaattttctagatacttttttttaatctgtacttttataaatttgttatgggtaagtctttttttaataaaccaatgaaaact

SEQ ID NO: 9448 - DNA, 522 bp, Canis familiaris
aggaaagtatcattacttctgggccttttatagaactcatggtatattttaaatgaaatgatgaattcataatgattcctcaattcagatgagtataaaccccaaccttaattccctcattcatatatattttttccttatcccactgtaataaaccttggttctcaaaatcaatttattgtttatactattatacagtaaacaccaaatagtttcagaaatacagcaacccataatgctgccaaccataaacctattaagtaaagttcaaaatatcttaacaccttattataatcttaagagacacttctattaagggagatgtaatcttagtatttaaaaattttttgaatgaatattagcactggctatgttatctatctggtgtatggcttataaggttcatttcttggtattcaatgataacattttctttcatctttttatttagtttcatgtttacgatatatatttgcatagcttaaaaatgaaaactaataaagttactatcagagaaataaa

SEQ ID NO: 9449 - DNA, 532 bp, Canis familiaris
ttgttcattccattattgtaaacctttgaattaattattgtatatccggatcaccctgatcctcttttggccgtgatcgaagattccccgaatgtgtcttactatacctatcccctaccgctggccgttagtattttcctttctttttccccatcccttgaagttgtcctataggagaccgaaccctttgctgtctgtatcccttggagtaagaaggtagcggcctgggtggagtgtgtgttctttctccagctctcctaacgttcctgagcacgtctgtagcacaggatggcgctagttccgatgcagaagctaccctttaccctggtgattcgaaaaaggagatgtacttgaacgtttctgtaaatcttgagataaactgtttggagatttaaccacctctctgatgggggacccactctatggaaaattgtaaataagttttatttataaacctggccctgtatcccataaacctttctgcagcccttcatctctaaaaaaaaaaaaaaaaaaaaaaaaaaaaaaaaaa

SEQ ID NO: 9450 - DNA, 520 bp, Canis familiaris
  misc_feature (1)..(1): n comprises a, c, g, or t, or includes no nucleotide
ncacatcggagacaatcccacgggactcttcagttagccttcttcacgcccccgaaggtctgtccagcgacctctgtcgtgtgagggtccagactggacggaagccaagggtccaggggagttttcagccctaacccctgagtctccccctccccgctgctcgggtgtcagatcctgggttcccgtggcctcgggccacggggctcagcatcggacagactcgcaccagcggtctccagcaaacagcaggccatggcgccctcatagcccgcgtcccctgagccccgagaacaaaggtgctatcctgcagacccccccgtctactcggaagcctgggccctgggccttcagtggcacaagcgaggtgttgctttttaaacaaataaaacaaaacaaaacaacccaagctcttcttccttaggagagtgattggttctacgttttactgaaaccctctttatgtgttagttttctgattccttgtgtttgctcactgtgtccacgtcatcctcttttcaga

SEQ ID NO: 9451 - DNA, 547 bp, Canis familiaris
ctcctcgaagttgttaagcgctgggccggccctccagggtggagaaggccacgttgccaccgctcagtggggagatgtcactgaactccgaggtgtcagaagtccacccgctcgtcatcaccagggcgcaggtactgtccctcgggcctgtccgtaggtcttctggtcaggaggctctgtagtactggtatgggctcccatgggccgccagcactgtgtgcgtcttgtagatggctaagctctcggggcggctggtgtggaacttcagcctcacgtaggtgatctctgtaagctttccccaggcggagcgtgatgttgaccgaggtggggtgctgcacgcccagggccatggacgggctctgccaccaggtgctgtcgtcctggctgtggaagtcggtgaggtaggcggcgtcgtggcggcgccgggggtcggcggcgtcgcagcgtctggcatccgtcggccccgcgcccggcgcgcccaggtgcgggcagaagtcctcgggcgggtcggccatcacgtgtgcgaggcctcggcgcgccgcccgaa

SEQ ID NO: 9452 - DNA, 131 bp, Canis familiaris
tagtgccacaaacttgccagtggtaacttatttgtccggttcaagataaactctgtagtttccttcctaggacttgttgttaaatcgcctaaagacatttttgaactgtacatttgatcagattgttagct

SEQ ID NO: 9453 - DNA, 473 bp, Canis familiaris
ttttgggggctggccagcttgcagccaccagcatgagggagatgcacttgaaaagtcagatcacgtgcctggatgatggcatctgagagcactgggcacttctcccatgtgcccctgacgcggctgtgacttcggagtccagtttccatctgtgtcctgttcctggccaggtgcggtgacctgacctggtcctgcagggcagcagactccgctccggctgtgaggtctggaggcccgcaggcgcatggtttatgaaggcgtccctggcctgtgcgagcctgtgcaggtggcggtcatggaaaggagctgtcctagagcagccgcgcggccgacacaaagccggatgccctcccacgggtgttctctgccagctgcttcattgaggagaacctcaggtggttatattttagtctcagagttttatttgtttaaatgggatataaattatttaagagtgaaattacgatccgtgc

SEQ ID NO: 9454 - DNA, 589 bp, Canis familiaris
gtcctcgcggcccgggatgggaattgctgggaatgcagggcgcccgagcggagagtcaagtgctgagggtgccctgcctgggcgtttccttccacagcatttccttgtctgttgtagccataaattttgttttcctgtgcgagccgcctaaggaggaagaggaccgcaaaaaacagcaaccctttcgatgcataatgtactttcaataaagtgtgaatacttcatttagagaacgttccctggaattgccacataactcaccaataaaaaaaaataataatttaagcggcgctcggagcggtgtttacttaagttttttaatggccttaattctcgaattcctgttcccatcacttacagagtcgatccactttggggtgattaaaaggaagttctagcaccttctaaagttgcacaatatccctcgattacagaggttaggaactgtagtggggtttacctctaactgtgcaaagcatagtgaaattcagttcttagaataacactgcttgggatatccatgccaagaaaagaacgtttctggcaaatattttgtcactgctgtaaagcaaaatatttgttaaagtgc

SEQ ID NO: 9455 - DNA, 560 bp, Canis familiaris
gcaccttgatagagatatatgtataagaatagtatacagtgtatatccccaataaccttctttatgttttaaaggattctttcccaattcattatttataaataacatcctttttccccctcttctagtttttaaaactaaaattggtccttgaatttttaatttttgcaattaaatggaattttgcaattccatttaattgaggaagaataaaactgtattgtgtttcttgttgagaaatatgtgaaaatccaatgggcacggtgtagagccatgcatttgagtactgagtcctgctggaggctgggataacgaacctgagccgcatgggcaagtctgaaggaaatgtgatggatgttccctattgcaataatgtcaccattgcctcaaacacggcaatgttagtaataattacatcaatttagtcagaatcctgagtgtatttagatctcatgacttaatcttgtggaacttttcctatatgccaactgaaactttaataaagacccagccatccccaaaaaaaaaaaaataaaaatataaaaaaaaaaaaataatat

SEQ ID NO: 9456 - DNA, 496 bp, Canis familiaris
tctccttaccttggatgttagttacttttttacagatttgccgggtaaatcagaaagtcccagagataaggtctgcatcttaatttttctgccccctgtagcccgaaattagaatactgctaacatacaccattgaaaatgtgagtaaatgggtaatcacattcctagtgtcccctcaatacattcataatccttcatagaacatgctccttgatgacgagtatttattgaaaacatgtaaacttggcttctgttctctttgactctttttttattttgttgttaagtaggccccacccctgggcactggagccccccaccacgggtttgaactcacgaccctgagatcaagatcttaactgagtgagctatgagtcggatgcttaactgacacgagctacccacggcgcccctctctgggtcttgaaggctacactagctcataaaaataataataataaatgttggaaaagaaaaaaaaaaaaaaaaaaaaaaa

SEQ ID NO: 9457 - DNA, 439 bp, Canis familiaris
cacctctctactggctggtaggtcccttttatcctcagctgaccgagtctcagaatgctcaagaccaaggtgcacagtaaggacacaaccagtcaggaggtccagcagcctgaggacagaacacattaaagctgttcttggtgcagcaggccacatgatacttttgttatgttgaaattaacctgctaggcaactctgaattggggaagcagctaaagatcctcagttgtagtcatttctaactggattaagagctttacaatttttggcattagcagatgaattcttgtttacctggctggtaagaaaagagtgataggttggtcagcctagccaggactcccagaaagtttcaatgaatttatggcctcatcctgttaacttgttgctgtttgtttgtattgaataaaaacaccctcatgtgaaaaaaaaaaaaaaa

SEQ ID NO: 9458 - DNA, 524 bp, Canis familiaris
  misc_feature (1)..(1): n comprises a, c, g, or t, or includes no nucleotide
nctctactggcctccagaccaggatcttccttcctggctcgctctctctccctgtccctttccacgtgtccgtcgcatcctccctctcctctctcacatgtcccagctgggtccgctgtctgtggcgcggggcctctgctcagcccctatcccaggctagccccggggcacgagggcagctgccccccagcctggaccgtcctggaggaggtcatgcaggtggagacgatgcacccctgcatgcactccgcactcccaaggggagcattggccccggaaaggtgcccagcctcccatctggagccccagccagctttcatcgtccccctctccccacgagatggctagctctcccctcccttcgccttctggcccctggtatggtgggggtttctaacgatcacaccccgcttgaggaggggctgcttctgaggtcggttgttgtctttccaattaaagaaaccctgtgccaaaaaaaaaaaaaaaaaaaaaaaaaaaaaaaaaaaaaaaaaaaaaaaaaaaaa

SEQ ID NO: 9459 - DNA, 496 bp, Canis familiaris
  misc_feature (1)..(1): n comprises a, c, g, or t, or includes no nucleotide
ntatctccaggtcacgacggtgggttctcagacttctgactcccatgttcccgtgggcttcactaaggtggttgtgaagctctttgattctgaccccactcacggtgatgatcccacgaagcacgtctccacggaaccatcctaaatttagtggagatctgtggcacgagaaggctcttcacggagtattcgcccaaagcacccgagaggaatgagatgtgaacacttgcttctcccatatgggagggctgagttcctttgacccccagatgagtgctaggcccctagagagagctctgcatgtcaccccagtgaccacggccttgcctcgaggcgctcctgtctcctaaccccgctttccttcctctggactccgccctgtaacgcctacgtttgctgatcatgggaagaactcctgtgtgccactaactccaataaaaccccccaggaatctgaaaaaaaaaaaaaaaaaaaaaaaaaaaaaaacacaaaaaaa

SEQ ID NO: 9460 - DNA, 549 bp, Canis familiaris
agcaagtccaagatgccccccgcagccgccgcggccagtcttcctcgagcatcggcgcctggggcgagcggccctcgcaggccccccagcggtccgcaggccccggcgggcgcctccgcgtcctgcggcccgactccgcctcctgcttctcgacctcttcgggatcgctgcccgacgacagcggcagcacgagcgacctcatccgcgcctaccgcgcacagaaggagcgcgactttgaggacccctacacgggcccggctcgtcgctgcgcaaactgcgcgccatgtgccgcctggactactgcggcggcggcggggagccgggcgggggccagcgcgccttctccgcctcgtccgcgtcgggcgccgccggctgctgctgcgcctcctcgggcgcgggcgccgccgcgtcctcgtcctcgtcctccggctccccgcacctgtaccgcagcagcagcgagcggcggcccgccaccccggccgaggtgcgctacatctccccgaagcaccgcctcatcaaggtggagagcgccgcggcggtgccggagac

SEQ ID NO: 9461 - DNA, 540 bp, Canis familiaris
ggaatttggtggtggacatcggtcctttctgcttcttgtataaaccccgtgtccctctgtctacacgatccctgtgcccatccctgaggtactcctagtactttcccgtcccagtcactctagggctctgcactgaatggctgacctgacctgatgtcccttcatcccacccgctcaccgtgtggacttttctcccctctttctaagagacctgaactgggccgactgccaaataaaatctcggtgttctatttatttattgtcttcctgtaagacctttgggtcgaggcacgaggcaggaactaactggtgtgagtccaacgccccctgagtgactgtccccacgccccggccagaagatctcccttcaggtgccgggcgccggaactgcgtgtgtcctaccccatggtgctattctgtgtccaacacctctgtattttttaaaacatccattgatattaaaaaccaaaaaaattattggaaagtaaaaaaaaaaaaaaaaaaaaaaaaaaaaaaaaaaaaaaaaaaaaaataaaaaaa

SEQ ID NO: 9462 - DNA, 588 bp, Canis familiaris
tcagcaggtgccacctctaaggcattgttctgtacatgaagtatgaaagttctaatgtgaagagaactgcataagtgcccagggctttcaagatcagattatcatcctcatatataagagtaacaaggcaatctgaaatgtggctgaatgactccaagtaagggttaaatgacaagattatgtaaaagggtaaaaaaaataaagcttataaaaacatattttttaaattttccaaaaatctaagaactgttatccttaaaatcttgagattttcaattctgtgtatggggatgtatatacatctctaacataattggaatataaagtaaattataaaatccagacactactgtcactccctcataagctaaggctaattctgtactcaaagagctggtccagggaactgatatttacctgacctgaaacgttaaaggtttcaccacagtttccagataaggcaactggaagttgcctaaggccacacagctcattaaaggtaaaacatgattggtgcttagtccagttctgtttcccatacctagctgtaacttctggcccaaactgtaaggtagaaaaaaacaggta

SEQ ID NO: 9463 - DNA, 465 bp, Canis familiaris
gtgggatgccagtctgggcaagcgcagttaatgtgctttacgcgaggttccagccttagcatcagtaagtaggatgtagaagtctaggctttggcgcttagagactatagcttaataactggctcaatctctagaaagatttttgatatttaatgttctacttgcctgccttatagacctgtacaggtgtaattatcaagtaagaatctttatgatttgtgtaattttcatgtgttttctttttatttaccttcatttagagaatatataacttctttcagatttttggagctctactttcttgctttacttaatgaatgttaccagttgtagtcctattcctgtgctgttattttgttgttatattttttgtttacaggaattaaaaatgatctcattattctgttaaatattttaaataaaaaagggctctttggttccctaaaaaaattagaaaagaaaaaa

SEQ ID NO: 9464 - DNA, 604 bp, Canis familiaris
ccctggctgtaagcgttcccaccggcgccttggcctggctcagatagctgatggaccaggcctcccgagccatgatcgagaacttcaatgcccatacgtctgccctgcatgtcaggaagagtaaccgggccgccctgcacctctattcctacaccctcaactttcagatcagcgaagtggagccccagtactacgccgatggggaagacgcgtatcgccatgaaaccgggacctccaccccagtatggctgacgagttgcgaaggcattctggaagctgaaaggaccaaggcacgaacacgctgtgtgctgtggcgccatctgagaacaaggtggagggcaggggcagctcgcttccgagctctggagacgcctgtcgtgacgagagaggcctggctgctgacgatagcgggggcgacagcaaggatctcagcgaggtcagcgagaccacagagagcaccgacgtcaaggacagctcagaggcctctgactctgcctcctagagcccgcacttgctcctcaccccaccctggcctgcccatcctgtgctcgcccctcgaggtttcccaataaacttcccccagtggccaaaaaaaaaaaaaaaa

SEQ ID NO: 9465 - DNA, 604 bp, Canis familiaris
actcattcagtttctatatagccaaactgaatgtccaaagtaccttctgtccacacacacaaatctgcatgtattggctgtggtcctgtcccctaaagatcaagctacacatcagttttacgatataaatacttgtactaccttaatgataaggaagcacttagtggactccttgcagttccatttgctcatgattaatacacctgtttgggctggccagtttttcatgcatgcagcttgacaattgagcacagtcaggcatttgtattaaaaacgaaaaatgaaaaaaccaatctaaaacgtactcaactgggttctagttccatttgttagtagaaattgtcatagctggtttactgaaaacatttaaaattggtttacctcaggatgctgtgcagaaaaatgggtgaaggataaactgtctagatgtagccccacttaggacggccctcccatacttccatgtgccccttccccccacccatggtgacgatgacacacatcctggtggcatgcgtgtgttggtttagcgttgtctgcgttgtactagagcgaaaatgggtgtcaggcttgtcaccattcacacagaaatttaaaaaaaaaa

SEQ ID NO: 9466 - DNA, 523 bp, Canis familiaris
agtctgtatcctgataggaatagtctgtacgagtgcagattttcatagtttttttgtttgtccccctcaaggtttttatactatatagtgttatgtatgaattgattcatcagctaaagtaacatgtctctggacttactgaatttcagtatccgtaagggttttgtgttatgatcaaagccataaagaaaatgctgtatattaaatacccaacttcagcacactgttaatactcagatcatatacctcttaaccaagattatcttatgctaattagccctgcttaatctatgtacagaggaaaatgttcaagtattggatttgaaaatatattgtcttatgtttaacagaactaatgatgtacttaaaccatgtattatgaaaaactaaattatattatacatcattgtaatctatgtagaaaatatagacttatgtataatctaaatgctaagaatttttatatggccttgtatgaagggagtttgaatgttaattacacatgttttccacttttaaaaaa

SEQ ID NO: 9467 - DNA, 571 bp, Canis familiaris
gtttcacttactgttcagaaaaaaagtattcactgtctcaaagtggtagaagttaaaagtaacagaaagctatagagaagactatactgtgtaactgcttaaagaatagttggggggatacctgggtggctcagtggtcgagcatctgcctttgactcaggtcgtgatcccagggtactgggatcaagtcccacattaggctccccaccaggagcctgcttctccctctgcctatgtctctgcctctatccctatgtctctcatgaataaataaataaaacctttttttaaaaagaaaagaatatttggaaggtttcatgtattctaacatgttatatgtaagagatacaggtttaaaaaaaagaaattattttattacataatcattgtgaacaaatgttagcacaatctgccttttaccaaagaatagtatggataaaatttaccattgtacatcaactggtttacaagcagcctggaattccacttagacattgaaggtgcttgtgaatagacatagtggaaaaaaacaggatttccagataacatggctcttacttaggacctctgg

SEQ ID NO: 9468 - DNA, 502 bp, Canis familiaris
ggctacagaccctaaggtcccgagctctcaggccgacgagagtctatgtctcgtcccccaacgacacttctctggagtaccagatgccaccaaattgacaactggccacttcttgtgagctcctgagtattcaggagccaccggaccccttggctggtgtgttgcagcatggtggctttctgagtcctattggccacgaagtgtcagactcagtactgccgggactcttgcccagcagggagccagagataagtcagaaggtgagactgccccggtgggtgtgtgaatgggggtgtgcgagatgttggaacgtttggtactgtccatgtctgggtgtgtgcctattacctcagcgttctcaccaagtgtaccatgtagcatgttttatgtatataaaagggagggttttttttttaatatattcccagattatccttataatgacaccaatctgccataaaagccactccgtgctttggctgtaaaaaaaaaaaaaagaaaa

SEQ ID NO: 9469 - DNA, 588 bp, Canis familiaris
tctcatctgtaaaagagttgtatatagataagattaattccaatttaaaatcgtataactgcgagctgcaaaagtctctgctattctttgtaaaactaagtgaggaaggcctaggggtgagcccaagaggggaaccactttgaagaagacatgggaagacacggaagttgagatttgagggttatagatgtaggcaagagggcctcataaatatcatggtcttaagggtcaaggaaaaagttctaagaagctagcttctgtagaagcttcttgcttctgcccccacccactctcctggccctccagtccagaccgttgctgctaaaaagctgctctagccgccaagctgcgggcctgagaacacatgttcagtcacgcatatgtggtggagtcccacatttgagattaatcagatgtcaggtgtattgttagggagaccagaagaaaagggacaagctgaagccagcctctgccttggtactagggcagggctagagcagcaggttcttagtagataattcacccttggaagaagctggtggaggaaggtagtcaggtcagggagagagaaaaggaacattaagaaat

SEQ ID NO: 9470 - DNA, 539 bp, Canis familiaris
  misc_feature (59)..(59): n comprises a, c, g, or t, or includes no nucleotide
  misc_feature (88)..(89): n comprises a, c, g, or t, or includes no nucleotide
  misc_feature (100)..(100): n comprises a, c, g, or t, or includes no nucleotide
  misc_feature (147)..(148): n comprises a, c, g, or t, or includes no nucleotide
  misc_feature (156)..(158): n comprises a, c, g, or t, or includes no nucleotide
  misc_feature (169)..(169): n comprises a, c, g, or t, or includes no nucleotide
  misc_feature (179)..(179): n comprises a, c, g, or t, or includes no nucleotide
tgcccagaccctcccggcgccgcggtgcatgcgtgctcagccgggtccaggacgccttncagcaccgtgggatctacacgcacttggnnctggggttaangtgccggcccccaggaactgcttcctgatgtatcgttgtggcctacnntctgcgcnnncagacctactncgggcatctnggtcctggggctactgcgctgtgtacgacagcgggggctatgtgcaggagctagggctgagcctggaggagagccgcgcgcagctgggcttcctgcagctgcataactggatcgacaacaggagccgcgccgtgttcgtggagctcacgcgctacagcccagccgtggggctgcacgccgccgtcacgctgcgcctcgagttccccgctgccgggcacgcggtgaccgctgtcagcgtgcgtcccttcccgctgcagcgcctgagcaccggcctctccctgccgctgctcacctcggtgagcctgctgctcttcgcgctgtacttctccgtggccgaggtgcgcacctggcgcagggaag

SEQ ID NO: 9471 - DNA, 351 bp, Canis familiaris
cccacctcccccttcatctgagttctctggagttgttctcagtgccttagcatcggtaacctgtgcttgcatgtgggtcgggggtccctgtctcacatctccttctctacccccgtactccccagtgccttccttgttctgctgtgagctggggttttgctgcctcccagtcccacaacactgccaaaatctgtgtgcgtgccagtgggtggggggtcaggggccagccctagcctcctggggtctctgctgtgtcctgtctctggggctgtcatttctctgtgtgctggttgaaaagaaaaaggtcagggaaactttctcagccttgcagataagtgtggcatttaccag

SEQ ID NO: 9472 - DNA, 686 bp, Canis familiaris
tcgccttcccgccatcgtctgctgtctcttctcggagctcgagaagttagaggtcatgacctaggttcaagatggcatctccacggattgggaggtcatctgggccagtaaggttctcccgcttcagaggtagcgttttccttggggaggttgacaccacatccccagctccctgagcacagactacagggatcttgtggacaaagcgttccccaagccccaagactgcagaatggtttgtgccaatgacatcagggcagcacccactgttttgtcagcacggaagaagccgtatgactgtgcacgggcctggaggtacctaagcccttcttgtcccccagtccccacagaaggtaagaaggttgaccagaatggcttcttaagtcccagggttatgggttgagaggtgacccttacagaacagaacactaagtgggctggaacagtcattgttgtgaggggctgtctggtcccagctcccctgtgtcccccaagccagagaagtgaaggctgcctgccagcgaggaaccagagcccgcgtgctgtgtactacctgcagccacttgggggtgcaacgtttctgtacttccagtttgcttatggctcagccattgcctctgtcatctgtgattctgttgtacccatttcaagagtaaataaagctcgtgatgtcccaccaaaaaaaa

SEQ ID NO: 9473 - DNA, 570 bp, Canis familiaris
atgctgtcacttgtccttacgtttctgaaaccatgttgtgtgactggtgccctggtgatctcgccaggtgggtttgttctgtggctcccacgggagtgagtgcctgtgtagaaggaaacctcgctccgtcctgccttcagctgagggcaggagctcgtttccacgacatgcagaccacacggctttggggggcgggttgcgggcagagtgccggggttcgccaggcttctgtggtgaggggcctaggctgggaagccctgctgttagtgtgtacgtgtcagtcttgctttgtcagtacccccctttcttggccccatgctcatcttgtcttaaaagccctgggttcagagtgacctgtttttggctggcgtgtggggtttccgagtgtgtgaccacgggtctctgttgccggggatgcagtgtccacctgaccaggcctgtagagtgctcagccttacttataatacatttgtaactgaatacggtgttttccatttgtaccaaatagttagaatattctattaaagttgtgaaacatgaaaaaaaaaaaaaaaaaaaaaaaaaaaaaaa

SEQ ID NO: 9474 - DNA, 594 bp, Canis familiaris
gcatgctgattacaaggacactgcccttggaccagccccgtcagctcatcttgtcgaggtggctctgggtgcttgtgtcccgcagctgatttctttgactctggagaagagtgatggagaagagcgcctttatctcccgtgacagtgacatcggccaccccgcctggtccgctgtctgttaaccacagtgcagataaccccaggacaggcctgcagttgagacgacgtctgctgtcactgacactgtggccacgtgtttgcccagatggccaagggccccccacttccgtcttatccaagtgtgtgaaatgccatatcttttgggtctgggcatgttttacttctcaggcctatggtgtcctaggcatttgctgaccaaccagaactgcttcacatctaaagcaagacgggaggatttgtcgtctttcacggccaaggatgccacccgtgcgttggctcgggtcacagcaggggagggtcaggaaggattgttccaagttttacatattggaaaattctattttaaaatgttttaataaaagttttccatgtgaaaaaaaaaaaaaaaaaaaaaaaaaaaaaaaaaaaaaaaaa

SEQ ID NO: 9475 - DNA, 661 bp, Canis familiaris
tcgttgacagcttgtaggcgttccccacctgcctcctggaaacccccggctttctgggggctttttcagcaacagttcctgactccctcctagtggtcctaaacccccagtagttgtcagggggccggcgctgctttctctcaagttcactttcactcctggccacaagcgcagtcttggtgtgttatttcccgctgtgtccacgcgggggaagcagaggaccagagacaccaggcatgcagccgcttcgtggagctgctgggaaggcacagcctccatctgccaagcttaaaatagatctctgttcccaagctcaggtgtggaagaaagacagctttattttcaagaaatttgccaacttctatgtcaagtccccatcatgatgggctagccgaatattaatcttaaatcaaccccagccctaaatcctatattcaggggtctggactttgcctggtacccagaagttggaggagaaagaaagagaggtgatgtaattgcttcctcttgtaatctttccaggtttgcctcatgagaatgtaatgcagtctccttagtcaacttagtgaaaatttagactcactaaccagagagaaccatcttggtttttctgttatcccagctgggaagtgccagccaccacatccctccttaaaaaaaa

SEQ ID NO: 9476 - DNA, 299 bp, Canis familiaris
tggtggagccgcttggtgtccagtgaccctgagatcaataccaagaagatcaaccctgagaactctaagctgtcagacctggacagtgagacccgcagcatggtggaaaagatgatgtatgaccacgaggcagaagtccatggggctgcccacctcggatgagcagaaaaagcaggagattctgaagaagttcagtggatcagcactccggaagactggatttatgtccaaggccaaacttcaactaagttccatgtagtcttcgccgtgccctgacagctccttggaggtctgaggcg

SEQ ID NO: 9477 - DNA, 566 bp, Canis familiaris
  misc_feature (119)..(120): n comprises a, c, g, or t, or includes no nucleotide
  misc_feature (137)..(138): n comprises a, c, g, or t, or includes no nucleotide
  misc_feature (170)..(170): n comprises a, c, g, or t, or includes no nucleotide
  misc_feature (546)..(546): n comprises a, c, g, or t, or includes no nucleotide
gctattgataaggtcaaacgaatttttattacatctattcagttgaatgctatattttaaaaaatatgggcccttaaaccacataccaaaattagctccacaatggattacagacctannaccctaagattaggacnntataaaactcttagaagaaaattagggggaanaaacccccttatgacactggcagtgatttcttgaatagtatacctgcacttgcagccaaaacaagaatagaccaagagagcgacctcaaactttaaaaactttgtgcattggaggacacaatcaacagaacgaaaaggcagcctatggagtgggagagtcacatatacatatctcatgaggagttaatatccagaatatattttttaaaaactcaacaacaaaaaatagggacacctgggtggctcagcagttgcatgtctgccttcagctcagggcgtgattccagatccagggatcgagtcctacatcagactccctgtgagaagcctgcttctcccctctgtctctgtgtttctcatgaataaataaaatctntttttaaaaaaatggacaaa

SEQ ID NO: 9478 - DNA, 622 bp, Canis familiaris
agcaaaggcaaggaccgggagtacacggacatcatcaggaagcaggtcctgggaccaaggtggacgcggagcgggacggcgtgaaggtgcccaccacgctggccgagtactgtgtgaagaccaaggcccccgcgcccgacgagggctcggacctcttctacgacgactactacgaggacggcgaggccgaggccgaggccgacagctgcttcggggatgacgaggacgactccggcaacgaggagtcctgacaccgcgaccccgagaataaacttacagattttacctcagcaggcccggactgtgtggcgccgagactgccgcgcgggagggacgctgcccggcccttggggggtctcctttcgggtgtcgccctcccttcccgcgtgtgtcctgggtcctctgcttcccaggggccgcctgcctcgtcctgtccctcggagcccgccaggcggggtggcggggcctgggggccctgggccctgcccgtctgcagcccctgcggctggagccagagacggcccccagctcgcgcgtggacggattcacttgtggtcacctcttctctctgctttggtttgtttggaatctaaataaaatgactttatgagaaaaaaaaaaa

SEQ ID NO: 9479 - DNA, 582 bp, Canis familiaris
gaagtctgaacttgccgtggttgttgtgtgctctgatgtggccttctccccatactccccgctgcctgtgctggcccagcggaaatcacccggatcttgatggaacttggattcagtcggcccctaccgaccagtggtaccttccactggggccagcccccagccagtgaaggtgccagcgtagcaccctccagctctaactcataggtacagaccacgtgcccatcgctgccccctcaaccacactgacctgtgaggtcctagccagaaggacaacaggctcactcttctggcagaagagaaaagggacccagacttgagctgaaccaagctgttaccccaccctcacccccatttctgtgataaatgttacccttccctgggcgctcatcgtgttcactggagcacccccttccctttgtcaataggcacagaccattgtaaagaaatgcggtgtcattcagtgaacttctgtccccctcatctaagattggctctagctggtttccccactctttgaggggaataaagaagggatcctgccttgcagtggatccactgaatgttaaaaaaaaaaaaaaa

SEQ ID NO: 9480 - DNA, 616 bp, Canis familiaris
  misc_feature (153)..(153): n comprises a, c, g, or t, or includes no nucleotide
ttcatcccatggtccatggcctcatcggagatgataatgtggccactgaacctggcctctcagctgggaggggattggaacaagagagctcccaaggggttgatgagcctgctggaccacaggagcagctgcactgctgatgccatcttcccnaacatcctcgcatctgactccacgcatacttgagaggaaagacgagaatatttggagggggtgcttggttcatcattccaaggagccaaaaaaagaaaagaaacggacttgagttttggcagaccctgaagaaaacctagagatgtgagttgatgtaaattcagcaatttgctgtttcaatttattagctgagaggagttgtcatcctccatcctatagttctggtccagtaaattgtcatctttggttgtttagaaggaagtggaaatcaaggcagtggaagcctcaagggaggttcgaattgggtgtggactaccagaggtggctacggtatgcacagagtcagggactgggcagacactgacgccaaggccagaaagttgagtggcagtcgccaggtcacattttattgtgaagaaaactccagttcaagaaagatgaatgttaaaaaaaaaaaaaaaag

SEQ ID NO: 9481 - DNA, 626 bp, Canis familiaris
gaagtatgagctgggacgccccgcggccaacactaagattggcccccgccgcatacacacagtacgagtccggggaggcaataagaagtaccgagccttgaggctagacgtggggaacttctcctggggctcggagtgttgtacacgcaaaaccaggattatcgatgttgtctataatgcatccaacaatgaactggtccgcaccaagaccctggtgaagaactgtatcgtgctcattgacagcacaccgtaccgacagtggtacgagtcccactacgcactgcccctgggacgcaagaagggggccaagctgacgcctgaggaggaagagattttaaataaaaaacgatcaaagaaaatccagaagaagtatgatgaaaggaaaaagaatgccaaaatcagcagtcttctggaggagcagttccaacagggcaagcttcttgcatgcatcgcttcgagaccaggccagtgcggccgggcagatggctatgtgctagagggcaaggagctggagttctatctgaggaaaatcaaagcccggaaaggcaaataaatcttctgtcttcggtcatgtaataaaggtgtttattctgtcctgtgttcacgtaaaaaaaaaaaaaaaaaaa

SEQ ID NO: 9482 - DNA, 641 bp, Canis familiaris
cccggcgcctgtgccgagagatccggcgcccgtggcacgctgcccggcacccctacatgccgatcaacagcgcggccatcaaggcggagtgcacggcccggctgcccgaagcctcccagagcccactggtgctgaagcaggccgtgcggaagcccctggaagctgtgctccggtacctagagacccacccccgcccccccaagcccgaccccgtgaagagcgtgtctggcgtgctcggaggcctgaccccggccaagtcggcccccgtcatcaacaacggctcccccaccatcctgggcaagaggagctatgagcagcacaacggggtggacggcaacatgaagaagcgcctcttgatgcccagtaggggtctggcgaaccacggacagaccaggcacatgggaccaagccggaacctcctgctcaacgggaagtcctaccccaccaaagtgcgcctgattcgggggggctccctgccccccgtcaagcggcggaggatgaactggatcgacgcccccgatgatgtgttttacatggccaccgaggagaccaggaagatccgcaagctgctatcgtcctcggagaccaagcgagccgcgcgccggccctacaagcccatcgcctgcgccagagccaggcct

SEQ ID NO: 9483 - DNA, 628 bp, Canis familiaris
tagtctgtgtgagcacacagattaattacctgaacaggggcctggatatattcaacacttccattgtgactccgatatattacgtattctttacaacatcagttttaacttgttcagctattctttttaaagagtggcaagatatgcctgttgatgatgtcattggtactctgagtggcttctttacaatcattgtgggaatattcttgttgcatgcctttaaagacgtcagctttagtctagcaagtctccccgtgtcttttcgaaaagatgaaaaaaccatgaatggcatctctctaacgtgtatgaagttctgaataataatgaagaaagcttaacctgtggaattgaacagcacagtggtgaaaatatctcccgaagaaatggaaatctcacagctttttaagaaaaatataattaaaaggttaatctgtaattgtcttataaaagtgattttgaatatcaggatgtgtctgaaaaagcattgttctcaagagacaatcttttttaaagtttcactgatttggaccaagaaattatttttcttatatttacatgatggtagctcactaaaatgacctcagtacatggcccatttctattaaaaaaaaaaaaaaaaaaaaaaaaa

SEQ ID NO: 9484 - DNA, 199 bp, Canis familiaris
aaatatccattaagtccttactgataggggcacctgggtggctcagttggttgagcatctgcctttggctcaggtcgagatcccagggtcctgggattgagtcccacatcgggcttcctgcatggagcctgcttttccctctgcttatgtctctgcctctctgtgtctttcatgaataaataaataaaatattaaaaaa

SEQ ID NO: 9485 - DNA, 615 bp, Canis familiaris
ctcagacttcttggtctcctccgaatttccatgactgaaatgtagtggaggggggagcggctcaccctctgttttcctcctgtgtctgactttgtcccttgctacaaggaaccacacacccacccaagttcactccatataccatcaggcctagggatggtcccactggcagtgtaggtcacccatgagaagatcctgtactagtcctggaaccaggcctggggccatttgggtatggaattcctgggtgctcagtatccagagtatggctctgggtgagcatgtcctcttgtcccctgaacacttttgcttatgtatgattcaacatggttgaaagagggccagcagggcagccctggtggtgtagcagtttagcgccgcctgcagcccagggcgtgatcctggggacctaggatcgagtcccacatctggcttcctgtatggagcctgcttctccctctgcctgtgtctctgcccctctctctctgtctctatgaataaacaaaatctgaaagaaaagaaaagaaaagaaaagaaaagaaaagaaaagagaaagaaagaaagaaaaagaagaaaaagaaagaaagaaagaaagagaaagaaagaaagaaagaa

SEQ ID NO: 9486 - DNA, 695 bp, Canis familiaris
ttttgttgtctgctttttagtaagtatctcatagtgagtttttgtttatggttgaaataatcatgtgaatgggtcaagacataatatggtaatttaaatattgctttttttcttgcaggtttgatttgcctggtaaccaaattacttgtgaccattaactagctaggtcattcacgggagtcaaattagcacaaagaaacatgtcacttttaaatgtagtgataaaatatgctccttcttaaactcttctgttaaaattagttgtaaagaggacagtttgccaattctgaagtactcccattgctgcagaatatcacatgcttttgatgtcatataggaatcctatttaacttttttctgcctgttttgcagactgagtacttcagtttttagggctcttaatcctttcagaacagtgcaaagaatataagcttccccacaactgaaaatatgtgtatttaaaccaaacccaaaagccgataacagctgcttagaagtagtatttatttcagaatcatacttgtaaacatgagaataacttaactgtggatcccagtttagctttttttgtaattgcagttatatttatgctgctgttgtattagaatttttaaatgtcatcttgaaatagaaatgtgtattttaagtactaatgcaaaggtaaatgaaaaatactttttaaaaaaaaaaaaaaa

SEQ ID NO: 9487 - DNA, 561 bp, Canis familiaris
aatgggaggcaagagggaaaagcagactctccaccgggcagggaatgggttgagagagtctggctccatcccaggacccttagatcatgacctgaactgaagacctatgcttaacccattgagccaacccaagcaccccatttctatgggttttgacaagtataatcatgtatatatactactttagtatcattcaaaaacagttttattactaatactttctctcaatttttctttttgttgtaaacctctttcccctttaccaatccctgaaaaccactgatttgctttccatccctatggtttttccctttccagaggtcatatgattgaaatcatgcaatatgtagatattttggtctggtttctttcacttagtgaaatgcatttaagatccatccatgttatgagaattattagtttattcctttttattgttatatttcattgcatgaatgtaccacagttttttatccattcactaattgatggacatgtaagatgtttccagtttgggcaattatgaataaaatttctataaacttacaaaaaaaaaaaaaa

SEQ ID NO: 9488 - DNA, 538 bp, Canis familiaris
  misc_feature (69)..(69): n comprises a, c, g, or t, or includes no nucleotide
agcagaccaagcgtgctgcacctggcaggggacagcttccgggagacgctgaagaagaagaagcacacnttggtcatgttctatgccccttggtgcccgcactgtaagaaggtcatcccgcactttaccgccaccgccgacgtcttcaaggatgaccgaaagattgcctgtgctgctgttgactgcgtcaaagagaagaaccaggacctgtgtcagcaggaggctgtcaaggcctaccccacgttccactactaccattatgggaagtttgcagagaagtatgacagcgatcggacggaatcggggtttaccagtttcattcgagcgctccgggaaggagaccacgagagactggggaagaagaaggaagagttgtgattcctgcctcagagagagcttttccattacactgtgaaatgataacctgctttgttgttctttctgaatttccacgtgttccgaaaacgaaattttttatagccgcttatggccattttgtacaattttgaaataaaactaaacccaataaaaaaaaaaa

SEQ ID NO: 9489 - DNA, 642 bp, Canis familiaris
accaccagtgtctggcaaccctgagaggaggcagacagcagcatccttaggggcctgagcccagcgagggagcaagagagactcaggcctggggaagaacctattgtgtgcatggagtgaggtgtgttgctggatgtgtgtacgcgtgcatgcctttttttttctttttgccatggggacagttgaatttggggtatttttctacaagaataccgccttctctccccccgtaaggattggctgtaaccttaagctcatcatagaacctcaccaagacagcttgtgtggcttgaggatggcccagatgggatcccccaattcagccggagccccacgcaggagaggacggtggggttgccagggctcagaagtgcaagctgattccccaccccaccctgccttgcctttccttcatttccttggttgagtgctggagcagcagtggctgcccgtcccacctggacagtggtgtgtagcaagcaggctgggtgggtgtttgtggtggggcctcttggtgcctgggaggagctgaagatggggaggtttttccttactgtataaatgaatatttgtatgattaaattaacacacacacacaccaaaaaaaaaaaaaaaaaaaaaaaaaaaaaaaaaaaaaaaaaa

SEQ ID NO: 9490 - DNA, 494 bp, Canis familiaris
  misc_feature (107)..(107): n comprises a, c, g, or t, or includes no nucleotide
  misc_feature (119)..(119): n comprises a, c, g, or t, or includes no nucleotide
  misc_feature (126)..(126): n comprises a, c, g, or t, or includes no nucleotide
  misc_feature (144)..(144): n comprises a, c, g, or t, or includes no nucleotide
tatgacatcgagatatttgggggagtctcatgatctttccttaacaagctgattttgcgaatgtagtaaataccacaatgacaatgcttatattctaacaccatacnctgcaattgtcntgttacnctgttttaactactatanctgcatgtcagaaagaaattccctaggttgctctagtttcatattcaaacaattataccaccagatgcaacatacataataaacacataaaatatttttaaaatacctaatgaagtggcactcgatgaattcaaagaaaatcaacattccaacaagagggcccaaccatatctcgacatgtacattaacaacttaggtattttaagaaaaaatgtggcttctttagtttttataattccttcactctttcttttgagcccacaatttctgctgataggagggacatttaaatttgctaattaaagataattcagtccctttcccattaaaaaaaaaaaaaaaaaaaaaag

SEQ ID NO: 9491 - DNA, 608 bp, Canis familiaris
caatgataagctaggcctgtgtcttcagcaatagaatttttacttgattctgatctacggacttttgacatgtcgctatgtggagtcttaaagtcataaatgttcagtatgttttttgaccatatgctaaatcgatagcaacccactgccatattagttattcaggatatacttaaagacattaagctagattgcagtttaataattaaactgtatatactgtgcatataatgaatttttatcttatgtaaattatttttagaacacaagttgggaaatgtggcttctgttcatttcgtttaattaaagctacctcctaaactatagtggctgccacgtagcagaatgttaaattgtggtttatatacttttttgcattgtaaatagtcttggttgtacattgtccgtgtaataaaaacagaatctttgtatatcaaaatcatgtagtttgtataaaatgcgggagggatttatttacagtgtgttgtaattttgtaaggccaactattcacaagtttttaaagttgctatcatgtttgtatatttacacatctgataaatattaaatcataacttggtaaaaaaaatgtaaaaaaaaaaaaaaaaaa

SEQ ID NO: 9492 - DNA, 661 bp, Canis familiaris
tctgtggctccgcccatgcttctactgtgggcccaacctgagggtaccgtcctgccatctctccagcccaggaccttgtgcatctcacgcttgggagccgggggaagggaccagaccacccccctctttcgccctcgcaccgtgtgtctccaggggccctgatgcacagcactgtggccccccacgcccacgccctctccgccttccacatcgtgcccctctgcgttagagacccacgagagggacgcaagcgtctctatcactaccacgaagagctgtgagagaagagagagggagacctctttggggaacgcgcgggctaacacaccgggtttcggaaccagctgtgggttttctaaccaggtttggaaggcctttttcaagacccactccagggagaaccctgagcaggagaggaggcagcagagggagaggatcctgaggtgtggctgccctcccttcagcatcagaagggtgacagaaatggagagcagaggaccaggccaccagctgcctggctttggcccttcacgccttaacactaagcccacctccctgcccaccactgggctgtggctgctgggccccaggctgggtgactttcagtatttgtaagcatctcaacagaacaataaagcatttggagtacgtgaaaaaaaaa

SEQ ID NO: 9493 - DNA, 583 bp, Canis familiaris
  misc_feature (1)..(1): n comprises a, c, g, or t, or includes no nucleotide
  misc_feature (167)..(167): n comprises a, c, g, or t, or includes no nucleotide
ngggtaccaagcccactcgagggtagtctgtccgagccggccatgctacctgacccatcccaggtcgccagccagaaccctggcccgacctgcggtggagaaccatccgctagtcaactcacccacgcagacacgccctccatcctacgcaacgcagccagcacganctagcagacaggaggaatgcatcagcgcgcaccaccagaggaggacgcccgccagcagcacacgccctgcagagaaggagtttcacaaggacacacacaaggattgagacgcacaggagcccccgcacaggcgagacatcccacacagtggatggtgctcctcttctcccgctttctgctacatataaggaattccattaaagaaggaaaaaaaaaacaaatcccacattgtgtatgcacccacctctccccaccccacccccaaatcgccaaaaccgcatctgatttttccctcctcgatgccaaagcaaagcaaacctattgtaagccatggactgagtttagagacatttctccaatctctcgttgtgcctttccagggaccagagcagggacagggggagaaggggaggggt

SEQ ID NO: 9494 - DNA, 647 bp, Canis familiaris
aatcgcatccgggccaattggaaatagtggacacgttaaccagtctggagagtttgtttttggggaaaaacacagatcactaagcttcagaacctagatgcacttaccaacctgacggtcctcagtatgcagagcaccggctgaccaagatggagggtctgcagagcctggtgaaccttcgagagctgtacctgagccacaacggcatcgaggtcatcgagggcctggagaaccataacaaactcacgatgttggacattgcatcaaatagaatccaaaagattgaaaacgtcagccatctaacagagctacaggaattctggatgaacgacaatctcctggagagctggagcgacctggacgagctgaaagcagccaagagcctggagacggtgtacctggagcggaaccccctgcagaaggacccccagtacaggcggaagatcatgctggccctgcccaccgtgcggcagatcgacgccaccttcgtcaggttctgagtccggctggctcctcgcccggtccctctcgacaagaacgtcccagccacggtttttatccactcgctcctcgagccgtcgctctctcagcagtcacaaaccccatggcaataaaaaggcactgagtgatgaaaaaaaaaaaaaaaa

SEQ ID NO: 9495 - DNA, 603 bp, Canis familiaris
tttgaagaccagaaccggaagtctgaagcgagccctccacaatgccgactgccagaagacagtcaccatctccaagccttgtggcaaactgactaagcccaaacctcaagaatccaagcagaagaaaaaggaaggcatagaaacaagagaagatgctggactaatagacaccaccttctgatggaacgtgagtaaggacatcagcaagcaggatcagttaactattgcatttatacctcatgtaggctttttagttcccaaaattatgctatagcttaaagtacacaataggcagataccccaaggacagtaaaattttgtagtagcattttttttttaatgtataccataggaccactagggacttataataaaggactgtaatcctatttagaaagttgacttatagtacatgctagaacattgaggtaagttttttgaagttatgtgatattttacattaaaaatcgtttgtttttacatgtttttcttttggcagcaatttacgtgttatgtaaactactattcttgttagataattttttcacctagacttttttccccattgagaaaaatatatactaaacaagcagcaataaaata

SEQ ID NO: 9496 - DNA, 529 bp, Canis familiaris
gcaattggcagtggatccggccgtgacgacccttccatggtcgtcctggcgggtctcctggcctggcctccgactactagacatggctcttcagcacatccctgaatggagcaaccgtccgggaaagtccaggaactcaggtccccatcctaaggcacgatctccccgcccaccctgcccccgtaggttcaccggagcctccccaccctacaaaggccctgtaagtgccgtaccagcatatgctgagacgaggccagccacgcgagagccaggctgcccccagtggaccagctgagacttgaagccaatccgtcccatccgtagctggctgatggcacccctgctgcagtgctcttcgtgctcaggcccctgcccccatcccgagcctccagcccgtcctcccccttccatccttcgttagccatttggcccttccacctgttaggccagcctgaggccacgtccacacctgatgtatccgtgagatgggaataaagacactgtccagtaaaaaaaaaaataaaaaaaa

SEQ ID NO: 9497 - DNA, 554 bp, Canis familiaris
gggacaccgtgcccaactgcgcaagaagcccaccacggaggggttcacccacgactggatggtgtttgtccgtggccccgagcaatgtgaaatccagcacttcgtggagaaagtggtcttccggctgcatgacagcttccccaagcccaagcgagtgtgcaaggagcccccttacaaagtggaggagtcgggttacgctggcttcatcatgcccatcgaggtgtacttcaaaaacaaggaggagccgcggaaggtgtgcttcacctatgacctgttcctgaacctggagggcaacccccctgtgaaccacctgcgctgtgagaagctcaccttcaacaaccccaccattgagttccggtacaagctcctgatggctggcggggtgatggtaatgcccgaaggagcagaaacggtgtccaggcccagccccgactaccccatgttacccacaattccactctctgccttctctgaccccaagaagaccaaaccatcccacggctccaaggacgccagcagggagaccagcaaggcctgcaagacccacaagacgg

SEQ ID NO: 9498 - DNA, 295 bp, Canis familiaris
gggggggggcccccaaaaagggccccaaggaaggtgttgcgcaacttcttcccatttgccaagaggggggtaagggagggcaggtggagcctgctgggaagatgagtggagaggccccgcctcccgccctcccctttccaccggacagcatgctcagtacagagggtgaccacatactgtattgtctcaactgtgaccctccaggggaaagagggggtgccattaaaatctccacgggccaaaaaaaaaaaaaaaaaaaaaaaaaaaaaaaaaaaaaaaaaaaaaaaaaaaaaag

SEQ ID NO: 9499 - DNA, 323 bp, Canis familiaris
tgtgtgcctctgagggacagctctgcctcaagctctcggggccaccgtgtacatgtgtagtgtcttcagaacctgtccgtcagcctcctcagcctcaggggcaggaagcggtggttgcggctgaaagtcacaggaggtgtgcatcgtccagcttgtgtgcacgcgcagcgcccgcgagcatatatgcacacgcacacggatctttgatttgcctttaaccagactgctatcgtttttactcaccctgttaatggtgtttgtgtttcctgtctgtcattccaaaataaacatggggagcggcaaaaaaaaaaaaaaaaaaaaaa

SEQ ID NO: 9500 - DNA, 565 bp, Canis familiaris
tgggcgacgctgtgtccagcgcactcggtactcaaacggtggagtactaccagagcaacctatgtgttcgtgtttcctgggcctcatcgctgtaattgcgtggttgacgtcccctatgctgctggtggctctggctgtcttctgttggcgcctgttacatccgtcgatctccgcacattgcagtccaagtttggtgctgtattggccgagaggtgaggcccagccgcatcagtatgctctggccgggggcgtctcctttcccgttcttctggctggctggtgcagggtctgctgtcttctgggttctgggagccaccctcgtggtcattggctcccatgccgccttccaccagatggaagctgtggatggggaagagctgcagatggagcctgtgtgaggacctgcgggcctctggaatcggctgcctcatccctgttcccccctgccccgcttggccccgaggcctggccaaaggcctccttcccatctcgagcccagggcgggattccagctgtggaaataaagctgttacagttgtcattcaaaaaaaaaaataaaaaaaaa

SEQ ID NO: 9501 - DNA, 111 bp, Canis familiaris
tgctgatcagaatcaaagctgatgtgtgcttttgtctaagtatgtgagaaaatgtactggtagacaaaatgtttaaaaatacaaaatctcaaaaaaataaaaatacaaatc

SEQ ID NO: 9502 - DNA, 577 bp, Canis familiaris
aaacagttcagttctggtagaaagaagtgagatgttgtgagagtgtcgtcgtttctgcttctgtcctggttattggtagttctctgatacgttagatatgttttgttttccatggggtcaaaaggtacctaagtatacgattgcaagtggaaaataggggacagaaatcaggtattggcagtttttccattttcagtttgtgtgtgaatttttgaatataaatgcggggacataaagcattaatgcaagtcaaaatgtgttcagtgaacacgtttcagcagttcaactttataacaattataaataaacctgttaaatttttctggagcaaagccagcatttggaaattttttaaaaccagttgaatttcttattgatggcaactaaatggtgtttgtagcatttttatcatacagtagattccatccattcactatacttttctaactgagttgtcctacatgcaagtacatgtttttaatgttgtctgtcttctgtgctgttcctgtaagtttgctattaaaatacattaaactataaaaaaaaaaaaaaaaaaaaaaaaaaaaaaaaaaaaaaa

SEQ ID NO: 9503 - DNA, 535 bp, Canis familiaris
atatgtatttgaacgaagcaatatgtattcattcacttgttaagattgtttctttgtgtgtcaagaataatattcaaaggtagatggagattgcttctacagaattagctctggcacccatacatatcttcacacgtgttcagaaatgtctccttcagcattaggtatgacttgttctgagtgctgcttccggtgctaaaatgaacaaatgaattgtatacttcctggcatgggctctgaagaatctgggcaaatccacctttctaccttaatatctccccaaaatgtatagtgccttgtttttatgtacagtttatatacagaaaagtttgctctgcattttttgatgatggtttggaacattatctccaagttttactcaaaactagtagaaattaaaaaaaaatctcaaatttctaatacctgttgtaaacatgaaacattgtcattttgcggtacagagctccaaaataaaagcttcaagaataaacacgatgattgattcaaaaaaaaaaaaaaaaaaaaaaaaaaaaaa

SEQ ID NO: 9504 - DNA, 397 bp, Canis familiaris
ctccacctgatggtgagagctccatcacccctggccccaccgtccacggctcgctgctcagagatagctattgcccagtacctcatagtccttcgtgtaccctgtatcagggtggccatcaggatggccacccttccataatcctcctgtcctcctgctccccagaccttgccatttggaaacaaacatcagatccttgccccaccccttgcttccagaaagggtcttgagcccataccccaagtctgacaccctcctcccctcccgccgcctgccaggacactctagcaggacactggtgctttgccgcataccctactgtgctgcacttctttcccaatttttcataaatataaatgtatgtatgtatgtgtaaaaaaaaaaaaaaaaaaaaaaa

SEQ ID NO: 9505 - DNA, 627 bp, Canis familiaris
ttctgtggaatatagtactgtatgagaggctctgatcttgatctttacaagatttgggatcattgaggtagtatggttggaaaagcctgctttgttccatcgtagaatgactatccatttttttagctgttctgaatcagatccaggacttggggtacagattcctctgtgatgagtatttaagatgttcttcactcttcagtgtttggatcacagcaggggctaaaaaacctttcggttctatactttttcaatagataagtgagatgaacagggggaaggatctttaaatactgtgctataaagagaaatctttcagtaaatttctaccaaaagaaggaggctataggaaaggctccacttgcctgccagggaggtgtaccagaaggtgtgagcaatatgacagtgccatgtgcctttcatacaaagtatttccatatgttggtctgctctgcaatgatggacacaagcaagggcacaccttcgagagaaaggagatgatgatggaaacttttttatagaactattcttgcagtgagggggtgagtcttttttctgattcttgcttttgggggatcagcaaataaattctttgttaaaactggaaaaaaaaaaaaaaaaaaaaaa

SEQ ID NO: 9506 - DNA, 540 bp, Canis familiaris
tgtaatgtagggaacacatgaatgaatgaggttgatagcgtaatcacaagaccgcagttagtgagctctagagtgagatttttgtgaagacgtacacgagaaaaatggaaattctttggagccggaataactgggagaccatggagtcacgccacacgtttttcaacacgaggggaggacctggaaaggaattttggaaattgttaatccttccttaccaggaaaatggactttaagaaaaaaggcagaatgaacttcagaaacaaaaggaagagctacagcgtcagcatgaccaacttgaggctcagaagcaagagtatcatcaggttgtacagcagatggaacaaaaaaaattagaacaagaaattcctccatcagggcctggtggaaaattgaagtttgagccactcatttaaagtccgaagaccaccagaacttggaagaaaactgttaaatcagcatctgtgtcatctttttaccacccttcctttttttcctgctcaataaatattttaaatcataaaaaaaaaaaaaaaaaaa

SEQ ID NO: 9507 - DNA, 599 bp, Canis familiaris
  misc_feature (272)..(273): n comprises a, c, g, or t, or includes no nucleotide
gcgtgatgtggatgggctttcctcgtgggtggggcttccctcaagcctgatgtttgtggatatcatcatactgcctatcttatatagcccatgccatctgccgcctattcctgctaagccatgggactaggtatgctcagaagctcagtaactgtgctcctacccgccaccgccgcaccctgcacatgcttctgatggtgtcacctgccccctttgtggccaaactatacctcttccttaccgtttacaccttaccctgtaatggttggganncaggccaatcccttctccacttactgtaatggttggaactagacatgtcaccaaggtgacttctccttggctgagaggtggaaggggtgggatttgcctatgggccccctcagtccccagtgagggcaggagaaagaagccgtcctcctctcccatctcgctccatgaggccaagggctgagagaaaagccctgtcctcccctcagaggccaggggtgctgctctctcccatggtgccaacgcctgtgtgtgttgtgtatgtgagcaatcccacatgtggggggaaataaacacctggcactgaaaaaaaaaaaaaaaaaaaaaaa

SEQ ID NO: 9508 - DNA, 368 bp, Canis familiaris
tggaggaaaaaagctgctactctcagtaggccaaacgctcaggttataacaactgacgagtgttactgtaggggtattgttttgttttcctgtcaaattgcgtacttctattgtagaagacaaagcatttccatttcaacagtctgtcagctttattaatgttgggcaaaatctatatgttatgaaaatgaaacagatctatagttttggggcaaaattataaaaattaaacatgtaggtaacctatttatatactgctataaagtattttttgaagagagatatgcaaagaagctattacctacatgaaatgtatatttaaagattttttttttcatcctgggagccaggaatatataaaaaaaaaa

SEQ ID NO: 9509 - DNA, 676 bp, Canis familiaris
gcctagtttctctagtgtgatttgagcgttggattgtacaggtacccattcgaagggggactttccgcttgggtcagaatggacaactcttttgcccactgtgagttacttgcgcccctaccagcccgacaacttctttgtcaacggagaggactgtgtggtgatgatctggcacgagaagggagagtggatatgacgtgccttgcaattgactacctgcccttcacgtgtaataaagggcacagtggcctgcggagacccccctgtggtggtacacgccaggaccttcggccagaagaaggaccgctacgagatcaactcgttggtacggtaccagtgcactgagggtttcgtccagcggcatgtgccgaccatccggtgccagcctagcggccactgggaaaaacctcgcatcacctgcacagacccctccacttacaagcgcagactacagaagcggagctcacgggccccacggaggagccgccccagcacagcccactgagaggagcttccaggacgcacccaggatgctgagcccaggagccccgccaggctgacatcccacatggatggtgtcctcttcttgccgctttctgtcatataaggaattcccaaaaaaaaaaaaaaaaaaaaaaaaaaaaaaaaaaaaaaaaaaaaaaaaaaaaaaaaaaaa

SEQ ID NO: 9510 - DNA, 523 bp, Canis familiaris
tcccacatgatgttataatacataaagccgatatgcagtttaagataattgcgctacaatgaaggagatattgttgtgcctgccattttcagaattcttttttgaaggtttctgttgatgtttgaactgagctattgcagatattttaatttccctaaacgtgaaatttggagtaatatatatatgatattcttgacatatatgtgtgtgtgtgtgtgtatatatatatatatatatatacacatatatatgtcaacaattcagtaaagcttttgtttaattttcagaaggaatcaaataaaacaagtatccatcttctgtagttcgtagggtgttaggtcctttaacgtaaagtcaaacttcaaattccatctagctctgtgttaatccctgttattactggtaaagcttcatttgaatatgtaaattcagtttaggctatgtaaaatttttgctaatgtcatcattctgaaaaaaataaatttacaaatacattcaaaaaaaaaaaaaaaaaaaaaaaaaa

SEQ ID NO: 9511 - DNA, 321 bp, Canis familiaris
ccccacaagaggcgcgcgggagagagaggagaggaagagagaagagagagagagagcgccagaccgtggccgtgacacgcccaccgatgtgcgaaacgtgaacattttgagggtggcgcgcgacgccgggaggggccggccccgggtgctccccggacaggaccgctcctcgccaggaccggtcacgaccagaagggaaagtttccttctcctttactgttggttttttttttttcctttgctctttctcccttccgtctctgacttaagcaaagaaaaaaaaaagtacccgaaaaaaaagatctttaaaaaaaaaaaaaa

SEQ ID NO: 9512 - DNA, 601 bp, Canis familiaris
ggccaacatgaaaatgtgttggatctgagagtagcacccactagatgctgcctggcaaggagcacgtgctggactccagggtacaggggttggagcgatcaccaagggttccttgtgttccagccttgtgacctggcccagtaatctcctccaactgtagagctggggggaaatggtttgctgctgctccctcgtttgctgaagacactcgtggaatattggatacttgtgagagatgtgacactctttttgagggacgaagagatattattgggaatctcgagacccgtggcgctatttccctaaagggattgaaaaaggagaattagcggaaaaaaagacctcagacccttaaaatatttttggttaattccgggtgctatgctattaaatgtcttggtctgtgttttaaattgttgggctttttggggctggatggctcagtggttgagcgtctgcctttggctcaggtcatgatcctggggttctggggtggggtcccccatcgggctctctgcggggggcctgcttctaacctctgcctgtgtctcttcctctttctgtgtctcttatgaataaataaataaaatcttaaaaaaaa

SEQ ID NO: 9513 - DNA, 586 bp, Canis familiaris
tgcaccagtcctgacttgtaccggctgttatgagatcaagatggccaagatgtgtcaagggtttcagcgccttggggaatgccctctggacatccgcttcgtcgacacccccgcactggagagcgtctgcggatacttgcacaggtcccagaaccgcagcgaggagtttctggtcgccggagacctgcgggacggacacttgcagatcaacacctgcagtttcgtggccccgtggagcagcctgagtaccgctcagcgccggggcttcaccaagacctatgctgctggctgtgaggggtgcacagtgtttacctgttcatccatcgcctgcaaactgcagagtgacacttactgcttgtggacggaccagttcctcacaggctctgacaagggtttccagagccgccacctggcctgcctgccaagagagccagggatatgcacctggcagtccctgcggccccggatggcctaaatcctactccccgtggaagccaaagcctgcacagtgttcaccccacttcccactcctgtctttctttatccaaaacaatgaaataaagaactaccatccagcaaaaaaaaa

SEQ ID NO: 9514 - DNA, 123 bp, Canis familiaris
tagagactgtgttttgtgttttgttcaaaagctgagtccaacatgaatgattctgaatcattccaacattatacagtgtattctcagccatgacatgtgatcagtgcaataaaaagtgaaccg

SEQ ID NO: 9515 - DNA, 606 bp, Canis familiaris
gggccgttattaacaacctcgtgcgctgaaaatcagggcacaaaatgtgtgcgtgtcactggacatcgattcttgcctcttgggccattactagtagctagaatacatactcatctaaaatgtagggtttccatttgtttttattttttgtttgttttggttgagatcttccaaatttcccataattttccaactgggaaggatgccagtttaggggattcttttcaaccagttaatgggcatccgccagggtacttcaaagcttttctgggtggcctccccgtcaggtgcagcttcgtgtcaccatgcctttcagtttgccacatgtcacggtggtaggaagaacacgctcaccgttagcaccccagcctctgtgccatacgtactcttcaaggaagaggagcctttctcactaagttaagcagctaccagggtggcctcactcgggccttttaggcagggacactgtaggccggtgtttcatgctccaaatctggaaacaccaatttaaatgaaaaaacaacaacaacaacaacaacaacaaaaaaaaaaaaaaaaagaaaagaaaagaaaagaaaagaaagaaagaaaaaaaaaaaaaaaaaa

SEQ ID NO: 9516 - DNA, 496 bp, Canis familiaris
agctttgctgctagagttgtcaagagagggaatgatgtttgccttccacgtttaacgccacgctgtcaagtgaagactagcaagagagtcattgtttgcaataccaagctggatgaatatctggggaaaggaagaaaggcaggcagcttttccattcgaaagtggtaaaccattcagaaatacaagtgctggttgaatctgaccacttcaaggttgcggtcaatgatgcccatttgttgcagtacaatcatcggatgaaaaatctcccggaaatcagcaaactgggaatttctggtgacatagatctcaccagtgcttcatatgctatgatataatcttaaaggagaagatttaaaaaaaagagaagttgaatattcatttaaacttacacatgtaaacttcatgtttcgactgaaaaattttacctttattcatcactatccttcttgtaaatcatccatgtaataaacattctaagagttaaaaaaaaaaaaaa

SEQ ID NO: 9517 - DNA, 541 bp, Canis familiaris
tggaccggcctctgccttctcgccggagaaactggctgaccttcccgcctctgacccgccacgctgtgtcctcacagcctctgcttggcggcacagagctgtccactgtgctagacatgtcctggcagggggacacaggcactctggcacagacccaggctccacctgatggtgagagctccatcacccctggccccaccaccacggctcctctcagagaagctgttgccaagacctcaagtccttcagaaccagaacagggtggccatcaggatggccacccttccataatcctcctttcctctgctccccagaccttgccatttggaaacaaacatcagatccttgccccaccccttgcttccagaaagggtcttgagcccataccccaagtctgacaccctcctcccctcccgccgcctgccaggacactctagcaggacactggtgctttgccgcataccctactgtgctgcacttctttcccaatttttcataaatataaatgtatgtatgtatgtgtaataaaaaaaaaaaaaaa

SEQ ID NO: 9518 - DNA, 540 bp, Canis familiaris
aaatgaagggtgaaattcaagagctgaaggatacatgcaattcacatgagcacagtcctggaggatggttgcactatacaacactgggaatgggggcaaaacagtctttcgaataccgtacacgcaaggctgtgagactacctatttatagatattgcaccctatgatggttggtggtcctgatcaaggatttggtgtggacgttggccctgttgtgctgttttataaacccgaactctatctgataaccccagcaaaaaattttcacactccatatgtgttcctctcgttctaaccttgtcaaccagtacaagtgaccaactcaattccagttatttatgttccaaaagttttggaaaaaagtataatttggcaaaaaaaaaagatacctttttgttttgtttttttgctgttacaccaaatacagttcaaatgctttttgttctatttttttaccaatttcaatttcaaaatgtctcaatggtgctataataaataaacttcaacactcttacaataaaaaaaaaaaaaaaaaaaaaa

SEQ ID NO: 9519 - DNA, 548 bp, Canis familiaris
tcagtcaaccagaaggttacatataaggtctgcctctgcgtgaaagcgggattattaacacttaactatacgctccctctcaaaagactgtgcacaggccaaattgttggaatgctggtttttcttgacaactcctaccccggactatgatgatgcgttatggtgtagttgaaaatagcatagtcagatgtttgcttaaaacctagaaactgtacgtgttgcttttcatgtgctgtgccaagtctttgataatactttgtttcccccaaccaagggacctcataacctgattatggttattgctttacaaacagttttgacagaaggtggctgctagagcttaacatacgtaccagttccatgtgatggagctggttcttgcaaactaagctcatcatttattctttgctgaagtcagcaaatagagttagagagatacccagtcatctatcacaccaaataaaaggacataacggctttcaaaagggttttcccacatacccaaaggctttctgaaagcttctacctctgcaaaaaaaaaaaagaaa

SEQ ID NO: 9520 - DNA, 600 bp, Canis familiaris
atagtgggtggtttaaatgagctctgttgacctaacttgcagaaagaagcagaaaatgaaaagatgaaggccattggtgctcggacgtgctcaaatctatagcaaaccttagagaagccctacagccagcaactccaagcactaatatgcagaaaagaaaatgcagcttgaaaggtatcgggttgaatatgaagctttgtgtaaagtagaagcagtacaaaatgtagtttattgagccaatttatttttcagaaatgaactgaaagtttcattttatagcaggagggcaaataaaactattactataaccctataaacctctgtgccgttccagtgacttgactaatgacccacgtttgtcctgagagatggtgtgtaaggaacacagcatctctgaaggcagtaaaccaatatgggggagcttattgcagatggccatgtgcatctgctggtgaacacctagtagccatggtggtccaggctctcgcttcttggcattcttagcctgaactgagcagtctgtacactctgatccttttttctttttcttctttttttgtaaattcacataggctttggaaaggaagagcaataaattat

SEQ ID NO: 9521 - DNA, 468 bp, Canis familiaris
ctccgttcagaactgctacacgccctgtggccggcctcgcaccctcgtaagttgggagaacgggtgttctgcgagattgaggacgagggtcgagtcgctgggcaagagaagcactctgtctccttcgacctccctgactggcggtgcctcttggggagaggtccatgttgcggtgacttgtccccacctctgcgctgaccttggcgtcatgctgaggctcagcttggtgttctaatctgaatcagtggtgattgtgtgatttttatttctgccccgaggggtaaggaagagtcttctggaaggttttgccttggacattattcataatcgagctcagaggcctcgccctgcccctccatgccctgcccccaatcactgcagtgtccagcccattgttgaatagattgtagtgttttgtctcattagaaataaacagcctttaattggtcacaaaaaaaaaaaaaaaaa

SEQ ID NO: 9522 - DNA, 577 bp, Canis familiaris
gagacgccacgtggaccggtaccgacggtcacgcgcacccgcgagcctgccatgatgttccagtactttggtgaaggtgggtgcccacggtgtacatgaaggtagatggagaggtgtctgaggacaaaatcagttctctgtgaccaggacatgagaaggtcgccaatgggctgatgggtgaccaggggcttcctggagtctttgtgctctatgagctgtcacccatgatggtgaagctgacagagaagcacaggtccgttcacacacttcctgacgggcgtgtgcgccatcgtcgggggcatgttcacagtggctggactcatcgattcgctcatctaccactcagctcgagccatccagaagaaaattgatctcgggaagacaacgtagttgtctccttccccctctgttgttgccttctcctgtttctctttggccctttggtcatttcccagcctcgtccccacgcacccccactccgtcgtttctgagcccaggttgataaatctattaattgtgatagtaaaaaaaaaaaaaaaaaaaaaaaaaaaaaaaaaaaaaaaaaaaaaaaaaaaaa

SEQ ID NO: 9523 - DNA, 589 bp, Canis familiaris
cggatggaagcgcgagtactcctatcgagggcactctctctcgtcggcacgtcccggcagttactgggaggcacctcgatgagggatgactggtcccccccggtacgactgaggaccgccttgcctctcgatggaggatcatctcatcaccacctatgaagtaggttaccaccattctctggagagaattgcctcccgcgtttgcacactgtgggggagtaccccttccacagtcacatcctctggggcccccaccaccgcgagtccccattctgtgagatctctggtgtcttcgcagaggcacaggagcttccctttccgcggagtccagattgccaggtggactacgagtcctatacgtggcggaaactggatcctggcagcgaggagacccagacgctggttcgagagtacttttcctgggagggggccttccagcatgtgggcaaaaccttcaatcagggcaagatcttcaagtaaacatctcttgtcatcatcgcctagctgcctgtacctgcccttcagggagatgggggtcattaaaggaaactgaacattgaaaaaaaaaaaaaaaaaaaaaaaaaaaaaa

SEQ ID NO: 9524 - DNA, 464 bp, Canis familiaris
gctcccagttctttatcacgacggttaagactgcctggctagatggcaagcacgtggtgttcggcaaagttttggaaggcatggaggtagtacggaaggtggagagcaccaaaacagacagccgggacaagcccctgaaggatgtgacgatcgcagactgtggcaagattgagatgttaggtagcccccttcggccactcttcccaggagtatgagcgccccaggggcccgcgtttctccctttgtagaccccaccaatttgtgcgagttccccgtgtcccctttcccatgggtgaggccggcccgccacagggcaccgtgctgcggggccctggtgctggcatctgacggagcggacccctcccctcacattccataggccagcggcctggttttgtaacaaactcaaactcctaccaatgctgaccaattaaaaaaaaaaaacggtgggttttttaaaaaaa

SEQ ID NO: 9525 - DNA, 115 bp, Canis familiaris
aatcagaacttatttccggaattgcagaagaaaacatatttcccttattttgatttaatcaccatacttatttaatgagtgtattctgtgcaatttttttctcagattgtcttta

SEQ ID NO: 9526 - DNA, 122 bp, Canis familiaris
gaattgtactaaacaggtctactttggatttatgacagaagaccctttttaaaacgtcatttactggttccataaaccttttcatgtctggaccaagtaacaagtgccatgaattaccattc

SEQ ID NO: 9527 - DNA, 583 bp, Canis familiaris
tacacttgttatagtaccggagaacaaattcagaagtagtaggaagacctgccagtttaagacctgtgacagcatgaaagtggtatttgtacttgaatattttgtcagggaaggatgtgggtttaagtcatgatgagttagagcttttcttggcacagatcctatgtctgttttgggagatgggaggcttgttttgttaccattatctattcatttgtgatttcgttttttcacattttgtagacatggactcaagtgcccttgtctggtatgtacaggaaaggctgttgctttgaatttttatgtctaccttctgtttcaactacaggaacagtgagcctggctgaaggagtggcttcacggcagagtttctttctgctgggttgctcacagagatgtagctctaccttttgacttgagccccgaatagtgaggttgggaattctgatactgagattgatcagggaaggattcaaactgtgaaccacttgtctgtgctgccaccacgtgatcccatgggcatctactctgtgttttcagtacagatagatgaagtacaggcaaatctctaggtgccttgagg

SEQ ID NO: 9528 - DNA, 445 bp, Canis familiaris
  misc_feature (370)..(371): n comprises a, c, g, or t, or includes no nucleotide
cctgagccgcccggaagccaaggcggcacccccacgcgcggggcctgaacaccagcccccgggcaggccagagcccaccctactgcagatcccttgctgtccacgacgcggtcaacacggttccaggctggcggctcgcacagtttttcacacatttcccgctttaccagcagaacgctgccctgccttgccgccggtgcctgcagcacgcctctctgagccctgcctcctccccgcgcagaggctaagaccaagtgtgccaagcccgcctcgtgtcacttgcagcaccttcgtagctgacccagactggaactcaggcccctgcatctgccacggcctctgccccgagtcagcaccacagccagagaannggggctccctccatcttttataaaaacattttctgaagagttagagtatattataggctttttatttttattaa

SEQ ID NO: 9529 - DNA, 413 bp, Canis familiaris
gtccaggggcatttctgcctccgtgctatatgtgaactgtttttgtgttccaagccagcttttcttactcccttcatcccattgcccccatttagattgcagtctgcttccgcgttgctccctgcggcgtgtaagccagaggggattcaggggaagttcactttacagccaatcccctgctcccctctgcccagtgctgacggaagcccctcctccataagcaagttcattctttcagtgccattggcatctacatagacaggtgtgagagtagatgtgtaggttactctacatgtatctgttctttcttcaaaaccatgttaactttgtgaaacgacttttacactcctacacgctttacagcagaagaaataaaggaatatgaaaaataaaaaaaaaaataaataaataaa

SEQ ID NO: 9530 - DNA, 677 bp, Canis familiaris
  misc_feature (14)..(14): n comprises a, c, g, or t, or includes no nucleotide
aggtgatgatctgnaccatccaggccaatcaggcgggatagcacctggctgggatgtcacacagctcacattgcttgcaaatttgctgagctgaaggagaagatagatcgtcgttctggaaagaagctggaagatggtccccagttcttgaaatctggggatgctgccattgttgatatggttcctggccaacctaagtgtgttgagagcttctctgactatcctcctctgggccgttttgctgttcgtgacatgagacagacggttgctgtgggtgtcatcaaagcagtggaccagaaggcagctggagctggccaagtcacccagtctgccccagaaagctcagaaggctaaatggatattatcccttatacctgccacccccgtcttaatcagtggtggaagaacggtctcagaactcgtttgtgtccaatggcccatttagttttatagttaaagactgggttaagaaaccaatgcatcgttaaaccttcagaaggaaaggagaatgttttgtggaccctttgttttttttttttttttttgtgcgtgtgtggcagttttaagttattagtttttaaaatcagtactttttaatggaaacaacttgacccaaaatctgtcacagaattttgagaccccattaaaaccaaagtttaatgagaaaaaaaaaaaaa

SEQ ID NO: 9531 - DNA, 346 bp, Canis familiaris
gagagattttatttgagtgacagccagagcgagcgagcgagcaagagagagcatggggaagggcatggagaaggacaatctagactccctgctgagggcagaatctgacctcaatcccaagaccctgagaccatgacctgagctgaaaccaagagtcagacaatcacccaggagccccggaaaatgccttttttatttgagatgcgactgatggttttccaaggtgaaatgacgtgtttagggttttctttgaaattacttcccatgcctaaaggataactgaagatcagtgaaacaagtatggcaaatgctaatgattgccaaagctgggtgacatgtatgaagt

SEQ ID NO: 9532 - DNA, 558 bp, Canis familiaris
gcatgaagttttgccagcggtggttcttttctcttgtatgttataattgcctttttagtaagaaggttttgaaagtattgtctcagtgatgaaaagagagcggatgttaacagtttgttgtatatttcaccatttccaattgtaagtatttcagggtacagcaaaagccttagcacgcaagagcacgcgtgcaggaggggtccttcgacacccaggaggtgaggggatcagaaaggtccggattctctgtaaatgtcccgcttttctttctgtgtgtatctatctacatgccttagcacacgccctcccgccctgatccctctgccctgtcgccagaacaaccggtacgctggtgcgctgccagttacaggacaaagcgatggaaccctaatcagttctctctcgtgtgacaggggaggaagagaaactccatagtattctttgtagaatatacatacctgtaggatgctgtgtaatgggaaaccatagaattgggcttttgtcatttcaaagttggagaaatgtatgaataaaatgtataaaacacgaaaataaaaa

SEQ ID NO: 9533 - DNA, 391 bp, Canis familiaris
cctcctcactataatccccacccatgcccacatgaaacaacagcaaaataagatacacaaataaaaaaatctttccaagttctttaagtatttaaacatctgagccaaagcctatgacaatagaatagaagttattgtatagttgttaaacttctacaactttgcaaataggggctaaggtgtccaatatctatattggccttgctggactataaccttctaaacctggatataaggggttggaggttttaaatgggccggtaatgatttagtagcttattttgaaaaagctctatgagctgtaaaaacttgcatgttttttgtttaatgtaatataggagaccctctaccctctcaaggaatatatttcaaaaacattgttttgtgaatt

SEQ ID NO: 9534 - DNA, 228 bp, Canis familiaris
ctttcactgatgtattttttttaatagggtcggaggtggtcgggaggttgcgggtggagaaagattgaattgacttttgtgtggttttgtttagtggagaatttttttttcccttttactgtcagctggtctgatgggtttatgaattctcattcttaaaagatattggtcttaaattctagaattttagattaggactgttctactgtgaataaagttctggctccg

SEQ ID NO: 9535 - DNA, 524 bp, Canis familiaris
tcttgtttggccctatgaaattctgcacttggtatttagcatatactctaccttcattactatctggcaccgatgttctgccttagcactcagttgcattcttttcctggtcttgtcctgttcattatgcgtttaattctgaggaccatatgaaggtaggatatattaatatttaccacgattattaaaatttgtataggccaaccatattcccttaagttgatggcccaatgttaaatgttatttttcatatcatttataatcttgtcacagtccacttaacgaagtttggttagatttcagtgaaaattatcttccagagtagtttcttttttcctgggattggggaggggggctaactttactacaattagtatgtatggtgcagaatttcatgcaaatgaggtgtgccagcagtgtggtaatttaatcgtatttaaacaacaaccaaaaaagaatgcacacaacttgctgctgcttagatcactgcagcttctaggacccagtttcttttactgatttaa

SEQ ID NO: 9536 - DNA, 608 bp, Canis familiaris
actacttatgtgtggacctgagcaatcagagtctgtggcgataataatattactgagaaatgcactgcattcaattttctaaagtaacaaatttggtttttttttaagccattaaaaatctatgtgtgtgcgtgtgtatgtatgtgagcagttagtgttaccagaatcattgttgaactacctgaagcctgcctttagaatactaaatataatgctgttgtctctgttttgacatttcctagtatttcccccagaaactccaaagaatatttgtcccatatgattgtggattgtcctgccttagactgttgtaaagaaaaccatttctcttttagaattgctcaatctcagttgacggcacaaattaagtgttttgttgttgttgctgttttacaactagtattctaaaggcatagacaggagtagctgctttttagcaatagaattgttttggtattttgctgctgtttactatgatgcgcaccttcagaaaacttcccaaatgagcccaggaatttggggatttctagcaacaaaattgtgaagcatgagaattctgccgattttgatatataaaatccaccccaccctctcttttcctaaaaaaa

SEQ ID NO: 9537 - DNA, 172 bp, Canis familiaris
ctgatgcccaagtgtggattcatccataagcttcctgaaggctcccttcagtgaatggtccagaacatttaaaaaaaaaatacactgggaaagactacatttactatagacctgtgacacacagattttgttaggcagctgtggggtgctagtcctgtgctatggtatactg

SEQ ID NO: 9538 - DNA, 474 bp, Canis familiaris
tgttgatatgtgtcatgaaccatcatcttgcaggaaaccagcttcacttagtagcctactagtagtacatcaaagagttacatgaaatcaatcttaggcaaacttgaaggacagaggccagataagagtaaagccctttatgacaggggtctgcagaacatatcaagcacatccttgctaatttctagatactaccagttctttattggtgaaaacatgaatccagatggcatggttgcactcctggactatccgtgaggacggtgtgaccccttatatgatgtttctttaaggatggtttagaaatggaaaaatgttaacgaacttggctgttaactttggatgtatcacctgttgtcctaactggctgctgctcttcatccacacaacaccaggacttagacaaatgggactgatgtcatcttgagctctttattttgaccttgatttatttggagcggaggcattgttttt

SEQ ID NO: 9539 - DNA, 329 bp, Canis familiaris
ctattcggggactctgcctgactgtagggcccgggtgtgtggcattgtctcggcaggcagagctttttgatttgctgctccatctcaaggaagtggctgctcttgtcatgagcacctccgtggatgggacagggagggagcaaggtaagggaccgtcaccaagatgtagcagctgggggcaggtgttggcagtagcccacctcttagaaaccggagcagcctgaagcctaatgtgaaagggccacaggttttataaatggggacatggaagcagaaactggaatcaaatgccgactgtaaattgtatcttataacttattataatgttt

SEQ ID NO: 9540 - DNA, 487 bp, Canis familiaris
taggttgagggaaattttgacacagacacgagacgccaggtgaagattggagtgatacatctacgagctcaagtatgccaaggattgctggcaaccacagaagctaggagaagcatcgaacagatgctacctcagataccttcaggatagaaccaaccctgccaacaactggattttggacttctagcctccagactgtgagagataagcttctgttgtttcaagccacccagtttgtggtgatttgttatggcagccccgggaaactaacatagtagcctacctagtattctgtgggaatgatctgtctatcactctccctctctatcttttaatacagagactcttttctgaagtgctatccaagagaacagacaaacatggcctccggaataaagaagaggatggctgggagcaagagagagaaacagatttctttttcactttttcaagagtacaaaagtatttacttgtactttttgatatt

SEQ ID NO: 9541 - DNA, 536 bp, Canis familiaris
cggggattccatcggggagtgacgaggaggcatcagtctcagagtcagacgaggatgtccgcagcgcttgaggcagagctcaacgacctcatgtgacctgtgggtcagggtcgcagggcagacaccgctctatccctggggggctccaggccgcatgggccctcgcctgaggtttccttttctccgggaagacatgtatatttgcagagctccacatacagaaaccataattttgcagaaataggtgtttttagaggttttactacagaaggtctacttttctaagggacagtgtcctgggaggtggtgtgccacaagatgccgcagtggcccacacagcctggtatgcagtgggcaggcaggacatggggcggcagccagagctgcccctgtgggccaggcagcgggcgggtgcacggggccctcctcctccaggacacagatgtaaagttttgtatatctatttcgcatttgacccaccagcggatttctctttcgtttaataaaactcctttttgtaaaaaaaaaatataatt

SEQ ID NO: 9542 - DNA, 563 bp, Canis familiaris
ggggagcccctgcgttcaggaccttacgccaaatccttgtcgccgcacttttataagtcatcgtatatgagataaagccttggcctggtcggggtggcacggggacgtagtttatcacgataaagcaccaggaatagtagagaagtggggggaattcaaagccccgtgcctccttctcccgcgttgagtttgcgattgatgacagattctttgccctgcggcgtggagaggcctttccagaattgcttccccgataaggtcgaaggatgggttttaggaaaccgagactggatgaagaagtgttgaggatagcagagcccgggatgtatggaagggattatcaaataatgatgggaggagtgaggagtcccacgcggagatgcccggggagaccccggaaggctacggacagaacttgaaattggcggaacgcgtgctctcctggttcaggttccacggaaggttgtagtctaaatggattttgtgttttctgaggcatttcaaatggcaggcagtgtcactgttgtacatattccctgataaatatgtattcgagaaccaaa

SEQ ID NO: 9543 - DNA, 181 bp, Canis familiaris
cttcacccagaagccaagttccacttctttcataattgcctacatttattgcagtcccgaatgtagcgtgtgggcttgtgttttgcgggcagtctttctggaactgttagagctgagacggggtggggggaatgggaggaaaggctacttcctctggtttattataaagcttaaattttat

SEQ ID NO: 9544 - DNA, 492 bp, Canis familiaris
cagatacgtaagaggccacctcataccacatgcctatttagagattagatgaaactgtgagggatactctgtggatgccttaaaggtgactggtgttgagtactggtgggtatgtgtgcacccatctggcctaggctgacggaaaccatttccgttcaccttcacacagcacaagctgttcctgctcataacctcattgaggaaaatgagaaacatggtgctggtgacttccgtgtgtcttgggaggtgaggtggtaacgtcactcagcactctccgtgctcagcctcccccttaaatgccagttctacatctacattaattcatctatgcaagcttgtgttttcatggtttgttttatacatgtttgctcatttgattctttaaataatcaggtctaacattaatattatgaataatttttaaacccaagtatgtatatgtttgtgtgcttgttttcctggatggtttgaggcaaacaccatcttgtcctt

SEQ ID NO: 9545 - DNA, 555 bp, Canis familiaris
tggcgaccgcttcttgctcaggagcccgcaaggattgctgagcttctgtgctgggacctccggcagcccagccatcccctgtggtcgctgagtcgagaggtgaccccccatcagcgcatctacttcgatctggattcgcactgggccgttcttggtgagcgggagcacccgtggggctgtgtctgtgtgggacaccggcggggctggaccggaagggaagccggagcccttgctgagttttctgcccccagaaagactgtacccacggagtgagtctgcaccctagcctgcccttgctggccaccgcctccggtcagcgtgtgttccccgagcccacacgagagtgaggacgaaggggagcgggaggtggaccttcccctgctttccactgcgccacgtccccctcgaatgtcagcttcagctctggtggtgtggtggggacctggaaccaggatagctgatgctccccagggccccgaagggccagggagggactgaggaaagtgagtgtgagtttacataaaacccttttctatgaaaaaaaaaaaaaaaaaa

SEQ ID NO: 9546 - DNA, 588 bp, Canis familiaris
gatccccatggccctcaccgttccccaacctacaactcctcccgcaatgatgccagggcagtgccaggcaacgggcacccaaggcgtggcggacacaggtacccctctgcctccagaccccacggccccgagcccaaggcacagtcacccctgtgccacctccacagtgaggagccagccagacatctctctgccctcaccccctatggagatcaaggttccaggaacagccctctccccaccactgggacccttccccacggcctgtgagagattctatcactacgtaaggaaagacttttcctgcccctcccaagcccccctcacagtcctgtcacgaagcacatgccattttaataatccgaattaatttcaccggaacctttcctggttttaaaagaatggttttcttaattgtcttggggaagagagccataggattggggatgctgccctctaagggctggggaaaggtgtttatacaggttctaattaaccacttttaagggtgcaccccctcaaaactactgcattttttatggatgaaaaaaaaaatgaagccctttaaagaagtagagagataaaaaa

SEQ ID NO: 9547 - DNA, 617 bp, Canis familiaris
atttggggggaacacactcggggatgacccactgtgaatcctcctgagtccccatggagtgagacacagagccaccccgagcccttcaccttggcactggctgaataaggcctctaagggcaacacgggctcaacctagctcccgcccacctgcctcgggagggggttttcactttgttgttttaagttatcctcttgattttttttcttttgctttgtgggtttggctggtttttcttgcactggtttggagccgatcacttttctccccctgccctagggacccgcccggtggagatccctcgtgtctctgctcacgtctggggtctaggagggatagggccccaggtgctctgctcacgagagggtgtctatgagggagacccgtcttaactcacactccttccctggggacccgctccaaccggggcctttggaattttgctttttgttgtttgtttaaaaaaaaaaaaaaaagaaagaaaatatatattttttgaagaaaggactgccccgggttttatccctgataggtcggggccagttacctgattgctgttttaatttaaaaaaaaaaaaaaaggaaaagtagaaccaaaaaaaaaaaaaaaaaaaaa

SEQ ID NO: 9548 - DNA, 625 bp, Canis familiaris
gcctccctgccttagccgttcaccaggccttgacggccaaacagctacacaaactgcttaagctgcccacaagtacaagaccagagaccaagcaagagaagaacagagctgttgcccgggccgagaagaaagctggccggcaaaggggatgtccccactaagagcccgcctgtccttcgagctggggttaacactgtcaccaccctggtggaaaaccagaaggctcacgctggtagatgatagctcaccgacgtggataccccatgaactggttgtcttcctgccaatgccctgtgtcgtaagattgggggttccctacctgccattaatccaggggaaaggcccaggctggggcgtctggtccacaggaagacctgcaccactgtcgccttcacacaggttaactcggaagacaagggagctctggctaagctggtagaagccatccggaccaattacaatgacagatacgatgagatccgccgccactggggaggcaatgtcctgggtccgaagtcagtggctcgcatcgccagctggaaaaagccaaggctaaagaactggccaccagctgggctaagtggacgctgttgaattttctgtacataaaagtaataaaaggttc

SEQ ID NO: 9549 - DNA, 571 bp, Canis familiaris
tccggggacaactgttgtcgctggggacctgcttcgggaaattcaccagagtcacagattccggttgcacatcacagccctggattacctcgcaccctatgccaagtataaagtgtggataaagcctggagcagacagtctttcctgtatgggaaccatgtgttgaaatcgggactgggtcgaatcactgaaaatacttgccagtacccagggatgtggtggtgtactccatggcagacgtccctttgggttttggggtggcagcacaagtctacacaagactgcaggaaagtagaccccatggcgattgtggtatttcatcaagcagacattggggaatatgtgcggcatgaagagacaattgacttaaaacgaaatcatcgcaaggacttatggctgtgtggaagggcctagctttgtttcctgtgtctgtgtaggctccatcatcatgttgaattttgtcaacactgtgacttcttcagggacttcttagtttaatattctcactattacggacgatgcaggttggattcttatgcggaaatggctccaaaaatagtgtttcagatct

SEQ ID NO: 9550 - DNA, 393 bp, Canis familiaris
  misc_feature (1)..(1): n comprises a, c, g, or t, or includes no nucleotide
ncggcggtctgtcccgcagcgtatctctcctaatattcggctagctcaggctacccggattcattgcctccagttgcccccttctatcgcgtacactggactcactcgcgggtcctgttctttgtctgtggaactgactctacacctttccacttgctgaaaaggtcaggccttcttggctgatccatctgcatttgtggctgctgctcctgtggctgctgccaccactgcgtgcacctgctgctgccgcagccccagccaaggttgaagccaaggaagagtcggaggaatcggacgaggatatgggatttggtctctttgactaatcaccaaaagcaaccattcagcccagtttatttgtgaaacaaggaaataaaggcttacttctcttaa

SEQ ID NO: 9551 - DNA, 618 bp, Canis familiaris
ggttaatttaagcacatctgttctggtgcatttgcgttgtttcttcatgcctttacttactgtctgtacccctgataccgattggcaccagagatgtccaaataaatctgtttttgtcttgttctttaaaagagaatagcagaaactgacccttgataaagtcacgtggccatcacggaaaatgtccttcctttatttttgcagggttttgctcacctctaccgtaatgataatctgatgttaaagacccaataacccatagaaagcatatttcttggccttggtctatgggatgtcagcaaggcctctatcacagtccgcacatataaatggtggtgaaataaaggaataatctaccatattcttacttgaaatgtaaataagttatttctttgatgaatttggaacgctagtatacatcccacattaagctgttgaacaccacgggtaatcatagttcctctgcccagtctggaaagaccctctcatgactaccctgcgatgggctgctgactatatttgtgcactttccttttatatttacttttgttcttgctggaggccccagtgtacccccgagcagatgtcaataaatgcacatttggtatttgtttttga

SEQ ID NO: 9552 - DNA, 373 bp, Canis familiaris
attcttaatttaaagaatctttgaaatggctaaggccttatactgggtcgtaatcttgaaattgacctggatttccctaactgtgctgttctgttttatagcacaagcccactccaccaatatgcactgaattcatgttcactttctgggtttctttctcatttctccatgtgccccaccctttaaccccccatagatgtgctggctgcattttgttgccagataattcctattgctttcatggaaagcaagccacattgacatatcctacttgaagcttgtagttaaagcctcattctttgtggttctgtgggtattcgaatctgctgctgtgctccatttcctttgcctttgatgcctgaagaatatagtc

SEQ ID NO: 9553 - DNA, 555 bp, Canis familiaris
gctccctaaagtcttagcatgaccctcacgcttacagtcatcccatccggaaagaagtctgtgtataaggccaatgtcccccaagatcagacttaaagtattagcactgttgttgtgattttcactttccagatagaagactaagtttagggagtgatacagaggtgatctagtcttaatgggagtgaaatgtcattttacttccaacctgccttcaggccataagtgaaagcccaattcattagctttggttagacctaagtagtttccttcctcacttttacaatggacttgggtcttgctatagctcacagcagctccatacagtactttgatcccaccgaggtgggtaccgctaccatgaccaccatttacccataaggaaacaaatgcccaagcctttacctactagatgcccagctaggtgcccagccttgctttgtgactcaaattctcccacttaaaatctatcagtcccacctccctttcacatttttaggtgctaaggggattactcatctgacgtcccccaacttgaagtaaataaaaactgtt

SEQ ID NO: 9554 - DNA, 527 bp, Canis familiaris
cacacacactcagcgaaccacagcagaaactccggacacaaacttgtatgtaagccacctgaaagaaacaggaagcaggcacaagaccttcgttaattaacaagcgaactaaagagagcagacctaccatccaaataaatcacattcttgcacataagtgatcgtttttcttccaaactatgtgaatttaaaaggtcacacgaaagaagcagtcgggctttgccaccacagaatgaaacccaaggtacattttcaaatcaatgtatagtagtttctcctcttttccttcgctccctttctcctttctcctctctcatcttctttctttccctctccctctccctctcatttcattttgttttgggttgcctgaatgttgtcaccaagtgagaaaaagtatttaattatatgtaaaatttctcttttaaaaaaagttttgctgatgttaaatgtatctcagtgccatgtcagattgtgcccctccctttcttgcacctctaccctcaccctaagcagtcttgttgaaa

SEQ ID NO: 9555 - DNA, 382 bp, Canis familiaris
ctggtggcgcggcgccctctgtctcacccccttccccagctcaacgcccccgggcacagaggcacacgtcgtgccccccaagccgtggccattctctggaggaggtcaccaggtggagacgatgcacccctgcatgcactccgcactccaaaggggagcattggccccggaaagggcccagcctcccactggagccccagccagctttcatcgtccccctctccccacgagatggctagctctcccctcccttcgccttctggcccctggtatggtgggggtttctaacgatcacacccagcttgaggaggggctgcttctgaggtcggttgttgtctttccaattaaagaaaccctgtgccaaaaaaaaaaaaaaaaaaaa

SEQ ID NO: 9556 - DNA, 668 bp, Canis familiaris
  misc_feature (652)..(652): n comprises a, c, g, or t, or includes no nucleotide
ggaattttatggcaaagggatcccattgaacctttatggaatattatattaccacactgatgtcatacccaataatttggcacaaacactttggtgtctttcctaagctccacaatatattctgcgatctaattctagtgcaaactgtatagcactggcgcccaatataaaatagtgctcggatatgaattcttctcgtgacttttaaaagggtaacacggatatgtacatttgaagacccacgtgatacccgttctgtaattcccgaggcacctctcttgtttttgtttgtgttttttttttgttacacagttgttcacagtggagattgtctctacagtccccgaggagggtggctattccaccacctggattccaccccagggccattttagggaggaacacaacgatacacaggattttgtatttcagcaggggactgctccagtgtaagggcaggtttctcaacaccccttcttcctcaccgagcccatcagcgaagttcagtgaaatgaataacataattggtggttggttcaatcactaccagtctagactagcccagacgcatcaattagagagagctgtcttttaaagggggagcgctaccgaaacaagcagggcattattgatactgatctttaaaagtgcnaatccagcttggcaga

SEQ ID NO: 9557 - DNA, 499 bp, Canis familiaris
  misc_feature (1)..(1): n comprises a, c, g, or t, or includes no nucleotide
nggtgcccggcgtccggaactatcgggttttgggattatatatccagtgccagatacgatgttttctgtgttacatctacttccatggccggttttactaccttatcccccccccccagctgacctatgatgaagccgtgcaggcttgtcttcaacgatggtgctcagatcgcccaagtgggcccgatattcgctgcctggaaacttctgggatatgacccctgcgatgtcgggctggttggcagatggcagcgtccgctaccccatctctaggcccagaaggcgctgcagtcctaccgaggctgcagtgcgcttcgtgggtttccccagataaaaagcataagctgtatggtgtctactgcttcagagccatataactgagcgtgcccctagagccacatccagtttttaagtccattaagaaccatgtgaaaaaaaaaaaaaaaaaaaaaaaaaaaaaaaaaaaaaaaaaaaaaaaaaaaaaaaaaaaaaaaaaaaa

SEQ ID NO: 9558 - DNA, 541 bp, Canis familiaris
gtttgctctatcagaaggtgaatgatagagataatgaagtggaagagataagtaatccccacctgccagtataggaatcggaaggttgaaactggtgcctgtaggaggatgggcaggagaagggaaccatgggaaaatacaagaaagattattgcattcttttgttataaaaggtagctttatttgacttcacagatgaagtacagttgacccctgaactacaagggtttcaacttgttaggtcccattatatacccatttttttcaataaatacagtactgcataaagattttctcagtaacattttcttctctctaagcttactttattataagagtacagcatgtaatacatataatataccaatacatgttaattagctattatcagtgagattcccagtcaccagtagactattggttaaatttcaagggagtcacacagattttctactgtctggtgagttggtgcccctaaacagttgtataggtcttatatccctcccagaagatgcttcctgtattttacatatttaagaga

SEQ ID NO: 9559 - DNA, 690 bp, Canis familiaris
tgggacgacatcaggttttccccaacacccctgcgtccctgggtacacgtcatcatcctgacagactgagaaagactgaggattgcgggagcccagaggggttcgatgaggagccccccttggcgcccccagccggagaaagatgcgaggtctgctggtctgtgttcctgctcctccgtcagacctggtgatgaaggagccgctgtcaaggaccgtccttttgttggtcatccttaccaactttcttttggttccttggtaccctcagtcccacgcagttgtgtgaaccccgactcagcagcgttccggcagcaacgaagtggtggctgcacacatgtctcctctctatatataacccctgtgaaacacccctttacaacaaatagtgagagactcctcccacatctgtgagagaacacgaagttcccgcagcacagttgaattctttagtaaaactctgggccttgccgggaccccctgagttggcctccagccggtttggccaccctgccttcggcccgggtgggatcccggggtcctgggctcgagtcccacttcgggctccctgcatggagcctgcttctccctctgcctgtgtctctgcctctctctctctgtctctcatgaataaatggataaaatctccataaaaattaaataaataaaattgcccttgaaaaaaaaaaaaaa

SEQ ID NO: 9560 - DNA, 338 bp, Canis familiaris
gccagcgcttcaagagactctctccaccttatgacacaggtcttccacgagatcctggagaccgcagaggagccgcgcccaactctccggccccgttaaaagccaaaagagccgagagccgagagcgagccagccagagggagggagagcagagcctctccagcctgggaactataactcctctgcaggaggcagcgcgctccttccccgcatctcctggggacacttctccccgcgcccggcgccggcccggccaggagcggaggggcccgcacggccgccgcgcgcgtcctcccgctcggcgtgtgctgcgcccggggagccgggagggcccggcg

SEQ ID NO: 9561 - DNA, 304 bp, Canis familiaris
tttaaaagaaagctaatgctagtatatactgcaatgttaggggaatgaacatgttttcctactgcattggggacttctagataggttaatgaaaggtcttttattatgttactggacacgaaaactcttgtctaatttcttactctattgtacgtttacacgtcgcagcactaaaaatggatgacatccaacactttttaaccaaatgatgtacaaactaaataaggactatttattgataatgttttgctactcttgtcagacaatggctaataaaatgaattaggcagtcttaaaaaaaaaa

SEQ ID NO: 9562 - DNA, 614 bp, Canis familiaris
ttcaagctaatcactgaggatgtgcagggcaaaaaactgcctgactaattttcatggcatggatcttacccgtgaccaaatgtgctccatggtcaaaaaatggcagaccatgattgaagctcatgttgatgtaaagactaccgatggttatttgcttcgtctattttgtgttggttttactaaaaaacgcaataatcagattcggaagacctcttacgctcagcaccaacaggtccgccaaattcggaaaaagatgatggaaatcatgacccgagaggtgcaaacacaatagagcttgaaagaagtggtccaaaaactgaatcccgacagcatcgggaaagatataggaaaagcttgtccagttctaattaatcccacttcccatggaatggtttttggttaaggaaaaggtaaaaatgctgaagaagcccaagtttgaattgggaaaactcatggagcttcatggtgaaggtagtagttctggaaaagctacgggggatgagaccggtgctaaagttgaacgagctgatggatatgaaccaccagtccaagaatctgtttaaaattcagacatttaatggtgacccaataaaaacatatttgtgatgtttaaa

SEQ ID NO: 9563 - DNA, 390 bp, Canis familiaris
gacttgcacagtgacacagtgctctccatcttaaatgatgcagcgcattcggggcattttatgtgatgtcaccattattgtggaagacaccgaatttaaagcccacagcaatgtcctagctgcttcaagcctgttatttcgaaaatatcttttggagccatacaatctgtatctccagccatgtcctggaactggatgatctcaaagctgaagtgtttacagaaattcttaattatatctacagctccacagttgtcgtcaagagacaggaaacagtcaccgatcttgcagctgcaggaaagaagctgggaatatccttcttggaggatcttactgatcgcaacttctcaaattcccctggtccctatgtattttgcattactgaaaaag

SEQ ID NO: 9564 - DNA, 159 bp, Canis familiaris
caacttttgtgtatattttactaggaatttagattataacctttcggggataccctgggtggtgcagcagtttggcgcctgcctttggtcccagggcgcgatcctggagatcccgggatcgagtcccacatcgggctccacggtgcatggggcctgctt

SEQ ID NO: 9565 - DNA, 333 bp, Canis familiaris
ttttctggtcagctcagtgggaaccagtgttactgctctttccaacaccggctccatccagtctctccctatttgctgccagggaggctgccccttttgccacgtcttggggcagggcagagagtgagcccaaggccaggcctctgccgctgcctctgaccagaccgttgtggcaccccagcgccatagcaaggaagtgcttcacccataaatagatgtctggtagggtttcgttgtacccgccagtatctgctatcatttcactttgtgttgttccggcgtttcctgttgctagagaatcatgtgcttcttgtaaaataaaatttactacct

SEQ ID NO: 9566 - DNA, 479 bp, Canis familiaris
ctgcctcgatctgggctctgacgcccctgggccacgcatgctgctgcgggcagctggaggatgatgatgcagtccgggcccgcggccacctggaggagatgcgcgagcagatacacggaggtgtcgggtgaagatggaggagcaggccgaccagatacgcccaaatggccgaggccttccaggcgcgcctcaagagctggttcgagcccctgctggaagacatgcagcgccagtgggacgggctggtggagaaggtgcaggcggccgtggccaccatccccacctctaagcctgtggaggaaccatgagcgccccgcatgccacctgctgggccccccccaactccttcccgtgccccctgcctgctcccaccggcctccaggaggcctgcccctgcccccagctgtcctcctgaaagggccctagcttaataaagattcaccaagctccacagcaaaaaaaaaaaaaaaaaaaaaaaa

SEQ ID NO: 9567 - DNA, 512 bp, Canis familiaris
ttaaagggtgctatgcttctggttgtttatgtcccagactggagataggcacgggcttaaatgtgattattatttttgcctctaatgactggtgctagaattccttctataaaactcttccaaaataaagatggtttcatcaatgccaccttgtgaaaaaaataattgttagactgcccacttctgaaagaaggagcgttgttccagtgccttgttcattgttcacctgtcctaccgtatctggaatgttatgtgatacttgcatgtttcctagacccgaacgtgtaggtccccttgtgtctcaaggtttgttgtttttttttttttccctcctcgattgcatttgttggctccatttttatttttttctttaaagataaacagctgggaccatccccaagggcaagccatgcacgcaactttagtcatgtatctctctgcaaagcatcaaattaaatgcacgcttttgtcatgtccaaaaaaaaaaaaaaaaaaaaaaaaaaaaaaaaaaa

SEQ ID NO: 9568 - DNA, 186 bp, Canis familiaris
  misc_feature (1)..(1): n comprises a, c, g, or t, or includes no nucleotide
ncaagcctttcctcatcatcatcgtcgacagagacacccagagtcccctcttcatgggaaaggtggtgaacacccaccccaaagtaactgccttttgggtcaggtcccttccagatacccattaaagagtgaccccccccaggaaaaaaaaaaaaaaaaaaaaaaaaaaaaaaaaaaaaaaaaaaa

SEQ ID NO: 9569 - DNA, 502 bp, Canis familiaris
caagccagatcggatgagacagacacaacctgcacagttggaaatggaggatgaatataccattgatggttgttccagcagcagacaggaggtgtgctaactaaaaaagggcacctgctactttactccgagaactctgttcctccagacctagaagacattctcaaatagaaagccgtaatttggttccaccacatcctgactacgtacagtatagttttctctattcgtttcattttccccttccccattcctttattgtacataaagtaactgtgtatgtgcacaagcatattgcattttttttttttaactaaatggccaatggtatgttttgatcgacatcaaatggagatgggatgggggaaaatactgcttctgtgaaaataccccctctctccattagtggcatgctcagtcagctcttatctttatattccagtaagttattttgctctcactgtttaacaaaaaaaaaaagaaaaaaaaataaaaaaaaaaa

SEQ ID NO: 9570 - DNA, 626 bp, Canis familiaris
aaaaatggtaacacccgaataaggagggaagactgtcactctccgagtttaagccacccagatctggaccagcctctgaaggttattgccagcccctgccaccaaaggagaatgcttgggtgaagcgaaggttctgaccctcgcggcccgatctcagagctcggacacagagcaacagtcccccacgagtggtggagggaaagcagtcccggctcagcccccggaggaaggaccagcaaggagagcagatgaaacaaagtagatggggtgagtgtcccaaaggccacagtgggaactccagccgtggtccaggagacggagggaacaaagaccactggaaggagccagacaggaaagacggcaaaaaggatcaagactcccgatctgcacctgagccaaagaaacctgaagaaaatccagcttccaagttcagttctgcaagcaagtatgctgctctctccattgatggtgaagatgagaacgagggagaagattacaccgaatagacctctgcatcctgtgctttctcctagtctctccaccctggaacattcgagagcaaatcaaacctctatccagacaagacaataaaactcaccatctcctggagaaaaaaaaaaaaaaaa

SEQ ID NO: 9571 - DNA, 647 bp, Canis familiaris
tggtatggtgtgtgcttttattgtctattgttatttattttattttttttgcgacgtgcttgttagacccatatattggcgataatatttttcttgcacttctttttttttcctctacttagttttcagaatggtatactctattagaatgtatacttggtgtcagtgctgtatactttgtagccaaattaaggttatgcttgagacattgaacatgttattatagtggtttgaaaattctgattattcactgggaccttactgtagagttctgtacatacccccttattattactgctttttaaataaattattttaattaatatgattatattaaccaaataatatgccccatttgtatgtaaaaacctctttgagaaatactacttctggagtagtatataagatttgtaagttaagtagttgacggaatgttaggttagcatgagttcatttctttgggcttttttttttttactggttatacattttgtaaactgatacttgcttcttccttctagtagtaagagtaaccacttatctatttttacatcagtacttaactctttgatgatacatgatgctaccttgactttgggagagataaagaataaatgctggttccccggcccaaaaaaaaaaaaaaa

SEQ ID NO: 9572 - DNA, 607 bp, Canis familiaris
ccgatggtttggtggagtgctgccaacatgaactgctacagccattaatggttctctatgagaaggaagggtgaatttgtagcccagtgttaaattgtacagtcctgctcatgcccaatggccccatgcggataaaccaggtggtccctttgagcctgacctctacaagtctgagatggaagtcaggatgcagagctaaaggcccctcctccagagttctgcaagtcggaaaacccagaaaaagattaaagaaggcctccaagactgcagagaatgccaccagtggggaaacattagaagagaatgaagctggggactgaggtgggtcccatctccccagcttgccgctcctgcctcatccccttcccaccacaccccaggctctgtgaagtgcagttcgtcttctccacccaggaccgccagcagagcagggtctccctgcccccatccctgtccccatcccaaccccttccaacaacaaccagctccaactgactctggtcttgggaggccaggcttcccagccaccgaagactactttaaatagaaaagagaaattgataataaaatcaggagtcaaaaaaaaaaaaaaaaaaaaaaaaaaaaa

SEQ ID NO: 9573 - DNA, 637 bp, Canis familiaris
tccttttagtgaaccgttcagatccgcctggagacgccatccacctgttttgacctccataggaagacaccgggaccgatccagcctccgactctagcctatgccgcggacggataacaatttcacacaggaaacagctatgaccattaggcctatttaggtgacactatagaacaagtttgtaccaaaaagcaggctggtaccggtccggaattcccgggatcggccgccctaacctacggcctctactgcttccaccggggtcagagccaccgctcgcagcttatgatgcgcacccggatcgctgcccagggcttcacggtcgcagccatcttgctgggtctggctgcatctgcgatgaagtctcgatcctgagtccgagaccacctggccttgaaagtcacgcagagatcacccccagccccaagagcaaccaccggtcctgccacctgacttattccctggtctcccctgacaagcccctgtttcagcgggggagggagtggccaattctgtaactgacaggtttttccaggaatctcagattcggttgagtttgggtgtcgcatactacatttgtgcccccactctctccacttcctacttaataaactgatccacttgtaaaaaaaaaaaa

SEQ ID NO: 9574 - DNA, 705 bp, Canis familiaris
gtctcaggtccatgagcttgtacttgggacttgccaagcggagaggaagtgcatcaggggttggccccccacgccctttctgatttggcctctactccctcaatttagtttgctctatcgcttttgactttgctgtcagcaggaatttgagttttatgtctgattgatttttaggaaagcctggaactttccagatctcatccgggtttctgggcctctactctctcctccttttcttgcctcattcccactgctgttcagtcttctgggtctagttttcagcctttctggtgtgccctacctggttccagacagtgcaggccccaggcggtgggccagttcaagagtctcaggtcgagcctgccccattggagctgcttctgctgcctggtgggttggctgcagggcatgaggaggcctgggaacagcaggggtaaggtccacaatgctgtgcgtttggcctaatgcagagacactttctgaatattttcccttttgaatctgatttgaaatatgtagcttccctctctagcccacaggaaagacaggaacatagggaaataaaagcatttatctttgttttggaagtaattacgttgtgcagctatttacctatttagatgccatgtttatagagagctgattgttaataaaaacccaatttacactggccaaaaaaaaaaaaaaaaaaaaaaaaaaaaaaaa

SEQ ID NO: 9575 - DNA, 525 bp, Canis familiaris
acgtcatcatgggctattgtggatgatgatgctgtgccagtattatctgttggtgtgaagggtctatttgatgagaaatggaaggatcgacttggtattaaaagtcaagcgctgggacatgaagctccgtcatcttggactgaataaaagtgattctagccacagtgattccacccagagtcagaagtctggcaggaacgccaacccccggcaatgcacgcaactaatcctgaaatgcagaaagacaccagtggacttcctatctaagacttgcgttgctggatcagcaaaggaaaattgcactattgcacgccatattctattttttaccaccaaaatcatgtggttactgatattacttctattttctctgttttctgtttctctctctctctctctctttgtggtctgagtgcagatccttaaatatatgtattctgtttcactaatcctgggaaaactgttctttgcaataataataataaattaaacatgttgatacccaaaaaaaaaaaataaaaaata

SEQ ID NO: 9576 - DNA, 595 bp, Canis familiaris
cgatcagagtgaagacgctcagctcccaggaggaaccagtggaaagttgggtagctctcgcgtcagggttctccccacagcttgaggacgggatagaggagaaccaccatgggcagagagatcatgtactggttgaagagaactgtgcggatagaccggcgtagtttctcagcgtccactggttcattcttgccgacctgaattcggtagcgagagatgaagttaggttttccagttgtatcaaccaccagtagaaacccattgaagctccagaagagcagaccaggtacttggatggcacctataaagtagagcatccactccatcccttcgaatgtagacagcagcttctcccactgggcttgccaaaagtagccagaagcaccccaaatctctgaagatgccaggtgactgagttccagaaggccaccagcaagagaaggccagagcccaggatgaaagctgtcctcctcatggagccccagatgtgtccctcctgcttcggcttctcattatgttgcatacttccagcttctcccttcatctgcgcagcgccccgcgtccccgctgctgcgaggtccccgccgcggcccag

SEQ ID NO: 9577 - DNA, 575 bp, Canis familiaris
cacctttatctttcagaccttctgccaatgggagaaccaactctgcccacccacagttgtttggtgggacccagagtagcactcaccttagtattctttgtgaccctgtttcttcattggtggctcatcttctgccaccaagcatgacattttggaaggaataatgtttgtaaggctacacaatctgctgaatcagccaaggggggatcactgaggtgaccctcactaagcggataaccctgccacttaccactttgttgtcttacatctgtcactgccatgtgacattgaggaggtaatttcatttctttgaaccagttttcttatgcacagaatgaggaggttggaccataaacccagaagtttcatataaactcttttttatagtgatatctactaaaaatcttacccataaggttgttttatggatcggattgtgtctgtgccttacaaagattatgctgaaattctagccccaggaccccagaatgtgaccttattcggaaataaagtcccttaagatgaaaaaaaaaaaaaaaaaaaaaaaaaaaaaaaaaaaaaaaaaaaaaaaaaaa

SEQ ID NO: 9578 - DNA, 588 bp, Canis familiaris
tgggcattgtggagcttctgttgtctttgggtctgatgtcaatgctcaggtgagttcttcatgtctccagatggaacgcatcagggctccaggccctcctcgataagacctcacatgttcttgttgcaagtagaaattcccaactctaccattacatctcaaattccttttggtttcaggagccctgtaatggccgaaccgccctccatcttgcagtggacctgcagaattcgtgaccttgtgtcgcttttgttgaagtgtggggctgatgtcaacagagttacctaccagggctactccccgtaccagctcacgtggggccgcccaagcacacggatacagcagcagctgggccagctgaccctagaaaaccttcagatgctgccagagagtgaggatgaggagagctatgacacagagtcagagttcacagaggacgagctgccctatgatgactgtgtgcttggaggccagcgcttgacgttatgagcttcaaaacatatctaaaagaacacggacttgtatatttgtacaaaagagagttttatttttctaaaaaaaaaaaaaaaaaaaaaaaaaaaaaaaaaa

SEQ ID NO: 9579 - DNA, 520 bp, Canis familiaris
  misc_feature (1)..(1): n comprises a, c, g, or t, or includes no nucleotide
natgtcgtacactccgccccattgagcgcgcaatggtcggtaggcgtttacgtgggaggtctatataagtcagagctcgtttagtgaaccgtcagatcgcctggagacgccatccacgctgttttgacctccatagaagacacccgggaccgatccagcctccggactctagcctaggccgcgggacggataaccatttcacacaggaacagctatgacccttaggcctatttaggtgacactatagaacaagtttgtaccaaaaagcaggctggtaccggtccggaattcccgggatcctgggtggcgcagcggtttggcgcctgcctttggcccacgggggcgatcctggagacccgggatcaaatcccacgtcgggctcccggtgcttggagcctgcttttccctctgcctatgtttctgcccctctctcttctctgtgactatcataaataataaataaaaaaaaaaaaaaaaaaaaaaaaaaaaaaaaaaaaaaaaaaaaaaaaaaaaaaaaaaa

SEQ ID NO: 9580 - DNA, 152 bp, Canis familiaris
aggccctttccagggtctgagcgctgtgcggggttcgtacactggcttcccacccctggccggactggattctggggccgacctgtggtgctgctaggctggccttctgcttcctaatggactagattccagccatcctgccttgtgcttcc

SEQ ID NO: 9581 - DNA, 471 bp, Canis familiaris
ctcgtgaggagaatgagacacaccggggcaccgcggccacaccctgtgagggagattgcgccgaggcacgagatcacggaatgttcgcggtgtaaagattggagggaagcacggccgagacccagagtatccgcccaaaaggccgaaggcccttccaaggcggccgccttccaaggaggctggtttcgagaggccccttggctgggaagaacaagccaggcgccagtgggaacgggctggtggagaaggtgcagcgcacgtggccaccatccccacctctaagcctgtggaggaaccatgagcgccccgcatgccacctgctgggccccccccaactccttcccgtgccccctgcctgctcccaccggcctccaggaggcctgcaccctgcccccagctgtcctcctgaaagggccctagcttaataaagattcaccaagctccacagcaaaaaaaaaaaaaaaaaaaaaa

SEQ ID NO: 9582 - DNA, 637 bp, Canis familiaris
  misc_feature (543)..(543): n comprises a, c, g, or t, or includes no nucleotide
tgcaagcatttacagggcatgtgacatctaacagatgatacggcgtgttaagacataggccactggagaccttctggcttcagagggggagagactgagttggaccccaaccttctttctgtggccctgcacgtttcttgacttagcccatggtcagtcagtgaggggcccccaagggtttgtgacaggcacattcccttgggacagaggctacagtttgtagctatttcccctgtccccccgaccccatccccacctctacttcagaacatggccccccgcccaactggccacagcgttaagtaatgtgcttatcctcgggagcagctccgggtgtctttttaaaatgtagagaaaccaagtacggtgacagtttaaggaaaaaaaaatatatagaataccagaaaagccgtttacccggagaatttttttctccccattcttgttttgtttttactcaatgacaaaaattttagttttatttcctgatagcaaaaggaaagaaaaacccagccctcaaaaaggccaaggccccgtcccccntgttgtcggtgatttgtttgtctttctgataggttgaaaattgtgtaataaacttgatgacgctgtcaaaaaaaaaaaaaaaaaaaaaaaaaaa

SEQ ID NO: 9583 - DNA, 598 bp, Canis familiaris
tggcttcctcctgagttgttggtcttcatccttagagtcattggtacctgttcatctttgaggtcaagttctgattatttggcatctaagcgttcatagtaggaagagttttaggtaaaagtggatccagaccctgtcttcttatttgccacttccctataggactattgagagacatgtccttgggttaatttgtatctgatcttatggtggccctgccttctactagctgattcgaaatacagaatgtgaagagtgaacatttattcatctactcctttggctactaggactcatctgcagtcctttcttactcatactgaatcccgattctacttctgcttcttctaaataggtcagagcatcccatttgtctattgctgagctgtagaactgtttctctcctgtaggtataaagcagagtgtgtgggatattcagggaacccaccctaatgatatattgccattctctgggaaaggttgggatcataagtatttctgtgttctgtaaagaatttcatatactggttctccaataaaattttattaggactaaaaaaaaaaaaaaaaaaaaaaagaaaaaaaaaaaaaaaaaaaa

SEQ ID NO: 9584 - DNA, 520 bp, Canis familiaris
cgctccttgcctgatgcttccatcaccaatgtgccccctcctgcttccagatgttccactcagaggattacgagctctctggtgcttcagcacacctgctgccccctactgtcggaggcgcatcgatgaccccagcccatgaccggccccctcaggaccaaccgctcccatcagggccacctcacatttggctgggctgtcaaaggaagaaagagttaggagtgtcagaatgtgtcttctgcccagatcaagtgtgtattttagggaggggcctcgtgtaaccacggaattcctatttatggcatttcgtgccttgtaaatagcaccaggagatggcgaagagaatgtacatatattttctaagaaaaaaaaatctgttactttcagaaaggctctgagttgttcgtggcagcctgctggagtccacagatctgtcagaccattaacatgtacactttgcgaacagattgcctcaataattacaaataaaagggctacttattttcaaaaaaaaaaaaaa

SEQ ID NO: 9585 - DNA, 629 bp, Canis familiaris
ggctttccttgggctgccagaccgaccacaagagcagaaattcatgcagcctgcaaagccatcgagcagcaaaggcgccatacactttagaagttagttcctgtatacgacacgtatgttactataaatggtatcactaattgggttcaaggttggaagaagaattgggtggaaaacaagcacagggaaagaggtgatcaacaaggaggactttgtggtccctggagcagctcacccagggcatggacatccagtggatgcatgttcctggtcattcgggatttacaggcaatgaagaagctgacagattagcacagagaaggagctaagcaatctgaagactgaacgaaatgattttaattcttggaaaaacttgattggcagcatcgagtctcaggaggttcgagttgacttgtaccttcccgtggattagagcgaggcagtgctctcctggtggctgcagcccacgcccgggcccccgccgtagcagagggagtgcagcccggggcttacctggctggcacccgtgtacaagacaagcctgcacgtagccctggctcttgatctttgattaggaaccgttacttacagagcaagatgtgtaaataaatctcttaaaatttaaaaaa

SEQ ID NO: 9586 - DNA, 625 bp, Canis familiaris
aaatgagaagtacttactgtatagtacagcttggtttgacccactctccaagcttgcctgttgaagaaatatattgtcagaaaacaccaggcctgatttggttcccagggacagtcaaacccgggtgattaccgacaataatcaagcccatggattcgggggaacagaagatccataacttagaattacgggttttgactttactcatcagagaactctgccataagcgttgctgatagaagagtgccctcggtcattcctctcgacaaggatacagcagactgcacggccaagaagcctcggaccatggcggacacgtattcggaatcagaagctgacgtggtcactcgcacccatcgcattacctcactggccgcccaaatgggggaaggtgtctgtccgctgcctcacctgtgacgctgcgacttaggcacctcaacccaagacccgaatgctgggaggggagtttcttccgatggctgggcagcctcggcggagcagatgcacgaagaccacggagtggtagggcagcccgcggcggccttccttccccagcacggccctggggtgttctcggtgaagtcgggacgctctgtttagagcaagggcttggaaacagaaatgc

SEQ ID NO: 9587 - DNA, 649 bp, Canis familiaris
taggaacattgaattggcctgccctggtgacaccccgtcatggccggttactctgactgtgtcttcagtatttcagggtccgcatgtccatgaaggatgttgtgtacgagcactgattctgaactgtcccttatctatagtactgcacgctactttttcgagtggatccccaactatctgtgtttatccagtccgttctgtgacaatctccaccccgggggcttaagatgtctgctaccttcatcggcaacagcacagccatccaggagctgttcaagcgcatctcagagcagttcacggccatgttccggcgcaaggccttcttacactggtacacgggtgagggcatggacgagatggagttcacagaggccgagagcaacatgtatgacctgggtgtctgagtaccaggcagtaccaggatgccaccgccgaggaggagggggagttcgaggagtgaggtcggaggaggaggtggcctagagctgataacctggtaaagcgcgtggaagctgtgtgaactctttattcgctcacaacctgttctctgatagccgtgtctctgtgtgcactcactctttttcctgtctggacgtcacatgctgtacagatgccaccattaaagcattttcatagtgaaaaatataaa

SEQ ID NO: 9588 - DNA, 519 bp, Canis familiaris
gggttttcaacatcgcgagtgccggctcccatccccttcccatgggtaatccgtgatcacaccaaaggatggtttgtcctgtgctgggagctgacaggctgcagaccaggtattgcgaggttgcctttgggaagcccccaaggggcacagtagtccagggtccaacaattggccaagtcatcaagtcacatccgtacccagctgcagaacaaggagcatgtgattgaggccctacgcagggccaagttcaagttccctggccgccagaagatccacatctccaagaagtggggctttactaagtttaatgcggacgaatttgaagatatggtggccgaaaagcggctcatcccagatggctgtggggtcaaatacatccctaatcgtggccccttggacaaatggagggctctccactcatgagaaccttgcaccacccgaaccctattcatgcccacccaataaatcctgcttcctgtcaaaaaaaaaaaaaaaaaaaaaaaaaaaaaaaaaaaaaaa

SEQ ID NO: 9589 - DNA, 649 bp, Canis familiaris
gttctcaaaccaagatatttgtacaattaaaattatagaatcattcatccttgaagaatgtgtcaaacagtgtatcctgacattccaatctgatctgtacccatggggagccaaatatgaatgagggagatctccctgtctagattattctatataataaataacaaagaaatgaatataatatcaccattttgtaatgtccaatgcattaaaagaggcataaattgttcataggtactaataccataaaaagacaacctgatgtcatttgtctcccaatgtaagaataatttactgcctgtagtgtttttttaatatttttaaaagattttatgtatttattcatgagagaggcagagacaccggcagaggggagaggcaggccccgcacagggagccttatacgatcgatcgatcaatcgaggaactctgggatcacaccctgagccaaaggctgaggctcagccactgagccacccaggcatcctactgcctgcagtcttaacaaaggagtcaaacttgactctgacccagtctgcgatccagctgacaatttttaggaattcagaggtctgagtgtgaaatagcaaatcagcctgagagtctataagtcagatgactggtctttcttcaacaaaaaaatggtaag

SEQ ID NO: 9590 - DNA, 649 bp, Canis familiaris
agcacaggccgccccgcccccgcgcccgccccggccccgctgcttagccaagctccttgcacaccaggcccgtacccagcagtctcttggaggccgcaggcccagagtcctgaccctgctgacctcgctgctccaaagactcccgcggtgcccacagctaacgtccttggctgcacctcctggcgggtgccccccggccctgatcccgattcctcgctgcggagaacatgtgaggacactgtagcctcgtagctgggtctctctggaagagacccaactgcaaagagaaaactgtgatttttgtcatattctctgttaaaaaccaaaccaaaaaaccctgatcttagctaatgaaagctcttctggaaatcaatgacacacaacggccacagcagcgcacgactgcctctcccagtccagtcgggcccctcggaggcctcactgccgttttagagaacagcgtatttattgaaaccatgagaagggacaaagtgccttaatcgatatattttgtgattttttaaagatctatttaaaactgcttttctgctcttcataccgcacttagtgcaaatgactatttctctgtaccagtgatgcttctgttttaataaatgcctcaaagtgaaaaaaaaaaaaaaaaaaaaaa

SEQ ID NO: 9591 - DNA, 599 bp, Canis familiaris
acatgagcttgaattgaattgagtaacgctcaacccaaagaatgttcctgcctcattccatgcccgcctgtgtccctggtcgttcagatctattccgacctaatgacagatgcactgtttctggctgggttcgagaaaaagacaacccaaagtttatgtacttaagtggggtgacgttaagctaatagacaactgctccaagttttacccaggtcgctactttgaaaagaaatggtgtgtgcaggtacagatgacggttccatcgacgcctgtaaaggggactctggaggtcccttagtctgtaaggatatcaacaatgtgacttatgtttggggtgttgtgagttggggtgaaaactgcggaaacccagagtacccaggtgtttacacccaagtagcccattattttgactggattagccatcacgtgggaaggtctcttatttctcagtacaatgtataaaattgtggtctctctcttctactctttttctctagggagttggattttagttgaaatgatactgcataattagtacttctctaggaaaaaaataataaagcacattttattggaaaaaaaaaaaaaaaaaaaaaaaa

SEQ ID NO: 9592 - DNA, 657 bp, Canis familiaris
atattactagcaatgtttgggtgctgataatatacctcccaagtacgttaattttgtctggatgatttcatgtacacaattcgagtatggtaaggcgataagaataaggaagatttccataaaaagatttcatgactatttaaagtgaacccaaaccatctattttgttttgtttttatttcaagtaagtgcatacccaatatgttgttgactatgtaaaaaagtatttccccaactgatatgttttgaaaactcttgtttgatttgtataggattttcaccccatggctcctttgattttctcctggttataaataaccccactatagttggtagatctctgttcttttccatattgccttcctaggctaaaacatcctaatgtgtgtgcctaaacattttatgagaataggagagtcccaaatgttagctcttcaattagaatttcagctgttaaactgctacaaataattaaaaacttcctagcccttgaccaatgataaatacactatcctttcatgctgtggcatatacacatatatggagagccaactactctgttccaaggattttatttcatttcccattaaaagaattacatttttcctcctaaaaaaaaaaaaaaaaaaaaaaaaaaaaaaaaaaaaaaaaaaaaaa

SEQ ID NO: 9593 - DNA, 550 bp, Canis familiaris
caggttctactgggccttttggaattaccggttctccccaattgttcctctggcagacgggtttcactgagcctgccatctttcccaagccttacttcccccactgccagtcaggaggtgacaaccatcctcccagagtatctctggctccttttttttttttttttttataatccacccccccccccgataagataagattcttgctgggaaaggaagcttggtataagaaatgtcagatgtgatctttgaacgtgatcctatccctgtgatgcagcagccaccccggcccagagagatgagaagagctggacgtgggcgagagcgccccacccgtggtggctctggtgctctgcccccaccatccctaccatctggtcttggtagatgtccttaggtgggctgacccatgtgcaataagaacatagatcctaaaggatcccccgagaagctgtatttcttgaattagaattctgaaattgtacatctataaatatatgtttattatgtgaaaaaaaaaaaaaaaaaaaaaaaaaaaaaaaaaaaaaaa

SEQ ID NO: 9594 - DNA, 545 bp, Canis familiaris
tgtcattcctggaatatgtgctcttcagttcatagcacgcatgttattaaatgtgtgggtggggagttcacggggggaaatggttgaggcacaacttgttcaactgattttgtcaaccgtctcacatgttcttgtttcccatgctacaattatttttcataccccatccctaacctgatacacactcgaatcttaaaggagaaaactgggtaataaggtcatttgttaaagaactgaacaactggaataggcttgtttttaagagtgccagtatgagtcacaacttgaaacatttctagctaagtatcttggagttccaactgatgtcacaagtagttgagtaagcaaggtaatgcaggggtgatgtaaggattgttagcctatataatattcaagattactttaaaatttcaatgttttatcctgatttttaagacttaagaggtggtctgtaatggattcaaatgttcatttgtagtataatgaaatgtttacagaaagataactttttcattaaaatatttttagaaaaaaaaaaaaaaaaa

SEQ ID NO: 9595 - DNA, 658 bp, Canis familiaris
  misc_feature (267)..(267): n comprises a, c, g, or t, or includes no nucleotide
tgatatcacgtaccctgctggttttatggagtcaatcagcattgacaggactggggagaattccgtcctaatctatgacaccaagggtcgctttgctgttcatcggattacacctgaggaagtccagtaatatattgtgcaagtgagaaagatcttttgtggggaacaaaaggaatccctccaacctgggtgactcatggatgctcggcacccatcccgctatcctgatccccctcatcaaggtgaatgataccattcagattgatnttggagactggaaagattacggatttcatcaagtttgatactggtaatctgtgtatggtgactggaggtgccaacctgggaagaattggtgtgatcaccaaccgagagagacaccctggttcttttgatgtagttcacgtgaaagatgccaatggcaacagctttgccacccgactctccaacatttttgttattggcaaaggcaacaaaccatggatttctcttccccgtggaaagggtatccgcctcaccattgctgaggaaagagacaagagactggcagccaaacagagcagtgggtaaaatggtccctgggtgacgtgattggaagtctttatacttaattaaagattctacagcacgcaaaaaaaaaaaaaaaaaaaaaaaaaaa

SEQ ID NO: 9596 - DNA, 625 bp, Canis familiaris
gacagtgcgatcatgaccgggtcctactacaacttcttcaggaatgtttgaccggaacacacggagggacgtcacgctggaagcctcccgggagaacagcaagcctcgggccagcttaaagcctcggaaagtgtgtacaggcggtaagagaaagaaggacgagattagtgtggacagtctggacttcaataagaagatcctgcacacggcctggcacccggcggagaacattatcgccgtggctgccaccaacaacctgtacatattccaggaccaactcaactaaggaagccacgcgcagggactgagcccggccgtcttctcaacggaagggcctcaaccttccccgggaagaatcaacgggcccgccgcccccttccccctgggatggcctggggggccttgcccttccccctgcggcgaggcggcccgggccgctgcccgcagaacaccgttcagcgcggatgtggtggacagtgcccagtaaaggccatcactcaaaataaatgtatttatttcagtctgagccttcctttccaatttgtagaccaaaaagttcccacccaggagaaaagccgtctgatggaacgtgtctctctctgcagcctcccccgccccatcacac

SEQ ID NO: 9597 - DNA, 595 bp, Canis familiaris
cccacaattaagaaattcctgaacctggcagcagaagaacctcctccggatgacatctacgtgagagaccgtctacaatatctttatgccataaacatcacaagacatctgtgagtgagagctagcccctagagattgcagttccacagtagcatcttaattgatgccaggctgccctgatcccagctctgtcatggtgctatgtataactgttcctcagttgggtctttcaagtcaagatcttttctagaaacattgaccctttgttttgtccggtgaataattgttacgcaacttttttctgaaagccttttcggagaggcttgcatttaagttagatctgatgtagttattcatttcctgataaccagaatgggcaggaccttgtattctcccttgagctttttctcccccgcttcttatccctgtctaaaagcagtatcttcctaatttttggtgttttgtaacaacccagaatatctagtgaataattcctctcagctataataaatctgtggtgtaatgaaggcagtcaatattagcccaaataaagaatttacaaatcaaaaaaaaaaaaaaaaaaaaaaaaaaaaaa

SEQ ID NO: 9598 - DNA, 481 bp, Canis familiaris
gcacagctcctggggtcccttgagggcacgggggcatttctgctcctgccgaatcttaaactgttttgtttcagcaagccttacctacaaccattcatccccttgccccatctagatgccgtctgcttccgcgttgctccctgcggctgtaagccacgaggggattcacggggaagttcactttacagccaatcccctgctcccctctgcccagtgctgacggagagcccctcctccataagcacagttcattctttcagtgccattggcatctacatagacacggtgtgagagtagatgtgtaggttactctacatgtatctgttctttcttccaaaccatgttaactttgtgaaacgacttttacactccaacacgctttacagcagaagaaataaaggaatatgaaaaatatcctgcttgaacttgaccagtgtgaaaaaaaaaaaaaaaaaaaaaaaaaaaaaaaaaaaaaaaaaaa

SEQ ID NO: 9599 - DNA, 611 bp, Canis familiaris
taggagccaagattatgcctccagccctagctctgcagctcaggttgttgctgcgcatcccactctactccttcagtacggtgctagtggataagcatggtatggacaaggagcgctatgtctccctggtgatgcctgtggctctcttcaacctgattgatactttccccttgagaaaagaggagatggtcctgcaagctgaaatgggccagacctgtaacacctgatgtgatggttcctctcttggcagctcctcttctcattctacagagtgctatgcacacggaaaggccttaaaaatatccttgatgtacagatttttatttgtaatttttaaagtctattttaatatgagctttctttgcacttaaaaattaccatgatgctttttgtactttgaagtgtacccccaaaatgatgaatataatatgtactctttttctttattccatcatggctggttaattttaaagaaactagaaacaacaaccatacacatgctttcactgtgttattcagtgtaacacataacttctactttgttttttgtataaaacatattaataaaatattttggagcaaatttaaaaaaaaaaaaaaaaaaaaaaaaa

SEQ ID NO: 9600 - DNA, 684 bp, Canis familiaris
atactggcttgctgcctgttgtatccgtggtgacgtcggttcccaacgatgtcatgctgccttgccaccatctgacctagcgcagcatccagcttgtagtactggtgcccccctggcgttcatacagtgggcgtctaattatccacccctcccccctgctggtatcccgctggtggagcactgtccccagtttcaccgacgactctgtgcacatctgtgccacaccccacacgccctttctcgtagagcctcgtgggctctgcgcctgtgggcacaccacagatgttgtagcccgtagtagtgatatccacaaacgctgtcccttgtgtctcactgtgatatttggtgtgaggcacatggaggaagggagagttttctgaggcccgtgaggaccattggcttgcccctggagaaggattatgaggaggttggtgtggattctgttgaaggagagggtgaagaagaaggagaggaatactaaataccattcctttcagcccctgcagcatgtcacactcagacctttagctttcaatgttagctgacaggcattaaagctttctgattagattgtcttcagttttaactgtgatcatgtcttctccatgtgtacctgtcacttattccatcatgtctcaagtaaaggctttaagaaagaaaaaaaaaaaaaaaaaaaaaaaaaaa

SEQ ID NO: 9601 - DNA, 257 bp, Canis familiaris
ccctgtctgaaatggaaatttgggaggtatttatatagaagattggtctggcagcctttatattcgcattaatttactagcattcctagactccggttttatggaaaagaaagtttttctttctattctattgtatttcatctgatttgctggctgatgaagatggtcctggtccttcaggatgctttttccttaataaacgtcatctgtaagagccaaaaaaaaaaaaaaaaaaaaaaaaaaaaaaaaaaaaaaaa

SEQ ID NO: 9602 - DNA, 624 bp, Canis familiaris
catgtttggtttggagaatccctgggtgttggcttccagttttggctacggcaatcccgagctgcctgaagacgtcctcgatgtccagctggcattcctccgccgtgctctccagccgggcctcccagaacatcacgtatcacctgcaagaatagcatcgcgtacatggatcacgccacgtgggaatgtaaagaaagccctgaggctgatggggtcacaatgaaggtgaattcaaggctgaaggaaacagccaattcacatacaccagtcctggaggatggttgcactaaacacacctggggaatggggccaaacagtcttcgaataccgaacacgcaaggctgtgagactacctattatagatattgcaccctatgatgttggtggtcctgatcaagaatttggtgtggacgttggccctgtttgctttttataaacccaactctatctgaaaccccagccaaaaatttcacactccatatgtgttcctctcgttctaaccttgtcaaccagtacacagtgacccactcaattccagttatttatttcccaaagttttggaaaaaagtataatttggccaaaaaaaaaaaaaaaaaaaaaaaaaaaaaaaaaaaaaaaaaaaa

SEQ ID NO: 9603 - DNA, 664 bp, Canis familiaris
ttggtatacagttgcccgagggggacaccccgtttgacgctggatcaccaggcttctgggctggctctgtggtcctcgccgtgcagcgtctcacgaggagtacgtcatcatgggctatgaggatgagggagcgtgcccagattactgttgtgtggaagggtcttattgctgagaaaatggaaggatcgaggttggtagaaaaagtccagcgctgggacatgaagctccgtcatcttggactgaatataaagtgattcctagccaccagtgattccaccccaccgagtcagaagtctggcaggtacgcccacccccggcaatgcacgcacacttaatcctgaaatgccgaaagtacaccccgtggacttcctactaagacttgcgttgctggatcagccaaggaaaattgcactattgcacgccatattctattttttacccccaaaatcatgtggttactgatattacttctattttctctgttttctgtttctctctctctctctctttttgtggtctgagtgcagatcccttaaatatatgtattctgtttcactaatcctggggaaactgttctttgccataataataataaattaaacatgttgataccccaaaaaaaaaaaaaaaaaaaaaaaaaaaaaaaaaaaaaaaaaaaaaaaaa

SEQ ID NO: 9604 - DNA, 532 bp, Canis familiaris
ttgaattctgttgcccttaagatgaccatgcattgtatacccatctgaagggatggccccaaggcctgttagcttcacgaagctgcaatctgtggatagggatgaggacctggttgtcaggccaggggagcatatgcatgagcatatcctggccagtgcccacccccccagggggcgccttcttgtggcctgacccacctgctccggaaccacgaggagacgcaatcatctttggttttgccctacagccaagtgaaggcaggcctgccaacaggctgtctcctaggaggttgtgtgggacgttctcattcagttaaattcagagataatctgactgcaggcaaggtgtgccgaacctgggaacacggaaggggaagcttcactttttgtctgagcttttctctgggctgtgggagggacatccatttccagggtgggggaggaagtacccaatgcattgtagttccactggttacatctcacttgtttctaataaaggaagcagctgaacccacaaaaaaaaaaaaaaaaa

SEQ ID NO: 9605 - DNA, 554 bp, Canis familiaris
aagccagggttgtgtgttactgtaccccatggatgcttgatgatgccgaccttgttcctggacaggtgtgtactgcccaatgagaaattcaggtcataggagagacccgattatagagaaggattgctcccttgtgtgtcctgaattgatgaaatgaatgtaagaccctgaaggatgtttctttttctttgtatttgttcaagtaaaatggcatatatggttaatttgctttggagagtttccaaagagatataactagaagtcatgtaaatgacttgactctaactttatcattatgagatgtcacaggctgtaattttactttatggcaagtataggccaatgaggatatgcatacgttaaaagtaatcaccttaaaaagccaagtgctgaaattgtgtgaaacatcctggttttggagttgcagaaaacattaaagatatcctcagtaatagcaagctttcatctttgaaaagtaggtttgttatttgatttaagaatgatagataaataaaggatatccagctgtttaaatgtgaaaaaaaaaaaaaaaa

SEQ ID NO: 9606 - DNA, 644 bp, Canis familiaris
tttatgaaaggaaatagctgtggccaagactttactgtgtttatcactttgtttttaggggtattagttatataccctattgttttattcaccacatcacttctcctgatagccacactttgtaaagacaggttttcccaactggcatgggtggccactttgatatatgccagcggacttgcttataaatcatatgttgaatgtcactggtatgatctttaccaagctattaacacggttaaccccagctttttcaaccaagggcctgtaataccttaattacagtttattttgtaactaaaatgatttgatgctaataatcttttgctcccttccacttcatcgtttggtgactgtattggactcttaaatattagtgttttgttttaatgtgaacatatgtcattatttgaaaaccgtttcttattcaaacctggttaaaaaataccaggagacttatagatgcccaatattctttattcagggcagtgtaacataactgatggtatgtgataaagttaaaatttttttgatgatatatattttatttaccaaaccttgtacactgctggtattactgtatgaaaagaaataaagtccattgataattgtccaaaaaaaaaaaaaaaaaaaaaaaaaaaaaa

SEQ ID NO: 9607 - DNA, 585 bp, Canis familiaris
aatcgtggcaggagatccaaatgtggagtacaagaagaccgtgtggcacagaagagttgcttcacctgcagcaactgcaagcaagtcatcgggactggaagcttcttccctaaaggggaggacttctactgtgtgacttgccatgagacccaatttgccaagcactgcgtgaagtgcaacaaggccatcacatctggaggaatcacttaccaggatcagccctggcatgccgagtgctttgtgtgtgttacctgctctaagaagctggctgggcagcgtttcaccgctgtggaggaccagtattactgcgtggattgctacaagaactttgtggccaagaagtgtgctggatgcaagaaccccatcactgggtttggtaaaggctccagtgtggtggcctatgaaggacaatcctggcacgactactgcttccactgcaaaaaatgctccatgaatctggccaacaagcgctttgttttccatgaggagcaagtgtattgccccgactgtgcccaaaagctgtaaagtgacaggggctcctgtcctgtaaaatggagaaaaaaaaaaaaaaaaaaaaaaaaaaaa

SEQ ID NO: 9608 - DNA, 414 bp, Canis familiaris
tatgattttgggaggacacaaattgttcagactatagcccagatccaggaatatgtggagtctagatttcctgtgttcccccaccccagcactgatactctttccgtatgtacatacacatgtgcacaggacacacagaaaaatgaacagccctttaatgggtaaatagtcaccaactgtgttctacagagggaaattcctgctgtgtggttgcaggctttgggtgtttcctgggtcttctgagttcagaattgttggagttggcaaaaacaaatcccatagggggaaatgatgcagagaaaatgactccttgtgtttcctcttcaaatgggcataaatggggacaaataagtggaagaaaatatagaaataaatctcttaaaaaaataaaagtcactgaaagatccaaaaaaa

SEQ ID NO: 9609 - DNA, 551 bp, Canis familiaris
aaggaagccctgaggctgatcgggtcaaatgaaaggtgaattcaaggctgaaagggaaaccgcctatttcacatacccagtcctggaggaatggttgcactaaacacactggggaatgggccaaacagtctttcgaataccgacacgcaaggctgtgagactacctatttatagatatttgcaccctatgatgtttggtggtcctgatcacagaatttggtgtggacgttggccctgtttgctttttataaacccactctatctgaaccccagcaaaatttcacactccatatgtgttcctctcgttctaaccttgtcaaccagtacaagtgacccactcattccagttatttatttcccaaagttttggaaaaaagtataatttggccaaaaaaaagataccttttttttttttttttgctgttacaccaaatacagttcaaatgctttttgttctatttttttaccaatttcaatttcaaaatgtctcaatggtgctataataaataaacttcaacactcttacaataaaaaaaaaaaaaaaaaaaaaa

SEQ ID NO: 9610 - DNA, 608 bp, Canis familiaris
ttggtacaaaaaggttacgattacggaatagattcttcttaatcggtatcagaagaattgtttctttcaaggcttctttctgagcattttaccactgcaagcctagcccctactcctgaacttggggcttcctggctcctacccgccattattcctcttaaccccacttagaatcccttttactcaacacctcagtcttcttaagcctccggagtatctattaacttgagccccatcatatgtttaatagaaggtaatcgccaacatatacttcaagccttattcatgtacaatctccttaggcgtatattttacgctattacaggcctccgaatactatgagacatcttttacaatctccgatggggtgtacggatctaccttttttatagccactggatttcacggattacacgtaattattggctctacattcctcatcgtgtgcttcctccgacagctatactaccacttcacatcaaaccaccacttcggatttgaagccgctgcatgatattgacactttgttgatgtagtctggctattcttgtatgtatctatttattgatgaggatcctaaaaaaaaaaaaaaaaaaaaaaaaaaaaaa

SEQ ID NO: 9611 - DNA, 334 bp, Canis familiaris
ccactatgtccgccgcacccgccaggtcacccgataccgcaatggagacgcctacaccaccacccaggtctaccatgagcgcgtcaacacgcacgtggccgaggccgagttcgactacgcgcgctgcggcgtccgcgacgtgtccaaggcgctggtggggctggagggcgcgccggccacgcgcctgcgcttcaccaagtgcttcagcttcgccagcgtggaggccgagaacgcctacctgtgccagcgcgcgcgcttcttcgccgagaacgagggcctggacgactacatggaggcgcgcgagggcatgcacctcaagaacgtggacttccgc

SEQ ID NO: 9612 - DNA, 324 bp, Canis familiaris
tataactgctccaccacttgtggaaccccgttttggagaggggaaatgtgaaattttaagtcactttcttttgagagagacttgttttggatgctcccccgcagcccccttctcccctgcactgtaaaatgttgggattgtgggtcacagaaagaagtgggttttttagttgaatttttgttttttttaacattcctcatgaatgtaaatttgtactatttaactgactattcttggtgtaaaatcttgtcatgtgtataaaaataaaaaagatccccaataaaaaaaaaaaaaaaaaaaaaaaaaaaaaaaaaaaaaaaaaaa

SEQ ID NO: 9613 - DNA, 633 bp, Canis familiaris
tgctcttcacgccgccgagacctccaggtgggcatctgaccagtgtgcccgaagaccaagtgcagatgcacggcccggtcggtgatggcccagtggctaccgttccaggccacgcccggcagctgaccaagaacctgatgcgcaaggccacagccgaccgcctgctcaagcagcgcgactcggacatccagaactttgtcagcttcatctccagggactccatccagaagtccctgcatgtgtacatagaaaagctcccaaagaaaaaagtctaagtgctgggctgtgcacatggccttgtggccgtacatgcctgtctgcggccctgattatgagattttattttattttattttattttattttttttttgattatgagattttaaacaaggtattttcccaatttaaaaagactttcagggatccctgggtggcgcagcggtttggcgcctgcctttggcccagggcgcgatcctggagacccgggatcgaatcccacatcgggctcccggtgcatggagcctgcttctccctctgcctgtgtctctgcctctctctctctctgtgactatcatgaataaataaataaaatcttaaaaaaaaaaaaaaaaaaaaaaaaaaaaaaaaaaaa

SEQ ID NO: 9614 - DNA, 391 bp, Canis familiaris
ggatttcttagagagcacccccgcagcccccggtgtctttaagtctgggcttgcccaagctccatcccccatgcccgtgtgtctgatcccccagcgccatatcagggtccgaaaccaggtagtgaacatacccgtccttcattgtccgcctggactcccagaagcacatcgacttctccctccgttctccgtatgggggtggccgcccaggccgcgtgaagaggaagaatgcccagaagggccagggtggggctggagccggtgatgacgaagaggaggactgaacccacccttccatccctttcaggcccgtggattatctagtttttctaggcccaataataaaacagtgttttggaaaaaaaaaaaaaaaaaaaaaaaaaaaaaaaaa

SEQ ID NO: 9615 - DNA, 545 bp, Canis familiaris
atatgagaattttttcaattatgttaccatatcgatatgctggaggaattcgcctacttaagaactcaggaaggtgggaaaattcatctggaattgctacccaatcaaggaatgctgatcaagcaccacacagtcactcggggcatcaccaaaggcgtgaaggaggacttccgcctggccatggagcgccaggtgtccctctgtgtgtgagaacttgatggtggtcctgcacaggttctgcatcaacgagaagatcctgctcctgcagacgctggcctgaccggagcccttgccaccagaggaaaggcccagggccctggcacctctttatgaagacatacagcatccatagatgcccttatgatgcttagaagaaaacctctgagttctaattccttagtggcttcagagtagttcccagagtctgagaagctatttctatttttaagagttgttttttgtaatttttgtaaaacaaaacatctcttttgtaaataaaaatcatcctaagtttgggtctttttaaaatgtaaaaaaaaaaaata

SEQ ID NO: 9616 - DNA, 639 bp, Canis familiaris
taaactgagttaatgtttccatatttgatttcagttttgcaagtaagtccttaaaggtccccggtagtgaagtgttaaatcttaattttcttcatctttcagagtatctgtaacaggcccttgtatctattcagtggtcaacagctaactgtatcattccaatatgttatttatttttaaccttaaccgtaacagaagcttgcctgtttacattccaaatgcataaattgctttcctgaacatcttggttctagctactaaggaccaatataaattcttatgtttggcaagtatctcgagagaaccagtattaattttaactgcattttcctaggaacttgcattctttgtagtgagcagcatatggtctctgtttagagcttaaaagtaaccatgaaaagactttccttattccctctaattcacatttaaaggatatcagaaacttataccatactgaagtatgaaatagtcatgctaaggaactacccagaatactataaagctcaagccacttgtggatctctgtcacttaagcattaatataacccaaactataaattgtacacaaatgaaatgttttctatttaaataaaaagttttgggggttaaaaaaaaaaaaaaaaaaaaaaaaaaaaa

SEQ ID NO: 9617 - DNA, 554 bp, Canis familiaris
gaaatagtcatgattggagatggagccaccagacatggaagcctgccctcctgctgatgttttcattggatttggaggaaatgtgatcagaccaccagtaaagactacgcagaatggtacatcactgattttgtagagcttttgggagaactggaagagtaatacccatttttatatggttcaatttttcaggttaatttttaaaagtcacagagtttgatactgtttgcttaccattgcctattaccacttaatgtatagatttggtattgattatctgtacttcccagtaaactatggaaatcactttaactgcagtcccagtattattatgacccttaattacctggacagttttataatcagaattctttatgtattttcctagtgatattttatttgagactttttaaaggaggatagtaaattaaacacctttcctattggaaatatgggttaggcagctttaagtgaatattggttttcctttgataggtaaataaaagtttatccctttatcagccaccaaaaaaaaaaaaaaaaaaaaaaaaata

SEQ ID NO: 9618 - DNA, 619 bp, Canis familiaris
atcgagctgccccttaaagaagaaagcttgagtctgtgaattaacctgaagcctccagaagcacaagaggaagatacagcatgttacatggccctgaaggaaagtttccaaaatgtaaatataactaactgtagtttttcaagcacagttcacatatattgacagtatttacagagatcctgattattgtggaattttcttaagaggtttaaaattaggttgaaaaagtcttcctttcccattcctttttttttttttcctttttaaaatttttgccttttgtgccctgattaggaaagaatttctttttaaacagatggcttagtgtaagtcatttatattgatcctagtcagtcattagctgcaagtctgatataaagcatctgatgaattttaggaattattttcattactctgtttcagtgtttggggaaatttgagattttgtttaaattcaaaatattttagaagttcacatttttatttcgtttccgtagcaaaagaatttaacagtttatcccagtattttagtaaatactgccaactccttctcaaggttcaccaagaaaagcatatttgtagtgctgccaataaactattcagaatatacaaaaaaaaa

SEQ ID NO: 9619 - DNA, 462 bp, Canis familiaris
tgtgttgttatgtgtttcaggtgctctgtgtggagaaggatccagatatatgtgcttctgagtatgtgtgtgtatatgcccttttttctcagcaagggggcttctagaggctttggggaggtagggtgggaatatggggggaggcccactgcccaggtgtggagctctggctgtatataagtaggagcagagaacgtatttctgtcataatgtaggcatgaggggtagtggggtgaagtccaggtcataagtttcatgtttgccttttttttttttttctttctttttttgtaatacagcacagatgttagacttttagggatgggggttgggagaccctacttaaaatagggtcttcactcctttaatcctccactcaatacatgtactcttttgccttttatatataaaaaataaaataaaatgtgtgcctaaaaaaaaaaaaaaaaaaaaaaaaaaaaa

SEQ ID NO: 9620 - DNA, 228 bp, Canis familiaris
cccatttcatatagttaaaaaaaacataaacccacccttcatgcttactacccaagtgggagctactgatgctggatggtgtttttgttttttttgtgggtttttttttttattttttttttttataaatctttttatttgttacccttgactacacttgattatttcccactctagggaagattgtggaaacgtattttgaaaaaaggcattaatcaacaaaaaaaa

SEQ ID NO: 9621 - DNA, 596 bp, Canis familiaris
tgtactgtgttcctcggtgtgtatgttacagattgggctgtagaagaccgttctgtccgtttttaactctgaagtgacacctcacaggagctttgcgcttttgtacagacctttgtaaccattgtacaagatacctactctgttagagaaaccggaaattatgaaccaatcgtgctggtttttctctgagcaccaactttgatgctgtatgtccgcggctgtgggatctcactaagtggctgatgtgggtcagcaaggccccctctgccctgtgggaacaccattcctacacgtttggattcagattcccttgggagcgcacgagctctgggagctggcaggtgaatcttacgcttttcatcggctggtttcttgggcaccttctagacatttactatcacttgtacctggaaaaacacttttttccttcataatttaaaaagaaacagcaaccaaggtttgtccattcactccagtctgttaatgttcacatttttataaatatgagccttgagaatgttctaaaatttgtaccagtgtgatttttttttttttagaataaatattttataaaaggaaaaaaaaaaaaaaaaaaa

SEQ ID NO: 9622 - DNA, 587 bp, Canis familiaris
ctgtcagccgtatccctctggccgtatgctgtacccggcattcagctcaaggcttgtgaagtcctccacaggccccgggagcacgtctgcggaatgcactctggcacaccaggggacacagcatcacaggtgcggctgctgtggaaggacccccgcaacgtgggttggaaggacaagacatcctaccgctggttcctgcagcatcggccccaagtgggctacatcagagtgcggttctacgagggtcctgagctggtggccgacagcaacgtggtcctggacacaaccatgcggggtggccgcctgggggtcttttgcttctcccaagagaacatcatctgggcccatctgcgctaccggtgcaatgacaccataccacgaggactaggcgagactcagaggcttctgcaggcctagggatgggggtggggacccacttgctggaagatggcaccatcgtggctaccctcactgcaacaaacagggagcttggcacccggctccaagaggtagctgccctagaggggctcagaaaggaccaaaataaagtgtgtgtggtggaaaaaaaaaaaaaaaaaaaaaaaaaa

SEQ ID NO: 9623 - DNA, 598 bp, Canis familiaris
taattcctcccagggttttaactttgttttattttccaaaccaggtcccatgagctttctgaacagctggtgtagctacagagaaaccagcttccttcagagagcagtgcttttggcggggaggaggaaatcccttcatacttgaaccttttctaattgcttatttattgtattctggggtatggcgtaagtacagagaagccatcacctcagatggcagcttttaaaagattttttttttttcctcaacaccatgattcctttaacaacatgttttccagcattcccaggtaggccaaggtgtcctacagaaaaaccttgggttagacctacagggggtctggctggtgttaacagaagggagggcagagctggtgcggctggccatggagaaagctgacttggctggtgtggtacagagaagccagcttgtttacatgcttattccatgactgcttgccctaagcagaaagtgcctttcaggatctatttttggaggtttattacgtatgtctggttctcaattcccacagtttaatgaagatctaaataaaatgctaggttctacccttaaaaaaaaaaaaaaaaaaaaaaaaaa

SEQ ID NO: 9624 - DNA, 215 bp, Canis familiaris
gagagagaagggtcttcttagaagcttgaaggatctggcttaagggaggatggagacgaatgtgtaccattatttctaaaaatcatccataaaaaaatgtgtcttgagttatggatctattagcaaaagaaattgagacatcaggagtcatgagacccatgaaaggccattaccttgcttttgttttaaggtctgggagggcaaaaaaaaaaaaa

SEQ ID NO: 9625 - DNA, 590 bp, Canis familiaris
aggaatctgctggaaggcgatgtagatcaggatttgctctgcctcttccaacttttcttccctggacctgagtgaaacccacctggattccactccctctggtgtgacaactcacgtccaaaagtacgcttctgattaagactggtttgaaactagggatggacacggttatcaacggaacttctcagcatcatgatgaccctggagtgaagcttgcccacgattcgggtgccaccccattactaccccgcacagaattacttttataaggaattcgttatctttaaagaaaacacgctttttccagtgccctttctgcaacttttttcaggagcgccacagataggatttggaattagggagtaacctctagttcttaagaacccacacctcttaaaagatttaggagaaagtttaccacataatctagtttacgaagaaaacttgtgctagaatactttttaaaaagtatttttgaatacccattaaaactgcttttttcccaccagtatctgacccacttgtttctgcttccaataaatctttggaaaactccaaaaaaaaaaaaaaaaaaaaaaaaaaaaaaaaaa

SEQ ID NO: 9626 - DNA, 547 bp, Canis familiaris
cctgccaacatggtacctcctcatgtcagactggagctggtgcagggcctcttttgtggcatgtacctgtggggtttctggggccaccccacaaatggggttgtgtgggccacggaatggtccctgctcaagacaggatggtggaagagccacaagttacctgtaggccttgtctccttagacctgggggcctgtgagatgtggagcaggagccacgagggtgtggtgaagaggagccacccttctccctttcctggtctgaccagggtctgtgttactttgaaaaggtgtgggtgcccgtgccccctcccagggcccctgagggaggaggggaggtcattggtccccttttctgcctcctggttccctgccccctgcaccccctgtatcataggggactttcacctccaaatctttctaagccatgtgtgaataggatttttactccccttgtacagtattctgagaaacgccaataaaggaccgtgtgttcctgtttcctctgaaaaaaaaaaaaaaaaaaaaaaaaaaaaaaaaaaaaaaaaaa

SEQ ID NO: 9627 - DNA, 656 bp, Canis familiaris
ctacggtggatgacaacctgggctcccgacacgccaacgtccagatgaccttcctccgcctgctgtccaccgagagctcttcacgaatatcaccctacccctgccagagacacgcacttgcctacctggacgagagcacgaccggcgcacctccaggaggccccggtcaatcacgggctcccaagaagtggagatcccggcttagggccacacacaagggttaacaaaaaaccggtttcttgaagaattgcttgccccgaaaccaccacccggttaattggggccaagacctaattgattcggagttacccggttccaccagaagaccctcgcgccctccccatcattgacacttgcgcccatggacataggagggcccgagcaggaatttggtgtggacatcgggcctgtctgcttcttgtaaaaacccgaacccacacaacaacacaatccacttgccaatccacgaggacccaagtactttccagtcccagtcactctagggctctgcactgaatggctgacctgacctgatgtccattcatcccacccgctcacagtgtggacttttctcccctctttctaagagacctgaactgggcagactgcaaaataaaatctcggtgttctatttaaaaaaaaaaaaaaaaaaaaaa

SEQ ID NO: 9628 - DNA, 667 bp, Canis familiaris
tattcgtatgtgaagcagcgggcagctgctggcttttccctggccaaccgtcagcagggcaagaacttccacctgtgtgtgtagcctgaggtaagtagcccttttataaaggccggtaaaatggtaggaaatttcgatttcttcggtaggggcaaaggaaaggggaaatgtccgttgcctttaatggttccctgtggcctggcaggaaagagttcggggcgatgacgaggttggatgtgaaacactcagctacatcttcagtgggatatttactcttactttggtgctaaatcgagatggcaacgagtcctggtacaacctgttatgaactgcctttgaacaccggcctgttatcccaggcactcacaatatagaatgccagcaagttggttccttcgtgtattttctcgctgggataaaaactttctcttgttgattttttaacaccacttcaactgttgatctcttcagagatggaccaaggctttttttaacaaaggaattgcaggacacatttaattctttacaaaactttctgtaatgccttatttgaatgtattatgtgctttctaaaactgtggtgaactactacgcttatgaatattactggctttcctggcatacatgactcttaatgtactacaataaaattaaattctagaaaaaa

SEQ ID NO: 9629 - DNA, 633 bp, Canis familiaris
  misc_feature (153)..(153): n comprises a, c, g, or t, or includes no nucleotide
agttcctgcacgaccctacactcactgcctgcttgttttcagaggacgctctgcggagggccaccccgcacccaggagagctgaagaacatgaagaagaccgtggagaatttgcggaacgacatgaatgctgctaaaggactggattcaaacnaaacgaggtcaaccacgccattgaccgagtgaccacttctgtatagaacttcacctccgaattttacctcccgtgtctccccctgctgtccagacgtccccgtctgctggcctggccgggagcctggcgcggcctgggtcttcccgcaacgcgggcacctgcgcgtcgctgccccgggcccgggccgcttgctgggccgctgctcacccacggaagtgccttatggggccctccgcccgccgggagccgccttgtccccgacctccagtcctttgtccggagtagaatacactactgtaaacagctgacctttgcttctgtcttttgttggggtaagggagcgcaggaaggggaaatgtgtttatcctcctcccccacccccataaagtgctgggacattttgagctcaagttctcttggacctactgatgagacagtgttttatgtacggggaataattgattctttaaaaaaaaaaaa

SEQ ID NO: 9630 - DNA, 537 bp, Canis familiaris
agctggggtcccacgtactggagtttattctcctctgtctcctgggacccatggaggggagtgacggtttcaattttttgccggaggaggggagggctcttacttagggaaacccagctctatcctggactctgtagctgagatttctttccgtaactagacttagaaggaggaggcctggggctttctgccctgaactctcccattatttcagtgttatagactccttgctcttacctggggagagggcagttgcgcactgtgagcccgaggaaggggcgagtaagcacccacctttctgtttttatctaataaactgctaccctgcctggatctctccttaactgcgggaggggtcccctgggccaggtggtggcgtgtctccctctacgtgttccctcccaccaccaccacaaggacccccccgggcgggggggcacagcctcctttctctgtctctgatcagagccgacaccagacgtgattagcaggcgcagcaaattcaatttgttaaatgaaaaaaaaaaaaaaaaaaaa

SEQ ID NO: 9631 - DNA, 613 bp, Canis familiaris
gtgtgtacagtacaacaggtgcaacccagttcggtcctccgcccacgtactacctcacgtgtttcttttccccgtgaggattgcaggggggagacccacaacatgggagtccataagtgacccactagaacatcagctagtgctaaagaacctcttgactccaagtcgaccctccttcttcagcattcccgataccaacagagccagttaacccattcaaatgcacagtgagaggaacgacagagatcatttgcctagccaagtggttatatcatttgtttcacgtttgctgggtttttctggttttgttttgttttggagtaggggtgggagtggatgtaacttcacaatcctaatacagtaattgttttgcatcttccatgttttatgcaaaacagacatttgaatcaataactaattgtgccctagactgaaagttaatgtttaggagaggaaaaaaattgttggaattttttctacatttttttgtgaagaatcttttttggaaaggaaggatacatatttttgttgtgtaatattttctatttttgaatgcattttattggtacaagactgtttttttggtgaagacattatttaaaaaaaaaaaaaa

SEQ ID NO: 9632 - DNA, 152 bp, Canis familiaris
tcttactagaacttgcctttgtttagatgtcccttagattcaggaatgtatcatttgcagtgcttgtattggtttagaacacacgattttaagatcatccacccctgtactaaaacatttcaataaaatcatgctacttctttttatccaaa

SEQ ID NO: 9633 - DNA, 652 bp, Canis familiaris
catcgtccccaccctgtcagcagcaggacttctccattggctccccaaagctcagcaaaagccattgtcctacagaagacccttgactacatccagtttttgcacaaggagaagaaaaagcaggaggaggaggtgtccatgctacgcaaggatgtcaacggccctaaagatcatgaaagtgaactacgagcagattgtgaaggcacaccaggacaacccccacgagggggaagaccaggtctctgaccaggtcaagttcaatgtgtttcaaggcatcatggactccctgttccagtccttcaatgcctccatctctgtggccagcttccaggagctgtcagcttgtgtcttcagctggatcgaggagcactgtaagcctcagaccctgcgggagatcgtgatcggtgttctgcaccagctgaagaaccagctgtactgacctggctcctagaacctgcagaagagccaacaagaggcctgagtctcctacttggccacagagctaccgggcttatgagattggactgtgatactgcacactggtccactggttctcggtgtttggttccccagcaccccctcatcttcagcggggctagggtatttgttttatgaaaactttaatttattatattgaccacaaaactcgaaa

SEQ ID NO: 9634 - DNA, 545 bp, Canis familiaris
cctgccccgagaaggggtctcctgccttgcctgtcctacattgttttgtccctcagctgccccaggttgtgtccactctggcatccgcgcatccccacagttgcttggaatcctgcctgctgcccagcgtcgatgggcttatgaggcctgaagtggtccctcgagagctttccttgccttttgtgggaccaccgatacctcaaggacaatgtcttccccgtgacagggtgtgaggggctgcagaatcgtcagcatagccacttagcgctgatacttggaacccagactctccgtgaccgctggcttccagctgcctcagcctctgccccgatgcctggctccttgcccctgccctacacatccccagaagggtcctggagccaaccctgccccaggatcaggttccagcctctcagtctcagaagagggggggagcaccccccatttctggccttttctcacgtggctccaagttctgctctgtactccagttccacccaaatacactttctggaacaatcaaaaaaaaaaaaaaaaaaaaaaaa

SEQ ID NO: 9635 - DNA, 616 bp, Canis familiaris
tcagcgtggatcaagcaaatgattgttaggttccaggcccctaattccccctgaagtctctagacatggagggtctatgggtcccagtcacttctcgctttgagaaaatcacaggggatttccccgtgaatcgtaacccggccacgtgtgaacatcttcaacatgtgggaaacatgagatgaaaggctctcttccaaggtggggaaaccccatccgactcctgccatctgcaggattaattccatccaaataaaggccgcagtggcctgacctaccaccaagggggctgtgcataccttgtgactccttggtagagaagaagagtctgtgtgcctgcctgactttaacccctggtgaccagacttttatttcagtaatgcccttaagtctagaattgtttgtcctgtttccttctccctcgtctcgtatttctagcctctatccagcaacaacctaattcagcactatcattgtatcgcttgaccctccatcaagaaatcaaagcaaactgcccacgctgaaagcagattgtgtgaggaaaaccccttccatattcaccatattcatttctagtctatttgtggatggaagtgaaaaaaaaaaaaaaaaaaaaaaa

SEQ ID NO: 9636 - DNA, 501 bp, Canis familiaris
ccctctctgatcacgaagccctgatggctactctgtgtgtgagacacagccccccgcagcacacccccgaccctactcagggaccagcagaaaggtcgaggttgatcagcgtattaaaggaggcctggacagagctggacctgggcgtggctcaagctcggtggtgggccaccttcgctggttacgtgattggcctagggctgcttctgctggcactgctgtgtgccttggcagctggaggaggggtcagggaagttgccatactcctctggacccccagcgtgggagtgctgctgggggcgggtgcagtctacctcttccacatgcaggaggccaagggcttatcgagggctcgcgctgagctccagcacgtgctgggaagggcaagggaggctcaggatctgggcctggagtctcagccagccctgctcctggggcagcaggagggggacggagctgaggaacaataaagcttgacacttttaaaaaaaaaaaaaaaaa

SEQ ID NO: 9637 - DNA, 582 bp, Canis familiaris
cgcctccccatcagtaacattgcgcccatggacataggagggcccgagcaggaatttggttgtgacaatcgggcctgtcttgcttcttgtaaaagcccgatccctctactacaccaatccaattgccaatcccagagggacccaagtacttttccagtcccagtcactctagggctctgcactgaatggctgacctgacctgatgtccattcatcccacccgctcacagtgtggacttttcttcccctcctttctaagagacctgaactgggcagactgccaaataaaatctcggtgttctatttatttattgtcttcctgtaagacctttgggtcgaggcagaggcaggaaactaactggtgtgagtcaaacgccccctgagtgactgtccccagcccaggcaagaagatctcccttcaggtgccgggcgcaggaactgcgtgtgtcctacacaatggtgctattctgtgtcaaacacctctgtattttttaaaacatcaattgatattaaaaaccaaaaaattattggaaagtaaaaaaaaaaaaaaaaaaaaaaaaaaaaaaaaaaaaaaaaaaaaaaa

SEQ ID NO: 9638 - DNA, 648 bp, Canis familiaris
tcattaagagtaatatatagccccctcagttgtagaatgtctaaatagctattttaaaaatcaaatgtttaaattttggaaatcacctgatgtcagtacacacctataatgccatgtgcttataacttttttgtaacattccatctatgcccattccctaaaagtcatgagctggtaataagggaagtgattaaataaaaatacagtgaaagagaaactaagatctgaatatatgttggaaaggctttggaaagaaaattgactggaaccccaatgtactgcagagtacagccagtatcttgtgtctctcttcctcattccgcacccctactggaatccttacccaaaataattcactactttaaaaacaggagtgaataatttgctcaatattgtttggctatgcaaatgtttgttttgcttaatgttctccatttacacttctcagcaaatgtagttgcagacaaatgcttttttttttttattttttccttggtttggggtatgtaaatagcctaaaatgtacattgaatttcacattgtaaaagttttattttattccttgtattatattaagcaaaaatccctatgtatatgaaagtgcataataaatatatttgctctaccaaaaaaaaaaaaaaaaaaaaa

SEQ ID NO: 9639 - DNA, 625 bp, Canis familiaris
tgcacgtagcccgacatggggctagatcctggtctccaggatcaagcccctgggctgaagcagcaccttaactgctgagccacgcaggctgcccggaagaaaatgaacttggacctcaacttcataccatagacaagtattaatttgaaatagattataaacttaaatgtataattgtcccagctttctgtctgaaggcacaccatatgcagggaaggaaatccagagcaccacatggtggttttgcttaattataacacagagacagaagttaagggagtcttgaagtagctggaagtcaaggtgctaaattccagagaagagggaactatttagaaagagttctataaatctgttttgcattccccttgagtttttgttgaatactaagaaaagcataagtaaagtataactccaaaagattgggcaaagaatgaccagggcacaaaaaaatgagaaattctaaagtttcacacactgtcaagagaaatttgcattccaaccaaccaaagtatacagaccatagcttttggtagacataccaataggacaaggccttagcagttaaattagccttgcagtaaaggccactttaactttaggtctatacaaaaaaaaaaaaaaa

SEQ ID NO: 9640 - DNA, 664 bp, Canis familiaris
ccgagctcgcgccgtgcccccgaggttcaagcttcattttcaagatcccatgggagcatgttctctggctcttttgcaattaacgtcttttccgggttttcatcgatgtaacctttgagtctgtgaagtggttaaattaattataaataaatggttgagacccctgagtgtgtatcacatccattcattgattcattctgcaaattagctacccccctgtggctcaagtgtgtacggagttggacaggacactggattctggaggacattaccccaacctgctcaagagttggggtcgaccacgttgtcagctgagggctggattatctaatacgccttgggccctgttgcttagctagcacgaaacctaggtgaccaacaccagcacagaagtatccacgttcttctcaaatgagcctttaaggtcagattccacatgcaaacttgctttgtaatttaaaaatgcataaactctgtaactctgtgaacaacattgacatttttgtaagcattgcagtcataccatcagcgtaaatgtctccttaaagacgagaatacagagaccatgggtatttttttttaaggtatatgaaatcatgactcctttgtaaataaatctacatttaagcgataaaaaaaaaaaaaaaaaaaaaaaaaaaaaaaa

SEQ ID NO: 9641 - DNA, 685 bp, Canis familiaris
tattgatcgcttccaataatcgttgtgtttatttctgagggttttttcccaccccgtatgaagtaacttcttgtcctagactgaaagattgaagcacttgttttttgtgttttgtcccacaccaatcggtcccataccatcccgtacccacatatcaggtcctatgttttgtgtgagtctatttctgagtttctctacttgcatttctgtggcaaatcttgatttatgcccatgataataccgacactgtcttaaattactattgtcttttttgttagcctgaaatctggcaagacaagtcttttttattttctcttccctccacatgcattttagaattaatttgcacagttcctccaaaccgacacaggacaagtacatgttaattgtaaatgcattacatcagttttggagaattcacctcttaattagtccctatccaggagcagatatttctcctttatgtaatactacatttgttaatcttttgatagatttcagtctgagcactttatatattgttactgcagtggatgatatttgtttgtaattatcaattataactgatattagtacgtagaaaatgcagttgatttttatgtatttctattgtatcagggacattattaaatcttattactaatttaaaaaaaaaaaaaaaaaaaaaaaaaaaaaaaaaaaaaaa

SEQ ID NO: 9642 - DNA, 677 bp, Canis familiaris
ctcagttcaccccacctggcttggatcaacactcccaggaaggaaggagggtttggcccccctgcacatcccccctggtggctgatgtaaccagaagtttatctgaagattatggtgtgctgaaggaagatgaaggcatcgcctacaggggcctctttatcatcgatggcaaggagtgtcctctctgtccgagatcatctgtcaatgattttgccccctggggcgctccctgtatgaaagtatctgcgcgtgtgtcagacccttccacgtatcacagcgatagtagacacagcgggggagaagtgatagtcccccgtcgtcgtggctcgtggagagacgccacgagcgacgatgtagcaccacatactacagacgctctacagtgtgggcacagcacacacagagggaatcacttcttccaaacccaattagactccagacatgccggaaagccttgggctgttgggcccccacctacacccctacgtggataccccatgctgacccaggaaaggccggacctgcccctttaaactccatgaccctggagggcttgtccaaggccttctcattctcccagctgggagctggtgaatggtgagcccctccctggagcccatctagctgggcccaggccaaaggtgaccaataaagtactaggacagacaggaaaaaaa

SEQ ID NO: 9643 - DNA, 268 bp, Canis familiaris
tcccccagggccggggcaggcatgggggccacaggctctcctgtccccctcacccccccccccccccgcagccagtcttcccccagagactgtttaccgaagcccagccagcccggccacctgtgggggccaggacgcgggcaccggcgttggcccaggcgccgagtgggtgtcctcttcccgggggcaggatgtcaggactgccgactgttcagggctcaggctggttgtgggacgcacttggacgatcagaaaataaagccatatt

SEQ ID NO: 9644 - DNA, 657 bp, Canis familiaris
gatgacatatattatgtatagaaatcccccgaactccacagatatgcttactagaggtaattttttaaaattcagcagagatgcagggaagaagattaacacagagaaatccactgtgtttctacacatgtgcaatgaacaatctgaaaaggaaattaagaaactaataacatttaaaatagcatctaaaagaataaactacctggaaattaaaacacagtaggaaagacttgtatactggaaactatgaaacactgctgaaagaaatgtaaagaagccctagttaaatggaaagatatcacatatttgtgggtaggaagacttaatattgctaaaatgtcagtactacccaaatggtctgtagattcagtgcaatccctatcaagatgccaacagcctttgtttgaaaaatgccaagccagtcctcaaattcacatgtaattgtgtaagggatcctacatgggcaaaataatcttgaaaaagaagaaagtttagccatcttccggcccctctgcaccccccccccaaaaaaataaaataaataaatagaaaaaaagaagaagaagaaagttggaggactcagtttaatagcttacaaagctgcagtaataaaaacagtatggtactggcataagaatagacaagcagaaaaaaaaa

SEQ ID NO: 9645 - DNA, 615 bp, Canis familiaris
agggccccctcaggctcccagcagcccccccactaccccacgcccccatgatgggcctcatgttcagcccttcatgtcaccgcggttctcaggggcccccggcccacccctgcggatgccgagtcagcctcctgtgggcctccctggctcccagcccctcctccctggcaccatggaaccctccccgagagctcaggggcatccaagcatgggcccgatgcagagagtgacacctccacggggcatggccagcgttggaccccagagttatggaggtggcatgcggcccccacccaactccctcgccggcccaggcctgcccaccatgaacatctactcgggacccccaggaggaggtgggccccctggaacacccatcatgcccagtcctggagactctaccaactccagcgagaacatgtacactatcatgaaccccattggcccgggtgccggcagggctaatttcccgctcggtcctggtccagagggccccatggcggccatgagtgcgatggagcctcaccacgtgaatggatccctgggctcgggcgatatggacgggttgccgaagagctcccccggcgccgtggccggcctgagcaacgccccggg

SEQ ID NO: 9646 - DNA, 582 bp, Canis familiaris
ttgaatgaactggttaaacatggtctgcgtgccctacgagagacacttcctgcagaacaggacctaactaccaagaatgtttccattggaattgttggtaaagacttggagtttacgatttatgatgatgatgatgtatctccgttcctggaaggtcttgaagaaagaccacagagaaaggcacagcctgctcaacctgctgatgaacctgcagaaaaggctgatgaacccatggagcattaagtcaccaacccgtctatatgtgtattatcaaatatgtaagaatgcaggagcctttactgatgacagtaatctatactttgaacccaaagatgcagcgtggtcttctggtatgttttaggaatcggtccagatgtgtttttccccagtaacttgtctgaaccatataatggtgtgcatttttctttgagagggtctatataatcattttctagaaagtatagttatctgtactaatgtttttatatgaagaacatagtgtctttgtggttttaaagaccactgtgaaataaaattgtttcacctgaaaaaaaaaaaaaaaaaaaaaaaaaaaaaaaaaaa

SEQ ID NO: 9647 - DNA, 552 bp, Canis familiaris
ccaggttctcgtggttccgatgagtgaccattcactgtgtgtagcgtgagcccgagaaccagcgtctagagtccgacagttctgctctgacctagacctcaaccttgaggccagcacctcccattatcgtccagaataccaccactgaagtgcccagacgtttctgggtctaccacactgcccaatctgtctctccactgtgcaactgctctccttcctgaagggccctcccaggccccctacccaccccttagtgctcccagaaagcagccaaggaagatgtgagagcaaaggccatgttccccgtgtcaggaatggcatctccatgaaggaggggcccgaagccctcatgggcggacctcccctgagcctgtctgaagggccggcccttagtgcattcaggctgaggcccctggacagggatgctacccctgcttctctggaggatgtgccctctcccctcaccctggtccctggcattagactcccccccgcccccaatccccatctgcccagtaaaggcctttgtgcagcaaaaaaaaaaaaaaaaaa

SEQ ID NO: 9648 - DNA, 572 bp, Canis familiaris
ctgtggactggtcagtccaggctcataccagggaccagactgacgacacatcccctcgggggtcacagtcccgtgttgctatttcgggtactctgatttcagtgagattaatccccgcatgtgtcactcaggggcaggcactgctcttaagccctttttgttttttttaatggtaaatacacatcagattggccgtcttgactattttcccgtgcacagctcaggggcattaagtacattcagcattatagcagccatccccaccatccgcctccagggacccttcatcttgcaccaccgagaccctgtccccctgaacgctgactcccccgcccctggctccccccgtctgcttcctgtctgtgaatttgactcctcctagggacttcctgtaaatgggatcatacggtatttgttcttttgtgactggcttattttacttagtataatgtcttccacaggttcatccatgttgtagccggtgttagaatttcctaataaaaggctgaataatagtcccattgaaaaaaaaaaaaaaaaaaaaaaaaaaaaaaaaaaaaaaaaaaaaaaaa

SEQ ID NO: 9649 - DNA, 627 bp, Canis familiaris
gtttatcaaacagcaagccatcacctacaaaaccacttgtttcaagttgtgttctgcagtcccaaactgatgttgtagattcaactgaataacatgggaaatgaccaaacaagacacccagttggagtccgttgaatttctgcagttagtgggggcatttctggtcttttcttccacttctgcagaatttcctgcagcaaatacttttttgtgcttgtttgcctccactatgatgtttggataaaaaatgagaatatctcttaaaaaataataaaataaggaacctagaatcttcacactgagccgtcacttatgagaaattgctaatggtgcccaggcccaggaaagaatttcagaaaatgactgtggaaagagtgataacccccagaatgcaaatcgggagtattacctggtgcttgaacaaggagctccactttgcaactggttttttttttaggacttgtgaggaacgcagcaacaggaaatccatccacaaaggatgcagtgtcccacttgtactgcgcctgaatagttacatgataatttactgaagaaatctagtgtacttaaaatttttttcataaaagtttacattgtattgtaggttaacattaaatgttttataac

SEQ ID NO: 9650 - DNA, 624 bp, Canis familiaris
gctgcacgagacaacacccgttaatgggcaaagactatggatcgagtaccggtcacaggagacctcgcgcctccccatcattggacattgcggcccactggacataggagggcccgagcaggaattttggtgtggacatcgggcctgtctgcttcttgtaaaaccccgtacccctatcacacatccattgccaatccagaggacccaagtgactttccagtcccaagtcactctagggctctgcactgaattggctgacctgacctgatgtccattcatcccacccgctcacagtgtggacttttctcccctctttctaagagacctgaactgggcagactgcaaaataaaatctcggtgttctatttatttattgtcttcctgtaagacctttgggtcgaggcagaggcaggaaactaactggtgtgagtcaaacgcccccctgagtgactgtccccagcccaggcaagaagatctcccttcaggtgccgggcgcaggaactgcgtgtgtcctacacatggtgctattctgtgtcaaacacctctgtattttttaaaacatcaattgatattaaaaacaaaaaaattattggaaagtaaaaaaaaaaaaaaaaaaaaaaaaaa

SEQ ID NO: 9651 - DNA, 629 bp, Canis familiaris
atagtgaccttatttctttacccttttgcgatgtgtaggaatgagtgagtggctggcttcccatgctctgtatgtcagactcctccctggcaccagaaattcccatcatgtgaagccaactgccctttgtcctcccaaggaattgtttcccaaagaaaagttttgttaaaagatttgtttggataattatcgtgccctctgtttcttatcacaacttgaaatgttgggcacttttctaactatagttttgttgggctacacgtaaattcacgtattcctgcgtcacaaattggaaaagtggccctaattgaaatgtgtttgaatgttatcccttgcaccacgttctttaaattgaaagaccaaatgttttacctcactgttggacatacattcccagcttttcaactttaggagaaaaaaaaataatcatgttttcctgtattgtaaattttagactatttcatatacattgtattaaaactgccatatcaattttaatgtatagattttgccaatactatgctctatgtaatacctaactgtatcgtagtgtatatgtaatatatttatgccccaataaatgttttaattcttaaaaaaaaaaaaaaaaaaaaaaaaaaaaaaaaaaa

SEQ ID NO: 9652 - DNA, 574 bp, Canis familiaris
actttgggataaagcgagggcaggtggtaaagatcatccggcccagtgagaccgcgggcaggtacatcacctaccggctggtgcagtagcggctggctcagtcgtctgtcaccttccggggggcgcggaagtggccccacttcgcactcggctggtctcggcccgcagcacagacatgacgcctggttgtgccgctccctccctcccggcagcccagagaccattgggggctgtggccaccatccccacgctgcgcgccgggtggctggcctgccctgtgggagccacagccctcaggaacctcactgctgcttctgggtgctgagccctcgctggacctggcacgagctgcctccaggggggacgggaggccacagggaggctcgcaggtggctggtgacagtggtcctgggtcaggtttctggccgcccggcactgtgctgtcaccgtgccccgtgggtggccctgaggcctctgtctgtgagcacacaccccgcagcagggagccagtcgctatttgatgttgggcgtttataaaaattaaaggtgtttgagtaaacaaaaaaaaaaaaaa

SEQ ID NO: 9653 - DNA, 628 bp, Canis familiaris
gaatgatactgttccgaatcagaatcctgtctattagactggacagcttgtggcagctaatttgcctgtaataagccagaacttttttttattgatactgtaaatattgtgtgtgtgtgtgcgtgtgtgtgtgtgtatatatatatatacacatatatatatatttgtacagttatctaagttaatttaaagttgtttgtgcctttttgtttttaatgctttgatatttcaaatgttagcctcaattccgaacaccataggtaggacgtaaagcttgtctgataattcaaagcatgaaatggatattcaaatggaaattctgctcagaatgacccgtccaactccaaacacgagttgtttgctgaatatgaggtaatgaagtccctgggaagttcctgaatttgtccaagttggaaaatgtggtagcctcactttaatgaacaattgcctttgttaaaacatgagtggctctgtatagctgatcagtttttccacctggaagcatttgtttctactttgactatgactgttttttggacagtttacttgttgagaatgtgaccaaagttacatgtttgcacctttctagttgaaaataaagtatatattttttctataaaaaaaaaaa

SEQ ID NO: 9654 - DNA, 531 bp, Canis familiaris
gtacaatcctgttttgctccgaagtattcagtaccgctcagtattgttaaatgaaatgattctcacttgtgatttggtttgggatccatagggaagcacaggcacccacccacatataccatgtattgaaatgattttctcagaatttgaagtaggaagttaccccaacacttctgcttccacttaactggcccgccattattgtaagaatggcaaatccctgttactgtgatatttaaatatccacagggtccacctttcccaaagattctagtaatgatctagagatatctttctcttatctgttatttatccatttttccccgtatttttatatgggaaaaattgtattgaagacatttagtatgccgttgataagagggatttggtataattatggttggtgattattttttatactgtatgtgcccaagctttactactgtgggaagaccactgtttaataaaagatttacattcccccacttgaaaaaaaaaaaaaaaaaaaaaaaaaaaaaaaaaaaaaaaaaa

SEQ ID NO: 9655 - DNA, 598 bp, Canis familiaris
gtccttttatttttatttgagctacacacagagcttgtatataggttttatgctctggttgaatcccttgagactatagatactatgtttttgtgtctttcatagcccacttttatgtttcgtgcctttcagtagctagtatgaccattcctatctcagatcttaataaatagaaaagcattcaggttaaatttggccttaacttaatatacttgttagcaggcatgtgtgacagagagtggggaaagctgcatcgtattgaatattttgataaactttatctgcttgggcttggtttgtttttcccccttcctaaattaactagcactgactgtaatttatttccctgtttcatgtctcccttccattctgcaggagttttagctttttgagattgtggaccatcaattttgcactttagagagtgattctgactcaaatcctctgttttatcagaaattttggcttttcttgctcttagctggaaaaatgaccatctgccaaccttatacagtatttacttgtttttgacccacagacataacacatgcattgtgcaaacggttgattcagcaagactacaaaaaaaaaaaaaaaa

SEQ ID NO: 9656 - DNA, 595 bp, Canis familiaris
  misc_feature (1)..(1): n comprises a, c, g, or t, or includes no nucleotide
ntttgcccagaagcacaccaagaagggcctgaagaagatgcaggcccacaatgcccaggccatggctgcgctgtgctgaggctatcaaaggctccttgtcaagcccacaaggagggttaaagccccaagagtcccacaagggcggcagaccgccaaggctcacattcgaacttgcctacactcgctcacccccacagcttcgggataaacgtggttcgtgcccgcacttgccacaaggtcttcaggctcttgccggccacaaggccaaggccacaggctcaaaccacaggcccaggctgcagctgcgaccccggctccggctccggctccggctcctgctcctgctcctgctcctgcttctactcctgcagcgcaggctccccaaggtgcccaggccccccccaaggcccccgtgtagaggcttctgcctgcccgtgtgaggacggaaggactggtatgacccctgggcttctgtctgcatgggcccggtgtcctcctgtgctatttgtaccaaataaacctgcggcaggaaaaaaaaaaaaaaaaaaaaaaaaaaaaaaaaaaaaaaaaaaaaaaaaaaaaaaaaaaaaaaaaa

SEQ ID NO: 9657 - DNA, 532 bp, Canis familiaris
gggtgggtgcccgagccacatagcaggcacgtcggggtcctcgctctcctttcactcgaccgtcatcgaccctcgcgcctgcggggtcacagccccttcaccatacctcaagtcgtgctgtgtgcccaccaagctgagaccaatgtccatgctgtactacgatgatgggcaaaacatcatctaaaaggacattcagaacatgatcgtggaggagtgcgggtgctcatagagcacccccggcccaggggtggggggacaggagccggagttgtccagagaagagacggtggccaaacaaaaaacataaaactaaaccatacaaaccaaaaccaaagactcaaacatacaacaacaaaaaaagaagaaatgtttaaggtttctgagttaaacaagcaggaaaaaaagatagagattaagaaaaaaaaaaagaaagaaagaaagaaaagaaaaaaaagaaaaaagaaaaaagaaaaagagaaaagaaagaaaaggaaggaaggaaggaaggaggaggaaaaaaaaaacccacaaa

SEQ ID NO: 9658 - DNA, 617 bp, Canis familiaris
  misc_feature (15)..(15): n comprises a, c, g, or t, or includes no nucleotide
gcctgtatacctttngaggtcatcgccgagattaccagtggatttacggtgcagactgccttcgtcgggtacagactgagcgaccacagccccagacactacagctggatttcctgatgaaatcttgcccaactaccccctcccttatagaagactatgaaaggaagctcaactccagttaagaactaaggaccatatatgacatccagataaccggttgtctttgactactgtcttttggaaagggcccccattgttcacggactcttagccattcacaggataatatgtgttgattttattttgtaaaattgagtcagagaggaaggtaatggattttctttgtaactgtcctctataagttatataaaatgcagttattttcctatatccttgctcctctttctgagaatttccaggtttgatttatttttcttttgtcatataaaatgttgtcatataaaatgaattttagttgtataaaagactccgtgataagaaagggcatattgttatgtatttatattttagcatatattgtactaaataaaagtgctaatgacaggaaaaaaaaaaaaaaaaaaaaaaaaaaaaaaaaaaaaaaaaaaaaaaaaaaa

SEQ ID NO: 9659 - DNA, 544 bp, Canis familiaris
gagacaaagtgggacccagcggaacccacactgctcaacatgctgaacatctcccctttctccctttggctgatcaatccacccaaggtgtttgataattgcagcatctacaaccctgaagtgcttgacatcacagaggaaactctgcattctcgcttcctggagggtgtccgcaacgttgccagcgtatgtctgcagataggttacccgactgttgcatcagtgccccattctatcatcaatggatacaagcgggtcctggctttgtctgtggaaactgattacaccttgccacttgctgaaaaggtcaagccttcttggctgatccatctgcatttgtggctgctgctcctgtggctgctgccaccactgctgcacctgctgctgccgcagccccagccaaggttgaagcaaaggaagagtcggaggaatcggacgaggatatgggatttggtctctttgactaatcaccaaaagcaaccattcagccaagtttatttgtgaaacaaggaaataaaggcttacttctcttaaaaaaaaaaaa

SEQ ID NO: 9660 - DNA, 642 bp, Canis familiaris
acaaagttgacttgccaattttcactgaggatacccaacatctgagacacagccctagaatgattcacatgaaaaggaggaataggaatgaaagaagtcatattaacacctgggaaaccatctttaaatgactgctgccatattttatcacggtaaattttagtcaaatatggtatttgtaaatttaaactttctgtcataggaagggggccggtacctgtttaagctttattttatgccataatataatcgcttattattttggcaattagaagtagtctcaaaggagattcccatttggttgctggcagccatactgggtttcttgatttcagtgctcagaatagggtggtctcatggaatagctgaccactaaggaggggaggagtaaaagggaattgcctatcagttttcagcgtagaatgcatcaagaacaatcaatggataactgatatagttttgtttagaagtgaactgtatcatagctcactactgccagagaggcaacgatgtacaacaaaggaaatgaaaaattcaaaagtcattcaaccacctgattaaaagaaaaaccaatatttaatacctactgagtacaaacctgaggagaaccactctgtattacccaaaaaaaaaaaaaaaaaa

SEQ ID NO: 9661 - DNA, 632 bp, Canis familiaris
ccctctgccgtaaagggaacttctgtggacccttgagctaatttgtgcgttcccaccccacgctgcgctgtggccccggagctgggctgtgacatcggctggcgcagcccccttcctgtgctctgcctttgttccggcggcggcgtgatggtgagatcactgttaggggctgggggaaggctcccggtaggacaaagggagcaggaccttcagaacccggaggggggggggatctccgctgaccctgaccaggtgcctgccttgctcctaaccacatgccctttgggcctaaagcctctagattgcaggaccctccgtcggctccgagtcaagtagtggatttctccctcccctcctcccctccgacccaaattttgaccatgatgatgttcaccagaagcaaatgagtttcatgcactttactttgttttgttttttttttttattttagtttttttttttaatcaggagaaactttttttatttgaccaaatttgccttctgtgtatatatgtgcataaatacacgcataaagcgtgttgtaaatatactaaaccaacttatatttccaataaaagggagtttaaaatttaaaaaaaaaaaaaaaaaaaaaaaaaaaaaaaaaaaaaaaa

SEQ ID NO: 9662 - DNA, 613 bp, Canis familiaris
  misc_feature (396)..(396): n comprises a, c, g, or t, or includes no nucleotide
ccccgaagtgactttatgataatctgactacacgatagctaagacccaaactgggattagataccccactatgcttagccctaaacatagataattttacaccaaataattcgccagaggactactagcatagcttaaaactcaaaggacttggcggtgctttatatccctctagaggagcctgttctataatcgataaaccccgataaacctcaccacctttcgctaattcagtctatataccgccatcttcagcaaaccctcaaaaggtagaacagtaagcacaatcattttacataaaaaagttaggtcaaggtgtaacttatgaggtgggaagaaatgggctacattttctacccaagaacatttcacgaatgtttttatgaaattaaaaanctgaaggaggatttagtagtaaattaagaatagagagcttaattgaatagggccatgaagcacgcacacaccgcccgtcaccctcctcaagtaataagacacaaccataaccatattaacttaactaaaacacaagaggagacaagtcgtaacaaggtaagcataccggaaggtgtgcttggattaataaaaaaaaaaaaaaaaaaaaaaaaaaaaa

SEQ ID NO: 9663 - DNA, 596 bp, Canis familiaris
caggagaatggtctccctgccagagaacctgccctgacaaatgctggctgagccctttcaacagggatgttaatttttcctgataccacgttcagtgtgtggatttgattcttactattgtagaattctggcacaagaggcaaaatagtccgtcagtcatcctgtgtgttcacattagattttgatatttccagactataaatggcttagagggatgatattatctgtgataacagtgactttattgaagcaactgcattgaaatccactagggttttctctcattctcaaattccattcccaacaagtattctgtaaatcccaatggattaccacgtgtgctataggttttttgtagaacatttttgtttggtctacatcaaaaatagtttgcataagttagtcctggttaccatctaaaatatttttaagtgttctttacatgaaaatttatgttgtatttttaaacctttaggagctttatctatttttctaagtcagttaattgtacttttaaagaaagtattttgtatctacttttgtaacttcatcagaataaaatatatgaaaagaaaaaaaaaaaaaaaaaaaaaaaa

SEQ ID NO: 9664 - DNA, 624 bp, Canis familiaris
tcttctctcgtatacttgtcctagccacattatgtacccgggaaatgtaaaacacgatgtgaaggaggaccagaaaattagttaatattaaaatatattgtgcgttttggcttcacatggtttaactttttttaagacaaaaaagttgcatgaatggaaaaaaaaatctgtatacagtatctgtaaaattgtctgttacctgtttcaatttcttgctcataccccattcagactagaattaaatatggtgcatggccatattctaacacctaagagtcaagcagttgatactttggtttgaagcacctcatcctgttctttccaagcgaacactatcatattgcattcttactgaggattttgtccaaccatatgttgccatgaattaactctaccacctttcttctcaagaatcaaaaccaatttgatttgggaatcttcccctttccaaatgaaatagagatgcagtacttaactttccttggtgtttgtagatattgccttgtgtattccatttaaaaccgtaatctagtttgtaaaagagatggtgacgcatgtaaataaagcatcagtgacactccaaaaaaaaaaaaaaaaaaaaaaaaaaaaaaaaaaaaaaaaaaa

SEQ ID NO: 9665 - DNA, 583 bp, Canis familiaris
  misc_feature (15)..(15): n comprises a, c, g, or t, or includes no nucleotide
  misc_feature (271)..(271): n comprises a, c, g, or t, or includes no nucleotide
gtttcttaactaacntacacatgtgatctgtatttctagaaataatacccaagtcatttggaaatgtggctaactagatttaaatctccatctgaaatgctgctatagggctgggacccataaaaaatatcctaatgcatatgttttaccattttgatttttaaagtatgctgtagcatttcttgataacacggttgtaatgttcttaaggcagaccttttcatcataaaaaggacattaatggcaaatttatctcctgtggaaatcccanttgcctgaattactgatattttagaaataggctgtttttaaaatgccatatgtaattttatgcaagttgactatatatcttggacttaataaattataggcacttttactgtccactagtttaaaataatttgtttaataataaatatgtttttagaggaaatattgttacttggaattaattttccaattacacagtcttctataacttactcatcatatgctatatgtatcttatgcaatttccctataaagaataaactaccattatggtgttaaacccaaatatggggaaaataaacactaactgctg

SEQ ID NO: 9666 - DNA, 598 bp, Canis familiaris
  misc_feature (86)..(86): n comprises a, c, g, or t, or includes no nucleotide
  misc_feature (142)..(142): n comprises a, c, g, or t, or includes no nucleotide
  misc_feature (146)..(146): n comprises a, c, g, or t, or includes no nucleotide
tcaagctgctgcttcagaagcgggaagcacctgctccagctaagactaatgtgccagtgggcgagagcacaggccacaagaattcnttgagccggcctgaagccccgccacgaagcgacccagcctgtggggaccccggganctcnggccagaggtccagcagtggtatcagcagttcctctatatgggtttcgacgaagcgaaatttgaagatgacatcacttactggctgaacagagatcgaaatgggcacgactatgattactaccagcgtcactatgacgaggaccgccgccatcggtccccagagcccctacagcttcaggcatggagccagcgtcaactacgatgactactgaccaaccacccctcggccctcggcgccccggccgcggaggtgacccactgggctgccttgcaccacgtggcttccgctgggctttactccagcagatcttgcctaccccctttctgcagccaggaaggaagagttaaacaatataaatgcctttgatatttcatgcaagtgcctaacatcgcatttcatttaacaaatagaaataaaagcagtttgttaaaaaaaaaaaaaaaaaaaaaa

SEQ ID NO: 9667 - DNA, 545 bp, Canis familiaris
aatatggagccagtgggcaacttacagtgtgagcagatctctggatgggtatggggggtgcctgggggtaggcagcacacagggcagtgaatgcttcttgagaggaaaaagcctgatccttcatcccctccagcttggggactgtgttgcctggattttcctttgtacctgttctttccatttggcttgaccttcagccgtcttgcccttcccctggtcagatgtcctctggggcacaaatgttcctcataccacagtcttctggaaagcaaactcagcttcctgctccataatctctcacattgacacgagattattttttgccatagcataatcttccttagcccactaccgctgtggtcataggttttaggtggggttgtagtgccttttgattaatttaaatatttcatctttctgccatctatttggcctctccaatgacccgagatttctgttaaaaagactgatgttactgtctcttgtagaggaaactaataaagtgtctgtgtgtgattgtgaaaaaaaaaaaaaaaaaaaaaaaa

SEQ ID NO: 9668 - DNA, 524 bp, Canis familiaris
tactgtgaccgagacagtttccgatgactcttgtgcgtgtaatttttttggccccacctgaagttcctgagagtggagatttggatgatgatgctgaagctatccttgcgtgcagactttgaaattggtcactttctacgtgagcgtataatcccaagatcagtgttatactttactggagaagctattgaagatgatgatgatgattatgatgaagaaggtgaagaagcggatgaggaaggggaagaagaaggagatgaggaaaatgatccagactatgactcataagaaggatcaaaacccagcagagtgcaagcagcagtgaagcaggatgtatgtggccttgaggataacctgcactggtctaccttctgcttgccctggaaaggatgaatttacatcatttgacaagcctatttcgagttttttgttgttactgtttgcttgtttttgtttttgcagcctaaaatagaaaatgtcaaatataaaaaaaaaaaataaaaaaaaaaaaaaaaaaaaaaggg

SEQ ID NO: 9669 - DNA, 651 bp, Canis familiaris
ggagaagctgaggaggaggaaaaaggaaaaaggaagaagctgctgaagaggaaggagctgaagaggaagaagctgccaaggaagaatccgaggaggcaaaggaggaagaggaaggaggtgaaggcgaagaaggagaagaaaccaaagaagctgaagaggaggaaaaaagatgaaggtgctggggaggagcaagcaactaaaaagaaagattgagcccctctgtccgtaatccttccaggaagaattctcccgaaatcaggtcaaccccatcaccaaccaaccagttgagttccagatactatatgaattaagaagtcaatatatgtataattctgagatgacttaggttggacattcaatgttgtgctatgacttttctccttatgcagagtatctgtttgcttgcagagtggcttcctggcttgctgccagcctgtgcatggtccacgcttatgagttcaggatctatggcaatgtgaataattcagatgtttacaataaaaaaaaaacatgaataaatgaattcactaatgttaatgttaaactccatggtaaaaatagtcctttgaacctttggtggttagaaattaaagacctcgaatcatgtgcaataaatagtaaataaagttatactgatgacaaaaaaaaaaa

SEQ ID NO: 9670 - DNA, 522 bp, Canis familiaris
tgtagcagttccatttggtagttatgttttctcgccttgccgcaagaagatgtgtgcgtaatactgctgtgtaccaagccagggaaatgctccgaaacacgtagttcagatctcttgcactgaggaacgttctatgtgttctccccttaatgaatcctggctttcatcagccaagcgttaccttagtgtggtttggatttgatagcgtcagttagttctgtgctggttgccaagaggtcataattgagatgatttttgatacccagccagaattgtcttccctttatattggattcctgtgttgttatgttgcatgttgctttttggtatcagcctgactctttgcccagtatatgatagttctgctgatgttttattgtttattggtgaacatatcttcattaagagtttttggaaactcatcaaactcaataagttttcttcataacccatttggattattcctaataaaatgataaaaatgtataaaaaaaaaaaaaaaaaaaaaaaaaaaaaaaaaaa

SEQ ID NO: 9671 - DNA, 614 bp, Canis familiaris
ggggtgacctcggcatcacctgcacagacgcctccacgttacaagcgcagactacagaagcggagctcacggccccacggagagccgccccagcacagcccactgagaggagcttccaggacgcacccaggatgctgagcccaggagccccagccaggcgtgacatcccacatggatggtgtcctcttcttggccgcggttcgtgtgcatataagggattgccactttaaagagaggggaaaatagcgcagatgctccacactatgtgttatagtcgacaccacactttgtcccacacccacacccccaattggccaaaccggaattcggatttttccttcttcgatgccaaagccaaaccaaacctatggtaagccatggactgagtttagagacatttctccaatctctcgttgtgcctttccagggaccagagcagggacagggggagaaggggaggggttaagttaaataaagaagattattttttgtttcctgactttatccaagagcagtgcaatcgttggttctttcactccaggaagagttagggaggagggaggaaggggcgtgaggagctggaacctgaccgcagctgaatgtattggatgagg

SEQ ID NO: 9672 - DNA, 281 bp, Canis familiaris
cacagaggggcgtcgcgacaacagagcccctgtgtcttagccacatgagaggagaaaggggactcggaagttgcggggaggccaccctttctgggaagccatccccatgtccatgccgcccagtgtcgacttcaacaagcctttcctcatcatcatcgtcgacagagacaccaagagtcccctcttcatgggaaaggtggtgaaccccacccaaaagtaactgccttgtgggtcaggtcccttccagataccattaaagagtgacccaccccaaaaaaaaa

SEQ ID NO: 9673 - DNA, 394 bp, Canis familiaris
acgaggctctgggagcgctgttttagcaccagagagcccaaggtcaagacgcaaggttgtagaaatattgtaaatatagaaaaagtggtgttgttgaattggttttgtttgtgttttgtttggttttcacattgggatagctgtcacaagaggtctttccctcagtttccagcatgttcttccttttctccctttctcacgtttttcctcctattaatcaagagaaacttcaaagtccatgggatggtcggatctcacaggctgagaactcgttcacctccaagcatttcatgaaaaagctgcttcttattaatcgtgcaaactcttgccacgatgtggggagtttgacaaatctttcaaaataaaaagtaatgacttagaaaaaaaaaaaaaa

SEQ ID NO: 9674 - DNA, 491 bp, Canis familiaris
aattgaagactgttccttggttagagtcctgttttagatggtatactgagaagaaatttggctaaacatggggtgtcctctgatagtaagcctgtgtggcgacactcttccatattttgtttttttcctctttgtcagcaaaggcaatgtccccgtttaatgggggaaataggggttgtcccttttattaggataggaattcattagttaggtcccagaaaattcctgcctgcaactttatgaggttgtttctagcttgctgatccttccttgcgtcctttgtgagaacaatgcggtggacaattcatcccctaataactttcagtaaaagtttcaaaaagttctttgatgttgttctaaagcctctgaaatatttccggaaggatgtaaccttgcccatgcaacccattaaattggttgcccagttgaaagataacgtaggtatgtaggtaattttaaactcctagtagccatgtaaaaaaaaaagaaaa

SEQ ID NO: 9675 - DNA, 637 bp, Canis familiaris
gatagatacgttaaggcctcttggttctacatagtttggagagtatagtgcttttactgagcatgagaaacttacaataatatcgttggtcttcctggtgctgttggaactatattgtatttgaaattgattttgttccatgttggctcttgtagtataagaagtgcaagcgcgaatgctcgttatcctgttctctggcttatagcagaaaagaagttaagttcagtccagtccttggtttatatagacagagcagatgagattttaagttagtagttgaaaggaaggatgttatgtagtgagcagtacagattgttggatgtaactgcacagatgttgtagcgagtggttttttttttttattaacgacatactaaaaatatatcccgaggaatatgttcacactggacactgtagtggtagcttctcagtattgtaaagagattgttctatacggacctttttgctgtttatcctgtatgtaataaagtcctttctagaccctatgtgaaaagacacgtgaaaaccgactgactcttcagcatgttctcatcggtggacctacttgtgtaatgtaaactgtgccatgttattaaaaaaaatgtgaaccccaaaaaaaaaaaaaaaaaaaaaaaaa

SEQ ID NO: 9676 - DNA, 107 bp, Canis familiaris
  misc_feature (1)..(1): n comprises a, c, g, or t, or includes no nucleotide
natgcctgtgtggtgctttccagaataaaggttgtgtattcgaaaaaaaaaaaaaaaaaaaaaaaaaaaaaaaaaaaaaaaaaaaaaaaaaaaaaaaaaaaaaaaaa

SEQ ID NO: 9677 - DNA, 420 bp, Canis familiaris
  misc_feature (165)..(165): n comprises a, c, g, or t, or includes no nucleotide
ccatagctaagaaattttcagcagtcagaatatccaagggactaagtgaaagatttttgcaaaatctgaagagcagagagtagctgaagaagttgtagatagacacagcacctaccaaaagtggaaagaagaggaaggcacagagggaagaggaccattcaaatnatactcgcaggacgcttacatctaaggaacggaggcgagcggcccggcagcaacagtccaagaaagttggtgtacgctactatgaaacacacaatgtgtaaaaataggaacaggaacaaaaagaagaccaatgactcagacggacagaaacacaaacacaaaaaattcaaacacaagcagtaacatttcaaaagtttattaaattatacaaaaataaaaaaaaaaaaaaaaaaaaaaaaaaaaagaaaaaaaaaa

SEQ ID NO: 9678 - DNA, 486 bp, Canis familiaris
gcacatttgcaatctctgcccctcggacgaggcccctcaggggagcacagctcctggggtccctgagggtcagggggcattttcttgctcctgcaagaatctataactgtttggttttcagcagcatcttacaccatcatcccattgccccatctagatgcagtctgcttccgcgttgctccctgcggctgtaagccagaggggattcaggggaagttcactttacagcaaatcacctgctcccctctgcccagtgctgacggaagcccctcctccataagcaagttcattctttcagtgccattggcatctacatagacaggtgtgagagtagatgtgtaggttactctacatgtatctgttctttcttcaaaaccatgttaactttgtgaaacgacttttacactccaacacgctttacagcagaagaaataaaggaatatgaaaaataaaaaaaaaaaaaaaaaaaaaaaaaaaaaaaaaaaa

SEQ ID NO: 9679 - DNA, 220 bp, Canis familiaris
gaattgtcattgagtacattcaatacttccgaaatataattttaaaaatagcacagtattttcagattcatgtctcagacagggttgtcagcactgcttagggacaatttcttttggcataagtaaggttacaagattttgataaaaattatttctttactgtttggaacgtccaaatagatttgtggtctttcattttgctttaaaacatgtattaaat

SEQ ID NO: 9680 - DNA, 607 bp, Canis familiaris
agtagattctagtgttttctaaagacgtagctgcatctacttgtaactaatttacttccagtatattggctcctgtcaccctcagtaggagacgttgttaattttggaattgggattgttaggaggtctccatttctcagctgcagtttctcaacttactactatttaaattgtacatcctccaagttgattccaattaaaaagcaattgcttttcggggcaagtatcaaaatgaatataacactttggaattctgctatttaagttagaatattttatcgccttaatatgagggcagtaaagcaatatacaagtcattctaattaagatactgctatgtgagataaattgagccaatatttatagcaaattgccttatgatgctttattggtttcatggttttggaaacatttgaaaaatactgtccccgggattatcttactgtaaattgcagtgacagaaaaacacaaagcaaatacaattttggcaagagagtaccatgttggtccaaattcaggctttattatctataggttgttctcaactgcatttggaatgagatgtcttcttaatcataatattgaccgctttggtcaatatttaaga

SEQ ID NO: 9681 - DNA, 380 bp, Canis familiaris
atcccaaccctttgtgttctccaagccccataaccagtgtctttaagatctctcctgctctctaccctttaataacctgaatcctagtgaaatttccacatagacacgtctagggatgagggccttccgtgagaaagagtggtgacattttgtggatagcttggattgttggaattttcacttttaagacaaagccccttgtcccttaaaaaaagaaagaaaagagggatccctgggtggcgcagcggtttggcgcttgcctttggctcagggcgcgatcctggagacctgggatcgaatcccacgacgggctcccggtgcatggagcctgcttctctctctgcctgtgtctctgcctctctctctctctctgtgtgact

SEQ ID NO: 9682 - DNA, 532 bp, Canis familiaris
  misc_feature (1)..(1): n comprises a, c, g, or t, or includes no nucleotide
nccccaacaggcctaccctgttatctattgtcatctatgttctgttcacaatctctccccttccggagagcaggggcttgcactcttcccctagacctactttgaaggcaattagaagctttgtgtttcatttccccctggtattgtctttgccaggatggttaggtacacaaggacgcttattagatcactgagaagttaaatgccaaacccgcttctctggtatgaacatctagtttgagagcaagcaaacagtaggcttgtattagtgctttaatggagtactggtaacatttttctttcttgataggaatctgcttatatttagccaggcttctatttcataccctctcccatctactaaactttccgtgcagttacctttcatttttaaagccatttcactgctaaatataaattgtatttgtggggttcatagttatataatgctgaagggaaccactctttcgttgaaaggtgataaataagttaaataatagactgtctccccagtaaatataatatataaaaa

SEQ ID NO: 9683 - DNA, 592 bp, Canis familiaris
ggagaaacactttttctcaggattttcatgggagaatggaaggagattgggagtgttatatgtattgcgtagataagagttctttaaagatactaagcaactttgagtgccttctcttgttttcatttgacttaatttatgcagaagattaatactgttgttatttctctggtgtttagtaaaataactttctgcttactggggaaatttgagctgtacaggctttctttttgctttcaattgggaatggttgaaaaaataacaattttactttctggtaagatacagagatttacatgaaaatgagattttttgacttcttgtttctgtttaaactgtatccttagaaatataatttgaataagttggttttgtcagattctgaagactgggaattgtcttcatagaaaaaataacctacaagagatgtttggtttgagtgtcttactttaccctggtaacaacttagtaattgatgtgtcttttttcctaaatatactttgtgagattgctctgtcaaactggaaatgtaccattggcatatttgtttttccttatatgtgttgttgtaaaataaaagcatgttactctg

SEQ ID NO: 9684 - DNA, 703 bp, Canis familiaris
aggcacgttccacgtgaacacagtcacagatgatgactatgctggcttcatctttggctaccaggacagctccagcttctacgtggttatgtggaaacagatggagcagacatactggcaggcgaatcccgtcagggccgtagactgaacccggcattcagcgtcaagcgctgtgaagtcctccacaggccccggggagccacctgcggcatgcactgctggcacatcaggggacacagcatcacaggtgcggctgctcgtggaaggacccccggcacaccgtggcgttggtaaggacaagacatcctaccgctggttcctgcatgcatcaggccccaagtgggctacatcagagtgcggttctacgagggtcctgagcctggtggccgacagcaacgtggtcctggacacaaccaaaccgagggtggcctgcctcgggggtctgtttgcttgtttctcgaagagcgatacatcatggccgactcaatgtgcgctaccgctgcaatgacaccactaccagaggactacgagactcagaggcttctgcaggcctagggatgggggtggggacccattgctggaagatggcaccatcgtggctaccctcactgcaacaaacagggagcttggcacccggctccaagaggtagctgccctagaggggctcagaaaggacaaaataaagtgtgtgtggtggaaaaaa

SEQ ID NO: 9685 - DNA, 455 bp, Canis familiaris
ctgagcatgaccgttgtgtatccgttccacaaaggctccaggtaaggccaaaagcaaagatgaagggaaccgagaacaatgaatccaaagtcctatgatagataaggtagagctaaccaacaagcagctgcttcctcctagactgtcttccctcctgaaagacagccacctgctgacatgaagggcgcggcgagcagcacctgctcgcaaaggttccacccaaaaaggtggctgctgcggccaagaaggctccagcccagaaggttcctgcccccgaaagctgcaggccagaaagcagcacctcccaaggctcagaagggtcagaaagctccagcccagaaagcacctgctccgaaggcatctggcaagaaggcataaaaaacataagaggctgttataaataagtaataaaggttctttttgacaccaaaaaaaaaaaaaaaaaaaaaaaaaaa

SEQ ID NO: 9686 - DNA, 312 bp, Canis familiaris
gggagatattcgccccaaagcccccggaggagggaattgaaattgtgaacacttgcttctccaaatatgggagggctgagttcctttgaccccaagatgagtgctaggcccctagagagagctctgcatgtcaccaagtgaccaggccttgcctcgaggcgctcctgtctcctaacccagctttccttcctctggactccgcactgtaacgcctacgtttgctgatcatgggaagaactcctgtgtgccactaactcaataaaaccgccaaggaatctgaaaaaaaaaaaaaaaaaaaaaaaaaaaaaaaaa

SEQ ID NO: 9687 - DNA, 724 bp, Canis familiaris
  misc_feature (274)..(274): n comprises a, c, g, or t, or includes no nucleotide
  misc_feature (423)..(423): n comprises a, c, g, or t, or includes no nucleotide
tataagaggatagaggcacattataaaaacttatccagaaggacataaagcagcagctgtgcttccagtcctggatttagcccaaagacagaatggatggctgcccatctctgctatgaacaaggttgcagaagttttacaaagtacctccaatgagagtatatgaagtagcaactttttatacaatgtataatcgaaagccagttggaaaatatcacattcaagtctgcactactacttcgttgcatgctttcgaaacgtctgacagcatacntggaggccattcacgcaaaacagcttgggaatataaggttggggtatgactgacacctgcatcaaacttgttccactgctctattacgagttaggaatggtttaaggggcctggtcttaaatggcaaccgcatcgcgttcggtatcaanaatgacatagtcacatcatagaagtagtcgaatcatgcacacgtaatggattaatgaagttaatttattgagtgtccatcaaaggcctggcaataccttccaacaatcggtggcaccagaggtagtgcgacgtcttctcttgatgacccagtcgtggagttcacacctctttgattgacccaacccaaaggacctggctttggtgtgcaagtgggactttaatttatatattcaactgtaaatatgtcactggagaaataaagaggaatctcctatctacataaaaaaaaaaaaaaaaaaa

SEQ ID NO: 9688 - DNA, 420 bp, Canis familiaris
gttaagtgaccggaaaaaagtacacaatacaggactctttgcgaggccctgtaatttggaaatgagtccactgtaaatcctgttaacgaggatccatttggagggcaaattctggtgccagcaaccctcgggtaatgtccaagctcccatagcgtatattaaagttgctgcagttaaaaagcttgtagttggattttgggaagccgggccgggcggtccggccgcgaggcgagccaccgcccgtccccgcccttgcctctcggcgccccctcgatgctcttagctgagtgtcccgcggggcccgaagcgtttactttgaaaaaattagagtgttcaaaagcaggcccgagccgcctggataccgcagctaggaataatggaataggaccgcggttctattttgttggttttcggaactga

SEQ ID NO: 9689 - DNA, 343 bp, Canis familiaris
cgtgtgagtcctttttcgaggatcccttggagggtcaagtctgtgtgccagctatccgcggtattccagctccatatgcgtatattaagtttctgcagttaaaagctcgtagttggatcttgggatcggttcgggcggtccgccgcgagttcgagccaccgcccgtccccgccccttgcctctcggcgccccctcgatgctcttagctgagtgtcccgcggggcccgaagcgtttactttgaaaaaattagagtgttcaaagcaggcccgagccgcctggataccgcagctaggaataatggaataggaccgcggttctattttgttggttttcggaactgag

SEQ ID NO: 9690 - DNA, 642 bp, Canis familiaris
  misc_feature (31)..(31): n comprises a, c, g, or t, or includes no nucleotide
cagatgagtatgagcagctctcctctgaagnccctggaggctgcccgtatttgtgccacacatagtacactggtgaaaagctgtggcaaagatggttttcactatccgtagtgcggctcctatcccttcctatgttatccgttatccacgtagtctgctgtcctgtgtccggatctggcaagtctccaggaccgatactgcggtaagtcgccggttcccttttggggaagccccacgggtacattagccagggtccacattggccaagtcatcacagtccatccgtaccatagctgcaagaacaaggagcatgtgattgaggccctacgcagggccaagttcaagttcccctggccgccagaagatccacatctccaagaagtggggctttactaagtttaatgcggacgaatttgaagatatggtggccgaaaaagccgggctcaatcacccaagatggctgtggggtcaaaatacaatccctaatcgtggcccccttgggacaaaatggagggctctccactcatgagaaccttgcaccacccgaaccctattcatgcccacccataaatcctgcttcctgtcaaaaaaaaaaaaaaaaaaaaaaaaaaaaaaaaaaaaaaaaaaaaaaaaaaaaaaaaa

SEQ ID NO: 9691 - DNA, 322 bp, Canis familiaris
  misc_feature (185)..(185): n comprises a, c, g, or t, or includes no nucleotide
  misc_feature (198)..(198): n comprises a, c, g, or t, or includes no nucleotide
gggcaagtctggtgccagcagccgcggtaagttccagctccaatagcgtatattaaagttgctgcagttaaagctcgtagttggatcttgggagcggtcgggcggtccgcccggcgaatgcgcgagcacaccgcccgtccccgccccttgcctctcggcgcccccgtcgagtgctgcctttagcntgagtgtcccgcnggggcccgaagcgtttactttgaaaaaattagagtgttcaaagcaggcccgagccgcctggataccgcagctaggaataatggaataggaccgcggttctattttgttgttttcggaactgagg

SEQ ID NO: 9692 - DNA, 528 bp, Canis familiaris
gaaataaaggggagaaggatatttcctggactcagacggatagctactcgtgcctcgctctgcctggggcccggaaacgagccagcaggatccgtaagcttgtcttaatctagtcgatacagaagacagatcgtctcgccagcatggcatgttagtaagtgcgccctcctcaacagaagagtggtgaagacatccgtaagccccagcagcccccgagtttcagcctctttgttatctccacagcgtgctctctcccacaccacaaacgtacggcgtattgctttgaagaaacagcgtactaagaaaaataaggaagaggctgcagaatatgctaaacttttggccaagagaatgaaggaggcccaagaaaaacgccaggaacagattgccaagagacggaggctgtcctctctgagagcttctacctctaagtctgagtccagtcaaaaatgagattttctaagagtgacaaaataaataagatcagacacccaaaaaaaaaaaaaaaaaaaaaaaaaaaaaaaaaaa

SEQ ID NO: 9693 - DNA, 543 bp, Canis familiaris
  misc_feature (498)..(498): n comprises a, c, g, or t, or includes no nucleotide
tcgcttcctcccctgtcttctcctccatcctctgttctcttgttttgtaccttcgggttctcaaacctttccccaaaggcaccccagtggttaagtggacgcggaggggcccatcggcatctccgactatggaagtgaaatcgtttcattttatcttttaaaaacactatggactttcttctctactccacatgtattgtaacagtctaacaaaaaaaaagtgatttaatcacttacctgaatctaaatctaaatccagagtgggattgatgctttgggaagatgggccgtggtcccccggggagtctgagaagcactgtctggagcctgcagaggcctccctgtgccctccagaggcctgcagagcacccacccggctgggtactgctcccgatgtcacatagcgcgggtgaagcccccccggccaaccaacagactgacctagttcgagggcatcagagcccctcagtgcttcatcccccggggacagccacaccntggcttcaccctcacaggtacgacaacattgctgtcttcgtccca

SEQ ID NO: 9694 - DNA, 310 bp, Canis familiaris
cgtgcagcatctgttgtactatcgttgttgcagcagcaacgatcggtgcgctgggccgctttctccagcacccgctttatatttggggtatagtagcatttatctccccggctcccgcccacgcctgtgtggaaaggaggcccacgggcactgggggagctgaattctacaatcccgctggggcggacggggcgggagagaagggtggtgctgcagtggtggccctggggggccattcgattcgcctcagttgctgctgtaataaaagtctactttttgctaaaaaaaaaaaaaaaaaaaaaaaaaaaaa

SEQ ID NO: 9695 - DNA, 541 bp, Canis familiaris
gaacagctatgaccattaggcctatttaggtgacactatagaacaagtttgtacaaaaaagcaggctggtaccggtccggaattcccgggattactgcacaagccagtgagaccaacccacaggaccacggagagaccatgaagagcctgctccttctctccattctggctgccttggccgtggcagctttgtgctacgaatctcatgaaagtatggaatcctatgaaattaatcccttcattaacaggagaaatgccaatacatttatatctccgcaacagagatggagagctaaagcccaggagaggatcagagaaaccaccaagcccgcctatgagctcaaccgggaagcctgtgatgacttcaagctttgcgaacgctacgccatggtttatggatacaatgctgcctacaatcgctacttgtccggcatcgccgaggaggccaaatgagattgaagaaagtctctttcctctccacgagtcctaggatgccctgggttcttggtattcgctattaccagtagccaatcgatcgcat

SEQ ID NO: 9696 - DNA, 620 bp, Canis familiaris
  misc_feature (41)..(41): n comprises a, c, g, or t, or includes no nucleotide
  misc_feature (125)..(126): n comprises a, c, g, or t, or includes no nucleotide
  misc_feature (161)..(161): n comprises a, c, g, or t, or includes no nucleotide
  misc_feature (168)..(168): n comprises a, c, g, or t, or includes no nucleotide
  misc_feature (418)..(418): n comprises a, c, g, or t, or includes no nucleotide
tttacctttgaacgaatggtttccccgttaaagcctaaaanttggaattttgtttttggaaagttccaagtctttacatttgactggatagataaaccttcgtaacttctgcccagctaaagctnntgaccatttaatatgtatgaaaaccaagccggcancgaaatntgaaagaagagttcttctcacatagctgggctatattctgcagctggagttgaagaagcagtctttaaaagctggtatgagcacaagccagcaggtaaaaatttaagctgcactgttaagctagattagaggtttaaagaaaaactagttttcatactgggcaggcgttgtccagttggtatagaattggaagtttcaagaaagttagtttacctttgcttttaggtcataagtttcttatgtgattgcntgtatgtgaacacacagctctttgtaacattctctatttggtgatttgaaactactcaagataccagtgtcctgccagtttaagggtacattgtagagctgaactttgagttactgtgcaagatttttttcatgctgtcatttgtaatatgtttgtgaaaatccttgggattaaagttttggttacaaaaaaaaaaaaaaaa

SEQ ID NO: 9697 - DNA, 654 bp, Canis familiaris
gacacaactcccatcttcgtgcaaggcttgggcgaaaacgttacaattgagtctgtgcccgattacttcaagcagattggtattattaagaccaatatagaaaacaggacagcccatgattaatctgtacacagacagggaaacaggcaagctgaagggagagccacggtgtcgtttgatgacccaccttctgctaaagcagctattgactggtttgatggtaaagaattctctgggaatcccatcaaggtctcatttgctactcggcgagcagacttcaatcggggtggtggcaatggtcgtggaggccgagggcgaggaggacccatgggccgtggaggctatggaggtggtggcagtggtggcggtggccggggaggattcccaagtggaggtggtggtggtggcggccaacagcgagctggtgactggaagtgtcctaatcctatatgtgagaacatgaacttttcttggaggaatgaatgcaaccagtgtaaggcccctaaaccagatggcccaggagggggaccaggaggctctcattattttgtaaccttccaactcctgatcacccacgggttttttgtgtcggactatgtaattgtaaccatatctctggttcccattaaaaaccatcgttttaaaaaaaaaaaa

SEQ ID NO: 9698 - DNA, 671 bp, Canis familiaris
tcagcattgacaagactggggagaatttccgtctaatctatgacaccaagggtcgctttgctgttcatcggattacacctgaggaggccaagtataagttgtgccaagtgagaaagatctttgtgggaaccaaaggaatccctcacctggtgactcatgatgcttcgcacccatccggctatcctggatcccctgcatcaaggtgaatgatgaccattcagattgatttggagactggaaagattacggatttcatcaagtttgatactggtaatctgtgtatggtgactggaggtgccaacctgggaagaattggtgtgatcaccaaccgagagagacacccctggttcttttgatgtagtatcacgtgtaaagatgccacatggcacaacagctttgccacccgactctcctacatttttgttattggcaagcgcaacacaaccatggagtttctctcttcctcccctcgggaagagggtgagtctccccctctaccacctctgtctgtaggagaagaagacacacgagaggctgtggccacaccccaaaccgagaaccattgggttaaaatgggtccctgggtgacgtgattggaagtctttatacttaattaaagattctacagcacgctaaaaaaaaaaaaaaaaaaaaaaaaaaaaaaaaaaaaa

SEQ ID NO: 9699 - DNA, 331 bp, Canis familiaris
  misc_feature (207)..(208): n comprises a, c, g, or t, or includes no nucleotide
gggggacctcagacccggggtgccctgggggccgcctctgcctgcgtcccggggcccggcccctctgtgccccccgcgcgcgccacatctgagacccgctgtgtcgccccgcgcccgcggccgctctggggtctgggttgccggggttgccggggttcccccgggggccggcaccctcctagacacctggtagatggatagtgctgnngtgcatggtggacccttgcccatccacagtgcgagtgcgtgtgtgagtgcgtgtgcgtgtgcgtgtgcgtgtgcacgtccgtgtagagtttggggtagagcctgggcccggcgggggggcccg

SEQ ID NO: 9700 - DNA, 596 bp, Canis familiaris
tgctgaatgttaagatggctctcgacattgagattgccacctacaggaagctgctggaaggcgaggagagcaggattgctctgcctcttccaaacttttcttccctgaacctgagggaaaccaacctggattcactccctctggttgacactcactcaaaaagaacgcttctgattaaaatgggaaacgggttgaaactagggatggacaggttatcaacgaaacttctcagcatcatgatgaccttgagtgaagcttgcccagattcggtgcagcaattactaccagcaagaataaaaaaaaaaagaaattcgtatcttaaagaaacagctttcaagtgcctttctgcagtttttcaggagcgcaagatagatttggaattaggagtaacctcctagttcttaagaacccacactcttaaaagatttagggagaaagtgttaccacacttatttatagtttaccgaaggaaaaccttgtgctaggaatactttttaaaaagtatttttgaataccattaaaactgctttttttccaacaagtatctgaccaacttgtttctgcttcaataaatctttggaaaactcaaaaaaaaa

SEQ ID NO: 9701 - DNA, 666 bp, Canis familiaris
tacgtccatcgtctgatcagattgagcctcagactcctatacgcctaatcggagcccttcgagcagtagtctcaaaagaaatctcatatgaagtaacgcctaccaattattctcctatcagtcctcctaataaacgggtcatttacactatccacgctaattattacccaagaacatatatgattaatctttccggcctgacccctagccatgatatgattcatctctaccctggcagaaactaatcgagcccccttcgacttaactgaaggagaatccgaactagtctctggatttaacgtagagtatgcagcaggtccttttgccctattctttctagcagagtacgcaaatattattataataaacatcctcacaacaattctattcttcggcgcacttccacaacaccacttcactatcccgagactcttatctcttatataacaattctacatatataaaaccccctctaataacccattccggctttccctaatggaattcggagccatcataccctcgattccgctacgatcaattaatacacttattatgaaaaaattttctacccttaactttagccctatgcatatgacatgttgccttacccattatcaccgcaagtatcccaccccaaacataaaaaaaaaaaaaaaaaaaaaa

SEQ ID NO: 9702 - DNA, 582 bp, Canis familiaris
tctccctccgggcccccagagcagcctccccggccccagacccccaaccagactggcactgccctcttcctaactccccagctgctgtcagcttcccccctttcccctccctccctctggcagctagcagggcaatgggtggggaggagctgcggactgaggaccaaggtggggcttaagccctgccctcctcatgggaggggctccgtatgcattccttggtgctctctgagtgcagctgacgtcctgccctttggagcggacgcctgtatacatgtgtgtgcgtgcctgtccaatgtatattgtgtcttagcttccattttaaaaattgttctgtacagaaagatgcagcgggggtgggagggcagagcaggtggagggaagccaccctgctcccagcgctgggggtctggggatgggagcgagagggctgtgaagggtctggcctggcccaggctcccccttgggctcagcacgaaagggctttcaatgaattaagtgaaaactttttttttacaaaaatgcaaaaatcaacaagctccaacctattggaaataaaatatgaacttacaaaaaaaaaaa

SEQ ID NO: 9703 - DNA, 784 bp, Canis familiaris
gcgtggaatgaaagagaactttgccgtcgaagctgctaactaccaaagacaactattggccgcctgcaggatgagattcagaacatgaaggaagaaatggctcgtcaccttcgggagtaccaggacctgctgaatgttaagatggctctcgacattgagattgccacctacaggaagctgctggaaggcgaggagactcaggattgctctgcctcttccaaacttttcttccctgaacctgagggaaaccaacctggattcactccctctgggttgacactcactctaaaagaacgcttctgattaagacggttgaaactagggatggacaggttcatcaacgaaacttctcagcatcatgatgaccttggagtgaagcttgccctagatctcggtgcgagcgaattcactacctagccagcatagatataaaaaaagaaattcgttatctataatagaaacagcctatgtccatagtagcctgctcttgtcagtcatttcatgcaggggccgagcatagagatagtaggtgagttatgtgaggagatccacctagtatgttcttgaagccacaccactacttcttaagaagatttgaggagaaagtttcacaaacaataaatcatgagtttcagcgagagaaaaccttgtgcctagaatacctttttaaaaagtatttttgaataccattaaaactgcttttttccaacaagtatctgaccaacttgtttctgcttcaataaatctttggaaaactaaaaaaaaaaaaaaaaaaaaaaaaaaa

SEQ ID NO: 9704 - DNA, 623 bp, Canis familiaris
caactcacagcttctccaagcatcacctgggagtttttgagacttttctcataaatgaggccgtacattcctgttttgctccgaagtattcagtaccgctcagtattttaaatgaaatgattctcacttgtgatttggtttgggatccatagggaagcaccaggcacccaacccacatataaccatgtattgaaatgattttttccagaatttgaagtaggaaagttaccccaacacttctgcttccaccttaactggcctgcaatattgtaagaatggcatatcccttgttactcgtgatatttaaaatatgccaccacgtgtccacccttttcccaaagatttctagtaatgattctagaaatatcttttctcttatctgttatttatccaatttttccccagtatttttataatggaaaaaattgtgattgaagaccatttagtatgccagttgataagaggaatttggtataattatggttggtgattattttttatactgtatgtgcccaagctttactactgtggaaagacaactgtttaataaaagatttacattcccaccaaaaaaaaaaaaaaaaaaaaaaaaaaaaaaaaaaaaaaaaaaaaaaaaaaaaaaa

SEQ ID NO: 9705 - DNA, 651 bp, Canis familiaris
  misc_feature (78)..(78): n comprises a, c, g, or t, or includes no nucleotide
cttccccttaagagttctaagtacgtctcgtatacgcggatagtgtatagagattctcgtgttcacagctcttgggancacgaggtgtgagagtgtatatctacgatgctcatcacgggtgttaaaaatgtgtctctttctgcgttgtcgactataccgggccaatatatatttccaaatgtgccaaggacattctgtgttttgcaagggctctggggaaccattggagagaggtaaatgacccaaagggcataaatccaagggttccagatggaccagttaatccatggtggaagttaatgtttctccacccttattgtccatgtgtttaagacatttgtcaccatttttaaaatccccccttgttcttaaactctcgatatcttttgaccttactatgattccagagaattcaatatagaaagaaaagaagaaaagaaaagaaaaaagaaaagaagagaaagacaaacactgtggcagtggcatttaacaatataatatattgtaaacacaataaaatagggattataatgtatgacttttggcattggcttgaagcaatataatatattgtaaacaagacacagctcttacataatgaacattttatactgtttgtataaaataaaggtgctgctttagttttcaaaa

SEQ ID NO: 9706 - DNA, 550 bp, Canis familiaris
  misc_feature (1)..(1): n comprises a, c, g, or t, or includes no nucleotide
ntagcggttcttagtcaacacccactggagttaaataggggcaacagctctaataattgcccctggtttacagtcctcgatactattcgcttagcccactcccattacgcacggatccatagccgtactataattctcgcacgaggacttcaaactctccttcccctaatagcagcctgatgactattagcaagcctcacaaatctggctctccctcccaccattaatcttatcggagagactatttgtagtgataatcctcatttctcatgatcccacattactattatcctaatagggattaacattatcatcaccgccctatactcactttatatattaatcaccacacaacgtggtgaatattcccaccatatcgaaaatatcaaaccatcattcacacgagaaaatgccctaatgaccttgcacctactgcccctactcctcctatcccttaaccctaaaattattttcggtcccatctactaaaaaaaaaaaaaaaaaaaaaaaaaaaaaaaaaaaaaaaaaaaaaaaaaaaaaaaaaaaaaaa

SEQ ID NO: 9707 - DNA, 730 bp, Canis familiaris
  misc_feature (1)..(1): n comprises a, c, g, or t, or includes no nucleotide
  misc_feature (265)..(265): n comprises a, c, g, or t, or includes no nucleotide
  misc_feature (273)..(273): n comprises a, c, g, or t, or includes no nucleotide
  misc_feature (318)..(318): n comprises a, c, g, or t, or includes no nucleotide
  misc_feature (343)..(343): n comprises a, c, g, or t, or includes no nucleotide
nccgcggggcaccctcgccaaggtcgtcttccgggatccgtaccggtttaagaagcggacggagctgttcatcgccgccgagggcatccacactggccagttcgtgtactgcggcaagaaagcccagctcaacataggcaatgtgctcccggtgggcactatgcccgagggcaccatcgtgtgctgtctggaggagaagcctggtgacaggggcaagttggcccgagcctccgggaactacgcgactgtcatctcccacaacccnggagaccnaagaagacccgacgtgaatgctgccgtccgggtgtcaaacgaagngtcatcttcttcctgccaaccagangccgctcggtggtgtggtgttgcgtctggaggatggtcccgcagcttgatcaacgcccaccatttgatagagaggtgtgcccctgcgtctatcaccccacagatgtccagagcgcaagaggaggaatattgtcgtgcgcacactgtgtccgggtgtgtgcccatgaatcctgtggagcatccttttggaggtggcaaccaccaacacatcggcaaaccctctactatccgcagagatgcccctgctggccgcaaagtgggtcttattgctgctcgccggactgggcgtctgcggggaaccaagactgtgcaggagaaggagaactaggcttgaggggctcaataaagtgtgtccttctgcccaaaaaaaaaaaaaaaaaaaaaaaaa

SEQ ID NO: 9708 - DNA, 704 bp, Canis familiaris
  misc_feature (320)..(320): n comprises a, c, g, or t, or includes no nucleotide
gcttgcaagtttgcttgagctgaaggaaaagatagatcgtcgttctggaaagaagctggaagatggtcccaagttcttgaaatctggggatgctgccattggttgataataggttcctggcaaaacctaatgtggtgtttgagagcttctctgactgatccctcctctgggggcccgtctctttgctgtttctgtgacataggatgagcagcacggttctggcttgttggtgtggtgcatccataacagacaagtagtagccaacgaaagggacagcattggaagatgggtcgacagtacgtcccacgatagctgccgcnccgcagtagaatctagcagaggagcttctatgatgataattttatctcccctattatcaccgtcgccacacccaactgtgtttaaacacagtgtgttggaaagaacagcgtgttctacgagaaatctgtttgtgtgctcaatgggccatttaagtttaatagtaaaagactggttaatgataaccaatgcatcgtaaaacccttcagaaggaaaggagaatgttttgtggaccatttgtttttttttttttttttttttttgtgcgtgtgtggcagttttaagttattagtttttaaaagtcagtactttttaatggaaacacttgacccaaaatctgtcacagaattttgagacccattaaaacaaagtttaatgagaaaaaa

SEQ ID NO: 9709 - DNA, 455 bp, Canis familiaris
taatcagaattcggaagaccttgtaacggttcagcaacccaaagggtccgcccaaattcgggaaaaagaattgaatggaattccaggaacccgagagggccaaaccaatgacttgaaagaaggggtcaataaactgattccagacagcatcggaaaagatatagaaaaagcttgtcagtctatttatccactccactgatgtttttgttagaaaagtaaaaatgctgaagaagcccaagtttgaattgggaaaactcatggagcttcatggtgaaggtagtagttctggaaaagctacgggggatgagaccggtgctaaagttgaacgagctgatggatatgaaccaccagtccaagaatctgtttaaaattcagacatttaatggtgacccaataaaaacatatttgtgatgtttaaaaaaaaaaaaaaaaaaaaaaaaaaaaaaaaaaaaaaa

SEQ ID NO: 9710 - DNA, 647 bp, Canis familiaris
catggttagcccagggaaaggaaaccaagctacctcatagcagtagaggtacatatcgagaaggtagggttttctattctagagccagttttagagagggaaatccaggctcttgaagtccaaatccaggaatcttcctgctctcagcttcaggggagatgttgaccagtattgtctatttttagtcttcttccagctctgtcctgagctgtttcttttgaggggtctgtgcccactttgtttgattgggatccttccctcctacataaactgctttcacgtgttcgatttcgtcctgtttcccaggggaaagagggactggccttgatccctaaagtctggaaaggccccctcccactccccactttttcttaaccaaactccagctctactgtgtacatatagaaaagtgtgtattgccacctaaatcagtttgagtcattcttccagaggggacaaggagaccctccacccttttggcaacacctcagcgtcttcccttcgctaatctcccttcccccaaccaccctggattttggtcctgtcctacatttcaaatttctactttgtgttgaacttgctttttttcatattgaaaagataccattgccccaaaagccaaaaataaaaaaactgaaaaaaaaaaa

SEQ ID NO: 9711 - DNA, 618 bp, Canis familiaris
  misc_feature (1)..(1): n comprises a, c, g, or t, or includes no nucleotide
ncataatacctactaggtccatccatgttgttgcagatgtcaaaatctcattcttttttgttgctgagttatattcctgtgtgtgtgtgtgtgtgtgcgcgtgtgtgtgtgtgtatgtacatatcctatcgtgtagtcccttgtatctaggtaaatttatttttttgaagatgttatttatttgagagagaggaccatgagccaatggggaaggggtaaaagagggggagagccagactcccttcgggaaccaaggaaccctgttccccaggaacccctgggaatcgtgaccctgagcccaaaggtagatacttagctgattgaaccacccagatgccccatttatctatttaaaaaattctttaagtaggcctcatccagcgtggagcccgacatggggctgaagttcatgaccttgagatcaagacatgagctgagggatccctgggtggcacagcagtttggtgcctgcctttggcccagggcgcgatcctggagacccgggattgagtcccacgtcgggctcccggtgcatggagcctgcttctccctctgcctgtgtctctgtctctctctctctctctctgtgtgtgactatcataaataaataaaaattaa

SEQ ID NO: 9712 - DNA, 541 bp, Canis familiaris
aggccgcccgggaactgctgacgcctggacgataaggacccgcggcgcctgttcgaaggttatgccctactgcggcgacttgtaagcatcggggtgctggatgaagggccaaatggaattggattaccattctgggcctgaggaatcggaagaattttttaggagaaaccgcctgccagaccccagttcttttaacttgggcttggccaagtccatccaccatgcccgtgtgctgatccgccagcgccatatcagggtccgaaagcaggtagtgaacatcccgtccttcattgtccgcctggactcccagaagcacatcgacttctccctccgttttccgtatgggggtggccgcccaggccgcgtgaagaggaagaatgccaagaagggccagggtggggctggagccggtgatgacgaagaggaggactgaacccacccttccatccctttcaggcccgtggattatctagttttctaggcccaataataaaacagtgttttggaaaaaaaaaaaaaaaaaaaaaaaaaaaaaaaaaaa

SEQ ID NO: 9713 - DNA, 135 bp, Canis familiaris
ggccatggtcctggaatcccaggatcgagtcccacgtcaggctccctgcatggagcctgcttctccctctgcctgtgtctctgcctctctgtctgtgtctctcatgaataaataaaatcttaaaaaaaaaaaaaa

SEQ ID NO: 9714 - DNA, 602 bp, Canis familiaris
gtcccgctggggcccttgcttcctggaatggggccaagctggccaagcttctggcctacaagaggaattcaaaggaagttttttaacgcccaatgggcccaacttgggccgtcaaatcccaggaggagaaccctgggccaggaacttggcttgtgtagactttggacccaatcaactaatcctgcttgagggacccttgttagccgttcatgccgtgaagattatcacctgaacgggacccaggtcccttccgcacagcctccggcccccacaggtttcccccaggcttctggccccggttgaaccccttcaaggccccaccaagcccctgaaccatttggcccaagtccctctttgggcccggcaggagagcctacaggagcgaaagcaggcactctatgaatatgcaagaaggagattcagagagagacaggcccaggaggctgactgagcacaggatggcacccagagccgcaggacggaggctgggggcagccctcaccccacttacaactggctggaagggtgggtggtaaaaagggagggatggggctccccccaaaatcacattaaattcagggttttcactcaaaaaaaaaaca

SEQ ID NO: 9715 - DNA, 604 bp, Canis familiaris
  misc_feature (66)..(66): n comprises a, c, g, or t, or includes no nucleotide
  misc_feature (196)..(196): n comprises a, c, g, or t, or includes no nucleotide
ccatgccgtcccaagggtcctctgcagtccgtgcaggtcttctggacgtaagaagacggccacccncgtggcagcactgcaagcggggcaacggcctcatcaaggtgaacgggcggcccctggagatgatcgagccacgcacgctgcagtacaagctactgggacccgttctgcttctgggcaaggagcgatttcnccgggtggacatccgtgtccgagtgaaagggtgttggtcacagtggccccacgattttacgcccatcccgccacgtgccatattcccacaggcgcctgtgtgggcccaaatacccggaataaattggaagcgaggcctcccaggaaggaggagtccaagacaatccctaatcccaggtccggacccgggacccctgcttggtgccagaatcccccggcgctgcgaatcccaaaagtttggcggtcctggtgcccgtgctcgctaccagaaatcctaccgatgaaattgttgtgacgatgagggttcatctttataataaaccgctgtcgtgggacttaaggtttccaaaaaaaaaaaaaaaaaaaaaaaaaaaaaaaaaaaaaaaaaaaaaaaaaaaaaaaaaaaaaa

SEQ ID NO: 9716 - DNA, 589 bp, Canis familiaris
tcaagaaatcttaaatttacccagtcaattgtacagtgttgttctcttgcaaatcatatttttgttttagaaagggattagatcttttcatgagggtgagaacagttttatcagttttcttttaaatggaatgctttgaaaagaatgtcactaatgccatgccatttaaagtattttttagattgagttttaaagtcaatggggattattggttctctttatatataaacactgtaccaagctttgcagatcttttcaaacatacatttttgaagttttattttcagagattgcacatttgaaaaccagtcttttttccataatgtttcctttatttgaacaattcacagagggccaattcaaacatacccacatataaggttctttaagaaaatagaataaattggcttcttggtgttagctcagtgagctggcaaagtaccaatgtatttgtatttgctttcttcaaatactcttggttcctgccactgtccctaaattgtcaaatttgggagggatttttaaaaattccacaatcatttgaagaaatgtatcaataaaacctactttgaggactttaccaaaaaaa

SEQ ID NO: 9717 - DNA, 529 bp, Canis familiaris
tacccctattggaccgaaaggactacggttcggattaagtccttttatcgtatcaggaagtaattttccttgcaggccttcttctggaaccctttaaccacttccagccctagcccctactccctggaacttgggggtttctgaccctcctaccggcattattcctctaaacccattagaagtgcctctactcaacacctcagtcctcctagcctccggagtatctattacttgagcccatcatagtttaatagaaggtaatcgcaaacatatacttcaagccttattcattacaatctccgatggggtatacggatctaccttttttatagccactggatttcacggattacacgtaattattggctctacattcctcatcgtgtgcttcctccgacagctatactaccacttcacatcaaaccaccacttcggatttgaagccgctgcatgatattgacactttgttgatgtagtctggctattcttgtatgtatctatttattgatgaggatcctaaaaaaaaaaa

SEQ ID NO: 9718 - DNA, 511 bp, Canis familiaris
acgatcctgactttgatagtcattgtctagaactaggacaatctagttctctaacgattaaaagaagaaaagagtactatatactctatgccctgctaaaccaaataaagttttcagaaatactataaaatgcactatgtatttcaaattactaaaagcacttttacctgtaaaattgagtcttttatttttggggtgaataaaagaactggttatgagatcctctgaaagcttagccaatataagaccagatgtaaatatataccttgttttaaagtataaataatagccttaaaaaagaaaaggaaagaaaaggaaatgtggcttaagtatgtattttgtttcaggatgcctgggtggttcagttggttaagtgtctgcctttagctcaggtcatgatgccagggtcctaggattgagcactgggctctgtgctcaggagggagcctgcttctccctgccgctccccctttgctgtgctctttgtcaaataaataaaatcttaaaaaaa

SEQ ID NO: 9719 - DNA, 507 bp, Canis familiaris
tagtgtgttgagagcttctctgacgtatcctcctctgggcccgttttgctgttcgtgacatgagacacgacggtttctgtgggtgtcatcacaaacacgtgggacaaagaaggcacgctggaagactggccaaagtctacccagtctgccccagaaaagctccagaaggctaaatggatattatcccctataacctgcgccacaccccgatgttgtaatccaatggtgggaaagacggtttccagagacctgtttgggtccaatggcccatttaagtttaatagtaaaagactggttaatgataacaatgcatcgtaaaaccttcagaaggaaaggagaatgttttgtggaccatttgttttttttttttttttttgtgcgtgtgtggcagttttaagttattagtttttaaaatcagtactttttaatggaaacaacttgaccaaaaatctgtcacagaattttgagacccattaaaacaaaagtttaatgagaaaaaaaaaaaaa

SEQ ID NO: 9720 - DNA, 633 bp, Canis familiaris
  misc_feature (1)..(1): n comprises a, c, g, or t, or includes no nucleotide
nacttgtgaccaaaaaggactcgatcacggcatagtgctgctcatcgtatcagaagtagtggttcttgcaggcttcttctgagccttttaccactccagcctagcccctatctccttgaacttgggggttgctgacctcctaccggcattattcctcttgaacccacttagaagtgcctctactcaacacctcagtcctcctagcctccggagtatctattacttgagcccatcatagtgttaatagaaggtaatcgctaacatatacttcaagccttattcgttacaatctccttaggcgtatattttacgctattacaggcctccgaatactgatgagacatcttgttacaatctccgatggggtatccggatctaccttttttatagccactggatttcacggattacacgtaattattggctctacattcctcatcgtgtgcttcctccgacagctatactaccacttcacatcaaaccaccatcttcggatttgaagctcgctgcatgatatgtgacactttggttgatgtagtctggctattcttgtatgtatctatttattgatgaggatcctaaaaaaacaaaaaaaagaaaaaaacaaaataaacagagtaaaaaaaaaaaaaa

SEQ ID NO: 9721 - DNA, 590 bp, Canis familiaris
caggagggccatgctggattcaggactttacccccgtggctccccaagcaagtaaccggcaggaagagggacccgagctgccctctggcctgccctgtgtcctccggggcacccgcagacctcaggacatggagaaggcagccccggcgggtgttggaagcatttatatcttacccgtgtagagcgggactcaagatcccaaaggattatggctctttcttccaagagtgagctgaggcttctacacattcacttgatcttagccaaaaggccgaaaagcgatgcctctacacattcaaagtccaactcctctgccttcagccctcgttaatgaggcgcttcctgggttgcatgttctctgactagttttcctttatttatagaggatttggagaagagggcaggcaaagtcatgggaatgacttctgcctaccctcgtattgattgcacttggcttgaatatagtggcagtatttctagaaccatttaattaaataaattcttaaacagtgttcttactttactctggtatatggaaaggttccaagagtcttcgtgcattaattctaataaagctttaaattgtgaaa

SEQ ID NO: 9722 - DNA, 535 bp, Canis familiaris
tgggaaatgttactttctaccttctgattagcaagacgtttgtggaagctggaaaaaaagttccaaaagaaagggagcaacccagaagaaaagaggagttaatgttttgcaaatgcagaggaagaatttttctatgagaaggccatcctgaagttcagctactcggtgcaggaagagagcgacactcgtctgggaggcaggtggtcctttgatgacgtccccatgaagcccttgcgaaccgtgatgttgattccaggtgaccggatggacgaaatcatggacagactgaaagagcacctctccgtgtgacccatttcccatggacagtagttggtgattttgtgtttgtaaaattatcagaaaacagctctctgatttactgaaaaactcacgactttattcagagtaaggtcctctacaaaagagtagggttctgtcccctgtgtctgtgacacatttacaaaatagttttaaaaaaaaaaaatttggtcaaattatgaatgattaaaagcttttcccataagaaggaaaaaaa

SEQ ID NO: 9723 - DNA, 641 bp, Canis familiaris
agtctgtaaagtgggaattgggttaattgagggagtccagcaccggatttcttaagctggacacttggcgtgtggtggtagtcctttatggggagagttcaccccgtgtgttgtaggacgtgtagcaactcccggttgccgcccgcccacagccaatgtcaccccctggttgcccgtgagtcaccaggtgacaaccagggtgcccaagtgccctcctggggcaacaagggcgccccccaagctggaaaacccaggtggttctcccaaattccaggcctgtaatgttaggggggggaaattctgcaggaagattaatgtccacatgagattcggggtctggggtgtgtatttattcgtatttaaattgtacctcgacgaatgcatttttttaaaactcttgccatagatttctcggacctgaaatcttacaacagctgtattatcctcgaatgttgtataataaacactgggaagatgaaaaattatttaacagagctaaatgttttgtgaattcagtagaaaagcccatttcttaagcctgaagagttgctgaaaacttcaggcaagacgatgtggcaagtactaattttactgagaagcaaaccaataaaaggattaccacaaaaaaaaaaaaaaaaaaa

SEQ ID NO: 9724 - DNA, 641 bp, Canis familiaris
tggtgctcccgttctacccagagtcttcaactcccctcatggcacaactccctcacggtaagatcacaatgggcacatgtgtttatctctaatacgcgttctttatttctcaacaccccctggtgagtgttataataggggcgcacacgcgtttaatatatttgcgcccagggggtttacactctcgtctcaagtcacatatctcggttatacgccaactctccaatttccgacggaatcccatagcccgtacctataattttcgccaccgagggacctccaaacttccccttcccctaattagccagccctgatgactatttagccaagccctcacaaatctgggctctccctccaacaagttaatcttatcggagaactatttgtagtgatatcctcattctcatgatccaacattactattatcctaataggaattaacattatcatcaccgccctatactcactttatatattaatcaccacacaacgtggtaaatattcccaccatatcaaaaatatcaaaccatcattcacacgagaaaatgccctaatgaccttgcacctactgcccctactcctcctatcccttaaccctaaaattattctcggtcccatctactaaaaaaaaaaaaaaaaaa

SEQ ID NO: 9725 - DNA, 645 bp, Canis familiaris
  misc_feature (20)..(20): n comprises a, c, g, or t, or includes no nucleotide
tttattcctggattcattanaagcagaaggagggtaattttacattgtctctggaactcgctaccaaggaaatggaggtgtatacggctgggatttgaaaaggaaaataatcagccgcggggcccattttttaacatcagattttgctcagaccaggagcatctgatttaaccaggaagcttccaggttattaatcgggaaagaagttctaccaggaaattgattaggaaaaaagtgttttctaaaggcgtaagttttcccagaatggaagaattgaattgttccgggccaaagaccaaggttggaattaataaacttaatttggcggagggtcccaaataattccaatttggttggaattccggagtttaattgggggaatccaaagttggggagggaaatgaaatagtctctttcttgaaaggattattgactctctttgctactacataaaagaaagttattcattatacttatcatatactttatgttaacataaaagaagcctgcttgctgatttttataaaatgtactcttagagcataaatcataaggtaaggtaaatttcatacaaatctttttttctgaggaaactccattttatatgtcaaattaaattagaaaaatgaaaaaaaaaaaaaaaaa

SEQ ID NO: 9726 - DNA, 543 bp, Canis familiaris
gccagcgcctgtacggctgctggaggacccggcctggctgtggctgaccgccgggtgggccaggccgtgctggacacgctggaggggggccctgcaggccagcgacggggccccggtgcctgcccactacctggaggctggatcgcgcctgggccccgacagcctggcgctggccatggaccgcgccctggtggcccggcggcccagctccccgatgacccgggaggagttcctggagaaggccgccgccctcttcatcgccaaggtcaagcccgtggcctgagcccgcacacctcaccgccccctcccgcacccacagcgaggtcgcagccgcgggtcgctgatgcgggtctgggactggggtatgcccgcgggcaagggccgggcagggagccccccaccccctccaccctgacatcgcgccccagccccgtcggggagcctcgggtcccaggaagtgggcacccccacccccacaaaggcccctcctcccgctggtaataaaatctgttcccaggcccaaaaaaaaaaaaaaaaaaaaaa

SEQ ID NO: 9727 - DNA, 532 bp, Canis familiaris
gggattaacaaatttcgaacaccaggagaacagcctatgagccacttaggggccctaatttagggtgacactattaggagaccagtgttgtgacgcaaaaaagacacggctggtaccggtcccggaattcccggggatacccgggggggcccgagagggagagggtccacacccagggcccctggggttccccgcccacccagatgccgccagagaaagggcgtccaaccagaaattctggcccgggtcgctgcccaatttgggtggggttcctggggccaacaagggttaacaacccccggtaacccagcggtccagaggttctgggaggccagcagggcctcgggtttgcccggggctcccagggaccaaaggcccctctcccgtgcccacccctggaccagccctcggagccccggtgcccgcggccaggctttgtcctgccttgtctgtggtctttcattaaatgtttctggaaggaaaaaaaaaaaaaaaaaaaaaaaaaaaaaaaaaaaaaaaaaaaaaaaaaaaa

SEQ ID NO: 9728 - DNA, 573 bp, Canis familiaris
ctgtcattcccacttcttcctcattgagaacatctgtcttctgcagacccttctgccaagccaggggatgatcaagcttggctggagttgttgggctgggcataagggagcttctccagagccaggcttgaagtttgctctaaccaacatttaaaggctcccagagaccagagccagatagctcctgccccagtgccttggtcgacacctcctcaaagtggaccagcactgtcttgtctgagttcaccccagcccatccctgcacctactaattctggtctccttctcccttcttccaacaaaagtattgaatactgtctccaatcggtatctcaaggaggtttctgagacagttgtagaaggctcaagatgaaggctggccattcagctacaagcctgataaggcctgtgtttctctgaccagaggtggaaccccgagggcccagcaggcctttcccagggcctccatggagcaagctgagccaccttggaaaacagagttaaacggaatatttttgtacccgatgtttacagatgctgttgggaagttatcaataaaaagactctgttatt

SEQ ID NO: 9729 - DNA, 599 bp, Canis familiaris
ctactgatgcagcacaagagatgtgtaaaaaaaaaaaaaggaaaagaaaaaaagggaagacgctctctaaggtttttgttttgttttttgtttttttggttttaattgtgttaattatcttctaggggaaaacactgacgaatggtcagagctcccgtatcctgatcttttcatcaaggcgcctttcctaataatatggttcaactgtgaatgtagaagtgggggggaggggggagaaaaagaactctggagttagaggatctagaacaaattaaaatacaattgttacaaaaataacgcaaacttcaaaaaccaaagaaagccacaatccaaacaaaccaaaatttagatgctcagaattggcagcatgaaagagaagttctctcctaatatgtatcgtgatagtctgaacacccccagaaaattgtgccaaagagtttagaaaacaaatatacaataaaagtaaacacacacacacacacacacacacacacagaaaacttcaggtaactattttggattgcaaacgaggataaatttaatgttcaaacaatctgataaaataaccatttggaaactgaaaaaaaaaaaaaaaaaaa

SEQ ID NO: 9730 - DNA, 151 bp, Canis familiaris
  misc_feature (1)..(1): n comprises a, c, g, or t, or includes no nucleotide
ntttggcctcccctgtgacattggtgtgtggtgttgtctgtatatgctaactccgttgctctttccagccccctgcccataaacaactatttaaggggggaaaaaaaaaaaaaaaaaaaaaaaaaaaaaaaaaaaaaaaaaaaaaaaaaaa

SEQ ID NO: 9731 - DNA, 647 bp, Canis familiaris
agagcgcagccccgagaccggccccggcgcccgcggcaccccccggcttcagggcgtccgagaccagcgccttcagcagccggccccctgccaccccaggagcaggcgtcgccggcccggcccccgcgagaccaaagccccccgccaggagctcgtcgctcccccaggtgagctccgggcacagcagccccgcggcccccgagtccgccaagggcagccccggcctgcgcggcggcccggcgcccggcgccgacccccagacctcgctgcccgaccagcctctctttaaactcaagtatcccagctccccgtacagcgcccacatttccaagtcccccaggaacgcgtccccaagctcaggccagcagtctcccgccgggagcgcgccgtcccccgccctgtcctactcctcggccggttctgcgcgctccagccccgccgacgcccccgacggggacaagctgaggacggcggcggtcgacgagaaggtgcaggccgtgcacaacctgaagatgttctggcagagcgcgccccccgccaaggccctgcgcggcgcccctggcacgatgacctccaggagggacgtcctcagcctgctgaacctgtcgccgcggcacaagaaggaggagggcgcggacaggctggag

SEQ ID NO: 9732 - DNA, 654 bp, Canis familiaris
tgaagtgcctgaacccggagcagacccagcagccagtgtggacgccagcgcagatgccaccgtggacaccccctcggacgcccctttggacgccagcacgggttcctcagaccctgccccgacggagacctccctgccccggtgaggccatcctgcgccgacaaggatgccccggcagcacctatgcacacaggctgcaggggcctccacctcagtgtccaaagccagacccagaacttctcatctgtgtgaagtacagatttttgaagactggagaggatagaatgatatcagtactgcttttatatatattttttagcttgttagaagttgctcattttcctgtttctttggcaaagctgggtcccttgtgcctgtggctggtgatagaccgtcactgttacagtcttattcctgtcaagacacacagctgccctggcgggaagtttcaggtcccttttattatggctatgttggttttatggtcccgtgtttcttttaattattatttatagaaagaatctataactcatgggtctcgtagactgcgaggactatggagttgcacattcacagtgcacggtactgtggtctcagatgacttctgtgcctttgtaacaaaaggtgaaataaactttttctcagaggtaaaaa

SEQ ID NO: 9733 - DNA, 660 bp, Canis familiaris
  misc_feature (182)..(182): n comprises a, c, g, or t, or includes no nucleotide
ccaggagcaatgttcagagactcgaaggcggtgggcccctagccccaatagcaggccacacgcatcgggttcgaaataagaagagggtcctacttggggaaaggaaaaaaaccttgggccaaagggagaagctcccgcggtactaccaaaacatcggttctgggcttcaagacgcctcaaanggaggccattgagggcacgactagatattgacacagaaatgcccctttactggcaatgtctccaatccgagggcggattttgtctggtgtggtgacccaaatgaagatgcagaggactattgtcatccgccgagactacctccactacatccgaaagtacaaccgctttgagaaacgccacaagaacatgtcggtgcacttgtctccttgcttcagggatgtccagatcggcgacattgtcacagtgggtgagtgccgccctttgagcaagactgtgcgtttcaacgtgctcaaagtcacaaaagctgctggcacgaagaagcagttccagaagttttgaggcaagacttctgtctacacccctgaagaaaataaaactgtttacacccctgaagaaaataaaactgtttacacccactgaaaaaaaaaaaaaaaaaaaaaaaaaaaaaaaaaaaaaaaaaaaaaaaaaaaaaaaaaa

SEQ ID NO: 9734 - DNA, 579 bp, Canis familiaris
agtggggatgagtatggagccaactgacagccgaccagcaaggatggatgtatcttctgttgtctagcagtaatacactcgcggttcacgagatgcacgagtttataaacacccattttgggggctcaatgagttgggagagtttttgtgtgtaatatattatcccacatgtatattatatttgtgggcgtcttcgccacagttgttgtttctggtgtgtacagggaggtcggcagagctccttaattctctccgtgagggcattttcgtggttcttaagtcaaccgtgtttcgtgttcttggaccctttccagccctttcgtgcccctttagcttcttccccaccaaaaatgcagtgaataccatgactttatgtgtgggatggggtatatagtgtagcaaagcaaagaaacaatatagttatcttgagtcctgagacatttgtttaggggaaagtgtgattgagaataagggtaaaggttgggggaggggaggggagttctaattgactcaaaactgaaactttttttgcagaaattaagtgggatgtttttcattctagaataaaagaatgtgatt

SEQ ID NO: 9735 - DNA, 627 bp, Canis familiaris
agccatagcaactgatggtgcttgctttctgtgctgctggaggcttggacaggcatggactggatcacctgactccagctagatctcctcacctggacatggcaattggcacagaattcaagaaatcaccaggaggaggttatgcttttgttgatcctaaccaaagcagaaactaagacgtgaagccactgataccaattgctgaaccaaaaatgtccgaggcttcttatgtctttattctctgaagagctttaatatatactgtatgtagtttcataggcactgtaagtagaaggcacttagtgtcgcatgtttatgcctgaggaacttttcagatgtgtgtgtctgcatgtgtgtttgtacatagatatcatagacgcagaaatggttctgctggtacgatttgattcctgttggaatgtttaaattaccctaagtgtactactttatataatcaatgaaattgctagacatgttttagcacggacttttctaggaaagacttacgtataattgctttttaaaatgcagtgctttacttcaaacccaggggaactttgcagaggtgaaagcctttgctaggttttctgttcaataaagttttactatgaatgaaaaaaaaaaaaa

SEQ ID NO: 9736 - DNA, 667 bp, Canis familiaris
cagagccaccccccctggccgttgccagagcagggaagaagggtgtgtgtgtgtcccggaagggaaaaaggtggatcatgatttgtacttgaaaacacagctccatccctggtctatatgttataagaagagaagattctgagcgaagcaagcacgcgacccacggtgtgtgtgaattgaatggagatgtttcttttctctctttttttaatttttgttgttttgtctttgtttttttctttaagaaaaagttttattttgtttcttttacttttttggtaaccaaaactaaaataaggaatagaaaagctgtttttcaggctgacacgtccattaagggtagtcgagccgtgcaatggtagactaggaatcatagtgtccgtgaggtccagtgagtctgtgtgagtccttgtgtcatcgtttggggcactgttttttatgcaagggccaaaatctttgtatctggggaaaacaacaacaacaacttttttttaaattaaaaaggaaaataaaagatattgaggtcttcctagtgttacttaaattaagatcaaggtaagaaacattgtaaaaaaaattaccaaagtgctatttgtttcctaaaaaccgtgatttctattaaaaaggtgtcagaactggaaaaaaaaaaaaaaaaaaaaaaaaaaaa

SEQ ID NO: 9737 - DNA, 700 bp, Canis familiaris
tgagccttttgtattttagaaagatcccgtccagttcagctaatttcaggccattgcccaccttgtgagccccaatatgacccatcacgtgcttttgcaagtaaatcccttattaaaagacagccactctcattagttacatgttgtctgtggctgcttttgcactacagtgacacgtttagaaattgtaacatacacttatggctcacaaagctgaaaatatttctctggcctattattcagtctcagggatctagaacttgtgctgtggacccttgacagtcttactaagtctgagcccccttctgagaaaataaaaatatgtagctttataaaagaaaccaattaacttgagatataattgtttaaatacatttttaaagacttatgtgttttattaacttattaaaaaccagaactagtaactcttataatttttttttcttacaccacttcaccagttacagaagtagaagtacttagtgatgaaaccagtattaagaattgaagcctcggggcagcctggtggctcagcggtttagcgccaccttcagcccagggcctgatcctggagacccgggatcaagtcccacatcgggctccctgtgtggagcctgcttctccctctgcctgtgtctctgcctctctctctctctgtccctcatgaataaataaaatcttaaaaaaaaaaaaaaaaaaa

SEQ ID NO: 9738 - DNA, 709 bp, Canis familiaris
gtatcccttgggcctacttctcgggaactggtcgcgattggtagatgtttttgatcagatcaggtctttgtttgttgacctgccactcagtgagggagacacgcgatgcctcttcaaggtgcatgcagtctgtcctgacttcatcctcaagttccgctcacagtgctctgccagaagtatgtccggcaagcctggcagaaggctgatatcccatacccaaatgggcagctaccagatgggcccagaagattgaagcccgagaaaggaaagcccagatgaccagactttgatcgttaccaagtcatgaaggccaagaaaatgaggcacagaataatcaagcttgaagttaggaagctaccaaaagcagctctcctgaaagcttctcctaaaaaagcacctgctgctaagggtgcggcggcagcacctgctgccaaggttccagcccaaaaggtggctgctgcgggcaagaaggctccagcccagaaggttcctgccccgaaagctgcaggccagaaagcagcacctcccaaggctcagaagggtcagaaagctccagcccagaaagcacctgctccgaaggcatctggccagaaggcatataaaaacataagaggctgttataaataagtaataaaggttctttttgacaccttggccagtgccaaaaaaaaaaaaaaaaaaaaaaaaaaaaaaaaaaaaaaaaaaaaaa

SEQ ID NO: 9739 - DNA, 590 bp, Canis familiaris
tgctgagcgtgtccacacccatcgcggacatctatgtgcaggagaaggatgatgatggcttcctctacatggtctacgcctcccaggaaaccttcggcttctgagccccccctagtgggggtctgcttgtctctgggagtgcgggggtgccctgtcaggctctgcccagggaactcctggctcctgtaactgaactgctctgcccgggctgggctgggcagggatgctggccccctagccagggggcacccactgcacctactctgcccctgggtggatcctgggcccagtcattgttagggatgccctcctgggtgctggctgggatgggggagggtggggaacagcccccagcactcttgctcgtgtgatttatcttttttttaggcccctgcccatctgcccctccctcacctgaggcgctgcccccctgcctggacctgcccacccctgaaggactggcccttggctcacctgatcttgacctggtgtatggatctgtggtcattgttcctctgcagaataaagattgctcaggcccaaaaaaaaaaaaaaaaaaaaaaaaaaaaaaaaaaaaaaaaaaaaaaaaa

SEQ ID NO: 9740 - DNA, 633 bp, Canis familiaris
aaaccctgccccctcggctgggatgtcacacctattccctactgggctgtacaagcttcattggtctaaacagccactataatctgtgagatttgtggaaattacacgtaccgaggtccccaggccttccagcggcactttgctgagtggcgtcatgcccacggcatgaggtgtttgggcatccccaaccctgcccccttcgctaatgtgaccccgaatcgaagatgctgtctccttgtgggcccagctgaaactgcagaaggcatcagagcgatggcagcctgaccccgaggaagaatatgaagactccagcgggaacgtggtgaataagaagacctatgaggacctgaagagaccaggactgctctagtgttcagggatgtagctcagcttctgggcttgcccaggcttacctgaagtctcctttttctatttctccccacccaatgctccttaaagactttcctacttagtcttaaggtctagcgtgcgtcttgtgaaaacccaggcatgctggccggttgcagggctgagatgtgttttatctttgttttatattaaaagattctgtccagaaaataaaaaaaaaaaaaaaaaaaaaaaaacaaaaaaaaaaaaaaaaaaaaaaaaaaa

SEQ ID NO: 9741 - DNA, 611 bp, Canis familiaris
cccgtatcccaatgtattttgacacgttgttcttgtcccttataaataaataaaaagttttttgttttgtgtttttttttaaatgggtttttgtttcctactcggtggcccacttctaatcccccgccaatcccttgggcccatggagattttgtcccataaggtccatacccctggtacccgggtaccctcaggatttcctttttcttcttccagttaccagtttctcgttcttggacttcttttattattattataattttttttttgctttaaaatgagtgtgatgccatatcgagtccatgttattctctcacagtgtactctataagaggtgtgggtgtttatttggtcgggatgctagccagtgctaaagtagcatgatcggtataagccaaaggtttttaggaagtatggaaaaatgttttattggttatgatggtgacatggtatagtcagctgccttttaagaggtcctgtctgttcagtgttaagtgatttttaaaaataatggcctgttattctgaccagcttaaagatggatttgcaatggttttggatgccattaggttatgctatttggacaataaactcaccttgacctaaaaaaa

SEQ ID NO: 9742 - DNA, 484 bp, Canis familiaris
ttggagccctgaggacttctttgcaggactgagggaagagggagaggaatccacagctaaagaaggaagaggaggagagtgaggatgacagtgattgaggaaagaagttgactctcaaaataggacctcactgggcaagtctaacatcctgggctgaataccctagagaggctctgaatttaaaatactccgcagtgcacaagatgcatagccagaggctcaagactgagggcagtgatgtgaggaagtacttgccctgtggcagctactccttctaccagtgtaagagaagcccacagctggggcaagatagcacggacacaggcgtacacccaccaggggtttaatataaataccaacggcagagaaaaaccccaaaatcacacatacactgtaaccagactcttaagtagtgaggacaaaggcagaattctgaccctctggctcagccagcctccaaataaaattaaagattgaccaatca

SEQ ID NO: 9743 - DNA, 382 bp, Canis familiaris
ttgatgccgtttctttccatatgttatttccaatatttcagaggcataccaatgccctagctagcctgggacttatttggccggtgtggggtgggggaggcgggatgggacactcaacattttttttttccactttcagaaactcaaatgtcaaaaaaacgcattaagaggtttatttgggtaaatggcccgtagtggatttccccccagaaagggggaaggaacgagcgggtagacctttctttttggacagaagctagaaggcaggaaactttgtgcggtgtcaccgtgagcacctccagctgtattagtgcccttggaataataaatttgatatggtggtgaaaaaaaaaaaaaaaaaaaaaaaaaaaaaaaaaaaaaa

SEQ ID NO: 9744 - DNA, 612 bp, Canis familiaris
gggccagtgggcacatgaggagccctgtgggtgagccgactgacgacggccttgagtctacgcagcgcagtggcacaaggatcaagagtctgactcagggtggccaggaagtcctttttgcctcattggaaaagacagaagtaacgctggtggggtttagtgcattatcgtagattacacagaaaacggtgcctcctcctctcaggagctcagacaagaggctgtggctggaatcacagcctgaagagttgaggtgaactttcaggaagaatttatggacattgtgattgttcactggctctgccaacattgaccactggccagtgccagtggagcttccagttctgcactgggccgaggatgtcggaggccactgggtgctgctcacccccatagtgaacagaaagggtggtcaccaaccttcctgtccacgtgggagttgttgttttagcctgctgggtggaggtgggtaagtggaatcattttctgggctatggaaaatcaggagtccccagtgggagggtggcaaggaaaggcccatcttgtattattgtgctataggtgagactcaccattcattgagagatgccgtccaagactataggactgtat

SEQ ID NO: 9745 - DNA, 611 bp, Canis familiaris
  misc_feature (344)..(344): n comprises a, c, g, or t, or includes no nucleotide
cggggcgctgtgcagcgcatccaccagttgcaggctgagcgcgcacaggccttccgccggctggaggaaggccacctccagtacctgcgaagcggcccgcctctcgacttcccgcgctatccggagcacggtgcacgaggtgacccaggccttcgccgccgcctcgcgggaggtgctggcggtggaggccgagctggccgggcccagaggacagccgctgcttgcgagccacgtgcgcagcctgcaacagctggagcagacgcgcctggccacggtggccctcctgcagctgatgggggcaccagagctgactgagcaggagaacaccctggagatgcaccagnctgaagatgaaggtaattaaaaccactggaagcgatcagcgaggttcttcaggaccttaggtttgatgcagaatctgccgagtgatggtggcttcccagagacatgccactgggatatgggaaatggggtgaatggcacccagcccacccctggaccgtcagatggctggggtcacgctccaccaggttgctgaccgcccttgaatttgctgtgactccaacaataaaggacccttcatttgccaaaaaaaaaaaaaaaaaaaaaaa

SEQ ID NO: 9746 - DNA, 640 bp, Canis familiaris
acggcagcgccggttcttgagggatgccagccctccgcaccacgcggtgcttgagcagatccacctggcctccaggttcccgctggctctgccttgatgcctgccgctgggcctggagcacgaggcctgtgcagaggagcatggccaccagcaggatggcattccacagctgctgcaggggcttctgctcctgggcccgactgcctcccaggcacaccaagtcctgccatcctccatagccatccttggagaggccacaggtggtccacagggtcagcttccactcgatgttggctgacagtgactctccactggtgatctcagctgtggcctgagtcctctgcagcagtgcctctaacagcttggtgacgttggaagagtaatggaggacaatcactggcctgagcagaagctgtgatatgtctagctctcggaccacgttgtgattcaggatgaggaggagcagggcagaagctcccaggaagagtgccctccgcatctgctggaccagggccttgggataggcctgccgaccgctgccctgactctcctggtggaactgggcggcctgctccttgcccacgtatgccactgcaatccagccttctacgggtacctcctgctcagcatccacgatgtc

SEQ ID NO: 9747 - DNA, 635 bp, Canis familiaris
  misc_feature (141)..(141): n comprises a, c, g, or t, or includes no nucleotide
  misc_feature (165)..(165): n comprises a, c, g, or t, or includes no nucleotide
tcgataaaatctgagggaggctgttgaccacggctttcctcatgctccccgaaagcttttctgaagaagacctctttatagagattgccggactctcttattcaggcgactttcggatggtgtttggagaggataagacanaagtgttgaatattgtgaagcccnacatagcccactttcgtgagctgtatggcaacatactgcaggacatccccaagtggtgtataaaatccagcaaggcagactggagatagataaaagcccagaaggacaattcactcagctaatgacattgccccaaaccttacagcgacaaataaatcatattatggaccctcctggaaaaaacagagatgtggaagaaactttattacaagttgctcatgatcccgactgtggagaagtggtgagactagggctttcagccattgtgagaccttctagtatgaaacagagcacccaaggcattttcactgctggcatgaagaaatcagtggtttatagttcactaaaactacacaaaatgtggaaaggatggctgaggaaaacatcctgattgtgcttgcttttatatgtgttatgtatagattaataaagtgatcctttttgacggaaccagtaaaaaaaaaaaaaaa

SEQ ID NO: 9748 - DNA, 546 bp, Canis familiaris
gccaccacttcggctcgatgtctgacccctgtacgatgcgcctggtggatctgcagtctgagctactatctagctgggggactccggcgtccgggagctgtgccaggcgtctgggccagtcggggaccgcgctgtcaggtgctctgcctgggggatctgcgacgtggcccacgatgtgctgcgtccatgcctggcctcgtctcctgctggccaatccgcagcctgcgggatgctggacctcagcacccaccgaatgaacgatccagggtatccggcggctcatggagagtgtggagcagccaggctgcgcgctggagcagctggtcctctacgacatctactggtcccaggacattgaggacagcctgcgggtccctggaggaacggaagcccagcctgaagatcatctcctgagcagcccccccatctctgccccccccacgtcctggcttggagtacacagaaatgctctaatcaactcagttctgcaacaagttttagacactttattaaagcactttttttggccaaaacaataaaaaaata

SEQ ID NO: 9749 - DNA, 659 bp, Canis familiaris
ttctttttctttgcacaacacctacgatccacagaatctttaaggcgctgaacttcttatttttcgacccatttcacacaggagaaccacacagttgaatggaccctttttaaaaaaaaaatggaaggaaaactaagaatgatcatcttccccagggtgttctctgacctggactgtgatattagttatttatgaaaaagacttttaaatgccccttctgcagttggaaggttttctttatatactattccccccctggggagcgaaaaacgttaaaatcaccaggaatttccccatttaagccagactttgccttttttccaaggtggagcgtgaatacccagaaggatcccagtattccagttacttaaatgaagtcttttggtccagaaattacctttttgacgccagcctactgaatgctgtgtatatatttatatataaatatatatatatatggagtgaaacccttgtgaactctttaattagagttttcttgtatagtggcacgagatgtgtatttctgcatacccaagtgtaatgatgtacttattcatgctaaactttttataaaagtttagttgtaaacttaacccttttataccaaataaatcgtgtgtttattgaaaaaaaaaaaaaaaaaaaaaaaaaaaaaaaaa

SEQ ID NO: 9750 - DNA, 643 bp, Canis familiaris
aaaatgtgatgtgggaaaaattggggttcggagctagacagcccaagaaagaactcgttgacacatttttggtgccataaggtgtttgtgttatagcatggggacggaacttgtgggcagaaagagctggactgaagctgtgaggaacccttgattatatactttggagcttggcagaggtaaaggccaagggatgtttcccaaaggattttcatatgctaaagaagactcagaggataccataccggaggcctggctattgtcaagcttagactgtttttccccctagcaagtcattaacattaagacacgttgggagttcctgaactactgtcctgttctgcctgcctcaagtatttgtcagtgagctgcaggttataaggaaatctttttagttttatctacatttattttgcctttgttttccacatcatacgtacacatatttatatttagttacaaatcattgtattagggatgcctgggtggctcagtggttgagtgtgtgcccttgggctcagatcatgatcctgcatccagggatggagtccctcattaggctccccacagagaatctgcttctccctctgcctgtgtctctgcctctcatgaataaataaataaaatcttaaaaaaaaaaaaa

SEQ ID NO: 9751 - DNA, 541 bp, Canis familiaris
aagatatagaccgcaggttcttccctaggaaaagttataccgtccagcccatgtaacatgtttctgaagctttgagttcctcaatgttttaaaataaagagcaactaaattatatgaaaggtttcctaagatctgaaattatgtgctgcctggaacatagtgtgaaaagaacataatgcctctatgtagtgaaaataaggagaatctctaggtactatagcaaatgtaaccaagtacccagaagatcaagtttcacttaaaccaaagtactcaggccctttctaagtgttttctatagtctctcacaaaggatcagtaaactgttgcaagtgacatatagataacagtcaaggggaatatctgatgaagaggagataggaaaaccttaaaaaatacagtaacagaactgaaaagataatttggcttgggttggtcatttcagggccaagtaattgccttgaggtcatcattgtagtgtggccaaaaaagtatatcagttgttcataataaaaattggctaacccaaaaaaaaaaaaaaaaa

SEQ ID NO: 9752 - DNA, 599 bp, Canis familiaris
cccgaagcccccgttccttcccgggggttcctgtgcccccctcgcttcccgttgccccctcacacggagccaatcccacggactcttcagttacccttcttcacggcccccgagtctgcccagcgacctcgtcgtgtgaggccagacggacggaagccaggttccaggggagttttcagccctaacccctgagtctccccctccccgctgctcggggtcagacctgggttcccgtggcctcgggccacggggctcagcacggacagactcgcaccagcgtctccagcaaacagcaggccatggcgccctcaagcccgcgtcccctgagccccgagaaccaaggtgctatcctgcagacccccccgtctactcggaagcctgggccctgggccttcagtggcacaagcgaggtgttgctttttaaaccaaaaaaccaaaccaaaacaaccccaagctcttcttccttaggagagtgattggttctacgttttactgaaaaccctctttatgtgttagttttctgattccttgtgtttgctcactgtgtccacgtcagccacttttcagaataaaggtgttcattcctcaaaaaaaaaaaa

SEQ ID NO: 9753 - DNA, 670 bp, Canis familiaris
  misc_feature (287)..(288): n comprises a, c, g, or t, or includes no nucleotide
  misc_feature (320)..(320): n comprises a, c, g, or t, or includes no nucleotide
  misc_feature (356)..(356): n comprises a, c, g, or t, or includes no nucleotide
gtgcccatgatgaccgcctgggcatgttcgacatccagcactgtgccacgctctccagctgggtgctgctcatggagtacgtgggcaacgccaccgccttcttcatcctgcccgacgagggcaaatgcagcacctggagagcaagctgaccaaggaggtcctggccaagttcctggaaaagagatacgccaggtctgccagtttgcgcttgccccccaacaataggtcctttggggtttgcccccccaaaaactttttctctggaaccctacgggattcttgaaaanngcggtcccctggagccacaaaactgtggcacntccaccccacacggtctttccacgcgccgacggctngacctctctgggatcactgaggaagggcccttgatgctgtccaaggggctgcacaaggccgtgctgaccatcgacgagaaagggactgaagctgcgggagccacctttctggaagccatccccatgtccatgccgcccagtgtcgacttcaacaagcctttcctcatcatcatcgtcgacagagacaccaagagtcccctcttcatgggaaaggtggtgaaccccacccaaaagtaactgccttgtgggtcaggtcccttccagataccattaaagagtgacccacccccaaaaaaaaaaaaaaaaaaaaaaaa

SEQ ID NO: 9754 - DNA, 505 bp, Canis familiaris
ggaaattcttcccttgaagaaataccagccttggtgaagagttgttagcccaaggcgaatatgagaagggtgtagaccatctaacaaatgcacattgctgtgtgtggacagccacagcagttgctgcaagtgttacagcaactcttccaccaccagtgttccagatgcttctgacccagcttcccaccattagtcagagaattgtaagtgctcagagcttggctgaagatgatgtggaatgagaaaatgtcaacataatctccattaaaaatatttttaaaatcttaagtcagaagatgagcagctctgggggagtaagggccaataggcttgttatggactgtcctatgctgaaatctacccaagttaatttttactttgtgtagatccattcatctgttttatttatttttcccagtgaaaagtgtattttgatagaaagcgttttcattttataaatacactatgagttacccaaaaaaaaaaaaaaaaaaaaaaaaaaaaa

SEQ ID NO: 9755 - DNA, 618 bp, Canis familiaris
agtgcgtgtggcacatctcaccgcccccccaagcgcaggatcctcatcgtggtccccgagatcttcctgcccgttgaggatgagtgtggcgatgtcctggtcatgaggaagagcgcatccctggcgtctatcaccacctatgagacctgccagacgtacgagaggcccattgccttcacctcccgctcccggaagctctggatccagttcaaatccaatgaaggcaacagtggcaaaggattccaagtgccctatgtcacctatgacgaggactaccagcagttgatagaagatattgttcgtgatggacggctctacgcctcggagaatcaccaggaaattttaaaagacagaagctcatcaaggccctgttcgacgtgctagcgcatccccagaactacttcaagtacacagcccaagagtccaaggagatgttcccacggtccttcatcaactgctgcgttccaagtgtcccgggtcacaggcgccgtgtggtggggctctaaggattctgcggtggggcaggaaagagctgctagcggaggaaactgtagatttgtgctttcccttgatagagcatctaattaagtactatatatatatatataaatataaata

SEQ ID NO: 9756 - DNA, 649 bp, Canis familiaris
atgacacacagctggcccaccttaccacatcctggttgataccactttgatcacgttttccagttaaagccaacttgacttagtacagtcaatgagtggactgtctgtatgccaagtgtatcccttgtataactgactgtgtaatggctgaaattgagaaactgggacaaaagtatcgagtggctctaaggattgccaaggatccgagatttgaacgactgccatgcacacacaaaggaacctatgcagatgactgcttagtacagagagtaactcagcacaagtgttacattgtggccacagttgaccgggaccttaaacgaaggatccggaagatccctggagttcccatcatgtacatttctaaccataggtacaacattgagcggatgccagatgattatggagcccctcggttctaattcttaaaagatcgtttttctgtcttcttataccaactttttctgttgccagttcatattagcaatatgctatagtatgaattattcttcttacccatttgctctgttatgagctgagtatggttaaatatattcattttttgatgttttgaaatcagtattttgtatcattttaagtattgttgcatctttctataaatcagatgattgtttaaaaaaaaaaaaaa

SEQ ID NO: 9757 - DNA, 645 bp, Canis familiaris
ggatacgattcaaggctactagtcagtgcttcccaagatggaaaagtaattatttggatagctatacacaaataagatgcatgctattcctttgaggtcttcctgggtaatgacctgtgcctatgctccctccggtaattacgtggcatgtggagggctggacaacatctgctctatatataagcttaaaaaccagagagggaaacgtgagagtgagtcgggagttaccaggtcacacaggctacttgtcctgctgtcgttttttagatgacagccaaattgttaccagttcaggagacacaacttgtgctttatgggacatcgaaactgcccagcagaccaccacattcactgggcattctggagatgtgatgagtctctctctgagtcctgacatgaggacatttgtttctggtgcttgtgatgcctcttcaaaattatgggatattcgagatggaatgtgcagacagtctttcactggacacgtgtcagatattaatgctgtcagttttttccccaacggatatgccttcgccaccggctcggacgatgccacgtgccgcctcttcgacctccgcgccgaccaggagctgctgctctactcccacgacaacatcatctgcgggatcacgtccgtagctttct

SEQ ID NO: 9758 - DNA, 672 bp, Canis familiaris
ctgccattcagcttgggaattataatatttcccacagaaagccctcgttttttataacctggcaaaatcccattaatatcatggctctaaaattaaatgaagctagatactggaaacttaactgcaatgtggatctttttcccacatgatttataatacataagccgaatatgcagttttaaataattgcctacaataaaaaatattttgcctgccattttcagaattcttttttgaaggtttctgttgatgttaactgagctattgcagatattttaatttccctaaacgtaaaatttggagtaaatatatatatatattcttgacatatatgtgtgtgtgtgtgtatatatatatatatatatatgtatatatatatacacatatatatgtcaaccattcagtaaagcttttgtttaattttcagaaggaatcaaataaaacacagtatccatcttctgtagttcgtagggtgttaggtcctttaacgtaaagtcaaacttcaaattccatctagctctgtgttaatccctgttattactggtaaagcttcatttgaatatgtaaattcagtttaggctatgtaaaatttttgctaatgtcatcattctgaaaaaaataaatttacaaatacattccaaaaaaaaaaaaaaaaaaaaaaaaaaaaaaaaa

SEQ ID NO: 9759 - DNA, 625 bp, Canis familiaris
tattaaccacatagcgttgattaaatgggcaagccctgatgtctgtgtgcctgattgaacttcagcctggcctggcctgcttgggaaacccaggtctgggccaaccccagaggagggcctgccaaccagaggatgctgtgcacttgtgtgaggaatttcttgccagagaggctcctgaggccaaaggttgatgctcttccctgcagccactgtacaagatgtgctggtcactgcagacaacactgaagccaggatgtccatgtgaaattccacgctcacctgttactgagctcgctctcccagctccccagggcagcgcagccccaccgcgaccctccctcggcacagtttggccctttgcggggttggaattggcgggacttggctgtagccagcagcagtctgggggtgccggcgccctgctggccccttccttcggaacagccggccagcccaggagcaagacggccttccctctccctctggactcacagcctttgcagagtcaagctccacttgaagctcactcagtaatatcctttacatgtgttttatattgttttgactgcctttttttgtagaaataaaaattgaccttagaatttatcatcaaaaaaaaaaaaaa

SEQ ID NO: 9760 - DNA, 632 bp, Canis familiaris
tgatgagccgcctgggcatgttcgacatccagcacctgtgccacgctctccagcctgggtgctgctcatggagtacgtgggcaacgccaccgccttcttcatcctgcccgacgagggccaaatgcagcacctggagagcaagctgaccaaggaggtcctggccaagttcctggaaaagagatacgccaggtctgccagtttgcgcttgccccaactgtccatcttctggaacctacgatctgaaaagcgtcctgagccaaatgggcatcaccaaggtcttcagcgccgaggctgacctctctgggatcacctgaggaagggcccttgatgctgtccacaggggctgcaccaaggcccgtgtctgaccactcgaccgagaaagggagcctgaagctgccgggagccacctctttctggaagccatcgcccatgtccatgccgcccagtgtcgacttcaacaagcctttcctcatcatcatcgtcgacagagacacccagagtcccctcttcatgggaaaggtggtgaaccccacccaaaagtaactgccttgtgggtcaggtcccttccagataccattaaagagtgacccaccccaggaaaaaaaaaaaaaaaaaaaaaaaaaaaaaaaaaa

SEQ ID NO: 9761 - DNA, 394 bp, Canis familiaris
ccgtatcctgatcccctcatcaaggtgatgataccattcagattgatttggagactggaaagattcggatttcatcaagtttgatactggtaatctgtgtatggtgactggaggtgcccacctgggaagaattggtgtgatcacccaccgagagagacaccggttctttgatgtagttcacgtgaaagatgccatggcacagctttgccacccgacttccacatttttgttattggcaacacaaaccggatttctcttccccgtggaaaggtatccgcctcaccacttgctgaggaaacagagactggcagcccaacagagcacgtgggtaaaatggtccctgggtacgtgattgaagtctttatacttaattaaaagagttctatacgcaccc

SEQ ID NO: 9762 - DNA, 676 bp, Canis familiaris
atttttttagcatttagtcttttgaggaaaaggttttggaggcgaattgtatccacagaaatttggagactgggttcctctgttctggtgagtttatggggttgtctcctagcttctcataagactcatagcataattaaccattatgtatgagcttttgcctgttagcatatcaaattcttaaagggaattcagctttattactatcagtacatgatcaaacttctgtatttgtcctgggaatgacggagaaagggaaaacctgttaattcataagtaaagacttaaaattagtgtttaatttttgaaaattgccctctctgttcagctgataccggttactgatggttacatgtcctagggaaagtttcaaattaggaaatactgctctctgacattattcatttctaagtcctgggaagaagagcttggaaagcttctgagtatggagaagttccatatcgggaagaggtcccctcatagaagtatgaaagtattatagattctaaactgagacttaatcctcaaatgtgtttattttacttgtcctaaaataatctgtctacgaatataaaaaactgtaagtaattgttattttcccactgtaggaatctttaatgtgaaaatgtattctatgaaaataaagttttttaaaaaataaaaaaaaaaaaaaaaa

SEQ ID NO: 9763 - DNA, 643 bp, Canis familiaris
cgccccccccgtggcgtgtcgatcgagccccctttcgaacgtctgccctatctaacatttctgaatggtagtctgccgctgcctaccactggtgaccaccgggtgacggggaatcagggttctgattcccgagaagggagcctgagggaacggctacccaccaacccaggaaggcaagccagcggcgccaaattaccccaacttccgggaccccgggaaggtaagtggaccgggaaattaccaataccggaacttcttttccggagggccctggttaattgggaatggagtccaccttttaaatccgtttaacgagggatccacttggagggcaaagtctgggtgccagcagccgcgggtaattccagctccaatagcgtatattaaagttgctgcagttaaaaagctcgtagttggatcttgggagcgggcgggcggtccgccgcgaggcgagccaccgcccgtccccgccccttgcctctcggcgccccctcgatgctcttagctgagtgtcccgcggggcccgaagcgtttactttgaaaaaattagagtgttcaaagcaggcccgagccgcctggataccgcagctaggaataatggaataggaccgcggttctattttgttggttttcggaactgagg

SEQ ID NO: 9764 - DNA, 650 bp, Canis familiaris
ctgaccataggtaacatgagagaactcactctgtcaatataaggaatggagaggtcttcagcaccagctctcacctttaaacacactattgggcctgcacgggggagaacccctagatctataatcactgtgaacagtatgccacaagcaccaggtgtagtgtacacagaaaaccccagtgaagtctgaataaacactaacacaggatgtaaggatgaatattcttgaggaataaccattcatactgcggtgaaaaatcctcagaaaccctttgttcataaagaagcacttggggctgtacaaatcactcagtgtcagtgatcactcatttctcagccaatactgaagttcttatatgaagagatggcagttgtgaaatcattgtagagaattcacattagaaaaccaagtctagggaagaatctctaaaattagagcctctaactttcaatttagccaacaattcaagattttgagaaaaataactattcatggggaaaatgtggcatataaatgcaaaaaaaaaagtgattcaagcatattgaatacagaattttataagaaataaaactttttcaatacattattacttgtaaatatttaaacaataaaccctactgctgataaaaaaaaaaaaaaaaaaaaaaaaa

SEQ ID NO: 9765 - DNA, 646 bp, Canis familiaris
gcgaagggaaaacggcgagatgactgaccgctacaactatccacagccagctggagcacctgcagtccaagtacatcggcacgggccacgccgacaccaccaagtgggagtggctggtaaaccagcaccgcgactcctactgctcctacatgggccacttcgaccttctcaactacttcgccattgcggagaatgagagccaagcgcgagtccgcttcaacttgatggagaagatgctgcagccttgcggaccgccagccgacaagccggaggagaactgacacccccgtctcgtcactgccacgcgggagcgtgtcccgagttcctcccgtttgccgtttctcccgcgtgttcctgccccgaagtggaccggttctccattgctcctgtttctcgcgccttcctcgtgcacaagtgcttagctgaggccgtcccgcctgacctgctttcctgtggacccttaggaacagcgttgggagactgtcaggacccgtgagaactgagacggtggagaggtcctaaaccagcaagagaggggggaaggaactgggatcagacgggatttggaggctcttttttggctagttgattgtcgtttctttttccataaagtctagaagtttttcaatcaaaaaaaaaaaaaaaa

SEQ ID NO: 9766 - DNA, 683 bp, Canis familiaris
gcttgcccttgggatttttttgaacattttgtaaaatgctgtcttcctttctagtccacaaccacagcttttcagaatttgttctttttaattcttcttcctctgacttttgtatcccctaatacctccaccctctaattataagagaaagggggagcagggaagcaatataacttctgttctaaggttctgttctcatttacttactagctgattaacagagcatttatactggaaagtgtgttggagaaatttaaatactgagaggttttgttttgttcttacggtgcctattctagagcttggaagttgaacagctgttgcattacatactttgcttttcttattgaaattttgaaatcaaacatgtcttgattctttctgttctattgctatgttcaggatgcttttggaaaggggggtcgggggacagggactctcttcataagcacttgttttattttgtgtgtgtggagtataaaggttacaaccttattgtacaaataatgaataaaatgacaacaatcaccaccaccgtcattaacacctgtaacttgtctagtaaattgtcactagcaactatttgctgtgggcatttcttctattctgttatatcattattagtgccttaccgtgcaaggcaccaaaggaaataaaacatatacttgccaagatgaaaaaaa

SEQ ID NO: 9767 - DNA, 628 bp, Canis familiaris
atatctctgggttcatttacagataagttatgctctggacatcagggatgagtgaccacatgcaattgaatctgtgaggatagagctgtggccctgatacattgggtccaaaagcaggtagaagttggctaggactttgagtccttcagagtaatggagatccatgataccccatatagagtatggtcctttaggtcagactcacagtgaaatgaggatttgggaaaagctataacttgcaccctgagctagagtttaacaaacacaatgaacaaacataccaactgctgtttgtccctggtagtggaaggaagcagagaaatcaagacttgtgccagtctgctttccagctctagtccctaatagccctgatgaggaacaggagccctgagacacctagttctagactggaggtgagggtcaggagtgtcaggatctacatggtggctacactaattagtgtggagtaggtagaaagggaaagctaccacttaagatgagctgcaaattaatacaaaaaaacatagtggatgcttcaacttaatttttgcttcattgatctgttagtttctaataaagatatatttaaaattccccaaaaaaaaaaaaaaaaaaaaaaaaaaaaaaa

SEQ ID NO: 9768 - DNA, 583 bp, Canis familiaris
ggttcaacacgtcctccctgctgaagcagctgtacgagcagtttagctgggtgtccccactggctaacctcactcaaagtgaagaccccttctatctccaggtcacgacggtgggttctcagacttctgacatcccatgttcccgtgggcttctactaaggtggttgtgaagctcttttgattcttgacccccatcaccggtgatgatccccagaagccagttcttccagggaccaatccctagaatttaatgggagaccttgttggccaaaagaaagcttcttcaggagtatcgccaaaagcaccgagaggaatgagatgtgaacattgcttctccaaatatgggagggctgagttcctttgaccccaagatgagtgctaggcccctagagagagctctgcatgtcaccaagtgaccaggccttgcctcgaggcgctcctgtctcctaacccagctttccttcctctggactccgcactgtaacgcctacgtttgctgatcatgggaagaactcctgtgtgccactaactcaataaaaccgccaaggaatctgaaaaaaaaaaaaaaaaaaaaaaaaaaaaa

SEQ ID NO: 9769 - DNA, 506 bp, Canis familiaris
taggccttggtatgaggaaaaatcagggtaaaacctactatgaagaggatgtgtcactcttcttccatcttctagtaccctggttcattcccagagtagatatttttagaacacactttaattttaggggaaagacatcagttgtacattttacatttgtaaaagaacaaatgggggaaactgagaactaaaaatgtattatgccatccctgagcctaaacacagtacttgtagtttctttctgggtctaccggaacctgaatgggggcggggggaagtgtcctggctttaatcaaggcctgtgaggtttaaattattgccctatccgctctacctccattgtacaagaaatattttacaaccagcctgggcaagattcaacagcatagtagttttgtatccaagattacttccccacaaccactttaagggtaagaaatgaagtggcaatataaagtttgtagcctttccaataaaggtttataaaacattaaaaaaaaaaaaaa

SEQ ID NO: 9770 - DNA, 519 bp, Canis familiaris
ctctctgtctctctttttaggagtaattatactaattttaagagcattcccccaccctccctacacaaaccaaacatggtggtgttgccttcaaaccagataagttttgtgtcattaacatgacagaagaacttttttaaaaatgtaactgtcatgtatacgatttacatttaggagactgttaatctatgctagattgttattttccccccttctcccacaaaagtttactggtaatccatgtcatggctcatagctgtccctctaaccatactctggaaatgtagtcacccagtgtgaaaagaaccacttgctgggcatcactgacaccattcatgttttactgatagttgagtaatcagcatatctagaattaccttgcattgctgaaatcatgtgtatatagtgaatgttatataataaacctggcaggtctgttttaatttaattgaataaagatacaaatactttgtttgactggcatatattaaattattatatggagaaaaaaaaaaaaaa

SEQ ID NO: 9771 - DNA, 443 bp, Canis familiaris
agtctaattgagccaagatgagatttattcaagcttggcagtcattaccagaatttggcatcacacactttattgcaaggtttcagggaggaaaaaaagaagaacttattggaattgcatacacagactgattaggatggatgccagcaccaggagatgcaattaaaacatggcgcttcagtaacatgaaaccagtggaatgtaaactgggaaataaaaatggtcacggtagagtttgcagatgaagtacgattgtccttcatttgtacggaagtagattgcaaagtggttcatgattcattggtggtacatatttctctcacacgtgcaaaagaccaatgagagttagtgagagatgttctacaattaccatgttgggtgtgatagaacatggtgatgaatccatgccatacatattaacttgaagcgtgtttgtatatctg

SEQ ID NO: 9772 - DNA, 635 bp, Canis familiaris
ggggacctgcgactgtctgcggaagatcttcaaagatgaaggggggccaagccttcttcaagggcgcgtggtccaacgtcctaaggggcattgggggccccttcgtgctggttctgtacgacgagctgaagaaagtcatctagacattcctcctccagacaccgggggccacagggaatcacgtagaatccttttaactgttacggacccttgatcttcgagaaattcccgtgtccttgtcccggcccgatcacgtagacacgggctggggaaggttcccaagggggctcacttgtgatcgatcatcggcacccacggttccactgttttgattccgcgggggagggcacatcatgacgtcttcgtgggtccacgggctggcagttccgccgctcagaccatagagtccacggtgcttgtgggacccgggttgtgtttaagtatttatttaaaaaaaagaatcatgtctccactttgtacttaagcacctgttctcttttgcacagccgaatatttgccattatgttccacgtcgggcattttgctgccaaaccataaaaactgggaacccagagaaaaaaaaaaaaaaaaaaaaaaaaaaaaaaaaaaaaaaaaaaaaaaaaaaaaaaaaaaaa

SEQ ID NO: 9773 - DNA, 578 bp, Canis familiaris
cccggggctgcgtgggcgagcagaggctaaaggtcttcagcagagccctccaggaggcgctaaccgagcactacaaacaccactggtttcctgagaagccatccaagggctcaggctaccgctgcattcgcatcaaccataagatggaccccattatcagcaaggtggccagccagatcggactcagccagccccagctgcaccggctgctgccccgtgagctgactctgtgggtggacccctatgaggtgtcctaccgcatcggggaggatggctccatctgcgtcctgtacgaggaggcccctgtggctgcctcctatgggctcctcacctgcaagaacccaatgatgctgggccggagcagcccctcgaaaaactatgtgatggcagtctccagttagatcccctgccacccctgaccaggcactctactgtactcattctgccgtgacaacaggccactgaatacctcaacctgggggactgtattttaaatgaagatatatatatatatatatattttttttttttaagaaaagaaaaaaaaaaaaaaaaaaaaaaaaaaaaaaaaaaaaaaa

SEQ ID NO: 9774 - DNA, 697 bp, Canis familiaris
  misc_feature (166)..(166): n comprises a, c, g, or t, or includes no nucleotide
ctcattctgggctagggtgggtgaccagccctgatttgtgcctctcgtttggggacaggatcctttccctttcttgctttggggcttcttgagagttcagagtacccactatagtttggctcttaaggtatagctttctgtatttgctgggttttgtttggggccnctggaccctgtgctttctggtttctcttgcctcatttagggagcatctcacaacacaattgtttatatctggtggttggactagccacaggccgcctctagatctggaaccaggccaagccagggctttgtaagggtaagaggaacactgagcaattcaggggccagctactgtgagtttgttgctaagctttgagctgtcagagaaacatcttgaacctcaatcttgggtctgaatgagactctttaagtgtttttacaattttgtgtcttatttatggaatgatgtatcccttccattcagagcagccccacccagccatcctctcagcctctgggctcgttcctgcctcctaaaagcagagctgtctggttggtctccaccctgtgttgggagcccagccaccatgctcacgggtatttttcctcaaagtttataagcagttatttatatgaatccttgttatgtcaactggtttgtattgcctattttgattataaaataaaatatttaacaaacaaaaaaaaaaaa

SEQ ID NO: 9775 - DNA, 286 bp, Canis familiaris
cgctcgggcttcttccgtaacccaagccaagccacaccgctgtgtctccccgcatctggggcgtgggtggttctacctgggggggtggcctgagccctcagagaacagcatgccccagggcatggccggctgcctccggggccccgtgggtcacagggtccaggagaccctgggcgtctgttgcccacgatgctggtgactgagctggggcgcagcctgtgaggtgttgggccggttggcctcagaggagcccacaattaaacgtattccaccggcaaaaaaaaaa

SEQ ID NO: 9776 - DNA, 569 bp, Canis familiaris
cccagaaccccaccaacgccctgaaggtgcctcaaaggttctgggggaacccccaagagcgatgagaattgaatgtgaaaagtggttggactttgaaacacttcctgccccaatgctccagactgtgcccaaggaacaaggaccagggccaccctatgaggactacgtccgaagccttcggtgtttacaaggaagggaatggcaccgtcatgggtgctgaaatccggcacgttcttgtcaccgctgggtgagaagatgacggaggaagaagtagagatgctggtgcggggcatgaggacacaatggttgtatcaactatgaagcgtttgtgaggcatatcctgttcggggtgaccggcccatgggcggagctcgtccgtatggtgctgaatggctgaggacgttcctggtgtgcccgagccccgtgccttcccccgtgtgagactgcatgtagccccgaaggcgtcctaggtcctcttgtcacagcacctttgccagcttgtctctcttggatatttgctatcagcagtcaccaataaacttgctctgtgccctaaaaaaaaaaaaaaa

SEQ ID NO: 9777 - DNA, 688 bp, Canis familiaris
  misc_feature (1)..(1): n comprises a, c, g, or t, or includes no nucleotide
ncagctgggtcccggtccggaattccgggatggccaaggtgcaaactgtcttcggtcgtcccgaatccgggtttcatccgacaccagctgcctccgccatgccgcctaagttcgaccccatcgagatcaagttcgtgtacctgaggtgcaccggtggcgaggtcggtgccacgtctgcccttggccccgaagatcggcccgctgggtctgtctcccaaaaaggttggtgatgacatcgccacaggcaaccggtgattggaagggtctaaggattacagtgaaactgaccattcagaacagacaggcccagattgaagtggtaccttctgcctctgccctgattatcacagccctcaaggaaccacccagagacagaaagaagcagaaaaacacttaagcaccacgtggaaaatatcacttttgatgagattgtccaatattgcccgaaccagaatgccgaaccacccgattctttaagccaagagaaactttgctggaaccattaaagagatcctggggactgcccagtctgtgggctgcaatgttgatggccgtcaccctcatgacatcatagatgacatcaatagtggtgcacgtggaatgcccagcgagttaactacataggaaaatatttcaataaaggatcatttgacaacccgtgaaaaaaaaaaaaaaaaaaaaaaaaaaa

SEQ ID NO: 9778 - DNA, 103 bp, Canis familiaris
aggaggcaccccaaggccccgtgctctgacacagccagcccccagcttcaaaaataaaattccattggtattaaaaaaaaaaaaaaaaaaaaaaaaaaaaaaa

SEQ ID NO: 9779 - DNA, 328 bp, Canis familiaris
gggtttgaccccacaccgcccatatttcttcgccactcaggaagtgctgtccgggtccagctgatcagaccgcccaaaagatcccaccctttgtacccaatgatggttgtttgaactttattgaggaaaatgatgaggttctgttggctggatttggtcgtaaaggtcatgctgtcggtgacattcctggagttcgctttaaagtggtcaagtagccaatgtctctctcctggccttgtaccaaggcaagaaggaaagacccagatcataagttttggtggtaaaaacaggacaataaattttcatatacccaacaaaaaaaaaaaaa

SEQ ID NO: 9780 - DNA, 536 bp, Canis familiaris
  misc_feature (36)..(36): n comprises a, c, g, or t, or includes no nucleotide
ccgcccgcacggcttgggaggattttcgttgaagcntgagctccctcggggggccgggcccagggccgcacccctcctccagggccagcctcaatgccaggagctcctgcaggaagctgaccgagtcggcctcggggacctgactgaggttgtggcgggcccggctcagcctactgcgctgttcctcctggcgccgcaggtcaccctgggagcggcccagcatggtggcctccccctcctcgatgaagcccagcacctctgtctggaagccctgcaggatggccgcagcctcggtgaacagtcggctcaccttctcccgctctgccaaggctgcgctcttgatgagggccaccgtgcgccgggacagtgcaatgccagcgcccagctcatccatgcgatcctccacggcactcaggactttggattggtccgcctcctggagcgcgcgctcctgctccagcggcacgagttcgtggccccggtgctcctgggcggcgcaggcctcgcacaggcacacgcgctcggcgcggcagtag

SEQ ID NO: 9781 - DNA, 214 bp, Canis familiaris
  misc_feature (1)..(1): n comprises a, c, g, or t, or includes no nucleotide
  misc_feature (5)..(5): n comprises a, c, g, or t, or includes no nucleotide
  misc_feature (16)..(16): n comprises a, c, g, or t, or includes no nucleotide
  misc_feature (24)..(24): n comprises a, c, g, or t, or includes no nucleotide
  misc_feature (55)..(55): n comprises a, c, g, or t, or includes no nucleotide
  misc_feature (63)..(63): n comprises a, c, g, or t, or includes no nucleotide
  misc_feature (103)..(103): n comprises a, c, g, or t, or includes no nucleotide
  misc_feature (111)..(111): n comprises a, c, g, or t, or includes no nucleotide
ntttnccggcctgacnccctagcncatgatatgattcatctctaccctttagcangaaactanatcgagcccccttcgacttaactgaaggagaatccgaacntagtctcntggatttaacgtagagtatgcagcaggtcctttcgccctattctttctagcagagtacgcaaatattattataataaacatcctcaccaccattctgttcttc

SEQ ID NO: 9782 - DNA, 563 bp, Canis familiaris
attattctcctatcagtcctcctaataaacgggtcatttacactatccacgctaattattaccccagaacatatatgattaatctttccggcctgacccctagccctgatatgattcatctctaccctagcagaaactaagcgagccccctctcgactttaactggaagtgagaatctcgaactgagtctcttggactttaacgctagtagtaagcacgccacggtccctttgccgccctgattgcttttctagcacgagtacgcgaaatattattataataaacatcctcacaacaattctgttcttcggcgcattccacaacccattcataccagaactctactctattaacttcactataaaaaccctcttattaaccatctgcttcctatgaattcgagcatcataccctcgattccgctacgatcagttaatacacttattatgaaaaaattttctacccttaactttagccctatgcatatgacatgttgccttacccattatcaccgcaagtatcccacccccaaacataaaaaaaaaaaaaaaaaaaaaaaaaaa

SEQ ID NO: 9783 - DNA, 389 bp, Canis familiaris
cggccacagctgaagggagtggttttgcgcacattcatccgaaagcccaagaaacccaactcggccaaccgcaagtgctccgtgtgcggctcagcacagccgagaggctgtatgcttcatccccggagagggtcacagcctgcaggagcaccacgtcgtgctcgtgcagggtggccgcacccaggacctgcctggcgtgaagctcactgtcgtgcgtggcaagtacgactgtggccatgtgcagaagaagaagtgactgtccgggccgcagcaggctggggttcacccagaacaggatctttctctctggaggcctgcagtattcttgggaagctattccagttctggaagcacctggtcctgggtttaagtcctggcttcgcctcttc

SEQ ID NO: 9784 - DNA, 251 bp, Canis familiaris
gaaatgaaagcagtattgaaactattccatcctccccagcagcaagcactctgggtgaaatgatttcttcccaaacttgtaaataaactatctttgtagatatcttcaggtgtaaagtttgcaaatttgagaaaatacatatgttgacaccattgtcaaggtacattcccttaaaactaattaaatgtacatttctataataaatattttttaaactaaaaaaaaaaaaaaaaaaaaaaaaaaaaaaaaag

SEQ ID NO: 9785 - DNA, 572 bp, Canis familiaris
  misc_feature (1)..(1): n comprises a, c, g, or t, or includes no nucleotide
ncatgctgacatctcccccttctcctttggtccgatcatccacgcaggtgtttgataatggcagcatctacaaccctgaagtgcttgacatcacagaggaaactctgcattctcgcttcctggagggtgtccgcaacgttgccagcgtatgtctgcagataggttacccgactgttgcatcagtgcccccttctatcatccatggatacaagcgggtcctggctttgtctgtggaaactgattacacctttccacttgctgaaaaggtcaggccttcttggctgatccaactctgcatttgtggctgctgctcctgtggctgctgcccccacctgctgcaccctgctgctgccgcagcccccgcccaggttgaagccaaggaagagtcggaggaatcggacgaggatatgggatttggtctctttgactaatcaacccaaaagcaacccattcagcccagtttatttgtgaaaccaggaaataaaggcttacttctcttaaaaaaaaaaaaaaaaaaaaaaaaaaaaaaaaaaaaaaaaaaaaaaaaaaaaaaaaaaaaaaaaaaaaaaaaa

SEQ ID NO: 9786 - DNA, 592 bp, Canis familiaris
cgcaggcatttcggttctgggagatttatccaagggaaaaagggtgcgtacggtctggatgcactgtactgaccaatgaaaagaaaggcttcacaaaaggtctatatactaaaatcctttataactactgagctaaccctcttgagtatttactgtccagttcaggagttttgttttgttttgtttacatgtgtggccaaatcagtgtgataggagggggaaaaatgaaataatataaaaattaaaaaccccacctgcaacaacacattttatggtagcttttacttttttatgaaaagaatattattggccgttttaattctttcgttttggtcccatccaagtcttgatagtaagcattattttgggggtagaaatagtgaaatctctagcctctttgtgtgtttttgttgttgttgttttatataatgcactgtattcactaaaataaagtttaaaaaactaatgtcttgctagacaaggtttgctgttgtgcagtgtgcctgtcactactggtctgtactctatggatttgcatttttgtattttgtacagagtaaaaataaagtgttatgagtagtaaaaaaaaaaa

SEQ ID NO: 9787 - DNA, 635 bp, Canis familiaris
actttctcatgaactcaccattccaacgatttgattggctgcataatcgggcgtcaaggcgccaaatcaatgagatccgtcagatgtctggggcgcagatcaaattgcgaacccagtggaaggatctactgataggcaggttaccatcactggatctgctgccagcattagcctggctcaatatctaatcaatgtcaggctttcctcggagacgggtggcatggggagcagctagaacactgcagattcatccataatccctttctgctgttcaccaccacccatgatccatctgtgtagtttctgaacagtcagcgattccaggttttaaatagtttgtaaattttcagtttctacacactttatcatccactcgtgattttttaattaaagcgttttaattcctttctctgttcagctgttaatgctgagatccatatttagttttataagcttctcccccctttttttttggctcatgaatttttctgtttgtcatggaaatgtaagagtggaatattaatacatttcagtttagttctgtaatgtcaggaatttttcaaaaaaattaaaagatggactggagctttttctttgtgaatagaaactggatgccacagtgaaaaaaaaaaaaa

SEQ ID NO: 9788 - DNA, 462 bp, Canis familiaris
tatattgggtttcgccgaatggcgaattttgaagattgacactcaccttatctggctgtacacgagtatcgaaatgggcacgactatgattactaccagcgtcactatgacgaggatcgccgccatcggtcccccgagcccctacagcttcaggcacggagccagcgtcaactacgatgactactgaccaaccacccctcggccctcggcgccccggccgcggaggtgacccactgggctgccttgcaccacgtggcttccgctgggctttactccagcagatcttgcctaccccctttctgcagccaggaaggaagagttaaaccatataaatgcctttgatatttcatgcaagtgcctaacatcgcatttcatttaaaaaatagaaataaaagcagtttgttaaaaaccaaaaaaaaaaaaaaaaaaaaaaaaaaaaaacaaaaaaaaaaaaaaaaaaaa

SEQ ID NO: 9789 - DNA, 660 bp, Canis familiaris
  misc_feature (1)..(1): n comprises a, c, g, or t, or includes no nucleotide
ntcccgggatcatgcgcaggatcaaggtgaaaaggagaaccccatgcggagcttcgcatccgcaaactctgcctcaacatctgtgtgggggagagtggagacagactgacccgcgcggccacaggtgctggagcagctcacgggccagacccccgtgttctcccaagctaggtacacggcttagatcctcctggtatcagcgagaaatgatgaagatttctgctcccctgcacactccctcggggccccaacgacaagagatctcctgggaaaagagtctctaaagaggtcgcagagatgattatagagtttagagaaaatatacactcttctccagtatcacgtggaacactttgggtttgtgggatcccaggacgcacatcgatctggggatcaaatatgacccaagcattggtatctacggcctggacttctatgtggtgctgggtaggccaggtttcagcatcgcagacaagaagcgcaggacaggctgcattggggcccaacacagaatcagccaagaggaagccatgcgctggttccagcagaagtatgatgggatcatccttcctggcaaataaattcccgtttctatcccaaaggcccataaaaacttttcagtgaaaaaaaaaaaaaaaaaaaaaaaaaaaaaaaaaaaaa

SEQ ID NO: 9790 - DNA, 571 bp, Canis familiaris
tcatctcattattcctcacagattcgtattctccagagtatccaggtccatcgcatagaattataaagactgtacacggtggaacaatccaaggttttaatcaaagaagctggtgttcagttgctgctcaccatagttgataccccgggatttggagatgcagtggataatagtaattgctggcagcctgttattgactacattgatagtaaatttgaggactacctaaatgcagaatctcgagtgaacagacgtcagatgcctgataaccgggtgcagtgttgtttatacttcattgctccttcaggacatggacttaaacccttggatattgagtttatgaagcgtcttgcatgaaaaagtgaatatcattccacttattgcccaagcagacacactcactccagaggagtgccaacacgtttaaaaaacagataatgaaagaaatccaagaacataaaattaaaatatatgaatttccagagacagatgatgaagaagaaaataagcttgttaaaaagataaaggaccgtttacctcttcgctgtggtcaggtagtaatacgatcatt

SEQ ID NO: 9791 - DNA, 679 bp, Canis familiaris
tataggacaagtttgtaccaaaaacaggctgtacccgtccgggattcccgggatctctcccctctgctactgcacaagccagtgagaccaacccacaggaccacggagagaccatgaagagcctgctccttctctccattctggctgccttggccgtggcagctttgtgctacgaatctcatgaaagtatggaatcctatgaaattaatcccttcattaacaggagaaatgccaatacatttatatctccgcaacagagatggagagctaaagcccaggagaggatcagagaaaccaccaagcccgcctatgagctcaaccgggaagcctgtgatgacttcaagctttgcgaacgctacgccatggtttatggatacaatgctgcctacaatcgctatttccggcatcgccgaggaggcaaatgagattgaaaaaagtctctttccttccagagcctggtgcctggttttgtattcctttacagtagcatcatcgaactacataaacacatacaaattgcttatttcttaaatgttcttgtctggctgttgccctccttcctgccccccagatcaataagcagtgaaagtgcatgtggtgaaaggtcaaaagagaattaagatgtgtgattattattacataataaactcttggatggatactttcaaaaaaaaaaaaa

SEQ ID NO: 9792 - DNA, 643 bp, Canis familiaris
actcagttgagacctacccacatggacctcggagagtccatgtagagcctgctccttctctccacttctggctgccttgccgtggcagctttttgctacgaatctcatgaaagtatggaatcctatgcattaatcccttcgttaaccggagaaatgcccatacatgttatatctccgcatcagatgatggagatgcctaaagcccatggagaggatcagagaaaccaccaagcccgcctatgagctcaaccgggaagcctgtgatgacttcaagctttgcgaacgctacgccatggtttatggatacaatgctgcctacaatcgctatttccggcatcgccgaggaggccaatgagattgaaaaagtctctttccttccagagcctggtgcctggttttgtattcctttacagtagcatcatcgaactacatatacacatacaattgcttatttcttaaatgttcttgtctggctgttgccctccttcctgccccccagatccataagccagtgaaaatgccatgtggtgaaaggtccaaagagaattaagatgctgtgattattattacataataaactcttggatggatactttccaaaacaaacaaacaaaaacaaaaaaaagaaaaaaaaaaaaaaaaa

SEQ ID NO: 9793 - DNA, 181 bp, Canis familiaris
ttgttttgactgtttatattggcatgtttagactgtcacggtttagtcttctgacagatgaagttcagccattttgtatccaacagcacaacccgtgtctgtcactttccatgcataaagtttagtgagatgttatatgtaagatctgatttgctagttcttccttgtagagttataaacg

SEQ ID NO: 9794 - DNA, 588 bp, Canis familiaris
gctgcctagtctatgctggggccacaggataaactaatgcattgtcctgtggtttgtgtaaaccctattatgctttccatggatgaggcttgagttgtacaccttgaagtaagcccaacctgtataaggggagttataagtacattgactcttgttcaccttggtgggacaggctaaagggggaggtggttgaagtccacagagttatgttcttcaactccacacttctgcacccagtcttttcgaaatgtgaaaggaatacctatcatgagtcagacctggagtccataacctcagaaggcaatatctatctggctgagaatgtagaaggatcaagaaagctttagttaaattcttgacattcaacatgacacggtgcatgttgatgccctatggaagatgtccttgtgctttaagaagaggtcactgatggaggaagatctcctacctgttcttggctctaccggtagaacagtcttggggtgggcgagttatagagctgagctgctgtctcgattctgttcttacattagccaaaaaccattaaaaaaaaataaaagcaactttggatttcaaaaaaaaaaacaa

SEQ ID NO: 9795 - DNA, 106 bp, Canis familiaris
  misc_feature (1)..(1): n comprises a, c, g, or t, or includes no nucleotide
natcctggagaccctggatcgaatcccacgtcgggctcccggtgcatggagcctgcttctccctctgcctgtgtctctgcctctctctctctctgtgactatcata

SEQ ID NO: 9796 - DNA, 579 bp, Canis familiaris
  misc_feature (130)..(130): n comprises a, c, g, or t, or includes no nucleotide
ttgttggtgggaagagtatccccactgtggattatctcacgctgataaagggagatgttctttgtagatattggactgtttcccgatgttacactcgtatatatgactatgagtaagcactaccacatgnatatgtatatgtacaccttaccaatacgtgtacgtattatcccttagcctaatgggggaggttttatgtaggcttattaaaatgtctgagtttaggggagttcgaaaaaatagtttgttaagtgtgcccacgctgagtaattgctttatgtgattacttttggtctttgtaaccatcctggaggttggaagaggaaatggctttaggccccctttccccaagaccaaactgaggctgagaaagatcagatgatctttccttctctgttctgaagtctgaaattctgtgtaatgttaaacttctaagaacttagattagtaggcatactgatagaatctgtgtaaaggtacttaaaaactatcagccatagttatttatcccataaatatttactgtaaaaaaaaaaaaaaaaaaaaaaaaaaaaaaaaaaaaaaaaaaaaaaaaaaaaa

SEQ ID NO: 9797 - DNA, 594 bp, Canis familiaris
atcatggggcgttggctatcattatgctactttgccttgaagggggccctaaaaatcaaagaatcacttacatgcactctgaaggcataccttgctggtgaattgaaacatggccctctggctttggtggataagttgatgcctgtcatcatgatcattatgagagatcacacgtatgccaagtgtcagaatgctcttcagcaggtggtggccaggtcagggacgcccagtggtgatttgtgataaggaagataccgagaccattaagaacacaaacagaacaatcaaggtgccccacctcagtggatctgcttgcagggcatttctcagtgtgatccccttacagttgctggctttccaccttgctgtgggagaggggctatgacgttgattttccccggaatcttgcctatctgtaactgtagaataacggagcatctgcaactctgggcgattgagcaacacaagacaccttttgtatttaacaccttgatttaaaatatcaccccttgaagccttttttagtaaatccttatttatatatcggttataaaaaaaaacaacaaaaaaaaaaaaaaaaaaaaaaaaaaaaaa

SEQ ID NO: 9798 - DNA, 563 bp, Canis familiaris
  misc_feature (151)..(151): n comprises a, c, g, or t, or includes no nucleotide
actcaagggaaaagccgtcatcataagaagctgtcactcatatccatttgtcaggatcctacagtccagtcatccacactacaaatgggctcctatgtgttctatctttccacataacccaagtgatgctttagtaactaaaaggaattcnctggtttccctgtgaactctcagctggagtcctgtagaccagaccccactccaagcagaagatgaatttacacgaggacacagcagcccaaagggagaagaaaaccccacacagtcccagtatcctctaggaaatcagacccagaagcccagccaagtggagaaggattctagagcagcagcggacccccagtgagagcagtcatttgttagccatgcccattggaacatagccagaaaggactcctgcttccacctttgatttattaaaaatacatggttgaggttcagcgagtaagtccacttcatatctgaagtttaggatgaaacttttcctattatttaggctgaaagtggaaattgtgggtatattacatggcttcccagacttggaataaaaatgtcttggcacg

SEQ ID NO: 9799 - DNA, 544 bp, Canis familiaris
aagaaggatgatgccgttcggaaggcatacaagtatctagctgcctttgcatgagaattctgcagccagctcatccagaccactcgaggatacaggcacaatcatgcgggaagttcgagatcttgaggaacagattgagatggagatggggaagaagacgctcagcaatctggagtaagatccgcgaggactaccgagccctccgccaggagaatgctggcctcctcgggcgggtccgggatgcctgaggagcccccagcacctgtctgctcccagcctggcctccagtggggagttgagatgttgggggcgatagccagggcttgccctagccattccctctggtggctgcgcagctcctcttgctacggccttggccccagacccctgcccacctgacccccacccttatctagggtgatcatctagagcatggaaactcagctgcagtttattggagagggtaccggggttaagaccttggatccccaaataaatgaagggctctgtctgccaaaaaaaaaaaaaaaaaaaaaaaaaaaaa

SEQ ID NO: 9800 - DNA, 576 bp, Canis familiaris
ctggactccagcaggcccctgccgtgggccgagtccgtggcggagatggtgcttgcaaggccacttccagactatcgacctgagcccctttctcttcaacgccgcttttactctgggagtgaaggtccaggagcaccatatcgtctgagccgtaagctctcagatgggccccgctgccccatccgtcagccttggcccacatgcacattttcctcaccatggctttccccagcactaacccaggctctcctgtccccacaccctgctcatccggcggcggggcaggcaggccaaccgacgggctttgaggcactgcacctgaggcccaggtccatacagagtgatgggtgagactgcactgacccatctctgtccggggtggaggccacccaccgaagtagtacagctggactactagtatacctgaccatgtgaccgagaccggctccttcctggtacccaggcagggagcattcgggcagcctggcccggatgtagtgactgtctaccctagtcatcaagccaataaatgtgattactcttgcccaacaaaaaaaaaaaaaaaaaaaaaaaaaa

SEQ ID NO: 9801 - DNA, 514 bp, Canis familiaris
ggtgaggagatgacactcgaacagttccgttgactacttttaagacacgagcaataaatgtggagatcaccatgctgtcccaagggtgtgtccatgctctactccttcttcatgccagccgccaagctcaaggaacggttggatcagcccgatgacagagatcgtaagccgtgtgtcgaagcgaaagctgggccgccatgtgcgggcgctggtgcttgagctgtgctgcaacgacgagagcggcgaagacgtcgaggttccctatgtacgatacaccatccgctgacccctgtccacgcccataggctggccccagccctggctcctaccccaccccaccccccagcccagggctcccatcaagcctctggcagtggtccagctagccacgcctggtgtcccctcctcatctccctccctgcacccctcttgccgctgctttctaccttatttggaacctgaatcctaataaagaattattaaccccaaaaaaaaaaaaaaaaaaaaaaaaaaa

SEQ ID NO: 9802 - DNA, 637 bp, Canis familiaris
ggtccagttcccgtgacgtctgttccccatgcccccctctagctggcgcatccttcccagctactgctggtttctccaggctccctgttgaagtccatatagtattgtggctgttaagcacctggtgcttaagcctggatagcccccacttcttgcaccaactcgcacttggcagtctctgcccctcggacgaggccctcaggggagcacagctcctggggtcccttgagggcagggggcatttctgctcctgcaaatctaaactgttttgtttcagcagcttacctacaccatcatcccacttgccccatctagatcaagtctgcttccgcgttgctccctgcggctgtaagccagaggggattcaggggaagttcactttacagcaaatcccctgctcccctctgcccagtgctgacggaagcccctcctccataagcaagttcattctttcagtgccattggcatctacatagacaggtgtgagagtagatgtgtaggttactctacatgtatctgttctttcttcaaaaccatgttaactttgtgaaacgacttttacactcccacacgctttacagcagaagaaataaaggaatatgaaaaataaaaaaaaaaaaaaaaaaaaaaaaaaaaa

SEQ ID NO: 9803 - DNA, 675 bp, Canis familiaris
gccgagctggtttgtcgtaagacttatgtgaccctccgaggcccttcgagaagtcgcgccttcgatcaaggactgaactgatcggcgagtacgggctccggaacaaacgtgaggtctggagggtcaagtttaccctgccaagatccgcaaggccgcccgggagctgctgacgctgggacgaaaaggacccgcggcgcctgttcgaaaggtaattgcccttactgcgggcgaccttgtacgcatcggggtgctggatgagggccaaaaatgaaagttggattacattctgggcctgaagaatcgaggattttcttagagagacgcctgcagacccaggtctttaagctggggcttggccaagtccatccaccatgcccgtgtgctgatccgccagcgccatatcagggtccgaaagcaggtagtgaacatcccgtccttcattgtccgcctggactcccagaagcacatcgacttctccctccgttctccgtatgggggtgccgcccaggccgcgtgaagaggaagaatgccaagaagggccagggtggggctggagccggtgatgacgaagaggaggactgaacccacccttccatccctttcaggcccgtggattatctagttttctaggcccaataataaaacagtgttttggaaaaaaaaaaaaaaaaaaaa

SEQ ID NO: 9804 - DNA, 236 bp, Canis familiaris
ggccaagaattgtggtaaatctggatagactgtattgccagaaacacgaccgagaagtaaacctgaagttcaaaagcgatctaggagataaacgacccggtcgctgcattgacccgaatcacactttagcaccaccgcgttgccccacgcacagcggcagaacttgaagggttactgacgtataaacgctggtgtttgatttcctgtgtgtgttgcctcagcattaagggcatttt

SEQ ID NO: 9805 - DNA, 614 bp, Canis familiaris
cattccaaggacatcatacccctattgtcacctaagggcttctgatttcggtataggttctttttatcgtatcagaagtattttttctttgcaggcttcttctgagccttttaccactccagcctagcccctactcctgaacttggggttgctggcctcctaccggcattattcctcttgaacccattagaagtgcctctactcaacacctcagtcctcctagcctccggagtatctattacttgagcccatcatagtttaatagaaggtaatcgcaaacatatacttcaagccttattcattacaatctccttaggcgtatattttacgctattacaggcctccgaatactatgagacatcttttaccatctccgatggggtgtacggatctaccttttttatagccactggattccacggattacacgtaattattggctctacattcctcatcgtgtgcttcctccgacagctatactaccacttcacatcaaaccaccacttcggatttgaagccgctgcatgatattgacactttgttgatgtagtctggctattcttgtatgtatctatttattgatgaggatcctaaaaaaaaaaaaaaaaaaaaaa

SEQ ID NO: 9806 - DNA, 631 bp, Canis familiaris
  misc_feature (1)..(1): n comprises a, c, g, or t, or includes no nucleotide
nacccatacaagcactatagacgcacaagaagtggaaacagtattgaaccaattctacccgtccattatcctcatcctaatcgctcttaccttccctccgaatcctctctataataatggacgacaattaaataaccccctcctttatcccgccgttgaacaactagtgccccccactgattactgccatagcctcatatgatatacttcagctatgatagaacatctttaccatctttacatctcatcactattcctccccacaccacgagaatatttaaaactcacagagagaaatctccgcatcttatatagagatatagcacaccgcgattttgcctctcccaatagaaatacccatccgaatacttatctcttccagaagaccgtttggccattcatgacccgttccatcactaggtctaaaaactgacgctattccaggacgactaaaccaaaccacccttatagccacacgaccaggactgtactatggccagtgctctgaaatctgcggatctaaccacagctttataccccttgttcttgaaatagtccccctatcttactttgagacctgatctgccttaatagtataacctagactagatctactaaaaaaaaaaaaaaa

SEQ ID NO: 9807 - DNA, 500 bp, Canis familiaris
ttgacctcctggccaggctgagcctcttacagcaccatgcgactgtgagcaccagcatggccagcgtcatctccagactggacttcaatggcttctactcggagcggctggagcgcctgtctgcagtagaggagccagaaggcagccccccaggtgcccatcccacgggccccctccagcatcagcgcccatggttcgccgtccctgcccagtgaggctgctggtgctgcagagacaggagctcagaagcttttacccgagtgtcgccgaaccacgtgttgttaccgtttaaagtctggatgtggcccctctcgctgccctcgtttgttggggtcctgggttccactctgcagcagccacccctgaccagagtgggtgtgtccacagccgtgcttccgtgagcttgcttcagttgtgccagggtgactttttataacgtgtttgttctcaaataaagacaaagtgaaaaccaaaaaaaaaaaaaaaaaaaaaaaaaaaaa

SEQ ID NO: 9808 - DNA, 595 bp, Canis familiaris
  misc_feature (394)..(395): n comprises a, c, g, or t, or includes no nucleotide
ggccctgatcgcattcccccagctagcctctggtcacagaggagttgaccctggggaagacaaacatggagtattcccatcctgtggagagcacactcccaggtaggagtttagactagtgtctgaaccgtggggccaacaatgcagcacgaatctagtctctgcgggaacaggccctgacttgttggcgctgcagtggcaggcttaccaagccactaggtggctcccgactggatggctccttccaggtcttactgttggccgtgtgggcccgaccctgccagtgaaaggctacaccttggatggcaccagctcctcttaggaatatatgacacaggtgaggaaaaaccaaacagttcactttattttggctgctctgcagggccaagggccnntggcttggagtcatacactcctggattccaggcttgttccctgggccaaacacaacttttgtttccacttccctctgaaatggggctaatatttacttgggtgttgatggttaaatgagatgtatgtaataccaaaatacgccaaataaaatatcctgagaatcgttaaaaaaaaaaaaaaaaaaaaaaaaaaaaaaaaa

SEQ ID NO: 9809 - DNA, 583 bp, Canis familiaris
cagtttgtggcactgtgttttggaaagcgacattaagccagctattcagaattctagggtccctgaaatttaatgcttggtagtaagtaagtaacctccaagttgagagagggtactgcctcagaatgttcatttaagagtatacagtcacagagcctaggaaaccgtcaagattctaggtgattgtgtcccaggaacatacctacccaaaatggaaaagcccattctaaccagagataggccccataccctgaaccattcatttatcagcatatagggttggatgtgtctcactgaatacacatgaggcatgaaggggccagggcagcgtgatttggccgagagtaaatgttccagtctgttgtgaggattgggtatcaaagtattagaaatacacatatccaactgatggggggggtgtgtgtgtgtgtatgatagaagtgccggtgggcctcgtggaggttgtgagtgatgcatcctagggcagagtttgagggtggaagagataattagccatccactttcaaggaaaagatgttacttagaaactttgaaatatgggctgtgaaagttctaggagaaa

SEQ ID NO: 9810 - DNA, 623 bp, Canis familiaris
cagtggaacactcctcagccaacaaaggaataaactatccttacatggcaacacatcgtggatgaatctgcacggttaattcagcctgagtgaaaaaaagccgaatatcccacaagggttataaattcttttgtggtgaatcccattccattgtcacaatttttttggaatgggagaatagattagtgatttgccagggtttagagctggagctgggagggaaggcccctgtatagaataaagaaaagattactgggaaggaacccagaagcctgaattccttttcatgtgaataagggaaaccatgtctggagaagtggtttgaccaaggctgatgcctgggaagtggcagaaggaagacctgaactggagttggtgtctcatgtgccatgatagtgcatgcttaaaaatgtgggctctggggtgctggggtggctccgtcggttaagcgtccactcttggtttcagctcaggtcgtgatcttagggttgtaagattgagctccatgttgggttttgtgctcagtgcagtctgcttgagattctctccctctgaccccctccccactagtgtacacatgtaaacacacacgcactctctctctaaaagtaaataaatctaaa

SEQ ID NO: 9811 - DNA, 647 bp, Canis familiaris
aacaggtctgtacccggttccgaattcccggattgcaactgtcttcggtctcccgaatccgggttcatcggacaccacttgcctccgccatgccgcctaaggtcgacccccaccgagatcaaagtcgtgtacctgaggtgcaccggtggcgaggtcggttgccacgtctgccctggccccgaagatcggcccgctgggtctgtctcccaaaaaggttggtgatgacatcgccaaggcaaccggtgattggaagggtctaaggattacagtgaaactgaccattcagaacagacaggcccagattgaagtggtaccttctgcctctgccctgattatcaaagccctcaaggaaccaccaagagacagaaagaagcagaaaaacattaagcacagtggaaatatcacttttgatgagattgtcaatattgcccgacagatgcgacaccgatctttagccacgagaactttctggaaccattaaagagatcctggggactgccccgtctgtgggctgcaatgttgatggccgtcaccctcatgacatcatagatgacatcaatagtggtgcagtggaatgcccagcgagttaactaccaaggaaaatatttcaataaaggatcatttgacaacccaaaaaaaaaaaaaaa

SEQ ID NO: 9812 - DNA, 496 bp, Canis familiaris
caaatgactacgcactcgtggtttcgaggggctgggggaccgtggagaaggtaaatgaacccaaaggcataaatccagggttcagatggacccagttaatcatgttgaagttatgtttctccccttattgtcaagtgtttagaccatttgtccaccatttttaaaatcccccctgtttttaaactctcgatattcttttggaccctactatgattccacgagaattccatatagaaagaaaagaagaaaagaaaagaaaaaagaaaagaagagaaagaccaaccctgtggcacgtggcactttaaccatataatatattgtaaacaccataaaatagggattataatgtatgacttttggccttggcttgaagccatataatatattgtaaaccagacccagctcttacataatgaacattttatactgtttgtataaaataaaggtgctgctttagttttccgagaaaaaaaaaaaaaaaaaaaaaaaaaaaaaa

SEQ ID NO: 9813 - DNA, 542 bp, Canis familiaris
gttcagcctcgctgaccctcttctgctagagctgccactccctggggttggcccgacgtcctgggtagaaatccactctcagctgggaggagatcttcgtgctcggcacacttctcacaagctaactggactatagcaccttatttctttttgtaccaaaccttacacagaaccacttcagatggctccactttaaaaccaacaggccaaaaaaaaaaaaaaaaataaaaaaaagtcagcatggttcctgaaatccactttttgttttcattagaaaactaacattctgtggtagagcaggtgccagagcaggttgtctatggatcgtgtttacgtagatcctcttcaaccggagggcttagctgtgagatggagtcttgaacatcctgtatccaccctgggttcagagtcaatgagacaagtcaccaggagaaatgtaggagacagatgttctatggtggctgcttgtattttatttgtgtatattgtatgttgagataattcaaataaaatccatagatattcagtgaaaaaaaaaaaaa

SEQ ID NO: 9814 - DNA, 494 bp, Canis familiaris
atatagttctcatagtgtaattacacgtatccccgagatttacaaagtaaagtgtttattgtgaagtgtgaggtattttgtttactaaaatgttgctgacctaaggttagaggagtgacttaaatatctttttaaaggaaattcctttaacttaacttctgtgactttgaaaaagaaggattgttacctttgatgattatgctctcttgatctgtatacctctttaaataaatgaaaccatacccattttaaaagttcttgtagagattgagacctgcccttataccaaattattctaccccttaaaattaattagatttgtctacatatctaaaagatattataacacattcttgtcttttctctttgccaaaatatttttaaattgagaaatgcgattttaattgtccatggaatgtaatttttaaaattatttttaataaaaatagaaacagctcagagctaaagcccttccaaaaaaaaaaaaaaaaaaa

SEQ ID NO: 9815 - DNA, 619 bp, Canis familiaris
cgtgcaggttgggtcttctgtatgaagagggtgtccgcaaggctcagagcagtgactccagcaataggaccttctctgtgtatacagcttctcgccagcagggccgctatgcaccccaagctatacacccagtgccccaatggacactaatctcttgagcgaacatccagaaactgttctctgaacgtattgatgtgttcagccccgtggagttcaacaaggtctcggtgctgactggcatcatcaagatcagcctgaagacgctgctggagtgtgtgcggttgcgcacctttggtcgcttcggcttgcagcaggtgcaggtggactgtcacttcctgcagctctacctgtggcgcttcgtgggcggacgaggagctttgtgcacctgctgttggatgaagtggtggcctcagctgccctgcgctgcccagacccagtgcccatggaacccagtgttgtcgaggtcatctgcgagcgtggctaggccagccgctgccatgcacgcacccgcttgcgccgttggtcgccccagcctccccatccctggtctcccgcccgctggcctttcccctccggcctccagacccgccaataaagacgtgttgttctcttaaaaaaa

SEQ ID NO: 9816 - DNA, 536 bp, Canis familiaris
aaatggtgctaagtattttacccattccttattatccctgatcatctgtaactactcactggaaattccattaacgattttacgacgtaaagtagaattggagaccctgaataattctgtggtaatattaaatggtttataactgcttttgtacctagctaggctgtccgttattaccatgatataagtgatatatatacacaggccttcattgctcctacattcttcttacggtcggagcactgaggacacagcctctggaccccccgggacagcgcattcccagggctcagctgggtctagactgttctctgcctccaaggactgtctggccatgacttgtattggccccccactgtagatgtatatacggtgcccttctgatgctaagactccagacctttttttttttttcggctttgctttttctgattttatacccactgtgtggactaagatgccattaaaataaacatcagagtaactccaaaaaaaaaaaaaaaaaaaaaaaaaaaaaaaaaaaaaaaacaaaaaaa

SEQ ID NO: 9817 - DNA, 621 bp, Canis familiaris
agatttgttgttttctctttaaaaagcccagacaggaatgaaaacagaccaattaaggctaaaatgaaaccacgactatgctatcaacaccccccagcccccattcatctgtggttcacagttaaggagttttggggggaggagcccactctgccccagggcaggcgtggcttccagtcaaagctggatcagtcgctgtcggagccacatccatcctgtgctattgaccacctgaccttagtgttcacatgtgaattccaacgttgacgtgtagcacttaaacatatttgggcttgtttctcaggtttaaatatttcaaatgtaattaattgttttaacccgtgcagttatcatgccattttatatttcctaaaagaaggaagagtgggtttttattgtacatgttgaaaagaagagggaagagtattatgtatttaatttaatttggaataagccatagtcttaaagagctgtggtttgaatttgttatcttgggctgtccactgcatgtagataccatatgctcttttggatgtaaatctgagaactgcagtatgaatgttatcattaataaaaccttaatccccaaaaaaaaaaaaaaaaaaaaaaaaaaaaaaaaaa

SEQ ID NO: 9818 - DNA, 646 bp, Canis familiaris
  misc_feature (1)..(1): n comprises a, c, g, or t, or includes no nucleotide
nttaccctaagatctctaggggcaccgtgaaatcttgagtgatgtgcagctgattagaccggagaccatatgtggggagccagcgaagccacactgctcaacatgctgaacatctcccccttctcctttgggctgatcatccagcacggtgtttgataatggcagcatctacgaccctgaagtgcttgacatcaccgaggaaactctgcattctcgcttcctggagggtgtccgccacgttgcccgcgtatgtctgccagcataggttacccgacttgttgccatccagtgcccccattctatccatccatggattaccagcgggttccttggctttgtctcgtgggaaactgatttacacccttttccccctttgctgtaaaggtccaggccttcttggctgatccctctgcctttgtggctgctgctccctgtggcttccttgcccacccctgctgcacctgctgctgccgcagccccagccaaggttgaagccaaggaagagtcggaggaatcggacgaggatatgggatttggtctctttgactaatcacccaaaagcaacccattcagcccagtttatttgtgaaaccaggaaataaaggcttacttctcttaaaaaaaaaaaaaaaaaaaaaaaaaaaaa

SEQ ID NO: 9819 - DNA, 649 bp, Canis familiaris
  misc_feature (44)..(44): n comprises a, c, g, or t, or includes no nucleotide
caggggcctggcacggaggacacaaggagggtgcttgtgccccnttcgacccttgcccagagcaagggggcaaggactctggctccagggtatttggggttctcccctcccttacactacacactcccctgtctctgtagcttctacccgtggtatgagcacgttggagttccgtgttggacactgggggaaaaagggggacttacctggtagaggtcccaccgcttacactggccatgcttcccccccaccactgggggcctgtgggacccgtggacccgcgtccgtcccctcttgctgccccccatttttgttgcctttcttagtttggttttccttttagattttaaccaaggtggcttgccgttgttgccccaccctatcgcccttctttcccccccaagtcctcagcaactttttccctcctgccctttctggggatgatggggagggtggatgcggggtcccctcgaccggccccctcaggaggcctgggttggactcagggtctcctgcagctgggggctggaccgcagcacctgtctgagcagttagagcgtctttcttttcagatcgtgtacagtagattatttattttgttattttggaataaaatttattttatggcttaggaaaaaaaaaaaaaaaa

SEQ ID NO: 9820 - DNA, 641 bp, Canis familiaris
  misc_feature (394)..(394): n comprises a, c, g, or t, or includes no nucleotide
atcgcgatgatgtggctttgaagaacttggccccaatatgtttctcccccccatctcatgaggagagggaacatgctgagaaactgatgaagctgcagaacccacgaggtggtcgaatcttccttcaggatattaagaaacccagaccgtgacgattgggagaatgggctgaatgcacatggagtgtgcacttacaccttggaaaagagcgtgaatcagtcactactggaactgcaccaactggcccctgataaaaatgacccccacttgtgtgacttcacttgagactccttacctgaacgagccggtgaaatccctccaagaattgggtgaccctgtaacccacctgcgccagatgggggcttccccgaattctggccttggccaggaaggnaattccttccttttgaccaagccacacccctgggaaacagtgatagtgagagctaagccttaggctgtcttcccatagccgcagggtgacttccctggtcaccgaggcagtgcatgcatgttggggttacctttaccttttctataagttgtaccgaaacatctacttctttcgtttgtatcattccttcaaataaagtaatttggtaccccaaaaaaaaaaaaaaaaaaaaaaaaaaaaaaaaaaa

SEQ ID NO: 9821 - DNA, 579 bp, Canis familiaris
gggtcctgcttgtcacaggatatcccgggatttattgtgcccggtgtgggtacttcacgcggtccaccatggcactggaggcaagtccatctacggggatgaagtttgatgacgagaacttcatcctgaaagcacacacgggcctggcatcttgtcccatggccaacgctggacccgacactaacggttcccagtttttcatctgcaccgccaaagactgagtggttggacggcaagcatgtggtctttggcaaggtcaaggagggcatgaacatcgtggaagccatggagcgcttcgggtccaggaatggcaagaccagcaagaagatcaccatcgccgactgtggacagatctgatgaatcttaactcctgttttatctgaacttccagaccgttcctttagctcaggagagcgcccctccacccccacctgcttgaaatagcccagtctccgcactctcactgcagttctgcgggctccgtggttcctttccccaggtatagctggattgcagagttcagtttatgatgatgaaataaaatctaaacccccaaaaaaaaaaaaaaaaaaaaaaaaa

SEQ ID NO: 9822 - DNA, 572 bp, Canis familiaris
ccctcctgagctgcaggcccgggcccgtgtggacgagtacctggcgtggctacacaccgccgtccagctgcctgctacccatgtctacctgtgcaagtccctcctgccccatttctcgggtcagcctgtggaccaggagcggctagatcggctgatgggccagctgagaccagctctgcagcacctggatcaggaggtcctggctgcccagcccttcctggcccccgagcaggtctccctggcagatctgatggcattcacggagctgatgcagcctactgccgttggctgtgacctcttccgagactggccccggctggcagcctggcgagcccgagtggaggcagctctgggccctgagctcgtccaggaggcccaccagcttgtgctacagcctcgggacccccgagacgcccagcgtgacccccagctggcccaggagctggtgcatcggctgctggagaggctcggctgagagggatgcgacaacggggcctgctcccctgcgctctcctgccccgccaataaacgtgctgtgtgtcctccaaaaaaaaacaaaaaaaaaaaaaaaa

SEQ ID NO: 9823 - DNA, 472 bp, Canis familiaris
ctgtccttcgagtctggggtaagcactgtcacccacattggtggaaacagaaggctcactggtattggatagctcacgacgtggatccctttgagctgtttgtcttcctgcctgccctgtgtcgtaagatgggggttccttactgcattatcaaggggaaggccaggtctggggcgtctggtccacaggaagacctgcaccactgtcgccttcacacaggttaactcggaagacaagggagctctggctaagctggtagaagccatccggaccagttacactgacagatacgatgagatccgccgccactggggaggcaatgtcctgggtccgaagtcagtggctcgcatcgccagctggaaaaagcaaggctaaagaactggccaccagctgggctaagtggacgctgttgaattttctgtacataaaagtaataaaaggttctctttccaaaaaaaaataaaaaaaaaaa

SEQ ID NO: 9824 - DNA, 438 bp, Canis familiaris
tactggcctgttcaggagattagtaagtcagagggaaatactggaagctttttaaaggtgaaaaggagataagcaagtctttcagaccttggccccgatggagaaggaagccacccccacgcgtctcactgggccctggggccgtgactgcccgtttctcctctgggcaattaaggtctctctacaaatctggattcagcactgctgagtttgcactgtttttgcgtgaaagacctgcctcagagtgtgttggcggtggagcccctgcagcggtgacttggcgttgcccttgtggacgtgggctgcgctgctttccccgtaggtgtggggtgtacgctttaggacgtgatttcgttcagtaccagttacacggctgcttctcctgctgctgcgtgcgcaccaccctgctgctggtcctagtccccgagcagactgcga

SEQ ID NO: 9825 - DNA, 603 bp, Canis familiaris
  misc_feature (191)..(191): n comprises a, c, g, or t, or includes no nucleotide
gatgacagtgggacttgacaggagtctcatttgttaaaaatgagttgtaagttatgcattgatttgattttgttttaatgttaacgtctaatgtgaagcctggtactctagaaagatgtttccacagattaccacgctgctttcacagtatttctgagtgttaaaagatgctgaaagagtaaggattaatntgggcatctcacagctttgatgcttttttttttttctgaaggatttttgtgcccattcaaaggcacgaacacctaaatagaaaagtagatcttagaatggcttcttgaaacgtgaaacacttgccaaggtttcgttggatcaaatcatttatctttgtatgatttacacatttaagaacgagtggagtctgtcttcagttttgacccccttgatgctatactgtagcagttaggagtcttaaactattatgctcacttgagcctgctatggttgtttaccaagttccttagatgtccatttctccttaaatggttactttcttacctaaaaagaaggtaggaaggggttgcttaaatatatggaaaaatgaaatacagagggtagaatttaataaatttcatattgagtaaa

SEQ ID NO: 9826 - DNA, 539 bp, Canis familiaris
ctgcattggagtctcctcactgttgaccactcaagctatgtgtcaccacacagggtggctgagttcccccggatggctttcacggatctccacgcccccacccacttgtgtgtctcaccctcaagaagctgtgtcccctcaccccagcacctgctcttaaccagctacgtggtgtccagtgtacgccccttcatcccctccccacccagccctgccagcccagtttaagctaccagattttaagagatgtttcccaggacttttggaactcactcaagacagcgatggttattttagatgctatgatctatatttatagagagattcctggaccactcaagctctttgacccaaatcaggaacatcttgggatttattaaattatgtaagaagatatagcccagatatccagaatattgtgtggaagtgaggctgttactttggtctgatttcattgatgtatgcgacccagtttcccaataaagtgctagaatgaccaaaaaaaaaaaaaaaaaaaaaaaaaaaaaaaaaaaaaaaaa

SEQ ID NO: 9827 - DNA, 683 bp, Canis familiaris
tccagcccaggacaccgtcttgggcccgagaagacatcttcgttcaggctttagccattcccctcagatctcttagggcaccaatgaaatcttgagtgatgttccacctgataagacccgagacaaatgtgagccatcgaagccacactgctcacatgctggacatctccccccgtctccttggctgatcatccaacaggtgtttgataattggcaagcatctacctaccctgaagtggcttgacaatcacagaaggaaactctgcattctcgcttcctggagggtgtccgcaacgtttgcccagcgtatgtctgcagaataggttacccgactgttgcatcagtgccccacttctatcatccatggatacacagcgggtcctggctttgtctgtggaaactgattacacctttccacttgctgaaaaggtcaaggccttcttggctgatccatctgcatttgtggctgctgctcctgtggctgctgccaccactgctgcacctgctgctgccgcagccccagccaaggttgaagccaaggaagagtcggaggaatcggacgaggatatgggatttggtctctttgactaatcacccaaaagcaacccattcagccaagtttatttgtgaaacaaggaaataaaggcttacttctcttaaaaaaaaaaaaaaaaaaaaaaaaa

SEQ ID NO: 9828 - DNA, 384 bp, Canis familiaris
tacaaccaggacgcttatagatccctgagaagtaaaagccaaacccgctttctcctggtatgaacatctagtttgagagcaatgccatcacctgtacggcttgtattagtgctttaatggagtactggtaacactttttctttcttgataggaatctgcttatatttagccaggcttctatttcataccctctcccactacaaactttccgtgcagttacctttcatttttaaagccatttcactgctaaatataaattgtatttgtggggttcatagttatataatgctgaagggaaccactctttcgttgaaaggtgataaaagttaaataaagactgtctcccccagtaaaaaaaaaaaaaaaaaaaaaaaaaaagggcgg

SEQ ID NO: 9829 - DNA, 632 bp, Canis familiaris
gatactccagtgtccctggtcccagctttcccacagatgttaacctttggtattctccactttaggtaattcctaagttaaaaagttaaagagggtggaaccagcttgttcacggtgtgagtaggcacgttcactgtcaagaatacgctctagtataaatgtgaccctgaaaggaagttggcccctgaccttgcacacatgcccatctgatcttttgattcctggagtgcacttcagagtcttagtaaagagaagggagagacccgtggctgtgtttcagatgatcatccctgaaacaggcccagaccaggacccccaggatgtttgtacggttgagacaaatggcccaggtatattttctacattagttatgatctgtttcatttttctttctccttcccaagtttatgtagacacaggcatggaatgcagttccatttttcacccctagaattgatctattttctgattgcttccctgtctctggtattctcttatgtcctcagaacctgtttttccctgtatatcgcaaattgtatgtttataggtgaaatgttaatacattaaatgattaaccttaaagcataaaaaaaaaaaaaaaaaaaaaaaaaaaaaaaaaaaaaaaaaaaaag

SEQ ID NO: 9830 - DNA, 556 bp, Canis familiaris
acctttgccatttccccgtttgtacctctgccactgaggattggccacctctacgggaatagagagctaatgccacttactttgctgcttgatacgccctttaaaagatttttgataatgaagagaagttaacaccgtaacacctttattaaaattcacgccccccctattaaccctgagtaagaattggttgccttggtttagtaaggcagatacttggaaggatttcttggtgtaacttaaaatatttgaaaactgccttttaatgccattgcatatgtttattctggaaaaatgttttaatatccgggcctgctgagttgctttctcttgtggagattttttttttttttttaatctcctaagttgtataaaagttgtactgcatcttagtttacctggataaatttaaaaccccagtattgtagaaagcttataccaagctatcctatgccttcaaatagtacagaaaatggaaaatataccagtaaattctgttgaaccccccaaaaaaaaaaaaaaaaaaaaaaaaaaaaaaaaaaaaaaaaaaaaaaaa

SEQ ID NO: 9831 - DNA, 369 bp, Canis familiaris
cccaaagtccaccagagaccttccagaatttggaacccgaatgaatgtttgaaaccattggttaattgaatccagttaagaacttaaaatggttctactgccaaaattgatcagaccccagaggaaagtagttgtcagtcatagtacacatcggacatttggaaaacagcagtggcagcaactgtatgacacactaaatgcctggaaaccaaacttgaaccaagtgaaaaacagccttttgagtctttctgatacatgaatttttatgctatataaaatttggttctttttggaagaaatctaaatcatagtaaaaccaactaaaatttgactaccaaaaaaaaaaaaaaaaaaaaaaaaaaaaaaaaa

SEQ ID NO: 9832 - DNA, 645 bp, Canis familiaris
atatttggggagtgcccagagcaattccatgattacatgacacatcctcaatctagttctagccaatcacgctctagttagccaagtttatatactgagacttgattattgcttcccgtcagaactccctcctcagtgacatttcagcagtttccctcttggtcctagttttgtgcacatttttatgtgcttcagattaattatatttctctcactttcttagctggtcctattttttcacattctggcatctggctatcaagttagattgctgtaggcatcatattgtcatggtaactaccgaacctaatgatgcagatggatggaacatcagtataataaatgatgggaaatgtttcctaaaaattcaccccttccttaagagaggaggaggagtgcctgatagtgttaataccacccttcctacctcaggcttttgcagatggatgtttggagggtcagtgcagccagagggaggagggggacatcttggaaatttccagttctcttttcaaacccaaaatagggatgactcttgctgtttgtcagatttgctgcaaattgctcctcacaaagaacatttttttctatctgtaattgtacatacaggttttgtactctaatgtactacagttctgatgtgga

SEQ ID NO: 9833 - DNA, 603 bp, Canis familiaris
agacaagaacagaggcccagagacgttagattactgccccaaaccacacagccagtttgggacagagctggggtgcagatcctggcccgctggcgcccccactgcagcgccccctccagaacctccttctgctctggactctcctgaactgcggtctagggggcagtgctcagggtcccggtgagtggaccccctggggttcctggagtcgctgttccagctcttgtgggcggggcctctctgtgcgtagccggcactgcatctggtttcctggggaggagtcctgctggggagacacccatgagtaccgcctctgccgtctgccggactgtcccctaggagccattcccttccgagacctccaatgtgccctctacaatggccaccctgtcctgggcacccagaggacttaccagtgggtgcccttctacggtgcgcccaaccagtgcgacctcaactgcctggccgaggggcacgccttctacccagcttcggccgcgtcctggacggcaccccctgcagcccgggcgcccaggggctctgcgtggccggccgctgcctcagcgccggctgtgacggtttgctgggctcggacgcccacga

SEQ ID NO: 9834 - DNA, 701 bp, Canis familiaris
cctgcagaagcttgatacgctgcagacaccacctgcgagcagcgcgcacggaacgcaagccccccacagaagaagctaccccagaagaaggaggccgagaagccggctgttccggagactgcaggcatcaagtttccggacttcaagtctgcaggcgtcaccctgcggagccagcggatgaagctgccacagctctgtaggacagaagaagatcaaggccctggagcagatgctgctggagcttggtgtggagctgagcccgacacccacggaggagctggtgcacatgttcaacgagctgcggagtgacctagtgctgctctacgagctcaagcaggcctgcgccaactgcgagtacgagctgcagatgctgcggcacaggcacgaggccctggcgagggcaggcgtgctggggggccctgccacaccggcatcgggcccggccccagcctctgctgagccagcagtacctgaacccggtctcggccctgaccccaccaaggataccatcattgatgtggtgggcgcacccctcacacccaattcgaggaagcgacgggaatcggcctccagctcctcttctgtgaagaaagcccagaagccataagaggccacacggggtgtgggtgctgctgtgtaaatagaactgctgagtcggaaaaaaaaccaaaaaaaaaaaaaaaaaaaaaaaaaaaaaaagg

SEQ ID NO: 9835 - DNA, 636 bp, Canis familiaris
  misc_feature (321)..(321): n comprises a, c, g, or t, or includes no nucleotide
aatgatcagtaaaaacattgcaaaagtgagaaggaaaaggaaaaaaaggctgcatttccccccaaagccgagggggacggaatttcagaacgagggggaggcagggtgtacaagtaccaggtggctctcccttccccccacattatcttcccaaacagctccaagctcggagaaggcaacgagcccacccctcgtcttctgctcagcgctccccccatcccgtacccgtggcccgggccgccggaacccggtcctggggcttcccggggggccaggacccggccccggctcctcccctctttggttccactcggagaacanttgtgcttgacagactcatcccctgccctcattccaggctcccactggtgggctcaaggcactcacaggagtccaggggagccccaggacacccacctgcccttgtgctctgggtgggcccatccgtgggcacattcccccatcctcagcccggatctgggcatccggatgtgggaccgtccaaggaacaagccttttaggacttcaccaactgtgcagacatttctgaaccccgcaccacatccctccactgtcccctctcccgggcccccccacccagcccggcccctccatccagtccttctcccgggctgc

SEQ ID NO: 9836 - DNA, 509 bp, Canis familiaris
aggcagatgcccatccgctgagccacccaggtgtccagaaatggtgtttaaagtgaaaaccaagcccagctaacctttagtatagagtccagggccggatgatataaatagaaccccttcccctgtctggagtgtcttccctgggaggaggccccaggagaggactgcctggcctttcgtatttatccccccccccctatctatgtaaaaatattgaccatatattgaaatacatccatgttttgaaaaggtaccacttcccagccacccaatcccactgttgatttggttcccaggaagtcctgctgtaccgactttattgaaccttgctctttgcttcacacgttactcggaaacacacagaagcggctgtcccggtcgctgtaatgcctgcgtgatgctccctggtgttttatgcccagtttattaaactgttccccagatgttcaaccaaaaaaaaaaaaaaaaaaaaaaaaaaaaaaaaaaaaaaaaaaaagaaaaaaaaaaaa

SEQ ID NO: 9837 - DNA, 589 bp, Canis familiaris
gttcccgcctgcaacctcactgtgcccggcgcaccttgcccgacccaggccccgggggcgcgggccgctcgggggcatctccggcacttgggtgggaccaagtagatgcccccacaggcccctccctcacctcctcctccccacccagtctggattccattcttttcaccagcacccatcgcccaaggggtaccgaggggggcaaggggtgtccagtccaagcccacccccgcctcgccttccgcaaaactgtgagcaaaaagccatagaagcctcgcccccgccccggccctttccgcaggattcgctgagtctgtagcctcccccgtcccagctcctagacctcgtggctgtccccccaccagacacccactactgcacaactcgggcggggcgtgacctccccgcctccgtggtttccgtgtcgtcagccccgccagcagccgacccggagggggacgggccccactggccttcccgtccccaccaactcttacgcttgacgatgtagcaccccggcccccccacgtcctcccctcctctccttgaccaataaagtctggattcgttgccctccgaaaaaaaaaaa

SEQ ID NO: 9838 - DNA, 299 bp, Canis familiaris
ggagtgtgttgtgtgtatggactctcctcccccacccccacccccctccctcttttcactgttgctttctatgtatagctccctagacctttcacttttttaaaaacgcgttttgtgtagagaataaggaacgtggatctttttattttgcaatcctgggccagctagagaccgggagctgattgaccttttaacttttttcagtggccacattttggttatcgatgtacctagaagtatgtaaattagattaaatttctcttctggaaaccaaaaaaaaaaaaaaaaaaaaaaaaaaa

SEQ ID NO: 9839 - DNA, 569 bp, Canis familiaris
acttgcccagaggcggtgggctaaagccacgccccccaccaggcctccctgttactatagcatcagaaactgtcacatctctccccttccggagagcagggcttgcactcttcccctagaacctactttgaaggccattagaagctttgttttcatttccccctggtattgtcttgccaggatggttaggtacacaaggacgcttattagatcacctgagaagaaaaagcccaacccgcttctctggtatgaacatctagtttgagagccagccaaaccgtaggcttgtattagtgctttaatggagtactggtaacatttttctttcttgataggaatctgcttatatttagccaggcttctatttcataccctctcccactacaaactttccgtgcacttaccccttcactatttttaaagcgcaatttcccggctaaatataaatggtatttttggggttcatagttatataatgctgaagggaaccactctttcgttgaaaggtgataaaagttaaataaagactgtctcccccagtaaaaaaaaaaaaaaaaaaaaaaaaaaaa

SEQ ID NO: 9840 - DNA, 601 bp, Canis familiaris
  misc_feature (504)..(504): n comprises a, c, g, or t, or includes no nucleotide
gcccaagagccaggacatctacctgagactgttggttaagctgtacaggtttctggccagacgaaccaactctacctttaaccaggttgtgttgaagaggttgttcatgagtcgcaccaaccggccacctctgtccctttcccggatgatccggaagatgaaactgcctggccgggaaaacaaaacagctgtggttgtaggaaccataacggatgatgtgcgtgtccaggaggtgcccaagctgaaggtgtgtgcactgcgcgtgagtagccgtgcccggagccgcatcctcaaagctggaggcaagatcctcaccttcgatcagttggccctggactcccctaagggttgtggcaccgtcttgctctctggtccaccacaagggccgacgaggtgtacagacactttggcaacggccccacgggaccccacacacgcccccccccaacccctatacgtgaggaatcccaagggcccggaaagtttcgaagccgtgcccagagnccgcagggccagccgaggctacaaaaactaaccccagatcctgccttgttattaaaaagattttgaatgcccaaaaaaaaaaaaaaaaaaaaaaagg

SEQ ID NO: 9841 - DNA, 669 bp, Canis familiaris
  misc_feature (1)..(1): n comprises a, c, g, or t, or includes no nucleotide
nctccgctgggcaaaagaagtctggttgaccccatgagaccatgaatcgcccatgcaaactcccgtcagcagatacgaaactgatcaagatgggctgataatccggaagcctgtgactgtccattcccgagctcggtgccggaaaaaccctctggccccccggaagggcaggcatatgggcccttggtaagagaaaaggtactgcccatgctcgaatgcctgagaaggtaacgtggatgaggaggatgagaattctacgcaggctgctcagaagataccgtgaatctaagaagattgaccgccacatgtatcatagcctgtacctgaaagtgaagggtaatgtgttcaagaaccagcggattctcatggaacacatccaccagctgaaggcagaccaggctcgcacagaagcttctggctgaccaggctgaggcccgcagatctaagacccaggaggcccgccagcgccgtgaagaacggctccaggcccagaaggaggaaatcatccagactctgtcccaggaggaagagacccagaaataaaactccctctctcttgtctgtacatagtggcctcagcatgaatcagatcagttattccaataaaaccaacctttatctgcccaaaaaaaaaaaaaaaaaaaaaaaaaaaaaaaaaaaaaaaaaaaa

SEQ ID NO: 9842 - DNA, 666 bp, Canis familiaris
cccagagcctgcttgcagggtcccagaggccagctcttggcccccttctggtgggcctggccagcccgttcccagctgcccaggaaggcagcacgggggggccggctgtccgaggagatcctctgccccactcccacccctgctcttaccaatctctttgatcctccttccaggcccaagtgtgccgcccactccctgccccccagtctttgcccgcctgacacctgctggctagcgaggttcatggggggacctgggggggctcggtggccgggagcgagcggccctggggagtcgaggggcccggaatgcgcgcccacccccctctacccttccttcctaggatgcataacctacctttctttttttttaattttttctccccatagagtagctctttgtaccataaaaaatacttgaaaaattaattgtatgatgtatgagaggacagagtcccctagttttgtatctcgtgtatgactgcccatgagttcccacccagaaagccgctctattttggtctctgtgaccattttaaatgcgtgacagaagtgagccaataaagtgagaaatatatatatgagataatatagattgtattgaaatctccaaaaaaaaaaaaaaaaaaaaaaaaaaaaaaaaaaaaaaaaaaaaaaaaaaaaaaaa

SEQ ID NO: 9843 - DNA, 677 bp, Canis familiaris
ggccacaagacaggattttctgatatcagtctcacgcattcttccgcagcatagactgggacctgttggagaagaacagccctccgccattccagccccaataaccgacgagtacggtctggacaacttcgacacccagttcaccagcgagcccgtgcagctgaccccagatgacgaggacgtcataaaaaggatcgaccagtccgagtttgaaggttttgagtacatcaacccgttactgctgtccaccgaggagtccgtgtgagccgtcttctctgtcatggacacgtctgtgaatgaccccttcactctatccttaaccacagcgcatgcatgccaggctgggcgcaaggctccaagtgcggccagggagggatacttgccgccgaccccgtggacgggggcgccagcgggcgcttctcatagcggaacagtcttgcgtctgggcccgcgcggccagctttgtgctggaggaatttgcttcttgtgcctgcgccgcggacaacccgcggtgaccgtgtcccagggagaaactgccccacgatttcgaaggtgcacactttccacagaaacagaactgacctgctccgccaggagagttagcctgtaatgtcctgaggaataaaatgtgcccatgatgtcgaaaaaaaaaaaaaaaaaaaaaaaaaaaaaaaaaa

SEQ ID NO: 9844 - DNA, 632 bp, Canis familiaris
  misc_feature (149)..(149): n comprises a, c, g, or t, or includes no nucleotide
cgtcagtgagcgccccgcacacgccccgtcgtcccggcagcgagaccctcccgtgcggttccccgccccggagccgccgttgtgcctcggggatgagcacggcccgccgggacgtccgcccgcccccacgctcacgcactgagcatcgncggtggtcagggattcggagcttgagctgctgcgggatgggagttcgggagcggcctccagcccgtcagctcagcttcccaaggacgcgtaggggtccgccccgagggaaggctctcacgggggcagagttcgcgcattctctccccatacgtgctgccagatacgctgcaaggaaagaactccaggatttagacttctggaactcagggatcctagagtccgttggaaaagtccaagacggagaccaagacacgttaattcagagggtctctccaactgatctgatttcacaggtccctagatttaaaatctcggaaaaagggattcctgcgtggctcagcgggtgagcgtctgcctgcggcccagggcctgaccccagggttcctgcacggaggctgcttctccctctgcctgtgtctctgcctctctctctgtgtgtctctcctgaataaatacataaaatctctaaaagaaaaaaaaaa

SEQ ID NO: 9845 - DNA, 596 bp, Canis familiaris
tggaacactgaggagttctgcagtccagctctggggagccaggtgatggtgaggccagtgctggtgttgtccaggatgtgctgtttgagacactgcagacagacgaggggttgcagagtgtcctggtgctgagtggggcagatggggaacagacccagctgtgtgtgcaggaggtagagaccctccctcctgggctggccgagcctccagccctggccctccaggacagaagctgctcatcatccgcagtgcacctgccactgaactgctggacaatagcagcggtgggggaggtgctgccacactgcagctgctggcccccccccaacctggccaagcctctgccccagtgggcatctccacagctcccacctcccagatggtacaagtggtacccactggcgctgcacctggaggtatgaccccacagggcctaccctccatccagattgtccagactctgcccgcagtccagctggtgcatacattttgaggagaaccactgggacttaagtgtgccctacacagagaccccactcgctgggctgggctgggctagagggaggggagctgcaggctgggcttgctaataaaga

SEQ ID NO: 9846 - DNA, 601 bp, Canis familiaris
gtgacgcaaaaggacaagagcaacctgaccacaacacctttgcagcgagcagcccccgtggcagccgccacccacccctcctggcaatgtcatccccgtggccaacctgccatggccaggcgaccaccagccgccacgccccacgcccctcgccctctttctcttcttcctttcctatgttctctcatttcctttctttcctttcctttttgctcgggagacttaaagcccccatgactctgtttccccgtccctcctgaatttaatttgcactaagtcgtttgcactggtttggagtcttggatctggccttgagttcccgagcgtgtgtgcaagcaagctgctgagtgcacctggcctcctgtggcccacagcgcccggcacccaccttccgtccatctctgtgtgggggtgcccgggtgcggctgagagcgtgaggccccacccccccttgcctagtctggaagctcctaacaccgagcagaccttgaagcattccattgtagcatgactcgctctgtgcccctccccaccagggcttcaccaggagccctggactcatcaataaacacagttacagccaaaaaaaaaaaaaaaaaaa

SEQ ID NO: 9847 - DNA, 660 bp, Canis familiaris
acagtatggaccaattaggcctatttaggtgacactattaggacaagtttgtacaaagagcaggctggtaccggtccggaattcccgggatccggtccgggtcgtagcaggcgccaagagtgttgatgcccaagaagaaccgaatcgccatttatgaactccgttttcaaggagggggtgatggtggcaaagaaggacgtccacatgcccagacaccctgaactggccgacaagaatgtgcccaaccttcacgtcatgaaggccatgcagtctctcaaatcccgaggctacgtaaaggaacagtttgcttggagacatttctactggtaccttaccaacgagggtatccagtatctccgtgattacctccacctaccccccgagatcgtgcctgccactctgcgccgcagcagaccggagaccggcaggccacggcccaaaggtctggagggagagcgacctgcaagactgacacgaggggaagctgacagagacacctacagacgaagcgctgtgccccctggtgccgacaagaaagctgaggctggggcagggtcagcaactgagttccagtttagaggcggatttggtcgtggacgtggtcagccacctcagtaaaattggagattgttttgtgttgaataaatctatagccagaaa

SEQ ID NO: 9848 - DNA, 604 bp, Canis familiaris
taggtattatcctactgaagatgtgcctcgcaagctgtgagccagtggccaaaacctcttcagtcagcatgtgagaaagttgcgagctagcatcactcctgggagccacttttgatcatcctcactgggcgccacagaggcaagagggtagttttcctgaagcaactgagcacgtggctttgctacttgtgactggacctctggccctccaccgagttcctctgcgtaggacaccacccagcaagattatgtcgatctgccgaccttcctccccaccaattgatgataagacaactgtgtgaatacatccccacatcatctcagagacgcatattctcgagagagagagaaatcgtgtgtaacacccagcacacacaggaaggggagatttttagacacagagaaggagaaatacgagattacagagcagcgcaaggttgatcagaaagctgtggactcgcaaattctgcccaaaatcaaagctgttcctcagcttcagggctacctccgctctgtgttttctctcacaaatggagtttaccctcaccaattggtgttctaaatttcttaccaagaacctaattaaacaactgatccattaaaa

SEQ ID NO: 9849 - DNA, 534 bp, Canis familiaris
  misc_feature (423)..(423): n comprises a, c, g, or t, or includes no nucleotide
agttggaacctggtccattaaagaaggagtggacaagaatgagtgcatctggcccaatccctttccctaccctgccacccagaagtaccttctcagtcatgttcactaccccatccctccccccattcacagctggatcccttcctcaatgctccccactttctgttatcaatgtatcttaaggcaccatgtctctcaaagtgttcactagcacaagatgcttaaaacccagactttaatcctgcccattcctctctggtcccccatcatgaccagatattcacattcttcatttcaatacccactctcataatagttctctctatatttcccacatgagaccaatagagagaccgggaatatgagccaaataatcattaccatcccttttcccttgggttccagtagctcattcccaacccntggattcttctgtggttgctgctggctcaatgaaggtccctaatcacattccctaccagttggggttcttcttttctgggagacactgtaaagagcacaagagagtaaata

SEQ ID NO: 9850 - DNA, 182 bp, Canis familiaris
tatcagtttaaataaaggttaaaaaattaaaaaaaaaaaaaaggagcctataatcaagtagggaatatagacatacaaaactgcattataaattctgtgctagaagaattaagccttacaggagcaaaaaagaagttagttaattctgatgggtcatgaattgggctttgaggaagagtttt

SEQ ID NO: 9851 - DNA, 408 bp, Canis familiaris
ctgctaaagtagcaggaagcccccagagctctgtccctcaaggatgagacaggacaggtaggcctgggcttctgagtcagcagaaaggggcccccgtggggtctaaagtgaggaaggtcccagaccacattctacctagcgttctacagcagaggctgtagacattgtggggtctcagaagagggtcccctcctttgaggcaggactggaaacaaccccggtttgaagaggtcaacaggccccttcccaaggtttgataactcccctccacccataagcttattgctctgtttacagtgacctgccccaggcccctcccctagggggactggggtgtctggggtccaccctctgggtcaatggttatttgatttgattttatttttttctctgtaaacttctaacctg

SEQ ID NO: 9852 - DNA, 125 bp, Canis familiaris
ttgaggagcaaggccaagttcccagtgacttcagtattttctttgaaaacgggagcttttcatgtggtaccccctcaacctgacattgctacagtgcaataaagatacccccacccttaaaaaaa

SEQ ID NO: 9853 - DNA, 249 bp, Canis familiaris
aaggcttgggtaggaagcccttcccgggacccaatttaaccaattggaccagatacgatgagatccgccgccactggggaggcaatgtcctgggtccgaagtcagtggctcgcatcgccaagctggaaaaagcaaaggctaaagaactggccaccaagctgggctaagtggacgctgttgaattttctgtacataaaagtaataaaaggttctctttcaaaaaaaaaaaaaaaaaaaaaaaaaaaaaaa

SEQ ID NO: 9854 - DNA, 613 bp, Canis familiaris
atggagcagacatactggcaggcgaatcccttcagggccgtaggctgaacccggcattcagctcaaggctgtgaagtcctccacaggccccggggagcagctgcggaatgcactctggcacacaggggacacagcatcacaggtgcggctgctgtggaaggacccccgcaacgtgggttggaaggacaagacatcctaccgcgtggttcctgcacgcactctggccccaagtgggctacactcacgaggtgtcggttttaacgagggtcctgaagctggtgtgccgacaagccaacgtggttctggacaaccaacccatgccggggtggcccgccttgggggttctttttggctttctccccaagagaacatcatctgggccaatctgtgctaccggtgcaatgacaccataccagaggactacgagactcagaggcttctgcaggcctagggatgggggtggggacccattgctggaagatggcaccatcgtggctaccctcactgcaacaaacagggagcttggcacccggctccaagaggtagctgccctagaggggctcagaaaggacaaaataaagtgtgtgtggtggaaaaaaaaaaaaaaaaaaaa

SEQ ID NO: 9855 - DNA, 566 bp, Canis familiaris
aaactattgcttttagtccacagtatgcccttctctacacttttggatattaaggtccagaggagagatgcacccaaagtcccagaacaggtcagtgcaaagccagaaatgaagcctaggacccctgactggtccccctgcccccacccccagctcctctgcacttattcaagtgtttattaagcacctgccttgtggtgggctctatgccaggcaccaggatacaatgatgacaacccagtgctctcctcgcaggggctgacgtctgggaggtgagtaggcatgaggcaaggagaggacacagtgaacagagatttggtcagactccctaaagaagccaatgaaggactggaatcaggaaatgatgtgattgggtgcctgggttcagtggctgcctttggctaaggtcattatcctggagtcccaggattgagccccacatcaagccccccatctacccctgcattgggctccctgctcaatggggagcctgtttctccctctgcctcttgtcctgtttatgcctcctctgtctctctctcttcaaataaatgaataaaatattt

SEQ ID NO: 9856 - DNA, 571 bp, Canis familiaris
  misc_feature (70)..(70): n comprises a, c, g, or t, or includes no nucleotide
caaacaaggcttcccacatgaagcagggtgtcttgacccacggccgcgtccgcctgctgctgagtaaagnggcaattcctgctaccgaacccaggaggaactggaaaagaagaaggcgccaaatctgttcggggttgccatgttggaatcccaattcttccagtggttcttccaattgggttatggtgaaaaaaggggagaaggatattccgggactcacgggatactactgtgcctcgtcgcctggggcccaaaagagccagcagaatccgaaagctttttaatctgtcgaaagaagacgatgtccgccagtatgttgttagaaagcccctaaacaaagaaggtaagaaacctagaaccaaagcacccaagattcagcgtcttgttactccacgtgtcctccaacacaaacgtcggcgtattgctttgaagaaacagcgtactaagaaaaataaggaagaggctgcagaatatgctaaacttttggccaaaagaatgaaggaggccaaagaaaaacgccaggaacagattgccaagagacggaggctgtcctctctgagagcttctacct

SEQ ID NO: 9857 - DNA, 172 bp, Canis familiaris
gaataaggataatgtgaagtttaaagttcgatgcagccgatatctttatactttggtcatcacagacaaagagaaggcagagaaactcaagcagtctctgcccccaggtttggcagtgaaggagctaaaatgaacctggcccactgatttgaactgtattaaaattttaaaa

SEQ ID NO: 9858 - DNA, 620 bp, Canis familiaris
gagagactggtgtgcaaaaggcgctacaatgttatttcaggatttagcacatgagtctagggtgagcttgaatgcatagtgtaccataaggagagtatgaagatgataatagtcttgaatggagcacgagttgtagaccccatctcggagatggggttttgttatagtctcaccgagagcacgtgtttatgaggccttgtcgcccgtatagtcgcgagagagaatttgtggagagggtgagatatctcgagacaactatgtgaggaggtgtacacatatcccacatcttgtaagggaaggtaaatgtatggagataggaagtgtccaagtttaagagacttttgcttaacccaagttccaaggaaagtaaataaactaatgggccccctgtgggcataaataagaaatatatatttggtctttgtccccggttcttagcaaagagctcttaaaaccattgtaatttcaggatgcctggatggctcaatggttgagcatgtgctttcagctcagggcatgatcctggggtctggggatcgagtcctgtatcaattcctgtggggtgccttcctctccctttgcctgtgtgtctctgcctctctttctgtgtctctcatgaa

SEQ ID NO: 9859 - DNA, 102 bp, Canis familiaris
tgggtgtttaatccttcctgaaaacccgaagagttcacttttgctattacacttttaatgatttacaggctggtgccagacaaagcttggaaagatagatca

SEQ ID NO: 9860 - DNA, 506 bp, Canis familiaris
tcccttagctagtttggatatgaccatggaatagatgtcttatctcgagtgccacagttactttggattaatgcaatatagtcacgtttgaagaccgaagatttttatgaagctttggacatgcttcagtagggaaatggtcgaacattttaatggggaattcatgtgggttaccgttaagaattcatactggcattactacagtaaagtgttaattttaaacagattgtgtaaagtttttttttttctatattatagtggctacaatattaatgtcttaaattttcaatatttgagcttatttttttaaattctaacattgaaataagggtaattttagggaagcatctaagattttaatgattgtataattggcatctcatggaaaattaggcagaaagtatcaattctttaaagttgtgccctaaaatcctgtaaagcaggtgagaatactggttagaagatatccaatataatgctgtattaaattgttaaattctaacttg

SEQ ID NO: 9861 - DNA, 106 bp, Canis familiaris
aagaaggaggaggacctagaaactttataagagcacccataagaaattgggacagcaagtgaaggcacagaaggactgctgggagacagagctgcttcaactgaaa

SEQ ID NO: 9862 - DNA, 617 bp, Canis familiaris
aggaccacggagagaccatgaagagcctgctccgtctctgccaatctggctgccttggccgtggcaactttgtgctacgagatctcaaggaagtgatgggatcctatggaatgatcccctcgataacaggaggaaagcccatacaagtgagaatctccgccgacagagattggaaggaaggcttaaagcccaagggagaaggaatccaagagaaccccccaagcccgcctaatggaggttcaacccggggaagccctgtgattgacttcaagctttgcgaacgtacgccatggtttatggatacaatgtctgcctacaatcgctatttccggcatcgccgaggaggcaaatgagattgaaaaaagtctctttccttccagagcctggtgcctggttttgtattcctttacagtagcatcatcgaactacataaacacatacaaattgcttatttcttaaatgttcttgtctggctgttgccctccttcctgccccccagatcaataagcagtgaaaatgcaatgtggtgaaaggtcaaaagagaattaagatgtgtgattattattacataataaactcttggatggatactttccaaaacaaaaaaaaaaaaaaaa

SEQ ID NO: 9863 - DNA, 666 bp, Canis familiaris
ctgcttcaaaaagcgggaagcaccgtgcgtgccagctatagacctaatagtggtcagttgggcagagaagcataggtccacacagaatttcttgaggcgggcctttgaagtcgccaatgaagtcggacagcttggtggggaaccggagctcggggccaatgagggtccagacaagatggtaattctacgcacgatgtctcctcttataattgtgggttttcttgtagcgagagacgcagaaattttgaaaggaatagagcactcacatctatcttgtgcgtgtgacacgagaagatcgcgaaaatgggcacagagactaagtagattatacataccacgggcttacactatattaacgagaggaacccccgccacattggttcccccaggaggccccttaccaggcttcaagggccacgggagcaagcgtcaaattacgatgactactgaccaaccacccctcggccctcggcgccccggccgcggaggtgacccactgggctgccttgcaccacgtggcttccgctgggctttactccagcagatcttgcctaccccctttctgcagccaggaaggaagagttaaacaatataaatgcctttgatatttcatgcaagtgcctaacatcgcatttcatttaaaaaatagaaataaaagcagtttgt

SEQ ID NO: 9864 - DNA, 472 bp, Canis familiaris
tcaaccagcaacacaaggggaatggtcagaccttgagcagggcccaaacccttctaagggccttaagaggtctaaccaagggaattaaggggaattgggagaagggggctagagcagttcttctatacatcctggcagctggacttcaccaaggaggtcttgcccagccaggggacagtatatatctggaaagagcagagcgttttcctcatcaggtgtggctggtcatgaaagggacagttgtccaagttgggctgggacttggtacatctcgttcgtccaatctccacctccaagaagtagttcatcccagacacaacctgcttgcgggcgcgcagcactcgcagggcgcggctgtggtaggcgtcgttgctcgcccggttgtactcgcgcacggcgaagtccagcgcctgctgcacgccctcctccccgacgtccgcgtccaccgcgccgcccaccgcgccgggcctgc

SEQ ID NO: 9865 - DNA, 635 bp, Canis familiaris
cagaaaaaggggttagatgttggcatttcataaaactaaccgaagttctgtctactgatgcagcacacagagatgtgtaaaaaaaaaaaaaagaaaaagaaaaaaaaggaaagacgctctttaggtttttgttttgttttttgtttttttgtttttattttttaagtatcttctagggaaaacacctgacgaatggtcagagctcccgtatcctgatcttttcatcaaggcgcctttcctaataatatggttcaactgtgaatgtagaagtgggggggaggggggagaaaaagaactctggagttagaggatctagaaccaattaaaataccattgttaccaaaataacgccaacttccaaaaccaaagaaagccacaatccacacaaacccaaatttagatgctcagaattggcagcatgaaagagaagttctctcctaatatgtatcgtgatagtctgaacacccccagaaaattgtgcccaagagtttagaaaacaaatatacaataaaagtaaacacacacacacacacacacacacacacagaaaacttcaggtaactattttggattgccaacgaggataaatttaatgttcaaaccatctgataaaataaccctttggaaactgaaaa

SEQ ID NO: 9866 - DNA, 640 bp, Canis familiaris
  misc_feature (356)..(356): n comprises a, c, g, or t, or includes no nucleotide
atattgaagtacagttggcttcagaattagccattgctgcacattgaaaaaaatggtggtgttgttactacagctttctatgatccaagaagtctagaaattctgtgcaaacctgttccattctttctgcgtggaccacctattcccaaacgaatgcttcctcctgaagcactggtaccgtattataccgatgcaaagaatcgtggttacctggcggatcctgccaaatttcctgaagcaagacttgaacttgcccagaagtatggctatattttacctgatatcactaaagacgagctcttccaaatgcttagtactcgaaaggatccacaggcagattttctttggtcttgccnctggatgggtggtgaatatgacagataagaaaatcctaaaacctacagatgagaatctcctcaagtattatagctcatgaattctctttcaagaaagcagagttgtaaaagagttctggaagaaaagggactgaaacatacatatttctcatggtctcatcttgatttgtgattctctaggtattgatgataatttcccatgtaaccctatttccctttttatctaaaattgaaataaaaaatgccataagccaaaaaaaaaaaaaaaaaaaaaaaaaaaaaaa

SEQ ID NO: 9867 - DNA, 591 bp, Canis familiaris
ctgctggcaaggatggcgtggccattgtgtccatagaagattctctgattgcactctcaggagactattccatcattggccgcaccatggtggtccacgagaaacgagatgacttgggccaaggtgacaatgaagaaagtacaccagacacggaaacgccgggagtcgtttggcttgtggtgtcattgggatcgccacagtaaatattccctaggatgcgatctgagttctagttaactcctatgttatcttgctagtcgtagaaatttaacttgataaacattaaaccttgtaaccttaaaagtgtaatttgtgtgactttttaattgctttaagtacctgtaatgagaactgatttatgatcacttggaagatttgtataattttataaaactcctattcagttaaaatgtatgtttcaacgatctctgtattttgccaggcttaatcatatatgggtattaaacttaattgtctgaatttcttcaattctcattcaagcccgcaataaacaaatataacatatggcactgaattcttaacctattaaaatatcccaattgaaactcttaaaaaaaaaaaaaaaaaaaa

SEQ ID NO: 9868 - DNA, 582 bp, Canis familiaris
  misc_feature (9)..(9): n comprises a, c, g, or t, or includes no nucleotide
cagagggtncggttggggagcctggccagctgcccttgccctcgccgagagggacccctcccgagagcaccaccctgtacaaacagctctgccccttgcccagttgcccttgcgcatcagaagcgtgagaccgtatttggcaacagctcatcagacaggtaatctccgaggggaggcaagttagctgttctcaggtgcagagcactggcctctgcacctcgttttgggtgcagctgctggcttgcagtcttttttaccaagttaaagggcactgagtccatcccgttataaggaagcgtaaaaaaattaattcaaaaccaaaaatgaagaagtatgaaggctgaaatgtagatgagatgtttgggcccgggcccactctatccagatcatgaaggtggaggagattgcagccagcaagtgccgccggccagcggtcaagcagttccacgactccaagatcaagttcccactgccccatcgggtcttgcgtcgtcagcacagccacgcttcaccaccagaggcccaacaccttcttttagatgcagagcgtgccggtgcccagtctgctcaaataaactcctc

SEQ ID NO: 9869 - DNA, 657 bp, Canis familiaris
  misc_feature (543)..(543): n comprises a, c, g, or t, or includes no nucleotide
ctgtggtgacctctacgacacgctgaccatcactcagggccgtcatcttctgtaacaccaaaaggaagtcgactgctgacagagaagatgagagaaccatttcacggtgtcgtccatgcacggggacatgccgcagaaagagcgcgagtccatcatgaaggagttccggtctggtgccagccgggtgctcatctccacagacgttgtgggccccgggggctggacgtcccacaggtgtccctcatcattaactacgacctgcccaacaacagagagttgtacatacacagaatcgggcggtcgggccgctacggccgcaagggggtggccatcaacttcgtgaagaatgacgacatccgcatcctgagggacatcgagcagtactactccacccagatcgatgagatgcccatgaacgtggcggatctgatctgaggagctgctgtgctgacaaggcgctggtgaccatctgcctgcccggtgccccggctgggacatgcttagggacagtgtctgggtgacggggattgtggggctctccantggaccctgggacgagccgttggtgttcttttcttacccacatgtaaataatgcagtgctgtgagttttttcattaaatgtttaaaacttttcccataaaaaaaaaaaaaaaaa

SEQ ID NO: 9870 - DNA, 368 bp, Canis familiaris
cccatgactgggcttgcgggcggcggggggcccgcgactctctctctcaggtacagaaccggtagcttctgcgaagatggaggggaattaggcttctggttcctctgacatattggcaaaaggctccccaaggttcggcggcgggagtcgggcgggggagacggctctccccagcctgcacccaccccttcccacctcgcctcccaaatgacagcctggtgttggctctgcgtgatttggccttggcttcagccaagcagctgatgcagaggaggccccgtttgcaggactgactggcaagtgcacgctgaagaaagaaggaagaaattttttaaagcagctctggggaggtttctcgttcccaaaaa

SEQ ID NO: 9871 - DNA, 583 bp, Canis familiaris
aggacgcggggacacagacaagtacctgaagaagctgcacacacaggagcggcacgtggaggaggtgaactggccatcaagccgtattatcagaagaaggacatcaccaaggaggagtacaaggacatcctgaggaaggctgtccacaagatctgccacagcaaaagcggggagatcaacccagtgaaggtgagcaacttggtgcgggcctacgtccaacgctaccgctactttcgcaagcacggccgcaagccaggggatcccccagggcccccacggccacccaaggagcctgggccccctgacaagggtggccccggcctgcccttgccccccctctgagaccctcagccaccccttccctccttcacctctttggaattctggacgtatttatggctccacctccccacttccttccccccatcagtgggatgatggagggagggttgctgcagggaagaggagagcccctgccctgcccagcccctgtgccccttgcccccaggcctgtccccattgccccgcccttctgtttgtgcccctcccccatttcattaaagatttcatgaaattgttaaaa

SEQ ID NO: 9872 - DNA, 683 bp, Canis familiaris
ctgaagatcgaacctgtgtgtaaaatgttacccacactggtaaaaagcacaccataaagtttggtttttacttttctttctaacatcaatgcttagcagaactgttcagattaggttgtcacgtagtaaatttcaagacgaaatacccatttttctccaatccatgaaacatactatacttactatacctgcaactaagtgttaaaaattatgctctgtaaccctgtactgctagtattagaactaaacattttcaatacagccacatgcttaatgcttctataactgtggatttgtcagcctttatgtaatctgtattatataaagcacggggataagaaaagaggtacaccaatgtatgcctttaaaaggctatttcttaaagctgttacacaggggataatggtatttcaactagttatcagcaagtgaccaatacacttccaccaccaatgtactcttgttcttctagcttttagactatggaaaaaactgagtgcttcagagttcggaaagagaagggaacactacaccctgtgttgtggatgaatctgaagactttgcctgttcattttttaaatattattttcaggtcctttgcttacccaaggaagccccatttcactcaatgttttgagaactgtgtttaaataaatgccaatgaaaagagcaaaaaaaaaaaa

SEQ ID NO: 9873 - DNA, 628 bp, Canis familiaris
  misc_feature (279)..(279): n comprises a, c, g, or t, or includes no nucleotide
cataaagatgtatttctctatgatttgaatggatcatatgaggcatgtaataccaagaattgttactttacatgttcccttaagcaaattgaatttgttttgaagttcagtcttacattgactgataataaacctctaactctgcccagctaaagcttgacatttaatattatgaaaaccaagccggcagaaattgaaagaagagtctctcacatagctgggctatattctgcagctggagttgaagaagcagtctttaaaagctggtatgagcacaangccagcaggtaaaaatttaagctgcactgttaagctagattagaggtttaaagaaaaactagttttcatactgggcaggcgttgtccagttggtatagaattggaagtttcaagaaagttagtttacctttgcttttaggtcataagtttcttatgtgattgctgtatgtgaacacacagctctttgtaacattctctatttggtgatttgaaactactcaagataccagtgtcctgccagtttaagggtacattgtagagctgaactttgagttactgtgcagatttttttcatgctgtcatttgtaatatgtttgtgaaaatccttgggattaaagttttggttacc

SEQ ID NO: 9874 - DNA, 526 bp, Canis familiaris
  misc_feature (142)..(142): n comprises a, c, g, or t, or includes no nucleotide
ccaaagaactgacgccgccgggcgtcgccgcgaccccgtcctcccccgggacgccggagccggacgccgcgctgctgaccccccccgcccgcgtcccgccgcgccccccccggccccagctggctccaagcagcggcgggancggccggagccccaaggacccaccttggcgtccgtccaccggagcccttacgctgtcaccaggcggcgggacggccagcagggcccttccctcgccttacggggtggcctctggccgcctcggcctcgtgcgcagcggcgctgagccccgggccgcccccgcgccccgccggcctccccaggcctccccaggccgaggcggggcagggcggggcacagcagggcgggcaacagcgagcggcccggggccccagccgttccgcgctctcatgcccggtccaccaggtcccacgtgcagacgcccttcgggattagaaacccgggcctgacgcccaactatttgataataaagcgcttgtttgcagataaaaaaaaaaaaaaaaaa

SEQ ID NO: 9875 - DNA, 689 bp, Canis familiaris
ccggattcccggatgggagtttccaagagggaccttgacccgttagcagcccggccatgcggcgcgctcccgccttcgccgctccctccgcccccagcgcgacacgttgggcctctggtccccacgtgttgggcggggagctgtggcacacgcagtgcgcagcgaggcctcgggtctggcgagcgccgtgcgggagggcgtcgtggacaagaacgatatatgctggcggggcgaggaagggtcagggggccggcgagggccccggcgggcagctccggctcaggctcccctcctcagctcgcccgcggggtccaagcggctggagggcatctcggtagaggaggcgatggtgacccggacgcagctgctggaggaagagctgagcagcctaaaggaggagctggccctgtgtcaggctgataaagaatttgtatggtctttgtggaaacgtctccaggtgacaacccagatgtcacacaagcagtcacgtttggttgtggaaagctcctgtggctcagcggtttagtgccgccttcagccagggcgtgatcctggagacctgggatcaagtcccacgtcggactccctgcatggagcctgcttctccctctgcctgtgtctctgcctctctctgtgtgtgtctctcatgaataaataaataaaatctttaaaaaaaataaaaaaaaaaa

SEQ ID NO: 9876 - DNA, 621 bp, Canis familiaris
gaccccactgacaccatggcccaagtactgttttcctcccttgtgctggtccagaactgtctgatgtcaagagctgtgttacctagaattaaccccgggactcatgagttctccagagcatgaacatgtttgttggtgtgcagcggagggcagactgcgaggggcagaggtgaagctctggggctccaggttaagaagtagctaagtctcccctggagagaagagtagagggacttgcccaatttcttctcttgaactcagctcgcgatgcttagaaggtcagtctcacttcgagagataaggatgcgcatcaagacttggtaattgggtttgatgtcctggaagatggagaaacagaatggggggagggtggtggcaagattctcacagagtagagactggacacggatggtaaattactctagaaaggggaagcgcgggatgcctgggtggctcagcgcgctgagcgtctgcctttggctcagggtgtgatcctgcagtcccggatcgagtcccgcattgggctccctgcgaggagcctgtttgtcactctgcctgtgtctctgcctctctctctctctgtgtctctcatgactaaataaataaaatcttaaaaaaaaa

SEQ ID NO: 9877 - DNA, 602 bp, Canis familiaris
agctgagccggtcaaggaaggttgctccatctataaccgctcagagttgtgtccagctgcccaccaccgaccccacctatgaacccaagacagtcacaacagggagccccctagttcctgagccccacagctctggctttgatggagccagcttcattgggggttcgtgctggtgctgagcctgcaggcagcggccttcttcatcttacgcttcctcaaggccaaggacagcacctacccgacactaatctgacccccttcaggcctggattccacaggggaaggaggacgaagaggcccctcttggcccccttgtaggcactgggggtgggaaaaactttggccacccatttctggcccctgtgggccatcaagcagactccgtgcctgctatgtgacatcccctcctggcctgggcctggtaccctgcggctgagagcattcttcaatcccctcctgtcttatccactcatgcctgtgggccccctgcctgaacacgaggtctgtgcctgcctcttcccacccccccggcctggccctgccccccaataaaaccactctttctggccaaaaaaaaaaaaaaaaaaaaaaaaaaaaaaaaa

SEQ ID NO: 9878 - DNA, 723 bp, Canis familiaris
gtggtacaagacatccaggctatggaggagaccatccgacgtcatgcgcttttttctccgggtgcgctgctgcagtatcgcccgctcttgctgctccacaggccccccgcccaacccggcccgataaagcgcgcagactgggctacaaggccaagcaaggttatgtcatatatcggattcgtgtgcgtcgtggtggccgcaaacgccccgttcctaagggtgctacctatggcaagcctgtccatcatggtgttaaccagctaaagtttgcccgaagccttcagtctgttgcagaggagcgagctggacgcccctgcggagctctgagagtcttgaattcttattgggttggcgaagattcccacataccaaattctttgaggttatcctccattgatcccattcccataaagctatccagaagaaatcctgacaccccgtggatcacccaacccgtccaccaacaccacgggagatgcgagggctgacctctgcaggccgccagagtcgtggcccttgggaagggtcaccagttccacccacacctattggtggttctcgccgctgcggcactggagaaggcgccatactctccagctcccccgttaccgctaatataagtaatgtttgtaaaattcttacctaataaaccatttaggaccgtcccaaaaaaaaaaaaaaaaaaaaaaaaaaaaaaaaaaaaaaaaaaataaaaaaaaaaaa

SEQ ID NO: 9879 - DNA, 653 bp, Canis familiaris
ttgactatttcacatgatatgcccccatctccacccccgagaatcagtacatctttgccactgtaatcttcttttccacttgcccatgatggcctgggtatatgccaaatcactctccgccagattaacatccccactaaggatgagaatatttccaaactgcttcgagtgtagaattttaatgttctgataaggtgaatcttcatcatacaccacttcatctatgtcatactcaaccaggcgaccatcagcagtgggccagtatctgtcgatggcccctcctcgaactatgggtggtaatcgcttcacccgcccagtactgtcctgactcaattctttcattctttcttctactttgttcaaaagactgtcaacttcttggccttgcgaatcaccatcataactctgaagatccaacaacaccaatccatgtgggtaaattctcaaattggcaaagctgccatttttgtttatgtaggtcgctagataaccatggtcttgccaggtgtgcaccgactccgtcatcccttgctcctggaaaatggactggaggccttttagaatggtctcgccatcagctctggcgccgagcttgaagtcgagcgtgctgtgccgtgctgctgccatagtgaggcgaggccctgggccatgcc

SEQ ID NO: 9880 - DNA, 109 bp, Canis familiaris
  misc_feature (1)..(1): n comprises a, c, g, or t, or includes no nucleotide
nagcccgagaactttctggaacccttaaagagatcctggggactgcccagtctgtgggctgccatgttgatggccgtcaccctcatgacatcatagatgacatccatag

SEQ ID NO: 9881 - DNA, 564 bp, Canis familiaris
tcgcgcctccccatcattggaccttgcgcccatggacataggagggcccgagcaggatttggtgtggacactcgggcctgtcggcttcttgttagacccgtacccccttactactccatcccttgcccatccagaggacccaagtactttccagtcccagtcactctagggctctgcactgaatggctgacctgacctgatgtccattcatcccacccgctcacagtgtggacttttctcccctctttctaagagacctgaactgggcagactgccaaataaatctcggtgttctatttatttattgtcttcctgtaagacctttgggtcgaggcagaggccggaaacttactggtgtgagtccaacgccccctgagtgactgtccccagcccacggcagaagatctcccttcaggtgccgggcgcacggaactgcgtgtgtcctacacccatggtgctattctgtgtccaacccctctgtattttttaaaacatccattgatattaaaaaccaaaaaattattggaaagtacatattgaaaaaaaaaaaaaaaaaaaaaaaaa

SEQ ID NO: 9882 - DNA, 666 bp, Canis familiaris
  misc_feature (86)..(86): n comprises a, c, g, or t, or includes no nucleotide
  misc_feature (101)..(102): n comprises a, c, g, or t, or includes no nucleotide
  misc_feature (117)..(117): n comprises a, c, g, or t, or includes no nucleotide
  misc_feature (125)..(126): n comprises a, c, g, or t, or includes no nucleotide
  misc_feature (158)..(159): n comprises a, c, g, or t, or includes no nucleotide
  misc_feature (169)..(169): n comprises a, c, g, or t, or includes no nucleotide
  misc_feature (199)..(199): n comprises a, c, g, or t, or includes no nucleotide
  misc_feature (259)..(259): n comprises a, c, g, or t, or includes no nucleotide
  misc_feature (271)..(271): n comprises a, c, g, or t, or includes no nucleotide
  misc_feature (285)..(286): n comprises a, c, g, or t, or includes no nucleotide
gcctcactatgtctgccattttcgattttcagagtctgttgactgtaatcttgctgcttatatgtacctgtgcttatatccgatcncttggcacccagccnntcctggaccacgaanaataaaanncttggattttgttttgggtaaataatttctgnncgaaagatgncgccccacaggaaacatttttggggttggnaaacaccggggaaaaaggaaggttccccctcttatgtttgcccacgctggttggcctcgntaattagtggantgggcccctgtcanngccagtcccctgctttcatgccacgtagctctggaaaaatatcagaatttaattgccatcggatttcagtatgaaaaaaggacttatctacagaaaataatggaatgaatggttaacccttttatctctgaacacttgaatgagataaatttccacgctgctctcctctattttcgttattggacccatgttctatataaataggatgtaaccgtttaatactcagagtttaatatgtctgtaacaatcaacctcagtactgtaactacaatattacattctgcatgttattcttttatgtcagatacccgttcttagtgtggtatctcccaggcgcataatagaaaaccaaattagtaaattaaaaaaaaaaaaaaaaa

SEQ ID NO: 9883 - DNA, 553 bp, Canis familiaris
taccaaaaaatgtttggcttgttgtgtgatgccaccgatatatagccctttcaagtcatgtcgtgtttggacttggggttgggacggggagagcatcagccatgtcagctacacgctcaaatgtgcacccgattatggagagtaattcccaaatcttacgaagccccatatgcacgggagttaactgaaaactatcttggccgtgaggttggccctgttgataaagctggtcccttcctttaactgtcttttaggttgttcttgccttgttgcccggagtattgccggtaataccgtatattcataagaatatccatcttggggctaaaatgccttgattctttgcacctcttttaccagtccttacgttgaattactaattgataagcagcagcttcctacatatagtaggagactgccacgtttttgctatcatgattggctgggcctgctgctgttcctagtaaggtattctgaattcccttttatccataaagcttgatttaaccaacccagaaaaaaaaacaaaaaaaaaaaaaaaaaaaaaaaaaaa

SEQ ID NO: 9884 - DNA, 686 bp, Canis familiaris
  misc_feature (1)..(1): n comprises a, c, g, or t, or includes no nucleotide
ntttttacggtggttattgtggaacacgatggggcaaacatactgtcacgcggatcccctcagggccgttgctggacccggccttctagctcaaggctgtgagtcctcccccgtcccccgggagcacttcggatgcactctggcacaccggggacacagcatcacaggtgcggcttctgtggaaggaccccccccacgtgggttggcaaggaccagacatcctaccgctggttcctgcagcatcggcccccagtgggctacatcagagtgcggttttacgagggtcctgagctggtggccgacagccacgtggttctggacaccacccagcggggtggccccctgggggtcttttgcttctccccagaggacactcatcctgggcccatttgcgctaccggtgccatgacacccctacccgaggactacgagactcacgaggcttttgcacggcctagggatgggggtggggaccccttgctggaagatggcaccccttcgtggctaccctccctgccaccaacaccgggaagcttggcacccccggctcccagaggtagactgccctagaggggctccagaaaggacccaaataaagtgtgtgtggtggaaaaaaaaaaaaaaaaaaaaaaaaaaaaaaaaaaaaaaaaaaaaaaaaacaaaaaaaaaaaaaaaaaaaaaaaaaa

SEQ ID NO: 9885 - DNA, 572 bp, Canis familiaris
  misc_feature (376)..(376): n comprises a, c, g, or t, or includes no nucleotide
ttgcgcccactggacacttggagggcccccagcgcggaaatttgtgtttggacacttgggccctgtttgccttcttggtaaaaaccccggacccccctgccaccgccaatcccagtgcccaattcccgggggaccccaagtgcctttccagtccccagccactcttagggctcttgcactgaatggctgacctgacctgatgtccacttcatcccaccccgctcacagtgtggacttttctcccctctttctaagagacctgaactgggccgactgccaaataaaatctcggtgttctatttatttattgtcttcctgtaagacctttgggtcgaggcacgaggcacggaaactaactggtgtgagtccaacgccnccctgagtgactgtccccagcccacggccagaagatctcccttcacggtgccgggcgccggaactgcgtgtgtcctacaccatggtgctattctgtgtcaaacccctctgtattttttaaaacatccattgatattaaaaacccaaaaaattattggaaagtaaaaaaaaaaaaaaaaaaaaaaaaaaaaaaaaaa

SEQ ID NO: 9886 - DNA, 685 bp, Canis familiaris
ccaccccggacccacttgcttttcctaccctccgcccgccttttgtgcctccttgtctcttcgtagccccctactgtgatttagagcttttctgcccggcccatcctcccctcccgtccccttcccagggcacaacatgccgcctgcttggcctcatcccctcccagcaccccaccctcccgttcgccaccttctactttccccggcttgcccgaggacccccgccctcgccgtgtcgttcgtacctccatctggatttgcaggaagctgccttttcgcgtgaattggggtgaaaaaaaaaaaaaaagccctcggctgcagccggctgggtgcaaatggggaagagggggtggagtaaggaagatggggttcagctgccgcagggagccgcgtgtcggttcgcttcggtcgcggatggcgtttctctcttttccaccttcacctgccctcagtcaagggtttgtctcacagggatgcggaatggcttttccgtaggcagggcgcaggtctcgggggtgggtgcagagcgcttcgtggcgttcctgggcccaccctgacggggagacgcgggaggaatctcaaccaaatgaaaccaattcccagtgtcacctggacgcgtccgttttattgcattaccccgttccgagagtccatttgcaacgacaaaattgcattaaaaaaaaaa

SEQ ID NO: 9887 - DNA, 338 bp, Canis familiaris
cctgcccctccagggcccggcaccatttcctcattttctgaaagcacctttaatgattcccctctccccttaccccagggaatggaggggggaccccgccagccaaaacatttccccctttccagccccagttctttctagcctcggaccttccctggtggagggagggaacacgggagctctgtcccccccaaacccccacccccacccccttgcttgcctctgtatatagtgtgagcagcaagtagccccgccccctccccatgtagtggccttggatcttccgtttgttaataaagaccattcacccgctccccaaaaaaaaaaaaaaaaaaaaa

SEQ ID NO: 9888 - DNA, 618 bp, Canis familiaris
caaatgagaccatccatttgaagaccatcttcaagagactgtttgagggctcatcgtctttaccgtaccctaccacttctctggtgctgtgacctctaaagatcacgctgttatgaattgagactaatacacggtggttctcaggattccactgaggttcttagaaaaatgtgttttttaaaaatacattttaggatgggaatgtctacagcacagcgaactgctgttgcagatcatgtatgctcactttcgttggaacacgagactaggttaccacgctaagctcagatgttaggaggtcatccattctggtcgagttcttttaaagctccacatgtattcatctgaaaattgtcggccacgagccacccagaatctccttcctgaaatctccttctatgtctgtatcaaggtcttatgactattaatctgatattctcagggcttcatcatctcctgctgcctatctgtcctggtctttttttgggtaattgatattactgcaaatagtcttatatcatagagatgtattgctagaactttcaaaatcgcacctggctattagaagttgctttctgctttcttaatgatttttttaaaaaataaactgtttaataa

SEQ ID NO: 9889 - DNA, 584 bp, Canis familiaris
  misc_feature (1)..(1): n comprises a, c, g, or t, or includes no nucleotide
ncagacatactgcaggcgaatcccctcaggccgtagctgaacccgccattcagctcatagcttgttgaagtcctccacaggccccgggagcagctgctggaatgcactcttggcacccacggggacacagcatcacaggtgcggctctgtggaaggacccccgcacgtgggttggaaggaccagacatcctaccgcctggttcctgcagcatcggcccccagtgggctacatcagagtcggttctacgagggtcctgagctggtggccgaccagccacgtggtcctggaccaccaccatgcggggtgccccttgggggtcttttgcttctcccaagagacatcatctgggcccatctgcgctaccggtgccatgacaccctacccgaggactacgagactcagaggcttctgcaggcctagggatgggggtggggaccccttgctggaagatggcaccctcgtggctaccctcactgcaaccaaccgggagcttggcacccggctcccagaggtagctgccctagaggggctcagaaaggacccaaataaagtgtgtgtggtggaaaaaaaaaaaaaaaaaaaa

SEQ ID NO: 9890 - DNA, 554 bp, Canis familiaris
cagctcccgtgtacctgagcggccccggcttgcaccttgcttcggggaggtccgtctggaaccctgcagggccccctagaggtgtaccggacacttttgtatgatgggcccgtcagcgctctgttgtactattaacttcttctggtattactctgctaccaccctattacccttttacctctgaggttttctgtcctgaagtccccccggtaccctttggggctgagtcacctagagacggcgtgtgagtgggccctggggaccctgatggcaggggccggcctctgcttctgcagctgcttgggggctccgccttgcttagtcaggcctctcccaggggccccggggcccacccaccctgcccacgggctgcacggctcatgccttttaaccctcgttcctgtcgccacttgtcccgagccgggtctgccagcagccttcaccttcagtgcacctgtcctctctaactcgtcaccttcagctgtaattacatcttccaagtcattccaataaagaaggaaaaaccgggcatgctaaaaaaaaaaaaaaaaaaa

SEQ ID NO: 9891 - DNA, 644 bp, Canis familiaris
  misc_feature (1)..(1): n comprises a, c, g, or t, or includes no nucleotide
ntcatagtgaaagctcttggctggaggatgcctttttggggtctgtgaagcctgggccacgcacgccccatatggccctgtgctgagggatgtgacccctctgcggttcacactcttctgagcggcgacccctctcttttctgtgagagtatccctttggcgctttattatactcttgctcgtgagggccaatctcattgctgcccccaggtttctgaagagttaatgtgtgctctgggcctctagagcttcctctgctctccctttgggcccccacttggaatggagccctttctgggagttccagggaccggggacctgccctgaggagagctagcccctagcctggccccctgccccgatccattccatcactgatatttaagtgaaggggaggatccctagactatgttcttggctccagactccaaaatcccccaaagcccaaccagctcatttcaaccaaggagcgctgatgtgaggggcaaggctgcctctgctccaggctcttcagaaagcatctgcatgtgaacaccatcatgcctctataaaggatccctattacaggaacagcatgagtggtggctaacctgacccataaagttattttatgattgccaaaaaaaaaaaaaaaaaaaaaaaaa

SEQ ID NO: 9892 - DNA, 607 bp, Canis familiaris
cccccgaggcccccgtggccgtggtgtcagcatgcccccactcccaagcatgtccctcactgccctggccactccatctccctctgtgccccgtatccccctgagctgaggcacccacgtttccatcagagcctgcatagcccatgctgttctcttcccgcccgagtgcccctcacccctccccgctgcctggagctcttctgctgctggggtgctggtattgcctccctagagctgagcctgtagcctcctgggggctgctctgaggccgggggatgatgtggagaagcccggccgtatttagccaccacacctggggagtgacccatccctcaggcctcccctgcccacaaccgggcatgtcactggaagaccaaaaaaccaccgacacccagccaccaaaaccaactagtccttttagaatttcttgcgctttgatttttttagggcttgagccctgtttcacttatagggtctagaatgcttgtgttgagtaaaaaggagatacccccatattccaagctgctaaatgttctctttgcccataaagactcccgtgtaactgtgtgaaaaaaaaaaaaaaaaaaaaaaaaaaaaaaaacaaaaa

SEQ ID NO: 9893 - DNA, 299 bp, Canis familiaris
tctaccggttacccattagcctaccacccaggataccaggatggttaccacggatgactaccgtcatcatgagagttaccaccactggatacccttactgaacagaaatacgtaaccttagccccagcccgtttcccctgcagctgttaaagccacccacagtggccagctacgtaaagaagtttttccaccctgcctacaattccttgcctttttctttccgtgttcttcccaaattaaataaatagccaacttttgtctaaaaaaaaaaaaaaaaaaaaaaaaaaaaaaaaaaaaaa

SEQ ID NO: 9894 - DNA, 717 bp, Canis familiaris
tgccctcggatacgtttggactagcacttctacagcacccggccgcttttacgcgagctcccacctccccccgaagaaccggaaccccaatagacaccaggtgtacctggtgcgcgagagcgtatcccaactgggacttgcgagcaactttgagcggagagcacgtcagcagagacgccagcccgcgccggagacgagccgagcaccggccctccggggccaggcccggtgcggaagagcgtcattaatttatttctcactgatcctaattaatatttataagtatttatgagatgtccccctaggtgatggaaggggtgtctgtaaataattaattttaaaccttaattccaggggaagccccgatgtgccccccgtggctgtaagcgcagaactctcggtatttgctgagcttcgtgggagaggtggaggcgggcgcgcagggctgaagcgcacccggagggccggggagcgcccaggcggagtcgaggacgccgctggcacgtgggcttaggggctggtgttcgtcctccggggtttcggccccttggatctgccgtgtgaggcttcggcggaccactggggtgaggtccttggccttcggtcttctcaaagttgcccccagtgggtggctggggtgtcggaggtcggcgggcggccagggggcggctgcgcggccgtccagtatgttccgtgaacaccactaaagtcgacttc

SEQ ID NO: 9895 - DNA, 558 bp, Canis familiaris
  misc_feature (1)..(1): n comprises a, c, g, or t, or includes no nucleotide
ngtcctccctaataaacgggtcatttaccctatccacgctaattattacccaagcacatatatgagttaatctttccgccctgacccctagccatgatcatgattcatctctaccctagcagaaactaaatcgagcccccttcgacttaactgaaggagaatccgaactagtctctggatttaacgtagagtatgcagcaggtccttttgccctattctttctaccagagtacgccaaatattattataataaacatcctcacaaccattctattcttcggcgcattccacaacccattcatacccgaactctactctattaacttcactataaaaccctcttattaaccatctgcttcctatgaattcgagcatcataccctcgattccgctacgatccattaatacacttattatgaaaaaattttctacccttaactttagccctatgcatatgacatgttcccttacccattatccccgccagtatcccccccccaacataaaaaaaaaaaaaaaaaaaaaaaaaaagaaaaaaaaaaaaaaaataaaaaaaaa

SEQ ID NO: 9896 - DNA, 668 bp, Canis familiaris
tcctatcagtcctcctaataacgggtcatttacactatccacgctaattatacccaggacatatatgattaatctttccgccgaccctagccatgatatgattcatctctaccctagcaggaactaatcgagccccccttcggacgttaactgaaggagaatccgaactagtctcgggattttaacgtagagtatgcaccaggtccctttttgccctattcttttctagcagagtaccaaatattattataataacatcctcacacagttctattcttcggcgcattccacaacccattcataccagaactctactctattaacttcactataaaaccctcttattaaccatctgcttcctatgaattcgagcatcataccctcgattccgctacgatcaattaatacacttattatgaaaaaattttctacccttaactttagccctatgcatatgacatgttgccttacccattatcaccgcaagtatcccacccccaacataagaaatatgtctgataaaagagttactttgatagagtaaataatagaggtttaaatcctcttatttctagaataataggcttcgaacctaatcttaagaattcaagatcttcgtgctacccaacttacactatattctaccaaaaaaaaaaaaaaaaaaaaaa

SEQ ID NO: 9897 - DNA, 586 bp, Canis familiaris
gatcttctaggatttaatataagactgtggaaaattaagtcctaagctgagccctgtgcctggaatctccccttgctggcatccggatttaccccttaaggaaggagatgactgcagaaaccctgagacacctacctgcttgttcacacatagaggtgctctccgctctgcctaatcttaggagtggtgttttcagaggaaccaatccttttccagctgggcatgcatgcccaaaactgtattttcatggttttccaaccatatgaatagtcagaaaactaaagatcatgtattatggtaacataaggaccactttctcagttaggaaattgatttggggcatttcagcgctgtgacggttttatttactgccagtagtttttttggggttactatggtagatcccccacgcatgaagaaaataccttcttttggaaatggccaattcagtacttttctattaagtctataccattagagatttctttcctctagccaagagagatccaatttaagctattttaggttgaaccccaataaaataactttattggagaaaaaaaaaaaaaaaaaaaaaaaaaaaaaa

SEQ ID NO: 9898 - DNA, 527 bp, Canis familiaris
ccgtggtaacatcttgcataacctaatacaggatcacaatgggaaatcacaacattgatacaactctatcaaggttatttagctataccagtttttcatgtacctgtgtgtctgcggttttatcatgtatcccttcttgtaacactgtaatcaagatacaaacagttctgtcaatacaacaatcctcaagtgacacacttttataaatacatccaccttccactctcccttctcctgtccctaaccattgacactactaatccattaaccatctctataattttgtcctttcaagaatgaatgtaatcatacagtatgtagccttcggggttgtcttttttcatttgacataatatccttaaaatctgtccagttactttgtctatcacagtttgttcctatttatgcctgagtagtgctattaatttactaccgtttgtgtaacacccttgcattgaaggacatttggattttttcctgttttggattattaagaaataaatgccactttgaataaaaaaaaaaaa

SEQ ID NO: 9899 - DNA, 574 bp, Canis familiaris
  misc_feature (65)..(66): n comprises a, c, g, or t, or includes no nucleotide
  misc_feature (72)..(72): n comprises a, c, g, or t, or includes no nucleotide
  misc_feature (128)..(128): n comprises a, c, g, or t, or includes no nucleotide
  misc_feature (136)..(136): n comprises a, c, g, or t, or includes no nucleotide
  misc_feature (166)..(167): n comprises a, c, g, or t, or includes no nucleotide
  misc_feature (175)..(175): n comprises a, c, g, or t, or includes no nucleotide
  misc_feature (193)..(195): n comprises a, c, g, or t, or includes no nucleotide
tttcctctcatctttcagtgccaatttctcgttcatgttagcctgtttgtaccaacttttgggannccgggntggtacatcagttctctggaatccgccaggccgcttgggggttggatcaccacacncctgtagnggctttctcccctgcctagctgtctttggnngaaacgcnaggactggggagcctgtnnntttgaccacgagaggccacaggttcaaagacccaaaggttgtaagaaaaattttgtaaaaattagaaaaaagtggtgttggtgaattggttttgttttgttttgttttgttttcacatttggatagctgtcacaagaggtctttccctcagtttccagcatgttcttccttttctccctttctcacgtttttcctcctattaatccagagaaacttccaagtcccatgggatggtcggatctcacaggctgagaactcgttcacctccagcatttcatgaaaaagctgcttcttattaatcgtgccaactcttgccccgatgtggggagtttgaccaatctttccaaataaaaagtaatgacttagaaaaaaaaaaaaa

SEQ ID NO: 9900 - DNA, 585 bp, Canis familiaris
gatccgctctgctggtgcgaacggcagctgcatggacattcccaccctactgcacatccgcatcctcatctcagatgctggtgcggtagaaggcattactcagcacggagatacttggcgtacacgaccaggttttcctccgtgaattggcacgttcccctgcgggctcacctgtgaggataaggctgaccttctccctgtcagtgcttctgtcccgtttattaagatacctgcacaggtaccccgcccactgtcaagattccagatccattttacagagtatgactgcaacagaaatgaggtgtgttggccgccacttctatatccactgacccggtattatcaaggggagccttattctcagtgtgtggccaagggcttactactggtatccttcttcatactagctgcattcctcagtaatcccctggaccagaacatgtagagcttgaaatttattacctggcttcttacagacaccccagattttcacttcagtgatttgtcctactcctgtgtgcctctctataaagttataataaatggccgtgctttatttttgtagaaaaaaaaaaaaaaaaaaaa

SEQ ID NO: 9901 - DNA, 575 bp, Canis familiaris
aagcgcctggcgtgggccacgcctgtggcctgaggcataccggctacgtcatcgagctgcagcatgttgtcacagggccccatgggctgtgtagagagcctggaggtgacctgtagacgaccgatgctgccagaaaagcccaagccccttattccctgggtgtcaccgcctctgacttgtgagattcgcccttatgagcgactatttccagccccagagaccctgaggatcctgctgaggtgcctggtggattcttaaggtgacctgagaccccagcatcgctaccagtggtggaggccgcgttagtggactgctctgtggccctggccaagccctttgaccagttcccgtttgagcggcttggctacttctccttggatcccgaccgctgcccgggaccgcttgtcttcaaccggactgtcactcttaaggaggaccccggaaaggtgtgagctgtaaggaagccccctggacctacctcatgcttctggaggctagggataccctagactccgtgtccacataaaaaaccagctaaatctcctggaaaaaaaaaaaaaaaaaaaaaaaaaaaa

SEQ ID NO: 9902 - DNA, 630 bp, Canis familiaris
cagcccactggagagtcccctagttacccggagccccaggcatccaggggttgcgcccataagggagtggagtgtgttccaaagtcttgtttacctcaagggagggagtttattcttcccacaggtgaacccccccagataaagcccttgtgttaaaaaaggaacccgcctttttcctttcccccccaaagccgtctttgttctcttcttggtgataaacttagaatactggcacagctgggcattcgtgaggagaacctaacacgtgcttccctgctgtttctttggcttcccctgggctgcaacatgccatctgcttctttaccccgtcacgtgcattttagggatcttccacttctgacctctccctcatcacccactccctcccctgtgttactgaaaccgtagtactgttcgctgtagcatgctagggtgttgtttctaatctggctttgaacgtagcacccagtaagatgatagcacccagacacggtcgctggaccaaaaaagaagtctgtctgccgcaggacagatgctgcatttgcatgtatgtacacacgtaggctcgtatttatggaccaaataaaaccgagttggtgatgtgtggaaaaaaaaaaaaaaaaaaaaaaa

SEQ ID NO: 9903 - DNA, 629 bp, Canis familiaris
tcgccgtgtactccatcctctgatcaggatgagcctcaactccaaatacgccctaatcggagcccttcgacagtagctcaaacaatctcatatgaagtaacgctagcaattattcttctatcagtcctcctaataaacgggtcatttacaactatccacgctaattattacccaagaacatatatgattaatctttccggcctgacccctagccatgatatgattcatctctaccctagcagaaactaatcgagcccccttcgacttaactgaaggagaatccgaactagtctctggatttaacgtagagtatgcagcaggtcctttcgccctattctttctagcagagtacgcaaatattatcataataaacatcctcacaacaattctgttcttcggcgcattccacaacccattcataccagaactctactctattaacttcactataaaaaccctcttattaaccatctgcttcctatgaattcgagcatcatacccccgatttcccctacgatcacgtatacacctattatgggaaaatttttctacccctaactttagccctatgcatatgacatgttgccttacccattatcaccgcaagtatcccacccccaacataaaaa

SEQ ID NO: 9904 - DNA, 670 bp, Canis familiaris
  misc_feature (340)..(340): n comprises a, c, g, or t, or includes no nucleotide
tccccttataaaagtcagactaaacctgaccattgtacagcaaagcctgacatttggatattttgaagatttttcataaatcatcagaaattagtatatgcctgctagtttagcttctttaggtaataaggtatgtttcactagtagcacttcttattgctgatctcctgcgcaaatatgaatacaccgctccccattcttatatcacatgcacgagaagcacgtgaatgagatatgagtgacactacacattgtgccatatgttttaaaattttctaagacaccccctgagataccatgtagatgttgttcacagttgggtgagaccatcctcttcaantggaatcacaccctctccaaaaatttttggcccaattccctaaattgatagccttaaagtccaaaagtgaaattatagtttaattaggacttggttataaagaaatcccttttccccttccccaagggatactgcagttatatcacataccccataggcaccacgatgaagatcagagcttattatacttaattaaggttttatacacaccagttcccccaggtaaatgcaaatttaacaaaattacgacatgtcatatgttcaaatgctcatggcaacatcattttgcattcctgcaaataaaattgttttatactgtaaaaaaaaaaa

SEQ ID NO: 9905 - DNA, 341 bp, Canis familiaris
  misc_feature (1)..(1): n comprises a, c, g, or t, or includes no nucleotide
nctctctgggatcccctgaggaagggcccctgatgctgtcccaggggctgcaacaaggccgtgctgaccactcgaccgagaaagggactgaagctgcgggagccccccttctggaagccactccccactgtccatgccgccccgtgtcgacttcacaagcctttcctcatcatcatcgtcgaccgagacccccagagtcccctcttcatgggaaaggtggtgaaccccaccccaaagtaactgccttgtgggtcaggtcccttcccagatacccttaaagagtgacccccccccggaaaaaaaaaaaaaaaaaaaaaaaaaaaaaaaaaaaaaaaaaaaaa

SEQ ID NO: 9906 - DNA, 575 bp, Canis familiaris
aagctagtgtctaccaaaaggtagagaaggtcacttcacacgccatagtaaaggaagtcacccagagtgattaacatttgagtcccattgcaaaggttaagccatatgaccattttaatatgcatgtgattgacagcttccaaacagaacgggttctcccatgggggctccagacattgtattttactttgtgcatatgagggaactgcatgcaagctcagggtgctccctcctcagtctttgggtgattaaaatgcatgatactgtatgtacctggggagttggcccatttcctaagctgttggaaggggggcactcaagggggggatgtattgagatgtattatgcaagaacccactgagcccaaaataataaatgaaacacagaactctcttagccttaagaaagctatatatgaataattatgtttacctcactggtgcatttaaaaaggacttttgttcatgggagaacctcgttgacatgcacagtttgcaacctttcgttgattgatgttaaacgtcacagcagtaattgctcaataaaggtcatattggaaacataaaaaaaaaaaa

SEQ ID NO: 9907 - DNA, 641 bp, Canis familiaris
catggtgatcgttttgcagtacatcaatggcgtgatacggttgactcacgggatttccaagtctccaccccatgacgtcatgggagtttgttttggcaccaaatcaacgggactttccaaatgtcgtaacaactccgccccattgacgcaaatggccggtaggcgtgtacggtgggaggtctatataagcagagctcgtttagtgaaccgtcagatcgcctggagacgccatccacgctgttttgacctccatagaagacaccgggaccgatccagcctccggactctagcctaggccgcgggacggataacaatttcacacaggaaacagctatgaccattaggcctatttaggtgacactatagaacaagtttgtacaaaaaagcaggctggtaccggtccggaattcccgggatagcagctgcaaggactctccgctccggtacacagttcctccgaagacgcagggggccccgtctttagccgtgcacacgccgatcttgcggttggccggggagccgaagtcgcaaaagaggcccttgtgcgggtcgcaggggtcgcgctccgtgcacagctcgcccagctgcttggcgcacacacggcagcagccgcagccgtccagcacgagactgacgccggc

SEQ ID NO: 9908 - DNA, 294 bp, Canis familiaris
  misc_feature (1)..(1): n comprises a, c, g, or t, or includes no nucleotide
ngatattaagaaacccgacctgacgattgggagaatgggctgaatgccatggagtgtgcacttacacttggaaaagagcgtgaatcagtcactactggaactgcacaactggccactgataaaaatgacccccacttgtgtgacttcattgagactcattacctgaacgagcaggtgaaatccatcaaagaattgggtgaccatgtaacccacctgcgcaagatgggggctcccgaatctggcatggcagagtatctctttgacaagcacacctgggaaacagtgataatgaga

SEQ ID NO: 9909 - DNA, 685 bp, Canis familiaris
tcccgctgacctctttcttcaaggacaacagtcacatgttggatccccatgcaaatgaacattcactattttcgcctcccgtagatccttctctctccttctttcacgtggatacatggctgcagatgcacacagacgcatttacgtgtgcgtgcatctacacattgttttagctcccatccacagcaggtttgaatttggacagaggtgaccttgccacgtttatggcttctgcagactgattttcctctttctcaaagtaaacttcaccaaacgtaaaaattggagccgcatatcccagggtccaccgtcgtctgtcccgagccgggcagtgcagtagggagagcgccgcggcctggagctggggcttctgtaccaacaccccccacacacacccatgaggtgaaggcaccctcttccctgggagcaggaaggtgccgtgtttcagtctgtaagagggatctgaccaggagggacccggctggggaaaatcccactttctcactctctgacgctgtctccccgccactcttctaacatgtcgtcgtgtcgtaaatactgtcgaatactgttcacccatgactgttttggtgtgcgtgacatttgcccttaaaacatagcagtcctcccaatgaatacagtatttctactaggaaaaaaaaaaaaaaaaaaaaaaaaaaaaaaa

SEQ ID NO: 9910 - DNA, 536 bp, Canis familiaris
  misc_feature (1)..(1): n comprises a, c, g, or t, or includes no nucleotide
nggctgtgaagtcctccacaggccccggggagcagctgcggaatgcactctggcacacaggggacacagcatcacaggtgcggctgcctgtggaaggacccccgcaacgtgggttggaaggaccagacatcctaccgctggttcctgcagcatcggccccaagtgggctacatcagagtgcggttctacgagggtcctgagctggtggccgaccagccaccgtggttcctggacacaacccactgccggggtggccgcctgggggtcttttgcttctccccagagaacatcatctgggcccatctgcgctaccggtgcaatgacaccataccagaggactacgagactcagaggcttctgcaggcctagggatgggggtggggacccacttgctggaagatggcaccctctgtgggctacccctcccatgccaccaaccgggaactttgccaccccggcttccccaagaggtagctgccctagaggggctcagaaaggaccaaataaagtgtgtgtggtggaaaaaaaaaaaaaaa

SEQ ID NO: 9911 - DNA, 325 bp, Canis familiaris
cacactgcaccccatttcaccaatagttaaggccagagccaaatagccatgcagagcgagacgcctccatccacactgatcatcttccttttttgtcctccccctctcccactgctgcacctgggatcactgatgggagaatagggccccctcatgactgagggcagaagttgttctaaggaagtcagagcagatgcctggtttcccctgcctccaccagcccctaccatttcccccaaaatgtaacttctcctgggcgcttccttgcccccttctcctgatcagagatagatactaactactcattctgggtacataccacata

SEQ ID NO: 9912 - DNA, 675 bp, Canis familiaris
  misc_feature (29)..(29): n comprises a, c, g, or t, or includes no nucleotide
gctctccagcctggagctctggggtcccncaggaacttccagagccactgacccactccttggaaccccccagtccctcccctcctctaggggtacagaatccccttggcagtctagggaaggatgttgatttaaatacacttggacaaatacacagggcaacagaatctcaactacactgaaatacaagttaccagcacacgtgagtaaacacacctggtgatggagtaataatccatgtgtttctttattctcacatcccatagcagatctggtggtgggtctaatcactactgttgttttgaattgctgatgaggggctgatgagcataaatgctacctggaggtatctgccacattaccatgggctgtaaagtacttgacagctatgggtgatagagtcaaagaaattgctataataccactgtggcttgctgcctacacgtggcgtaagaaggaaatgctacactttcagttagaagtcagttaaaaattttttttcctcatcagtcacaggtcccctaaattctacccacagatccccttggttaaggacccttaagactaaggccccaattttgtctcctgccaggccctcccactgagatgaatcatctgtcaccactgctgctggccagataggtaggcacctaaattgaaaaaaaaaaaaaaagg

SEQ ID NO: 9913 - DNA, 417 bp, Canis familiaris
  misc_feature (302)..(302): n comprises a, c, g, or t, or includes no nucleotide
tgattgaccggaggaacttcatccgtggagcacacaggggcctggcatcttgtccatggccaaccgcgtgggactccttacgtcgtccggtttcccaagtgttttcagtcgtgcaccggccaaagactgagtggtttggacggcaagcatgtggtcctttggcaaggtcaaggagggcatgaacatcgtggaacccatggagcgcttcggggtccaggaatggcaagacctagcaagaagatcaccatcgccgactgtggacagatctgatgaatcttaactcctgttttatctgaacttcncagaccgttcctttagctcaggagagcgcccctccacccccacctgcttgaaatagcccagtctccgcactctcactgcagttctgcggggcttccgttggttcctttccccagg

SEQ ID NO: 9914 - DNA, 658 bp, Canis familiaris
  misc_feature (1)..(1): n comprises a, c, g, or t, or includes no nucleotide
ntgggaaatggagcactgatgatgttcagatcaatgacatttctttgcaggactacattgcagtgtaaggagaagtatgccaagtacctgccccacagtgcagccgctatgcagccaagcgcttccgtaaggcacagtgccccattgtggagcgcctgaccactcttatgatgaggcatggccgtggacacatggcgagaagctcatgtctgtgcgcactgtctaagcacaccctttgagagtctctcccatatgtgtctcagtgtgtagagaccacccccgtcgacgagtgtctcgtgtgtgatatcgccataatttacacaggggtccccgggaagattcaacccgcattggccgagctggaccagtgaggcttcaggcttgtcgatgtgtcccccgtacgccgtgtgaatcaggccatttggctgctgtgcacaggtgcccgtgaggccgccttccggaacatcaagactattgctgagtgcctagcagatgagctcatcaatgcagccaagggctcttccaattcctatgctatcaagaagaaggatgagctggaacgtgtggccaagtctaaccgttgatcacctggctgtggcttcaataaacctgtctgcccttggggcagccttcaaaaaaaaaaaaaaaaaaaaaaaaa

SEQ ID NO: 9915 - DNA, 614 bp, Canis familiaris
agttcagtgtgacaagcccaacaaggagttcatgctatgccgctgggaagagaaagaccccaggcggtgtttagaggaaggcaagcttgtcaaccagtgtgctctggacttcttcaggcagataaagcttcactcgtcgcagagcctcttacagactattggacaagcatcgatgattttggtcccccacatacatcttctctctgtcgcccacacgacgaggccaagtttgacgaatgtgtgctggacaaactgggctgggtacgacctgacctgggagagctgtccaaggtcaccaaagtgaaaacagatcggcctttaccggagaatccctatcactcaagaccaagaccagagcccaaccctgagatagagggagagctgaagcctgccaaacatggcagccgcctttttttctggaccatgtaaagattggtccatggcctacgctcagtcacacgcccagacaaccactgatgaaattcccgtgcagtttgcatcggccgtttgagtgttctttccgggatcacaaactgaacaaaaaagttaatttatgtgacttggcagttattctataccatttcctggccattaaaacttttaaaggaaaaaaa

SEQ ID NO: 9916 - DNA, 258 bp, Canis familiaris
ggggcctgggagaaacttgttcaattccctaagtaccaggtttgttgaaagtcctgtgggaacagggaacaggggatcatggatgacacccacaggaagccactacctgatgacacttggaagtgattgtctttaacatcacaggcatgacactttgaacgatatagagatgcacgcagttgaacttagaagtagcagtattggctttatgtaataaaggaagcatttttaacttaaaaaaaaaaaaaaaaaaaaaaa

SEQ ID NO: 9917 - DNA, 568 bp, Canis familiaris
ttctgtattagtcacagttgttgggcaagaacagttaattggtaccaaatctgtctgatacagtttttgccttactgtttttaaaatgatttttttgctcattactgccctgccttactccttttcgtataggcaatatcacttgttgttgtctatttttaattttttaggtcgtctaaatcctctattagttttagttcggtgagtatataaaagtgtcacatgctataggtgtaaatcattttctatattagatgttaatgtgtatgatatgatgtggagataatttgtgatatgatttttaggaaggagaaaataggaattggattgcccttaaccctgggttcccaaggtaatttgccaaccatcaccttggggtttctaccaccagaaaaagtgttaaaatttgttttaatatttatattgtgctattatccttttaaatagaaaaagtagagggtctgttcgaggattctcttcccccctttccctcccactacttgtgtgcaccatgtgcacactctgtctccaaaagtaaataaataaatcttaaaaaaaaaaaaaaaaa

SEQ ID NO: 9918 - DNA, 617 bp, Canis familiaris
  misc_feature (493)..(493): n comprises a, c, g, or t, or includes no nucleotide
atgcccggtgaatatcattgctcagaagtatgtgtgatgtaaatgtaagctagatatctggaaacttaactgcaaatgtggatcttttgtcccacatgatgttgataatagcatagagccgaatatgcagtttaaaataattgcctaccattaacaaatatgtttgcctcgccacgtttcacgagattctctttttgaaaggtgtttctggtgagaggttaactcggagtttttccaaataatttgaatttcccctgaacggtaaaatttgggagtaaaaaaataaaaaaaattcttgacaatatatgtgtgtgtgtgtgtgtatatatatatatatatatatacacatatatatgtcaacaattcagtaaagcttttgtttaattttcagaaggaatcaaataaaacaagtatccatcttctgtagttcgtagggtgttaggtcctttaacgtaaagtcaaacttcaaattccatctagctctgtgttaatnccctgttattactggtaaagcttcatttgaatatgtaaattcagtttaggctatgtaaaatttttgctaatgtcatcattctgaaaaaaataaatttacaaatacattcaaaaaaaaaaaaaaa

SEQ ID NO: 9919 - DNA, 247 bp, Canis familiaris
ctgaaagccctcagcttccagcgaacggcaggagtccaagacacatttgtgctctgtctgagtggtgatcaagtgctttttccgtgacctatagaacctggccactcccttaattgctatgttgttagattcagtagcgccactagtgaaaatgatctcacgaggatcagccccaatcagagatgctacttgctggcgagcatgttccatggctgcctcactctcccagccataagcatgtgtccgg

SEQ ID NO: 9920 - DNA, 472 bp, Canis familiaris
tctctcagcagtccccgccacaaagagtgctctttgccagcacgtggcctcgcatccacgaactgctggccagccatggggacacggaacattagtcggtggtacgtttgccgtgatcatgcaaggacatattggaagcgggttggtggcataccattggccagacacgaggcctatgaggaagccctggctgtgcttgctcgccaccgtgacccccagctcttctataagttctcacccatcctcatccgtcacattcctcgccagctggtagatgcttggattgagctgggcagccgcctggacgcccggcagctcatccctgccctggtgaactacagccagggtggtgaggcccagcaggtgagccaggccatccgctacatggagttctgcgtgaatgtgctgggcgagactgagcaggctattcacaattacctgctgtcgctctatgcccgagccagcctgcctc

SEQ ID NO: 9921 - DNA, 298 bp, Canis familiaris
atatatatatatatatatatatatatataatctcccttccattaattcttattccagttcattttgtttaaatggtggatttatgcaaatgataggattattaaaatattcaagcaaaacaccacaaattctaccacttagaaatagctagtgttcacatttggtgaacgttataccagacatttctttatgcatgtgcattgaaatggaagaatggatagaattttgtaaaaatagatggtgtgtgtgatttataataaaaagtattacgataaaaaaaaaaaaaaaaaaaaaaaaa

SEQ ID NO: 9922 - DNA, 468 bp, Canis familiaris
gccatgtgctgaggcctggggctcgccttggaccgacaaagtttgacctgatgtatgcccagcgtgcctttgttcactggtatgtgggtgagggcatggaggaaggagagttttctgaggccccgtgaggacatggctgccctggagaaggattatgaggagagttgtgtttggatatctcgttgtaaggagaagggtgtaagaagaaggagtgagggattacttaaggtttaaaaagtcaaccaaaggtgctgcttttacagggaagcttattctgttttgaacattgaaaagttgtgctctgatcagttaatttgtatgtagcagtgtatactctcatatataattactgacctatgctttaaaacacgacgctttgttacagactcaagctgtccatttctctgatgggtttgaataaagtattccctgtcttaaatgaaaaaaaaaaaaaaaaaaaaaaaaaaa

SEQ ID NO: 9923 - DNA, 636 bp, Canis familiaris
ctattgtacaaaaaggactacgatacggaatagttctttttatcgtatcagaagtatttttctttgcaggcttcttctgagccttttaccactccagcctagcccctactcctgaacttgggggttgctgacctcctaccggcattattcctcttaacccattagaagtgcctctactcaacacctcagtcgctcctagcctccggagtatctattacttgagcccatcatagtgtaatagaaggtgaatctcgacacatatatcttctagcccttattctacttacactactccccttatgagcgctatatatttacgcgtattatacacggcgctctcggatatctttaggaagcacttatctttaccaatttccgatggggtatcacggatcaacctttttaatagccactggatttcacggattacacgtaattattggctctacattcctcatcgtgtgcttcctccgacagctatactaccacttcacatcaaaccaccacttcggatttgaagccgctgcatgatattgacactttgttgatgtagtctggctattcttgtatgtatctatttattgatgaggatcctaaaaaaaaaaaaaaaaaaaaaaaaaaaaaaaaaaaaaaaaa

SEQ ID NO: 9924 - DNA, 521 bp, Canis familiaris
  misc_feature (199)..(199): n comprises a, c, g, or t, or includes no nucleotide
cctggccaagttcctggaaaagagatacgccaggtctgccaagtttgcgctgtgccgccaagcttgtccaatcgtctggaacctacgatctgaaaagcgtcctgaggccaataaatgggggacaatttccaccccccaaaggggtggttttcccctttgtttgccaaaaggggatcggggccccgcccggaaaaggggncctggaccttctcttgggatcactgaggaagggcccttgatgctgtccaaggggctgcacaaggccgtgctgaccattcgacgcagaatagggactgaagctgcgggagccacctttctggaagccatccccatgtccatgccgcccagtgtcgacttcaacaagcctttcctcatcatcatcgtcgacagagacaccaagagtcccctcttcatgggaaaggtggtgaaccccacccaaaagtaactgccttgtgggtcaggtcccttccagataccattaaagagtgacccaccccaaaaaaaaaaattaaaaacaaaaa

SEQ ID NO: 9925 - DNA, 512 bp, Canis familiaris
tccccgttagcacatagccttaatggtaccgtaataataaggtggttaatccaggcaataatattggaggtttaattaaggggccaatttaacccttggaaggttggaaccattggaatttaaattaaattaataaattttgggaggttccaaaccaattctaaggccaataagttttaatttccggttccaaatggctaaagttcccagtaaagtaggtttaaactaggacttgttataaaataacctttagttgcctaacatgaaattaccaagcttaggcataggggaaatgggctttttagaagccaggaattctaagtatattctgttcttcaaataaatgtcattttcttctttaaatattgaataagttttatgaacaaatatctttctttgcaaactcgaattacatgtgcttggaattaagttttagtttttttcactgcacaataataaagcctgagttctgatcaaaaaaaaaaaaaaaaaaaaaaaaaaaaaaaaaaaaa

SEQ ID NO: 9926 - DNA, 401 bp, Canis familiaris
cattttcatcaaccaaccagtatataaccttgctttatgaatgtctctacttaaagacaccttatttaatatatgttgttgattcggtaacattgaactcacagccaacaacactataactcatgcctgaatgaagcttgtataacacattcatttcctttttttttttatttttaagattttatttatttattcatcagagacacagagagagagagaggtagagacataggcagaaggagaagcaggctccttgcaaaaagcctgatgcaggactgcatcccagaatcccaggatcccaggatcacaacctgagccaaaagcagatgctcaaccactgagccacccaggcgtccctttttaaaaaaaaaaaaaaaaaaaaaaaaaaaaaaaaaaaaaaa

SEQ ID NO: 9927 - DNA, 518 bp, Canis familiaris
gtatcatcaagattagtacgctccgtgggctctagtaaggtatgaggcaagcctacgctggccagagttcatataccaaagttagtctttttgaaccctcatgccagtgcctttaagaagcgtgctatggagctgcagttctctgacttatcgaaggccagtcccgtatgaactttctgattcaagcatagtgctgcccattttttaaagggtcacaccgtttaaagaaatacctgtacacaccttgtccgttgacaacataagcaggaaagggtattgctgggttctgccaagttcttaaggatttcacgctcattatatcatattctaaacatgatgttaagattattggatgcagctttttactacaaaattttataaagcctaaaatttaaactcttcctttatgattgaatggcattattctattacatggaatatataaacgatgtttattagaaaatgttttagcttcctatgtaaaataaactctcatattctgaaaaaaaaaaaaaaaa

SEQ ID NO: 9928 - DNA, 453 bp, Canis familiaris
accagacatcctaccgcctggttcctgcgagcatcaggccccaaagtgggctacaatcagagtgccggttcttacgagggtcctgagactggtggcccgaccagccaccgtggtcctggagccaccaacccaagccggggttggcccgccttgggggtcttttgcttctcccaagagaaacatcatctggccaatctgcgctaccggtgcaatgacaccataccagaggactacgagactcagaggcttctgcaggcctagggatgggggtggggacccattgctggaagatggcaccatcgtggctaccctcactgcaacaaacagggagcttggcacccggctccaagaggtagctgccctagaggggctcagaaaggaccaaataaagtgtgtgtggtggaaaaaaaaaaaaaaaaaaaaaaaaaaaaaaaaaaaaaaaaaaaaaaaaaa

SEQ ID NO: 9929 - DNA, 733 bp, Canis familiaris
ccgccaatgtgaaatatccggagtgtcagggaagcaaggaacaaagcatggaaagcacgtcgaaagtcgttgtcaaccccagtgtaatggacactctgggcagaaagagttgagcaaagaccaagaccaaagagctgggactccacaaagagaaaaagcccacaagaaacctgaggccacgaagcccaaagggaaagaaaaaagagccgtcctgggctaggagaggaggtacaagtaacaccgactctcaacctgtagaagctcgttcgcacgaggaagcccttgaataaaaatcccaaatattggaattctggtaggtaatgggtataatatggaatggaaagactaattaccgcaaaattctcacattaattggaaaattacccattaaccaggaggaattaaggcttcttctggaaaccaaaacccaaaaccaaaaggttaaccttaattggccctgggggttgcctggatggttcagtcagttgagtgttcaactcttggtttcagctcaggtcatgatcacagggtcagaaatcaagccccgtgggatccctgggtggctcagtggtttggcgcctgcctttggcccagggggcgatcctggagtcccgggattgagtcccgcgtcgggctcctggcatggagccttcttctccctctgcctgtatctctgcctctctatgtctatgtctattgtgaataaataaataaaatctttaaaaaaaaaaaa

SEQ ID NO: 9930 - DNA, 194 bp, Canis familiaris
ccacacaggctcgggtaccccgtgctggtggctgctttgcatttggaaggcgggcctcgtgttctccgcgccctcagaaccccctttgttggattaggggggccctgggggtccagatagatgctgtttttgtaaagtgcaatgtatatgtggacttttagtaaaacggagcatttgctcgaaaaaaaaaaaaa

SEQ ID NO: 9931 - DNA, 583 bp, Canis familiaris
gctggagaatgcttgttgggtctgtgaagcctgggccaggcagccaaatctggcctgtgctgaggatgaaaccctctgctttcacatctctgagctgcaccctcattactgaagatgccctttgctttatagctttgctggagagccatatcaatcttcccaagtctggaaaggtaaagttgcctggggcctaagcgtcctgctcccttgggcaaccaatgggaaattgggaacccaatctgggaaggtcagggacggggactgcctgaaggagagctagccctagcctggcccctgcccagatgccattccatcactgatatttaagtgaaggggaggatccctagactatgttcttggctccagactcaaaaatccacaaaagccaaaccagctcatttcaacaaaggagcgctgatgtgaggggcaaggctgcctctgctccaggctcttcagaaagcatctgcatgtgaacaccatcatgcctctataaaggatccctattacaggaacagcatgagtggtggctaacctgaccaataaagttattttatgattgcaaaaaaaaaaaaaaaaaaaaaaa

SEQ ID NO: 9932 - DNA, 370 bp, Canis familiaris
aatgtgaaggctcaagatctcaggataaagagggcatcccgcctgaccagcagaggctcatctttgcaggcaagcagctggaacggaatttggcggtcccggtcatcgtgcgtgtttcgtgagttacaacagtccagaaagagtcaactctccacctggttctccgtctgaggggtggctgttaattcttcaatcttgaattcttagtgcccaatgatggcattgctctgcactctagccatttgccccaatttaagtttagaaattaccagtttcagtaagagctgaatcactggttttctcaatagctgttcaaaatgttaataaaagttttgttgcatggtaaaaaaaaaaaaaaaaaaaaaaaaaa

SEQ ID NO: 9933 - DNA, 553 bp, Canis familiaris
accaggaagccagctttccagaccctgcgcatccgggaccctggagtcctgaggaaaaggaaattctaagattcgggggaagcgaagggagggcattgggatgaaaaggtgaggccaacagacggcaagggtcactggagagtcccagctccaaagaggtggctttcctcccagagcacgactcatcaaggtaccaacagcaaatgtcgtccgtaatcatgtgctgtccctccacaggcgcaccatctttggggcacgatggactgaggtctctgccggtctcctgagcgccacacttctctccctgtgagcactgtctgggtgtgcctcttgttggtgacacccaccccggaggtggcccgtttggaaccgcccccactacttcctccctgcgtccctcccatctgagtatttaagcacccctcccccttctcttcctggccttacccccacccaccctgagatccaccccagcctttctgtaaataaactccccccccgccccgacttgggtacaaactaaaaaaaaaaaaaaaaaaaaaaaaaaaaaaaa

SEQ ID NO: 9934 - DNA, 592 bp, Canis familiaris
gagccacttatcattaggatagtctgggataaatataagatactatttctcgtcatggtcctgtgtttatgctggttccccacatgctcatctgaactaatgggctttttggcatcatgctcctcaaatgcatcatagggaatgaatttctgctactaagaacccccattatagctttgtcagacagggttttgatttagtgattacacgatgtgctctccaggcaaggggggagggtccctgtcagtccttaactgcaagcagcccccttgttagagccgagccatcgcctctctgacagatgctgttctgctgagacatggcccaatccggaggtgaagggctggacgtctcttcttccccttcttggccatggaagccagcctccatgggctttactttaagaatccagttgttttgggatgcctgggtggctcagcagtttagcgcctgccttcaacccagggcgtgatcctgaaatcccgtcccacgtcgggctcccttgcatggggcctgtttgtccctctgcctgtgtctctgcctctctctctttctgtgtcgcgaataaataaataaaatcttaaaaaaaaaa

SEQ ID NO: 9935 - DNA, 675 bp, Canis familiaris
gtaaattggggatatagctaacctagaattttctgcattgtaaaataataagtactgtttatgtttgtatatgtagaatttaacatttgtgtttaattttgctgtggtctagaattgtggtgtttctgtagtggccataaaggcctgaaatgatttattatggatgtcagactttatcatgagaagtcctaggtaatgacttttcttgatggtgggactctgactcatgcatttatcaattacacaacaattatttgcaatagattatttgactcttcagtttttactgagattttaaacactttgcactagtataatacatctgtgatatttaccccaagagtttataagcacgatgtgagaataaagtaataccccaacaccccgtgggaccgtgtccttggaaaaactaggggaaaaggaaaggttaaaaattccaccaaggtaaccaatccaactaatcctgtaattaaatagagttctataatacagaaatagtctacattggtatttgtgaaatctatggaagaactttaggattctagcagatggatactgaatgttcaggcccacttaagttattgatgtataaattgtgtttttgtctctatgtacagagatgtaaccatttttataataaatatttttattacaccaggaaaaaaaaaaaaaaaa

SEQ ID NO: 9936 - DNA, 612 bp, Canis familiaris
gaggtcgctgtcccgctaagtatcggtttctgctgatgctgattgacatcccggccccgtggcatcagctccaggaaggaatgccttcacgcagtgctttggcggagatagaaacttagggatcaaagacagcgcagagatgaactcggtaaatcccatttggaatgataatttgatactaactgaagcctttctaatatttaagatggtttcagcggtcagtgtgctgccagaccccttgcttttacttttgtagttaactgtacagaacatttcaggaatgtgtgaatgcttgtcataatcaggcctttccttaataaatagggacttgatcatttataggaattatacatgaagaaagttttaaaaatgtatttttatgatgtcctatgttgagagggaacaaatatttataattttcaagtattcttacctaaatattgtacaatgtaatatgctgaactttcttaattttttgctaattttctaagatgtattaaaaatgttttgtatgtttgggttttttttgttttgttttttagtaaaatggactcagtaagaaaataaaagtaccagacagcaaaaaaaaaaaaaaaaaaaaaaaaaaaaaaa

SEQ ID NO: 9937 - DNA, 448 bp, Canis familiaris
cccagtgatgccatggtggtctgcccacgcacgcgtgcgcccaccccacctggctgcagcccttccctggttactgagttctggcccagggtctgtgggccccacctggctgtcgtggcagccgctcccagggcctccacagcccacatgggatgcccttgtccactgggatggcagctgggcttttgcaggtgggagaagcctgtgcatgacccgggccagggtggctcccataggaacccaggcaggacctggtgccacgaggaccctctgagcgggtgctgcagagcagggagcacggcctgaggagtagacctgcccccttctcagtggaggtccccgacagccctagtttgggggtgcggtcacttatacataccaagttaggttttaaagtggtaaaattcacaagcctttttctaaaataaagtatgaaatgctgtatact

SEQ ID NO: 9938 - DNA, 469 bp, Canis familiaris
tgttaccacataattagatttgaataagccgtcttgccatatgttaaagagttaagaaccatggaaatcagatgtatgaccatatttgtcctggatttagtttaagtgttatctagccaaatccttcccctgtctcatcctgtaggatttgagtgaccttgaatatttaagttgatacattcttctgctcattgtgattcccatctgcagttacaggaatggtatgagtttgggcactttaaaagatgcctgatttatatctcatccacaatgaatgcactgtaggaaaacggaccttaattttagggaaaaattaaagctgctatagaaagttgaggtttattgtttttgcttgtaacctttacttactgccagaagctgtaattgaggaaaccattctctgttttatattttaggataatttaagtaagtatatactaaatttttatctactgtaaaaaaataaaaa

SEQ ID NO: 9939 - DNA, 580 bp, Canis familiaris
agaatgaccctcagctttctaggaccaaatggatcactggccctgacacgcactgggtcagccagctcatttttctggatcttgcatccccaaaggtcattgtaccaaggaccacttgtagaaataaatagctctgttcctcccataggacccttcatatgtttacagatttaaaagcatatcatttgtgatacattttaaggacataaaaactgtcatgatcttgatgagaagatatttcattgcagtggatggaaaatacactaaccatggcatttacctggaagtttcagatggtagaggttctttccagagtggctaccaagcatcggagggcaggtgctggccaggattgtctcatttcattcttatggcaactccctggtgaagttgctcctgccaccctggttttcagagaaagaagaggcagctggtaaaaggcagagaggatttgaatgcaggactctgcccccagagtgtgtacgccttcatccatacctccctgcctctgtttttgccgtttgacctacatcaagaataaaccctgcgggcagaaatttcaggtcgctaaataaaataa

SEQ ID NO: 9940 - DNA, 628 bp, Canis familiaris
tacgtatgttcctggggatctggtcaggtggagattcgagttcttggctcataatgctgttgcttgttatacaagatcttatcaaatgggattgggaatacccccggccgggtaagctttggagaggatgacacgtgaacgcagacatcggcattcctggtactccctggtgggcgctaacgaaaggctgttggcctgcctttatgaagccctcagacgaggccgcttggcccggggggcccggggggcctgggggacctgggaggccaggctctccagcgtggcctctcggacccggaggccctggtggcccagtgggaccacttaagccccttagttgccacgccagctgggccagggggacctggaattcctggatcccctttagatccagggaatccgggaatgcctggcggccccatggggcctctggttcctgggattccaggagcacctcttggaccacgtctcacccttgtgtccaggcgttcccttagcgcctgccgggcccacggggcctggaagaccaggagaccctctgagtccagcatcacctttagggcccggtaaccctgagtttccccttaggaccactgctgcctggttctccggggtaccccggttttcc

SEQ ID NO: 9941 - DNA, 513 bp, Canis familiaris
tggacataggagggcccgagcaggaatttggtgtggacatcgggcctgtctgcttcttgtaaatacccggacccacctactacacaatccattgccaatccagaggacccaagtactttccagtcccagtcactctagggctctgcactgaatggctgacctgacctgatgtccattcatcccacccgctcacagtgtggacttttctcccctctttctaagagacctgaactgggcagactgccaaataaattctcggtgttctaattaattaattgttcttccccgtaagaacccttgggtcgaaggcagaggcaggaaactaactggtgtgagtcaaacgccccctgagtgactgtccccagcccaggcaagaagatctcccttcaggtgccgggcgcaggaactgcgtgtgtcctacacaatggtgctattctgtgtcaaacacctctgtattttttaaaacatcaattgatattaaaaacaaaaaaattattggaaagtaaaaaaaaa

SEQ ID NO: 9942 - DNA, 584 bp, Canis familiaris
gacgcgcggcacacgtgaggcgggacccgggttcaggccgatgacctggtgaggatgctcttcagcccccgcagaggtggacctcctcccacggaggccagcctcccagggacaccccacggtaggggccccccccccagcctgttttgtaggagtctgctcttcttggcactgtagagtgtgggcgcacagagattgagcgtcttgaccacgatgccccacgacgtctacggaatgtggtgagacacgagcccacacctcgcggggaactgtgggctccacaccccgtgcccagcgcccccgcggggctccgagagccggggaaacctgatgttctgcccgccccaacccaaccgggaggggacccctggtggcggccatccgcacggtgctgctgctctcggagtggacatggcaggacggccctccctccccgggcctggctgagggctcggcacgcaggcccagagaccccgtggggggctgcgcgggcagccgtgccacagcaacccggtatttaagtgtcggtgtagacaacccaagaataaatgatttgtggttttttaaaaaaaaaaaaaaaaaaa

SEQ ID NO: 9943 - DNA, 568 bp, Canis familiaris
cttctgagactcatgccccccagggcgggtgcctgttgggtgagattagacacctgtgtctttgagcgcagtatttggaccatcagggcctccccactggaggccatctctgcccaagaggctgagctgacgccaaaggcccagggatgcctacttagctcttggtatttattttcttccacttcccatcccctccttccagataacttatacattcccaggaaagctcagctcagatcgggaatgtttaaggaagggtgggcagtttcccttttcttttggtgatgccattggcagtactacccagactcgagcagaggggtcagggagaacctgctgtgacagttgccccagcagtgccaggctgggctctggcggtgtggcccatgggacggcagaccgccaggtgggaaggccaggcctggggcttgtctcatcagttttagatttttttttttttaagtaaaaaaaccaaaccaaaccaaaaaaacaactttttttttttttttttttaaaagctttgaaaattgatggtttgggtattaaaaagaaaaaaactaaaaaaaaa

SEQ ID NO: 9944 - DNA, 441 bp, Canis familiaris
cacgagcgtgtctttgggacactcaggtctgggaggtcttttttgaccagagaggccacaggctcaagacgcaaggtgtagaaaatattgtgaatatagcaaaagtggtgttggttgaattggttttgttttgttttgttttgtgtttcaccattgtggatagctgtcacaagaggtctttccctcagtttccagcatgttcttccttttctccctgttctcacgtttttcctcctattaatcaagagaaacttcaaagtccatgggatggtcggatctcacaggctgagaactcgttcacctccaagcatttcatgaaaaagctgcttcttattaatcgtgcaaactcttgccacgatgtggggagtttgacaaatctttccaaaataaaaagtaatgacttagaaaaaaaaaaaaaaaaaaaaaaaaaaaaaaaaaaaa

SEQ ID NO: 9945 - DNA, 541 bp, Canis familiaris
aaccatcaggagaggatttttgtttgatttgtttgacccgtatgttttggcataaagattttggtagctttatgcagctgattggaagactttgtcctatgatctgggacaggtgtttaaaaaaagggacacatcagtaaattgcttggcgcccagaaaataaaagcgaggtggctattatttggtctcctaactaaccccgtttgtaagttaaaataaaagcctgtataaattaaaatagagactgtaattgtctacatcctttttcacctgaagaaatatttgtatatttcccatatataagtattatgcatgatgtaagccacgtacatgttgtattttctctgaatagcacttttttggtactcgtgattatcactcagttctgtggctgaccctttagttctatttagttttttgtccctcccccttttttgctgctataaattgtaataaatattgtatatctcctgaagccagttaaaaaaaaaaaaaaaaaaaaaaaaaaaaaaaaaaaaaaaaaaaaaaaaaaaaaaaaaaa

SEQ ID NO: 9946 - DNA, 237 bp, Canis familiaris
ggccggcccgggggcattcgtattgcgccgctagaggtgaaattcttggaccggcgcaagacggaccagagcgaaagcatttgccaagaatgttttcattaatcaagaacgaaagtcggaggttcgaagacgatcagataccgtcgtagttccgaccataaacgatgccgactggcgatgcggcggcgttattcccattttaaataaaaagtataaggaaaaaaaaaaaaaaaaaaa

SEQ ID NO: 9947 - DNA, 667 bp, Canis familiaris
aaatggataaagtaagataatgttaaaaatgtccccgttttgtcctgaaattttagtccattctggataataggattttctagttcagatatgagaagttgtagctctgatatctagctttagccttggtctgctgattgcgttgttttgatttgcttttctggaaaagcatttttgctagcagccatcacagacttcctccttcatacctaccagtcactttatatcgtcaaactttgtgccatgccagcatctgaagaactacatgcttttaaaatagttatgtcctcctgtctgatctatctatatgttgtttaatatactcactatctaccagcagactttcccctctatttcttcaagacaaccattctcttgtatatcacacgctctcctctacacacacccatttttgtggtgtgtgatatatatcgtgacttggggagaattggaaaaaaacacagctttttaatttgtttaaaaccagaccttctgcctgttacattttgtgctcttaacccattaaagaagccagtggcatttttaattttatattgtgtatgttttccactagtatatctccattgatttgtttgtgccctttattaactgccattttctaaaatttttttcaataaaaggaaagaagatgtgaaaaaaaaaaaaa

SEQ ID NO: 9948 - DNA, 579 bp, Canis familiaris
gcatgttagtggccagctcaaggctgatgaagaccccatcatggggttccaccagatgttcctattaagaacatccatgatgcttgggtttgcacccatgacatgttcaggcttgcctgcaccacttcggctgacctcttccccagccaggcactcatgctgtttcctcctccctcctgcttcctgatgactattcaccgctcctccagatgctcccaatatcataccccaatgagcagggccccggtgggagcgggcgcagtgcgctgctactaccgaggtgttgtgcatgatgtttggatgctagaatagttgcatctgacaggagaagtttgtgttgtaccagcgcatgccttggaaagacttaagtaatgccaaaggttgtcttttttttttttttttttttttaatctactgacaagttgctctagtaaccccaagaagtgaaggagaaagcagctgcctcaccgcccagatattgaccgcccagatattgatttgttcggatgtttcaatggctcatgatataataaaacccccaaaaattttcttaaaaaaaaaaaaaaaaaaaaaaaaaaa

SEQ ID NO: 9949 - DNA, 638 bp, Canis familiaris
gcttcctcgttccccaagaacacccagtttgtgttctgtcactatgtggtggtcccgtgacccagacatcttccctgagccagagagcttccagccttaccgctggctcaggaagagccagcttgctgcccctggggtccatcatgcatttggctccgtgccctttggctacggggtccgggcctgcctgggccgcaggattgcagagctggagatgcagctgctgctgtcaaggctgatccagcagtaccaggtggtcctggcccccgagacaggggaggtgaagagcttggcccgcatcgtcctggttccccataagaaggtgagcctgcatttccagccgagacagtgctgagctgggcccggcctcctgggagccgcccccttctctctcccaggcgcagtcattccaggccaccgcccgtgtctcagacgggaagggggagaaggtggctgccggacccggagatcgaagaaacccagcgcactttctgtaggaccttgagcttttgccactttaatcatttccaatgtctccgtctcagataggaggccaccccgtgccacattgctatccttggaaaaaatacagaataaagggactctggtggataaaaaaaaaaaaaaaaaaaaaaaaa

SEQ ID NO: 9950 - DNA, 526 bp, Canis familiaris
catctactccagcacttcctgtcataaaactccagataaagtgaaccacgcagtcctggctgttgggtacggagagcagaacggaataccctactggatcgtgaagaactcgtggggcccccagtggggcatgaacgggtacttcctcatggagcgtgggaagaacatgtgtggcctggccgcctgcgcctcctaccccatccccctggtgtgagctgccgcccgggccggcgctggagtcctgccctggaggaaggggcccgggaccccagggccctcgcccccatgccgtgccctgaggcctgaggaaaatgaggaagaagagtccaccgaacgagcgacaagcctaccacgtctcccacatgaaggtggccgccagctgtgtgccttcaacactcctgttcacgcacttaaacccaacggccaagaatagtctttatctcccacatttggagagcacccctgtctttcctgtgatctgtattcaataaacatttggtgaactcctgcaaaaaaaaaaaaaaaa

SEQ ID NO: 9951 - DNA, 490 bp, Canis familiaris
  misc_feature (96)..(96): n comprises a, c, g, or t, or includes no nucleotide
gttgtgtcccgttccgcgagcccagccacagcctggcccctctggtggtcccagtggtgtcttgcttctctaaccctctgaggcgttctctatgcnccctggtcgttgtcccctgtccccagaggcccctgcccatgggctcccctcaggccaccgtctctgggccctctctccgcagtggaggacctggagaggaatgatggctcagccgagagcccttacttcatgtctcccaaccttaagaggctcttgaacaagaccaacaagaagctggcggagtcctaaaggccccgctccccccccccccgacctttgcctcttgggttgttgtgcttctttccccttactttgctacatttctatagttaagttggttttacttgaatgattcatgtttagggaaaaaaaatgaaaacacctttaaaatttgtttcaactcctcctgcaaataaaaaaataaatgaagaaggcagatgtaaaaaaaaaaaaa

SEQ ID NO: 9952 - DNA, 509 bp, Canis familiaris
ccgtcactccctccgtatgatgatatatgaggtgatgataataatatatctcagtcttcctacacacactatatgcacatatatatgtgtacacacgacatattgtggtgtctattagggggctatcacacctttggaggttgacaccatgtggatttaaataatattatttgtggagtcaaacatctagccgccaatattttattctgtcaaatgctatttccattaaatagtttaactagattgtataaaataactttattgcctaacatgaaattaccaagcttaggcataggggaaatgggctttttagaagccaggaattctaagtatattctgttcttcaaataaatgtcattttcttctttaaatattgaatatgttttacgaacaatatctttctttgcaaactcgaattacatgtgcttggaattaagttttagtttttttcactgcaccataataaagcctgagttctgatcgaaaaaaaaaaaaaaaaaaaaaaaaaa

SEQ ID NO: 9953 - DNA, 692 bp, Canis familiaris
tagaaacttaatttgatataaaataaagttaacattctactcaggaaaaagtatctcagtgtatattttcaatgcacatttgtcctcacacagaaagttcttaatgtgattttaccaaggctgtacatgtttgatgtttaaaatcatagcattcttaagtttatgaacaccccaaatccatgattctgctgtacttctttattgtgtagtatttctacagcgtgagcatcatgccagcgaatggtgacctcttaataatgattgttttactacttcctagacgagatacacgcatcagagtatttctacccctctacgcgcaaagcacctgtagatgtgtatatagatgtgggatataagagacatcgtgattatacactcacacaaaacgcggggaaaaacacctatactctcagatatgatgtcattggcccataatgtaatagaaaagttctgtggatcgccccctttggtctagattctgctggctatgtgactccattagacttacacagtatcataatgtacaacagtttttctgaaagatcttgcctttagaatattaaacattctatcattgaagagttttggatgtataataattttgtgatgctttagaaaaatagtctaagcacaaaataaacttttctaagcacttcaaaaaaaaaaaaaaaaaaaaataaaaaaaaaaa

SEQ ID NO: 9954 - DNA, 640 bp, Canis familiaris
tgccccaatcccgggtgctgggagagcaaggcggcctgagcctcactttgcttgtacgcggcttgccagaggtggcgcctgctggctcccacaacctccgctgatgtcccgactctctcctctaagggactgtggtttctgctccccagaccctcttcctgtcacctgcctcttctggtgatgcagagcccctaggagcttagattgctcctgaaccgccttgcctcttgtctggtggactgcgagtcactgatggagcacagagcccctggctcttttggtgttgtttctgacagccccctgcagctgttgctaaaatcaggcttcgctcctggcggtggtcccagagtcatcgctaatactctcttcctccagttttcaacacagttcaggttgtccaattctgtaatatttatctccatttaaagaagtttctctacgagctgctgctctgaatgtaaatcgtgcaataagcgtggcgtgaactgcctttggacgcagccatgtgttccctccatggcaggtggctctttggggcactgattctcttaattttgtctgaaatggactgtacagaaggcactctcttatcacaataaacctttcctgaaaactggggatggtaaaaaaaaaaaaaaaa

SEQ ID NO: 9955 - DNA, 631 bp, Canis familiaris
atcttcacgaaagcaatggctttgctggggctggacttgcagtcaccgtcctggcccttgtaggggtagctgtcttcacccatgatgcccttgttgtagcggatgtactcgaacgcctggctggggagccccccttggcagccgtgattgttgaagttctgggcaccagtccaccagctgctgctctgccaaagagagcaacttcccacttttgatggcgatgcggactccagggcccccgtggtggagaagggtccagcagctgccacagctgccctgatttttcaccggtgacacgaactttccttttttccgccagtccacaaaaggggggtagggacctgtcccccggaggtagttacctttggtggctgagcaattctgaggctccgaccagagatacttgtgttttatttcagcaaagttcatgtctgaaaactggttcagccccattttaaacgtgtggttcccagcgttgtgagcatttatcttcctccagttgccaacgaaggtctgcagcctctggaggtactcctccgagctgtacttcttctggtgctgcactgcccatgacttgaagtgaactttctctaaggagctcgcggaggcgtccgtggcgccgcaggccggg

SEQ ID NO: 9956 - DNA, 239 bp, Canis familiaris
ctccggggcctcctgggtccccttcctctgtcggcggccctctgcgtggctctcagcccggacggtgattgggtagccgttggctaccgggaggacggcatcaggacctacgaggtggcttcaggctcccgggaggtccgctgcggggccgtggccgcggccgtgtgggcgctggtgtggctcagccccggggcgttggtgagcggcgcggaggatgggtcctgcagggctgggtcctc

SEQ ID NO: 9957 - DNA, 636 bp, Canis familiaris
cggaggcgccccttgggcctttaatgttggcgccaaggattccgcccatgccttggcctcgggaaccttgggaaacgtggaccgatccccccgggaaacccgtccttgcccctaccctataccccacccccggcttccctggaccccttgaaggagaacttagtcgtgattccatgcccagccaccactatcgagtctatgccgacgcaccccctactcgtgaagccacgcccaacaaccatcgcatcgcttcacttaggtcgagcatgaatcaacatatgctctgtctgtgtgtcgctgcatgggaggggggaggccgcactggactgccacctatgatagacatctacaacgtgctggtacgcacgcagcacgcgaggagttctgtgctgagggtgctcagggagccccacacagacgcctctgcggatgtcttgtacagggagacacgggcttgatttggacccacccggatgggagccaaggaaaaaaagtctctgttctgatcctacagaaagaagactggtgctgatacaggggcttgccgcatttgtggttggaaatacctgagcccaaagtatgtgatactattaaatatcttcctgagaaaaaaaaaaaaaaaaaaaaaaaaaaaaa

SEQ ID NO: 9958 - DNA, 639 bp, Canis familiaris
  misc_feature (1)..(1): n comprises a, c, g, or t, or includes no nucleotide
  misc_feature (332)..(332): n comprises a, c, g, or t, or includes no nucleotide
nccccctcaccagcggaggacaatcccacggggactctttcagttagcgcttcgttcacggcccccgaggtcttgccagtcgacctcgttcgttgatgggcccagacggaccggaatgccagggttccaggggagtttttcagcgcctgtgacgcccttgagtctcgccccgtgcccgccgcttgtcttccggggttccaagaccttggggtttccccgttggccttcgggcccaccgggggcttccaagccacgggaccaaggaacttcggccaacccagccgttcttcccagccaaaaccagcaaggcccattggcgcccctcgaagccncgcgtccccctgagcccccgagaacacaaggtgctatcctgcagacccccccgtctactcggaagccggggccatgggccttcggtggcacaaagcgaggtgttgctttttaaacaaaaaaaccaaacaaaacaacccaagctcttcttccttaggagagtgattggttctacgttttactgaaaaccctctttatgtgttagttttctgattccttgtgtttgctcactgtgtccacgtcagccacttttcagaataaaggtgttcattcctccccaaaaaaaaaaaaaaaaaaaaaaaaaaaaaa

SEQ ID NO: 9959 - DNA, 633 bp, Canis familiaris
ggtgaaccatgattctcttatggtgtttcaggaaaaatatatttatatctctttcaaggacagaagagtctcacgtttttatttttgtaatttttatcaggaagtcataagtactactcaatcagacctggtttccatttttgaaaattacgattcttgatgtgcagctaatttttattttccaaacaagatgtcatgaaagatttccggttttcaaagctgtgtgtttgactgcttcagatctctgtccattttctgaacgagaacttactttgtgcctagagctcccaccctctggtaatgtttcccttctgagcatttattccaaagtggaatcaactgtgtacctttggtatctggccagaaagtcttttactcagctcatatttgggtaatgtctttaccatggaagtataaccaaaataaagatctagtttagtactgcattatttattttcctaaggctaaagaggagcagtcttttgcttttatccagcatcctttatctgtggattcacgctgtgattactgcctttccttccttctgtgcctttcaatacaaatttcatttctgcacaagtgaaacattaaaaattgccaatgcagattaaaaaaaaaaaaaaaaaaaaaaaa

SEQ ID NO: 9960 - DNA, 489 bp, Canis familiaris
  misc_feature (419)..(420): n comprises a, c, g, or t, or includes no nucleotide
  misc_feature (444)..(445): n comprises a, c, g, or t, or includes no nucleotide
  misc_feature (454)..(455): n comprises a, c, g, or t, or includes no nucleotide
  misc_feature (463)..(464): n comprises a, c, g, or t, or includes no nucleotide
  misc_feature (466)..(466): n comprises a, c, g, or t, or includes no nucleotide
  misc_feature (473)..(474): n comprises a, c, g, or t, or includes no nucleotide
gaaagtaaaggaaaaaaaaaaaagataaaactgcaaacctagaaaactttttagaaaaaaactatttaaaactgtcagatcctgaccagcgcccacccagcccccttccagtgattccgtgccttgagtgtgtctgcgtgtttacacccatccctctgctggctaccccccgcaacccatgcgggcagctcccctgcccttccccgccctgccctccacagaattgggttccaagggctgttccagacaactgccaacatcaccgagggccccatcccagtggtcctgggcctggctccattaacctaaatgtagctctttagcgctaacctaggaaccgccgctgcctgctgagggccatgcccctcatgcccttgccccaggcctgggtccttcagcgttgaacacttccttgcttnnttttcacatagttttatggagatnntgttcaccnntggtttgnnanaataatnnaaaatggttagagaa

SEQ ID NO: 9961 - DNA, 281 bp, Canis familiaris
ggcagacaggccgaggccttcgaggcccccgtgaggcccagagtcctgggtcctggccctgtcccgtgcccccgcttctgtgtgccccattgtggctccactggctctcccctgctctcctgcctctacctccacccctgcccggcctgatgctgtggccccaggaccagccaagtggggaggatcagcccccaagaatgggtgcagtggcccggcccctggccccacccccctttcagggcaagaggctcaagttacaaagaagtaaattctggacaaaa

SEQ ID NO: 9962 - DNA, 710 bp, Canis familiaris
ccccgtgtctgcaactctccatagaccagaggtcatttaccaacttaaaaagatgatcacagtttagccctctggggttatcccattttctggagcacctgagctaagccttaaggtcttaggcaacactacagatagtaaacctacctccagccatcatccacgagaggcagacccaccctaggacaacgagtgatacatcgtgctacatacttgagtatatgagtatcgagtatgaaataagtcgtttcacaaccacatggtcgtagtagtagtatttatataatagaggctctgttcctataaagaggcacaggggagtaatatgttgtgagacgtgtgaggaagatgatagtagactccacatgaaagatgcacccaacctggtgtcacaagaggggaattggaagaatgggatttggggtgtttgttgggggttcaaggtaatggttgaagaaaaaaataacgatcatgtcaggaggaccaactagcagttaacctggtggatttactggttggaactggatagtagacacgcattcagcccttccctagttaccctggacttagcctgcatgtactgggaagtacatgaaaaccagccaggctttgtgtgtgttcaaaagaccttatgcttgcattccacagaagtttttaagcacctctatacatcaagtactgtgcccgaggtcaggggcacgatgtaaaaa

SEQ ID NO: 9963 - DNA, 543 bp, Canis familiaris
ccccttccatccgtagccctctctggctctgcatccccccccaccctctcgcccccacctcgactcctctagtcctcagggcccccccgggcctcaggtgctgtccagggtatctcctcccctactcttactcaggactcgtgtctacagtcaggagtcccagcatctgttgagggtctccccgcccacaccagccctatagccccccccctgatctggaagtgaaggcccacggggacactggggtggagtgtagggcattggtggttgacaagagttagtgccttgggtgggggatgccaggactctatgactgggagggacaggaaggggacatgacagccctgccccatctgtgggagcctgagggccccactgggggcacgtaccctccccaccagcagcccacagatgtggggccaggatgcctggcctctgtgtcctagaagggaccctcctgtggtctttgtcttgatctttcttaataaacggtgctatccccgcccaaaaaaaaaaaaaaaaaaaaaaaaaaaaaaaaaaaaa

SEQ ID NO: 9964 - DNA, 597 bp, Canis familiaris
ttgcctgatgcattgctcattattcccaaggttcttgctcagaactctggttttgaccttcaggacacactagttaaagttcaagcagaacattcagaatcaggtcaacttgtgggtgtggacttgaacacaggtgagccaatggtagccgccgaagtaggcatatgggataactattgtgtaaagaaacagcttcttcactcttgcactgtgattgccaccgacatcctcctggttgacgagatcatgcgagctggaatgtcttctctgaaaggttgaatttgaagcttcctttgtgtcatctgaatcatgaagactacagagagaccttaaggatatagctatggaatttttgtccaagcttcaaataattttaaaaagcattttctttccccatattaaaagagaatattgacacttaaattctgaagttctgaaattaaaattacagtattttttttaattgcactgcagtgtacacacattaagtaggctatttatacctagtgaaccagatgttttgctttagcttcagtgatgtaagagtaccatgttaaataaatatgttatctaccttgttattaaatgttccttgaa

SEQ ID NO: 9965 - DNA, 610 bp, Canis familiaris
cgacaatggcctctctttgggcatacatgccttacaccgtgctgagctggatattgtcctgtgctgaagcatccagcttgtacttggcaagtgtgtgcgtatggtcctttccccatcctgggtaaccatgttaagttcctgaaaagtacacaggaagaaaattcaggtgtttgcttatctttgtaatgctacagcacttggaattgcaccatggagcatgctcagaaatacttagtttgtctcctgctgggatgcagaaggtctcgatgtctgctgagaagtggtatgggaaaatgctcagtcgtttagtagagtagcgacataagcattggtcactagcaactgtcgtgttggtttttgatacaggcttcatgctggcttcatttgccagtcgtgttgtttagttgggaagtaaacaggaaagggtcttgagatggagggctggggccagttggtttgacactgatcagtccctggctagggcaggagtttgttgctgtactctgagtggcatctcctttgtcaaaacatagccaagatgtgaaattaagattgtggttctctttatttaaaaattctaataaatactcaattttgaaaaaaaaaaaaa

SEQ ID NO: 9966 - DNA, 504 bp, Canis familiaris
gccaagaaccaccccaggggaataagatcgaaggaaataataaggaaccataggggaagtggatccggagaaaggatccagagtctcaggtaaatgccattctttattaaaatacagaaataccttttacagcatgaacagaaaatactgcattgtcttggaatcttaagatttagaaattttattgaatcactccccaggcccacaatacactgtatttgaaaaaaaaaatgctgcttcaaaaatgaaaggaaaagcagtcccaaatgttaaaatcattaaggccagtagtgtttattgaatgaaactacatatctgactatagggtacctactggtcactatttaaaggaatatattaaaatagatctctaaataatgaaagaatggacccaacagaagaaatttacatacaataacaaaaggctttgaaaatttttaaaagcacgttttgatacgatgcttatatataatcatctatttgttaaaacctgtacatttgtaa

SEQ ID NO: 9967 - DNA, 529 bp, Canis familiaris
gcacccatgtccttgttctcccctcgtcagcctccccactgccctttccacatgttcctccttcctgccttggacagggctttcccaggatgcatgtcctcagagggaacagcctatctccccgagctggggagatcagagaacttggctaggtccccacctgcctcccagcaggctctgggcgtccagtgtggtgtagcccccagagcccaggcctgtgtttagcccagtggctcactgatctggcaccttgtggcagggtggggggtcctgctttgaagccagtcacctgccctctctgcctgtagtccgtggaagggggtgtgcatgtgcctctgtgtgtgtggctgagtgtattacacgtgtgtgtggagggagggagggaggggagcatggtgtctcccgctccaccgccctgtgtcaagccccatcagctgcccccttttactttgcattgaacggcctgtccaaagatcctctctctagggcagcagagacctttttgcactttaaaaaaaaaaaaaaaaaa

SEQ ID NO: 9968 - DNA, 584 bp, Canis familiaris
aattcaagccttgttgattttgcagaaaggtactgttactgtctgataggatgcctttgttttgtacatgatccacatctttgttttacatttcttttatcccaaatatttaggcatctgacattttcaacccaaatttcaattatatactgtgatttttatttgttgcaatacattaaaatttcagaggtactttggggctcaaaagctaggatttctaagtatgtgcatttcacataataaagctgttaatggtgagcaaagtattatatactaactagatttttccacatctgtatagtatattatatgtattttgtggtattgagattatagaaagtttagagtgtcaaacatgcgtttaatgtgtatttttaaacaaatttatggcaattaaaatatttggagacagggtatcacatttcaatttgtaaagatctttttaactctactgtgtcattaagatgctttgtataatgccaaaccatagctggagaaactaagtttaataaatatcaaatagattttctgtattaaagtttataaacactgtgctctttaaacttcttcaactcttaaaaaaa

SEQ ID NO: 9969 - DNA, 458 bp, Canis familiaris
attgctgaaagcacaagtttcccacaatttgccctgcgtcccccatttggggaagaaattacagacattaactttccaaatcggtactcattttgttgtgagattacatactttcagtgctgctattggattatttcccacccccttgcaattcccagattatttcaacctccccactacccctgccaattgcagttaggtcattcttaaccttatcatttgaggatcaggcaaaactggaatttgcagggcatttgtttttaaatctctcttccgtattgggagttttaccaagaactgctgatttgtcaggacgtcatctgggtacctgtgtcactgttttattttaaccttcagtgtattctgtgcattttcttaatggattaatctagttaataataaattgtttccaagtgaccacccaaaaaaaaaaaaaaaaaaaaaaaaaaaaaaaaaaa

SEQ ID NO: 9970 - DNA, 554 bp, Canis familiaris
cgcctgcgccgctggagtcagcactgcttcttgattgtgcttccacgattgtgcaaggtggtacgctcggtgatatcgctgtggcccgacctcgttgaggcagccgcagcaaggtaatcggggtgaggtcgccgcccgcggtagtcggcccggccccgcaggccccggcagcacgttgcccctccggagatgggcaccgcgtgcgagacgcctgtggccgctctccagcaccaggcccgacgtcctgccgtacgagtagatggacagcatgcggctggggcgccacgtgcagggcggggacgcccaaggcctcgaacaggagctcggcgtacttctcccgctggccggcggggccgagcggggggtcggatgagcagcacggcgtgctcctcggggcaggatcttcatggccgtgcggaacacgtactcccagatgctctgcacgcagtcccagtccaccaccacgccgtgctgcagcgggttcgtcagcttcaggggcgccccggtgcggagcagctcgtggcccacgtaggtctccttgcgggtgtcgccgg

SEQ ID NO: 9971 - DNA, 219 bp, Canis familiaris
cccttcaatgccctcccgggctaagcagctcgtgccttcaggagccgactccctgtcccctcaactctctctccaaacccttgctttcagccttctcggggctgaaggggcccgatttacgtgcgattcaaaattcaaaactctccgcccggggagacccgcattcaggagtctggcctctgagtctcggtctcccgcctgcctccgagggagccgccc

SEQ ID NO: 9972 - DNA, 123 bp, Canis familiaris
agtactccattcctttgttattgcgcgaataacattccattgtatgcttataccacattatattatccactcatcagctgatggacatttgtgttgtttctactttatggcaattatgaataa

SEQ ID NO: 9973 - DNA, 658 bp, Canis familiaris
gctggcccagcgtgcacggcaagtcctgccacacagcaagggagccacccgaaggcagaagtctaagagcgccatcgaacagcctggaggcctttgtcggagaccgctgccggtggggccaggatggctgggatggagcaggtcacgggccacagcagggatgttccccagtgcattcaggaagccctgcacacacagacatgcctccttgcaggcgccctccagcaggccggctggggacccccacccccgccccccgtcccagttcagactgaagaccactctcccctattgcagcagaagacctgggatcgaagtctgcagacagcactgcaggaggatgcggagatgatcctgagtgttcgttaaaccagtcgaaagtcctgttactgggcatctgtgatgttggagatggaattttaaaggttattttttgcacaccccatttctcactatcttcattatttcatgtaggtgtatgattttctaggtcttccacttctaaccggaaagctgcttggttggggtggggagcaaaaatgaatgaacttgtctgtgcactgtggcagaactgttatttttatggattttacagctcaactaacagtgttacttttcaagatttatatatttatatactcttaagaaaaaaaaaaaa

SEQ ID NO: 9974 - DNA, 591 bp, Canis familiaris
ctccccaagcccggacccccacctgtggagaagcccaaggcctcatcggaggctcaagcaactccggaagctccccatgtgccccatgtgtcctgccccaagccgtgtccgaaggaccaggcaccctgcagagccacttttggtccaagcagcctggtggtgaccccgaccagtgaagtccaatggttcgaggcccaggggaggcctcactgtcactgtcagtctcattggtgcttacaaaaccggaggcctggacctgccttctccaatcactgacacccccctgaagttctatgtgccttgcaagcagtgccctcccatgaagaaaggagccagttatctgatgatgggccaagtggaagagaacagaggtcctatccttcctgcagagagcttcgtggttctctaccggcccaaccaggaccagatcctcaccaacctcagcaagcggaagtgcccctcccagcctggaagggctgctgggtcccaggcctgaaacccaggctaccttcctagcctggagccctagggactcctttcttatcccaaataaatgtttcttgactgaaaaaaaaaaaaaaaaaaaaaaaa

SEQ ID NO: 9975 - DNA, 438 bp, Canis familiaris
aactgcggatccggacccccacgtggcgagttccttgagcggcgattcctggccagcaataagctccagattgtctttgattttgttgcttccaaaggatttccatgggacgagttcaagttactcagtacctttcctaggagagacgtaacccagctggacccaaataaatctttattggaggtaaagttgttccctcaagaaacccttttccttgaagcaaaagagtaaacatggcccagcagtggaaccagccattccttgacaagccagaggcctgcatcaagagaagggctcctcagccaacccacctacacgctcgtctcactcaactcaatgtcacacttctgcctcttgcaagattgctggaaaaaagtaataataaacatagctacttaaaaaaaaaaaaaaaaaaaaaaaaaaaaaaaaaaaaaaaaa

SEQ ID NO: 9976 - DNA, 642 bp, Canis familiaris
  misc_feature (58)..(58): n comprises a, c, g, or t, or includes no nucleotide
gcctttggagtggatgctaaccacacagactttcatcgactcggctggtgccatgctngcaatatgctgttgcttttctgaagcctactaaggtctcagctcgccagctgccaccaagtgtagccagagtggacgcccaaagccgagtgctatttccacttgggttaggacatgctgctgagtacgtccggccacggctggcactcattggggatgcggcccacagagtccacccacttgcaggacaaggtgtcaacatgggctttggggatgtctccagcttagtccatcacctcagtgctgcagccttcaatgggaaggacttaggctctatgagccacctcacaggttatgaaacagatagacagcgtcacaacactgctcttctggctgctactgacctactaaaaaggctctattccaccagtgccactccacttgtgctgctcaggacatggggcttgcaggccacaaacgcagtatctccactcaaagaacagattatggcctttgcaagcaaatgaatgctcctcttctgaacatgatgttgaagaaaaataaacatcttttattttcaagatttaataaatttactttacattagaaaaaaaaaaaaaaaaaaaaaaaaaaaaaaaaaaaaaa

SEQ ID NO: 9977 - DNA, 577 bp, Canis familiaris
aggattaagtgaagaaagagccaaattggtgaagcagattgaggagcaagaagatcttcttcggaggctaaaactggtccaaatgtatagatccaagaatgacctgtctcaggttacacgttggtaatacagaagtggagaagctgtagcccagctgttgctttatgagttgcagtcagctatgtctgaggaaaaccagaaactcagccttactcagttgatagacccctgtgggttagatgataaactgctacactacaacagaaatgaagaagaatttatgggtgtttaattcataatttttttctctggaatatttttgagaatgacaaatttacttaacacatcttaaaaggaaggtagaaaccacttagggcttagagaaaggtgtcttgatgaatgtcagtttagggcactctgcaatgtaaagtaagttctaaaatgaaaatttagtattttgaataaatttgccagagaaaacttgacatttaaagaaatgtgaaaaaaaattaaatcatgtttaccaagtaaaaaaaaaaaaaaaaaaaaaaaaaaaaaaaaaaaaaaaaaaaaaaaa

SEQ ID NO: 9978 - DNA, 529 bp, Canis familiaris
gcttcattcaggagagtctctcgagctctctcttccatgccgtgtcctgcctggttaaggggagagaacttgtccatatgtcccacgcggatgggttgttgttctcaaagggatcacactcccaggtgtccttcgcttccaagttctgtttggaggccacaagacaacccccccctcccacccagggtttctcctaggaaattcactggaattgagcgcaaccgtcctgagagtcctctctccgtcgtttctgttttgtttttaatatgttgtcagtagcgtttgttttgggtatttttttttagaggcctcacaataagttattactgtccctctcattttttttcaaaaacatgtggtgatatagtttttaaaaataactattttgttatagatcatgagatgcataaaactgtacagaactattttgtaatgtattgatttaaaaaaaatctgtaaataaagtttaaaaaaagaattcccatggccaaaaaaaaaaaaaaaaaaaaaaaaaaaaaaaaaaaaaaaa

SEQ ID NO: 9979 - DNA, 636 bp, Canis familiaris
attaatgcttatgttgtgtttaaaggatgagagctctgctacaaagccttgaaaagaaacggtgcccaaattgcagatggatttcgtattagagttgatcttgtcatctgagacttcatctagggacaagagatcagtgtttgtgggaaatctcccgtacaaagttgaagaatctgcggttgaggaacactttttggattgtgggagtatcgtggcagtaaggattgtgagagaccgagttactggagttggcagaggattcggttacgtactctttgagaataccagatgctgttcatcttgctctgaaattaaataattctgaactgatgggaagaaaactgagagtcatgcgttctgttaataaagaaaaattaaaaccaaattcaaatcccagtttgaagaatgttggtaaacctaaggagggacttaattccgcttcaaaaaatgtaggactgtgtaaaaatttgtttattggagaaaaagctgtgtctcattaagaagaagaagaagaaaggacaaaagaaaagtggacacactaagaaacagaaaaaacagaagtaaccacctgaagattatttagttcctgctgagtactggtaataaaagtgtggtaaacccaaaaaaaaaaaaaaa

SEQ ID NO: 9980 - DNA, 601 bp, Canis familiaris
gcaaacttggttgtagtggaacacattcccagttcataacctatgcagactcttttaattttcctatctgagtggtaagtattctttagtgcttttgggtgttttgttttgttttaaacctgggattgagaagttgatgaatggaaattcatcctttaacttcatgacatgtgggtttaccataattgagtcaaggtgaagtttgaaatttgggggcagggggcgtgtgtgggttgataacttaaaaaaataatgggctctgattgggcagctactcatttgagttccttccatttgacctaatttaactggtgaaatttaaattgagtttatgagctcatcttcaaaacttttgctagaagattttcagctgttcccaatgggacttactaacagtatgtatataaaaagatcacatcagtggatgagagacatttgatcccttgtttgcttaataaattgtaaaatgatggcttggaaaagcaggcttatagtctaaccatggtgctattattaggcttgcttgttaaacacaggtctaagcctagtatatcaataaaacaaatacttatttcatttgttaatgaaaaaaaaaaaaaaa

SEQ ID NO: 9981 - DNA, 569 bp, Canis familiaris
caatgcgcaccatgggacataaggagggcccgaggcaggaatttggtgtggacatcgggcctgtcttgcttcgttgtgtgttacccgtaccctctgtcttactcacatcccttgcccattccacgaggtaccccagtactgttccagtcccagtcactctagggctctgcactgaatggctgacctgacctgatgtccaattcatcccaacccggctcaaccagtggtggactttttctcccctctgttttaagagacctgaactgggcagactgcaaaataaaatctcggtgttctatttatttattgtcttcctgtaagacctttgggtcgaggcagaggcaggaaactaactggtgtgagtcaaacgccccctgagtgactgtccccagcccaggcaagaagatctcccttcaggtgccgggcgcaggaactgcgtgtgtcctacacaatggtgctattctgtgtcaaacacctctgtattttttaaaacatcaagttgatattaaaaaccaaaaaaattattggaaaaaaaaaaaaaaaaaaaaaaaaaaaaaaaaaaaaaaaaa

SEQ ID NO: 9982 - DNA, 681 bp, Canis familiaris
gccagttcacatatcttgttttgaaaggatggctgcacgtacacaccggtaagtggggctagatctatgattcgagtactcggtcaacagaagacctcgtcgcgctcctccatcagttgacattgtcgcccatggacataggagggcccgagcaggaattttggtgtggacatcggggcctgtctgctttcttgttaaacctcgtatccctcgtatcactaccatccacttgcccatccaggaggacccaagtactgttccagtgcccagtcactctagggctctgcactgaatggctgaccttgacctgatgtccattcatcccacccgctcacagtgtggacttttcgtcccctctttctaagagacctgaactgggcagactgcctaaataaaatctcggtgttctatttatttattgtcttcctggaagacctttgggtcgaggcagaggcaggaaactaactggtgtgagtcaaacgccccctgagtgactgtccccagcccaggcaagaagatctcccttcaggtgccgggcgcaggaactgcgtgtgtcctacacaatggtgctattctgtgtcaaacacctctgtattttttaaaacatcaattgatattaaaaaccaaaaaaattattggaaagtaaaaaaaaaaaaaaaaaaaaaataaaaaaaaaaaaaa

SEQ ID NO: 9983 - DNA, 537 bp, Canis familiaris
tagcctttggcaggacgtgtccctggaagatggtcatctgaaattcgggttgttgtcacgtttagctgatgacttgggccatgccagtgccccactccaggcttcaccagatgtgcagggtcagagatgttcttgatttctataatgtgcctattcatgatagatctaaatttgatgaactgattgccagtaatctgcctcccaatttaaaatcacttggggttattgagcaactcagaagaggagcatcctgaaatcattttgtcttgagcaaggggactggttattagacttttgatactttaccatgtgaaatgctatcagaattgttctctaaatcctctttttctgtagaagaatgaattagctctttttttccctcatatcatgaattaactaccaggattttcttttttcacatttgctgaagtcttttttttttttcttttgatggaattgagtcattaatcatgtatgaaagtttccttctctggaggacactaattattaaacttaggtttaagatatgaggctatt

SEQ ID NO: 9984 - DNA, 594 bp, Canis familiaris
tctatcgcctttccactgtattgaatgggatattatggagatcagatcagctatgaccagggagggacgcgtcccagattacaccatggacttggttggtaaggccctaatagaaatatccagcttttgcggtgacatccgggtccctttccaagcaaagcttctcaaggggaaagaaaaggcttaaccccttttcaggccaagtcaaggaggagcagcctcgggcaggcttcagaagagtgggctgccaagggctgtgtgtcccctcactcagggccacgcagccccagaaatggaaactcttgcagagacaagaaagtggatggggtgacggggtgacgggcactgaggggggcacttgggatgaggactgggtgttatactatatattggcaaattgaactccaataaaaaaatatacccaaaaaaaaaaaaaaagagagagagagaagacaaaaaagaaccttattaggaatgaaaagagaagcaatggacagatctgcagattttttaaaccataaaacaccatgccatactggggaaaaaaaaaaagagaaagtgaattcttattccctgacttctcagtagtcaaaa

SEQ ID NO: 9985 - DNA, 677 bp, Canis familiaris
aaagcttgaagtcgacagtgcccattttaactgagacctggctagttgggcagagggcaaggggcaaagcaattcacagtatttcgtggcaggggaaacagcaacatgcaaaggggatggttattaaaggagagaatgacgattttaatggaaaactaggaaagttcagaattgctgtgacacccatgggaaagtggggagaggggagagaagaggaaccagatatgcaaagtaagcagcggtatgtgtggatagagctttatatatcatcatgaaggtctttgaaactactagtaacagatgaagggttttaagccagtgagatgtcaagatctgatttgtgttttggagagctcactcctgatagagcgttagagggggcaagtccagaggctgatgggccaattgaatggctattctataatctggaagagaaaagatgttgatataaaccaatatagaggtagaaatgattgagagaagtccaaaaaagagggatgcctgggttgctcagtggttgaacatctgcctttggttcaggttatcatcccgagatcctgggatcaggtcctatatcagtctccctgcaggatgctgcagggttccctccctctgcctatgtctctgcctctctctgtctctcatgaataaataaataaaatctttaaaaaaaaaaa

SEQ ID NO: 9986 - DNA, 644 bp, Canis familiaris
gtcacatatactgttctgaaggatgcctgcacggaacacaccggtaaatggggcagactatgatcgagtaccggtcacagaagacctcgcgcctccccaatcatttgacattgcgcccatggacaatagggagggcccgagcaggaatctggtgtggaacatcgggctcctgtctggcttttcgttgtataaatatcccgtatcccacttacgacaccatgccattgccaatccagaggacccaagtactttgccagtcccagtcactctagggctctgcactgaatggctgacctgacctgatgtccattcatcccacccgctcacagtgtggacttttctcccctgctttctaagagacctgaactgggcagactgcaaaataaaatctcggtgttctatttatttattgtcttcctgtaagacctttgggtcgaggcagaggcaggaaactaactggtgtgagtcaaacgccccctgagtgactgtccccagcccaggcaagaagatctcccttcaggtgccgggcgcaggaactgcgtgtgtcctacacaatggtgctattctgtgtcaaacacctctgtattttttaaaacatcaattgatattaaaaacaaaaaaattattggaaagtaaaaaaaaaa

SEQ ID NO: 9987 - DNA, 655 bp, Canis familiaris
ttggatgctaccactggtgctgtcccgtgctattgctgagttgggcatctatccaagcagtggatcctctggattctacctctcgaatcatggatccccacattgttggaaatgagcattatgatgttgctcgtggggtacacaagattctgcaggactaccaatctctccaggacatcattggccatcctgggtatggatgaactttctgaggaagacacagttgactgtgtcccgtgtcacgggaaatacacgcgtttcttgtctcagcccattcccagtaactgaggttttcaaccgggtcaataatggggaaacctgggaacccttcctgaaagggaagaacccatccaaaggaatttcccaagccagatttttgggccaggtgaatatgaccatcttccagaacaggccttctatatggtgggacccattgaagaagctgtggcaaaagctgacaagctggctgaagagcattcatgaggaggtccttttggcaaactaagcactgatcatcctcggtgctgtgctgcttgcccctaatctaagaaaaatctgtttgctctgtaggccacatgaaagcctgtgttctgtctgaagagtatttaaagtttccaataaaatgtacatccctcaaaaaaaaaaaaaaaaaaaa

SEQ ID NO: 9988 - DNA, 680 bp, Canis familiaris
tgtcccccttggtttaatttgtttggtctctctctgccatcttaggttggcatgagccatgatgtcaacattgcttagcccccctgtctgtaaactgcctccctgttagttcaatggacagagtttcctcaaggcgtccaaactaccttcgtgacctggactggggctgggtgccccacacccttgttcctccccccactcgctttaagagaccacgagcccagacctgtgtgggggcccccacggtctacagcacgagatggggatacctcgtgtgtgcacaagagatagggttgaaagaaccgctgtggcacgagggttcctcgcccccacactcggcctccacttcttcttctgttctgcccttcttggcccttggtaggcttcccaggaaaacttggttaaggtgttcccaggccaaaggggaataaccccaggttcttttccctgtggctttgctgttcccctgcctcctttttgtgtttttataactgtcaccagtttagccactgtttaaattgtatatattgttctgaggcgtctggcctatcccttcagtgagccatgcccacccttgtgttgtagtgagaagctgttgtcatgactaaccttctgtctctggaattgtttgtttcaaataaagaattaaaattgtaaaaaaaaaaaaaaaaaaaaaaaaa

SEQ ID NO: 9989 - DNA, 575 bp, Canis familiaris
tagggctgctcttgaggttttgctctttttaccagctttcttgctttctcacggcctgttcttggcccaggtgtccagtcctctgaggagggagcctctatggatggtacactttgggacacttgtgggcctgagggtcagaatcaagtgggatgggcatgtgggctctgcatctgctcaacccccctacccccttggctctgaaggatccctgcttgagcagggcagcagaagcttctgggctcagagagaaagagtgtgtatatgtgtgtgtgtgtctgtctgtctgtctgttcatctgcgtatatataccaggggtggctaggggccaggactgtttgtctaaggtccgatctgatatttccaccccgccttctccccatgtacctcctgcccccacatctccatgtccctctcctgctcccccttgccttgttcctaccaatcacacaacctgtacagttgccattttactgcccttttttatattcaacagaaaccaggtgcctttggaggctctctgataaaataaatctttttttttttcaaaaaaaaaaaaaaaaaaaaaaaaaaaa

SEQ ID NO: 9990 - DNA, 553 bp, Canis familiaris
aacgtaaattcgtctgtaagcctgcaggtcaatcgcggactatgagagcggacgggccattcctagtaaccaggttcctgggcaaaatcgagtagagccatcggcctcaagctgcgggggaaggatatcgtgaagccgattgagaaggggccaagggcgaaatgaacacataagcctcgaaatcagtgcattccggctgatgtcgcctggctggttgcccttgaccaccagcgccagtgcgggtctcttgacgtggccgcgcggttacgtcggggcgccagccctgcccaggaacccccgtacccatacctgctgtcaaacaaactaaaccttgtatagcattgcttctcctgaaattttttcctctccatctccagtgtctgcccagacggggtggctccccggggacctctgagtgggactacctcaggttggtggggtctgtgggatggggcaacctgatcgggagagaagacccgtctccggtccggcttttagagaagccaataaacatttgttgcccttcaaaaaaaaaaaaaaaaaaaaaaaaaaa

SEQ ID NO: 9991 - DNA, 420 bp, Canis familiaris
attccttctccagccaccccttacgttcccgtcttaagcccccgataaaacagctgggcacggggagaggaggtgtaacactttctgctgggatcctaatttgcttggcaatgtattaggcatctctgtgcagactgtagtggctccatgtcactgactaaggtcactaagccttagagaaaccacccagcaagacgaggcagggtcaggatgcagacctagggctgtccaagtgcaatggcgctgctccctcccttgtaggatccccactgatcctgggttctggagctcattctgctctgaaggtgctacaaccatcgcacctccacctcctcttctaggaggaaggtaaccaggataactgagctttgttaatccaccaagttcagctacaaaaaacaaaccaaccaaaaaaaaaaa

SEQ ID NO: 9992 - DNA, 665 bp, Canis familiaris
ttagaggtatgatcagaccaggcttggttgatggaccctgcactcaggtgaggatacacggcgatgcctttcaagtgcatgcagctgactggacttcatcctcaagttccctcaacagtgctcgccagaagtatgtccgggcaagacctggcagaaggctgatatccataccaaatgggcagctacacagatgggcccagaaagattgagagcccgaggaaagggaagcccagatgaccagactttgatcgttaccaagtcctggaggccaaggaaatgagggaccaggattatccagcttgaaatttagggagcctaccaaaagccagcttctccctggaagctttctcccttaataagccaccctgctgctaaggggtgcggcggcagcacctgctgcaaaggttccagccaaaaaggtggctgctgcgggcaagaaggctccagcccagaaggttcctgccccgaaagctgcaggccagaaagcagcacctccaaaggctcagaagggtcagaaagctccagcccagaaagcacctgctccgaaggcatctggcaagaaggcataaaaaacataagaggctgttataaataagtaataaaggttctttttgacacattggcaagtgcaaaaaaaataaaaaaaaaataaaaaaataaaaaaa

SEQ ID NO: 9993 - DNA, 582 bp, Canis familiaris
ccggccaactttaatgtccctcttttagcgccccctttatgagaggtgcccctcttatcgtctaacaaccctctacgtgctcctctcgtatgcctctcggaggatattcttagtgtatctctgagggccccatcactaggtttatagtatgagaaggtatatctccgcaacctatatatcttctcaggcccttatatgtccgtagccaattctccctatagggcggatatattttaaccggctaattataccaggcccttccggaattacttttggaggaccattctttgtaaccaatttcttccccggattgggggtgttccgggatctaaccttttttatagccactggatttcacggattacacgtaattattggctctacattcctcatcgtgtgcttcctccgacggctatactaccacttcacgatcaaaccaccacttcggatttgaagccgctgcatgatattgacactttgttgatgtagtctggctattcttgtatgtatctatttattgatgaggatccctaaaaaaaaaaaaaaaaaaaaaaaaaaaaaaaaaaaaaaaaaaaaaaaaaa

SEQ ID NO: 9994 - DNA, 644 bp, Canis familiaris
acgggggcccatgccagcctccgctcaacccccgatgagcgccagctctacgcctggtatggacggctaccagattgtctataagctggagatgcgaaggaaagaggaagaagtctgaggacccagctctgggtttcggatctctgtcacctcctgcacaacttctacccccactcatcgtctgtcctcgctgcctccttggtccccatgatgtcagagccccgctctccccgcagtatgcacaccacatgtgagaccacaccctttctccgatgctcccctctctgttctcgtgtgggagcatcttatgagtatcgtagagacggtctccttttcccacggcggaaaagagggaaaccctacattccctctccggccccaggccaggccctttcaggccagtccggagttttcgcagatccacagctctggcccttacaggtgggcaaccccagcaaaggggcagcagaatattccctgcctcagtgttagtagggggcggggagagcgagttccggaggagggaaccctcacctctggctgcccctgaagtgcccggagaacctgggcttcctgcgcatcattttgtattgccgccttttgcattaaaaggaaaatccactgctcaaaaaaaaaaaaaaaaa

SEQ ID NO: 9995 - DNA, 588 bp, Canis familiaris
ccctcaccagccttagtgttcgtaccacagtcttcacaactgatgactcaatctgtacagatttactacagcaaacggcctggatccccggagcacaagcttcatgaaatgtgtatgaagtcatcttggagccgacgtagcatgtagtatggattctggaatattcattgaatgaaaggatcagtgagatcagagaaagtgttctctatctctctgttctttttcttttcttttttttaagatttatttattttaaagagggagagcgcatgcccgggtgggtctggggtggggcagagggagagcatctcaagcagactccctgctgagtgtggagcccaggcgacctcacaactgtgagatcaggacccgagcctaagtcaagaggtggatgcttacccgactcggccacttgcacaccctagagggtcactttcaagtggttggaatcacagacctctgggtgttgttctatatgttggcaaattgaacacccataaaaaataaatcaaaagtcaaaaataaattaaataaataaatgaaagagaaagaaagaaagaaagaaagaaagaaagaaagaaaaaaaaa

SEQ ID NO: 9996 - DNA, 505 bp, Canis familiaris
  misc_feature (1)..(1): n comprises a, c, g, or t, or includes no nucleotide
ngcccccgaggtctgccagcgacctcgtcgtgtgagggccagacggtactgttagccagggtccaggggagttttcagccctaacccctgagtctccccctccccgctgctcggggtcagacctgggttcccgtggcctcgggccacggggctcagcacggacagactcgcaccagcgtctccagcgaacagcaggccatggcgccctcaagcccgcgtcccctgagccccgagaacaaatgtgtgctatcctgcagacccccccgtctactcggaagcctgggccctgggccttcagtggcactaagcgaggtgttgctttttatatacaaagaaacaatacaattacaaccctaagctcttcttccttaggagagtgattggttctacgttttactgaaaaccctctttatgtgttagttttctgattccttgtgtttgctcactgtgtccacagtcagccacttttcagaataaaggtgttcattcctcaaaaaaaaaaaaa

SEQ ID NO: 9997 - DNA, 643 bp, Canis familiaris
gatacccgctgcccctacaaggacacggctggggcccaatgcagaaggagctggctgagcagctggggcctgtccaccggcgagaaggagacactgcccggagaagcttggagcccgtgcaaggcttgccccaggaccagacggggaaggtaagtgcccaaccgagccttgccgggaaatggggcccaacccagcccgttggccgaagtcccatgccagccccaaccctccagaacccgacggaccaatgcccacttatcccgtgtcaccaaccctgtcaagaggacactcgtgagactgactttacaggaactcttccgaccctttggctccatctctcgcatctacttggcaaaggacaagaccactggccagtccaagggttttgccttcatcagcttccaccgccgtgaggatgccgcacgagccattgctggggtgtctggctttggatacgaccacctcatcctcaacgttgagtgggccaagccatcaaccaactaagccagttgccatgtttgctgctgctgtctggccccggccccaggaccccatggccttaggaggtagctcccgaaagcagggggctcttggcaataaaaaggctcctgttgtcaaaaaaaaaaaaaaaaaaaaaaaaaaa

SEQ ID NO: 9998 - DNA, 457 bp, Canis familiaris
cccaccccccaggtagggagagagaatggtactgttacggcttacccagaattcaagttttggagcaaaggggggacttaaggcgaccgaagcattcctgcagggaggctttcaggccgggaacctgggtgctggctcagccttcaggcctgtgtgtgaaggtgcaacagcagctcctttgagctctttcctagaaggtgggggtgagggggaggctgcctccctgagtctgctcctcctccctgctgacatctggggctttgaccctttcttttttaatctacttttgctaagatgcatttaatagaaaaaatacacaaaaaacaaaatgcaaactatttcccttgcctcttgggcttctgggatgtcatcacctccagtttattgggtttgtttccagttgttaataaagcattgaaacagtattaccctaaaaaaaaaaaaaaaaaaaaaaaaa

SEQ ID NO: 9999 - DNA, 648 bp, Canis familiaris
tgggagatgccaattgggttcacgatctgagggggctccttattagtctcctggactagggggtcaaagagatcacacgtgtcatccaacgtggccaaaagctcatctggcatggttttccaggtcatctatactgaacagagtgtcaaaatcaaactccttcagatccattttctccaccatccaatctgtctccggagaagagcatcctgccttgccgttgtctgagagcactgaccaccccatctccaatgccacgccacttcggagagagcgccgcgcttagaccttgtcgctcggagaaacccactgagggtttgaagtgcgttggccaacgttcaaggtaagtcgttctaaagagagacctaaggccttttcctcaagccccccaaacccggacctgggtcggaagggggggacatcaagtcccccaccaacacctcgctgctcaggaaactcatctcggccatgtcgcgggactttactggaatcgaggaatgtgcttaattcgaaggtgtctttgtcggttacagcaacgctgctgctggatgccgtgaaaagcgccatggcttaagccgctggggggtgccgctgcagagcctggtgctgctgccgccgctgcaaaggccaatgctgccgcaggcactg

SEQ ID NO: 10000 - DNA, 605 bp, Canis familiaris
  misc_feature (1)..(1): n comprises a, c, g, or t, or includes no nucleotide
nggacttccagatcatttaccgactgtatcgcctgcctctacttctgcatctgctggatgtcacgacaacaacctggcctacctggtagccatccacaacttctggaggtcttaaatgagtatttccacaaaagtctgtgaactggacctggtgttcaatgttctacaaggtttacacggtcgtggacgagatgttcctggccggcgagatccgtagagatccagccagacgaaggtgctgaaaccattgctgatgctcccgtcactggagtgagggcaaccggcccctgcgccccggcccctcactccctgctctgcccctcttcaggccggggctgcccggcgccctccctcacctgcccaggaggaaggcccacagctgggcctgggccaccagggaggagactgcaccccactgcctctgggcccagccaggggcggaggccatctcgtgtgttctgagtaaccgtgacattgtcgtgtgacgctgtgagtgcgtgtgtgtggagccccccataaacccctggtttcgcctggaaaaaaaaaaaaaaaaaaaaaaaaaaaaaaaaaaaaaaaaaaaaaaaaaaaaaaaaaaaaaaaaaaaa

SEQ ID NO: 10001 - DNA, 551 bp, Canis familiaris
  misc_feature (265)..(265): n comprises a, c, g, or t, or includes no nucleotide
  misc_feature (287)..(287): n comprises a, c, g, or t, or includes no nucleotide
gaagagaacggggaggctttcccagattatatgcaagttgccctccctcctctcttggacgagggcgtgggatgaccagggtggaaaaggaggtgcagaggggcaggaagacctggccctatccaccgagaagggggttcagggatccccaggcctgggtttgcagctcagcctcttgtccaggtccgaagctcagaccccatccccgccctgaattctagacatcagacccagaagggaccccgaaggcgacctggggggtgcntgcaccccccaagcagcagacnattccagcctcagccccacacatcccccatctctgctctggaacctgctgtctgtccccagggacagcagccagttaggagcctggggctaggaggaactccagcccccctgcaagatgcagcttgaggaccctctccccactctgacttctcccacggtactttgacctccaacgtagggctatactatatacaaaacagacacatacacacaggagggaaacaagcaaaaagagaaaagaaaaaaaaaaaaaaaaaggcaaa

SEQ ID NO: 10002 - DNA, 617 bp, Canis familiaris
ccgagagcagcatcctacccaaatcccagtgataatagaacggtacaagggtgagaagcaacttcctgttttggaccaaaccgaattcctcgtacctgatcatgtcgacatgagtgagctcattaagatcattaggaggcgcttacagctcaatgctaatcaagccttcttcctgttagtgaatggacacagcatggtgagtgtgtccacaccgatttctgaagtgtatgaaagtgagaaggatgaagatggattcctgtatatggtatatgcctctcaggagacatttgggatgaaattgtttgtgtaagactaggaagaagcatcttctttctaggaattttttaaaccccttaccacaagggaggaaaaaaggggaaaattacccaactgagattgatcagttcatctaatcacagatcatcaaaacagtagtgtttctgcctaggagttttaggaagttgttttgtactgcaagcagaaaaactgagctccaaatgagcacattcagctttggaaaactatattatttaacctaggctgttttgttttcaaatttaggcatttaaaaataaaatactttgcattgtaagttgcccaataaaaaaaaaaaaaaa

SEQ ID NO: 10003 - DNA, 631 bp, Canis familiaris
tcttggtggatttttatgcaaccagccacagctgttgagagcataatggaacatttgtctcgagacgttgatgtgattagtaccgaatgttataagacaccctctgacccaggaagtaaaagagtgtgaagggattgtcccagtcccacttgaagagaaactatattccacgaagaagaggaaatgagaagatttacccacgattttagcgtcttgtatagtaattctctcactctttgagtaccactggagtttataatgttaccaacttgacccctataatgagtattaggtgccctttgtttttctaaggtatttttagcttcttgatctctcttgccgtgagaaggttaaggggaatggtttgctttagagccaattttgtaatctgtggtaccagcacatcattcttgatttcatttcattaatgtaatttctttgccgttgaggactttgcccaacaacaacactaataccattttgaagagcaaagcttatgaaaaatgccttgaattgcaagctaatcattcactctgttataaccatgcaaaatgaaaattcaggactactgtatcggatgagtaacttctgaccaggataataaacacactttcagaaaaaaaaaaaaaaa

SEQ ID NO: 10004 - DNA, 580 bp, Canis familiaris
gccgtgtcccccagcggatatcattagggaaccccagcaggggtcccctacatcagagttaactcccccctcccagcaagcatgctcgtccaaccagcaaccccgtcctccatgctccccatccccagccctggagccctggctggcctgccccccccccacacaggccaccagaatgggctcctaagaccctcccccagcaaaaggctgccgtgcagctcattctggagaggaacaggcaaaaacctcggacatggcacataagaggctgggggcggggggggcagagtgcctcagtttcctcctcaacagcatactaaatatttatagtatctgaaggaagcattatatttgatggcacaaacgtagagctgttatcattctttccacctcctgcaggaagcagaataggggcagacagcacctggtaggcaggatggtttgcccctcctccctccatccctttgtggaagctcctggggcctcagtgcctgcaacagcgtggccttaggcaaataaaagactaggttgtttacataaaaaaaaaaaaaaaaaacaaaaaaaaaaaaaaaaaaaaaaa

SEQ ID NO: 10005 - DNA, 561 bp, Canis familiaris
taggtgaatacctgtcctctacccagaagtatagtctggaggcttgtttggggcccctgggaagaaaatgttgttttatagctgttggggcccgatgggtgggatagtttttttcagctattttcataaggtctttatatgtgatagtctgtcctccctgtaatatgtgtagacatggatttctttttcgttctctctaccttgtcctcttcctcctgtctgcctctctctccttcctcttctcccctgacctcttaaccccttctctgaattctccgggtttcccaaatctatgtattggtgtctttaagcagttccgaaaaattgtcagctgttacttcttcaaatattgtctctgcattgttctcattctctctttatgattaattgtatgttaagtcttcttactctagctcccgtgtctcttaactcttttatatttcccatgtcttcatttttttctgtgctacattcagggtaattccttccagtcattaattcactgcttggctgtggctcatatcttattaaacccatgcaataaaaaaaaaaaaaaaaaaa

SEQ ID NO: 10006 - DNA, 334 bp, Canis familiaris
cctggaggagcaggaggcttacacttgaacttggactctagccttggatctgccttcccactgaacgtctttgtgcctcagttacctcatctgtcaaatgtggggagaggatgctgggagggagagagggagggaggactgcaggaatgttacctgtcatttgtttgtgggggcggttgtgaagatgcggttcaccagagaggtaagggagcctgcgcacctcttcccctccctgtggctgtgcccacgctggagatttgatcattaaactgaagcccccaaaaaaataaataaataaaaataaataaataaataaaataaactgaaaaaaaaa

SEQ ID NO: 10007 - DNA, 471 bp, Canis familiaris
ggcagtggtggtcttggctcggctgcagtggtcccccaccaagctggcctacttctcactgagcacctgtcccgatgaggggatagtgctgtgtggagatgaagagggcaacgtgtgggtttacgacgtcaggcacatcctgacccagccgcctccacggccagcagctccgcaggcccccacacagattcttaagtggccccaaccctgggcgctcggccagatggtgaccaagaccatggtgaacacggtggtggccaaccccacctttacctacctcaccgccctgacggactccaatatcgtggccatctggaagagacagtagccagagtggggttcctgcctctgcggcagagcaccagggacatgacttaacttattcagctttggggctaaggacgagaatctgtttcatccagtgaatatattttattaataaactctctgctgtctgaaaaaaaaaaaaaa

SEQ ID NO: 10008 - DNA, 227 bp, Canis familiaris
cctggctctgcttgggctcaccagttctggctctgtagctggcagacgtgggcctggacagtccaggaaatgctctatctcagccttggccaggtggccctgcagtatggccctacacaggcagtgtgctctgtgggatccttcttttgcccttgtttgcatcctttatttatttttttttttaaacttgagttaaaccaaaaaaaaaaaaaaaaaaaaaaaaaaaa

SEQ ID NO: 10009 - DNA, 598 bp, Canis familiaris
gcattttaccttccatggtccactctgaagggcacttcctactagagatctagccccatgggaacttgggaagtaacaccttgaggtagtgtgtatcccacctgctatgcattgtcaggaatgcatggatagtattgtaagatgatccccagctgggttttaccaagtatacatgagacctttgcatatagaaagaggaatggggacagattattttcctacctcttgggagaatcagcagagattgttaacgattttctgaaacattttaagctcccttgttgaattcctattatttaggactcagatggtaagaaaccataggcacccaccccaaatttctccagtagttagagtgacactaaaagtaaaaaccgtctgaatatttggctccttttccttctcagagcctccaggatgaggggttggttgcactggtcaagttgtgttaaatgcgtaacaagccatatattattctgttttctcatttccaatgtttctgctgtgtgaatgaagtgtgcaattatttgaaaatcttggaaggaaggtacttttcaaaaacagtattctttttaagcaataaactatttttacagca

SEQ ID NO: 10010 - DNA, 302 bp, Canis familiaris
gggtcaggtagcttgtggtgggagggaaggcgggaaaacctttattttgtgtaacccagacatgggggaaatggccgctgccatcacaagctatgcattttctcagtgtttccagcgagcttgatgtcttgcttggaaagtggatgtgcgtctgtgtttgtcatgacaacttaccagcagaaatcctcattcctttgctacagatttaccaaaaattgtcaagtcttttcagttaggagtttctttaaatgtatagtattttagaaaaaaagaatcaataaacagttgatctcgtgtgaaaa

SEQ ID NO: 10011 - DNA, 462 bp, Canis familiaris
tacccaatttttgtatattggtctcatatccacgaaactttgctgattttttgtgtgtgtttgctttgttacctctctggatatttgtatataaacgatcatatcatttataaatcaaagtaattctttccttcttttttatttcttaaaccacctattcgtatttctttgttttgtattaacatacaatgttaatggaagtagtgatagcatctttaccttgtccctaactttactgctgtatttttaaaatgtttattataaagtataatgtttgcttttggtagatactttaccaggattattaagggttctatttctagttgcttactgttttaatcaggaatgttttttttgttttttggtttttttttttgcattttttgaaataatcattattcccttctttagtatgtttacaggagttatattaataaatattctgatgttgaatgaaaaaaa

SEQ ID NO: 10012 - DNA, 659 bp, Canis familiaris
  misc_feature (118)..(118): n comprises a, c, g, or t, or includes no nucleotide
gaaggtctggttgggacccccaatggagaccccatgaaatcgcccaatgcaaaactcccgtctagcaggatactgtaaaactgatcaaaggattgggctgagtaattccggaagcctngtgacgtgtccgattcccggagctcgggtggccggaaaaacactctggcccgccggaagggcaggcatatgggcattggtaagagaaaaggtactgccaatgctcgaatgcctgagaaggtaacgtggatgaggaggatgagaattctacgcaggctgctcagaagataccgtgaatctaagaagattgaccgccacatgtatcatagcctgtacctgaaagtgaagggtaatgtgttcaagaacaagcggattctcatggaacacatccacaagctgaaggcagacaaggctcgcaagaagcttctggctgaccaggctgaggcccgcagatctaagaccaaggaggcccgcaagcgccgtgaagagcggctccaggccaagaaggaggaaatcatcaagactctgtccaaggaggaagagaccaagaaataaaactccctctctcttgtctgtacatagtggcctcagcatgaatcagatcagttattcaataaaacaaacctttatctgcctgtctcttttcaaaaaaaaaaaaaaaa

SEQ ID NO: 10013 - DNA, 601 bp, Canis familiaris
tgctagacggtaaagaaaaaaacgcacgattagggtattagcctgccccagttataaaaacccacaaggcatgttaatttgggacggctggaagttctttttctgaggctcctgtcttgccttcattgtgccttgtcagggaggtccttggagtcagctttcaggatgcaccttggctgactttgtttttttcccctaaagatattatttctgagtaatttctgtaaccaatgtggaactcagacccccaagcctgaggtcgggaggtgcacactgcaccgcctgagccagcggggaccccacaccttggctgtcttcgggcgatgtcagaatagcgtttcctttgggaccggctctgatgaggctgccggggcatcagtagaaaactgggaggagccctttaaactgagaagtcagaattttgcaggaaacttgaaaaggtagtgcttactaaatcacattaatgtgtcatttctagaaagcagcacattcgtcggcatctactttggcttgaacatggccacgaaagcaacggttagagtgactgtcacgttagaatcagcaatactctgtcgtatatttgaaagttaataaaagcata

SEQ ID NO: 10014 - DNA, 467 bp, Canis familiaris
gatttaagtcaggctgcaattcacaagacctagagcttttctacctctccgaatcaaatggtagaccatccatctataccagttttagggtcacagtgattaactaatcccaaagatctctgcagatcagactctcctgataactacttcaactctgctgcccattctagtaatattaccacattttctttggagatttagtctgctacatcacctttgccattgaaaatcctatcatcaatgttgaattcaggaagttcagttccatggtagccattatcatttctgttccacagtgaataaccactatagagctctgcaggaatattggagcaattttcatgaccatatttcacacagccttcgtggaaaaaatgtccttgggaccctcttgaaggtcagagttgaaggatggatgagctgcttttaccaaaaaaaaaaaaaaaaatagaaaaaaccaaaaaaaa

SEQ ID NO: 10015 - DNA, 515 bp, Canis familiaris
gtccctgaccacaggcttcgtacagaggctcctctggggaagccaaggcgtgggggcgccacatgccacccgtctggagaagttccaaagagtcctcagtgccctttcgcagcgcctggagccagacgtttgaaagcacacccccttcttcaagctgggacacccagactttggggaacctccggggccaccagaccttgccccaagccgttcatgtagccaaagcagtgggaacccattctgcctcacagaagggagtgcagatttaccaaaacccatacagctcccccaaaatgtacatggatcctagggtgtctggaggccccatcccacctcccacccccacacacataacccacaaatgcagaacatgaggctttcaagggtaggagaacctgcacatcccttactcagaagccagagttcaaatgctttttaagagctctgtgacttccagccaatggctcagcctctctgtgccttcgacataaaaacccaccaggttttatgagcaa

SEQ ID NO: 10016 - DNA, 732 bp, Canis familiaris
  misc_feature (387)..(387): n comprises a, c, g, or t, or includes no nucleotide
ctatgcacggattgaaagctttcttcgttaggcgtccctatttgtgtgctgccctcggtcgctggtgcggtcactccaagccacgaagattgggtggaccaattcccgtcaaacggaaagacggggtgcataggggactaatgaagaacaatttgtgtggatgcctacgtgttgacaatgtatgatgagatcctcctcgctttctcacgaatatgtctactgacgcacaatactttcctacaagccccgcgtggggacatcattgtcagcgtgcgacaagtagagagggccccctcgtgggggcgccctcgtggcgtgtcgttacagatgtagtactcagaggagcaccgccgaaggaggagatatttctcgaaggagatctccacnggcacctttcttataagttgtgtggagcacaccggcgccaccgggaaccggaagggaacttcgaaaggcttgaccaggcggcccaacgaatggggccggagtggcaaagaccccaaccacttccgacctgcaggcctgcccagcaaatactgagcttcctcttggctctgccctgggcagccgggctctgagccccctgagggcagggacacccactcgttgagatctctggccacgcaggctgggagggcacctaagaggtgtctaataaatgcttaagagatggactgttgaaaaaaaaaaaaaaaaaaaaaaaaaaaaaaaaaaaaaaaaaaaaaaaaaaaa

SEQ ID NO: 10017 - DNA, 136 bp, Canis familiaris
tctgttattaaaaactataccatgtaaataagccaaaagagttcaatattttatgctttcatgctgtataactgtaaaatctgtgaaataaagtcagaagtaaaaaaaaaaaaaaaaaaaaaaaaaaaaaaaaaaa

SEQ ID NO: 10018 - DNA, 579 bp, Canis familiaris
ccagctcaccataaaaagccaaagttgtggtacattgtgcccagcggaccccaggggccacagccactttccaaggtgcttcctgctgagtatcagactgcctcatttccccctctggtgacttgcttggccaaacccagtctcctgttatgccagagggtgaacagctgcttgcctcttgaggaaaagctggggttagggtgaggacgggagaaatcttgttcctctcttaagtgatggcactgtggcttttcctgccctctccaaatgagccctgccaggtcccaggctccatactgctgtgcttagtgacaagcggcacaatacctgggggctgggatgcatttacccttggcaggtggagaggaggctggctgtccactccaaccccacacggcccggtgtcagcaggactgactgaacttccaagtgatggaccctttgaagccattgagataactgccagacacctcagtcatgtgaccagcgccccctctttccacatgggtaggcctgtaacctgaagcttgatttccatttatcatgtttttaagaatcaaagcctcctctattgtaaaa

SEQ ID NO: 10019 - DNA, 606 bp, Canis familiaris
  misc_feature (201)..(201): n comprises a, c, g, or t, or includes no nucleotide
cattcctgctaccgacccaggaggtactggagagaggaagcgccaatctgttcggggttgcattgtggatgcccatctcagtgttctcacaatttggttaattgtgaaaaaaaggggagaaggatattcctggactcacggatactactgtgcctcgtcgcctggggcccccaaagagcccagccagaatcccggaagctnttttaatcctgtcggaaagaaggacgaatgtcccgcccagtatgttgtttagaaagcccccttaaccaagaaaggtaaggaacctagaacccaagcaccccagattcagcgtcttgttactccacgtgtcctccaacacaaacgtcggcgtattgctttgaagaaacagcgtactaagaaaaataaggaagaggctgcagaatatgctaaacttttggccaagagaatgaaggaggccaaagaaaaacgccaggaacagattgccaagagacggaggctgtcctctctgagagcttctacctctaagtctgagtccagtcaaaaatgagattttctaagagtgaccaaaataaataagatcagacacccaaaaaaaaaaaaaaaaaaaaaaaaaaaaaaaaaaaa

SEQ ID NO: 10020 - DNA, 584 bp, Canis familiaris
gagcccacgggcaggtgccagcggggtggccttccacccccgtgcggcccttcctgctcgtggcttcgcagcgcagcgtccgtgtctaccacctgctgcgccaggagctcaccaagaagctgagacccaactgcaagtggggtgtccagcctggcggtgcaccctgcaggggacaacatcatctgcggcagctacgacagcaagcttgtgtggtttgacctggacctctcctgtgagccctacagggtgctgcggcatcaccggaaggccctcagggccgtggccttccacacccggtacccactcttcgcctctggctcggatgacgggagtgtcatcgtctgccacgggatggtgtataacgacctgctgcagaacccgctgctggtgcctgtgaaggtgctgcgggggcacacgctgacccgagacctgggggtcctggatgtggccttccaccccacccagccctggatcttctcctccggggccgatggcaccgtgcgcctcttcacctagagccgggccgcctccacagggcgcagggctgtgcgggcgaccctcaatacacgtgttccccccgaaaa

SEQ ID NO: 10021 - DNA, 597 bp, Canis familiaris
ggaggccaaggagggagtccaaagccagggtcaggaaggacccaaggcaggccaggagcgattgcccccaacccttgccaggcagggtggttcccacccggcctgtcttttgggtgcttggccatatggctgaccctggatggctttgggtctctggtcaactttgtgtcttcaggctgacctgtgctaaaagcatctatttagccatcctgcgtccagcctgaagcttatgttattagaagaaaaaagatgacaaatctcacttatctgcacatttttcactgtcctgtagcatttagagaaggaagtctacttgatgggagtatattttttaactcagctggtagaatttgactaattgaccgttcttttattgtgacttgagctgaagaggttgaccaccctcctgcgtggcacatgtgcacataccttccatggtgagatgattcttccttgtgctaatgagcagacagagctggtcatccttggcccctcgtgaggcatatcagagtacggagatgcatctggagggaggaaggggaagcaaacttaccagaacatgcaaatggaataaaatcattttggctagaaagaaaa

SEQ ID NO: 10022 - DNA, 565 bp, Canis familiaris
agaagtttgctggaaaggagggttactactgcacactctccacagacagaggttcctaaccgttcatggataccgtactggctgccttcaccaagaacccgaaggaccctgggtgtccttgaccgcatgatgaagaaactggacctcgactctgatgggcagctggatttcccaggatttcttaatcttattggtggcatggccatagcttgccatgactcctttacaaggtctccccatttccggaagtaaatcggaggggttcctgggcctggcctccagaccacctctttccttcaaaacagcttcccaatcatcacatccttctcacatcctacacagacctgagcccacagtgtccaccagccctgtgcaggccagtcctgctggtagtgaataaagcaatagcatttttttaaagcacacactagagtcagtacatttgtgccagggaggaagaaacgtgggaggaatggaatttgcatgatggaagcagtttccagagctgcacaataaatagtgaaaataccaaaaaaaaaaaaaaaaaaaaaaaaaaaaaaaaaaa

SEQ ID NO: 10023 - DNA, 612 bp, Canis familiaris
gcaagctgttgagccactggccaaaaccgttcagtcagcaatgttgagaaagttcagagctagcatcactcctgggacccaatttgatcatcctcaactggggcgccacagaggcaagagggtaattttcctgaagcaactgagcagtggcttgctacttgtgactggacctctggccctcaaccgagttcctctgcgtagaacacacccggaatttgtcattgccacttccacccaaattgatataagcagtgtgaaaatcccccaacatctcactgatgcttatttcaagaagaagaagctgcgtaaacccagacaccaggaaggggagatttttgacacagagaaggagatatacgagattacagagcagcgcaaggttgatcagaaagctgtggactcgcaaattctgcccaaaatcaaagctgttcctcagcttcagggctacctccgctctgtgttttctctcacaaatggagtttaccctcaccaattggtgttttaaatttcttacaaagaacctaattaaacaactgatccatattacaaaaaaaaaaaaaaaaaaacaaaaaaaaaaaaaaaaacaaaaacaaaaaaaaaaaaaaaaaaaaa

SEQ ID NO: 10024 - DNA, 590 bp, Canis familiaris
  misc_feature (313)..(313): n comprises a, c, g, or t, or includes no nucleotide
ggcttatggtttcaatgctggatagagatatgtcaggcacaatgggtttcaatgaatttaaagaactctgggctgtgctgaatggctggagacaacacttcatcagttttgacagtgatcagagtggaacagtggatcctcaagaactgcagaaggccttgaccacaatgggttttcgctttgagtccccaggctgtgaattcaattgcccaaacgatacagcacccaatggcaagatcacctcttgatgacatacatctgcctgcgtgtgtccaaactgcgagaccctgaccagacagctttcgaagacggngatactggctcaggcaaggtggttgtgaaatttcccaatatgatgaatttcaatccagtggtgtcaatgagcgtttaaaccaagaagccgtatgaacacaaccaaccaacagcattccgattggagttctctcttgctcttactctttgccttcagccactgtgtgtaaacttgcagcgctgcttttccttattagctgtcataaagatttattactttatgtacaatcaaagtttttagtgttgataataaattcgttggaattttacgaaaaaaa

SEQ ID NO: 10025 - DNA, 660 bp, Canis familiaris
tggacagttgcaggagctgatgcaagaagctactaaacccgacagaccatttagtattactgaatctaggaaaccacgaattgtaatctatacagtgaaaattagccaagcattttaagttcagaactccttatgtttaactctcatgttttttttttttaatttatttcttaagattttaggctttgagaatgcctgtattaatgaaatattcttttacttggggatgttatcgacaatgtatagatccaatatatgactagtagaccaaactttggattattgaagtaacagtatttgctagataggatttgatttttggactaaacaagaaagaataactgtaaaatggacaaaattgtagaattttgccagaagtttatgtataaatttaatgctatttttgttcaagcattagcctcatggttttagcatcagtagatgagtatattgtaataataacagatgtggaattccaacagagttattatttatgtattgtcaccctgaaattttcatcatttctactttaataatgcatgtatgattattcttgtaaatatcctttctccctcagtcattgtttagatataatggaagattaaaaagaagctttaagattcagtaccacacatggtataaaaaaaaaaaaaaaaaaaa

SEQ ID NO: 10026 - DNA, 619 bp, Canis familiaris
gtcacaaggagacctgggatatgcttgtcctgaacctggtcccagtgcatttcagtacaagccctgtaattttgctgaccgactgtacgactccatgaagggcaaggggactcgtgataaagtcctgattagaatcatggtctctcgcagtgaagtggacatgttgaaattaggtcgtgaagttcaagagaaagtatggcaagtccctgtactactacatccagcatagacaccaagggcgactaccagaaagcgctgctgtacctgtgtggtggggatgactgaagcccaccacggcatgagcgtctaggaaagggcccctttgtttgcagctaacagttctagaaaatagcttgtgactaacagtccccttatgcccatccctgcgaggatggtgttagcatagccccctccccatccttattttagttacctaagcattgcctgcctctcatgtctagtctctccttttagcccaagaaatgaacattccaaggagttggaagtgaaatctatgatgtgaaacactttgcctcttgtgtactgtgtcataaacagatgaataaactgaatttttacattataaaaaaaaaaaaaaaaaaataacaaaaaaaaaaaa

SEQ ID NO: 10027 - DNA, 595 bp, Canis familiaris
gatgctgaggattatgacagtgtggagcacggatggagatgacccggaccgcacgctctgttgaaggctggattctctttgtcactggagtccactgaggaagccaccgtaagaagacatccatgaccaatttgcagaatatggggagattaaaaatatccacctcaacctggacaggcgtacaggatacttgaagggatatactttagttgagtatgaaacatacaaggaagcccaggctgctatggagggactccatggccaggatttgatgggacagccgatcagtgtggactggtgttttgttcggggtccgcccaagggcaagaggagaggtggccgaagacgcagcaggagtccagacaggaggcggcgctgacaggtcctctgttgtccagatgttctctccagagattctctttgaccatgcagccttggagaaatagggctgaggtggaactcactgtttatatttaatctcttatcctacttagtggggtttttttttttgaattatgaataaatgtccccttttttgttttgtacatttaaaaaaaaaaaaaaaaaaaaaaaaaaaaaaaaaaaaaaaaaaaaa

SEQ ID NO: 10028 - DNA, 633 bp, Canis familiaris
cttggcttaaatgccaccttctgagaaggcctccaggccatcctgtctctaataacctccgtgttcatcctgttaattgcttcattgcacttagcatgatttataattatgtatttgcttgcttcacttctgtctcattactaggttgtaagctcccttaggatagaaaccttgtctcttttgttcaccagtatatacccagtgcctggcacatggtaggtcttcattaaatgtttttgggtgatggaaggaaaaaagcaaccctagctagaatcctatttttggacaaacttccccttaacagtatatacagtttagtatttatactttgggtttttccatgtgttttgttttatccactgatactgctaactcgggaagacagatatcatgtgtcagacaatgttctccatgtctcgcatggtccctggcacagtgctccgcctgtagtagttcaggtgctcaattaatacttattctgtgagctgggtgatttcgagacttgttgccaagtcctacccttgggtcagtatcatatggaagtatttgggttatagaacctttccacttcccactgccaggattttacattgccttcaggtgccaaataaatgctcatatttattctgaaaa

SEQ ID NO: 10029 - DNA, 647 bp, Canis familiaris
cgattattacttctgaaggctttggttaagggattttttttaaagtctcactacttagatataaaatttttttaaagtacatgagaagaaatgacagtttttatacaagtaaaattagaaataccaacatgaggatgcctgagtggctcagcagttgagtgccttcagctcagggcatgatcctggtctggggattgaatcccttgttgggctccctgcggggagcctgcctctccctctgcctatgtctctgcctctctgtctctcatgagtaaataaataaaatcttaaaaaaaaaaaaaaaaaagggaaagaaatacaaaacattaaatgataaaaagaagttggaagtccgtgggaaatattttttaaaaaattttaacatctccttaattgggcaaagcgtggaattcaatactctttcttaattggtctttcttaattgaaaacaagacttagaacctggagggatgcctgggtggctcagtggttgagcatctgccttcagctcagggcatgatcctggagtcctgggatcgagtcctgcattgggctcctcttagggagcctgcttctccctctacctgtgtctctgcctctctctctctctctcataaataaataaataaaattaaaaaaaaaaaaaa

SEQ ID NO: 10030 - DNA, 622 bp, Canis familiaris
gagaagtggtcaccacacctggaatccaggaggatgaaaatgataaccttttccacccgaaatacactggagaggattaacctgtactgtgaaaaatctcaagagaagcacacagtataaattcaggctgacggcttcgaatgtggaagggaaaagttgtccaagtgaagttctggtgtgtacgacaagccctgaccggcccgggcctcccacaagacccctcattaaaggaccagttacatctcatggctttagtgtcaaatgggatcctccaaaggacaacggtggttcagaaatactcaagtacttgctggagattactgatggaaattctgaagcgagtcagtgggaagtggcgtacagtggatcggctacagagtacaccttcacccacctgaaaccaggcactttgtacaaactccgagcatgctgcatcagtactggtggacacagtcaggttggttctgctccggtgtagacgcaaacttcttgggtcaaatccagacaaccgatcgatagcatcagaatgaaattacggtctcaacatgtattgtggtaatgccacctgccacggtatcccatcagggaatggaaactaggctgttttttaaattgttcttta

SEQ ID NO: 10031 - DNA, 642 bp, Canis familiaris
agcgcatcctgcaagtgcacctggcagagaggactgtgagcaatggtggcaggactgccgcaccgtcctacacctgcaagagcactggcacaggggctcgacacgtggaccgtcaggaacgtacaagggtcccgataggcaccacaccaggccccaccatccgaaccttagaggcccacctgctccccacgcccgcagcccggcagagggcatcagtgatcactcgtcaccacaggccaccaactcacaggcgggggagtggccagctcgcatccagatgtggcctcgacccggcccagggtaaccccaatagaggagctaggcgaggttctacgcaggggccaggaacgctggggttatgccccaagggattgagcatctcctgctcagcctggcccccatgctgtacctctggctccttgcccgggtctagcccgacccagatgtccactccgcatgtcccgggttctgatgaccaagttgggttcagctcagctctcacaaatgtgggtaccctaagtgagcctccatctattatccatccttcccttttgtcatccagtttctgctccatggtgggccttggggtttctctggcaatcagttcaaataaagagacagacataaaaaaaaaaaaaaaaa

SEQ ID NO: 10032 - DNA, 610 bp, Canis familiaris
  misc_feature (1)..(1): n comprises a, c, g, or t, or includes no nucleotide
nccccgttccagacccttccaggagaagggggtcaccatccggtaccagcaaggcgttgtgacaagattataccaccagatctcccaagtcccccaaatggttcggatcgtggactcccagatggtctgtgcagaggactttgacacgggagcacgttttgctacgagataagtggtgagcccttggcctgttctgtggacaccatgtggtacctggtgggtctggtgagctggggccctggctgctcgaagagtgaggccccacccatctacctgtcaggtcacctcctaccagcgctggatctgggaacgtgtcagtgggcaggaccttcccgccccatccagggccctgctcctggtgctatcactgccccttggcctgctctcggccctctgacactctcatggtgtccctggggttgctgtcctcaccctctgtgctcaggatcctgcacggtgttgctcccctggccccacacacgggcacgggcagatgtgaagtgcttcattaaacgcttctcttcccccaaaaaaaaaaaaaaaaaaaaaaaaaaaaaaaaaaaaaaaaaaaaaaaaaaaaaaaaaaaagaaaaaataaaaaaaaaaaaaa

SEQ ID NO: 10033 - DNA, 735 bp, Canis familiaris
  misc_feature (143)..(143): n comprises a, c, g, or t, or includes no nucleotide
acaagtcccaattcctccaagggcccagtggctgagagcccttttttccttctgagggcccacaggggccttgacgacaatgtcagagaccccgttacgcttggccggccactttgactagattcgttggccccccgagaggnacaaggcacacgccttcctgtgaccctgggggccaggagcccactccctgcaccgggagcagccccgtgtgccacctagctgctgggccacagccacgccaggcggacacccctccgagcccgggaaaaggcccgggaccgcgccgctctccgctttccgcaccacgtccagcgcgtcgtctccgggcaccgctgggagcccaggccgcctctcccttccaggagggctgagcctccaggctgcccagaggagaaggctcttggggagcgtcggagtgtttaaaaccaacacacgctctggcttttgtgttgatcatttttatatgaaataaaaagatcgtgcatttatggtatcgttctgattactgcaaatggtctgcctggtatctgtccttgcacaggggtgtgggtgatgggatcgtggagatgcctgccgagggcacggagctgcaaatgccagtttcccaactctgtccgtgttggtttagtacttttgtaatgaaagggggaaagtttgggattgaaagtaaagattcaaacccaaaaaaaaaaaaaaaaaaaaaaaaaaaaaaaaaaaaaaaaaaaaaaaaaa

SEQ ID NO: 10034 - DNA, 327 bp, Canis familiaris
atcaagaacgaaagtcggaggttcgaagacgatcagataccgtcgtagttccgaccataaacgatgccgactggcgatgcggcggcgttattcccatgacccgccgggcagcttccgggaaacccaagtctttgggttccggggggagtatggttgcaaagctgaaacttaaaggaattgacggaagggcaccactaaaaaactacatttataatctaggatttgttatatgcaaatattttctgcctcttcttttgttctgtttaaaaccaataaagtgcatttgtataaataaaaaaaaaaaaaaaaaaaaaaaaaaaaaaaaaa

SEQ ID NO: 10035 - DNA, 657 bp, Canis familiaris
tgcatagtgttggtcatgaattcttaaagtattttataaaaggagaagacagcctcattttagttatgttccatttggagttgtaaaattcttcctcatagtcagctgggtttaagaaatcaagtctttaggatcttaggacttaattctatatgtggatctgaaaatctgaccctgtagacattacagctaccttcagttatgttttttcaacagatgttactgatttgaaacttttgtcaactcctgagctatcctcttaccatttaaccatagtctgaattaaccatatcaaattggcttcagcttttcaaactgtactttcaattctaggtttcagggatatattttctgccttctattttaatacattaaaagactagataatctttcagagatgctggaaacaaatcatttgctttgtatgtttcatcaggacaccaatgaaacgtgtaatttgaaatcagtattgtatttttgaaaatcccatttccaaatcagagatcttttttggattttaatcaatttataatgtgtattactgtattaagtgcacttgaatgtaattcaactatttgactaataaaatgagttcatcatgtttgcataaaaaaaaaaaaaaaaaaaaaaaaaaaaaaaaaaaaaaaaaaaaaaaag

SEQ ID NO: 10036 - DNA, 608 bp, Canis familiaris
tcagcacgcacccaccagactcgatgttttccatcgtgcctgacttcagcctagatctccaagaggacccctgctagaatcccagccccactccagatcctcacatacccccggtggagcccacaactcatttgacctttgaccttaacctgtccaagaaagagagagaagccaaagacagcctgacactgcccttccagttcagctctgaaaagcagcaggctctcctgcgtcctgggccaagtcaggctaccagcaacatcttctatgagccggatgtgtatgatgacttggaccaagaggacccagatgatgacctggatgtttgactggcgggttggactggcctagaattggaggggaaagaccttggacccataaccatcctttggctgtttgctttggccttgccctgtccctgcccccaccttgttccctggtgtgggggcctgccccgtgacccgtaagtcagagtagcttcccatcaggacaaaaggtggggaggggggtgttaggggaaggtgaagaaaatgggaacccctcccctccccacgtaataaaatttttatttttctactgaaaaaaaaaaaaaaaaaaaaaaaaaaaaa

SEQ ID NO: 10037 - DNA, 274 bp, Canis familiaris
ctctccttctctctccttcctccccccttcccctgactgttctacccaggaggaggaaacttcacatagccgtgctcacagttgtttattttcaatgaatttggttggggagctgagcaggctccctatgatctgaagaaagcttttggtgcttgtcctcacaaccacctcaaccttctctccctgtcctgccctgtcttctttcctcctcctgggttcatgttgtaataaaagaagattgttggtgtgtaattaatttgttcaaaaaaaaaaa

SEQ ID NO: 10038 - DNA, 502 bp, Canis familiaris
  misc_feature (1)..(1): n comprises a, c, g, or t, or includes no nucleotide
ngtacgtacacgtgcgtacacgtacgtacacgtgcgtacaccgtgcgtacacgtacgtacacgtgcgtacacgtacgtacacgtacgtacacgtgcgtacacgtacgtacacgtacgtacacgtgcgtacacgtgcgtacacgtacgtacacgtgcgtacacgtacgcacgcgcgtaagaccttaagttaacttataccaaccccccttaccccccgtaaactcatgtcatctattatacacttatttatgtcccgcccaacccccaaaacaggactaagtgcataccatactcaccagctttatttaaattatataccaatgtattgctactctagttaacttaacaccacagtcttacacgcatttggtctcgtagtctatctatagatagcattccctttttttttcctctcatatttactatgtattttatttattacgcacactaccatttcagtataaaaaaaaaaaaaaaaaaaaaaaaaaaaaaaaaaaaaaaa

SEQ ID NO: 10039 - DNA, 578 bp, Canis familiaris
  misc_feature (1)..(1): n comprises a, c, g, or t, or includes no nucleotide
ncattggtatttacggcctggacttctatgtggttctgggtaggccaggtttcagcatctgcagaccagaagcgcaggacaggctgcattggggcccaacacagaatcagccaagaggaagccatgcgctggttccagcagaagtatgatgggatcatccttcctggcacaattattcccgtttctatcccaaaggcccataaaacttttcagtgaaatgtatgttactgttgtgtattctgtgaaaggagcctggccatattcaagtctctggacctcaagccacttaaagcttcgatgggaatagctggtaacaaccctgtcgtcccttggatgccacgtgtttcctggcagattgaagcccgagctttgcagcacttgcctgtgctccccacaccccttattaggctgtggtggtggagtagtcgcttggagaactgatttttagaggggagggtatgattggggctggggtttgaatatagagcccttgattaaaggtgagcaccagtaaaaaaaaaaaaaaaaaaaaaaaaaaaaaaaaaaaaaaaaaaaaaaaaaaaaaaaaaaaaaaaaaa

SEQ ID NO: 10040 - DNA, 593 bp, Canis familiaris
atctctcttctcatcattggatgaatttttagcacagatgctccagaaagcacctcttccattggggcacataaagcgaattgcacagaggtgtacaacttgaatgccattacacattctgaaatacgattcagatggttacggctctgcattcaatcgaaatgggaggaagctattcctctggctctaaaaatggcaactgagcaaggacgaatgaagtttacacgacctctgttcaaggaccttgctgcctttgacaagtctcatcatcaagccgtctgtacctaccacagaacacagagcaagtatgcaccctgtgacggccatgctggtggggaaagatttaaaagtggattaaggacctacccattgctgatttcagacatttctcttttttaaacagaattcactaagaaatataaaagttcagctcatattgtaactaaaaatgttgttttcattttggctttttattgctttgtcagtgattttcataaataaatctgagcaccacctttcccctacccccaaccagtggcatgttctttataaagtgcattttaaccaaaaaaaaaaaaaaaaaaaaaaaaaaa

SEQ ID NO: 10041 - DNA, 554 bp, Canis familiaris
  misc_feature (1)..(1): n comprises a, c, g, or t, or includes no nucleotide
ncggacgcgggtcagaggcccatggggatacgaatctgaggaccctggtgcccccccggagacagagggggctggccaacaggaggaagaggaggacgaagctgagtatttccgccaggcagtgggagaggagcccgatgaggacatgttcccgaaagcagcccaacgcggacagttcaccgggcccccaggcaagaagccacgaggaaaagagcggaggccagatggaggcacttaccacaggccttcaaaggccaagggcaagccccagcgggaacaggccacagctgggacggagaggaactgtccgggaccgcaggcgaggccaagctcgaccacctaagaaagtagtctgaggcccagctggagcagcggatggaatacccccaattggggccccaagacctgctttggacttccacctgggtctccaggagcagcccttggtttcctttcataaaggagcagtttccccgaaaaaaaaaaaaaaaaaaaaaaaaaaaaaaaaaaaaaaaaaaaaaaaaaaaaaaaaaaaaaaaaaaaaaaaaaaaaaa

SEQ ID NO: 10042 - DNA, 650 bp, Canis familiaris
gctatgaaggcctcggcacgctgcggagagtacaaggtggtaggcgctgtctgcccacccctaaatgtcgcactccgcccctgtatcggatgcgaatctttgcacctaatcatgttgtcgccaagtcccgcttctggtactttgtgtctcaactgaagaagatgaagaagtcttctggagaaattgtctactgtggacaggtgttcgagaaatctcccttgcgggtgaagaacttcggcatctggctgcgctatgagttcacgcagtggcacccacaacaatgtaccgggagaataccgggaatctgacccaccgcaggcgccgtcaaccccgtgctaccgaagacaatggggtgcccgacaccgggcccgggccccactctatccagatcatgaaggtggaggagattgcagccagcaagtgccgccggccagcggtcaagcagttccacgactccaagatcaagttcccactgccccatcgggtcttgcgtcgtcagcacaagccacgcttcaccaccaagaggcccaacaccttcttttagatgcagagcgtgccggtgcccaagtctgctcaaataaactctctcgggtaaaacccaaaaaaaaaaaaaaaaaaaaaaaaaaaaaaaaaaaaaaaaaaaaaaagaa

SEQ ID NO: 10043 - DNA, 581 bp, Canis familiaris
gatcttgaatgggttctgcttgcacgttggccttttacagctgtagaccccggaggccggcagaaaggatactgtgtccgatgtatataaagcatgttgacagtgtctttgtaatccggtgaagtgcctttccaaaggagagaacacatcaagctaggggaaggaccagaggagagtagacgaagtagaagcagactctctgcctgatctggggaacccatcatgggtctcagtcccaggacctagagatcatatctgagccgaaggcagatgcttaaccaactgagccaggtgcctcacaagtatatttgaaggaacatgaggagcccagtttgctgagatttcacgtataaaagcaaagtacagttgaactgagatgcctgggtggctcagtggttgagcatctgccttcggctcagggcatgatcccggagttccaggatggagttgcacatggggctccccgcagggaacgtgcttctccctctctcggcctatgtctctgcctctctctccatgtctctcatgaataaataaataaaatctttaaaaaaataaaaaaaaaaaaaaaaaaaaaaaaa

SEQ ID NO: 10044 - DNA, 525 bp, Canis familiaris
ccagatagtaagaaaactagatttgagaagaagtgactttttccgagctagtgggttgtttgtttttttttgtactgttatactaaagctcctactgtgatgtgataatgctttatatatactttataagtaattctatgccaaattatagtccaaactagtgtagaaaataatataaactttaaaaaagcattaaaagtaagtcatcagtatgctgaatcagtagtttcactttaactgcaaacttaatttcttacaacaccatttgggctagtttctgtataagtgtaaatactacaaaaactttatttatactgttcttatctcatttgttacgttcataggtttatatgatatgacatctggctaaaaacaaattgttgcaaaactaaccactatgtacttttttataaatactgtatgaacaaaaaggcattttttttatattaaattgtttagccctggcaaaaaccaatttagttgaaaagctggtactaataaaggaatattatgactgttaaaaaa

SEQ ID NO: 10045 - DNA, 628 bp, Canis familiaris
  misc_feature (8)..(8): n comprises a, c, g, or t, or includes no nucleotide
cgtgcacnctcgtggatggagaaaggagacaccgttttctttcatcctttgctcatccacggatcaggctggaacagaactcaaggattccgcaaggcaatttcctgccctttcgcccagtgctgactgccactacatcgatggtgaaaggcacccgtcacagatgtcactgagagggatattgtagggattggacataaattatatgggatttccggaagaccacccgcctgaaggaggtgttcttagaaaattcgaagccccggcttggttgaaaagggaagaaagggtccaaccctttggaatgtaactgcccttccttgggagcttctttgagaccataaccccaaaggaatcaagatgcctgtggaacatgttttattaatgagctgtcctaatctttcctgtcacttgttatgaagatcacaacgcacttacagggaactttatgggatctggttagctctgggtgaggggctgttgctttaatggatgaacaggtgtaacagtggcctattactattgtcaggaatactactttgcacctaataaaggtcactgatgtctaaaaaaaaaaaaaaaaaaaaaaaaaaaaaaaaaaaaaaaaaaaaaaaaaaaaaaaaaaaaa

SEQ ID NO: 10046 - DNA, 641 bp, Canis familiaris
tggcattgcagccatcgtggtggccgtgatcatgatcttcgagatgagtcctgagcattggtgctctgcctgcggcatccggacagctccgtgtactgagcggccccggctgcacctgctgcggggagggccgctgggaaccctgcagggcccctagagtgaccggacattctgaggaggggccgtcagcgcctgtgtatataacttctctggtattactcgtgcgtacacgttattagcctttttacttctgaggttttcgtgtcctgaagtcccccgttacctttgtggggctgaagtcacctagagacggcgtgtgagtgggcccttggggaccgtgaggcacggggccgctctgcgttcttgcacgctgtcttgggggctctcgcctggttatgtcacggccttttccacagggggcccccggggccccaccccaccctgggcccacggggctgcacggctcatgccttttaaccctcgttcctgtcgccacttgtcccgagccgggtctgccagcagccttcaccttcagtgcacctgtcctctctaactcgtcaccttcagctgtaattacatcttcaaagtcattcaataaagaaggaaaaaccgggcatgctaaaaaaaaaaaaaaaaaaaaa

SEQ ID NO: 10047 - DNA, 585 bp, Canis familiaris
gtaataggagcccttggggtgatccagagggcaagaggtgattctaggctagggaaagctttctgaagctggaggtatattagcctagaaggatgggtaggatcttcatagatagagatgaaagaaaagacatttcagggagagaggatggcaggaacaagaatggaagtggacgtgagaatgtgtaaggtgtacatgtggaaaggtggatggatggtagagggtctccctgctgagatgtatgctgtctatgtgctgggagggaacagaaaggggagggttccctgtagctactctctggggctgtttccctatctcatttaatctttacaaatagcctctagggatgcactctggttttctccactttacagctgggaaatgaaggcacagaggtagtcacttgcccagattacacaagtagtgagtaatgagacaggtcttttcaattctaaagtgagatcctaaccatcaagccacactatctcatccagagctaacagaggctcgaagcagagtgagttgggaactcttgactccccaaccagggctcctgccttcacactaaaaaaaaaaaaaaaaaaa

SEQ ID NO: 10048 - DNA, 653 bp, Canis familiaris
agtcggctccccgcacatggcaacagggctgcttcaggaccaccgccatccggtgtctcgtacagctttgactcaaggtgggaagaaagaagaggctgcttgctgctcccccggcccatcccatcgttaacaactgccgagctcttcctcctccgcccaaggtgctcagacccgagtgccattaactcccggactgctgactggcctgccctgggaccggcgttgttgaggactcgcctcggctccctttgtcccagctcttcctgctgtcttggctggatcccccggggcccagatgggataagctgtgcgtgtggcctcctggccaagggttggtgggttggttagatggctttgactccgtgggattccacttgagtcttcccccaggagcctccatctggaagcaggcttaactttggggctggggtgagccctccacctccaggctctaggggatggagggcgggaggcgggaggcccaagctgtgtcccagggcctcaagcgctctgcctcctacctgcttctagccaaaaaggagcaggctctcagaggcagactccttcaggaactctaatgtacagaccaaggtgtaaataaacagtttgcttttcttgcctgaaaaaaaaaaaaaaaaaaaaaaaaaaaaaaa

SEQ ID NO: 10049 - DNA, 691 bp, Canis familiaris
acttgtgaaattactcccaaggttacaggacaccatattacctagtatatttggcagtgtaccagatcatcgtgagagagagatttttcgactaagaatttttattgaataggcattttgctacttttggaaattctagaggagggggagcttgtgaacaagcctttatagttccagcatatatagagcacttcagttcagtgtggttgtaagtatgagcacaccaacacatataacccacatctatacgtgctaatatgcacaagattttaactgcagatgtcttgctgctattgaatgctacagaattatatggccaattgcttaccagaatactccatggagataagctcagctcactcttgggaagaattatttcttagaaaacaatttagtttttgttggattaattaaataaggtatccccagttttaatgactagatttggaaattggacgccattcttcaatctcactggtctcaaattcactgataaaaatctctccctaacctagtaagtggagtaagaataatcttctagatcggtacccactggccactcttgagctgatttccagtcatgtcctccatatgtaacttttataaattaaaggtaatattgtatattgaagatcaaataaagatgttccttaagtgaaaaaaaaaaaaaaaaaaaaaaaaaaaaaaaaaa

SEQ ID NO: 10050 - DNA, 606 bp, Canis familiaris
tgcttctactgtgggcccacctgagggtacgtcctgccatctctccagccaggaccttgtgcatctcacgctgggagcgggggaagggaccagacaccccctcttcgccctccacctgtgtctccaggccctgatgcacagcctgtggccccccagcccagccctctcccttccactcgtgccttgcttagagccagaagggacgaagctcctacatccagagactggaagaggaggggagctgttgggaacggcggctacacgggttctgtacaggctgggtttctaacagggttggagggcttctcagacactccagggagaacctgagcaggagaggaggcagcagagggagaggatcctgaggtgtggctgccctcccttcagcatcagaagggtgaccagaaatggagagcaagaggaccaggccaccagctgcctagctttggcccttcacgccttaacactaagcccacctccctgcccaccactgggctgtggctgctgggccccaggctgggtgactttcagtatttgtaagcatctcaacagaaccaataaagcatttggagtacgtgaaaaaaaaaaaaaaaaaaaaaaaaaaaa

SEQ ID NO: 10051 - DNA, 536 bp, Canis familiaris
  misc_feature (1)..(1): n comprises a, c, g, or t, or includes no nucleotide
natgtgacgtcaatgtgagttttgtttggcaccaaatcaacgggacttgtccaaagtgtccgtaacaactccgcccccaatgacgcaaatgggcggtaggcgtgtacggtgggaggtcttatataagcagagctcgtttagtgaaccgtcagatcgcctggagacgccatccacgcgtgttttgacctccatagaagacaccgggaccgatccagcctccggactctagcctagccgcgggacggataacaatttcacacaggaaacagctatgaccattaggcctatttaggtgacactatagaacaagtttgtacaaaaaagcaggctggtaccggtccggaattcccgggatgaagaagattcgagcccacagggggctgcgccacttttggggacttcgtgtccgaggccagcacaccaagaccacagggcgccgtggtcgcaccgtgggtgtgtccaagaagaaataaacctgtaggccttgtcttgttaataaatcgtttatacacctaaaaaaaaaaaaaaaaaaaaaa

SEQ ID NO: 10052 - DNA, 688 bp, Canis familiaris
aatatctggaagatgttaagttggagaatgaagaagagatcaagatctcagacagcttcatgatttggtatactcacaagcctgcagcctggtttcagaatttaagagacagatttcgaagccaaattcttcaacactttggctcaatgcctgggagggaggaaaaccttcaggcaacccctaatggacctgcatggtgttggtggcttcttgcagttcttcctgtagatccccgataccagctgtcagttttgtcaatgaagtctttgaaagaacggttgacaaagatacagcatatactgacttatttttctagagaccatctaagtaactaactgcttggatcttcctttaaagttaccctaatctggctgtgttgatggccagattgtctgctgccttttgcacatccagtgctggtttgagaaatgtaatgaaaccttttttttttctcccttcaacctcctgaatcatgtggttctgcaaatgaataccttcaactaggacttagaccactaagaacttgcacagaaaaacacgcactgaatgtgtgtcaaacctctacattgtgatgaagttgcactatgtaccatattctaaaacgaaatgagaactgtgtgtatgtggggtgtgtgtgtgcgcgcgcgtgtgtgcattttctctggctttaaaattaaaaaaaaaaaaa

SEQ ID NO: 10053 - DNA, 598 bp, Canis familiaris
agttaagtattacaagaagaccgtgaaatgtaacctttttcagtcctgatatcgataatggatatccttctttctgctttgccattctccattttataaattcatttgcaatgtgtatgccacaatattaaattaaaaatgtttctcataaaaaaatgttctcatagtatttgacgtaattgattttctattttgcatctgttgtatatttactataactctacatttctatatcctttaggagttatatcagccatgttatttgaattttaaaaagactagcacctctttttcctgtaattttttgttatgtaaatagaaaacctataagttgtatccttttgtgtgtttagaactgtaatttctgggacacgtgggtggctcagttgcttaagcgtctgccttcagttcatgtcatgatcccagggtgttgggattgagccccatgtcaggctccctgctcagtggggaatctgtttctccctctccctctgctcatgtgtgtgcttgcacatgggtatgcttgcacatgggtgtggttctcgctgtctctcaaataaataaataaaatattttttaaaagaagaattgtaatttc

SEQ ID NO: 10054 - DNA, 675 bp, Canis familiaris
  misc_feature (213)..(213): n comprises a, c, g, or t, or includes no nucleotide
ctgggcctcttctccagctccagagcaaagacagtgagtaagatgttcagtcagcctgagccaagaagggccctaccgtaagcttccctcacccctcaggaggatgtggggtgccgtgatggtctgtgaaggccatcttgtaggctctgacgtcactcactttggacccctggctcacagactctaaaacagctgcgtaggaaggaacccagncaaggatccctcctgcactgctgtgtgtttctgccaccataaaacaactggcaaaagaacgtgacacgtttctttggaacttggatcccactggacatagcctggaagacccgagtcctttctgactttgcctagccaggccctctgacccaccaccttgataaacatcactggtgttggggctatgtgcgtttttaaagcagatccgaaattaggaaggcggaagaacttgggacagttactaagttgagacctttctgatggcacttcagccacggcctaggtgccccgaagaacattttcaccgtagtgattttcgactctttaaagctagacatttttgtttctgtatttgctgctgtaagcataatgattgtgttccttccactggacccattgttttgtaaacaataaagtgccagaggggactgtgagttctctctgtttcctggtcaaaaaaaa

SEQ ID NO: 10055 - DNA, 503 bp, Canis familiaris
gtgggcccacaagtcttagacttgggtctgaggctggggagagccagaagcagcagattaaaagagtggagcctacggctgggacatcaaccatggtgcctgtgctgtccctcctgggcatcattttcattctcaccgggagtcctcctatatgttctttgcaagaggagggagcagtcactgcagcaccctccagatctgcagcttcattacacacccgtggcatcagactcccatgtgtgagctaagagcggaagcctgtgagggtacacattgtgatttattcagtcctgtataatttagaataatctctggcacttaataggcactctgtagctatctgatgtttaacatacaaataaccagccagtgccctcttgtggagctttcctggtcttttattttctatgctatcctgcaagtctaccttttaatgtaatactttagaggaattctttatgtgcattttattactaaagattatttttataaaaaaaaaaaaa

SEQ ID NO: 10056 - DNA, 628 bp, Canis familiaris
gcagggaggatctgctggaaagggcctcgaagaccaggcagtgaggtctctgggcctagttgaccatcccttctggaggaattcctcgcacccactgttaattgtcgttgtggcaaactcttccgtaaaacttatcctctggacccagaccccgtccctaggttgcaccactctggattatgtgaccctcgttagggttcccatcatcctccgtccataccactcccaaagccgtctactatattaagttgtctatttgtctgtatcccccgttagactgtgagcttcttgaaggcagggaccatttatttattattttttatgttccacaaacctggaatatagtaggtattccacgaagagttgttaaattatttctatattatttattttaatcctacccagaatgtaaaataaaaataatttgctgtatcattagtgaacaagactgactgtccacagcccaaaagatgtatgggatgcttactatcagtgcaaatatgtgaataattgttttagtctcctcaaaagctgtaagagagaaacaggaaaatagaaatgttttatgtttttgaataaacacttgcaaataaacataaaaaaaaaaaaaaaaaaaaaaaaaaaaaaa

SEQ ID NO: 10057 - DNA, 617 bp, Canis familiaris
cttcaaaggaggctcttttctgggtggtacagactaaacctggagtggtaggtcaggccagtggttatgcgcttaggtcactgtagctcacaaactccactgcacccttgccctacttcatcccaaccttccctgagaagggaggagagtgggaatcccacagcacgtgcaccagcactgcattagtgagcagcagctccatcctgttgggatgaagggctttcttaactatcctaggaaggtttaaagagactgctctctagggggccatggatgttcccagtgtggtgggacccccccttctagggtcaggacgtggacagtaacatctgtgcaagtgttgactggaaaaataaagtgttgattggctagaactgctgccgcctgcctgcctgcctcactgccagctgcctcccacactgctctgttccctcctcgcccccctgtccccagtcttgctcctggctatttatatttactgtggtgcaaaactaggccagaagcaaggattaccctaacagccctaacttgcccttagtcatcttccctgacagcgtgatatgttagtgagatttagcatgtgtgaataaagtgtatgcaggaggaaaaaaaaaaaa

SEQ ID NO: 10058 - DNA, 522 bp, Canis familiaris
gggcttgggaggtcccccgggggaggaaggaaggttggttgtttaatttgaaggtcctgtcatggtttctgtggtaaaccatggtttttccaggccctcagattttggggcccaccacacggtggccgcccaccctccagccctgctgacccagcacagctttctctcccccaggccttgtctcaccgaggaagtgggcatttggcccttctcactgaaaagagaagcacttctcaagttggattgtgatttgtgagagatgaaggaaaaatataaataaaactagggacagtttgggtggctcagtggttgagcgtctgcctttggctaagggcgtgatcctggggtcctaggatcaagtctcacgttgggcttcccaccagggcgtctgcttctcccttttcctatatctctgcctctctctgtgtgtctctcataaataaataaataaataaacaaataaataaataaactaaaaaaaaaaaaaaagaaaactaaaaaaaaaaaaaaaaaaaaaaaaaa

SEQ ID NO: 10059 - DNA, 239 bp, Canis familiaris
gggtacgtcaagtcaaagaatctccacaatctccacggttcttcccccacttgaaagctttcagacccacagcttctgctactctgggatcttataaccgtagcctgaggagaatgagcaaagccttttaacaggttactaccacccatcctgaagatgtgatatattaaatggaaaaggatgtaaataaaactgttatctcattgaaaaaaaaaaaaaaaaaaaaaaaaaaaaaaaaa

SEQ ID NO: 10060 - DNA, 506 bp, Canis familiaris
gttgggcttaatccacgcctcccctattcaggcgctccctggttactatagcatcagataactgtcacatctctccccttccgtgagatgcagggcttgcactcttcccctagtacctactttgaaggcaattagaagctttgttttcatttccccctggtgattgtcttgtccaggatggttaggtacacaaggacgcttattagatcatctgagaagttatagccaaacccgcttctctggtatgaacatctagtttgagagcaagccaaacagtaggcttgtattagtgctttaatggagtactggtaacatttttctttcttgataggaatctgcttatatttagccaggcttctatttcataccctctcccactacaaactttccgtgcagttacctttcatttttaaagcaatttcactgctaaatataaattgtatttgtggggttcatagttatataatgctgaagggaaccactctttcgttgaaaggtgataaaag

SEQ ID NO: 10061 - DNA, 556 bp, Canis familiaris
  misc_feature (1)..(1): n comprises a, c, g, or t, or includes no nucleotide
  misc_feature (130)..(130): n comprises a, c, g, or t, or includes no nucleotide
nagctcggtgccggtaaacactctggcccgccggaagggcaggcatatgggcattggtaagagaaaaggtactgcccatgctcgaatgcctgagaaggtaacgtggatgaggaggatgagaattctaccnaggctgctcagaagataccgtgaatctaagaagattgaccgccacatgtatcatagcctgtacctgaaagtgaagggtaaagtgttcaagaacaagcggattttcatgggacacatccaccagctgaaggcagacaaggctcgcaagaagcttctggctgaccaggctgaggcccgcagatctaagacccaggaggcccgcaagcgccgtgaagaacggcttcaggcccagaaggaggaaatcatcaagactctgtccaaggaggaagagacccagaaattaaactccctctctcttgtctgtacatagtggcctcagcatgaatcagatcagttattcaataaaacaaaaccctttatttgccaaaaaaaaaaaaaaaaaaaaaaaaaaaaaaaaaaaaaaaaaaaaaaaaataaaaaaaaaaaa

SEQ ID NO: 10062 - DNA, 570 bp, Canis familiaris
gctcatttaggaagctcattcacacagagcttctgttgttagcctcccatgaaatgtaatttataattcaacactttaggagacacgtccaatagttttgttactcacttttagggaatagcactttatagtctatgattctgttcagtaacttaactacatgcacacaaccacatgtatagtgcgtggatgcacaatgacactttgtaacttggtcctttcatgaccttgcctagcgttcagacaccaataatctagaatagcatgcataatactaaataataataatttatataagataggaagacaagggatcttaaaatcctgaccctattctccttggccagggaaataaaagcctgtgtaatgtctaggctcttcacaggtacatttgaactctttctgctttcccttggaagtggtgaatggctaaacctggggcactgctatgcctgttgtcaactagaatcgaaaagttgagaggacgtctgagggccagccgcaccatggctaggaagagcagttagcgcaccaccaacctatcccctatttacacttaaaaaaaataaa

SEQ ID NO: 10063 - DNA, 518 bp, Canis familiaris
cttcatatgagtctgtgctcactgtgtggtctgcacccaactattgctaccgcctgtgggaatgtggcagccatcttggagctggatgagcatctccagtaagatttcatcatctttgaggctgctcccctagagacccggggcatcccctccataagaagcccgtggccgattatttcctgtgatccctcctacccctgtcaacctcctagcccctctggccctcggaccactgtgatctctgccctcttctccagacagaggctgggcatcgggggtgggggggctgtctcggctctgctctcccccccaagtagggcacttcgagggtgaggactttctctggagaggcttggagcctcagctccatgctcctctcctttctccccacttgaaccatggagtttccaataattttttggttttcttttttctttttctttttttttgtttgtttttagataataaattttgagagaaataaagaaaaattctaataaaaggagaaaaatggtaaa

SEQ ID NO: 10064 - DNA, 690 bp, Canis familiaris
gtcccttctgatctcaccagttggtcagttctacttcttgatccggaagcgaattcatctccgagctgaggatgcctgtttttctttgtcaacgacgtcattccacccaccagtgccacaaatgggtcagctataccagggacaccacgatagaagacttctttctatacatcgcctacagtgatgaaagcgtctacggtctgtgaagctgctgcccctgacgtgggggggggtcctgttctacacaagacagaggtggcccccatcctcgacctactccttctttgggctcatccctcacctccctcttgttgggacctgcacttctctaatgatttgaggcgtctccttccagccccctttctgccagcgagggctcatgtgggagatggcttttttggaccctctccccctctctccccctctctctttctgacactcttctcccatctgtgtcttatagatcttctggattgctccgtttcggtacaccatccggtgattgttttgggtttcttgttccctaactgcccaggggctcagaaccccaacattcccttcctctcattaccttcatttttgggggtagagggaagggactgaaattgttggggggaaggcaggaggcacatcaataaagaggaaaccaccaagctgaaaaaaaaaaaaaaaaaaaaaaaaaaaaaaaaa

SEQ ID NO: 10065 - DNA, 671 bp, Canis familiaris
acaggtggctcacactgccccagacttcctggggtgggggaatcactcaaagtgacttcagagatgttttacttgctgcaatgttttctacatgcgtgtattcggtcagtagactgagtcaacacacaaaggccacaaccaggatttggaatagtgggggaaatctgctgacaacctgggacagttgactgtggggggatcccacgcagctagtcagggagcagaggttagtcggggatctatccttgaggtcactaacaggagcatcaaaggggaccctctctgcagtcttggggagtctctgggattcggacgtggggcctgtgcaacctcctccagcaccacctatcagcacctgcccattgggcctgactggtgctgtttctttcagaattctggaatccccgctgatcccccaaccatgtcccccaccctacctcctgccccctcaggacagctcccctcctgctgggcaacagactgcttttctctactctctggtgttcagactccaggagcaaggcatgccacaagggaaagagcgcctgcctgcctccctggtgtctcctgctatctccccagctgggcacagccaacaaactagctcaataaaattggtgctaaatgtgaaaaaaaaaaaaaaaaaaaaaaaaaaaaaaaaaaaaaaaaaa

SEQ ID NO: 10066 - DNA, 576 bp, Canis familiaris
acagggagcttacttgttcccaagcaggactgtctatgctgagcagtttgccaaatgcccaatctacaagagaaaattgcagggccagtaagctattgctgcttgatccttgattcttggctgggaattcttcatcactacttggccatctcacaagtgcttcagtgtcttctggagttgttcaaactgatatcaactataagactgtatgctaggctgcagactttggatctttgcacttgcccttccaatgccagaaacacttttccccctagatatccacatggctcagtctctcacttcccccagggttattcagatgccagttttatggccacacttaagatagttacaagttttccttccagcattgctttgctttttttttcttcctgttctgtttttttcctttataatgaatgtgaagatctatattgtttacttctacgtgctagaacatagtgatttctgtttgttttcatgtcttctgaatctccagtttccaggagaggatcttgcacgtgatgatgatcagatgatcagaatgcaactgatgaataaatgaatagaaaaaaa

SEQ ID NO: 10067 - DNA, 649 bp, Canis familiaris
ccgttccaatccacaccacggcagcaagcgtaagaaggcatcttctgaagacctgcggggccgctactacccactgcaggccaccacgatgcttgatccagcccacagcaactgaggcagcctcctagcttcctcactggggcctggtgccaggctcctggaggacagtgactctgactctggcccggcatgtggccaactccctgccaggcaggggctcaagacaggggccctctggagcctcgtgaacagagaacagctcatgactggagttgccccctttccgggtggggggctgcaggtgataccctctgaggacggagctgcagggttgcaggccctggaagcgtgagaccgaggggctttgagacctattccttgcctgcccgaggagtcggacgtagagggaccatttgggggcagccaggccagccctcgatggaggattcagtcacattgactggctgggggaccagggctcccgcgggcccccgcgggcccccagcgccctcacagtgtccttgtgtgtgggtgctgtgggatgagccggcgccagcggtgtccgggtggagctcgcagaattcttgtaataaaagcaacctcaaaaaaaaaaaaaaaaaaaaaaaaaaaaaaaaaaaaaaaaataaaa

SEQ ID NO: 10068 - DNA, 729 bp, Canis familiaris
  misc_feature (321)..(321): n comprises a, c, g, or t, or includes no nucleotide
tacaaaagcggctgtaccgtcccgaattctcggatgctgaagaaggagcgctactcctatgggaggagtcagagattcttccgggaggacctcaagcttgcttgcgggaccagctgagtcagcacacaggagctgctgctgaaacaagattgcttgaggggcaaccaagcttcaggcccacagctggaagctttttccttccccaagccccctttcttccaaggtttgagaaaactggtcattgcccacaatgaggggtttctgtgtgtgctgaagatgccaaatggttgtgaggccgattcattttggagaggaagagtnttggtcctacctggggcctatgggtttgacagatgttggaggagctgcaaaagtggccaggagggcaaggatcaaaactgtggaggctgccacaggacagaggcccaggatgccccatgcgatcacaacctcctcagatctccagaggagcacactttctaacctggagcccagcagcttacagctataggcccagagccttgagcaggagaaactcttctttaagggccccacaatgttcctgagtgacctgtaaggacttgtaagagtagttttgctcaccttcctctccaaggccctgtttctcttgatctagctggtatctgccctctctactgaggcttgtcactgcctgcctaaccctgtccatcaactgcaataaaatgttttaacccccaaaaaaaaaaa

SEQ ID NO: 10069 - DNA, 634 bp, Canis familiaris
acaggtccccccaattcggaaaagaatgatgggaatcatgaccccgagagggtgcacacacatgacttgaaagagtggtccataactgattccagacagcatcggaaagatatatgaaagcttgtcagtctatttatccacctccatgatgtttttgttagaaaagtaaaaatgctgaagaagccccagtttgaattggggaaactcatggagcttcatggtgaaggtagtagttctggaaaagctacgggggatgagaccggtgctaaagttgaacgagctgatggatatgaaccccccgtcccagaatctgtttaaaattcagacatttaatggtgacccataaaaacatatttgtgatgtttaatttcttatcattctttttaaataatcaggctcggtgaagcagatgttttgaactgaccgtgtgaacttttcagaactattgtatggatcttatcccttgctcttggctactaaatagctgccaaagggtagtgatctattttaagctgtagtgatctggatggaagtgttttagatggttaataaaaggaaacttttttaacgtgaaaaaaaaaaaaaaaaaaaaaaaaaaaaaaaaaaaaaaaaaaaaaaaaaaaaaaaaaaaaaa

SEQ ID NO: 10070 - DNA, 621 bp, Canis familiaris
ccctctgaagaaggtttaaccaggaccagaagaatcttagaggaggctgattcaacctggcccagggtttaaagaggacactcctgtgaggcatttggagcctgaagaaatgataagaggagtagatgagtctgaaaggcttagggaagagataagaagagtaaggaaacacagtttgtgatgatgcattggaagcacaagacattcacgtaccgtccttatccgtgtgtgctttaggccttgaattcttttttgtctgatattaaaatctggcccctgctttctttctgttagcgttttctgatgtatctctgacctttgttttacctttaatcatctggtggaattttgttttaggtagcttccttgttaccaccatctcactggattttgtattttgacccacttccagaggtctgtttttccattggaaagtttaacatatttgcatggaaatatattcattctatattgtaaagtaaaacagaacaggttacagagcagtatatttagtaccagttcacatgtaggattaaatcccaaatttgtgtgcgtgtgtgtgtatacatacatacatatatcaaaaaaaaaaaaaaaaaaaaaaaaaaaaaaaaaaaaaaa

SEQ ID NO: 10071 - DNA, 528 bp, Canis familiaris
tctgctaataaattatgagaagcaaggataattaattaggggaaatatgttatttaggtggtttctataagcacagggactataagttcttgtacacttgtttttcatctttgctgtttctttaagcagtctaatgtgccacgaaattattttttaaggtgtttcctgtaaggattgttttaaaggtgttctcattatgagtagttgtagatatgtttcaaaatataactggtgatttttaaaggcctgagtactgacctaagaagcaattatatgaattctactctggagggaagagaggatgttaatggaaattgtttgacttttacatttctgtgccatcgaatataggtaaaaatacccattgtgcatgtctgctgtttaaacagaaactattggcctccttggccctaaataaaaggggctgatattttaagttgactattttattgtaaattaatccatcctaatttttaaaaattgattgaatgtttttcttgttatatgttgaaaaataaaaactggaag

SEQ ID NO: 10072 - DNA, 664 bp, Canis familiaris
  misc_feature (381)..(381): n comprises a, c, g, or t, or includes no nucleotide
agtcaggaccctacgtctgggatttcactgcattttccagatcaggacattctgattagtatagaccgatagtattcacaaaggcaatataaaattggccttccagcaatgtaggaaaatatgctggaacctcacttcttattagacgatgctaatttaaatagcaagggaaaatagcctcaagatatcatttctaacctatcagatggacacaattgtaaaatacggcaccatattctgtgatgagtctgcggagaaaccagccccctcgtatactgctggtgggaatgcaaattgatgcagcccttgctggagagaaacttgtcaacatctagccaaatcacatttgcctttcccttctgacccaggccacccttagcnatctagcctgcagatacacttctacgaatgtgaaaatgaggatgtgcgcacgatgatttgttcattgcgacactgtttgtaattgcagggattggaagtgacctaaatggggttgaataaaccgatatggccacacagtggagtagtatgcagttgtaacaaagaatggagaagagctctgtgaactgatttggggtgattaccaggacatactattaagtgaaaaaaaattgaaaaaaaagcatctgttagtatgctaacatttatgtaaaaaaaaaaaaaa

SEQ ID NO: 10073 - DNA, 572 bp, Canis familiaris
gcgaagtcacggagtccaatgagttaccggatacagggtgcagtccctcacctgcgaagtggatgcactcaaaagggacttcatgagtctctggaacgccagatgcggtgcaatggaagagaactttccgtcgaagctgctaactacccagacactattgccgcctgcaggatgagattcagaacatgaaggaagaaatggctcgtcaccttcgggagtaccaggacctgctgaatgttaagatggctctcgacattgagattgccacctacaggaagctgctggaaggcgaggagagcaggattgctctgcctcttcccaacttttcgttccctgaacctgagggaaacccacctggattcactccctctgggttgacactcactccaaaagaacgcttctgattaagacggttgaaactagggatggacaggttatcaacgaaacttctcagcatcatgatgaccttgagtgaagcttgcccagattcggtgcagccaattactacccagccagaaaaaaaaaaaaaaaaaaaaaaaaaaaaaaaaaaaaaaaaaaaaaaaaaaaaaaaa

SEQ ID NO: 10074 - DNA, 617 bp, Canis familiaris
ttctgtttggaaggtataactggcagagttttgataggatgtgaaaactgccctgggttccagggtaatcatatggacttgctggaagattctttgattcattatgctctttctcagtttaaagacttgttcttggtgtagggatactgcagaagccactggcatatattccgtactcctatgagtaacttcttaaatagaaatgtcctgtgtaaagatttctagtagtggaaggggccagtgtatctgaaagacaaatgtcctggagcctccctcaggggcctgtgatgcgtgagatgtcctgagccttactcaagttcactgactccacgtttcaggcaagtctgattgtgtggtggtctcaggttataataggatccttgagggtaattttgtagagggtctagaaaacttggtggctttacgttaagtcatttctgttaaaaatttcctcatgaaaggagtcctcaggttggggctattagggaaaaggtgtcaccatgcacaacgaattgtaactttaaaaagcatgttgattttttataaatttaagtgtgctggggaattccttaaattttgtgcaataaactattttttgttaaagataaaaaaaaaaa

SEQ ID NO: 10075 - DNA, 652 bp, Canis familiaris
  misc_feature (184)..(184): n comprises a, c, g, or t, or includes no nucleotide
  misc_feature (186)..(186): n comprises a, c, g, or t, or includes no nucleotide
gggcccagctaatcatttgaggaccagcagattccggatgccagcacgtagcccacgcttgcgtgccacgtgcttccttgctcccttctatcctccgacccgacccctagcccctcttcgtccttcccgtacacactgctcccccaactcactgtctcccaccccgcagctccttccacgacancnctggcacctggctctccatcatcctgggacacaggtcatgtcagaacagcacagatttaacgatgcaggaacgttctgttgcccaagcccccatctgtcaggagtgtgtggcccaaggaggtggcccaagagctaggcggactcccatttcatcctccaacctggagccccaagacccaggcccatggacgagatggaaggtgcagggagaggggacagtgttccccgacacccaacatgttagctgttcctgcccctttctagcctcttcagctggggagccaccccttccctctctccagcaacactcacccaggaagaaccagcccctccacagcgatgcctcactttctgccaacccccagttccctctccgcagccaagcttgtcattggccctcagggctgagaataaaagtagtgagtagaaccaaaaaaaaaaaaaaaaaaaaaaaaaaaaaaaaaaa

SEQ ID NO: 10076 - DNA, 683 bp, Canis familiaris
cacgtgaccctccaggactgtaaggataaccagttttgtcttaggccaccgagtgtggtaatctgtgacaacagtaacacgatactggggcaaaagcaaaattcaggtttttaaaaagattttattcatgagagacagaagcagacttggcagagggagaagcaggcttcctgcagggagcctgatgcaggacttgatcccaggactccagaatcacaacccaagccaaaggtagacgctcaaccactgagccaaccaggtgccccccaaattcagtttcttttcatctcaactttctccaaattctgcaagacccaacctcaggcaagccacagcccgcgagctgagcaggcttcaccttctgcccaggctacagcctttgtactggaacacagatcatagatcttgtggtgggcagttccccagacagggctgcactctgcagcagccggcatcttcctcggaagccaggacaagtggggagtggctccttcacccagtttgctgttaccccttcttcttcctacacaagtaagggagactgatggtgcaggtgccataagaacttgggattacatttgctcctgggaggccttttgttcacttgtttgtgcttgttgatcacattctgcaataataaaatcagatggggtccttgcaaaaaaaaaaaaaaaaaaaaaaaa

SEQ ID NO: 10077 - DNA, 440 bp, Canis familiaris
ttccatggagtctgagtctagctctcattggcccattgggtcccggagaggctgcctcggggtgtgtgcatgtatggtgcgttgtgacacgtgtacacacatgtccaggctttcctccctgacatcatctccgtgcctttcacgcccgtcttctcaggcgcatgtctcagcaggacttggtcttggtggtggctgtgtccacagtctgtccagcacagggcctggagcatgtgaagacgctcgaggagtatttacagagcaaaaataggcattttgaactcgccccctccagtcctgacaccatccaccctccacgtcgcagtcagggcacccttcagagacggccgtgtcgtggggcctgggcccgatcacgcttccccggggtgaggtgcatcgcgtgtgcgtggcccagcccttcgctcctggccctcctgcagctt

SEQ ID NO: 10078 - DNA, 682 bp, Canis familiaris
tggtaccgtccgggatttcccgggatgagcctttgctccctctgctactgcacaagccagttgagaccaccccacaggacccggagagaccatgaagagcctgctcctgtctctccattctggctgccttggccgtggcagctttgtgctacgaatctcatgaaagtatggaatcctatgaaagttaatcccttcattaacaggagaaatgcccgatacatgttatatctccgcaacagagatggagagctaaagcccaggagaggatcagagaaaccaccaagcccgcctatgagctcaaccgggaagcctgtgatgacttcaagctttgcgaacgctacgccatggtttatggatacaatgctgcctaccatcgctatttccggcatcgccgaggaggcaaatgagattgaaaaaagtctctttccttccagagcctggtgcctggttttgtattcctttacagtagcatcatcgaactacataaacacatacaattgcttatttcttaaatgttcttgtctggctgttgccctccttcctgccccccagatcaataagcagtgaaaatgcaatgtggtgaaaggtcaaaagagaattaagatgtgtgattattattacataataaactcttggatggatactttccaaaaaaaaaaaaaaaaaaaaaaaaaaaaaaaaa

SEQ ID NO: 10079 - DNA, 531 bp, Canis familiaris
  misc_feature (309)..(310): n comprises a, c, g, or t, or includes no nucleotide
  misc_feature (320)..(321): n comprises a, c, g, or t, or includes no nucleotide
  misc_feature (343)..(343): n comprises a, c, g, or t, or includes no nucleotide
tttttctatgtttacataccccagtcaggaagtccccggtctattggaaataacgtaatcttagtgttaaatagacttccagctttatgctggaataaatagcatgtgagcagctgtttgttggcctgggggtggaggggtaaggtgggcgctaagccttttttaagatttttcaggtacccctctaaaggcaccgaaggcttaagtaggacaaccatggagccttcctgtggcaagaggagacaatccaagcgcttatttaccaccttaaagggtcaaataaaaactggtgtcagcctcctaaccccnnagcttctgtnntagaaatgaggacttggggatncccctgggtgtgccacagcggtttggcgcctgcctttggcccagggcgtgatcctggagacccgggatcgaatcccacgtcgggctcccggtgcatggagcctgcttctccctctgcctatgtctctgcctctctctctctctctctctctatgtgactatcataaataaataaaaattttaaaaaaa

SEQ ID NO: 10080 - DNA, 612 bp, Canis familiaris
cttcgtcaagttggccgttacgagtcgccactgcgtcagccctcgggaacgtccaccgtccacaggattttcaagtcccctttaacgcgacatcgcgaaggtctttatcagctggctcttacccactctcaggactccctcgcgctttactttccttctggcatttggaccccaacgaccttccccgaatatgaacttctccttcattccctccaggctttggcaacgccggtccttctgctgggttgcccttcctgccatcctctgcttaaaagagccgaggaatcgcaatgcccagttctgggtttggctgtggcctgagccaatcctcggctcccattctgctccgccggccaccgtccaactgtatgacctgcaaatccttaatctttgactcgcacgattatcatcaggatcaaattatacagaagagtacttagcacagcacctgttacccggctaactcaaaaatgttctttttcttctcttcctcctgaagggttcttttccaaacccttcccgtttgtacctcgtgtgtctaccatactattaatcacaccgcatgctgtgttataattgtttatcgcttgtcaaaaaaaaaaaaaaaaaaaa

SEQ ID NO: 10081 - DNA, 593 bp, Canis familiaris
cctgcccaccgtcttaccgatgacccttggccgtcccgcccttggaggttcactgggaccaacccccccaggtatggccttgggcggctgccacctgggaacggccgaagaaaggaagttcctgttggtaagaaacgcggcggcgccccggcgcctgctaaacctgcgtgaacccggggagccaacgttctgggaccgaccgggcaatcttgggaagggagggccccagcaaggtcgtgccaacgtggggacacgacagcacgccccgggtgtgcccgcacgaccgctgctgaccgcctgctggacctgtatgcctcgggtgagagccgggcctacgggccgcccttcctgcgcgaccgcgtgcggtgggggtgacgcgtttgcacgtggcgacttctccctgcgcatcgacccgttggagcccgctgatgagggcacctactcctgccacctgcaccaccactactgcggcctgcacgagcgccgcatctttcacctgagggtcaccgagccagtcgctgagccgcccccgcgggactcgccgggcaacggttccagccacagcggcgcaccccggcccagattccaccctg

SEQ ID NO: 10082 - DNA, 618 bp, Canis familiaris
gtgcttatgaacctgagggtccttgagaataagccccatctcagagagccaccgagccccggagccctgggcgtctttcaggcctcatcctgccgctgcagtctggagacacggtctgcatcgacctggtcatgggcaaactggcgcacttcggaggagaccgctcaccatcttcagcggagccctgctctacggggacttggagctagaacagtgtagacagacggctgggcatgaccggcccgaagtgtctacgccgccggccaaagagccagcggggacggcggggctccgtcctggccccccagccccaggcgagccgtccagtacctgtgccgcgcaggcgcccagagcgctctcctcgccacggcctgagcgccccgggcggagactctgggatccccacgtccagacttttggcctgctcgccctgcagggcccagacggctggggagccgatcctcgcaccttcgcagctcctccagctggtctctagcccgaggcagggctctcccgaggggctctggcccccaccgccgtaccaaactattcaggaataaagacacttggtttttctaaaaaacaaaacaaaaaaaaaaaaaaaaaaaaaaaaaaaaa

SEQ ID NO: 10083 - DNA, 332 bp, Canis familiaris
agtttgatatgttttcgctgggttttatctctctcgacttcctgcacttaccatatgaaataggaacttttgtctccactgagatgatcgagatgtgtgagacacagtcggcccacgtgagtaaatgacacataagctttggtcaccaggtggtgtgatcagaagcttgaaatttaacacctcttgtcctcactcagttctagtactgaatgcctactctgctctctgttagaaatatgaaatggtgtttgatattgtctgagacattatggaaagatttaattatttgtaataaaagatttactgccgtctgaaaaaaaaaaaaaaaaaaa

SEQ ID NO: 10084 - DNA, 565 bp, Canis familiaris
gatatctgtcatgcctcgtacatcagccagatccttggctcggcgcaatggctctggatggggacgctcccgcagcctcccggggtcgctggtcctcctctgcccctgcatcgcgggcaccttcaccaccgcccctaccccagcccccaccacccccagtccaggaggctcagctatgccaccacggtcaacatccatgtcgggggtggtggcgtttgcggccggccaaggcccaggtcaggttgaaccaccccactctcctggcgcccccccaggaatctgtgggccttcgcggggcccagggaactcctgatgcccctttccacacgtgagccggatgccgggcttcttgaaaagcaaggacctcaaccagatgccaccgaccctcagaacttcaccctgaagtccagacactgaacacaggtgtaaaaattgctgcagcttttcaactcctgggagctgctttggcaaatggtcctttttacttgccttgattaactcaacagggatggggagggggatatcattaatattttgttaatattaaaaaaaaaaaaaaaaaaaa

SEQ ID NO: 10085 - DNA, 582 bp, Canis familiaris
aaacccctcaggatggcctcttgatggggcctagcggagcaaacaactttgccactgactttctgggaagccacagccccaagactgcagatagatacttgtgtgcccgtgtgcacagagatcactggccacacaggagcgatgctcaggaaacattcctgatcctcaggagcttctgggaaaggcctgacggccactggggccagtgacactcctttcctgatacaggtcttccctttgggcagggatgggccagccgctctggggtacaggatgactgcctaggagggggtgaccgcacccatgcttatcctcttccacttggacaaatgtgtcccatttggtcaatttaccagatgagggaatttaattaaatcctggtggagggtgcctgggtggttcagtgattgagagtctgcctttggctcagatcgtgatcctggggttctgggatcaagtccccatcaggctccctgcagggagcctgcttctccctctgcctgtgtctctgcctctctctgtgtgtctcatgaataaataaataaaatctttaaaaataaaaaaaaaaaaaaaaaaaaaaaa

SEQ ID NO: 10086 - DNA, 592 bp, Canis familiaris
ctttgtggaatattcacctgggacgaaaaagaatggctccgacaatgacaaactatagtgagcactagtccaccacaaataaaaaatggttttctccttcataatactggatttatatttaattgtcacaataccaactgtcccccaagacagaagtacagccacaaattgggaaaataacaatgaggatattttcatttggagaaaaccatgaaacaattcgatattttaattctatgatggtttcgccttctctgcttaattcagtaacttcacaagtactagtttcctacaacagcttcttccttactcatctccaaagaggcaatgccattcagtaatttctgtggtacgatttttgtactcttaaacttatcaccgtgagtggtctctttgtacagctccatcaaaggtgaagatgtcttttcctctaaatttccactttacatacatctcattaatgtttgtggcctccacattattaacaaagcatgggatgataacactttcattgcaagcagtgtattctacagatttggttatgttaaatattagctgacgccgaaccgcagctcgccgagcccagcagcag

SEQ ID NO: 10087 - DNA, 489 bp, Canis familiaris
ccgcagttatcgacggtagagtccaagagtcaggtaacctccttatcatggtaattaaattgttctcttctgagatctgtgttgtctaattggaccataattcaggtagagcggtcccagatgtaccaccttggactcccgctctggagtctagctgcggctccgagccctgccagggccccgactcggcctgcctcggcgtcccctgagaggcctgaattctgctcgcagcttcattaccactgggctggaaacatccttgggttgagtgttttgtttgggagttatttcatgagggccttttaaacagtagtgtcccaatgaagtactagatattatttatgtaagaatgagcttttttttttttaaacaatatcctttcaaaatttctaactactttgtaactgcatgacttaacctggtgataaaagcagttattaaaagtctaccttttcccaaaaaaaaaaaaaaaaaaaaaaaaaaaaaaaa

SEQ ID NO: 10088 - DNA, 569 bp, Canis familiaris
ggcagctcgtagttccacgcgtcagtccgagctccggccgggcgccggcgccccggagcagcacctgctttccttgatgtgctccacggatgttgcaggtggtcgtcggtgacgcgtggcccgactcgttgagcagccgcagcaggtagcgggtgagtcgccgcccgcgtagtcggcccggcccgcaggcccggcagcacgttgccctcggagatgggcaccgcgtgcgagacgccgtggccgctctccagcaccaggcccgacgtcctgccgtacgagtagatggacagcagcggctgggcgccacgtgcagggcgggacgcccaaggcctcgaacaggagctcggcgtacttctcccgctggccggcggggccgagcggggggtcggagagcagcacggcgtgctcctcggggcggatcttcatggccgtgcggaacacgtactcccagatgctctgcacgcagtcccagtccaccaccacgccgtgctgcagcgggttcgtcagcttcaggggcgccccggtgcggagcagctcgtggcccacgtaggtctccttgcgggtgtcgc

SEQ ID NO: 10089 - DNA, 600 bp, Canis familiaris
  misc_feature (303)..(303): n comprises a, c, g, or t, or includes no nucleotide
agagccccaggggaaccacagtgtatgtcaactgcccagatgccggtgggctaaaccaacggccccccacaggcctccctggttactatatgcatcagaactgttcacatctctccccttccggagaacaggggcttgcactcttgccccctagaaccctactttgaaggccattagaaagcttttgttttcagtgtccccgctggtattgtcttgcccaggatggttaggtacacaaggacgcgttattagatcactgagaagaaaaagcccaacccgcttctctggtatgaacatctagtnttgagagcaagcaaacacgtaggcttgtattagtgctttaatggagtactggtaacatttttctttcttgataggaatctgcttatatttagccaggcttctatttcataccctctcccactacaaactttccgtgcagttacctttcatttttaaagcaatttcactgctaaatataaattgtatttgtggggttcatagttatataatgctgaagggaaccactctttcgttgaaaggtgataaaagttaaataaagactgtctccacagtaaaaaaaaaaaaaaaaaaaaaaaa

SEQ ID NO: 10090 - DNA, 348 bp, Canis familiaris
agccacccatgatattgaagagacctgtctttcgttccaatggatagtcttgtcctcccttgtatcgaatattagttgacccataaagttccagggtcccacttctgggttctctattctgttccattgatctatgtgtctgtttttgtgccagtaccaccactgttcttgatgaccacagctttgtagtacaacctgaattctggactattaaagagaggatctaccaggggcccctggcttactcagccagtagagcatgcgactcttggtctcagggtcatgagttcaagccccacattgggcttgaagcctacttaaaaaaaaaaaaaaaaaaaaaaaaaaaag

SEQ ID NO: 10091 - DNA, 517 bp, Canis familiaris
cagagcctcgcaggcctgtgggatttgctctgcccaggcttcgtccccgcgaccccgtccgtgtgtccctggctccccataccagtcccctgacttgttggttcctctcccctccctccctagagagttggtgagatcttttgagccaaggagggtagggggagccagaagattgggccggctcagcaggccccccacgccctgcctgagctgctcctcggggtcacccccttcccttggatcagctggggattccctgctccttcccatgcccacattgttccctaccatacgtgcttcccagttgaggtgcctttgcctctgttttctgaggaaatgggagaaagttgcccaccacctctgacacgataccccctgtgaagaggttgggttaccggaacccaccccacccatgtttctttgaacactccaggtttctccagtaaagaactggactatcgatccatccaaaaaaaaaaaaaaaaaaaaaaaaaacaaaaaaaaaaaaaaaaagggc

SEQ ID NO: 10092 - DNA, 114 bp, Canis familiaris
  misc_feature (1)..(1): n comprises a, c, g, or t, or includes no nucleotide
nggagcctgcttctccctctgcctatgtctctgcctctctctctctctctctctctctctctctctctctgtgattatcataaataaataaaaaattttaaaaaataaaaaaaa

SEQ ID NO: 10093 - DNA, 249 bp, Canis familiaris
  misc_feature (1)..(1): n comprises a, c, g, or t, or includes no nucleotide
naaaagctggccaagaagtatgatgcctttttggcttcagaatctctgatcaagcagattccacgaatcctgggtccaggcctgaataaagctggcaagttcccttcctctgctgacccacacatgagaacactggtggcccaagtggatgaagtgaagtccaccatccaattccagatggaagaaggtgctaatgtttggccagtggctgtttggccacgtgaagatgacggacgatgagcttgtgta

SEQ ID NO: 10094 - DNA, 401 bp, Canis familiaris
cgcttcgtgcacaacagccacgacctcacgctacttggcctacctgatcaaggcccagcccgacgaccccgagtcgcaagacggcctgccacgttttccgcgccacggaccccaaccaggttcctgatgttatcagcagcataaggcagttatccaaagctgccatgaaagaggatgccaaagccagcaaagacaacgaggatgccttttacaactcccagaagttcgaagtcctgtactgcgggaaggtgacggtgacccacaagaaggcgccgtcgagcccctcatcgacgaaatgcactggaacaactcaacctgcaagaaccacagcgcctgagctgcagggcgagccgcgcggcaccgaggcgggcgccgaccccgcggtcttcgaggccccggcg

SEQ ID NO: 10095 - DNA, 427 bp, Canis familiaris
aggaaaaaacaatatggctaataaatcaagacagtatgattccagtgtcaaataaaaaacgtggaacacctgagtagataaggtagtccttgacaggttttaggccagagaaatgaaaaaggtcttaagatttgtcaagggaactctaagtattctttcatatatctttataggagcaagaccaactgcttttaagttttgaagggctagatgtatttcctgtgacgggaactgtgtcttcattttcttccttcggggtttccaatttacccattttaagaagtaaatctttatgtttggggacaattacttctttgttcataatatgaagtgtaaatattttttcccagtttctcttgtaacttgcttctggtgttttgtttttgaatcttcattgtaaaataaagcacattacattactcacaaa

SEQ ID NO: 10096 - DNA, 675 bp, Canis familiaris
ctacgcggttttgagctgggatcctgggaatgaagctagttccaagcttcgaagagaatattgacagtaatttctttttcatttgacatgggccacttgttgctatgttactgtattctaagttgctatagttatatatggttatactaattactcatacacaatctggggaaacctgaaaacaccaaacgtgaaaacgtgctgaaaattcctcggaggtaataatgctgacaaagtgaagattaaaaattttatagtaactcagtgtagctgtctcttgaaattttgtttatatcccattaagagagaaaaaatattttttaacttaaaaaatatagtgcagcattgaaaggctttaggctatttctggctggtagattgaacatataattggttttaagtaaaaatttcccccatcgtgggaggtttgattgctctgaaaccaatgaaattgaggtaaaaaagcatcctaagcggtattttttcccctctctcccatttttctatttctttaaaaaccctgatccatacttaaagcttggcaaaaacaaaactcacaaaatttggtaatttctgattgcctcctcatactggtcagctttatcatttcaacttactgagtgtgatagagttaccctttatatttaggattggatctatgtaaaaaaaaaaaaa

SEQ ID NO: 10097 - DNA, 467 bp, Canis familiaris
  misc_feature (424)..(424): n comprises a, c, g, or t, or includes no nucleotide
atctctgcccctcggacgaggccctcaggggagcacagctcctggggtcccttgagggccagggggcatttctgctgcctgcaaaatctaaactgttttgtttcagcagccaaccaacaccatcatcccattgccccatctagatgcagtctgcttccgcgttgctccctgcggctgtaagccagaggggattcaggggaagttcactgttaccagccaattccccctgcgtcccccttgtgccccaagttgcttgaccggagaagcccccttcccttcgcccacaaaattagccaagttcattctttcagtcccattggcatctacatagacaggtgtgagagtagatgtgtaggttactctacatgtatctgttctttcttcaaaaccatgttaactttgtgaaacgacttttacactccancacgctttacagccagaagaaataaaggaatatgaaaaataaa

SEQ ID NO: 10098 - DNA, 606 bp, Canis familiaris
ccgtacaggacgagagccattcagagtgggtctcttgtgtccgattttcaccttatagcagccatcccgatcagtggtctcctgtgtttggaccaatttgtccaaggtatggaaccctgcaaactgcaaagctgaagaccaatcacatcggcccaccccggggctactttgaaccccgtgaccgtctctccggatggatctctctggtgcttctggagggaaggatggccaagccatgctgtgggatctcacatgaaggccagcacccttataccacttgatggttggagacatcatccaatgccctatgcttccaagtccttacccgaattactgggcttaatgtgctgcccacgggccccagcatcaagatctgggacttggaaggcaagatcattgtagatgaactaaagcaagaagttatcagtaccagcagcaaggcagagccaccccagtgtacctctctggcctggtctgctgatggccagactctgtttgctggctacaccgacaacctggtgcgtgtgtggcaggtgaccatcggcacccgctagaaatgatggcagaactttaggaataaaacattggttttctgaaaaaaaaaaa

SEQ ID NO: 10099 - DNA, 300 bp, Canis familiaris
aactagtgggcctgtgttgctggtctgccagttgaagggttagctgctcccttctcccatcttgcttttctgcaaaacctcagggaacccccaggcggggcttccatcatactctcaggagggaccagcaacagggtgattgctagaggtggggggggggtcccttagtgatactcctctgcccttccaccattttcctggcatgagactcacagacataaatcaaaggccttctgattggttggctgccccagaaggcacaaaatagacttattttctcctgggtaaaaaaaaaaaaaa

SEQ ID NO: 10100 - DNA, 646 bp, Canis familiaris
ggcaccatgaatatgacaatggatatgaagtctaatgaaagtgagaatggagaacctcgtggggataactatcgagcctatgaagatgagtacagctactataaagggcacagctatgacagctatgatggtcaagattactactaccaccaccagtgaaggctcagcctgggatgaattcatccattctggcatttcatgtggctaccattttcaaagttcaactcaggaaggtgccaatataaccaatgtgcatattataatgtggaatggtgctactattcccaagtaatttctgtaattgcttctgttgcttttccctggtatgttattgaaagcttattgtaaatcagggcatttaaactaatctaagattgagttcaattaagtgttttgagtttgtagttctataaatagtatttttaatatgtttgtactattattatctgctaaaactactcttcatgcaagtgcttctacgaattaacattaatgacactatataccaaatatgtgtagttctttaatcatactacctaacactgtatattatgtttaatcaccatcatcatctatttttatgtgatctttatgtatattctatctatggattttatcacaaataaaatgcaaccttccaaaaaaa

SEQ ID NO: 10101 - DNA, 184 bp, Canis familiaris
aggggtatggtttgaaacttcctgacttgtttcagaatgtcatcattgtaaacacgcacctgaagctttggcgagcagagcccataaatcacagttatggctccctctgagtgacaaggacatttgcagctgcctttggaaggcttttcttctccacttctaaaaaaaaaaaaaaaaaaaaaaa

SEQ ID NO: 10102 - DNA, 619 bp, Canis familiaris
  misc_feature (155)..(155): n comprises a, c, g, or t, or includes no nucleotide
  misc_feature (161)..(161): n comprises a, c, g, or t, or includes no nucleotide
  misc_feature (176)..(177): n comprises a, c, g, or t, or includes no nucleotide
  misc_feature (182)..(182): n comprises a, c, g, or t, or includes no nucleotide
  misc_feature (186)..(186): n comprises a, c, g, or t, or includes no nucleotide
gatcgcacgccccccgtggcggcgacgacccattcgaacgtctgccctatcgactttcgatggtagtcgccgtgcctaccatggtgaccacgggtgactggggaatcaagggttcgattccggatgtagggagcctggagaaaccgggcccgtanccgcanccatccaaaggaagnngcagnccanggcgcgccaaattacccactcccgacccggggaggtagtgacgaaaaataacaatacaggactctttcgaggccctgtaattggaatgagtccactttaaatcctttaacgaggatccattggagggcaagtctggtgccagcagccgcggtaattccagctccaatagcgtatattaaagttgctgcagttaaaaagctcgtagttggatcttgggagcgggcgggcggtccgccgcgaggcgagccaccgcccgtccccgccccttgcctctcggcgccccctcgatgctcttagctgagtgtcccgcggggcccgaagcgtttactttgaaaaaattagagtgttcaaagcaggcccgagccgcctggataccgcagctaggaataatggaataggaccgcggttctattttgttggttttcggaactga

SEQ ID NO: 10103 - DNA, 585 bp, Canis familiaris
  misc_feature (1)..(1): n comprises a, c, g, or t, or includes no nucleotide
nggactcttcagttagccttcttcacgcccccgaggtctgccaacgcgaccctcgttcgttgtgaagggcccaagacggacggatagcacaggggtccaggggagttttcagccctaacccctgagtctccccctccccgctgctcggggtcagacctgggttcccatggcctcgggccacggggctcagcacggacagactcgcaccagcgtctccagcaaacagcaggccatggcgccctcaagcccgcgtcccctgagccccgagaaccaaggtgctatcctgcagacccccccgtctactcggaagcctagggccctgggccgtcggtggcacgcaccagagcgagttgcttgcttttacaacgagaccacaccacacaaccaccccgctgcttcttctctccatcaggggtagatgagtggtttacacgttttctggtgaaacacccctcttaaagtgggtaaagttttccgaattccctggtggtttgctcacatgtgtcacacgtcacgccacttttccagaataaaggtgttcattcctcaaaaaaaaaaaaaaaaaaaaaaaaaaaataaaaaaaa

SEQ ID NO: 10104 - DNA, 607 bp, Canis familiaris
  misc_feature (159)..(159): n comprises a, c, g, or t, or includes no nucleotide
  misc_feature (177)..(177): n comprises a, c, g, or t, or includes no nucleotide
ccaacggaccaggttcaaggcattcgttgccatcggagattacaacggacacgtgggtctgggcgtcaagtgctccaaggaggtagccactgccatccgtggggccatcatcctggccaagctttccattgtccccgtgcgacgaggctaactgtgggngataccaaagaaatcggngcccaagccccacacactgtcccatgcaaggtgactggtcgctgtggttctgtgctggtgcgtctcatccctgcccccagaggcactggcattgtctcggccacccctgtgcccagaagctactgatgatggctggtattgacgactgctatacttcggccaggggctgcactgccaccctggggaactttggccaaggctacttttgatgcgatctctaagacctacagctatctcacccctgatctctggaaagagactgtgttcaccaagtctccctatcaggaattcactgaccatcttgtaaagacccacaccagagtctccgtgcagaggacccaggctccagctgtggccaccacatagttttatacaagaaaaataaaagtgaattaaagcttgttaaaaaaaaaaaaaaaaaaaaaaaaaa

SEQ ID NO: 10105 - DNA, 647 bp, Canis familiaris
aggaggtttgaaatggaccggggacctaagagtgcccgatatctgtgctgagtgtaataaactgcatcctgctgaggaaggagacttttgggcagagtcaagcatgttgggcctcaagatcacctattttgcactgatggatggaaaggtgtatgatatcacagaatgggctggatgccagcgtgtgggaatctccccagatacccacagagtcccctatcacatctcatttggttctcggattccaggcactagtgggcggcagagagcaaccccagatgcccctcctgctgaccttcaggatttcttgagccggatctttcaagtacccccaggccagatgcccaatgggaatttctttgcagctcctcagcctggccctgggcccactgcagcctctaagcccaacagcacagtacccaagggagaagcccaaccgaagcggcggaagaaagtgaggaggcccttccaacgttgacaccccttctcttctttcctcagatcaatgtcagggagtcaaaagggctgtgtatagcacaggatggagttttgattgtttatttttaaatatttaaaaaagggaaaattttaagctcaaattgttcactccaaaaaaaaaaaaaaaaaaaaaaaaaaaaaaaaaaaaa

SEQ ID NO: 10106 - DNA, 569 bp, Canis familiaris
acccctagccatggaaatgagttcatctcgtaccctagcagtaactatatcgagccccctgtcgacgttaatctgaaggagaatccgaactagtctctgggattttaacgtagagtatgcagcaaggtcctttcgccctattctttctagcagagtacgcaaatattattattataacatcctcacaactattctgttcttcggcgcattccacaacccattcataccagaactctactctattaacttcactataaaaaccctcttattaaccatctgcttcctatgaattcgagcatcataccctcgattccgctacgatcagttaatacacttattatgaaaaattttctacccttaactttagccctatgcatatgacatgttgccttacccattatcaccgcaagtatcccaccccaaacataagaaatatgtctgataaaagagttactttgatagagtaaataatagaggtttaaatcctcttatttctagaataataggcttcgaacctaatcttaagaattcaaagatcttcgtgctaccaacttacactatattctaca

SEQ ID NO: 10107 - DNA, 637 bp, Canis familiaris
  misc_feature (278)..(278): n comprises a, c, g, or t, or includes no nucleotide
gcgagacctggaggtgcacaatgccgttctggtgagcccctctctgagtggccgttacgccctgcccttcttgatccaaggccaccaccagctgcgtggatttgtgcccatcgcacccgcctccacccagaatctacaccccacggaaccaacttttctgggtctcgtgaagtatcccccacaccttctcacttctctgttaatgggggaaagtctgggagcctgtatttccctggggcttctcgcgtgatgatccacatggcaggccaagcctcccngggcaacccttgcgccaaacacacgtcttgtggtgaagcattctgttgatgccaggccatgaccctgctaccactcccacacagccctctcagacattccacccttgtgctcctctttgcctctctcctgagccacactcgccctgagagttaacccacggattagcccccagacttggccctggaagcttggagaatctggaccagtgctccaccagggaggcagcccctgggattggagagtagaagccagggggcaatgccagccaggacctctcatttcatctcacagacacaataacacaacaccatcttttgtccagagacacaaataatagaacaacaaacaaagaaaaggg

SEQ ID NO: 10108 - DNA, 485 bp, Canis familiaris
cattggaaaccattttgaacacaagatagaacacgggacaagtgacccgcgcaacttcttctcaagaacctgtagagtataagtctacctatccctgtagaaaaggggaatattttgagaaaaaagaatagagaagagaccaccgtggaacacagtgcactaatacacggatagccccgatgttgtaagaagagaataatattttccagagagagatatggaccctatgattggttgaatggcctcaatcttctttcccaagggaaaaccaatggaataattccaaccatgatgaactatagtatatttttatttctaagttttcttagctacttactgtactttatatataaaaccaagtcccttctctagaacttgtattttctgttttcctcccacgagaacatattttaatatcctcaatacatgtaatttggcataataaatgtgtgttattttgcaaatttaaaaaaaaaaaaaaaaag

SEQ ID NO: 10109 - DNA, 399 bp, Canis familiaris
ctggatgtatattatgtgttatcactcattgcacccaaagttggagaagtttgtaactgtgtgcgtgccagtcactgtgcggctcactgtgctctgtgccttgacatctaggcgcccattcagtgggaggagcggaatgtcactgccattcaaggaccggggggaaagtggatgatccctcctgaagccaaagagtccatggataagaacaagatgggcctgaaaggtagtggatgtggcggctcctatgggtttctgcttccagtgtcatgtttctgagagattctgtgttgaagctaaatagggcctgaccatattaaaacaaaccatcctgtgtgaagcagcgtacttctttctgttctcagaatgtctttatttgaaaaaaaaaaaaaaaaaaaa

SEQ ID NO: 10110 - DNA, 656 bp, Canis familiaris
acactatagaacaagtttgtacaaaaaagcaggctggtaccggtccggaattcccgggatcttacacaggcggattgctggggatcggcagcggcgaccgcagcggtggaagcagcaaattatctgtgtgcagctcccaactgggaagaagatgctaattaaagtgaagacgctgaccggaaaggagattgagattgacattgaacccacagacaaggtggagcgaatcaaggagcgtgtggaggagaaagagggaatccccccacagcagcagcggctcatctatagtggaaaacagatgaatgatgagaagacagcagctgattacaagatcttaggtggttcagtcctccacctggtgttggctctgagaggaggaggtggtcttaggcagtgatgggccctccctccattttacctccttaccctgtcgctcataatgaggcaccatatatcctctcactctgtgggataccagagccactgccccctctcctggatgcccagtcttgtttggtgggagacggtgaggaccctaggatgcagtgttcctggcccaagggcccttgctggctattgggttttagtttgcagtcctgtgtgcttccctctctagttgtcaataaaatatttcctaacctcctggaaaaaaaaaa

SEQ ID NO: 10111 - DNA, 628 bp, Canis familiaris
cgttctggcctcttgctcctatgattttactgtaagagttctggaacttttcaaagcctgaccctcttcttgaaacagtggaacatcatacggagtttacttgtggtttagatttaagtcttcagagtcctactcaggtggctgattgtgcttgggatgaaaccaataaagatatatgatcctgtttgccttactatgcctgcttgagatgcactcccccagtcataagccaaggagactggctgagagctacttaataggaaataaattaactacccataacctagatattatgcttttatgtgctattcagatttcaaatttttgaaaatgtaccctgaaatcagttttgatgcagttgataaagactgcggttcactatttaagcctggtacataagcgatatttcttaaaacagtcctaagaaatgatgttatagtacctcttgtaatgtctattaaaatgtaatctctgtattgtaaaatggattaaaatatggaagatctgtagattatattgatagtgacatattttatttttaatttgtcatttttgatgtaaaatataatcactgctgttggtaaaaattaaaataaactacatttctcaattaaaaaaaaaaaaaaaa

SEQ ID NO: 10112 - DNA, 419 bp, Canis familiaris
catgtcctccttgttgcacccgccagcgggtgttttttcccctcgcttcacccgcgcctcctttgcgcatagtgtcgcgggactttgtgatgagtcttctccgcggtttcctaataaagtgaccccccttttccacggagggccagaagttttgccctttgtctgtgtgggtgttgctgagtgattctcaagatcccgtagacttaaggacacgtgtattcttacaatcttggctgtatttaacggcagagcttgacttcggcagatgagggcagcatttcaggattaacatttttttcaaccctttgatcatgtaatctgtgtgacagactggaatgaatgatgcctttccgaaaataaaatgtcagcacagtgaaaaaaaaaaaaaaaaaaaaaaaaaaaaaaaaaaaaaaaaaaaa

SEQ ID NO: 10113 - DNA, 619 bp, Canis familiaris
ggaggatgctttatctcgggactatgaagattatgataagactcagccttcgttttaaaaaggggcattgcttatctgaaattgttatgtttcgaggagatggtaccagagcatatttttttgttacacaaaggggaagtccacaaatatgttctgcaaggtctgggttaatgatcgagaagccaaatctggttgatcgtcgcttacaagtgaatagggaaaaacaagtgaaatgcaccgagtgtgggttcaaggccaattccagaaaccattccacttgactcagtaaacctccaaattggtgttttaactttggctttctcatggctgaactatgtaccatgttaaggtacaaaccagaggattacacaatacaagacttctataaatctttcatttttgaaaggacaatcagaagaaaagagaatttgtatatcctgctgtttatcatgggtgagctccctatgtttaagcacttgcaaattatttggaagagtatactatattctgtgttttcaaaacttaatatgctgaaacttgcttgagtttattatgcctaaccattttgtttgttctttgaattttataagcattcaattaaattacctcgacataagat

SEQ ID NO: 10114 - DNA, 685 bp, Canis familiaris
ccctctcgtaatgtctggcgatttcactcaaaaggagagatgagttgatggagtgagtactgggtgtataggcaggtgatgaatcacctaattctacccctgaacttatatatactccatgttaactacattgaatttaaagtggtgtaaaaaaattttaaaggagagatgagttgatattaatgaaaaggggttgaagatagacttgtcacctagttgacactccctcctgactatcatcatgaaagatgggagtgcagctgtcagagctgtgacctgttgggaacaagcgcacaggggcctccagacctgcccctctcgggtgtgggagacaccccctgagcatccagcacaggggcaggatctggggtgacactttcagttcttagttaccaatgtggcccagggccttttctgctggcctctgtgtggtgaagaaattttaaaatttccctctttgggtgggagactggagaagtctcccagcaaaccagagttagtatcctagtgtgttgctatggaaagaatggcggtatcacttggagttcatgaaaaaaaaaaaaaaagaagaagaagaagaaggagaagaaagaagaaagaaagaaagaaaagaaagaaagaaagaaagaaagaaagaaagaaagaaagaaagaaagaaagaaagaaagaaagaaaagaaaaggaa

SEQ ID NO: 10115 - DNA, 594 bp, Canis familiaris
cctgccgactccatgcagcagtagtctatctggcctcgccgccggctgcccgcagaatcccagcgccatgtaatgcccgcgggtgcctacctgcccgcttccccccactgccccggggcccaagttatgaggagtcaaatcctaaggatgcagcagcagtgacagagggatccaaagagggaacagaggcctcggcatcgaaggggctggagaagaaggagaagtgaaacggctggggcctgacccactgagggccgggccaggcaggcgggggcaggctggcacaggcctgcaagggcagagggcatgggaggctaagggcgctggaggctgggcagccccaggagaggggcaggggcaacaggatccctccagcggggccccccatggcctggttccttcatcccccttctctggccttcctctaccccttcccgtcccctgcaggcaaaggaagccctacctcccccaccctcctagatgccaggcaggaaaagtgggtttgatttttagatttttgtattgtggactgactttgccttacattaaaaattcatcccaggggcacctgggtggctcagtcggttaaaaaaa

SEQ ID NO: 10116 - DNA, 619 bp, Canis familiaris
actacataaagcgtgcagctgatcatttggaagcattggcagccattgaggacttcttcctggagcatgaagctcttagtacttccatggccaaggtactcatggctttctaccagctggagatcctggctgaggaaacaatcctgagttggttcagccaaaaggatatgactgacaagggccggcagttgcgcaagaaccaacagctgcagaggttcatccagtggctaaaagaggcagaagaggagtcatccgaagatgactgaagttgcactgtctgcttctcttggtgtagttgatagccctcctggcttctggttgccgaaggatgaatgactgccatctaagctgaggcttaaaggagcagaggctggaactacagtattcgtcctaccaccagcaaccatgtgcctcccatcctgcctggggacttgggaaaaggaaagttggactggaacaaagctctgcctaaaaaggagcaaggcaggctccgcagttagaggaagtctagaggaacaattttgtgctctggccttccctcagggaacagcagagagcagctggccctttctgctgcttgtatttgttaatattaaaaaagagacagggggatgtaaaa

SEQ ID NO: 10117 - DNA, 634 bp, Canis familiaris
aacaagcacagcattatgacccaagcactgggatcgttcaccctgccagatccccaggaacatacttattttctccttacccacgtgcaatgtgaaaagcaaccccacgttttgggtgggccttctataagaacggcaccccctgtgaatgtacaacctacgacgaatacaccaaggggctaacctggatcaaggctttcgggggagccccgtgctcgagctcacggagaacgaccaggtgtggctccagctgcccaaacacggggatcgaaaccgggctgtactcctcccagtacgtccactcctctttctcagggttcctggtggcaccaatgtgagcgtattcccaaccgagctcacgtaaatctgcttgacgaggcattccccaattccgctgcgccccacaaaatgcatatggacgtaggccaaaaagtgacccgttttaactttccaaatacagatgtgagctttcagaccaacccattctcctgctggaaaagcgggcagcaatggtaaagaatatgtgaagaccctcttgaatttctagtcagtggtcccaagactataaagttttctgtgaactccttcagtatttaaacatttcaacctcaaagtcctagtagggtaaaaaaaa

SEQ ID NO: 10118 - DNA, 596 bp, Canis familiaris
caggtatgatcccaggccctgggatcgatcctgcatcgggttcccctgcagggaggctgcttctctctctgcctctgtgttgtgtttgtttttgtgtgttgtgttgtgtgtgtttgtctcatgaataaataattgatcttggtaagaaaggatttatatattgagtacatgtaaggaatgccagtctcactaccctcagaaggaagacatttggtaactgtattatcatcttcaaactaaaaggtacagagattgctttatgtggacataactactcaggagctttatggacattctggaatgtatatctttcaatgactaacattttaatgggaacacactactcaaaaagccataaattctagactgtaaactcttgagtgctgtgcctatttatttttgcatccgtactggatatactgcctgacacactgcaggcattcagtgacttctagttgaatcagggagtgaaaatgtgtgggaaacaacctgagtcaacttagtcacttagcagtgaatgatacagcccagggatacctcaggagtattttctatatgagaaagagaaggattcgtatgtcttgaaaaaaaaaaaa

SEQ ID NO: 10119 - DNA, 702 bp, Canis familiaris
agaccgctgatatacctgtctccgtccatcactagactctttttcaaaagacataatgggacccaagtgaggaagggtgcccctgaacggagcagtgaggctggagcctggctctgctgcttctctggcccagtgcagactcgcgtgacttcagggcccctggctgctccccatctgggaatagcaagtgatcccatccaacgaacgtggagattacacttgccgatcgtgcccttcgctatccaacctcggcctgtccagctcagtaggtcacgtggcctggcctgtcaagtaagagaagggagaaactatatctgcgttccgagtacaagagacgtgatcttttccttctccgctgtgggaggagaaagaggcacgccgcgcgtcctaggcatgctcggctgcttgatccacccgctgtttctacggacgagtcgctgggcaggcctgactacctcctcgcagctgtctggggatgtttgtcttttctgagccctgtgtggtgatggagcccctggtgtccctaatgtgatcgttaccaagtctgcagcctcactcctggctgggcctggcagctcctcctcggtgagcattttcagtcagaaaataaaagggtgaatcctgtaatgggaaggccctagccagaaaaaaaaaaaaaaaaaaaaaaaaaaaaaaaaaaaaaaaaaaaaaaaaaaaaaaaaa

SEQ ID NO: 10120 - DNA, 630 bp, Canis familiaris
attgtttctcccatgattgctacacccaatagcttctctctctctcctctctctctctctctctctctttcggttttttccttcttgttatctcattgagctggttcttcggctgtcatcgttctaacataacttactgggaaacgtgacatgacaatcctcagccgctgtgttttcccgatggtatctctttactttgattagtgacgcgtatgcggtgtcacttgtgttgtgtatagctaaagccatatttccaagcccggggtccagcaccaggggctccgggaattaagctcataggagaaacttattttaaacagagctttctctgtctaccttgaccggaattggaattttaaaatgatgtgtccatttttgttgtcgtttgcaggctcttatttttctctacttaaacattattgccctgtaacaaggctcttgagttaataaaagttatcatctctaagaattcattttctacgttttctagcaagtagaaggaggtcatcttgagtcgggccagttcctggcctgatgagagctgcaggtgcctctgggcagaaagtagcaggaggccacggccggtgccgggcgctgccccgatgtcccctggctgccgcgacgtggtcc

SEQ ID NO: 10121 - DNA, 719 bp, Canis familiaris
ttgcgggcttcaagtaaaaccggctccttttgtttttgtaagaccggactccttctgtcgaaacaaccggggctcacttgttccccagatttttggttagtattttgtgaattttgagttcactgtgtgttgattgctaaattcactttgagagggtaaaggaccactttgtcggagtagtgtcaatcttcccttctttcactagatagtcccggcgatagcccctgttcccccggatgtggatgtgagcacaataatgtttgcgcctaactcgcgcttctcttgcacattgtgtctctcctccaatgtgttggtgtgtgaatctttaatgttttggccctgttctgggatccatggccagttgtgttcctttaagggaaccattaatgtccggcccggagggacccctattttagattcccaattttggagagtccattattttataataaaatgtttaatccatttttcccgtggtattactgtgtcatgctatgcttctttgtggctaattctccctttatttctcccgttctttgatatctccaccaagcattctgaattgttgtctttggctagtgaattaggtggaaatttttattttttaactttggggttaccattaaactaaataattgactttttgctttttgtttaagttaaaacattgacactgcccaaataaaactagaaatttagcataaaaaaaaaaaaaaaaa

SEQ ID NO: 10122 - DNA, 650 bp, Canis familiaris
  misc_feature (67)..(67): n comprises a, c, g, or t, or includes no nucleotide
cttggtacagacatagtacgcccatggcagcccctggctcattcttttacccgtggagtagaaggcncagtcacctctgccattctaggcaggatttgggcctgacagtatttctagccccgggaagctgtgattagctttagctgttgtgtccacaaagggggtgcctgggagctcccagcctgcctttccagcttgctggcctctttatcaaggctggacaggggctttgcaggaagaaagatgctggccgtttgcccctgccatcccattccaccccagccaatgatccttcacacttgccctacccttgggagttacaaaggtcagaggcctgagtgcccaccctcaaactagttaggaacaaggttcaaagcatggctcccctacttgttctatgacttggggctcagtttcttcatatggaaaatggggacatcttcacaattgtttaatggcttgtctaaatccacgttcctggggattctcaagtctgcagcctgagcaagaaaaagcagcctggcacactgatcccatgacaccagctccaccagttgttaatgcgagtctttattaggctgtatatacaatttaagctattaaaatttgtacaatatttacaaattaaaaaaaaaaaaaaaaaaaaaaaa

SEQ ID NO: 10123 - DNA, 614 bp, Canis familiaris
ttgattctgacccccatcacggtgatgatcccagaagcagtcttccagggaccatcctaaaatttatggagactgtggcaagaagaaaggctctttcaggagtatcgcccaaagcaccgagagggaatgagatgtgaacatttgctttctccaaatatggggagggctgagttcctttgaccccaagatgaagtgctaggccccctagagagagctctgcatgtcaccaagtgaccaggccttgcctcgaggcgctcctgtctcctaacccagctttccttcctctggactccgcactgtaacgcctacgtttgctgatcatgggaagaactcctgtgtgccactaactcaataaaaccgccaaggaatctgaatgtgctggggtgtcgtccttttatgctgggcttttctatctcccacacaccttcatcttgacatgggaaaaaaaaaaaaaagtagaaaagaaaagcactagctaagatggtataaggaatatcatataattgagaataaaaggagtgacaaagttaaaccaaggatttcttgcttttagaagcagagatgtgttccaatggccaagtaaaataaatttctgaaaagtgaaaaaaaaaaaa

SEQ ID NO: 10124 - DNA, 443 bp, Canis familiaris
  misc_feature (270)..(270): n comprises a, c, g, or t, or includes no nucleotide
ccggcagacagctgaaagatgggcccactctgtccgactacataccatccagaaggacgtccactctgcacgtggtccttcgccatcaggggggatcatgcaagatcttcgtgaacgccccttcgacgggtaagccacctatccccttggaggtggagccccagtgacaccatcgagaatgtcaaagggaagatccaagaaaaagagggcatcccccctgaccagccagaggttgatctttgctggcaaacagctggaagatgggcgcanccctgtccgactacaacatccagaaggagtccactctgcacttggtcctgcgcttgaggggaggtgtctaatttccccctttaagctgttgacaaaattcattgcacttttctttcaataaagttgttgcattccccaaaaaaaaaaaaaaaaaaaaaaaaaaaaaaaaaaaa

SEQ ID NO: 10125 - DNA, 696 bp, Canis familiaris
  misc_feature (400)..(401): n comprises a, c, g, or t, or includes no nucleotide
actgtgtaaataacagtccctttaaatgtgggattgggaaccacataggtctgttcaagatggtattcttcagactatagaaggagcttccacgtggaattcaccacgtggaccaaatgagggacaacaggtgaacacgctttttttcatgggtgtacaataccaagtcaagattcccggtttattgaaataaagtaaattttagtggttaaaatagacttccagctttatgctgggaattaaatagcatgtgagcagctgttttgtttgcctggggtgggagggttaaggtgggcgtctaagccttttttttttaagatttttcaggtacccctctaaaggcaccgaaggcttaagtaggacaaccatggagccttcctgtggccaagagagacaacannagcgctattacactaaggtcaataaaaatggtgtcagcctcctaaccccagcttctgttagaaatgaggacttggggatccctgggtggcacagcggtttggcgcctgcctttggcccagggcgtgatcctggagacccgggatcgaatcccacgtcgggctcccggtgcatggagcctgcttctccctctgcctatgtctctgcctctctctctctctctctctctatgtgactatcataaataaataaaaattttaaaaaaaaaaaaaaaaaaaaaaaaaaaaaaaaaaaaaa

SEQ ID NO: 10126 - DNA, 641 bp, Canis familiaris
tcaggaaggaagtagatagtattgttttaaaagtaattggaaaaggctagtataaaatggcgccagagattttactggaataatcctcatggatgcccctcatgaagttatcactgacttctcaccaaggcaaggccaagggcattatgtgttgagagcccttgccctgtgtgactttcctcatctgtccctattggcacgcttatgatggcttctacccaaatgcaaagccatacattctgaagaatgaagattttagaattgtaagttcctcccctaaggatctaataattctatcaaaacaaatgtttgttttgtaaggtgtagcgtatgatccttatgtcagttgagttctctcaatccagagggggaatccagaaaagaagggggagggaatcctcaactcctgaattatactattagaaaagtataagattcactggtagtgttatgctatatgttggcaaattgaactccaattaaaaaaatatataagattaaattaaaacttaagaaagcaacaaaaagaaacctgacacttcaaagaaacaaagactaaacatgtttaaaagaatgtttctaaatcaaaacaaaaaataagactaggaaaccaaaagaaaaacatcttcacatatcagtaa

SEQ ID NO: 10127 - DNA, 464 bp, Canis familiaris
atttcctggaactcaccggattacttcctgtgcctccgttcgccctggggccccaaaagagcccagcagaatccgaaagctttttaatctgtcgaaagaagacgatgtccgccagtatgttgttagaaagcccctaaccaagaaggtaagaaacctagaaccatagcacccaagattcagcgtcttgttactccacgtgtcctccaacacaaacgtcggcgtattgctttgaagaaacagcgtactaagaaaaataaggaagaggctgcagaatatgctaaacttttggccaagagaatgaaggaggcccaagaaaaacgccaggaacagattgccaagagacggaggctgtcctctctgagagcttctacctctaagtctgagtccagtcaaaaatgagattttctaagagtgacaaaataaataagatcagacaccaaaaaaaaaaaaaaaaaaaaaaaaaa

SEQ ID NO: 10128 - DNA, 637 bp, Canis familiaris
ggagagatctggcccctagccagagcggagcccaccccctcggctgggcttccctggtgctccgggcccagcccacggagacactgttcctgcccatcgctctgtagcaactcgtcctctcccaccgtcttcctgaaaggcccaggcctcttcctctgctttttccgtgggcgggactcgagcggaaggggggctcagccagctgcccagagccctaggggtgagaaggcggcccccagcttctcccagcagagctgcagccccaggacattctgctacaggcttggggcagacacagagagcctggagtcagagacccagcccccgtcccgcacccccggggctgctgtaaacccccttcctcccaagggttcccaattcgtggggagcgaacgttgttcccctggagatgatgactcagaaaatctcccggggaacgggacagctgtcgatgccacagctccatcctccgcgtggggggatgggattgcaacgtgcacgcactgcagtggatcgccctgtcccggatgccccccgagagaggaacagacagtcggaaataggagagtttctattaaaggtcattcaaaccaccaaaaaaaaaaaaaaaaaaaaaaaaaaaaaaaaaaaaaaaaaa

SEQ ID NO: 10129 - DNA, 666 bp, Canis familiaris
ataaataaaatctttaaacaaaaagtaaaaacctgtggtgaggatatatgtaatttcctaatattaaaatgttttctaccaaagaagctacaaggaaagtggttctgacttgaagagggaaatttgtaagtcacaacttaagatctatttttggaataaactaaaagaccttactgaggaagtaatatgatgggtggaaagaacaggtgtctttttctgcatatgacttgatgctgaattctgacattgtgtccaaatatgaatatgcctgatattttccctgaatatgcttgagattttggctggtactaaatcccagtggcatggcctgtgacagtggtgcagatacctgtaacattcatcctattagctccttactctgggtgtgcttgggagacctttgcttattccagaagcacatttgcacttcttaaaaattacttgttttctggtaaatcgagtgtgagtgcaaaactgcatttatgtctatatagaagactgttagctaacacatagagcctgtaagatacagttgaacttaaatgcaaacaacagatagagtccttatgtctgtaaagtgctttggaaattaaactggtaaaatgggcttcagcccttaaatttatttttacatactcacttaaacacatagcaaaaaaaaaaaaa

SEQ ID NO: 10130 - DNA, 699 bp, Canis familiaris
aattcccggatgcgggccccgcgcaccccgcgtgcgctgcgcgctgtcggcgcttgcccggctcctggcgcttgccccggggctgcccgcattggaccgggcaggcgccgcgccccccgagcagggccccggtgcggctcttcacggaggaggagctgcccgctacggcggcgaggaggaggaccaagcccatctacatggctgtgaaaggaagtggtgtgtgatggtcaaccctcttggaaaggagtttttatggacgaggagcccccctataatgccttgactgggaaggactccaccagaggggtggccaagatgtgccctggatcctgcagacctcacccatgacactacgggcctgacagccgaggagctgaaatcctggatgacgtcttcaacaaagtgtacaaagccaagtaccccattgtgggctacacagcccggaggattctcaacgaggacggcagccccaacctggacttccagcctgaagaccagccccattttgacacaaaagatgagttttgatgttctatctgcagaagcctgttcctgatatgtgggggtgcgggcagggagacctcatgtgccaaatctgcaaaacaggccacctgagcctctgggctccccggacctgaataaagccgatgttgaacccggaaaaaaaaaaaaaaaaaaaaaaaaaaaaaaaaaaaaaaa

SEQ ID NO: 10131 - DNA, 692 bp, Canis familiaris
gagacagaccctcaaccccacttccacaagggctggcaacggcgcctgggccaactggtcaacaacggccggaatccgcagacgcagcccgccaggccaagcccgccgcatcgcccccggcctgcgtcagggcccatccgccgatcgtccctgccccacggtgaggtaccacacgaaggtgcgggccgcaaggggcttcaacctggaggagctccgggtggccggcattcacaagaaggtggccggaccatggcatctcggtggaccccggcggcggacaagtccacggagtccctgcaggccaacgtgcagcggctcaaggaataccgctccaagctcatcctcttccccaggaagccttcagccccccagaagggcgacagctcagctgaagaactcaaactggcaacacagctgacaggaccagtcatgcccatacggaaagtctacaagaaggagaaggccagagtcatcacagaagaggagaagaacttcaaggcatttgccagcctccgcatggcccgtgccaaagcccggctttttggcatcagggccaaaaagggccaaggaagctgcagaacaggatgttgaaaagaaaaaataaagtgctattggccaaaaaaaaaaaaaaaaaaaaaaaaaaaaaaaaaaaaaaaaaaaaaaaaaaaaaaaaaaaaaaaaaaaaaaaaaaa

SEQ ID NO: 10132 - DNA, 687 bp, Canis familiaris
tgccggcttcatctttggctaccaggaccagctccagcttctacgtggttaatgtggaaacaggattggagccagacaaacctggcaggcgaatcccttcagggccgtagctgaacccggcaattcagctcaagctgtgaaagtcctccacaaggccccggggagcagctgccggaatgcactctggcacacaggggaacacagcatcacaaggtgcggctcgctgtggaaggaacccccgcaacgtgggttggaaaggacaagacatcctaccgctggttccctgcagcatcggcccccaagtgggcctacatccagagtgcggttctacgagggtcctgagctggtggccgacagacaacgtggtcctggacacaaccatagcggggtggccgcctgggggtcttttgcttctcccacagagaacatcatttgggcccaatttgccgctaacccgggtgccaatgaaccaaccaataacccagaaggacttacgagactcagaggcttctgcaggcctagggatgggggtggggacccattgctggaagatggcaccatcgtggctacccgtttgttgctcactgcaacaaacagggagcttggcacccggctccaagaggtagctgccctagaggggctcagaaaggacaaaataaagtgtgtgtggtggaaaaaaaaaaaaaa

SEQ ID NO: 10133 - DNA, 656 bp, Canis familiaris
gatccgagacctgccgacggtattccgcgcttgagcaggagtatggactcctgcgtgtccctgctcagtcctgagcactggcccagctgccctcctcgggagtccccacggctggggccctctgcgcccatgggccctccgtctgagcctcccttccctcacaaatgtgcctttgggggctgccacagcataacaggccttgtgccagctgcccacccccacttcctatgcagctttaatgcctccggatccctggggatgggagttgaaggctcagaatcggcctagtaccccccactcattcctcagtctccccctaatgcccagggactgggcagcggcatccccaggccttgaaggaggagggagggcttcgggatagggtgttagatagagccctcctccccacctcccgaggtgtcaatgttttgggaaaccctggcaaataagaagttctgggcgagtttggagtctcccgggcggacaccccatccccaccattgttccctcaaagatacccattctcctctgcccaagggagggagtatggacagtcgtgcaagttctgggattcaggcttgttattaaaataatcaattactaattaataaaatctgaagaaacttgacaaaaaaaacaaaaaaaaaaaaaaaaaa

SEQ ID NO: 10134 - DNA, 130 bp, Canis familiaris
cgatgctggtgactgagctggggcgcagcctgtgaggtgttgggccggttggcctcagaggagcccacaattaaacgtattccaccggaaaaaaaaaaaaaaaaaaaaaaaaaaaaaaaaaaaaaaaaaa

SEQ ID NO: 10135 - DNA, 665 bp, Canis familiaris
ccccgcttaccacgtgtttttttcccgatcagagctaccaactcttttcccgaagggtcactggttcatcagagccgcagataccaataactgttcttctagtgtaccgtagttaggccaccacttcaagaactctgtagcaccgcgctacatacctcgctctgctaatcctgttaccagtggctgctgccagtggcgataagtcgtgtcttaccgggttggactcaagacgatagttaccggataaggcgcagcggtcgggctgaacggggggttcgtgcacacagcccagcttggagcgaacgacctacaccgaactgagatacctacagcgtgagctatgagaaagcgccacgcttcccgaagggagaaaggcggacaggtatccggtaagcggcagggtcggaacaggagagcgcacgagggagcttccagggggaaacgcctggtatctttatagtcctgtcgggtttcgccacctctgacttgagcgtcgatttttgtgatgctcgtcaggggggcggagcctatggaaaaacgccagcaacgcggcctttttacggttcctggccttttgctggccttttgctcacatgttctttcctgcgttatcccctgattctgtggataaccgtattaccgcctttgagtgagctgataccgct

SEQ ID NO: 10136 - DNA, 621 bp, Canis familiaris
gacccggacctgtttctataactcaagatgggattaaatgccttctgaaaggagctataagtccagatttcttcaatgatatcaccttcaaatggagatatagttgggcagcattcatgttcctagcagccttggaatggatggctttgccaatcagttggcattcttggacgtcctgccacagcttatggattccgccctgatgaaccttactactatggctatggatctcgataaagtcatccttttcttgtgtactctcagcttagaagaaatctgtatgggttgggttaactttgaatcttggctaataatgcatgttgatattattgcgggtctgtgggggtattttttattttttattttttatttttccatgttgttagctacaaattaactctgatacctttgtcctctgttaggtacagttgatgtttgacactgttaactcatgaaactacatattaatgctgaataacatttcccatgttataaagagaggtgcagaattaaatgctgaaaggcaatcagactggaaaacaaacactacattatgtacattaagtgactaatttaatttctattaaaaagaaggataaagtacaagtgaaaaaaaaaaaa

SEQ ID NO: 10137 - DNA, 708 bp, Canis familiaris
tgatgtttttgcattttgcagtgtgggctcccagcagccataagcatcaagtgtaaaatattttatgcaacacctgggaccccggcagaaggaatatttttcataagggaatgaaacgtaaccaacagaatgaaaatgataaaatattcccacacttgggagtggtgcccttggaggcaagctcccattttggacatttaaagcacctacaggtggcattcctttctttcacaacataaactatagataattaaggcagtaaaaaaaatttgaactgccttctaggcactgagagcaaatctttactcatttacctgcaaaccagaatgattctggcctagagtaaggtgcaggtgttaaaataaccattatcctagaggattgcataacagagaaaatgattcgtagacaaaaatgatctcacttcatctttgctgtctcataattgtcaaaaatcagaattatgttaagtcctagtttctataatcagtttttgaatcaaaggatggaaggccatccacaaaaatatcttaggtcagagatgacagaaatatccactcagagtggaaaaaaaggaattctgttcattgttatttaagtaaggtgaaattattgtctagatcgttcaatatcatcacctagcagataaatttagcattctgcaatgttcctggcttgcactgggcatttaatgtaaaaaaaaaaaaa

SEQ ID NO: 10138 - DNA, 531 bp, Canis familiaris
  misc_feature (211)..(211): n comprises a, c, g, or t, or includes no nucleotide
gtcaataacacaggaggaatgcccatacatgtgtatattctccgcaacagaggatgggagagcttaaagccccacggagagggatcagagataccccccagcccgcctattgagctcaaccgggaagcctgtgatgacttcaagctttcgtacgctacgccaatggtttatggataccatgctgcctacacatcgctatttccggcatccncgaggaggccaatgagattgaagaagtctctttccttccagagcctggtgcctggttttgtattcctttacagtagcatcatcgaactacatagacacataccaattgcttatttcttaaatgttcttgtctggctgttgccctccttcctgccccccagatcaataagcagtgaaagtgcaatgtggtgaaaggtcaaaagagaattaagatgtgtgattattattacataataaacttttggatggatactttccaaaaaaaaaaaaaaaaaaaaaaaaaaaaaaaaaaaaaaaataaaaaataaataataaaataaa

SEQ ID NO: 10139 - DNA, 673 bp, Canis familiaris
tggcatcggggccagtccgcaccaactcttggctccttgaggacctgtcaggttggacgtgcccgctctgggagctctgtgttaggtgaacatcaatgacacagtcctctggcggttttttgtagaagcaaagcacagcctcctggtcatcgtttcacgatggtgtccacccgtgtgaccacctcatccttgcacagcctgtggcaggtctggttcgtcatccggccgccccgagtcgaagtctagcaaagcactcgatcgcaagtccctccctggttgcttggcatagcaatgctagtgctcgaagctacggtgcgaagtctacttgcagcgtacttttctccagggaggcctccgcgcggcctgcccgcagctagtcggctagcgcaccacacacacagcgcccgctgcgtctccacagatcgtggccactcctgtggcacaggcacgtgtctagatgtctgtggacgcatgtatacagttgtccccaatgtaacccgcgtggcacttgcattctccacagtgacactcgccgtggcctgagcagaggacccctcggttcctggcgcaggagaagttgtcacactggcagaaagggccgtagatcttcccgaactcgctctcgaagcaggagcactggttgcagctgcactccccgcgcccgctgcacagc

SEQ ID NO: 10140 - DNA, 682 bp, Canis familiaris
aggaggccatcctgtatagacgtctgcaaggtgcctcctggcctgtaagccagcttcaccccagccctggggccggccaacagcaccacaactgcttaaggctgggcccacaagtacagacctgaggaccaagcaggaagaagaagcagaggcctgttggcccgggcccgagaagaagctgccggcaaaggggatgtcccccacttaagaggccgcctgtccttcgagctggggttaacactgtcaccaccttggtggaaaacaagaaggtctcagctggtagtgatagctcacgacgtggatcccattgagctggttgtcttcctgcctgccctgtgtcgtaagatgggggttccttactgcattatcaaggggaaggccaggctggggcgtctggtccacaggaagacctgcaccactgtcgccttcacacaggttaactcggaagacaagggagctctggctaagctggtagaagccatccggaccaattacaatgacagatacgatgagatccgccgccactggggaggcaatgtcctgggtccgaagtcagtggctcgcatcgccaagctggaaaaagcaaggctaaagaactggccaccaagctgggctaagtggacgctgttgaattttctgtacataaaagtaataaaaggttctctttcaaaaaaaaaaaaaa

SEQ ID NO: 10141 - DNA, 511 bp, Canis familiaris
gccaacgacgtgctcacggggccggatggccgcggggtagccagcgggactggacaggcccggtgacgtcagcaggcggacggccgattcaggatgtggggaggcccctgcattgtcttgagtgatcagggaggttacagatcaaggagtttccttaaaactgtggaggatcgtgccgtttgggcagagaaagctcccaggagccagagccttcgtcaggctcccgaaggtcgggctgagcagctgctggtcgggtttgctgtgggtgaggagcagctggggtcggggggtcacctcccagcaaccaggaaggttctgtttcagccttggcttgcccctggcccttttgctcacagaatcctccaccactgcctcgagccctctgccacccgttgtctgtgtggacacggggtgccccctccccccgctctcccgaccctgtggtgccagcattggcctgtcggtcggggaaggaggcctgggcctctagggtcggcagcatgcccacggt

SEQ ID NO: 10142 - DNA, 117 bp, Canis familiaris
ccttctgctggggccggcacctgctgggggttctggtttttacttttttaatgtaagtctgagtctttgtaattattgaatcgtgagaacatttttgaacatttacctgcccataaa

SEQ ID NO: 10143 - DNA, 592 bp, Canis familiaris
cggtccctcctcagccctgtcccacccccttccccacccatccttagtccagcatgcttgtagtgctcactcgggggttgtcatgtgtcactggtggtctgggatgccagggaagatgatgcctctgtattacatgatcttttttaggaccctgttcagtgcaggtggcccagagctgggctgcacatcaggtgacctcaccgcagcaacggacgagggaagggtgcaggactggaagccccagagctttaacacggagggcaacagctcctgcttctcctcctctgtgtactccattcggttcctatagaaaatggatacgcagagaactcccaaccctggcctggctgggtctagagaccaccgcaagaatcgcagcccagggcagtggttccagttacactggctcaggcccttactcgcttctccacccccctgtctcccccactcccacctgcccttctgttcctaggctcagctgcaggcaaacactccaccctccatttcccccactcctgcagctgcctccaggcctgttgctatagagcctacctgtgtgtcaataaacacaattgaagcaaaaaaaaaaaaa

SEQ ID NO: 10144 - DNA, 549 bp, Canis familiaris
tcttccggcaggaaccattcagttttcagaagagccactgctttaatgatttcctgaaagctcttcgagagaaagtggaaatgtaaaccgttaaatcatttctgggaaattgtcattcaggatggaattactctgatcacccaagatgaagctcctggaagttccgtcacagctgaggaagcccaaccgtttctggcccctaaagaacctcccaatgaagacacagcagccatatttgcagaaggtggtgatgtggatgatttactggacttgatataggtcgtggctgtgtggggaatctacgagagttgccactcgctgttgtgctgggagttctatcccgaggaagccctttgcggggaactggaagctctggagatggtccctgtcggttatgtggaagtgaagctcctaattctctggaatgaatatatacatatagaagggataatttaggtccccatacacgtttataaagaatccttgttattttctgaaaaaaaaaaaaaaaaaaaaaaaaaaaaaaaaaaaaaaaaaaaaaaaaaaaaa

SEQ ID NO: 10145 - DNA, 522 bp, Canis familiaris
  misc_feature (1)..(1): n comprises a, c, g, or t, or includes no nucleotide
natgccacttctggcacacatggggacacagcatcacaggtgcggctgctgtggaaggacccccgctactgtgggttggaatggaccagacatcctaccgctggttcctgcagcatcggcccccagtgggctacatcagagtgcggttctacgagggtcctgagctggtggccgacagctacgtggtcctggacaccatccctgccggggtgtccgcctgggggtcttttgcttctccccagagacatcatctgggcccatctgcgctaccggtgccatgacaccatacccgaggactacgagactcacgaggcttctgcaggcctagggatgggggtggggaccccttgctggaagatggcaccctcgtggctacccgtttgttgctcactgccaccaacacgggagcttggcacccggctcccagaggtagctgccctagaggggctcagaaaggaccaaataaagtgtgtgtggtggaaaaaaaaaaaaaaaaaaaaaaaaaaaaaaaaaaaaaaaaaa

SEQ ID NO: 10146 - DNA, 527 bp, Canis familiaris
atatggtaaaacactttagaataacatctgacataaggacccctgtagactttggccatcagattattactcttcatctatgtgctttctgccatacttaccatggtgccttgcgcagagtaggtgatcaacaaatgtgttaaaaagaaacactatccaagttttcacgcataaaattactttgatccatgatcttcatttgcaaatctaacagagctatgtccaactatctgcctatattggatggatagttaagagactggatcataagaaaagataaagaaaaattaaggtagggatagtcatggtaggaatttcagcccaatgaggatcttctaagagatgaagtaggtcacttgtgtggtctaatagctagctactttgcaggttacctaggaataaagacatggttgccgtaccttctataagactgaactgtaaccctggagctggtttacagaaggattcagttatttttaataaataaaatgaagcttaccctaaaaaaaaaaaaaaaaaaaaaaaaa

SEQ ID NO: 10147 - DNA, 569 bp, Canis familiaris
gcctcgagcgccgccccggggctctttcgtctccttcatgacccgatcggagccccggggtcgtcgggcctggatcccgggcctgcgggctgtcccgcccgcccgcccgcgccacggcggactctccagcggcggaaccgcagcgccgagtgagagtcagcttgaagaggaagatcaagctcaggacggagtccccatggaggtgtggagcctggtcaccaacctctaactgcagaactgggatgtggagctggaagtgcctcctcttctgggctgtgctggtcacagccacactgtgcactgccaggccggccccgaccttgcctgaacaaggtaagccataggctgaggggtcagtctggactcctgggcctcagaaacatagcagactaggacaccagtgatgtgttgactgggaaggttctacccaggtggagcaagggctcctttttgtggcagaggcttccacaatacctgggctggtttgggtctggctcaagaagtgacttgacctaaatacaccctgcttcggcagaaattagaagtcacaaaggcaaaaaaaaaaaaaa

SEQ ID NO: 10148 - DNA, 662 bp, Canis familiaris
tcctggagacgccatccctctgttttgaccctccatagaagacaccgggaccgatccagctccggactctagcttagccgcgggacggataacaatttcacacaggaaacagctatgaccattaggcctatttaggtgacactatagaacaagtttgtacaaaaaaagcaggctggtaccggtccggaattcccgggatgtcatagtaaataatataaggtgaaatgtaaaggttctgctattacaggaccagtcgcaaaggagtgtgcagacacacaggagcccaaaatctgtatattatctctgtgaaggggattaagggacgattgaacagacttcctgctgctggtgtgggggacatggtgatggccacagtgaagaaaggcaaaccagagctcaggaagaaggtacatccagcagtggtgattcgacaacgaaaatcataccggagaaaagatggtgtgtttctctattttgaggataatgcgggggtcatagtaaataataaaggtgaaatgaaaggttctgctattacaggaccagtcgcaaaggagtgtgcagacttgtggcccaggattgcttccaatgctggcagcattgcatgattctttggtgtatttgttttaaaaaaaaataaaaattatttgttctcaaaaaaaaaa

SEQ ID NO: 10149 - DNA, 564 bp, Canis familiaris
atttttgtatttcttgctattttattctctttgtgtttcttacctttttggtatctgttctctgcgtcctattgctgtgtcagttgtccgactgatgacgtctttgcagcttgttagtgggctttttctgggggctgcccccttagccgtgcacaagcccattctattgcctgctttgtgctttctgcaccagacagcctgatggaacatttgcacctgagttgtacatttttgaggtgtgcagggcagcccggacacaccacttagattctatgtgtatagttccccgtgttttctaacatgccctctctggaaagcatatgtacataatacatgtcatgtccattcgaaacctggccacctggcgggaaccctggggatttctccccgggcatgaccgatgacatttccatttcatccatttgttttgttttcttttttcttttttcttcaattcttggactttcaaccctgcatatgattcatagggtttgagatgtacatgtgacactgacaggtaaaacagtgctagcatttgagtttcctgccaccttaaaaaaaaaa

SEQ ID NO: 10150 - DNA, 608 bp, Canis familiaris
tgcgtgcccaccatccgggatatctgtggggttattgggtccacctcagccccagcctcatcttcatccgtcctagcatcttctacctccgcattgtcccatctgaggtggagcccctctactcctggcctaagatccaggctctgtgttttggtctcctgggggtcctcttcatggctatcagtctaggctttatgtttgcccactgggccacaggccagagccaagtgtctggacactgaccttgccctgcactgccccgggcccctgtgtacaagctcctgtgcatatggaggaagatggggccgctctccagggtccctcctgcctggcatgtggaggtggctggttcccattaacaaggctgttggaggtaggggggccacagaggttgcagagtggtctgcttccctccttcccagggatgctgagcttggatcaaggccctaagcccaaccccacgtgaggaggagaccaggtccttggggaatccctgcccaacccagtcctttctgcctctcctggcagaagctgtttgtcaggatgactctcgagctaaaggggaagaataaagatgctgaattgccaaaaaaaaaaaaaaaaaaaaa

SEQ ID NO: 10151 - DNA, 118 bp, Canis familiaris
  misc_feature (1)..(1): n comprises a, c, g, or t, or includes no nucleotide
ntatgcggacgaatttgaagatatggtggccgttaaagcggctcatcccagatggctgtggggtcaaatacatccctaatcgtggtccccttggaccaatggagggctctccactcat

SEQ ID NO: 10152 - DNA, 496 bp, Canis familiaris
cctgatcatcgagtccgtctaacacgtcgaatacctacgcctgagccctcttaattacactcgttgccacatccctaacctctgcctacagcacccgaattatattctttgctctactaggccagccccgcttctcccctataatccttatcaacgagaataatcctctcctaattaactctattaaacgactccttatcggaagtgtatttgcagggtatattatctcccacagcatcacacccactaccatcccacagataactatgcctcattatctaaaaatgacagcccttgcagtaacccccttgggtttcatcctggcactagaactaaaccttaccacacaaggactcaaatttaactatccttctaattactttaaattctccagcctccttggctactatccaaccattatgcaccgcctcacacctaaaaccagtttaaaaaaaaaaaaaaaaaaaaaaaaaaaaaaaaaaaaaaaaaaaaaaaa

SEQ ID NO: 10153 - DNA, 654 bp, Canis familiaris
  misc_feature (1)..(1): n comprises a, c, g, or t, or includes no nucleotide
nggacacattccctgcagatgaggagataacaacctctacctgccaaagttttccatctccagcaagcttataatctggaagatgttccttccccacagctgggcgtgagatgaagtcttcaccaaccaggcctgacctgtcgagatgtcacatgggcacaagaacctggccagtttcccagatagtcccccagacccctgctcgatgtgaccgagttgggcacagaagccgctgccgccacgggaagtaaatttgtttttttttccggaaagatcggcccaactggtcactgttcgtttcaacagaccctttctgttttgcatacacccaccaagatacggagaacatcctcttctggggcaaggtcacccacccccatcaagcctaggcctccccccgcatgaggtggggcccctttcagaggtctgtgcgtgcagcctggcctctctgcaccgaggagccacgtgccaggctctgccctgctcatcctttagaaggtgcccgtgactacctggtggcttccacgggagcctatgggctttttgatctgaggccctgaggtctccagacagcccataaactatctttcttggacaaaaaaaaaaaaaaaaaaaaaaaaaaaaaaaaaaaaaaaaaaaaaaaaaaaaaaaaaa

SEQ ID NO: 10154 - DNA, 398 bp, Canis familiaris
ggcatctgcccccatcagccgcctctgcctggcagattggaaagctcaggcctacattgtggggctcctctaggaagtgcctttcctgcattaggtctgattagtccgtttccagccctgaacacagggaggtaatcaagtgggtgatgccagcggttgcagcttctctgtcaggagccgggcagatcctacggagcagggccactgcggtgtggtccaccccgacctacggccagagccctcccgagccgcgtcaaccctgcccgaccttccagcacagggagtctgggatgggcgctaatttcctccctcctgaagccagagggcccttccttggtgtaatgcagccatttcagggaaagaagtgggagtgactggaaataaataccagttctaaa

SEQ ID NO: 10155 - DNA, 686 bp, Canis familiaris
  misc_feature (1)..(1): n comprises a, c, g, or t, or includes no nucleotide
  misc_feature (11)..(11): n comprises a, c, g, or t, or includes no nucleotide
  misc_feature (78)..(78): n comprises a, c, g, or t, or includes no nucleotide
  misc_feature (357)..(357): n comprises a, c, g, or t, or includes no nucleotide
ngaagttcctnctggctctgtctcactgtttccatcggggttgggagagcatatcacatggtcctgtttgccctgccnctggagtccctgcagttcctccctctgacatctctctgctctgtttgctgtgttacctcttggcagcctgtctggccccagtcaacatagtcctttcctttctccaagcccacacagtattatctgtgtactctaaaagcttctgaccatttgaggtacactgggggtggtgggtagtattgtagtgcagagtaggagaccagttggaatgacagttggaataacattgttcctggaaatcttttgggcgctcccttgtaatagagaatttctccctgnccgtggttctcattagggttcgccttcctgcatatgatggggcgcctgtctctcccagcccgtttctcacctttccatctcacttgccctcttcccaggcagccctcagaaacacacaattcggatccctgggtggcgcagcggtttggcgcctgcccttggcccagggcgcgatcctggagacccgggatcgaatcccacgtcgggctcctggtgcatggagcctgcttctccctctgcctgtgtctctgcctctctctctctctctctcactgtgtgcctatcataaataaataaaaaacttaaaaaaattaaaattaaaaaaaaaa

SEQ ID NO: 10156 - DNA, 567 bp, Canis familiaris
ctcctcgtgaagccctggaggctgcccgtattttgggccgcgaggtgctgggtgggagcttgtggcgaagatggttttcacatccgagtgcggctccatcccgtccatgttatccgtatctatcaagatggtgtccggggctggagcgtgacaggctgcagacaggtaggcgaggtgcctttgggaagccccagggcacagtagccagggtccacattggccaagtcatcatgtccatccgtaccaagctgcagaacaaggagcatgtgattgaggccctacgcagggccaagttcaagttcctggccgccagaagatccacatctccaagaagtggggctttactaagtttaatgcggacgaatttgaagatatggtggccgaaaagcggctcatcccagatggctgtggggtcaaatacatccctaatcgtggccccttggacaaatggagggctctccactcatgagaaccttgcaccacccgaaccctattcatgcccacccaataaatcctgcttcctgtcaaaaaaaaaaaaaaaaaaaaaaaaaaaaaaaaaaaaaaaaa

SEQ ID NO: 10157 - DNA, 342 bp, Canis familiaris
tacgtaggatcctttggaagggcaagttctggtgccagctagccgcgtgtaattccatgctcctatatgcgtatacttatagttgtcttgcagttaaaagctcgtagttggatcttgggagcgggcggcggtccgccgcgaggcgatgccccgcccgtccccgccccttgcctctcggcgccccctcgatgctcttagctgagtgtcccgcggggcccgaagcgtttactttgaaaaaattagagtgttcaaagcaggcccgagccgcctggataccgcagctaggaataatggaataggaccgcggttctattttgttggttttcggaactgaggccatga

SEQ ID NO: 10158 - DNA, 629 bp, Canis familiaris
  misc_feature (102)..(102): n comprises a, c, g, or t, or includes no nucleotide
agtcccccagggctttccacccaggtggctctgtccagatttttcttgtaccacactggaaacaaactgctcagagccagaaatctggaaagcctactctcnaggtagtgtgtgaacatccttcccccaaatttgaggggtccgtgagcatccaaatgaccccatgggttttcctggctggtcaccactaccatgtagcattcaatgtccacacccatctgtgacaccaaggttttgtgaaacgtgagagcaactttccatcccccacgggtgtgacatgccttcggggaagcaaggaagaggtgatggtgggaggaggaaactgtcccaacttcttacctgtaggcagaaccagccctcactcagtgcttattatcagtgactcaagaacaacccccatgaagaaaattagctgagacatccaggaagcaaatattaggacccaatgtgttacccgtaaccattgtatttgaaggaactgtagtttgcgcattttagaacatttttataaagtactgtacttcttttgtggagaggctatggatggagacagactaatttgttttgttatttgcattaaaatgactttgggtctctgttgaaaaaaaaaaaaaaaaaaaaaaaaaaaa

SEQ ID NO: 10159 - DNA, 608 bp, Canis familiaris
ttaagtgatttaggtgttttagggttggttactattgtattgtctttaagattagttgtatcttttgatttaagatactactttaaagggatactacttttggttgtggataaggaaattgagatggatgtacacgctagtcccactattgagcataatttcacttgtattcagctgattttcctgtcagccagctttgtccactttgtattagctgatggttccacgttgataaaaggaataaatcataccaactatttctttggttcagatgtcacacatactaaaccatgcagaactgaaataactttcacttttttctggaaaataaaaaccaaacccagagcacgttgtttctggataactaaatattaaatgagagagctcttcaggttcttaagaattgtctgaactaagttatgttctgtgataatcagtttccaaggcacactggtgctctgctttagatttatcccatatgctattgtttgatactggatttatgtaactgttttactgcacagtattgaattggtgtcctttgcacagttagcagtaaataaaaattagcatttaaaattgccaaaaaaaaaaaaaaaaaaaaaaaa

SEQ ID NO: 10160 - DNA, 642 bp, Canis familiaris
catttcaggaaatagtaaagtcagagggaaatactggaagggcttttttaaaggtgaaaaggaaaataacaggtctttcagaccttggcccccgatggagaaggaagccacccccacgcgtctcactgggccctggggccgtggctgcccgtttctcctctgggcagttaaggtctctctaccaaaatctggattcagcactgctgagtttgcagctgtttttgcgtgaaagacctgcctcagagtgtgttggcggtggagcccccgcagcggtgacttggcgttgccctcgtggacgtgggctgcgctgctttcccagtaggtgtggggtgtacgctttaggacgtgatttcgttctgtaccagttacacggctgcttctcctgctgctgcgtgcgcaccacctgctgctggtcctagtccccgagcagactgcgacatcgtccctcacctgcctgaaatcttgccgaaggcctttgcgtttcctttgtgttctgctgtccgggcgagggtgggaggtcggctggctctgttctgtttattcacccatttgtacatgatttgttgtcctttgctactgtaaacagtaaatatagtttgctattctgaaaaaaaaaaaaaaaaaaaaaaaaaaaaaaaaaaa

SEQ ID NO: 10161 - DNA, 673 bp, Canis familiaris
tcaaccccctgccacgtggctgtgcacatttgcttgagctgtaggtatagttagattcgtcctttcttggaagaagctggagatggtcccaacgttctgtaatctggggatgctgcccttggtggataatggttcctggcaaaacctatgtgtgttgagagcttctctgactatcctcctctgggccctttttgctgttcgtgacatgagacaagacggttgctgtgggtgtcatcaaagccagtggtaccagtaaggcagctggagctggccaagtccacccagtctgccccagaaagtctccagataggctaaatgaatattatccctgatacctgcccacccccagtcgttaatccagtggtggaagaacggtctccagaactgtttgtgtccattggccctttaagtttaatagtaaagactggttaatgataaccatgcatcgtaaaccctcagaaggaaaggagaatgttttgtggaccctttgtttttttttttttttttttgtgcgtgtgtggcagttttaagttattagtttttaaaatcagtactttttaatggaaaccacttgacccaaaatctgtcaccagaattttgagaccccattaaaaccaaagtttaatgagaaaaaaaaaaaaaaaaaaaaaaaaaaaaaaaaaaaaaaaaaaaa

SEQ ID NO: 10162 - DNA, 672 bp, Canis familiaris
catatcatcaatcaagaggacatgtctccccatttacagggaaaagactgaaccacccaatgggaatctcaagaaaggcttcacagccaccagttatcattcagtatctatttaattaaatgcccagaactgttccaggagctatgaaaccggttagcgaacagatgagtcctatataagcacatgtctttggcgcggtcaagtctctgggactcctgaagctaccaggatctcaggctgtgtgacctgctgtagcagaaaggtagttacttccccagctaatctcctcgcatacctctctagaactaagccagcttactgcttatctccccgctctcttcttagtggcacttttaagctatggaagcgttaaaccaactactaggaactgggcccatatgcaatggcaggccaaaccctctggcatcaaccctcaaacaatgacggatcggtggagttggtaggtaaattccctatttcccttacctgtccattccggaataattctgtctcccgtgttacctggcaggatggagcccagctgcctaagaagtaatgtgcttgctaatccaccctccactgcttctgtctcacttctctactccctatcagtattttcctgggctcacctcaaaaatatgtcacttctgttaaaaaaaaaaaaaaaaaaaa

SEQ ID NO: 10163 - DNA, 667 bp, Canis familiaris
gccccccagcactacatgggctacacttgagcgtgtgacccgggatggactccccatcaaccccccgagccgcaggcctggtggcagagatggcccttacgacaagcagcccttcatggtggccttcttcaaagtgagtgagtccacgtgcgcaccacaagtcggcccccggtcggcgccgccagcagagccgcaatcgctcaacccagtcccaggatgtgtcacgggtctccagcgcctcagattacaacagcagtgagttgaaaacggcctgcaggaagcgatgagctgtatgtgagcttccaagacctgggatggcaggattggatcattgcacccaagggctatgccgccaactactgtgatggagaatgttccttcccactcaacgcgcacatgaacgcgacgaaccacgccatcgtgcagacgctggtccacctcatgaatcctgagtacgtccccaaccgtgctgcgcgccaactaagctgaacgccatctccgttctttactttgatgacaactccaatgtcatcttgaaaaaataccggaatatggttgtcagagcttgtggatgccactaactcctcaaaaccagctgctggggacacacatacagccttgggttcccagataacatctgccttaaaaaaacaaaaaacaataaaaa

SEQ ID NO: 10164 - DNA, 583 bp, Canis familiaris
gacctttgaggaacgccctggaggaccaaggtgatctggccccatagcagtgcatgaggctctgctcttagccccagctgccaacttagaatctcttgggagactatgatgctggttcccaggcccccattcccatagctatggaatctggatctatggggctgaagcctgagcagtggcatgtttgaagagctatctggtaaccttgctgtgctgtccatggatggagaacccctgagctacttctgagcggtcagtgtgatagcgatttcctgggagagcccctgtttatgcctgttgtcttgggtcccaacgcacgtgttcataatttgcactgcatttgtcatttgttaaccacgattgtatcacttaatagttgtgttaccataagccaacggaccccgggtttagttgagctccacctttttatttccacgcttctgccaggattcatctattaggatatgaagtctgtgtgtgatgggggagtgttccaaataatcattaataaagatgacttacttaaccaaaaaaaaaaaaaaaaaaaaaaaaaaaaaaaaaaaaaaaaaaaaaaaaaaaaaaa

SEQ ID NO: 10165 - DNA, 651 bp, Canis familiaris
ctgctcagtcatctgaggctcaacggggttgggtcacctctgaaccatgcaggccaaaagccctgtttggatagagcccatcttggtcccatggaagcgtgggaaatgggcttacatggctgatggctgaggctcagagaagcctgccaccaagggaggaaaacacactgcaccaatgctgagctttgagcgtgatttatgtcattcatcaggcctagagataaattgagaagatgtcatgtaagaggaggcgagtagggcagaagagtacttaaaatgggcttctggtttttctcttctcagctatgtgaaaagccatttgctcttggtttgattagtaaatttaaagaatcttccaaagtaaatcttttcttcaaacccaaatgatcttcaggataaaatgactttgttaatctttgctgcaggaaatgttttgatcatgtgaatgcttttccagcccaatgtttgtactccctgtgcccctggaggctacaggtttctctaacacatcaccattaacttcgttcgccaggcagagctcggagtctcatgggaaaatggcttctgtcacagctaagaataagtatctgtatcctttactttttaaaatgaaataaaataatttcttctgtgaaggaaaaaaaaaaaaaa

SEQ ID NO: 10166 - DNA, 563 bp, Canis familiaris
gaggatagtcgagcgtgacgcgctgtctagtttcagcatttgcctacctggtgcgtttgcggcgcggcatacctcagagataggccctgctcatgccagggctcccagtgatgtggagatccgggctgagggcgacatgcaggttcacagtatagctgttgctgaaggatggctgcacgtaacacaccggtaagtggggcaagactatgatcgagtaccggtcacagaagacctcgcgcctccccatcattgacattgcgcccatggacataggagggcccgagcaggaatttggtgtggacatcgggcctgtctgcttcttgtaaaaacccgaacccacaaacaacacaatccattgccaatccagaggacccaagtactttccagtcccagtcactctagggctctgcactgaatggctgacctgacctgatgtccattcatcccacccgctcacagtgtggacttttctcccctctttctaagagacctgaactgggcagactgcaaaataaaatctcggtgttctatttaaaaaaaaaaaaaaaaaaaaaaaaaaaaaa

SEQ ID NO: 10167 - DNA, 616 bp, Canis familiaris
tcctcctagctctctccttcctcaggaagcattggtggaggatatgatgaagagttgacacgtccctgttgttgggacccctatcaattcactcattcccgggcctggggagacccccagccagttccctccactcagaccacgttttgatcctgttggcccgcttccgggacctcgccccaccttgccagggcggggtggcccgatgtgacagatttcccctaaggcccagcaggggctggcccactgacagcaggccaccgttcatgtgattgatttgtaatctcacttctggagcttgtttggttttgatgtcatcttgttggggtgctgatctctagtgttttctgattgtgatggtgaggaatgcactcacagtggcctttcagtagatctgtttaaagctccaggggtggtagggcccagaggtcactgtatgaccaggttgaccttgggaatagctagctactgacctacaccacccccaccccccgccccgaattcccctcttgagtgaatgaaggtggttcatcgataatgttctgcaccagattaaaaaaaaaaaccaaaacataaaaaaaaaaaaaaaaaaaaaaaaaaaaaaaaaaaaaaaaaa

SEQ ID NO: 10168 - DNA, 553 bp, Canis familiaris
  misc_feature (1)..(1): n comprises a, c, g, or t, or includes no nucleotide
ntatcgtagcggttcttattcacaacaccactgaagttatataggtgcaacagctctaataattgcccagtgggttgaacatcctgccatattattctgcttagcccactcccattacgacgaatccatagccgtactataattctcgcacgaggacttcaaaccctccttcccctaatagcagcctgatgactattagcaagcctcacaaatctggctctccctcccaccattaatcttatcggagaactatttgtagtgatatcctcattctcatgatcccacattactattatcctaataggagattaacattgaccatcaccgccctatactcactttatatattaatcaccacacaacgtggttgaaatattcccaccatatcaaaaatatcaaaccatcattcacacgagaaaatgccctaatgaccttgcacctactgcccctactcctcctatcccttaaccctaaaattattttcggtcccatctactaaaaaaaaaaaaaaaaaaaaaaaaaaaaaaaaaaaaaaaaaaaaaaaaaaaaaaaa

SEQ ID NO: 10169 - DNA, 566 bp, Canis familiaris
tttgtgtttctttttagccctgtgcctatgtacgttgtttggattcgtgtgtggtggttgggctcaggggtatggagacccctggccttcctctattattcctcatggcctgtctctgccatagaaccagccttttgcatctgaggcagatcatcctcttacaccgagacctccttggtcccactggaggccagtgtccggcagcagtgtttggacggcagtgccatgggctgcctccctgtacccgagcccactccacatgcatgcacgtggtggcttctctctgttctgtttctgcagcatcctgtacagtatctgtgctgtgacatgcagtaggcctggatctggcagagagttataaacacgagccctccttcctttccatcgacacctctgtagagctctctgcaccctgtgcccttcactgtttgtatttaattttataagtcagtgtattgcaaggaggctggatgcaagatagatactatattaaactgtactgttatttaagatgtaataaagcagtttgacatgagggacaaaaaaatatataaacaaaaatataa

SEQ ID NO: 10170 - DNA, 640 bp, Canis familiaris
atttttttggtgtgccgtgagtgtgtgtgttgttttgtgtgttgttgtgtgtgtatacagatacatgtgtatattccttttaaaaaagctttattgaacgtgttctgattttgaggtttagcatagctagctatagtaggtgccgctacagtttttatttagcatggggattgcagggtgaccagcacactggactccaaggtggttcagacaagacagagaggagcagtggccatcgtcctcgtgccaggagctccttcagtcctgcgcatatagactgtatgttacgaagaatacacaggaagactttgtgactgtcacttgcttttttgctttttctgcgcttcagtaacaagtgttggcaaacgagactttctcctggcccctgcccactggggaccggcatggttgtccgtccagtctaaatcatccatctttctcttgcctgagtgggaaaggcggtgggccaggcagaggacagaactggaggcagtccatctagggaatgggactatgaggccacacttgtggaacatttggactgctattctggagcttttatttttggtgtgttcgttgcacagctgtttgaaatgtttaataaagctttataaactttaaaaaaaaaaaaaaaaaaaaa

SEQ ID NO: 10171 - DNA, 661 bp, Canis familiaris
ttgtccccccagattagtgcatgtgtgtgcatatgcgcattttcctggagagagagggtccatggatttccccagcttcttacagaggtccctgtccccagaggatctgaacctctgctctagattggagcaagctgccatgccccttctccctccctggcgtgcctagactgctagggtcctgctcctccacgtggccctcaggccagcagccccacctgggggggtctcagtggcttcttgtcaccccctggctctcactaggccctcacaagcagtgctcttgtgccccagcacggggcccttggcccccagggccaccatcttgcatcctctgtcgccacgtttcttccacccccatctctgttgtacgtgtctctccccctcccacaggcagtgtggacccttggggatgggggggcacagcttccctcactgaatgtaagggggctactgatcagagaagcctctgagaactccttgcttccccctggtcagactgcgcttgtcagccaccccttgtgggactcagccctggtctattcttgcttttcctctccttgagcaaagcatgtgccactagctgtccctgagggccttgtctttatgaaacacacacttggaataaaaccacttctcacatgtaaaaaaaaaaaaaaaa

SEQ ID NO: 10172 - DNA, 339 bp, Canis familiaris
tataaacccaaggtttttgtgacgtgttaaaacagtgcatcagtcgatttgaaattttttctgtgtgtttacatgcttttaactttttattgcctaatgtataattttatacattaaatatatatgtgtaacataaaacataaatgtcatctaaaatatcctatgtaagatataacatcctctgtatttggttagttttattgctatactgcttagttttaactggtttgatttcataatatcagaagaaaaaagtattgaaaacaaaatcacatgggttggataatcacacaaaaagaaaaataccattttgtaaaaaaaaaaaaaaaaaaaaaaaaa

SEQ ID NO: 10173 - DNA, 625 bp, Canis familiaris
ctccagcttcagctcaactcacagcttctccaagcatcaccctgggagtgttttgagacttttctcattaatgagggcagtacattcctgttttgctccgaagtattcagttccgctcagtatctgtaaatgaaatgattctcacttgtgatttggtttgggatccatagggaagcacaggcaccaacccacatatacaatgtattgcaatgattttctcagaatttgtagtaggcaagttaccccaacacttctgcttccacttaactggcctgcaatacttgtatagaatggcatatccttgttactgtgatatttaaatatccacagtgtccaccttttcccaaagattctagtaatgatctagaaatatctttctcttatctgttatttatcaatcttttccccgtatctctttatactggaaaacacatctgtacttgaagacactttagtatgcacgttgataagaggaatttggtactaattatggttggtgattattttttatactgtatgtgcccaagctttactactgtggaaagacaactgtttcaataaaagatttacattccaccaaacaaaaaaaaacaaaaaaaaaaacaaaaaaaaaaaaaaaaaaaaa

SEQ ID NO: 10174 - DNA, 457 bp, Canis familiaris
catctctggcacgagtcccatggtgccaccgtgatggtgagagctccagtcacgcccgtggcgcccagccgcgcacggctcgctgttcacgaggagctattgccaagagcctcaagtccttcaggacccggacacgggtggccatcaggatggccacccttccataagtcctcctttcctctgctccccagagccttgcccttgtggaaaccaacatcagatccttgccccaccccttgcttccagaaagggtcttgagcccataccccacagtctgacaccctcctcccctcccgccgcctgccaggacactctagcaggacactggtgctttgccgcataccctactgtgctgcacttctttccccatttttcataaatataaatgtatgtatgtatgtgtaaaaaaaaaaaaaaaaaaaaaaaaaaaaaaaaaaaaaaaaaaaaaaaaaaaaaa

SEQ ID NO: 10175 - DNA, 537 bp, Canis familiaris
actcccagtatgtgcacttttgtttttgatgctgtttacagatgtcatcaattaaataccacttaaaggaatgtggactttactgaagagggttggatgttaataaaagttattaccgtgtggagtgttgagaccagacttcttttgctgtctcagtgggcagctacaagcatgaacgggaccagggaatggcagcagcatgcagaatattagcactctttagcccaatcttctgtattagggaactcttaattgacatgagatgctaaagtcagacattggaattggagcaactgtaaagtatgatttgatcatcaagacatcacttggatttcataatctcaaaagtttagggccgatgtgaagttgaggtgctgcattccagaactttaatatgtagcttactctttttttccttcttaaccaaccaccagtagttcatttttaaaggtttttttttcatccaagagaataatgtgactaaattttatttctttgtttgcaaaagaatctttattaaaacaccaccattactat

SEQ ID NO: 10176 - DNA, 726 bp, Canis familiaris
  misc_feature (29)..(29): n comprises a, c, g, or t, or includes no nucleotide
cccgagaaggaggcgtgacgcacaacccntctttgagcgcagcccagaagatccaggaggagcctgaggggccaaggaagatgaccagatctaccgggcatcaataattatcagaaatacatgaagcccaaggatacgtctatgggcaacgcatcctccggaatggtgaggaagggccccatccgagctcccgagcatctacgtgccaccgtgcgctgggattaccagcccgacatttgtaaggactacaaggagactggcttttgcggcttcggagacagctgcaagttcctccatgaccgttcagattacaagcacgggtggcagattgaacgtgagcttgatgagggtcgctatggtgtctatgaggacgaaaactatgaagtgggaagcgatgatgaggaaataccattcaagtgtttcatctgtcgccagaccttccagaatccagttgtcaccaagtgcaggcattatttctgcgagagctgtgcactgcagcatttccgcaccacccctcgctgctatgtctgtgaccagcagaccaatggcgtcttcaatccagcgaaagaattgattgctaaattggagaagcatcgagctgcagaagagggtggtgcttccgatttcccagaagaccccgatgagggtccgatccccatcacttaattttcctattattctcacacctcaaaataaatctttgtttggaaatcttaaaaaaaaaaa

SEQ ID NO: 10177 - DNA, 120 bp, Canis familiaris
gctgggattgggcttcagtgtgagaactgtgaccccccaccctgataaagagagatggaaggagccaaaaaaaaaaaaaaaaaaaaaaaaaaaaaaaaaaaaaaaaaaaaaaaaaaaaaa

SEQ ID NO: 10178 - DNA, 624 bp, Canis familiaris
agaggaaaacgatgtcccaggaggtgtgctcaagattcgagatgccagcgaggagcccaggccaaggaggggcaacgtgtggctcatcccacctcaggtgtacctgaaagctgaggatgaagagggccggaacttggagaagaggcggaaccttctgaactgcctcattgtccggatcctcaaggcccacggggacaaggggctgcatatcgatcagcttgtctgtcgggtcctggatgcttggcagaagggcccatgtcctcccaggggtttggtcagcagccttggtaggggatctgcctgcaacagtaccgacgtcctctcctgcatcctgcacctcctgggcaagggcacagtgaggcgccatgatgaccagccccagatgctgtcctatgcagtccccatgactgtgatggagcctcacaccgagtccttgaacccgggttcctcaggccccaacccacccctcaccttccacaccctgcagattcgctctcggggggtgccctatgcctcctgcacaggtacccagagcttctctaccttccggtagccctggaagtgggatcagggctttctccagaaataaaatgcaggagtttgattaaaaaaaaaaaaaaaaaa

SEQ ID NO: 10179 - DNA, 604 bp, Canis familiaris
ttaaaacgcacttctaattctccttgtggcaaactggaaccacccaccgaggcctattgatcatgtcatccagcttttgccaagtcagtatgtggaaatgtaggttcttcatcttcatgctgtggtggtgcatcaccttgaccttgttcatctgggggagttgctggggaattctcattggaggagtcagctgatgaggtctgattctgttgaaaggggggttgagattgtccatcaggagcctggccttggctgtcattccctcctactggagacccacgagttgtgactgtcatacttgacacagaacagatctttgctattttgtctgcttatgtagtagttgtaacagaagaaattatagtccacttaaaggagataaagtaccagcatatgtcagctttaaaaatttccaattcaaagacagaccatcttgctgagaccatctcataaccgctttcttttctcgagcagggtctctcccttttctcctgagtcaccttttctttacgccacccgcagcggtagagatcaccttgcctcgatagccgttccgggcctcgtccgttcactgcgactctcagcttccaacgccgacaccaat

SEQ ID NO: 10180 - DNA, 405 bp, Canis familiaris
  misc_feature (257)..(258): n comprises a, c, g, or t, or includes no nucleotide
  misc_feature (282)..(283): n comprises a, c, g, or t, or includes no nucleotide
ggaatggtgctactattcccaagtaatttctgtaattgcttctgttgcttttccctggtatgttattgagagcggttattgtgaatacagggcacattatactcatctcagagatgagatgtctcttatagatgtttttggattttgatgagttataaatatgagatatttttaaaaggttggaacaataataatcggcttaaaactacttcttccatgccaagtgctttttaccgaattaacccattaatgacacnntataataccaaatatgtgtagttnnctttaatcatactacctaacactgtatattatgtttaatcaccatcatcatctatttttatgtgatctttatgtatctatggattttatcacaaataaaatgcaaaccttcaaaaaaaaaaa

SEQ ID NO: 10181 - DNA, 520 bp, Canis familiaris
taccaccacccacctctcttttctgtctagcagtttttctttaaagacactaaatggggcacctgggtggctcattcagttcaacatctgcctttggctcaggttatgatcccagggtcttgggattaagccccacatctggctccctgctcaatggagagcctgcttctcctccctcggcccgcacctttgcgcgcatgcacgcactctccctcttcagtccctctcaaataaataaaatcttttaaaaaaaaaaaaagacactaaatgaattaactaatataattcttaaaagaattctctctgaaaatatcccttttacccgcactcttcaaagcagcgactaccggggcactttggtggtttagtggtttaagcgtctaccttaagctcaggtcatgatcccggggtcatgggatcgagctctgtgtcaggctccctcctcatcagggagtctacttctccttctcgctcttgctctcactctctctcaaataaataatctttaaaaaaaaaaaaa

SEQ ID NO: 10182 - DNA, 343 bp, Canis familiaris
aacgccaacccccggcaagcacgcaactaaatcctgaaatgcagaaagaacaccagtggacttcctactaagacttgcgttgctggatcagcaaaggaaaattgcactattgcacgccatattctattttttaccaccaaaatcatgtggttactgatattacttctattttctcgttctgtttctctctctctctctgctcgtttgtgtcgagtcagatccttaatatatgtattctgtttcactaatttcctgggaaactgttctttgcaataattagaacttaaataaattaacatgttgatacccaaaaaaaagataatacacaaaaaaaaaaaaaaaa

SEQ ID NO: 10183 - DNA, 665 bp, Canis familiaris
gtctgatgaatacccaaccaggaaaccccacccatgggaaatggaaggcaagaaatacagaggatcatgtgataactgtagagcttcagggggggtgggagagccagcggcagggcccagacttgcagggctcggaccctgcccccagtggtggcagtgtcaccacctgacagactgcaggattcgctgccctccagagaacagagatagacatgaggggcactggggcctttcttctggctggtgtccatgaggttctttctgcaggccatccgactctgttctaggtcccgggagtggagggaggggggcaggagtaggttctcggtccagaggcttgatcctatggttggcctttggccatgctgctgcccaactctgtcccctcccagctactggcccaggccaagttccccttgtcaggtgggctctggcacagggtcctgcacttgcagaggttccccatcccaggggaggggaagggaaggatcaccgctcctccagtggacgaggagatccacctagtcacagggagttccttggcctgatcccttcccccacccagggaaagcgctctcaactttttatttttaatttttgtttgaaataaagtccttagttagccaaaaaaaaaaaaaaaaaaaaaaaaaaaaaaaaaaaaaaaa

SEQ ID NO: 10184 - DNA, 692 bp, Canis familiaris
cttggagcctgggtggccactgtcatcgcctgccccttctggcccctgatttccacttgggtgaatggggaccgctcctctgccaacctgctcctgggaggagggatggtgctggctgtggccggtgaccaccttggtgctgaggtcgctctgtggctggccaggcagtggtgctggtggttgcagtgactatcctcatcgtggctgttttcacaaccacacttatggaatgtgggggggtgcgatgttgggtgctgcaggcctcctgagccggctggaggaagacagactgctgctgctgccaaaagaggacatctgtcgctgggcccttgctgcaggcagttgggcctaccaccgagccctgcacacacagcgcctgcagtgggagtgatgcttagagacagcatggtggggcttccgtcctggctaccgcttccctctcccacaggcctgctcccttaaggatggactctcgggtctcccaaaaagagcttgctgcagggtgatggatgccttggttaggaggctgagtccaggcaccaccgtccctcctctgcctgagtgtgggaactcgcctagaccagaatgaaggggatggggccccaggcacattttggggcctgctgctgggcaggccatggttgtggatccagagagaggcttggtctccaataaaccttagggaaacagca

SEQ ID NO: 10185 - DNA, 610 bp, Canis familiaris
  misc_feature (454)..(454): n comprises a, c, g, or t, or includes no nucleotide
acagccagagcattgcaagggcccaagtggccctcccgcatgaccttgtacctactcagagactggggcccgagtgtagactatccgcaccgaggactcggtatggtttccataatctgtcatctgcacggttgtgtttgaaaggagaagctacaaagtttccctccccttataagtgaaatgatcaaattccaagtctttatcactgcctgttcctttggaaccatgtttagaagagagtacgcttgtcctacactggtctacactggttgctgaatttacctgtattcctaactgcttttgtatatgctgcatttagacttacttatagctaagaaggcattttttttttaaagaagaaacccacctgaagtcatgatgatatatgaaagctacatatggctaaaaagctctgaattcaggtcccagttgctgtcaccaatggatgtgcacnggagctcccagccccaccccttttttatataataaaagtgccttagcatgtgttacacgctgtcaccactacagtaagctggtttacagatgttttccactgagcgtcacaataaagagaaccatgtgctacgaaaaaaaaaaaaaaaaaaaaaaa

SEQ ID NO: 10186 - DNA, 599 bp, Canis familiaris
aggttacaatttggtgcagcccctatttttggggggcagtagatgttactggacatcaccttttacagcatcggatcctcatggatcaactgataagttgcgcttatgtcaccatgggttctggttccttggcagcaatggctgtgtttgaagataagtttaggccagatatggaggaagaggaagccaagaagctggtaagtgaagccattgcagctggcgtcttcaacgacctggggtctggaagtaacattgatctctgtgtcatcagcaagagcaaactggacttcctccgcccgtactcggtgcccaacaagaaggggactaggtttggccggtacagatgtgagaaagggaccaccgcagtcctcactgaaaaagtcaccaccctggagattgaggtgctggaagaaacagttcagacaatggacacttcgtgaatggcatctgtggatggatggttactgctctacaagattggggtgcggggggacagtggaggcgcccccctcagaccttcatttggcagtgtctgctgaatgagaccccaataaaacatgaaaaccagattgaaaaaaaaaaaaaaaaaaaaaaaaaaa

SEQ ID NO: 10187 - DNA, 645 bp, Canis familiaris
tccaaactcagacctcataggaagtgtgcgggggagcctaggtagagtccagtcaatgagagaatctccatcagtatataaaaatgtgatggtgagaatgcttcaggttcgttccaagagcagagagcgcccctctccccactgctccccaggcccagattaaaaacaaggaaccggattgtctgtttctactccaggcaccgtgtgtggagttcagctctgctactctgctgtttgttctattttccaccactcgttggcatcatcctcaggctggtgccaagatggctgctgcattcctgccatcacaaccagacccagacctggaaaaacagaccagcgtgtcctgggtgaaattccccagcagcctcttctcgggcatcattggccagcgtcatccactgctcaaccaatccctagccaagagaagaggactgcttgggaggcttggaccactcaggacctgtcctctggggttagggaagagcccagaggaaggctgcagaagggacaacagaagtctggatctctggtatttattagcagtgactctctgggtagttggaagatgactgaatgttactctcttctttttgagctcatactgtctaaattttccatattaaaccttgacttttaataaaa

SEQ ID NO: 10188 - DNA, 661 bp, Canis familiaris
  misc_feature (473)..(475): n comprises a, c, g, or t, or includes no nucleotide
  misc_feature (506)..(506): n comprises a, c, g, or t, or includes no nucleotide
  misc_feature (580)..(580): n comprises a, c, g, or t, or includes no nucleotide
gggagaatttccgtctaatctatgacacccagggtcgctttctgttcatcggattacacctgaggaggcccagtataacttgtgccaagtgagaaagatctttgtgggaacccaaaggaatccctcacctggtgactcatgatgctcgcaccatccgctatcctgatcccctcatcaaggtgaatgatacccttcagattgagtttggagactggaaagattacggatttcatcaagtttgatactggtaatctgtgtatggtgactggaggtgcccacctgggaaagaattggtgtgatcacccacccgagagagacacccctggttcttttgatgtagttcacgtgaatagatgcccatggccacagctttgccacccgactctccaacatttttgttattggcaacaggcaacacaaccactggatttctcttaccccgtggaacagggtatccgccctcaccacttgcnnntgaggaatagagaaccagagaactggcagcnccaacagagcacgtgggtaaaatggtcccctgggtgtacgtgatatggaagtctcttatacttacattaaaganttctacagcacccctaaaaacaaactaaaaaaaacaaaaaaaaaaaaaaaaaaaaaaaaaaaaaaaaaaaaaaaacaaaaa

SEQ ID NO: 10189 - DNA, 604 bp, Canis familiaris
tactttagggaagttctctccccctctgtcccatcccctaccctggataataagaaaccgggaatcaaaagctcatgtctgttttcattcaaatcaggtgggaaattactatttaagttctgatgctactatgatgttctcaaaattggtgggaacaaatccatttatatgaaatgctaccctttttgtctctgcaattttatataccacaaccagacattatcaggtgacaggtgaatgaacataaagtctcagttctgtgtactcagtatactgccctttttttcaattattcacagctaatgacttttaggaacatattttataccacatatatcttttttaattaaagcaagtgccttgatgccattccatataaatcaggcttaaccctttatgggatgaggatgagttgatggattcgcagcttgttgcaggagaggggggagttggttaatagcaggtctttttcttctggaaggatatgctttgtgttgctttattatgtaagatccaacatgtgttgagatctagaggtgtcattttaatttctgctaataaattgttatgctaataaaaaaaataaaaaaaaacaaataaaaaa

SEQ ID NO: 10190 - DNA, 692 bp, Canis familiaris
  misc_feature (1)..(1): n comprises a, c, g, or t, or includes no nucleotide
nccccagatgttgactatctggcttcatctttggctaaccaggacagctccatgcctgttaacgtggttcatgtgggaaaacagatgggagcaaaacaaactggtcaggcgaatcccttcagggccgtagctgtacccggcattcagctcaaggctgtgaagtcctccacaggccccggggatcagcttcggaatgcactctggcacacaggggacacagcatcacaggtgcggcttctgtggaaggacccccgcaaacgtgggttggaaggacacagacatcctaccgctggttccttgcagcatcggcccccagtgggctacatcagagtgcggttctacgagggtcctgagctggtggccgacagcaacgtggttctggacacaacccatgcggggtggccgcctgggggtcttttgcttctcccaagagaacatcatctgggcccatctgcgctaccggtgcaatgacaccataccaacgaggactacgagactcagaggcttctgcaggcctagggatgggggtggggaccccttgctggaagatggcaccaatcgtggctaccctcactgcaaccaacagggagcttggcacccggctccaagaggtagctgccctagaggggctccagaaaggaccaaaattaagtgtgtgtggtggaaaaaaaaaaaaaaaaaaaaaaaaaaaa

SEQ ID NO: 10191 - DNA, 620 bp, Canis familiaris
gtcaggaaaaggtgtacatccagatcctggaggacacccatagggtgcagccccagccccctgccagctgcagcctgctactttcaccaggccttccacctgccctccgccacatcctagccattctcagtgcccaccaccaggtgctccagcccgacatgctgccagctcagtggacagcaggctgtgctgccagtctagacaacatcctgggcagcaagtggagtgagacactggataagcacttggccgtggctctcctcaccgaggaggtgggtcagctcttgcagcactgcagccaggaggagtttgaacggaggtacagcaccctgcgggaactggcggacagctggatcggcccttatgagcaggttcagctctgattaccctaaatgcccagagatgttcatacacacgtacacactcacacccacccacccacacacaacacacacacacacactattatactcctgcgggccctcttcccaggaaaggacaagggtcttctactacagcgtgctacctaaaatgtgtctagttccctaagacgggagtcagcaaaccttttttgtaaagggcctggcaataaatattttagactttgctgaccacaaaaa

SEQ ID NO: 10192 - DNA, 521 bp, Canis familiaris
ctttgccacagttcgcctgcctttctgtggccacaagaacatctgctcactggccacaattcagaagattccccgactactggtgggagcttccgacgggtacttgtacatgtataacctggacccccaggaaggaggcgagtgtaccctgatgaaacagcacaagttggatggaagcatggagacaaccaatgaaatcttagactcagcctctcacgactgccccttagtgactcagacctacaacacagctgtcgccacaggtactcatgtgccttcatctccgaccagacttgcctacggagacgagctgggggccgtgggcggcgcatgtctggaagaggaggccagcgctctgcggctggaggaggacagcgagcatcctcctatgattcttcggacggactgaacttgacctgtgaactctgacccccggagcagagaacactggcttgatggaggactttgtgttatgctgctatgaactttgacctgagttggggagaggatggcagagactt

SEQ ID NO: 10193 - DNA, 528 bp, Canis familiaris
ctcataaatgaggccgtacattcctgtttttgtctccgtagtatttcagtaccgctccagtattttacatgaatgattctcacttgtgatttggtttgggatcactagggaagcacatggcaccatccacatataccatgtattgaaatgattttctcagtatttgaagtaggaaagttaccccaacacttctgcttccacttaactggcctgcaatattgtaagaatggcatatccttgttactgtgatatttaaatatccacagtgtccaccttttccaaagattctagtaatgatctagaaatatctttctcttatctgttatttatccatttttccccgtaatttttatatggaaaaatatttgtattgaagacatttagtatgcagttgataagaggaatttggtataattatggttggtgattattttttatactgtatgtgccaagctttactactgtggaaagactactgtttaataaaagatttacattccaccaaaatataattaaaaaattaattaa

SEQ ID NO: 10194 - DNA, 426 bp, Canis familiaris
tcttcctgtagattatgcatgacccttctcaagtcttttctacagggaaatgggcactttttccaaatgctaggtaaatggccgtgtgtgtttgaaccacgctggggagggaaatgcttatcggtgtgtgtctgaaatgactgtcagtcctctgtatcactagagtcaagcctcgttatgaagctgctctagcatgctgagggccggatcatgcccctgcaacgtggggcatagggagtgggtctcctgccacaacctggcatgctgttctcatctgcattccctctgtgacatgcctgccagccttttcacagaaagccatggcaaggcctagaacccgcacacagattcttctagaccaaggaaccgacattaaagcataagtgctgcctgaatgaaaaaaaaaaaaaaaaaaaaaaaaaaaaa

SEQ ID NO: 10195 - DNA, 682 bp, Canis familiaris
  misc_feature (577)..(577): n comprises a, c, g, or t, or includes no nucleotide
gacactgtccttattactcctggaggtttctcatcagtgccagctggaatggagaccccctgaactcacttgagtttgaggaagaagaagatttgaggaagcaatggacggaagtgagacacctcagctgttcactgtgttgccagagaagagaacggccactgttggggggacccatgatgggatcaacccacatctatgacatgtccacggttatgagtcggaagggcccagctcccgagctacaaggtgtggaagtggcctggcacctgaagagttggagctggatcccatggccctgaccccaaagtatgaggagcatgtgcgggagcagcaggcacaggtggagaaagaagacttcagtgacatggtcggccgagcactgccgcccacaccagaacgccaacgaaacggaacagctcagccaccaggaacgagaccgtcgggtggcagcaacaaatattatagaggtatcttcataattagtagctcccccacacacaccctgccccctccttatagcccttttggatgcttgggcttcacacatggtcccccagagccagctctcccacanttcccaagggcttgtcatttcatgttcttattttagacctgttttgtaaataaaactgtttcccccggaaaaaaaaaaaaaaaaaaaaaaaaaaaaaaaaaaggc

SEQ ID NO: 10196 - DNA, 414 bp, Canis familiaris
  misc_feature (1)..(1): n comprises a, c, g, or t, or includes no nucleotide
nctgctagcccaaggaggatgctgtgttcggctgttattaattgatttgtgctgaggccatagttcatagtgaaagctctggctggagatgcttgttgggtctgtgaagcctgggccaggcagcccaatctggcctgtgctgaggatgaaaccctctgctttcacatctctgagctgcaccctcattactgaagatgccttttgctttatagctttgctggagagcaattcattcttcccatctcatgtaagagatgtaatttgcctcggggcctaagcgtcctgctcctttgggcaccattggaatggagccatctgggaggtcagggacggggactgcctgaggagagctagccctagcctggcccctgccccagatgcccattccatcactgatatttaagtgaaggggag

SEQ ID NO: 10197 - DNA, 318 bp, Canis familiaris
tatttataaatacacatatggccctcgggacctgattggctactgatccgctgagccagcgaccaccattatgatgtatcaacctacatgcggtttagtttgtgtgtttttattctctaaagttacttatctactttagccgttccccacaataccagtcacctaatttatctgtgctcatgacagctgcatttgttgatgcaggctgtggaaacagagaggtttggagggtcttgatgttttttctgggatcatcacatcactatagctttgtctccttttgaatccataagatttgtcacagatggacagaaccag

SEQ ID NO: 10198 - DNA, 735 bp, Canis familiaris
  misc_feature (87)..(87): n comprises a, c, g, or t, or includes no nucleotide
ccagaattcattagtacaacccattttttgttttacctagataaacatgttagtctgctgttgggtggaaattgagagggccagccntttggacacttttaaagagccaagctttgtgtataccgtttttctcacaagtaaagaaacttaaatgcgttcttcatagatttgtatgtgtattgttcagtgccaactcgttccatgtagtgcacaagctaacgcggatttgtttccttctttcttccctcggattgaaggccacctctacatatctgctctgctccatctcggcttatgccagactaactgacttatgtgtgccccctaatgtagtactatgacgttctttattgactggtcgctgctactaataggagtgttttgtagtattttcttctataattgtgagattttataaattgatccccttatatgtgcacatattttatatgatatgtacatttgcttcatagcgcattttagagttaacctccctaaaaggggatttgagccatagccatttgtttgtattatgaactgtaagcaatctgttggagacgttaggttttatcacctgctgctgtatttgtaaaccaagacatatgttgctttaagaagtaattataattaggaatagtctatggatgtgatacttgatattttttaagataaacttgtttgcttttgtgtatcatacctgaaaacttttttaaaaaatgtattttcatggttaaa

SEQ ID NO: 10199 - DNA, 271 bp, Canis familiaris
taatgctttctattctccagtggtttccatctctctgactttttttggtcatatatataccctaaatgcccagtcatgtgccctaggtcctgccctcgccaatgagagagccatgtatcccgggtacatccaggaacttcagcagccatttgactcattgctgttcccactttaaggttgttgttcttgtgttgttgttttttaattattattttgcttgttaataaaaaaacgaatagaaaagaaaaaaaaaaaaaaaaaaaaaaaaaaa

SEQ ID NO: 10200 - DNA, 605 bp, Canis familiaris
ttaatggaagaactggagtctccatatcaggcaaagtatggacagtgaattatcaggaagatatcgacgaccttgtggacttggcttcacgtgaggtagaagatcactgatggagaaggtgatgtggctggagatgatgatgatgatgatgattcacctgatcctgaaagtcccgatgactctgaaagtgattcagagtcagagaaagaagagtctgctgaagaactcccagctactgagcacccctgatgaagtggaggatccccaataccaaaaagatgccaaaagcaactataaaatgatgtttgttaaatcccgtggttcataactccccaacacttagtctttgtattaaaagtaagccttattgttataatgcacacgtggaggactgcttatagagcacagacctttgtattataatttttaaaaaggcccttttaaataattaccaagagtgtttgctttcagatgccctggattacacttttatgggcatgactataaccatttttgtaaagagtaagagttgtataaaataagaaataaataccatactccatttccctttccaaaaaaaaaaaaaaaaaaaaaaaaaaaaaaaa

SEQ ID NO: 10201 - DNA, 561 bp, Canis familiaris
tcttacctctctcccgtcctttctttcattcctggcctgcgaccgaaggggccgtcatttgcatgccacccttgctggatgcaacacttgcatcgctcccggagatctcgctcccacatttccgtgaaagaagatataccacaggctgcccacattgcgcgtcgcgccccaactctgcccatctcgggacactatagcagtatctgaaaacgctctccgtgactcaatatgggcatcaccaaggtcttcacgcgccgagtctgacctctctgggatcactgaggaagggccccttgatgctgtccaaggggctgcacaagccgtgctgaccatcgacgagaaagggactgaagctgcgggagccacctttctggaagccatccccatgtccatgccgcccagtgtcgacttctacaagcctttcctcatcatcatcgtcgacagagacaccaagagtcccctcttcatgggaaaggtggtgaaccccacccaaagtaactgccttgtgggtcaggtcccttccagataccattaaagagtgacccaccccaaaaaaaaaaa

SEQ ID NO: 10202 - DNA, 298 bp, Canis familiaris
  misc_feature (1)..(1): n comprises a, c, g, or t, or includes no nucleotide
ntgcccatgatgaccgcctgggcatgttcgacatccagcactgtccacgctctccagctgggtgctgctcatggagtacgtgggcaacgccacccttctttcatcctgcccgacgagggcaaaatgcagcaccctggagagcaagctgacccacaggaggtcctgcccaagttcctggaaaagagatacgccaggtctgccagtttgcgcttgcccaactgtccatctctggaacctacgatctgaaaagcgtcctgagcaaatgggcatcaccaaggtcttcagcgccgaggctgac

SEQ ID NO: 10203 - DNA, 532 bp, Canis familiaris
ttgctacccgatcatctgaggcctgtccaccctgcttctgcaaacccccacctggcccctgaggcacggggtctgaggctgcccttacctcaggagcttacccagggacccctgacatcggtgggctggctactcatcccgtgcacaactatggatgtggaactgtcaggccgaggttattcgccctccttctcaggcccgctgcccagcactggggaatttttgctcccgggccccgccccgagcccagcaccctgccaagagcagcaccccatgtactgccacaggacagacagcagcagctggttttcttgaatagggaggtcagaatggtcagctccagtatctcccctcagttcacggggggatacagctttacctctagcctttttgtgggggaaaagattggtaccccctccccccttatttttgattataacatgatgctaggtataattttattttatataaaaagcctttttatgaacaaaaaaaaaaaaaaaaaaaaaaaaaaaaaaaaaaaaaacaaaaa

SEQ ID NO: 10204 - DNA, 588 bp, Canis familiaris
ctctcgaagacacccccctcccccaccccacgatccaggctgcactggcctatgccatcctggggaccagaccttccctggccccctcctgggtcagcgggactgacctcatggcacccccacccccatttctaacaccagcgctccttccagccttttttcatcgactgactgggccccacgaataggctgcaggcccacaagcacccacttgcccctcggtggttgacaggcccattttggtttgctgctcttggtcagtacagaaggggctgcccgtgctactttcccgtgagcatgctcattgtggtgtttgcacatacacacttaacatcttcgtggagtgtgagttttattttttacatatttgtatgcagtagagggcttgttttagaaaactctccctgtatcttactgtactgttcacagaaagctgaattccacattgcccacagaagcgtgaaatgttcatgaaccttcctccaggaaaagccattcaagcctgattatttttctaagtaacttcaattaaattgaagaaaaaaagaaaaaaaaaaaaaaaaaaaaaaaaaaaaaaaaaaaaaaaaa

SEQ ID NO: 10205 - DNA, 574 bp, Canis familiaris
tacagggttcctgacatcctcgtaaaaacttattcagtagctcttatggtgtcgttgatgaacagaccgctgtccggtgcctcaggctgcagctggttgttctggctggtttgaggatactagaggagagtgaatggaaaggccaatgccttgactgtgcccttcctctgttctctctactcgagtgtaggttctcaacgcgccgtgccctagcatcgatctggttgtggtgccccccctggtgctcgccaccaagaggaagaggtcatcgcagaagtctagtagacgatgctcacgggggagaagaagatgtttggtggtattggatctcttggcccacctgccggtacaagctgaagccaaagtcagccaggttgggggcaatcttgtggcaagctggctggtgctcaggatcatggtggggtgcatccgtctcctggacagcgtctccctggagaccctcagccagggatcggggtaccaggcagcacaggcctgccagcaggaggaggccccaggtgatggaggatggcattgtcctccaatccttgtgctgcggtggcctccacacctc

SEQ ID NO: 10206 - DNA, 528 bp, Canis familiaris
tgctctactgccagcaacgctgctgcagtttagggatgatgtgaggcccgaatgtctcagggcctgcaccccatgtgaccccaggcccagcctcagggctaactgctggaccccttttacttcgtacagtttgtatttattcccctatagcgtttgcacgaggcggttgtgcggactccgctcccgagggtccgcctccccgcgagtgcacgcgcgacaggagcgttgagcacggctctggcgtttgggccaccttcccggccatttccagaagggagggagcccactgcatctgggctggccggggcccagaggtttccccgcctcccttgtttgcatggcccctcccccctgaagcaatagggccccgccataggaagacccccccagaaggagggtcatcagggaggcctcgcctgcatccccccctcctggcggccccgagatggggcgaggctggggctcacccccttccccagctattttatgtctgtaattaaatgttaaaataaagtcattattgtaagt

SEQ ID NO: 10207 - DNA, 624 bp, Canis familiaris
  misc_feature (180)..(180): n comprises a, c, g, or t, or includes no nucleotide
ggtcccatgggttgggcgtcattgtgtcgcatcggcttccggggagatccgtagatacctgtcactcgctggacctggtggttggactctgcactgggcagatctagaccgcgtgcaccattgcagatctgagcgcttggcccagtaccaccagatcctcagaattgtaagaggaactgnggtagcaaggccaagttctgccggcagaaagcttcagaaaccccttggccaagtaaggtccagatggcgcaccctgtggtcctgagtcagctcgttagacctctgctcccccgggcagctcaaggcccccagcccaaagtggcagggccctgtgctagttagctgccctctcccttccccgtgatgttctcaaagcttccttagaattgctacagaagccagagttgacatctggaaccctgctgggaaccctagctctgtaaacatgtaattggtccaaatcattgctttctcacctcacttccaccaagcatctggagccaggtctgtctatgtaataatctcaaggtgtccacaggcaagatccccagtggttttatgtgcagaataaaaaggcctcagtgacccataaaaaaaaaaaaaaaaaaaaaaaaaaaaaaaaaa

SEQ ID NO: 10208 - DNA, 567 bp, Canis familiaris
cttttcctaacagactggctccgggtcctataaaagtagacagttgttatgtttgcactagaacggtgcacggttaattcacagattaggggtaaaggagtatgatccaggtatatgtagctattccgttgaagtagtacaactccctgaaccggtaattaaggtagaatgtgctgttaaccctgccgtccccttccccatggccccaatacccttccttttcctctgaatttcgggagaacaacttccgccgcaactcttcacttggagaggcagaattggcatccctccggagccctcaccatcatgtctgttcactgtgtacagatggcaggcagaacttctggggtgcagtgtttaattgttaaaatagtacccacgaccagtcagcccccaactagtgcacaatgcatggtacaaggaatatttatgtattttgggaattatataatatttactaagagtatatgaaaggattgctactgtatcagaatactgtgtttctattcagtctgtcctgggtatgttaccaccaatgaagagagccttctacagaaagtcaagaaa

SEQ ID NO: 10209 - DNA, 335 bp, Canis familiaris
  misc_feature (268)..(268): n comprises a, c, g, or t, or includes no nucleotide
tcatgcggcctatttctgttttaaatgaatgtcaccacacgaataggtaaaataatttatttgtcatgatgctatggatttgaactatgaagattcttagtatattggcttctgtaaagactaggagtcgcctcagaaacccagctttttacatttaagttcaattaaatatgggatgctacacatgataaatctaagacaggtgtgaattacactgtaaaaaaaaagtaactttagctaaatggaaatggttggtttcagaattacnttgaagtaagaacactgtaccatattctatcctgtgtgccataataaaatactaaaaaaccgtaaaa

SEQ ID NO: 10210 - DNA, 330 bp, Canis familiaris
aaagcttgcgagataccaagtgatgcattgtgattgaaggcccttaccgcacgggcacaagttcaagttccctggccgccagaagatccacatctccaagaagtggggctttactaagtttaatgcggacgaatttgaagatatggtggccgtaaaagcggctcatcccagatggctgtggggtcaaatacatccctaatcgtggccccttggacaaatggagggctctccactcatgagaaccttgcaccacccgaaccctattcatgcccaccaataaatcctgcttcctgtcaaaaaaaaaaaaaaaaaataaaaaaaaaaaaaaaa

SEQ ID NO: 10211 - DNA, 492 bp, Canis familiaris
gttctcagaacattctgacatccacagagtgtcccgtggggcttcacactataggtgcgtttgttgaaacgttctttgaattctgagccccactccaccggtgagtgagattccccaggagcccgtttcttcacagggaccaatcccttaaatttaatggaagaacctgtggccagaagaaagggcttctttcaagggaggtaattccgcccaaaaagcaccgagagggaatgaggatgtgaacattgcttctccaaatatgggagggctgagttcctttgaccccaagatgagtgctaggcccctagagagagctctgcatgtcaccaagtgaccaggccttgcctcgaggcgctcctgtctcctaacccagctttccttcctctggactccgcactgtaacgcctacgtttgctgatcatgggaagaactcctgtgtgccactaactcaataaaaccgccaaggaatctgaaaaaaaaaaaaaaaaaaaa

SEQ ID NO: 10212 - DNA, 563 bp, Canis familiaris
caatttaaggaataaaagtaatgaagatttacgataaactttggtatgtcctactgaaagaaagaaacatgctcctaactctagagcaggaggccaagcggcagagattgccaatgccaagtccggagcggttagaaaaggtaatagattccatggatgcattagataaagttgtccaggaaagagaagatgccctaagacttcttcagactggtcaagaaaaagctagacctggtgcttggagaagagacatctttggaagaatcatctggcacaaattcaagcagtggcctataccttggtacctaaataaaagatacaataggaaacgattctttgcaatgccctatgtggaacgttttgtcagactgagacttgagaaacatgcccgcattgaagcaagaaagaaaagtttagagaaaaagaaagaaaaatttcttcaggaaaagtttccacatctttctgaagcccagaagtcaagtcaagtctaagatgtctgagttcaagttgccattttgttttccttggatagacagattatatacgggaagtaaatatgtatt

SEQ ID NO: 10213 - DNA, 107 bp, Canis familiaris
ttttggaacacgaaggaaaattgtgatgtgccaaactggttgtaatcaggaatggactcctgggatttcactgtattgattcagccagtagtgataaagcgtttttc

SEQ ID NO: 10214 - DNA, 433 bp, Canis familiaris
gatattctgtgtattcgaaaggtctgtctgggattttaagaactatgttccactgacacctttgattgtattagaaattacttaagaaaggtaatgtctaattaactagttagtttcacattcagctggatggtggtaaggggagctaggatggcatagagatggggggatttgagtacactgtgtccagatgcctgtggtttcctctcaccccacctggcttgtcctaacaagggttctcttctttcagctgtggcaccatcagtgtgaaaactgaacccatggaagattcaggtatgtacactgatgcttttagaatcaaatattgagcaggttatcacttgacaactccttttgttttacttttaaaaaataagactgtcagtaaagtaggaaggggaggtgcttcctcagttcgatttaaaaaaataga

SEQ ID NO: 10215 - DNA, 449 bp, Canis familiaris
tagtcaactgggttagcacgatatctgatttgttgcccgattgaagtgaaactctgacgttccttatagcgtgcttctataaaagggtttttgtattttttcttaatattgtgattttttaaattgacctaataatggaccaatttaatgtatgtaattgtctatgcattttaagttaaactgcctaaaatgtgatttgagacatagacatttgtttgtattatgaactgtaagcaatctgttggagacgttaggttttatcacctgctgctgtatttgtaaacaaagacatatgttgctttaagaagtaattataattaggaatagtctatggatgtgatacttgatattttttaagataaacttgtttgcttttgtgtatcatacctgaaaacttttttaaaaaatgtattttcatggtttcaaaaaaaaaaaaaaaaaaaaaaaaa

SEQ ID NO: 10216 - DNA, 599 bp, Canis familiaris
aatccttgggagatgttttctctcaatgcgatgtatggaaggaaacatgttgccctgatgttacgaggattctaaagaaaatggtacagagcgagccagccagcacgtgtaacctggataacactatgtaggcctgagtgcgcaggaacagaccgtaatattaggtaaggtagatatttatgacttgtattcatctgaagttatggattgcattaatagtccttgtcgaatgcggagcactcaggtgctttaacgtttataatgtaatcatcagtaacatcaaatattttggctgccgtttttaaagaccttagaaaataggctcaaagagatgccaaaattaggagcttcacgggctagtagaagctcggtcgttgtagctccaaggtggatagtggtgcctgtgtggtgctatccacagaacttatagttttaaactagactttagtcgatgtgacctgaagcctaactggaaaaaattgtggagttcgagatgaaggctgaaggaccaaggatgaaaccttaacacatgtcaaattctgagactcagtaaaggtaaaagacaaaaggaacaactcagaaaggggaaagtgagggga

SEQ ID NO: 10217 - DNA, 618 bp, Canis familiaris
ttgtaatattaggggtattaaccaagaatggaggcatgagtgtgtgagagtcccagcaagaggccgcatccccactgccacgcaaccccgtgtggactgaaggacctctagttcccccgtgtcagttctgcttcagaaaggggagtcagttactgcttgggcagggccccctagactctaccctcagtcaggacattttgttgagccagactcaaccagttccctccaactgagagctggagtgaggagcaagaggggctccagctgtttaggagagaaaacagagccagacgtgtggctaatgaatgctgacatgcctgggatgtacgcaaatagccctgtcctggcctgccattgaccctgtctgtattttcttgatggttgtttttctccttctactccttcccaggaagggctttgtatgtctagtccaatgcacttaaagtcagccagcggactctgcagcacccagaaggctggatgactaaaggtttatgtcactcctttgccgggctgttcattgtcatggctgtggtgtgggacctctggaaatggagtctgttctgtctgaaatcaagccagtctgggatgttcaagggactggaataaagtggctta

SEQ ID NO: 10218 - DNA, 376 bp, Canis familiaris
tgaagcttggttggcccgaaccagccaaccttggttccttggaccaccaacccattccggggttggccccgcccttgggggtctttttgcctttcctctccaagaggacaatcatctgggccaatctgcgctaccggtgcaatgacaccataccagaggactacgagactcagaggcttctgcaggcctagggatgggggtggggacccattgctggaagatggcaccatcgtggctaccctcactgcaacaaacagggagcttggcacccggctccaagaggtagctgccctagaggggctcagaaaggacaaaataaagtgtgtgtggtggaaaaaaaaaaaaaaaaaaaaaaaaaataaataaaaaaaaaagg

SEQ ID NO: 10219 - DNA, 593 bp, Canis familiaris
catggctctgagatggatgaggatggtgactcagcaagagtaggattgtctggaggtgaagtgcttgctctgggggcccatggaggccggagtaaggaccctgaagctttaggaggcaccattctccccaccggcttgtggcttgcacctggcttgcaaggcttgcctggcccattgatggttcccgcccacttctccagttacactcgctgcctctgtgcacctgggaatcatttctgcttctaagaaacctccatctttttttaatggatttgttttcatcacaatgaagagttgaaatagttaacatttttgtattaccaaagtaaattatgtaatttataggacaaaaacgagatacaggtaaaataaacaccctcttactcctttccctgggataagctctgttatcaatttagcatctacccttgcaagtctttttctgctttatatgcatatatattttttacaaaaatgaaatcattactgtatgttgttttactacctggttcacatatcaatttgcccccaaacacctcttcatgtcaataaatgttcttctataacgttgttaaaaaaaaaaaaaaaaaaaa

SEQ ID NO: 10220 - DNA, 526 bp, Canis familiaris
cacgtttgtgtagctcggtccgtattgttttcacacttctggcatctggctatcaaggttagattgtctgtaggcatcatagttgtcatggtaactaccgaacctatatgattgcagatgtgatggaacatcagtatgataaagtgatgggaaatgtttcctgaaaattcaccccgttccttaagagaggaggaggagtgcctgatagtgttaataccaccctgtcctacctcaggcttttgcagatggatgtttggagggtcagtgcagccagagggaggagggggacatcttggaaatttccagttctcttttcaaacccacaaatagggatgactcttgctgtttgtcagatttgctgcaaattgctcctcacaaagaacatttttttctatctgtaattgtacatacaggttttgtactctaatgtactatagttctgatgtggatggcgattaaaacagatgattttatagccacaaaaaaaaaaaaaaaaaaaaaaaaaataaaaaaaaaaaaaaaaaaa

SEQ ID NO: 10221 - DNA, 378 bp, Canis familiaris
gaggctgaggaattagatggtagatggccaactcccccagaagtctgaactctgaattagacattttagaatcggcagccattcacgttggcttgctgtgtagctgtgaacttagcagcatgactgagatgcccatataatcactgaaagacgaaattggtctgtttaaaagcagagttgaaaaaaaaaaataaataaataaataaatataataaaagcagagttgttcacatgctgtctgtacatttaaaaattgttgcattaagttcattttagaattgccttagtggtaagaagaaagtaaatgctgtaccattgatgaaatcattaaaattctgatctgaatattggaaaaaaaaaaaaaaaaaaataaaaaaa

SEQ ID NO: 10222 - DNA, 640 bp, Canis familiaris
  misc_feature (163)..(163): n comprises a, c, g, or t, or includes no nucleotide
gctgtgtctgccaggacagtatgtcagacgtcacacaaagctgccgacagacgaacgtccaagaagttcaaatgtgacaaaggtcacctggtgaaatcagaattacagaaactagcccctcagagtgaccgtgttgctgtgcccagaataccacccgagagcnctggtaacagtgagcctctggggtttgccaaagagcacgcgctgcccccaggaaagggggctggagctcctgcacagccggaggccgcggggtgccccctcaggcacgccacagctgtgggcgacacttgcccagcagagacggaggacagcctggccctgccagcacacacacctctggctggggaggagcctcacagcagccgctcagcacagggtgggtccacactgcacaccgagcaggccgcaagacctccgctgcagacggatgacagcgtctttctggatgaggacagcaaccagccaatgcctgtgggccggttcttcgggaatgtggagctcatgcaggaccttccaccagcttcttcgtcttgtccttcaatgagcagacgagaattcaggaaaatgcatttcagagccaaagatgatgaagacgatgatgatggtgcagaaatgtagagaataaagtatacacagt

SEQ ID NO: 10223 - DNA, 616 bp, Canis familiaris
taagataatccatgtccaaaagtatttcttgaaaattcagtttgctataaacagtgggtaaaatcgtagatcttttaagcatagaactttttaaataagttagattcttcatggatactactgaagtacatctcagactcacgccttgacagatgctgtgtaaaaccctatgactaatgtttttgtagttaatggaggggctattggtgacccgtcaaagtttcccaggagcacgacatattgcttttctgtgaatgtctccgtcaaggatgggagcatttcaagtttacagtggtgattctgaaatttccaaggttacttctatctgcaatcatttagaattcaccaccatttaaaatatcttcaaacgcatttcagggtacctgggtggctcagtcagttgggtgcctgactccttaatttttggctcaagttgtgataacaaggttgtgggattgggccccaagttgggctccatgctcagcgtggagtctgcttctttacctccttccctccctccctctctctctctcttcctctgtgcctccctctacttgtgcactctctgtaaaataaataaataaatctttaaaaaaaaaaaaaaaaaaaaaaaaaa

SEQ ID NO: 10224 - DNA, 588 bp, Canis familiaris
cttgtgaacgttttttgatggaaaagttgaaggcttctcttagttctactggattctcaaggagccctcttgtggcctgtttgctttgagtgctgtgtttccctgttaccagagggcagcactgcataaattcctgttttgtccccatagcatgttctgttggattgcatttactggcaaagaaaggacagatcacatactgggcagaagtcaccattcaaggctaaggtgggcttccagttgccttaatagaagtactcaagtctcttgggtaatgagctggaatgcccacagaagaggggttcctgttttcatttgaaaactttatgattaagagaacctttaaaaactgatttcaagtaagtttttggtgcccattaaaatggtggctgtggttcactactttcctagatggatgagactcttactattataacttaacgtgttcctttgccccctagctgaggccatccttccccagagggatggcattgggatcaaaagataggactctggcttctgtgtagtgtaaatgtaaacacctgtttcaagcaaaaaaaaaaaaaaaaaaaaaaaaaaaaaaaaaaa

SEQ ID NO: 10225 - DNA, 623 bp, Canis familiaris
tggctgcacgaaacacaccggtaaagtggggcaagaactatgatcgagtaccggtcacagaaggaccctcggcgccctccccccatcatgggacaatgcgccccatggagcatagggagggcccgagcaggaatttggtgtggacatcgggcctgtctgcttcttgtaaaaacccgtacccactactacacaatccattgcccatccagaggacccaagtactttccagtcccagtcactctagggctctgcactgaatggctgacctgacctgatgtccattcatcccacccgctcacagtgtggacttttctcccctctttctaagagacctgaactgggcagactgcaaaataaaatctcggtgttctatttatttattgtcttcctgtaagacctttgggtcgaggcagaggcaggaaactaactggtgtgagtcaaacgccccctgagtgactgtccccagcccaggcaagaagatctcccttcaggtgccgggcgcaggaactgcgtgtgtcctacacaatggtgctattctgtgtcaaacacctctgtattttttaaaacatcaattgatattaaaaacaaaaaaattattggaaagtaaaaaaaaaaaaaaaaaa

SEQ ID NO: 10226 - DNA, 610 bp, Canis familiaris
ctcattgagctgctcttttatataataaaggaagaaagaaagagaaaggaaagctcaaacatttgtgtacctaattttttgttgatcacatttacataaatgtaaacaatgtaaatccaaactgagtggagtaactgcaaatttttggcttagtaatttatgaaaggacaggatttcatgttgagcaattatcagatttgttccctttatctggatctatgccatctgaattactgagaaaattgttaatcccttaattagtccatcattaattgtgattaaaattatcgagtgattttttttccccgcaacgttagtgggaagatgttgtgtcaaatatgtctgcccagattagtatcaccctataaatattatcaagaaatttacctagagtcttcttaggtattgaattatatatccagcatttaaagtgaatttgagatgacaaagtaaagcttattttctaagcaacgaaggttatttcgtaatttgaaaatttctcattgtaggaattgggatagtttgagatttttcatttctgtgcgttttcttttatcttcttaataccacgtgacgcattgacgattattaaatacaaattatttttaat

SEQ ID NO: 10227 - DNA, 751 bp, Canis familiaris
tggggtggaagtaaatcagggatgctgccctgagccccaggtatgtgggactgcagacagaaggacccctgggtattgtcggttgaggaatgaagtctttggcaggagctcttgtaagcaacgctgcttctcagtaaacctggggcctagggtggagccccttaccccattatccatcaattcgaagcattgtgggtgcctccccatactgctgttctcatcacacggctgtgcttgtctgtgcttccgtgaacctgggccctgcccactgtaccctcccggtctgagcagtcccacgggagagtggccgcatatacattgcttacccagttccccaaacacgattgtacctatacaaccttcctttgagagaacacacagcctcaccccacttggaaaggtgctccccaggaccttgggggcctcattctctcttacgttctggcagaaggctgcactgctgtaggcctctgcagtttttgactgcttttcttcaatactatctgagtagtgtggggcttaggggcttaggaagatgtctggcagcttggaatgaaagagagctgtgtcaggcagccccggtggtgcagcagtttagtgccgcctgcagcctggggtgtgatcctggagacccgggatcgagtcccacatcgggctccctgcatggagcctgcttctccctccacctgtgtctctgcctctctcttcactctctctcaatgaatgaataaataaatctaaaaaaaaaaaa

SEQ ID NO: 10228 - DNA, 494 bp, Canis familiaris
cttctgaggctgtcacttgcccccctagccctgttgggggacattctcctgttctccaagatcccctgtggttgataccgaagcatgtcccatcagaaaccctggcagggaggagggggcagcagtagacctgaaaccagtgtctgtccaagccatagcacgagctgaggagtcctgtgcgccccagggagtgccacgggatcgctgtctgggttcgcttcgctgtaacatttgccacaacatctgctcttggagtctgaagaggaattggaaattagtctctttcgagtgccagtgtgaattggagaaagcccagctttaaatggctccttgctgagtgaccgcactcagtcagatgtgctagtgccacatctgaagatgggaagatccttccagcagcaggagtggaccttgacaagggggacatcctaacgggatacagtctctctgtggaccagactgtttaccaaatagaacaactcattctgtggaaa

SEQ ID NO: 10229 - DNA, 560 bp, Canis familiaris
caagaggtctatgtgctatgcccatgcagaggtcactgcgttactaactcctagggaggcccttggcttatcggagagcctggctatggtgtgctgcggttcatcatggagagtggggccaaagtctgtgaggtcggtggtgtctgggaaactccgaggacagtagggctaaatccatgaagtttgtggatggcttgatgattcacattggagaccctgttggactacgtacgttgacaccgctgtgcgccatgtgctgctcagacagggtgtgctgggcatcaaagtcaagatcatgcgttgcactgggaccctagtggtaagattggccgtaagaagcccctgccagatcatgtgagcattgtggaacccaaggatgagatactgcccaccacccccatctcggaacagaagggtgggaagccagagccgcctgctatgccgcagccagtacccacagcataaatagggtctccttggcagttggatctggaggctggattttactctgtgaagacctttaataaaatatttgagtaaaacacgtggcacaaaaaaga

SEQ ID NO: 10230 - DNA, 536 bp, Canis familiaris
ctattaaagggttctgatgcttgtattttaagacatgcatttaaaataggaagggcaaccggtggtctcagtcagttaaatgtccgactctttgatttcagctcagatcaggagctcaggcccttgggattgagccctgcatctggctctgtgctcagtggatgatctacttaagattctctccctctgcagcccgctccccttcatgtgcactgctttaaaaataataataataataattaagcacatactggaatggcagcatgaggaaatctgcagaggagcatcagaggctatacagtgcagggtaaattaaatagtccagcgaagtcactatacaagtaagtgctgggaagatgagtctccagagctgctatattatctaaactgtccacttttcaacaaaaacttaaaaatctgtggagaaacagtaaagggtgtcccataaacaagatttgaaaacagtaaaaagaaacttttagtggaaccagatgttggaagcagaaaaaagacttcaaaccagctatcatattaag

SEQ ID NO: 10231 - DNA, 542 bp, Canis familiaris
cttgcctggcctgctgctccctggcctcgcagcccgcccccgtgggcgaagttcatggcctggccccgtccatccaagcccctgttccgtctactggcctccagaccaggatcttcctgccctggctcgctctctctccctgtccctctccacgtgtccggtctcatcctccctctcctctctcacatctcccagctgggtccgctgtctgtggcgcggggcctctgctcagcccctacccaggcaagtccccggggcatgagggcagctgcccccaagcctggacagtcctggaggaggtcagcaggtggagacgatgcatccctgcatgcactccgcactccaaaggggagcattggccccggaaagggcccagcctcccactggagccccagccagctttcatcgtccccctctccccacgagatggctagctctcccctcccttcgccttctggcccctggtatggtgggggtttctaacgatcacacccagcttgaggaggggctgcttctgaggtcggttgttgtctttcaattaa

SEQ ID NO: 10232 - DNA, 620 bp, Canis familiaris
aatgagtatttgggggcaaccgtaacaagcagcagcttgtgtaacctgcccctagccaagagcagagtctatgtgtagttgagccctggggactaccgttggtgtcagtgattggaggcctcttgtgcaagcagaccgtccagcccggaagcagtgacaagtgccaaaggacgctctcccgcatcacttccttcccttagaagcctgagtgagagtgcatgtgtgttcatccgtttgtgacagtgggactatgacagatatgactcctccttgtcgtcagtgttccttgaagctgccagggaattcccagcccagggaatatccctcagtcagcatccatgttcctgggtcctgcccagacctggcaacaggggtggtggtgggtggaatagaaaacagggcaaggccccaggaagtgtgggttttaaaaagaggttccaggtaggccccagctctggccctctgggttttgaaggaagtgggaggacaaacatggaccttcagcactgggttcctggggaatatgacccagctgaccctgccccttcaagtgtagcaagagccaagcaggatcttgtcactccattctgaataaagctctgtgagctgggttggaaaaa

SEQ ID NO: 10233 - DNA, 574 bp, Canis familiaris
gtgacagtgctggctgtctgtccagtgtcctggttttccttaccaagccctaggttccctgggccagccccaagttctcagagtctgattaacacgaaggtgagagtcagactggtctcactcctcctaggttatcacattctcatttggagccaggaggaagtccaggatgcggccatgagagacactaatgaaggtgtgggccaagcaagagcttggagccgcctgaggacaatcctgtaagaagaggcggctgtgtattaaaagggcccaaggtatccaagtcttagggttggagcagggacactgtggcatgggacactatgggactgggacactggcacgttactgctctggactcagctccagaaacttctccagagttggtgccccaggtgccccaagggcccctgctgtatctagcctggagccaggcttctcttggagcgaaggtactcttatatgtttgatgtgcagtgatggagtgataaggtagtggttttcagtttgtgctcactattgacatggctaataaaaccataccccactgaaaaaaaaaaaaaaaaaaaaaaaa

SEQ ID NO: 10234 - DNA, 333 bp, Canis familiaris
ccccctccgggtgcggggtccctggacctacacactggccccaggggaaggatggccctctgggccccgagagacccaggcgcacttgaccttcagacctggaaagccctgctaggccaggcccagatagccaaacgaatttattttgggaacaccctttcctggaagagtattctgaggccctacaggtgactccaggaggtgtcttcttcggcatgggggggtggtccccagggacagggcgcaggaaggacaagtcatgtaataaacagctgcctgggctcgctgccagtgggcgctggctggtgccgggccctgagccaaaaaaaaaaa

SEQ ID NO: 10235 - DNA, 565 bp, Canis familiaris
taagccaactgtatgggaaaattaagtagggatgaatatagtgtgttactgtttcccgtgctttagtatccttatcctcctagatgaattgagggttgatattataaatgtcagtttcctttacatactgtatgtacttatatatgtgtaaacaagcatatattgaagtctattaggggccatcgtacctttggaggttgaacattggatttaaataatattattttggagtcatacatctatgccatattttattctgtcaaatgctatttcccttaaatagtttaactagattgtataaaataactttattgcctacatgaattaccaagcttaggcataggggaaatgggctttttagaagccagggattctaagtatattctgttcttccaataaatgtcattttcttctttaaatattgaataagttttatgaaccatatctttctttgccaactcggattacatgtgcttggcgattaagttttagtttttttctactgcaccataataaagcctgagttctgatccaaaaaaaaaaaagaaaaaaaaaaataaataaa

SEQ ID NO: 10236 - DNA, 102 bp, Canis familiaris
tgtctcatgtaatttgcattacacttggtgggttgttctagtactgtatttggctttttctttaatagattgatatttcatatactataattgtaaatattt

SEQ ID NO: 10237 - DNA, 656 bp, Canis familiaris
actgctcccagacctttctccacggatgtctcttctgcacccaccatgaggaatctggcttgctgtgtagcacactgagttacgcaatcaatgtttactcaaacagaatgcatttcttcactccgactccaacgacaataaaagtccaaaggcattttctcttatgcttactgaccaataatgtgtatagacatacagacacacacaaacacacacacacagacacacacacactaaaagctgcaagagcaccaaatccatgtgttcaaagttaatcctttccatgtgaagtttaaaattactatatatttactgacagctagattgagaggataaaagacaagaatctttctcttcaaaagctgaagcaaagaagcacattgcatcttttctcactaagaaagaatgcaaagatttacattgctgccaaatcatttcaactgaaaagaacagtattgctttgtaatagagtttgtaatagaatttcctatagaaagagaatttgccagacgctatctcaggtgccttataaagtattccaagtttacttcattacatgtctgatgtctggttatcattgttgaactaaagccttttttgattacctgtaatgctttaaactgtatttttaagagagatactgaaaaagagaaaaa

SEQ ID NO: 10238 - DNA, 638 bp, Canis familiaris
acccattcccagtggaccaccatctggcagaccgtcagagataggcatcttgaccagagagagaagcccaggggaccacagtaagtcaacttgcccagagcggtggctaaagccacgcccccccacaggcctcccggtacttatagcatcagaaactttcacatcgtctcccttccggagagcagggcttgcactcttccccctagaacctacttttgaaggcaattagaagctttgtttttcatttccccctggtattgtcttgccaggatggttaaggtacacaaggacgcttattagatcactgagaagaataagcccaacccgcttctctggtatgaacatctagtttgagagcaagccaaacagtaggcttgtattagtgctttaatggagtactggtaacatttttctttcttgataggaatctgcttatatttagccaggcttctatttcataccctctcccagctacaaactttccgtgcagttacctttcatttttaaagcaatttcactgctaaatataaattgtatttgtggggttcatagttatataatgctgaagggaaccactctttcgttgaaaggtgataaaagttaaataaagactgtctccacagtaaaaaaaaaaaaaa

SEQ ID NO: 10239 - DNA, 710 bp, Canis familiaris
tttctttagaggcaatgggaggagccttccgagtggagccataccccgaggaggacttccacgtggatgagcacaaccacggtccgaggtgccccatggatgggccgcctgggcatgttcggacatccagcactgtgccacgctctccagctgggtgctgctcatggagtacgtgggcaacgccaccgccttcttcatcctgcccgacgagggcaaaatgcagcacctggagagcaagctgaccaaggaggtcctggccaagttcctggaaaagagatacgccaggtctgccagtttgcgcttgccccaactgtccatctctggaacctacgatctgaaaagcgtcctgagcaaaatgggcatcaccaaggtcttctagcgccgaggctgacctctctgggatcacctcgaggaagggcccttgagatctgtccacaaggggctgcaacacagggccgtgctggagacccattggacggagaaaggggacctgaagcctgccgggagccaccctttctgggaagcccatccgccatgtccatgccgcccagtgtcgacttcaacaagcctttcctcatcatcatcgtcgacagagacaccaagagtcccctcttcatgggaaaggtggtgaaccccacccaaaagtaactgccttgtgggtcaggtcccttccagataccattaaagagtgacccaccccagaaaaaaaa

SEQ ID NO: 10240 - DNA, 581 bp, Canis familiaris
ggctgcacgcccgcgggggcggcgagtacttcttcacggcgggctggaggagggcaagctcaggccgggcgaggccctccggtgcgacggctggaacttcagcgacgacggcgagcttcctgccgagggcggcgagctgcgcttgttcaccgtcaggtccaccggctccaactgcatcccgtgcgacaggccctcgggcgtctggaagaacttatccggtagcggcgtcgagtagatgactccgtacttgttgggcttcatcggctccatgtaattagacgggtaggacaccgacacagagtccatgacctcttgcttgacagggaccgggtcaaacatgagcattcttttagttaagctttctagggtgctctgaggtttagcttttggaggcgcggtgctgggcgctgcagacgagaaataaaggcccggatccgaggcgccttgaaccccgcgaatgcagcagtgtcagcgcgccagcccggagcgcagcgcgagcgcccgccgcacgcgcggccgtcccggtccccgtccccggccccgtgcccggcccggtccccgtccccggccccgtgcccgtg

SEQ ID NO: 10241 - DNA, 603 bp, Canis familiaris
cggcccacagaacccatgtggtatagagataggacaccgggcaagagagattgtgtcttacaggtttgagaagcgctttctaacatgtagagactaagatttttaatgaaatttttaaaaaatgtttcccttgaaagagttggaatctgagcccacgttcctttagtgacctagatgactttctcctcatcggtatggtaaagttttgggaaagcctgtcatctttagattacttgtttagctgatgggtgcatgcatgctcattgtcggccctaaagaactgggttcttgtaggtaccgctagtggcctgtatataaatatgtacaactttcccaactgtgtctcctctcccgaggaacagtttgtttatgggaacaatcccgggaagaattaattcatagaaatgataagcttttagggctataaagagcttagaagcagtcaacccacccctaggggttggattcctattgccaggttttttgcatgaaaacagcccgccaaccaaccaacctcttccattaggaccttgtgttttatggcaagttgtctgagccgtacatgaaaattgcccttgcatcttgaaaaaaaaaaaaaaaaaa

SEQ ID NO: 10242 - DNA, 530 bp, Canis familiaris
gccggtttggtctcagtgatctactaggtcttttccatctctaatatttatgcataatgtagtgcactgatggaaaaatgttgaatatgttcagtagtgcattattatttcaccggcgtgttgcctggaatataaaagagctaagccgttgcagcataactagttccttgacgatatctgcactggtacaacagagccttgtcccttcctggcccattgtgtgtcacacacacacacacacacacacacacgacacacacacacaggggctctccgtgtctgagtggcagctgcagactgggtacctgatgggatgacagccagccaaggttctgaggggcccggagacaccctttgtggagtctgggttctaaacagaagtagctttcctgaacatgttgatggggtggtctcctccaggaggactcaccgaagctggctccatgcagcagatggttctcaggtgctagtgtgctgcaggggttgtagctctcctcaccggaaaggaaacttatcattctgtcccttct

SEQ ID NO: 10243 - DNA, 665 bp, Canis familiaris
atagtaataggagaaagaaacagtattatctggaagaaacttattgaaacactttgcattcaccgataatttataagtgtccagaaagcaaccagaacgtaagcaagaaaagtgaaggcaaagatgcgggactgtggaacagtgcttcgcagtgtttctgcccagacacctgcactcttgttcctgagtcaaccaaataatgacgagcttttcacatcacctttctggtttcaacacccagctcagagctttctggaatcttctattttttgtaaactttttttttcccttttgttaaaattaataaaacattcaatgttttccccccttgttctctcttattacttacttcctttctttccaattattttgaagtgctttcctttggtggttggttttattctcctgctcccctcccctgttcttattattcagagtataaacctgcaaagttctgctctgttttggtttttgaaagtttaagcttttctgcttctgtgagagcacaggcttctgtcccttttgattccaactgaacttttgtgttctctaatgatactaacacggtgtaggttttacagtctcctaatttgtactggtaatgcatattcccaaataaatagtttcttttgttgccaaaaaataaaaaaaaaaaaaaaaaaaaa

SEQ ID NO: 10244 - DNA, 519 bp, Canis familiaris
  misc_feature (1)..(1): n comprises a, c, g, or t, or includes no nucleotide
ntaaacgggtcattttacactagtccacgctaattattaccgcagatcatatatgattaatctttccggcctgacccctagccatgatatgattcatctgctaccctagcagaaactaatcgagcccccttcgtacttaactgaaggagaatccgaactagtctctggatttaacgtagagtatgcagcaggtccttttgccctattctttctagcagagtacgcgaatagttattgataatagaacatccgtcacgacgattctattcttcggcgcattccacaacccattcataccagaactctagctctagttaacgttcagctataagaaaccctctgtagtgtaaccagtgctgcttccgtatgaattgcgagcatcataccctcgattccgctacgatcaattaatacacttattatgaaaaaattttctacccttaactttagccctatgcatatgacatgttgccttacccattatcaccgcaagtatcccaccccaaacataaaaaaaaa

SEQ ID NO: 10245 - DNA, 425 bp, Canis familiaris
tttccctcaagtcgaagcgactgagaatatagccagacatagccagaaattagccaaggctcaccctccgtcccttctttagtcccaggcgtctctgaattgatgctgttcttaccagcagtgggcaagtctattcgacacgattcgttggtaatgaaagctgccctggcactatggtggaaatttcacatacattacttataatcctcccaagaagtctagggcatgggtagtttttttgttatcccaaatatgagcttgaaaaaattgaggctcagagggtggctcagttggtcaagcagcttattcttgatttttggttcaggtcatgatcaagctctgcctagagctccgcacccagaagggagtctgcttgagcattctctctccctctccttctggtcctcccctcatgctgttctctc

SEQ ID NO: 10246 - DNA, 135 bp, Canis familiaris
cttcccatgcccacattgttccctacaatacgtgcttccaatgttgaggtgcctttgcctctgtttctgaggatatgggagaaagttgcccaccacctctgacacgatcccactgaaaagggtggggtacggaac

SEQ ID NO: 10247 - DNA, 622 bp, Canis familiaris
tttcatttttcacatgctaaagctggcagtgaatgtgccactatatgtcaacctcatgaagaatgaagaagtcttggtatctgcctattgccaatgacggtgctccagaccacgaaactgctagcaatcatgcgattcttcagctcttccagggagaccagatatggttacgtttgcacaggggagccatttatggaagtagttggaaatattctacattttcaggctatcttctttatcaagattgaaagtcagtgcagaattgaacagtaaaaggatggtgttctaattagtggggttaaaggagaagtagtctttgcccttgtgactgattggattaggaaaatggtttcattcctagaggaaggaggaggtccttactttttttgttttcctccccaaggtgaaaaatttcaagctgaatgacaattagcactaatctggcactttataaattgtgatgtagcctcgctagtcaagctgtgaatgtatattgtttgcacttaatccttaactgtattaacgttcagcttactaaactgactgcctcaaattcaggcaagttataatgccttgttgtgcctcaataaaaaagttacatgcaaaaaaaaaaaaaaaaaaa

SEQ ID NO: 10248 - DNA, 601 bp, Canis familiaris
ccgttgtgaattcctgtaagttcccttccataattttatgttcttgtgagggaaaaaagtagaacctgttaatcttatttgactttatgacatggctttcaataagcaaatgttaaatgtgttaagacttgacttgtgtactagtgttgtaatttttcaagttaaaagtgtccctaaaggccacttcctatatctgatttttcccagtaaatgaggcaagcaattctaagaccttccacaacatctagccttctaaaatggagaggtgaatccttctgcctatacaacaagctagctattagagggtggtcggggtatgctactcttaggatttcagagtgtcttcaaactgaaatctcaatgttctcagtaatgaaaaacctgagatcagatgcttatgtaaggaaagtgctattcacccagtaaatcccaaaaagcaaatggataatgctggccatattttgcctttctgacatttccttgggaatctacaagaacctcccctctcccctcccccaataagaccatttaagtgtgtgttaagcaactacagaatactaaataaaaagtttggcccaaacccaaaaaaaaaaaaaaaaaa

SEQ ID NO: 10249 - DNA, 550 bp, Canis familiaris
gattcacagtgcccctgcggagagcctgcgagcctgggtggcatccgcgtggcaggcccaggaaggcagagtggcttccattgtcagctgggatctgctttgcttctcttcagcaagctcaggatcttgtttcctgcttgggcggccctgtcctcagtggtgtgtgcaggcgcctggctgtggacttccgacactgccgaggtggcctcccggacctggtggtgtggaactcccagagtcatcgtgttaagctggtggaaagttaaaggcccccatgatcgcctttcacataagcagatgatctggttggatgagctgcagaagttgggggccgaagtagaagtctgccacgtggttgcagttggagcaagagcaaagcctttcctaactaagagctgtggtgtcggggtgtctggttgtacttggactgattttcagaagcataaagcatgattacatttttaactttgattttgctttgtcagtaataaacaagatcatcgttgtacagtgtgtgcatcataaaaaaaaaaaaaaaaaaaaaaaaaaa

SEQ ID NO: 10250 - DNA, 535 bp, Canis familiaris
  misc_feature (1)..(1): n comprises a, c, g, or t, or includes no nucleotide
nagcagactgcggaatgcactctggcacacaggggacacagcatcacaggtgcggctgctgtggaaggacccccgcaacgtgggttggaaggacatagacatcctaccgctggttcctgcagcatcggcccccagtgggctacatcagagtgcggttctacgagggtcctgagctggtggccgacagcaacgtggtcctggacatccagccactgcggggtggccgcctgggggtcttttgcttctccccagagacatcatctgggcccatctgcgctaccggtgcaatgacaccataccaacgaggactacgagactcagaggcttctgcaggcctagggatgggggtggggacccacttgctggaagatggcaccatcgtggctaccctcactgcaacaaatcacgggagcttggcacccggctcccagaggtagctgccctagaggggctcagaaaggaccaaataaagtgtgtgtggtggaaaaaaaaaaaaaaagaaaaaaaaaaaaaaaaaataaaaaaaaaaaaaaaa

SEQ ID NO: 10251 - DNA, 574 bp, Canis familiaris
  misc_feature (1)..(1): n comprises a, c, g, or t, or includes no nucleotide
ncatgacctcagcaggccccagattggaaggggagcagaatcagtctttgtcctagcacttgttcaccagacctggcccaatatctcttatgaatcagaaagcccagttcaggtagttaactgaatttaggggaaaaggcacaaattcagaaagcaaagggcattattatatactgtatatgcgcttttcttctgaactgtaagccatttgaggtcagcttttgtgttttacatttgttttataagttgtacagaatgtagtatatacctttaagatggtcaataaatgttccttaatttgatacatgttaaaccttttttgataatttacttttttaaaaactgctttaggggatccctgggtggtgcagcggtttagcgcctgcctttggcccagggcgcgatcctggagacccgggatcgaatctcacgtcgggctcccagtgcatggagcctgcttctccctctgcctgtgtctctgcctctctctctctctctctctctctctctctgtgactatcataaataaataaaaaaatttaaaaaacctgcaaaaaaaaaaaaaaaaaaaaaa

SEQ ID NO: 10252 - DNA, 629 bp, Canis familiaris
gcatccatgcagtcttgcaaaaaacaggtttttttgttttttgtttgcccatttggtcttaactattcttagtaaccttcaccattcatgataatctgcaacgttttgttcagtaaagggctttatgggctaagctaagggcttggagggtggatgtatgaggcacatgtgcttgaatggagggtctatgtaagaggagacttggagtttggctggcatttcggggtgacatcagattgtaggatgccaaactaagaggtggtgaggaattttgtttggtagccagtgaggatcctgtaaagttgggagggcaaattggttttatttcacctgacaactctaatggattggtgctgcaataaggtttatgaggccacatgcagtcgcagctatggagaggacatcgatgagtgatgtctgctccaggcacaagacacgtgagtggtggtgtgtggtgccgtgtatttgccatcctggtaatgaagcttcttaagtggcctaagctgtgagagtgagagtgctacactggggcagggccatcactaacctgggagacagaagacccgtgtagtagtttgagttttgtcaccatccacttgtatcctttagtctctctgagcctgaatttc

SEQ ID NO: 10253 - DNA, 657 bp, Canis familiaris
ctttcctaagggttgggaggcgcttgtcacctcagctagcacaggggcttttgtctgttggttctgggccacgactcaagaaggactgtattctggagagccacccccagctccttgcacaccacggttgaggtagttctcctggcaaccacactctttggggaccatcccttgcctaccctgggccctggtgaccctgatcccccttccccaagtgtccctgtccctgtgaggctgacgcccttatcaaagcctccagattccagcttgtacttgggagatggggacacacaggccacctttccttctggcaaggcctcttatttattaccattgctgtagggctttcggtttcccccttcttttgataggccacatagaggcatagagtttggataggtttccgctatgaccccttgtgcgacacaccccgtgggccacaccttgtgcccacccgcctgccctgttctgttccttggaacgctttgcctctgctttgtgctgttcgctttgttctccaccttcatagcagcagttattctgttttccaaatggagcatctgtaccagcttaatgtaacttttgattttgggtcgatttgttttaagctctattgtcaccaataaaatcttaataaacaaaaaaaaaaaaaaaaaa

SEQ ID NO: 10254 - DNA, 710 bp, Canis familiaris
tctacctaccgagccatcaggcacccgacctttgatgacccatgtaatgtagacaagtaccggtataccaagctaacgaagacacttcttttacttcagaggaataatcttttatgaacattgatgcataatcctcacagtataccagcaaattgattcagcatatcagaagggttacacaccaggacgaagtggaatttatttctgaaatgcagggatggttcaacatatgaaaataatgtaatacaccacattaacagaatggggagaaaagcgtatgaccatttcacttgatacagaaaaaacatttgacagaattcaatactctttcatgataaagacactcaacaaactagtaataggaagccaactcaacataataaaagccatatatgggggtgcttgggtagctcagtccattaggtgcccaactcttggtttcagctcaggtcatgatcccagggtcctgcgattaagtcttgtcttgagctctgcattcagtaggaatctgcttgagaattctctctctctaaagtaaatcttgagatgcctgggtggctgagtgtttaagcacctgctttcggctcagagcatgatcctggagtcccaggatcgagtcccacattgctccctgcatggagcctgcttctccctctgcctgtgtctctgcctctctctgtctttcataaataagtaaaatctttaaaaaa

SEQ ID NO: 10255 - DNA, 538 bp, Canis familiaris
ctccaggcgtgcttctctgtcaagagaatgatcggctgctctgaaaggatgctgctgcacttggctgtgtgttcactacggcatgatgtgccccacagtgcactagatggaaactggggggcctgtgcagccacatgatggccagtgtcacctgaacgaggccaacgagtacactgtgtccaatcagtatggactatccgtcccttgccttgtcttggagagaaacttgtccgagaacaacatcaacctcatctttgcagtgacagaaaagccattatatgctcgacaagaatttcacagccctgatacctgggacaacatgtggagattttacacggagactccaaaaatatcatccaactgattatcaatgcatacaatagcatccggtactaaagtggagctgtctgtctgggatcagcctgaggatcttaacctcttcttcactgctacctgccaggacggtgtgtcctacctggccagaggaagtgcgaaggcctgaaaattggggacacggcgaccttcgaggtgcggcgga

SEQ ID NO: 10256 - DNA, 513 bp, Canis familiaris
ctatgtttcccccccgcacccccgccacacccccgttttcttggtctttttttgttccttcttcttcttcttttaaggaaaagctaaagccggtgtgagtcctggtggtgggctctccgtggatgtagcatatggaagataattttgatactgcatttttatggattattttataatgtgtgattctttctggagagaaggaaggaaggggccccagtggaaactgctggtcttcagtgatcttgctccaggcgagcagctcccccatcgtgacccagaggccaccgagactggcccgggcaccgtgtacctttccgaggttggggaggggccctctagagtatttctctgtctttctctgggtctcagatgttcatctgccgtgtcttgttaaggctctagccacaagggagggtgagggtagaagaaagttgattcctgaagaaaaaaagaaaatgaaaagtcattgtaatgagctgtttttatatttttaaaagttgctatttaaaggtt

SEQ ID NO: 10257 - DNA, 625 bp, Canis familiaris
ccgtcaccaccaccagcaggcctggcaggcctgtcccctgtcctcctgctcttctctccctccagctccccaccaccgccacctggggaccttccactttcaccctctgcttctctgctgccctgggaccccggtggcccgaagggaccccaccacagtctgttgcccctcctgccgaagggctacccccagtagcgtctgggggcccttgggtggcctggctcggagcccctctgcacagtccctgggatctgatcctgaagaatatgccagcagcggcagcagcctagggggatccgactcgcctgtcttcgaggctgggatttttgggacaccccagccacctgcagccccccggcgactccccatcttcaaccgcatctctgtttctgagtgacaagtgcctgcccagtacagatcagctggattcaagggggccatttctcttttgctgtgggttccacaggggccccggggctgtggggaactcgggggactcaatcaagtagcctccccctaccttccaaagtgcattaacccactcccctgaccccacgctggggcaggtccccagtgtgcaagatctgtgttcatggtgttggggtggggagttttctgggtcttg

SEQ ID NO: 10258 - DNA, 614 bp, Canis familiaris
ccacggagggcatggtcaccacatgccggatacttgatgtgcactctcatgtcacccagataccaagagaccacaggacgagagtggagagtcaactaacagaaccaccaacagagtcaatggctgttgataagggagcacaaggcagctctatggaccagtatataatcttctggtgctggaaccaattagatgtcattatgcaaaccaccctaagacctagacttggactttcagaaaagcgatgctcttcataaccatctgaacactggagcaattgaccccagtgtaaaacacaagactgaaacttgtagacaaataaccccaaggggaaaatgtaggtgactttgggtttggcagtgagtttttagatatgacaccaaggcctggttgagaaaagaatcagattggtaagtaggacttcgtgaaaattgggaactactctgtgaaacacatttccaaagaatgaaattagaagacacagactaaaagaaaatatttgcaaaatacatatctgatgaagaaaatacatcccaaaatatacaaaccagtcttaaaactccacagtaacacgccaacagctcagtcaggaattggcccaaaaaaaaataaaa

SEQ ID NO: 10259 - DNA, 167 bp, Canis familiaris
  misc_feature (1)..(1): n comprises a, c, g, or t, or includes no nucleotide
nttgggcagccccacgggctgggacatccccgtgggcgccctgctgcggaggggcttcctccggcccagggactgcgacgtcctcacacgccgtgagccagttcttcagcgccagctgcgtgcctgtcaacaaccccagaactacccggcctcgctgtgcgccctct

SEQ ID NO: 10260 - DNA, 626 bp, Canis familiaris
  misc_feature (1)..(1): n comprises a, c, g, or t, or includes no nucleotide
nctgggacccagggtgctgggtccctccaaccgtacccctgagatcaggccacctgccagctccactgggcttggcacgtttctggcacgcggggcgcacgcagcccggccgggggcttcctctgcgggagaccccatccgccgccccgcccgacgtgagcctgtcccccgccgggagggagaggggtgcgggtcccactcctgggggcggccaccacccggatgtgcacgcatggctcactggacgcagccactcgcccccagaggcacacgtgtgcacacgctcccacaccctccggggcctcaccgcccggtgccggggcaggtgcaggggccagcgctgccacagcctgggtcccgactccgctctgcccctcggtggcacgggggagaggccgtgtctgaggtgaccctgggccgtggccgtgggaccccctcttcctcctcgagtcctcgagctgtgaggctccgctcaagtgcccctctgcttctgacgtgtgacacaggcccttatgttctcgactttccccgagaagccaaataaaccgtgtgaacagccccaaaaaaaaaaaaaaaaaaaaaaaaaaaaaaaaaaaaaaaaaaaaaaaaaaaaaaaaaaaaaaaaa

SEQ ID NO: 10261 - DNA, 501 bp, Canis familiaris
  misc_feature (1)..(1): n comprises a, c, g, or t, or includes no nucleotide
ncggccacaatccgaccacctgtgggaccggactcggccacaggttcccaacagtggtatcaccagttcctctatatgggtttcgacgaagcggaaatttgaagatgacatcacttactggctgaaccagagatcgaaaatggggcacgacctatgattactaccagcgtcactatggacgaggacgccggccatcggtccccagagcccctacagcttcaggcatggagccaagcgtcaactatcgatgactatctgaccaaccacccctcggccctcggcgccccggccgcggaggtgacccactgggctgccttgcaccaccgtggcttccgctgggctttactccagcagatcttgcctaccccctttctgcagccaggacaggaagagttaaaccatataaatgcctttgatatttcatgccagtgcctaacctcgcatttcatttaaaaaatagaaataaaagccgctttgttaaaaaaaaaaaaaaaaaaaaaa

SEQ ID NO: 10262 - DNA, 604 bp, Canis familiaris
gcttctgatccgggactgcctttccagaggttggttgagggagatcgcccaggatttcaaaccgatctgaggtttcagagcccgccattggcgcgcttcaggaggccacgtgaagcgtacctggtgggtttatttgaagatactaatctgtgtgccatccacgctaagagagtcaccatcatgccccaagacatccagttggctcgccggatacggggagagagagcttaagtgaaggccgtttttatggtgttttgtagtaaattctgtaaaatactttggtttaatttgtgactttttttgtaagaaattggtttataatatgttgcactttgtacttaagtccttccatctttcactcaaggatgaatgcgaaaagtgactgttcaccgacctccgtgatgtgagccctgttgcttccgggagttgaaccaggttgcttaattatgccagaagggatgggtgatatttcttgcttctcatgatgcatgtttctgtatgttaatgacttgttgggtagctattaaggtactagaattgataaatgtgtaccgggtccttttgccaataaaactggttatgaccttgaaaaaaaaaaaaaaaa

SEQ ID NO: 10263 - DNA, 310 bp, Canis familiaris
ttcgtttgagaccgaagtgtcccaagcaagagccatctggcggtgaccagtatctgcggtgtttccaccccccctttatacacactggccgttcctctgaagccccccagtcccacttccttgtggggggagggcaggcatttcggagcctgtggaaggagaggactcgtgtctgcaacccatttgccaaatcggcggcagctcctccatccccaagctggagcgccattcggcacgagccaccggcgacctgcggtcaagaatatagcctagccacgtttgccaaaagtatttttaatattgcatctgc

SEQ ID NO: 10264 - DNA, 635 bp, Canis familiaris
gcagtcaggtaaagttctccccaactccctgcaaaatttgtcctatcaaagtcccacccaagactgtgaagttaagacatctgaaatcataccttcatttcttccatctgagaacaggtcctgccaggagagtttacttgtgttactttccccaattggaaagcacatcccggcattgggtggagcttaattctgtgccagaggaatgataacactgtagactgatgccgtttgaaacacttctcctcccacgtgtgtctgtgtttgtgtctgtccctgtgtccttgtgcgcgtatgtctgtgtgtgggtgggtgtgtgtttgtctggccactggggggagaggtatctgtaaagtccgttctcttctctcctgtagggcggatacgcacgcctacagatacgcacagcccgctactgccaccgcggccaccagccgccgccgctgccgctgccgcctacagcgaccggttatggcccgggtgtaccccgccgacccctaccatgcccttgcccctgccgctagctatggagttggcgctgtggcgagtttataccgaggtggctaccgccgatttgccccccctgaaaaaaaaaaaaaaaaaaaaaaaaaaaaaaaaaaaaaaaaaaaaaaaaa

SEQ ID NO: 10265 - DNA, 645 bp, Canis familiaris
ggacaccattcgccgccagaatgagggaggatagtccaaccctcttaccctgcccaagtttgtccactcttccacggcagctatatatctggaagatgtccttccccagctgggcgttgagagaagtcttcaccaaccaggccgacctgtcgagagtcacagggcacaagaacctggccagtttccccagatagtccacaagaccctgctcgatgtgaccgagttgggcaccgaagccgctgccgccacgggaagtaaagttgtttttttatctggaaagatcggcccactggtcactgttcgtttcaacagaccctttctgttctgcatacaccaccaagatacggagaacatcctcttctggggcaggtcacccacccccatcaagcctaggcctccccccgcagaggtggggcccctttcagaggtctgtgggtgcagcctggcctctctgcacccgaggagccacgtgccaggctctgccctgctcatcctttagaaggtgcccgtgactacctgctggcttccagggagcctgtgggctttttgatctgaggccctgaggtctccagacagccataaactatctttcttggactggaaaaaaaaaaaaaaaaaaaaaaaaaaaaaaaaaaaaaaaaaaaa

SEQ ID NO: 10266 - DNA, 657 bp, Canis familiaris
  misc_feature (437)..(438): n comprises a, c, g, or t, or includes no nucleotide
gaagcagtctccggccccccgcctgccgacttgtatcatgccctgcgttggtacaatcacatcaagtcttacgagaaggaaaaggccagccttccaggagtgaagaaagctttgggcaagtatggccctgctaatgtggaagacaccacaggaagtggagctacagatagtaaagacgatgatgatattgatctcttcggatctgatgacgaggaggaaagtgaagaagcgcaagaggctaagagaggaacgccttgcaccgtattgagtctcaagaaaggcccaaaaacctgcacttgttgcccagtctttcccataattactatagaatgtgagaaacccttgggaccgaatgaagaccaagaataatggccaaaaattaagaaggaaggtgccgttcccggaaagccaatttccaaggcacgatggcttggtcnntggggctcttctaaactagttccacgtgggatatggaattaaaaaacttcaaatacagtgtgtagtggaagatgataaagttggaacagatatgctggaggagcggatcactgcttttgaggactatgtgcagtccatggacgtggctgcttttaataagatctaaaattacatcgtagatcattgtccttaaataaaagcttaaaagaccaaaaaaaa

SEQ ID NO: 10267 - DNA, 576 bp, Canis familiaris
  misc_feature (1)..(1): n comprises a, c, g, or t, or includes no nucleotide
ntcccttcagggccgtagctgaacccggcattcagctcaaggctgtgaagtcctccacaggcccccggggagcagctgcggaatgcactctggcacacaggggacacagcatcacaggcgcggctcctgtggaaggacccccgcaacgtggcttggaaggaccagacatcctaccgctggcttcctgcagcatcggccccaagtgggctacatcagagtgcggttcctaccgagggtcctgagctggtggcccgaccacgcaaccgtggtcctggacacagccatgcggggtcgcccgcctgggggtcttttgcttctcccatgagtacatcatctgggcccatctgcgcctacccggctgcaatgacaccataccagaggactacgagactcagaggcttctgcaggcctagggatgggggctggcggacccattgctggaagatggcaccatcgtggctaccctctactgcaacaacagggagcttggcacccggctccatgaggtagctgccctagaggggctcagaaaggaccaaaataatagtgctgtgtggtggaaaaaaaaaaaaaaaa

SEQ ID NO: 10268 - DNA, 589 bp, Canis familiaris
taggagttccatggctcgctttgagggccttgaggaccatatctgcctaccatggagtccccacccgtttcgtccccaggccctccggtttcttaaggaattgcccaatttgggccaaccaagttatggggggccaataagaaggaagaatcccagccaaggaagcctgggagctggtgcctggctcccaggtacccagaaacagggtgtcctgctttttccccctttgtgacatgttttttttgtccccatgaaatacctagttgactcctttttctccttcccaaccctattttcatccatggcccttgacgtcagctatccacttcagccattttcctcctcccccagtgttacccctcctacgctaaagcccaccagatcattcttccctcggtgcttgtgccaccttgcaggaactggcctggacttctggcctgcagagcctgcccctgagctctggagcactgccctgaagcctggtgtgacctggtgtgcccatgttgctcccccggggtggtccctgcccagccctgctaatccccagtaaagccttgagcactaaaaaaaaaaaaaaaaaaaaaaaaaa

SEQ ID NO: 10269 - DNA, 106 bp, Canis familiaris
atctggtccagttgagatttttaagaacctcatttttaatttgtaactaaaagtttaccacttgattttttccaaaaaagtccaccaacggccagcccccgttaat

SEQ ID NO: 10270 - DNA, 652 bp, Canis familiaris
agtacatgaggcgacaacaattgcaactaatggaagacatggatacagtaatccaaccccgtcctcaaatagctctacccaaaatcagcgccccaaatctattcacagagatcatattgagtctccccaaacaccaataaaaggtcctccagtctctagcctttctttggcatcactgaacacaggtgacaacgagagtgtgcattcaggcaagaggacaccaagatctgagtctgtagaaggcttcctcgtctccaagtcgttgcggcagtcgaaatggggagaaggactgggtaaatgcatcgacgacctcttcagtagcttctggaacagaatacccaggtcagagtctacatttttagggagaccactttaccacagtcatgagaacaaatacaggctctactaatgaaagcttcatgggctcgtctcttggtctagacatggagagtgatcaggaacacggagtggcagggggactccctgggtggccgcacgcggtttggcgcctgcctttggcccagggcatgatcctggagacctgggatcgaatcccatgtcaggctcctggtgcatggagcctgattctccctctgcctgtcgtctctgcctctctctctctctctgtgactatcataaataaatacaatat

SEQ ID NO: 10271 - DNA, 412 bp, Canis familiaris
aaaatggttcaggcacggtctggaaactgcagttcctcaaaagctaagacctagagttgccatatgaactggcacctccatcccttaagtgtcaccagagaagtgaaaacattacacaaactctgtatgcggatgttcatattggtagccgaaaagtggaaatagcctgatgtccatcagctgatgagtggatcaaatgaaaggtggcctattcatatagtggaatagcattaaaaaggaacagatgaaaaaaacattgaccatgtggacgaaacatgtttgaaaatatgcaagtggaagaagccagtcaccaagacctcctagtgtatgatttggcttacatgaaatggctggaacaggcaaatccactagagacagaaggtaggctaacggttgccgagggctggaagga

SEQ ID NO: 10272 - DNA, 654 bp, Canis familiaris
caccgcaccgtgccgggcgtcacgttcctccttctcgtggtgcttccggctcccacaccggtccttggcccttggccttctgtcttcctggccttcgcaagccccccccctttctggccaagttccgggccctggcccggtccaagtgccagccccttgtccttctatggccttcccagaaccaggattctttcccttcttggcctccgcctctgctcgtccctgtcccctcgtccacgtgtcccgtctcatcctccctctcctctctcacatctcccagctgggtccgctgtctgtggcgcggggcctctgctcagcccctacccaggcaagccccggggcagagggcagctgcccccaagcctggacagtcctggaggaggtcagcaggtggagacgatgcaccctgcatgcactccgcactccaaaggggagcattggccccggaaagggcccagcctcccactggagccccagccagctttcatcgtccccctctccccacgagatggctagctctcccctcccttcgccttctggcccctggtatggtgggggtttctaacgatcacacccagcttgaggaggggctgcttctgaggtcggttgttgtctttcaattaaagaaacactgtgcaataaaaaaaaaaaaaa

SEQ ID NO: 10273 - DNA, 393 bp, Canis familiaris
gaattgatctacaggctgtggttatgcccaagattcaaccatagaagcgaattgcccctgaccagattaacaccattgattgctccggtctcttggtaaatatggcatcatctgcatggaggatctgattcacgagatctatagccgttggaaaacgtttcaaagaagccaacaactttttatggcccttcaaattatcttctccacgtggcggaatgaagaaaaagaccacccattttgtagaaggtggagatgctggcaacagggaagaccagatcaataggcttattagaaggatgaactaaggtatctaccatgattatttttgtaatctggtcagttaataaatgactactttcaaatggaaaaaaaaaaaaaaaaaaaaaaaaaaaa

SEQ ID NO: 10274 - DNA, 616 bp, Canis familiaris
  misc_feature (1)..(1): n comprises a, c, g, or t, or includes no nucleotide
  misc_feature (507)..(507): n comprises a, c, g, or t, or includes no nucleotide
ncaagggaccaccagttatgtcaacttgcccagaggcggtgggctaaagccacgcccccccacaaggcctccctgttactatagcatcagaaactgtcacatctctccccttccggagagcagggcttgcactcttcccctagaacctactttgaaggcaattagaagctttgttttcatttccccctggtatttgtcttgccaggatggttaggtacacaaaggacgctttattagatcaactgagagaggaaagagccaaaccccgcttcttctggtgatgaacatcctatgtttgtagagcgaagccaacacagctcaggcattctatgtagtgactgttcaatggtagtatctggtgatcaacatttcttctcgtcgatagtgagatactgccgcataatatatgagcacaggctctatattgctacatcaccctctgctccacatgtcacaaagctttcccgtgccagttaccctttcatttttgaaagcaatttcactgcntaaatataaattgtatttgtggggttcatagttatataatgctgaagggaaccactctttcgttgaaaggtgataaaagttaaataaagactgtctccacagtaaaaaa

SEQ ID NO: 10275 - DNA, 129 bp, Canis familiaris
gtgtcgtgtaatggcaacttggtaagccggtagcgtggtggcctctgggacccagtgtatattcccctgcccagtgaataaataataaaacacccaaaaaaaaaaaaaaaaaaaaaaaaaaaaaaaaaa

SEQ ID NO: 10276 - DNA, 292 bp, Canis familiaris
cagagaggaggaaaaaccggaaacgcggacgcgagggaggaaggaaaaggaccaagaaagaagaaggaggaaataaggaaggagaacccctgggctctggcggctccggggccgtgtgcccgctgcccggcctccctcgcccggtgggcagactggggcgggcaccagcgcaggcctgccgtctctgtccggttgagtcttgtagtgacgctcggtcgtagtggacgcgctcgtccctccctgtgttggtaataaaacttggaaagaacggcaaaaaaaaaaaaaaaaaaaa

SEQ ID NO: 10277 - DNA, 703 bp, Canis familiaris
ccagtgtgaaaatggagcacgtggtggcttaaattaggagaaataagcgatcttaaggcactttacccagcgagtgcgactcttttggtgtttttggtcgtcaatgtttccacgtttccctggggaagcttccaagattctccccaaactttagttgtttgtcactttctcaagtcgtagaaacttcttaggaatcgttaaaatcgtgaccagtggcaagtggataacttaagggacactccgcttagatattagttgaagagcaatgactctttgactagtccgttatgataaagaatgttgtgatagaagttaataaatccagccgcggtcctcccaccacgaaagtaatcaatcactgatggaatggatggttggtggtctttcttgtttgtttggtggtcatggtgcgtccattgttcatcacgttccatttcatctcaataggagagtctctctagataggggcacagtctctatgatttgggtctgtaacatgtaataaccgaattcagtaccctagatttatgttaagctattagtattttcttgatgaaaattaccctacctgtatttctcctaatttctggatcctgggctccttatgcagtctgaggaaggtattacagtcagaaccgtgtactgatgataaaagcctctggtagcaataaagttgtccttaaccttaaaaaaaaaaaaaaaa

SEQ ID NO: 10278 - DNA, 583 bp, Canis familiaris
tcatcttttcagtgccatttctcttcaggttaggctgtttgtacaaacttttgggagtccggggtggtacatcagttctctggaatccgccaggtccgctggggggtggatcaaccacaaccctgttcgggcttctcccctctctagcgtgtctcttgggaaaacgcacggatctcgggaaggctcgttctttgaccacagaggagggccacaaggtgtccaaggagccaagggtgtaggaaaaacttggtaaaattaggacaaaggtggtgttggtgaacttggttttgttttgttttgttgttgttttcacatttggatagctgtcacaagaggtctttccctcagtttccagcatgttcttccttttctccctttctcacgtttttcctcctattaatcaagagaaacttcaaagtccatgggatggtcggatctcacaggctgagaactcgttcacctccaagcatttcatgaaaaagctgcttcttattaatcgtgcaaactcttgccacgatgtggggagtttgacaaatctttcaaaataaaaagtaatgacttagaaactgccaaaaaaaaaaaa

SEQ ID NO: 10279 - DNA, 420 bp, Canis familiaris
atggttggctcttagagtagaagcaggttagaagcaaaagaataaatttgattttaggagaatggagatagagtgctctgggcatttagaaaatggaatctggagagataccctgggtacctcagttggttaaacattcaactcttggttgtggctcaggtcatgatttcatgggtcctgggttgagccactcatggggctccacactatcagtcggggagtgctgtcttgaagagtctatcactctgtccctcctcccatctctgacacatcgctctttttctctctcccctcttaattatgaattaatttttaaaaaaattaaattaaatgggatctggagcaccatagaagtgtctgtactgaagatttagaggttatcaacccatttgtaaatcaattagatttcctagcagagca

SEQ ID NO: 10280 - DNA, 421 bp, Canis familiaris
ctatctagatccgagctcgcgctcttccagcaccagccccctgggccttttcccatcatgggccctgaagaggagggggactcagctgctatctctgaggaggacgccatgctggcactgggctagtgcttcagccctggggaacaccagaatccagtactctccgggaggaggatttttatcattccagcccttctgggctttggccacaggcccgcctgcctggcaaggcccaccactgctcatactaccataaagaccagccctgtacacctgtccccaccagccagggttttgggatcagagttgagttggaaggcagccactcgcaacagcatgcctggccttgtcaatgctgcctctgctgcatttgcaataaaatctgcatgctggagggaaaaaataaaaaaataaataagat

SEQ ID NO: 10281 - DNA, 654 bp, Canis familiaris
gaatgaccacgactgtcttgcaagaacactgggtggaaagaacaccttgaagattgggcttaaggatctgaagaaagaggacctttgagctgcgtgtgccctgatggccaaaggaagtctgtggacaaggctcctgagtgcttcctagccaaagccccaaatcatgctgtgtgtctcaaggaaagacaaggcatcttgtgttagccaaatgttacttgagccagcagcttttgtttggaagaaatggaaatgactgctcgggcaagttttgcttgttccactcagcaacccaaggaccttctgttcagggacgacacaccaatcgtttggccgaacttctcagaggacaccacatataaatcataacttaggaggcagagtagtatcatcgcctgttgctaaccctgagacactagcggtccacacctcgcgacatctctgggagagcgccgcgacacttctcacaacaacttctttaaaattccaagagccggagaccaccacccagattggtgattgggagctcacgtgacccataagttccctcggggcctcactggcctgggtggtttgtctggtttcacagttcagcggtggaacctctgtagaacattaaataaacattattattggtgttatcttttaaaaaaaaaa

SEQ ID NO: 10282 - DNA, 669 bp, Canis familiaris
agtaaccccgtaagctgctctatgtgccagttcgtaatgtagcttgttcaagcgttttatgacattgattcaatgctatggatttcttgtgtgttcaaatgtttgtttgttgggcaactgtgagaagtaagtggttttgtgttgaaatagtgctgtttcactggacaagtgcgtgtgttcataagaggttcagatatgctaacacggttataaattggcgcatcagttaaaccctcctaaaggattctcatgcccgtgtccttttcaggcctctccaggggaagccctttggcctcaagtttctaatgtggcaaccgtggtaaggaaaattctgggtcccttggcccccacctggttttaacgattaaaagagttaaatttgttttcccgagggaaaatgttcagtgttttctaatgaaaattgctctttttgtaagtagtcttctgtctagtagtagtacttgtagatatcacccatgggcctttaattatttttggtcacattttccatagggttaacaccattttggcttaaaaaaaatataacttgattgctaattgagaattgctttattatgaaaaggaaatggttctgcctttgaatgtttctgttgggagaaataaaaagactttcatgtgaaaaaaaaaaaaaaaaaaaaaaaaaaaaaa

SEQ ID NO: 10283 - DNA, 388 bp, Canis familiaris
agctccatcacccctggccccacctgccacggctcctctcagatgaagctattgccaagacctcaagtccttcagaaccagaccagggtggccatcaggatggccacccttccataatcctcctttcctctgctccccagaccttgccacttgggagaccaacactctagagtaccctgccccaacccctggttcccggaagggttttgagcccaaacccccaattcttgcacccctcctcccctcccgccgcctgccaggacactctagcaggacactggtgctttgccgcataccctactgtgctgcacttctttccccatttttcataaatataaatgtatgtaaaaaaaaaaaaaaaaaaaaaaaaaaaaaaaaaaaaaaaaaa

SEQ ID NO: 10284 - DNA, 602 bp, Canis familiaris
aatccccttcagggcccgtagcgtggacccggcattcagcttcaaggctggtgaagtcctccacaggccccggggagcagctgcggaatgcactctggcacaacaggggacacagcatcacaggtgcggctgctgtggaaggacccccgcaacgtgggttggaaggacaagacatcctaccgctggttcctgcagcatcgggccccaagtgggctacatcagagtgcggttctacgagggtcctgagctggtggccgacagcatacgtggtctctggacacaaaccatagcggggtggcccccctgggggttttttgcttttcccaagaggacatcaatttgggcccaaatttggcgcatacccggggccaatgaacaccataccagaggactacgagactcagaggcttctgcaggcctagggatgggggtggggacccattgctggaagatggcaccatcgtggctaccctcactgcaacaaacagggagcttggcacccggctccaagaggtagctgccctagaggggctcagaaaggacaaaataaagtgtgtgtggtggaaaaaaaaaaaaaaaaaaaaaaaaaaaaaaaaaaaaaa

SEQ ID NO: 10285 - DNA, 724 bp, Canis familiaris
agtcggcgtcggtagctcggttatctccggttcctagaggagtacttgagctccacgccctcagcgcctgaagctgcttgacgcgtacctcctgtacatactgctgaccggggcgctgcagttcggttattgcctcctcgtggggaccttccccgttcaactcttttctctcgggcttcatctcttgtgtggggagcttcatcctagcggtttgcctcaggatagcagatcagacccacagaaccgaagccagatttaccaaggccatgctctcctcagagacgagcgcatgtccgctgattgtatctgtctggtccagcacgcatccatgccaccttcgcttgtatatgaagtatcttctgttgtgaagttattacctccctctattatctacattcataggtggaggtaggtggggagaacgtaggaaagaatgcttcactttgaatgatttccccggggatgagacacttgtgagagtgggcaactgtggacatgtggattttcttcaagaaaaataagatttatacttaaatactgattcttgatttcaaatgtaggtggagagcccagagaagtttccttgcttctgtgttagagcagctttgtaatgagcatttattaacatgacctctgcttcccattaagtgtaacctttttgccttccaaattaaaaaactccatgccactccttaaaaaaaaaaaaaaaaaaaaaaaaaaaaaa

SEQ ID NO: 10286 - DNA, 621 bp, Canis familiaris
caccgtgtcggagttggagccccggggagctgggagctcggaggccgtcccgctgaggcccggaggccacgtccgcatccgacaggaagggaagaacatattctggtgctgagcgagcttgcgcccggaggacgccggtgaggtccgcttccaggcgggacccgcccagtccgtggctcagctggaggtggaggccctgccttctccaaatgtgccgccgcccccctcgagagaagaccgtttctggtgggccgcagggcggtgctggaggtgaccgtgttcccgctcggggggccacgtgtgctggatgcgggagggggtcgagctgtgccccggagacaagtatgagctgcgcagccacggccccacccacagcctggtcatccatgacgtgcgacctgaggaccagggcacctactgctgccaggccggccaggacagcgcccacactcggctgctggtagagggtagctaggaggaccgaagcaggccaggcaggtgcccccggacagcttggaaggcgtgtgcccacaccctgggcaggggtggggaggcaggggaaccagaggtgtcgggagacaataaagtggtacagtcctgtcaaaaaaaaaaaaaaaaaaa

SEQ ID NO: 10287 - DNA, 579 bp, Canis familiaris
ggggcctgcgcaagttgccgtaattggagcctggcatccctgcccgatggccttctctgtggctcgggctgggcagaaaggcttaccatcaccgcactgagatccaccagaagatataccagattggccagggctatctcatcaaggatggcaagctgatcacagaccacgcttccactgattacgatttgtctgacaagagcatcaaccccctgggtggctttgtccactacggtgaagtgacccatgactttgtgatagctgaaagactcgtgtgtgtgggcacccacagagagacgagatgtcttgacatttgcggcaagatgcccttgtgggtccgacccaacggggggcccctagaggaagattgaccctgaaattcattgacaccacctccaagtttggccatggccgattccagactgtggaggagaagaaagcattcatgggaccacttaagaaagatcgaattgcaaaggaagaaggagcttaatgtcaggaccagattgtgcagctggtgggatctcaataaaaattattttccagtgaaaaaaaaaaaaaaaaaaaaaaaaataaaaa

SEQ ID NO: 10288 - DNA, 226 bp, Canis familiaris
aacttggctgaattgtgtttgtttgtgtcccggtgttttatggaagatagaacttgcaagcaatgaaagcgggtatttacctaaaactatctctatgcacagtgttgaaggagtcacctggctcctcttgactgcttatagtaaattgtcagaagagagaaatgatttaaagtcagagagttcataaaaaaaaaaaaaaaaaaaaaaaaaaaaaaaaaaaaaaaaa

SEQ ID NO: 10289 - DNA, 159 bp, Canis familiaris
gcctgctctggggccccattccagcttggccgccgtctgtgaccttgggcaagtcactcgacctctgtgtgcctcaacttcctcctctgtaaaacggggacagtccctgcccctccctacctcacaggcatgttgtgagaataaatgaggtaacgcgta

SEQ ID NO: 10290 - DNA, 595 bp, Canis familiaris
aaaggtgtttgtttcaaataccccatggatgttgcgtcccttggtgttggcaagccaagccccttgatgacgctttgttagtacctgtcaccacatcccccaagtgtgctcctccagccaaagttcacagacctgtctgaacaagacccgtataatgcagggaagttgcatgaacaactgcaatggggagagtccagaatagccaggcctaccaagtctcacagtacccattctccctttgaacattccacgttgctgtaatgtccaccatcgctttgtccactcatgctgcaagatgatgagaagaagatattcatcacagctgatattagacacaccccagaaaagagaaataaaaatgagaaaaatctccctctctcccccttttttagtttgaccaaaaacgtccagttaatacttgggcggcttgaaaatgcagtagtgaatgtggaacgagcctgtctgtatatctggtagctctttcttgcttcgtttttccttaccagtatttctgcctcacgtttgcttctgtgacggttatattgcctagcaagcacacctgtggttgtgaaaatagaatagaaaaaaaaaaaaa

SEQ ID NO: 10291 - DNA, 617 bp, Canis familiaris
gagcatccgctccacatgtacctacgtgggagcaagctaactgtgaaggagttgacccggagaaccacctttcatccgggtcacccagcaggtgaaatccaatcttcagtgatgagagctagacctgagcagctgtgccctctcaaggcactagcaccgtcccaagtgggttcctcacccatccgaactactatggctatttatcattcaagtcatttccagcttgtcgtcacctagctgatggggctgcctcgctagctagattcttgtagcttctgtactacacattaatgacgcaggggacacactggggggagaaacgagaggacgagccacagagtctagagaaatagtgagagcaacatgctcaaaggacacatctggggacccagcatcctgaagattattaaaaggaaaagatgctggttcctatctaggtgtttaatgtggctttgatctggaagagttaggctcttgaaatcatgttttggtaatgagcttcattaaataggagctttgaatacctaaaaagctcagaagtgttgacgcattttaaatatctcaataaagagacctcagtgactttaaaaaaaaaaaaaaaaaaaaaaaaaaaaaaa

SEQ ID NO: 10292 - DNA, 461 bp, Canis familiaris
ccatgggtcacccaggtcccatgcctccacatgggatgcgtggacctcctccactaatgcctcctcatggatacactgggcctccacgacccccaccctacggctaccagcgggggcccctgcctccacccagacccaccccccggcctcccagttcccccgcgtggcccaattccgaggccctcttcctcccataatttctaattctctcacctcctgttctatcttcctaatatcgttttcaatttccttgggcccatcagaattgccgtaggtcccctagaggttaaggcactaatccctctcaggtcttttttttttttagtgtaattttcacaggaggttttattattgtttctgtgttggtcctaagtgtttttgcaaatgcacagagaaaataaaactaaactccttgttttaaaaaaaaaaaaaaaaaaaaaaaaaaaaaaaaaaaaaaaaaa

SEQ ID NO: 10293 - DNA, 555 bp, Canis familiaris
ttctgccagtagaatgttcatctacttatagtgtgtttatcctaggagttattttcttgtttgttttctgtcttttggatcttggattgatgactgccatgatagttttgctttgatgtgtttctaaatgtagttgcacatggttcagtaaaaataatgctgctatcaagtatgcaaatattgaagtatgatggtttgacagtatggcagtgttgtagcagcctctttgtttctccctgtttcctctttttttaattgttaaaaagtcacttttgagtttttcttcagtcttcaatgatgagagcaatattaagaagacacttgctatctaatttttaatctttttaaataaaaaattcctatgttcagtagcatggttaatgctttcgtttagctttcccctccgaactgtatacacttggcttggaatgttcacaacttgcgtgtgtggcagcagaagataattcccatattctacattgctactgttttgtataaaataaattggtaaagattgaccaaaaaaaaaaaaaaaaaaaaaaaaaaaaaaaaaaa

SEQ ID NO: 10294 - DNA, 663 bp, Canis familiaris
  misc_feature (1)..(1): n comprises a, c, g, or t, or includes no nucleotide
ngtgccaccgtgggtcaaccagccggcgcggaaatccgcagacgcaaggcccgccaggccaaggccccacgcatcgccccgcggcctgcgtcaggggcccatccgccgatcgtccgctgccccacggtgaggtaccacacgaagggttgcgggccgcgcagggggcttctagccctggagggagctctcgggtggtccggcattctacaagatagtgtggggcgcggaccacatgggcatactcggctgtgacaccccgcgcgcgcgcgggacacagtgccaccgggagatgtcccccgcacgagcacacaagcggcgacacgggtctcacagggatatccgcgtctcaccaaagttaaccctcttttcccccaggaacccttcaagcccccaagagaaggggtcggaccagcgtccagctggaagaactcaaacgggcaacacagctgacaggaccagtcatgcccatacggaatgtctacaagaaggagaaggccagagtcatcacagaagaggagaagaacttcaaggcatttgccagcctccgcatggcccgtgccaatgcccggctttttggcatcagggcaaaaagggccaaggaagctgcagaacaggatgttgaaaagaaaaaataaagtgctattggcaaaaaaaaaaaaaaaa

SEQ ID NO: 10295 - DNA, 595 bp, Canis familiaris
gcgaatcccttcaggccgtagctgaacccggcattcagctcaaggctgtgaagtcctccacaggccccggggagcagctgcggaatgcactctggcacacaggggacacagcatcacaggtgcggctgctgtggaaggacccccgcaacgtgggttggaaggacaagacatcctaccgctggttcctgcagcatcggccccaagtgggctacatcagagtgcggttctacgagggtcctgagctggtggccgacagcaacgtggtcctggacacaaccatgtcggggtggccgccctgggggtcttttgcttctccccagaggacatcatttgggcccatttgcggctaaccgggggccaaatgaaccaacccaaaccacaagaaggaactacgagacctgcaggaggcgttctgcaggcctagggatgggggtggggacccattgctggaagatggcaccatcgtggctaccctcactgcaacaaacagggagcttggcacccggctccaagaggtagctgccctagaggggctcagaaaggacaaaataaagtgtgtgtggtggaaaaaaaaaaaaaaaaaaaaaaaaaaaaa

SEQ ID NO: 10296 - DNA, 639 bp, Canis familiaris
aaacggactgacgggtttgaaatgaagatccttcatgttcttaggaagtaaatatcttttgaatcagaaaaagtgttgggaaagaaaatatgtaactaagtgggctcttcagaagtggggagatcattttttgtactttgttttttaatgtttactttagagagctaggaacgtacatgctttcaggtagaaagcctttatttatttttggaaattcagtaaaaggcagttcttccttaaatttagttaatctgtctttaaaagaaaattaaatttaaccattttgctggattgttgtatttcttttggagcataaaatttgtgctattgatgaccaacaaacataaaatatggtaattggaattacctgtgcacagcagtgtacctatgtataatatagtaatgtagtctcagttctatctaaaagtaatcatggaaatgagtatgctttacctaaaacttttccaaacttaaactgtatttttgaatgtaaggaatttgtagtattgttagcttgttgagcagggacttgctttaaatctagtttccagtgctcaaaaacaactgcatttacttgaagtgcatgaacagattatcactagtggactgaaccaccatattacgcaagtatttgctgca

SEQ ID NO: 10297 - DNA, 586 bp, Canis familiaris
  misc_feature (43)..(43): n comprises a, c, g, or t, or includes no nucleotide
acggttaaagtgtgggccaagacctatggattcgagttaccgngtcacacgatagaccctcgcgcctccgccatccattggacaattgcgccccatggacatagggagggtcccggagcaggagatcttggtcttggacatcggggcctgtcctgcttgcttgtaacatacccgtgaccctacaactacacaatccattgccaatccagaggacccaagtactttccagtcccagtcactctagggctctgcactgaatggctgacctgacctgatgtccattcatcccacccgctcacagtgtggacttttctcccctctttctaagagacctgaactgggcagactgcaaaataaaatgctcggtgttctatttatttattgtcttcctgtaagacctttgggtcgaggcagaggcaggaaactaactggtgtgagtcaaacgccccctgagtgactgtccccagcccaggcaagaagatctcccttcaggtgccgggcgcaggaactgcgtgtgtcctacacaatggtgctattctgtgtcaaacacctctgtattttttaacacatcaattgatattcaaaa

SEQ ID NO: 10298 - DNA, 648 bp, Canis familiaris
atgaagtgctgccttgccgtgcgcgcccggccgtctgtctggttgtgttccgattgggtggtgtgggtgttgttgttgggcaccagccatgtagtctggatcccagagctgtggggcccctgtcagtacgttggtagccccagccgtgggcttggcagcgcgatcaggttgtgtggtcgcatggacccctcagcgccgaggtagtttccgtcctcctgcccgcccgccacccctggtctgtgcttcgggcccgtctgctcaggcaggacctctggtctgtagcccccaccccgggccaggctgttttctgggttcctgccctggcctgggttcgggatctgggtgctgctggccccacttgccttcctgtgtaggcccatcgaggaaggggccggccaacgcctaggacaagcaggaaggagcagaagcaggaagggtcgggccaggggacagaagccagccttgtgatgccgttggggtcattctggagctcgaccccagctaggagggcattgactggtccagggtcagggaaggaggggagggggtggtgccgtctactctgcagctccccgctcttgagcggcccggagccaaaggtgacttgagaatacagttgtttgggcctctttgaaggtgagagacaga

SEQ ID NO: 10299 - DNA, 604 bp, Canis familiaris
gatggcaacgtttaagagcccccccctcccgttttacacatagtatacaagagtgtatacctgagatttcagtatgaagtattaaattggcatgtagtcagagaaagaagggaaagactggtgcttttgctaatgtgtatcaactatgctctgtccatcttggtgttgaagtgttatttctgccagtattataaaacgtgtaacagattcatcccgtctaatacgacatttttggaaagtatttatgtaaatcttttgtgccaacagttaagttccctcttgttcagtatctttagtcctacattttgatcttcagatagatcagtttgtcttcataaaacccaataatgaaccttgaatggggcagctctttgaagagatgcggttggaaggcctttcgtgtttcagaccaggacatggccttcagatagcttcttctcggtcaagtttcatgtgaacggtgccactgtatatatgtgattcagataattttcccatgtttcctatgcagtttaattgtatttgttactaaatagcttctttgtgcaaatgcagtttttacactaaaaatactgtttatttgtattgtaatgcattataaatt

SEQ ID NO: 10300 - DNA, 535 bp, Canis familiaris
ccgacttactgaatggtgctcagggagcaagagtgttctcttagaggtcaggatgtttagccataacagggccaatcctccaacagtcagggtagagtactcttaaaggcactttgttaaaattgctgaaagcgggtgccctcccactttctcagtgtctgattcagggatctgactttgttttctcaaggcagaattttctccagtttgtctttgttttcccagcaatactgctatagaaggaagatacttcctgtcattcaccccgtttgtcatgtttcatatacttctgaaagaacctgatttctactatctgcatgtagaatgcagtagctgggctctttaaagcacaaagtgaatcttaaaagggtttaggagaaccaagttatgtaccagactaaactgcaacttttgggagtcttacagtgaataatactcgagagagacgaataccagaacctttcctttatattattcaactgtatgtgggcttccatatgcctgtaaacacatgttccctggaaaagaacctgct

SEQ ID NO: 10301 - DNA, 236 bp, Canis familiaris
cactcggcccaccatgacctgtccctaatctgatgtgcactctcttctctgatgtgctttcctgtccagcagagggagggctggaccatctccatccctgtctttgtttcatgttgggctgagtgctagtgccttacttttctattctatatgagaatccagggcagccctggtggtctctgtggtttagcgccactttcggcccagggcctgatcctggggacccgggatggagt

SEQ ID NO: 10302 - DNA, 687 bp, Canis familiaris
  misc_feature (277)..(277): n comprises a, c, g, or t, or includes no nucleotide
tcaccagtgatgagtttctgctccgcatgtctgaggatgactgggacagagtcatagctgtcaacctcaagggcatctttctagtcactcagcttgcagcccaagcctggtgtccagtggttcccgtgggtccatcatcaacatcagtagcatcgtagggaagtgtagggaacgttgggacagaccaactatgcagcatccacaggctggagtgattggcctgacccacgactgcacgctcgggaggcttggacggttggtcagagcaacccctggngggtataacagaagggaatttgctgaagaaccccgggaatcccgctgtaacttctgttccttccccaggggttccaattccaccaccccaatgaccccaagaaagtgccacagaaagtgctggacaaggtgattggaatgattccgatgggacatttgggggatcctgaggatgtcgcagatgcggtcacattcttggcgtctgaagacagtggatacatcacaggcgcctcagtggaagtcactggaggtcttttcatgtaactgcctcacggaccctggactctgctcactcccccaccactccaaccggcctcctgctgatgaggactctgagttcccaggctacaaaaggcgcagcagtgtatggctctggaatgctgaatatgggaggcaggggtgcttgtgacc

SEQ ID NO: 10303 - DNA, 434 bp, Canis familiaris
tttactcatcgtgaagatcccttacgctctagttttatatgatgtgtatacacgagtaggattgttataatgaaattgagaggttgagcgccctcgtggggcactagcaacctggaatgtagagggctatcatcttccccttgtagaagccacgggctttctcttgtatgaggagagggcaaagtgattctagaaggaggagttggcctaactagcttccttactgccccttgggctaaccagccagaggattctacattatggaactgctgagccactgtccgaacagccaccaccttgactctacaaatggacccgtcaagaatagttgagaagcttggaaagatcacttgaataaattcttttgcattcagcatggactcgaccagcatctatggagattatttttttgcttcattgttctagaaattgta

SEQ ID NO: 10304 - DNA, 108 bp, Canis familiaris
tgcttccctcctgtcaccaagtcaccaccaccaccttggctttctggtagttccccataacatgccaacccctgaatgattttcagggtcttcacgcctgcttctccc

SEQ ID NO: 10305 - DNA, 188 bp, Canis familiaris
gggctgcacccagctgcggtcagccctcggaaagcctggggttcttcactcctgctcgctcctcccaggcctcagagcagagctgaacgacagaacccctgcctcagtgggcagttctgccttccaaaggaagaaggggagtcaggggacctgtggggggctcaggcacaagcaacctgggcttggag

SEQ ID NO: 10306 - DNA, 600 bp, Canis familiaris
atcaggggaactcgacgcgagatgtagattctgtaaatgaaacccagatgtgtgtgatattcctgctgtgaggaactttaaagtttcaaacacacaagatgctttggtgtccatcgtggattactatgaaccgaggagacaacggtgaggagttacaactcagaagtgaagctgtctccttgtgacctctgtggggatgatcatggatgcagtccttgtgagagaggagcagcggccactccttgtcattctacagtcattgtcgtgttctgttttatgctgctgttctctatacagcagtggctgtgattcattttataaggactccatgtaacagttgacatttctggaagtcatacgtgattgaattgtcttcattaccaagtattgcttctatttttgaaaaacaatgtttttcttcttatggggttgtgggggatggtgcacaacaggtcctagtgtgtatagctgcataaatgctgtctttacctgacttgtgtagaacaaaaaaaaaaatatcagtcttgcagttgtgcgtctttatttccccccctcttaaaaatcatttatgggtgttttatggaggtcattttcccagaa

SEQ ID NO: 10307 - DNA, 551 bp, Canis familiaris
gacaatattatgttgtagctcattttcacaatgggctttcaataggagcagtgtttggccaatgatgggaaggattttgcccactggattccccgtttatgtctcagggtatactctttacgatacttgagcagaagattcacttgacaattatgtttgtgggagttatataactttctgtccctcgacatttcctaggtttatctgggatacctcgtcgatactcggactacccagatgcatatactacctgtaataccgtctcctctataggatcgtttatctcgcttacagcggtgatgcttataatttttatgatttgggaagcctttgcatccaaacgagaagttgctatagtagaacttactacaactaacattgagtgactacatggatgtccccctccataccacacgttcgaagaacctacatatgtgatcccaaaaataagaaaggaaggaatcgaaccccctaaaattggtttcaagcccaatgtcataaccattatgtctttctcaatcagccaaaaaaaaaaaaaaaaaaaaaaaaaa

SEQ ID NO: 10308 - DNA, 588 bp, Canis familiaris
tttttgaagtggaattacaggctgtgctgtgaagagagttcgtttagtgagcctgtaggatcctacaactttgatttaaagtgtaagaaaatgttggatatttgaggccaagttgttaatatatttctattgcagtatccttaaaaagcaaactgatacggaacgagaccgaggtaaccccaccatttctgtgatgggtttcctttgtgaaaatcttcgtgtgatggaagcactgtgttcagtccttaatcccctaccaggtgtagcatcatagtacttgggggaaagggtgtgtgcatatgggtccttccccagaagagcagggtggctgatttggctactgcttctacagcttgagtttgtccacttaagtgttctacactacagcagtgatgttgtgcagttccagctttgccagaagtttgtttccataagcgctctgtaggtttggttataatgaagattcacttgggaaaacagtgtgacttcagcctatgtaattaccttgttatgagtatgtaaaagtaaaatgcatgtgaatttattatatttgcactataaaggtatttgattaaaatagagacttca

SEQ ID NO: 10309 - DNA, 539 bp, Canis familiaris
ctgtggtttggcttttttctaaaaatggacacctggcagtcaagtatcatacgtgttccactgccaccaagaggaaagtttttactttactggctgctgcttagtcaaagagagataaaagggatgataattcctcgtagtctttcagactgtctttggaatatttaatggtctacagcactatgcaatatttgaaagtacacttcagaaaactgtgacatgaagattaatcaaagagtgaatggatactaaatcagcagagtggagttttttatgatgaggactcaggcattgctgaaggagttaaaagtaactctggacagtttgtttctgttccttttgcctggtatacagcaggtactcaataaatattcagtacttcagtatttaaatgtaagcttcagggtagccctggtggctcagcggtttagcgctgcctacagcccgggcgtgatcctggagaccccggatcgagtcccacatcgggctccctgcatggagcctgcttctccccctgcctgtgtctctgcctctctctc

SEQ ID NO: 10310 - DNA, 231 bp, Canis familiaris
cagagtcagtgtagaactggtcatagaagaagagctagaaatcagtagcatgatttttaaataacctgtctttgtttttgatgttaaacagtaaacgccagtagtgaccaagaacacagtgattacacacactatactggagggatttcatttttaattcatctttatgaaaatttagaattcattccttgtgtttaaagggaatgtttaattgagaaataaacatttgtg

SEQ ID NO: 10311 - DNA, 547 bp, Canis familiaris
  misc_feature (1)..(1): n comprises a, c, g, or t, or includes no nucleotide
ncccacgggtactcttcagttagccttctgtcacgcccccagagttctgccagcgactctctgtcgtgtgagggccagatcggacgtaagtctcagggtccaggggaggtttcagccctaactcctgagtctccccctccccgctgctcggggtcagacctgggttcccgtggcctcagggccactggggctcagcacggacagactctgcaccagcgtctccagcaaacagcaggccatggcgccctcaagcccgcgtcccggtgagccccgagaacaaaggtgctatcctgcagacccccccgtctactcggaagcctgggcactgggccttcggtggcacaaagcgaggtgttgcgtttttaaacgaaaatgacaagaacgaaacaagcccaaagctcttcttccttaggagagtgattggttctacgttttactgaaaaccctctttatgtgttagttttctgattccttgtgtttgctcactgtgtccacgtcagccacttttcagaataaaggtgttcattcctcaaaaaaaaaaaaaaat

SEQ ID NO: 10312 - DNA, 509 bp, Canis familiaris
cggcggatgggacatccgtcgtggagttgaccctttggatgcgatggtgatagcatttcgaaggacaatctttctctggcccggttgggcgctgcaatcacgtcctgtgtttggtggacttcttggttgtatccagacaccaaggtgggccaccatccttgcatgaacatggtcctgttgggcacattgggtgctatgatggccaccatctttggttggctgacataaccagtataccgttgtgcactgtgacagctcccacagcacgctgggttggccattgtcatccccgtctctttggtgtgagttgagtgagggatggaggtgagaatactccttgtttttttctggagcccattccccacctctggtcccggagaaaccagaatggactggctagggtgtggggaacttctactgaagtctggttcttgcctgggaagcgggatactggctgtgtttgaccattaaaggcactgtttctgcctcttaaagaaaaaaaaaaaaaa

SEQ ID NO: 10313 - DNA, 583 bp, Canis familiaris
gggccatccttcctcgtgccccagcctgcgccccctctggccccgcagagaccccgcctaggcctggcacctctgtctcatggacccacccgcggggtgtcgggagccccaccgaagggccaaggagggaggaggctgaggagcgtgaggcagatgccccccgccgcagtcaggcttctcctggcctcccatctcgtcgccttcttagagttttattcctgtgtccttttgtttgagatttttttcgccgtgtgtttattttttattattgttgtcaagagtaaggagaaagaaagtacccagcaaatgggcatttgtacaagaagtacgaatcttatgttgttcctgtcctgcccgtaagggttggggagagcaggcccctctctagggatccgtcagcgccagcctcgttccccgttccgtgttccgtgtcccgtgtcgcctcggtcgcccgtgtttgcgcttgcccatgttgcactgtttgcatgcgcccgaggcagacgtctgtcaggggcttggagttcattcatgtgccgctgccgcccacccacctgccttgtgagatggaaccgtaataaaccac

SEQ ID NO: 10314 - DNA, 232 bp, Canis familiaris
agggccgtgggacagaggttccccacggctgggcaggccgccggtctcttcttcagggcccagttcctcccggaggtcccctgagctgtccttggcggggcccccaggggcttcctgagagcccccggagttgtgtcgtgtaatggcaacttggtaagccggtagcgtggtggcctctgggacccagtgtatattcctgcccagtgaataaaataaattaaaacaccaaaaa

SEQ ID NO: 10315 - DNA, 122 bp, Canis familiaris
ggcattgtcgcctgcccggtgtcctgagccctttgccccctccgtccgccccggggccaggaggctcccatccgaccaatgtctgtaaagtgctctgaggtctccccagcacaagcaccctc

SEQ ID NO: 10316 - DNA, 555 bp, Canis familiaris
  misc_feature (46)..(46): n comprises a, c, g, or t, or includes no nucleotide
  misc_feature (56)..(56): n comprises a, c, g, or t, or includes no nucleotide
  misc_feature (67)..(67): n comprises a, c, g, or t, or includes no nucleotide
  misc_feature (90)..(91): n comprises a, c, g, or t, or includes no nucleotide
  misc_feature (106)..(107): n comprises a, c, g, or t, or includes no nucleotide
  misc_feature (122)..(122): n comprises a, c, g, or t, or includes no nucleotide
  misc_feature (152)..(152): n comprises a, c, g, or t, or includes no nucleotide
  misc_feature (174)..(176): n comprises a, c, g, or t, or includes no nucleotide
  misc_feature (182)..(183): n comprises a, c, g, or t, or includes no nucleotide
  misc_feature (198)..(198): n comprises a, c, g, or t, or includes no nucleotide
  misc_feature (287)..(287): n comprises a, c, g, or t, or includes no nucleotide
ataataaaaaacacaattgataaaatagagtgctaaaaaatgttcnaagtaactcnaagtttctccnttagaaactgagaactgtagggnngtgtcttggctggcnnttagttggtggagcngataaggcgttcttgatcttggtgagtgtngcaagtcgccagtggttgcagnnntgtaanngaagaagtttaagcnttgatagagaagtgagagagagaaagattaatgtaaaagaaaacccccaaaccctgacaacgtgaataaccatagagaagcgtaatagnaaaacaaaacaacaaatttggcagctataaatctaaatatattaataaatacattagctataaatggaataaattaaaacagattatcagaaaggaataaaagaaaacaagacccaatgctatactgtccataagaaactcgcttctaatatgatatatgtagattaaaagtaaaaaggcagtaaaagatgtttcatgtaaacactaataaaaagctgagacagctatgttaatgtagtaaaatagactttgagccaaaaaaaaaaaa

SEQ ID NO: 10317 - DNA, 460 bp, Canis familiaris
ctccgcactgtgtcctttacactggaagccacttagaatcgcgctcaggcgtggtcacgatggagtcaccctgtgcgctgagcttgtatgagcagcccttggtttccgatttcactaaggaactgagagaccctgaacaccttctgtttgttcccccttgccgccaagccttttgcccagccttctgggctgccaaccgggccaaggccctggcttcatggcaggcttaccagagcttggcccgagggcccatgccacctctggctccctgacaagctggatgtaacttgtgtcttctggccccttcaggagcccaggtgttgtgaggaatgaattggtcactgcatcctgtatcggttttggttccgagaaaagcaaatatcatttttggctgcattaaaagaagcatcatgtataaaataaaaaaaaaaaaaaaaaaaaaaaaaaaaaaaaaaaaaaa

SEQ ID NO: 10318 - DNA, 371 bp, Canis familiaris
tggatttaacaacaaaaatacaacaggaaaaaagtgggaccacattaaactgaaaagcttatgcacagcaaagaaaataaaaaggcaatctaatgaatataaaataagtaaaatatctgaaaagggtttttctttttttaaaggattttatatatttactcacgagagacacagagaaagagaggcagagacataggcagagggagaagcagattccatgcaggaagcctgatgtgggactcgatccaggaccctgggatcatgccctgagctgaaggcagatgcttaaccactgagccacccaggtgtcccgaataataaaatctttaaaaaaaaaaaaaaaaagattcttctccccttcttgaaaaaaa

SEQ ID NO: 10319 - DNA, 470 bp, Canis familiaris
  misc_feature (235)..(235): n comprises a, c, g, or t, or includes no nucleotide
tttcgtgtagctacaagatgattcttggcaagctgttgttggcctcctttaaattgtacttaccgtgagttcagtaattcatatgtacaaattcacatgtcaacaaaggctcctgaatgtagtagcagtggaagcctttagtaagttaaacttaatactaaaccatacctgctacttatcttcaattggtgatttaaaagtgagcttatgtacagtttgtggtgtatgtgttaancgatgtactttttaaaaagagaagaaagatattcagtcagatttattaggctggtgtttttgcaccctttttcaagtacaaagttgtactaaaattttatgcaagatggtactgtaacattccatattatctataaccagcctttgtaaacaaagggaactgattgataaacttgtgtgtataataaatggtacagttctgtataaaaaaaaaaaaaaaaaaaaaaaaaaaaaaa

SEQ ID NO: 10320 - DNA, 516 bp, Canis familiaris
agccctgggcatgaagggtaacccttccttagagaagtgccgggccctgaaagagcggcgggaggaggcagctgaggtggcctccttggacattaccaacatcatcagcggttcaggccggccacgcagacgtacagcttggaacccgtcaggagaagctgaccccccaggggagctataccgccggactttgggctcagatgatgagcagccccgtgtcccacccccggattggtcacatatgcgtggcatcatcagcagtgatggagagagtaactgaactcctcccgttccaagaggctttccacttgtagaaggcagatatggcacttgcacccccctgcccccattccaatctttgcctgcaaagcagtaacagctttcttcaaagactttgcagcccccacggacacaagttattgggatcctaattctcattagtttaagttgtttgcaggagtttattttttaagcctcaataaaggagttgttttaaaaaaaaaaaaaaaaaaaaaa

SEQ ID NO: 10321 - DNA, 639 bp, Canis familiaris
  misc_feature (503)..(503): n comprises a, c, g, or t, or includes no nucleotide
  misc_feature (511)..(511): n comprises a, c, g, or t, or includes no nucleotide
gtgtacaagtaattgcgtaaattttgtgccccaagtctacagatttttctgatccagttgataagtattgtttcaagtattttaatagagatacactctgttaaaacgaatacatagtggacatgtgtcttggtttaagtcatatatatcttctctctgactaatctgcctattgttaaatttagaactgtgggccaccagatgactttagatgtcctgatccttcaaagcagatctggactgtgaatgaaactctaattcaaaaatggctgagctacccatcttgggagggtttcctgtggagatagccaagtaagaaaaacattgttacttacacaacccgaccaacctcgtaatctcccatggtagggtatcttgtacttagaaggtttttttttttttcaagattttatttattcatgagagagagagaaagaggcagagaacataaggcagagggaaaagcagggagaatacagggagcctgctgcagtactcaatcncaggaccncaggataacgacttgagccaaaggcaaatcgatgcttgagccaaaggcaaatcgatgctcagtcactgagccacccaggtgccccagaggtttttatttaaataaatacttcattaatatgactcacc

SEQ ID NO: 10322 - DNA, 188 bp, Canis familiaris
gatgataatgctgtacaattttaaatggtagcagtttctgtatgcagtaggctgaaatattttaatgaactgcttaatttttggattttattttttaagttgtataatttattttcttgcaaaataaaaatgtaatataaaagccttcacctaaaaaaaaaaaaaaaaaaaaaaaaaaaaaaaaaaaa

SEQ ID NO: 10323 - DNA, 618 bp, Canis familiaris
acgtgcctgcagaacccaagtggcatttgtcatcaggatcagaggtatcaaatggtgtggagcccaaaggttcgaaaggtgtttcagcttcttcgccttcgccagatcttcaatggcacctttgttaagctcaacaaggcttcagttaacatgctaaggattgtggaaccgtatatagcatgggggtacccaaacctgaagtcagtgaatgaattgatcctacaagcgtggttatggcaagatcacaagaagcgaattgccctgacagataacacattgattgctcggtctcttggtaaatatggcatcatctgcatggaggatttgattcacgagatttaaacccgttgggaaaacgtttccaaggaagcccaccaaccttttaaggcgcccttcaaattatcttctccacgtggcggaatgaagaaaaagaccacccattttgtagaaggtggagatgctggcaacagggaagaccagatcaataggcttattagaaggatgaactaaggtatctaccatgattatttttgtaatctggtcagttaataaatgactactttcaaatggaaaaaaaaaaaaaaaaaaaaaaaaaaaaaaaaaaaaaaaaaaaaaaaa

SEQ ID NO: 10324 - DNA, 162 bp, Canis familiaris
ccttggctcttgacacagggtctggggtccggaccagggctaatctggtctttaggatttcttttattttccttttgagttcctatgcttcgctccctgatgttcatgggaatcagaatagagtctggggggagggtccccaccttcttgtaccctcccttc

SEQ ID NO: 10325 - DNA, 437 bp, Canis familiaris
ctttcccaaggggcaacaagaggtggcaattggccgctcctgggggtgaggcaggcaggcaccccagagggcctcaactaggcctaggggaaagagagatgttgccagcatttagagagtgtttatttgttgaggagacacacgaaatgccgttgtttaatctttgagaaattatgttttaatgcgagttggggagggggtatttttattttcttaaaggagacatcagaagctggagaaaagtgtagagctttggtcactggtttgctgggtgaggggagccaagagacagggtttgggcctcaggactatccagatggaatctcaagggagaagggactgatcagcagagctgggaggtggggagaaatctgtgttgtttttaggattatgaatctattttgttttttaataaaatttttgaaaacctaaaaaaa

SEQ ID NO: 10326 - DNA, 223 bp, Canis familiaris
aaatgaggcgggaaaaatgtcagtgatgggttgacagaagcattgagaggtctccataatctcttgggaaacggaacaaggggtggtggaagaggatgtgggcagggggttggggtgactgggtgatggaccatgaggggggcacttgggctgagcgctgggtgatatgctatatgttggtgaattgaactccaataataaaaaaaaaaaatacagaaaaaaa

SEQ ID NO: 10327 - DNA, 619 bp, Canis familiaris
cattgtcgcctcaggcagggctgggtcacagcggtcagcaacacctgtagcttccaccccatcatggggactgtcccttccctggtccactgagctctggctacaagtgctcagaataaaactctcttgctcctcagcttcctcaaagccttgctcaaaccagcttcgggaatcaacctgggagtgccacgcaagttgaagagcgtgtcccagtgctcagtctctgaactcagcagggcctggaaactgacgccttgtgctgtgctcccgagatgcaggccgtggggtgctgcaggcgtggagcctctcctggtgcagccttgttgccttttctcaactaggaccaataccctcctatgccagggtgtcactgtcccatatacaaatgacaaagctgaggctcagttcgggggtggggggcggggaggatgggaagtaagtaactcacccagagactcgcagtagaagcagagttaacatgtgaacccagctctgtctggctccagaaccttttttgttgttgttggatttttttttaatggcaaatgtatctattgagaatattctaaaaaaaaaaaaaaaaaaaaaaaaaaaaaaaaaaaaaaaaaaaaaaaaaaaa

SEQ ID NO: 10328 - DNA, 558 bp, Canis familiaris
aaacatagtaattctcatataacccagttcctcgcaccatttgtcctgtcattctgttcaggccaattgctgcttcatgttaggctgtttgtacaaacttttggaggccggggtggtacatcagttgctctggatccgccaggccgctggggggtggatcaccacaccctgtagggcttctcccctcctagctgtctttgggaaacgcaggactgggaggctgttttgaccagagaggccaaggtcaagagcaaggtgtagaaaaattgtaaaatagaataagtggtgttggtgaattggttttgttttgttttgttttgttttcacatttggatagctgtcacaagaggtctttccctcagtttccagcatgttcttccttttctccctttctcacgtttttcctcctattaatcaagagaaacttcaaagtccatgggatggtcggatctcacaggctgagaactcgttcacctccaagcatttcatgaaaaagctgcttcttattaatcgtgcaaactcttgccacgatgtggggagtttgacaaatctttcaaa

SEQ ID NO: 10329 - DNA, 674 bp, Canis familiaris
aagttacaatgattttggaattataaccagcaacccctctaactatggtccaatgaagagtggaaactttgtgttaacaggaacatgggggacacatatggtggaggaaactatggtcctggagcagtggaggaagtggggttatggagggagaagccgatattgagcttcttcctacttgccatgggcttcactgtataaataggagaggatgagagcccagaggtaacagaacagcttcaggttatcgaaataacaatgttaaggaaactcttatctcagtcatgcataaatatgcagtgatatggcagaagacaccagagcagatgcagagagccattttgtgaatggattggattatttaataacattaccttactgtggaggaaggattgtaaaaaaaaaatgcctttgagacagtttcttagctttttaattgttgtttctttctagtggtctttgtaagagtgtagaagcattccttctttgataatgttaaatttgtaagtttcaggtgacatgtgaaaccttttttaagatttttctcaaagttttgaaaagctattagccaggatcatggtgtaataagacataacgtttttcctttaaaaaaatttaagtgcgtgtgtagagttaagaagctgttgtacatttatgatttaataaaataattc

SEQ ID NO: 10330 - DNA, 531 bp, Canis familiaris
gttcgattccggagaggagcctgagaacggctaccacatccaaggaaggcagcaggcgcgcaaattacccactcccgacccggggaggtagtgacgacgaaataacaatacaggactctttcgaggccctgtaattggaatgagtccactcttaaatccctcttaacgaggataccacttggagagggcaagtttgtggtgtccacgacacgaccgcgcgtgatatatccacgacgtctccatatgcgtgataaattaaattgtgtgccaagttaaaaagttgtaagttgaattttgggaaccggggccggccgggtccgccgggaggcgagccaccgcccgtccccgccccttgcctctcggcgccccctcgatgctcttagctgagtgtcccgcggggcccgaagcgtttactttgaaaaaattagagtgttcaaagcaggcccgagccgcctggataccgcagctaggaataatggaataggaccgcggttctattttgttggttttcggaactgaggccatgattaa

SEQ ID NO: 10331 - DNA, 350 bp, Canis familiaris
atcatcaccacgctgctcacagtggtaggacttttctcccctgctttataagagacgtgaatctggacagatctgcaaatataatatctcggtgttcatattatatttattgtcttcctgtaagacctttgggtcgaggcagaggcaggaaactaatctggtgtgagtcaaacgccccctgagtgactgtccccagcccaggcaagaagatctcccttcaggtgccgggcgcaggaactgcgtgtgtcctacacaatggtgctattctgtgtcaaacacctctgtattttttaaaacatcaattgatattaaaaacaaaaaaattattggaaagtaaaaaaaaaaaaaaa

SEQ ID NO: 10332 - DNA, 633 bp, Canis familiaris
gtcacgtttattagatttcatgaatttcagattctgagggaaatgttttgtgaacaggttgtacgtactttgtttgtgttaagataagatgaaaggcaggcctatttcatcacaagcacagacatagacacacagagactacgacttatgctttagttgtaaatttagtgttttctccatctgcgactgtgcaaatgatgtgcaaagtcttctcttggttgaatggaagtcagccaaggattataactcctgaatcttaacttaatatgcccaacagcatgggctacacacatatgaatatttaatatcttgaacccaatgatctcaaatttcaatgttcagatgttgcttaactgaaaaataggtggtaaattttaagactgatgattttgccaaatactagaccaaattcatgaagccacatacaccttagagcaatatcttttagtattaagaattatatagttacctagtgaaacttctcttttctagaattatttttcactctaagtcatgtgtatgttcctttttaatcatttgcatgttatgtttaacaagctcatagcaaaataaaacatagcaaatggcaaaaaaaaaaaaaaaaaaaaaaaaaaaaaaaaaaaaaaaaaaaaa

SEQ ID NO: 10333 - DNA, 102 bp, Canis familiaris
aatctaaacaattggacagattaaatgtacatggaaatgagcagtcttacttttgtagttttatattatacaataaacagttaaaagatgaaaaaaaaaaaa

SEQ ID NO: 10334 - DNA, 640 bp, Canis familiaris
ggtcaactgtcgttttcgcccagtgacccaggagcttcgctcgcgcggcattgggttgaaaaagaacagccaagcccacaggattcggggagtggtaagccacttacagcctagagagtagccaacttcatttgattggcttgaacgcaaaagggcttgaccaatctcccggagtcgccagcccacccttcctagtttgtcccacctgataggctccagccctctgggggcgtggccaaaccctcctaaccccaggattggcctgcggccttaaatttacgttctttacactactgggactgggtcgcttttgaccgagtcctgactatgtgcccctctaccctctcccagggatggcccaatcctggtccctgcgtctgacaccctcttcggttccatcccacaacagcctgccaatcgtagtccgtccttgcagtcaggacggcaccagctcccgcccctctccctccacccccacaggtgccttaaagggcccttgtccacccgaggtggggggcaggggccctcgctctccggcccttgtgtggggaagagagtcgtgggtggggatcgggagttgggagcggtggtctgagattaaaagagttttacctctgaaaaaaaaaaaaaaaaaaaaaaa

SEQ ID NO: 10335 - DNA, 587 bp, Canis familiaris
agtattatttggaattcctgatgtattttgcttattacttggtttcattctcataataaagagagtgtatactgaccacacaggcaggctgatgagaaatcatggtgttaatattttacttttccaacttaatgcccacacaggtctaagttatgtttacaagatgaagaaacctcaaggttttaaatatttaaaatgcctagaagctagtaatttagtctttgattacctatgtgctaagacttctgcccagtttcattaaaccaacccaatcgaattcttctttcacccttgggtttctgtggccacccttacctgtttaaaaccacctttatgtagcagttctcagctgtttacatgaaccctagcacaaaaatcagaatcaaatccatctattaatgtttgcataaggatgcacaacacaaaccaggtaagtatgggacacatgtataagtgagatcattacactttgatgtaaaaatttatattttgtgtatttttaaaataaatactaaccctgacctggccaaaaaaaaaaaaaaaaaaaaaaaaaaaaaaaaaaaaaaaaaaaaaaaaaaaaaaaaaaa

SEQ ID NO: 10336 - DNA, 615 bp, Canis familiaris
accgggcagatcaagagacacccgcgctcatcccgatgatcggcttcatcggcctgggggatggcagcgccgcgctgtacctgctgagactcgccctgcgcagccccgacgtctgctgggacagaaagaacaacccagagccatggaaccgcctgagccccaatgaccaatacaagtttcttgcagtttccacggactataagaagctgaagaaggaccggcccgacttctgagctggccgggttgcaagccggccgggtgtggcccaggctacgtgttgagcgtggccaacgtgagccaggagcaagcggaggcctcccagtgccaagtgacgtggcgggccccacgttagccgggctccggcgccagtgcaggggcggcgctgctctggctcgactgggctcgctgcctgcgcccggcctgccctggatgcgacaccttcgctcgctcgcggagccgagctcctccctgtgcccaagcccactgcttccagagccaacaggcatcccctcccacagccctgcacctgggcctccccgccccctcccttgctcccctcagtccctgggatcaaacagaagcagccgtgggcaaaatacaatttcatttaacaaa

SEQ ID NO: 10337 - DNA, 480 bp, Canis familiaris
acgagtgctttggacacatgagtctgaactatgcacataaaaatttccgatactgtttcctacataaatcatacattagaatcaagttggtctccatttaccattcccagaacaaatagctattcatatttttaaacatttgtttctggctttccttaagtagaataagctcctatctgtttttcaatctttctcccatttgtcaaggttgacccaaagatgagactttttcattaaaacatctgtgatctcttaaggtcataataattacccctatactagttattaactcatttattttgatagtaatcattaactatatactagtttctcattattttgtgtgcatgcctcactttttctgaaagctcactaaacacatccaatattctctttatacttccaatgtacctagcataatagtgagcacatctgaactgaatatgcatgaatagtgcaaaataaaattcatttaaacca

SEQ ID NO: 10338 - DNA, 571 bp, Canis familiaris
ctatagacagtttgtacaaaaaagcaggctgtaccgtccggaattcccgggatctggagagcaagctgaccaaggaggtcctggccaagttcctggaaaagagatacgccaggtctgccacgtttgcgcttgccccaactgtccatctctggaacctacgatctgaaaagcgtcctgagccaaatgggcatcaccaaggtcttcagcgccgaggctgacctctctgggatcactgaggaagggcccttgatgctgtccaaggggctgcacaaggccgtgctgaccatcgacgagaaagggactgaagctgcgggagccacctttctggaagccatccccatgtccatgccgcccagtgtcgacttcaacaagcctttcctcatcatcatcgtcgacagagacaccaagagtcccctcttcatgggaaaggtggtgaaccccaccccaaagtaactgccttgtgggtcaggtcccttccagataccattaaagagtgacccacccccaaaaaaaaaaaaaaaaaaaaaaaaaaaaaaaaaaaaaaaacaaaaaaaaaaaaaaaaaaaaaaaa

SEQ ID NO: 10339 - DNA, 469 bp, Canis familiaris
aggtggatgacaaaatcacgctacattcttcacgtgggatatttactcttacttggtgctaaatcagatgccacgagttcctgggacaacccgttattgaactgcccttggacccccggcctgttatccccggccactcccgattataatgccagcacagtggttcttcgtgtatttttgtgggaaaaaacttttcttttgatttttaaaaattcaatgttgatctttcagaatggaccaggctttttttaaaaaggagttgcacggacaccactttaatttctttaccaaactttctgtaatgccttatttgaatgtattatgtgctttctaaaactgtggtgaactactacgcttatgaatattactggctttcctggcatacatgactcttaatgtactaccataaaattaaatttctagaaaaaaaaaaaaaaaaaaaaaaaaaaaaaaaaaaaaaaaaaaaaaa

SEQ ID NO: 10340 - DNA, 408 bp, Canis familiaris
catggttctggggcccacttagtgccatcactctatcgtgtcacacttgatgtccgtttctttccatatttatcttcgaaatttcagaggccgaccaatgccctagccgccagggacttatcttggccggtggggtgggggaggcgggatgggacactcaacattttttttttccatttcagaaactcaaatgtcaaaaaaacgcattaagaggtttatttgggtaaatggcccgtagtggatttccccccagaaagggggaaggaacgagcgggtagacctttctttttggacagaagctagaaggcaggaaactttgtgcggtgtcaccgtgagcacctccagctgtattagtgccattggaataataaatttgatatggtggtgaaaaaaaaaaaaaaaaaaaaa

SEQ ID NO: 10341 - DNA, 522 bp, Canis familiaris
ttgggaagctgcagcaccagtcccctctgacatctgccaacccatgccctaccttgagtatgacatctccacgtccactacccttcttgatcgcatggcgcaccctcgctaccaccactcttcatccccactaagtttaagggccagcagccaccatagtccatcacagcagacgacgacacctcctcatactcaccgactgagtctctattctcccttttgtgctccctccccctcttctccacatctgtgtcacactcgtgggatacactgagatgggagaatagggcgcccttcatgactgaggccagaagttgctagaagtcagagcaggatgcctgggtttccccctgcctccaccagcccctaccatttccccatgatatggtagcttctccttgggctttccttgcccctgtctcctgggatcagagagtaggatactagacatgactcatgtcttgggtacataccacatagcaaataaatggtagcaaaagaaaaaaaaaaaaaaaaaaaaaa

SEQ ID NO: 10342 - DNA, 495 bp, Canis familiaris
gggtcccataggttcgaatccccttctacctcagtcgggagtactgtcctccatggtgcttcccttcctctccttaatgtggggaagaccatggggcaatgcatggcgcaggacctgcctccccccaaagcagtctacttgctccacggagagagaactggttccacgtgccagagtcttgccctttggcccagagtagcctggtcttcatggctgtatgggagacaagtgccttctctgcttcttgttgtaggtgatgctaatctccttaacccaacctttgtcccagccgctaatctgttctaactctccctcctctgattctcctgctcaaagtctgttccctgggaccccagacagcatgaaggaagatgtattcttccccctgggcaacaaagctatgacgcgagggaggaagaacatggaagcatgtgaataaaatagcattgaacacagaaaaaaaaaaaaaaaaaaaaaaaaaaaaaaaaaaaaaaa

SEQ ID NO: 10343 - DNA, 671 bp, Canis familiaris
  misc_feature (545)..(545): n comprises a, c, g, or t, or includes no nucleotide
gggggatgccctggaatggccaggaatgcctgggctcaatggaattcttagtgacccagaggttcttgcagccatgcaggatccacgaagttatggtggcctttcaggatgtagccccgaacccagccaatatgtccaaatatcagagcaaccccaaggttatgaatctcatcagtaaattgtcagcccaatttggaggtcaagcataatgcccttctgaccaagcccttgctgaaagaaaagcaacttcgatcacctaatggatgtcgccataataccaacccgtgtacctctgaccttctcaagaagaaagctggggtgctgtgaagagaatccctacccctctgccccacatgcaactgaaacattctacagtggtttgccacttagggtattcattcagataatgttttcctactaggaattaccaactttaaacactttttaaaccttaaaaatatttaaaaacaattaaaagagtgtgttagtccctacatttttctttactaatcatttcagtttttttccctttggattaattgggncaggaagctacttcagtgtggaagatttattattgctcagtttgagtgaaataaaggtttattaaccggaggccaatataacatttaaatagatgaaaaaaaaaaaaaaaaaaaaaaaaaaaaaaa

SEQ ID NO: 10344 - DNA, 649 bp, Canis familiaris
attgtgtaggcttgttcttctcatatcaacttaaatgtggtttatctctaacaagtatttagtgaaccggcaaagcagagactatgatgtggaatgggctatgcctttgatgtgcatctgaatgctttttatcccctcctagtcattctgcattttatccagcttttcttcatcaaccatgttatcctgacggatacattcattggatatttagttggaaataccttatggttggtggcagttggctactacatctatgtaaccttcctaggatacagtgcattgccatttttgaaaaatacagttattcttctttatccgtttgcacctctcattctgctctacggcctgtcactagcactaggatggaacttcacccacacactgtgttccttctataagtacagagtgaaatgaaagcagtattgaaactattccatcctccccagcagcaagcactctgggtgaaatgatttcttccaaaacttgtaaataaactatctttgtagatatcttcaggtgtaaagtttgcaaatttgagaaaatacatatgttgacaccattgtcaaggtacattccttaaaactaattaaatgtacatttctataataaatattttttaaactaaaaaaaaaaaaaaaaaaaaaaa

SEQ ID NO: 10345 - DNA, 662 bp, Canis familiaris
tctgtggtccttcaagaagtaggaagaaaacctcctacttttggagatgcatctgtcaattgccctggaactgctgaattctggatacgaatttgacgaagggtctatcatctttaatcggttcaggtctgtcatctcctacaagacagaagaaaagcccatcttttcccttgaaaccgttgcacagtgctgagagcatgagtgatctatgatgatattgatagctgacgtgctgcaggattacccaggataaccatttggcccacatcatttactaattcttcttaaagggaatcccacccacggattgagaccaggaggttgcccagggattggaccaggcccattgggaccaatggcttaagccaaggaaccgctttcttgagatgatttgacaaacctgacctttgacgttcaatcgcacccgccaggctgtcatcaccaaagagttgattgaaatcatctctggtgcagcagctctggattaatgaaaaccaagtttcatcctcagataagaggtaaagaagggaaattcagcccgctgattttatttttagcttactgctgtcctcatcagaagaaattgttggtccattgtttaaactactaaagacagcacaatgtttgtaaattatcttacaataaacagcttacataagaaa

SEQ ID NO: 10346 - DNA, 646 bp, Canis familiaris
tttaatatgaaagctatgatactcgggaacttatactcgccatagtggatactcttttcccaccactagatattattaaataacacttaagccccggatatagcacgtttataataaatttgcctcaccacttaaaacaataatatttgcgctctgcccacttttccaggaatttctctttttgagaaggtttctcttgtgagatggttacctggaggctatattgccaggaatatttttaagttctcccttaaacggttaaaattttggagttaaaaataaagaaataaaaagttctttgacaaaaatatgtgtggtgtgtgtgtgtataaaatataatatatatatatacacataataatatgtcaacaattcagtaaagcttttgtttaattttcagaaggaatcaaataaaacaagtatccatcttctgtagttcgtagggtgttaggtcctttaacgtaaagtcaaacttcaaattccatctagctctgtgttaatccctgttattactggtaaagcttcatttgaatatgtaaattcagtttaggctatgtaaaatttttgctaatgtcatcattctgaaaaaaataaatttacaaatacattccaaaaaaaaaaaaaaaaaaaaaaaaaaaaaaaaaaa

SEQ ID NO: 10347 - DNA, 389 bp, Canis familiaris
tgatacggagggggttataattgatattttaatatatatatttataccccacgctgcatacaacacattttatggtagcttttacttttttatgaaaagaatattattggccgttttaattctttcgttttggtcccatccaaagtcttgatagtaagcattattttgggggtagaaatagtgaaatctctagcctctttgtgtgtttttgttgttgttgttttatataatgcatgtattcactaaaataaagctttaaaaaactaatgtcttgctagaccaggtttgctgttgtgcagtgtgcctgtcactactggtctgtactctatggatttgcatttttgtattttgtacaaagtaaaaataaagtgttatgagtagtatatata

SEQ ID NO: 10348 - DNA, 621 bp, Canis familiaris
acctgcatccaccaccacttgccacctcttcgaggaacctgcccgctccctgccctggaggatcaccgcacaaccccccagcgaggacgtggcggcgccaacatggtgagcgccggacgaaggaaggatggcttctggttataagcacgccgggcgccgccgcgcgtcgctgtaatcactcgcgctgtgacaccgcggggacacactgctcgtggcaccagaccgcgcacattctgagagagaggccacacacagttcgtcacacgtgggaccagcacacccgcccggtgtcccgacacgacccgcgcggacccgccctgcgggacccggaatgccctccgggtgagccgcccgggccctaccgggcccgcccttcctgcgcgaccgcgtggcggtgggggtggacgcgtttgcacgtggcgacttctccctgcgcatcgacccgttggagcccgctgatgagggcacctactcctgccacctgcaccaccactactgcggcctgcacgagcgccgcatctttcacctgagggtcaccgagccagtcgctgagccgcccccgcgggactcgccgggcaacggttccagccacagcggcgcccccggcccagattccacctg

SEQ ID NO: 10349 - DNA, 610 bp, Canis familiaris
aacagatggagcagacatactggcaggcgaatcccttcagggccgtagctgaacccggcattcagctcaaggctgtgaagtcctccacaggccccggggagcagctgcggaatgcactctggcacacaggggacacagcatcacaggtgcggctgctgtggaaggacccccgcaacgtgggttggaaggacaagacatcctaccgctggttcctgcagcatcggccccacagtgggctacatcagagtgcggttctacgagggtcctgagctggtggccgacagcaaacgtggttcctggacaccaaccaattgccggggttggcccgccttgggggtccttttgcttctccccccaaggaaggaacatcaatctgggccaatctgcgctaccggtgcaatgacaccataccagaggactacgagactcagaggcttctgcaggcctagggatgggggtggggacccattgctggaagatggcaccatcgtggctaccctcactgcaacaaacagggagcttggcacccggctccaagaggtagctgccctagaggggctcagaaaggacaaaataaagtgtgtgtggtggaaaaaaaaaaaaaaaaaaa

SEQ ID NO: 10350 - DNA, 703 bp, Canis familiaris
  misc_feature (354)..(354): n comprises a, c, g, or t, or includes no nucleotide
tgtggtccgccgtccccgggtagaccttcgtcgaagcatcacgcccagctgaggtcggtgctcctggttggcaaagacccgccggagtttttttcgttggaccggggcgtgacaacttgggaggccacgcaagttgttctgtgatccgcggacctcgtctgcctgcagcgaatggtggaggtttatctactggagcccctctctgtcccacgagacacacgctgtgaagcgcgcccctcgttctcacactactcagcgtgctccccctagtgcatccgccagagcagcgtatatgctctctcttggagagtggcgcaaagagaggttgctcccgcgtggtggatagtgactcancacaagaaagtgtatagtgaaagtggcttccacaccgtgcgggcgtttcccagtacgagacccttcgttctgtccccgccccccttaccactccccactgcttttgcacccctctcctccccatacacacacgtacaccatttttattttttgggccattaccccacaccccttattgctgccaaaaccacatgggctgggggctggggctggatggacagacacctccccctaccccaacccctcctgtgtgtggttggaaaacttttttgttttttgggtttttttttttttttttttctgaataaaaaagattctactaaaaaaaaaaaaaaaaaaaaaaaaaaaa

SEQ ID NO: 10351 - DNA, 633 bp, Canis familiaris
tttaaagactgtttcagctcttattctgctaaaggagtgatatttactatttgcttgggtcagctgttaatataggggagcggttcagctccctcagtgctcttaggagagtcacagtggaaactgcagaaagctgacatgttcgtaaaagctgagttaagtctcgggcagcagcctgcgaagccacatgcaatgatcatcccataaggaaagtatgtgaatgctgcttttgcaaaggattaaatgtattattgtaattttagctcgtgttctgtactatgctttccgtggaatcatttaagcccttttagtgaccgttgtccttgcccattaagaaactataaatgtagtatatattgtataaaatgaaaataccattatagcttcgttagggaagttgtacatagacattgaaagaagggttaaaaacggttttattatgcaattgtaaaacaccaaaaatacagattcatctttgatatgtaacacactaaatgtattttgtacagcatctggtttaaaaggtgccttattaagtttaccattaattgctttgttctatatatagattacatccagtgtatcatttttaagtaaataaccttattttagtatactttaaaaaaaaaaaaa

SEQ ID NO: 10352 - DNA, 733 bp, Canis familiaris
  misc_feature (179)..(180): n comprises a, c, g, or t, or includes no nucleotide
  misc_feature (248)..(249): n comprises a, c, g, or t, or includes no nucleotide
  misc_feature (298)..(299): n comprises a, c, g, or t, or includes no nucleotide
  misc_feature (329)..(331): n comprises a, c, g, or t, or includes no nucleotide
  misc_feature (361)..(362): n comprises a, c, g, or t, or includes no nucleotide
  misc_feature (381)..(382): n comprises a, c, g, or t, or includes no nucleotide
  misc_feature (397)..(398): n comprises a, c, g, or t, or includes no nucleotide
  misc_feature (427)..(428): n comprises a, c, g, or t, or includes no nucleotide
  misc_feature (455)..(455): n comprises a, c, g, or t, or includes no nucleotide
  misc_feature (482)..(482): n comprises a, c, g, or t, or includes no nucleotide
  misc_feature (497)..(497): n comprises a, c, g, or t, or includes no nucleotide
  misc_feature (515)..(515): n comprises a, c, g, or t, or includes no nucleotide
  misc_feature (530)..(530): n comprises a, c, g, or t, or includes no nucleotide
  misc_feature (548)..(548): n comprises a, c, g, or t, or includes no nucleotide
ccatctgtcgtcgtctcctggtgcaggccttcaccagggaatgagttttcttgctccgcatgtcttgaggatgaactggggacagagttcataggctggtcaaccgtcaaagggcattctttcgtagttcactccagggctgcaagcccccaagcccttgggtggttccaagtgtgttnncccgttggggtccaatcaatcaaacatcccagtagcatttcgtatgggaaaggtagggaactgtgggnnaccagacacaactaatgccagcattccaaggctggaagtgattggcctnngaccccaagacttgcaagctcggggagctnnngggacgggttgaacacggggatccgctgtnnaacttctgttcctcccagnnggttccattacaacnnacccatgacacacgaaagtgccacagaannagtgctggacaagatgtcgcagatgcnggtcaccttcttggcgtctcgaagacnagtggatacatcacnaggcgcctcacgtggaangtcactggaggtctntttcatgtaactgcctcnacggacccctggactctgctcactcccccaccactccaaccggcctcctgctgatgaggactctgagttcccaggctacaaaaggcgcagcagtgtatggctctggaatgctgaatatgggaggcaggggtgcttgtgaccctaataaattccaaatcctcttcctgccaaaaaaaaaaaaaaaa

SEQ ID NO: 10353 - DNA, 418 bp, Canis familiaris
cgacgacgcgcacgacggtagctactactgtcgctcactcatcatgatggtaactatctcgtccctcctccttgtcttggagagaaattggccgagcaccacatccacctcatcttcgacagtgcacaaaaacgccattatatgtctctacaagaatttcacagcccctgatacctgggacaaccagtggagattttacacggagactccaaaaatatcatccaactgattatcaatgcatacaatagcatccggtctaaagtggagctgtctgtctgggatcagcctgaggatcttaacctcttcttcactgctacctgccaggacggtgtgtcctaccatggccagaggaagtgcgaaggcctgaaaattggggacacggcgaccttcgaggtggcggcggaggcccggggctgcc

SEQ ID NO: 10354 - DNA, 573 bp, Canis familiaris
cagatgatcatggaggaaaaaagtggttctgctaatgtctagcaacatctagctaagagagcacacatgttgatgcactggaaagctgctttagagaatatgcgtgatttagagttattttattgggaaaccaagaattttagaaattcttgataattgagtcatacaattcttttcagtcctataatcatttaaaaaactgtgagtcctaatgattgtaactatggtgttgttttgtgtcttatttttacagtgtcaaaagaactcaactagtaaacctggcaacatcttttgagtttttttataatttgttttctaacttgaaaaccctcaaataattggattttcttagattctatgtgtgtttcatgctatggctaaaagtcccattttcccctgatggctgttagtttggtaattgcttcaagtgagattctgtattatatcattgtgtattataatggtgatgcagcatttcaacagcattccaataaatggaatgtcccaacaggacatctacatctaagatgtaaaaaaaaaaaaaaaaaaaaaaaaaaaaaaaaaaaaaaaaaa

SEQ ID NO: 10355 - DNA, 342 bp, Canis familiaris
tggtttatctattaatttcaaattatgtacttgtaaaagtaactgaaaattgcattgggaatctgagaaagactgctaattttttgtgattttcagtgttgtcttttttttttttttaaggagatattgttaagatctaaaaactgtcatttaatgttatctccaccagcatcagagggaatcactgttttcagggtgttatgtaatgccttgtgccttccgttttcgtgaaaaagaggttttgtgaaggcatttatggtcattactgaaaaatgaattaaaggccttggattttaaagccaaaaaaaaaaaaaaaaaaaaaaaaaaaaaaaaaaaaaaaaa

SEQ ID NO: 10356 - DNA, 499 bp, Canis familiaris
  misc_feature (114)..(114): n comprises a, c, g, or t, or includes no nucleotide
tttgggaccggtgttgtttgttccagcagaaacacctggcccacagaatccttcttgatagtttgcaggcgaaacacaatgtaatgtcgtagatctgcaggcagaagctcgccncttctgtatcctatgtacgcagtgtgcttttccttgccagcttggactgttcctgcttagacagtcaacgtttgtctcttccttttaccgagtcatcattcttagtccgactaaggcagttaaatgtaaatgcgtagatggaaggaaaagttcccgccggggagccaggacggttcccgggcaacgtttatgcttttcctcctagtcagcacccagaggaggtcgacgccagagaccaccgctgggtggatgctggcttccagaagggccagagtccctcttttaggaaactcttcagaactgggagcacagtgactgagtttgagctattaaaacccttcttcatactctgaaaaaaaaaaaaaaaaaaaaaaaaaaaaaaaaa

SEQ ID NO: 10357 - DNA, 648 bp, Canis familiaris
  misc_feature (162)..(162): n comprises a, c, g, or t, or includes no nucleotide
  misc_feature (192)..(192): n comprises a, c, g, or t, or includes no nucleotide
  misc_feature (219)..(219): n comprises a, c, g, or t, or includes no nucleotide
  misc_feature (258)..(258): n comprises a, c, g, or t, or includes no nucleotide
  misc_feature (278)..(278): n comprises a, c, g, or t, or includes no nucleotide
  misc_feature (300)..(300): n comprises a, c, g, or t, or includes no nucleotide
  misc_feature (314)..(315): n comprises a, c, g, or t, or includes no nucleotide
  misc_feature (327)..(327): n comprises a, c, g, or t, or includes no nucleotide
  misc_feature (339)..(340): n comprises a, c, g, or t, or includes no nucleotide
  misc_feature (351)..(352): n comprises a, c, g, or t, or includes no nucleotide
  misc_feature (365)..(366): n comprises a, c, g, or t, or includes no nucleotide
  misc_feature (376)..(377): n comprises a, c, g, or t, or includes no nucleotide
  misc_feature (389)..(390): n comprises a, c, g, or t, or includes no nucleotide
gttcccaaagagtcaaagctgccattgccaccatcaagaccagcgcagcatccagtttgtagactggtgccccactggcttcaaagtgggcattaattaccagcctcccactgtggtacccggtggagacctggccaaagtacagcgagctgtgtgcatgcntgagcaacaccacagccattgctgaaggcnctgggctcagcctgggaccaacaagtnttgacctgatgtatgccacagcgtcgcctcttgttcacntggtatagtgggtgagggcnatggaggataggagagttttcntgaggcccgtgagnngacactggctgnccctggagaagnngattatgaggnnaggttggtgtggnnattctgttgnnaaggagagggtnngaagatagaaggtagaggatatagctaaatacacattcctttcagcccatgcagcactgtcacactcagtaccttctatgcttgtcaaacgatatgcaagatcagcgacggctattaaagctttctagattagattgtctccagttttaactgggatcatgtcttctccatgtgtacctgtcacttattccatcatgtctcaaagtaaaggctttaagaaagaaaaaaaaaaaaaaaaaaaaaaaaaaaaaaaaaaaa

SEQ ID NO: 10358 - DNA, 188 bp, Canis familiaris
atgctgttcaaactctcaacctccgtttcttctgtaaaatggggaataaatcatatatttcaggcttaggaaaaaagtaaggtggcacaggattaccaaaggacaggatatgtaaacagattttttttcagcatgaattgtcttgtggcatatacaaatatttagaaaagaaactggctttatagttt

SEQ ID NO: 10359 - DNA, 596 bp, Canis familiaris
  misc_feature (1)..(1): n comprises a, c, g, or t, or includes no nucleotide
nggctgcccaggacctgctgggaccagggtgctgggtccctccagaccgtaccccagagatcaggccactgccagctccactgggcttggcacgtttctggcagcggcggggcgcacgcagcccgggccgggggcttcctctgcgggagaccccatccgccgccccgcccgacgtgagcctgtcccccgccgggagggagaggggtgcgggtcccactcctgggggcggccaccacccggatgtgcacgcatggctcactggacgcagccactcgcccccagaggcacacgtgtgcacacagctcccacaccctccaggggcctcccgcccggtgccggggcaggtgcaggggccagcgctgccacagcctgggtcccgactccgctctgcccctcggtggcagggggagaggccgtgtctgaggtgatccctgggccgtggccgtgggaccccctcttcctccatcgagtccatcgagctgtagaggctccagctcaagtgcccctctgcttctgacgtgtgacaaggcccttatgttctcgactttcccagagaagcaaataaacagtgtgaacagcaaaaaaaaaaaaaaaaa

SEQ ID NO: 10360 - DNA, 473 bp, Canis familiaris
tgtgaaatgtttcaagctttgtcagattcttgatgtgatgtatgatggccaaatgctttacacacagccatgtatttctttgataaaaagaagtagcttgcaagcatattcctgatagtaattggaaatagcactcttggactgggcggttattgagatacttggtctggtattgttctatggtcctgtacctggccagattggggaaccaatgaatctgtggatgtatcgaggctctcatccatcaagccccattggaacatgtttgctttcgttttgtaactttataatatacgcaatactgtacatgtttaggagcagctgtcttactaaaagtgtctcatttagctacatcacagatatcttccagacatattgaacatatttaagatttgagtgacactaggaaaatgatatgaatgcgatttttacttcaaataaaagtaacattgtttaaaaatataaaaaaaaaa

SEQ ID NO: 10361 - DNA, 629 bp, Canis familiaris
agggtgaaaaagggagaccccccatgcgggactttcgcatccgcaactctgccgtcaaaaattctgtttggggggagatgggagacagactgaacccgcgcggccaaaggtgctggagcagctcacgggccagaccccagggttctccaaagctaggtacacggttagatcctttggtatcaggagaaatgaaaagattgctgtccaactgcacagtccgtggggccaaagcagaagaaatcctggagaaaggtctaaaggtgcgagagtatgagttaagagaaaataacttctccgatactgggaactttggttttgggatactcacggagcacactctgatatcgggggagtactcaatatagagcacccagaccatgggaatatcgcggctgtggacttcatatggtggtgccctgggataggccaggtttcagcattcgcagacaagaagcgcaggacaggctgcattggggccaaacacagaatcagcaaagaggaagccatgcgctggttccagcagaagtatgatgggatcatccttcctggcaaataaattcccgtttctatcccaaaggccaataaaaacttttcagtgaaaaaaaaaaaaaaaaaaaaaaaaaaaaaaa

SEQ ID NO: 10362 - DNA, 522 bp, Canis familiaris
ttgcaacaggggaggaaagagaacccgaacttccaaggccctgctttttttcttaaagtactttaaaaaggaaaatttgtttgtatttttggatggacacggtgatatttgttgtacaatattgttaggggtcagccatttgttaatgatctcggatgacccaaccagccttcggagcgttctctgtcctacttctgactttacttgtggtgtgaccatgttcattataattctcaaaggagaaaaaaaaccttgtaaaaaaagccaaaacgtaccaccaaagaccatcttattccgagcacttcccggaactttttttgtgtaagtacttagctgtactataagttaattggtttgtatgagatggttaaaaaggcccaagataaaaggtttctttttttccttttttgtctatgaagttgctgtttattttttttggcctgtttgatgtatgtgtgaaacaatgttgtccaacaataaaccggaattttattttgctgagttgttctaacaaaaaaaaaa

SEQ ID NO: 10363 - DNA, 608 bp, Canis familiaris
tgccagatcccaggaacatactatttctcttaccacgtgcatgtgaaaagcacccacgttttggtgggcctctataagaacggcaccccctgtgatgtacacgctacgacgaatacaccaagggctacctggatcaggcttcggggagcgccgtgctgcgagctgcaacggagcaacagaccaggtcatggctccagctgcccgaacccaggagattgaacggactgtactcactcccccacgtcacgtaccatctcactctcttcttcaggcgatgtgcttgctggcagccaacgagagggaggagtactccccacagcggatgccatcgacgataatgctgcgatgaacgacggcacttcccacaattccggctgcgccccacaaaatgcatatggacgtaggcccaaaaagtgacccgttttaactttccaaatacagatgtgagctttcagaccaacccattctcctgctggaaaagcgggcagcaatggtaaagaatatgtgaagaccctcttgaatttctagtcagtggtcccaagactataaagttttctgtgaactccttcagtatttaaacatttcaacctcaaagtcctagtagggta

SEQ ID NO: 10364 - DNA, 518 bp, Canis familiaris
ggatccactctgctgagtccaccatccatccagtttgccccacctatagtgacaggttctaatttcattccaacttcagtatatttgctgccaccacttttcagggtctaaggtcggtcatacacttcccacgtttactcttgttctaatctagctagttgttttgaaagtagctcattttgttgtccctaaagtaggttaatagcctaagggttaaaatccattctgaagggtttaccaaggattaagggttaaggaaagaaccaaggggaacttccggagggattgttctggttcaaccctggatcttccaccttattctaatgccttttctttggacacagcctttggtgttctcttgcctttagctaccttttctaacatgtatgctaccatcactttaacaatatttgagagtgatggaaatgggtttgagagtcataatttataataaaatgtgtggacttttaaatacatttttcaaataaaaaaaaagtttaaacaaaaaaaaaaaaaaa

SEQ ID NO: 10365 - DNA, 597 bp, Canis familiaris
gaggccaagcacgacaagtacttagcagacatggatgagcttttctcccaggtggacgagaagagaaagaagcgagacatcccggactacctgtgtggcaagatcagcttcgagcttatgcgggagccgtgcatcacgcctagtggcatcacctacgaccgcaaggacattgaggaacacctgcagcgtgtgggccactttgaccctgtcacccggagccccctgacccaggaacagctcatccccaacctggccatgaaagaggtcattgatgcattcatctccgagaacggctgggtggaggactactgaggccaggcgagtgccagagctgcctgccttgcctagtacctgggccacaggtgggctttggggcacgtagctcgccacgttccatgtacaataggtgttgtggtctcctaaagtatcccctgccccttggtgtccctaatcccaccctcatcagttctgctgctggaccatgagccccacctccacccccttctgggcccagaacacacagaggtgtaaggttggcttctgccaaccacttgtcctgtaataaaacctgtgagcactataaaaaaaaaaaaaaaa

SEQ ID NO: 10366 - DNA, 662 bp, Canis familiaris
tccaacgagaatgacctgatgctcatgtccgttctcacctgtctgtttgagtcctgagccacctgcttaaggaagaatgtggatggagcactgcttgtctggaggacatacgatcggagccactctttggtgctgcacgacaattatttgatgatcggcggtgattatttcgaggagagatgaatctccacgatagatgcctcccaagagtagtagatattttgaggccgctgaacgaccaaccccctgtgatgcaccagagtgtggcccgaggtttcacagtctgcacaaggcacaaattacagtggctcgttatctgaaatgaagctctgtcgcattacagggtctccccgtgcccccagacgcatttccccgatcctggcaaaatttcaaagatccagggaaccaggagagacccatctgtatccctaggccctcccagaactgactcctgaggtctctggccagggactctgagatgcaaagatttggcttcagtactgactcaccccttctcactgccctggcctgtccctccagccacgagaaccagctgagctgccttaactcagaccttaggcattcctcgccccagagccctaataaacctgctttgtctcctgcccaaaaaaaaaaaaaaaaaaaaaaaaaaaaaaaaaaaa

SEQ ID NO: 10367 - DNA, 657 bp, Canis familiaris
tccacgtggatgagcacaccacggtcaaggtgcccatgatgagccgcctgggcaatgttcgacatccagcactgtgccacgctctccagctgggtgctgctcatggagtacgtgggcaacgccaccgccttctgtcatcctgcccgacgagggcaaaatgcagcacctggagagcaagctgaccaaggaggtcctggcacaagttcctggaaaagagatacgccaggtctgccagtttgcgcttgcccaaactgtccatctctggaacctacgatctgaaaagcgtcctgagcaaaatgggcatcaccaaggtcttcagcgccgaggctgacctctctgggatcactgaggaagggcccttgatgctgtccaaggggctgcacaaggccgtgctgaccactcgacgacgaaagggagctgaagctgtcgggaggccacccttttctgggagccactctcccactgtgccacagcgcgcgcccatggttcgagactttcaaccaacgcctttcctcatcatcatcgtcgacagagacaccaagagtcccctcttcatgggaaaggtggtgaaccccacccaaaagtaactgccttgtgggtcaggtcccttccagataccattaaagagtgacccaccccagaaaaaaaaaaaaaaaa

SEQ ID NO: 10368 - DNA, 396 bp, Canis familiaris
gacaggtatgcgaggtgcctttgggaagccccagggcacagtagccacgggtccacaatgtggccaagtccaatcaaggccaatccggacccaaggctccaggaaccaagggagccatgtgattgaggcctacgcagggccaagttcaagttccgctggccgccagaagatccacatctccaagaagtggggctttactaagtttaatgcggacgaatttgaagatatggtggccgaaaagcggctcatcccagatggctgtggggtcaaatacatccctaatcgtggccccttggacaaatggagggctctccactcatgagaaccttgcaccacccgaaccctattcatgcccaccaataaatcctgcttcctgtcaaaaaaaaaaaaaaaaaa

SEQ ID NO: 10369 - DNA, 580 bp, Canis familiaris
ggggccacagacgatggctgccacggagagtcatcgagcgaggtgtcaaaagcccgggcccaccacatgccctgtggagaaggtctgtgagaagctcaagaagaaggacagccagatctgtgagctagaagtatgacaagcagatcgacctgcgcacggtggacctgaagaagctccgggttagagagctcaagaagattctggacgactggggggagacatgcaaaggctgtgcagagaagtctgactacatacggaagattaatgaactgatgcctaaatatgcccccaaggcagccagttcacggactgacttgtagtctgccccgcccctgctgcccctgagggaaggcagcgcacctgcgccttccccacagccgttttgtaatttattttttaggcgggctcctgaaagtccgtgtgaagcctggagctttcctgacgatgctggctctccagcgcccccctggggggattcactttattctgttgctggttttctctaggacttcaaagtgtgtctgggaattttttattaaaggaagaaaatttctagctgtaaaaaaaaaaaaaaaaaaaa

SEQ ID NO: 10370 - DNA, 636 bp, Canis familiaris
ttggacccctgctgcaccccgtcaccagtactataatcaggagtgacgttgtgggatcgctttgaggtccagggtctgcagcctacggtgaggagatgacactcaacagttccttgatactttaagacagagcataaattggagagtcaccatgctgtcctcagggtgtgtccatgctctactccttccttcatggaccagccgccaacgctgcaacggagaacgcttggatcacccgcttgatcacagatcttaaagcccctgtgtctgaaagacgcgaagactgggcccgccgcactagtgtcgcgggcgcttcggtgtgtcttagactcgtgtcttccaagagagcgagaccggcgaaaactgtggaggttcctaaggtacggaaacaccatccgctgacccctgtccacgcccataggctggccccagcgctggctcctaccccaccccaccccccagcccagggctcccatcaagcctctggcagtggtccagctagccacgcctggtgtcccctcctcatctccctcccctgcacccctcttgccgctgctttctaccttatttggaacctgaatcctaataaagaattattaacccaaaaaaaaaaaaaaaaaaaaaaaaaaaaaaaaa

SEQ ID NO: 10371 - DNA, 398 bp, Canis familiaris
tgttggcgctgtcagtggcaggctacaaagccactaggtggctccgactggatggctccttcaaggtcttacttgtgccagtgtgggccagaccactgcagtgaaaggctacaccttggatggcaccagctcctcttaggaatatatgacaaaggtgaggaaaaacaaaacagttcactttattttggctgctctgcagggcaaagggcccctggcttggagtcatacactcctggattccaggcttgttccctgggccaaacacaacttttgtttccacttccctctgaaatggggctaatatttacttgggtgttgatggttaaatgagatgtatgtaatacaaaatacgcaaataaaatatcctgagaatcgttaaaaaaaaaaaaaaaaaaaaa

SEQ ID NO: 10372 - DNA, 538 bp, Canis familiaris
gggtgactgctctcagaatggttcatgctaagagtgatatcagtaacagagctctaggaaagccgtcttcagattactatgtgtgatgtgtgttcgtccaggagagcataactctctctcgcctatggtgaaagcccacctgttgacaacgagataggcgcccatagtcctgtgcccctctcttatctgcatatatgagggttgtagatgtgctctacatcgtgatatcaccactagtagagcgacagtgaagggggcacggggcacgagtgtagattggccagagagtaaaggttccattcctgttgtgaggattgggtatcaaagtattagaaatacacatatcaaactgatggggggggtgtgtgtgtgtgtatgatagaagtgcaggtgggcctcgtggaggttgtgagtgatgcatcctagggcagagtttgagggtggaagagataattagccatcaactttaaggaaaagatgttacttagaaactttgaaatatgggctgtgaaagttctaggagaaaaaaaaaaaaaaa

SEQ ID NO: 10373 - DNA, 280 bp, Canis familiaris
  misc_feature (64)..(64): n comprises a, c, g, or t, or includes no nucleotide
ttaatggggttccaccaattaactggggccaacctggtttccaaaatattttgttttaaacctnccctgtatagaaaaaaaaatcattaaggatgtaaaagccatgcttgcctatttgctgtatacatgtaatgaaattgtagataaagtgttagtgcattgaaacaaatgaacaaaaagtagatacttttactatacaagggtgctggtgcagaaaaaatatatatatttttggaaatgtagcattttatactttcaagtgttataaaaaaaaaaaaaa

SEQ ID NO: 10374 - DNA, 146 bp, Canis familiaris
caacagtttaaaaaacagataatgtaaagaaatcgcaagaacataataattaaaatatatgaatttccagagacagatgatgaagaagataaataagcttgttaaaaagataaaggaccgtttacctcttgctgtggtaggtagta

SEQ ID NO: 10375 - DNA, 539 bp, Canis familiaris
tgttcagcctcgctgaccctcttctgctagagctgccactcctggggttggcccgacgtcctgggtagaaatccatctcagctgggaggagatcttcgtgctcggcacacttctcacaagctaactggactatagcagccttatttctttttgtacaaaacagataacacagaaccattcagatggctccatttaaaacaaacaggcaaaaaaaaaaaaaaaaaaaaaaaaaagtcagcatggttcctgaaatccatttttgttttcattagaaaactaacattctgtggtagagcaggtgccagagcaggttgtctatggatcgtgtttacgtagatcctcttcaaccggagggcttagctgtgagatggagtcttgaacatcctgtatccacctgggttcagagtcaatgagacaagtcaccaggagaaatgtaggagacagatgttctatggtggctgcttgtattttatttgtgtatattgtatgttgagataattcaaataaaatccatagatattcagtgaaaaaaaaaaaaa

SEQ ID NO: 10376 - DNA, 681 bp, Canis familiaris
cgatgtcattacaggcacaggtatttgaaatggtaaatacggcatttcagggaaatagtaagtcagaggggaaaatactggtagtctttttaaaaggtggaaaggaataagcaggtctttcagaccttggccccgatggagaaggaagccacccccacgcgtctcactgggtccctggggccgtggctgcccggtttctcctctgggcagttaaggtctctctacaaaatctggattcagcactgctgagttgcagctgtttttgcgtgaaagacctgcctcagagtgtgttggcggtggagcccctgcagcggtgacttggcgttgcccttgtggacgtgggctgcgctgctttcccagtaggtgtggggtgtacgctttaggacgtgatttcgttcagtaccagttacacggctgcttctcctgctgctgcgtgcgcaccacctgctgctggtcctagtccccgagcagactgcgacatcgtccctcacctgcctgaaatcttgccgaaggcctttgcgtttcctttgtgttctgctgtccgggcgagggtgggaggtcggctggctctgttctgtttattcaccaatttgtacatgatttgttgtcctttgctactgtaaacagtaaatatagtttgctattctgaaaaaaaaaaaaaaaaaaaaaaaaaaaaaaaaa

SEQ ID NO: 10377 - DNA, 393 bp, Canis familiaris
  misc_feature (1)..(1): n comprises a, c, g, or t, or includes no nucleotide
natactgactatgaagacttaaactttgactcctacatgaatcccgacacaagaattaaagccaggagaactccgactattagaagtagacaaccgagttgtcctccccataggaataaccatctcgaatacttatctcttcaggagacgttttgcaatcatgaaccggttccatcactaggttttaaaactgacgctattgcaggacgactaaaccaaaccacccttatagccacacgaccaggactgtactatggccagtgctctgaaatctgcggatctaaccacagctttatacccattgttcttgaaatagtccccctatcttactttgagacctgatctgccttaatagtataacctagactagatctactaaaaaaaaaaaaaaaa

SEQ ID NO: 10378 - DNA, 602 bp, Canis familiaris
atactcaggtcttccagagtcctttcctcatcccctgcctctgaaagctgtagagagttttcaggaacttgtttaagcagtttaatagagctattaagagctttcctctctggttccacccccgaccctgtacacccctcagcagtcattagagaaatccctcgaagaaacccctgattttgacccatgaggcattagaactgtgctgttcaaatggtaatcactggccacatgtggctatttaaactatattgaaaattcagttcctcagtgcattagccctattgtgagtattcatgaggctagtaaattctgtatttgacagcacagagattatgggacatttccatcatcacagaaagttcttttgggcaacactgcattagaatattttcatgctgctttttctcagatcagttcatttttgttagagaatgtagataatttaatgtgtcataatgttccatgaaaattcttgaagatcaattgcatatgtttatttttcttaattctcactctggtcctttttaagtttcctataaagtttgttgtttcccaaaaaaaaaaaaaaaaaaaaaaaaaaaaaaaaaaaaaaaaaaaaa

SEQ ID NO: 10379 - DNA, 423 bp, Canis familiaris
cacttgtatcggctgtaggtgtttactttccacagctagagatggtctcttttaacttggccttcaatgctctttgcatatctaagaacagtagctgggcccgccccagtccatatttcagttgttggcgctcttctctcattcctccctggtctccttaacttgtctgttttacggcacttactataatcagccttgcactagagcttcgccctccctgccctccccacccacccctcccccgttagattgtgagctcttataagacaggggtgaccctttatgtctgattcccctaccagatctagcacagtgccttgcattaagtcgactctcctataaatatcactgcttataatgccgaaaagacaaaatacagcaataaacataaagacccctcgaaaggatactactggagcgccg

SEQ ID NO: 10380 - DNA, 259 bp, Canis familiaris
  misc_feature (1)..(1): n comprises a, c, g, or t, or includes no nucleotide
nttgtcaatattgccccgaccagatgcgaccacccgatctttagccagagaactttctggaaccattaaagagatcctggggactgcccagtctgtgggctgcaatgttgatggccgtcaccctcatgacatcatagatgacatcaatagtggtgcagtggaatgcccagcgagttaactacaaaggaaaatatttcaataaaggatcatttgacaaccaaaaaaaaaaaaaaaaaaaaaaaaaaaaaaaaaaaaaaaa

SEQ ID NO: 10381 - DNA, 562 bp, Canis familiaris
gttgcccattcaacttgccgcaatgccttacacattccttgcatattataatcctcctacacaccgttatccaggcccgacctccagtagctctgagagaagccatgagagactcttagaatcacaggaatagaccttccagaccccttgtttgtataaagaacctttgtcacatgttgataaacactattccccaggaccagtcactggaccaccaccgagcagacgccaaagcccttaccagctctgtgacagaccccagggtatgtgctggggaggccgggacgctgggtatctgtatgtcaatcagtgcaattgttttcttcccctgggttgggggtcatggaggcgagcggcctggtggtgagtctccagggctgtggagcagactggaggggcccagcccagccggggaggcagcagcccctcacccccgggggaagttgccagcaagaactgatgtgtgacttcctggatgttaatgccattaaaaccaacattgttgcccggccaaaaaaaaaaaaaaaaaaaaaaaaaaaaaaaaaaaaaaaaaaaaaaaaaa

SEQ ID NO: 10382 - DNA, 652 bp, Canis familiaris
agccctttgctctggagtaacttctccagcttcagctcaactcacagcttctcccagcatcaccctgggagtgttttgagacttttctcataaatgagggccgtacattcctgttttgctccgaagtattcagtaccgctcagtattttaaatggaatgaattctcaacctgtgaatttggtttgggatccaataaggggagcaccaaggcacccacccacaataataccaaggaattggaaaggattttctccaggaattggaagttaagggaaaggtaaccccaaaccactttcttggcttcccaccttaattgggcctgccaatattgtaagaatggcatatcccttgttacctgtgatatttaaaatatccacagtgtccaccttttccaaaagattctagtaatgatctagaaatatctttctcttatctgttatttatcaatttttcccagtatttttatatggaaaaaattgtattgaagacatttagtatgcagttgataagaggaatttggtataattatggttggtgattattttttatactgtatgtgccaaagctttactactgtggaaagacaactgtttaataaaagatttacattccacaaaaaaaaaaaaaaaaaaaaaaaaaaaaaaaaaaaaaa

SEQ ID NO: 10383 - DNA, 626 bp, Canis familiaris
aagctacagttttccaccccacattgctgctcctctgcatgttttcggcagccctcattcaagcaccacggctgattctcacagtctgttgtctgagtagtagaaaagccacagggagtcccttcagcaggcttgcagagtgaggaggcagggcccagtctgtagcagagcagccacagagcttctgcaaagcgctcctagcactgagtgtccgcagtgctgcagcaggagcagcccttaggcaggagtagttcaagagtggatgcgcctcatcagccacaggaggacctcgtggaacagaagggttgggaggtctctcttgcgtgttctaaaacattagtttcctcactcgttgaatattaaatgtgtaccaccccaatgtgctcggctcagattactcagctttacaactgtctgttcatttcttagcttagaaaacagagaagtgatgcacttcccgtgacataaaacaggcgcctttctagtgttttggacttttcctgagtgtgtttcatgcaatggcaatgcattcggatggacagtgagaagaacgtggaaaagaccaggattcaaagaagcgacagggtactctctagagttttagacaggaagatttttaaaaaaaa

SEQ ID NO: 10384 - DNA, 598 bp, Canis familiaris
cctttccctgactattatactgcctgagatagccagagaaacctgtgcttcgtttaaaaagccacagtagagggtggaaccagtccttaggcgaatttctttctaaagtattttgttcaaaccttattaggtcacccccaagtaattcttttggtcatctacagtgcaaggtacctcagatataattactataatccaagaattacagcttttgaggttgtacctttatcttaagggcagtagtttgacctagaaattcttatgtaagggtcattggacaagtgtcttagaacgtgaaatttgagtggccctttaacatttcttttcctccttcttggtatcccaggcttgcctccaattttaggccctttagtttgcttctgcaagcagagaacacctacctgagggggctcctttccgtcatgtacagttcaagtaaagatcaagaatcttttgtataactatgaaaatttactatgtaaatgcttgatggaatctttccctgctagtgtaacttttggaaggtgctttctccatttatttaaaactacctgtgcaattaaaaagtgcatgcagaaaaaaaaaaaaaaaaaaaaaa

SEQ ID NO: 10385 - DNA, 652 bp, Canis familiaris
  misc_feature (239)..(239): n comprises a, c, g, or t, or includes no nucleotide
gagaggaaggaaaagccaagatccattatcggaagaagtaacagcttatgaggctacggaaacaggccgaaaagaatgtggagaagaaaattgacaaatacacagaggtccttcagacccagggactcctggtctgagcccaatgaaaattgacttattcatcatgctttggcttggccctgccccttcctccaatcgccggccctagggatatgggggactcccaggggctgctgccnctcatgcctcaggcaaccctggggcttacagtactggggaacacaaagggctttagtcactactgtttaagaaaaggtcttctaaaaagttaatgcaaattcttaagagttctgaggcataagtgcctgtgactcattcctgagagttattagtgccatttcactgtaagcaagaaagacctggaaaatggaggggagcccttcgttgagaatggggtgtatttaaacttgtcatgcacagtcaggcgctatactctgtagctgttagggtgtgaggatgctgggggccaagcctggtgtacagaggtagttccagatctgtagatggggaacagccaaggggtcacaggctctacccttgtgctatcccctgtaattctgtgatccaaacctaataaattatttttaaagaa

SEQ ID NO: 10386 - DNA, 665 bp, Canis familiaris
  misc_feature (1)..(1): n comprises a, c, g, or t, or includes no nucleotide
nccatagttcatagttgaaaagctctgtctggagatgctttgtttggggttctgtgaagccttgggtcaggcaccccaaatctggcccgtgctgaggattgaaccctctgcgtttcacatcctctgagctgcacccttctttactgaagatgcccttttgctttatagactctgtctggagagacaatatcacttctctctccacagtttgataaagagtgtatagttttgccctgggggcctatagcctctctgcgtctcttttgtggcacaccacattgtggtaatggagacccacattctgtggaaggttcacagggaacgggggactggcctgaaggaaggaggctaaggcccttaggccttgggccccccgggcccagaattgccatttccatcactgatatttaagtgaaggggaggatccctagactatgttcttggctccagactcaaaaatccacaaaagccaaaccagctcatttcaacaaaggagcgctgatgtgaggggacaaggctgcctctgcttccaggctcttcagaaagcatctgcatgtgaacaccatcatgcctctataaaggatccctattacaggaacagcatgagtggtggctaacctgaccaataaagttattttatgattgcaaaaaaaaaaaaaaaaaaa

SEQ ID NO: 10387 - DNA, 247 bp, Canis familiaris
  misc_feature (1)..(1): n comprises a, c, g, or t, or includes no nucleotide
ntgactcccagggtagcctgaggcctgccccaggcagtaccagaaccctccattttcaggctgggaaacggccgagggtgcttgagccgaaccacgtgcaggccgtttttcagccatttttaccacgatagcagaattgaacacattggcccaaataaagttgaaattttactaaaaaaaaaaaaaaaaaaaaaaaaaaaaaaaaaaaaaaaaaaaaaaaaaaaaaaaaaaaaaaaaaaaaaaaaaa

SEQ ID NO: 10388 - DNA, 605 bp, Canis familiaris
tcgcaccaggacatgcaactcagcttctgtaaccagttaccccacccaaagaaggccttattttcaagaagcaatgtttgttcaggaaccctgtcccaattttggagaaataaggtgggtcaccaccccaaatcaaattacgtcccagtggtatgaggtgtggaccacaattcctgggaaaaatggtagatgctgcaatcgtgatcaaaagtgcctttctgttttaccgtggcaaagaagtaattggaaacaccttatagtattggtcacattcatgttaaagctgttatgtttactatgtattaaagtttaatagcaatagtagatgtttattagaaatattgctgagaatatttatcaggttttacaaaatcattttaagaaaacaagatattgacattaacaataacatttttagggaagctggctccctaattcatggtattttaagagatcatttgtatattatttatcgcactgttgtaatgatgttttgagatacttttataacaaatttaacatcaaaaactaatatacttaaaaaaatacttttattaaagtgtactgcttcttactggtgagttaattccaaaaaaaaaaaaaaa

SEQ ID NO: 10389 - DNA, 498 bp, Canis familiaris
ctcggggtcagcgctgtggtactcacgggagccgggcttttagggaagagtgtttgccggggtggtgtgccctctgatggggcaaagtcttggaaggatcccaaggccttttttggcaaaagggcccacctgggaatcccaaaggaggtcctggccttggggccaagcccttcctggccaccgagcaggtctccctggcagatctgatggcattcacggagctgatgcagcctactgccgttggctgtgacctcttccgagactggccccggctggcagcatggcgagcccgagtggaggcagctctgggccctgagctcgtccaggaggcccacaagcttgtgctacagcctcgggacccccgagacgcccagcgtgaccccaagctggcccaggagctggtgcatcggctgctggagaggctcggctgagagggatgcgacaacggggcctgctcccctgcgctctcctgcccgcaataaacgtgctgtgtgtcct

SEQ ID NO: 10390 - DNA, 678 bp, Canis familiaris
atgttcgtcaggttaccggtccctccgggcccaagaaggccccccaggcgctgtcctccagggggctgtgtcttcttgggcccatgtgcttggtcccccggcgagtcacctgatggatcgcatccagcgcatatctcatggtgtccctgtacgcgcagcatctctctccacgcattgcttcctccccggccgttgctcgccccagcatggcccgtgcacgatgggcgtcctcgacgagctcttgtgggagcacatttctcatcatgggaagaggggccggcgcaccatctttgtgtgtattgcgccgcgctgttgtttatatgtgttagacgcccccctcgtcgccccacagtcgcaattccccttgtttttgtgtatttctccgtgaccaaaatgtaaccggaccaccctggaaaccaaaagggtattcggaatcccttttttaccccataagggtttttaccaaagaatgtgtctcactaggaactaggacactcatcggcccgagaccaactcctagataaaaggaataaaggagaatcgtgtttgtaataagttacaggattgtttctgtcctggattttaaactttttgttaaattgtgaaattatggaggagttttatagaaaaaaaaagtgaaataaagtcagatgggaaagcagaaaaaaaaaaaaaaaa

SEQ ID NO: 10391 - DNA, 574 bp, Canis familiaris
tgctcccattacccatttattgcctttcggccccagatgcgctttccttacctgctctgtgatcctgagccggaccctgtggacatctcttctttgctgtatgcacgatgttatatatgagggacactgcacggacgagggggcttctctttctggtttcagtgacatctccttccctgttgctcacgtctgcagggctgcagtgaggagacagccaaggtgcctgcccagagcatgcagaggtcccagcatgggccgcagctcccagggtctgaccctctgagcgtccggccgccagcctcgcctgccacccctctgtggggtgcatcccgcttgcctggtgactgcacacattggctcaggcagcccagcaaacctgtgtgctgtccagggagccttctccagcaagatgtgaatcccagcctccaggagggggtacctttcaagtgaacttttttttaccctgggcatttgccgttaaccctagggttttcttgagagttctctttgaacattattgccttagtagacttgataattctttatattaaacttgccctgatcaaaaaaaaaa

SEQ ID NO: 10392 - DNA, 527 bp, Canis familiaris
tcaagctatgtgtcacagacaacagggtggttgagttcctccggatgacgtctcaggatgatcctagccgccccaccaacgatgtgtgtcgtcacactactacgaaggaatgtgtcctccccaccacccgcaacacgttctaacacgagatcacggggtctcagagtacaccccctttactcccctcacaccgacgcagcgcacgcccatgtctaggcgtcacgagattttaagagagtgttcccaggacttttggaactcactcaagacagcgatggttattttagatgctatgatctatatttatagagagattcctggaccactcaagctctttgacccaaatcaggaacatcttgggatttattaaattatgtaagaagatatagcacagatatcagaatattgtgtggaagtgaggctgttactttggtctgatttcattgatgtatgcgaccagtttccaataaagtgctagaatgacaaaaaaaaaaaaaaaaaaaaaaaaaaaaaaaaaaaaaaaaaaa

SEQ ID NO: 10393 - DNA, 173 bp, Canis familiaris
atagagggactatcaagaaatttacttcgagcaccaaactcacataactcaaagccgcttggtccactgcaaaccttgatggaaaacctgtcttcaaacatgttttactcccaaccagaacaggcaaggaagaaagaaagaaagaaagaaagaaagaaagaaaagaaagaaag

SEQ ID NO: 10394 - DNA, 519 bp, Canis familiaris
  misc_feature (456)..(456): n comprises a, c, g, or t, or includes no nucleotide
acagctatgaccattaggcctatttaggtgacactatagaacaagtttgtacaaaaaagcaggctggtaccggtccggaattcccgggatagctgacgtccgacgacgtgaaggagcagatctacaaactggccaagaagggtctgactccctcgcagatcggtgtgatcctgagagactcccatggtgttgcacaagtacgttttgtgacaggcaataaaatcttgagaattcttaagtccaagggacttgcacctgatctccctgaggatctgtaccatttgattaagaaagctgttgctgttcgaaagcatcttgagaggaacagaaaggataaggatgccaaattccgactgattctgattgagagccgtattcaccgattggctcgatattataagaccaaaagagttctccctcccaattggaaatacgagtcatccacagcctctgccntggtcgcataaatttggctatgtactcaagcaataaaatcattgtctactagaaaaaaaaaaa

SEQ ID NO: 10395 - DNA, 684 bp, Canis familiaris
  misc_feature (382)..(382): n comprises a, c, g, or t, or includes no nucleotide
catttccaaggagcatcatacccctgttgtaaccaaaggcctacgatatcggaatattttctgtgttgatcgtatcagaagtatttttctctgcaggcttcttgctgagcgctttttaccacgtctcagcgctatgccccctagctcctgaacttgtggggttgctgagcctcctatccggcacataattcctttttaccccattaaggagtgccctttactcgcacaccctcacgtccttcctaagccttccgcgaagtatttaattaacctgaggccccattcaataagtttaataaggaaaggtttaattcggccaaaccataattaccttccaagccctttatttccattaccaatcttccttaggcgtatattttanccgctatttacaggcctccgaatactatgagacatcttttacaatctccgatggggtatacggatctaccttttttatagccactggatttcacggattacacgtaattattggctctacattcctcatcgtgtgcttcctccgacagctatactaccacttcacatcaaaccaccacttcggatttgaagccgctgcatgatattgacactttgttgatgtagtctggctattcttgtatgtatctatttattgatgaggatcctaaaaaaaaaaaaaaaaaaaaaaaaaaaaaaaaaagg

SEQ ID NO: 10396 - DNA, 675 bp, Canis familiaris
ttgtgttcaaaggtaccttctgggaacctatagtgccctgtgttttcaggagtttagaatgttaagatctgaaatcaagtaaagcacttacaccgggcttttttaaagttgcatttgagaccatttccctcaaggagcctgttttccagcaaattcagcaaggagagacgtgtgcaatcgtttcactctggttttctatttgacatctttatttgaaatgctaagaatgcaacaattgttcatcttctgaagggggggaaatacagcaattttgtttcccccttatactctgtgattatccccatagaagaacagcgtgttttaataagatagtagtagtatctcaaaagtgggttttatattctctagtatttctcgtcgctttgtggccccatcgcggtctttacagtgactttcagtgtaccagatcctcagctccctgaaatatggggctgggaagctctggaattacggcaagatttttgttccatgagcgcaatactacatcattaacatttttaatggtatggattttataccatctgtgtatgtttgcaaatattaagttattacatgttttcaaatgagcatttttcatcctaaattttatatgtttgcaaatatatttttttaataaaatttcaaaaccagttttagcacctacaaaaaaaaaaa

SEQ ID NO: 10397 - DNA, 726 bp, Canis familiaris
cttcgtcctatgactgatcccactatggctcacagacatgatgaaaggcaaatgtgacaaatgtgtctccctatgattcttattggtgggctggatcaacatgacattctccggctttgtcacaaccaaggtcccatttccactgactctccgttttaagcctatgctacagcagggaattgaactactcacattagatgcatcctgggtgagctctgcatcctggtacttcctcaatgtctttgggcttcggagcatttactctctgattttgggccaagataatgccgctgaccagtcacggatgatgcaggaacagatgactggagcagccatggccatgcctgcggacaccaacaaagctttcaagacagagtgggaagctttggagctgacggatcaccagtgggcactagatgatgtcgaagaggagctcatggccaaagatctccactttgaaggcatgttcaaaaaggaattacagacctctattttttgaagaccaaggagggatttgctgtgtcaggaactcagagtagtggttaactttgtaactttggtttgagctggagcctctcagaataaaatggaggtgcatgaactagcaggtattcagcaagaattgttcttatctgagccaggttcccctgtatgtctgaaactagaggagatttgaggagtctgtgccggatgacttaacaagaaacagttatttttaaaaaaaaa

SEQ ID NO: 10398 - DNA, 701 bp, Canis familiaris
ccgaaggtagcgatgattggcgaaccagaaatagctatatcagtacttcctctcctactgcagtctttgctcttattcccgcctcagcaactgaagccaccagcggagctcagccctgaggatataaacacttttaagttactgtcctatgcctcctattgcattgagcatggtgatctggagctggcagcaaagtttgtcaatcagttgaaaggggagtccagacgagtggcacaggactggctgaaggaagcccgaatgaccctagaaactaaacagatagtggaaatcctgacggcatacgccagcgctgtaggaataggaaccactcaagtgcagcaagagtaaggtccagaagagttttgtaaagtcctattttatgtgaaagggaatcagcagtgatatatgaagagtttgcaacagggtcccagaattgtctaagaaggagcaggttacaagtactgttctaaatgttaacacctgttgcatttatattatttccacttgctatcatgtcagtgaactccaggagtactttctttgcaacttgtgtaacattatccgtttttcaggttttactgatcaggcttgtgagccaatcaaaataatgtttgtgatcgctattactattgattttgcccttggagcaaactgaataaaacagaaagatgaaaactgaaaaaaaaaaaaaaaaaaaaaaa

SEQ ID NO: 10399 - DNA, 118 bp, Canis familiaris
aggaagaagcaggctccctgcaaggagactgatgtgggacttgatccccgaccccgggatcacgccatgagccaaaggcagccgctcaaccgctgagccactcaggtgttcttagttt

SEQ ID NO: 10400 - DNA, 664 bp, Canis familiaris
taagtgagtcattaagtcacagctaatgcataccattaagagttcattatcagtgctaatagcaatcaacacgatgaaggggtgggaaccacagcccatcgagtgtcccttcgctgcactgggtttccgcgcaatccatgtgtgatacgcctctacggctacgtaggcggagggacggtctactgaaggcggagggacggcctactgaaggcgggccagcaagggacagggcctcgcgggccaggcggcctacatgtcgtacaggcggagctgctcctgcacgtcgccgtcggacatctccccaaacgtctccttgttctccttcatgagcttgaagatagccgccagctgctccttctgcactctctgctcctcctccagctcctctttggtcatcatcttcctgtacatggttcccccgcagcttccccgggctgtatttaaaggagaagacctctcccccgtcctcttcctcaggccctgcttgggctggtccctccgggccatcctgctccggctctggctgcggctccggctgcggctccggctgtggctccggctccagctctggctcctcttcctgcctggcctcagcggcctgctcctccgcctccaccggcgccgccgccgccgccgcgagctcccccgggccctcgggctcccc

SEQ ID NO: 10401 - DNA, 677 bp, Canis familiaris
agatctatgacatttctttcgcatggactgacatgtgcagtgtaagcgagaagatatagccaaagtaccgtgctcccatcaggtgcacgagccgctgatccgcagcacaacgcggcttcccgttttacgccatacaggtggcccctatctcctcgagttgctgccatgcagccctagatccaatcgcttgaatgacagaggcctgggaccgtatagcgcataggcagagtacaagctccatgttagctgctagtgctctagtcaagcattccttcggagaattcatccatcttcgctcagctgagtgacgcaacctcccatggctaggtgcctggatgaacctgccattatcaacagtgcgctccccgggaagacctcaacccgtcattgggacgagctggcacagtgaggcgtcaggctgtcgatgtgtcccccctacgccgtgtgaatcaggccatttggctgctgtgcacaggtgcccgtgaggccgccttccggaacatcaagactattgctgagtgcctagcagatgagctcatcaatgcagcccagggctcttccaattcctatgctatcaagaagaaggatgagctggaacgtgtggccaagtctaaccgttgatcacctggctgtggcttcaataaacctgtctgcccttggggcagcctcaaaaaaaa

SEQ ID NO: 10402 - DNA, 380 bp, Canis familiaris
ttttctctttttttttcttcgtcttcttccctctttcccccttttctttgttgctctctgggcaccgggctggaggtgtgcgatggacggccccgccttctaccccccgccgccgggggctgtgccctgatgaccagcgccctggggatgaggaatcgctgctggtcagaaagcagctgccaagtggaacgttctgtttacgactgtctttaccggaggctgttctgttgtcttccatttcccttcacgcccgcgagctgacgtcgtggttcctgtgaatctgggttgcatgtgggtacgttggaagaaaggcgatctcccacgcctcggtagacgctttgtggttggaataaaggacgcagatttgcaaaaaaaaaaaa

SEQ ID NO: 10403 - DNA, 533 bp, Canis familiaris
cagcgcctcggagaggcctcagtatcgcagccctctgggccctccagaaagaacatgatggggaacctaagtcgcctgtttccgcagtcatctggggctgcccagagcgcctcagccagccagcctctcccagcccccttcaggtggttaagggactgggtccggtgtgggcctgggacttgctgggcagctgaaggatagagaagcagccgcagtctccccgcctccccagctctggtctggtcctgcccttcctgcacattcatcaatgcccccagccgatcccggctgtgagatgtgcagcacccagaagccctgcagttgggacccccttcctgcagcctccacccatccagccgccaaaggtctcgaagagagaggatggcctgatccctccgggcccgaggtccctggagcctgtcctgaaactctcaggcgacttttgctgactgcctcaccagcatcaggctcagggttgtggagggctgcgatctggagtcattaaagacacttctgagccataaaaataaaaa

SEQ ID NO: 10404 - DNA, 611 bp, Canis familiaris
tcagaatgtgttacatcacatcttactttttttctaacaggctcttaatgcagttggcatttgctgtattcatattaatgtattccttatttatagctctgatagctttaattttctaagcagtctgtctatcagatgtgcacatctgctgtgcctggttgaagtatagtggaacccatcagaagtaatgtagtagttatgacttgttgacatttccattataaaatttaattttgaattgtttatgcgaaataaccatagatttgtgttgtattgggctaaaagttgacagaatttcagccaccatttatgaattttgatttagacttacaacatatcagaatctgttataagagcacagaaatttgaaatgatttgttctaatctgctcttctttaacacagaatatttagttttttaaacataaaagtttctctgtcacttagcagtacgaaccagattgtttttgcattaattaaaaaataaaacttagaaacttagatttaaaagtggtagtgcttagtattgtcatttgaatgaatcatttaaatttaatgaaaatattgaccatatttttctgagttttatactctacatatgacaacctaaaa

SEQ ID NO: 10405 - DNA, 526 bp, Canis familiaris
ttcttcttgagccttttaccactccatgcctgagccccgtagctctctgaaccttgggggtttgctgacctcctacctggtgcattattcctctttaatcccattatgaatgtgcctctatctctacaccgtcagtcgctcctagcctccggagtatctatttacttgagcccatcatagtgttaatagaaggtatatcgcatgacatatacttcaagcctgtattcattacaatctccttatggcgtatattttacgctattacaggcctccgaatatctatgagacatcttttacaatctccgatggggtatacggatctaccttttttatagccactggatttcacggattacacgtaattattggctctacattcctcatcgtgtgcttcctccgacagctatactaccacttcacatcaaaccaccatcttcggatttgaagccgctgcatgatattgacactttgttgatgtagtctggctattcttgtatgtatctatttattgatgaggatcctaata

SEQ ID NO: 10406 - DNA, 609 bp, Canis familiaris
gctgttttttttctgtccccacatgccactcagtgtaaccggtttttaagaaaatgtagacacttgctaccttgtaccctgttgtgtttgttccgctagtcactatttggaaaagtagaaaatttgagtgtataatgtggactttcttttcacaagatgcctgttaaatgctgttgtgattttatatgaattttcctttttttatagtttaaaatcgatctttttgggaacacagctgaagttcccacatactctaagagtttatcaggcatctttaatttggtcatgtcccatttctataggtttcaaaatactgcagattgtgaacagtgcattatatgagattatggggggaaatcctatatccagagtactctacccatttgtgtgtatgtgcgtgtgtgcgtgtgtgattaccagagaattactaaaagacccactgctttttaaatactgttatgtagttcaagtgtcttgccttgacccaatctaatgagttgattaactgggcctttatacttaactccaataaaaaactaagcagatgtaagttaaaaaaaaaaaaaaaaaaaaaaaaaaaaaaaaaaaaaaaaaaaaaaaaaaaaaaaa

SEQ ID NO: 10407 - DNA, 718 bp, Canis familiaris
gattgctgcaaataactttcgagctgtcagtgtgttgattgatgcaaagcacgtgggactgagaatacttattctttttttggtatttcttttaaaacctggtaataatttacatgctcataatacagaatttcaacatatccatgcaccttattaagccctgtcttaaaaaccaatgtctaagtctgctgttacaacttattgatggttatatgaatataacagatgattctgaggagagaaaggccttgttggcaatactcctgttaagccattagtctataaattccagctttactgtgaagttctatagagtgttaaatacaaattttcctgtcttgcttcacacaattctctaaaatcagttttgaactttggttatagagtcttcatacttcagtatctggtggttcctatggcttatacataactttgtaaaaagaaaattttttctgatgctttgaatatagttttgaaaggagtttgactttttttcccctcattcatctcagcatagggtgcactatttcacaatatgaaattttttgtcatttaaattatcatattctttattatgtaactttaacaattgagttgatctgtttaaaatataaatctactcaagttaattaaaaataagcttttcaaaaatgtattatatttataacaaatgtaaatagaataaagacatgctattcactgtaaaaaaaaaaaaaaa

SEQ ID NO: 10408 - DNA, 619 bp, Canis familiaris
gtcagtccagtatttgtttgcagcgcccggtccttggttccggcttcttccagctgctgttcttgcaggggcccctcgcttgctcctcgagggcaggagggaggccgccctatcttctttcagtgtctctgtattacacctcaacgtacacactttgctgctactgttcgtactgtctacagtagaatctccttatcttgctcctggtagtgcgttacaggcaagcatgaaatgtaaagtatttatttaaatgttaagtagacctctaaattggtaattgaattacctccctgtagctttatgagtttgtgacatttcttgaccttgctagttctttcattagatccgcgcaagatctagtcatctggttaaggattttaagcagacgcaactatgaacccaagataaactgtattactattattgtcggtcatactaaaactgttcatttccttaagcatatgacccacaaggatgtgaaataactacaagaaactgtttttgtacactgtacatccttagtatttttacacgtatatgatagggatgcacattattttccttcgtacagacggcttaaataaagcactatgtctatctgctaaaaaaaataaaataa

SEQ ID NO: 10409 - DNA, 645 bp, Canis familiaris
ccaccaaggcccccacggccttgccagatgacatcatcacgcagcgagaagatgccaaacaggccagggaaggaggaagaggaggatgagcaggaggacgacgaggaggcgagcaggaggcagtggttccagaaagccggccgcggaggcgaaggccaacgaggccgcctgaggcagcagcaaaggtggaaccagaagagaagttcagaggaaagaggcagaaggactttgatatatcagaaccaaaggagtccagcgatgaggagagccagaagaaggacagaacacgtgctgctgaggagccgtggactcagagtcaacagaaacttctggaattagcattacagcagtacccgaagggatcctctgaccgctgggacaaaatagccaaatgtgtcccgtctaagagtaaggaagactgtatcgctagatacaagttgctggttgaactggtccaaaagaaaaaacaagctaaaagctgaatattctggaagatgatgttcactctcattttccaaaatggttattttgaaaatcttatgcagaaatttgcattttgtacctcagtatttctatacgtcatgtgccttagtaaaaaaaaaaaaaaaaaaaaaaattaaaaaattcttaaaaacaaaaaaaaaa

SEQ ID NO: 10410 - DNA, 687 bp, Canis familiaris
  misc_feature (196)..(196): n comprises a, c, g, or t, or includes no nucleotide
tacttgcaccccgccggtacggggcccatagcaagcctccgttacaacccccgagagcgccagctatacgcactgggaggaactggatgaccaagcatagttctgatcaagcataggagagagcagaacggaaagagaagagaaggaagtaatggaggacgccaagctagttggttggtctgtgatggatttgtcnacctacctgcaccaacttcttaccacccccatcatccgacgctctcgctgcttccgtctgtcgcaccagatgtcgaggcaggccgccgctcccgccagtatgccacacacagtgaaagccactttctcaagtccccgcgttctcctgggggacttagagatctgtgagacgctcctttccacaggcggaaaagagggaaaacctacactcccctcctgccccagggcagggcctttcaggccagtcggaggtctcgcagatccacagctctggcccttacaggtgggcaaccccagcaaaggggcagcagaatattccctgcctcagtgttagtagggggcggggagagcgagttccggaggagggaaccctcacctctggctgcccctgaagtgcccggagaacctgggcttcctgcgcatcattttgtattgccgccttttgcattaaaaggaaaatccactgctaaaaaaaaaaaaaaaaaaaaaaaa

SEQ ID NO: 10411 - DNA, 105 bp, Canis familiaris
ttgtcccttgtctgcctcaactgctctgggacacagcacttgagactttcaaaacctgtcccctgaaacttctgaactgttcactttaaaattgtttattttgaa

SEQ ID NO: 10412 - DNA, 655 bp, Canis familiaris
tatgtcagtggaaaaaattgctgcaatcaaagccaaattatggcttaagaaaagatccaccatcaagactgacttagatgatgatataactgccttaaacagagaagttttgtggatctgaggtagatgtgacacgggatattgtcagcagagagagagtgtggaggacacgaacaactatcttacagagcacaggaaagaatttttccaagaatatttttgcaattcttcagtctgtaaaagctagagaagaagggcgtgcacctgaacagcgaccagcaccaaatgcagcacctgtggatcccacgttgcgtaccaaacagcctatcccagctgcctacaacagatatgaccaggagagattcaaaggaaaagaagaaacggaaggtttcaaaatcgacactatgggcacctaccatggtatgacactgaaatctgtaacggagggtgcatcggctcgtaagactcagactcctgcagcacagccagtaccaagaccagtttctcaagcaagacctcctccaaatcagaagaaaggatctcgaacacccatcatcataattcctgcagctaccacctctttaataaccatgcttaatgcaaagacctcctacaggacctaaaatttgtcccatcagatgaaaaaaaaaaaaaa

SEQ ID NO: 10413 - DNA, 628 bp, Canis familiaris
ggaaacaagatggaacagaacatactgggcaggcgaatcccctgcagggccgtaacttgacccggcattcagctcaaggctgtgaagtcctccacagccccggggacagctgcggaatgcactctggcacacaggggacacagcatcacaggtgcgcttgctgtggaaggacccccgcaacggtggtttggaaggtacaagacatcctaccgctggttcctccagcatcgtgccccaactgggtgcgtacatccagcagtagcgctgtttacgacgagtgctcgagatgttggtcccacaccaacaagtgttctctgtgacacacaacaccacctatcgcgggggtgccccgctcgtggggtctctttgcgtctttctcccagagagacacttcattctggcccaatctgcgctaccggtgccaatgacacccatacccagaggactacgagactcagaggcttctgcaggcctagggatgggggtggggacccattgctggaagatggcaccatcgtggctaccctcactgcaacaaacagggagcttggcacccggctccaagaggtagctgccctagaggggctcagaaaggacaaaataaagtgtgtgtggtggaaaaaaaaaa

SEQ ID NO: 10414 - DNA, 618 bp, Canis familiaris
tcccacttgtctctgctcttgttctgaaatgtttctctgctttgaggtcaggaggttcactctctgggattggaattcgtcaccccagttccagttgtgctcagtttcaagcttgcagttgtcggttagtttctgttccccagaaccacaacacctgtgagtttctgagagtgagagaggattcgagaggttaattttggaaacggaatccctggcaacccctgttaactgcccctgagttggtgctaaattttgcctgaaaaatgtcccatcttgactgctctctgtggcgctgactccctcttctggatggcaataatgtcttatgttgaaacgtgctttatgttgtcctcaaaatattaatggagatggcccagggatgagcttggtttcacatggtagtccagagcttgtttgcgcagacagctgttggccaagtgtgtacttaagcgctttccctacttcacctttgaaagttcctttttcaaaaaaaaaggtttattcaaattacagaggaggggaatgtaaagtgaattttaacaaaagtaaaccttgtatgttaatgatgatgaagttgatattaataggaagaagtctcataccatgataaaaaaaaaa

SEQ ID NO: 10415 - DNA, 623 bp, Canis familiaris
gcgggacctcgttctcaaattcctacagaagttctaaatggaacagctaagccatttctacttcactgaaatcctacagtccttcgctgtggctgcccagcacaaactgaggaagggcgtaaaaagttggccatgtctttgtggtgttctctggcttaaggaataaagaagtggcccttgaggaacacgattatccacagatatagccagaatctcctgggctagatttttagcactgttgtgggcaaggacttatgctttaaacttaaactccttttcttccccaacctgcctcccttgggtggccaagatggaaaggcggcaagctgaggagtagcataagcagcagctttcccagaagtgaatggtggaaggaggggtgaaaagatgaatgacgtaagcagtctgtgtttgtttttcgtggtgtcctaggccttgggcaggggaactagcattggattgtgttttatttacttgtctacagtgctatacctaataagaaagatgatcccaaaaaattggtataacgaaccatctatttgtattttataccataagcccattttgttaataaaacttatttttttatagaaaaaaaaaaaaaaaaaaaaaaaaaaaaaaaa

SEQ ID NO: 10416 - DNA, 597 bp, Canis familiaris
aatggatgaggagaaaattgaagaatatctgaagcgacagggtatttcttccatgcaggaatccggaccaaagaaagtggcccctattcagagaaggaaaaagcctgcttcacagaaaaagcgccggtttaagacccacaacgaacacctggctggagtgctgaaggactactctgacattgctcctggcaaatagggaacagttttgttcatgagccaggagttaataagtacaaagtcaagatctttcttgttgatgctgggctctgaggacgtctccccatgctacttaggactgaggggagaagctgttcagtttacagaacaagagcaaattaccgaactcaaagctttctttaattgaatgggctaatgagatatgtgatattccctgttaaccttctgttacttctgggggaaaggcgcttagcatggcatgcaggtgtctttgctacttctatttctaagtggttcctggttccatttttcttcctttattactttagaacaagttggcagataaatagtcttgaatgcaatatttgtttattcctaaagaacatatttataataaaatcattgtagaaggactctaaa

SEQ ID NO: 10417 - DNA, 566 bp, Canis familiaris
atggccccgatcggccggcgcacgccatgccttcctgtctggacactgaccgccgggcactgcccttggggtgacagccctgcagtcccacggctgaccgccactactgtgccttacgcctgtccgggaagcccaggctgctgccgtctcccacagcgcgcctccaccccgcggagccccgcaaccccgcccctggggtcggcagcctcagttggcccctggcagaaggacgaggacgcagacacgcccgtagtgtagggtcaggggacactgaggagagggcggacctccctggggaggggtccccggaaagccttagcccctcagggaacacggggtcccgggccccaggggaagtgggacaggacagtctgcctcgtggctgtaacaccccaagggaagagagcaggtggtgctggtgctctttttaggcccaccgtgcggggagaggcctgggggccccggcagcccgagctgggctaccccgggggaccgctgcaatagggtcaccgcgattgtcccattaaacctccactctgctaaaaaataaaataaaaataaaaaaa

SEQ ID NO: 10418 - DNA, 278 bp, Canis familiaris
  misc_feature (143)..(143): n comprises a, c, g, or t, or includes no nucleotide
  misc_feature (146)..(146): n comprises a, c, g, or t, or includes no nucleotide
ccaatcggttctcaccaaatgaccggtgcttataaaaagttattactcagtaactcccaaaccacctgaatgcataggaccacagagggaaatcagcctgtgtttagtaatttacacttggacagccgggtttttcaaattanaantttgcactgtcttatgtgaaaactggtggagaaaattctataacccttctttgccctgtttttgatacctgctttttgttttgttttgtaaaatgataagttctgaaaataaatgtcagtgtttggtagcac

SEQ ID NO: 10419 - DNA, 471 bp, Canis familiaris
gacagtgagcggacccgctccaagcccgtgctcacgggcacgcaccccgtgaacacaacggtggactttgggggcaccacgtcgttccagtgcaaggtgcgcagtgacgtgaagccggtgatccagtggctgaagcgcgtggagtacggcgccgagggccgctacaactccaccatcgacgtgggcggccagaagcttttcgttggtgcatgcccacgggcgacgtgtggtcgaggcccgacggctcctacctcaacaagctgctcatcacgcgtgcgcgccaggacgacgcgggcatgtacatctgcctgggcgccaacaccatgggctaacagtctttcccgcaggcgacctttccatcatccgttgctttggtccaagacccacaagccgcccgggccgcccgtggcccccgcgtcgtccagcacgcttgctggcccgtggtcatcggcatccccgcgcctcttcctc

SEQ ID NO: 10420 - DNA, 545 bp, Canis familiaris
tttggagcccaaccccgaagacccactgtacaaggagcctccgaggtcctgcagaacaaccggcgtctgtttgagcagaatgttcagcgctccatgtcggggtggctatatcggctccacctacttcgagcgctgcctgaaatagggtttgcgcacacccacccctgccagggccaccagccccggcgtcccctgcaaatattttattgggggccacaggtggtggggcatgggtgtgccggtgggggaatcccatgccctgaccttgcctcccctccctgccacccgctcctagttattattttttttttaaaccaccatgtgattaaggtcggcgctgcctccgacccactcagcaatgggaaatgaattggcttgtctagcccccagctgggtgctgtccagccccccactctgggctctggggtgggtggccaaggggactgggtggctggggctcgggcaccctacccctccaccactggaggtcccaccaggctattaaaggggaatgttactgcaaaaaaaaaaaaaaaaaaaaaaaa

SEQ ID NO: 10421 - DNA, 429 bp, Canis familiaris
gaatggttagggagcatcacgtgtcctactcccgtgctggggtggagcgtggcagcaggcctgatggatgagggaccgcgacgttctcgcccagagacatgaggtgtccagggccaggcccctcaccctcaatggagtattgttccgggggcaactttgaaatcccacccccaccctggggtagggtggcccatcctcagttccccacagggacaggcagtgggagtcgtctggatggtcaccaggaatcccaggttccatctcgacctccctctgcagggacaggagcaacaggtccctcctccctgactctaagcctgatcctgtaaggtgcggcagggtctggggagctctttgttggggcagatctggtggtttgaataaaaacccgtcatgcaagcccaaaaaaaaaaaaaaaaaaaaaaaaaa

SEQ ID NO: 10422 - DNA, 646 bp, Canis familiaris
actcatcatcactatccaacatttctcgtttcttcaggtgtagacgatcaattatgagttcatccagttattctccagtgatcctacccagcgttacgtcaatcaatagttagctattataagtatgtaccgatagtacgacttctggagatgcttaaaggggtcaatggtggcaccagtttcccatgccccatgcatcgaggatgataccagagtacaagggacccgagactcccatgcatgactttgccacgtatcccagaccttcatttcctaaccaagccccatgtcaccttatcactgaatcactatcctgcttaggcaaagccaaggcaggcagagcaagaagattatgaatagataaatatcttccactgattagtgagaaagcaaacacaacaaaaatttcctctgtttttgagatttttttaggatcattacttaaataaaacccagtgaaagatgatttaaaaattacattgttgggccacctggccggctcagtcggttaagcatctgccttcagctcaggttatgatcttgggatcctgggactgagcccctcatctggactccctgctcagcagaaaacctgtttctccctctcctgcctctgcctctccttttcttcctctcaaaaaaaaaa

SEQ ID NO: 10423 - DNA, 662 bp, Canis familiaris
tcgtcgagtggatccccaccaacgtgaaggtggccgtgtgtgacatccccaccccgggggctcaagatgtccgccaccgtcatcggcaacagcacggccatccaggagctgttcaagcgcatctcggacagttcacagccatgttccggcgcaaggccttcctgcactggtacacgggcgagggcatggacgagatggagttcactgaggccgagagcaacatgaacgacctggtgtccgagtaccagcagtaccaggacgccacggccgaggaggagggcgagatgtacgaagatgacgaggaggagtccgaggctcagggccccaagtgaagctggaggggcagagccaggctgtcgctgtggcccagaggcctgtcccccagagccacgtcgccactgacaccgccccgagccttgcccccaccagctctggccacagcgccctagggctcccgagtgtttgtcctccagtatttacggcatccccaccccacgtgagtcctgttttcccaccataggtcagctccatcgtgtctgctttatttgtcagctccaggcctgttttatggtttgttttgttttttgtttttactggtttgtgtttatattttgggggggaatacttaataaatttattgctgtcagataaaaaaaaaaaaa

SEQ ID NO: 10424 - DNA, 585 bp, Canis familiaris
accctgaaccagtccccgttgttccatctgctggggcttaggacacagcttaaagtccaatgggcctgggaccttaatactggtcttgtcttttccttagaagactaaaccctcctcatgactcttgtaaccagtgaaatctgaaagagtattccgaacccaaaccagttttggatttcctataactacaagtcttcagattttccatcacttcatggactttttctctatcccactctttttctctctctttctttttctttctcctctttttcttttccctggtaccttttattttttttcttcaccttgttagttccagaagctaaaacgttctaaactatcagtttgctcattgttgggaaatttttaaagcagataaaatgatagcttcagtataaaatatacaaaacctgttatgcttgggatacctctggtggctgagcggtttagcacctgccttcggcccagggcctgatcctggagtcccggtatcgagtctcacattgggctccctacagggaacctgcttttccctctgcctgtgtctctcatgaataaataaataaaatcttaaaaaaaaaa

SEQ ID NO: 10425 - DNA, 634 bp, Canis familiaris
  misc_feature (302)..(302): n comprises a, c, g, or t, or includes no nucleotide
gataacccatccaagatcctggcctcacgatgtggcttccgtcctcatgagggaagattcctgtccctgggaggctaaagtacatcttgggtgtggaaggaggcatgggtatccctcacagcattctttggcctcctctggggaccactcctccagcgacacattatgtaggggagaaaatagtctggtgcccctcagggcctcctcgtgacacgtggcactaatattctttccactgttctgagtatactcgcaagtgtatatcacacactgatatgtgttttctatttataagagctctngtgtatatctgtgctctgtaagtgcacaggtgccttacaccacccagggaaggagttccaattccatggccacctggttagaaaaattcgcccttaatttcagggtgtccagttcagagactggtgagttggacccttgttcacaaaattcctgccgtgggagcctgcagcccagggcagaggtgagctgcagtttgccatccagagatgccagccagctggcattttgtcacggaggatgagcagcgtaaagctgtccctttgctgggtaccccagcaccccataccagacaccagagatgtttttataatcctgttcctaaaaaaaaaaa

SEQ ID NO: 10426 - DNA, 633 bp, Canis familiaris
tagaaaggagaacaccctgaacatggtgtccccagggcatgaagacattatgatcacagtgattcccgaagaattcgacccgtagggagaggcatgagctggatttcatgtttcccgcaagactctccagtggacgaatgcatgatgactctgaaccgggtggcaccggcgccccccaggacctctgggacccgtgtttgtttgtccagcagagacacctggccaacagaatccttcttgatagtttgcaggcgaaaccaatggtaattgtcgtagatctgcaggcagaagctcgccccttctgtatcctatgtacgcagtgtgcttttccttgccagcttggactgttcctgcttagacagtcaacgtttgtctcttccttttaccgagtcatcatcttagtccgactaaggcagttaatgtaatgcgtagatggaggaaagtcccgcgggagccaggacggtcctgggcacgtttatgctttcctcctagtcagcacccagaggaggtcgacgccagagaccaccgctgggtggatgctggcttccagaagggccagagtccctcttttaggaaactcttcagaactgggagcacagtgactgagtttgagctattaaaacccttcttcat

SEQ ID NO: 10427 - DNA, 239 bp, Canis familiaris
ggcaagggcttcgtgtaccgctcacacctggccatccaccagcgcacgcacacgggagagaagcccttcccgtgcccggactgcggcaagcgcttcgtctacaagtcgcacctggtcacgcaccggcgcatccacacgggcgagcggccctaccgctgcgccttctgcggtgcgggcttcggacgccgctcctacctggtcacacaccagcgcacgcacacgggcgagcggccctaccc

SEQ ID NO: 10428 - DNA, 609 bp, Canis familiaris
gatgaggcgagacttacgtgcatttcctactctaaacttaaaatatgtcccattcagaattgagggtagatttctgtgaaggaagaaattttccaaagagagtttcccactcttaattactggagatgtagaagtaatttgccttcttctcaaggcaattctgataagtggaatacaggaatggcttccctcaggaatgacctcgattgccagcctgaggctttgtatgagggtgctgctcacccagctctctgctcctctgtggaagcagcagaagtccctccacatgacccaggcagcaaaagaaggttatcaagaaggggagggggggcatagtgggactacctaaccaacccccaagctgcaacacaagaacaaaatgctcacaaatgtgttgagtgtttactaagaggtgacatggtggtgacctccacacatggattaggtccactttcttgtaggtgcccagggtagtgacttatatcccctgatcagctctctggggagaaaggctgctttggcaccagtcaaagcatttatgtccaggtgtcctgacatctgtaggggtcaagtattgacaagacattacacctgttcaggcttataaaa

SEQ ID NO: 10429 - DNA, 474 bp, Canis familiaris
ggattcaagagttcgcaatatttcccgctggaccaattgccaggcaatgatcgtgtggacatgccggaacccaggatttttttggttcccgagttttggggtaaatagaccaagggcgctacagcccctcctttagcctgttcccaaccagagagccatcatatttcttcagtgtagaaaccgtggaaaaatcagaattggatttatttttaattctttagatagtttacatgagtaatatttggattctttgatttttatatttcatgttcttagtgcatgagttctgtgttgggagttttatttaggtctcctttgaagctctgaagtagagaatgttctttactgaatactcacatttcagtgttgtattttccttaatagaagtgggaggggaatcttgtgtgtactttattttgttttcaatcactaataaaatgttttccgtagaaaaaaaaaaaataaaaaaaaaaa

SEQ ID NO: 10430 - DNA, 106 bp, Canis familiaris
ccgcccagcagctgacctgcaggacatttttcttaggttgttagtcagccttgccctttgagagtattgcggagtgaacaaattccctgtgcccttgttgccaggg

SEQ ID NO: 10431 - DNA, 587 bp, Canis familiaris
cctggggcacaagatcatcatttcgagtgcagacccacagccagactacagcccccccaggaggcccttcaccgacgccatcacagacctcatcagcgagctgtcccctgctggaagagcgattccgggtggctattaaagacaagcaagaaggcatcgaatagtgggctggaggagtcttgtttggctggttcctaccctgcactggaaccttctccgggcttccagtagaggcgagcagcttccctggcttcagggacatcttgttgagctcctccccccagagttggtgtgtcctgtacacggagtgttttaccttcctaataaagacctggctatgggaagcagtggacctgctcagtttcacagcggacaggccctgggcccccgactcctagaccgacaacctggagcctgggagggcaggggtggcctgagaggcatgctttaggagtctgttcagagctcaaggtaggaacaccaggggagccacaaacagctctccagccttccctcagacagcagagagtttattaataaaatatattcactgatgaaaaaaaaaaaaaaaaaaaataaaaaaagag

SEQ ID NO: 10432 - DNA, 618 bp, Canis familiaris
  misc_feature (236)..(236): n comprises a, c, g, or t, or includes no nucleotide
cgatgtattttttcgtagctaatgtcatcacgtcagagattttaactgtgggtaattccagtattacgcatacgagcattaggtggaaaaaaaaagcccagctctaattgttcctatgtaaaaataaatctcccaagagaagttaatgaatacatgttataacacatggaatatatttgccctttatgttcctattctttctgttttgaactgctgctattatcacagcctttacnacatactcctgtgattagctttacagaagtggaggtttcattaaagttcttggcttccttaagggtgagctgagctgtgtgctcaggatgcgccagggacatcaccctcatttcagtctaatagacaatcatatttgcaatgctgtcataaccgtccttagaacatcagtttccctattctgcttgtcttttttttgttgttgttgttaaatgtcatcggtttaaggagtttactccattaaacaatttccttctctagtttaaacagtagatggaaaacaatagacccgggtctacactcattttctccagtctacattaaaatgtttttaaggatatgcttttcacaacagaacaaaaaacgatttgtactttgtgtcta

SEQ ID NO: 10433 - DNA, 468 bp, Canis familiaris
agcagcactgtttatgcgatggagtctgtgtttctcaaatgcgtggccatcctcaggtggaaagtgggtaggaatttttacaacaggtttctttttcttttttaatttattggacataaagcccccaaccaggatatgtgtgtgtctgtgttttttttttttttccctcattggaccctccccctctttcaatctacccccttttatatctaatgtagagaaagcaaatttgaatctggaaagcaaaccattgtatatagttgcggtaacaatcatgaagagagttgagttgtcccctcagtaattcgttttaagcaaaaattggttgacaatgaagtccatggcaggccagctgaagaggccttcctccatcactgccagaggcccctcttatctgggccctctgttccatcaggcatgtctcctcccggcaagattcatctgttcgatgccatttgcgtttcaata

SEQ ID NO: 10434 - DNA, 420 bp, Canis familiaris
cagtagttatagcccagacgttaatgtttatttcaagttttactttagaagttaataactgaaccagtggaaacaattttaaattcttaagctcaggtgcaataacatttgctatttatttgtagaattatttggagaattttgtttttgaaataatgctttccaaaagcataagatgttcaagataaaccatactataaactgatttattaaaggttgacagttacacagattgacttaggtgtgaatagaagggattggggggtatttctgaaagtaacatttagtccaaagtttcctcaatatagttactttgaaaagatccagaatgctgatttcttgtctgtttcatgtgtcttgtagctctaactaaatgtatttacctatgccaaagatttattaaaacatagaaaaagtgaa

SEQ ID NO: 10435 - DNA, 420 bp, Canis familiaris
gttttgttaatttcagttagtgtatattatatcaaggcagacctattttgtgtgtcttatctctttaaagatctgcttcacatataaatgtctatagccatagcccagcccttcagtgtataatttgaataaatatatctattttctgtgaattatcctgaaagttttaaacagaaggacctcatagtttttaataaagaatattatttacataaaatgtgctagcagcatcttgcccagccataaagcaataaacttctcaataatgttaattttgacatttggataaataatggaaactttctattttaagggcatgtatcccatcaattggaattagtaccttaaaaaaaaggcagctcttcaatggaattaatagtgatataaatgtttgatacaggcagtacttttataaaatat

SEQ ID NO: 10436 - DNA, 676 bp, Canis familiaris
  misc_feature (1)..(1): n comprises a, c, g, or t, or includes no nucleotide
  misc_feature (277)..(277): n comprises a, c, g, or t, or includes no nucleotide
ncaaatggtcgtaggcgtgtacgtgggaggtctatataagcagagctcgtttagtgaaccgtcagatcgcctggagacgccatccacgctgttttgacctccatagaagacaccgggaccgatccagcctccggactctagcctaggccgcgggacggataacaatttcacacaggaaacagctatgaccattaggcctatttaggtgacactatagaacaagtttgtacaaaaaagcaggctggtaccggtccggaattcccgggatcccagaccnctggttgctgggactacccctcaggagggtcacaggcaccttccccatcctaagccgtggccgtagccatctcccttcagaccaaggcaggcagctgccctgaccagcagagcccagccctgcttccacttcctgtcttgcctcatccaaaaattggctaaaccgggggacttcgggactggatcacattcccctcctctgatgacccagcaaagccccggggacaccaagctctgctcctgaggccacccccctcattgccattccatgagggatgcacgtgcatcccagctaagatgagcagcgtagccttggtcacaatcgagggcaggttgaaatgtaatcctgaattttttttaagaaaagtattaaatgtctctttctacaaaaaaaaaaaaa

SEQ ID NO: 10437 - DNA, 487 bp, Canis familiaris
ctttctacctgttcatcactcctcccggctgtcctggatgaccacacgctgaccctctttcaggcaaatctcttccctgctgcccttgtgcatcttggagtctgaggttccgacaggcctcttcctagcgtccgaggctgctggaacacacggtttccccgtctgcggctgactgtgctggtggccaggtgcatgtccagggttgctgggacctcacccccaatgccggcaccctgaccctgcaccccttgacttggagccagcggctgaggcggaggcagtgcggctccctgaatcccagccctgggtcggcccagccggtcagaagggatcctgggtcaaggtgcccaagtggctgaagctgccagccggcaagaggtgagggccgccagcctggacgcaccatctgccgccacaggacccccccgccaccccgagcaggaataaaggtgtgagctgcttaataaaattaatactaattttatta

SEQ ID NO: 10438 - DNA, 637 bp, Canis familiaris
tttcttccgctaggaggttaagtggtacatctggctctcccagtccctgcgccgtggtctgtgggcattgctatgctcaaaatcatcgtagaaaagaccccccagggaattaggatgctgaggcttcaggaaaaggccagcttggattcatgctctaacacttcattgtaattttagttggccaggtttatttccatttgtttgtgaggtgtttcaaattaattcctgatcattttgtatggaaaattgatagtactactaccagtctttgcagtattcgctttcttgaagttataaaccaggcacagggttcacattccggttttaagcacttttataacaatgagaagtgcctttttggaattgggtgactttcaacagtttgttaactggacatctctgcccttttagttttctgggcagattccacgtgtcctgccccctccccttttgcattaatcaaatcattttatagaggtggaatctaagtgtttgtgtgtccattttctttgcatgtgcagcctgttgctgtgcatgttcagtgtttgatgcctaattggacattgaatcaataagtgtaaatagagcttttgatctgtaatgcttttatacaaagttttttattttaataataaaa

SEQ ID NO: 10439 - DNA, 599 bp, Canis familiaris
gcacttaaaagtacacataaattcttggtctctgtgtgaggtaacattcggcagctcgtcccggtgccttctgtgttgggcttggatgctgcccccttccctgcactgggcagtgcaccacccccggggcgcttctcgtaagttgttccgcataaacactgtctgctttcctgtggtttcaatcatgtagaacagattgttgtttgtcaatattgtgaaacgtgtaccaccaaatggcaggttgtcctgagctgcaagttaagattgaccgtgtcctggggacttttttccttgtggcatctactgcttcttaaccgttgaccccccagaaacctctttcctgtttcaacatctgtcggtgttggccgtgttcacagttacacgtgggtagtaggtttgtggcttgttgacatgtttgggactttttgaaaaatatttttataccaagagaatataatttaatggtaataacctaaaaccagaaatggaagctactggtttttcttttaacttttcacaggattcattacagattttttttctgtttcttaagtgcaatttgagataaactggctggagaaaaacatttataaaaataa

SEQ ID NO: 10440 - DNA, 615 bp, Canis familiaris
  misc_feature (1)..(1): n comprises a, c, g, or t, or includes no nucleotide
natctttggtttcggctgttaattaagtgatttgtgcctgaggccataggttcatagtgaaaggctctggtctggagatgctttttgggtctggtgaagcctgggccaggcagccaaatctggcctgtgctgaggatgaaaccctctgcttgtcacatctctgatgctgcaccctcattactgaagatgccttttgctgtatagctttgctggagatgctattcattcttcccatgtctgaaaggtaatgttgcctggggcctaagcgtcctgctcctgttgggcaccattggaatggagccatctgggaggtcaggtgacggggactgcctgaggagagctagccctagcctggcccctgcccagatgccattccatcactgatatttaagtgaaggggaggatccctagactatgttcttggctccagactctaaaatccactaaagccaaaccagctcatttctaacaaaggagcgctgatgtgaggggtcaagtctgcctctgctccaggctcttcagtaagcatctgcatgtgtacaccatcatgcctctataaaggatccctattacaggaacagcatgagtggtggctaacctgaccaataaagctat

SEQ ID NO: 10441 - DNA, 569 bp, Canis familiaris
gagagacagcgctccatagacctcttgtatttctgaatgcctcaggcccagagcatgaactggttgtttttccagactcttctcaaggctgtgtgtaccgtgtgtatagtgcacaaactttggaagggaattggaagctagggatagtagtacctccatccgagtgtaaggtttgcttccctgatctcaaagctaccgtcctgtatgtaatgccacccacctatgtgtacccatatctgaccctcttctcttaggcttgtaggaatccgggctcaggaaacacagcatgaaatatgctggtgcttagactgcttctgtgcctgagtgataaagttgtttctctctaaccccagggtttcgcaacttcttctatggcagacataaaactccggccagctaaagttagcttgcaagtggggttacatcttagaaccgacaggtgcttaaaaacccattacttaattttgttctctgagacccttttcagcagtagagcatatttttagaaaagaataaaattaaatttgttggtcccaaagaaaaaaataaaaaaaaataatatataacaa

SEQ ID NO: 10442 - DNA, 629 bp, Canis familiaris
ttagttcctcatcgtaaatgagactaatagtatcacccttcagcgtgctggcagaattgaaaataaagtacgcgagtaaccaagaacattgtagatgatccgaaatcatagccactcaccccttcaccaaactgaagtccatggaccatgcaagtcaagaattaacgtacaactgtattatacataggaaaccagaactatgttcacttatttcttattccccaataggattaactgtgaagactaatttataaatgtgaacttaaggaaaactcaagctctgaaggaaatattttgcttttctactcaagttaatcctcaaatggtctaagtatctgtcaccccttgacttggtgacagttcagccctcagatagagacatgcccgcctactcagtgttctggtcaggtgctctgactgcagccagcctgctgaccaggggcccaggcccctctggggacaaaagacttgggctgggccactgctctgtttccatgtgtgaactctgttctactgtaaccctgtcgggtttgagacattttcttcagatgcaacctctgctttgttcttgttctccatgttggaaataaaatgggggaagaggggtcaaaaaaaaaaaaaaaaaaaaa

SEQ ID NO: 10443 - DNA, 339 bp, Canis familiaris
gacccgaggccgccgtgccttgccctggacacgcccgagctgtggcatcccgcagagcatgtccgtgggagactgcagcatgcgtgctcgtgctcccagcctgtcctcggcttgctggcttgagctgggagcgcttgttatcaactgaagtgctggctcactggtttcctcctccttatttacaactctggtgtagcgttggtcggcatggatgtgatccaaatgcagcagcctgctcaaattggaaggctgcctccacaccatctctgggtcttgagcatttgcttttggtctcatagtaaagacatttacagttgataaaatacaaaaaataacaag

SEQ ID NO: 10444 - DNA, 593 bp, Canis familiaris
accatggtgtcaagatgagtatgaacagctctcctctgaagcccctggagcctgcccgtatttgtgccaaccaagtacatggtgaaaagccttgtgccaaagatggtttttcacatccgagtgcggctccatcccttccatggttatccgtattcaaccaggatgttggtcctgtgcctgggagcctgacacggcttgcagacacggtaattgcgaggtgcctttgggaagccccagggcaccagtagccagggtccaccaatggcccagtcatcaaggccccaacccgtacccagcctgccaggaccaaggagccaatgtgaattgagcccctacgcaagggcccaagtttcaagttcccctggccgccagaagatccacatctccaagaagtggggctttactaagtttaatgcggacgaatttgaagatatggtggccgaaaagcggctcatcccagatggctgtggggtcaaatacatccctaatcgtggccccttggacaaatggagggctctccactcatgagaaccttgcaccacccgaaccctattcatgcccaccaataaatcctgcttcctgtcaaaaaaaaa

SEQ ID NO: 10445 - DNA, 578 bp, Canis familiaris
  misc_feature (1)..(1): n comprises a, c, g, or t, or includes no nucleotide
ngctaattcgtccttagacatcgttcttcatgatacatattatgttgtggcccattttccactatgtgcttctcaataaggacccagtttttgccattaatgggaggatttgccccactgatccccctttattctccacggttatacctcttaaccgataccttgagcccaagattcacctttacacattatgtttgtgggagtaaatataactttcttccctcaacatttcctaggtttatctggaataccctcgtcgatactctgactaccccagatgcatatactaccctgaaatacccgtctcctctataggatcgtttatctcgcttaaagccggtgatgcttataatttttatgatctgggaagcctttgcatcctaacgagaagttgctatagtagaacttactacaactaacattgagtgactacatggatgtccccctccataccacacgttcgaagaacctacatatgtgatcccaaaataagaaaggaaggaatcgaaccccctaaaattggtttcaagccaatgtcataaccattatgtctttctcaatcagaaaaaaaaaaaaaa

SEQ ID NO: 10446 - DNA, 560 bp, Canis familiaris
ctagaagttccttgaagaaaagcagcaagtagtcgttatcttatttctctatcttgctgtccagaattgtggatacaacaggaggctttggcatactgtccaggaggatataaggaatgccagttagaaagcttaaaagatcttgacttcttcattatttgattcccttatcctatatttgacccacagtatatttgggtttctttatatgaattcaaactaacctattctggccttaagttttttgtcatgatgctgtttaacactgtttgaaagaactagattgcagcaaatcttacctttaaaagttttaaaggataatgtgtaattcgcattagaattgattttccattgttaattagttatactcatgttcttgccttgatctttcattagatattttgtatctgcttggaaaataccatcttctttataactgtgtaataggtacttgctaaaactctgtaatctctaaaatatcattatcaattacatgccatgtttttatatcattctcatagatatgccttatgaacatccaaataaaaagtattatttaa

SEQ ID NO: 10447 - DNA, 607 bp, Canis familiaris
ggaaagccgtgaagatccagcattcccagaattttatgcaagaatcaatggcacagtactggaagagaaactacaagtagtttctagaagtctgaaatttcggaaccctgaaggaactatcctaacctctgatgggggctactataaaggaccattttgttcagagtagcaagtgtttctcttatagggaaatttgactcaagatgcagccagggatacaagaccacttggacctaacacggcttcacgttttatcatttcaacttaagtacttttgctgctgatggatggaacagagagaacttactattcacctcaaatctctattaggctggatctgtattctactctcccgtcttgcccttgaccctgtaccatgaattcccctccttttagcagaaagggcgagaggaatcatgagcttcccagggtggcagcagtctgcttggcaaccagtcaatgttggctaccaaaggtgcctcacacgaagtacctcattgtagaataacaggttcattgaagaaggtgagcaaaacataggattaatgaataagaatcctgctttggatggtgacttggataaagagttttaaattttaaaaaaaaa

SEQ ID NO: 10448 - DNA, 338 bp, Canis familiaris
tatatttcagaggcgtacgtgatgccctagtctgctgggatcttatttgcccttgtggttggtgagccgggatgggacactcaacacttttttttttccactttcagaaactcaaatgtccaacaaaacgcacttaagaggtttatttgggtaaatggcccgtagtggatttccccccagaaagggggaaggaacgagcgggtagacctttctttttggacagaagctagaaggcaggaaactttgtgcggtgtccccgtgagcccctccagctgtattagtgcccttggaataataaatttgatatggtggtgaaaaaaaaaaacaaaaaaaaaaaa

SEQ ID NO: 10449 - DNA, 701 bp, Canis familiaris
ctttgctttagagtcacacccaagttcagattcacagttgtatgacctcacacaaatgattttcaccactatttctgtttctttatcactaagataatatctactataatgagaatcaaatgaggttgtttatgaaaccaccttaggatcagtgcctatcaatataaagcacttaataaatagctatattttttctcatgggtccaattctagtctcttgatctttagtcttcccaagtttttactgtaggttctattcatatggctcttaagtaatatgtaacacacaacgtgaaagcattcatcgatcatgtactcagtagtctgctagaagtttccaaaaatgaataagatagtcttgaccaccgggaacttagttgagggagacaggatagctctatgagcaacttatattccataagtagtgaagcggaatcgactgggagagtctttagacacttctaggatgctagatgtgaaagagaatatatggatcagaagacttactcccgagaaaggagtttaacattgtctcctcataggggaacccgtggttgtctcgctaggccagtgattaagtggattaatctctaattcagggatatggactattagccagtctccattgctacatattgaaaaaaactgttctttaactttgttaataataaaagtgttgtttgatcaaaaaaaaaaaaaaa

SEQ ID NO: 10450 - DNA, 666 bp, Canis familiaris
  misc_feature (420)..(420): n comprises a, c, g, or t, or includes no nucleotide
atttggtgtgttcagggagatttacacgcgaggacaccgtggtttccaggattttcccatatatttgaggacccggagagcctaggggctgcgccgaccttagcgcggaccaggactttcccccatattaccagggttgatatccaccagcccgccatttggttgactccacttggatgggtccaatgttcccggcttgcttgttgttgccggaccagttgaaccaccttgaaaagaagggggaaaaggaagaccttgaagaaagaagaggaaaatgaagaagaagacccatgagtttcccgactttaactaccctagcttagataatccttctgaacgccaacaagctagggggcatggcataaagaccgatttattgaagaattacacatagatgtcgaatgaatgaatgtaatccanataggaccctaataatgcccccctccccatgcttttcagtgaaaaaaatatttgttcgtttgtttctcataatgcactggacagtaacagccacacatagtacccatagggatacccaaaatgtggggtccaacattcttgaagttgtgttgaatcatatgctttttcacttttgatatataaacaagtaaaatattatttaaaaataataaaataaataaaaatataaaaaaaaaaaaaaaaaaa

SEQ ID NO: 10451 - DNA, 615 bp, Canis familiaris
  misc_feature (59)..(59): n comprises a, c, g, or t, or includes no nucleotide
gtgccatcattggactcctggtggcggtgttgtcatagcaacagtgattgtcatcaccnttggtgatgctgaagaagaagcagtacacgtccattcatcacggtgtgttggaggttgacgctgctgtgaccccagaggagcgccacctctccaagatgcagcagaatggctatgaaagacccgacttacaagttcttcgagcagatgcagaactagaccaccgccacagcagcctccggagttggacagcaaaaccattgcttcactacccatcggtgttcatttatagaataatgtggaaagaaacaacccttctgttttattatttactcattatcgcctttcgacagctgtgctgtaacacaagtagatgcctgaacttgaattaatataccaatcagtaatgtattctctctctttacacttttggtctctacattattaatgggttttgtgtactgtaaagaatttagctgtatcaaactagtgcatgaatagattctctcctgattatttatcacgtagcccctagccagttgtatattattcttgtggcttgtgacccaattaaactcctacttgaaatatgctttaagaaaaaaaaaaaaaaaaaaa

SEQ ID NO: 10452 - DNA, 583 bp, Canis familiaris
tgtcagccgaggtgagctgagccgccagaatgcttggagaagccctgagcaagaacctggctatatccaactgcgcaagatccggcagcccagaacatctctaagacgatcgctacatcacagaaccgtatctatctgcactgctgacaacctcgtcttgaacctacaggatgaaagttttacccggggcagtgacagcctcatcaagagtaagaagtgagcctcgtgaccacggaatccgactcccagagaagttgatgtttcttccctggtgtttgaggagccagcttgaggtccagcatacaccctgtcccacccccagtatcatgtgatggccccttcctgcatctttcctcccagcccttggatgaaccaagcctgacccgtttcccccctggggaatgattttgctcctccctgtgttggccaagaggtgttggggacagtgtgatttctgagtgatttcctacagtgttggttcctccctccaggtcgggaggcaataacccccatcccaggaattctccaataaatttttattacttaaacggaaaaaaaaaaaaaaaaaaaaaaaaaaaaaaaa

SEQ ID NO: 10453 - DNA, 506 bp, Canis familiaris
gcaatcttgtttctatgccaaatagagaggattcacgacttttgtctcaacttccacatttcattcgataaagttacgtttgttgcttccttcgagcttgattttttgttttgctgcacttttgaccttgttctgcagagccgtgtccccagaacagcggggtttggggactggactaaatgtaacggtcgtggaggccgtgcaggtttctctgttggtgtcccttggccgaacaacacagtgctgtgggatgatgatgtgaatatttagaatgtaccatagtttttttggtaaattatttatgttttttttttgaacaaacttctcttccagattgatgaaacttcatttgttttgcccaagactgtaaatatttatttatttgttcacatggtcaaaatttcaccactgaaaccctgcatttagctagagcctccatttttatactttaaagattaataacaggaaataaattgtaaaaaggttttctaaaaaaaaaaaaaaaa

SEQ ID NO: 10454 - DNA, 562 bp, Canis familiaris
cgactgtcgtcaggtggtcccactggggccactgctgtcaggtggtctttgggtgcacaaggggagcctcgtcccagaggaggtgaccctgaggatctgggggatcaggagggagatctgatgagggccctagtgtatactgcctacagggagtcgggcgctggaggccaggggctggggagtgagagggagggagggatccagggctgcattcggaaatctaacccactaacccatatttagcttcaggggaggggagcagaaaccaactcaagggggggcctttggaggaagggctgtggtcccccagctctggccagccacgagggactcatccagtgtgatgcacctgtgggttgccacggcacatgggttcccaggccccccctgagaacccaggccccacggagctgtccttccctagagaccagatggatccatagggcactgatgttaatttttaccatgtcgcttccccacccccacattttttggaaataaaagtaattttattctccaaaaaaaaaaaaaaaaaaaaaaaaaaaaaaaaaaaaaaaaaaaa

SEQ ID NO: 10455 - DNA, 546 bp, Canis familiaris
accccagtcaggggggttccagacccataagtgccacttacaagaaacacatttcatgttttgcacggtattccaagtctctccaggatgtttgttcatgcataccttatggtgcaggataaattctgtaatagccagctcccaaggagtattgaagctctttcacgtaatggagtttttgctatttaaatgctttgaaggggactataagagtcccatagaaatcaatttataaccggatttaacctgtagagataccatatgtttttccttatttttattttttgtttgttttaatgtattccttagcatgtttataaataccacttttatcctttagatcttaagccttcttttgctctcttcaaccatgtaagaggctaataaggtgttatcttcctaaaagttatttggtatccactcttttaaaaaaaaattctcccactttgttgttggaggtaacttttgtgagctctaccactcatcttctaaaacgtttaaataaaaattaataattgtgaaaaaaaaaaaaaaaaaaaaaaaaaa

SEQ ID NO: 10456 - DNA, 632 bp, Canis familiaris
  misc_feature (182)..(182): n comprises a, c, g, or t, or includes no nucleotide
gaccctccaggccctgtacagcacacagccagcccgcccaagtgagttgcctccatcctgggaagaggttccactggagcttgaggagatctggtccctaggaagatgtctatcagcccctggagagctggctgagcgcccactacctcctacccagactagaggccagggccccagggacnctggctccgatccccactctatgagtgtccgcctagccaggtgggccagggggctgagaaggggatggaggaggtctgggatgctccccagatgcagtgccaaaaatgtgctgaagattcgccggcgaaagatgaaccatcacaagtaccgtaagctagtcaagaggacccggttcctgcggcggaaggtccgagaaggacgcctaagacggaagcagatcaagttcgagagagacctgaggcgtatctggctgaaggcaggcctgaaggaagcccctgccggttggcagaccccccagatctacctgaaaggcaaatgaatctagtgctcctctcccctgacctattactgctggccaccccctgtaataaatgttctggaactcctccaaaaaaaaaaaaaaaaaaaaaaaaaaaaaaaaaaaaaaaaaaaaaaaaaaaaaaaaaaaa

SEQ ID NO: 10457 - DNA, 653 bp, Canis familiaris
gcaccagaaaggagcagcatttcttgctatcacgaccatctttgcagagagtgggtcaggttttgtagtacccagtgcttctgcccaagcaggagtggaagccctgaacaagtctcttgcagctgaatggggtaaatacggaatgcgatttaacgtgattcaaccagggcctataaaaaccaaaggtgcctttagccgtcttgaccccactggaacactttgagaaagatatgatcgaccgaattccgtgcggtcggctgggaactgtggaagaacttgcgaaccttgccgctttcctttgtagtgattatgcttcttggatccatggggccgtacgtactgtttcctctggacttcctggggaggtggatctggggtcggaaggcatattgtggaacccgtcctggccatactgagtgtcattagatttgacggtggagaggaagtatttatttcaggggaattcaacagtctgaggaaggtcacccaggaggagtgggacataatagaaggactcatcaggaagaccaaaggctcctgagatgactctggccttcatcttggttatgatggaaatgataccatctatgatcttttgaattattttcaagtctaataaattgttaaataaccaaaaaaaaaaaaaaaaaaaa

SEQ ID NO: 10458 - DNA, 664 bp, Canis familiaris
  misc_feature (372)..(372): n comprises a, c, g, or t, or includes no nucleotide
cattcttgtgtccccattagaccaacagatcccaggattcactggacacagtaaatggcttaggcactagctggtatctgggcaccacaccaggtccctgggaagatgcctgttgtcagactataccttgcccctcacttgtctgtagcactggatgcttctcaccagactccttccaacattttttatgaagtgccagatagtagatattttaagccatagatggcctgttacaagtactcatctctgcctttgtaggagaaaaggagccatagacaataataaacaaatggcatgtttgtgttcccataaaacttgatttatagaaacagcaggcacagacaggatttggctcctatgcatggcttcccnatgcctggtagtgacacatgagaaaaacacttatccataaacttctgcaaaaattaagctaaatgttgcccatgctttgatttgattggcatgaggaatattttcttcttgcattgcccagtgccaagtatatgtgagtctcgaagatggctctttgtggtggctcagttggttaagcgtccagttcttgacctcagctcaggacttgatctcagggttgtgaattcaagccccacactgggttctacactgggcttgcagcctacttaaaaaaaaaaaaaaaaaaaaaaaa

SEQ ID NO: 10459 - DNA, 608 bp, Canis familiaris
  misc_feature (1)..(1): n comprises a, c, g, or t, or includes no nucleotide
ngagccggacatattggtcgtcgatccccttcaggccgtagctgaacccgctttcagctcatagtctgtgaagtcctccacaggccccgtgggagcatgctgcggaatgccctctggcacacaggggacacagcatcacaggtgcggtctgctgtggaaggaccccgcgcgacgtgggttggaaggactagacatcctaccgctggttcctgcagcatcggccccaagtgggctacatcagagtgtcggttctacgagggtcctgagctggtggccgacagcaacgtggttcctggacacaaccatgcggggtgccgttcctgggggtcttttgcttctccccagagacatcatctgggcccatctgcgctaccggtgcatgacaccataccagaggactacgagactcagaggcttctgcaggcctagggatgggggtggggaccccttgctggaagatggccccctcgtggctaccctcactgcaaccaaccgggagcttggcacccggctcccagaggtagctgccctagaggggctcagaaaggaccaaataaagtgtgtgtggtggaaaaaaaaaaaaaaaaaataaaaaaaaaaaaaaaaaa

SEQ ID NO: 10460 - DNA, 588 bp, Canis familiaris
ggaacatttgtgtcctagattaccatgattgaggcagtcctgttaaaaaatttttggtgggtatgtgtgcttgtagaattctcttaaagatagtggatctgtagattttttttttcactgtggaatccacgatgggtggctatcagacctctcccccaatcactatagtgtaatatcatttattacaccacactgaaatatattcagaattgttttagcttttattctttcttcagaggcgtttcagatgtaccgatgatactgtttcttgcactgtaatatataaacactcccaagtgtttatattggggagatttggggaggaagtatattcataaaagatgaaggctgtatctgtttattttgtttatcttccattttttactggttcactgaaattcttatgaaggtgggatgaatttttcttgctgttcagtgctttattcttttcatctgttgttctgtggtcacagtgaccttagctatgtagcagactttccccaatgtattgagtgcccaataaacagttacttagccagacctaaaaaaaaaaaaaaaaaaaaaaaaaaaaaaaaaaaaaaaaaaaaa

SEQ ID NO: 10461 - DNA, 340 bp, Canis familiaris
aatgtatcacttaaaaacagtgaatgtatatgtattgtcttactgcctttataaccatgctaatgtctatgctttatatgtaatcaacttgcctttgtctttaagaaaaacacatatgttattccaggaattctagctatttcatgcaataccaaaataagtgcttgactgagatttgtaaacccaaatcctctacccagctatggtgatacttgattttttattttccctcctttgttgtgggagataattaatttttgtcatcctgtcaaagagaatgatatggatagatgtttcagtttttcatttcaatcttgtaattggattttatttactatag

SEQ ID NO: 10462 - DNA, 631 bp, Canis familiaris
  misc_feature (1)..(1): n comprises a, c, g, or t, or includes no nucleotide
nactgaattcccctctgcgcatgtcgggactgggctgcgagtacgtttctggtccacttctgtattgaaaagggatgagggacaaccaacccttctgacccgaggaaagccagaaatgctgcggatgtgaagaagattccactgagaaccgagaagcgccttggagtctggagaccaccccttggagctgctggcccggggactttgagaagaactactacatgtacatcttccctgtgcactgtcagtttggccagctggaccagcaccccattgacgggtacctgtcccacacggagctggccccactgcgtgcacccctcatccccatggagctctgcaccacccgcttctttgagacctgtgacctggacaatgacaagtacatcgctctggacgagtgggcgggctgcttcggcatcaaggagcaggatattgacaaggatctggtgatctaaatccacgcctccttccgcagtcccggatcctccctctttgatctttcccttcctgtttcccccactgtttaaaatgtttggatggtctgttgttctgcctggggacaggtgctaatatagatttaagcgaatacattaacggtgctaaaaatgaaaattgtaacccaaaaaaa

SEQ ID NO: 10463 - DNA, 648 bp, Canis familiaris
  misc_feature (246)..(246): n comprises a, c, g, or t, or includes no nucleotide
cgccccggagattgctcggatggccctagcattactggatgccgtttcttccttccgcatccgccaccgacctcatgaccagctgaggctacgcataggggtccacacggggcccgtttgtgctggggttgttggcctgaagatgccccgctattgtctttttggtgacacagtgaacactgcttcccgaatggagtctaatggtcaagccctgaagatccatgtctcctccaccaccaaggatgnccctggatgaactaggatgcttccagctagagcttcggggggatgtggagatgaagggaaaaggaaagatgcgaacttactggctcctaggagagcggaaaggacctgctggactcctgtaaaccctacttcttcccaagtcacacagtctcctgctgctggtacctgggtgggcagtggtcaccgtctctccacacaccagaaatggacattgttgtgtaggatggaaatgaacatgcacaaaaaccctgccttatatggaagttgttgccctttgcagctcagccttgtacatatacctgcctcactctggcctgattcccttcttccctaccttctgtaaatatctgtatctaaaccagaatattttggccaaatataaaacaacagaaaaaaaaaaaa

SEQ ID NO: 10464 - DNA, 243 bp, Canis familiaris
ggttccattgccagaatgtgttgtcccaaatgcctgtttagtttttaaagagtggaactccaccctttgcttggttttaagtatgtatggaatgttatgataggagcatagtagtagtggtggtcagacaaatggaaatggtggggagaccaaaaatatacatgtgaaataaactcagtattttaataaagtaaaaaaaaaaaaaaaaaaaaaaaaaaaaaaaaaaaaaaaaaaaaaaaaaaa

SEQ ID NO: 10465 - DNA, 588 bp, Canis familiaris
gagcaggtttagtctgggtgtcccaactggcgtaacgctcactcgaagtgaagaccccagttcctatctccaggtcacgatcggtggggtttctcagacttcttgacgtccaagtgttcccgtgggcttcatctaaggtggtttgtgaagctctttggattctgatcccatcagcggtgattgatccccacgaagcagtcttccaggggacacatcctagaatttatggagactcgtggcagagaaaggcttttcaggagtatcgcccgaaatgcactccgagtaggtaatgaaaatgtggaccatttgctttttctccaaataatggggaagggctgaagttccctttggacccccaagatgagtgctaggcccctagagagagctctgcatgtcaccaagtgaacaggccttgcctcgaggcgctcctgtctcctaacccagctttccttcctctggactccgcactgtaacgcctacgtttgctgatcatgggaagaactcctgtgtgccactaactcaataaaaccgccaaggaatctgaaaaaaaaaaaaaaaaaaaaaaaaaaaaaaaaaaaaaaaaaaaaa

SEQ ID NO: 10466 - DNA, 517 bp, Canis familiaris
cccaaccgcaccctccccagcccagtggggtccgaagcctgagtgaggaggggcccacccgcaccgcggtgcgctccccgccgacccctcccagtcagcatcaagtccgagcgcctctcgccggcccccgggggccccggagactttcccaagactttcccctaccccttgctcctgtcgcggcccctggcggagccgctacggcccgggccgcccctgcgccgactgcccactgcggacggctgggcccggtagtggaccccgggatggcacggtccttcttcccacgcgggcctgggcgagggcacgtgggtcccaacctccctcccccgcgtccttagagaagatggagaagttatgaccctcccaagtgagggctctggagttcggatccacggggggggggggggggctcctttctccctctcctgtgtgtgtatccaccaataaaacacgcgtggtgtccacggacgacactgtcgctgctcagagccaccaaaaaaaaaaaaaaaaaaaa

SEQ ID NO: 10467 - DNA, 587 bp, Canis familiaris
agccccatgaccatgacccagagcccagccccacacccgcaggcccagcctgctcctgccctgcctgggccccacccccgtgcactccccatgcacctgtgcccgtgggagccccgagtgtgcccgttgctggagcagtcaccacgtccgcgctgccgggctcgggctcccctcctctcccaccagccaggaccccgtagtccagggctgtgcagccggggcagcctgtgaccgggaggggacaggccgcagagcgtcggtggtgcagctggtccgggtgcccgatgtggcgcggagctccgagcatcgccccaaccgcgggcgggtgtctgggctccgctgcctcgagcaggcccccggggtgccccagtgcccggcctgtacccggggtcgctctcgggccttgcggcgccgggggcctcaggcggcacttgcacgcaccccagggcgcgggaggacgcgcactccttaggcactgggtcaggtctgcattggaaacacgttttaaaatgcctgtgcatctagtaagcacctctgtgtacgctgtggaccgggcgtttgacctcagctacctcattaaatgtctg

SEQ ID NO: 10468 - DNA, 549 bp, Canis familiaris
tgtttgttctttgtgttgtgtgtgtgtctgtgtttgttgacaccaaacaatgctggcatgtgtcatggatagtcccctgcatgttctcttggagagagagtggaaaggaggaggggatcagcccaccgagagacctgaattcttaattctttctgtggctggagagtttgaggattgctttttaaaaaagacagcccaactttttttttttatttaaataaagatatattgacagttttagaagtcagtagaataaaatcttaaagcactcttataatatggcatctttcaatttctgtataaaagcagatctttaaaaaaatatttctgtaacttaagaaacctggcatttaaatcatattttgtccttaggtaaggtttggtttgtgtttgtgttttgtttgttttgcttgtttccccgccccccaaaccttttgttctctctgtgaactcatctttccttttttctttcttttttttttgtatattattgtttacaataaatatacattgcattaaaaaaaaaaaaaaaaaaaaaaaaaaaaaaaa

SEQ ID NO: 10469 - DNA, 658 bp, Canis familiaris
cactgtctgagtccactgctaaccccagatgcagccagagtgaatactgtgtgtccagaacccctgtgctatactgactgttttgctgtgctgaggaagcaacagtgttgggattgcagagataaaaatgtatcgcttcccagaagaacaggaaatgacatggttgacaggaaatgcataaaaaatgatagatgaaaaatctataatagcagtttatattttcctaatggctgtttcgcctcatttattaaatatttgagaaatctttatagacagttttattgaaagctaaaaataggctctaaagtaatgtaaacgtaaaaagcacaaatatacttgaatgttgcttaaagaaatatatgaatagcaaggatgtgtattatggatataatatgattaatttgtattattttaaaaaataacttttaaagaatgtatgagctgcatatataactcaggagattccataactttcttctatttcaaaggaaagattataaaatgtaaaatttcttagagaaagaagctcctcttcagacatgaacaagaaaaaaataaatttgtctcaacagttttgagtttatgaattctagagattaaaatcttttactcgagtagaaaaaaatgaaagtaaaaaaaaaaaaaaaaaaaaaaaaaa

SEQ ID NO: 10470 - DNA, 655 bp, Canis familiaris
gtcttccagcaagtgaaaggcccatggacttcggacctgacatttagtataatagaagtgacaattagtgaacccatgtcaaaatgtttaagtttctgggctccctagattcatctagtaacttctacacatgaaatatccctgttattaatatatagtttttttgaaacctttcagtgctgattatagaaaagctttgtcagatttttgaacatgatatgtacattattctttagcaaactctttctgtaaataaccatgcataaattactttctgcattgttttcttagaaactgtgtctggatatctgtttcattaatgttaaaattaagtgaacttaatatatagagaaaatttgagtgttaaagatagcttgttttaggacagatttttaaaaaatgagtattccacatgtcctttataagaaaatttttttattttctttttaagggacatgccagttctagggattctcagttgagaagcttggtttttatagcattgccatcttagagattcttgcaggaagagattgtattagatactatatttatttcatttaagacacttttgaaaattaattttctgagtaagatattctcatttgcatttgtcttttaaaagccaataaaaatatctttcaattaaaaaaaa

SEQ ID NO: 10471 - DNA, 675 bp, Canis familiaris
cctgtgtttggcagaccgtgtgagtcgagaggtgcaatcttccctgccgcccgggtaatcaagatttttgccggacctttgagcacacaccgagagagtgaggagccagacgaaagcacagactatggcgcttgaaacggattaataaggaacttagtgatttggcccgtgaccctccagcacaatgttctgcaggtccagttggggatgatatgtttcattggcaagccacaattatgggacctaatgacagcccatatcaaggcggtgtattctttttgacaattcattttcctacagactaccccttcaagaccacctaaggttgcatttacaacaagaatttatcatccaaatattaacagtaatggcagcatttgtctcgatattctaagatcacagtggtctcctgctttaactatttctaaagttcttttatccatttgttcactgctatgtgatccacaacccagatgaccccctagtgccagagattgcacggatctataaaacagacagagataagtacaacagaatatctcgggaatggactcagaagtatgccatgtgatgctaccttaaagtcagaataacctgcattatagctggaataaactttaaattactgttcaaaaaaaaaaaaaaaaaaaaaaaaaaaaaaaaaaaaaaaaaaaa

SEQ ID NO: 10472 - DNA, 704 bp, Canis familiaris
  misc_feature (261)..(261): n comprises a, c, g, or t, or includes no nucleotide
gtccgccaggcacttgggttttgccaaatgtcagaagcagcttctatggagcagctcccatgacagccgagacgcagcacttcttcctggcctcaacatccgcctgtatgcgggctatggcctcagtgagacgtcaggcccgcacttcatgtccagcccctacaattaccggctctatagctctgggaaggtggtgcccggctgcctggcgaaagtggtgaacgaggactcggagggcgtcggggagatctgtctatgggnccgcacaatcttcatgggttatctgaacatggaggacaagacgcgggaggccattgacgccgagggctggctacacacgggtgacactggacgcctggatgcagacggcttcctctacatcactgggcgcctcaaagaattaatcatcacagccggtggagagaatgtgccccccgtgcccatcgaggaggccgtgaagacggagctgcccatcatcagcaatgccatgctgatcggggaccagaggaagttcctatccatgcttctcaccttgaagtgcacgctggaccccgatacatctgacccaactgacaacctgactgagcaagccatggagttctgtcagcgggtgggcagcaaagccaccaccgtgtctgagatcgtggggacaaaggatgaggctgtgtaccaggccattgagcagggaatccagagggtcaaca

SEQ ID NO: 10473 - DNA, 616 bp, Canis familiaris
  misc_feature (169)..(169): n comprises a, c, g, or t, or includes no nucleotide
agtaaccagtccctcttggtgttttttttcaaaatcttcggtcagttttctgattctcattcttggagttcttaaatcttagcaagtgtcaccacacttaaatactcaagtccatgttaaactttccttaaggttggagtaattgtctgtgttttgaacagatgaaatngattataatcaaggctagagctttgagtgtccaagaaggaaaactgtactaattgtctgtcttgttttatttaggggccaaccatgcccaccccgccccccgctgccgttaataacgaagattattaagtatgaatgtggccacttttgttaagtttttgagactgcagttctcaacttttggttaaaggttttggctgctgtacaaatgttattttaagatatatttcgaattgtgacaacaaacattttttgtacttttttttcattggaataattttcaagtttctgcaaataggacaactgtaaatttaaagcattaagcatttattggtggataatgtatatattccccttccacagaaatgtaagtgagtgaaattgaaataaattctttaaaagtttaaaaaagaaaaaaaaaaaaaaaaaaaaaaaaaaaaaaaaaaaa

SEQ ID NO: 10474 - DNA, 496 bp, Canis familiaris
tcgcagagtccgagtcttcagactcgatggggtcctgggacgtcccggagcacagtgggttatcggctctggagggggatgggcagccacctgcccgttccccgtgacccagcgtaggcatctgccctggaaactaaacccttcagtgtcctggagatctacgggtccgtgtccagtaggatgacgcctgaaggaagcacaggccctgcgtgcaggcaaggggggagcgggccacggggcttcctggtctggagcccagtgtggcttctcaggatgatccgcgtggggttcaacaaactgatggggattcctggtacgtatggtttcctgacgaacgggaactggagctgggcagtggggtcaggacgtggaggggtcgggccagcctggacgcgggccttcgggcaccaggggagctgcccccatgggtaccattgagccgagctgaacccgctgagcccacattgcaggccgatgaacaaaataaagtctttga

SEQ ID NO: 10475 - DNA, 667 bp, Canis familiaris
tatttcgaccagggaattcagcattgcggaatttctccgagggagcgaagcaggctttttgctcatgtgtccaagttactgtcacagtgtaaattgatctgttggaagaacttgtggccaaagaggtgctacatgtattgaaggaaaaggttacttcactacctgacaaccataaaatgcccttgctgctgacatagatgaaattgtatacacatcgacaggagacatctccatttactatgatgagaaaggaaggaagtttgttaacatcctgatgtgcttttggtatctaaccagtgccaacatccccagtgaaactttaagtggagccagtgtattccaggttaagttgggggatcagaacgtggaaactaaacagcttcttagtgcaagttatgaatttcagagggagtttacacaaggagtaaagcctgactggaccattgcacggattgaacactcaaagttattagaatgatccttcttggaaaaatcagcttattggacttctggcaattactatgaaaaaattaaggaaagtgatttttggatgagttgatcttcacttagtcaagtctgtggcttacttttgtattattttgaaatattccttgtagtatactggcatgatacaataaagcattttccacaaaaaaaaaaaaaaaaa

SEQ ID NO: 10476 - DNA, 649 bp, Canis familiaris
  misc_feature (1)..(1): n comprises a, c, g, or t, or includes no nucleotide
  misc_feature (626)..(626): n comprises a, c, g, or t, or includes no nucleotide
ncctcactctctcttagattgctcactctggtggttagttgctgtgtcacaaggacacttaagcagtctgtggcagtatccatgtggcaagatattaagcctcctgctgacagccatatgagtgagccatgcttggaatagtgtacctctgttaggcagctctaacacatccagtcaagtcttggatggttgtagcccctgccaacatctaatcatatgagaggccattagaaccacccagctagggatcccctgggtggcgcagcggtttggcgcctgcctttggcccggggcgcgatcctggagaccagggatcgaatcccacatcaggctcccggtgcatggagcctgcttctccctctgcctgtgtctctgcctctctctctctctctgtgactatcataaataaataaaaaaaaattaaaaaaaaaaaaaaagaaccacccagctagggatccctgggtggcgcagtggtttagcgcctgcctttggcccagggtacgatcctggagacccgggatcgaatcccacgtcgggctcccggtgcatggagcctgcttctccctctgcctatgtctctgcctctttctctctctctgtctctcatgaataaataaataaaatcntttaaaaaaaaaaaaaagtcagc

SEQ ID NO: 10477 - DNA, 659 bp, Canis familiaris
  misc_feature (1)..(1): n comprises a, c, g, or t, or includes no nucleotide
naacaacaaggttggacgagaggacagcctttgtacaacgattgtcaccctgtacatcgacgaggaggagcttttgccgcccctgcccctcgcgcaggcggggcaccaggccacccagctaccgagtcagagctgcggcttcggaccgggggccctgtgcaggactactgggcactggctcacaaggaccacaagggggacacggacacgagctgccggagcacaccgtcgctcgagcggcaggaccagcggctgcgggtggagcacctcccgctgctcaccattgagccgcccagcgacagctttgtggacctcagtgaccgctcggaccgcggctctgctcaagaggcagggcgcctatgaacgcagcctgggtgggccgccagggcagccccaagcacggccccctgggcgggcccccccaaggccttccccgggaggagcccgagctgcggccccggcccccccggcccctggacagccacctggccatcaacggctcagcccataggcagagcaagtccgagtctgactaactcagatggcgacaatgacagcatcaacagcacgtcccattccaactctgaaaaaaaaaaaaaaaaaaaaaaaaaaaaaaaaaaaaaaaaaaaaaaaaaaaaaaaaaaaaaaaaaaaaaaaaa

SEQ ID NO: 10478 - DNA, 661 bp, Canis familiaris
ggaggcagcctgcagtcctcacctagaactcccaggtcatgtgctttggacacagctatttcgggatcggggtgtgccagcccctcccgccagccctgctctcacctggcatttgtcgcctcaggcagggctgggtcacagcggtcagcaacacctgtagcttccaccccatcatggggactgtcccttcccctggtccactgactctggctacaagtgctcagaataaaactctccagggcggaggcccagagaaggagggcctctcttgctcctcagcttcctcaaagccttgctcaaaccagcttcgggaatcaacctgggagtgccacgcaaggtgaagagcgtgtcccagtgctcagtctctgaactcagcagggcctggaaactgacgccttgtgctgtgctcccgagatgcaggccgtggggtgctgcaggcgtggagcctctcctggtgcagccttgttgccttttctcaactaggaccaataccctcctatgccagggtgtcactgtcccatatacaaatgacaaagctgaggctcagttcgggggtggggggcagggaggatgggaagtaagtaactcacccagagactcgcagtagaagcagagttaacatgtgaacccagctctgtctggctccagaaaaaaaaaaaaa

SEQ ID NO: 10479 - DNA, 652 bp, Canis familiaris
gatgaagaagacagaggctgtttggccccgggccgagaagaaaagcttgccgggcaaaaggggatgtccccccactagagaggccgccctgtccttcgagactggggggttaacaccggtcacgcaacctttggtgggaaaaaccaagaaaagggctccaggctgggtagtgaataagccttcaccgaacggttgggaattccccattggagctggtttgttctttccctgcccttgcccctgttggttccgtaaagaattggggggttccctttatcttggcaatttaattcaaagggggaaaggccaaggctgggggcggttttgggttcccaccagggaaagaaccctgcaacccactgttgcgcccttcacaccaggttaactcggaagaacaagggagctctggctaagctggtagaagccatccggaccaattacaatgacagatacgatgagatccgccgccactggggaggcaatgtcctgggtccgaagtcagtggctcgcatcgccaagctggaaaaagcaaaggctaaagaactggccaccaagctgggctaagtggacgctgttgaattttctgtacataaaagtaataaaaggttctctttcaaaaaaaaaaaaaaaaaaaaaaaaaaaaaaaaaaaaa

SEQ ID NO: 10480 - DNA, 297 bp, Canis familiaris
cgggggctgtgccctgatgaccagcgcactggggatgaggaatcgctgctggtcagaaagcagctgccaagtggaacgttctgtttacgactgtctttaccggaggctgttctgttgtcttccatttcccttcacgcccgcgaagcgtagacgatccagtggttcctgtgaatctgggttgcatgtgggtacgttggaagaaaggcgatctcccacgcctcggtagacgctttgtggttggaataaaggacgcagatttgcacataaaaaaaacaacaaaaaaaaaaaaaaaaaaaa

SEQ ID NO: 10481 - DNA, 602 bp, Canis familiaris
gatatgcttgaattggatcacatcacagtttcaggagatgtgacaatttggcaagaatggtttcactaaaggacacagttatcatcattgcaaatcatggtgaccggaattgacatcccacctggagcagttattagagaacaagattgttatcgggggaacctccgtatcttggaccactgagaggaaaaaatactgtgtacacttcatactaattatgggctaaacagtttcttacaatgaaatgttctctaggattctaaagttggcaggtactttactgtgttactgtaccctgcggtgttaatttttaaagtagagttttttgcaatatgcttttagtcgaagaaaagcacagatggaagcaatattttttcttctctgaagaggaccctgaaagttagttcatcgtaaagtgcaatactgtttaatcttaaaactggggcagctctgctggaacatcttttaacagaggcctcagtgatggtcactttgaattgcttgtgatttcaaaaataaagctgtgaggcaatccatgtgcacacatacactttcaatgctaactttatgaaatggccaaaaaaaaaaaaaaaaaaaaaaag

SEQ ID NO: 10482 - DNA, 691 bp, Canis familiaris
cgtccatagaagacaccgggaccgatccagcctccggactctagcctaggccgcgggacggataacaatttcacacaggaaacagctatgaccattaggcctatttaggtgacactatagaacaagttttgtacaaaaaagcaggctggtaccggtccggaattcccgggatgtcacggccactaacagccagggcttcaccctgctgcatcacgcatccctcaagggccacacgctagctgtcaggaggattctagctcgggcacgacagctggtggacgccaagaaggaggatggcttcacagccttacacctggctgccctcaacaaccaccgggaagtggcccagattctcatccgagagggccgctgtgatgtgaacgttcgcaaccgtaagctccagtcccccctgcacctggccgtgcagcaggctcatgtggggctggtgccgctgctagtggacgcgggctgcagtgtcaacgccgaggatgaggaaggggacacagccttgcacgtggccctgcagcgtcatcagctgctgcccctggcagcagatggggccgggggggacccagggcccttgcagctgctgtccaggctccaggcctcaggcctcccgggcagcggggagctgacggtgggagcggcggtcgcatgcttcctggcgctggagggcgccgacgtgagctac

SEQ ID NO: 10483 - DNA, 676 bp, Canis familiaris
  misc_feature (1)..(1): n comprises a, c, g, or t, or includes no nucleotide
nggcatcaggtgaacgtcttagtgtccgtagtgatcctggattccctccagtagcgttcgaccttgcgcccggggttcggagccccacttcacgcgtttttggagaagtgcgaggtgaacggcgcttcaggcgcaccccctcttcgccttccttcgggagttttctgcctgccccccagtgacgacacccctgcgctatatgaccgacccccagttcatacaccatggtccccggtgtgccgcaacgacgttgcctggaactttgagaagttcctagtgggcccagatggtgtgcctgtgcgcaggtatacctccgcttctcccaccatcgatatcgagcctgacatcgaagaccttgctgtcccaggggccccagctgtgcctaggcaaccctcctttccctgctgcttggcagtcacagcgctgccctctggggatttcatccatgatggtgtttccttgaaatctgcatggaggacgcctgattttcagggaagtcccctgagctgggcttgggctcttcttgtccctcccagaaccccctccctaactaggctcctcactaataaagtgttggccgtcagccaaaaaaaaaaaaaaaaaaaaaaaaaaaaaaaaaaaaaaaaaaaaaaaaaaaaaaaaaaaaaaaaaaaaaaaaaaaaaaaaaaaaaaaaag

SEQ ID NO: 10484 - DNA, 631 bp, Canis familiaris
ttgagtttctatagtttgtcatgcactctccttgttggtgaacaccagtaaacacttcagtgactgcttgattaaggaatgctctgtaagtaagacccttagtgatctgaggcagagaaagcataatttctgctatcccagaactggtaattgtgacagattcataaactgtctcttctttctgcagcacagtaaacgctctgccactgatctgtgtggccggaatgatggaaaccttaaagtgatcttccccgatgtagagatggaggacattaataattctgacgtcagggtcagagctcagcctggggactatgtactggtgaagatcacatccaccagctctcagacacttaaaggacatgttctctgcaggaccaccctgaaggactcctcagcatattgctgacctgagtggatggtgttagagttgacatgagctgtccttcccaacaggaagggagatatgactggtcactaatgaaagaggtagaacctctggagacaagctgcaagtgataaagcaactttatgtcaaatggaaaatgtatctctttgctgctacgtgaacagttttacagtcattaaatttaccataagtaaagtgaaaaaaaaaaaaaaaaaaaaaaaa

SEQ ID NO: 10485 - DNA, 667 bp, Canis familiaris
cccggatgtctcggctccgcggagaaggcgctgcttgtctggagcctggatgagcagcaggccctgcagatgtgccgaactcacgaactcaccaatcctgggattgctgatgtcaagatccggccggaccgcaagatcctggccactgcgggctgggaccatcgtgtccgtgtgtttcactggcggacaatgaagccactggctgtactgtccttccacagtgctaccatccactgcgtggcctttgccactgatggcttgctggccgcagggtctggggatcagcgcatcagcatctggtcgctctacccaatcagcactgactcttccactccattgttgggacatacggagggcggggaggtgggtgcccatgcttcggcctgacccagacatgtggaaccgtgcatcaggacccctgaggactagccagtcacagttctcctcctcctccagttgccagaggtgcctggtccatggagtcttcattttctgcacaaggcgggtttcctttcatgatatacagcatctgtacgacagtgactctgcagtctacaaggagtaactgggccagacacctgggcatctgtggctcaggtgaggccagcctggggctgctttacaataaacctctagatgtacacctaaaaaaaaaaaaaaaaaaaaa

SEQ ID NO: 10486 - DNA, 593 bp, Canis familiaris
ttctctcatctgggtggctgtagaccagcctgtgaagggacaacagcttcttgagttctaggatcttagaactctgggcgacctttcctattttctggctgaagccaacgtatcccaaagagaaaatccagagtagtaacgaagagaattggcaagaaaatcgttacaactactacaagacgaccacgcagtggaccacggggcaacccaggccctggaggaccagataatgaaaccagacccagtgttcaagaggattcagaacccttcaatccagacaacccttaccaccagcaggaaggggaaagcatgacatttgaccctagactggatcacgaaggaatctgctgtatagaatgcagacggagctacactcattgccagaagatctgtgaacccctggggggctactatccatggccttataacttatcaaggttgccgatcagcctgcagagttgtcatgccttgtagctggtgggtggcccgcatcttgggtatggtgtgaaagctcagttcgtatacccggtgcttgtatcataaaaactcaagagacaaccagaaaaaaaaaaaaaaaaaaaaaaaaaaaaaaa

SEQ ID NO: 10487 - DNA, 662 bp, Canis familiaris
acgtaggacttacaaagtatttttgtggttgtgaatccatgaggctgattccttactgtgggtgtgacagctgacgacaccttactaacctacatgctgctgtccctgttcggggttgactaagtttgtttttaaacttcagacattgcagtagacccttgagtattgtgcctccaataagtatcctggggacaaccttatctgttctgtatgggaggccgggtaatagtcacagggacggccccgtctgaaaccaccgtagactgtgaatacgtggtcagctccgaggcaggagggactttgcagggggtttgggttaagattccacgctgggggcctccccactagatggggacatggtcctgggttgtccaggggccagggtcatcataaaggtcttgtaaggagaggccaaggggtcagggctaggaaccagacagctggagcttggaggggcccttaaagacagagggaggctgtggccgaggtacgcaggtgtctctagaagctggaaaggcaagaaacaggtttccctcagaggcaccaaaaggaactctgctgacatcttaactgcagacttttcacctccaaaaccaaaagagagtaaatctgtgttgttttaaaaaaaaaaaaaaaaaaaaaaaaaaaaaaaaaaaaaaaaa

SEQ ID NO: 10488 - DNA, 262 bp, Canis familiaris
tgggcctggagcgcggaccacccgccctcggacccacgcccggcttcatgggcgccccaggtgacccgagcccgaagcccggggcggcttgtgtcttcttcccgagtgtggagcccacgcggatcgcgcgctgcggtcatggggggagtgaggtatttattctgtgcacatttgtactttgaaacgctaataaaatacgttttctaagaaaccagaaaaaaaaaaaaaaaaaaaaaaaaaaaaaaaaaaaaaaaaaaaaaaa

SEQ ID NO: 10489 - DNA, 644 bp, Canis familiaris
ggtccaaggggcagttgaagcacttttttcggacacgagggttattttggagccgttggagcactccttgagctgttgaagatcccctgatcgttacccagggaggggttcctggaacattccacaatgggatctgtgaacttttgttttttaagagacttattcaattttgtgattgtgtactacctgaatcaaagcaagaaaggacaagtgtatttttctaagtcatgaagataaatccttaaaaattcagcctaaactagtaaccagtaaggaaagataccaaaaaagtggaccatgtctgtggcagtgaggatctgctgtgttgaagttgctcttcagtatagctttgttacacctgccacgtatttgtgaaattcagtgtccttactggagccacttcaggggtgggctgctctgtgttcagctgactgcggttttgtgtcctgtcgaacttgctagatgtaaggcaggcactacatgttgtaatctaatcacaatgttaatatggccttggagatcatcatctgtgcattaactctggtgtgctatttagcctttgtgtgaacatactgaaaaacatgttttatttcaaggttctatgaaaaaaaaaaaaaaaaaaaaaaaaaaaaaaaaaaaaaaaa

SEQ ID NO: 10490 - DNA, 646 bp, Canis familiaris
  misc_feature (366)..(366): n comprises a, c, g, or t, or includes no nucleotide
acatcatacccctattgtaccaaaggactatcgatatcggtatagttctcttttatcgtatcagtaagtatttgtcttttgcaggcctcttctgagccttttaccacctcccgcctatgcccctatctcctgaacttgggggttgctgacctcctaccggccattaattccttttttaaccccttaaggaggtgccttctacctccacccctccgtccttccttaggccttcccggaagttattcttatttaacttggaggccccaattccattaagttttaaataagaagggttaaatccgccaaacaatataccttcaaagccttatttcattactatctccttatggcgtaatattttacgcntattacaggcctccgaatactatgagacatcttttacaatctccgatggggtatacggatctaccttttttatagccactggatttcacggattacacgtaattattggctctacattcctcatcgtgtgcttcctccgacagctatactaccacttcacatcaaaccaccacttcggatttgaagccgctgcatgatattgacactttgttgatgtagtctggctattcttgtatgtatctatttattgatgaggatcctaaaaaaaaaaaaaaaaaaa

SEQ ID NO: 10491 - DNA, 627 bp, Canis familiaris
tgctagttcataattgttaatcttacagtaattggcatattaacaatagtgtgtaagtaaatattttaagactggattcatagacaaggaatgggaagccatagagaaatatatatgaaaattcctgattcatttaggaagtacttcacctgttttttgcatagttcaagtgaagaatgtctccaggaattaaaaaaaaattttttttaaagaggaaaacatacatttgaatgtgaaaaattatctaatttctacaacactggactaccagaaaaagaactttgtaaaaattactgttgtgtacaaactatttgaaatacaagtaccaaaaaaacacctgataaggtatggtcttttggccgtgactacaatgcaccgtggcaatgccatttgctcaggacccagcactgcagccctgtgtgcacctgccttgaagttgtgttgcggttactacacacacagatcttcccgtctggtccgtagaaaagccaggcttccaaagcactgttgaacactgagattctattgttaaagtggatgttcgatgagttgtattttaaatatcaaagattattgaataaagataatgtttgctttttaaaaaaaaaaaaaaaaaaaaaaaaaaaa

SEQ ID NO: 10492 - DNA, 691 bp, Canis familiaris
  misc_feature (320)..(320): n comprises a, c, g, or t, or includes no nucleotide
  misc_feature (504)..(504): n comprises a, c, g, or t, or includes no nucleotide
  misc_feature (510)..(510): n comprises a, c, g, or t, or includes no nucleotide
cctgcgaaggaggatccaaccaagagatgagctctctggctctactctcatatgggtctgaaagatcgcaaacgcagtggccatccttcactacccccggggtagccacaaaccggaaccaaggccagtggggctcccactagttcctcgggatctccatctccaataagctctcctactgccacccctcccactatacccccacccttcaacctgcacccctgcccctcatcctgctggccagtatgcacgctgcagaaacttaatacgccagtatcatgggatcggctgccgccactccgggacaagctggcggagcncagggccccctacacaacttggggctcttgcgggctctacgagtgtggagagggcgcgggtctacatcttcttccttttatctggtggccccgagaccctcgctatccattgaaactccgaaccccagtggaattaaagaaggttgcctgaatggttcccctgggttagttgggaactgggganctgganccgagccaatgagcttccggagctgtggctgggacagaatgagtttgacttcactgcggactttccatctggctgctgatgctaactgccactaaagatggaggaagaaagccaccaattctgttgtaaataaaaataaaagttacttacaaagtaaaaaaaaaaaaaaaaaaaaaaaaaa

SEQ ID NO: 10493 - DNA, 686 bp, Canis familiaris
tgcgagtctattgctacgtgacgttggtgagtctgcagtaccttgacgccgctcatcttcaccgtcagctgcaccctgctgctcaagacactggcggctactcctggggcccgggccggatccccgtgcagtcccgggacccccgtcctccacccacgatcgcctgggggcctgggggacgacgaggcccagcagacagcggcgctgatcgctggggccctgggcagcctgctcacgcccctcttcctccgcgccatcctcaccttcctcatctggtggacagccgcctgccagctgctctccagcctcttcggcctctacttccagcggcacctggcgggctcctagccgcccgcagacactcctggggccccgaggcccgggcctgagccagcggtgtaagggccgcttcctccgcgtgtgcctcagtatcctccggtgccaggtgggcctggggggcccccgcagcacctgctgtgcccgcccacttcaccgcagtgcctgagccctgggccccttgggtcccatgtttctgcctcaaaactcttgccctgggccccgtgccagaggatcccagggccattgtccctggatggcatgcccccgcgccccgctatttgacgcacaggttggagggtcattcttctgaacaaataaaagaacaggctgatttttacaaaaaaaaa

SEQ ID NO: 10494 - DNA, 547 bp, Canis familiaris
atatgtaatgtttgtagctccaatttgtcgactatgtgctttcaaataggacccagtttcttgccattatgggaaggatttgcccactggattccgcttgtaattctccaggttatactcctttaacgataaccttgagcacaaagattccacctttgacaattatgtttgtgggagtaaatataactttcttccctcaacatttcctaggtttatctggaatacctcgtcgatactctgactacccagatgcatatacgtacctgaaataccgtctcctctataggatcgtttatctcgcttacagcggtgatgcttataatttttatgatttgggaagcctttgcatccaaacgagaagttgctatagtagaacttactacaactaacattgagtgactacatggatgtccccctccataccacacgttcgaagaacctacatatgtgatccaaaaataagaaaggaaggaatcgaaccccctaaaattggtttcaagccaatgtcataaccattatgtctttctcaatcagaaaaaaaaaaaaa

SEQ ID NO: 10495 - DNA, 101 bp, Canis familiaris
ctaggttaacttttgctttactcccttatttactttccatctgatatgcatttagtctaaagaataaacagaaagctgtctattaaaaaaaaaaaaaaaaa

SEQ ID NO: 10496 - DNA, 665 bp, Canis familiaris
  misc_feature (542)..(542): n comprises a, c, g, or t, or includes no nucleotide
tgctgtatcctggtctttatccactagacaccgtagagtgaaaaatagggttggctttaaaagtacatcattactcagttcaagtagctaattctctgggtcaacccactgtgtccaagttcccttaggcgtattgagaaagtctcctagttggtgtcaatatgtcagtagtttccattctgatccttacatgtgttctccacagttaacttttctcatccttattcagacccctcgaaatacttgccattgcataaacttgccagcccagttgtgcccaccttgatgtaaggtataccaccacattgtttccattctgtcttccagtagatgaggtttctgtttcccagagtgaatttgaggaaacaaaggagaggaattgccccagttctaagtttgctggcttaatccactactaattgctcggtttcctctgagagcacggtgtttataaattgttttttcacaggaagttccttaagggccgttaaggttaaaatgaattgtcccacgaaaacacggctccaaaacccttgagaccngtaaattcctgttcccactcaaaagagagatcctaaaccatatattttgtgtgtagagtttgttcaactaaaggaataaatgtttattaaactaaaaaaaaaaaaaaaaaaaaaaaaaaaaaa

SEQ ID NO: 10497 - DNA, 212 bp, Canis familiaris
taaatttccttatggaatctgttttcttttgtagcaatctaggaaactgtattttggaagatatttgaaattatgtaattcttgaataaaatgtttttcaaaactaaagtttttgttacaattacatgttatctgtaatttataatataattacaaattatgcatatcattgcagctaataaagctgatagaggtcaaaaaaaaaaaaaaaa

SEQ ID NO: 10498 - DNA, 631 bp, Canis familiaris
tttgaaaatggtgcggcgtggctgggcgtggagcgaggactggatctcaatagagccgtacagctgccttctgttccaaacccagaattgtgtctttcgggataagagagtggcctcagtgttcttcatggctcggtcccctccctaaccgagaatgtgcttaagtgccttttagatactaatcaggaaagctgcgattgtccccagagcaaattttctgtgaaatctttaacacacttctggagaacgggggcggggggcagggttttgctggtcccacagatctgacccactggcagtgctcagccgccggcttcagcgaactggctcgtggttcggttcctggcggaagaagccgagatgcttttctgctcattgacgtgtttaagccctggccccttgtcatttcattgagaaagctgacagtcgggagcgagatgacagggtcacactctgtgtgaggcttaccctaccagagtaagcacctggtttccacttgcgccagtggaggagaccggcctccagcccttgaacgacagcctgctctctttttaaatacaccaccgagctgtatgctgccacggcacactgaaatgaaataaatcaccctgttaaaaaaaaaaaaaaaaaa

SEQ ID NO: 10499 - DNA, 528 bp, Canis familiaris
  misc_feature (160)..(160): n comprises a, c, g, or t, or includes no nucleotide
  misc_feature (195)..(195): n comprises a, c, g, or t, or includes no nucleotide
aaaaaaccaggaaaagactccgcgaaacaccgaacaggacctaagttctgtaaggaagacattcaaagcaaagaatgcaagcaagttatacgaaaaagggtggttctcgttcccaaagtggaagccaagttccatccaatctatgtgaagaattgcttcncggatgactgaccaagaggctacttcaagatctcntggcagtggaggaagtctcgtttaagaaaatagtttaaacagtttgttaaaattttccgtcttctttcatttctgtaacagttgatatctggctgtcctttttataatgcagagtgagaactttccctaccgtgtctgataaatgttgtccaggttccattgccaagaatgtgttgtccaaaatgcctgtttagtttttaaagatggaactccaccctttgcttggttttaagtatgtatggaatgttatgataggacatagtagtagtggtggtcagacaaatggaaatggtggggagacaaaaatatacatgtgaaataaactcagtattt

SEQ ID NO: 10500 - DNA, 599 bp, Canis familiaris
ttaagagattcatacctttaaatgcatacagctatagaatataccacctcgcattaaaagcgttcatagactcttggtttaagagaacccctaacccttacacgtggaattttggtctcttgctttaaaattgtcccttggtcagttttgtagattatatctaacatagaaaatgtagattatagctaacaccatttggcacatttgatttcaaatagaagctgaaaattaaaccaccatttagtagttaagattttagattcagcacctgacactgttctgctcgtagtattggaattttgtatacttacacacttgtagatgttttaaaatatatgcatatgaaccacaaggaacactattcttgaagaggccttttaatcactaataaaacaatttggtgggattcctaggtggctcagcggttgagtatctgcctttggctcagggtgtgatcccggagtcccgggattgggtcccgcattgggcttcctgcatggagcctgcttctccctctgcctgtgtgtctgcctctctctctctgtctcatgaataaataagatcttaaaaaaaaaaaaaaaaaaaaaaaaaaaaaaaaa

SEQ ID NO: 10501 - DNA, 696 bp, Canis familiaris
gtaatctcatgctcagaagatggccgtgtacgccatttgggaataagagtaaccagccagcttgccagttggacctgtacccaccggtttttgtaacaagtggggatttggacgagtggaccaaccagcccacccagccttatttaaaagaccagccaggaaaatgctaatccccaggttccccgggaggcctaatgggaaaattggaatggaccacttccttcggtcctgtgggagaatgtttccttgtaccttggaagattccccggacctagtgaccatgctcttgctgacccatctcattattttgtggaaaaatggagaaagagaatctggattacgcagtttaaaattatttcagaagttagaagagaatggtgacttatatcttgctgtctagttgaaggaatttggagtacatgtgcatgaaccttgaacatcaaatatagggtaatattcaaatttgtaatgtattatttttttttaagattttatgtttgaggggatccctgggtggctcagcggtttagcgcctgcctttggcccaaggtgcgatcctggagtcccgggatcaagtcccccgtcgggctcctggtgtgcagcctgcttcttcctcctcctgtgtctctgcctctctctatgtctatcataaaaataaataaatatttttaaaaaaaaaaaaaaaaaaaaaaaaaa

SEQ ID NO: 10502 - DNA, 607 bp, Canis familiaris
tcccagtgacaagagctctggatgcagacagggcagaggcaagttagcacttcgtctgcaacctgtggggggggcccgggcacctgagcccctgaagctccctcctcctcggggccggggccgacattgtgggactttccacaggtctctgcctgcccgctggggggcccccctgagaggctgtcatgtgatagttggtggtgtgtattcttgtgtgttggttattacatgtcttgaaatctagcatcctttcgcacagaattgtctatgtgtcggggagaaaatgggccagcagcccagtcttaggttctcgccctgtgataccatttaaaattgacatttaatttttcaaatcactgttggtgcctaatcacttaagttattaatttattctgttttctttaaaaaaaaaatttgtaacatgtatttatcctgtgagtaggtctggggtaggggtgggaacgtgttgcagtgggtcctgtttttgctgtggtgacacatggtacaggcctggagcttgcaggtccctttttactgtggtgtcggagcgggacaacaataaagtccattagaagtgaaaaaaaaaaaaaaaaaaaaaaaaaaaaaa

SEQ ID NO: 10503 - DNA, 617 bp, Canis familiaris
  misc_feature (44)..(44): n comprises a, c, g, or t, or includes no nucleotide
  misc_feature (527)..(527): n comprises a, c, g, or t, or includes no nucleotide
  misc_feature (564)..(564): n comprises a, c, g, or t, or includes no nucleotide
  misc_feature (572)..(572): n comprises a, c, g, or t, or includes no nucleotide
aaacagatggagcagacatactggcaggcgaatcccttcaggcncgtagctgaacccggcattcagctcaaggctgtgaagtcctccacaggccccggggagcagctgcggaatgcactctggcacacaggggacacagcatcacaggtgcggctgctgtggaaggacccccgcaacgtgggttggaaggacaagacatcctaccgctggttcctgcagcatcggccccaagtgggctacatcagagtgcggttctacgagggtcctgagactggtggccgacacgcaacgtggtcctggacaccacaccactgcggggtggccgccctgggggtcttttgctttctccccagaggaaccatcatctgggcccaattctgcgctaccggtgcaatgacaccataccagaggactacgagactcagaggcttctgcaggcctagggatgggggtggggacccattgctggaagatggcaccatcgtggctaaccctcgagcgtgcaacaaacagggagcttggcaccnccccggctccagaggtagctgccctagaggggctcanggaaaaantgggacaaaataaagtgtgtgtggtggaaaaaaaaaaaaaaaaaa

SEQ ID NO: 10504 - DNA, 635 bp, Canis familiaris
  misc_feature (253)..(253): n comprises a, c, g, or t, or includes no nucleotide
gtttgcccctagaaggtcatgaactccaaccccagccctactcagctggatgggtaatacaaggtggaataggggacagatccccagcatccccggcctatttccccaccccagtgctgcagaatacacatgggagccctcatgtgcccactcccttgggccacccagctacgtgagacctcactttgtgccgaggtggcacaggtccttccttacctcctcaccccttcacggggtagctcagtgggcagtntgggcaacagaagcacttatgatccctccagaccaaaggagggcagccggctgcaggcaaggatttcatgggcctggtggggctgggacacctgtgatggctggtactcctcacctgtggctgcggcctggcctgagggctccaggagcagtgggtggtgggcaacctggcagccccctaatccctagactgccattccctgcctgtggctggaggtcccttctccccagaagcactgttgccccggggggttccctagcccatgtcccctcccccagcatgataccttccccaaaccccattctccagttttgttcagttgtgaatgctgcgtcctgtcctggtgacgggaaaacatgttggtgaagtcgcaaaaaaaaaa

SEQ ID NO: 10505 - DNA, 418 bp, Canis familiaris
cacccgtacccgacagtgggtaccgagtcccactaagccactgccccctgggaagccaagaagggggcccaagcgacgccctgaggaggaagagattttaaataaaaaacgatcaaagaaaatccagaagaagtatgatgaaaggaaaaagaatgcccaaatcagccacgtttttctggaggagcacgttccaaccacgggcaagcttcttgcatgcatcgcttcgagaccaggccagtgcggccgggcagatggctatgtgctagagggccaaggagctggagttctatctgaggaaaatcaaagcccggaaaggcaaataaatcttctgtcttcggtcatgtaataaaggtgtttattctgtcctgtgaaaaaaaaaaaaaaaaaaaaaaaaaaaaaaaaaaaaaaaaaaaaaaaa

SEQ ID NO: 10506 - DNA, 641 bp, Canis familiaris
gcagcaaaggcagcgaaagcgtttggcttggtagactctgtcaacccctggaagatcctacgcgggactggtctttggagtagaaatgtaaacccggaatttccaactttcacccaaagggaaacttggtttcccgtatttaacttggccctgctcttcaatacagaccccacttaactccctcaaatttcgttttgggagcttgaatagaaatatttttttgactgaatgaaagctagcaccgatacttttaactggagggactgctccacctgttgcacggagtttctacagactctcacatattcaacccaagtgcctattgcggttgtaactggtcttagtaaagatttctaaaagaagatatactgacacgtttgaggtaattctggtttagagaaaacttttacacaatttaaagtataaagtcgggatccctgggtggcgcaaccgtttggcgcctgcctttggcccatgggcgcgatcctggagacccaggatcgaatcccacatcaggctcccagatgcatggagcctgcttctccctctgcctgtgtctctgcctctctctctctctctctgtgactatcataaataaataaaaaaaaataaaaaaataaaaaaaaaaaaaaaaaaaaaaa

SEQ ID NO: 10507 - DNA, 431 bp, Canis familiaris
  misc_feature (1)..(1): n comprises a, c, g, or t, or includes no nucleotide
  misc_feature (286)..(286): n comprises a, c, g, or t, or includes no nucleotide
ngaacctactttgaaggcaattagaagctttgttttcatttccccctggtattgtcttgccaggatggttaggtacacaaggacgcttattagatcactgagaagaaaaagccaaacccgcttctctggtatgaacatctagtttgagagcaagcaaaacagtaggcttgtattagtgctttaatgggagtactggtaacatttttctttcttgataggaatctgcttatatttagccaggcttctagttttttttccataccctctcccacctacaaactttttnccgtgcagttacctttcatttttaaagcatttcactgctaaatataaattgtatttgtggggttatagttatataatgtgaagggaccactctttcgttgaaaggtgataaaagttaaataaagactgtctccacagtaaaaaaa

SEQ ID NO: 10508 - DNA, 501 bp, Canis familiaris
  misc_feature (251)..(251): n comprises a, c, g, or t, or includes no nucleotide
atggacataggaaggggcccgaaccaggaatttggtttggaccttcgggcctgtttgccttcgtgttattacctcggatcccccctgtcctagccccaattccagtgcccaagtccagagggacgccaagtacctttccagtcccagtcaactctagggctctgcactgaatggctgacctgacctgatgtccattcatcccacccgctcacagtgtggacttttctcccctctttctaagagacctgaanctgggcagagctgcaaaataaaatctcggtgttctatttatttattgtcttcctgtaagacctttgggtcgaggcagaggcaggaaactaactggtgtgagtcaaacgccccctgagtgactgtccccagcccaggcaagaagatctcccttcaggtgccgggcgcaggaactgcgtgtgtcctacacaatggtgctattctgtgtcaaacacctctgtattttttaaaaaacatcaattgatattaaat

SEQ ID NO: 10509 - DNA, 531 bp, Canis familiaris
ttctggttcgtggcctgtggcagcctgccattctgggggagggggtccgcactgcagatcctccaaggcaggcgcaggacgggctgatgacacagctgcggcgtgtccacgatggacgctgtgcaccagggcggctgctggtgtttggggacctgtgcctcgtggcctgtacatggccaggtggctaaccctgggaccccggggggctggctgctggtgtttcctccagatgcagccccccccttcccccactgacagcgaggacagagcataggcttgtgccctcagtgtgtgccggggattcctcccatgtccggcatccctgaaggtacccctccccttaccgacaaccctctggtggcagctctgtgcccttgtgggaatgattctcagagctctgtgtttctgatgcttcggtcggggtccagcgtccagattgatctttgattgtaaagtatatttttgcttttcagccttctaatttaatacatgatatctataaaagtagaagattaaacttctccaatgaaa

SEQ ID NO: 10510 - DNA, 524 bp, Canis familiaris
tgcttcctgctgtgtagagggagtcttctccacctctgtgcgcccaggaattctcagcttgctttaggttctctttcgatgcactcattgcaatctgtgaatcataaacagaggaaggtggcattccaccagtgggagataggctttgctgtggacactgagactacactgggtagatgctagcttttaattgttattattaatatgaagggatcaaattaatttaagtgtgattctgggtctatggaactctttaattctgtgttctctatggaaactagtaataatgcaaataagacaggggtattattgttggtctggtgagatgtttaatatttgcgacaggtaacttaaaaatggtgactgtgtgctgtcagggaagtccccgtcccaaggggtttgtgtctttgtcagtaggtgtctcttcatcctttgtcatgtgttcccccagtccttcaatcacgtaagctattcattttggtttggagacctccatctcagaagtgtctgaaacatgcctaatc

SEQ ID NO: 10511 - DNA, 326 bp, Canis familiaris
atggtctctattgccaggctgctagtctatcttttttgctttcgggcaaattaagaatattgtgtgggcctcactcgttaaactgggagtaatgattcttatcttgctggattgttgtgtttgaaagttaaataatattttgaaagcgccaagatcactgtttagcacagtgcctcctctttgtttccttcccttttcaagggtcaagtgaatatgtagaatttcttggatttgtttgtgttgtcttcagagtgtatgaggatatacagatatcaaatcattttgttgtatacctgaaataaacacaatctcatgtcagttataaa

SEQ ID NO: 10512 - DNA, 535 bp, Canis familiaris
acggagccccctagcctgtacagtgcgcaaggccctgagaccatcccgtaccacctgagtaagatgtggttcaagggaatgcctggccctgaaaacccggcctgatgcaacctggttcccccaaggcccttgaatggaacccttggaaggccgccttccccaagaaggaacccaaggttacctgcaacgaaatgcccacagcaccccccgggctgcacttggccccctgccctatgaggctgggcccagagcatgaatgcagcccacacccaaccccgagtagaacactttgcaaccaatgttaagcatctgttgcctgtgaagtctacaggttcccagcagggttcccatgcacagatttctagattaaggacccttactaagcaaacactccactcaacctccttgctacaggtgcctggacagacatagattattacacttggagacctctggctgtacccccgaggaaaatagagctgttatttttggccactgagtccctattttttttttttttttttttttttttttt

SEQ ID NO: 10513 - DNA, 549 bp, Canis familiaris
tgggacattattgctaatattgatgtcagatcctcttttgatcgtatgccatataaccatgtagccttgttgtttatagattcttgtgatagaggccaagctcaaacgtttaagtacaatttgttgctctttgtaaaaaagcacttttaacaccagaggagccactgattctggtgtggtagtttactactaactgggtgtcaaatctgtagtctattaagtagactaactggtttttaggcctgtggaggtagtagtatgatacgttgtacaaggtgttgatttgttgagtaaaagttttaaagacacataaattagtacagttcagtgtgaattataggcccttgggtgtgtggccaaaagttttatatataaataccatctgattttcagatgtcatcccactcccaaggctaaaactcagaacagatattggcagcaagaaaaaaaataagcccttgacattatttcgggtgtcagactagcaatagctagtttatgttaaatgactttatttttaaaaaggactaaaggatcagtttttttttt

SEQ ID NO: 10514 - DNA, 515 bp, Canis familiaris
ggtgccggggaggatctactgaacacaggttaccggcctggccgacagggggaaggtactacctctcccagatgggcaacaccccaccatgcagacaaagggtattcgctggtcagggtggcagaaaagtcctgtgtggccctggacttgtgccctggagatagcttttacagattttatgtttttgaggagaagcgagttaaggaaaagaaaagacaaagaaaagaaaactcctcaaaggtatgcagactccctgtggacaaacccactgaaacctgctagaacaaccaaaacacccaaacactcgaaaaaccaccataattacctgtgtttcaaccttgacccagggtaggacggtacaccccggcagtgttcacgaactccaccctgccaaactagtttttgcagcaacaataattacgagccttcacaagccccgtagaggggtgaaagtccttacaaacttttatttttgattagtcaatgtttttttttttttttttttttttttagtt

SEQ ID NO: 10515 - DNA, 739 bp, Canis familiaris
  misc_feature (160)..(160): n comprises a, c, g, or t, or includes no nucleotide
cggtagtcagcttagctaaggttatcccttaccctgagtcctcctaccagcctgtccgactgtgtatgggctacaggtcctgtgtgtgtgcccctggggtcctctgaatagactcaagccctgtggcggagggcatttgcctcgcccccctcctggccanccagaatcatatgctactgtttcagactctacacaccccaaccggtgtgctcgggcaagctcacaaccccatgttccatcaaagttggcttaatgttgcaaagaaaactaaacccccaggataagacaagcctggtaggaatggatctcttggttcgcaatgaatcgtcactcatgtggtatgtctatgttggccgtttcccccgcaaccaccaggatcagttgctaacattgctaagttgtagctcttgcttctttctcgattggccaatgagtgaatagatgcataattcagagtgtatgcaggaattctaaattacacaaaaccagatatgcgttagcagtaacatactaatataactgccaacataaacatatctccaccacaccccctcattctcttaaacacaccgctcctagactcccacttctaaaattttcccttaacactacagcctattttatatttaggttaaaaaggggaactatgaatatattagcagttgggttcctcacaaacgaagtttggagtattttgaatttatttgtcagacacctctgatttttttttttttttttt

SEQ ID NO: 10516 - DNA, 555 bp, Canis familiaris
ctgtagtaaacctcaagttttacaatttggtataaacgagagttaaacaaacattataaaaactggaaaattccttggtgtcagaggcacggggtcatttggttggcccgaattgcctcccgtttagaaccagagccaaacctttacaacaaccaaaaatatgacccgagtatgttgtaaaacacctttaacatctagttgaagtattgtcacaagcagtagtccaggttgtttgcaaccccttaaagttggaactgtcaattgtccagttaagttgaaacaacagcccctatttagttcaaagaaacaactcaggctgaagtttaagtccctatccatttgcaataaggtcccagtaagatagtataatatccctagcccaacacccagacaatacactcaaactaacggcaaaggttccaggtgaaaagccagcagactttaacttcccccacctctctcttaaaaaaactatatgaaaagagaataaagaccacaaatggatttgttttctgtttatcctggaatactaagttttttttttttttttttttt

SEQ ID NO: 10517 - DNA, 631 bp, Canis familiaris
ctataattaatgtattgagtttatgggatcttatagccttgagaactgcccttttagattcgggaaagagcatattaggaaaagaagtatgtagtctgaccactcctgtcctcaagctccttataaaacactaaaagaacacagattcaaactggggcacattaccactaatgtatagggttgtttaagttgtacagtacagactcaagcaattgtccctttgacccgtctctgcaagagatgtgcttatgtacagcaggcagttgacatggctataaatatagatactagcattcttaccagaaacctacaagggagcctatatatggtccattgcatagcagtgttaacctcataaatttaaatgcagtcatcagtgtagtagtgaagagcacatgtggaacacctttaactaggcactcaattttacgcacggggtgggctgcacgggaggcaaggcggaaacgcgccgccaactgccctgggcgagtaccaggtgtccagggtacttgacccgcgacgggaacccagctaggtgccagcaacacccacagcccgatacacagccacacacacaccccacacagagaaccactagttatttatttattttttacaatttttttttttt

SEQ ID NO: 10518 - DNA, 559 bp, Canis familiaris
ctctgtattcatagccactaatacatttttagtctgcccaagctgattcctacaagggaaactaccaggctcatgttcatttccaatcctctcttggtcactttaaattcataccaacattaatcaaatttaacacctgccaccaaggcatcataccttcctaatagctccgccactctccattttcttgaaattcctaatgcctgtttactgctacatatcaacaggtcacctacagtcatgttttctaccatccctttacttacactataaacctttattttacaacatcccaataaactttactttttggacactactttcacataaaccatacgaactatcatgcatattaccactgacatcattaccaattaatcctcgggattcaacctagtattccttctcgccctaattattagtactgccagattcttcctccttccttgaacctattcagatctgtgccgctatccctatgccacaactcattttttacctgtgacccccgatactatgtactcacttaccccataacctaatttcatttttttttttt

SEQ ID NO: 10519 - DNA, 639 bp, Canis familiaris
gagagcactgtagtgcccaggcaccgttggtgcaccaggttgttactcttgttagtttggtacccttgttaaaaatctgttatacgtgaacagtattattagacaagtgggtgctagatctctctctttagtccattagttgttgtgaaaagtattcctagccaacgagatcgggtacctctgcaagtagaacagcgagcagtttacagcacccttgcctttaagatgaatgcctgaaactgttatataagcagttatagccttgtccttattaaacctagattgtctagagtaagtgggattattgggttttgggatttgtcctggttaacccccaaacactccacaacttattttttatgcaatgaatggcagatgaatacataggtaggtaaatacaaaaagccatcagtatcgcaaacaaacaaggggggattgaccatttgactaaatcactccttgtttaattaggaggaagtaactcagtaatatgatgcagaacctgagtagataacagttaaaattttgatattgaagaatttaagatttttttaaccttgcccttgactatacacagaagaagcccttgatctagactagtagtgcttttttttttttttttttttttttttttttttt

SEQ ID NO: 10520 - DNA, 597 bp, Canis familiaris
gccatgttgcagccattatgatattgtgcatctacccagaacagtgccacttgtggatgtcttggaattattttctcatggcagtctgttggaagggacatgttgtcagaacccagctcccgctcccaccttggctagaggcagaaggctggataatgagcttggtcgcaggcttctgcacacgaccctggtatctctgaggttgaagagctggaatctctggtcggggcccaggtactccaggcaacagagcacctcccacaagagtcagtccggagcagggacacagagatgcaaccattagtgaggtcaccctgtagcagccaggggagactcataaattagagacgccctgtacttctggatgacagtgtcagttttactgtcccagtctcatatttttgcccagccaagggctgccctggaggcactgaggaaatgcgccgccaactgccctgggccagtaccaggtgtcccgggtacttgaccctcgacgggcacccagctaggtgccagcaacacccacagccagagacacagccacacacaaacacacacagacacacgagttatttatttattttacaattttttttt

SEQ ID NO: 10521 - DNA, 559 bp, Canis familiaris
ggtactgagccaaaggcatccaggtgagcactgccttgtccttggtgggggagtgggtggataacgtgtaggcctcacgggcgggacacctggaacgcttgttattgcgccggtggggaaagaccctaacacagtgtcctcagtggccaccccagaactcccccccccaactagggggagctgttgcacccctcaaccaggcccctctcaagaagttggttggcaaccaagactaacccacctgccctggtcagctacagtgaaaccccagcccctcctgtcccctgggaggaggatggcaggcccacccagcccaacctgtgcttgacccaagaccagaagccaaggacctggggagtggcacaagtacccactgccaacccctgtggtactactctctcctgctcaaatatatcaaagggcactctggtgagacaggggatggggtcaaggtgggagatagactccctgtgccccgggacccaggctaaatagcaaaggaaggggtccaagccacaggcagatcaaggaggttggctagttatttggcctctggaac

SEQ ID NO: 10522 - DNA, 547 bp, Canis familiaris
ggcgtggtccagtctcgactcctagtagtgcacagtgcccctggcccctgggcgccctcatcgtgccaagatgcccctctgggagtcccttggtggggcccccgaggcctggccccccacccctacaggtccagatgctagaggtctccacatacctcccagagacccacagcccgtgcacactgggtctctgctggacttcaacaccttgtatcagctgctccccctgcccaaccctcccctcccactggtggcactgtgtccccttgggattgagttctacagaaacactaaggctgttactacctgccctgccctgggcaccccccttatccttgcactgccaccttgtgccacctcagtgctcccctgcacccttacagtgccactgtactctcctgctgtgtttctcccctccactcaggccactgtcacgccagccccccggcccagccccctggtagccaccacacagcctgggtggccctatttcacccgagcagttgttttttttttttttttttttttttttttttttttttttttt

SEQ ID NO: 10523 - DNA, 582 bp, Canis familiaris
caactttgtagttgggggcccttcccaacaaccttgggcgcagaggacctctagaaccatttggggctagggggggccccaaacgagcaggaacagatcgtcgtgcaagttgtttgactacatgtccaaccaccacctgtctcgggggccctctgggttactcgatgttaccaaaattcagaatcggtcccaagtacaacgtgtttaacctgagaccaagacccggcctgtactcgatgtctgggcaggggttggaacctttgggggcactaagagtacgtactacggctcctggaacctagaaaagtaaccggggggtgggcctactagtcgacaacgagggacctcgggcaggctgcaccgccgcactgtcctatgtgacctggagcaagagggtcccgggaagagaaattgataaataaattttttttgttactagacacctaaagatcaattgctcagaacacaaaagctctgccgttataaagcctaatagaacctctacgggccaacagcagcctttccctatttttcagggtcccctgttttttttttttttttttttttttttttttttttttg

SEQ ID NO: 10524 - DNA, 268 bp, Canis familiaris
tagcctacaacagaatattaactacctgaaaaagttgtgttgctatgttgtgtcaaaaaaaataaataacatgctcacgctgtttagtcatctccagagcatatatatcatcctgttaaccctatgtttgttgcaatattcagattccacaatctaatccaaaactgctagttgtttctgaaaaaaaattagtccttccaagaagccaaccattgttccaacaagttatttcactaaaattttcaccttttttttttttttttttttt

SEQ ID NO: 10525 - DNA, 581 bp, Canis familiaris
ataattgatacaatcttgcaattatctatgttatctagaggcaaaatacataattaaggttctgaaaatcaaaggacaatgttttctcagaatcctgggtacctggttagaacttttaaggaatcaggactccgttgtccaaagagaatgggctagtacggtacgggctgctttcattctcaagtacagtttgcaggcaaaagcaaaaagaaaaaaatttaaggcaaaagcaacaagttagagatctacagtgatgatcatcactaaaggttgcgagatcattcgagtctgtcctctcaggcctcaactctggttgtagcggatctgagcttcagctgagtctattcgtcacccagaaaagctactccctacagttttgtccccaactttgtagcgtatctattttacactaatctttactgcgcattatggagttctaaagctgaagtagtaggggtcagcagtcaagttctcattaatttggtgtagactaccacgtcacctttgtttgtcgataataatttgtttttaagcactcagaatctgaaacgtcaacgaattatttttaaaagaggtgtata

SEQ ID NO: 10526 - DNA, 480 bp, Canis familiaris
tgtaatatctagctgagtcccctttggggagccaagctccccttagaaaatatctggctagacctctatgactctctctctctctctctctctctctctctcttaggtcagcatcaatgcctaccttttgagtttacaggctgcccggctggtgggggaagggaggttcactgcggaaatgcgcagccaactgccctgggagagtaccaggtgtccagggtacctgacgctagactggcacccatctagggtgcattttccatcactcccacagccagacacacacacacacacacactagttatttatttataaattttttgtttttttgagtttacaagcataaagcttaatagaggtatgttcatgtgggataatagcatggcttttattgacttaccgtgtttgtcttaatactatagtacactcaatatagaggttaaattgtttctttctgttgtactatggggttgtttgttt

SEQ ID NO: 10527 - DNA, 396 bp, Canis familiaris
gagaaacctgctagccagggaggagtcccgcgtctcgagttgaacctaagggaacgtggccctcggagtgggcacactcaggagctccagaacctgacactcaaggggcgaatcctatccggtgggcccaggtccagccaaaacccgtactcaagtctccccccacggtgaaaatagaggcccagcctgccgaggcccaaccccaagtggttgggtccctaattacagttaggtagggcccttgaggttgtgttctgtggaccataccaaccagctgtgtgcaacgaggaacacatccggcccttcctggtcctgtaccactcctccactgcttgcggttgagccccaccctgccaggttgggcagcagggaccctggccagtttccctggcatcc

SEQ ID NO: 10528 - DNA, 619 bp, Canis familiaris
  misc_feature (160)..(160): n comprises a, c, g, or t, or includes no nucleotide
tgccaccggtcacatgccatggccgcgggtcggtatcctaaactctcaggcttctgcatagtcctaatggccataacactggagtcctcatatgatcttgcaagctccagattgcgggcaggatccggaccggttaacccgggtactaccagactaactnccagtccttgacagctgagggctaggctgagtcctggggtgtgtgcacactgtccccagtacctgcctgcctatgtgggtggagtctccaatgtttagggagggtatctctgtagcgggagggacgcctcgtgggaaggccctccgtcccccacgcctttgcagctccctttttaacaactgtgtggtattccttcgttaaaagctttactaacccatgtatcgcaaggctggcttgtttggttcgctaagctacctagtgctatatctggtataaaggggggctgtggtatttttgaagaaccgaactcacatctaaatctgaaacctgttgctacccgtccgaggtggcactgagccaccccgactaccagcacgtgcgaaccgcaacctcaaccacaccacccgaccttcgcaattattttgttctagcaagttatagtttttttttttttttttt

SEQ ID NO: 10529 - DNA, 135 bp, Canis familiaris
tttcggccactgaaagaactacagattttaagtgggataatgattccaccattagcagagccaacaaaggggtccgggggggtacattttagaacaactaaagaagaagaggcttctattcttaaatcctatttt

SEQ ID NO: 10530 - DNA, 609 bp, Canis familiaris
tggtgcccaaaagagaaagcaacgaagcggtaccagagggccaggcaggccgtggtgtccactacccagcgcttggtggacagcctgcagcagcccaaccaagagcgcatagccttgtcccacatcgtggtggccgtggtggcgttagtccacaccctgctggaggcctcccaggcctacaccccctccgcccctgggccctccaggcctggggtagcacaccggcaccaccagcccggcaggagcctccagtcagacgttgtagggccccgggtgtaccagtactttgtgggtgcccccactcaacacagcttgataaacaagctgctgagggttcactctaccccgggcctagtatccactgagcagcccgtctgcgaggtgtacggccagctgtccagcagcctctacaaccacttccaagaggactccgctcctgggcattacttgcgtgtagccagcaactcgacacattagttctcccagtagtcgactcagcccgctcatgagctgctgtgaggctggcaccagcaggcagccttcgaggcctcacagggccagcactaggcccggcaccactgctccacacctgcacaactgggctcgccg

SEQ ID NO: 10531 - DNA, 612 bp, Canis familiaris
tgttttcccgcctcaacatcgagcccagctggttccccttgaagcctcagagactacctggtactgtgaatacttaggagagtgcccccttggaacgtttggagaagctgcaacaacgccaacgcctcgtacaaacttaggctccaaagaattgcacctcctggcaactgaattctcagcattggtaagaggttccgatatatgccagggggatccccttccagttgacctgagttagttaagtacatcctgcgaggaataggcctgtacctcctgttgccgttaagcccagtcctgtaatcctcctaagtaagcacggaacaacaaggatttataggcctactacagctaggtggtaacagtaaactcgtgtacatatccgaaggttttcgaaactttgttgccctcttcaaaaataggcccaactttaatacaacacctcgaggcggttagttgtttttgtcctccctaaaagatgttggaggtgtagcaggcctctgggttgtcctgtactatggcaataatgttggtagttcattggatacatcctagtaataaaaagattacaggactgaattatttagtcatcaaaccttaggttttttttttttt

SEQ ID NO: 10532 - DNA, 560 bp, Canis familiaris
ggatgccagagtttattgtacgagccccccctgattattatgatgatatcatatgaattttaggcagattgttatgaaaatattttgaggtatctccgtacataagataaagtttcctattcataaagtcctaataatgagagtcccttgataatggccgaaaactatccctaaaaactccaagatcctttaacagttaacctaaacacaacctggcaggcctggtgtagaggggaagtttagcccacattgagaataaaaggaagaacattcaatccttcgagtaaaagttattgtttataaaggagaacaaaaatattcccgaaaaagtaaggattcagaaaacagataagaaaatttcggtacctttttagattgacataaggatgtgtaattgataaataagcatcctcaatgaagtatttaagtagaataagatttgcctatagaacagaatttgacaagaaagcaagtttaggaataaccatccggagtttctcatgtcataaaggtgagattttttttttttttttttttttttttttttttttttttttttt

SEQ ID NO: 10533 - DNA, 630 bp, Canis familiaris
aggtaatattgttgccaaagaagatgttgttagggagttggtttctctagcagtacagaggcctgccttgctgatccctcaagactcgcctttagttgtttgtttagaataggttgtggctttggcaaactgcccacttgtacagctgcacttctggttcaagtagggtttccagcaacaccatcacctgattaagactccaccctctctgccttccttgttgttttgtgaaatgacgttcaggttgatgtacaggtattaaatgttaatgttgtataagtctcttctgtctacttccaggtagttgtataaaaggtagtaagtgagattagaaacaagtgttcccctcatctctgtactaatagtaggtctggatacgtacgcctcccagtcctctgagcaaatgtcacaagtgttccaccaatgtaaaatataggtttggcagaaagaggccctccagggtgctctcagcacaacactacaatggtgactaaatagagctgctacatttactaagaaaccactaattgatttccctgagagggcaaagtaaaaaaaaactatcagactaatgtcagaatacacctattttacacaaagttaattcctttttttttttttttttttttt

SEQ ID NO: 10534 - DNA, 665 bp, Canis familiaris
caagtccccctgtctgtgggtatgatcaagttctacagcccaatttaggtccttggcctaggggatatattcaagaaaagtagaatctacaacttatatgttaaaaccatttctcgactgtaggtctcctgccagatatccctccccttgacagagcagcacagactcatcaaactgcactaagccctttccctccacaggcaagtggttaaaagtaaacagacccctccgccgcctcccccatcctcctgcatgaccaccctataagaccctttctaaaccaacctgcaacctttctaaaccagcacacatacataagctgattcactgttccctagtttaaatgtcgctcctccttaaacagcggtataaaagcacattgtttacctaagaatcactgctattagtgcaaaattggatataggtcctagctcacacgagccctaaatatatgttggtatcctaacaaaaaatcgagtaagtcgtttagaatcgaaaaactaatggtttctcatttacgagattataaacagaaagagcaccaaacttaaccagtcggctttacttgtatttcataagcaaagacacaaagtgctgccagtttgcgggtagtttattgtgggtagctaactaaatttctagcaaagcagatcgttttttttttt

SEQ ID NO: 10535 - DNA, 382 bp, Canis familiaris
aaacaccaatctcaatgccggtgacacaacataaaatggggcttaattaaactactcatcataatacttctaatttcccccagcttataccctgataccttcaccccagaaagatagtactgatcattaatctgctcgaacatcacaatcatacccagccagatcaggcagcaggttaatcctatcaaaattctcgtccggttacaattatcctctaaaaaagtaccccgcaggtggtggtgtcccataccatatacttctccataacagtaacaacgggctaccagttgaaatctaacaataccagcccggtaacggttattaaacactctaagactcaatcatcactgggttttttgtgccttttttttttttttttttt

SEQ ID NO: 10536 - DNA, 653 bp, Canis familiaris
gtagttattgatgctaggctaaacacccggtttgcttctcaaggttcagtcctctcttcaggggctcaggttgtagtagtgtccctgtgaatcctctgaggctttcactgtccaatgtggtaaaggactctaaggttaagctgaaccagtagatctctgagcaagattttgtaaagttgttcagggtgactttaaagagttgtttccagtagtcggattttagtttggccaggctaaataacttgtaccagtaggcatcaggtaagtttaaaatttaccattcctgtagtcctcatattaaatgaacagagtgttatcagcaaagcttaaactgagttgtccaagagggtttattttttggtttaggagattaacttgtataactgtattctgtttatacatggtcatttggtactaagacccgtaactgtaataacagttgacctaaacccaaaccataaactgcatagaaaaaatccattcagaactgactaatactaaaatttgatgagcaaagacaagagaccaagttagataaacagattcaaatcaaaaaaatggatgattaatgttctaaacccaactgtgggagctaaagccaacaaacaccatttatagtagacaaatcttacatccaaagttattactaacat

SEQ ID NO: 10537 - DNA, 544 bp, Canis familiaris
tccaacaagttgtttttgaggcattatctgcgacctgaacttgaagccagtagagataggggagaacctgaaatttgaggtaatctccggcatggcatctcgctcaatctcacaacctcactggagaccgagtggccgcacctgctctcgctgatcgtgcgcaactaccccacggccatccccatcatcgcctgcgccaacacctagtagcaggggcacaactacaactgctctgacaacaatctctagttggtgttggtgtttacagtcagttggggctgtgcctggtcaccagtcgtctggctcaagggtgaacagcgggccagcgacaaccactctgcgggcaaagaacagaagaatttgcagagggtccgaggctctgccaatccactggggtgtagcggctcagtgatccgtgggtggggggaggggtagttaaaacagagtgaaaaacctccattagcattgaggataaaaactatagaggactcaaactaaacattgtatttctaagcccaccatcacctttttttttttttttttt

SEQ ID NO: 10538 - DNA, 304 bp, Canis familiaris
ggaatgctcaagttggaggataggttttgccagctagcgagaactgaacaaagaaacaacaccaacccaaaccccaagggcccccccaacccaccaacgcacgcacttccacaaaagaactgatagagattcaagttgcattaaagatcatcaggtatacagtcaggtgcccctgtatctgttacagataagaacaatcagtttccctgctaggttaattctaatttcaatttattttccttccatttaatttttagcccttatttttttttttttttttttttttttttttttttttttcttt

SEQ ID NO: 10539 - DNA, 631 bp, Canis familiaris
ctgcctccaagcggtctagcatcttagaagaaccttttgtttaggtagcgtcacaagatctctgatattcagtttgagttgaagctcgtgcccttttacaacagttttcttctagaagaagctgcaagtcggaacctcaccctacagagttgtataaggatggccttagaatagcatattctgttgttaaccctacccagtgcaagttgcttgttaagtagcagatttagcagtgtcctaacttgttgagagctcctttatataaatagtattgtgacctgcacaagcagcagaaggaccctaagttcctcagcctgtcaaattcctgtaacgctggttctagagcaggcaacgagtaattttagcaccataacatttataaaaggtctagatataaatatttgcattcagtacagcctgaaaattgcatcctgacccatttgtttttcttatcttttctagatcaaggtttaaagtgagttcctcatcagctactgtcaaaggttggtattgtccccccctgagttaggatctactctcaaactttactactcatattacaattgttagttttaaagatctataaaactgaaaataatatttttagctctctcatttttttctttttttt

SEQ ID NO: 10540 - DNA, 584 bp, Canis familiaris
  misc_feature (128)..(128): n comprises a, c, g, or t, or includes no nucleotide
acggtttgtcaagttggatttgcgataatccccacgactcaagctcaagcataacgaggtgtagttgttaaggtaacccactacttggcatcctaagcaggaggaggagaataacctctctacctctntacacagtaagggttgtttggtctcctgttgtcagaaatttggtagccaggtaaccaataatacactggtcacatttatcacaattctgcagacctcgagaaggagtaacctcgaggtcagatacacagagtttttctcctaaaagccaaaaagattaacataaagtgcctgaaggttgaaattaatgcaaaccttccttcccttaaacagctaacgtgacaattcctataaattgagaatcagaggcaaccttgttgccataagtaaccagttcgatcgagcggacacaagttcaacgtcgcaagtccagaaacaatttcttctccagacaaggtacaaattcaagagtcagcctcgttcgcaatcatgattccttctcaaaggaaaagatctgtctaataaacctcacccgaggtattgcacttatttggactataccccttcatttttttttt

SEQ ID NO: 10541 - DNA, 451 bp, Canis familiaris
  misc_feature (69)..(69): n comprises a, c, g, or t, or includes no nucleotide
ggggccacaggctcagtgctgccacagctccccctgcaccctgccctgagccctgcctaggcgagcccncaggtactgcgcctaaggccaccacgaggcctacaacctattgatcacgggcttggttggcgtcttgttcttcacagtgcttgttggtgcagttggtgcagtacctgttggtgcagtcctaaggcccgttgcagctggtagcagtctaagctttgcagtaggtcgtccaggtccgtttcttggtcctggaggagttcaacctggtgatcgactccaaccagggggccaaggcacagtacatattagtagcccacttgggcagtgctatctgctggttggaggtgtctcctcccacctacgggccagccattaactgtacctgagcagggattcagaacttatttatccaaacaaaggacttgactttttttttttttttttt

SEQ ID NO: 10542 - DNA, 613 bp, Canis familiaris
gcccttgttcttcttgggccagacttgagaagaaggggttgtccaacgtcaccgaggagtaggtccccttgttggtcgaccactacgtgaacatcgcccccaggagcgggctcagcttgctgcaggtgcccgtgatcgcggcgcacggcttgttgatcttgttccagcttgttccaggactacgccttgtaggtcgcctcggccttcgtctactcctgcgtccgcatctgtgacgtcgggaacccctcctacatcaacgccccccgaggggtccttttgttcccgtaatttaaagtggtcggtttccgtgtacaggttctcaagtgcttgaacgatgttgttctcgcctcgtttcagtgctggtcctgggttgttcacagttggcccgggcggccgtggcgcgcgctggtgggtccgcccggtgcccggtgccctgctacggggccacggacctgggctgggacacaaggggcaatggggaaaagatcacaggatacactccactagcacagttatcagtgatgtgttgttagtcacctatgtaatgccctgtaaaaatctgtgttatctacataaaaatcctaatttttttttttttttttttttttttttt

SEQ ID NO: 10543 - DNA, 553 bp, Canis familiaris
tccaggctggtaggcctccgccgtcacagcacccccctgcaccagtggttgtcgggggcttgtggtcctctcacccagccagcccccccaacccctgcagcaaaccccccacaaatcacacacagaacaaggcaccccagaccccccgccactgaacctgtgtcacggggaggggtggttcagcctctggccacccagaaagttgcctccccaagaccatggagccgggttagtccgcggatcccccaacccgggctacagaaaaggaaaattcctaagacaataacagagtcgggggttgggtgctatagcagtgacaccctggccagagacaggtggggctcactcaacacctgccagggtccccaggcaacgcacttctcctgccccagtccctgccctgacctttagaaatctgggtgccaccagcccgaccctccccacctgccgcaaggtggcccctttggtttttgctctgttgcgagtgtcgcctcctaaccaggtgtcatctgacctccagcactaacacgatgcaaaaatttttttagtttga

SEQ ID NO: 10544 - DNA, 336 bp, Canis familiaris
tgatatacaaggaaattttatccttgcccctctggaagcatcatagaaaaaaaaaaaacccttaagagaaatgtttatcagattatttatagatgattattatatttttgttaaggtactttgtattatatttgactaatatttcactacctagcaactaaaagctattgaaaagacaagagtacacagcaactcaatgatacaaggaggtagcagtatagaccgactaacagttgtccagttaatgattaagattctaaactgttttagacaaaatcaaaggtacttaattttttttagctgttattttttttttttttttttttttttttttgg

SEQ ID NO: 10545 - DNA, 483 bp, Canis familiaris
ttggcatgggaggtctgcctctcccgtctgcctctccccgtagactcagtgctctcgtctccttgtgttttgtggaatgcttagctaggaagcagtgaagcccgaagaggagtttagcagcgcggagagaggggtgaagagggaaacggaaatgaaaggcgtacttatagtgtatagtgacacttgtcccttctccctgacgaagcgtgaagtgcctggcccaggactaggcacatagtaggtgctccacttacattataatcatattaaaatcttcctaagccacgaggatcgtcagtgtatatgcagggttgggcagtggagtggaaggggcgggaagcctccctggggctcctgagactcatcttggactggtgccttcctgggtcggagagctgtgtgtgcttggtggggggcaggggaaactgtgcatgcttttgctcagacctggtcattaaaggtaactctggaaacccaaaaaaa

SEQ ID NO: 10546 - DNA, 641 bp, Canis familiaris
tgggaaaggggtaaggggcagttatgccctgaagtacattcagtttgagagagaaccagtaccccaaagttcagtaatatttaagaaatagctgaacagcttccaagttggtttacagcaatatccacagatactgcctttagctttttttatacaagttttctaaaatttagattcaaaatttaagtgctgccttttatggtcgacgtagtttcgatcattaatttatgttccagtttaagatacttcatacaccgtaggtatttaatgccccacaataaaaccaaacaaaaacaaaataaactagagtcatttagtgaacatctcaaatgaacaaaattttatgcagaactgggtatgaagtcatctggagtcaaacaaaatcacttttttaaatgttatcagtccactcagtaatgaagactttcctacatacgtcgtcgtatcttcaggcaaaaactattacgaaattagatgaagtaactacagaattgtgtttcttggtttaccatcaaaatgatggtgatattaaagcatgcctctttccaaccgcttggccaatgctgataacaagcaggcaaggagacatctgccagcgttgccccacggcccccgccgcgactgtcccccagcagccggtc

SEQ ID NO: 10547 - DNA, 556 bp, Canis familiaris
cggcggtgccttctctggccctgacgtccctgctgtggcctgggcttcgcccttctttgccttcggtgccccgtgctgccccgttcccggtatgtcaaccggttccatccctgccaagttgatccaacccggtcccttcctgtaacgggggccaatgctgccctttccctcaccctcgctttcccttcggagcactttgggaagctctttgggctggtgatgccttatcagccattgtctctctgctccagttccctatcttcaccttcatcagggtcccctgcagaatgacccgctttacgtgaacgtgacgctggtgcttgccaccgtcttgaccttcgtccatccctttatggtgtactgggagtgccggcgggaaaggagccctcgtgcaactgcctagctcagaagctctgctttccagccgagaggacgctgtctttgctcatctttccccacccgtgaggaccccacatccaggagcacttggcctgcctgggcttcttgtattaattagccattactttttcttttctttgaaaaaaaaaaaaaaaaa

SEQ ID NO: 10548 - DNA, 490 bp, Canis familiaris
gccttctgcacccaccccctcggagggttcctacaccagcggggcatccgagtgtgagtccgtcagcgagcaaggctcccagccctgccaccctgccagccacctcctcctccctgcccagcccagccaccccctgccatggctcccccagctcccatgggcccccggccacccaccctacctcccccactccccctgccacagccggtggggcccccgcagctgcgaacgggggtacctcgaactgcctgcagacaccatcttccaccagcagggggcgcaagatgactgtcaacggagctcctgtgccccccttaacttgaggaaagagaccctctctgtccttctccagccatgcctctccatcctccactttttctgggccccctttccacctctgactttccccagctcctcccgccttaggggtggggggcgggttttataaataaatctatatatatatgtacataggaaaaaaaaaaaaaaa

SEQ ID NO: 10549 - DNA, 594 bp, Canis familiaris
cagtctgagcttggagtgttgtcccgccagcttctgtgccctccccagtgagacccccaccagctggagctgcctgccctgcaagtcagaggtaccaaggacagctcagaccaggagctccaggcccctggcaactcttgctgcccgctctaccacctgcctcaggctcctggtgctgagtctcccttgaaattgccacttcctgtcccttcctcaaagtccccctgttcctgtcccctccttcccctgcatgcaaatttcacaagagatgggggatggctccctacacacagccccacatctgttatcttacagggcagatattcaggctagatgtctaggtgggggatgcgaagccagagcctggggttcctagtctgtgtccaagtgaaaggagtgggagggggctaacctgtgagctcctgtgtcctgtgtcaggaagcctgagagttcaaacacaccacacttaactggctttctgggtcttttatttgtacccatgtaagtctaccaccccatgaatgggcctggggtaatcaactgacctccttgaacatttcatgcatgggaaatagagaaataaataagtgattc

SEQ ID NO: 10550 - DNA, 631 bp, Canis familiaris
actcaataatgcagtattccacttacatgttcaccatgtattaaataatatgcagacaactttgcatgcattatctaatctttacgatactatgaaatagagcattctcatttttcagatgaaaataacaggcttagaccaattaggatccacgtcaatatcatacaactaactagtgggataggtggattcaacagttctgtctgacgccagagcctgtactcttaatcacactaccacctaaatgacttaggtacatatattggtttgctaagtctgccataataaaatgccacaaatgagatagtcttaaaagaaacacattatctcatagtcctggaggatagaagtccaaggtcaaggtgtgggcaggattgattccttcatagggctctgagggagaatctattccttgcctgtcccgtctgctggtggtttgctggcaatccttgacattccttggcttgtggatctagcactccaatctaccttcatgttcatacagcgttctctctgtgtatgtctgtccacacttccctttattataaggataccatttgtactagattagggctcacactaaggacctcagttttatctccagagtagggaggttcctattctgccctgc

SEQ ID NO: 10551 - DNA, 590 bp, Canis familiaris
  misc_feature (167)..(167): n comprises a, c, g, or t, or includes no nucleotide
  misc_feature (210)..(210): n comprises a, c, g, or t, or includes no nucleotide
  misc_feature (274)..(274): n comprises a, c, g, or t, or includes no nucleotide
tatgataacatatattggtttgagaccgtagctatagcccttggagccaaggaccgatgatatatatatgttgttgttttttttttttttttttttagctgtccctacatacctgtatcagcactcatgtatgtagagtgtgacacgtgtgttccaacagcccctcntacccggcctacgcttcttggctccacgctgcttgtggtaggnacccattaaacatctgttacagctcattcttgaaatgggatttcttcacaagccagcccaccanctacatcaacccgtgtttccacattggaacccttgaggcttagtttagtatacaccctcaggccaccacctcagcaccttgcccacctctgtgtttactgccttgtattctagtcactttgtgtatctgtctgtctcccccacctagattatacgctccttgtgggcacgggactatgtctttttcatctttgtatcttttatggcccctagccccgtgctttgcacatagtagtcatccatgtttgttaaataaagctattagtgtcacttaaaattccaaaaaaaaaaaaaaaaaaaaaaaaaaaaaaaaaaaa

SEQ ID NO: 10552 - DNA, 730 bp, Canis familiaris
agacttcagtagcttcgtgataatgaatatggaacgaaacatatttgaacctggcatatatgaatagttctattcaacatctatgttaatttttaggtttggatgaccaaaagtgtaataagttagaaataattgtgatgtagaattctgaaggtgttaatccatggttgttcctagtgtttgttattattgagaaatctgacgcacttatgattctttagttttttaggtggcccctttttttccactggacacttagaatctttccttatctctagcattctaaaatctcaggtataggtactttggttataggtcatttttgctctctttatttttggccagtttttttctctccttaattttctctttttaagaattttacttatgttgggagcatttcttaaatgtatctttttagctcctctatagaattttgtatttctgctgtgttattcgtaatttccaggacgctttgttctcttaatgttgttctttgttaaaattccccttgagggatccctgagtggctcaacggtttggcaccctgcctttggctcacgagcgtgatcctcactcaggctccctgcactggagcctgcttctccctctgcctgtgtctttgcctctccgtatctctcatgaataaatagaatctttaaaatcaataaataaatacatgcataccaaaaaaaaaaaaaaaaaaaaaaaaaaaaaaaaaaaaaaaaaa

SEQ ID NO: 10553 - DNA, 627 bp, Canis familiaris
ctggagacatggacggaccccttcttggtgctggacgagattgtggatggcggcgtgattctggagagtgatgctccgcaagtgatcccgaaagtgaattttagggccgatgacagcagcctgactgaacagagtgtggcccaggtctctctgcccacgactaatcctgcttttctggaacttcctgcccagggcactaactacctcctgctgtgacagctaaggcaggggtggagccacagccatcctgcatggagccccaggttcttcagtctgccacaggaaccaattaaatggtcgttactgaaatgaaggctgtgcattcagggctccctgcccccagagcatttccccgatcctggcaaaatctcaaagatccagggaacaggagagacccatctgtatccctaggccctcccagaactgactcctgaggtctctggccagggactctgagatgcaaagatttggcttcagtactgactcaccccttctcactgccctggcctgtccctccagccacgagaaccagctgagctgccttaactcagaccttaggcattcctcgcccccgagccctaataaacctgctttgtctcctgcccaaaaaaaaacaaaaaaaaaaaa

SEQ ID NO: 10554 - DNA, 648 bp, Canis familiaris
  misc_feature (1)..(1): n comprises a, c, g, or t, or includes no nucleotide
ncctggatcatggaaccacgctgtccatgctatccccgcagctgctctaagcaacttcgggtgtggaagagctgaagttgtcccacaaccccctgaaaagcattcctgacgacgccttccagtctttcggcagatacctggagaccctctggctggacaacacccacctggagaaggtgagctgctggctgcagagctctgtcctggctccttttctgcctagaggaccggggatccggggccgaggctgggcaccatcccttcacctctaaaattgcttctgtctctctggctatctctaaggtataagagctctgacagctctgtccctcatcttgcctcatcccccccctataatcccgtccctgcagccccggtccctagtctcagccacctgccgtcctcggattcctacttatagacggagctggggctgccctggccccccccatggcccctaggaggcatgtccacctgctccccaaccccctgctgtgggcacggagccacctcttcctgttggaccttccatccctcctctgctgtttttttcctgttttcccagtaaacttaccacccccataaaaaaaaaaaaaaaaaaaaaaaaaaaaaaaaaaaaaaaaaaaaaaaaaaaaaaaaaaaaaaaaa

SEQ ID NO: 10555 - DNA, 544 bp, Canis familiaris
tatgttctcactctaatattgaaatctctcatacttaaactccaagagtaaagatcagaagatataactcaatatcactttttttttttttttggccttgccttggagagccagagcttttgcaccttccacactattctctttctaaaatgtatcactgtgtagagaaaacatatgtaaatataggtcagttacatatcttcacttagagaaataataattggaaaacactattttgggaattcgccaataatttaaaataggatgtccactttaagaaacctgatgagctgaaagtgacgtaattaagttgataatagaaaaatatctattgacactagcaccaggtttggtggcagatgataccaactgtttttgataatcaaggtagtataagaaatacccccttggaaataatctatgttgtaactgaatctaatgaaatatgtataaaaatatgtattctctaacaccgcgttaattaaatagattcataagccaaaaaaaaaaaaaaaaaaaaaaaaaaagaaaaaaaaaaaaaaaa

SEQ ID NO: 10556 - DNA, 498 bp, Canis familiaris
tgaattacatcttgaaggcaaccaaatcacccaggttgatgcatctagcctgaaaggactggataatttggctaagttgggactgagttttaaccagcattctccgctgttggaccatggccaacttcttagccgaaccacttcctcatctgagggagcttcacttggacaacgataagctcatcagagtacccggtgggctggcggagcataagtacatccaggttgtctaccttcataacaaccatatatctgcagtcggatctaatgacttctgcccacctggatacaacacccaaaaggcttcttattcaggtgtgagccttttcagcaacccagtgcagtactgggagatccagccatccaccttccggtgtgtctacgtgcgctctgccattcagcttggaaattataaataattcccaagaaagccctcgtttttataacctggcaaaatcccattaatatcattgctcaaaaaaaaaaaaaaaaaaaaaa

SEQ ID NO: 10557 - DNA, 668 bp, Canis familiaris
ttccctctgcatctgatctcatattgtttgttagagcctgccacttcatgagagtgactactaggtgtctagtgacaggttgggggtggtccttcagagatccattccagactctctgggtagggagagggcggtgactcgaaaggttctgccagaggagccctcctttatcataaaggtaaaagaaatggaaggttcatctgtctaatttagttaaaggtggtggtgctggtcagatgtccattgtacctactcccccctccctgaaagcagttaccactctgttcatggccaccctgcagactccttactgtaatgtttctgtggtgtgtaatgtctgacattttgagagaccagcaggcccacgtccccaggcctgccgtcctgtcactccacatgttgcactgatgcgtgtgacgcgctgagatccgggtttaacttctgctacacacctgcatgttctctgtgaagttcagcagaccacaggtaggacaggtttggagggtccaacacgaaccgggccgggtccttggtaaaactgaggagtctcactgatggctgttctgagtttctgagggcctcttgttgcatttgtatggcattaatgttctgaagaaacactataaaactccccacccaagtcccaaaaaaaaaaaaaaaaaaaaaaa

SEQ ID NO: 10558 - DNA, 569 bp, Canis familiaris
ttgcccactaccagtgaacttgcttgaaggccgaggagaccaggattgctctgccctctcccaaactttttctttccctgaacctgagggaaacccacctggattcactccctctggttgacactcactcaaaaagaacgcttctgattaagacggttgaaactagggatggacacggttatcaacgaaacttctcagcatcatgatgaccttgagtgaagcttgcccagattcggtgcagccattactaccagccagaataaaaaaaaaaagaaattcgtatcttaaagaaacagctttcaagtgcctttctgcagtttttcaggagcgcaagatagatttggaattaggagtaacctctagttcttaagaaccaacactcttaaaagatttaggagaaagtttacaacataatctagtttacgaagaaaacttgtgctagaatactttttaaaaagtatttttgaataccattaaaactgcttttttccaacaagtatctgacccacttgtttctgcttcaataaatctttggaaaactccaaaaaaaaaaaaaaaaaaaaaaaaaa

SEQ ID NO: 10559 - DNA, 663 bp, Canis familiaris
ggccgagagctgtacccgcgcgggtgtctgtgccagagcgcgtcgctgcgtgggacacggagtggctcccctcccctcgcgtctcgcccaactcggcttttgcgcgccaaccgcccgcacttgggggcctgcggtgtcccccagacggtttcccccttttacggaggaaccccctctgtggcccattcgcgaagggcttcccccctggcccttctgggccggacttcgcccttctattcattctcccgccaccttcgggcctttggaccccaggagctcttccagggccccgccagcccccttccctgtgcctggagttcccaagggcatctgtagcgggatgccaccccaggtcacaggcggagattgggtctggggcactggtggcttcctcccagagggcatttcctggaaactgataaatcagattgtgcctctttactcttggcttttgaaccaatcgatgttcacatctgcgatgggcatggactccaccagggcagcaccagacccaagcctcctaggaggggctacactgagcccagcacccggggtgtgaaatagaatttattgtggctctgattatgtacacgtgagatgtgtctggccagggggccaggctggcatggtttgtacaataaatacatctgtgggcctgctctc

SEQ ID NO: 10560 - DNA, 577 bp, Canis familiaris
atttggtaattgtcctgatacctctgaagtagtatgatttgagattaccgactttcaggtgtctgtccccgttccagctggtaacttcgtaaatgaaaggacatgttgggactagcgtattcttagcaggagatgaccttttggttttgagtaaatggagaactttgtattggttaggagataaaaagcactttggagagatcggaattttgtatagatcacggtatgtcgtttttaaagaggccatatttcacgtgagtaatcacttgtatgttattctgagaccaagtcggctttctcttactgtaacttttatggaagactcttgtagaaggagggattcagttataagactattcactctaaggcaggtttgtaagtaaacgcttcccctagttacacttctgctttgctgtctcatgacttgaatattagtaaaggttactcccccctccctttttttttttctttttttttaccctttctcagtattttgttttctgtcatctgaatcattttaataaatgactttttgtttttctagccataaaaaaaaaaaaaaaaaaaaaaaaaaaaa

SEQ ID NO: 10561 - DNA, 610 bp, Canis familiaris
gagaataagcccttcgtcagagagcccgccgagtccccggagccctgggcgtcgtcagcctcatcctccgctgcaggctggagacacggtctgcatcgacctggtcatggggcagctggcgcactcggaggagccgctcaccatcttcagcggagccctgctcttccggggacttggagctagaaccggtgtagacagacggctgggcatgaccggcccgaagtgtctacgccgccggccaaagagccagcggggacggcggggctccgtcctggccccccagccccaggcgagccgtccagtacctgtgccgcgcaggcgcccagagcgctctcctcgccacggcctgagcgccccgggcggagactctgggatccccacgtccagacttttggcctgctcgccctgcagggcccagacggctggggagccgatcctcgcaccttcgcagctcctccagctggtctctagcccgaggcagggctctcccgaggggctctggccccccccgccgtacccaactattcaggaataaagacacttggtttttctaaaaaaccaaaccaaaccaaaaaaaaaaaaaaaaaaaaaaaaaaaaaaaaaaaaaaaa

SEQ ID NO: 10562 - DNA, 624 bp, Canis familiaris
aagcacgctggatgatgtgctgcggctgtggtgctgatgactgcagatcagccaggaggctcaaggtgaaaccgctggcaagagtacagcatttgctgatgctgctgtggaacctattgattttccagttgcacctgcgtatgctgtacctaaggttcttagagatgcaggactgaagaaagaggacattacgatgtgggaagtaaacgaagcctttagcctggttgtactagccaacatcaaatgctggacctggaccccccaaaagtaaacatgaatggaggagctgtttctctgggacatccgattgggatgtctggagccaggattgtcgttcacttggttcatgccttgaagcaagggagaatatggtcttgcaagtatttgcaatggaggaggaggtgcttctgccctgttgatccagaagctgtagaccacttgtgtcatcccaagcacaacaatactacatggattctgtaatcattatgactgaccaccctgggtcaggttattcaatctgtttcattttctatttttttctaatatttttataagcagataagatcagttctcaaaccttctgaaattataagtttttcttcctgttttaaaaaaaaaaaaaaa

SEQ ID NO: 10563 - DNA, 386 bp, Canis familiaris
  misc_feature (109)..(109): n comprises a, c, g, or t, or includes no nucleotide
cgcactgaatctaccgatcttgtctcgacccagagccatgcaaacccccttggggtggcctcttgtcccacctaccggtgaaaagtgacccaatgactttgtgaatgcntgaaaggctgtgtggtgggcaccaagaagcgagtgctgactctgcgcaagtccttgctggtgcagacccaacggcgtgccctagagaagattgacctgaaattcattgacaccacctccaagtttggccatggccgattccagactgtggaggagaagaaagcattcatgggaccacttaagaaagatcgaattgcaaaggaagaaggagcttaatgtcaggaccagattgtgcagctggtgggatctcaataaaaattattttccagtgaaaaaaa

SEQ ID NO: 10564 - DNA, 639 bp, Canis familiaris
  misc_feature (112)..(112): n comprises a, c, g, or t, or includes no nucleotide
tgcaggggtgctgttaccctgccctgggtctcagccctggctgcccaaagctggggacactcaagtgcttccttccctgccctttcatcctcccagttgggagcctcttgcncttcctctctctgtgccttgggccctaaagccccacctgtagtagagagcaaaggtggcccctggtggagagataagggaaagactgtctggattccctgttcctactagtatcagggtttttctacctgtcccccaggctgtggcccaccatgagcccctgcccatggtccagtggagagcctcaagccagcattccctgtcctcatcagccacaggatggttctcactgcctggccctctatccctgccatctgtcccatggtcttcagctcatcctgccccccatttacctgtcatgtctcctacaggctggttccaggtgctgctctgaggttctgggcagtgggctgggcctggccccagaagcagggcagctcctgtctgctccttgagttttgtaaagccaaccctttcaccagaatagtattaactcctggtgctttgtactactggtccagctgccttgggctccttttctatattaataaagaaatgagccaaaaaaaaaaaaaaaaaaaaaaaaag

SEQ ID NO: 10565 - DNA, 537 bp, Canis familiaris
tgttcagcagtatgtgcgggactccagagtccatccaatactagaaggcagccacgaagtgatgaggatgctgatctctcgaagcctgtttgaggagtagcacccagacttgatgttcggtcatgatggttaatgtaccacttgaatcagtattgagagctttcatgtacccttgtgttgcatatgagtcatggattagattgaagggctgagctcttccaggtggatcctaaggtgtgtgttgggagcagcatcagctctaggaccgggacagagtcctcagcagaactggaggaattgccctaattgggaatgtcacaagaagatgtactaccttgtattctgatgccaaaagatgaccagtgaagattcaccacccaatcaagtcctttcttggatccacatcatcttgatttgtctgcaattttgctggttcactaaatctctcttccacgggatctggatgcttccacttaagggttttttctgatgataaagccaaggtgtaagaaaggaaaaaaaaaaaaaaaaaaaata

SEQ ID NO: 10566 - DNA, 673 bp, Canis familiaris
ggttatatgagagagactacatttcgtctggaattcttagcttcaactcagaaaatgtatggtgctgaactgccagcgtggatttttcagcaagccctctgaagaggcgaggaaggcgattaataagtgggtcaaagggcagacagaagggaagattccggaactgttggctgcaggtacggttgacagcatgactaaactcgtgctggtgaatgccatctatttcaaaggcagctgggaggacgagttctcgaaaaaagacactgccgatgccccgttccgattgaataagaaagacaaaaagaccgtaaaaatgatgtataagaagaagaaattcccatttggctacatcgaggatctgaagtgccgggtgctggaactgccttaccgaggcagggagctcagcatgctcatcctgctgccggatgacattgaggatgagtccacggggctcaagaagattgaggaacatctgactttggaaaaactgcatgagtggaccaaagcggagaatctggatcgcgttgaagtcaatgtctacttgcccaagttcaagctggaggagagctacgaactcaactcccacctggcccacctgggtgtacaggatctctttactggcagggctgatctgtctggcatgtcaggagtcagagatcttttcatatcaaaa

SEQ ID NO: 10567 - DNA, 620 bp, Canis familiaris
ttccccaagttagacgatctgtatggcacatggcgtaaggctgccctccctcaagagtaactacaaccttcccaagcataagatgcttaatacagacctcagcagaatcttgaaaagcccacgagatcccatagagccctccgagcaccacgcatagaagattcatcgtagagtcctgaagaagaatccactgaagaacctaagaatcatgttgaagctaaacccgtatgccaagaccatgcgccggaacaccattcttcgccaggcccagaatcaccaactccggatggataaggcggcagcagctttagaatgcccaatcggaggagaagggagttccacggcatgaagcccccggtagggaagaaaggataagataaactgttggtgtgaaaaagtccgaagaaacctgtggtacgggaaaaaggctgcagctatccagataaccacgcacgctgatcagaaacctgcagaataagaaacctaccaccggaagagaagaagcccgctgcctaaaaacttatatttgtttattccataaaactcaaatcattttggacagctaattttaaataaagacctgatcaaagaccgtgagaaaaaaaaaaaaaaaaaaaaaa

SEQ ID NO: 10568 - DNA, 494 bp, Canis familiaris
cgcccggcgccgcgccccaccctagcccagcctagctaactcagctggcgagccacccaccaaaagcagcagccgcccgcgcggctgcctgctgcgcccaccgaagcgtccggcgagcagcacgcagaaccatgcccctgcgtcgccccgcagacgacaccccgcagcactagcacgagacacccatgggacgcgagcaccccaccccaccccgcgcgctacacataacacgagcgcctacaacacgagattgtaacagaagtccgattaaccccgtcctccccttgaaactgctgcagctgtgggtgcaaacccttgagcagtccctgcgcctgtacctctacctgccagtattcattgccgtcgctggatcccagccagtgtggcgagtgctcccacccctcatttctggtcactccttcccgccgcctcccccggtcctgcagaggcagcgcggaccacatttcctcctcattcccccgagacggcactcg

SEQ ID NO: 10569 - DNA, 562 bp, Canis familiaris
  misc_feature (249)..(249): n comprises a, c, g, or t, or includes no nucleotide
  misc_feature (262)..(262): n comprises a, c, g, or t, or includes no nucleotide
  misc_feature (297)..(297): n comprises a, c, g, or t, or includes no nucleotide
  misc_feature (331)..(331): n comprises a, c, g, or t, or includes no nucleotide
agggtcagtgaaaattctgctacaccgcagaagtcttaggctcacatgccatctcaccactacagtgggtgcaactcaaggtcttcttattgcactactgtgatcccggagggcaggcggtgctattgatctacctggaagacatccaactattcttcttatatacagctgacggtacattagtcaacagccctccaggtatcttctcctttttggcaacaataactggagagtgccaaaactgcttcncctgagctgatcnagggtgtaacctgcctacactcccaaaccggaganggaacattcgaagcgacacagcctcgaactgcanaggtttaatatttattaacccttgtttgcccacgaaaaatattccaggcttttaccctaattatactaagcacttttttttttttttttagtttgcatgtatcaggtttcaattcagcttagaggtacaaaaaccctctagtaaatattatctatttgccgttatagctgaaatttattaagccatcttatttttttataaaagccagccttttttttttttttttttttt

SEQ ID NO: 10570 - DNA, 682 bp, Canis familiaris
ccatgttgtaccttggtggtgcagtgggacttggttgtagtcttgtacatccggggctacttattaatactgtttatctagttgcccttggtatcgacatagggcttcgctaccaccggttaggagtggttgggcccctaccgtgcacccgtgctacatcgagcctccgagcgcagggtaatcctgcccgtctaaagattggtcatcttggtgtcaggcaaaagcggcaacggtgtctgcagcttgaaccacctagtccgaactgtaatcttgctcgggaggctgtaagttcgagtgcaagtagtgggacgcataggagacatagtggtcgttttcatagttgagggttgcgtagtagtggtttatcctaacttgagaaactacagacgcctgtccaacctgttacctgaagactccttgagctggctaataaacagcgtgtgcagagctcagctgctaaaccgctcctccccacgcagcatagacagagtcctgctgtccttaggcgacaacttacctgcgtttgttaagtaagcatttaaggtgttgctacgtgcagctgttgtgggaggagcaaccgtaaaccctgttgtccccgtagtgggaccgtacccctactcaattaaaaccataataacactctccacttttatttacaaagaaaggtttacaattttttttt

SEQ ID NO: 10571 - DNA, 607 bp, Canis familiaris
gcacccctaccgttggtcacccagtccagaggaaacagagcctttgccccgacctcgccgcaggctctgtgggggcggttggggggcagggctaccacaatggcacccagtgccacgcagtgccacacagacaggacaaccaaggtgttctaaccaccgggcaagggtttgttttccggccacctggggtttacaggacacaaccaccagcaacatgttccttccgctactgggtctgtcagtacccgcaattctcgtgggtggggaaacagttagcaccagccacttacaacaccaactctaaccacttgggtgagttgccgccaattgaccaccatatttttctttgcctccaccattaaatacatgcaaggtttgtcccacaaccaactgagtggagagagagctgttgctcagaggactgccagacccctgtatggtgtaccagacagcaaaagggccgatgccaattactcctacgagagagatagagagagggggctagagagaaacagagagagggctagagagaaaagattattttataattcaaggccctgaattttttttttttttttttttttttttttttttttttttttttttt

SEQ ID NO: 10572 - DNA, 220 bp, Canis familiaris
cgagtgatgataattggataaaagtttcagcatggagagcaggagctgtaggtctcattagctgcctcttaaggtgttatcaacgcaacgattataaggtgctctagaatcagcaactaaaaggtgcaagaggagaagtagtcgaacagaaaacagaaagatttaataaaggattgctataaacacacatggcgaaaaaccaaacggaacatctcaagaa

SEQ ID NO: 10573 - DNA, 512 bp, Canis familiaris
cctgtgagtaattctaaagtgacctaagcttttggaattgcctatagtcttaaaaattatagctagagtaagtctgcaacttttctgttcggaacaccctagggggcacctgtcttaagataaaatcaaagagctttatagtgggttcagctagcttgcactgggagcacccacccacctgaaccaaaaaaaggggagtaattttagctagtatcagatagatccaggggtgaagccttaaaccattgcagaaggttggggggctcacttgggggggtagataagtgtagataatagctttgttccttcagtgccttttattatttagtttctctgttcacacaatgccaattgtttgcatatatagttattaatagaaatccactcaggagctaaatttttggtcaaaagaactagggtgttccacgaagtctagctctgaaagcttccaaacgaagtaagtagaatttcgactctgctgattaagcacttatttggactataaggtttct

SEQ ID NO: 10574 - DNA, 427 bp, Canis familiaris
  misc_feature (2)..(2): n comprises a, c, g, or t, or includes no nucleotide
  misc_feature (23)..(23): n comprises a, c, g, or t, or includes no nucleotide
  misc_feature (44)..(44): n comprises a, c, g, or t, or includes no nucleotide
  misc_feature (60)..(60): n comprises a, c, g, or t, or includes no nucleotide
  misc_feature (74)..(75): n comprises a, c, g, or t, or includes no nucleotide
  misc_feature (93)..(93): n comprises a, c, g, or t, or includes no nucleotide
  misc_feature (99)..(99): n comprises a, c, g, or t, or includes no nucleotide
tngcaccagacggcggcacagcnggagtgctcctgcagggcgcntgtgccccaggcaccncacgtcacgggccnngaggtggagcctgtcccngccgcncaagtccttgactcagccatgctgcccccccagacccaacaaaggacctctagcaccacaggagactgcacccagagccacagagggtggggcggcagcccagagaagagaccggggccgcagctgcaggggctacagttgcagcctgctgcccagtgggcggatacccctcacaggacccgtgaaaagtcctgtccagtgacctccaggaccccagagaagagaacaggactgtggccaaagcagagtttagctgagaaactatcgtaccctacaaaccatgagctagtgtttatttgtaataaattgatttttttttttttttttt

SEQ ID NO: 10575 - DNA, 602 bp, Canis familiaris
actctctcgctgaacacttgttacttggcaccaatttggtgagcaagtttacccaaggcaagacatagcaggtcacggccagtcgccaaaactagcaaaagttcttttgtaggcagaaatatgcacgttcacctctgcccagaaaggatatttgattatctaagtgataactggttatggcttatataaagaaattaatcccttggaccaccaaccaagactgaaaaccagaaaactaatgtgttattattttgtggtgtgttgtttgggggagttaaaaaggccaactacaggctctcctcatcttctgttataaggctataaaacatggtttgtttgccagaaaagcctattttaaaatccactctttattattgagcatccataagatcactgaaggtctgcaaaagatatgttgttcatttcacgggctgccctggaggcactgcggaaatgagcctccaacggcccagggcctgtaccaggtgtccctggtacgtgacccgcgacgggcacccagctaggtgccagcaacacccacagccagacacagccccaaccacacacctacacacacagagacactagttatttaatttttt

SEQ ID NO: 10576 - DNA, 190 bp, Canis familiaris
gcttctgggttgggcaaagccagtccggtggtttctccctgcaaatagatttataacggcctcagactggagaggggagcgccctctgccccgggcagaccagttagataatatttggcaccgggggttgtagctctgtaccgaggaacatgatgtcagcaaccttgtctgttatttagaaaaacaagaa

SEQ ID NO: 10577 - DNA, 481 bp, Canis familiaris
agggcacctgtggttggacctgccatggccccctcttaggcagactgctccccctctctagccccagggccgccaagtgttgctctgacattcactcctctggcaccagtgccagccacagccagcaacccctacaacgccttacccaaacacaggaactgacctggaatcaaaggcccaaggaaaacaaccctgtaaggtggaacccttgtggcccacctggggtgaggattagggctcaacccaagagggatgcagctggggcctagccacaccacccacacaggctgggcccataccagggctgggggccaggggcagggccctatgacctgcctacctgccgcaccaaagcctgacagttaacttatttaccgacctccccccaaaagagggggagttcgaaaattctgcccttttttttttttttttttttttttttttttttttttttttttttttttttttttttttttttttt

SEQ ID NO: 10578 - DNA, 636 bp, Canis familiaris
acccttgggagatgttaacgatgggacagactaaccctcaacaaccactaagtgttctacagacaacagctgtcccaacagccttgcctggggtagtactgcaaggcaggtgaagaagggcagggctattgggtgcaacacctgtgcctggcaagttgaaagcacattccttctaaatttggcaccctgtgtcctgtgcctgtatgcaccagcccctgagccaaggacgtctccaccactttgaggtcctgctcagacaagacagtgaactcccctgccctacccagctccatcattaacaggacaccaacacccaacaaccttcttttgataagttatcagacaccttacggatacacttggtggaaacagtgtctgaagatgttggcacttgtagttggcaggcctaactgcatcttgccagtattggccagagaaacacagtcctgtggaggttccccgtgggccctgctggccaaaccctgggccacctaggtgcttgcagtgcctccaaggttttctgtgaatttcggttataaaaagatcccgtagaaatctgtagcagaagggttgaatacttatttttgtcacagaataattttttttttttttttttttttttttttttttttggcg

SEQ ID NO: 10579 - DNA, 526 bp, Canis familiaris
gtgcccccacctgcccccagccaggtgctacaggctgcccctgtccagccctagggggaaactggcagcccccaaccagcctgtccggtggggcaggggggtaccctgctgggggtgggcttacccaactcccctgaagcctttctgcccccactcccccaggtccaaccaccacccacatacccagtcggaacaggcaaaccctttccgcaaaagtacaacagtaaccacaagggaagttgctgtcctgaacccccctggctcccctgaaaggggggggccagataaaaaaaattcgtctcccctgaaccactccagaaccacccaaaaccctagcagccttcaacattccgcttatgagtcacagagcaagacagaaatgaacagagatatttaggttagaagaggtgtagtcccaaccaagcgcctccaggaaccccaccccaaaaccccaggacaaggctcactaggtttctggtcctgattgggtccaacttaatttttttttccttcttctctctttttt

SEQ ID NO: 10580 - DNA, 549 bp, Canis familiaris
tagcttttgttagtttcaggtcctcaaacaatctactatctcgtagttcaccttaggtaatttgttcatttagattgtcccctgtactatttcaccagaaattttttttactattcctgctttcaccaggtccaaagcccggcttttgaaaacctggactgacaccacttgcttgggctgcttttgcaggtctttctggctttattcatcaggttcatctagtttccttttgcaaaaaagctattagtgggtcttttcttctttggcttcttttctctttggcttccatcgtgaggttgttttagaaagctttagtatataccttttttaggatttataccttttatataatttttcacaatcttcacttatcctttctcactttaaatttttagggctgtgttcagttatgtctaaaaccctttgttgtctgtcggtagtccttatgtatatatttttggatcacttctactcattactgagtttagctttacttttcctcttataatcaaagctgctgactgttaggaatgctactttttttttttt

SEQ ID NO: 10581 - DNA, 641 bp, Canis familiaris
ctcagagagcccgcacggacggtcgcctctggtgctgacggctgctgcctgcctgccggggcacgggggcacagcgagccggcggcccgccccctcgacctctatgctcttcgacaatcagagccacattccttgcgtgagaaaggttcctctatcaaaaggttacctcagctttaaaacatcaggccttgaaagtgagagcttgccgggaaccctgcagcggcaggtgaggtggcacctggcccgctgtgggccacagcaagcaggttcgaacattctaaatctaaaaagaatattgcataaattttccttattgttgtcaagtatcactgttttttttacttctggaaaaaattagtcattcaaaattttgcccctccttctcgagtagcctaccatggtccagccggggcgctgcctccccgccccacgttgcctacgctgcacgaccgaggccgtgcttggtctgggtgggaaaacacctgtgacataaaaaacttcgtcgtggtcccgggccaccagagccgccgcaggggttgtgctgggtggccgcctcttgccgcttgccgagccgtgcctggcctcctccaccgccagccagccctcccggcggcacctgtgggggcactgagccgggcccg

SEQ ID NO: 10582 - DNA, 652 bp, Canis familiaris
aagtaatatgtggttggttattgatttttgaaagaaatatgagaattatccgtctgagatttttgttttagaccttacacaggcaggggtgtcggatgcagagttccaaggcaacagatctacaagccacgggttttacggctgaagcagcaaccaacagtgatttaaaggcgaatgtattgagaattctgtattttatatgcggaaaataggtaaggtgcggttgagtagttttttttttctgcctggtttccaattttgattctatgtaagtctgtggatctggagttactactctgacaatttctggcattcatcacaagaagttttgtaacctgaagggactttttagtcacagttccagtttagagtagaactcgaaagatattttctcttggtaatttggtgaaatttgtattagttttccaaattgactatgtttaagttgatggttgcttctaaagatactgttaaattgcatattctttgatatcttctctgagatggtagatgctaaattgttacaaaggatttattcgcgaactatagctgtcagaactgatacaagtagagtgaggattaaaaatttttatgaactaaaatggataaattatttgattaaacaaaaaaattttatttttttttttttttt

SEQ ID NO: 10583 - DNA, 584 bp, Canis familiaris
accgggcacggaaacaaggcgttcctcccccaaccagaaacaactattgtcactgcctatcctctcgtaccacaacagaggcttgcaagccacacccaatttcttgctggacaagtgcttggcactgtgactctgtggtggggctgggtctttccctagtcaatctgctgaactacccactctctccacagatccactcacagcactacagcttttaggggcatggcacacacacttcaatgtccaagttaaggaggtccaattgtaatatgtttactaggttgttggatctaaatagtttttgcaacacaggaacagaatacaaaggggccactagatttggtatacagggagtcttacttgacttggtgtcatttaaatttgggaatgtaaagaaagtcaagatcgacagatagtacacaagtcctgtggttacatccaactgttttgcttaaagtgggcaacttcaaaggaaagtaaaaatttataataaaaccaagctagatcttctactagttaaaatgaacttttaacagataactcagattatttctctatttaagcaaactttttttttttttttt

SEQ ID NO: 10584 - DNA, 610 bp, Canis familiaris
  misc_feature (376)..(376): n comprises a, c, g, or t, or includes no nucleotide
gggtgggggggaattccaaatcatcctaatgatagataggagcctgttaaactagctttagtggagagcctgctgagaggattaaattacgatagatttcatcatccaatttgatagctctttcaagcagcagcaatgtactccagctgcaacatggtccctcgaaacaaaatcagtaaatttttcatatctatatttttattttttgaagagccagtttagttacaagaaaaaaaatattgatgccgccaggaaccagagaccagagtttatctggctcaagtcccaaggagatgccacagaacgtcaaatatactcgggttcggtaaggacagtaaacaaggcccactacaagttaaggcctctacctgggccncaggcctgaggtcagttggcaaagacattgtagtcttgggctgcactggggtagagggggtgggcgcaaaatacaaccccgaagactaaagtggaaaagtacaacacagggatttgtggccgaaatacaaagatttctcgtttctaaaaagcaaacacctgaaaacagaattaggcgtttgttaggttgcgttatttgaaaatcagtaaaaagtgtcacatttttttttttttt

SEQ ID NO: 10585 - DNA, 347 bp, Canis familiaris
gagttcgggctggtgcagagctactcgaccctcacctacgcctggtacactaacgccttggtgcccctcgaaggtgcctgtactcccgttttaactggcagttaaccgttgcgctttcaaagttctgtccgacacctaggcgtcctcctccctgccctagtcactgctacacctctactccatcttgtgggagtccccgagtccccgtgagagacgagtcccaacggcaaagatgtcgcccgccgctggagcgggcgggccgcgggcacgagggaccctgtgacgcctagggacccagattcggcgatggttttcctttattttggccaaataaaaaattttttttt

SEQ ID NO: 10586 - DNA, 491 bp, Canis familiaris
gtatttgattaaggccatgaaactacaccgaaatttcaactggttaggcctttcagttgtaaatgaatagatggtcaaattaaccaacaactggtccctgaattattttgtccctgttggttcaccaggtaattttcaggtatagggtgattaaaagatggcctgggcagcctcctaaaagggccaaagaagattaaacagcaaacaagtaattctacactgtgcagtttctaacctctaacccctgctgagagggggccttcacttgaaatcttagcagtcttttaatcccagcaacatgcaatacctttaccacagccccactcaccataaataattgctactctcatccctttggatctcatgctttaagagcttaagttattttccctcaaaactaaatgtaacaagcttcagatactatagattatgatactcaaaaacatctaaaaggactttatttaaaaatctatttcatatttttttttttt

SEQ ID NO: 10587 - DNA, 225 bp, Canis familiaris
tgctctgtctggtacgctgggtgtggccgataatgcaaggcaccagtggaacagcttctgcaaaacaacaagatccctgagaatcccactaataaaagattccaaccttcaccagtactccctccgggaaaaaagagacggtcatagattaagattcctatacacaggaaccctaatttttcctacgaaaatgaatttttttttttttttttttttttttttttt

SEQ ID NO: 10588 - DNA, 625 bp, Canis familiaris
ttgctcaatccaggaggcaaaagctatccttatcgagtttaaagaacacttctccttgaatgctctgttgtgggtggtacagaaaacccttgtgtgagtcacgttttcacacagttgcagtaatccgttgtagaaacgtttggttttgtagttgttaaaagaggttgttgttagttgaagcagtaatagttgcatcttctaaaacctacaacatattcctctcccataaccaggacaaggactaagaagccaccaacaaatataagttgttcaacttcccttcggagttcatataaaagacctattgagcaactactggccactacgcccaacagacatcaggcacctctgatgtcagatccggcaaaggccccaggcaaagatacatagggaggccagaggatataggttttgattctgggaggactgttagtgtgtctctcttgtagaaaaatatgacagctgaaggtgggaaagtttttccccttccttttagattaacctgataaagaaataaggcacaaaaaaagtcctgtaagaagtttaatttagttaagtttgggtttttttttttttttttttttttttttttttttttttttttttttttttttttttttttggg

SEQ ID NO: 10589 - DNA, 588 bp, Canis familiaris
aagaatatttattgcagctattacctatttatgttcttgggtcaaaaagaaagtattacccttatcactttgaaatcgattagtgttaatatgcgcgagagctcttcacaagtgggaagtaatagcagcttaaatgctagaaggttcgacatgtgtgttggaagtcaaaaagctcaacagatatatgacttttgtgtgtttccagatattatgattgtacaataaaagttatttttcgacatattaatcttggtgaaaagaattggcattattttagtctgtcagtgcttttaagcaagcttttgaggctctgtgaatgctcacctatccccaactttctagaagcaaagcaaataagaggtctgcaagatgaaagcctggtaaaaaactgcaggtttgtatagcctaccaaccgtgtacactagtcagtctttttcacctaagggcctttacagccagttgtactaatcctttttatgctggatcaacttcctaattggagtttactaggtactgtataaccgatctaaaaacttttcatcagctagaaattttcaacttcggtttttttttttttttttttttttt

SEQ ID NO: 10590 - DNA, 640 bp, Canis familiaris
ctgccgccacaaagtcctgaacaacggtgtgctccagaaggtgaccgtacacaacccttcaacatcaacccagtgccccaacatccaacggcctcccactaaccagcgggctccctgcaggtaagtctccgggcacactgtgtagcgacaggtgttggtctgtaacacagacttccaggtagagttgctcaacacccctgtggtgcacttggacttggagaagggtgtagagtaagtggagctaggctttctagttgtgcgcctggtagttctaggaaactacacccgggtgaacctctggtttatctggtaccctgccgtagaggtaccacaagcctaatcaactacccagactacagtaggggaccactcagagttaggtccttggttgctggccactggcccagtgcgctcctaaccctactcccgagttgttttgccagctgactcagctgcccccttgtttatgtagcccaaacacattcagctaaaaaattttcttgttttaaacccctcctgagttagttttacaagagtaatgagcagttgcaataattagcattgggctggccctttaataattgcattattttatcataactgcttcttttttttttttttttttttttttttttttttt

SEQ ID NO: 10591 - DNA, 627 bp, Canis familiaris
tcaagaccgccaccttcgcgcgcgttgcggttgaggcaggcggactccggggccaccaggctcacgcgctgcagcgcctcgggatctccgggcctgaggccacggcgggcacgccgggccagggcaaggcgtggaagtagcggttgccgaagcgcaagtgcgcggggacagacgaggacggagcggccggaatggcctggcgcacctggatgggcagcgcctctgcctctcggaggccggcgcgcggccggggcctgggttgggcgccgggcaaccctggcaccaaccctccgccccttgccgttggccggaagttcccttgggccggaagaattgggccgacgggccctgggcccacgacgctgttggcgggctggctggcgccgaagggaccggagtcctgcgcagacgtttctggcccctggcacgggggaaggccgtgttgccgggcgcgggcacctggaagtcctgcgagtcctcctcgcccacctccagcacgaagggggagttcaagacgaaggcgatggcgcgctccaactctttgctgcggcggcgcacgggctcgacctggaagttctgtcgccgcacccggtacacctcgaagccctcctggttgtcgcgcaccac

SEQ ID NO: 10592 - DNA, 535 bp, Canis familiaris
agcccgtacacatgttcgcgacgatctctcgtgcttcttgaccccctccgtcaggaggatggagtttgctgatcacggcgactacctcccccgcgctggtgtgatgcctcccttcggtgtgtgatagttctcctgatgatataggagagtgacacccctttgtggccctctagagggtttacaccctcccgaggactctggtgccgtgtgggtcctttgtcccacaggttggtgccctgtcctggtttgtcgcctttttggtacttgtcacccgtacagctccagtgcctttgtttccagttgttttacctgcaaccttgaactgaacagcttgcttgatagcagcacacacctaagtaggagttgtagtgttcgtgggtgttgtaatctccgttatgtccacagctaccagagcaaacaccatgacacacctcccaggttctaacgtgtgctttactttccacatacctgtcttgtcttattttcactcctacaccaggttttttttttttttttttttttttttttttttttt

SEQ ID NO: 10593 - DNA, 545 bp, Canis familiaris
ggcaccaccgccagccgcaaagtaggtggtggataagattgcaaacctaaaacatattgtagttttttggaggggggtctaatgcgcagtaggcagagagagcaggcaagatatataaaaaatttcctacatccagaaccagtcaactttcttctatcaatccatatttcatccaaaaatattagctcttcagaagtcaggcgggcagatatgaaaaatgacagagatgaattaaattaaatcacaaagagaggctgtgcgtacagccctgtatcaagttctcagagaaaataagaggattaatagaaaagagtcactttcaacagagcagggagtagctcccgaagagtaagagtttgcaatgttaacttaaacttcactggaagaagtagtgggtgtttttctgaagctatgtgatatgcacagatgaggttatagacaacagatagtcatggcagaactccaaagtcagatttcatgcagattggtaaacactgagtttattttaaaattttgtttgagaacacactggttttttttttttt

SEQ ID NO: 10594 - DNA, 415 bp, Canis familiaris
  misc_feature (41)..(41): n comprises a, c, g, or t, or includes no nucleotide
  misc_feature (81)..(82): n comprises a, c, g, or t, or includes no nucleotide
  misc_feature (181)..(181): n comprises a, c, g, or t, or includes no nucleotide
aggtgtatcaacggggcgtgtagagcgaggaggggcgtctnccacagggggcgtctcgccccacaggcgccccacaacccnncacaccgtgtggctctgggccccgcgtagagggagattccgaagatattgagagaggtacattgggaggatctctatgggtgccgaggcccccaccccngcccggtgggcagggcagataaataggcaggagggtggcctgagggaggggtaccagcagcaccccactacagccaggctcctggcacacgccaagcactcaggccacaagtctaaaaccaccacagtttaccataaattgttcaaaaggttgcaatgcctaaaaatcaataattttatttttccaaaaatctccttttttttttttttttttttttttttttttttttttttt

SEQ ID NO: 10595 - DNA, 716 bp, Canis familiaris
tcagaggcactcactagagtactactggtttggtacctgcaaccaacagttttggctacaaccagaaagaggtattgtctgaccctctgacctgccattcatagggtctgcaaatagtgttggtttttgtagttgtaggtaacaagatagaggccatctgaggtgtgttctcaaaaggcaacagtgggcctgcgcagggcatggagctccgaaccagcaagagatacaagatttatgacggcctaaaactgaaacctgtccacaactctatgtccataatgagctaaagattcaggtaaataaacaattatataaggttggaaaagaaaccaatgtaatgatttaatactatctgtgaaaataaaactgaaaaccaaaagagctcagaccactaggcagaccacacctggggtctagaaccacaggggtactataaattagttgtataaacctataatttgagtggatggaggggataattcgagtttgggtgggtgtagtagctaaacaacaggtaatagaaagttgagaatttgtaggcattgataattttgctccttttaatttaccaatgcttactgttctcaagcaactcatgtaaaagccttcagccttactagaaggtcagtgcattacagaaccacaaacagtttcataattggatttattaattcttattttcaaccacaatatttggctttttttttttttttttt

SEQ ID NO: 10596 - DNA, 583 bp, Canis familiaris
ccaacttagctggtctcccaatcctctctggttgggggtttgctagtctaaagtcccatgtcaggttactcgttggttacagcagatatgttagctgtcggtgcatctcactaagcctgttgtacagagttcccaggggggcatcatacctaggccaatattaatacttggaagccgtactgccagctgtgaagactagccaagatgcaggagggaggcccgctacaagggataggagagtttgcactgaacgatatcccggagcaagatactatttttcacttgtgtcttcctgtgatagtggctacaagtagcagttgggtcctctttgataaaatatcacttaaactgcgtagcataacttgtatcaaaattctgcacacttaagcaaatctgttcaactacctgttagagctttagatcagtttgggatgaaattgacattttagcccattcttacccaaataatcaggcataaaaattaaagcaaagcaaagccttattggccatcaatcttgtcattcaaaccttgcatcaaagtttatttctagttttttactctagactgtgtattttttttttt

SEQ ID NO: 10597 - DNA, 610 bp, Canis familiaris
tggtacttaggtctagacagaagcctggtccatctaagctgagttggtgttgatagccctgatccagcccctctgaagctggccgcatagcttcccctggcgcaaccgattggctcctgagcccccaagaggtggcgccaggtcccttcactttagtagttagctaggccggattctttaggcttgttgcactagtcagagcgctaagacttgctagccaacgtgtactacctacagcactcaggagtgttcccccagctggaccaggagttagcctaataattctgaggaccccgggttgtcacttcccgctaagggcgtgcaggttctgagtggcgactggcagacgtagagaccccccatcgccgagagttactggcctaaaggcagcagagctctggagcccgagtggccgccaaccggttctacttgtcataagcagtgagccatgctgtagtgcactacttagctgcctgggcacaaccttaaccatagcatacttgttgttggtagtgcaggttcgagaggccttgacattccgaagtactccaggcagaggcaacttatttccagacagcccaaggggctgccacttttttttttttttttt

SEQ ID NO: 10598 - DNA, 496 bp, Canis familiaris
tacacctggactcgtcggagggaacactgtcaacagtcaccttagaacccgagggcaactcattggaggaacagttgcacaaagtaacagtcccctactcggagtagtaccctgttgctgacacctggttcttaccatttaaataggtgtcagaggctgtgttggcacaactggtgatacgccctttgctccgtgtggttagatgtagagttctaagcaacacccttatagggtgggcagtgaaccaaagtccccctgtagtgagcatggccccatgtgtgtgcacagctagactccttgagtccctggccaagccacgtggcgcaccagacaccattccctgcaaaccaaccacaggtcaccgctcagattcgccatcgaaagcagtactcagggttgttccaccagagagcctccattcacttattttccgccttggttacagtctttttcttatcttctatttctttctcttctcttgtctttctctcttctt

SEQ ID NO: 10599 - DNA, 398 bp, Canis familiaris
ccgcggaccccggtctcagtaacctgctgcaagcctccctcccccgcggtggggccggcctgccaaacgccacctgagtgtcccgaagctccccacacctcccctgtgtccacaacagcaccagcctgtaggcctccctggaccctcggggagccaggctcgacgggacctgactccacgaaaaccaacaccagaggtccagagcgaaaagccctggaaccaaacacttaacgctgcagacacacagtagagagccaaaagaacttctcttattaattccccagctgcacagccctgcccaacctctcatccaggtctttcgacaaaaccaacaaatcttatttagactgtcgcataatttttgtttttttttttttttttttttttttttttttttt

SEQ ID NO: 10600 - DNA, 597 bp, Canis familiaris
taatagctccagtaaagacatgttagtgatttttttacttcaaaaaaaaggtgacagctattgtatttggagaatatttgtcaaaaactcaaatgttaatagttataattgagttattggaattctagaggagagtatccattttcagatactgtagttgaaccaaccttgtagattgttaataaaggcattttaagatagtattttatttgttaggttgaattggatgactaaagagctatactagctttctctttattagtgtggatttcaacagaagcctacctctatttctttgatgcacagtagtgtggatcatgaaatgaactgtttaattcacattcatcaatattggtattttatgagtctatttaagagcatttgactttatcttacagattgtgattcaatttagataagcacaaatacagtattagaaaaataaatatgcaatcttactaaagtttaatttcaacctattataagctgtacatctttaaaaaattctttgggaagataatccttttttgttagttgacaatatgtaccactatatagtttccttcatagcagcatttcttcaattaaaaaaaaaaa

SEQ ID NO: 10601 - DNA, 574 bp, Canis familiaris
aggaaggaatgccttcacgcagtgctttggcggagatagaaacttagggatccaagactcgcgcagagatgaactcggtaaatcccctttgggatgataatttgatactaactgaagcccttctaatatttaagatggtttcagcggtcagtgtgctgccagaccccttgcttttacttttgtagttaactgtacaggacactttcaggaatgtgtgaatgcttgtcataatcaggcctttccttaataaatagggacttgatcatttatagggattatacatgaagaagttttaaaatgtatttttatgatgtcctatgttgagaggggaccaatatttataattttcaagtatttttacctaaatattgtaccatgtaatatgctgaacttttttaattttttgctaattttttaagatgtattaaaaatgttttgtatagtttgggttttttttgttttgttttttagtaaaatggactcccagtaagaaaataaaagtacccagaaccagccatgccaaaaaaaaaaaaaaaaaaaaaaaaaaaaaaaaaaaaaaaaaaaaaaaaaaaaa

SEQ ID NO: 10602 - DNA, 666 bp, Canis familiaris
ttttttgggattgcaccaatgttcgtcagacgtcaatgttccccccgggatccttacgactcactccttaaagaagccttgctttttttttattctttccagtaacctgctattgatcaggctatcccttagctagttaaaatataccatggaataaatgtcttatctcaagtgcccacagttactttggattaatgcaatataggtcactttaaaacagaagatttttataactttggacatgcttcagtaggaaatggtcgaacattttaatgaaaaattcatgtggttacgttaaaaattcatactgcattactacagtaaatgttaattttaaacagattgtgtaaagtttttttttctatattatagtggctaccaatattaatgtcttaaattttcaatatttgagcttatttttcttaaattctaacattgaaataagggtaattttagggaagcatctaagattttaatgattgtataattggcatctcatggaaaattaggcagaaagtatcaattctttaaagttgtgccctaaaatcctgtaaagcaggtgagaatactggttggaagatatccaatataatgctgtattaaattgttaaattctaacttgaatttcaataaaattttaaagctaaaaaaaaaaaaaaaaaaaaa

SEQ ID NO: 10603 - DNA, 561 bp, Canis familiaris
  misc_feature (306)..(306): n comprises a, c, g, or t, or includes no nucleotide
agtgcttttgttacctgcaacccacaaccactcctggttctgggtggagctgtggcctggggaccctgccactgtggctgtgaccgcaggtcatgcatcagttcaccactgctgtggttaaaatctagcagctcagaacaactgccattttattatttacccacaatcctggaggtcagcagtctccccagctcggctgggcaaggcttctggcctcacatggggtcacccctacagtggaggtcgcagatacttgagcagggctggtgggcttggagctcctgcggggtgagaagctgtaagtcnccctgaggacatgctgctggataaagccggtcaggaggccacacttggaggactgcagactctgccctgggggatagggatgcagcctatgcatccctggcagcccaaagaccgaaatgctcactgttctgaagaccaacatccagaagcaagccaagcggccacaaggtccaacgatgcctttccagggtccactcatgtgggaggatatgctgtgtttctggctgtcctgaaccatacagtgaagccctcttc

SEQ ID NO: 10604 - DNA, 237 bp, Canis familiaris
ctgaggtctaggcaggacttgcagggccgccattcccccctgctcctcaccccccacccccgcctgtgcctgctttgcaacccctttgcttgggccacggtgtctctgcattgcttgcctctttgcctttacctctttttttcctccaccccagcacatgtggggtcttggcccccaggctgtgagctccttgggggcaggccctcaataaatgtgaagtgctgctgcccaaaaaaa

SEQ ID NO: 10605 - DNA, 594 bp, Canis familiaris
cagtgatgtgggccagaaaacaagggatgctcaagcacctagagactagcattacccagaagccatgagcattctaagttataaaggggcaaaggatggaaacaagtgtcaccagagcccaataagagctgctctcatggaggagagactatctcctaggagatcttttccctaccagaatcatggccctgaactactgatgcctccctttgaagaatctaaccagatgttatttccagagtagcccaggtggatacagaaagtggagagaaggtctgggtgcagtcgatggataataagcagcacagtgtttgttttctgtaaattcctatgtaaagtctcagtattagaaataaacttattctgctagttgaaagtgaagtctttttacttcattgtgcttttgtatcgtcacaagtaaattccttttgaaattgagcacctgtggcaggtatgtctgttgacatgcatgaagcagatattatgttaaattatattattcatatatccctctgtggtgtttcttgttaaatgtgttgtgaggtaagcagttctgtattcttccaaataaatagccatttgtccctgcaaaaa

SEQ ID NO: 10606 - DNA, 609 bp, Canis familiaris
ccaaagggacaagactcaggattgtccactgtatcttgtgacacaaagtcccaagcttcttccaagctccaggacagcagtcagccaactcaagagatcaggggaccaaaggtgactaagaaactaaagcaacaatcagctacgctgctatcctccaagaaggttgccttctggaagccgaatggccctcctaagggcacggacacagaagtgcctgtgctatccctttccaagacccaggacacactcaagcctgaggactgggttcagccccttagaagcaccagagggaccaagaaagtaaagcagcagttgccagcacagccttccaagagagctgccttccggaaacagaatggcacccccaagggacctgagactcccgccatgtccccccttgattccagccagcccccaccagcaaagaggagaaaatctcagtccagaggcagcagccatccagtgttgtcttagatgaatggctggtactagactggggtggcttactgctgttggcacagggttggaactcttaacctctgtgaggctggtgtccccactgcgtatgaaatctaatacacattttataatctcaaaaaaaaaaaaaaa

SEQ ID NO: 10607 - DNA, 696 bp, Canis familiaris
  misc_feature (44)..(44): n comprises a, c, g, or t, or includes no nucleotide
ccccttcgtatatcccaggactgtctcatcgaaatctgctgggngatgacaccacagactgttcttcatctttcggtatattctctgtaccatgtcaattcgacagaacatccagaagatttcttggtcttgccccttcacgtgctgccaccaagcaggcaggtggatttcttggccctccacctccttctgggaaattttcttgaaatcaagaagaaccctgtaatacccgtcattctttttaaacattcaaattagactggcaactattttgtagcaggagccatagacagccttagggcttgggccactttctagttctgagttatttttagactttttggatattattctaatgagaatggcacccaacaaacatgatagtactttcagtcacagattaatttaaaaaaatatgtttgttggttagataagttcaggtgatgtttatgtaatgagaaacaaatagcatctttcttgtttggcttacatgaatattttctgtgggaccgattcaagtgtgtgctatgtgccttgtaccatggaagttggctctccatgagcatttagagttctggaagaaaaattcagtttgtgatatcttaattggaactatttgttgtacattgtttccaagccaaatatatgaccgaagatgaataaagaagccaaaattttagctatttcatctacaaa

SEQ ID NO: 10608 - DNA, 579 bp, Canis familiaris
tttgtagactggtgcccccctggcttcaaagtgggcattaattacccgcctccccctgtggtaacccggtggagacctggcccaagtatcacgtcgatgctgtgtgcatgctgaggcaacaccaccagcccttgctgaggcctgggctcgcctggagccacacacagtttgacctgatgtatgcccagcgtgcctttgttcactggtatgtgggtgagggcactggaggaaggagagttttctgaggcccgctgaggacactggctgcccctggagaaggattatgaggaggttggtgtggattctgttgaaggagagggtgaagaagaaggagagggatactaaataccacttcctttcagccctgcagcatgtcacactcagacctttagctttcaatgttagctgacaggcattaaagctttctgattagattgtcttcagttttaactgtgatcatgttttttccatgtgtacctgtcacttattccatcatgtttccaagtaaaggctttaagaaagaaaaaaaaaaaaaaaaaaaaaaaaaaaaaaaaaaaaaaaaaaaaaaaaaaaaaaaaa

SEQ ID NO: 10609 - DNA, 637 bp, Canis familiaris
ccttcacaagttctggttctttagtgctgcatactattttgggaactggcctttcttggggtattcttgattggattaattgtatcctgttgtaaagggaagaaatctgtcattgaaggagttgatgaagatgattcagacataagtgatgatgagccctctgtctattctgtttgacggcccctctcttaggggttttataaggctgattgaatgtctattatgcatttttaaagtgttaaactaacattaggataaactgactagctttcatcaaaaatgggagcatggctattaaaaaaactatattttttatgttatccgaagtaacattattgtatcatagattaacatttaaaattgctataataattctatgtaaatataaaaccatggactttgtgagagaatgttttgtggaaattttctttctctagtgtataatagtgttgaattgattaaaaatcttccagaattaatattcccttttgtcactttttaaaaacataataaatcagttgtatctgtgcctttgggtctctagagtaatgtggaattccaaagtgtctatatctgattgtctaaaaataatacaagatagccgataaataaatgttactcctctatgcaaaaaaaa

SEQ ID NO: 10610 - DNA, 608 bp, Canis familiaris
gtttaggaataaacaaccgggttcattgtttctgggcctatgtccagattcctttcttgtctcaatgggctctgcttggccactcagtgtcactgaggtcatccccaggactttaagggtaaagtattactgattcccatggaagagaggtacagaacagttggcaggcacagatgtgggttttaggagaaactttgccctgccttaaagcccttctgttaaagtaactcttggggccactaattgtatagtttctggaatgagagtgacatacgtggtaatactgggacccacgttctgaaagcttgaaacttggggtcttcttttcaaatgagtgatttcatgattgaagagcagtgagcctcattcgaggaaatacagcattttggacagaagcttctttgaaaggcaggtcctttagcgccacaaatgaaatgccggtggtcaacatccagaccctacacgtgtttcatttgtttgttgtggtttttgaaatcctgatttgtaggtaaacctggtgggaggaagaagtaaatctacggactttcagaactcagcattgaaaataaaactcatttctaaaaaggaaaaaaaaaaaaaaaaaaaaa

SEQ ID NO: 10611 - DNA, 606 bp, Canis familiaris
ttcaggttttccagctaacttcggtgtgataaatattttatcaggagctgctccaaggaaaggatatcgattctttgagttggaaacacgattttcaacatgtaagatggggtataaaattttgctaaaggtaattgaatttattcttcaagaaaaaaaaggctttctgttattgttgcacaaagtctaaattactattggttgaaacacagcagcagtggagttgagtccaggcatgaagattaaatccactgtagatgtaacggttgcatgtttcagccttccaccaccttgcactgtgggcagcactgtatctgcgcattgtctgaaagcctcctgtgtatactgcagctaaatgattgtccggtagccttcgcatttaacaaactagcatgaggctttttatatctaaatgctacgtgatagacaatttcagctagccacatattgtatgcgtgagattcataaagacttttcaatcattcatttccatttatcaactgaaattttgtttagtatgtgaatttttttttgaaatgtatagtggtaggatgttgcactggtggcattcatcatggagcataataaaattaatttgaccccaaa

SEQ ID NO: 10612 - DNA, 585 bp, Canis familiaris
catgttaccgatgatttcctgtgttggggacttgtcaatgtttactctttttatttaccaaattctggcctaggcatgacagtgggcaccatcccccagccttggatgggcccagcacctgagtatatgtgttagaaaaggatatatatatatatatatatatatatatatatatatatatatatatatatatataattacatatatatatattaaaatatatgtaatttggggggccctgttccttgcacattttacagttacctcatttttcccatgtatgtatttgagaaaatgctaatatatagagaaaaaaatggttcttaaagcttaaatgtgtggtttttttccattccattggattcacattggtttgtagcatttaacataactagtatgttgtattatatatatgtgtatactgattgaaatttttaacagatttgtactttttttaaaatgaaagttgctagttctgcttgaccaagtagtgcaatcattattttttttaatattgttgctgatttcagagggatattcactaataaatgtatgatgtatatcaaaaaaaaaaaaaaaaaaaaa

SEQ ID NO: 10613 - DNA, 645 bp, Canis familiaris
aactgcaggccctccaggtgctcgacctcagccacaacgagctatcctttgtgccccctgacctgcctgaggcgctggaggagctgcacctgcagggcaaccgcatcggccacgtgggctctgaagccttcctcagcacaccccgcctacgtgccctcttcctcagggcaaataggcttcacatgaccagcattgcacctgaggccttcctgggcctcctgcacctgcgtgtggtggatacagcggggaaccctgaacaggtcctggtccggctgccacccaccactccacgtcagccacgggcagggggcccctgagccccagaggaacctagcagtgcagcccagacttctggggttctgctgggccgtggactgaagagacagtgcccacctggggcctcgaccgggctctctcaggccttgagggctgggccgcctgacccgtggcggccaggaacctggggcaagagcaccgcctccacacacagggcgtcctgggagaggctgaagtgcacagcttgcacaccaggcacacagacaacgccaaccctgccgcatacatgccctgctccccctacaggtggagacagcaacaataaagcctaactctttcaagtgctcaaaaaaaaaaaaaaaaaaaaaa

SEQ ID NO: 10614 - DNA, 522 bp, Canis familiaris
  misc_feature (1)..(1): n comprises a, c, g, or t, or includes no nucleotide
naaagaaaaggagtagaatattagggaagtaaatggaaacaatggactgtacatttaggaagtttatcactggagaaattattagtttattactgagtgatagtatatagctagaagagagtggtttcaagtgaacatatgttttcaacataggaaaggattatttgaaagaaagaagggaagaatatagtgactgggggcatcaaagctgttgaagaaacatgatgttcattggagaaattattttttgagagaaggcccaactttttctgagtcagaaaaggaatgttggagatataaaagtagagttgtgttaaagatctggctagagagggatccctgggtggcgcagcggtttggcgcctgcctttggcccagggcgcgatcctggagacccgggatcgaatcccacatcgggctcccggtgcatggagcctgcttctccctctgcctgtctctgcgcctcctttctctctctctctgtgactatcataaataaataaaatttatttaaaaaaaaaa

SEQ ID NO: 10615 - DNA, 603 bp, Canis familiaris
ggctgaatcgggagactataaggccacccgagaagatcgccttctccgccatgaggaccatcaacatccccctggcggcgggaccagaccatccgcttcgaccacatagtcaccaacgagaaccgcaactacgaaccccgcagcggcaagttcacctgcaacgtgcccggcatttactacttcgcctaccacgccagctccagagggaacctgtgcgtgaacgtcatgcggggccgggagcgcatgcagaaggtggtcaccttctgcgactacgtccagaacaccttccaggtcaccacgggcagtgtggtcctcaagctgagccagggggagaacgtctacctgcaggccacagacaagaactccctgctgggcatggaaggtgccaatagcatcttctccggcttcctgctcttcccggatgcagaggcctgagctgtggggctgaatcccttcctcccccacccccccagcaatgctcactttacccccaacaccacccacacccggcccaagcacacagtagggctccacagatgttgctgagtgaatgagtaaataaactcttcaaggcccaaggaaaaaaaaaaaaaaaaaaaaaaa

SEQ ID NO: 10616 - DNA, 632 bp, Canis familiaris
  misc_feature (1)..(1): n comprises a, c, g, or t, or includes no nucleotide
ncagcctccagcttcttacgtggttatgtggaaacagatggacagacatactgtcagcgaatcccttcagggccgtagctgaacccggcattcagctcaaggctgtgaagtcctccacaggccccggggagcagcttgcggaatgcactctggcacacaggggacacagcatcacaggtgcggctgtctgtggaaggacccccgcaacgtgggttggaaggtacaagacatcctaccgctggttcctgcagcatcggccccaagtgggctacatcagagtgcggttctacgagggtcctgtagctggtggtccgacagcaacgtggtcctggacacaaccatgcggggtgccgcctgggggtcttttgcttctcccaagagaacatcatctgggcccatctgcgctaccggtgcaatgacaccataccagaggactacgagactcagaggcttctcgcaggcctagggatgggggtggggacccattgctggaagatggcaccatcagtggctaccctcactgcaacaaacagggagcttggcacccggctctcaagaggtagctgccctagaggggctcagaaaggacaacataaagtgtgtgtggtggaaaaataaaataaaaaacgaaa

SEQ ID NO: 10617 - DNA, 677 bp, Canis familiaris
agggaatagccgccatctatctcgttcctgcttttcttcgaagttttctctgcatcagcttctgtcttaaattcatataaacaatcccttactctttccatcgttgctgactaatctgatctccacagcgtcttcagatacttcttttaattcatcctgagtaactttgtaaggcagattttttgccagaagtgttcttgcatctcgatctttcttactgtcttttccctttggtttttctaatttaatttcattgccaaagacttttaaaccagtgagttccaaagctttttccaggtcttcagcagattcaaaatccacatagccaaacttcctagacacaccaattctgacatctacaacagcaagatcatttttagcgaaaaggtcactgatgcccgtttttaattcaggagcagatttgctgaagttcaggtttccaacaaaaagattgaatgacgtagttggttctgtagcttctactttctgtttcttggcttcaggagctgctttctgtttggccatttccttctttcgttttccaggtgcttctttaacaggctcttcctcttcttcttcctcctcctcctcatcttcctcctcaacatcatcctcgtcctcctcctcctcgtcgtcatcctcctcatcctcatcatcctcctcttcatcttcatctt

SEQ ID NO: 10618 - DNA, 542 bp, Canis familiaris
cggtttgcttggatggttcgggactccctgtggctgtgagcatgctaaccggtgcttgtgacggcctccgttctcaggacctgggggcccccccagtcggggaggggtgtcttttggggcctgtgtgcttcatgggctaggaccttctgtgcctgactctgtccgccgtaagcaggcccatccaggaatctcacagcatcagctctgtgccacctcccagagggctcctcaccatctagagggctttggtccagggcaccgagagcccccagtctggggcacaccaagggagggtgaagcgtgccgggcaccccaggggaggggtggcacctggggctcttggccctcccacccggagcctgtgacctgttaggcagccgggacccttatttaaaactcacctcccgatcgcccctaaacaagcagaagagaagagaaaggacactgtgtattttgtatttaaaagtaattaattaattatttaaagagcggaaaacaaacgaaaaagataaagagagaaatgccaaaaaaaaaaaaaaaaa

SEQ ID NO: 10619 - DNA, 722 bp, Canis familiaris
  misc_feature (135)..(135): n comprises a, c, g, or t, or includes no nucleotide
gggtaatacccctggggtttgtatgccaaggacaccccgttacaggaacgagagccatttcagagtgggtgtctttgttgtccgatttttcaccctaaatatgctagcaaatcccaatcattgtcctcctgtgtntgggacaaagttggtcaaaggtatggaacccttgggcaaacctgcaaagtttgaagaccaatcacatcggccacacgggctacttgaaccacccgtgacctgtctctccggatggattctcttctgtgctttctggagggaaggattggccaaacgccatcgcatgttcgggatcgtctccattgaaatggcagagccaccatcctctattatcacactatgattgagtggagacaatcatcaactgacccctcactgactgtcatggctcgctccattccagactgactgcgtgtatatgctgcccaccgggggccccgcgtactcgagtatgtggggatctttggagagcacgagtaactcattgatagtatgaattaaaccaagaagttatcagtaccagccagccaaggccagagccacccccagtgtacctctctggcctggtctgctgatggccagactctgtttgctggctacaccgacaacctggtgcgtgtgtggcaggtgaccatcggcacccgctagaaatgatggcagaactttaggaataaaacattggttttctgaaaaaaaaaaaaaaaaaa

SEQ ID NO: 10620 - DNA, 569 bp, Canis familiaris
ttgggccctttgtacccatctcctgcctggcgccctacttctgtgatcttggggggtttctgggccgtcttatccggccttttatttcctctgttaccccgttgtgttgcctctactcacacctcagtcctcgtagcctccgggtatctatgtacttgagcccatcatagttttatagtaggttatcgctcacatatcttcgacgccttattcatgaccatctccttaggcgtatatgtttacgctatttacaggcctccgaatactatgagacatcttttacaatctccgatggggtgtacggatctaccttttttatagccagctggatttcacggattacacgtaattattggctctacattcctcatcgtgtgcttcctccgacagctatactaccacttcacatcaaaccaccccttcggatttgaagccgctgcatgatattgacactttgttgatgtagtctggctattcttgtatgtatctatttattgatgaggatcctaaaaaaaaaaaaaaaaaaaaaaaaaaaaaaaaaaaaaaaaaaaaaaaaaaaaataaaaaaa

SEQ ID NO: 10621 - DNA, 490 bp, Canis familiaris
  misc_feature (1)..(1): n comprises a, c, g, or t, or includes no nucleotide
natctgttccggcctggacccactagccatgaatatgaattcattcgagtatccatcacgctagacaagctaactcgatgcgccccttccgatcgacattctgacaggaggatcacgccgtggtacgttccttggaggataacgatagtaagtagtactgccaggcatgcctccttgttccctcactatttctttagacacagaatacgcatataatatatattatacactctctctcaccactatttcatattctctcggcgacattcccacaacccactcataccagaactctactctattaacttcactataaaaaccctcttattaaccatctgcttcctatgaattcgagcatcataccctcgattccgctacgatcaattaatacacttattatgaaaaaattttctacccttaactttagccctatgcatatgacatgttgccttacccattatcaccgcaagtatcccaccccaaacataaa

SEQ ID NO: 10622 - DNA, 749 bp, Canis familiaris
  misc_feature (287)..(287): n comprises a, c, g, or t, or includes no nucleotide
tgacatggacttggattccaggaccctgggatcacgctgctgaggccaaagccagaccgttcaaccgccgtgagccaacccgaggtgtccgcctactcttggaatttttaagatagccatgtatagctttggttctcaaaggatgtcttgaaagttgatcacggagacttgctgattcttggctcgtgactggagtaaaaggggaccggaatttatccttcctaccgtgaaacagatgaagaaaaactgaacgaaatgtatggaaaatacgattcttgaagacaccnggatatcgaggaaacacaaggtctagtatttccccgaataggatgagaatacttaccacggttgtagccccttatgttgtcgttcgaggaatttctcaacgagctattggtaaatatggaaaggagaaaatcccacggcacgaaggaagttctaacctggaattaacaagagaaccagctgggaaatgtaaaggaagggccaagttaaggtaagagtttctcagggccagaaagaaagcaagctgtacagagagaacactctggaaatctgcagcggatctcttccagtcttgagctgatcactgattggtgtatacatatgaggaaactatctcagaccagagaaaggaaatattccttgaagctcataggggactagcaatagtgcagcaaatatttagagctaataccacagagataaaataggatcataaataagtacacatccagaagaagtaaaaa

SEQ ID NO: 10623 - DNA, 605 bp, Canis familiaris
aacacggacaagaagtcctacgagcccctggaggaccccggagtgaaaagcgtcaccaagatctacaactactacaagaagtttgactacaagaccatcgtcatgggcgcctccttccgcaacacgggcgagatcaaagcgctggcaggctgcgactttctcaccatctcgcccaagctgctgggggagctgctcaaggaccacagccagctgacccccgtgctgtcggccaaggcggcccaggccagcgccctggagaagattcacctggatgaaaaggccttccgctggctgcacaacgaggaccagatggccgtggagaaactgtcggatggcatccgcaagtttgcggccgacgccgtgaagctcgagcgcatgctgatggaccgcatgttcagtgcagagaacggaaaatagcgccgtggccgagcgggactgcggacctgtgtggaattggggctgcgcgcacgcgccttgtgagaattctgcattttctaccatcggggcagggatggatcagattctatgtgaaattttgctaactgattaaagcagtcacttttcttgtgctaaaaaaaaaaaaaaaaaaaaaaaaaaaaaaaaaa

SEQ ID NO: 10624 - DNA, 461 bp, Canis familiaris
  misc_feature (229)..(229): n comprises a, c, g, or t, or includes no nucleotide
gtggaaggcccttgtccacggttcccctggcctccaaccacgggccattccaagcccttgccggtcctttggcctcccctccagtacccctttccccgccctcactgcctcttaagcctaccccaaagaaaatgtgtcactcaatttggacctattcaaccagtaaatgaatgccatctttactaaacaccttctccgagcccccagcccctcactgatcttgctttcnctggtctcacgcagttgtggtcaatatcgtggtaatcgctaattgtactgattgtataagtgtgcattagttgtgtctccccagctagattgtaagctcctggaggacagggaccacctctacaaaaaataaaaaaccagtacctcccccatctcgcacagtgttccaagaccctgcggggtggtggaggtgcaccaaaaaaaaaaaaaaaaaaaaaaaaaaaaaaaaaaaa

SEQ ID NO: 10625 - DNA, 625 bp, Canis familiaris
tggcgttggacatgtcagtcatgatccacccggtactgtcagtgccatgcctatttaagtagcattcccatggcatatgaggagctagtttcctatgggttctggcccagcccagactggacggtacagtccagctgtgcttgcattacagacagattctctcttactacttacttgatggcacgcacagtattctgtgaatgtacggcggcagcagcatgggttggtttcttatgatctgctgaggagcatgcattagttgagaggaggagtcgtaatgagagccacctctcccatatcacccctctcctgactcacgcatatctttcccccttatcattatccccaaaccagaatgttacatcgtgttacaaccgtgtgaacttaacagtgatacctctttatcgcctaaagttttactttaaattacattctattctgcattcattctggttggctcaggtcatgatctcagggtcctgggatcgagccccatgtcaggccctgtgctcccagcagggagcagggagttagcttgaggtttgaggttttctctctcctcctccctctactcctccccccacttcaccccagttcacacattcagtgctctctcaaaaaaaaa

SEQ ID NO: 10626 - DNA, 665 bp, Canis familiaris
  misc_feature (317)..(317): n comprises a, c, g, or t, or includes no nucleotide
ttaccttcctgcttttgcccagaagctgtctgtccaacaggtatgtccatggcaacaatattacattaatcgaatcttttctgaatttatgtatttaatattagaatttgttggactttactagatatatttttaaatttatatttttgtccatttttttcaagattgaaaaatttcgtatcagagcaaaatatacacagcaacaacgaactgcttaacaagtgtcccaaaaataacattttctcacctataaagatacacagatttagactcttattgacattgttgttttaaaaagaagttgctaaggagaccantctaaatattagccttagttaactttttaatgtcaaaattaacattttaagacatccagttataaaaagtaacactttgtttatccactactatgttcttgtcaaaacggtttccacagtcttatcacatttgagccttaacaggtagagaaaggtactctataaacacatttgagaaataaaaatatatataaagtaccaagaggctcagtcacttagcctaagatgtctcaaaactttatgagagagccaggaccagaacccatgcttcccaactctgttatacgttatgttgcttccacatcagtgaggaagggtttctccagaattacccttggcataactggt

SEQ ID NO: 10627 - DNA, 618 bp, Canis familiaris
ggacccatgaacattcccttggtatccagacccctagcgtaccagtgctcaggactatggagtcttaaaaggctgatgaaggcatctcgttcaggggcctctttatcattgatgataaaggtatccttcggcagatcactgtaaacgaccttcctgttggtcgctctgtggatgagacactgcgactggttcaggccttccagtttactgacaagcatggggaagtgtgcccagctggctggaagcctggcacgtgataccatcaagcctgatgtccagaagagccaagagatatttctcttaagccgaagtgagcgcctctgcccttttaggtccgggccgtaatgggggaaccctggaaaccggattcctttttttggaactaattggtccaatgcttaattaaccaagactttagactctgcagatgtggtatgtggtatgggacaagaccgccctttcctgcaggggttggggaggccagcctttcttcctctggagagaatggtctgaggtgtgctatggggcaggccaactgatatgtacagtagtagcaaggcatcacttttgatcttttgttgtttctattaaacttgaactgagaccttaaaaaaaaaa

SEQ ID NO: 10628 - DNA, 728 bp, Canis familiaris
accaggagcgcttgacatcaagtggccctggataggagaccagcctaccgcaagctcctggagggcgaggagaaaggctgccgactatcccccaagccccacctcgcagcgcagccgtggccgcgcctccctcccactcatcacagacgcagggcacgggcagcatcaccaagaagcgcaaactggagtcttccgagagtcgcagcagcagcttctcccagcacgctcgtaccagcgggcgcgtggctgtggaggaggtggatgaggagggcaagtttgtgcggctgcggaacaagtccagtgaggaccagtccatgggcaattggcagatcaagcgccagaatggagatgaccccttgctgacctatcgcttcccaccaaagttcaccctgaaggctgggcaggtggtgacgatctgggctgcaggagctggggccacccatagtccccctactgacttggtatggaaggcgcagaacacttggggctgcggaaacagcctgcgcacggctctcatcaactccactggggaagaggtggccatgcgcaagctggtgcgctccgtgaccgtggtcgaggacgatgaggatgaggatggagatgacctgctccatcaccaccatgtgagtggcagccgccgctgaggccgagcccacactggggcacccagccaggcctccccttgccaaaaatcttttcattaaagaatgttttggaacttcaaaaaa

SEQ ID NO: 10629 - DNA, 639 bp, Canis familiaris
cagcctggccgccccacagggcgcctgcacgctcatccccgtgctggtaccaacgtgtaactccgttccgcaggcttccgccccagatcggggatcgctgaagccacaccccgccttcacagagctgctggccgccgccgcagagcacacgctgatcttcgaggcggccgaggtgcccatgctgtgcccgccgctgccctggacgtcgccgcacacgggcgccttcctgctcagccccaccaagctcatgcgctcgttggagggcaccatgcagcaccagcgcctgctggacagctgcccgcccgccgagctgcacggcgcgctggacgccctcacgcagctgggcaactgcgcctggcgcgttaacggccgcgtgctggacctggtcctggagctcttcgccgccaagggctgcccccgcctgggcgtgccggccccgccctctgaggcgccccggccgccagagggccgcctgccccccgacgcttcgcccgcgcagaaggccgaggtgcggcgggagctggcccgctgcctgaaggtggcccgggagatgcacagcctgcgctccgacgcgctctaccgcctgtcgctggcccagcacctgcggcaccgcgtcttctggctgccgcacaacatgga

SEQ ID NO: 10630 - DNA, 564 bp, Canis familiaris
tgcggtcccggttgcagctgcttaactctcctgttgttttgtggacgttgaaattcaacctcatataatgttcacatcacaaaattgtcacgttatataatccctcccaccccccgtacaactgaaataatacgagacccattcattctttggctttgcagaccatgccaaaatgggcagcagcgcatttgacttgagaacctagtttgtcccagcctgccccagatgacattcgatggagtcaaacgtatcccatttttcctttagtggaatgtggtgattaacagaggggcagtccagtgggaccacttgcccttgggacatgaatgacctttttgttgacttagtttcctcatatgaaaaataagggaattttttttctttgtacctcgcctgcaggagatgaactaagaaactggatgtagaacatgtaacatgtagtccgtagcttttagctcttgttatttctttaattactgatgaggtcacacagttttttcatgtgctcattggccattttaatattttacttgttcttttaggacttccacagtcaaaaaaaaa

SEQ ID NO: 10631 - DNA, 519 bp, Canis familiaris
agcccacccgcacctgccagcctgccctgcacagcctcggccccgtggtgcctccttatagccccccttcctgtggccccgatcatctgtggctccaggctttctgtagatgtgcttgaacgggccccaatccccgaggttcatgttgtgggctggccaccctccatgcatggagtcccatcaggactgtgcaggtcacttttgagaatctgactgcatcaaggcgctgcagcctcaccatatctgtggggagtacgcagttcctgccgtttccttgaagaccacagaagtgatcatagtattagatgagctctgctgagagctcttggccggcctctggggggtgcctgccccttcccggggtgctggggaggggccgccacaatgtttagtctccgaaaacaccaacgcttgtgacgagaatctcattaatgtactttaaattacagttgcttttttctcctaaaaaaaaaaaaaaaaaaaaaaaaaaaaaaaaaaaaaaaaaaaaaaaaaaaaaaa

SEQ ID NO: 10632 - DNA, 647 bp, Canis familiaris
aaggtccctccaccgatgggctctgtcttgagttgtccactggttctttgtggtggtttcgtggtcttctcaccgggtacctgttgtgtgttttctctctacccctgactctcaacctgcctccaagggaactttcgtcttcacctctgttctggggtttgaggatatcatggccctggccgtatgtctcaagtacctatagccggatctgagtgaggcttttgagggaccttttcttgagaaacagttaaaaatggaacgaaggtttgctgcggttgacttggtgatgttattttactattgttcctatcacttcctgatttctcagccacacttgttgaatctttgacctcaaggtaagtgagatattgctacaaatgatgtcttttgaattagaagccgttgtctcccccattgtgctcatgtttttatatgtatagttgtataatatgaaacgtaagtaaattaaattcaaacgaacatttctcaggccacatttttgtgcacggtaaagtattttttattgcagtgttattgtgatttggatctatagattagttgtatagctgtaaaattcaagcctgtcgacattctgaaataaaggtgttatgactaataaaaaaaaaaaaaaaaaaaaaaaaaaaaaa

SEQ ID NO: 10633 - DNA, 701 bp, Canis familiaris
tattttggtggtgttactaaaacgcgataatcagattcgggtagacttcttacgtgcgcaccaacggtccgccaattcgaaaaagatgatggaatcatgacccgagaggtgcaaacaaatgacttgaaagaagtggtcaataaactgagtccagaccagcatcggcggagatatagtagaaagctgtgtcagtcgtattatatcacaccccaccgatgattgtttgttagaagaagtgtaaataattctagaaggacccccgagtttgatagtggggaacactcatggagctctacatggtgaagaggatagatagtttcgtggaaaagcctcaccggggagatgagcaccggtgtctaaagttgaacgagctgatggatatgaacccaccagtccaagaatctgtttaaaattcagacatttaatggtgacccataaaaacatatttgtgatgtttaatttcttatcattctttttaaataatcaggctcggtgaagcagatgttttgaactgaccgtgtgaacttttcagaactattgtatggatcttatcccttgctcttggctactaaatagctgccaaagggtagtgatctattttaagctgtagtgatctggatggaagtgttctagatggttaataaaaggaaacttttttaacgtgtaaaaaaaaaaaaaaaaaaaaaaaaaaaaaaaaaaaa

SEQ ID NO: 10634 - DNA, 282 bp, Canis familiaris
ggatttggggaaattaacgcatgttgtcttgagatttttgtagtttttttttttaatatttgcttcaagctgcttctggcaatggtaaattattacgtatcattaatgttttcccaacccaaggattgttcacatttttcctatacaatatctatggagtgtgtctttcaaagagaggaaaatacagaaatgtgaaagcgggaaaagctgaatgtgatgtgcacattttcatcccatacaatgtatttgttttaataaatggaattttcaaattcaaaaaaa

SEQ ID NO: 10635 - DNA, 599 bp, Canis familiaris
agaaagcttatgtaagtgcagcgatgaggaaatattgaaaatcagagtcaggcaacgcttggataagtagacaccaagcatccttgtctttaaagtcacttaaaataaggtgatagaaccttccagatcacacaattgatagaacatttacacttttctcctttacttaataactaatcacagttcagttttgttttgtttttttttaaagctcatcgggtacagaattcactcctttgtttctattattttgtcttgtcctagatatgaggggctatgctcgcaaattatgtctttaccacatgccaaagagaaagaaatgaagggaaacaagaaaatttccctattctgagtttaaagtgcctattcatatattaaattgcatttgccccaatttgaggggtttggatttcaatttgcctttgacatttcttttggaaaccttttaaggatattgtcctcccccatcccatgaattgtgtagcgctttttatctcatttatttttaattgcacactaaatctgtcaatacccatatttggagaataagatacctgggttaaatacatgactatttaaaaccttaagctaaaaaaaaa

SEQ ID NO: 10636 - DNA, 552 bp, Canis familiaris
  misc_feature (197)..(197): n comprises a, c, g, or t, or includes no nucleotide
caggcgctggaccgccaccacagctacacaactgcttaagctggcccacaacgtacagaccaggagacccacgcaacgagaagaaacacagactcttgtcccgcgccgagagagagaaactgtcccgcggcacagagggatatctcccacatctagagagcccgcgctcgtgctcctctgcagactctctccgtgtntgttctctcctcgcctccccctgttgtctgtaagatgggggtcccttactgcataatccaaggggaaggccaggctggggcgtctggtccaccaggaagacctgcaccactgtcgccttcacacaggttaactcggaagacaagggagctctggctaagctggtagaagccatccggaccaattacaatgacagatacgatgagatccgccgccactggggaggcaatgtcctgggtccgaagtcagtggctcgcatcgccagctggaaaaagcaaggctaaagaactggccaccagctgggctaagtggacgctgttgaattttctgtacataaaagtaataaaaggttctctt

SEQ ID NO: 10637 - DNA, 661 bp, Canis familiaris
tgtgcccgacaggtcatgtttggttagaaggtggataatctaacaagaattctacagattccaggtattatggacctattccatatggactaataagaggacgtatctgttttcaagatttggcctctgagtgattttggatttctacgtgacagtcctaatggccacagattttctgatgattagcatttattcttttgactattctctcctattcaagtgaatttattattgccactgaaaccatgtacttactaataaactatttgctatttagttttagtcatttttaattgttaaatgtaaagaataagcgacacaaaccacaagctctattagttcccaatagatggataaaaatgtaatcccaaataagttatctatattttgtgatataaaaagatttttaaggaaaaaacctggatgacaacctcacttttgaatttttggttttatagctatgagtcatcttttcttgaatatgccttgtacttttgctacatttacaagtcagagtagtaaccagtcttgtaagtacaaaaccatggtaaataccatgagttcgacctaataaaaagctgtttagtcacatgtttggttcactcatttgaaattaagtaataaagttccagtgatccccaaaaaaaaaaaaaaaaaaaaa

SEQ ID NO: 10638 - DNA, 716 bp, Canis familiaris
  misc_feature (387)..(387): n comprises a, c, g, or t, or includes no nucleotide
  misc_feature (459)..(459): n comprises a, c, g, or t, or includes no nucleotide
gacatcatcaacatgctttctgtacatcctcaccatcatcggccgcgccaaggagtagctcacgcttggggccccgcttggttgccctgtctggcctggaccctgcccctggtgtgccagtgccatcgtacctccccgctctcatccctgggcacagcctggtactgagggcccctctccgaaccctcctgtgtgtacactgcagatacttctgttcggaccccgccgtggccagcatggcccccttcttcgccctcacggccctggcccaagggcaccgtggggccccgcgtttcccactagccaacccccactgcgccacatccacctcgttgcactgaggcccctcgtttcgccacgcgccacaccctatgggttctcgggggncacaacacaccacggttccccacaggggagagagaggggcccgaggaggccacaagaaggttgaaggggttncaaccggtgttcccccttcccgttcccggcccccccccagcctggcatagagtacccagtccccccctcccctcccctgccctggagtgctgccctcattcctgtgctgagccccgagggcagagaggatgagcctatttcaggggaggaggaggaggccttcctcttgtcttgctgtctaaaattccaataaatgggaccttgtgctctacccaaaaaaaaaaaaaaaaaaaaaaaaaaaaaaaaaaaaaaaaaaa

SEQ ID NO: 10639 - DNA, 617 bp, Canis familiaris
  misc_feature (225)..(226): n comprises a, c, g, or t, or includes no nucleotide
  misc_feature (397)..(397): n comprises a, c, g, or t, or includes no nucleotide
acaagaccgaaagttcggcgcaaggagcccaagagccaggacatctaccctgagactgtttggttaagctgtacaggtttctggccagacgtaccaactctacctttaaccaagcttgtgttgaagaggttgttcatgagtcgcaccaaccggccacctctgtcccgtttcccggatgatccggaagatgaaactgcctgtccgggaaaaccatacacgctgtgnnttgtaggaaccatatacggatgtatgtgcgtgtccacggaggtgcccacagctgaaggtgtgtgcactgcgcgtgagtaaccgtgcccggaaccgcatcctccaagctggaggccagatcctcaacctttcggatccaaggttggcccttgaatccccttaaggtttgtgngcaccgtcttgctctctggtccacgcaagggccgagaggtgtacagacactttggcaaggccccaggaaccccacacagccacaccaaaccctacgtgagatccaagggccggaagttcgagcgtgccagaggccgcagggccagccgaggctacaaaaactaaccccagatcctgccttgttattaaaaagattttgaatgccaaaaaaaaaaaaaaaa

SEQ ID NO: 10640 - DNA, 591 bp, Canis familiaris
caagctgcacaggatggcagcagtggggcaagctgtccgaggagatcctttgccccacttccacccctgctctttaccatgctcgtttgatcctccttgcagggccacaagtgtgccgtcctactccgtgcccccagtcttggcccgcctgacacctgtctggctatgcgaggttcatggggggacctggggggggctcggtggcaagggagcgacggccctggggagtcgaggggccaggaatgcgcgcccacccactgtacccttccttcctaggatgcataacctacctttcttgttttgtttaattttttctccccatagagtagctctttgtacataaaaatacttgaaaaattaattgtatgatgtatgagaggacagagtcccctagttttgtatctcgtgtatgactgccatgagttccaccagaaagccgctctattttggtctctgtgacattttaaatgcgtgacagaagtgagccaaataaagtgagaaatatatatatgagataatatagattgtattgaaatttccaaaaaaaaaaaaaaaaaaaaaaaaaaaaaaaaaaaaaaaaaaaaaaaaaaa

SEQ ID NO: 10641 - DNA, 556 bp, Canis familiaris
gacataggcgagattcaagtcatataagtcctatttttgagacgtcagcaccggacttttcacggatgcacatttgtcctatgtagaccagttctcctctcaggttcttcagttaaggtccagaactatggtgttcctcgttgcccccagtatatttttgctttgttagtgtatttcttgactgttttcatatttctgttcccttctgtgaaatggttttttttaaaaacttgggaccaccaaagttgtaaagatgtatgtttttacctgaccagttataccccaggtagactgtccacgttgagttgagaagagtgaattgatagcttgtatttgtttttaaaattaaattaatcctggataagagttgcttttttttttttttttaggagttagtccttgaccactagtttggtaccatctctattttgggtgacctgtttcaccagcaggcctgttactctccatgactaactgtgtaagtgcttataatggaataaattgcttttctacgtaaaaaaaaaaaaaaaaaaaaaaaaaaaaaaaaaaaaaaaaa

SEQ ID NO: 10642 - DNA, 460 bp, Canis familiaris
ctcttagcccaagctgcaaacttagaatctcttgggagactatgatgctggttcccaggcccccattcccatagctatggaatctggatctatggggctgaagcctgagcagtggcatgtttgaagagctatctggtaacattgctgtgctgccatggatgggagaaccactgagcaaactttgtgagcgtcagtgttgatacgatttcctgggagagcccctcgttttatgcctgttgtcttggtcccacggcagtgttcatatttgcacggcatttgtcatttgttaaccacgattgtatcattaatagttgtggttaccataagccaggacagggtttagttgagctccactttttatttccagcttctgccaaggattcatctattaggatatgaagtctgtgtgtgatgggggagtgttcaaaataatcattaataaagatgacttacttaacaa

SEQ ID NO: 10643 - DNA, 511 bp, Canis familiaris
ccggggagagtttggccgcgagcgctacgaggacgggaagttccaggagcgggccctgcgtcgcttccaccagctgatggcagatcagaccgtgaactggaagatggtcgacgcttcccaaagcatcgaagccgtccacaaggaaatccacgccctctctgtggacaccatgcaggccgctgcgcagaggccactgggggagctgtggaagtagcgggaggcggacgtccaggcgacgtgctcgcggcacacgcgccgagaccaccagcggcaggtcagggagccgggagccagcgggtgcgctggggacgccgtgcaggcagcgcttcgcagcggtgtccccccgtcctgtctcagcctggagacccaatgaatcacggccttcggggagtttaatgaccacctccaggcagcttcacggagatggcgatcggtcatcattttcctgaatttcttacaggggcgaataaaaattaatttaaaaaggtgaaaaaaaaaaaaaaaaaaaaaa

SEQ ID NO: 10644 - DNA, 499 bp, Canis familiaris
gagtttgaaggttttgagtacatcaacccgttactgctgtccaccgaggagtccgtgtgaggccgtcttctcgtggtcactggacaccgctcctgtgaatgaccccttccatcttatcccttaaccccagcggccaagccatgcccaggctgggcgccaaggctcccaagtgcggcccagggagggatacttgccgccgaccccgtggacgggggcgccaagcgggcgcttctcatagcggaacagtcttgcgtctgggcccgcgcggccagctttgtgctggaggaatttgcttcttgtgcctgcgccgcggacaacccgcggtgaccgtgtccaagggagaaactgccccacgatttcgaaggtgcacactttccacagaaacagaactgacctgctccgccaggagagttagcctgtaatgtcctgaggaataaaatgtgcccatgatgtcgaaaaaaaaaaaaaaaaaaaaaaaaaaaaaaaaaaaaaaaaaaaa

SEQ ID NO: 10645 - DNA, 560 bp, Canis familiaris
tcagaagtatttttctgtgcaggcttcttctgagccttttgccacgtccagcctagcccctagctcctgaacttggggtttgtctggcctcctaccggcattatgtcctcgtaacccagttagaagtgcctgctactcgacacctcaagtcctcctagcctccggagtatctattacttgagcccatcataggtttaatagaaggtaatcgccaacatatacttcaagccttattcattacaatctcccttaggcgtatattttacgctattacagggcctccgaatactatgagacatcttttacaatctccgatggggtgtacggatctaccttttttatagccactggattccacggattacacgtaattattggctctacattcctcatcgtgtgcttcctccgacagctatactaccacttcacatcaaaccaccacttcggatttgaagccgctgcatgatattgacactttgttgatgtagtctggctattcttgtatgtatctatttattgatgaggatcctaaaaaaaaaaaaaaaaaaaaaaaaaaaaaa

SEQ ID NO: 10646 - DNA, 157 bp, Canis familiaris
gctcacgcgggtgagcgtctgcctgcggcccagggcctgaccccagggttcctgcacggaggctgcttctccctctgcctgtgtctctgcctctctctctgtgtgtctctcctgaataaatacataaaatctctaaaagaaaaaaaaaaaaaaaaaa

SEQ ID NO: 10647 - DNA, 639 bp, Canis familiaris
aaatttgctggtggttcagagtgggaacagcttgaggagtttgctgccaagtgccaggctcttggggagcccaggtgatgttgagccagtgctgtgttgtccaggatgtgctgtttgagacactgtcagacaagacgagggtttcagagtgtcctggtgctgagtggggcaagatggggaaccagaccccagctgtgtgtgccaggaggtagagaccctccctcctgggctggccgagcctccagcccctggccctccaggacagaagctgctcatcatccgcagtgcacctgccactgaactgctggacatatagcagcgttgggggaggtgtctgccacactgcagtctgctggcccccccccaacctggccaagcctctgccccagtgggcatctccacagctcccacctcccagatggtacaagtggtacccactggcgctgcacctggaggtatgaccccacagggcctaccctccatccagattgtccagactctgcccgcagtccagctggtgcatacattttgaggagaaccactgggacttaagtgtgccctacacagagaccccaactcgctgggctgggctgggctagagggaggggagctgcaggctgggcttgctaataaagactg

SEQ ID NO: 10648 - DNA, 642 bp, Canis familiaris
tattttggtcaattttgtagtccccacgaattaacagttactagtttctgacttgaataggtaacacctaaggcaaaactttatgggaaaataaagtaggaaaaaatatgtttacttttccccttgctttagtatccttatcctcctagatgaaattgagggttgatattatatatgtccagtttcctttacatactttatgtacttatatatgtgtaaacaagcatattattgaagtctattaggggcaatctacctttggaggttgaacattggatttaaataatattattttggagtcatacatctatgcaatattttattctgtcaaatgctatttccattaaatagtttaactagattgtataaaataactttattgcctaacatgaaattaccaagcttaggcataggggaaatgggctttttagaagccaggaattctaagtatattctgttcttcaaataaatgtcattttcttctttaaatattgaatatgttttatgaacaatatctttctttgcaaactcgaattacatgtgcttggaattaagttttagtttttttcactgcacaataataaagcctgagttctgatcgacatggaaaaaaaaaaaaaaaaaaaaaaaaaaaaaaaaaaa

SEQ ID NO: 10649 - DNA, 657 bp, Canis familiaris
  misc_feature (483)..(483): n comprises a, c, g, or t, or includes no nucleotide
ctgggtcccccattgcacagatgaggaaacctgaggccgggagacaagaaacagaggcccagtagacgttagattactgccccaaaccacacagccaggttgggacagagctggggtgcagatcctggcccgctggcgcccccactgcagcgccccctccagaacctccttctgctctggactctcctgaactgcggtctagggggcagtgctcagggtcccggtgagtggaccccctggggttcctggagtcgctgttccagctcttgtgggcggggcctctctgtgcgtagccggcactgcatctggtttcctggggaggagtcctgctggggagacacccatgagtaccgcctctgccgtctgccggactgtcccctaggagccattcccttccgagacctccaatgtgccctttaccatggccaaccctgttcctgggcaaccccagaggaacttaacccagtggggtgccctttctancggtgcgcccaaccagtgcgacctcaactgcctggccgaggggcacgccttctaccacagcttcggccgcgtcctggacggcaccccctgcagcccgggcgcccaggggctctgcgtggccggccgctgcctcagcgccggctgtgacggtttgctgggctcgacgcccacgaa

SEQ ID NO: 10650 - DNA, 428 bp, Canis familiaris
ccccacctcgggccgggcagcaggctcagctcccctggactctgagctgggccttgtccccgatactgcccatagcaccccccagcgcactactcctcaagggtgtcctgtgggggctccaggctccaccgggtggggtgcatgctctactcccaccgccctcgcaaggagccaggatggactggacataccctcactcaagtatggccttagcccccaccccacccccaaggcagagcccgagggaggcattcccccaacaggtctaaggcccggctggccctatgtactgtgtgggtggtgggtgagtgttggagccccggcctctgcaggtgacaccgagatgacagctgaccaaggttcaaaggccgtgtcattaaaccaattaagtatcctaaaaaaaaaaaaaaaaaaaaaaaaaaaaaaaa

SEQ ID NO: 10651 - DNA, 559 bp, Canis familiaris
tggtggcttcagagtgtgggtgagtaggtggctgctcaacgttctctatgctggtcctgagtggtgggtgcagcgttgcgtgggcatgctgggctagtccatgttagagtgtgcggtagggcagtcatagttgtcagtggtagacttgtccgggacctgtatggagttgcagattggatggaacatcgggtataagtaaatgatgggaaattgtgttcccgtggagagttcaccccgttccgtttaagagaggaggaggagtgcctgataggtgtttaataccacccgttcctagcctcaggcttttgcagatggatgtttggagggtcagtgcagccagagggaggagggggacatcttggaaatttccagttctcttgttcaaacccgaaatagggatgactcttgctgtttgtcagatttgctgcaaattgctcctcacaaagaacatttttttctatctgtaattgtacatacaggttttgtactctaatgtactacagttctgatgtggatggcgattaaaacagatgattttatagcaaaaaaaaggaaaaaa

SEQ ID NO: 10652 - DNA, 561 bp, Canis familiaris
  misc_feature (295)..(295): n comprises a, c, g, or t, or includes no nucleotide
  misc_feature (310)..(310): n comprises a, c, g, or t, or includes no nucleotide
  misc_feature (324)..(324): n comprises a, c, g, or t, or includes no nucleotide
  misc_feature (359)..(359): n comprises a, c, g, or t, or includes no nucleotide
  misc_feature (392)..(392): n comprises a, c, g, or t, or includes no nucleotide
atcccacgccactgagtgcatttactttagctactcctactaataagcatattaatttgtccacaccaggccatcagatcttagataaccgcacaggttatctagaactcaggtgtctcctaatattgttccctgcatgcagccttcattgattttgcagccaaatatacagtaatcattatgtcgcttctggattaaaaatttttcgtgtgttaagttgccttgtaaagagcatgttgagtaaatggggcagcgtggcctttgtggtagttgttaaagcacaaagaaagatgtntggagcactttgaangatagatcttttcnaggaaaacctgtagtaatgttaagttttttggagnaaagaagtgataccacataggagaattgtcgantaatgagagtttcttcaatccagcacggtgtttaaccagtgttattttgccattttgccattaataatgtataaccatctatgagtgatttacaataaatgattatgaatttgttggtaaaaaaaaaaaaaaaaaaaaaaaaaaaaaaaaaaaataaaaaaaaaaaaaa

SEQ ID NO: 10653 - DNA, 663 bp, Canis familiaris
cagctgaatgcaatggctcatcagattcaagagatgtgttcccgcacggttcgcctaccatctcgtgcctggcaggacctcccaggctcgacacgctcgcgtatgaaatgaactaccagaccaacattcttagaaggacgggactgtacaagcaccacctgcctcaccaccagcggtcatgaatgggtagtcatgcacctcccagtctgttcagctacctcctcgtgaagacgccacatgagtagagcagcgaaggaaggagaggaaggcttttctgcacagtgtgcgctgtgctcccatcgacactctctctcctcgcgtgtggagggagcccctgtggatttctacatgtagagtgtgagaggttgagacgcccatggtgaggggggaagactttgagccccgggggacccgcttcttccaagttctccagaccgagaggccagcgccatgctggtccagcgtaaggatgacctcctgcagcaagctcgcaagcgtttcctgaaccgaagttctgaagtcgagtccgcctccgcctctgagagctgcctcacgtcagaaggcacgaactccgaccctgtgaccctgcgtcggaggatgctggctgcggcggccgaacggaggctccagaagcagcagatctcctagcgctcgctcgccgcc

SEQ ID NO: 10654 - DNA, 563 bp, Canis familiaris
  misc_feature (1)..(1): n comprises a, c, g, or t, or includes no nucleotide
ntgcttcagaagcgggaagcacctgctccagctaagactaatgtgcagtgggcgagagcaaggccaaagaattcttgagcggcctgaagccgccagaagcgacaactgtgggaccggactcggccacgaggtccagcagtggtatcagcagttcctctatatcgggtttcgacgaagcgaaatttgaagatgacatcacttactggctgaacagagagtcgaaatgggcacgactactgattactaccacgcgtccactatgacgaggacgccgccatcggtccccagagcccctacagcttcaggcatggagtccagcgtcaactacgatgactagctgaccaaccacccctcggccctcggcgccccggccgcggaggtgacccactgggctgccttgcaccacgtggcttccgctgggctttactccagcagatcttgcctaccccctttctgcagccaggaaggaagagttacacaatatacatgcctttgatatttcatgctagtgcctcacatcgcatttcatttaaaaaatagaaataaaagcagtttgttaaaaa

SEQ ID NO: 10655 - DNA, 642 bp, Canis familiaris
agtcccccagattgcggagaagttcaccaagcttacgacgagctgctgcagtcctaccaggagaagatgttcaacacgtcctccctgctgaagcagctgacgagccgtttagctgggtgtcccacactggctaacctcaatcaaagtgaagacccattctatctccaggtcacgaacggtgggtttctcagactttctgaactcccaaggtttcccgtgggcctttccaacttaaaggttggtttgtgaaagccttcctttggatttctggaccccccattccccgggtgatgatccccagaagcagtctcccaggaacaatcctaaatttatggagactgtggcagagaaggctcttcaggagtatcgccaaaagcaccgagaggaatgagatgtgaacattgcttctccaaatatgggagggctgagttcctttgaccccaagatgagtgctaggcccctagagagagctctgcatgtcaccaagtgaccaggccttgcctcgaggcgctcctgtctcctaacccagctttccttcctctggactccgcactgtaacgcctacgtttgctgatcatgggaagaactcctgtgtgccactaactcaataaaaccgccaaggaatctgaaaaaaaaaaaaaa

SEQ ID NO: 10656 - DNA, 551 bp, Canis familiaris
aagtgcaggagtcgggatactaactagccctccgaagacgggcattagtagtccagaatgcagtaagtcgtgaggatgaggttatttacaatgtaaaggtgacgcatgggccaagtacatggtcatgaggtgtaacaagtacaaagcccatcagtgttggcgatgacgattaaatctcggcccccctggtgaaaatgacccccgttcccacgcctgcctatcggcctgggactctctgcgatgtacatatactagtttaatgcagcggcatcgtcggcagcctttcccccccaaggacttctacacagaaggaaatcgagatgcttcccgcagccgcggacgattctccaggactcttttttaccttgagcacttgcctcctgagacttcatagaacagtggtttactgtcccctcttctcccacctccttgctctctctggctctttctgtcttcctcccacccccacccccccacccctccttagccatcacttctgggaagtaaagaacttgacttagtgccgaaaaaaaaaaaaaaaaaaaaaaaaa

SEQ ID NO: 10657 - DNA, 663 bp, Canis familiaris
cccgtcacagtgcatgacccgtgctggccacgggagcaaggttcaaggcattcgttgccatcggagattacaacggacacgtggttctggcgtcaagtgctccaaggaggtagccactgccaatccgtggggccatcatccatggccaagcgtttccacgtgtccccgtgcgacgaggctaactgggggtaccaagatcggcaagccccacactggtccccaatgcaaggtgactggtcgctgtggttcctgtgctggtgcgttctcatccctgccccccagaggcactggcattgttctcggcccctgtgcccaagaagctactgatgatggctggtattgacgactgctatacttcggccaggggctgcactgccacccctggggaactttgccaaggctacttttgatgcgatctctaagacctacagcgtatctcacccctgatctctggaaagagactgtgttcaccaagtctccctatcaggaattcactgaccatcttgtaaagacccacaccagagtctccgtgcagaggacccaggctccagctgtggccaccacatagttttataccagaaaaataaaagtgaattaaagcttgttaaaaaaaaaaaaaaaaaaaaaaaaaaaaaaaaaaaaaaaaaaaaaaaaaaaaaaaaa

SEQ ID NO: 10658 - DNA, 618 bp, Canis familiaris
ccacgtattgcacttggaattatgaaactagattccctgtgtgcccttactatatagtgggtatgtcttactttagtagctttgagatttcagctgtgctagaggcttttattagaagccctagtgttttttctgtaaagttactttatatatctgtaccagctatgtaccagtagattcttacttataagtcaatccggatatgaaggtttggacatattatcatccttaaagggaattgttataagaccattttagaaagttatatatgttctgtttattatgtatgaccaatgagagattaatatattttttaatggaaagtttatagcatctcttaataggtacggccatccttcctgtgtggagtgtttttgtaatatacttttacctgtataagctgtaatatcattttatagaaatgcattatatagtccaattgtttaatgttggaaagtgtatgaagtataaattatctgaatattagatgctctgagaaattgaatgtactttatttaaaagattttatgtttttactatctaaacatcattaaagttttccaaattatttaaaaaaaaaaaaaaaaaaaaaaaaaaaaaaaaaaaaaaacaaaaaaa

SEQ ID NO: 10659 - DNA, 176 bp, Canis familiaris
cctgccttcccagacttgtgtggccacgttggaaatgtctggtttgtgttcatctctccctcgtttctggagcaggggctcagaccccaccacatctcctatgctctgcatccatgcctcttttggacattaaaggtcgaatgatgcaaaaaaaaaaaaaaaaaaaaaaaaaaaaa

SEQ ID NO: 10660 - DNA, 665 bp, Canis familiaris
cggggccttcagcccaccttggccccagggacaggggcttgggggcgcccaagctagcctttcactcgctctatctccccgcttctgaggcggctccagggtgtgagcacggtgctggccgtcccccccacaccccccagcattgccgcctgcaggaccacctgggcccggctgttcgcagcatgcagaagccgccacccaccatctagtacaatcaggagtctgcagagagaagcccggagaatgaggcatactccacgcgcaccctcgcgtgagaagcgtgctccgcgaaagagccgcgccagagagctgcacgagacccgcggccttcagaggcacaaccacagggggcacaacagcggggcacaccgagagccccgggcccccgggcccactggggagcccaccaccattcgggcggccaaaacccggagggctggaggcaagaatgaacattctccccgtgtctcacctgcagaggaaagctgcgaacccgtgtcccgccgagggcacgtcccccacccaggctgtgctggccctgcaggtgccctgcccctccctccccttcaccagcctgcagcttctcttattccgacccagtgcctgacacacagatgcctgtgtggtgctttccagaataaaggttgtgtattcgactctaaaaa

SEQ ID NO: 10661 - DNA, 641 bp, Canis familiaris
tctgagtgacctcccgagatggttctctactcgctggaccccgttgaccctcccatatcatgcaagtcgagaggttcaatcttcgtgttcactttaagaacacacgtgaaaactgcccaggccatcaagggtatgcatattcgaaaagccaccaagtatctgaaagatgtcactttgcagaacacgtgtgtcccattccgtcgctaccatggtggagttggtaggtgtgcgcaggcccaaccagtggggctggacacagggtcggtggccccagaagagtgctgagtttttactgcacatgcttaaaaatgcggagagtaatgctgaacttaagggtttagatgtagattctctggtcattgagcacatccaggtgaataaagcccccaagatgcgacgtagaacctacagggctcatggccggattaatccatacatgagctctccctgccacattgagatgattcttactgaaaaagagcagattgttcctaaaccagaagaggaggttgcacagaagaaaaagatatcccagaagaaactgaagaaacaaaaacttatggcccgggagtaaattctgcatagaataaatgccaaataaaaataaaaaaaaaaaaaaaaaaaaaaaaaaaaaaaaaaaa

SEQ ID NO: 10662 - DNA, 520 bp, Canis familiaris
gactgtgcgcccatggacataggagggcccgagcaggaatttggtgtggacattcgggcctgtctgcttcttgtggcatcccgtaccctctttctacgctatccgttgccaatccagaggacccaagtactttccagtcccagtcactgctagggctctgcactgaatggctgacctgacctgatgtccattcatcccacccgctcacagtgtggactgttctcccctctttctaagagacctgaactgggcagactgccaatattaatctcggtgttctatttatttattgtcttcctgtaagacctttgggtcgaggcagaggcaggaaactaactggtgtgagtccaacgccccctgagtgactgtccccagcccaggcaagaagatctcccttcaggtgccgggcgcaggaactgcgtgtgtcctatcaccatggtgctattctgtgtcaaacacctctgtattttttaaaacatctattgatattataaacaaaaaaattattggaaagtaaaaa

SEQ ID NO: 10663 - DNA, 542 bp, Canis familiaris
gaagaagaggatggaggagaggaggctgagggccaaggtcgggaagaaaggaaagaaacccaggcggcagagtctgtctccaagccacggagtcagtgaagaatccccaggaccatccaaaattaaggccatgaagcctgaagaaaatctggatttctagggagaagaaagccaactcagctccccaaagtgcagcagcaaatgggagctcttctggaaaaattgggaagcctctgagtggagctgcacaagagatcccttgccgatagcgaagaatctgaagcttacaagtcccttttcacgactcacagctctgcccagcgctcccaggaggagtcggcccacctgggtcacccacacgtcctactgcttctgaagcccatgctgcactccacgccatgcgggctccgtttcgtttccccgggagcccggtggcataggtgtcactgtcccctgtactctgctcactctctgtgcggggcaataaagtcctcctccccaacctcaaaaaaaaaaaaaaaaaaaaaaaaaaaaaaaaaaaa

SEQ ID NO: 10664 - DNA, 526 bp, Canis familiaris
ggagatcgtatatgaaagaatgcttcgcctcagtttaaacgttgaccctgatgctaaggtggaagtagtacccgaagaatgaacccgaagagacaaccgatggacaccacagaagacacagagcaggacgatgaagaagaaatggatgcaggaacagacgacgaatgaacaagtacacccagtaaagataatctacagctgaaaaagatgtattataaattatactctcaccatttggaacctgtgtggagagggaatgtgaaatttaagtcatttctttcgagagagacttgttttggatgctccccgcagcccccttctcccctgcactgtaaaatgttgggattgtgggtcacagaaagaagtgggttttttagttgaatttttttttttaacattcctcatgcaatgtaaatttgtactatttaactgactattcttggtgtaaaatcttgtcatgtgtataaaaataaaaaagatccccaatactcagctcttgtcttcataaaaaaaaaaaaaaaaaaaa

SEQ ID NO: 10665 - DNA, 577 bp, Canis familiaris
  misc_feature (192)..(192): n comprises a, c, g, or t, or includes no nucleotide
ccagcccccgcccggcggctttgatgggatcagggggtcttggggtgtccccctgcggaggcccagctgcagggggctgcaggcctgggggcttgcccgctcacgggtcctcctcccggacctccagccaagcccacgggtcttcacaaaggtccccacctccacagtgtgagcccagggccccttcctggnccgccctcggcctccctgaatcacctggccaggccatatgtcccacctgaaccctgggggggtctcctccctgcgtccaggtcagaccacctgacccacctgttccctggggggccctctccctacacgccctcccggccgcccctcagctgctcagatcgccagcagagcccacccatcccgaccccggcagggcccacagtgcctccacccagggccccacgacccaaggggcggtcaccccaaaacctggctggctgtggtccccgctcacgttgcccccccggaactcctcaagggctcccggctgctcccgcctgccagcctttagcggtccttttagagaaataaaaactcagcagcccaaaaaaaaaaaaaaaaaaaa

SEQ ID NO: 10666 - DNA, 599 bp, Canis familiaris
tgttctgatgaggatgctgaagaaaagtgggccttaagtgcgtgcctgctgatgcctgctccactgcccagaaggctgttggatatatctgcaatgtaatggtgctcgtggtgccctccgatgagttttcagagcacattttcctactaatggaaaaggttattaactcatgcccaaaatagaaattagtataatgttaggaaagaaagtatacagccttcttcagccacctttatttttgattaagtacagttccatgttgtaatgttacagagagtgtgatttgacctgtgatgtatcttaatatattttaaagcagtcttctcgaattgtcactccccaaaccttctacaaaataactgtgctctacttttctctttatgcacagataattatttagagattaatacagtctttctcagatttttagtaaatgcacagtaagaacatcatctaaattgactttgtattgtaccctgttaaactgtgtgtttgtgtgcttttaatgatgctgagattttatttatttggggacatgtgtctggtaagacatgcccttctattaattaataaaattacatttcacaaaaaaaaaaaaa

SEQ ID NO: 10667 - DNA, 592 bp, Canis familiaris
agctcaactcacagcttctccaagcatcaacctgggagtgttttgagacttttctcataaatgaggccagtacattcctgttttgctccgaagtattcagtaccgctcagtattttaaatgaaatgattcgtcacttgtgatttggtttgggatccatagggaagcacaggcaccaaccatcatataccatgtattgaaatgattttctcagaatttgaagtaggaaagttaccccaacacttctgcttccacttaactggcctgccatattgtaagaatggcatatccttgttactgtgatatttaaaatatccccagtgtccaccttttcccaaagattctagtaatgatctagaaatatctttctcttatctgttatttatccaatttttcccaagtatttttatatggaaaaaattgtattgaagacatttagtatccagttgataagaggaatttggtataattatggttggtgattattttttatactgtatgtgcccaagctttactactgtggaaagaccactgtttaataaaagatttacattccccccaaaaaaaaaaaaaaaaaaaaaaaaaataaaaaaa

SEQ ID NO: 10668 - DNA, 538 bp, Canis familiaris
tcggggtttgtcatttggcatctgttggtctgggatgccagggaagatgaatgcctctgttctacctgacttttttaggaccctgttcagtgcagtggtcccagatgctgggctgcacatcaggtgacctcaccgcagcaacggacgagggaagtgttccaggactggaagccccagagctttaacaccggagggcaacagctcctgcttctcctcctctgtgtactccattcggttcctatagaaaatggatacgcagagaactcccaaccctggcctggctgggtctagagaccaccgcaagaatcgcagcccagggcagtggttccagttacactggctcaggcccttactcgcttctccacccccctgtctcccccactcccacctgcccttctgttcctaggctcagctgcaggcaaacactccaccctccatttcccccactcctgcagctgcctccaggcctgttgctatagagcctacctgtgtgtcaataaacaccattgaagcacccaaaaaaaaaaaaaaaaaaaaa

SEQ ID NO: 10669 - DNA, 444 bp, Canis familiaris
aactgttcccacttgggagatgggggagaagtcatggttgagtgtcaggttattatacctatttgttttgtacacatatgtacataggagctttgtaaccaggcatcttaagtaataaccttttttcctttgaaatatttcagactgaaaactgtatttccatccccgcttctaatatttaaaaaaaatcatgatactgatctatctataccttttattttccttttttgaaagatgtcacttggaacccatgggtaactttcccatgagagtcttgtaccaatattgaaacgcatgaagtctaatgatttagaactgattaatctttccaattgagcatattgttgaaagggatttttgaaggccgtgcagttcctccactgatgatctttccttttctgcctcctgagcaccatctttaattgccattatcttcaagtcttg

SEQ ID NO: 10670 - DNA, 544 bp, Canis familiaris
acgtgtgtccttgtctgttaaagtgagttcttttagtagtaatagttcggggagggggcctagcctcctttatgcagccacggatgtctttgctgtcttcagcccttgccccatctgtccctgcagacagttgaggtcctctttcgaatgccctacccactattcactggtgctgatcgacatagatatggggttgagagaagatcatcggggacttcacattgtcattctcaaaccttgtgtttttttatgtttgtggaaaccttcaagtgaatggaatgattgccttgctggtgtccctttgtggaccaggggtgggaagaggggataactttgaccctgatggtgcctgggtgatgtgctcagggaagcttgtctctgggggttctgtggcagtgaacactttccactctctgacactttatcctgatttatgtctccaggatttggattttgatttttctaacgtagcttgaaatttcaataaactttgctctttttgttttctaaaaataaaaaaaaaaaaaaaaaaaaaaaaaaaaaa

SEQ ID NO: 10671 - DNA, 517 bp, Canis familiaris
  misc_feature (159)..(159): n comprises a, c, g, or t, or includes no nucleotide
cagggtaccagaaaatgtggttttaattgaccttaacggatggtgctttggtgagtcttggttctaaaggtacccaatgaggaagcccaagttctccaactgctgcatactttgaccaggaaaatctatttttgtcttccgatctacactttatgaccntaagtcacggtaaatacgccctggtttacttctttaaccttttttatgcagacccgtctgttaatgcacctgtggtttcacgatgtgccataatttgtaccatggtttattccccagtatcgccttaagccagaaccaatgtttttttctatatagttccttgcccttaataaatatgtaatataaatttaacgccaacttctattttgtatatttgtaaactaccaagtaaaaaatgaaccttttgtggagtttgtattttgcatactcacaggtgagaattaagttttaaataaacctataatattttatctgaaaaaaaaaaaaaaaaaaaaaaaaaaaaaaaaaaaaaaaaaaa

SEQ ID NO: 10672 - DNA, 399 bp, Canis familiaris
ccgtgttaaccccctaacccctgtgtaattggtttgggtacccaggcccaagccccttttcccaccttacctgttaattgtttggaactaaaccatgtcacccaaggtgacttctccttggctgagaggtggaaggggtgggatttgcctatgggccccctcagtccccagtgagggcaggagaaagaagccgtcctcctctcccatctcgctccatgaggccaagggctgagagaaaagccctgtcctcccctcagaggccaggggtgctgctctctcccatggtgccaccgcctgtgtgtgttgtgtatgtgagcaatcccacatgtggggggaaataaacacctggcactgagccctggggtttgtccttcttcaccaaaaaaaaaaaaaaaaaaa

SEQ ID NO: 10673 - DNA, 614 bp, Canis familiaris
  misc_feature (443)..(443): n comprises a, c, g, or t, or includes no nucleotide
tctggcatagcgctatttgtagttactttttgctttcttctgagagactgcagataataagatgtaaacattaacacctcgtgaataccatttaacttccactttagctatagctttactcagcatgactgtagataaggatagcagccaaccatcattggagcttaatgaacatttttaaaaataagtacccaggcctcccctctctacttgtgagttttgaaatcgttttgtttattttcagggataccgtttaatttaattgtatgatttgtctgcactcagtttatttcccttctcaaatctcagcctcatgttctttgttattgtcagaacctggtgagttgttttgaacagaactgtttttccccctcctataagacgatgttactgcacccagagcacctgcagtgtttttcataataaacttgtgaactaagaanctgagaaagtcaaattttaattgtatccatgggccagactggtgctgtttatttaaaagttacatccattgataaattttagaatttgtagaattctaggtaaagaaaaaataaaaatcaaggtcactataaaaaaaaaaaaaaaaaaaaaaaaaaaaaaaaaaaaaaaaa

SEQ ID NO: 10674 - DNA, 503 bp, Canis familiaris
cccctgacctgatgtcccttaaggagatgaaggcatgctcctcctctcaggggtcagctcaggagaagccctctgggttgtgggagaccccactgtcccttttcttccttggctttttcctgtccctcttctcatccgcctgggatatgaccccatagaaacttgtcctgagaggaaacttgaggttgaccagctctgggatttgtaaaggaagcctgttttcccctaagctctgggtttcttgaatgtttgcttcgttggcaggaagccacgggaattctggactggacactggccttatactttgtggttacttagttggccattcaagagtcaggcgggggagctggcaccatccagacccagatgtaccccacaccctcctccctggcccatcccaagctttccaggtgtgaatcaggctgtagaaatggtcttttactgaatatccaaaaaaaaaaaaaaaaaaaaaaaaaaaaaaaaaaaaaaaaaaaaaaaaaaaa

SEQ ID NO: 10675 - DNA, 595 bp, Canis familiaris
cactgaccacatgactggaattgagctagatgctggtggggcatggatggcatggatgctcagggaatctcagtcttgactggggagaccaggttatgcctatatggaagccatagccaagccctatcatgacgaggtttgtctaagtagggaatggtgtttagtggctttgaagagaggactctttcagagagctggaggtgtcagagaaggcttcctcctgcatgaaggaatgtaagtgatgggatttaccttggaacacggactggagcaccatttccaggttggggggcccaacataaaagaaggcccagaggtggcctgtggcttgttggtgagacctcaaggaggctgccttggtgagagcctgggcaagtgaggcctcatcaggacgtgcctacaggtgccctcgttctggggactgtgcaggagaaggggtgtatttctttctgtatttggaggctgtgttattttccagggaagcttgcttatttttaaactgaagacttaggttttctggattatagaatcccaacataagaaaaaaaaaatccccagggcagctcactgaagttagctctcataaaaaaaaaaa

SEQ ID NO: 10676 - DNA, 612 bp, Canis familiaris
ccacctggcgcgtccggcgctggcccgtggccctcgctgtgtggtgtcggtggtatcgtgaatgtgtgcgggaagggcacttctgccatgataaccagacctgctgtcgagatagccgaggaggctgggcctgctgtccctatcaccagggtgtctgttgtgcggatcagcgtcactgctgccccactggcttccactgtggggccaagggctaccaaatgtctacggagggagagcctgcgctgggacatgccactgagggacccatgccccaagaccgctgctgtgatggcgatgccgaaggactatagagtctgcagcccttgggaccctgctcggagggtccccctgctcaggcctccccagcacctctcccccaccaaattctcccagtcccccatcctgagtcccacccccatcatggttgctggggcctcaacctaaggccttccctatctcaagggaggctgtggcgaaagccatgttacaagctgccatccctccctgtttccgtctaccctgtggccaggtgctcttccctatccacaggtgtatgtgtgtatgtgctgcagtaaagtttgtacactttcaaaaaaaaaaaaaaaaaaaaaa

SEQ ID NO: 10677 - DNA, 679 bp, Canis familiaris
tttccaggtcagagacttgcagcagttttcccgaagtgactcagacacaccacagtgaacattcgtgtcactgcacattttatttttatgtcactgagaagtaaagacttcctccaagccacacgaggtccctgccacccacccacatagtgggacctaaatttctgagcttagggcccagagaacctggctgcagggaccttttgggggcctcttcaccctcctgcccagccccccacccttgcatgtcctgcagggcagccgaggtggaggggacaggcggaggggacggccgtctgccctgggaaaggaaccagagctcccgcctgaccgccaccaaggaattctcgtgggaaatatctgcccaggatctcagccccaggctggttgtttttacaaatctctctcaaatgtattattttgatgaccaaaatgaaggagctttgtaaattttttttaaaattatgaatcatatcaagtagttgtttacatttcttgacaaattaggaattatgccagcagaatcaaattggcaaaatccttagattaaaaaggcaataattaggtctgctgttttggccttttgtagtaagagacgtggtgtagtgtttagatacgtgtttggtcttgcttcttgtattgcatttttcaataaacttaaaaaaaaaaaaaaaaaaaa

SEQ ID NO: 10678 - DNA, 520 bp, Canis familiaris
tgctcacgaggagctcctccgagctgacctgtgttcgggaccagttctcccaatggtggcgtgatggcccagcagcggcctgttgccagtcttgtggcggccttccctgttgcccaggagctgccggggtctgctaggtcggagctgccaccccaagccctggcctttctcggatccggggccctcaggccctgcctgacctggtgcttttctccccggcctgacattccttttattccgtaagaagttagtggactatggccccggggggttggtctcgggcccctctcccagcctgtggccacccggggacccaaggggggctctccactgcccagggctcaccccctgatgaggggcatccgggcctctgatgtgccttctctgtccccctgcccccagcccctccaggtaggctgtgcccctcacaccccagctggtccactaggacttcgtacagctcccgggcatagaccacccttgttttatacaaaattaaaatggtttttacaaaaaaaaa

SEQ ID NO: 10679 - DNA, 652 bp, Canis familiaris
tagatagtattttactcaagtacggctaaaacgtgctacagtaacattatttcctaaatattattgaaatataccacttttattgtataacagtggataataatacctgatatttatggagtgtttgacagttgaaaagcattttacattcattatctcatccatcctcatagttctttaagattgacacagtggctattatgtctccctgcagaggtaggaattaaaacatcacctgccttatgaaattcacatgtcaagtttgtgaccaggccaaaaagctaaaacactggtcctgtgtctcctagcctaaatccattggttttgtttaaagggtctgttatgttcaaatgatgcctctgcccctcccccccccttgtgcatgcgctcacgtgctctctctctttctctttcaaataaagccaaataaataaatagtaagccattaaccagtgagcaaggtactattgtcagaagagatacatacaaagatgtgtgtagcatattcctaccctgtgaagttatactaggggaagcaatacctacaccagtaaatatggtaataactgctaatcaaatagtgtcacatacttagttctaaacaatggcacagacagtagatatgttaacagttcaaaggaggccatgacaa

SEQ ID NO: 10680 - DNA, 532 bp, Canis familiaris
gaactacaagaatatttacaagtacacatgtgaatagtctgtgacatttctaccagttgtgttcaatagcctatttggtcttggcatttcttggcactatggttctctgttcttggtgatgtcttattgtttgtgagtttttgttgtttttttaaagtaactcatgggactataaatgtagatgtgtatcaatatcaagaagttcttttctgaaatccctaaattcctgacttcctattcaagtctttgaaacttgttttctcttgctaagtagctaagaacttttatttttcactttcctatatacctaaaaagtatggacactgcgtttccatggactgtattgcgtgtagttttttgctgaaaactttttctgtaaacaccattgccttgttcagttttgttgtaaactgacttaaaccataagatgcactgttgatatgctttctgatgtgtgtttcttaagggtgataaaataaagcttaaaaataaaggagctgttttttcatttcaaaaataaataaataatata

SEQ ID NO: 10681 - DNA, 541 bp, Canis familiaris
gttttagatcttcagtgagattccatgggatgttatgatgtaagaagaataggctgttccttataaaaaagagtaataacagcacatggctaaaattagaaattaagaaggtaatgaattggaaatggataatgctagaaacccaaattatgaagatggaaactaaattaaacttcgctgaattaaaaaatgaaaattaaaacacattttacccatcatgttagccaagatgtggattgttaggtatctgaagaaatagctttttttttgccttgtaaattaatataacctttttagagtttaagttagcaatatcaattaaaattcacaatattctgggtttggacccagggcaccttggtggctcagtggttgaacatctgcctttggcccagggcgtgatcctggagtcctgggatcgagtccctacatggagcctgcttctccctctgcctatgtctctgcctctctctgtgtgtctctcataaataaataaataaaatctttttttaaaaataataaagagatggacccaaaaaaa

SEQ ID NO: 10682 - DNA, 585 bp, Canis familiaris
ggcgctcgcacctcgccctcccttttgcaagttcagtggctggcccgtccatccaagcccctgttccgttactggccgtccagaccaggatcttcctcctggctcgctctctctccctgtccctctcgcacgtggtccgtctcatcctgccctgtccgtctcgtcacatcgtcccagctgggtccgctgtctgtggcgcggggcctctgctcagcccctacccaggcaagccccggggcagagggcagctgcccccaagcctggacagtcctggaggaggtcagcaggtggagacgatgcacccatgcatgcactccgcactccaaaggggagcagtggccccggaaagggcccagcctcccactggagccccagccagctttcatcgtccccctctccccacgagatggctagctctcccctcccttcgccttctggcaccctggtatggtgggggtttctaacgatcacacccagcttgaggaggggctgcttctgaggtcggttgttgtctttcaattaaagaaacactgtgcaaaaaaaaaaaaaaaaaaaaaaaaaaaaaaaaaaaaaaaaaaaaaaaaa

SEQ ID NO: 10683 - DNA, 580 bp, Canis familiaris
ctgctgaagcagctgtacgagcacgtttactgtgtgtcccaactggctacctcacttcgaaaggggagacccagtctatgcgtgcaggtcacgatcggtgggttcttcagacttctgactccaatgttcccgtgggcttcactaaggtggttgtgaagctcttgattctgaccccatcacggtgatgatcccagaatcagtctccaggacaatcctaaatttatggagactgtggcagagaaggctcttcaggagtatcgccaaaagcaccgagaggaatgagatgtgaacattgcttctccaaatatgggagggctgagttcctttgaccccaagatgagtgtctaggcccctagagagagctctgcatgtcaccaagtgatcaggccttgcctcgaggcgctcctgtctcctaacccagctttccttcctctggactccgcactgtaacgcctacgtttgctgatcatgggaagaactcctgtgtgccactaactcaataaaaccgccaaggaatctgaaaaaaaaaaaaaaaaaaaaaaaaaaaaaaaaaaaaaaaaaaaaaaaaaaaaaaaaaaag

SEQ ID NO: 10684 - DNA, 581 bp, Canis familiaris
tgtgaatgcgagatatgaggacccagttacaatttctactcgatctgcaaatgaataggcccagaaagatgtaagagactctttgatgaatggacataaaaattctacttgttaagaacaaagtgtggctctggtaactgaccttcatagctaaagtttaaaaatacttgggaagtaaagacatcttgtggtgatagtacacccatatgcctgtgatgttcagcttctgtgaatgttgatataattgtaagtaatgtcaaactctattttctaacaagtattaattataagggaattctgtctacaatagcactgtcttgctaatttctgtttacatttttacttctttctggagtacatatgctgaattgttccttatgattagttatattttacaaaagccagcacacagccacaacaacacttgagcacaggaccattggtctatatttttaattaaagtatcaactaagaaaaaaattgggattttatttctcttaacctactttttgctgcagacctctttgatgttgtaattattacaaactacattaaactgagttcctcttgttttggaaaaa

SEQ ID NO: 10685 - DNA, 639 bp, Canis familiaris
gccaagtctgatcagcagatccagaagattcgacagaactgcaggctaaacaggcagccatggagaagtctgaaaaggcgaagcaactgcgagcacttaggaaatatgggaagaaggtgcaaacagaggttcttcagaagaggcagcgagagaaaacacatatgatgaatgccattaagaaatatcagaaaggcttttctgataaactggattttcttgagggggatcagaaacccgttgcacggaaaacaaaggaaggagcaaaaagccagcagatgaagaaggggcccagcgctaagcgacgctataaaaaccagaagtttggttttggtggaaagaagaaaggctccaagtggaacactcgtgagagctacgatgatgtatccagcttccgggccaagacagctcatggcaagggcctcaagaggcctggaaagaaaggatcaaataagagaccaggaaaacggacacgagagaaaatgaagagcagaccacactaagcagcatctttgtatacaaagaaccaagaaaaagggttgcaaacttgggatttcagcatacagttggatctcttgtgttggtttctttttgtaaaaagttctttcaataaacagttttcaaagaaacacaaaaaaaaaa

SEQ ID NO: 10686 - DNA, 508 bp, Canis familiaris
gagatggctgtgcccgaggtcggctcccggaggtacagttgccaaaggtctcagagatgaaagtccccgagatgagactccccgagataaagctccccaaggtgcctgagatggccgtgcctgatgtccacctcccggaggtgcagctgccaaaggtgtcggagatgaggctgccggaaatgcaggtgccaaaggccccagaggtgcatctgccaaaggtcccagaggtgaagctgcccaaggccccggaggtgcagctcaaaggggaacaggcagagagggtggaatttggcatcaagctgcccaagatgaccatgcccaagctagggagggcggagtccccatcacgaggcaagccgggtgaggcaggggctgaggtctctgggaagctgctcacgcttccctgtctgcagccggaagtgggccccgaggctcgagcgggtgtcccctctctcacgctgccctccgtggagctagacctgccaagggtcctcagtccggaggcgca

SEQ ID NO: 10687 - DNA, 117 bp, Canis familiaris
tcaggtcagggctatcggtggggcccggggcttggatggcccctccccaactcctccctctttgcttgggttcctttttcacgttcagtaactgtttttttggaaagcacaaacttc

SEQ ID NO: 10688 - DNA, 507 bp, Canis familiaris
ctctagagtgccaaacagttctgctcgtgaccctagaccctgcaagcctgtggaggccaagcacctcgccattatctccaatagccaccaacctgaagtggcccagacgtttctgggtgtaccacacgtgcgccaatctttctctccacgtgtggcaacttgctcgtcctttcctgaagggccctccgcaagccccctacccacgcccgttagtgctcccagaaagcagccaaggaagatgtgagagcaaaggccatgttccccgtgtcaggaatggcatctccatgaaggaggggcccgaagccctcatgggcggacctcccctgagcctgtctgaagggccggcccttagtgcattcaggctgaggcccctggacagggatgctacaccctgcttctctggaggatgtgccctctcccctcaccctggtcctggcattagactcccccccgcccccaatccccatctgcccagtaaaggcctttgtgcagcaaaaaaaaaaaaaa

SEQ ID NO: 10689 - DNA, 605 bp, Canis familiaris
tcctcgagtgcctggtgcatacctgcagagcatagaagagcaactgccagacccgtctctacctggtggacttgctgactgggctgagtgaaacccagctcaagctgctcacaaaggtcctggagacaggagagctgtcccggcccttcaagctggtgtcagagcattttggagcagagcaccccctggcaggagcgcagggctgtggtccctgccacaggggctcctggagggcagctgggatgcagaggcacctgcctgggtcttgctggaggagtgtggcctcgagctgcaggtggacgacccccaggtgtgctgggagccagaggcccgggaccacacgtgtacactctatgcctgtctggcactgctgttatgcctgagcgaggacccctgttagggctgaccggctctgcccgccagcgtgctgggcagctctccagacggcgtggggctcatgcccacctggctgcccgcaccgggaaggcgagagccccacccagccgtgcggccagtgcatcctggggtggagagctggggaaagtcagtaaatgtgatacacaaagaaaaaaaaaaaaaaaaaaaaaaaaaaaaaaaaaaaaaaa

SEQ ID NO: 10690 - DNA, 647 bp, Canis familiaris
cgttcatccttctggcttacgcagggcaggctccagcttgttacgtggattatgttggagacatgatggtgcagacaatactgtcaaggcttatcccttcatggccgtaagtgaacccggcattcagctcataggctgtgaaggtcctcgcacaagccccccgggggagcatgctgtcggaatgcactctggctacatcaggggacacagcattcacaggtgcggctgctgtggaagacccccgctacgtggtttggaaggacaagacatcctaccgctggttcctgcagcatcggccccaagtgggctacatcagagtgcggttctacgagggtcctgagctggtggccgacagcaacgtggtcctggacacaaccatgcggggtgccgcctgggggtcttttgcttctcccaagagaacatcatctgggccaatctgcgctaccggtgcaatgacaccataccagaggactacgagactcagaggcttctgcaggcctagggatgggggtggggacccattgctggaagatggcaccatcgtggctaccctcactgcaacaaacagggagcttggcacccggctccaagaggtagctgccctagaggggctcagaaaggacaaaataaagtgtgtgtggtggaaa

SEQ ID NO: 10691 - DNA, 610 bp, Canis familiaris
aagggttcttgggatttttttaaacatactctccccagaccagtaaccacagttttagactaaacacatctgtggaactaaatatagcatggaaatctaatttgaagaagtcatacgttcctcgtatttaaaagtaaacctccctctggaaagagtggtcacacagacatcatgtgccctataaaactgagtgtctttaggactgttaaaaaagaaaacttttaataactttttaaggaaattttttgttcttatataaatacatttaaataatgctttattactttcctgtttctgactctgctctgaactatagcaatcctcatatgaacaaaagggcttttatctcaaatttttctgtatttctccaaatgtacagattgaaagactaaagcaagagatctggcagttgcaaatagtgggaaagagaatttctactggcactgtatctatgaaatacctcataacttgagtttacatattttcctaattttttgtatttttcttattcacctagagacttcatagattttgatctcccattttcatcctttagaataaaacaaaatccttaattcaaatattatatcataagcacccttgaccaacc

SEQ ID NO: 10692 - DNA, 454 bp, Canis familiaris
agcgtggcctgaaccaggtgtacggccccagcctcccccgggcttggaccggagaacggggccgtggctgcgcctgcgaccctcactccagcttggaggtcagccagggcaccctgtggccggaagtgcagctctcagggccctcgaggaagagcactttccaaggaaacggttcacagagcgcttttcgtgaatctggacccgtcaggacccacgtaccctcagtccactccagccccagcacggcctccgctccgggctggctgacctgctggggtctgcacccccgccgccccacccccaccctcaccccactgggtgcttccatctccacgtcagctggctcccccaagcttatgttagcgtggggtcccgtggggggaggtgtacattgctcagtggttcccaggacgcggccacccagtggtaccttttctccttgaatttcacaaat

SEQ ID NO: 10693 - DNA, 517 bp, Canis familiaris
cacgtcatgtgtgcccggccagctattgcatctttcaggagcgacaagaaagttgttctgccaggtacacacagacctgctggatggcaaggagattgtgaccccggacgggtttgatgtactccgccgagtctatgtggactttgagggtatcaactttaagcgaaagttcttgacggggctcgaacctgatgccatcaatgtgctcattggctccatccgaattgactcgttgggtaccctgtctgatctctcggactgcgagggacggctcttccccattggctaccagtgctcccgtctgtactggagcacagtggatgctcggcggcgctgctggtatcggtgtcgcattctggagtatcggccatggggtccgagggaagagccagtccacctagaggcagcagaggagaatcagaccattgtgcacagcctgccccttcctcagagccccctttaaaaaaaaaaaaaaaaaaaaaaaaaaaaaaaaaaaaaaaaaaaaaaaaaaaaaaaa

SEQ ID NO: 10694 - DNA, 619 bp, Canis familiaris
ctcagggggttgtgacggtgcccttcagacgcaattccttgagcgagacagtgaaggaaagtggaacatgatcatggaaactcacctatatgttagattctgtaaagtgtaacccagatttgtgttgatattcctggctgtgaggaacttttaaagtttcaaacacacaagatgctttggtgtccatcgtggattactatgaaccgaggagacaagcggtgaggagttacaactcagaagtgaagctgtctccttgtgacctctgtggggatgatcatggatgcagtccttgtgagagaggagcagcggccactccttgtcattctacagtcattgtcgtgttctgttttatgctgctgttctctatacagcagtggctgtgattcattgtataaggactccatgtaacattgacatttctggaagtcatacgtgattgaattgtcttcattaccaagtattgcttctatttttgaaaaacaatgtttttcttcttatggggttgtgggggatggtgcacaacaggtcctagtgtgtatagctgcataaatgctgtctttacctgacttgtgtagaacaaaaaaaaaaatatcagtcttgcaaaaaaaaaaaaataata

SEQ ID NO: 10695 - DNA, 693 bp, Canis familiaris
  misc_feature (86)..(86): n comprises a, c, g, or t, or includes no nucleotide
aagggagatctggctctcctggaccacaagtctagcaggtccccagacctcatggtcctaatggtgttcctggactcaaaggtgcncgaggaactcagggtccaacctggtgcaacagggtttcctggttctgccggcagagttggacctccaggccctcctggagctccgggacctgcggggcccctaggggaacctgggaaggagggacctccaggtcttcgtggggaccccggctctcatgggcgagtgggagatcgaggaccagctggcccccctggtggcccaggagacaaaggagacccaggagaagatgggcaacctggtccagatggcccccctggtccagcaggcactactggacagagaggaattgtgggcatgccagggcagcgtggggagcgaggcatgcctggcttgccaggcccagcgggcacaccaggaaaagtaggacctaccggcgcaccaggagataaaggtccgcctggacctgtgggacccccaggctcaaatggccccgtaggggagcctggccctgaaggtccagctggtaacgatggtactccgggacgggacggtgctgttggggaacgtgtaagggcaatttcgctgattagaaatgtgcactaatgtaaatttgaaacctttgtaagactgaagagtaaaatttgccctttctttcataaaaaaaaa

SEQ ID NO: 10696 - DNA, 600 bp, Canis familiaris
aagatgtgcctcgcaagtggtgaccactgccaaaaacctttcagtcagcatgtgagaaagttgcgagctagcatcactcctgggaccattttgatcatcctcactggggcccacagaggcaagagggtagttttcctgaagcaactgagcacgtggcttgctacttgtgactggacctctggccctcaaccgagttcctctgcgtagaacacacccagaaatttgtcattgccacttccacccaaacttgatataagcagtgtgaaaagtcccccaacatctcagctgatgcttatttcaagaagaagaagctgcgtaaatcccagccaaccagcgcaagggagagagtatatttgacaaccgcggagagaggaataactaggagtatctagcagagcagcgacaaggtatgatcagaaagctgtggatctcgcaaattcgtcgccaaaaatcaaagctgttcctcagcttcagggctacctccgctctgtgttttctctcacaaatggagtttaccctcacaaattggtgttctaaatttcttacacaagaacctaattaaacaactgatccattaaaaaaaaaaaaaaaaaaaaaaaa

SEQ ID NO: 10697 - DNA, 706 bp, Canis familiaris
  misc_feature (70)..(70): n comprises a, c, g, or t, or includes no nucleotide
atccggatcgccagcctggaagtggagaatcagagctttgcgaggttcgtgcaggatctgcagcagcgtnttccaagctggaggcccggctaagcgtgctggagaagagctcacccacccaccgggccgcagcccctcagacccagcacgtgtcccccatgcgccaagcggagccccctcccaggaaggcggccactgctgcagaggacgatgaggacgatgccatcgacctgtttggcagcgatgaggaggaggacaaggaggcggcgcggcttcgggaggagcggctgcgacagtatgctgagaagaaggccaagaagccagcgctggtggccaagtcctccatccttctggacgtcaagccttgggacgatgagacaaacatgcgccgcaccctggatggccgtcccgtgtgcgcctccattccagcttattcggcgtgacgcatcgcgtgggggctgcctcacaatgctgtctctcctggtggtatatcgacatccgcaagccgcagatccagtgcgtggtggaggacgacaaggtggggacagacctgctggaggaggagatcaccaagttcgaggagcacgtgcagagtgtggacattgctgctttcaacaagatctgagccccagcaccgggcctggttgtgtgaggccccgcagccattaaagactgagattgtaaaaaaaaaaaaaaaaaaaaaaaa

SEQ ID NO: 10698 - DNA, 737 bp, Canis familiaris
ttgtctttctggttgaactgtgcagatcatcctcgcctcatggaatccaaagttgagctaaatgctctaatgactgatgagacaatatccaatgtgcccatcctgatcttgggtaacaagatagacagaacagatgcaatcagtgaagaaaaactccgggagatatttgggctttatggaccagaccacaggaaaggggaacgtgaccctgaaagagctgaacgcgcgccccatggaagtgttcatgtgcagtgtgctcaagaggcaaggctacggcgagggcttccgctggctttcccagtatattgactgatgtttggacagtgaaaataaaagagttttccttctctggactgatcctattcacagcttcctcatgaacttttctaatagaacaaggaaagctcttcaaccgtgtctggcgttgagaagccaagaatctctgtcagtcagctctctcattgcccagtggtgatacgtgctcttctccacactgttgggaggtgacgctgccccacgtgccggcgcaggtcagcatcccgggtcttggaagctggcaggatttgctgagtaaagctgtgtgccaacatggggcacctgaaaagaaaaacacgtctcaccactgtggttgatttcaaaagaaagtgattctattttttaaagaaagtgttgttaatgtaattggtgtccctcctaactttttgagttaaaaatttccttggtaaaaaaaaaaaaaa

SEQ ID NO: 10699 - DNA, 193 bp, Canis familiaris
ttcatgaatggttactttgtataacctactgacctcagattctaagaacctggggaaagatcagcaattcttgtaacagtatatttactgtgtatagaacggtttatttcattatagctattaaatgctcaccttttctacattaaaaatatttttctgtaatgaaaaaaaaaaaaaaaaaaaaaaaaaaaaa

SEQ ID NO: 10700 - DNA, 665 bp, Canis familiaris
attccctcgggggttggggggtgcttttctggccatggagccaattatagtcgcactgtttggggaccagatcctgggggtccccaggtgccactgtgtctcctggacttttcacttgagcttcaagcccacatctggtttgtgagccatcttcctcaaccagctcagatgccttgtcccatttctaagagcttaaaagttctttgagctcctttttttacctttgcaggctctacaggcgtgaaaagcaggacaaatttccccactgacaaaattgacacatattctactaaggagagatcattctttctttatctttaattcccaccccctgcccccatatctatgctactatactctcggccagtgtccctatcctttaaggggaacaaatgtcccgtccagggttcgttgtgtttgattttttgtgagggcttggcttgagcctgtagctttctatgcaaacaccagtgggttccatctttctgggctcctgaatgctcaagaatatcttgggctagtcagtaggatttgagctgtgcagcactgccatgatcagaactgtttcctcaggcactctgaacatgtgttttgcttggccagcatgggatttaacaaaattgagccactttttaaatatttggaggttttgaaaaaaaaaaaaa

SEQ ID NO: 10701 - DNA, 347 bp, Canis familiaris
ctcattgccccttcccagcccagcgtcctggcttcccagcttggctcaggggctgaggccccagtgagcagctcccaccagggagcccaatgctgcctttacatgccaccgggtgataggccaagctttggacccctcagcaggtctagggaactgaagcgggcaccatcccaggtcagtcggggggaacttcctctgagccatgatgccaagacaggcacggggagagaccagggcccccaatcagggacataggctttcttgtcctttctccctcttgcaggctggggcagcctggtggtctctagccttcctctccccaatcccaggcggcctgaacctctctc

SEQ ID NO: 10702 - DNA, 635 bp, Canis familiaris
aatctcagtaatcattacacttatgatccagaatgttcagaagaataatgtaaatgtggaatttctcagaaaaagagttgtctgctttggtgaaacttccttctggagaggattaccatttgaaactgagacttcttcatcctatagatacccgaccagagcacgatttaaagtactttcgaccaagattgaaattaaaatggaaaagacagaggctgtgagatgggaaaagctagaggggcaaggagatgtgcctaaacccaaaccgttcatagcagatgtaaagaacttatatccatcgtcatctcattataccagaaattgggataaattggttggtgagatccaagaagaagaaaaaaatgagaagttggagggagatgcagctttaaaccaattatttcagcagatctattcagatggttctgatgaagtgaaacgtgccatgaacacaatcatttatggagtctggtggtacacgttttgagtacccactggtctgatgtaggtaaaaggaaagttgaaatcaaccctcctgatgatatggaatggaaaaagtactaaataaattaatttgctatcactgtaaaaaaaaaaaaaaaaaaaaaaaaaaaaaaaaaaaaaaaaaaaaaaaa

SEQ ID NO: 10703 - DNA, 711 bp, Canis familiaris
cagctgcagctctggttaattcaagtcttcagtgtaaaggggcacttgagcccctcaagtcttcattgccagtaaggtaaccattttcggctctcctggttcacaggcagcacccagtttgaccccagtggctactggttttgcagcacaccgtatcactgtgctgggcctgtgaagccatttgttcccggggtgtgtgtattcctggagtggcgtgctgccccgatggctttcttctgcagaggatgttgccctcttgacctagctgccgcctctagcctctggcttgagaacttaataaagggacttcttcccattaaacgcccatagcactctccataaatttgctgattctctgcaaggcctgagaatctgagttacatctcttgaagcccaactccacctcttgtgcttttttgcttgggataaaggagtttttctttagaaacagtgccacagaatgacagagattaaaaaaaaaaaaaaaaaaaaaacgacttttaaagaaaatgcctaacaggtttttaatacagtaatcactgtaattatcactttcttttctagttccttggttttcagctcaggctgcattctctaactcatactgtgaagacaaaggtgtttttgattcagaaatatatgaaatctacatagtcttaatttgtaaaaaataaagaaaataccttaacctttaaaaaaaaaaaaaaaaaa

SEQ ID NO: 10704 - DNA, 348 bp, Canis familiaris
gaaagccattccccaaccagttttaattctggccttgaaaaagatttggccctggtaaggggttccaaaccttttaagcccacctacccaatgcagcatataaacccaagtatacacatgcatgtaatctgtctcaacaatgtctaaaggagcataaatatttaatattaattttgtatcccactatgaggaactttatgttttaaacacaggatgttcaaaatcttacgcataataagcaaaattgaatcccaagttcaaaaccaagtaatgtaaaaatatttaaacagcattataaaatccttatagtttataccataaaaaaaaaaaaaaaaaaaaaaaaaaaaa

SEQ ID NO: 10705 - DNA, 396 bp, Canis familiaris
gacatctcggtggacccgcggcggcggacacaatgtccagcggagtcccctcgcaggccaaccgtcgcaccggtctcaaggaatcaccgtctccaagttcatcctcttccccaggaacccttcagcccccaagaagggcgacagctcagctgaagaactcaaactggcaacacagctgacaggaccagtcatgcccatacggaatgtctacaagaaggagaaggccagagtcatcacagaagaggagaagaacttcaaggcatttgccagcctccgcatggcccgtgccaatgcccggctttttggcatcagggcaaaaagggccaaggaagctgcagaacaggatgttgaaaagaaaaaataaagtgctattggcaactcaaaaaaaaaaaaaaa

SEQ ID NO: 10706 - DNA, 658 bp, Canis familiaris
gatctcttgatgtgtctcacatggtatttggaaagtctcagcacctgagtcaaaaatggaacctgaatttatgaaaggaaaaaagtcttgttttacccccaatggaggaaaaaagatgatttaaaaagaaccagtaataacagaagagaaggaattaaaatggagatgaccgatcttcattactaaactaaactacagtgcacgatttacctggtctcagtaacataagagaaaccaatacacaggacggtagtgtgcagtttattaaagatcatgtgactcaatgtgcattcagttttcataattctttgctatatgacttggattaattctatataattttagagcttaaaagttacgagtaaaaattttttagacttaaaatagatgatctttctgttaactactatcttgaagtattcaagaaaatataaaattaaaatttgcaattttgactctaatggggaaactggagatacttatttttttgcatgtagagtttatacaaagtttccttaattacagggatttttgtgattcctctgatgtatattttttctaatggacagttaaacatttagttttaatacaacttgtatatatttgcttgtttgtttttggcttcttttgtttaccattactttaataaagtttcaaa

SEQ ID NO: 10707 - DNA, 499 bp, Canis familiaris
cagacctttcctgggaaggaatgagagctttcaaattgagactacaagggaagaaaatccgagcaccaccgagtgcaattctcgaaagcttttacaagagggcaggacctgcttaatgaagccgaaagacaatcaatcaagcagtgtcactatagagccagcgactaccccgaagaaattgcaaatgcctccttgtactgaatgtgaggtgaagaagactccagaaaaaccattgaccagctttgatgggagggcgactagagaagaaaaaatactgtaaatatcaagaaactgtgttaaaagcattcatttacgattgtcttcatactctttttcagccacaggcttgatggaaatactaagttctttaaagcatgcaactttttcacaattttctgtactttatataaagtagtctacaaattttccaaaagattccaggccaattatgatccttaagcaataacctaattaaaatggatatccaccgtcaaaaaaa

SEQ ID NO: 10708 - DNA, 669 bp, Canis familiaris
gcagtccagctgcgacaggaacgtgagtgattccctccagattgcggagaaaggtcaccaagctctacgacgagctgctgcagtcctaccaggagaagatgttcaacacgtcctccctgctgaagcagctgaacgagcagttttactggggtgtcccaactggctaacggtcactcaaaaggtgaagacccatgtctatctccagggtcacgacgggtggggttctcagacttcttgactccaatgttcccgtgggcttccactaaagtggttttgaagctcttttgatttctgaccccatcacggtgatgatcccacgaagcacgtctccaggaacacatcctaaatttatggagactgtggcagagaaggctcttcaggagtatcgccaaagcaccgagaggaatgagatgtgaacattgcttctccaaatatgggagggctgagttcctttgaccccaagatgagtgctaggcccctagagagagctctgcatgtcaccaagtgaccaggccttgcctcgaggcgctcctgtctcctaacccagctttccttcctctggactccgcactgtaacgcctacgtttgctgatcatgggaagaactcctgtgtgccactaactcaataaaaccgccaggaatctgaaaaaaaaaaaaaaaaaaaaaaaa

SEQ ID NO: 10709 - DNA, 599 bp, Canis familiaris
ccagatcaccgagcggctatgtctggcccgaagctcctcggttctccctcttcagagttccccccccttagagaatgtccacctggccagcccccggtgaagctgagaggcccggattggggttagaccagcaccccgcagctgtgctgctaccgggagtccttggtagtccaaggaagatccctggtgtctcccacggacccggtgggccgagcttagagtggcccccttccctatagtgaggtgtgataggacactctgagcttgccccccaggtctttttgacccgacatatcctagctaattgatgtcccaacaccccgaatgtgaggcccatcttctgagttaaacttttgacccagggaaccaacttataaactgatgtatccgtcatgtagctagctgtagagcttgccacttaatagccacagctgccccatgccatgtgaagtaacagaactggtttttggtttatttcttccttccagttttaatgttatgtaatgtatttaaaccccttatttaaataaaacttgttttccagaacaccaaaaaaaaaaaaaaaaaaaaaaaaaaaaaaaaaaaaaaaaaaaaaaaaa

SEQ ID NO: 10710 - DNA, 551 bp, Canis familiaris
tgcccttgttgatatggttcctggccaacctatgtgtgttgagagcttctctgactatcctcctctgggcccttttgctgttcgtgacactgagaccgagcggttgctgtgggtgtcatcgaagccgtggaccagaaggcagctggagctggccaagtcacccagtctgccccgaaagctcagaaggctaaatggatattatccctatacctgccacccccgtcttaatcagtggtggaagaacggttctcagaactgtttgtgtccattggccctttaaggtttacatagttacaagactggttttatgatgaccatgcactcgttagaaccttcacgaaggagaaggaggatgttttgtggaccctttgtttttttttttttttttgtgcgtgtgtggccgttttaagttattagtttttaaaatcccagtactttttaatggaaaccacttgacccaaaatctgtcccagaattttgagaccccattaaaccaaagtttaatgagaaaaaaaaaaaaaaaaaaaaaaaaaaaaaaaaaaaaaaaaaaa

SEQ ID NO: 10711 - DNA, 536 bp, Canis familiaris
  misc_feature (1)..(1): n comprises a, c, g, or t, or includes no nucleotide
nactgcggaatgcactctggcacacaggggacacagcatcacaggtcgtctgctgtggaaggacccccgcaacggtgggttggaaggaccagacatcctaccgctggttcctgcagcatcggcccccagtgggctacatcagagtgcggttctacgagggtcctgagctggtggccgacagcaacgtggtcctggacacaaccatgcggggtgcccgcctgggggtcttttgcttctccccagagacatcatctgggcccatcctgcgctaccggtgccatgacaccctatcccgaggactatcgagactcagaggcttctgcaggcctagggatgggggtggggaccccttgctggaagatggcacccctcgtggctaccctcaactgccaccaacccgggagcttggcaccccggctcccagaggtagctgccctagaggggctcagaaaggaccaaataaagtgtgtgtggtggataaaaaaaaaaaaaaaaaaaaaaaaaaaaaaaaaaaaaaaaaaaaaaaaaaaaaaaaa

SEQ ID NO: 10712 - DNA, 104 bp, Canis familiaris
aggagttgttcattttgctgaaattcattaaactagaaattcattcaactagaggttttacttacggactcatttaaatgtaaggttcaactgataatttcttc

SEQ ID NO: 10713 - DNA, 216 bp, Canis familiaris
ttgctagaacagtaaaacccgtacatgggagggaggaggaatgcctcggtcactctggggccagtttagatgctgtgaaattaaacctgttctaagtgtacttgtttgaattaattgtattgtaatattatttgttgaatgtagtaattaggtatttatgaatatattgctgtaatttctgaccacatcccaaaaataaaatcttcctaaatcatt

SEQ ID NO: 10714 - DNA, 595 bp, Canis familiaris
  misc_feature (1)..(1): n comprises a, c, g, or t, or includes no nucleotide
nccttcagggccgtagctgaacccggcaatcagctcaaggctgtgaagtcctcccccggccccggggagcagctgtcggaatgcacctctggcacaccacggggacacagcatcacacggtgcggctgctgtggaaggacccccgcaacgctgggttggaaggaccagacatcctacccctggttcctgcagcatcggcccccagtgggctacatcagagtgcggttctaccgagggtcctgagctggtggccgacacgccacgtggtcctggacaccaccactgcggggtggccgccctgggggtcttttgcttctccccagagaacatcactctgggcccatctgcgctaccggtgccatgaccccatacccgaggactacgagactcagaggcttctgcaggcctagggatgggggtggggaccccttgctggaagatggcacccctcgtggctaccctccctgccaccaacccgggagcttggcccccggctcccagaggtagctgccctagaggggctcagaaaggaccaaataaagtgtgtttggtggaaaaaaaaaaaaaaaaaaaaaaaaaaaaaaaaaaaaaaaaa

SEQ ID NO: 10715 - DNA, 466 bp, Canis familiaris
tcgggcacgcaccccgtgacccaacgctggacttttgggggtcacccacgtcgttgccagtgcaaggtgcgcagtgacgtgaagtccggtgatccagtggctgaagcgcttggagtacggcgccgagggccgctacaactccacccatcgacgtggtcggccagaagttcgtggtgctgcccacgggcgacgtgtggtcgaggcccgacggctcctacctcaacaagctgctcatcacgcgtgcgcgccaggacgacgcgggcatgtacatctgcctgggcgccaacaccatgggctacagcttccgcagcgccttcctcaccgtgctgccagaccccaagccgcccgggccgcccgtggcccccgcgtcgtccagcacgagcttgccgtggcccgtggtcatcggcatccccgcgggcgccgtcttcctcctgggcaccgtgctcctgtggctgtgccaggccaa

SEQ ID NO: 10716 - DNA, 615 bp, Canis familiaris
ttcccgcttccactcctgcctgcaacaaggcctgctccccacctgggtgctgacctcaccccagggtgcttgcgggcagcgtccagtccagcaggaggtctgcaccccctcccacctcaccccggggaagaggggagctgcccaccttgagagggaacagggcagcccctggggctcctgctctcctcctaaggggggaccccccccctgcctgctgccgacctgcccaccttgctcactcaccctgaggacttggggaattttcttgaatatctgtgtggctttacctgtggccacaaagagttatgacttctgcagctggaaagagacctcccacctcacataaaggaaaaagggacaatgaaaatgagtctaactataaagaccaggtttaaacatgggaacacatttgctgtgacaacggcagaacccaaaatgcagtcctgctgcctgccaagccgaaaatgtgcaaaaccatgggtggaaggaaaggcagctccccaggccagcagccatgcaggccttagtttattaaacagtatatggtcttttcaataaaaaagagaaagcatcactcacttaaatataaaaataaacataaccacaaccacacaa

SEQ ID NO: 10717 - DNA, 556 bp, Canis familiaris
agcgccctcagaacgagccctggccatgtcaccgcagagccgaggcagtgttgtcagggctaatgtgaaatctcttcccgtggcgccgatcctccggctctgcagcgccagcttggacagattgaggtctctgtggctttggtgaccctgcttaagcattcccaccgtgtcccagcttcgctctcagcctgcctccctccgcagcccccctcacctgacctcagggcctggggagggggccagtgccccagggcaaggggctgttgctcaggagagatgtcaggcttcctggtgtcatcaggctttgagctctacctggggtccagcagacctgggaccaggtgtcactaggagatatgcctcatgctgtgcctccatgagggctagggaacaattctgttattgtattaacttgactcagttaactcacttgagaaactaaccaatttttactttctgtctagaatgatgtacatgtaggagagtgagctataatgctcccaagtgccttgttttctctgatataaatatatttataaggacctataaaaaaaaa

SEQ ID NO: 10718 - DNA, 633 bp, Canis familiaris
cccccccttctcagcgcgccactctgtgtgacacccccgctttgccgagccccaggtgcagcgggctcgcgcaaaggagccgcctgctcggtccccatcccagtcccagcgccctggctcggaggctccagagtgggtgctctggctcccggagcagcaggtgtccaggcgaggcctccgatttcccggggacttctggccctcctcaaaggccccagccctattacggagccgtccatcccgcgccgccggaaaccgcgccacctcgcagcatggccaccagcctcgggcccgacgctcccctgcagccgagcgcgctgtccgcccagcagaccacgctcctgctgctgctgtcggtgctggccgcggtgcacgcgggccagtggctgctgaggcagcggcggcggcagccggggtccgcgccgcccggcccgtttgcgtggccgctgatcggaaacgccgcggcgatgggccccgcgccgcacctctcgttcgcgcgcctggcgcggcgctacggcgacgtgttccagatccgcctgggcagctgccgggtggtggtgctgaacggcgagcgcgccatccgccaggcgctggtgcagcagggcgccgccttcgccgaccgccgcgcttcgc

SEQ ID NO: 10719 - DNA, 574 bp, Canis familiaris
aaaaacggcccttccagggaaaagacccagagttggggtaatatgtatatgatggagaatggcactctcgaaatacaattacagtaaagaaactgtgattatacggggcaaagagaaaggggagctaaagtgttatgttaaaaaagggtattggaagttcaggccaatgcgaaattataaattccttctaggcagtgagcctgtacccttcatatttaacatctctcttggctctccccgaacacatactaacagatgtagtagaatataagcatcctgcatatctgcgtatgttgcaggttaatttctctattaaggaggttggtggtttagaggcaagttttgttgttttaaatccctctgctcactaaaataaaagtaaaaaagaacagctgggggcagcctgggtggctcagtggtttagctggtttagcaccgccttcagcccagggcgtgaacctggagacctgggatccagtcccatgtcagctccctgcaggggacctgcttctccctctgcctatgtctctgcctttcgctgtctttcatgaataaaaaaatatataatctttaa

SEQ ID NO: 10720 - DNA, 619 bp, Canis familiaris
catttgtttggtgattgcctttaatgttatgatcctgaatatgaaatttccaacaacttggtagaatatcccttgtacctagtctctatgtggaggagttgtctcttgtgtataatattgcacgaatatgccatacctgaagttgaaggtttcttccagagaacttataaggatagctcactgggactatttataactgagactgccatgatcctcaggcctcttctaagtacactgtgatagatgatacagtgagtgggatccatgcaagagcctgtttcttacccctgacatgaatctacattggcctttaacagctcctggcttctaagctacccaaacccactatagtaccgcattaagttaccatctcagaaatagtgctggtgagagagtaaccaattgtcaagtactatggatatagtctctagattcagactggtaggaaattaaaccatgccaaccggagctcattcttatataattcaagaaagtcgatgacttaggtttcatattcctaccttaacactggggtggttcaacataaagtctgacactgatgtctatttgtatttatcttttgttaataaagatatgtaattgagaataaaaaaaaaaa

SEQ ID NO: 10721 - DNA, 550 bp, Canis familiaris
  misc_feature (1)..(1): n comprises a, c, g, or t, or includes no nucleotide
nagctcaaggctgtgaagtcctccacaggccccggggagcactgcggaatgcactctggcacacaggggacacagcatcacaggtgtcggctgctgtggtaaggaccgcccgcaacgtgggttggaaggactagacatcctaccgctggttcctgcagcatcggccccaagtgggctacatcagagtgcggttctacgagggtcctgagtctggtggccgacagcaacgtggtcctggacacaaccatgcggggtgtccgcctgggggtcttttgcttctccctagagtacatcatctgggcccatctgcgctaccggtgccatgacaccataccacgaggactacgagactcagaggcttctgcaggcctagggatgggggtggggaccccttgctggaagatggcaccatcgtggctaccctcactgcaaccaaccgggagcttggcacccggctccaagaggtagctgccctagaggggctcagaaaggaccaaataaagtgtgtgtggtggaaaaaaaaaaaaataaaaaaaaaataatataatat

SEQ ID NO: 10722 - DNA, 600 bp, Canis familiaris
  misc_feature (1)..(1): n comprises a, c, g, or t, or includes no nucleotide
nctggagatgcttgttgggtctgtgaagcctgggccaggcagcccaatctggcctgtgctagaggatgaaaccctctgctttcacatctctgagctgcaccctcattactgaagatgccttttgctttatagctttgctggagagccattcattcttcccatgtctgaaaggtaatgttgcctggggcctaagcgtcctgctcctttgggcaccacttggaatggagcccatctgggaggtcagggacggggactgccctgaggagagctagcccctagcctggcccctgcccagatgccacttccactcacctgatatttaagtgaaggggaggatccctagactatgttcttggctccacgactcaaccaatccaccaaagcccaaccagctcatttcaccaaggagcgctgactgtgaggggccaggctgcctctgcttccaggctcttcagaaagcatctgcatgtgaacacccatcatgcctctataaaggatccctattacaggaacagcatgagtggtggctaaccctgacccaataaagttattttatgattcccacaaacaaaaaaaaaaaaaaaaaaaaaaaaaaaaaaa

SEQ ID NO: 10723 - DNA, 593 bp, Canis familiaris
ggcacagactgagtcccccgagctcccagtttcttccttcttgcttctgaattttcttttgagtgctccttagcagctggattcccgtctggcgcacacttcatggaaagccaaactgtgtccacacttctgggcacacgggaatgagttcaggtgggcttggctgtactcacagtgcttgtcttcccaagtctgttttccttttggatgcatcgtccagcagctgagaaggggaccccagccctgttttagagtagaggggcatcgtggtgaggccggctctgaaatctgtacagcacccccacccgacacacacacacactctggacttcggtcccccatgccccaccgccacactccagcgaagcacgtggcctttatatttacttctttctttcagcagaaatcagacagatgcctcttatcttgtgatctccctgtggcttctctctgccccgttacctgcccagttacctggggtaaacctttgatttgtcttgaccccaaggatcctacccccagaaataaacatagtaatttttgtttaaaaaaaaaaaaaaaaaaaaaaaaaaaaaaaaaaaaaaaaaaaaaaa

SEQ ID NO: 10724 - DNA, 647 bp, Canis familiaris
tgaactgattgtgttttttgctggataatgtgattccgcgattgatctcatccaagcagtttagagtccagcctaatgacatgtcataattgtacctattgaaagtttttaaataatagatttattatgtaaattatagtatatataactagttaatgaactataagataatgaagaaggaaattgataggaggttgtttaaatgggagaccatgtaaaatatgtaaattctagtgcctgaaatcctttcaaccaatttttatttagccactgctctctaccacggtgttaagctagaaactgggcacttagtagagcctcacaacatttaagttttcttcacttctgttaacctcaagaaactcttatttgtaatagattgtttctctcttggaacttttatctatttctttctccttgacatgaatgtgtcttcctcccaggtatgtacctggtatagacagaagattcttttgactaggaatggtttactccaacaaaacacactgtgctggccattctttgtacttgcctactgtatactacagattttagttctggacagttttgcagcaccaatatttattttaaaatgaataaaatgttcacaagccaaaaaaaaaaaaaaaaaaaaaaaacaaaaaaaa

SEQ ID NO: 10725 - DNA, 664 bp, Canis familiaris
ctgccgcatgctggccgtcctgccccatgagcttcgctatagcatctacagagacctgtgggaacgaggcttcttcctcagtgcagctggcaagttcgggggtgacttcctggtctatcctggtgacccacttcgtttccacgcccactacattgctcagtgctgggctcctggggaccccattccactccaggacctggtttctgctggccgcctggggaccagcgtcagaaagacgctgctgctctgttcccctcagcctgatggtaaagtggtctacacctccctgcagtgggccagcctacagtgaactccagagacccgtggggatgtggctgcatctgtggaaagagcctttctagatggtcccaagctcatctctgcaaatgggaggctgttaaccctcctacctctttcttgcggttagattttgactccggatttataaacactacatccttcttatttccctccctgtttcaaagcacttattggctgtgatatttttgtagttacctatttccaagctgtgagcttcttgagggtgaagactgggtttgattcatctccagtttctacagggcttagggccaagaggtctcagtaaacttgttgaataaaaaaaaaaaaaaaaaaaaaaaaaaaaaaaaaaaaaaaaaaaaaa

SEQ ID NO: 10726 - DNA, 642 bp, Canis familiaris
ggctgccagatagatgagatgtggcacaggttagcctcaggttgctgtgcccctagactataggagcccttggagcccagaacaggaacttgaaggccacatcccttacccaaattaagtatgcagagggcaagtgaaggttgactgaaacagggaggcagctttgtaatctatgtcagctctctcaggaagcaccagtatttatcttgggtatacatttgcccttagaaactcctgtttgtgagtctcaaaacaactgattattatttttttgaatactttgctgctgcttttctggatctgaattcccttttgtgccagatggcagtgcttgtctgcccacttgcttcaggggatatacagacaggttatttctagagggttttcagattacctgcttctttgctggagtaaatgttttgttccaaggccagaagagcttatcttccttgtcctctgttcccacccttccatgaacaatcatgcccataagagacactctcagatgaaactcttcttttcttgccatagtcatgctcaggctctgtggttgtaggaataaagtctgtgactttaaaaaaaaaaaaaaaaaaaaaaaaaaaaaaaaaaaaaaaaaaaaaaaaaaaaaaaaaaaaaaaaggg

SEQ ID NO: 10727 - DNA, 513 bp, Canis familiaris
tgtgatgacttttcatgtgagaggaggctcattttggatggaacaagggctgcagtgtttacaggatagttgtaagaagccaagtttattttagaattggttgattggtttgtgttgcatggttatatatcctgggatcataaagtctctgtagttatctgtgtgaagaacaatggatcattaaacctgtatttatctgcactgaccatctcatttattttttctagtccctattaatagtttctggcaataattactaattctgagtgttacatttatgaatgggctttacccatgtgttctaggttattggtattaaaacctgacagtttggggatgcctgggtagctcagtcacctgagcatctgactcttagtttctgctcacgttgtgatttcagggttgtaaggttgagcctcacgttgggttctgtgcttagcacagagtctgcctgagattctctgcatctccctgtccccctccctccactcttgttctctttctctgtctcaa

SEQ ID NO: 10728 - DNA, 623 bp, Canis familiaris
gagcaaacataactggcagccgaatcccttcagggcccgtacctgaaccccggcattcaagctccaaggctgtgaaagtcctcccaacaggccccggggagcagctgcggaaagcactctggcacaacaggggacacaagcatcacaggtgcggctgctgcggaaggacccccgcaacgtgggttggaaggacaagacatcctaccgctggttcctgcagcatcggccccaagtgggctacatcagagtgcggttctacgagggtcctgagactggtggccgacagcaacgtggtcctggacacaaccatgcggggtggcacgccctgggggtcttttgcttctcccaagagaacatcatctgggccaatctgcgctaccggtgcaatgacaccataccagaggactacgagactcagaggcttctgcaggcctagggatgggggtggggacccattgctggaagatggcaccatcgtggctaccctcactgcaacacaacagggagcttggcacccggctccaagaggtagctgccctagatggggtctcagaaaggacaaaatcaagtgtgtgtggtggaaaaacaataaaattacaaacaaaacaaaaaaaaaaaaaaaa

SEQ ID NO: 10729 - DNA, 664 bp, Canis familiaris
cccaggatagaaaagggaatgttctgacagacagcctgactcctctttgggtttccttccctgtctaccaggatgaggcctcaccgatgccatgtgcagggaccacggtcagtccacatgggtgtcttcagtcactcccacagctggccacatgggcccttcccggctccttggcacagcccgtcccggcactcaactccgaggagggccgccagcacttccattcagaactcatcctacattctttaagagccttttaccacttaaatatttgtcaactaaagactctcatctggtttcctgctttgataaccagtttctcagtctggagtcctgcccgacaccattgggtctgaacccagccacatttagcaggtgggggaggtggctggatgctgatgggacagcagggcatcctatttcaataaaatactcaacagctcagtctttgcctctggctgtttatcctttatgcttatggattaaactatttagatgtgatgtgtccatcccaaatattctgttaacttaggagaaactacaatttctatgaagtggttatgaacattttttgcaatcggtacaactgattgggacatttaatccatttctctaactttggaaataactgcaaaataaaattttattttaccaaaaaaaaaaa

SEQ ID NO: 10730 - DNA, 498 bp, Canis familiaris
aaagagggccccaaccttcgggaatgtgttccagctgtattgcaagcttgagccctgggcactactgtgagagacttcaatttggccgccaccccccagcagcttgcagcgtgttgatgaacgaaagctgatccagtttgggcttatgaagaacctcatccgccgactacagaagtatcccgtgcgggtgtctcgggaggagcggagccaccctgcccggctttacacaggctgccacagctatgatgagatctgttgcaagacaggcatgagctaccacgagcttgatgaacggctggaaaatgaccccaatatcatcatctgctggaagtgaggctggtgggggctaaactaggcacacgactgtggctgctttcgtcctgcaaagcgctgtctggtgcatgagggctagacccgtagactagtccgtattgtctcaggggtgaccctcagttctgtaaataaaagcatctgtttcaacctacaaaaaaaaaaaaa

SEQ ID NO: 10731 - DNA, 559 bp, Canis familiaris
gtgacctggtgggggatgtctgtgacaccaatgaggacagtgatggggatggacatcaggacaccaaagacaactgcccacagctgccaaacagctcccagctggactcagacaatgatggacttggagatgagtgtgatggggatgatgacaatgatggggtcccagactatgtgcctcctggtcctgataactgtcgcctggtacccaatcccaatcagaaggactcagatggcaatggcgttggtgatgtgtgtgaggatgattttgacaatgatgcggtggtagatcccctggatgtgtgccctgaaagtgcagaggtgaccctcacagattttcgagcctatcagactgttgtcctggatcctgagggtgatgctcagattgatccaaactgggtcgtgctcaatcagggtatggaaatcgttcagaccatgaacagtgaccccggcctggcagttgggtatacagccttcaatggtgtggactttgaaggcaccttccatgtgaacacagtgactgatgatgactacgcaggctttctcttcagctatcagga

SEQ ID NO: 10732 - DNA, 612 bp, Canis familiaris
tggaaaccatcacagcttgcctttggggaccacttagcctgtgggtggtgattgcctttctccgccagcagcccctgcgcttcatcttacaacttgtggtctctgtgggtcagatctatggggatgtgctctatttcctaacagagcaccgggacggattccagcatggggaggtgggccacccgctctacttctggttttactttgtcttcatgaacggcttgtggctggtgctacctggaatcctcgtgctagattctgtaaagcagcttgctcatgcccagagcgtgctggatgccaaaggcacaaaagccaagagcaagtagaactaatcagtagtaagctgggcttgaacattggctgatgaggaaccctccaccaggaagaagaatccagtccatactcccacaggtcggaggaacaaagcaaattgatctgtcaaactcaagctaatgggtaaggaccagaaggaccaaaggcaggggcaagaaaggagttgtgtggagctactgccaggagccactgggacaaaggtgcagaagaacctaggagggccatgatggtggcagtttttaaaatcaggaaataaaagatcttgaccctaaaaaaaaa

SEQ ID NO: 10733 - DNA, 705 bp, Canis familiaris
gaagcagaaccaccctgcctacggtcctgcaacccccagcaacccccacatcagcagtggctccactgtggccacctgcctgagccaggggagcctcctggaagacctggacaacctcatcctggaggacctaaaggaggaggaggaagaggaggaagagggcgggcacggggagtgacccctgacatgcaaactagacacactctgtggagattctgtgttgttataaaatatgagctcaaactgagatctaaatgctctcggggagccattggggtctgagatactggcaggggcattccagggccctggggagcagatacaagaagaaggtctgtgggccatggcccacactaagtcacaaagcaagtgtggccaggataacttgggctcctgctgacaaacatcccctgggcctgggggacagatggacagatgtcacagcctcaggggccggatcagcatggcaaccttcttgagagagtaagccccaccacgaaactcggcccagtagacgccgtcctgatagcggctgcggtaatggccaccacgatgccacacgccgttgaggttggagtgggcacaggcgtggtaccaccagcctccccgctggtacagggcacagttacctgaagagagagaaaaacccatatcctgtcaccaaaataaaagcctctaccagtaaaaaaaaaaaaaaaaaaaaaa

SEQ ID NO: 10734 - DNA, 615 bp, Canis familiaris
ttaggctatctctaaaattgatccagctcttaaaatttttacattgagttttaattttatgtaagaaaccatgtttaggaccagctaccatttctaagggttttttgttttgtttctaacgtttgctcttttcctgtgttttttcccttatggtagtggtatcattttttggatgtgtaatgtttataaaagaaaaccaaaagctgatgtatagccctgtatacagtgtagatactatttttgtaaaaaaaaaaaaccaaaaaaccaaggctaaattaatgaacaagagtactgaatgtttcatcattaaaaatttcttgtatttcttgtgcattaatctgaccataattttccctgtatattatgttcatgtagctgggtttgtaatttttgtttactagatcaagttgtcagcatttgttggtataagtgaacatcacagttatcctgagttgagtttaagccaaatatatgcatagtaaagtatcttcctattactggaagatggtgatttttttaggatatgtgttaatttcagtttttgtatgtttaacttttattaaataaagtgttcttaaaaaaaaaaaaaaaaaaaaaaaaaaaaaaaaaaaaaaa

SEQ ID NO: 10735 - DNA, 613 bp, Canis familiaris
atttaatttgaaaaagtgctctaatgctactttgaaatgtaacattcagacagtacgcagtggaaaagctcttatctctcaaagactaaagatagggatgttaggtgctgttatattgtcaaagagactttcagatacaatgtgagaactgacaccactgaagcggagactaattttctcatgtgatgggaggagctaagaagagatagggcaaggggccaggaatagggcaaggggccaggaatgcgagccccatgccctcttctaggggcaagagcaagagacagaagggaaacttcatcactattgattttttatgtgtttcattgaacatttctctattctctcaagtatgttccaaatctataaacagattgcctttagactatgtatgagcttttgttattgatattgttgttgttttggccctgtgaggactctaatatctttgctcctaaaaaagaaataatctggggcacctgcatggctcagtggttgagcgtctgccttcaactcaggtcatgatccctgggtcctggaatcgagtcctgcatcgggctccctgggggaggcctgcttctctctctgcctgtgtctctgcctccctctgtgt

SEQ ID NO: 10736 - DNA, 634 bp, Canis familiaris
atattactactccataaaatgtgcatggacttaaaggactctcatccttcacttgagtctgctgaagggatttctgtgcacaaccaccacgctgtcttctaggtgctgggcccaccccatgcatcacagatttacttatttcacaggcttctctgagggcctggtgatctgaggtgtggtgcctacttccgctgtaagaatcttggtggatctgtgtctcaaatcagacaagagaaatccaatttaaagagccaaatgccatcttctggctccctcccatgtgggagccagttaagaaaccagagcattcctttttattgaaaaaaaaaaaaaattgttatcaggttgtttcagttgtatcagatgccctatctgctcaagcacaacagaactaagctaagtgcattttcatcccagaagagagttgcatttgtattgatatggaaatttgtataccagcgcttccttcggctagtatcttatcacccgaagatttaagatacacccaattccagtttgtttctaacattgttcattttcagtgcactttgttttatgtaataaagtatgcctgttatattaaataataaaaaaaaaaaaaaaaaaaaaaaaaaaaaaaaaaaaaaaaaaaaaa

SEQ ID NO: 10737 - DNA, 642 bp, Canis familiaris
gagcttcgtgtggtcttggtatttggctataattgctgtaaggtgggagccaaataattatctgcagcgagttgtcagcgctttcagtgatatgaacgtcatattggctggaggccaggtggataacctggcatcactgacttctgacaaacagcctctggatattgacgccactggtgtggttggactgtcatttagtggacaccgaatccagagtgccaccggtgctcctcaacgaggatgtcaatgacgagaagaccgttgaggctgcgatgcagcgcctcaaagctgccaacattccagaacggaataccattggcttcatgtttgcatgtgttggcaggggttttcaatattatagagccacaggggaatgttgaggctgatgcattcagaaagttttttcctagtgttcctttatttggcttctttggaaatggagaaattggatgcgatcgcatagtcactgggaactttgtattgaagaaatgtaatgaggtaaaggatgatgatctatttcacagctacacaacaataatggtactgattcatcttgggtcatctaaataaagccgcctgtaaagtggctttcacaataaaaaaaaaaaaaaaaaaaaaaaaaaaaaaaaaaaaaaaaaaaaa

SEQ ID NO: 10738 - DNA, 652 bp, Canis familiaris
ccggagagggatagaactgtaatctagaccatctgtcaagaaaattgtgaatgtggaacgagatacatacactgccacttctcagatccccagagcctttcagaaaaggggaatagagtaggattcatttttaaaggagatgtatatgaggttaaaaaaaatcatattgctgttctttaaagggcaactgcatagtacattagttgctatgactggtacattctggcccagccagagctataattattttttaaaaggtgtcaagtcttgaagaatgtgtagtgacaagggggagcagctgctgggaactatcctgcaatgctattgttgccatatgtatcaaaccctgactgctcctagttgtaaagggtttatcttgcttcccacctattgctgcctgagcaatgcctcaagtgtgtcctgaataggaaccttgcaaaccctgtagttaggtctttcacgatggttcccttgcatatatttcaagtgaatgttgtatccccgactaaccacagtaataatataatacacctctgtgagtgctgatttgcctttgcaatatttcttctgatttatttaattttcttgtatttatgttaaaaatcaacaaaaatgttcaaatcaccaaaataaatttgtagttcagtccttt

SEQ ID NO: 10739 - DNA, 594 bp, Canis familiaris
aggtccgcggctgccaacccgcaaaagtgacgcagacctatatgagacccccctctcacccttccccgagggagaagcagcacggctgcacattgcagagcccagtgctgggtttcccttctcactgatttgctcgcgggggcagcgtctacccctcaacggcacctggtagacgctgagatgctggtgtaacatctcaccaactctgccttgcagacttgcagacctcgggggtcggggtgggcagggggcacgcgtgccctggagcgcagcgagccagcagccgccccgctacctcctgaactaggtcaggcctgtgccaccaccgtaccctccgctacagaagttcagatgcatccttgatactttttagttttgcagcctggagcgccatgctgtttcccaaggtacattttccatgtccttctagctgcttctggcatgtatccctgggccctaaatcatcacatgcaaaatattttcttgaatgagttcatcagttgttaacctcaaggataataatgattgtaataaagctcttgcatttccttctaaaaaaaaaaaaaaaaaaaaaaaaaaaaaaaaaaaaaaaaa

SEQ ID NO: 10740 - DNA, 632 bp, Canis familiaris
tgacaatctacatcttagatagcttccaaagcctcaagcaattaattgttttgccttggacctctgccacaaatggtaccagcagtgaaaccctctggaaaaagtctcccacctcatggtttatgattgacaaatagaatcaaaactcctcaaggcttaagttccatttcctactaagccaacggcgcatcctgattcaggcccaagaaaacttgtgaacattaaagacctcagagcaagtgtactctgattcaacaaaccaatccaaaactaaaaataataaaaataataaatactcattacttgaaatttaagcatttcttaaccatataaaactgaattggtttaacgtacagaatgtgttttcttacattttttcaaaaagaaaaaaatagcctagcccaagtctctgtttagttcaatcactttaatatcagtcactgaacatacagatgccagacaggcattcccaagagaaaactggatagatgcctcctcctgataaaatatccctttaaacgttgtcttttttaatttgcaaattgtctgaaagttgtaatatatcacacagtaatagttaccattctccctgcttgttttcatagctaaccaaaaaaaaaaaaaaaaaaagg

SEQ ID NO: 10741 - DNA, 612 bp, Canis familiaris
  misc_feature (116)..(116): n comprises a, c, g, or t, or includes no nucleotide
ggctatgccctctcagtggcaagaaattcaaggggcctgagtttgtacgcaacatatcttcaacaagcatgcagagaagattgaggaagtgaagaaggaagtggcattttttaacnactttctcactgatgccaagcgcccagctctgcctgagatcaagccagcccagccacctggccctgcccagatactccccccaggcctgaccccgggactcccctacccgcaccagactccccagggcctgatgccctatggtcagccccggccccccatcttggggtatggagctggtgctgtacgccctgcagtccccacgggagggcctccataccctcatgccccctatggtgctggccgagggaactatgatgccttccgaggtcaaggttatcctgggaagcctcggaataggatggtccgaggagacccacgggccatcgtggaataccgtgacctggatgctccagatgatgtggacttcttttgagccatttacttttcctcactcctggtatcgtctagaattgtgactgcctcatcccatccagctgagaatttttttgtacgtccaaccctactgccaataaaagcacttccatagtgaaaaaa

SEQ ID NO: 10742 - DNA, 697 bp, Canis familiaris
cctcacggagagacaggtaaaatctggttccagaaccaggagaatgaaatggagaaaaagagaacaaccaagggacaaattcccacgtttcccgacaggaggcgaaggatggagaaaccacagaaggaagcccaagagctggaggaagacagagctgaaggcctgacaaattaacttctacctttaaaattttaccacagactattaaaactaatgatcaacacatgctgttggacaccatctattttctttgttggaaaggactttacctgtatttcaagctaccttcatgtcactgctcttgaggtttctgcgctttgagaggggtttgggtgttaaaaaaaaagtttctagtatcacacagaagcagcccttgagctgtcctatgtaagggtaatttgatactgaccttgttgctatatttttataatggtagtttttaatgtctgagctggtgatttgcctcaacaacgtaaacttcctaatgattagcactaaataattgaatatgaaatgctttattaatcaaataagtgcacttgaacacttaaaatcatttctttatggtgagtaaattaaaagagatctattaattttttaaaaaaatatgcctgcagaatatttactttatgttatttgattaaaacatattatttaaaaaaaaaaaaaaaaaaaaaaaaaaaaaaaaaaaaaaaaa

SEQ ID NO: 10743 - DNA, 649 bp, Canis familiaris
ttattgaataatttccccagagagccctcgtttttataaccctggccaaatccccttaatatcactggctccatattaaaaaatgaaagctagatactggaaacttaactgcaatgtggatctttttcccacatgatttataatacataaagccgaatatgcagtttaaataattgcctacactaaaaaaatattttgcctgccaattttcagaattcttttttgaaggtttctgttgatgttaactgagctattgcagatattttaatttccctaaacgtaaaatttggagtaaatatatatatatattcttgacatatatgtgtgtgtgtgtgtgtatatatatatatatatatatatacacatatatatgtcaacaattcagtaaagcttttgtttaattttcagaaggaatcaaataaaacaagtatccatcttctgtagttcgtagggtgttaggtcctttaacgtaaagtcaaacttcaaattccatctagctctgtgttaatccctgttattactggtaaagcttcatttgaatatgtaaattcagtttaggctatgtaaaatttttgctaatgtcatcattctgaaaaaaataaatttacaaatacattcaaaaaaaaaaaaaaaaaaaaaaaaaaaaaaa

SEQ ID NO: 10744 - DNA, 549 bp, Canis familiaris
  misc_feature (34)..(34): n comprises a, c, g, or t, or includes no nucleotide
tttcctcctggtgagcaactgcccagtgaccagnggagatgggtgctgagacttccacggggcaggctgggccacctgcaggagcgcctcctgagccccgggaggaggtgggccagcctgcacacctggccagaggtgtcggagagccagggccgtgttctgactgagcagggtctcagcctccttggtcactgaccctctgtttccctttccacgggcctccgggcaagcccacacgctgccagcccacgcgctgccagcctctgagcctccactcacgctcccttcctcctccttctccacctcttcacctctgccggggctcagcctgccccacccccgagggagctaggactttccccgtcttccctgccccctgtgtcttccaccctgggccttcctcccttgcagggctcaggggggctgtgcttcacccccatcctgctgcccccgcattgctcagctcggctgggatcctttgcagccacctgttcccggcacccaggagaagccaataaacctttgtgaaacgaaaaaaaaaaaaaaaaa

SEQ ID NO: 10745 - DNA, 609 bp, Canis familiaris
ctgtgactgtgcagatttccacatgtacctgagtcgctggtgactccattcgagtggaaggaggtacctgggcggtgtacgaaaggcccaactttgctggctacatgtacatcctacctcggggcgagtaccccgagtaccagcactggatgggcctcaacgaccgcctcagctcctgccgagctgttcacctgtctagtggaggccaatataagattcagatctttgagaagggagattttaatggtcaaatgtacgaaaccaccgaagattgcccttccatcatggagcagtttcacatgcgagaggtccactccagtaaggtgctggatggtgtctggattttctacgagctaccccactaccgtggcaggcagtacctcctggacaagaaggagtaccggaagcccattgattggggtgcagcttccccagctgtgcagtctttccgccgcattgtggagtaatgatttggatggggccatgggcttctccctgggggccacatgctggctggccttgtcatacaaataggcatcataaataaaacaattggcatgcaaaaaaaaaaaaaaaaaaaaaaaaaaaaaaaaaaaaaaaaaaaaaaaa

SEQ ID NO: 10746 - DNA, 675 bp, Canis familiaris
tttcaagatatccagttccgttcctatattatagatgagcaacctgtgatcataaaccaggcctgtctctgtatctacttgattttaacatgttatgcctaaatacttctgttccctctttgctgctgtttaattttttcactctaactgatagaagctattgttcttgtggctgaccatcagttaacatgaggaactttccttacctggttgaagtatgggacaagtaggctgtgagcttcttgccaaagctcaatagcatacttgtaatcttacctatgtatcagctgttcaaggactcggtcaagtagcccatccactgcagacagttgaaagtctagaggaaatttccagacatcctcagtgtgttgccatgtgtttttttttaatggcactcttcataaaatggcttcttccatgctcactctactgccgaagggatagctatgggatggccaggcctgttctaatgacctttgggctttcatccttgtaaagaagtgtccagagcttttggtaacaatttgtaatcacatgagtgagccccagaaaaggaaagtcgcataatatcgaaatcagaaaaaaagtaatacggccaaaggtaaacgcatttttcctgttgaaaatatttgacagagtccttacatttgattgtcctcattcaacaaaaaaaaa

SEQ ID NO: 10747 - DNA, 213 bp, Canis familiaris
cccccccccccccccgccggggagaccagagcgccgccgggaggcgaacccgtgaacccgcaacgaccacggtcgccttggccgggccgcgagggccgagagccggagacgagggattggaaacgaactcttccctggaataatcttgacgattaaaactgatacgtttacttttttgtagcgaaaaaaaaaaaaaaaaaaaaaaaaaaaaaa

SEQ ID NO: 10748 - DNA, 446 bp, Canis familiaris
gtcaagatcatgtgaagaaaacagtgaccattgaaaatcaccctcatctcccaccgcctcctatgtgttcagttcacccatgcaggcatgctgaggtgatgaagaaaatcattgagactgttgcagaaggagggggagaacttggtgttcatatgtatcttctaattttcttgaagtttgtacaagctgtcattccaacaatagaatatgactacacaagacacttcacaatgtaacgaagagagcatagaatctatcctaattattgtttctgatttttaaagaattaacccatagatgtgaccattgaccatattcaccgatatgtacaatttctctaataaagggacttatatgtttatgcatcaaataaaaaaagttccactaccagccttatttgtttaataaaaatgagtgtaaagaaaaaaaaaaaaaaaaaaaaaaaa

SEQ ID NO: 10749 - DNA, 638 bp, Canis familiaris
tgtgccagggggcgattttcagcgaaccacaacggcaccgggggcaagtccatctacgggaagaagttcgatgatgagaactttatccgtcaaacacacgggaccaggcctgctctccatggccaactctggccccaacaccaatggctcccagttcttcctgacgtgtgacaagacggattggctggatggcaagcacgtggtgtttggggaggtcacggaaggcctggatgtcctgcggcagatcgaggcccagggcagcaaggacgggaaaccgaagcagaaggtgatcatcgccgactgcggggagtacgtgtgagtctgcacgccccgtgtctgcaccgccctgcgtcccggagcggtcaccccgtctcggggcatcggtcccctctgggcaagcagggctttgtgtcccggctcctggggtctgcttggagcagctcttgtgccgaggtggcccgggcttcctctggctctctccctggggcggccgggggccgggagggcagaggcgctgcgtcttccaggcctctgctgccacggctgctcctgggcccacccgtgtagctcccggacgtcgcttctgctaaaataaatcctagttcttgtaaaaaaaaaaaaaaaaaaaaaaaaaaaaa

SEQ ID NO: 10750 - DNA, 636 bp, Canis familiaris
taataagtgagaaaggtacataactgttgtacatgcttgactgtgaccaatttagacatcctcgttctgcacatacagttactccagcagattgtcctgtcatagctattgacagctttaggcatatgtatgtttttggagacttcagggatgtattaattcctggaaagctaaagcaattcgtatttgacttacattctgggaaactgcacagagaattccatcatggtcctgacccaactgatatagccccaggacagcaagtccaagatgtagcaagcagtccacctgagagctccttccagaaattagcacccagcgaatataggtatactttattgagggatcgagatgagctttaaaaacttgaaaaaccatttgcaagcctttcaaacagcagcatcaacttacgtggtggaaatagtaaacctatattttcataattctatgtgtatttttattttgaataaactgaaagaagttttgggtttttaatttgtttttcctccccctgactcaaaatgcattgtcatttaatatagcctctttttaaaaacctgttagggataaaaaaaataaaaataaaaatcagaggcctatctttgctttaaaaaaaaaaaaaaaaaaaaaaaaaaa

SEQ ID NO: 10751 - DNA, 702 bp, Canis familiaris
cctgaccttgcctgaatttttaaaagttataattgtctgaagtttgctcagagaatgctgctggattagtgccctgttgctgtaggcgtgcgggtccaaagtgctgagcattctaatgctgccttcctcctgcagtcccagagcccttcggaggggccatcatcattggacaggaatcaatcacctatcacaatggtgacaaatacctggcaattgctcctcctatcatcaaggtgagcagtggtcttttacttttccctcctctgtttttcacccttgttcttaccctgcttctctctttctcctcatttgtcaaagggacgcttaaagatgtctgtcatagtgtttgctgtgtgaaagatactgtggtggtcattgggaatacaagagattggcctggttttgcttactgatagcttgctagctaactatgagaaagaagtagtaatgaaagtaggtttaccctttccgttgactggggcaactttttaagaaggaggggagaattttgcaaattttgttcaatgttttcagagctcaagtcatgtgcagataatgtagcgataagttatatagacataaaaaattagttataaaagtcttaaactttaacgtttcaagttttaagaattaataaaaagattaagttaaagcctaagtaacaaaatctatggtaacattaacagtgggaggtaaaaaaaa

SEQ ID NO: 10752 - DNA, 587 bp, Canis familiaris
caagtcacttggtatattttgttaccttgtctggattttcccttgcactttaccctgtttctgtttccccagggccgtacagcacggggctccggggcagtgtgtcctggcttggcttcccttccccgcgtgctcaggagtccgtggccaggactcgcccattcttatttattttgtctgtttgactttccagtagcttgaggggaaggctgattttcaggagaggtgataaggggaccgagggggctggtgccttaggccctggtggtcagggaggagcgggagcatgtgagggatgtaaagtgacctcctggcaccaggttcacccacccttggccccctgcccccagcactgaagcccagcactgccccgaggccccctccactcctcctgcagcttggttcataccacacagactctgcttggaccctcctgtacgtctgcctcccatctgccctcctacccgacctctatcccctcaggccacctagcctgcatatgtgttcacttttatttaaataaacttgtgtggtaaaagtcaaaaaaaaaaaaaaaaaaaaaaaaaaaaaaaaaaaaaaaaaaaaaa

SEQ ID NO: 10753 - DNA, 651 bp, Canis familiaris
attgcgtcatctggaagaccatcatcccccggatctctcagtgcactccccaaggtggaccttccccaggaccagctgacagccgtcactgggcggattcaggagtccggcacggaggtggtgaaagccaaagctggagcaggctctgccaccctgtccatggcatacgctggagctcggtttgtcttctcccttgtggatgcaatgaatgggaaggaaggagttgtcgaatgttcctttgttaaatcccaggaagcagactgtgcctatttctccacaccattactgctggggaaaaagggcatcgagaagaatctaggcattggcaagatctccccttttgaagagaagatgatagcagaagccatccccgagctgaaggcctccatcaaaaagggagaggagtttgtgaagaacatgaaatgaaagggcagccagctagcagtccgtttccctaacttatgaaggcatcatgtccctgcaaagccatctcctgccctcatgtttccgttgtgttaaccaccagagtcatgttaacgtcaccgccccttccaatcgcaagtccgtcaatgtgtgcttcaataaaagcaggcttccattttcttttaaaaaaaaaaaaaaaaaaaaaaaaaaaaaaaaaaaaaaaaaaaa

SEQ ID NO: 10754 - DNA, 591 bp, Canis familiaris
tcagacctcctggggccctgggtgcccaggcagatgaagcaggctcagcgcccagccctcaccggagcgggagccagagagacagccgtccccccttgagccacgccccggtcaccctcagcctatatgctacgcctcccacccccagacgggcggcctacatccagaatgagcacagctaccaggtgggcagcgccctgctctggaaacggcgggctgaggccgcacttgatgctctggacaaggcccagcgccagctgcaggcctgcaagcggcgagagcagcgccttcggctccggctaagcaagctgcagcaggaacgggcacgggagaagcgggcgcaggctgatgcccgccagactctgaaggagcacgtgcaggactttgccatgcagctgagcagcagcatggcgtgagtgaagggctgctggccccggagcttcgggctcttcctccctcagaatccccctggaaagggacccggtttgagctgtgtccaccagacctgccagatgccataataaagtggattttaggaaaaaaaaaaaaaaaaaaaaaaaaaaaaaaaaaaaaaaaaaaaaaaaaaaaaaa

SEQ ID NO: 10755 - DNA, 542 bp, Canis familiaris
tctaggccgtatgatgtgtgtggtcctctaatatgaagttatcactcacaccaaactgagagtcctcgtttgttgactgttttagagcaaatatttttaccattcgtgctcctgtatgttctagaaaacatatgattacagatatctgttccattgttttttaatatcagtgaatggctagtaattactcgttttatcccaaatagagatttacccctgaatgccaatgatgttgaatgttttaacagtagctcttgtggaaaataccagtctttaataatcaaaaactgaactgtaaacattttccctagaatgtttcccacttgatatcacttgaactctgagggtcaactcctttcatatgattttttcctgtacatttgatgtttcttacattgtcccattctttgctgatgcattcatctctaacataaaatgagggatttagccaccatgttcctcaagttcaaaaaataaccagtgacaataaattgacttttcttgaggcaactgtgaaaaaaaaaaaaaaaaaaaaaaaaaaa

SEQ ID NO: 10756 - DNA, 624 bp, Canis familiaris
ccacagacgaaggcccaccaaggcagactgttaggcgggcaaacagatctcttagaaaatgtaccagctgctttgaaggctgaagattgtttttgtataatattgtacagtattcagacattttaaaacagatctttactaaacagattaatgagttaaccagcaggttctcttttctttgggctctttttctttctgttgcatatttgattattttcttgtcccaagtagagaatagtactgcaaaaagggaccacatttttcaggtattttgaaatattaaaaaacagaacaaaatctagaaaattcctagatctccactcatggatacccattttcccttttatttaaaaaaagaaaaagaacaatacacctctttatagatgctgtctaatcttatatgcatctaatggaaggaaaataccagttgcactgagacttgtaatggtggtgatattagtggcattatctataaatacactcacctaggttgaaaagctaagaaggaaatgtaaatataatatatatttatatttgatgtaatatggacatcttcagattctaataaacacaggaatactgctgataaaaaaaaaaaaaaaaaaaaaaaaaaaaaaaaaaaaa

SEQ ID NO: 10757 - DNA, 646 bp, Canis familiaris
aaagcttgagggtggatggtttgcatttctgttttaaataaacatttaaactctcagtcagtgctatgcctgcgcatggaccttagtcactgggatgaaacacccagattctaggccttcatgaatctttgattcaatgagtctttatctaaataaataaaagaccttgtaacagaaacaacacaaggaacatttgcacaaataatctttgctttcttccagtttctttttcttgctcacagtatcatttctgctgctacaactttttctccccagacttctcaaatatagtgcttaaaatgcagagggaaggaaaaaaatgagccactgaaagaggaaggaaggatcatttcttgtactcacctcctgaatcacagtggactttttcaagtgataatgtgtgtctacgtttacaaaattgttttccctcaaagaaggtgaactgtatttggtctccctggcattgcacagccaagttatcacttctcttggctgagcatttcactaaagtttaaagcaaaagtggccttaaactcacatttcatttgatttgccatatatttggaaaccttcataatagaaacaacagctctggagtgaggatgtattataaataaattctttcaaatgagtaaaaaaaaaaaaa

SEQ ID NO: 10758 - DNA, 633 bp, Canis familiaris
acgtgtcttggggtctctgccccctatgtggtttttagtgggcttaacttaaacatgtagtttttcctccactccctaaaaagccttgtcttcctggttttgttttgtgtttttttttttttttttaacctataaattttcaggagtttgtattacggctcaaagaaagagaaagttggacttctcagtgtttttattttggtttttaaaaaaataccaagcctgcagttgatcagcaaaaaaacaaacaaaaaaatcttttctgaagatggaatgaaaaatgccttggcgcgaaggctgcttgtgtccccagcgccaagttcccacgagttcccgccgccgaacaagaaggcgcccggccgcctagaacaatctcttcaaggtgtgtggcttcggccccccgaagtggaacctgggcgcatctccctgacggcatcctgccgcctacaagccagtggccggggtgttccctggccccgccatcgcccgccgggaaggtggcgagaagaggggccgtcctggccggcggtgtggactcctgtcccgaagccatgcacccccccctccccccgtgcgcttccgtgttgcaccccctgcacgcagggccctctgcccaggtgacggaggggggaa

SEQ ID NO: 10759 - DNA, 617 bp, Canis familiaris
agttcgtggcctctctgggctgtcccgccggcaccccctgcggagggaccagactggcaaaggtctttgagacctaggggaacacctgggttccctgggacggaccctagcctgaatccaacgttggccagtggccatgggaaaaatagagagccggcagccactggagccaagggagagagaggggccttctggaaaggccaccttggaggctctgcctcccagagagaaccatttcctgtccctgcctgcctctcctcacagacctcactcaccactggatggtgggtccagacctggcacaatcactgtgcttgtcggactgattattatgattagcatcaactactactccaaaaattgctggccaaactttgaaaacctcaccatgttctgatgacgacgatgattcttggcgattgcacaatccttcctccaggaagtgggggaggcagctagggggccccaggaagggcttctttgttgctgggatcccctggggagtggggtcatctgtgccaactctaggcagctgctgtagcctcacccttgggcccccccattttgggtcttccatcctcaaataaactatttttgcttgtaaaaaaaaaaaaaaa

SEQ ID NO: 10760 - DNA, 343 bp, Canis familiaris
gatagtaattggaatagcatttggactggcggttattgagatacttggtctggtattttctatggtcctgtactgccagattggaaacaaatgaatctgtggatgtgtcgagctctcatccatcaagcccctttaacattttgctttcgttttgtaactttaaatatacaaatactgtacatgttaggagcagctgtcttactaaaatgtctcatttagctacatcacagatatcttccagacatattgaacatatttaagatttgagtgacactaggaaaatgatatgaatgcgatttttacttaaaataaaagtaacattgtttaaaaaaaaaaaaaaaaa

SEQ ID NO: 10761 - DNA, 653 bp, Canis familiaris
caccgcgtgtaggtgcagcacgcagccaggtggtctacgtggtggcgcagagagcccccgccgccccacacgccggcgccccgcccacccacgtagtgccgtggtccgcggccaccgggcttggccccaacaacaggtcccggccgaggcggggctggcgagcagggctgcctccatcaaggagcatcacaaagtgagatctatggaaaacactgctgcaggtgcccaaccggtggcactgccaagagagcgaggctggagagagagagagcgagagcgcgcgcgagagtacccgtgtgtggaagtgagagcctggtgcccttgcaagaggcagctgtgtatggtggcgcccagtcccccctccctaaaagggcaatgtgttccctgtgtggcggcagtggggccacaggggggctccagggccaaaaactctgatctattgcttacaaagatacttagtagaatctcattaggtttcagtaagcccaacagcctcagcaaggtcttgctctgtggttgcagttcggaaccttggctggggcttgctctgttcttaggggccgcctgcaggtgctgaggtcaaaagatttatctcattttcaaaggttaatttgagcaccaggttgggttttttttttttttttttttttttt

SEQ ID NO: 10762 - DNA, 603 bp, Canis familiaris
accaggccccctcctgtgaggttaccgcagctttacacctgcgaataacaagcaactggtccctgtccggagacaagcacatgggctgccctgggctgtggggcctggacagcccgcgaaatcctcagaagacttgcctcggcccacaggcctgatctcggcctaccactgagtggcggccccgccatggccccccggccttgcacagtacccgttgtggcccccctcgcgcccaccctgcccaccactggcccctccgcacagcaaagtggctgggtagggttgctggcaccccggggtgccctgaggctctccgggcacgatgccctagaactcgaccagtaggatgtgcagggggaggggcgtgggcaagaaccccagctgatacagaacagagttgaaagaatttagattggtttgcaatttaacaagatacaaattttgtgttgtacaataaattcccaaaagagaaaatgtaaatcaatctctctatgccatgtgcactgaaaatgaaaattctaagagttttataattttgttacaagattcaaataacaaaaaacaccagcagtttttttttaatttcctcacgatagttttttt

SEQ ID NO: 10763 - DNA, 588 bp, Canis familiaris
cggaccagtcccggttgttcctccagctcccaagggtgcgcaggtgccgttcgggcccctcctccggaatacgtggactacgtagggccggtgctgccgccactcactggggtgctttcggcaacggtccccgtgcttctcccggttcctccgcggcttgtgccagcccgtggccgtcagaggggccagcagttgcaccagggccagtggagtacgtgccggacccggcagcaggagcagtgtgcatggccagggtcgtgtagtcggcagcagtggacttgccttggatccaggaggactatccactgtaactcaggcccgtccaggtggtgcctccagcaacaaggcctcccctgttggtggtgctggacccggcgcaggcacacgtgaactacgttgggcctgtgcagcctccagccactgaggggcctctaggcacggcccccgtgctgctgaacgagtaggcagctgctcttaagttgccaccccaccccaaacgaagagcagaaacagataaaagagaaaaactattaaacaactagttaaaataaagattatttggtattgaattcaaattttttttttttt

SEQ ID NO: 10764 - DNA, 246 bp, Canis familiaris
cccagagggggacggcccggggccgggggcagcggaggtcgtggctgcgtggctctcggtgccgcgccagactctggtcccgggttctcaggtgcccctgagggcccttgagcgagcgatgcctcgactcgggggtcgcccggagcagccccgtctcccgactctgcagcgtccttgggtcgagcggaaccgtggtccctctgtcgcctctcggcgtggcctgcgcgccccctgcgccgtctctca

SEQ ID NO: 10765 - DNA, 667 bp, Canis familiaris
agtggttccattctggtcaggatgtggcaaaaaactgctaatcagataagagcaccagccttgttagaggcttgtactcctaatgtttagggttatctaagtttgcctaatgtcaacatggagtagcttgctacattgtgtgtggaattactctcatatgtggctaagaggatactgaaaaccaagaagcattaagaaatttacgttaaatatccttagaatttttaattaaggtagaatgcaagttgaggaatttgtaagaaaggtgtgaagaatattaggaaaagcagatttttgagaagcggtttagaagcagttttgctaggagcaggattctgaacttcttaccgaggcagcactaacaagccatcaaaatcacacccaacatttgctggaatgctaagttggaggataggttttgccagctagcgagaactgaacaaagaaacaacaccaacccaaaccccaagggcccccccaacccaccaacgcacgcacttccacaaaagaactgatagagattcaagttgcattaaagatcatcaggtatacagtcaggtgcctctgtatctgttacagataagaacaatcagtttctctgctaggttaattctaatttcaatttattttctttttttttttttttttttttttttttttttttttt

SEQ ID NO: 10766 - DNA, 287 bp, Canis familiaris
atatatatatatatattacacccaacctaattaacaataacctgaactaaaagaaatttaggaggtaaatagctttagtatggtaataattttataacttgcttttctcctctttaacatcctcaatgtttatgcatgagaactctaaaggagttcgaatatcctgtctaaacaaatagctagagctaagtttaggttgttaggtatgttaaaagatttttatgtaggagagagagtaaatattatttttgataatcgtattttttttttttttttttttttttttt

SEQ ID NO: 10767 - DNA, 704 bp, Canis familiaris
gttggttccgagagggtgtttcgaacctcctgtgcaacgcaacaacccgggtccaacctgaacggtgtcacgacttgacccctcggcccggcacgacgagcaccggcaactccccattgacacggaggccgcgccacatggacccgtggaccccccgagaagtgttttgttcctaaagctttctagacccggtacgttttgtagtgctaaaagggcgagcggtgaaaaggttatgtggtctttgtattgctttaatactcaaaaaactgcccccactcttaaaaggaaggtcccttcggggcggggttgtcgtcctactaagttagacattttatctaaagatcaggcgtaaaaccaccaggttcctttggtttatctaaagaactagtacccttggctctctgagtgtgtgtgtgtggctgtgtctctggctgtgggtgttgctggcacctagctccgggtgccagtcgagggtaacgtacccggtacacctggtacgcgcccagggcctttggctggcgcctttccacagcgcctccctgggtacccacctcagtgaaatataacatatgaaataactgaagtcccacagaagtagaactaaattggagaagcctcaaattagagtcatttggattcagattaataatttgataaatattccaaattttttttttttttttttttttttttttttttttttt

SEQ ID NO: 10768 - DNA, 641 bp, Canis familiaris
cccgcgcaccttcaacggccaggaacccgaatctcgccgggcggtcctccctctgcccgccgccgcgggccgccaccgcctgtcagtccgcctggccagctgcgcggagcctggtgtctgtcccacgccgaggcagccgccgccgccgccgccgcagtcgcccccctccgagcgcctcctcctgtcagcggccacctgcgtacagtgcactgcctggttgataccgtgccggccgcggaccccggtctcagtaacctgctgcaagcctccctcccccgcggtggggccggcctgccacacgccacctgagtgtcccgaacctccccccaccaccctgtgtccacaacagcaccagcctgtaggcctcctggaccctggggagccaggctgacgggacctgactcacgaaaaccaacagagatccagagcgaaaagggctggaaccgaacacttaaagctgcagacacacagtagagagccaaaagaacttctctgattaattccccagctcacagccctgcccaacctctcatccaggtctttcgacaaaacaaaaaaacttatttagagtgttgcataattttgtttaactgacaagttttttttttttttttttttttttttttttttttttttttttt

SEQ ID NO: 10769 - DNA, 669 bp, Canis familiaris
tccctccataatctttagagagatgaagaagcttttacaggataattttagtggtaaaacagtacagatcaaagagaaatgcatccaagaacattaaattttttaattttattttgaatagaacaataatgcaatttgcaagtaaagtccagaaatttagccttttcagatcaatttagttaataaatgttagcctatttaaaggtctgaaaactatatagatatattactagaactagatctaaatgtatctatattagcaaactttagtgaaaagcacaatttactaaaggcaagcagaaatcacccaaaagatgaaaaattacattggttaaaattgacatttaaatttttattactctaaatttgcaaacacaagagcttacagtgatatagagtgtttactcttaaggctattaaagacaatgaagtataactgggcaaatgttggctaataaacagggtgaggattgagttaaattgagtacatcagcacatgtttgatatgtaggcccttggtcctaaaagatacgaaaccaggaatcatgacagtaatatcagagagagcattatatcacataacaaaaagaatatgtaagacaattctgatggaattgatattatttttttgtaatttattttttttttttttttttttttttttttttt

SEQ ID NO: 10770 - DNA, 646 bp, Canis familiaris
ggttgggatctgggcccaggcttttgcaacagcaacgcctcagccttccacagccaccacccagtcacgcaggcctggcacttcttcgaaaaattctcccttgcgcgggcctgtgtgtacggtctgtgttaccgtttcggggcctgacggcccctgtatttttacatctacgtcacgccctccttctccacctactgcgcggcctgcaactgctgccaggagactccgctgggctgagtaggcgaggcccgggccgacccagggtgctaattgtggtcggccacagaggttatcttgggggtcggcgggcgactcccctgagttgtggcagccttcggcccggccaccggggtcccggccgtgggggaaggccaagtggtcgccagctaagagcgctacggtggagttgtggggggccggccccccgttgcagtagtcccagccgccgggggcctgtcctggttcggggcaggcgggtgccctctgggcctgtcgcccttcctctgcctgcgggtcggggtcacggggtgccagggctgccccacggccacctgggtgacccaggagttgtcgcgggccgcggcggtcggcggaggctgcggggtgccaggcgcctccttctgcttgaaccccatcttggccaccg

SEQ ID NO: 10771 - DNA, 660 bp, Canis familiaris
gcaccagcggttgacaaccggttcggcagcgggccttcccagtccactacgaagagagagctcttgtgcacactttgacagaggttacgccagacagagaagcagttccagaagcctgcagcaggagtgcaccttgtgacagggccaggcccagagacccgtggacctggtccatcaagttggaagagttcagccagtccagcccacctgacagcagcaccctgtggtctcggcccaacgattccagccaccccaccgggcagccctatgtcgcaacttcaaagtctctgtccggccccagcaattcaccaatgtggtgactgacgagcgctacagcagctaccgctgcaaaggtctcaactacgccctccagctgggctgctaccagctgaactgcgctgtggcaggctacaaagactgctacgccctgacagtgctggtgggcgagcagctgctggccctggcgctgaaccgctaggcactggttgtggcccgacggttctggcagtagtgtgtctaggccctgcagcgtcaactgcacgtggacacactgcaggttgggtgccagctgctgcccttggccctgactgcttagacaccaatccacgacccggtctccctggcccacagcctcctccacccggactaccgcctgcaggc

SEQ ID NO: 10772 - DNA, 615 bp, Canis familiaris
taggagctgagagtaaattgtccgtggtcttctgaagggtgcctaacgtttgcctctcagacacttctagcaggatctacacccccaagaccaagagggcagtgactacctgcttgggagaaagatatatatggctgctatagtcttcccagttgagcaagtctactctcgtggatacacagctcaaaacgcaaacagagtgggaagaccgactctcgaagacctggcgattggaacagcttgttatgggattcccgttcagaagcttacctgaggccccctaaacattgactaccttagggtatccttgcggggaccaggcaaagacagaggtttcagtaatctccaaacctcaagcagttttggacttggccaacaaggcagtacctacagctaaagaggcagcagcaccagaggcagcagcctcctcagcagctccagcagcagccgctgcccctgccttggaagttgctttggttgtgacggtggttacggtcgtggtatagggtaaaggacacaaagtcattactcctttttgcttccttaactgccttgaaataaagagtttcttggtttatttggcaatcaacacaattttttttttttatttttttt

SEQ ID NO: 10773 - DNA, 620 bp, Canis familiaris
caggccctgccgagtggtctgtctaggtcttgacctggtgcaacattgtctaggccaacttaaccagctaggtgccagcaacacccacagccagagacacagctcccccctcccccccgacccgccgacacactgagttatttatttgtctagtccaactccctcttgtcatctggcccaagagggtggatgcagctagtttcagtgcagagggggccagtccccccctccagagactggggagggggagcagtggggaatggaaaattttgttgggcttctgagcagttggaggccgttggagcaccattactcaggactacccaggggccttgagctaaaagtccctactaaactacaaccctttggactctgcttattggtgctttgctatgtcaagttccctggacattggcccaggagacctcagtatggggtagaagccactaagctactacagatggttactctagacaaagattaacttctttgctctcggtgaggctagagtgtagttagtagcgggctcttggctcggggctgaatgatgccaacataaatgaagggtgtaggaaacaagatcaatttttttttttttttttgttttgttgttttttttt

SEQ ID NO: 10774 - DNA, 588 bp, Canis familiaris
agcaggtcttcagatcgccacggccaggagccctcgcgcggcacgcacgcgcaagcgtcacggactccgccacggccaacagccgccgccgccagccctccgagcagcagttgcagcgctaggcgctgctccacctggccgccgaggccaacgaggtgctgggcctcgagcgcgagggccccgtcgaggactccgtccccgccaaccacgactcgcgctgctaggtggtcaacgactccagggaggtcacgacccggtaccggcgcctcgagcaggtgatcttcgtggtgcgcgtcgtcaacgtccaggtggccatgcgccgacccaccccggggcgccgcccgccgtcgccaacccgaagcacgtccccaaaagtaacgtgatcacgcacaagaacggggaattgcggcgctcggtcccaggtgttaacgtgcacgtgaaagctctgtagcggggcgtgggcggactagggaatgagcgcagagcgcccacgcgcgcggtgtggtgccgacccttagcctgatttggggcctgccgcacggtgcgagtttttttttttttttttttttttttttttttttttttttt

SEQ ID NO: 10775 - DNA, 647 bp, Canis familiaris
tacatgatacatatgctagtgaggccatgagtgaaagagttggctctaagaaaaactttgaatttaaattgtaattttatatagcatataatatgtatacatgttttccaggaaagaggagctcttgaattgagaaggtactcatttattaagaagctgggatcctaaaggagattctaatcactaaacagatataaccaaaataggtttgtagaagcctaggattcatttcaaaacttaaatgaacatcaaaatagtagagttagttagcatctaaaataatttataatccttgactgatcataaaaatatcaaataattgcgtctggggtaaaatgaaattatggcacttgtgcacaattagtttctttaatcattcttaacaaatctagttttacccctcattatgagcctctgattaaacatatgtttatacatgggactaagtatgtaaaaaaattgtcttaacacctaagagactgttagtccaaacaatactaccaattctctttcaagacgagccctactaataaagattcctaagttcctatcattgatagaaagattcctgctaagagtatataacagatcaagataagcatttttagttaataagtccattatttatatgagaaccagcttttttt

SEQ ID NO: 10776 - DNA, 627 bp, Canis familiaris
tagtttgagggtggcagggcaagatcctccagtacttggtgtattcgaatctcacagctgtttgaagctggggtagcaacaaggtgttcctcactggttgggcaaaaatagttaagaataaactagctgatgcaatacaagataaaacagataaaccaactgttctcagagttttaacaactcggttggttttttttcccactgaaggctaaaaactagctgctctgtttactgtatatagatactttcttgatttttgtttgccataaagaatccatgttcacctgttgcctttttttttttgttttacttttgtcaggttttagcattaatacttgtcgaaaagattttaaccttttttaatctaattagtttgtgacaactaagcattatccttcagaaaccactatgcacatctattgagtttttttctatagttatttccttagtcctacttcaaaagtagtgcgagagatatagacagagatagagctctattgataggtctatagttagctgtggacttgggatggtaaaaatctatttagtgcaaattgcaatagaaggggaataacataccgctagttttctctacataaaataaaagcctccaataataatgtaaat

SEQ ID NO: 10777 - DNA, 592 bp, Canis familiaris
gaagagggcgcgcgagagagagagatagagagagaaagaaaaccaatcaccaatttgtctcaattgcatttggcttcaccatcccctgttacccttgtctgtttcttgcgaaatgcacaccttcgctaaaatcctccgacgacgaagctttttcctcgaggcctggcctcactagaggcctgtaggtcccgcggtgacgtattgtttaggttcaagttttcaataaaaaaaaaacaacaacacaacaactttgcgtgctaggtggtattattgttacgagagtcctgaaagcacttacacacagccagaaaggtcaaagattaataaaaaatgctgattaatttgttttttttttgaccacagagtggttataacacataaaatttataaaaatgatagatcagagatagtaactaatcctaaaagtggggtaaatatctataaaaatgtatttgtttaatttagcacaataaaaacctatctgcatttttcatcaatgacgttctgagagcccatgcaaaaccagcttcctgtgataaaaagatctgtagagcacacacaatctttttttttttttttttttttttttttt

SEQ ID NO: 10778 - DNA, 593 bp, Canis familiaris
taagaccaaggttaaagaggttggttttgttgtctgtagttgctttattttgatatgtatgttatgttttaatgctttggtctaagtacatggttccaaattttcttcaaaagcttttctcacactggacaagaatcctctattaatgtaaagttattgctgacaagcttatagaatttgtgaattgttcctggtttactgtagatgtcctataaagccaggtaaatgaaattgagaatacatgcttttaccaaccgcagacactaccagatggtaaagtgagtccaagttataaattgaagtatctaacaacagcactaagagtaaccctacagctgaatctggttaggatagtgaaagggctcaaattttgtagccagtaaatatacactacctttagttagttagatggttttcggtccaattaaaatgggtttttaatttgcagcatatgtttgaagtggaaataagaaaaagaagattccaaatcaatcagcctgttgcagattaagtggtttcctaacacagaaaatataaaatggtattaaattgattgatttatttttaaaaatacatcagattttttttttttt

SEQ ID NO: 10779 - DNA, 653 bp, Canis familiaris
gtgcttgaggagttcgaggacccgaggaccttaggccccccaggtaatgcaggtccccaggcgtgacaggtcgggtggtacaccaggagcagttggcaccccaggtcgtgtaggaacaccaggccctcttgggagtccgaggagtgtccggcccagcaggtcccccaggagcccccggagccccaggagcaccaggcccagacggcccagcaggcttgttcggagtccgcggagtgtcaggaccagcaggaccagcaggcccttacggcccagaaggagcacgaggaccagcaggtccccttggcccccgaggagtcttgggagtgtctggcgttctgggagtctgtggctatttgggactccgaggcaacacaggacaactgggaccaccaggcccacccggcacaccaggagttcttggaccaacaggtgcaacaggaccagcaggaccccgtggacccccaggcacagcaggaacaccaggctttgtcggtcacttcggacaccctggcccctaaggcccccccggaccacgaggacgctcaggagtagccggaccagaaggactcccccggcccaccaggtcctccaggaccccccggaccaccctgcggcggaaacgtcaactgcaaccagcccctgcctccactggt

SEQ ID NO: 10780 - DNA, 659 bp, Canis familiaris
gcacgcagcaaaccaaggtgtgatgctcgaagttgtaggggttccacggtattcacccagaaagatatttgcagccagtatgcaagaggacgggagagagagcacgacaatcacagttcacaaaggttacacctaccactaccaccccaggtctacccctgagctcgaccctgtgccttgagtgaattacccaacagaacggtccgctgtgtacctggcccagttggttccgggcctggccgatgggctgcttgagacacgaggggtggcagagaccttgctggccgtgccccacgggttggttggggggtgggcaggtgtgctgccagcggtgcgaggggtggggggcaacgcccgcagacagggaaatcctaatgcaaggcgcagctacagagggttcaccagggctggcgaaatgccaccacttgttgctgcccatttttttttccattactttccgtacttggcagcaaagtcctgtttgccttctgggacaaaggctaggggaggggaggggccacgaatataaaataaacccgagaagtttattgccacccaatttccaatgcacctgaccagtgtgccaagtgtgttcaagtttacccaacacattatttgacatttacagagtgttttttttttttttttttttttttttt

SEQ ID NO: 10781 - DNA, 574 bp, Canis familiaris
cagttctttcttgaccgatttacaaagctttgagtcaggtttgtaagaaaagttactaacttaagtaaactgcagctatccggtatccagtacacaacgtttctaaaacgaacaaacaaattccctaggatccttgacagttagatcacagacttgcgatacccaaattgctgcagacaaccatcagaagaatttgattaacagtagttgcagtgtcgatgtcagtttagagttgacagtggctccttttatcctcctagtgctacccatcctcaaaatgtgatcgatcaaaaaaaattttccattgtccacatgtttagttagatactgtgttagattagttttacacaatcaaattttttgaccaactaaaggggtgggtctagggttagcagctaaagaaggccacaaacaaacagtttggtccaaaccacagcaatcccaacttctagcaacttaaaatacttcgcatagaaaagataaaaacttgctctgatacttcacagcttatttgtgtagatgaaaaaaattttttttttttttttttttttttttttttttttttttttttttt

SEQ ID NO: 10782 - DNA, 683 bp, Canis familiaris
gcgcaaacgaccaccccgtcgtgggctgttaggtggctgaggtggcctagcagcaccctgtgtcgcagtggtggaggtctctaacccagctgtagtggtggtatgtcttccacatccagcctttgaaaacctacacctgctgcatattacaggttgtagaccaacccctgcagggcgagtgtgttgacaactccttcctggccgtccagacgtgtgactctgggctcttgttccaggctgaaaccctgtatgacctcttgtcccagcacgtagagtccgtgaagggctctgttgccgcagccgcctcgggttgatttaaagaaaaaaaaaccggtttgtacggccctcaggactcagaacgaaacttctgtcccaaacagaaaagctatctcctctttgtatcggtgttctaccacaacaggggcttggactccttccccttacttgccatggccaccccccgctgtggaggggccccaaactgtggacagagcgagctgccaggccacacagctccgtggtgcctcgagcctggcacagcccagcactaccaaatgttggagcctgagtcatccaggaggcaacctgggtgccatagggcaaaaagtacagtggcccagtggacacctgtctgcttatttcatacaaacaaggtcaggtttttttttttttttttttttttt

SEQ ID NO: 10783 - DNA, 685 bp, Canis familiaris
ctactagctgctggttggtagtgatcggagcttattgtataaaaggtgtgtgtctcctctgacgctattcaaaagattctgagaatattcagaacataaagataataattaagaagcagaattaaacaataatagccattaagatattcaatttcaaatactctggatagatagagatggttcttttctgatatatatgggaactgatcagacagaggaaactggctaccccggtggacaaggatacacactaggtattgggagttgaatttctaaagtcttggtgatgatattaataaagtacaataagaaccaaagaagtaggtagaggtagaaatgctacaatattgacctgagtattgaattcttgacaatgaggggaggtattttattaggtgatttgtgaactggttttacatggttgctgaattgcaaaaagtgcaagtataataattggataagcatccaaccaattgtttagtgggcattgggctgccccggaggcgctgcggaaaggcgccgccagctgccaggggcgagtaccaggtgtccctggtacgtgaaccacgacagggcacccagctaggtgccagcaacacccacagccagagacacagccacacacacagacacacacacacagaagcactagttatttatttattttacaaattttttgtttttt

SEQ ID NO: 10784 - DNA, 655 bp, Canis familiaris
gggcaacagtgcgtggctggggcagccaccgaggcggtggtcccgtgggccagcgtggtttggcttccccaactcagagttttgcagcccacgtgcttagcccaaaccaaccgagtcgggtggtgctggagtggtccgcgggcccagcacggcccccacgggtggtgcagagtccgaaccggagcagacgacagccctccagcccgccccgccagggtgtccgctgctgtgccaagccccctccaagggctactcggttcctcccgcatggtaagcccgctaacccgaggtttaagttacaagcagacgcctttgttttgacaggcacggtggaacaaaggtgccctggtagccggctagcgccttagtcacactctaaagacacaacctttgctttgcctataccgtgggcagcctcgaggagcccagagggagaagacatggactagagtaaccgaaaagcaaccacgacccaccagtggcccccgactcgcagacaaccactcccacaggccccaacttttcagaagactaaagatcagttgactttagagacccgaacacccctgtcctcaacgcataggatataagcttatttttaatcaacaatataaagctttttttttttttttttttttttttttttttttttttt

SEQ ID NO: 10785 - DNA, 131 bp, Canis familiaris
gggtgggagaggtcgtgatcttaatgtagccctagccagagatgaagcagccaggtccctctgcacttgggtcggtaggtatgtgggtactgggacaggggagaacacccaccaccccacccactaaaaat

SEQ ID NO: 10786 - DNA, 569 bp, Canis familiaris
tttccagtgttttggcagactaacagcttggaaccttagtagaagttcaggaagccgtgggcttctgctggaactccatctcagaacaagatgtcggcagcacatttttgtctttagttaggtgtttgtcttactaagttatctgttcttattgcctacccgccagccataccaagtataagctccaaaggtctacggagtagcagtccttgttaactgggaggtcgaaggccctgacagaaactttatttagttcacttccatttaattttttttttttgtttacagttgttttcaaacacacaaagcctaaacaaaaacaacaaaaaaaaaattcagtgtgaagtgaccaacctaaaccacagctctacatcaagcaatttaagagggcttttgtgttggtgttggtaagtactgtgctatgagcttatcgtaaactaactaacccccacccagccccctttgtaaaggttaaaaaaaacttctcacaatctaccgaagaggttttagacttccaaagattgttttccttttatttttaagtttttattttatttttcctagttcta

SEQ ID NO: 10787 - DNA, 146 bp, Canis familiaris
aaccggagggcataggctaccgcttgcaagctgtacctgagcgaggaggtggtcgtcttggaggggtctgtccagcaggtggtggtgtactccttgaacgtggtgctcgagctgtgagaggtctaaggagcaaacttcttgtaaag

SEQ ID NO: 10788 - DNA, 621 bp, Canis familiaris
gcttgaactagagccaggtcactgtaggcttctgccagaaagtcacctaggcctgagggtagcgacagtacgaatgcagctacaccaccaaccactaccagacgcagcaccaaaactaggacctccggcaacgcctgtggcgtcgggtgcgctaagtgactcagtaaggtgccttcaagctcctcaacttccaaggccggtggtacccaggcaaagtaataggccctgtcgggaacggctcaggccactcacctcatctccaaacagtcgtcggggtgggcggctcgaacctcaacctagtcccaccgccacccatctccgctatcttgatccctgtctacgtcctgccagtagtaccaccgccgcccatagtggccacctacttcccagtctgcgagaacatcgtccccgctgtcgtagtagccaaagtgcctgctgtcgcctggccgccttccccgggggtaggaggcggagttggagcgacaccccggcgccaggtgctcccacagccagccgctgtggccacacaggctgtacaggttgtcacagccgtctgctgctgagccccagcaagagcccccagtccaggacctggtggctccccctctgtggctcagcctg

SEQ ID NO: 10789 - DNA, 528 bp, Canis familiaris
agcagaaaaagtcacctggcttccgagagaggtgaactgacacaagcttcagcagcagaaagaacataaaacctcctcacgaaggctactaccaactggcaggaagccttgtaggcagcagctaaccagcctactcttcctgtccctgtccagggtatttcatgtcctgcgagaacagggagtttaacccctgctgccacaaaacgggctactaaggcctgcgactacctcagcacttccttacccatgccctgtgttgtggtcagcaagggtggcaaggtcctcactggtccagaccacaggggaatgggttgtgccctgtggttggcagctgttgggtcctctgttgacaggtacacaggataaataatgctgagtcacacagggatgaaggttgtagtcagttagaatcacaaaaaaaaaagtgcactatcagaaatttaaaacctataatttcccaagtcaaaattatttagcctttttttttttttttttttttttttttttttttttttttttttttttttt

SEQ ID NO: 10790 - DNA, 603 bp, Canis familiaris
gccccgtagggtatgtcctacgtggcagtggcagcactaggttcggattcccgcctaatacgggtgctacctgttgggccggccattcctgctcgtcccctaagcctgctacaaagccaggtctcacggccaggtgctccgggggttgcaggtagggttcctggtccactactggaaagcgcttgtcccaggtttttgagagagacctgtcagaggtgtgaggtgcctagtccttggtccaggctggcagatacctaggccactgcttcgagttgcagttagtgctcaaccagttctccaccgtcaaccaggtctcctacttgttcttccaggtcttggcacagggcctgatgaggggccgggccgcgggagccgggaggggcagtgcatgctgagggccacgtgagtgcccccacactggccaaagatgggttcaaaaaaaatattgcttgtagaaaaattttgatacagagagaaaccccactaggagtagagtggcgggttctgagagaaaatccactgcctcactgagagaaaagctatcagattaaatataagcccaaggttctctaggagcctataaatgcatcatttttgcacaac

SEQ ID NO: 10791 - DNA, 591 bp, Canis familiaris
  misc_feature (373)..(373): n comprises a, c, g, or t, or includes no nucleotide
aaaactcgctgtaccaccgtgacttggtccgtgtcgtaaacccctacgagaaggaagggttcttggcagtacaggtgtctctgcgcctggacccccgtacagttgccacagccaaaggcgccaccctcctcgaggccatcaacgtggccactgcctttcagcgccacttagaggtcgtggccaaagtgctgcaggagcgggcagaccggttgatcctggtgctggtgcacccgccctgccctccctgagccccctggttgtttgtcggtggcagacccagcgaccaccacatgcccgggagcttttggtgctgcctgctagtgcacacgggtcctgcagccaactcagtgcacaaaccccaacagggaaaccntggtatctcatctctccctaccctttaaccaggccaacacctggtctacgcctcagagagccaacagccgttgccaaccaacccctcccttgccccagggagtggggcacccgggcaacagggactcagcagatatattcaccccacacatccccctgggtttatttcgactcagccttagacttttttttttttttttttttttttttttttttttt

SEQ ID NO: 10792 - DNA, 627 bp, Canis familiaris
  misc_feature (158)..(158): n comprises a, c, g, or t, or includes no nucleotide
cttcaccctttacgactactgggccttgaacgaggggtccgctgttgacttcctgtccgtcaatttccggcgaatagtgtacttgtagtccttgtagaacttgggaaactgcgccaaaggggttagccacggtctaccgcaacgacgtctcccccgcncaggtgtgcgacagcggtatcaagctctggaccctgttccgctgcgtggtgaaacaggacgccggtttccagcgggtcggtctcaagctgtacttctccagctgaaacgaggccccgaggtgctgccagtgatccgcactgcgccggggcaactccttgtccatagcagcaggcagagtggggagctctgagaaatccagaactacctaccccagctttcagctgtgagtctcactcagcaagaggtcggtcctgaaccactctggcacagtcttgggaaacctgtgccgcctccaggccagccagccttgtgtgcctgggtatagctccaggctgacccagcggccccggtaggccatttaccatcaccccgaggttgcctttgccagctctgagaactcccctcaaccctcaccagacaaacaaataccttttcttagtttatttgttcatcctacctgcttttttt

SEQ ID NO: 10793 - DNA, 603 bp, Canis familiaris
actaggagtctaatggtaccagacttctggtgggttgtgaatgcgctgacttggcagtaaagggcttttacgaaaagtcattaccagagagctcctgttgatggtgtttttaagccccatgccgttgtgaagtgtttctaaggcgaaattaaggaaggggactttattgttgtggtgagtctctacttgccttctgatgtagtagtcagttgttaacctggggttactctctaaaggtaggtgaaggttaaagcactaatcttccatggggatataaaactttgcttatcagggtttaattaaactctgcactaatccaatgaggatgcagattggaataacactaaaaaaggagtagttttaaattccacatgagcattttatgggacatcttatttagatttttaaggctattagaatgtaacttacatctaaaatgctgtttaattactaaccctttattagacattaaatatctactgatctggaaagtttagtttcataaagcatgttcctgccagaacagatgctctcgatactttccataaactttatttgtaaaacaacaatcaaagtttttttttttttttttttttttttttt

SEQ ID NO: 10794 - DNA, 476 bp, Canis familiaris
cctggtacaaccaccgaggcacgcagacacggccgcagacccacacctgcgagaccgacactaccacccacaccacaacactctacaccctgacagggaccagcagaacagaggcgcggggccacagcactgccccatccctggcttgccccggggctgtagggctgcagcccccttgccaggtctgaccaggtggtggactgctggaggtgtcgtgagctcccagctagctcaccgctcacctttggggtgctaaggccccggtttgggccctgcgcaccctcaggtgcccctgcctgcaaactacgacccccacacccctcgtgtaggcatgcacaccccacccgaacgcacaacaggccccaggataggagggggaaacattcgtactctccctgcaagtggtggggcagcaacagtggacggaagaagacaaacttaatttgtttctcagagcttatttttttgttttttgt

SEQ ID NO: 10795 - DNA, 501 bp, Canis familiaris
aaatgacaactctgctaaatacaagttcaggataaatgagatgccttgctgtttggactatgcagggtaaccaggaaagggatactagcaaacactatcaaattagtatttgcacctgttcaagttgtctactatagttattagggctacctagatctgctgatttacacaactttttccacgacataggagtggtaactgaataaacattaaatttttgcctgattgaggattgtgtcaattataaccagttagtttagagatacagtgatgagtcttccagcagttcaactgtaaaaaacagtaatatgtatacttgagctaaaagtgggatttggtattttattgagtgcacatactagtcacgcataacatttcaagctagtccaaatcatagaaaccacaaagttataacaagtttaaaatgaaggcattcctaggcaataatgtcaggccttccaaaagcacgacagatacaaagatttcttgagtatagcccaa

SEQ ID NO: 10796 - DNA, 574 bp, Canis familiaris
ggagtgacgtgaggttcctgaatccgagagagtgttacgagaacaacaaacattgagaggggacaaaaatacagttaatgatgaaggatagttgactatggtgatatgtatctcgaactcctatgtacaatagagaatggttgttcaatttagaacagattgactgaatacctgtaaaaatagaaagttaatagctaaaacctgttgtggggaatacacttgttattactatatatagctatcgatttttagggcctctgagtcaataatgatgaagaatgcagcccagcatcaatgaaagaatgtgctaaagtgctctctaaaattaaaatccattaatttttagagctgataaaactgagactataaattcataaatgtgatagtaaacctccacgtagaaaattataccatgtctacagcagattattataaaatgttttagaaaggttaaattgggtattcaagagaatcattaaagatattcccgatacagagcttagggttatatttatactcgttgaagaaagttttttttttttttttttttttttttttttttttttttttttgt

SEQ ID NO: 10797 - DNA, 334 bp, Canis familiaris
cacagcgccagaccctcttctgccagcgctccgtcggctaccgcggcgccaccaaccagggccaacgctgcacccaggccgtgcagcagcaggtcctcttcctgcagcgggcctaccctcgcggccaccagggccactgggggcagctggagcagctccagtgcctcttcgtgtaccggctctagccccagttaacctacagagtcgcacgtgaggcactgttcaccttacactacacctctctccaggtgttcttccaataagtccggcgccgctacccgccctccgccaacaccagctaccgggacatacgctgcgaggaccaccggccact

SEQ ID NO: 10798 - DNA, 620 bp, Canis familiaris
cctggaactttggcatctaaaaatgagatttttttttttttttaagggataacaactcatacccttttgtattccctgttgtttatagatactagagagtacatacacttttagagaaaacttgtgctacagtttaaaagaaagatcgagatacaagtactaaatatttgcatcatagtacctattaacttgttttaaagacaagcctaaaaattttcacttttaattgtcgaccgattaaactttgaatgtctaattttagatagagtttgttctgtcataaacagtatcacaatctatcatgtgttgaagaaaatcaagcacacaaagaaaaactaaattcaatctggagttggtcaaaggaagttcaactattatattgttcagaatttgagttttagacttgattttggtttgcccatctacctttttgtttgtcagttcttaatagcccacttcccaattttggaaaattttccagccctgtttacctccactgatacagttgaaacccacagacaccaccacattaatcgcaagactaaggaatagctcctgctaacgtgtattattttaaacaagaacagagatttttttttttttttttttttttttttttt

SEQ ID NO: 10799 - DNA, 644 bp, Canis familiaris
aaacctttgcatgtaagtattcgtgggttttctcgaacccgaacatgaaaagtgttcaaccacaaggcaccctggtggtgggtaaccaagtagaagtctctctagtgcctccaaggaggagaggttttttcattttaactaaaaaaatagaccacaacacccacacgagccaacttctatgtcaagtcaccaatttccctgtgtccagaaggttccagtaccctagtttaggaaccctgatagactggcttacaggtcaaatcggagactcctcagtgtaggcgacccacttttgtgaaccaaaaaaatgcaagaggtacaactgtaagtattaacagcctaaaactaaactaaaccagtttgactgggacggcaagagttttgaagaatttcttctagcatttagagttcagacttcccactcacatttcaaacccagaactgtgctactctagttgtcaactaagggaaaatatgaggcaaacagtaaaaggatgacctaagttgttgggtgaaagtttgaagaagatatcagaattcgtacgaccgccctagaccagccagtttatcctagtaagaaatagttttgatacaaattatttgcaggtatctgaaaggcaaggttttttttttttttttttttt

SEQ ID NO: 10800 - DNA, 658 bp, Canis familiaris
  misc_feature (172)..(172): n comprises a, c, g, or t, or includes no nucleotide
aacagcctcctttagccctgatgatttctttccctacgtatggtttgataaaaagaaaaaacagagctgcacagactaaggggccctaggtgcgcggttcaggtcaacccttgtctttaggatcctgcgaacacaatttttgtagccaattacctaaccacgtgggaggtcnaatgaagtgtagtatgctgtcagatcaccccaccggctgcaggccaacagcccagtgaagctcgaattactgtaatgccagataacacaactaacattaggcaacctgtaactaaggcgaatgggttgccaaaatgttacaactcgagactacgacgtttaagtttctcagtgaagaacagcagtaggaaaaggtgtatcaacctacaaaaattgggaaagcaacagacattaacaggctggtccactccctttgtacgggccacgatccttcgactgtctcgtagacgccgagaagagcgaacagataaatttgataagagaaaagcaacggtttctccatcactcaaagcatatgcctagcttctagttcgctgtaatctcagtaacatcaagaatcgtttaaggtgtttgataaattattttccagaattaaaaatatcagtcttatttttagaaacatctgtataattagaattcttgtctt

SEQ ID NO: 10801 - DNA, 660 bp, Canis familiaris
  misc_feature (7)..(7): n comprises a, c, g, or t, or includes no nucleotide
gataacnagtcacgggtagctctacgtgctggtcaactggttggggtccttgaccatgcagagttagtagaggtaaaccttgtataagtgctctgctggcagaagtgtaccagttgtctgcccgcgtttactgctagcgcgaccgcaacaaacccatcttaatactacgccttttggtgtggtcagatctcatgtgtgaagcggcccgatgcccacctctagtttacaacacggtcttgcaggaatggccactgggttgccacaagggtttcatcacactcccctcccaggctgtgatgtgagtggatgggtctctgattggcccagctccgtgactgcctgccttcagctaatcactttcagagcagctcaaaaagaaaccacgaaaagatggagtgtactaacccagtttctggtttggctgcagtctaaataagttatcctagagcatgtcttaatctctagagaagatactaaaactaatgtgacatgtttacctctgtgtttttgttacaagggggccaacctacaccaccctaacaagatcatcctgacactatctaacctgtgtcacacaggttcctaacacccctccccctcccacacccctcttttgattttggcttagcagtggtttttttttttttttttttttttttt

SEQ ID NO: 10802 - DNA, 530 bp, Canis familiaris
aagcacgcacagccggcttcccaccgttctccgcagccaccctgtttggaacaccacgggttgcaggcggaagagagtcggcttcgacttgttgctactgttgtagcccaaagtcggagaagccgcctcttcggtagaggcctaatgacctacaagaagcacacgcgggcgagatccgcagagaacactgacgcctccggtagtgcagaccagaagcctagagcacgcacatctccaagagagaaccctaggccgcctccagcccagcctgctcgtgtcccttctagagagctcaatcggcacacaatcttccgacagggacaccaaaaaaggtggcagggggtcggtggtctgtaatcgggcaaacacgctcgccctcagggtcccgaacaagagagtccaggtgctgttgactctaggagagacaaaactagtctggtaacacccccctcccgcctccccgcattttgcttagataaaagatattctgaaagtgcaaagagttcggacaaggtagacgaaagcacggg

SEQ ID NO: 10803 - DNA, 684 bp, Canis familiaris
ctcccgagacccccaggtcccgcctcaagatgtttgcaaaggaagttgaagttggtgttcccaggggccccaacgcatgaaccgtggccggcatgaggtaggggcactggtgcgagcctgcaaagccaatggtgtcactgacctactggttgtccatgagcatcgaggcacacctgtggggttcattgtcagccacctgcccttcggccccactgcttacttcaccctgtgcaatgtggtcatgcggcatgacatccctgacctgggcaccatgtcagaggccaagcctcacctcatcatgcatggcttctcctctcgcctaggcaagcgggtctctgacatactccgttacctgtttcctgtgcccaaagatgacagccacccgggtcataactttcgcgaaccaagatgactatatctccttccggcaccacgtgtataagaagaccaaccatcgcaatgtggagctgactgaggttggacctcgctttgaactaaagttgtatatgatccgcctgggcacgctggaacaggaggccacagcagatgtggagtggcgctggcatccgtataccaacactgcacgcaagagggtctttctgagtgctgagtgaacccaccccccaggaggtggggaggggttggaataaagtccatgtgccacaccaaaaaaaaaaaaaaaaa

SEQ ID NO: 10804 - DNA, 653 bp, Canis familiaris
  misc_feature (131)..(131): n comprises a, c, g, or t, or includes no nucleotide
cagcatggcctcagccacctctcgttacaatcgaggaagcagcagaccacacagcagctgatcatggagcaacaggatcaacagctggaatggtgtctgggagcatccgggttctgaaacacatgtccgcncgtgttggggaggagctggatgagcaggcatgctggatgccttcgttcacgagatggaccacacccagtcccggatggatggggtcctcaggaagatggccaaagtatcccacatgacgagtgaccgccgacagtggtgtgccatcgtggtgctgctgggggtgcttcttctggttctcatcctgctcttctctctctgaccgtgggccccacccccaccccacccaacccaggatgctggtccctgtagccgggagagctgacaaggccctgccccctggtaggagttccttcctggggaactgccccaaggttcttagccagagccagtgggacccacagggccctgggccagagcccacaccactgggcctgtctcaagtgcgcttaggaggtggtagaggtaggggagcctcacactcctccctgtttctactctggtgccccaaagtcatttgcttctgtgccttctacaagtgccaacttggaaataaaatcccagtcttttttaaaaaaaaaaaa

SEQ ID NO: 10805 - DNA, 691 bp, Canis familiaris
  misc_feature (2)..(2): n comprises a, c, g, or t, or includes no nucleotide
  misc_feature (41)..(41): n comprises a, c, g, or t, or includes no nucleotide
  misc_feature (62)..(62): n comprises a, c, g, or t, or includes no nucleotide
  misc_feature (117)..(117): n comprises a, c, g, or t, or includes no nucleotide
cngtgtacagccagttctctgagcctggggatactggtgcntctgccccgcagctcggcccncaggaaggtgtatgacacgcgggacgatgaccgttcaccaggcctgcatgggganctgtgatgaagacaaagtaccgtcgccggcctgccctggggtggctggcccagctgctcaggtacacagggtcaggtggggccaaatgccaggaaggagggaggagaggaagtgagagccagaggccctgggcatggtgattgcatgataagaggggcttctctgggtaatggtagtatctggtgttgggctgtgcagagaggcctcagctcagctttagaagtcccaggtctgctcccctgtggagctatttcctcacctactgggtatctgaggcttgagtcttgggctctttgaggtcccttcctgctctgacaccacctgaccctagtggctaccaagcctgacacattttagtttccagagcagttttggctcagctggtttgagctgcatggtcccctgtgtaacaagcaagtacaggggtgaccctgcacacttgaaggaacaagactcagtaatggtggccctctgggccagaagatgagagcgagtgttaatatctggggttcctctgcaggacaaggagtcatcagggattgggaacctgacctgactttcccctcatcccccc

SEQ ID NO: 10806 - DNA, 685 bp, Canis familiaris
aactccaaccccatcccccaggaaaaggggggaaaattctctgaatgttggcgttttgctgcttgggaaatgtgctttctctgccccctgctggtgatccctgcgctctgcagcgaggatctctgctcctcagacctcagcgcggaccctgctagaaccctgccccgcccctagagctgactcacttctgcgggattacgctaaatacaaaagagcgcgatccgcttgcatttcctttctgagctagctagctatttggggcagctgcagtgttggccactgttgtaagttctcttttatccttgtgtctctctgtaaatatgcgtctgtcaacatattacagtttgtgtttaaagaaggcataatttggtgaacagagccaagaactgaatttctgctcttaaaatcatttgctttgagaccttagagtggtgtcttttccttgtaaaaccctaatgatgatttctgccttggccctctcttgaagcgatgtcacgggcatggatgaaggatctttaaagggctttaagcgcctgcgggaaagatgccggagaaatacaaggcactgttgttataaccgtgatgtccttgctgttactactcaaatcacccacaaatttcccaagagactgagctggctgtcaaataaaagatagtaaaattgacctgagaaaaaaaaaaaaaa

SEQ ID NO: 10807 - DNA, 616 bp, Canis familiaris
gttcatgtgtctggtcgttaaagggaaaaaatttctctaaagtctcactctgtcaggtggacatcatataatttgagagtttatctgttatcaccccaattctttaaacttgttctcagcttcaacaaacctggtttgctgggcctcggagatagccatgggagaaatggagacaccccaagcccagggaagggctctgaccagaggaactggccactcaagatcaacgttgcttattttcctcagggctaggctccaccaacctgggataggagatggtggaatcctctttgcctttcttagatctgagtagactgggaaaggaaagctctctggctcctggtggatcctggggtcctaaagccactcacccagtcccaataagcacttggacccatctatagttgccacttcctctgctccttcctcactgttttcagccatcccagagcttcacccaagggacctctcatctgccctggtttttagtctttttctccaggtgtgaatctttttctccagcctttgttctgagttggaagagatgttacaaaacaagagctggaatgtggggggaataaaagtttttgttttgccaaaaaaaaaaaaaaaaaaa

SEQ ID NO: 10808 - DNA, 620 bp, Canis familiaris
caagttatttaggtaagacatagtaacaccacattaagagcaaatgtaagaaagcgaggatacacaggtgctaatcagagacatcattccctaagtggaccaaattgttaacgtgaaataagcaggttgttgcactctgtgtataggtatagtactgttcctacttatgtaccaaaaggttatgtgtttacctgtttctctgtgtgatgtgtgtatgaatgtggaaaggctttatatatacttggtatgtgaatagacttggttcgaaaaaatatagaagacaactttatagtggttgtcatgagcacaggagtaccagaatgggggctgggatgggagggagacctcctttttattgtatactgtttgaatttttaaataacgtacatgtattatttgtcacacattcaaatcttttttaatatgcacacatcagcactgattaaaattttcacctgagatcgctccatggtgttgtgtgatgaagtaaaagtatgcctattatgaagggtaatgagtctgaagatatggtattaaatgatactgaattcacaaagacttttcctataaaacacatatctttttattaaaataatgaattgcgaactataaaacaaaaa

SEQ ID NO: 10809 - DNA, 630 bp, Canis familiaris
gcgcaagtactccaatcgaggacactctgcactgtggcactgccgtactgtctgggagcacttcgataaggcatggctgctccctgtggtacgctgagtaccgcttccctgaggagctcactcagaccttcatgagtcgtccacctcatcactggtgagaagagggtcggaccgagggagggggagggccaaggcagtgggtgctgtgattctgaaggctgtacccactgtgattctgttctcccttggccctgtcaggaatgttccaacggttggacaagctgaggaagaatgcctttgccagtgtcatcctctttggaaccaacaacagcagctccatttctggagtctgggtcttccgaggccaggagcttgcctttccgctgagtccagattggcaggtggactacgagtcctatacgtggcggaaactggatcctggcagcgaggagacccagacgctggttcgagagtacttttcctgggagggggccttccagcatgtgggcaaaaccttcaatcagggcaagatcttcaagtaaacatctcttgtcatcatcgcctagctgcctgtacctgcccttcagggagatgggggtcattaaaggaaactgaacattgaaaaaaaaa

SEQ ID NO: 10810 - DNA, 692 bp, Canis familiaris
  misc_feature (6)..(6): n comprises a, c, g, or t, or includes no nucleotide
  misc_feature (509)..(514): n comprises a, c, g, or t, or includes no nucleotide
  misc_feature (524)..(525): n comprises a, c, g, or t, or includes no nucleotide
  misc_feature (540)..(541): n comprises a, c, g, or t, or includes no nucleotide
gcctcnccgtgtactccatcctctgatcaggatgagcctctactccctatacgccctatcggagcccttcgagcagtagctcaaacaatctcatatgaagtaacgctagcaattattctcctatcagtcctcctaataaacgggtcatttacactatccacgctaattattacccaagaacatatatgattaatctttccggcctgacccctagccatgatatgattcatctctaccctagcagaaactaatcgagcccccttcgacttaactgaaggagaatccgaactagtctctggatttaacgtagagtatgcagcaggtccttttgccctattctttctagcagagtacgcaaatattattataataaacatcctcacaacaattctattcttcggcggcacttccaccaacccacttcataccacggactttaactttaattaaacttcaactaattaaaaacccttccttaatttaaacccattctggcctttcctatgaannnnnnttcgagcatnncataccctcgattcnncgctacgatcaattaatacacttattatgaaaaaattttctacccttaactttagccctatgcatatgacatgttgccttacccattatcaccgcaagtatcccaccccaaacataaaaaaaaaaaaaaaaaaaaaaaaaaaaaaaaaaaa

SEQ ID NO: 10811 - DNA, 694 bp, Canis familiaris
atgtacagacctgaattgcgatgtcagagaagtgtgcaggtcacaagtaaatcctctttgggtttttttttcaagcatttaaaaatgtgaaaactatgcttagttccaagagccatacagaactggtggtgggctggatttagcccagggccatggtttgctgacccaacttagaaaactgggaacaagagccacagtggtctgaacacaagcaaactagctttcatcacattcatgactgacaatcggaagctttggggcattgcaaatgtaaatataacctgtaagattcattaaaaagtaaaatgtagtttctatattgtgcaccattagtggactcttatttggcatttctttttatgtagagaatgatggattttttttaagtttattgcttatgtattcacagattattccacttttggttttcacagactgaatttagaatgatgtataaattaatatcttctgagttgtgacatcttaacaagaaatttaaccatttcttaaagcaaaagtagactgagttggtgttcgaatttatttattttgtatttattatacatagctttcttgatattgcttatggattagaagcatcagtggttctatttgaagacaaatctcctaaaaagaaaaaatatgtgttctctgaatacctgacatggaacagaatttcatgtaaaaaaaaaaa

SEQ ID NO: 10812 - DNA, 654 bp, Canis familiaris
cccactaagtacaggatgatctcatccaagagcattaattagatcatacctgcaataccctctatctaaataaagtcactgtctttagttcaagctgcttataacaaagtactaagaactggtaggcttataaacacagaaatttatttttaacaatacttctggaagctggaaatccaagatcaggatgccagcatggtcagattccttctgttgtatactcacgtggcagaaagaggatgaggcaggattctagggtctgttttacaaagatactaatcctattatgtgggctttattatcatgacctaattaccttttaaaggcaccacttttaaatcccatcacattgggggttaggatttcagcgtatgatttggttggggtaggggggccatacacattcagtccataagagtcatatccacagggactacggttaggacttggacatacctttttgagggacacaactgaatcttcgacatagagactgagtcaaaacatgattaaaaacctacttcaaatgtctttaatttccgtatgctgcctgcctgtccctgttaaagaggccaaagagggaagaatctaccagcagatggcttttacagaaaatacattggctttcattgaatagaaccaccaaaaaaaaaa

SEQ ID NO: 10813 - DNA, 651 bp, Canis familiaris
cagctggatacacctgggagaacctgctggccttgttagacagttcctgggccttttccagcacagaggtgaggctgcactgctcgaacctgtcccactccgtccccttctgcccctgcccctgcataggcacctggactcagacccatctactgttagcgctcagctccactccacctccccaagatcagtgcaccaccttcccggtgcttagagcatcccctggctgtcaacagctctgtgtccaggcttttgtctgaacaccccaaccttccactcgttccagaactcaacgtggtgggaaggactgccccagtgataatggagggtcggctgacagcatgaaagggacaagtttccttttcaacatttctaggttatggatgcccagcctcccccacctccgtccacctccacacttagttgacagggagtccccacctcctgaggccctggttctattgtaggataattctaattgttagaaattcttcctcataatgaatggaatctgctttcctgtaatttctacctattgggcctcgttctgttctctggaatgaaacagaacaaccacttaccctccttttcaaactagagaataaagatttggttttagaaaaaaaaaaaaaaaaaaaaaaaaaaaaaaaa

SEQ ID NO: 10814 - DNA, 700 bp, Canis familiaris
aatccaaccggttcaagcaccaccgttccactgatagcagcctaagatcgagagaggaaagcatcacgtcaattgccgcatttggtggtatccaaggaagctgactacgtagctcatccgcccagctccgtactgccctagagggcacggccacttgccggagtgacatctacttctgcactgggtatgaccctcccatgaagccctacggacgtcgcaatgaggtctggctggtgaaagcatgagtaacgcgctgagttagaacttcccggacgggtgtttctgtgtttccacttcctcaggggagaaggagggagcacagcttccaactgtatctctagcttaatccaactttccttcaaagccatgtactgccaattttctgaaacatgtgtattttgtccatgctctttctctcccggtgggaaataattcagccagataggcagcatccttcgaactgactgagacatttctgtggtagatgagaaaaaatccagcaaacattctctcagctctctgggtccctcagaactgatctttaaaaattattgaacctgtgtttttgttgttgagggagggaaatgcgatttgtgcgtgatccttcctctgtgattcttacgaggcctttgtctgaaaataaagatctttgacttaaaaaaaaaaaaaaaaaaaaaaaaaaaaaaaaaaaaaaaaaaaa

SEQ ID NO: 10815 - DNA, 603 bp, Canis familiaris
gcttcagagcatataactgagcgtgccccctagagcacatcagttttaaagtcattaagaacatgtgaaaggttgttgttttttttttttcaatagtgaactcatgcaagttaccaaaactgtgataaccctgtgtgtttacttactgtaaaagagtcattttcataaagaccaattcattgatttgttttgtaaagctatcattcaatatatattataaattaatataattttaagggaagcgctatattaaggaggctttagagcccaactgtttaggctacatcatcccagtgaagtatcctttcatgaaccgggcatgcaatagcttgaggtttgctaagattaaattgaggaaagtacagctactcggagcagcagcttccacaagcacaaattttacacatttgtacaattttgaaatgcactacaatatacaaattagagcaacagatttgaaatacaggcttctttacataaactgagattccgagaggttgcacaaaactcagtttcacaagggaacaagctacacttttctaaaagataatatttcaagtctccaataaacagaatcttttagtctttaaaatcctgcctttt

SEQ ID NO: 10816 - DNA, 658 bp, Canis familiaris
  misc_feature (44)..(44): n comprises a, c, g, or t, or includes no nucleotide
tgtgaaaacactagccccatgcttttctgctatgagagccggcnagacacaggcagagggagaagcaggctctgtgtggggaaccgactgctggactcaatcccaggaaccctggatgagccctgagccacaaggcagacgctctaaccactgagccacccaggcatccctcctcccaataagttttgtttgtcttttgtctctacccatagtaattttttttctgtctactgtaagaattacttttgtttatcattttgttaagagatgataaaagaacagagttggttgttctatgtacagcttcctgatttttttattacttgtaaatttgtctatttctccttgtattttctgtgaagtttgttttacatattttgaaattctcctattggatgatacatatatcttaagttgtgataactttctgttggattaatcccagaagctattatggaatttactctttatttataattgcttttttgtcttagtctattctgatattactatagtttcaccatccttcttttggttagtgcatggtttatctctttccacctgtttgtttttaacctgttttatttttaaagtgtgtctgttattaaacagcattattttaaatataaaaaaaaaaaaaaaaaaaaaaaaaaaaaaa

SEQ ID NO: 10817 - DNA, 568 bp, Canis familiaris
tagaatgagacatttttctgaactagcttttttactggggggaaaaaaaaaagttccatttgtgttggtaaggattgcattcatatttacacaatgctttgcttttcctccagccacaccagaccattaacagtacctctaagcaactatagtttgtcacaggtgtttcagctatttgaaacaagcctatgcagttttaaggaggaagataaatgagatgtgacttaagagtagtaccaggagaatgtttgtatttagcataaaaagagtttagaatagcttactggtatagtagcctctaaaactctagatgagtatggagaaatattttaagcataaatttgatcagctgtcattctctgaataagactacattcttagagtgaaaatagccaaatagagcaattacagaatgataatgctatttgtgttcattctttttagtgtcaggtcttttatcttaattgccccgaacaaaaactgtattttatttgtttgtttttgaatacagcactttaaatctaaaaaaaaaaaaaaaaaaaaaaaaaaaaaaaaaaaaaaaaaaaaa

SEQ ID NO: 10818 - DNA, 681 bp, Canis familiaris
ctcccacgcacgttttaacctcccacttgatggggatgtctatgcccttcttcatagtgaactgtattttcagctgtccgacctcttggtcccctcattttcttccgtcacttaggaaagagtggaggctccactaaaatctctgttgttatggtcttagaggctgcattactctattgtaagctttggtgtttaaattagcaacagggatggtggggcttgaattcttgttacttggaagtaggatctatcaacacgaataacacatgcacataaggcacacaactcacaagtcaggtcatctcctggcattcagttgtcatttgaaggtgaaattcctttacgtttccatcccatcggtcaaatggaaggatccaggggctcattggttctcttccactgttttcctttatgagcaggagctaacagaagtcagtgctctgtgttcaaagaaacatttctagcaaaggggagacacagttttaaaatgttaccattagggcagcccccgtggcgcagtggtttggcgccgcctgcagcctggggtgtgatcctgagactcaggatcgagtcccacatcgggctccctgcatggagcctgcttctccctctgtctgtatctctgcctccctctctctctctctctctctctctctctctctctgtcatgaataaataaat

SEQ ID NO: 10819 - DNA, 671 bp, Canis familiaris
tactattccactagcatatggggaccccacgtgtgatggtctggatcgcattgttgagcgctgcgacttgccggagatacacgtgggcgattggatgctctttgaaaacatgggtgctttacactgttgctgctgcttctactttcaatggattcccagaggccaactatctactatgtgatgtcggggccaacatggcaactgatgcagcagatccagaaccacgacttcccgcccgaagtagaggagcaagacgtcagcactctgccagtgtcctgtgcttgggagagcgggatgaaacgtccccccgctgcctgtgcttcagctagcattaacgtgtaggtgccactcctgtagctgttaacttcgagtttagcttgaattgtgggatttggggggaccgtttaacttaattactgctagttttgagatgtctgtaagtagggttggcatgaatgcaacagtatggaagactaggagatggggtcacttatctgtgttcctatggaaactatttgaatatttgttttatatggatttttattcaattttcaaacatgctactaaggagtgcccctcagctgctgagcaagcgtttgtagcttgtatgttggcagaatgggccaaagcttagtgttgtgacctgttttgaaaataaagtatcttgaaat

SEQ ID NO: 10820 - DNA, 637 bp, Canis familiaris
  misc_feature (56)..(56): n comprises a, c, g, or t, or includes no nucleotide
gatcaaatttctgaacaaaaggagagattgcagaggcagacagacttgttcaaganacacatacagtacaattcttagatgaagactttgtgttcgataaatatagagacagtaggggggaaggtgtggcctgattggatttttaatccgctttggggaagtaaccgatttcactgctgtttacttgggaagagctgatatctggaagaaacttaaaaggtgattttagtgaaggagatgccctggagcaggattctccagctttccgttgcacaaacagtgaagtgacagttcaacccagtccctatctgagttaccgacttcccaaaggactttgtagacctgtctactggggaggatgctcacaaactcatagattttcttaaactgaaaagaaatcagcaagaggatgactgattagagtgcagagttaagtccgaggtaaagaggaaaccaccttggcgtcaggaggctgctctgagctcacaacttcctgtaccccactcgggttggggtgggaggcagcgtgaaatcaatagctttttatatccatgtatattaagctggaaaaaaatggagggactttgctacttgtaaaaataaataataaatagatcttaagtataggaaaaaaaaa

SEQ ID NO: 10821 - DNA, 404 bp, Canis familiaris
gagagtggtaaccagggggcccttggagctaggcactgggcatcatagtctcctgcctccttcttctcagtctgggggaggggagggtgtccaggggggccctggagctgggcactggacattatggtctcctgctgcctctgctgctgcctcctcctcctcttcttcctccaccaccacctcctcctcctcctgtcctcctctgcgaagcagctggtccagatcagcacagctgtggagctagggttggaagccgggtccctagacttctatgtgaagtcccaggaaatggagaaatttctccattttttccttctctctccgaagagtgtatttttttctctctcatctttccctgctcagggagtggccctcaggtgtctgtactttctctggacaataca

SEQ ID NO: 10822 - DNA, 510 bp, Canis familiaris
ggcccattatcttctgtcttcggtcatgtaatataaggtgtttattctgtcccgtgttcacgtatgaatgtcccattgctctgtcatgctttccttgtaggtcagtcctagatgtgggctgtgcccttataaagctggggggacatttctcaccaccaaagttaagtgttcagtgggagcacgggatgtgacgttcagacccagcacgaggctgtatgaaggacatagcccagcactgggtccccatattactggggttgtgactggaacctgaagccatgctgcctctataaaacgtgactctttcaggggtacctgggtggctcaattggttaagcatctgcattcgactaaggtcattatcccagggttctgggatccagtccccaattagtctccctgcttaagtggggagtccacttgttctgtctttcaagtgaatgaataaaattttttaaaataaaaaaaaaaaaaaacaaaaaaaaaaaaaaaaaaaaaaaaaaaaaaaaa

SEQ ID NO: 10823 - DNA, 586 bp, Canis familiaris
gcgctgggctgggaggccttccaccctctgcagatctctggcttcctcatcctgctgacaggcaccgccctctacaatggtctgcaccgcccactgctcacccgcctggccagggggccggcccccggcagaagagggtgagcatcgagagactgctcggtggctcccggactcccatcaatgatgctagttgagcctctcgtgggttctccgctgctacctggatgcaccttgtccaccctgaggccgaggccacataggctggtgagcctcccgtgtcctgttcccaaaggcctcaccccacccctccccaacgcccctttcccctcccagggcagctgctgccacaggaccagacacccgggtcctcctttgttaccaccccctgcaacccccacaggcctgagcacagtgaccgacccttgccaggctcccctcaacccccaaagcccctcctgcagcactagcactaaatcatgaagtggaattgcaggaactaacaactgtaaggtttcctcctaaaacataagctaactttggttctccagagaagagaggtcagtgagcaaattcaaaaaaaaaaaaa

SEQ ID NO: 10824 - DNA, 677 bp, Canis familiaris
  misc_feature (244)..(244): n comprises a, c, g, or t, or includes no nucleotide
gaggatggagaaagtgaatggctttttaagatgtcaatctttaaactcttgctggatttaaaccaccacctcttgtcctctcggtgatggtattgctctggattttttgtgcaactgtcgcttacagctgtcgacagtatgttccctctgagaagctgagtatctatggtgacttggaatttgtgaacgaaccaaagttaaacagatatccatcttcttctcttgtggttgttagatctaaaanctgaagaccatgaagaagcagggcctctacctacaaaagtgaatcttgctcattcagaaatttaagctttctttttttttaaagtaaagggttaattgacatctaaatttccattcctcatagagcttctcaagatggtttcattggatatagggcttaaaaatcactttaaaacacaaataaagttacccaaatctgtgaagaccgtatttgccgtaactttatctgtaatttcttttctagtaatttaagaggtggatatttgggattgcatttttattttactaatacctgtagctattttattatttacattgttttttgttttctttcttagccaaattctgtgagctgttcattgctcttcctcaccttctgccataatactgtctgtcaccttagttaataaactgaatattcactaggaaaaaaa

SEQ ID NO: 10825 - DNA, 568 bp, Canis familiaris
tctgttgtcaacaacgtcattccacccaccaagtgcccacatgggtcagctataccagggaacacccacgggagtagacttcttttctatacatcgcctacagtgattgaaagcgtctacggtctgtgaaagctgctgcccctgactgggggggggtccggttctacatagacagaggtggcccccatcctcgacctactcctttctttgggctcatccctcaccgtccctttgttggggacctgcagcttcctaatgtttgaggctctcctccagcccttctcagcaggagggctcatgggggaggtggcttcttggacctctcctttctccccttcctcttcgacctttcccactctgctctagacttcttgattgtccgtctctgtcacatccggtgattgttttggtttctgttccctaactgcccaggggctcagaaccccaacattcccttcctctcattaccttcatttttgggggtagagggaagggactgaaattgttggggggaaggcaggaggcacatcaataaagaggaaacccccaagctgtatctttattataa

SEQ ID NO: 10826 - DNA, 101 bp, Canis familiaris
tgcatgatgagaagatggtatgattctacatatataaattgtcttgctgttttgtaaaaaaaaaaaaaaaaaaaaaaaaaaaaaaaaaaaaaaaaaaaaaa

SEQ ID NO: 10827 - DNA, 525 bp, Canis familiaris
  misc_feature (1)..(1): n comprises a, c, g, or t, or includes no nucleotide
ntcaccatcaaggacgacaagggcaacctcaaccgtctgcatttccgatgtggtttcgctcttcatcaccggtgatggaccaatctgcgcctggagatccgtgccatggatgagatccagcctgacctgcgggagctgatggagaccatgcatccgcatgagccacctgtcctcctgacttcgagggtcgccagacggtcaatccacgtggctgtcagatccctgagcggcatgtcagcctctgacgagctcgacgactcgcacggtgcgccagatgctctttgacctggagtcggcctaccacgctttccatcgcttcctgcacgcctgaggctgtgcgctgggccctgggccccgggggcacgggagggcccccggctctgcctgtgactcctgcgggtgtgtcagccctggagcccccgccctcgccctcctcgcaataaaggtgctgtttgaaaaaaaaaaaaaaaaaaaaaaaaaaaaaaaaaaaaaaaaaaaaaaaaaaaaaaaaaaaaaaaaaaaaaa

SEQ ID NO: 10828 - DNA, 530 bp, Canis familiaris
ctttgggggttttttttactttttctgctttgtgctttgtgtttgttttgtttgttttttgtctttcaaaattgttgtaaatctctgtatgcactttgcttttttatttacataatccaggtggccgtgactctttcgtacacttacaccagcacggacctgcttttccacttgtgtttgaaatgtgagcctagtagagtcagcctgctgtgaaattaacattgccacggatgaatcttccaccaaataatttcaaattttttcagtatttagtagtgagagatattaatgcacttaatggtaatacatttctcgtttaatataaattgaggatgtttttctagttgtgcatgaacgctggcaacttagtaagatttgaccattgtttaaatatgtaatgttaagcttaggtttaaaaaaaagtaaagctggtaaactgggtctttgtcatttgcttaaaaaaaaaataaatgcgaatgtgtttggtgccaaaaaaaaaaaaaaaaaaaaaaaaaaaaaaaaaaaaaaaa

SEQ ID NO: 10829 - DNA, 581 bp, Canis familiaris
accaaggagaagatggttcaaacacagtccttccctgtctgaagcagcctgaacgagcagtttacctgggtgtcccaacgtggctaaacctcactcaaagtgaagaccccatgtctatctcccaggtcacgactggtgggttctcagacttctgactccaatgttcccgtgggcttcactaaggtggttgtgaagctctttgattctgaccccatcacggtgatgatcccagaagcagtctccaggaacaatcctaaatttatggagactgtggcagagaaggctcttcaggagtatcgccaaaagcaccgagaggaatgagatgtgaacattgcttctccaaatatgggagggctgagttcctttgaccccaagatgagtgctaggcccctagagagagctctgcatgtcaccaagtgaccaggccttgcctcgaggcgctcctgtctcctaacccagctttccttcctctggactccgcactgtaacgcctacgtttgctgatcatgggaagaactcctgtgtgccactaactcaataaaaccgccaaggaaaaaaaaaaaaaaaaaaaaaaaaaaaaa

SEQ ID NO: 10830 - DNA, 611 bp, Canis familiaris
tccgactgagatgcctgtgttctctttgtcgacaacgtgcagtgccacccaccagtgccacgatgggtcagctataccaggaacacccacggagaagacttctgttctatacactcgcctacagtgatgaagcgtctacggtctgtgtagctctgtcccctgtcctggtgcgggtgtccggttctacaaagaccgagtggcccccatcctcgacctactccttcttggggctcatccctcacctccctttgttgggacctgcacttcctaatgtttgaggctctcctccagcccttctcagcaggcagggctcatgggggaggtggcttcttggacctctcctttctccccttcctcttcgacctttcccactctgctctagacttcttgacttgtccgtctctgtcacatccggtgattgttttggtttctgttccctaactgcccaaggggctcagaaccccaacattcccttcctctcattaccttcatttttgggggtagagggaagggactgaaattgttggggggaaggcaggaggcacatcaataaagaggaaaccaccaagctgaaaaaaaaaaaaaaaaaaaaaaaaaaaaaaaaaaaaaaa

SEQ ID NO: 10831 - DNA, 576 bp, Canis familiaris
gtgttgtagtaaaagggatggtgtaaataagtatcatttccacacttgcccagccaactttactattatagaggaagaaagagagctgggtggaactctcaggggatacttgagaaaatgattaatcatttctggggtgggtatgtatcagagtcataatacttctaatttaactactggataaatttacccaatctgaagaggcatttaatttagacaggaggagccaggaccactctgcctgcactgaaggcacagcctgtggtcactcccagaccccagctgggtggtcaggtggctcccagaggccacttggtactagggagcgtgggctggcctggcctggtcccgcccacatgccccccattagggaagacacatacaggctgctgttttcacatcctttgcattacacactgtcatgacagttgtcgtttatgaagtcagtgctaaaagctggagcaaatgcttttgaaagaacatagtctgtggtgctgtggtcttgcaatggacagtaaatacggttcttgccataactccttcttttgtctttgattaaacacttaaaaaattaaa

SEQ ID NO: 10832 - DNA, 621 bp, Canis familiaris
cagtatcctcatttagctattatgtttaggtgtgaaataaatgttattgttgaccattttgtgtaatccagagctgtagaggaagatatttaggtggttttatgtgtttcccctctcatgtggaacaaaagagggcaaagcagaccactagtggatcaacctgaaaaaaaattacagaaaaaagaaaattgcctttggactgtgctgccctgttaagggttgcaggaagacatttttaaaaagcttatttcttgcattaatttttaaaaattctgatttgaaatgcctttcaccttctgtgataaatttttctccgactttttcagcccaggattcagcaatcagatgtttattgcacacctattactcttgttttgttgttgttcttgcatggttcaaaccaccggtgattcatagctgcccatcctttgccttatctaacaaaaattttgccaggatgtggaaaggaagtaagtgttgctctcattgtgttactcagtgctgctgcctacatcccatggaaacatgggtacaatcaagtatttgtccagcctgactgttgctggcttttcatgactttaaaataaattgtgatcagtaatagtaaaaaaaaaaaaaaaa

SEQ ID NO: 10833 - DNA, 509 bp, Canis familiaris
gagcgtgcaaccgcccccaggcggtgagcccggacagcgcccgtgtgcggcccccgagagaggagaagagggggacccgggccagcaggagacgggaacctggagctcaggctttgcgacagagcagctggagtgggggatgcacggcctcccccaaccgtggagggcctggactccacactcgggtggagtgagacctactgcgtcccccaccctttttgtgaccggcgctgacatctgcatgagactcgcttgaccgagggtctgcacccttgccgggactatactttgggacttgggagctggggccgaggttgctctgtacccatgaactccccgtttgccaatgttatagaccatctattttgttacttgcacttgttacttgagacccctgagagagctgggaagcttatatagatacatatatttttacttctatgatgaccttgtaataaattttctaaagcttccaaaaaaaaaataaaaaaaaataaaaaaaaaaaaaa

SEQ ID NO: 10834 - DNA, 554 bp, Canis familiaris
ccgggctggggtgggcacccactgaactgtcaagtcatagttttgagagctagctgtgattgtcagctgtttttattccatgtgtgcctctcccaggaggtctggtcttcagaaacatgttttgacatctggaatagacacctgggccaatgatagtctcctcagtcttagcaagaggggaggcaagttgcctatcctaactcttggctcctgtgctccacacgaccacaccaggagtgagacaggtacaggggatgtgagattgacatctaaggactgagcttgtggcagtggggaggatgagactgggttctcagctggtgcagagttacaatgtaatcttatctactttgagctcaacaacaaacagcctgattaaaaaataggcaaaggcgggagcacctgggtggctcaagtggttaagcatccaactcttgatttcagctcatgtcatgatctcaagatcttgagatcaagccccacattaggctccatgctgagcgtggatcctgcttaagatcctctctccctctcccatccccacactgcacttg

SEQ ID NO: 10835 - DNA, 611 bp, Canis familiaris
gggcggaggacccgaggggcctgcgaggaaaggcaaccccttgcactgtgaaaagctgccctcgagcaatggcccgtttccttccgtgacgggaggagcaggtgaggaccgcgggccctgctcggccccctcgggaggagctgtcgtctgcccacctgcccgccccgcctgggagagccgcagcagagccttgcgccccaccttgggcatcacggaaccacccgctaggattgcccgcattcccgtggaaattgaatcttgctgtcgccaaagaaaagtctggctcggaggttctttggagcccaggatgccggcatgcgccaatgactctcacatttgtctcttccaaagcaaagccatatccgagggctgccacgtggtgccctgtgggtgttgtctaggtcatgtgattccgttttgcttcctcgtccctcctgaggcccccgtcacgctgtcttcctcaccctctggccccttcaaaactgttgtcatttgtactgaagtcaaatgtgtcccgttctccccagaccacttcgctatggtatattgcaataaaaattacttctaatatttgcaaaaaaaaaaaaaaaaaaaaaaaaaaaaaaaaaaaa

SEQ ID NO: 10836 - DNA, 638 bp, Canis familiaris
  misc_feature (1)..(1): n comprises a, c, g, or t, or includes no nucleotide
naccatcttgcagatccttcagagatagggcatcttgaccagagagagagcccccaggggaccacagttatgtcacttgcccagagcggtgggctaaatccacgccccccacaggcctccctgttactatagcatcagaactggtcacatctctccccttccggagagcagggcttgcactcttcccctagaacctactttgaaggcatattagaaggtttgttttcatttccccctggtattgtcttgccaggatggttaggtgacacaaggacgcttattagatcactgagaagaaaaagcccaacccgcttctctggtatgaacatctagtttgagagcacagccaaacagtaggcttgtattagtgctttaatggagtactggtaacatttttctttcttgataggaatctgcttatatttagccaggcttctatttcataaccctctccccctaccaactttccgtgcagttacctgttcatttttaaagcaatttcactgctaaatataaattgtatttgtggggttcatagttatataatgctgaaggggaccactctttcgttgaaaggtgataaaagttaaataaagactgtctccccagtaagaaaaaaaaaaaaaaaaaaaaaaaaa

SEQ ID NO: 10837 - DNA, 594 bp, Canis familiaris
aaaccagatgccttcttacctgttcagtgtggctacctagtgagcaccacgcacagattgcttgtataatccttttgtacgttaaaagtaactattgccatatatgactttgatgaattactttagacttgttgagctgggatgctaccaagctctagaaagtctttggatagacctaagcccagtcgtccaattttactggtttttctctgcttccctttcttcgacctatactcttggcttcctacttgtctgagctttttcatctttttagagccgacttcctcccccttttcggtgtatttccccttgtatttgtagcataggagtttatactggagagacagggcacagtagtgtcatgggaggaacgaggcatgattgggagtctgagtggggcacacagccttcagaggggatgtagtacaattgagcatgactgtttgaaaagctcaccggttggggatccctgggtggtgagcagtttggcgcctgcctttggttcagggtgtgatcctggagtcccgggatcaagtctcgcatcgggttcccggcataaagcctgtttctccctgtgtctctgccccctcccca

SEQ ID NO: 10838 - DNA, 594 bp, Canis familiaris
tacaataatccaataccacttgaaagatgtattgtaggaaagatctacttcctgttggtgagaatcaaaatcaagcacatggagatagatatcatcaagcgggaaacgacagggcacaggccccaacgtgtaccacgagaacgacacgatagccaagtatgagatcatggacggggcgcccgtgagaggagagtccatcccaatccggctcttcctggcgggctacgagctcacccccaccatgcgggacatcaacaagaagttctcagtgcgctattacctcaacctggtgctcatagatgaggaggagcggcgctatttcaaacagcaggaagtggtgttgtggcggaaaggtgacatcgtaaggaagagcatgtcccaccaggcagccatcgcctcgcagcgcttcgagggcaccacctccctggctgaggcgcggacccccagccagctgtccgacaacaacagcaggcagtaggcctgggcccgggagcggctgggcttccaccccagcagccccgtctaccatacaccagcggctggggcaggaggacggcgcgacgctcagctgacccgttacttgcaacctgaaaa

SEQ ID NO: 10839 - DNA, 674 bp, Canis familiaris
ggatattgaacattgcattgacagagaatgtacaattccagaaagaatatctggaggcagcagagtttttcaataatctataggagattatcctcagctatctatcaatcacttttcactattggaaacttgataaaacagtggaaagtaggtgaaatcagctgagtaaattctgtaattgtgtaaaaataataaaattttcaccaaggtagaaaaactataaatacaaggcttaccactatcaagtattctatgccacactaaatgttctcataattttctatttctcataacacctctgtaatataggtcacatatcctcattatatagacactgaggtgttagcagagccaggacctgaattaattgattttaaatctagtccacttttcactaagccacaacggaatctataaattttataccttcacagagagggctcccatttattaatcaaattgttcagcccacagttggtattaggcacctaccatatgttagacaatcctgatggccttgagtagaacctgaatttgtcttatttatctaaatagacttgcttcctccatttttctcaaatctgctcactttctaccacacttaccagatgctcatatcaggaatcttctgagaagagactttagcttctaagtctcaaaggtaatgggaaaaa

SEQ ID NO: 10840 - DNA, 676 bp, Canis familiaris
  misc_feature (74)..(74): n comprises a, c, g, or t, or includes no nucleotide
aagttaaagaaataaagaccaagtgccaaggaggtgaccgtggtcattgaggtgaaggagattctaaaggcttnccctggtaaacattccaagggacaccgttaacctgtacaccagctctggctgcctgtgtcctccgctcagcgtcaacgaggagtacgtcatcatgggctatgaggatgaggagcgtgccagattactgttggtggaagggtctattgctgagaaatggaaggatcgacttggtaaaaaagtcaagcgctgggacatgaagctccgtcatcttggactgaataaaagtgattctagccacagtgattccacccagagtcagaagtctggcaggaacgccaacccccggcaagcacgcaactaaatcctgaaatgcagaaagaacaccagtggacttcctactaagacttgcgttgctggatcagcaaaggggaattgcacatattgcgacagcccactatattcatatttttacccccaaaaatcagggggttacctgatattacttctattttctctgttttctgtttctctctctctctctctttttgtggtctgagtgcagatccttaaatatatgtattctgtttcactaatcctgggaaaactgttctttgcaataataataataaattaaacatgttgataccaaaaaaaaaaaaaa

SEQ ID NO: 10841 - DNA, 601 bp, Canis familiaris
tctccaccccatgacgtcaatgggagtttgttttggcaccaaaatcaacgggactttccaaaatgtcgtaacaactccgccccattgacgcaaatgggcggtaggcgtgtacggtgggaggtctatataagcagagctcgtttagtgaaccgtcagatcgcctggagacgccatccacgctgttttgacctccatagaagacaccgggaccgatccagcctccggactctagcctaggccgcgggacggataacaatttcacacaggaaacagctatgaccattaggcctatttaggtgacactatagaacaagtttgtacaaaaaagcaggctggtaccggtccggaattcccgggatcgcccggcacagccccttcccggccaggcccaggcatgcccgtccctgcaaggcagacacctcgatgggaccctacctccctgcagcctcgcggtggaacagctgtttgacgcattcagaagaaaggatgacagccctacagaggaacacgatgtgaatggaagagacctgtcattatacccttcccaagaaattgattggaaatggcaaaggaacacagttgtttggtgttaaaaaaaaaa

SEQ ID NO: 10842 - DNA, 656 bp, Canis familiaris
ctctctttctcttgtgctcattacagaagcggtccattccgtacgtttttccccatgctccccttagctgcccatccttcccagctactgctgtttctccaggctcctgttgaaagtcaatatattattgtggctgtaagcaacctggtgctaaagcctggataagcccccacttctgcaccaaactcgcactttgcaatctctgtccctcggacgaggccctcaggggagcacagctcctggggtcccttgagggcagggggcatttctgctcctgcaaaatctaaactgttttgtttcagcagcaaaacaaacaccatcatcccattgccccatctagatgcagtctgcttccgcgttgctccctgcggctgtaagccagaggggattcaggggaagttcactttacagcaaatcccctgctcccctctgcccagtgctgacggaagcccctcctccataagcaagttcattctttcagtgccattggcatctacatagacaggtgtgagagtagatgtgtaggttactctacatgtatctgttctttcttcaaaaccatgttaactttgtgaaacgacttttacactccaacacgctttacagcagaagaaataaaggaatatgaaaaataaaaaaaaaaaaaaaaaaaaaaa

SEQ ID NO: 10843 - DNA, 632 bp, Canis familiaris
tctctgttttatatataggtggagaatttaaatctaatattggtttgcacaaattccctggagaaaaaattgctctggtgtatatctcttggaaaaattaagaccatagtatttctccctttgcaatagcagtttataacagatgtgaaaatgaaatatacttgactctaatatgattatacaaagagcatggatgcatttcaaatgttagatattgctactataatcaaatgatttcatattgacctttttatcatgattcctccctgtcaagcactaaaagttgaaccattatactttatatctgtaatgatatagattatgaaatttctcctcaaactcattgcagcagataactttttgagtcattgacttcattttatatttaaaaaattatgaaatatcattctgtcattatattctaattaaaattgtgcataatgctttggaaaaatgggtcttttataggaaaaaaactgggataactgatttctatggctttcaaagctaaaatatataatatactaaaccaactctaatattgcttcttgtgttttactgtcagattaaattacagcttttatggatgattaaattttagtacattttcaaaaaaaaaaaaaaaaaaaaaa

SEQ ID NO: 10844 - DNA, 551 bp, Canis familiaris
cgggatctcctgccgtaaggtaaaggatcatccgccatgtccgctcacctgcagttggatgttcgtgccggaactgctccagcttcctgatcaagaggacaagcagacgtacagctctggagccctacaacctgaaagctcgcaactccttccgctacaacggtctgattcaccgcaagtactgtgggcgtggagtccggcgtgccgatcggcaagggtgtggtggtggtcctgaagcggagtatcaggccagcggaaacccgctacctcctatgtgcgaactaccatcaacaagaatgcccgggccaccctcagtagcatcaggcacatgatccgcaagaataagtaccgtccggatctgcgcatggctgccattcgcagagccagtgctatcctgcgcagtcagaagcctgtgatggtgaagaggaagcgggcccgccccaccaagagctcctgagcacttgcccctgtacccagagcaataaagatgttaaccatcaaaaaaaaaaaaaaaaaaaaaaaaaaataaaaataaaaaaaaaaaaaaaaaa

SEQ ID NO: 10845 - DNA, 638 bp, Canis familiaris
gagaaggcacactccaaggacatcataccctatggtacaaaaggactacgatacggatagttcttttttatcgtatcagaagtaattttcttttgcaggcttcttctgagccttttaccactccagcctagcccctactcctgaactttggggttgctgacctcctaccggcattattcctcttaacccattagaagtgcctctactcaacacctcagtcctcctagcctccggagtatctattacttgagcccatcatagtttaatagaaggtaatcgcaaacatatacttcaagccttattcattacaatctccttaggcgtatattttacgctattacaggcctccgaatactatgagacatctttttacaactcatccgactggtggtatacggatatacccctttttatagcccacctggagtttctatcggagttatcaacagctatattatttgtggctttacaattcttcattggtgtgctttcctccgacagctatactaccacttcacatcaaaccaccacttcggatttgaagccgctgcatgatattgacactttgttgatgtagtctggctattcttgtatgtatctatttattgatgaggatcctaaaaaaaaaaaaaaaaaaa

SEQ ID NO: 10846 - DNA, 650 bp, Canis familiaris
cttccctgggaagtcagtgctgcccagttcccgatggggcgcctgagaacattcggcaggttgtgcctctatgacatgacccatcccgaatgaccctgcgagctcagcatggatctgacgagcaccagatcctggtctgcaccaagctagtggagccgttccaagcccaaattgactccctgtaccttgtccttggggagctcgaacaccaagacggaggctccgtggtgaaggcccgggtgctgacttgtgtggaaggaatgaacctacccttgttagaacaagccgtgcgggagcagaggaggtaccaggaagagagggacagcagccggtagcaaatggccgttcctggcaaccgccctccctcgccccccaaccagcttctgaggccgagcccactggagatgcctgaggagagaagatccaggaccttcctcagaatgacaccctctggagccagagagaagaggggacgtttgctaatttggatcattccagacacacacacccctcgccgggagcccgtgggaggctgagctgtggggtgctgggcgctgagcctcgtgtgggaatatggagggttctggaaggtcctcatgaataaaggccccagtgggggagaccttgaaaaaaaaaaaaaaaaaaaaaaa

SEQ ID NO: 10847 - DNA, 679 bp, Canis familiaris
gtgtggtttccatgggatttaattaatgggactgcagtttcaatttgtaaattgtgcattggccatctccttcactgcagggtgtgatcgtctacctggctccacctcgggaccctcggggccctcctgggggcttcccctcccccgccgggtttggggtggagcagaaggacgctcgctttcctgaggtctccctgaaatgaatgtatttctcccccacaagagctgatatttaatgttttaatagggatttttgagacacaaataaccttatttataatctgggtgatccaatcattttttactcccttttgatgccataagtagaggaaagtctagcttttttggcgtgagacttttgcaatgtgcagtgggataaaatacatttccttttctggttcgtttttcttctctctctctctctctctctctctgtctcacacacacacacacacacacacacacacacacatgcacacaccctttcacctagcacttcggacagcgacccacccagcacaggtgcacccgcacacatgggcccacacatcctcctcccagcccctccacctgcctaatgttatgcaacctccttctgatgtatccaccaaaccagtactgaatgtggccgagaagttttcagtaaatcttattacctaccataaaaaaaaaaaaaaaa

SEQ ID NO: 10848 - DNA, 574 bp, Canis familiaris
atctgtatgcttcacaaacttggatttgacaagaaaatgtttatgatgaattacgacacgtgtattcgcaactctcctcagttcagatttgactggtttcttaagtctagaactgcaatggagctccagaggaggtgtaataccttaattaccttgattgaaagagaaaacatggaactagaagaaaaggagaaggcagagaaaaagaagagaggaccaaaaccttcaacacagaaacgtaaaatggatggagcacctgatggtcgaggaagaaaaaagaagctgaaactatgaatacatatttgtttcataatcactaactttaaaccagtagttctttaatttacgggtcttcataagatgtactgtacaatactcaattgttatgtcattcaaagacatcaggttcatctgtttactaagctagaaacatagtatgtagtttcacttttttaaatgcaacagctgtgctgaaattttttttatcattaacacttgaagtaataaaacaggcttcatttattaataaatgtttcatttgatttaaaaaaaaaaaaaaaaaaaaaaaaaaaaa

SEQ ID NO: 10849 - DNA, 584 bp, Canis familiaris
ctccccatcattgacattgcgcccatggacataggagggcccgagcaggaattttggtgtggacatcgggcctgttctgcttctttgtaataaacccgtgacccctttctacactatccatgtgcccatccagaggacccaagtactttccagtcccagtcactctagggctctgcactgaatggctgacctgacctgatgtccattcatcccacccgctcacagtgtggacttttctcccctctttctaagagacctgaactgggcagactgcaaaataaaatctcggtgttctatttatttattgtcttcctgtaagacctttgggtcgaggcagaggcaggaaactaactggtgtgagtcaaacgccccctgagtgactgtccccagcccaggcaagaagatctcccttcaggtgccgggcgcaggaactgcgtgtgtcctacacacatggtgctattctgtgtcaaacacctctgtattttttaaaacatcaattgatattaaaaaccaaaaaaattattggaaagtacaaaaaaaaaaaaaaaaaaaaaaaaaaaaaaaaaaaaaaaaaaaaaaaaaaa

SEQ ID NO: 10850 - DNA, 649 bp, Canis familiaris
aggaggggctggagagagctctggggttcacctcccactgggtacccaactctaccctaaggaaactctggagtgagagaggaggttgggtaattggttttctgactaagccatagccatacataggaaggagaattgatttcagtgaaggagtaaagtgaccaccactttgttttctactgatttaaaagcacaatcacatccaaaaagtcattttctattacagtgttttgaagccattcttaccgtagtctaaggtgtcttagatcttccctagtgatgtcattaagaatatcagaaagggtataaccttcttcaacaatctgaaaccaaaatcgaatacagaagagctaagctgctttgtaagaagggcataggaatgcttttttgttagaaatttaccttttctattgtactcgaatctgctccttgcagttgtaaccagtccacaagctctttatcagttttctgctcctgagacccaggaggggatgctgaattctctgtagtatctgcaacgatgtgagatgtattttgttgtatgttaatgtttaaaactcttcaaaagtaacaaggtggatgaaataaactattatacaacataaaaaaaaaaaaaaaaaaaaaaaaaaaaaaaaaaaaaaaaaaaaaa

SEQ ID NO: 10851 - DNA, 671 bp, Canis familiaris
tttgggatctgatttttgaagaaatttagctggtaatgaaccatgaggattctagtatgactctgctcattttttctttggagttccagtaggttaattctgtcatttttgtttgttattctctgccccatgcttttttttcttctaaatgtggaaacttaaaggatgaattagattctaagtactttgcagttaatgtatgactatgcaagtttccattggccttctaaccacctgataagcaatagagttcttcagaaataacaaacacattggaaaggaatttttaaattacagagtattgtttaaaaagaggcaacaaactcaaaattgagtcacttgtgctaagcccatgtcaccaaaccaagactgattgcagtttcagtctctcccaagagtggaatcttaagccagtcagtctcgaatgatctggtcagcactagtggaataatccccaggagacaccctcccaaacccatgacccctcaaaggaaggtgattttgcctgtaacaatcagctctgctaaaataatttccttgtcccacctctttctgcccatagaagttttccattttgtacagctctttggaacttctttctctttgccagataggatattgcccgatctatgaattgttgaataaaactgataagatctttaaaaaaaaaa

SEQ ID NO: 10852 - DNA, 632 bp, Canis familiaris
cagagcaccaagccatacagagtctggatgtgctagatctctgtgagggcgatctgcccccaggactcatagactctacagctccctcctcagaggtgggcaaggaccacatagaagagttggctgcatctgcccagaagatggatggagcagttgaggcaacccctcaggatctggacacaatgaccttggcaccagggaaggcagctgaaacagatgttgtgaatcaagagatagaccccctctgtgcagagtgccggttggtgcgacaagaccccttgccccaggaccttgtgatgttcctgcatgctctgtgctataaagggccagggtttgagtacttttcacccatgcctgcctgggcacaggatgattggcaagaagactgaggactatggcccatggagcaattgcttcttgaagtggaaaaggaatgggccatggagtaggatctgaccttgtgggctagtactcagggtttctataggagtgaggttcttaaaggatctgcttatacttgctacctccttctttcctctccctctagctagagttagggaacatattggtttgtaaatatatcttttttctgaaaaaaaaaaaaaaaaaaaaaaaaaaaaaaaaaaaaaaaa

SEQ ID NO: 10853 - DNA, 601 bp, Canis familiaris
cgctcaggactggacctggagccgcagcaccgcctccgtcaacaggactcacaggagcaaacggtcttcgtcccaccctgtcttccaccggggggagttctcggtgtgcgacagcgtcagcgtgtgggtgggcgacaagaccacagccaccgacatcaagggcaaggaggtgatggtgctgggagaggtgaacattaacaacagtgtgttcaaacagtacttctttgagaccaagtgccgggaccccacccccgtggacagcgggtgcaggggcatcgactccaagcactggaactcctactgcaccaccacccacaccttcgtcaaggcgctgaccatggacggcaagcaggctgcctggcggttcatccggatcgacacggcctgcgtgtgcgtgctcagcaggaaggccgggagacgagcctgacctgcgggccggcccccaccctccccgcgcccccctccacaccctcctgggcccctccctacctcaacctgtaaattattttaaattataaggactgcatggtaatttatagtttatacagttttaaaaaatcattatttattaaatttttggaagcatccgggaaaaaaaaaa

SEQ ID NO: 10854 - DNA, 595 bp, Canis familiaris
ccagcatcacccctgggagtgttttgagaacttgtctcataaatgagggcagtacattccgttttgctccgaagtattcagtaccgctcagtattttaatatgaaatgattctcacttgtgatttggtttgggatcaatagggaagcacaggcacccacccacatataccatgtattgaaatgattttctcagaatttgaagtaggaaagttaccccaacacttctgcttccacttaactggcctgcaatattgtaagaatggcaaatccttgttactgtgatatttaaatatccacagtgtccaccttttcccaaagattttagtaatgatctagaaatatctttctcttatctgttatttatccatttttccccgtatttttatatgggaaaaattgtattgaagacatttagtatgcagttgataagaggtaatttggtattattatggttggtgattattttttatactgtatgtgcccaagctttactactgtgggaagaccactgtttaataaaagatttacattcccaccaaaaaaaaaaaaaaaaaaaaaaaaaaaaaaaaaaaaaaaaaaaaaaaaaaaaaaaaaa

SEQ ID NO: 10855 - DNA, 605 bp, Canis familiaris
ataggaccgtatgtctgatctctattgctctgtgaagaaagcaagctgggaaacagggtatcaaggacgatgcgatgtatgtggcatggataatagtatgtgaggaaaaacagtagataggtacccaactcttgacagtagttatttctggggagcggattataaagcactttgattttttttttaaagagattttatttatttattcctgagacacatagagaaaggcagagggagaagcaggctccctgtggggagcccgatgcagtactcaatcccgggaccccggggtcatggcttggtattttttaaatatatacacacacacacacacacacacacacacacacacactcctagagaaaagagaatggccaatagagaatatactaccaaaccaaggtttaactaattaataaaggaaatttcttaagggggtaccctgagtggttctgtcagttgagcatctgactctagatttctgctcaggtcatgatctcagggtcctgagatggagctccatgctcactgcttaggattgtgtttctgctctgctcacacccccctccccctgctctctattaaaaaaaaaaaaaaaaaaaaaa

SEQ ID NO: 10856 - DNA, 593 bp, Canis familiaris
gaatgttttccacgtataccgtatagtttttctcttctgttaagtttaggcagatcaaatattgatgtcctaatattgcacttcttattttgtataaaagtaatacctttgatatccacaatgaatctattaaaatgtttgattccttgggaatggctttaatagtaagtggaatgcgttatttgtttccttggtagagtagtggtatggaaacattcctagtgataatattgtaaatctagggttaagcacaggcagccagagctttctatgtattgttcaaagtgaggtcacacatttttcttttgtatcctggcaaatactcctgcaggccaggaagtatgatagcaaaattttaacaaagataaactaatgtattgcatcaccattgccactgattttattaatggtaaatggccttgtgtataaatattgccatattatggtacctatgatggtgatatatttgtttctatgaaaaatgtattgtgctttgagactaaaaacctgtaaaatgttaattttggtatttttttttttctgctggtgaatttactctttccctgtaaacatattaaaattaatcatgtttc

SEQ ID NO: 10857 - DNA, 168 bp, Canis familiaris
  misc_feature (1)..(1): n comprises a, c, g, or t, or includes no nucleotide
ngagatggtttagtggcaaaacccacagaaactcatcacaaaaacgatacttataaataaatacaatgtatgttatcattattcctacatgggatttaaccatgactaatgacatgaaaaatcatcgttgtatttcaactataagaacattaaaaaaaaaaaaaaaaa

SEQ ID NO: 10858 - DNA, 616 bp, Canis familiaris
aatgttccttgcctcctggctaccctacaggtgtctccagccagagcattggaggccagcaagctagctggtggccctggtgccttatttccccagggcacaacctgctcacctgctctgttgaggtctggtacatttcaatttcagcctgattaattggcacacagggtgggcacccagccctctgccacacgggcccccaaagcactacaggccaagtggggagaccccacagcccatgacatgaaagcaccttgaaatttgcaccctttttcttaaggtatttttaaatgcagtgtttttatctaataatttaagcatatgcaacactttggttttaacggatgctttgttctcttggaatggtgtttctcttaagacttttccgattcctttcccttttaaagtggacttttgctgtttgcccacctggagagggggcagccagccccatctgatttctctaagtggatgtgtcacctctgaccagccagtgtctgtcacaactgggttaaaagtgtcagcaccaagaatcaggttcatgacagatggccaccatggcaggccatgctaggcacattgcactaattaaaaagcgtgagcattaaaaaaaaaa

SEQ ID NO: 10859 - DNA, 540 bp, Canis familiaris
aagcactatggctttcagcttatcagagtgacctagtgggaattatggaggatgaaagccacgtgcatcggaactatagtgcctgcagcggtgtcgatgttagacaagactacattagaaggagaaatgaactctgaagtccgcactgctttagctatcaaagtcctatacaagaccatggattgtgagtaaactctcggctgacaaagtggagattgccatctctgacaagagagaacgggaatgacggtcatcagggtcctgaagcagaaggaagtggagcagcgtgatcaagaaccacgaggaggaagaagcgaaagcggagcgagagaagaaagaaaaagagcagaaagagaaggagaaataggaggagaacactgggctctggcggctccggggccgtgtgcccgctgcaccggctctccactcgctccggtgggcagactggggcgggcaccagcgcaggcctgccgtctctgtccggttgagtcttgtagtgacgctcggtcgtagtgacgcgctcgtccctcctgtgttggt

SEQ ID NO: 10860 - DNA, 661 bp, Canis familiaris
tggtctggccctccggagggacatctggggctgcacctacgttctctgcaagctgtgcatggaagggggggcattgcagcatgtgagcacaagtcgctggattctctggcccctttccgtgtcccctactgtaaatgcgtgtgccttagctcaagccccagcctgcactggctggctctggtgtgggatggggcccaggaagcaaactgctcccttccctccccgactggccttctgagccaggtgatggttcgaggggggcttgccgcttgtggaacctctgccttccttggtctccttgttgccccaccagaggcctgctgctgctgttgggagggtagctcccaggctggggggtggggggactgcttccaccaggggctgggaaggagacacggctgcagtgttcttgccaggacagtcactttattgagaggaaggagcccggcccctcggcccagcgcggggtgggctcactgtgaggtctgataacagaactctaggagaggggactgcgagaccacccgcccctcctgctctctctgcagaggcccccggcagggctgagggggggcccagccaaagcttgtgccggagcctcacggaacaaagggtggtctggcctgggcactggagtcaataaattatggtcagaaaaaaa

SEQ ID NO: 10861 - DNA, 620 bp, Canis familiaris
  misc_feature (1)..(1): n comprises a, c, g, or t, or includes no nucleotide
ncggatttcagaatatataaacacagtgtttgtaatgtgaggcattgtcctggttggggatctctggaaccacaatagttataaacttaaggaaattgaataaagtgtgagttttagttaataatatacagatcagtattggtttattaattgtggcaagtgtaccatactaatgtaagctgttaatgggggaaattgggtgtaggtatatgggaattctctgcactatttttacaacttttctgtatacctgaaactattgtaaaataagaagtttatttaaacacacacacacacatacacacatacacagcccctctattcaaacactattcctgagaatcttaagggccatttttaagaagagacaagtcatgatggagcaggattttttttctactgaaagttaacacaaaaaacttatgggggatccctgggtggcgtagaggtttagcgcctgcctttggcccagggcgcgatcctggagacccaggatcgaatcccacgtcgggctcctggtgcatggagcctgctcctccctctgcctgtgtctctgcctctctctctctctcactgtgtgcctatcataagtaaataaaaattaaaaaaaaaaaaaaaaa

SEQ ID NO: 10862 - DNA, 516 bp, Canis familiaris
gtaaacggtctacactcgctctggttgctggacccacgttactggctggcgtgcacaggctgctgggtgcccggtgtgcatgggaagggtgctgtctgggtaccgcgggccttcagagtgccacgcttgctctgggaccgctggtgctgggcagaacttcaaggttaagtctagaatttaaatttggacactcactacatgtgacctcccaatcctgggggccgttggtgggtttgtgtgggtgcagggccacctaagtgggctctggggtacctgcgcgcgtgaccccgtgacgctgtcctggacgctaggaacactcagacctttatttgtttcactggtttacatgtaagaccgcactctctccccactcctgccccactcctgcttctgcctttccttccttacccagtcccttggccaaaaagacctgtttctttccaacatgtgacctttctttaacatcagccatgtatgcgtctctttattaaaagattatccatcaaaaaaaaaaaa

SEQ ID NO: 10863 - DNA, 147 bp, Canis familiaris
caggggaagtactgaggagggaataatcagtgctgcttgccacctcacgagcttgggttggaaagtgtgaataggagtttgcagatgaagaggggcattccagtccaaagggaaaagcctatacaaagtccaaagaggtactgaagg

SEQ ID NO: 10864 - DNA, 663 bp, Canis familiaris
cactgattaggaaccctcagaatgactgttttagcaatttagtgaataaattatttcagtctggcagccatgtttaatccacgattcagattgatccaaaaagggttcttcaaaattgccccatgtgaatgagaggtggtaatagaaaaaggactagcattaccacattgattttgtgtttgtctcatttcagttcctggagttcagaaacaaaattattgttttcatttttatcttaatttagaacttaaaagtggcatgtaattataattagggcactgttagatttgttgaaagcatatttgacatttgtataaaagaatttgtgataaagttaatatatccaggtgctcaccaaagaaatatcaaatgattaaggttttggtttcttttgtttttggtaactggtcagttttcactcatttctaatcagtaggagagactctctagatattgggacagctctatgatttgggtctgtaacatgtaataactgaattcagtaccctagatttatgttaagctattagtattttcttgatgaaaattaccctacctgtatttctcctaatttctggatcctgggctccttatgcagtctgaggaaggtattacagtcagaaccgtgtactgatgataaaagcctctggtagcaataaagtt

SEQ ID NO: 10865 - DNA, 464 bp, Canis familiaris
tatgcacttttataagtttagagagcactgttttaagtattccaaagtgatctatgagaatttttgttccatgattgcattttactgtatcagaatgctgcttctgcgtatatttgtgatatgaggatattatcaagtgatacacatttatgttctttgtgcctgttttatgtgcacacattaggcattgagagattgaaacttttttgtccatgtatctttggatctttgataaagaatccctgttcattgtaagcacttttacgggtggggtaggggtgggggggagggagtgctctgctggtctcaaattaccaagaattcgcccaagaaattttccgcaggatgattgtacagaatcattgcttatgaccatgatagctttctacactgtattacataaataaattaaataaaatcaaaaaaaaaaaaaaaaaaaaaaaaaaaaaaaaaaaaaaaaaaaa

SEQ ID NO: 10866 - DNA, 656 bp, Canis familiaris
atatcaccgtttgagcacatgtttgaaaggaggtgtccgattgtgtattaaaaactcagcatctgatcaacgtcgctaatgtgggagcttggagaagaaagtcatctgtagcagattagacagtgtaattgctcaagtcttgctagcacgcaatcactttggggaagaatctaccacgttgtctgatggacagagtggatgaaatgagccaagaatatagttaaatatacacatacatgagggtacacggagtaaacaacagtcagcagaaacatcaagtatcatgcagcgtctgccagcaggagaatatgcagcgccagagtcggggagaacccccatctgtcctgaggaggatctgtccaaacttttcaaaccacctcagcctcctgccaggatggattctctactcattgcaggccagattaacacttactgccagaacatcaaggagttcactgcccgaaacttgggcaaactcttcatggcccaggctcttcaggaatacaacaactgagaaaaggaagtttccagaaaaggagttaacatggactcttgagatcacattggggcaatccttggaagaaatacatttgtgtattgaaaagtctttctagctaataataaaataaaaataaaacacaaattaaataaataaa

SEQ ID NO: 10867 - DNA, 617 bp, Canis familiaris
gaacggaccacgttgtactcgtacttgtccgcctccacgcgcgcgaacggaattgcttgcggtcaccgggggcctcctggcactcgcgtcagtctgctgctcacgggtacaccgggcccttggcctccggcgggctcgtccggggcctgggcttggcgaggttgatcggaagccgttgcgcttgagcgcggggtcgtcgtggtcggtgcgccggtaggccaggcgctccaggtagggctgcgccacgcccacaggtggccgcgcgcgggccggggccgggagggcgcgggctccagctcctccccgcccagcgagtgcggtgaccagggcggtgtaggcgtcgggccgggcctcgtcgcagaaggcgggcaggcaggcgccgttgggtccggtgaccgcgctgtcgaagcggccccaggctcgggggttggccgagaagccgggcgcgggctaccaggttgaccagcgtgaccaccacgccctccacctgctcgttgggggtgaacttgtcgttggcgtaggcgcgcaccttcacaaagcagcggcggcgctcgggcacgtccaggttgaacagacgccgctcccggatctccacgttgcccactaggaagacgcgc

SEQ ID NO: 10868 - DNA, 639 bp, Canis familiaris
cctgagaatgtatccccaaagcgtgagcttaaaatacaagactgccatattaaatgttttgttgacattagtcccagcaaaggctctggaaaacagaaaaaaaaaaaaaaagtgctggctgtaaatgtcttctatttatctaaatgtggatttctaaggaaacttgactctccattaaaggtatttttaattaattgggccaacttctaaaatgtatgccacatttaaaatcaggtatattttcctatattagagtttgctcctttaagtcaaatagacgtaaaggaagaagacccttaaaacttggtatttcagtatgatttatctgatttgaatttgatttttcttacaaaacccaaactcattcattagagtcatgtttatctacttagcagtttagggaacaatttggcaattttgtggttttttgagattatcgttctcttaaagtgccagtgttttaaaatagcgttcttgtaattttacacgcttttgtgatggagtgctgttttgttatataattttgacttggattctttccatttgcatttgtttatgtaatttcaggaagaatactgaacatctgagtcctggatgatactaataaactaataattgcagagggtttaaaaaaaaaaa

SEQ ID NO: 10869 - DNA, 649 bp, Canis familiaris
ttggagtactgagcagccagctgcaacctgacttaacccggtcccttctccccaccagtgtgctcatggggctttgtttcctgaaggtactctggctgctgactggcccttagctcagagcagtcatgaagcttaactggggaaacagaaggaaacgggtatgtttgggaaccaaaatcaagaaggagcagaaaactggatttgatttcgcttgttagaccctgtgccacacctcatctgtaccaatggaagtttcctgtttgacccagggtctatcagggaggggcctggaagacatggattagcatggaagaagtcagtcctacccttgtcatttgtgcacattaatgaaatcctgatgaggacctgctttctgtttgtttgttttcctttcaaacccaaccctactgtatttgtatttaaatttgtacacatttgtataataatctgtaccttgtggtatttggtactattagaggaaaaactttggattcagaccttcttggagtttttatatcattgttttattttgttttttaaataaattctagcggtttgatccaaatcccattacagttgtataaagaaataaaattttgtacttatattattaaaaatcacatttttaataaaaaaaaaaaaaaaaaaa

SEQ ID NO: 10870 - DNA, 676 bp, Canis familiaris
ctgcgcgctcaggtccgtctgatgagccacgggccccgggccgaccggtccgaacatcacccttgctgatgtggcccaaagcagagccttgaccccgcagacctacagacccttctcaagacggtcaagttcgccctctgccccacccccctttggctttatcaccaagcacctttttccatacagccatccagactgaggaagacccggaaacttcggggccacgtgagccatggccacggccgcatcggcaaacaccggaagcacccaggaggccggggtaatgctggtggcatgcatcatcacaggatcaacttcgacaaatatcacccaggttacttcggaaaagtcggtatgagacattaccacttaaagaggaaccagagcttctgcccaactgtcaaccttgataaactgtggaccttagtcagtgagcagacacgggtaaatgctgccaaaaacaagactggagctgctcctattatcgatgtggtgcgatcgggctactacaaagttttgggaaagggaaagctcccaaaacagcctgtcatcgtgaaggccaaattcttcagtagaagagctgaggagaagatataagggtgtggggggcgcctgcgttctagtagcttgaagccacatagggggaggttcattaaatgctaacaagtgcttttca

SEQ ID NO: 10871 - DNA, 635 bp, Canis familiaris
gtcattgtcttctatgatttgtatctagtcattttaataactgacattaggtctaatactttttcaagcactttttatctaagtagactgtcattttatctgcaaataatggcaattttgtctcttctactgcaataattgttttcatatttattgcctgcaatagcaacaacaatatttaaatatatcatctgttgattttttatgggtttgcctctagtgtttcaccattgtacatggtatttactgttggtttctatcctttatgatattaatgatatttgttctttttccagattgctcactttttaaaaattaagaatttatgttaaactcatattaaacaccttttccatattttatgatgtaattatacatattatcttatttaatctattttaattaaaaaatttaatatactgaattatataaatagatatcctaatgttgaacatccttgtaaatttctaaaatgctccccacttggtcattatattgtttttaatatgctgtgatttgtaatgtatactttgctaatattttatttagggtcattacatagaaatgaatgattaattataattattaaagatttatttcaaaggcaaaaaaaaaaaaaaaaaaaaaaaaaaaaa

SEQ ID NO: 10872 - DNA, 412 bp, Canis familiaris
catttaggaagaagctactgaagatgagacctgccacgtcgatggcgcagagatttgtcattgtcgatgaatcaggatggaacatagaggccacttttaggcaacaggcttgagcaatagagacctgagcaaggcaaaagggcccacagtgaccagctgagctgatgcagtgtcattaagccataggccctaactgaccaatgggccacttaaaaccagttactgttcctaagattgccaaaaaagggagaattccatccggccccatagtctcttatttcgtcctgtaaatatagcccctcaccattgcctcttggcagacagtccttcctttgttgtggtgcccactgcttcctttcagtgtattcagtaaacttctactaaagctttaaaaaaaaaaaaaaaaaaaaaa

SEQ ID NO: 10873 - DNA, 602 bp, Canis familiaris
agagctccaccccgctgtcggccatcgtcccgcacatcagcaccaagaccatagacagctggatgagcgccaatggtgcccaagagggtgcaggtcatcttgcccaagttcacagccgtagcacagaacagacctgaaggagccactgaaagctctcggcatcacagagatgtttgatccatcaaaagcgaattttgcaaaaataacaaggtcagaaaacctgcacgtgtctcacatcttgcagaaagcaaaaatcgaagtcagcgaagacggaaccaaagcttcagcagcaacaaccgcgattctcatcgcaaggtcgtcacctccctggttcatagtggaccggcctttcctgtttttcatccgacacaatcccacaggtgccgtcttgttcatgggccgcagatctacaaaccctgaagagtgtgagagagaaaccaggcagagcaaaggctcctttggggcgaaaacaagactcttttcctgcatctttcacagttcagttaaatatttttgtacattactttcttttttcagaactagttcttaggaacagagactgagtgacgcaggcatttcggttctgggagatttaaaaaaaa

SEQ ID NO: 10874 - DNA, 661 bp, Canis familiaris
atgacctgaacaggaagagatgaaatcctgagggaagttctagaaatcaaaagaggatatgacccaggaggaagaaaaggaagagaaaaagcagttaatcagaggctaaaacagaagaacctccagtgcacgctaatgaaactgcagaaatgaagattcccagggggatggtgaacattttgcacacccaccctcagaagttaaagtgcattttgctaatcagtcagtacaacctttggcaagaaagccggaaatgctgtctgaaacttcctccttcccacaaaaaggcctgaagatcctggcctggaacatgcaagcattgaaggaccaatagcaaatttatcaacacttggaacagaagagctccgacaacgagagcgctatctcaagcagaagagagataagttgatgtccatgagaaaggatatgaagactaagcagatacaaaactcggagcagaaacggaaagcctgctggggaggtagaggaaatgacagagaaaccagaaatgacagcagaggagaagcaaacattactaaagaggagattgcttgcagagaaacttaaagaagaagttattaataagtaattttaaaaacaacctagcacaacagttcaaattttcttaaaaataaattatttaatccttaaaaaaaaaaaa

SEQ ID NO: 10875 - DNA, 644 bp, Canis familiaris
gcgaacacgtttcctgctcccattactgcaatgtgcaccagtaagggaagaggagttggagcgtggcccggagggacggttcccagcacgcaggatctgatgcgcggagcctcgtgcccaggagctcctggcccagtgcctgtcccggagtctgctgctggagaaggaggagagcaagaggtttgacgatcagcttcagcagtggttgtctgcagactcgggagcatttatggattcgatgtcccttcctctctaccttcctcagactctggtgtctctgcctcagagtattgaccctgtgatgaagacagtgacccctgctagccctcagaacaaaaggagaggagagcagctgcagttgtcagaggcaacaggcacttctgtaagcgaacggctgaagcacttggagaggctgatgcagagttcaagggaggaggaagttgcctctgagctgcatctctctgcactgctggacatggtggacatctgagctgccagacctgagagcgggaaggtctccaaaagatgtctgcttttactcacaatgatgttattcagatgcttgacgcactgttggaaatgtgatgattaatcatgcaaataaactatttgaatgtctcattaggcctttcccagaaaaaaaa

SEQ ID NO: 10876 - DNA, 390 bp, Canis familiaris
gagttgcccggtgagtgaaggaggcaaagctgtttttgcaagggggcatgggtcccaatgttcgtcagaggcaatgggtggtgcttattgtgccttggtattgtaatgatgaaatcaagaagttcacataaagtatttcctagttttccccctgtgaacaggcatgttgtattatataacatatcttgagcattcttgacagactgctggctgtctgtttatcaatggcaactatttactggttgaaaatgggaagcaataatattcatctgaccagttttctcttaaagccatttccatgatgatgggactcaattatattttttatttcagtcactcctgataaactaaatttgaagaaataaaaaatatctgaagtataaaaaaaaa

SEQ ID NO: 10877 - DNA, 519 bp, Canis familiaris
ccctcgcaccccgcgcagcacccgaatgtacccgaagccagcccgaaccacacacctgccggccactcctggcccctccagcaaccctgtcagtaacggcaaagaaacccggaggagcagcaagagatagcaagacgttcttcgtcccttcccaccacccaccataacccaggtgtctcctggagaacacagcctcctactaggctgctggcttttggggggtgggttggggtggctgggtaggtagcagtattttagtcactaaatttcattgcaggggtagggagctgaggcctttagccaccctaagcccatactccctgccttgcccagctgaagctgcctatcccctgggattgaaggccctttgcctgccctccttccttttagaaaccacagtcacagtctgtttccaatgtgtgtgatgtgggagttgaattgaacccctccttcctaataaacgttaccactctgaaaaaaaaaaaaaaaaaaaaaaaaaaaaaaaaaaaaaaaaaaaaa

SEQ ID NO: 10878 - DNA, 407 bp, Canis familiaris
gctgggttggaattgcagaattgcgttgccctgatgccagtcccttgtttatggttggacaaatcagaaactgggtgcctcagcctcaatgtgcccccctgtcattgtcctgggaaaccatggtctccgctgggtccccaaggacaagaacttagtgatgtggagggactgggaagagtcacggcagatggtgggagcactcctgcgccgggccgggcccaccagcaccttgtggactttgactgccaccttgatgacatccggcaggactggaccaaccagcagctgaacacccaaatcacccaatgggttggtcccaccaatggaaatacctgagccagggctggggggtgggctggggagggtcaggatctaataaagaggttgggctgaaggacaaaaaaaaa

SEQ ID NO: 10879 - DNA, 563 bp, Canis familiaris
tgcaagaggaatctcctgaaaatgggggcacacagaaatttgatttgtggccaaatttgatggaaaaaaatgaggttctaaggaaaatggtggcatgaagaccctctcccgtctttgtagaattaagataactttgattttatagcgtttgagctaaaataacttttgtaaagattaagctcatttagatttttttttaagtatttcagcaggatctgctgcaggggttttgttgttttgtttgcttacttttagaattaaccgtttcaagctttggatacctaaggctttagagggagatcccgattttcaattatgttggctttttataaagcttgagttatgtaagatttcaataccaatttgctaccaagatgattgccttattgaataggtcactatcaaattcctttaaatattgataatttgctttttgtgaaaacaaaatgtaaattctacgtaaatgtaaaagaaggcaagcctcagaccagccaataaattattcaactttggataaaaaaaaaaaaaaaaaaaaaaaaaaaaaaaaaaaaaaaaaaaaaaaa

SEQ ID NO: 10880 - DNA, 425 bp, Canis familiaris
atgtaaatccttcgccaaattatggaaaaagaaagattaagttgagtcttacttgattttatccttgtgggaaaacacactaattttttattttgttaattttataacataggttgaattttagagtgggtttttttaataagtaatgaaggataaaatgggtgggagaaaatggcactccgcatctgaagatagaggcagttctctagaactcatgcattgccattggaaagcctgtgttgggcattgatgtcatcctgaagaatcacctggaaaatcatcctagacacgaggaagctatacccaaccgtagtccaccagactttattacatgggttgtccattatcttgtattataatcaaaatgtttacttgaataaagaacctacttactctcataaaaaaaaaaaaaaaaaaaaaaaaaa

SEQ ID NO: 10881 - DNA, 612 bp, Canis familiaris
tggcgcgcagcgtcatcagctcctgccctgggcagcagatggccgggggggaccaggccattgcagctgctgtccaggctgagaaagtgtggatctggtactgaagagtgggccagagagcctggctgcaggccagaagtggggcctgagggactggccacctccactgtgggtgtctgaccaggagccaggccttcttggggtgggtgagtccaggggactcggtttgctaaagatgttttctgtgacctcagtcaccgcagagtggcccaggttccctgagaagatgtgctcctggccggcttgggaagaggggatagggcacacacagcagggcagggtggggtccatcagaactctgcccctaccccggagttccctggctgggcgcttggcccggccacactgcctccctcctgttccagcagcctcacaccgaagccccaggggccgggtgctgggagaggctcctgcatgcccagggcctgccttcaccggcctgcctgtgtctgccgtccagctccaggcctcaggcctcccgggcagcggggagctgacggtgggagcggcggtcgcatgcttcctggcgctggagggcgccgacgtgagcta

SEQ ID NO: 10882 - DNA, 502 bp, Canis familiaris
acaaataagcaggcgtgtaccggtccggaattcccggggatgccgcccttggttgttgtggtgtggttttttaagagaagtaagcctttatttccttgtttcacgaataaacttggctgaattggttgctttttggtgattagtcaaagagaccgaatcccatatcctcggtccgattcctccgactcttccctttgcttcaaccttggctgggctgcggccaagcagcagtcaccagtggtgcagcagccacaggagcagcagccacaaatgcagatggatcagccaagaacggccttgaccttttcagcaagtggaaaggtgtaatcagtttccacagacaaagccaggacccgcttgtatccattgatgatagaatggggcactgatgcaacagtcgggtaacctatctgcagacatacgctggcaacgttgcggacaccctccaggaagcgagaatgcagagtttcctctgtgatgtcaagcacttcagggttgtaga

SEQ ID NO: 10883 - DNA, 630 bp, Canis familiaris
acagtataagaatacaatgtggctttccccgaattcgtttgggtcccgtgttttgttgcttgtaaacttgatggttttatgttttaaatcacatcctggattaaaatgtgtctctctaaaggggttactaatattcaccttgttagaaaactctatttaggggaaaaaatgaagcaagtaactgaattatatggaaaataaggttcacacctgtggatcagggattattttttaaaaattagatattaatttggtatcagacaatggtggtggcatttcttgatagtaaataaaataactaaaagcaaatttaagaacataagcagttgtgattcattataggcagtgggaggtaactaactcctagggataaccatttgtatcctattccaaagtcttattttatagtttgaaaagtacttccgcacacagttcttgtatatataaataaagatgtaattataggatatggtgttactgctttgttaaaaagaacctcatttaaaattttaaattgacagctggtatttttttaatgatcttcttttctgttcctttattgtaaaactacacttaaaaataaaaaggttaatgagaaaaaaaaaaaaaaaaaaaaaaaaaaaaaaaaaa

SEQ ID NO: 10884 - DNA, 132 bp, Canis familiaris
tgtttttgctggaatatgaagtctgagaccttcctgtgctgggaagatcgtgagagctgttgaacacttgacaagcagactgcgcatgtctccgatgctttgtatcattcttgagtgatcgctcggtcaatg

SEQ ID NO: 10885 - DNA, 633 bp, Canis familiaris
ccttagcatggaccctcacggtaccaagtcaatccccatccggaaagaagtctgtgtataaggcaaatgtccccaaagatcagccttaaagtattagcatgttgttgtgattttcactttccagatagaagactaagtttagggagtgatacagaggtgatctagtcttaatgggagtgaaatgtcattttactttcaacctgccttcaggccataagtgaaagccaaattcattagctttggttagacctaagtagtttccttcctcacttttacaatggacttgggtcttgctatagctcacagcagctccatacagtactttgatcccacctaggtgggtaccgctaccatgaccaccatttaccaataaggaaacaaatgcccaagcctttacctactagatgcccagctaggtgcccagccttgctttgtgactcaaattctcccattaaaatcaatcagtcccacctccctttcacatttttaggtgctaaggggattactcaatctgacgtccccaaacttgaagtaaataaaaactgttaataaaactaccactggactacagtcagataattttcaagcaatcaacaagttcacgccttattgtcaaaaaaaaaaaaaaaaaaa

SEQ ID NO: 10886 - DNA, 428 bp, Canis familiaris
  misc_feature (185)..(185): n comprises a, c, g, or t, or includes no nucleotide
gtgggttggaaggacaagacatcctaccgcctggttcctgcagcgtcggcgcccaagtgggctacattcagagtgctgggtttctacgagggtcctgagccttggtggcccgaccagcctacgtggttctggacacaacccatgcggggttgccgccctggggtccttctgcttctcccaagagnacatcatctgggccaatctgcgctaccggtgcaatgacaccataccagaggactacgagactcagaggcttctgcaggcctagggatgggggtggggacccattgctggaagatggcaccatcgtggctaccctcactgcaacaaacagggagcttggcacccggctccaagaggtagctgccctagaggggctcagaaaggacaaaataaagtgtgtgtggtggaaaaaaaaaaaaaaaaaa

SEQ ID NO: 10887 - DNA, 584 bp, Canis familiaris
  misc_feature (229)..(229): n comprises a, c, g, or t, or includes no nucleotide
gacaggaatggaggtgcatctggcccatgcccggtgcgcgcgagcctgcgcacgccagaagtgaccgttgtcagtgcatgttcacgtagcgcccagtcgcctgcccgcgccattgcaacagggtgggatgcgccttgcgtcgaatggctcgcccactttcgtggtatcagatggattcttaagggcaccaagtctgctcaaagtgttcactagcacaagatgcgttganacccagactgtaatcctgcccattgccttctggtcccccatcatgaccagatcttcgaaattcttcatttcaatacccagtcatttaatagttccttctatttttcccatttgagcaactagaggccaggaaataggcaaactatcactcacagtccttttgccttgggttccagtagctcattcccaacctggattcttctgtggttgctgctggctcaatgaaggtccctaatcacattccctaccagttggggttcttcttttctgggagacactgtaaagagcacaagagagtaaataaaacagttgtatgatctgaaaaaaaaaaaaaaaaaaaaaaaaaaaaaaaaagg

SEQ ID NO: 10888 - DNA, 451 bp, Canis familiaris
atgaatgtgatctgacacagtccggttggggttaaatgggggcacaaggggaggttcgcagtcatcagggatagggcggagaagtttgggggcccgcgtgggagccgatgagtgtgagcacccaacttgattgctcggtctcttggtaaatatggcatcatctgcatggaggatctgattcacgagatctataccgttggaaaacgtttcaaagaagccaacaactttttagtggcccttcaaattatcttctccacgtggcggaatgaacgaaaagaccacccattttgtagaaggtggagatgctggcaacagggaagaccagatcaataggcttattagaaggatgaactaaggtatctaccatgattatttttgtaatctggtcagttaataaatgactactttcaaatggcaaaaaaaaaaaaaaaaaaaaaaaaaaaaaaaaaaa

SEQ ID NO: 10889 - DNA, 550 bp, Canis familiaris
gatacattgtttaattatttagcatggttaccaaacttgagtgagtgtcattttcaaaaagagttgtagctctttggattattgcagtagttgtataagtgtacaagaatctgtgatggatgtagtcattagtaaagcatctaaatcacttgagtattttaccatggatcattattattaaagcacaaataacccgttgttagaaaatgtgtttttataaatgaatgtaaaaataatcaaatgaattgtgaaattgatgtttaagaaaatacaggtttaaaaagtaactatattaagtaatgtcttgaaacaaacatatcatgaaaaacactgctttactaggtatgtgattataagctacattcacccagaatttgaacactcaacttcattagactttaatatttagtatattttgatagtaaaggattttgtttcttgaatatctttcacttttttaaaaactttgatttgtgtggcatttatttttggaagtgtcttttttttttctttattaaaggttttgaaactcgcctaaaaaaaaaaaaaa

SEQ ID NO: 10890 - DNA, 596 bp, Canis familiaris
ctctttgacgacttctgggggccataaaatgaggtgttccaacgcgtcctccagctacaagtccagattccccttaattgaatagctaccccaaagcccccaagtttaacaggtgccgagttttcctttgaggcgaggagaacacagtggggcttcacatccctgtgaattatgttattatcatgacagtagcgtagagcttctagtatctgtctcatgtaatgactggctacagcttcaactgtatacaaaaccagcatcagctcgctttacgatttcaaaacacagatctgctccatccataaattcaaaaaccatgtaaagcattccatctgagctatatgtttccaataactctacaatgtggggatgtttcagcatatgacagactactggcttcccgctttagatcttctgtacttaaccctggacttgatgtgaacttggctacatcaacaatttttacagcaaactgttgcccagtttctctgttgatacatcgtcgtacaacactgaagggacccttgccgatcacctcgcacagctcgtacacgtcctcgaacagcacgtcgtcgtcggccatggtccggagggga

SEQ ID NO: 10891 - DNA, 513 bp, Canis familiaris
caaaagagcccaagaagagattttgtattgctggaggctcagagccgcagaggccgtccgtgaacacggagcagtgggaactctccaggcttcgtccacccgaggacacccaaggtcccgttgccctgcagcgctccctcctccccatgtgaccactgagtgtgcagctggagcaggataccctcatttttaggaatctagtgatgcctcttgcctcagggaaacgtttctttgatggggagtttatgagatttctttttcttgtttatgctttatttgtggtaacgaaagagtgaatgacttccacagccatggccggccgggccggcaggcagagcggggcctggggctgcagggctgcggggctgtccctggtgcagccgctcctgaggtgtgagaggggctgtggcttttgtgcggcgcgactatgttggtgttggggggtggtatggaaattgttaatcttgtataaagcaactcaataaattgtttcaaggtttccaaaaaaaaaaa

SEQ ID NO: 10892 - DNA, 633 bp, Canis familiaris
  misc_feature (215)..(215): n comprises a, c, g, or t, or includes no nucleotide
ccgtcagagaataggcatcggacccgagaggagccccagggaccacaggtaagtcaatgccccagagcggtgggcaaagccacgcccccccacaggcctcccgtttactatagcatcagaaactgtcacatctctccccttccggagagcagggcttgcactcttcccctagaacctactttgaaggcaattagaagctttgttttcatttcccnctggtattgtcttgccaggatggttaggtacacaaggacgcttattagatcactgagaagaaaaagccaaacccgcttctctggtatgaacatctagtttgagagcaagcaaaacagtaggcttgtattagtgctttaatggagtactggtaacatttttctttcttgataggaatctgcttatatttagccaggcttctatttcataccctctcccactacaaactttccgtgcagttacctttcatttttaaagcaatttcactgctaaatataaattgtatttgtggggttcatagttatataatgctgaagggaaccactctttcgttgaaaggtgataaaagttaaataaagactctctccacagtaaaaaaaaaaaaaaaaaaaaaaaaaaaaaaaaaaaaaaaaaaaaaaa

SEQ ID NO: 10893 - DNA, 606 bp, Canis familiaris
gaataagttcagcgttcaggacttaatgcggaagccacctcctgtcatggacaagaggccttggatatttaggactttggagctagagagcctccgaggggctgatggtggatcgtttggaggcagactttgtaagccatagcagttggccacgctgaaggggacggaggacataggaaggagaggaacgggatctcctgagcctggcccagacctgagaccaggtgcttcagccaggtgggaaagagccctgtggaatgcagcctccctgccaggctgtggtgactcctggttgcaagggctccaccctccccgcctctgcacgatgagagaatgtataattccctttggagagtgtgtgatttaatcacagggtgaggtatcaagaattcatcactaggtgcgattaagaaacagctgcttaacactgtcacttcatcaggataattggtcataaaatatctcagaacttcaatatggagttttcatgtagtatattaaattgtattttctaatttctagttaaactaaattattgcctcgactattcacatattctgcttcaaaataaatacactatatttgctaaaaaaaaaaaaaaaaaaa

SEQ ID NO: 10894 - DNA, 617 bp, Canis familiaris
cccctgccggctgctctggcaggcgatgaccgtgcaggtgttttctccttcctcttcgacatggccacaggaaaactgactaaagccaagcgtctggtggtgcattgagggtagccctgtgaccagcatctctgcccgctcctgggtcagccgcgaggcccgggacccctcgctgctcatccatgcttgcctcaacaagctgctgctctacagggtggtggacaacgaggggaccctgcagctgaagagaagcttccccattgagcagagctcacaccctgtgcgcagcatcttctgccccctcatgtccttccgccaaggggcctgtgtggtgaccggcagcgaggacatgtgcgtgcatttcttcgatgtggagcgagcagccaaggctgccgtcaacaagctgcagggccaccagtgcgcctgtgctggatgtcagcttcaactgtgatgagagcctgctggcttccagtgacgccagcggcatggtcatcgtctggaggcgggagcagaagtaggtcctgccgtgtccatcttcccacccacctcctgctccagccttgtgtttgtaaataaagttcctgtggttgtgcccgaaaaaaaaaaaaaaaaaaaaa

SEQ ID NO: 10895 - DNA, 613 bp, Canis familiaris
tgctggagacccgcctgggcagaatggacttacccaccagggcctcctgtatgaagcagccaaggtgtttggtcttcgcagcaggaagctcaagctgtttctgaacgagactcagacacatgaaattacagaagaaatccccatgaaggctttgaacatgaagactgtgtatgtttctgtattaccgacgacggcagacttctaacggtcatcatcctcgtggtggagtcagcctatccccggcacacacggaaggtgttcttttcaggtgcatgtatgatttgctactttgggtacaccagtggaaatgggactgattcctcgggtgacttggcacctcacatacaccagtgcctgtatcccgcgcagccaggttgggggcaggccgcacctccgctcacttctgcacttgcacagcatggaagtgatttcaatggcagatatttatcattctgtggcattttaaaatttgtttgagatgtcttgaaggaatgtgttaaatatctgctacctggattttcctgggtaatttgatggaatacgttaagcttcagtaaattagaaccaataaataaattttctctcagaaaaaaaaaaaaaaaaaaaaaaaaaa

SEQ ID NO: 10896 - DNA, 615 bp, Canis familiaris
ttggaaagtctctataaataaagtaaatgctaatctggtcgaaaaatcggtgtctttggtaaaaattctatgaggatgacatattccatcatgttattcgtttcacatttccttttgctcagtctccaagtgcaagcacagcttgtggtataacctattgttttcccattctaataacttctcaatcgatcttcgtgttcttttactgaggcaaataactggccacatactgcaacctaatgtgcagcagcacaaaggcagccacaaagtagccaacgtacattaacaggaaggttcttcttaagacaactgttaactctgttgatgctggctttaaattcttcaggagctacttttccagttaatgaagaagggaattctgattcaaatttgttgctcagtccaaatacggtgacgtgaccggagccgcggaccaccaccgggtccggcgagtacttgagcagctgctcctccagggcccgctcctcgtcctcctcctcctcgtagatctcgtcgaaatccgccatcctgggcctcccgggccccccgccccggcccgaaggggcccgactccagggcccgggcccgggctccggctggcgaggcggcgggcgc

SEQ ID NO: 10897 - DNA, 653 bp, Canis familiaris
gattacctattcaagctatggaataccgtgggtgtatgcaaggtacaccgtacacggatcgagagccacttccagacttgggtttcttgtgtccgattttcacctgatagcaagcaatcccatcattgtctcctgtggttgggacaagttggtcaaggtatggaacctggcaaactgcaagctgaagacccatcacatcggccacacgggcatacttgaacaccgtgaccgtctctccggatggatctctctgtgcttctggagggaaggatggccaagccatgctgtgggatctcaatgaaggcaagcacctttatacacttgatggtggagacatcatcaatgccctatgcttcagtcctaaccgatactggctatgtgctgccacgggccccagcatcaagatctgggactctgtggaagccaagttcattgtagatgaactctaaagccaagaagttatccagtaccagcagcaaggcagagccaccccagtgtacctctctggcctggtctgctgatggccagactctgtttgctggctacaccgacaacctggtgcgtgtgtggcaggtgaccatcggcacccgctagaaatgatggcagaactttaggaataaaaccttggttttctgaaaaaaaaaaaaaaaaaa

SEQ ID NO: 10898 - DNA, 343 bp, Canis familiaris
gaaagcttcttctggctatcgtgggccccgtaggagagattttctaaataaatgaagcatatccttcaatgacttatctgcatgcagcaatatcaaccatcacctaacccaaagagctttttactaaggactgtgtcagggtattgtgcttggtttgcacatgtggttattgccttaattctttttttttttatttttcctctacaatcaatgtgaagccatatcacatgatggtagtaataatgcatgtttataaggcataattttcactgttcttattctaatcagaatccccaaattaaataaaaatcaccaaaaaaataaaaaaaaaaaaaaaaaaaaa

SEQ ID NO: 10899 - DNA, 498 bp, Canis familiaris
  misc_feature (26)..(26): n comprises a, c, g, or t, or includes no nucleotide
  misc_feature (84)..(85): n comprises a, c, g, or t, or includes no nucleotide
  misc_feature (195)..(195): n comprises a, c, g, or t, or includes no nucleotide
acatgttcccagacccctgaagtacnctggccatctctggcgcagtgtgacgtttctggctggccacatcgcgatgctggcccnnagcacggccatcccagacgaaccagccacacctagtgccacgaaacggaggacacggaactgaattgaaagcccccaaacattgaactactgaatattcccacgaaacanggagtccacagaacccattcaccacgttctgtaaacgagaaaccgaaaactttactttaaacccaaaaagttcagaacttgtggttacaccttttgcttgttgttttttctatttccccaacccagagtgaatacctatgaggcccaatactccgtttctttggcatggtgtcctagccagatgctgtgaatattcctaacttagctgccagctgttgcatttgaaaagttgaaatttgtaattagtctgttttggaataaagagagtaaccagaaaaaaaaaaaaaaaaaaaaaaaaaaaaa

SEQ ID NO: 10900 - DNA, 701 bp, Canis familiaris
  misc_feature (1)..(1): n comprises a, c, g, or t, or includes no nucleotide
nggcggcgcgtgggccaacctggttcaaccacatccgtgcccggaaatttcgcagtatcggcagggccccgccagggcccaggcccgccgctattgcccctgcggccttgcgtcacgggccccatctcggcccgatctggtcccgcgttgcgcccccaccggtgagtgtacccactcccgtatggttccgggcccggccaggggccttccagccttggaggagcttcccgggttggcccggccattccaccaggaagggtgggccccggacccattggccattcttccggtgaaccccccgcggccgggaacaagtcccaccggagttccctgcaggcccaacggtgcagcggttcaaggaataccgctccaagctcatcctcttccccaggaagccttcagccccccagaagggcgacagctcagctgaagaactcaaactggcaacacagctgacaggaccagtcatgcccatacggaatgtctacaagaaggagaaggccagagtcatcacagaagaggagaagaacttcaaggcatttgccagcctccgcatggcccgtgcccatgcccggctttttggcatcagggccaaaagggccaaggaagttgcagaaccggatgttgaaaagaaaaaataaagtgctattggccactcctaaaaaaaaaaaaaaaaaaaaaacaaaaaaaaaaaaaaaaat

SEQ ID NO: 10901 - DNA, 542 bp, Canis familiaris
atggacataggtagggcccgagcaggatttgtgtgtggacatcgggacctgtgctgcttcttgtttatacccgaaccctgctgtacgacacaatccattgcccatccagaggacccagtactttccagtcccagtcactctagggctctgcactgaatggctgacctgacctgatgtccattcatcccacccgctcacagtgtggacttttctcccctctttctaagagacctgaactgggcagactgccaatcaaatctcggtgttctatttatttattgtcttcctgtaagacctttgggtcgaggcagaggcaggaaactaactggtgtgagtccaacgccccctgagtgactgtccccagcccaggcaagaagatctcccttcaggtgccgggcgcaggaactgcgtgtgtcctacaccatggtgctattctgtgtcaaacacctctgtattttttaaaacatccattgatattaaaaaccaaaaaattattggaaagtaaaaaaaaaaaaaaaaaaaaataaaaaaaaaaaacaaga

SEQ ID NO: 10902 - DNA, 626 bp, Canis familiaris
cttgcccttggccctcaaaagtccaggcttttggggggggggttccttcctgtcattggccagaaaataagtggaagcccacatagcttaatgttggcctatgtattcatttggctctgaccacaggtaccctgaaggctgttttggaaacccatgtgcacgggtgccaaattcccctaaatctggagtataaggcaatttttgcatccccctttcttgcagaccctgagactggctttggaataaagttaaaagccattcggggacacactgcctgacatgtagggccccgggttttttggccattgttctccggccaggccagaaccttttttgaatttgcctgcctcccatctccaaagaaaagtgctgctctttgtcatgagcacctccgtggatgggacagggagggagcaaggtaagggaccgtcaccaagatgtagcagctgggggcaggtgttggcagtagcccacctcttagaaaccggagcagcctgaagcctaatgtgaaagggccacaggttttataaatggggacatggaagcagaaactggaatcaaatgccgactgtaaattgtatcttataacttattaaatgtttgctctgtcaagctcaaaaaaaaaa

SEQ ID NO: 10903 - DNA, 609 bp, Canis familiaris
agaaccgggtatcttgagttccacaccagagttggacgggtgtcctgtccaaggacatccagacccagtattacatcgagcatcccgtgtccctggagccataacctgatggagggcagctattaccaggtgtttctggcccaaggcacacatccctgctgagagctataccttcttcattgacatcttgcttgacacgatcagggatgagattgctgggtgcatcgagaaggcctatgagaaaatccttttcactgaggccacccggatcctcttcttcaacacaccccaaaagatgacggactacgcccagaagcgagggtgggttctgggcctcaacacactactatcagctttgcccgccagcagcagaagcccgaagacacccccatcccctccacggaactggcccaacacggtcatcgagtatgcccggcagctggagatgatcgtctgagtcccccacggccctggggtggggcagggcttgcagtatttaaagccgtggccgtgcagggcttcctcccaataaaggtggattgaccaaaaaaaaaaaaaaaaaaaaaaaaaaaaaaaaaaaaaaaaaaaaaaaaaaaaaaaaaaaaaaaa

SEQ ID NO: 10904 - DNA, 589 bp, Canis familiaris
  misc_feature (247)..(247): n comprises a, c, g, or t, or includes no nucleotide
ccccgatcatcaatggtctacacagcattgcgagaagcattgaatctgcgatactactcagaaggattgactatccatacccacatcgttagcaccagcaacttcagtgagacctcagctttcatgccagttctcaaagtcgttctcacccaggccaataagctgggtgtctaaaaggacatctttactcccagcccagccatttttccaaagaaacatattttaaaaaatgttaagatatggaccnatcctcattagcatgtttccatagcagccagtcaagagcatttacactatttctgcagataatacttactttagaactgctcaaaacccaggtgctttcttttgttttaatcttttattgctcatgatgattttcatattctgcaaatagtgtatttcctggattacacatagtgtgttttcctgaagtattctgataaaatgtggtttttaaaacctcagtatactttttggaaaaggagcatctggttatgcataaaacagagctaaaacctaagtttctttcgtgtcctccctacttcctccatgtcatcagattaaagtatgtaatcctaaaaaaaaa

SEQ ID NO: 10905 - DNA, 625 bp, Canis familiaris
aatattatcaatataaattatattaagtctaaaaaaagtaatcaagttctctggggaacaaatgagttcattgcaatacagtatttttactgcgcaccattccagttatttgtgttacacccataattaattacattggttttttttttactgtgttgatttagatttgagcatatgtttctttgtaatttatcctaagccttcctgtttaaaaccaattagtggaagcctgatgatcacattcctctttaacagatattttaatgggattactaagtatttcattatctgaaagcacttaatgctctatcagcactgggttctcctaagcaatgttcacaaaattagttagaacaaaaatgaaataaattccatctgtgaggatttatcttgctgccatttttggagggtacttttcataggttttctgcattaaaattcagtatgatctaacacagcaaaaatatcaagactttctttttcctctcagtgaatacaatgtgctttgaaaaaaatgttgctctctttctcagcagaattttgaaaagcattttctgattagattagtactttatcaaattgctcagaattgtgctgcattccattttaaaaaaaaaaaaaaagg

SEQ ID NO: 10906 - DNA, 604 bp, Canis familiaris
aattaatggcaaagtctcaagaagtatatggagaacaggtcgaagactacctatacctgggtattacactttggatggtgaggactttagagttgtgttggaaaaggacacctatggatgtatggtgccatggtaaaagaatggagacagcaggtgagtttgtagaggacgggactgaaactcacttcagtgttgggaaccatgactgttacataaaggctgtcagtagtgggaagcggaaagaagggattatccatagtctcattgtggataatagagaaattccagagatccttgaatgacttcatgttagtgaattttaatcttaacaagtaaaagatgaagacttttaaattactgtggtaattaaatatgttcaatatgtacttttcagtacacttagtctgccaggtgtttattttttagatacttgaaactgtaatattttaagagtcaaaaaaaaaaagaaatatgtacaatcttaaaaattgcgatttattttataaataatgtaaatgttttaaagccacatggaaaaaaagatatggaccaaaatcaccatgttttacagaggaacttttactataataaatactataaaata

SEQ ID NO: 10907 - DNA, 663 bp, Canis familiaris
  misc_feature (1)..(1): n comprises a, c, g, or t, or includes no nucleotide
nggaccgtttttttttgattggtgatttactttttgtcgtagcgtgtgttttggtccctgttgcttcggttatattgtctttgggagttctcatgcgcctgtgtagccgtcctttcctgttaggtttatactctcatcttttataattccatttgtgggattttgagacattttgtggacgtacaggtgtctgttccactctgtccgggccttccctggagactcctgtcccctgtttgtgggagggctggtgtccggcgctggacgggtccctccctcctggtgtccggtgtttccgtgactgagcatgggtctcacattgtttgtcttacaatggcagactttggatctctgtctcgcgggcccttctagaacgtctggagggtcggtgtggtcctgctgagcccggtgggcccgccagcaccccttcccccccagctgggctccccggtgctctgactcccagggtagcctgaggcctgccccaggcagaaccagaaccctccatttccaggctgggaaacggccgagggtgcttgagccgaaccacgtgcaggccgttcttcagccatttctaccacgatagcagaattgaacaccttggcccaaataaagttgaaattttaaaaaaaaaaaaaaaaaaaaaaaaaaaaaaaaaaaaaa

SEQ ID NO: 10908 - DNA, 598 bp, Canis familiaris
cccttttttattgttaatccatgtggagtacccagagttgtgttagggtgttgactacaactgagtttgggtcttactgatccagaaatagcctccatagtttgagtagttaccagcttatgaagtagtcattaaaacgaacatggagcatacacattatgtatactgctttttgttataattcataccgggtgtgttctgataaattcatccttactgtacagaaaaaaaaattacttttttaccaagttttccaaagacagaatagatcaccaagcttaaggaattgaatattgcagtggactagacaacttcaaaatgcttagaccattccaggaggaaaacagctgggaattcagttcattcatttgaaattgttctacaagaatcaaaactcaaaacctcaaggctcaggatcccatagatcagagtctacctttttgataaactcttagtaaagtcttggagactagaaacaagatagtttgtgacacgtatgcttcccaaaaactagaatagatttttactgaatagtggtatatctaatggtatatgtttcttaaaggtccaaatgtaataaataagtgaaaaaaaaaaa

SEQ ID NO: 10909 - DNA, 546 bp, Canis familiaris
tagagatcattcacgtattaatactgtgctctctttaggccccatgaggccaaattattgagaagaatctaagaaacccgtgagggtagtttcagttaaaacctggaaaataggaggcttagccttgtcatgacagctgcgcctccctaccacgtacctggtgtatgagtgcccctatttgaaatggcttttattttcatgtcttccaaaatcttagaagaggtgatggacttgaagattcaggatatgaaggtcacggggcttgtgttgtctactgacccgttctaccacgttaaagtaatattcttgcacgaggagttggcgggctcctcgatggcttactataaagtaaattattaaagtgaaatctgtttttttttttttaaatcttccacttctaaccctcagaagtttgtgtgtctagaagaagtgatcatctctggctctaataaaatgtcccataaactgcctgtaattccagtttttctgataaaacttaaccataaaaatatttactgtaaaaaaaaaaaaaaaaaaaaaaaaaaa

SEQ ID NO: 10910 - DNA, 662 bp, Canis familiaris
  misc_feature (112)..(112): n comprises a, c, g, or t, or includes no nucleotide
  misc_feature (114)..(114): n comprises a, c, g, or t, or includes no nucleotide
cggagatgagatgatgagagaggccagacaacaccaggcagagatgagaaaccagcttcccatgctgggagccccgatgtgggactcacatcctgggtctccaggatcaggncntgggctgcaggcggcgctaaaccgctgagccacctgggctgcccagcattatattttcaaggttaatcaaagttgtagcatgtgtcaatactccatttatttttttccctgccccagtacttcccatggtacaaatatgccacattttctttgtcagttgacaacattttggttatatctgtttttggctgttatgagtaataactactgtggatattcatgtacaagtttctgtgaacatgtttgcagctttcttgtgtatacacctaagagtggaattactggattatgtgatgactatgtttaagattttgagaaactgctagactattttcaaagtggttataacatttgatgtttccatcaacagtgtataaaatgtataaaggttccaattttcacagcatcaccaacaattattatctttgaataatacttttaattattttaaatattaatatttttattctgtgttgccataacagtaggaagcacatattcatattgtgccaaattaaagatactaaactaccaaaaaaaaaaaaaaa

SEQ ID NO: 10911 - DNA, 600 bp, Canis familiaris
gtttgcacgcgctgtgcccacgtggtcaaccagccgggcggaaattccgcagacgcaagccctccagccagcccgcccgcatcgcccgcggccctgcgtcaggcccatccgccgatcgtccgctgccccacggtgaggtaccacacgaaggtgcggccgcagggcttcagcctggaggagctccgggtgccggcattcacaagaagtggcgcggaccattggcatctcggtggacccgcggcggcggaacaagtccacggagtccctgcaggccaacgtgcagcggctcaaggaataccgctccaagctcatcctcttccccaggaagccttcagcccccaagaagggcgacagctcagctgaagaactcaaactggcacacagctgacaggaccagtcatgcccatacggaatgtctacaagaaggagaaggccagagtcatcacagaagaggagaagaacttcaaggcatttgccagcctccgcatggcccgtgccatgcccggctttttggcatcagggcaaaaagggccaggaagctgcagaacaggatgttgaaaagaaaaaataaagtgctattggcactcaaaaaaaaaaaaa

SEQ ID NO: 10912 - DNA, 562 bp, Canis familiaris
tccattcctgagactcgttttgttaatatttgatgatttagactattttactgagcacgactttataaatattttgcaaggcacttaaagtgttacagatgttttaaaaattatttaagttttattgggttaagaccgttctttcggtgttctcataaacactgtattttcagaaacacgaaagtgatggtgctgactggagttttgtgtgtaccgcacaactgtcctcgactacataaagtagcatttttttcactattagaattggaattaaataatgcctatgcagttaagttggataaaatgtatacagatgtttcagatattacaagataaatatataaatcgaaatttcctatataaaactaaatttgggagttgggtggaaatattttgaatatttatttttaaagatgcaaaataggactttgtgcacggtatttttgtaaatgcttttcaaaatactggtctttggtagtgcttcttttgccgccacccaattgataagatgctattgaaatgtttaaataaagagtttaaatttttaaaagtgaaaaaaaaa

SEQ ID NO: 10913 - DNA, 373 bp, Canis familiaris
tattgcgtttaccttaattggaaggaaagatgaaagaatgccttaacacagaaaccattctcgtcccatatataaagaacaacgttactccagacatggaggagatgtataagaaagcgcacgctgctatacgagagaatcccgtctatgagaagaaacctaagaaagaagttaagaagaagaggtggaacccgtcctaagatgtctcttgccccaaagaaagatcgggtagctcagaagaaggcagcttccttagagctcaggagcgggctgctgagagctaataaaccaaaccataattttctatgaagattttccagataaagccaataataaacttattcaccagcaaaaaaaaaaaaaaaaaaaaaaa

SEQ ID NO: 10914 - DNA, 567 bp, Canis familiaris
  misc_feature (253)..(253): n comprises a, c, g, or t, or includes no nucleotide
gtagttctaaaaaaaaagttctgaactcaccacgtagtagtttcctgccctagttcttttcctcaccaacatcctactgaactagagttactggccaatttaatggaaaatattttcccgtttctgtagaagccttttaattatccttggtcaaataattcttatcctcatcaattctgcttaaccgggccatggaaaattctgaagacccataatagcctgaatagttcccttagtcattagcccagacccnaatcgcagttgtatttatgataccttttattcgttcttgaagcccaagtgccagtaccttttgtctgagaatgagaacaccaagggtcaccccatgtgtgtccaaatgaatacactgaatttcaaaaaaatatattttatgtacattaccttgaactcaaactgtcatgaaagctaagaaaacagtgctcatccatgggaatgtgtaatgaatgagttaccactcttgagaagagctccttgaagcaaaaaacaaacttttttttttatctcccctcccacccaccaaaaataaataaaacaaaccaacaaaaa

SEQ ID NO: 10915 - DNA, 659 bp, Canis familiaris
gaggtccttcacccgatttctgagctggtcatgaacaggatggggagtagtgcacggtctttccctagctggatcatcttcatgtaccgatggacgtcagcaggtagggaggccccgtcaaagacgaagtcgtccaccatcacattcagtgttagtcttggtctccagtgagaaacaggctcatccagggcactcggtggcttcttctctgcttctatctgatgctgcgtagcagattccccagtgagcagattgacctcttctggctttgggaaccatgtaggtcgtcagtgggctcaccaggtgcacctgcttcccgtcatgccacgggagaatgccagcatgatggaggaagatgtaggcatacaacgtcccgttgtttctagttttctttggtacagaaacattaactgtcttctcaaattttgactccacgtcaaagtcttccacgttcaggaccagatccacgttgttctcagcaccgaggttggaccgtgtggtggtgtagacactgagctgcagcttcggcctccgcgccaggtagggctggatgcagttgccgtcgcgggcgcacggccgggtgtagacgatgccgtacatcacccagcaggtgtgcaccacgtacaccacgaacacgcccaccaccaggctggtgaagg

SEQ ID NO: 10916 - DNA, 651 bp, Canis familiaris
  misc_feature (371)..(371): n comprises a, c, g, or t, or includes no nucleotide
agtaatcttttttattaggcgtttgcaggaatgtcatatcctggtgaattttggccaaccacttatttaatctagcattgttttggccaagacattgagatgcaccagagaatcccagagtggtcacaaagaagccagcgtgattggaaaaaggtaggaagtttgtgcagaagtgggaagattggtgacagaaaagagaagagaaataataagctgaggaagaattacgaaggagtggtcagaaacatatgtttggttttgaagatgccatgtagctgctgagtagttttaggctaggtgtggggtaggagctccttaagtggttgcacacacagtacatgaattgaacaaataaatgaaatagccatgcnctcaggcacagaagtgatttaagggtcctggctaacattggttccttaaccctggccgcaggttggaatcctctgaggaacttctcaaactgctattgcccggcctctatcagcttatacttcagttggtctggactggacatcaccacctgtgtttgtgttttttttttaaatttaatatatatatacatagaatatatcttctcaagcgatcccatctaccgagagttgagaactgttgaaaagaagggaaatcgacaaaaggagattaaaagtaggt

SEQ ID NO: 10917 - DNA, 670 bp, Canis familiaris
  misc_feature (557)..(557): n comprises a, c, g, or t, or includes no nucleotide
tataggacctcccgctatgtggaaaggaaatgtcttgtgcaagcacaaagtgactccttgctccagcacgtgtgggatgggaatatctgatcggtcacccatgaaaatagccactgtgaaatgagaagagagagaagactgtgttatattcaacccttgtgaccgtaatatattaaagagagtaaagatcccgaaaggaaaaacgtgccaacctactttccaactcttcaaagctgagaaattcgtcttttctggatgctcaagcactcagagttataaacccactttttgtggagtatgtgtagataagagatgctgtgttcctaataagtcgaaaatgatcaccattcaatttgattgccccaatgaaggctcatttacatggaagatgctgtggattacatcttgtgtatgtcagagaaactgcagagatccaggagatatattttctgagctcgagatcctataaaacctagtatatgtgggaaaagttaggttcaggtgattatgtcattacctaagaaaattggaatggtttcaaaagggtggcaaacttnccctaaccttattggtttaaaacagtaagaatgcctacctattctcagatgactatctttaaggcattagaagctattaaaaaggttctcttaaaaataaaaaaaaaaaaaaa

SEQ ID NO: 10918 - DNA, 573 bp, Canis familiaris
  misc_feature (1)..(1): n comprises a, c, g, or t, or includes no nucleotide
nttgcaggactaccacttgcagtgaaggagaagtatgcccagtacctgccccacaagtgcaggccgctatgcagccaagcgcttccgtaaggcacagtgccccattgtggagcgcctgacccactcaatgatgatgcatggccgtaaccatggcaagaagctcatgactgtgcgcattgtcaagcatgccttcgagatcatccatctgctcactggtgagtggtccccgggaagactcaacccgcattgggcgagctggaacacgtgaaggcgtcaggctgtcgatgtgtcccccctacgccgtgtgaatcaggccactttggctgctgtgcacaggtgcccgtgaggccgccttccggaacatcaagactattgctgagtgcctagcagatgagctcatcaatgcagcccagggctcttccaattcctatgctatccagaagaaggatgagctggaacgtgtgcgccaagtctaaccgttgatcacctggctgtggcttcaataaacctgtctgcccttggggcagcctcacccccaaaaaaaaaaaaaaaaaaaaaaaaaaaaaaaaaggg

SEQ ID NO: 10919 - DNA, 104 bp, Canis familiaris
gaaatgtgatttgttattttcatattgagatgatgtatctgatatttgagacattcaccataacctaataaactgagtatttccccaaaaaaaaaaaaaaaaaa

SEQ ID NO: 10920 - DNA, 439 bp, Canis familiaris
cccactgagatgtgcaatgctgaagtgagtcacaaacttaatgaaatatgtatacgttgaaacattctgcccaggacctaatctgtatgaacttccgttcctagtgactaataacctctaatgactaataggacaaattatgtgtttctgggtctttgtaataatgtgtcagaagtttggagctgaggtagagttatgtttattcagtgtttcctttttaagtgtggctgatgacccttcctggtttattaaataaaatctctatgtactatattatactacaataacattgtattatgagagaaatttataagccaatcaaaaatttcccatttctgcttatcaaaaaatgacacagactcacagcaactactgttgcatagaaatctgtcctaggtcaaaaaatagaagatttactaattttacctgaaattggttt

SEQ ID NO: 10921 - DNA, 304 bp, Canis familiaris
  misc_feature (121)..(121): n comprises a, c, g, or t, or includes no nucleotide
  misc_feature (131)..(131): n comprises a, c, g, or t, or includes no nucleotide
  misc_feature (146)..(146): n comprises a, c, g, or t, or includes no nucleotide
  misc_feature (160)..(160): n comprises a, c, g, or t, or includes no nucleotide
gcccgctggtctccccgttcagtcagagcccatcgtataatgaaggccaccgctggaacaaagtacgcatggctgtggggtcgcccctcctgaaagacaacatctcctactcaagaaggcnctctgagtanctgtatcacctgacntggggcacgggctnccccatcccaccagggtgtcccagctcctcgggaaggcacagcagacagtgggctgaccctcagtggccttgtgactgccttgggccatgctcagtgctgagggataggagttgtctgcaaaggaatttcataaaccaagctca

SEQ ID NO: 10922 - DNA, 532 bp, Canis familiaris
  misc_feature (50)..(51): n comprises a, c, g, or t, or includes no nucleotide
  misc_feature (199)..(202): n comprises a, c, g, or t, or includes no nucleotide
ttcccacctctgacccccaccttctcgtcacgagccctctggctggcgcnnaccaggaagcccttggtgccccaccgtttgctaagacatgtcctggcagggggacacaggcactctggcacagacccagctccacctgatggtgagagctccatcacgccctggccccccatctcgggtcctcatccggggctccgtnnnnctcaggagaagctattgccaagacctcaagtccttcagaaccagaacagggtggccatcaggatggccacccttccataatcctcctttcctctgctccccagaccttgccatttggaaacaaacatcagatccttgccccaccccttgcttccagaaagggtcttgagcccataccccaagtctgacaccctcctcccctcccgccgcctgccaggacactctagcaggacactggtgctttgccgcataccctactgtgctgcacttctttcccaatttttcataaatataaatgtatgtatgtatgtgtaatatttaaaaaaaaaaa

SEQ ID NO: 10923 - DNA, 130 bp, Canis familiaris
cttcttttgccgccaccaaagttgataagatgctattgaaatgtttaaataaagagtttaaatttttaaaagtgcatgtgatgtttccagtgaataataaatggtctatttcttttcaaaaaaaaaaaaa

SEQ ID NO: 10924 - DNA, 603 bp, Canis familiaris
ccttccagagattataatgaagaaacacacagactgttatgaaatttggcaagtcactttggcaggtctcacattggaggtgaccttggcagatgaccagcattgttttccctagaaagtgacacagagatcgactttcctgctgcttttatcatttatcttcccgattcattgagttacacatcttaagatttttaagaagctgccttttcattaatatatccatatttgcctttttttgcacgggtgaccggtttccaaatgtcagaaagaagcagccgcagtttaaagattaggttaatatttaaattgtgtttccagagaaaaaggagaaaccttgagattactgattacataaagcaaataactcatatagcaggtgttaattcaatccagggtgaatttaatttaccagttgtatttataagccttaatataatatacataagcaacgagagtttaatacaacatttgagccttaattttattaagaaagaaagaaagaaagaagaaagaaagaaagaaagaaagaaagaaagaaagaaagaaagaaagaaagaaagaagaaagaaagaaagaaagaaagaaagaaagaaagaaaaa

SEQ ID NO: 10925 - DNA, 562 bp, Canis familiaris
cacagcgagtgttccctcggggatctggccagggacttggggaagagaagcttgaacataaagaaagaggaaatctgaattaagcacagaggtgaagttttataatccccatgcacatacttttcagggacgtagcacttgcttagaagcaagggatggctgtactgtttatttttgacaagccgaaatggagcgtttttcaacccaagatcattatgcttttgaaaatatatggacttttatagtcgtttctgcttcagatttagatttttcattttagtagatttatatgggaaacggatgtatatgtgtaaatataaattctgtttgtcagatattgacaaatgcgtgggcaaaccttcaaatggaaagttccatggaattacatggaaagaaacgcttggaacctgtgaacagtttgctacagctgtcagaatggatttgcagtgaaaggagaagtctcgtgggcaggggtctttaccgttcattgcttgaaaagtggatcttcagatgttgcaaaaaataaaccgtgagccgtggagaaaaaaaaaaaaaaaaaaaa

SEQ ID NO: 10926 - DNA, 708 bp, Canis familiaris
cccaaggcagacaccttttctctcagcccagcgggtctttcaccatggtggccagctgtcccatgagccatgtattgaaaatatgatccagattctaactgggggcctgcaatctgtcaaggcctctgtcctgaaggtattctggattgggcagggggctagatgtaggaattcccagttcctatctgtgtaattagacattctcaatctggtctgaaccctcactggtttccatttctgcctcctctacataccttggcctgaaggtaatgcagtctacagacctgaagaccccctgggactccttgtattctgaaggtatttaagtaaggagacttaggcaggggggtaggaagagtggaaggagggggaagggcatgtgcagagtgccaatggcatgggccatcaagtcaagccttgggtatagatggaacagctgtaacctgggtagtacacacaggtattgggggcgggggttagaagtgtgggtatgtgtctttgctcactcatgcatgtgtctgtgtgtatgtgtatgcatgcaactgagtggaatgagaggtgtatgaaagaatgtgagtgagtgcattgtccttcctctggttcatccaggctctgtgaggcttttctctaatgtaatggcattttgttcctgttaaatttgatttctaagttaattttgtaaaaaaaaaaaaaaaaaaaaaaaaaaaa

SEQ ID NO: 10927 - DNA, 457 bp, Canis familiaris
ctggagatccagaatctgaggatgaagcccaaccccccccagttctccgtacagtggccttactacgtccttggctttgccattcttctgtttatagtggctggtgccatctgcctctttcaagaaacagcctgccttggctgccatttgttgcccaactcccagagtatggaggagacccaaggggtcccaccaccctggagaatctggagagtttgggaggagaactgagctcaatacaaaaggagacactgctgaaggaagaaacaattatctagtccaggagagcatcctccacctgtcatccgctgtgtgagtggatttgtggaggcccgagtggcagccaatctctgtggcttctgttgaacttcctgagtgtcacttccccacactcacagtgattctgtctggcttgtatttgcaatttggtaaaagtttttttgaattaaaaaaaaaa

SEQ ID NO: 10928 - DNA, 602 bp, Canis familiaris
gggggggcttctttaggcccccaataggcaagagccggaaggggccggaaggcttcccctctacctgtcttggagccccccgtgggggcaccatccctctgaccaggagagaaggcatgtctcaatcactggagtgagaaccctctctctctggggtgggtgtagatggcgccccaagtggctgctgcctggaattggtgctctggcctgtggctggctttggcccggtggcccttctctgcctttctacactaatgcccaaggcttgggtacctctcctacctgctcaggcccttaaacccctacaggaaccttccttcctactgcctggtgacccttggtcttgacccattcgtccgctctccctgggcctggtccccgggtctggggtctgtacatccttccctctgaagggcttctgctggtcagatttgaaaaatggtgtttcaatgggtgtgctagtgcgcagggcgcccgcctgctgctttgtgctgtcccgatgctctttcagaaaacattaaacttggaaccatgtgtcttagccaaaaaaaaaaaaaaaaaaaaaaaaaaaaaaaaaaaaaaaaaaaaaaaaaaaaaaaaaa

SEQ ID NO: 10929 - DNA, 471 bp, Canis familiaris
ggtccgtgaagccattgaagaacatggagaagctgaagaggtagacagagtagggccgcacctttttaaggcccgtgatgaagccagcagtgggccgggcgaagatgtcgatgaagcccagcacggtgagcaggaaggcagcctgcgtgtcgggcacacccaggtccttggcgtagctcaccacaaacacgggaggcacaaagagccccagcaccatgatggaggcggccactgcgtagatgaggaagccacggtccctgaagacgctcaggtccagcagccgccgggacggccgctggggcacgggccccgacccgggcaccggcgcctccaagggcctcatgagcgcggcgcacacgcagcagttgagcagaaggccccccaagatgaggaagccgccccgccagccatagtggtcctgcagcagctgccccagtggggacaaggcacacaggaacacagggctgcccg

SEQ ID NO: 10930 - DNA, 649 bp, Canis familiaris
aaagtttgccaacttgcttgatattgacggagaaaattctaaaaacaagatacccaccacaggaataggaagaaaaccacataccattttaggagaatatgaaggtttctcattgcatagttccttagagagaaagaatgttttgtgctattgaaagggcagtgtgggaatggactgagggaatgaggcatggatgcctgttcctcaagtgagcgcagacttggaaaatagatcctctgatgacagttggaaagtggatggtttcccaggaaggagtccccgataaatagtgattgttgctgtagcggaggaagagaattaagcagcctgattgatcaccgggtcaggattaaacatagttgcatgcttaaatgatgaattttcttttttgataagactgttgataaaaactagtggccatttggttccactgggggttgcctgtgcctgtacgattatgcttagtctctgaccagtgagggtattttctgcccctctcatggttcacagagattcagttttgtggggataaaaagccaagtctgaggggcgcccggctggctcagttggtagagcattcagccttttgatctctggtcatgagttcgagctccatgttgggcatggagatcattaaaaaaaaaaaaaa

SEQ ID NO: 10931 - DNA, 572 bp, Canis familiaris
  misc_feature (1)..(1): n comprises a, c, g, or t, or includes no nucleotide
ncatggagagttaagttatcttcacacctgccacatggtggaggctatttttgttaagactgtcagaatttactaaccgcaagttacgacgtagagtcccaagagtgccgtaacctccttatcatggtaattaattgttctcttctgaagatctgtgttgtctaattggaccataattcaggtagagcgtcccagagaaaaaccaccttggactcccgctctggagtctagctggcggctccgagccctgccacggggccccgactcggcctgcctcggcgtcccctgagaggcctgaattctgctcgcagcttcattacccgctgggctggagaacatccttgggttgagtgttttgtttgggagttatttcacgagggccttttaaaccagtagtgtccccatgaagtactagatattatttatgtaagaatgagcttttttttttttaaacaatatcctttcaaaatttctaactactttgtaactgcatgacttaacctggtgataaaagcagttattaaaagtctaccttttcccaaaaaaaaaaaaaaaaaaaaaaaaaaaaaaaa

SEQ ID NO: 10932 - DNA, 631 bp, Canis familiaris
accaggattcatctaaaccgattacaagagagtcatggatgactgaacttcctccagaaatgaaagactttggtcttgggcccagaacttttaagagaagagccgatgacaaatctggagatcgatcagtctggacagacactccagcggacagggagaagaaagccaaggaaacacaagaagcaaggaagtcatttaataagaaggatgaagaacatgtattgtcaggaagggaaaagaggttggctgagcaggtgtcctcatacaatgaatcaaaaagatcagaatctcttatggacattcatcataagaaattaaaaaataaggctgccgaagagaaaaataagccccaagaaagaataccatttgaccgtgataaagatctcaaagttaatcggtttgatgaagctcagaaaaaagctctgataaagaaatctagagaactaaacaccagattttcacatggcaaaggcagtatgtttttataagtaagtatatctcagtgaggtatattttcaaactgataaatttgaacttttctaaatacgctgttatctataagtaattgtgtgtaaaaatctatttccttttataataaagtagtttataacctgaaaaaaaaaaaaaaaaa

SEQ ID NO: 10933 - DNA, 699 bp, Canis familiaris
aagaaagaaggagaaggttctcgcgaccgtacaaaaaccacgttggtgtgacaagaatggtggtacccgagtggttaaacttcgcaaaatgcctaggtattatcctactgaagatgtgcctcgcaagctgttgagccatggccaaaaacctttcagtcagcatgtgagaaagttgcgagctagcatcactcctgggaccattttgatcatcctcactgggtcgccacagaggcaagagggtagttttcctgaagcaactgagcagtggcttgctacttgtgactggacctctggccctcaaccgagttcctctgcgtagaacacaccagaaatttgtcattgccacttccaccaaaattgatataagcagtgtgaaaatcccccaaacatctcactgatgcttatttcaagaagaagaagctgcgtaaacccagacaccaggaaggggagatattttgagcaccagagagaggagagaataatcggcaggagataacacgagaccggcgcacaagggtgagattccaggaaagcctgttgggactcgcaaattctgccaaaaatcaaagctgttcctcagcttcagggctacctccgctctgtgttttctctcacaaatggagtttaccctcacaaattggtgttctaaatttcttacaagaacctaattaaacaactgatccattaaaaaaaaaaaaa

SEQ ID NO: 10934 - DNA, 666 bp, Canis familiaris
ctccccggttctcgcttccagctcgtcttggactgctcctccctccccgtcgtcccccgcgcacactggccgcgtccacaccgacccggggaccggctccggcccgccctcatccccgaaccccccccgtgcggctcctgctcgcttagcgcttcccccgcccccagggaagaaacatattctggtgctgagcgagctgcgcccggaggacgccggtgaggtccgcttccaggcgggacccgcccagtccgtggctcagctggaggtggaggccctgcctctccaaatgtgccgccgcccccctcgagagaagaccgttctggtgggccgcagggcggtgctggaggtgaccgtgtcccgctcggggggccacgtgtgctggatgcgggaggggttcgagctgtgccccggagacaagtatgagctgcgcagccacggccccacccacagcctggtcatccatgacgtgcgacctgaggaccagggcacctactgctgccaggccggccaggacagcgcccacactcggctgctggtagagggacgcgctacatcagcacggagctgggcatccggcagaggctgcttgtggccgtgctgacctcccaagccacgctgcccacgctgggagtggccgtgaaccgcacgctgggccaccggctggag

SEQ ID NO: 10935 - DNA, 556 bp, Canis familiaris
gtccaggagctaatctgaccgttctgttgtgtggatgaccacatcaaaaggcaattttagtgtattaatcatagattattataaactataaacttaagggcaaggagtttattacaatgtatctttattaaaataaaagggtgtatagtgttcaccaactgtgaaaatagtgtaagaactgtacattgtgagctctggttatttttctcttgtaccatagaaaaatgtataaaaattatcaaaagctaatgtgcagggatattgccttatttgtctgtaaaaatggagctcagtaacatagctgcttcttggagctttggaatattttatcctgtattcttgtttgaattcctcctctatttaagatatatacatggaatcgaagtgtttatgtaatagttctatccttttgcctgcaggtcagttgtaataaatttaggatgtgatgatgactttgtaatttgatttcctgaagtcagaccctgagagggaaaaatcaagtaaattccattaaattatctgtgcatttcacattgggaagaaaaaaaaaaaaaaa

SEQ ID NO: 10936 - DNA, 627 bp, Canis familiaris
cttctcccgtctttgaacatctatcttccaggctcccgaggggtgcacagcactcggacttctctgcagccccgttgtggcccacttgcccctgagttcccccatcacgggccacacaagtgtttctggtccctagggcagctccactgtcgttcccactttctcctgaggtagatccctaccctgctactcatgctcatcctgtcccccttagtcctgaaagggaacggccatggtccaggcatgaattccaccccagggaattttaggtacgcccttgtatcccacgggagagagctgcctgcctgttttccactttatatcaagagttgtttgcaaacttttgtaattaaggggtgtgtccacgtggaagtttttaaatgagtctatatggatagctcaagtctttgccactttgtaatttttggctttggattcccattagaaaagtgtccccttctgcatatgagttgactgatgttgtgagtgtaaactgcatttggttatctctgctatctgtggcccaccacatagttttataccagaaaaataaaagtgaattaaagcttgttaaaaaaaaaaaaaaaaaaaaaaaaaaaaaaaaaaaaaaaaaaaaaaaaaaaaaaa

SEQ ID NO: 10937 - DNA, 613 bp, Canis familiaris
caggtcacgatctagatcaccattcaagatcccagaggtaggcgatactcccgctcacgcagcaggagcaggggaaggaggtcaagatcagcatctccacgacgatcaagatctgtgtctcttcgtagatcaagatcagcttcgctcagacgatctaggtctggttctataaaaggatcgagatcccggtcgaggtcaagatcaagatccagatcactttcacgaccaagaagcagccgatcaaagtccagatctccatctcccaaaagaagtcgttccccatcaggaagtccgcgaagaagtgcaagtcctgagagagtggactgaagttctcaagttcaccttttagggaaaagttattttgtttacattattataagggaatttggtgaatgttctggtaaaaggtgtaaccctaggaaaggggtatttcaaccatctaatcaaaatggatctggattattactctgtaaattcacagcagtaagataatataaatttttgttgaatgtattaacatcctatggtctgaaaatgtgggtttttatttggcacatttaaataaaatgtttctaactagaaaaaaaaaaaaaaaaaaaaaaaaaaaaaaaag

SEQ ID NO: 10938 - DNA, 615 bp, Canis familiaris
tcaatcagcctggtcccaccagggaattagtgaccaggttttcaggaaaggattagcttctctctagaaatgcctgaaagaaggattttattttgtggacgaaaggctgtatggaaataccctcctcaataacttgcttaactacatatagattcaagtgtgtcaatattctattttgtatattaaaccaatgctatataatggggaccaatctatattatactgtgtatggcattattaagaagctttttcagtgattttttatcaccgtaattttaaaaatgtgtaaaaattaaacccgtgactcctgtttaaaaataaaagttgtagttttttattcatgctggataataatctgtagtaaaaaaaaaaaatgtctttttacctacacagtgaaatgtcagactgtaaaatcttgtgtggaaatgtttaacttttatttttcatttaaatttgctgttctggtattacccaaccacacatttgtattgaattggcagtaaatgttagttagccatttacagcaatgcccaatatggagaaacatcataataaaaaaatctgctttttcaaaaaaaaaaaaaaaaaaaaaaaaaccaaaaaaaaaaaaaaaaa

SEQ ID NO: 10939 - DNA, 691 bp, Canis familiaris
ggcggatgagcaggagcctgaactgacatccactcccaacttcgtggtggaagtcatcaaggatggtggcaagagggctctggtactggactgtcactacccggaagacgaggtggggcaagaggaggaggatgagagtgacatcttctccatcagggaggtgagcttccaggccgtgggcgagtcggagtggaaggacacgaattacacgctcaacaccgactccctggactgggccctgtatgaccacctgatggacttcctggccgaccggggggtggataacaccatttgcggagtgaggctggttggagctcagcacagccctggagcacccagaatacactcactcttccctctgaggatactctcaagaggttttttgttctacagaggaccccgatgatgaagacgcgacctcgtagcaccgtgagacgcgggacacagaggcggggccctcgggccacagggaaggagccccgccggttgaagccaggaaccgtgtcccctggagatggctttcttcctgatatcatgcagaataattcagatttaaattatttcctttgccctcttaactactcttcatttactgcttctgtacgactctcccactcctagatttttgtataacacaataacggacaataaaactggtttatcttctcccacaaaaaaaaaaaaaaaaaaa

SEQ ID NO: 10940 - DNA, 557 bp, Canis familiaris
tttacagtggctaataacctgtcctaaagactgctagccagagcaaatgttctgggtaaaggttgaattggtacttgagcttgccagccactgaatcacttcatctctctgggatggagaaacattctgatttgtaggcatttttggcacattcaccttccacatctgggcttccctagagattgccttttccaagaggaaagacaatctctggttttccaaaggccctggaaacttcatgatatcctttggatctgcctgcctcccagcctgatgtagctaccttctcctcctcttcctcctcttcctcctcctcctcctccccggcggagctgtaggcctcacagtggagacgcggggtcatccgcgggcccgttaccacctcattttcctcagcgcgcggcggccgggcgcgcgggacgcgggcgggaccgactgaggagggagaagagggggaagcgggcgcgggcccgggccggggagcggggagacgggcggtcgagcgggacgcagggctgcggccggcgggtcagcgcaccagctccatgactgccccc

SEQ ID NO: 10941 - DNA, 521 bp, Canis familiaris
tgtgttgggcatagaagggagccatcagctaggaagctgacttgtgacagcttggatatgacttccaggagtcctctgagtatggcaagtcccgattgttagcatggctcacacgtctaagaagtttgaagaagttagaaaacagaggattcaaacctgcgatgttgggagatttaagccccgcaaagttgggctgttccttccggcctcaccaaactgaggggagatggaggaagcagttagtgcagagagatgcaacagtgtctgaagtacttggtcctcacagaatctacactgtcacgtcctgaactccagggctggagagctgtagcagatgtaggtgtttggactcaagagtttttactgagccgagagcctggggttgctccagctgcacagcagccaggggcctgccagcctcattcctcatggaaagccagccttgggagctggttccagttgaaacagtactgtcatgtgagagggagacattaaagctcattttatggcatgtaaaaaaa

SEQ ID NO: 10942 - DNA, 535 bp, Canis familiaris
agggctcccacagtgctcgtacgtcagatcactgatcacctgcattccggataggcagccccccgccctccgagacactcatcctgagcttctgaggagccccaggacctagtgatgtgacccatctgcccgtccctgagcacccctccctgcccgccccaccccgaggtcccttctgtagcctgagcacccctctcgttattccacggagtcctggaatcccactttgccctaaggattcggtccctgccaccccttagattccttcgaggggtcctgagacccctcgtgaggttacctagccccccgtgcccccgacagacccaccactctcatacacggtgccagcacccgctgcctgcagtcaggcgcccctgcccggtgtcctcagttgcccctcgcccgcggcccccgccccacagagctgctccttgggggggggtgctgtttgagagtctttgtgttgcacattaaaactcaacaatttagacctgccaaaaaaaaaaaaaaaaaaaaaaaaaaaaaaaaaaaaaaa

SEQ ID NO: 10943 - DNA, 611 bp, Canis familiaris
gatgcccacaacaccagtgactcggctgggaccaggggccctaccccgtcccatgaggagacgcactgctgaggctgtgtgcttgcttcagcttaaacatcacccccgccccccatccccaagctttggagctccgcagacccgataaaaggaaactgtcatctgtgggtgcctttggccaaatgaggttttaattcttgtgccactgcccacgggtagtcaccccaggggatggcaagaagcaaggtgggccagtgactagtgcgtggtgggaaccgagagtcgttttctgttcaaactccaactccactgctcgcccccgactcccgcgtgacttgctctttgttaactcgtgcctcagtttccccatctgtaacctggatcaggaggggaagggtggtgatacctacctcacagggttgttgtggggattgaagtgctactttgaaggacatgttgcccagtgttacaaatataggtccatgaaatatggcaggaaaaggtctgagcttagagctaccgcaaagggctctgggtttgtttttgtgagtaaataaaattgtctttgatggtccaaaaaaaaaaaaaaaaaaaaaaaaaaaaaaaaaaaa

SEQ ID NO: 10944 - DNA, 562 bp, Canis familiaris
tgagcatcgtgtcatctccccaggatcccattacaccagcccttacctctgccatccctctggcccttcaaaccactgtctctaccaccaagctcacaaagtttctgaaccatccacatctccttagagagtagtatctactgagctagatttgggggaaaggctgtacctgctaagagagtactgagtgtacactacctgctgtacaataaggtactggggccctagtaataccatggttagcaagagaaaacagtccctacttcatggaactttgaggcttgtgtgaaagattaatatcattacataaataaaattgtttaaatgctacaagaggaatccctaaggtggctcaagcagtttagcaacctgccttcggcccaagggtgtcaattcctggagtcccaaggatcaagtcccaaaattcaaggctccctgcatggagccttttttccctcgcctgggtttctgcctttctgtttttcatggataaataataaattcttttaaaaaaataaaataaaaaaaaaataaaatataaaaaaaaaaaaaaaaaaaaaaa

SEQ ID NO: 10945 - DNA, 602 bp, Canis familiaris
  misc_feature (1)..(1): n comprises a, c, g, or t, or includes no nucleotide
ngcaagtcctggtggactctcccggggaaggagtccccgaatcctctggtatgactgcacatgggaccatgacacaccaaacatgggcctgcagtaatgtcagcgagaatggctggctcaaggcggttcaggtcctcatggtgctttccctcatcctctgctgcctgtccttcatcctgttcatgttccagctgtataccactgcggcgaggagggctcttttatgcccctggcctctgccagctttgcaccagcgtggcggtgtttaccggggcgctgatttacgccattcacgccgaggagatcctggcggaggcgccccccggggggcagcttcggttactgcttcgccactggcttgggtggccttccccctcgccctggccagcggcgtcatctacatccacctgcggaagcgggagtgagggccccgcgtcgcgctgccgcccctgcccgcccctcggtttcagccccgaagacccccgcccccggcctcctcccagaaaataaaaccgtttaaccccccaaaaaaaaaaaaaaaaaaaaaaaaaaaaaaaaaaaaaaaaaaaaaaaaaaaaaaaaagaaaaaaaaaaaaaaaaaa

SEQ ID NO: 10946 - DNA, 564 bp, Canis familiaris
ttgttccagatgaggacaggggttgggattccgatgacctcacagctcaagtacacctgggcgccagtgacattccagatgtccttggggggtgtcacaatggaaggaccttgctcgcaggtgcccttgctgacctgggtgacggccttctccccgcggctctcggcccgcaggctggcggcgcgcagctggcagccgctggggtaggtgacgccgtcgctgccgcacaccgggtagcggctcttgcacacgcacacgccgctcgccgccgagccgccggctgctgccccggctttacccctccgcctcttgcggctcttcacgcactccatgcccggcgcgcagtgccccctgccggcgccgccgcccccgcacggctcgccctcgccgcgcgcgcacaccgggcagcagccgcacgcgtcgcgggtctcgcccagcgggcagccccgcgggggcaggggcgggcaggcggccggcgcgcaggggccgcaggcgtccgaagaggaggaagaggagaggggcaggagcaggagcagcaccccggcggcgccgagcagcagggcg

SEQ ID NO: 10947 - DNA, 592 bp, Canis familiaris
gttaccttagaagtatttgagtggagcactgctgagtttcacttctgccatggctttagttttctcttagactttatgagagatgggttcactggtgtgagaagaaaggaagaggtcacagtgagttgccactcgccaagattcattcatacagcatgttagtgggtagtttattctcctggggcagcacttttaaatcttactctgtgagcaaattgtatttgttcattgcttgccagagatgaacacagaaaagtttgttccatttaataagagctgtcattctgagcttctgtgaagggaaacatttcatgtaatgcggttatagcgaacactggaaagatttattataaaattatattcttgtatactttgtaaattagtctcattaggttttttttttttttccttaagcataggactgaacttaaatttgttaattttaatagaatcagacactgctcatagaaggatcacaaattatggagattaacatatattgttcttgttctaatatatatatttttccatttctgtcatgcttggaaaactagtaaatgttatgtctaagataaaaaaaaaaaaaaaaaaa

SEQ ID NO: 10948 - DNA, 635 bp, Canis familiaris
cttgctttctggctgctggaggctttgacaggcatggactggatcacctgactccagctagatctcctcacctggacatggcaatggcacagaattcaagaaatcaacaaggaggaggttatgcttttgttgatcaaacaaaagcagaaactaagacgtgaagccatgataccaattgctgaaccaaaaatgtccgaggcttcttatgtctttattctctgaagagctttaatatatactgtatgtagtttcataggcactgtaagtagaaggcattagtgtcgcatgtttatgcctgaggaacttttcagatgtgtgtgtctgcatgtgtgtttgtacatagatatcatagacgcagaaatggttctgctggtacgatttgattcctgttggaatgtttaaattacactaagtgtactactttatataatcaatgaaattgctagacatgttttagcaggacttttctaggaaagagcttacgtataattgctttttaaaatgcacgtgctttacttcaaaccaggggaactttgcagaggtgaaagcctttgctaggttttctgttccaataaagcttttacctattgaatgaaaccctctgataaataaaaaaaaaaaaaaaaaaaacaaaa

SEQ ID NO: 10949 - DNA, 289 bp, Canis familiaris
gccacacgggccgccggcccgaccgcctgcagcacctgatcctgccggtgctcgaccgcgccacctgcaacctgcgcacgtaccacgacggcaccatcacggagcgcatgatgtgcgcggagagcaaccgccgggacagctgcaagggcgactccgggggcccgctggtgtgcggcggcgtggccgaggccgtggtcacctcgggctcgcgcgtgtgcggcaaccgcaagaagcccggcatctacacgcgcgtggcgagctacgcggcctggatcgacggcgtgatggc

SEQ ID NO: 10950 - DNA, 574 bp, Canis familiaris
gggcaagcttaactgcactcgggtcctggtgtggcatacacggacagagaagccccagatgaagcaggaggaacagctacagcggcaagggccgaggctcagacccagctgttgaggtgtgatggcggcccccccacccccgcccctgactaccacctcgtcaggcacgaagctgggggactgggccactggccagcctgggcggcagatttcccaatcctgacccctcagagccagggggtggctcctctgccccctcagccccagagcgtggcccagctgcttctcctctcccccagcctgccatgtggcactgcccacaggctggggacaagcggcccttgtgttgagccaggtcagctcggtctggggtggggcagaaggacagacactcaggagggctgctaagcaactgggtaacttattggggctaggcatgggctggggggctggaggagctgggctggaccctccccacctgagcatgcggatcccacccccccacacctccagaataaaagatcatgagctggaaaaaaaaaaaaaaaaaaaaaaaaaaaaaaaaaaaaaaaaa

SEQ ID NO: 10951 - DNA, 628 bp, Canis familiaris
  misc_feature (400)..(400): n comprises a, c, g, or t, or includes no nucleotide
ccacatgggtgctaggacctgcattgtcggttgaagcccccgcagggccagggagccggttcatccacctcaacctgggtcgacgtggactaccaccagctgttggccctcatggctcgtggtgcctctcctgccgcccgcctctcatctccaaggctttcgagatcacactggctgcaggggaaaggcagaggcgccaacaagcggatcacctacaccacccttacccctcccagaggacctatcacctgtacagcgaccaccctgacctgctgcagttcagagaggactccttccagctgcatctcgggatccccaggcagcatccgtctgtccaggcactccgacctatctccacatcccgggaacacagccgggtcactgctgctcgcttgcagtnccctgaggtacctcctcgtgtgaccagttaggatggcactagcggcactgtcctgctcttggaagccaacgatgaagcaaggtagtgaggcaagcaccaccggtcggctctgaggggctccttgggtgtgtgtgtgtcattctctgggtgagaagcttcaccctctaaactgctaacttttggatttcatgggtcaataaaaataatttaaaaaagtaaaaaaaaaaa

SEQ ID NO: 10952 - DNA, 680 bp, Canis familiaris
gtggaaaagaagaaccaccagagactcaaaactacacgtttcaaggaaataaagaccaaagaaaaacattcagtgattctaaatgtatattttcttctggaagatgtgatttttattgtgagggctgattctttgttatttaactagcagtggaatgcaaccattgacaagattcttggaggaaaaaactgtccagttcaagtccgtacggaaagcggtcagctggcttacctgccgttgctgaaatgcacagatgcatagtttacagtagctgggctcatgctgcctctttgtcctggtctctagatttctttgcagatttcagctatctttagttaacttgcctgaatagaaaagtcatcattttactgcagtttttgttgttaccatcaaataaaataaaatcttgtttgaccacatggttctctgttaggcgtgcacctttaaaccataagggcagttcagtgttgtatggttggaattgaagttctaatacctggagagtgagagggcagtccaagtatatgtatatgatcacttttaccacgtttatttttggtgggatagcaagatttaataacgatatttttgtgcctgtatcatagatacggaattgtatttgaagaatcagtgaccagaaaataaactttttctacatttgtatgcaaaaaaaaaaaaaa

SEQ ID NO: 10953 - DNA, 587 bp, Canis familiaris
tcgctgctggtcataaaacccttgttcctggactcatcaaagaacttaactccctcggacggccagatattcttgtcatgtgtggaggggtgataccaccacaggattatgagtttctatttgaagttggagtttccaatgtatttggtcctgggactcgaattcccaaggctgccgttcaagtgcttgatgatattgagaagtgtttggaaaagaagcagcaatctatgtaacatcctgttttttgtgttaactttctttctaaaatagactttcaatgatgatcagagaataaaaccatgtcttcaatttatttcaacatttgatatgtgctttcctgaaagctttacattaaaatacctgacttataagaattttgtgatgctctaagtgtatatagtttctttaaaaatcaaaacatatatatccttaaaaactccatatgtttaattcatcatcagaaactctagacaatgatattattttaaagtcatgatatttatttgaagtatttcttattaaagtctattttaaaaattaaactttacctaaaaaataaaaaaaaaaaaaaaaaaaaaaaaaaaaaa

SEQ ID NO: 10954 - DNA, 482 bp, Canis familiaris
cacttaaagctttatcttgctaaaaatgtttggtttcctttgggctcaagtgagtgaatgaagtagcctagggctattgtctacttgtcattatgcatttgactccatgtgagagaggctcatggagtatcccctgcctgctgtttctatgcagtggttctcagtcccacccgtgtatgtgtgtgtgggatctgtgcttgtggggctgtgtgacgtgtgtgataacctcctacgagacaccaaggacaccaagcgtgtgagtctgagagagcctgatatttgtcctgtccttaattcaaagttatactcttagcaagttggctttctgtctcctcaagatcccttcttgagaatagatgctattcatgtaagaggagccatttaaaaatacttgaaagtatacctcaaccaagctgaaaataaaaaaatacatgaaaatgctccaaaaaaaaaaaaaaaaaaaaaaaaaaaaaaaaaaaaaa

SEQ ID NO: 10955 - DNA, 692 bp, Canis familiaris
gtcaactccctgagctattcctcttaccatgtaaccatagtctgaattaaccatatcaaattggcttcagcttttgccaactgtactttcattctaggtttcagggatatattttctgccttctattttaatacattaaaagactagataatctttcagagatgctggaaaccaatcatttgctttgtatgtttcatcaggacacccatgaaacgtgtaatttgaaatcagtattgtatttttgaaaatcccatttcccatcagagatcttttttggattttaatccatttataatgtgtattactgtattaagtgcacttgaatgtaattcaactatttgactaataaaatgagttcatcatgtttgcatagagatgtagccattatctctggtaaccaaaggataaagggaatagttctgcttgttaactaatatctggggaagacttgctactatgaaagcgatgaaattagtccatctcttaacctgttggccagaattttttttttttcccaatcagaatgtgttttgaggtcttctgtaattgataacactttgagaaaaatggtggcattttttttttttagctacctctttgtttatgcaccagtaaagatcatgtctttttgcaataaaagtgtagattttcaaaaaaaaaaaaaaaaaaaaaaaaaaaaaaaaaaaaaaaaa

SEQ ID NO: 10956 - DNA, 664 bp, Canis familiaris
cttcaattttactggtcacgaaattctatgaaggtgggatgaatttttcttgctgttcagtgccttattctttccatctgttgttctgtggtcacagtgaccttagctatgtagcagactttcccaaatgtattgagtgcaaataaacagttacttagcagacctaaaaatatgtctgcaggtttctccttgatgcaaatgtgtgggattattatatttccagaaacctgccttcctcactgtccattgatgttccatctcgtgtctcatctaacagtttcttcagttgagctgtggaatgacgagtataaattagtgttcatttgcctttccagaattatttagcagttcgtcaccaaagaaagaaagaaaccaaagtctttccttggttctctttttcaccatgtcaaaggtgcagcccttccgattaaatgtctgatacattaattaatgaatgaccagcagtgtttagctcttaaaatgcacttacattatagtttgacgtgctgggtgtctgtcacagtgttgtaaaatgcccactccatcagattgtgttcctcagttcctcttatccacaaaatactctccatttttctcagattgtcacatcaccaaatgttattatattaaagccctatgttaagtgtcaaaaaaaaaaaaaaaa

SEQ ID NO: 10957 - DNA, 313 bp, Canis familiaris
gtgactgttgctgcaaagtctcccccaggaagtcagaaaccagtttcagttctttgacttgggggtccctaccccgctctctgggtttgggagtgctgcccacatggggactgctggggcctgtcacccggcccttgccacacacggcccccacgtggatgtcagagccacctccctttctttgctcctccctttctttgatacaccttttcaagaaaatgaaaaattcttactgacaacttgtaacttggttgtattttatattaatagcctttaataaagccatttaaaatataaaaaaaaaaaaaaaata

SEQ ID NO: 10958 - DNA, 685 bp, Canis familiaris
tggacctcaggttatgatctccaggttcctgggattcgagcccttgagtcaggctccctgttcagcggggagtctccttctgcttctcccctcacctcaaccctgcctgctcatgctccctgtctctcaaataaataaagatttattaaaaaaaaaaaaaaagacataggcacaattcgtttacatactccagtcctataagaattgtatttaattgcatctcaagaatagtgatacttttttcacatatttgagcttagaattaaaaatagtaaattcttgttagtcttggtagttattatgttcagtagtttctgtgaacattgaatcagcaaagactggatcattgctcctaggggaaatatacacacacacacacacacctcagattgtaatcttaaatcctaaaaacaacccatcccaatagattttattatccttattttataaaagagaatatgaaatttagaagtgttgaggtgatttgtctgaagccaccctacaacaggtgccagatataggatttagtctctttctgattggccccagagccagagcttcttgcactgcactgcacagcttcctccactctctatcctctggtcatctctatgacagatgaaacaaggagacacagagtcacctttttttacctcaattgaaactgtaaaaaaaaaaaaaaaag

SEQ ID NO: 10959 - DNA, 627 bp, Canis familiaris
tgccagaatgctcagaccttcaacctggagggctccctgatctatggagactcaatcgtcctacagtcggtcttcaccagctgtgcggcagtataattgagaaagaggatgacagtgagggtcgaggagagcgaggaagaggaagagggcgaggaagaaggtctctgagtctgagtcccgctcggtcaaagtgaagatcaagctcggccggaaagagaaggcacaggaccggctgaaggggagccggcggcggccgagccctggttcgcgagccaagccggtggtgagcgatgatgacagtgaggaggagcaggaggaggaccgctcaggaagtggcagcgaggaagactgagtcccaacattccagagtctcgaccccgggcccttggttccagagccgaggcggcatagcccttagcagtaacggcgtagcaggagatgtagtttcagacttggggtaaactgtataaacgaaaatcttccatatttatacggcagagaagatgtaggactgtttgtgtctggccctgtcctggcatcagtagcgtttgtaacagcattaactgttgaaaacaagaattatatgactcggggaacacgcgacacctgcttgtctttcctttcccg

SEQ ID NO: 10960 - DNA, 537 bp, Canis familiaris
cagggaaacagaagctacagtatgagggtattttcatcaaggattccaactcactggcttactacgacatggccaatggtgccattatccacctggccctcaaggagagaggcgggcggaagaagtagaggagagaaacctgctgttagatctcagccactgccgtttttgcctctcctgtctcccactgccctattctctgccccagccccaggagaccctgccttgcacatttgtttctctctcaactaaatttggaaattcaaattgtcctgacaagttttcttcttcacatgggtaagggagagctttctaagccagtcttctccccagtggtctctggaactccttttgtgtttgagtcttgacttgaggggattcatttctttgagtagcatgttaggagatgtgaactcagaaatgtcctgtgggatagtgtcatagtactaagtggcacgtggctgatagaatatggttgttctcattgttaatcattttgtatcttgccatggttgtctaataaacctcttgtatcct

SEQ ID NO: 10961 - DNA, 589 bp, Canis familiaris
  misc_feature (108)..(108): n comprises a, c, g, or t, or includes no nucleotide
ctcttgggtgtacgtgactgctcacacactggtggtgctctgtgaacatttccagtgtttgatcccaaatggaaagctctacccatttttgctaaattcagtgccctnttgtaaatcacttttttaattttccctgaaaccttggtttttggtgaaatataccacgtgatacctaaagtaaggcatgaagatttttgtgttttgttggtttgacacaaaaatttctgaaattggaaccttgtggttaaaaatgtaatttcaatgtggctaaccaagaggaccaagtcacgtaaaaattggaatccaagaatttagacctttaaaaatttaaaatggttgttacaccagggtgttttcatttgtggaatgatctagatataacacagaaaaatacattctattctaaaagccacatggcatttataaaagtcatctttgctctcaaaagaaattagaatacagatagtacattcacggcaatggtctgctttctgtaaaattctcttccatatgttgttgtaaatattccgatggaaattcaaagtgttctgagttttgcagaaaaaaaaaaaaaaaaaaaaaaaaaaaa

SEQ ID NO: 10962 - DNA, 262 bp, Canis familiaris
ataactcagtttccacaaagaccaatgtaactaaacttattaaaaggaaactttgaaaaagtacatgagactcatctcttacaagatggttacgtgagctggatatgaaaaagtccaaaaggacagagaccataatatttgagatactggttgatttcaccacatttaaaagttaattttttcttttagagttcaccttacggaaatattatactagaaagaatgaaaatattaatgttctccattcagaaaactttaatat

SEQ ID NO: 10963 - DNA, 799 bp, Canis familiaris
  misc_feature (229)..(229): n comprises a, c, g, or t, or includes no nucleotide
  misc_feature (467)..(467): n comprises a, c, g, or t, or includes no nucleotide
ctgttgagaagggagatgtggcctttgtgaaagaccagactgtcttgcaagaacactgggggaaagaacaactgaagattgggctaaggatctgaaggaagaggactttgagctgctgtgccctgatggccaaaggaagtctgtggacaaggctcctgagtgcttcctagccaagccccaaatcatgctgtggtctcaaggaaagacaaggcatcttgtgttagccaanatgttacttgaccagcacgctttttgtttgggaagaaaatggggaaatgactggcttcggggcaaagttttttgcctttggtgtcacaaccttccagccaaaccccaaagggaaccctttccttggttttccaaggggaaccgaaccaacccaccaaatggttttggccccaaaactttcccaaggaagggaaaccaaccaaaccaattaattagaatttccaataacctttaggggngaccaggaaggttattattccaccgggcctggtttgcttaaaccctggagaaccaattggcttcccacccttgtgaaacttccctgggaggcccctccccacctttcccaaaaccattctttaaaatcccaagaagggcgggagaacaaccacccaggaattggtggatggggagcttccaccgtgacccataagtttccctcgggccctcactggcctgggtggtttgtctggtttcacagttcagcggtggaacctctgtagaacacttaaataaacattattattggtgttatcttttaaaaaaaaaaaaaaaaaaaaaaaaaaaaggg

SEQ ID NO: 10964 - DNA, 584 bp, Canis familiaris
tcccaaactaatctatcaggttcactggtacataaatatctaggaaatattttttccagttgacaatttggtggtgctattgtgcagtaaataatattactcttgccagaggagaaattatattaacttccctgctaacatcctttcctagtaatttgctctttgcaaattaaaaaccaaccgagaggaaggaaaacattgtagatatctatttatatttaaagtttacttttcatgaacttagctgcaggattctggcattgtgcatgccatcttccatcagatctgacttctagggatgaggactccaacatgtgcacagactcctaggtcctgtgtgatctgctacggggtggagagaataatatgcagcttggaatgctatctgagatgtatgatactcgattcattcacttgattacttcgatctagttgcagcgcaactgtatatattgtataacctaaatcaattcttattttcgttgtctttaatgcagtgatttataactagagcatgttcaataagttgattcttcctgttaactagtcatttgagactggaaaaaaaataaaatacttttaaa

SEQ ID NO: 10965 - DNA, 650 bp, Canis familiaris
ttgcaggctttgatgtctcggtgcatcacccggcgagaagtgcatatgttccacggcactgcacagctgtgcgaagtacttccacacagtcctctccgggatgagccgcttctgcttcttaaagtacttgatcatctgtgagaggtcacccgcatcagccagctccagtacaatgttcagctcattgtcctcaataaacgagtccaaatacttgataatgttgggatggttcaattgcttcaggaggccgatctccttgacgcagtcttgcctggctttggcgtccatcatctcaaatatctgcaccttcttcagagccacggtcttcctatccagcaggcaggtggccttgtacacctcgctgaactgtcctcggcctatcttcttctctatctggaagtcggccagcgagcagcgaaaagacaaggtgtttgggtgtctctctgggtcaggggggtgtgccagccctggggtgtggcagaggttgttcgggctccctccatggggcatgtggctgggctggccggccatcctgcatgccagcctcacaagggcacgggcggcgcgcgggcggctcggctgcctcggaggagcggcgcgcgggcggccggagcggagcggggcggagcggggcggagcggagggtccca

SEQ ID NO: 10966 - DNA, 673 bp, Canis familiaris
  misc_feature (274)..(274): n comprises a, c, g, or t, or includes no nucleotide
  misc_feature (290)..(290): n comprises a, c, g, or t, or includes no nucleotide
aggacctgagtctgtgttaggaaaacatattaattctcatataaacccagttcctcaccattgttcctctcatctttcagtgccatttctcttcatgttaggctgtttgtacacaacttttgggagccggggtggtacatcagttctctggaatccgccacggccgcctggggggtggatcaccacacccctgtagggctttttccccttcctagctcgttctttgggagaaacccacggaactgggaaggctgttttgaacccagaagaggcnccaaggttccagaganccaaggtgttaaggaaaaattggttaaaataaggaaaaattgtttttggttggaatttgggtttttgttttgttttcaccatttggatagctgtcacaagaggtctttccctcagtttccagcatgttcttccttttctccctttctcacgtttttcctcctattaatcaagagaaacttcaaagtccatgggatggtcggatctcacaggctgagaactcgttcacctccaagcatttcatgaaaaagctgcttcttattaatcgtgcaaactcttgccacgatgtggggagtttgacaaatctttcaaaataaaaagtaatgacttagaaactgccaaaaaaaaaaaaaaaaaaaaaaaaaaaaaaaaaaaaaaaaaaaaa

SEQ ID NO: 10967 - DNA, 619 bp, Canis familiaris
gtcgcaagtggccgtactgatcttacttcatccaatctaataggtttggagattaaaccttttctcaacttgtgctgtttatatagccaagcttccgtcaataaggcttcattgtgactttaacaacattatcttcccacataccaggaactattggacatttattttacatgggaaaaattatttggaataataaagcaggaacttttcctgaagttgcaatttatactgtatggcttctttttcatgtttcatctaggtttttagaagtgaagtatagtaaatttggttcgttatattgtgaagggctggaattacatgaacataccaccttaataaaggcaagttctgtaagcttacatggcctatttgtaaagttatggccttcacagcatttcagatgctgttggacttcatgtccccaacctagcttggtgagggctgtaactgtttcccaagacctgtacattggaagtctgaatgtataacaatatttaatgtatttagagttcctcatgttgcagggtttaagaaatctgacccaccaaggtcatgtgacttttctgtactgttaaacttcattgtaataaaatgagagaaaaaaaaaaaaaaaaaaaag

SEQ ID NO: 10968 - DNA, 719 bp, Canis familiaris
tgtaaattagagccaccgggatactacaacaccctcctgggatggctcaagttaaacaactgacagtaacaggttccgtgaggatgtgggaacaaccggggactcatccacctgctgggaggagtggtcaacgatgcacacggttgcaaattgtttgggctgcttcttctaaagttttaaaccacattttgccacacaacccagcaattccacccctcagtatttacccaagagaattgaaagcacaatcatgcagagacctgtatacagattttcattagcggtcttagtcatcctagccaacctactggaaataacaccagtggcttcaactggtgagtggatagacgaattgtgatgtccgtgtgatgaattctactcagaaatgacaaggaacaagctactaatacaacagcatggtgattctcagaaagtcatgccaaagaccaaaggctaccgaatgtatgattctgtttatactacattctagagaaggcaaaaagagggacagaaacacagatcagtggtggtttgggggtgacaggaatgggtggactgcagagggcacgaggagccctttggggtgatctagatactctacatcttgatgaggtgctggttaagtaagtgtacatttgttaaaacccaccaagctgcgtatttacgagtgaatggtgtgtatatatcgtaccacaacactcctacttttaaaaaaaaaa

SEQ ID NO: 10969 - DNA, 717 bp, Canis familiaris
gagcgacctggatggtgatggcttaggatgaaatcattgtgggagccccactgagaataacagatgtcacctctggactgatggggggagaagatggtcgtgtttatgtttataatggcaaacatatcacctttggtgacatgacaggcaaatgcacaatcatggacagctccatgtcctgaagaaaaggcccagtacgtactggtttctcctgaggcaagttcaagatttgggagctctgtgatcaccgtgaggtcgagagacaagaatcaggttgtcgctgctgctgggaggagttctctgggatcccggctctctggggccctgcacgtctacagcctgggccttgattaaagacttcaccgtgttttcctaccctgtgtgccctccctcgtgccaagtcagctccagggtgagcattctggtggatgaagcgggacatcaggggagccctgggagatcctgcaagaggatgcatgcctccctgggaacatgatacagtctctccttccttgcttctcttgtgtttaagcttattcccaacttactgcctgtgcttggacctgttgtacaacctctttcctcttccacatgaatacctgggtctttctgatgcttggaaaggctctgtggttcttttaggaaaacctctgtcaccatttctcctaaaataaatgtccttttaaaaatggtgccccaaccaaaaaaaaaaaaaaa

SEQ ID NO: 10970 - DNA, 527 bp, Canis familiaris
ccgttctccccttaaaccctggtttttaagggacccccggtctccccattaaggagaattgcctggttttgtgaaggagggcttatcagatccagattgaaatctcagcagtgttttctgctgcaaagtctgcgtcctggaagatggggaaaggagcacagggttcttcctctataaatcaacatttacccagcagtttagaaaacacctttagcccacgtccaccccttccgttcatcccaccttaccttaatccctgctggctagtttgagggagcctctttgcaagtttggagttgtgagcagatgtatcatttccttttcctcggcggctcttccgttgcccagacttccccctccagctcccccatagggataagaaactcctgtgccactgggggagccagagggcccaacaccagagctcttgtatcttaaaacatcgtctgccttttgcttatactttataaaacgtcagttcaaataataaattttttaaatctgaaaaaaaaaaaaaaaaaaaaaaa

SEQ ID NO: 10971 - DNA, 603 bp, Canis familiaris
  misc_feature (1)..(1): n comprises a, c, g, or t, or includes no nucleotide
natgactaattcaacttacatccaaaccaatactagccattcataaccgcaagggacgaacctgagctctcatacttatatccctaattctatttattggctcaactaatctacttggactattacctcactcatttacgccccccacacaactctctataaacctcggaatagccattcccctatgagcagggaccgtaattaccggtttccgctatataaacccaagcatccttagcacactttctaccccacaggcacccctcttcccctaattcccatactagtagtcatcgaaactattagtctatttattcaacccatggctctagccgttcgattaaccgcccatattactgcaggacacctcctaatccatttgattggaggggctaccctcagctcttatcaatattagcgcgaccacagcttttatcacttttattattctaatcctacttacgatcctagaatttgctgttgccttaattcaagcctatgtttttaccttactagtgagtctatacttacatgacaacacctaaaacaaaaaaaaaaaaaaaaaaaaaaaaaaaaaaaaaaaaaaaaaaaaaaaaaaaaaaa

SEQ ID NO: 10972 - DNA, 671 bp, Canis familiaris
tatggcacactagttacaaaacagtgaaagcattcattcagcactgggtctgggacactaggtcatcagagaaaactgaatcccagagagggctggatgatttgattggaaaggaagaagctggtaatggaaagaaaagtaactatatgtacaagatcaaagagaggaacccaaagcctctaaattttcaggtctgtcagccagggcctcaatcatggtaactggaatggtaaaggaatttatcaggcaccaggcactatcaactcttctttccaagacatagagggaacagcgtggaaatagaagatggccgaatttggaaagagaactagactggaaagaacagaaaacccaacaaatgtacaaaattcatgagaagaattttactgtgccatttcaaagtcaaaagaacaagaactttgcttagaagtattggcatttggggcagcccggggggctcagccggtttagcgccaccttcaggccagggcatgattcatcctggagaccgggatccagtcccacatcaggctccccgcatggggcctgcttcttcctctgcttctccctctgcctgtgtctctgcctctctcactctctgtgtctctctcacgaataaataaataaaatcttaaaaaaaaaaaaaagtattggcaataaaaaaaaaaaaa

SEQ ID NO: 10973 - DNA, 615 bp, Canis familiaris
  misc_feature (1)..(1): n comprises a, c, g, or t, or includes no nucleotide
  misc_feature (78)..(78): n comprises a, c, g, or t, or includes no nucleotide
nctggggctgtttaaaagcggcaccagaagccctttgatgcaatgaacaacattgtggcccatttgctgctgaacctnacaagctctgcaaggtttgaagggtcccttaatatggaccttaatgaaatcagcatgaatttggttccttttcctcaactgcattatcttgtgtcaagtctaacaccacctgtatacgctggcagatgttaacattcctacccgaaggtaagatgtagtcactttactcccattacttgataatttgagttgtttttaagaaataacattttttaaagtttgtaataatgctaggtattttttcatgtcattttctttgtgagaggaacataaaatgcaactgatgacaaccactttttcattatttgaatgcttatttataaatcattatttaaaaagtatttgagggatccctggctggcacagcggtttagcgcctgccttggcctagggcacgatcctggagacccaggatcgaatcccacgtcaggctcccggtacatggagcctgcttctccctctgcctgtgtctctgcctctctctctctctgtgtgactatcataactaaataaaaaaaaaaaaaaaaaaaaaaaaaa

SEQ ID NO: 10974 - DNA, 638 bp, Canis familiaris
gcaagtccgcactgactctacaggttcatgtatgatgagtttgtggaggactatgagcctacccaagcagacagctatcggaagaaggtagtgctggatggggaggaagtacagatcgatatcttggatacagctgggcaggaggattatgctgcaattagagacaactactttcggagtggggagggtttcctctgtgtcttctctattacagaaatggaatcctttgcagccacagccgacttcagggagcagattttaagagtaaaagaagatgagaatgttccatttctgctggttggtaacaaatcagacttagaagataaaaggcaggtttctgtagaagaggccaaaaccagagctgaccagtggaatgttaactatgtggaaacatctgcgaaaacccgagctaatgttgacaaggtattttttgatttcatgagagaaattcgagccagaaagatggaagacagcaaagaaaagaatggaaaaaagaagaggaaaagtttagccaagagaatcagagaaagatgttgcattttataatcaaagcccaaactcctttcttatcttgaccatactaataaatataatttataagcattgaaaaaaaaaaaaaaaaaaaaaaaaaaaaaaaa

SEQ ID NO: 10975 - DNA, 621 bp, Canis familiaris
  misc_feature (51)..(51): n comprises a, c, g, or t, or includes no nucleotide
agggacactgtgaaaggggagtaccttcgtgcagcccagttctctcatcanagacctatgcatttttacgatctacttaataaactgggattttcagaccataggaagctttttctttttctttctttctttctttcgttgtttctttttctttttctttttcttttttcttttctttctttttttttgttttttttgcagtcccgtatctggtttctacgtggaggactaaactcatgcttttagctaaatgtggtctttgccgactaaatttaagacgcagcggtttaagagatttacataccgatgtctccacagtattgtttgctaatctttaaataaagtcctgatccgtgtgcatttgtgattatatgtgtactcattctcttacctgaactgaccagagctttcccaagtggggtttctaaaggcgcgtgtacaaagtcggcctgcagagagtcgggtctgggtggtgcgtttgcttcctgtttgtgccaatgtatcaatgtagagttgctctgttctcttcaactgtatttattgctgcgtttctcagcataaacttatcccattgtattttcttataaataaatattttttttgaacgttaaaaaaaaaaaa

SEQ ID NO: 10976 - DNA, 605 bp, Canis familiaris
atgtgtagccagaaaagacatttgggcgataatttgagggaatgttaatattatggaatattgggtaattttatcaaataactatttataatatttttttaggtgtaatatggactcttaggtttttgtaggatgtcacatttttgagatacacacttcagggacaagtgccatactgtcggctacttgcaaattattcaataagagctttttcagtgtgtgtgtgggtataaaagatattctatttatatatactttgatgtttttcatttatatatatttatatttatatacacatgaaaaaaagcatgcatgtgacagtctaggtaaaggatattcaggtgtttatcacacgatcctttcaacttttctgtagatttaaatttcttccaaactcaaaaaacattttaaaaaggaaagatagagggacacctgggtggctcagcggttgagcatctgcttttggctcagagtatgatcctgggatcctgggatcgagtcctgtatcagactccctgcagggagcctgcttctctctctgcctatgtctctgcctctctctatgtctctcatgaataaaaaaaaatcttaaaaaaaaaaaaaaa

SEQ ID NO: 10977 - DNA, 650 bp, Canis familiaris
  misc_feature (56)..(56): n comprises a, c, g, or t, or includes no nucleotide
ccaaaggcccaggtcccaactctttcccactagagatgcctgctttccaggacccngctcacctttccccaggattggcacagcaagctgctgtatgtccccgtgctctgggaaggtcgcagaaacctcgattctcccttattcctgggagccacttcagctccgtggggggctgcccgggtgccatgcttgcagagtcagggaagcctggaactggcaagacgccgagattctccacaggccatgctgtgaggtcaggggtacgtgggaatagagaagagtgacttgtgggagactgtccttcctttacctcagtttgtagtcttggagatcaggggcattgcttggtgtggctggggaagggttggggtggacagctgaccagcgtatcttcgagctactatcaaatggttgttaagggcagagggcaccgaggcagggggaccctagttcaaatcctatctctggggacatccagggggctcagcggttgggcgcccactttcagcccagggcgtgatcctggagtcctgggatcgagtcccgcatcgggctccccgcagggagcctgcttctccctctgcctgtgtctctgcctctctctgtgtctctcatggataaattaaaaaaaaaaaaaaaaaaaaaaaaaa

SEQ ID NO: 10978 - DNA, 634 bp, Canis familiaris
gggacggataacaatgttcacacaggaaacagctatgaccattaggcctatttaggtgacactatagaacaagtttgtacaaaaaagcaggctggtaccggtccggaattcccgggattggacataggagggcccgagcaggaatttggtgtggacatcgggcctgtctgcttcttgtaaaaacccgaacccacaaacaacacaatccattgccaatccagaggacccaagtactttccagtcccagtcactctagggctctgcactgaatggctgacctgacctgatgtccattcatcccacccgctcacagtgtggacttttctcccctctttctaagagacctgaactgggcagactgcaaaataaaatctcggtgttctatttatttattgtcttcctgtaagacctttgggtcgaggcagagccaggaaactaactggtgtgagtcaaacgccccctgagtgactgtccccagcccaggcaagaagatctcccttcaggtgccgggcgcaggaactgcgtgtgtcctacacaatggtgctattctgtgtcaaacacctctgtattttttacaacatcaattgatattaaaaacaaaaaaaattattggaaaaaaaaaaaaaaaaaaaaa

SEQ ID NO: 10979 - DNA, 625 bp, Canis familiaris
  misc_feature (207)..(207): n comprises a, c, g, or t, or includes no nucleotide
attaccactaagatctctagggggccaccattgatattctttgagtgatgtgcaagctgaattaagaccggagacaagtggggagccagcgaagccaacacgtgctcaaacatgctgaacatctccccgttctcctttgggctgatcaatcccaagcaggtgtttgataatggcagcatcttacaaccctgaagtgcttgacatcancagaggaaactctgcattctcgcttcctggagggtgtccgcaacgttgccagcgtatgtctgcagataggttacccgactgttgcatcagtgccccattctatcatcaatggatacaagcgggtcctggctttgtctgtggaaactgattacacctttccacttgctgaaaaggtcaaggccttcttggctgatccatctgcatttgtggctgctgctcctgtggctgctgccaccactgctgcacctgctgctgccgcagccccagccaaggttgaagcaaaggaagagtcggaggaatcggacgaggatatgggatttggtctctttgactaatcaccaaaaagcaaccaattcagccaagtttatttgtgaaacaaggaaataaaggcttacttctcttaaaaaaaaaaaaaaaa

SEQ ID NO: 10980 - DNA, 512 bp, Canis familiaris
gccagagagtggcaacggaaactggaggaggtgctttcttctgaggggtgctgtaagaaaatggcacacagtgacattaagaagaaggccaagcgggactaacgggtgtctgaatccctgcccacctagactgttttctgagccctctggacctgagactgagttttgtctttttcctttagccttagcagtggttatgaggtgtgcagggggagctgggtggctttattcagcccattccaaagagggctctccctccacacagcagcctgggagcctctgctgtcttccccagcctcctccttgctcctaggggctcatcaccggttctgtgcctgtgctctgttgtgttggagggaagactggcggttcttctggtttttactctgtgaactttatttaaggacattcttttttattggcggctccatggcccccagccgctcgcacccgctctctgttgtacactttcaatcaacactttttcagactaaaggccaaacctaattgtg

SEQ ID NO: 10981 - DNA, 543 bp, Canis familiaris
cctcaagaggtacccagcaacaggaagatcaggcaccaaaggaggacgaggatgtatgagccaatgctccacagagctcgggattgggatgactggaaggacacccatcctcgtggctacggcaaccgacagaacactgggttagtcttcccacccacacagatggaactaacacggggctcacatcttccctgccaaggaaagctgtgcagtcttccctgggctcctgcttcagctgtgtaccacgagggccaagatgcttaatcttgctcttgcgttcacataaacgtgtcacagcacattaagtgtgtgtttgtaccctaggtgatgagccacgccatcttgttttggcattcttctcctcatcactggcatattcccatttcttaagtggaaagaaaaaagtactgagaagtggctctgtataatccatggctgtatgcaattatcttaaaatataataaaagtcccttctattaccaaaaaaaaaaaaaaaaaaaaaaaaaaaaaaaaaaaaaaaaaaaaaaaaaaaaaaaaaaaaaa

SEQ ID NO: 10982 - DNA, 665 bp, Canis familiaris
ctgttataggttcatccccacccgcccggcctcgttttcacgtcaccgatccactcacaggcccgttgtcactctgcatgtgcctttcccatggatttaaggtgctttcgttttttgtgagttctaagtaaagtattttgtattgtattgtcctaagtgttcagtgtccccgactttcaatcacgcatgtcagcccggcttcagtcctcgctgagagactggggtgtaagggtgggtgtccagcttctggtgaggaaggactagccccgtgccccacctggccagggacgtgcaataaggtggagtttcgcccgggggcggcaggagtgcacactgccgtggcaacagcggagcccagggtgcccgggccccttttcagacaattttttgattagctttggatttttttttaatggagaggaaaaaaaaaaaaaagaacttgatgctttgcctttcctacatgcacttagattaaatcacaggcataaattaattttaattgcttccttttcccgtttttctacccgcagagcctgatgggagagtatccagggcagggaaaccacactttctgtagatgataattaaatgaaaattggtgcttacttttacacttcaaaaaaaaaaaaaaaaaaaaaaaaaaaaaaaatataaataaaaaaaaa

SEQ ID NO: 10983 - DNA, 697 bp, Canis familiaris
ccctcccggccatggagctcccccagctgtgcccccccagacacacagtgtcccggggtggagcccgtgtgtgtggacctgggtgactgggagccacggagcgggcgctggcagcgtgggccccgtggacctgctggtgaacaatgctgccgtggcgctgctgcagcccttcctggaggtcaccaaggaggcgtgtgacacgtccttccacgtgaacctgcgggccatcatccaagtgtcccagattgtggcccgtggcttaatagccaggggagccccagggtccatcgtgaacatctccagccaggcctcgcagcgagcaatagccaaccacagcgtctactgctccaccaagggtgccatggacatgctgaccaaggtgatggctctggagcttgggccacacaagtggtgatgacccccatgggccaggccaattggagcaaccctcagaaggccaagaccatgctggatcgaatcccacttggcaagtttgcggaggtggagaacgtggtggacaccatcctcttcctgctgagtgaccggagcagcatgaccacgggttccgctgtgccggtggatgggggcttcctggccacctgagtctctacctgacacccctccccccccgccacccagtttctccaataaacatgagtcttctgctcaaaaaaaaaaaaaaaaaaaaaaaaaaaaa

SEQ ID NO: 10984 - DNA, 576 bp, Canis familiaris
cagaatgcgcagtcgcagttcgcattcaaagagcaccatgggcagtcccagggtgcagctggctgccttccccggggtgtccctggggcgccttgacttcacagcacttccgggtagaggcatcagtcctcacccactgggtgaggcccttgcccctgctgtcctttctcatctagcccttttccgcactccaccctcacctggggggaggtagcactgataagatttgcactcgcctttggcacaggggagaccagtttctctcagccttgccagtctctgccaacgtcgggggtgggcaaaggaaggaaaagggacttcactggcagtggggcagtagtgggtcttggtgtgtgtgtgtgtgtgtgtgtgtttgtgacaaggatgggggtctgagtatcctgctgctcccccagcatggcacacacacaactgcagcaggcgcacagagttctttgttgagccggcaggggctcacagggcggccctagaagaaaggaaactaaaatgttaagtgtctgagtcggttcactccacaacaagttttatgaaagagaaaacaacctcagaagtggc

SEQ ID NO: 10985 - DNA, 550 bp, Canis familiaris
gcattgttgccgaccatccggtgccagccatagcgtccactgggaaaaacctcgcatcacctgcacagacccctccacttacaagcgtcagactacagaatcggagctcacgggccccacggaggagccgccccagcacatgcccactgagaggagtcttctcaggactgcatcctcagtgatgtctgagcccaggatgccccgtccaggctgacatcccacaattggatggtgtcctcttcttcccgcttttttgtcaaaataaggaattccattaaagaaggaaaaaaaacaaatcccacattgtgtatgcacccacctctccccaccccacccccaaatcgccaaaaccgcatctgatttttccctcctcgatgccaaagcaaagcaaacctattgtaagccatggactgagtttagagacatttctccaatctctcgttgtgcctttccagggaccagagcagggacagggggagaaggggaggggttaagttaaataaagaagattattttttgtttcctgactttaaaaaaaaaaaaaaaaaaa

SEQ ID NO: 10986 - DNA, 466 bp, Canis familiaris
gagcacagatgagaaaaatcgaggtcttgcggtctccaaagcccagacctgatgaactttctgatggatgctcccaaatataatatcgggagatgtgtggaatgtttgtaggatgagtggataaagatgtggtctatgtacacagtggaatgtgactcagccattagaaacgacaaatacccaccatttgcttcgacgtgggtggaactggagggtattatgctgagtgagataagtcagtcagagaaggataaatgttatatggtctcatttggggaatataaaaataatgaaaggggggcaggctgggtggctcagtggtttagtgctgccttcaacccagggcgtgatcctggagacctgggatcgagtcccacgtcggcctccctgcatggagcctgcctctccctctgcctctgcctttgcctctctgtgtgtctctcatgaataaataaataaaaatcta

SEQ ID NO: 10987 - DNA, 470 bp, Canis familiaris
  misc_feature (11)..(11): n comprises a, c, g, or t, or includes no nucleotide
  misc_feature (32)..(32): n comprises a, c, g, or t, or includes no nucleotide
  misc_feature (48)..(48): n comprises a, c, g, or t, or includes no nucleotide
caagtgggacncctgcagtggccatcaggtcnccccgtggggatttcnagagacactgaaggagaagcatcttgtctgcacagctccagatggttctccacccccttcctccactcattgccaccagggagttgctgatcagggtctactccagtggcccagggggaatgcaggccgacaaaccagagctgcacaccatggccccttcccgtcacaagctccgagagggccagggtgcctgccaccggagccctctcaccaccaggggtctcattcttcctctgaggctctggtggaggtgggtatcccctgccagggccagcacttgatgtgaagaatgaattcaaatcccagctcttactgttaagatttgatgtggaatcacagctgcagtgatacatatttttatcagcgcttggttggttttaaataaaatgcacgctattttattaaaaaaaaaaaaaaaaaaa

SEQ ID NO: 10988 - DNA, 539 bp, Canis familiaris
acttcatggcagatagcctctcctctgttatcctgttgctccctagcagtacattcaataaacttctctcacctctcttctgcctccagtgaattccttcactgcctgtgccaccagcctcaacccaatcaatcattgccccagttttgggaactcctctccagtcaagacagacaccacaatacagccttatcagctctaccaaaatgaactaaccttatgtagaagaaatacaactgttttaaaaagtggggagagtaaagggacctaaatgaaaataaagtttctatgcttcacttgaactggtaaaaatatcagtatcatcacaccaggataaattatgtatgcataatattatacctagagcaaacccaagcaaaccatacaaagtgatacaatcaggtattatacgttaatcaaaatggaatctttaaaaatattcaaagaaaccataggaaattaagaaaaaagaaatagaggaagcaaactgaaaacacaatggcagacttaagccctaacattcagtagttacctttttt

SEQ ID NO: 10989 - DNA, 631 bp, Canis familiaris
cacgggagatcccggggaggagtctgaggcgcctcactctggcccgtctattcgttcccacaggctgcactgacataacctggtaacaatggcctcctcagctctgcatctgtctatctgctgtgctgctttcaggataggaagagagacagaagctacactgcagttagcatctgtatcctccagttagtgttgccagtaaaatattcttagtcacagagatttgtgctttggattccacataaccatctgccttttatgtcatggtccaaccagacagaattccttctattgcgcacacaaggccagtatactgtggtgtcacgtttgtttcaaatacacagcttggcattctgtttactttgtgtttaccctgagtgaagacacttcttgggaatggctgcagtcaggccacattgtttacacacctgaggtgtatcatcaatgatttctatgtttgcattccattgtcctgcttactgaggtcttggactccccaggaagccagttaaaagggactgagtgttgtgtcaactgttgcagcgtttttcatatatgtgttcactctcttaaaatgcaaataaagattgcttcccaagagggtgcttgtaaaaaaaaaaaaaaaaaaaaa

SEQ ID NO: 10990 - DNA, 576 bp, Canis familiaris
gtccttctggaggatcccagcctgtcaagttggcctggtcccatccaccgtcagctcaccctgggttccgttgtcttgaacccaggacagtttgtagggtcccagggggccttccaaaggtccctcggggatcacttcttcccactccaggatgaggcctgagtctgtgcggatggcatggaggttctggggagcgatggctggggctagaccctttgtccgaaagggtacccagtcagcatacggagaaggccccaaggcgttggcacagcgcaccctgaggctgtagttggtggcaggtgccaggtcccggagcaggcaggtaaaaggtggcacggggaccacaacagccaggacctcccagcctcctggcgcttgtgtcacctggacagtacaggattggagcagggcccggccatcagcacctggcatccaggccacactagcgttgctgctggagagctttgtcactgtaatgttgaagggggctgcaggcagtgcttgaaggcgaacagtggctgggcgagaagaggccaggcctttaaggttgtgagcttcacaggagaactcggtgct

SEQ ID NO: 10991 - DNA, 589 bp, Canis familiaris
aggtcccctctacctgtaaccctataaatatttgtatatagaacactaaaatttgtagcgataggatcaacttgggaatatctgctgagagaccaaaaagctcattttctaagtaccttggttaaagagtaaagattatttctcttattttttaaaagaagaatgcactttaacagctgcatgggctattcaaacaagcccgtgaagtgcagtgccgttcagaaatcacacttcctggaaaccgttcagaagcgagtgtagacgggctgttgcgctcactgcctggaggcggaagctcgggtgccagtcagtgtagagacatggagacgagtagggccgctgcaaaagcgcaacgtgagctcggccagaagcttccgacaggcctgcaacaggcaggtcccgtgttgaccactaactagccaaactgacagaaacagagaaaaaagttgaagaatccttactgctggtgtgcactccctacaatagattttgcaaatggagttttacagtctatatttaaaattgtatgtttgtaacaaataaagtatgcggaaaagtgaaaaaaaaaaaaaaaaaaaaaaaaaaaaaa

SEQ ID NO: 10992 - DNA, 654 bp, Canis familiaris
catctcccataaaaggtgacccgccagggccagaagtccagggaaaaaaatgtttactgacttcctggtgttcttgctgtgcgtctccgccgatggccggtagtaaaggccagccccggcctccattccaatggcctccattccaatggcctctcggctcggggttggcagacgtgcagcccagacgcagccttgtagctcaccgtgatcggctcttcactgcagaatgcgtaaagattcatttttgaaagattcatttaaaagagaaaacgtacaagtgaccaatgaaggaggtaaataaactaagatattctgagggaggggtcctgggcacacggctcccgccctctgtgtctgtggatgaagggctttttgaatgaaatgctgctgtgcattttcaggaaaaaaaatctctgataagcagacttggaatggatgtttgttcctcctgaccctcttctctgcatcgtgacgtagcatcagcggcactcagaactgtgaatgtacatagacttagagttcagtcccctttgtgtgaggtgggacgggagggccccacggggactgagggtccaggctgcacgtcatgaaacagctttggattttcagtggaatgaataaaacatagtcttacacaaaaaaaaaaaaaaaaaa

SEQ ID NO: 10993 - DNA, 587 bp, Canis familiaris
taaatttctgttttttaagtcactcacattagtgatcatttggtatagcggctctaggaaactaaaacagttaccaaataaacggactatgccagttgaactttttatcatgattataccaactgatgacatgagtttgaagagttgtagtttctgccaaaatcaagctgaactttggaaagagtagataaaactgtgttgctcttttaagggagcctggctagctgttggtggaacatgtgactcttgatcttggggttgtgagttccagccccatgttgggtggagattacttaaaaataaaatcttaaaaaaaaagtgtgttgcctttttaaaaaatttaaaggtgttaactaactatgggcaaaacagttctaaaagactggaggaaaatatagccaaaatctacaagaattctgtatccttggctcacaactatataatgtaaagcaatgtatgtgatttgtagcaattagaggatacctataagcagaaccaatattaaaaagaaaagacctgggccttacagtaaatatttgacaaataaacattctttaagttaaaaaaaaaaaaaaaaaaaaaaaaaa

SEQ ID NO: 10994 - DNA, 633 bp, Canis familiaris
ccaatatcatcacgaggattaaaacactgtacttaccccaagattcttattaataaagcttctattttggtactacttctctatatttttacttagaggaatgtgactttaggacagttaccattttaaagctttgtaaaccacacagtctcctagatggcacggcgtgatctaaatttgcagccgttatactaacccattatctgacatttctcaagccccacagagaaacataaagagaaatgtttcatcggagggagggaagaaaacaaatgtgtttgccctgaacgtgtggtcggtgagggtgtgaggtcatcccctgcagctgccagctctgacccacgtccctaagtgtcgtccgtttccgctgtttgctacggccgcacagtccggcgcttctagtttctcttgtacagtaagtagtttgagatggggtttttgtatataaatattgtattaaacattaggtgattaccccaaaatccttttatggacaccattttttttttaaaaagtgaatgtatgcaaattcacagaggaccgtggctgaacattcattcaactaaataaatttggatacacaaccactttcttcactgaaaaaaaaaaaaaaaaaaaaaaaaaaaaaaaaaa

SEQ ID NO: 10995 - DNA, 589 bp, Canis familiaris
ccagtacacgccgcaggccacctaccacggcaatgtgacgctgctgcgcgccaagacgggcagcatgtacggcgagggcctgggcgccgactacaacctgtcccaggtgtgcgatggcaaggtgtccgtgcacgtgatcgagggtgaccaccgcacgctgctggagggcagcggcctagagtccatcctcagcatcatccacagctccctggccgagccgcgcgtcagcgtgcgggagggctagccacgccgcagcccaggggtgcccgggggtcctgccggtgggacctctgcccgcgccctgcgtgccaccgccgccgcctcggagacctgctctggtctgtgaagagtcggccgggcggagcctggtgtgccgcgtgggtccgttcctcggttctccattcagttctatttattgcgtcgctggggagacgccggggcctcgtccacccggtaaaggccggcggcgcaggaggcccggcccagggaccccatgatgcagggccctgtggaaaggagcagccccgggcgccgggcacccattctgtgtttgtctgtattcgtttttcaagaaatatgattcaaattg

SEQ ID NO: 10996 - DNA, 311 bp, Canis familiaris
aaacctattaaaaccatccattttgccaatttgaaaaccatttatgatgacttatggatttttatatatataccagaggatgatctaatttagagacgtaaagagggtctctgggtggcgcagtcacttaagcatccacttcttggtttctgtgcaggccttgatcccaaggtcatgagatagagcattgctggggttccatgatcagtgcagagtctgctaaagattcattctccctctgcccctacccaccatgcactcagtcatgctctcctccactccccctaaaataaataaataaatcttaaaaa

SEQ ID NO: 10997 - DNA, 607 bp, Canis familiaris
  misc_feature (421)..(421): n comprises a, c, g, or t, or includes no nucleotide
aacagaggactaacgtctaacagcaagacgaggatttctgaacgtccagaccaggctcacgggctccaaacacattaactggagagcggtgctgagcggcggctgcctctacatcgagatcccaggcggcgccctgcccgagggcagcaaggacagcttcgcagttcttctcgagttcgcggaggagcagctgcacgccgcccacgtcttcatttgcttccataagaaccgcgatgacagagccgccttgctccggaccttcagctttttgggctttgagattgtgagaccggggcatccccttgtccccaagagacccgacgcttgcttcatggcctacacgtttgagagagagtcttcgggagaggaggagtagtggcagtgccgcctgcggcccttgtgctctgccgccgccggagcnctggaccgcggtccctttgcctgtcgtgctttgtgcgggtggcggaccgacggctgtgctgggggcgccgacggcaggcctgctcatctctgctgggtttgtccgcatgttgtaattgtgcaaataaacgctcactccaaattaaaaaaaaaaaaaaaaaaaaaaaaaaaaaaaaaaaaaaaaaag

SEQ ID NO: 10998 - DNA, 577 bp, Canis familiaris
tcacccccactccgcagctttttcagtggtctgggtcctggggcagccctcctggccctggcttccagatccaggccaggactcctggtaagacctcaagactgccaacctgacctcctctggtctgtcccttattgctgagaatgaagcttatgcttttgtctttaattatggcaccatgtgccttggcttcagagaacacctagttacagtgaccctccccatactcctcctaggagacgttgctctgtcatcctggatcccagtgaggcattatcgcgctgtgttccaggaaccccagtaactctggggtcagccttttagagagaggagatatctgatcactgacctggcagatgagaagtgtgggacagagtgtgtccccaagcaccctgttccccttttcccagaagcttcttaaggccactcccagaacctgatccttgttttcacatcccagagaaacaacacactctgtatttttgttttatttagaaatgatttaaaaaacattataccaaggctaaaaaaaaaaaaaaaaaaaaaaaaaaaaaaaaaaaaaaaaaaaaaaaaaaaa

SEQ ID NO: 10999 - DNA, 615 bp, Canis familiaris
ttcaacaagcccttggagcagcccaacccccagagtgttctagtactgctctaccgacatgtcaaggcatcatggtttcaacacactgctcagcgtcttttaaaaatagttgagcctttcctgtttagttttcctcttgttaaagaaacagaggatggggaataaaatggatttaggacacccagcctgaattgcagtttttctttgaaaaatggccaggctgtggtgccagacctggactgcttacatacgtgctcaagggttttacttcttgagtgtgacttgtttggcaaggaaagctataatcattaaagaagccctgaaacctgcccacttttaggtgaagcttgttttaagtgacagtagcctgagttgtaggagcagaggagtctgacacacctagagacagcagggcaggtttgaaagcagtggtattacccactgcctccttgttgtctagagcagtctgtgccttggtttgagctgaatttgagtgatgtgaattatcttgctgctttaataaagtgaccttcaggtataatagagtgtgaaggcaaatagttgcaataaatcacctgcacaagcaaaaaaaaaaaaaaaaaaaaaaaaaaaaaa

SEQ ID NO: 11000 - DNA, 577 bp, Canis familiaris
  misc_feature (551)..(551): n comprises a, c, g, or t, or includes no nucleotide
tggctgtgcggggcctatctggtgcaagatctgctcagtccaggaaatccaaggaggtgccttcccactactcgtggtgaaagaaacctgcctccacccaaatctctggagggaaaagcagcagaaaaggtttgcttctcttgggggactgcgatttaagaaataaaagtgatcaagatatttgcactttgtagaaagggcaagattctttgcttatttctgaaagggggagggtggtctttgctggatgtttggtttgtgaaaagagttacttttgataaaaatctgtagttatttttttctgtgttttttaaattactaagagaaattggtgagttcaatagctttggtattttgagtgcaaatcataatagttccaatgtggaaaaaaatcaaaatggaccctgtctctcaatgttaggaaattgcctaaaatgcagtttaataaatgatctttgttatcaaatggtaatttacatggggtaatgttctgcgaggaaaatgtactgtttttatgtttccaacctaaaattgaattaaaataaaaacancttgttttctaagaaaaaaaaaaaaa

SEQ ID NO: 11001 - DNA, 608 bp, Canis familiaris
cattcgtccctgattctaaatttctgatggtttctcccactgccacctacgtttccacataggatgaaagggtaaaaccagggcaaggatgacccttcctctagttggctccaagacacttctgatatcttttaacaagtcaggggctgatcacagcggtccagcaaatttaagcagctgatgacatcatactggaaccctgtcttctgccattcatttataccaagcactctgtatttcttcttctgaagctgccatatcatagtttcagacagctcagtggcataaatttcttcaaagtgagggctcatgatttttgtgacttctccatctccagcacctaaatcaagaagtctatgggttttccagtctggattaatttttagcagtctctgaaactgatctggtgaaaacacaaacatggagcctcttcctagcaacccattgatagatgttctagacataaacaggctaaaaacagatgacacaaaagagtgatataattggataaatagccagcccgatttctcaatgctgttgtttaagaagatctgtgttccttggtcaaggtagctctgaacaaagacagcctggagtgattcgcataa

SEQ ID NO: 11002 - DNA, 618 bp, Canis familiaris
tattaagggtttcaacccaaaggaggtcaacgagcctggcaagtgccaaccctgcctccaccctgagggacggacaaagaagtggagaccgtcctttccctaccattcctgcccttaagccaaagaaacaagctgtgcagacgtggcctcttaagaccagcactgtgggaatcaagctagaaggggcctggggtcatgcagatggacactgagtttggcaaagatgcccctcccaagagaggcaggatgcccagatgaactgaccgaaagaaaagcatgagacggtttcatgcttgggaggcagagacaggagaggcagcatgcttgggctgatccagcatctctcccaaggcttctagaagtctttggagctgccatggagaggtttgtaaccaggcactgcatcctgtcccatctggggactgcactacccagagctgtgccagcaggggggctgtgccaccctgtgcctagagtgtagctgtcagggcagggcccacgtgtacaggatctgtatataaacttgatgtgtgtctgtgctgatttctacaactggagtttttttatacaaaataaataaataaataaaaaaaaaaaaaaaaaaaaaaaaaaaaaaaa

SEQ ID NO: 11003 - DNA, 504 bp, Canis familiaris
cccacctggcctaccaatgtggggccattgacgttaccaccctccccactgtgggtacccggttgggagaccctgtccaaaagtacaatcgacttgtgttgcatcctgagcaacaccacagccattgcctgaggcctgggctcgcctggaccacaagtttgacctgatgtatgccaagcgtgcctttgttcactggtatgtgggtgagggcatggaggaaggagagttttctgaggcccgtgaggacatggctgcccctggagaaggattatgaggaggttggtgtggattctgttgaaggagagggtgaagaagaaggagaggaatactaaataccattcctttcagccctgcagcatgtcacactcagacctttagctttcaatgttagctgacaggcattaaagctttctgattagattgtcttcagttttaactgtgatcatgtcttctccatgtgtacctgtcacttattccatcatgtctcaaagtaaaggctttaag

SEQ ID NO: 11004 - DNA, 366 bp, Canis familiaris
tttgtcacgggtacttcaaaggtgcccttacaaggctttgctgcccttgaaggcatgaatggcattcagaagtttcagatccatcgggatgacaggtccacagatcgcctgccttcagctcacacatgttttaatcagctggacctacctgcctatgagagctttgaaaagctccgccacatgttactattggccatccaggagtgctctgaaggctttgggctggcctaataaggccccacacaccactgtggggtttttctaccattgttggacctgggaatggggggaaataaaaaaagaaccagaaagaaaatgtcaaaaaccaataaatgaaatccaccaaaaaaaaaaaaaaaaaaaaaa

SEQ ID NO: 11005 - DNA, 601 bp, Canis familiaris
tatagagagctaactcaggcaatgtcttgtttatctgtagactggataagaccaacctttcctgttttgtcagtccctagttccttagattaggataaattagacccaaagaagaaacttgtctttgtatacccgcagaattaagttattgttattgaaacctggcctttcatgttcactagtcttagaagagtccagatgcttagtagatgttcaataagtgatttttaaattgaatttgttcatttcaaatcctcattaacctttctaggaaggcttctttgaataaataatggaatcttaaaggaaaagtggggtttttttaaagctaaggaactcctctcttggaaataatgtgaaaacttgatggaggactaaaatttccatgagaaatggcagcccaataacagttacatgcatttgtagtcaatggtcaattttaggaggccggtgatgtctgacaaatgttagagcagatggggaaggaaattgtggggaattgtaataaatatctctatgtcgtttctcttctgggtcatggtaaaaccaataaattatcacctctaaaaaaaaaaaaaaaaaaaaaaaaaaaaaaaaaaaa

SEQ ID NO: 11006 - DNA, 667 bp, Canis familiaris
agaaactggaaaagttaaatcaaccaaggtgtttgattttgctggtgaagaagtcagggtgactaaaggaagtggatgctacatctaaagaagccaatctttcttcaagccaaaatgagaaagaaaagccacaggctactgtccctgcacctctgccatcactccctgctgggtctgggttaaaaagatcaagtggcatgagcagccttttggggaaaattggagccaagaagcagaagatgagcaccctagagaaatccaaattggactgggagagcttcaaggaggaggagggcattagtgaagaactagccatccacaatcgagggaaggaagggtacattgaaaggaaggcttttctagaccgagtggaccacaggcagtttgaaatcgagcgagacctcaggctgagcaaaatgaaaccctgatgttatggggaggaaatcaacagcagcttaatcctgtttacaatgtgagcttctgatgcatctgtgaaatgtctccagtgtttctcatcagctgttcccaccaaggtctctttttctacgttggatttctgtctttgtatcttgatctcacgtgtttcattcattttacttttaaaagtttgtccttaaaaaaaataaaaataaaagttggtcctgcgagaaaaaaaaaaaaaaaaaaa

SEQ ID NO: 11007 - DNA, 569 bp, Canis familiaris
  misc_feature (536)..(536): n comprises a, c, g, or t, or includes no nucleotide
gccctcttgtacgtgatgtctttgagctcacgggtgacttctgccgcctgcccaaacgccagtgtaaccgccattactgctgggagaagttgcggcgtgctgaagtggacctggagcgtgtgcgcgtgtggtacaagctggatgagctgtttgagcaggaacgcaacgttcgcacagccatgactaaccgggcaggattactggccctgatgctgcaccaaacgatccagcatgacccgctcactaccgacctgcgctccagtgctgaccgctgagcctcactggcccagaagtcctcacgccctgcattccaggcccgggagctgccccgaattccccgtttgtctgttctgccattcatctgtttctccaatggtccctgagtttctccctgtgcccatccaccatttgactacccagatgccgttatcagagggtctcaggattttcttctgtccttgtctgtccctctgtctctccattctctgtgcctgggtgggactgtggagtttgctcactgttgcctcacctctccntggttttgttaataaaattttgaagaaccaaca

SEQ ID NO: 11008 - DNA, 622 bp, Canis familiaris
gtgtattggtaactggcctcactctctccatgtgttctcgattcagacctctaatctcaagactgtcccaagtaatctttctatatcaggtttcatctacttgtagtaagctccagaagatcagggactttgttttgtacagtgctgtatccccagtgtctaaacagtacctgatatgcagtgggtgcttgacaaattaaacatatggccaatggatgaaagatcaatcagcctcctagtttattgactgcctttgggtcaccatacctcctctgggcaaattttctgtggctgaggggatgtccctggaaggggacatgtcacttttagtggtagagccaaaatttgtttggatctcattcccactgcttactttaatctgaacttcagtttacatttctgcaaaataggatcgataaaacctgtcctttaaaaggcacctggaaaaataaaaataataataataataaaaggcacctgggtggctcagtaggctaagcgtcagctttcggctcaggtcatgatctcagggtcctggaatggagccttgaaaagggctccctgctcagtggggaggctgcttctccttcttcctctgcctgtgtctctgcctctctctctc

SEQ ID NO: 11009 - DNA, 640 bp, Canis familiaris
gagctccacactgggcatggagccctactttaaaaataaatgagaaagagagagaatccaaaaggaaaagcaccccaagacctctccttaaccttcatgttaggatgatgtcctatgaaaataatacttggtgctacggcagcgatcttgtgaccacagcaaggagacatggccgacatgttgagaccgcagaaagaaaagatgagaagacttgagatctttaatgacatcactgaaccactaaattcaccctgaaactgccactaccagatttgttatatgaagtaatcgagtctgtattgttgaagctattttagttgatattctactatctgctaccaaatacatcctggataatattcactatcaagagataatgttagaaaccaggaattaaggatatattcatatggttgaagccactagaaaagccaggaaaagggcagcccggtggtgcagtggtttagcactgcctgcagcccggggtatgatcctggagacctgcgatcgagtcccacgtcgggctccttgcatggagcctgcttctccctctgcctgtgtctctgcctctctctctctctctctctctctctctctgtctctcatgaataaataaataaaatcttaaaaaaaaaaaaaa

SEQ ID NO: 11010 - DNA, 437 bp, Canis familiaris
cctgacaggttctggggcccacttagtgccatcactcaacgtgaacacttgatgccgtttctttcaatatttatttcttaatttcagaggcaacaaatgccctagcatgcagggacttatttggccggtgtggggtgggggagtctggatgggacactcaacacttttttttttccactttcagaaaactccaatgtccaaaaaaacgccattaaagaaggtttaatttggggtaaaattggcccccgtagtggatttccccccagaaagggggaaggaacgagcgggtagacctttctttttggacagaagctagaaggcaggaaactttgtgcggtgtcaccgtgagcacctccagctgtattagtgccattggaataataaatttgatatggtggtgacaaaaaaaaaaaaaaaaaaaaaaaaaaaaaaaaaaa

SEQ ID NO: 11011 - DNA, 616 bp, Canis familiaris
ttggagtatagagaagaatgtctgaagggacattgatactaggcatatataagaagtatgctagactatttgctttaaagactgaaagtggcaagtattaatagagtagtggactgggtgaccaagacttggattctagtcacagctcttttagtcattttgacccctgaggcctcaccttcttgccagttagtgaggggaaatgggttagattatttctggagttcatcccagctcccattcagtaattctatgaatgagctcttcaggtactagagcccaattattacacatttgaactcaagtttaataaataagtaaaaaatcactttgcaaaatgtttttggtcttataataacatgattaaaatgttattatttccatgttaactccattccataacatgaaagctttcagaacatttgccaaatgactgtcattttcaatagtatgtatcaaagtatcatatcctaaggggggaagagcacttgaggggctgatatgtcaactgtaaattgagaactgcttgttttggcttttactgttaagattctgctggcttttaatatatacttttaaaatatattcatgtctgagagagaaaaaaaaaaaaaaa

SEQ ID NO: 11012 - DNA, 692 bp, Canis familiaris
tatttattcatagagagagagagagagagcaagagacacaggcagagggagaagcaggcttcatgcagagaacccgacgtgggactcgatccagggtctccaggatcacgcccctgggctgccagacggcgctaaaccgctatgccaccggggctgcccatacttaatgtttttgaagtaaatttgttttccaccaaaattggaaaagctttggtcaagaaattggacatttaacatatcccagcagcctcttcatggcccttttgtaagcaattagatgtacactttaaaaagtgtaaatttggagtgggtgtttgttgaaattgattcctcttgaaagttatttttagtgtttgaagaattaccaaggcaactctgtatttcattatagaagtaatgatatttataatagactatgtaacttaaggagtatttgtttttttttcctgctcatgtactaattaaaatgcaggtatttgtttcatcagaaaacagagttttctcagtctagggttggtatctgaaatcaagagatttgagctttcttttttgggtagcagtctctgagactgttttcttgctggtaaaatggggacaatcatagtacaaaccttccatattaggattaaattggatactgcttctaaaaaagttaataaagcattttcttaacccaaaaaaaaaaaaaaaaa

SEQ ID NO: 11013 - DNA, 545 bp, Canis familiaris
taattatgctttttgtttaatttttagaatatctgtttttactgtggctgttgatatttcatcaggataaccatttctttgctgagttcaggtgactgaggaagagccacaccctcagactactaatacacactaacaaaccacagaatcatctttaacctaactttttatacgatgtctcagtttcccgtaaccttgcacacaagcttctgtgttgagttgaattgtaactgctttttgtatttggagagagtgtgactattgaacttgaaaccttttattccgggcgtcttggtagtttctggtgggattaagcgggtgagagggaagaaggggaggttagggggggctccttcccttcagaacatgaaatttctcccaccgcctcctctccagaggtctcccaggtgccagacctaaaggtttttcctacaatgatcctctgattatttttactccccccttgacccatatgttttaacaggattttaacaaactgcacttattaagaaatgtgtttgctttgttttgttttctttcaataa

SEQ ID NO: 11014 - DNA, 671 bp, Canis familiaris
ccctcctgactattcagagtacatgacagggaagaagcttcctcctggagggatacctggcattgacctctcagaccccaacaactggcagaatttgctagaatgaagccaagaaaaattaaagaagatgatgctccaagaacaatagcttgccctcataaaggctgcacaaagatgttcagggataactctgccatgcgaaagcacctgcacacccacggcccccgagtccacgtctgtgcagagtgtggcaaagcttttgttgagagctcaaaactaaaacgacaccaactggttcatactggagagaaaccctttcagtgcacattcgaaggctgcgggaaacgcttttcactggacttcaatttgcgcacacacgtgcgaatccataccggagacaggccctatgtgtgccccttcgatggctgtaataagaagtttgctcagtcaactaacctgaaatctcacatcttaacacacgctaaggccaaaaacaaccagtgagaagatgacggagaagacccttctcgaccccggggagcatcttgccaggagtgtgattgggaataaatatgcctctcctttgtatattgtttctaggaaagaattttaaaaatgaatcctacacacctaagggacatgttttgataaagtagaaaaaaaaaaaaaaa

SEQ ID NO: 11015 - DNA, 549 bp, Canis familiaris
atgaattaccctgcgcttacctcaatgctgcatcagccattgggatgaagatgcaggatgtggacttgttcatcaagagacttgacacagtgtttaaagaccgtaagaaaagaaccaaataaggagagtaatgtatctggagttgaccattatgaccaaactgaagatgtggatattgaagaaatggctttaaaactagataatgtgctttttgacacgtaccagaattcttcctgacatttgaaaggtttcttttttatcatttgaaaaaagcgatgaggctgcagtgcacaataagcagtttaaagataagacttgaggtttcggaattgagaatttcacggagaatatttggtcaagggatagaatgtggctgagcgagcccttgaggactgttaggttcttttactcttagactgcctcaatcattatgacccttaacagataaaataccattaagattttttctaattgttagaatatttgtccaattaaacatgattcagataaaaaaaaaaaaaaaaaaaaaaaaaaaaaaaaaaaaaaaaa

SEQ ID NO: 11016 - DNA, 675 bp, Canis familiaris
tctccctgcctggagagaacagtagggcaaagtcaggagctacacccagcaatgggcaaatgctatgaattaatttccctggtctggatggaacaagggaaccaacccttcatgcttggtagcggttttgctctgagagtgattggcagcatatatatctatagatatatagagatatgtaatttgaacagcaaagtgctctaagtagtgagaagaatgtatgcaagagtaagtttggttactgtttgaccttggagagtttcctgtatgagcagagggaatttcaggtaagtgtcacaggaaccaaagggtgacaatgtgtgcaccaaacatgaaaaagctattcattttgttattcttttactggcaatggacaactatttgatgtttgcaaatcaggacaaattgattaatgccttgctacaggaagttcactcaaaatttgatgtggaagatgagtggttttgattttgggtgatgcagagataaaaaggcaaaattaggaacacctgggtggctcagcagttgagcatctgcctttggctcagggcatgatcccaggatcgagtcccacatcgggctccttacagggtgtctgcttctccctctgcttgtgtctctgcctctctctctctctctgtctctcatgaataaataaaatcttaaaaaaaaaaa

SEQ ID NO: 11017 - DNA, 633 bp, Canis familiaris
ccgtctacgtctaatcagactcatcatggtagggaagtagaatgtcaggtcagtagtgatttggcattggtgcttaacagaaaatcctggtacttgatcgttaattccatacctttggctaagcaagctaatttagaaataagactatgtgatttccaagcctgtttgtaaagattctttgattagcccagaactgtcctggactgaagattttctagactcaagaagactgtttttctaaactaatctcatctggatctacaaggacgagataaacaatgtccagagaaatttgttttttaacaaataggtttccaatattcccccaaatattaaaacattcactgtgttgatagttactcattctccatatattctgtgaagagaacaacctaatttttggtatgctaggataggtatgtcatctcccgatagatatttcttgatttgtttttcagaggagatttagaattatctgtgtaatgggagttatatgtttttatttaaattactaaacaaattcaacacatttagagtaacctgcttttgttttcattttgtggtaacttgcagtaaattctgtagaaaaattaaagctgctatttggtcattaaaaaaaaaaaaaaaaaaaaa

SEQ ID NO: 11018 - DNA, 565 bp, Canis familiaris
tgtacttaagctttttgtccttaaattgtttcttcttgacactccccacaatgaacataactagattagaactgactttaaggatggcagcttggagcatagcaaaaagttggagtgtttgaattctattcccattctgattgtattttgtatcttaaaactgattactgttacaacaaagtttgaaagctgcttttgatgtgaatagccaaattctggtatattgtggctaaggcttaagaataccttgtctctgagataaaggtgttataatgttaatgaacagtgccaaatacactgtgcgtatctacgatttaatctttgaatgtatgttatttgattagctccctcctcctgtgtgatggtaccacgcatagagtcaaatccttgtgatgttttgtatggctgtagactttggcaacatgtaaataacgtgtaaagcaagtttttatgattgaggaatcaaatttattgaattttattattgaaagttgaaactcaacatgtatgacaaagacaataaaagaatatactcttttaaaaaaaaaaaaaaaaaaaaaaaaaa

SEQ ID NO: 11019 - DNA, 614 bp, Canis familiaris
ctctgcaacttgataggattcggctacccagcctacgtctccattaaagccatagagagtccccaccaagaagatgataccccgtggctgacctactgggtcgtgtatggggtgttcagccttgctgaatttttctctgacctcttcctctccatgggtccccttttactaccatgctgaagtccggcttcctgctgtggtgcatggccccgagcccctctaacggggccgagctgcttctacacggcgcgtcatccacgcctgttcttttctgaagcactgagttcccacggtggatacccactggtgaatgactttcaaggagcacatagcccacaagagactcgtggataccactcagcgaaacgaagcccagaaagcacgcagtgaccttgctcggtgacgaaaagaagagcaccctaagccaccccaaccggtgagaccttcctcgctcgccctcccgcgtacgtgcccgtgttgcattagggaccgcgccataatcatcttaattatgttgccttggaaacatttttgatatattaaaaaagaatgtgttaaggaaaaaaaaaaaaaaaaaaaaaaaaaaaaaaaaaaaaaaaaaaaaaaaaaaaaaa

SEQ ID NO: 11020 - DNA, 556 bp, Canis familiaris
  misc_feature (39)..(39): n comprises a, c, g, or t, or includes no nucleotide
ggctcaccttctttaagaacaggaagtgcataggcgtgncggccaccaagctgcagaacaagaagttctacccgatggtgtgctccacggccgccaagagcagcatgaaggtgatccgctcgtgcgctagcatcacgtccctacagtacctgtgctgctaccgcctgcgccagctgcggcccgactccggggacacgctggaggggctgcccctgccgcctggcctcaagcaggtgctgcaccacaagctgggctgggtcctgagcatgagctgtggccgccgcaagccccccgcgccctcccccaaggccacggccacccctggcagccctgagccccggcactgccagaggaagcgctgccgacggacctaagttctcttccagcgaaaactgccttcctggggctgagggggtgtgtcctccatccctcctttcgggccatgctccagagggaggccttgggctgaggtctgtcttggtgcctgtccctctgctccccaaggcgaggacaggcccgggagcctgagtgcatctggctcccgcctgcaccgtgt

SEQ ID NO: 11021 - DNA, 571 bp, Canis familiaris
cttcagatagaggagcgacaccaggaaaagaagaggaagttcctagaaagcacagattcatttaaccatgaacttaaaaggttgtgcggtttgaaagtagaagtggatatggaaaagattgccgctgaaattgcacaggcagaagaacaggctcgcaaaaggcaagaggagagggagaaagaagcagcagagcaagctgaacgtagtcagagcagcatggttcccgaggaagagccagctgctagtaagacccaggagaagaaggacgacgaaagcatccctatggagacagaggagacacaccttgaagaagcaacggaaagccaacagaacggtgaagaaggcacatctactcctgaggacaaggagagcgggcaggagggggtggacagtatggccgaggaagggaccagtgatagtaacactggctcagagagcaacagtgcaacagtggaggagccaccgacagaccccacaccagaagatgagaagaaagaataaatgttgccttgttttatgtgttctaaatacttttttaaatgaaaaaaaaaatgttttttgagttttaaaa

SEQ ID NO: 11022 - DNA, 723 bp, Canis familiaris
gtagccccccgtaattgccttgttgtgggggagaaaaagggcccccaaccccctgttttcttttctggggttttttagaagtaaaatatccccccccccctttgggttttaccagaatactttggagataagataccaaccgtcttctcagaagaggacttccggttgtatcgggacgtgcggcagaaggtccagctcacaattgcccaggctttcggcatcagtgcatcttcactgtacctgaccaagcccacgttcttctcacgcatcaacagcaccgaagcccagacggctcacgatgagtattggcacgcacatgtggacaaggtgacctacggctccttcgactacacgtcgctgctctacctgtctgactacctggacgacttcagcgggggcagatttgtgttcatggaggagggggccaacaggacggtggagcccagagcaggtcgggtgtccttcttcacctcggggtcggagaacctgcaccgtgtggagaaggtccagtggggcacccgctacgctgtcaccatcgccttcacctgcaaccccgaccacggcatcgcagacccggtgttcacgtagcccggccgccggctctgcccacggggcagccacaggatggcacccctcccgcccttttggcccatttcctccaacaaggtgccttatgaatccccccaaaaaaaaaaaaaaaaaaaaaaaaaaaaaaaaaaaaaa

SEQ ID NO: 11023 - DNA, 612 bp, Canis familiaris
gttagaaatagttagacatagttagaaaaattgacatatggccaatgtcagagaaattactacctgtgttctcttctaggacctttgtggttgcaggtctcatatttaagtctttaatccattttgagtttatttttgtgtgtgatgtaagaaagtggtccagtttcattcttgtacatatagctgtccagttttcccaccatttattgggggggaaaagacactggaacagaacaacacgtggaagctaaacaacatgatattaaagaactaaagggtcaggaaatgaatcggagaaatcagaaagtacatggaaacaaatggacatgaaaatacaatgctcccaaacctttaggatgcagcaaaggtggccataagagggaagtatatagcgatataggcctgcctcaaaaaatgagaaaaagtgcaactaaacagtctaacctcacacctaaaggaactagtaaaagaagaacaaagaccaacagtagtagaaggaaggaaataataaatatcactgcaaaaataaatgacatagagactgggaaaaaaaacagtaggaagaaaatctttgaaaccaagagctcagaaaaaaaagaaaaaaaaaaaaaa

SEQ ID NO: 11024 - DNA, 567 bp, Canis familiaris
tattggtgagtgtctggtgatacttccttgggagatgtactttttaaaaagattttatttgtttgagagagagtgagcaggagagagcacaagccagggggcgaggcagagggagagggagaagcagactccctgctgagcagggagcccaacatggggctccatgccaggaccctgagatcatgacctgagctgaaggcagacacttaactgactcagccacccaggttcccctcctaggaagacatattaactggataattgctgtggtatgtgttggctgagttgtgagctacctagatgcccatgcccgaaaacctgccgcttcctaagcctggtttttcagccttcccgttggttctttgaactatttaatacaaatgttaataaattccttttttgcccaattcagtagagttattttctgttgtttgctactaagaacctttaatgtatgatgaatctcctaagattctttcattgtaagcaacatatactggctaattgtaataaaacattgtggttgactccccaaaaaaaaaaaaaaaaaaaaaaaaaaaaaaaaaa

SEQ ID NO: 11025 - DNA, 600 bp, Canis familiaris
ccggctatttgtccagggctgaaagctaacgtttagcagtcagagcggccaagcggtgcgatgacagcgaagacggccttccggagcttgcagacaccaaagcacctcgggtcagcacggcccccggcgcctgcggcctggcagaaccaccgcccccgcctccgcggggcctcggagtccgagcgtcttccgcgccgaactacagctcccggcatgcacagcagcgccctcccctcgcgggaaggcggggccccggggacaggtggccgcgctgcccgccccgcgggtcctcacagccctttacgctgcggcgctccctccatcccctggatcgggtattttcggggctgcagggctgccgctcgcccgacgtgccgccaccctccccggaatcgcccgagcgaggagcccacgcaactttccgtcaggctttcgcgcctggcgctctccccgtgacggaatgcagggggtgggcgttccggctcgggaggaccccgtcgcggccccggaagcgcctcgtagccggcggtggtggcggcggtcgccgtgatgcccgcggggctgggcggctggccgccggaataggagcgggcccagagc

SEQ ID NO: 11026 - DNA, 504 bp, Canis familiaris
aggcagaataaggagactgtggggtctcgggcccaggcctcccaccaccaccaccacctcaccaaatgaggaaacccagagggacctttagacacgggttgggcccccccgcatcttggggcagccaagctggacggtctccccttttggctgaatgcctgccttctgcctggacagctcctggagaagaggagagaaaccgtgggcatctgtgctccccgctccactagggggccaggctccgccctcctgccaccccctacagcctacctgttgctgccagaggttctgcttgccttggccttcccttccagccctgggcagcatgggaatcagccttatttaagggatgtgtggtgtatctgggtcgggcggggtgggtgggatttactttttcctcttaaaccagtgttgatcctaggtcccctctctacccccacttccccaaaatctaagcaaaaacaataaactcaccttctcctgaaaaaaaaaaaaaaaaaaaaa

SEQ ID NO: 11027 - DNA, 545 bp, Canis familiaris
agcattgagagatttatactgtaactgttcttcgtggtggcaagaaccgacgctgttctttataaagggactgtcaggataaatattacctacagtgttgtcaagggcgacagaaactgaaacgtgggctgttctctgaagaagggggaccagaatgtgcgctatggcagatgacagtgacaacaactacgatacaatgatgatgaccaagggcctcgatgaccaaggccgaggcctggaggcccagtggggagagggctgatattggaggttgctgcgtctttcacccctattgagacgttaaccattcagttgccattcactttcagaaccttgtattgttgaactttggatgtttatatgtcttgcctcatgtgtctgtgaagaagtgtccttgacaaggagcctgtgtcctccaaggtgctttccagtatcctgtgcgctgctgtggcgccctgtccccactcctgcccgagtgtctcccgaaagcgctactcctggaaacagctcatcgatccggcactggtcatgaaacacttttctgc

SEQ ID NO: 11028 - DNA, 466 bp, Canis familiaris
taccaggactttgtagccccaaggtgtgtgtggaccatggagggggttttctgagacatgtgtatttttctctctgttcccacttcctgctcccttgacttctaccctctttattgttccttaggaataacagcctcccacctatacccatatatatatatatatatatatatatatatatatgtatatatatatatatatatataaaatctcccttccattaattcttattccagttcattttgtttaaatggtggatttatgcaaatgataggattattaaaatattcaagcacacaccacgatttctaccacttagaaatagctagtgttcacatttggtgaacgttataccagacatttctttatgcatgtgcattgaaatggaagaatggatagaattttgtaaaaatagatggtgtgtgtgatttataataaaaagtattacgataaaaaaaaaaaaaaa

SEQ ID NO: 11029 - DNA, 697 bp, Canis familiaris
  misc_feature (120)..(120): n comprises a, c, g, or t, or includes no nucleotide
tcggcggacgaaggcggagcgccgagaccatggctggaggcaaagctggaaaggacagtgggaggccaaggctaagcagtatctcgctcccagagagccgggctacagtttcccgtggcncgcatccacagacatctgaagactcgcaccaccagccatggaagggtcggtgccacggctgctgtgtacagcgctgcgattctggagtacctcactgcagaggtgctggagctggcaggtaacgcttccaaggacctcaaggtaaagcggatcactccgcgccacttgcagcttgcaatccgcggtgatgaagaattggattctctcatcaaggctaccatcgctgggggtggtgtgatcccgcacatccacaagtctctgattggaaagaagggacagcagaaaaccgcttagagcattgttttacccaaccccttcctccccgtcattgtactgtaactgggacagaagaaataatggggatatgtggaatttttaaaagaggcggatggaaaagcatagacaattactgtagacgtgataagagatatttgtacgttcttaggctcaaagtttgataaagtacctttccatgtggcagcacttgtgtgttgattggctaggtttctcccgtgtgttttatacaaaaatggaattgataaaccattttttacaaaaataaaaaaaaaaaaaaaaa

SEQ ID NO: 11030 - DNA, 537 bp, Canis familiaris
agaccacgcaggagtgcgcgcccccgcccccgcccccgccgcgcccgcgcgcccgcggcgcgtcccgcaggacgtcggcggggccccggcgctggcgccgctcgcgcctcaacgggctggcggcgcagcgcgcacgcgcggcgcgggactcgctgtcgccgagcagcggctcggggggcggctcagcctccgcctcggacgacgacgcggacggggcgctggcggccgagagcacgccctttctcggcctgcgcgcggcgcacgacgcgctgcgctcggactcgccgccgctctgccccgcggccgacagcaggacttactactcccctggacagccgcagcacgcgggccagcagcagacacagccgcgggccgcccccgcggggcaagcaggactcggcgcccctctaggggccccgccgcccctccgcctcgcctgccccactgtctttagggagaacagagaccaccgcctggagagagagaggagggaaaaaagaaataaaaatatttttattttctataaaaaaaaaaaaa

SEQ ID NO: 11031 - DNA, 476 bp, Canis familiaris
agcctgggagtgttttgagactttgtctcataaatggagggcagtgacattgcctgttttgctccgaagtattcagtaccgctcagtattgttaaatgaaatgattctcacttgtgatttggtttgggatccatagggaagcacaggcaccaacccacatatacccatgtattgaaatgattttctcagaatttgaagtaggaaagttaccccaacacttctgcttccacttaactggcctgccatattgtaagaatggcatatccttgttactgtgatatttaaaatatccaccagtgtccaccttttcccaaagattctagtaatgatctagaaatatctttctcttatctgttatttatccatttttccccgtatttttatatggaaaaaattgtattgaagacctttagtatgccgttgataagaggaatttggtataattatggttggtgattattttttatactgtatgt

SEQ ID NO: 11032 - DNA, 479 bp, Canis familiaris
attctagggaaattttttgaagaggtgagtcccacaggacagttaacagccgacgggctttaattctatgagttgagaacttaaaatctggtatttgtagcatttgcttggatccaggaaagatttatttagtgggctttattatatgtgctgctgaagtgagcactacttagtgggctttaaaattctcacttgcaggatttggtctctttatgggactgttcatggctctttttatcggttaccttttttttggtatggaattgcctttcaccattccagaagtaagctgggaaaactctaatctaatctaatagctttgtgtagtgctattccttttgagccagcacatcacttgtcagtaagagctcagtataaaaagcctcagcatgcccagtagtgtgatgaggatcatttttatagcattcgtttttcttggtgccacgagtaaaattgggttttcatgatcttgacccata

SEQ ID NO: 11033 - DNA, 585 bp, Canis familiaris
  misc_feature (170)..(170): n comprises a, c, g, or t, or includes no nucleotide
  misc_feature (181)..(181): n comprises a, c, g, or t, or includes no nucleotide
  misc_feature (289)..(289): n comprises a, c, g, or t, or includes no nucleotide
  misc_feature (300)..(300): n comprises a, c, g, or t, or includes no nucleotide
agggaaagaaggacacatttggttcatgcccaacatcacccaccccagtttccagcacataccagattctcgatcagccctgtttgcatagagccagatctttccctcctccccctccaagagtgtctgcatcagggacgtgacttggtgagaagagtacggagggaagnaggaaaagctngaattttctgaacaaccttctcacccagttattgaaatggctgcagagcagacacagaggatgatgtcgaacctttggtctcatttgtgaaaacgtgtgcaatttttnttttcctgtgnctacactacatgacaaatctaccaaatgtacaaattaaccttttgtgatccttggtgtaatgagcagtttctttggggctttctctttccgggaagtgggagggaaaggagcaaggtatcatcctgctctccatttgtattttggtccccaaatgtaaatacaattttctatgttacttttttgtggtaactaccaagatgaatattttaattagataagttatatgaaaaggaaggaaaattccatgtctaaataaaaaacaaaaaactgtcaaaaaaaaaaaa

SEQ ID NO: 11034 - DNA, 608 bp, Canis familiaris
ctgcctattacattagcaccttcaactttgaccatgccttggtgcctgaggatggcatcaacagtgtcattgaggtccttcagcgacggcaggatggccagagctcctgaggcctccacactctcccttcaccccaggcttccagagacttctctaagctatttcctcgagctctgggatgagccttccccacccccattcctgccgggggaccccctccttctgctctctgtatataagctgcgtgcaggcaccggctctcacgtggacatgcgtgtctgcccacgcaggggaacacggtgctctgggctttcctccgggaacccctcaccccatcactccctgcgcggcctcagtgtttgcacattccctgcctgaggcccgagccatcccctctcagcaccctgggccagccactccctggacagggtccttatctccgttctgcctctggctgggttgccttccctggccaggtgagttctgacagtgcctgcccctcagggggcctccaagaaaagtatttttacatctttctcccttttttattgacttgttaataaagggcttgtagttctaaaaaaaaaaaaaaaaaaaaaaaaaaaaaa

SEQ ID NO: 11035 - DNA, 625 bp, Canis familiaris
gagggcaccggacatgacgcccccacccccacattcacccagtgccatcctcccaggcttgagacacaggacgagatgtggtaaagccagctccccgatctcgcctgaggctgttcatctgtcggactctttctttgtaaccctggggctccggggctgggctgcctgccctggggccactgggagtcttggcgagctgtctgctactagcaagtggctaacaggttgagccaatctgggctcctgctgcctgtcctctggtcctcagagttcactggcctgggtccctgaaacaggaagtgcacaccaaggcacagtggccactgtgggccaactggcatcttgggcaatgggggccaggccagaggttgcactctccattgcagaggggggtaagggagggcaggtggagcctgctgggaagatgagtggagaggccccgcctcccgccctcccctttccaccggacagcatgctcagtacagagggtgaccacatactgtattgtctcaactgtgaccctccaggggaaagagggggtgccattaaaatctccacgggccaaaaaaaaaaaaaaaaaaaaaaaaaaaaaaaaaaaaaaaaaaaaaaaaaaaaaaaaaaaaaa

SEQ ID NO: 11036 - DNA, 662 bp, Canis familiaris
  misc_feature (3)..(3): n comprises a, c, g, or t, or includes no nucleotide
  misc_feature (160)..(160): n comprises a, c, g, or t, or includes no nucleotide
ctncccactgaatggcatgaatgttttttgtcattactctagaggcttttactgatggccagatgtttttgtactgactggcattctgtcaatttaattctaaccctgctcttaacccactacctatacaccctgctcttgttttttttatgtgctaccnatatggtgagtttttagtttttagagctcatccttataatgtctgtttaatgatagccataaggatcttatagaaagactggccgcccgtcttgggcctttgagaggcatcatgaggatcaagatccataacactgctttctgtccactcacagaattggctggttcacacatcacattagcagttgagtctgttccatgtattaaccggaggtaaaacacacttagccaaaggcagacatttaacaacagagccacccagatgcccccaaaataaaatcttaaaaataaaactacagtaaggggtgcctgggtgcctcagttggttaggtgtctgccttcagcttggatgatggtctcagggtcctgggatccagcctcccatgcggttccttgctcagtgggaagcttgcttctccctctatccctgcttgtgctgtgaaattaaaaaaaaaaatcttcaaaaataaataaaaataaagctataatgaaaaaaaaaaaaa

SEQ ID NO: 11037 - DNA, 679 bp, Canis familiaris
  misc_feature (203)..(203): n comprises a, c, g, or t, or includes no nucleotide
cccatgatggagaatcctgagatggttgagggaaacagctgatgactttcttaatagaatcgcattgaccgacgcttacctgttatatacaccttccccaattgccctgactgccatatttatctagtgcatctcgaggcgggaattactatggaaagttatttatccaggaagtctgatagctgtaagagcaccaggacttngcttattccgccgtgtactacgatattaatggaaaagttatggaggaacctttgggttaaagaaaatattgagcccacccccggatcctgaaggaagttgctggctcttgaaaccagaagttggagagatgtcactctgctgagcttgcccttaacgtaattacgaagaagaggaaaggctatgaagatgatgattatgtctcaaagaaaccccaacatgaagaggaagaatggactgacgatgacctcgtagattctctctagccatttgaaattgacttttcaatgctaactgatcacacggatgaagcacatcttaactttattgaaaaatgaattaatgtgaaagtatcaagtatattaaacttttctatttgttatttttttcccttccacagatagctttatgtgaaataaaacttgctctaaaaggaaaaaaaaaaaaaaaaaaaaaaaaaaaaaaaaaaaaaaaaaaa

SEQ ID NO: 11038 - DNA, 508 bp, Canis familiaris
gcgacgacgacatcgacggcgaccggatacgaaatacggtggacaactgcccaagggtacccaactcagaccagaaggacagtgatggtgacggtgtaggagagtgcctgtgacaactgtccccagaaaagcaacgcagaccagagggatgtagaccacgactttgtgggagacgcttgtgacagcgaccaagaccaggatggggatgggcaccaggactcacgggacaactgccctacagtaccgaatagtgcccagcaggactcagaccacgatggtcagggtgacgcctgcgatgacgacgatgacaatgacggagtccccgacagtcgggacaactgtcgtcttgtgcccaacccaaaccaggaagatgtagaccgggacggtgtgggcgatgcgtgccagggcgacttcgacgcggacaaggtggtggacaagattgatgtgtgtccggagaatgccgaggtcaccctcaccgacttccgggccttccagactgtcgtactga

SEQ ID NO: 11039 - DNA, 644 bp, Canis familiaris
  misc_feature (421)..(421): n comprises a, c, g, or t, or includes no nucleotide
gttttgaggtttgagccccgtatctggctctgtgctgggcatggagtctgctgaagattctctgaagattccccctggcctctctccctctctgaaaccctactaacagaattgaatgctgtggaattctgttttctaaaactattgtaaacctgtaaaaaatagccgggtaatactggctatagcggaatggtgcgtcccatcaagaatcactggacttttcttttaaaagcccaaaatcatggtttcagttctaaaccactaaatgaatatttaaagaataatcaaaatttattgttgggaaaaaaattactcagtgctgttctacgccattatattccagttatgttggacttgtacatagtaggtctggaaatacacgttgagggaagtgaccgctgtacatacactaatcagcccntggaattagttagaaaagcattttaaataagggcagtggatcactgaatgtctatcatatctcagaataaccaaaccctcattttaaagtgaaggctggtagcttcggtcacagtaacaggggaaattgtctcaatttgtactatctgtaattattgtaagttttgtaaataaactctcttgtttgtactctgaaaaaaaaaaaaaaaaaaaaaaaaaaaaaa

SEQ ID NO: 11040 - DNA, 701 bp, Canis familiaris
tatgccacccagggtttcgttcctgtggtaaggaggaaattcagtggtaactgtttcatcaagtaaaatatggtgaacgttagttatcgcagccatttccaggtatcccattgggctttgcttcctctgagttgttggtctttcatcttagagtcattggttaccttgtcatctttgatgtcagttctgattatttggcatcaaaagccttcatagtaggaagagttttaggtaaaagtggatccaagaccactgtcttcttattgccacttccctatagaactaattgagagacatgtccttgggttaatttgtatctgatcttatggtgccctgccttctactagctgattcgaaatacagaatgtgaagagtgaacatttattcatctactcctttggctactagaactcatctgcagtcctttcttactcatactgaatcccgattctacttctgcttcttctaaataggtcagagcatcccatttgtctattgctgagctgtagaactgtttctctcctgtaggtataaagcagagtgtgtgggatattcagggaacccaccctaatgatatattgccattctctgggaaaggttgggatcataagtatttctgtgttctgtaaagaatttcatatactggttctcaataaaattttattaggactaaaaaaaaaaaaaaaaaaaaaaaaaaaaaa

SEQ ID NO: 11041 - DNA, 321 bp, Canis familiaris
ctgcaccctggggcccgcctctgcgcctctggctccgaggacagcaaaatgtgaagtgagacaccccagcccgctctgggccgagcccctgcccagtctccttcccgggccctcatgggggcctgactcttacagtgacccccgaggtcccccagggggcagggctgggccacgagggacaggaagggtatagaaaagactggaagggaagagggagggaatggagggagggtatgttctatttgttgctgtaaataaagttatttgtccatctccaaaaaaaaaaaaaaaaaaaaaaaaaaaaaaaaaaaaaaaaaaaaa

SEQ ID NO: 11042 - DNA, 556 bp, Canis familiaris
  misc_feature (1)..(1): n comprises a, c, g, or t, or includes no nucleotide
nacgcccccgaggtctgccagcgacctcgtcgtgtgagggccagacggtcggaagccagggtccaggggagttttcagcccttacccctgagtctccccctccccgctgctcggggtcagacctgggttcccgtggcctcgggccccggggctcagcacggacagacttgcaccagcgtttccagccaacagcaggccctggcgccctcaagcccgcgtcccctgagccccgagaaccaaggtgctatcctgcagacccccccgtttactcggaagcctgggccctgggccttcggtggcacacaagcgaggtgttgctttttaaaccaaaaaaccaaaccaaacaaccccaagctcttcttccttaggagagtgattggttctacgttttactgaaaaccctctttatgtgttagttttctgattccttgtgtttgctcactgtgtccacgtcagccccttttcagaataaaggtgttcattcctccaaaaaaaaaaaaaaaaaaaaaaaaaaaaaaaaaaaaaaaaaaaaaaaaaaaaaaaaaaaaaaaaaaaa

SEQ ID NO: 11043 - DNA, 686 bp, Canis familiaris
taaattgtcaacattgttctgtgagtatggatttatttaggggtggcaaaaggagtgctagttacacgttttttcatgtagattgtcctcaactgatttgtccacatgtcagttgtcatccccacccagaaaaggaattctttctaacctagatgtatcacttgaaactttttagaaaccaaataatcagggaagtttctagagagaacgatgctttttggttttgtttttgttttaatttttccttgaggattggggtaaagaatacctccccccaatactgtcagcacaaaccagggtattaatttttttaactctgatgttgctattggagttgaatactaaataaataactataatgagggaaatacatttctaataaaattccctacattctagaaacatccctgttttaatttttttacctaaatctttttgtgctctgtgtaaagagagaaaatgtactgagttataatgcattttattaacactatgtacatattagctgctttgtgttcagaatggtagcaattgctttgtatattaaagtgatccttgtgaatttgtgaaatattgtcataaagtgcttttttcttactgtaatctttgtggtatcaactgtcataatgccctttttacacacatttatgtgcagtcacataaacatgcttttaaaaactcaaaaa

SEQ ID NO: 11044 - DNA, 618 bp, Canis familiaris
ttctttctaaaaagccatttgatactccccaatttaaactcttcaaggtttcccgttagatcaaatcccaactgccttggttacgtaggccctcccccgaaaagttagcggaagtggaggcgctgggctggatcgtgccttcctgtcttcctacagtgccagaagctgagtacagagggtcccctaaatagtccacgcttatgctagaaaaagcccaaatccttcctgacaattcacgaactaaataaacagctgggaagtagcagcatagagaaaacgtatttgaaccctccccctcccctttcttatggaaacagtttggccacagaaggctttcttctgaacagcagtcctggggataaactttggtatttggcctcatggcctgagacacaaagtccacttagctgtaatggtcatctgcacttccctcagtctgagcaagcaaaacaaagtgatgctattggagcttgtagatgcaaggctcacagaaaagcagcataagctaaaattaccgcaatgttccaaaaagaggacgtcaacccgaaactgtttataggaaataaaatgtcaaatatatatttaaatgtaaaaaaaaaaaaaaaaaaaaaaaaaaaa

SEQ ID NO: 11045 - DNA, 585 bp, Canis familiaris
ggcccctggggaactgggttcctcatgttaattccagtctggatattttgatactatccgtgcttgtcaagctgattgtgaaaatggctgggcgaagtaagtctggctttgaccctcgacatgggtcacaccatataaaaaaaaagcctggtacctgcattgcaatgttacttaaattagccttctgccttgcactctgtgctaaactgggacagtttactaccatgaatctgtcctaagtcttcattcctttatgggccttactggctggggctttgatagaacttggatataacgtcttttttgtgagagactgacttctaaggacatcatctcatttgtattgctgttcaacaagctatcattaaagtgtttgaatctttgcaagcttgaagaataccagagaactgagaaaaataacccaatgtagttttatactgcttccataaaatagtctttgtgaatcatggacttctagtcaatcccaagcttaattattcaatatttcagttattaatatccttattatccctatataaataaagtttgttttttgacctcaaaaaaaaaaaaaaaaaaaaaaaa

SEQ ID NO: 11046 - DNA, 627 bp, Canis familiaris
acaactggttatgatgataccaacctgataaaagctgttctccctactagcaaagcagccaaatgatcaccttgtacctttgctaatggggtttggcgaccatgcggaccagtgggacggagccccaaatcaagtactattcagaactgtgtgcacccctggaaatagtgatcctgagcagtctgaagaaagaactataatgaactagtcagtgctattgaagaacattttttccagccacaaaagtacaacctgcagccgaaggcagagtaaaatattctagccttgggcataattacagttaagctgaacatcattcattcagcagtgtgtttgaggacccagtgacttgaaccatcgctacaagtatttatgcatttttaatagacctacattcctcattctattgttgacctttaaggtgaataaagaaaagatggacaaacctaacaaaccaatatttccttttacacggttgagcctgggcattatctgaattaaaaaaaaaaaaagatttttaaaatagctaactcaaaaatatattgtaattactatgctttaatcagaataaatcatgaatacgtctcctcccaaaaaaaaaaaaaaaaaaaaaaaaaaaaaaaaaaa

SEQ ID NO: 11047 - DNA, 592 bp, Canis familiaris
tttcgatgtggacattcttatctcgggacacacacacaaatttgaagcatttgagcatgaaataaattctacattaacccaggttctgccactggagcatataatgccttggaaaccaacattattccttcatttgtgctgatggacatccaggcttctacagttgtcacttatgtgtatcaactaattggagatgatgtgaaagtagaacgaattgaataccaaaatcttaaaagccaggcctgtcttgctgtttttttttttcattcccatgttcaaatcaagtaattaaacatttatgtaccacaaaattgtatcacttttataatattttgcagtaaaatatcatcttctgttaatacaatgttctaagcttcttgtaaactataagaatatattccatttccatatatgatttctatgaaaaaaatgtcatcacacagtaaatggtcataatgttcagaaaaatttatccttgtaaatatcttcaaagttggtatttggaactttactatgaaagtagtgcatgaggaaaaagaatttagacttgtatacgtttttctcttcagtaataacagttactttctttttc

SEQ ID NO: 11048 - DNA, 611 bp, Canis familiaris
tagagtttgatggagtctttgttggttctgattcccggtgtcttcaggagaacaagtggtataccgagcattgaacaagctgtccccactacacctacacatctactgtgctctctctggctccgctgctgatgcccaggccatggctgacatggctgcctaccaactggagctccatgggttggaactggaagaacctccccttgttctggctgcggccaacgtggtgaggaacatcagttataagtaccgggaggacctgtctgcacatctcatgatagctggctgggaccgacgagacgggggccaggtgtatggaaccatgggaggaatgctgactcgacaacccttcgccattggtggctctggcagtacctatatctacggttatgtggatgcagcctataaaccaggcatgtcccctgaggagtgcaggagcttcaccacaaatgctatcgctctggccatgaaccgggatggctccagtgggggtgtcatccacctggtcactattacagctgctggtgtggactatcaagtaatcttgggtaacgaactgccaaaattctatgatgagtgaatcgtcctcccttcattattttgtaataaac

SEQ ID NO: 11049 - DNA, 593 bp, Canis familiaris
  misc_feature (231)..(231): n comprises a, c, g, or t, or includes no nucleotide
atgaaaagaattcctatgagttgaacatttggggaatattctggaacagctggagactcccttgctgggaatcttcatcctgaggtgcaatggtggggtagtcaccagagaatgaaattcagcacatgggacagagatcatgacaactacgaagggaactgtgcagaagaagatcagtctggctggtggtttaacaggtgtcactctgcaaacctgaatggcttctactancctggcccctacacggctaaaacagacaatggggttgtctggcatacctggcatggatggtggtattctttgaaatctgtggttatgaaaattaggccaaatgattttattccaaatattgtttaattttccctgctgggctttctttctgtaattcatctaggtttaaagggatttgaaaaacagcaggcctaaacacacacatgcatatatgatgatggcaattgttacgtgtactacttttcattcctacttacctttattacttaatgcactttcagtacagcaaatatgtgtactcttcaaataaatatagattaatgaattcctatgtgcagaaggttatgataagcacttatgtt

SEQ ID NO: 11050 - DNA, 654 bp, Canis familiaris
  misc_feature (1)..(1): n comprises a, c, g, or t, or includes no nucleotide
  misc_feature (116)..(116): n comprises a, c, g, or t, or includes no nucleotide
natataagcagagctcgttttagtgaaccgtcagatcgcctggagacgccatccacgctgttttgacctccatagaagacaccgggaccgatccagcctccggactctagcctagnccgcgggacggataacaatttcacacaggaaacagctatgaccattaggcctatttaggtgacactatagaacaagtttgtacaaaaaagcaggctggtaccggtccggaattcccgggatgtcgcccacagggatacagaggccgcgtggaggctgcttctcaggagtgtctacaactgctctggggaggcgtgcagtgggcacaatcgcagccctctggtcaggaggccatccctacagatggttaccactgtctggtacaaccgatcagatgtgtttgaggcctggcggctgctgctaacagctgccccaaccctggcctctagccccaccttccgctacgacctgctggacgtcactcgccaagcggcccaggagctggtcagcttgtactatgtggaggcgaggagcgcctacctgaggaaggagctggttcccctgctgagggcggcaggcgtcctggtctacgagcttctgccggcgctggacaaggtgctggctagtgacagccgcttcctgctgggcaggtggctggag

SEQ ID NO: 11051 - DNA, 571 bp, Canis familiaris
ggaacgttttctgctgagactattgatttgaaatgacggtgtgagatgtgtcaccagtttcaggcactgtgtaattctgattgtaataaactggcaggtatcttttgtaactataaatagtgcatgctcagccatgtacactgtaaatagcctttaccagaacgtgtttgacaaggaccataattaacatcacttagtgaattgtgataaagaaaaaaaaagccatgatttatttgatgtgattggcttgtttttacgtggcgccaagaatgaaactgtttaacagctgtaaccaatggtactgacctgtccatccaatcttgtcctttattatatctgattgtggtttgatagtattgcattgtcacaccaggaaagctgaagaagccaaatggttttagtaactgctgaagaccggccttactaacggacagctttcctgccgaggattattagcttctatcaggtgttaacatctgtttcaggaatacggcagtgtgtttacatgtcagaagtctcgtttcattctatgatatttctaaattgatttctttaaataaattcagccaat

SEQ ID NO: 11052 - DNA, 596 bp, Canis familiaris
ggagtggaccctgcgcatccgtcacatcagccccacagcccctgatacgctaggttgctaccccttggtataagaacgacccgttcatctttccggactgccctcacgtctacttttgtgggaacaccccccagtttggctctaaaattttccgaggcccagaggaccagagggtgctgttggtggctgtcccagacttcagcaccacacagactgcctgccttgtgaatctgcgcagcttggcctgccagcccatcagtttctcaggctttggggcagaggacgaggacctggggggcttgggttctgagcccctgaactcacttgagaccccgttgcaacgttgacaactgaggtggcatttgctttataaccaaagcctgaagaaaaaaaaaaaaaaaaaaagcctgattggagcccctgggtggctcagtgagttgagcatccaactcttgatttcagctcagcctgtgatctcagggttgtgggatccagcccaacgacaggctccgagctcagtggggaggctgcttgagattctctctctctccctctccccctgctcactctctctctaaaataaaatcttaaaagaa

SEQ ID NO: 11053 - DNA, 99 bp, Canis familiaris
tgcttatgaatgacgctactacttgttatgcatataaatattttactttttcatatgtatagattgcatttcttaggtgttttaattttttaaatatat

SEQ ID NO: 11054 - DNA, 626 bp, Canis familiaris
acctggcataatcccttagatatcacttgctcataattatttaataatgaaagctagatactggaaacttaactgcaatgtggatctttgttccccacatggatgttagtaatacatagagccgaatatgcacgtttacatagatgtgcctaccatggaagaatattttggcctcgccattttcagaattcttttgtgaaggtttctgttgatgttaactgagctattgcagatattttaatttccctagacgttaaatttggagtatatatatatatatattcttgacatatatgtgtgtgtgtgtgtgtatatatatatatatatatatacacatatatagtgtcaacaattcagtaaagcttttgtttaattttcagaaggaatcaaataaaacaagtatccatcttctgtagttcgtagggtgttaggtcctttaacgtaaagtcaaacttcaaattccatctagctctgtgttaatccctgttattagctggtaaagcttcatttgaatatgtaaattcagtttaggctatgtaaaatttttgctaatgtcatcattctgaaaaaaataaatttacaaatacattccaaaaaaaaaaaaaaaataaaaaaaaaaaaaaaaa

SEQ ID NO: 11055 - DNA, 597 bp, Canis familiaris
gagtaacctaggttcagcccactcacggtctgagctggaataggcctgcttctagtgagttgatagcttcctcagaaatcaggcattgtcctccagtggatggtgtactaacagacacttggtctccttaaatttcggagttcattgagaaccagcatgctgactggagaaatcaatggtgtaccgctgtgaagatctaaatacaatcacacagagagctccgctccctcaggaaggactcttttccctgtgtccgcttctgaagatctgtgaaggaacatggctgtggtctccagtccagctcctggtgccagagtagaacccaataagcacccgtgggaaggaattcaccctacgtggtcaactccagaattttcagggggagtaatcacttgcagaattcaggagatctaaaacctatcatgccacactgggcggtagcccaggatcttctcactgcttctgtcatcgtttatctgtgaccctaaataagatgcttgtgaccctgcatcctgacttgaaattgtcatttaaagttcagtagggtctaattttctcaaaaatgagagaaataaaaggttcctgaggaaaaaaaaa

SEQ ID NO: 11056 - DNA, 501 bp, Canis familiaris
tctgctaactagctgattaacctttttcagaagtttgatccctgagcaccttcaaactaaatcgtagcatacttcaatcaggatattatttactccactttacagataaagccaagtattttttcagcaggatgaaacctatctgaaagaaaagaaattggtgtcagggaaagaggtagaaaaaggggaagtataatgaattactacctgtgtccctcaggaagttagtctggttaaccaagtggtggtattcttgcagtactgaggttactgattttccaggaagttgataaagccagagaactctttgctgcatgtattataatttggactctgttacattatcttagtgtgtccttgttacaactcccaatactcagcaaacttgttttttatatttttgcttccttatacattcttactacatattttttgacttcaaaagaatgacatctttagaactgtttcagagcccatgatgatatttgctttagataatta

SEQ ID NO: 11057 - DNA, 548 bp, Canis familiaris
gaatttaacaagccctccaggtgatcctcatgcttgctaaagtgtggactgctgttcctagtaaatctttaggaagttttttccatcaccagttgaatccagttccaccaccttgatcaagtttgaaatgcatgaatgttgaacactaaaataaggacacccagccttgatgcctggagattaagtttgcaggactataactttgtataacctttttaccaaactacgttctttatcaagtatcgcaaggtgaaaataaatgtttgcctgatagttgatacaatgtagcactttatactgacagtgagttttaatatcttgtggtaggtatcttgggtagactggctgacacatctggccaagacgaagtttcctcacttctccaaggatgtggtgatgaaacgacaagcagtaaataatggttgtagccttttacacagtagatagcattcacaggggtaaagaatatgtttacttctgaggcttaatttttaatgtgatttttaaaattaaagcctgctacatgaaaaaaaaaaaaaaaaaaaaaa

SEQ ID NO: 11058 - DNA, 670 bp, Canis familiaris
  misc_feature (1)..(1): n comprises a, c, g, or t, or includes no nucleotide
ncagcctgggcatgtctggctagcccaaaggaggattctgtggtttcgctgttattaattgatctgtgctgaggccatagttcatagtgaaagctctggctggagatgcttgttggtctgttgaagcctgggccaggcagccaaatctggcctgtgctgaggatgaaaccctctgctttcacattctctgagctgcaccctcagtgactgaagatgccctttgctttatagctcttgcttggagaacccattcattcttccccatagtctgaaaggtaatgttgcctggggcctaagcgtcctgctcctttgggcacccaatggaatggaacccatcttgggaggtcaaggaccgggggacctgccttgagggaagaacttaagccctaagcctggccccccttgccccagaattcccatttccatcactgatatttaagtgaaggggaggatccctagactatgttcttggctccagactcaaaaatccacaaagccaaaccagctcatttcaacaaaggagcgctgatgtgaggggcaaggctgcctctgctccaggctcttcagaaagcatcgtgcatgtgaacaccatcatgcctctataaaggatccctattacaggaacagcatgagtggtggctaacctgaccaataaagttattttatgatt

SEQ ID NO: 11059 - DNA, 622 bp, Canis familiaris
tatattttcagcaactttcatcgacttgcccattttagaaagcagagagtcccaaaccacggttgtgcctgccttgaaacaagccattcgactgtgctaatgttttaatatcacatctcacaagtaacggggctaatgttttcctccagcagtctagacaggtgctggtgtttcatctccatttgaatgcttgattgacctcctaacacagtgtgtgtgtgtatgtgtgtgtgttcgcgcacgcgcgcgttcatgggatttagaataatagtattttaccaaaggtgtagcttttataagagttcagaaaagggaaagatgtgtgtgggtgtgtgtctatttgtttatctctcactatagcactaagaatctacttcttggagcaaaaagaccatacgagggtcgtgaagcatgattctgttataactagtttcagcttttatccaataacttgctttttaaatcagtatttatcaacaattttttttatgtatagcagtgctttcaaaagaaagtttcgagtgtccagggaaactcatgactggatatgtggtcctacaacatccaacacaaaagcaacaacaacacaggaaaccaaacccacacacacacacgccaaaaa

SEQ ID NO: 11060 - DNA, 616 bp, Canis familiaris
gcacagatgaatattcacttattggagaccataagcttatttgttctgcgatggtgaatggagtagtaaccctcctgagtgtaaagtggtcagatgtccacttccagaccccgtaaatggcaaactggtgttgggatttagcaggaaatactactacaaagcaagaattgaatttgaatgcctttcagggttttaccataagggtacccaattttgcaatctgtggcagtaacagtacttgggagcctgagatgccgatgtgtcttaaaggaatagccacttttccagaaaattgaagctgagactttctacctaaataagtcaagaatgaaaggcgtacttcatataaatgaaaagaacacagtaattcccagtgtcgagtcctcccagtacaaactctccaattccgagtgtctcaggatctcccaagcccagtgatgaaacaccacctagtgacacttcaggcaaaggatacattgttgttgtgattgttctctgtgtctctgctggccttgtagtcattgtcatcgtcgtgttcgtagtgtatcgacaaaagaagaaagggtaaataaaagcatatcccttctaaaaaaaaaaaaaaaaaaaaaaaaaaaaa

SEQ ID NO: 11061 - DNA, 629 bp, Canis familiaris
aatattcgtgacataattatatttgtcttttggcagagcatgtttgtaaggtaaacctgcttgtgttgttgactctactgtacatcttgggcagctaattacccaatgaatcatgtcaccgtaacagattttaattgtgttatgatttttgatgtttgttgcccaggtgtcatgaaagaataaagctttaagaaatgttttaaaacttagtcaacaatgaaggttgttgaacttaggtacctgtttcccattaactcatgtaaagagaacagatatattcatgattgccattattttttaccaggctgaatgaaggtagtaatctgagacactgaagatactacaatttagtttgtcttttaaaaattgctcttatggtaacactgaagatacaattgaaaaatatgttcattgaggttgtatttggagaaactgccaagataccactgccatgtataaattcccagtttacatagaaatccatcagagtaacgctcagaattttaaacatctgaaaataaggtggaatttttcatcgtctctactttataattatcacaacttattttgtatttctactatctttaattgaaataaaatctttatacttacggaaaaaaaaaaaaaaa

SEQ ID NO: 11062 - DNA, 663 bp, Canis familiaris
gttggccaatgacagcttttacgtggagatgatccaggacagtacccagcgcacagctgacatccgctgctctcttcctgctcggccgagatggctacatgatccgccgctcctggaacagcatgggctgccatgggccatcatttccatcccagttaatgtcaccagcatccccacctttgagctgctgcaaccgccctggaccttctggtagaagagttgttcccacataccagccttaaacaactctgagctgggaaaggaaaatccaggaagtctgctctttcggatttggggatagcatttggggacagggggagccgggcagaggaaaaaggcttgggccttggctatgctaaaagaagccatgccgctagccttcccttcctcagggaacccccaaacatctcatgccttgggatgaggcaagagtcagaccccagagcttcttggctagaatctggaacaaaagaggctaaaggcaggtggccagagagccacttgtgacttgtcccatcccacctggctccagcctccccctcccaaggtctccttagtgtacttcacagcaattgctggagtggttcaaggagctggtgtttgaggaattaataaaccctcactgtctttttagcaaaaaaaaaaaaaaaaaaaaaaaaaaaa

SEQ ID NO: 11063 - DNA, 645 bp, Canis familiaris
ccagaactgcttcatgttgaaagattttgtgtgaaatgttactaaaacaactttttaggacttttacataagtttttaatgtagagtaatagattattaagacactgttggaatgatggtatgagtgttgtatattatattcaccattgtggtaatctgaaattttcaagagagaaaaaaggtcaagaaaagccaagaggaaagaagatggtggataaatgaggcaggtatttggggaggaggaaaataaactgtaatttgtgtgctgggtacgtaccttacacatagtcttgtttatataaactgtaatatgtaactatactgtaagtaaacatagcttatgtaagaaatgggtatttctcagaatgtatgtgactaaaattgcaacgaaggtttactaaatgtttcaaagcagtgactgtgtagaaattaggaaatattagaataaaaaccttgtttactgacagtcaaccgtaaagtagagggaaagtaatcgctttttatacaataatttctaatggaagagagaacttaggttagtaaaaattgtatttgttggtgaggtcagttctcgaagtcttgatttgtttctctagtattttgatgtaagtaattccacagatactgtttccagaagaatgaaaa

SEQ ID NO: 11064 - DNA, 646 bp, Canis familiaris
ctgggacgcccgtggagcagcggcagacggcagctcctggacaccatcgccgcctgcgaggagatgctgcggcagctgggccggcggcgcccggagccggctggacggcgggagcgtgtcagccaagcccggagcgcctccgcagaccggccgtctccgacccgtcgcgctggcgtttccaaaggatgcaggcgacggagtctgcggagtccgtgaccatccctgacgggcgtcctgacctctctctctccctcccggggctggaccgcatggactccggacaaccccctccaataaaggggccagtcttcacatggcagcaggactggtacttggctctacggcctggggtgcgcagtctctgctggcggcatgggcttcacgtcccactatgcatgcactggtctgaagcgcagatgactagagctttggaatgtcgccagcgaacaacgccaggctcggttaacccgggtctctgggcacgaccacgcagcgctctcccagatgcggcctggcctgctttgggggatccaagtggtgttacatgtccatttcatgctttgggggctcccggccccacaaaacacttttagcagagccttgattaaaaggaaacctgcagactcaaaaaaaaaaaaaaaaaaaa

SEQ ID NO: 11065 - DNA, 539 bp, Canis familiaris
aagacctcgcgcctccccattcattgacattgtctctccatggacataggagggcccgagtcacggaatttgtgtgtggacatcgggcctgtctgcttcgtgtaaaacccgacccacatacgacacaatccattgccaatccatgaggacccaagtactttccagtcccagtcactctagggctctgcactgaatggctgacctgacctgatgtccattcatcccacccgctcacagtgtggacttttctcccctctttctaagagacctgaactgggcagactgcaaaataaaatctcggtgttctatttatttattgtcttcctgtaagacctttgggtcgaggcagaggcaggaaactaactggtgtgagtcaaacgccccctgagtgactgtccccagcccaggcaagaagatctcccttcaggtgccgggcgcaggaactgcgtgtgtcctacacaatggtgctattctgtgtcaaacacctctgtattttttaaaacatcaattgatattacaaacaaaaaattattggaaag

SEQ ID NO: 11066 - DNA, 579 bp, Canis familiaris
tgcgggggcagcttcgggagccccgacagctttcaggggaggggcacccggacatacaggccccgaggttgctatgcaacccgcccttgacatcacactgcccccggggatcctcccatgccccccgggtcagccccagcgacctcggacctgagtccatgtgatgccagcagcctgcatggaagaacatcgccacgactgcagagagcacggcctgcggttccgacgcgcatctgtccgggtccggtccgggggcgcagtcccgatggcgcgctgccgtggcccccaggagtcgccacccctgccctgacccggccgtccagtacccccgctgcttcctgtcgaccgtggatccctggctcagtgttacggccgacgcccccagacgacgccgacatccctttcccgcctgcgttcgtcccacacccagggtgactatcctgggctcccccggccgcgacaagcctgataggtgccgggcgcgcacgtgggtcacttgggctgccccacgcctggggagttcccagtgtggggccttacaaataaagctgccgcagacgctggtgcaaaaaaaaaaaa

SEQ ID NO: 11067 - DNA, 596 bp, Canis familiaris
cgctatagggccccagcttgacctctcgacagtttccgtgaggatgacttccggaggtcgtggactttatagatgaaggtgtccacattggcttggaggtgcaagaacaagacggcccaactccaggatttcaaatctttcctgctcaaggactctgaaacaagtcatcggctggccgacctcaggcagcgggtggagcagtttgccagggccttccccatgcctggttttgatgagcgctgagggcgcttgggaggtggggcccacggactggagtttattctcctctgtctcctgggaccaatggaggggagtgacggtttcaattttttgccggaggaggggagggctcttacttagggaaacccagctctatcctggactctgtagctgagactttctttccgtaacctagacttagaaggaggaggcctggggctttctgccctgaactctcccattatttcagtgttatagactccttgctcttacctggggagagggcagttgcccctgtgagcccgaggaaggggcgagtaagcacccacctttctgtttttatctaataaactgctaccctgcaaaaaaaaaaaaaa

SEQ ID NO: 11068 - DNA, 691 bp, Canis familiaris
catcacgatattaatcagaacactaacaggtctttgctataccggaagtgttttcactgatttttcatgtgtatttgtaagaaaatgtgaatttggtggattattctattggtataaaggcatctgatattgtagatgtacccatgtttataaaagtgtaaagcacaatgaaattatgctggaagtctcaaataatattttttcctattttatattcatggaagagatgagataaagagagaacataatgagaaatggttggtgtgtttttctaagcatttaaaacataattgccaattgaagccctaaatatgtttacatgccattaagatatgattcttgtaacaattttaaattgattataaagggattggatttgtaatctgtggtagtatatattgtagtgttcccatagtgaaataagtagggttgagccaagcttactttgttttgtgtcttaaattgtttgactacatcatcaaaagagataaaaggtatgtagaactggtttacctgattactattttttttttggcttagattaatactcatagcagaactttattaaaatgtgtttgtgttgtaggtggtgtttgtattatgcttatggatatgtatggtttaaaaatattttcattatacaagaaattcaactttccaaataaaagttcaacttcatgtactctaaaaa

SEQ ID NO: 11069 - DNA, 630 bp, Canis familiaris
  misc_feature (65)..(65): n comprises a, c, g, or t, or includes no nucleotide
tggggatcatcctcagccagtgccagggtcagcataagttagatcgctcccaggagagaggcacncgggaccttctttacagtataatttgaaattcctgatgtattttgcttattacttggtttcattctcataataaagagagtgtatactgaccacaggcaggctgatgaaaatcatggtttaatattttacttttcaaacttaatgccaacaaggtctaagttatgtttacacagatgaagaaaacctcaaggttttaaatatttaaaatgcctagaagctagtaatttagtctttgattacctatgtgctaagacttctgccagtttcattaaacaaaccaaatcgaattcttctttcaccattgggtttctgtggcccccttaccttttaaaaccactttatgtagcagtctcagctgtttacatgaaccctagcaaaaaatcagaatcaaatccatctattaatgtttgcataaggatgcaaacaaaaccaggtaagtatggaacaatgtataagtgagatcattacactttgatgtaaaaatttatattttgtgtatttttaaaataaatactaacactgacctggaaaaaaaaaaaaaaaaaaaaaaaaaaaaaaaaaaaa

SEQ ID NO: 11070 - DNA, 555 bp, Canis familiaris
cggccagatggtgattgatgaggactgttgggagatggacacagctatagccctagagctattcattcatggctgaccagagccatgtacagccgtcgctccaagatgaaccccctgtggaacaccatggtcattggaggctacgctgatggagagagcttcctcggttatgtggacatgcttggtgtagcttatgaagccccttcgctggccactggttatggtgcatacttggctcagcctctgctgcgagaagttttggagaagcagccagtcctgagccagactgaggcccgagaggctaatgggacccttgcaatgcggaatggctttaattattgaggaatgccccgctcctataacccggtttcaaaattgccacagtcaccgaaaaaggtgttgaaatagagggaccactctctgcagagaccaactgggagattgctcacatgatcagtggttttgaatgaaattcagatgcattatccagaattgaagttgtgcccttcttctaactttgaacttggctggttcaaaggtctacttttctactgt

SEQ ID NO: 11071 - DNA, 432 bp, Canis familiaris
ccccccctcagcacctggtcagagagcccaccttcccagccaggtgtctctccagcaggctccgatccctccctctcgccatggggttctgagccaactcctcagcctcgaccatcagccttctcaggagaagctgagcacgcagggccgccatcccagctgcagccctctatctcctccagcaccctcagagctttactgttgccctctcatcccttctcgaagtttttgcacagaacttcagttttaaaaagtgtttttctcaattctccatacctccccaaactcctccagcccttatcccctgttcagccctatcatccagagcatctcctgggctgagctgctctcttggggccggagaagggtggggcttgagggactgaatggatgttgggtttcttcattcaataaactggtgatttcttacca

SEQ ID NO: 11072 - DNA, 644 bp, Canis familiaris
taaatgatggagcattgtcgattttcccccagcgattcatagcagtaactttaagagggcattgtgcaatagttagttgtttccttgttcggctattttaaaagctgctttaacttgtgtgtttgtctttgtgtataactacttctaatctaatcactagagttattatatttctgttgttgtttgaccagagttatatgacgagaactggtgacagtttagtgcctctgcccattgtccatgatttacactaattgtgagcaatcttcttacatgtcagctcattgtttttggaaagatttgccgttaggctgttctttgaggtatcaacgaagtgattgaatttcagtcccttaattcagtgcacatcatggtgatctaacagcggatcaaaactgataaaaccccaaagagagtcctctaaatttgtagttcctacttttgtggggatgacctggccgtgtgtgtggagagggatgatgtttgggggtgaaggagcctagattctctccctggatctgtcactaacttgctgcgtgacctgaacacgtcactttacctctctgtgcctcagtttcccgtgcattaaaaataaaatgaaataaaataaaatgggaaaaaaaaaaaaaaaaaaaaaaaaaaaa

SEQ ID NO: 11073 - DNA, 445 bp, Canis familiaris
cgcgaacccccccgctgcccctatacgtctcgagttcgtgcagggcgccttcacttgccaggtcatctgcggggcgctgggatctctgtggaagctcggcgctgcagctgggtggggctggcttcgtggaggatgctggacctggtttgggggggtgctgcgtgaggccgcgtcctcggcctctgggccccgcccccgcacccctgccacgctccccgccacgcacccctgcacatggccacagcccccggcacacgggccccgccccgtggtcgggaagccccgggcgcccttccggaaaattttggggccagttcagtgtccgtcacgtgaaggattaaaagttgttaccttggggaagaagccgggggggggagcagggctggcttttggacgtgggctggaaactacaaaaccgagcttctcgggagctgcctctcggcct

SEQ ID NO: 11074 - DNA, 146 bp, Canis familiaris
  misc_feature (1)..(1): n comprises a, c, g, or t, or includes no nucleotide
nctggatttcacggattacacgtaattagttggctctacattcctcatcgtgtgcttcctccgacagctatactaccatcttcacatcaaaccaccacttcggatttgaagccgctgacatgatattgacactcttgttgatgcta

SEQ ID NO: 11075 - DNA, 562 bp, Canis familiaris
  misc_feature (3)..(3): n comprises a, c, g, or t, or includes no nucleotide
ccntggacttcagcactggaagtgccttattacccagagcccagcatcagggtgcgccataggatggagtgtcaagtctgctaccaggagagtatttgcaggagcaaaagctgtaaagacgcttcgtcgcaaagctttgtctctcttgtgataaattagaatactggcaagctgggcatcgtgaggagaacctaacacgtgcttcctgctgtttcttggcttcccttgggctgcaacatgcaatctgcttctttacccagtcagtgcattttagggatcttccattctgacctctccctcatcacccactccctcccctgtgttactgaaaccgtagtactgttcgctgtagcactgctagggtgttgtttctaatctggctttggaacgtaagcaaccaagtaagatgatagcacaagacaggtcgctggacaaaaaaagaagtctgtctgccgcaggacagatgctgcatttgcatgtatgtacacacgtaggctcgtatttatggacaaataaaacagagttggggaaaaaaaaaaaaaaaaaaaaaaaaaaaaaaaaa

SEQ ID NO: 11076 - DNA, 738 bp, Canis familiaris
  misc_feature (176)..(176): n comprises a, c, g, or t, or includes no nucleotide
cttgttcggacatcctgctccaatagatttaggcctttttttgcaaaccttttgaggtgtttcaccagttatttttggaaaagctgcattggagtggataaattcttcttcagcatgcattttaaatgagggaggaagaattcgatttaatttcagtttcaaatattttggggtanaaagatagttctacagcttttgacattcaagaggtctttggaattgttttatcaagtgtgggcacatcagaatggccaacttcacatgggtttctctattccctggtgctgctcataacctgaactcatcatcagttgccatactgaggtgagagcactcagggtgaatgtagtcacgtttctttaaaagtgatcaaagtgttttctgtggtgaggccttcagtatttgaacgcagagtatgcggaagtggtaagtcagtgtaagtttttcgtcattaaccttgtttgcacttttgtacactgctgcttgcactagcatcttagtgtgaattttaacatggttttacagtgtatacagattgttaagtataatttatataaatatgtttctgtttacctttatgtattttaccaagaacagctatgatagatggttaaaggttcttgaattgtgtttttatgttattttgattgtgttctattatcattcaccccctatgaattcgagtgtcaggagtagaaaaataaatgctaacacagtctttgaaaaaaaaaaaaaaaa

SEQ ID NO: 11077 - DNA, 182 bp, Canis familiaris
tgggatcgggttccccatcaagcttctgcatggagcctgcttctcctccttctgcctatgtctttgcctttctctgtgtctctcatgaataaataaataaaatctaaaaaaaaaaaaaccaggacagaatgtgaagcaatgatcatatggatacccactggactccaaaaaaaaaaaaaaaa

SEQ ID NO: 11078 - DNA, 580 bp, Canis familiaris
gctggtagtatagtaagaaccgagaactcacctaccgtggaggaggctgctacactaaaacagagtcagcagagtaccgccaacttcctgtggttagttatataaccactcttggcggtattggaaagctggctcatactttccttagaagcctttttctttaaggatacagcatatttgtagctcgcactttaaaagatgcttgagacacgttttaaagaaaaaaaaatccctgtaaataggatttggtgctttctgtgataattgcatgcttaagccaaaaaaactcagcattgattactgtaaaatatctaattgaatttgtcgtgaggctttgtagtcttcaggagttaatgggctgaatttcatgaagggtaacttgtacagctccttctgacaagacacaaagattatacttaacaatttgaattatgatcttttaatttaatattttaattatcttgtttatatatgtcctattgtggattgtcatccttcagtattctaaaaccaaaacagtctttttaaaaacccactaaagtttcttgataataaactttgtcaattatatatattgaaa

SEQ ID NO: 11079 - DNA, 613 bp, Canis familiaris
tatgtgttcaggtcattaccaagtgcatctgacactaagggatcattgggtggagcctctcctgcactccctccagtggttttaaataagctgtatttctgagatcttggctatcacttcagtgcttcacagtgaaactggggcttttttttttcctcttctgaggtctgaagtgagttctgagcagcgtttgtgctgggagagtgggggcgagctagggccgggggtggcagcccgagcagccgggcctcctctccagggcgcgggatcgcccaggcctccttcctgcggcagcgcccccacccccacaacacatagcccgtgctgttgtcctttggcttggtgtgtatgctttccttgggtaaaatggccgttcttttgacaattcaagtgactgttttgtttactataaccttgaaaaccaaaattgtaagaaaagattccaatgatcgtgctgtggattttattaccaagatgtttacacctcccttttacctgtcattttgaggaactgtcgactcttctcccttaatggcttgtagtctttcctatgtcataataaagcaacattttctctgaaaaaaaaaaaaaaaaaaaaaaaaaaaaaaaaaaa

SEQ ID NO: 11080 - DNA, 693 bp, Canis familiaris
tgtcccaccggtcccacctgtcctgggagtcaggagcccctggtccctggtgctaaatgctctcttccccttgggccagtgtgggcaggagctcctttccagccagatcacaagggtctgaagcacataatggaacctcagcagtgccagtatgggtcggggttcttgttttaccagcttttacagttccttttgtttctaaaaccaatgaaccagcacctagatattggatgaaggggaactggggtgtcttgtcacccaacttcccagggctggtggcaagggaactgggggtcaggatcatcatgtcccactgcagaggggctggggggccagggttcagtccagatgaacttctcagcccgtttggccagaactcgggtctgaaacctgggcctgccccctcatcagctcccccgggcgccctgatcctgggccagctggggatgagcagagagatgaggtggggccacgggccgggccagagccttggcctctgaccttggcgtgtgctgccacagctcccctccctgggggctcagcggtggcggaatggctgtgccagacgtgtggacctttgatgtctgggccccaagtgcatgagggggggacgatagcaggagggtgaggacatgagtgaaggggaataaaatccgtacaactgtcaaaaaaaaaaaaaaaaaaaaaaaaaaa

SEQ ID NO: 11081 - DNA, 605 bp, Canis familiaris
gctccccatcacgtacgcagacaccgacacctgcatccggaagtgcagcctcccctgcccctttcgagacccacactgcactcctctgaggcctcctcgagggattctctccacgggactctctatgtttgatatgttgtagtctctcactttctggcctcctgtcgccgcacggacctaccctctctctgtccctcttggccccgcgcccacccccgaggtccctttttagccctgagaccccctctcgttattccaggagtcctgaaatcccactttgccctaaggattcggtccctgccaccccttagattccttcgaggggtcctgagacccctcgtgaggttacctagccccccgtgcccccgacagacccaccactctcatacacggtgccagcacccgctgcctgcagtcaggcgcccctgcccggtgtcctcagttgcccctcgcccgcggcccccgccccacagagctgctccttgggggggggtgctgtttgagagtctttgtgttgcacattaaaactcaacaatttagacctgccaaaaaaaaaaaaaaaaaaaaaaaaaaaaaaaaaaaaaaaaaaaaaaaaaaaaaaaaaa

SEQ ID NO: 11082 - DNA, 624 bp, Canis familiaris
tgccacccgtgccacatccactacgacctcgtgggcaagtatgagacgctggaggaggactcgaactacgtcctgcggctggcgggcgtgggcagctacctgaagttccccacctatgccaagtctacgagaactactgacgaaatgaccacagagttcttccagaacatcagctcagagcaccaacgcagttgtatgaagtctaccaactcgattttttaatgttcaattactcagtgccaagctacctgaaattggaataaagggggtgggagagggagaggatcgtgctttttaatttaagatttttatttgtcaaaagaattatatggatattgggttattttgtaaagtaatatttctttggggatgatgctgcgagcagcatggtgagaattatttaaaatccttagtagggaaggacggctgtctttgcaagagaataggatgggtgtccttgtgtttagacgtaaatacctacctgcaacactgtcttaaaggtttccttgtgctctggtgaattccatgaattgtgcatcccataaattctaattaatattatttatagttatttaaacatggtctctgtatagatttaaaaaaaaaaaaaaaaaaaaaaaaaaa

SEQ ID NO: 11083 - DNA, 255 bp, Canis familiaris
gtttccagttgcctggtaccagccaccagtaatatggatggaattttccaaggttccaagaccaaaggaatcactcagttttcataactatcatttgtctctatttttcatctatttaaacccatttaagaatttttccttacattcttatttgcatgtggaccactgtcttattggctgagatatagacctaatgttgaaaggtaatttgagagaaatatgaagaactgaggaggaaaaaaaaaaaaaaaaaaa

SEQ ID NO: 11084 - DNA, 576 bp, Canis familiaris
ggcccacgggaggcctcagcccttgaatttccactgtggctttagcaatgtgaaccgcttcaccgggtcctgcccctgcccccagctgggagccctgactggcaaggctagcactcctgggggcctggggtgcagtggagaggtggaggggggttcatctcagacaagcacagaccccagattgtgccaaaggccatcagccctgcagtcccctccctgcccccaggtgaggctaagtcaggacagactaaaagcacaagatggaaacctgtaagctctgaccttggctccatcctgagaggtcagtggactgccccctgaagggcagaccccagcagatccctgcacacttgtttttcctccaatgtacataggatcagcttggggaggaggtgaggaggcaagactcccttggaacctaggtgtttggggtcaggaccccgcccccccccatcaggtttgtctgtgtttgcaccttgtcttgtgtctgaggtgactgtaccctccttctgccctgggacatttgtatctcctggctttgtaataaatgctgcatactctcaaaaaaaaaaaaaa

SEQ ID NO: 11085 - DNA, 713 bp, Canis familiaris
tttggctaccaggacagctccagcttctacgtggttattgtggaaaccagatggagcagactatacttggcaggcgaatcccttcagggccgtagctgaacccggcattcagctcaaggctgtgaagtcctccacaggccccggggagcagctgcggaatgcactcttggcacacaggggacaccagcatcacaggtgcggctgtctgtggaaggacccccgcaaacgtgaggttggaaggacaagacatcctatcccgctggttcctgtcagcactcggcccccacgtcgggttagcatcagagtgcggttcttatcgagggtccttgcacgtctagcttggctcgacagacaaccctaggtcgctggacgagccaccaccactggggtgggccgcctcgctgggtcttcttgtcttcttctccacgagaagcaatcattcatggggccctatgtgcgatacgcggcgcaatacacccacataccgagaggattagcagagatctcagaggtttctccagccctaggatggggtgggaacccattgctggaagatggcaccatcgtggctaccctcactgcaacaaacagggagcttggcacccggctccaagaggtagctgccctagaggggctcagaaaggaccaaaataaagtgtgtgtggtggaaaaaaaaaaaaaaaaaaaaaaaaaaaaaaaaaaaaaaaaaaaag

SEQ ID NO: 11086 - DNA, 663 bp, Canis familiaris
  misc_feature (1)..(1): n comprises a, c, g, or t, or includes no nucleotide
  misc_feature (394)..(394): n comprises a, c, g, or t, or includes no nucleotide
ncgcacctgccgggcgcacgttcctccttctcgtgtgcttccggctcccaaccgtccttggcctggcctgctgctcctggcctcccaccccccccccttctgcaagttcatggcctggcccgtccatccaagccccttgtcctctactggcctccagaccaggatcttcctccctggctcgctctctctccctgtccctctccacgtgtccgtctcatcctccctctcctctcttcacatctcccagctgggtccgccgtctgtggcgcggggcctccctgcctcagcaccctcaccccagcgacaacgaccccgcgcggcagcaggagcacctgcccccccaacaagctgtgacacagctccgtgagagagagtgcacacacagtggtggagnagcacagatcgaccccccgtcacagtcacatctcgccacatctccaaaggggaccattggccccggaaagggccccagccctccccatctggagcccccagccagctttcatcgtccccctctccccacgagatggctagctctcccctcccttcgccttctggcccctggtatggtgggggtttctaacgatcacacccagcttgaggaggggctgcttctgaggtcggttgttgtctttcaattaaagaaacactgtgcaataaaaa

SEQ ID NO: 11087 - DNA, 602 bp, Canis familiaris
aacatggacacccagagatgttagagaaagtgtccagggaactatggatgcgtgtctggtcacgggatgaagacatcacagaacctcagagcatcttagctgctgcagagaaggctggcatgtctacagaacaagcccagggacttctggaaaagattgtaacaccaaaggtgaaaaacaagctcaaggagaacactgaggcagcctgcaaatatggggcctttgggctgccagtcactgtggcccatctggatggccaaacccacatgctatttggctctgatcggatggagttgctggcacacctgctgggagagaagtggatgggcccggtgcctccagctataaatcccaaactttaaggatagccagggaaagcctatagggatgaaagcagaccatctgctgcttacccttcttccaccgttgtgacacatctcttggggcctgatttctctgatagaggatcctctgtggccccgagagatgccatgtagggggcttcctggtgccccaaattctgctcttcctcagaataaacataatatttctgggaaaaaaaaaaaaaaaaaaaaaaaaaaaaaaaaaaaaaaaaaaaaggg

SEQ ID NO: 11088 - DNA, 641 bp, Canis familiaris
gccctgtgttcagtgctcattctgacgccctgagtctccgctgcatggtcctgcttccactgcctcgagcagatagatcagctccttccgattgaaagcagaaagtcttttgcagttctcttcctctctgggtcactcttccccagccccacagcccaccctccttatctatttaattcctgtttatcctccaggaattaacccgatcaacactgccagtcccaaacagggtcaagtgtgcctctacctgtgtctcagaggagcatatgtttctcatctgtagcactgaccacagttacattttgacatttccttgtttggttatttgattcctgattatctcttcctttaaacagtaagtcagcttgtctatcgtttacagctgtatccccggtagcccctgtatcccttgcttagtatctgtatttagaagatgccccataaacatgagttataccatttaaatgttgtgcttcatgaacattgtacaaatttctttgaaaaaaatctacttatgataaatacaacatatatgtctcattataaacttttcctttcatctgcccaaataataaaatctaaaattttccttcttccaaaaaaaaaaaaaaaaaaaaaaaaaaaaaaaaaaaaaaaaaaaa

SEQ ID NO: 11089 - DNA, 627 bp, Canis familiaris
  misc_feature (153)..(153): n comprises a, c, g, or t, or includes no nucleotide
  misc_feature (478)..(478): n comprises a, c, g, or t, or includes no nucleotide
tccgctagacgcaaggcccgccaggccaaggcccgccgcatcgccccgcggcctgcgtcagggcccatccggccgatcgtccgctgccccacggtgaggtaccacacgaaggtcggccggccaggggcttcagcctggaggagctccgggtgnccggcattcacaagaaggtggcgcggaccattggcatctcggtggacccgcggcggcggaacaagtccacggagtccctgcaggccaacgtgcagcggctcaaggaataccgctccaagctcatcctcttccccaggaagccttcagcccccaagaagggcgacagctcagctgaagaactccaaactggcaacacagctgacaggagccagctcatgcccatacggaatgtctacaagaagagagaggggccacgagtctacttaccacagagagggagaagaaagaactttcaaaggccattttccacagccctcccggccangggccccgtgccaatgcccggctttttggcatccagggccaaaagggccaaggaagctgcagaacaggatgttgaaaagaaaaaataaagtgctattggccaaaaaaaaaaaaaaaaaaaaaaaaaaaaaaaaaaaaaaaaaaaaaaaa

SEQ ID NO: 11090 - DNA, 697 bp, Canis familiaris
ggatacaatttcacacaggaaacagctatgaccattaggcctatttaggtgacacctatagaacaagtttgtacaaaaaagcaggctggtaccggtccggaattccccgggatccggcccttcaataatgtggccaactgtggccggagctttgcccagtgggaccagttagttgctcacaagcgggttcacgtagctgaggccctggaggaggcagcagccaaggctctcgggcctcggcctaggggccgccctgcggtgacggcgccccggcctggcggagacgctgttgatcgcccattccagtgtgcctgctgtggcaagcgctttcggcacaagcccaacctgatcgcccaccgccgtgtgcacacgggcgagcggccccaccagtgccctgaatgcgggaagcgcttcaccaataagccctacctaacctcacatcggcgcatccacaccggggagaagccctacccgtgcaccgagtgtgggcgccgcttccgccacaagcccaacctcctgtctcacagcaagatccacaagcgctcagaagggtcggcacagggcgccccgggctcagggagtcctcagcttccagctggccccttggaggcctcgtcggagctcgctgcagacgcccagctgagacccagccaggagcgagcaccggagcctccgctggaggcaccctggggcgccc

SEQ ID NO: 11091 - DNA, 130 bp, Canis familiaris
cacgtatgtaaatgaatgttctataagccctttgtatagtcattttctctgcttttcagatatcgtctctattcaaagtataataaaataataaaggtggtaaattctcaaaaaaaaaaaaaaaaaaaaa

SEQ ID NO: 11092 - DNA, 640 bp, Canis familiaris
  misc_feature (1)..(1): n comprises a, c, g, or t, or includes no nucleotide
  misc_feature (39)..(39): n comprises a, c, g, or t, or includes no nucleotide
ntgtgacggcttattttcctggcattagatcctctggtnttgttgttacagacatgtgtcaaaattgttcatcctccttaaaagttgaaacaagtgcacctggctggcgcagtcagtacaacatgtaactcttgatttcggtgtcctgagtttgagccccatcttgggtgtagagatcaagtaagtgagtggaaacattccatgtttgtatgtaacattttatttatcatctgtctgtgataaatggatggcttccaccttttggttattatgaataatgttgctatgagaggtgtacaaaagccttttgaaaccctgttttcatttcttttggagatacacccagaagtgggattgctggattatatgtatttctatttttaatttttttgaggagcctcacacttttccaatagcagctgcgccactctagagcctcagcagtttgcaagaattccagtttttgaggatgcctgggtggctcagtgattgagtgtctgcctttggctcaaggcatgatccgggtctggggattgagtcccacatcgggctccttgcgaggaacatgcttctctgcctgtgtctctgcctctctctctctctctctatgactatcataaataaataaaaacaacaacaa

SEQ ID NO: 11093 - DNA, 528 bp, Canis familiaris
  misc_feature (120)..(120): n comprises a, c, g, or t, or includes no nucleotide
  misc_feature (162)..(162): n comprises a, c, g, or t, or includes no nucleotide
accctccccgagagctcaggggcatccaagcatgggcccgatgcagagagtgacacctccacggggcatggccaagcgttggaccccagagttatggaggtggcatgcggcccccacccnactccctcgccggcccaggcctgcccaccatgaacatgggcnctggagtgcgaggcccgtgggctagccccagtggaaactcgattccctattcctcctcctcccccggcagctactcgggacccccaggaggaggtgggccccctggaacacccatcatgcccagtcctggagactctaccaactccagcgagaacatgtacactatcatgaaccccattggcccgggtgccggcagggctaatttcccgctcggtcctggtccagagggccccatggcggccatgagtgcgatggagcctcaccacgtgaatggatccctgggctcgggcgatatggacgggttgccgaagagctcccccggcgccgtggccggcctgagcaacgccccgggcaccccgcgggacg

SEQ ID NO: 11094 - DNA, 546 bp, Canis familiaris
tgggggcaccactgtccctggagcagaggcaggtgttccccatgggtgccaagccatgtgcgtccctgcatctttgctgtgtgttcatgcgacctgggtgcccccaccctttgcattggaacatcgtcctattctccccaaacagctgcaggcacccactctgcaccttgttatgaactttccttggattcacaccctcacctggtttctgcttgagctccgcccccactttgtgctcatgtatcctaggtccacattcacattccttcccaggactgcttcctttggttttgtgtttttctggggggagttaagagagaagaaatgagggcaggcttggggagctgcttccagtagaagtgagaatcctaaccaccaggaagccacctcgactgctggcatggacggagggaactccagggcagaaggtggcatcccctttgccttgaggtgtctcttggggagggatctcccctagtctcaataaacccgtgaaccgtgtgaaaaaaaaaaaaaaaaaaaaaaaaaaaaaaaaaaaaaaaaaaa

SEQ ID NO: 11095 - DNA, 595 bp, Canis familiaris
  misc_feature (80)..(80): n comprises a, c, g, or t, or includes no nucleotide
taaagtgtatattcagcggcatttgtacgttcaccatgttgtgcaaccattgctatctagtttgaaactatatagttccnaaagtggatacaccccaatgtccgtcaatggatgagtgagtaaaaaattgtgatttatccatacaattgaatattattcagccataaaaaagagtgaaatacatattgcaatgtggatgaacctagaaaacctgctaagtgaaagaaaccagccacaataggtcaacaattatatgattatatgattccactttatatgaactttcccagattaggtaaatccatagaaactttgtaatttcttatatgataaatgatgactgacttccttaagaactatgaacttttgtgaatgtagggactgtaccttattcatctgtacatttcttcacccccaaatacagtttcagacatacagagaacccactgttagtcagttaagaactgatacaatgtacttatcatagaactaaaaccaccacccaatatttgcacgtatttgtcataaagatttgaccttgcaccattaatggaaataagagaaaaaaaaaaaaaaaaaaaaaaaaaaaaaaaaa

SEQ ID NO: 11096 - DNA, 622 bp, Canis familiaris
aataaggtttaaatcccacgtatcttcttcacaaactgacatacatccctgtacccaataatatggaccgcaattgtgctaggaactaagaatgctcagtaccaccccagaaatccccccactataatgtcctaagaaatgggagctaatacttgaatggtccctttaaaccgattttatacgtttaaataaagattataccagcccctgttcatgaaaattttatagtaatgtgataatttatgaccttagtctcttttcttgactatgccaagcccatccaagaaacgttagctatttggaccaccttgaaacggactcccggtgttttccctagccctgacccttatgactaaatcctgccccccgacatcttactagaatgaaaccaaggaaattggaaattcatgttttgtaacaggaccctttgtttccttacttttgagattagaaagttctttatatactttcgactcacagtttgttgttggatataggatttgccaatatttttgtcccgtctgtgatttatattttcattctaagacttttcagagtaaaattttgaaaaagtccaaaaaaaaaaaaaaaaaaaaaaaaaaaaaaaaaaaaaaaaaaaaaa

SEQ ID NO: 11097 - DNA, 735 bp, Canis familiaris
ttctctggaaggctttcttgagatacttgatgataagtcttgtgtgatttaacgtttcctcgaagtggtacagcttcctgtgcttctcagtggcagggcttgaattcaccctctggacactgttccttgtccctttctttgtgtggtttcatctaatctgtgctggttagatacagcatctcagaccttaaccatccaatgaccaagaaggccactggactttttaagtaatactgacaagtggtttctgttttctaaaggaccaaataaggaggatgtcttgcttctttaacttaggctcttttccctgctgagctgaaaattgtggtgacatcccggttgaccacaactgcctaatctaaaagctcaaagacaagaagctaaagtgttatgctaattttattgcagtatgatagaatttttatcttgttatgtcctttcttcgataactctgacaggaaactaactgctatgtctcagagctgcacataggaaagtatggaaaaatgaaaactattattctttattctgatacctgaaaacttttaacgtggaccagacttactactactgttgatcttcccttctcttggaaaacacatacttaagtagcccaaacactttataattttgtagaaaaaatatgcatctattttttcttgacctggttttataccagtaataaaagttattttggaagctaaaaaaaaaaaaaaaaaaaaaaaaaaaaaaaaa

SEQ ID NO: 11098 - DNA, 585 bp, Canis familiaris
  misc_feature (1)..(1): n comprises a, c, g, or t, or includes no nucleotide
nagctgtccaggctaccccgcagctgctcttaagcaagctgcggttgtggaagagctgaagttgtcccacaacccctggaaaagcattcctgacacgccgttccagtctttcggcagatacctggagaccctctggctggacaacaccaacctggagaaggtgagctgctggctgcagagctctgtcctggctccttttctgcctagaggaccggggatccgggcccgaggctgggcaccatcccttcacctctaaattgcttctgtctctctggctatctctaaggtaaagagctctgacagctctgtccctcatcttgcctcatccccaccctaaatcccgccctgcagccccggtccctagtctcagccactgccgtcctcggattcctacttatagacggagctggggctgccctggccccaccaatggcccctaggaggcatgtccactgctccccaaccccctgctgtgggcaggagccacctcttcctgttggaccttccatccctcctctgctgtttttttcctgtctccagtaaacttaccacccccaaaaaaaaaaaaaaaaaaaaaaaaaaaaa

SEQ ID NO: 11099 - DNA, 599 bp, Canis familiaris
accctggaggtgatcctgaggccgaagatcgggctgcctggcgttgcggagaagagccgggagcgactgatcaggaacacgtgtgaagcagtggtattgggaacgctgcacccccgcacctccatcactgtggtgctgcaggtcgtcagtgatgctggctctctcctggcctgctgcctgaacgccgcctgcatggcattggtggacgcaggtgtgcccatgcgggccctcttctgtggggtcacctgtgctctgaactctgatggcaccctcgtgctggatcccacagccaagcaagagaaggaggcccgggccgtcctgacctttgcgctggacagcgtggaacggaagctgctaatgtccaccaccaaggggctctactctgctgctgagctccagcagtgcctggccgccgcccaggccgcctcacaacacgtcttccgcttctaccgggaatcgttgcagaggcgttactccaagagctgagacaagccggggcagggcgcccctccgccgtggccacagccaccgccaccacccactacctccgtggaaaataaaccagcagctaacctcgcctctcaaaaaaaaaaaaaaaa

SEQ ID NO: 11100 - DNA, 664 bp, Canis familiaris
agaagttacggggtagaccaaattctctggtattgaagaagtggaaatgttcccaaaccaggggacccggtgatccacttttgacccaccctaaagttcaggcatcgctggcagcgaacactttcaccacttacacggccatgctgagaccaagcacgctgaccagaaatgctacccagtatcttaaaccagcttggtgccagaccgtctgactagtttaagaagactggctgaagctctgccccaaccatccgtggatggaaaagccccccttgctaccggagaggatgatgatgatgaagttcccgatcttgtggagaattttgatgaagcttcccagaatgaagccaactgaattgagtccacttctgaagaagataaaacttgaagaagttactgggagctgctattttatattatgactgctttttaaaattttgttcactggatctgataaaatctagatctctaatatttttaagccccagccccttggaccctgcacgctcttttcacgtttttgcttatacacccattcacttctttgcagctaattaagctgaagaagcctgggaataaagtttgaaaccaggttaataaagttctttgcctaggaaaaaaaaaaaaaaaaaaaaaaaaagaaaaaaaaaaaaaaaaaaaaaaa

SEQ ID NO: 11101 - DNA, 608 bp, Canis familiaris
gagatatcttcaagtacatcccaccctgagactccttcaaaacagtgtcaagcatcagccttgtttcagtttgcagagatttcttcaaacacttcgcagttggtggtgctgaacctgtgaaacgctgtgggaagtctgcactctttcaactggcagagatgtgtctggcatcagagggggttaaaatggaggactcaagctaatgaaggccaaagaatcacgatggtggaagaattcaagaattggagaagggaaaggaaccaagagaaataaaaatggagaaaacagatgaagccaggttacagaaggcagcagaatttgaaagaccagctaaggaaaatgtcagagattctaaggaactaagaaattttgaggagctgcgaatggatgatataatggatataaaaatggaagattccaaagacattaagaaggaagaactagaggaagatccaaaatgtagtcacttccctgatttttcctattctgccagtagcaagatcataataagtgatgttcccagtaggaaggatcacatgtgccatcctcatggaattatgatcattgaagatcccacagcattaaacaaccagagaagctaaaaaaaa

SEQ ID NO: 11102 - DNA, 674 bp, Canis familiaris
tctgctgcccgccccactcactgcttgtagggagggggagaacccccctcttggtcctacccttcgtctctgctcctctttcactgccgccttccccaagctttagtgacaacagccgcccaccctccctggatggagaagagacccttctcccaaagcaccttggcacactctgacctctgtcgcccccccaccctcggtggggctgtggctgaaggagactgcagaagctccgtcccctcctccgtttgcacatgatgtcctgcattggatccgcttttgtattttctaaccatccccaaagggggcctggaaggggagacagtggttggcccggctgggcatgctgaccctgagcggacagccccagcccactcttggctatgagatgcactgcccagtttcccttggccatctgctggcgtggggtaaactgaggcccagagtattagggaaggaggaaggaaggagaagcacccccttcctcttttctttcccctttggttcatggggaggatttgtctttcttgtctgtaagcccttttaccctggtcctgtactgtccagtgaaggaaaccgtggttactaaggccctgtcaaaaagtgcacgtcttgtcccaataaatcacgctacacttggtgtcccaaaaaaaaaaaaaaaaaaaaaaaaaaaa

SEQ ID NO: 11103 - DNA, 159 bp, Canis familiaris
acgaacttgacttgcattagagtgtacttggaaacgaactcatccctggccacaggagtctctattttttcgtaactttcatcaagaagtttaagaaacatacagtcctatcaagggggaaagaatggttcccacccagaacattcagcctgggaagca

SEQ ID NO: 11104 - DNA, 621 bp, Canis familiaris
cgaagatgggagcgtgttagggaaaccgacgtttttatccagtcctttgttcacactatttatatttgaagtcggtggttccattctctggaccggccatactgccacatagcattcctctagtccattgtgaggcttctgttaggaggcagaggggcaagaaagagctgctcatcctggccctcaagtgagtcacttcccttctctctgccgaggttcccactgggggatggcagtggccagtggccaagacccttccagatccagcagtctgacccctggcctcttgctgcatatggtgtggacagtaggcgcaccatccctcctcccctggacacgtcccttcccctgctggggccttggactccccatctgtggcatgagaaggtggaactagatccataaggtccttacagctatcactggcaggttccacaagaggttcaggacaggcagatctggttcctctcctcctccagagtctaagctacacgaaagttgatagaattagctaatggctccaaaaccacctccagagagctggctctatccgggcggcttagcgcagagatggtgttatattgattgaataaagtcagactcctgggaaaaaaaaaaaaa

SEQ ID NO: 11105 - DNA, 603 bp, Canis familiaris
cgaggactggggagggctggggcgcgtgcccattatgatggtttctccttggagcctgagagcgactactatcgcctacggcttggccagtaccatggagatgctggagactctctttcctggcacaatgacaagcctttcagcaccgtggatagggaccgagactcctattctggtaactgtgccctgtaccagcggggaggctggtggtaccacgcctgtgcccactccaacctcaacggcatgtggcatcgtggtggccattaccgcagccgctatcaggacggcgtctactgggccgagtttcgtggtggggcttactctctcaagaaggttgccatgctgatccggcccctgaggctgtgacatctgtccatctgtcccccaggcccaggggatgtttgtcagcaggagcccaagttatcctggccacacttgctttgtgacttagtgtgggcctggcccacagaccttcttcttgtatctgctccccagggccctggaatgcccctgccagtatctcagaccccaatggctccccgagagcatttagatctcagtttgagctcatattttataacacacagaatctcaaaaaaaaaa

SEQ ID NO: 11106 - DNA, 640 bp, Canis familiaris
cactttttatacctgtttgaaattgttcactgttgttatgacatgtcagccactcaaatgaaattgtactttaaaaatttactaccattctgtacatttctaagtcgaacaccttgtgacttttgctttaatgacaatgaaactatcttgcctccttgatatttgtattactgctgctgctgttttttttttttaccctagaaccgaggttataattgtatggcttttcagaactgagatacacggtgaatgattccaagagtccaaagtcgaggagaataatgtttctttctggcataaagactgattaataaaaatccttgcctgtgttttcctgatagcacatgaccaatgtctcttaggtgaccagatgagagagcacggttaactgattgtgtggtactttggaactcacgagaaatattttaattttcacaatgtagttaccaattagaacgtattcatattttgtactttctgttaaaatgcactgattgcccagattgttaccttcaatttttgtgtttattcctaatgaaaagcttggtttgttcttgtttttaagtttgcactcgaatcttaagaaataaatctactcatgttatccaaaaaaaaaaaaaaaaaaaaaaaaaaaaaaaaa

SEQ ID NO: 11107 - DNA, 634 bp, Canis familiaris
cccgcgccgccgccggttccgggcaccgagcccgagccccgagtcgggcatcgaacctggccacatccccggcactgtgaacatccccttcacagacttcctgaccagcgagggtctggagaagagcccccgaggagatcaaccgtctgttccaggacatagaaggtggacttgtcccagccgctggtggccacgtgtggctccggcgtcacagcctgccacgtggcactgggagcttacctctgcggcaagcccgatgtgcccatctacgacggctcctgggtggagtggtacatgcgcgcccagccggaggaagtcatctccgagggccgggggaagaccctctgaggctgggcaggacgcaaggagctgtgccagagtcagttctgactctgctttgaccaagtgtgtgtttcttcctgcaagtcaggtggcacacaggggaacatccccaagcccaggaattctgttgacttgtgggcttccgacagaggccggagagaaggtggtggtgggcgcaggggaaggcagcctcccacctgctgaggtgaggccctccctcccttctgtttcactaatgaggaaataaaatggccaagtgcctaatctttctaaaaaaaaaaaaaaaaaaaaa

SEQ ID NO: 11108 - DNA, 546 bp, Canis familiaris
  misc_feature (169)..(169): n comprises a, c, g, or t, or includes no nucleotide
  misc_feature (221)..(221): n comprises a, c, g, or t, or includes no nucleotide
ttgtaagctccttgagagccaggaacccatgttatcccctttacttttgtaaaccactccttgttcttcactgcgcctagttgctacttgcctagtgctactcgttatgtgatcatttggacttgactgacataaagacttgtaacaggtttattgtagactgcaaacnaaaggccttagagtcatctctttgtaactctttgtctcttccatctgcttanccctggattctgtattgcttttcctctgtcacccctctcccttccctggctcttcgcctccattccgtgcagcatacagtaaggctgtcagcttccacgcaaataagtgggtacctttccaaccatttttcttttcaatggcatataatactatcctaagcaaatttgcctttgcttaactcatcaggcagccttctgggtcagttttttgtatcttttgccttgatgtcctgttctcttccacagcattgaggtctcatgaatttttctaattttttttgttattgatgaattgtttcactattaaatatatgcatgtatccca

SEQ ID NO: 11109 - DNA, 631 bp, Canis familiaris
  misc_feature (130)..(130): n comprises a, c, g, or t, or includes no nucleotide
  misc_feature (237)..(237): n comprises a, c, g, or t, or includes no nucleotide
cccgaggctccgggaactggcctatcgtccggggctccgcaggaccatccgcacgccacgcggaggcgaggcgcaaacgccgcacaggtgtgtgcccggggcggggggacaggtgtgcccgaggccacanttagggtgcgaggggcccgacctcggagggaggaaaacagtcggtcccgaagcttcgcccgccgagcacggagggggcgggcctgccgcaggtctgaaggctcccanagcccccgcgctgggcgggattcggaggaggccgagggactgagggtgcaagccccagaataaaggaaaaggctctcgaatccaggggccagcctagaaacccccaaacaatgaacatgctgggtctgaggtaaacagccgcgactgggggtgtcgcggaggtgaacccggatgggaagagggaaacaaaagagagaagcccccgagcgcgggtccgtggcggcggcggcgcgtacctgtgagagttgccggggattggggcatccgaagagcgcggagctggagctgaagctgatggctcctcggcggctgaggacgtgctgggggaccggcctgtccaggggcagcaccggcagctggtaacatacttccacttgaatacgcccgccctgcc

SEQ ID NO: 11110 - DNA, 474 bp, Canis familiaris
gagggccctcacgcagccccaccgaggcctggctccccggccggaaaccagccagtttggccctggagatggacattcctctattactgtgaagtttttatttatggaggaagggagtgccaggcctcgggagattggtggtgttctcctttccctaccctcattccagcaagagaccacctccctcagccactcacccccctcccggggcacccccatgcctgtcacggccccctctggaaccctgccctacctgcctgcccgcttctccagggcctgagcagaccagcatttgccccggtgaagggatgaagtgaaccttgtgtgccacctcacccgggctcaggcgtccttggggatgggggcagaaggatgccacctcgtatccaggtggagtcacccgggaaaagatggagggaccaactctgttttctcaataaaaggggctgtttttttaaaaaaaaaaaaaaaaaa

SEQ ID NO: 11111 - DNA, 623 bp, Canis familiaris
gcctcgtacaccccgctaagtggggccatgactatgattcgtgtaccggtcccagaagacctcgcgcctccccatcttgacattgcgcccatggacataggagggcccgtgcaggaatttggtgtggacatcgggcctgtctgcttcttgtatacccgaacccacgcactacacagtccattgccactccagaggacccagtactttccagtcccagtcactctagggctctgcactgaatggctgacctgacctgatgtccattcatcccacccgctcacagtgtggacttttctcccctctttctaagagacctgaactgggcagactgcaaaataaaatctcggtgttctatttatttattgtcttcctgtaagacctttgggtcgaggcagaggcaggaaactaactggctgtgagtccaacgccccctgagtgactcgtccccagcccaggcagaagatctcccttcaggtgtccgggcgccaggacactgcgtgtgtcctacaccatggtgctattctgtgtcaaacacctctgtattttttaaaacatcaattgatattaaaaacaaaaaaattattggaaagtaaaaaaaaaaaaaaaaaaaaaaaaaaaaaaaa

SEQ ID NO: 11112 - DNA, 598 bp, Canis familiaris
agggtgagggcgatgcccgtgctctccaccacgctggctagctctttgctgcaagagccagagcatcatggccatcttgggctgtggaagaggaaggaaatgctttttccttcttgagcctcaagaagaaccagccctaaaaataaataaagaaccaagccctgctgacaacctggatggttgccccgtgagatccacttcagatatctgacttccagaactgtgaaataagccacgtttgtggggccctgccacagcggtgactgggaatgaatgcagactgtgttcccacggggtagggtgccctgcagcaaatacctgtggatggacccgtggccactgggcggaggctgggagagttttgcagggcacagcagaaaaagcccaggtgggacgctggatggcacccgtggttaggcgtctgcctttggtccacgagtgtgttcctggagtcccgtgatcaagtcccaccttgagctccctgcatggagcctgcttctctttctgcctatgtctctgcctccctctgtgtctctcatgaataaataaaattgaaaagaaaagaaaaaaaaaaaaaaaaaaaaaaaaaaaaaaaaaa

SEQ ID NO: 11113 - DNA, 179 bp, Canis familiaris
cccgacggcagctcggcgggctcgttccacagggtgggcgcgggctcctgcgggccctcggctgtgagcactgcgggggccaggaccccggggaggagcagcagggccatgcgtagggccagacagaatgccatcctggcctgtgagggtgcgcagctggagagcagggtgcaccgacg

SEQ ID NO: 11114 - DNA, 525 bp, Canis familiaris
tacattggctttgttagggttgactttgttaatgaccaggtaatcattcctcctattactgaagtcagatggactctagagacccacgatttatgctactattaaccccaactttctgtctggtactggaaagtaaccatctaagaatcatttacaccttgaaagcttctttaacacttattttaaaatgcccaatatgttctttctagaaaaatatttatttttgtttctgttatatagcttttaactacactttcagagaagtgtgatctttggataaatactcattacatttctgaaatgtttactactctgaaacagggatttagatgactggtggttattggctttacagaaatttcagagaactaattttaaaaaccatgaaccattccaaaaaaaattttgttttgttttctgacatactctgtttgaccaagagcagcaaacccttgctgtgtggcattcttggagtgtgctgtgaacatgctttttaaaatattaaatatgaagagagccttttaa

SEQ ID NO: 11115 - DNA, 615 bp, Canis familiaris
gcctacgtcccgcgtacgcacactgcctgcctgctgcttggagacatgtgtgttcgagtgccgtgtcttctccgccgcacgctgtcccaggacgctttctatgagcagcctgcctctgccagcgctttagaaagtgttgcgcgtcctccaggtttgattaatggcatgcagttatttttacttaactggagtaatctattctttcaggcacgtagagcatttaacacctaatttggggttatttttacggctctcaaacttaaattcatgtttttctgttgacgctccttgtttgcagtcctgggctgctcatcggtatcctgggcgggctgacctctgtgtcagcatggctgcagaatgcaccggatccagggtgggccagcccggcagcccacctgaccccccgcgggctctggagcagggccatcccaggccccagggaccccattatgccttttcctgctgtgtctcatgccacctttgtggggtgttactcgagggcttgctgctcctctttctgaccagctcttggaatagaactctgaagagtgggtgtaagaggtggtaggtccagtgctttgtatctgtttattaaagggtacttaggaaaaaaaa

SEQ ID NO: 11116 - DNA, 592 bp, Canis familiaris
caaccgaatgtggaccaagacatcccattccaaagatttttaatatttattgtattcattcatgttcattcattcattcattcattcattcatgagagaccacagacagcgagagaggtcagagacacacaggcagagggagaagcaggctccatgcagggagcccgacgtgggactcaatcccgggactccaggaccacacccctggctgaaggcaggcaccaaatctgctgagccactcagggatccccccaaagatttttttatagtccattggttactaggtccaggtgaccagtgctcaaaagataggtttgatgaccttggttctaacctaagattcttttcaactctcttagatgctatccaagatgttaatattctttcctcttttaatcataaatatattattttaaaagactgcttcagatagaatagaggtctgtagactaacaatggtctaaccaccaaagtgtgaatgattgtgcattaccattaactccatctgcttgggtaagcaaggattaacaggatttcttgttcaaattggaattttgtttgtatctaatgaaagtttgtaaaaaaaaaaaaa

SEQ ID NO: 11117 - DNA, 646 bp, Canis familiaris
aagtaccagctgctctacgtgaaagttcccagagccctccatcgacgaccatcttggcatcctcaaacaaagtgagaagtggggatgacctcagtgttctctgcactgtcctaggggaacctgatgtggatggtggaattcaggtggatctatccaggacagaaggatgaaaggcctgtgacaattcaagacacttggcggctgatccatagaggcctggggcacaccacaagaatctcccagagcgtcatgacaatcgaagatttggagaccactgatgtaggatattatatttgcactgctcagaatctccaaggggagactacagttgccacccactgttgagttttcctgacttggaaaatgaagtataatgaattgatggaaagttcattcgtatatacatgacccgctttggggttcttttgactcatgctttgccagagccccgatgtcaagtgccaaccccacccccggccctgtgagtcagacccagacatccaaactaaaaggaagtcactcggtctaataatagaagtgttaactcctctgacagaaagcatgtattctgattgcttacctatgtacatgcctcttctacttttttataataaaaaagcattgatgttaaaattaaaaaaaaaaa

SEQ ID NO: 11118 - DNA, 587 bp, Canis familiaris
agtcagacatgttgaccgcctctcagcttgtgatgtgaccagcagatatcagatgtcgccatttgcttaatttttgtgtctttttagcatttgaaaactaagacctttccttttagggcatggtaacaggtcctgtttgaggctctatcactgttgtcctctagagtgctgtcccgtagaaaaagaacccagtcctataggccattgtacattttcttgtggtcgtgtcaccagaaagtaaaaagaaacaggtggaatgaagttaaaatgagggatgtctggccagctcagtcagtagagcctgtgacgcttgatctcgggttgtgagttcaagccccatgtggggtatagagattattaaataaaagtgggtattttacgccccgcatggtgtgacattcttgttctagcagttgggacgagcggcatttccagtgcccgggagccctatgtggctagtggccgccctattgggacacctcagcagtatctaggatgattccagcccttgtcagtgctgaaatcacgctcattttctactgagtccggaagaaaattttttccttctttcttaaaaaaaaaaaaaa

SEQ ID NO: 11119 - DNA, 583 bp, Canis familiaris
aagcgtgagcagcatccccccgccgagggcccgcgcctctggccgctggccttggagcaggcccgcgagcgcaacgccaaggtgggcgccctggccacgcagccgctgctcgagcgggccgacgccctgggccagcagctgcgcgggcagctggaggagatgagcagccgggcccgcggccacctggaggagatgcgcgagcagatacaggaggtgcgggtgaagatggaggagcaggccgaccagatacgccaaaaggccgaggccttccaggcgcgcctcaagagctggttcgagcccctgctggaagacatgcagcgccagtgggacgggctggtggagaaggtgcaggcggccgtggccaccatccccacctctaagcctgtggcggaaccatgagcgccccgcatgccacctgctgggccccccccaactccttcccgtgccccctgcctgctcccaccggcctccaggaggcctgcccctgcccccagctgtcctcctgaaagggccctagcttaataaagattcacccagctccacagcaaaaaaaaaaaaaaaaaaaaaaaaaaaaaaaaaaaaa

SEQ ID NO: 11120 - DNA, 638 bp, Canis familiaris
caggatcgcgcccctgggccaaaggcaggcgccaaaccgctgcgccactcagggatcccgatgctagcattttttaatggatcatgcttcttgaccattacagaaaaacagactgtcaaagggctaatacagacaacccagacctgataacagatcttcagtaattaaatgaatgattataactttcatctccacccccgaacctgtctagccccataaaatttcccaactcaatgaactcaattaagtttcactccaggtattgcttacgtgactagagataaattttagtatgaagtgaattcgaaatgtgagcctgagtggagtttcactctgactctctgaaagtacaaaaaccagtccacgtgttgtctctacctgacttagttttcctttccatttgaaccattcagcatgaattgaaaccaggttttcctgtggaaaccatgtttgattggagtagggggtagaagttgagttctttcttgcaactcttggtcggtgtttatttttatattgtttctcaatgtggatgtcctcggtttgtatagtatacactgcaaaacaccctctcctttaatgcatatgcatcaacggccttcacatttctgtataataaatatcaattattggtaaaa

SEQ ID NO: 11121 - DNA, 347 bp, Canis familiaris
agagggagcacacagctctacttaagatcgaaggtgtttatgctcgagatgaaactgagttctatctcggcaagcgatgtgcttatgtctacaaagcaaagaacaacacagtaactcctggtggcaaaccaaacaaaaccagcgtaatctggggaaaagtaactcgtgctcatggaaacagcggcatggttcgtgccaaattccgaagcaaccttcctgcgaaagccattggccacagaatccgcgtgatgctgtacccctcaaggatttaaacttatgaaaagtacaatcaaataaaggtgtagatttgtaaaaaaaaaaaaaaaaaaaaaaaaaaaaaaaaaaaa

SEQ ID NO: 11122 - DNA, 571 bp, Canis familiaris
aacggtcatttatcagttacagaatagagaacattcatttaacagcaggttttatgaagacacataaatatcacatggcttaagcatttaggttgactgtaaaacagaatgaagaaatagagatagtttgctacataaggcttaacattggtgtaatggtgagtttcttttctagcttcctggcagactcttccttgaggtcaaggaccatatcatattcacctttgtatcttccatacttactacagtgctgtataagcattcagctcatgctgaattaatgattgagtaaatatagattaaaaaaatcaaacttcctctatgtgagactagatcagcaaaaatataatgtcccgaatgcaggaggcactgcacattttgtaccatatactaccatatactactgtacttggccatgtctagggctctaagtttagggtaggagccatattcttaaaaagatactaaaagactggaccagatccaaaagatagcattggctgtctgaagttgtgcatggtttgatgtaaaggaatgttcagcataccaaaaaaaaaaaaaaaaaaaaaaa

SEQ ID NO: 11123 - DNA, 593 bp, Canis familiaris
ttgtcgcgcactcttccgaggctcgggttcctggggggctcagcacccactctcccacccgccctctccccacccaggctgggtgacttgatgcgcttcattcaggagagtctctcgagctctctctccatctttcctgcctggaaagggagagaactttccatattcccagcggatgggttgtgttctcaaagggatcacactcccaacttccttcgctccaagttctgttggaggccaaagacaacccccccctcccacccagggttctcctaggaaattcactggaattgagcgcaaccgtcctgagagtcctctctccgtctttctgttttgtttttaatatgttgtcagtagcgtttgttttgggtatttttttttagaggcctcacaataagttattactgtccctctcattttttttcaaaaacatgtggtgatatagtttttaaaaataactattttgttatagatcatgagatgcataaaactgtacagaactattttgtaatgtattgatttaaaaaaaatctgtacataaagtttaaaaaaagaattccaatggcaaaaaaaaaaaaaaaaaaaaaaaaaaa

SEQ ID NO: 11124 - DNA, 639 bp, Canis familiaris
tttaaatatcaagattctttcagaaacctctttctactgaaagttaggaatccgtaagcctaggaagaggagggtgcctggaaggaggaatctcacagttctgagaaccaggatggggaacagctctgcacggatgacagccttccctggcactgaactcaccttcccagccttccccacgtgcccagatagtctcaagttttcgtttttaggccatatagtataagccatatgctctcattcatctttttgtaaagatctgatgtgctataattgctttaaaagggggaccatgtaaaaatatctagcacctttttaacttttgataattttgtaaaattaagttaaatgttttttaaaaggaggatgtcatttttatattttcaaaatcacgttgttggactatataagtaacccactgtatgaaagccattttatcatgtatttaccactttaaaatgattttatttataaaagtatccaaattttaatgtatttaatgtagaatgtggcttttagtaaggtatgttattattttgctgtagaaaaaattttatattacttgattaaatatttttaacttatctactaaaaaaaaaaaaaaaaaaaaaaaaaaaaaaaaaaaaaaaaaaaaaaaaa

SEQ ID NO: 11125 - DNA, 587 bp, Canis familiaris
gacggttctaagtgtttccgtgcattaatccttgacccactatttggacactgtgtggttcaaaaactggaatccgttcaaataagtcagagcaaaggaacaaccaatgtgttgaccttctctatagatgttcttcgcattgaagaatttttcccaggctgctggtgccaatagtagagagtatagttggtgtcagggcttgtattccttccaggaagccaagtacacttcatgtagctcaggttgtgccaaacacattgtagctcagtcacagccgactcaggatcaccttcaggtgctggggtgcacttttccaccaaaatgctaggattgtcactttcattggtgctgcactgggaccccacttgcagacaaatcctctcacctcaggggtacttcttttgaacgatgagtttcaggagcaattttcttatcctgtttgttgtcaaaatgactaaaataccgtaaggtgcaattcgggctggctccctcgggaggatcccatgtccatatgaccgtgcagaggttttcaacagaaacactcaaattcgtcacaggtggctgagtttcggtgggtgcggcgaccc

SEQ ID NO: 11126 - DNA, 488 bp, Canis familiaris
agggcttgcactcgttccccttggacctactttgaaggccattagaagctttgttttcatttccccctggtattgtcttgccaggatggttaggtacacacaggacgcttattagatccctgagaagatatagcccaaccccgctttcttctggtatgaaccatttagtttggagagcaagcccaaacacgtaggcttgtattagtgctttaatggagtactggtaacatttttctttcttgataggaatctgcttatatttagccaggcttctatttcataccctctcccactacaaactttccgtgcagttacctttcatttttaaagcaatttcactgctaaatataaattgtatttgtggggttcatagttatataatgctgaagggaaccactctttcgttgaaaggtgataaaagttaaatacaagactgtctcccccagtaaaaaaaaaaaaaaaaaaaaaaaaaaaaaaaaaaaaaaaaa

SEQ ID NO: 11127 - DNA, 437 bp, Canis familiaris
aaccacccacccagggcctggaatcacccagctcagagccacccacctcctctcctcaagtgggtctcgtgctgatcctcagaaagctaatgtggggggtctgaggtcatgttccctgcaggagccccagcgaccctgcagcatccttgacacatccctgccattctcagtgccctacgccctccttcgtggtctttcccttggcttgctttgtggccactgaaccaatcactttgtatgctatactcctactgtgatggaaaatagaaacaagtgtaacttattttatatctatgttcaaactatatagagaatattctatgtactatgatgtgcttactactgcagtgcatttgtcattagtattcatgttaatacagcacatttatcctttcggtaaaaaaaaaaaaaaaaaaaaaaaaaaaaaaaaaaaaaaa

SEQ ID NO: 11128 - DNA, 598 bp, Canis familiaris
cccgcacaggataccatgtcaacctcgctcaccctgaggacactgaagacatgccgctgggacaggatgccgagatctgcttgctgaagtccggagaactgatgataaaattacccctcacggtagaagagatcgccaactttggggagagcaacagggagctgtttgtgcggtccagtacctacagcctcatccctatcaccgtggctgaggcaggcctcaccatcagctgggtcttctcctccgaccctaagagtatctccttcagtgtggtcttccaggaggcagaggacacaccgttggatcagtgtaaggtccttatccccacaacccgatgcagctcccacaaggagaacattcagggccagctcaaggtccgcacaccaggcatctacacgctcatcttcgacaacaccttttccaggtttgtctccaagaaagtgttttatcacttgacagttgacaggcctgtgatctacgatggaagtgatttcccgtagcctcaagcacctggattctagattctaatagtttcactttatgcacaggaaacactactcttgctcacctgtcacataaagcactaaaaaaaaaaaaa

SEQ ID NO: 11129 - DNA, 552 bp, Canis familiaris
tcaggtctgagattcatgacttgagctgaaacccaggcagatacttaactcctgagccaccaggcaccccagaactattaaatcttcagtgtaaaccttctgggatccctgggtggctcagcggtttggcgcctgcctttggcccagggtgcgatcctggagtcccgggatcaagtcccgcatcaggcccccagcatggagcctgcttctccttctgcctgtgtttctgcctctctctctctctatgtctatcatgaacttaaaaaaaaaaaaaaaaaaaaaaaacttcaaaatgttacacaaggactcggaaggacaactaaacaagtggaaaggtacaccatgttcttgaatagcaggactcaacatcggggatccctgggtggcgcagcggtttggcgcctgcctttggcccagggcgcgatcctggagacccgggatcgaatcccacatcgggctcccggtgcatggagcctgcttctccctctgcctgtgtctctgcctctctctctctctctctatgtgactatcataaataaataaaattaaaaa

SEQ ID NO: 11130 - DNA, 688 bp, Canis familiaris
aagctctccatgactgtgcgtctccagcagagttgcaccccggtcaagggctctggagagaaccaggaccgagcctgcagctatcggccaagccactgcctcctgtccccaccaacagcgtggcacacggtgtccctgaaagccaggcctctgtggcggaagacaggacgttggcctttccaggagaatggaagtcgtcggcatttgatgaagtggatacagaggaagacccatcaatacttcgtgtgtccaagagaggctgcggcctgagtgatgccgaaagtcccagcaagatccggatggtagaagaatcatctccacaagtgtcttccagatttcagaatttgagactgaataggttaacccccaggcaacttttcatatctaaacataatcaagaaacttaatttgagattgctcgaagtaattatctttttttttttttcctactcaacacaaaatgaacatcatagcatcagagcctcgagatctaaaataggatgtctgtaagtggagttttattttttatttttaaattgtttttctaaagattttgtgtattcacgagacacagagaggcagagggagaagcaggctccctatggggagcccgatgcaggactcaatctcaggaccccgggatcaagccctgagctgaaggcagacagacgctcaaccactgagccac

SEQ ID NO: 11131 - DNA, 695 bp, Canis familiaris
tgagtgtaagaactgtgaaggaaatttctgcagattcagtgattttgtatcaaataataatccactgatgttattaaataatgttatatgtttaccctgtgttcttttgataattttggaggaatctgatgtttccagacatataatcagaatgccaaaaatattatttcacttctaaatattattcctgttttagttctttttttctgctttaatctttttttaaagattttatttatttatttctgagaatacacagagaggagagagagaagcagagacacaggcagagggagaagcaggcgccatgcaaggagcctgacatgagactcaatcccgggtgtccagaatcaggccctgggccgaaggcggcgctaaaccacttgagtcacccgggctgccctttttttctgttttatttcttcttgaaatttttatcttctttatacgagatgtctctaatattttactacttagtataaaattaacttctttgctttataaatttttaaaaaataaatatgtcttttttataaatttgtgtagaactgtagtaaaagcccctgatacttcttaacacaaatgatagaacttaattgttaaaattaattgtatgttgtatttattcaactgtttttgttttgaattaaacttgccaatataataatgaaaaaaaaaaaaaaaaaaaaaaaaaa

SEQ ID NO: 11132 - DNA, 635 bp, Canis familiaris
taagtatcaatttgttccaaatatagttgaagtctgtcctggttgtctgcttttgttattcactgagaacaatttgaattgaacatacttagaatctatgctttgaggaaagttcctatttaaggaatttaatcagtacttgctaaaagggctggatagtggtacattatatacacacaacatgaaatgcacggaagtggatttaaaattaacaatatgcctttgtgtcttatgtgaaaaacttgcaatataaaaacttgcaatatttgagtgctatatggcattatatccacgttgactttacatttatattagaagcctcatttttgttttgatataaacaaacaagatgatacaatcctttttcctactatttcaaatactagttttagatttaattattttcacaagtattggggagtaccgcataccgtaatataaaaaaaacaaagggtgccaaagcagaaagtggaattgaaaaagaaggatgatgtgcgcctgggtagctcagtttgttaaatgtccaacttgtgatttctgcccaggacttgatctcagggtcatgagttcaacccttgcattgggctccatgccggacacggagccaacttaaaaagaaaaaaaaaaaaaaaggg

SEQ ID NO: 11133 - DNA, 668 bp, Canis familiaris
  misc_feature (11)..(11): n comprises a, c, g, or t, or includes no nucleotide
gtcatctgggnagaccatgatcccccgatctctcagggcactcccaagggggaccgtccccaggacagctgacaccgtcactggacggattcaggaggccggcacggaggtggtgaaagcccaagctggagcaggctctgccaccctgtccatggcatacgctggagctcggtttgtcttctcccttgtggatgcaatgaatgggaaggaaggagttgtcgaatgttcctttgttaaatcccaggaagcagactgtgcctatttctccacaccattactgctggggaaaaagggcatcgagaagaatctaggcattggcaagatctccccttttgaagagaagatgatagcagaagccatccccgagctgaaggcctccatcaaaaagggagaggagtttgtgaagaacatgaaatgaaagggcagccagctacagtccgtttccctaacttatgaaggcatccatgtccctgcaaagccatctcctgccctcatgtttccgttgcgttaaccaccagagtcatgttaacgtcaccgccccttccaatcgcaagtccgtcaatgtgtgcatcaataaaagcaggcttccattttctttttaaaaaaagaacaaaaaaaaaaaaaaaaaaaaaaaaaaaaaaaaaaaaaaaaaaaaaaaaaaaaaaaaa

SEQ ID NO: 11134 - DNA, 683 bp, Canis familiaris
aagcatatatattgggccatcttttatgtaagacagaaagcttatcttacaaaaagaaacaaggataaccaggaaataatgaagttggttattttacaagggatagggagaatggagtggaaagtatacataaaggagtgaaagaactgggacgtctgcgtggctcagcagttgaggatctgctgttggctcagggcatgatcctggggtcctgggattgattcccatatcaggctcctcacagggagcctgcttctccctctgctatgtctccacctctctctgtgtctctcatgaataaataaaatcttaaaaaaaaaaaaggaatgaaagaactaattaaggattttacaaacagagttttgctatatatactcttttgggcaaggtgggagaattgcaaacaaatactaaactcatttaggtttgttttttagaagcctggacaaagcaattatgaaacaattgtaatagaattaagacataagtagggcagccccgggggggggctcagcggtttagcgctgcctttagcccagggcctgatcctggagacccgggatcgagtcccacgtcgggctccctgcatggagcctgcttctccctctgcctgtgtctctggctctctctctctgtgtctcgaataaataaataaaatctttaaaaaaagaaaagaaaaaaaa

SEQ ID NO: 11135 - DNA, 613 bp, Canis familiaris
tcagcttcactggaccagtgagctgccgcgatggattctgtttgacgtgctgttctggaaaaggacttcgtttgggccccctgacccctcttgcccatgcgtctgggtcaacccatgactgtaaaactacctggtttggttcagggagccttccagccagagggcttggtttgactcctgtgtcccctccggtggaaagatttgggtttggctccggccatacccctcccacctcaacctgtcccaggacctgttggcctctttcccaggtgggcccggtgtggccagcattgctgtggatattctgcgagctgtcaggctttgacctctcgcttacaggacccagttttggccactggcctccccgccccggagaactcagagcactttacagtgggcccagccgaggttgaagggtgggttcctccagcagaatctggttttgtccccacttccagccaacagggtttggccaggacttccgaggggtgggggtagggggctgtatgggtcttcctccctcctgcatcccaggcaagcgatgtgcagggaaggaggtccagggccccccaaggcagtaaaggaccagaatgaggcctgaaaaaaaaaaaaa

SEQ ID NO: 11136 - DNA, 612 bp, Canis familiaris
cactcgtgagagctatcgatgatgtatccagcttccgggccaagacagctcatggcaagggcctcaagaggcctggaaagaaaggatccaataagagaccaggaaacggacacgagagaaaatgaagagccagacccccctaagcagcatctttgtataccaagaacccagaaaaagggttgccaacttgggatttcagcatacacgttggatctcttgtgttggtttctttttgtaaaaagttctttccataaacccgttttcacaagagaacacccatcactggttaaaaactcacggacttaaaaaagatggagaagttacttttatactagttaagtaggattgctattgattgacgataatttagactttgagtcccaatcgtctttttttttttatgatatatgcccacttgcaccttcctcatgcttctaagtaattgtatcacgatttctagataagtcacagaatgagtgatcgtatcattatgattatttaaatacccatcactgtcaagctacgtgtactatgataaaatttcctttgtgataccaaacaaaaaaaaaaaaaaaaaaaaaaaaaaaaaaaaaaaaaaaaaaaaaaaaaaaa

SEQ ID NO: 11137 - DNA, 531 bp, Canis familiaris
  misc_feature (412)..(412): n comprises a, c, g, or t, or includes no nucleotide
tggagaaggaagaaaactattatgttaattactttcatatatcgccgttgaagagtggatacaaattgcttttctattttcccagtttttaaggaattgcggttaatattgacatttgttggggctgttacaccactgcctttggtaactaaaagtctcaagggtgttttaaatttttatttatattatattatattatattatattatattatattatattatattatattatgttatattatattatatttattatattaattcacgagagacagagatgcaggctccatgcagggagtcggactaggagtccgatgcgggactcgatgctgggactcctggaccacgccctgggccaaaggctcagtggtttagctcctgcctttggcccagggcgtgatcctggagtncctggattgagtcccacgtcgtgctccctgcaaggagcctgcttctccctctgcctgtgtctctgcctctgtctctgtgttcctcatgaataaataaagtcttaaaaaaaaaaaaaagg

SEQ ID NO: 11138 - DNA, 658 bp, Canis familiaris
tatttttcaaagcccccttcctaagataggtaaaagaatagtatacacagctttttccatcttgctgtttttcaagtagtataatctgaatattaataataaaaagaaatgaggatagcctttatatttttatagcaactgtgctgatataccaaagtttattcagtctttcctctactgatggatattggaattatttcttgttttgtgctattacaaatggtgcttcattgaataaatttatgctgtttgtatttttaccagtttatcattggaaggttcctcgaatgggaattactaggtcaaagggtaaatgcatgtgagtttgctagatactgccaatttcttctgcataggcaaatcgtatgtgccgttaatgtttgagtgtctatagagtcatcaaatgtttacctatttgccagtcgtgggtgacaaatataccttagtatagttttagctcggatttctccaatgagcaagatggaacgtcttttcatattggtgggaggaatggacccaatttctatgtgattatccagttatcttagcaatctttgttagaaaatccctcttttttctcccccttcctgtatgttcatctgttttgctttttaaattccacatacgaataaaatcatatagtattaaaaaaaaaaaa

SEQ ID NO: 11139 - DNA, 255 bp, Canis familiaris
actcgattgttctgccccacaaggagctgagccgcagcttcaccaaccagatcatcctctgaggggggctgccaggaggcccccaccccccaactcccagctcccagccgctccccttgaggctgccgcctgcttggccggcctccatccgagaggaccagaggagaggaagccaggcaggatcgccacaggccaggagcgccctgggtggccggaggactcctggcctcttcaccctctaataaaccccggtga

SEQ ID NO: 11140 - DNA, 645 bp, Canis familiaris
tgcctgtttgtaccgtggtgtacgtggtttccctaagatgtcgatggctgccattgccaccattcaaggaccgagtcgcagcatccagtttgttagactggtgccaccactgggcttctaaagtgggcatttattaccagcctcccaactgtggtacccggtggagacctggccaaagttacagcgagctgtgtgcatgctgagctacaccacagccattgctgagtgcctggggctcgcctggaccacaaagtttgacctgatgtatgccaagcgtgcctttgttcactggtatgtgggtgagggcatggaggaaggagagttttctgaggcccgtgaggacatggctgccctggagaaggattatgaggaggttggtgtggattctgttgaaggagagggtgaagaagaaggagaggaatactaaataccattcccttcagccctgcagcatgtcacactcagacctttagctttcaatgttagctgacaggcattaaagctttctgattagattgtcttcagttttaactgtgatcatgtcttctccatgtgtacctgtcacttattccatcatgtctcaaagtcaaaggctttaagagaagaaaaaaaaaaaaaaaaaaaaaaaaaaaaaaaaaaaaaaaa

SEQ ID NO: 11141 - DNA, 728 bp, Canis familiaris
  misc_feature (187)..(187): n comprises a, c, g, or t, or includes no nucleotide
gggtcaagggccagtgacttcacaattccaaatgcgttatgttaatgaccagcacggtaccttaagccctctttggtgttcaagttctcctcccgtttcccaaccttctcactggtgttgctgggtgtggtactcagcaaagaatagcctttgggcctctgtggccagacttctgaccccttaggcnacagccagatagagcctgattgccttttaagcctcagctctcttcctcttgttctcctagggtgggaatacagcaggcacacgctgaattttgtcccatccacttccatcttatcctttgtgcccttcatccccctgcatcttgtcctttttgccctctggtacctcccagtgccccatcatctctacccccagggactcggagatcatgcagcagaagcagaaaaaggcaaacgagaagaaggaggaacccaagtagctttgtggcttcgtgtccaaccctcttgcccttcgcctgtgtgcctggagccagtcccaccacgctcgcgttttctcctgtcgtgctcacaggtcccagcaccgatggcattccctttgccctgagtctgcagcgggtcccttttgtgcttccttcccctcaggtagcctctctccccctgggccacgcctgggggtgagggggttaccacttcccagtgttttttattcctgtggggctcaccccaaagtattaaaagtagctttgtaatttcaaaaaaaaa

SEQ ID NO: 11142 - DNA, 379 bp, Canis familiaris
cacaagccacccccacagagggggtactgggggcaacatgttgagaatagcctagtcccaagacctcggcatgggcagaagctgctccaggacctgggcctctcggaggactttctagctgtcccggtctctccaaggctgccaactgacagggtgggcagctggctgggaacatgtgtaggtggcaccaggtgtcgcagactaactctgaaaagaaggggtaccgtctcagtgttcaaccaccatgtgcaagtgagatcttacagctggctcctctgtcccctcactaagacactgatcctctgcaaatactgggaattgggcttcagtgtgagaactgtgacccccaacctgataaagagagatggaaggaaaaaaa

SEQ ID NO: 11143 - DNA, 582 bp, Canis familiaris
cacctactccacgaactattccagcgattgatcccacacttttcagtacagtttctcagggggatatccgtctaacaccagaggactttgctagagcccagaaatactgcaaatatgctggcagtgctttgcaatatgaagatgtcagcactgctgtgcagaatctacagaaggccctcaagttactaactacaggcagagaatgaagcctttgtacagcagatccatgcatttttggcttaaagaactaacagtccattactcgatcttcagcctatcaggagcacagttttaaggaagacttcagttgcattgactataacaatgaaatctgtgtctgtgtatcagattcctgttgaagcattcagcagcagcagcctcaaccagtttctcattgtccatttagtggatccagtaatctctgggtatatagggctgatgtgagcaaaatcctaaaaatgcccattgattcctgattcagaaaatgaacacacgcttctataaaatgttactggagttcatgttgtatcttaatatacataataaattaaggattttttaaaatcataaaaaaaaaaaaaa

SEQ ID NO: 11144 - DNA, 633 bp, Canis familiaris
catgtttctttgtttttttaaataactgctatttgaatattcctggcatctgtagttggcttcagagccagaggggagaggaggtgaaagagcaggctcccaaaggattgggatgttctgtgttcgtgctcctggcccccactcagttggcctttcttggtgacctcagccaaggtcatgctgttggagagtccgctggcaacgtaggggtgaaggcccccagaagcaagtgagcacagctgggaagaggcatccctcacaggtggctgatgctggccaggaggcgagtgatcacccttgacccagaccccctctctgcctctcagccccctccccagtcctgtagggccagaccctgccccccaacatgtgaagccggtgatgggcgtgtgcgtccacacctgcgttcatcctgtgacccaggcgctgtgctggctgggcagctgggtgagaagcagcggccttctgtttttctgtgaatgttttaatgagttcgttcttgcccccaccttgctagggtgtcgctggctgtcctggactcacacactgtatgtacttagtggcaatgatgccaaatgtaacttattttcacatttttacaataaagccttgaagatggaaaaaaaaaaaaaa

SEQ ID NO: 11145 - DNA, 620 bp, Canis familiaris
taacccagaatggaaaagactcaaaccatcaacaccaagaaccaaaggtcaagaatctttcgcaagaacaggaaaagactccccactccggaaggacctagttctgtagaagacattaaagccaaaatgcaagcaagtatagaaaaaggtggttctcttcccaaagtggaagccaagttcatcaattatgtgaagaattgcttccggatgactgaccaagaggctattcaagatctctggcagtggaggaagtctctttaagaaaatagtttaaacagtttgttaaaattgttccgtcttctttcatttctgtaacagttgatatctggctgtcctgttttataatgcagagtgagaactttccctaccgtgtctgataaatgttgtccaggttccattgccaagaatgtgttgtccgaaatgcctgtttagtttttaaagatggaactccaccctttgcttggttttaagtatgtatggaatgttatgataggacatagtagtagtggtggtcagacaaatggaaatggtggggagacaaaaatatacatgtgaaataaactcagtattttaataaagtaaaaaaaaaaaaaaaaaaaaaaaaaaaaaaaaaaaaaaaa

SEQ ID NO: 11146 - DNA, 640 bp, Canis familiaris
  misc_feature (182)..(182): n comprises a, c, g, or t, or includes no nucleotide
aatgagccctctccaagatcacgaccacccgtgggcctcaacatcggcactgtggacgtgggaaaggctcgcctcatgttttggacctggggggccaggaagactgcagtcgctgtggacaagtactatgcggagtgccatggtgtcatctacgtcattgattccacggatgaggaagagcntgtcggagtccaagcggggcattcgagaagatggtgacgagtgaggcgctggatggtgtccccatcctcgtgctggccaacaagcaggacgtggagacctgcctgtcgatccccgacatcaagacggccttcagcgactgcacctccaagatcggcaggcgagactgcctgacccaggcctgctcggccctcacgggcaaaggggtgcgcgagggcatcgagtggatggtcaagtgcgtcgtgcggaacgtgcaccggccgccgcggcagagggacatcacgtaggcgtggctggtgccgcgggtgcccacagctcgtcctgagcgccagaggagcgctcctgccggctccgtgcctcggtcctggggcgcgggcttgctttgctctgggtttttttcatttgctttgttttttctttaagacaaatttttctgtgtccataaaaaaaaaaaaaaaaa

SEQ ID NO: 11147 - DNA, 591 bp, Canis familiaris
  misc_feature (13)..(13): n comprises a, c, g, or t, or includes no nucleotide
agaaccccccagnttggcaaattgtcatcaggatcagaggtatcaatggttgtgagcccccaaggttcgaaaggtgttgcagcttctttcgcctttcggcccagatcttcaatggcacctttgttaagctcaacaaggcttcagttaacatgctaaggattgtggaaccgtatatagcatgggggtacccaaacctgaagtcagtgaatgaattgatctacaagcgtggttatggcaagatcaacaagaagcgaattgccctgacagataacacattgattgctcggtctcttggtaaatatggcatcatctgcatggaggatctgattcacgagatctataccgttggaaaacgtttcaaagaagccaacaactttttatggcccctcaaattatcttctccacgtggcggaatgaagaaaaagaccacccattttgtagaaggtggagatgctggcaacagggaagaccagatcaataggcttattagaaggatgaactaaggtatctaccatgattatttttgtaatctggtcagttaataaatgactactttcaaatggaaaaaaaaaaaaaaaaaaaaaaaaaaaa

SEQ ID NO: 11148 - DNA, 630 bp, Canis familiaris
gaagcagcggaagaagatcaaggccaagatgttagggatcccagaggaagcagagagcagtgaagatgaagacagctcatggctcctgccgtctggcaaataagggggcccaccctccacccactgaatccagaatccagcgtttctttggcctgtcctatcagggtgaaacagaggcccctgaagcccagaccagcacggtgcccagtgagctaaggggagaagaggaggcttctacaggaactccatatgcggcctgtgggcagctctacagtcctcaattcctgactggctctgctctgcacttgatgaacagctttctctgggggtctcagcagccccagagacctgactttggaatctggctatgggtggatgtgtggcctcaaatgaagacagggctccttccttctcagccttccccaggctctttcccagttctgcgcctgagccagggcatgatgaagagctcagccttccctgtatctctgtgccaagcctcaggggccagataaaagtgcttcctcttggaatctcagttttcttatccataaaatagagctacctacctcccaagggtgtgtgagcacgacctgagctaatataataaagtagctgcccatgaaaaaa

SEQ ID NO: 11149 - DNA, 609 bp, Canis familiaris
gatccagggaaaccacagctgcatcaacagtgcagaacactccccccccttctcctgggggccgagaatcaccccagcagggtcttagaataagtcgcgcatatacacacaccccggatatggcgctgagacactcacacagagagggaaatctccagcatttccggtttctgtgggagggttgtcccgcaaacggtgcgccacaggtaagttctgccaaaatggttaacccgacctggtggaattcaagtgccccatttcatcaaccaatggatacaagcggggtcctggctttgtctgtgggaaactgattacacctttccacgtgctgaaaaggtcaaggccttcttggctgatccatctgcatttgtggctgctgctcctgtggctgctgccaccactgctgcacctgctgctgccgcagccccagccaaggttgaagcaaaggaagagtcggaggaatcggacgaggatatgggatttggtctctttgactaatcaccaaaaagcaaccaattcagccaagtttatttgtgaaacaaggaaataaaggcttacttctcttaaaaaaaaaaaaaaaaaaaaaaaaaaaaaaaaaaaaaaaaaaaa

SEQ ID NO: 11150 - DNA, 612 bp, Canis familiaris
cgtaaaaagcaccaaggctggaagctccccttcttttcagcctggtcccccaaagaagggggcggagtccaaagcccgaccctggcgtcagcgtggttataagatgcaggtgctctgggtgccccgcctggggttcgtgttccacccacagaagcgcatggggatgttggctcttgggaaggagggagaggctggaggggtgagaacgcaggccctggtcctgcagacggtcgcccctcctggagtgaaggcttccacgggaggggccggcctgctaccgggagaccccgaccgggcccacacggccagcggggagggtggaattgggggtgctggcgccgccgcgggtcccccagaaggggcggacgtgaacctccacctgccaccggcccgtgttcccacgcttctgacctcagacccggcggtgccacagtggaggggagcctgtctacgggtgaccttcctgtttccaaacacggcctgtctttcggaggcagcgccaaggaatccgggctcggggacagctcaacaagccagctttgtggggaggggacagccccctcagcagaagacccccttctgctatccccgacagtggggagcccggagcgg

SEQ ID NO: 11151 - DNA, 580 bp, Canis familiaris
cacaactgtatggggaacataaaagtaggcaaaaaaattatgtttacttttcccctgctgttagtatccgtgatcctcctagatgaaattgagggttgatagtatatatgtcagtttcctttgacatactttatgtacttataatatgtgtaaacaagcatatattgaagtctattaggggcaatctacctttggaggttgaacattggatttaaataatattattttggagtcatacatctatgcaatatgtttattctgtcaaatgctatttccattaaatagtttaactagattgtataaaataactttattgcctaacatgaaattacaaagcttaggcataggggaaatgggctttttagaagccaaggcattctaagtatattctgttcttcaaataaatgtcattttcttctttaaatattgaataagttttatgaacaatatctttctttgcaaactcgaattacatgtgcttggaattaagttttagtttttttcactgcacaataataaagcctgagttctgatcgaaaaaaaaaaaaaaaaaaaaaaaaaaaaaaaaaaaaaaaaaaaa

SEQ ID NO: 11152 - DNA, 561 bp, Canis familiaris
cagagcctgaggtgacagttttggggccttccgtagaatcactcatacctgcatagtgcagccctctgccttggccttacctcccaccacagcgcaaagaacttcgggagcagcaatctctgcagtgtgttcagggtgctttattttgaacttgccttctggctctctacctcaagggcattcttcccagaagccccccatcctcctcttttaatattaggacttaaagacctttcgttggcctcctaacccaaggccgtttggtcttgcccacgttgcctcccccagtaccttgaagagcagtattgaatgaagttctcagcacaatcttcgttgggggtggggggggtctcactataaaggtcagaaaggcggggtaatggacctggaaagaggactcttgggcttggaagagtcgatcgtggggcgggcgccccatcgccaacccccgtagctggctgggaccggcagcggcaaggccgcgggacgtggcccgggtctgcgacctaacgggataataaaagtttaccaccgaaaaaaaaaaaaaaaaaaaaaaaaaag

SEQ ID NO: 11153 - DNA, 589 bp, Canis familiaris
cattggtccgtggggctgtaaccaggtcggcccacatctctgccccatgggaaccggtgcagtctctgagcgcttcctggcccagcgccgagatggattccgaccctcaacctcccccttccatctgcccccagacgaggtcaggagcacttcctccaggaggccctcaggaggcctgggggtctttactccccaatggcccgctggcttggggcttggcctcttcttgggtacaaaggtcaaagttcccctcccatgaaggcccagccaaggagggaaccccttcccacccctgctcctgctccagcctccacttggggtgagaaggaccagagggtcccaagcatcctgagcccaggccagaccacagctgccaactatgcctctatttttggcatttgaggaaagggctccttgggtggtcccaatctctgagggccttactgcccattcccgacctgacttacagagtctatcactctgtccccaaccttttcggtgaaatacattagtttccaacccggaaaaaaacaacaaaaaaaaaaaaaaaaaaaaaaaaaaaaaaaaaaaaaaaaaaaaaaaaaaaaaa

SEQ ID NO: 11154 - DNA, 634 bp, Canis familiaris
gcccagcagttctctcgtccaagtattagttcacctggatggcgtcgagctcgggagatgacgcccgagtaagagggggtactgtgggatggggatcagcacgcccgtccgcgacttgccaccccggacaccaggatcttcaggatcgtagaaatgccgtcgctggctccagtggtcaggtaaatgttgtcgggttccgcgggcaaccccaccgtccctcctggtgacgtaggcggccacgtcctcgcggatgcagttgacgccgctggctggcactgtaggaccccaggctgttcccgccacaagcctgtaggatcctccgggctcgtttcttagcatcttctgggaagctggggctgtccagcaggttggggtaggtgcacagtgccatcacctgtcggaggaaggttataggctgctggcccacggcctgggcgtccccgatgttggcgcggatgacctcggtgaacggtttcttgataccccgctgcagctccagctcgatctcgccggccttgagcacgatgggcccccgcaccgcgtactccaccgccttcacctgcgggttcatggactcgggcgtcaggatgcgctcgcgccggccccgcgccggccgcacctgcagcgccgaggc

SEQ ID NO: 11155 - DNA, 594 bp, Canis familiaris
atggaacacctcaggcatacatggtcacccagaactgttgcacaagttcgaatgatgttttttggcatgtgagctggtctatcacaagccaacatcctggctgtctcgggcggagacaataaggtgaccctgttggaaggagtctgttgacggacagtgggtgtgcatcagtgatgtcaacaagggccagggatccgtgtctgcttctgtcacagagggccagcagaacgagcagtgaccagacaggcaagcccagctcctcacctgctgactccaggactgccctttcctagaccaactgactaaatagctgggaggaacagctccaacacgattactttcccaggagtagttacaaatgcagccagattgatcatctgccttaacatgatttcgatatggtttgtaatttactgtcctgctgaaagcattcatgttatgaggaaaaaaactacaaatgatcttcagatctattattttaaaatatttttggccatttttatgtaccttttgggttcaggcattatttgggagggggttttgtctccaaaatagttaaataaattcatattgcttataaaaaaaaaaaaaaaa

SEQ ID NO: 11156 - DNA, 463 bp, Canis familiaris
  misc_feature (1)..(1): n comprises a, c, g, or t, or includes no nucleotide
ncccttacccctgagtctccccctccccgttgctcggggtcagacctgggttcccagtggcctcggggccacggggctcagcacggacagactcgcaccagcgtctccagcaaacagcaggccatggcgccctcaagcccgcgtcccctgagccccgagaacaaaggtgctatcctgcagacccccccgtctaactcggaagcctgggccctgggccttcggtggcacaaagcgaggtgttgctttttaaacaaaaaaaccattaccataacaaccccccgctcttcttcctcaggggagtgattggttctacgttttactgaaaaccctctttatgtgttagttttctgatatccttgtgtttgctcactgtgtccacgtcagccacttttcagaataaaggtgttcattcctcaaaaaaaaaaccaacaaaaaaaaaaaaaaaaaaaaaaaaaaaataaaa

SEQ ID NO: 11157 - DNA, 622 bp, Canis familiaris
caagcctccctttcctgctgagggggtgcacagttatgtcagaaggggagctgcccccatatttgtctgtaaacggttcttcctctgtgaataaattcgtcgtcttcctggggacactgtcctcttcaaggccgagaggagcttgagcagctgtgaggccccaagctccccgcctatgtgctaaactcatttgggggttcccgcatgtggttgaggaaagactacctggagggtgggagaggcagtgcctgttgccaggaggtgggtgtgtggcagggttagaccagccccttccttcgtggcctctcccaggatccacagtacgttcccctcctgagcctccctctgagcaggggcccggctatttccccagccttccccatgccccaatgtctcccgggccgctgctttctgaagagctggccttcccttgtcttatacgctctaactccccagccatgtagtgtgacgtactcctctgcctactttttaaagttaacttttaacagcacaagtaatgcacaaatagattatgcctgtgaaaaataaaactgacaagtcaaaaaaaaaaaaacaaaaaaaaaaaaaaaaaaaaaaaaaaaaaaaaaaaaaaaaaaaaaaa

SEQ ID NO: 11158 - DNA, 590 bp, Canis familiaris
gttgaaggactcttgatttaccctcttctcaaacttttttggaaaaccaattaagtttaccctaatgagatcagccctgttaaactatagattaagcttaaaaatggatgttagtttgggtgtgcctagataggaaatcagaactgagaactcccaccattttatttgtccagcaccaagataatcccataggtcttgttgcttcccaccctaagaaactaaaggcagttgaagcagttgagagaacctggcacctccttcacagtcctgaaagcagcattggcctcactccacgggaaggtcaagaattagacttaaaaaggtaatctttttgtcacaactgttcgatgaggatctgaaccaccctgaagagcaaataccgaaggattgattgtaaactgtgtttagtttgattgtgaacttggtgctggatgttctgtctgaaatgtgcccaaatgctacatgtgggagtacacatctgtgcgtgtgttgccattgaagtgatgatttttctgtatggtactgctttatttgttaataaagtgcactaccatccctgattcaaaaaaaaaaaaaaaaaaaaaagggcg

SEQ ID NO: 11159 - DNA, 617 bp, Canis familiaris
cagccaacacaaggtggttcccctgaagggccctgtgggaggacgtggcacctaccctgccagatggccactttgacgggatcctgtacgacacgtacccactgtccgaggagacctggcacacgcaccagttcaacttcatcaagggccacgcctttcgcctactgaagcctgggggcatcctcacctactgcaacctcacctcctggggggagctgatgaagtccaagtactcagacatcaccaccatgttcgaggagacccaggtgccagcgctgctggaggcaggcttcaggcgggaggatatccgcacggagctgatggagctggccccgccggccgagtgccgctactacgccttcccatggatgatcacgccctggtcaccaagcactgagcccggccgggcctcaggcctgtcccgtgcccagcgcagtgccttacccctgggagtgtgggcctgggtcttacagccgtgggcgccagcccgggccacacctgcaggaggacgggggctcccgcccttcgctgcaatgggaacaccccttcctcccagggtcgttcaggataaaataaatgctaatgccggcctcgccctaacagcaaaaaaaaaaaaa

SEQ ID NO: 11160 - DNA, 565 bp, Canis familiaris
gtgcttaagaatccactatgatggaaaacagtgtcattctgttaaaaaaaaattgaaaaaatttgttgttctcttcttcctgttattggtagttctctgaacgttagatattttttgttttccatggggtcaaaaggtacctaagtatacgattgcaagtggaaaaataggggacagaaatcaggtattggcagtttttccattttcatttgtgtgtgaatttttaatataaatgcggggacataaagcattaatgcaagtcaaaatgtttcagtgaacacgtttcagcagttcaactttataacaattataaataaacctgttaaatttttctggacaatgccagcatttggattttcctcttaaaacaagtaaatttcttattgatggcaactaaatggtgtttgtagcatttttatcatacagtagattccatccattcactatacttttctaactgagttgtcctacatgcaagtacatgtttttaatgttgtctgtcttctgtgctgttcctgtaagtttgctattaaaatacattaaactataaaaaaaaaaaaaaaaa

SEQ ID NO: 11161 - DNA, 681 bp, Canis familiaris
  misc_feature (1)..(1): n comprises a, c, g, or t, or includes no nucleotide
ntggggatatgtcgtggccacccaaatcaacgggactttccaaaatgtcgtaacaactccgccccatggacgcaaatgggcggtaggcgtgtacggtgggaggtcttatataagcagagcctcgttttagtgaaaccgtcagatcgcctggagacgccatccacgctgttttgacctccatagaagacaccgggaccgatccagcctccggactctagcctaggccgcgggacggataacaatttcacacaggaaacagctatgaccattaggcctatttaggtgacactatagaacaagtttgtacaaaaaagcaggctggtaccggtccggaattcccgggatcggcccccactaaagccccagcacttctagtggtctcgcctggaggcaagagggaggaggacacaggccctgccctatcccgctgcctccttggtctctagaggtactgagacagggtgctttcgggaaggaggggagcctttaggcgggccaccctggggcctggacctgagcagggaggccatgtcccaccccacctcttgtttctggatccctgctcccctttgagtgtgtgtgtgtgttttaattttctttatggaaaagtggacgaaaaaatagagagagagagagaggtctttaactgcaataaactggccccatgtggccccgccttga

SEQ ID NO: 11162 - DNA, 687 bp, Canis familiaris
agcctctgagactaaataagagagtaaagggaaaataaatcagttaccataccagtcgatagactactgtgtggacttttcaaggcacgtgaaatacttgaaattctcatttatgttatttatgatgttgttttctacatgtttctattattgtattgttttttaaatggagggtgcaggatatcacctgaattattaatgaatggccaggaagtaattttcttctcattcttctaaaactccagcctttgaagtgcacacacacacacacacacacacacatatgcatgcacattgcactagttcctccagcataaattgcatacgtgagcaccttgtggcttgtaaaccaacagatggggttgcacaatgaaaaccagagtgtgcatagacaaatctcaccctattaaagatgtaggttctttcagttatgcccttcttgtctctggcagtcttattttccatgttcccagaattcctcccctctgtcccttttattatacatggttccacagttttgtctctagttgactccaggatccagacgtgtaactctgttgatcttgccctattataactgtcattattctcagattgtacctgtgctcacgggctgctgtcttacaagagatctggaaggtcattctgaatgagaagtaaattattttatgtaatacaaaaaaaaaa

SEQ ID NO: 11163 - DNA, 510 bp, Canis familiaris
ggagctcgttgggggcagccctcggcctggtggcgctcgccgtggcctacgcgcacctggccgttctgctggtctcctcctgtgtggattcattccggagtgcggcgcgggccctcttggtgctgtgccctgggtcagggggtcccgccctgtgccctgccgagtcctggcgcctgtccccgctgctgtgcaccgggctctgggccctgcgcctttggggcgccctgcggctgggggccgtccttctgagatggcggtaccatgccctgcgtggggaactctaccgaccggcctgggagccgcaggactacgagatggtggagctctttctgcgcaggctgcgcctctggatgggtttcagcaaggtcaaggagttccgccacaaagtccgctttgaagggatggagccgctgccctcccgctcctccaggggctccaagtcctccccggatgcaccccccacccgacaaagtcaaataaacaacctggctgactgcaaaaaaaaaaaaa

SEQ ID NO: 11164 - DNA, 582 bp, Canis familiaris
gccagatggctatgcaagcgtccaagaggcgaacattcgactttccacccgaagtaaatcggatttatatataagtaatttgccatactaatcacagctgaagaaatgtatgatatatttgggataatatggacctattcgtcagatccgagtggggaacacacctgaaactagaggaacagcttatgtggtctatgaagacatctttgatgccaagaatgcatgtgatcacctttcaggattcaatgtttgtaacagatacctggtgcttttgtactataatgcctacagggcatttcagaagatggacacaaagaagaaggaagaacatgttgaagcttctcaaggagaaatatggcatcaacacagatccaccgaaataaatattttctgcattttcattttagactacatcccataaatgactaccatcacccttttcttgtttttaattaatgctgaatgttgtgatttcttattcaagattcaaaggacctacttaaaactttgatacattttaaaatatgttatgtgaataaacttgtagctttttgtaaaacttgtagcttttgtaaaaataaa

SEQ ID NO: 11165 - DNA, 492 bp, Canis familiaris
tcccagagcagatcttcctcctggctcgctctctcttccctgtccctctccacgtgtccgtctcatcctccctctcctctctcacatactcccagctgggtccgctgtctgtggcgcgggcctctggtccagcccctacccacggcacagccccggggcacgagggcaactgccccccaggctggacaattcctggaaggaggtcaacaggttggagacgatgcatcctgcatgcactccgcactccaaaggggagcattggccccggaaagggcccagcctcccactggagccccagccagctttcatcgtccccctctccccacgagatggctagctctcccctcccttcgccttctggcccctggtatggtgggggtttctaacgatcacacccagcttgaggaggggctgcttctgaggtcggttgttgtctttcaattaaagaaacactgtgcaataaaaaaaaaaaaaaaaaaaaaaaaaaaaaaa

SEQ ID NO: 11166 - DNA, 165 bp, Canis familiaris
ttctggaatggatcccagatggacaaggtcgatgggtaaaagatgagaatgttgagtttgactctgatgaagaggaacctcctgacctttccttagactgataccctcttttccccctcagttcacaaataaatttcagcaggctccaggaaaaaaaaaaaaaaa

SEQ ID NO: 11167 - DNA, 623 bp, Canis familiaris
ccctgatgatatatatgatagacctcatgatttttctattttcagggacccgggcctgtgtgatgcccatggatggcattttaatgactaccaaagtcccctaaaattaaaaaataaaattaacattaaaaatttcttttgagatccagacatatttgtctttttacataaagatttttaaataatctagaattaggttatataattcatatgtgtgtggtttttatagtaatacactcaaattagtaaagaccaatttaatttctaccattgtatgaatgtaatgttagtttttaataaccacactcatgtatggttttgattatcccggtggagtgattgtgtatgtatgcataggaatgttttgttcaaatgtattttggattttcaataatcatgaatcaaattttacctttatgtataaaaaccctttatgtaatgtaaaatgtataatattgtacataatattcagaatacaattattttggtaaattagtttgtatttttaatgtcccagttgcagtatttaattatttgaacccccttgaaacttggtaatcatcaataaagctataaaaagccaaaaaaaaaaaaaaaaaaaaaaaaaaaaaaaaaaaaaaaaa

SEQ ID NO: 11168 - DNA, 612 bp, Canis familiaris
cagatgagcactgggctccgaaggagctcctggaagaatcaaagaatgaaaggatccaaagaatttttacagaatatcgagttctgataataatgtcttgagggagcatgtacacacacaaatgacctaatgaagaagagttttgataaccatgccttcgtgtacgggatccaagcttgatgttctgcgtgctgaaatctgctccaaagcaaattgtagttagccaagtttcagaatatattgctgaatatgcaaagacaaataatttccatgtaagacatgtgattgagggtaataagggaaaagggtaaagaccaggaattccccctttctcacctcttcaataaaaaatagcttagttaggctgtagttatctatggatggatttatctttttgcctactgatacgctttctttcttggggggtaagtcctaaagtcatttactcacaaagaaattaatggtggttgattcactgattatagtagctgttccagtgatgtattctgaattttaaaagtataagttgttaaattgtaaaaaaattccaagccaaagtcatatctctgttgttgccaagtacatgtcaatgatgagcaaaaaaaaaaaaaa

SEQ ID NO: 11169 - DNA, 561 bp, Canis familiaris
acattcatgtataggtgttcatgtgacataaattctcatttctctgggagaaatacccacagggggccattgctgagttgtatggttaagcatgtttatttttgtaagaaactgtcctactctttttctggagtaactgccattctaccttcccaccagcaatgtgtggcccatccagtgttctccgaattcttaccagtatttgctattgttattattttttattttagtcattctaataggtgtgtctagtagtacttctttatggttttaacttgcattttcctaatggcagatgatgttgaacattttttcatgtgcttatttatcatttatatatcttcctcaatgaactatttctattctttttgcccacctttctaattagattttttctactattaagtttcaagacttccttatatagtagatacccagtactttgtcagatatgtggttgcttgaatttttaacataacttctagccaaggaaaatgaaagtaaaatttacccacacttcctacatggcccaaaaaaaaaaaaaaaaaaaaaaaaaaaaaa

SEQ ID NO: 11170 - DNA, 632 bp, Canis familiaris
  misc_feature (238)..(238): n comprises a, c, g, or t, or includes no nucleotide
cttgttcattgcctttgttcacctaagcataaggggaaaaactctcaggggcctggtaagatttataacccttataatgttcgtcacccacagaccaccttcttgtgaattttactttggtctgactggggaatgtaatggatggaaatggaatgcccgggagttttcctggtgttctgaaccccgttctcccttgcctggtgtaacttccaaagtccaaaccgccgtaatattctgngttaattgttaactaatccaaataatagcgtacgcatttctgcaaaaagccatagaaggaggagcaatagttgcttggatcaagattctctagcaccaactcagctcaagcccttgacagtggggagcagtaatgacaggaaaggctttgacttgtccgcgtctacacagttctgtatccttctggagtaacttggcagtgttttggtgttgaaccatgtcaattgatgctacttagattttttttctgtagatttgtaacgtacccatgtgaacctaacgagtctacaatctattttctcaggctatgagcaaatatagaaccctaacttttctaaaaatctgtataaagaaaaacggcagcaaaaaaaaaaaaaaaaaaaaaaaaaaaaaaa

SEQ ID NO: 11171 - DNA, 599 bp, Canis familiaris
cccttacccctattgcctgctcttcagggcagtggttcaggggccgctggagcactcagcaagcccctccttgtcttcccctctccctgaactcacccactggctctctaagattaggcagtgataccccccacctcctgccccgaaaatgggcaggggctgaactgggggtggggttgcaggtgtgccagctcctgagtttccttctagggctgcctttgggccaagctcttgccagctttccctggcccaaacccaggcgtgccctcctccactacccccaccctctatctgggtccacatcccctttgggaagggggagctcccgagaagcacaattcaggggcttgaccctcatacctgggctgatggcctgggcagaagccaggagaggaaccactagaatcacagaaatcgttttcctaggagaggcccagtgctggcctcccttgcagggtccagaccaccaccttcttggcttctcttgccctgccccccccaccagagtccccccagccccatgcaccttcattgctgtttggattaaagcctctgttttgcacctgtcaaaaaaaaaaaaaaaaaaaaaaaaaaaaaaa

SEQ ID NO: 11172 - DNA, 623 bp, Canis familiaris
tccccatggcacctcgttatcagccccccccacccttacggcccccatggaggcaaggctcccgtcccaagacatgaccccgtaccggtcgccccctcctacgtgcccccttaacccacaagcgcctgggtggaggcaggggtagggcagggcctggagacaacatggtgttgtctgtggagaccggtggcctgcagaccatccgcccaccgggagccgacacctgacctagcacacactgacagacgcgaggcctggacaagcccgccctctggtcctccaaaccccaaagcagctggagagactttggggacatttttacttttattttttgcctaacagctttttgtttgttcatagaaaattctttgctgcggttttgatggctggctctgaaagcactgtttggagtagaggtagatggagggagtgaggagccgtgaatgaactcgcaggcagtgctgggtggcctcccggctctctgcgttttgcctttaacactaactgtactgttttttctattcacgtgtgtctagctgcaggatgtaacatggaaaacagtagctaaagattaaattcaaaggactttcagaaaaaaaaaaaaaaaaaaaaaaaaaaaaaaa

SEQ ID NO: 11173 - DNA, 653 bp, Canis familiaris
  misc_feature (1)..(1): n comprises a, c, g, or t, or includes no nucleotide
nggggacttggacagcacctgtcaccaggatcttctttgagccacagcatctctaagactgggttagcctaaactcatgtctgcgttgcagcatagcccccattgttcttttttaattactcctctagaggctcatgcctgctgttaactcttgtgtccaagttcctgtcccattgacccctggtgaccccatcggttacagtagcaggtgtcctttgggctcgtgtccccacaggcctaggttgtcccctgcacataggagtccctgaggtttggagagatgaacttccagatccatccactctccccctcccagatggagtcccacatcgggctcctttcatggagcctgcttctccctttgcctgtgtctctgcctctctctctctctctctcttatctctcatgaataaatatataacatctttttaaaaaaaataaggatctgtgggatccctgggtggcgcagcggtttggtgcctgcctttggcccagggcgtgatcctggatacccgggatcgaatcccatgtcaggctcctggcgcatggagcctgcttcttcctctgcctgtgtctctgcctctctctctctctctgtgtgactatcataaataaaataaataaagataaaaaaaataaggatccaaaaaaaa

SEQ ID NO: 11174 - DNA, 586 bp, Canis familiaris
aggtgggaaattctatattctctcagcagcagccttgtctctttgaatccatatatacgatgcacctgatgcaccacaggtgttcaatacacaccggttcccttctcttccttgctactcatcagcactttgatcacatttctaagcacaggatgactaggagttccttgtttgctgtgctggaaatgacaccattctaggcctctggtacccaatgcccagcactgttcatcaccaccctgggacccagagtgagagcagaagacccacatctcccaataagggtcacactagcctataatatatccacaccaactaggacttctgtttaggtttattcagctttttccttacacagaactgaaactttggctggagaaaaaacggtcatgtattgcccacataataccaccagttatcttggttagtctgatagtttccagatgactttgggggcccgtattgtcatcattcagcccctttgttgctttttcatgataaccattaataaaagaaatagtcaatggccagtgaaaaaaaaaaaaaaaaaaaaaaaaaaaaaaaaaaaaaaaaaaaaaaaaaaaaa

SEQ ID NO: 11175 - DNA, 668 bp, Canis familiaris
gtattttggaaaacagaatggaaaagccactaaagatagtataaagtagtctaaattcctatgtcagttgccacaaccatttaaatttgtatattcaccaagcccaagaataaattgtggctgccaggattcccattttaattgaagaactaaaaaagtaaagtttataagtattagacttcttaatcttattttgcagttttagaaaaagtaaaatattagcatacgtttattaaatacactttccccatgccatgaaaaaggttaattttgctggatattttaagttgaagttgatactatatccatgaagtgctttggacaaggtagaaggggttgtttttttaaagtttaagtacccaaggtagtctagtctaagaaataataagtgttggcttttctaatttgtactgtaacatccttatactttctattttatctgtttcttaagtaaacaacttagatatttttccacactgtttttttttcctgatgcagagttcaggttaattaatattttactgcatctgataatgtattatatgtttgaagcctagtgacttttcattttgacattcttgtgatttcatatgctgtattcttcaagcaataaaattctgatgtgttttataaaaaaaaaaaaaaaaaaaaaaaaaaaaaaaaaaaaa

SEQ ID NO: 11176 - DNA, 669 bp, Canis familiaris
ttgctgatggaggtcactatcagctctcttgagaaccggttggagaggcggccctgatcctcccgagcccttgggcctgggaaccagctcttgagtttgcgcttgcaatttcgaggcgctgactggcaaggatgtggctgaccacagtgaaggccccgcttggttcttataagattcaagccagaatcttcgactgatgaagtagacgacatgtgccgtttgtcatccttctcattgggttcactttaagcaaaatgggcagttcccgcgcagtctggctgcgaagtggcagcctcactgagcttccccacctgcgcccaggtcctcatggtcctgagccttgatggcagagtaaatggcatttagcaaaactactggttgttactccatttatctctcaattcctcctttttgtgtgtgaaacccaaatcactgtcagcgtcacttgcagctgtttaacgtgcttgatacagcgactgagactaaaagagcacgtgaacactgtttgacactggcaaggaggaaaagcataaaagccaagatttaagaagcttgtgattttcccccccctttgttaattgtatattgcttaatgtgctattaaaaatacccagtgaaaaaaaaaaaaaaaaaaaaaaaaaaaaaaaaaaaaaaaaaaaaaaaaaaaaa

SEQ ID NO: 11177 - DNA, 714 bp, Canis familiaris
cccactttgcatgttgaggaatgtctgatttaggacaaacagcttcatgtaaccagctttgcaaattttccagtccagataatctgtcttgttaaaatgaattgccttattcagacagagatctgttctgttaatttcccacttaggtttttcagttcctgactacccacatcttattttgccaggctggtgcccaaagtaattaaagatgtcacaagaaaaagatgttaattagaaatgttaatgagactaaaggagttatgtaaatctcacctacatttagcaacacctcatatagttgttttggtagcatctggtagatcttagaaatatagcccatagattctttgttgagactttaaatatctttagtagggcaggtaatagttaattttgagttttctggtcaagtttttttttttttttaaccaggtattcattagcattggtataaaaaaggggaatactggtctgcatcaaatttatttggtctgatcactagtgcattggaagattggatgctttgttttcagaattttgacaactggctgaattataatggtgtaaagctttgtgtataatcggcaggcttatttgttgacttggtcagctttaattgttctgtattaatataaagataagttcacttaataaatctgcagagaacaaaccaaaaaaaaaaaaaaaaaaaaaaaaaaaaaaaaaaaaaaaaaa

SEQ ID NO: 11178 - DNA, 619 bp, Canis familiaris
caacgggactttccaaaatgtcgtaacaactccgccccagtgacgcaaatgggcggtaggcgtgtacggtgggaggtctatataagcagagctcgtttagtgaaccgtcagatcgcctggagacgccatccacgctgttttgacctccatagaagacaccgggaccgatccagcctccggactctagcctaggccgcgggacggataaccatttcacacaggaaacagctatgaccattaggcctatttaggtgacactatagaacaagtttgtaccaaaaaagcaggctggtaccggtccggaattcccgggattgggcatctgcctgaggcctgctctgcgtatcgctgagctgggtgctttttttttgggtcccctgcccccaaactttgttctaggggttatttattgaaatgaagcccatggggctggtcaagggagtaagagggggggtgtccaggccccgtgaaagtcaggcaggggcttcttggttctggggctaagggacacaattctcacaggtttggtgcttggagaccacccccaggggggttgggcagggaatcaattaaagatgcttcatttccaaaaaaaaaaaaaaaaaaaaaaaaaaaaaaa

SEQ ID NO: 11179 - DNA, 598 bp, Canis familiaris
ccgccatctttacaggtcctgacccagctggtccctggtgtccggcctgctgccttccgccggatggtacttctgaccctcccacctttgaccccccccttggtcctcacacgccttcctgcttggcggcacaggacctggtcccactttcttagacccatttccttgccagggggaaccaccagccattttggcaccagacccagctccccctgatggtgagagctccatcacccctggccccaccgccacggctcctctcagagaagctgttgccaagacctcaagtccttcagaaccagaacagggtggccatcaggatggccacccttccataatcctcctttcctctgctccccagaccttgccatttggaaacaaacatcagatccttgccccaccccttgcttccagaaagggtcttgagcccataccccaagtctgacaccctcctcccctcccgccgcctgccaggacactctagcaggacactggtgctttgccgcataccctactgtgctgcacttctttcccaatttttcataaatataaatgtatgtatgtatgtgtaaaaaaaaaaaaaaaaaaaaaaaaaaaa

SEQ ID NO: 11180 - DNA, 625 bp, Canis familiaris
tattactcctggaggtttctcatcagtgccagctggaatggagacccctgaactcattgagttgaggaagaagaagattgaggaagcaatggacggaagtgagacacctcagctgttcactgtgttgccagagaagagaacggccactgttgggggagccatgatgggatcaacccacatctatgacatgtccacggttatgagtcggaagggcccagctcccgagctacaaggtgtggaagtggcctggcacctgaagagttggagctggatcccatggccatgacccaaaagtatgaggagcatgtgcgggagcagcaggcacaggtggagaaagaagacttcagtgacatggtggccgagcatgctgccaaacagaagcaaaagaaacggaaagctcagccccaggacagccgtgggggcagcaagaaatataaggagttcaaattttaggtctccctcacacacctggcctcctttaggccttttggatgcttgggcttcacacatggtccccaagagccagctctcccacaattcccaagggcttgtcatttcatgttcttattttagacctgttttgtaaataaaactgtttcccacggaaaaaaaaaaaaaaaaaaaa

SEQ ID NO: 11181 - DNA, 564 bp, Canis familiaris
atgcattttccagagcacatgggccttttgcaaactcctggtgcaaaattatgttgcagtgaatcttccaaattggagtgagaaccaatggaccaatgcctgatttgcccttatatcttagagctaccaaggttgtttttattgggtgtgtccagtttgctatacctgattcagttgcacctggtgttctggtgtgattaacagcgtcctctcactctcaaccatgtcatggtttgcataataaattcttggtcaccttctccatggaggttatagaaactgccttagggaaatgtggtccctcctccttgcccgtgccttagtcgtatgacctccaaaggggtgcttcagattccagggctactgatacaacctaacaagaaactttttgtcttttgtgcctccaaaagtgttttacttgtatcttcctgaactcaaagggggaaaatgggcttgaggtctgtcaaagggcttgagaaagaattttgtatgaacactgctcctcattttcattaaatactataataaaatgctttctttacaataaaaaaaaaaaaaaaaaaa

SEQ ID NO: 11182 - DNA, 699 bp, Canis familiaris
  misc_feature (93)..(93): n comprises a, c, g, or t, or includes no nucleotide
cgaatgaaccctcaagatcccgagatgacgccaatgacctgacccacacgttcttcaacccggatcggaggctggctccttaagctgggggcncgggtgaagacgtggaagcggcgctggttatcctcactgacaactgcctctactatttcgagtacactacggacaaggaaccccgaggaattatccccctggagaatctgagcatccgagaagtggatgacccccgaaaaccgaattgctttgagctttatatccccaacaacaaggggcagctcatcaaagcctgtaaaacagaggccgacggccgggtggttgaagggaaccacatggtgtaccggatctcggccccgacacaggaggagaaggaggagtggatcaagtcgatccaggcagctgtgagtgtggaccccttctatgagatgctggcggcaaggaagaaacggatttctgtcaagaagaagcaggagcagccctgacccccgcccccaaccccattatttattacggagctgccccacccgggtggccggacccctgggccctggggctgcggatcctggttctctgtttggaaagttcaccacctctagctcctctctcgttatttgtaattaacacactgttggtaatcttattaattatttaaccactcgcaaaaaaaaaaaaaaaaaaaaaaaaaaaaaaaaaaaaaaaaaa

SEQ ID NO: 11183 - DNA, 542 bp, Canis familiaris
cgtgcacccatacttgtaggaggtccctaagccccctccctgctcagaggcagcacccttaaattataatctcttgacctgtggtttctgtccaggaggtctggctggccaaggtgagccagggtgtggtgtagggatgtgttccaagaatggaagctctgggaatacagcccagccccttagaccctgcgaagggggacgtctggcctgcactgtcctgtaaggctgaagcctattgaaccacctgtaggactaggccccttccctcgagcaccccttctcccatcttatcattggggaggagctcctcccaggagagggggctgggtggtgctcaccacagggctcacccgccctgtccttccttgctgcatcctcttgggatgcctggccatctggtgagggtgtgctcccatgtcctgaccactgccccacccccacccccacaacgtattcctgctgtgttgtatctggctcctccctgcctgaataaagtcattctctcgcctcccaaaaaaaaaaaaaaaaaaaaaaaaaaaaaa

SEQ ID NO: 11184 - DNA, 581 bp, Canis familiaris
aacgcactttcacgacagtccggaccccaaaggacatgcgcatcagagaactccatctccaggttgctcttctgctgctggtttccctggatgctgagggcggagatgcagtcttagaggcctggatatctgacagagagtcaaagagtcccctctgagcatctcctgacacaggagcccccaagtcaccctgagatagagattcccagtaacacatccagaatagagaccccattagccagccctcgatcactgaggccccattattaacagattccctcatgataacccccgaatacagaccccatggtacccagaaagagattccctgagtgtagcaccttcaggctagttcctgtccccaacccctcagagcagactcccaataccctttccacatcacctcaaataatggtgacctcgtacataaagctccagagcagaacattcctgagtcattcatcactggatcagaatcctcccccattaacaaagaccctccccccccccacatcaagtccccttgaaataaacacacggtcttacctccagaaaaaaaaaaaaaaaaaaaaaaaaaaaaa

SEQ ID NO: 11185 - DNA, 674 bp, Canis familiaris
ttagtgtgtaatgaaaaggaaaatattctcgacctccatcctgtttggaaaaggtcaggtcccaccggatactcgctggtctcagcaggagacaaggtgctgcacacactgtcctcatccgcgtatgctgttccagtgaatctcagcaggtggtcactggagcaagtccccagtaaggcgcctgtcccaccgcctcccacggtcactttgctggtttcagttcagtttggaaaaaataccacgcaacactctggttgcttttagtaagtaggcagagggtgaaaattgcataattttcatcatatattttgttgttttatctaaaatgactgtaacacatgtggtttgtgaactgggcccccgtttgtaacggatctttcaaagatgttccatgtaaggacacatgcggttacctctccctcctcagacgccttccccacttggcactcaccccccttgtatgcagtgttagccatctctggcctatgtggacattttttgtaaattacagtttccagatggcattaaactttttatattacgaaatttaccatgtaaaaagaacttcatatttttattgagattgttaaggcacttggccttcctttgtgatttcagtgtctattaaagcatgaattccctcggttttaaaaaaaaaaaaaaaaaaaaaaaaa

SEQ ID NO: 11186 - DNA, 636 bp, Canis familiaris
ggcgaccccacgctggcccactttgcctcgccgcttccgggaggcaggtgagctggcccagcacagccgggtgcactcaggggagcgcccatttcagtgcccacattgcccacgccgatttatggagcagaacacgctgcaaaagcacactcggtggaagcatccatgagccaggctgcagggtaccccagatgccatggtgttctgggggaacctggactcctgtcaccctcagacacctggccagtgctgagggctggttgcagcccctggacaggaacacagacacacctcctgcaaaggccaagccctgcctgaaggaggagcccatgagtagcctctgtgtggtggagataagatggaaactacaccttgcattccaagtggagccctccagcctcaggctgagccctgacccgaggtgtggggggagagtgctccatctggaagtcctccagcttgaaagaggtggttgggagccatcaagaatttgcagcagctttctgaggcctccatgttgatgctgggggaaggggaccggaaccacctcccaacccccagccagggcctcagattggatacccaataaacacctttcccattttgaaaaaaaaaaaaaaaaaaaaaaaaaaaaaa

SEQ ID NO: 11187 - DNA, 589 bp, Canis familiaris
gttccatttgctgctcggggtcaagggacacgccttcttgtactgcccccccattctggacattcccccacgtttggacgactgggcgcacgcctcccaaggggcgaagggggcaaggcggtgggcaccggcccccggggcacccgcacaaccaccacctggaactcctgcccgcccgctttgcgtccagtccttccacttcgacgtttacaagcccccctcttcgcgtttttttgtatgttttttttttctgctggaaacagactcgattcatattggatataatatatttgtgtatttaacagggaggggaggagggggcgatcgcggcggagctggccccgccgcccggtactcaagcccgcggggacactggggaagggaccccccccccctgccctcccccctctgcatcgtactgtggataagaaacacgcactcggtccctaaagagtttattttaagatgtgtttgtgtgtgtgtgtgtttgttgttccgactttttattgaatctatttaagtaaaaaaaaaaatggcttctttaaaaaaaaaaaaaaaaaaaaaaaaaaaaaaaaaaaaaaaaaaaaaa

SEQ ID NO: 11188 - DNA, 658 bp, Canis familiaris
aacgcctctggtaaaaaaatccaaaaactggcatttgagtatgaatctgcaaattcgcacctttcctgaaaatcaagttggaaaaaaaatgtctttataaaattaataaaaaaaggcagagcacttcttttctgccagtttttgataagcaaggtgtagactttacatttttgtccttgctcccaatgaaatggatcaacaaaaaagaaaaccagacataccatctactcatggattgttgttgtgttagccagtctgaaagcccaccttaatttttatataatcgtctttggctcttcccgtcggggcaggcttggtcccacgctgtgccctcctgactgttaaccccaagatgcatgcaccgcccttcttcctactcttctcgctccccccttgacctgagtctcttgtgcatcttcccgctccctccttggttagaataagtctatcagctgtgtaaatagagcaagaaaaccgtattctgcatctgtggcatttacgtagagttgcggttgtatgctgctgacaacgcaggcttttgtaaaaaaaacaatgtgatcttgactgatgcactcacaacaagtacccagtgtatttcagctattcttagtagtatttgttcaataaacatgcaagctgtaaggtaaaaaaaaaaaaa

SEQ ID NO: 11189 - DNA, 661 bp, Canis familiaris
gtaaccttccatcattaagtactattggttaagcacgtgcattccttcatatggcctcccttcctaacacttacctcttcccaaatctcaggtttacaacctctaagatgactatcacttcattcagtgtacaccttaaccacactagaaacatttgataaatcctacagttccattccagtgtctaataaaagacaagcaagggacacaaaataatggtgtaagactgctcacagataaatatcaaaccaataaaacataatttgctaatattactagtctttaaagatttgataatttacctcagcaattgtaggctttctgtattattgtgttagcattgttttttaaaaaactcaatttaactaaattctctaattgtattatttgttacttaaaaatctttcctcccaatcccagattgctactttcaaattttctaaatagaggatttcttttgtgtgtgctttttaaatatcacaattatgttgaagacttttgcttgttttccacatttttattcacatttaaatatttattgactgcaatatatgtgcaaagcaaataattaaaagtgtgttacttaaggatcttttgcacttttatgatttaatccaatattaattaaatttgcacatgctgaaaaaaaaaaaaaaaaaaa

SEQ ID NO: 11190 - DNA, 649 bp, Canis familiaris
  misc_feature (145)..(145): n comprises a, c, g, or t, or includes no nucleotide
ttggaacccataatactacttgtaaaagattggagttgtacaagaggaactttcagagaaaacctgcactcctggcagttaataaaatggacttgccaggtgctcaagataagttccatatactgatgcatcaactccagaatcnctaaagaatttctgcatttatttgaaaaaaacatgattccaaagaggaccatggagttccagcatatcatccccatctctgcaactacaggagaaggaatagatgaattaaagaactatataagaaaatctctggatgaacatgctaatcaggaagatgatgtgtatcataagaaacagttgcttaatttacagatttctaatacagtatcttatatcacacagagagagagacagagacataggcagaggcaggctccatgcaccgggagcccgacgtgggattcgatcccgggtctccaggatcgcgccctgggccaaaggcaggctctaaaccgctgcaccacccagggatcccaatcatcagtatattcttaagagattaaaacttctgagtttcaaaaagacaaattggacattttcttttcctaagttttattataaaatatgtatgttcattgtaagaaataaaatttaaacccatgcaaacaccctttaaaaaaaa

SEQ ID NO: 11191 - DNA, 587 bp, Canis familiaris
  misc_feature (6)..(6): n comprises a, c, g, or t, or includes no nucleotide
cccggnctgaagtgcgccaaaccgctgggcctttgggctaccctgtatgcagtcttgaaatcacctttagacgtaaccagctggccattttagcaggagaggtgtattcaccagagaaactcctgtgatagtaatctactctttgagctggttaccgagacttttcactcacatgtgatgaatcattagattgaggcagcaacgattgtctaaggagtagaggctaggagtcccagcccagctcattgagtaggagagctttcttgagaccgttcagcttgtcaggacagatcaggtgtgaaataatatacacacacaggcagatctgagttcccctaggctgtgaatattgatctttggttatagtttatttctatagaagagaaacactgtatttaattacctgtgccacttgaatgtcatttagcctccaggaaagttctggtggtgagggtaaagatcctaaactagaaatgaccatgacagttcagagtgagagcctctgaggcactgggtttgtctcagtcagtagaaagtttcccaagtcctgatcttgggatcataagcttgagccccatgttagatac

SEQ ID NO: 11192 - DNA, 634 bp, Canis familiaris
gagattctgtgggtcacgatggaatctaggactaagactggacacactttctgcatgtagcccaagccataccgctgacaggataagtgcccgagactatatatgttataaattagattcttttctaatcgtagttaccagataacttttgctatctttgaactatatgaaataacctccatgctcaacacttgggattgtgttactcgactattattatgtaataatcccaggaccctgacttaatacccataccaaaataggtaatgataataccaatgtattaataaatttattacagatgcacttaatacatgtagttatttcatagatatgagactacatggtaaaccaaccccacacatcagtgttttaagtttttattggtttgcttccatctaaattaatgttataggatctaaaaatgcatatggaaggggaatgattaaaacacttgtaaacctaaattatatgtcattatgcgtgttcttgagactggtaaacgtttaatgttaatgaaaattgagggtcgtgtggtccattaacaccaagcttctgagatctttaaaataaataattatttccccccaaaaaaaaaaaaaaaaaaaaaaaaaaaaaaaaaaaaaaaaaaaaa

SEQ ID NO: 11193 - DNA, 586 bp, Canis familiaris
ttcaggaagaattttgcccacctctctgttagtccatgattaagggtgaaacatctgggggactataagaaagccctcttgatgctctgtggaggagaagatgactgaggcatcagccagagagagatcttatgctgtgcctgccaccgccacttggaccttccttgcacagcttgcgtgcactttttataatagcccgtgcttgacacattgccttattcacgtagcgtgctaataacccaagcataacatgctgcagaataaaaataacggtgcttctttcttaattagttcaattaaggtctttctctttgtctgttgtagtactaaagtgtacttacgttattaaagtctaaagtctgggtcatttagattttcttttaaaagatcccgactgcttttagcctttttaaaaaaacttcatttatattaaattgaaaactgtatttccttaatcggaatcttagccttaaaattatgaaatcctggaagtgttattaatcaagtttgctactaaattaaacctgaaaaattaaacaaaaaaaaaaaaaaaaaaaaaaaaaaaaaaaaaaaaaaaaaaaaaaaa

SEQ ID NO: 11194 - DNA, 641 bp, Canis familiaris
agaccttttgtcctgtgtcaacagactaggacaccatatctatgtgttccccttcttaccacacacagctaatattctaatagtaaatttctctatatttggtggggaaatatgccgagggacagtatcccttgctccatttttaggtcatccatttggaatgttttgttatagctcttcactcttaaaacgtttccaatgtgagtaataatgtaaaaatggagctgccaattttgttcctcttgcaaaaatagtaaatacttgttgcaatattcccaagatttaatgaaagaacctaacttagtttttcagtgaatttgacatctttctatttttaaactgatgaaattttctttgagaacttgagaatgatgcaatcaactattggcagttttttagcctaattttgactttacagagattactttatcaggtactttaaaagtcactcttgattgcatttgcccctattgacacatgaaagctgtgtggtgttctactgtacatacttcagatacacataggaatagaagtgtgttataaatctagctttctttatgatgtttctgataatatgagaattgaaaactttaccttttcttgtacatagtcagactttctattcgtattaaagttacatt

SEQ ID NO: 11195 - DNA, 609 bp, Canis familiaris
tgtcataaaccttgtgtctcaatttggctacagaagtcgggaacgtgccccgtgtgccgccgccatttcccacctgccgtcatagaggcatcagcagctgcgtcctccgagactgagcaagaggcccccccttccagtgacagctcggcggatgccccctaaaccttaaccctcggatgagatcgccctgtcaaagtcaatctgcaaattccttctcaatctgatgtgcaaataattatatataaataaatttaaaatgctatatatagtctatgccatagtttagaaagaagaatattaacctttctaaactaaatttaggtttgcagaaagtactaaacattttcaagctgaatgttgaagcagtgcatccattttctttagttgactatgttgatatcagttgtaatgtcaagcttaccaattaataactctttccagaagaaataatcctatatgtggcatctattattgattttgtctgaagtactgccactaagtgattataattaagctctcctatttgcatcaaatgtgaagactgtgatcacaacagtagtaaaatttggtttcattggaaataaaaagaattctaaaacaaaaaaaaaa

SEQ ID NO: 11196 - DNA, 611 bp, Canis familiaris
aagacactgccctctaaaaatttcctagatctctgaagagtggtcttggtcctgaatatacagtgttctgtgtttaaaagggtgatccagacatgagaagcaactagttggtgcataagaaggccctacctggatatttcatatctacctacaattgacccaaaattttttaggccagcagttattatttagctttgctccttctagtgcaagaaactgtaggctggatcagtagttcaacagctaaacagtcattaaatagtcattgtgcatgttaaatttctttcaactataaaacaaattcaatttctatttacttattcattgtgacagtattactaaaccaggtaaggatgggaatattttgttataccgtgtatagtgaatgtattgtactgtgtctgtgaaaatcgtgctttaaattatattttcatatgttttgttggggacagagcacattaagtttgaaagcaacagaggtttgttttagaactgaaggcaacttaatcaaaattgctgtcaagaaaagctgcttataaatgtaaatgaaatcacatctaaaataaactgcctctgaccccaaaaaaaaaaaaaaaaaaaaaaaaaaaaaa

SEQ ID NO: 11197 - DNA, 432 bp, Canis familiaris
gcagatccgtgttctacatggagtgactacctgatccgtgaagacgggcgaggatatttttggcaccattggcattctggcccaatgccaagagataatctgtgacctggacttcaccatcgatctggacttcaagggccagctgtgtgagctgtcctgctccacggactaccgaatgcgctgaggcggcgcccggcttctcccatccccgcccggtgccggccctgcactgggcccaggggctgcggcattcttagtgcagtttgggggctcccccttcctctccttccctccctcagaagggggttttaggggcctgggctggggcggggcacatcgtgactgtgtttttcataacttatgtttttatatggttgcatttacgccaataaatcctcagctgggaaaaaaaaaaaaaaaaaaaaaaaatat

SEQ ID NO: 11198 - DNA, 574 bp, Canis familiaris
cttgtgcttttatactttgtggcaggattatactataagcagatgagtcaaacagctatgtaaatctacaactttatactaaaatgaaccaaagtgaaaaggatatgttccaggcagtatctttctattgtaacctgttatttaagggaatactagtgattcgttctaaataggatgtaaaacttgttccaaattactcctcagtcctgcctgccaagagctcaaatgtaactgtgatatagcaacccttcccaggtgtattggcaggtaaatgtgtgatctcagaatacacaggtgacatagatatgatatgacaactggtaatggtggattcatttacattgtttacacttctatgaccaggccttaagggaaggtcagtttttaaaaaaccaagtagtgtcttcctacctatctccaaataaatgtcaaaaaagaagggtgtttgtgcttcagctttgtttttgctcagtaatacagtcaagcaagtttgtttccaagtgacctgttgagctgtgtaagcttttttgtttatttcaaataaaatatatttgtattaaaaaaaaaaaaaaaa

SEQ ID NO: 11199 - DNA, 675 bp, Canis familiaris
agcatgagggagcagaccagtgtgcctgggggaatgctgtcagctctgccgagcctcattgcaccggaggcccttccccatcatgcaggagaagccggggtgatcactgagggcagacatcaacaagggtgtcagagagcttcaccaagcccttctctgcatcggtgtagacaggtggactttccgggggaggtgggatgcctgtactccatggggcatctggtgagggtgacggtgggggccggcggggcaaggcctgggtggcctgccgcaggggctcccttcacgcccctggatgggccaggccgagtgccctccgagtgcccccctctcttccagacgacaagtcggagctggagggctccaccctgtctgtgctgtcggccacctccaccgccagccacctgctgccaccccaggagcggctgagggagaaggccttcgagtactgccagcgcctcatcgagcagagcacgcggcgagccctgcggaagggggactcggacctgcagaaagcctgcctggtggaggctgtgctgctgctggacgtgctctgtcggcaggacccgtccttcctgtaccgcacactgtcctgcctgaaggccctgcacgcacggctgtgcggggacccggcccgggtgcgggcgctgctgcccatcgcgcagttcttcctga

SEQ ID NO: 11200 - DNA, 671 bp, Canis familiaris
gtgtgctgtgccctaccgtggcccttcctaatattttttcctgcctaatttcgcctgtttattgcaactcctttctgcatctgtacttcatttgcttcaccatatcatttacagaaaacttatacctacttaaataataaatgtatctgtgtcctgtaaaatggaatgaaaattaaaacacctaataatggggcacctgggtgatgactcagtcagttaaacgcctgccctcggctcaggtcatgatcctgcagtcctgggatcaagtaccatgttgggctccctgctcagtgggagtctgcttctccgtctccctctgccctcccccaccctcattcgtgctgtctccatctctctctcaaataaataaataaaatctttaaagaaaaattaataaataaaaataaaacatctaaaaaaataatttataaatgcctgcgtaagctgaaatggaagcatattttagctggcgctaatgttccttttctataactatcctttggaatgaatgtaattgtaaaactcatttttcagaaatttgtgattcaatacaaatcatatagaggccgaatgaaaatttagccttgcttcaatcataaaaaggcaactattataggcacttgaaaataatgaagctacgtttctttctttaaaaaaaaaaaaaaaaaaaa

SEQ ID NO: 11201 - DNA, 543 bp, Canis familiaris
  misc_feature (292)..(292): n comprises a, c, g, or t, or includes no nucleotide
atatgattaatctttccggcctgaccccctagccatgaatatgattcatctctacccctagcaagaaaactaaatcgagcccccttcgacttaactgaaggagaatccgaactagtctctcggatttagacgttagagtaatgcacgcaggttcccctttttggcccctaatttccttttttgctaagcccaggaaagttaacggcccaaaaaataaagttgaaattttaaatgaagaagttgaataagacccaaattccccccttcccaaccacacccagatttgctattncttcggcgcattccacaacccattcataccagaactctactctattaacttcactataaaaaccctcttattaaccatctgcttcctatgaattcgagcatcataccctcgattccgctacgatcaattaatacacttattatgaaaaaattttctacccttaactttagccctatgcatatgacatgttgccttacccattatcaccgcaagtatcccaccccaaacataaaaaaaaaaaaaaaaaaaaa

SEQ ID NO: 11202 - DNA, 596 bp, Canis familiaris
cgttcccaccggcgcattggcctggctcagaagctgatggacaggcctcccgagccatgatcgagaacttcaatgccaatacgtctccctgcatgtcaggaagagtaaccgggccgccctgcacctctattccgacaccctcaactttcagatcagcgaagtggagcccaagtactacgccgatggggaagacgcgtacgcaatgaagcgggacctcacccagatggctgacgagctgcgaaggcatctggagctgaaggaccaaggcagacacgtggtgctgggcgccatcgagaacaaggtggagggcaggggcagctcgcttccgagctctggagacgcctgtcgtgacgagagaggcctggctgctgacgatagcgggggcgacagcaaggatctcagcgaggtcagcgagaccacagagagcaccgacgtcaaggacagctcagaggcctctgactctgcctcctagagcccgcacttgctcctcaccccaccctggcctgcccatcctgtgctcgcccctcgaggtttccccaataaacttcccccagtgaaaaaaaaaaaaaaaaaaaaaaaaaaaaaaaaaaaaaaaa

SEQ ID NO: 11203 - DNA, 604 bp, Canis familiaris
atgaatcccatctgggttccagcgtatataactgacagcatgttggaagactgtgcatctcagttctagaattttcccccagggaggatacgtgggtacagaaattgcctgttggcctcatgcagggataccccaataccctttgtgctagcccaagccctggaggatcgggtggctcacacaagccatagttggtatttgcatttttacctgaaccagagccaaacctggttttgctttccttgctccatggaatgcctgagttcaacaccacttgctcttgaaaatccgggtctgcaaaaaggcacaacagctcctgccccagcctagctgaggcatacactgagacccacgtgaggatagcacagattgagttgtaccatttggggatgcagatgcaaatgcatgggaaatgcatgatcattcaaacttgacactttaaaacttgacacatttatgtaatatacttatttaaaatatttgtattcagctacattatcaatgtactagagacatcaaacttgtgaccgtactaataaagtcattaaaaagagaaaaaaaaaaaaaaaaaaaaaaaaaaaaaaaaaaaaaaaaaaaaaaaaaa

SEQ ID NO: 11204 - DNA, 630 bp, Canis familiaris
cccagcccgtgcgggcaataggccacgcccggggagggctggaaccacacgcgcaaatctcgcgaggcgctgagaaggacgaaggagccaaaaatggctcttcacggtcgcgcggttcttcgttcctggtgccttgggcagcggccgtgctcctcgctctgggcgcggaaagggccctggcgctacccgagatatgcatcctgtgtccagagagtgtgcgaaatttgtcagaagtgaccctttattgtaagcagacaccagggctaatgctgcacaaccgctgctgcctgaatcaagagggcaccattgtggggtgagggaggaaaagacaactttggatactggaagagttcccgaaccggattcttcttcttttttttttaaagtagtcttcaacctaacgcagggcttgaacttagaccctgagatcaagaactgacatgagggcagcctgggtagctcagcggtttagcgcggccttcagcccagggtgtcctgagtcccatgtcaggtcccctgcagggagcctgcttctccctcgacctctctctctctctgtctctcatgaataaataaataaaatctaaaaaaaaaaaaaaaaaaaaaaaaaaaaaaaaaaaaaaaaaaaaa

SEQ ID NO: 11205 - DNA, 553 bp, Canis familiaris
agaccagagccccccctggtattaaggcttaagttacagccactcacccttgcttcggccctttgggactcccaccatcatagtcaatagctcaggatgctaggaacacatcccaccccctctacaccctgcaccccgattccagattcctccagcgtgcccctacccattccacccatcaaaccagtgaacttctcgaccttcctcacagcgactccatagcttccaggcagtgtccacccagaatcaggttggagaaaagggaaccccagcagtggagaatgatagtgcaggcttttgttcatcccaatctcggatttttttccctaagagattctcttttgggggatgggggagtagggaaatggactcctccaaaagggttcagatgtcatccatttttctgacttttttaatcatcatcattattatttttaattaaaagatgcctgtatagcctttttttggtcccattgtaaataaatatgcccttgtcctgttaaaaaaaaaaaaaaaaaaaaaaaaaaaaaaaaaaaaaaaaaaaaaaaaaaaa

SEQ ID NO: 11206 - DNA, 640 bp, Canis familiaris
ccccaagtgacggggcttgtcatgcccaaggggtcgttgcgtgtcagcccatcagcggcacagagggtcctcgcaggcgtccggggagtgggccattcggactattggacagagccgaaaagagccaaattgtcataattggggacccaagacagattggcctgagatccgaaaagacttggaggcaccccaaattgcctgcccatcctgctggatgcccaccccacccagtgttacattctgcctcttgtggggtgggtgctccaaggccgtctgctgacgctcctctgtgtcccccagcaagcagctctcccagggtcctccgccatcctgacccgggcccccatctgacctcctgagccccgactgtggctgtccatcttttctccctcctcaactgtcttcagcgggactccctcttgggtcccccccaccatcacctgaagaccccccacgcgccaagcaccgaatgtcaccttgcccactgtcgcggcccatctgtctggcagtggctggtgtgggcctccacttgacccctttaacatgctgatatttctggcaaaattcattgcttgggttttgtctttaacatttatcgctcgcaatcccaataaagcattcaaatgtaaaaaaaaaaaaa

SEQ ID NO: 11207 - DNA, 523 bp, Canis familiaris
  misc_feature (140)..(140): n comprises a, c, g, or t, or includes no nucleotide
  misc_feature (179)..(181): n comprises a, c, g, or t, or includes no nucleotide
  misc_feature (200)..(200): n comprises a, c, g, or t, or includes no nucleotide
  misc_feature (215)..(215): n comprises a, c, g, or t, or includes no nucleotide
  misc_feature (217)..(217): n comprises a, c, g, or t, or includes no nucleotide
  misc_feature (223)..(224): n comprises a, c, g, or t, or includes no nucleotide
  misc_feature (232)..(233): n comprises a, c, g, or t, or includes no nucleotide
  misc_feature (247)..(247): n comprises a, c, g, or t, or includes no nucleotide
  misc_feature (259)..(259): n comprises a, c, g, or t, or includes no nucleotide
  misc_feature (272)..(274): n comprises a, c, g, or t, or includes no nucleotide
cccccacttctgcaccaaactcgcactttgcaatctctgcccctcggacgaggccctcaggggagcacagctcctggggtcccttgagggccagggggcatttctggcttcctgcacaaattctaaacctgttttgtttnccagtcagccaaaaccataacacccattcatcccattgnnnccccatctagatgccacgntcttggcttccgccngnttgctnnccctgcgnngccctgtaagcgcncacgaggggagnttccaggggaagnnnttcacctttacagcaaatcccctgctcccctctgcccagtgctgacggaagcccctcctccataagcaagttcattctttcagtgccattggcatctacatagacaggtgtgagagtagatgtgtaggttactctacatgtatctgttctttcttcaaaaccatgttaactttgtgaaacgacttttacactccaacacgctttacagcagaagaaataaaggaatatgaaaaataaaaaaaaaaaaaa

SEQ ID NO: 11208 - DNA, 639 bp, Canis familiaris
taacggcagagccaggcttgaacccgtggctgctgcctgagcttcctgcttcttcagtctgtggggaggaaggagagagagagggacgggatggggggagagggagcaaaaggatggaggaggggctcaggaggggacagtgacctggatgtggtgttggctgaagtcagaggaaagagtctgggttaagcctgcccctgaagtcagctctggagggctcaggggccaggctgggtggagaggagggaatccaacagtgagagccatgagggcctttccctttcacagatgagggaaccgagagcttccctttgctgcaaacagagttggtatttgcttggatggaggtggcccctgataccccagcccttccctctcctgttcctccctggcatgctgtgctctggctggagccagagtgcccccaggttctgtggctgccaaaccctggatttggaaaattgctgctgcgggtggtacccaggaccagggggaaccatgaaaccacttatccaaccatgaaataactcaggaaggggcttgcttgctttctccctttgaggacaaaattgcttttgaataaagagactgaggcaaaaaaaaaaaaaaaaaaaaaaaaaaaaaaaaaaaaaaaaaaaa

SEQ ID NO: 11209 - DNA, 575 bp, Canis familiaris
tggcgttataattctgcaaggtgaaagcacacttttgtcaaaggagtctgttagaaatccacatggtttcagcttgtttgttgagctcgaccaatatgtttcccaagatataatccaattttttctattgattaaagaagtataaatagttaaacctatccatagagacatttaagtgtaattaaaaccttgttacgctttaaaaatgtattctaataaatgatataaaggataatgcttatgatggcactatgaactagaggaggacctggggtcacccagaatcacgtagtaggaaaagtagattatatgcatcagtctcgttgttctagttcgatgttagtttttacttccaggtttggtctcaccaagtcctgatgatttgcttcagtaaagttttcttgtttttgttattttacctcttaataattgtcaaatatttgcaacttctcttactgttacaatcatacatgttacctaagatacccactataaatcaatggatattgtcatgaaaactaagaaaaaaagctattgctcccccaaaaaaaaaaaaaaaaaaaaaaaaaaaaaaa

SEQ ID NO: 11210 - DNA, 605 bp, Canis familiaris
  misc_feature (272)..(272): n comprises a, c, g, or t, or includes no nucleotide
gtcacagaagacctcgcgcctccccatcatgacattgcgcccatggacataggagggcccgagcaggaatttggtgtggacatcgggcctgtctgcttcttgtaaaacccgtacccactactacacaatccattgccaatccagaggacccaagtactttccagtcccagtcactctagggctctgcactgaatggctgacctgacctgatgtccacttcatctccaaccgggttcaccacgtgtgggaacttgtttctgcccgcttctctngtctaaagaggaccctgaacctggcgcacgactggcacaaatataaattctcggtgttctatttatttattgtcttcctgtaagacctttgggtcgaggcagaggcaggaaactaactggtgtgagtcaaacgccccctgagtgactgtccccagcccaggcaagaagatctcccttcaggtgccgggcgcaggaactgcgtgtgtcctacacaatggtgctattctgtgtcaaacacctctgtattttttaaaacatcaattgatattaaaaacaaaaaaattattggaaaaaaaaaaaaaaaaaaaaaaaaaaaaaaaaaaaaaaaaaaaa

SEQ ID NO: 11211 - DNA, 538 bp, Canis familiaris
tgtgcgccattttcaactatgtgctttcaataggagcagtttttgccattatgggaggatttgcccactgattccctgtgattctcaggttatactcttaacgatactgtgagccaagattcacttgtacaattatgtttgtgggagtaaatatgcctttcttccctcaccagtttccctaggtttaatctgggaataccctcggttcgatactctgacttaccccagagtgcatatactacctgaaataccgtctcctctataggatcgtttatctcgcttacagcggtgatgcttataatttttatgatctgggaagcctttgcatccaaacgagaagttgctatagtagaacttactacaactaacattgagtgactacatggatgtccccctccataccacacgttcgaagaacctacatatgtgatccaaaaataagaaaggaaggaatcgaaccccctaaaattggtttcaagccaatgtcataaccattatgtctttctcaatcagaaaaaaaaaaaaaaaaaaaaaaaaa

SEQ ID NO: 11212 - DNA, 605 bp, Canis familiaris
  misc_feature (1)..(1): n comprises a, c, g, or t, or includes no nucleotide
nttacacttgaataggatatatgaatcatcctgtttataagtgaaaaatcatgtacagtaatcaggtcatgtgaccaatcatagatttcactcatatatactcttcagccttattaaatgctttcataaccccattttaaaaatggaaaagtcagggtagagaagaaagcgacctaaaccacgcaactgaagacatttttagtacagtttgccagtttgcctaaattctagttttatgtctggtccatactgtccttttccttttataatttgtgattttataatttttatatcagttaattcatcggatgaggtaagctgattttgaaaacttcagtatatgttactttacatataaaatcaaaaatgaaaatgaaaaatcattagatagaagagtttagtgcctgtttatgctgttgcatttttgtttactaaaggataacaagggatgccctgggtggcgcagcggtttggcgcctgcctttggctcagggcgcgatcctggagacccgggatcgaatcccacgtcgggcttccagtgcatggagcctgcttctccctctgcctgtgtctctgcctctctctctctctctctctctctgtga

SEQ ID NO: 11213 - DNA, 633 bp, Canis familiaris
gaatttcagaaggccatagacaagtcaataccatttccgaaggccatagttgctgaagaggatgaggagggaacggttggaccggcaaattggggagatcgatgagcagatagaatgttaccgtcgggtggaaaagcttcggaatcgccaggatgaaatataaataagcttaaggaggttctgactataaaggaactgcagaaaaaggaagaggagaatattgacagcgatgatgagggagaactacaagatctgctgtcacaggactggagggtaaaaggggctttgttatagggtttcaagacccaagatttttacaccctctacaatggtacgaaaagtgctgtttctgggtatgattactggttccttcgtgcgtggagatttggtgacctaactgggttgttgacatacaatgagcctgtgaagatagcacttttgaaaattggtgtaaaatatttttgaggtgaggttgtttttgcaatttttgagctattgtatactaaaatgtcaacttttttcacacgttaagtgaataattttgcgttgtcaaatctgtaagctgtaaatattgtacctcgttaaatatatatttacttaagtaaaaaaaaaaaaaaaaaaaaaaaaaaaaaa

SEQ ID NO: 11214 - DNA, 450 bp, Canis familiaris
tgcaagggacggttggcactggaatgtggtctgtagtgatcctccggagtgatgatagggtgtagatgcatcctctggaagtagtccgacatctggtccatgtggggaccttggcaggtacaatcccatgggtgagggtgagtatcagggaccagccctgtgggggtggcgccagatgatccgtccagtctaggggagctatgatgtcaacacccctccatagctgtttgacatcgaaaggcaggaaagaggggagcttgagagtcacatagaattaagggaaccgggggggggggggcccttgatgggatgagcactgggtgttatgcttatatgttggcaaattgaactcccaaccaaaaaataaattaaaaataaatttaaaaaaaagaaaaaaaaaaaaaaaaaaaaaaaaaaaaaaaaaaaaaaaaaaaaaaaaaaaaaaaaagg

SEQ ID NO: 11215 - DNA, 623 bp, Canis familiaris
agtcagcaccccagtgccagataaggagcaggcaaggtctcagagcagcttaagtgctgcagtgccatcctcaaggagatgtttgccaagatacacgcagcctatgcctggccgttcttacaagcccgtggatgtagaggcgctgggtctgcatgactactgtgacatcatcaagcaccccatggacatgagcacaatcaagtctaaactggaggcccgtgaataccgtgatgctcaggaatttggtgctgatgtccgattgatgttctccaactgctacaagtacaaccctcccgaccatgaggtggtagccatggcccgcaagctccaggatgtgtttgagatgcgctttgccaagatgccagatgagccagaggagcctgtggtggccgtgtcctccccggcggtgccaccccccaccaaagtggtggccccaccctcatccagcgacagcagcagtgatagctcctcagacagtgacagctccactgatgactctgaagaggaacgagcccagcggctggcagagctccaggagcagctcaaagccgtgcacgagcagcttgcagccctctcccagccccagcagaacaaaccaaagaaaaaggagaaagacaaaaaag

SEQ ID NO: 11216 - DNA, 584 bp, Canis familiaris
ccgcaatcaatccaccaggagctgaacccggagcggccgaagctgaccggtgcagtctgggaccagttcccaactgttgttgaagcccagccggatgaaaccaccagaagggggatgtcaatgaaccagttcgtgctgccagcgcttggccagacagtgcccatggaccttacgccatggtgtagttctgtcccagggcctccagatccctgagcgagggccaccctacagcccagcatgagaagatgctctgtgacagctggtgtattgaggcacgcagcccgggtccgggagaccatggccgctctgcagtctgacccgcagcaacaggagctcttccggaacttcaaaagcatctctaaggccttggtagagcgaggtggcatggtcaccagcaaccccctcggcttctgagtgctccccgctggggcctggccaggcctgtgccttctctctccagcccagcctggccccgattctgccttaaagaggccctggccccggggcgctgctgctctcggaggcccacttacagcctcttaagtaaaggttctcacaagccacaaaaaaaaaaaaaaaaaaaa

SEQ ID NO: 11217 - DNA, 139 bp, Canis familiaris
ttcagcttcagcatcagagttgacagtgaagtaaatttgcatcagaactttgcatctagctcttacgcagtataaaagaaaattttgtttgcttttcaacgcagtttttgtggaagagagaagcatacttttaaatgga

SEQ ID NO: 11218 - DNA, 622 bp, Canis familiaris
gtgatagtgccttgacagtcaagctcttagtcagagaccattgtgtttgtgttcatacccgggtaagctggttttctcctgatgaaggaggaagaaagtcttagatgcttgattttcctcagtacccctgagaaatgtgcaatagctgtttaaatataaaccaccgatgagtacacttgcaagactgaatacaggactgaactatacacatgtactgtagaatgagtttttatttttaatacattaaagtaggcatcaaattttaaccccctagaacagattggttgatttatcaaaactcttatctggccaacagtgggaccatcagacaacattgaatattttcccaatcccagattaaactatataaaaattctaccccccaccccgggtcagtcgttaaacaaaaagaacaaaatgtaacaacaaaaactttggctgctaatgcttatgttttcctatttctattactgtaaaatcagaaattaatctaaaagtgataagtctacatgttgggatttaatgtttaggtaaaaaaagaaagaagaaagaagaaagaaagaaagaaagaaaggaagaaagaaagaaagaaagaaagaaagaaagaaagaaagaaaaaaaa

SEQ ID NO: 11219 - DNA, 538 bp, Canis familiaris
tcacatattggttattgtgtaaaaaaggggagaatggatatatctctggaactccctggatatctatctgtgcctacgtcgcctggggccccaaagaagccagccgggtatccggaaggctttgtaaatcttgttcggaaaggagacgatgtcccgcccagtaattttttttaagaatagccccctagaccataaagaaaggtaaagaaaccctagaacccaagcacccatagattcagcgtcttgttactccacgtgtcctcgcaacacaaacgtcggcgtattgctttgaagaaacagcgtatctaagagaaaataaggaagaggctgcagaatatgctaaacttttggccaagagaatgaaggaggccaaagaaaaacgccaggaacagattgccaagagacggaggtctgtcctctctgagagcttctacctctaagtctgagtccagtcaaaaatgagattttctaagagtgacaaaataaataagatcagacaccaaaaaaaaaaaaagaaaaaaaaaaaaaaaaaaaaaaa

SEQ ID NO: 11220 - DNA, 225 bp, Canis familiaris
accaggatttgggttttctagttacaatcgccacatcagaaagcaacgaaattatgcttgagggaggtccacaagcaaacggtgtctgagtctatttttctttaggtactataatggtttccaagaacaaaaggctcccttccacttggagagggtgccatggttgttaatgtgggctgagaaaggctcaaggttttcatttcccaggccaaaaaaacagacttt

SEQ ID NO: 11221 - DNA, 644 bp, Canis familiaris
agcagcatggtggtggagcaccccgagttcctcaagccggggaaggagccaggcctgcaggtgtggcgcgtggagaagttcgacctggtgcctgtgccccgccgatcgtctatgggaacttcttgcacggggcgacgcctgacgtcaatccgtggaagacgggtgccagttgagggcaacggggaaaccgtggcaggtatgaccgtccagcgtactgggctggggcaaaggaggtgcaagccacggagcgagagccggggccagcgtgccatacgcgtcagccggtgccaagctgggacgagctgaccctggaccggcccgggcccgggccaagccacccggtggaggttccaaggggcgtgcgagtcgggccacccttcgtggggctactccgaagtccggcgctcaagtacaagaaaggaggcgtggcgtcgggattcaagcacgtggtccccaatgaagtcgtggtgcagagactcttccaggtcaaggggcggcgcgtggtccgagccaccgaggtgcccgtgtcctgggacagcttcaacaacggcgactgcttcatcctggacctgggcaacaacatctaccagtggtgcggctccaacagcaaccgatacgagaagctgaaggccacgcaggtgtcc

SEQ ID NO: 11222 - DNA, 522 bp, Canis familiaris
atgtcagaaagggtggggaatttagcaaatagatcaggtattgacaaacccaatctcatgggctaaatctggccagccccctgtaagctaaaaatagtttttacatttttacaagattacattttaaatggttatgtaagtccccagttttgcccgttggcctgaaaagcctaaaatatttgctatctggctttttaagaaaacgtttgcagatcagagggaaaaaaaacatacaccagaaagagaaaagcaccagacggattcaacctaaaatgattccttactcataagaccttgaagtgagggatccctgggtggcacagcggtttggcgcctgcctttggcccagggcgcgatcctggagacccgggatcgaatcccatgtcgggctccctgcatggagcctgcttctccctctgcctgtatctctgcctctctctctctctctctctctctctctctctctctgtgactatcatgaataaataaataaaatctttaaaaaaaaaaaaaaaaaaaaaa

SEQ ID NO: 11223 - DNA, 569 bp, Canis familiaris
ccaggtgatggtgattacttgttgacaactggccgcttacttgcacggccgacgcaggttcgtgagcaggttacctagagtttcccggcacctggataggctcctactgccgtctgggtaccgtagtgatgtacctaggacttcgggatcatcatggacagcggggtgctaccactacattttgctgtctctccctgtgtgtgcgtctcattagagtttccaagtgatatatatttgtttctgataggccaaggtgcccttcttcgacccatgacccatggcctttacatactaatttctttcccgtcgaacacgtcccctctcttgaacgggttccccttcctttgtgctcatacagcgagcccactctgtagacggctgagccctgctcttcccagatagagcatctctccggctctattgtacgtatgacctaatttctcttgcctgtatatgagtctccagaatgcctacaaatagtttagtgtcaaataaaacttggtcagataaagctctttttaaataaagcttgtgtttccaataaaaaaaaaaaaaaaaaaaaaaaaaaa

SEQ ID NO: 11224 - DNA, 614 bp, Canis familiaris
  misc_feature (12)..(12): n comprises a, c, g, or t, or includes no nucleotide
agaggtcctacnggaacagcgaagttctcacaggcagcaaactggatggaactatgcccggaatgtgcaacgaggagttcttgagcccaccccacctgccaaccttgccctgcacacctcgggccccctggtgcctcctaaagccccccttcctgtggccccgacagctgtggctccaggcttactgaagatgtgcttgaacgggcccaaatccccgaggtgcagttgtgggctggccaccctccatgcatggagtcccacaggactgtgcaggtcacttctgagaactgactgcatcaaggcgctgcagcctcaccatatctgtggggagtaacgcagttcctgccgtttccttgaagaccaagaagtgatcatagtattagaatgagctctgctgagagctcttggccggcctctggggggtgcctgccccttcccggggtgctggggaggggccgccacaatgtttagtctccgaaaacacaaacgcttgtgacgagaatctcattaatgtactttaaattacagttgcttttttctcctagcttcatttttttgttgaaaaaaaaaatcccataaaatgattttgaatgttaaaaaaaaaaaaaaaaaaa

SEQ ID NO: 11225 - DNA, 600 bp, Canis familiaris
  misc_feature (209)..(209): n comprises a, c, g, or t, or includes no nucleotide
gataactggtggtaaatcctagagctaataaaatgccgaacggggcgctgaccccctcccggggggaatgcggcaattaatcagatctaagccaaccccggtcagcctccactccgggccccgccggggggcgggcgccggcggctttggtgactctagataacctcgggccgatcgcacgccccccgtggcggcgacgacccattcgnacgtctgccctatcaactttcgatggtagtcgccgtgcctaccatggtgaccacgggtgacggggaatcagggttcgattccggagagggagcctgagaaacggctaccacatccaaggaaggcagcaggcgcgcaaattacccactcccgacccggggaggtagtgacgaaaaataacaatacaggactctttcgaggccctgtaattggaatgagtccactttaaatcctttaacgaggacccattgctggaagatggcaccatcgtggctaccctcactgcaacaaacagggagcttggcacccggctccaagaggtagctgccctagaggggctcagaaaggacaaaataaagtgtgtgtggtggaaaaaaaaaaaaaaaaaaaaaa

SEQ ID NO: 11226 - DNA, 544 bp, Canis familiaris
ccccatggccagtcaggcaggtttgacacggaaattctgaccatcaccggtctgtgctcttctgctgggcaggtcgatccttgtagcagagggtaaaatcctgtcctaggcctggtggcctggttcctactgtcactgtgataactgtgtgttataggcacgacgtagtgttatcctttcttcctaatttaaatgtaggtgtgtttaatatgttcatgtctttctacatatgaaaacaatggcattatccctttactttgctgttttaagtcttgcttgatttttctctgtaagaataaaaaaacactttatctgcttgaactatttcttcctaaaactcatagtgaacagctgtggcaataaatgtgtctgattcttgtagaatgggtaccgaggtgagcaattagtccctaatcattagcatgtaatttgttacattaatctgggcttacattggtagacttgtgttcatcaaagagtaataaagacagttttcaagccaaaaaaaaaaaaaaaaaaaaaaaaaaaaaaaaaaaaaaaaaaa

SEQ ID NO: 11227 - DNA, 562 bp, Canis familiaris
attgaaatatatgtgcccactaagggcactctaagagtttagagttatatttgaagttaagccactttgaagaaaatccctggattaagtaaattggaacattagctgccccaggtgttttttttgctttgttttgttttgtttgtcgtgttttctgaatgttgtgtgccagcatcctattgaggccagctattgagaatcctttgggagaagataatcttgttggacagaagggaggtgagtttatggaatacggaaaagcttggggcatttaagtttaatctcctgtaattggtatcttacgattttgcagtttgtagtaaaagtacaaagaaaggtattgtttaaaataaataacttcatctgtgcatatctacagttgtcaacattttacattttattttaaattgtttgcttcaggaaaattcactgtttatggtttttcaaacagactgtgaaagtaagagtccatttttaaaaagtggagtgttttaaatattttttactaataaaaactgatctgtagcctcaaaaaaaaaaaaaaaaaaaaaaaaaaaaaaaa

SEQ ID NO: 11228 - DNA, 465 bp, Canis familiaris
taggcaaagaccaatcgtcctaactacgtgaaagaaccttttagctgatgagcttagcaggagaaactatgtttttttgaggctgattgagacctttgagctaaatggctgaagatgagtttaagatctgtaaaatgagatttttgtttttaactttcttttgtaatacttgtagttgggaggggttgtggaaatttaattatggaagaaaagaaactgtgccgttttgtaatggtggctggcatactttggtgatttagtggcaaatagatttcccaccagcctctattgattgtactaactgtaagcctgctgggaggtggagtccatttggttcataagctctacctgccggtttggaatctaatctcacttcttagcctcagtaggctggctcagggccttctcattctccagctctcagcccaaataaagctttttttttcctggaaaaaaaaaaaaaaa

SEQ ID NO: 11229 - DNA, 477 bp, Canis familiaris
  misc_feature (1)..(1): n comprises a, c, g, or t, or includes no nucleotide
ntctgtatatattagggatagtgtgcactttgtcgatattattcaagagtgtttcccttttgagtttgtttatgggtaggcttggtttggccttagagagcaacttgatttttatatagtcagtttcactcattctgtctcattggggcttttatcctgttatgtttatccctaaaggcattcctccttctgatatgcaaagtaaaaattattatttttattttaaaactttgatgttgggaatccctgggtggcgcagcgggtttagcgcctgcctttggcccagggcccaatcctggagactcgggatcgaatcccacgtcgggctcccggtgcatggagcctgcttcttcctctgcctatgtctctgcctctctctctctctctctctctgtgactatcataaataataaaaaaataaagttttaaaaaaaaaaataaaaaaataaaaaaaaaaaaaattaaaaaaaaataaaa

SEQ ID NO: 11230 - DNA, 621 bp, Canis familiaris
gttcgtaaggtctgggtcccgatactgtaatttctagatatttattgtgcaaaccacacgggccatttaaatgttagaattgcctgagaaagttctgcttctttaaggattagcacagatggcacaggttaggtttccttactgtgatttccagaataaatccttttctaaggtggttatatgatttcccaagctgagtaagttcaagatcagcttaagctctgccgttctgacacgttggccactttgtcatttctaccgtgcaccataaaattgtttgatcagatcgcactgaatgcattattggaggtgggaggggtgtcagttcatgagtcccccatatacctgtctcttttcttctgagttgaacaacttagccacaaccctcaattgaccgttttgcttcaagatgtgtctgccttttatgaatttgtacatacgaatagaattgttgtgttgcaaaaaaaaaactgcatacattttatgtgagtagaattttgtatgaaagtttatcaaattgtatcataaaatttatttttattttatacataaatcattaaaaacaatcacatattttttctataaaaaaaaaaaaaaaaaaaaaaaaaaaaaaaaaaaaaa

SEQ ID NO: 11231 - DNA, 466 bp, Canis familiaris
caatgcatctggatcacaggatcagagagctcacagtatcaggaaagccttgaatgcattttaagtactatcgggtctttttaaaaggtgataccaaccgatctccacgtgggttctagctgcgggaaatgtaatactgatttaaactaaccacgtgacttcctgtaacccacctgcacaggcattttcatttttagatattttgttccacattgttatttgactaccaatataaagtctaagatatatattctgggcttatacttaaagctaatgtttttgttttttttcatttcccaaaaaaggacaagtggttcaactagaatatatgaaagtaatttctgtattttgaatatttttgaaacaaatctgtatgttttggtagctcagattctgtattaaagggaggcctcagaaaaaaaaaaaaaaaaaaaaaaaaaaaaaaaaaaaaaaaaaaaaaaaaaaa

SEQ ID NO: 11232 - DNA, 565 bp, Canis familiaris
agtgcctgagttatacatctccagtggtgctgccttattgccaggactacagtggaggatttctgcatgaagattcagtggaaagtgcgtgatcaaagaatttaaatacgctttggtttggggtctgtctgtgaaacatgatcctcaaaaagtgggtaaagaccatacgttggaggacgaggatgtcattcagattgtgaagaagtgaaaccttctgcccatctgctgggccaaccatagcagcttttcccgtgaccaagcaccctatcccaaaccccttccggctttggcagccagtggatcaggattcaggggagggagatggaggccctcaaactggaactttacttgtcttatcttggtgtccccttataaattcaactgcataaaggacctggtaggccagccagctatgtgcagctcatgtgtcattgtcagaatttgtttggggatggactgaatgaggatgggtatatacagtgaggtagctgcagaaggggttacttgggagcctggtcttagatgtgaaatggattacaatgtgactgcaatatctcagttgaaa

SEQ ID NO: 11233 - DNA, 559 bp, Canis familiaris
  misc_feature (191)..(191): n comprises a, c, g, or t, or includes no nucleotide
  misc_feature (202)..(202): n comprises a, c, g, or t, or includes no nucleotide
ggaatatcaagtagttccagctttaaggatttattccctttgaatcactcgtgaatcaatgatatgcagtggttatttttcaaaattaatcttttattaattgacagtgatacatacatatagtttccataaaatttcttttcttaagaccaagaatattgaaggcacgatcacaaaggctaaggtaagangttcctttccntggtgctaaatgtggtcagtttccttaacaaattaagatgtattttgtattttaaatgtgtaagtagaattcaatcacctggaaatgagtctacactgttcatacctttcgtgtatgtgaatgtctttttttggtacttcttttgatttgttaactttattattttcttctttattgaccaaaatttgaaaataaaattcacaatgtaataccattgctattcagaatatttttagacagttcattgtttttgacctttaaaagcacccacaatgttattagccgcagaataggtggaaataaatatgaattttttaaaatgcaaaaaaaaaaaaaaaaaaaaaaaaaaaaaaaagg

SEQ ID NO: 11234 - DNA, 572 bp, Canis familiaris
agtgattccctctactggttcctactcccatcaattttgttcgagatccggatgatgacagatacaaagtttcaacagtagcttgtaaagctggcttggaatattttgtgctgctcggctattagcaagggggaaaggccctgccaatatttaacttttaaaagcattttatctcaaagacaggctacccactagggcccagttgctcccttttccctcttgttttatggtcagggtgaaacacacttctgatgtaataagcctaattggatttcgatgtctgtgtggctgttgcccttggttctggctgttctttgctttgtccaggaggaagcctgcttgtcaaagctggtctcctcaagctttccacactggcccaggcagagtatctcccggcctgagcaaactgctggtcagaaactgcccaaacatgattaatggggttcccgcctactgtcccctctccctgagtactcccactgcccaggcggccgggcatgggctctggcgtctcctggtttcctctgtggtaataaacgctttctgtgatggtcaaaaaaaaaaaaaaaagg

SEQ ID NO: 11235 - DNA, 700 bp, Canis familiaris
ggttcggtctttagcacattctggtggtcaggcagttttccaagcttgtgaggccaccttgttcagatatatggtatcgaagtcgctatgccagtgaccttattctgtgcatcgaacagataactgggtagcaagtagaaaaggaattgttgagaggtagcacaatcttgaagggacctaaatggctgcttccattatggatccctacataagcgttccgtgaaagtgaaaagcctaaatgacatgacagcaaaagagaggttctctcctatcacatccaacctgatcaatttgcttgctgagaacggtcgcttgaacaataccgctggagtcatttctgccttttccaccatgatgagtgtgcaccgtggagaagtgccgtgcacagtgaccaccgcgtctcctttggatgaagccactcttactgaactaaaaacggtcctgaagagcttcctaagcaaaggccaagtattgaaattggaagttaaggttgatccgtcaatcatggggggaatgattgtccgtattggagagaaatatgctgatatgtctgcaaggaccaagattcagaagctgagcagggccatgcgggaggttttctgaaagtattgattatctgtcagtgaaaactcctaaaacttggagcaacaataaaatgcttcctgaacagaaaaaaaaaaaaaaaaaaaaaaaaaaaaaa

SEQ ID NO: 11236 - DNA, 539 bp, Canis familiaris
ttttgccattagggatgtcccagtcaaatgtactattttaaaataacttagaatagtggttatgtttcaaacttaaatcaggtatggttactttattttgcttaaaattttagatttgcttgttttattttaattttttttataattatgtaaactatttacatggctccaaagtcaaatccacaaaatgagctactttcagagaaatctgtatcgtgacccagtcccctccccctccttcttccttagataatactttttttcccatttattcttccattaaaaaaaatatatatatatatatagacgaatgataaatgatagcacagtatttcacactttccttggtcttgctttcttttccccataacaatatactgaatatcattccatagaacaagatagaatgttctcctattaaatgctccattatgaggtcatacataccattgtttattcaaccagtcacccttgattgacatttgggttgtttccaatcctttgctattaaaagtattgcagcaataaaaaaaaaaaaa

SEQ ID NO: 11237 - DNA, 471 bp, Canis familiaris
cacctcaaattgatgttcagctgcatacacgaatacggtgatctcgttcgagaacattgttcgttctgttctttacccatgttaccatgtctgaatgtactctgtcaagctatccctcctaagcagctgtcttcctactgttgttaagtgtaattctgatgaagctgaacgtagactgaatgtgaagtctgagcacggaaaataccacatgacatccctaccattttagagtacgtactttttttaatacctaagacctctagaaatgaatgtatcagagaatgtaatgtaaatctcttactttataaaaagtccttcactttggggagggacatgggaatgctgcatttgttggcctctttctttctgaaaggacctttcctctgcttacccttcaacatgcttcaattttatcaacgctatgttttgtatttttcaagcaagtatcaactctgcaataaagagatgtag

SEQ ID NO: 11238 - DNA, 637 bp, Canis familiaris
  misc_feature (5)..(5): n comprises a, c, g, or t, or includes no nucleotide
cttcnctgtgtgagccaggaatggggcacgctctcctggcattcatgttctctcgacaagagggcaagctgaaccgccagcagaccatggagcttggccatcacatcctgaaggcgcacatcttcaagggcctcagtaagaagacgggaatctcttcgagccacctccaagccctgtggatcgggtacagcaccgaggggctgtctgctgccctcgcctctctcaggaacctctacactcccaacgtgaaggtgagccgtctcctgattttgggaggggccaacgtgaactacaggacggaagtgttaaataatgccccgatcctgtgcgtccagtctcacctcggccatgaggaagtggtcactctgctcctggaattcggcgcctgcctagagggaatgtccgagaatggcatgaccgccctctgctatgctgcagcagctggccatatgaagctagtgtgtctgctggccaagaagggggccagggtggaccacttggataagaaaggccagtgtgcgctggtgcacagcgcactgagggggcacgtcgacatcctccggtacctgctgacctgtgagtggtcagcaggccctccgcagccgggtgcgctgaggaagagccaggcccctgcagc

SEQ ID NO: 11239 - DNA, 551 bp, Canis familiaris
tgaaactgttctccgttttcacattggaacaaccttatgggtttgggggattttcttgtagctctgagatgatccctatagtattagtatctatgatcgcgaaattttgagctgtcagctacatgttggtaagacacaagcaaagtattactgtaactaagttatttttaaagttaaaatatagtttttatgtgcctttggctttttattgcagagtctacattttatagatattacatccaatgttgtcatatgacttgttaccattggggctccattgtaagctgtgtatgtatatgtttggaaaagtgtattcatacttagctttatttctttttcttcatctgtcagcatacttttcacagcagcccagcaatggattgtaaagtagtaaaggcagcaggctagctcatgatgcttcgtgcagagagctgtgggctacacgcatataatgttatttggaaatataggtattttagtacagtacatacttgcattacataggtacttcatgcaacacaataaagagtaaatgttgaaatgaaaaaaaa

SEQ ID NO: 11240 - DNA, 511 bp, Canis familiaris
ttaccccaggctggcaccctagtgtttgtcgtcctggctaccaaaaggaattagatcactacaatagttttacacaaagatacactttcaaaatctgatgactataagctaaaataaatgtgggagtgtaggggaggtggatgtcaacaatccccatagttggctcttgggagttgtgaaggagggtaagaatcttaaagaccaggtcatcgactttgaggggaggggcttcatagattctcccaggctctcacctgttgccccttagccagctctgctgtcctgagacccagaagtgatggagagaaaccaaccagagaaaaccctatctggaaggaatgtattctgttgctaaattttgtagcactgtttacagttttcctccatgttatttatgaattttatattccgtgaatgtatattgtctgtaatgttgcataatgttcactttttatagtgtgtcctttattctaaacagtaatatggttttatttctatcaccaaagtatac

SEQ ID NO: 11241 - DNA, 278 bp, Canis familiaris
gacctgacctgatgtccattcatcccacccgctcacagtgtggggacttttctcccctctttttctaaagagaccctggaactgggcagactgcaaaataaattcgggttctatttatttatgtcttcctgtaagacctttgggtcgagagaggcaggaactaactggtgagtcaacgccctgagtgactgtcccagccaggcaagatctcccttcaggtgccgggcaggaactgcgggcacactgtgctattgtcacactctgatttaatcatgata

SEQ ID NO: 11242 - DNA, 676 bp, Canis familiaris
taaaagggtctttccaacgacaagcataacgagtttctcagggagctctcttttgggccggatcttacagctcctgtcggaggtggggctttccccaccatcagcaccagagagccttgggatggcaaggatggcgagcttcccgtggaagacgacattgacctcagtgacgtggagctggacgatttggaaagagatgagctgtgagaggcttggcacaagacttcagttttcttttcttggggagcaagatttctccagcagtgaaggaaccattccttcacaactcagattgagtcctaccagtgggcctttttaacccaagaagtagcacttgattgggtcatgtgaaaacaccggccaaccagtgaactttgcatcctcaagaaacaatgaaaaaattcctatgaattgttggtaagcccagccggaattggggttgtccttatccaagtaataattttggagggaaaacctggatggggcctggttggacaaacttgttcccctcccctctgactgctggcttgaatgtttcttgggagggctgtttctaatattaagttttttaatgtgattctttcgttggaaatattaatggcttttttccattaaaaaataaaattaatattttggacaatgccacatttaaaaaaaaaaaaaaaaaaaaaaaaag

SEQ ID NO: 11243 - DNA, 610 bp, Canis familiaris
cggttcggccgaacacttgcagaaattaatgcaaaccgagctgatgcagaggaggaagcagctacccgaatacctgcttagctcccagataggggatattgtagccttagtggatttggggaagtctctaagtagaacctaagactatttgcatgtttctgtctaaatgttaattaaaaggaaatttcgtggatttaaccatggatttaatgcagcaagtaaatcgttaaaatgtccctttttatataacatgcatcttgttttgaatttgtgtcatttttaatacagattgcagccttttcgtgaattcttataaacaggtgtatatttggtattagttattctttttaattcttttcaacttataacactatacaagttatttctaaaatacagattaagttctgcatattttgtaaatcacaagtccctgttatactgataatgttctcactaaccataatatgtaagaacattatttcttagccatagcatgcatacatctatccaagttccattctaatatcctttttctttataactcatgtgatagctgtctataaataaaaacaaatatgctttaaaaaaaaaaaaaaaaaaaaaaaaaaaa

SEQ ID NO: 11244 - DNA, 333 bp, Canis familiaris
aggaagaagtcttgtaaatcagctgctaccccgtttctccctcccataaaagagtctctttctccatcttttcggtgcttcttaattcacacagcttgatgttagagaaagtaaaggacctgtgaagtcactaatgtgctatgtgactttgtgcaagtcactcacctcagcgtgagccacctccagtttctgcatgctgtgagaatgggcataacaataatacataaccctacctacctcacagggctgttgtgaggatcaaatgaaataacgtatatgagaatccaatatacatgataaatggtgttgctaaaaaaaaaaaaaaaaaaaaaa

SEQ ID NO: 11245 - DNA, 552 bp, Canis familiaris
aaggctgatttgggtaaaatagttctcactaatcctgtgtgcacagaagtggggagaaaaaattgcccttagccgaagagttgagaaacactggcgtttaattggttggggtcaaataagaagaggagtaactattaagccaacagttgaagatgactgaagaatattatttacataatacgtctggatgaagttatagtttctgttaacaacctgggggtataatttcaaagcaatactggggaatatatttcatagttcattaccttagtagaagttgtaaggttattctcatctccttgttatgaagatttaacttcaaaataatagaatctataatagttgtcaaatgggcatattaatgggttcaatcgaacactttagcagaaactgattattgctaaatggtgtcaaatttatacatcacttcatgtttgaaatgacacacctgttaaaaccagcctttgctaaggccatatatgtaccacactcaacctgtttcaaataaagttttccttcttacttttaaaaaaaaaaaaaaaaaaaaaaaaa

SEQ ID NO: 11246 - DNA, 590 bp, Canis familiaris
cttcccgaaaaccttatattccacgaaatgtagaactatttccccaatccccatggtcacagtgggacaatgttgatttcacacagtttgttgccgtgagagggattatggtgaacagaagcaggcgtttgccctctggagagcctacacatacaccgcacaacacacgcccctgaggaatgaagaaagtacacattactagcccaatggtttttaacgtatatttcttaaggtaacagttattcttcccttgtttacaaaaccatagccactgcaagagtagtagggcaagagtcaaggtctttgatattggtcttttggttaacaataaacttagcttaagtagactgttacagttgtatgaatttgtaaaagtattatatgagacaactagtgaggtgttcaaactcttgtaactgtagttgaatagtttttgtattttcttgtgaaccgtgtttaatggttttacctcaaatcagaaaacaaaatgaagtgctttggtcagttaataaaatggttttaccccagtaaaaaaaaaaaaaaaaaaaaaaaaaaaaaaaaaaaaaaaaaaaaaaaaaaaaaaaaaaaaa

SEQ ID NO: 11247 - DNA, 607 bp, Canis familiaris
gaagaatcggtgctaacaagctggcggtgagagccgtgaccagaagcgtttgtgaaatgcacaaaagcgcggagactgaagaagaggaacatgcggactctctggattaatcgaatcacagctgcctcccaggaacatggcctgaagtacccggcattcattgtcaatttaattaagtgccaggtggagctcaacaggaaagtacttgcggatctagccatctatgaaccaaagacttttaaatctttggctgctttggccaaaaggaggcgactggaaggatttgctgctgccctaggggatggcaaagagcctgaaggcatattttccagagtggtgcagcatcactgagggggattccaacattgcctgccctttgtagctgaatgtcttaggaaaagtgtttttccccctgataatcacagtggttaacataggggctaaaagttatgtcaccatgtgtgtaagtttggtcagcaattatattagtttgcattttagtgacaggtgtaagagaaaggccccttcttcccttactgggacaaatctagaaatcttacacagatgtgcaaataaagctcgtgtggtgttcaaaaaaaaaaaaaaa

SEQ ID NO: 11248 - DNA, 445 bp, Canis familiaris
accaaggtagaccattatcctgagccatgtaaccaacttcaacaaatgtaaaagtaattgaaatctgcgtatgttctctgaacataatggaatcacgctagaaatcaatgacagaaagataggtagaaaatctcccaacacttgggaactaaacacacttttaaatgacaaataggttaaagagaaagtcttaaggaaaatgaaaaaagggcagcccaggtggctcagcggtttagagctgccttcaggcccagggcgtgatcctggagaccagggatccagtcccacgtcgggctccctgcatggagcctgcttctccctctgcctgtgtctctgcctctctctttctctctgtgtctctcatgaataaataaaataaaatcttaaaaaaaaaaaaaaaaaaaaaaaaaaaaaaaaaaaaaaaaaaaaaaaaaaaaaaaaaaaa

SEQ ID NO: 11249 - DNA, 683 bp, Canis familiaris
aaaggctatcacaggaggcagaggtctgcattacatgtaactgaatttggaaaaatgcacaaatatgttgtgactttcttgttgaaaagctagatagctctgttgttattagccaaccccagttctatcatactccaggttctgttgagaatcttcgacgccaagcctgtcttgttgctgttgagaacgcatggcgcaaagctcaagaagtctgtgaaccttgttggccaaactctaggaaaacctttattaatcaaagaagaagaaacgaaagaatgggaaggcccaatagatgatctccagtcatccagactctcaagttcattaactgtccaacaaaaaatcaaaagtgcgacaatacatgctgcttcaaaagtatttataacttttgaagtaaaagggaaagagaagaaaagaaaaaacctctgaaattccaaccgaaatgtttgtataattttatttttatactttttatgtttgtttttgtcctgaaaatatatattgtgtagtatatagtatttctccccaaaatctgtcaatcctggaatacagtcccacaaatagctaagtttactttctatttttaaaaacttactatgaaaaatgctctgaaaataaatgtgttatacgtgcacaattatatactgataaaaaaaaaaaaaaaaaaaaaaaaaaaaaaaaaa

SEQ ID NO: 11250 - DNA, 512 bp, Canis familiaris
cctggaccttcccacgctgtggacccccaccttcgtcgttcacagcctcttgctggcgcaacagagctgtgccacttctagacatgtcctggcagggggacacaggcactctggcacagacccagctccacctgatggtgagagctccatcacccctggccccaccaccacggctcctctcagagaagctgttgccaagacctcaagtccttcagaaccagaacagggtggccatcaggatggccacccttccataatcctcctttcctctgctccccagaccttgccatttggaaacaaacatcagatccttgccccaccccttgcttccagaaagggtcttgagcccataccccaagtctgacaccctcctcccctcccgccgcctgccaggacactctagcaggacactggtgctttgccgcataccctactgtgctgcacttctttcccaatttttcataaatataaatgtatgtatgtatgtgtaataaaaaaaaaaaaaaaaaaaa

SEQ ID NO: 11251 - DNA, 481 bp, Canis familiaris
  misc_feature (51)..(51): n comprises a, c, g, or t, or includes no nucleotide
aggatttctaacgcagaagttgaggagtttgggtttgggggggttaatggnctagctgttaggagagacataccgatcactaggtggcaaaccgagaccttaccggctgccaactcttcattattgtaatctcaaagcactaacctgcttcaaggcctcgtgaattaagagcaacacctgtgtagtttgcaagcaacggtgtcaatagcatttcagcccttttgcaagccatgtgtaatcacaactgcagaaatcaggagaaaacccggttttttttagttagctagttaggtgtgtgacgtatctgggattgctctgaacggagtctgagagtctggggcttctgtaagcgccctccccacgtgccgtggccatgtcttcttccgatgccttgacaaggccgccgggagctgtggacagagccagttgctcccacccgcagctgccaggggtggcacctgtcgcccgagccacttgggtc

SEQ ID NO: 11252 - DNA, 580 bp, Canis familiaris
tttgagtgctgagccacgtgttaaggaaagaattgtgggagaagcgctggtttgctgggagaacatggacgggagccttccttggtgcctggacgagatctgtggattgccggcgtgatttctggagatgaattgctcagcaagtgatccagaaagtgaattttaggccgatgacagcagcctgacttgaacagagtgtggcccaggttcttcagtctggccaaggaacaaattaaatggtcgttactgaaatgaagctgtgcattcagggctccctggcccccagagcgatttccccgatccgggcaaaatctcaaagatccagggaacaggagagacccatctgtatccctaggccctcccagaactgactcctgaggtctctggccagggactctgagatgcaaagatttggcttcagtactgactcaccccttctcactgcctggcctgtccctccagccacgagaaccagctgagctgccttaactcagaccttaggcattcctctccccagagccctaataaacctgctttgtctcctaaaaaaaaaaaaaaaaaaaaaaaaaaaaaaaaaaaa

SEQ ID NO: 11253 - DNA, 550 bp, Canis familiaris
ggtttgggtcttgggttcaagtgtatatattcctataagtttcttaactgcattttgatgaattcacatgtatctataagagattgtcccccaagtacctgtacagagatttccaatataaaccaattgactaattatgtaaacactaaaaatttaaaatattgcctaaattgcatttgcaataaacagactgaatgaacatcacttttttcatgaaaacttggtgcaaattcagatctcttatttaaattttaaataaggtctaattttcaaaatgcagtagtttcaaaatgtgatctaaggtaacggaatcaaatgtgatctagtgtaatgaaagatctttgagaacctgggtgtgttagctttctgtatatagtgtaaatacccccactctgctgttggaggccaacagttccactaggacttgttggcaaagagtgctacaccgtttcaatgaaacaatgtatgtttgttttaactgaactaaaataaatacatgcttaatcctgaaaaaaaaaaaaaaaaaaaaaaaaaaaaaaaaaaaaaaaaa

SEQ ID NO: 11254 - DNA, 587 bp, Canis familiaris
gcacagaagatgatttgcacaatgaagtcaccactaaaccactgcttaagtccagtccccgaccttctttttctgctctgtagtccagaaacatttctttaaaagccaggaaatctgtaaacgtgagcagcatgtcaaatatgtcgcctgccacttcatctttatggtgctgtaaagttgttgtgaaagccgccatgttaaacccaggaatccgctccagcagctgttcttcaatatacttttctaccaaagaaatatattcattaaaaataggcgtgtaggtgagtttattctcttctgtgtcttcaaactcctgatagtacttgtccatgaaattcctctgtagtaactggaactcgtcatccatgatgatgtcctctaaatatccaaccacagcgtcgaattctgcatcagaggcagaagagaacgacagcgcgaagctctcttcctctagggcgtccatcgccgccgccgccgccgccgcatccacccgcggggcgagcgcgcccgtcggccttaccccgcccgcggcccgggcccagcctccgctctgctccgtagagccccagcccgcatccgggaggcct

SEQ ID NO: 11255 - DNA, 596 bp, Canis familiaris
taaagttagagggcagtaaattcattggttgatttggagtttttctatcttacccaaattgatgatgaatcagtttggaacatggtatgttttcatgggaaactgaattggggtgggtgggctgctagctctaatgcctcaaacctgtgttaacccatagttcaattaaatgatggaacgctggggaccagaccttcctgagcactatttcacttcactgtcccaaagacctgatctaccatagggtcttggctctgaggggcctgagctcatgaatttagacagaaaaagcacagttttcttgaacagcatggaacttctcattaagaatgctcctgttcattgtctcgattttcttgatgaaaattaccctacatattatttttcctaatgacttctggatccagacttgggtgcctgccccctaaagtagtatttcttttctcttgtgttagaaacaacatgtatgtgtgtcctctgtagtctacatacctggatttataagcttcctaatttactgattctggagttcctgaaataaagtcagtcatgcttgagcattaaaaaaaaaaaaaaaaaaaaaaaaaaaaaaaaaa

SEQ ID NO: 11256 - DNA, 637 bp, Canis familiaris
taaaagatgggcactaaccagttatctatgaattgttcaaagttattcttagttaccgaatcaacttcgtgaatttgattccaagttgcgtattataagtagtcttcgaaatattatgtttacctgcacctgcccaactaatactgatttcgttttctgttcaaaaataatatcacacattatttgaccgtgcctaagttcgctaaataacatatgggtggattgttactaacagtgcttgttttaaaagtcatacttattaaaacaatcaaaacatttttttccactaaggtattttctcccaggtagcttgatatagcagtaaaatttgaaagttacaaattgaactttgtatctaatttaagtaatatatgtaagacttgaaaataaatgttttatttcttatatgaagtgttaaattaactgataccagatttcactggaacattttcaactgataatttatcacaaaagagcatacttgtaatactggaattaaaacgtgaacacttgtcattcagaagttctttatttttgaaatcaagtttgtaaatgtcctttcaagaagggagatacgaatcgtataaataaactcaagtcttgtctaaaaaaaaaaaaaaaaaaaaaaaaaaaaggg

SEQ ID NO: 11257 - DNA, 614 bp, Canis familiaris
tccctccgccgacggctcgaagtggcgcacgtgcacgctccgaccaacccgaggagccacctgctcatacagggaagcctgagaagcccccgtgtccccggcctgtcccctccgtgttaaggtccccgaaacccccctttcccttccggggggtcgctgagcaccgcctcccctcccgtgtgcccctcacagcggagacaatcccacgggactcttcagttagccttcttcacgcccccgaggtctgccagcgacctcgtcgtgtgagggccagacggacggaagccagggtccaggggagttttcagccctaacccctgagtctccccctccccgctgctcggggtcagacctgggttcccgtggcctcgggccacggggctcagcacggacagactcgcaccagcgtctccagcaaacagcaggccatggcgccctcaagcccgcgtcccctgagccccgagaacaaaggtgctatcctgcagacccccccgtctactcggaagcctgggccctgggccttcggtggcacaaagcgaggtgttgctttttaaacaaaaaaacaaaacaaaacaacccaaaaaaaaaaaaaaaaaaaaaaaaaaaaaaaaaaa

SEQ ID NO: 11258 - DNA, 564 bp, Canis familiaris
  misc_feature (1)..(1): n comprises a, c, g, or t, or includes no nucleotide
ncccaagaagtccagagaataggcacaggaataggaggtgggcagcttagtggacgggctgtgtcactccaccttccgggtagagtgtcaggcttctgagcagtcagcaccccaggagccacccctggagctggctttctgctgcataggctctggaaggcagggtgggaggccgtgcttttcaccagaggactcccccagatccagtagtaaagaagtagccaggctcgtaggcagccacctaaggcagactctcaagaccaaggcaggtggagcccctttctctgggggggaaggggtcctggaactgttcaccccctggaccacaggggacaggtgcctatgttctatgctggcccctcttcactgtgcacactgccctagaccatctagtccacttcctgttctccccaggactcagagaaccaccatcatatcacataaatcaggacgttaaagttcattaaaggacgcagaccctgaaaaaaaaaaaaaaaagaaaaaaaaaaaaaaaaaaaaaaaaaaaaaaaaaaaaaaaaaaaaaaaaaaaaaaaaaaaaaaaaa

SEQ ID NO: 11259 - DNA, 407 bp, Canis familiaris
  misc_feature (349)..(350): n comprises a, c, g, or t, or includes no nucleotide
  misc_feature (400)..(400): n comprises a, c, g, or t, or includes no nucleotide
cttggtcgtgcgcaggggcaacagaccttacttgtgattagtcagagtgtccaacagggtcttggtcctgcagtcggtctgcagcatcctgaaattcaacctgacctcccagacgaggtgggtggccagggcctgcagcgtgctgctgggggctgtccagcagtgctactcggtgtacctcgtgctgtccatctacttcgggcaccactccggcatctgcacctcgcagaggtaaggccaattagtccaggtctcctgcggtggcaggctgaggaccgtcttcacgccccagttgatccacttcagggtgtgagtactgccggtcttcccgtgcgtggtgttcagcggnnggagtaccgctcggtgaccacgggcggcaggctgttccgcgtcaggcctngctaacg

SEQ ID NO: 11260 - DNA, 410 bp, Canis familiaris
tgtctgctcctgctgcagagcagcatctgggtgactaaggatgactttgtttgtacccaggagacaccttcggtcctggagggctgtgcaatgtgaggcctccaacccatatgagtggagagtatggtctacagtcaagcctccttggacaaaaagtcctgtctataccatgcattaagtagacctttctcctgttagagtggccttacaacagtgaatttcaaaagtcttgggttctttcaattttcagtagataccgactagatgcatgcagatgtgcaagcttcaattatgcttctgcagcccttagcctagagttgattctgtcaggaaaaaggaaataaacaaccaactgaaaattagaatagattagataaatttcccaataaatttattttcaagaaaactgt

SEQ ID NO: 11261 - DNA, 589 bp, Canis familiaris
aggtggagtaactgcagctgcaggcctccgtgaaagtgttcaggatatggtccatcctgtttccctattacctgtgcgtgatcggggctgtgtcttaagctggcaacctcctggtacctccacagtagaactgagtggtgatcctgtttggacagcacgtgctgatactcaaggagcaggtactgtttcgctttgttatagaggaaggtgtgcactacaggttaaaagcagtaaaatagtcagtcctgactcctctgtgtgctgatgggttctgtttgggctacaactcacgcctgtgtcttccctttgcggcggccaaccaaaagcgtgtgtggatcaggtttcaagccttagtttccgggctcctccggaccgcggccttgaccctgagaaaggttttctgcccgaacgcccacagttgccacagacagccccggtggggttgggtcctcgacctcggtcccctaggtccgcgagaggccgccagggtcgaaccagccagctgccagatcagtaactcaggttgggttacaatgtggaggtttatttggcaaaagaagagagagttatttgtgactacaatgttgag

SEQ ID NO: 11262 - DNA, 578 bp, Canis familiaris
tctagggactcgcctgagggtttgatttgtttgcccagtggcagtaggggactttagttggagttaacttggcagttggtttctgccttaactctatctctgaccaggtggtaggaagctcatttctctcaggggttaggggcctttctgaacaacgttatccgttctcgcttggcagagtgtcatccataatatgtataagctcccatagtagaaggaggaccagtacttgttaaaggagaggtcgaaggcccagaaagcaaaaatatttcccttcacatacagtttcccctgcttttttaaactctcacctatagagaaccacacgaacattccaagagcttcctgatcttgagtccttcacttaacctgaataaataaaccctttgaaaagggtttttgatattaaaggcctttttttttgtatccaaaaaaaaaaaaaaagcagaatctcctttatctgaactttagcaaaaagaacataaaaaaatccttaaacttaaacttttagacacttaggagcatattatttatttcaacttctcacaatcttatttttttttttttttttttttttt

SEQ ID NO: 11263 - DNA, 506 bp, Canis familiaris
aaagaataagtatcagatttataagagagagagagagcgagagagagagagatatatatatatatctctatgatatatataaagatctgaatacattgaattaaatttgaagaaagagccaaaaagaaaaattagcaaagtataaactttagaatgccacttaaccgttctcctatggatggtcgatttgcaagacagtattaactttgctagtttaggtataactttaggtttaacagcactgttagtctgacctacttttctgtaagaaagcagttatagtggattagtagaccaagggtgacagtaaagactgaaggtttagaggatgccactcaaattagttctttaagccaaagaattttctagtgaggcacagatatgcagtactgaaaaacctccaggttgctaaagaaacatcaaagtcatagtcagaaaaaaggtctgaaatcaagaagtgttagagtccttttgaatctagaaagctccaaacatgaagttttatt

SEQ ID NO: 11264 - DNA, 604 bp, Canis familiaris
catctatcctacatccctctcaactcaccgaaccacactctcacgtagtttgtacttgatagaagactccaagtaggaaactttgtaccaacgatatcccaaatacaagaaccaaggtcaagaacagccaggcagggtgaggaggcaaatgctttaatgaaggaggaagtgattgagtaaggttcaccactttcttgctgccactcttacagaatgccagggtggacagagtagagtcaggtgtaacaaatagcagttttctgcctgaccctgtgtagtcaagacaggtaaattgttcagtttatgataactcatcagcaataagctctgctgaagactcagttacgcacctcacaatttggtagcaacaggttttctgatcttcatggatgatgcatttatcttttacatagggtaaaggacagagacaaaaacatgatctgtaaaattgaatcatcgttaaactgatgagaacaacttgtgcttttattagaattgtttataaagtttacaaagggtttactagtttaaagataatacaaagataaaaaatatttttaacttttatttaaacttttatgcaaaatttttttttttttttttt

SEQ ID NO: 11265 - DNA, 529 bp, Canis familiaris
tcatggggaggcctgcacgggagtgttggcgaggccacacagtggaaaccagggtaagcaccactgccacagtgcttcattgactatagggatcaaaacaaccccctccactaggaggtctgcctaagagtgtcagtagattgtcagactcaaggaattaaattgctctacagaacaggagcttaaagcaagaaaacaactagccaaatcaatcagacaaatcccctagtatccgtaaggctcctgtgtagacttttatttacaaaaaagacaagaacaaattttgtttatcttgtttcagtcctaagtatttgactgaggcctacttcgttttagaccaaccaaataaaaagctgggaaaagcactccacatccgattagtattacagtagaatttgtcccttattccttatgtttgctataaacaaggccaaggacatagggtagactgcttggccacatactctgaccgctctatatttaggaggagtttatttggttattacatcttattttttttttttttttt

SEQ ID NO: 11266 - DNA, 481 bp, Canis familiaris
cggcgaggtcccactcctcaacccagaggcagttagcgggcccgttcagacttacaaagagggcttcagggtgttggcttggcagcagaccagttgcggtaaaaggtggtcttggtggtgttcccccaccccgccgcccaggacctgcccctctctgggtttcaaagcaggaaccaggtcgtggctgcagcccgtcaccagtcagagcccaaagtgttgctaacctcgaagatgcaggccccttgggtctccgctgcggggtcctctttttgcccaagagggctgggtccaaccagggcgggtaccctcagcctactcctcacctggcaactaaaactggttgcatcgaggagcagcaggttggactctggtacctgccgactgcccagcccaggggagcactgccctcctgccgaggcacggggagtcctgtataatttaggtgctaaagcaagtttttttttttttttttttttttttt

SEQ ID NO: 11267 - DNA, 635 bp, Canis familiaris
gacaaactgcgtgcttggctaattcgtgaaacactgggtgcacacaaaagggcgcggtacatctgcaccagacggtggaggggcaaacccctcctactgctcctgtgtgccaagggtaggcttggtaggcgtgcaacccgaggttgtcgtctaagtccactgagtcgaggtgcaggtcgtaaaggtttgtgtagtgcagagtgtggcaaggctctgtcaactgaaaacaaaacaagggtgctgtaaacacctgctgagttggttctaacaactctcactgtagtgacatcctgaggccaaaaattccttgttgatgctcaagtaaggactagagttttctcagcttctgagttcaaagctacacttgttttcttagtttttaacatagttaagaagatgcctgcgttaagggaagacaatacttgattataaaagtggttttcagtagggcagaagtctatcaaaacccacccacagtcagcagcaagttagaacaaggtggcagaaacaatataattgaaaaaattagagtaacaaacgaaagttataattaggcaaaaaacctaattttttattttattataaaaggtcttagcccttttttttttttttttttttttttttttttttttttt

SEQ ID NO: 11268 - DNA, 168 bp, Canis familiaris
tctaggagcccaacccgcgccagctcaacaactagcccggcaacgccccgcactcctgccgcggctgcctgctgatccgcgcgcactcggagcccgtgcactccctgctgtagaacgtcaccttgttctagtaggccgcgagcgtcccgcgcctcggccgcatccagt

SEQ ID NO: 11269 - DNA, 575 bp, Canis familiaris
gggccccttgctaaagggtggcacaatcaatccaccccctactgagcctgagccaggaggcagtggcaactgtctgcccacagcccctctggacaggccacagggggtccagggggtggtgactgtgggggacagtggctgccctaggtgcgtgtccatatagagggtctagccacttctgtaggcaaaccccttctccctgcaccccgccccctccccggctgcagagcccagaccagagtcagagatatgagcctcctctgcaataggatacactcagtggtttttgtgttcagctcttattttccttgccacaggtgttagccaaccagccaaacacagcaaagcacgaccgacagacacctggccagccacccaacccaatgcagagctacatggtgtacttttcagcctccaagttcacccccacaccacagccaaatactgcccaacccagccccagcagccacctgggactgctaggtggcctaagctagcaggtcaaaactggtcatcactttctaggctctaaaggcctttatttagttagaacctactttttttttttttttttt

SEQ ID NO: 11270 - DNA, 496 bp, Canis familiaris
aataattggtggattgtgtggtttctatttttataattgtggttagctacagccaacttaactggactagtacacttggacctgggtagttgcccctaaacgggcacccagcaacacccacaccagcagcacccccagcaagagcacacacacacacacacaaacacatactttatttattttacaaaaaatttttaattgtcaaagtgataagtatattcatcagtttttaaaagatcaaaaaaaatttccacacataatgtttaaaataaacttggcccgtaacaattataattggtgttagctgctacctttcagcattaaccacaggttattgtttaaagttcttcacagctaggatacactgtcactttgtggagttcaaagctttcttctaagattcaaaattaaaaggataataaactgtcaatctgtttttaattaatttttaaagagtgtttgccaatttttttttttttttttttttttttttttt

SEQ ID NO: 11271 - DNA, 703 bp, Canis familiaris
cccgtgtaggtcgcctccagccgccccgcaactgtcctgccagcctcctggtgacagcgaaccttgtgtagagcctggggcagcaggtggtgactgtcggggtggttgtgctggcgtggcccggtctctgagccggtggcaggtggtttgctgtcagttggtgctgtgtctacgccctctccagagcgccaggccgcctaggtgttgttgtctgtgctgctgtggcggcgggtgttggccgccctgttgtagcgggatctgctggccctggtgcgggcagcccggcaccggctcctggtgcacaaccggcatcgcgggtacttggccctggaggctcggcggcaggcggtgcaggctcggcggcgggtgctgcggcgtgagcggcggcaggcggtggctgtctgtccccgctggcaggggcggcacttgatactggccccagtctaggtcgagctgcactgcacggtgcaggcagtcacgcactggtcacagttgcccgttggcttctaacaccgagtccgaaacttgtgcaacctgttgtggttctagtaagtgccacgggtgtgtgccttgaacttgcgcttgatctttgagttgcaggaggttttgcgggcgaaccgcgtgtacctgaatatgcctactcagttagcaggtgcaccctcccatcttattttctcctcagtacgtcttttttttttttttt

SEQ ID NO: 11272 - DNA, 627 bp, Canis familiaris
ggcactgcgagtggcgagtgagaccagaccacaccattcgccacgccgccagacccccccccccccgccccgctctgccaaaccaggcaggccctgggccgcactggacccctcctttgagccccacgcctcagtggcttgacttcccagccaggccacatgttgagagtccggttgctgccagccctttgcttttcacaccaaaaacattagaaaacatcgatcccatgttgaccgagaggcaaaagcgaacctaaactctcgaccgtgaaggccaagcagatctctatttagaatatcaccggtttgcccaagccgagaaacacccactgactctagccccgggtatctcgggccctggaggccttatgcttcccctcccctcttgcaggttccaacataatacagagtgtccaatctctggactcaactccacacagtgccttggcaacaattgttgtgggccccacccatcaacttgggccaaagggttctctctcggtgtgttccagtgtttagccctctcggtgcaaggatttcggaagcagacgcagtctagataacaaaacattaaataaactaactaaattactcttatttccctagacacttagcattttttttttt

SEQ ID NO: 11273 - DNA, 403 bp, Canis familiaris
ggcaccacagccagcccctccccctcccctccccagcccactgccccggggagtcatgaccagcctggatcctgcatagcaagcaaaaacagatacaataaatgtcttgtgtagggttagtggagggtgtggggggttgtgtggaacaaactggcagccactccaggttgcaggttgccagggcacagcactgactcaggtggacttggacttgagggagatgggatgttaggtgtgggtgggatgatgtctgggagggtgccggcagaggttgtggttggagtgttgtggatgtgggagagagaccgaggaaaaggctttctcatttgaccaggccacccctaaaccctacagctaacccaaacacccccctgtacttatctcatgaataaacatttttttt

SEQ ID NO: 11274 - DNA, 644 bp, Canis familiaris
aactgaaagcagcatacacaaaagcagtaagctaacaggccctcacttcccacacaaaggtcctcttgaagtttttagtgtcctacaggatccacttgatactaaggccaagtggtggttgtccagcacacctgcgcactgactaagtggactcgttgtgttaaccacatgtagcttttacttcacctttccctgtccgccaacaaagtcaagccataaaaggcctactgcagccaatttctaactctcctataaagttatacaataacatcttagctgataaaaaaccagaagccaaaaaaatctaaaagtagttaatagagccatcaatttcagagcagtcacctattttagaaatagctcacaacagtgtatgtgggagcataacaacagtgtttatctaagcacacaccaaggttccagagttaaagttgtagtcaccagccaggactcttctagtgttactgctttgagaaatttttcagactcttgtcttggctgactgatggtgtgctagaactgtgggttatacagacccttctgttaatctcctttgatataaaactggtagtcaaacaataaacagcctacatcaggttatttaataaaaactgcaaacagaggtttttttttttttttttttt

SEQ ID NO: 11275 - DNA, 615 bp, Canis familiaris
gcagaaggcctaccggactacccaccgcagactcaccggggtcagtcctgcagggctagaactctctcttggtgaaagtgctgcaggccccagagcaggtaggcaactgccactagtccatagtcatcccctctgctctgctgccaggccccttagctcctaagaccagggaacgtgccagagacctggaccaggtccccttgaccttgaggcggtgcttgtaccaccaggggcacttccacataggctaggtcatagctgccacctgggtagctcgcgtgcccgactaaggggcctggatctacctgtagcagttggtcctctggccccggtactaaagggtctgcctggctgctgtgctcaacaacgtgatcttgttttgccgaggagggtggctctacgacaacatcccttcacagttgacagagctggatcggcaggtgcaggcccgggtgcagggcgacggtgagacctagagggtgcagggcctgggccacgtcatcaacatagtccagcacatggccacgcaccttgctgtatggagcaaaccattacgaaggtgactcaagtctagcttttatctgtcacaacagaaaacctttttttttttttttt

SEQ ID NO: 11276 - DNA, 699 bp, Canis familiaris
gacttttgagttatccggagaaacatatccagggtatattagaagaaataaatcaggtagagattctaaaagggttggctttctaaaaagaaagaatttttttaatcaaagattaaagaagaaccattgtaaaaatatcctattcctttcaagaacaaaacactagttaaagctgaaacatttattgtcttgcttgatattttcagggggtgttctgtcaaataattaatttaatagacaagtaaaaacatttcgtgtggtcataaagattctcatttatagggtgcataaacaattctttcaagaaaggtttgtaactagaatagaagagataatgtaagcacctacaagagatagttgctgtaaaggacaaagacaattgaaccacatcaaatatgaagaggtagatcaaagaattttttttccttcttctctctctctgtttccatctaaactagacaaattttttagaaatttagaatacaacggttctcaagctttagtaatttttcttttattagagttttatcatcggccattcagttaacaattagactcctgagaaaatcaaaggattagagccaaagtaaattaaagggtctcaaaattttggtatcaaataaagagaaagattattacaaggtagtgcaaggtttattttaaacagcaagtaaccttttttttttttttttttttttt

SEQ ID NO: 11277 - DNA, 709 bp, Canis familiaris
acccatcataacatggatgcatcattggtgttgctcctgaggtgagtataggtctgtattcggtacccctaaaaaggtataaagttaataagtttgatacttatgttctaaggaagctgcaggtgttgttggaagtttttttgctgtggcaggtataaattgaagggtactataatgatttattttggagaaaagaattgagtttctcaggtttgttcacactgctgaaagtgatttttttaaggggggtttcttctaaaatggaaaagtatgtctgtgggaaagagttgtcatatgttggtcctgtgttgctaggatacccttgtgcatgggttgatgggaaacttgttgttagcagtgcaagcttatcgagctgcacttccttgaggaaagagaccttacatataactggcaacaaagggacatccaaaaccgcaagtggcagtgaacaaatgaatctgatgagcattaggcaaaatataagacacagtactttataacacaatcccacttagcgattacagtgcacagcagtttccctcttgtgatcaataggacctcctctgcactggccagacatctccaacctacccctcattgggcagagcagaaacttgccctgttctatcctctccttacgctatcagcatgagctaaaaaccatatctcttaatccttaagagaaaacatgatatcaattttttttttt

SEQ ID NO: 11278 - DNA, 637 bp, Canis familiaris
ggttggttgatgtaatataaaaaaattttgatttaaggtttttggcatgaatattttaggcgcctgtgtaaaatcagggtatttacactaggtagccccactagttgaatactcagtcaacactcctggcttggcctgggctaatagagaagtgtgcccaagcccagagagtcaaaccactacagacccataaggctcgcaatagtaggcaacatcccctttagctttgcctatctaacagttgttagttgtaaaatgttaagattgaaccaccccattggtacattattaacatacttttctttagaaagaaaagattggagatgcgatagtaccaatagactgcagtgaacacacttacctgtgggggttacctgttttgttgggggtgggttaccacttcaccagttaatatcataatgttttgatattgtaactcaggatgagaatagcatatagaaggctttaagttcaccttaatttttttatatattgtaatttaattttcaattgtttgcttctttttgtttccagtctcaactttgtttctttgtcatttctagaaattttgttagaaacatttacttttcttttttattgtcatggtttccttttgtttttctacaactctatactg

SEQ ID NO: 11279 - DNA, 549 bp, Canis familiaris
gctctaagtctgccatattgcagtccccctgaggcatagttagggacgcctgttctctgtattgggcttcttacccttgggcatacatcccactctaatcgtgtgggacctgtagcagcagactgtacgcaaccaaggcaaaaaataggacccagcccctgaccactaggttcatcttaaaatagggagaccggctagtacccttctagttgatagtgcagctgcaggctttaccatttgtgaacatcctcgtggagctctgtccaaccctcaaccacttcaacgcacacaagcttgtgggagtggacatcacagcggtccgtgttgtccacatagccatgaagaaaccactccacccccaacaactctcaccccttgtcaggtgccaaaatcttttcccctttttgttgcaggagtctaactgctgcaaggaaccaaaacacccagaaagagcaacaagattaagtacacacgaggctagatgaccagtgcttttagattattatttaaaagatatttatggtttttttttttttttttttttttttt

SEQ ID NO: 11280 - DNA, 598 bp, Canis familiaris
actcttggccaagtcctagctgtgccggcacagcaacacctgccagctgttggcgaagactaaggattcgcgggaggtgtagccctaccctctggacaaggttctggctcacctcacagaggacaggtcctggctgaaggcccgttactatgaagggacagggcctttcgagacaacctgacggattgcggcctgggctgggccttcctccgagagtaccaagggcacgacgctctccctcaccacgctgctaaacccgggctgcaagtcccaccgcgggttggggctgacggggcagggcttgctggtcgacctagcagctctggggctctgctgccctccgccccgacctggctggagctcaggatcaagctgcagcacaggttggtcacaccgcaccggatctctgaaccaccgttgtcgctgggggccccgacaaatgccgagctctcgccgtacaagcggaaggccggggtgccgttgacgcttttgtggcccaagagcgggacgctggggacgcgcaccgagctctgcacgccctgcagcaaggcgctctctcggctgctgccgctgccgacctgctcgtgtcagtcgccgg

SEQ ID NO: 11281 - DNA, 557 bp, Canis familiaris
ggtcagagtgcttaggaggctggtcagccgctccaccatctccagcttgtgcttcaggctctggggcaggttcaggtccactggtgagttcttgagacctgcatggtcctccagccgctctaaagtggccatcaaaccctcgccagctgcccagagagtgggctacagggtactcaccatcttggcctccttcatctggcgggggtgaggccgcagctacctgtagaggaaagtcccggccctgggattccccttagtggtggaggcgtggaacatcgctggggcctggttcgcaggggaatagccccttgggtaagtgctacaccagcactgccaggccccctagcagatccacaggcaccaaggccgggacatgcccgtccctgtagacctcaccgctagacccgggaacagtagtccttgaagggaactgcactgcacactctttagagggatcccattgagtgccacctacataatacctaccaacccaaaagactacctgaaacagcacctaggagggccaaggggaaacacaggcttactgaactttattt

SEQ ID NO: 11282 - DNA, 584 bp, Canis familiaris
aaaactataagttttggtaattgtgagagagagaccaaaagaaaatattaagattaaggggattaccttcaaattacatactataagtaaaagtttcataacacattatcctctttggccagaattttcagagcagagtaggtcactttccgtaagatcatctatcagtaaattccataaaattagcttctaccaaactgaagaatatttgttgaaatggtagagaacaaggagagaaggtttttagttgaagttataagaatgtgatgatcaaatagtgggataaaaatgaaatttggcctgtaaatcttcaaggtgataaaagtaaagtatgataactgacagttaaaaatttttaacaaagtggttttgaaactaactttttttgcctaacttatagcaaaaaggttaactaggtaaaaactaaaaagacaaccttactaaagtctagaataaagattaattaaggattgaagagcgctagttcatcctgagcctatttaaaaatggttttagtgtttaagaatatagaattgtattgttttctcactagaaggttgcaagttaatcaatttttttttttt

SEQ ID NO: 11283 - DNA, 657 bp, Canis familiaris
aagcctagtttgttttgatttctgtggagccctgtgatgtttctggttgacactgctgccctgcaggtggggcccagaaggagcggtgctgtctcacctctaggtctcgggtgggtgggcgagtgacaatgacctctgaacggtttcgttgtggtcctggccctgcccgtgcgggaggcgaggcaggaggagagaaccccacccctctggagctcgagaggtcgaccagtctcctgtccactggcctggtcagagaaagggacggggacgcagctggggatcaatgaaggggagtggaccctcaggtgctgtggggcccctgtgagtagtcgggctaccaatatttgggtctcgaggtagctgtctggccggtggttgccccgctgtgtctggggagtagccccccccgggggactgggacgtggccgcccctggttggctccctgctgtggcgtggggtgaggttcgtggggctggggccagcagagcccgggggcagctcctctccaggctggccagacccagggtagggcggggtggcggcgaaggagtctgctggttgtggtgctgctccctggccaggtgggtggttgggcagagggcagccacggccaccgggagtccagactggtcgctggtagaggcaggtgaagtgtg

SEQ ID NO: 11284 - DNA, 676 bp, Canis familiaris
tataaagcttaccgttgccaaaacaggttttgttgttttgaacttcctccactgctgtcataactcagggcagttcaagtagttttttaatgagcccactttcttgcccagcactgttttacttgtgttgctgttacgcaggcatcactcctccaaccgagtttttcaccacactaacaagactaaaatcaaaaaatatatatctagattcaatttcagcttaattctttgaggtatagataaatacttagatgtcaacccacagttgacttggaaacaaaactagagtgaaatgccagcttcttgaatacaactttataacctgagttaaaagtttaggaattggataatgtttctgctaagactgttagataacccaacagaaaatttggtggataaaggtttaagtttttcaattaaagtttgctctacagagagagagagagagagagagagagagagagagatcctctgttgtaaataaaagttatgagtataagttttggtcaaatataaagattctactgagaattccttaaataatgaaatttaatgatcaaagataaattatggctaacttctttttagatacttcagtttagttaaaatttagttagctatcaaaaaaaactttagacttaaaattagatttatttatgatgtacccttttttttt

SEQ ID NO: 11285 - DNA, 595 bp, Canis familiaris
gagagagagagtgttaggtgaagtgtagactgtgttttattcaaaaaacctgtaaagggtatatggacactccacaactggaacactagtatcctccaaatcagagcaataaaaaaattgtttttttttgagaaatacttcctaacgtccatattgttgccaattaaagctctgagcgagtcaatcggtttcagctagtttgccgtagggcctgcgaaacgcccatgcgaagctcaagggtaaccagcacagggggagcagggaaggccacactgagcagctggtctggtgggcggggcctcagaccaacccaggcagaaggctccaaacaagttgagaaattagttagtcaaaacacgttaatatgttaagatatatgtcactgaggataactagatcagttttgctttcatcccatctgttaaccaaggaaagatcacggaaaggcaggcattaaaagtaaacttctagtgagataaaaaattttaagtaaacaacacactaaaaaaacttacgttaaatcagattatatttgataacttattaaacttattttgtatttaataatttttttttttttttttttttttttttg

SEQ ID NO: 11286 - DNA, 545 bp, Canis familiaris
ggggacttaggggagtgcgggaactcctaggtacctcggcacaacagtttgggaggtagccaggagagggttagcaagccagtatcctctacaaccttccaccccctgccctagtggctgccagaggtaacgtcaggccaagcctacagccccgggctggtggcctggcaagccaaagaacctgccacttgaggcctggtctgtggctgctaaggcagcccctcaaagaagcggtctggccacagtccagaactctacctcacacaccggggttgcagtggggttcgcgagatgttaccaagaacctaaactactaatcaggtgacaaggggctgcagcattttcctcacggaaaatgataaccgagctgggtgagaggctgaaaccctaggagggcaggccagggtccaagagcagagcaccgaacagaaagactcccttaatcagatgtataaaacatccaaccagctattccctggaacctggtatcgagtacagaacacggaacccaattatttcattgactgaccacctttttttttttt

SEQ ID NO: 11287 - DNA, 545 bp, Canis familiaris
cagcccggacaagggtctgtgtgagacaacaggggctcacacaacctctgtttgtccaagacacctaaacctaatgtgttagcagcaagctagagaaagtgttgtacaacatttaggttacgcaagaagctcagaatgcctggcgtggggcagcctcatgtcctgtggtcctctcactcgagggccttactagaccaactcctcagagccaatgttactccctgtgtgttccaaacctgggctgtggggtttgctgtaccctgaccactagctggccactggaacaaagggaggggctgccagaccagggcccaaccactgttcccaccacacctaacactaccacaaccacctcgtgagaaatcacactgtgcacaacgtaagagtcgcctagcaggactactacattactattcattctggcactcccaagccagacgtccactccgcccttctagttgttcagagtcgctttatgtatcggtttgtgcaatgctgagtaaactgaggagtcagttatatgtttgaccaatttattatcccga

SEQ ID NO: 11288 - DNA, 555 bp, Canis familiaris
ttagcataccagcgctctacgcacgcttgctcttttagagaggagtgtcagttgttgtttgttaacgtgaggtctactaggtgttcccttattaggtaaaccgctatctgcgagggtcttcagagcatctgaccagtgccaagtttttcagttgccacggatcaaggttctgcatccaggtcttcagtttctgaacaccaagaaccaggggtttaacaccaggaaagctggtgttttgcactccaaagaggtaaaccactcaatagtagacaaggtactgttccgatagaaagtgcccttgagccaggtagttaaacctttacagttggcaaactagagccgaaaagtggcaaaggtgttgtatgcattcatctagctgacagtccgcaaccagttgtagccctacttcttcttgtaggcccagaggggcttattgtgttatagcagtgctggtggaggtcaagtacagcaagaaaataacctaccagagccatgggtgccagatcacacacaacacagcacaaaacttatttatgcgaaatggcattttttttt

SEQ ID NO: 11289 - DNA, 575 bp, Canis familiaris
agttataaggtaagcagaaaattgctaagttctataatgttgaacagttgtgatgcttgcaaagtgttcccaggctaatgctccaaagtctacaaacccctggagtcctgcaccattagacttcttggtttgccaggatactgagttctggtgcggagtccctggtgctggcaacagcagcaaaatcccaagcgcaggcctgctggaagccaacagaccaccccccaccctgtggagaaatggtacaaaagaaacatgagacttcacgggcaaaaccactatggaacaaagcccagggaaattttgtggtggcgacacagggagaccattgtccagacaaatggttgaccctaacctttgtgtaggatgataacaggtttacagcaatttttcttgttgcagacagtaaaaagcttttgtgtgtggaatggaaaaataactacaaaacaaaatctgaacagctgaacctactctgagaaaaaaaacttattcactggagaattagtggtatttaatgttttgttttattcaatagaggtcagatttagaaaataaagattgtaacatatttattt

SEQ ID NO: 11290 - DNA, 560 bp, Canis familiaris
aaagaaaagcgagagcacctcctcacgatgaagcagctttataagtagttttgtcacagtttcgtgttggagaaagagctgcctgacaaccatcctcatagggtgaggaagcagggtacaatgaacttttagagaatttgaaacagaatttaaaaggatcagaatgaaaaatccaaggtatattagcttagcttgtaaaaaacccatcatagacctagttgcctttaccactgagcgtagtccgtttaagctggttgctccttgttgttatcttgtttttggatgctgctaagccctttctggtggcataacttgttgtggttgtgtattatctagttgtcttagtgaggggataagtgaaggatacagtggaaactgttgtggttcattttttaacaactggacctgaaccagtcaatccagttggttaatctgaggctatctcttaaccctttttgcttgttgtaacagatgcagtggattcagaggttgtaacaggagtttgcaaggttgtccaataggccttttagttgttatagatgtattaggtcagtccataa

SEQ ID NO: 11291 - DNA, 594 bp, Canis familiaris
tgcagctggccgctggtttgtgacctgtggtcaatgtgttgcagaagcctctcttggacaaagttggtttacgcccttctttcacataagagaactccttgcactcgcctaactaacagggtgccaagtaagcctagatcgtgctcttgtacaacgaactgggagactacagggtctacttctgcaaagtcctgaggggggaggtgcagggtttgctgcaggccttgttttaagtgccagttcaagtaggctgatgccctgactccacactcgtcacaacctcgttcgggcattacttcaactacttgctggtgcgagtggcctgttgccttatttcactagcccggcagctgacccagaagattcaggaccaagacacaccactcctgtgtagcgcagctctgacaaaccctgtgctcccacaggaagcgggcaaggtgctcttgcccaaagggggttgccggacaggttaagcctccccagccctacctagacctagagcccacagaaaatcgtaaggcagttgagaacctgagctgcagtataaacagtccgagaacgcaaagaacgagatcctgtatgtttttatttgta

SEQ ID NO: 11292 - DNA, 515 bp, Canis familiaris
ttttgggtgtctagtactcacacccagctgggtaaatactccgcaactcgcaggtcgttttgttcatcgagttggcctagcggcagaacgaggggcttcccgagaggtcggcgatcttccggcccgccgtcctccaggtggcccggggcctgatcgagcggaaccaggcgctgtccgccatggcccgggctgccacgccacgcgggccgggcaaccccgcgcagggccgccgcacccggggacgccgacgactcctggctgccgcccgcgccggtcccgacgccagtgcccagagtgcggtgccgccccacggtccagggagagttgctgtcgagcggcagcctgccagcccagatgtcgccggtccgcctgtccctgtcgcacaacagcggcccggagggccgggaggcagggcctgagctcccgctgccgactaggggcgacgctgccgcgggggcctccaacaagaacctctatttgctgcggccgagtaagagcgcactcacggccactaa

SEQ ID NO: 11293 - DNA, 596 bp, Canis familiaris
taaacactttgtgtttgttttttttaaggaaaggattggtatatttattatattctgtttttctacataacctgtggataagggaagccccactgattctcctgtcccttcctccctcgctgtgaggtggcccgaggacgtccccccgctgagcacgtcccccaggggagagctgccccggcgcttggcccttgccctggcagccgctgtctggggaagagcggggcgggggcggcccacagggggcagctcgcggaccctgcccctcggagccggccgcctctgtccccagagcccggcagcgggaaccccaccaaggacgggctggtccccaaagtcgcagcaggaaatcgatggctgtcgcaggaggcggccgggtggtggccttcaagcccggccccggggccctagagcgctccagctgcacggcaggagccccgagagacctggtggcctcgctggcctcctcctggcctctcccgcccggggtctgccttgctgacccccttgccccgggaaggaggaaggcgaacgccactgtcctgtcccgcagcgcccggcccggctcgagctgggtccccgcctggggggctccc

SEQ ID NO: 11294 - DNA, 637 bp, Canis familiaris
  misc_feature (78)..(78): n comprises a, c, g, or t, or includes no nucleotide
gatgagaagtattaggtgtctttgtcaagctaatgatatgagttttggaaagcccctagataacctgaggatgggggnctggttgccaaggaaatcaaccctgtgattagagagttgaaacttttagtccaccccactccagggagggagaaaaaaggataaggattgaggattgagttcagtcaccaaaggccaatgatttagtcgatcaatgtaatgtaatgatgcctctataaaaatccaaaaggactagctttggggagcttgttggtggtgagcaggaggtgctgggagtgcggcaagcctagagagagagtatggacgctcctcgccccttcctacatacactgctctatgcagctcttccatctggctgctcctgagttatagcccttttagaataaacctgtaatccagtaagtaaaatgtttctctgagttctgtaagctgctctagcaaattaattgagcccaagaaggagttcgtgggaacttctgatatacagctggtcaatcagaagcacaggtgatgatctggacttggaaacagcatctgaaatggaggggtgtggtgcatggagtcttgtaggaccaatcccttaacctgtgggattctgactgtatcttcagataatgtc

SEQ ID NO: 11295 - DNA, 325 bp, Canis familiaris
caggcccagggctcccaggcccccatcccaaggagactctgagggccagtgaaggaagcccccagaaagatggcagagggagagtgggactggggatggggcatgtaggtcagccccggccccaaggagcaaaggaacaaaagaaactggaaagacagacgctttaggaacatgttttgctttggtttttaaaaatatatttataagagattctttcccatttattctgggaaaatgtttttcaaactcagagacaaggactttggtttttgtaaaacaaacaatgatatgaaggccttttgtaagaaaaataaaagataaaatg

SEQ ID NO: 11296 - DNA, 664 bp, Canis familiaris
  misc_feature (1)..(1): n comprises a, c, g, or t, or includes no nucleotide
nagagtaataacttttcttgaaggtcatattctagactttagtctaagcatcatcttgtggattacctcgtttaatccctatacccaaccctgcaaagttgatactataactgataagggaacagaggtgaagcaacatatcctaggtcagcacaggtagagctatagtctgtagtcagaacctggattcttagagattgccatggtcttggaaagtacacattctaatgaggttcgatctttagtgtaccaggatttcccaaattatcttacgtattttatcttatcttccaattaaaaattcaccttctgtttagactggcactatccagaataggtttttttgtgtgtgtgataatggaagtgttctattctgttcaaaagagtagtcaactagccatctatggctcttcagcatttaaagtatgactagtggaatgaaaaaacacatttttagggatccctgggtggcgcagtggtttagcgcctgcctttggcccagggcacgatcctggagacccgggattgaatcccacgtcaggctcccggtgcatggagcctgcttctccctctgcctatgtctctgcctctctctctctctctgtgtgactatcataaataaatgaaaaaaaaattaaaaaaaaaaacgtgcaatttaaaaaaa

SEQ ID NO: 11297 - DNA, 595 bp, Canis familiaris
tttcaagactgcatctaacaccaaccacattctctgaccacaagttagatgttactgaaaaaaaaaaaaaaaagttaaatgtatacaacttaagaagttggaggggcactcgggcgactcagtggttgagtgactgactgcctttggctcaggttgtgatcctgaggtcctgggatcaagtcccataaggctcccatggggagactgcttctccctctgcctatgtctctgcctctctgtgtgtgtgtctctcattaataaatacataaaaaccttaaaaaataaaaaaggagttaggggggaaaaagtcccacaaaataatctcaaagaaaatagatcaaggaaataataaagaaagaaaaagtggaaatacaaaacaaagagtaacaatattatacagttctgccattatgatgaaaaaattaaaggagttcaaataaatgttatgaataaaaaggtggctataactcaagatggcagaaattaaagagacaataaaaacagcataataaatttgcaaaccttgatggactgacacatttttttgaaaaacctactaaaactcactaaaaagaagagctagtgtaaaaaaaaa

SEQ ID NO: 11298 - DNA, 509 bp, Canis familiaris
  misc_feature (202)..(202): n comprises a, c, g, or t, or includes no nucleotide
aaagccagaagttacctgcctctgagtctcttgtccctgctgccatttttccagtcctggagggaggactctgtcccactattgtcctattcagtttatggtcagtcttcccatacacccttcccagcttcccactgggatcccctgggaagtggaaggggccagaaaaagatgtttacaccacttttatattactattttnttggttataccacttttaaaaccacaaagttcgtctgagatcaccttgaacccttctgataaggaaacacgccccagggagagtcagcgttccagatggttagggttgccagccgagagttctgttccaactcctcactgggtccatggagaggtcacaggagacccgtccagggacaggtgggctccaagattttggctcaggtctgtaagtgctaagctgttttctgtcctctgcttcatcataaagtcactttttcttccactgaaaaaaaaaaaaaaaaaaaaaaaaaaaaaaaaaaaaaaaa

SEQ ID NO: 11299 - DNA, 745 bp, Canis familiaris
ggaccgttctgatcgggcctaaaccctctctatctgggaatatgatggattgacttggtctatggacggaaccttcacagagatgaaagatttgtctctaaaactctttccgaacagggtggcatcatctcaagtcagtggatgcaaaccttgcaacaccataattggtaaagctgtggaacatatgtttgagggtgagcacggttctaaggatgaatggaggggaatggtcttagcccaagcacctatcatgaaagcctggttttatattacctatgagaaagatcctgtcttgtacatgtaccagcttctagatgattacaaagaaggagacctccgtatcatgccagagtccagtgagtctcctccagcagagagggagccaggaggagttgtagatggcctcataggtaaacatgtggaatataccaaagaagatggctccaaacggattggcatggtcattcaccaagtggaagccaaaccctctgtgtatttcatcaagtttgatgatgatttccatatctatgtctatgatttggtgaaaaagtcctaactgtcagggtaaaccttgccacatttgtgaaaacaaatgtatactttgtggacatgcaaaataatgttgcttttcagtgtattgaaagcttaagggtccctgttaattcaacatctttgccagcgtaactgttgttttgttccaaaaaatacaaatttatgtggatatgaaaaaaaaaaaaaaaaaaaa

SEQ ID NO: 11300 - DNA, 584 bp, Canis familiaris
  misc_feature (1)..(1): n comprises a, c, g, or t, or includes no nucleotide
ncagttccataactgtacagagccgccatacccatagcctcttcactaaaaatccagagtcccccgtatcatagatcactcaatcccctattccattaaactttaatactacctccacctcatcatccttcaaaatatagcacagcagtcaacaattcagaccaccaaccagtaataaaagccgctagaacagccttatttgaaactcacacctcagggtattgctcagtagccatagcagttgtataacccaatactactaatatacccccccaataaattaaaaatactatcaaccctaaaaaagaaccccccaaattcagacacatcgcacaacccatcccaccgctaataattagcacagcccaccataaataggagatggtttagtggccaaacccaccaaactcatcacacaaaacgatagcttaagaataaatacacatgtatgttatcattattcctacatggaatttaaccatgactaatgacatgaaaaatcatcgttgtatttcaactataagaaccattaaaaaaaaaaaaaaaaaaaaaaaaaaaaaaaaaaaaaaaaaaaaaaaaaaaaa

SEQ ID NO: 11301 - DNA, 617 bp, Canis familiaris
caatgcagtgctttcagtcacttggatgaaacatttgttactgagaacactgaaggcacttgccaaagatgtactatgactgcctggaaatacagactgcctactatatgccaagagaacaatcaacaaagtgttctatttgggtttatagagaggaagtatctctaatgccttagttcttcaagtcctgtggagaagcacgtagtcatacataggagcacagttccctttgtgtttgtctaaacctacaagaggagaagcaaatgatttttggcagtctggctatgagcaggctatgtgtcatctaatagatgtggagttctgggttctttttgtctgactttgggatataactttagcagcagtatctaattaattaattaatatataataccccaaggacctgtttgtcttgtctgatagtgctccagggagatctgggactcgcttgggggagggactatgaaacggagagatgggagagtggatcacagtggcttactagcgacatgaaataaaagtcatataaaccttgttaaccaggagagatgggagctatctggaggctatttgccatgactgacagaggagatcttaaaaaaaaaaaaaaaaaaaaa

SEQ ID NO: 11302 - DNA, 505 bp, Canis familiaris
ttcctgatcgatggctaccctcgggaggtacagcagggagaggagtttgagcggaggattggacagcccacgctgctgctgtatgtggacgcaggcccagagaccatgacccagcggctcctgaagcgtggagagaccagcgggcgagtggatgacaatgaggagaccatcaagaagcggttggagacctactacaaggccacagaacctgtcattgccttttatgagaaacgtggcatcgtacgcaaggtcaatgctgaaggctccgtggacaatgtcttctcccaagtctgcacccacctggatgccctcaagtagcagtcccagagccccttccccagccgagccccgccccacccctgtcctgcctgaggctgtcctggcctgggctcagcgcctccaccctgcccggctggagcacagacagaggaagccactttatcctgttttcatggacagccaagcactaaaggaatttccaaggacaaaaaaaaaaaaaaaaaaa

SEQ ID NO: 11303 - DNA, 631 bp, Canis familiaris
  misc_feature (55)..(55): n comprises a, c, g, or t, or includes no nucleotide
agccatacagtacctgcccgttgagcctttcacttgttacaaccacacgcctttngatacatgccatgcctttgatcaaagaacaggacataaaacaagtcaccatgacattccatagcaaatttggaatcaggactccactttacagcttcaggatcactggagaacaactaaggagcatcagatcctttaaggttttagcttaaggtctgctcaaaaaaaaagatattttaaaaaaaagtgtttgccctggacacgggacacgcctcttaccactcttgcgtcttcccgtgtatatgttattgtgaagcccaaatatttaagagttttcttgccaaggccagaatgccttaattggttaaagccttggagccaagccaataggtggccccccagctatttgcaggaagaaatcccagtaaaggaaaaatgggctcagaattttcaagacccattcaagcactctcctggttttctcctctaaattcaatggaaccatatgggggaatatcagtgaagatttttagagcttttggaagccctttggtctctgaattgtaattagcaataaacccaaataagaaacccccaaaaaaaaaaaaaaaaaaaaaaaaaaaaaaaaaaaaaaaaa

SEQ ID NO: 11304 - DNA, 670 bp, Canis familiaris
tctttgggcgcttggggaccgctacccttactgtgccacccaggaaactgacctcttctttccccctcagtcaaagtaggtccgcttggacattaacaagcacgtgccacgctggtggcactgacgacgccgacttcccttcacgttttcgtatgttgcatgcggttgcattcaaatgcccaatagcgattaggagcctaccgttctgatcgacaagctgtacggtcactgtgtgactcactttactgtttctctcctcgtgctagacgaatgaagaatgcatacccgtgttttaaaaagtatttttatgtgtttttaaaaaactttttaaaatgaggcctgacatgtctgtttcagcgttcggagacactggcccactgttatttttaaaaaatgtatgattactgatacttttgtttaactaagttgtgtttaatttatgtgcggtctttataatatatgtatgtattcccgtttcaactatcatgttttcttttattacatctataatttgatcttgctctgattataatgcccgtgaatgttgctgaattctttgtatatgccaattgcacagatctaaaacacttctgatgcaacaggataaatctttactttgacttcccaaaaaaaaaaaaaaaaaaaaaaaaaaaaaaaaaaaaaaaaaaaa

SEQ ID NO: 11305 - DNA, 565 bp, Canis familiaris
gacactgtggccaaggacagtctcttcaacaaatggtattgggaaaactggatatccacatgcaaaagaatggagttggacccttaccttataccatatacaaaatttaacctaaaatggattaaaggcctaactgtaagacctaaaactgtaaaactcctagatgaaaacatatgagaaaaatttgatggcattggatttggcaatgagttcttggacatgacaccaaaagcacaggcaacaaaagcgagagtatattaatgggaccacattgaacccaaaagtttctgcacataaaagaaaacaatagagggccacctgggtgactcagcagttgagctcagtggttgagcttctgcctttggctcagggcctgatcccagggtccagggagcctgcttctccctttgcctgtgtctctacctctctctgtgtgtgtctctcatgaataaataagtaaaatctaagaaaaaagaaagaagaaagaaagaaagaagaaagaaagaaagaaagaaagaaagaaagaaagaaagaaagaaagaaagaagaaagaaagaaagaaaaa

SEQ ID NO: 11306 - DNA, 731 bp, Canis familiaris
gggctggtggcccccctccttgctgcggctcccaccaacccacaccatagcaccagctcctcgtctcactgcatctcccacgcctgcagtggatcagccagccgggagcctgtctttcagccacccagtcccccacagggcctcttgcccaccctgtgcagcagtgggccaagctgctccgcgacgctgtagccatccatgtactggtcacaggcagcctgcatctagtgggcggtgtcctcaagctgctggagcctgccctgtcccagtagcctgggcagtgggattggaagtgggggtctcccatacctgccttgcatctctccatgaactcctgttaggtgccttttgttgtctgcttttctattctgtctagactggcccaggggcccgggttctgggcagcaagattgagggctggagaggggaggccaagatgggaccacctctgtctctgagcctagggtgcttttggcctctccttcctcctggctgagacagccagagggcttcctcttcctcgttctcccgctgtcggagtccacctgactatgcagcccacctcccttcccaacctgcctgcctcctggcttgggcccagctcacaatgtgagcgacctggccagcctagggttctgctgggtgctgggtggtagattacctcctagtggcccacaagagatggcggatggttggaaccaattaaagcctttaacgaaaaaaaaaaaaaa

SEQ ID NO: 11307 - DNA, 554 bp, Canis familiaris
  misc_feature (1)..(1): n comprises a, c, g, or t, or includes no nucleotide
ngaaacaaggtgcaggaacgggatgaaccgtataccccccactggctggcaatttggcccatgcaggagcatccgttgaccttaccattttctccttacacttagccggagtctcttctattttaggggccattaatttcatcactactattatccacataaaccccctgccatatccccagtatccaactcccctgtttgtatgatcagtactaattacagcagttttactcttactatccctgcctgtactggctgctgggattacaatacttttaacagaccgggatcttaatacaacattttttgatcccgctggaggaggagaccctatcctatatcaacacctattctgattcttcgggcatcctgaagtttacattcttatcctgcccggattcgggataatttctcacattgtcacttactactcaggggaaaaagagcctttcggttatatagggatagtatgagccaataataaaaaaaaaaaaaaaaaaaaaaaaaaaaaaaaaaaaaaaaaaaaaaaaaaaaaaaaaaaaaaaaaaaaaggg

SEQ ID NO: 11308 - DNA, 712 bp, Canis familiaris
tccccgggatccagcccctgagtttccaggaggccttttcactgtttcgatcgtacaggggatgcaagatcctgtcagccagtgttggggactgatgtgggtcctgggccagaaccccaccacgccgaggtgcctcaaggtcctggggaccccaagagcgatgagatgaatgtgaaggtgctggactttgaacacttcctgcccatgctgcagactgtggccacagaacacaggaccagggcacctatgaggactacgtcgaaggccttcgggtgtttgaacaaggaagggaatggcaccgtcatgggtgctgaaatccggcacgttcttgtcacgctgggtgagaagatgacggaggaagaagtagagatgctggtggcggggcatgaggacagcaatggttgtatcaactatgaagcgtttgtgaggcatatcctgtcggggtgaccggcccactggggcggagctcgtccgtatggtgctgaatggctgaggacgttcctggtgtgcccgagccccgtgccttcccccgtgtgagactgcatgtagccccgaaggcgtcctaggtcctcttgtcacagcacctttgccagcttgtctctcttggatatttgctatcagcagtcaccaaataaacttgctctgtgccctaaaaaaaaaaaaaaaaaaaaaaaaaaaaaaaaaaaaaaaaaaaaaaaaaaaaaaaaaaaag

SEQ ID NO: 11309 - DNA, 625 bp, Canis familiaris
  misc_feature (104)..(104): n comprises a, c, g, or t, or includes no nucleotide
  misc_feature (451)..(451): n comprises a, c, g, or t, or includes no nucleotide
gacaccgggacccgatccaagcccttccgggaacttctagccttaaggtccgtcgggaccggatttacaatgttcacacaggattacagctatgaccattaggncctatcttaggtgacactatagaacaagtttgtaccaataagcaggctggtaccggtccggaattcccgggatcggccgccccgcgcgccctgagcgtgccccgcgcgccccccgtgtgccccgcgcgccccgagcgccgccgcggtgagtgccggccggagggcgggcccgggccggggacccgctcgcccccgcccgcccccgcccgcccccgccccgcaggagccggcgctgcggaccgagccccacggggccgcgccggcaggagccccggggcgccccgctgagcgccgtgcggaccgaggccgggagccgaggccctgacccacatctgaaggatctcccncgtgcggaaccgcagagcctgggcctgctgagcaggcgcgttaaattatcagactatctatgtatttattgtgatggttgtcatggaaccgtcggtcttaatatttcgtttttgcatcatatgttcattccaaataaacgacttggtcttttcccttttctaccaaaaaacaaa

SEQ ID NO: 11310 - DNA, 613 bp, Canis familiaris
caccccagggtcacccagggactgacggcgctgatggatgagacccctgaaggaggtgaaggcctacaaaggcggagctggacgagcagctgggccccatgacctcggagacgcagccgctgctcgagcgggccgacgcccctgggccagcagctgcgcgggcagctggaggagatgagcagccgggcccgcggccacctggaggagatgcgcgagcagatacaggaggtgcgggtgaagatggaggagcaggccgaccagatacgcccaaaggccgaggccttccaggcgcgcctcaagagctggttcgagcccctgctggaagacatgcagcgccagtgggacgggctggtggagaaggtgcaggcggccgtggccaccatccccacctctaagcctgtggaggaaccatgagcgccccgcatgccacctgctgggcctcccccaactccttcccgtgccccctgcctgctcccaccggcctccaggaggcctgcccctgcccccagctgtcctcctgaaagggccctagcttaataaagattcaccaagctccacagccaaaaaaaaaaaaaaaaaaaaaaaaaaaaaaaaaaaaaaaaaaaaaaaaaag

SEQ ID NO: 11311 - DNA, 658 bp, Canis familiaris
gacccaagggggttctccactgcccagggctcaccccctgatgagggcatccgggcctctgatgtgccttctctgtccccctgcccccagcccctccaggtaggctgtgcccctcacaccccagctggtccactaggacttcgtacagctcccgggcatagaccacccttgttttatacaaaattaaaatggtttttacaaaagattcggtcatttttcgggcaggagccagagtggtggccagcggcctcccactacacctgtcctcacccagaggctgcctggccccctggggagaaggtgacctgtggtcttgcctcccgatcctgagcagttcgggtcacagtcccatctgttacccagggacctccctgtgccgacatcccgggaggctgggaatgccagggccctccatgagccgccccctccccctgcgcgcccccggccgcccgccccgtccctcctggcccaggccccgctgtctccctggcaccgcttctctcaggcgcaggagtacaggagggacccaagtagcaggacacgtctctacaaaccgtttttagaaaacgaggtctccttgctacaaaaaacacaaccgttctgaacagttaacactgtaaaaaggtataaaaatacaaggactctgaaaaaaaaaaaa

SEQ ID NO: 11312 - DNA, 597 bp, Canis familiaris
agcacgtggccggtgtctggattctcgagtccacgctcagcaagctctgggagacgggggcgcctaagcccctcgaagaagcagcagctgaggacggagaacgactttgtgaggttcgacactgccttcttacccaagccgctgttcttcagaaaagccacagagcagcgccactgccacttctgcacaccctgccctgcagcgagacaagatgccgtccagctccaagaaggtcactttcgggctgaacagaaacatgaccgcggaattcaagaagacagacaagagtatcctggtcagtcccatcgggcccctcccgagtggccttcaaccctgagcagaggcccctccacggagtgctaaagacgcccacgagctcacccaccagcacccccctggggaccaagaagctgctgaccaccacgccaaagagaaggcccaccgctatggacttcttctaggatagtagcacgggtccttttagagactgttttctgtacagatattctataaattataactttaaaacaggtggggcctttttttattgttttataaatccccataaattgtataaaccaaaaaaaaaaaaaaaaa

SEQ ID NO: 11313 - DNA, 536 bp, Canis familiaris
gctactccgccagcccccaccctggtttcaggtgaccccctggtatgccctggtacaagttggaaacagccaccggagtagagatgctgtcccgccttcgacggctctatcagggccatcttcgagaagagagcggtcccccacctgagtcaatgcctgaagtgccccttagcagcccaaccgaatcttcctccactgaggagagccctcagagtgctctgtaggagccatagaccgggaagggattaagggatagtgcctaggaattacatgatgggatttcactctcaagagttgtgtctgtatgtggcccatggcaggcccacgggccagaggaaagaaatgattgctgcttgaagggaataaatgcatcggaggcttaaggagggcaggacagatgtgtatgggaaacctcaacccctatgtattgtaaataggctaaacattgttacttcccatgtctgctaaacttggcttttccaccataaagctgtatttcctgttaaaaaaaaaaaaaaaaaaaaaaaaaaaaaaaa

SEQ ID NO: 11314 - DNA, 640 bp, Canis familiaris
  misc_feature (1)..(1): n comprises a, c, g, or t, or includes no nucleotide
ntgaccctcagaaggacacacgcttcttcgggcaccgtcaggcttaagtcccccccccgcccccagttttctgtgtgtgttttgggggaccagcaacactgtgatgaggcccaggcagtggacattccccacatggacattgaagcgctgaagaaactctaccagaattaaaaaactagtccaaaagctggcccagaagtatgatgcctttttggcttcagaatctctgatcaagcagattccacgaatcctgggtccaggcctgaataaagctggcaagttcccttccttgctgacccaccatgagaacatggtggcccaagtggatgaagtgaagtccaccatccaattccagatgaagaaggtgctatgtctggcacgtggctgttggccacgtgaagatgacggacgatgagcttgtgtacacacatccaccttagctgtccatttcctggtgtccttgctccagaagaattggcagaacgtccgggctttgtacatccagagcaacccctgggccaaacccccagcgcctttactgagacccatttaataaatcctagtgctacccgttaaaaaaaaaaaaaaaaaaaaaaaaaaaaaaaaaaaaaaaaaaaaaaaaaaaaaaaaaaaaaaaaaa

SEQ ID NO: 11315 - DNA, 552 bp, Canis familiaris
atctgaagagcccacacctgttgaggtactagatagagttctgccaccagctcacctggaactccagagccagcagtggcacatgacagaaacacctgcattatttatgaaagccatgtctaatatcaactatgaaaagctatgcatatcacgaaaatcaggggctgctccttgtagtgcagatgtagttcgcacttgccgctaagccttaccaggagactctgatcccttaggtaggagtgatgccattttcaaaggggaaacacctgagtgccgtttattataagcctggaatttcccccgtaggaaaggatgtgagaaacatcagagtgcagaactgataatactgggcagaaggtgtctgtccacgtgatacgaattttagaggctcttctctgcccaacatcttaatgggtgatgccctttcggccaagagaatattaccgtaagatattctgagctcaagagccctgccctgtcccatgcaccctgccttgccaaaaaaaaaaaaaaaaaaataaacacaaaaaaaaaaaaaaaaaaaaaaaaaaa

SEQ ID NO: 11316 - DNA, 692 bp, Canis familiaris
gaccctcttcctccaccatatacacaccctgatttttgaaaatgcccggtccagtcctgaaagggaatgataaaacaggatatttggtcaatttgtagtcccagaattaccttactatttctgacttgaataggtaacactaaagccaactgtatgggaaaatcaagtaggaaaaaaatatgtttacttttcccttgctttagtatccttatcctcctagatgaaattgagggttgatattatatatgtcagtttcctcttacatactttatgtacttatatatgtgtaaacaagcatatattgaagtctattacggggcaatctacctttggaggttgaacacttggatcttaaataatattacttttggagtcatacatctatgcaatattcttacttctcgtcaaatgtctatcttccacttaaatacgtttaactagattgtataaaataactttattgcctaacatgaaattacaagcttaggcataggggaaatgggctttttagaagccaggaattctaagtatattctgttcttcaaataaatgtcattttcttctttaaatattgaataagttttatgaacaatatctttctttgcaactcgaattacatgtgcttggaattaagttttagtttttttcactgcacaataataaagcctgagttctgatcgaaaaaaaaaaaa

SEQ ID NO: 11317 - DNA, 590 bp, Canis familiaris
tgggaagagtattaccaggaaatgggtccagcagttcctgctcctactggtgctccaccaggtggtcagcccgattatagtgcagcctgggctgagtactatagaccaccagcagccttctatgccccgaccagtcccccgggaatgccccagcatcctccagcccctcagggcccataataagaagtggaccataccgtatttgcttcacttgtgtgggggaaaaaaacccttgttaaatatatggatgcacgacgacttgatgaagatcttaattttgtttttggtttaaaatagtgttttttttttttttttttgaaaatgtaccaaatatctatcacctactgataggaggttaatatttctgtgtagaaatgaaaattggtttgtttttagtatttagtgtagatgtacaccacttccagcacaatgtatttgccactattatgtggtccatgctttgtgatataaatgtactttttccatgtatactttcacttttaaaatgcctgttttgtgctttaccataaatgatatgaaacctccaaaaaaaaaaaaaaaaaaaaaaaaaaaaaaaaaaaaaaaaaaaa

SEQ ID NO: 11318 - DNA, 663 bp, Canis familiaris
cttgcgtcggtttctttaagaagaatccctttggcctagtgcccgttctggaaacagtcagggtcacattgatctatgaatctcctatcacttgtgagtatctggatgaagcatatccagggaagaagctgttcccggatgatccctatgagaaagcttgcccaaagatggctgttcgagttattttcccaggcttccatctctctggtaacaggctttctcgagaagcaccaaataacggaagactcggctctggcctcaaagaagaattacggaaggaattcagcaagctagaggaggttctgacccataagaagacaactttctttggctggtaattctctttctatgattgattacctcatctggccctggtttgaacggctggaagctctggagttaaatgacttgtgtagaccacactcccaaacttaagctctggatggcacgccatgagagaagatcctgccgtatcagccctcctcaatgaggccaacacccttcgaggattcctcaatctctacttgcagtacagccccgaggcctgtgactatgggctctgatgggggcaagagtcagcaatgaaatgtctgatattttctttcactaaatgtctgatattttctttcactaatatgagtaaaaatgcgctttcatttttaa

SEQ ID NO: 11319 - DNA, 560 bp, Canis familiaris
cagggagggctggtacatcccaagacttcaattgaagaccaagacgagctgtcctctcttcttcaggttcctcttgtggcaggcactgtgaaccgaggcagcgaggtgattgccgctgggatggtggtgaatgactggtgtgccttctgtggcctggacacaaccagcacagagctgtcagtggtggagagtgtcttcaagctgaacgaagcccagccaagcaccatcgctaccagcatgcgggattccctcattgacagcctcacctgagtcaccttccatgctgttctgtgggctcgtggcgctggacttggaatccctctgtgccccaccccatctgttttggatgctggcagggagttggcagagagctcactgtgactgagtggctggatgcccagctcttcacctgtgcccatctcctgaacctacagttactgtaaaaatctgccatattgtgctgtcaggccttaaaggctcctgactgctctgtttcctgcactacccccattaaagggcagctgcctctggccaaaaaaaaaaaaaaaaaaaaaaaaaaa

SEQ ID NO: 11320 - DNA, 580 bp, Canis familiaris
ggattcttaacccgtggacccaaaaatgtgctccactgggtccaaaaatggccagaccattgaattggaggcttcaagttggaatgtaaaagaacttaccgaattggttaatttggccttcgttctatttttgttgttgggtttttacctaattaccgccaataatcaagatttcgggaagaccttcttacgctcagcaccaacaggtccgccaaattcggaaaaagatgatggaaatcatgacccgagaggtgcaaacaaatgacttgaaagaagtggtcaataaactgattccagacagcatcggaaaagatatagaaaaagcttgtcagtctatttatccactccatgatgtttttgttagaaaagtaaaaatgctgaagaagcccaagtttgaattgggaaaactcatggagcttcatggtgaaggtagtagttctggaaaagctacgggggatgagaccggtgctaaagttgaacgagctgatggatatgaaccaccagtccagaatctgtcttaaaattcagacatttaatggtgaccaataaaaacatatttgtgatgtttaaaaaacaaaaa

SEQ ID NO: 11321 - DNA, 531 bp, Canis familiaris
aatagccaaggtgaagaacatgaacctgtttcggtaagtcactttaattccgaagacctacgttcttaaggtgaaaggtatgacccaacccggtttaaactctaccgcacatcccggtattttaaggtctaagtgttaactggtcaacatttaaaatggattggagctattagtacataaagtatgatgggctttggtcccacatcttttgcatctacccacccttcaacctgttgtccttcagcccccttctctcttccacattctttggtttgtatgtggtttctcagttaatatatagctaatagctcttatttttcttatgtttttaactgcttaggtctatctggatgtaagggtgaaaattcatttgatggaaatacttgtgtatatttaaagaccccattgctcctctggagcttgtacgttcaagaatgattaatctgtgtaataaactgattactaccagtcattacatataaaaaaaaaaaaaaaaaaaaaaaaaaaaaaaaaaaaaaaaaaaaaaaaaaa

SEQ ID NO: 11322 - DNA, 638 bp, Canis familiaris
atgaggccggcttggggctcctcttgggtgggcgtcttctggcaccctgtgcggcggctacttcgacggcccgctgtaccccgagatgtccaacggcaccctgcaccactacttcgtgcccgacggggactacgaggagaacgacgaccccgagaagtgccagctgctgttccgcgtgagcgagcgccggcgctgccctcccggggacgcgggcccgggccgcggggcgctgagcctcagcctccgcgacgagttcacggtgctgggccgccaggtggaggacgcgggccgcgtgctggagggcctcagcaagagcatctcgtacgacctggacggcgaggagagctacggcaagtacctgcggcgcgagtcgcaccagatcggcgacgcctactcgctctcggaccgctcgctcgccgagctggagagcaagttccggcagggccaggagcaggcggggcggcccgacggcaggctgggcgacgacttcctgggcatgctgcgccgcacggccgccctgctcaaggacacgctcgccgtggccgcggggctcggcgacaggtacgagctgctggcgctcaccgtgcgcagccacggcacccggctcgggcggctgaagaacgagcacctgaaggcct

SEQ ID NO: 11323 - DNA, 640 bp, Canis familiaris
attaattgaatttgtctgaagcccatagttcaataggtgaagctctggccttgagatgcttgttgggtctgtgaagcctgggccagccaccaaatctggcctgtggctgaggatgaaaccctctggctttcacatctctgagctgcaccctcattactgaagatccttttgctttatagctttgctggagagcacattcattcttcccatgtctgaaaggtaatgttgcctggggcctaagcgtcctgctcctttgggcaccattggaatggagccatctgggaggtcagggacggggactgcctgaggagagctagccctagcctggcccctgcccagatgccattccatcactgatatttaagtgaaggggaggatccctagactatgttcttggctccagactcaaaaatccaccaaagcccaaccagctcatttcaacaaaggagcgctgatgtgaggggcaaggctgcctctgctccaggctcttcagaaagcatctgcatgtgaacaccatcatgcctctataaaggatccctattacaggaacagcatgagtggtggctaacctgacccaataaagttattttatgattgccaaaaaaaaaaaaaaaaaaaaaacaaaaaaaaaaaaaaaaaa

SEQ ID NO: 11324 - DNA, 600 bp, Canis familiaris
attgtagatccactatccaacccacttatgtgaccttaaaggatcatatacacgcgcacgtttgaacataccatactgttgcgtcccacgtgtaaagaagttgtcagcacgaggagatgactattaaacttagtcccaagccgcctcaacatcttttattttctaagctttgttggaataccttatacccgaagtaatttgccacatgttgtctgtttaaccgtggacctatgtaatgcttttatccaatgtttaaaaaggaaggaatttgatccaaggccaaccactctgatgtaattagtccaggagaaaagctttcaggactttcacaatgttaacctgtttttcccactctaggaaatgctataaagctccaattagttaggaatgagcttatacacttttttgttttgaacaccttaagagatgcttttcagatatttatattgccactattcttaattgaatgctttgaatgactacatcccattctgcacctataccctctggtattgctttttaaccttcctggaatcccttttctaaaaaataaagacattttcagatctgaaaaaaaaaaaaaaaaaaaaaaaaaaaaaa

SEQ ID NO: 11325 - DNA, 635 bp, Canis familiaris
  misc_feature (44)..(44): n comprises a, c, g, or t, or includes no nucleotide
gaaaattgtctacccaccacctcagggatttcatggatccaacnatggacaacaccaagcatatattaaactatctgatgcccatcattgaccaggtgaatccagagctccatgacttcatgcagagcgctgaggtgggaaccatctttgccctcagctggctcatcacctggtttgggcacgtcctgtctgacttcaggcacgttgtgcggttatatgatttcttcctggcctgccacccgctgatgcccatttactttgcagctgtgatcgtgttgtatcgagagcaggaagtcctggattgtgactgtgacatggcctcggtccaccacctcttgtcccagatccctcaggacctgccctatgagacactgatcagtagagccggagacctgtttgttcagtttcccccatcagaacttgcccggaaggcagctgcccaacagcaggctgagaagacggccgcctctaccttcaaagactttgagctggcatcagcccagcagaggcctgacatggtgctgcgacagcggtttcgggggctcatgcgctctgaggagcgaacgaaagatgtcctgaccaaaccaaggaccaaccgctttgtgaaactggcggtgatggggctgacagtggca

SEQ ID NO: 11326 - DNA, 527 bp, Canis familiaris
  misc_feature (37)..(37): n comprises a, c, g, or t, or includes no nucleotide
  misc_feature (336)..(336): n comprises a, c, g, or t, or includes no nucleotide
gtgtttaccctaggcccccttaaaataatggaataanaatgtaaccataaagaccaaccttagttaagcatggactctgggggaaatggttcagacctttgtattgtggttttttgccttgagagtagcaagtgaccagaatctgccatggcaacaggcttttaaaaaagacccttcaaaagacactgtctcaactgtggtgttagcaccagccagctctctgtacatttgctagcttgtagttttctaagactgagtaaacttcttatttttagaaagtggaggtctggtttgtaactttccttgtacttaattgggtaaaagtcttttccacanaccaccatctattttgtgaactttgttagtcatcttttatttggtaaattatgaactggtgtaaatttgtacagttcatgtatattgattgtggcaaagttgtacagatttctatattttggatgagaaatttttcttctctctatcaataaattgtttcttatcttggcattttaaaaaaaaaaaaaaaa

SEQ ID NO: 11327 - DNA, 569 bp, Canis familiaris
agggagatctgaacatctgtgctagtggaccccgtccactattttaaatttgagttccctgactggcgaatgcctcggtaatccggtccggcccaatgggataggcaatcctcatcccagaaccggaacttgctctcctttgctgtagctcacaaacattttgaaactggaaccgtttgtcttccgagaatggaaacaaggcagcaaagtctaagcccctataatcagaggccacctctcactttgcgtgttaacgagacccatccgtgccattggcacggaacccacagaaagatgacaaatcaggccaacagtgttgctgggtctcctgcctccaaaataaaaagttctcatttccttcagatttttgccctatcatgttctgagtttttatattgtctgtaggctcactcagcccgcagcttacatgtgtgcttttttctatgaaaaatgatgtattttactacttcctatgtacaaaagtttattgtaaattttgtgtgtgtgtgctttgcatgaacgggggccacgttgctgttgtttcaataaaactggtttgatttcaaaaa

SEQ ID NO: 11328 - DNA, 655 bp, Canis familiaris
agcttggccaagcccaccttcctcctgtccccatgcggaccactgcgcttccctcgaatgctgatgagcttgtgagcttgcgtaccctgagctctgtgcactccgagcaggtctttgccctgcggcttcaagaccagaagctgccgcctcttctgtctgagatctgggacgtcccacgaatgaggggcctggtgaccctgccccacagccctgtacccttcagcaaatggacattgttaccccttcctcctcctggagtgggaaggggcccagcctggggtcccaccttgtggcttttagcacaagtcctggccccaccagccctcagcccacgggtgagcccccgtcagggtccaggaggctcccccctgcccactgagtcttcctgggagggctggatgggtcatagatccccacctctgactctcctagcactaccagccgccctccccacccagcttacacctcaagctcactgcgcaaccttgaacagagggattgggggacctgaggctctcccctccagcctgagagactgcaggcctcctccccttgttccttttatttaataaaaactaaaaaaaaaaagaccaaaaccggaaaataaaagtatgaatagaaaaaaaaaaaaaaaaaaaagaaaaaaaaaaaaaaa

SEQ ID NO: 11329 - DNA, 514 bp, Canis familiaris
  misc_feature (301)..(301): n comprises a, c, g, or t, or includes no nucleotide
cggggctctgcctctgcccagcatctaagctgctctaggactactgtctttcatggctgtggagccaaggtctaagttggtatgccccagcagaccagacagaagctgtcacttcaggcctgtgctggccagccaggaaccctgtactgctgctgttgcctggttgccaggctgttagaataaagataagagacttggactccagacccctctgtgactgtcccacctttattaagcctgggagggtgaaatgccctgggtggctcacgcttggttaaagcccttctgaacttcttgattntcagcctggagtcacctgattctcagggtctctgggatcaagcccttgggtggggctctgtgctcagctcagagtctgcttgagattctctttctgcctgcccctgctctctctcgctctcgctctttatctctccaaataaattaataaaatatttttaaaataaaaaaaaaaaaaaaaaaaaaaaaaaaaaaaaaaaaaaaaaaaaaaaaa

SEQ ID NO: 11330 - DNA, 628 bp, Canis familiaris
  misc_feature (247)..(247): n comprises a, c, g, or t, or includes no nucleotide
cggcaaagtgcgggcaaaggccaagtcccggtcctcccgcgcgggcctgcagttcccggtgggccgagtgcacaggctgctgcgcaaagggaactacgcggagcgagtgggcgccggggcgcccgtgtaacctggcggcggtgctggagtacctcgacggctgagatccctggaagttggccgcgcaaatgccgcttcggtgacaaacacagagagacccacggagtcactcccgggcgccaccctngcacactctggccatcccgcaacgacgaggagctccacaagctgctggggaaagtcaccctcgcgcagggcggcgtcctgcccaacaatccaggccgtgctgctgccccagaagaccgagagtcaaaaggcgaagagcaagtgaccctgacgccgccacaggggagctggcttccccagcaagggctcttttcatggccaccccgcagtattcttttttttttttttcccccccccatatactcgatgtcctggaaggctggcgcgatctagtggggaggtgggtggcagggggcccgcggagtccgaggcccaataaagtcggtgaaaatcgaaaaaaaaaaaaaaaaaaaaaaaaaaaaaaaaaaaaaaaaaaaaaaaa

SEQ ID NO: 11331 - DNA, 710 bp, Canis familiaris
gtatacaaaagaatcgttcttgtcctgtttcttatgttggttgaatacttcatgcacaagggaaataatcatatcccaaagagagagcattggcttgtttagcttttgttgttgttgttcttccctgttatctgcttaatagaagtttgtgtgatgggaaagaatttttaaatacacacatacacacagacacagtatatatggggcgatgcacaggtgggagctggctgtgcagagaggaggagacaccggtctgcagcgacagcttctactaccagcccttggggcactcacccctgtgctcaagcaatcattgtcaatgacaaagtgactattgaagttataattgtattaaattaatgctaataatttggatattttattttatttttggctgctcgggtaacgttagcccttaaccaagcatacatggttttttctttcttctttctctttctttctttcttttcctttttgggtacagctgtaaaatatttggatataggaaatgttgtgttattcttgcagccttgatattcagggtggattgtaaaatataaatttttgtgagatttcaaagattaagattattttgataacattatttacagatttaaaagatgtggttatcacaagtctgttgaggggaaaaactactgcataaaataactaacttggaataaatattttgcatcagaaaaaaaaaaaaa

SEQ ID NO: 11332 - DNA, 674 bp, Canis familiaris
tacaggaaccagtgctggagtccatgtgaacaacaataaaaatctgaagcttcactgcacagtaccttcctataatttccctgtgactgctctggccatcgcccccaataccaacaaccttgtcatcgctcattctgaccagcaggtatttgagtacagtatcccagacaaacagtatacagagtggagccggaccatccagaagcaggggtttcattacctttggctccaaagggacactcccatcacacatatcagttttcatcccaagagaccaatgcacatccttctccatgatgcctacatgttctgcatcattgacaagtcattgcctcttccaaatgacaaaaccttattctacaatccacttcctcccacgaacgaatcagatgttatcaggaggcgtaccgcccatgcctttaaaatttctaagatatataagcctttgctcttcatggatcttttggatgaaagaaccctggtagcagtagaacggcccctggatgacatcatcgctcaacttccaccacccatcaaaaagaagaaatttgggacctaaaatagggcactgtctgtgtccttccttgaactgtctaccctgtttgttttcacaaatcatgataataaaacaaagttattctttaaaaaaaaaaaaaaaaaaaaaaaaaaaaaaa

SEQ ID NO: 11333 - DNA, 335 bp, Canis familiaris
tgcccttttagtgacacaacccctgggcccgttcaggaggccggggtgttgaggacctgggctgctggaaccaaagcagggacttcctggctggaggggtataaccccctcggccctccgacgtggaatttgggttattgcccaggcactgccagtgggaggtgaggtgaggagctcagcctcttcattgtctaaatgaggcctgaacgtgtgaagtgcgatttctgcttttcgtgtaccccccccaaccctccccaccccggtttaccgaagctgcctttgtgtttgtgtcaataaaaagccaacccctgaaaaaaaaaaaaaaaaaaaaaaaa

SEQ ID NO: 11334 - DNA, 665 bp, Canis familiaris
  misc_feature (406)..(406): n comprises a, c, g, or t, or includes no nucleotide
gcactgagaggctcaatcagcctggatttgagttctgggatacatcaatccccacttctccctggacacaggctttgtaacattgagtcctttctcaagtcagactttgcaacctgtgaacacccaagtctgcaccaatgggtctgctagttccagtgatggccaattcatgtcctgcagccagtggaagttgcagctggcataggtgagactggtggtggtggtccaccctcacctgcagctcattctggaaactttgtaaaacacttcattgagaccagcttttcatcaatttgcccggcacgctgggcctgacaagtcacactacatgcactgccttcaggagttggcatactcttgccccccacctggaaccttgtcagtgtgaggcctctggctcccttgnccctgtcagccacctctgagtcccaccaggtgccttcctgggtgggtgccgcaagctgacgcacccttccccagccctctccttccgaggttttggcatcagttgttttctatgaaaacagtggattggttggcttttgtgcagggtcttgtgttagagccatgatggatttgagggatgagtattttttttcttttggttttgtatattttgtacattaataataaacagtggaaagagaagcagcttaaaaaaaaaa

SEQ ID NO: 11335 - DNA, 621 bp, Canis familiaris
acagccttgtctgagaaccaggtccctcctgcggatgcccccctgggtaaacatctggctgctgggctccatctgcctctccatgtccctccacttcctcatcctctacgttgaccctctgccgatgatcttcaagctccgggcactggacttcacccagtggcttatggtcctcaagatctcatttccagtcattgggctcgatgaggtcctcaagttcattgctcggaactacctggagggataacccgtttccccttcctccatctctttgaaccgtgtcacagatccagaagatgaaagaaggaagtaaccagtccttttgccccttcttccccaccctgatagtgatgcatcttcagccagagctgtggcacaaactcccacgttcccctccctgacatttttctgtttataaacatgatggtcccttccactttgcaccctcaacaccccatcttcccttctgctcttgtaaaacctcccctccccaaccccgtggggcttgcagggacaaggcgacggattgagctgagctgcttatttattgaaaataaatgacagaaaagtcaaaaaaaaaaaaaaaaaaaaaaaaaaaaaaaaaaaaaaaaaaaaaaaaaa

SEQ ID NO: 11336 - DNA, 304 bp, Canis familiaris
cgagcggagagtgagcgatgcctcctctggtcggcttagagcttgtctgggggaagcctggaggaggcgcggcgtctccccccgctcccccccgtcctccccgtcctccgcttgggggagccttcgaatccacgatagcggatgcgtttctttggtgcgtgtgcgtgaatttaagagagtcttggggcagccgtgaggtttaagggtgggtttgatgtgcgcgtaggaggtcggcgctgactgtgcgtttccttaaccgctgccgcagcgtgggattcctggaaggaggggcgttcgtgtggga

SEQ ID NO: 11337 - DNA, 665 bp, Canis familiaris
atggaatgaatatggcctttcctttggaataagccccagtcagccagtgtgaaactggcaagccagttcaatgagttagcaacgggagcaaactcacgggccaccggaagctccgaatcctcagggagccaccgggcacaagactcattctctgtccggggtcccagcctagccctttaccaagatactggtcctggtttggggggattctgaaacctcgaactaatagaactttcttctcttcttttctagtaggtgtagtccttccttaatttcaattcattaaaaaatgctttatagtatagggcagtggaaggaaggctggcatcaaaatattttgatcaaaaaagatggcaatgtgaaggcccagttgtggcagtttttggaaagtaacttgtaaagcatttaccatatcctaaatttgcactctttgcagacttgtgcacatatattccgctttcagaatagttttgcaaattgtacacaaacaaacaaaaaaagggtggaagctttttaataaagaaattgcatttataaatgatctgtattagaatataataaatctccagttatagtcaattactacccgtgttgtacaacagataccttctattttagttgctaataaagggctacacaactcaaaaaaaaaaaaaaaaaaaaaa

SEQ ID NO: 11338 - DNA, 207 bp, Canis familiaris
aaggaacagtgccccagctccggaggggcccaggctggggtggccagccagtccctgtgctacggcttgggacaatgtgaacacggactcaaacacatggtcctttttttgtagttcttaattttttttaatgtgccattattgtgagggaaaaaagaaaaaagaaaagcaaaccaataaaacacctttaagaagcttgaaaaaaaa

SEQ ID NO: 11339 - DNA, 524 bp, Canis familiaris
cataaacaggaaaatagtcaattaaaactgtccctgaagaagtctagacattggacctatacagattttaaatcatccattttaaatgtgtgcagagaactaaaagaaaccatatgtaaacttttaaatgaaagtataagaacagaagagagatgaaggccatacaggatcctgagctcaccatgtcccacagaacacaccaaagcagcaactacatatgttgcaactaactctaaaaatgacctcaagactggcagaacagatcttccacagcttggcatagaaaggcagctacatcaaaaagggtgaaaagaggagcgcttgggtggctcagccagctaagcgtctgccttcagctcaagtcacaatcctggagtcctgtgatccatccccacactgggctccctgctcagtggagagtcttcttctccctctgttgttcctcctgcctatgctctatctctcacttgctctctctcaagtaaataaacaaaatctttaaaaaaaaaaaaaaaaaaaaaaaa

SEQ ID NO: 11340 - DNA, 591 bp, Canis familiaris
gtgcagggatcccatccgttctcctggacgcaagcctctttcctggaacggggcttcggcgcacgcgcccctcgtcccctggagctgcccttggtcccgcggggcactgaccctccaggggactagcctgaaacccgccaccagcctaggtcggggcgggcccctcgcccggagactagagcagcataggcacggggctcccacgtgaagacggccctcttctctgccacaatcactccttttggcttagaattttaaaatgaacttcctaaaggggaaaggtcctccaggacaaggaattggggggtggtcccgcactccaagagaagacggggcccgggcccaggctgagcgagtacttggcgccgacccttcgggcactggactccccttccagctctggaagaggggttcagggcaaaggggagaacacagaagaggttgtgatttggttgaaggtgcctggtttagtgctgtaattgtcttttttttatatatatatttcttggagtaaacattttaaataaacgacatcattgtttaaaaaaaaaaaaaaaaaaaaaaaaaaaaaaaaaaaaaaaaaaaaaaaaa

SEQ ID NO: 11341 - DNA, 683 bp, Canis familiaris
  misc_feature (42)..(42): n comprises a, c, g, or t, or includes no nucleotide
  misc_feature (107)..(107): n comprises a, c, g, or t, or includes no nucleotide
ccctcctaataacatcgggtctcatcatatgatttcactatnactcgatatccctacttacattaggattcacaaccaacctgttaaccataataccaatgatggcngagatgtgatccgagaaggcacattccaaggacatcatacccctattgtacaaaagggctacgatacggaatagttctttttatcgtatcagaagtatttttctttgcaggcttcttctgagccttttaccactccagcctagcccctactcctgaacttgggggttgctggcctcctaccggcattattcctcttaacccattagaagtgcctctactcaacacctcagtcctcctagcctccggagtatctattacttgagcccatcatagtttaatagaaggtaatcgcaaacatatacttcaagccttattcattacaatctccttaggcgtatattttacgctattacaggcctccgaatactatgagacatcttttacaatctccgatggggtgtacggatctaccttttttatagccactggatttcacggattacacgtaattattggctctacattcctcatcgtgtgcttcctccgacagctatactaccacttcacatcaaaccaccacttcggatttgaagccgctgcatgatattgacactttgttaaaaaaaaaaaaaaaaa

SEQ ID NO: 11342 - DNA, 443 bp, Canis familiaris
cgaacgcgggtaacgctctcgtttcgaactttaatgtgaaaatgaacccgaggggccactttttctaaaaagacggaaatgccgagagccctgtcgccacgaagcagagtggttgtttcgttgtctgcttaagctgcatagtcatcctgttagcaagaccctgtcctcagttttcaaagaagtgaagcttctggtgtattttccttcgttactgttctgggcgggggctgcatcttgaggtaattactgatcattgtgctggctgcttgcaaatatagacctgcccggggggagacaaaggacagccctctgcgctcaaaagctgaggtggtctagatgtgtgcttaaattctctagatgtttaaggtggaaaagcaaatagtcataattattttgcaggtgcctttagaaataaacccatgctattgagcctaaaaaaaaaa

SEQ ID NO: 11343 - DNA, 605 bp, Canis familiaris
taaagggggtgaatcatggtaggacttcaaactcgttccacgtatcgcgtgatggttcaggctgccctttcgcgtggaaagaggatttctgggggccccccatcctaccctccagcttctaagactctcctagagaggtccgggctgggagctatggcctttgaggccacagagccttgatcaccaagtgtcttcctcaaatcatggattcattctcaccttgtgccaaaataatgccccctaccagcccctctgtggtgctggcattgtccttaaactaacaccagcatttgagggcctgtccccctggcccagcagaggtctctaccagctcttcccttgctcaactgtggcccagggggactggtgggacaacactggccctttccaggatccagggaggttcagtccgagacttttctgttcccccttttctcaagtgccttaatagtagggctaggtgtttggagagtaggggggagggcaggctggcagctctccaatcaagaggctcggtttttactgaagaatgaaagcagttggactcttgctctttctactctgaactaataaattcattgccaagctgaaaaaaaaaaaaaaaa

SEQ ID NO: 11344 - DNA, 640 bp, Canis familiaris
taatcatgggcaagcaagctggagctggagtgtctggggcagacaggtggtcaaggactgtgccacctcccgatggcctctattccagatctgcctcacagtcccaggcagctgtgccagctccagacatcctgtcttcatcccagtgactagggtggaggacagttgactccacctgcacttacactccctcggccaaaacaaagtcgtggtaccctggtgccagggagcctagggagacagccttgttctgggaggctatgtgtcccactaaaatacaggagttgtatatctgaggaaaaagggagaactgatactaaggccctgggaggattgtgtagggaggagaccatgcccatgactggcctttccaaacccctgaggtctcagagggagggcaggaggtgagcttggagatttaaataggactagactcgggggatccccgggtggctcagcggttgcacacctgcctttggcccagggcggcgatcctggagtcccgggattgagtcccgtgtcgggctcccggcatggagcctgcttctccctctgcctgtgtctctgcctctctctatatatatgtctatcataaataaataaaaataaatctttaaaaaataaataaataaataaataa

SEQ ID NO: 11345 - DNA, 534 bp, Canis familiaris
aaagggaaaaaggaatggcctatctattaagaggaaaatgagtaaatgaactttgttggactattcattcattggcataaattcaccaatgagcttcttgcttcaatgatctcaaaaaaatgttaaataggggtgtctgggtgtctcagtcaagtgtctgccttgggctcaggtcatgatcctggggtcttgggattaggccccacatgggactctggttcagtggggagcctgcttctccttctccctctgcttttctcctgcttgtgctctctggctcttgttctttctctgttaactaaataaaatcttaaacaaaaaaagttaaataaaaaaattttcagggctcctggtggctcaattggttaagtgtctgactcctgatttccagtgaggtcatgatctcagggtcacaagatcaagtctggaggagactccgcactgagcatggagcctgcttaggattctctctctcccactgctctccttcactcacacagcccatgtacgcatgcactctctgtaaaaaaaaaa

SEQ ID NO: 11346 - DNA, 504 bp, Canis familiaris
aggaggcctgcgctgtccccgcgcccgcaggccacacatgtgggcaggtggctccctgtgtcgcctctgctcgcccaggggatcggaagtgactgcccaggccacgtccctcaggccctcgcaggcccgccgcgcctgctgggagaggggaggggtcctgtgtccgggaggcacatgcacacggctccagccccgggcccggccgccccgcccggagggagagcagggccgcttctgaggcttcccctcgctcccctccaagctctgaagacggcgaggctgggggccgcccccccaggcactgtgacggctctcgggtcccagctgctctgcggggcggcctttccaggctcctgtgctttttcctgtggacaccaaagaggagacgagttgctggctccttccaccggcttcccaggtttccgccacttccatccccaaagtctcacctggttgaggggagaataaagaagataccccgaaaaaaaaaaaaaaaaaaaaggg

SEQ ID NO: 11347 - DNA, 646 bp, Canis familiaris
gagtcccccaggaagagtcaggaatcatggagaagagccttctggaattctaaggtcccctgctccacataagggcgtatgtgtatgtgtgcgtaatcccaccccagagcttatactgttctctcctgtctggtctcaggcaggatcctggtggtgcagcatggcacagctatggcaacaaaggaaggagcagtatggtggaaggcctgctccaacagatgagtcctttgcctgccatctagccccttaagtgtcaggtgtgtgtgatgacagcattgaaggctttcccctttaaatctctctaggactccccaccccaccaaaggtcagtgaaggcactggagctgagggtcttgggagtcactttgctctcggggtctgttgttttagaccttaaaaactccagcatggacattgattctctccgacctatgcacactgcccgcgtctaggaggctacaagccaaccaaccggagaaggggacacctaatgaggagcgatgttaagttaggtgggggtagatatctgtctacttcatactgatttcaccgagggcccaccatatagtttcacaggtgccaaattttctactcgctagtaaaaatatttttaaatatccaaaaaaaaaaaaaaaaataaaaaaaa

SEQ ID NO: 11348 - DNA, 451 bp, Canis familiaris
tgtgtgtgtgtgttgtgtgttttggtgtgggtgtgggtctgggttctggtgactgccttcttgcttgcttcttgtgtccgcccgactgctgaagcccttgcctttgtgcatctgtagtgctgcccggagcccacctttgctctgggcgtcccggccccttcccctgcgacccccatttcgtttgacctttaggtaaatgtggatgacaagctcctaagcctctggctgtcaggtgcacgggtgtgctaccgcgtgctctccaggggccctggctgccgccctgcctctctcacttggccacctcttctgttcactttaagttgccaggagacagtaagacatgcagttactattaaatagacttaatgactttttggtttgttttgcactaaagttcctgtgatttaacaataaataaaatctgttaaccagaaaaaaaaaaaaaaaaaaa

SEQ ID NO: 11349 - DNA, 668 bp, Canis familiaris
  misc_feature (1)..(1): n comprises a, c, g, or t, or includes no nucleotide
  misc_feature (275)..(275): n comprises a, c, g, or t, or includes no nucleotide
ngtgcccatgatgagccgcctgggcatgttcgacatccagccctgtgccacgctctccagctgggtgctgctcatggagtacgtgggcaacgccaccgccttcttcatcctgcccgacgagggccaaatgcagcacctggagagccagctgacccaggaggtcctggcccagtttcctgggaaaagagatacgccaggtctgcccgtttgcgcttgccccaactggtccatcttctgggaaccttacggattctggaaaaggcgttccctggagnccaaaattgggccattccaccccaaggttctttccaggccccccggaaggccttgaacccttccttccggggaattccaccttgaaggaaaaggggcccccttgatgctgtcccaggggctgcacaaggccgtgctgaccatcgacgagaaagggactgaagctgcgggagccacctttctggaagccatccccctgtccatgccgcccagtgtcgacttcaacaagcctttcctcatcatcatcgtcgacagagacacccagagtcccctcttcatgggaaaggtggtgaaccccacccaaaagtaactgccttgtgggtcaggtcccttccagatacccttaaagagtgaccccccccaggaaaaaaaaaaaaaaaaaaaaaaaaaaaaaa

SEQ ID NO: 11350 - DNA, 644 bp, Canis familiaris
aatcccagagcttgtcgatgttgtcgtgcaggatctgcagccatgcggttttccagcttggaggcccggcttaagcgtgctggagaagagctcacccacccaccgggccgcagcccctcagacccagcacgtgtcccccatgcgccaagcggagccccctcacaggaaggcggccactgctgcagaggacgatgaggacgatgccatcgacctgtttggcagcgatgaggaggaggacaaggaggcggcgcggcttcgggaggagcggctgcgacagtatgctgagaagaaggccaagaagccagcgtctggtggccaagtcctccatcctcctggacgtcaagccttgggacgatgagacaaacatggcccagctggatggcctgcgtgcgctccatccagttagacgggctgatcctgggggggctccagctggttccggtgggctcctggcatccgcagctgcagatccagtgcgtggtggaggatcgaccagtgtggggacagacctgctggaggaggagatcgaccaagttcgaggagcacgtgcagagtgtggacattgctgctttcaacaagatctgagccccagcaccgggcctgggtgtgtgaggccccgcagccattaaagactgagattgtaa

SEQ ID NO: 11351 - DNA, 564 bp, Canis familiaris
tagccccggttctcagttggcattggtggcatgtccctgagcatggctcagggagcttcttggcatgtgctgcaagaggtcacaactcagaagcatgatggcaaaaggtaggaggaggcagaaagggaatcccgttaggtaaacaaatgcctttgtccgaagtataggaggatttgttcttccaaatctccctgccgggggctgaggcatggcccctgctcctccccagcccagggtgtagaacaagggccctcacagggtttggggggctggtactcctagacccctccctaccctgccctttgtgttggctctgtggccgtccagtgccattggcttccccccaataagggctggtatttctcctctgtccttagaggggatttcccccctgacccctcaccccaggtgagtgaccacctgggtgccagttacaggtgtttccagagaccatagaaatgtgttttcctgagagtccgtgtcattcgtgacttttttttgtaaagaagttgtgttttcagaggtgattttatgacaggaaagtgaaagaattagttttgcaaa

SEQ ID NO: 11352 - DNA, 585 bp, Canis familiaris
tcccattaatgtggccaccatggtggtcagattgagtatgaccagctctcctctgaagccctggaggcttgccccgtaatttggtgccatcaagtacattggtgaaaaagctgtggcgaaagatgggttttcacatccgaggtgcggctcgcatccctttccatgttatccgtatctacaagatgttgtcctgtgctggagctgacaggctgcagacaggtatgcgaggtgcctttgggaagccccagggcacagtagccagggtccacattggccaagtcatcatgtccatccgtaccaagctgcagaacaaggagcatgtgattgaggccctacgcagggccaagttcaagttccctggccgccagaagatccacatctccaagaagtggggctttactccgtttaatgcggacgaatttgaagatatggtggccgaaaagcggctcatcccagatggctgtggggtcaaatacatccctaatcgtggccccttggacaaatggagggctctccactcatgagaaccttgcaccacccgaaccctattcatgcccaccaataaatcctgcttcctgtcaaaaa

SEQ ID NO: 11353 - DNA, 548 bp, Canis familiaris
ggttaaatccaatatataaattactactttaaatattttctatttttgtaaagggcggctgctgttcctggttacgcagcggaatccgaggagcagatacagaccccactgtacggttcggacacttagcagccgtcctggccagtccgtctcctgtcccgggcgcctgctgaggatcctaactcatcactctggattcgctgaagtttagtctaccctctttgtgtttggtttttgtgtgctcttagaatcagcttcattctaagccaacctgtgtctacttccaaagactggaaatagaacaaaaataaatctttgcccaatccttcagagatgactgtagtcacatggcctaaatgaaatgtcaaaaagctttttgattaaaccaggcatccgccccgttgtcaccgttacctttctgccagcatgacctcttaaaggctgcctcttgggcgtactgtgtatcctgttgtgtatttgttcatttccacactcattcacgttgtgttaaaataaataacattttaagtttttaaaaaaaaaaaaaa

SEQ ID NO: 11354 - DNA, 637 bp, Canis familiaris
  misc_feature (585)..(585): n comprises a, c, g, or t, or includes no nucleotide
ctgctcctccaatcctgggactactggacatagcccggttccctgacagtcccgcctcttcttgagagtgtcaccatggatcgttttaaaaccaccctataaatatcagttctcaacagctgcccacattccgcactctcctctgcacagcggagggcgaagcagcgcctttttgttgagcaaccaccgcccaccacagcctctgaaggcccgaaaagtgagagcttctttaccattaaaagtcaccagctgaccacctgcaaacatgtctgtggagaaaaaccaaacgccaaaatccctgctaacagctctttcttagaattctggcttatgggtaccatattgctttcagcttcagcacccgaaagaagctcagatctctgcaatcaaactaacttaactcatccatctcagatttccactcatcaggactcaaacggtccacacttgtttgatgtgtgttaaaacctacaaaatacaatgttttactacctgtgtgggaacatggcaggcattgcacaacttcctaaagcattaaaaaattttcccttgccctagagattgaatcagtcatatctctcagcnatgtcttggtgaaaaaaattaaaatcttttccagaatgataaaaaaaaaaaa

SEQ ID NO: 11355 - DNA, 559 bp, Canis familiaris
  misc_feature (1)..(1): n comprises a, c, g, or t, or includes no nucleotide
ngtcctccacaggccccggggagcatcttctggaatgcactctggcacaacaggggacacagcatcacaggtgcggctgtctgtggaaggacccccgcaacgtgggttggaaggaccagacatcctaccgctggttcctgcagcatcggcccccagtgggctacatcagagtgcggttctacgagggtcctgagctggtggccgacagcaacgtggtcctggacaccaccctgcggggtggccgcctgggggtcttttgcttctccccagagacatcatctgggcccatctgcgctaccggtgccatgacaccatacccgaggactacgagactcagaggcttctgcaggcctagcggatgggggtggggaccccttgctggaagatggcaccctcgtggctaccctcatctgcaaccaacccgggagcttggcccccggctcccagaggtagctgccctagaggggctccagaaaggaccaaaataaagtgtgtgtggtgacaccaaaaaaaaaaaaaaaaaaaaaaaaaaaaaaaaaaaaaaaaaaaataaacaaaa

SEQ ID NO: 11356 - DNA, 537 bp, Canis familiaris
attggaatacccaaatagttttgaattactttctgtaaccaagtattagtccattatttcagaatgtaccattttagaaaaatgtccttttttaaaacttatgtttgattcctaggaatttttttttttcacagttaccattaaaataatttcatttcatagcttgttgcattaacacctgtaattactgttgtgggagaaattttattttttaaattgatgtatatgttatgccccagattgtaggatgaagatgctaccttttaaagagacttatttattggtaaaatgtttactttaatttaatttcctttcttaaaagttgtttattctgtcctaaaagtcgtcctgtcactgtgtttatatgctattagtggaagggggactgattggcgttccttggctgttttaacccaagccaaggagaaataattttcacatcttgttgatagctccttcaaccaacccctttttgggacttcattttttgtatataaaagaaaatatacttctatccaaaaaaaaaaaaaaaaaaaa

SEQ ID NO: 11357 - DNA, 691 bp, Canis familiaris
  misc_feature (410)..(410): n comprises a, c, g, or t, or includes no nucleotide
tcattgagatgatgagtacatccccgcgagggccagttccccatcagtgggcagcccccgaggctgctctcttttggcaattcgaccatcgagtcgagatgtgtggtcctttgggattctgctcactgagctcatcagcaagggccgagtcccctatccaggcatgaataaccgggaagtgttggaacaggtggagcatggctaccacatgccatgccccccaggctgcccagcatccctatatgaagccatggagcagacctggcgtatggacccagaggagaggcctaccttcgagtacctgcagtccttccttgaagactacttcacttctacagaaccccagtaccagcctggggatcagacatagcctatttggtcatcaaccacctttctggggtacccaccantcccccttccaatccccagggctctgatcccagagctcccaggcttagaaccctttagggtcctagcatttcagagcaacctgcttgcccctctcgggcaacaatcctctcattttaaagatggggccagtagaggcttagagatcatccctcactctggctccaagcactatttctcctcttcccacttaggcgcctacctctagattctcttcccacctctccctcaaaagaaatgctcagaccttgtctagttatttataaaactgtatatcctttcc

SEQ ID NO: 11358 - DNA, 439 bp, Canis familiaris
ttgtcccactggggtccaaaaggctagcctaaagtattacgattgcacagtggaacactaggggaccggaatcacggtattggccgtttttcccgttttcactttgtgtgttgaaattctttaaataataaatgcggggacagtaaagccttaaatgccaagtccaaaatgtttccagtggacacgtttcaagcagttcaactttataacaattataaataaacctgttaaatttttctggacaatgccagcatttggatttcttttaaaacaagtaaatttcttattgatggcaactaaatggtgtttgtagcatttttatcatacagtagattccatccattcactatacttttctaactgagttgtcctacatgcaagtacatgtttttaatgttgtctgtcttctgtgctgttcctgtaagtttgctattaaaat

SEQ ID NO: 11359 - DNA, 521 bp, Canis familiaris
tcttcccacttattttagcttgtggagttctggaggactccctttctcttctactcctttggcccccatttttataacctgtttttgagtgtcccatggggcagggtcgcatatctttgccctcctccaagccgctcggctccctcccagatcctaccctccagcctcgccagttgcccaacactaaatctgcagacactcacctgtctgacctcccaccatggccatgaacacagcctcccccacaaacccccctcaaagttcaggattggggagagggaggaggggaggaacagtctccctgatttttccacataatttttttccagagtttgggttttttgggcttatccttattttttgacaatttaggggggacgaggggccgggcatggcaagggggttggcctgagggtcaccctttggctcacagccacgtttttgtacagaattgatggttgattctttgttctcttgaaataaaccgaggaaaatgaaaaaaaaaaaaaaaaaaaaaaaag

SEQ ID NO: 11360 - DNA, 636 bp, Canis familiaris
gggcagctttgagttccaggtgttggagtcccaggtgtcggagtcccaggtgtcggagtcccaggtgtcggagtcccaggtgttggggggcctggcattgtggtggaccaggagctgtgtcaccagctgcagccgctaaagcagccgccaaagcagccaaatacggggccagagctggagtgggagttggaggcattcccacttacggagtgggagttggtgctgggggctttcctggttacggtatcggagctggaggtgttcctggagcccccctttcccctgcagcccaggcagcagcagccgctcaggcagcagccgcagccaaggcagccaagtacggtgctggaggagtaggagcattagggggactggtgccaggagtcggagatggagtagcaggtgtgccgggcacaggaggggtgccaggagcacgggaccccagctgctgcagctgccaaagccgctgccaaagctgcccaatttgggttaggtcccggtgtcggcgtgggtccaggtgtcggtcctggtgttggtcccggcatcggtcccggtgtcggtcccggcattggtcccggcattggcatcggccccggtggtgttacaggagtggggaccccagctgctgccaagccg

SEQ ID NO: 11361 - DNA, 533 bp, Canis familiaris
ataataagtaaatgctttgcaaattgataccctgccataagtccctccattcttaccaccatgttaactaatcctctagctgaattaatgccaaccctaatggggggattttatttataagggctctagaatatgaataccagttattcacaccagcatcatctgttactaattctaaactagttagtgcaagcttttctttgtgttgtggttggtctcataactaggttgagtttttctccaccacagagggaaacacatgccgaagttcttttccttgtggagtttgtattataataacccttagagtaaacttgctgtgggggaggggcacactactcccgctttttttgaacctctgcgggttaacatggtgtcgggttaggttacatctgatacatggtcctgggaaaaatcactttatagagatggcctttccaagtggttttaaaaattatccttctattgaagtcttctaggtcaattatgtatgttgactaaatttacaaataaacttgtttattcaaaaaaaa

SEQ ID NO: 11362 - DNA, 564 bp, Canis familiaris
  misc_feature (1)..(1): n comprises a, c, g, or t, or includes no nucleotide
ncctgccccacagtgcaggccgctatgcagccaagcgcttccgtaaggcacagtgcccccttgtggagcgcctgacccactcaatgatgatgcatggccgtaaccatggccagaagctcatgactgtgcgcattgtcaagcatgccttcgagatcatccatctgctcactggtgagaaccccctgcaggtcctggtgaatgccattattaacccgtggtccccgggaagactcaacccgccttgggcgagctggaaccgtgaggcgtcaggctgtcgatgtgtcccccctacgcccgtgtgaatcaggccctttggctgctgtgcaccaggtgcccgtgaggccgccttccggaacatcaagactcttgctgagtgcctagcagatgagctcatcaatgcagccagggctcttcccattcctatgctatccagaagaaggatgagctggaacgtgtggcccagtctaaccgttgatcacctggctgtggcttcaataaacctgtctgcccttggggcagcctcacccaaaaaaaaaaaaaaaaaaaaaaatcaaaaaaaaaaaa

SEQ ID NO: 11363 - DNA, 574 bp, Canis familiaris
tcggggtagtgtgagcttttaatgttaagtcatattaaactcttaagtcaaattaagcagacccggcattggcagtgtagccataactttctgatgttagtaaaaacataattggcgacttgaaattaaatcatgccacaggttttgatacacttgtcttaagatattaatgatacacttcaaaaacactgataagaagtgtccagattctcagatgtttgttgcgtgagttttgtttagttgtgtgtattttttttttcagtgaatgtctggcacattgcaatcctcaaacatgtggttatctttgttgtattggcatattcagtgacttgtacattcagcggcagcatttaagccagttttatccgtaagcaatattttcagttaaataaacgtttcaaaaaatcacataagaatggatttaaacttgctgaatgtaaagattgaacttcaagtcactgtagctttagtcaattgcttattgtattagtttagatgctagcactgcatgtgctgctgcatattctgattttattaaaataaaaagttgaactgctaaaaaaaaaaaaaaaaa

SEQ ID NO: 11364 - DNA, 602 bp, Canis familiaris
gttgcacgagcccgtgcgatctgaagagggccgggacttgccacccggatcagtgccttggctacctggagtgctcagcctgagacccaggatgggggtgagggaggtattcgagatggccactcgggcgggtctccaggttcgcaagataagcgccggagggtttgtcccattctctgagaccactgaggcctcccctgttcaccccccccttcatgggggtgcagaagctccccacttcctggccccacacttgttgaaggaaggcttccttgtcattccctccagcccaggactgcatctgagtttcccctgccccaccagaccccagggtggtggtaggctggccctccctgcccttccagagcaagtcccttgtcctgttgccttggtccaggggtgaggctcttgatccctcagccttccccagaggatcatcacacaccagcactttatatactttgggctcacaggagtgtctagggtaggggacttggagggtgtatgtcacccagagccccgggtccctggcatttatgctttggttggggaccttgcctctcgctgtacttggtggaaggcatgaataaaggccacaggtt

SEQ ID NO: 11365 - DNA, 582 bp, Canis familiaris
taatccaccccaaggttcttccaaatgttatccacgtgacgtgatggaatttgaaccccatttcatgctgtcagtaatatcccagaattatggtaaaatgagaccctgggaatgagagcatagtggggaaagggtctgtttggggattataaacctgaaacacaggctttctccctctcttcaaatcgctgcctgcattggtccggccactgtgccctgggcaccccgagctgatgtgctagaacagccgtgtaactcctgggagctttacagcagcttaaatagcatagagcccaccccactccttacccaatgtttgcttctcatcctcctcccactcctcttcccctcagtttcagtggaggggctggctggacctgcagacggaagccatatgttatggacagaaccaacgtgtcagggcagcacagctgtcctctccttcccagatgtggcgggtcactgggcattgtctgcactggctctttaatgtttctacttctgttgtacagaagctctgctgtatggttttcttgaaaataccgtttatactgaaatgaccccaaaaaaaaaaaaaaaaaa

SEQ ID NO: 11366 - DNA, 593 bp, Canis familiaris
acacatactcgagggcctgagtatgaaaggactactccacgggataacatgaaggctacgtgaaaaacgtggattgaaggagatttttttttttttttttttttggattgaaggagatttaagtttgaagtgacaacacgatgcgataagacagcccactgggaaatagaactgactcagtgtcccagagaactgcggttgttctcgtctgagggagaacggtacgaagaagtctgttacttgtttgtcttgcacggtcatctgtgaagaggtgggtcccgggtgagaagaaggccaccggaggagagaagaaaggtgaagaatcaggatgcagtgaacttggaccaacctggccgcagggaggcccgtgtgggctgcgaccgccgctgctgctctgtgccccgtgtcacctgcccagacgtgccttccagcaacagcccacagggaacacgttatcctctagtttttgatgtatttttgtaaaatgattttctacacgcaggatctgcatcagcagtttacaaatgacctattagctagtaatagatcgaaagtacctctgtagtaaaatgtgaaaaagccaaaaaaaaaaa

SEQ ID NO: 11367 - DNA, 600 bp, Canis familiaris
ggaatgataaacaggatatttggtcaatttggtagtcccagaattacattactatttctgacttgaataggtacaccttaagcaactgtatgggaaaattaagtaggaaaaatatgtttacttttccctgctttagtatcctagtcctcctagaatgaattgagggttgatattaatatatgtccagttttccctttaaccatactttatgtacctttatatatgtgtaaacaaagcatatattgaagtctattaggggcacatctacctttggagtttgaacacttggatttaaataatattattttggagtcatacatctatgcaatattttattctgtcaaatgctatttccattaaatagtttaactagattgtataaaataactttattgcctaacatgaaattaccaagcttaggcataggggaaatgggctttttagaagccaggaattctaagtatattctgttcttcaaataaatgtcattttcttctttaaatattgaataagttttatgaacaatatctttctttgcaactcgaattacatgtgcttggaattaagttctagtttttttcactgcacaataataaagcc

SEQ ID NO: 11368 - DNA, 631 bp, Canis familiaris
  misc_feature (48)..(48): n comprises a, c, g, or t, or includes no nucleotide
cggcgttaatgagatcaagatgacccagatgttcaagggtttcagcgnccttggggaatagcctcggacatccgcttcgtcgacacccccgccctggagagcgtctgcggatacttgcacccggtccccgtaccgcagcgaggagtttctgtgtcgccggaaacctgcgggtacggacacttgcagatcaacacctgcagtttcgtggccccgtggagcagcctgagtaccgctcagcgccggggcttcacccagacctatgctgctggctgtgaggggtgccccgtgtttacccgttcatccatcccctgccaactgcacgagtgaccctccctgcttgtggccggacccgttcctcacacggctctgaacaagggtttccacgagccgccaccctggcctgcctgcccagagagccacgggatacctcgcacctggcagtccctgcggccccggatggcctaaatcctactccccgtggaagcccaagcctgccccgtgttcaccccccttcccactcctgtctttctttatcccaaaccaatgaaataaagaactacccatcccaaaaaacacaaaaaaaaaaaaaaaaaaaaaaaaaaaaaaaaaaaaaaaaaaaaaaaaaaaaaaa

SEQ ID NO: 11369 - DNA, 390 bp, Canis familiaris
ttgcaattttgtaaaatatttcttgtattctttagttgtaagccaagaatacacccagaaaacacgggtacatcttcctgtggtatctatttaacatgaaggattgtggcaggaaatgttatgccatctggctagtaattaatattaaacatcatatttatgttcaaacagaccatttatgtactaggaagtaacatgtacagatttttaagatacagtgtgaggaggttgcctgggtggcttggtccggtaagcctctgactcttggtttctgctcaggtcatgatctcggggttgtgagatcttgcccgtcatcaggctctgccctgggtgtggagcctgcttcaccttctgtctcacctctctctccctctgcccatccttttcttc

SEQ ID NO: 11370 - DNA, 510 bp, Canis familiaris
acactgacgatttctggttatggaaaatcaaaacccattaaaagtcttagcacctggacctccatagctgtggagcaggcacttgggggcaccagccactgctgagtgctcttggcagctatcagaagcccatctgccctttaagcctcaacagaacagagggacttctacacagaggtggagctggagcaggcaggaagaaaatggtggtgaagacaactattctgcaggtgcacttggaggcttcaccaaaccactttggggagagataaggaagtttgacttttctgcagaatgaatggatgcagagcccaagaattactgttttgcaactgttgctgcagctctttatttactgtaaaggatgatgttgcctaacaaacaggtctactagggaacgagcatttacttgctaaggtatctctgaagctctttaacaatctattaaagataacatgttaaatatcacacatatataaaatatgtacacatactccaatacatttaata

SEQ ID NO: 11371 - DNA, 534 bp, Canis familiaris
tactaccatccctcaagtgcttcctccattccctgactgaattacatctttgaaggcacaaatcaccaggttgatgcatctagcctgaaaggactgaataatttggctaaattgggactgagttttaacagcatctccgctgttgaccatggcactctagccacactcctcatctgagggagcttcacttggacaaccataagctcatcagagtacccggtgggctggcggagcataagtacatccaggttgtctaccttcataacaacaatatatctgcagtcggatctaatgacttctgcccacctggatacaacacccaaaaggcttcttattcaggcgtgagccttttcagcaacccagtgcagtactgggagatccagccatccacccttccggtgtgtctacgtgcgctctgccattcagcttggaaattataaataattccccagaaagccctcgtttttataacctggcaaaatccccttcatatcattgctcccaaaaaaaaaaaaaaaaaaaaaaaaaaaaaaa

SEQ ID NO: 11372 - DNA, 621 bp, Canis familiaris
  misc_feature (249)..(249): n comprises a, c, g, or t, or includes no nucleotide
cctggtctgaacctcatcaataatgcaggaagcgatatagagaagtatcctgatttttggctcaccattttccctttttttgagaaaaagaatctcccttaactagggctctttggggccaggtgtattggcacagaatcaggagtttcctgcggcaggaggcaaaggtccaggtggaggtggttgtcagagattgcatttaaggaggcatttgcctggactcccatcgcagcttctaagctgcacacnttgtctgcagtccttcccttctccggtctgttctccatgctgtggcagagatccttttctaaatgcagatcagaaggtcctgtctacccatggtgttggtgttgaagaagcgcttaggctctgcctgaggccgggtggctgccacagatgagtgaggcatggggaagtgcaggggctattcaaagtggaatgtttgtgtccactggaaggccttaacattccagcttcgttagaataatgccctgggcaagcaacacaggaccatgggctggaacaaggtaatcggtctaagactcccaagtccaggaggtatgatatgggttttaccaaatgatgagttaataaatatataattcttaggatgagaaaaaa

SEQ ID NO: 11373 - DNA, 600 bp, Canis familiaris
  misc_feature (1)..(1): n comprises a, c, g, or t, or includes no nucleotide
nttgcccccaggcctgatgacagctattcccccccacgctttggtacatgaatccccccttagagacattcatccccgcaccataatgcagacaccctattgctacccaggcctctccttcccagctcccttggctccagcagcacctggagaccatgccccctgctccctccccagtgctgctctccatatcccccccgctttgttctggaaactcccgagagggctggagcttgacccctctcagggaatgttgcccctgggcccctggcttaaggctatactccggatctctgctcacccccagggccctctccaagccccctgccccctctacaactcctaggaggtaccattcttctcactctgggtcctacccctgcctagcagtgtcctagctctcaacagcttagggaagctctacaccagagtaacctggaaccaggcaccacgggaaatttggtataactcaatcagtgtctctatgtaacccataaggtcttaataaagtatttctggggtgccggttctgccaaaaaaaaaaaaaaaaaaaaaaaaaaaaaaaaaaaaaaaaaaaaaaaaaaaaaaaaaaaaaaaaaa

SEQ ID NO: 11374 - DNA, 623 bp, Canis familiaris
agcctggaggattttgctcaggcccggggcttccgccgctgcacctcacccacccacgaccagctgcagttctatgcccacctgggctatcacctgggtgagcctgtgcagggcctagtcttcactagccgacggctatctgccaccctgctcagggcctttcccagagccccctctccccggccaccctacaaggctcctagtgtaactgcccaaactgccccaagagcccacaaggggccatcgttgccaccaccccctcccctgcctgagcccttgacctcctctctcccacctcccgctgggctccctccacaaagcctgctggagactcagtaccaggatctgagaggatgccccatattctggatggaaaaggacatctgagggctacccagggcagggcactgtccttcagggtcgatggactgcttaggacactaccagcctcagcccactgggccatacctcaggctctagcccctggggacagctttagcctgaccacacttcctgagtgccagtggggctgggagattgattgctccatagctgtggctcagagctgacaacgtggtggaataaaggcttctgttgggaaaaaaaaaaaaaaaaaaaaaaaa

SEQ ID NO: 11375 - DNA, 469 bp, Canis familiaris
aacctttcctccagaagggcctgtgggaatgaagaaaagaagggctatagcctctgttatcccatttagcaacgtgtcttgactgcctgtctgtgccagacacacagaaacaccagggattcggactcagaagagcaggcttctggggcacctgggtgtctcagtcagttgagcgttcaacttttgattacacgctcaggtcatgatcccagggtcgtgagatcaagccctgtgtcgggctccatgctcagtgtggaatctgcttgagatcatttccttctccctttgtccttcccctggctcatgctctttctctttaaaataataaataaatctgaagaagaaagaagaaagaaaaaaagaaaagaaagaaagaaagagaagagaagaaaagaaaaagaagaaagaagaaagaaagaaagaaagaaagaaagaaagaaagaaagaagaaagaaagaaaaaaaaaaaa

SEQ ID NO: 11376 - DNA, 636 bp, Canis familiaris
ggctagatcttatgtgtctgagtcccggtctacccgtagagcctctgccggccttccccctcagtgaccttgcgccccctggacatatcgatgggccccgaggccggaattttgtgtgggacacttgggcccgtccgccttccttgttaatccccggacccctccttccaaccccaattcccgtgcccaattcccaggagggaccccaagtacctttccgttcccccgttccccttcttagggcttttgcccctgaatggctgaccctgaccctgatgtccattcatcccaccccgctcacagtgtggacttttctcccctctttctaagagacctgaactgggcagactgccaaataaatctcggtgttctatttatttattgtcttcctgtaagacctttgggtcgaggcagaggcaggaaactaactggtgtgagtccaacgccccctgagtgactgtccccagcccacggccagaagatctcccttcaggtgccgggcgcaggaactgcgtgtgtcctacaccatggtgctattctgtgtccaacacctctgtattttttaaaacatccattgatattaaaaaccaaaaaattattggaaagtaaaaaaaaaaaaaaaaaaaaaaacaaaaa

SEQ ID NO: 11377 - DNA, 494 bp, Canis familiaris
  misc_feature (357)..(357): n comprises a, c, g, or t, or includes no nucleotide
tgttttccttttcccattaatgacgaaactcaagtgtgacatttttttaaaaggttgtgcctccaacatttttggtgaggtcacctgttttccatgtccatcattttatgctactgccttttaaaaagaactagtgtatctttgaaatagcacaaaaatgttttaaaattcataattacaaaccacctgtgactaacttaatgtcttcacatctagaaggtgtaaaaatattgatatttcagtgatatttcacttgctgccagaaaaaaatattctcagtcttttgtaaaaggaaggaggatttttgcatacatttttactctttaaataaagacaccttataccgggttcaattanaataaccaattatgtatttctttgtggtttttatttttttgtattttacatgaacgttattttctatttttactcagataaaatatttgtgcataaatgtaaaatagtaaatgagaaaataactattatacagtaaa

SEQ ID NO: 11378 - DNA, 592 bp, Canis familiaris
  misc_feature (1)..(1): n comprises a, c, g, or t, or includes no nucleotide
ntgacgtccatgggagtttgttttggccccacaatcaacgggactttcccaaatgtcgtaaccactccgcccccttgtacgccaatgggcggtaggcgtgtacggtgggaggtctatataagcagagctcgtttagtgaaccgtcagatcgcctggagacgcccatccaccgctgttttgacctccactagaagacacccgggaccgatccacgcctccggactctagcctaggccgcgggacggataaccatttcacacccggaaacagctatgacccttaggcctatttaggtgacactatagaacacagtttgtaccaaaaagcaggctggtaccggtccggaattcccgggatcacgagtcagtagggaggaaaggtagagggggagggaaagaattctcaagcagactcccccctgagccacgggagccccatttccaaaccctgaaattatgacctgagcccaaacccaaagtcagtcactcaaccgactgggtcacccaggcaccccctaaagtaaattttatttaaacccaaaaaaaaaaaaaaaaaaaaaaaaaaaaaaaaaaaaaaaaaaaaaaaaaaaaaa

SEQ ID NO: 11379 - DNA, 501 bp, Canis familiaris
ctaaagtaaaggggttaaatctgacattctaaaatttccacttccctccatagagctttctccaagatggtcttcattggatatagggctttaaaaatcactttcaaacaccaataaagttaccccaatctgtgaagaccgtatttgccgtaactttatctggctaatttcttttctagtaatttaagagcgtggatatttgggattgcatttttattttactaatacctgtagctattttattatttacacttgttttttgttttctttcttagccaattctgtgacgctgttcattgctcttcctcaccttctgccataatactgtctgtcaccttagttaataaactgaatattcataggacttgatgcttctgctcagaaatggcccacaacctgcaccctctgtgctggtcttttttaccccagagtacacaggccagcttccaaaaatatatgttatatcaaccctctggtaatacattgaaataaaaaaaaaaa

SEQ ID NO: 11380 - DNA, 701 bp, Canis familiaris
cggaccgttgccccgcggatccgggtgtcttgcctgtggtccccccgggtcttgtcccgcagcctcccgcgtcgtgactccgtggcctgccctccgaccccccggagcccccgaggctggggcggcacctgcgcgcagtctgggccacgaccgccaggtccccgcggcttcccggagtgcgggcctgctgggggcccggtgccccgggtcgccgcggcggatggggctcgtgatgtgcgtgcgcctgtccgaatcccggcccaagctggtcacgtgcgcgcagaatgagggacgtgctgtgatgggccacgaccatcctctgcagtgacccccgcccttgaacctaaggcgcccctgttccgaagctgacagcgatgcgccactgagtgttcccaagcatcccgttaggaagtgtccgatgcagaaaagaaaacgaggcagcgtagaagcaggaggaacagcagaagcaggaggagaagcaggctccccactgagcagggagacggatgctgggctcaatcccaggaccccgggatcatgacctgagcggaaggcagacgcttaacagactaggccacccaggcgcctccacatgtttttgatattcatccattttgtggtgtatttcccgagctcatcccttcttactgcagagtatgcttctttgtaagtgtattacagttgtttattcatttaaaaaa

SEQ ID NO: 11381 - DNA, 572 bp, Canis familiaris
gtcgggaaaggagccagctcgcaagtttggcgcgtgaggaagttcgacctgtgcctgtgccccccccatctctatgggaacttcttcacgggcgacgcctacggtcatcctgaagacggtcagttgaggaacgggaacctgcagtatgacctccactactggctgggcaaggagtgcagccaggacgagagcgggccgctgccatcttcacggtgcagctggacgactacctgaacggccgggccgtgcagcaccgtgaggtccagggcttcgagtcggccaccttcctgggctacttcaagtccggcctcaagtacaagaaaggaggcgtggcgtcgggattcaagcacgtggtccccaatgaagttcgtggtgcagagactcttccaggtcaaggggcggcgcgtggtccgagccaccgaggtgcccgtgtcctgggacagcttcaacaacggcgactgcttcatcctggacctgggcaacaacatctaccagtggtgcggctccaacagcaaccgatacgagaagctgaaggccacgcaggtgtccaagggcatccgggacaacgagcg

SEQ ID NO: 11382 - DNA, 577 bp, Canis familiaris
gtttttgctgttccacccgtctagcaccattcacccccgcaggggagggaggcgactctttccctgaagccacctggtgacagcagcgaggacagcgaggccgtgtgcacacgaatgtaacccctggtgtcaagatgaatgtaaaccctggcgtcggtttggccctccgtgtgggggaccccactagaatggtgctctggcgcgggcgtacctcaagaggcaggagaggaggggcttcacctcctgtggatcaggtgacctggtagcgatgttaaaagcaattgactagtttgggctttagtattgtaaaataaacccggaagcaaataatcagacatatactttaatgttaaaggtgctctatttttttggatgtacagtagttttatttctcacagccacatgatcatagcaataagaaagaggcatagtaaatagttggagaagccgtgtcgggaaaaatgaaaacaaaaaaaagcactgatgtctttaccgctagtttgaatgcagttaatttagaggcctatttatttgcaggagcacacggtgcctgaatattaacagtgttctgatttaa

SEQ ID NO: 11383 - DNA, 586 bp, Canis familiaris
caactacgactactatgcaagccgagttcccgaatctgttaaaaatgcactcgttccttaaaggaaaacctcatgtacttagctaggagaagaacttgattctcagagtaatataccttaaaactaattgagtggaattagagttccacttttaccttattcattgttgattggtgatttatatttagttactttggagtagggagagaaatgaaagaatttcttgattaattaatcacccagacccattgtgagatcggaaggattcataaagtaagcattttacacgttcttttcctccttgtatttggaggaatgaaaggagggtttcctttcagcgcacccatctcgtcggttttttaatcaacattcctgttattgtgaaccagattcctttagggcacagaatcacaaatggttacctgaatctcattcttgtttttcacagtagtattaagttttccttactccaattatgaatatactgaaatgtcatgtatgttgatgaaacagatttatgggaaaagcttctttgtaataaattatttaattctaaaaaaaaaaaaaaaaaaaaaaaaaaaaaaaa

SEQ ID NO: 11384 - DNA, 606 bp, Canis familiaris
ggactggataatttggctaagttgggactgagttttaacagcatctcccctgttgaccatggcactctagcccacactcctcatctgagggagcttcacttggacaaccataagctcatcagagtacccggtgggctggcggagcataagtacatccaggttgtctaccttcataaccaccaatatatctgcagtcggatcttaatgacttcttgcccccactggatacaaccacccaaaaaggcttctttattccaggtgtgacgccttttcagccaaccccagtgccagtactgggagatcccagccatcccaccttccggtgtgtctacgtgcgctctgcccattccagcttggaaattataaataattccccagaaagccctcgtttttataacctggccaaatccccttaatatcattgctccaaaaaaaaaaaaaatgaaagctagatactggaaacttaactgccatgtggatctttttcccacatgatttataatacataaagccgaatatgccagtttaaataattgcctaccaataaaaaaatattttgcctgcccaaaaaaaaaaaaaaaaaaaaaaaaaaaaaaaaaaaaaaaa

SEQ ID NO: 11385 - DNA, 278 bp, Canis familiaris
  misc_feature (1)..(1): n comprises a, c, g, or t, or includes no nucleotide
  misc_feature (41)..(41): n comprises a, c, g, or t, or includes no nucleotide
ngattgaggccccctacgccaggggcccaagttcaagttcnctggccgccagaagatccacatctccaagaagtggggctttactaagtttaatgcggacgaatttgaagatatggtggccgaaaagcggctcatcccagatggctgtggggtcaatacatccctaatcgtggccccttggacaatggagggctctccactcatgagaaccttgcaccacccgaccctattcatgcccaccaataatcctgcttcctgtctgtcaaaaaaaaaaaaaa

SEQ ID NO: 11386 - DNA, 473 bp, Canis familiaris
  misc_feature (1)..(1): n comprises a, c, g, or t, or includes no nucleotide
nccctgctccacgtgtgccgtctcatcctccctgctcctctcgtcacatctcccacgctgggtcccctgtctgtggcgcggggcctctgctcagcccctacccaggcaagccccggggccgagggcagctgccccccagcctggaccgtcctggaggaggtcagccggtggtagacgatgccccctgcatgcactccgcactcccaaggggagcacttggccccggaaagggcccagcctcccacctggagcccccgcccgctttcatcgtccccctctccccaccgagatggctagctctcccctcccttcgccttctggccccctggtatggtgggggtttctaacgatcacaccccgcttgaggaggggctgctttctgaggtcggttgttgtctttccattaaagaaaccctgtgccaaaaaaaaaaaaaaaaaaaaaaaaaaaaaaaaaaaaaaaaaaaaaaaaaaaa

SEQ ID NO: 11387 - DNA, 622 bp, Canis familiaris
tgagcaccagtcgcatcctcaatgggcaggtctttggttcccgttcctacttctttgaccgggctgggcattgtgaggacgagggctgctcctgggagcatggtcacagcgaaagcaccagcatgtcaggcagcctaggctctggcagctggtacggcgccatcgggcgggagccaggctggtgcgggggcagccagacacggaccactccgctgctcttctcccaggtgctgggaccaggtggccaccaccccagtctctactccaccccacagacgtgatccccctcccttctcccctagaacacccagaccccagtcctccccacccaggccccgtgccaagttcacctgccgcttcttgcccaggatcaccgggagactggccacctcttcccctggccggctccttgctcctcctgtcgtagtgagcttgtgctatccccacaagggaacactggctctggctgccagatgcccccagcacccttggcatgacctgccgcctctgcttctacactggagccagctacctctcctgcacctgccactcaataaaccgtgtctgtacccccccaaaaaaaaaaaaaaaaaaaaaaaaaaaaaaaaaaaaaaaaaaaaaa

SEQ ID NO: 11388 - DNA, 662 bp, Canis familiaris
tagcagttagacctaaccacgctaaccgtaatcaaccatgggatccattactaagcatgtcatactgattaacatctaataatttggtagtaaattttgtttggctattataaatatcgaagtataaataattttaaccctagataccacacatgtagtattttaaccgaaattacgtgtcaccccgttattcacgttaaaatactttatttgaaaagaatgaataatgtttattaaaatgactacataaggggtttatccccaatgaatattgtggccttatattcacacagttataggaaaccctacatttaagtgggtgcaggttgtctttactaaagaccacactgaactctgctgttcctggttacgcagcggaatccgaggagcagatacagacccccctgtacggttcggacacttagcagccgtcctgggcagtccgtctcctgtcccgggcgcctgctgaggatcctaactcatcacctctggattgctgaatttagtctactctttgtgtttggtttttgtgtgctcttagaatcagcttcattctaagccaacctgtgtctacttccaaagactggaaatagaaaaaaataaatctttgcccaatccttccaaaaaaaaaaaaaaaaaaaaaaaaaaaaaaaaaaaaaaaa

SEQ ID NO: 11389 - DNA, 653 bp, Canis familiaris
  misc_feature (441)..(441): n comprises a, c, g, or t, or includes no nucleotide
cggccgaccgcagaccgagaggctcctcctacgacttcccaggagcagcttgacccgcctgcccccatcgccccggagcagaggagggtcttggaggagatgacagttcctccgagggagatgctgctgctgactctgggcgggctgaggttggggagcggacaggtgtgcctccacggcctgccatgaggtccgtcttggatgacgcccttgacacatgcaggctctttgctgcctgagccttgctcccattatagagcctcccggggcctcagtgttgctgtctgtatactagtgggctggactgtcttgggacggaccttccactcatcttgctggattctggaatcccttctggaagtttggcgttagtctgctgggctgaaatcctcacctcactgtcagtgttgttgtttccccactcttagccagaggccccancttgctagtgaccactctgtttattggaacttttgtccgctagtggcctcctggggacctgcctccttcctgattgccccagagctgaactggcctttcagggaggcaaggctgaacaaacttgcagtccactcgacctgctgggtgtcctctggcgcggcccttccccttggtggtttgtgatagaacaggtgcctggaggcctcccaaaa

SEQ ID NO: 11390 - DNA, 600 bp, Canis familiaris
ggaaataaaacaaaaaggatcttttgtctagtctctgttcatctgggctttcagagttaagtcttgttaacatggaaccactttcaggtgatgcaagacctttatacctacttggacctcaacgaagagggttacccatttaagcctcaaatggctgtgtgtcctgtttttcctactgtgagtccgtctgggagaggtgggcttctccagaagtggtggcttgtgtctcgttaacaaaaagtattcagacagagcttctattagagccaactggaagcacatgactgcttcctggctgaccacggcgctacccatgaaaatgttttctctgggacaactggcttcccagttgctactgagagctcttctgcttgggcgccgagctattcatcagtgcagcttcatactcacacagcttggctttgcttttctcccccagcgacagtgtctcatgtgcaggatgttaaatcctcctctgactttctgggctcaaagatctccgttgggagtaaatgtagatgttagaatttttacttcccaaattctgatttgcatttttgatcctattaaagttatctcctgcatgtatgactcaaaaaa

SEQ ID NO: 11391 - DNA, 648 bp, Canis familiaris
tagctttgaacgtaagttaataggtcgctcttgaccttgacatgagaaaaggtttaatgcacgaatagggatgagttactatacactggccttacccaggaatatagacccactttcaacatttctattattctactttgtatatatactagaagcccaaccggtgcctgtgaggggggggaaacaagtggaccaagtagttctaaaccttcctccatatagaaaatgtggtcagtgatgtcactttccttgctggtcatcattaggcttaaatgaaatgcagaagctcccatcaaagagtttacactaaaatcttcagggctttaaatgaaagggtaaggccagtttcagaaaaacaactttagacattagcagctcccatattaaataaagctctgttttcctatatttttatgactgttgagaccccgcagggacccaatatttgtattcaatttacatttcatggtttcccattgtttcacaatgagttctaataaatgggatttagtataataatccaagtatgacatagctggtatgctttcatgaatgtttttatgtagattttcctcccatgaacatgagtaaataaatctgtttcctgaaaaaaaaaaaaaaaaaaaaaaaaaaaaaaaaaaaaaaaaa

SEQ ID NO: 11392 - DNA, 597 bp, Canis familiaris
acagtcattccatgggaaagtctcttatctggtgacattgtggtcttcacatttatcccattaccttaagtagaactaactacagtgattactttaactttggtagtcttgtctttgccactttgatgtcatttgacttatgatgggacaaggtggcagaagtctgttttttttttttttaaatcttctatttcctatatttttctatatttggagcttctaaagtacagtggtaatttattttgagttccttttaaaaatctaatctgatataaacattatcctgcttaatagttagacatttagaagtagaattaaacactcagctaatgtttggtattttaaagtaaaaacagggcaacccgggcagcccgggtggctcagcggtttagcgccgctttcagcccactgcgtgatcctggagtcccgggatcaagtcccatgtcaggctccctgtctggagcctgcttctccctctgcctgtgtttctgcctctctctctctctctctctctctctctctccccacctccctctctctctctctcctctctgtgtattctcatgaataaataaacaaaattaaaaaaaaaaaaaa

SEQ ID NO: 11393 - DNA, 577 bp, Canis familiaris
tgtagcatccatcgacaactttcatgtgagcattccaagtgaaagtacatttgtgcagttactggaaagaaattgtacaaatagtgttcagcaggttaaccgattctgaaactctaagctctgttttaaaatttataatcagaccctcagagcaactgaaattcccttctcactgggtaaagtagtatctaagcaacttcacatagtatttgatcatgttattcctggggaattttattattcggggcaaatgactggcaagtgacaggttttttttcttttgttagtgaatttaaaaacgacagaaaaagccaatggcatatggtttttatgatcatggataccaagacagataatgcagactcatagttagttgtaggtgcatcccattgcatcccacttgtcaatgaggatttaagtaagtgacagaaatagtctaattttttccccaagggttgaatgttgctaattatttgtattgctgaagtgcaaattacctaaaagttaacatgtacacacacacacacacacacacacagagaaatatatctgtcttattcaataaatggtctttttt

SEQ ID NO: 11394 - DNA, 578 bp, Canis familiaris
atctgcagtgttgaacggatctagggctacactaggttggatgacaaggcggcctgtgactttgtcggcaggacatctgccaagtggaggaaggactccaccggggttttcctggcagggcccctgtggtacagtgaaggcggcagaaggaccctggaagcatctgcataaaagcataaaagctggtgagacctactgccacctgctctgaagtgacctgtccgggatcagttaggcccggtggtggtggtgggggcggtgggttcaataatacgtggtccttctagatcactgtatttattttgtgaggaaggataaaactaccgtccgttacattccaccatccgtcttccgcttaaggttttagaatttgcaagtatcggcttctgaaaaccaagcatcaccaggtaccacatgctttagaaagtgcatcacatttgtgaacttaatagtgtggtcgcaatttgtataaatatgcctctaatgacttttgggagatgtgatatatttttcatatttaaatgcattccacttcaaataaagtatctattgtgatgaccaaaaaaaaaaaaaaaaaa

SEQ ID NO: 11395 - DNA, 630 bp, Canis familiaris
gtttcaacagtgaaaataaatttagttcttcctgttgtcttaaaatatctgtgaaattttggactattacttaagacatgagtacatgatcacagtaaaacttctcctaagatgaaatcatgcagtatttattgatagccctaacatatggaatacatgtttatgctcctacccagatttgtgttgaacagaaacagattgcatgattggaaaggagacttcaacaattaatagttgacattttaagattaatgttttaaagctttacacctgtttacaatttgggggacgaaaaggcaggcttcatttttcttgattgatgaaaactggctaaaaatatttgtaaataaaatcatgagcaaaactgcacaaacttgcacattgaaaagtgcaacaagttattttgcagtaaaagtatttactattctaaaaaagtgaaaattgaagacttagccagtcggatgcatttctaaatgaaccagttgttgaaattattggaattaactgagccaaagtgattatgcattcttcatctatttagttagcactttgtatcattatatacagtttacaagacatgtataacttgtagctataaacattttgtgccattaaagctctcacaaaact

SEQ ID NO: 11396 - DNA, 630 bp, Canis familiaris
taagtgtgcggttcagacgccgggattgtgtgaccccacatctggcagaaagaatcctgtagctcgaaaatccgaagtgtttactctgatcctgacagggattctcggtacctgtcgatgttgtgcgttctgtaacattcgggagttgggcagctgtgctggtgtcgagggttcgagtgtgccatttcatgtgccgatgttggagggtgggaataggggtcagagtggacaggaaacccagtgacctcattcatccctaaaacatttttctttgatgaagtgcctaaatctgtggtgtttttgtacggtactaacatgacgtgccacctgtttgtgtcggattttgctgttcacggacctactctaagtaagattttatttgcagaatttatatgcaagtgtcatttttaggaactaaaattatttgtatgaaacttccattgtgattttaacaaattaaaactagcacatgtacgtggttagaaatgttactgctgagggaaggtacaaaatgacgtgtgcctaccccctgccactgcctcctcttgggggaagctcctgtagatttgtttccaggagggaaaaaaaaaattcacttagaaaaaaaaaaaaaaaaaaaaaaaaaaaaaa

SEQ ID NO: 11397 - DNA, 660 bp, Canis familiaris
cgaagagatgctttccaccagatgctgagcggcatccccgaggtggacctgggcatcgatgctaaaataaaaatatcatttccacggaggatgccaaggcccgtctgctggcagagcagcagaacaagaagaaagacagtgagacatctttcgtgcccaccaacatggccgtgaattatgtgcagcacaaccgattttatcatgaggagctcaatgcccccgtacggagaaacaaagatgagcccaaagcccgacccttgagagtgggtgacaccgagaagccagagcctgagcggtcccctcctaaccgcaagcgtcctgctaatgagaaggccactgacgactatcactatgagaagttcaagaagatgaacagacggtactaagggtgggagaagggagaagttgcagactgggatgtaaatagtgttgtccctcccatactcccttgacaaaatgcttcttgaacagaagtttgcttctgttctatttgctagcagaccattccaaaaacagacagtcctgctgcttacctgctggatttttcaggcactgcatttataaccttctgaaacaatgtgtagtttccctatttggggacaaattctattcttgtgagcgttattaaatcttgtttgtaaaaaaaaaaaaaaaaaaaaa

SEQ ID NO: 11398 - DNA, 520 bp, Canis familiaris
  misc_feature (1)..(1): n comprises a, c, g, or t, or includes no nucleotide
  misc_feature (74)..(74): n comprises a, c, g, or t, or includes no nucleotide
  misc_feature (89)..(89): n comprises a, c, g, or t, or includes no nucleotide
ntttggcaccaaaatcaacgggactttccaaaatgttcgtaacaacttccgccccagttgacgcaaattgggcnggtaggcgttgtacnggtgggaggtctatataagcagagctcgtttagtgaaccgtcagatcgcctggagacgccatccacgctgttttgacctccatagaagacaccgggaccgatccagcctccggactctagcctaggccgcgggacggataacaatttcacacaggaaacagctatgaccattaggcctatttaggtgacactatagaacaagtttgtacaaaaaagcaggctggtaccggtccggaattcccgggatgggccaggagcaggcggggcggcccgacggcaggctgggcgacgacttcctgggcatgctgcgccgcacggccgccctgctcaaggacacgctcgccgtggccgcggggctcggcgacaggtacgagctgctggcgctcaccgtgcgcagccacggcacccggctcgggcggctgaagaacgag

SEQ ID NO: 11399 - DNA, 616 bp, Canis familiaris
tgcttctcggatgtgttggccatgtcgaaaatcgaaatcaagctatcgtgatattccagaaggcaagaacatggctttcaagtggagaggaaaaccgctgtttgtgcgccatagaaccaagaaggagattgagcaggaggctgcagttgaagtgtcccagttgagggacccacagcacgatttagatcgagtaaagaaacctgaatgggttatcctgataggtgtctgcactcatctcggttgtgtacccattgcaaatgcaggagattttggtggttattactgcccttgccatgggtcacactatgatgcttctggcaggatcaggaaggggcccgcccctctcaaccttgaggttccttcgtatgagttcactggtgatgacatggtgattgtgggttagagacctggactcaggttctaggctcctttcggtcttcttgtcccctcagaagacttagaaggaagccatctacacttgggttgatttgaaatatttaagaattgctaataatgtacttgcaaacgatgtgaagtaaattgagtttaatgttgaatactttcaagcattcacctaataaagccactgttaaacattaaaaaaaaaaaaaaaaaa

SEQ ID NO: 11400 - DNA, 208 bp, Canis familiaris
agtgccccagctccggaggggcccaggctggggtggccagccagtccctgtgctacggcttgggacaatgtgaacacggactcaaacacatggtcctttttttgtagttcttaattttttttaatgtgccattattgtgagggaaaaaagaaaaaagaaaagcaaaccaataaaacacctttaagaagcttgaaaaaaaaaaaaaaaa

SEQ ID NO: 11401 - DNA, 615 bp, Canis familiaris
  misc_feature (113)..(113): n comprises a, c, g, or t, or includes no nucleotide
  misc_feature (154)..(154): n comprises a, c, g, or t, or includes no nucleotide
  misc_feature (178)..(178): n comprises a, c, g, or t, or includes no nucleotide
  misc_feature (185)..(185): n comprises a, c, g, or t, or includes no nucleotide
  misc_feature (192)..(192): n comprises a, c, g, or t, or includes no nucleotide
  misc_feature (332)..(332): n comprises a, c, g, or t, or includes no nucleotide
  misc_feature (347)..(347): n comprises a, c, g, or t, or includes no nucleotide
  misc_feature (350)..(350): n comprises a, c, g, or t, or includes no nucleotide
cccccaatgtatcagttgtggatctgacctgccgcctggagaaagctgccaaatatgacgagcagtcaaggaaagcgtaacgtttgaacaaaccgggcccccacggggccaantccggggagggacccctcaaaggcatcctgggctacactgnaggaccaggtggtctcctgtgacnttcaacnagtgacnacccactcttccacccttcgacgccggggctggcattgccctcaatgaccactttgtcaagctcatttcctggtatgaccaatgaatttttggctttaatcccccaaaaaccttggggggtccccccccaaacaaaaaancccccaccccggggnggnggtttggtggcctcatgtccacatggcctccaggagtaagagcctcctggaccaccagccccagcaagaacaagaggaagagagaggccctcagctgctggggagtccctgccccaacttaatcccccaacacactgagagaatctcctgacctccaatttacatcctagaccccaggaaggggaagggcttggggagccctaccttgtcatgtaccatcaataaagtatactgtacccagcgaaaaaaaaaaaaaaaaaaaaaa

SEQ ID NO: 11402 - DNA, 644 bp, Canis familiaris
ccgcctgctgcctgagtaaggggcattcctgctaccgacccaggaggactggagagaggagagcgcagaatctgctcgtcgtgtttgcattgtggcattgccgatactccgtagttctacaatttgctaattgtgtaataaaggggagaagggatatatggatagactcgcaggtatacggatagtgcctgcggtccgtccgtggggccgcggcacagccgaccacaactagggataccggttatgctttattctgagatcgggtagaagagcgagtagctgatgtccagccagtatgttttagttaagccacgctcccatcaaacgaaaggataggtaagcaacgctagcaccgcagcacccaagattcagtcgtcttgttactaccacgtcgtcctccaaacacaaacgtcggcgtattgctttgaagaacacagcgtatctaagaaaaataaggaagaggctgcagaatatgctaaacttttggccaagagaatgaaggaggccaaagaaaaacgccaggaacagattgccaagagacggaggctgtcctctctgagagcttctacctctaagtctgagtccagtcaaaaatgagattttctaagagtgacaaaataaataagatcagacaccaaaaaaaa

SEQ ID NO: 11403 - DNA, 641 bp, Canis familiaris
  misc_feature (129)..(129): n comprises a, c, g, or t, or includes no nucleotide
  misc_feature (151)..(152): n comprises a, c, g, or t, or includes no nucleotide
  misc_feature (330)..(330): n comprises a, c, g, or t, or includes no nucleotide
ggtagaatccggcttgtaatcattcaacaatatcagttgagtatttattatgtaccaggcactattccacacatttggactgcatcaatgaaaggaagcagaccaaactgtttttatggaaggaagacnataaacatacacacacataacnnactatataaatagcatgccatgttggaaggtgatgcatgcacagctgaagaaaagcagagttcaaaggcagtagagtggatggatcccgtattcattaggctaaccgatagtacagcccacctctgagccgagactgacaggaggaaatgacggaatgaacagctcatgcaaaggccntggggtaagagagtatacctggtaagtttgagaaagagcaaagtggccaatgtggctggggcaggtaaaccagagggagactatttagaaactcagagatgaaagtattgaagtaagaggagatcagatcatttaggacatggtaggccacttttatcctgtctgaagcagggaggtattttagtgttttgagcacaggtttgctatttgatgtatgtttaaacgggaccaggatagaagcaaggaaatgaggttggaagctaatttagtcatctcttcaagagagaacaggagcagaaaaaaaaaaaaaa

SEQ ID NO: 11404 - DNA, 445 bp, Canis familiaris
tggaagaagacacagtcacaaatgggtcctgagcagtgtggcccaagtatctgcaggatgcgtaatatgcctacttgggacaagtcctgtttttttgaacttggaataataaccttgtttgagtcagcaaagtggagcttataggcattgttgaaatgcttaagactgctgcccgtaattttgtaatactataaattttgaaatctaaatgccagttttctacaaatagtaaaaatgtgacattcactgtgctgccaagctgtctgtcatcgggcgggggtgggtgggtgtgcagtgctgtgaggtatggacatgtggaggttggaaatgacagaagtcaatgtttctagataggcttcccaggcctctctaaaatgtttagatttttaagttcttaataaaactcaagataatttgctgcccgtggttatcagtaaaaaaaaaa

SEQ ID NO: 11405 - DNA, 622 bp, Canis familiaris
tccgactccacactatcttgtcaggaacagacgaaatggcctttagacattgccgaggctttcaaagacgtgtcagaacccatcatatttctgcaacagatgcaggagttcagggagaaaataaaagtaatcaaggagactcctttacctccctctaacttgcccaccagtcctttaatgaagaactttgataccagtcagtgggaagacataaaattagtagatgtggataaactttccttgcctcaagacactggcacattcattagcaagattccctggagcttttatcagttgtttgtggtggtccttctgttcagccttcttgttttctttggtcccactatatttctagaaggatctttatttgatgaactcacaatttggaaagaccatctctcaaacttcagttcctatctgactaaatcagctgattttgtagaacaatcaatgttttactgggaacaggtgatggacgggtttttcattttcagtgaaaaatttaagaattttatgttggtggtgctgaacaatgtggcagactttgtgtgcaaatataaactattataaaaacctgttgccaaaaaaaaaaaaaaaaaaaaaaaaaaaaaaaaaaaaaaaa

SEQ ID NO: 11406 - DNA, 641 bp, Canis familiaris
agaccaacaccatccgtcaccagagaaaacaggcccacctgccccgggaccaacctacagctttttttattctgtgttgaaggaagccatgtgttcacccaccttaaacctacatttgaaaggagaatctgcagtctgatgggaaagcttaggaggccacacagttcatggaatcgctttagaggcagacccattggccgttgaccacagttgattgaaccagaagcatgaatggcgttgcgtagagtcctagagccgagtcccttggcctgcgctccatgtgcagataaggcaacagatgcagagtgtccgtgaccctctcacagtcacaaagctgcttaactacggcccctacatctccagcgtttgctcgttccctctgctgccttctgacgactgctatttccttgctccactcacttatgatcctattaaggtgtaaatcacagttcccttggaagagccagattttctctgagctcttgagttttttaactccttcagaaaacattggccattgtacatagcaccgtgctaggctctgggatcccaaatgatcccctttaaccttctgaagacgcaaccggccccttggaggagagtcattcctgcctaatctcatcagaggaagaggcttgtcc

SEQ ID NO: 11407 - DNA, 497 bp, Canis familiaris
  misc_feature (1)..(1): n comprises a, c, g, or t, or includes no nucleotide
  misc_feature (187)..(188): n comprises a, c, g, or t, or includes no nucleotide
  misc_feature (210)..(211): n comprises a, c, g, or t, or includes no nucleotide
ncctcacagcggagacaatcccacgggactcttcagttagccttcttcacgcccccgaggtctgccagcgacctcgtcgtgtgagggccagacggacggaagccagggtccaggggagttttcagccctaacccctgagtctcccccttccccagctgctcggcggtcaagacctgggttcccgtgnngccatcgggccaacggggctcnnagcacaggacacgaactcgcaaaccagcgtcgtccagcaaacagcaggccatggcgccctcaagcccgcgtcccctgagccccgagaacaaaggtgctatcctgcagacccccccgtctactcggaagcctgggccctgggccttcggtggcacaaagcgaggtgttgctttttaaacaaaaaaacaaaacaaaacaacccaaagctcttcttcctcaggggagtgattggttctacgttttactgaaaaccctctttatgtgttagttttctgattccttgtgtt

SEQ ID NO: 11408 - DNA, 560 bp, Canis familiaris
aggaaagtagaaagtcgagtctcctcagatgaagacttaaagctgacagagcttctccgatactatatgctcaacatagaggctgctaaggatctcttatatagacgcaccaaagccctcacagactatgagaactcaaataaagccttggataaggcccggttgaaaagcaaagatgtcaagttggctgagtcacatcagcaggaatgctgccagaaatttgaacagctttctgaatctgcgaaagaagaactaatcaatttcaaacgaaagagagtggcagcatttagaaagaatctaattgaaatgtctgaactggaaataaagcatgccaggaacaatgtctccctcctgcagagctgcattgacttgttcaagaacaactgatctgccttttctatgaatgaaggacacgaatgtgaaagaaagccagtatcacttgcacttaaatcattaccacagaagatttattacctttcactttagttaaaaattatgtgaataaatattttgatttctaaaatcttaacacttaaaaaaaaaaaaaaaaaaaaaaaaag

SEQ ID NO: 11409 - DNA, 256 bp, Canis familiaris
ccactgcatgcagagacctgggtgtcgctgcctcgtagtcgcttctaaaaaggacctgtcccaagcgtggaatcccccacccacaccaagtgctctggaaaagggggctgcagttttgtggagctcataaaacacaaatcatacgatccagcctcatggggggcggggggggggagtcctagcacggtttttgtaaagcccttttacaactggagaaatggcatcattataagctatgagtggaaaaaaaaaaaaa

SEQ ID NO: 11410 - DNA, 657 bp, Canis familiaris
ggttttgttagactgcctgcctgaaagcacaggacgctgggcaacaggtcttagaaaagttgtaatgtcagtagtgtaacctgagaaatccgtgcaactctgttgaatgtagtggactttaccatatttataaaggaaggaggaaggccaatgctaacttgtcaaccaataatatccttattctaaatcagatcattccttttgttagtagcagagtctattctcaattacaaatgatattaataggtggggataatttttttttaacagatgatctcatttgctgaatgatttaagagtaaaattagccacctgcgtggctttatgtacagtgaccggttttgttgcactcgtctgtggtggacccccttgcctacagtggaaagcagagtgtggaggaggtaaaaattggagatgtttgagaagttaaaatactattcctactgtaaggctgttgccggttctgaatgagacaagtaatttaatccatctcaatttagtgttttaataaaaaaacctggaaaattaattgaaatgggtctctagatatagtctgcaaatatgggtactatttttatgcccgtgtattttcacatttaatacaaatatttatggtccaaaaaaaaaaaaaaaaaaaaaaaaaaaaaaaaaaaaaaa

SEQ ID NO: 11411 - DNA, 601 bp, Canis familiaris
  misc_feature (158)..(158): n comprises a, c, g, or t, or includes no nucleotide
ttcggtgctcgtgggtcccccgcggcgggtgcgaggcctgggggctcgtgggcccagacgcaagtggccaaaggagctcagccccccccggctctcccaccagggcagagccgcgtggtcggggtgccgcccccggggtgccgctcagaggacgctcncctgtgagtcgggcccctgtgagtcgggcccctgtgagtccacacgtcccagggtgtgaatgagcctcggaaagcagctctgctcagagccagaaaacccgggcgcgcggtcgttgggacgcggtgggcttacgaatgactttctcgattttatgaattagatggttgtgttttgtcatttttttaactccctctgaaagaagctgtatgtcgtgagaacttgcgcacttgggctctcttatggacacttttgttctcctttcgttttgtcttgggaacttaacgtgcatcatgtgggatgcagagttctcccgttcttggagaagaacctgattcagttatttgatatagaaattattgacgattttatcgagttgctagtatttcagagtttgatcctagggttcattatactctgtgaaaaagttatattattaaaaaaa

SEQ ID NO: 11412 - DNA, 516 bp, Canis familiaris
ccagccctacggagactgagcggtgcatcgagtctctgattgctgttttccagaatgtttgtctggataggagggtgactgttgcgacagctgtgcgggggcagagttcgctaaccgttcatggatacagaactggctgccttcgcagaagaaccagaaggaccctggtgtccgtgaccgcagtgatgaagaaactggaccgtcaactgctgatgggcagctggatttccaagaatttcttaatcttattggtggcatggccatagcttgccatgactcctttacaaggtctccccatttccggaagtaaatcggaggggttcctgggcctggcctccagaccacctctttccttcaaaacagcttcccaatcatcacatccttctcacatcctacacagacctgagcccacagtgtccaccaccctgtgcaggccagtcctgctggtagtgaataaagcaatagcatttttttaaagcacaaaaaaaaaaaaaaaaaaaaaaaaaaaaaaaaaaa

SEQ ID NO: 11413 - DNA, 475 bp, Canis familiaris
gtggcaggagaaatccgggcacgtcccagggaatagcagatgggccttctacatccttccacctgcccttagatctccatttttatcaaatagtttattgcattttgaagtttgggttttttttttttccttatctttcccttccccttcagatcctttaatgttaagaaaacaagtgaagtttggtgcaagctaaactttttaagtggtgtggaaatgcaaataataccacagtaaaataatacagatattattaagattttttggttttgaaggttgttgttaagattaaatggtatttatgtgcctagtggggaatccaatattatgaatattaaaaaagggggcaataaaaagggtatgtaaaatatgtatgaagtaaaggtgtataaaaagtttgcccttatgcacggaactctgtttctaagtgccaagcacagaaagccgctaaataaaatctttgcattgtaaaaaa

SEQ ID NO: 11414 - DNA, 455 bp, Canis familiaris
ctctgtgtggaggtcctgtgggcttggctcgtgtgtgtgtgctgtgggtgtgggtgtggtgactgcctcttgcttgctcttgtgtccgcccgactgctgaagccttgcccttgtgcatctgtagtgctgcccggagcccacctttgctctgggcgtcccggccccttcccctgcgacacccatttcgtttgacctttaggtaaatgtggatgacaagctcctaagcctctggctgtcaggtgcagggtgtgctaggcgtgctctccaggggccctggctgccgccctgcctctctcacttggccacctcttctgttcactttaagttgccaggagacagtaagacatgcagttactattaaatagacttaatgactttttggtttgttttgcactaaagttcctgtgatttaacaataaataaaatctgttaaccagaaaaaaaaaaaaaaaaaa

SEQ ID NO: 11415 - DNA, 586 bp, Canis familiaris
cttttctgtcgctgcccctagcagggtggaggcccgcgggtgtgggacacggatttcggtcgagcagctgcgtcactcctacacctcggcccgtccccccccatcggcggccccgtacacgggtgctggccgcggaccgcgccccgaggccggccctgccccttctcgggttttgggaaaagcacattagccccaggaaggccggctctaggatttcacccctttcaggaaaacggtcccttgccttttcctcgactgcgtgccgggtggcggggtcagacccagcaaggagaggaagcgaggaaggcgacccccaccaccaggagggggtccagcgggcttgcccttatgaacccgaatccccgtttctcttgtagaaaggaagactcagaagaaaccgtagaatatttttaaagtgtttttttcacaatcatgtactaggaagcccatttcatactaaactgattaaataatacatttatgatctaaaactgtttgcacttacagcttttttgtaaatataaactataatttattgtccaaaaaaaaaaaaaaaaaaaaaaaaaaaaaaaaaaaaaaaaaaaaa

SEQ ID NO: 11416 - DNA, 654 bp, Canis familiaris
  misc_feature (212)..(212): n comprises a, c, g, or t, or includes no nucleotide
gtgagaccggacataggctcaccagagtgtactgatgctcatggacagtcccctgaaccgagctggctgctacaggtctatatccacacacagaagaatgtgctgattgaagtgaacccccagactcgaattcccagaacctttgaccgtttctgtggcctcatggttcagcttttacacaagctgagtgttcgagcagctgatggcccccnaaactcctgaaggtaattaagaatccagtgtcagatcactttccggttggatgtatgaagattggcacatctttttccatcccagtcgttagtgatgtacgagaattggtgcccagcagcgaccctattgtttttgtggtgggggcttttgcccatggccaggtcagtgtggaatatacagagaagatggtgtccatcagcaactaccccctttctgcagccctcacctgcgcaaaactcaccacagcctttgaagaagtctggggggtcatctgacagtagtgtcttgttctgggacagagattggccatggcatccctcgaccccgctttcagctcactgcttggaggggaccttcctgcacccagactggggggctcggggaggcgaggctgtatatttgctgctggttcatcgtataaatactgttcttataaaaaaa

SEQ ID NO: 11417 - DNA, 529 bp, Canis familiaris
gcgtggcatgccttgtttttgttttctgttgttggccattggggtacatgtttgaattttggtggtatgtgtttgctagcatagtaacagccttctcgtccccctgtaaggattgtctgtaaccttaagctcatcatagaacctcaccaagacagcttgtgtggcttgaggatgtccaagatgggatccccataattcagccggagccccatgcaggagaggacggtggggttgccagggctcatgaagtgtcaagctgattccccaccccatcctgccttgcctttccttcatttccttggttgagtgctggattcagcagtggctgcccgtccaatcctggacagtggtgtgtagcaagcaggctgggtgggtgtttgtggtggggcctcttggtgcctgggaggagctgaagatggggaggtttttccttactgtataaatgaatatttgtatgattaaattaacacacacacacactataaataaaaaaaataaaaaaaaaaaaaaaaaaaaaaaaaaaaaaaaa

SEQ ID NO: 11418 - DNA, 585 bp, Canis familiaris
tttctgtaaattagatgacctttttgtgccagtgtttccccttgcgtgtagtactttggtgtactttatgttcaaatcagcgcagccacttttgggggtaattttaatactactccgcacctatctttttaacccttgccttctatacatcctcacacagcgccagttacataatgttgcctgtcacgggcattgtacttttatccaattttgttttctctaaattcagatttccagtgatgtttcaaatcttgtggagatgtttagatttttaacagagaccctatcataaaatctgtacattacgtattagggtcaaaggtaggagaagcaaaattctgccatactgtaaatttccagtgcaggctttaatttttttttaattagtagcactgaaaaaatattactgcatgggtatgttatagttcattttttaaaagttaaaaaaaggcttatttgaggcatccctcactgttatgcacactggtgactttaaccatgcccctaagtttcttctgcatctgatgcagcccaacagagcttttgttttgaaataaatttgactaccctgtccatagccacaaa

SEQ ID NO: 11419 - DNA, 197 bp, Canis familiaris
ccttgggcccttggggctggaactccccacttggtggcggccaccttggggcccctgggagaagtagaaaacgaacacgggttttggagtgggagcctcaggctcgcggcaggccgagtgatgttgggcaggttaatccctgggaactttagatttctgatcctcaaaatggggattgacgctgggaagagctgaaa

SEQ ID NO: 11420 - DNA, 256 bp, Canis familiaris
gtcttgaccatggtcatgagtcatcttaatacatcttcagccaacctccatccttggttccttctggcacaattttagagaaaaaaatttagttaagcaaagcaaaaatttttgtggacttaaataaaagtagaagttgaagaaaaataacactaaccatcttttgtcattgccatttcttgctacctcttcctagttgaaatttcatggtcaacatttcctatattaaaatggtaggacaaaaaaaaaaaaaaaa

SEQ ID NO: 11421 - DNA, 566 bp, Canis familiaris
ttgacccagaatatatgaccccactgtccagatttctagttattcgtacgttgtatatatactagaaagccccaccggtgcctgtgaggggggggaaacaagtgacacagtagttctaaaccttcctccatatagtaaatgtggtcagtgatgtcactttccctgctggtcatcattaggcttaaatgaaatgcagaagctcccatccaagaggtttacacctaaatcttcagggctttaaatgaaagggtaaggcccgtttcagtaaaaccactttagacacttagcagctcccatattaaataaagctctgttttcctatatttttatgactgttgagaccccgcagggacccatatttgtattccatttacatttcatggtttccccttgtttcaccatgagttctaataaatgggatttagtataataatcccagtatgacatagctggtatgctttcatgaatgtttttatgtagattttcctcccatgaacatgagtaaataaatctgtttcctgaaaaaaaaaaaaaaaaaaaaaaaaaaaaaaaaaaaaaaaaaaaaa

SEQ ID NO: 11422 - DNA, 611 bp, Canis familiaris
cgatgtggtcattggaaagtgttcatgcaggagttcaaaggaagccgcagagccagccacacagccccacaggtcctctttagccacagggaacctcctctggagctgaaagacacagatgctgccgtgggcgacaacattggctacattaccttcgtgctgttccctcggcacaccaatgccagcgctcgagacaataccatcaacctgatccacacgttccgggactacctgcattaccacatcaagtgctctaaggcctatattcacacacgtatgcgggcaaaaacatcggacttcctcaaggtgctgaaccgtgcacgcccagatgccgagaagaaagaaatgaaaacaatcacggggaagacgttttcgtcccgctaactctggggaacaggaagaggaggcggctggcagctgaaggctggaacacttgctactggataatcgtagcttttaatgttgcacctctccaggttcttaagggattctccgtttgggttccattttgtatacgtttggaaaataatctgcagaaacgagctgtgcttgcaaggacttcatagttctcaagaattaaaaaaaaaggaaaaccaaaaaaaaaaaaaaaa

SEQ ID NO: 11423 - DNA, 573 bp, Canis familiaris
ccattggttcaatattttttttgggggggttcagtattttaagccatttcctcactgatttgtgaatgctatcattgtagaatattaaattcccatgtgtcttgtggtatgggcctatttctgtgccttgcagtttttcctgcactattttaataattacagatttaatcagcattaatatttggtataccatttctccaaattctgtcaacgtataacctccagaaaagtacaccaaacaggtgtgcagtttaatgggtaaaacaaacagctatgtaatcacaagccagatgcagaaaagctactgccagcattcgaatctccccaggtaccctgtggataccctatttatccctcagaggtaactactatcctgaagtagtacttccccctttaaaaaaaaaaatggttttaccagttatgtatgcaataatatggttaatttgttttgctgcctacttttgccttataaaaatgaaatcatactgtatgtatgtttggtgtctttgactcaacattgcttatgaaattcaaaaaaaaaaaaaaaaaaaaaaaaaaaaaaaaaaaaaaaaa

SEQ ID NO: 11424 - DNA, 616 bp, Canis familiaris
  misc_feature (26)..(26): n comprises a, c, g, or t, or includes no nucleotide
taaaggtaatccatggttgtgccacnagtcacattctctcgcgacatcccaatgcccactcaggagatccctgggagaagggcgctgccctgagggcctgctgggtgcttggcccccttctgtggggccagcacatcctcccggcatgggtcaagcctggcttcccgcgggcggcggcagagcctggggacactctcccgtcccaggcccccaccaggggctggcgcagaggcagctcggctgcagggcccgcggaggccgcccccaggcccgccttcacagggctccttcctaccccttggccaggggcaccaagagctgatccaaagttgcagggacagcactgggtgaggggggacggcaaggcggggctcccagtctcctgctgccttggccttgctccgccactaggagtagcaagtggcagcaggtcctccgggctggggggggacctccccacccttgtcagatggacagactcaagtgattccttcaggacagaccctctggctctccagacacctcagcgcttgtggtgggcagggccgcaggagcccagcaggtggcagccagcctgctccaagttccagtcgcacatctccagcactttgtggca

SEQ ID NO: 11425 - DNA, 463 bp, Canis familiaris
tggctgggaagcccccggacttaaataccagtccttacgactaacttacagaaggcagcacatccactgggggttaaaattagtattttcaaaagaaccttcaaagccattggctccgcgaattcttacctaatccactggcagctgcagccgccgctgctgcagtggccgtgaactcccccttcagtctccgaactgctccagcggccacactgttccaaacctccgcgctccctccagcactcctgaggccagctcctggacctatccggaccgcccacactcctgtgctgtttgctccttactgaattccaaatgggagtacttgtactgcaataatttttcaaaaaacaaaaaacaaaaaacaaacaaagagaactatgcagtgtttatttatagtttaaagtctatctgaagagccaggacttttgatagtgaattgaaaagattatttaaaaaaaaa

SEQ ID NO: 11426 - DNA, 625 bp, Canis familiaris
gtacatgcgtagccacagacctggtccgttttctgttgccgttccccacaggtgacactgcagacagaccaaaggctccagtcacccctcaccatctgtggaatcatattctggctgctctttggcctcaaaagtccggtggcctggggctggacggtcccacccctgggggggttgaggaagttgctgtcgtctgaggtactgtcgtacttatagtcttgatccccgctgtttgccctcgtcaaggacaaggacctctgccaccaggccctccagtcaggggatgggactgaccagctgggcttattctccgggtgctgatctttatctgcttcagagtcaggaccatccaccacctctatggtgacctggatatttggattctgcccattgatatcagctttggaaagatctggaaagtttggtagatcaaggagaaaggatctggggctatctctttgcagtgaagggtgcccaggctcttgctggaatcgctgtctggggaagggttgatgtgcagcctgatggtccagatgttcccctgctgcttctttagagaaaggaaagcttgtttctgatgtagaatcactttccacgtggaggttattctgcagctgggtccggc

SEQ ID NO: 11427 - DNA, 648 bp, Canis familiaris
ccaaggtcagggattgaactcagtaaaaaaagggataaagtgagatctgtctccaaattaaagatgggaagtctttatgctgaataaatgactagtctaagggaagagaactacagattgtgattatttgggagtcttctagtgaaacagtggagtgaagccactggtcagcctgcccagcctggatacccagagcgtccattcagcattttaatgacctacttttaaatgtgaaagaatagtctgggaccagcagacaagaggataggggacttggtgaaaataatgtggaggataaaacccaattataattcatatcctcaaaatttggtaggaaatatggcatctgtgcaagaaaggagaccgtaagacggattatgcagggaataagaagaccttttagaaattaatatatagtttgaccattgaacaacctaggtattaggagtgctggggatccctgggtagctcagtggtttggcacctgcctttggcctggggcatgatcctggagtcttgggatcaagtcccatgttgggctccttgcatggagcctgcttctccctctgcctgtgtctctgcctctctctctctctctctctctgtctgtctctcatgaataaatgaataaaatcttaaaaaaaaaaa

SEQ ID NO: 11428 - DNA, 546 bp, Canis familiaris
tagaacaagttgtactataaaagcaggctgtaccggtccggaattcccgggatgcgtgagcgagcgccggcgctgccctcccgggacgcgggcccgggccgcggggcgctgagcctcagcctccgcgacgagttcacggtgctgggccgccatggtggaggacgcgggccgcgtcctggagggcctcagcaagagcatctcgtacgacactggacgcgcgaggagagctacggcaagtacctgcggcggcgagatgcgcacccgatcggcggacgcctaattggttctccgggcccggttccgggcttccgcccggaggcctgggaggaaccaaaggttcccggcagggtcaggagcaggcggggcggcccgacggcaggctgggcgacgacttcctgggcatgctgcgccgcacgggccgccctgctcaaggacacgctcgccgtggccgcggggctcggcgacaggtacgagctgctggcgctcaccgtgcgcagccacggcacccggctcgggcggctgaagaacgagcacctgaaggcctag

SEQ ID NO: 11429 - DNA, 435 bp, Canis familiaris
aagggcgtcgtggactactacctgaagtatttcagcggcgcccacgacggggatgtgtacccggcctggtcgcagaaggtggaaaagaagatccgggccaaggctttccagaagtgccccatctgcgagaaggtcatccagggcgccggcaagctgccgcggcacatccggacccacaccggggagaagccgtacgagtgcaacatctgcaaggtccgcttcaccaggcaggacaagctgaaagtgcacatgaggaagcacacgggcgagaagccgtacctgtgccagcagtgcggggcggccttcgcgcacaactacgacctgaagaaccacatgcgcgtgcacaccggcctgcgcccctaccagtgcgacagctgctgcaagaccttcgtccgctccgaccacctgcacagacacctcaagaaggacggctgc

SEQ ID NO: 11430 - DNA, 138 bp, Canis familiaris
ctacctggacgtgaagcagaacgccaaggccgcttcctgaagatccgctgaggtgggcgcgggcggcaacaagagccgcctcactctctccatgtcagtggccgtggagttccgcgactacctgggcagacttcatcg

SEQ ID NO: 11431 - DNA, 661 bp, Canis familiaris
ctaggaaaaacagtccagatgcagctattttggtacctcgttcctcacatgcagctctgaatcagggtttttctataagaattctttcagaatcagcaaaagcttggatgacctggttatcttgatttgcagaattaaaaggaccaaactaggttgtcagtagtcactgtagatgagcagattctctattagagtatagttattgaactggctctgagaaatctttagaaagaaaaaattcaaaagtacacaattaattgggaaagttagaatgtcctttctgaattttccattctaaaaatttgtattatatgaaataacataaagctaccaaactgctttgtattctattaagaaatagctcctaaagatgtagtcttgtttcatagttgttgcactatatcaaagctttttaaagtgtaaacccagttcttctctgtatagaaagggagcattgtgttactgaatttatttatacagagcatttgttgccatctgtaattccagccattcgcacacgagtctgttctgaggtggcaatagcacatgggaagatgacgtttccctgtttatttacccctttttctttggctgtatctgatgataatataagatgttcttaataaagttttatgttgtttttgaaaaaaaaaaaaaaaaa

SEQ ID NO: 11432 - DNA, 519 bp, Canis familiaris
tggtggatggactaccaggaaggtatgggggtttcctcaagcgctttgccgactctctgccctctcgacgagagaaggctgaaagctactcccaagaagttcctgagatggagaaacagatatggagggtttatgagattttaaccccatgtggccgccagtgaccccaggcctccagccagccttcctcctgccccctggtcaatcgtgtcttactatcgcgcactgcttgcattgtagagctgactgtattatctggataacttacactatacaacctgaaagtgctcacttcaggtcctgtgttctcttgacagtgtttatgctcagtattggtctattgcagctgtgtcattttcatgctacaatcgctgttgttccttgtccctttatttttgacaaagcaccagtcaattgcttatttgtaaatagatcctaataaacccattaccccagctgcatgaaaaaaaaacaaaaaaaaaaaaataaaaaaaaaaaaaaaaaaaaaaaaaaaaaaaa

SEQ ID NO: 11433 - DNA, 585 bp, Canis familiaris
gtttagtgttctgttttagaatcagtagccgtttaccagctgttgtaacccatctgatatctataggtagacacacgtatatacttaacatagttaagttcggcacttgtctcattttattgtaaagatctgcttccacttgttcccaacaggcagtctctctccttcctcacagtcccactgtgcaggtgctattgttgctcttatcaatattttctgaaatgttttaagtgaaatttcttttctagcctgcactttgatgtcatgtgttcccctttgtctttcaaaatccaaggttccccctccccctttccttgaccccaggaagctttctgggaccccttaccccttggctctttggactttgtatactttaaataatttaactacccttaattacttaaaaaaaaaaaagctttatgattttcataacttattgctgattttaatgggttgttaatttcagtcctgtagttttattttgtttagatagggctgggcaaggaaaaagaaaataaagacaaccatatttagcagtgccaaaaaaaaaaaaaaaaaaaaaaaaaaaaaaaaaaaaaaaaaaaa

SEQ ID NO: 11434 - DNA, 586 bp, Canis familiaris
aggctccctgcagggagcccgatgcaagacttgatcctgggactctgggatcacaccctgagcttaagacagaggctcaaccactgagccacccaggtgtccctccctcgcagatttcttaacactaggaggctagagacaactatgtcaggaatatcttacttattctttttcttaggaaaccagaaaagagattatctttcttgagtagctaatcaataaatttttaccttgcatttactttcttggcagaaagggagtaggaagatggtagaggaaggtagacagatctgcctgtgagggcctgggccccatgagaataattagagtaaggaagagctaggctgtggtctaggtcctgagaaagacctgtttaaaatgacattctccattttgggaaactgaaggaggaagactgtcacagagcttcccttagtagaatgtcagggggagcctcttggttggtagggattggaacagcagctctcttcccaccacttgctctgcttggcagaggacctaggactgccaggaggaccatgttgtcaaagctgcccactgtcataaaaagcaagagggaaaaaaa

SEQ ID NO: 11435 - DNA, 614 bp, Canis familiaris
tcaccaagctctacgtacgagctgctgcagtcctaccaggagaagatgttcaacacgtcctccctgctgaagcagctgtacgagcagtttagctgggtgtcccaactggctaacctcactcaaagtgaagacccattctatctccaggtcacgacggtgggttctcagacttctgactccaatgttcccgtgggcttcactaaggtggttgtgaagctctttgattctgatcccatcacggtgatgatcccagaagcacgtctccaggaacaatcctaaatttatggagactgtggcagagaaggctcttcaggagtatcgccacaaagcaccgagaggaatgagatgtgaacaattgcttctccaaaatatgggagggctgagttccttgtgaccccaagatgagtggctaggcccctagagagagctctgcatgtcacccaagtgaccaggcttgcactcgaggcggctcctgtctcctaacccagctttccttcctctggactccgcactgttacgcctacgttgctgatcatgggaagaactcctgtgtgccacttactcaataaaaccgccaaggaaattttttaaataaaaaaaaaaaaaaaaaaggg

SEQ ID NO: 11436 - DNA, 509 bp, Canis familiaris
  misc_feature (293)..(294): n comprises a, c, g, or t, or includes no nucleotide
  misc_feature (329)..(330): n comprises a, c, g, or t, or includes no nucleotide
aaggcgaagatccaggacaaggagggcatcccccctgaccagcagaggttgatctttgccggcaaacagctggaagatgggcgcaccctgtccgactacaacagtccagaatggagtccgactctgcacctggtccttcgcctcagggggggcatgcagatcttcgtgaagaccttgacggggtaagaccatctaccttggaggtggagccacagtgtacaacctatcgagataatgttcaaaggtgaagatcccaagaaaaagtagggcatcccctctgaccagcagaggtnntgattctcttgctgggccataaccagctggtaagnntatgtggcgtcaccccgtgtcccgactacaactatttccagaacggagtcctactctgcatcttggtcctgcgcgttgaggggaggtgtctaatttcccccctttaagctgttgacaaaattcattgcacttttctttcaataaagttgttgcattcccgaaaaaaaaaaaaaaaaaaa

SEQ ID NO: 11437 - DNA, 653 bp, Canis familiaris
gcttgatcgtccttcaccggcaagtgagagccccgatctgtggttgctcagatggcagtatggagcccgccctttcacaggggcgaccttttgttcctgacaaacttccgggaagaccctattaggagctggcgaaatcgtggtctttaaagtcgaaggacgagacattccacatagttcacagagtgatcacaagttcatgaaaaagataatggagacatcaaatttctgactaaaggagacaataatgaagttgacgacagaggcttgtaccaagaaggcccagaactggcttgagaagaaggatgtggtgggaagagccagagggtttttaccatatgttggtatggttacccataattaatggtacgacttatccccaaattcaagtatgctcttttggctgttaatgggtgcaatatgttgttactaaaacgtgaatccctaaaagagaagaagtttcctgagacccacgattgaaatgaatttctgttgaataagaagaaaccctattatatgtgaaatgttccactttctgtataaaaggagacaatgtggagacatttttgtcttgtcccaaataaatgattcatcagtaaaaaaaaaaaaaaaaaaaaaaaaaaaaaaaaaaaaaaaaaaaaaaaaaaaaaagg

SEQ ID NO: 11438 - DNA, 609 bp, Canis familiaris
gatcatattgatccagtaaatttgacgttaaatagctttccaatgtgttaaaaagtcgcaattgccgtgtttttttcagcggtatccaacgatgtcacgtgctttaatctgatgaaatcgtcttctgtatcatggccatttgtctacttgcttaatatattaacattgtccattatgcaatttgtaaatttgacaaggtaaatatgcattattttgcccagttttcttatataggctatggacctcatgtgcagatagaaagaccagaaatctagctctaccacaagttgcacaaatgttatctaagcattaagtaatcgtagaacataggactgctaatctcagttcgctctgtgatgtcaagtgcagaatgtacaattaactggtgatttcctcatacttctgatactacttgtacctgtatgtcttttagaaagacattggtggagtctgtatcccttttgtatttttaatacaataattgtacatattggttatatttttgttgaagatggtagaaatgtactatgtttatgcttctacatccagtttgtataagctggagaataaataaatataacataaaaaaaaaaaaaaaaaaaaaaaaaa

SEQ ID NO: 11439 - DNA, 640 bp, Canis familiaris
  misc_feature (276)..(276): n comprises a, c, g, or t, or includes no nucleotide
tctaaagggagcataaaatattgtaagtagttaaattttggtaatccccactatgaggaactttatgttttaaacaggatgttcaaaatcttacgcataataagccaaattgaatcccaagttcaaaaccaagtaatgtaaaaatatttaaacagcattataaaatccttatagtttataccatactgccatttaaaaggtatgtttttcatataaatacccaaatttaagaagcattatttccattaatattgaaatgaaaggattaagtccaangaaactttcaactatttgtctttcctggcctttactggatccctaaagcatttaaggaagaagttccaaaaactttgaaaaactaagtatttccagtgatctcccatttttcttttatgattcacacattattcattatgaagtaggaactctgttttccctctattaaggcagctattatatacctattatataccctatttctcagggtattactctcctatctaggcaaacctttccaaataaagcataattttactctctgataaagacctaatagagtaatatgcaaagttattttgctttgtagtcatacagttaaaggctttaataaaacagtacaaaattttcaaaaaaaaaaaaa

SEQ ID NO: 11440 - DNA, 574 bp, Canis familiaris
ctcccgaggatgtgagcagcacagacaagggatctcaggctggacatgctctcttttggtagagatcattcttcacaaactgggaaaccattccctttccatcctcaacggccacactttacccagaggcaggctcactgcaacagaaatcccttcttctcttctatagctctatccactgccaacctgccaaggcctggggagacttaacatgattaaaattgtaaagcatttaagatgtttgaaggaaaggcatcattgaagtgcaaatcatcaatttggggggaaacctcagaggcggccaaacctcagcgttgacttcacctgtctgacttgaaggctaaaaagtctgttcatgcacggtcggtcccgtctggcttgtttcagaataccattcgctagttccagcccaacccgcggtccacctccatgaactcagaatttcctgggttcgcggtgacactaaacgccacagtaatgagggttacaggattttggaaaagatagcgctgctttcaaagcctcttgcccgctaagcgccacaaccccgcgggcggcatgtgcccagccaaag

SEQ ID NO: 11441 - DNA, 603 bp, Canis familiaris
agttatttgaatatttacacaaagtgctaccaagtactacacaatccctacccctcatgaatatacagtttagttgtggaaaaaaataaacacacacttgcacttcaaacaaatagcaggaggataaaagccaatgtctttggcgagtgaccaaagcccttgccagggctgtaggcgtcgagaggctgcagaaggcaatgagacttcttcagtctcccgcagaaccttctcgggaggtagagcttggtggatgggcagatgggagggttctcttagcagaagatgaatcctggaaggagccaccagggatgcacttctgggccaagagtgctggcccaaggtccccctgggggaaagggagaggctttgttcagggcagaatggggacaccctatgtggccaggagcagaacttcctttccttcttctgggaaccttgattagaaggatagatgggagagagatgatgagaagctttggttgccacactgacccattcaaattctgagcagcgagtagcatatgaaggtggaattttgaaagattaacctggttccaaggaattagcttgagttcaaaaaaaaaaaaaaaaaaaaaaaaaaaa

SEQ ID NO: 11442 - DNA, 679 bp, Canis familiaris
ctcggtaatcaccggcactatccatggagcctgaccatttcgtcgccagaccctcacaccgtgactctaaacagcccccgttcatcagtcagaattgagagagagagataagcttttttttttgtcaatgtcccacttagaaagtggaaacagaggaattgcacagaggactgggggatccttgggcataagaggtgcagacaggggaacacagaggcaggcggagtgtcttagtgggggaccacaagtgccaatggcaaaggacacttctccaagtgtacctcagacccagcccctctccagccccgccactcccaagtcgcccccacccttcctcgtaagagctaaacatccagaagaatgggtttttcccagggaaccttaagggaaaaagccaaacccccacacccgtcctggccaacccccccttccaaacccttgggcactggtaatttgttcttatttttcctaagaaccaacttagggcctttcctttcctttagcaataagttccccccatgaagccggggccaccaatgtcctcaagccgcctgcagtgacattgctggactccagaagaccattccacgggagaatgggttccacaggctcacagcgtagagacgttgagcccatggcaactgttttgactgctggcagtgcaaaacagtccacccca

SEQ ID NO: 11443 - DNA, 590 bp, Canis familiaris
tacgcccttgtatcccagggagagagctgcctgcctgttttccatttatatcaagattgtttgcatacttttgtaattaaggggtgtgtccagtggaagttttgtaaatgatctatatggatagctcaagtctttgccatttgtaatttttggctttggattcccattagcaaagtgtccccttctgcatatgagttgactgatgttgtgagtgtaaactgcatttggttatctctgctatctgtggccaccttggatggattttttttttgttttccattttctgttccacagttactgaaaggagtctctcttggtatgtgaatacctgcacctggagagggtgggcaggtgtggcggggaaatgtgtggcatgcacatgagttgaaattccacttttatgctttgtaaaaaacacaacaaactcttgaggacatgagggctgtcggtttcctatggaagagacacctctgacccgttactcttaaaatctcaagggggaaaaatggtttaattctttccccactcattgggctcaaatagattaaaaggctgattttcagaaaaaaaaaaaaaaaaaaaaaaaaaaa

SEQ ID NO: 11444 - DNA, 472 bp, Canis familiaris
ctaagtagttcgtgttgtcctggatcagctagtgcagtgtgttgaaagttaaagagcattgttaagtattcgcaaattgatctaagagaattgtttttcgcatgatttgcacttttacctgtacagacagtgtctgctctctgctatattctgtgatagacggaagttaacacaggatactacagttgtatcttctcttgtgccctgtatttactgtgcacacattaggcatctgagaattgaaacttttttgtccatgtatctttggatctttgataaagaatccctgttcattgtaagcacttttacgggtggggtaggggtgggggggagggagtgctctgctggtctcaaattaccaagaattcgcccaagaaattttccgcaggatgattgtacagaatcattgcttatgaccatgatagctttctacactgtattacataaataaattaaataaaatcaaaaaaaa

SEQ ID NO: 11445 - DNA, 247 bp, Canis familiaris
  misc_feature (1)..(1): n comprises a, c, g, or t, or includes no nucleotide
  misc_feature (46)..(46): n comprises a, c, g, or t, or includes no nucleotide
ngtggtatgtgaaacagatggagcagacatactgcaggcgaatccnttcagggccgtactgaacccggcattcagctcaagctgtgaagtcctccacaggccccggggagcagctgcggaatgcactctggcacacaggggacacagcatcacaggtgcggctgctgtggaaggacccccgcaacgtgggttggaaggacaagacatcctaccgctggttcctgcagcatcggccccaagtgggcta

SEQ ID NO: 11446 - DNA, 379 bp, Canis familiaris
ttgttcacttgatgcattttttttgtattgcttaagcacaagtagacttccagcgctacatgtaaccccaaagttcccaactaacatgcatggatctgttcccagactccctaattctattcctttgatctacagtccctttttgtgaaccaatagcacactgttttaattattttaactttatagtatgtttctgaggtctggtaacaagcttttcccctcattattcttttgcaaaagtgtgttggttgcattttcagcatttttttcccagaggatcaattgtcaagttctaaaaagaaaacaaatggagttttgttttgtattgtattgcatttttagttaatttggggagaattcacattaaaccttttgaagt

SEQ ID NO: 11447 - DNA, 610 bp, Canis familiaris
atgcccgagtgccagtgtccaccccacatggcagggccccggtgcgaggagcaggtggtcagccagcagcagcctggacatatggcctccatcctaatccctctgctgctgctgctgctgctgctgctggtcgctggagtggtattctggtacaagcggcgggtccgaggggctaagggcttccagcaccagcggatgaccaatggggccatgaatgtggagattgggaaccccacctataagatgtatgaaggcggggagcctgatgatgtggggggcctactggacgctgactttgcactggaccctgacaagcccaccaacttcaccaaccccgtgtacgccacactctacatgggtggtcacggcagccgccactccctggccagcacggacgagaagcgagaactcctgggccggggccccgaggacgagataggggaccccttggcatagggccctgaccactggactcaccccagagagcctcctgccccctgccagagaagtccttcgatgagcccccctcctgcccagccagcccttccccggccccgccggggtgtataaatgtaaaaatgaaggaattactttttaaaaaaaaaaaaaa

SEQ ID NO: 11448 - DNA, 656 bp, Canis familiaris
  misc_feature (1)..(1): n comprises a, c, g, or t, or includes no nucleotide
ncatcaagctctctgggaaatggcagcactgatgatgttcagatcaatgacatttctttgcaggactacattgcagtgaaggagaagtatgccaagtacctgccccacagtgcagcccgctatgcagccaagcgcttccgtaaggcacagtgccccattgtggagcgcctgacccactcaagtgagtgatgcatggccgtaacaatggcaagaagctcatgactgtgcgcattgtcaagcatgccttcgagatcatccatctgctcactggtgagaacccctctgcaggtcctggtgaatgccattattaacagtggtccccgggaagactcaacccgcattgggcgagctggaacagtgaggcgtcaggctgtcgatgtgtgcccccctatcgccgtgtgaagtcaggaccatgttggctgctgtgacacaggtgcccgtgaggccgccttccggaacatcaagagctacttgtctagagtgcctagcagatgagctacatcaaatgcaggccaagggctcttccaattcctatgctatcaagaagaaggatgagctggaacgtgtggccatagtctaaccgttgatcacctggctgtggcttcaataaacctgtctgcccttggggcagccatcaaaaaaaaaaaaaaaaaaaa

SEQ ID NO: 11449 - DNA, 595 bp, Canis familiaris
acttttataagacattaagcctcttgtcacaaatttggagagaatatgactttactagcagagaaataccataatatcttgtctactggagctgtaaaaaaaatgtatgaaataaaattagttccatttggtcttctagtatattaaagtgctatccgatgttgttatcctgtttttgccaaaaagaaaaaaagttaactacagaccattgtttctaataagcagagagatctattttagtagtaaactgaaggtttagttgtgagcttcagatttttgtgaactccagatgttgtgcagtggtttttttttttttaagacaactaaaaaaaaaaaaaatcccaaggaatatgtacactggaactgtagtggtagctttcagtattgtaaagagattgttctatacggacccctttgctgtttatcctgtatgtaataaagtcctttctagaccctatgtgaaaagacacgtgaaaaccgactgactcttcagcatgttctcatcggtggaacctacttgtgtaatgtaaactgtgccatgttattaaaaaaaatgtgcaccccaaaacaaatacaaacagggaaaaaaaaaaaa

SEQ ID NO: 11450 - DNA, 492 bp, Canis familiaris
ctcctcgcacgcctctcgctggcgcatcagttgctgtccagcttctagtgcatgtcctgccagggggacactaggcactttggcacagacccagctccacctgatggtgagagctccatcaccactggccccaccgccacggctcctctcagagaagctattgccaagacctcaagtccttcagaaccagaacagggtggccatcaggatggccacccttccataatcctcctttcctctgctccccagaccttgccatttggaaacaaacatcagatccttgccccaccccttgcttccagaaagggtcttgagcccataccccaagtctgacaccctcctcccctcccgccgcctgccaggacactctagcaggacactggtgctttgccgcataccctactgtgctgcacttctttcccaatttttcataaatataaatgtatgtatgtatgtgtaataaaaaaaaaaaaaaaaaaaaaaaaaaaaaaa

SEQ ID NO: 11451 - DNA, 634 bp, Canis familiaris
caggtgttctggagcacatgcctgtggccccgatgccatccgtcagatacgtccgcagggttggcgacccaccccagccacttcctgaggagccgatggaagttcagggatcagagaggacttctccggtgagcctcagcgggagaatgcctccccggccccaggaacaacggcagaagaggccaagtctcgagggcctcctccgtgcacctgagggcggcggcggcggctcccgggaagagcaggacggagctgcagccgagactgagccttgggcagctgccgtccccccagagtgggtcccgattatccagcaggacattcagagccagcggaaagtgaagccgcagccccccttgagcgatgcctacctcagtggtatgcctgccaagagacgcaagctccgggctgatatacagaagcgactgcaggaagaccccaactacagcccccagcgcttccctaatgcccaccgggccttcactgatgatccctagctgtttgctctttggccctccctcatcaggggaccatttcccccatcttccttcacagtatttaaggaataaaagtcagattttcctggcaaaaaaaaaaaaaaaaaaaaaaaaaaaaaaaaaaaaaaaaaaaaaaa

SEQ ID NO: 11452 - DNA, 640 bp, Canis familiaris
gtgtcccgaatttattagtgccagaggcatgtattggtcaattcaaaatttggatttttgaaatttgtggatttttgtaaatttagaaaaccgtcctctaaaattcacatcccatacacttctaactagttgatgttaaatgtctatgcattagatttcacttctaattaatttccatttgcaactatactccttcataactatttaaagagtaaaatgagaggtttgattttttctttaaaatcttgactttttgaattataagcagagggagtaacaaagccatcaatttaaagggaaatctcctataaaggaaacccacaccattcttcttcatacagtatagaaatttattattttctttttttaccaattttctaaaccccaaacttttttctttcccaaaatggaaagtcttgattttttttttattataaatgtaatacagttttgtttttataaatttaaacaaaatggtataaagccctttataatcacagctttcagagaaaaaagtcattgtttatggtttggtataccttcttcctgagcaaatacatgcaactaagaatttttaaaaatgttttatatgtataagtgtgtttcaataaaagtgagattatgctgtaaaaaaaaaaaa

SEQ ID NO: 11453 - DNA, 207 bp, Canis familiaris
gaaggcccagcacggtcactcctgctcacgtgtgagcagctgaagaaccgtagccacaaatcccatccatctccactccccatcttcctcctcctcagctcatcccggcttccatcccttgctgcagccactgccctggttcgggctttgtcgaatcgtaaacatactgagcctctgtctgtgaaaaaaaaaaaaaaaaaaaaaaaa

SEQ ID NO: 11454 - DNA, 570 bp, Canis familiaris
cattggcgctgggcccggtccagcccaagccccctttccttctactggcctccagaccaggagtcttcctccctggctcgctctctcgtcccctgtcccgtctccaccgtgtccgtgctcatcctccctctcctctgtcacatgctcccagctgggtccgctgtctgtggcgcggggcctctgctcagcccctacccaggcaagccccggggcagagggcagctgcccccaagcctggacagtcctggaggaggtcagcaggtggagacgatgcaccctgcatgcactccgcactccaaaggggagcattggccccggaaagggcccagcctcccactggagccccagccagctttcatcgtccccctctccccacgagatggctagctctcccctcccttcgccttctggcccctggtatggtgggggtttctaacgatcacacccagcttgaggaggggctgcttctgaggtcggttgttgtctttcaattaaagaaaccctgtgcaataaaaaaaaaaaaaaaaaaaaaaaaaaaaaaaaaaaaaaaaaaaaaaaaaaaaaaaaaaa

SEQ ID NO: 11455 - DNA, 637 bp, Canis familiaris
ggaggatgtccgtctaatctatgacaacccagggtcgctttgctgttcatcggattacacctgaggaggccaagtataagttgtgcaaagtgagaaagatctttgtgggaacaaaggaatccctcacctggtgactcatgatgctcgcaccatccgctatcctgatcccctcatcaaggtgaatgataccattcagattgatttggagactggaaagattacggatttcatcaagtttgatactggtaatctgtgtatggtgactggaggtgcccacctgggaagaattggtgtgatcacccaccgagagagacaccctggttcttttgagtgtagttcacgctgaaagatgccacatggcaacaggctttgccacccgactttccaacatttttgttaatggccaaggccaaccaaaccctggaattttctcttccccgtggaaaagggttatccgcctcaccattgctgaggaaagagacaagagactggcagccaaacagagcagtgggtaaaatggtcccctgggtgacgtgattggaagtctttatacttaattaaagattctacagcacgctaaaaaaaaaaaaaaaaaaaaaaaaaaaaaaaaaaaaaaaaaaaaaaaaaaaaaaaaaaa

SEQ ID NO: 11456 - DNA, 593 bp, Canis familiaris
agaggcagcccccagcaggcccgtcttctaagtactttggtgatgactgaggaggggtgcccgtgggccaggacttcaaccccagccttgtcttctggggctatgcccagccctgcggcctctcactgggcaaggatcagctggccatggggagggaggccctgcctggcctagcttaaggggcccaggcatgtgccaggcctcgggctgcacagccacacagctgcgcgggccgcatgtgctgatgaagccggccacccaccccctgccctgccctgtccctgcaccaacccctccacagccctgggtcaggacccagggtccttggggacagctataggcagggggcagttcttctggtgctaggccctgggacccttgcgctcagcctgtttccttggaattgcagccgctgtatttatgtaaaagtatttatgggcagctggccactcccatgcaccccgggcactgcccgccccaggaaaccctgctgcgggactttggggcatgcagggcctctgggtggcaggctctggtacatgtgaaacccagaaacttaagaaagaagccaccacttcaaaaaaaaaaaaaaa

SEQ ID NO: 11457 - DNA, 613 bp, Canis familiaris
  misc_feature (3)..(3): n comprises a, c, g, or t, or includes no nucleotide
acnttcaggaccacagtgcctttttgggtcacccccttgtcttggggattccggacctcctttgcaattttctgctttataattgatcacagtgtagtatgactgctttttcctcaggcactacactgtaaatctggctggaatggttgcgttttcatcagctttgggggaatcctgaagactttggtgctaatggggagaacccttgctagggttctgaaattaatcagcagaatgcccagataagtttgaatgtcagataaataatgaatgatggtttggtataagtatgtcccaaatattgcatgagatatgtatatattaatattttaaaattttgaaattcaaatttagttaaatctgggaatcctaattcctggagacctaaaatccaactttgaatcccctggaaaggggtagccccggtggttcagcggtttggcgccaccttcagcccagggtgtggtcctggagacccaggatggagccccacgtcggggttcctgcgtggagcctgcttctccctctgccggtgtctctgcctctctctctctctctctgtgtttctcatgaaaaaataaataaaatcttaaaaaaaaaaaaaaaaaaaagg

SEQ ID NO: 11458 - DNA, 606 bp, Canis familiaris
agaccatggagacggcccagaaacaagtgttggggtaagacgagagaaacacgaagaggaagggggtccggagagtgaagggagccgaagaagttcaaggaggagctgggcgggaagctcagcctacgagactggcaggtgtccacagtccctcatcgtgtcgagaagtaaggaaagggccaaagggcttcagaaaagggggaaagtgctcaccatttttaaaataagaaacaagcttcagacttaagacaggaggagaatgaaggaatcttctaatcctggggaccttccctgctataggagcaccgtgcacctgtgcgtcattctgttgctagtggtgttacccgtgatgagcccacttctcttcacagcatctcaagagtcctgcccctcgtttcttttccgtttttgaagatcttttgggggacacctgggtggcccagtcggtaaagcgtctgccttcggctcaggtcatgacctcagggttctgggatggagcccgacatggggctccatgctcttgggcctacttctccctctgctgctccccaccactcctctctctctatatctcaaataaaatctttggaaaaaaaataaaaaaaa

SEQ ID NO: 11459 - DNA, 596 bp, Canis familiaris
ctggcctgtggctcctggcctcccatccccccccgttctgcaagttcatggcctgggccgtccatccgagcccccttgtcctctactggcgtgccagaccaggatcctcctccccggctcgctctctgctcccggtgccgctcttccacgtgtccgtctcatcctgcctgctcctctctcacatctcccagctgggtccgctgtctgtggcgcggggcctctgctcagcccctacccaggcaagccccggggcagagggcagctgcccccaagcctggacagtcctggaggaggtcagcaggtggagacgatgcacccgtgcatgcactccgcactccaaaggggagcattggccccggaaagggcccagcctcccactggagccccagccagctttcatcgtccccctctccccacgagatggctagctctcccctcccttcgccttctggcccctggtatggtgggggtttctaacgatcacacccagcttgaggaggggctgcttctgaggtcggttcgttgtctttcaattcaaagaaacactgtgcaataaaaaaaaaaaaaaacaaaaaaaaaaaaaaaaaaaaaaaaaa

SEQ ID NO: 11460 - DNA, 622 bp, Canis familiaris
tggtgattttttgttaacaagtcatcagaagttgtttgcaaagtgagttttatttttttgtaattccctgatcgtttacttaaaaggtgaatgtgtattcctctggggaggaataggaagaaaaacaggaatgttaataatgtcaaacagaagacttcctcccttattaatatataaccctcatgtatttatgcctaatgtaagctgacttttaaagaattttctttggttgcatgccctgtgcaggcatccctattgtacatgcatgcctctcgtcctgttttcctgtataaagttagtgaacaaagaactatttttgcctagttcatgttgccaagcaatgcatattttttaaatttgtcatatatggaaatagcatgtttgttacatgtaaagctttactgatatacagatatactaatgtttgaagatgctgttctttgcaagtgtacagttttcaaatgttgttaccagtgaaacacccttgtggtttaaacttgctacaatgtatttattactcatttcctcccatgtaactaagaatcatggctatatttcatatcaacgttatattgaaagtgaagggaaatgattaatacaaggttttgtaacaaaaaaaaaa

SEQ ID NO: 11461 - DNA, 502 bp, Canis familiaris
tgttcatgcgtgcccgagcgagggccgaagtgcgagcacctggagagcaagctgaccaggaggtccggccaagtgccgggagaagagatacgccaggtctgccaggggcgcgcgcccgagctgtccatctcgggaaccgacgatctgaaaagcgtcctgagcgaagatgggcatcagccaaggtcttcagcgccgaggctgacctctctgggatcactgaggaagggcccttgatgctgtccaaggggctgcacaaggccgtgctgaccatcgacgagaaagggactgaagctgcgggagccacctttctggaagccatccccatgtccatgccgcccagtgtcgacttcaacaagcctttcctcatcatcatcgtcgacagagacaccaagagtcccctcttcatgggaaaggtggtgaaccccacccaaaagtaactgccttgtgggtcaggtcccttccagataccattaaagagtgacccacccaggaaaaaaaaaaa

SEQ ID NO: 11462 - DNA, 567 bp, Canis familiaris
cgcgaccatccggtgctctggagctccctttcgtggagccagcggcgctttctccgcggccccggcaagtgggcgagctgtgccagcgctctcgtacgcaacgtggagtactaccagagcaactatgtgttcgtgttcctgggcctcatcctgtactgcgtggtgacgtcccctagtgctgcgtggtggctctggctgtcttctttggcgcctgttacatcctctatctccgcacagttgcagtccaagtttgtgctgtgttggccgagaggtgagcccagcccatcagtatgctctggccgggggcgtctcctttcccttcttctggctggctggtgcagggtctgctgtcttctgggttctgggagccaccctcgtggtcattggctcccatgccgccttccaccagatggaagctgtggatggggaagagctgcagatggagcctgtgtgaggacctgcgggcctctggaatcggctgcctcatccctgttcccccctgccccgcttggccccgaggccctggccaaaggcctccttcccatctcgagcccagggcgggattcc

SEQ ID NO: 11463 - DNA, 169 bp, Canis familiaris
gaccttcctgctggagtttgagtttagctgctcctccctcctgagccaggtccttgtgaggctgactgcttcaagcaatagcctagagtaaacgggacccttcaagataacacagcccagatctcagctacattcaactatgagccccacctcctgttctccagtgagt

SEQ ID NO: 11464 - DNA, 101 bp, Canis familiaris
ttagagtatacatgaagtgataaaatatcacaggtactgggagaagttaaaaatatgttccataaactctaacaccacaactgaagtaaaacaaattatag

SEQ ID NO: 11465 - DNA, 523 bp, Canis familiaris
tgtgggtgtcgccaactggctaacctcagctcaaggtgaagacccattggagtctggcaggtcaagcggcggtgggttctcagagcttcgtgactcgcgatgttcccgtgggcttcagctaaggtggttgtgaagctgcgtttgattcgtgaccccatgcgcggtgatgatcgccgagagagcgagtctccaggaaacagatcctgaagatttatggagagctgtggcagagaaggctcttcaggagtatcgccagaaagcacgcgagaggaatgagatgtgaacattgcgttctccaaatatgggagggctgagttcctttgaccccaagatgagtgctaggcccctagagagagctctgcatgtcaccaagtgaccaggccttgcctcgaggcgctcctgtctcctaacccagctttccttcctctggactccgcactgtaacgcctacgtttgctgatcatgggaagaactcctgtgtgccactaactccaataaaaccgccaaggaatctgaaaaaaaa

SEQ ID NO: 11466 - DNA, 559 bp, Canis familiaris
gatgtgatacaggtggactacttagagctctttcctgtagtctcttagtgtacatgtgctgtgtaggccaataccttactgttgttgagttattgtagctttatagtatattttgaaatcaggaagtttgatgccactaagtttgtctgagcatgtatttcatttttgaggtcccagtttcctcaccaattaaatgaagatattggatgcgggaagctgtatggttcccctgctcagaccgttttatgatcctatacttcttgctttcagcaatctccatttagaacaatgagttgagattctatcacaagcacacataggcacctatgttgaaaacaaaagaacgacatgttatcattgatttagaacttgagttggggaagacagtggtgcctcttgctgctgcctaaactgctttctgctcatgggaataggggagctgtatccaatgatttgaggatagagagaagggaacagattgtgttttctattttcctttctttttcttctattttttaaaggggaataaaagacaaggactccaacttaaaaaaaaaaa

SEQ ID NO: 11467 - DNA, 503 bp, Canis familiaris
gacacagcatcacaggtgcggctgctggtggaaggacccccgcaaacggtggtctggaaggacaagacatccgagccgcgtggttcctgcagcatcggccccaagtgggcctacatcaggagtgcggttgtagcgagggtcctgagctggtggcgctggcgagcgacgtgggtgctggacactaccatggcgggtgtggccgcctgggggtctgtgtgcgttctcgccaagaggagcatgcatgctgggcgcaatctgcgcctaccggtgcaatgacaccatagccagaggactacgagactcagaggcttctgcaggcctagggatgggggtggggacccattgctggaagatggcaccatcgtggctaccctcactgcaacaaacagggagcttggcacccggctccaagaggtagctgccctagaggggctcagaaaggacaaaataaagtgtgtgtggtggaaaaaaaaaaaaaaaaaaaaaaaaaaaaaaaaaaaaaa

SEQ ID NO: 11468 - DNA, 549 bp, Canis familiaris
ccagccctgccgctccggcccaggcccgtcctcgcctgctcccgcctggagccgccgcgcgcccgcagtcccccgggcgccccatcggcccctcgccgttcctcttcccggcgcggcccccgggctttcgcgccccgcccgccaccaacccgctcgccaccatgtccgtggagctcgaggaggccctgccgctgacgaccgccgagggggcggccaagaaggcggccaaggccggcggctcggcggcactgtccccgtccaagaagaaaaagaacaacaagaagaagaaccagccgggcaagtacagccagctggtggtggagaccatccgcaggctgggggagcgcaacggctcgtcgctggccaagatctacacggaggccaagaaggtggcgtggttcgaccagcagaacgggcgcacctacctcaagtactccatcaaggcgctggtgcagaacgacacgctcctgcaggtgaagggcaccggcgccaacggctcgttcaagctcaaccgcaagaagctggagggcggcagcgagcggcgcggag

SEQ ID NO: 11469 - DNA, 565 bp, Canis familiaris
gactatacacagcattcagagcatcatcaaggagcaccacaaaaagcggaaaattgaggaattagatgaacgtgaacgaacctctcgtacttccgtaataaaaatcttgcaaattcatcactcccaatgaaaagaagaaaattaagaaaaagaagctacccagttcatttccagctggaatggatgtggacaaatttttgttatcattgcattatgatgagtaaacattctgaacatataagaacagtagctgtttaaaactcgtatcccttaaactatgagtgtagggaatgagatattgacagaacctgaaagcatgacctgcactttccttgtactgaaatttcactttatatctgaatcatgctgtttctgaaacagcttcctagtttgtaaatagatttacctggtatattttttattttggaaaaaacatttgcagaaatgtaagtaaagccaatctgcaaaactgtatagctctgacaattatgtgttgtaaatattgtataaatcttgttgaaatagaggttaaatcaaaaaaaaaaaaaaaaaaaaaaaaaaaaaa

SEQ ID NO: 11470 - DNA, 390 bp, Canis familiaris
ccaacaagacacaagtacagtggactaaagcagaatccatcttagcacgtacacagacaggcattactcagggtgatggggacagcagctctgattcagatagctctagcagtgaggaagagaagatgtcaaaatccccagttaaaaagaagccacagaaggtagcaagagttgtagcctcttccaaggcagcttccacaaagaaagcaaaggctgagagcagcagcagttcttcctctgatgattccagtgaggaagaggaaaaggagaagcctaagggcaagggcactgtaaggccacaagccctcaagaccaatgggacctctgcactgactacccagaatggaaaagcagacagagatagcaatgaggaagaaaaaaaaaaaaaaa

SEQ ID NO: 11471 - DNA, 619 bp, Canis familiaris
acgttcgtgagttctgcaggcggtggactttggagaaccctccggtggaaggcgttttgagaccagacgggaaggtggctctaccagcgtgcgcccagaaatatccaccggccacgtggtcctgtccgaggtcaaggaagctgttgctgccctccccccggattgtgaccacgcagtctgtgatggggttcgaccctctgcctcctttggacaccatctactcctacgtgagaccagagaggctgagtcccgtcagccatggaaacacaattgcactcttcttccggtccctgttgcctaattacactatggagggggagaggctggaggatggaggggctgggggtctgaaccacaaccaaggcttgaacaggctgatgctggccgtacgagacatgatggccaacttccacttccacgacgtggaggcagctcgcgaggacaaccccgagggggatggggagtgggactgagcccgcgtagatgccacgccccaatgctgtacaattatgttcctgattgctgttctggtcggaattgaccagtaccctggagtagaaatgctgtgttgtccgcttgcctcctttgtgtctcctataaatgtgaatgggttaaaaaa

SEQ ID NO: 11472 - DNA, 617 bp, Canis familiaris
aagactcaagtaattatttaggcaaatcagccctttttggctcttactcatttgttttcctaaattagccatgtaattgttttaactcttcagtgtactttgctatcaaagtctcttcacattgaattatctccatgtgctattaagaagtggagatttctgtttacagtagctaggaactggtggtggtaaggactgaattgtgtctcaaattcccatgctgaagccctaacacctaatgtgcctttgaagaggtaactaagattaaataaataagagaacctgatccagtatgactggtgtccttataagaagacaaagagccaccatgggtgcaagcacacagatgaaaggccacatgaggacacagggaggaggcaccatcttgcaagccaaggaggggggctttaagacaaacgaaccagccaacacactgggctctcagccttcagaattatgagaaaacatattactgtggtttaagccacctagtctgtggtattttgttatgacagccctagcagactaatacagatggtaggtatataataaatttgacctaattcatattttcaaaaaaaaaaaaaaaaaaaaaaaaaaaaaaaaaaaaaaagggc

SEQ ID NO: 11473 - DNA, 517 bp, Canis familiaris
ccctccctcaggtgatgctttgtcttgtcattaatcgccagggatcgggttttgactgagcccttagtggctcatctggagaggcagccctagtgtctgtccccatcccgggagtgacttatttctttcccccccctaccccaccccctcccctggcagctctgctgcaatggcccacaccttactcagaatcactacacattcctcagtcttccttcaagctccagagccagtggtacaaatgctttattgaaactacatagtgtgtaaaatgaaagagggcagggaagttagcatagggaggagacccctgcacaggggccagctgaggtggcctcagtgggtgagaggaaggcagggcatgctcagccccatccagccagcctgctgagggaagttcacttgtgatctcaagatttgaagctgaggttcttctggatttctacaatcattaaatacgtgtctgagtggtcaaaaaaaaaaaaaaaaaaaaaaaaaaaaaaaaaaaaaaataaaa

SEQ ID NO: 11474 - DNA, 572 bp, Canis familiaris
caacaacgtcaggccacccctccagtgcccacaatgggggtgcagcttataccagggtacatccatcgaaatgaagatcttcttttcttatacggtcgcctacaggtgatgaaagcgtctacggtctgtgaagtctgctgcccctgacgtgggggtggggtccggttctacaaagacagaggtggcccccatcctcgacctactccttctttgggctcatccctcacctccctgttgttgggacctgcacttcctaatgtttgaggctctcctccagcccttctcagcaggagggctcatgggggaggtggcttcttggacctctcctttctccccttcctcttcgacctttcccactgctgctctagacttcttgattgtccgtctctgtcacatccggtgattgttttggtttctgttccctaactgcccaaggggctcagaaccccaacattcccttcctctcattaccttcatttttgggggtagagggaagggactgaaattgttggggggaaggcaggaggcacatcaataaagaggaaaccaccaagctgaaaaaaaaaaaaaaa

SEQ ID NO: 11475 - DNA, 211 bp, Canis familiaris
ttggggaaaaaatgttgagtttctaccagttcagaaactgcaaaataggaaaagattgataaaaaatcattttcctttcttcattgtacatagttcaaatctttctttgttacatttaaactatatccatgtacatcagtctgttggactcctgctagtgttacagatggaaataaaaccattaatttgaaaaaaaaaaaaaaaaaaaaaa

SEQ ID NO: 11476 - DNA, 445 bp, Canis familiaris
accccgcgaactgccggccatagcgccagagaatagcctccgcgtgccccgcacatttgccccagatggtggattttgtacagaaaagttatgtggccataggggggttcacgcgtggcgcccccaggcccacactgtcacggggaacacggagccttggtgtatattgtttttttttttaatgaatcaatagcagcgtccaatcccccagggccccttccgcctgctatagtggtggcaagcaggatcctggggctgaggctgcagctcagggcaaagcagggccagatgtgggtttccagccttgcttggcctcagggctggccgacagatcctggggcaacccatctggtctcttgaataaaggtcaaagctggattctcaaaaaaaaaaaaaaaaaaaaaaaaaaaaaaaaaaaaaaaaaaaaaaaaaaaaaaaaaaaaaa

SEQ ID NO: 11477 - DNA, 600 bp, Canis familiaris
acagtgagacatgacctcacacttggcaggatgcccgtcatcagacagacagacggggtgaaacgagtttggcgggagtgtggcaaacagtggaaccctcatgccctgtgggtgggtatgcgaactggagcagccactctggaaacagtatggaggctcctcaaaaaattcaaaatagagcttcctatgacccagtgattccactgctgggtatttaccccaaaggaaatggtaataggatctcaaacaaatctgcacccccatgtgcacagcagcatgattcatggcagccaagacctggaaggaacccaacttctcatcgatggatggatggatggatcaatggatggatggatggatggatcgatggatggatggataaagaacaggtggtccatccacacgatgcaacatgactcagccacgagaaggaaggagatcctgccatttatggatgacgtggggtggacctcaaggacattgtgcaaagtgcaataagtcagacacacctagggaaaaaaaagcatgagctcaccgatacatgcaatcttaaaaataaaaagaaattcgaacttgtaaaaaaaaaaaaaaaaaaaaaag

SEQ ID NO: 11478 - DNA, 426 bp, Canis familiaris
  misc_feature (1)..(1): n comprises a, c, g, or t, or includes no nucleotide
ntcgcggcctgacccctagccagtgattatgattcgatgctctagccgtagcagaatactaatcgagcccccttgcgacttaactgaaggagaatgccgaactagtctctggatttgaacgtagagtagtgcagcaggtcctgttcgccgctattctgttctagcagagtacgcagaatatgagtcataataaacatcctcacaacaattctgttcttcggcgcattccacaacccattcataccagaactctactctattaacttcactataaaaaccctcttattaaccatctgcttcctatgaattcgagcatcataccctcgattccgctacgatcagttaatacacttattatgaaaaaattttctacccttaactttagccctatgcatatgacatgttgccttacccattatcaccgca

SEQ ID NO: 11479 - DNA, 523 bp, Canis familiaris
ataggttcacacaggctttatatctattgccccatggtgttaacattcctctcattagttatgttcttgctttaccccaacttccaattccgtcgaatcccatagcccgttacttataattctcgcacgagggacttcaaaccctccttcccctaatagcagcctgatgactattagcaagcctcacaaatctggctctccctccaacaattaatcttatcggagaactatttgtagtgatatcctcattctcatgatccaacattactattatcctaataggaattaacattaccatcaccgccctatactcactttataatattaatcaccacacaacgtggtaaatattcccaccatatcaaaaatatcaaaccatcattcacacgagaaaatgccctaatgaccttgcacctactgcccctactcctcctatcccttgaccctaaaattattctcggtcccatctactaaaaaaaaaaaaaaaaaaaaaaaaaaaaaaaaaacaaaaaaaaaaaaaagg

SEQ ID NO: 11480 - DNA, 508 bp, Canis familiaris
gggactcacagctgaaagcaatgtaagagactgtccatctctgcctgtcaactgtgttccgtaatcagcctccccctgtggagtctgaccaggtcaaatccaagtcagatgccagttccacccggtcaagttggccctctgatttctgatgcaagtagaatgcaggaaactcctgaagaaatgtgaaactggtcactggtaaagtgccaagcctctcacagagcgtcacccacccaccaggaagccacaccctgcctccttagtgttggtctaagggaagagcaaaggttcggcctcattaagtctgctgactctgggcaaagcactttgtaattctatgggcacacacgatacttgtttccaactcaaaatctgtttgtttaggcccaattaaaactgggctccttatgacccgaaagtgtggaggaaattactgattgttactttaactgatttacgatgaataaatgtatgtcctgtcactgaaataaataattaatatttatta

SEQ ID NO: 11481 - DNA, 633 bp, Canis familiaris
gaggaagttgatgatcctcatcactgatgggaggtcctatgatgatgtccgaataccagccatgtcgcccatcacaagggagtgatcacctatgcaataggtgttgcatgggctgcacaggacgagctggaagtcatcgccactcaccctgccacgaccactctttctttgtagatgagtttgaccacctgtacaaatttgtccccaaggtcatccagagcatttgcacagagttcaactcacagcctcggaactgaattcagagcaggtaaagcaccagtaaatgctgctttcccaacgggctctggtgcaacccccaatgctttatggggcacgcaggtcatgtaggcgcttggagaacggatgtgctattattattctctgccagctgtggttttgcatgcttcaagaattgaggtgaggaagatgatcataagtttatagaatgaggcgaaatgatacatcattttgagggtgctggggatttacattttgacattgttttctaaaatacaatgttcagactagagtgcagaacttatgacaggcttaactagagttttggtgaggcttttttccattctcttatttctaattaggattcagtaatcctcattagaaaaaaaaaaaaaa

SEQ ID NO: 11482 - DNA, 635 bp, Canis familiaris
caagtttgtctgagtctgtaggttagatagatcgtcgttcttggaagaagctggaagatggtccccagttcttgaatttggggatgctgcccttgttgatatggttcctgggccaaacctatgtgtgttgagagcttctctgactatcctcctctgggccgttttgctgttcgtgactctgatgaccgacggttgctgtgggtggtcatccaaagccagtggaccagaaggcagctggagctggcaaagtcacccagtctgccccagaaagctcagaaggctaaatgtatattatcccttatacctgccacccccagtccttaatccagtggtggaagaacggtctcagaactgtttgtgtccattggccctttaagtttaatagtatgagactggttaatgatacccatgcatcgtgaaaccttcagaaggaaaggagcatgttttgtggaccctttgttttttttttttttttgtgcgtgtgtggccgttttaagttattagtttttaaaatcagtactttttaatggaaaccacttgacccaaaatctgtcacagaattttgagaccccattaaaaccaaagtttaatgagaaaaaaaaaaaaaaaaaaaaaaaaaaaaaaataataaaaaa

SEQ ID NO: 11483 - DNA, 576 bp, Canis familiaris
gtgtcccaaacctgaggtaccactgtccttggagatatgcacagctctgcctctctttctagggacctgtggctagagagctggctcctgagtgtggaaggaaagaggaaagatactggctggaagtgactggaaacgatgtgggaatgagtcagaataaagggagcagaggtatggggctgcagggatgctctcagtggagccaggggtactccagctctctgggctgggagggggcacacaccgtacgtactctcaagagtttaggcccaagccaccagtttgtaagtgacactgcactgctcaaccaccagccagtggggtgtttttatttttacttattttttagaccaaaacttccctgttgcaatcataattaatgcttattgaggaaatttggggaatttttaaatgaatcagttcgccacccaatgctaccactgttaatcttttggtgttaaatgttcctctagacatttctgtgcatagatttttggtgtgtttacatagttgttattctactgtatatacacttttatgtcccttttgtacttaacatataaacattttttccat

SEQ ID NO: 11484 - DNA, 653 bp, Canis familiaris
taggcctttttgtattttgtgaaaccgacctgattccaaattcatcgcaagagtaaatggagaaaaacgcccagaagtttttgaaaaaataacaccaaggggaatttgttctactagatgttgacagatacctccaagctatcataattgaaacagtgtaataatggtataggagttgataaatatacagcacactgacagaactgaatagagcccagaagccacttgatgatatgtaactaggtacagtgtaacagctatctcaagtatgctgtgctcagcgtttaagattaacttaggacaacaccagagcctgtcaaagccaatttattttattgctgctatcttagacactaagattactctgccctgagaagccaatcttacatatgcatctcatacagggtgaggagttcctttggtaggaaatgcttacataactgtaatagtgcatactgatatgaatggattgcttttgcctgagcagcttggactctgggagtagtaaaaaggtctgcttgctggccaggagcaggagccagctggctcagtcttccttggctttcctgtccaggcttccaggtgtacaacagaagacctgtcttctccagtagaggtaatggaaagctttatatttgggaaaaaaaaaaaaa

SEQ ID NO: 11485 - DNA, 544 bp, Canis familiaris
  misc_feature (1)..(1): n comprises a, c, g, or t, or includes no nucleotide
nataaacgggtcatttacactatccacgctaattattacccaggacatatatgattaatctttccggcctgacccctagccctgatatgattcatctctaccctagcaggaactaatcgagcccccttcgacttaactgaaggagaatccggactagtctctggatttaacgtagagtatgcagcaggtccttttgccctattctttctagcagagtacgccaatattattataataaacatcctcacaaccattctattcttcggcgcattccaccacccattcatacccgaactctactctattaacttcactataaaaaccctcttattaaccactctgcttcctatgaattcgagcatcataccctcgattccgctacgatccattaatacacttattatgaaaaaattttctacccttaactttagccctatgcatatgacctgttgccttaccccttatccccgccagtatcccacccccaacataaaaaaaaaaaaaaaaaaaaaaaaaaaaaaaaaaaaaaaaaaaacaaaaaaaa

SEQ ID NO: 11486 - DNA, 541 bp, Canis familiaris
agtggtattcttggggcccccctgatatgccgtgtagattgtgtgccacctgttggctctactgggaaaaatatggaggcctgaaaatgccccaccccgtcggaagaagagcagttatctcctagccccactacagaggacccccgtgttaggagtcacatgtctcgccaggccccatgcaggggatgcccgtccgaaaccctgggagccccaagtctgccagtgaagacccgcccagctttcttcctccacactacatatttcaccaatttgctcgtcaggtctgccaataccctccggctgcggccggcagccagacggccgtttgttcctattaattatgctgcccttagggccgaatgtaagatgcttttaaattcttacccttatgtgttgtgcttctgacccttttctctccttccctctcttttttgttttttttttgttttgtttcgtttttgtttgccaataaacataagttcttgtgtaccaaaaaaaaaaaaaaaaaaaaaaaaaaaaaaaaaaaaaaaaaaaaaaaaaa

SEQ ID NO: 11487 - DNA, 603 bp, Canis familiaris
gatagaagggaggcttctctctccagtattgtaccttctaaggacacatgagggaaaatgccagcctggcttggaacctgccagaataaaggggaattgtaaatatagagaagaagtagaatgagggtaaaaaaaaaaaaaaatctcttgggaccaaaagctgtttcttaacagaagaagggaatagatagggatagaaggggaatgtgggacttagggtaaaggttgtggcattttcccaaagcaagcaaccatataaaaatatttaaaaatattaaaaatcaagctatttattcataatctctggtatgagaaatttaaatagaagtcggtaacgttttcctaacttgtgtagaatcagatagagctgactttgctagatccataacttaaaattggcttaaagggagtctcagatcagcaactgccagcagttttgtcctttaaaaggttaaccattcttggggtgcctggagggctcagtcagataaaaatccccctttggcttaagtcttgatcttggagtcctggggagcctgcttctccctctcccctccctctgtgctcatgtgctctctctcaactaaataaaatattaaaaaa

SEQ ID NO: 11488 - DNA, 650 bp, Canis familiaris
catcgcccaccattaagacttattactgatgaggatgaaatttgtccccatgggctagtttacctgtgtcatgagaaggacgttgtgaaaccctctgttaatttggtttcacttttcataacatggatggtctagatttatgttagcatttttaaaactttttttatattcaagtatatatgaagatctgtttggcacttaagtgatttttaatgtttttgtttttatattctcttatctcttaagtactgaacactgttgacagtgaagaacttttcttaatggttttcagtgtaactaataaggatgtgaagctttattttctctaattccgcatatgctgaactatgcttatagacactataaccacgctgtgccttcctttgcatttagttttatgtaaatggtttatatattttttagtattaagagaaaatgtttgaaagacaaattagtatcaacagctctctagtagaatcattatttttcataagtaggcaatatgaaagcatattcatatttttctttttcgctttcaattgtataagaattgccttagaacctcttttgaactgaaattcagcaaatgttcaatttaatgtttttataaaagaaactaagccatatctagaaaataaacattcataaaa

SEQ ID NO: 11489 - DNA, 564 bp, Canis familiaris
gtggctttgtgaacgacagttaccatcaggtggactccatggaaggcccgagaagttacccgatgtctgctattcgtggtgggttttggcttccctaaagataattggaaggcttcacttggattgatagagagaaactgcgaagtttcattttagcatgtccagatgaagaaacccggaggatttccagaccgaccacggagacactggtagatccttttcatactttatttggaattgctggattgtcaccttttgggagaagaacacgattaaaccctgttagtcctgttttttgcactgccctgaagaagtgctttcggagagtcacatgttcacgcctgaactatgtgaggctagacacttgatggagatacccagataaatgcttagtatagttttgccactcttaacactttctgtaaagtgcttctccaatttaatgactactgtgtcactattttgtatatgaattgtattaattttaataaattatgtaattatacatactgtaaaataaagatctttatcttccaaaaaaaaaaaaaaaaaaaaaaaaaaaaa

SEQ ID NO: 11490 - DNA, 606 bp, Canis familiaris
ttctgttaagtttagcagatcaaatattatgtcctgaatatgcacttcttattttgtatcaaattatacccctgatatcccaatgaatctattaaaatgtttgattccttgggaatggctttaatagtaagtggaatgcgttatttgctttccctggtagagtagtggtatggacaaccttcctagtgataatattgtaaatctagggttaagcacaaggcagcccgagctttctatgtattgttccaagtgaggtcaccaaccctttttcttttgtatcctggccaaatactcctgcaggcccggaagtatgatagccaaattttgaccaagatatcactaatgtattgcactcaccacttgccacctgattttattaatggtacaatggcccttgtgtataaatattgccactacttatggtacctatgatggtgatatatttgtttctatgaaaaatgtattgtgctttgagactaaaaaccctgtaaaatgttaattttggtatttttttttttctcgctggtgaatttactctttcccctgtaaacatattaaaattaatcatgtttccaaaaaaaaaaaaaaaaaaaaaaaaaaaaaaaa

SEQ ID NO: 11491 - DNA, 613 bp, Canis familiaris
gctcctggatcttcatgctgaaaatgtgtccggtttgatgacagtgatgaaaatgtgttttctctctccttcctcaagcctcggccccagggctcctgtaattgacctgtggtgggtatgaattacgagttcagagagagggaggcgcacgtggagtgacttggcacccctccgctgtgacatgcggagggccggcgggagctccagcctgggccctcgtgcgtcggggcctgctccagctctttaatgcgctctgacctgcgggttttgtccagtaccaccttgctggaagtctcatcagtggtttcagaggtgagggaacagccctgaaattgagaaagcgtttggttggcttcaggcgactggatctaggtgggaatatgccaatttctttcccgtttggcccgaggattttggacagtatttttccctgaggctcaaaagcatgcttctcccccaccctgacccaagtagctgtttgctgaatatttcagagggtgatgatggtgtttaagagctgccacaattccagtgttttcgttgcaaaacacccctgccctccctgccaagtataagattagagttccggaaaaaaaaaaaaaaggaaaaaaaa

SEQ ID NO: 11492 - DNA, 606 bp, Canis familiaris
ccttgacatgctgtggttctttttaaaccgatgctctgtgccactgttgggcctgtgttgtaggccagctggccggtgttgtagactaggcttctccctggcacactgtctcggagggtctgaaggtacagagtatgtgccctcagcatcacacatgcagataggggctctgctcaggtttgggaggcacaagtggtgcttctgaagagccacatcctaactggcacgagaagcattgctacccttggacctgtttgcacaagctcaaagaagcttcccatgtgagcagtagtaaagtcatcaagccagccctctgcagcagaaacccaccctgcgactcaaaccccgtcttcctggcttgctgtgtttgtatcttccattcccacaacctgtgtggcacatgtgtttgaagccataaagaatgtgtattttctttctggaatacataaaccgcgcagttttccccaactccattcttccttccctggactctctttgccctctctggaggtacagagaaggctagagactggaaagctctgtaatgacttatgaggatctcttataataaacatcataaagtaaggagcccaaaaaaaaaaaaaa

SEQ ID NO: 11493 - DNA, 576 bp, Canis familiaris
  misc_feature (419)..(419): n comprises a, c, g, or t, or includes no nucleotide
  misc_feature (427)..(427): n comprises a, c, g, or t, or includes no nucleotide
ttaccgagctgatacccagacataccagccatatacccaagactggattaaagagaagatctacgttctccttcgtcggcaggcccaacaggctgggaaatagtggagttggaagccgcatgggggatgggggtgggccttggaacacaggtgtgtacagcgtgctgtagtggaagttttgtattatagtaatcctgtttccacttttggtatactctagtcaggattgaatgtattagatgaaatgtaaggatcttgttcaatctgaaacccccctcggccccctttccctccctttttttttttacttaaacatttttatgataatttagatggaagttgtttgtcacgttaatgttggttccacgtccttccaactgttcactatttctgctttattaaccacttcacttgtgacnctaatacnccccctttcccagcggttcggggtggggggctggtgaccgtttagttatgtcctccagataaagtcttagtgaaaaaaatgaataaatgttctttagttatatttaaaaaaaaaaaaaaaaaaaaaaaaaaaaaaaaaaaaaaaaaaaa

SEQ ID NO: 11494 - DNA, 605 bp, Canis familiaris
  misc_feature (421)..(421): n comprises a, c, g, or t, or includes no nucleotide
ctcctctaaaggactggcaactcctgctgccagagggctcctgggcctctggggcggggtcgggcaggaggaagagccgcaccccccacagggagaggctggtgccttccgtcctccgctccagcctgcccgtttgccgcacgctggggacggccctgcgttggggtcggctggaactctgctgtcgcctgttctcaggagctacaagatctcattcttgttctgaagctgccacaccccagcagccttgcattcagggccccacctcgggtgtgtctggaggggcagctccgtgccttactggctcccagcaggcagagacctgcgtgcgcagctgtgcacccctgggggaggagccaccgcagagtccacttcggcggacagtggcgtgctctgggtaacccgagtgtctgctggtcanttcaggcacctgggggactgcaggccaggctggtgccgtgggaagaactgcactcggtgtgttttcttcagggttagaatcacagatggggtgtggtgagaaggcgggatgcaagtgtagtaggtggtgtaacttttccttaaagtgaataatgggtaatttgtcaataaagcattcctttgtg

SEQ ID NO: 11495 - DNA, 587 bp, Canis familiaris
aatccggagggctcgccgtcaagttatcacaagagataaactatgcaaagagcctttactatgaacagcagctcatgttgagactcagtgagaatcaagagcagttggagctggactcctgagaaaccccagctgccggagagacgctcccagacccggaccccggatcagtcaggacgacaggcccgagggctgggcctgaatcaggccaaccaggataaggtttgggggataatatcaaggaacgaggggaggatacgaatggaaaccgtgttaatttgtgggtagggtgggggttactttagattatggggaagtaatttttaaaaggttttggttgaataacgttaaaaaaaaaagtgtactgagatgaatctaatttttagatcgccctgtattttgttaacatgtatatatgtacaactgtgtgtttgtaaatatataggagcatttctgagcagggcctgtgatgtgtgtaaaggtttgttaatgtaaagtaatataaaattatattggatcttctattgcactaattctacacatctgattcagggtactctataaaaggcattcttgaaagttaaaaa

SEQ ID NO: 11496 - DNA, 657 bp, Canis familiaris
agtggtgaaaagtgaaatatgtaacaataaatagataagtgaaatatgtaatatgcagtgtcagcaaaatgtaagggttgtgtatatgtttgttgatagataacacgtcctcacccaaccacttgcaccaatattttctcattttgttcttgtaactttcaggggctctaatcctcattagatatgggaagaaattgaagatctgatctgtcaccttgcttaagacccaaagtccccacacacgcttgtgtagagccatagatctgctggctgaagtctaggcatatttatatgtatcatgctaaccatcctgtttccactcttgggtgccatatataggacctaagctatgctgagaattcccctatttaaatttagctgactactgagatgatgagttgtgctctagaggttctccaaattcatggctcattaaaatcgctcggggagggcagctcgggtggcttggcggtttcgtgccgccttcagcccagggcgtgatcctggagacctgggatcaagtcccgcgtcgggttccctgcatggagcctgcttctccctctgcccgtatctctgcctctctctctcccctctctgtgttcctcatgaataaataaataaaaaatcttaaaaaaaaaaaaaaaaaaaaaaaaaaaa

SEQ ID NO: 11497 - DNA, 446 bp, Canis familiaris
ggggtacacaggcactctggcacagaccctgctccacctgatggtgatagctccatcacccctggccccaccgtccacggctccttctcagagatagctattgcccagacctcgagtccttcagaacccgttcccgggtggccatcaggatggccacccttccataatcctcctttcctctgctccccagaccttgccatttggaaacaaacatcagatccttgccccaccccttgcttccagaaagggtcttgagcccataccccaagtctgacaccctcctcccctcccgccgcctgccaggacactctagcaggacactggtgctttgccgcataccctactgtgctgcacttctttccccatttttcataaatataaatgtatgtatgtatgtgtaaaaaaaaaaaaaaaaaaaaaaaaaaaaaaaaaaaaaaaaaaaaaaa

SEQ ID NO: 11498 - DNA, 688 bp, Canis familiaris
ccagaaggaccctaacattctcccctgattcttgatataagccgaaatggactctgtggctttagccagaggcacattaataacactgtgaattacaaatacatgttgtcatccaaggctgggtatttctcagcaattgttaagtaactactgagtttagccaccaggtactccagtaaacactttttcattagacactgggtcactagaacagggctctaagttagattccagcacctgaagagctggaggagggttgtgaattttaagctagtaaatggtcagactttttttctgcagaaaaatgggtccacttatctattataccaaaaccaaggagtctgaccctttgatcccaaaattcacttttaaatcgtgaatgctataggaagaccatttctctttatagaagagtctgtgttttagatgtgctgattgacaaatgaactgtaaatgctactatggtacagatattctgctaaaccaaattatactaaaaccacgtagcaacggacaccctctccttaggggtctagctacatactttttttggtcatgctttaatgaacatagccattctatgtctagaataatgctgatttcccacgtactctggatttttaatttataaaatagatactgtatccaaggaaaaaaaaaaaaaaaaaaaaaaaaaaaaaaaaaaaaa

SEQ ID NO: 11499 - DNA, 622 bp, Canis familiaris
  misc_feature (1)..(1): n comprises a, c, g, or t, or includes no nucleotide
ntatgccgaaaaggtggcccaccagaggtctatgtgctattgcccaggcagagtcacctgcgttaccaactcctaggaggccttgctgtgcggagggcctgctatggtgtgctgcggttcatcatggagagtggggcccaaggctgtgaggtcgtggtgtctgggaaactccgaggaccagagggctaaatccctgaagtttgtggatggcttgatgattcacccgtggagaccctgttaactactacgttgaccccgctgtgcgccatgtgctgctcagacacgggtgtgctgggcatcacaagtcaagatcatgcttcccctgggacccctagtggtataaattggcccctataagaagccccctgccagatcactgtgagcacttgtggaaccccaggatgagatactgcccaccacccccatctcggaacagaagggtgggaagccagagccgcctgctatgccgcagccagtacccccagcataaatagggtctccttggcagttggatctggaggctggattttactctgtgaagaccctttaataaaatatttgagtaaaacccgtggcaccaaaaaaaaaaaaaaaaaaaaaaaaaaaaaaaaaaaaaaaacaa

SEQ ID NO: 11500 - DNA, 646 bp, Canis familiaris
aagtatttttaccttcagttaaaaaaaactattaaataacacctagtttagaaaactagaataaagagccaatatttaaagatattaaggcagggggcccctggatcagtgaagagaataaagactaaacacctctgattttttttttttaagattttatttatttattcataagaggcagagacacaggcagagggagaagcaggctccatgcagggagcctgacatggactctatctcgggtctccaggatcaggccctgggctgaaggcagcactaaaccgctgagccacccgagctgcccaacactttgattttttaaaaattagaggataaggatagtatttcaagtcgagggctagtagtgttgagacagtttttcatttgaaaaaaatgaatttagatctctgcttcgcatcaattaaaaagactaaattccagatgaagtccttttttaaaatttatttattcattcattcattcattcattcattcattcttgatagacatagagagaaagagaggcagagacacaggcagagggagaagcaggctccatgcagggagcccatcgcgagactcatcctgggactccaggattgcaccctgggccaaaggcaggtgccaactgctgaaccaaaaaaaa

SEQ ID NO: 11501 - DNA, 606 bp, Canis familiaris
  misc_feature (61)..(61): n comprises a, c, g, or t, or includes no nucleotide
  misc_feature (136)..(136): n comprises a, c, g, or t, or includes no nucleotide
agctgagcctgccccttccgagtggcccatctatttacctggagaaaagccaccacgctcnctgggctcctctcggctgcccctcagactgcagaggcgactcaagcccccagaaacccccacccggcatccaganccctgagactcccctaacggccagaaaggtccgtttctccgagaaagtctctgtccatctcctggctgtctgggcaggaccggctcaggcagcccgccgcggaccctgggagcagctcgcccgagatcgtagtcgcttcgcccggcggatcgcccaggcccaggagcagctgggcccctgtctcacccctgctgcccgggccagggcctgggcacgctgcgggaaccctacccctcctctggccaccacacctgctcctgcccagactttaccagtctcctccatccagaccacacccttgagccatgttggggcatctccctccattcctgtgtccctatccctggcctggacctcagtgggaggcgtgggctaagatcatgtagtttcctatttatatgaactatttattttgtgtgtgtggtttcatacaagaaataaaaccttctgatttgtagccaaaaaaaaaa

SEQ ID NO: 11502 - DNA, 559 bp, Canis familiaris
  misc_feature (550)..(550): n comprises a, c, g, or t, or includes no nucleotide
agcctaaaagttgcttgtttggctgggattgtattcatgactgtcagggttatgttcaatgactggctgttccctgtatgcagaacaaaaatcacaacggagttctttgatcctctctatgttgagcagaagtatgaattaggagctgctttgtttattggatgggcaggagcttcactctgcataattggtggtgtcatattctgcttttcaatatctgacagacgacaaaccccccaggatgggatatgcatacaatggtgccacatccgttctgtcttctcggacaaagtatcctggtgcagaaggagattttaaaaccacaaacccttcaaaacagtttgataaaaatgcttatgtctgaaaagagcactgctgcaagctgtcttataaaagtgaactgttcacacaatgatcccctcaaagccctcctctaatccgcactcaaactatttttaaaatatgaatttggagaattttctgattgtatggatgtaaatgttctaatcattttctgttgaggctttctataaaaaataaacaggttatnttacaaaaa

SEQ ID NO: 11503 - DNA, 590 bp, Canis familiaris
aatttaaaaaatctgcttctggtaatcatttctacttctaacacacctataaactctttaactctaagatactcaattacacaataatgggttattgagttaaagattgaccttatacagaaattttgactcatggtataaattttcatttgtgaattatttatccatctcgggcaatgactttcaaatacttttacctggtgagattctttcatccttccttcctatacctcacttttaaggttttcttccttcttcatggaaatccttgtactgtctctcagccaattaagggagagactttttcttcatgttcctcattttagaacttaccatggcttcatctaagctaggtgtctccattaaagtaagtcagagatgatatgagagcttaatggaaataataaaaatggaggggacttccttaggtggctcagcggttgagcatctgcctttggcccagggcatgatctgggagtcccgtgatcgtgtctcacattgggctcctacatggagcctgcttctctctctgcctatgtgtctctcatgaattaaaaaaaaaaaaaaaaagaaagaaaaaaaaaaaaaaa

SEQ ID NO: 11504 - DNA, 622 bp, Canis familiaris
ctgccacctctacgagatcctgccagtccgcctggaggtcacggacaaccggtgagtgcgcccccctcccgcccccgggacagtgtccccgctggctccctgccctcccaccgggtgctgaccggcctgcacccccagcccaggaggctggcgcgcactgggacggcgagaaggaggtgctggtggtagaacgcggcgcgcccgcgctgctaacctgcgtgaaccgggagcacgtctggaccgaccggcatctggaggaggcgcagcaggtcgtgcactgggaccgacagccgcccggtgtgccgcacgaccagcgctgaccgcctgctggacctgtatgcctcgggtgagcgccgggcctacgggccgcccattcctgcgtcgaccgtcgtgagcggctgggggtggacgcgtttgcacagtggcgacttctccactgcgcatcgacccgttggagcccgctgatgagggcacctactcctgccacctgcaccaccactactgcggcctgcacgagcgccgcatctttcacctgagggtcaccgagccagtcgctgagccgcccccgcgggactcgccgggcaacggttccagccacagcggcgcccccggcccagattcc

SEQ ID NO: 11505 - DNA, 542 bp, Canis familiaris
gtttcactaaagggacagttatcatcattgcaaatcatggtgaccgaattgacatcccacctggagcagtattagagaacacagattgtatcggggaacctccgtatcttggacccctgagagggaaaatactgtgtacacttcatactaattatgggctaaacagtttcttaccatgaaatgttctctaggattctaaagttggcaggtactttactgtgttactgtaccctgcggtgttaatttttaaagtagagttttttgcaatatgcttttagtcgaagaaaagcacagatggaagccatattttttcttctctgaagaggaccctgaaagttagttcatcgtaaagtgcaatactgtttaatcttaaaactggggcagctctgctggaacatcttttaacagaggcctcagtgatggtcactttgaattgcttgtgatttcaaaaataaagctgtgaggcaatccatgtgcgccacaaaaaaaaaaaaaaaaaaaaaaaaaaaaaaaaaaaaaaaaaaaaaaaaaaaaaaaaaaaa

SEQ ID NO: 11506 - DNA, 616 bp, Canis familiaris
gtcatttggaagcagactttcctttgggagctgctgtgagttgcaggcatctggcttctcaccctggtacaactgtcagacgaggcttaggagctgactcagatctttcaggggtttcccattgacgacgacccagggcacatattcatggggcggctgcagagcatctgtaagctgggcattaatgtgcaagagctgcatgccacggtcccccactgcacactccatgatggtgtctggggacattgttggggcatagatctccatgcacggtttcagattttcctccatgtcatccatttcctctatgcagacaatgatcaggatggccaaatttttatctagcttgtcccacaggcaggcctccaccttgttaagcttgcattcctgctcaccgtgctgacatgtgaactcccacctgccgctgacattttgttcatgggcatttccatagggcaccagcgtgacattgaggatctccaggaccatcagccaggtcgggaagagttctcggaccaggaaggcccggcacccgggacacagtgcctcgtagtagacgctcacattgacaagtggtgcttctgacttcctgaggggctcctgcaggcataggtcc

SEQ ID NO: 11507 - DNA, 582 bp, Canis familiaris
gcctcggcgcagatgcagcgatagtcgtctggctcacgggctggcactggtactcacacttgctcccgaagcacgggtccacgggctccacgcactcgttgtccaccagctcgtagccggggtagcaatggcattcgaaggcgccccgcgtgttgacgcagagctgcgggcacagactgggcacctggatacagtcgtccacgtcctcacaccggtgctggtcggcagccagctggtaccccgtctcgcacatgcacaagtaggagcccggcacgctggcgttgggaatgcagaaatgctcgcacagtttatggcacgagtgctccgcaaacgtagcgcaggagcgcccgtcggcctgcaggtaggtgtcagccgggcagaggcagcgcggcgccccggcacttgcgctgcacgcgcgctggcagccgccgttctccacgctgcagtcccaggcgcccggcgcctcccggccccagcgcgcctcggcctccccccgcggcgccgcgcacgccagctgcaccccgaagggcgcgacggcggcggagctgcccgccggcagcgcctggaagtccgcgccccggg

SEQ ID NO: 11508 - DNA, 705 bp, Canis familiaris
tcaaactggcacagaatttgcccaagagaatgttaagatggttgccctttcaggtgggacagtgttgaagaccatcttgcctggagccaaggatatcaatgctacaatgggcaggagccccacagaaacatacctttccccatcattgatgataagaatcgggaccttgccatcctgttaggcatgctggacccggcagagaaggacgaaaagggcatgcctgtgacagctcgtgtggtgtttatttttggtcctgataagaaactgaagctgtctatcctctacccagcgaccactggccggaactttgatgagattctccgagtaattacctccctccagctgacggcagagaagagggttgccaccccggttgattggaaggatggagacagcgtgatggttcttcccaccatccctgaagatgaagccaaaaaactcttccctaaaggagtcttcaccaaagagctcccatctggcaagaagtacctccgctacacaccccagccttagtctctccgaggagtcggtgctggagctgttggcgtagctcagtgagccagaggatccgggctgccagtcatgttctcctacaactgttccgtcaaaacatcctggggtgatcacagctaaggcctttaggttgctctactactggcttattaaatgaaaatggcactaaaaaaaaaaaaaaaaaaaaaaaaa

SEQ ID NO: 11509 - DNA, 687 bp, Canis familiaris
acaagcgtggtttatggcaagatctacaaggaagcgaaattggccttgacagattcacacagttgatgctcggtctcttgggtaaatatggcatcatctgcaatggaggatctgattcacgagatctataccgttggaaaacgtttcaaagaagccaacgactttttatggcccttcaaattatcttctccacgtggcggaatgaagaaaaagaccacccattttgtagaaggtggagatgctggcaacagggaagaccagatcaataggcttattagaaggatgaactaaggtatctaccatgattatttttgtaatctggtcagttaataaatgactactttcaaatggaaatgtgttgttgtcttggtgacttttttccagcctgactctgctgtcccttgacaggcaaaccttggtgtgataaaattaagccaagtcatcagcatttgcgttcaaacttaggatctagtttgtatcttggtgggaaaatattccttgggtttattaaagactctttacagagcataaatcttaatttttcacttttgaattgtgccattgagttagccaaaatggtctgttcgaaggaagcctatttcataggcctttgtgcgtgatttatgggtaaggtaataaaaattcagtttacgaataaaaaaaaaaaaaaaaaaaaaaaaaaaaaaa

SEQ ID NO: 11510 - DNA, 584 bp, Canis familiaris
cagggatcgtgtacaagggccgccagctcacaaggtgtgtcctggtgcccaaaagaatgaatttctgacaagcatcttggacgcgctctctaccgacatggtgcacgcagttctccgacccctcttcctctggcaggctctcagaacccgaccccagccacaccctcgaggtagagggtggtccactggtacttcaagctactcgataagaactccagcggggacattggccaaaaggagattaagcccttcaagagattccttcggaaaaaatcaaagccccaaaagtgcgtgaagaagtttgtcgaatactgtgacgtgaataacgacaaatccatctccgtgcaagagctgatgggctgcctcggggtgacgaaagaagaaggtaaagcaaacgcaaagaagcaccctacccctagagctaatgctgaaagcgcctctaatagacagccaaggaagcaaggatagtggctcacacatcccaggcggttcctagacatgtgggagactccctcacccaaaagcaattaaaaaccaaaaccaacaccaaaaaaaaaaaaaaaaataaaataaaaaataataaa

SEQ ID NO: 11511 - DNA, 588 bp, Canis familiaris
tgtcactggcgcccaggtgtactttgatgctgtgaggtcatcggaatcccaaccgctgtcctcatctggaacaaggtaaaaaggggtaactatggagttcaaaggacagaactcttgcctggtgaccgggacaacctggctattcagacccggggtggcccagaaaagcatgaagtcactggttgggtgctggtatctcctctcagtaaggaggatgctggagaatacgagtgccatgcatccaattcccaaggacaggcttcagcatcagcaaaaatcacagtggttgatgccttacatgaaataccagtgaaaaaaggtgaaggtgctgacctataaactgcagaatgtattaatctgcatcactaaaagtagtcctggtaactacagcctctgttcttgcctaataaccagtttcttttcatccagtccactaacgcttagttatatattcactggttttacataaaggaaatccaaaataaagataacacatcaagactatctacaaaaatttattgtctatttacagaagaaaagcatgcatgtaattaaaatcaataaaatgctttctctcacaaaaaaaaa

SEQ ID NO: 11512 - DNA, 653 bp, Canis familiaris
  misc_feature (104)..(104): n comprises a, c, g, or t, or includes no nucleotide
tttgcattgcgagttgtttgtagttgtgtggccaaagtaatatactacgggacttcacggtaacgtctgtctagcatttaatgtactggttaatatggaaaatntaagacattccgggtttaaacacactatatcctcaggatatatcttaacatgtatagaatttaagtatccagatggcaagacatccctttcaaggtaaaaactaccaaacgatagctttgtgaagctgtacaaaatgtcagaagggataaggacggatcccgtggcagcttcggtgcagtttgctcctctttcagttctgtcttgtatagattgtgccccactttggaagcaataattatactacttttcatattcagatatcttttaaaagtccacagtataaatgaagcaatgttcctttaatgataagacttttcttcattaaaatcagaaatttggcattgacattttggtatattaaatggtgtataaggatttttggatgcattttttatttgtaatcaatttttttttttctggaacaaatgtattatagtatgcctattacaattaagctatgacagtaggaaaataagtgatatttgggaaattaaagaaaaattgagccagaaaaaaaaaaaaaaaaaaaaaaaaaaaaaaaaaaaaaa

SEQ ID NO: 11513 - DNA, 642 bp, Canis familiaris
agagcctttaatcagatatcgtgattgcaatatagggcctcaagggcttgggtttatgaaggcacaacttgtcttggcccatatttctgattccttgttcaacagcattagtattttttgttgctgttgttgttcttattctttcaaaccattaaagagccacccctggtgatagcctgccttgcctcttatattctcctttatcctacctgctgtggtgtttgtgtgggatcacatggagtcaagaagtggatgtcttataaaagatgcccagaaatgtccaaaaagactaatgtagtgggagagatggttaagccaagaggggatgcccagatcttacttgttagcagtcttcttgcgtgttttctgttaaaggttcttgacttctgtcactgtgatatgggtttttatggcgatggaatggctttaagcaattctgtggagggaaatgggaaggatggatctctgaattaataatacatgtacttcttggaaccaggcttgaaatgctgcattttcttgcttccaccaaaacttgtgggctggttaataaatgttcttaagatactgcaagcccaaaaaaaaaaaaaaaaaaaaaaaaaaaaaaaaaaaaaaaaaaaaaaaaaaaaaaaaaaaaaaaaa

SEQ ID NO: 11514 - DNA, 603 bp, Canis familiaris
gagagattggaggtcaaggagaaaagtgaaagataaagcactgctcttgactctgctgtccagttctcaaggactagtcttatgcagcttcctatcagagttttacccttatttttaagttaagaaataatgattaacttatgaggaaattatctgggaacaagagtgggattccttcctgtgggttttttggcagccttctgatcccatcttcctgccccacaacgtgagcagctattcctacggtttctcttcacgtattgataaaacttccaactgtatgaacaacctgtagatgatagtgagagttactgattcctggaatgccatctgggaaccaaggatggacatggcaggtggggctgggatgacccttccctcccactcacccctaggaaaggaaagtctctgccatttgggagggtggcatctatgtcatttcttgtgggcaccagttctgagctttagtttgaggactcattcctgagtgtgctttttcctccctcttccctgcccacctcaccttgagtttaataaatatggttgtacttttcttattatgaaataaatgtctgtaactgctgtaaaaaaaaaaaaaaaaaa

SEQ ID NO: 11515 - DNA, 551 bp, Canis familiaris
ggattttagagttagagccattaggatccatctcctccctcttattcttaggaaatgcataaaggaccattaatagaagtgattccccaacctaaggaaaagctaaaaccggattaatccttctggctgcattggttacatttgatgcaggagcagtccggtatggaggtgagcgcctgcaagcagtttccctgcttgaaaggaagagggttggctgctgcctcctagcggtgagagccccattgagtggaggtcacaccaggatgtagtcctgacaaggatcctcttatttctgcataacgaaagagcctctggattagaagacgtggttcttcctctctgtatttttacattcttggtcccttccaatccttcccatcccttgaatggactccgaattgtcagctacctccccaaagggggtttgggaagcttcttttggcccatcacttggtgacagctgtgagtgagatgctgctgctaacatgactgcttctcccagagagcacattgagaggtccagaccgattcaaaccttggccctaaaaaaa

SEQ ID NO: 11516 - DNA, 373 bp, Canis familiaris
acaagtactcacagcctatttagatcttaatctggataagtgctatgtgattccattggacacttccattgttatgcctcccaggaacctattggagttacttattaacataaaggctggaacctatttgcctcagtcatacctgattcacgagcacatggttatcaccgatcgcattgaaaatatcgatcacctgggtttctttatttaccgactgtgccatgacaaggaaacttataaactgcaacgcagagaaaccatcagaggtattcagaaacgtgaagtcagcaattgtgttacaattcggcattttgagaacaaatttgctgtggaaactgtaatttgtccttgaacagtcaagaaaaatattatg

SEQ ID NO: 11517 - DNA, 640 bp, Canis familiaris
tgctggacaaaggaattaaagttatctcctatggaaatgaatatgctgatctcccagaatatttcaagcgcctgacatgtgagatctccacgcgggggagatcagggatggtgagagaaggtcagctaaatggctcatcagcggcacacagtgagataagagactgtagaacatgagaggactagagaaatcatcaccattagaccaagctgtcaggcccgactgtggagaatatttagcaagtaaacttacaagagcccaacacagctccatggaagtaccaaaacccagaggctgaaggttggcagtagagttgggggtcggggggtgttccagctcaatccttcatgcccactggttcttgatcttctgcggcctattccagttcaaggatcccccagtgacaacgggacccaatgcagcccccccatccctgggttggacatgcctgtgtccacacaacacatcagtgtgacacctccactgactatggctacagccctgcatgaaggacttgggagctagatgccgcgggatcaccatggcccttgttgctgttttgtactctatacttggtttttcaattaagcttaatggcttttttaaaacatgacttgaagctctagttttctaaaaaaaa

SEQ ID NO: 11518 - DNA, 632 bp, Canis familiaris
  misc_feature (1)..(1): n comprises a, c, g, or t, or includes no nucleotide
nattccagacaaacccttaccaccaacaggaaggggaaagcaagacaatttgaccctagaatgggatcacgaaggaatctctgtatagaatcagacggagctacactcattgcccgaagatctgtgaacccctggggggctactatccatggccttataattatcaaggttgccgatcagcctgcagagttgtcaagccttgtaactggtgggtggcccgcatcttgggtatggtgtgaaagctcagttcgtatacccggtggcttgtatcataaaaactccagagaccacccgagtatgaggcatcttgatgctgaagggacccccaagtattttatactccatttcagcgatgctattcaagatacttttacagctctcaattgctttacagaacttcatccagaatgtgcacaatgtactgaaagggtagtttaagtctaaaatgccctaacaatccctttattactggctatttttaatttgctttgctttgcccataaggcctacttacaagactaactttcccagctactttgaaataaacatgaaaaaatcaccatgtccaaaaaaaaaaaaaaaaaaaaaaaaaaaaaaaaaaaaaaaaaaaaaaaaaaaaaaaaaaaaaaaaa

SEQ ID NO: 11519 - DNA, 586 bp, Canis familiaris
gtggcctgtccaggaacctccgaagtctggctgtcctgtgggcgtcagtgtgtctgcaggggctagggatgttgagggggctggcccctctagcctttggggtcccgcctgggcagatgttgtcttgtgtatgtggctgaggagcagacgggccggggggtctctacagctccttcggcggctctgcggtgagcacagtctgggcgcagagctctggctccctcgactcgggccgtggaggtgccagacccccgccttgaccaagtcactgcctagcagccccccctgtcccttctttggtccacatgctcctctggtgtcacgctccctgtgcctctgtgggaggggcggctgccctgtgttgtgtccggggccgctgcagctggggcaatctgaagctgccagcagccctgagggcggtatccccactctggtcccgagttttgaccagacctgagtccacctggtcccctgtgttgtgttctggtcagaggcctttgctgtgaaatgcagtgtttcatacgatcccatctttcctagtgcatgagaaataaagattatttaagtaatgagacaaaaaaaataa

SEQ ID NO: 11520 - DNA, 524 bp, Canis familiaris
ttaatgtttaatggtctcccagcctttccagcccaggcacttttggacaaatgtttgtccttgtttgaggttttgttgtcgggtttttgtgtttgtttttgtgggtatttgcctcattccatccctgagcttcgcaggtagacagatgtgattcctaacttaagtttaaggtgtttcttgtagtggagtcattggttggcaggagttaagtcatgcttttccagtaaaggggcgggggggcgggggtggttatccacgagatgagctaaagttaagttagaagaatttgattggaaattcttgattggaaattttagctttgagttttgtctctctagtcctaaaataaacttggaagatgctcctcatttgtccatcttctgctttgatccttggatcccacccattcttccactttaagaaaaaacgagtaattgttgcagaggtctctgtattttgcagctgcccttttgtaagaagcacttttcccaaataaaagaataaaaaaaccaaaaaaaaaaaaa

SEQ ID NO: 11521 - DNA, 695 bp, Canis familiaris
gaaaaatggtcagcttgaaaaggagaaaagggtttctgacagctcagtacaggaagtgagaaccagagtttgatctttccaaaggagggatgaaatggatgaattagaggggttccagcagcaagaactaagtaaagtaaagcacatgcttttaaaaaaagaagaaactctggggaaaacggagcaagagttggaggcacgaaccagagaactgagtcacacccgggaggagttgatgacctccagtcagatgttatcagacttgagccagaagttggaagaattgcagagacactgctcagcgctggaagagcagagagatcacgtgacagcttcaaaaacaggtgcagaaaataagatctcggccctggtgcaaaaggagcaagagctccaggcattcattcagcagctttccatggacttacagaagtgtgaagtaacaaaagttattcatcgtattgaccatcaacattgaggtgtttctggacttttactattacgaacaaggctactgtgaacattcctctacccgtgcaggttactctggggtatatttaagatgtggaaaggttaggtgtgcctggctggctcagttggtggagcatgcaactcttgatctcagggttgtgagtttgagccccacatcaggtgtagagactacctaaaaataaaatctcacccaaaaaaaaaaaaaa

SEQ ID NO: 11522 - DNA, 658 bp, Canis familiaris
  misc_feature (17)..(17): n comprises a, c, g, or t, or includes no nucleotide
  misc_feature (104)..(104): n comprises a, c, g, or t, or includes no nucleotide
cactaacccatccgagngaagggcacatgtggcacaggtgaggctcctgggggtcaaacaagaagagtgaaggggtagacacaaagatagctggatgggatggntggggggcttcatgggctaccgtcctcccggacatctagtcaatgactgggtattttggtgtggttttgaacctaaaggcttcattgatacaaatgctacacacttatcaatggttttaaaatgaactttctttaacacttctgtgtgtagtctgaatgctacaatttaaatctgaattccttgtgtttgcccccctgaaggtggtaagcactgactacaaaactaacacagaaaaaaagtattcaaaaaaaaaaaaaaaaaaagaaagaaagaaaaacgaaaaaagtattcaaaatacaaaactacaaaagcatccaagaaactgaattcatcaaactctcaaatgatgtcttttgttaagtttgtggcctgtttactcctgtggttattagaacttcaagctgcacccaggcttctggaagactctgtatttaccaagcctataaaatagaccttcttatagagacttaacactttcccatggttctaggtactctgggtaaaggccaaaatcttcacagtagccaaaaaaaaaaaaaaaaaaaaaaaaaaa

SEQ ID NO: 11523 - DNA, 569 bp, Canis familiaris
  misc_feature (35)..(35): n comprises a, c, g, or t, or includes no nucleotide
ctgaccccctatgctgacatccctctcacagaccnactcaaccgcaggaagaaggtgaagctgcagggacagttcaaaggcctggtgaaagctgcccagcgaggatcccaggtgggacacaagcttcgcagaaaggatcgtcggccctgaagggtcccccagagggctctgtgatccagtctaaggtctctctgtggctcccacgctgctttgaccacaactttagatgctcgaggttttttctgtcacagcctggactcaaaatgacttgttggatgggacttggtttccagagaggcacccaggattttggaaatgccaaactggaatcacccttcagagctgtccctagagcctagagatgggaatatagcctcactgtctccaaataggccagctgtgtttcttccccgagtggccatgtgcatccagagcagacagtttccatttcttccagactcttgtagccacgtgacacttagcctggctgtggtctgggcatataagatttgctgtgaccagatgtagaataaacatgcaccagcatgcactgtccctaaaaaaaaaaa

SEQ ID NO: 11524 - DNA, 597 bp, Canis familiaris
gcagagcaccccccatctggaaagagaaccaagttcgtgggccactggacagggaaggtatggagaaggtgcttcgtggaagagggctcagtgcccaaggcagtccttccggctctcctgagactaccaggtgcctctggcagcagcgtccacgtctgcagggagagtccaccagacgcccaccccggccctgccatgagagccaccgtcatggcccgcttggcctgcccgcggcccctccatcaccccccaccatcatcgcccccttctggcgcaatccaaaccaccggacgttctctcccctcccactctctaaccaccctgcctcccactctgcctggcatggcaggagcaggaaagggactatcactggtgattgacccaaggcagccatcccgcagaggccaagggttcccaaggaaggcccaggctgagcagagagagaacacctgctgggggacctccaggtcaagagacagagacacccgtaccacattctcaggcccctgcaccccccgcctcctgcttgcagcctcctccttctagtgcaataaagtttgtgtgttcccaaaaaaaaaaaaaaaaaaaaaaaaaaaa

SEQ ID NO: 11525 - DNA, 563 bp, Canis familiaris
tgactgggggccagattaggcccttggccgtgggtcagcaagggtccctgagggaaaggggtgcaacgtccgtgccgcatgctgtgtccctgctcacctgggccctgctgccctgcttggggtcctctttccaaacacctttgcgcaaacagccccagaattatccattagttacccagaattacccccagaatggttctgttcctacggggactcatgcacgcacatccacaccccacgtctccctgctgaaattgggtgagaaaattgagagccggctctgcagggtcttcataggcccctgctgcagtgtcatggcagtcttgcaggttaccttggcaacgtgtacattactccctttttttggcattgtacagtcagtactataaatttgttgttttgagttttgtaacttgtagcattttaggtgccgttgtgtttgtactttgttgtgtagagtgaagggactgttgaataaacaggattagaatgcagatcgaaaaacaaaaaaaaaaaaaaaaaaaaaaaaaaaaaaaaaaaaaaaaaaaaaaaaaaaaaaaaaa

SEQ ID NO: 11526 - DNA, 593 bp, Canis familiaris
gcccacatggtgtcagatgagtatgaccagctctcctctgatagcccctggagctgcccgtaatttgtgccaacaagtaccatggttgaaaagctgttgggcaaagattggtttttcacaatccgagtgccggctccatcccttcccatggttatccgttatcacaaagatgttgtcctgtgctgggagctgacagggctgcagacagggtatgcgaggtgccctttggggaagccccaggggcaccagtagccagggtccacattgggccaagtcatcatgtccatccgtaccaagctgcaagaacaaggagcatgtgattgaggccctacgcagggccaagttcaagttgcctggccgccagaagatccacatctccaagaagtggggctttactaagtttaatgccggacgaatttgaagatatggtggccgaaaagcggctcatcccagatggctgtggggtcaaatacatccctaatcgtggccccttggacaaatggagggctctccactcatgagaaccttgcaccacccgaaccctattcatgcccaccaataaatcctgcttcctgtcaaaaaaaaaaaaaaaa

SEQ ID NO: 11527 - DNA, 569 bp, Canis familiaris
gcatacttgtccttcgttctgtctgttccacatctgcacccctcatggcttacgcaccttgggcctacaagtctgtctaaccggtctggttgaaaataccagattcctgcaacaagtgttgtcacatgacctggaacccaccaatcggagtcacccgtgcctagtctgacaagagctagtgatgctaagggagggttcaaggagccaggtctactcaggcagggtagaggcaaggtgttggggcagaagcgggcatgatgaactgaaccgtcctgagctcagaggcaaggcaaagttcctctccgtccagttctgcagtgtgggctgttcctggaagcggcaccctgaacctcttcctgagccctggaaactgccttacctctcccgggtcagcttctgtgcccctaggaaccctgaccgatttcgtccataaagctctcaaattcgttatttgaaggcaaagaatgtgcaacagcaatagttactgtaatagttaataattttaataactattccatatataataacacattaccatatataataacagtagtgactttattagtaat

SEQ ID NO: 11528 - DNA, 646 bp, Canis familiaris
gggagcctgtctgggatggtgaagtcctggcaagaagctggaggaaagggccttttgacaaggcctaatgtggtcttggccagtttcttggttgctaaaggaaagatggaagatttctttccgggaaatggcctgaaaggaacaacatagtggtccccaatggctaagcagttcccggggacttgcttcgggttgcccttcgagagttgttcgaatcccttcttgttgaggctctttggaataggcccccaggtcccaagccccaagccatggagtctcccgagtttgcaacccgcgtggggaacttcctccccctgtcctctacaaagggaagaagattgcttattggttgtactcacttctgatgtacttcaaggtctttgggagttctccttcctctcaccatttcaacttttttgaaattctcactcttgcatgcatctccccactccttccccctgccagtttcacgtcaacaattatcagctttaccgagtgagttcctggcccttccctcacccccacccccactagtctggtctgttttatgctatttggctccttttttggcagaacagtcactgtccttgtaaggttttttaaatcaataaagtcagtggccttcaaaaaaaaaaaaaaaaaaaaa

SEQ ID NO: 11529 - DNA, 612 bp, Canis familiaris
agcctacagaagctggaggaggctgagaaggcagctgacgagagtgagagaggaatgaaggtcatcgaaaaccgagccatgaaggatgaggaaaagatggagctgcaggagatgcaactgaaggaggccaagcacatcgctgaggattcagaccgcaaatatgaggaggtggccaggaagctggtgatcctagaaggagagctggagcgctcagaagagagagcagaggtggctgagagccgagccaggcagctggaggaggaactccgaaccatggaccaggccctcaagtccctgatggcctcagaggaggagtattccaccaaagaagataaatatgaagaggagatcaaattgctggaggagaagctaaaagaggctgaaacccgagcagagtttgccgagaggtctgtggcacaagttggagaagaccatcgatgacctggaagagaccttggccagtgccaaggaggagaacgtggagattcaccagactcttgaccagaccctgctggagctcaacaacctgtgagggtggctcagctccaagccgggctgtcggcgccaccccaacgcaataaagtggatgttactggcaaaaaaaaaaaaaaa

SEQ ID NO: 11530 - DNA, 702 bp, Canis familiaris
  misc_feature (1)..(1): n comprises a, c, g, or t, or includes no nucleotide
  misc_feature (15)..(15): n comprises a, c, g, or t, or includes no nucleotide
ncaaatggcggttanggcgtgtacggtgggagtctatataagcagagctcgtttagtgaaccgtcagatcgcctggagacgccatccacgctgttttgacctccatagaagacaccgggaccgatccagcctccggactctagcctaggccgcgggacggataacaatttcacacaggaaacagctatgaccattaggcctatttaggtgacactatagaacaagtttgtacaaaaaagcaggctggtaccggtccggaattcccgggatcgtctctccgcccgctgtcccggactccagccgccccttctcgccatggatcccaactgctcctgcgccgcggggggctcctgcacgtgcgccggctcctgcaaatgcaaagagtgcagatgcacctcctgcaagaagagctgctgctcctgctgccccgtgggctgtgccaagtgtgcccagggctgcatctgcaagggcgcatcggacaagtcccacctggctgtgccttaattgtgggggagagccttattcctgatgtaaataggagcgacgttgtacaaacctacagtttttgggggtttttttgtggctttttgtttgggtccaactctgacccgtttgctactacattcctagttattttccctatgaaataatacgtgaattataataaaagctgtcgactttaaaaaaaaaaaaaaaaaaagg

SEQ ID NO: 11531 - DNA, 666 bp, Canis familiaris
ggagggttcaagtcaacgtctgggcctcctccccgccgcacctcaccatgcgccccgccggcctcatcttcaccccgaccttggacacccaggccttttccgtcctcccgaactcctccttggctcccctcttcgtgcttggcctgagcacgaatctgttccatggaggtcagcgccaggcctgacaggcttgtcggacagctcagtttggacaagctgctcctagaactgaagcactcggacgtcggctccttctcggttgcagtgctgcagtctatcatgaactatgttgtgcccactgctgtgcttcccaaggttaacgagcggctgcaggaaggcttcccgctccccatgcctaaaaacgtgcagctcttcaacctggtgcttcagacccaccaggacttcctgctgtttggtgcagatgttcactacagcggctgaagtcccgaattcagcgtgggtcccggggggctgtcggcccggccaggaggtgtggggctggtggctctggctcctgacccgcccgtggggcacaggctgcctttctccaacccttgaaccagacacccttgcaaatgtctgcgaactcagattcggaaatgatctaaatacagaaactttgttccttgaaaaaaaaaaaaaaaaaaaaaaaaaaaaaaaaaaaaa

SEQ ID NO: 11532 - DNA, 538 bp, Canis familiaris
ccaaagaactcccaactcttgggacagtgggcactaccgtgagtttcaggtcagagaacatctgatttcctcgtgaaggaaacagcttcctcaagcagtgtcacttagtacccgctgcccaggctgactcaccttgcctccacctgcgtatcactgccctctttctcccaagagatcccactcgattatagcaacaatgcccccctggtgcctggaaaacccacctggtgcagtaaaatgctatgcaacaccaaatggcttcttcccctacttctgctcaacagtggaaattcctcaaaaatcacgtttcaccttatgttggcatcagtgtacagtggctcacggttttttctttttttttttttccttttaatatgaagcaaaccatctctgttacaattcatgtttggggctcgttcatgtctcttgagtgtgaaataaaaatcatgtttttatgatttttgtaaatcttgactttttacaccttgtttctgtaagctgaagtttcttattaaaagaataaaatgacaaaaaaaaa

SEQ ID NO: 11533 - DNA, 540 bp, Canis familiaris
atggaccatggcggcccagtgacataggagggcccgagcaggaatttggtgttgaacatcgggcctgtctgcttctttgtaaaaacccggatactccacgtccgaacacaatccattgccaatccagaggacccaagtactttccagtcccagtcactctaagggctctgcactgaatggctgacctgacctgatgtccattcaatcccacccggctcacagtgtggacttttctcccctctttctaagagacctgaactgggcagactgcaaaataaaatctcggtgttctatttatttatggtcttcctgtaagacctttgggtcgagccacgaggcaggaaactaactggtgtgagtcaaacgccccctgagtgactgtccccagcccaggcaagaagatctcccttcaggtgccgggcgcaggaactgcgtgtgtcctacacaatggtgctattctgtgtcaaacacctctgtattttttaaaacatcaattgatattaaaaacaaaaaaattattggaaagtaaaaaaaaaaaaa

SEQ ID NO: 11534 - DNA, 681 bp, Canis familiaris
gcatggagaagcttggagcagttgccagaccccacgggtgccagcagtgatactgccagccaagaaaatcaggacacagaggacctgagcgggaccagcttgtcatccctgatgggcaagaggaggaagagcaggatgttgatgaggaagggagacaccaacaaaagctggggggagaggaggactacaacatggatgaaaatgaggcagaatcggagacggacaagcaggcagcccttgcagggaacgacagaaacctcaatgttcttaatgctgaaaatcagaaaggagacataataaatttacttgctcagcgtgaaaagaggaatcacacactctgaatgaactgggatcatatactggtcaggattgaacagagatcactacaaaaaatttacgaagggttgaatactgtgaaatgtactaagtaaaatatacaccttaaagattattgtggagttttaatatgtaccgtatgtaggaaaatgattatcttgtagatggtttttttgggggtattttcaaagtgtttatgctaaggtgtcaaaatttgtcagctaataggtatgagatcaacaccgaaaatagaacccaagtttctccttcaaatatggtgacactggcgctttttaagaaattctggaatgtaactttaaaaaaaaaaaaaaaaaaaaaaaaagg

SEQ ID NO: 11535 - DNA, 628 bp, Canis familiaris
gggttaacaggttattgtccctaagctaatttcgtcccttaagacatcgttcttcatgatacatattatgttgtggcccattttcactatgtgctttcaataggagcagtttttgccaattatgggaggatttgcccacctgattccctgtaagtctcagggtaaaaactaattaaacgatacttgagcaaagattcacgtttacaatttatgtttgtgggagtaaatataactttgcttgccctcgacatttcctaggtttatctggaatacctcgtcgatactctgactacccagatgcatatactacctgaaataccgtctcctctataggatcgtttatctcgcttacagcggtgatgcttataatttttatgatctgggaagcctttgcatccaaacgagaagttgctatagtagaacttactacaactaacattgagtgactacatggatgtccccctccataccacacgttcgaagaacctacatatgtgatccaaaaataagaaaggaaggaatcgaaccccctaaaattggtttcaagccaatgtcataaccattatgtctttctcaatcaagaaaaaaaaaaaaaaaaaaaaaaaaaaaaaaaaaaaaaaaaaaaaaa

SEQ ID NO: 11536 - DNA, 651 bp, Canis familiaris
ggcatcaaccatcccccgccggccctgtggttgcgcgcagctcctgatgtcaaggagcttctgagcagattggaggagctggagaatcttgtgtcttccctgcgggagcagtgcaccacgggagctggctgctgtctccagcctgccgaaggccgcctggacaccaggcccttgtgcagcggccgcggaaacttcagcacggaaggctgtggctgtgtgtgtgagccgggctggaaaggccccaactgctcggagcccgaatgtcccggcaactgtcacctgcgaggccagtgcctggacggccagtgcgtctgcgacgagggtttcacgggggaggactgcagccagctggcctgtcccagcgactgcaacgaccagggcaagtgcgtgagcggggtctgcgtgtgtttcgaagggtacacgggcgccgactgcggcgacgaggtccgccctgtgccctgcaacgaggagcacggcaggtgcgtggagggccgctgcgtgtgccaggacggcttcgcgggcgaggactgcagcgagcccctgtgcctcaacagctgccacaaccgcgggcggtgcgtggagaacgagtgcgtgtgcgacgagggcttcacgggcgaggactgcagcgagctcatctgccccaatgactgc

SEQ ID NO: 11537 - DNA, 562 bp, Canis familiaris
ggtcactatctgtaatctggcctcagttcttcttaagagtcaactagcttttctgcggtctcttgccatgtgataaggattttcatacttgggcttacagacccatttgaatcataactcctattaaatacacgaaagtctccccaataccattgaaataaaaagtaggaaaagagaagcttgaatttcttgagcctactaccctcgagattctagtgtggctttcagagttcaggaataagatttcttcccagaactctttacagtcccaatgccagagtgataaacccaaataactctaatcagtaagtgctagttgagaatcagaataactttctttcatcaggccgatcccatccctaaaagggggtgggagtgtgtcttctcatgcctgaggatcagtgtgtcactgtgcaggacacacatgcttgacacaggtcatctcagatcttagtaaatgtaacaaattacttttttagatcctgaaatttgtaataaaattactttactatcctgatcacccaaaaaaaaaaaaaaaaaaaaaaaaaaaaaaaaaaagggc

SEQ ID NO: 11538 - DNA, 498 bp, Canis familiaris
acagtagtgaattatcacttctggcagatgaggtaatcactgtgttcagtgtcgttggaatggattcagactggttaatgggggaaaggggaaatcagaagggcagggtgccaattacctacttagaactgctcaattaaataggtggactatggaaagattacccatcgtgacaccagtatttatataccattaactctagattaaacagggtttaagtatcttccatgcttaataattcttaggagactgaaagagcaaatacccagcccatccagaaacccagcctttctgccaataaaattgcatggtaaatatttcattacagaatttatgttagtgctttcatgccaagaatgttttcttaccaaattctctttctactgaggtttcactaataagcagcttctacttttgagctccaacttaaagcagaagaactgttttctactgaatttttcattaatggcaagctttttcttttatgtaaaataaatt

SEQ ID NO: 11539 - DNA, 593 bp, Canis familiaris
tagccctatttaggtgacactatagaacaagtttgtaccaaaaagcaggctggtaccggtccggaattcccgggatgtctctagacacccctacttaaggcctaattatggctgcagagaagaacagaaatgttatcaattttgacaatggaaagtatcattaacagatacagggatgtggaatgggagggggtatggaggaagagggaaggacagagcccacgatatctttatcaaacacatatgaagttgcccaaatgagaactagacattgggtatattatttagcacaacaaatttaaccaatacacaaaccttaaagctgtattagcagttggaaagagggaggtagataaagtggaagaggaaactgtaagggaaccaaatgtcatgcacaatagggagtaataagttattgtttaaaactgataaaaaaaaaatagaggggcactgggtggcttagttagttaagcgtctgacttgagctcaggtcatgatctcggggctgtggaatcgagccctagggaaggctcgctgctcatggggagtctgcttctccctcttcctcatgctctccctcccccctctcaaat

SEQ ID NO: 11540 - DNA, 586 bp, Canis familiaris
  misc_feature (556)..(556): n comprises a, c, g, or t, or includes no nucleotide
gccaccactcagatggctctgtcagcctctctgcgcacctgcagcccatcccagtcacagccaagcaccatggagcgcgctatgcctgtcgtgtccaccacccaaccttgcccaccttggggcgcagtgcagaagtcaccctggaggtggcaggactctctgggccctccctggaggacagcgtgggcctcttcctgtctgcctttctcctcctcgggctcatcaaagcgctgggctgggtggctgcctccagatctacttcaaaagatccaaaggagaagaaagcacagtgaggccactcaccaccatcctggggaagctgccaccatctctggcctgagctactggagtagctcccccaaattgtacaccatcatcttgctccctccaatctctctccacagaatggctggaatgctttttcagaggatacaaatctgtagcatttcctttcttagagtgctaaggcagtgcagtggttctcaaattctttaagtctcaggactgcttaaaaagcgtcaaggacgctaaagagctttcggttatgtgggtgacnaactacagatatttatgctaccagaactta

SEQ ID NO: 11541 - DNA, 609 bp, Canis familiaris
gttggtgctgttgtgaaggcgcgggataagtaccggcatccggagtgcttcgtgtgtgctgattgcaacctcgacctcaaccaaagggctacttcttcgtggagggggagctgtactgcgaaactcatgcaagagctcgcacgaggcccccagagggctacgacacagttactctttatcccaaagcttaatgaagccttacacacccctgagcacgcgcacactcacatgcacgtacacaggaacacatcgatggctttggccagacgtagagccatctgttgactcccaatctaatacccaggcttttagacctttatcttattgttactggaagaaaagggactgcgagaccaatgcctgctataaatgtatgtggaaacattcatttagctatgttttttttacagctctttttctctctggggctagcaataacttaatgacatttaaagcaatatttttttttgtatgtcatactccaccatttatatttatgctatgacatcgagatatttgggggagtctcatgatctttccttaacaagctgattttgcgaatgtagtaaatacccaatgacaatcttatattctaacccaaaataaaaa

SEQ ID NO: 11542 - DNA, 567 bp, Canis familiaris
ggcctgccgcggggtctcagctcctctgggccactcgtagagccagcatcagctgatggtgtcaggcccttggctgcacggagctgccgggtttggggttggaccacggggctcgccgggagttttgctatctctctcaaacactcccaggcatctgctgtgcttcggggtccaggtcccgtgcgaggcacctggggagctggtgaaggggcccagggctgctcctagggatctcgcagttctgctgagtggaggaacggacttttccccaagcagtgctccggacgggtggggtgcatcctttccactaaccgggtcacggaaaggccagttctatatactccattggcgtgggcttctgctttgccctgaaatagcgtggtcgttcggaatcgccttccgagacacctgagtggctcagctggtccagtgtctgacccttgatttcagcccaggtcatgatctcagggttgtgacatggagccctgtgtcctgctctgtgctggatgtggagtctgcttgggattctctctctttctgcccctccccctactggcactttgtctc

SEQ ID NO: 11543 - DNA, 587 bp, Canis familiaris
agcaggcagcacttgcggtttccaggggcagccccgtcagaaagcgatcatggctccagctgcagttgtcctagcgtctgtccgtgggcgtcctgggtgcccacacactacgggcatcatccggcattgggggccctctgggcgggctcgccggcagcctccagggtcacctctgtagccacctgcacgcaccaactaaggtctgtggcaggctggctgggggctcccgacccgaggggcggggtgctttacacatgctgaagttctgaccaaagctgaactgtgcttgtcacaaggctattttctatatttattgttgggaaaagtcactttaaagacttgtgctatttggaagccaagctattttttttgtcagtggaatgcggttttttactatgacatcataaggaacacacagattccgtggtctcctttttggtaaaaggacagactgagatttgaaggaaacttgcacagatctgtgaaacatagaccttcgctttatttttataagtatcactgccatcatgttttgtaatttggggtcttgatttcaccattgtcggtgaagaaaattttcaataaat

SEQ ID NO: 11544 - DNA, 657 bp, Canis familiaris
ccttcagcttggagattatagataatgtcccatgaagccctcgttgtttataacctggccagatccccttatatatcattgctccaaatattatcaatgaaagctagatactggaaacttaactgccatgtggatctttttcccacatgatttataatacataaagccgaatatgcacgtttaaataattgcctaccataaaaaaatattttgcctgccattttcagaattcttttttgaaggtttctgcttgatgttaactgagctattgcagatattttaatttccctatacgtaaaatttggagtaaatatatatatatattcttgacatatatgtgtgtgtgtgtgtgtatatatatatatatatatatacacatatatatgtcaaccattcagtaaagcttttgtttaattttcagaaggaatcaaataaaaccagtatccatcttctgtagttcgtagggtgttaggtcctttaacgtaaagtcaaacttcaaattccatctagctctgtgttaatcccctgttattactggtaaagcttcatttgaatatgtaaattcagtttaggctatgtaaaatttttgctaatgtcatcattctgaaaaaaataaatttacaaatacattccaaaattaaaaaaaaaaaaaaaaaa

SEQ ID NO: 11545 - DNA, 654 bp, Canis familiaris
ttttggttcctaaagcctcctaaggctgagcttcctgagtactgccgaatatctaccttattgtgcttcacctcaggaagatggaggaagaagaggatgagtcggcattaaagagaagtgagcttgttaactggtacttgaaggaaatcgaatcagaaatagattctgaagaggaacttataaataaaaagagaatcatagagaaagtcattcatcgactcacccactatgatcatgttctaattgaactcaccccagctggattgaaaggctccacagaaggaagtgagagctatgaggaagatccctacttggtagttaaccctaattacttgcttgaagattgaaatactgaaagtatctgagagactgttgcccttccctcctggcctggagtctggatgtagctctactagccagagaaatgtttctggggccagacttcaggaagatttattttgaggaataagaacccttgttgctggtcttggtttctgtaactaagaccttcgtttcacatgtataagaaaaagtccagtacttctttggtatgagaatagctttttaccattgccagctactgcttttcttcatccaaaataaaatgatgtattctgccaaaaaaaaaaaaaaaaaaaaaaaaaaaaaaaaaaa

SEQ ID NO: 11546 - DNA, 610 bp, Canis familiaris
gaggaggaggaggagactgcaaggatagcccaggagcatggcgtcccaagagaaacaagtggtgaaaagtgtcaacatggaaagtgcccagcaggaaaacgaagaacagagctctgtgcagaatgaagagggatcatgccattcgaaagggagtgaaggccagaagaatggaagaaatgttaagctggggcgaatgagacgacttgtccctaattttcgatgggccatacctaacaagaatattgatcacaatgaaatgggagatgatgtggaaaagttcgtagggcaaatgatggagatcaggagaaagactaaagagcagccaatgaggcatcataagcgcttccaaactcctgaacctgataatcattatgacttttgccttataccgtgaatcttaaggttttccctgaggttaataatgtggcctctgctccacagcttgtagttttgtgatttactttttctgtaaacatttggtgtttccagttaccagtttgtaattaaatattgttttgtctctgtaaaactttctgtccagcagggcaatttcacccagttttagaaaaaactattcttttcataattgaaattaataaagccgttgaaa

SEQ ID NO: 11547 - DNA, 631 bp, Canis familiaris
gtccggccgagcctgggtctgatcatgcactgggggctctggagggctaagtggcccagctcagcgcctccacatgggccatggagccttcctgcagcatgtggtgctggcagcctgtgccctcctctgcatcctcagcatcatgcttctgccggagaccaagcgcaagctcctgcccgaggtgctccgggatggggagctgtgccgccggccttccctgctgcggcagccaccccccattcgctgtgaccatgtcccactgcttgccacccccaaccctgccctctgagtggcctctgagcaccctggcaggaggctggctcatactgaaaggtggcataaggccctggcaaacagattgggaggactggtgaggaaggcagggctgcccaggagactgagaggcacctcacgccagccatcaaggagggctcagagggctgtccccacccccatctcctccctgctgctttgtgttcacttccttggcaagagtcaggggacacgggagcgagctccaccagtgtaatcactaggtctgggcatcatcctgcgccccaagacatcctcccagacctcattctttcttgctctatcattctgtttcaataaagacattttgaataaatga

SEQ ID NO: 11548 - DNA, 636 bp, Canis familiaris
gacagtagtatgagtgtggtatgcttgatcacagatggatttagttataagcatcgatgtgacccttgcaggacactacatgtgggacatgtttgtttcttccatatttggaagataaatttatgtgtagaccgttttttttgtaagataccgttaataactaaaatttattgaaaatggtcttgccatgacttgtatcccgatgcttaaagaaagcattgctgctaccaatatttctatttttagaaagggtttttatggacccatgcccccgttgtcggtccaagcctggtattttcattgtttaaaatgtcacctgtaaaatgggcattatttatgtttttttttttttttttgcattcctgataagtgtatgtattgtataaagaaagtctgtacacttgggttataacactagtatatttaaacttacaggcttatttgtaatgtaaaccacacattttaatgtactgtaattaacactggttataatatgtaccattcttcccgccccttccaccccaccacacaacttttcttgtgtgtgataaacccactttggtttgccaataaaaccttgaaaaatatttaaaaaaaaaaaaaaaaaaaaaaaaaaaaaaaaaaaaaaaaaaaaaa

SEQ ID NO: 11549 - DNA, 617 bp, Canis familiaris
gatgcctctaactaccttgcccgactccagctggcatctgcgcttccagagtgagacatgggcctgaagagttttccgctgacctcagccactctagccactgctctctgggggtggggcggtcacaccatcacctcccgacttgtcccctgtgcaaccttgcactccagtcagcctggggtcctctactcagccctgacacaccactgcccattcaccacccgaccctgcccctgtccagggttccagcctacctctcgcctttcccactggccccaacttgggtcctggtcagggtagtccctgggttccccccctgcacaggacagtggctgagaaaggacccgggagcctggggagccttaggaggtgggacgggtcttgaggagtgccacacgccaccgctctttgccttaggagaccgcaggttcccagtcaccctgtgccacatctgtgtgccctgccacaaagtgcatggcttgggctcaggctggaggtcagcaaggaccagagccccagggggaggaggcccccagccagcacaggctctccctgcctccatcttggaaagcctcaagtaataaattgtgggctctgaaaaaaaaaaaaaaaaaaaa

SEQ ID NO: 11550 - DNA, 548 bp, Canis familiaris
  misc_feature (63)..(63): n comprises a, c, g, or t, or includes no nucleotide
tttgtcttttaacttcagtatctggttcaaaggttgcccaccagtagaatactactttacccnatatacctaagcaaagggtaccatgtgtgcaagcagaccaataatgttcccagtcctttctgttcatgctgctttcttaattcttttctccatgtcatcaagaggttggagaacttcttcctaaggtcagacttagacgtgatggcatctaaatgttttcaacccagacctcacagaattgccattgagcaagtagcatgatcctaaaggaattgctggcatcaggcagccagatggctgtggtctctgaagagccagtctttgcgtttctccatccccagcactcaccctcacccacagatggggagtggtctggattgacaaaagataaactggtgaagtgagctaaaggctgagacactgagcatctattgtcgtgtttaagcttagctgggtcctttcgagtttgttttacagcttactaggttaagtagtttgcactatttttgcaataaattcatggaaaacctaaaaaaaaaaaaaaa

SEQ ID NO: 11551 - DNA, 671 bp, Canis familiaris
ttgttactgactgtacagtatgaaggtgaaatgtttagtagttgacttttgtcccccttaagttaaagtggaaatgccatttcagcacccataacccctaaatcatgctctagggtagcacttctcttgaggttgtggatactcccttcttagcttaatttatggcccgtttttattttttatttttttaaagaaccgccccagtcgtttcttgtttgttttcttacacggcgtgttaatttttgttttcatggctttgtaaccccccagtgttgtctaggtgacccatcaccatctttaaggctgacagatttggaccatcttcaaatcccatgttttttttgtacaccccagaagttaaagtggtctgagtctagttggcatgccacggttgctaattagtattgacgtcgtcccagaaccacctgtatgtaggtggtaattcagagactgtcctttgccaaggagatgaccagcatttcaaccgtatgtcttcctggaagggcagattctgctatatcttccttgtctgcatccaaagactcccgaggaatgtggacacatttcatatcccccttgtagagccaagcttcaagtgacccgtcagccctgagaaaaaaaaataaattgtttttttaaaaaaaaaaaaaaaaaaaaaaaaaaaaaaaaaa

SEQ ID NO: 11552 - DNA, 634 bp, Canis familiaris
aatgggagtttgtttgcacccaatcaacggactttccaatgttcgtacaactccgccccatgacgcaaatgggcgtaggcgtgtacggtgggaggtctatataagcagagctcgtttagtgaaccgtcagatcgcctggagacgccatccacgctgttttgacctccatagaagacaccgggaccgatccagcctccggactctagcctagccgcgggacggataaccatttcacacaggaaacagctatgaccaattaggcctatttaggtgacactatagaaccagtttgtaccaaaaaagcaggctggtaccggtccggaattcccgggatcccctggcagggctcggactcggcctgcctcggcgtcccctgagaggcctgaattctgctcgcagcttcattaccactgggctggaaacatccttgggttgagtgttttgtttgggagttatttcacgagggccttttaaacagtagtgtcccaatgaagtactagatattatttatgtaagaatgagcttttttttttttttaaacaatatcctttcaaaatttctaactactttgtaactgcatgacttaacctggtgataaaagcagttattaaaagtctaccttttccaagcttaa

SEQ ID NO: 11553 - DNA, 622 bp, Canis familiaris
  misc_feature (19)..(19): n comprises a, c, g, or t, or includes no nucleotide
ggaagataagtgcttcccnaaccgagtattggaagtggttcaatctggattcagcccggttccgttacctaatgggggaaaggttgggagttcacccgttaagctgtcatgggtgggtccttggagagcatggagactccagtgtgcctgtatggagtggagtaaatgttgctggtgtctctctgaagaatctgcaccctgacctaggcactgatgcagataaggaaccgtggaaacaaggttcaccaacacggtggttgaccgtgcctatgaggtgatccaactaaaaggctacaccttcctgggcccttggactctctgtggcagatttggcagaaagtataatgaagaatcttaggcgggtgcatcccatttccaccatgattaagggtctctatggaataaaagatgatgtcttccttagtgttccttgcatcttgggacagaatggaatctctgatgttgtgaaggtgactctgactcctgaggaagaggcccgtttaaagaagagtgcagatacactttgggggatcccaaaggagctgcagttttaaaattttctaatgtaccatgtcactgtctagactacacaagattttaattggaaaaaaaaaaaaaaaaa

SEQ ID NO: 11554 - DNA, 504 bp, Canis familiaris
  misc_feature (1)..(1): n comprises a, c, g, or t, or includes no nucleotide
nactctcactgtgctgatgtccatgtgtgggattttgagacatgttttggacggtcagggtgtctgttccactctgtccgggcctccctggagactgcctgtgcccctgtgtggggatggggctggaccgggctggacgggtccctcccacctggtgtccggtgttgccgtgactgagcaatgggtctcacattgtcttgcttaacatggcagactttggatctctgtctcgggggcccttctgccgtctggaggccgctgcgtcctgcctcagcccggcttcgcgcccgcgcagcaccccttcccccccagctgggctccccggtgctctgactcccagggtagcctgaggcctgccccaggcagaaccagaaccctccatttccaggctgggaaacggccgagggtgcttgagccgaaccacgtgcaggccgttcttcagccatttctaccacgatagcagaattgaacaccttggccaaataaagttgaaattttaaaaaa

SEQ ID NO: 11555 - DNA, 523 bp, Canis familiaris
gtacccacagccccatgtccatggtacctggaagagaaggggtttcagtgtgaggccagcagccccctccctgggggaggccttgcatttgaggtggcagccaaaaggagagcccctgagagctgccccatcaggggtctgccgtccctgtgggctgagcatggggcaagcgtgggcaagtggcaaggggaacaagccgagatcatgaatagctcagggcagtgggcagagtggccagcgcaggcgttttggggggctctggcccggaagcctcagctccttaccctagggctggccaggagctcagccaggggccggagttcctggctctgctgcccccttcctcagcactagcctggctttccaggctgttcttggaggagagtgagcttcctgcctccttcctctaagacagtctgggacacctggggcggggtggggtgacccccatgcccagtccatggcagagactgagactaaagcatcacttaataaagacccctcgaagccccaaaaaaaaata

SEQ ID NO: 11556 - DNA, 574 bp, Canis familiaris
atatcctacagcaccccggggccgtgttaactccctccatggagcacaccatgtcactacagcctgcatctatgatcagccctctggcccagcagatgagtcatctgtcactaggcagcaccggaacatacatgcctgcgacatcagctatgcaaggagcttatttgccgcagtacacacatgtacagacaacggcagttcccgttgaggaagcaagtggtcagcagcaggtggctgtcgagacgtctaatgaccattcaccatatacctttcaacctaataagtaactgtgagatgtacagaagggtgttcttacatgaagaagggtgtgaaggctgaaccatcatggatttttctgatccattgtgctttaggaaattattgacagttttgcaccaggttcttgaaaacgttatttataatgaaatcaactaaaactatttttgctataagttctataaggtgcataaaacccttaaattcatctagtagctgttccccccgaacaggtttattttagtaaaaaaaaaacaaaaaaacaaaaaacaaaaacaaacagatttttatcaatatt

SEQ ID NO: 11557 - DNA, 595 bp, Canis familiaris
ataacttgtaggccactttgttaattgatattgagtcacatgaatgaaatgatgaattcttgagaattgaactttggtttcctacccgaatggaaggagaggctcacttgatggtgtgtacaaactcacttgaaagagattttttttagaccgattttcactgacctgtttccaacccactccatcacctcttttacccccaaagtagtctgcacgggcgtgatagctgtttcttttgtgcccttttggggtggagaaggtggatgtgattaagcccataattcaaggacttaattccctctcatgttgtggttttctacccttgcaccagagtatgaaatagcttctaagagtcccagctctaagctgggaagagtctctgtgactgtaatcaccgttgtgaccacacctcggaataaaaattggacttgttatattctcactactcagtttattttttagcagtttaatgggtacattttagagtcttcccttttgtgtggaattagatcatccccttcaaatgctgtaattaacatcacttaaagtaaacttgaataaaatattgaaacctccaaaaaaaaaaaaaaaaaaa

SEQ ID NO: 11558 - DNA, 640 bp, Canis familiaris
  misc_feature (336)..(336): n comprises a, c, g, or t, or includes no nucleotide
tggctgagtgacggctccgtgccgtaccccatcaccaagccccgagagcccgtgcgggggcccgaacccggtgcccggcgtccggaactacgggttttgggataaagaccagagctcgattcgatgttttctgttttacatctaacttcaatggccggttttactaccttatccaccccaccacagctgacctatgatgaagccgtgcaggcttgtctcaacgatggtgctcagatcgcccaagtgggcccgatattcgctgcctggaaactttctgggatatgaccgcctgccgatgccgggcctggttggcaacgatggcacgcgtccgctacncccactcttctaggcccagaaggcgcctgcagtcctacccgaggctgcacgtgcgccttcgtgggtttcccagataaaaagcactaagctgtatggtgtctactgcttcacgagcatataactgagcgtgcccctagagcacatcacgttttaaagtcacttaagaacatgtgaaaggttgttgtttttttttttccatatgaactcatgccagttacccaaactgtgataacccttttttacttactgtaaagagtcattttcataaagacccattcattgaaaaaaaaaaaaaaaaaaaaaa

SEQ ID NO: 11559 - DNA, 627 bp, Canis familiaris
tatttcagtggaagaagtccatgatgatggaacgccacacctccaaaacatttgagcatgtgaccagtgagattggagcggaggaagccgaggaagttggagtcgagcacttgttacgagacatcaagacactacggtgggcactctttcacagaggattaccaaccaggtccatggtttgaagggactaaactccaagcttctggacatcaggagctacctggagaaagtggccacgggcaagctgcccatcaaccatcagatcatctaccagctacaggatgtcttcaacctgctgccggacgtcagcctccaggagtttgtcaaggccttttacctgaagacccatgaccacgatggtagtggtgtacttggcctcactgatccgttctgtggtcgccctgcacaacctcatcaacaacaaaatcgcccaccgtgatgcagagaagaaagaagggcaggaaaaagaagagagcacaaaaggatagaaaagatgaccaagagaaggagaaggagaaggaaaagggtgacagccagaaagaagagaaaaaggagaaaaaataaaacctgtagctttttaatttgtaaattacaaatcttataaacgaaaaaaaaaaaaaaaaaaaa

SEQ ID NO: 11560 - DNA, 622 bp, Canis familiaris
agtctggagggaattctctcgcttttcttggcccttggcagctgtccagcccagcggaagggctatgtgtcagagagggaagccgggctgtgaagagccgtgttgcttctgtggcatgggcagagggttagaaaagtgctcctaaaattgcacctggtaactgtcgcataaccagaggagtaccatgatcctgccccaccatccccaaaataaaaattgactcacacttgtccccacccttgcccccctccacacacttgggcgctaagagaggtcagtgtcatcctcccctcctttgatgggactttgcaaccctggagaggagctgctgccccttcagtcccaagagggtctctgaaggcttcctaccctgcagcctccagcggaggcccctctgtggtgcaggggcacccggggttgtgtgggaggcggtgcagcaccagtgggcatggcaggagacgtggactctgcccctctgctctgctctggatcctggtttaaacaagttgtgttttcaagttgtgtgtcttgggcccttatctctgtgagtcttctctgtcaattcctgtaataaagctttctaattataattagggccaaaaaaaaaaaaaaaaaaaaaaaa

SEQ ID NO: 11561 - DNA, 565 bp, Canis familiaris
  misc_feature (395)..(395): n comprises a, c, g, or t, or includes no nucleotide
gaaaagtcaatattgtgagaattgaagcgatctcagtaaaaagcactttggaaactgtgaatgctaataagcttgtaccaatattttccaatacctcaacgctataatgaaagggttgccatttggttaggactggaaatactgtttgttgtctcctatgaggttttaaatcctggtgtctctaatttcttctgtttgaaaactttttaccaaatctaagcctggattctagaccatgtgagatctgcctaagcctcaagtctctgttaaagttgcttgcctgctgttaaataagacatgagattaacttattctgacttgctccagtgtcacggggaactgcttggagcagatggtaacgcctgtgttcagattcagtgatgtggaaaggctanctgtgcacggagggcagagcaactcagaagtcacggcgtttcttccacttaacgtttgttctctttcggtttgcagtgtgttttactcaagtagccagaaacctccccaaatttctgaacttgtttaaagtgtaaccaataaatagaatgaatgaaaaaaaaaaaaaaaa

SEQ ID NO: 11562 - DNA, 726 bp, Canis familiaris
ctaatgaggaattctgggcccttgcggattgtacaccttgtgcacgttgtacgttctggatgctcgcaaccgaatgtcatctccgagcctgatggattccctggtttttctttgtcaaacaacggtcattccgacaccaccagtgcccaccatgggtcagctataccaggtaccccccgtagagacttctttctatacatcgcctaccgtgtatgaagcgtctacggtctgtgaagcttctgcccctgacgtgggggggggtccggttctaccaagaccgatggtggcccccctcctcgacctactccttctttgggctcatccctcacctccctttgttgggacctgcacttcctaatgtttgaggctctcctccagcccttttcagcaccggacgggctcatgggggaggtggcttcttggacctctcctttttccccttccttttcgacctttccccctctgctctagacttcttgattgtccgtctctgtcacatccggtgattgttttggtttctgttccctaactgccccaggggctccagaacccccaccattcccttcctctccattacccttcatttttgggggtagagggaagggactgaaattgttggggggaaggccggaggcacatccataaagaggaaaccccccagctgaactggaaaaaaaaaaaaaaaaaaaaaaaaaaaaaaaaaaaaaaaaaaaaaaaaacaaaaaa

SEQ ID NO: 11563 - DNA, 551 bp, Canis familiaris
  misc_feature (479)..(479): n comprises a, c, g, or t, or includes no nucleotide
  misc_feature (494)..(494): n comprises a, c, g, or t, or includes no nucleotide
  misc_feature (503)..(504): n comprises a, c, g, or t, or includes no nucleotide
  misc_feature (511)..(511): n comprises a, c, g, or t, or includes no nucleotide
ttgaatgaccccatttagagccatgaaaaataatttactgtagtgtatgctgcatttacagatacacttgtcatcaattccatgccttctttggtttcctatatctttttaatcaagtccagaaactttgttcatcaatcattcattcttaaggtctgagagttagattttatagtagttatgactattctgttttcttcttatagaaaatagcatgttagtcttggaaattgataggttggaactaattaagggcttcattcctggttgtgtcatagctagatagttttggatctaggttaataacactttatttataaagcacctcttaatgtcctgtgaacacaagttattttaaatgtgttaatacctgtgcctttgatttgttagctttaaagttagtttaaaacttttacactgccagtattccggatttggtgaaattaatacttttgtaaagggtccaagtaaaaccaatntttttctaaacccgngtgtatctnngaaattntgtaataaaatcaacctcatatttttaaaattcccaaaaa

SEQ ID NO: 11564 - DNA, 559 bp, Canis familiaris
acgggcgtgtctcggtttctagacagtgaattggtgcctggaggtacgacatgagggaatgacgtgcggcctggttcggggcacatgtctggcctacacgcacctcctcatggagtgcggcccccgcgcacctggcgctctacagggacacgcaccgtgtcctggccagcgtcccaggcaccacgggtgtgagtcttgaacctcagcaggctgccccccctcgacgtcaacctgcagacaaggctggtgctcctggagagaccccgtgggccgtcctgaggcctcagggctcctcggtgtcctggcagatgggatccgcatggcgggacggtgggacccagggcacaggccccgctcctctgcagccccgacctcgtggctgccccccgtccccaggagcgcaccccaccacggaggtccgtgagtccaccacggaggactctgcgggcgcaggtgcacctggtccgtcgcacatggggctccggggatcccgaggggctgcgaataaatctgtgtttccttagtgaaaaaaaaaaaaaaaaaaaaaaaaaaaaaaata

SEQ ID NO: 11565 - DNA, 614 bp, Canis familiaris
ggaagccagggcgtttgtccgcaagttcaaagtctcctatagcctaaatggcagagactgggaatacatccaggaccccaggacccagcagccgaagctgtttgaagggaacatgcactatgacaccctgacatccgaagattcgaccctgttccggcgcagtacgtgcgggtgtaccccgagaggtggtctccagcagggattgggatgcggctggaggtgctgggctgtgactggacagactcgaagcccaccgtagagacactgggacccactgtgaagagcgaagagaccaccaccccgtatcccatcgatgaggaggccacggagtgtggggagaactgcagctttgaagatgacaaagatttgcagctcccttcaggattcaattgcaactttgatttgccctgaggagccctgtggttggatgtatgaccatgccaagtggctcagaagcacctggaccagcagctccagccccaacgaccggacgtttccagacgacaggaatttcttgcggctgcagagcgatggccggagggagggccagtacgcgcggctcatcagccctccggtgcacctgccgcgaagccccgtgtgcatggaattccagt

SEQ ID NO: 11566 - DNA, 178 bp, Canis familiaris
gattttagggtacctgggtggctcagtggtttagcgtctgccttcagctcagggcatgatcccagggtcctgggatcaagtccctgcatcaggctccccacaggaagcctgcttctccctctgcctttgtttctgcttctgtctcatgaataaataaaaatctttaaaaaaaaaaaaa

SEQ ID NO: 11567 - DNA, 579 bp, Canis familiaris
aagagttagcgcagtcaaggctgatttgggcaaatcgttgttgactaatcctgtgtgcacagaagtaggagcacaataattgcccttagccgaagagttgagaaacattggcgtttaattggttgggttcaaattaagaagaggagtgacaatcaagccacacagtagatgatgatctgaagaattccagggaaatcacacatttggatggagttggaatttctcattacaacctaggggtatattttcaaagcaatactgggaaattaatttcacagctcattaccttagtggtagctgtaaggttattctcattttttggtgatgaaaatttaacctctagtgctaaaatagtggtctacaataaatgtaaaaattggcataatgttagattcaatctacattttagcagaaattaatcattcccaaataatgtctaatttatacatcagtacaggtttgaaatgaaactatttgctagaaccagcctgttctgtagcacacgtatcaaacctatttcaaataaagattttcttcttactttgaaaaaaaaaaaaaaaaaaaaaaaaaaaaaaaaaa

SEQ ID NO: 11568 - DNA, 576 bp, Canis familiaris
gtgactgtgaacacctgggaaagcaaatcatagtgcaaaatacatttaaagtgtgttcaagaatatgttctgaattggtaaataacaagcatgtgaatttttttatagtctgcattccaaattttgcagtaccttattctgtgttatatacctaaaaaattgtaaaggtggtgtcactgtataaaataaaaagggcaaggacaaatccaacttaattactaaaatgcaattcttgacattctgtatgattagaatccatacccctcccccccccttttttttaggtctcctaatagttaggccaggggctggagtagggagggaaattaggtacgataggtgcaaagaaagaattagtttggaacttttgagatgatccctaacatactgtagtagtactacttgcttttacaatgtgttagcagaaccgaatgagttataaacgtagaatgatgtgctttctgccaagtggtaattcaccttggtttgctatgttaaaactgtaaatacaacagaacattaataaacgtctcttgtgtagcaacttttgctgtaaaaaaaaaaaaaaaaaaaaaa

SEQ ID NO: 11569 - DNA, 614 bp, Canis familiaris
ttagtcgcattaaggttaaactcactgataatgattttgcaagcaagaggctatctcctgagtcttaaattacctagcaacgcagagggcaaatgtggagatttaagaggaaacaagttagggtatgagttaaggcctttacccatctgtaacttatgcattgccttacttgtcaccatttagatttccagagaagtggcataattcctcttcgaaataaagtagaaaaatctaaggttaacaatctgagagaaagatgatcaagtacccttttatccttggtaataacaaggtaaacagagaaaatgaaaaatgttagaatttttaaagaacagtatgtattagaaaaccttctttataactgttttgttttactgtaatctattccatcaaatgcaacattggtccaggtgctgccccttgcttgggaagaagcgctgaggctctaaatgtctgcagagccctctgcacctgaagtgaactgagaatgaatttcctggtactgtaatgaaaataaggtctgctcaacacaataaacttttccttgtctttttcaaaaaaaaaaaaaaaaaaaaaaaaaaaaaaaaaaaaaaaaaaaaaaaaaaaaaaaaaaa

SEQ ID NO: 11570 - DNA, 629 bp, Canis familiaris
agaatctgacttcggttcatgtcggtacaggaacaatagatgactttatttggtttaaatgttaaaaatatatacaaatatatttgtctgtaagaatttatggttttaaacagctgctgtaggggtacctttaaaaaggaaaaaagtcttccagtggagtatatttttgtaaagcacaaaattggtgccaagtctgggtgaggaatgtaaattacccccttattattttgaggtttttttccaggggggaggaaggggaggaaaccttacctataagactcttaaagacattttctcactcctgtttcagggtgggtcatgttctcatgaatgttgcacacgagagagttttacttacacagatcccagccttaccgccttgacccagtccgtgctcccacggacgctggatgaattgtgggctcttggtcatctctatgcacctctgtccccggtttcccaaacctcagccccacccttctttcctctcagctcagaaccttgtgacctgtacagttttgaaacacccgttctattttatgatggttaataatagtcagtaacctaataaaggaaagtttattaaaatacaaaaaaaaaaaaaaaaaaaaaaaaaaaaaaaaaaaaaa

SEQ ID NO: 11571 - DNA, 642 bp, Canis familiaris
  misc_feature (420)..(420): n comprises a, c, g, or t, or includes no nucleotide
agtgtccatcagtgggcatgggagcctcaactccatcagccccactcgtccctgaagaatcggctggacagtccacagatccggaagacagtgacagcaggaaggtcaaagagcttcaataaccatcggcctgtggatcccgaggtcattgcacaggatattgaggcaactatgaactctgccctgaatgagctgcgtgagctagagcggcagagcagtgtcaagcacacccccgatgtggttctggacaccttggagcccctcaagacctccccagtggtggcccccacatcggagccctccagccccctgcacacccagctcctcaaggaccccgagcccgccttccagcgcagtgccagtactgcaggggacatcgcctgcgccttccggcctgtcaagtctgtcaagatggccgcnccctgttaagccgccagctacacgacccaagcccaccgtcttccccaaaacaaatgccactagccctggtgtcaactcctcatcttccccacagtccactgacaagtcttgtactgtctgaaggatataatttaattgttctagacaaggggactgaagggactgactgttattaaaaaaaatcttcctatttaaaaaaaaaaaaaaaaaaaaaaaaaaaaa

SEQ ID NO: 11572 - DNA, 604 bp, Canis familiaris
tcccacgtcggtcctgtgatgcgtcagagctcatctgtggccatagtctagaatcagtgtttgtgtttttgtaccggcacgtatccgagcactttagcaaagtggacattaagttcctgtcctgttgtgaagagaacattcctgggccctcgtgccgggtgatttcaccgccacgcgcccctgtccgcgggctccagtctgaccctccgagacgccacgattccccagacgattgcgagtccgaggaatttctgcttggccatgtggcaggaatgggggcgtcccactcggggccccgcagcgcggccgtgttgacccatctctcgcccgtgcgaggtcactcctgagtagagcccaattttatttgtctggttggtgtgttgagcagataatcctatttctgtggaacctgtgcacgtctttaattgtgaccataatcttagtccacccgacaattatttttacgatgattgcagcatttccttgccgcggggtctttcagaaccgccttagaacttaagatctgatttcagcaataaaaacgtcgaagatgaaaaaaaaaaaaaaaaaaaaaaaaaaaaaaaaaaaaaaaaaaaaaaaaaaa

SEQ ID NO: 11573 - DNA, 660 bp, Canis familiaris
ggtacacatctaacgtaaacaaaattggtctatgccatatttcttgaatggcccacatcaagaagtctatttcttagccaacccatagctactctgggagtaacacagattaaactgctgggacatggacagccacttaactggacttctttgaagccaaatggcttattgatacaactgccacatctaacctttcatcagatgcccagtaaatggggctgggctctggcactaactaatgtgatctaatttgcaacagagaggttcatgctgcaggtacaccgaagactagaaaatatcagatttctataattgtagcacacagagaaagcaattgtgaaactggtcaagaagactcaagtaattatttaggcaaatcagcccttttggctcttactcatgtttttcctaaattagccatgtaattgttttaactcttcagtgtactttgctatcaaagtctcttcacattgaatttatctccatgtgctattaagaagtggagatttctgtttacagtagctaggaactggtggtggtaaggactgaattgtgtctcaaattcccatgctgaagccctaacacctaatgtgcctttgaagaggtaactaagattaaataaaataagagaacctgaaaaaaaaaaaaaaaaaaaaaaaa

SEQ ID NO: 11574 - DNA, 589 bp, Canis familiaris
tggagcatagtaatttaggagagaacttgttgaaattttaaaacgtgtttctagattgaccttgtgttctggaaatttgcacttaatggaatttgcatttcagagattttgttattgttgtgctttgccttctttggggatgaaatgtcagaaattgaatgccacatgctttcttaatatagttccgtgcttcaaagtgtttgacagaggttgggtgttaaagatttaaagtctcttaggaatattattcatataactacatggcacaaatagtggtatttttgtgtatttcaaaatcaccttaatgtataactatgcgatgctattattgcttcagtgttatttgaaaagaatacaaattccatactccactgttgtgtagactggagtcttcatgaactggggccagtgctgggcagcaaagagctgtcaatactaaaaggaagggcttcattgaaatgatgtgttctccccaagcattatgtcatgattgctggaaattacatactctgataccattctggtagaactttaaaatgagggacaaattcaattaaaaatatgaaaaatctttaaaaaaaaaaaaaaa

SEQ ID NO: 11575 - DNA, 580 bp, Canis familiaris
  misc_feature (1)..(1): n comprises a, c, g, or t, or includes no nucleotide
ntgtgaagtcctccacaggccccggggagcaacttcggaatgcactcttggcacacaggggacacagcatcacaggtgcggcttctgtggaaggacccccgcaacgtgggttggaaggacaagacatcctaccgctggttcctgcagcatcggccccaagtgggctacatcagagtgcggttctacgagggtcctgagctggtggccgacagcaacggtggtcctggacacaaccaaagcggggtggccgcctgggggtcttttgcttctcccaagagacatcatctgggcccatttgcgctaccggtgcaatgacaccataccagaggactacgtagactcagaggcttttgcaggcctagggatgggggtggggacccattgctggaagatggcaccatcgtgggtaccctcactgcaacaaacagggagcttggcacccggctccaagaggtagctgccctagagggggctcagaaaggaccaaaataaagtgtgtgtggtgggaaaaaaaaaaaaaaaaaaaaaaaaaaaaaaaaaaaaaaaaaaaaaaaaaaaaaaaaaaaaaaaaaaaaaaaaa

SEQ ID NO: 11576 - DNA, 603 bp, Canis familiaris
tttcccatctggagatgatggtcgaagttgtgggaagcagtgctgcaggaacgagccgggcggagacgcgcttggatgtgagcccgtgttcctgtggcccgcgagctcccctgcccggcggcgggacacccgtgtgcgtgtgcgctcccttcctcggggcctccacaggcgccgcgtggggctcggcggggacccgtcacccctgtcactgcccgtgtctgtgctctagaagtaggctatgtccccaggtgtccacagtctggctcgtggccgagtcggtggcaccgtgtccctaagctaggtctagatctcaactcgtagggcacacgcgcatcaaccttgtactcctgtgaaagtggctgttcacgcatcatgtgtcatggtgtccttgctgcccgggtccctccctgtcgtgcgaaggtgggcgccccaaagccgtgcagggcctggaggcggcgatgcatgtgacgggactctgcatggatagtacagtcgtagagatgtcttccacgtaaattatgtgttggcgcatagcacatactcaataaatatttttaaagaaaaaaaaaaaaaaaaaaaaaaaaaaaaaaaaaaaaaaaaaaa

SEQ ID NO: 11577 - DNA, 565 bp, Canis familiaris
gacctgtgagcgcaggacgtcccacgcccggcccgctctgctgcccagcctgcaggcctcagtttccacggttcttaactgcggcgctccccctcgccgcccagttccgaggtttccaaggggcaggcgctgcccccaccccctgccgggtggtcttcccacccagcacagaggggtacccagcacagcggggtggcccagcacaggatgagcacggggtcccttcggcctgggggcaccgccccgtgcgccacagaaggcctggctcccactcctcccccagcccctgcagacccaggacgcccaactgcccagcactttctgccctcccagcctccctggcagccagcttcaggggagcagagacctggaggggacacccattggcccttcaggtcacagaccatgcctccttcgcgtgggcacatctcctgggccctggcccgctccccccacttcctgggccttgctggtctccccacagactgttctctcgactttgtccagttggctggcgtacaaccaaataaacctggtgggaggtgttctgtgtccaaaaaaaaaa

SEQ ID NO: 11578 - DNA, 552 bp, Canis familiaris
gctacaagtgggcatccctgacctacgccacttcctctataagtcaaaagctcaggactcttcaccaggcctgagattgaggccccgtacacgagtgaagaggagcaggagcggctgctgggcctctaccagtacctgcacagccgagctcacaatgcctcccgcccactcaagaccatcttactacacaggccccaatgagaacctcctggcctgggtaacaggtgcctttgagctctacatgtgctacagccccctggggaccaaggcatcggccgtcagtgccatccataagctgatgcgctggatccgcaaagaagaagaccgcctcttcatcctcacgcccctcacttattgatgggaaagtgtgtgggttcagccctcttagacacactgggcgatggaagccataggcacctctacatgggctggcctctcttgcccaggcggcaggcagggactgtgggttggtgtgcgcattaaagtgctttggggaagacaaaaaaaaaaaaaaaaaaaaaaaaaaaaaaaaaaaaaaaaaaaaaaaaaaaa

SEQ ID NO: 11579 - DNA, 503 bp, Canis familiaris
ctccaggtcctgagctcccggctccgcgcaacccgccaccccgggctccccgctcagcgccctgcgctccctgcacccgcgctccgctccccgtacccgctccaggcactgggctcctcgctctgcgccctgaactccccgcacccgccccccgggctcccagccccgctccccgcaccaccccccttgcacccagcggcctgcacccgcgctctgctcccggctccctgcacccgcgcccgccacctgagctccctgcaccggctccccgctccctgcacccgcgcccgccacctgagctccccgcacccgctccccgcgctccgctccccgcgcccactcccgccgccgaccatgggccgctgccccgcgcggacgagccagaccccggggcgcacacggccgcaccccgcaccccgcggccactgctcctgctgctcccgctgctgctgctgctgctccggggcgcgggcgggaccccccggagcccgcgccgcccgctc

SEQ ID NO: 11580 - DNA, 683 bp, Canis familiaris
  misc_feature (1)..(1): n comprises a, c, g, or t, or includes no nucleotide
ntcgccagggaccgcacgtaaaccatggctgtctcaagccatgggccactgcagcacgtgactgtttttacttacatcactcaaaagctgaagcaatgacattctcccgcgttgctgggtcagctgttcatttgttcaccggctcctgggctggatgtgtgaaaggcatcacttttatattttcctcagggtaaatgttttatgtgttcgcctactgatgtgccatttgttgcttctattgtaaatatttgtcatttgtatttattatctcagtgttttcccctgaggcatcaaattgcttacaatgttcatttgaaccccttcgctgatctctgttgtatatttttcataccactagtgtgttgcttaacaaaagtcaggtagatctcatttcattctggttcttcatgttttgaagtatacaatagtatttattgctaaggttctttggctcaaaacggagtacagtccaaattcctgtaagagtcgacagaggcgggatccctgggtggcacagcggtttggcgcctgcctttggcccagggcgcgatcctggagacccaggatcgaatcccacatcaggctcccggtgcatggagcctgcttctccctctgcctgtgtctctgcctctctctctctctctctgtgactatcataaaaaaataaaaattaaaaaaaaaaa

SEQ ID NO: 11581 - DNA, 717 bp, Canis familiaris
tcataaatagaccaagagttcagaatcaagactcttccagactgataggacaaagagcagtggccaaaaatagcaagtcacagaagagtgtgcccccactctgaaactgctggaaatgcggccttgtagaaataaaagtacttctatcttgtaacattttacacgaaaatgccaccgcagtgttgttcttagtggccccaaaaccagagaaccaaatgaactaccattgtaaagaataattcaggtctatgctagatcagttgaggatatttccatgaggaattgagtgataaaatcaagatgcagccaaatgttcattacaggtttatatattctattgacgtttttaaagaactaacttctggctttgttaattttacctattaacttagcttctctgtttcattaacttcagttccttatcttaattctacttacctctacttatctactgtactttgatctttttttctagcatctttttctttttctttatttttattttattttttttctagcatcttaagatggaatcttaggtcactgattttcttctttaaagttataaatgttcctccttgtactgctttagctgcatccctcaaattttgatgtttttttcattatcattcagtaaaactttttttttcattcagcaaaacttatttttaataaatttgaggaaaaaaaaaaaaaaaaaaaaaaaaaaaaaaaaaa

SEQ ID NO: 11582 - DNA, 631 bp, Canis familiaris
agagtgaggcaaaggagatgagtagtaggtatttctgctttttattttctgaggaaggcagaaggaagaaggtattttatttggtttaataccctgaaaagaagtgatgacttgttgcttttcaaaacaggagtgcattttcccccttgtctttgttgtaagagaccaaagaggaaacaaaagtgtctcccctgtggaaaggcataactgtgaagacagcaacttttataggcaaagtagcacaagtcagaggttttcctttggatgttaatttggctgagataaacattcctttttaaggaaaagtaaacggcaccgtgcttcccacgtataccccagtcagtcagaggttctgacttggctaaaggaaatgcagggggttttgttgtgtttgttttaaataaatttaactcagaacacacaatcctatctacaggctctgttcagatgttcagggaaatctctccctttattattatttttttcttcctataaacctgcctttaggttttctattttcttctgatttgaatccttcaagataaaaggaaaagcataatgccctcagcctccataataaagaagttaaatttttttaaaaagtaaaaaaaaaaaaaaaaaaaaaaaaaaa

SEQ ID NO: 11583 - DNA, 572 bp, Canis familiaris
ggacacggccggtcacctactcccactctccggccctggccttccccctcctctgctccacctaacaaaccaagagtgactcttccaagatgcccttacagcctggaggctcggggggcttggggtgctcagggggctcaggggcctggcctccgtagtgttctcaatgccacccacccaagaagggctgtacacggtggtggagtcaggcccgggccgcacgctccccgtggtgcttcagcggagctgcccccgccctgccggccagatctggagcccaggatggcagcgtccgcgtgccctctccgagcagcagcagcccggaagccgccggccgcagggtctctggttgccctgttccactcggtcacccccacccccaagaagtccagccaacaccagagatcatgccttgagttcaaatgtgcagtgtttctaaatggaagagaaatgtcacatagaaagtattacaaaaaaggattaagtttgtcagctgtccaaacactagtaagaccacatgctttgtacagcgcagcgggccgagcccctggcacacggcggggggcccgggc

SEQ ID NO: 11584 - DNA, 582 bp, Canis familiaris
cgccccactggaacataggatgggcccgatgcaggaatttggtgtggacatcggggcctgttctgcttccttggtataaatatcccgtatccctcccttactgactcccatccacttgcccatccacgaggactccacagtactttgccagtcccagtcactctagggctctgcactgaatggctgacctgacctgatagtccattcatcccacccgctcacagtgtggacttttctcccctctttctaagagacctgaactgggcagactgcaaaataaaatctcggtgttctatttatttattgtcttcctgtaagacctttgggtcgaggcagaggcaggaaactaactggtgtgagtcaaacgccccctgagtgactgtccccagcccaggcaagaagatctcccttcaggtgccgggcgcaggaactgcgtgtgtcctacacaatggtgctattctgtgtcaaacacctctgtattttttaaaacatcaattgatattaaaaaccaaaaaaattattggaaagtaccaaaaaaaaaaaaaaaaaaaaaaaaaaaaaaaaaaaaaaaaaaaaaaaaaa

SEQ ID NO: 11585 - DNA, 578 bp, Canis familiaris
cactcttcgcctgtcaaagccagatgttgttgacatttcctcactgttcagaacacctacagttgtaggtttctgggctccaaacccatcccgtttctattgttttcttcacaagaaagctaatctgtggtgggacggcagggcgaggaggaagagctgtggtttataacctgttcaactcaggcaatagtgattttagctttatttaaggtcttaggttgagctttaagcactttgtaagacttggctgtaagcagcttctctgtcagaactccagagagccacgctgggttaatagccattgggtttgttcctttacctcacacaatcccagttaactgtggtggtatttagaggtgaaataggcaagtgagatgaacacctctgctgtgaatgttttagggagagaaattctaaatattttgtaactgaaagccaactacaatgttaaatatgggtatcagctttattctacactttgattcttaacatttctcagtcaacttctaccttcatgaaagttgaccatagttattcctgaataaaaagaaatcaactcttaaaaaaaaaaaaaaaaa

SEQ ID NO: 11586 - DNA, 662 bp, Canis familiaris
tgaggacgtcccacgtggtatgagcacagcacggttcaagttgccccaggatggagcctcctggccatgttcgacatccagcacttgtgccacgctctccatgcgtggttctgctcatggagtacttggcaacgccaccgccttgtggcatcttgccccacgaggccaaaatgcagcacttggagagcaagctgaccaaggagttcctggccaagttcctggaaaagagatacgccaggtctgccagtttgcgcttgcccaaactgtccatctctggaacctacgatctgaaaagcgtcctgagcaaaatgggcatcaccaaggtcttcagcgccgaggctgacctctctgggatcactgaggaagggcccttgatgctgtccaaggggctgcacaaggccgtgctgaccatcgacgagaaagggactgaaggctgcgggagccacctttctggaagccatccccatgtccatgccgcccagtgtcgacttcaacaacgcctttcctcatcatcatcgtcgacagagacaccaagagtcccctcttcatgggaaaggtggtgaaccccacccaaaagtaactgcccttgtgggtcaggtcccttccagataccattaaagagtgacccaccccaaaaaaaataaaaaaaaaaaaaaaaaggg

SEQ ID NO: 11587 - DNA, 506 bp, Canis familiaris
aggtgctggcgcccgttccgcctgggaccccgggaccctctacggccggaagcccgagggcatggatgggccccaacctcgccctgcccacttgacttcccctaacccccgcctcgaggctggacctggcgcccgggagcggaggactgtgaacttgggtggcctaaagagccagagctagctctgggcaccagctgggcaacatctcccagcccccaccccacccccaagttttaaagactgtctttcacagtgtggagttgggggggggagtggctgctctccaaagtctgccaaggcagcagtagagctggtcttctggtctccttggagaaaggctctgttgccctgattatgaactctataatagagtatatagcttttgtaccttttttgcaggaaggtgactttctgtaaccatgcaatgtatattattaaactttttataaaagttaacattttgcataataaacggtttttaaacacttgaaaaaaaaaaaaaaaaa

SEQ ID NO: 11588 - DNA, 574 bp, Canis familiaris
  misc_feature (1)..(1): n comprises a, c, g, or t, or includes no nucleotide
nccaggtacgtgcccacagtttgggctagctcatcttatggctctggggctgggtccaacggctggcagtgggaatccccgatctgattcagaagggcgtgattcagcatataagagcgaatgccacccatgagaggatcaagcccctgaggcaggacagagggacccttgataggctacgtgtcctgctttctttgcatcactcgtactcatcccgttgcttccccccaaccccttcacccataattggtactaagtagctgcatcaggcattgctggggggaaaataacagcattgctactgaatttccacaggctacacagggaggggaaaagactggggctttgggaaacctataagaccatctgtatcccttctccaggtggggcgatgtgagattccggaaggatgggggagggggtgcctgccgaaagtgggtgcatagcttttttggtttttggagataactcatccataaaagctgcttttttttggtgaaaaaaaaaaaaaaaaaaaaaaaaaaaaaaaaaaaaaaaaaaaaaaaaaaaaaaaaaaaaaaaaaaaaaaaaaaaa

SEQ ID NO: 11589 - DNA, 616 bp, Canis familiaris
atgtgcaatggatggatcattcaaaatagcaagcacagagcgtctcccactggcacctaaaaatcgtaaaatcggacccatagaggcaaagaggcgaaacacaggcagagggagaagcagacttcctgcagggagctggatgcaagactgaacttgatccggggaccccggcatcatctcgggatcaagccctgagctgagggcacacgctcaaccactgagccacccaggcctcctatatgctcatcattcttgcatagaaagtccaagcctggaaagctaatcatcaaaacttaccacctgaaaagatgatgatctctttcatgggtcatgggatcaagccccacatcaagccctgcactcaggagtagagtgaagattgaagattctctccttctacccctccctgcacttgctcattcttgccctctaaaataaaagaaaagaagaggaagttcccaccccaaccccatgtgaggacactgtgatatggctgccatctgcaagccagaaagagttctgaccagaaaccaagttggctagtaccttgatcttcaggctccagaactatgagaaataaatgttatttaagtcaccaaaaaaaaaaaaaaaaaaa

SEQ ID NO: 11590 - DNA, 649 bp, Canis familiaris
atcaatgtagaaagaaaaggcatgcttacataatctgggaatcccaggtgactcctggatgtatagtaaataggaacccaaggggtaagatgcagtcaaggtcagttgtgttaaagcctggaagtattattaattctatttcccccgtctctttcagcccactttttcacagtctcttaaatcacttgaacgcgtgctttttattccatttatagaaaacagcatgttcactgtccaggtggtttggactccaggctgggggcttcccctggctctcctggggatgttcccatgaaggactttgaaaaaccccaaagtgacagcacctccttcaggttcgagctgagaatggtcatggcagaggtgatatttgggatgttcagaaagacaaaaggaaaactacttaatggtttgaattgctttgaggatatttttaagaggtcaagttgcaggggatgggattttccagtgttttccagaagtgcttgtgaattgccagatgtggggtcttacacaatgtcggagggcctgcatcaccaagcgcttttagcctcccagagatttcttttttttatggtgcggtgccaccataggcatccagtctttggtaagagccaagcaagatttcttgaagttcaaattaaaaaaa

SEQ ID NO: 11591 - DNA, 466 bp, Canis familiaris
cggacatcaccggccccaaaggggccggagtcaagcgagggagcagaggacgctgccggtaatcaggctgacgtgacgcgtgtggtcttaacacggaaggggaagggacacagtcaatactgacacgtgccgaagtccaaccgcgctggcttctggcttgtttgacacctaaaccctgtattcgctgaaaggggaaatgaaatcctcatctcccttctgcttcaaggggcgtcaatcagaaaaacgagacagggcagcccgggtggctcagcggttagcgccgcctttggcccagagcgtgaccccggggtcccgggatcgagtcccacgtcgggctccctgcatggatcctacttctccctctgcctgtgtctctgcctctttctctctctgtgtctgtcatgaataaataaataaaacctttaaagaaaaaaaaaaaaaaaaaaaaaaaaaaaaaaaaaaaaaa

SEQ ID NO: 11592 - DNA, 590 bp, Canis familiaris
  misc_feature (1)..(1): n comprises a, c, g, or t, or includes no nucleotide
ncttctcttactcttgcttgtctctctccccctgttctggggccctgtcctcatgctgccccatctcgagggcttgggaggggtccttggatgggacttgggacccctggtagagcaggaggggaccattccagtccctgcctccagtgtcattccggcccgtggctctgggacttgggggtttcagccctgagatctgggcgttgcctccggttggcatccatcctcctgtctcccagccctagctgctctgctccctcaggagagcagcccccttgcttccccttttgggccacttccctgaggacagaaacttggaagccaaccaaaacccaagtttttggtgacttgtggctggaggggccttcgggggtagacacagagtgtcagcccctatgctgcagcctcatgccccttgcctccccacttgggcctgcccttggcctcagggtggtgcccacagctcccctgctgtagggacccaattgcagactgtgctgccattaaatagagaggccgtgaaaaaaaaaaaaaaaaaaaaaaaaaaaaaaaaaaaaaaaaaaaaaaaaaaaaaaaaaaaaaaaaaaaaa

SEQ ID NO: 11593 - DNA, 563 bp, Canis familiaris
caacccagaaccgccaaagaaaaataatgacaatcggaaaagatcagccggaaaccactgacagccaaggacaaataacgggttggcctgggctggacttctggttgcctttctcattatcactcgcgctccccgccaccgtgtcccacaagtaaatgccatgtgtgtgctgctttctctcctcctagcacttaccactttaccttccaaatgcttttggtaggtggtagacttttatgaattcttaaagctgtttccatttgtttgcttaaaaatgccacaggcaggaaacaaagctctaattcaactgcaaattccatagtaggcacgggagttccgttccctgaatagatgttcacaaagttgcatattatcaaaagaataattaaaatcatgtgatcacttaaatgtcacagttaacactgttcattcttgtgttcattcacatgacttgttattttactttgttctaagctttctataaacattgggatattgtgttaaatcacaaataatttttaataaaatcttgaatttgtatcacaaaaaaaaaaaaaaaaaaa

SEQ ID NO: 11594 - DNA, 581 bp, Canis familiaris
agatttagaaatacaatgaaatatttacatacctaacttgtgggatgcagctgaatgacacttagaaatgcgtagccttacttgcttacttagaattgagaaagggctggaaattcatgagatgaaagcatctgttctactttggtctgttgtcagcttgagctgcatttcctgagtatccttccttgtatagttctaggtcagttggcccaaagaagaacttgtgtgagcctgggagatggagtgagggaagcaggggcctttattctctacaggccttctgctgagacacagtggcaggcagaggagtgcttcctctgtgcatccagttcctcttctccttgggtggccacctccagattcttcactctggacccacagggatccagaggccatgccccgtattttcccccacgtaggtccatgtgggtgcagagtgagcctggcctctgagttctctgccctcagactcaggctggtcctcccactctggggcttcagagggaggagtgatggccgccttcacttcccccagcaccttccccactaggaagatctacttttttaaaaaaaaaaaaaaa

SEQ ID NO: 11595 - DNA, 621 bp, Canis familiaris
ggtacatagatgacaacatcggacatactctaaccaccctggagaaagtaaacagagatgatgaagaattcagagaaagcaaataaaatgcatgctattaatgggagaatgtttgggaacctacgaggcctcaggatgaatgtgggagatgaagtcaactggtatctgatgggaatgggcaatgaaatagacctgcactcggtacattttcatggccacagcttcggatacaaggggcatttataggtctgatgtctttgacattttccccgggacataccaaactgtagaaatgtttccaagaacacctggaacctggttactccactgccatgtgaccgaccacattcatgctggaatggaaactacttacacggttctatcaaatagaggtgaatatcgagttagtaattctagaagtcgtgtatcatgaatataatcaagatgtgctactttgcctaaatacttcacccagtgtgaagcaccagcttgaggcactgtaattattcctaaaactgatatgagagtggttgtgttatatacaaaagactgtaacttataaaagatgcatttcgaatttaatttcttaataaaaaacatttaaccttaaaaaaaaaaaaa

SEQ ID NO: 11596 - DNA, 527 bp, Canis familiaris
  misc_feature (268)..(269): n comprises a, c, g, or t, or includes no nucleotide
aaaggtgaagaccccattctatctccaggtcaccggacggtgggtttctcagagcttcgggagtccgaaggttccccgtggggcttcactaaggttgttggtgaagctctttgattctgacccccatcacggtgatgatcccagaagcagtctccaggaaccatcctgaatttatggagactgtggcagagaaggctcttcaggaggtatcgcccaaagcaccgagaggaatgagaatgtgaacattgcttctccaaatatgggaggnnctgagttcctttgaccccaagatgagtgctaggcccctagagagagctctgcatgtcaccaagtgaccaggccttgcctcgaggcgctcctgtctcctaacccagctttccttcctctggactccgcactgtaacgcctacgtttgctgatcatgggaagaactcctgtgtgccactaactcaataaaaccgccaaggaatctgaaaaaaaaaaaaaaaaaaaaaaaaaaaaaaaaaaaaaaaaaaaaaaaaaaaaaa

SEQ ID NO: 11597 - DNA, 659 bp, Canis familiaris
catggctagagaaactaccagaaagactagagaaaaagtgcccagagctcaccaagaacccaaatagtgcctgtttccaacagccagattgcaatcctctcactctacagggcaagtggctaaaatataagaaggatcttgcctcaatagtgcagaaaaactaaacgtttttctggtcttttctatgagagctcaaagcaagatctgaaagagcaagcagtttccaagtaacattatcacatcacagacaaagctcaaaaatactttttggggggaacaaatgtatccagtaaccagaaagaaaattttccgtgtttgacatctattcaaaagactaccaggtgaaggggacacaaagagatggaaagacattccatgatcatggattggaagaaaaaatattgttaaaatgtctatactacccaaagcaatctacacatttagtgcaatcccttttaaaataccaacagtatttttcacagagctagaacaaagaatcctgaaatttgtatggaaccacaaaagaccccaaatagccaaagcaactttaaaaaagcaaagcaaagctagagtcttcacaattctggacttcaagttatattacaaagttgtagtggtcaaaacgatgtggtactggcacaaaaaaaaaaaaaaaaaaa

SEQ ID NO: 11598 - DNA, 600 bp, Canis familiaris
tttcagaattttatggttatctcccagcagctgtttctgtagtacttgcatttatctgttgtctaaccctaatattctcacggaggcatttatattcaaagtggtgatcccttcacttagacgcatagggagagtcacaagtttgatgaagaggacagtgtagtaatttatatgctgttggaatttgtgctagcagtttgagcactagttctgtgtgcctatgaacttaatgctgcttgtcatattccactttgacttcatggagaattaatcccatctactcagccaaggctatactaatactaagttaatggtattttctgtgcagaaattgaattttgttttattagcatttagctaaggaatttttccagtaggtgctcagctactaaagaaaaaccaaaacaagacaccaaactattctcaaacattcattgttagacacactggagtttttgctggttttgtaacctactaaaatggataggctgttgaacattccacattcaaaagttttttgtagggtggtggggaagggggggtgtcttcaatgtttattttaaaataaaataagttcttgacttttaaaaaaaaaaaaaa

SEQ ID NO: 11599 - DNA, 496 bp, Canis familiaris
gtggaaggcaaccaccccctcctccctacaaaaaggaaggagcaacagcccctcctctcccccctcactagtccccgcgggttcaacagagccacgagggttgtctatgggagggggctgcgccacatttatatcaccccacgcgcgcgctctcgtgctccctctctccccgccacttcttgggcggcgtctctctcttcgtgctataggcggtacagcctggcccatccaccccctttttcccttccccccattttggtggcttttttctctcggaacagaaaagtggggagccacccccattcatccccatatttgtccctctcataacttctccccatccaggaggagctctcaggcctggggtggggccccgggtgggcacgggggcgattcaacctgtgtgctgcgaaggacgcgacttcctcttgaacagtgtgctgttgtaaacatatttgaaaactattaccaataaagttttgtttaaaaaaaaaaa

SEQ ID NO: 11600 - DNA, 652 bp, Canis familiaris
cccaatattgtttccaaaactgatttggctagttgccaagaaatatatatttgtcaagtggagcataaccaaagaattgaatggtttcttgccatctttgcatattccttgagtcacctaattatacatgtgtgtatgatggatgtgtccatttatatatcacagtgagattaaagaatgtttgggtgacatgttagttttattgagcatgagcagatatttggagaaacttttgcacaacctgtgaaaaaaagagtcatttctctaaatcttagagcaatttaggatgggcaagtataatgggttgatgttagccatctacattgtgtgactattccatgtttaaaatgaaaatcattatttctagaggattcctagcccagtgctatttgatgactgttagtatgtcataattattatacagaaagcctttactgactggttgatttaacatcagtccaaacaaagactggtttctgtacttgctctaatttactagtagtttactactggtcatcatgtgagcttgctgacttttgttttcagttgaataaatgaaaatgtcaacaaaacaaacccactgatgtctaaaaatactgtgttctacagtgtagtaaataaagggcttaatatttaaaaaaaaaaaaaaaaa

SEQ ID NO: 11601 - DNA, 641 bp, Canis familiaris
gggcgtgtacaaacaggtcccctcccccggcccagccccggcagcctccactactcgcgacgaggacgtcacgaagtacaatgacctcatcccggcagagagcagcagcctgaccgagaagccctcagaaatctccgactctcagggaagcgacagtgagtacgaggccgaccccacccaccagaaggcccactcctttgtcaaccactacatcagcgaccccacgtactacaactcgtggcggcggcagcagaagggcatctcgcgggcccaggcctacagctacacggagagcgactctggcgagccggaccacgccaccgtggccaacagcagcagcgcccagcagggcagcctcttccggccacaaggccagtcggaccccaacgccccagaaccccccgaaccccccgagccagcagagcaccctctaccgcccccccagcagcctcacccctggctcccgggctcctatagcaggattttcctcgtttgttgacgtcgtcctcgtcggaagggggagaagagagaaaaaaaacagcaccaaccgccccccacccacccctccccgcactgcctgccagaaaacaaaaacaccaagaaaccaagtcaacttttaaaaaaaaaaaaaaaaaaaaaaa

SEQ ID NO: 11602 - DNA, 379 bp, Canis familiaris
gcaagcggaccaatgagacgccggtggccaagcgtctgcggctggacccggggccccagagcctgtcggggaagtcaacccctcagccccagtcggggaagtcgacccccagcagcggagacgtgcaggtgacggaggacgcggtgcgccgctacctgacgcggaagcccatgaccaccaaggacctgctgaagaagttccagaccaagaagacggggctgagcagcgagcagaccgtgaacgtgctcgcgcagatcctcaagcggctcaaccccgagcgcaagatgatcagcgacaagatgcacttctccctcaaggagtgacgggcggcgcccacccacctgcccaataaacaggctccgtcgccagaaaaaaaaaa

SEQ ID NO: 11603 - DNA, 611 bp, Canis familiaris
ccagcaactatgtgacagacctcttccccgagctgccattcactgacgccctccgccagcagtctgcctggacacgtgggcgtgtggcctcggagggactggctgcagaccagcttcggtggggacgacctcagaggtgccagcaacatcctcttctccaacggggacctggacccctgggcagggggtgggatccggagtaacctgagcgcgacggtcctcgccattaccattccaggggggagcccatcacctggacctcagagcatctcacccagaagaccccgcatccgtcagggaggctcgcaggtttgaggccaggctcatcggcgagtgggtggaagcagccagacgtgagcagtggctgcggcggggccagcgcagaggcctcaggggctgaggggtgcccccccgcgacagagagcacttggggagcatctcagaaggttctgggggtgagcggctgtggccaagagggttgagggagcagacacggtgagcgcactgtgcacagccatacatctaataaacagagcctccaatctgaaaaaaaaaaaaaaaaaaaaaaaaaaaaaaaaaaaaaaaaaaaaaaaaaaaaaaaaaaaaaaaaa

SEQ ID NO: 11604 - DNA, 610 bp, Canis familiaris
tctctaagccctccaggtcaggggtctgtggatttgggggcctggccagggacatctgccgaaggaagttgtatcgtagggaagtgttaactttggcatttgggccatcaagattttgcagtcttaaaggagctgcagaagtgagagtgaaaagtcagaacgaccatagtgttagtaatgtgctgaccatcttgggtttgaggctaattgaggccatgaagacggctggaaaagagaggggggtgttgacagcctactcggtgtaccctacgcaacctgttttagaggaccaagccaaccacacaggtttctccgaggtccgcctccccctctcacctgttggtggaagcttcagggaagatcagagccctggaaagaggcagtagcaggaggagtcagggatatacatcaattgaacatcaatcgtgtgtcctgatttgggagtgattgagggaggaggtgggttgctaatctcatggcctgattttttttttttttctattgatatcactgttagaatcgaggggtaggggtggtgaccggaaataaagtcctcggatcttccgccaaaaaaaaaaaaaaaaaaaaaaaaaaaaaaaaaaaaaaaaaa

SEQ ID NO: 11605 - DNA, 691 bp, Canis familiaris
tactccattactattaactatcgcgaaaaatggactggggacagaagattgttgctaaatttgcataagaagagttggatggaaggtttgacacttcaagactacagtgaaccctgtaaacataatgaatcagtggtaaaagagatgttggaattagccaagaattacaataaggctgtagaagaagaagataagatgacacctgaacagctgggcaataaagaatgttggcaagcaggacccccaacgtcatttggaggaacatgtggatgtccttatgacttcaaatattgtccagtgtttagcagctatgttggatactgtcgtatttaaataaaaccatgcaaaaagctattggtgatactttcagcgtatattcctctattgttcctaatgctcaaaatcaagggacctctgaaggtgtgtttggttaaatgtaagacatctggcatcatttgcagcactgtaacacccttcagtctcagttgtgcaattacttctgtttctttagtcagggtctttgcagattccaaagttgtataagaatacatcaaagtggacaaattttgttaagatcccatttaatatttgaagaaatcagtaacacaaatatattttgattgttgcttacaaaataaaatacatttacaatctaaaaaaaaaaaaaaaaaaaaaaaaaaaaaaaaaaaaa

SEQ ID NO: 11606 - DNA, 611 bp, Canis familiaris
tgaagggggccgggggtgagtcttccaagaggtaagtgttgggtacaaaatggcccagtaagtgctttttttggcatctatttttgcgggtccatgttgagaattggggtgttaaagataatagataggctctgattgcagtaggcagtgcttctcaggtctgggtaggcaactgcccaatatggtaatgtgctggggaattccagagctcactggataaatggggcccttttcctagagggttagttttacttgaaagtgtgggggaataaataaatatgatggagcagaattcacatgaagttttagagataagcaggatatgtacaaggtctgcaatgtgctccaggctgtggcccgtgattcttgctggttatttacttacggggctcttccttgggcacttggggctcaacctggctggctgtttgcacttacagtgagatgggcggtgtggctgggagtgagaaaagccctgttaaagttaggggtggattggctttgatgggtgaacctaaaggcccaggcccttttccctcttgctgctatagggacaagtcaaaaaaaaaaaaaaaaaaaaaaaaaaaaaaaaaaaaaaaaaaaaaaaaaaa

SEQ ID NO: 11607 - DNA, 602 bp, Canis familiaris
aacctcaccaggccttgagacacaggacgagatgtggaaaaccagctccccgattcgcctgagctgttcatctgtcggactctttctttgtaaccctggggctccgggctgggctgcctgcccatgggcacatgggagtcttggcgagctgtctgctactagcaagtggctaacaggttgagcaaatctgggctcctgctgcctgtcctctggtcctcagagttcactggcctgggtccctgaaacaggaagtgcacaccaaggcacagtggccactgtgggccaactggcatcttgggcaatgggggccaggccagaggttgcactctccattgcagaggggggtaagggagggcaggtggagcctgctgggaagatgagtggagaggccccgcctcccgcccatccctttccaccggacagcatgctcagtacagagggtgaccacatactgtattgtctcaactgtgaccctccaggggaaagagggggtgccattaaaatctccacgggcaacaagtgcaaaccctgtgaatagactgtaaaaaaaaaaaaaaaaaaaaaaaaaaaaaaaaaaaaaaaaaaaaaaaaaaaaaaaaaaa

SEQ ID NO: 11608 - DNA, 706 bp, Canis familiaris
cacgggctcctcagtaggtgtgacccgtagccggcttgaagtgctcatccgtttcggggtccaccaccagcagccgggcctcgtcctcttgcgccttgatgctggcgaccacctctgcgtggcgcagcccctccacattctgcccattcacctcgatgagtctgtcctgggcgcggaggccagagtgagcggcaggcgagcctgggtccacggagcggatgtactgtcccggccgggacttgtcactgtgcaggttgaacccgtaaccttgggggccctttctcaggtggcagagccgagggcgtagctccctggggggcccaccgacatccttctggcccgcctcggagctgaggttgcttgcacgtgcccagtccggcttcggctcccaggggtcatgggtgggcggaagccctcgctgggccatctcctctgtgcaggtcagctgccgccggcggagctcctcgtccgtctctttgtccaccaccagcagccgagtctgtccttccacagccttgattctctgcaccacctggtggtgcgtctcgccctccacgttgacgccgttgacctcgaccagccggtcccccgcgcgcagcgcagccgcctcggccggcgagccgggctccacgcgccggatgaactggccgcggcggcccttctcgccgtgcaggtggaagccgtagccgtgctccccgcgcaccag

SEQ ID NO: 11609 - DNA, 547 bp, Canis familiaris
gaaggaccctcaggcactcagccgaacacttaaagaatcctgtaatagcacagaagatccagaagctgatggatgtgggtctgatgcaaatcggtgatgacttgctcatcatccccgttcccttcgccctcatgtggaaagaggagctgggaccgcggcaagccgcgcggagcagaggggagagcaagggaaagtgaacaacttctctctatatatttatatagacctatgtggaagacacaagagactcgtactcatgttactcgcaccgccgctgcctctgggccctcccagcacacgcatggtctcttccaccaccccctgggttccctgttcccttccccaacttcagtcactgtctcagctgctctcccatagttggttattttttatttggggcagtgggcatgtatggggagggggtgctgttcttccccgacctcaggtcccaattgtcctcacgttgttaactccacatgcccttctccaataaaacaagccagtcgggcgtggttataaaaaaaaaaaaaaaaaaaaaaaaaaaaaa

SEQ ID NO: 11610 - DNA, 625 bp, Canis familiaris
gtctgggctactgtctgccactgtgtggcatcgtcctcgctaggatggatcccgtaattccacgttctctgtaccacgtagatcacgggctcaatggaaatattgaatttcgaggaccacttaatctccagctgtccggactgcagttctgtaaatcgcaactccttcctgggcttcagggggacacctttgtatagcgtcttgggcacctgacaggtgtgtccacacccgttcgaacaacacttcttaaccccagagcactcgttgtcagcttcacaactttccacacaggcggcggcaaacccactggctttctccggggctgggcagtcgccctgcttcaccgacaggatgtacttgaggaactcacagctcgtcaggcattcatagttcttcttggggaagagaggctcacagaagctctggcactgctgcttccgcaggtcccaggactccttgcagggctccagacacttagaacattgcttgtgattctggcaccaaaccagggaaccattgttctggaagtgctggaagaaggcggagatgcgcgtgatctgcaagctcaggcacctggaggcgcagcgggcgcgctggacgctcccggccgacagggactcgtcca

SEQ ID NO: 11611 - DNA, 657 bp, Canis familiaris
tgacaggatcatctcctgtgcgtggacgtgactgcatcccgtctcgtcactactctcacctggaactaaaggaataaatattgtgtcttattttagtaagatttcattcacttatcacatagaaattttagcttggcaaccaggacataaacttttagactccatatggcaactgttgttattgagacctggtctacaattcatggccctataacctggctactagacttagaatgaaagcaatttgcagaacaaaaatggccacacattcagatacttgttaaacaaatgttttttagaaaataggtacaaaacatggggtgacctgggtgactcagtcagttaagtgtctgcctcttgatttcccctcaggtcatgatctcagggtccgtggcatgaggcccctcattgagctctacgctgagttcagagtttgcttaagactctctctctctccttccacccctgctctggctcaaatcaatctggaaaaaagaaagaaagaagagagaagaaagaaagaaagaaagaaagaaagaaagaaagaaagaaagaaagcaaagaaagaaagaaagaaagaaagaagaaaggaaggaaggaaggaaggaaggaaggaaggaagaacagaaagaaagaaagaaagaaagaaaaaaaaaa

SEQ ID NO: 11612 - DNA, 651 bp, Canis familiaris
aactgcatctctcgcttggctcaaaacacggcaggtgttgtccgcttggacaacagagagtgggaattccccaaagtatgggcactagaaagaattcttccatcaagctcaactgttctgttattcatttaatgacttgccctcctgttacttaattataaattagatagaactgtgtcttttctgctttttcttttcagtttgctattcctgcagccatattgtattctgtgtcaaataaaatccagttggattctagaacagatgctgtctcttgtgtatgtgaaaaagtgaacataaataaagggtcccctcttcctatgttggaaggcttccttttgaaagtgaaatgtttgttcattagagcagagttgtcctgtgagcacatcgcctggtcacgaggaatcctggtccacagcctggtccctgatggcagtcttgggcaagtcatctctctgctcgactctcccctctagaacggctcctaagaaactaaatggcatcatatgtgcacagaaagaagctttgtaaactgtaaaaccactatacaaatgttgactttgaccatgtatgacatgttgctttctcagtttagaaaaataaacctgaaaaaaatctaatatataaaaaaaaaaaaaaaaaaaaaaaaaa

SEQ ID NO: 11613 - DNA, 613 bp, Canis familiaris
ccctaagggtctgccctctcctggacctcacagttctgtgaagccagtttccgcagattctcagaaatcttagagaccagattgatggctgacttcttctagaaagaggattaaatttcatggtatgcaatgtcaatttaattacctaattcctgaatgggtttactcttagttttccttttgctctgattattttttacgctggacatttaaagttcagttttatatcacttatcatagtaagcatttgtaagccacctaaatcattttgggggtaaggccgtaaatagatgatctgtagatagatcatagattagatagacaggtagacagatgaataaatattttaaatatggcttttgttgttctgattgcacagtctgtagctatgtgtttctgtattttgtgactagttgctgagggaccaccttagagttaatgagaagtataggaggcttcccttgatatttcattagtctaaaacttggagttttctagattcatgaagatttttatgcagtattgtggcagcagaatgttatatctaattatgatgtgtgaaaccattaaaatatatgtgaaaaaataaaaaaaaaaaaaaaaaaaaaaaaaa

SEQ ID NO: 11614 - DNA, 591 bp, Canis familiaris
tatcattaaacatttgtagcctacttgcacaggatatatgtagttaatgcaaagaattacatacttgacctatcctatactgctaaagagctcatcctatgctaaagagcagcaaggagacttgcctcctcccaagactctagtgagaattctgcatcatatataacctggggtccaaattcacaccatccatactccaaactaagaaattttcacaagcagttgaatgaaatcccaatctgagaatgatcaaaccctaaggaacctcagctgaaacacatatagacctgtaccacaggatcactttgacaaaacaggctatatagaggttcgtatgaggggaaaagcggtcctattaaagctgaagcttagcttacaattaaaaatacacgggcccctgcttgactcagttggttgagcatctcactcttgatttcagctcaggtcatgatctcagggtcatgggatgaagccccacatcagtctctgcactggttgaggagcgtgcttgggattctctctcttccctcccctgcagcccctccccacagtcactctcattctatctgtcttaaataaatttaaaaaaaa

SEQ ID NO: 11615 - DNA, 650 bp, Canis familiaris
  misc_feature (55)..(55): n comprises a, c, g, or t, or includes no nucleotide
ggtgtttgttgagacttgaaaagccttttaggattcttcttgctccccactgccnttagcacttaacatccccatgttcccctccctaacccagacatgttactaaacttataaagtaaataacactctggagtttttccctgcctagtccttgcaagttactttcatttgttttcttttccaccctctgtccctgtggaaactgactctgaaatgtgcgaaagtgaacttcctgaagtcgcggctttcgtttttggaaatatggaggagatgagaattctcttgtgtactgcttgggtacctttttagaagctgattgaaatcattggagctttccccagaaagatgtaagcacacactacacagcttttttgtatacacttcccagaggttcatggatccctagagtttaagatctattgtgtcctgcatatttcgattttttgttctagattcatgatgcctagtactgtgctgagttgtgtagtccgaataaaaattggagtctttcttgattgtgctttccaaattgagtattggtgaaatgacttctgatgtagaattaagaagtaactctcgtgaattagaagcattaaaataaactgcattggtgctttttcaaaaaaaaaaaaaaaaaaaaaaaaaaaaaa

SEQ ID NO: 11616 - DNA, 685 bp, Canis familiaris
  misc_feature (106)..(106): n comprises a, c, g, or t, or includes no nucleotide
cagggagacagcagtgcagtggtctccttcagctaccattcaaggagctccaaagaagtggtagacccctccagtggccgggccaccctgctggagtccatccgcnaggctgggggcataggcaaggccaagctccgtagcgtaaaggagcgcaagctggagaagaagaaacagaaggagcaggaacaagtgagagccacaagccaaggtggggacctgatgtcggatctctttaacaagctggtcatgaggcgtaaagggatctctgggaaaggacctgtgacaggagccagtgaggggccaggaggagcctttgcccgaatgtcagactccatcccacctctgcctcccccacagcagccacctggagaggaggatgaggatgactgggaatcctaggggctcagccaccctttcccaccaaactcaggtttagttactgccctcacatggacacagcggggtgagctgcctgccctgcaggtctctcggcccctgctgcctgtggaggactgtcccaggcctgtgccttaaggagctaggtggccagcttctgaggctaggtggccgagagcagggagcccttgctctctgcctgtggtctcctccagctacagactgaaataaatacatgaatcaataaagaagtatcatgcaaaaaaaaaaaaaaaaaaaaaaaaaaaaa

SEQ ID NO: 11617 - DNA, 573 bp, Canis familiaris
agtattacactgagctctagtaaaaatctaatcccgaagtaacatgcaaaaaagaaaaatcagtggaataagatcaacaagatcagactctccgtcatccgctccattattttatctttgaacggtcttcaaacccacattatctaggacttagacacttttgccttcttagatgttgtcttccataaaaaattaagaaattaattcactacaattttatttatataaaatgagtctaatactatatataaacatgtcctcaatctaaaagattgttttttttttccttctgaatttaaaagatgaaaacattttttatgggccttaaaagtattgtgggctggaggcatggtgcctgaaagataaggtggcccttcctatattctcaagggtatcactggagaaatagcagtcatgattctgtcgcctgtaaaacttatctcacaaaccctggggtagctttgccatcaccaccaagaatattgcagttcctggggctttaaatctatagacttgaaccttgttcttcactgacatgaccaaaacttaaagagtgttgcttgggaaaaatca

SEQ ID NO: 11618 - DNA, 664 bp, Canis familiaris
ctggtgatgctatttctgacatgctggtgattgaggcaatcttgacttctgaaggggcttgactgtacaacagtgggatgctctttatatggatcttccaaacagacagctcaaagttaaggttgcagacaggcaagttatcagcaccactgatgctgaaagacaagtagttacacctccaggcctacaggaagcaatcaatgacctcgtgaagaagtacaagctttcccgagcttttgtccggccttctggtacagaagatatcgtccgagtatatgcagaagcagactcacaggaaaatgcagatagccttgcacacgcagtgagcctggcagtatttcagctggctggaggagttggagaaccaccccaaccaggtttctgaagacaatttttatattcatgagaaactggatttttaaaaagtttttacaaaataatagtactcccattattgtgacaggttcaaacccatttgtaatcataatgtttacagtgcatcttactagattgtgcttctaaaactgattatttttcttaaacactaccacagtaattgtttagaagtaggtaagacttgttaaatttagtttttaaaaagtaaaacttacctaatttcaatctcaaaaaaaaaaaaaaaaaaaaaaaaaaaaaaaaaaaaaaa

SEQ ID NO: 11619 - DNA, 683 bp, Canis familiaris
  misc_feature (157)..(157): n comprises a, c, g, or t, or includes no nucleotide
ttaagcgaataaattcatactgccgggacgtgggtgatggctgcctcagtcagtagcgcatgcgaatctgatctcagggtatagagattacttaataataaaatctttaaaataagatgaaattcatactattgggacaagcaatttgaagaaccanaaagatggtttcaaaaggaagcaaaaatgcaagttctttgagaaagatatagaaattatttaaattgtttcctatatgtcagttattaaacactgcttttactgtcacttagggtcttatgtaggaaattattaggattcattcacaaaacaaactgcaattttgagatggaagttttattctagttaatgacatactgcatcagattaacatattacttacaaagagcaagagttaacaaaaacagttctataggcaattaacctaggctcttccacaccatagtaaaaaagactgttaagctttgcaaatgtgaattgttggggagggaaaaattttagtctaaccccgtaaaggtcctaactgggccctgagaatcagactgacatgagaccaagtaaggagaaattaacaagagaaagtcaaagaggggtgcctggctggctcagtagagcctgtaactcttgatcttggggtcatgagtttgagtcccacattgggcatggagcctacttaaaaaaaaaaa

SEQ ID NO: 11620 - DNA, 610 bp, Canis familiaris
caagccctggtgtccagtggttgccgtgggtccatcatcaacatcagtagcatcgtagggaaggtagggaactgtgggacagacaaactatgcagcatccaaggctggagtgattggcctgacccagactgcagctcgggagcttggacgacacgggatccgctgtaactctgtcctcccagggttcattacaacacccatgacacagaaagtgccacagaaagtgctggacaaggtgattggaatgattccgatgggacatttgggggatcctgaggatgtcgcagatgcggtcacattcttggcgtctgaagacagtggatacatcacaggcgcctcagtggaagtcactggaggtcttttcatgtaactgcctcacggaccctggactctgctcactcccccaccactccaaccggcctcctgctgatgaggactctgagttcccaggctacaaaaggcgcagcagtgtatggctctggaatgctgaatatgggaggcaggggtgcttgtgaccctaataaattccaaatcctcttccctgcccaaaaaaaaaaaaaaaaaaaaaaaaaaaaaaaaaaaaaaaaaaaaaaaaaaaaaaaaaaaaaaa

SEQ ID NO: 11621 - DNA, 722 bp, Canis familiaris
  misc_feature (179)..(179): n comprises a, c, g, or t, or includes no nucleotide
tccccagccattagtggagtcacagggacccccagggctgttgtcatctagagcctggagtgggactctgcttgggctagtggtgacaggatcctgatggcaggatccctcccccgttcccaagatcgtcacaacacaccggtagggatgttaggatacgggcattagagaaacctccnctgggcaaggagaaaattcagataggcctctatattctgtttttgccttcccccatcatggagtcgacacctggaccccagagcccagcaggcctacgccagagccagggaggtgagacaggccccccgaggcaggctgtggtgcccggggaggagtggccggcaagagtgctggcagcaggaggcttcatgagcggctgctcctggctccgtgttccctggtcagtccaaacggggaaacagactggacagcagatgctgtgtgagatcttaggccttgaactttttttttttttttaagaaagaaaaaaaagtaaaattaacaagcctcttttgtaaatgatttttctttctatgtataaaatcccggcagttccttgtttttacatgttcatgctgtgtaattttgagatgttactgagatcctgaacataatgtgcatttttttctgtacagatgaaatgggagaatttaataaagagtttgcaggttaaaaaaaaaaaaaaaaaaaaaaaaaaaaaaaaaaaaaaaaaaaaaaaaaaa

SEQ ID NO: 11622 - DNA, 608 bp, Canis familiaris
cagcctctcggactctatcctagctccgggacggattacaatttcacacaggtacagctatgaccattaggcctatttaggtggacactatagacaagtttgtactaaatagcaggctggtaccggtccggaattcccgggatcttggtaaaaaagtcaagcgtctgggacatgaagctccgtcatcttggactggataaaagtgattctagccacagtgattccacccagagtcagaagtctggcaggacgccaacccccggcaagcacgcaactataatcctgaaatgcagaaagacaccagtggacttcctactaagacttgcgttgctggatcagcaaaggaaaattgcactattgcacgccatattctattttttaccaccaaaatcatgtggttactgatattacttctattttctctgttttctgtttctctctctctctctctctttgtggtctgagtgcagatccttaaatatatgtattctgtttcactaatcctgggaaaactgttctttgcaataataataataaattaaacatgttgataccaggaaaagaaaaaaaaaaataaaaaaaaaaaataaaaaaaaaaaaaaaaaaaa

SEQ ID NO: 11623 - DNA, 106 bp, Canis familiaris
ggtggtatatttaaaaaatgaaagaacgaaagcacacaaaatgagtcagtttggggtcagtggtaaagggggtatatgttgcgaacagaatgttttaataacagtt

SEQ ID NO: 11624 - DNA, 542 bp, Canis familiaris
acgctctgcttcgatgcggttccccgacatcgagaaggtgtccaagatcacgtcaccggtgctcatcatgccacggcatcggaggacgaagtcatcgacttctcccacgggctggcgctctatgagcgcgtgccccaaggccgtggagccgctgtgggtggagggcgccgggcacaacgacatcgagctctacagccagtatcttggagcgcctgtagccgcttcatctcccaggagctgcccagccagcgcgcctagcctaggcctgagccgtgccgggacttcagcaataaggcggcgctctggacctcgcccccgccccgccccggggctgcatgtgaaccccccgggcaccccagtctctccgaggcatgctggagggtatgggggtcgggacctgccccagcccaggggccgtggacgatgtacaggcgcggagctatgctctcctttccttttggaagcaaaaagaaggaaaaacgtgaaaacgaattaaagatttaaaattttaaaaaaaaaaaaaaaaaaaaaaaaaaaaaaaa

SEQ ID NO: 11625 - DNA, 536 bp, Canis familiaris
gatgggcacacatgtgtcattctgttgatattgtttcggcaaatttttttttttcttctcttcttcctgttatttggtagttctctgtacgttagatattttttttttccatggggtcaaaaggtacctaagtatacgattgcaagtggaaaaataggggacagaaatcaggtattggcagtttttccattttcatttgtgtgtgaatttttaatataaatgcggggacataaagcattaatgcaagtcaaaatgtttcagtgaacacgtttcagcagttcaactttataacaattataaataaacctgttaaatttttctggacaatgccagcatttggatttttttaaaacaagtaaatttcttattgatggcaactaaatggtgtttgtagcatttttatcatacagtagattccatccattcactatacttttctaactgagttgtcctacatgcaagtacatatttttaatgttgtctgtcttctgtgctgttcctgtaagtttgctattaaaatacattaaactataaaa

SEQ ID NO: 11626 - DNA, 576 bp, Canis familiaris
atttgtgtctattctacattttgggtattctttcactatcccatagattaacccagaagaaatatgtatcatgtgtgatctatctcaaaatgtgtgtttcaagagcatcgtgaaattgttgtttgtacgtgtatctggatcatttataaagctactatgatccataattcaagaaaatttgtcttgccatttttaaaactctaaaattaagacgtccgtgaatttcaaagttagacattaaaatgtatgtgaaagaacagactatttctgatactcttacatattagagaagttgttttacttgctctctttgtttttcatttaacttacaggtgaaggactttggttgaacttcataatataagaactgttaaagtgaaaatgtcaagtaaaaggaaagccctacatccaaaaagaaagactgaacaattatgccctcaacccttaaaaggttttaaaacctgcccagaaatccacctcagtatctgaagtttccctctgtctcctcctctaattacgcttgtcattggttatgcaccagcattcgagataataaaatttcttgttctgtgaaaa

SEQ ID NO: 11627 - DNA, 569 bp, Canis familiaris
atggtcatattatagaaggactcttggctctggccattgtgtcctgcagctttcctacccattttggtgaagttatctctctgtccgtatcgctgtttctgctgagtgttaaccagacttgagttttgatggttctgttgataaccaagaatcctgactaatagactaatcctgactaatcctgacatcaataaatttttgtaatatcttttttcttcagatattattaagttttgtttttgtactgttttaaaatccatcaggaatttgtttatatgtatggtatcaagtaggaatttaatttttttgtatggataggtattgctgctcgaccatttatttttcaaaccatttcttgactaattctttacctatggttctgaaatgctatcccaatcacatacaaacttctcatgaatgcacaggatctcaattctgtttggctttctgctgttttacctaaatatccatttttgcagcaatttcatcatttcaagtactacagttttataacatgtcttagtatcagaataagttccttctcccttttcttccaaaaaaaaaaacta

SEQ ID NO: 11628 - DNA, 517 bp, Canis familiaris
agatggcagagaccacaggcatgagtggggaaatcaggctgccatgtcagggagcctgacgtgggacttgatccaggtctccaggatcaggcctcaggctgaagtcggtgctaaactgcagagccaccgcaggctgcccccattccgctgaatttttccagttgtaaatgtagatttccctccatcctgtgtctacaacaaaatctgcctgctttgttacgtaagttatgatatcctctgccataaagtaatttctttggttttaaaaattttgttgtagctaagtcccttaaattacaaacattttcctaaagaactggacattttgttattaagtaattgtgatctgtaagttctttgtgcagaatgttttgaaatgtcgtatttaaatacatgattagtatataatatctatgaaaatacatttgtcattctgtaagctgtattgtctactcttacttcattattaaagctcttaatcagcacaaaaaaaaaaaaaaaaaaaaaaaaaaaaaaa

SEQ ID NO: 11629 - DNA, 545 bp, Canis familiaris
atagtatgaacttgctgcattaggaagatcacagtagagggcgaagttcagacattttggttttcagagattcactggtttcacttaggtctggtttctttgttagtcctagtatcagtcaaacaggccttggagctccccagagcaaccagccacctctgtctttcagccgcgttcactgccttcatgtagaaatgctgctctccaggaatgattaattccattctggtgttgtctgctgaatggactttaatttcacaaactgccatctttatacttcctttgctccctttgcaaacatcatcttgtgaatcatagtaggaaaggattccattatctaaaacaaaccaacgaggctgccaacctgtcaggtagttggtccacttgtacagaaccccctccatgcttcagggccccgcgccgcgcatcctccggccgggcgcccgccgcgctgctgggtgggcgcggagcgtgggcagccgctcccggcccgactcccccggcgctcagcccgcgccgccgggacgtggcggcccctagaggcc

SEQ ID NO: 11630 - DNA, 462 bp, Canis familiaris
gggcacaaccgtggtgcacgctggctctggttgaggtctggtacatgtcgaatggtcagcgctgattaagttggcacacagggtgggcacccagccctctggccacacgggcccccaaagcacctacaggccaagtggggagaccccacagcccatgacatgaaagcaccttgaaatttgcaccctttttcttaaggtatttttaaatgcagtgtttttatctaataatttaagcatatgcaacactttggttttaacggatgctttgttctcttggaatggtgtttctcttaagacttttccgattcctttcccttttaaagtggacttttgctgtttgcccacctggagaggggcaaccagccccatctgatttctctaagtggatggtgtcacctctgaccagccagtgtctgtcacaactgggttaaaagtgtcagcaccaagaatcaggttcatgac

SEQ ID NO: 11631 - DNA, 505 bp, Canis familiaris
cgaggactcggtatggtttaaaatcctgttcatctgcacggttgtgtttgaagggttttttgagtttccctccccttatcatgaatgataaattccaagtcgttttatcactgcctttcctttggaaccatgtctagaagagagtagcttgtcctacatctggtctacactggttgctgaatttacctgtattcctaactgttttgtatatgctgcatttagacttacttatagcaaagaaggcattttttttttaaagaaaaaccaactgaagtcatgatgatatatgaaagctacatatggctaaaaagctctgaacttcaggtcccagttgctgtcatcaaaggagtgaacggagctcccagccccaccccttttttatataataaaagtgccttagcatgtgttacagctgtcaccactacagtaagctggtttacagatgttttccatctgagcgtcacaataaagagaaccatgtgctacgaaataaaaaaaaaaaaaa

SEQ ID NO: 11632 - DNA, 425 bp, Canis familiaris
gaggaagagggtcttcatggtgtcggatacctcctggctctgatcctaagggaagtacctatgtgctcttatccttagagaagtacccatttctgcgccctcaccccacgcctgcctgtaatctgcttcccccctccccagcgcaccccgagagccgcctctccagctctcacctggtttatgcaaacgccgagcgccggggaggctcggtaggaggagtctgccgcggccccgcccccgcaccctgctagccccgccccccgccgggctcctggggctgtggcccgaaggatttttatctccgtgtgtgcatgtgaccgtgctgggttggaatgtgaacatataaagaggaatgtccaagtaaaaaaaaaaaaaaaaaaaaaaaaaaaaaaaaaaaaaaaaaaaaaaaaaaaaaaaaaaaaaaa

SEQ ID NO: 11633 - DNA, 109 bp, Canis familiaris
  misc_feature (1)..(1): n comprises a, c, g, or t, or includes no nucleotide
ngcttcctccggcaccagggactgcgacgtcactcacagccgtgagccagttcttcagcgccagctgcgtgcctgtcaacaaccccaagaactacccggcctcgctgtg

SEQ ID NO: 11634 - DNA, 554 bp, Canis familiaris
ccatgtccgtccacagggtggaacccaagtccccttcctccacagctgcttttagtgaatgggaaggatctgggcccagcctggagggattggccctcactgtttctctcagtggtagccttgctccaggcccccttctttctgcaagtggccacctccagtgagaaactaagccaaagagaccgctctgggccaagttgactgtgccttatacatctcccatcccaagtgctcctggcacaaggcagcggagagccaaatcctcagaattccccccatttccccaagtgtctcgggggcctgaagcactgggcattcatttcctctcttgtccaaaataggcgtggtcctaagggtaggacagaggacatttggagacatgggcctttgataggcccacctgggcctttataccatggaccgtggctggagaatgtgcaggtatttattttgtgtactctgtttgtaaatgtatcctctgtactcaataaacaggctgccatccccagggaaggctgctcatccattcaaaaaaaaaaaaaaaaaaaaaaaaa

SEQ ID NO: 11635 - DNA, 560 bp, Canis familiaris
ttgagagaagggaaagttggagcatgaatgtagaatttacgccctagaaagtcctccttggcagcttctccacgaagatcttgcataagagccatagtttgggggctcagatggacaagaagaagcctttagactgtctccccagacctacagcctgacttgacttttgagtcatgaggatgctgctggaagagatgaggccttacctcagacgagaaagggtgtcaccaaaaccagagaacactttcaccctgtacttcccgcttcgtgatcccagttctacagccaacctggggccttggtttggggcccctttttccttagccccaggaaccaagatttttttttgccacagctccctgactccttttagaatccccctccatcctccctcaagtttggaaaggagtgaggactatcttcctccattcccggagtctcaccttcctgcctgctccatactccacagagggagctgacgttggcttcagaaagtaaagtcaacatctgctgctttcaaaaaaaaaaaaaaaaaaaaaagaaaaaaaaaaaaaaaaaaa

SEQ ID NO: 11636 - DNA, 601 bp, Canis familiaris
cttcaggagacaaggagtaaaaggcttatggatgtatatagtcatatatgtattttagcgagtataaaatgtatttatttggacacagggaaacactgacttatgttgctgtaagtactttgaagctagtgaaagggtctttcctcagtctctgagagtggccccaagtgacataaggaccatccagcaggcagctgctgggtagctctggtaagccagccatggcttggcacgggagtgagcgacgttgtgaaagtgttgtccaggggaaggccagtttttctccctttgaggcctcgactccgggttgaaggggcagaggccgggtactccactgccacaagcttttaaggaacgaaggtgttacaaacacaaaatgtaagggggggtgcagagagctgggagtaattgaccaggaagctaatttatttgctgaaaaggatggtataggagtcactaccctctgttttgatctgccaaggatttcctctcagagctgttgcacaactaggggttgggcttggtaagacaccaaatgggacagacaacgcacctaaatttctaatgtgttctgtgggtttcaattctgaaaaagaaaaaa

SEQ ID NO: 11637 - DNA, 628 bp, Canis familiaris
aggacacagactatattactgtgctgataaaaattcttaaattcaactttaataagaattggccagaatatattagataatgatcatgtttttgttttcctctgggtttataaaacaaatatgaacatcctaaactgttagatgaatctaaaagggattatgttcagaattaaatttatgttcatgtttactgtaactacattaaaagttaaaatttttatggaagaagatacaaggtaaagaggtagaatcacttttttagacttaagaataatgttggtttcccagctgctttctctttccattgaagcttaaagttaattggtatttattcataggcagtttgactgcatgtactagggaatgaaaaaaagacatttgtagtaatgcctgcaaacttggtgcttgaagtgaaggttctcctctgctgctatggagtggattccatatggtgtatagataggagcgatgcagaagattataaaaatttagactctcagttgttaagtttgtacgttttgtgggaaattacagacttactgtgtgtcacctgcatttgtgctgtgtaaaaaataaatacaaggattcttttaacttgttcagcttaaaaaaaaaaaaaaaaaaaaaa

SEQ ID NO: 11638 - DNA, 505 bp, Canis familiaris
gaatatagccatgaatccatgaattcatatgaatgaatctcccatcccaagtgaaacagttttcacataaaggtggaaagaagaaacggctcattctaaaattccttaggaaagttaaagaaagttgcaacaggtagttgagcagtactgctaaaataaagtaggccaaaatggagtctcttgtgctaagccccacatcagcaaaccccagctgcagtttcagcctgtcccagcactgtaacctgtaaccagtgatgttacctaactcagcatttaggaggtagtctgcctgataggccccgactgtcccccaaaggaaggtaaccttgcctgaaacaaaccactctgttgggagagttccttctcccactccctttaagtctataaaagcctttcattatgtgcagctcttcagagctcctttctgttagatgggatgttgctggattcactaaccgttgaataaagtgaatttttcagttgaaaaaaaaaaaaaaaaaaaaaa

SEQ ID NO: 11639 - DNA, 576 bp, Canis familiaris
gctcccatactcactggtggtcctgcccacccccctggcacaaccctaaccctgctgatgttccccaacccgatccttcaggctctcctggcccctgccactgtgagctggtgctcagtggggactcttggagttcaggtcagcctcagggctggcacgctggccccttcttcacccctttctagggggagcctacagctaggacctggggattgcacactccaggccccaggctaattcccctctgctctgtgttggggctacttagggctgccctaggctttttctctgtcttccactctattccagctttgtttccagcaagtgccttgacagtcactgggctccatgtgacttctgactctggcccccctcccacagccccttcttgggctgtagtctggggctgggaccctgtttggtttctgttttggctgaggacaggggaggggtaaaagtggttctagagtggcttgtgctgccacccccaacgccccacatttgctcccccctgggaacctaccatcatcacaataaagaccacataatttttaaaaaaaaaaaaaaaaaaaaaaa

SEQ ID NO: 11640 - DNA, 522 bp, Canis familiaris
gttatttccccctcgggaccccaaagagctggctccagaagattgggatcatctgaagtgttttatgtgtgcattgactttgtaccaagtggttcaagtatatatagatatacacagtatatatattcaataccctaccgaaaccccatctggggtttctagtggcggttgaaatattcccacatgggatcatcccaaaataagccattcctcacaccaacgtgggataaactccttgacttccaggcctaggagttcatcctgctgtgtgttttagaatccctcccctgccttaatgttttatggcagtgaaatgcctcttgatcatgtccaagtgtgtctttcaactgtatctatttctgatcatgttccagttgcttggccctgccactggggcccagtactccttgtgagcataactgtactaaatcttttttccagatcagtataataaaggagtgatgtgcaataaaaaaaaaaaaaaaaaaaaaaaaaaaaaaaaaaaaaaaaaaaaaaaaaaaa

SEQ ID NO: 11641 - DNA, 588 bp, Canis familiaris
tgttataagcccatcttggctcttagtaatgtgatgcaaggtggtagctgtcgtgaatataatggtaaactttacaggaagctaagcctcctgttgattgaatgcttctcaaccatagggaaaacattctgactgtgtggcagggtgattgtctttcttgtggccacttacagtgggtatttattgttcttgacccttttatgccctagaatgctgtgggggttaccatgttgaatttgtgcagaagctaaaagcaccggatgtgccagagatgcaatttgtgattacgtgttgcactggattgtgatttgaacaggacacttatgactaatgaactctttcttttgaggtggggaggagggttgtaaatgagacttcacatcccacccttatagctcagagaatctagttgtggctgaggctgatgtggggagctgcagacagctggacctcctaaacacgcatcagaccttgcaagagatggaaggtgaatgcagaggactctgaaatgccacccaagagccttttaaaataaatagaagtttttaaaatgctacttaaggagtcactgcagaagcatgaaaaaaa

SEQ ID NO: 11642 - DNA, 527 bp, Canis familiaris
gtcttgtggaggctcttccctggtgatgggtattattcccagttgtactgatgagaatactgagaactgaggtaggaagggttatgagatctggctaaagttgtgcagggataaattagcaaaagcagagctgggaatcaaagctttcaagcttgtatagttaactgccatgccataccagcttctctggatgagggaaagaacattctgaggttagagtgactctctctgaggccttcgaggtgtggagtgaaatgaaaattgtctacttatttgtgcattctattaattgagtaccaactgcatgccagacactgttggagatacttggaatccatcagtggaccaaggaagaccagggacccctaggtggctcagctgcctttggcccaggatgtgctcccgggatccgggatcgagtcccactcaccttgcggagagtctgcttctccctctgcctgtgtctctgcctgtctctctgtatgtctctcatgaataaataaataaaatcttaaaaaaaaaaaaaa

SEQ ID NO: 11643 - DNA, 588 bp, Canis familiaris
  misc_feature (234)..(234): n comprises a, c, g, or t, or includes no nucleotide
ccgattttcaccttatagcagcatcccatcattgtctcctgtgggttgggacaaaggttggtcaagggtatgggaccctggccaacttgcacaaggcttggaggcccatcaacaatcggccaacaacggggtatacttggacacccggtggccgttcttttcccggagatgggaattcttcttcctgggcctttcttggaaggggaaagggatggcccaagcccatcctgtggngatctcaaatgaagccaagcaccctttagtacacttgatggtggagacatcatcaatgccctatgcttcagtcctaaccgatactggctatgtgctgccacgggccccagcatcaagatctgggacttggaaggcaagatcattgtagatgaactaaagcaagaagttatcagtaccagcagcaaggcagagccaccccagtgtacctctctggcctggtctgctgatggccagactctgtttgctggctacaccgacaacctggtgcgtgtgtggcaggtgaccatcggcacccgctagaaatgatggcagaactttaggaataaaacattggttttctgaaaaaaaaaaaga

SEQ ID NO: 11644 - DNA, 533 bp, Canis familiaris
taaagtaggcattaaatattgtttacgttttccgttgctttaggtatccgtgatccctcctagatgaattgagggttgatattaaaaagtcagtttcctttacataactttatgtacttatatatgtgtaaacaagcatatattgaagtctatttaggggccatctacctttggaggttgaacacttggatttaaataatattattttggagtcatacatctatgccatattttattctgtccaatgctatttccattaaatagtttaactagattgtataaaataactttattgcctaacatgaaattaccaagcttaggcataggggaaatgggctttttagaagccaggaattctaagtatattctgttcttcaaataaatgtcattttcttctttaaatattgaatatgttttatgaaccaatatctttctttgccaactcgaattacatgtgcttggaattaagttttagtttttttcactgcaccaataataaagcctgagttctgatcgaaaaaaaaaaaaaaaaa

SEQ ID NO: 11645 - DNA, 679 bp, Canis familiaris
agcccgtgactgccacctgcctgggatccttgccgagtcctagctactgaagggcacaacacatgtgcttctgccagcccgcttttgcagttctgggctctgtcctcagtgtagcacccttaaggcctactgaggccaacgcctgctggcaatggcccctctgtgcagtgacccctggcctgtcaccactggtccccgcccagttcagcctagctcaccgtgctaaatcatgcgataaatctgtaaaatatgtttgtaaatacccaatcgggcacaggtgctcgctttcctccacccaccagcatttcaatcagctagggtcttctaatatatgagtaggtccttgggcattgacataggtggtacgacactggacagatggcgaacatcttggcaccggttgggctgtccattcagtctgtccttgaggttcgcagtcaccaggtcggcagccagaggcctcgagtgatgtctcgactgtgttcaacaactcacacccacttgttagactcctgacgtttctttcacctgctttttaagaatgagaatgtaacttcctttactacatcagctcgctattaataatcccatataccagtatcatgtttaaaagatgctaaaagagaaattaacaaatttaaatgtttcaataaaaaaaaaaaaaaaaaaaaaaaaaaaa

SEQ ID NO: 11646 - DNA, 603 bp, Canis familiaris
  misc_feature (301)..(301): n comprises a, c, g, or t, or includes no nucleotide
aaaattaatttaactccacgtttggttgaaaacttcctaagggagaaaattcagtgtactggtttcctatagataagtggatgtcaaactttaaagtacagaaaaggtggtacctacatttagatgatagtcttgaggttcatgtgaaactagtgtcaccccattttgatttcttttgctttgttttctattttgattcttcttgttcaggccaagcataaaacctttttttctgggaggtggaagaatttaaaatttttctatatgaaatcattgtcccctggaaagacgcctgcatacnttttataaatatatacagttacctcacacggaacaggaacctacaggaatccagctcttttaatttctcctctcaccatgtatatggtcagttactgtcttaaacacctggctccaattcccactgttttctttgttctggactaatatcgtgtctacatgggagccgagcggacctttcattggaaagccctggagtctaaaatgatcagaataattaatttatttgtgtcttctgttatgcttgtatctcttatttgttttgacaataaacttcttaaactgctttctcaaaaaaaaaaa

SEQ ID NO: 11647 - DNA, 585 bp, Canis familiaris
accttgcctgtgagcaaggctgcctggccagcgtgggagtcctgactcagacttgcaggacccagcacctctactccatcctccaggccaccaactacaatggtcacacatgtctacatttagcttctatccatggctatttgggcattgtggagcttctggtgtctttgggtgctgatgtcaatgctcaggagccctgtaatggccgaaccgccctccatcttgcagtggacctgcagaattctgaccttgtgtcgcttttgttgaagtgtggggctgatgtcaacagagttacctaccagggctactccccgtaccagctcacgtggggccgcccaagcacacggatacagcagcagctgggccagctgaccctagaaaaccttcagatgctgccagagagtgaggatgaggagagctatgacacagagtcagagttcacagaggacgagctgccctatgatgactgtgtgcttggaggccagcgcttgacgttatgagcttcaaaacatatctaaaagaacacggacttgtatatttgtacaaaaagagagttttatttttctaaaaaaaagaaaaaaaaaa

SEQ ID NO: 11648 - DNA, 578 bp, Canis familiaris
tgtctcaaccattctatggatcttgagatgtatccaatagagtaaatcctcgttggaatttttttaatgtttccaaatacttttttagagccctatggtttctcacatgtcactagtaaactatcactgcactgatgttaagacccctgaggtttggaatcacgatcacctaaatgtagactctgccctttactggctgaggagcccttggggagtttttaaaagtctctagacctttactctctcaccctgtaaaatcgaaccacttacttacctcccaccacgttattgataaggactaaaagtaataatattcactaaagcacttttatgtgtaattttacttaaaatttatggagtattctattatcaccacttattgccatgataatagtgcgatctttagtttctgatatgtcctcttgtattggataataacacgtttcttttttggttttacccatgtggattgaaactgaaattttccagctcatagaaagttgtaagagatatacatgtgataaataataaatgttcgcatactaaaaaaaaaaaaaaaaaaaaaaaaaaaaaaaaaa

SEQ ID NO: 11649 - DNA, 615 bp, Canis familiaris
  misc_feature (356)..(356): n comprises a, c, g, or t, or includes no nucleotide
gacattctatgtaatacggccaagtttctaattcttcgttctatggaagaataatttcctgtaccgttgatatattggcacaggtgccgatatgactgctgctacgctactcagagtccacaagggccacaggttcctctcccagtgacagagcctgggacatctaacgctgtcgtgcactttgtcagggtcagaatgatggtgaacacccaagtgtggtctctgacttggaagtcacagcctgacagtaaagaggtcactgttctgaggtagcaggtgcttataacttacttgtaggataggcgcagagtcgctttctgaaagattgagaaaaagatgtgtgaagtggccccaangtgagaattattcaaacctttataaaaaattattttcatacttgtatgctgccataaggtatctcttcaacctgaactcttctggcgtcttggtctcagcagcacaccaaggaagcctgaccagaagtgcgtagtttgtactatatagagaaatgtgcactttagctttattgtgaaggatgttattttaacagattactgactctaataaagtattttattaataaaaaaaaaaaaaaaaaaaaaaaaaaaaaaaaaa

SEQ ID NO: 11650 - DNA, 625 bp, Canis familiaris
ctttttccagctggtttaagcagagagaacacagaaaggaagtagtgcagccttgggatgcagcctgcccctgggtctcaggacagtggaccggcgccttgcccatgtgcgagtctggggacttctccctgagacccctggcccagcctaggcttaggcatccatccaccagtggcccaccagtagaaccattttattactttttcattaaaagttgagataccatttacagggcaggggatccctgggtggttcagcagtttagcacctgcctttggtccagggcctgttcctggagccccaggaccgagtcccacgtcaggctccctgcatggaacctgcttctccctctacctgtgtctgcctctctctctctctctgtctctatgaataaataaataaaatcttaaaaaaaaaaaaaaaaaaaaaagagagatacgggcagccctggtggcgcagcggtttagcgccgcctgcagcccggggtgtgatcctggagacctgggatcaagtcccacgtcaggtttcctgcatggagcctacttctccctctgcctgtgtttctgcctctctctctctgaataaataaataaataaatcttaaaaaaataaaaaaaaaaaaaaa

SEQ ID NO: 11651 - DNA, 621 bp, Canis familiaris
gcggatgaggccccaggcccgaatcccatatgcccgtgtcaaccacaacaagtacatggtgaccgaacgtgccacctacatcggaacctcccactggtctggcagctacttcaccggagaccggcgggcacctcgctgctggtgacacagaacgggcggggtggcctgaggagccagctggaggctgttttcctgagggactgggactccccttacagccacgaccttgacacctcagctgacagcgtgggcaatgcctgtcgcctgctctgagtccccagcccggcagacaggccgaggccttcgaggcccccgtgaggcccagagtcctgggtcctggcccctgtccccgtgcccccgcttctgtgtgcccccttgtggctccactggctctcccctgctctcctgcctctacctccacccctgccggcctgatgctgtggccccaggacccagcccagctgggggagggatcagcccccaaagaaatgggggtgcatgctgggcccggccccctggcccacccccctttccagggccaagagggctcaaggttacaataagaagtaaataacttgtctgtaaaaaaaaaaaaaaaaaaaaaaaaaaaaaaaaaaaaaa

SEQ ID NO: 11652 - DNA, 610 bp, Canis familiaris
tggtactacctgttaccccagagtgcccttcatctcaggggaggtgggaggtatttttaacccttttcgtactttggaaaatgtcactgtgacccaaagcccgtacagttctcctgcccccacccactcattggatcccaggcaggaaagcttctctctgtaacggttcatccttcaccttgttctggttgatggcaggggctgtttcctggtgtacttttgtgagggtgggggcttccccttaatcaggggtctctttctacactcttggtcagaccccaggccatggagagaagtgctgagtgatgcttagaaagtctggaccctccagagaggatcctttccttgctggcccaggcttacccaatgtcacactgcccagggtagcctcatggctctcagggcctgatatgggcctgacaagtgcctgcaacccagcctggttcctgacctttcactcactggctgggaaagcctagcccacatcagatagaaaaaccctgctgggttttacatctagatagtaataaatacccttttggcatttccaaaaaaaaaaaaaaaaaaaaaaaaaaaaaaaaaaaaaaaaaaaaaaaaaaaaaaaaaaaaa

SEQ ID NO: 11653 - DNA, 567 bp, Canis familiaris
ttatcacttgtgagtatctggatgaagcatatccagggaagaagctgttgccggatgatccctatgagaaagcttgcccaaagatggtgtttgagttattttcccaggttccatctttggtaacaggctttctgagaagaccaaataaggaagatggctctggcctaaaagaagaattacggaaggaattcagcaagctagaggaggttctgacccataagaagaccactttctttggtggtaattctctttctatgattgattacctcatctggccctggtttgaacggctggaagctctggagttaaatgattgtgtagaccacactcccaaacttaagctctggatggcagccatgagagaagatcctgccgtatcagccctcctcaatgaggccaacacccttcgaggattcctcaatctctacttgcagaacagccccgaggcctgtgactatgggctctgatgggggcaagagtcagcaatgaaatgtctgatattttctttcactaaatgtctgatattttctttcactaaaaaaaaaaaaaaaaaaaaaaaaaaaaaaa

SEQ ID NO: 11654 - DNA, 571 bp, Canis familiaris
  misc_feature (1)..(1): n comprises a, c, g, or t, or includes no nucleotide
naatcagaactccgaagtgaagaagatccccgagtacgatgatgctgcctgtgaggctggagacccaccccgtggagctgctggcccgggactttgagtaagaactaccacatgtacatcttccctgtgcactggcagtttggccagctggaccagcaccccattgacgggtacctgtcccacacggagctggcccccctgcgtgcacccctcatccccactggagcactgcaccacccgcttttttgagacctgtgacctggacaatgacaagtacatcgccctggacgagtgggcgggctgcttcggcatcaaggagcaggatattgaccaggatctggtgatctaaatccacgcctccttccgcagtcccggatcctccctctttgatctttcccttcctgtttccccccatgttttaaatgtttggatggtctgttgttctgcctggggacacaggtgctaatatagatttaagcgaatacaattaacggtgctaaaaatgaaaaaaaaaaaaaaaaaaaaaaaaaaaaaaaaaaaaaaaaaaaaaaaaaaaaaaaaaaaaaaaaaa

SEQ ID NO: 11655 - DNA, 578 bp, Canis familiaris
  misc_feature (82)..(82): n comprises a, c, g, or t, or includes no nucleotide
ttttgtcatcttttaggaaaatgtttcaactgagttagcttcagttgaaattattttatttatgaattccagtactctccanatctgtacacctttgtcactccctgctatagctattaccttgtgttataaaggaatatgtgtacatttatggcatttatggcaagcattttgttaatactgttgtcttttatcatgactttatcacttttactaaaaataccattagtttaagttgcctttgacattgcctgatcatagacactttctctgagaatcatattcatgtgtagattttcatgttatattatagcttatattagaagcacattttaaaatggggtctttgagaaattgagcatttttatttaaagttcaccatagtaccttaaaggaataaagagaatgtgggataggaataacctgattcagatttaatatggtgggctttgaattttttctatctagacagtactttctttagttgaaaacccagtggatttttgtttgttttgttttattttgttcttatcatggcccaactaactgatttaaagggatggccaaggaaaaaaaaa

SEQ ID NO: 11656 - DNA, 598 bp, Canis familiaris
  misc_feature (7)..(7): n comprises a, c, g, or t, or includes no nucleotide
tgtcccnaatgatgcatagtatttttaccattgttcccattagccataccaggactggtgtgttttcagtggtacctgaatgcactggatttgtttctgtgaaagtggatttttgtggcctgtgcacaggaatggatcggagacgatgaactggatgtgaagcaccctaaggatttatagatctatccaaactattggtggtgacatcagcattgttgtcatagctgggctggttgtcatggctactgttgcagaggcctccgtgtcacctgtgataatactcctggagggcctagctgcctgatccacgtggagaagaggctttggttcttcctgctcctgctcccacttgtcacattcaggatacagcatattcgtttgacaggactgaaccagcatctgtatgtgaagatccatgtcaagctttcttatgatcagtgccttctactgataccggagcacctcctctggtacttgttggtgttttgttaattatgtttagtttctggaactatgtaagcctaacccacccaataaaaggtctttgcctaaaaaaaaaaaaaaaaaaaaaaaaaaaaaaaaaaaaaaaaaaaaaaaa

SEQ ID NO: 11657 - DNA, 617 bp, Canis familiaris
  misc_feature (331)..(331): n comprises a, c, g, or t, or includes no nucleotide
gtgtgaattagaaagatacaacatatgcagtcccaacaattggaaactttacaagaaaaataagaggaaggaactcgaaaccttcaaagctgaactcgatgcagagcacacccagaaggccctggaaatggagcacacccagcaagcgaagttgaaagagcggcagaagttttttgaggaagcctttcagcaagacatggagcagtacctgtccacaggttacctgcagatagcggagaggagagagcccatgggcagcatgtcgtccatggaggtcaacatcgacatgctggagcagatggacctgatggacatctctgaccaggaggcnctggacgtcttcctgaactccggcgctgaagacaacacggtgccgtctccggtctcagggcctggctcgggggacagtcggcaggaaatcacgctccgggttccagatcccgccgaatcgcaagctgagcctcctccctcgccgtgtgcctgtcctgagctggccgccccggcccccggcgacggtgaggcccccgtggtccagtctgacgaggagggagtcgaggtggacactgccctcgccacgctacacagcgacgacagcgactcgtagatccgcgtgtccg

SEQ ID NO: 11658 - DNA, 623 bp, Canis familiaris
  misc_feature (1)..(1): n comprises a, c, g, or t, or includes no nucleotide
ntgatggcttccacctttggttataatgaataatggttgctatgagaggtgttaccaaagcccttttgaaaccccgttttcatttcttttggagatacacccagaagtgggattgctggattatatgtatttctatttttaatttttttgaggagcctcacacttttcccatagcagctgcgccacctctagagcctcagcagtttgcaagaattccagtttttgaggatgcctgggtggctcagtgattgagtatctgcctttggctcaaggcatgatccaggtctggggattgagtcccacatcgggctccttgcgaggaacatgcttctccctctgtctctgcctctctctgtgtatctctcacgaatgaatattaaataaatctctttcaaacatttcagttttccgggggatccctgggtggcgcagcggtttggcgcctgcctttggcccagggcgcgatcctggagacctgggatcgagtcccacgtcgggctcccggtgcatggagcctgcttctccctctgcctgtgtctctgcctctctctctctcactgtgtgcctatcataaataataaaaaaaaaaaaaaaaaaaaaaaaaaaaaaaaaaaaaaaaaaaa

SEQ ID NO: 11659 - DNA, 691 bp, Canis familiaris
  misc_feature (130)..(130): n comprises a, c, g, or t, or includes no nucleotide
  misc_feature (281)..(281): n comprises a, c, g, or t, or includes no nucleotide
tcttttggacagagggaactggaatccccccaccaggtacacatgacccattcccagctcaggggaagctccctcacaaaaaccccagcttctggggggcaagaaggactgagtagcctctgccctcctntctagaaccagagccctgagggggaccgtgcagggtgagggcaggccccagcaagcagcttttggtcctggtcataaaacctccttaagcctgctcaggccaggctgcacatagtttcctgtcttgtccatggaatatgctctgggagtgnttgagggtggcagccagaggcaggctggcatacctgccaggggtgaaacaggccaggactcccagtcagagccccactcagtagcaagttctgcagacttgcagctggagtcctccatctggagcccgatgcagggtccgcctgatgccacgtcaaggtggagagagctacccaacatgaccagggcttttctctgtgaactgtaaatggataagaagcgagccacttagaattgttacagttaatcagaaaagccgggaattagactgtgcttatattgaactcttgctttgtaggtgtctcattgaaaaagccttactcatgctgttaagctgcttcaataaagttattttttgttaccttgaaaaaaaaaaaaaaaaaaaaaaaaaaaaaaaaaaaaaaaaaaaaaa

SEQ ID NO: 11660 - DNA, 513 bp, Canis familiaris
  misc_feature (118)..(119): n comprises a, c, g, or t, or includes no nucleotide
  misc_feature (137)..(138): n comprises a, c, g, or t, or includes no nucleotide
  misc_feature (141)..(141): n comprises a, c, g, or t, or includes no nucleotide
  misc_feature (151)..(151): n comprises a, c, g, or t, or includes no nucleotide
  misc_feature (158)..(158): n comprises a, c, g, or t, or includes no nucleotide
  misc_feature (169)..(170): n comprises a, c, g, or t, or includes no nucleotide
  misc_feature (189)..(189): n comprises a, c, g, or t, or includes no nucleotide
  misc_feature (373)..(373): n comprises a, c, g, or t, or includes no nucleotide
  misc_feature (379)..(379): n comprises a, c, g, or t, or includes no nucleotide
ggcacacaggggacacagcatcacaggtgcggctgctgtggaaggaccctgcgcaacgttggtcttggaaggaccaagacatgcctacccgtctggttcctgcaaagggcactcggcnncccaaagtggggggctanncantccacgtaangggtttngctggttctanncgagggtccttcgagctgngtggccgacagcaacgtggtcctggacacaaccatgcggggtggccgcctgggggtcttttgcttctcccaagagaacatcatctgggccaatctgcgctaccggtgcaactgacaccataccagaggactacgagactcagaggcttctgcaggcctagggatgggggtggggacccattgcntggaanggaatggcaccatcgtggctaccctcactgcaacaaacagggagcttggcacccggctccaagaggtagctgccctagaggggctcagaaaggacaaaataaagtgtgtgtggtggaaaaaaaaaaaaaaaaag

SEQ ID NO: 11661 - DNA, 442 bp, Canis familiaris
aaaagagccgtgaatccagtccacttactgggactgccaccaaactggcccacttgattaggaagtgaccccccactttgttgttggccgttccaatttgaagacttcatttaccctgaacgagccaaggtgaaatccatcaaagaattgggtgaccatgtaaccaacctgcgcaagatgggggctcccgaatctggcatggcagagtatctctttgacaaagcacaccctgggaaaccgtgataatgagagctaagccttaggctgtcttcccatagccgcagggtgacttccctggtcaccgaggcagtgcatgcatgttggggttacctttaccttttctataagttgtaccgaaacatctacttctttcgtttgtatcattccttcaaataaagtaatttggtacccaaaaaaaaaaaaaaaaaaaaaaaaaaaaaaa

SEQ ID NO: 11662 - DNA, 346 bp, Canis familiaris
gtggacttttctccccctcttttctaagaggaccctgaactgggccagactgccaaaaataaatctccggtgttctaattaatttattgtcttccccgtaaagacccttgggtcgaggcagaggcaggaaactaactggtgtgagtcaaacgccccctgagtgactgtccccagcccaggcaagaagatctcccttcaggtgccgggcgcaggaactgcgtgtgtcctacacaatggtgctattctgtgtcaaacacctctgtattttttaaaacatcaattgatattaaaaaccccaaaattattggaaagtaaaaaaaaaaaaaaaaaaaaaaaaaaaaaaaaa

SEQ ID NO: 11663 - DNA, 659 bp, Canis familiaris
ttgttagtattgtacaacttctttacacagaataatacatttgtcattactgaaaatttaggagctatggatgagcaaagtgaaacctctctatgttcattttgagcctacagagtgacataaagagtaaatgggtcaaaacttgattcaaaaaagctcttttcagagtgaatacgcaaggctaggacagacttagccagccttctatctcaacactgtccggtgaaaatcggcaatactgagacactgccggattctcaagtgcctttgggatcatcaaagataggttacataatctgaggtcttgagctggagttcagaatgtatcaaatccattgacagatcaacagtgctacactgaatatggctacacagttaaaggaaagacctcatttcccagttattctggatcagagagtttgcatatcactgtatgaagggagaaagggcgctgctggcagacatgtagttaaggtggcccaggaatcattctgtctggattaactgtcccagggaagtggcagggtgccatttctgtaccaagaggtgaatgtaatttgcatgttgaatgctgtaatcaagaacaaacaactcttgactctaccaattaaaacatcctgttttctctgcctgtaaaaaaaaaaaaaaaaaaaaaaaaa

SEQ ID NO: 11664 - DNA, 569 bp, Canis familiaris
tcagcacaggcgaggaccagcttcatgccagtacctgctggagcaggaagtggcaggctcccggcgtggggcccgagcccaccgagccgacgtgcgtcgtggccgtcatgcatggggacagccgagggcaccgtgccaggcaagcgccctggtcgttgacccggacaagcctttcgcgcaagctcaacccgtttcgggaacaccgtccgtcaacagggtgcgcagcctgagaggcaggggtgcatcgttcctgtcccctgcctgcctgcatccctccctgcctgtgtttcttccttgttcagctccaattcccttctcttcctgatccgttctatttcctgcctctgctctctggcctcctctagcgggagcagtgaagccagcttgcctgggtccagctcctttccacgtggggggcctggggcaaatgacctaacctctctgtgcctcttttatcctcacctggaaaatggagataaccatagtccgcactcatgtataaagtgcttagactcgcacctggcacaaagtaagtgctcagtaaacatcagctctgaaaaaaaaaaaaa

SEQ ID NO: 11665 - DNA, 540 bp, Canis familiaris
ctagccgatgttcggacaacccgttagatctaaatcgacagccaatctgatgctctggctcagccatgcccagatactgcttggtccctaaaccgttttatgttcttccctgttctttcagttccctcttaaaaaatagaagaaacctcactacttatttctcggtgcctggaaggacagaatccattgtgactttctttgttcctttggctttggtagacccttcaggtccaaatttcctccaagataatgcccaaataattatagcagggacttgagattttgcatacatggagtgctaaaaggtgagaagtattccaaaagaattgcaacctctttggttagtgagaacactgtctatctgttcataagggcagtggtggcctattttattagtagctattttgagaaatgtggcagggctcagtgaccttgtaggtttgggtccatatgaaggcagtagtagaagtcactgccctaaacaaaaaaaaaaaaaaaaaaaaatagaaagaaagaaagaaagaaagaaaaaaaaaaaaa

SEQ ID NO: 11666 - DNA, 622 bp, Canis familiaris
tcatttactgtggattggtgacaatattgttaaagccgaattgccctaagacctcagtttttatctcagagcctcatggattgccagcctaaaaatgcaggaaatcaaactgttgtcctgaccttcttaaagcttggaacagggagagttcaactcctggccctagttccctgcaccatgagatcaaaagattgtctccacattggaaagaaattggagggggaggggcgtattcatggaggcagtggctcagctaatcgagtttcctcgagttgtggggaaagtggggctggtttccctccttaatgatgcaccattatgtactggtccacctgttctcatgggtcagttctcagcagccactcagcatccctgcgctcttgccatcttccatccacgatgtgggaagggacccttgttcctaagagcaagtgtcctaagcaacatcatccaaagattgtcctttccatcctcaaatcctgtgagtgggatcactcgtcagcactgtgatgtattattttcaatgaggtgcctttcttaaccgaccaaatgctgccttgtttggcccctcaatcaataaagtatgttaaaaatttgtaaaaaaaaaaaaaaaaaaaaaaaa

SEQ ID NO: 11667 - DNA, 705 bp, Canis familiaris
tacgtctgctgccctcagccattctggggcgatccttgcaccccagctgagctgggggaagaaggtagtagattagcttgggcagacctgttaacatcttcggcttttgctgcctcctggagtgtggagagaatagtcatggcttcccctaattttcacctatccggttacacttgccattttaactgctttcttgcctctcttcctttccgggaagataggcattttggtcggcgtctgtgttgcagaagttttcctctcggtgtaccttggactttttagcctgttgaagagggcttcgtatcacagttttgaaatctggaggatcttgaagcctccaccgtattggtcctggaattaaaaatagaagttttctgggtaggggaggcacttgggggtgttacaggaagagaagcccaaccagtagcacaagagagttttctttctttttgttttccttccatttcttttctttaactttcttttctgagcttgaggctaactccgtaatgtcagtttgttgctctttactcctacttcgggagcggtaccggagggtagatatccagtccatctgcaacctgctgccacggaaaagatgacatttcactgatttaaggattatgggataaagacagaatttcacacgatccgattcagcccttcagaaaatgctttgaatagttatgtgggtaaaaaaaaaaa

SEQ ID NO: 11668 - DNA, 116 bp, Canis familiaris
acttaaagtgttttacatgggttttagtattttactttattaagccaaatctctaaagactcaaattattgagtattatcaaaccattgataaatttttataatggaaaaacaatt

SEQ ID NO: 11669 - DNA, 658 bp, Canis familiaris
acaacagcagcaacagcaaattcaccaatcacacttcaaatccgactcaagacccacccccatcccagcactgtatgccactccaaaaccatggccttcctccagctcctagtaatgcccagaattcagagtcaagacaagacctacgagtgtccgattgtggaaatgcctggcgggggaccgttgctgtgtgacacaaaatggagttcttcctgatggcaggagccagcatcctgggtgaccactgggcatctgcctgaggcccagggggatttgctcccagctcacatgctggccctgattttatgtgtgttttctaccctgatctcagatatcctgtcgagattcccgactccgcctgaagcctgctctgcgtatcgctgagctgggtgctttttttttgggtcccctgcccccaaactttgttctaggggttatttattgaaatgaacgcccatggggctggtcaagggagtaagagggggggtgtccaggccccgtgaaagtcaggcaggggcttcttggttctggggctaagggacacaattctcacaggtttggtgcttggagaccacccccaggggggttgggcagggaatccattaaagatgcttcatttcccaaaaaaaaaaaaaaaaaaaaaaaaaaaaaaaaaaaa

SEQ ID NO: 11670 - DNA, 575 bp, Canis familiaris
ctgcagaaatggagcttcaggctaactacagcgtgacccatgcttcaagaagaaaagcttttcacaaatgttatgattgccggggtgatggcaagaaaccaaactgcacttatttcatatattttgttattaaaaattgcacatgggattggctaaagtgaagcttcctgttacctgagatcgtcttcaatgggaaacagtcattcccagaactataaactccgaagctactcgtagaaaccgagggttttcttttttaaatgtttcttggctagattattcataatgtgagatggttcccaagatcatgtgatcttttttttttttttctctctccctttcccttttttttttttttttttggttggcctttttttttccagactgtgcgaatacttagagaacgtatagcatcttctcattcccatgtggaacaggatgcccacatactgtctaataaattttcaattttttcaaataagtatgaatctagttgattgatgccttttttttcatgacataataaagtattttctttaaaatttaaaaaaaaaaaaaaaaaaaaaaaaaaaaaa

SEQ ID NO: 11671 - DNA, 580 bp, Canis familiaris
  misc_feature (30)..(30): n comprises a, c, g, or t, or includes no nucleotide
atgattgatgtgataaatccatccatttgngcactctgatgccgccatctgggatgacatcttagtaggccctttggacatggcgatggacatcctcttgattgaccctttggatgcgatggtgatatcatttcaatgacatcttctctggcccgttgggcgctgcaatcacttcctttttggtggacttcttggtgtaccagacaccaagttggccaccatcctgcataacatctccttttggcacattgggtgctatgatggccaccatcttggttggctgacataaccagtataccgttgtgcactgtgacagctcccacagccccctgggttggccattgtcatccccgtctctttggtgtgagttgagtgacgggatggaggtgagaatactccttgtttttttctggagcccattcccccctctggtcccggagaaaccagaatggactggctagggtgtggggaacttctactgaagtctggttcttgcctgggaagcgggatactggctgtgtttgaccattaaaggcactgtttctgcctcttaaaaaaaaaaaaaaaaaaaaaaaaaaaa

SEQ ID NO: 11672 - DNA, 609 bp, Canis familiaris
  misc_feature (1)..(1): n comprises a, c, g, or t, or includes no nucleotide
ntccgcccccttgacgcaaatggccggtaggcgtgtacggtgggaggtctatataacccgagctcgtttagtgaaccgtcagatcgcctggagacgccatccacgctgttttgacctccatagaagaccccgggaccgatccagcctccggactttagcctaggccccgggacggattcccatttcaacaccaggaaacagctatgacccttaggcctatttaggtgaccctatagaaccagtttgtaccaaaaagcaggctggtaccggtccggaattcccgggatcctgagacccctcgaaggagtctaaggggtggcagggacccctcgtgaggttacctagccccccgtgcccccgacagacccaccactctcatacacggtgccagcacccgctgcccgcagtcaggcgcccctgcccggtgtcctcagttgcccctcgcccgcggccccccccacagagctgctcccttggggggggggtgctgtttgagagtctttgtgttgcacattaaaactcaaccatttagacctgccaaaaaaaaacacaaaaaaaaaaaaaaaaaaaaaaaaaaaaaaaaaaaaaaaaaaaaaaaaaaaaaaaaaa

SEQ ID NO: 11673 - DNA, 638 bp, Canis familiaris
gtagtcccaggattacattactatttctgacttgaataggtaacacttaagcaactgtatgggaaataaagtagggaaaaaatatgtttacttttcccttgctttagtatccttatcctcctagatgaaattgagggttgatattatatatgtcagtttccctttacatactttatgtgacttattatatgtgtaaacaagcataatattgaagtctattaggggccaatctacctttggaggttgaacattggatttaaataatattattttggagtcataacatctatgcaattattttattctgtccaatagctatttcccttaaatagtttaactagattgtataaaataactttattgccctcacactgagattacacaagcgtctaaggcactaagggggaaagggcgcttttaagagacacccagggaattttaagaaaattccggttcttccaaataaatgtcattttcttctttaaatattgaatatgttttatgaaccatatctttctttgcaaactcgaattacatgtgcttggaattaagttttagtttttttcactgcaccaataatcaacgcctgagttctgatcgaaaaaaaaaaaaaaaaaaaaaaaaaaaaaaaaaaaaaa

SEQ ID NO: 11674 - DNA, 588 bp, Canis familiaris
acttctttaaccccaaagaaaacatctggctcatctttattacggaatgaaaatggcattgatgtggagccagctgaggaggcagttattcaaaaacctcgaagaaagacaaagaaaacccagccagcagaattacaatataccaatgaactaggagtagaagatgaggacataattactgatgagcaaagtggtccagaacaacagtctatattcactgcacccactggcattagccagcctgtaggcaaagtgtttgtggaaaaaacccggcgattccaggctgctgatcgttcagagttgataaagaccacagaaaatatcgaggtgtcaatggacatgaagctttcctggacaaccagagatgttgcactctcagtgaaccgggctttcaggtggctgcttctgcgggacttttcttaaatgttgcatgattttttttaaaagtattgattgctcaatattgttaacaaaattgacaacttaaaatagtcaataggtatattttttaaaactcaatttaattggagttaaatcatctgcctatctgtcataaaaagaaaaggcttgtttttaaaaaaaaaaaaa

SEQ ID NO: 11675 - DNA, 575 bp, Canis familiaris
cattcgacgttgacccgaaatgcctgacacattccttacagaataatgaccgcctacacaccgttatccaggcccaacctccagtagctctgagagaagccactgagagactcttagaatcacagaatagaccttccagaccccttgtttgtaaaagaacctttgtcacatttgataaacactattccccaggaccagcccctggaccaccaccgagcagacgcccaagcccttaccagctctgtgacagaccccagggtatgtgctggggaggccgggacgctgggtatctgtatgtcaatcagtgcaattgttttcttcccctgggttgggggtcaggaggcgagcggcctggtggtgagtctcccagggctgtggagcagactggaggggcccagcccagccggggaggcagcagcctctcacccccgggggaagttgccagcaagaactgatgtgtgacttcctggatgttaatgccattaaaaccaacattgttgcccggccaaacaacaaaaaaaaaaaaaaaaaaaaaaaaaaaaaaaaaaaaaaaaaaaaaaaaaaaaaaaaaaagg

SEQ ID NO: 11676 - DNA, 291 bp, Canis familiaris
  misc_feature (25)..(25): n comprises a, c, g, or t, or includes no nucleotide
ataataccaaaaaatctgcttgttntctatatttcttaagaaagagaaattaaggggtgccctgggtggctcagtgggttgagcatctgccctttccggctcaggtcacaatcctcggagtcctagggtcgagctccacattggcttccctgctcagcagagagccaagtttctccttctccttctgccgctccccctggtgtgtgcgcactctttctctctgtcaaataaatcgaaagaaagcaacaaagagagagagagagagaaagagagagagagagagagagaaag

SEQ ID NO: 11677 - DNA, 562 bp, Canis familiaris
atcccagagaccaaggcaagagaaggaagccagaggctggttgggcccggggctgaagaagaaagctgccgggcaaaagggggaatggtccccaactaagaggccgccctgtcctttcggagctgggggttaacactgtcaccaccttggtggaaaaccagaaggctcagctggtagtgatagctcacgacgtggatcccattgagctggttgtcttcctgcctgccctgtgtcgtaagatgggggttccttactgcattatcaaggggaaggccaggctggggcgtctggtccacaggaagacctgcaccactgtcgccttcacacaggttaactcggaagacaagggagctctggctaagctggtagaagccatccggaccaattacaatgacagatacgatgagatccgccgccactggggaggcaatgtcctgggtccgaagtcagtggctcgcatcgccaagctggaaaaagccaaggctaaagaactggccaccaagctgggctaagtggacgctcctgaattttctgtacataaaagtaataaaaggttctcttt

SEQ ID NO: 11678 - DNA, 628 bp, Canis familiaris
ctctggacagttgccactgtggtgtgaggccaagctgatgaacgcagaaggggagttgtcagtgagtgagccctaccccatccccagcccgctgtccattcgttccctcctgtcccgttcccggctgtcaccatcgccgagccccatcccatctacctgacagatggacagttcgtgctgcagcgcctggcagacagtgccattgacctctacgccatggtggtagttctgtccagggcctccagatccctgagcgagggccacacctacagcccagcatgagagagatgcgtttgtgacaactggtgtattgaggccgcaacccgggttccgggaggaaccattggccccttctgcagtctgaacccgcagcaacaggagctcttccggaacttcaaaagcatctctaaggccttggtagaccgaggtggcatggtcaccagcaaccccctcggcttctgagtgctccccgctggggcctggccaggcctgtgccttctctctccagcccagcctggccccgattctgccttaaagaggccgtggccccggggcgctgctgctctcggaggcccacgttacagcctccttaagtaaaggttctcacaagccaaaaaagaaaaaaaaa

SEQ ID NO: 11679 - DNA, 651 bp, Canis familiaris
cccctcttcgtgttctgcctatggcgtaggagatctgatcccttacaatgattaccagcactgaagtgggactcctccactctgattacattggcctgggcaattggctgcggatacagaactgtcctgttgaccaccgccacccagccccctcccctgaccatgggcactccgcttccctgcctcacctgcttccccacctgcccactgtcacatctcttgccctccctgctcccaacacatacactgatagtcctggaacttaaccagagcacaagtgtcccctgcagtagaaactgactgctctgtatcagcctggatataggtatatcactgtgtactgagaatctagccccaactttctacacgaaggctcagtaatagttgtttaaatgtgccttctcctctttcctgtccccacacgagatggaggggcatctttcttcctgacccccctactctccattctccttggatgccctcccttcccgatcgtcccctggtgatgggttcctaacaagagatcagttttgaaaatttatttttctgttataattctgctgagattcagggttccttttgtaaataaaacacataccctttaaaaaaaaaaaaaaaaaaaaaaaaaaaaaaaaaaaaaaaaaaaaaaaa

SEQ ID NO: 11680 - DNA, 531 bp, Canis familiaris
ccaaacccggagaatctaggatttcctcatccgagaaggatacatcagctaaagcctaaggctctgagggcttgggatcagaaatcacaagtttggaatgtgctgggcccaacgacagcatgggcattctggagaatttcatttctgagctgaattcttgttgtaaaaagaggaaggacacaagggaaccctaagttgtattaacatctactttcttctccaccccactttaaaacacttctgttgttggtgttgtgcagcacgttatgtgctagataagctattattaaaagtgaatgggcccttattctcaacacctcttgtaactaaacaagacccatagtacctcacatcagagtgttggtagaaatagaacttgaaccaatctttagtcctgggagtccggctcacatctttgtacttgggaggctggttttctcattatatgttttgccttcaaacgttacggaaagatctaaaataaagaaaagggttatagagcaaaaaaaaaaaaaaaaaaaaaaaaaaaaa

SEQ ID NO: 11681 - DNA, 619 bp, Canis familiaris
acaaaggccattctgttggcggagtctggggctcgggtggggccattgctgagcctcacccatatcccccgcccccaacgtcaccagacactgaacaggcccagttcactcctttattttctcagactttcctttgtacccatacttttccttgtccccaactaccctgctctggtctgtattcttgggtccaggcagccccccaagagcatagaccaggactcaccagaccctcagcccctgggggcttctagggagggcactgccctcccccacacctctgctgttggccccccacaatgtccagtggtggctggagtgaccctggggctctctgttcagggctgggcttggtgttgcccttcctccctctctgtccctgctttctttctctatgggacagagaagaggaaggtccaagggggtggggataaggatggatggtagtcttagggctacgaaatccttggtttgggggagagataaacttggaagagaggcttgcttgaagtgagaggggggtagacagctctgcacattcaaaaggctaaattggtggcagatccctttctcctttgtaccaaataaaagactaaaccaaaaaaaaaaaaaaaaaaaa

SEQ ID NO: 11682 - DNA, 630 bp, Canis familiaris
gatattccacgatatttctttaagatttaaaaggacgcatatcaagatgaagaaacaacccagaggctacggcctccgctgccatcgggccatcatcaccatctgccggctcattggcatcaaagacatgtatgccaaggtttctgggtctgtcaacatgctcaacctcacacggggcctcttccatgggctctcccaccaggaacccatcaacaactggctgataagaagagtctacatgtcgtagaattccgggaagaatgtggccctctgcccatcgtggttgcctccccccagggagccttcgagaaaggacgccaagcagacgtagaggatggaggttccagaccatcatacttgatctggtgagaagtagatggaggtgctgcaggcaggagtagatagacagctgcctcccagtgtgcggtcaaatgtgaaagagagctgccacaccgtgagcttcccctgcccttgtactgctccagtagtagctggtgctgtccagcacctggagagactcagcccctcacattttggaatatcactctcttttaaaggaaaggctaaccttccttatttacaaataataaataactatagctttaaaaaaaaaaaaaaaaaaaaaaaaaa

SEQ ID NO: 11683 - DNA, 648 bp, Canis familiaris
cgcaaaaagccaagccctgttgcggggcccgtgtcagggccccattgagacccggcattattggcggtgcttagagacggtggagccctgccaaagggcgttgcggttaaaccacttaaaggaaggacttgacacctcgcgggccccactcggtacactacgtttcggctggcacgacccaccacgcctctacctgtgagtagtccctgggaggcacacgggcttgcggccacgcgccgacaccaccacgaggagcacagagaggagagagagcgctctggcgcacaagcggggctctggctctgcgccgcccacaggtgtggaacacatggagagagagccagccaaggagagccagggccctggtttgagaccctgggttccaattcaattccaacgaaccaatctgaagaaggcttatcgggccctggaggaggcgctatcacgcaggaaatcaagaaggctcagaggaccagctgctcctgagaagaaatgctggtggtgtcctccctggtgggggtgctgcccgcgtctcctgctcacgctgccacggctggtggaccctggtctctccccatctcctgggagctggggtgccctccaataaaaaactgctgggttaaaaaaaaaaaaaaaaaaaaaaaaaaa

SEQ ID NO: 11684 - DNA, 545 bp, Canis familiaris
agcctgggtccccatgccttccagctctgctcctggcctagcccttagcccacagcccgtgggtcagcagccgagcttccttctaacatcgtcattctttgtttctccctttcttttgctgaactccttgccccccagaaggcaatgttgagctgaaagcgtgcgtcccagtgtctcacacctgtgctctttaaacacagagacctgccacgacgccctctcgcccagctatgcccaggctgaagtcctcaccctctcttaagcggcaccaacgtgagagaggcaggcagacagacagaaagccacaaggcttagggaaactctgcaaccctggcaagaatcattcagagatccttgtttgcacaggactgacggaaaacctcccgtgtgaccctccgggcccagagccatctgggtctgatgttctgttctgttgtgccctgaagagatatatatgcacatatgatatctatattcatacatgctaaaaaaaaaaaaaaaaaaaaaaaaaaaaaaaaaaaaaaaaaagaaaaaaaaaaaaaaaa

SEQ ID NO: 11685 - DNA, 567 bp, Canis familiaris
aaattggatagtataaataagcataagggagtgagccagcttgttatgggcaccctatagtttgtatagttgcttaaatctagaacgttgagaattgttatatttgcttccttatggcagaaactacaagccaccatatatgcacagactacacagtgagttgggttggctctcccacagccgttgaggtgtgttacaagagtcccggccatgatcatcttcctcctgtcattttgaaatggtttgtttttttgtttttttgctttttgtttttgtacattttggctacagtattggtggtagaatatactataatatggatcatctctacttctgtatttatttatttattgctagacctcaaccacagtcttcttcatccccttccacctctttgcctgtaggatgtactgtatgtagtcatgcactttgtattaatatattagaaatctacaaatctgttttgtactttttatactgttggatacttataatcaaaacttttacttagggtattgaataaatttagtcttactagaaaataaaaaaaaaaaaaaaaaaaaaaaa

SEQ ID NO: 11686 - DNA, 511 bp, Canis familiaris
aatgtgggtgaattagggaaggtgggtaggaagcatgcaggtggctaaggctggagtccaagctatttgggggaagtagaagcatgaggaggcttctcctcagccattcctacattatttcctccctgtgcaacctaagatcaaagcttgcatgtccccatgcctgcctcccctcccggaatggccattttgcagttgcatccctaattcatcagtttgggttctgggatggacatggataggttgccttccatccatccacctcctggggccacagaggcaggcaggaggtcccggggctcttgccccattaccttccaaggggcttggggcgtcgggccgaggctttggctgctctcttcctcaactttctgtagaaggccgtgttgaccctcttctcgccggggaagcccagcatcccgcagaccacgtggctgttctgggcgctccagccgttgtcacacacttgcgaccagccgtcgggaagccttacttccaccagtccctcggt

SEQ ID NO: 11687 - DNA, 658 bp, Canis familiaris
gcacatacgttgccagcttgctacgcgtcgtgtgcctgacaggtaagtcaaacttcttaggcatgtgattaagcagtgctttccctccgtcacaacgcaggcttagtttcattgactctccctataagagcttgttctgttttccgtcattctggcataccaccctttccaatcctgccctagctgaagcccagctcagatgcctctttcaggaaatcttccatgattacccactagtgcgtactctccctgcttcaggagtcagtggtcactatacttggttaggctacctgtcacatactgcaggtgtttgtttaaggatcttagctctctggtggattataattgctgtgatagcagggaccatcatagaattttggtttgttaagtttgtattcagtatggtgcttggaagtacttttttttctcttgtttctggtgttggaagtacttacttggaacacaataaattatagaacaagccttctcatataacatgtgtcagagcatccttagtttgagaaacccaggtgaaatgaggttctagtgtaattttttaggccttttttcagtcttctgtcacatacatgattggttagaaaggtaacaccacaggggctagagcagctttggctatgattgagaatggagaaaaaaa

SEQ ID NO: 11688 - DNA, 605 bp, Canis familiaris
acaatgtctctgaggtgtgcttgaacaaatgaattattggaaatgctggtgctcccggactcgagggccgactgggaatagagagccgctgcggaccctgctaaggactaacacgtgggcagtgttgttcacaggcctgggcctggagaacgaaatctctgcactcctgcccccttcttcttcctccatttctgagggagcctgggggggaccgtcactttttgtgcgtgctgcattcaaggagatcagaagaacttcttttttctttattttgcacaagaaagttttaatattttgttcttaactgcaatatactctttccttatccccaagagacgtagtgcctggagcttcttcccatctttatgaaaaacagtttttgacgtgttggacttgccaggggaggctttaaaaatttttgttatttctttttttaagaaaagtgcagttgtagaacatgatgaaggagtcctacggtgggcccttctgcgcagctgcgttacgggcttgttttggggtgtgtgcggggggagatgatgcagacaaaattttctgttttataaagctcttagctcacacatcaaaaaaaaaaaaaaaaaaaaaaa

SEQ ID NO: 11689 - DNA, 585 bp, Canis familiaris
actttccgaaatgtcgtgacgaagtccgccccattgacgcaaatggggcggtaggcgtgtacggtgggaggtctatataagcagagctcgtttagtgaccgtcaggtcgcctggagacgccatccagcgctgttttgacctcctgtagtagacgcccggggccgatccggcctccgggctttagcgctaggccgcgggagcggtatgacgagttgtcagcaccaggagagcagcgtagtgaccattaggcgtagtttaggtgacagctatgaggagcaagtttgtagccggaatagcaggctggtacgcggtccggaattcccgggatgggcggggttccccgccgggcttgctgagggcctctgctgcctgtgcgcatgcccgcggccgaggcggaagcccagcgtgtgggccctttgcgcgtgcgcggggagcaggtgggagagcgggagctgcgggcctccgccgaggggcggggctgaggaccggaagtgtatgagctcaataaacgcgctgtgcacctgccaaaaaaaaaaaaaaaaaaaaaaaaaaaaaaaaaaaaaaaaaaaaaaaaaaaaaaaaaaa

SEQ ID NO: 11690 - DNA, 580 bp, Canis familiaris
cccagaatagaggcttaaaaatgctttgaaggccagacagttcttcttcatgagatgagattgcttcaaagaggataaatctctgggagaaatcatttgggaaattccaccaagaggtagctcatttagttccccagaactagagctgagtatctgatagttttgtagaattttctgggatatatgggggaaagggctattatcaagtgagctttgtctaatatccccctgaggatattgctagagcccaagtgaagagtaaatgaagtttcactctgatgcaagcttttcccattgcccaatatatcaaaaaggaagcttctggaattgtgtatgggtattttatccctaggggaaaatcaaggatcttggtacccctaattctttatggaaatgtttcagattattttaattttattacaagtattattagagtagtggttctgctctaagatttcaaaagtgcttttagaatcataaatgtttctctgactccacatatattgttattttggtggagaaaaaaatagtatattctacatgacaaatattaaagatattaactaagaaaaaaaaaaaa

SEQ ID NO: 11691 - DNA, 659 bp, Canis familiaris
cctgctcgtgtttgaaatgtccacaccatctgagacggtggggtactgcttatcctctccattttgcggagcaagcaatgcaggcacagagaagtaactgtaagagatgtgagcactgtggaggcggcagggaggggggcaggttgagtgcctggtgtcctgcccagaagaggacagaggacattcaacaagtaggacctcaacacacacagaaagatcgcgcttatccagcccaccccatggaggtgccgcttgggtcaacagggtcctagctctgccctcaggttcaccttgaggaaggaagtctctctgacccttaaggattcaatttaaaaagagggggaggggagaagcctgctctccaggaagcccctcccacaggtacctgggccccaaggagttcaagaggtccttgcagaaggtcctcctcctcctcttagctccctgagcctgctgggctcccccctgcagggcagacaggccgaggggcagctggcatcccacccgcacagggtccccggacggtcgggacacagtgagctacggtgaaacgtcaacggtagacctgggtgggaggtctggaaggatctgccgccaaattcttttaactttgctggacactggagcatttttcgtggtgcagcgctggagggagagtc

SEQ ID NO: 11692 - DNA, 626 bp, Canis familiaris
  misc_feature (1)..(1): n comprises a, c, g, or t, or includes no nucleotide
  misc_feature (98)..(98): n comprises a, c, g, or t, or includes no nucleotide
ngggctttgaaagaactttgccaaatattttctccccccatctcatgaggagaggggaaccatgctgagaaactgattgaagctgcagaaccaccganggtggtcgaatcttccttcaggatatttaagcaaccagaccgtgacgattgggagaatgggctgaatgcaatggagtgtgcattacacttggaaaagagcgtgaatcagtcactactggaactgcaccaactggccactgatcaaatgacccccacttgtgtgacttcattgagactcattatctgaacgagcaggtgaaatccatcaaagaattgggtgaccatgtaaccaacctgcgcaagatgggggctcccgaatctggcatggcagagtatctctttgacaagcacaccctgggacacagtgatagtgagagctaagccttaggcatgtcttcccatagccgacagggtgacttaccctggtcaccgaggcagtgcatgcatgttggggttacctttaccttttctataagttgtaccgaaacatctacttctttcgctttgtatcattccgttcaaaataaagtaatttggtaccccaacaaaaaaataaaataaaaaaaaaaatataaaaaaaaaaaaaaa

SEQ ID NO: 11693 - DNA, 567 bp, Canis familiaris
tgacacatctgaacatgtgttagggagtcaggacctgaacttttgtgtttcttttaaattgaatgtttcccttaaaggttaaacattttctgaagccatatttaagaaagattttaacatgttaattttggaagacttttgatgttgtgtatacaaatagcagaaataatgaatagttcacagtccttttaaggagaaaatctaaaatgaaaagtggtatgtacagaacctatataaatgaccacgttaatgcttaagcgtggaagtagtcctatgatttgtcattctcaagatatttaatatcaactgcattatgtattatgtgtgctttaatcacgtaaaacaacagaggattatatagactatgattgagttactttgctatgtatgaggatgagggggatttaatagcctcataaaagttgatttggtttaaagcaaagttttatgaatctgtaactagaatttgattttaatcccaattatgttccatataaccttttccaagagcaacctttcccaagagcaaccaataaattgaaactcttctctgtgaaaaaaaaaaaa

SEQ ID NO: 11694 - DNA, 624 bp, Canis familiaris
  misc_feature (131)..(131): n comprises a, c, g, or t, or includes no nucleotide
gaaaccagatggagcagacatactggcaggcgaatcccttcaggccgttagctgaacccggcattcagctcaagctgttgaaagtcctccacaggccccggggagcactgcgggaatgcactctggcacanccaagggggacacaagcaatcacaaggtgcggctgctgttgggaatggaccccccggcaacgttggtttggaaggacaagacatcctaccgctggtttcctgcagcaatcggccccaaagtgggctacatcagagtgcggttctaccgaggggtcctgagctggtggccgacagcaacgtggtcctggacacaaccatgcggggtgcccgcctgggggtcttttgcttctcccaagagaacatcatctgggccaatctgcgctaccggtgcaatgacaccataccagaggactacgagactcagaggcttctgcaggcctagggatgggggtggggacccattgctggaagatggcaccatcgtggctaccctcactgcaacaaacagggagcttggcacccggctccaagaggtagctgccctagaggggctcagaaaggacaaaataaagtgtgtgtggtggaaaaaaaaaaaaaaaaaaaaaaaaaaaaa

SEQ ID NO: 11695 - DNA, 610 bp, Canis familiaris
tttcctgtttcccgtattaagtatcttaccaacgtgatacataggatacatgtggcttttatctattaattggaacagttttactttggtcttagaaaaccactgttaccagggatccaggaatgttccaaaattggttactggtcaccgaagacctttgtgttagggcatgatcggatcgggcagccaaactacaccttgatctgaaagctggcttttgctttttgtttttttaaattggcttttgcttcttgaaatgtgtacatctgaggtagtactactcaatttggaagcgtgtactaacgtgacagagccacacctggccaccttcaccacggaagatgcggtaccagtgcacaactgcagtgacataacgactccctgttttgcatcacccatctgaaaagaccccttcaaagatgcgatacataaaatctcattacaaatcagcgctaataggtgaacatttgcagttgatgatggggactgctgaacttgaacactaattaaaggagatgtcatcctcgactcccaaagaaagacgtattattaaagaaaaattgctcaaaaaaaaaaaaaaaaaaaaaaaaaaaaaaaaaaaaaaaaaaaa

SEQ ID NO: 11696 - DNA, 540 bp, Canis familiaris
gaaagtgacaaaggttatctttttacacttccatgaacatcccaatgaacatgtcagttacataccaaccttaaaaccactccaagtccagatgaatttgatgaatttgggactacaccagatgaaagctcagtccttggtttcaggagcctgagagcctgtgactggttgaaagtgtaaatccacatcccctctagtgaaggaatcatgaagagtcctgttccccttcagagttggtgagaagtacatgtttggaaggtacataatttttcctctaacgcagggtagtaggaaacatgttttacttagtcttcaggctagctatacacaaagccttttcctgcataaaaggcatagagaaggaaaataaggcagggtgtttttgcaaattgaagatatttcttgggtactcatcatataaggtcttaaacaagtaaagcatcattttgagcctcagtaaatcagggaaggaatttggatcttgacatcacatcagaatttgcacgagtggacaggtgagagtaaacaaagaccaaaaaa

SEQ ID NO: 11697 - DNA, 575 bp, Canis familiaris
aaattgtcgcgatttcacaagttctggtggctctaatactcgattccaacaacaccacgacaacaaataacgggggggaaaatttagatcttcacctagagaaaggtttcccaaatgcttagagctacctgaatattagtatattaattatgtactccagaactgttcactttgaaacatcttccatatcttttaactttttactgcattctttaattctaagacagcaaagcaatacatataaaagagcttaagaaaagttgaaaaaaaaaagccccacacataccaaataaagagacttgttattataagctaaaatctacaagtgctttatcctttcaataccagaagaaggatgagcagaatgggttagtgagaaggaagtatcaaaaagacctagggaggggtacctggatggctcaattgatgaagtgcctgccttcagctccagtcatgatctcaggatcctgggattgggccccacattgggctccctgctcggctgggagcctgcttttccctctctctctgccactcatgtttgctcgtattctctctctctcaaataattaaat

SEQ ID NO: 11698 - DNA, 535 bp, Canis familiaris
cattcgggctgatcatgattttgtagtaacacggaagacttcatgaaagcaggtcagaaaagtggctgattctaagagctagagtcttaattggactacccaacctgggaaattactgggagttttttatgcttgcatgacagatactggcttaaatgttaaaataagtttaaggaaataatgtatgtattggtaatgatctcctttgagaacttatgactaaaataagtatggataccttaaattagtgattcagtgattctacttctaagattgattaagaatttgtatgtttgttaatgttgcatttattgcagccaaagttatgagtatgttgaagcttttcgtatttgctgtgtgagcacttttgtaaaacattgaaagtagtttgaaatagtacaagagagcatttcttatgacttattttatatcatttgttttcttcatcctaaaagttgaataaaatgtttgattcagttctcctaaaaaaaaaaaaaaaaaaaaaaaaaaaaaaaaaaaaaaaaaaaaaaaaaaa

SEQ ID NO: 11699 - DNA, 571 bp, Canis familiaris
ctttgtcccccacgagttataatacataagccggatatgcagtttaaataatgtgcctaccataaaaaatattttgcccgcccttttcagaattcttttttgaaggtttctgttgatgttaactgagctattgcagatattttaatttccctaaacgtaaaatttggggtaaatatatatatatattcttgacaaataatgtgtgtgtgtgtgtgtatatataatatatatgatatatacacatatatatgtcacaccattcagtataagcttttgtttaattttcagaagggatcccaattaaaccagtatccactcttctgtagttcgtagggtgttaggtcctttaacgtaaagtccaacttcaaattccatctagctctgtgttaatccccgttattactggtaaagcttcatttgaatatgtaaattcagtttaggctatgtaaaatttttgctaatgtcatcattctgaaaaaaataaatttaccaatacattccaaattacccttgtaaaaaaaaaaaaaaaaaaaaaaaaaaaaaaaaaaaaaaaaaaaaaaaaaaaaaaaaa

SEQ ID NO: 11700 - DNA, 563 bp, Canis familiaris
gaaagatcagatatgagagccctatgaatacacaagccacagatctccccacgaattccatatcccggaaagagcaagaagaaagcttaggcagccctgctcaacaatgtccacttgacgttcagatagccggagacgggaccgaagacccatccttacagctttaaggatgagaatggcaaaactgggaaaaaaagttatctgagaggtgtatcatctacctaaacatcctttggagaagaaactaagaaacatttgccaccttctcttctgggtattttgtttcttttttcctgagactccagaaattataattatagccatattaagccatgtgaataagcagtactcattatttgtggggaaaaaatccccaaaaagctagggagaacaaatgcttaacttttccagttacttgacacaattcagtggtgggggagaaaccagcgtatttttattgtattgataccaaagcatttctaataagagtgtgttaaatttaaaaataaagttatttaaaatagcctgaaaaaaaaaaaaaaaaaaaaaaaaaaaaaaaaaaa

SEQ ID NO: 11701 - DNA, 598 bp, Canis familiaris
cacaaatgatgaacagaaggacgtatgaatggatttatcgatcagattgatggaataggttcattgtggaaacacgagaagctcctgtcaaccatgggacaaaacagatccagtcactttgtttccaagtggataaccctttggagaaaaattagtcaagacagccaccaagaaatggacaagcacaagccaagggaagcaacaagatgggctccagtggatcccttaccaaaattcttgtgccacactaacatcttttaccaattttgtacagatttaattttcacctgtctcctccaaagcatttgcatcatgacccttacatacttcaatcccttttatgctggatcccatttaaagaagacattattagaacaggaagtgcaagcatttgaaaatatgtagttctcgtgtattcagggtctctgtgtatcaagctaactcaaacgttttgaaggctttttctttaaacagagtaagtgaaatatctgtggctaaaaagtttgggtttgtgataactttgtagtcatgtaaaacttaaagtgctttgtgcctctccaatgtggtaattctaataaatggagaagtgagccaaaaa

SEQ ID NO: 11702 - DNA, 659 bp, Canis familiaris
tgtgaacctaaaatatttcaatatacatttctggatacattcttatttcttaaatttcatatggcacatgtgtcagtgccatttcttttctaggagcttaccttcagctatggaaacaacaagctcttttattgactacacataaaaaattacatgccaagctatgaatagaaaattagcatttgaatctcaatttaaaaattctttttaaaaatttgctgaaagagaaaaatactttattttgtataatctgaaaaaagactcaagcactcaagtctcttttccgtttatagaatgttactgtaagtttttccctatatttgaaaacgtcacttcagacttgttttaaattcagttgaaagtaatggaagatttgaatgtattatttatataaggccattttgtaatgtcaattaaaaagtatagaaaataatgttttaaatgtatcaagtttatttttattcagctctcaaatcatacactttatataaaattggttccattttttaatgaaccagaataaaggattgatggacaagccaatagaaaaaaaccttgattattgataaattaatgagtgcttttaataatattagattgcccaactgtatttctttttttagttgggttttatagactgctaagtgtgtttggtttaa

SEQ ID NO: 11703 - DNA, 609 bp, Canis familiaris
gcaaggtcccgggctggggaagccccttgcgtacctcccaagccagagaaatcctcagggtcagaaggatcatcacccaactggctacaagccctgaagctgtagaagaagaaggtctgagaagtcctcgaggtccttccatctggcagtctcaggcaatgcccattcctgtggggtccccggcgaggagacggctggagccccaccaggccccaggctgcagcctctgtcccctccacgtctgaggagcgtctggggaggcacatttatgcactttgtatccccctgcccttcctgactctccctcactccctcctgaccagattcaggcattagtggttgaaggtttggtccctcctccctcgctctcgacacccccctctctgcttcctcctccagcctcccccgggttttcttttgatatcaatttatagcattttttataaaagcctttgatttttgtaacgggcggagccctgcccccgcccaggcctccctccgtcctgccaggtgtcccacagagaccaataacattttgccacttgaaacaataaagttttttgggaattggtaaaaaaaaaaaaaaaaaaaaaaaaaaaaaaaaaaaaa

SEQ ID NO: 11704 - DNA, 607 bp, Canis familiaris
  misc_feature (148)..(148): n comprises a, c, g, or t, or includes no nucleotide
tctatctctaaggacctaaaagcactttatgtagtttttaattaatcttaagatctggaaaaggtgactaagaggtctgtttccccatatccagttgtggaaataagtgcatagatgtaaattggagttttaaggaacccaattcccnatttactaggtgtgactgctgaattatagaggagggtcttagttgaaactttggttcggggctgtcagggcttagggagcccaagtgctttagggaagggtgggtggttttctagggagaggaggcacgtgttctaagtgctgactagttgcatagttcaggcaagtcctccaaagtggaaagggaggggctgcttggaaactggctctcagcaacttgtcttatgcttctctcagggaaaaacatgcaatcctctagtgtccatgtacactctatttggggtaaacaccttggttctggttagacagctaatgctgttgacagctgtgccaggaagagttaggaccaactacaaattaatgtgggctgtaaaatgtagtatgtttccctaacttcctgttttttcctgagaagaaaataataaatcttttattcaaataaaaaaaaaaaaaaaaaaaa

SEQ ID NO: 11705 - DNA, 660 bp, Canis familiaris
aggacagcccttgctatctgttgctgtgacccactgtaaaaagtttttataggagactgaaagtcttgatattgtgaagcagaggttattttgtcaaaagattaaaaggattttggtggcacctggtttcatgttgtgtgtgtataggtgaggttgagcagggggacgatgatgttagtatggtaactgtaacaaagatacttttctggtaacatttaaagtactttatattttacatgatagcatgtttcatttttattaaaagctaccaaaggaattttgatcatggtataagtgtttaaagcaatattttctgggatataccaagtttatataatttaattttgtgctaaattattaaaaacttctccctttttgaaacatgcgtgtttaaaataggacatctttggggtttccatgtgaaaatcctcacccttgaagtatcactatttctatatttgtaaattttcagttgtcaattctataatatgtggtctataaaagaccaaatagatttctacttcttaaattttacattcattatttctagagattgttaatcttgtaatttaatgtagacttactctgaataaaattagtttaattggccttaaaattacattaataaaacttgtggtatacaaaaaaaaaaaaaaaaaa

SEQ ID NO: 11706 - DNA, 674 bp, Canis familiaris
gctgcgctttcagagaccgaggggagacagcgcaccaacagtggcggagacccgacaatcaagctcttgggaaaggagcactgatgatgttcagatcaatgacattctttgcaggactacatgcagtgaaggagaagtatgccaagtacctgccccacagtgcaggccgctatgcagccaagcgcttccgtaaggcacagtgccccattgtggagcgcctgaccaactcaatgatgatgcatggccgtaacaatggcaagaagctcatgactgtgcgcattgtcaagcatgccttcgagatcatccatctgctcactggtgagaaccccctgcaggtcctggtgaatgccattattaacagtggtccccgggaagactcaacccgcattgggcgagctggaacagtgaggcgtcaggctgtcgatgtgtcccccctacgccgtgtgaatcaggccatttggctgctgtgcacaggtgcccgtgaggccgccttccggaacatcaagactattgctgagtgcctagcagatgagctcatcaatgcagccaagggctcttccaattcctatgctatcaagaagaaggatgagctggaacgtgtggccaagtctaaccgttgatcacctggctgtggcttcaataaacctgtctgcccttggggcagcctcaaaaaa

SEQ ID NO: 11707 - DNA, 578 bp, Canis familiaris
gtctgcccccgcccgcctggccacaggattgatcgattccgcgtcacgttctctcaccgcacacggcaatgcaccctggattcccattccctggtaggcggctgtagggggcgcccctagtgcgtttgcttggggtctcgtgttctggtccattcagtggggacgctgaggccacgctgacgctggcccccggcacactggccgaagccccccaaccccgaggtcccgcaggctggctttgtgccaggctccaggcccacccggtgggccccgtgagccgcgggcgtggacctcaggccctgtctgcccggccgggcagtgccgggggtcagccacggtggtccaggtccccgcctgccccctgtacatactgcacgccctgccccacccggcctctgagtgagcactgtggccagatggtgtctggagggcgcatgcccctcccccgtccccccacccgtgtttccaccccagtgatcctcctggaaactcctccccaaagccatggaaggtgtgccctcctcacaccataccctcaaaggatttttttaaataaaggaaagaaacataaaaaaaaa

SEQ ID NO: 11708 - DNA, 591 bp, Canis familiaris
cgaggtcaaaacctgctccgaggtggacgagccgtagctccccgaatgggcttaagaagaggtggtgttcgaggtcgtggaggtcctgggagagggggcctagggcgtggagctatgggtcgtggcggaatcggtggtagaggtcggggtatgataggtcggggaagagggggctttggaggccgaggccgaggccgtggacgagggagaggtgccctcactcgccctgtgctgaccaaggagcagctggacaaccagttggatgcatacatgtcgaaaaccaaaggacacctggatgccgagttggatgcctacatggcacaaacagatccagaaaccaatgattgaaacctgtccaccctactgtgagagactcttattcaaaagtcaccacatctgtaaataaccttgagataacagatggagaagaaacctgatcgatgctggaaggacctatcacaataggctatggacttatttgccaccagtttgtgcatttagtgtgttccttttactttttttgatactgtgttgtatgaaacctttctttcctctgaaaaaaaaaaaaaaaaaaaaaaaaaaaaaaaaaaa

SEQ ID NO: 11709 - DNA, 592 bp, Canis familiaris
  misc_feature (311)..(311): n comprises a, c, g, or t, or includes no nucleotide
ggtgtcaaggataaagctccagctgcttaaagcctggttgtgtccaatcccatgaacaattaaacacttcgggaaccctgctgttttggctggccggccacccagcctcaccaggcctccggcaccctggcacacagggtcctgggtgctcagcccataccttcgttcattgaaggggaaggtgagacccctaagcacggttccttcccgcccagaaaagcttcttgatgcccctgctgaagaacacgtgttagttcagtttatagttcattactgttccagctgctgaaatgcccaagccccagctcccncaggagaccgggagtgagcacatgcatctcaacaggtctcaaccgccttattttgctggttactgaatttgagaaaatcttttttgccctgttgttcatccatttgtagaaattttcagatctctattagccacttactggagacctgaaggtattttcccttataagatggactttctcaaaatccgaggactgctcgcttggtatactttaaatgttaatgtttaatttttaaattttatttaagaggattaaagccctactatgtttaaaaaaaaaaa

SEQ ID NO: 11710 - DNA, 624 bp, Canis familiaris
cttgaaagcaagccacgtgcaagggtcctgaaatggagtggctccagcccccaccactacaaatgctgagtttgccaaggccttggtcctgcctggctgccagccttcattcctctccccggcatgggtggtacaagctgtctttgggcgagagcgtgccatcatgctgctggagggccagaaggtggtcccacggaagacactcgcctctggctaccggtattccttcccagagttgggggctgctttgaaggaagtcgtagcctaagtgggaggctcctggcagggcctgcagcctgtccttctacagaggcttgctggttacagactgaataggttcaggtactcctctgagacctgaaactatctggttcttaggggttcctcaccctgccctcctcctcattgctctgttgctccaccttatttaactgattgtccactgtctcaaggttgcagtctcctcaaattgggtccttaacctcttgactccttttaaaagaatttccaagtttggtttcccttccctacatgtcccattactatcccagttatcctttgtgttgtgtagaaaatgttctgcgactgagacaataaagataaattatctcaaaaaaaaaaaaa

SEQ ID NO: 11711 - DNA, 634 bp, Canis familiaris
atcccttcgggctccctccccaggtgacctccggagatggttcgctactcgctgggacccagaaaaccttacaaatcatgcaagtcgagaggttcaaatcttcgtgttcactttaagaacacacgtgaaactgcccaggccatcaagggtatgcatattcgaaaagccaccaagtatctgaaagatgtcactttgcagaagcagtgtgtcccattccgtcgctacaatggtggagttggtaggtgtgcgcaggccaaacagtggggctggacacagggtcggtggcccaagaagagtgctgagtttttactgcacatgcttaaaaatgcggagagtaatgctgaacttaagggtttagatgtagattctctggtcattgagcacatccaggtgaataaagcccccaagatgcgacgtagaacctacagggctcatggccggattaatccatacatgagctctccctgccacattgagatgattcttactgaaaaagagcagattgttcctaaaccagaagaggaggttgcacagaagaaaaagatatcccagaagaaactgaagaaacaaaaacttatggcccgggagtaaattctgcatagaataaatgcaaataaaaataaaaaaaaaaaaa

SEQ ID NO: 11712 - DNA, 612 bp, Canis familiaris
ctttcagttttaagagtgttttgtctaaatctatttagagcttcatcaccatggcaaatatatatgtcccttaaacacctggtaaaccatatatactaggagtgcaccattttaatcttttactagttatttgtgagacttgctgtgtaagtttaataaaatacattggtgaaatacattgtttgcaggaagaaatttctgagttacagctcaggaaaagcctactgaatttacgttgtaagccattacttaacacagtataaagatgaaaaggcaacaaaaataattcatactccttcagcccctcattgcaacaaagcccttaactgggagaaccttattcccctctttcctcttccttctccgattcccacttattgtcaccttgtaatattcagagagcacttggattatgggtctgaatagagaaatgctttcagataatcattagcccacataccagtaagttatactcaaagatgggatggagttgtaaagtgcttttataatacaatattattgttaaaggcaagggttgactctttgttttattttgacatggcatgtcctaaaataaatatcaattcaatatggaaaaaaaaaaaaaaaaaa

SEQ ID NO: 11713 - DNA, 645 bp, Canis familiaris
cctcttaccgtattccacaaggatttggcacatcttcttgaaggactgtacacgcggagattcctgaggggagcaaaccacgcaatataccagctttcgcagcagcatattttgaagatcttgctagagaaacgagagaaaaccaactttgatccagcagaatggggggctaaggtagacgaccgcttctataacaaccatgcattcaaggagcaagaatcacctgagaattgtgagtcagaaaaagcaaaatctcccccatctgtgaaagaggatgagacaccagtcacagcctttgaatcttctgaagaagaaaaacaaagagaggaggatgctgctctcaaaatccaacgcagccttcccggggacacttagccagagaggaggtgaagaaaatgaagtcaggtgatgctgaaggagagaaaagagagggaaatgagtgagaagactggttttactcccccgctccccagaaaaacatgacaaaatcatccagatccatcagcctcgctgtgattgttgtttttttcttagtaagggagatgtcgatgtagtgaaataacattctgttgctgttgctgaaaatctgtcatgagcatttgtttaatacacatgccattgaacacactaataaaaaaaaaaaaa

SEQ ID NO: 11714 - DNA, 368 bp, Canis familiaris
aaatggagccatagatacttttaaaagatacctttcttttgacctaaaactttttagttctaataatatatcattatgcatcatatatgtgctaggaatataacagcctaaccatctttgtgcagtacattaacattcattttatctctaaatcttgaattttaaaaattggttacttgaaactaccaagtattttattgtacagtttgctttggtacacagttcatgtaatttttggtactgaggcagcaaggactattaagtattaactatttagctgatttggggtttttttgccttgttcatatgtgattaaaatctaaaacccattaaaaaaaaaaaaaaaaaaaaaaaaaaaaaaaaaaaaa

SEQ ID NO: 11715 - DNA, 330 bp, Canis familiaris
atggtgagcctgtcgatggggttgggagtgacatcttatagttctgtcacgatatgctctagaccgtgaagattgtgtgactgcttggctgggaagtctgttccgcttcctgcccacagctgaccttgggctcctagccttccacgagattgagagaattataatgcacagtattttttaagcctcatatttttcttggtttcatactcagttgcatgcgacctccagcttagtgaggttgcctgatgatccggggaaataaaaaatgtccttccccaaaaaaaaaaaaaaaaaaaaaaaaaaaaaaaaaaaaaaaaaaaaaaaaaaaaa

SEQ ID NO: 11716 - DNA, 443 bp, Canis familiaris
ttggggatgatgacagatgattataatattatattattatgatacctacctcacatgtgtgttataaccaatgagataacacatgtaaaatgctttagaacagctccaagccaccattaatactaactgttaatactgctaattcacaatctatttttagtgacacataggcagacttggttttattatctctgcttaagttgtaaccttttttctctttttataagttttatgtccactattattaaaggatggctggtttgattatttctaaagttaattattcatgctgcccatcaagcgaatataaataagagtaataatacatcattcagtaatttatgtgattttattgggtcaggcagtgctaatttgtgtcatacaatctgctttgcatcattcaacacttatgtccaggaataaagcatattctacagtaaaaa

SEQ ID NO: 11717 - DNA, 322 bp, Canis familiaris
ttttgctttgcacttaggatgctccgatctgacactttgacatgaccacaaagtgctagatgctcttactgacttccagccaatgggatgggggaaatatagcacgtttttggtaaagtcctttataataatgggttgatttttttatttcgagagaatcttttttgccatgtatgcttttttcctttttgcccagtttccttatcacttgctgtagatggcttattttgcattcatgcagactatgttgcaagtctgtttcatctagtaaactgaaaattattgcttaaaaaaaaaaaaaaaaaaaaaaaaaaaaaaaaaa

SEQ ID NO: 11718 - DNA, 366 bp, Canis familiaris
gcgcgtgcgcctcggaaccggcctcccgtccgtccgtccgtccagctgtccgtccgtccacgcggacttttatttcccgaggagcccttgtggtgcggctccgctgccccagctcgcagggggtcggggcaggggtccgggcccggctgcccggaggaggcaagcagggccgccaggccgagctcaggccccagcgcccagcgggggcgcccagggcatccccgaggccattgcagcacaagcggcggctctgccctgccccccaggactccagcgcccgctccgagcagcgcaggcgcctctgcggggaggggcggtgaccggtcgcgctgtccttgctgcgcctccgcctccgcctccgcctcc

SEQ ID NO: 11719 - DNA, 357 bp, Canis familiaris
agcaccctcctgggtccggtaggagtagatgtggggccctaggagacagaagttagttggacaactgtttctgtgagggaagggcaccttcagcctggtggtaagaggcgtggtgtccctgagcaggcagggagggcttctcttgagccgagacctgtgagctggagcccagtaaaagaaggccgttccagggggtgcctgagccactcagtcgcttgagcgtctgactcttgattttggctcaggtcatgatcttggggtcgagggatcaagctccagtggggagtctgcttgagatgctctctctcccactccctctgcccctcctctctaaaattaataaataaatattaaaaa

SEQ ID NO: 11720 - DNA, 355 bp, Canis familiaris
actgcccccatccaccacctgccacttaagaggctttagtgccagttctgctagaagccctggcgtcctctgtcatccagcagagatttcagcaggcaggagattagggagaaagctgggctccgggtcccatataaacgccctttgcatgcgctcttggctgaccctccctccccgttggccaccaggcccgactccacctctctgccagctgccgtgggttggtgagtccctgaagcagctgcccagccttccctgggaggtgcgagcggcctgcaaacaggaactttccaccctgccatcgaagatggtccttgcatcaaaggccaaagagaaaaaaaaaaaaaaaaaaaaa

SEQ ID NO: 11721 - DNA, 466 bp, Canis familiaris
cagtggggccaaaggcttgtgagttcctggtttcttggaaacttccgagaccagaagggcttaaatccatgaaatttttggatggcttgatgattcacagtggagaccctgttaactactacggttgacacccttgtgcgccatgtgctgctcaagacagggtgtgctgggcatcaaagtcaagatcatgcttcctgggaccctagtggtaagattggccctaagaagcccctgccagatcatgtgagcattgtggaacccaaggatgagatactgcccaccacccccatctcggaacagaagggtgggaagccagagccgcctgctatgccgcagccagtacccacagcataaatagggtctccttggcagttggatctggaggctggattttactctgtgaagaccctttaataaaatatttgagtaaaaccaaaaaaaaaaaaaaaaaaaaaaaaaaaaaaaa

SEQ ID NO: 11722 - DNA, 340 bp, Canis familiaris
  misc_feature (1)..(1): n comprises a, c, g, or t, or includes no nucleotide
nctacccatggcaagccccggggcagagggcagctgcccccaagcctggacatgtcctggaggagttcagcaggtggagacgatgcaccctgcatgcactccgcactccataggggagcattggccccggaaagggcccagcctcccatctggagccccagccagctttcatcgtccccctctccccacgagatggctagctctcccctcccttcgccttctggcccctggtatggtgggggtttctaacgatcacacccagcttgaggaggggctgcttctgaggtcggttgttgtctttcaattaaagaaaccctgtgcaaaaaaaaaaaaaaaaaaa

SEQ ID NO: 11723 - DNA, 249 bp, Canis familiaris
ccggttaccaaggtttcctggtggggcaaataagccaacaaccatggggctgccaaagccccctgaaaagtctttcaaagtgccttctgttgatgctgatttgtgaggttccagtgcacctgacacccccaggaaagccctcattgttgtactcctgtccactcctctgtactcacgtccactgcccgagataataaatcagttactgcactgtgaaagaccaaaaaaaaaaaaaaaaaaaaaaaaaaa

SEQ ID NO: 11724 - DNA, 346 bp, Canis familiaris
aataatagctgtcagtttaatgagctcttactgtaaggctagtctgaacagtgtgctcagatcagactccctcttttggacaagcttaggtattgccagtctcttttactgtttgggatgaccatcctcttccttttttttttatctgcatgtctattttccattagaaaaatactatctattaaaattgtggtacacctttattctcctttacctctaccattcaagtttcaggtactttaattttattcaagtaaaagcagaattatatagctgaggtgaggactaattatttcacatcattaaattaataggatttaactgaaaaaaaaaaaaaaaaaaaaaa

SEQ ID NO: 11725 - DNA, 353 bp, Canis familiaris
gcgggacggataacaatttcacacaggaaacagctatgaccattaggcctatttatggtgacactatagatcaagtttgtacgtaagcaggctggtaccggtccggaattcccgggatggccagtgctccagatcctcatgggcacggcactggctcccccggccttgctcagcccagccccatccctggactccttggcccctctggcgcccccgaggtctccgcctggcctctggaggtcacgtgacccagactgagccgggacagcaggccctgcacacccccccaccccgtgcacatgcccagtccaataaagtctttgaactgcaaaaaaaaaaaaaaaaaaaaaaaa

SEQ ID NO: 11726 - DNA, 509 bp, Canis familiaris
ccttgggcagacacgagttttcttaatgacccagtccccttgatgagtaattctttccagttctcagttggaggtacagccaagatgtaggttttatgaacatgctctagagaagtaagccagatagaactggtttgtgggacaggagcggcttgtctcaggaagagggaatggtgcacagtcttttattggaaggcttttattatgcgccgtgatagtgacattgccctcaccatgatccttctcccatgtggtcgtctttctttaccttgtgtcttctcttgtaaaaaatgaaactcaaaataaatgtgtcaaatttaaaaaaacaactggaaaagccaacgaattgtgtgcaaactgcataatgctgtaatgctaacctacaatatgtaatgctatcttgtatgtggagtttgttaatgtaccacacaagtgcccaaataaagactgactcacattaaaccaccaaaaaaaaaaaaaaaaaaaaaaaaaaaaaaaaaaaaaaaaaa

SEQ ID NO: 11727 - DNA, 464 bp, Canis familiaris
cccccccccggtgtcccacaagtaatgccatgtgtgtctgctttctctcctcctagcacttaccactttaccttccaatgcttttggtaggtggtagacttttatgaattcttaaagctgtttccctttgtttgcttaaaaatgccacacggcaggaaaccaagctctaattcaactgccaattccactagtaggcacgggagttccgttccctgaatagatgttcaccaagttgcatattatccaaagaataattaaaatcatgtgatcacttaaatgtcaaccagttaaccctgttcattcttgtgttcattcacactgacttgttattttactttgttctaagctttctataaaccttgggatattgtgttaaatccaccaataatttttaataaaatcttgaatttgtatccaaaaaaaaaaaaaaaaaaaaaaaaaaaaaaaaaaaaaaaaaaaaaaaa

SEQ ID NO: 11728 - DNA, 389 bp, Canis familiaris
cccaccaaacttgctataagaaaggaaaatacttccttccattcacccccgtttgtcatgtttcatatacttctgaaagaacctaatttctactatctgcatgtagaatgcacgtagctgggctctttaaagcacaaagtgaatcttaaaagggtttaggagaaccaagttatgtaccagaccaaactgcattttgggagtcttacagtgaataatactcgagagagacaaataccagaacctttcctttatattattaactgtatgtgggcttccatatgcctgtaaacacatgtccctggaaaagaacctgctttcatgatgtcactggatgttgtgaggtcagtaaaatcccctgtaattgtgtaaaaaaaaaaaaaaaaaaaaaa

SEQ ID NO: 11729 - DNA, 397 bp, Canis familiaris
tccctcgtgctagattctgtaaaccagcttgctcatgcccagagcgtgctggatgcccaaggcacaaaagcccagagcacagtagaactaatcacgtagtaagctgggcttgaacacttggctgatgaggaaccctccaccaggaagaagaatccagtccttactcccacaggtcggaggaaccaagccaattgatctgtcaaactcaagctaatgggtaaggaccagaaggacccaaggcaggggcagaaaggagttgtgtggagctactgccaggagccactgggaccaaggtgcagaagaacctaggagggccatgatggtggcagtttttaaaatcaggaaataaaagatcttgaccctaaaaaaaaaaaaaaaaaaaaaaaaaaaaaaaaag

SEQ ID NO: 11730 - DNA, 341 bp, Canis familiaris
ttgtaagaatggcatatccttgttactgtgatagtttagaaatatccccacgtgtccaccttttcccaaagattctagtaatgatctagaaatatctttctcttatctgttatttatccatttttccccgtatttttatatggaaaaaattgtattgaagacactttagtatgccgttgataagaggaatttggtataattatggttggtgattattttttatactgtatgtgcccaagctttactactgtggaaagaccactgtttaataaaagatttaccttcccaccaaaaaaaaaaaaaaaaaaaaaaaaaaaaaaaaaaaaaaaaaaaaaaaaaaa

SEQ ID NO: 11731 - DNA, 130 bp, Canis familiaris
tcggaactggaattttgcagctatccccatcccagactaggaccctaccagattgaggagatttcagatggactaattttgtttattaaaggattgtttttttaaaaaaaaaaaaaaaaaaaaaaaaaaa

SEQ ID NO: 11732 - DNA, 460 bp, Canis familiaris
tcgggcgttggtgttccgcgcccagtcccgcgccacgtcgggacgtgatgatcgtgcccggcacgctcaccaccaagatggccccggcgctccgcaaggtgtacgacccgatgccggagccaccgctacgtggtgtccctggggagctgtgcccacgggggaggttactacccctactcgtactctgtcgtgaggggctgtgaccgcatcgtgcccgtggacatctacgtgcccggctgtcccccccccgctgaggccctgctgtacggcatcctgcagctgccgaggaagatccagcgggaaaagaagctcagaatctggtaccgccggtagtgccggcgcccccggcccctgcggcgtcctcaggatggtccaataaaccccatacacccccccctggaaaaaaaaaaaaaaaaaaaaaaaaaaaaaaaaaaaaaaaaaaaaaaaaaaaaaaaaaaaa

SEQ ID NO: 11733 - DNA, 524 bp, Canis familiaris
cggctttgtgcgccacctcggaatgccccaaggtgagcccctggacggccgctggcccccgtgggtcctgttgcttcaccattctccaggaggctccaaagtccaatggttaagaaaaaagaatttaccgttattgaacttaaaagaggccatccccgttgacggacgttgatggggcccagtttggggaacttcgatgggacccactcagcactcggaccacctgttaccgtggtccgcggcctggaccgcgtcgcaagccggggttgggtgtccctctgtgctgtcgctgtgaacgcaacgggtgggtcacctgtcctcaccggctgctcggaataggggtgcagctggctctgagtacagagaggtgggacacagacaggatttggggtcgatggagaaattacggtggtaacggagacggtgtgcctgaggtaggacgatggttgccttcgacattagccatataacttgaaaccgtatgcaacactaaatctatgctgtgcacactaaaaaaaaaaaaa

SEQ ID NO: 11734 - DNA, 419 bp, Canis familiaris
  misc_feature (66)..(66): n comprises a, c, g, or t, or includes no nucleotide
ccctgacgaatctgttcccggtcttcggtcagcttcatgagggtagttcctcgtgtagagaagacnataaaggacattcttagctgtgggctgatgaatttatgagccaactgttccacaaagtaatagatttcattccagtggtgcagcacacttcctgatttgtccaggatgaagtagaggtcgaagccgccgtagcaggcagcgcccgcgtcctcccggcgccccccgtgcgcggcgcagagcagagccagggcggcccagccgagagcctggaggccgcggcccagcgccgtccgccgcgccgtggccatgacccgggccggtcagggacgcgccatccgccgcgctccccggaagcagagtgggcaggcccggggccccggcacctccgcggccggccgggctcggggtccagg

SEQ ID NO: 11735 - DNA, 443 bp, Canis familiaris
  misc_feature (267)..(267): n comprises a, c, g, or t, or includes no nucleotide
  misc_feature (345)..(345): n comprises a, c, g, or t, or includes no nucleotide
ggccttcctgtccacccccattggctctcacttaggcccctcaccaagccgtgctctttgtgcccccagcacggggcccttggcccccagggccaaccatcttgcatcctctgtcgccacgtttcttccacccccatctctgttgtacgtgtctctcccccgtcccacaggcagtgtggacccttggggatgggggggcacagcttccctcactgaatgtaagggggctactgatcagagaagcctctgagaactccttgcttcccnctggtcagactgcgcttgtcagccaccccttgtgggactcagccctggtctattcttgcttttcctctccttgagcanagcatgtgccactagctgtccctgagggccttgtctttatgaaacacacacttggaataaaaccacttctcacatgtaaaaaaaaaaaaaaaaaaaaa

SEQ ID NO: 11736 - DNA, 495 bp, Canis familiaris
  misc_feature (186)..(186): n comprises a, c, g, or t, or includes no nucleotide
tgggtgccaccaccccggttcctaagtgttttttttaatccaccctccacatgggcttcttgtttgattatgccccaatggaaagtctttgtggcatgctctcaatctcaggtgcccctttgtttgccattctaataggaccatcttagaggagaagtcactgcccctaagactggagaagaccancctactggccatattagatttggggagccacgtacatagcttacctttagctacttcaaatccattgagttcttaggaggaaaagtcaaacccagaatttggtgcaaaatcccaacatcttagtgggatttgacatatgcccctgggtcctgggacacctggacccatgtgtaggccagaggaccgagtactgaattgggatcctgtaagttccatgaaccattcctctttggtttggctttttgatatgattaaaataattttttattcctttttaaaaaaaaaaaaaaaaaaaaaaaaaaaaaaaaa

SEQ ID NO: 11737 - DNA, 441 bp, Canis familiaris
gtctcgttcccccatggttctggaaagggtgaatgtttgccctggggccctaaaccgtcccgctccttttggcacccattggaatggaccatctgggaggtcaggacgggactgcctgaggagagctagccctagcctggcccctgcccagatgccattccatcactgatatttaagtgaaggggaggatccctagactatgttcttggctccagactcaaaaatccacaaagcccaaccagctcatttcaaccaaggagcgctgatgtgaggggcaaggctgcctctgctccaggctcttcagaaagcatctgcatgtgaacaccatcatgcctctataaaggatccctattacaggaacagcatgagtggtggctaacctgacccaataaagttattttatgattgccaaaaaaaaaaaaaaaaaaaaaaaaaaaaaag

SEQ ID NO: 11738 - DNA, 589 bp, Canis familiaris
acattactggccagcggaatcccttcaggccgtagctgacccggcattcagctcaagcctgtggaaagtccctccaccaaggccccggggagccagcctgcggaatgcaactctggcacacaggggacacaagcatcacaaggtgcggctggctgtggaaggacccccgcaacgtgggttggaaggacaagacatcctaccgctggttcctgcagcatcggccccaagtgggctacatcagagtgcggttctacgagggtcctgagctggtggccgacagcaacgtggtcctggacacaaccatgcggggtgccgcctgggggtcttttgcttctcccaagagaacatcatctgggccaatctgcgctaccggtgcaatgacaccataccagaggactacgagactcagaggcttctgcaggcctagggatgggggtggggacccattgctggaagatggcaccatcgtggctaccctcactgcaacaacagggagcttggcacccggctccaagaggtagctgccctagaggggctcagaaaggacaaaataaagtgtgtgtggtggaaaaaaaaaaaaaaaaaaaaa

SEQ ID NO: 11739 - DNA, 499 bp, Canis familiaris
cccgagcaggaatttggtgtggacatcgggccctgtctgctttcttgtgaaacccgtaccctcttcatccgatccattgccattccagaggacccaagtactttccagtcccagtcactctagggctctgcactgaatggctgacctgacctgatgtccattcatcccacccgctcacagtgtggacttttctcccctctttctaagagacctgaactgggcagactgcaaaataaaatctcggtgttctatttatttattgtcttcctgtaagacctttgggtcgaggcagaggcaggaaactaactggtgtgagtcaacgccccctgagtgactgtccccagcccaggcaagaagatctcccttcaggtgccgggcgcaggaactgcgtgtgtcctacacaatggtgctattctgtgtcaaacacctctgtattttttaaaacatcaattgatattaaaaacaaaaaaattattggaaagtaaaaaaaaaaaaaaaa

SEQ ID NO: 11740 - DNA, 391 bp, Canis familiaris
agcagctgctggagaaaattcccaagttccaaggtgaagctgttctcaaacattccaggaacacccagactcccactgtaccagaggagagtgaagaagaagaggttgatgaaacgggtgtagaggttaaggacatagaattggtcatgtcacaagccaatgtgtcacagagccaaggcagttcgagccctgaagaaccacagtaatgatattgtaaatgctattatggaattaaccatgtaaccgtatgaaaacgaggactttttttggtgtttccaaagaataactgcagcttggtttgaaatttgtactgtttctatcattaataaagttatggcttcttgttggaaaaaaaaaaaaaaaaaaaaaaaaaaaaaaaaaaaaaaaaaaa

SEQ ID NO: 11741 - DNA, 501 bp, Canis familiaris
  misc_feature (304)..(304): n comprises a, c, g, or t, or includes no nucleotide
  misc_feature (395)..(395): n comprises a, c, g, or t, or includes no nucleotide
tcgaagtcccgttctagagtgcctttggccccacattcgaccctggaattccaggaatcttcttcggaccatcctgagctcctttgggccctccgggtcccggagggcaataccccgggctgcccaggaatttcaggcccctcgaggaaccaaagggtgacactggcgtgcctggattttcaggactaaaaggagaacagggagagaagggagagccaggtgccatcctgaccggagatattcctctggaacggctgcaggggaaaaagggtgaacctggagtgcacggagcccccgggaccantggggcccaaaggaccgccaggacacaaaggagagtttggccttcctggacgacctggtcgcccgggactcaatggcctcaagggcgccanaggagaccaaggggtcatgatgccgggcccacctggcttacctggtcctccgggtcccctgggcctcctggagctgtgattaacatcaaaggagctgtcttcccca

SEQ ID NO: 11742 - DNA, 448 bp, Canis familiaris
ggcttgggcacagacgttcacgttttctttttcttgggagcaagatttcccccagcagtgaaggaacattcttcacactcagatgagtctacccagtggccttttttaacccaagaagtagcacttgattggtcatgtgaaaacactgcaacagtgaactttgcatctcaagaaaaccaatgaaaaattctatgaattgttgtagccagcgaattgggttgtcttatcaagtaatattttgaggaaaactgatgggctgttgacatacttttccctccctctgactgctgcttgaatgttcttggaggctgtttcttatattaagttttttaatgtgattctttcgtttgaatattaatggcttttttccattaaaaaataaaataatattttggacatgccaataaatgtatgaacttagtgtccacacaaaaaaaaaaaaaaaaaa

SEQ ID NO: 11743 - DNA, 372 bp, Canis familiaris
aaaacagctatgaccattaggcctatttaggtgacactatagaaccaagtttgtacacaaaaagcaggctggtaccggtccggaattcccgggattccacgcccacctgggccccagaggcttggcagggctccggtggccagtgctccagatcctcatgggcacggccctggctcccccggccttgctcagcccagccccatcctggactccttggcccctctggcgcccccgaggtctccgcctggcctctggaggtcacgtgacccagactgagccgggacagcaggccctgcacacccccccaccccgtgcacatgcccagtcccaataaagtctttgaactgcccaaaaaaaaaaaaaaaaaaaaaa

SEQ ID NO: 11744 - DNA, 494 bp, Canis familiaris
ggttcccatagctgcacccggcacaggccgtgaagacggccacctgtggtggtcccaccaccctaggactacggcaggacgagcccttggggcttctgtcccaatcaagagtaatgactgtgagacccttctggggacaaggaccagctgacggacagctgctaccagtttaacttccagtccaccctgtcgtggagggaggcctgggccagctgcgagcagcagggggcagacctgctgagcatcacggagatccacgagcagacctacatcaacgggctcctcaccggctacagctccacgctgtggattggccttaatgacctggacaccagcggaggctggcagtggtccgacaactcgcccctgaagtacctcaactgggagagtgatcagccggacaacccgagcgaggagaactgcggggtgatccgcacggagtcctcgggcggctggcagaaccgcgactgcagcatcgcgctgccctacgtgtg

SEQ ID NO: 11745 - DNA, 501 bp, Canis familiaris
cgctacagcgtagtttctccgacaggggtgatatgatcgtgtctgcttcgaagcataggtaagggcctgccgtccgtcatgtggtctgaaggagcatatgggaccttgagtgggctccgccatgcaaggcaggcagcccatagagccagctttcaggtgttgggttatcaatgcctgccctctgagtttacagtgttgaattgcttccaagggtgaatagatagccctgctctgtgaatgctctaagagcccccacagccaaccttaggctgggtctgtgtatgttcttctgaagcactgatgaacaaaattgaagatacattcagaggttttgattggttgaaattaactggtttggtggttggtatacgtttatttttatgtgctttgtatgtagttctacataatgcaaactttctgatggacaagacctcataactgtgattaatatcaataaaggggatattgttgtggaaaaaaaaaaaaaaaaaaaaaagaaaa

SEQ ID NO: 11746 - DNA, 614 bp, Canis familiaris
gaacactgaagattgggctaaggatctgaaggaagaggactgtgagctgctgtgccctgatggccaaaggaaagtctgtggacaaggctcctgagtgcttcctagccaaagccccccagattcatggcttgtgggtttcttcaaaggataaggagcaagggcatcgttgtcgtttagtcccaaaatgttacgttgaccagcaggctgattgtcttggaaagaaatggaaatgactgctcgggcaagttttgcttgttccactcagcaaccaaggaccttctgttcagggacgacacacaatgtttggccaaacttccagaggacacaacatataaatcatacttaggagcagagtatatcacggctgttgctaacctgagacaatgctccacctcgaaactcctggaggcctgcactttccatacatcttaaaatccaagaggcggagacacaccagatggtgatgggagctcacgtgacccataagttccctcggggcctcactggcctgggtggtttgtctggtttcacagttcagcggtggaacctctgtagaacattaaataaacattattattggtgttatcttttaaaaaaaaaaaaaaaaaaaaaaa

SEQ ID NO: 11747 - DNA, 544 bp, Canis familiaris
  misc_feature (81)..(81): n comprises a, c, g, or t, or includes no nucleotide
  misc_feature (126)..(126): n comprises a, c, g, or t, or includes no nucleotide
caaatggtttcgttttggtagaatctttgttccaacctttgttccccaggaataacgaaaggacttaaaggttttcgaagnggaagtgaaataccagtaggttggattcctaagttcttaatgggnagtgaaatgtcattttactttcaacctgccttcaggccataagtgaaagccaaattcattagctttggttagacctaagtagtttccttcctcacttttacaatggacttgggtcttgctatagctcacagcagctccatacagtactttgatcccacctaggtgggtaccgctaccatgaccaccatttaccaataaggaaacaaatgcccaagcctttacctactagatgcccagctaggtgcccagccttgctttgtgactcaaattcttccattaaaatcaatcagtcccacctccctttcacatttttaggtgctaaggggattactcaatctgacgtccccaaacttgaagtaaataaaaactgttaataaaactaccactggactacagtcagataattttcaagcaataa

SEQ ID NO: 11748 - DNA, 456 bp, Canis familiaris
tacaatgaggggggatatgtgttgcctgccatgtttccagaattcgttgttgttgaaggttttctgttgatgttaagctgagctattgcagatattttgatttccctagacgtaaaatttggagtaaatatatatatatattcttgacatatatgtgtgtgtgtgtgtgtatatatatatatatatatatacacatatatatgtcaacaattcagtaaagcttttgtttaattttcagaaggaatcaaataaaacaagtatccatcttctgtagttcgtagggtgttaggtcctttaacgtaaagtcaaacttcaaattccatctagctctgtgttaatccctgttattactggtaaagcttcatttgaatatgtaaattcagtttaggctatgtaaaatttttgctaatgtcatcattctgaaaaaaataaatttacaaatacattcaaaattaa

SEQ ID NO: 11749 - DNA, 131 bp, Canis familiaris
tgtgcacgcgcaggtgctggctgaggcccgcgttcttcttgaaccgcttcccgcactcctcgcactcgaagggcttcgcctccctctccacctgctccctcttctccagggcggcctccggggcgcggctg

SEQ ID NO: 11750 - DNA, 408 bp, Canis familiaris
  misc_feature (1)..(1): n comprises a, c, g, or t, or includes no nucleotide
  misc_feature (236)..(236): n comprises a, c, g, or t, or includes no nucleotide
nggtcagacctgggttcccgtggcctcgggccacggggcctcagcacggacagactcgcaccagcgtctccagcaaacagcaggccatggcgccctcaagcccgcgtcccctgagccccgagaaccaaggtgctatcctgcagacccccccgtctactcggaagcctgggccctgggccttcggtggcacaaagcgaggtgttgcttttaaaccataaccttactatacaacccanagctcttcttccttaggagagtgattggttctacgttttactgaaaaccctctttatgtgttagttttctgattccttgtgtttgctcactgtgtccacgtcagccacttttcagaataaaggtgttcattcctccaaaaaaaaaaaaaaaaaaaaaaaaaaaaaaaaaaaa

SEQ ID NO: 11751 - DNA, 549 bp, Canis familiaris
tgccaggtgcagcttgggtcaccgggagctccgtgcgcaggaggaaggcagtcagcatgtgctcctcttctgccgtagctcttacggccgccttccccccagcgcagcctggttccggcccccagggtagctctgatgggacagctgatgccaccgagctgctccctgtggtcggggcccacccgggcgcttggctccccgccccctcccccacactctcccaccagcatggggcagtgccgcgcccctcgcttcctgcagcacctggcccctcactccggcccccagggccaggccgtcccccgcctccccgtgtctgccgctgctgagccgacacttggtgggaccacgcgactgagaggctgagcggtggctctgagttccatggctcctgtcctgggattgccactcgcctgatttcattgcaccggtgcatggagagaaacgtttgtcctcctgttgtctgtaaaccaaggaagccatcattaaactgtcttatttctcccactttctagacttcaagaaaaaaaaaaaaaaaaaaaaaaaaaa

SEQ ID NO: 11752 - DNA, 668 bp, Canis familiaris
ttcagaaactagtggcctaactggatgggcagctttgcagctaaacttcctctgctgggtccatcaacagcaaaatttgagttcagcaacccaaacaacagtgggaaacctgctacctcatcaactaaccagaagcctgtgggtttgactggtctggcgacatcatctaaaggtggaataggttcccaaataggtgctagtaacagcactgcaccagctgtaccattgaaaccacctccacctctaactttgggcacaaactggcctgagtcgctctgttagttgtgacaatgttagcacaagtaggtcttccgagtccaagtagtttagttccgggaaacaccagccaactcagtgggaatggaaatagtgggacatcaggacctagtggaagtaccactagcaaagcacttcagaattaagcagctctctctcagcatgccctaaaggtccaacttcacaagaatcacagctcaatgccatgaaacgattacagatggtcaagaagaaagctgcccagaagaaactcaagaagtaatgtggccaagtaggtttttatatcaaattaccctaagatcttattattaagacataaactgtaatatactataacttaataaaaatcttcagaatgaaaaaaaaaaaaaaaaaagaaaaaaaaaaaaaaa

SEQ ID NO: 11753 - DNA, 645 bp, Canis familiaris
  misc_feature (1)..(1): n comprises a, c, g, or t, or includes no nucleotide
ntcaatggagtttgttttggcaccagattcaacgggactttccaaaatggtcgtaaccactccgccccattggacgcaaatgggcggtaggcgtgttacggttgggaaggtctaatataagcagagctcgtttagtgaaccgtcagatcgcctggagacgccatccacgctgttttgacctccaatagaagacaccgggaccgatccagccctccggactctagcctaggccgcgggacggataacgatttcacaccaggaacagctatgaccattaggcctatttaggtgacactatagaacaagtttgtacaaaaaagcaggctggtaccggtccggaattcccgggatggatggagttgctggcacacctgctgggagagaagtggatgggcccggtgcctccagctataaatcccaaactttaaggatagccaggggaagcctatagggatgaaagcagaccatctgctgcttacccttcttccaccgttgtgacacatctcttggggcctgatttctctgatagaggatcctctgtggccccgagagatgccatgtagggggcttcctggtgccccaaattctgctcttcctcagaataaacataatatttctgggaaaaaaaaaaaaaaaaaaaaaaaa

SEQ ID NO: 11754 - DNA, 359 bp, Canis familiaris
gttcatctacgtattttgtaacatcacaagctgagccaccacgtcctccgttttccaggttccaagttcattgtgtaaatggttcgtttttttctgtggtgagctttggtgattgtgtcagggctcttttaggagacggtttcccctcgtggtatgaacaactaaacccaggagagccttgtcagttgggggttccctcaggcctgcgccgtccagaacaccacccttcatgctctgctgctgagaagcccatttccaccagcgtgtattcaacactacaatgcagttttaaaactatatttgcatccgagacaataaaaagctgtatttttttgaaaaaaaaaaaaaaaaaaaaaaaa

SEQ ID NO: 11755 - DNA, 448 bp, Canis familiaris
aaggtgactgagaagctagaagctcttctcggtgaaggaggagagcaaggagtcagaagataccgagagcaaggctggagcggaggaggagcaataagccgcctccccttgttttctcttccttccgttcttttcctccttttttctttttttaaattttgccctgccccttcttttcagtttgtttttattctgttttgtttttacaagggactttatataaagaactgaattccaacattcaggttgtttttttctaagtttttgccctattgaagaagacttcagaaaatccattccccagtcatgaaaatgtactgtgctcactttcttttccatagtggaaacacttatttatagtcatcaaaaatagcgaataaacgacacatttgaaacctgaaaaaaaaaaaaaaaaaaaaaaaaaaaaaaaaaaaaaaaaaaaaaaaaa

SEQ ID NO: 11756 - DNA, 431 bp, Canis familiaris
cgagtccaaggtgtgaattggaatgaccccagtgtcagattgatcttggagatctggaaagattacggatttcatcaagtttgatactggtaatctgtgtatggtgactggaggtgccaacctgggaagaattggtgtgatcaccaaccgagagagacaccctggttcttttgatgtagttcacgtgaaagatgccaatggcaacagctttgccacccgactctccaacatttttgttattggcaaaggcaacaaaccatggatttctcttccccgtggaaagggtatccgcctcaccattgctgaggaaagagacaagagactggcagccaaacagagcagtgggtaaaatggtccctgggtgacgtgattggaagtctttatacttaattaaagattctacagcacgctaaaaaaaaaaaaaaaaaaaa

SEQ ID NO: 11757 - DNA, 594 bp, Canis familiaris
gctcgaaattgtgtacaaatgaaagctagaatactggaaacttaactgcaatggtgggatcttttgtcccacatggagttgataatacatgaagccgaataatgcacgtttgaataattgcctacgatgaagcaaatattttgcctgccattgttcagaagttcttttttgaaggtttctgttgatgttaactgagctattgcagatattttatgttccctgagacgtaaaatttggagtaaatatatatatatattcttgacatatatgtgtgtgtgtgtgtgtatatatatatatatatatatatacacatatatatgtcaacaattcagtaaagcttttgtttaattttcagaaggaatcaaataaaacaagtatccatcttctgtagttcgtagggtgttaggtcctttaacgtaaagtcaaacttcaaattccatctagctctgtgttaatccctgttattactggtaaagcttcatttgaatatgtaaattcagtttaggctatgtaaaatttttgctaatgtcatcattctgaaaaaaataaatttacaaatacattcaaaattaaaaaaaaaaaaaaaaaaaaaaa

SEQ ID NO: 11758 - DNA, 444 bp, Canis familiaris
ccagggaaaagaggttaaaggccccgtggtaatgaccagggggcctgccaagaaccaaaattcaaggcacaatcccttggctaaatttcaaaaactacccagtttctttattggtgaaaacatgaatcccagatggcatggttgcactcctggacctaccgtgaggacggtgtgaccccttatatgatgtttctttaaggatggtttagaaaatggaaaaaatgttaacgaacttggctgttaactttggatgtatcacctgttgtcctaactggctgctgctcttcatccacacaacaccaggacttagacaaatgggactgatgtcatcttgagctctttattttgaccttgatttatttggagcggaggcattgtttttaagaaaaaaacatgtcatgtaggttgtctaaaaataaaatgcatttaaactcaaaaaaaaaa

SEQ ID NO: 11759 - DNA, 118 bp, Canis familiaris
agggcatgatcttggagtcctgggatcgagttctgcatcgggctcccctgcatggagcctgcttctccctctgcctgtgtctctgcctctctctctctgtctctcatgaataaataaa

SEQ ID NO: 11760 - DNA, 714 bp, Canis familiaris
ttgatggaacgaatcagaagaggagtactcaacacccctgcctgcagctcagcttcttcctcctgaaaccgggctttgatttaggttgatgagaatttccagaaatgccagataccctttccctttagcacgtttagagttttgcgtattaattgtaaactgtactagtctatgtgggactgtacacattttatttcctttgtttcgatttagttggcttctgtttctaggtgaggagtttcttaaaagttcataacagtgccattgtctttctatgaacatagactagagaaacagtcctcttcttccatcacactactaatctgatggaaggtttgctcatttacattttcgagactcttctgtagatgtaaataacctcctctgcttgaacacagtattttccccatagcacttcattgctgatgtctgtctttggtgcctttcctggtcagcattctcagcctgtggcagtaaagagaaactttgtgctgcgtgaggaccaagctgctaaatctccttctatttttttaaaatcactaacattatattgcgacgagggaaagaaaaaaaagtctctatttaaatttgtttttttaaaattttcctcttcagttggtgtgtttttgggatgttttatttttagatggttacacctgttagaacactattttcagaacctgaatgtaatttgtgtaataaagtgttttcaga

SEQ ID NO: 11761 - DNA, 597 bp, Canis familiaris
gctagcggcccagaccccacgcccgcgcccccccacttggcggccccgcttcgagcccccgccccacttccagcccgcatctcaccctccccaccccgccccgcgcccccggccccgcgccccccgcgtcgagcccgggctccccagccccgctgggcactgtcctcctctccgtggtgctactcagactcacccagaggtcccgcacgtgcagacaccaggtctccaggtgtgggtgtgaagtcaggaagggaggacccccacccagcccagccccgcagaggatcccaccaccctgcacccctcctgtccccccatcggccccccgccctccacgcccatccctgggccccagaggcttggcagggctccggtggccagtgctccagatcctcatgggcacggcccctggctcccccggccttgctcagcccagccccatccctggactccttggcccctctggcgcccccgaggtctccgcctggcctctggaggtcacgtgacccagactgagccgggacagcaggccctgcacacccccccaccccgtgcacatgcccagtccaataaagtctttgaactgcaaaaaaaaaa

SEQ ID NO: 11762 - DNA, 479 bp, Canis familiaris
atacatgtcctagatctcttatcccttaaaaaccagcttcgtctggatggtaactacatgtttcaagtgctataacatgaatacccaaatgtgatgtccaatgggtattttaaaagcagatatttgaaaattcttgtcttaatatatgtttattgaatatactctaaataagtgtgccatttgctagtattacaatacagtgattagcattaggtatgtatcctctttatatcccagctgtgtcccttttacttgtaagtgcaatcctttcaagttcacttgctattttacccccacctagtctaccttcacgtagaaggcttgcctagagagtattgtacgtattttcacttgtgtagtgaattgcatgtgccaattgttaccgtagttatcagtcttatgttaacaagtctaaatgttactgtaaatgtatcagctctaatctttcaagtaaatttaagaaataaaaaaaaaaaaaa

SEQ ID NO: 11763 - DNA, 530 bp, Canis familiaris
  misc_feature (72)..(72): n comprises a, c, g, or t, or includes no nucleotide
gcgctctgtgccacagatgtgaagttcatttccacccaccctccatggtggcagctggcagtgtggtggccnccgtgcaaggtctacacctgggaagttccaacagcttcctgtcctaccaccgcctcactcggttcctctccaaagtgattaagtgtgatgcggactgtctccgggcgtgccaggagcagatcgaagccctgctggagtccagcctgcgccaggcccagcagcagagcctggaccccaaggcggcggaggaggaggaggaggaggaggaggccgacctggcctgcacgcccaccgatgtgcgagacgtgaacatttgagggtgcgcgcgacgcgggaggggccggccccgggtgctccccggacaggaccgctcctcgccaggaccggtcacgaccagaagggaaagtttccttctcctttactgttggtttttttttttcctttgctctttctcccttccgtctctgacttaagctaaagaaaaaaaaaagtacccgaaaaaaaagatctttaaaaaa

SEQ ID NO: 11764 - DNA, 491 bp, Canis familiaris
gcgggggcacgcccctcctccccatccgtccacgacgttcgagaaacttatgggaggcgctgtctttgacctacatctgcatttcacagcccctggcctccaaaagtgcccctcggctgcggggagagacctcaatcctcctttgtgaggcttgtttgcgttgggagattggcagcgatggcttccagatggggctgaaatgctgcccgtatttatttaaacgggttccttgcggagacccgtgaatcgggctctgtgtgcgctcgagaaaagccccattcatgagcggcgaggtccggcgggcgcccccggaccccccgaccccctctccacaatgcccccctgtgcccgcccgccgccacctcccgggctccagccctgcgcagcgcggcggcggagcaaaaacagttccccgaaagaggtaactttttaattggcctgcgacaaaggagcactttatgcggcgcggcgggaaccacgggaaccggatc

SEQ ID NO: 11765 - DNA, 509 bp, Canis familiaris
cctaagtgttcagtgtccccgactttcaatcacgcatgtcagcccggcttcagtcctgctgagagattggggttaagggtgggtgtcccgttctggtgaggaaggagcagccccgtgccccccctggccagggacgtgccataaggtggaggttcgcccgggggcggcactggagtgcacactgccgtggcaacagcggagcccacgggtgcccgggccccttttcagaccattttttgattagctttggatttttttgtaatggagaggaaaaaaaaaaaaaagaacttgatgctttgcctttcctacatgcaccttagattaaatcaccacggcataaattaattttaattgcttccttttcccgtttttctacccgcacgagcctgatgggagagtatccacgggcacgggaaaccacacctttctgtagatgataattaaatgaaaattggtgcttacttttaccaaaaaaaaaaaaaaaaaaaaaaaaaaaaaaaaaaaaaaaa

SEQ ID NO: 11766 - DNA, 658 bp, Canis familiaris
  misc_feature (157)..(157): n comprises a, c, g, or t, or includes no nucleotide
ctgcacggccccgatggcgatcacacacatgcagaacaggaagatgcccagaggcaacgtcggggaacgtcaccattaaggaaaaggtgacggcaggaaggtgatggtcatcatgcaggccaggttgagcaaggcaagcgtgtcatctatcttcccnacaacctggaacagtctcgtgtgtgctgcccaggccacagtcacgatgagaaacgtcatcagatagaccgcaatcctggtcgctagaagcttctgtatacttttgtcaaactgcaccctcgcttacgctggggggtgagcaaggcacgcccacacacgcacgcacagggactctcaagagtcttccaaaatcacgtcagctttcgaggcgctatgtgtcactacttgctttataaatcagaagtattctgttccggggagatctccgtgtgggtcacaggcaggatcatcacggtggcgatgatggacaggagtgcgtcactgaagctgagcatgcgatgtgagtgctggatgccatcagcagcgtcctcatcccttgtgcccatgggggagtccccctgtacactgagggtcggttctggggtctggggtccggacatggtggggcccgagggctgctgatcgcgccacccggcgtcggggctctggatccgcccctccg

SEQ ID NO: 11767 - DNA, 296 bp, Canis familiaris
cagacgttgtggtcatttacccccagatgtgccatccgcatagtgctttttcctctcgccctttggcttgtttcaatttcaccattatgtatttaattctccaagtaatatgtatccgtagccatttgttgacactatatacagatgattaaggaaacagctgatctttggggaaggggagctaccgtacactttacacacacacacgcagccacaccatatatatatatatatattatacatatataatatatatatatatatattatttgctttaccgggaatttttcacgggt

SEQ ID NO: 11768 - DNA, 605 bp, Canis familiaris
  misc_feature (59)..(59): n comprises a, c, g, or t, or includes no nucleotide
ctccaaatctacctctgccgcatatgtatgtgataaaggatctggttcctgactgagcnacttctatgctcagtataaatccagttgaaccttatttgaagaagaaggatgaatcccaagagggcaagcagcagtatctgcagtccatagaagatcgtgagaaactggacgggctgtacgagtgtatcctgtgtgcttgctgcagcaccagctgccctagctactggtggaatggagacaaatacctggggcctgcggttctcatgcaggcctaccgctggatgatcgactccagagacgacttcactgaggagcgcctggccaagctgcaggacccgttctctctgtaccgctgccacaccatcatgaactgcacaaggacctgccccaaggggctgaatccaggcaagctattgctgaaatcaagaaaatgatggccacctataaggggaagaaagcgtccgtgtgacgctgagcgtgaagtagccggctcggctggacacactttacatccaacttgagtcccttcagaggccttgattttccatgagcacagcatgtataataaacattttaagaaataaaaaaaaaaaaaaaaaaaaaaa

SEQ ID NO: 11769 - DNA, 614 bp, Canis familiaris
  misc_feature (1)..(1): n comprises a, c, g, or t, or includes no nucleotide
nccccttgctcacctgcccaagagtacctttgtgtggacgaatttaagcggcaagtactccaatgaggacactctcactgtggcactgccgtatttctgggagcacttcgataaggatggctggtccctgtggtacgctgagtaccgcttccctgaggagctcactcagacctttatgagttgtaacctcatcactggaatgttccaacggttggacacagctgaggaagaatgcctttgccagtagtcatcctctttggaaccaacgacagcagctccatttctcggagtctcgggtcttccgaggccaggagctcttgcctttccgctgagtccagattggcaggtggactacgagtcctatacgtggcggaaactggatcctggcagcgaggagacccagaccctggcttcgagagtacttttcctggcgagggggccttccagcatcgtgggcaaaaccttcaatcagggcaagatccttcaagtagaacatctcttgtcatcatcgcctagctgcctgtacctgcccttcagggagatgggggtcattaaaggaaactgcacattgcaaacaaaacaaaaaaaacaaaaataaacaaaaaaaaaaaaaa

SEQ ID NO: 11770 - DNA, 554 bp, Canis familiaris
  misc_feature (77)..(77): n comprises a, c, g, or t, or includes no nucleotide
tagcccagcctgctgcccagtagcaaccatgccaggctcaccacctgttctgagccccagggctgttgtaggacagnctgggcctcctggacttgccttacccctggctgacctttgcccctggggcccattactggactccactcactcctcaacaaaacccaaattaaacaagcttctttcttgcttgcccatctctagcttcattgtcctttgtctacatggttcctggggtgccagctcaatgcctgcttgcctggcctctgaggcaagctcagagtgggttccccttgagaagggcaggtctaaaaacttaacgaggatagtgcccctctgtattggggcatccattgctgctcctctagggagctggcctcacctctccacctctgcaagttattatattctgggtactgaggggcagtaccccttaatgttccccctgtgcatgcacacccttgtcctgtctgaataatcacacagctgatgcgcttccatgtttaataaaccacatcctcagttgaacctggggtgaaatgtgaaaaaaaaaaaaa

SEQ ID NO: 11771 - DNA, 635 bp, Canis familiaris
  misc_feature (278)..(278): n comprises a, c, g, or t, or includes no nucleotide
gtgagggcctccacgtgctgcgttagcccacggccccgaacacctcaaccagtacctcttccagctgcagcatggaaggaaccacgacgcccagcgacattcggcatcgctgccggccccccaggaagacagcacccacctcttggcctgagggtagcagtgccaggtggacgggaggtgttttaaacgagcacccgctgtgggcgaagctgtcggtggaagaagtcatctgataattgctcccaagaaaagcaagtcacctctctccccttccccanaagtggctctcaggttgaattcttcccatcagagtccttgcggagcgtgtgggacacgaggattcgtattcccaagagggggcccaagagacggtcaccctgctgtcctgagcagggcccgggcctcatgaccggccagggcaagggcaggcacgaggcggctggaaggacggggctccgggaggccaccaggacgtgacaactagaaatacctgcttcttgctttacttttgtcttcctctagtacctgggtgagcttctgcttcccctggtcgcccagacctggcctctagacaaagggggccggtttcgtccctggctgtgtccccgcacctctgggggcgggaggagacctgc

SEQ ID NO: 11772 - DNA, 216 bp, Canis familiaris
ggtcccgctacctgtagattctgtattttgaaaaggcaaccaggctaatatcaaacatttgaacagattaggatttactgtaataatgtctgtcctatggaggtgaggaacgtggaaaatatgagaatatatgagaatatatttataagaatgaatgaaaaaaaaaagaatgaatgaatttgggtaataaccaggtcagggttggttgtggccgaa

SEQ ID NO: 11773 - DNA, 565 bp, Canis familiaris
tctgctgtcaccggggcctcctggcactcgcgcaggctgcgccacgggtacaccgggcccttgcctcggcgggctcgccgggcctgggcttgtcggagcttgatgtcggaagcctgttgcgcttgagcgtcggggtctgtcgtggtcggtgctccgttagttccatggcgctccatggtaggttctgcgtccacgcccacggtggccgcgcggcgtccggggccgggagggcgcgggctccagctcctccccgcccagcgagtgcggtgatctcaggttcggtgtaggcgtcgggtccgggcctcgtcgcagaaggcgggcaggcaggcgccgttgggtccggtgaccgcgctgtcgaaacggccccaggctcggggttgccgagaagccgggcgcgggctccaggttgaccagcgtgaccaccacagccctccacctgctcgttgggggtgaacttgtcgttggcgtaggcgcgcaccttcacaaagcagcggcggcgctcgggcacgtccaggttgaacagacgccgctcccggatctccacgttgcccaccaggaaacgcgc

SEQ ID NO: 11774 - DNA, 583 bp, Canis familiaris
  misc_feature (374)..(374): n comprises a, c, g, or t, or includes no nucleotide
tatttaaacatcttcctggtgcatcaaaggcagttttagctttagattttggagaatttcctgggtaatttcaagttttgaattttatgttcagtgtagttggtactaagataacagttttgtttctggttccacattagtctctagccttgacctacatgttcacctgtggaatagttgatctcaccttcaaaatgtaaatttttcgtgttgatgaacctgccttttgttttatttggtgcctgcaacttcctttgttcaatgatgtttgtacttgctggctatcaagttacaatgcacttggcctccttttgctcttgttttgctatttgaccttaaacctaggccaagtaccaatcaatgttggttattgncagggactgtttattctttaaacatgcaaccttagggaacaagggagattttcattttaagttatgttgtcaaaagtctgtaggtgcagtgtctttagggcagtgaatcctgttaagttcaaatttatgaataggtgacaagttgacattgagattgtcctttccctgagcaaaaaatgaataaaggctttttaaacaaaaaaaaaaaa

SEQ ID NO: 11775 - DNA, 597 bp, Canis familiaris
gggggcagccaagttattgcgatctttgagagatgtccatttatttctcccataaagagaaaatattgaagtgttgggtacattaagaactctaagggcacaatgtttacaggggctcggatgggccctgtcctgagggcaacggcttttaccagcgctcttcagctgtctgctgacctccatgctatcaagccaagtggttcttgaaatttgaagatgacatcacttactggctgaacagagatcgaaatgggcacgactatgattactaccagcgtcactatgacgaggacgccgccatcggtccccagagcccctacagcttcaggcatggagccagcgtcaactacgatgactactgaccaaccacccctcggccctcggcgccccggccgcggaggtgacccactgggctgccttgcaccacgtggcttccgctgggctttactccagcagatcttgcctaccccctttctgcagccaggaaggaagagttaaacaatataaatgcctttgatatttcatgcaagtgcctaacatcgcatttcatttaaaaaatagaaataaaagcagtttgttaaaaaaaaaaaaaaaaaa

SEQ ID NO: 11776 - DNA, 519 bp, Canis familiaris
gctggatttggatatggcttgcccatttctcgtctgtatgctagatatttcccaggagatcttaaactctattccctggaaggagtcggtactgacgcagtcatttatttgaaggcactttcaagtgaatcatttgagagacttccagttttccataagtctgcctggcgtcattaccagaccacaccggaagctgatgactggagccatcccagcagagaacctagggacgcttccaaataccaggcgaaacaggacaagatcaagacccatagaactttctagagaatatgaacaccttctgtcctctctgtgaagaaagattatcttctgcaagtcaccacgagagaactcctttcctccacccactttgagcaggcactatagttactccagtgcttgaatgtgtactttctctatatgagctggatcttttccacggaaactttcctgtagctgctccagatcttcactaaagtagtaacttgaatcatgaaaaaaaaaaaaaaaaaaaaaaaa

SEQ ID NO: 11777 - DNA, 605 bp, Canis familiaris
aaggattcccacacgtggtgatgttacattcctatgaagtaggtatgtagcttttgtttcattcgtatcaatgacatcaaagggaaacagatgtattctatttaaattcacactgaaacaagccaaatcttgtatgcagtacacacacaagaatcgcctagtcttcactatattgagtagctataatatgctaattttagactctctgaaattaacattttaaacatctccacttttatctatatcctgttgaaaacacttatcatagtcactaattctaatttcagggttgactttctctttctgaatggcttcagagaattggtgtgaactttgaagacttagggtactaatgattgtatctttgctagtcaaccaataatgaaacataatactcactgctggcatctgatatgtcagtaagtagagaagtgactaagacacaaataacctttgccaactctcaagctgtgtaatattcccatgttgtttttttttctttgtatatatacttaaatcatgtaggatgttgtaaaattagtatgaccgtgtctagtcttcaaacttaaaataaaacttttgaaaatctgggaaaaaaaaaaaaa

SEQ ID NO: 11778 - DNA, 587 bp, Canis familiaris
tgctggccaagccctttatgatgtctggcacccctgcagttatcccgtgggtcctgtgaaattgcagtggtgcatctagcgcctttttctgctgacaatgcgattttgaacttttaaggttatgctatcattttttaaatgcagaaaagatgatcttttgtcttcatctgcatgatagattttataaggccctgcaactctaaagcatcttttcgtttacacatttttgtatggtattttaagatgatcacttaaaaatttctagaaacttcggtttgtatagcactttctcaagggctctgtcagcaccacatgcagaataatttcttttaagaactgattttcacagtaatcacgtggcagagcataaatatggtaacttgggacagtagttttccaactaagataattgcatgaactctgttaaaaaacgattattgttcatcaatgactttgtttttaacccctccctatatacctggttttcgcaggatttcaagacatgtaacttttcctggaaaatgtgtcataaattcatttttcattatttgaacaaatgcaaaaaaaaaaaaaaaaaaaaaaaaaaa

SEQ ID NO: 11779 - DNA, 102 bp, Canis familiaris
  misc_feature (1)..(1): n comprises a, c, g, or t, or includes no nucleotide
naaccccctggtgaaataaaccccactattaatgataaaaaaaaaaaaaaaaaaaaaaaaaaaaaaaaaaaaaaaaaaaaaaaaaaaaaaaaaaaaaaaaaa

SEQ ID NO: 11780 - DNA, 614 bp, Canis familiaris
tttttcttttttgttttgttttgttcttgtttttggtgagttctacatcttgtttacctatcactttttcgatatagtttaagttgtaagctaaaggaaatgcttggaggtttgcttggactggtgagagttggtaccaattgtcatagtgtgtttgtataggaaggtgagaagcaccatccgctaaagaggaagtcgttaagttatatggatatgtgggcgttttaaaactccagccctctggcctcccccctgccaccccaaggattaaaaaaaaatttttaaaaaagagctgctttaggaaaatttatcccgtaaatttcccaattaatatagatgaaaagccagatgctcattagactgaattggaaactttttggtattcttccaagcatagccttcgaaattctaatttcttagtgatgcctaagatatttgaggtttcctctttggtgcgatggcccctgaccttcttacgtgatgaaggtgaaatcacttgtccatgccaactgtattagaagttgatgaaataaagctttgagtttgagaaataaagatatatttaaaaaaaaaaaaaaaaaaataaaaaaaaataataaataataaaaaaaaaa

SEQ ID NO: 11781 - DNA, 641 bp, Canis familiaris
gcccagcctcggcattagccgcttgtccactcggggggacctctctggccccacgtgtcagaattttgagaacccacaggctgtgtctgcaagtcggagaggtgtgcccatcctgaagacggcctgcctcgatcttagtacccggcgccggccccagccccactccggggggcgcagagtgtttgcctctcccaggagcccgcagcctgcggggggcctggggaccagatggtggctcctgggagagcagatcccccagctgcggcagttcccgtggcctcctcagtggggtgttcttcacgctggtgaagaccccaaagcaagcaacgccggccccagacgctcccacgtgctcttctttcccccatttccacatcctgtgtcttagcgctcccacctccacgtccctgcgggctcggtggtcggcggctcctgcagtggccacaggttggtgtcgtgtcctggtcctggggcccggcctccacttagccccgggggacagagcccggccaccggtccctgcagggccgccccctccccggaccaggaggacgggggacccgtggccggcagcctccccggcagggtgggcgcagggaccaaagtcagcctgggcctggaagcacctgtcactgccaagc

SEQ ID NO: 11782 - DNA, 550 bp, Canis familiaris
ttgtattgtattaacctagcaaagtacctttagttttcttatgttaaccaccttaaagtacacgaagttctttggatttcagtatttttccaaggacatttttgaaaagtgggcttataaaagtattcagaatgttcccaaatgttacacttgagaaagccttataggatttggatgccattaaataacttattagtgtctttttagacttggtggaattaattaggggagttcattttgctacccatttgggaagcattcattttcagttttgtaatagtaaaaaatttaatgttcatattctcaccataccatgaccagaagttattgaaaatcttgtttaattccgaatctacatttcacttgccttatttagaaataagttcataaaatttgccttaaaatatttttatatgattcctggtacctgggtaggctttggtctattgtatacaatctcatttcacatgcatacattatggaaagaaacaaataaaattgttgagtgcttattcataaaaaaaaaaaaaaaaaaaaaaaaaaaaaaaaa

SEQ ID NO: 11783 - DNA, 629 bp, Canis familiaris
gaccctgggtgatcctctgcagcttggtcggcagggccccgggcaggacgcagacctaggagtgcaccgcccgggggctggctcgcttctccgtgaagaagctcttcagcagcagcacctggctgaagctgaccacgaacagggcaaccgtctcgccaacagacccataagacacccggctgttgaggtcttctgcccgcgcccggtcctgggcctcgcggagccggtaatgtgtctgggagtcaatcacggtcttcagggcctcgtggatggtcacacaggcagactccatctgcgtgagagctgtgaccctgttccccatgtctgggagaatggggggctcgtcaccaacttgaaagtcaaagtagacggtcttatgagagaaagtggaaaactcgttactgaagcaaaactgataaacgcccttgacttcagcccggtgcgtgaagctgtcatactgcttcttggtctctcggtagattgtgttccccagcgggtcctccacgtagcagtccacgtcgtagtggcctccagtgatgacctggtagtccagggagaaccggacgccccggtccacgtcctcgtggaaacactggcgggcgctgtcgggcagctcgaaggtcagctcg

SEQ ID NO: 11784 - DNA, 613 bp, Canis familiaris
acttgtgtagatgctctcgcagcttgaagtccgtagtatgattacaaggactatggagtcaactgtgacaagttggcatcggaaatcgaagatcatatctaccaggagctcaagagcacggacatgaagtaccggaaccgggtgcgcacgtcgaatcagcaacctcaaggaccccaggaaccccagcctgaggaggaatgtgctcagtggagccatctctgctgggctcattgcccagatgacagtcagaggaaatggccagcgatgagctgagggaactgaggaatgccatgacccaggaagctatccgtgagcatcagatggcccagacaggcggcaccaccactgaccttttccagtgcagcaaatgcaagaagaagaactgtacctataaccaggtgcagacacgcagtgctgatgagcccatgactacctttgtcttatgcaatgaatgtggccatcgctggaagttctgctgatagaaccgccagccaggatttcagtgaacaaggtgaggaagaacaaagagaacgcactaagcccttgtagctggagaaaaaaataaaaattaagatgaagaaaaaaaaaaaaaaaaaaaaaaaaaaaaaaaaaa

SEQ ID NO: 11785 - DNA, 513 bp, Canis familiaris
gctgaagccaggcgagagcagagattagagctcgaatgggcacttgggcttggctctgagaatgctgctgggccctgcaaactgggacgaagctgatattggaccctgggcccaagcccggatcccaactggagctgaagctaaagcccaagccccagagagcagtggtgctagctccacgtgctagcgccagtgctagtgcccatggtggctttggtgcccgtgctagcctgactgccactctcacctttgggctcttcgcaggtctcagtggagctggtgctagcacccgtggcagctctggtgcctgtggtttctcctataagtgagatttcagatactcctaatccccgccgtctttctcttcgagcccgggtgcatcctcagaaacctactcaaatagcactctaggcagccactatcaatcaattgaagttgacactctacattaaatctatttgccctttctgaaaaaaaaaaaaaaaaaaaaaaaaaaaaaaaaaaaaaaaaaaa

SEQ ID NO: 11786 - DNA, 538 bp, Canis familiaris
cgggcctagctacattccgcttccgccaagcactcgagtactcgctccgtgaccatccctagctgccctggcccctcctgagccagcctctgcccccaggatctgtacccctacatgaagcaagtagagtggcttctccacttttcctccacctaggacatgtaagaaggggtgacgttggggtcggggagggggccagtggccaccccacactcctgctggctgtgggcaaggacctcggaactggggggaaggggtcaagcgctctcacagcagtctctgtgccactcgacattcctggtcacccgctggaagggacctccatgctgcccagcagtcagtcccctgtgtcttgagccccctgaatgtccctctgccccaccagctcccccaccaccccagctctgcactccatggcccgcccacctcagcgcacctacaggggatccctcgccaccagaaatgcagaaacagcaagtggcacaccccatctcagccccctgccattaaatccacaaacagaaaaaaaaaaaaaaaa

SEQ ID NO: 11787 - DNA, 132 bp, Canis familiaris
ttgttccaagctctttcttttcaaattacttttctgatattcataggcagatatttaattttactaataagcatcctgtgtgaatgtattaaataagcccctgtgtttcagtgttgtagtttgcagaaatat

SEQ ID NO: 11788 - DNA, 504 bp, Canis familiaris
ataggccgacgttttcaagggttcaaccctctgaccccacacgacacctaggacttgacgttcgttttgtgctttcttataatctagatctcggagccacagtgaagtgcactttgtcaaatgtaagggtctgcgttgttccttgttagtgtttaaccttctgttccacttttttttttttttttttaaatcgtgtttcttgtcaaatgcagaaatgttccttccgccactcacgttgaagttttgaattctggcttctgcagtttttattgtctgtgtcagacgtacagccagacgtcctctgtctgcattttctagattctgttccgtgcacatcgacccccgttctgttctcttccacccccactcaccctcacgctctctgagaaaaagaatcaccttgtgtgtcgtagctcatttgtttcaagagagaatcacagatcatactcagtgtcttgaataaatcgctctattttgatattaaaaaaaaaaataaaaaaaaaa

SEQ ID NO: 11789 - DNA, 572 bp, Canis familiaris
ttcagtcaagctgtccagaagccagccgcacagcctgcgcagccaggagtgtacggacaatatgagcatcaccgtgtccatggcaggtggaaacacaaatgttcagaacatgaacccaatgatgggccagatgcagatgagctctttgcagatgccaggaatgaacactgtgtgccctgagcagataaatgatccagcactgagacacacaggcctctactgcaaccagcgtctcatccactgaccttctcaaaacagaaacagatggaacccagcaggtgcagcaggttcaggtgtttgctgacgtccagtgtacagtgaatctggtaggcggggacccttacctgaaccagcctggtccactgggaactcaaaaacccacagcaggaccacagaccccccaggcccagcagaagagcctccttcagcagctactgactgaataaccacttttaaaggaatgtgaaatttaaataatagacatacagagatatacaaatatattatatatttttctgagatttttgatatctcaatctgcagccattcttcaggtcgtagcatttggagca

SEQ ID NO: 11790 - DNA, 548 bp, Canis familiaris
attttggttccaccacatcctgaactaacgtacagtatatttgtctgctattctgttcatgttgtccccttcgcccagttcctttacttgtacataaagtaactgtgtatgtgcacaagcatattgcatttttttttgtaactaaatgcgcatggtatgttttgatccgacatcaaatggagatgggatgggggataaatatctgcttctgtgaaataccccctctctccattagtggcatgctcagtcagctcttatctttatattccagtaagttattttgctctcactgtttgacaaaaattaatagtacaacataaaaatccttgcataccttgttcgattggagaattttaatgtttttcatttatcattgtaaaaccaaggacaattttataacttttttgtacgtagctgttacatgtagggcaatctgtctttaagtagggataaattactctaaaagaaatgaatcctagatagttttcccttcaagtcaagcgtcttgttgtttaaataaacttcttgtttaaaaaaaaaaataaaaa

SEQ ID NO: 11791 - DNA, 631 bp, Canis familiaris
ccccggacacacacctacatataggtacacaattattttattttattttttgtccccaatgggcttgccaaagaaaaaaggatgcaggaaatttcgtgtaagtaatttctggtgttcttttgtaagtaaagtttatcggacatagaccagcctatagccaagcctataacctgctgcccccaactgcactgtagctttttaaaataatgctgctctcagcagtgggctcagctctctaaatctttaaatggctgccatgctgttactacctaattgggtcacgagagagaagataaggttaaaaaaaaaaatcaccattcttcagaaaagaagaaactgtttcattttattatctatatatatgatttcagaagatgatggaaggtccctcctaaagaggggtgtcaggaaccaacctgccgaatccttaaatggctaagaaaagaagatgaatatgagttctgttttaaaactaccaaatgagcctaaaatccagcaaacagcttctgtttaagaaaaatgatttacattaaacttggtaaaataggtttttcactccaaaataattaaaagcattattttcatgaaaaaaaaaaaaaaaaaaaaaaaaaaaaaaaaaaaaaaaaaaagg

SEQ ID NO: 11792 - DNA, 625 bp, Canis familiaris
tcccaccatcatccaggacatacgggaggatagactcttcttactctgggagcgtctgttggctctggttcagctcttctcgacaatgctgcagcttacgtaggcaggagagatactcgtcactgaggttgtctaactccgaatgcagttctctgcactggggggagaataccaccaacgtcatcaccatcagttccttctgggacagctcagattggggagagggccccatgtgagttaccccttcattcatttggaatttttaccatcatcctcccttcccagcctttctcagagatttcagtttgccttttgactgtctcacctactttgtctggaatgtgtccatttaaatgattataatgcatattataatatgtattgtacatgtcagtgctctcatgattgtgtatgtgtaagtgctttgtagatgggggcaccaaaaaatgacgatcttctagcacagaggacctgggagtgatcttagtaaaagcatctttgccaggacctggttgagttgcatatgaatacttctggggatatgtatgttccccagtatgtagatggaaagggctttgttaattaaaagacactatatatgtaaaaaaaaaaaaaaaaaaaaaaa

SEQ ID NO: 11793 - DNA, 596 bp, Canis familiaris
aacatctaataatttggtagtaaattttgtttggctattataaatatcgaagtataaataattttaacactagataccacacatgtagtattttaacagaaattacgtgtcaccagttattcagttcaaatactttatatttgaaaagaatgaataatgtttattaaaatgactacataaggggtttatcccaaatgaatattgtggccttatattcacacagttataggaaacactacatttaagtgggtgcaggttgtctttactaaagacaacactgaactctgctgttcctggttacgcagcggaatccgaggagcagatacagaccccactgtacggttcggacaccttagcagccgtcctgggcagtccgtctcctgtcccgggcgcctgctgaggatcctaactcatcacctctggattgctgaatttagtctactctttgtgtttggtttttgtgtgcctctttagaatcagcttcattctaagcaaacctgtgtctacttcacaagacatggacaatagacaccaaaataaatctttgcccaatccttgcagagaaaacagaaacaaacaaaagcaccaccaaaaaa

SEQ ID NO: 11794 - DNA, 641 bp, Canis familiaris
gtagaacggtgtgggcggacctgcaaacagagaggccaattgctagggaaaggaaaatttaataagtaggggacgaaataccgggctccaggggagctccagtgctggacactcacaggcgttcaccagaattacttttaaaggctacgctagtgtttgattttttgtagtttttttcaatcactgacttactgatctagttttccatatatctgggtaatcatcaagtaatctgaaacatttcgctagaatatataacacttttggcctaaaaattatcataagttgccacagtaattcttacactgtaaccaagaccagtttttaaaaggaaacacctttccacaaacctatccctgggttatttttcgtactactttttctgttttacctggaaataatttacaaaaataacgtactgagatttgcactaaagaacaaaagtggaggggagtcagggacagtaagaagaggtatgattggggacccctggggggctcagcggtttagcaccaccttctgcccaggccgtgaccccagggtcctgggatcgagttccacgttgggcttcctggagggagcctgcttctccctctgcctgtgtctctcatgaataaataaataaaatcttaaaaaaaaaa

SEQ ID NO: 11795 - DNA, 591 bp, Canis familiaris
agtcccagattacactactatttctgacttgtataggtaacactaaagcagactgtatgggagaaataaagtagggtaaaaatatgttttacttgttgccctgtgctttagtatccttatcctcctagatgaaattgagggttgatattatatatgtcagtttccttctacatactttatgtacttatatatgtgtaaacaagcatatattgaagtctattaggggcatctacctttggaggttgaacacttggatttaaataatattattttggacgtcatacatctatgcaatattttattctgtccaatgctatttccattaaatagttcaactagattgtatagaaataactttattgcctgaacatgcaaattacaaagcttaggcataggggaaatgggctttttagaagccaggaattctcaagtatattctgttcttcaaatagaatgtcattttcttctttaaatattgaatatgttttatgaacaatatctttctttcgcaaactcgaattacatgtgcttggaattaagttttagtttttttcactgcacataataaagcctgagttctgatcgaaaaaa

SEQ ID NO: 11796 - DNA, 648 bp, Canis familiaris
gcttctgtggttagcttctccaggcgttcaggctcagtgcacgagctttctccaagcatcaccctggggagtgttcttgagactgtgttctcatgaattgagggcagtacaagtcctgttttgctccgaagtattcagtaccgctcagtattttaaatgtgaatgattctcacttgtgatttggtttgggatcaatagggaagcacaggcaccaacccacgatatacaatgtattgaaatgattttctcagaatttgaagtaggaaagttaccccgacacttctgcttccacttgaactggcctgcaatattgtaagaatggcatatccttgttactgtgatatttaaaatatccacagtgtgccacctgtttcccaaagattctagtaatgatctagaaatatctttctcttatctgttatttatcaatttttcccagtatttttatatggaaaaaattgtattgaagacatttagtatgcagttgataagaggaatttggtataattatggttggtgattattttttatactgtatgtgcccaagctttactactgtggaaagacaactgtttaataaaagatttacattccaccaaaaaaaaaaaaaaaaaaaaaaaaaaaaaaaaaaaaaaaaaaaaaaaaaaa

SEQ ID NO: 11797 - DNA, 552 bp, Canis familiaris
cgccccaggagctgaacccgcgcggccgcaacgtgtgccgcgcgcccggctcccaggagcccacgtgctgcgccggctggaggcagcaaggggacgagtgcggggtcgcggtgtgcgacggcaactccacgtgttcggagaatgaagtgtgcgtgcggccgggcgagtgccgctgccgccatggctacttcggtgccaactgcgacaccaagtgcccgcgccagttctggggccccgactgcaaggagctgtgtatgtgccacccgcacgggcagtgcgaggacgtgacaggccagtgtacgtgtcacgcgcggcgctggggcgcacgctgcgagcatgcgtgccagtgccagcatggcgtgtgccacccgcggagcggcgcgtgtcgctgcgagcccggctggtggggcgcgcagtgcgccagcgcgtgctactgcagcgccacgtcgcgctgcgacccacagacgggcgcgtgcctgtgccacgcaggctggtggggccgcagctgcaacaatcagtgcgcctgcaacacgtcgccgtgcgagcagcaga

SEQ ID NO: 11798 - DNA, 633 bp, Canis familiaris
ctggaggcccagggcaagtcctacctgtacttcacgcagttcaaggctgaggtgcggggcgccgagatcgagtacggcatggcctactctaaagctgcgttttgaaagagaaagcgatgtccctctgaaaagcgaggaatttgaagtgaccaagacagcagtgtcccacaggcccggggcgttcaaggccgagctgtccaagctggtgatcgtggccaaggcagcccgcagtgagctgtgaccaggagccccgcccgggggcggctcttcctcatctctgctgaaggagctgggcccagggagagctggcatgttactggttttctaggggggactggttgatgttctcagaacatggagcaagggtctgagacccactgcccgtctttcttgccaaaagaggcgctggggcctgtgaaggggctcccggggggaatcacagcttctctgaagccagtgcgtcgtctccctatggagcaggccaggctccaggtcactcccagggagaggaatcctgctgccctgaccccgagccaactgttttcttacagttttcccaggggaccttcttccagactaactgggaagaaattaaatgttctttcacatttaaaaaaaaaaaaaaaaaaaaaa

SEQ ID NO: 11799 - DNA, 571 bp, Canis familiaris
agaaaactaacttattttaatttttacttattttacttttattttttgtgagagtcgagcataacatggaggggaggggcagaggcagagagagagagagaatctttttttttttttttttttttaagattttttatttatttattcatgagagatacagataggcagagacaccaggaagagggagaagcaggcttcatgcagggagcccgatgtgggactcgatcctgggattctggaatcacgccctcagccataggcagatgctcaaccactgagccacccaggcatcccgagagagaaaatcctaaggagattccctactgagtgcgggggctcaatcttacgacctccagatcatcgacttgagctgaaatcaagagtcaggtgcttatcggactgagccccctagacaccccttctagaatagattcccagaaacatttctttcagaaaggtctgttactgtgtagcatacgttggcaaacattcttaaataaagggatggattgtaaattaaaaaaaataaataataaaaaaataaaaaaaaaaaaaaaaaaaaaaagggcgg

SEQ ID NO: 11800 - DNA, 609 bp, Canis familiaris
tccatagaagacaccggggaccgatccagcctccggactctagcctaggccgcgggacggataacaatttcacacaggaaacagctatgaccattaggcctatttaggtgacactatagaacaagtttgtaccatataagcaggctggtaccggtccggaattcccgggatcaaggaggctcagctggtagtgatagctcacgacgtggatcccattgagctggttgtcttcctgcctgccctgtgtcgtaagatgggggttccttactgcattatcaaggggaaggccaggctggggcgtctggtccacaggaagacctgcaccactgtcgccttcacacaggttaactcggaagacaagggagctctggctaagctggtagaagccatccggaccaattaccactgacagatacgatgagatccgccgccatctggggaggcaatgtcctgggtccgaagtcagtggctcgcatcgccaagctggaaaaagctaaggctaaagaactggccaccaagctgggctaagtggacgctgttgaattttctgtacataaaagtaataaaaggttctctttccaaaaaaaaaaaataaaaaaaaaaaaaaaa

SEQ ID NO: 11801 - DNA, 478 bp, Canis familiaris
ccttaatctcctaatctccctaattccctaatttccatctagtttaattttcaccctgacctattaggagacccagataactacacccctgcaaacccccctaacacccctccacatattaaacctgagtgatattttctattcgcctatgctatcctacgatccattcctaataaattaggaggtgtactcgccctagtattctccatcctaatcttggcattcattccactcctccacacatctaagcaacgcagcataatattccggcccctcagccaatgcctattctgacttttagtcgccgatcttctcactttaacatgaattggaggacaaccagttgaacaccctttcatcattatcggacaagtcgcttcaatcttatatttcaccatcttattgatcctaataccacagttagcgttatcgaaaacaaccttctaaaatgaagaaaaaaaaaaaaaaaaaaaaaaaa

SEQ ID NO: 11802 - DNA, 711 bp, Canis familiaris
ttggaattgccgtgatcaggtaagggtgaaatgaagaaacagctgaatataaacatttgtagatggattttaaagcccgaggcccagatccaccctcagctccaaagcatgggccgttctctgcacctgtcatttggggttccttctaaaaagaattgcaggaatttagctatagagcccaaatttagtttagcctaaccttgagaatgatacccgatcatattcccgtgttttttttttttcttcttcttggtccgtttgttaaaactacacttgtgttagcctagggatcctgagatagtctcttccggtcatcagttcccggcattgtgaagcttttcttggtccacttgttggcatagactctttgtgtacatatttatttatttgtgtttataaatgccagcttgtttcatatcttagctctatattgcctggatttgttattttaattaactttctgtcagagagactgtatatatttttttcctaaatactttgtgaaatacttttctgtagcaatatctttgaatatgatgaataaaagtgactgtgagtgccaattagaattagtagtaagaagctactatagctgatttgccattttacttaaatggaaaatgtttttcaaataaatacttacgttgttcgtgttcccaaattaaaaaaaaaaaaaaaaaaaaaaaaaaaaaaaaaaaaaaaaaaaaaaaa

SEQ ID NO: 11803 - DNA, 363 bp, Canis familiaris
tgttcttcaccagcaacgaaactcaaacagcaatggacgactttcttctggccgatttggcctggaacaccatggaatctcagtttagctctgtagaaacccagacatgtgtcggaactacacacagtctccaacttctgaaaatgatgtccgtgcgtgccacagctgttacaatttccttctaggtttgggaaaatgggagagtgggacaacagtgttaacactattgaatgtagttactgatgcatttacttctattcttggagggtcttttgccttttgtacttgtaaacatgaaatttgtgtatcaatgtgagtgtattataaagtgtaagatgttgatctaaaaaaaaaagaataata

SEQ ID NO: 11804 - DNA, 495 bp, Canis familiaris
ttgcagtgttatagtaacttgcctaccgatataggataatttgtgcctgccattgttcagaattcttttttgaagggtttctgttgatgttaagctgagctattgcagatattgtaatttccctttacgtaaaatttggagtaagtatatatatatattcttgacatatatgtgtgtgtgtgtgtgtatatatatatatatatatatacacatatatatgtcaacaattcagtaaagcttttgtttaattttcagaaggaatcaaataaaacaagtatccatcttctgtagttcgtacgggtgttaggtcctttaacgtaaagtcaaacttcaaattccatctagctctgtgttaatccctgttattactggtaaagcttcatttgaatatgtaaattcagtttaggctatgtaaaatttttgctaatgtcatcattctgaaccacaataaatttacaaatacattcaaaaaaaaaaaaaaaaaaaaaaaaaaaa

SEQ ID NO: 11805 - DNA, 568 bp, Canis familiaris
gttaaccgtgcacggtgatttaagccgttatttcccctctgacccccaagagctggcctcccagaagatttgggatccatctgaatggttttatgtgtgtcgcatttactttgaccaatgttctttaaagtatatatatagtatacacatatatatagtgagataaccaaccgaaccccatctggggtttctatgtggcggttgaaatattcccacatgtgatcatcccgaaaataagccattcctcacaccaacgtgggataaactccttgacttccaggcctaggagttcatcctgctgtgtgttttagaatccctcccctgccttaatgttttatggcagtgaaatgcctcttgatcatgtcccagtgtgtctttcaactgtatctatttctgatcatgttccagttgcttggccctgccacctggggcccagtactccttgtgagcataactgtactaaatcttttttccagatccagtataataaaggagtgatgtgccaataaaaaacaaaaaaaaaaaaaaaaaaaaaaaaaaaaaaaaaaaaaaaaaaaaaaaaaaaaaa

SEQ ID NO: 11806 - DNA, 495 bp, Canis familiaris
cgttccctcccgggacctccgtgctccctcatctgtcatagcagggacgtgtccttcccggcatcacacgcagccgactggctcctgggatgctgtgcctccggcatccgtgcgaacccgggagcagacatctcagatgggacaccggctgtccgcggtggtgacggggtcccaaattggcatcgcttccctcccctgaggagggagatgcgggggcgggaccggggcattgggggccagccctttcaccgaccagcacatcagcaaaccctaggacagtgggattttctaacaaaatacacttgcttatttggtctgttttctgtaacttttgctaaatactttatacatttttaatgttaaaaagctgtgtctcctgccagcatttctcatcccggtatgactgtgtttacttcacattgtatacccttccaccctctggctgcctagatcagtaaataaaattgatgtactataatttataagtaaaaaaaa

SEQ ID NO: 11807 - DNA, 610 bp, Canis familiaris
  misc_feature (356)..(356): n comprises a, c, g, or t, or includes no nucleotide
tctcctgtcctccaggaattattgttggagaatatgatgaaagattaacacttccctttgttggggaccccatcaattcacgtcattcccgggcctggggagacccccagccagttccctccactcagaccacgttttgatcctgttggcccgcgttccgggacctctgccccaccttgccacgggcggggtggcccgagtgacacgagtttcccctataggcccacgcacggggctggccacaactgagacacagcacaggcccaccggtcaatgtgaattgaatttgtaaatttcaactttcttggaaggccttggttttggtttttgaatgttcaattcttttttgggggtcntgatctctagtgttttctgattgtgatggtgaggaatgcactcacagtggcctttcacgtagatctgtttaaagctccaggggtggtagggcccagaggtcactgtatgaccaggttgaccttgggaatagctagctactgacctacaccacccccaccccccgccccgaattcccctcttgagtgaatgaaggtggttcatcgataatgttctgcaccagattaaaaaaaaaaacaaacataaaaaaaaaaaa

SEQ ID NO: 11808 - DNA, 698 bp, Canis familiaris
aaggcacgtatttatgtccctgactgtaaatgcccctgttaaagttttataacttgtgtaattaattaatcagtcgactggctgcaatgtagggtctgataacggtctgggaggaaggtctcacgagaccctcacatgggcagagaagggccgatggctggccacgtcaccgtgttccgttttgccacccagctaaaaaccatcagttaaagttgtccatttccatagctggcatccttttgcctgctccgaaaattaaccctcacaagcatgaaaggctgtggctgttcctcatccgtcccatagatgttgacactcatgaactgtaccccagcctctcagttcttgaggattctccttttcagcagcagggagggctcccgaacccaaagctttgaaagtcaacttcaaccaatggtgaatcccagaaaatgtcgtgggggctgggggatgctcctgtttgcatgtgcgaacgtgccggtccgccttcgaccctctcagactagcggaaagggccacggagtgtcccagtcacggagccggggtggtcttctagagagtggtgtttcccggtcagcggtggttctcgggcgtgggtgtggatcgcggaggagggcggttctgtatctgccatgtgaagaaacttaacaataaaagtgtgaagcgcgattgtaaaaaaaaaaaaaaaaaaaaaaaaa

SEQ ID NO: 11809 - DNA, 545 bp, Canis familiaris
  misc_feature (1)..(1): n comprises a, c, g, or t, or includes no nucleotide
ntcctgcccgacgagggcaaatgcagcaacctggagagcaagctgaccaaggaggtctctggccaagttcctggataaagatgatactccaggtctgccagtttgcgcttgcccaaactgtccatctctggaacctacgatctgaaaagcgtcctgagccaaatgggcatcaccaaggtcttcagcgccgaggctgacctttttgggatcactgtaggaagggcccttgaagctgtcccaggggctgcacaaggcccttctgaccatcgacggagaaagggactgaagctgcgggagccacctttctggaagccatccccatgtccatgccgcccagtgtcgacttccacaagcctttcctcatcatctatcgtcgacagagacaccaagagtcccctcttcatgggaaaggtggtgaaccccacccaaaagtaactgccttgttgggtcaggtcccttccagataccattaaagagtgacccaccccaaaaaaacaaaaaaatataaaaaaataaaaaaaaaaaaaaaaaaaaaaataaaaaaa

SEQ ID NO: 11810 - DNA, 495 bp, Canis familiaris
ggaccatggatggataaattacctttcaaggccaggataaaaagaattgtttaatgctgttgtccaagcatcatcagcagtttttagatttaccttacagaccattattgggatttgactggacttcctaaagtagtgttaatatttacttcacgtttatatgctacagtgaaaccacccaaggtcacattttggtttgttactttaaagtcagtgtctctcccccataagcataaaaaacagtgccctgagaacattttaaaaagttagtcctagaccccatcctcagagattctgattcagtacatctgtaggatggaaacaaaatttagttgtaaagaagaccccaggtagagcaaacatcctggtcactctaccaaacattgacaaaatattgttctgaatcctattatggatttaaaaaaaaaaaaaatttcctaaagggcaattgtgtttttaacatttttaaataaattttttattttaatactaaaa

SEQ ID NO: 11811 - DNA, 598 bp, Canis familiaris
tcttccggaggagtacctagtgagcttaagaagagaagtgcggaattgaggactctgaaggaagaggagctggccagcaccccccccagctcagaagactcggcatcaggatctgatgagtagagaggaagaaaattctctctccttgggcttgccctgtcacaacctgcagtcgtctccacccgtgttttggtaccagtttctcatgaaatgcagcccttggattttgtgccatcttgacaagctctcctggtgacacgcacttcaccggggcagcaggggaggtgtcctcctctctactgcttctcaaggatggctcttgataacttggggagagattgggtggggcagtgcagtgcagggtggaatcctgagcctgctcctgcgaccttagggatacggctgctgcttctcctgttcaggttgctgcagcaggggtcaggtgagggcaggccatagctcctaacggggcctatttctacttttattttgtatttctggtctgtgaaaaatcaacatttaataaagggaactgactttggaaacccaaaaaaaaaaaaaaaaaaaaaaaaaaaaaaaaaaaaaaaaaaaaaaaaaa

SEQ ID NO: 11812 - DNA, 659 bp, Canis familiaris
atagtgatagagatggctatggtcgtgatcgtgactattcagatcatccaagtggaggttcctacagagattcatatgagagttatggtaactcacgtagtgctccacctacacgagggcccccgccatcttatggtggaagcagtcgctatgatgattacagcagctcacgtgacggatatggtggaagtcgagacagttactcaagcagccgaagtgatctctactcaagtggtcgtgatcgggttggcagacaagaaagagggcttcccccttctatggaaagggggtaccctcctccacgtgattcctacagcagttcaagccgcggagcaccaagaggtggtggccgtggaggaagccgatctgatagagggggaggcagaagcagatattaaaaacaaaacaaaactttggaccaaaatccccgttcaaagaaaacaaacaaaaaagtggaaccttttctgtcataactacccaaggactactaaaaggaaaaattgtgttaccttttttaaatttcctgttaagttccccttccataatttttatgttcttgtgagggaaaaaagtaaaacctgtttaatcttatttgactttatgacattgctttcaataagcaaatgttaaatgtgttaagacttgaaaaaaaaaaaaaa

SEQ ID NO: 11813 - DNA, 624 bp, Canis familiaris
aacagctacacaactgcttaagctggcccacaagtacaagaccagagaccaagcacagagaagaagcagaggctgttgccccgggccgagagaagtctgccggcaaaggggatgtcccccactaagaggccgcctgtccttcgaactggggttaaccactgtcacccaccctggtggaaaccagaaggctcaactggtaatgattagctcacgacgtggatcccattgagctgttttgtcttccctgccctgccctgtgtcgtaagatgggggttccttactgcattatcaaggggaaggccaggctggggcgtctggtccacaggaagacctgcaccactgtcgccttcacacaggttaactcggaagacaagggagctctggctaagctggtagaagccatccggaccaattacaatgccagatacgatgagatccgccgccactggggaggcaatgtcctgggtccgaagtcagtggctcgcatcgccaagctggaaaaagcaaaggctaaagaactggccaccaagctgggctaagtggacgctgttgaattttctgtacatacaagtaataaaaggttctctttccaaaaaaaaaaaaaaaaaaaaaaaaaaaaaaaaa

SEQ ID NO: 11814 - DNA, 117 bp, Canis familiaris
  misc_feature (1)..(1): n comprises a, c, g, or t, or includes no nucleotide
natcagtcactactggaactgcacaaactggccactgatataaatgacccccacttgtgctgacttcattgagactcattatctgaacgagcatggtgaaatccatcaaagaacttg

SEQ ID NO: 11815 - DNA, 695 bp, Canis familiaris
ctgaatctctcactagtcatgatgccccagtaggtaccattgtgtgtcctatttgctttttctctgtcctcctccatattcttatgtctcacagatataactgttaatagaactcattttacaaagtttataatgggtagagtgtgttagtgaaaactcatttaaatatgtattggctttatttgtccgtgaaactgttgtaagtaaaggttgcacatatgatttgcttgtcgttgaaaaagattaagtagaaaaatacccagtgtaacttgatattgtattatagatcttaattactataattgagctgtcaatggtgatgaaaaagtgaatcagaattcctataactttttccctaaagctttcagagtattaatagaaatattttgtagttttgtgctagtttttagctttagcaaaagccgttctgattgaatctcaattatttttctttactaatctttattctctaattcttaagaaggaattcaccccactggggacacctgggtggttcagtcagttaagcatctgctttgggctcaggtcctgatcccaaagccctggaatgaagcttcacgttgggctccctgctcagtggggagcctgcttctccctttccctctgctgctccatctgcttgttcaccctttttctctctctccctccctctgtcaaataaataaaatctaaaa

SEQ ID NO: 11816 - DNA, 595 bp, Canis familiaris
  misc_feature (1)..(1): n comprises a, c, g, or t, or includes no nucleotide
ncctgaacccggcattcagctcaagactgtgaagtcctccacaggccccggggagcagcttcggaatgcactctggcacacaggggacacagcatcacaggtgcggtctgtctgtggaaggacccccgcatacgtgggttggaaggacaagacatcctaccgctggttcctgcagcatcggccccaatgtgggctacatcagagtgcggttttacgagggtcctgagctggtggccgacatgcaacgtggtcctggacacaaccatgcggggtggccgcctgggggtcttttgcttctcccacagagaacatcatctgggccaatctgcgctaccggtgcaatgacaccataccagaggactacgagatctcagaggcctctgacaggcctagggatgggggtggggacccattgtctggaagatggcaccatcgtggctaccctcactgccaacaaacagggagcttggcacccggctcacaagaggtagctgccctagaggggctcagaaaggaccaaaataaagtgttcgtgtggtggaaaattaaatcaaaaaaaaaaaaaaaaaaaaaaaaaaaaaaaaaaaaaaaaaag

SEQ ID NO: 11817 - DNA, 594 bp, Canis familiaris
gaggcgcgggggcctcccgcaccctccagccgctgccgggcaggtcacaggtgcaaagcgcttgctctgctgtgccccagccatcgctcacccttggcgggagttgcctgtctccgctcccccgtgggagctgacttctactgtgtctttcagatcttcgcctcctccacgggcttgcctgacccccatccccgacccggatcctctgcgctttcacagtcgggtgtttctcactgttcatgctgctttgcaaggtacatggtcaggccccaggactagcctggaagcccccgcggtgggtggggcatgtcctctcctctctggcctggcaggtgcttcaccaatattcgatgaacagacgacaccagctgcgtacctggccctgtgcccggtcgggaatgtggacaggtgccgagcgagaccgaactctaccccccacccccggggttcctagtttggcagtggcgcagctgcccacagatgcctgcattggcaggcgcgatcttcgcacaaagaggcgccgagaagccagtttcggggcttccttcccggtcgggccggggaattgggcctggggagggagagggtgcgagc

SEQ ID NO: 11818 - DNA, 556 bp, Canis familiaris
atcctgtctttctagcatttctagtcttggttttagatttctgttttcatacctccctggaagatttctgagagtgtggaggaaggatgggaaattctccgtataagtgggaacccaccttcttcccccaccacttgggggccaaggttgttggcctctcaaccccgttttccttggggccaatgttaaatccggaaccaccaagctgggatccattatgggagagccacagttgcagatgacagggatctggggacctcagcaggctgcctgactgaaggcatcgatctgaagtatcagtgtctcctctggtcatcctgcccacgtaaaagtgaaactggctaagatgttaccaccattttgtagtcaaccaggatgacatcatgataaacagggtggctgagtgggagtgcaggactggggcagcgtcctcacacatgtaggggtaaaggccttgtataatgcgccttatgaagcactgtttcagagttcctttcatttcaataaagattatcaggtaattaaaaaaaaaaaaaaaaaaaaaaaaaaaaaaaaa

SEQ ID NO: 11819 - DNA, 735 bp, Canis familiaris
gcctagtggtataccctcggtgtcacccacagcccacatacaaccggcagcttccttgttgaatccctggcccatttcttgtcggggaagaagacctggacccttgggttcgaagagttgccatgatcgtggatccgtgagatctggctccccagagcactcattgacccatctcgggcctcccaaccgtcttcctccaggcgctgtgcccccaggagcacgctttgacccctttggacccattgggaccgagcccatctggacctaacccagaccatctccccccgccgggctacgatgacatgtacctgtgaaggcctcaagaatgtaacatcccagccttccctccactctcctggagctgccactgctggccccatcagcaaccgtgttcttgcgggctgggggcaagggactctgcccatgtgtttgcgggccggctgggattgcctcccccctacctgtcagagccaaggcacttgctgcagctttccacctggctgcatataggtcccatagagaaatcagtgtttctctccccaccagctgccccacacttctcaaaggagactccggcaacatatacacttggtccgatgcagtcccagctgcagcgctataagaacagaacgcattttggatgttattataagaacccaatgtcaatacaaaaatcatgttcgccagtctaaaaaaaaaaaaaaaaaaaaaaaaaaaaaaaaaaaaaaaaaaaaa

SEQ ID NO: 11820 - DNA, 566 bp, Canis familiaris
gggtgaggactgcccctgcgcctggcccggggctcgagtgtggccacccgggccatggggtccagcggacgtgatgtgtgtcgtggcgggcacggccctgggcaccgtggtggtgcgggcgatgtgtttgaacgcagtcggagacgaagactcctggcaagcgctgagcgaagacccggtggcccaggatcgcagccgtaagagggtcctaggcattgcggacgtggtcgtgcctggtcacggagccccctttagggtgatcagggaagcccctcagccaaggaactgacgtccagaagaccagaggacccagtcagagtcagcgcgccagaggagtccggggtgatcgcttccagccctcgccaagaggcgggtgcctagcgagaacagtcatcgatatcactggttctgcagccaaatgaggaccaaggactggctcaactgtgtgccacctcttggggcctccataaaatggaagaatgttcttgagggggttatccaaaataaacataggaagctgcgtggaaaatcatgcagccccaatgtaaacgtgaaaaaaaaaaaaa

SEQ ID NO: 11821 - DNA, 653 bp, Canis familiaris
cgcgattgatcagatttcggaagaacactcttacgctcaagcacccaacaggtccgcccaaattcgggaaaaagatgatggaaatcatgaccccgagaggtgccaacaaatgacttgaaagaagtgggtccataaactgattcccagacagcatcggaaaagatatagaaaagcttgtcagtctatttatccactccatgatggttttggtgttagaaaagttaaatgctgaagaagcccacagtttgaattgggaaactcatggagcttcatggtgaaggtagtagttctggaaaaagctacgggggatgagacccggtgctaaagtgtgagacgaggctgatggaattatgaacccacccagtcccaaggatcctggttttaaaattccagaccatttaatgggtgacccattaatacatatttgtgatgtttaatttcttatcattctttctaaataatcaggctcggtgaagcagatgttttgaactgaccgtgtgaacttttcagaactattgtatggatcttatccattgctcttggctactaaatagctgcaaaagggtagtgatctattttaagctgtagtgatctggatggaagtgttctagatggttaataaaaggaaacttttttaacgtgaaaaaaaaaaa

SEQ ID NO: 11822 - DNA, 422 bp, Canis familiaris
gtccagtgacctccagaggccccccccttcccgggcccccctgccacaaagcacttgtcagaggaagagtgtcctcaaggaggacagcaacgggctaataggggtggccagcgcgggtgagaaggcgtggcctctctgaggtttcctgggattgctcctcagcctctgagcaactaagtcatatggtgacttttcttcccccacctcatgtgacagccattgtgagactgatgtataaactgtcacttgggtaatttaagcacatctgttctggtgcaatttgcttgttttcttcatgcctttacttactgtctttaccccatgataccgattggcacgtagcccccagagatgtcaaaataaatcttttttgtcttgttctttaaaagaaaaaaaaaaaaaaaaaaaaaaaaaaaaaaaaa

SEQ ID NO: 11823 - DNA, 578 bp, Canis familiaris
cgccctgatgccacttgtgcctcgccgccaagttcaaaggccagcatatccgggacacagatgcctttcgcagctgcaagttccccaccaagaggtccaagaaagccggccgccactaaacaggtcctgacccagctggtcctggtgaccggcctctgccttccgccggagaaactactgaccttcccacctctgacccccaccttctcctcacagcctctgctggcgcacagagctgtccacttctagacatgtcctggcagggggacacaggcactctggcacagacccagctccacctgatggtgagagctccatcacccttccataatcctcctttcctctgctccccagaccttgccatttggaaacaaacatcagatccttgccccaccccttgcttccagaaagggtcttgagcccataccccaagtctgacaccctcctcccctcccgccgcctgccaggacactctagcaggacactggtgctttgccgcataccctactgtgctgcacttctttcccaatttttcataaatataaatgtatgtatgtatgtgtaaaaaaaaaaaaaaa

SEQ ID NO: 11824 - DNA, 457 bp, Canis familiaris
aggtaccgtgaacaacgtttctgtttgggaacttgggatccccacgtgggacaataagccctggaaagaccccgagtcccttttctggacttttgccctagcccagggccctctgacccagcgcacgttggagtaaacatcaactggtgtttggggctatgtgcgtttttaaagcagatccgaaattaggaaggcggaagaacttgggacagttactaagttgagacctttctgatggcacttcagccacggcctaggtgccccgaagaacatgtttcaccgtagtgattttcgactctttaaagctagacaatttttgtttctgtatttgctgctgtaagcataatgattgtgttccttccaactggacccattgttttgtaaacaataaagtgccagaggggactgtgagttctctctgtttcctggtcaaaaaaaaaaaaaaaaaaaaaaaaaa

SEQ ID NO: 11825 - DNA, 478 bp, Canis familiaris
  misc_feature (106)..(106): n comprises a, c, g, or t, or includes no nucleotide
ctgagcccgccggcgccccaacggactcttaactcggggagtagttggtggagggagttggtgggtgacgggcatgacggagggcacttgctggggcgccggggcngggtcagcgggtgaagcagctgacttgggctcaggtcatgaacccaaggacctgggatccagtcccgggttgggctccgcagggagggggcttgggatcctctctctgcttttccccccaacgcgtacacttattttctctctctcaaataaagaaataaaatcttccaaaaaatttttttaaatagaagctggaaaagcaaggaatagacccccctccccgacccccgagacaccaaaaggaaggcaactgcaccgatacatttagttcagagacccatgttggacttctgatctctaggactagagaagaacaatctgttgttttttcgtattaaagattttattgaaaaaaaaaaaaaaaaaaaaaagg

SEQ ID NO: 11826 - DNA, 642 bp, Canis familiaris
  misc_feature (112)..(112): n comprises a, c, g, or t, or includes no nucleotide
cgcatgctgaccttgcaaattcagccactgctttgagcccaaatggaaaaatattggttttgtgtcccacacttattccaagtttgtccgggaggtttacggatcctccagnacagatgccatctgcctgaatgttgatatgccagtggatgtgaatcctttttcatttctccttccctctggacagtgttacagtgaacatttagcattctgtttttggttgatagttaagcaaactgacattacagaaagtgccttagacactacagtactaagacaatgttaaatatattatttgcctctgtaacaattcaactgtgcttcatatcatgtacctctctagtcgaagtggtattataaacattcagtgacaatgaatcagtgttaattataaatccttgatcctctgcaacgtgcttgaaaaacaaaccttttgggttaaaagctttaacacctgttaggaagaatttgtcatgtgggtttggaatctttggttttccccctttatgaattgtactggctgttgaccaccagacacctgactgcaaatatcttttttcttgtattcccatatttctagacaatgatttttgtaagacaataaatttattcattataaaaaaaaaaaaaaaaaaaaaaaaa

SEQ ID NO: 11827 - DNA, 572 bp, Canis familiaris
  misc_feature (124)..(124): n comprises a, c, g, or t, or includes no nucleotide
gctgcttcggagccgaggttccccagactcacagcggattccagagcccgcaggcctcttaaactacatagctgagctcggggagtggtgggaataagggggtcgtcctgcccgaggcctaccntggcacacgtgtttccgccgaatacggacgcaagcatatcccccgccaacgtgttccctcgtcccggctactcgcgggcccccccacgctttgactgtgggggtacccgccagcccccagggtaggcgtgcgtggaaactcggaccccaacgcataggttgggtatacccactcgcgtgagtgagcaggtgtgacaaggccatctcccttcagtgccacgggccacgcacacgcagggccctgcttatgcacatatatgttttcgtacgctctcgggcgccctgcaacccagggaaagggtggggggcacatttgcaagcgtgcttttcgggggcgagctctcattgcaccgggagacgggagttgagctcctctcgtaaatgaaaatcctttgtaaaagagacacaaagtgaaacaacgcaaaaaaataaaaataaaatgaactgaa

SEQ ID NO: 11828 - DNA, 568 bp, Canis familiaris
gctttgttctgttttctagttccttgacgtataaaggaaccttgtttatttgagatctttcttcttgccttgatgcagatattgatccttatgaacttcccttttagaactgtgtttgctgcatactttgatttggtatgttgtaagtgtccatttgtcatttgtctcaaggtattgagctctcttttgatttctttgacccgttgattgttcagtgatatgttatttaatctccacatatttgtgttttcttcttgtaattgattctagtgttatattattgtggtcagaaaagatgcttgatatatttcaatctttaaatattaaaacttgttttgtggcctaatatatgatctgtcttggagaatgttccacgtatgcttgaaaaataatatgtattctgttccttttggatagaatgttctatttatgtctgttaagactatctggtctaatgtattatttaaaaaccaacgtttccttattgactttcagtctggatgatctacccatttatgaaagtggggcattaaagtcaaaatacaaaaataaaaaaaaaaaaaaaaaa

SEQ ID NO: 11829 - DNA, 516 bp, Canis familiaris
gaccatccaggcccaatcagtgctggatatgcacctgtgctggattgtcacacaggtcacattgcttgcaagtttgctgagctgaaggaaaagatagatcgtcgttctggaaagaagctggaagatggtcccaagttcttgaaatctggggatgctgccattgttgatatggttcctggccaacctatgtgtgttgagagcttctctgactatcctcctctgggccgttttgctgttcgtgacatgagacagacggttgctgtgggtgtcatcaaagcagtggacaagaaggcagctggagctggcaaagtcaccaagtctgcccagaaagctcagaaggctaaatgaatattatccctaatacctgccaccccagtcttaatcagtggtggaagaacggtctcagaactgtttgtgtcaattggccatttaagtttaatagtaaaagactggttaatgataacaatgcatcgtaaaaccttcagaaggaaaaaaaaaaaaaaaaaaaaaaaaaaa

SEQ ID NO: 11830 - DNA, 620 bp, Canis familiaris
ggaaccccggggtggcgccccctgcgcccgcgaccccgccgtccccaagcctgtcgccagcctcgcagcagctgcgtgcccacgggggcaccgtcctgtcggagctgctggaatcggggcagaggcccggcgctccgtgggctcgcccccaggtttccatcgtgtgcatggggagcagcgcgtagctcttcagaccagcccccaggagggcggcacctgacggggatggaggggggccaggcatcgggctcacaggccacagccgcgggcagtgctggggcgaaaggcccaccaggacctttcctggcatttggggctgaggccagtcatgggctctgtggtgttagtgctcccggaagtatgtatttgattttcttaaattccttttaaagaaatctagtttcacggttctggtttccggttgtgaacgttgaaagtctggggctgcagctgtcgtcctgccagttcttttactgtcatgtaaccaactccctttgtacgtggatttcagtgtaaagtctgcatgttccttttgtgtgtatttaatcatgaaatttaattttgcacttatttgtaatgttccttttaaataaaagtgactaattttgttgtaaaaaaaa

SEQ ID NO: 11831 - DNA, 539 bp, Canis familiaris
ggggccgccgtgccggtcagcactcggcctggagcagcttgggccggggcgccttcacctgcccgggctgtgggcagcccccccaccccacccccgacaccccgctctccccccacacttgagggctctctgcgccttccctgctgtacccaggagcttccagaagccccatccccaagtccaagctccagtggcttccatgcggaggacagggccagacgtggggactgcaacgctcccaggtccagacaaggccgcgggccgccctctgagccgcctgaaggtgccggagagcaacggacaaaggagagcaacggacaaagaaacaaacgacggcagcccggggaggggggggctcggcgctgccttcagcctgggttgtggtcctggtcccgggatcgagtcctgcctggggctccctgcgtggagcctgcttctccctctgcctctgcctctctctctctctctctctctctgagacacatgaataaataaaatctttaaaaaagaaaaaaaaaaaaaaaaaaaaaaaaaaaaaa

SEQ ID NO: 11832 - DNA, 629 bp, Canis familiaris
aaaaatgtaaattattcctgaaaaatctttaataaaacctttgcaattaaaatatgcccctcagaaccatagtcaggaaagtagttcatggagatatttagaaataaagtgaaactaatagaaacaaggaaaagatattcttttttttttaaagatattcttttgtcactattacttaactttattctagatgtgctgaaagttctaggaattagagaaacacaatataaaggtaatcccctagccctctggataacatccagtgctttgttctgggcatttagttactgtgtgttcacaatctgccttattggattttcacccattttccagtaacttctatccacacagtctttttgggtttttttttgtgattttatttatttagtcatgagagagagagaggcagagacacgggcggagggagaggcaggcgccgtgcaggaagcccgatgcgggactcgatcctgggaccccagggtcatgccctgagccaaagggagatgcttagctgctgagccacccaggcgtgcctatccaacacagtcttaaagtgtttttggttagcttaatgattttcacattaaaaaaaaaaaactcaaaaaaaaaactcaaaaaaaactcaaaaa

SEQ ID NO: 11833 - DNA, 671 bp, Canis familiaris
gcttaatatttggatcaattttattgggatgggggggtttgcatacaagagtaatatacatatatatctaagtctctgaaatgaaatagtttttagattactttttcaactgtaaataatgtacagttaatttcacaataaaaattgttttctgcaaattttctagtacagcaaaggagaaattttgtagatgagaaaaaatcatgtttagaggtctaatgttatatgttttcatattacagagtgaatttgtatttaaacaaaatttaaattttggaatcctctaaacatttttgtatctttaattggtttattattaaataaatcatgtaaaaattctcaatgtgttttcaaggaactgtctctaaagaacaagtaaacagaaaatgttgctagtatttatagtgttgtaaaacattgcttgtttgtatcacaagctccattggtcagataaaaattgcagaattgtcattttctcattttttgttgctgctgtgccaaagagtggcttccagggagcacataatggatcacctagctccaaaggttagaatacaataaaatgttctcaacaataatactcaacatacctttaaaaaacaagttttctaattagaaattagatcaattaattgttaaacttgggaaatatggaagcacaaatagaaaaa

SEQ ID NO: 11834 - DNA, 721 bp, Canis familiaris
acaggcaggcaccggcagcagatcggcggttttcctcaaggtcgccgcacacccccggtacaacgcgagcggacccgcttgtggggcttggtccttccgcagccctggagagccgaacgtgacgacgcggccatgtgtgaagttcgtggcgcagcaaccagaacccggccccgggccaacggcagcgcggccttgcggccccgcggctcctgagccaacgacgacgccttcctggagcttcccacccgcacccgttccacgcagcgcacgctcaccggcgcgcttccaggtcaacgacacggagccgccgcacgtgcagctgctgcgcaagccggtgctcacaggccatggcgctgctggccctgctggacggccggcagctgtgggccgaggtgtcgcggggcgggacggtgctggacagcaaccacacggtgggcgtcctggccagcgcgcacctgccggccgggccccgggacgcctggcgcgccaccgtgctgctctacgcgagcgacgacacgcgcagcccacgccgcccgcgccgtgcccgtgacgctgcgcctgctcggggtgccgcggggcccagggctcgtctacgtcaccctggccctggacaacccgcgctgcagcccccaccgcgagtggcagcgcctgagccggcccgtcttccccacggcggaggagttccggcgcatgcgcgcagccgaggacccggtggccgagg

SEQ ID NO: 11835 - DNA, 646 bp, Canis familiaris
gtaccggctccgcccggcacagcacaggatatggggcatcatccgacatggcgcccagcttcttacgcatttgctgaagcaactgtgcccaaagtcacagtcatcaccaggaaggcctatggtggtgcttatgatgtcatgagctccaagcacctttgtggtgacatcaactatgcctggcctacagcagaaatcgcagtcatgggagcaaagggtgctgtggagatcatcttcaaagggcacaaggacgtggcagctgctcaggcagagtacattgagaagtttgccaacccctttcctgctgcagtgagaggatttgtggatgacatcatccagccttcctctacacgagcccgaatctgccgtgacttggatgtcttggccagcaagaaggtacagcgcccttggaggaaacatgcaaatattccattgtaaacagattaaaggaaaataaaccaagaggcaattactgcctggccattcatacccattcctgccttttgcaatcatgatacttggaattctaaataccagtaataacttgaaatggctgtttattaaattctacaaagatttcatgtatgccttactgtaaaattatttgctttattaaaaacttgttttaaccagtaaaaaaaaaaaaaaa

SEQ ID NO: 11836 - DNA, 680 bp, Canis familiaris
agagggcggggagcccccagttctggcccgtgggacctatttcgggagctgctggaggaagggaaaggggcgaccagaggcaatagagagtatgaggaagaaaagcgacaggagaaagagaggcaggagaaagctctgggcatcctgacctacctgggccagagtgcagcagaagcccagactcagctgccttggtatcagctacccccacggcaaggggccccccagctcagcccaggtccagatgaaaagatcaagaaccgcctggaccctctacaggagatacagaagcacttgaggaggaagagacggcacagtggggacaatggtggccatggcaggaaggggaaggagaagcctgagaagcagcggcctgaagtacccccatccctggaccagcttcgagctgaacgtcttcggcgggaagcaacagaacgggctcgggcagaggccctgctggcacgagtccggagcacaaccccccaggaggagcagcctgaggaggagacagatgaacggcggaggcggtacaactcccagttcaatccccagtgggcccggcgccccaccagcaagaccccagcgctcactgactcctggggggagaggagaggccgcagctgccagccgtcatataaaactatttattcataaatattttccaaaatgaaaaaaaaaaa

SEQ ID NO: 11837 - DNA, 479 bp, Canis familiaris
aatggcctcttctcagacccaggttgggcagacagcttgttctccggatttctcttatatgttgacacagattatctagattccatatcagaagatgatgagctgtgatcgggactgatatcctgaatgttccgagattcctgtggcagacactttgatttaatctggggccctggaaggtggagcaagcagaaatgagatccaaagagactcccactcagattccaaagcacttacagagaattctaacagaatctattaaaacaagatgaaccaccaagtggttgaaaccacaccaaaatgaattctataaaacaataatcccagataagaatcctctccaaaacaatgttcataaatatttaaacaagttaaagacaatgttaacaaattttctattaaactcccagagtaataaaatcagctggcaatgatattgtctcattaaatcttcataaaaaaaaaaaaaaaaaaaaaaa

SEQ ID NO: 11838 - DNA, 608 bp, Canis familiaris
tctttccttctgtgctctgttcctagacagccttatttggcccaatggctttggttatctctctgtctatatcgtgacacatttataatgtgtccagtccagacctccagtccagacctctcttctgaacttgagactcagaggatatctgcttattcaacaccacccttcagatttctggagagaacctcaaacatagcatgtgcagaattggactcctcccactttccttttgtgtgcctcaggttacaaatccgagtcattctttgactcctctttctaccttacttccatattcaccaccagccagatcctgttgtatttgcctcctaaatcttcccatatccacacacttatctgcttcctctgcgactactttttttctaccattttcagtttttttttaagattttatttttaggggatccctgggtggctcagcggtttagcgcctgcctttggccggggtgtgatcttggagacccgggatcaagtcccacgtcgggctccctgcatggagcctgcttctccctctgcctgtgtctctgcccgtccccccccccccccgtgtgtctctcatgaataaataaataaaatctaaaaaaaaa

SEQ ID NO: 11839 - DNA, 402 bp, Canis familiaris
cccaagatagaggagaaggaagtctctggtgcctgtcccgaaagccatcgacagcttccacccagaaccccatccccgagtggccttctggataatgaagctgccacggcggaggtcccaccaggacattcaggagggtggccgctggctcagcgagaagcgacaccgcctgcaggccatccgggatgggctccgggaggggagtcacgaggacagccttgaagaggggacccaggggtcctcccactccaagctgccagcccgcaagacccacttcctgtacatcctcaggccctctcagcagctatagggtgggggctagggaacacctgcatgtaccccccagccagaccccaccccaagcaccatatggaaataaagttcttacatctagcaaaaaaa

SEQ ID NO: 11840 - DNA, 529 bp, Canis familiaris
ccagagtatacttaagagacttggagcaccaggagttgatcatcagaaaatggaaggaaatctggattttacccaaagacatgtaacatcattttctgagctgcttaaaggaatttcttgcttatggtaagaaagtagactacaatgtttaactctataaagggtcaggtttggacaggccaaacccaggagattgacatttctattcaaacttatttatgctttgttaatccctttaataatagaatggcatttgtctgatcaggaacttgtcatggtttccttttttagaaggacttcataggaaacaaatttttttacttcaattatcagtgtcccaaaataatttcaaacaaactgaatccacattacttttaacttcagaaggcctcatttataagattatatatttaagaggcagttaactattataaattattttggtgaaatatggtactatcgacatttaaaataaaggatccttttgatgatttaaaaaaaaaaaaaaaaaaaaaaaaaaaaaaaaaaa

SEQ ID NO: 11841 - DNA, 463 bp, Canis familiaris
  misc_feature (57)..(57): n comprises a, c, g, or t, or includes no nucleotide
  misc_feature (64)..(64): n comprises a, c, g, or t, or includes no nucleotide
gcaaagtggtccccggttcgtttcaagggccaggtgtacatcctcagccgggggaangtccccnccaactggtccctctacaatgagggagctggtgaagccatgaacgtgcaaggtgattatgagcctatcgatgccactggttgtcatcacatatcaactccctcaggctgaagggaatatgcaccgcctccagagcaaggtcactgcgcacaatagacccgctgacaatgaggagactgggcctcctcctttgcccatctttccgagcacaggcgctaattgttgtgataatttgtaattgtgacttgttctccccgggctggcagcctggtgggggtgccaggccccagctttgttccctgctccccagtagcctgcccaagtggtcatcagtagcctgcccaagtggtcatcagaggagagggtggggttggcgtcggtggggagatgcaaaatgaca

SEQ ID NO: 11842 - DNA, 507 bp, Canis familiaris
  misc_feature (98)..(98): n comprises a, c, g, or t, or includes no nucleotide
  misc_feature (176)..(176): n comprises a, c, g, or t, or includes no nucleotide
  misc_feature (178)..(178): n comprises a, c, g, or t, or includes no nucleotide
  misc_feature (185)..(185): n comprises a, c, g, or t, or includes no nucleotide
tggagcggcctggaccgacgtcaatggatgatgcatggcccgtaacacatggcaaagaagctcaatgactgttgcgcattgtccaagcaatgccttcngagatcagtccatctggcttcaccttggtgtagaaccccccttgcaaggtccctgggtgaatgccaattattaacacngntggtccncccgggaagactcaacccgcattgggcgagctggaacagtgaggcgtcaggctgtcgatgtgtcccccctacgccgtgtgaatcaggccatttggctgctgtgcacaggtgcccgtgaggccgccttccggaacatcaagactattgctgagtgcctagcagatgagctcatcaatgcagccaagggctcttccaattcctatgctatcaagaagaaggatgagctggaacgtgtggccaagtctaaccgttgatcacctggctgtggcttcaataaacctgtctgcccttggggcagcctcaaaaaaaaaaaaaaaaaaaa

SEQ ID NO: 11843 - DNA, 427 bp, Canis familiaris
caaatggcagattcaggtcgggtccgtggtgtggggggcgcggcgtcaattcaaaacttggtatcagattttcctcttacttacatcaaaggacaagacactattatatattatcaacatgaacacagagattgaattattttttgagtagttttataagacttatcctacagcccaaggcactatagaaaactagcacacttaagaaaggtttttttttttttttttctgaataacattttttctatttccactgtttttatgagatgttttctagtttatggggattttaattgaaaataaacctgagtgtcaatagaactgtttttttctcacttcctaacaggagaaaatgcaaaataaataactaagcagcctttgtttggttctgaaccatatgcagcatattgttatcaggtcctagctt

SEQ ID NO: 11844 - DNA, 596 bp, Canis familiaris
ggctccgctccccagttccttaggagcccatcctggcgacgccccctttgcggtcgggcggtggaagccccggggagtatgtgctgcgctatgaggccttcatctgtgaccgtgctaacagccgggaccctgcgtatagtgcttggccttcgcggaccaggtatatgagcacgctggcccgatgaccttcaactgagaaatgtcattgagcggcttcaggaagctgacccctcggagttatatatgcacggtggatttgggctgtaacttcttcgttgacaccgttgtcccagacacttcacgaatctatgtggcgctcggatatggttttttcctggagttgacactggcagaagctctcaagttcattgatcgtaagagccatctcctcacagagctcagcgacagcctcacccaggactccatgaatatcaaggcccatatccacatgttgctagaggggcttagagaactaccaggcctgcagaatttcccggagacacctcactattgacttcttcccgcctccgtagacattaaagagcctgaatgcccaaaaaaaaaaaaaaaaaaaaaaaaaaaaaaaaaaaaaaaaa

SEQ ID NO: 11845 - DNA, 461 bp, Canis familiaris
tttctgtagtttttgtttctgcacggagcgagctgggcctcggtccctgctgccgggttgagtgcacaagggggatgtgatgtagtagaaagagcacggagcctgaagattgaggaccagctctgttacccagggtccctgcagcctcggtttatcacttccctgggcccctttttccctgtctgtatagtcaggtgttaagctaagtgttttctaaactttgggtcctgcgtctgctgacaggtgggccaaagttgataattccattttgtccccattcattatttcttttgagttgaagaaaatattgaaatgaaatcattggtaccaagttagtatctataagcaaaccagatacatgaaaaggatagataaagggggaatgtagaaaatataacagattccacctagaaaaatgttagcgacgtggatgaaatgctaaggggaatcatggttcttta

SEQ ID NO: 11846 - DNA, 606 bp, Canis familiaris
cactagcggttaacaggtattgtcctactaattcgtccttagacatcgttcttcatgatacaatataatgttgtagcctcattttcacctatgtgctttcacataggaccacttttgccactatgggaggattttgccccactgattccccttattctcacggtttatactcttacgatacttgagccaagattcactttacacattatgtttttgggagtaaatataactttcttccctcaacaatttcctaggtttatctggaatacctcgtcgatactctgactacccacgatgcatatactacctgaaataccgtctcctctataggatcgtttatctcgcttacagcggtgatgcttataatttttatgatttgggaagcctttgcatcccaacgagaagttgctatagtagaacttactacactaaccttgagtgactacatggatgtccccctccataccacacgttcgaagaacctacatatgtgatcccaaaataagaaaggaaggaatcgaaccccctaaaattggtttcagcccatgtcataacccttatgtctttctccatcagaaaaaaaaaaaaaaaaaaaaaaaaaaaaaa

SEQ ID NO: 11847 - DNA, 654 bp, Canis familiaris
acaatagaccacccttggtccagaaattgcagcagtcctaatgagattattctgtcccctgttcaggatcttatttcaaggacatcttcagcttcccacatgagagccacagacctatggatgcatcgactgaaataacacttcgtttttattccttcataaaatgttttgaatgttaaatccactgatattacaagatttcagaggcacacacagtgtgtttgttgtgtttgtgtttgtgttctccattgttttggtaaaatcacaagatgtggattatgagtgctaataagggaactatggcacgggatagcatcacatgaaaccatagcacacagaacacttagaattgcacagactctgcacaggtggcagcacacctcgggttttgttaggccagaaatgtatttgaaagaaatgcacacgtttgattcatataagatgtcttgttaagtcccttgcactaactggatgtgtccattttaaaataattatttattgtgtaaggatgaaatagcttttgaatcagaatatagcggaatatgtgcttttttgtttgaagcttgaaagtttcaactacttgtaaaatcttaacacataagctatataacttttaaagcctttcaagtgagcctggctgatacctctaaaaaa

SEQ ID NO: 11848 - DNA, 628 bp, Canis familiaris
ttggggccctgtgtgcgttcatggggctaggaccttctctgcctgactctgtccgcctgaagcagcccacccgggatctcacagcatcagctctgtgccacctcccacagaggggctcctcacccatctagagggctttgggccagggcaccgagagcccccagtctggggcaccccacagggagggtgaagcgtgccgggcaccccacggggaggggtggcacctggggctcttggccctcccccccggagcctgtgacctgttaggcagccgggacccttatttaaaactcacctcccgatcgcccctaaacacagccgaagagaagagaaaggaccctgtgtattttgtatttaaaagtaattaattaattatttaaagagcggaaaccaaaccaaaaagataaagagagaaatgcccacacggaaccacgcagactttggagacacgggctcaccctactccttgcctcacgggcttcctcagcgactatggggagccgtttccaggcccaccccccctccctcagcctgcctgtagcaccccctgtgaatgttggaatatatggtctcctttgcctccaaaaaaaaaaaaaaaaaaaaaaaaaaaaaaaaaaaaaaaaaaaaa

SEQ ID NO: 11849 - DNA, 605 bp, Canis familiaris
  misc_feature (1)..(1): n comprises a, c, g, or t, or includes no nucleotide
ntttgaagaactttcccatattttctccccccatctcatgaggagaggggcacactgctgagaaactgatgaagctgcagaacccacgaggtgttcgaatcttccttcaggatattaagaaacccgaccctgacgattgggagaatgggctgaatgccatggagtgtgccttacacttggaaaagagcgtgaatcacgtcacctacctggaactgcaccacaactggccaacctgataaaaatgacccccaccttgtgtgacttcacttgagactccttatctgaacgagccggtgaaatccctccaagaattgggtgaccatgtaacccacctgcgccagatgggggctcccgaatctggcatggcagagtatctctttgacacagcacacccctgggaaaccgtgatagtgagagctaacccttaggctgtcttcccatagccgccagggtgacttccctggtcacccgaggcagtgcatgcatgttggggttacctttaccttttctataagttgtaccgaaacatctacttctttcgtttgtatcattccttccaataaagtaatttggtaccccaaaaaaaaaaaaaaaaaaaaaaaaaa

SEQ ID NO: 11850 - DNA, 395 bp, Canis familiaris
  misc_feature (1)..(1): n comprises a, c, g, or t, or includes no nucleotide
ncctagcctccggagtatctattacttgagcccatcatagtttaatagaaggtaatcgcctacatatacttcaacccttattcattaccatctccttaggcgtatattttacgctattacaggcctccgaatatctatgagacatcttttaccatctccgatggggtatatggatctaccttttttatagccactggatttcacggattacacgtaattattggctctacattcctcatcgtgtgcttcctccgacagctatactaccccttcacatcaaaccaccccttcggatttgaagccgctgcatgatacttgacactttgttgatctagtctggctattcttgtatgtatctatttattgatgaggatcctaaaaaaaaaaaaaaaaaa

SEQ ID NO: 11851 - DNA, 493 bp, Canis familiaris
ctcttgcgtcctggtgtctgagtctgcacccccaaccctaggaggggatgggtgccacagccgctaactggctgtgctctcattcagcctgcccccctcagagggaagcgttcttgcccactgtccttttgcctccatgctgaggttggtgctgtatttccaagggatggtcctcttcaccccccctcgctctgtattaaggactagggcagtagcatgggggtgctccccagccctcctgactccctccccctgtggggggtgggctacggtgtgataaactctctttgttctcttcccctttgtccctggtaggggctctcccacagcatctgggctgtggccttagtagaagggcaccccttcctctgtgccagaggattcatcctggccttgtgaatgggagagggggcaggtggaatgcacagaactcacgtgtaaaggaatttgagtaggtgaataaaagctatacatgttgaaaaaaaaaaaaaaa

SEQ ID NO: 11852 - DNA, 552 bp, Canis familiaris
acagtatgtacctaggtattaggtttacctagtcgttactttttccggatctacctgaagactaggaataaactagcctctaatcagggttcccacttgatgtttgccccatatgctattctgagttgattgtggtgaattaagtctgtttaagttaaaatactttgattacacaaatttttaaataccgatccctatataaccgtgggtcttcttaactaaaatgatccttagtctcttgccccctttttttaaatgatgagtttgtccataaaatttactgtttttcttagtgctaataccttgcctcttattcctgctacagcacggtggtgatattggcacttctgataaaatattgtgccttaggagactggaaattttaaaatgtaccagtccttttaatgatgagggaattgatagaaattttctaaaaagcccaaatgtttttttccattctgaaatgtgttgtgccccccatgacctatttatgatcttaaatctttttttaaaaatgaaaaaaaaaaaaaaaataaaaaaaaaaaaaaaaaa

SEQ ID NO: 11853 - DNA, 588 bp, Canis familiaris
cctgccagaaacttttggcaaatgtcccaaacatgcacttgaaaagatccatagcatcttattaccctactgttttgatttgatcctagaagttaatatatatggttcggtgggctgggctatcccagattgagatagcctagagaaagtgatcctggttctaggatatggaagggctgcttttagtgattagactcagaccaggctagccttagaatgtatcagtgccatgggcaacctgaatctaatctggcttcttcaggctttttctggatttactcatcctgccttcaggccaaacctccaaataccatctggaatgaagagtccgtggcctggctaaaggagagggttagtaagaaaaatatcttatctttcccgagcaggtccagtctcccacatgcccaggctcagcaacagcaggtaacagatactagcccaattgcactgactagcatttataaaatgtttaaagatttaaattatgaaccccatatcccaatggtaccaaatgaaataaatgaagtgggattgtataattatatataataaaagtgacttgagtatgaaaaaaaaaaaaaaaaaaaa

SEQ ID NO: 11854 - DNA, 612 bp, Canis familiaris
  misc_feature (163)..(163): n comprises a, c, g, or t, or includes no nucleotide
  misc_feature (174)..(174): n comprises a, c, g, or t, or includes no nucleotide
  misc_feature (279)..(279): n comprises a, c, g, or t, or includes no nucleotide
  misc_feature (295)..(295): n comprises a, c, g, or t, or includes no nucleotide
  misc_feature (399)..(399): n comprises a, c, g, or t, or includes no nucleotide
  misc_feature (441)..(441): n comprises a, c, g, or t, or includes no nucleotide
gggggcgtgcctccacccgaccgaggacaccccatctttgccggggctgggagaaaagccgactcttctccaacgtagaggtaaaacaggccaaaccgaaccggagttaaattatgggccgcgccaggggtgagggtgcgacaggacgagctcaggaccgacngctggacgttncaagtcagcacaagtgtcgccacagggtcaagctttcccctgttgccaggaatcctttcaacggtatcctccgggctgtacggacctctggggtgcccgacggcnttttctgtatctctgnctgcttttcccataccccgcgcctgaccgagggcctttgcattgcctcccttccttcccaaggtgtcgtgtgagggttagttccacccagaccacctggtggcncagtcgccccgtgggactcgaagatcaaggacactgaccctncaggaactctgtccagggaacccagacgacctctaatttctttcttttttgtttgtttcaggctacgtaaactcttagcagtaaatgaaaatgagtattttaccgaactgccattgaaagaagaagcattataggagaaaaaaaagaccaaatgagaattattaaaagaga

SEQ ID NO: 11855 - DNA, 643 bp, Canis familiaris
tcatggtttatgaaaggaaatttacacccgaaggaggttggtttatataagggtaacctgttctgaatggaaccttgctatatcgttttcaggagctagtgacccaagtcaaaggaggaagattaagagatcagtcttttcagcagtataagtaaagagcttcctgttctttggtagaagctcctctagattgggtagattcccaataaaaatttagaaatgtggaaagttttaattacacaggccttgaacaccgacttccctaaacccttgcaacccctagtgaattctgatttctagactgcttggaaaatcccgtattccctttgctaacttaatatttggggaccctgctccttggctgttcttttcttcccgtctttgtcagttgtacttgtggcacgtgtttctttacctacgaccccgttttgtttaaaaccaccaaatcgtagagaaacttaagtcttacttagttactagtaatgtgtttttatttattgaaaattgtttgtgctaaggattgtgttagatttaccaattagtggattgattcctctttgttgtgttgctttccttgttgaaaataaatagaactttgagtctctaaaaaaaaaaaaaaaaaaaaaaaaaaaaaaaaaaaaaa

SEQ ID NO: 11856 - DNA, 581 bp, Canis familiaris
gaggatctctctaaggaggcggctgcccgggggggggccctgaaccaggcccctgattggtgctgccctcctctaggtcataagagccctggtgaccacacagcagtgaggctgccaggcggccgggccttcctacacagccacatgatacccccgtggccaagacacactccgtcacccacatatgacatttgactgcttcctggatctatgggcttgagtggtatgtagaaaaacgctcgggatttaaaaactatgctgggccatacacgagagcccatagagttcttgactttggggaaaatagttgagaggagagaccagaaggatctcatcgatttcccacccccacggtgccctgagcaactgcccttttattcaattcacgttctgggtgcccacaccaggttttgtttaacgaaaatattctctatattgctgaactgtttgagaagaaccaaaaaaaaaaaaaaaaaaatgaggtacagactaagatatggtcatgaatatttcaaacccttggcgtgctgaaatgaccctgttatgcatatcttaaaccacgtaaaaaaaaaaaaaaaaaa

SEQ ID NO: 11857 - DNA, 583 bp, Canis familiaris
caggcacccgttgtagtttgttctccctacgtgcccttcacggctggggctgccaccccacccggcccgaatctgtctcaacctgcaggaacacacacggcggcgccaggcattacctcacagcaggactgcagtttgtctggcttcgctcctggcacaggatggagcagcccacggagcctctttcgcttccttgttcctgcctgtgcccctttctagaagccgcacgcaggttgccaggaggtgacatgaaagaggaggaactcagtgacctctccctctcctgcattcctccaagctgcggaggacttaactgccgctctgaaggacaccatgcctgtgcgtgcatgcgtgtgcgcgcacgtgggagttggcgtgggacaggacagccgagctcacggggccaacggagtctgcactctgcaagtcagaaaacgtttgagcgtccgggagtcacagatcctctcctcctccatccccttcagcatttgcactgcgtccccccagacgacacagccaataaatgatttggttgcatggaccccgcgaaaaaaaaaaaaaaaaaaaaaaaaaaaaaaaaaaa

SEQ ID NO: 11858 - DNA, 627 bp, Canis familiaris
  misc_feature (336)..(336): n comprises a, c, g, or t, or includes no nucleotide
ggcaccgaggtgcttgccctggcgttgtggtcactctgctttgatgaccctggtcactggaaaagatgtttgtccgaggaggaggctgaactgacccaagagtcggtccccagagaagcttcaccagtatcgccaggtgcacctgctacccggcctcgggagcacaggctggtgtgagatcaccgcccacctcctggcactacctgagccgacgcccgagaaaaggtgctacagacgctgggcgccctcctggccaacctgccgggaccgctaccaccaggaccccccactcagcaggatgctggtcagcctgcaggctgagtaccaggctctgcncgccctggagctccgagatggcgaggatgagggatacttccgggagctgctgggctctatcaacagcttactgaaggagctgagatgaggctgctccctaatgcagggaccagactgggacatcagtgaggctggcgggcacccgttggggtgggcttctcggggtacactggccaggagggaggacttccctactggggttgcccaccatccgggccgtgctggcttggcccttaaatggaggtatgagggcccaaaaaaaaaaaaaaaaaaaaaaaaaaaaaaaaaaaa

SEQ ID NO: 11859 - DNA, 546 bp, Canis familiaris
gtctgagtcaatcccatcagggccccgagcaggtccccccagcatgcccttcgcccatgattggtgaccaaaccccagtaactcccatctgcagataatctggaacagcaggaccaacaggtaacacttaatggtcaccgaccccgttcatgacatcgacacactctcttcgtccattccctagccggggacttctagctcatttaaccagataaggaaactgaggtccacatgtccccccgtgaggtacgacttggccaggcctagccaccaggcccatgtctctggctactccctggaccacgagactgacccctcttattcccgctgctcggtttctgcctgcgtggtggtcaggagccaggaggggcgaggcttgtgctggaggggagaggggggcagacccgcttcctgcctggttctggctgctgcgtgccagaccttgcatctgtctctctgcatatatgtctctttggaatcggaatttcattatatgttaagaaaataaaggaaaatgacttataatgtcctaaaaaaaaaaaaaaa

SEQ ID NO: 11860 - DNA, 544 bp, Canis familiaris
taaaagggaatgatttaaaacacggataatttggctccatcttgtaagttccccaggaattaccagttactattgtcctggactttgaattaaggtaacccctaaagcccaactgtatgggcaaataaagtaggaaataaatatgtttacttttcccttgctttagtatccttatcctcctagatgaaattgaaggcttgatattatatatgtccatttcctttacatactttatgtacttatatatgtgtaaaccagcatatattgaagtctattagggcccatctacctttggaggttgaaccttggatttaaataatattattttggagtcatacatctatgccatattttattctgtccaatgctatttccattaaatagtttaactagattgtataaaataactttattgcctaacatgaaattaccaagcttaggcataggggaaatgggctttttagaagccaggaattctaagtatattctgttcttcaaataaatgtcattttcttctttaaatattgaaaaaaaaaaaaaaaaa

SEQ ID NO: 11861 - DNA, 527 bp, Canis familiaris
  misc_feature (375)..(375): n comprises a, c, g, or t, or includes no nucleotide
  misc_feature (392)..(392): n comprises a, c, g, or t, or includes no nucleotide
  misc_feature (412)..(412): n comprises a, c, g, or t, or includes no nucleotide
  misc_feature (419)..(419): n comprises a, c, g, or t, or includes no nucleotide
  misc_feature (435)..(435): n comprises a, c, g, or t, or includes no nucleotide
ttgagcagctctgtcattcgagaactgaaggagccatactcagatgctccagaggaaatccgtgatgctcggcatcctcatgttactcgccagagtcaggaggatccacataggattaactatgaggagagcatgatggtgcgtttaagtgttagtaaacgcgagaaaggacggcgaaaacgggccaatgtcatgagctcacaactccattccctcacacacttcagtgacatcagtgctttgacaggaggaacccctcatcttgatgaggatcagaatcctatccagaagcggaagaagatactgaagaaaggtcggaagaaaaaaggttttcggaggcggcggtgattatgggtgtgcatatttatatgtatngtttgttgtcatcctgnggatacttctttaatttcancctgtantgtaggttttatttcnttttcccttggaattccttgattgttctggatatgtggaaagatctttattaataaaattgattttacttaaaaaaaaaaaaaaaaaaaaaa

SEQ ID NO: 11862 - DNA, 661 bp, Canis familiaris
agctcccctgagtctcttgcatgtgttccctgggtccacccttcaaggttttcctttgcctcccagagagatgagggagatacggtctgtctccccgtctccccatgacccggacccactggcagccctctctggaccttgtcccatctctgaatccaaggcatggccaacccacacgctaatccaccccgccctcccaaaagaaaagcacagagaagtgatagatcagaggcctcatttagtgggagcttaaatttcaggcgtggggatctggctcggttccatggagatttacaacagcaggtgcaaagggaagctgagactgaggcagagagggattttgtgtgttgggggaggccgaggaggggggctcatttgatctgtctgctactggaaggaaaataaactccatttgctctgctattcttttaagaaaccaaagggatgaaagaaaccttaggcccataagcttcccttttattcttccctttttctcaatagatcagaaaatgatcccatattattaaccacctagccttctccccaaaatatgaattaaaagaacacgactgttcctccgtgcttaacaatctcatgataacagcccagcaggctggagctcaagaaacataatggaaaagaaaagtcttaggtttgaaaa

SEQ ID NO: 11863 - DNA, 451 bp, Canis familiaris
tactcaatattggggacactatggaatgtaagtgaacactagtgaatcctgaaaaaaattttaacccttctggaatgatgttcagccacctgaaatttttgaatcttatttctttgaaagtggcactttacccaaagattgaccactgagatagctattttatcacgttgtgtttggtttcttgagagttcgagtatttgacggtgtaaatgagcttttctgccaactgtattaagcagatcgtcattactctgccattcccccaagtggagaatgtttatattctcacatatgtattttagacatacttgttagttatataaaaaatagatgtattctctgatgtatttggttgataaatattaatctgaatttctttcatgttctttgctattttgagttcccttatagattcatgaataaagtcattagccgagaaaaaaaaaaaaaa

SEQ ID NO: 11864 - DNA, 649 bp, Canis familiaris
  misc_feature (341)..(341): n comprises a, c, g, or t, or includes no nucleotide
gaacgtgccttggccctttccttagccacaaaggccacgcctcacggtgaaactcttaggtttaacagtaagtcctggaagcccgaactactgtctatttcgagaggcggttcatcttttccatacttgtttgggattcagttacaccacgattcaagtaattcccctcctcaacagaaaaggagggaataaaacccactccattgccatggtttatcctcctcttctatcttctgttatacattagggcatagaatgctctttacatctcctttaaccaccaccaaccttaagccatgtagctgaaattattgtatccactggatacagttccatattcncttaaacctccttgttttagacacactaacactttatgcccaattgcagattattctgcagcgatggaattgcatgtttgtgttgtatatttagtatgaactttttttttcagaacataatgtttcttagttatccaaagccgttggaaaatgtttgccagactatgaacatagaattgctgcttttatattttaactgcagattgtgaatttcactgccttatattatttatttctgaaaccaaagaggcctttttccaataaaactactgaaaatttgaaaaaaaaaaaaaaaaaaaaaaaaaaaa

SEQ ID NO: 11865 - DNA, 551 bp, Canis familiaris
ctttccccctgaggactccagcagcatggctgaccctggggcatgacaggcctatgctccttaattttggatgctccagaggcttccctgggacccgtttaacctgggtctgtgaggggctctcttggcccctatttccatctttagggtcttcagagaggaaccttgaagtcttcccgaaatctagaggagctgggctagatattctgagataagccctgactgaatcaccctccccttggttagcaccacccctcactcttgggttggatgctatgggaattatagaccctcacttgagatttctttgcctgccttccctggggagcctgccacacaccccctgctgagggatctctgggagggccggtgccccccctgtaggttgtcctagatcatgagcccgttagtgcccccctgtctggtatatcgggttcttaactccttcaccagcagccagcaccccccaccccccctctcgcccctgcctgccccctgttcttaataaagtgtgagtggtgaaaaaaaaaaaaaaaaaaaaaaaaaaaaaa

SEQ ID NO: 11866 - DNA, 577 bp, Canis familiaris
gtcctcattctcattctctgcccagcaatctcagcattttcattttgatacagtagagtcacactcataagctggttatatttttagactgtgcctccgaattaaatcaagcatgctcaaaattatcctggaaatcccatattgccagtgaagttctctgtatagtcttacagttagaatccctatagagtgatacacaggtatgaatatattatgaatatagtaagtatactatatacaatacacaataaaaactacatagcaacagtagactcttttaacaccaataattaaactttaaatgtgtgttttgttttctgggcactaggtacgcttgattttatgtaaatttattgctaattccatgccttgtgatagatctagagtgtgagctccacaagggtaaagatttttatctggtttgtttgtgaatatatcctcagagcctagaacagggcccagcacacagtaagcattcaataaatattaactgaatgagtgaactctgatgtatatacctatttataacctggctccatttatcctactttatctgccattcaattaaaaaaatttt

SEQ ID NO: 11867 - DNA, 160 bp, Canis familiaris
cctgcgggccaggtacgccgctgccaccggcgggccgccccccaccccgctgcccggcgcgcggcgggccagcgacccggtgaggcggcccgacgggctggcgggcgcgcgggtgcagcgcttccacagcgcccacgacgtgagccccgcgcgccgcgcc

SEQ ID NO: 11868 - DNA, 468 bp, Canis familiaris
tggagacccgggattgaatcccacgtcgggctcccagtgcatggagcctgcttcgtccctctgccttgtgtctctgcctctctctctctctctgtgactatcataaattagatgatgtatttataaagatttaacattcatgttgtaagagtcccaggagaagaaataaccaaagaaggtactggaacaaatatttgttgaaaatgtcccagatttgcaagaaacataaacctatataagaagttgagtaaacctcaatcaggataatcttgtacttttcaagattttatttttaagtaacctctgcacccagtatggggcgctaactcacaatcccaagatcaagagtcacaggcttcactgactcagccagctgagcagtcttcaatcagggtaactcaaagaaatccacacatcaagatatgttggaatcaaacttctgaaaactaaagacaaaaaaaaaaaaaa

SEQ ID NO: 11869 - DNA, 649 bp, Canis familiaris
tgtagaataataaggatgacgacctcacgtaaatgaacccacaaaagggattgatgcaaagaatcatttgagactctgtgagttatgagaatgcagaaaacttagaatcagtcactaaacctgcaggtgacttttgcaaaacgtatgtttttttaagggcttcttttaaaatgtttgcctttttccgttaccttgagagtattgggttggatttggaaactgtacctactgatggatgtgtgggactttttagaattcatccatctgcatcctttcccttcttttgaggcgacctaggtaattttgcgtacaatgcgtatgaaccacccccaaatgaaaatggtacgagcctctgtgttgtctcttgcataaggacttaaagattgtttttagtttttattatggaaactttcaaacatacctgaacgtagagaaacgtacggcgaccctcatgtatctatcacccgcaacgaccatcaaatcatagcttgttgattgttttgaaacaaatacaaaatgtatcatttctttatatttccgtttgtgtcactaaaaggtgagaactgtgtttaaaaatcaaatataatacactactatcatgtcaaataattacaatttcttaatatcatcaaaaaaaaaaaaaaaaaaa

SEQ ID NO: 11870 - DNA, 564 bp, Canis familiaris
  misc_feature (29)..(29): n comprises a, c, g, or t, or includes no nucleotide
attgcaggccggcacaatcttatgtagcntgtgtggaatgaatgtgtcataaatggcacaagtagagtggaattcgctcttgttcgttagtagattgaagtatgagacagtgtttctgggacatctgaactcttgagccaaggagaatgcccaaaagggcaaggtgggtacccggtgttaccttggtttaataatggagttacctttgttaaaccaaaaggggaatgaatttggtaattcaatggaattcgatagtttccctgtaaaaaccatagcatttcagaacatgaaatatagaaaatatatataatgggacataaatgttacatttgtaaagaaaatgtaaaaatgtaactacaaaatatgaattgcttaaactgtgctgcattgttggatgacaactctttttgtcacagttagagaatgaggttgactaatgcatattatgaattgagtccacaaaagaaatacaaaactctttgtaattctgttaaatcttttatgtggatttatttatgatcagcctactaattaaaaatattttgcttgacaaaaaaaaaaaaa

SEQ ID NO: 11871 - DNA, 598 bp, Canis familiaris
caagggaaggtcacggtcaagtacgaccgcaagagctacggaagcgcctcaacctggaggagtggatcctggagcagctcactcgcctctatgactgccaggaagaagagatcccagagttagagattgatgtagatgaactcctggacatggaaagtgatgatacccgggccgccagggtcaaggagctgctggttgactgttacaaacccactgaggccttcatctctggcctgctggacaagatacggggcatgcagaagctgagcacaccccagaagaaatagggtcctcgatccaggtgaatggtggctcccacaggacaatcgctgctccccgacctcgtagcaacagcaataccagggtgccctgcggccaggcctggtgccatgagcagggctccccgtgcccctggctcaggggcctcatccctgccccctcagttttccatttttggggttttttattgttattaaactgatgggactttttgtgtttttatattgactctgcggcgcggccctttaataaaactaggatatgcctttggtgcaaaaaaaaaaaaaaaaaaaaaaaaaaaaaaaaaaaaaaaaaaaaa

SEQ ID NO: 11872 - DNA, 618 bp, Canis familiaris
ccgatgagatagagggggcaaggcacctcacttctgctccccacgaacccataccccagtgttaccctgagataccagacaacccgactgtggggacactgacacccaaccggtcgtcctcacaagtgtcaaggtcatggagagcaaagaaggcccgaggaggagatttcgcagatcagaaaagactctgagacccgccaaatataaatgtacatgcaactgtaattgatggatcttgaaacaaaggacagtagtagttaaactggggagatccaaatgaatgaactgaactgtagcttaataacactgttgctgcaatgtggatttcttagttttagtaattacactgtggttatatacagtgctgacagtaggggaagctggtgaaagatatacaggatgctctaaactattttgcccctcctgtacatcaaaacaagtattttgaaaacaaaagtaaaaaaacaacaaacaaccctaaataaaacaaacaaacaaacaacccctctatataatagtacagaaaattcttcagtgtctaatgaaggatatacaagaaccctaaggagaaatgataaagccttgatgagagccattcaagaagacataaccaaaaaa

SEQ ID NO: 11873 - DNA, 686 bp, Canis familiaris
  misc_feature (72)..(72): n comprises a, c, g, or t, or includes no nucleotide
  misc_feature (74)..(74): n comprises a, c, g, or t, or includes no nucleotide
cagcttgacttagcatttctagagggcccgaggcttctgggccaccagtgacggggctggcatggcccaggngncggtgcgtgtcagcccaccagcggcaccagagggtccctcggcaggcgtccggggagtggcccattcggactattggacagagccgaaaagagccaaattgtcataattgggacccagacagattggcctgagatccgaaagacttggaggcaccccaaattgcctgcccatcctgctggatgcccaccccacccagtgttacattctgcctcttgtggggtgggtgctccaaggccgtctgctgacgctcctctgtgtcccccagcaagcagctctcccagggtcctccgccatcctgacccgggcccccatctgacctcctgagccccgactgtggctgtccatcttttctccctcctcaactgtcttcagcgggactccctcttgggtcccccccaccatcacctgaagaccccccacgcgccaagcaccgaatgtcaccttgcccactgtcgcggcccatctgtctggcagtggctggtgtgggcctccacttgacccctttaacatgctgatatttctggcaaaattcattgcttgggttttgtctttaacatttatcgctcgcaatcccaataaagcattcaaatgtaaaaaaaaaaaaaaaaaaa

SEQ ID NO: 11874 - DNA, 563 bp, Canis familiaris
ccacctgccctcgctttatcccaaagtagcgagccacggggtctcctgcctggatcctgggcagctggttctctcggagtttgtatcgggccagcagctctgtcacctcttgccttggtcatgacgacgtgctctgggaccagctcgtgctccgtgatgttgatgagtagctcctgctgcagaaactgctccaggatgtacttgggggccatgtcaaccagggactgcttggcggagggagtcatgccctgctgtaccacaatgagggcccgggtgatgttctcctcctgcatccgctggcaatacaccttgatggtcttgattcccactttaggctcctctggaaagaagacaaacatctggtcggtggggtcgtcgttgtgggccaccagcaccgtgaggtccgtgcgccggggccgcccctcgctcggcttgtccccaaactgggccttgaactcttccagcgtctggtccagctcatcctgcgtcaccaggtagccgcggtcgtggcacagctgcatgatggtcttgcggatcttccacagccggtacgtctcctcctc

SEQ ID NO: 11875 - DNA, 587 bp, Canis familiaris
ggttcctacaagagattcatatgagagttatggtaactcacgtagtgctccacctacacgagggcccccgccatcttatggtggaagcagtcgctatgatgattacagcagctcacgtgacggatatggtggaagtcgagacagttactcaagcagccgaagtgatctctactcaagtggtcgtgatcgggttggcagacaagaaagagggcttcccccttctatggaaagggggtaccctcctccacgtgattcctacagcagttcaagccgcggagcaccaagaggtggtggccgtggaggaagccgatctgatagagggggaggcagaagcagatattaaaaacaaaacaaaactttggaccaaaatccccgttcaaagaaaacaaacaaaaaagtggaaccttttctgtcataactacccaaggactactaaaaggaaaaattgtgttaccttttttaaatttcctgttaagttccccttccataatttttatgttcttgtgagggaaaaaagtaaaacctgtttaatcttaaaaaaaaaaaaaaaaaaaaaaaaaaaaaaaaaaaaaaaaaaaaaaaaaaaa

SEQ ID NO: 11876 - DNA, 591 bp, Canis familiaris
ctctgcacacactttcactgtttcctcaaggtagtctatgcccttaacatgtccctcgactccctttacctggttcatttccagttctctttaaaaactcagaagtcatatcctcctgtgaaccttttgactccctgaaggtagctcatttttgtgtagcagaaaaattctgggtttttaaaaacagacctatttgatacttggttctgacgtagactaggacagagccttggacaggtacatctccccgagtcttttccctcctctgttaagggggcatatcaatacctgcgtcgcacagtaatcagggaataattaagtggaataaagttgatagagtgcctgacacaaagaagtaggcggcagatgttagtccccttcctcctttgcactgcatactgtgtctacctctagtattgtaactccaatgtaggactgaaaatgccagctaacctgtttgcctccccgactgtcagcgccgagaggacgagagtctcgtcctgcttaactttgtactcccaggccctcgctcaggatgggcaaataggaattaaataaatgtgtgttgcgttgaacacccccccccccaaa

SEQ ID NO: 11877 - DNA, 419 bp, Canis familiaris
tacacagacaatatagtctggcatttacaagtgtttatgttcatcttacatatataacagaactctcttgctgatagtcaatgacccaatcccatgcagaggaacacaggatatattgtttgattgttttttggaaatacatcttattctgaaagttaatatacttgtgcgtattcatgtaaatgtttatgaaaaaattgttatggaagtgattccattagtattgttctaatacttggaaatgaccttcatatttatatatttctttgttttactgtacaactataaatccaggaaattttttttacaagaaaattttattgtatttgtaataatgtaaaggtgaatctatacctgttcaataaaaatcatcttaaactttaaaaaaaaaaaaaaaaaaaaaaaaaaaaaaaaaaaaa

SEQ ID NO: 11878 - DNA, 671 bp, Canis familiaris
cgtataaattaatataaatgattacctctggtgttgacaggtttgaaactggcactccttaaggacagccataatcccatgaatgattgcattaattattgactatccttagtccattggaagcttttgtatatataggaacttgtagggctcattttggtttattgaaatgccatctaattataaattagctgtagatatcaggtgcttctgatgactgaaaatatatatctgacttgtgggaaacttcatgggtttccttatttatcatgtatgtgattatatatggacacatttacaaaataagaagagtgggatttttccccttcaacttgaatattatccctgtatattgcatgaatgagagatttcccatatttccatcagagtaatatacttgctttaattcttaagcataagtgaacaagataaaatatatgctgaattacttgtgaagaatgcatttaaagctattttaaatgtgttttaatttgtaagacattacttattaagaaattggttattatacttactgttctaatttggtggtaaaggtattcttaagaatttgcaagtactttagattttcaaaattgaatgagagagaacattgtataaccatcctgctgttccttagtgcaatacaataaaactctgaaattaaaaaaaaa

SEQ ID NO: 11879 - DNA, 543 bp, Canis familiaris
aggaaagtgtgcctggcagaaaagagtgtgttctcagcagcaggttggaagggtctgattccagacgtccacactccaggacagagtcggggctgggggtaaggaatccatgaaggtagcttggctgggggaggaaccgcatttgggtaacttgctggcaccaaaagtgggaagaagtgcccaaggtaggaagtgactggccaggtaggaagccccagccccaatgcctgaatggttagaatttcctgtgggaatcgccaccccactgaataattttctgataagtcctactatggtcttccaaagctgcgttctcacttccactccaactccttcaaatagcatcttgtttctggaatccttccataagtagaggcctaaatctttttccaacctgaggtcctaaccctggctgctttttcctgtcttggaagtcacctcaatcccctcctttaggacatgcctcctccactggccttgaaaggagttcctctttccctgcccagaaccaaacacctcattccctgtgtgcagcagagcaat

SEQ ID NO: 11880 - DNA, 240 bp, Canis familiaris
gtgaataatagccccctgggatgcattaaaatttgctttcatttgcttctggactggccgagaagggaggagatggttatttaaaagagaattccctatttatttgaccaaaaaaaaaaaaaaaaaaaaaaacagttaatatattaatgtgaaataaaccctgtttgcacctttatttgtttgctgaaaatgtgaagtagtaaaaatgaagtgactggaaaaaaaaaaaaaaaaaaaaaa

SEQ ID NO: 11881 - DNA, 610 bp, Canis familiaris
  misc_feature (10)..(10): n comprises a, c, g, or t, or includes no nucleotide
ccagaggggncaagtcacaaggcagagatatccccgtgagctgcctcagctctagccggcccccaccccatccataaaccccagtcccctgatccctaaagaaaaaccaatactatacaaacgacaaaaactgttgctatttcctaacctgcaggcagaacctgaaagggcatttggctccggggcatcctggatttagaacacggactacacacagtgcagtggtataaactttttattatcagtttaaaaatcagtttattgttcagaagaaatattcctaatgtatgatgggaaatgtttggccatgtttggttgttgcagttaagacaaatgtaacacacacacacacacacacacacacacactcacacattgtttggggacccacaagtattgccctttaaaagacttcaaagttttctgctgtaaagaaagctgtaatatatagtaaaactaaatgttgcgtgggtggcatgagttgaagaagggaaaggcttgtaaatttacccaatgcagtttggctttttaaattattttgtgcctatttatgaatacatattacaaattctaaaagataagtgtgtttgcaaaaaaaaaaaaaaaaaaa

SEQ ID NO: 11882 - DNA, 672 bp, Canis familiaris
actccggcaccaaactgttcaatatctctggccaatgtcaaccacccttgcactgtggaggaggagatgtctgtacccctgaaggaacgtgattgaaaaacatgctgggggtgtcacaggtggctgggacaatctccttgctgtgatccccggcggctcatccacaccactgatccccaagtcggtgtgtgagacagtgctgatggactttgatgcgctggtacaagcacagacaggcctgggcacagctgccgtgattgtcatggatcgctcgacagatattgtgaaagccattgcccgccttattgagttctacaagcacgagagctgtggccagtgtactccgtgccgtgagggtgtggactggatgaacaaggtgatggcccgctttgtgaggggggatgcccggccagccgagatcgactccctttgggagatcagcaaacagatagagggccataccatttgtgccctgggcgatggagccgcctggcctgtgcagggcctgatccgccattttcggccagagcttgaggaacgaatgcagaggtttgcccagcagcaccaggccaggcaagctacctcctgagctcgatgccctgcaccgaagtccatctgtccagatggctggacaataaagcaagtgctgcccacaaaaaaaaaaaaaaaaaa

SEQ ID NO: 11883 - DNA, 571 bp, Canis familiaris
caaaagatgtgtgtcataaaaagcacttttaattacgggatagctaggttttgagagaaatagaatattagcataggtcatttgttctaatacgcggcaagctggtaaacaaagtcagtttcactgtctaaattgcccagagatgatctcaaaaggttggtttttacgcacaagcctgagaatggcctggtggtaggtgagcactcatctctgtcggctctggtagcaacttctgtagctgatgtttaccaggtccttggagctttctgaagcttctcccttatgatgaaaggacccagaacttcttgtttcacatacctttccgaggagtgacagcaggggagagcagagccggagcagagtctgttggagaattcagtttttcatcactgaagctgaagctgttcctgtagagcgaatctgcactctccgagtcgctgaagccgctgctgtcgctcacgctcgcgctgctgcgccgcttcatgcgctccaggtgctcctcgtagtggaagtggcgctcgtggaagggcgacgcgaagtccgccagcaccgcgtcaaactcgcacagcgc

SEQ ID NO: 11884 - DNA, 544 bp, Canis familiaris
ttcaaaagtggaataaatctatacatttagtatccttagagtaaactgtatccttagagtaaaattttgtgcttgataacagttatttttttctacattagaaataagatgccacacagggaattacattccagagttaaacgagtggaaaggatacagaccattaaagaatagcaggttatcgttcatacttgtaaagcaccttaaatcacagaaaataaagaacagtgccttaaaaagacagacggaaaggtagactgtgacttcagatgtttgtgatttattctttcacaggaggaaaggtgaaggttggtttgatgatgtaactgttgacgagctgtagtagacctgcttttagataccgtactgttagtatttaattgaaattttactattttatttcagacctaagcaagttaagctaaaggatgttctacaaagttgaaagccttcatatagtgaacttcccaacatttttcttaggctgttaaaaagtataaaaataaagttgactgatttctaaaaaaaaaaaaaaaaaaaaaaa

SEQ ID NO: 11885 - DNA, 542 bp, Canis familiaris
cttcttttgctccaagggccacctggcccatctgcttgctagggccctgggggtaggtgtgcgcgggcctggggggtggcctgcatcttctcccctggcttcctctcctgaagcagctgaagcccaggttgggctgagccagtgcaggcaggccaccagcccggggaggcggcgcggtgcgtgccctggcggccaggcccagtagggcagagaccaatcaatgggcggtcctgcgcaagattcccaggccaagggctgggtcacaggaaggaaacaacatgttcttgagaggggaaatgtctcccagatctctcccctggctctgaggccgaagctggtgtgacccgtgtacccttaacaagcctgagccacagcctgactcctttgccaggtggacccctgtacatacatcccttttctgctaacccctcaaccccttcccctcccactctgagacaaaagaaaaaaatatatatctatataaaaagactgcataagcttaaaaaaaaaaaaaaaaaaaaaaaaaaaaaaaaaaaaaaaag

SEQ ID NO: 11886 - DNA, 623 bp, Canis familiaris
gtttactgcagtttctggggctggtgtcctagggagcccctttttaaactctgcgctggctgtgagcacagcttgatacaccaccccaggcgtggtgggggtggcaggcaccatgagaggagtcccaacaagctttgctgctgtctcccaaacagacacaggcacaaatagaggtgccaccttcccaaggtctgcccacagagtccctgtttgtcactggccaggccttccaggtgataatgcctggcttatctgggaggcagagtggcagtcacaccctttcggaggaggccacatgagctggtggcccctagcccctggagagcagagcttagtgcccggctggtggcagtgacgagaagctggagctccgggggaggctggctcctgctgaccacggggagaagcaccgtggcgggatcccaaggcccggcaggtgtgcagctagtgagagatgccttcccaagccatcatctgccctgacgccaggatgctgagccgggcctggcagacttttgggtgacaacaggtcacagccctgggaggaatacccagtgaagaattcagggcagtgaaaaagtttggcaaagatgagtttggacaaaaaaaaaaaaaaaaaaaaa

SEQ ID NO: 11887 - DNA, 664 bp, Canis familiaris
tatcagggccccgaggattccccgtcccgacagtcccgccgctatgactgggtgagggccctaggcctttcagcctcgtccgggaacagggctgaggaggctgaaagaatcatcccctgaagtaacatgtgttccggttccaactcccactcccagtttaatattaaattaacaggcaagctggcccccacctgctccctgggggtctcagggaggacctttcagttgccccgtttacctactttctccttctttaatcccctaccacgatgactccatttctcctgtgtctgctaacttgatttttcattctgctgctccatctttgaatctccttacctgccccattctacccttgccatgcattggaggggctttgggggtgagctctgggtttaggggcttactccatccttcacccacccctggatctttgcccacctccacctcagatcccctgctgcagggtccatagccctcatctagggctgtgtggagggagaggactggctccccacccttcctccctacccaccccctgcacatcacagaaatcttccccacacccttctctgcctttattttttgattcgtgcaacttgtaactaggtgtttatggaataaaggagaatgaaaaaaaaaaaaaaaaaaaaaaaaaaaaaaa

SEQ ID NO: 11888 - DNA, 367 bp, Canis familiaris
ctacgtgtttgcgcacatgaggccggcctggagctcctgcgcctgtcccacaacagcctgcgcaccgacggcatccgcggcgcctccttcctgggccttcgcagctccctggccgagctgctgctggaccacaaccagctgcgggccatcccacgcggcctcctgggcctcagggggctgcaggtgctgcacctgagccacaacgagatccggcacatgcccctgaattccatctgtgacgctcgagtggctcagaactccaatctcatctccacacacctggagaacaaccttattgaccggcgccgcatcccgcccaccgccttctcctgcatccgggtctatcgcagcgtggtcctccggcctc

SEQ ID NO: 11889 - DNA, 639 bp, Canis familiaris
ccggacgcgccgcccgccgcccgcgccgagcccacggccgcgcggtgccatgcctgccccggcgcggcgctgaaggatggcgacacccgtccctccgccctccccgcgacacctgcggctgcttgcggctgctgctctgcggcctcgtcctcggcgcggccctgcgcggggcctccgccggccgcccggatgcagctgcctgtcctgggagcctggactgtgccctgaagaggcgggcacggtgccccccaggcgcgcatgtctgtgggcctgccttcagcccttccaagaagacccacaagggctctgtgtgcaccaggatgcgccaggcctgtgggggagagcactgcccaggccccgattagaagatgagattgacttcctggcccaggagctggcccatcaggagccacagccccccatgctcgctgcccagccccagcctgacaagggacagcagcacctggagcctgcagccacctggggctctcagagcgccgccagggccccaacctgggcacctcctctactgggggaacccctgcacccacaccccacacctccttgggcccccccgtgtcgtcagtaccggtgcacatttcccccttggagccccggggcgggcgcggtgacggactc

SEQ ID NO: 11890 - DNA, 620 bp, Canis familiaris
aggaagattagatcgtcgttctgggaagaagtctggggagatggtcccaaagtgtcttgaaatctggggattctgccattgttgatatggttcctggcaaacctaatgtgtgttgagagcttctctgactatcctcctctgggccgttttgctgttcgtgacatgagacagacggttgcttgtgggtgtcatcaaagcacgtggacaagaaggcagctggagctggcaaagtcagccaagtctgcccagaaagctcagaaggctaaatggatagttatcccttatacctgccaccccagttttaatcagtggtggaagaacggtttcagaactgtttgtgtcaattggccaatttaaggttaatagtaaagactggttaatgatgacaaatgcactcgtaaaccttcagaaggaaaggagaatgttttgttggagccactttgtttttttttttttttttttgtgcgtgtgtggcagttttaagttattagtttttaaaatcagtactttttaatggaaacaacttgacccaaaatctgtcacagaattttgagacccattaaaaccaaagtttaatgagaaaaaaaaaaaaaaaaaaaaaaaaaaaaaaaaaaaaaaaa

SEQ ID NO: 11891 - DNA, 328 bp, Canis familiaris
aaatgtgtaatgggcccaattccggtttaatttccaccaaaaatcctctaagtacttttagtactctgaaaatatcttgagaatttagacctcctaaaaatatatttatacaagactttgtttatatgttaagctaagtggaataacacaacatacctaaaacttgggtactgaaagccagaatctgtggaagaaatttcttgtgttcattccactgtcttaaactgaagcaatatggctgtgtgagtgtgtgagatttacagtaccaaaaatgtcctgcctgttccctccagtggaataaactttttttaaaacaaaaaaaaaaaaa

SEQ ID NO: 11892 - DNA, 577 bp, Canis familiaris
gaagaacaggctttgatgacaaccaggcttggctttcggtcctggtcatactatctagtgacttgtgattcttatgagttactttatctctctgagccagtgaggggtcattgcaggcctggggagagggatgagcagcatgagattgggactgagcatagcagggtacctgggccgggggaataatgagcaagcaaggcatatgattgctcttccccagcatttccaaatgcagaaccttagcagcacctccttgaatgtaatacttgatgcagagttgtgaatgctatgatgaaaaacaattagagaaaactgaaaacaaagcagtcaggttgttaaatgaagggtggaaatggtcagttctggggtatctgggtggcttagcggttgagcgtctgcctttggctcaggtcatgatcccaaggtcctgggatggagtcaggcatcaggctcctgcaggaagcctgcttctccctctgcctaggtctctgcctctctctctgtgtctctcatgagtaagtaaataaaatattaaaaaaaaaaaagaaaagagaaagaaagaaagaaaaaaaaaaaa

SEQ ID NO: 11893 - DNA, 592 bp, Canis familiaris
attggtttcttgccacagggtttgaaaaaatagaaggtttcctggttccctggggagattcaatgggccttttcgaaataatggcaacaacaagacccttggaattggtggcccaacttaaattaattaagcacagggggaaccttgggcacaccccaagggaattttcctggaccttttctggggattaataagtaagtaattccccaccggtacccctgggactttattttgctaaccataaattgagcaactgtaaattactgctatattaatgttttaaagcactgggatagtctaattctaacttgtaattaattatgtttgccaattatctgtttgaaataaatttgtgtctgaacagctattgaaactgttaaattgtacagatattattcatgacagctttgtactgtggaatgtgcttaataaaaaacaaaaagtttgacttttgtccaataaattgctaagtaatgtcaataaatcaagtatgagtattatgcagtacatctaatctggcttcatgcaattgttacttcagctactaattcaaagcccaatactcttaataaagtgttgaaataaaaaaaaa

SEQ ID NO: 11894 - DNA, 614 bp, Canis familiaris
aggaacgcatctcctgtgctgacttgtgcaacagtggtcatccatcctgttaagttttcccctgaattaacggttagagtggaaggccttacggtggcaagtgcattgagtgttatacgtgcagctcttgtcgagatcaaggctaaaatgcagatgtacatgctcttttgtgattcctgtgaccgaggttttcacatggagtgttgtgacccaccactcacccggatgccaaaaggcatgtggatatgtcaaatatgtcgacctaggataaaaggacgtaaacttctacagaagaaggcagcacagataaaacggtcgctatgctgaacccaataggacgtccgaaaaacaggttaaagaaacagacacggtatcaaaaggtcccttcagcaaagttcgaactggtcctggacggggtcggaaacgtaaaatcactctttccagccaatcagcatcatcatcagaagaaggatatttagaaagaatagatggcttggacttctgcagagatagcagtgtccccttgaagtttaacaagaaaaccaaagggctcattgatggccttaccaaattcttcaccccttcccccgatgggcggaaacctcgaggggaag

SEQ ID NO: 11895 - DNA, 462 bp, Canis familiaris
gcccgccccgggagttactcccttgaagatgtttgttgaaccttggaacccccgccagccgacaagatcttctactcgcaccttcacgtgcgccaccgacacggagaacatccgcttcgtgttcgcggccgtcaaggacaccatcctgcagctcaacctgaaggagtacaacctggtctgacccggccgccgccgccgcgcccaggaacagggaccgccgccgggcgggggcctgcctccggtgccgagcccgccgcggctctgcccgccccacccgcccggctctgcccgcagacgagttgattttgttttcatatttttaacaaatggtttttatttcacagttatcaggggacgtacgtctttctttctatacacctcgtgcaccttctcacctgtgtcagcggcgaggccgccttttcctggccttgacttgtggctcgcttttttctattaaaaaaa

SEQ ID NO: 11896 - DNA, 490 bp, Canis familiaris
  misc_feature (267)..(267): n comprises a, c, g, or t, or includes no nucleotide
tttactcacctctgtggatcacgaccgggcacctgtggtgggggtgagagtcaatgtgctcctctccaggtatctgatcgaaccctgtggatcagggaaatctaaactcacctacatgtgcagagctgacttaaggggccacatgccagagtggtacacaaaatctttcggacatctgtgtgcagctgaagttgtgaagatccgagactctttcagcaatcagaacaccgaaacccaagacaccaaattaggtgattcctgaagctnaagcggccacatctgccatctggatgtttgtttctggaagcccatgccggtccttgaaagagtggattctgagtctagtcctgaaaccaagaaaactaatttagagtgtggggatcaactagcaattgaagacgtttttaaagctgcttcctgtttgttgaaggtctagattttaggccttgactggaatatataagactgtgcacgaaaaaaaaaaaaaaaa

SEQ ID NO: 11897 - DNA, 636 bp, Canis familiaris
aatggattttaatgtttctgacccggagcagttgtaacaattcccaccatctactttaacacgcaatcttatcagaaaggaattaaattaaatacaagctattgtagcccctccctccccatacttctctttaaatcactaataaatagcaacaaacgactgtgccatttcagagaggaagcggagaggcaggtctgaggccttccctggttccacgtcttctacttcaagtcctggaggcgggagtcggggcgcggagccagggggggtggtcagggacgagcaagaagggacaaagggaaaagtgagattgaacaaatccaaacccgagagaggagcgagggggtggggtggagggtggtggtggagaacattcttgcctcgcttctcaaattaagatcaaaatacgagggaaacgtgtggtttgagtagctcttaaaaggaggcagggcgcaggaaggaggaggagggccatctttttataccaaattcaaaaaaagcattttacattttaaatattcacaataaagtaacttctagtcagtgtgactcacgatttatttacaaagagccttcaacaggttgctttagtcggcacagcagtgtgtgggggtaggaggctccctctccgctccc

SEQ ID NO: 11898 - DNA, 135 bp, Canis familiaris
gttctgaggtcaggagagtttgagaggaaagaccgtggtaagtccctcagcaaggggccaagccagaactagaactctaatatgtatagctgatggaaagcccttgtgtgttcctttaatgtactgtactgcctc

SEQ ID NO: 11899 - DNA, 346 bp, Canis familiaris
aagggcttgtttggacccgaggggtggcctctaaaatgcccgttgtggccctaacgtgagcacaaccccaaatctacgcctctagatgcatcaaggttacccaattgaaacctaaggacacacccattacacaagagcccacaaggctttacaaccttggcccatccataatttcctgactttgctttggcaaagtagaaaagtctctccctgagcttcccgttggtgaaacactcctaaccaatctgctttggcactgtcaacgtgaatacattttcactcaaataaactcctaaaacaaattttaatatgtctccgcttatcttttaacatggtggaaaaaaaa

SEQ ID NO: 11900 - DNA, 646 bp, Canis familiaris
cccaagaaggacccggtgaagatcgtgcgctgccatgagcacatagaatcctcacggtgacggcgagctcttgttcttcagcagagggagggcccttctacccgacgctgcggctgctgcacaagtacccgttcatcctgccgcaccagcaggtggacaagggcgccatcaagttcgtgctcagcggggccaacatcatgtgccccggcctgacctcgcccggcgcgcagctctaccccgccgccgtcgacacggtcgtggccatcatggcggagggcaagcagcacgcgctgtgcgtcggggtcatgcgcatgtcggcggaggacatcgagaaggtcaacaagggcatcggcatcgagaacatccactacctcaacgacgggctgtggcacatgaagacgtacaagtgagcgcgggcagcggcgcccggggagcgcccggagagctggacccgtgtgtgtgcgcacgtgggggtgtgtgtgtgtgtgtgtgtctcgtgcgaccgcgaggaggcccgcacgccccgcgccccagggggcagcagcccggcagatgctgaacaagcaaaacaaaaacaacaacaacaacaacaacaacaaaaaaccacacgaagtaaaagatttggaaggagtgcaaaaaaaaaaaa

SEQ ID NO: 11901 - DNA, 567 bp, Canis familiaris
  misc_feature (243)..(243): n comprises a, c, g, or t, or includes no nucleotide
gtgccaaagtgagaaagatctttgtgggggacccaaaggaatcccctcacctgggtggactccttgatgctcgcaccatccgctatcctgatcccctcatcaaggtgaatgatccccttcagattgatttggagactggaaagattccggatttcatcaagtttgatactggtaatctgtgtatggtgactggaggtgcccacctgggaagaattggtgtgatcacccaccgagagagacccnctggttcttttgatgtagttcacgtgaaagatgcccatggcaacagctttgccacccgactctccaacattttttcattggccaaggcaaccaaccctggatttctcttccccgtggaaagggtatccgcctcaccacttgctgaggaaagagacccagagactggcagcccaacagagccacgtgggtaaaatggtcccctgggtgacgtgattggaagtctttatacttaattaaagattctacagcacgctaaaaaaaaaaaaaaaaaataaaaaaaaaaaaaaaaaaaaaaaaaaaaaaaaaaaaaaaaaaaaaaaaaag

SEQ ID NO: 11902 - DNA, 514 bp, Canis familiaris
ttctggtatccgtggcccccagacttttatcacaagctccttgaatctacttgtggggtaattgtgggtggagggaagggtcccgggacctggggctgctcaacctaatgcaaaccctgttgctgcgtcactgtgttccctttggcctggccaagtttgatactgtggggattcagctttaggcgccggccctgaggacatcccagacttttaaacacagcactaaataaacttgggggaactggggggagggaagggcccgggacctggggctgctcaacctaatgaaaacccctgttgctgcgtcactgtgttccctttggcctggcccagtttgatactgtggggattcagtttaggcgccggccctgaggacatcccagcggtggtacttcggagaaacctgtctgcatctgactgagcagagccaatcgtcaggtgcctggagccaaaaggaaaaaaaaaaaaaaaaaaaaaaaaggacatttagttttaagagaagggaaaaaaaaaa

SEQ ID NO: 11903 - DNA, 602 bp, Canis familiaris
acttcttaaatgatgtaagtaacttccgtataagattttcatagctcagtcagctcgtttatgccagagcagagaaccagctggaacttaaaaatacctagaagtttcagagaaaagagggccaaccttaggggcctgaaggccaatgttccagcacggtagatcaatgtgtagaggaccattaggccagttggcccagtcctgtttcaggagaggaggcagatgagattgtagcggagaccacccactcctccaggaaaggcggttacttctcctcaccctgacttttttctttcattagctacagtaactgtcctaccttgccttgtgggtacctgcttatgtataacaggaacaggcatttgaacttttgaaactaaatgtgattacacttcatgccaaagcctatcacaggaatctggtgtgttggtgctttcgtaataagcatttggtaaaaattttaacatgactgcagtccagtgacattttccttgatttttggcagtctagatattgtaagggggaggggaataatctacagaatatgtctctaagctaagaaatgcggatttacccaataaaagtgatatatgcaaaaaaaa

SEQ ID NO: 11904 - DNA, 579 bp, Canis familiaris
actttaaaagaatttagaataatttaacaagatatattttatgcccaatccagaaacttgttttataatgaaacacaattattcgcattgaagtcagaaacatggcaagggggctcattatcataccatgaaaggatatgatagatatatggaatagaaatccagtgacatatggaatagaaatacaaaattaaatactgaacataagttaggattgtcatttgtttgctaattatatgaaaactcccaagatcaattgaaaaactcttaaaaggtaaagtgaacacccaataaaaaataaatttattataaataaataaataaataaatgaaaaactcttaaaagcaataaaagatgaagtaaagtaaccagttttaaaaattaacatcaagagggcagcccaggtggctcagaggtttagcacccgctttcagcctagggcctgatcctggagacctcggattgaatcccatgtcaggctcccagcatggagcctgcttctccctctgcctgtgtctctgcctctctctctctctgtctgtctctcatgaataaataaataaaatctttaaaaaaaa

SEQ ID NO: 11905 - DNA, 655 bp, Canis familiaris
  misc_feature (235)..(235): n comprises a, c, g, or t, or includes no nucleotide
gtgcgtcgctcgcttgcagtgcccatggtgccgccgccgctgtcgtcggctctctgcacgctgccgccaggccccgggcctccgcgcttcgtgtgctattgcgagggggaggacgcgaggacggaggccccggcggcttcaacgtctagaggacaaagcatccctgacccttccaggggggccctcggcagtggatctcaacctctccagggtgccgggcccagaggcagcctcnaggctgcaggcactgacactgagcctggcagagcaagtgtgcatcttgaagaggcagctggcagctgtggaggtgacagctgccagccccagaaagagcccttgtcaggtggggccccagctcttcctaccagacccggatcctcagagagttggccctggacttggggtcaggaggcggtgtccaggcgagtccctcatcaacctggcttcaagagtaagaaaccagccgctggtgtagactttgaaagcccctgaagatgcagcagagtgtgaccttgccagatacctgcctgcaagtggggacagctctgagacccgacgatctccacctgctcctcctactgcagggtgggagcgcacctgcttctcaaaccccttctctatgaaataaatgcttcctcagaaaaaaaaaaaaaaa

SEQ ID NO: 11906 - DNA, 109 bp, Canis familiaris
ttaagtgtctttattggagtgatagctttgaaggttcataactttatatttgtataaaactgctgtttaccaaaccaaaaaaaaaaaaaaaaaaaaaaaaaaaaaaaaa

SEQ ID NO: 11907 - DNA, 571 bp, Canis familiaris
acacgcgcacacctaccttatatttggacttcaaattggaccaaggagccaagcattcccagcctattcctaaagggcctgatgatgcgcataccttaaatagaacctcatcacacagcagtgctgggggaaggtgacagtgtccaggtggagaacacaggatcctgagagaagccacttcgtgctaattgctggggagccattaagagaaccggttgtcccacacggtccatttgtgatgaacaccaacgaagagatttctcaggctattcttgatttcagaaatgcgaaaaatgggtttgaaagagcccaaacctggaaatccaagattggaaactagagcacaagaacagatctcatgctttttagagttttgccagttgtggcatcgtccattcagcacattgagtttcccaagctgactgagccggtgcttcccaagcattccacactaaagtgataacatgtgataacgtgcatttgtagcaaggcacatgagatatttcctggtgcgtgcaaataaacctaattgttgcttctttaaaaaaaaaaaaaaaaaaaaaaaaaaaaa

SEQ ID NO: 11908 - DNA, 594 bp, Canis familiaris
atcttttaggcacagaacccttccaaccaaatccttaagcaaaagcttaaccaagtgggagctacacttgttaaagtggaggcaggacaggtggtctggaccctgcccaattatgctcctctcataggtggcccaaggcatgccaaagaaatccctagagctcctagaagtacagtttgaaattatgtcagccatatgctccatccacaccaaccacttggcatttccacgaataagacatatttgcttatacctctgcctcttgatacttgtatcttggctaccccttccaattatgattcaattcaccctctttggtgaagactttccttattctgttcctccatcctgccaaacacaatgtcaaggattctttttcagatttaaaaatatttactgagctattatactatgagccagctctatgtatctagttatatgctactgaaattgtctacttcttatgttgtgtcccttttagaatgtgagttcccagaggcagggactgtatcattcatctctttgtctccaatgtctaaccagtgcttagcgtttaaggtgttaagttggtaaataaatttatgagtatcccta

SEQ ID NO: 11909 - DNA, 642 bp, Canis familiaris
gccatggaggagagacttctgaaatgtactgaagccacatgaattaactacagcaaagtgccctttggcttaaaattgttctcctaccctaaggtgacaaacttcaagttgtaattgaccccagtcaggggggttccagacccataagtgcaacttacagaaaccatttcatgtttgcaggtattccaagtctctccaggatgtttttcatgcataccttatgtgcaggataaattctgtaatagccagctcccaaggagtattgaagctctttcagtaatggagtttttgttatttaaatgctgttgaaggggactataagagtcccatagaaatcatttataacaggatttaacctgtaagataccaatatgtttttccttattttttttttgtttgttttaatgtattccttaacatgtttataaatacaacttttatcctttagatcttaagccttcttttgctctcttcaacaatgtaagaggctaataaggtgttatcttcctaaaagttatttggtatccactcttttaaaaaaaaattctccactttgttgttggaggtaacttttgtgagctctaccactcatcttctaaaacgtttaaataaaaattaataattgtgaaaaaaaaaaaaaaa

SEQ ID NO: 11910 - DNA, 377 bp, Canis familiaris
  misc_feature (217)..(218): n comprises a, c, g, or t, or includes no nucleotide
ctaacctttggaggtttgaaaccatttgggaattttaaataatattattttggagttcaatacatctatgcaatattttattctgtcaaatgctatttcccattaaatagtttaactagattgtataaaataactttattgcctaacatgaaattaccaagcttaggcataggggaaatgggctttttagaagccacggaattgctaagtatattcnntgttcttcaaataaatgtcattttcttctttaaatattgaatatgttttatgaacaatatctttctttgcaaactcgaattacatgtgcttggaattaagttttagtttttttcactgcacaataataaagcctgagttctgatcgaaaaaaaaaaaaa

SEQ ID NO: 11911 - DNA, 217 bp, Canis familiaris
gggagccaccttctttctggaagccatccccatgtccatgccgcccagtgtcgacttcaaccaagcctttcctcaattcaattcaattccgggttcgacagagacaccaagagtcccctcttccattgggaaagggttggttgaaccccaacccaaaggtaactgccccctgggtcaggggtcccttccagatacccattaaaaggatgaccccgca

SEQ ID NO: 11912 - DNA, 632 bp, Canis familiaris
ttcccccgagtggcgactatgctattttcagttcgtatacggccctgtaaagtggcagcaagatcatggttcacgtttcccccgtatacccgtgtaaagatcttccccaaagtgatgttttaccagatagccaatggatcatcttcgtggacccatcaaagaagttcagtggaataaaatggaaggtcgaaactttggttataaaatggagctgcttaagtctgcacttagcccttgcctgctatgatttttgtttcccgaaccgtttctagattatttttttcccgagaattttcccgaaatggacatgccaagatgaactttaagcaccaggagaaattttcccaaggagtattgttttaaaaaaaaataatgagcacatgtttacctggcattttgaaagctttcactttataagtgaccagtgctttgaaatgcagaggcttatgtacagatatatatggtgtgggaagacaccaagccaacttttttatgccattaacttgaaatgttactatatttatgggtttgaattcacactttttaaatattcctttgatgttgacatccaataaagcatatggttataaaattccaaaaaaaaaaaaaaaaaaaaaaaaaaaaaaaaaaaa

SEQ ID NO: 11913 - DNA, 652 bp, Canis familiaris
gctcagagacttgagcaagaagccccgcggccggcttgagaggcagaagatcttggaccacatctgaagctgaaaagctcgcagggaactcctggagctggaggctctgagcactgctgtagagagcacagggactgccaaggctgaggctgagtcccgtgcagaggccctgcgcatcgagggagaaggctccgtgctgcaggccaagctgaaagcagaggccttggccattgagacggaggctgagctccagcgggtacagaaagtgcgagagctagaactggtctacgcccgggcccagctagaactggaggtgagcaaggcccagcagctggctgaggtggaggtgaagaagttcaaacagatgactgaggccctgggccccagcaccatcagggaccttgcagtggctgggccagagatgcaggtaaaactgcttcagagcctgggcctgaaatcaaccctcatcaccgatggctccactcccatcaacctcttcaacacagcccaaaggcagctggcatgcctggcccccgggagggcttggtactccgctccacttcccctcctcaagctgttggaagcaaccatgtggttccttagatccgtactgcgttgatgaataaaacatttctgggcatttaaaaaaaaa

SEQ ID NO: 11914 - DNA, 595 bp, Canis familiaris
  misc_feature (333)..(333): n comprises a, c, g, or t, or includes no nucleotide
tgttttttttggaaaaaatgggcccccccaagccccccggcccccttttttggtttttcccccctcccgtgttgttaatagggggcttgtgggcccccggcggggggttaaactttgggagtgcctaccgacccggggttaaacccccccccccccggtggtggcccccccgggggggccaaattgccttggttttttcttttggggtttttttttttaaaaaccgccccacctttggtttttccttaattctgtgacgggggaagggagcatatgctgagtctcccaaggcctgtgtctggaggggcactcacttctccagcctgggacccntggcttcgctcaacaccagcccctgacccagcccaagtccaaatgtttacagggagcctcctgcccgtcccacccctccagccgcttggaggccccaaaggaaaaagcacaagaagcgtgagacgccaccattcctggagactacagtccacctgctcattctcgtagctttttaaaaaaatgaaagtaaaggaaaaaaaaaaaagataaaactgcaaacctagaaaactttttagaaaaaaactatttaaaactgtcagat

SEQ ID NO: 11915 - DNA, 484 bp, Canis familiaris
cccatataatgggaggtctgagttccctgtgatcccccctagattggacgtgctttatcggctccccctagtatgatgagtcttctgcattgtcacccaagtgaccaggccttgcctcgaggcgctcctgtctcctaacccagctttccttcctctggactccgcactgtaacgcctacgtttgctgatcatgggaagaactcctgtgtgccactaactcaataaaaccgccaaggaatctgaatgtgctggggtgtcgtccttttatgctgggcttttctatctcccacacaccttcatcttgacatgggaaaaaaaaaaaaagtagaaaagaaaagcactagctaagatggtataaggaatatcatataattgagaataaaaggagtgacaaagttaaaccaaggatttcttgcttttagaagcagagatgtgttcctatggccaagtaaaataaatttctgaaaagtgaaaaaaaaaaaaa

SEQ ID NO: 11916 - DNA, 560 bp, Canis familiaris
cccccactcccgtagccctccacgcttcttatacttctcctatgagagggcccggctggagactatggcctctgaaggccccacgggccctagtcccccagtggttcttccctccaatccatgggattcatgtcttccccctttggtgccccaaattattgcccccttaccagcccctctggtggtgctggcattgtccttaaactaacaccagcatttgagggcctgtccccctggcccagcagaggtctctaccagctcttcccttgctcaactgtggcccagggggactggtgggacaacactggccctttccaggatccagggaggttcagtccgagacttttctgttcccccttttctcaagtgccttaatagtagggctaggtgtttggagagtaggggggagggcaggctggcagctctcccatcaagaggctcggtttttactgaagaatgaaagcagttggactcttgctctttctactctgaactaataaattcattgcccagctgaaaaaaaaaaaaaaaaaaaaaaaaaaaaaaaaaaaaaaaaaaaa

SEQ ID NO: 11917 - DNA, 604 bp, Canis familiaris
tactgtacagcctgccctagaatgagaggggccccaggctgacatctctgttgccaaatgttcaaaatcatgttttattcagacccacttattctggcagtttctcaatgatatatcttaggggttaaaggcatgagctgatattcaagtgagtgcccaccatttcacataggtaggagggtggaatttcccctccattcatccctccctctcttgggtctgctctcttgtaaagcagcctcagctcaagtcagctgctggctactccctttcctatagattgttttggtggccttcccttacaaaagaaaaggcactaggctccccaagctctacagttctcctctctacccaaatcagatttctagtcaagtcactttcagacttaaaagacagagatggaggttggctttagctccaagtctcagtccctggctggggaaaggggatctttttcctaccttccttaactatagttttaagttgccagtgtttgtttattcataatataaaaagttactctgctttttgaaagtgagagtgttatatgtgtaccaattcttttaaataaacatttgttcatttgagtgaaaaaaaaaaaaaa

SEQ ID NO: 11918 - DNA, 530 bp, Canis familiaris
aagggccctacataatgataaagggatccatccaacacagaaggtaacaacacttatgaatatgtatgcacctagcataagagcactgaaatacataaagccaatattagcatgccaaaggaaaaattggcactagtacaataatagtaggtacttttaagatcccacttatgtcaatggttagataatccagacagaaaattaataatgaaaaaaaaaaaaagaaaattaataatgaaatactgactcttgaacaacatactagaccagatggatttcatagatacgtacagaacattctatccaaaaacagaacatttttctcaagtccacatgaacattctccagaatagatcatatgttagaacacagaaagtctcagtaaatttaagaatactgaaatcatatcaaacaactttttctaatcatagtggtatgaaactggaaaccaattacagaaggaaactggaaaaaaacatacttgtggagacgccaacatgttactaaaccactggatcaatgaagaagtg

SEQ ID NO: 11919 - DNA, 628 bp, Canis familiaris
  misc_feature (24)..(24): n comprises a, c, g, or t, or includes no nucleotide
cccccccacaccggcgctcacccngcatggagcagagccgctttcaaacgccacccagctggtcctgcctgccttcgagcacgaggtaccgcagtggctcccagcacgtctgcaagaaggaagaaatgcactacaaggccgtccacgacacggccgtgctcttcctgcagaacgacccctggctttgccaagtgggggccgacaccagagcggctacaggagctgagtaccgcctaccggcagtcaggccgcagccacagctccagctcctcctcttcctcggagaacaaggaccgggactcgggccgcgaacagggccctagccgcgagcctcaccccacttaacacatcctgcagggaggaggagccccagggtgctggtatggactgctgggactcaggcctctcggggctgagcagaccccaggaccctccccctgaggtggctgcaggactcaggctgccaggtcataggaagattatggctctgccagggctccccctccctgcccgatcccccaactcctcacctcaaactcactccaactcctgtgtaaatagatcccatccctgcccttccggtccctacaaaaaaaaaaaaaaaaaaaaaaaaaaaaaaaaaaaaaaa

SEQ ID NO: 11920 - DNA, 447 bp, Canis familiaris
tccatctggttcttagggaccgggtaacctagaaaggttgtggagtatacgtacaggccagatgtgggggaaccccagctctggggctcaggttctgggagcacttctaccctacccccgcctccctccccgccaaggcctagatactgactgaattttgaatggaccaggcagggaggcctagctgggggactcccttgcctttgggaccagaacaaagtagtggagggcaggctggggagacgtgggcacgtcctcctccccaggaggggctggggagagtggcagtttgcatggcgaaccccccacttcccctccgctgcccctttcccggtctcttggcacccactcctgggctgtcccaattccctcttctgtatcaggtgtattggttgtacatataaattatactttcctttcaaaaaaaaaaaaaaaaaaaaaaaaaaa

SEQ ID NO: 11921 - DNA, 499 bp, Canis familiaris
gccccctctccaggataggcgtccactgctgtcagaggacgatgaggtacgatgccatcgacctgtttgtcagcgatgaggaggaggatcataggagtgcggctgctggcttcgggaggattcggctgcgacagtatgctgagaagaaggccaagaagccagcgtctggtggtccaagtcctccatcctctctggacgtcaagccttgggacgatgagacataacatggcccagctggaggcctgcgtgcgtctccatccagttatgatcggtctgacctgggggggctccaagctggttccggtgggctatggcatccgcaagctgcagatccagtgcgtggtggaggacgacaaggtggggacagatcctgctggaggaggagatcaccaagttcgaggagcacgtgcagagtgtggacattgctgctttcaacaagatctgagccccagcaccgggcctgggtgtgtgaggccccgcagccattaaagatctgaga

SEQ ID NO: 11922 - DNA, 647 bp, Canis familiaris
gctctccaacctggcagccgtgcgtcggaactggctccccccgggcttttcctcttggatggatgagtccgcttgtcaagaaggacctttggatttcattcattcgctcaacaaacgtttatgggcctgccagtctgagtttccttctcctgtggggctttccttctttgggcttccgcgtggcctctgcctcaccctgggggctctgctgtgtggagagaaatatacccgtgagagctggggctccttcccaggagggacatgggctctcgttggttggtttccagggtggggctgttttagagattcttccccaccgccccgcagacctccctctcctggcctggcttggatcgccgctgttggcggctcagagtgggtgggatgggagtgtcccatctggatgtccacaggggccttgaccctgtggccatgtcccccactcccctgccgcccacaagggcccctggactagctgggcctaggaccgaggtgcctgggcgggcagcctgtgtggagacgcagctgttgccggaaggctgggtgtccctgctcggctcacctgtttggtcgtaataaaaataattctctcaggtccaaaaaaaaaaaaaaaaaaaaaaaaaaaaaaaaaaaaaaaaaaaaaaaaa

SEQ ID NO: 11923 - DNA, 615 bp, Canis familiaris
agaatggtttggtgggtccccacccacctagtcatcaacatgtactttgccacgggcttcagtggccatggactccagcaggcccctgccgtgggccgagccgtggcggagatggtgctgcaaggccacttccagactatcgacctgagcccctttctcttcagccgcttttacttgggagagaaggtccaggagcacaatatcgtctgagccgtaagctctcagatgggccccgctgccccatccgtcagccttggcccacatgcacatgtttcctcaccatggctttccccagcactaacccaggctctcctgtccccacaccctgctcatccggcggcggggcaggcaggcagaccgacgggctttgaggcactgcacctgaggcccaggccaacagagtgatgggtgagactgcacgacccaccgaagtagtacagctggactactagtatacctgaccatgtgaccgagaccggctccttcctggtacccaggcagggagcattcgggcagcctggcccggatgtagtgactgtctaccctagtcatcaagcaataaatgtgattactcttgcccaaaaaaaaaaaaaaaaaaaaaaaaaaaaaaaaaaa

SEQ ID NO: 11924 - DNA, 547 bp, Canis familiaris
tatagtgtggaaaagccacattctattgtaaatccatcatacactgaaatttatggtcttttactgacaggctagcagttttgttggacctatctcttattgttaccttcattcttgtagcttcttttgtagaaaagaggccaacatgccttgaaaagccagagtggctcataatgaaaggagtgagcttgatactttaaaactttactttcacttattttaaccctgagtttgatgaaccatgtgacatctgataagtcatttgaacttgtgccttggtcagattcactctttgcaggtttatattcacatatgtattatatataactcatggttgttacttgtgaggtctagttttcaagagttctgcgttaagaagataactttattaaggattaaaggaaagacattattaccaaacattattgtctttagttgtcctgtttcatgtggcctaggcagtaagtaaatcaggtctttatccaaaacatttatttgcattctcctatgcacaaatatttttaataataaagctaaaattgtcaaa

SEQ ID NO: 11925 - DNA, 589 bp, Canis familiaris
gcgatccctgcttgcagctgccgcggacagctgtaaagtctggtatccatgctcatgggctcggcccttacagagcggctggcaaatgtgtacctggaagtcctctgtgagttctacctccatttcctcccagatgaaatctgggtcccctctggagaccccggaggctgagatgctgcgggaagtgtacctggtgctgtgggccctccggaaacagctacgacagctggcccgcaggcaggagaggcggaggcggcaccatatccggacccatgctggcccccaacctgaagcagttcagggcctgaaacaggatgcccggagtcccctgtaggggggggatccccacatcttccaaaaagccccacctcactcttaggtaaggttggtaggagaggttagggcagcaggccaagagttgtgggtgagaagttttcatactgtcacctcttatccagagaccaaggccaggcctggggtcccacttattccccttcattccgtttattcaatttgtaagaaagattatccaaatgttgggaaataaatatcagatatttctgagtaaaaaaaaaaaaaaaaaaaaaaa

SEQ ID NO: 11926 - DNA, 666 bp, Canis familiaris
ggtgtccccatttggtggcagtgtgccccattcctgagtcaggcctcgacgtgacccaaccttgtcaggactgtggagtgctccaggagaactgggtgtgtctctcttgctatcaggtctactgcggtcgttacatcagtgctcatatgctccaccaccacgaagactcaggacacccgctggtcctcagctacgtcgacctatccacctggtgttacaactgtgaggcctatgtccaccaccaggctctcctagatgtgaagaacgtggctcaccagaacaagtttggggaggacatgccccactcacactaaatcccagaaaatgtttctcgtctccaccttctaaggattcagatgaggcacagccccactccatcccatcctgaagacttttcagctcccctgggatgccgatttaagcatcaatacttgtaagaggactgtgatgatcaattgtaaatctccccctgcccactgcctgtttgagggactccatctaacctgcccggaaagaaacggggggcagttcagtggtcccaagagggggctgatatcctgaacctgatactctggagggagggggatcaactgacaatatatagctgagttgcattagtaataaaggacaagctattaccaaaaaaaaaaaaaaaaaaaaaaaaaa

SEQ ID NO: 11927 - DNA, 650 bp, Canis familiaris
  misc_feature (176)..(176): n comprises a, c, g, or t, or includes no nucleotide
tttttttgtaatgatgaaatattttagaattctttggatcaaatacttgtctttcctaaatgaaacatttgtgacactgacataaacttgctgttttacttctgaaacacttcccctccccccccaattaaagcttttctctatttatgagctaagaaatgatgtttttaaagcanaagtgaaatgttttcctttagcttctttttaaggtataacagcttttttactttattatgtggtaatggacagaagattacatacaaaatgtctgggggctagcattctcctcggtggtttcaaatcattgcgctacctgaaaagtttttaaattcttaggttgttttgtccaccagcatttagtgtgatgccatgtagatataaaaatatacagaaggataagaagtggatactaagtgatttttatacctgggcattgaataaatgtgccaacattttttaggaagattcgcaaaaatattctgacctatacttaaattactggctggctttagatgtcttcatactaaatagtgatcactttcttgcactgtgaagtttttacatgaagatgttaaagtggaagtctaccatattattttataaaatgttttgtgtgtggcaataaactgaaaacatggatcaaaaaaaaa

SEQ ID NO: 11928 - DNA, 300 bp, Canis familiaris
  misc_feature (1)..(1): n comprises a, c, g, or t, or includes no nucleotide
ngttggctgccggcctcattttccctgaaatccttggtttcagctgttgttgtgaggcaagagccagaacaggaagaccccaacagctaatccagagtaatatcctataaatctgtgtaaagtgaaggctgattgctagttggatagcaccttgattaattcacccacagtttgaggttataggtttggaagagggatatatttaagatgtttttcttttctaatgcataaagaaatcttattgcacatagaaaataaatacggtgcctattgtaaaaaaaaaaaaaaaaaaaaaaaaaa

SEQ ID NO: 11929 - DNA, 519 bp, Canis familiaris
  misc_feature (5)..(5): n comprises a, c, g, or t, or includes no nucleotide
cgtgntgtttctgtacattttaagcacgtattttagtatttttctgtaacgcactaagttcttagatgtttctagagctcgtttgttaataccattcacagactttttttttaatcctcacagagaccccattgacccaaaaccaaaaaccaaaaccaaaaataccaaaaaacgacaaaaaaaggcgtcatttttgtacaaatagctgcaagaagcctctgttgtgttgctgtgacccatctctgataacatttttttttcttgctatttgttttccacattaagagtcaaaagttgatccagctggcgtgggggtgggggaggcacccgtcggcccctggcgttgtcccttctgtccttggttagccatacgatgtttgttctcagcactgtacaacggtccctatatgatatggagaagcaatatcactgtatgaaactcacaccatgtattattattattcactagcaccctaggtgtgataattgaagtaaatatcttttatacaaacaaaaaaa

SEQ ID NO: 11930 - DNA, 612 bp, Canis familiaris
tgatgcagtggacattgcagtggatatagataccagccagaagttgttaaacttggtagagacctgatgcatgctttgaggagaaactgtcttgctgcaattattataaggctgagtaaagggctacctactattaccatccacagagttacagaatcttaggtgctgtctctgttggaggaacactcagccccttgttgcccacaaacagggaaccctctgtgtctaccagggaattagaaattaaggtttcttcactacttctatggtagagctgtctggaactctgtttcagactgtgaggctctgggcttgggctctagccacaaagggtttcttttaaggagctggaagggaaggaggcaggggttacatgttcatgtcatttaattttgatcctgctctctccagctgcttctttccgaagataaatctaaagatacaaagtctgcatttgatataatgccttaatcactgagtctacaattaatgttgaccgttttagattgtaagctcctggagagcagtattgctgtagtaggaatgttttaacagtgtcatatgtaaaggaacaaaataaatattttgattttgtgattctaaaaaaaaaaa

SEQ ID NO: 11931 - DNA, 262 bp, Canis familiaris
  misc_feature (22)..(22): n comprises a, c, g, or t, or includes no nucleotide
ccaccaatgggactgggctggngagagccagggtgaaagcaaagttttcctcggaagcctttacagaacagctctaccagtatgtcacccaactgctggtataatcagacttttttttaaaggaatttgtgctgtattcgttagtatcattttttgtagattgcagactcatttctgagacctaaaaagaaacctagagtcccttgtggaagcaattaaaagaaaaatacaattgaaaaaaaaaaaaaaaaaaaaaaaaaaa

SEQ ID NO: 11932 - DNA, 475 bp, Canis familiaris
cctttccagggctttcaaaaggagacagacccagtgaccctacagactggatctgtgactccaccagactcaaaagggctccagtccagggatgggtttcccactaccctgtatgtctgtccttggggaaaggtgaggctgaggtaccagggagaaaagatgtgcttctccttgccctgcctcctctaccatcctagactgtccctgagccagggtctgtaaacctttaacttcacatgtgttcacatacgtaagtacatacacgcgcctgcacaagcttttgtctctcccctttcccacccctttagctgctattgcctcacctctcaggctggtgctggatccttcctaaggggtgagagaagccctggctgcaggcagccttccaggcaatatgaaaataggaggcccaggaaggggcctggcgttgaggctgggctggacactgatttatgatattaaaaagctcaacccc

SEQ ID NO: 11933 - DNA, 674 bp, Canis familiaris
  misc_feature (147)..(147): n comprises a, c, g, or t, or includes no nucleotide
cagacaaactcagaacttcctaaattggggtgatttggaaggtaaatgtttctcgaccttgacggaaaggtcaagatacagctcataaaagacacccgtgctcttctcctatagtagtagaatgccaacccataaacgtagaagcantaatggtattagtaataaaagaggaacagtaaactcaatccttttcttctgaattcggttatacccaaaggccaaatgttactgattactttttattgctaggttaaaaaaaaagaagaaaactgggttacgttacagcctttacttagccctaattgtcaaaattcaggtagagatacagtccagagcccaaagaaaataatttaaagccaactatcttaaagtaagtcgctaaaaaatttttttaaaaattaaaaaaaaaaataaaagtaagtcactacacactttctttggaaagagatgattggatttaggatttgctgacggtgatttgtggaagctgaagggctagaatcaggcatttgaccttcaagagactcattttcatagtcactgatccacaagattgaaagtgctagcttttttctccatggcaaataacttagattccaaatcaaattggtcagtgtattgaaatattctttcacattctccttcaaaagcaaaaaaaaaaaaaaaaaaaaaaa

SEQ ID NO: 11934 - DNA, 669 bp, Canis familiaris
tatagactaggaaaccccattgagctagcgacaccgacagggatatcctcagccgttgttgttcctgttccagtcccaggtcccagagttccctttcagtactttgcaagagatgtttttagtttatatacaataatcatacacaatattttagttcatatatgtatagactatatgcatacacataaacatacatgtaggtgtacatggtatatctccatgtatatgtgttttaaaaatgaaataaatcctacatttgtataaagcatgtcatcttgaaggattgaaggaaggtggagtatgtggtagtttaaaagcatacgttctagggtcagatggcctgggtcctgtaacttctgtacctgagtttcctcatctataaaactaggataataatagtacgtacttgttaggattgtttgtgaagaagctataatgagagaatcatgaaacaaatcccccgcagtgggcacatagtgaacgcttggtcattataatcatcgtccaggccaccactactgcttctccacctttcccctgaagctctaactgcttgcctagaagtagttttcttctactttagtggcaagggtcttaggtatttttagtggtataatatctgcatctgtgtaatgataatgctgctgaattgtttaaaaaaaaaaaaaa

SEQ ID NO: 11935 - DNA, 657 bp, Canis familiaris
aggcctgtcctgcccggggctagagtggaggcccctggacgatctggagcgtagcctgaggaaggtgactcaaagatcatggttgggtggcctggcaggtagaggtgctgaagagaacaggtaggcatcccgtggggcaaagggaagctgttagacggattggtccagggtgaactgtgggctgtggctgtctgggtgaggatcaggctccctggggaagtgagcatccggggagggctggctgggggacggggtactagctcacctctgggagaagcctcctggtccccttgggcttcatcaacatgctgaggccatgtgggtgctctggggacagcgctggggtccctggccctgagacctgaccccctagcactcactgggacagaagccacccacctggccactccaagcatcacgccgcccagtgagtgagtagggcatcaggtttctccactttaaaggcggtgttggggccaccggagccaccttggtcatctccatccacacgctgcacagtgaaatcccaggggacccccaccacgcccctgcccaggggtccagaaggtctcctaatgctctgtcacccaatgatgtgccaacaacgtgactgtttacaacccaaaaaaaaaaaaaaaaaaaaaaaaaaaaaaaaaa

SEQ ID NO: 11936 - DNA, 578 bp, Canis familiaris
ctgaccatgataagaccctcttgttttgacccttgacatctagctcaacccaatggtaaatttttaagcttttcccccttgaaacctgtttttcaaaggggttcaagtttggcttcgtcctgggggcaacatgatggccccccagaagctccacactgacattccaccagcttcctgatcctgctggaatgagagcttcttacataatagctccagcgaagtccaggagctcactgtcattggtctgcttgtgattacgcatttgtgaaccaggacagaaaagttctactctgattactagctgtgtaccacgtggacccatagtaggagagcagacagttcaccacaggaaacccgggtgccattataatagcgggtgtttggcagctcaaaacaatagatccttactagactctacatctgccttttttatatcaaaggtccatatgcagtctttaattttacccatgatctggggtgataagaacataggtaactgaatggttgacttagatttcaagatttaaaaggattaaataaataaacattgtgttatgaccaaaaaaaaaaaaaaaaaa

SEQ ID NO: 11937 - DNA, 644 bp, Canis familiaris
taggtaaattgggatatagtacacctagaattttcgtgcaattgtaaaataataagtactgtttatgtttgtatatgtagaatttaacactttgtgtttaattttgctgtggtctagaattgtggtgtttctgtagtggccataaaggcctgaaatgatttattatggatgtcagactttatcatgagaagtcctaggtaatgacttttcttgatggtgggactctgactcatgcatttatcaattacaccaaattatttgccatagattatttgacttttcagtttttactgaaattttaaacattttgcatgtaaatacttgtatttacccaagatttaaagcagttgattaattaatcccaacacctgtgaactgtctttgaaatactagagaaaaagaaatgttaatatcaccagtaacatcaactatactgtataaatagagttctataatacagaaatagtctacattggtatttgtgaaatctatggaagaactttaggattctagcagatggatactgaatgttcaggcccacttaagttattgatgtataaattgtgtttttgtctctatgtacagagatgtaaccatttttataataaatatttttattacaccaggaaaaaaaaaaaaaaaaa

SEQ ID NO: 11938 - DNA, 529 bp, Canis familiaris
gcatcgagacctgcaaaatcatggtggacatgctggactcagatggcagtgggaagctgggcctgaaagagttctatgttctctggacaaagatccagaagtaccagaaaatttaccgggagatcgatgtggaccggtctggcaccatgaactcctacgagatgcggaaagcacttgaggaagcaggcttcaagctgccctgtcagctccaccaggtcatcgttgctcgctttgcggatgacgagctcatcatcgacttcgacaatttcgtccggtgtctggttcgactggaaacactgttcaggatttaagcagctggaccccgagggctctggaaccatagagctggacctcatctcttggctctgcttttccgtcctctaaagtcgtaattcgtctgcctggagaccgtccgccaagcaccgggccaccagagaacattttttctctcgaccttgaaattatgggaacagttgctcaaactaatgattataaccgaaaataaagatgccttctgagatagcaaaaa

SEQ ID NO: 11939 - DNA, 562 bp, Canis familiaris
gctgaccaacgtcggggagctggtcctgaccatgacagctgatgatatcgtgtgcaccagggtctacgtccgagagtgtgcagctggctgtgggtccaggagctgccagagccggcccccgagcccccccagccgcccccctcaacttgccctgtctcactgctccccctcccccctcctccaccccccgctgcccctcccctttcctcctaggctagctctcccctccccctgcgtcacttctggggatgctgggatgcctccagcagggttctgctttttagggcccctactcacaccctcccccaacaaagagggatggatggcaagagcccacatcacccgttccagaatcactccccctccctagccagcagtcccaaacctgcccaaagcacagcctctctttctgcacagtgacctgagggccccagtgggaaagatgatcctctggcttccaccccttgtccctgtagcctacacagtgtagaatatttattggttaattttattaaaatgttttacaaaaataaaaaaaaaaaaaaacaaaaaaaaaaaaaaa

SEQ ID NO: 11940 - DNA, 1746 bp, Canis familiaris
ggttgtgtagtccgtaagtgtcaacttttgaaactgtcctttcacttcacacggaagcccagcgatgctctgatagtagcttatgaaccagccttatgctggtgggaggtttttttgtttttgtttttgttttttgttttttttggtagcccatccacacatgctattaactctgattttcattgagcatctaaagtataagatctaagatgtttcatgcaaagatagtcttattaacgttttttggtttgacactcttcccccaaggtggtgtggtgttcaggcacctgccgtagtaggggtaatattgcagaggaaagcccgggtagccgcccaggccaaaatactccacgttcccaattctatccttgtcttcgtctcgcttgccagtgcactgaaccggcaggacgtaaggactgtatttcatcactgggtaagcctccagggactcattcttgggaggcttaggtttgaagcccagaactcggagagccgcagcggccgcggcgggtgcagcctgcggagagcggggcgcgggccgccgaccagcagccgggaggacgcgaggcgcgcgccgcactcacccaccctcagcccccgcggcagccgctgacccgccaccatggcccgcggaaaagccaaggaggagggcagctggaagaaattcatctggaactcggagaagaaggagtttttgggcaggaccggtggcagttggtttaagatccttctgttctacgtgatattttacggctgcttggctgggatcttcattgggaccattcaagtgatgctgctcaccatcagcgaattcaagcccacataccaggaccgtgtggccccaccaggattaacacagattcctcagatccaaaagactgaaatttcctttcgccctaacgatcccaagagctatgaggaatatgtgcgcaacatagtcaggttcctggagaagtacaaagattcagcccagaaggatgaaatgatttttgaagattgtggcaatatgcccagcgaaatcaaagaacgaggagaatttaacaatgaacgaggagagcggaaagtctgcaggttcaagcttgagtggttgggcaattgctccggaatcaacgatgagacttatggctacagagacggcaaaccgtgtgtcctaataaagctcaaccgagttctgggcttcaaacctaagcctcccaagaatgagtccctggaggcttacccagtgatgaaatacagtccttacgtcctgccggttcagtgcactggcaagcgagacgaagacaaggatagaattgggaacgtggagtattttggcctgggcggctacccgggctttcctctgcaatattacccctactacggcaagttgctccagcccaagtatctgcagcccctgctcgccgtgcagttcaccaacctcaccatggacactgaaattcgcatcgagtgtaaggcttacggggagaacattggttacagtgagaaagaccgttttcagggacgctttgatgtaaaaattgaagttaagagctgatcacaagcacaaatctttcccactagccatttaaaaaaagttaaaaaaaagatacaaaaaacaaaaacctactagtcttggaataaactgtcatacgtatgggacctacacttaatctatatgctttacactagctttctgcatttaataggttagaatgtaaatttaaagtgtagcaatagcaagaaaatatttattctactgtaaatgac

SEQ ID NO: 11941 - DNA, 2051 bp, Canis familiaris
cgaggcggggagccgaggccgccgccagcgcgcagggagccccgagcccgagccccgccgcgaggccgttcgccggctgcccgcagcaccatggatctgcacctcttcgactacgccgagccaggcaacttctccgacataagctggccgtgcaacagcagcgactgcatcgtcgtggacaccgtgctgtgccccaacatgcccaacaaaagcgtgctgctgtacacgctgtccttcatttacatcttcatcttcgtgatcggcatgatcgccaactccgtggtggtctgggtgaacatccaggccaagaccaccggctacgacactcactgctacatcctcaacctggccatcgccgacctgtgggtggtcgtcaccatccccgtctgggtggtcagcctcgtgcagcataaccagtggcccatgggggagctcacgtgcaagatcacgcacctcatcttctccatcaacctgttcggcagcatcttcttcctcacgtgcatgagcgtggaccgctacctctccatcacctacttcgccagcacgtcgagccgcaggaagaaggtggttcgccgcgccgtctgtgtcctggtgtggctgctggccttctgcgtgtccctgcccgacacctactacctgaagaccgtcacgtcggcgtccaacaacgagacctactgccgctccttctaccccgagcacagcgtcaaggagtggctcatcagcatggagctggtctcggtggtcctgggcttcgccatccccttctgcgtcatcgccgtcttctactgcctgctggcccgcgccatctccgcgtccagcgaccaggagaagcagagcagccgaaagatcatcttctcctacgtggtggtcttcctcgtgtgctggctcccctaccacgtggtggtgctcctggacatcttctccatccttcactacatccccttcacctgccagctggagaacttcctcttcacggctctgcacgtcacgcagtgcctgtctctggtgcactgctgcgtcaaccccgtgctctatagcttcatcaaccgtaactacagatacgagctgatgaaggccttcatctttaagtactcggccaagacgggtctcaccaagctcatcgatgcctccagggtgtcggagacggagtactccgccttggagcaaaacgccaagtgacaggccccgcggggcctcggggacaagcgtgcgcgcttcctacacggcgctgggttgcatcgtctccaagagttcaagcaaggcgccttggggcttgaggcctgagtcgcgtgaagtggggaagcaggtgccaccgtgggcccttctcctctttgtccggctgccggggtggctgtcacggggccgtcgtgcctgcaggcgtgggccgtgctgcgtgaccctactacttactcgtccaagccggttgccggcgggctcgcctgcacttctgtaaaataggactttctgtgttccctggaggttttacttggtgacttgtatttaagttttaagactttattttctcattatcggcgtaccttataaatgtacttgaaagtttaaatatattttataaaaatcgtatgggcgctgtcacatacgatacatatacatacgctgacatatattcagagcgttgtagttttaactagtttgatttcagttttgactaaggatgacattaattgttagctgttttgaaattttatatatatatataaatataaatataaatatataaatatataaatatatgccggtctgggctgaaatgttttatttacgatagttttatatctgtgtggtgctttgctacctgcatgggatatgggacaagaaggacgctgtaaagcagtttgtgatattaattgtatcgtaaagttacattaaaaatgcgaaacgaagcggaacctctccaggctgcagcgccgcgcacaaagttttgaacagtcttatttcggagagttctctcaatttgtaagttatttttctttttttttttttttaataaagatttgtttttcctaaaaaaggcaaaaaaaaaaaaaaaa

SEQ ID NO: 11942 - DNA, 1668 bp, Canis familiaris
taaagttctcattaaacacatttatccctcaagctttggaaggagccaaaaaatgccaaaagcgagaatcccaaagcactgcccacactggtgtgatatcctggtagatgtctaacaaattcagcatgtgtcccctgggcttgaacatttgctgggcaaaggtccagaatagtgagacatcttgggattcatctggtttaggaaagacttttaactaccagccgtcacctcactgttcttcaagtagtcaagtcttgaggtcttctcagtgtgggctgttctgatggagggccccccaccagcatgaagcagaaggatgacctcgtcccgtaggcaggacaactgtgaagagagctgcgtgtgtccaagtctgtgggaagagagagccacctagaatgtccccgccaaaccagtcactggaaggccttctccaggaggcctccaacagatccctgaatgctacggaaaccccagaggcctggggtccagagacactccaggccctcaagatctctctcgctctgctcctctccatcatcacgatggccacagccctctcgaacgcctttgtgctcaccaccatcttcctcaccaggaagctccacaccccggctaactatctcattggctccctggccatgactgacctcttagtgtccatcttggtcatgcccatcagcattgcctataccaccacccgcacctggagctttggccaaatcctgtgtgacatctggctgtcttctgacatcacatgctgcacggcctccatcctgcatctctgtgtcatcgctctggacaggtactgggccatcaccgatgccctggagtatagtaagcgccgcacagcgggccgggcagctgtcatgatcgccaccgtctgggtcatctccatctgcatctccatccctccgctcttctggcggcaggccaaagctcaggaggacatgtcggactgccaggtgaacacatctcagatctcctacaccatctactccacgtgcggggccttctacatcccgtccgtgctgctcatcatcctctatggccgcatctacgtggctgcccggaaccgcatcctgaatccgccttcgctgtacgggaagcgcttcaccacagcgcagctcatcacgggctccgcggggtcctcgctctgctccctgagccccagcctccaagaggagcgctcgcatgcggccggcccccctctctttttcaaccacgtgcaagtcaagctggccgagggtgtcctggagcgcaagaggatttcggcggcccgagaaagaaaagccaccaaaaccctggggatcatcctgggggcctttatcgtctgctggctgcccttctttgttgcatctctggtcctccccatctgccgggcctcctgctggctccacccagccctctttgacttcttcacctggctaggctatctcaactctctcatcaacccaataatatacactgtgtttaacgaagagtttcggcaagcgtttcagagggttgtccatgtccggaaagcctcctagtctgatttgctggtgactcttgtcatccggtgtgtcctgtaacccagctggaattgtcttgtttcgttttcctgagatttgggtcaatcctgatgtcttgggttttggttccatcaatagaattgttcagtgagaaaaa

SEQ ID NO: 11943 - DNA, 1695 bp, Canis familiaris
ccgtgctgcccttctcggcggccctggaggtgctcggctactgggtgctgggacggatcttctgtgacatctgggccgccgtggacgtcctgtgctgcacggcctccatcctgagcctgtgcgccatctccatcgaccgctacatcggggtgcgctactcgctgcagtaccccacgctggtcacccgcaggaaggccatcctggcgctcctcggcgtctgggtcttgtctacggtcatctccatcgggcctctccttgggtggaaggagcccgcgcccaacgatgacaaggaatgcggggtcaccgaggaacccttctacgccctcttctcttccctgggctccttctacatcccgctggcggtcattctggtcatgtactgtcgcgtgtacatcgtcgccaagaggaccaccaagaacctggaagccggagtcatgaaagagatgtctaactccaaggagctgactctgaggatccactccaagaacttccacgaggacaccctcagcagtaccaaggccaagggccacaaccccaggagttccatagccgtcaaactttttaagttctccagggagaagaaagcagccaagaccttgggcattgtggtcggtatgttcatcttgtgctggctacccttcttcattgctctaccgcttggctccctgttctccaccctgaagccccccgacgccgtgttcaaggtggtgttctggctgggctacttcaacagctgcctcaaccccatcatctacccgtgctccagcaaggagttcaagcgcgccttcgtgcgcatcctcggctgccagtgtcgcggccgccgccgccgccgccgccgccgtcgcctgggcggctgcgcctacacctaccggccgtggacgcgcggcggctcgctggagcgctcgcagtcgcgcaaggactcgctggacgacagcggcagctgcctgagcggcagccagcggaccctcccgtcggcctcgccgagccccggctacctgggccgcgccgcgccgccgcccgtcgagctgtgcgccgtccccgagtggaaggcgccgggcgcgctgctgagcctgcccgcgccccagccccccggccgccgcggccgccgggactcgggcccgctcttcaccttcaggctcctggcggagcgcgggagccccgcggccggagacggggcctgccggcccgcgcccgacgcggccaacgggcagcccggcttcaagaccaacatgcccctggcgcccgggcagttttaggggggcctgcgggggggaggggggcgaaaccaccgtggggggagggcgggcgaggggggagggcggcggcgcccgggggaggcgggggggcggggggcagctgctttgctggcaggggcatgggtgccaggtacagcggagggctgggcgagcatgccgagagcctggggccccgacgccggccgggatgtccgtctgtctctctgtacatatccaaacgagtccctgtgtgcacgtatttaaccgtgggtacacgtgcgtgtgtctgtgcggtgtccgtgtggtctgcgtgcgcgcgtgggtgcggccaccggggggggggcagcgggggcgccgtcggcccgggacctcgcgcccctccagccgctccccggccctccccgagtggcggatggccctgggcccgggtcggaaacaaatcggacattaaaggtcgttg

SEQ ID NO: 11944 - DNA, 2271 bp, Canis familiaris
cctcccacccgggcttcccaccacaggtacctgtccccgaaccctccgcgcccacctgctgatgtgcccggcccgcgcctgccatgccgcccgccatctcggccttccaggccgcctacattggcatcgaggtgctcatcgccctggtctctgtgcccgggaacgtgctggtgatctgggcagtgaaggtgaaccaggcgctgcgggatgccaccttctgcttcatcgtgtcgctggcggtggctgacgtggcggtgggcgccctggtcatcccgctggccatcctcatcaatatcgggccaaggacctacttccacacctgcctcatggtcgcctgccctgtcctcatcctcacccagagctccatcctggccctgctggcgattgccgtggaccgctacctccgcgtcaagatcccactccggtacaagacggtggtgactccgcggagggcggcggtggccatcgccggctgctggatcctgtccttcgtggtgggcctgaccccgctgttcggctggaacaggctgggggaggcgcagcgggcctgggcggccaacggcagcggcggcgagcccgtgatcaaatgcgagttcgagaaggtcatcagcatggagtacatggtctacttcaacttcttcgtgtgggtgctgcccccgctgctgctcatggtcctcatctacctggaggtcttctatctgatccggaggcagctcggcaagaaggtgtcggcctcctctggcgacccgcagaagtactacgggaaggagctgaagatcgccaagtcgctggccctcatcctcttcctcttcgccctcagctggctgcccttgcacatcctcaactgcatcaccctcttctgcccctcctgccggaagcccagcatcctcatgtacatcgccatcttcctcacgcacggcaactcggccatgaaccccatcgtctacgccttccgcatccagaagttccgggtcaccttccttaagatctggaatgaccacttccgctgccagcccacgccccccgtcgacgaggaccccccagaggaggcgccccacgactagacgccaccttctcccgcctgcccacgtcgggggcgtctccgccccggcccacccccccactgacccactcctgagccctcccggctgggctgcggggtgtgggcgcctgcaccttgggtcctagaggaggtttgggaggacggcccacggcgaaggaaccgggtgccctgaggagacggagaaagtggctcgagcctccccagctgtgtgaccggcccacgggcagcccggtgcttcaggccagacggacctggggacactggggctgcgggggtcccgtggggcccggaaggcaagcttgggctcccgtggaggtcagggagccgcttgtcgctggtgctgctgctgaagccctggaacagagcccgaggacgggggaggtcccctccgagatgcaggggatggagagaagctggacatcaaggtcttgcttcctctcctgttctgtagaaggtgggagagcccctgggcaggaatcaggggtcctcagcccctgcctcccgggaccctgagctcctagccacgctgggtgccgggggcctgcccctcttgccccagggcaaccgggtttgcacttgggatgggcgggaagagcgggtccagaaatcattcccaacctttacttgatcctccaccagcccctggcccctgtcgaagggcctgccacacacagccaccaggtggcagccccgcgccggctcagccgagccccccaggagcgggagcagcggggctgtgaggggccacctgggctaccgccccattagccctagaggatgcctgcactctcctaagtgacactggctgctgcttctgggccggggacaggggggcgcagcctccggccttgcgagcgctgcccgtgggcgctcccggtgtgacttggcacaggctgcaccgcctgaggctgaggcaggaaggtcttgctggcatttaaataccctcaggacccctggcacttagcagtttccagggcctttggggctctgcacggtctagatgggctttagcgcatccagggaagggtccgccctctgccaagctcagggcccggggcccttgtccagggggtgggggcggggttcggagtgtgaacagcagctctaggcctggattccagacccttccctttctcagaggtaggctcttccctggctcccaggggggccaccttctaataaaagactgtgggtcttgaaaaaaaaaa

SEQ ID NO: 11945 - DNA, 2419 bp, Canis familiaris
ccgagcccgagccgcggcggagacagcgggagccggcgcgcgagccgcaggtgcctcggggactatgaagccgagctgagccaagatgctgcgagagcccctgaggagggcccagtttctggagactcagacttggcagtgaaaacgcccttggggagcccccgtcacaggcaggggcgctcttggctcctgtgaagaaggggctcaggggcctgggcagggccagcggcactgcagctatggaccgtgagctggcccggcccgtgtccttgctgaccctgcccgtctgcagccatgtccaccatgggctcctgggtgtacatcacggtggagctggccatcgctgtgctggccatcctgggcaatgtgctggtgtgctgggctgtgtggctgaacagcaacctgcagaacgtcaccaactacttcgtggtgtcactggcggcagccgacattgccgtgggagtcctcgcgatccccttcgccatcaccatcagcacagggttctgtgctgcctgccacaactgcctcttctttgcctgctttgtcctggtcctcactcagagctccatcttcagcctcctggccatcgccattgaccgctacatcgccatccgcatcccactccggtacaatggcttggtgactggcacaagggccaagggcatcattgcggtctgctgggtgctgtcgtttgccattggcttgactcccatgctgggctggaacaactgcagtcagccaaaggagggcagaaactactcacagggctgcggggagggccaggtggcctgtctctttgaggatgtggtgcccatgaactacatggtgtactacaacttctttgcttttgtcctggtgccgctgctgctcatgctgggtgtctacttgcggatcttcctagcagctcggcgacagctgaagcagatggagagccagcctctgcctggggagcgggctcggtccacgctgcagaaggaggtccacgctgccaagtcactggccatcattgtggggctcttcgccctctgctggctgcccctgcatatcatcaactgctttaccttcttttgcccagagtgtagccatgccccactctggctcatgtacctgaccatcgtcctctcccacaccaattctgttgtgaatcccttcatctatgcctaccgcatccgtgagtttcgccagaccttccgcaagatcattcgcagccacgtcctgaggcggcgggagcccttcaaagcaggtggcaccagtgcccgcgccttggcagctcatggcagtgatggagagcagatcagcctccgcctcaatggccatcctcctggggtgtgggccaatggcagcgccccccatcctgagcggcggcccaatggctacaccctggggctggtgagtggagggattgcccctgagtcccatggcgacatgggcctcccagatgtggagctcctcagccatgagctcaagggagcatgcccagagtcccctggccttgaaggtcccctggcccaggatggagcaggagtgtcctgatgatccactcagtttgcctcttcctacaggaaggaaatctttctctttggtggatagaaccagtcacattgggaaaagaatgaatgtgcctggagacccttctcgtggccagttcccactttggactgagaggagggagccctggctggagcagcatgtggcctagcaggaagggtttggagtccaagaaagtggacgtttcacatcagaaggcccagcatcaggtcagggccacagcacagagcatcttggctgggcagggcctggtcccccactctggaagcatctagaagtaccatcctgatgtggcagggcaggctaactggccctgaggctgtgggggtggctccaacaggccccctaccacacacagacaacaccctccccagacttttcaaggattcaggagctgctatgcccagaggtggcgtttttcatttctttctttcttttttctcttttttttttccaggagaaaatgttaaacgtgaagaatgcctttttttttttttttaattattttccttccctggttgccaggtctgttgtcagtcctgctgctaacctagctccaggagtcagcccagggagtcccagacagccctgtctggctaccatgaactgccacgcacttcttacaccatcagtcccagggccatctcttggggtcacaaagctgggctcaaggacagggagctgtaatggatttgctgccagactgtgggctcaggggaggagatcgggactggctcaccatgcggtgtgcctgggtagctcagagctgcccggtcagaggccctttctaactgcctttccttccgaaggaatgtttttttctgagataaaataaaaatgagccatgttgtgttttaaaaaaaaaaaaaaa

SEQ ID NO: 11946 - DNA, 332 bp, Canis familiaris
cacaggcttctatgtgctcctcatgatcccaggggaacatgccctgctgacctgctctttctctccccagcggtcctgggtgcggagctcagcacaggcccggacagcaggggggagaagcctgctcccagtgcaccctggcggccccgccgatccaagcgctgctcctgctcttccctgatggataaagagtgtgtctacttctgccaccttgacatcatctgggtcaacactcctgagtaagtccctagagggcgtcgtaactctattccttacctctggcttccccagactctggagcccagtgactctagctgcttttaggggagctc

SEQ ID NO: 11947 - DNA, 2296 bp, Canis familiaris
tggcaatcgtcggtcctccagctggtgggagttggcgtcgctgtgctgggcgctggagccctagtttgtatagtttgggaagtcgggctttggagtcgcacctgtctgtctgacccctgctttccttggtttccttccacgttgcgggggcctcgcgaaagactccccggcccctttgggcgcagcggtagcggtgcttttttgcggtgaggaaagtaaggctcagagagattaagtaacttgcccaaagtaacacagccagtatgtaacagagctgggatttgaatccaagtctgtcagactcccaagcccatgctctttccagtacttcacactgcagcagattttcttgtaatcacaacttaaagccttcaagatggtactagcagaccttggaagaaaaataacatcagcattacgctcattgagcaatgccaccattatcaatgaagaggtattaaatgccatgctaaaagaagtatgtacagcattactggaagcagatgttaatattaaactagtgaagcaactaagagaaaatgtaaagtctgctattgatcttgaagagatggcatctggtcttaacaaaagaaaaatgattcagcatgctgtgtttaaagaactggtgaagcttgtagaccctggagttaaagcatggacaccgactaaaggaaaacagaatgtgatcatgtttgttggattgcaagggagtggtaaaacaacaacatgttcaaagttagcatattattaccagaggaaaggttggaagacctgtttgatatgtgcagacacattcagagcaggagcttttgaccaactaaaacagaatgctaccaaagcaagaattccattctatggaagctatacagaaatggatcctgttatcattgcctctgaaggagtggagaaattcaaaaatgaaaattttgaaattattattgttgatacaagtggacgccataaacaggaagactctttgtttgaagaaatgcttcaagttgctaacgctatacaacctgataacattgtttatgtgatggatgcctccattggacaggcttgtgaagcccaggcaaaggcttttaaagataaagtagatgtagcttcggtaatagtgacaaaacttgatggccatgcaaaaggaggtggtgcactcagtgcagttgctgccacaaaaagtccaattattttcattggtacaggggaacacatagatgattttgaacctttcaaaacacagccttttatcagcaagcttcttggtatgggtgacatcgaaggactgatagataaagtcaatgagttgaagttggatgacaatgaagcacttatagagaagttaaaacatggtcagtttacgttgcgagacatgtatgaacaatttcaaaatatcatgaagatgggccccttcagtcagatcttgggtatgatccctggttttggtacagattttatgagcaaaggaaatgaacaagagtcaatggcaaggctaaaaaagttaatgacgataatggatagtatgaatgatcaagaacttgacagtactgatggtgccaaggtttttagtaagcaaccaggaagaatccagagagtagcaagaggatcaggtgtgtcaacaagagatgttcaagaacttttgacacaatataccaaatttgcacagatggtaaaaaagatgggaggtatcaaaggacttttcaaaggtggtgacatgtctaagaatgtgagccagtcacagatggcaaaactgaatcaacaaatggccaaaatgatggatccaagagttcttcatcacatgggtggtatggcaggacttcagtccatgatgaggcagtttcaacagggtgctgctggcaatatgaaaggcatgatgggattcaataatatgtaaagaagatgccttaatttaaactgactcagttgattacattatttgctgagacctcaagagtttccctcctttttgcaaacaggaaaaaaaaagtatttttcttgcctgtcttgccctttttctttctcttctcatcttctttccttcctacttccttccctccctttgatataagggaggaatatatagtttttgtggaaatcattatatttttgctttagattttcttttcttagttttcaccatcataatacttcttaagttaaacaaatcatgatgtaaaatctagtacttagaagtttctaattgtctcaaaggccaagcattacatttgtaaacagtcctgatcagtagttatatgatgtctcaataaaagtgctgtaaaataaacttcaaactcgttat

SEQ ID NO: 11948 - DNA, 769 bp, Canis familiaris
cagaaatgccaatgctggcatttgctttaagtttttatttttctctttcaactgctttctacttccacgtaggggaacgagaggagaaatgcatcatagaagacattccaagtgacacgctggtaacagggactttcaagacacagcagtgggacttccgcaggcaggatttcctcgaatctgctccgggcctggggatgtttgtgactgtcacaacctacaacgatgaggtattattgtccaagttatatggcccacaaggaagattctattttacttcacattcacctggcgaacacatcatttgcttggaatctaattctacgaggcttgtgtccttcggtgggagtaagctgcggatccacttagagattcgagttggacaacatgaccttgatgcggccattgctcaagcaaaggacaaagttaatgaagttagctttaagctggaacatctaattgagcaaattgagcaaatagtcaaagaacagaactatcaaagggaccgtgaagaaaattttcggatgatcagtgaagatacaaatagcaatgttttatggtgggcatttgcacaaacattgatctttattgcaatcggaattttccaaatgaaatcccttaaaaacttctttatagctaagaaactcgtttaaaatgttaatacaaacagctacctgctaatttgtagaatgtctgagttaataaatcaaaatacattcacaaaaaaaaaaaaataatacaaacagctacctgctaatttgtagaatgt

SEQ ID NO: 11949 - DNA, 1956 bp, Canis familiaris
ggctgcacaaaaggccagcaaagactagcacacaccgctgagtgaaagtacagagaattcacagaggacgagtggtcatggacttgatcccaagcttttccacagaaacctggcttcttctggctatcagcctggtgctcctctatctgtatgggacctacacacatgggatttttaggaagctgggaattcctgggccaacacctctgccttttgtgggaactgctctgggctaccgtaatggtttttatgtttttgacatgaaatgttttagtaagtatggaagaatgtgggggttttatgatgggcgacagcctgtgctggctatcacagatccggacatgatcaaaacagtactagtgaaagaatgttattctgtcttcacaaaccggcggactcttggtccagtaggatttatgaaaagtgcgatctctctgtctgaggatgaagagtggaagagaatgcgaactttgctgtctccaaccttcaccactggaaagctcaaggagatgttccccatcattggccagtatggagatgtgttggtgaacaacctgaggaaggaggcagagaaaggcaaggccatcaacttgaaagatgtctttggagcctacagcatggatgtgattaccagcacatcgtttggagtgaacattgattccctcaaccacccacaagatccgtttgtggaaaataccaagaagctcttaaaatttgatttccttgacccatttttcttctccatattactgtttccattccttactccggtttttgaaatattaaatatctggctatttccaaagaaagttactgattttttcagaaaatctgtagagagaatgaaggaaagtcgcctaaaagataaacaaaagcaccgagtggactttcttcagctgatgattaactcccagaattccaaagaaatggacactcataaagctctatctgatttggagctggtggcccaatctattatctttatttttgctggctatgagaccactagcacttctctttccttccttatgtatgaattggccactcaccctgatgtccagcagaaactgcaggaggagattgatgcgactttccccaataaggcattgcccacttacgatgcccttgtgcagatggaatatctggacatggtgttgaatgaaactctccgattatacccaatcgctggtagacttgagagggtctgtaagaaagatgtggaaatcagtggtgtgttcattcccaaagggacagtggtgatggtgccaacctttactcttcatcgagaccagagtctctggccagagcctgaggaattccgacctgaaaggttcagtaggaagaacaaggacagcataaatccttatacatacctgccttttggaactggaccccgaaactgcattggaatgaggtttgcgatcatgaacatgaaacttgcccttgttagggtcctgcagaacttctccttcaaaccttgtaaagaaacacagatccccctgaaattaaatgctcaagggattattcaacctgaaaagcccattgttctcaaggttgagccaagagatgggagtgtaaatggagcctgactttccctaaggacttccttttgttcttcaagaaactatcccagaacaccagagacctcaatttcctttgattatgtggtttcactcatgtagggaatataagaaatagtgaaaggggttgtaggggaaagaagggaaaatgagtgggaaaaattagagagggtgacacagaatgagaaactcttaactctgggaaatgtacaagggatagtggaaggggaggcaggtggggggatggggtgactgacgggcactgaggagggcacttgacgggatgagcactgggtgttacaatgtatgttggcaaatcaaacttcaataaaaaatatattaaaaaccccaaaaaaaaaaaaaaaaaaaaaaaaaa

SEQ ID NO: 11950 - DNA, 176 bp, Canis familiaris
atctccgaggtgaagatggatgccgagttccgacatgactcaggatatgaagttcatcatcaaaaattggtgttctttgcagaagatgtgggctcaaacaaaggtgccatcattggactcatggtgggcggtgttgtcatagcaacagtgattgtcatcaccttggtgatgctgaa

SEQ ID NO: 11951 - DNA, 840 bp, Canis familiaris
tgttctaagggacggagcaggggaagacgtttgctctcccggaacagcccgttctcgttcccgtccctcgattacccgtggcgtcgagagtcggggcggcggctgcggcagcaagggcggcggtggcggcggcggcggctgcagtgacatgtccagcatgaatcccgaatatgattatttattcaagttacttctgattggcgactctggggttggaaagtcttgcctccttcttaggtttgcagatgatacatatacagaaagctacatcagcacaattggtgtggatttcaaaataagaactatagagttagatgggaaaacaatcaagcttcaaatatgggacacagcaggccaagaaagatttcgaacaatcacctccagttattacagaggagcccatggcatcatagttgtgtatgacgtgacagatcaggagtccttcaataatgttaaacagtggctgcaggaaatagaccgttatgccagtgaaaacgtcaacaagttgttggtagggaacaaatgcgatctgaccacaaagaaagtagtagactacacaacagcaaaggaatttgcggattcccttggaattccatttttggaaaccagtgctaagaacgcaacgaatgtagaacagtctttcatgacgatggcagctgagattaaaaagcgaatgggtcctggagcaacagctggtggtgcagagaagtccaatgtgaaaattcagagcactccggtcaagcagtcaggtggaggttgctgctaaaatttgcctccgtctttctctcacagcaaagaatttgcaatctgaacccaagtgaaaaaacaaacttgcctgaa

SEQ ID NO: 11952 - DNA, 760 bp, Canis familiaris
gagtgtaatatggcgaagacctacgattacctgttcaagctgctgctgatcggggactcgggggtggggaagacctgtgtcctgttccgcttctccgaggacgccttcaactcaactttcatctccactataggaattgactttaaaattaggaccatagagctcgatggcaagagaattaagctacagatatgggacacagctggtcaagaacggtttcggacgatcacaacagcctattacaggggcgcaatgggcatcatgctggtctatgacatcaccaacgagaaatcctttgacaatatccggaactggattcggaacattgaggagcatgcttctgcagatgtcgaaaagatgatactcggaaacaagtgtgatgtgaacgacaaaagacaagtttccaaggaacggggagaaaagctggccctggactatggaatcaagttcatggagaccagtgcgaaggccaacatcaatgtggagaacgcatttttcactctcgccagagacatcaaagcaaagatggacaaaaaattggaaggcaacagtccccaagggagcaaccagggagtcaaaatcacaccagaccagcagaagaggagcagctttttccgatgtgttcttctgtgaggaacactgccttactctgagcctcgctcagctgagctgactgtgcctgtcctgagtgagccctcctcactcagccggggccctccccctccaatactccctgccgtgccagccactgggcccatgg

SEQ ID NO: 11953 - DNA, 888 bp, Canis familiaris
gactcgagccctcgtttttcccacgctaccccggtcctccggcctgagaacgcccaagtgaggagttggccgtcgtgagagggaccgatcccttggggccgccggcggcgagagcctgagccgctcctcccaatggcgaagaagacgtacgacctgcttttcaagctgctcctgatcggagactcgggagtagggaagacctgcgtcctttttcgtttttcggatgatgccttcaataccacctttatttccaccataggaatagattttaagatcaaaacagttgaattacaaggaaagaagatcaagctacagatatgggatacagcaggccaggagcgatttcacaccatcacaacctcctactacagaggagcaatgggtatcatgctagtatatgacatcaccaatggtaaaagttttgaaaacatcagcaaatggcttagaaacatagatgagcatgccaatgaagatgtggaaagaatgttactaggaaacaaatgtgatatggacgataaaagagttgtacctaaaggaaaaggagagcagattgcaagggagcatggtattagattttttgagactagtgcaaaagtaaatataaacatcgaaaaggctttcctcacattagctgaagatatccttcgaaagacccctgtaaaagagcccaacagtgaaaatgtagatatcagcagtggaggcggcgtgacaggctggaagagcaaatgttgctgagcgttctcctgttccgtcagttgccatccaccaccctgttttttcctcttgctgcaaaataaaccactctgtccattttaactctaaacagatatttttgttcctcatcttaactctccaatccacctgttttatttgttctttcatccgtga

SEQ ID NO: 11954 - DNA, 926 bp, Canis familiaris
ctccccggccgcgcaatgggcacccgcgacgacgagtacgactatctcttcaaagttgtccttattggagattctggtgttggaaagagtaatctcttgtctcgatttactcgaaatgagtttaatctcgaaagtaagagcaccattggagtagagtttgcaacaagaagcatccaggttgatgggaaaacaataaaggcacagatatgggacacagcagggcaggagcgataccgagctataacatcagcatattatcgtggagctgtaggtgccttactggtttatgacattgctaagcatctcacatatgaaaatgtagaacgatggctgaaagaactgagagatcatgctgatagtaacattgttatcatgcttgtgggcaataagagtgatttgcgtcatctcagggcagttcctacagatgaagcaagagcttttgcagaaaagaatggtttgtcattcattgagacttccgctctagactctacaaatgtagaagctgcttttcagacaattctgacagagatataccgcattgtttcccagaaacaaatgtcagacagacgtgaaaatgacatgtctccaagcaacaatgtggttcctattcatgttccaccaaccactgaaaacaagccaaaggtgcagtgctgtcagaacatataaggcatttctcttctcccctagaaggctggggatagtccattcccaggtctgagattaaatatatttgtaattcttgtggtcactttgtgttttattacttcctcatacttatgaattttcccatgtcttaagtcttttgattttagctttataaaatcatccacttgtcccgaatgactgcagctttttttcatgctatggcttcactagccttagtttaataaactgaatgtttggattcctcaaaaaaaaaaaaaaaa

SEQ ID NO: 11955 - DNA, 716 bp, Canis familiaris
atgcaggccatcaagtgtgtggtggtgggagacggagctgtaggtaaaacttgtctactgatcagttacacaaccaatgcatttcctggagaatacatccccactgtctttgacaattactctgccaatgttatggtagatggaaaaccagtgaatctgggcttatgggatacagctggacaagaagattatgacagattacgtcccttatcctatccgcaaacagatgtattcttaatttgcttttctcttgtgagtcctgcatcatttgaaaatgttcgagcaaagtggtaccctgaagtgcgacaccactgtcccaacacccctatcatcttggtggggactaaacttgatctcagggacgacaaagacacgattgagaaactgaaggagaagaagctgactcccatcacctacccacagggtctggccatggctaaggagatcggtgctgtaaaatacctggagtgctctgctctcacgcagcgaggcctcaagacagtgtttgatgaagctattcgagcggttctctgcccccctcccgtcaagaagaggaagagaaaatgcctgctgttgtaaatgttgggttcccctgccccatccccctcagaacctttgtacgctttgctcaaaaatggtggagccttcgcactcaatgccaagtttttgttacagattagtttttccataaaccatttgaaccaatcagtaatttt

SEQ ID NO: 11956 - DNA, 488 bp, Canis familiaris
caggagcaggagcaggagcaggagactgagggctccagcctggacagctccagagctaagcggtgcagtaatctgagtacctgtgtgctgggcacatactcgaaggacctgaacaactttcatacattctctggcatcggcttcggggctgaaacacctggcaagaaaagggacatagccagcggcttggagaggggccgctaacctcgctttggggtgccccaggatgccaactgatctccttccactccttcctgacttcccttcttgctcccattgatgaatttaatgcatgcagatttcacttggattgctcttccagctggcattggtagctttgcttgcgagagagaatattggggatctcaggatggaagggaagtgagcagcactcatagaccaggtatgaggtctttttgctcctttagaggttagaggtaagagtgagggaagcctcttgagattccagaggatttcgaggtagagtc

SEQ ID NO: 11957 - DNA, 399 bp, Canis familiaris
gggtccccctccgcctgcggtgccaggcaccccgacccacctgtccgcctctgtccccctgttgcgcacgcaggcaagggccaggtggccgctgccccggagcatccagcaccctcagcccgggcccgaggctcccacctgcggcctcggcgttgctcctgcagctcctggctcgacaaggagtgcgtctacttctgccacctggacatcatctgggtgaacactcccgggtgagctcccgcggggacccaggcggggctgctagaggcggggcagggggtggggaacctgtagctagcacagctctccctgggcctccagacggatcgctgagctgacatgaagagcggctgggtgttgtccctactcccacgtgggggctgcctcggtaaccccggg

SEQ ID NO: 11958 - DNA, 872 bp, Canis familiaris
cctctgatatactgacactgaaacattaaaagtaaatttgagaaacaatgtgtctcctgaagctgccagtagttctcatcatactctcggttgcattaaaccatctgaaggctactcccattaaaagtcaccagatggaaaagcggaaatgcaacactgccacgtgtgcgactcaacgcctggcaaatttcttggttcgtactagcaataatcttggtgccattctctcgcctaccaatgtgggatccaatacatatggcaagagaaacacaattgagattttaaacaggggaccattgaattacttaccactttagaggtcaacgcacccctatcattcttactttcatgtataaaaatattctagtgatttcttgtgtaagttaacattagcatgaacataagtttttatgtactatgtttgttagtagtacatataaattgttatggtaagaattgttttaactttaatgctaattaagaccccatcataaaaagtcaatgtctttaaaaatgaaatgttcttgctatagatatttattttgaaaacatattaaaaagtcattcttttgcctatatctttatgatctgagtttgagaacaaaagagaaaatagtatttggaaacttggtaaattgtaaacagcggagagtgaagttaagcacattaaaaagggcattgaggaccgcaggtgaggagagcttgatgagcatgatgtcattgtccaggatccagctgttatagttgggatggcggatgaccttggcggagttgatgaactgctacaagtcccgcatccaagtgagactcggagagtacaacatcgatgtcctggaggggaatgagcagttcatcaactccgccaaggtcat

SEQ ID NO: 11959 - DNA, 2856 bp, Canis familiaris
ttttttttttttttttttttttttttttttttttccgggcggccccggcggctgcgtactggctgtgggatgggaagtgaagccccagcgagcggcacggcggggcggtgaggagcagccagggggaggcggcggcggcggcggcggcagccagtctgtgagcagctggagagcggcgccggggacgagcacctgcaggcacgggcggcggcctcgccatggcgattcgcaagaagagcaccaagagccccccggtcctgagccacgaattcatcctgcagaatcacgcggacatcgtctcctgtgtggcgatggtcttcctgctggggctcatgttcgagataacagcgaaagcctctatcatttttgttactcttcagtacaatgttaccctccctgcaacagaagaacaagctactgaatcaacatccctttattactatggtatcaaagatttggctacagttttcttctacatgctagtggcgataattattcatgccataattcaagagtatgtgttggataaaattaacaggcgaatgcatttctccaaaacgaaacacagcaagtttaatgaatctggtcagcttagtgcattctaccttttttcttgtatttggggcacattcattctaatatctgaaaactacatctcagacccaactatcttgtggagggcttacccccataacctgatgacatttcaaatgaagtttttctacatagcccagttggcttactggttccatgcttttcctgaactctacttccagaaaaccaaaaaagaagatattcctcgtcagcttgtctacattggtctttacctctttcacattgccggggcttatcttttaaacttgaatcatctaggacttgttcttctggtgctacattattttgttgaatttctcttccatatttcccgcctgttttattttagtgatgaaaagtatcagaaagggttttctctgtgggcagttctgtttgttttgggaagacttctgactttaattctttcagtactcactgttggctttggccttgcaagagcagagaatcagaaactggatttcagtgctgggaacttcaatgtgttagctgtaagaattgctgtcctggcatccatttgcattacccaagcattcatgatgtggaagttcattaattttcagcttcggaggtggagggaacattctacttttcaggcaccagttgtgaagaagaaaccaacagtaactaaaggcaggtcttctagaaaaggaacagaaaatggtgtaaatggaacagtaacttcaaatggagctgactctccccgtaatagaaaagagaaatcttcataatgaattataatctaattgattaatgtccccaaagaaatctgctttttactatatctttcagcactagagattttttctgtccttgaaaatacagtttgtgctctttgattcttgctattgtactgttgtttcatgcatttttttaaagggcatttgagggaaggatgattactatgagtgagaaaaatattttagcttagactaagctacctgccttcaaaatagtttagggaccaccaccatattctattttgttttttatctttgaatgtttttctaatgatttggagagataactatttacaaaaattctacataacagtgataaaatttcttgctctcaccaattttttgtattagcaagatggcctcttccagcaaggtcatttttttaagttatctttcagggtaaaatggaaatactatacagttggaagtcaaactttaatatgttttcagtgttctctaatttttaggaatttttgtagtctttacacctgggaaaaaagatttgtaaattcactataataattgtgtgctttattttataggtaatggttgttaatgttacatccccattttaaaaaacaaccacaacatactattggttacaatgtgtggagagttattgccatatatattgaatcaaaaatatatgaacataaaagtacctgtgaagtaaaatcctttcttgagcattttcaacacttgtaaactgaaaatcagaaaattaaatatttactataaagaagcaaatacgactatagccctttttgatatgtttattaataatgattcttaatggggcttataaggtcgatatgcacagcatcttagaaaaatattgtttaacctgcaaaccctttttaaaaataatgcctacttaatttatatctataaaagaatgtcgggtaattatatttggaacatttacgcactaatcttaaagaaattgaaaattcagttggataaatagtcttacaaaagacagtgctttatgttataactatagctttggtcccatctttaattgagaagcatttatctgtataaaacatatttttggataaatatatatatatatatttgtatctctacagaaaggctctaaaaaacatttgagtaaaacatttggttcccttttctataattatccttaaaaattcttacagctatatttggtttttttgttgtcttcacagtacctatactgctccttttggtgttcacatcttgttctccatttctcacttttgtcaccagctcatgtttgtgccatttttagtataaaagttgcaggcttgttaggtctgcagtttaataagttgccatgctgctagaaagttgtgctttctatttccagctgtttacttcctggaaaaagtagtagctctctgtagcatcatggagtttcagtggaaccaaatttttgccaataaaaactggcattatattgaactatacattgagaaatcaaacaaaataaaatttttactttcaaaaaaaaaaaaaa

SEQ ID NO: 11960 - DNA, 338 bp, Canis familiaris
tgtctgtaaccctctaaggtatccagtcctgatgaaccgcagggtgtgtctcctgctggctgctggtgcctggtttggtgggtccctggatggctttctgctcacccccatcaccatgaatgtcccttactgtggctcccacagtatcaaccattttttctgtgagatccctgcagttctcagactagcctgtgctgacacatccttgtatgaaaccctaatgtacatctgctgtgtactcatgttactcatccctatctctatcatctcaacctcctactctctcatcttgttaactgtccaccgaatgcgctctgctgaaggccggaaaaaagctt

SEQ ID NO: 11961 - DNA, 338 bp, Canis familiaris
catctgtaaccctctgcgctacacagagctcatgggacaccgggtgtgtgtgggactcgtggccactgcctgtgcctgtggcttgactattgcacagattatcacctccctggtgttttacctgccgttccgctcctccaaccagctccatcactacttctgcgacatccctcctgtcctcaaagtggcatctcaacatacccacttgagtcagattgtcattatcatgctctgtgcattggtcctggttatccctctgctactgattttggtatcctatattcacatcatctctgccatcatccaatttccttccacattaggcagatacaaagctt

SEQ ID NO: 11962 - DNA, 338 bp, Canis familiaris
catttgcaagcccctgcattacttgaccatcatgaacctgaagacttgctccttcctggtcactacctgcttcactttggccttcactctcatcactggtttggtagtgaaagtttcccagttatccttctgtggcccctatgtcatccctcactttttctgtgacattggccccctgattcatctttcctgttctgacactaaacctactgaaatgttggcttttgtcctcgctttgtttatccttttgacatcccttatcataaccatcattgcctacagcaacataatagtcacaattgtacaactcccatcagctagggaacgacagaaagctt

SEQ ID NO: 11963 - DNA, 338 bp, Canis familiaris
tgtttgccacccactgaggtaccccgttctcatgagctggcaattatgcctgagaatgaccgtggggtcctggtccctgggggcagctgatgggctcatgcaggctgctgccaccctgagttttccattctgtggtgcacatgagatcaatcatttcttctgtgaggcccccactctggtgcgtttggcttgtgctgacacgtttgtttttgagtatgtcatgtatatctgctgtgtattaatgctgctggttccgttttctctcatcctgatttcctatagtctcatccttgctgcagttctccagatgcattctagagaagcccgcaagaaagctt

SEQ ID NO: 11964 - DNA, 343 bp, Canis familiaris
tatttgctttcctcttcactatcccattcgtatgagcaaaaaagtatgcatgctgatgataacaggatcttggataatgggctcagtcaatgcttgtgcccacactgtatacgccttccatataccttactgtcgatccaggaacatcaaccatttcttctgtgatgtcccagccatgttgactttagcctgcatggacacctgggtctatgagtacacagtgtttgtgagcaccatcctcttccttgcatttccattcattggcattgtgtgttcctatggccgggtcctcctagctatctgccacatgcagtccacagaagggaggaagaaggcctattcc

SEQ ID NO: 11965 - DNA, 338 bp, Canis familiaris
catttgtcaacctctacactacatggccatcatgaacaccaggctctgtggactgctggttctggtatcctggaccacgagtgtcttgcattccttgttacaaacctcaatggtgttgcggctgtccttctgtacagaggtggaaatcccccactttttctgtgaactcaatcaaatgatccaacttgcctgttctgacacctttcttaataatgtggtaatgtattttgcagctatgttgctggctggtggtcccctcactgggatcctttactcgtattctaagattgtttcctccatttgtagaatctcatcagctcagggcaagtataaagctt

SEQ ID NO: 11966 - DNA, 343 bp, Canis familiaris
catatgcaaaccattactttatccagtgattatgtctaatacactgtgcatccggctgttagttttgtcacttttaggtggacttctccatgccataattcatagttcttttttattcagattaaccttctgtgattccatcatagtacatcacttttattgtgacattatacccctgcttaagatcacctgtactgacccttctattaattatctgatagtatttatttttgctgggtcaatacagatgttcaccattctgatagttcttgtctcctacacactagtgctcttcacaatattaagaaagaagtctctacaaggcataaagaaagccttctcc

SEQ ID NO: 11967 - DNA, 343 bp, Canis familiaris
catatgcaaaccattaacttatccagtgattatgtccaatacactctgcatccggctgatacttttgtcatttttaggaggacttcttcatgccataattcacagttcttttttattcagattaaccttctgcaattctatcatagtacatcatttttactgtgatattataccattgtttaagatctcctgtactgatccttctattaattatctgatggtatttattttctctgggtcaatacaagtcttcaccattttgactgttcttgtctcctacacactagtgctctttacaatattaagaaagaagtcgctgcaaggcataaaaaaagccttctcc

SEQ ID NO: 11968 - DNA, 343 bp, Canis familiaris
tatttgccatcctctccgatacaaggtcatcatgagccgctggatgtgtctcctcatggtgggcatctgtggagtttatggcgtggtgggtagcctgtgctacactttctttgcgatgcgcctgccctactgtggccctaatgaaattgaccactacttctgtgaggtccctgccgtcctgaagctggcctgtgcagacacatccctcaatgacttggtggacttcatcacgggcttcaatgtcattgtggtcccactgaccctggttgtcattgtctatgccaacatctttgccaccatcatgaagatccgctcagcccagggacagatcaaagccttctcc

SEQ ID NO: 11969 - DNA, 343 bp, Canis familiaris
cattgtcaactctttgctttacagtgcagccatgtctaagagaacatgtgtagggttggtcattgggtcattcataggtggaatgattaactcattgacacacacagtaagtttaggcagactgtccttctgtgggtccaatgttgtcagccacttcttctgtgatattccctcactcctaaagctatcatgttctgatactaccatgaatgaattgttgctcttaactttctctggagtcattgccatggccaccttcttgattgtgatcatttcctacgtgtttattgctgttgctattctgaggatccgctcagcaacaggcagacagaaagccttctcc

SEQ ID NO: 11970 - DNA, 1713 bp, Canis familiaris
gagctctcaggtgtatgacttgtgcctgagtttcttttactgatatgtgagagatttggaggcacagattgggagaggggcagggtgagggtgagttcatgagcttcttttaggattttctgagcttaaaatacatgtgctaagtctaaagaagataatcattaagcaattacatacacagttttatagattagatagtcatctacatctgacatttaaatggtagtgcagtcttttggagtaggtgagtttttctttgtggtatatgtagcattataagagaacagtgtctaagaaaaagccatggaacgtcaacatgaagagactgacaaaacagaaagtaattagagttagtgaggatgtctggtcagttaggtatgagaaaaacccaatatatatgtatctcagaggtaataggagtattttataaaaggtggaatattgataaagagaagtgaagaaaagtcatttctgatcatagagattctgatcttagaattttggatataaatggtaattattgtgatgagagtgataccaagtaactttacagaacacttaacagatcatgtatcatagaaatatgtttatttttaaattcaggtttaatggacactgtaatttcttcttaaagatactgaagacaaagcatgacagaaaagaatcaaactgtcgtctcagaatttgtcctccttggcctgcccattgatccagatcagcgagacctgttctacgccctgttcctggccatgtatgttaccacaatcctggggaacctactcatcattgtcctcattcagctggactcgcacctccacacacccatgtatttgtttctcagcaatttatccttctctgacctctgcttctcttctgtcacaatgcccaagttgctgcagaacatgcagagccaagtcccgtccatcccctatgctggctgcctgacccaaatgtacttcttcctgttttttggagatctggagagcttcctcctggtggccatggcctatgaccgctatgtggccatctgcttccccctacactacaccaccatcatgagccccaagctctgtttctccctgttggtgctgtcatgggtgctgaccatgttccatgctgtattacacactctgttaatggccagattgtgtttttgtgccaacacaatcccccactttttttgtgatatgtctgctctgctgaagctggcctgctctgacactcaagttaatgagttggtgatatttatcatgggagggctcattctcgtgatcccattcctgctcatcatcacgtcttatgcacggattgtgtcctccatcctcaaggttccttctgccataggcatctgcaaggtcttctccacctgtggctcccacctctcagtggtgtctctcttctatgggacagttattggtctctatttatgcccatcagctaataattctactgttaaggagactatcatggctatgatgtacactgtggtcacccccatgctgaaccccttcatctacagcctgaggaataaagacatgaagggagccctgagaagagtcatttgtagaaagaaaattaccttctctgtgtgatggtaacatttgatacttttacatatttctatctaggagatataataatattggaatactattccagatgttttctcttacccatggaaagcctgtaaaaatggtacggtaaataattatt

SEQ ID NO: 11971 - DNA, 1579 bp, Canis familiaris
ggcgaggcgagcggctggggtcgccgcgcggcagctcgctcccggcctgtgtctccgcgctccctgctgcaatgagcttcctcaaaagtttcccgccgcccggctcggccgaggggcttcggcagcagcagcccgagaccgaggccgtgctgaacggcaagggcctcggcaccggcacgctctacatcgcggagagccgcctgtcttggttagatggctctggattaggattctcactggaataccccaccattagcttgcatgcggtgtccagggacctaaatgcctatccacgagagcatttgtatgttatggtgaatgctaaatttggagaagaatcaaaagaatctgttgctgaagaagaagacagtgatgatgatgttgaacctattgctgaatttagatttgtgcctagtgataaatcagcattggaggcaatgttcactgcaatgtgtgaatgccaggctttgcatcctgatcctgaggatgaagattcagatgattacgatggagaagaatatgatgtggaagcacatgaacaagggcagggggacatccctacattttatacctatgaagaaggattatcccatttaacagcagaaggccaagccaccttggagagattagaaggaatgctttctcagtctgtgagcagccaatataacatggctggagtccggacagaagattcaaccagagattatgaagatgggatggaggtagacactacaccaacagttgctggacagtttgaggatgcagatgttgatcactgaagatgatttatgctgctgtgggattctgctcataactaggaaaggactaaagaacttggtgcctcttctactgtggagtgggtgttgatgaaagtctttttccttctccaaaatttacctgaaccagttctttttttgagacagactatatactgagacaaaaagttgtcaccagcagaagaaactatgacctttattaacaaaggtgaattaacttaaccaagagggtatttgtagtttatcatctacccaaaacttttgtgtataggtatcctctgagtaggcctatagttcctgctttcactatatgcatcttctgtaacctggcaggcctatgtggtgagaatgcgcaggtgcttgaagacataggtagactggatgggaaggaaggaggctgaatctaagatatatcctttagagcctaaggattcccttaccccttagaaagaaagacaaagagatctcagagaaatcctggccactgcttgttcttcacagggattagggtctttttactaatttgggatccaggttaattcatttaggcatctttagagagcctcttggaaatatcctagccacatgaaataccactaatatggatgcttctgattagcttttactctttcaccatgtttcaccagtctgttttgttataacctcttaggttatagcctttaatttctaacctcttaggtcagtttccataacaaatgaaattgggatgaagtcctcacagtacttcaatgatacttgttttgtctttgtaatagtttaacaaataaatctaggttttctat

SEQ ID NO: 11972 - DNA, 1993 bp, Canis familiaris
ccgggagacctgaacatggcctccatgaatttcagcccccccgagtaccccgactatggcactgccaccctggaccccaacatatttgtggatgagtctctcaacacccccaagctgtcggtcccggatatgatcgccctggtaatcttcgtgatggtctttctggtgggggtgccaggcaacttcctggtggtctgggtgacgggtttcgaggtccggcgaaccatcaatgccatctggtttctcaacctggcggtggccgatctcctgtcctgcctggcgctgcccatcctgttttcgtccatcgtccagcagggctactggccctttggcaacgctgcctgccgcatcctgccctcgctcatcctgctcaacatgtacgccagcatcttgctcctgaccaccatcagcgccgaccgctttgtcttggtgtttaatcccatctggtgccagaactaccgagggccccagctggcctgggcggcctgcagcgtggcctgggccgtggccctgctgctgaccgtaccctcgttcatcttccgcggggtgcacacggagtactttccgttctggatgacgtgcggcgtggactacagcggggtcggggtcctggtggagaggggcgtggccatcctccggctgctcatgggcttcctggggccgctggtgatactgagcatctgctacaccttcctcctgattcggacctggagccggaaggccacccgctccaccaagacgctcaaggtggtggtggccgtggtggtcagcttctttgtcctctggctgccctaccaggtgacggggatgatgatggctttgttctacaagcactcggaaagcttcagacgcgtgtcccgcctggactcgctgtgcgtggccgtggcttacatcaactgctgcataaaccccatcatctacgtgctggccgcccaggggttccacagccgcttcctcaagtcgctgcccgccaggctccggcaggtgctggccgaggagtccgtgggccgggacagcaagtctatcacgctctccacggtggacaccccagcgcagaagagccagggggtgtgaggggggcctcccggcttcctcctcccacctgtcccttccccctctgctgattttaacccagcccctggtggggagctggcctgcgagcgaactcccctccattccttccttcttccccgcacccgtcctccctcacttccaggatgaacgcgtccctctgggaccctcaactttccttttccatctgaggactttgggaaaaaagcagaaaccaggattactcggagcacctccgaatagggcttatgtctgctgcaggtggagattgtgcatgggacacagtcgatacatagaaaagagacaaataggaacattctaaccttggggtgcctgggtggctcggttaagcatctgccttaggctcaggtcatgatcccagggtcctgggttcgagtcctgcgtcgggctccccgcagagcctgcttctctgtctgcctgtgtctctgcatctctctctgtgtctctcatgaataaataaatagaaatatttaaaaaaatgaatgaatacaatcttaaagaaaaagaaagaaacagtctaacctttaaaaaaatggtgatgtgtttattttacagagacctgggggaaaaaaaacctaaggagcatctcaaaaagtattcttgtgacagacaaagcaaaattcactggctaagcttttcttttctttttcttttttcttttttttttttttggctaagcttttctgagttgattaaaaaaaaaaaaaacagtaagtgaaggtcttactaatcgggttttgagaaaacatattcagtaaaaagatgttcaatggatttggcgaaaagcaagtgtgaggacggagtgccgaagggagaggctgggaaacattggttaggcacctcgggggaaggcgctcatggggaaatttgacttttgactttgtaaactgctgttttgtgg

SEQ ID NO: 11973 - DNA, 660 bp, Canis familiaris
cggcaactctttggaggtttctccatgttgctgtggattggagccgttctttgcttcttggcgtacggtatcctagctgccaccgaagacgaacctcagaatgataacctctatctcggtgtggtgctgtctgctgttgtcatcatcactggctgcttctcctactaccaagaagcaaagagttcaaagatcatggagtctttcaaaaacatggttccacagcaagcccttgtgattcgaaatggtgaaaagatgagcataaatgctgaagaagttgtagttggagatctagtagaagtaaaaggaggtgaccgaatcccggctgatctccgaatcatttctgcaaatggttgtaaagtagacaattcttctctcactggtgaatctgaacctcaaaccaggtctcctgatttcactaatgaaaacccactggaaacaaggaacattgcctttttttctaccaactgtgttgaaggcactgcccgaggcatagttgtgtacactggggatcggactgtgatgggacggattgctacactcgcatctggactagaaggtggccagactccaattgcagcagaaattgagcatttcatccatcttatcactggtgtggccgtgttcctgggagttaccttctttatcctttctctgattctc

SEQ ID NO: 11974 - DNA, 3379 bp, Canis familiaris
tcccggcaggtgaaggaacagttgatcaagcacaatattggacagcgcattttcggacattatgtcttgggactgtctcaagggtctgtgagcgagattctggcccggcccaagccatggaataaactgaccgttcgcggcaaggagccctttcacaagatgaagcagttcctctcggatgagcaaaacatcttggctcttcgcagcatccaaggcagacaaagagagaatccaggccagagcctgaacagactatttcaggaagtaccgaaacgaagaaatgggtccgaaggtaacatcacaacccggatccgagcctccgagaccggatccgacgaagcaatcaagtccatcctggaacaagccaaaagggagctgcaggtccagaaaactgcagagccggcccagccttcttccacgtccagcagcgggacgtcagacgacgccatccgctccatcctgcagcaggcccgccgcgagatggaggcccagcaggccgccctcgaccctgccttaaagcccgcaccgctgtcccaggctgacctcgccatcctgagccccaagttgataccttcctcacccatgtcgtctgtgtccagctaccctccactcgccctgtccctgaagaagccccccaccgcccctgacaccagcgcctccaccctgcccaaccccccagccctcaaaaaggagtcccaggatgcgcccgggctggacctcccgggagcggctgagtctgcacagggggtcctgcggcacgtgaagagcgagctgggccgcagcggtgtgtggaaggaccactggtggagcaccgtccagccagagaggaagagcgccgcaccccccgaggacgccaagtcagaagaagccggtggcaccaaggagaaagggggcggccaaggccacgggccgatcgcagccagctccagggaccctcatcatcgtcggagtactggaaggaatggcccagcgctgagtccgcgtactccccagagctctgagctgagcctgactggagccagccgcagcgagacaccccagaacagccccctgccctcctccccgattgtgcccatgtccaagcccgccaagccctcggtccctccactgaccccggagcagtatgagatctacatgtaccaggaggtggacaccattgagctcactcggcaggtgaaggagaagctggccaagaacggcatctgtcaaagaatcttcggggagaaggtactgggcctgtcccagggcagcgtcagcgacatgctgtcccggccaaagccttggagcaagctgacccagaaaggccgtgaacccttcatccggatgcagctctggctcaacggcgagctgggccagggtgtcctgcctgtccagggtcagcagcaagggccagttctccattctgtgacgtcactacaggaccccctgcagcagggctgtgtgagctcagaaagcactccaaagacctctgctagctgcagccctgcacctgaatcgccgatgagctctagtgaatccgtgaagagtttgactgaacttgtccagcagccctgtccccccattgaaacgagtaaggatggcaagccaccagagcccagcgacccgcccgcctcagactcccagcctgccaccccgctgcctctttctggacactcggccctcagcatccaagagctggtagccatgtctccagagctggacacctacggtataaccaagagagtcaaggaggtgctgacggacaacaatctcggtcagcgcttattcggggagaccattttaggcctcacccaaggctccgtctccgacctcctctcccgtccaaagccctggcacaagctcagtctgaagggacgggagccttttgtccggatgcagctatggctgaatgaccccaacaacgtggagaagctgatggacatgaaacgcatggagaagaaagcatacatgaagcggcggcacagctcggtcagtgacagccagccctgcgagcccccctccgtgggcatcgactacagccagggcgccagcccccagccccagcaccagctgaagaaaccccgagtggtgctggctcctgaagagaaagaagctctgaaacgagcttatcagcaaaagccatacccgtcaccaaaaaccatcgaagaactcgccacccagctcaacttgaaaaccagcaccgtcatcaactggttccacaattacaggtctcggatccgcagagaactgttcattgaggagattcaggccgggagccagggccaggccggggccaggcactccccgtcggcccgaagcagcggcgcggcccccagctcggagggcgacagctgcgacggcgtggaggccgccgagggcccgggcgccgcggacgccgaggagtcggcgcccgcggccgccgccaagtctcagggagggccagccgaggcggccgtggccccggaggagcgggaggaggcgccgaggccggcggagaagcgcagccgccgccctcggggccccggccccggccccggaagacgcggaggaggagggccggccccgggcgcccccgccgcccccgccgccgccgcccgagggcccagccgacggcccggggcccgtgccaaaccccgccgccgccgccgccgccgccgccgccacgcccgcgggggaggacgccgctacctcagccgccccgcccgcggagggccctgccgggcccgggacggcgcccacaggagttccgctttgccaagcaccagcgcgccggcggccgcccgcaggcccagctcgctgcagagcctcttcggcctcccggaggcggcgggcgccagggactctcgagacaaccccctgaggaagaagaaggccgcgaacttgaacagcataatccaccgcctggagaaggccgccagccgggaggagcccatcgaatgggagttctgagagggcgcccgccgcgccgggccgggccgggccgagccgcgccgcgccgcgccgggcgggccgagcgggctaagcgggccgagccgggccgagtctgccgagccctgccgagtctgaccgagccgagccgggccgaacctggccgagcgggccgggccgggcagaggggcgggcgcggactccgcggcctggaccgtgttgcgcacttaccgccctgcgggccacagggcaaaatcgcgataggccaaggtgcatatagaaaacaaaggagcattaagcccaatctatgtcgtgttttcaaggaagaaaacggaaatgtgtagtcgagcctttttgtaccctgaagtgttttttttattgccctaagtgatttccacaggttctggaataactcttacagctttgccttgcgccctcctctttcgtgtgggctttaaaaaaaaaaaaaaaa

SEQ ID NO: 11975 - DNA, 3773 bp, Canis familiaris
aaccccggaacgggtgcggggtgttcaagaatgtccattctcaagatccatgcccgtgaaatctttgattcccgtgggatacccactgttgaggtagacctctacaccaccaagggtctgttcagagctgctgttcccagcggtgcctcaactggaatttatgaagctctggaacttgtgacaatgacaaggacacctacagggaaggtgtctcaaaaagctgttgagacatcaataaaaacaattgcacccgcactgattagcaagaatgtcaatgtagtgggagcaaagacaagattgacaacaactgatgctgggacatggatggatcagagaacacgcgcgtcaggcactacaacgtaccctccgcaggccggaccccaaacgccgaccccactctccacacccgcatcatcatcaggaccacagcctaggttctacccttcctccgtgctttctgctgtgtccgaaacgacacctactaccactacgctgaggccctacccttcctctgtgcttatctgctgttccctgacgacaccatctacggcaccaggtgaggaggtgtacaacggcggaattcgatattcaagcttatcgataccgtcgtcagccccaccccagacggcagacgacccaccacagtgcctgaccccaacgccgaccccactctccacacccagcatcatcaggccacagcctgaggccctaacccttcctctgtgcttatctgctgtgtccgaaacgacaccgacacccatctccaccaccactacggtgaccccaaccccaacacccaccggcacacagaccccaaccacgacacccatcaccaccaccacggtgaccccaaccccgacaccaaccggcacacagaccccaaccacggtactcatcaccaccaccactacgatgccaaccccaacacccaccagccaaaagctgcgtggatcagacacccccgttctggttatagcactagtgaccccaaccccaacacccaccggcacacagaccccaaccacgacacccatcaccaccaccaccacggtgaccccaacccccacacccaccggcacacagaccccaaccacgatacgcatcaccaccaccactacgatgaccccaaccccaactaccaccagcacaaaggtactcgtgacaccatacaccactactacgggggtgacccccaccacccaccggcacacgagacaccaaaccacgactacccataccacctacaccacggtgaccgccatcgccacaccaaccggcacaagaccaaccacgtacctacacaccaccactacggtgacccaaaccacccaccggcaaaccacaagaccccaaccaacgacaccatcaccaaccaccaccacggtggacccaacccagcacccatctccaccaccactaggtgaccccaaccccaacacccaccgcgacacagaccccaaccacgacaccaccaccaccaccacggtgaccccaaccccgacacccacccggacaagaccccaaccacggtactataccaccaccactacgatgaccccaaccccgacaccacccaccccgcacacagaccaccaccacgacccactaccaccaccaccaccacaagtacgccaccaccgcactccccgccactgtcatgaactcacctctggatctcctctaacgcactatccaaacacgcccacgactaatctcctcgagaaaaaccggagtgaacttattaacacaccgacacataccatgatcatctcatccgcagccatggccacacctccttcactggtgcatagtaggtgtcgttcaggacacagcagtaaagcacagaggaagtcgagggcctcaggctgtggtctgatgatgctgggggtggagagtggggtcggcgttgggtcaacgcacgctggtggtgctctggtgcgtagtaggtgtcgtttcacccgacacagcagagcagaggaagggctagggcctgaggctgtggtctcgatgatgctgggtgtggagagtggggtgggcgttggggtcaggcactgtggtggtcgtctgcacagtgctgggggtggggctgaagatgacccgggtcgtgtaccgcgagtgggggctctcacggattccacacaacatacgagccggaaggccataaagtgtaaagctggggtgcctaatgaggagctaactacatatattgcgtgcgcttccgcccttcagtcggaaacctgtgcagctgatatgatcgccaccgctacaattcacacaacaaccagccgaagcataaggaagcctaaaactataagtgagctaactacatatgcgtgcgcctccactgccgcttcagtcggaactgtcgtgcagctcgatatgatcgcaacgggtgggctgagagaccgcggtcagatggctggagcaatgcctgcaggtgactctagaggatccccgggtaccgagctcgaatttcgtcccaatggactacaggccccaaccccgacacccatctccaccaccactacggtgaccccaaccccaacacccaccggcacacagaccccaaccacgacaccatcaccaccaccaccaggtgacccaacgaaaggaaagactgtatataaaatcataggttctctgagaactacctttaacctcccggcttggttgggttatataactatatgtaaatgcctgatgcaatccaatcgcaagacaaagacggcggaaacgataaatgtgaaaacgctggggtcgctaatgatggacgtaactccaattaattcgtgtcgcgtcactccgccgtttccatcggggaaaccttgtgccgactcgcgattaatgaacccgaccgcggagacgggttcggtgattggcgcagggtgttcttgctgtgtcctaacgacacctactacgcacagggtgattaggtgtactacagcgccaaccccgacacccatctccaccaccactacggtgaccccaacccaacacccaccggcacacagacccaccacgtcacccatcaccaccaccaccacggtgacccaacccgacaccacgcacacagacccaaccacgtacataccaaccaccaggtgtcggattgagaagccagtggaaagatcctccaggtgtgggaagaccatgggatgtggacctactctactgtctgccggggtgggaggggtggggtgccgtgggtgctgtgctctctccgggtgtgtgtcagaggtggcgggtcgtggtactggtcagaatcaaactggtccctgcccgatcattgaggctctagccaagtacaaccagctgctgagattgaagagacttggcagcaaggcgccctttgctggaagaaacttcaggaacccccgtatcaactaaactgcgtggatcagacacccccgttctggttatagcactagtcacctacttagatcacaattactgtattagaaaagatgaggcagctgaaggaaaagaccagttgcaggtcctctccctcctagatgactccttcacctagtgtttccaccagctctgatctgttacttgtacgatctgcttttgacaatccagtgaggttttgtgttaaacatgctccggaacgtgaccgttgacactgggcattaagcaatcccttctctgcctgtctggtctttgatgtttggagctgtttgacttgcaggacagctaatgaggtacctacaaacagatagtactgtttttacatgtgataaataaaaagcatcaaacaacccaaaaaaaaa

SEQ ID NO: 11976 - DNA, 125 bp, Canis familiaris
ccgtcgcgctccgtccggacaagtggaaccccggaagaacgcgggacaggcaacagtttgatccttgggccaaagcgtatcaggagttactctgatagacagttaataacttgatcttagctaat

SEQ ID NO: 11977 - DNA, 1164 bp, Canis familiaris
tgtgtcatccataatgatttctctggggctcatcttgttctcgagtgttctctgccatgttgctactgcaggacggacttgtcccaaaccagatgatataccatttgccacagttgttccattaaaaacattctatgacccaggggagcagatagcgtacacctgccagcctggctatgtgttccgaggtctgacgagacggttcacctgccctctgacaggagtttggcccacgaacaccgtgaggtgtatacccagagtatgtccttttgctggaatcttagaaaatggagctgtacgctatacaacttttgaatatcccaacacgatcagttttgcttgtaacactgggttttatctaaatggaagtagctctgctaaatgcaccgaggaaggaaaatggagtgttgaccttcctgtctgtactcgtgtaacctgccctcccccatccgtacctaagtttgcaacacttagtgtttttaagccattggctacaaacaactccctctatggaaacaaggctgtctttgaatgtttgccacactatgctatgtttggaaatgatacaattacctgcacagcacatggaaattggactacattaccagaatgcagagaagtaaaatgcccattcccatcaagaccagacaatgggtttgtgaactatcctgcaaaacaaatcctttattacaaggataaagccatgtatggttgccatgatacgtataccttggatggcccagaagtagtggaatgtaacaaatttggaaactggtctgcacagccaagttgtaaagcatcttgtaaattatctgttaaaaaagctactgtgctataccaaggagagagagtaaagcttcaagaaaaatttaaggatggaatgctgcatggtcaaaaagtttctttctactgcaagaataaggaaaagaagtgtagctacacagaagatgctgagtgcatagatggcaccattgaaatccccaaatgcttcaaggaacacagctctctggctttctggaaaaccgatgcatcagatgtaaagccatgctaaactggttttcagattcagaattaaaggccatactggaatcggtgtctgtccaaggaacataaagaaaggtggaaaaataaagtgactgaaaacttaaaaaaaaaaaaaaaaaa

SEQ ID NO: 11978 - DNA, 2659 bp, Canis familiaris
gaattcggaacttcggcggcggcgaccctaatggctgcgcgcgggccgcggtgaggcgcgggcagagagcgacgggcgcggggccgcggagcagcgagggcgagcgagtgcgcgcgcggccggaccccggccaggcccggcccgacccgccgagcccgcgatgcgccccggggccgccccccggcgcagtgacgccgcggcccgcgagaccccggccggccccgcgcgatcccgccgcccgcccaggccgcgatggcggggaaggcggccgccccgggcaccgcggtgctgctggtcacggccaacgtgggctcgctgttcgacgacccagaaaacctacagaagaactggcttcgggagttctatcaggtcgtgcacacacacaagcctcacttcatggccctgcactgccaggagttcggagggaagaactacgaggcctccatgtcacacgtggacaagtttgtcaaagagctgctgtccagtgacgcgatgaaggagtacaacagggcccgcgtctacctggacgagaacttcaaatcccaggagcacttcacagcgctaggaagcttttattttcttcacgaatccttaaaaaacatctaccagtttgactttaaagccaagaagtataaaaaagtcaccggcaaggagatctactcggacacgctggagagcacgcccatgctggagaaggagaagttcccgcaggactacttccccgagtgcaaatggtcgagaaaaggcttcgtccggacaagatggtgcgtggcggactgtgcctttgacttggtcaacatccatctttttcacgatgcttccaatttggttgcttgggagacgagcccttcggtgtattcgggcatccgacacaaggccctgggctacgtgctggacagaatcatcgaccagcgattcgagaaagtgtcctactttgtgtttggcgatttcaacttccggctggactccaagtccgtggtggagactctctgcacaaaggccacgatgcagacggtccgcgccgccgacaccaatgaagtcgtgaagctgatatttcgcgagtcggacaatgaccggaaggtcatgcttcagctggagaagaaactcttccactacttcaaccaggaggttttccgtgacaacaacggcactgcgctcttagaatttgacaaagagctgtctgtttttaaggacaggctgtatgagctggacatctcgtttcctcccagctacccgtacagcgaggactccggccagggcaggcagtacatgaacacccggtgccccgcgtggtgtgaccgcgtcctcatgtccccgtccgccagggagctgatcctgaagtcggagagcgaggagaaggttgtcacctacgaccacatcgggcctaacgtctgcatgggagaccacaagcccgtgttcctggcgttccgcatcgcgcccggggcaggtaaacctcacgcccatgtgcacaagtgttgtgtcgtgcagtgacgtgtgggaagcgatggcagcgacaccagagggcccttcgcgagacctccctgtagcgcgaggagcaggtgacgtcccgtccattgagatacgtcctcctacagctgcatcgacaacccgcccgagcgccacccgctagacggccggccccacacttcgcttcagcctccggacgttccggaaaagcctcacatacctcactgtcttgtctgttcgtgtgacattaagtagaaatattgggtttttgtaataagtcaccgtcctgttgccaaaactctatagacaggagagggagtctgtacctgagacttcagagtttcaatttttaatgattgtcagcgtgggaagagcttctccggcgtggaagccccccgaggccacgtcccctctgccagctggaggtgcgcccgggcgaggcggtgggcggtgtggccgctggaggagagccggggcccgtctccgcctccggggcttgccctgccgtgttatttactcccctgccgtgttacatggtttttgaatcacactgcagctgcttttccatttttatatatataaatatatataaatatatactttttaaaaataatttataaatcttaccaaaacttatgctaaatatactttccaggatgaatgcttgagagggtcctgtccgcaggtagagacggagtctagcagttgaggcacgtgaacctgtccgaccgcgcgccccagcggggccgtccgggggacgctgaccacaggacatctagacttgcagattcttactcctatgcctttttttctgtgtaatattaagaactgaatgtgaagtttgtagctagctagctcgggtgtaccttttaagaattttgtaaaccgtttcgtctgtcttttgttactgttctatggtgccaagtactctacataaacaataatatcatgggagaaacaaaactagcctagtccgcttcagatagaacctgcttctaacatgggctgtacataaccctattacgacgagcaaaactgtaagtttcccgggctgcgcaggcagccagcctagtagtagcctcgccgcgacgtctcccctagcacgaaggacagcattaaaaggtcattgcagagcctgtggatgaaacacaacgtatgttttattgatctgcttcagaacactacagaattc

SEQ ID NO: 11979 - DNA, 832 bp, Canis familiaris
caccatgtggttcctggttctgtgccttgccctgtccctggcggggactggtgccgcaccccctgttcagtcccggatcataggcggctgggattgtacgaagaattctcaaccgtggcaggcagctctgtaccattacagcaagttccagtgtgggggtgtcctggtgcacccagagtgggtcgtcaccgctgcccactgcataaacgacaattaccagctctggctgggtcgctacaacctgttcgagcatgaagacacggcccagtttgtccaggtcagagagagcttccctcaccctgaatttaacctgagtctcctgaagaaccatacccgcctcccagaagaggactacagccatgacatcatgctgctgcgcctcgcagagcccgctcagattacggatgctgtgagggtcctggacctgcccacccaggaaccccaagtggggagcacctgctatgcctctggctggggcagcatcgaacccgataagttcatatacccagatgatctccagtgtgtggacctcgaactcctgtccaatgatatatgtgccaatgcccactcccagaaggttacagagttcatgctgtgtgctggacacctggagggcggcaaggatacctgtgtgggtgactcagggggcccactgatctgcgatggtgtgcttcaaggaattacatcctggggccacgtcccatgtggcagtcccaatatgcctgcggtctacaccaaagtgatttcacacctggagtggatcaaggagaccatgacagccaacccctgatcaaccatctgtacctacccccagtaaaatcaaatacgcatc

SEQ ID NO: 11980 - DNA, 1514 bp, Canis familiaris
  misc_feature (41)..(42): n comprises a, c, g, or t, or includes no nucleotide
  misc_feature (663)..(670): n comprises a, c, g, or t, or includes no nucleotide
  misc_feature (818)..(818): n comprises a, c, g, or t, or includes no nucleotide
  misc_feature (832)..(833): n comprises a, c, g, or t, or includes no nucleotide
  misc_feature (840)..(840): n comprises a, c, g, or t, or includes no nucleotide
  misc_feature (858)..(858): n comprises a, c, g, or t, or includes no nucleotide
  misc_feature (861)..(863): n comprises a, c, g, or t, or includes no nucleotide
  misc_feature (902)..(902): n comprises a, c, g, or t, or includes no nucleotide
  misc_feature (947)..(947): n comprises a, c, g, or t, or includes no nucleotide
  misc_feature (983)..(983): n comprises a, c, g, or t, or includes no nucleotide
  misc_feature (1390)..(1390): n comprises a, c, g, or t, or includes no nucleotide
ggatccagctggagttacagcacagcgctgcttcccttgtnncggcagacagccagccccccaccgcggcgtcggcctcccttcccgctgccctgtcctgctgcctggcactcaccgccggggcagcggagtcagagctcggcagccttcccacagccacgtgtcaccacaacagttttgctgatttttgcaccagtgcgttcgccgatgaagctggggcagagaggagaggtggaggagaggtggaggagaggtggaggaggggtggaggaggggtggaggagaggtggaggagaggtggaggagagctggaggagaggtggaggagaggtggaggagagctggaggagaggtggaggagaggtggaggagagctggaggagaggtggaggagaggtggaggaggggtggaggagaggtggaggagaggtggaggagaggtggaggaggggtggaggagagctggaggagagctggaggagaggtggaggagagctggaggagagctggaggaggggtggaggagagctggaggaggggtggaggagagctggaggagaggtggaggaggggtggaggagaggtggaggaggggtggaggaggggtggaggagaggtggaggagaggtggaggagagctggaggagaggtggaggagaggtnnnnnnnntggaggaggggtggaggagaggtggaggaggggtggaggagaggtggaggagaggtggaggaggggtggaggaggggtggaggagaggtggaggaagggtggaggaggggtggaggagaggtggaggagaggtggaggagaggttggncttccagttgcccnnccttccnggccaagggaaccaaggnacnnnttaccgggccccgaattagagggaaaagtcgtcgttggncccgatgactatccctgcttaaacaacacgggtccagcagtcgancgacgctcccgactctcaggagcaacgttcagaganatcagggcccttcagacaggggctccctaggcgagggcctgcccagagcacgcaaggccacgaccaagtttccaggagttccattcagagctcagaagaggcgctacgcgtgcactaggtacatccctttgattgcagcagctgaagaaagtgtttagagaaaaactgtttaaaggtgattgaccctcggcaggaacagctgcgtgaagagctgaggcattgagggccggttcctggtcgtcttaacaaagcaaatgactcccaactgtttctctttgctcttgagtttccagacaggacggccgctcctcagtagtggtttctctcttaagtccacaccaaacgttaagtcactaaagaattgccctctaagaatggtgtgcacggagcagggggacgtgaggatntcttcgggaagctgaggaggggctcgtctaggacgctgcagcgaatccaccggtacaagtgatagtgataaatagatagggccataagattattggccattgatagacttcatgaataggatcc

SEQ ID NO: 11981 - DNA, 1116 bp, Canis familiaris
atgtcgatgagtccaaagcacacgactccgttctcagtgtctgacatcttgagtcccctggaggaaagctacaagaaagtgggcatggagggcggcggcctcggggctccgctggcggcgtacaggcagggccaggcggctccgccggccgcggccatgcagcagcacgccgtggggcaccacggcgccgtcaccgccgcctaccacatgacggcggcgggggtgccccagctctcgcactccgccgtggggggctactgcaacggcaacctgggcaacatgagcgagctgccgccctaccaggacaccatgcggaacagcgcctcgggccccggatggtacggcgccaacccagacccgcgcttccccgccatctcccgcttcatgggcccggcgagcggcatgaacatgagcggcatgggcggcctgggctcgctgggggacgtgagcaagaacatggccccgctgccaagcgcaccgcgccggaagcgccgggtgctcttctcccaggcgcaggtgtacgagctggagcgacgcttcaagcaacagaagtacctgtcggcgccggagcgggagcacctggccagcatgatccacctgacgcccacgcaggtcaaaatctggttccagaaccaccgctacaagatgaagcgccaagccaaggacaaggcggcgcagcagcaactgcagcaggacagcggcggcggcggcggcggcgggggcgccgggtgcccgcagcagcagcaggcgcagcagcagtcgccgcgccgcgtggccgtgccggtgctggtgaaagacggcaaaccctgccaggcgggcgcccccgcgccgggggccggcagccttcaaggccacgcgcagcagcaggcgcagcagcaggcgcaggctgcccaggcggccgccgcggctatctcggtgggcagcgggggccccggcctgggggcacacccgggccaccagccgggcagcgcgggccagtctccggacctggcgcaccacgccgccagccccgcggcgctccagggccaggtctccagcctgtcccacctgaactcctcgggctcggactatggcaccatgtcctgctccaccttgctatatggtcggacctggtga

SEQ ID NO: 11982 - DNA, 1677 bp, Canis familiaris
tggcctgtaggagaactgatctcctaatgaaatacagaacaactgtcttagaaaaacgaaaatgggcaatcgtcatgccaaagcgaaaagccatcatggttttgacgtggatcacgatgccaaaaagctgaacaaagcctgcaaaggaatgggaactgatgaagcagccatcattgagatcttatcaagcaggacttcagatgagaggcaacaaatcaagcagaagtacaaggcaacgtatggcaaggacctggaggaggtgttcaagagtgacctgagtgggaacttcgagaagacagccttggccctactggaccgccccagcgagtacgatgcccggcagctgcaaaaggccatgaaaggtctgggcacagatgaggcagtgctcattgagatcttgtgtacgagaaccaataaggagatcatggccattaaggaagcctaccaaaggttatttgacaggagccttgaatcagatgtcaaagctgatacaagtggaaacctaaaagcaattctggtgtccctgctacaggctaatcgtgatgaaggagatgacgtggacaaagatctagctggtcaggatgccaaagatctgtacgatgcaggggatggccgctggggcaccgatgagcttgccttcaatgaagtcctggccaagaggagccacaagcaattacgtgctacctttcaagcttaccaaattctcatcgataaagacatcgaggaggccattgaagcagaaacatcaggagacctgcagaaggcctacttaactctcgtgaggtgtgcccgggaccaggagggctatttcgccgaccgtctgtacaagtccatgaagggcacgggcaccgatgaggagacgctaattcacatcatcgtgaccagggccgaggtggaccttcaggggataaaagcaaagttccaagagaagtatcagaagtccctctcagacatggttcgctcagacacctctggggacttccagaaactgctggtggccctcttgcactgaaccaagccagcatggtggaagcacatggagaagccacctttgtcaagagtccatttcaacccagatttgcaaatgtgaccccagcacaaaaagtattgaagaatcctggcttcctttcttggcagcctgaatgctgtggccaggccaagctgtttagaagggcagcagcctcaaaacgcttgggcagatcaccctgaatgctggcttagcaggtccctgagcagcctctctgcttgcctctagcatggcaaactgaatgctttctgaacacaaatgagattagctgttgatgaaagaaactgcacttgtaataaaacattcagaagaataggtatcgcacagagtgggtagagactgaatggttaaggtacagggaagacaaaattaatcagttgatcaattttccttctgtgggggggtctgggtggctcagtcggttaagggtctgccttgagctcaagtcatgatcttggggtcctgggaccaagccccatgtcgggctccctgctcagcagggaatctgcttctctctccctctgccccttctctccactcgcactccacttgtgtgtgtgtgtgtgtgcgtgcacgcacatgctctctctctctctctccaaaataaataaataaataaaatcttcaataaatttaaaaaaaaaaaaaaa

SEQ ID NO: 11983 - DNA, 1751 bp, Canis familiaris
aactgtcttagaaaaacgaaaatgggcaatcgtcatagccagtcttactccctctcagaaggcagtcaacagttgcccaaaggggacatccaaccctcagcagccgtgcagcctctcagccacccatcagggagtggagagccagaggcccaacagcctgccaaagcgaaaagccatcatggttttgacgtggatcacgatgccaaaaagctgaacaaagcctgcaaaggaatgggaactgatgaagcagccatcattgagatcttatcaagcaggacttcagatgagaggcaacaaatcaagcagaagtacaaggcaacgtatggcaaggacctggaggaggtgttcaagagtgacctgagtgggaacttcgagaagacagccttggccctactggaccgccccagcgagtacgatgcccggcagctgcaaaaggccatgaaaggtctgggcacagatgaggcagtgctcattgagatcttgtgtacgagaaccaataaggagatcatggccattaaggaagcctaccaaaggttatttgacaggagccttgaatcagatgtcaaagctgatacaagtggaaacctaaaagcaattctggtgtccctgctacaggctaatcgtgatgaaggagatgacgtggacaaagatctagctggtcaggatgccaaagatctgtacgatgcaggggatggccgctggggcaccgatgagcttgccttcaatgaagtcctggccaagaggagccacaagcaattacgtgctacctttcaagcttaccaaattctcatcgataaagacatcgaggaggccattgaagcagaaacatcaggagacctgcagaaggcctacttaactctcgtgaggtgtgcccgggaccaggagggctatttcgccgaccgtctgtacaagtccatgaagggcacgggcaccgatgaggagacgctaattcacatcatcgtgaccagggccgaggtggaccttcaggggataaaagcaaagttccaagagaagtatcagaagtccctctcagacatggttcgctcagacacctctggggacttccagaaactgctggtggccctcttgcactgaaccaagccagcatggtggaagcacatggagaagccacctttgtcaagagtccatttcaacccagatttgcaaatgtgaccccagcacaaaaagtattgaagaatcctggcttcctttcttggcagcctgaatgctgtggccaggccaagctgtttagaagggcagcagcctcaaaacgcttgggcagatcaccctgaatgctggcttagcaggtccctgagcagcctctctgcttgcctctagcatggcaaactgaatgctttctgaacacaaatgagattagctgttgatgaaagaaactgcacttgtaataaaacattcagaagaataggtatcgcacagagtgggtagagactgaatggttaaggtacagggaagacaaaattaatcagttgatcaattttccttctgtgggggggtctgggtggctcagtcggttaagggtctgccttgagctcaagtcatgatcttggggtcctgggaccaagccccatgtcgggctccctgctcagcagggaatctgcttctctctccctctgccccttctctccactcgcactccacttgtgtgtgtgtgtgtgtgcgtgcacgcacatgctctctctctctctctccaaaataaataaataaataaaatcttcaaaaaaaaaaaaaaa

SEQ ID NO: 11984 - DNA, 1380 bp, Canis familiaris
atgccgcacaactccatcagatccggccatggagggctgaaccagctgggaggggcctttgtgaacggcagacctctgcctgaagtggtacgtcaacgcatcgtggacctggcccaccagggcgtgaggccctgtgacatctcccgccagctccgagtcagccatggctgtgtcagcaagatccttggcaggtactacgagactggaagcatccggcctggagtgatagggggctctaagcctaaggtggccacccccaaggtggtggagaagattggagactacaaacggcagaaccctaccatgtttgcctgggagatccgagaccggctcctggctgagggtgtctgtgacaacgacactgtgcccagtgtcagctctatcaacagaatcatccggaccaaagtgcagcaaccgttcaacctccccatggacagctgtgtggccaccaagtccctgagcccaggacacacgctgatccccagttcagctgtcacgcccccagagtcaccccagtcagactccctgggatccacctactccatcaacgggctcctggggattgctcagcccggcagcgacagcaagaggaagatggatgacagtgaccaggacagctgccggctgagcatcgactcccagagcagcagcagcgggccccgcaagcaccttcgcacggacgccttcagccaacaccaccttgagccactcgagtgcccattcgagcggcagcactacccggaggcctatgcctcccccagccacaccaaaggcgagcagggcctctacccgctgcccctgctcaacagcgccgccctggacgacggcaaggccaccctgaccccttccaatacacccctggggcgcaacctctcgactcaccagacctaccccgtggtggcagatcctcattcacccttcgccataaagcaggaaacccccgaggtgtccagttctagctccaccccttcctctttatctagctccgcctttttggatctgcagcaagtcggcggcgccggggtcccagccggtgcctcggtcccgcccttcaatgcctttccccatgctgcctccgtgtacgggcagttcacgggccaggccctcctctcagggagagagatggtgggacccacactgcccggatacccaccccacatccccaccagtggacagggcagctatgcctcttctgccatcgcaggcatggtggcaggaagcgaatactctggcaatgcctacggccacaccccctactcctcctacggcgaggcctggcgtttccccaactccagcttgctgagttccccatattattacagttccacatcaaggccaagtgcgccacccaccaccgccacggcctttgaccatctgtag

SEQ ID NO: 11985 - DNA, 1242 bp, Canis familiaris
atgccgcacaactccatcagatccggccatggagggctgaaccagctgggaggggcctttgtgaacggcagacctctgcctgaagtggtacgtcaacgcatcgtggacctggcccaccagggcgtgaggccctgtgacatctcccgccagctccgagtcagccatggctgtgtcagcaagatccttggcaggtactacgagactggaagcatccggcctggagtgatagggggctctaagcctaaggtggccacccccaaggtggtggagaagattggagactacaaacggcagaaccctaccatgtttgcctgggagatccgagaccggctcctggctgagggtgtctgtgacaacgacactgtgcccagtgtcagctctatcaacagaatcatccggaccaaagtgcagcaaccgttcaacctccccatggacagctgtgtggccaccaagtccctgagcccaggacacacgctgatccccagttcagctgtcacgcccccagagtcaccccagtcagactccctgggatccacctactccatcaacgggctcctggggattgctcagcccggcagcgacagcaagaggaagatggatgacagtgaccaggacagctgccggctgagcatcgactcccagagcagcagcagcgggccccgcaagcaccttcgcacggacgccttcagccaacaccaccttgagccactcgagtgcccattcgagcggcagcactacccggaggcctatgcctcccccagccacaccaaaggcgagcagggcctctacccgctgcccctgctcaacagcgccgccctggacgacggcaaggccaccctgaccccttccaatacacccctggggcgcaacctctcgactcaccagacctaccccgtggtggcagctccgcctttttggatctgcagcaagtcggcggcgccggggtcccagccggtgcctcggtcccgcccttcaatgcctttccccatgctgcctccgtgtacgggcagttcacgggccaggccctcctctcagggagagagatggtgggacccacactgcccggatacccaccccacatccccaccagtggacagggcagctatgcctcttctgccatcgcaggcatggtggcaggttccccatattattacagttccacatcaaggccaagtgcgccacccaccaccgccacggcctttgaccatctgtagttgctatggggacagtgggagcaactga

SEQ ID NO: 11986 - DNA, 270 bp, Canis familiaris
ctaattagccagaagttggaggcatttctttgttatgaaaaccaatggtcatgcaaatgcagtccttacccgtgtttaagtacaggatttgtttcttaagtcccttcgctgactccaaagccaggagtcaacaatgcctccagtgtaaggtttcatcttcctctgagaacatgcacacacacacacacacacacacacacacacacacacacatgcacaaggactcgcaggcacacaaacagcacataagcacgtgatctaaacagagca

SEQ ID NO: 11987 - DNA, 198 bp, Canis familiaris
cccaatacagcaagacctctccagattttttgcctcctgtctgctcaacacacacacacacacacacacacacacacacacacacacacacattttcatagtacatgagtttcctcctggcttcctttcttctctgtgcagagtaggtccattactttatctcttagtcagctctttcaacaaataaattacaaaagg

SEQ ID NO: 11988 - DNA, 150 bp, Canis familiaris
aggaaggcaattcaggtcttctgattctcagtttctgattctctccaacatcatgcatcaagcagagcatgtcctagtggattcttcacacacacactcacacacacacacacacacaacgttgttgtctgtctctgcttacatgattta

SEQ ID NO: 11989 - DNA, 315 bp, Canis familiaris
ctgaatctgcttctcctactccctctaccctacacacacacacacacacacacacacacacactccctctctcaaataaatagaatctttaaaaataaataaataaacaaacaaacaaataaataaatagaggcacgtgcaaagcattagaaaactacctgggaaagcataaacaaaatcagaagcaaagattagtattgctcttactgtttttattatattgtcatatgtcaggatgaccagataatacaatcagttaaagaagatgcttggaggaacttgtctcagaactatttgtagttgaattaccaaggg

SEQ ID NO: 11990 - DNA, 261 bp, Canis familiaris
gagccccatgttgagggtcgatattacttgaaaacaaaatcttacacacacacacacacacacacacacatccctgtattttccaaatgatctctaaaacaaaacaaagcaaaaatcgtagacaaaaacaaattacttactttttccataacttcctacaaaataaacttcagcattcttttctgtttttgtttttgctttattctgtttctttttagtattatctgaaaggcacaatctgaaggaaacatttacttattt

SEQ ID NO: 11991 - DNA, 213 bp, Canis familiaris
  misc_feature (47)..(47): n comprises a, c, g, or t, or includes no nucleotide
ccctgattagcatcctcaattccaccttccacctcaaactactttgncataggaggtgacattattcacaggttccagggacggatggctgaagaaaatgtgatataagtgtattcacacacacacacacacacacacacacactggaatatcattaagtcacaaaaggaagggaatcatgccatttattacaatatggatggattctgatgg

SEQ ID NO: 11992 - DNA, 210 bp, Canis familiaris
gcccaactattattttagcaccaacctacttctgtcatggacccaacactattcttgtggaatggtactaatttggaaaagtgtctatgtttatttttttaaagattttatttatttattcatgacacacacacacacacacacacagaggcagagacacaggcagggggagaagcagactccatgcaggagccgatgtggactcgacca

SEQ ID NO: 11993 - DNA, 316 bp, Canis familiaris
cttttgctttatgaattgcatgatcccttccaagtttaagtggctagagggcttccacagggaaagtgtggttttaatatgcacatttcttttctgcgtgtagtatttttagctttctctggtttctgtgcccttctgttccagtctgctttttcttccaaacattgttcaaagtttctggttctctagtttcacactttttccccagcaaggtgatagatgtattctttttctgtgtgtgtgtgtgtgtgtgtgtgtgtgtttgtgtgtcggatacacatatatatttccattttgatggaatgaataaggtagc

SEQ ID NO: 11994 - DNA, 259 bp, Canis familiaris
ctcaaagagaaatttggtagaagtagcataaactccatgttggacatgaggctgcaaatgcatcaaatatctaaagcaaaagaagacagacccctaatggggtcaatatcttgttccacgcacacagcatccatgtcagtgacagcctgggaaggaagcaggattcacaccaggatgttctgtgaatgtggagtctgagcatcaacacacacacacacacacacacacacacacacacaagagtatgaaaaggttttca

SEQ ID NO: 11995 - DNA, 372 bp, Canis familiaris
ccctacacaacacaggctcgctacttttctgacctcatctccagaccctcattgctgctattcctcaagtgcatcaggtatgctcccaccacaggggttttgcacgtgctatttcctctacctgatactaagtgtctgaatgtctgccttctacaaaggagaatacaaattccatcttgtggaggctatgagttatgagtcttttgtgaagagcctttatttcagacgtgtatgtcagcataaaatatgtaacttctttgtgttcatgaacacacacacacacacacacacacacactgtggcaggtgggacaagaccattctgcaggatcagactaacccagattcagttcaaagcccctgaacttatcag

SEQ ID NO: 11996 - DNA, 415 bp, Canis familiaris
  misc_feature (20)..(20): n comprises a, c, g, or t, or includes no nucleotide
cttggaagttgttctggggntgtaggttctctcaagtggttgaaagaggcacagtgaagatatgaagattttggttttgtgtgtgtgtgtgtgtagaggaaatagttaaactcttacttagcatctacagtaggacattgaactataaataatacagacaactttgaatctgctgttgtgcttgaatgtttttatggcagtgatatttggggcggaggaaaaagatcaacaactacccatctataatagagaaacgattttggtttggaaggaggaaacatttgctatttaattttcaaagagaatgcagtggaactcactccggcttccacaggagcatatgtctcacacacacacacacacacacacacacacacacacacgaacaataaacaactcttgcaatctaaccaag

SEQ ID NO: 11997 - DNA, 562 bp, Canis familiaris
  misc_feature (86)..(86): n comprises a, c, g, or t, or includes no nucleotide
  misc_feature (176)..(176): n comprises a, c, g, or t, or includes no nucleotide
  misc_feature (228)..(228): n comprises a, c, g, or t, or includes no nucleotide
  misc_feature (266)..(266): n comprises a, c, g, or t, or includes no nucleotide
  misc_feature (302)..(302): n comprises a, c, g, or t, or includes no nucleotide
  misc_feature (311)..(311): n comprises a, c, g, or t, or includes no nucleotide
  misc_feature (321)..(321): n comprises a, c, g, or t, or includes no nucleotide
  misc_feature (469)..(469): n comprises a, c, g, or t, or includes no nucleotide
cttaacaaagagattggggcacctggctggcgcagtcggtagagcacgagactcttgatcgtggttgtgagtttagcctcacactnagcgggggagattgtctacttgacttctctagtccttagtcaaatggaaatgttatggactggaggtttgtatctccattcccccgggtnaatgggaatggggggtgattaggtcttgaggtggagcctcctggtgggattngtgccccttatacaggcttcctctctctcctccaccantataaagatccctggaagagaccataaccatctgcnaaacccagnaaaggtgctncatcaggaaatcaagatccaatcagcattcttgatcttggactttctggctagccaggggttagagtgcttgactgtaactcccttctgagacaacaatgcactggctgtgcaccaaacctggtgtggggagggcaggtttccctttnagtcttggttatttcctgtggtcagatctgaaaacacacacacacacacacacacacacacacacacacacaccacaggtttttgcctgagag

SEQ ID NO: 11998 - DNA, 262 bp, Canis familiaris
  misc_feature (14)..(14): n comprises a, c, g, or t, or includes no nucleotide
  misc_feature (16)..(16): n comprises a, c, g, or t, or includes no nucleotide
ctgtgctgctgagngntaagaaagtaggtattctttgtaggaatctggaggaagcggcaaatgatatcagacaagcacatcagtgatgacagcattaggaagaattgaaggatgggtgcaggcagctgtgtgctgcttcactgcagaatagtgacaggatccaatttgccactcctcctccacacacacacacacacacacacacaaaatactcatactcacatttcatattgtctctttgagcattaaggcagacaaggag

SEQ ID NO: 11999 - DNA, 365 bp, Canis familiaris
  misc_feature (230)..(230): n comprises a, c, g, or t, or includes no nucleotide
  misc_feature (273)..(273): n comprises a, c, g, or t, or includes no nucleotide
  misc_feature (311)..(311): n comprises a, c, g, or t, or includes no nucleotide
ccaaatttagcaaatatgacttaatcaagtataactcaaatcatatgatcttttgggaaaaaaataaaaaacaaaaagcaaaaaccaaaaccttttgcagtctactcatttttttttaagagagagagtgagagagcaagcacaatttgggggtggagagaggcagagggaaagggagagagagaaactcaagcaggttccacactcagtgtggagctctgagcaaaaanttcgatctccaccatgataaacatggaacagcaaccacacgcncgtgcacacacacacacacacacacacacacgactagngacagaaaatgtccaggaagaaaaccaagagatcagaattattttaacatatgg

SEQ ID NO: 12000 - DNA, 343 bp, Canis familiaris
ctactccaagggatatggagataaggatgccaatgtaactgcatgtagtcgtggcatacactgagattacccttacaagttctccacacaaacatgatgggaatcggatggcttattagaaaaccttattaggtcacctgaaaaggtgaagatagcaagatttgagaggcctcctgacacccagactccacggtcctcgggtctcctgcgtggcggggagggagatctagacctcaagcagaggggggataacacacacacacacacacacacacacacacacacacacacacacacacacacactaccctccccttatgagcgcctacgatgcgctccccgg

SEQ ID NO: 12001 - DNA, 221 bp, Canis familiaris
  misc_feature (175)..(175): n comprises a, c, g, or t, or includes no nucleotide
  misc_feature (178)..(178): n comprises a, c, g, or t, or includes no nucleotide
acagagtttcctgtgctccatgatcccctcccaacacatgcacacacacacacacacacacacacacacaaccttcccatcatctagcatcacagtggtatatttgttataattaatgagccatcattggtgcatcattatcacttgtccatagttcacattaggtatgatactnttngttattgcacattggagtatgcattgttcactcttggtattgt

SEQ ID NO: 12002 - DNA, 176 bp, Canis familiaris
  misc_feature (4)..(4): n comprises a, c, g, or t, or includes no nucleotide
  misc_feature (20)..(20): n comprises a, c, g, or t, or includes no nucleotide
  misc_feature (24)..(24): n comprises a, c, g, or t, or includes no nucleotide
  misc_feature (26)..(26): n comprises a, c, g, or t, or includes no nucleotide
  misc_feature (140)..(140): n comprises a, c, g, or t, or includes no nucleotide
cttntaggaaagccgggagntggngngtcatagggctcccagcagcagacacacacacacacacatacacacacacacacacacacacacaccaaggtcacccctgccaaagagtggtgagaacaagagggaaggcagtnttgaagttttgggtggggagaagatccaggaatttc

SEQ ID NO: 12003 - DNA, 220 bp, Canis familiaris
  misc_feature (16)..(16): n comprises a, c, g, or t, or includes no nucleotide
  misc_feature (55)..(55): n comprises a, c, g, or t, or includes no nucleotide
ggccccgtgcccaacnacacacacaaacacacacacacacacacacacacacacngtgcacacgcacacgcacacacaggctgactgacctatacagaactgggctcttttctctatcaggggcgatatactcaatgcagagactcttcaaactgttcaaaattgcttcgaggttagccttgcaagcactaagttcagcaagtgaagtctactccttgag

SEQ ID NO: 12004 - DNA, 285 bp, Canis familiaris
  misc_feature (232)..(232): n comprises a, c, g, or t, or includes no nucleotide
  misc_feature (268)..(268): n comprises a, c, g, or t, or includes no nucleotide
ctttggcgggggggtggtcagataaaggggtgtgaccagtttccttcctctgaggaataataaccataacaacaggcacttactgaacacacacacacacacacacacacacacacactgagagccaggcacatgttaagcagtctacctggaaaatgaacatttttctcagccacccattgttcagatgaagctttgtgagtttgtgctaaatgaggctttcctccttccntctcctctgctttggggctcagcagagaaatcactnctgcccaaactccgtga

SEQ ID NO: 12005 - DNA, 335 bp, Canis familiaris
ccgcggcgacctctggaaggaaggtatcaggctcacggtttccgaggggctcgggtggctcccgagaagtggatctgagtgtctccaggctgtctgatcctatccgagtcttaggatgcgattccaggggccattgctgagagccagaatgagaccttttaattcaggaagacatttaaaaacagaccacagcataggaaaatcccagggtctgattactcaccctccgcccaacacacacacacagacacacacacacacacacacacacacacagatgggtataggaaagggatcatttgaatttcaggggacaaaattctcaaaaccaacag

SEQ ID NO: 12006 - DNA, 455 bp, Canis familiaris
ccaaaggcaggcgccaaaccgctgtgccacccagggatccctcaaaggaatctcttacctctgatactgtgttttttatttctagcattttcatttgactttttctatacttattacctttctgctcaaattgtctatctctttatgttgtccgccaataacatactgaacacagttattttcaaggacactcagttaagcatctgactcttggtttcagttcaggtcatgatctcaaggttgtaagatcaagcccttcattcagttccacactcagcacagagtctgcttgagattctccctccctttccttttgcccctctccctcatgcacacacacacacacacacactctctctctcctaaaataaataaatctttttttaaaaagactacaagttttttcaacacaaaccttgtaggtcagaaaggaatatcatgatatattcactgag

SEQ ID NO: 12007 - DNA, 141 bp, Canis familiaris
cctggacgggctcctctggcactagtgacccacagtcacaaaggggagaaaatgatgggaaaaagccacacacacacacacacacgcacgcacacgcacacagttctggacagacggactcaaaggattaggaaacaacag

SEQ ID NO: 12008 - DNA, 474 bp, Canis familiaris
ctcaaaaacaatactctgggagtgcatgggtggctcaaccagttgtctgactcttcatttaggctcaggtcatgatctcagggttgtaagatcgagccctaaatcgggctctgcactcagccagggaatctgcttgagattctctccctcccgctctgctcctcctcccaccatgctctctctctctctctctttcacacacacacacacacacaaataaataaagtcttaaaagacacacacacacacaacactctgcatgggcacagaaacacaaatgtagtctggaggaacaatattcatttgtttttaaccatgatacacgctgctctcagagcatctttcttttcttcagaggttaaaggaagcctcccctctgagattcagggggttgttaaactagaggcaatggaatgttagtagttgcaggtagaagggatctgacatcactgatttgttagtaatttcaatcgg

SEQ ID NO: 12009 - DNA, 116 bp, Canis familiaris
ctacacagcctcagacctgagtttctgttgatttgctacccctgcagcgtgttctttctctctctctctctctctctctcacacacacacacacacacacatcctgcataatagct

SEQ ID NO: 12010 - DNA, 185 bp, Canis familiaris
ctgtaagaaggagttgtcttccccccacctctgtcacacacacacacacacacacacacacacacacacacactccttttccaacacattattgccctttagaacttaaataccatgatttgtataaggaaagactgagaaaacaggaaacaaaagtggaagtcacaaaaaaataagaactgagg

SEQ ID NO: 12011 - DNA, 157 bp, Canis familiaris
ctgaggggaatcgcacctctttcaccctcattggtgtgtgtccgtttgcgtatgtgtaaaagggtgtgttagtgtgagattgtgtgtgtgtgtgtgtgtgtgtgtgtgtttagaggggacagaagagaggaacatgcccttcctgggcagaaatcag

SEQ ID NO: 12012 - DNA, 147 bp, Canis familiaris
ccacatgcttgggatttaatgctctatggttgctgtttttaagtgtgtgtgtgtgtgtgtgtgtgtgtgtgtgtgtgtgtgtgttttaagattttatttatttgagagagagagagagagagtgagcaagagagagcagagcacaag

SEQ ID NO: 12013 - DNA, 477 bp, Canis familiaris
  misc_feature (106)..(106): n comprises a, c, g, or t, or includes no nucleotide
  misc_feature (110)..(110): n comprises a, c, g, or t, or includes no nucleotide
  misc_feature (132)..(132): n comprises a, c, g, or t, or includes no nucleotide
  misc_feature (136)..(136): n comprises a, c, g, or t, or includes no nucleotide
ccagaaaggggagaaggggacccttctcaggagaaagtgtttggtgggggtttgagtgaatgtgtgtgtgtgtgtgtgtgtgtgtgtgtgtgtgtgtgtgtgtctnagangtgtataaagaggtggcgctangctngagcagatgactctgcccatggatggttggaggtgggtagggcaagaaggtaaggctatgctcaggtggataaaattgtatgagccctggtgggttggtgggggtgggggtgggggtgggctctgttgtctccagcacagtttttctacaagtgggatcctccccctgggaaccaccctgggggtagacctgccccagatcctgagggtcacagagggaccatgcagggacagaggatatgaatcattaaccccacacatcttccattttatagagaaactgaggcacggaggtatgggcatagcaagaaacatggtattatagcggggtggcaaaggggg

SEQ ID NO: 12014 - DNA, 246 bp, Canis familiaris
acccctaatgcagaggaagagacagtataatcacaacacgcagtgacagatgcaaaaataaaggaccagaggatagtgtgggaaactgcctggggacggtgtgtgtgtgtgtgtgtgtgtgtgtgtgtgtgtgtgtctgttggggaacagagtgggctctagaatatttatagaggaggggtttgggcatattgtcagaaagggcggcggtggtggtgaaggggctgtagaaaatttgctttgcag

SEQ ID NO: 12015 - DNA, 265 bp, Canis familiaris
  misc_feature (7)..(7): n comprises a, c, g, or t, or includes no nucleotide
  misc_feature (9)..(9): n comprises a, c, g, or t, or includes no nucleotide
cttgggncngtgatcccgtggtcctgggatcgagtcctgtattgggctttctgcatggagtctgcttctccttctgcctttgcctctgtgtgtgtgtgtgtgtgtgtgtgtgtgtgtgtgtgtgatgaataaataaagtatttttttaaaaaagagagataacatgaacttacttgactagtaaactcaggtggaataaaaattttatgttgaatcttgataacccaaaagacatacctgttttgaataaaccaacttaaactag

SEQ ID NO: 12016 - DNA, 412 bp, Canis familiaris
  misc_feature (32)..(32): n comprises a, c, g, or t, or includes no nucleotide
  misc_feature (54)..(54): n comprises a, c, g, or t, or includes no nucleotide
  misc_feature (94)..(94): n comprises a, c, g, or t, or includes no nucleotide
  misc_feature (112)..(112): n comprises a, c, g, or t, or includes no nucleotide
  misc_feature (118)..(118): n comprises a, c, g, or t, or includes no nucleotide
  misc_feature (181)..(181): n comprises a, c, g, or t, or includes no nucleotide
  misc_feature (294)..(294): n comprises a, c, g, or t, or includes no nucleotide
ctttgattatgtgatggagtgaaagatttctncagacaacatcaaaatattcanctttgaaagaagaatttttttgaggatagttttctacctnctgtttcttttgaaaatnattgcnctataggtttaaaaggtaacacaagtgactttttttttttttttaagtccaggatgggttttncagatattgtgtgtcgtgtgtatgtgtgtgtgtgtgtgtgtgttttacctccttcaactgtgactgcctgacagccgccattggctctggcgcccaccgagcgtttcgaggtncggtggggctccgaagggtgagaaggtcgctgagtgtcgcgactggggcaaggggcgagtgcgggggcggacagaagccgcgcgggcgtgggagggcgaccgtccgcccgccgaaggg

SEQ ID NO: 12017 - DNA, 552 bp, Canis familiaris
  misc_feature (3)..(3): n comprises a, c, g, or t, or includes no nucleotide
ctnccctgcaccccgcccgccccgcgcctccgagggcagcctcgtggggcacgcaacaaaggcagagcggaggggaccgcgtccagaagaacttgtttttttgttcccgttaagaaacctgcaggaaaatccacacccacgttgccggctttgaattggagagcggcgtgtgcgcgcgcgcgccttgtgtgcatgtgtgtgtgtgtgtgtgtgtgtgtgtgtctcaagcaagaagcggacgacttgcaaacaactgtgcggtgtctgttttgataaggaagacctttatgcttatgaggactgccctacacgagagtggtttttatgcagtaacccaacctccctaaaagatcccagtcgcgatggcacttgctatggtttcctcggctgtttatattgtttggttttgttctcatttgccaaacatttagtgagagccaggagaaaagaccctatttttgaaatgatggtttgaagagggagataaaggcaatgtcaggctgctggatggatgggggaggtcatgacctcccagggctctgtcctttctgg

SEQ ID NO: 12018 - DNA, 307 bp, Canis familiaris
accctaatgtttgtagcagcaatttccacaattgcccaaatatagaaagagcccagatgtccattgacagatgaatggataaagaagaagtggtatatatatagtataagaagtggtgtgtgtgtgtgtgtgtgtgtgtgtatatatattatggattattcttggacagagataaaaagaataaaatgtcaaggtgaacagagaagcatgatcttagcactctgttaattcaatcaagtgggacagactgatattaaacacaagtgtgattacaattatggaagtggaagtatggaacatttttgag

SEQ ID NO: 12019 - DNA, 424 bp, Canis familiaris
  misc_feature (25)..(25): n comprises a, c, g, or t, or includes no nucleotide
cccctggagcccactggggaagagngtgactttcctccgatcttgggaaggtggctgctgcatttcacacatgcattgtcatggaaactagagtgctgggcacatgtgagtgtgtgtgtgtgtgtgtgtgtgtgagagagagagagagagagagaaagagagagggaggggcttagggtctgtttattagtcacatatgctcatagcctggggaaaggaggacaccatataccaggcaggacccacaggggtttctcttgggagcagagtgaaccagcaggggctatgggaggcaggatttataacgatgagagggtgaggtgaccctttaaccctgttggaggatgtggtttgtttgaataataactcaggctggcaaagagatgaaaccaattaggttgaggaccatgtagggtgttgttag

SEQ ID NO: 12020 - DNA, 472 bp, Canis familiaris
catctgtcaccccctgcactacttgatcatcatgaacccccgcctctgtggcttgttggttttggcgtcatttttaatcagcctgttggtctcccagatgcacaattcaattgtgttacaacttacttacttcaaggatgtggaaatttctcatttcttctgtgatccttctcaactcctcaaccttgcctgttctgacacttttatcaataacatagtcatgtattttgttggtgccatctctggctttcttcctatttcagggatctttttctcttactataaaattgtttcctccattctgagagtcccatccacaggggggagatacaaagccttctccacctgtggctcccacctgtcagttgtttgcttattttatggaacaggccttggggcgtaccttagttcagctgtctcactttctcccaggaaggatgcagtggcctcagtggtgtatactgtggtcacc

SEQ ID NO: 12021 - DNA, 472 bp, Canis familiaris
tatttgcaaccccctgctctacatggtggtggtatctccgctgatctgccttctgctggtgtccctcatatacctctacagtctgaccacagcactgaccgtttcctcctgtgtgttctctgtgtcatactgctcttccaacataatcgaccatttttactgtgataatgtccctttgttggcattgtcctgttctgatacctacattccagaaacagtagtgtttacctctgccgggaccaatttgtttttctccatgattattgttctaacctcctacttccacattgtccttgccattttgaggatacgttcctcagagggccgaagaaaagccttttccacctgtgcctcccacatgatggctgtcactgtgttctatgggacccttctcttcatgtatttgcaaccagggaccaaccactcattagatactgataaaatggcctctgtcttctataccctggtgata

SEQ ID NO: 12022 - DNA, 472 bp, Canis familiaris
tatctgtagccccttgcgttaccccaccaccatgtgccagtctgcctgcactcgcctggtgctgggcgcctactgtggaggctgcttcaactctgttgtgcaaaccagcttcacattccacctcccattctgcagctccaaccgcatcaaccacttcttctgtgatgtgccccctctgctccagatcgcctgtggcaacacggccatcaatgaacttctcttgtttggcatctgtgggctcatcatagtggctgtgacgattgtgatcctcatctcctatggctacatcacagtgaccatcctgaggatgggatcaggagctgggagacgcaagatcttctccacctgtggctcccacatgactgcagtgactctcttttttgggaccctctttgtcatgtatgcccagccaggagcaattgagtctatggagcagggcaaggtggtctctgtcttctacacgctggtcatc

SEQ ID NO: 12023 - DNA, 472 bp, Canis familiaris
aatctgccatcccctacattactctgtcatcatgagctggagagtgtgcactgttcaggctgtcacttcctgggcatgtggctccctgctggccttggtccatgtgattctcatcctgaggctgcccttctgtgggcctcatgaaatcaaccacttcttctgtgaaatcctgtctgtcctcaagctggcctgtgctgacactaggctcaaccaagtggtcatttttgctgcttctgtgtctatcttagtggggcccctctgcttggtgctggtgtcctactcgcgcatcctgtttgccatcctgaggatccagtctggggaaggccgcagaaaggccttctccacctgctcctcccacctctgtgtggtggggctcttctttggcagcgccattgtcatgtacatggcccccaaatccaaccaccctgaggagcagcagaagatcctttctctgttttatagccttttcaac

SEQ ID NO: 12024 - DNA, 472 bp, Canis familiaris
catttgtaaccccttgcgttaccccatcaccatgtgccagtctgcctgcactcgcctggtgctgggcgcctactgtggaggctgcttcaactctgttgtgcagaccagcttcacattccacctcccattctgcagctccaaccacatcaaccacttcttctgtgatgtgccgcccttgctcaaactctcctgtggcgacacggccatcaatgaactattcttgtttggcatctgtgggctcatcattgtgggtgtaacaattgtgatcctcatctcctatggctacatcacagtgaccatcctgaggatgcgctcaggagctgggagacgcaagatcttctccacctgtggctcccacatgactgcagtgactctcttttttgggactctctttgtcatgtatgcccagccaggagcaattgagtccatggagcagggcaaggtggtctctgtcttctacacgctggtcatc

SEQ ID NO: 12025 - DNA, 472 bp, Canis familiaris
catctgtagccccttgctttacaatgtcatcatggcccatcaggcttgtttctccctgatttcaggagtgtatattatagccctggtttgtgcatttgttcatacaggttgcatgtttagggttcatttctgcaaatttgatgtgatcaatcattatttctgtgatcttctttccttgttaaaactctcctgttctaatacccatgtcaatgagttagtgattctaatctttagtacagttaatatccttgcccccagcctgacgatccttgcctcctatgtcttcatcctctccagcatcctccacatccgctccactgagggcaggtccaaagccttcagcacctgcagttctcacatctcagctgttgctgtcttctttggatctgctgcattcatgtacctgcagccgtcatctgtgagctccatggaccaagggaaagtatcctctgtgttttataccatcattgtg

SEQ ID NO: 12026 - DNA, 192 bp, Canis familiaris
atattctatactcagggtgttgatgtcttctccattcccttttgctatctgcagataacgatgctggggatccagaaagatctgaagtggtccacggaaccagaaggtctcctcatttatctgccccagttatcactctttactctgccagttgagtttggttggactataaagctgacaggagtggaatga

SEQ ID NO: 12027 - DNA, 360 bp, Canis familiaris
ctagcattgagggaagccagcgccctgcccccagctgcgcccacccagggctgctccccagcacccccttccaggggtctgatcgccccagggccctgagtgcaccgtcctagaccggggccaaggggggcaggctgggcgagtcagctggtgtccgcccaggcctcgtaatcgtcgctaagaaaggctttgctgatgacagtgtttgccgggagtgtgcgagtgcctggggccggccgtgcctccagacagacagccggacaccatgagcctcagtgaggagcaggtgcagcacttcctggaccagaaccccgacttcacggaccagtacttcgggaagacgctgagccccgagcatgt

SEQ ID NO: 12028 - DNA, 217 bp, Canis familiaris
  misc_feature (29)..(29): n comprises a, c, g, or t, or includes no nucleotide
gatcttacttgatgtcgtgtccccaaagncccagcacactgctggctcccagtggtgctcaatcaatgttcactggatggatggatggatggatggataatggataaatggatggagacagagaaaaagagaaggatggatggacaggtaggaagaaagcggctgagtcactcacagatgagcatgtgctcctcgccgactataaggtgctgggact

SEQ ID NO: 12029 - DNA, 1872 bp, Canis familiaris
cccagctcaagccaggctgggctgactcagcatcccgtccccaccaaccctcgtccccgacaactctgcttccccttgggcagagatgggagatggcgccggtgttgcccttggtgctgcccctgcagccccgcatccgtctggcacaggggctctggctcctctcctggctgctggcgttggcgggtggcctcacccttctctgtagcgggcacctcctggttcagctgtggcacctcagcaccttcttggctccctcctgcccatttgccgccctgccccaggttgccctggcagccggcacggtggctctgggcacaggcctggtgggtgcaggagccagcagggccagtctggatgcagctcaataccctccgtggagaaaggtcctcggcccgctgctggtggccggcacagctgcaggcggaggtcttctggtcttcgccctggggctgaccctggctttacctgggagtctggacactgggctggaggagggcctggggactgccttggctcactataaagacacagaagtgcccggacactgtcatgccaaacggctgttggatgagctccagctgaggcaccactgctgtgggcggcacggatacaaggattggtttggggtccagtgggtcagcagccgttacttggatcccagtgaccaggacgtggttgagtgagtgttctgtctctcccctcccccggctcctcctggcctcctaaccctcctttcccttcttctcctccccccttgaaacccacctcacccccataggcaataaatagagcatagtgattgagagaattggttgcagatctgctgtttattaggtgcgtgacccacagcatgtgaccaaactgctccgggcccattttgtcgtctgtaggatggagataatcccgtgccctgcagcttctccgccggggtctctatttccagacatcctgacacccctgcccctctctttacagtcggatccagagcaacgtggaaggcctgtatctgatcgatggtgtccctttttcctgctgcaacccccactcgcccagaccttgcctgcaaagccggctctcagacccccacgcacaccctctctttgatcctcgtcagcccaacctaaacctctggacacaaggatgccacgcagcactgctggggcacctgcagagcttggcgagcacactgggcagcacgctgactgtcaccttcatgttgcaggtgagtcagcaacatgggggccccctccatctgggccccccctcattgcctctaccgctggctccagggacctactgaccctcactgacctcttgccccttgcctcccccacagattctggtgctcctgggcctgcggtacctccagacggcactggaggggcttggaggagtcatcgatggggagggagaggcccagggctatctctttcccagtgggctgaaagacatgctgaaaacagcatggctacaggcgggggttgctcacaggccagcacctgaggaggccccagcagaagaggcacctcctaaggagggtctacctgaggcctagtggcctgaagcttgggaagtgggggggggggggggggtctgagcaaaagggaaggggagggatggacaggaatgaaaacctcacaactctgtaccaaggctccagatgggggagtccctgcgattaggggggttaaggatagtcagggagctggactggtagcagcaagagaactaggtgtccggggcctagcccctgtggccagaaccaccggacaaccagaaagcacacggggtgatgggagagacaacgtggggagagctggagactgctcctggcacacagactcaataaagcttttggactgaaaccac

SEQ ID NO: 12030 - DNA, 530 bp, Canis familiaris
  misc_feature (18)..(18): n comprises a, c, g, or t, or includes no nucleotide
  misc_feature (54)..(54): n comprises a, c, g, or t, or includes no nucleotide
  misc_feature (336)..(336): n comprises a, c, g, or t, or includes no nucleotide
  misc_feature (389)..(389): n comprises a, c, g, or t, or includes no nucleotide
  misc_feature (407)..(407): n comprises a, c, g, or t, or includes no nucleotide
  misc_feature (438)..(439): n comprises a, c, g, or t, or includes no nucleotide
  misc_feature (472)..(472): n comprises a, c, g, or t, or includes no nucleotide
  misc_feature (483)..(483): n comprises a, c, g, or t, or includes no nucleotide
  misc_feature (491)..(491): n comprises a, c, g, or t, or includes no nucleotide
  misc_feature (501)..(501): n comprises a, c, g, or t, or includes no nucleotide
  misc_feature (515)..(516): n comprises a, c, g, or t, or includes no nucleotide
  misc_feature (522)..(522): n comprises a, c, g, or t, or includes no nucleotide
gatcatttacccaaaggntacagaaatagtgattcaaagaggtacatgcccccntggtgtttatagcagtattatcaacaatagccaattatggaaacaactcaagtgtccttcaatggatgagtgaacacacacacacacaaacacacaaacaatggactattattcagccataaaaaagaatgaaatcttgccacttgcaacaacatggatgaaactagagggtatcatgccaagtgaaataagtcagtcagaaaaagaccaataccatattatttcactcataagtggaatttaataaatgaaacaaatgaacaaatggtaaaaaagaaaagngagagagagagagagagaggcaaaccaagaaatagactctcaattatagagancacactgatggtcaccgntggggagggggatgggggttgggaaccagtnntggggatgaaggagcgctctttcatgatgagcnctgggtttgtntggcagtnttttggtttnggttcctaggtttnnttattntccatgag

SEQ ID NO: 12031 - DNA, 344 bp, Canis familiaris
  misc_feature (7)..(7): n comprises a, c, g, or t, or includes no nucleotide
  misc_feature (33)..(33): n comprises a, c, g, or t, or includes no nucleotide
  misc_feature (75)..(75): n comprises a, c, g, or t, or includes no nucleotide
  misc_feature (133)..(133): n comprises a, c, g, or t, or includes no nucleotide
  misc_feature (140)..(140): n comprises a, c, g, or t, or includes no nucleotide
  misc_feature (143)..(143): n comprises a, c, g, or t, or includes no nucleotide
  misc_feature (150)..(150): n comprises a, c, g, or t, or includes no nucleotide
  misc_feature (166)..(166): n comprises a, c, g, or t, or includes no nucleotide
  misc_feature (207)..(207): n comprises a, c, g, or t, or includes no nucleotide
  misc_feature (253)..(253): n comprises a, c, g, or t, or includes no nucleotide
  misc_feature (279)..(279): n comprises a, c, g, or t, or includes no nucleotide
  misc_feature (283)..(283): n comprises a, c, g, or t, or includes no nucleotide
  misc_feature (289)..(289): n comprises a, c, g, or t, or includes no nucleotide
  misc_feature (294)..(294): n comprises a, c, g, or t, or includes no nucleotide
  misc_feature (299)..(299): n comprises a, c, g, or t, or includes no nucleotide
  misc_feature (301)..(301): n comprises a, c, g, or t, or includes no nucleotide
  misc_feature (319)..(319): n comprises a, c, g, or t, or includes no nucleotide
  misc_feature (335)..(335): n comprises a, c, g, or t, or includes no nucleotide
gatcttncatttaaatttatacaaaagcctttnttttccaaatatattcatatccgcagcttctgaaggttaggncattgacagtgccaccattcaaagtattacagatggagatacatgacaggtttaaaanttacaantgnttcacanaaaaatagcatctctncctttaatctggacttctggttacttatgtagttgagattnctcctacggtattggccgtgtgtgtgtgtgtgtgtgtgtgtgtgtngtgtgttttccaccaaataaatcagncatnaactanttttnactantnttcgactaactttgactntgactatttggtcatncaggggttt

SEQ ID NO: 12032 - DNA, 235 bp, Canis familiaris
  misc_feature (69)..(70): n comprises a, c, g, or t, or includes no nucleotide
gatctgaccagtctggggtgtgtgtgtgtgtgtgtgtgtgtgtgtgtgtgtgtgtcaagtggaacattnnccttatttgcccctttaattgtgtctcatcagcaacatgagctgttgttgttcatcaccctcttcttattgtcattgtcattgcctagaagtagagcatccagctggcaatctcgaacacttgctgtttataaccaaatttattgctctttgaagaaagacaaaa

SEQ ID NO: 12033 - DNA, 300 bp, Canis familiaris
  misc_feature (82)..(82): n comprises a, c, g, or t, or includes no nucleotide
  misc_feature (207)..(207): n comprises a, c, g, or t, or includes no nucleotide
  misc_feature (225)..(225): n comprises a, c, g, or t, or includes no nucleotide
  misc_feature (232)..(232): n comprises a, c, g, or t, or includes no nucleotide
  misc_feature (257)..(258): n comprises a, c, g, or t, or includes no nucleotide
  misc_feature (271)..(271): n comprises a, c, g, or t, or includes no nucleotide
gatcagccactaagagctaacatttactatcgcttagtctgtgccatgccctgttttcttggcaacctgcaccccttaattngtttaacctttacaaacgcccggtgagaaagggactatcagtggcgccactgccaccaccatgattagcaccaccaccaccaccaccaccaccaccaccaccaccaccaccaccatcaccagcancttcctcggcaccatcancatcatnaccatgtctggttcacagatgaggnnactgaggtaaagngaggttaaatgacttgtcccgggtctccg

SEQ ID NO: 12034 - DNA, 495 bp, Canis familiaris
  misc_feature (79)..(79): n comprises a, c, g, or t, or includes no nucleotide
  misc_feature (175)..(175): n comprises a, c, g, or t, or includes no nucleotide
  misc_feature (281)..(281): n comprises a, c, g, or t, or includes no nucleotide
  misc_feature (292)..(292): n comprises a, c, g, or t, or includes no nucleotide
  misc_feature (296)..(296): n comprises a, c, g, or t, or includes no nucleotide
  misc_feature (303)..(303): n comprises a, c, g, or t, or includes no nucleotide
  misc_feature (307)..(307): n comprises a, c, g, or t, or includes no nucleotide
  misc_feature (309)..(309): n comprises a, c, g, or t, or includes no nucleotide
  misc_feature (355)..(355): n comprises a, c, g, or t, or includes no nucleotide
  misc_feature (376)..(376): n comprises a, c, g, or t, or includes no nucleotide
  misc_feature (386)..(386): n comprises a, c, g, or t, or includes no nucleotide
  misc_feature (397)..(397): n comprises a, c, g, or t, or includes no nucleotide
  misc_feature (446)..(446): n comprises a, c, g, or t, or includes no nucleotide
  misc_feature (449)..(449): n comprises a, c, g, or t, or includes no nucleotide
  misc_feature (476)..(477): n comprises a, c, g, or t, or includes no nucleotide
  misc_feature (479)..(479): n comprises a, c, g, or t, or includes no nucleotide
  misc_feature (484)..(484): n comprises a, c, g, or t, or includes no nucleotide
  misc_feature (486)..(486): n comprises a, c, g, or t, or includes no nucleotide
gatcaggcagctagaggttgtcattgtattactaatgtgtcagaggtaatgtgtccgctgaggcctctgagtgtgaganccgcattctgtcgtctgactattcccaagtagcacaaaacttagcacaaacattacaaagagaaatcatgacttattgctgattttggcctaaatnctgactggagaaaatgggaccatctttaaaactctctctctctctctctctctctctctctctctctcacacacacacacacacacacacacacacacacacacanaacttctgggntttnagctaanttantnagaacctgttgtgtggcaatgcgcttgggcagtattcccccccctngggcatgtggcttttcttttnggcccactgntcatctatttngtgttatctgccatttctacggtaaacattttgaggtttttggatcctntangagtcgacctgcaggcatgtaagcttnntnccccnanagtgagtcg

SEQ ID NO: 12035 - DNA, 573 bp, Canis familiaris
gacctctcggtcatccctgtcatcaaccgggctcaggtcatccatgacaccttcgacctggccagtgcccaaatcgtccctgtcactctggcgctgaacagcaccctcttcctgaaccaagagacagagtacatgccctgggaggccgccctgagcagcctgagctacttcaagctcatgttcgaccgctctgaggtctacggccccatgaagaactacctgaggaagcaggtcacacctctctttaatcattttgaaaaaatcacccaaaactggaccgatcacccacagaccctcacagaacagtacaacgagattaatgccgtcagcaccgcctgcacttatggggttcctaagtgtaaggacctggtctcaactcttttcgcagagtggaggaagaacccccaaaataacccgatctaccccaacctgcggtctaccgtgtactgcaacgccattgcccagggtggcgaggaggagtggaactttgtgtgggagcagtttaggaacacttcgctggtaaacgaggctgacaaactccgctcagccctggcatgcagcacccaggtctgg
